United States Patent Application Publication US 2015/0141320 A1 - sequence listing, part 13

SEQ ID NO: 334811 - DNA, 15 bp, Homo sapiens
aactggtacccatat

SEQ ID NO: 334812 - DNA, 15 bp, Homo sapiens
caactggtacccata

SEQ ID NO: 334813 - DNA, 15 bp, Homo sapiens
gcaactggtacccat

SEQ ID NO: 334814 - DNA, 15 bp, Homo sapiens
agcaactggtaccca

SEQ ID NO: 334815 - DNA, 15 bp, Homo sapiens
cagcaactggtaccc

SEQ ID NO: 334816 - DNA, 15 bp, Homo sapiens
ccagcaactggtacc

SEQ ID NO: 334817 - DNA, 15 bp, Homo sapiens
tccagcaactggtac

SEQ ID NO: 334818 - DNA, 15 bp, Homo sapiens
ttccagcaactggta

SEQ ID NO: 334819 - DNA, 15 bp, Homo sapiens
tttccagcaactggt

SEQ ID NO: 334820 - DNA, 15 bp, Homo sapiens
ttttccagcaactgg

SEQ ID NO: 334821 - DNA, 15 bp, Homo sapiens
cttttccagcaactg

SEQ ID NO: 334822 - DNA, 15 bp, Homo sapiens
acttttccagcaact

SEQ ID NO: 334823 - DNA, 15 bp, Homo sapiens
tacttttccagcaac

SEQ ID NO: 334824 - DNA, 15 bp, Homo sapiens
ttacttttccagcaa

SEQ ID NO: 334825 - DNA, 15 bp, Homo sapiens
attacttttccagca

SEQ ID NO: 334826 - DNA, 15 bp, Homo sapiens
gattacttttccagc

SEQ ID NO: 334827 - DNA, 15 bp, Homo sapiens
agattacttttccag

SEQ ID NO: 334828 - DNA, 15 bp, Homo sapiens
tagattacttttcca

SEQ ID NO: 334829 - DNA, 15 bp, Homo sapiens
atagattacttttcc

SEQ ID NO: 334830 - DNA, 15 bp, Homo sapiens
gatagattacttttc

SEQ ID NO: 334831 - DNA, 15 bp, Homo sapiens
agatagattactttt

SEQ ID NO: 334832 - DNA, 15 bp, Homo sapiens
gagatagattacttt

SEQ ID NO: 334833 - DNA, 15 bp, Homo sapiens
ggagatagattactt

SEQ ID NO: 334834 - DNA, 15 bp, Homo sapiens
gggagatagattact

SEQ ID NO: 334835 - DNA, 15 bp, Homo sapiens
ggggagatagattac

SEQ ID NO: 334836 - DNA, 15 bp, Homo sapiens
aggggagatagatta

SEQ ID NO: 334837 - DNA, 15 bp, Homo sapiens
gaggggagatagatt

SEQ ID NO: 334838 - DNA, 15 bp, Homo sapiens
ggaggggagatagat

SEQ ID NO: 334839 - DNA, 15 bp, Homo sapiens
aggaggggagataga

SEQ ID NO: 334840 - DNA, 15 bp, Homo sapiens
aaggaggggagatag

SEQ ID NO: 334841 - DNA, 15 bp, Homo sapiens
caaggaggggagata

SEQ ID NO: 334842 - DNA, 15 bp, Homo sapiens
acaaggaggggagat

SEQ ID NO: 334843 - DNA, 15 bp, Homo sapiens
tacaaggaggggaga

SEQ ID NO: 334844 - DNA, 15 bp, Homo sapiens
gtacaaggaggggag

SEQ ID NO: 334845 - DNA, 15 bp, Homo sapiens
ggtacaaggagggga

SEQ ID NO: 334846 - DNA, 15 bp, Homo sapiens
aggtacaaggagggg

SEQ ID NO: 334847 - DNA, 15 bp, Homo sapiens
aaggtacaaggaggg

SEQ ID NO: 334848 - DNA, 15 bp, Homo sapiens
aaaggtacaaggagg

SEQ ID NO: 334849 - DNA, 15 bp, Homo sapiens
gaaaggtacaaggag

SEQ ID NO: 334850 - DNA, 15 bp, Homo sapiens
agaaaggtacaagga

SEQ ID NO: 334851 - DNA, 15 bp, Homo sapiens
tagaaaggtacaagg

SEQ ID NO: 334852 - DNA, 15 bp, Homo sapiens
ttagaaaggtacaag

SEQ ID NO: 334853 - DNA, 15 bp, Homo sapiens
gttagaaaggtacaa

SEQ ID NO: 334854 - DNA, 15 bp, Homo sapiens
tgttagaaaggtaca

SEQ ID NO: 334855 - DNA, 15 bp, Homo sapiens
ttgttagaaaggtac

SEQ ID NO: 334856 - DNA, 15 bp, Homo sapiens
cttgttagaaaggta

SEQ ID NO: 334857 - DNA, 15 bp, Homo sapiens
tcttgttagaaaggt

SEQ ID NO: 334858 - DNA, 15 bp, Homo sapiens
ctcttgttagaaagg

SEQ ID NO: 334859 - DNA, 15 bp, Homo sapiens
cctcttgttagaaag

SEQ ID NO: 334860 - DNA, 15 bp, Homo sapiens
tcctcttgttagaaa

SEQ ID NO: 334861 - DNA, 15 bp, Homo sapiens
gtcctcttgttagaa

SEQ ID NO: 334862 - DNA, 15 bp, Homo sapiens
tgtcctcttgttaga

SEQ ID NO: 334863 - DNA, 15 bp, Homo sapiens
atgtcctcttgttag

SEQ ID NO: 334864 - DNA, 15 bp, Homo sapiens
catgtcctcttgtta

SEQ ID NO: 334865 - DNA, 15 bp, Homo sapiens
ccatgtcctcttgtt

SEQ ID NO: 334866 - DNA, 15 bp, Homo sapiens
cccatgtcctcttgt

SEQ ID NO: 334867 - DNA, 15 bp, Homo sapiens
ccccatgtcctcttg

SEQ ID NO: 334868 - DNA, 15 bp, Homo sapiens
cccccatgtcctctt

SEQ ID NO: 334869 - DNA, 15 bp, Homo sapiens
gcccccatgtcctct

SEQ ID NO: 334870 - DNA, 15 bp, Homo sapiens
tgcccccatgtcctc

SEQ ID NO: 334871 - DNA, 15 bp, Homo sapiens
ctgcccccatgtcct

SEQ ID NO: 334872 - DNA, 15 bp, Homo sapiens
actgcccccatgtcc

SEQ ID NO: 334873 - DNA, 15 bp, Homo sapiens
aactgcccccatgtc

SEQ ID NO: 334874 - DNA, 15 bp, Homo sapiens
gaactgcccccatgt

SEQ ID NO: 334875 - DNA, 15 bp, Homo sapiens
tgaactgcccccatg

SEQ ID NO: 334876 - DNA, 15 bp, Homo sapiens
ctgaactgcccccat

SEQ ID NO: 334877 - DNA, 15 bp, Homo sapiens
tctgaactgccccca

SEQ ID NO: 334878 - DNA, 15 bp, Homo sapiens
ctctgaactgccccc

SEQ ID NO: 334879 - DNA, 15 bp, Homo sapiens
tctctgaactgcccc

SEQ ID NO: 334880 - DNA, 15 bp, Homo sapiens
atctctgaactgccc

SEQ ID NO: 334881 - DNA, 15 bp, Homo sapiens
tatctctgaactgcc

SEQ ID NO: 334882 - DNA, 15 bp, Homo sapiens
ctatctctgaactgc

SEQ ID NO: 334883 - DNA, 15 bp, Homo sapiens
tctatctctgaactg

SEQ ID NO: 334884 - DNA, 15 bp, Homo sapiens
atctatctctgaact

SEQ ID NO: 334885 - DNA, 15 bp, Homo sapiens
tatctatctctgaac

SEQ ID NO: 334886 - DNA, 15 bp, Homo sapiens
atatctatctctgaa

SEQ ID NO: 334887 - DNA, 15 bp, Homo sapiens
catatctatctctga

SEQ ID NO: 334888 - DNA, 15 bp, Homo sapiens
acatatctatctctg

SEQ ID NO: 334889 - DNA, 15 bp, Homo sapiens
cacatatctatctct

SEQ ID NO: 334890 - DNA, 15 bp, Homo sapiens
gcacatatctatctc

SEQ ID NO: 334891 - DNA, 15 bp, Homo sapiens
ggcacatatctatct

SEQ ID NO: 334892 - DNA, 15 bp, Homo sapiens
gggcacatatctatc

SEQ ID NO: 334893 - DNA, 15 bp, Homo sapiens
tgggcacatatctat

SEQ ID NO: 334894 - DNA, 15 bp, Homo sapiens
atgggcacatatcta

SEQ ID NO: 334895 - DNA, 15 bp, Homo sapiens
gatgggcacatatct

SEQ ID NO: 334896 - DNA, 15 bp, Homo sapiens
agatgggcacatatc

SEQ ID NO: 334897 - DNA, 15 bp, Homo sapiens
gagatgggcacatat

SEQ ID NO: 334898 - DNA, 15 bp, Homo sapiens
tgagatgggcacata

SEQ ID NO: 334899 - DNA, 15 bp, Homo sapiens
ctgagatgggcacat

SEQ ID NO: 334900 - DNA, 15 bp, Homo sapiens
actgagatgggcaca

SEQ ID NO: 334901 - DNA, 15 bp, Homo sapiens
cactgagatgggcac

SEQ ID NO: 334902 - DNA, 15 bp, Homo sapiens
ccactgagatgggca

SEQ ID NO: 334903 - DNA, 15 bp, Homo sapiens
cccactgagatgggc

SEQ ID NO: 334904 - DNA, 15 bp, Homo sapiens
tcccactgagatggg

SEQ ID NO: 334905 - DNA, 15 bp, Homo sapiens
ctcccactgagatgg

SEQ ID NO: 334906 - DNA, 15 bp, Homo sapiens
gctcccactgagatg

SEQ ID NO: 334907 - DNA, 15 bp, Homo sapiens
agctcccactgagat

SEQ ID NO: 334908 - DNA, 15 bp, Homo sapiens
aagctcccactgaga

SEQ ID NO: 334909 - DNA, 15 bp, Homo sapiens
taagctcccactgag

SEQ ID NO: 334910 - DNA, 15 bp, Homo sapiens
ataagctcccactga

SEQ ID NO: 334911 - DNA, 15 bp, Homo sapiens
tataagctcccactg

SEQ ID NO: 334912 - DNA, 15 bp, Homo sapiens
atataagctcccact

SEQ ID NO: 334913 - DNA, 15 bp, Homo sapiens
catataagctcccac

SEQ ID NO: 334914 - DNA, 15 bp, Homo sapiens
tcatataagctccca

SEQ ID NO: 334915 - DNA, 15 bp, Homo sapiens
gtcatataagctccc

SEQ ID NO: 334916 - DNA, 15 bp, Homo sapiens
ggtcatataagctcc

SEQ ID NO: 334917 - DNA, 15 bp, Homo sapiens
aggtcatataagctc

SEQ ID NO: 334918 - DNA, 15 bp, Homo sapiens
aaggtcatataagct

SEQ ID NO: 334919 - DNA, 15 bp, Homo sapiens
taaggtcatataagc

SEQ ID NO: 334920 - DNA, 15 bp, Homo sapiens
ctaaggtcatataag

SEQ ID NO: 334921 - DNA, 15 bp, Homo sapiens
gctaaggtcatataa

SEQ ID NO: 334922 - DNA, 15 bp, Homo sapiens
ggctaaggtcatata

SEQ ID NO: 334923 - DNA, 15 bp, Homo sapiens
tggctaaggtcatat

SEQ ID NO: 334924 - DNA, 15 bp, Homo sapiens
atggctaaggtcata

SEQ ID NO: 334925 - DNA, 15 bp, Homo sapiens
aatggctaaggtcat

SEQ ID NO: 334926 - DNA, 15 bp, Homo sapiens
caatggctaaggtca

SEQ ID NO: 334927 - DNA, 15 bp, Homo sapiens
tcaatggctaaggtc

SEQ ID NO: 334928 - DNA, 15 bp, Homo sapiens
gtcaatggctaaggt

SEQ ID NO: 334929 - DNA, 15 bp, Homo sapiens
agtcaatggctaagg

SEQ ID NO: 334930 - DNA, 15 bp, Homo sapiens
gagtcaatggctaag

SEQ ID NO: 334931 - DNA, 15 bp, Homo sapiens
ggagtcaatggctaa

SEQ ID NO: 334932 - DNA, 15 bp, Homo sapiens
tggagtcaatggcta

SEQ ID NO: 334933 - DNA, 15 bp, Homo sapiens
ttggagtcaatggct

SEQ ID NO: 334934 - DNA, 15 bp, Homo sapiens
tttggagtcaatggc

SEQ ID NO: 334935 - DNA, 15 bp, Homo sapiens
ctttggagtcaatgg

SEQ ID NO: 334936 - DNA, 15 bp, Homo sapiens
cctttggagtcaatg

SEQ ID NO: 334937 - DNA, 15 bp, Homo sapiens
gcctttggagtcaat

SEQ ID NO: 334938 - DNA, 15 bp, Homo sapiens
tgcctttggagtcaa

SEQ ID NO: 334939 - DNA, 15 bp, Homo sapiens
ttgcctttggagtca

SEQ ID NO: 334940 - DNA, 15 bp, Homo sapiens
tttgcctttggagtc

SEQ ID NO: 334941 - DNA, 15 bp, Homo sapiens
atttgcctttggagt

SEQ ID NO: 334942 - DNA, 15 bp, Homo sapiens
catttgcctttggag

SEQ ID NO: 334943 - DNA, 15 bp, Homo sapiens
acatttgcctttgga

SEQ ID NO: 334944 - DNA, 15 bp, Homo sapiens
gacatttgcctttgg

SEQ ID NO: 334945 - DNA, 15 bp, Homo sapiens
tgacatttgcctttg

SEQ ID NO: 334946 - DNA, 15 bp, Homo sapiens
ctgacatttgccttt

SEQ ID NO: 334947 - DNA, 15 bp, Homo sapiens
gctgacatttgcctt

SEQ ID NO: 334948 - DNA, 15 bp, Homo sapiens
agctgacatttgcct

SEQ ID NO: 334949 - DNA, 15 bp, Homo sapiens
tagctgacatttgcc

SEQ ID NO: 334950 - DNA, 15 bp, Homo sapiens
ctagctgacatttgc

SEQ ID NO: 334951 - DNA, 15 bp, Homo sapiens
actagctgacatttg

SEQ ID NO: 334952 - DNA, 15 bp, Homo sapiens
cactagctgacattt

SEQ ID NO: 334953 - DNA, 15 bp, Homo sapiens
acactagctgacatt

SEQ ID NO: 334954 - DNA, 15 bp, Homo sapiens
tacactagctgacat

SEQ ID NO: 334955 - DNA, 15 bp, Homo sapiens
atacactagctgaca

SEQ ID NO: 334956 - DNA, 15 bp, Homo sapiens
tatacactagctgac

SEQ ID NO: 334957 - DNA, 15 bp, Homo sapiens
ctatacactagctga

SEQ ID NO: 334958 - DNA, 15 bp, Homo sapiens
tctatacactagctg

SEQ ID NO: 334959 - DNA, 15 bp, Homo sapiens
ttctatacactagct

SEQ ID NO: 334960 - DNA, 15 bp, Homo sapiens
gttctatacactagc

SEQ ID NO: 334961 - DNA, 15 bp, Homo sapiens
tgttctatacactag

SEQ ID NO: 334962 - DNA, 15 bp, Homo sapiens
ctgttctatacacta

SEQ ID NO: 334963 - DNA, 15 bp, Homo sapiens
gctgttctatacact

SEQ ID NO: 334964 - DNA, 15 bp, Homo sapiens
ggctgttctatacac

SEQ ID NO: 334965 - DNA, 15 bp, Homo sapiens
aggctgttctataca

SEQ ID NO: 334966 - DNA, 15 bp, Homo sapiens
aaggctgttctatac

SEQ ID NO: 334967 - DNA, 15 bp, Homo sapiens
taaggctgttctata

SEQ ID NO: 334968 - DNA, 15 bp, Homo sapiens
ctaaggctgttctat

SEQ ID NO: 334969 - DNA, 15 bp, Homo sapiens
cctaaggctgttcta

SEQ ID NO: 334970 - DNA, 15 bp, Homo sapiens
tcctaaggctgttct

SEQ ID NO: 334971 - DNA, 15 bp, Homo sapiens
ttcctaaggctgttc

SEQ ID NO: 334972 - DNA, 15 bp, Homo sapiens
tttcctaaggctgtt

SEQ ID NO: 334973 - DNA, 15 bp, Homo sapiens
ttttcctaaggctgt

SEQ ID NO: 334974 - DNA, 15 bp, Homo sapiens
gttttcctaaggctg

SEQ ID NO: 334975 - DNA, 15 bp, Homo sapiens
agttttcctaaggct

SEQ ID NO: 334976 - DNA, 15 bp, Homo sapiens
gagttttcctaaggc

SEQ ID NO: 334977 - DNA, 15 bp, Homo sapiens
ggagttttcctaagg

SEQ ID NO: 334978 - DNA, 15 bp, Homo sapiens
gggagttttcctaag

SEQ ID NO: 334979 - DNA, 15 bp, Homo sapiens
tgggagttttcctaa

SEQ ID NO: 334980 - DNA, 15 bp, Homo sapiens
atgggagttttccta

SEQ ID NO: 334981 - DNA, 15 bp, Homo sapiens
aatgggagttttcct

SEQ ID NO: 334982 - DNA, 15 bp, Homo sapiens
gaatgggagttttcc

SEQ ID NO: 334983 - DNA, 15 bp, Homo sapiens
agaatgggagttttc

SEQ ID NO: 334984 - DNA, 15 bp, Homo sapiens
tagaatgggagtttt

SEQ ID NO: 334985 - DNA, 15 bp, Homo sapiens
ttagaatgggagttt

SEQ ID NO: 334986 - DNA, 15 bp, Homo sapiens
gttagaatgggagtt

SEQ ID NO: 334987 - DNA, 15 bp, Homo sapiens
tgttagaatgggagt

SEQ ID NO: 334988 - DNA, 15 bp, Homo sapiens
atgttagaatgggag

SEQ ID NO: 334989 - DNA, 15 bp, Homo sapiens
tatgttagaatggga

SEQ ID NO: 334990 - DNA, 15 bp, Homo sapiens
atatgttagaatggg

SEQ ID NO: 334991 - DNA, 15 bp, Homo sapiens
aatatgttagaatgg

SEQ ID NO: 334992 - DNA, 15 bp, Homo sapiens
caatatgttagaatg

SEQ ID NO: 334993 - DNA, 15 bp, Homo sapiens
ccaatatgttagaat

SEQ ID NO: 334994 - DNA, 15 bp, Homo sapiens
gccaatatgttagaa

SEQ ID NO: 334995 - DNA, 15 bp, Homo sapiens
agccaatatgttaga

SEQ ID NO: 334996 - DNA, 15 bp, Homo sapiens
gagccaatatgttag

SEQ ID NO: 334997 - DNA, 15 bp, Homo sapiens
tgagccaatatgtta

SEQ ID NO: 334998 - DNA, 15 bp, Homo sapiens
ttgagccaatatgtt

SEQ ID NO: 334999 - DNA, 15 bp, Homo sapiens
gttgagccaatatgt

SEQ ID NO: 335000 - DNA, 15 bp, Homo sapiens
tgttgagccaatatg

SEQ ID NO: 335001 - DNA, 15 bp, Homo sapiens
ttgttgagccaatat

SEQ ID NO: 335002 - DNA, 15 bp, Homo sapiens
tttgttgagccaata

SEQ ID NO: 335003 - DNA, 15 bp, Homo sapiens
gtttgttgagccaat

SEQ ID NO: 335004 - DNA, 15 bp, Homo sapiens
tgtttgttgagccaa

SEQ ID NO: 335005 - DNA, 15 bp, Homo sapiens
ttgtttgttgagcca

SEQ ID NO: 335006 - DNA, 15 bp, Homo sapiens
attgtttgttgagcc

SEQ ID NO: 335007 - DNA, 15 bp, Homo sapiens
tattgtttgttgagc

SEQ ID NO: 335008 - DNA, 15 bp, Homo sapiens
ttattgtttgttgag

SEQ ID NO: 335009 - DNA, 15 bp, Homo sapiens
attattgtttgttga

SEQ ID NO: 335010 - DNA, 15 bp, Homo sapiens
aattattgtttgttg

SEQ ID NO: 335011 - DNA, 15 bp, Homo sapiens
aaattattgtttgtt

SEQ ID NO: 335012 - DNA, 15 bp, Homo sapiens
caaattattgtttgt

SEQ ID NO: 335013 - DNA, 15 bp, Homo sapiens
tcaaattattgtttg

SEQ ID NO: 335014 - DNA, 15 bp, Homo sapiens
ttcaaattattgttt

SEQ ID NO: 335015 - DNA, 15 bp, Homo sapiens
attcaaattattgtt

SEQ ID NO: 335016 - DNA, 15 bp, Homo sapiens
gattcaaattattgt

SEQ ID NO: 335017 - DNA, 15 bp, Homo sapiens
ggattcaaattattg

SEQ ID NO: 335018 - DNA, 15 bp, Homo sapiens
gggattcaaattatt

SEQ ID NO: 335019 - DNA, 15 bp, Homo sapiens
ggggattcaaattat

SEQ ID NO: 335020 - DNA, 15 bp, Homo sapiens
tggggattcaaatta

SEQ ID NO: 335021 - DNA, 15 bp, Homo sapiens
gtggggattcaaatt

SEQ ID NO: 335022 - DNA, 15 bp, Homo sapiens
ggtggggattcaaat

SEQ ID NO: 335023 - DNA, 15 bp, Homo sapiens
tggtggggattcaaa

SEQ ID NO: 335024 - DNA, 15 bp, Homo sapiens
atggtggggattcaa

SEQ ID NO: 335025 - DNA, 15 bp, Homo sapiens
catggtggggattca

SEQ ID NO: 335026 - DNA, 15 bp, Homo sapiens
acatggtggggattc

SEQ ID NO: 335027 - DNA, 15 bp, Homo sapiens
cacatggtggggatt

SEQ ID NO: 335028 - DNA, 15 bp, Homo sapiens
gcacatggtggggat

SEQ ID NO: 335029 - DNA, 15 bp, Homo sapiens
agcacatggtgggga

SEQ ID NO: 335030 - DNA, 15 bp, Homo sapiens
cagcacatggtgggg

SEQ ID NO: 335031 - DNA, 15 bp, Homo sapiens
acagcacatggtggg

SEQ ID NO: 335032 - DNA, 15 bp, Homo sapiens
cacagcacatggtgg

SEQ ID NO: 335033 - DNA, 15 bp, Homo sapiens
ccacagcacatggtg

SEQ ID NO: 335034 - DNA, 15 bp, Homo sapiens
cccacagcacatggt

SEQ ID NO: 335035 - DNA, 15 bp, Homo sapiens
acccacagcacatgg

SEQ ID NO: 335036 - DNA, 15 bp, Homo sapiens
tacccacagcacatg

SEQ ID NO: 335037 - DNA, 15 bp, Homo sapiens
ttacccacagcacat

SEQ ID NO: 335038 - DNA, 15 bp, Homo sapiens
tttacccacagcaca

SEQ ID NO: 335039 - DNA, 15 bp, Homo sapiens
ttttacccacagcac

SEQ ID NO: 335040 - DNA, 15 bp, Homo sapiens
attttacccacagca

SEQ ID NO: 335041 - DNA, 15 bp, Homo sapiens
cattttacccacagc

SEQ ID NO: 335042 - DNA, 15 bp, Homo sapiens
acattttacccacag

SEQ ID NO: 335043 - DNA, 15 bp, Homo sapiens
cacattttacccaca

SEQ ID NO: 335044 - DNA, 15 bp, Homo sapiens
ccacattttacccac

SEQ ID NO: 335045 - DNA, 15 bp, Homo sapiens
accacattttaccca

SEQ ID NO: 335046 - DNA, 15 bp, Homo sapiens
aaccacattttaccc

SEQ ID NO: 335047 - DNA, 15 bp, Homo sapiens
gaaccacattttacc

SEQ ID NO: 335048 - DNA, 15 bp, Homo sapiens
agaaccacattttac

SEQ ID NO: 335049 - DNA, 15 bp, Homo sapiens
aagaaccacatttta

SEQ ID NO: 335050 - DNA, 15 bp, Homo sapiens
caagaaccacatttt

SEQ ID NO: 335051 - DNA, 15 bp, Homo sapiens
gcaagaaccacattt

SEQ ID NO: 335052 - DNA, 15 bp, Homo sapiens
agcaagaaccacatt

SEQ ID NO: 335053 - DNA, 15 bp, Homo sapiens
gagcaagaaccacat

SEQ ID NO: 335054 - DNA, 15 bp, Homo sapiens
agagcaagaaccaca

SEQ ID NO: 335055 - DNA, 15 bp, Homo sapiens
gagagcaagaaccac

SEQ ID NO: 335056 - DNA, 15 bp, Homo sapiens
ggagagcaagaacca

SEQ ID NO: 335057 - DNA, 15 bp, Homo sapiens
aggagagcaagaacc

SEQ ID NO: 335058 - DNA, 15 bp, Homo sapiens
caggagagcaagaac

SEQ ID NO: 335059 - DNA, 15 bp, Homo sapiens
ccaggagagcaagaa

SEQ ID NO: 335060 - DNA, 15 bp, Homo sapiens
tccaggagagcaaga

SEQ ID NO: 335061 - DNA, 15 bp, Homo sapiens
ctccaggagagcaag

SEQ ID NO: 335062 - DNA, 15 bp, Homo sapiens
gctccaggagagcaa

SEQ ID NO: 335063 - DNA, 15 bp, Homo sapiens
agctccaggagagca

SEQ ID NO: 335064 - DNA, 15 bp, Homo sapiens
aagctccaggagagc

SEQ ID NO: 335065 - DNA, 15 bp, Homo sapiens
taagctccaggagag

SEQ ID NO: 335066 - DNA, 15 bp, Homo sapiens
ataagctccaggaga

SEQ ID NO: 335067 - DNA, 15 bp, Homo sapiens
gataagctccaggag

SEQ ID NO: 335068 - DNA, 15 bp, Homo sapiens
agataagctccagga

SEQ ID NO: 335069 - DNA, 15 bp, Homo sapiens
cagataagctccagg

SEQ ID NO: 335070 - DNA, 15 bp, Homo sapiens
tcagataagctccag

SEQ ID NO: 335071 - DNA, 15 bp, Homo sapiens
ctcagataagctcca

SEQ ID NO: 335072 - DNA, 15 bp, Homo sapiens
tctcagataagctcc

SEQ ID NO: 335073 - DNA, 15 bp, Homo sapiens
atctcagataagctc

SEQ ID NO: 335074 - DNA, 15 bp, Homo sapiens
aatctcagataagct

SEQ ID NO: 335075 - DNA, 15 bp, Homo sapiens
gaatctcagataagc

SEQ ID NO: 335076 - DNA, 15 bp, Homo sapiens
agaatctcagataag

SEQ ID NO: 335077 - DNA, 15 bp, Homo sapiens
cagaatctcagataa

SEQ ID NO: 335078 - DNA, 15 bp, Homo sapiens
tcagaatctcagata

SEQ ID NO: 335079 - DNA, 15 bp, Homo sapiens
gtcagaatctcagat

SEQ ID NO: 335080 - DNA, 15 bp, Homo sapiens
ggtcagaatctcaga

SEQ ID NO: 335081 - DNA, 15 bp, Homo sapiens
tggtcagaatctcag

SEQ ID NO: 335082 - DNA, 15 bp, Homo sapiens
ttggtcagaatctca

SEQ ID NO: 335083 - DNA, 15 bp, Homo sapiens
attggtcagaatctc

SEQ ID NO: 335084 - DNA, 15 bp, Homo sapiens
gattggtcagaatct

SEQ ID NO: 335085 - DNA, 15 bp, Homo sapiens
tgattggtcagaatc

SEQ ID NO: 335086 - DNA, 15 bp, Homo sapiens
ctgattggtcagaat

SEQ ID NO: 335087 - DNA, 15 bp, Homo sapiens
actgattggtcagaa

SEQ ID NO: 335088 - DNA, 15 bp, Homo sapiens
tactgattggtcaga

SEQ ID NO: 335089 - DNA, 15 bp, Homo sapiens
gtactgattggtcag

SEQ ID NO: 335090 - DNA, 15 bp, Homo sapiens
ggtactgattggtca

SEQ ID NO: 335091 - DNA, 15 bp, Homo sapiens
tggtactgattggtc

SEQ ID NO: 335092 - DNA, 15 bp, Homo sapiens
gtggtactgattggt

SEQ ID NO: 335093 - DNA, 15 bp, Homo sapiens
ggtggtactgattgg

SEQ ID NO: 335094 - DNA, 15 bp, Homo sapiens
gggtggtactgattg

SEQ ID NO: 335095 - DNA, 15 bp, Homo sapiens
tgggtggtactgatt

SEQ ID NO: 335096 - DNA, 15 bp, Homo sapiens
ttgggtggtactgat

SEQ ID NO: 335097 - DNA, 15 bp, Homo sapiens
cttgggtggtactga

SEQ ID NO: 335098 - DNA, 15 bp, Homo sapiens
ccttgggtggtactg

SEQ ID NO: 335099 - DNA, 15 bp, Homo sapiens
tccttgggtggtact

SEQ ID NO: 335100 - DNA, 15 bp, Homo sapiens
ttccttgggtggtac

SEQ ID NO: 335101 - DNA, 15 bp, Homo sapiens
tttccttgggtggta

SEQ ID NO: 335102 - DNA, 15 bp, Homo sapiens
gtttccttgggtggt

SEQ ID NO: 335103 - DNA, 15 bp, Homo sapiens
tgtttccttgggtgg

SEQ ID NO: 335104 - DNA, 15 bp, Homo sapiens
ctgtttccttgggtg

SEQ ID NO: 335105 - DNA, 15 bp, Homo sapiens
actgtttccttgggt

SEQ ID NO: 335106 - DNA, 15 bp, Homo sapiens
cactgtttccttggg

SEQ ID NO: 335107 - DNA, 15 bp, Homo sapiens
ccactgtttccttgg

SEQ ID NO: 335108 - DNA, 15 bp, Homo sapiens
gccactgtttccttg

SEQ ID NO: 335109 - DNA, 15 bp, Homo sapiens
tgccactgtttcctt

SEQ ID NO: 335110 - DNA, 15 bp, Homo sapiens
ctgccactgtttcct

SEQ ID NO: 335111 - DNA, 15 bp, Homo sapiens
actgccactgtttcc

SEQ ID NO: 335112 - DNA, 15 bp, Homo sapiens
cactgccactgtttc

SEQ ID NO: 335113 - DNA, 15 bp, Homo sapiens
tcactgccactgttt

SEQ ID NO: 335114 - DNA, 15 bp, Homo sapiens
ttcactgccactgtt

SEQ ID NO: 335115 - DNA, 15 bp, Homo sapiens
tttcactgccactgt

SEQ ID NO: 335116 - DNA, 15 bp, Homo sapiens
gtttcactgccactg

SEQ ID NO: 335117 - DNA, 15 bp, Homo sapiens
tgtttcactgccact

SEQ ID NO: 335118 - DNA, 15 bp, Homo sapiens
ctgtttcactgccac

SEQ ID NO: 335119 - DNA, 15 bp, Homo sapiens
tctgtttcactgcca

SEQ ID NO: 335120 - DNA, 15 bp, Homo sapiens
ttctgtttcactgcc

SEQ ID NO: 335121 - DNA, 15 bp, Homo sapiens
cttctgtttcactgc

SEQ ID NO: 335122 - DNA, 15 bp, Homo sapiens
gcttctgtttcactg

SEQ ID NO: 335123 - DNA, 15 bp, Homo sapiens
agcttctgtttcact

SEQ ID NO: 335124 - DNA, 15 bp, Homo sapiens
aagcttctgtttcac

SEQ ID NO: 335125 - DNA, 15 bp, Homo sapiens
caagcttctgtttca

SEQ ID NO: 335126 - DNA, 15 bp, Homo sapiens
tcaagcttctgtttc

SEQ ID NO: 335127 - DNA, 15 bp, Homo sapiens
ctcaagcttctgttt

SEQ ID NO: 335128 - DNA, 15 bp, Homo sapiens
actcaagcttctgtt

SEQ ID NO: 335129 - DNA, 15 bp, Homo sapiens
tactcaagcttctgt

SEQ ID NO: 335130 - DNA, 15 bp, Homo sapiens
atactcaagcttctg

SEQ ID NO: 335131 - DNA, 15 bp, Homo sapiens
catactcaagcttct

SEQ ID NO: 335132 - DNA, 15 bp, Homo sapiens
gcatactcaagcttc

SEQ ID NO: 335133 - DNA, 15 bp, Homo sapiens
tgcatactcaagctt

SEQ ID NO: 335134 - DNA, 15 bp, Homo sapiens
ctgcatactcaagct

SEQ ID NO: 335135 - DNA, 15 bp, Homo sapiens
cctgcatactcaagc

SEQ ID NO: 335136 - DNA, 15 bp, Homo sapiens
tcctgcatactcaag

SEQ ID NO: 335137 - DNA, 15 bp, Homo sapiens
ctcctgcatactcaa

SEQ ID NO: 335138 - DNA, 15 bp, Homo sapiens
gctcctgcatactca

SEQ ID NO: 335139 - DNA, 15 bp, Homo sapiens
cgctcctgcatactc

SEQ ID NO: 335140 - DNA, 15 bp, Homo sapiens
acgctcctgcatact

SEQ ID NO: 335141 - DNA, 15 bp, Homo sapiens
gacgctcctgcatac

SEQ ID NO: 335142 - DNA, 15 bp, Homo sapiens
agacgctcctgcata

SEQ ID NO: 335143 - DNA, 15 bp, Homo sapiens
aagacgctcctgcat

SEQ ID NO: 335144 - DNA, 15 bp, Homo sapiens
gaagacgctcctgca

SEQ ID NO: 335145 - DNA, 15 bp, Homo sapiens
ggaagacgctcctgc

SEQ ID NO: 335146 - DNA, 15 bp, Homo sapiens
gggaagacgctcctg

SEQ ID NO: 335147 - DNA, 15 bp, Homo sapiens
tgggaagacgctcct

SEQ ID NO: 335148 - DNA, 15 bp, Homo sapiens
ctgggaagacgctcc

SEQ ID NO: 335149 - DNA, 15 bp, Homo sapiens
actgggaagacgctc

SEQ ID NO: 335150 - DNA, 15 bp, Homo sapiens
cactgggaagacgct

SEQ ID NO: 335151 - DNA, 15 bp, Homo sapiens
tcactgggaagacgc

SEQ ID NO: 335152 - DNA, 15 bp, Homo sapiens
ttcactgggaagacg

SEQ ID NO: 335153 - DNA, 15 bp, Homo sapiens
tttcactgggaagac

SEQ ID NO: 335154 - DNA, 15 bp, Homo sapiens
atttcactgggaaga

SEQ ID NO: 335155 - DNA, 15 bp, Homo sapiens
catttcactgggaag

SEQ ID NO: 335156 - DNA, 15 bp, Homo sapiens
gcatttcactgggaa

SEQ ID NO: 335157 - DNA, 15 bp, Homo sapiens
agcatttcactggga

SEQ ID NO: 335158 - DNA, 15 bp, Homo sapiens
gagcatttcactggg

SEQ ID NO: 335159 - DNA, 15 bp, Homo sapiens
agagcatttcactgg

SEQ ID NO: 335160 - DNA, 15 bp, Homo sapiens
aagagcatttcactg

SEQ ID NO: 335161 - DNA, 15 bp, Homo sapiens
aaagagcatttcact

SEQ ID NO: 335162 - DNA, 15 bp, Homo sapiens
aaaagagcatttcac

SEQ ID NO: 335163 - DNA, 15 bp, Homo sapiens
aaaaagagcatttca

SEQ ID NO: 335164 - DNA, 15 bp, Homo sapiens
aaaaaagagcatttc

SEQ ID NO: 335165 - DNA, 15 bp, Homo sapiens
gaaaaaagagcattt

SEQ ID NO: 335166 - DNA, 15 bp, Homo sapiens
tgaaaaaagagcatt

SEQ ID NO: 335167 - DNA, 15 bp, Homo sapiens
ctgaaaaaagagcat

SEQ ID NO: 335168 - DNA, 15 bp, Homo sapiens
cctgaaaaaagagca

SEQ ID NO: 335169 - DNA, 15 bp, Homo sapiens
tcctgaaaaaagagc

SEQ ID NO: 335170 - DNA, 15 bp, Homo sapiens
ttcctgaaaaaagag

SEQ ID NO: 335171 - DNA, 15 bp, Homo sapiens
attcctgaaaaaaga

SEQ ID NO: 335172 - DNA, 15 bp, Homo sapiens
aattcctgaaaaaag

SEQ ID NO: 335173 - DNA, 15 bp, Homo sapiens
aaattcctgaaaaaa

SEQ ID NO: 335174 - DNA, 15 bp, Homo sapiens
aaaattcctgaaaaa

SEQ ID NO: 335175 - DNA, 15 bp, Homo sapiens
taaaattcctgaaaa

SEQ ID NO: 335176 - DNA, 15 bp, Homo sapiens
ataaaattcctgaaa

SEQ ID NO: 335177 - DNA, 15 bp, Homo sapiens
aataaaattcctgaa

SEQ ID NO: 335178 - DNA, 15 bp, Homo sapiens
gaataaaattcctga

SEQ ID NO: 335179 - DNA, 15 bp, Homo sapiens
tgaataaaattcctg

SEQ ID NO: 335180 - DNA, 15 bp, Homo sapiens
atgaataaaattcct

SEQ ID NO: 335181 - DNA, 15 bp, Homo sapiens
aatgaataaaattcc

SEQ ID NO: 335182 - DNA, 15 bp, Homo sapiens
caatgaataaaattc

SEQ ID NO: 335183 - DNA, 15 bp, Homo sapiens
tcaatgaataaaatt

SEQ ID NO: 335184 - DNA, 15 bp, Homo sapiens
ttcaatgaataaaat

SEQ ID NO: 335185 - DNA, 15 bp, Homo sapiens
tttcaatgaataaaa

SEQ ID NO: 335186 - DNA, 15 bp, Homo sapiens
atttcaatgaataaa

SEQ ID NO: 335187 - DNA, 15 bp, Homo sapiens
gatttcaatgaataa

SEQ ID NO: 335188 - DNA, 15 bp, Homo sapiens
tgatttcaatgaata

SEQ ID NO: 335189 - DNA, 15 bp, Homo sapiens
atgatttcaatgaat

SEQ ID NO: 335190 - DNA, 15 bp, Homo sapiens
catgatttcaatgaa

SEQ ID NO: 335191 - DNA, 15 bp, Homo sapiens
ccatgatttcaatga

SEQ ID NO: 335192 - DNA, 15 bp, Homo sapiens
tccatgatttcaatg

SEQ ID NO: 335193 - DNA, 15 bp, Homo sapiens
ttccatgatttcaat

SEQ ID NO: 335194 - DNA, 15 bp, Homo sapiens
cttccatgatttcaa

SEQ ID NO: 335195 - DNA, 15 bp, Homo sapiens
acttccatgatttca

SEQ ID NO: 335196 - DNA, 15 bp, Homo sapiens
cacttccatgatttc

SEQ ID NO: 335197 - DNA, 15 bp, Homo sapiens
acacttccatgattt

SEQ ID NO: 335198 - DNA, 15 bp, Homo sapiens
tacacttccatgatt

SEQ ID NO: 335199 - DNA, 15 bp, Homo sapiens
gtacacttccatgat

SEQ ID NO: 335200 - DNA, 15 bp, Homo sapiens
tgtacacttccatga

SEQ ID NO: 335201 - DNA, 15 bp, Homo sapiens
ttgtacacttccatg

SEQ ID NO: 335202 - DNA, 15 bp, Homo sapiens
attgtacacttccat

SEQ ID NO: 335203 - DNA, 15 bp, Homo sapiens
tattgtacacttcca

SEQ ID NO: 335204 - DNA, 15 bp, Homo sapiens
ttattgtacacttcc

SEQ ID NO: 335205 - DNA, 15 bp, Homo sapiens
attattgtacacttc

SEQ ID NO: 335206 - DNA, 15 bp, Homo sapiens
gattattgtacactt

SEQ ID NO: 335207 - DNA, 15 bp, Homo sapiens
tgattattgtacact

SEQ ID NO: 335208 - DNA, 15 bp, Homo sapiens
atgattattgtacac

SEQ ID NO: 335209 - DNA, 15 bp, Homo sapiens
catgattattgtaca

SEQ ID NO: 335210 - DNA, 15 bp, Homo sapiens
tcatgattattgtac

SEQ ID NO: 335211 - DNA, 15 bp, Homo sapiens
ttcatgattattgta

SEQ ID NO: 335212 - DNA, 15 bp, Homo sapiens
tttcatgattattgt

SEQ ID NO: 335213 - DNA, 15 bp, Homo sapiens
ctttcatgattattg

SEQ ID NO: 335214 - DNA, 15 bp, Homo sapiens
gctttcatgattatt

SEQ ID NO: 335215 - DNA, 15 bp, Homo sapiens
tgctttcatgattat

SEQ ID NO: 335216 - DNA, 15 bp, Homo sapiens
ttgctttcatgatta

SEQ ID NO: 335217 - DNA, 15 bp, Homo sapiens
cttgctttcatgatt

SEQ ID NO: 335218 - DNA, 15 bp, Homo sapiens
tcttgctttcatgat

SEQ ID NO: 335219 - DNA, 15 bp, Homo sapiens
ctcttgctttcatga

SEQ ID NO: 335220 - DNA, 15 bp, Homo sapiens
tctcttgctttcatg

SEQ ID NO: 335221 - DNA, 15 bp, Homo sapiens
gtctcttgctttcat

SEQ ID NO: 335222 - DNA, 15 bp, Homo sapiens
tgtctcttgctttca

SEQ ID NO: 335223 - DNA, 15 bp, Homo sapiens
atgtctcttgctttc

SEQ ID NO: 335224 - DNA, 15 bp, Homo sapiens
aatgtctcttgcttt

SEQ ID NO: 335225 - DNA, 15 bp, Homo sapiens
taatgtctcttgctt

SEQ ID NO: 335226 - DNA, 15 bp, Homo sapiens
ctaatgtctcttgct

SEQ ID NO: 335227 - DNA, 15 bp, Homo sapiens
tctaatgtctcttgc

SEQ ID NO: 335228 - DNA, 15 bp, Homo sapiens
ctctaatgtctcttg

SEQ ID NO: 335229 - DNA, 15 bp, Homo sapiens
cctctaatgtctctt

SEQ ID NO: 335230 - DNA, 15 bp, Homo sapiens
ccctctaatgtctct

SEQ ID NO: 335231 - DNA, 15 bp, Homo sapiens
tccctctaatgtctc

SEQ ID NO: 335232 - DNA, 15 bp, Homo sapiens
ttccctctaatgtct

SEQ ID NO: 335233 - DNA, 15 bp, Homo sapiens
cttccctctaatgtc

SEQ ID NO: 335234 - DNA, 15 bp, Homo sapiens
gcttccctctaatgt

SEQ ID NO: 335235 - DNA, 15 bp, Homo sapiens
ggcttccctctaatg

SEQ ID NO: 335236 - DNA, 15 bp, Homo sapiens
aggcttccctctaat

SEQ ID NO: 335237 - DNA, 15 bp, Homo sapiens
gaggcttccctctaa

SEQ ID NO: 335238 - DNA, 15 bp, Homo sapiens
ggaggcttccctcta

SEQ ID NO: 335239 - DNA, 15 bp, Homo sapiens
gggaggcttccctct

SEQ ID NO: 335240 - DNA, 15 bp, Homo sapiens
tgggaggcttccctc

SEQ ID NO: 335241 - DNA, 15 bp, Homo sapiens
ttgggaggcttccct

SEQ ID NO: 335242 - DNA, 15 bp, Homo sapiens
tttgggaggcttccc

SEQ ID NO: 335243 - DNA, 15 bp, Homo sapiens
ttttgggaggcttcc

SEQ ID NO: 335244 - DNA, 15 bp, Homo sapiens
cttttgggaggcttc

SEQ ID NO: 335245 - DNA, 15 bp, Homo sapiens
gcttttgggaggctt

SEQ ID NO: 335246 - DNA, 15 bp, Homo sapiens
tgcttttgggaggct

SEQ ID NO: 335247 - DNA, 15 bp, Homo sapiens
atgcttttgggaggc

SEQ ID NO: 335248 - DNA, 15 bp, Homo sapiens
aatgcttttgggagg

SEQ ID NO: 335249 - DNA, 15 bp, Homo sapiens
aaatgcttttgggag

SEQ ID NO: 335250 - DNA, 15 bp, Homo sapiens
caaatgcttttggga

SEQ ID NO: 335251 - DNA, 15 bp, Homo sapiens
tcaaatgcttttggg

SEQ ID NO: 335252 - DNA, 15 bp, Homo sapiens
atcaaatgcttttgg

SEQ ID NO: 335253 - DNA, 15 bp, Homo sapiens
tatcaaatgcttttg

SEQ ID NO: 335254 - DNA, 15 bp, Homo sapiens
ttatcaaatgctttt

SEQ ID NO: 335255 - DNA, 15 bp, Homo sapiens
attatcaaatgcttt

SEQ ID NO: 335256 - DNA, 15 bp, Homo sapiens
aattatcaaatgctt

SEQ ID NO: 335257 - DNA, 15 bp, Homo sapiens
gaattatcaaatgct

SEQ ID NO: 335258 - DNA, 15 bp, Homo sapiens
tgaattatcaaatgc

SEQ ID NO: 335259 - DNA, 15 bp, Homo sapiens
gtgaattatcaaatg

SEQ ID NO: 335260 - DNA, 15 bp, Homo sapiens
cgtgaattatcaaat

SEQ ID NO: 335261 - DNA, 15 bp, Homo sapiens
acgtgaattatcaaa

SEQ ID NO: 335262 - DNA, 15 bp, Homo sapiens
aacgtgaattatcaa

SEQ ID NO: 335263 - DNA, 15 bp, Homo sapiens
caacgtgaattatca

SEQ ID NO: 335264 - DNA, 15 bp, Homo sapiens
acaacgtgaattatc

SEQ ID NO: 335265 - DNA, 15 bp, Homo sapiens
aacaacgtgaattat

SEQ ID NO: 335266 - DNA, 15 bp, Homo sapiens
caacaacgtgaatta

SEQ ID NO: 335267 - DNA, 15 bp, Homo sapiens
tcaacaacgtgaatt

SEQ ID NO: 335268 - DNA, 15 bp, Homo sapiens
ttcaacaacgtgaat

SEQ ID NO: 335269 - DNA, 15 bp, Homo sapiens
gttcaacaacgtgaa

SEQ ID NO: 335270 - DNA, 15 bp, Homo sapiens
tgttcaacaacgtga

SEQ ID NO: 335271 - DNA, 15 bp, Homo sapiens
atgttcaacaacgtg

SEQ ID NO: 335272 - DNA, 15 bp, Homo sapiens
tatgttcaacaacgt

SEQ ID NO: 335273 - DNA, 15 bp, Homo sapiens
gtatgttcaacaacg

SEQ ID NO: 335274 - DNA, 15 bp, Homo sapiens
ggtatgttcaacaac

SEQ ID NO: 335275 - DNA, 15 bp, Homo sapiens
gggtatgttcaacaa

SEQ ID NO: 335276 - DNA, 15 bp, Homo sapiens
tgggtatgttcaaca

SEQ ID NO: 335277 - DNA, 15 bp, Homo sapiens
atgggtatgttcaac

SEQ ID NO: 335278 - DNA, 15 bp, Homo sapiens
aatgggtatgttcaa

SEQ ID NO: 335279 - DNA, 15 bp, Homo sapiens
caatgggtatgttca

SEQ ID NO: 335280 - DNA, 15 bp, Homo sapiens
tcaatgggtatgttc

SEQ ID NO: 335281 - DNA, 15 bp, Homo sapiens
ttcaatgggtatgtt

SEQ ID NO: 335282 - DNA, 15 bp, Homo sapiens
gttcaatgggtatgt

SEQ ID NO: 335283 - DNA, 15 bp, Homo sapiens
tgttcaatgggtatg

SEQ ID NO: 335284 - DNA, 15 bp, Homo sapiens
ctgttcaatgggtat

SEQ ID NO: 335285 - DNA, 15 bp, Homo sapiens
actgttcaatgggta

SEQ ID NO: 335286 - DNA, 15 bp, Homo sapiens
cactgttcaatgggt

SEQ ID NO: 335287 - DNA, 15 bp, Homo sapiens
ccactgttcaatggg

SEQ ID NO: 335288 - DNA, 15 bp, Homo sapiens
tccactgttcaatgg

SEQ ID NO: 335289 - DNA, 15 bp, Homo sapiens
ctccactgttcaatg

SEQ ID NO: 335290 - DNA, 15 bp, Homo sapiens
tctccactgttcaat

SEQ ID NO: 335291 - DNA, 15 bp, Homo sapiens
ctctccactgttcaa

SEQ ID NO: 335292 - DNA, 15 bp, Homo sapiens
gctctccactgttca

SEQ ID NO: 335293 - DNA, 15 bp, Homo sapiens
tgctctccactgttc

SEQ ID NO: 335294 - DNA, 15 bp, Homo sapiens
atgctctccactgtt

SEQ ID NO: 335295 - DNA, 15 bp, Homo sapiens
tatgctctccactgt

SEQ ID NO: 335296 - DNA, 15 bp, Homo sapiens
ctatgctctccactg

SEQ ID NO: 335297 - DNA, 15 bp, Homo sapiens
cctatgctctccact

SEQ ID NO: 335298 - DNA, 15 bp, Homo sapiens
acctatgctctccac

SEQ ID NO: 335299 - DNA, 15 bp, Homo sapiens
tacctatgctctcca

SEQ ID NO: 335300 - DNA, 15 bp, Homo sapiens
ttacctatgctctcc

SEQ ID NO: 335301 - DNA, 15 bp, Homo sapiens
attacctatgctctc

SEQ ID NO: 335302 - DNA, 15 bp, Homo sapiens
tattacctatgctct

SEQ ID NO: 335303 - DNA, 15 bp, Homo sapiens
ctattacctatgctc

SEQ ID NO: 335304 - DNA, 15 bp, Homo sapiens
gctattacctatgct

SEQ ID NO: 335305 - DNA, 15 bp, Homo sapiens
tgctattacctatgc

SEQ ID NO: 335306 - DNA, 15 bp, Homo sapiens
ctgctattacctatg

SEQ ID NO: 335307 - DNA, 15 bp, Homo sapiens
tctgctattacctat

SEQ ID NO: 335308 - DNA, 15 bp, Homo sapiens
atctgctattaccta

SEQ ID NO: 335309 - DNA, 15 bp, Homo sapiens
aatctgctattacct

SEQ ID NO: 335310 - DNA, 15 bp, Homo sapiens
caatctgctattacc

SEQ ID NO: 335311 - DNA, 15 bp, Homo sapiens
gcaatctgctattac

SEQ ID NO: 335312 - DNA, 15 bp, Homo sapiens
ggcaatctgctatta

SEQ ID NO: 335313 - DNA, 15 bp, Homo sapiens
aggcaatctgctatt

SEQ ID NO: 335314 - DNA, 15 bp, Homo sapiens
aaggcaatctgctat

SEQ ID NO: 335315 - DNA, 15 bp, Homo sapiens
caaggcaatctgcta

SEQ ID NO: 335316 - DNA, 15 bp, Homo sapiens
acaaggcaatctgct

SEQ ID NO: 335317 - DNA, 15 bp, Homo sapiens
aacaaggcaatctgc

SEQ ID NO: 335318 - DNA, 15 bp, Homo sapiens
gaacaaggcaatctg

SEQ ID NO: 335319 - DNA, 15 bp, Homo sapiens
tgaacaaggcaatct

SEQ ID NO: 335320 - DNA, 15 bp, Homo sapiens
gtgaacaaggcaatc

SEQ ID NO: 335321 - DNA, 15 bp, Homo sapiens
ggtgaacaaggcaat

SEQ ID NO: 335322 - DNA, 15 bp, Homo sapiens
aggtgaacaaggcaa

SEQ ID NO: 335323 - DNA, 15 bp, Homo sapiens
taggtgaacaaggca

SEQ ID NO: 335324 - DNA, 15 bp, Homo sapiens
ttaggtgaacaaggc

SEQ ID NO: 335325 - DNA, 15 bp, Homo sapiens
tttaggtgaacaagg

SEQ ID NO: 335326 - DNA, 15 bp, Homo sapiens
ttttaggtgaacaag

SEQ ID NO: 335327 - DNA, 15 bp, Homo sapiens
cttttaggtgaacaa

SEQ ID NO: 335328 - DNA, 15 bp, Homo sapiens
gcttttaggtgaaca

SEQ ID NO: 335329 - DNA, 15 bp, Homo sapiens
agcttttaggtgaac

SEQ ID NO: 335330 - DNA, 15 bp, Homo sapiens
aagcttttaggtgaa

SEQ ID NO: 335331 - DNA, 15 bp, Homo sapiens
taagcttttaggtga

SEQ ID NO: 335332 - DNA, 15 bp, Homo sapiens
gtaagcttttaggtg

SEQ ID NO: 335333 - DNA, 15 bp, Homo sapiens
tgtaagcttttaggt

SEQ ID NO: 335334 - DNA, 15 bp, Homo sapiens
ctgtaagcttttagg

SEQ ID NO: 335335 - DNA, 15 bp, Homo sapiens
tctgtaagcttttag

SEQ ID NO: 335336 - DNA, 15 bp, Homo sapiens
gtctgtaagctttta

SEQ ID NO: 335337 - DNA, 15 bp, Homo sapiens
ggtctgtaagctttt

SEQ ID NO: 335338 - DNA, 15 bp, Homo sapiens
gggtctgtaagcttt

SEQ ID NO: 335339 - DNA, 15 bp, Homo sapiens
tgggtctgtaagctt

SEQ ID NO: 335340 - DNA, 15 bp, Homo sapiens
ctgggtctgtaagct

SEQ ID NO: 335341 - DNA, 15 bp, Homo sapiens
actgggtctgtaagc

SEQ ID NO: 335342 - DNA, 15 bp, Homo sapiens
tactgggtctgtaag

SEQ ID NO: 335343 - DNA, 15 bp, Homo sapiens
ttactgggtctgtaa

SEQ ID NO: 335344 - DNA, 15 bp, Homo sapiens
tttactgggtctgta

SEQ ID NO: 335345 - DNA, 15 bp, Homo sapiens
ttttactgggtctgt

SEQ ID NO: 335346 - DNA, 15 bp, Homo sapiens
cttttactgggtctg

SEQ ID NO: 335347 - DNA, 15 bp, Homo sapiens
tcttttactgggtct

SEQ ID NO: 335348 - DNA, 15 bp, Homo sapiens
ctcttttactgggtc

SEQ ID NO: 335349 - DNA, 15 bp, Homo sapiens
cctcttttactgggt

SEQ ID NO: 335350 - DNA, 15 bp, Homo sapiens
ccctcttttactggg

SEQ ID NO: 335351 - DNA, 15 bp, Homo sapiens
cccctcttttactgg

SEQ ID NO: 335352 - DNA, 15 bp, Homo sapiens
acccctcttttactg

SEQ ID NO: 335353 - DNA, 15 bp, Homo sapiens
cacccctcttttact

SEQ ID NO: 335354 - DNA, 15 bp, Homo sapiens
gcacccctcttttac

SEQ ID NO: 335355 - DNA, 15 bp, Homo sapiens
tgcacccctctttta

SEQ ID NO: 335356 - DNA, 15 bp, Homo sapiens
ctgcacccctctttt

SEQ ID NO: 335357 - DNA, 15 bp, Homo sapiens
tctgcacccctcttt

SEQ ID NO: 335358 - DNA, 15 bp, Homo sapiens
ttctgcacccctctt

SEQ ID NO: 335359 - DNA, 15 bp, Homo sapiens
tttctgcacccctct

SEQ ID NO: 335360 - DNA, 15 bp, Homo sapiens
ctttctgcacccctc

SEQ ID NO: 335361 - DNA, 15 bp, Homo sapiens
tctttctgcacccct

SEQ ID NO: 335362 - DNA, 15 bp, Homo sapiens
atctttctgcacccc

SEQ ID NO: 335363 - DNA, 15 bp, Homo sapiens
aatctttctgcaccc

SEQ ID NO: 335364 - DNA, 15 bp, Homo sapiens
aaatctttctgcacc

SEQ ID NO: 335365 - DNA, 15 bp, Homo sapiens
caaatctttctgcac

SEQ ID NO: 335366 - DNA, 15 bp, Homo sapiens
ccaaatctttctgca

SEQ ID NO: 335367 - DNA, 15 bp, Homo sapiens
cccaaatctttctgc

SEQ ID NO: 335368 - DNA, 15 bp, Homo sapiens
tcccaaatctttctg

SEQ ID NO: 335369 - DNA, 15 bp, Homo sapiens
ctcccaaatctttct

SEQ ID NO: 335370 - DNA, 15 bp, Homo sapiens
cctcccaaatctttc

SEQ ID NO: 335371 - DNA, 15 bp, Homo sapiens
ccctcccaaatcttt

SEQ ID NO: 335372 - DNA, 15 bp, Homo sapiens
accctcccaaatctt

SEQ ID NO: 335373 - DNA, 15 bp, Homo sapiens
aaccctcccaaatct

SEQ ID NO: 335374 - DNA, 15 bp, Homo sapiens
caaccctcccaaatc

SEQ ID NO: 335375 - DNA, 15 bp, Homo sapiens
ccaaccctcccaaat

SEQ ID NO: 335376 - DNA, 15 bp, Homo sapiens
cccaaccctcccaaa

SEQ ID NO: 335377 - DNA, 15 bp, Homo sapiens
tcccaaccctcccaa

SEQ ID NO: 335378 - DNA, 15 bp, Homo sapiens
ttcccaaccctccca

SEQ ID NO: 335379 - DNA, 15 bp, Homo sapiens
attcccaaccctccc

SEQ ID NO: 335380 - DNA, 15 bp, Homo sapiens
gattcccaaccctcc

SEQ ID NO: 335381 - DNA, 15 bp, Homo sapiens
ggattcccaaccctc

SEQ ID NO: 335382 - DNA, 15 bp, Homo sapiens
cggattcccaaccct

SEQ ID NO: 335383 - DNA, 15 bp, Homo sapiens
gcggattcccaaccc

SEQ ID NO: 335384 - DNA, 15 bp, Homo sapiens
agcggattcccaacc

SEQ ID NO: 335385 - DNA, 15 bp, Homo sapiens
cagcggattcccaac

SEQ ID NO: 335386 - DNA, 15 bp, Homo sapiens
tcagcggattcccaa

SEQ ID NO: 335387 - DNA, 15 bp, Homo sapiens
atcagcggattccca

SEQ ID NO: 335388 - DNA, 15 bp, Homo sapiens
catcagcggattccc

SEQ ID NO: 335389 - DNA, 15 bp, Homo sapiens
acatcagcggattcc

SEQ ID NO: 335390 - DNA, 15 bp, Homo sapiens
cacatcagcggattc

SEQ ID NO: 335391 - DNA, 15 bp, Homo sapiens
tcacatcagcggatt

SEQ ID NO: 335392 - DNA, 15 bp, Homo sapiens
atcacatcagcggat

SEQ ID NO: 335393 - DNA, 15 bp, Homo sapiens
gatcacatcagcgga

SEQ ID NO: 335394 - DNA, 15 bp, Homo sapiens
ggatcacatcagcgg

SEQ ID NO: 335395 - DNA, 15 bp, Homo sapiens
aggatcacatcagcg

SEQ ID NO: 335396 - DNA, 15 bp, Homo sapiens
caggatcacatcagc

SEQ ID NO: 335397 - DNA, 15 bp, Homo sapiens
tcaggatcacatcag

SEQ ID NO: 335398 - DNA, 15 bp, Homo sapiens
ctcaggatcacatca

SEQ ID NO: 335399 - DNA, 15 bp, Homo sapiens
cctcaggatcacatc

SEQ ID NO: 335400 - DNA, 15 bp, Homo sapiens
acctcaggatcacat

SEQ ID NO: 335401 - DNA, 15 bp, Homo sapiens
gacctcaggatcaca

SEQ ID NO: 335402 - DNA, 15 bp, Homo sapiens
ggacctcaggatcac

SEQ ID NO: 335403 - DNA, 15 bp, Homo sapiens
tggacctcaggatca

SEQ ID NO: 335404 - DNA, 15 bp, Homo sapiens
gtggacctcaggatc

SEQ ID NO: 335405 - DNA, 15 bp, Homo sapiens
agtggacctcaggat

SEQ ID NO: 335406 - DNA, 15 bp, Homo sapiens
gagtggacctcagga

SEQ ID NO: 335407 - DNA, 15 bp, Homo sapiens
ggagtggacctcagg

SEQ ID NO: 335408 - DNA, 15 bp, Homo sapiens
aggagtggacctcag

SEQ ID NO: 335409 - DNA, 15 bp, Homo sapiens
aaggagtggacctca

SEQ ID NO: 335410 - DNA, 15 bp, Homo sapiens
aaaggagtggacctc

SEQ ID NO: 335411 - DNA, 15 bp, Homo sapiens
gaaaggagtggacct

SEQ ID NO: 335412 - DNA, 15 bp, Homo sapiens
ggaaaggagtggacc

SEQ ID NO: 335413 - DNA, 15 bp, Homo sapiens
tggaaaggagtggac

SEQ ID NO: 335414 - DNA, 15 bp, Homo sapiens
ctggaaaggagtgga

SEQ ID NO: 335415 - DNA, 15 bp, Homo sapiens
tctggaaaggagtgg

SEQ ID NO: 335416 - DNA, 15 bp, Homo sapiens
gtctggaaaggagtg

SEQ ID NO: 335417 - DNA, 15 bp, Homo sapiens
ggtctggaaaggagt

SEQ ID NO: 335418 - DNA, 15 bp, Homo sapiens
gggtctggaaaggag

SEQ ID NO: 335419 - DNA, 15 bp, Homo sapiens
ggggtctggaaagga

SEQ ID NO: 335420 - DNA, 15 bp, Homo sapiens
tggggtctggaaagg

SEQ ID NO: 335421 - DNA, 15 bp, Homo sapiens
gtggggtctggaaag

SEQ ID NO: 335422 - DNA, 15 bp, Homo sapiens
tgtggggtctggaaa

SEQ ID NO: 335423 - DNA, 15 bp, Homo sapiens
ttgtggggtctggaa

SEQ ID NO: 335424 - DNA, 15 bp, Homo sapiens
tttgtggggtctgga

SEQ ID NO: 335425 - DNA, 15 bp, Homo sapiens
ctttgtggggtctgg

SEQ ID NO: 335426 - DNA, 15 bp, Homo sapiens
cctttgtggggtctg

SEQ ID NO: 335427 - DNA, 15 bp, Homo sapiens
acctttgtggggtct

SEQ ID NO: 335428 - DNA, 15 bp, Homo sapiens
gacctttgtggggtc

SEQ ID NO: 335429 - DNA, 15 bp, Homo sapiens
ggacctttgtggggt

SEQ ID NO: 335430 - DNA, 15 bp, Homo sapiens
aggacctttgtgggg

SEQ ID NO: 335431 - DNA, 15 bp, Homo sapiens
caggacctttgtggg

SEQ ID NO: 335432 - DNA, 15 bp, Homo sapiens
gcaggacctttgtgg

SEQ ID NO: 335433 - DNA, 15 bp, Homo sapiens
agcaggacctttgtg

SEQ ID NO: 335434 - DNA, 15 bp, Homo sapiens
cagcaggacctttgt

SEQ ID NO: 335435 - DNA, 15 bp, Homo sapiens
acagcaggacctttg

SEQ ID NO: 335436 - DNA, 15 bp, Homo sapiens
cacagcaggaccttt

SEQ ID NO: 335437 - DNA, 15 bp, Homo sapiens
ccacagcaggacctt

SEQ ID NO: 335438 - DNA, 15 bp, Homo sapiens
gccacagcaggacct

SEQ ID NO: 335439 - DNA, 15 bp, Homo sapiens
ggccacagcaggacc

SEQ ID NO: 335440 - DNA, 15 bp, Homo sapiens
aggccacagcaggac

SEQ ID NO: 335441 - DNA, 15 bp, Homo sapiens
caggccacagcagga

SEQ ID NO: 335442 - DNA, 15 bp, Homo sapiens
acaggccacagcagg

SEQ ID NO: 335443 - DNA, 15 bp, Homo sapiens
gacaggccacagcag

SEQ ID NO: 335444 - DNA, 15 bp, Homo sapiens
tgacaggccacagca

SEQ ID NO: 335445 - DNA, 15 bp, Homo sapiens
atgacaggccacagc

SEQ ID NO: 335446 - DNA, 15 bp, Homo sapiens
catgacaggccacag

SEQ ID NO: 335447 - DNA, 15 bp, Homo sapiens
gcatgacaggccaca

SEQ ID NO: 335448 - DNA, 15 bp, Homo sapiens
ggcatgacaggccac

SEQ ID NO: 335449 - DNA, 15 bp, Homo sapiens
aggcatgacaggcca

SEQ ID NO: 335450 - DNA, 15 bp, Homo sapiens
gaggcatgacaggcc

SEQ ID NO: 335451 - DNA, 15 bp, Homo sapiens
cgaggcatgacaggc

SEQ ID NO: 335452 - DNA, 15 bp, Homo sapiens
acgaggcatgacagg

SEQ ID NO: 335453 - DNA, 15 bp, Homo sapiens
tacgaggcatgacag

SEQ ID NO: 335454 - DNA, 15 bp, Homo sapiens
atacgaggcatgaca

SEQ ID NO: 335455 - DNA, 15 bp, Homo sapiens
gatacgaggcatgac

SEQ ID NO: 335456 - DNA, 15 bp, Homo sapiens
tgatacgaggcatga

SEQ ID NO: 335457 - DNA, 15 bp, Homo sapiens
atgatacgaggcatg

SEQ ID NO: 335458 - DNA, 15 bp, Homo sapiens
catgatacgaggcat

SEQ ID NO: 335459 - DNA, 15 bp, Homo sapiens
gcatgatacgaggca

SEQ ID NO: 335460 - DNA, 15 bp, Homo sapiens
ggcatgatacgaggc

SEQ ID NO: 335461 - DNA, 15 bp, Homo sapiens
aggcatgatacgagg

SEQ ID NO: 335462 - DNA, 15 bp, Homo sapiens
aaggcatgatacgag

SEQ ID NO: 335463 - DNA, 15 bp, Homo sapiens
gaaggcatgatacga

SEQ ID NO: 335464 - DNA, 15 bp, Homo sapiens
agaaggcatgatacg

SEQ ID NO: 335465 - DNA, 15 bp, Homo sapiens
aagaaggcatgatac

SEQ ID NO: 335466 - DNA, 15 bp, Homo sapiens
aaagaaggcatgata

SEQ ID NO: 335467 - DNA, 15 bp, Homo sapiens
aaaagaaggcatgat

SEQ ID NO: 335468 - DNA, 15 bp, Homo sapiens
aaaaagaaggcatga

SEQ ID NO: 335469 - DNA, 15 bp, Homo sapiens
taaaaagaaggcatg

SEQ ID NO: 335470 - DNA, 15 bp, Homo sapiens
gtaaaaagaaggcat

SEQ ID NO: 335471 - DNA, 15 bp, Homo sapiens
agtaaaaagaaggca

SEQ ID NO: 335472 - DNA, 15 bp, Homo sapiens
aagtaaaaagaaggc

SEQ ID NO: 335473 - DNA, 15 bp, Homo sapiens
aaagtaaaaagaagg

SEQ ID NO: 335474 - DNA, 15 bp, Homo sapiens
aaaagtaaaaagaag

SEQ ID NO: 335475 - DNA, 15 bp, Homo sapiens
aaaaagtaaaaagaa

SEQ ID NO: 335476 - DNA, 15 bp, Homo sapiens
aaaaaagtaaaaaga

SEQ ID NO: 335477 - DNA, 15 bp, Homo sapiens
gaaaaaagtaaaaag

SEQ ID NO: 335478 - DNA, 15 bp, Homo sapiens
ggaaaaaagtaaaaa

SEQ ID NO: 335479 - DNA, 15 bp, Homo sapiens
aggaaaaaagtaaaa

SEQ ID NO: 335480 - DNA, 15 bp, Homo sapiens
aaggaaaaaagtaaa

SEQ ID NO: 335481 - DNA, 15 bp, Homo sapiens
aaaggaaaaaagtaa

SEQ ID NO: 335482 - DNA, 15 bp, Homo sapiens
aaaaggaaaaaagta

SEQ ID NO: 335483 - DNA, 15 bp, Homo sapiens
gaaaaggaaaaaagt

SEQ ID NO: 335484 - DNA, 15 bp, Homo sapiens
agaaaaggaaaaaag

SEQ ID NO: 335485 - DNA, 15 bp, Homo sapiens
aagaaaaggaaaaaa

SEQ ID NO: 335486 - DNA, 15 bp, Homo sapiens
aaaaagaaaaggaaa

SEQ ID NO: 335487 - DNA, 15 bp, Homo sapiens
aaaaaagaaaaggaa

SEQ ID NO: 335488 - DNA, 15 bp, Homo sapiens
aaaaaaagaaaagga

SEQ ID NO: 335489 - DNA, 15 bp, Homo sapiens
aaaaaaaagaaaagg

SEQ ID NO: 335490 - DNA, 15 bp, Homo sapiens
aactccatctcaaaa

SEQ ID NO: 335491 - DNA, 15 bp, Homo sapiens
aaaactccatctcaa

SEQ ID NO: 335492 - DNA, 15 bp, Homo sapiens
caaaactccatctca

SEQ ID NO: 335493 - DNA, 15 bp, Homo sapiens
gcaaaactccatctc

SEQ ID NO: 335494 - DNA, 15 bp, Homo sapiens
agcaaaactccatct

SEQ ID NO: 335495 - DNA, 15 bp, Homo sapiens
gtgtgtatcagtccc

SEQ ID NO: 335496 - DNA, 15 bp, Homo sapiens
agtgtgtatcagtcc

SEQ ID NO: 335497 - DNA, 15 bp, Homo sapiens
gagtgtgtatcagtc

SEQ ID NO: 335498 - DNA, 15 bp, Homo sapiens
agagtgtgtatcagt

SEQ ID NO: 335499 - DNA, 15 bp, Homo sapiens
gagagtgtgtatcag

SEQ ID NO: 335500 - DNA, 15 bp, Homo sapiens
tgagagtgtgtatca

SEQ ID NO: 335501 - DNA, 15 bp, Homo sapiens
atgagagtgtgtatc

SEQ ID NO: 335502 - DNA, 15 bp, Homo sapiens
aatgagagtgtgtat

SEQ ID NO: 335503 - DNA, 15 bp, Homo sapiens
aaatgagagtgtgta

SEQ ID NO: 335504 - DNA, 15 bp, Homo sapiens
caaatgagagtgtgt

SEQ ID NO: 335505 - DNA, 15 bp, Homo sapiens
gcaaatgagagtgtg

SEQ ID NO: 335506 - DNA, 15 bp, Homo sapiens
agcaaatgagagtgt

SEQ ID NO: 335507 - DNA, 15 bp, Homo sapiens
aagcaaatgagagtg

SEQ ID NO: 335508 - DNA, 15 bp, Homo sapiens
aaagcaaatgagagt

SEQ ID NO: 335509 - DNA, 15 bp, Homo sapiens
caaagcaaatgagag

SEQ ID NO: 335510 - DNA, 15 bp, Homo sapiens
acaaagcaaatgaga

SEQ ID NO: 335511 - DNA, 15 bp, Homo sapiens
aacaaagcaaatgag

SEQ ID NO: 335512 - DNA, 15 bp, Homo sapiens
aaacaaagcaaatga

SEQ ID NO: 335513 - DNA, 15 bp, Homo sapiens
aaaacaaagcaaatg

SEQ ID NO: 335514 - DNA, 15 bp, Homo sapiens
aaaaacaaagcaaat

SEQ ID NO: 335515 - DNA, 15 bp, Homo sapiens
taaaaacaaagcaaa

SEQ ID NO: 335516 - DNA, 15 bp, Homo sapiens
ataaaaacaaagcaa

SEQ ID NO: 335517 - DNA, 15 bp, Homo sapiens
aataaaaacaaagca

SEQ ID NO: 335518 - DNA, 15 bp, Homo sapiens
aaataaaaacaaagc

SEQ ID NO: 335519 - DNA, 15 bp, Homo sapiens
aaaataaaaacaaag

SEQ ID NO: 335520 - DNA, 15 bp, Homo sapiens
aaaaataaaaacaaa

SEQ ID NO: 335521 - DNA, 15 bp, Homo sapiens
gaaaaataaaaacaa

SEQ ID NO: 335522 - DNA, 15 bp, Homo sapiens
agaaaaataaaaaca

SEQ ID NO: 335523 - DNA, 15 bp, Homo sapiens
aagaaaaataaaaac

SEQ ID NO: 335524 - DNA, 15 bp, Homo sapiens
aaagaaaaataaaaa

SEQ ID NO: 335525 - DNA, 15 bp, Homo sapiens
taaagaaaaataaaa

SEQ ID NO: 335526 - DNA, 15 bp, Homo sapiens
ataaagaaaaataaa

SEQ ID NO: 335527 - DNA, 15 bp, Homo sapiens
cataaagaaaaataa

SEQ ID NO: 335528 - DNA, 15 bp, Homo sapiens
acataaagaaaaata

SEQ ID NO: 335529 - DNA, 15 bp, Homo sapiens
cacataaagaaaaat

SEQ ID NO: 335530 - DNA, 15 bp, Homo sapiens
acacataaagaaaaa

SEQ ID NO: 335531 - DNA, 15 bp, Homo sapiens
tacacataaagaaaa

SEQ ID NO: 335532 - DNA, 15 bp, Homo sapiens
gtacacataaagaaa

SEQ ID NO: 335533 - DNA, 15 bp, Homo sapiens
tgtacacataaagaa

SEQ ID NO: 335534 - DNA, 15 bp, Homo sapiens
ctgtacacataaaga

SEQ ID NO: 335535 - DNA, 15 bp, Homo sapiens
tctgtacacataaag

SEQ ID NO: 335536 - DNA, 15 bp, Homo sapiens
atctgtacacataaa

SEQ ID NO: 335537 - DNA, 15 bp, Homo sapiens
gatctgtacacataa

SEQ ID NO: 335538 - DNA, 15 bp, Homo sapiens
ggatctgtacacata

SEQ ID NO: 335539 - DNA, 15 bp, Homo sapiens
gggatctgtacacat

SEQ ID NO: 335540 - DNA, 15 bp, Homo sapiens
agggatctgtacaca

SEQ ID NO: 335541 - DNA, 15 bp, Homo sapiens
aagggatctgtacac

SEQ ID NO: 335542 - DNA, 15 bp, Homo sapiens
taagggatctgtaca

SEQ ID NO: 335543 - DNA, 15 bp, Homo sapiens
gtaagggatctgtac

SEQ ID NO: 335544 - DNA, 15 bp, Homo sapiens
tgtaagggatctgta

SEQ ID NO: 335545 - DNA, 15 bp, Homo sapiens
ttgtaagggatctgt

SEQ ID NO: 335546 - DNA, 15 bp, Homo sapiens
tttgtaagggatctg

SEQ ID NO: 335547 - DNA, 15 bp, Homo sapiens
gtttgtaagggatct

SEQ ID NO: 335548 - DNA, 15 bp, Homo sapiens
agtttgtaagggatc

SEQ ID NO: 335549 - DNA, 15 bp, Homo sapiens
aagtttgtaagggat

SEQ ID NO: 335550 - DNA, 15 bp, Homo sapiens
caagtttgtaaggga

SEQ ID NO: 335551 - DNA, 15 bp, Homo sapiens
tcaagtttgtaaggg

SEQ ID NO: 335552 - DNA, 15 bp, Homo sapiens
ttcaagtttgtaagg

SEQ ID NO: 335553 - DNA, 15 bp, Homo sapiens
tttcaagtttgtaag

SEQ ID NO: 335554 - DNA, 15 bp, Homo sapiens
atttcaagtttgtaa

SEQ ID NO: 335555 - DNA, 15 bp, Homo sapiens
tatttcaagtttgta

SEQ ID NO: 335556 - DNA, 15 bp, Homo sapiens
atatttcaagtttgt

SEQ ID NO: 335557 - DNA, 15 bp, Homo sapiens
catatttcaagtttg

SEQ ID NO: 335558 - DNA, 15 bp, Homo sapiens
gcatatttcaagttt

SEQ ID NO: 335559 - DNA, 15 bp, Homo sapiens
agcatatttcaagtt

SEQ ID NO: 335560 - DNA, 15 bp, Homo sapiens
tagcatatttcaagt

SEQ ID NO: 335561 - DNA, 15 bp, Homo sapiens
ctagcatatttcaag

SEQ ID NO: 335562 - DNA, 15 bp, Homo sapiens
actagcatatttcaa

SEQ ID NO: 335563 - DNA, 15 bp, Homo sapiens
tactagcatatttca

SEQ ID NO: 335564 - DNA, 15 bp, Homo sapiens
ctactagcatatttc

SEQ ID NO: 335565 - DNA, 15 bp, Homo sapiens
tctactagcatattt

SEQ ID NO: 335566 - DNA, 15 bp, Homo sapiens
atctactagcatatt

SEQ ID NO: 335567 - DNA, 15 bp, Homo sapiens
aatctactagcatat

SEQ ID NO: 335568 - DNA, 15 bp, Homo sapiens
gaatctactagcata

SEQ ID NO: 335569 - DNA, 15 bp, Homo sapiens
tgaatctactagcat

SEQ ID NO: 335570 - DNA, 15 bp, Homo sapiens
ctgaatctactagca

SEQ ID NO: 335571 - DNA, 15 bp, Homo sapiens
cctgaatctactagc

SEQ ID NO: 335572 - DNA, 15 bp, Homo sapiens
ccctgaatctactag

SEQ ID NO: 335573 - DNA, 15 bp, Homo sapiens
accctgaatctacta

SEQ ID NO: 335574 - DNA, 15 bp, Homo sapiens
caccctgaatctact

SEQ ID NO: 335575 - DNA, 15 bp, Homo sapiens
ccaccctgaatctac

SEQ ID NO: 335576 - DNA, 15 bp, Homo sapiens
accaccctgaatcta

SEQ ID NO: 335577 - DNA, 15 bp, Homo sapiens
caccaccctgaatct

SEQ ID NO: 335578 - DNA, 15 bp, Homo sapiens
ccaccaccctgaatc

SEQ ID NO: 335579 - DNA, 15 bp, Homo sapiens
tccaccaccctgaat

SEQ ID NO: 335580 - DNA, 15 bp, Homo sapiens
ttccaccaccctgaa

SEQ ID NO: 335581 - DNA, 15 bp, Homo sapiens
attccaccaccctga

SEQ ID NO: 335582 - DNA, 15 bp, Homo sapiens
tattccaccaccctg

SEQ ID NO: 335583 - DNA, 15 bp, Homo sapiens
ttattccaccaccct

SEQ ID NO: 335584 - DNA, 15 bp, Homo sapiens
cttattccaccaccc

SEQ ID NO: 335585 - DNA, 15 bp, Homo sapiens
gcttattccaccacc

SEQ ID NO: 335586 - DNA, 15 bp, Homo sapiens
ggcttattccaccac

SEQ ID NO: 335587 - DNA, 15 bp, Homo sapiens
aggcttattccacca

SEQ ID NO: 335588 - DNA, 15 bp, Homo sapiens
taggcttattccacc

SEQ ID NO: 335589 - DNA, 15 bp, Homo sapiens
ataggcttattccac

SEQ ID NO: 335590 - DNA, 15 bp, Homo sapiens
cataggcttattcca

SEQ ID NO: 335591 - DNA, 15 bp, Homo sapiens
ccataggcttattcc

SEQ ID NO: 335592 - DNA, 15 bp, Homo sapiens
accataggcttattc

SEQ ID NO: 335593 - DNA, 15 bp, Homo sapiens
gaccataggcttatt

SEQ ID NO: 335594 - DNA, 15 bp, Homo sapiens
agaccataggcttat

SEQ ID NO: 335595 - DNA, 15 bp, Homo sapiens
tagaccataggctta

SEQ ID NO: 335596 - DNA, 15 bp, Homo sapiens
ttagaccataggctt

SEQ ID NO: 335597 - DNA, 15 bp, Homo sapiens
tttagaccataggct

SEQ ID NO: 335598 - DNA, 15 bp, Homo sapiens
ttttagaccataggc

SEQ ID NO: 335599 - DNA, 15 bp, Homo sapiens
cttttagaccatagg

SEQ ID NO: 335600 - DNA, 15 bp, Homo sapiens
ccttttagaccatag

SEQ ID NO: 335601 - DNA, 15 bp, Homo sapiens
gccttttagaccata

SEQ ID NO: 335602 - DNA, 15 bp, Homo sapiens
agccttttagaccat

SEQ ID NO: 335603 - DNA, 15 bp, Homo sapiens
aagccttttagacca

SEQ ID NO: 335604 - DNA, 15 bp, Homo sapiens
caagccttttagacc

SEQ ID NO: 335605 - DNA, 15 bp, Homo sapiens
gcaagccttttagac

SEQ ID NO: 335606 - DNA, 15 bp, Homo sapiens
tgcaagccttttaga

SEQ ID NO: 335607 - DNA, 15 bp, Homo sapiens
ctgcaagccttttag

SEQ ID NO: 335608 - DNA, 15 bp, Homo sapiens
actgcaagcctttta

SEQ ID NO: 335609 - DNA, 15 bp, Homo sapiens
cactgcaagcctttt

SEQ ID NO: 335610 - DNA, 15 bp, Homo sapiens
tcactgcaagccttt

SEQ ID NO: 335611 - DNA, 15 bp, Homo sapiens
ttcactgcaagcctt

SEQ ID NO: 335612 - DNA, 15 bp, Homo sapiens
gttcactgcaagcct

SEQ ID NO: 335613 - DNA, 15 bp, Homo sapiens
agttcactgcaagcc

SEQ ID NO: 335614 - DNA, 15 bp, Homo sapiens
tagttcactgcaagc

SEQ ID NO: 335615 - DNA, 15 bp, Homo sapiens
gtagttcactgcaag

SEQ ID NO: 335616 - DNA, 15 bp, Homo sapiens
ggtagttcactgcaa

SEQ ID NO: 335617 - DNA, 15 bp, Homo sapiens
aggtagttcactgca

SEQ ID NO: 335618 - DNA, 15 bp, Homo sapiens
caggtagttcactgc

SEQ ID NO: 335619 - DNA, 15 bp, Homo sapiens
acaggtagttcactg

SEQ ID NO: 335620 - DNA, 15 bp, Homo sapiens
aacaggtagttcact

SEQ ID NO: 335621 - DNA, 15 bp, Homo sapiens
taacaggtagttcac

SEQ ID NO: 335622 - DNA, 15 bp, Homo sapiens
ttaacaggtagttca

SEQ ID NO: 335623 - DNA, 15 bp, Homo sapiens
gttaacaggtagttc

SEQ ID NO: 335624 - DNA, 15 bp, Homo sapiens
agttaacaggtagtt

SEQ ID NO: 335625 - DNA, 15 bp, Homo sapiens
aagttaacaggtagt

SEQ ID NO: 335626 - DNA, 15 bp, Homo sapiens
aaagttaacaggtag

SEQ ID NO: 335627 - DNA, 15 bp, Homo sapiens
aaaagttaacaggta

SEQ ID NO: 335628 - DNA, 15 bp, Homo sapiens
aaaaagttaacaggt

SEQ ID NO: 335629 - DNA, 15 bp, Homo sapiens
aaaaaagttaacagg

SEQ ID NO: 335630 - DNA, 15 bp, Homo sapiens
gaaaaaagttaacag

SEQ ID NO: 335631 - DNA, 15 bp, Homo sapiens
agaaaaaagttaaca

SEQ ID NO: 335632 - DNA, 15 bp, Homo sapiens
cagaaaaaagttaac

SEQ ID NO: 335633 - DNA, 15 bp, Homo sapiens
gcagaaaaaagttaa

SEQ ID NO: 335634 - DNA, 15 bp, Homo sapiens
tgcagaaaaaagtta

SEQ ID NO: 335635 - DNA, 15 bp, Homo sapiens
gtgcagaaaaaagtt

SEQ ID NO: 335636 - DNA, 15 bp, Homo sapiens
agtgcagaaaaaagt

SEQ ID NO: 335637 - DNA, 15 bp, Homo sapiens
aagtgcagaaaaaag

SEQ ID NO: 335638 - DNA, 15 bp, Homo sapiens
taagtgcagaaaaaa

SEQ ID NO: 335639 - DNA, 15 bp, Homo sapiens
gtaagtgcagaaaaa

SEQ ID NO: 335640 - DNA, 15 bp, Homo sapiens
ggtaagtgcagaaaa

SEQ ID NO: 335641 - DNA, 15 bp, Homo sapiens
tggtaagtgcagaaa

SEQ ID NO: 335642 - DNA, 15 bp, Homo sapiens
atggtaagtgcagaa

SEQ ID NO: 335643 - DNA, 15 bp, Homo sapiens
catggtaagtgcaga

SEQ ID NO: 335644 - DNA, 15 bp, Homo sapiens
ccatggtaagtgcag

SEQ ID NO: 335645 - DNA, 15 bp, Homo sapiens
cccatggtaagtgca

SEQ ID NO: 335646 - DNA, 15 bp, Homo sapiens
tcccatggtaagtgc

SEQ ID NO: 335647 - DNA, 15 bp, Homo sapiens
atcccatggtaagtg

SEQ ID NO: 335648 - DNA, 15 bp, Homo sapiens
tatcccatggtaagt

SEQ ID NO: 335649 - DNA, 15 bp, Homo sapiens
ctatcccatggtaag

SEQ ID NO: 335650 - DNA, 15 bp, Homo sapiens
tctatcccatggtaa

SEQ ID NO: 335651 - DNA, 15 bp, Homo sapiens
ctctatcccatggta

SEQ ID NO: 335652 - DNA, 15 bp, Homo sapiens
actctatcccatggt

SEQ ID NO: 335653 - DNA, 15 bp, Homo sapiens
gactctatcccatgg

SEQ ID NO: 335654 - DNA, 15 bp, Homo sapiens
agactctatcccatg

SEQ ID NO: 335655 - DNA, 15 bp, Homo sapiens
gagactctatcccat

SEQ ID NO: 335656 - DNA, 15 bp, Homo sapiens
ggagactctatccca

SEQ ID NO: 335657 - DNA, 15 bp, Homo sapiens
tggagactctatccc

SEQ ID NO: 335658 - DNA, 15 bp, Homo sapiens
ttggagactctatcc

SEQ ID NO: 335659 - DNA, 15 bp, Homo sapiens
cttggagactctatc

SEQ ID NO: 335660 - DNA, 15 bp, Homo sapiens
tcttggagactctat

SEQ ID NO: 335661 - DNA, 15 bp, Homo sapiens
atcttggagactcta

SEQ ID NO: 335662 - DNA, 15 bp, Homo sapiens
catcttggagactct

SEQ ID NO: 335663 - DNA, 15 bp, Homo sapiens
gcatcttggagactc

SEQ ID NO: 335664 - DNA, 15 bp, Homo sapiens
tgcatcttggagact

SEQ ID NO: 335665 - DNA, 15 bp, Homo sapiens
atgcatcttggagac

SEQ ID NO: 335666 - DNA, 15 bp, Homo sapiens
tatgcatcttggaga

SEQ ID NO: 335667 - DNA, 15 bp, Homo sapiens
gtatgcatcttggag

SEQ ID NO: 335668 - DNA, 15 bp, Homo sapiens
agtatgcatcttgga

SEQ ID NO: 335669 - DNA, 15 bp, Homo sapiens
aagtatgcatcttgg

SEQ ID NO: 335670 - DNA, 15 bp, Homo sapiens
aaagtatgcatcttg

SEQ ID NO: 335671 - DNA, 15 bp, Homo sapiens
caaagtatgcatctt

SEQ ID NO: 335672 - DNA, 15 bp, Homo sapiens
acaaagtatgcatct

SEQ ID NO: 335673 - DNA, 15 bp, Homo sapiens
gacaaagtatgcatc

SEQ ID NO: 335674 - DNA, 15 bp, Homo sapiens
tgacaaagtatgcat

SEQ ID NO: 335675 - DNA, 15 bp, Homo sapiens
ttgacaaagtatgca

SEQ ID NO: 335676 - DNA, 15 bp, Homo sapiens
gttgacaaagtatgc

SEQ ID NO: 335677 - DNA, 15 bp, Homo sapiens
ggttgacaaagtatg

SEQ ID NO: 335678 - DNA, 15 bp, Homo sapiens
tggttgacaaagtat

SEQ ID NO: 335679 - DNA, 15 bp, Homo sapiens
ttggttgacaaagta

SEQ ID NO: 335680 - DNA, 15 bp, Homo sapiens
attggttgacaaagt

SEQ ID NO: 335681 - DNA, 15 bp, Homo sapiens
gattggttgacaaag

SEQ ID NO: 335682 - DNA, 15 bp, Homo sapiens
ggattggttgacaaa

SEQ ID NO: 335683 - DNA, 15 bp, Homo sapiens
tggattggttgacaa

SEQ ID NO: 335684 - DNA, 15 bp, Homo sapiens
atggattggttgaca

SEQ ID NO: 335685 - DNA, 15 bp, Homo sapiens
gatggattggttgac

SEQ ID NO: 335686 - DNA, 15 bp, Homo sapiens
tgatggattggttga

SEQ ID NO: 335687 - DNA, 15 bp, Homo sapiens
ctgatggattggttg

SEQ ID NO: 335688 - DNA, 15 bp, Homo sapiens
actgatggattggtt

SEQ ID NO: 335689 - DNA, 15 bp, Homo sapiens
aactgatggattggt

SEQ ID NO: 335690 - DNA, 15 bp, Homo sapiens
taactgatggattgg

SEQ ID NO: 335691 - DNA, 15 bp, Homo sapiens
ttaactgatggattg

SEQ ID NO: 335692 - DNA, 15 bp, Homo sapiens
gttaactgatggatt

SEQ ID NO: 335693 - DNA, 15 bp, Homo sapiens
tgttaactgatggat

SEQ ID NO: 335694 - DNA, 15 bp, Homo sapiens
ttgttaactgatgga

SEQ ID NO: 335695 - DNA, 15 bp, Homo sapiens
tttgttaactgatgg

SEQ ID NO: 335696 - DNA, 15 bp, Homo sapiens
atttgttaactgatg

SEQ ID NO: 335697 - DNA, 15 bp, Homo sapiens
tatttgttaactgat

SEQ ID NO: 335698 - DNA, 15 bp, Homo sapiens
ctatttgttaactga

SEQ ID NO: 335699 - DNA, 15 bp, Homo sapiens
actatttgttaactg

SEQ ID NO: 335700 - DNA, 15 bp, Homo sapiens
aactatttgttaact

SEQ ID NO: 335701 - DNA, 15 bp, Homo sapiens
gaactatttgttaac

SEQ ID NO: 335702 - DNA, 15 bp, Homo sapiens
ggaactatttgttaa

SEQ ID NO: 335703 - DNA, 15 bp, Homo sapiens
aggaactatttgtta

SEQ ID NO: 335704 - DNA, 15 bp, Homo sapiens
caggaactatttgtt

SEQ ID NO: 335705 - DNA, 15 bp, Homo sapiens
tcaggaactatttgt

SEQ ID NO: 335706 - DNA, 15 bp, Homo sapiens
ttcaggaactatttg

SEQ ID NO: 335707 - DNA, 15 bp, Homo sapiens
tttcaggaactattt

SEQ ID NO: 335708 - DNA, 15 bp, Homo sapiens
ctttcaggaactatt

SEQ ID NO: 335709 - DNA, 15 bp, Homo sapiens
gctttcaggaactat

SEQ ID NO: 335710 - DNA, 15 bp, Homo sapiens
ggctttcaggaacta

SEQ ID NO: 335711 - DNA, 15 bp, Homo sapiens
gggctttcaggaact

SEQ ID NO: 335712 - DNA, 15 bp, Homo sapiens
tgggctttcaggaac

SEQ ID NO: 335713 - DNA, 15 bp, Homo sapiens
ctgggctttcaggaa

SEQ ID NO: 335714 - DNA, 15 bp, Homo sapiens
gctgggctttcagga

SEQ ID NO: 335715 - DNA, 15 bp, Homo sapiens
tgctgggctttcagg

SEQ ID NO: 335716 - DNA, 15 bp, Homo sapiens
ttgctgggctttcag

SEQ ID NO: 335717 - DNA, 15 bp, Homo sapiens
cttgctgggctttca

SEQ ID NO: 335718 - DNA, 15 bp, Homo sapiens
acttgctgggctttc

SEQ ID NO: 335719 - DNA, 15 bp, Homo sapiens
aacttgctgggcttt

SEQ ID NO: 335720 - DNA, 15 bp, Homo sapiens
aaacttgctgggctt

SEQ ID NO: 335721 - DNA, 15 bp, Homo sapiens
aaaacttgctgggct

SEQ ID NO: 335722 - DNA, 15 bp, Homo sapiens
caaaacttgctgggc

SEQ ID NO: 335723 - DNA, 15 bp, Homo sapiens
ccaaaacttgctggg

SEQ ID NO: 335724 - DNA, 15 bp, Homo sapiens
cccaaaacttgctgg

SEQ ID NO: 335725 - DNA, 15 bp, Homo sapiens
ccccaaaacttgctg

SEQ ID NO: 335726 - DNA, 15 bp, Homo sapiens
cccccaaaacttgct

SEQ ID NO: 335727 - DNA, 15 bp, Homo sapiens
acccccaaaacttgc

SEQ ID NO: 335728 - DNA, 15 bp, Homo sapiens
aacccccaaaacttg

SEQ ID NO: 335729 - DNA, 15 bp, Homo sapiens
gaacccccaaaactt

SEQ ID NO: 335730 - DNA, 15 bp, Homo sapiens
ggaacccccaaaact

SEQ ID NO: 335731 - DNA, 15 bp, Homo sapiens
tggaacccccaaaac

SEQ ID NO: 335732 - DNA, 15 bp, Homo sapiens
ttggaacccccaaaa

SEQ ID NO: 335733 - DNA, 15 bp, Homo sapiens
cttggaacccccaaa

SEQ ID NO: 335734 - DNA, 15 bp, Homo sapiens
gcttggaacccccaa

SEQ ID NO: 335735 - DNA, 15 bp, Homo sapiens
ggcttggaaccccca

SEQ ID NO: 335736 - DNA, 15 bp, Homo sapiens
tggcttggaaccccc

SEQ ID NO: 335737 - DNA, 15 bp, Homo sapiens
ctggcttggaacccc

SEQ ID NO: 335738 - DNA, 15 bp, Homo sapiens
cctggcttggaaccc

SEQ ID NO: 335739 - DNA, 15 bp, Homo sapiens
acctggcttggaacc

SEQ ID NO: 335740 - DNA, 15 bp, Homo sapiens
gacctggcttggaac

SEQ ID NO: 335741 - DNA, 15 bp, Homo sapiens
ggacctggcttggaa

SEQ ID NO: 335742 - DNA, 15 bp, Homo sapiens
aggacctggcttgga

SEQ ID NO: 335743 - DNA, 15 bp, Homo sapiens
caggacctggcttgg

SEQ ID NO: 335744 - DNA, 15 bp, Homo sapiens
ccaggacctggcttg

SEQ ID NO: 335745 - DNA, 15 bp, Homo sapiens
cccaggacctggctt

SEQ ID NO: 335746 - DNA, 15 bp, Homo sapiens
ccccaggacctggct

SEQ ID NO: 335747 - DNA, 15 bp, Homo sapiens
accccaggacctggc

SEQ ID NO: 335748 - DNA, 15 bp, Homo sapiens
taccccaggacctgg

SEQ ID NO: 335749 - DNA, 15 bp, Homo sapiens
ctaccccaggacctg

SEQ ID NO: 335750 - DNA, 15 bp, Homo sapiens
cctaccccaggacct

SEQ ID NO: 335751 - DNA, 15 bp, Homo sapiens
ccctaccccaggacc

SEQ ID NO: 335752 - DNA, 15 bp, Homo sapiens
accctaccccaggac

SEQ ID NO: 335753 - DNA, 15 bp, Homo sapiens
caccctaccccagga

SEQ ID NO: 335754 - DNA, 15 bp, Homo sapiens
ccaccctaccccagg

SEQ ID NO: 335755 - DNA, 15 bp, Homo sapiens
tccaccctaccccag

SEQ ID NO: 335756 - DNA, 15 bp, Homo sapiens
ctccaccctacccca

SEQ ID NO: 335757 - DNA, 15 bp, Homo sapiens
cctccaccctacccc

SEQ ID NO: 335758 - DNA, 15 bp, Homo sapiens
ccctccaccctaccc

SEQ ID NO: 335759 - DNA, 15 bp, Homo sapiens
tccctccaccctacc

SEQ ID NO: 335760 - DNA, 15 bp, Homo sapiens
atccctccaccctac

SEQ ID NO: 335761 - DNA, 15 bp, Homo sapiens
catccctccacccta

SEQ ID NO: 335762 - DNA, 15 bp, Homo sapiens
tcatccctccaccct

SEQ ID NO: 335763 - DNA, 15 bp, Homo sapiens
ctcatccctccaccc

SEQ ID NO: 335764 - DNA, 15 bp, Homo sapiens
cctcatccctccacc

SEQ ID NO: 335765 - DNA, 15 bp, Homo sapiens
gcctcatccctccac

SEQ ID NO: 335766 - DNA, 15 bp, Homo sapiens
tgcctcatccctcca

SEQ ID NO: 335767 - DNA, 15 bp, Homo sapiens
ctgcctcatccctcc

SEQ ID NO: 335768 - DNA, 15 bp, Homo sapiens
gctgcctcatccctc

SEQ ID NO: 335769 - DNA, 15 bp, Homo sapiens
tgctgcctcatccct

SEQ ID NO: 335770 - DNA, 15 bp, Homo sapiens
gtgctgcctcatccc

SEQ ID NO: 335771 - DNA, 15 bp, Homo sapiens
tgtgctgcctcatcc

SEQ ID NO: 335772 - DNA, 15 bp, Homo sapiens
ctgtgctgcctcatc

SEQ ID NO: 335773 - DNA, 15 bp, Homo sapiens
gctgtgctgcctcat

SEQ ID NO: 335774 - DNA, 15 bp, Homo sapiens
ggctgtgctgcctca

SEQ ID NO: 335775 - DNA, 15 bp, Homo sapiens
aggctgtgctgcctc

SEQ ID NO: 335776 - DNA, 15 bp, Homo sapiens
caggctgtgctgcct

SEQ ID NO: 335777 - DNA, 15 bp, Homo sapiens
ccaggctgtgctgcc

SEQ ID NO: 335778 - DNA, 15 bp, Homo sapiens
tccaggctgtgctgc

SEQ ID NO: 335779 - DNA, 15 bp, Homo sapiens
ctccaggctgtgctg

SEQ ID NO: 335780 - DNA, 15 bp, Homo sapiens
actccaggctgtgct

SEQ ID NO: 335781 - DNA, 15 bp, Homo sapiens
aactccaggctgtgc

SEQ ID NO: 335782 - DNA, 15 bp, Homo sapiens
taactccaggctgtg

SEQ ID NO: 335783 - DNA, 15 bp, Homo sapiens
ctaactccaggctgt

SEQ ID NO: 335784 - DNA, 15 bp, Homo sapiens
cctaactccaggctg

SEQ ID NO: 335785 - DNA, 15 bp, Homo sapiens
gcctaactccaggct

SEQ ID NO: 335786 - DNA, 15 bp, Homo sapiens
agcctaactccaggc

SEQ ID NO: 335787 - DNA, 15 bp, Homo sapiens
aagcctaactccagg

SEQ ID NO: 335788 - DNA, 15 bp, Homo sapiens
gaagcctaactccag

SEQ ID NO: 335789 - DNA, 15 bp, Homo sapiens
tgaagcctaactcca

SEQ ID NO: 335790 - DNA, 15 bp, Homo sapiens
atgaagcctaactcc

SEQ ID NO: 335791 - DNA, 15 bp, Homo sapiens
aatgaagcctaactc

SEQ ID NO: 335792 - DNA, 15 bp, Homo sapiens
aaatgaagcctaact

SEQ ID NO: 335793 - DNA, 15 bp, Homo sapiens
caaatgaagcctaac

SEQ ID NO: 335794 - DNA, 15 bp, Homo sapiens
gcaaatgaagcctaa

SEQ ID NO: 335795 - DNA, 15 bp, Homo sapiens
ggcaaatgaagccta

SEQ ID NO: 335796 - DNA, 15 bp, Homo sapiens
gggcaaatgaagcct

SEQ ID NO: 335797 - DNA, 15 bp, Homo sapiens
tgggcaaatgaagcc

SEQ ID NO: 335798 - DNA, 15 bp, Homo sapiens
atgggcaaatgaagc

SEQ ID NO: 335799 - DNA, 15 bp, Homo sapiens
catgggcaaatgaag

SEQ ID NO: 335800 - DNA, 15 bp, Homo sapiens
tcatgggcaaatgaa

SEQ ID NO: 335801 - DNA, 15 bp, Homo sapiens
atcatgggcaaatga

SEQ ID NO: 335802 - DNA, 15 bp, Homo sapiens
catcatgggcaaatg

SEQ ID NO: 335803 - DNA, 15 bp, Homo sapiens
acatcatgggcaaat

SEQ ID NO: 335804 - DNA, 15 bp, Homo sapiens
gacatcatgggcaaa

SEQ ID NO: 335805 - DNA, 15 bp, Homo sapiens
agacatcatgggcaa

SEQ ID NO: 335806 - DNA, 15 bp, Homo sapiens
gagacatcatgggca

SEQ ID NO: 335807 - DNA, 15 bp, Homo sapiens
ggagacatcatgggc

SEQ ID NO: 335808 - DNA, 15 bp, Homo sapiens
gggagacatcatggg

SEQ ID NO: 335809 - DNA, 15 bp, Homo sapiens
ggggagacatcatgg

SEQ ID NO: 335810 - DNA, 15 bp, Homo sapiens
aggggagacatcatg

SEQ ID NO: 335811 - DNA, 15 bp, Homo sapiens
taggggagacatcat

SEQ ID NO: 335812 - DNA, 15 bp, Homo sapiens
ataggggagacatca

SEQ ID NO: 335813 - DNA, 15 bp, Homo sapiens
gataggggagacatc

SEQ ID NO: 335814 - DNA, 15 bp, Homo sapiens
agataggggagacat

SEQ ID NO: 335815 - DNA, 15 bp, Homo sapiens
aagataggggagaca

SEQ ID NO: 335816 - DNA, 15 bp, Homo sapiens
aaagataggggagac

SEQ ID NO: 335817 - DNA, 15 bp, Homo sapiens
taaagataggggaga

SEQ ID NO: 335818 - DNA, 15 bp, Homo sapiens
gtaaagataggggag

SEQ ID NO: 335819 - DNA, 15 bp, Homo sapiens
agtaaagatagggga

SEQ ID NO: 335820 - DNA, 15 bp, Homo sapiens
cagtaaagatagggg

SEQ ID NO: 335821 - DNA, 15 bp, Homo sapiens
tcagtaaagataggg

SEQ ID NO: 335822 - DNA, 15 bp, Homo sapiens
ttcagtaaagatagg

SEQ ID NO: 335823 - DNA, 15 bp, Homo sapiens
cttcagtaaagatag

SEQ ID NO: 335824 - DNA, 15 bp, Homo sapiens
acttcagtaaagata

SEQ ID NO: 335825 - DNA, 15 bp, Homo sapiens
gacttcagtaaagat

SEQ ID NO: 335826 - DNA, 15 bp, Homo sapiens
tgacttcagtaaaga

SEQ ID NO: 335827 - DNA, 15 bp, Homo sapiens
ctgacttcagtaaag

SEQ ID NO: 335828 - DNA, 15 bp, Homo sapiens
actgacttcagtaaa

SEQ ID NO: 335829 - DNA, 15 bp, Homo sapiens
gactgacttcagtaa

SEQ ID NO: 335830 - DNA, 15 bp, Homo sapiens
agactgacttcagta

SEQ ID NO: 335831 - DNA, 15 bp, Homo sapiens
gagactgacttcagt

SEQ ID NO: 335832 - DNA, 15 bp, Homo sapiens
agagactgacttcag

SEQ ID NO: 335833 - DNA, 15 bp, Homo sapiens
aagagactgacttca

SEQ ID NO: 335834 - DNA, 15 bp, Homo sapiens
aaagagactgacttc

SEQ ID NO: 335835 - DNA, 15 bp, Homo sapiens
caaagagactgactt

SEQ ID NO: 335836 - DNA, 15 bp, Homo sapiens
tcaaagagactgact

SEQ ID NO: 335837 - DNA, 15 bp, Homo sapiens
ctcaaagagactgac

SEQ ID NO: 335838 - DNA, 15 bp, Homo sapiens
tctcaaagagactga

SEQ ID NO: 335839 - DNA, 15 bp, Homo sapiens
gtctcaaagagactg

SEQ ID NO: 335840 - DNA, 15 bp, Homo sapiens
tgtctcaaagagact

SEQ ID NO: 335841 - DNA, 15 bp, Homo sapiens
atgtctcaaagagac

SEQ ID NO: 335842 - DNA, 15 bp, Homo sapiens
aatgtctcaaagaga

SEQ ID NO: 335843 - DNA, 15 bp, Homo sapiens
gaatgtctcaaagag

SEQ ID NO: 335844 - DNA, 15 bp, Homo sapiens
tgaatgtctcaaaga

SEQ ID NO: 335845 - DNA, 15 bp, Homo sapiens
ctgaatgtctcaaag

SEQ ID NO: 335846 - DNA, 15 bp, Homo sapiens
actgaatgtctcaaa

SEQ ID NO: 335847 - DNA, 15 bp, Homo sapiens
tactgaatgtctcaa

SEQ ID NO: 335848 - DNA, 15 bp, Homo sapiens
ttactgaatgtctca

SEQ ID NO: 335849 - DNA, 15 bp, Homo sapiens
tttactgaatgtctc

SEQ ID NO: 335850 - DNA, 15 bp, Homo sapiens
ctttactgaatgtct

SEQ ID NO: 335851 - DNA, 15 bp, Homo sapiens
cctttactgaatgtc

SEQ ID NO: 335852 - DNA, 15 bp, Homo sapiens
tcctttactgaatgt

SEQ ID NO: 335853 - DNA, 15 bp, Homo sapiens
ctcctttactgaatg

SEQ ID NO: 335854 - DNA, 15 bp, Homo sapiens
cctcctttactgaat

SEQ ID NO: 335855 - DNA, 15 bp, Homo sapiens
tcctcctttactgaa

SEQ ID NO: 335856 - DNA, 15 bp, Homo sapiens
ttcctcctttactga

SEQ ID NO: 335857 - DNA, 15 bp, Homo sapiens
cttcctcctttactg

SEQ ID NO: 335858 - DNA, 15 bp, Homo sapiens
acttcctcctttact

SEQ ID NO: 335859 - DNA, 15 bp, Homo sapiens
cacttcctcctttac

SEQ ID NO: 335860 - DNA, 15 bp, Homo sapiens
ccacttcctccttta

SEQ ID NO: 335861 - DNA, 15 bp, Homo sapiens
cccacttcctccttt

SEQ ID NO: 335862 - DNA, 15 bp, Homo sapiens
tcccacttcctcctt

SEQ ID NO: 335863 - DNA, 15 bp, Homo sapiens
ttcccacttcctcct

SEQ ID NO: 335864 - DNA, 15 bp, Homo sapiens
cttcccacttcctcc

SEQ ID NO: 335865 - DNA, 15 bp, Homo sapiens
ccttcccacttcctc

SEQ ID NO: 335866 - DNA, 15 bp, Homo sapiens
accttcccacttcct

SEQ ID NO: 335867 - DNA, 15 bp, Homo sapiens
caccttcccacttcc

SEQ ID NO: 335868 - DNA, 15 bp, Homo sapiens
ccaccttcccacttc

SEQ ID NO: 335869 - DNA, 15 bp, Homo sapiens
cccaccttcccactt

SEQ ID NO: 335870 - DNA, 15 bp, Homo sapiens
tcccaccttcccact

SEQ ID NO: 335871 - DNA, 15 bp, Homo sapiens
ctcccaccttcccac

SEQ ID NO: 335872 - DNA, 15 bp, Homo sapiens
actcccaccttccca

SEQ ID NO: 335873 - DNA, 15 bp, Homo sapiens
aactcccaccttccc

SEQ ID NO: 335874 - DNA, 15 bp, Homo sapiens
caactcccaccttcc

SEQ ID NO: 335875 - DNA, 15 bp, Homo sapiens
ccaactcccaccttc

SEQ ID NO: 335876 - DNA, 15 bp, Homo sapiens
tccaactcccacctt

SEQ ID NO: 335877 - DNA, 15 bp, Homo sapiens
atccaactcccacct

SEQ ID NO: 335878 - DNA, 15 bp, Homo sapiens
aatccaactcccacc

SEQ ID NO: 335879 - DNA, 15 bp, Homo sapiens
taatccaactcccac

SEQ ID NO: 335880 - DNA, 15 bp, Homo sapiens
ctaatccaactccca

SEQ ID NO: 335881 - DNA, 15 bp, Homo sapiens
actaatccaactccc

SEQ ID NO: 335882 - DNA, 15 bp, Homo sapiens
gactaatccaactcc

SEQ ID NO: 335883 - DNA, 15 bp, Homo sapiens
agactaatccaactc

SEQ ID NO: 335884 - DNA, 15 bp, Homo sapiens
aagactaatccaact

SEQ ID NO: 335885 - DNA, 15 bp, Homo sapiens
taagactaatccaac

SEQ ID NO: 335886 - DNA, 15 bp, Homo sapiens
ataagactaatccaa

SEQ ID NO: 335887 - DNA, 15 bp, Homo sapiens
aataagactaatcca

SEQ ID NO: 335888 - DNA, 15 bp, Homo sapiens
aaataagactaatcc

SEQ ID NO: 335889 - DNA, 15 bp, Homo sapiens
aaaataagactaatc

SEQ ID NO: 335890 - DNA, 15 bp, Homo sapiens
aaaaataagactaat

SEQ ID NO: 335891 - DNA, 15 bp, Homo sapiens
aaaaaataagactaa

SEQ ID NO: 335892 - DNA, 15 bp, Homo sapiens
caaaaaataagacta

SEQ ID NO: 335893 - DNA, 15 bp, Homo sapiens
ccaaaaaataagact

SEQ ID NO: 335894 - DNA, 15 bp, Homo sapiens
gccaaaaaataagac

SEQ ID NO: 335895 - DNA, 15 bp, Homo sapiens
tgccaaaaaataaga

SEQ ID NO: 335896 - DNA, 15 bp, Homo sapiens
ctgccaaaaaataag

SEQ ID NO: 335897 - DNA, 15 bp, Homo sapiens
actgccaaaaaataa

SEQ ID NO: 335898 - DNA, 15 bp, Homo sapiens
cactgccaaaaaata

SEQ ID NO: 335899 - DNA, 15 bp, Homo sapiens
ccactgccaaaaaat

SEQ ID NO: 335900 - DNA, 15 bp, Homo sapiens
cccactgccaaaaaa

SEQ ID NO: 335901 - DNA, 15 bp, Homo sapiens
ccccactgccaaaaa

SEQ ID NO: 335902 - DNA, 15 bp, Homo sapiens
cccccactgccaaaa

SEQ ID NO: 335903 - DNA, 15 bp, Homo sapiens
tcccccactgccaaa

SEQ ID NO: 335904 - DNA, 15 bp, Homo sapiens
atcccccactgccaa

SEQ ID NO: 335905 - DNA, 15 bp, Homo sapiens
aatcccccactgcca

SEQ ID NO: 335906 - DNA, 15 bp, Homo sapiens
caatcccccactgcc

SEQ ID NO: 335907 - DNA, 15 bp, Homo sapiens
tcaatcccccactgc

SEQ ID NO: 335908 - DNA, 15 bp, Homo sapiens
ctcaatcccccactg

SEQ ID NO: 335909 - DNA, 15 bp, Homo sapiens
gctcaatcccccact

SEQ ID NO: 335910 - DNA, 15 bp, Homo sapiens
ggctcaatcccccac

SEQ ID NO: 335911 - DNA, 15 bp, Homo sapiens
aggctcaatccccca

SEQ ID NO: 335912 - DNA, 15 bp, Homo sapiens
gaggctcaatccccc

SEQ ID NO: 335913 - DNA, 15 bp, Homo sapiens
tgaggctcaatcccc

SEQ ID NO: 335914 - DNA, 15 bp, Homo sapiens
ttgaggctcaatccc

SEQ ID NO: 335915 - DNA, 15 bp, Homo sapiens
cttgaggctcaatcc

SEQ ID NO: 335916 - DNA, 15 bp, Homo sapiens
ccttgaggctcaatc

SEQ ID NO: 335917 - DNA, 15 bp, Homo sapiens
cccttgaggctcaat

SEQ ID NO: 335918 - DNA, 15 bp, Homo sapiens
tcccttgaggctcaa

SEQ ID NO: 335919 - DNA, 15 bp, Homo sapiens
ttcccttgaggctca

SEQ ID NO: 335920 - DNA, 15 bp, Homo sapiens
cttcccttgaggctc

SEQ ID NO: 335921 - DNA, 15 bp, Homo sapiens
gcttcccttgaggct

SEQ ID NO: 335922 - DNA, 15 bp, Homo sapiens
cgcttcccttgaggc

SEQ ID NO: 335923 - DNA, 15 bp, Homo sapiens
gcgcttcccttgagg

SEQ ID NO: 335924 - DNA, 15 bp, Homo sapiens
agcgcttcccttgag

SEQ ID NO: 335925 - DNA, 15 bp, Homo sapiens
cagcgcttcccttga

SEQ ID NO: 335926 - DNA, 15 bp, Homo sapiens
ccagcgcttcccttg

SEQ ID NO: 335927 - DNA, 15 bp, Homo sapiens
cccagcgcttccctt

SEQ ID NO: 335928 - DNA, 15 bp, Homo sapiens
tcccagcgcttccct

SEQ ID NO: 335929 - DNA, 15 bp, Homo sapiens
ttcccagcgcttccc

SEQ ID NO: 335930 - DNA, 15 bp, Homo sapiens
tttcccagcgcttcc

SEQ ID NO: 335931 - DNA, 15 bp, Homo sapiens
gtttcccagcgcttc

SEQ ID NO: 335932 - DNA, 15 bp, Homo sapiens
tgtttcccagcgctt

SEQ ID NO: 335933 - DNA, 15 bp, Homo sapiens
ctgtttcccagcgct

SEQ ID NO: 335934 - DNA, 15 bp, Homo sapiens
actgtttcccagcgc

SEQ ID NO: 335935 - DNA, 15 bp, Homo sapiens
tactgtttcccagcg

SEQ ID NO: 335936 - DNA, 15 bp, Homo sapiens
ttactgtttcccagc

SEQ ID NO: 335937 - DNA, 15 bp, Homo sapiens
gttactgtttcccag

SEQ ID NO: 335938 - DNA, 15 bp, Homo sapiens
ggttactgtttccca

SEQ ID NO: 335939 - DNA, 15 bp, Homo sapiens
gggttactgtttccc

SEQ ID NO: 335940 - DNA, 15 bp, Homo sapiens
agggttactgtttcc

SEQ ID NO: 335941 - DNA, 15 bp, Homo sapiens
cagggttactgtttc

SEQ ID NO: 335942 - DNA, 15 bp, Homo sapiens
tcagggttactgttt

SEQ ID NO: 335943 - DNA, 15 bp, Homo sapiens
ttcagggttactgtt

SEQ ID NO: 335944 - DNA, 15 bp, Homo sapiens
cttcagggttactgt

SEQ ID NO: 335945 - DNA, 15 bp, Homo sapiens
ccttcagggttactg

SEQ ID NO: 335946 - DNA, 15 bp, Homo sapiens
tccttcagggttact

SEQ ID NO: 335947 - DNA, 15 bp, Homo sapiens
gtccttcagggttac

SEQ ID NO: 335948 - DNA, 15 bp, Homo sapiens
tgtccttcagggtta

SEQ ID NO: 335949 - DNA, 15 bp, Homo sapiens
atgtccttcagggtt

SEQ ID NO: 335950 - DNA, 15 bp, Homo sapiens
catgtccttcagggt

SEQ ID NO: 335951 - DNA, 15 bp, Homo sapiens
gcatgtccttcaggg

SEQ ID NO: 335952 - DNA, 15 bp, Homo sapiens
ggcatgtccttcagg

SEQ ID NO: 335953 - DNA, 15 bp, Homo sapiens
gggcatgtccttcag

SEQ ID NO: 335954 - DNA, 15 bp, Homo sapiens
ggggcatgtccttca

SEQ ID NO: 335955 - DNA, 15 bp, Homo sapiens
tggggcatgtccttc

SEQ ID NO: 335956 - DNA, 15 bp, Homo sapiens
ttggggcatgtcctt

SEQ ID NO: 335957 - DNA, 15 bp, Homo sapiens
tttggggcatgtcct

SEQ ID NO: 335958 - DNA, 15 bp, Homo sapiens
atttggggcatgtcc

SEQ ID NO: 335959 - DNA, 15 bp, Homo sapiens
gatttggggcatgtc

SEQ ID NO: 335960 - DNA, 15 bp, Homo sapiens
tgatttggggcatgt

SEQ ID NO: 335961 - DNA, 15 bp, Homo sapiens
ctgatttggggcatg

SEQ ID NO: 335962 - DNA, 15 bp, Homo sapiens
cctgatttggggcat

SEQ ID NO: 335963 - DNA, 15 bp, Homo sapiens
ccctgatttggggca

SEQ ID NO: 335964 - DNA, 15 bp, Homo sapiens
tccctgatttggggc

SEQ ID NO: 335965 - DNA, 15 bp, Homo sapiens
ttccctgatttgggg

SEQ ID NO: 335966 - DNA, 15 bp, Homo sapiens
tttccctgatttggg

SEQ ID NO: 335967 - DNA, 15 bp, Homo sapiens
gtttccctgatttgg

SEQ ID NO: 335968 - DNA, 15 bp, Homo sapiens
ggtttccctgatttg

SEQ ID NO: 335969 - DNA, 15 bp, Homo sapiens
aggtttccctgattt

SEQ ID NO: 335970 - DNA, 15 bp, Homo sapiens
caggtttccctgatt

SEQ ID NO: 335971 - DNA, 15 bp, Homo sapiens
gcaggtttccctgat

SEQ ID NO: 335972 - DNA, 15 bp, Homo sapiens
tgcaggtttccctga

SEQ ID NO: 335973 - DNA, 15 bp, Homo sapiens
atgcaggtttccctg

SEQ ID NO: 335974 - DNA, 15 bp, Homo sapiens
aatgcaggtttccct

SEQ ID NO: 335975 - DNA, 15 bp, Homo sapiens
taatgcaggtttccc

SEQ ID NO: 335976 - DNA, 15 bp, Homo sapiens
ttaatgcaggtttcc

SEQ ID NO: 335977 - DNA, 15 bp, Homo sapiens
cttaatgcaggtttc

SEQ ID NO: 335978 - DNA, 15 bp, Homo sapiens
tcttaatgcaggttt

SEQ ID NO: 335979 - DNA, 15 bp, Homo sapiens
gtcttaatgcaggtt

SEQ ID NO: 335980 - DNA, 15 bp, Homo sapiens
agtcttaatgcaggt

SEQ ID NO: 335981 - DNA, 15 bp, Homo sapiens
tagtcttaatgcagg

SEQ ID NO: 335982 - DNA, 15 bp, Homo sapiens
ttagtcttaatgcag

SEQ ID NO: 335983 - DNA, 15 bp, Homo sapiens
cttagtcttaatgca

SEQ ID NO: 335984 - DNA, 15 bp, Homo sapiens
acttagtcttaatgc

SEQ ID NO: 335985 - DNA, 15 bp, Homo sapiens
tacttagtcttaatg

SEQ ID NO: 335986 - DNA, 15 bp, Homo sapiens
ctacttagtcttaat

SEQ ID NO: 335987 - DNA, 15 bp, Homo sapiens
gctacttagtcttaa

SEQ ID NO: 335988 - DNA, 15 bp, Homo sapiens
ggctacttagtctta

SEQ ID NO: 335989 - DNA, 15 bp, Homo sapiens
tggctacttagtctt

SEQ ID NO: 335990 - DNA, 15 bp, Homo sapiens
ttggctacttagtct

SEQ ID NO: 335991 - DNA, 15 bp, Homo sapiens
cttggctacttagtc

SEQ ID NO: 335992 - DNA, 15 bp, Homo sapiens
tcttggctacttagt

SEQ ID NO: 335993 - DNA, 15 bp, Homo sapiens
ttcttggctacttag

SEQ ID NO: 335994 - DNA, 15 bp, Homo sapiens
tttcttggctactta

SEQ ID NO: 335995 - DNA, 15 bp, Homo sapiens
ttttcttggctactt

SEQ ID NO: 335996 - DNA, 15 bp, Homo sapiens
cttttcttggctact

SEQ ID NO: 335997 - DNA, 15 bp, Homo sapiens
gcttttcttggctac

SEQ ID NO: 335998 - DNA, 15 bp, Homo sapiens
tgcttttcttggcta

SEQ ID NO: 335999 - DNA, 15 bp, Homo sapiens
gtgcttttcttggct

SEQ ID NO: 336000 - DNA, 15 bp, Homo sapiens
agtgcttttcttggc

SEQ ID NO: 336001 - DNA, 15 bp, Homo sapiens
tagtgcttttcttgg

SEQ ID NO: 336002 - DNA, 15 bp, Homo sapiens
gtagtgcttttcttg

SEQ ID NO: 336003 - DNA, 15 bp, Homo sapiens
ggtagtgcttttctt

SEQ ID NO: 336004 - DNA, 15 bp, Homo sapiens
tggtagtgcttttct

SEQ ID NO: 336005 - DNA, 15 bp, Homo sapiens
ctggtagtgcttttc

SEQ ID NO: 336006 - DNA, 15 bp, Homo sapiens
cctggtagtgctttt

SEQ ID NO: 336007 - DNA, 15 bp, Homo sapiens
acctggtagtgcttt

SEQ ID NO: 336008 - DNA, 15 bp, Homo sapiens
cacctggtagtgctt

SEQ ID NO: 336009 - DNA, 15 bp, Homo sapiens
tcacctggtagtgct

SEQ ID NO: 336010 - DNA, 15 bp, Homo sapiens
ctcacctggtagtgc

SEQ ID NO: 336011 - DNA, 15 bp, Homo sapiens
tctcacctggtagtg

SEQ ID NO: 336012 - DNA, 15 bp, Homo sapiens
ttctcacctggtagt

SEQ ID NO: 336013 - DNA, 15 bp, Homo sapiens
cttctcacctggtag

SEQ ID NO: 336014 - DNA, 15 bp, Homo sapiens
ccttctcacctggta

SEQ ID NO: 336015 - DNA, 15 bp, Homo sapiens
tccttctcacctggt

SEQ ID NO: 336016 - DNA, 15 bp, Homo sapiens
ttccttctcacctgg

SEQ ID NO: 336017 - DNA, 15 bp, Homo sapiens
tttccttctcacctg

SEQ ID NO: 336018 - DNA, 15 bp, Homo sapiens
ctttccttctcacct

SEQ ID NO: 336019 - DNA, 15 bp, Homo sapiens
cctttccttctcacc

SEQ ID NO: 336020 - DNA, 15 bp, Homo sapiens
tcctttccttctcac

SEQ ID NO: 336021 - DNA, 15 bp, Homo sapiens
ttcctttccttctca

SEQ ID NO: 336022 - DNA, 15 bp, Homo sapiens
tttcctttccttctc

SEQ ID NO: 336023 - DNA, 15 bp, Homo sapiens
ctttcctttccttct

SEQ ID NO: 336024 - DNA, 15 bp, Homo sapiens
cctttcctttccttc

SEQ ID NO: 336025 - DNA, 15 bp, Homo sapiens
gcctttcctttcctt

SEQ ID NO: 336026 - DNA, 15 bp, Homo sapiens
ggcctttcctttcct

SEQ ID NO: 336027 - DNA, 15 bp, Homo sapiens
tggcctttcctttcc

SEQ ID NO: 336028 - DNA, 15 bp, Homo sapiens
ctggcctttcctttc

SEQ ID NO: 336029 - DNA, 15 bp, Homo sapiens
gctggcctttccttt

SEQ ID NO: 336030 - DNA, 15 bp, Homo sapiens
agctggcctttcctt

SEQ ID NO: 336031 - DNA, 15 bp, Homo sapiens
aagctggcctttcct

SEQ ID NO: 336032 - DNA, 15 bp, Homo sapiens
caagctggcctttcc

SEQ ID NO: 336033 - DNA, 15 bp, Homo sapiens
gcaagctggcctttc

SEQ ID NO: 336034 - DNA, 15 bp, Homo sapiens
tgcaagctggccttt

SEQ ID NO: 336035 - DNA, 15 bp, Homo sapiens
ctgcaagctggcctt

SEQ ID NO: 336036 - DNA, 15 bp, Homo sapiens
cctgcaagctggcct

SEQ ID NO: 336037 - DNA, 15 bp, Homo sapiens
tcctgcaagctggcc

SEQ ID NO: 336038 - DNA, 15 bp, Homo sapiens
ctcctgcaagctggc

SEQ ID NO: 336039 - DNA, 15 bp, Homo sapiens
actcctgcaagctgg

SEQ ID NO: 336040 - DNA, 15 bp, Homo sapiens
cactcctgcaagctg

SEQ ID NO: 336041 - DNA, 15 bp, Homo sapiens
acactcctgcaagct

SEQ ID NO: 336042 - DNA, 15 bp, Homo sapiens
gacactcctgcaagc

SEQ ID NO: 336043 - DNA, 15 bp, Homo sapiens
tgacactcctgcaag

SEQ ID NO: 336044 - DNA, 15 bp, Homo sapiens
atgacactcctgcaa

SEQ ID NO: 336045 - DNA, 15 bp, Homo sapiens
catgacactcctgca

SEQ ID NO: 336046 - DNA, 15 bp, Homo sapiens
ccatgacactcctgc

SEQ ID NO: 336047 - DNA, 15 bp, Homo sapiens
tccatgacactcctg

SEQ ID NO: 336048 - DNA, 15 bp, Homo sapiens
ctccatgacactcct

SEQ ID NO: 336049 - DNA, 15 bp, Homo sapiens
tctccatgacactcc

SEQ ID NO: 336050 - DNA, 15 bp, Homo sapiens
ctctccatgacactc

SEQ ID NO: 336051 - DNA, 15 bp, Homo sapiens
cctctccatgacact

SEQ ID NO: 336052 - DNA, 15 bp, Homo sapiens
acctctccatgacac

SEQ ID NO: 336053 - DNA, 15 bp, Homo sapiens
cacctctccatgaca

SEQ ID NO: 336054 - DNA, 15 bp, Homo sapiens
ccacctctccatgac

SEQ ID NO: 336055 - DNA, 15 bp, Homo sapiens
accacctctccatga

SEQ ID NO: 336056 - DNA, 15 bp, Homo sapiens
caccacctctccatg

SEQ ID NO: 336057 - DNA, 15 bp, Homo sapiens
tcaccacctctccat

SEQ ID NO: 336058 - DNA, 15 bp, Homo sapiens
atcaccacctctcca

SEQ ID NO: 336059 - DNA, 15 bp, Homo sapiens
catcaccacctctcc

SEQ ID NO: 336060 - DNA, 15 bp, Homo sapiens
gcatcaccacctctc

SEQ ID NO: 336061 - DNA, 15 bp, Homo sapiens
tgcatcaccacctct

SEQ ID NO: 336062 - DNA, 15 bp, Homo sapiens
ctgcatcaccacctc

SEQ ID NO: 336063 - DNA, 15 bp, Homo sapiens
tctgcatcaccacct

SEQ ID NO: 336064 - DNA, 15 bp, Homo sapiens
gtctgcatcaccacc

SEQ ID NO: 336065 - DNA, 15 bp, Homo sapiens
tgtctgcatcaccac

SEQ ID NO: 336066 - DNA, 15 bp, Homo sapiens
gtgtctgcatcacca

SEQ ID NO: 336067 - DNA, 15 bp, Homo sapiens
ggtgtctgcatcacc

SEQ ID NO: 336068 - DNA, 15 bp, Homo sapiens
tggtgtctgcatcac

SEQ ID NO: 336069 - DNA, 15 bp, Homo sapiens
ttggtgtctgcatca

SEQ ID NO: 336070 - DNA, 15 bp, Homo sapiens
cttggtgtctgcatc

SEQ ID NO: 336071 - DNA, 15 bp, Homo sapiens
ccttggtgtctgcat

SEQ ID NO: 336072 - DNA, 15 bp, Homo sapiens
cccttggtgtctgca

SEQ ID NO: 336073 - DNA, 15 bp, Homo sapiens
acccttggtgtctgc

SEQ ID NO: 336074 - DNA, 15 bp, Homo sapiens
aacccttggtgtctg

SEQ ID NO: 336075 - DNA, 15 bp, Homo sapiens
gaacccttggtgtct

SEQ ID NO: 336076 - DNA, 15 bp, Homo sapiens
tgaacccttggtgtc

SEQ ID NO: 336077 - DNA, 15 bp, Homo sapiens
ttgaacccttggtgt

SEQ ID NO: 336078 - DNA, 15 bp, Homo sapiens
cttgaacccttggtg

SEQ ID NO: 336079 - DNA, 15 bp, Homo sapiens
ccttgaacccttggt

SEQ ID NO: 336080 - DNA, 15 bp, Homo sapiens
accttgaacccttgg

SEQ ID NO: 336081 - DNA, 15 bp, Homo sapiens
gaccttgaacccttg

SEQ ID NO: 336082 - DNA, 15 bp, Homo sapiens
tgaccttgaaccctt

SEQ ID NO: 336083 - DNA, 15 bp, Homo sapiens
ttgaccttgaaccct

SEQ ID NO: 336084 - DNA, 15 bp, Homo sapiens
gttgaccttgaaccc

SEQ ID NO: 336085 - DNA, 15 bp, Homo sapiens
ggttgaccttgaacc

SEQ ID NO: 336086 - DNA, 15 bp, Homo sapiens
aggttgaccttgaac

SEQ ID NO: 336087 - DNA, 15 bp, Homo sapiens
taggttgaccttgaa

SEQ ID NO: 336088 - DNA, 15 bp, Homo sapiens
ctaggttgaccttga

SEQ ID NO: 336089 - DNA, 15 bp, Homo sapiens
cctaggttgaccttg

SEQ ID NO: 336090 - DNA, 15 bp, Homo sapiens
ccctaggttgacctt

SEQ ID NO: 336091 - DNA, 15 bp, Homo sapiens
cccctaggttgacct

SEQ ID NO: 336092 - DNA, 15 bp, Homo sapiens
ccccctaggttgacc

SEQ ID NO: 336093 - DNA, 15 bp, Homo sapiens
cccccctaggttgac

SEQ ID NO: 336094 - DNA, 15 bp, Homo sapiens
gcccccctaggttga

SEQ ID NO: 336095 - DNA, 15 bp, Homo sapiens
tgcccccctaggttg

SEQ ID NO: 336096 - DNA, 15 bp, Homo sapiens
ttgcccccctaggtt

SEQ ID NO: 336097 - DNA, 15 bp, Homo sapiens
tttgcccccctaggt

SEQ ID NO: 336098 - DNA, 15 bp, Homo sapiens
gtttgcccccctagg

SEQ ID NO: 336099 - DNA, 15 bp, Homo sapiens
cgtttgcccccctag

SEQ ID NO: 336100 - DNA, 15 bp, Homo sapiens
acgtttgccccccta

SEQ ID NO: 336101 - DNA, 15 bp, Homo sapiens
cacgtttgcccccct

SEQ ID NO: 336102 - DNA, 15 bp, Homo sapiens
tcacgtttgcccccc

SEQ ID NO: 336103 - DNA, 15 bp, Homo sapiens
ttcacgtttgccccc

SEQ ID NO: 336104 - DNA, 15 bp, Homo sapiens
cttcacgtttgcccc

SEQ ID NO: 336105 - DNA, 15 bp, Homo sapiens
gcttcacgtttgccc

SEQ ID NO: 336106 - DNA, 15 bp, Homo sapiens
agcttcacgtttgcc

SEQ ID NO: 336107 - DNA, 15 bp, Homo sapiens
aagcttcacgtttgc

SEQ ID NO: 336108 - DNA, 15 bp, Homo sapiens
aaagcttcacgtttg

SEQ ID NO: 336109 - DNA, 15 bp, Homo sapiens
caaagcttcacgttt

SEQ ID NO: 336110 - DNA, 15 bp, Homo sapiens
ccaaagcttcacgtt

SEQ ID NO: 336111 - DNA, 15 bp, Homo sapiens
accaaagcttcacgt

SEQ ID NO: 336112 - DNA, 15 bp, Homo sapiens
caccaaagcttcacg

SEQ ID NO: 336113 - DNA, 15 bp, Homo sapiens
gcaccaaagcttcac

SEQ ID NO: 336114 - DNA, 15 bp, Homo sapiens
agcaccaaagcttca

SEQ ID NO: 336115 - DNA, 15 bp, Homo sapiens
cagcaccaaagcttc

SEQ ID NO: 336116 - DNA, 15 bp, Homo sapiens
tcagcaccaaagctt

SEQ ID NO: 336117 - DNA, 15 bp, Homo sapiens
gtcagcaccaaagct

SEQ ID NO: 336118 - DNA, 15 bp, Homo sapiens
ggtcagcaccaaagc

SEQ ID NO: 336119 - DNA, 15 bp, Homo sapiens
tggtcagcaccaaag

SEQ ID NO: 336120 - DNA, 15 bp, Homo sapiens
gtggtcagcaccaaa

SEQ ID NO: 336121 - DNA, 15 bp, Homo sapiens
agtggtcagcaccaa

SEQ ID NO: 336122 - DNA, 15 bp, Homo sapiens
cagtggtcagcacca

SEQ ID NO: 336123 - DNA, 15 bp, Homo sapiens
acagtggtcagcacc

SEQ ID NO: 336124 - DNA, 15 bp, Homo sapiens
cacagtggtcagcac

SEQ ID NO: 336125 - DNA, 15 bp, Homo sapiens
acacagtggtcagca

SEQ ID NO: 336126 - DNA, 15 bp, Homo sapiens
cacacagtggtcagc

SEQ ID NO: 336127 - DNA, 15 bp, Homo sapiens
ccacacagtggtcag

SEQ ID NO: 336128 - DNA, 15 bp, Homo sapiens
accacacagtggtca

SEQ ID NO: 336129 - DNA, 15 bp, Homo sapiens
aaccacacagtggtc

SEQ ID NO: 336130 - DNA, 15 bp, Homo sapiens
aaaccacacagtggt

SEQ ID NO: 336131 - DNA, 15 bp, Homo sapiens
taaaccacacagtgg

SEQ ID NO: 336132 - DNA, 15 bp, Homo sapiens
ctaaaccacacagtg

SEQ ID NO: 336133 - DNA, 15 bp, Homo sapiens
cctaaaccacacagt

SEQ ID NO: 336134 - DNA, 15 bp, Homo sapiens
acctaaaccacacag

SEQ ID NO: 336135 - DNA, 15 bp, Homo sapiens
gacctaaaccacaca

SEQ ID NO: 336136 - DNA, 15 bp, Homo sapiens
cgacctaaaccacac

SEQ ID NO: 336137 - DNA, 15 bp, Homo sapiens
acgacctaaaccaca

SEQ ID NO: 336138 - DNA, 15 bp, Homo sapiens
aacgacctaaaccac

SEQ ID NO: 336139 - DNA, 15 bp, Homo sapiens
caacgacctaaacca

SEQ ID NO: 336140 - DNA, 15 bp, Homo sapiens
ccaacgacctaaacc

SEQ ID NO: 336141 - DNA, 15 bp, Homo sapiens
cccaacgacctaaac

SEQ ID NO: 336142 - DNA, 15 bp, Homo sapiens
acccaacgacctaaa

SEQ ID NO: 336143 - DNA, 15 bp, Homo sapiens
gacccaacgacctaa

SEQ ID NO: 336144 - DNA, 15 bp, Homo sapiens
agacccaacgaccta

SEQ ID NO: 336145 - DNA, 15 bp, Homo sapiens
gagacccaacgacct

SEQ ID NO: 336146 - DNA, 15 bp, Homo sapiens
agagacccaacgacc

SEQ ID NO: 336147 - DNA, 15 bp, Homo sapiens
tagagacccaacgac

SEQ ID NO: 336148 - DNA, 15 bp, Homo sapiens
ttagagacccaacga

SEQ ID NO: 336149 - DNA, 15 bp, Homo sapiens
gttagagacccaacg

SEQ ID NO: 336150 - DNA, 15 bp, Homo sapiens
ggttagagacccaac

SEQ ID NO: 336151 - DNA, 15 bp, Homo sapiens
gggttagagacccaa

SEQ ID NO: 336152 - DNA, 15 bp, Homo sapiens
ggggttagagaccca

SEQ ID NO: 336153 - DNA, 15 bp, Homo sapiens
gggggttagagaccc

SEQ ID NO: 336154 - DNA, 15 bp, Homo sapiens
ggggggttagagacc

SEQ ID NO: 336155 - DNA, 15 bp, Homo sapiens
tggggggttagagac

SEQ ID NO: 336156 - DNA, 15 bp, Homo sapiens
gtggggggttagaga

SEQ ID NO: 336157 - DNA, 15 bp, Homo sapiens
cgtggggggttagag

SEQ ID NO: 336158 - DNA, 15 bp, Homo sapiens
gcgtggggggttaga

SEQ ID NO: 336159 - DNA, 15 bp, Homo sapiens
ggcgtggggggttag

SEQ ID NO: 336160 - DNA, 15 bp, Homo sapiens
gggcgtggggggtta

SEQ ID NO: 336161 - DNA, 15 bp, Homo sapiens
agggcgtggggggtt

SEQ ID NO: 336162 - DNA, 15 bp, Homo sapiens
cagggcgtggggggt

SEQ ID NO: 336163 - DNA, 15 bp, Homo sapiens
gcagggcgtgggggg

SEQ ID NO: 336164 - DNA, 15 bp, Homo sapiens
agcagggcgtggggg

SEQ ID NO: 336165 - DNA, 15 bp, Homo sapiens
aagcagggcgtgggg

SEQ ID NO: 336166 - DNA, 15 bp, Homo sapiens
gaagcagggcgtggg

SEQ ID NO: 336167 - DNA, 15 bp, Homo sapiens
ggaagcagggcgtgg

SEQ ID NO: 336168 - DNA, 15 bp, Homo sapiens
aggaagcagggcgtg

SEQ ID NO: 336169 - DNA, 15 bp, Homo sapiens
caggaagcagggcgt

SEQ ID NO: 336170 - DNA, 15 bp, Homo sapiens
acaggaagcagggcg

SEQ ID NO: 336171 - DNA, 15 bp, Homo sapiens
tacaggaagcagggc

SEQ ID NO: 336172 - DNA, 15 bp, Homo sapiens
atacaggaagcaggg

SEQ ID NO: 336173 - DNA, 15 bp, Homo sapiens
catacaggaagcagg

SEQ ID NO: 336174 - DNA, 15 bp, Homo sapiens
tcatacaggaagcag

SEQ ID NO: 336175 - DNA, 15 bp, Homo sapiens
atcatacaggaagca

SEQ ID NO: 336176 - DNA, 15 bp, Homo sapiens
tatcatacaggaagc

SEQ ID NO: 336177 - DNA, 15 bp, Homo sapiens
gtatcatacaggaag

SEQ ID NO: 336178 - DNA, 15 bp, Homo sapiens
tgtatcatacaggaa

SEQ ID NO: 336179 - DNA, 15 bp, Homo sapiens
ctgtatcatacagga

SEQ ID NO: 336180 - DNA, 15 bp, Homo sapiens
actgtatcatacagg

SEQ ID NO: 336181 - DNA, 15 bp, Homo sapiens
cactgtatcatacag

SEQ ID NO: 336182 - DNA, 15 bp, Homo sapiens
gcactgtatcataca

SEQ ID NO: 336183 - DNA, 15 bp, Homo sapiens
agcactgtatcatac

SEQ ID NO: 336184 - DNA, 15 bp, Homo sapiens
cagcactgtatcata

SEQ ID NO: 336185 - DNA, 15 bp, Homo sapiens
gcagcactgtatcat

SEQ ID NO: 336186 - DNA, 15 bp, Homo sapiens
agcagcactgtatca

SEQ ID NO: 336187 - DNA, 15 bp, Homo sapiens
cagcagcactgtatc

SEQ ID NO: 336188 - DNA, 15 bp, Homo sapiens
ccagcagcactgtat

SEQ ID NO: 336189 - DNA, 15 bp, Homo sapiens
accagcagcactgta

SEQ ID NO: 336190 - DNA, 15 bp, Homo sapiens
aaccagcagcactgt

SEQ ID NO: 336191 - DNA, 15 bp, Homo sapiens
gaaccagcagcactg

SEQ ID NO: 336192 - DNA, 15 bp, Homo sapiens
agaaccagcagcact

SEQ ID NO: 336193 - DNA, 15 bp, Homo sapiens
gagaaccagcagcac

SEQ ID NO: 336194 - DNA, 15 bp, Homo sapiens
agagaaccagcagca

SEQ ID NO: 336195 - DNA, 15 bp, Homo sapiens
aagagaaccagcagc

SEQ ID NO: 336196 - DNA, 15 bp, Homo sapiens
caagagaaccagcag

SEQ ID NO: 336197 - DNA, 15 bp, Homo sapiens
tcaagagaaccagca

SEQ ID NO: 336198 - DNA, 15 bp, Homo sapiens
ctcaagagaaccagc

SEQ ID NO: 336199 - DNA, 15 bp, Homo sapiens
tctcaagagaaccag

SEQ ID NO: 336200 - DNA, 15 bp, Homo sapiens
ttctcaagagaacca

SEQ ID NO: 336201 - DNA, 15 bp, Homo sapiens
cttctcaagagaacc

SEQ ID NO: 336202 - DNA, 15 bp, Homo sapiens
acttctcaagagaac

SEQ ID NO: 336203 - DNA, 15 bp, Homo sapiens
tacttctcaagagaa

SEQ ID NO: 336204 - DNA, 15 bp, Homo sapiens
gtacttctcaagaga

SEQ ID NO: 336205 - DNA, 15 bp, Homo sapiens
agtacttctcaagag

SEQ ID NO: 336206 - DNA, 15 bp, Homo sapiens
aagtacttctcaaga

SEQ ID NO: 336207 - DNA, 15 bp, Homo sapiens
gaagtacttctcaag

SEQ ID NO: 336208 - DNA, 15 bp, Homo sapiens
agaagtacttctcaa

SEQ ID NO: 336209 - DNA, 15 bp, Homo sapiens
aagaagtacttctca

SEQ ID NO: 336210 - DNA, 15 bp, Homo sapiens
taagaagtacttctc

SEQ ID NO: 336211 - DNA, 15 bp, Homo sapiens
ttaagaagtacttct

SEQ ID NO: 336212 - DNA, 15 bp, Homo sapiens
tttaagaagtacttc

SEQ ID NO: 336213 - DNA, 15 bp, Homo sapiens
ttttaagaagtactt

SEQ ID NO: 336214 - DNA, 15 bp, Homo sapiens
attttaagaagtact

SEQ ID NO: 336215 - DNA, 15 bp, Homo sapiens
aattttaagaagtac

SEQ ID NO: 336216 - DNA, 15 bp, Homo sapiens
gaattttaagaagta

SEQ ID NO: 336217 - DNA, 15 bp, Homo sapiens
tgaattttaagaagt

SEQ ID NO: 336218 - DNA, 15 bp, Homo sapiens
atgaattttaagaag

SEQ ID NO: 336219 - DNA, 15 bp, Homo sapiens
aatgaattttaagaa

SEQ ID NO: 336220 - DNA, 15 bp, Homo sapiens
gaatgaattttaaga

SEQ ID NO: 336221 - DNA, 15 bp, Homo sapiens
ggaatgaattttaag

SEQ ID NO: 336222 - DNA, 15 bp, Homo sapiens
gggaatgaattttaa

SEQ ID NO: 336223 - DNA, 15 bp, Homo sapiens
tgggaatgaatttta

SEQ ID NO: 336224 - DNA, 15 bp, Homo sapiens
atgggaatgaatttt

SEQ ID NO: 336225 - DNA, 15 bp, Homo sapiens
gatgggaatgaattt

SEQ ID NO: 336226 - DNA, 15 bp, Homo sapiens
tgatgggaatgaatt

SEQ ID NO: 336227 - DNA, 15 bp, Homo sapiens
atgatgggaatgaat

SEQ ID NO: 336228 - DNA, 15 bp, Homo sapiens
catgatgggaatgaa

SEQ ID NO: 336229 - DNA, 15 bp, Homo sapiens
acatgatgggaatga

SEQ ID NO: 336230 - DNA, 15 bp, Homo sapiens
gacatgatgggaatg

SEQ ID NO: 336231 - DNA, 15 bp, Homo sapiens
tgacatgatgggaat

SEQ ID NO: 336232 - DNA, 15 bp, Homo sapiens
ctgacatgatgggaa

SEQ ID NO: 336233 - DNA, 15 bp, Homo sapiens
cctgacatgatggga

SEQ ID NO: 336234 - DNA, 15 bp, Homo sapiens
ccctgacatgatggg

SEQ ID NO: 336235 - DNA, 15 bp, Homo sapiens
cccctgacatgatgg

SEQ ID NO: 336236 - DNA, 15 bp, Homo sapiens
gcccctgacatgatg

SEQ ID NO: 336237 - DNA, 15 bp, Homo sapiens
agcccctgacatgat

SEQ ID NO: 336238 - DNA, 15 bp, Homo sapiens
tagcccctgacatga

SEQ ID NO: 336239 - DNA, 15 bp, Homo sapiens
gtagcccctgacatg

SEQ ID NO: 336240 - DNA, 15 bp, Homo sapiens
ggtagcccctgacat

SEQ ID NO: 336241 - DNA, 15 bp, Homo sapiens
tggtagcccctgaca

SEQ ID NO: 336242 - DNA, 15 bp, Homo sapiens
ttggtagcccctgac

SEQ ID NO: 336243 - DNA, 15 bp, Homo sapiens
attggtagcccctga

SEQ ID NO: 336244 - DNA, 15 bp, Homo sapiens
cattggtagcccctg

SEQ ID NO: 336245 - DNA, 15 bp, Homo sapiens
ccattggtagcccct

SEQ ID NO: 336246 - DNA, 15 bp, Homo sapiens
accattggtagcccc

SEQ ID NO: 336247 - DNA, 15 bp, Homo sapiens
caccattggtagccc

SEQ ID NO: 336248 - DNA, 15 bp, Homo sapiens
tcaccattggtagcc

SEQ ID NO: 336249 - DNA, 15 bp, Homo sapiens
ctcaccattggtagc

SEQ ID NO: 336250 - DNA, 15 bp, Homo sapiens
tctcaccattggtag

SEQ ID NO: 336251 - DNA, 15 bp, Homo sapiens
atctcaccattggta

SEQ ID NO: 336252 - DNA, 15 bp, Homo sapiens
catctcaccattggt

SEQ ID NO: 336253 - DNA, 15 bp, Homo sapiens
gcatctcaccattgg

SEQ ID NO: 336254 - DNA, 15 bp, Homo sapiens
tgcatctcaccattg

SEQ ID NO: 336255 - DNA, 15 bp, Homo sapiens
atgcatctcaccatt

SEQ ID NO: 336256 - DNA, 15 bp, Homo sapiens
aatgcatctcaccat

SEQ ID NO: 336257 - DNA, 15 bp, Homo sapiens
aaatgcatctcacca

SEQ ID NO: 336258 - DNA, 15 bp, Homo sapiens
aaaatgcatctcacc

SEQ ID NO: 336259 - DNA, 15 bp, Homo sapiens
caaaatgcatctcac

SEQ ID NO: 336260 - DNA, 15 bp, Homo sapiens
ccaaaatgcatctca

SEQ ID NO: 336261 - DNA, 15 bp, Homo sapiens
cccaaaatgcatctc

SEQ ID NO: 336262 - DNA, 15 bp, Homo sapiens
tcccaaaatgcatct

SEQ ID NO: 336263 - DNA, 15 bp, Homo sapiens
ctcccaaaatgcatc

SEQ ID NO: 336264 - DNA, 15 bp, Homo sapiens
cctcccaaaatgcat

SEQ ID NO: 336265 - DNA, 15 bp, Homo sapiens
tcctcccaaaatgca

SEQ ID NO: 336266 - DNA, 15 bp, Homo sapiens
ctcctcccaaaatgc

SEQ ID NO: 336267 - DNA, 15 bp, Homo sapiens
gctcctcccaaaatg

SEQ ID NO: 336268 - DNA, 15 bp, Homo sapiens
tgctcctcccaaaat

SEQ ID NO: 336269 - DNA, 15 bp, Homo sapiens
ctgctcctcccaaaa

SEQ ID NO: 336270 - DNA, 15 bp, Homo sapiens
cctgctcctcccaaa

SEQ ID NO: 336271 - DNA, 15 bp, Homo sapiens
tcctgctcctcccaa

SEQ ID NO: 336272 - DNA, 15 bp, Homo sapiens
gtcctgctcctccca

SEQ ID NO: 336273 - DNA, 15 bp, Homo sapiens
cgtcctgctcctccc

SEQ ID NO: 336274 - DNA, 15 bp, Homo sapiens
tcgtcctgctcctcc

SEQ ID NO: 336275 - DNA, 15 bp, Homo sapiens
ctcgtcctgctcctc

SEQ ID NO: 336276 - DNA, 15 bp, Homo sapiens
cctcgtcctgctcct

SEQ ID NO: 336277 - DNA, 15 bp, Homo sapiens
tcctcgtcctgctcc

SEQ ID NO: 336278 - DNA, 15 bp, Homo sapiens
ttcctcgtcctgctc

SEQ ID NO: 336279 - DNA, 15 bp, Homo sapiens
tttcctcgtcctgct

SEQ ID NO: 336280 - DNA, 15 bp, Homo sapiens
ttttcctcgtcctgc

SEQ ID NO: 336281 - DNA, 15 bp, Homo sapiens
gttttcctcgtcctg

SEQ ID NO: 336282 - DNA, 15 bp, Homo sapiens
tgttttcctcgtcct

SEQ ID NO: 336283 - DNA, 15 bp, Homo sapiens
gtgttttcctcgtcc

SEQ ID NO: 336284 - DNA, 15 bp, Homo sapiens
tgtgttttcctcgtc

SEQ ID NO: 336285 - DNA, 15 bp, Homo sapiens
ttgtgttttcctcgt

SEQ ID NO: 336286 - DNA, 15 bp, Homo sapiens
attgtgttttcctcg

SEQ ID NO: 336287 - DNA, 15 bp, Homo sapiens
aattgtgttttcctc

SEQ ID NO: 336288 - DNA, 15 bp, Homo sapiens
taattgtgttttcct

SEQ ID NO: 336289 - DNA, 15 bp, Homo sapiens
ctaattgtgttttcc

SEQ ID NO: 336290 - DNA, 15 bp, Homo sapiens
tctaattgtgttttc

SEQ ID NO: 336291 - DNA, 15 bp, Homo sapiens
ttctaattgtgtttt

SEQ ID NO: 336292 - DNA, 15 bp, Homo sapiens
cttctaattgtgttt

SEQ ID NO: 336293 - DNA, 15 bp, Homo sapiens
ccttctaattgtgtt

SEQ ID NO: 336294 - DNA, 15 bp, Homo sapiens
gccttctaattgtgt

SEQ ID NO: 336295 - DNA, 15 bp, Homo sapiens
agccttctaattgtg

SEQ ID NO: 336296 - DNA, 15 bp, Homo sapiens
gagccttctaattgt

SEQ ID NO: 336297 - DNA, 15 bp, Homo sapiens
tgagccttctaattg

SEQ ID NO: 336298 - DNA, 15 bp, Homo sapiens
ctgagccttctaatt

SEQ ID NO: 336299 - DNA, 15 bp, Homo sapiens
gctgagccttctaat

SEQ ID NO: 336300 - DNA, 15 bp, Homo sapiens
tgctgagccttctaa

SEQ ID NO: 336301 - DNA, 15 bp, Homo sapiens
ctgctgagccttcta

SEQ ID NO: 336302 - DNA, 15 bp, Homo sapiens
tctgctgagccttct

SEQ ID NO: 336303 - DNA, 15 bp, Homo sapiens
ttctgctgagccttc

SEQ ID NO: 336304 - DNA, 15 bp, Homo sapiens
tttctgctgagcctt

SEQ ID NO: 336305 - DNA, 15 bp, Homo sapiens
ctttctgctgagcct

SEQ ID NO: 336306 - DNA, 15 bp, Homo sapiens
tctttctgctgagcc

SEQ ID NO: 336307 - DNA, 15 bp, Homo sapiens
gtctttctgctgagc

SEQ ID NO: 336308 - DNA, 15 bp, Homo sapiens
tgtctttctgctgag

SEQ ID NO: 336309 - DNA, 15 bp, Homo sapiens
ctgtctttctgctga

SEQ ID NO: 336310 - DNA, 15 bp, Homo sapiens
tctgtctttctgctg

SEQ ID NO: 336311 - DNA, 15 bp, Homo sapiens
ctctgtctttctgct

SEQ ID NO: 336312 - DNA, 15 bp, Homo sapiens
tctctgtctttctgc

SEQ ID NO: 336313 - DNA, 15 bp, Homo sapiens
ctctctgtctttctg

SEQ ID NO: 336314 - DNA, 15 bp, Homo sapiens
actctctgtctttct

SEQ ID NO: 336315 - DNA, 15 bp, Homo sapiens
gactctctgtctttc

SEQ ID NO: 336316 - DNA, 15 bp, Homo sapiens
agactctctgtcttt

SEQ ID NO: 336317 - DNA, 15 bp, Homo sapiens
tagactctctgtctt

SEQ ID NO: 336318 - DNA, 15 bp, Homo sapiens
ctagactctctgtct

SEQ ID NO: 336319 - DNA, 15 bp, Homo sapiens
gctagactctctgtc

SEQ ID NO: 336320 - DNA, 15 bp, Homo sapiens
tgctagactctctgt

SEQ ID NO: 336321 - DNA, 15 bp, Homo sapiens
atgctagactctctg

SEQ ID NO: 336322 - DNA, 15 bp, Homo sapiens
tatgctagactctct

SEQ ID NO: 336323 - DNA, 15 bp, Homo sapiens
atatgctagactctc

SEQ ID NO: 336324 - DNA, 15 bp, Homo sapiens
catatgctagactct

SEQ ID NO: 336325 - DNA, 15 bp, Homo sapiens
acatatgctagactc

SEQ ID NO: 336326 - DNA, 15 bp, Homo sapiens
tacatatgctagact

SEQ ID NO: 336327 - DNA, 15 bp, Homo sapiens
atacatatgctagac

SEQ ID NO: 336328 - DNA, 15 bp, Homo sapiens
aatacatatgctaga

SEQ ID NO: 336329 - DNA, 15 bp, Homo sapiens
aaatacatatgctag

SEQ ID NO: 336330 - DNA, 15 bp, Homo sapiens
caaatacatatgcta

SEQ ID NO: 336331 - DNA, 15 bp, Homo sapiens
tcaaatacatatgct

SEQ ID NO: 336332 - DNA, 15 bp, Homo sapiens
atcaaatacatatgc

SEQ ID NO: 336333 - DNA, 15 bp, Homo sapiens
tatcaaatacatatg

SEQ ID NO: 336334 - DNA, 15 bp, Homo sapiens
atatcaaatacatat

SEQ ID NO: 336335 - DNA, 15 bp, Homo sapiens
tatatcaaatacata

SEQ ID NO: 336336 - DNA, 15 bp, Homo sapiens
ttatatcaaatacat

SEQ ID NO: 336337 - DNA, 15 bp, Homo sapiens
tttatatcaaataca

SEQ ID NO: 336338 - DNA, 15 bp, Homo sapiens
atttatatcaaatac

SEQ ID NO: 336339 - DNA, 15 bp, Homo sapiens
tatttatatcaaata

SEQ ID NO: 336340 - DNA, 15 bp, Homo sapiens
atatttatatcaaat

SEQ ID NO: 336341 - DNA, 15 bp, Homo sapiens
ataatatttatatca

SEQ ID NO: 336342 - DNA, 15 bp, Homo sapiens
tataatatttatatc

SEQ ID NO: 336343 - DNA, 15 bp, Homo sapiens
ctataatatttatat

SEQ ID NO: 336344 - DNA, 15 bp, Homo sapiens
actataatatttata

SEQ ID NO: 336345 - DNA, 15 bp, Homo sapiens
aactataatatttat

SEQ ID NO: 336346 - DNA, 15 bp, Homo sapiens
aaactataatattta

SEQ ID NO: 336347 - DNA, 15 bp, Homo sapiens
aaaactataatattt

SEQ ID NO: 336348 - DNA, 15 bp, Homo sapiens
taaaactataatatt

SEQ ID NO: 336349 - DNA, 15 bp, Homo sapiens
gtaaaactataatat

SEQ ID NO: 336350 - DNA, 15 bp, Homo sapiens
tgtaaaactataata

SEQ ID NO: 336351 - DNA, 15 bp, Homo sapiens
ctgtaaaactataat

SEQ ID NO: 336352 - DNA, 15 bp, Homo sapiens
tctgtaaaactataa

SEQ ID NO: 336353 - DNA, 15 bp, Homo sapiens
ctctgtaaaactata

SEQ ID NO: 336354 - DNA, 15 bp, Homo sapiens
tctctgtaaaactat

SEQ ID NO: 336355 - DNA, 15 bp, Homo sapiens
gtctctgtaaaacta

SEQ ID NO: 336356 - DNA, 15 bp, Homo sapiens
tgtctctgtaaaact

SEQ ID NO: 336357 - DNA, 15 bp, Homo sapiens
atgtctctgtaaaac

SEQ ID NO: 336358 - DNA, 15 bp, Homo sapiens
gatgtctctgtaaaa

SEQ ID NO: 336359 - DNA, 15 bp, Homo sapiens
agatgtctctgtaaa

SEQ ID NO: 336360 - DNA, 15 bp, Homo sapiens
tagatgtctctgtaa

SEQ ID NO: 336361 - DNA, 15 bp, Homo sapiens
ctagatgtctctgta

SEQ ID NO: 336362 - DNA, 15 bp, Homo sapiens
tctagatgtctctgt

SEQ ID NO: 336363 - DNA, 15 bp, Homo sapiens
atctagatgtctctg

SEQ ID NO: 336364 - DNA, 15 bp, Homo sapiens
gatctagatgtctct

SEQ ID NO: 336365 - DNA, 15 bp, Homo sapiens
tgatctagatgtctc

SEQ ID NO: 336366 - DNA, 15 bp, Homo sapiens
ttgatctagatgtct

SEQ ID NO: 336367 - DNA, 15 bp, Homo sapiens
attgatctagatgtc

SEQ ID NO: 336368 - DNA, 15 bp, Homo sapiens
tattgatctagatgt

SEQ ID NO: 336369 - DNA, 15 bp, Homo sapiens
atattgatctagatg

SEQ ID NO: 336370 - DNA, 15 bp, Homo sapiens
catattgatctagat

SEQ ID NO: 336371 - DNA, 15 bp, Homo sapiens
acatattgatctaga

SEQ ID NO: 336372 - DNA, 15 bp, Homo sapiens
cacatattgatctag

SEQ ID NO: 336373 - DNA, 15 bp, Homo sapiens
gcacatattgatcta

SEQ ID NO: 336374 - DNA, 15 bp, Homo sapiens
ggcacatattgatct

SEQ ID NO: 336375 - DNA, 15 bp, Homo sapiens
tggcacatattgatc

SEQ ID NO: 336376 - DNA, 15 bp, Homo sapiens
gtggcacatattgat

SEQ ID NO: 336377 - DNA, 15 bp, Homo sapiens
tgtggcacatattga

SEQ ID NO: 336378 - DNA, 15 bp, Homo sapiens
atgtggcacatattg

SEQ ID NO: 336379 - DNA, 15 bp, Homo sapiens
aatgtggcacatatt

SEQ ID NO: 336380 - DNA, 15 bp, Homo sapiens
gaaatgtggcacata

SEQ ID NO: 336381 - DNA, 15 bp, Homo sapiens
tgaaatgtggcacat

SEQ ID NO: 336382 - DNA, 15 bp, Homo sapiens
atgaaatgtggcaca

SEQ ID NO: 336383 - DNA, 15 bp, Homo sapiens
gatgaaatgtggcac

SEQ ID NO: 336384 - DNA, 15 bp, Homo sapiens
agatgaaatgtggca

SEQ ID NO: 336385 - DNA, 15 bp, Homo sapiens
tagatgaaatgtggc

SEQ ID NO: 336386 - DNA, 15 bp, Homo sapiens
gtagatgaaatgtgg

SEQ ID NO: 336387 - DNA, 15 bp, Homo sapiens
ggtagatgaaatgtg

SEQ ID NO: 336388 - DNA, 15 bp, Homo sapiens
aggtagatgaaatgt

SEQ ID NO: 336389 - DNA, 15 bp, Homo sapiens
gaggtagatgaaatg

SEQ ID NO: 336390 - DNA, 15 bp, Homo sapiens
agaggtagatgaaat

SEQ ID NO: 336391 - DNA, 15 bp, Homo sapiens
aagaggtagatgaaa

SEQ ID NO: 336392 - DNA, 15 bp, Homo sapiens
aaagaggtagatgaa

SEQ ID NO: 336393 - DNA, 15 bp, Homo sapiens
caaagaggtagatga

SEQ ID NO: 336394 - DNA, 15 bp, Homo sapiens
tcaaagaggtagatg

SEQ ID NO: 336395 - DNA, 15 bp, Homo sapiens
gtcaaagaggtagat

SEQ ID NO: 336396 - DNA, 15 bp, Homo sapiens
tgtcaaagaggtaga

SEQ ID NO: 336397 - DNA, 15 bp, Homo sapiens
ttgtcaaagaggtag

SEQ ID NO: 336398 - DNA, 15 bp, Homo sapiens
tttgtcaaagaggta

SEQ ID NO: 336399 - DNA, 15 bp, Homo sapiens
ctttgtcaaagaggt

SEQ ID NO: 336400 - DNA, 15 bp, Homo sapiens
actttgtcaaagagg

SEQ ID NO: 336401 - DNA, 15 bp, Homo sapiens
cactttgtcaaagag

SEQ ID NO: 336402 - DNA, 15 bp, Homo sapiens
tcactttgtcaaaga

SEQ ID NO: 336403 - DNA, 15 bp, Homo sapiens
ctcactttgtcaaag

SEQ ID NO: 336404 - DNA, 15 bp, Homo sapiens
gctcactttgtcaaa

SEQ ID NO: 336405 - DNA, 15 bp, Homo sapiens
tgctcactttgtcaa

SEQ ID NO: 336406 - DNA, 15 bp, Homo sapiens
gtgctcactttgtca

SEQ ID NO: 336407 - DNA, 15 bp, Homo sapiens
tgtgctcactttgtc

SEQ ID NO: 336408 - DNA, 15 bp, Homo sapiens
ttgtgctcactttgt

SEQ ID NO: 336409 - DNA, 15 bp, Homo sapiens
attgtgctcactttg

SEQ ID NO: 336410 - DNA, 15 bp, Homo sapiens
cattgtgctcacttt

SEQ ID NO: 336411 - DNA, 15 bp, Homo sapiens
acattgtgctcactt

SEQ ID NO: 336412 - DNA, 15 bp, Homo sapiens
tacattgtgctcact

SEQ ID NO: 336413 - DNA, 15 bp, Homo sapiens
atacattgtgctcac

SEQ ID NO: 336414 - DNA, 15 bp, Homo sapiens
aatacattgtgctca

SEQ ID NO: 336415 - DNA, 15 bp, Homo sapiens
gaatacattgtgctc

SEQ ID NO: 336416 - DNA, 15 bp, Homo sapiens
tgaatacattgtgct

SEQ ID NO: 336417 - DNA, 15 bp, Homo sapiens
ctgaatacattgtgc

SEQ ID NO: 336418 - DNA, 15 bp, Homo sapiens
cctgaatacattgtg

SEQ ID NO: 336419 - DNA, 15 bp, Homo sapiens
gcctgaatacattgt

SEQ ID NO: 336420 - DNA, 15 bp, Homo sapiens
tgcctgaatacattg

SEQ ID NO: 336421 - DNA, 15 bp, Homo sapiens
ttgcctgaatacatt

SEQ ID NO: 336422 - DNA, 15 bp, Homo sapiens
tttgcctgaatacat

SEQ ID NO: 336423 - DNA, 15 bp, Homo sapiens
ctttgcctgaataca

SEQ ID NO: 336424 - DNA, 15 bp, Homo sapiens
gctttgcctgaatac

SEQ ID NO: 336425 - DNA, 15 bp, Homo sapiens
agctttgcctgaata

SEQ ID NO: 336426 - DNA, 15 bp, Homo sapiens
cagctttgcctgaat

SEQ ID NO: 336427 - DNA, 15 bp, Homo sapiens
acagctttgcctgaa

SEQ ID NO: 336428 - DNA, 15 bp, Homo sapiens
tacagctttgcctga

SEQ ID NO: 336429 - DNA, 15 bp, Homo sapiens
atacagctttgcctg

SEQ ID NO: 336430 - DNA, 15 bp, Homo sapiens
tatacagctttgcct

SEQ ID NO: 336431 - DNA, 15 bp, Homo sapiens
ctatacagctttgcc

SEQ ID NO: 336432 - DNA, 15 bp, Homo sapiens
cctatacagctttgc

SEQ ID NO: 336433 - DNA, 15 bp, Homo sapiens
tcctatacagctttg

SEQ ID NO: 336434 - DNA, 15 bp, Homo sapiens
atcctatacagcttt

SEQ ID NO: 336435 - DNA, 15 bp, Homo sapiens
aatcctatacagctt

SEQ ID NO: 336436 - DNA, 15 bp, Homo sapiens
aaatcctatacagct

SEQ ID NO: 336437 - DNA, 15 bp, Homo sapiens
aaaatcctatacagc

SEQ ID NO: 336438 - DNA, 15 bp, Homo sapiens
gaaaatcctatacag

SEQ ID NO: 336439 - DNA, 15 bp, Homo sapiens
tgaaaatcctataca

SEQ ID NO: 336440 - DNA, 15 bp, Homo sapiens
ttgaaaatcctatac

SEQ ID NO: 336441 - DNA, 15 bp, Homo sapiens
attgaaaatcctata

SEQ ID NO: 336442 - DNA, 15 bp, Homo sapiens
aattgaaaatcctat

SEQ ID NO: 336443 - DNA, 15 bp, Homo sapiens
aaattgaaaatccta

SEQ ID NO: 336444 - DNA, 15 bp, Homo sapiens
taaattgaaaatcct

SEQ ID NO: 336445 - DNA, 15 bp, Homo sapiens
gtaaattgaaaatcc

SEQ ID NO: 336446 - DNA, 15 bp, Homo sapiens
agtaaattgaaaatc

SEQ ID NO: 336447 - DNA, 15 bp, Homo sapiens
gagtaaattgaaaat

SEQ ID NO: 336448 - DNA, 15 bp, Homo sapiens
agagtaaattgaaaa

SEQ ID NO: 336449 - DNA, 15 bp, Homo sapiens
cagagtaaattgaaa

SEQ ID NO: 336450 - DNA, 15 bp, Homo sapiens
acagagtaaattgaa

SEQ ID NO: 336451 - DNA, 15 bp, Homo sapiens
gacagagtaaattga

SEQ ID NO: 336452 - DNA, 15 bp, Homo sapiens
agacagagtaaattg

SEQ ID NO: 336453 - DNA, 15 bp, Homo sapiens
cagacagagtaaatt

SEQ ID NO: 336454 - DNA, 15 bp, Homo sapiens
tcagacagagtaaat

SEQ ID NO: 336455 - DNA, 15 bp, Homo sapiens
atcagacagagtaaa

SEQ ID NO: 336456 - DNA, 15 bp, Homo sapiens
aatcagacagagtaa

SEQ ID NO: 336457 - DNA, 15 bp, Homo sapiens
aaatcagacagagta

SEQ ID NO: 336458 - DNA, 15 bp, Homo sapiens
taaatcagacagagt

SEQ ID NO: 336459 - DNA, 15 bp, Homo sapiens
ataaatcagacagag

SEQ ID NO: 336460 - DNA, 15 bp, Homo sapiens
aataaatcagacaga

SEQ ID NO: 336461 - DNA, 15 bp, Homo sapiens
caataaatcagacag

SEQ ID NO: 336462 - DNA, 15 bp, Homo sapiens
acaataaatcagaca

SEQ ID NO: 336463 - DNA, 15 bp, Homo sapiens
cacaataaatcagac

SEQ ID NO: 336464 - DNA, 15 bp, Homo sapiens
tcacaataaatcaga

SEQ ID NO: 336465 - DNA, 15 bp, Homo sapiens
gtcacaataaatcag

SEQ ID NO: 336466 - DNA, 15 bp, Homo sapiens
tgtcacaataaatca

SEQ ID NO: 336467 - DNA, 15 bp, Homo sapiens
ttgtcacaataaatc

SEQ ID NO: 336468 - DNA, 15 bp, Homo sapiens
cttgtcacaataaat

SEQ ID NO: 336469 - DNA, 15 bp, Homo sapiens
tcttgtcacaataaa

SEQ ID NO: 336470 - DNA, 15 bp, Homo sapiens
atcttgtcacaataa

SEQ ID NO: 336471 - DNA, 15 bp, Homo sapiens
tatcttgtcacaata

SEQ ID NO: 336472 - DNA, 15 bp, Homo sapiens
ctatcttgtcacaat

SEQ ID NO: 336473 - DNA, 15 bp, Homo sapiens
gctatcttgtcacaa

SEQ ID NO: 336474 - DNA, 15 bp, Homo sapiens
agctatcttgtcaca

SEQ ID NO: 336475 - DNA, 15 bp, Homo sapiens
gagctatcttgtcac

SEQ ID NO: 336476 - DNA, 15 bp, Homo sapiens
agagctatcttgtca

SEQ ID NO: 336477 - DNA, 15 bp, Homo sapiens
cagagctatcttgtc

SEQ ID NO: 336478 - DNA, 15 bp, Homo sapiens
ccagagctatcttgt

SEQ ID NO: 336479 - DNA, 15 bp, Homo sapiens
cccagagctatcttg

SEQ ID NO: 336480 - DNA, 15 bp, Homo sapiens
acccagagctatctt

SEQ ID NO: 336481 - DNA, 15 bp, Homo sapiens
aacccagagctatct

SEQ ID NO: 336482 - DNA, 15 bp, Homo sapiens
aaacccagagctatc

SEQ ID NO: 336483 - DNA, 15 bp, Homo sapiens
aaaacccagagctat

SEQ ID NO: 336484 - DNA, 15 bp, Homo sapiens
aaaaacccagagcta

SEQ ID NO: 336485 - DNA, 15 bp, Homo sapiens
aaaaaacccagagct

SEQ ID NO: 336486 - DNA, 15 bp, Homo sapiens
taaaaaacccagagc

SEQ ID NO: 336487 - DNA, 15 bp, Homo sapiens
ttaaaaaacccagag

SEQ ID NO: 336488 - DNA, 15 bp, Homo sapiens
cttaaaaaacccaga

SEQ ID NO: 336489 - DNA, 15 bp, Homo sapiens
acttaaaaaacccag

SEQ ID NO: 336490 - DNA, 15 bp, Homo sapiens
aacttaaaaaaccca

SEQ ID NO: 336491 - DNA, 15 bp, Homo sapiens
gaacttaaaaaaccc

SEQ ID NO: 336492 - DNA, 15 bp, Homo sapiens
agaacttaaaaaacc

SEQ ID NO: 336493 - DNA, 15 bp, Homo sapiens
aagaacttaaaaaac

SEQ ID NO: 336494 - DNA, 15 bp, Homo sapiens
aaagaacttaaaaaa

SEQ ID NO: 336495 - DNA, 15 bp, Homo sapiens
taaagaacttaaaaa

SEQ ID NO: 336496 - DNA, 15 bp, Homo sapiens
ataaagaacttaaaa

SEQ ID NO: 336497 - DNA, 15 bp, Homo sapiens
tataaagaacttaaa

SEQ ID NO: 336498 - DNA, 15 bp, Homo sapiens
gtataaagaacttaa

SEQ ID NO: 336499 - DNA, 15 bp, Homo sapiens
agtataaagaactta

SEQ ID NO: 336500 - DNA, 15 bp, Homo sapiens
gagtataaagaactt

SEQ ID NO: 336501 - DNA, 15 bp, Homo sapiens
cgagtataaagaact

SEQ ID NO: 336502 - DNA, 15 bp, Homo sapiens
acgagtataaagaac

SEQ ID NO: 336503 - DNA, 15 bp, Homo sapiens
aacgagtataaagaa

SEQ ID NO: 336504 - DNA, 15 bp, Homo sapiens
gaacgagtataaaga

SEQ ID NO: 336505 - DNA, 15 bp, Homo sapiens
ggaacgagtataaag

SEQ ID NO: 336506 - DNA, 15 bp, Homo sapiens
tggaacgagtataaa

SEQ ID NO: 336507 - DNA, 15 bp, Homo sapiens
ctggaacgagtataa

SEQ ID NO: 336508 - DNA, 15 bp, Homo sapiens
actggaacgagtata

SEQ ID NO: 336509 - DNA, 15 bp, Homo sapiens
tactggaacgagtat

SEQ ID NO: 336510 - DNA, 15 bp, Homo sapiens
ttactggaacgagta

SEQ ID NO: 336511 - DNA, 15 bp, Homo sapiens
tttactggaacgagt

SEQ ID NO: 336512 - DNA, 15 bp, Homo sapiens
ttttactggaacgag

SEQ ID NO: 336513 - DNA, 15 bp, Homo sapiens
tttttactggaacga

SEQ ID NO: 336514 - DNA, 15 bp, Homo sapiens
atttttactggaacg

SEQ ID NO: 336515 - DNA, 15 bp, Homo sapiens
catttttactggaac

SEQ ID NO: 336516 - DNA, 15 bp, Homo sapiens
ccatttttactggaa

SEQ ID NO: 336517 - DNA, 15 bp, Homo sapiens
tccatttttactgga

SEQ ID NO: 336518 - DNA, 15 bp, Homo sapiens
atccatttttactgg

SEQ ID NO: 336519 - DNA, 15 bp, Homo sapiens
tatccatttttactg

SEQ ID NO: 336520 - DNA, 15 bp, Homo sapiens
atatccatttttact

SEQ ID NO: 336521 - DNA, 15 bp, Homo sapiens
tatatccatttttac

SEQ ID NO: 336522 - DNA, 15 bp, Homo sapiens
ctatatccattttta

SEQ ID NO: 336523 - DNA, 15 bp, Homo sapiens
actatatccattttt

SEQ ID NO: 336524 - DNA, 15 bp, Homo sapiens
tactatatccatttt

SEQ ID NO: 336525 - DNA, 15 bp, Homo sapiens
atactatatccattt

SEQ ID NO: 336526 - DNA, 15 bp, Homo sapiens
gatactatatccatt

SEQ ID NO: 336527 - DNA, 15 bp, Homo sapiens
agatactatatccat

SEQ ID NO: 336528 - DNA, 15 bp, Homo sapiens
aagatactatatcca

SEQ ID NO: 336529 - DNA, 15 bp, Homo sapiens
aaagatactatatcc

SEQ ID NO: 336530 - DNA, 15 bp, Homo sapiens
taaagatactatatc

SEQ ID NO: 336531 - DNA, 15 bp, Homo sapiens
ttaaagatactatat

SEQ ID NO: 336532 - DNA, 15 bp, Homo sapiens
tttaaagatactata

SEQ ID NO: 336533 - DNA, 15 bp, Homo sapiens
ttttaaagatactat

SEQ ID NO: 336534 - DNA, 15 bp, Homo sapiens
tttttaaagatacta

SEQ ID NO: 336535 - DNA, 15 bp, Homo sapiens
atttttaaagatact

SEQ ID NO: 336536 - DNA, 15 bp, Homo sapiens
tatttttaaagatac

SEQ ID NO: 336537 - DNA, 15 bp, Homo sapiens
ttatttttaaagata

SEQ ID NO: 336538 - DNA, 15 bp, Homo sapiens
tttatttttaaagat

SEQ ID NO: 336539 - DNA, 15 bp, Homo sapiens
gtttatttttaaaga

SEQ ID NO: 336540 - DNA, 15 bp, Homo sapiens
tgtttatttttaaag

SEQ ID NO: 336541 - DNA, 15 bp, Homo sapiens
ctgtttatttttaaa

SEQ ID NO: 336542 - DNA, 15 bp, Homo sapiens
gctgtttatttttaa

SEQ ID NO: 336543 - DNA, 15 bp, Homo sapiens
ggctgtttattttta

SEQ ID NO: 336544 - DNA, 15 bp, Homo sapiens
gggctgtttattttt

SEQ ID NO: 336545 - DNA, 15 bp, Homo sapiens
tgggctgtttatttt

SEQ ID NO: 336546 - DNA, 15 bp, Homo sapiens
ctgggctgtttattt

SEQ ID NO: 336547 - DNA, 15 bp, Homo sapiens
tctgggctgtttatt

SEQ ID NO: 336548 - DNA, 15 bp, Homo sapiens
ctctgggctgtttat

SEQ ID NO: 336549 - DNA, 15 bp, Homo sapiens
gctctgggctgttta

SEQ ID NO: 336550 - DNA, 15 bp, Homo sapiens
agctctgggctgttt

SEQ ID NO: 336551 - DNA, 15 bp, Homo sapiens
cagctctgggctgtt

SEQ ID NO: 336552 - DNA, 15 bp, Homo sapiens
acagctctgggctgt

SEQ ID NO: 336553 - DNA, 15 bp, Homo sapiens
cacagctctgggctg

SEQ ID NO: 336554 - DNA, 15 bp, Homo sapiens
gcacagctctgggct

SEQ ID NO: 336555 - DNA, 15 bp, Homo sapiens
tgcacagctctgggc

SEQ ID NO: 336556 - DNA, 15 bp, Homo sapiens
atgcacagctctggg

SEQ ID NO: 336557 - DNA, 15 bp, Homo sapiens
aatgcacagctctgg

SEQ ID NO: 336558 - DNA, 15 bp, Homo sapiens
aaatgcacagctctg

SEQ ID NO: 336559 - DNA, 15 bp, Homo sapiens
aaaatgcacagctct

SEQ ID NO: 336560 - DNA, 15 bp, Homo sapiens
taaaatgcacagctc

SEQ ID NO: 336561 - DNA, 15 bp, Homo sapiens
gtaaaatgcacagct

SEQ ID NO: 336562 - DNA, 15 bp, Homo sapiens
tgtaaaatgcacagc

SEQ ID NO: 336563 - DNA, 15 bp, Homo sapiens
atgtaaaatgcacag

SEQ ID NO: 336564 - DNA, 15 bp, Homo sapiens
aatgtaaaatgcaca

SEQ ID NO: 336565 - DNA, 15 bp, Homo sapiens
caatgtaaaatgcac

SEQ ID NO: 336566 - DNA, 15 bp, Homo sapiens
acaatgtaaaatgca

SEQ ID NO: 336567 - DNA, 15 bp, Homo sapiens
gacaatgtaaaatgc

SEQ ID NO: 336568 - DNA, 15 bp, Homo sapiens
agacaatgtaaaatg

SEQ ID NO: 336569 - DNA, 15 bp, Homo sapiens
aagacaatgtaaaat

SEQ ID NO: 336570 - DNA, 15 bp, Homo sapiens
gaagacaatgtaaaa

SEQ ID NO: 336571 - DNA, 15 bp, Homo sapiens
ggaagacaatgtaaa

SEQ ID NO: 336572 - DNA, 15 bp, Homo sapiens
aggaagacaatgtaa

SEQ ID NO: 336573 - DNA, 15 bp, Homo sapiens
taggaagacaatgta

SEQ ID NO: 336574 - DNA, 15 bp, Homo sapiens
ctaggaagacaatgt

SEQ ID NO: 336575 - DNA, 15 bp, Homo sapiens
tctaggaagacaatg

SEQ ID NO: 336576 - DNA, 15 bp, Homo sapiens
ctctaggaagacaat

SEQ ID NO: 336577 - DNA, 15 bp, Homo sapiens
gctctaggaagacaa

SEQ ID NO: 336578 - DNA, 15 bp, Homo sapiens
cgctctaggaagaca

SEQ ID NO: 336579 - DNA, 15 bp, Homo sapiens
tcgctctaggaagac

SEQ ID NO: 336580 - DNA, 15 bp, Homo sapiens
ctcgctctaggaaga

SEQ ID NO: 336581 - DNA, 15 bp, Homo sapiens
cctcgctctaggaag

SEQ ID NO: 336582 - DNA, 15 bp, Homo sapiens
gcctcgctctaggaa

SEQ ID NO: 336583 - DNA, 15 bp, Homo sapiens
agcctcgctctagga

SEQ ID NO: 336584 - DNA, 15 bp, Homo sapiens
gagcctcgctctagg

SEQ ID NO: 336585 - DNA, 15 bp, Homo sapiens
agagcctcgctctag

SEQ ID NO: 336586 - DNA, 15 bp, Homo sapiens
cagagcctcgctcta

SEQ ID NO: 336587 - DNA, 15 bp, Homo sapiens
gcagagcctcgctct

SEQ ID NO: 336588 - DNA, 15 bp, Homo sapiens
agcagagcctcgctc

SEQ ID NO: 336589 - DNA, 15 bp, Homo sapiens
tagcagagcctcgct

SEQ ID NO: 336590 - DNA, 15 bp, Homo sapiens
ttagcagagcctcgc

SEQ ID NO: 336591 - DNA, 15 bp, Homo sapiens
tttagcagagcctcg

SEQ ID NO: 336592 - DNA, 15 bp, Homo sapiens
ctttagcagagcctc

SEQ ID NO: 336593 - DNA, 15 bp, Homo sapiens
tctttagcagagcct

SEQ ID NO: 336594 - DNA, 15 bp, Homo sapiens
ttctttagcagagcc

SEQ ID NO: 336595 - DNA, 15 bp, Homo sapiens
tttctttagcagagc

SEQ ID NO: 336596 - DNA, 15 bp, Homo sapiens
ctttctttagcagag

SEQ ID NO: 336597 - DNA, 15 bp, Homo sapiens
tctttctttagcaga

SEQ ID NO: 336598 - DNA, 15 bp, Homo sapiens
atctttctttagcag

SEQ ID NO: 336599 - DNA, 15 bp, Homo sapiens
gatctttctttagca

SEQ ID NO: 336600 - DNA, 15 bp, Homo sapiens
agatctttctttagc

SEQ ID NO: 336601 - DNA, 15 bp, Homo sapiens
tagatctttctttag

SEQ ID NO: 336602 - DNA, 15 bp, Homo sapiens
ttagatctttcttta

SEQ ID NO: 336603 - DNA, 15 bp, Homo sapiens
cttagatctttcttt

SEQ ID NO: 336604 - DNA, 15 bp, Homo sapiens
ccttagatctttctt

SEQ ID NO: 336605 - DNA, 15 bp, Homo sapiens
gccttagatctttct

SEQ ID NO: 336606 - DNA, 15 bp, Homo sapiens
ggccttagatctttc

SEQ ID NO: 336607 - DNA, 15 bp, Homo sapiens
aggccttagatcttt

SEQ ID NO: 336608 - DNA, 15 bp, Homo sapiens
gaggccttagatctt

SEQ ID NO: 336609 - DNA, 15 bp, Homo sapiens
ggaggccttagatct

SEQ ID NO: 336610 - DNA, 15 bp, Homo sapiens
gggaggccttagatc

SEQ ID NO: 336611 - DNA, 15 bp, Homo sapiens
ggggaggccttagat

SEQ ID NO: 336612 - DNA, 15 bp, Homo sapiens
cggggaggccttaga

SEQ ID NO: 336613 - DNA, 15 bp, Homo sapiens
gcggggaggccttag

SEQ ID NO: 336614 - DNA, 15 bp, Homo sapiens
ggcggggaggcctta

SEQ ID NO: 336615 - DNA, 15 bp, Homo sapiens
gggcggggaggcctt

SEQ ID NO: 336616 - DNA, 15 bp, Homo sapiens
agggcggggaggcct

SEQ ID NO: 336617 - DNA, 15 bp, Homo sapiens
gagggcggggaggcc

SEQ ID NO: 336618 - DNA, 15 bp, Homo sapiens
cgagggcggggaggc

SEQ ID NO: 336619 - DNA, 15 bp, Homo sapiens
gcgagggcggggagg

SEQ ID NO: 336620 - DNA, 15 bp, Homo sapiens
tgcgagggcggggag

SEQ ID NO: 336621 - DNA, 15 bp, Homo sapiens
ctgcgagggcgggga

SEQ ID NO: 336622 - DNA, 15 bp, Homo sapiens
tctgcgagggcgggg

SEQ ID NO: 336623 - DNA, 15 bp, Homo sapiens
ttctgcgagggcggg

SEQ ID NO: 336624 - DNA, 15 bp, Homo sapiens
gttctgcgagggcgg

SEQ ID NO: 336625 - DNA, 15 bp, Homo sapiens
ggttctgcgagggcg

SEQ ID NO: 336626 - DNA, 15 bp, Homo sapiens
aggttctgcgagggc

SEQ ID NO: 336627 - DNA, 15 bp, Homo sapiens
caggttctgcgaggg

SEQ ID NO: 336628 - DNA, 15 bp, Homo sapiens
tcaggttctgcgagg

SEQ ID NO: 336629 - DNA, 15 bp, Homo sapiens
atcaggttctgcgag

SEQ ID NO: 336630 - DNA, 15 bp, Homo sapiens
gatcaggttctgcga

SEQ ID NO: 336631 - DNA, 15 bp, Homo sapiens
cgatcaggttctgcg

SEQ ID NO: 336632 - DNA, 15 bp, Homo sapiens
gcgatcaggttctgc

SEQ ID NO: 336633 - DNA, 15 bp, Homo sapiens
tgcgatcaggttctg

SEQ ID NO: 336634 - DNA, 15 bp, Homo sapiens
ctgcgatcaggttct

SEQ ID NO: 336635 - DNA, 15 bp, Homo sapiens
actgcgatcaggttc

SEQ ID NO: 336636 - DNA, 15 bp, Homo sapiens
tactgcgatcaggtt

SEQ ID NO: 336637 - DNA, 15 bp, Homo sapiens
ctactgcgatcaggt

SEQ ID NO: 336638 - DNA, 15 bp, Homo sapiens
cctactgcgatcagg

SEQ ID NO: 336639 - DNA, 15 bp, Homo sapiens
tcctactgcgatcag

SEQ ID NO: 336640 - DNA, 15 bp, Homo sapiens
atcctactgcgatca

SEQ ID NO: 336641 - DNA, 15 bp, Homo sapiens
aatcctactgcgatc

SEQ ID NO: 336642 - DNA, 15 bp, Homo sapiens
aaatcctactgcgat

SEQ ID NO: 336643 - DNA, 15 bp, Homo sapiens
caaatcctactgcga

SEQ ID NO: 336644 - DNA, 15 bp, Homo sapiens
gcaaatcctactgcg

SEQ ID NO: 336645 - DNA, 15 bp, Homo sapiens
agcaaatcctactgc

SEQ ID NO: 336646 - DNA, 15 bp, Homo sapiens
cagcaaatcctactg

SEQ ID NO: 336647 - DNA, 15 bp, Homo sapiens
gcagcaaatcctact

SEQ ID NO: 336648 - DNA, 15 bp, Homo sapiens
ggcagcaaatcctac

SEQ ID NO: 336649 - DNA, 15 bp, Homo sapiens
tggcagcaaatccta

SEQ ID NO: 336650 - DNA, 15 bp, Homo sapiens
atggcagcaaatcct

SEQ ID NO: 336651 - DNA, 15 bp, Homo sapiens
gatggcagcaaatcc

SEQ ID NO: 336652 - DNA, 15 bp, Homo sapiens
ggatggcagcaaatc

SEQ ID NO: 336653 - DNA, 15 bp, Homo sapiens
gggatggcagcaaat

SEQ ID NO: 336654 - DNA, 15 bp, Homo sapiens
agggatggcagcaaa

SEQ ID NO: 336655 - DNA, 15 bp, Homo sapiens
aagggatggcagcaa

SEQ ID NO: 336656 - DNA, 15 bp, Homo sapiens
gaagggatggcagca

SEQ ID NO: 336657 - DNA, 15 bp, Homo sapiens
agaagggatggcagc

SEQ ID NO: 336658 - DNA, 15 bp, Homo sapiens
gagaagggatggcag

SEQ ID NO: 336659 - DNA, 15 bp, Homo sapiens
agagaagggatggca

SEQ ID NO: 336660 - DNA, 15 bp, Homo sapiens
aagagaagggatggc

SEQ ID NO: 336661 - DNA, 15 bp, Homo sapiens
aaagagaagggatgg

SEQ ID NO: 336662 - DNA, 15 bp, Homo sapiens
caaagagaagggatg

SEQ ID NO: 336663 - DNA, 15 bp, Homo sapiens
ccaaagagaagggat

SEQ ID NO: 336664 - DNA, 15 bp, Homo sapiens
gccaaagagaaggga

SEQ ID NO: 336665 - DNA, 15 bp, Homo sapiens
agccaaagagaaggg

SEQ ID NO: 336666 - DNA, 15 bp, Homo sapiens
aagccaaagagaagg

SEQ ID NO: 336667 - DNA, 15 bp, Homo sapiens
aaagccaaagagaag

SEQ ID NO: 336668 - DNA, 15 bp, Homo sapiens
aaaagccaaagagaa

SEQ ID NO: 336669 - DNA, 15 bp, Homo sapiens
aaaaagccaaagaga

SEQ ID NO: 336670 - DNA, 15 bp, Homo sapiens
aaaaaagccaaagag

SEQ ID NO: 336671 - DNA, 15 bp, Homo sapiens
caaaaaagccaaaga

SEQ ID NO: 336672 - DNA, 15 bp, Homo sapiens
tcaaaaaagccaaag

SEQ ID NO: 336673 - DNA, 15 bp, Homo sapiens
ctcaaaaaagccaaa

SEQ ID NO: 336674 - DNA, 15 bp, Homo sapiens
cctcaaaaaagccaa

SEQ ID NO: 336675 - DNA, 15 bp, Homo sapiens
ccctcaaaaaagcca

SEQ ID NO: 336676 - DNA, 15 bp, Homo sapiens
tccctcaaaaaagcc

SEQ ID NO: 336677 - DNA, 15 bp, Homo sapiens
ctccctcaaaaaagc

SEQ ID NO: 336678 - DNA, 15 bp, Homo sapiens
actccctcaaaaaag

SEQ ID NO: 336679 - DNA, 15 bp, Homo sapiens
cactccctcaaaaaa

SEQ ID NO: 336680 - DNA, 15 bp, Homo sapiens
acactccctcaaaaa

SEQ ID NO: 336681 - DNA, 15 bp, Homo sapiens
cacactccctcaaaa

SEQ ID NO: 336682 - DNA, 15 bp, Homo sapiens
ccacactccctcaaa

SEQ ID NO: 336683 - DNA, 15 bp, Homo sapiens
cccacactccctcaa

SEQ ID NO: 336684 - DNA, 15 bp, Homo sapiens
tcccacactccctca

SEQ ID NO: 336685 - DNA, 15 bp, Homo sapiens
ttcccacactccctc

SEQ ID NO: 336686 - DNA, 15 bp, Homo sapiens
attcccacactccct

SEQ ID NO: 336687 - DNA, 15 bp, Homo sapiens
cattcccacactccc

SEQ ID NO: 336688 - DNA, 15 bp, Homo sapiens
ccattcccacactcc

SEQ ID NO: 336689 - DNA, 15 bp, Homo sapiens
accattcccacactc

SEQ ID NO: 336690 - DNA, 15 bp, Homo sapiens
aaccattcccacact

SEQ ID NO: 336691 - DNA, 15 bp, Homo sapiens
caaccattcccacac

SEQ ID NO: 336692 - DNA, 15 bp, Homo sapiens
ccaaccattcccaca

SEQ ID NO: 336693 - DNA, 15 bp, Homo sapiens
cccaaccattcccac

SEQ ID NO: 336694 - DNA, 15 bp, Homo sapiens
ccccaaccattccca

SEQ ID NO: 336695 - DNA, 15 bp, Homo sapiens
cccccaaccattccc

SEQ ID NO: 336696 - DNA, 15 bp, Homo sapiens
gcccccaaccattcc

SEQ ID NO: 336697 - DNA, 15 bp, Homo sapiens
tgcccccaaccattc

SEQ ID NO: 336698 - DNA, 15 bp, Homo sapiens
ctgcccccaaccatt

SEQ ID NO: 336699 - DNA, 15 bp, Homo sapiens
actgcccccaaccat

SEQ ID NO: 336700 - DNA, 15 bp, Homo sapiens
cactgcccccaacca

SEQ ID NO: 336701 - DNA, 15 bp, Homo sapiens
ccactgcccccaacc

SEQ ID NO: 336702 - DNA, 15 bp, Homo sapiens
cccactgcccccaac

SEQ ID NO: 336703 - DNA, 15 bp, Homo sapiens
ccccactgcccccaa

SEQ ID NO: 336704 - DNA, 15 bp, Homo sapiens
tccccactgccccca

SEQ ID NO: 336705 - DNA, 15 bp, Homo sapiens
gtccccactgccccc

SEQ ID NO: 336706 - DNA, 15 bp, Homo sapiens
tgtccccactgcccc

SEQ ID NO: 336707 - DNA, 15 bp, Homo sapiens
ctgtccccactgccc

SEQ ID NO: 336708 - DNA, 15 bp, Homo sapiens
actgtccccactgcc

SEQ ID NO: 336709 - DNA, 15 bp, Homo sapiens
tactgtccccactgc

SEQ ID NO: 336710 - DNA, 15 bp, Homo sapiens
ttactgtccccactg

SEQ ID NO: 336711 - DNA, 15 bp, Homo sapiens
tttactgtccccact

SEQ ID NO: 336712 - DNA, 15 bp, Homo sapiens
atttactgtccccac

SEQ ID NO: 336713 - DNA, 15 bp, Homo sapiens
tatttactgtcccca

SEQ ID NO: 336714 - DNA, 15 bp, Homo sapiens
ctatttactgtcccc

SEQ ID NO: 336715 - DNA, 15 bp, Homo sapiens
cctatttactgtccc

SEQ ID NO: 336716 - DNA, 15 bp, Homo sapiens
ccctatttactgtcc

SEQ ID NO: 336717 - DNA, 15 bp, Homo sapiens
tccctatttactgtc

SEQ ID NO: 336718 - DNA, 15 bp, Homo sapiens
ttccctatttactgt

SEQ ID NO: 336719 - DNA, 15 bp, Homo sapiens
tttccctatttactg

SEQ ID NO: 336720 - DNA, 15 bp, Homo sapiens
atttccctatttact

SEQ ID NO: 336721 - DNA, 15 bp, Homo sapiens
gatttccctatttac

SEQ ID NO: 336722 - DNA, 15 bp, Homo sapiens
tgatttccctattta

SEQ ID NO: 336723 - DNA, 15 bp, Homo sapiens
ctgatttccctattt

SEQ ID NO: 336724 - DNA, 15 bp, Homo sapiens
actgatttccctatt

SEQ ID NO: 336725 - DNA, 15 bp, Homo sapiens
aactgatttccctat

SEQ ID NO: 336726 - DNA, 15 bp, Homo sapiens
taactgatttcccta

SEQ ID NO: 336727 - DNA, 15 bp, Homo sapiens
ctaactgatttccct

SEQ ID NO: 336728 - DNA, 15 bp, Homo sapiens
cctaactgatttccc

SEQ ID NO: 336729 - DNA, 15 bp, Homo sapiens
tcctaactgatttcc

SEQ ID NO: 336730 - DNA, 15 bp, Homo sapiens
ttcctaactgatttc

SEQ ID NO: 336731 - DNA, 15 bp, Homo sapiens
cttcctaactgattt

SEQ ID NO: 336732 - DNA, 15 bp, Homo sapiens
gcttcctaactgatt

SEQ ID NO: 336733 - DNA, 15 bp, Homo sapiens
cgcttcctaactgat

SEQ ID NO: 336734 - DNA, 15 bp, Homo sapiens
tcgcttcctaactga

SEQ ID NO: 336735 - DNA, 15 bp, Homo sapiens
atcgcttcctaactg

SEQ ID NO: 336736 - DNA, 15 bp, Homo sapiens
aatcgcttcctaact

SEQ ID NO: 336737 - DNA, 15 bp, Homo sapiens
caatcgcttcctaac

SEQ ID NO: 336738 - DNA, 15 bp, Homo sapiens
gcaatcgcttcctaa

SEQ ID NO: 336739 - DNA, 15 bp, Homo sapiens
tgcaatcgcttccta

SEQ ID NO: 336740 - DNA, 15 bp, Homo sapiens
ctgcaatcgcttcct

SEQ ID NO: 336741 - DNA, 15 bp, Homo sapiens
tctgcaatcgcttcc

SEQ ID NO: 336742 - DNA, 15 bp, Homo sapiens
atctgcaatcgcttc

SEQ ID NO: 336743 - DNA, 15 bp, Homo sapiens
catctgcaatcgctt

SEQ ID NO: 336744 - DNA, 15 bp, Homo sapiens
acatctgcaatcgct

SEQ ID NO: 336745 - DNA, 15 bp, Homo sapiens
gacatctgcaatcgc

SEQ ID NO: 336746 - DNA, 15 bp, Homo sapiens
agacatctgcaatcg

SEQ ID NO: 336747 - DNA, 15 bp, Homo sapiens
tagacatctgcaatc

SEQ ID NO: 336748 - DNA, 15 bp, Homo sapiens
ctagacatctgcaat

SEQ ID NO: 336749 - DNA, 15 bp, Homo sapiens
tctagacatctgcaa

SEQ ID NO: 336750 - DNA, 15 bp, Homo sapiens
tatctagacatctgc

SEQ ID NO: 336751 - DNA, 15 bp, Homo sapiens
ttatctagacatctg

SEQ ID NO: 336752 - DNA, 15 bp, Homo sapiens
cttatctagacatct

SEQ ID NO: 336753 - DNA, 15 bp, Homo sapiens
ccttatctagacatc

SEQ ID NO: 336754 - DNA, 15 bp, Homo sapiens
accttatctagacat

SEQ ID NO: 336755 - DNA, 15 bp, Homo sapiens
taccttatctagaca

SEQ ID NO: 336756 - DNA, 15 bp, Homo sapiens
ataccttatctagac

SEQ ID NO: 336757 - DNA, 15 bp, Homo sapiens
cataccttatctaga

SEQ ID NO: 336758 - DNA, 15 bp, Homo sapiens
tcataccttatctag

SEQ ID NO: 336759 - DNA, 15 bp, Homo sapiens
atcataccttatcta

SEQ ID NO: 336760 - DNA, 15 bp, Homo sapiens
catcataccttatct

SEQ ID NO: 336761 - DNA, 15 bp, Homo sapiens
ccatcataccttatc

SEQ ID NO: 336762 - DNA, 15 bp, Homo sapiens
tccatcataccttat

SEQ ID NO: 336763 - DNA, 15 bp, Homo sapiens
ctccatcatacctta

SEQ ID NO: 336764 - DNA, 15 bp, Homo sapiens
cctccatcatacctt

SEQ ID NO: 336765 - DNA, 15 bp, Homo sapiens
acctccatcatacct

SEQ ID NO: 336766 - DNA, 15 bp, Homo sapiens
cacctccatcatacc

SEQ ID NO: 336767 - DNA, 15 bp, Homo sapiens
acacctccatcatac

SEQ ID NO: 336768 - DNA, 15 bp, Homo sapiens
cacacctccatcata

SEQ ID NO: 336769 - DNA, 15 bp, Homo sapiens
tcacacctccatcat

SEQ ID NO: 336770 - DNA, 15 bp, Homo sapiens
ttcacacctccatca

SEQ ID NO: 336771 - DNA, 15 bp, Homo sapiens
gttcacacctccatc

SEQ ID NO: 336772 - DNA, 15 bp, Homo sapiens
agttcacacctccat

SEQ ID NO: 336773 - DNA, 15 bp, Homo sapiens
tagttcacacctcca

SEQ ID NO: 336774 - DNA, 15 bp, Homo sapiens
ttagttcacacctcc

SEQ ID NO: 336775 - DNA, 15 bp, Homo sapiens
cttagttcacacctc

SEQ ID NO: 336776 - DNA, 15 bp, Homo sapiens
ccttagttcacacct

SEQ ID NO: 336777 - DNA, 15 bp, Homo sapiens
accttagttcacacc

SEQ ID NO: 336778 - DNA, 15 bp, Homo sapiens
gaccttagttcacac

SEQ ID NO: 336779 - DNA, 15 bp, Homo sapiens
cgaccttagttcaca

SEQ ID NO: 336780 - DNA, 15 bp, Homo sapiens
ccgaccttagttcac

SEQ ID NO: 336781 - DNA, 15 bp, Homo sapiens
tccgaccttagttca

SEQ ID NO: 336782 - DNA, 15 bp, Homo sapiens
gtccgaccttagttc

SEQ ID NO: 336783 - DNA, 15 bp, Homo sapiens
tgtccgaccttagtt

SEQ ID NO: 336784 - DNA, 15 bp, Homo sapiens
ctgtccgaccttagt

SEQ ID NO: 336785 - DNA, 15 bp, Homo sapiens
tctgtccgaccttag

SEQ ID NO: 336786 - DNA, 15 bp, Homo sapiens
ctctgtccgacctta

SEQ ID NO: 336787 - DNA, 15 bp, Homo sapiens
tctctgtccgacctt

SEQ ID NO: 336788 - DNA, 15 bp, Homo sapiens
ttctctgtccgacct

SEQ ID NO: 336789 - DNA, 15 bp, Homo sapiens
gttctctgtccgacc

SEQ ID NO: 336790 - DNA, 15 bp, Homo sapiens
agttctctgtccgac

SEQ ID NO: 336791 - DNA, 15 bp, Homo sapiens
cagttctctgtccga

SEQ ID NO: 336792 - DNA, 15 bp, Homo sapiens
ccagttctctgtccg

SEQ ID NO: 336793 - DNA, 15 bp, Homo sapiens
tccagttctctgtcc

SEQ ID NO: 336794 - DNA, 15 bp, Homo sapiens
ctccagttctctgtc

SEQ ID NO: 336795 - DNA, 15 bp, Homo sapiens
gctccagttctctgt

SEQ ID NO: 336796 - DNA, 15 bp, Homo sapiens
ggctccagttctctg

SEQ ID NO: 336797 - DNA, 15 bp, Homo sapiens
gggctccagttctct

SEQ ID NO: 336798 - DNA, 15 bp, Homo sapiens
agggctccagttctc

SEQ ID NO: 336799 - DNA, 15 bp, Homo sapiens
cagggctccagttct

SEQ ID NO: 336800 - DNA, 15 bp, Homo sapiens
acagggctccagttc

SEQ ID NO: 336801 - DNA, 15 bp, Homo sapiens
cacagggctccagtt

SEQ ID NO: 336802 - DNA, 15 bp, Homo sapiens
acacagggctccagt

SEQ ID NO: 336803 - DNA, 15 bp, Homo sapiens
cacacagggctccag

SEQ ID NO: 336804 - DNA, 15 bp, Homo sapiens
tcacacagggctcca

SEQ ID NO: 336805 - DNA, 15 bp, Homo sapiens
ctcacacagggctcc

SEQ ID NO: 336806 - DNA, 15 bp, Homo sapiens
cctcacacagggctc

SEQ ID NO: 336807 - DNA, 15 bp, Homo sapiens
tcctcacacagggct

SEQ ID NO: 336808 - DNA, 15 bp, Homo sapiens
atcctcacacagggc

SEQ ID NO: 336809 - DNA, 15 bp, Homo sapiens
aatcctcacacaggg

SEQ ID NO: 336810 - DNA, 15 bp, Homo sapiens
gaatcctcacacagg

SEQ ID NO: 336811 - DNA, 15 bp, Homo sapiens
tgaatcctcacacag

SEQ ID NO: 336812 - DNA, 15 bp, Homo sapiens
atgaatcctcacaca

SEQ ID NO: 336813 - DNA, 15 bp, Homo sapiens
gatgaatcctcacac

SEQ ID NO: 336814 - DNA, 15 bp, Homo sapiens
tgatgaatcctcaca

SEQ ID NO: 336815 - DNA, 15 bp, Homo sapiens
ctgatgaatcctcac

SEQ ID NO: 336816 - DNA, 15 bp, Homo sapiens
actgatgaatcctca

SEQ ID NO: 336817 - DNA, 15 bp, Homo sapiens
cactgatgaatcctc

SEQ ID NO: 336818 - DNA, 15 bp, Homo sapiens
acactgatgaatcct

SEQ ID NO: 336819 - DNA, 15 bp, Homo sapiens
gacactgatgaatcc

SEQ ID NO: 336820 - DNA, 15 bp, Homo sapiens
agacactgatgaatc

SEQ ID NO: 336821 - DNA, 15 bp, Homo sapiens
cagacactgatgaat

SEQ ID NO: 336822 - DNA, 15 bp, Homo sapiens
ccagacactgatgaa

SEQ ID NO: 336823 - DNA, 15 bp, Homo sapiens
accagacactgatga

SEQ ID NO: 336824 - DNA, 15 bp, Homo sapiens
caccagacactgatg

SEQ ID NO: 336825 - DNA, 15 bp, Homo sapiens
ccaccagacactgat

SEQ ID NO: 336826 - DNA, 15 bp, Homo sapiens
cccaccagacactga

SEQ ID NO: 336827 - DNA, 15 bp, Homo sapiens
acccaccagacactg

SEQ ID NO: 336828 - DNA, 15 bp, Homo sapiens
cacccaccagacact

SEQ ID NO: 336829 - DNA, 15 bp, Homo sapiens
gcacccaccagacac

SEQ ID NO: 336830 - DNA, 15 bp, Homo sapiens
tgcacccaccagaca

SEQ ID NO: 336831 - DNA, 15 bp, Homo sapiens
ctgcacccaccagac

SEQ ID NO: 336832 - DNA, 15 bp, Homo sapiens
gctgcacccaccaga

SEQ ID NO: 336833 - DNA, 15 bp, Homo sapiens
ggctgcacccaccag

SEQ ID NO: 336834 - DNA, 15 bp, Homo sapiens
gggctgcacccacca

SEQ ID NO: 336835 - DNA, 15 bp, Homo sapiens
tgggctgcacccacc

SEQ ID NO: 336836 - DNA, 15 bp, Homo sapiens
ctgggctgcacccac

SEQ ID NO: 336837 - DNA, 15 bp, Homo sapiens
actgggctgcaccca

SEQ ID NO: 336838 - DNA, 15 bp, Homo sapiens
gactgggctgcaccc

SEQ ID NO: 336839 - DNA, 15 bp, Homo sapiens
tgactgggctgcacc

SEQ ID NO: 336840 - DNA, 15 bp, Homo sapiens
ctgactgggctgcac

SEQ ID NO: 336841 - DNA, 15 bp, Homo sapiens
gctgactgggctgca

SEQ ID NO: 336842 - DNA, 15 bp, Homo sapiens
ggctgactgggctgc

SEQ ID NO: 336843 - DNA, 15 bp, Homo sapiens
aggctgactgggctg

SEQ ID NO: 336844 - DNA, 15 bp, Homo sapiens
caggctgactgggct

SEQ ID NO: 336845 - DNA, 15 bp, Homo sapiens
ccaggctgactgggc

SEQ ID NO: 336846 - DNA, 15 bp, Homo sapiens
cccaggctgactggg

SEQ ID NO: 336847 - DNA, 15 bp, Homo sapiens
gcccaggctgactgg

SEQ ID NO: 336848 - DNA, 15 bp, Homo sapiens
ggcccaggctgactg

SEQ ID NO: 336849 - DNA, 15 bp, Homo sapiens
aggcccaggctgact

SEQ ID NO: 336850 - DNA, 15 bp, Homo sapiens
gaggcccaggctgac

SEQ ID NO: 336851 - DNA, 15 bp, Homo sapiens
agaggcccaggctga

SEQ ID NO: 336852 - DNA, 15 bp, Homo sapiens
aagaggcccaggctg

SEQ ID NO: 336853 - DNA, 15 bp, Homo sapiens
gaagaggcccaggct

SEQ ID NO: 336854 - DNA, 15 bp, Homo sapiens
tgaagaggcccaggc

SEQ ID NO: 336855 - DNA, 15 bp, Homo sapiens
atgaagaggcccagg

SEQ ID NO: 336856 - DNA, 15 bp, Homo sapiens
aatgaagaggcccag

SEQ ID NO: 336857 - DNA, 15 bp, Homo sapiens
aaatgaagaggccca

SEQ ID NO: 336858 - DNA, 15 bp, Homo sapiens
aaaatgaagaggccc

SEQ ID NO: 336859 - DNA, 15 bp, Homo sapiens
taaaatgaagaggcc

SEQ ID NO: 336860 - DNA, 15 bp, Homo sapiens
ctaaaatgaagaggc

SEQ ID NO: 336861 - DNA, 15 bp, Homo sapiens
actaaaatgaagagg

SEQ ID NO: 336862 - DNA, 15 bp, Homo sapiens
cactaaaatgaagag

SEQ ID NO: 336863 - DNA, 15 bp, Homo sapiens
tcactaaaatgaaga

SEQ ID NO: 336864 - DNA, 15 bp, Homo sapiens
gtcactaaaatgaag

SEQ ID NO: 336865 - DNA, 15 bp, Homo sapiens
agtcactaaaatgaa

SEQ ID NO: 336866 - DNA, 15 bp, Homo sapiens
cagtcactaaaatga

SEQ ID NO: 336867 - DNA, 15 bp, Homo sapiens
ccagtcactaaaatg

SEQ ID NO: 336868 - DNA, 15 bp, Homo sapiens
gccagtcactaaaat

SEQ ID NO: 336869 - DNA, 15 bp, Homo sapiens
ggccagtcactaaaa

SEQ ID NO: 336870 - DNA, 15 bp, Homo sapiens
gggccagtcactaaa

SEQ ID NO: 336871 - DNA, 15 bp, Homo sapiens
ggggccagtcactaa

SEQ ID NO: 336872 - DNA, 15 bp, Homo sapiens
tggggccagtcacta

SEQ ID NO: 336873 - DNA, 15 bp, Homo sapiens
ctggggccagtcact

SEQ ID NO: 336874 - DNA, 15 bp, Homo sapiens
cctggggccagtcac

SEQ ID NO: 336875 - DNA, 15 bp, Homo sapiens
acctggggccagtca

SEQ ID NO: 336876 - DNA, 15 bp, Homo sapiens
gacctggggccagtc

SEQ ID NO: 336877 - DNA, 15 bp, Homo sapiens
tgacctggggccagt

SEQ ID NO: 336878 - DNA, 15 bp, Homo sapiens
gtgacctggggccag

SEQ ID NO: 336879 - DNA, 15 bp, Homo sapiens
agtgacctggggcca

SEQ ID NO: 336880 - DNA, 15 bp, Homo sapiens
cagtgacctggggcc

SEQ ID NO: 336881 - DNA, 15 bp, Homo sapiens
tcagtgacctggggc

SEQ ID NO: 336882 - DNA, 15 bp, Homo sapiens
ctcagtgacctgggg

SEQ ID NO: 336883 - DNA, 15 bp, Homo sapiens
tctcagtgacctggg

SEQ ID NO: 336884 - DNA, 15 bp, Homo sapiens
ttctcagtgacctgg

SEQ ID NO: 336885 - DNA, 15 bp, Homo sapiens
gttctcagtgacctg

SEQ ID NO: 336886 - DNA, 15 bp, Homo sapiens
agttctcagtgacct

SEQ ID NO: 336887 - DNA, 15 bp, Homo sapiens
gagttctcagtgacc

SEQ ID NO: 336888 - DNA, 15 bp, Homo sapiens
cgagttctcagtgac

SEQ ID NO: 336889 - DNA, 15 bp, Homo sapiens
gcgagttctcagtga

SEQ ID NO: 336890 - DNA, 15 bp, Homo sapiens
ggcgagttctcagtg

SEQ ID NO: 336891 - DNA, 15 bp, Homo sapiens
gggcgagttctcagt

SEQ ID NO: 336892 - DNA, 15 bp, Homo sapiens
ggggcgagttctcag

SEQ ID NO: 336893 - DNA, 15 bp, Homo sapiens
gggggcgagttctca

SEQ ID NO: 336894 - DNA, 15 bp, Homo sapiens
ggggggcgagttctc

SEQ ID NO: 336895 - DNA, 15 bp, Homo sapiens
tggggggcgagttct

SEQ ID NO: 336896 - DNA, 15 bp, Homo sapiens
ctggggggcgagttc

SEQ ID NO: 336897 - DNA, 15 bp, Homo sapiens
actggggggcgagtt

SEQ ID NO: 336898 - DNA, 15 bp, Homo sapiens
gactggggggcgagt

SEQ ID NO: 336899 - DNA, 15 bp, Homo sapiens
agactggggggcgag

SEQ ID NO: 336900 - DNA, 15 bp, Homo sapiens
gagactggggggcga

SEQ ID NO: 336901 - DNA, 15 bp, Homo sapiens
ggagactggggggcg

SEQ ID NO: 336902 - DNA, 15 bp, Homo sapiens
gggagactggggggc

SEQ ID NO: 336903 - DNA, 15 bp, Homo sapiens
tgggagactgggggg

SEQ ID NO: 336904 - DNA, 15 bp, Homo sapiens
ttgggagactggggg

SEQ ID NO: 336905 - DNA, 15 bp, Homo sapiens
attgggagactgggg

SEQ ID NO: 336906 - DNA, 15 bp, Homo sapiens
aattgggagactggg

SEQ ID NO: 336907 - DNA, 15 bp, Homo sapiens
gaattgggagactgg

SEQ ID NO: 336908 - DNA, 15 bp, Homo sapiens
ggaattgggagactg

SEQ ID NO: 336909 - DNA, 15 bp, Homo sapiens
gggaattgggagact

SEQ ID NO: 336910 - DNA, 15 bp, Homo sapiens
tgggaattgggagac

SEQ ID NO: 336911 - DNA, 15 bp, Homo sapiens
ctgggaattgggaga

SEQ ID NO: 336912 - DNA, 15 bp, Homo sapiens
gctgggaattgggag

SEQ ID NO: 336913 - DNA, 15 bp, Homo sapiens
agctgggaattggga

SEQ ID NO: 336914 - DNA, 15 bp, Homo sapiens
aagctgggaattggg

SEQ ID NO: 336915 - DNA, 15 bp, Homo sapiens
taagctgggaattgg

SEQ ID NO: 336916 - DNA, 15 bp, Homo sapiens
ctaagctgggaattg

SEQ ID NO: 336917 - DNA, 15 bp, Homo sapiens
cctaagctgggaatt

SEQ ID NO: 336918 - DNA, 15 bp, Homo sapiens
acctaagctgggaat

SEQ ID NO: 336919 - DNA, 15 bp, Homo sapiens
aacctaagctgggaa

SEQ ID NO: 336920 - DNA, 15 bp, Homo sapiens
taacctaagctggga

SEQ ID NO: 336921 - DNA, 15 bp, Homo sapiens
ataacctaagctggg

SEQ ID NO: 336922 - DNA, 15 bp, Homo sapiens
gataacctaagctgg

SEQ ID NO: 336923 - DNA, 15 bp, Homo sapiens
ggataacctaagctg

SEQ ID NO: 336924 - DNA, 15 bp, Homo sapiens
aggataacctaagct

SEQ ID NO: 336925 - DNA, 15 bp, Homo sapiens
gaggataacctaagc

SEQ ID NO: 336926 - DNA, 15 bp, Homo sapiens
ggaggataacctaag

SEQ ID NO: 336927 - DNA, 15 bp, Homo sapiens
gggaggataacctaa

SEQ ID NO: 336928 - DNA, 15 bp, Homo sapiens
agggaggataaccta

SEQ ID NO: 336929 - DNA, 15 bp, Homo sapiens
cagggaggataacct

SEQ ID NO: 336930 - DNA, 15 bp, Homo sapiens
ccagggaggataacc

SEQ ID NO: 336931 - DNA, 15 bp, Homo sapiens
gccagggaggataac

SEQ ID NO: 336932 - DNA, 15 bp, Homo sapiens
tgccagggaggataa

SEQ ID NO: 336933 - DNA, 15 bp, Homo sapiens
gtgccagggaggata

SEQ ID NO: 336934 - DNA, 15 bp, Homo sapiens
ggtgccagggaggat

SEQ ID NO: 336935 - DNA, 15 bp, Homo sapiens
tggtgccagggagga

SEQ ID NO: 336936 - DNA, 15 bp, Homo sapiens
ctggtgccagggagg

SEQ ID NO: 336937 - DNA, 15 bp, Homo sapiens
gctggtgccagggag

SEQ ID NO: 336938 - DNA, 15 bp, Homo sapiens
agctggtgccaggga

SEQ ID NO: 336939 - DNA, 15 bp, Homo sapiens
cagctggtgccaggg

SEQ ID NO: 336940 - DNA, 15 bp, Homo sapiens
gcagctggtgccagg

SEQ ID NO: 336941 - DNA, 15 bp, Homo sapiens
agcagctggtgccag

SEQ ID NO: 336942 - DNA, 15 bp, Homo sapiens
aagcagctggtgcca

SEQ ID NO: 336943 - DNA, 15 bp, Homo sapiens
aaagcagctggtgcc

SEQ ID NO: 336944 - DNA, 15 bp, Homo sapiens
gaaagcagctggtgc

SEQ ID NO: 336945 - DNA, 15 bp, Homo sapiens
agaaagcagctggtg

SEQ ID NO: 336946 - DNA, 15 bp, Homo sapiens
aagaaagcagctggt

SEQ ID NO: 336947 - DNA, 15 bp, Homo sapiens
aaagaaagcagctgg

SEQ ID NO: 336948 - DNA, 15 bp, Homo sapiens
gaaagaaagcagctg

SEQ ID NO: 336949 - DNA, 15 bp, Homo sapiens
tgaaagaaagcagct

SEQ ID NO: 336950 - DNA, 15 bp, Homo sapiens
atgaaagaaagcagc

SEQ ID NO: 336951 - DNA, 15 bp, Homo sapiens
gatgaaagaaagcag

SEQ ID NO: 336952 - DNA, 15 bp, Homo sapiens
tgatgaaagaaagca

SEQ ID NO: 336953 - DNA, 15 bp, Homo sapiens
ctgatgaaagaaagc

SEQ ID NO: 336954 - DNA, 15 bp, Homo sapiens
tctgatgaaagaaag

SEQ ID NO: 336955 - DNA, 15 bp, Homo sapiens
ttctgatgaaagaaa

SEQ ID NO: 336956 - DNA, 15 bp, Homo sapiens
cttctgatgaaagaa

SEQ ID NO: 336957 - DNA, 15 bp, Homo sapiens
ccttctgatgaaaga

SEQ ID NO: 336958 - DNA, 15 bp, Homo sapiens
gccttctgatgaaag

SEQ ID NO: 336959 - DNA, 15 bp, Homo sapiens
tgccttctgatgaaa

SEQ ID NO: 336960 - DNA, 15 bp, Homo sapiens
atgccttctgatgaa

SEQ ID NO: 336961 - DNA, 15 bp, Homo sapiens
catgccttctgatga

SEQ ID NO: 336962 - DNA, 15 bp, Homo sapiens
tcatgccttctgatg

SEQ ID NO: 336963 - DNA, 15 bp, Homo sapiens
ttcatgccttctgat

SEQ ID NO: 336964 - DNA, 15 bp, Homo sapiens
tttcatgccttctga

SEQ ID NO: 336965 - DNA, 15 bp, Homo sapiens
gtttcatgccttctg

SEQ ID NO: 336966 - DNA, 15 bp, Homo sapiens
agtttcatgccttct

SEQ ID NO: 336967 - DNA, 15 bp, Homo sapiens
cagtttcatgccttc

SEQ ID NO: 336968 - DNA, 15 bp, Homo sapiens
tcagtttcatgcctt

SEQ ID NO: 336969 - DNA, 15 bp, Homo sapiens
ctcagtttcatgcct

SEQ ID NO: 336970 - DNA, 15 bp, Homo sapiens
cctcagtttcatgcc

SEQ ID NO: 336971 - DNA, 15 bp, Homo sapiens
ccctcagtttcatgc

SEQ ID NO: 336972 - DNA, 15 bp, Homo sapiens
tccctcagtttcatg

SEQ ID NO: 336973 - DNA, 15 bp, Homo sapiens
ctccctcagtttcat

SEQ ID NO: 336974 - DNA, 15 bp, Homo sapiens
cctccctcagtttca

SEQ ID NO: 336975 - DNA, 15 bp, Homo sapiens
acctccctcagtttc

SEQ ID NO: 336976 - DNA, 15 bp, Homo sapiens
cacctccctcagttt

SEQ ID NO: 336977 - DNA, 15 bp, Homo sapiens
acacctccctcagtt

SEQ ID NO: 336978 - DNA, 15 bp, Homo sapiens
aacacctccctcagt

SEQ ID NO: 336979 - DNA, 15 bp, Homo sapiens
caacacctccctcag

SEQ ID NO: 336980 - DNA, 15 bp, Homo sapiens
acaacacctccctca

SEQ ID NO: 336981 - DNA, 15 bp, Homo sapiens
cacaacacctccctc

SEQ ID NO: 336982 - DNA, 15 bp, Homo sapiens
gcacaacacctccct

SEQ ID NO: 336983 - DNA, 15 bp, Homo sapiens
agcacaacacctccc

SEQ ID NO: 336984 - DNA, 15 bp, Homo sapiens
gagcacaacacctcc

SEQ ID NO: 336985 - DNA, 15 bp, Homo sapiens
agagcacaacacctc

SEQ ID NO: 336986 - DNA, 15 bp, Homo sapiens
cagagcacaacacct

SEQ ID NO: 336987 - DNA, 15 bp, Homo sapiens
ccagagcacaacacc

SEQ ID NO: 336988 - DNA, 15 bp, Homo sapiens
tccagagcacaacac

SEQ ID NO: 336989 - DNA, 15 bp, Homo sapiens
atccagagcacaaca

SEQ ID NO: 336990 - DNA, 15 bp, Homo sapiens
gatccagagcacaac

SEQ ID NO: 336991 - DNA, 15 bp, Homo sapiens
agatccagagcacaa

SEQ ID NO: 336992 - DNA, 15 bp, Homo sapiens
cagatccagagcaca

SEQ ID NO: 336993 - DNA, 15 bp, Homo sapiens
ccagatccagagcac

SEQ ID NO: 336994 - DNA, 15 bp, Homo sapiens
gccagatccagagca

SEQ ID NO: 336995 - DNA, 15 bp, Homo sapiens
tgccagatccagagc

SEQ ID NO: 336996 - DNA, 15 bp, Homo sapiens
gtgccagatccagag

SEQ ID NO: 336997 - DNA, 15 bp, Homo sapiens
agtgccagatccaga

SEQ ID NO: 336998 - DNA, 15 bp, Homo sapiens
gagtgccagatccag

SEQ ID NO: 336999 - DNA, 15 bp, Homo sapiens
tgagtgccagatcca

SEQ ID NO: 337000 - DNA, 15 bp, Homo sapiens
atgagtgccagatcc

SEQ ID NO: 337001 - DNA, 15 bp, Homo sapiens
gatgagtgccagatc

SEQ ID NO: 337002 - DNA, 15 bp, Homo sapiens
agatgagtgccagat

SEQ ID NO: 337003 - DNA, 15 bp, Homo sapiens
aagatgagtgccaga

SEQ ID NO: 337004 - DNA, 15 bp, Homo sapiens
caagatgagtgccag

SEQ ID NO: 337005 - DNA, 15 bp, Homo sapiens
gcaagatgagtgcca

SEQ ID NO: 337006 - DNA, 15 bp, Homo sapiens
tgcaagatgagtgcc

SEQ ID NO: 337007 - DNA, 15 bp, Homo sapiens
ttgcaagatgagtgc

SEQ ID NO: 337008 - DNA, 15 bp, Homo sapiens
gttgcaagatgagtg

SEQ ID NO: 337009 - DNA, 15 bp, Homo sapiens
ggttgcaagatgagt

SEQ ID NO: 337010 - DNA, 15 bp, Homo sapiens
aggttgcaagatgag

SEQ ID NO: 337011 - DNA, 15 bp, Homo sapiens
caggttgcaagatga

SEQ ID NO: 337012 - DNA, 15 bp, Homo sapiens
acaggttgcaagatg

SEQ ID NO: 337013 - DNA, 15 bp, Homo sapiens
aacaggttgcaagat

SEQ ID NO: 337014 - DNA, 15 bp, Homo sapiens
aaacaggttgcaaga

SEQ ID NO: 337015 - DNA, 15 bp, Homo sapiens
gaaacaggttgcaag

SEQ ID NO: 337016 - DNA, 15 bp, Homo sapiens
ggaaacaggttgcaa

SEQ ID NO: 337017 - DNA, 15 bp, Homo sapiens
tggaaacaggttgca

SEQ ID NO: 337018 - DNA, 15 bp, Homo sapiens
gtggaaacaggttgc

SEQ ID NO: 337019 - DNA, 15 bp, Homo sapiens
tgtggaaacaggttg

SEQ ID NO: 337020 - DNA, 15 bp, Homo sapiens
atgtggaaacaggtt

SEQ ID NO: 337021 - DNA, 15 bp, Homo sapiens
gatgtggaaacaggt

SEQ ID NO: 337022 - DNA, 15 bp, Homo sapiens
tgatgtggaaacagg

SEQ ID NO: 337023 - DNA, 15 bp, Homo sapiens
ttgatgtggaaacag

SEQ ID NO: 337024 - DNA, 15 bp, Homo sapiens
tttgatgtggaaaca

SEQ ID NO: 337025 - DNA, 15 bp, Homo sapiens
ctttgatgtggaaac

SEQ ID NO: 337026 - DNA, 15 bp, Homo sapiens
tctttgatgtggaaa

SEQ ID NO: 337027 - DNA, 15 bp, Homo sapiens
ctctttgatgtggaa

SEQ ID NO: 337028 - DNA, 15 bp, Homo sapiens
tctctttgatgtgga

SEQ ID NO: 337029 - DNA, 15 bp, Homo sapiens
ttctctttgatgtgg

SEQ ID NO: 337030 - DNA, 15 bp, Homo sapiens
cttctctttgatgtg

SEQ ID NO: 337031 - DNA, 15 bp, Homo sapiens
tcttctctttgatgt

SEQ ID NO: 337032 - DNA, 15 bp, Homo sapiens
ttcttctctttgatg

SEQ ID NO: 337033 - DNA, 15 bp, Homo sapiens
tttcttctctttgat

SEQ ID NO: 337034 - DNA, 15 bp, Homo sapiens
ctttcttctctttga

SEQ ID NO: 337035 - DNA, 15 bp, Homo sapiens
cctttcttctctttg

SEQ ID NO: 337036 - DNA, 15 bp, Homo sapiens
acctttcttctcttt

SEQ ID NO: 337037 - DNA, 15 bp, Homo sapiens
cacctttcttctctt

SEQ ID NO: 337038 - DNA, 15 bp, Homo sapiens
gcacctttcttctct

SEQ ID NO: 337039 - DNA, 15 bp, Homo sapiens
agcacctttcttctc

SEQ ID NO: 337040 - DNA, 15 bp, Homo sapiens
tagcacctttcttct

SEQ ID NO: 337041 - DNA, 15 bp, Homo sapiens
ctagcacctttcttc

SEQ ID NO: 337042 - DNA, 15 bp, Homo sapiens
tctagcacctttctt

SEQ ID NO: 337043 - DNA, 15 bp, Homo sapiens
atctagcacctttct

SEQ ID NO: 337044 - DNA, 15 bp, Homo sapiens
aatctagcacctttc

SEQ ID NO: 337045 - DNA, 15 bp, Homo sapiens
taatctagcaccttt

SEQ ID NO: 337046 - DNA, 15 bp, Homo sapiens
ttaatctagcacctt

SEQ ID NO: 337047 - DNA, 15 bp, Homo sapiens
tttaatctagcacct

SEQ ID NO: 337048 - DNA, 15 bp, Homo sapiens
gtttaatctagcacc

SEQ ID NO: 337049 - DNA, 15 bp, Homo sapiens
tgtttaatctagcac

SEQ ID NO: 337050 - DNA, 15 bp, Homo sapiens
ttgtttaatctagca

SEQ ID NO: 337051 - DNA, 15 bp, Homo sapiens
attgtttaatctagc

SEQ ID NO: 337052 - DNA, 15 bp, Homo sapiens
aattgtttaatctag

SEQ ID NO: 337053 - DNA, 15 bp, Homo sapiens
caattgtttaatcta

SEQ ID NO: 337054 - DNA, 15 bp, Homo sapiens
gcaattgtttaatct

SEQ ID NO: 337055 - DNA, 15 bp, Homo sapiens
ggcaattgtttaatc

SEQ ID NO: 337056 - DNA, 15 bp, Homo sapiens
tggcaattgtttaat

SEQ ID NO: 337057 - DNA, 15 bp, Homo sapiens
ttggcaattgtttaa

SEQ ID NO: 337058 - DNA, 15 bp, Homo sapiens
cttggcaattgttta

SEQ ID NO: 337059 - DNA, 15 bp, Homo sapiens
ccttggcaattgttt

SEQ ID NO: 337060 - DNA, 15 bp, Homo sapiens
cccttggcaattgtt

SEQ ID NO: 337061 - DNA, 15 bp, Homo sapiens
gcccttggcaattgt

SEQ ID NO: 337062 - DNA, 15 bp, Homo sapiens
agcccttggcaattg

SEQ ID NO: 337063 - DNA, 15 bp, Homo sapiens
tagcccttggcaatt

SEQ ID NO: 337064 - DNA, 15 bp, Homo sapiens
atagcccttggcaat

SEQ ID NO: 337065 - DNA, 15 bp, Homo sapiens
aatagcccttggcaa

SEQ ID NO: 337066 - DNA, 15 bp, Homo sapiens
gaatagcccttggca

SEQ ID NO: 337067 - DNA, 15 bp, Homo sapiens
tgaatagcccttggc

SEQ ID NO: 337068 - DNA, 15 bp, Homo sapiens
atgaatagcccttgg

SEQ ID NO: 337069 - DNA, 15 bp, Homo sapiens
aatgaatagcccttg

SEQ ID NO: 337070 - DNA, 15 bp, Homo sapiens
gaatgaatagccctt

SEQ ID NO: 337071 - DNA, 15 bp, Homo sapiens
tgaatgaatagccct

SEQ ID NO: 337072 - DNA, 15 bp, Homo sapiens
ctgaatgaatagccc

SEQ ID NO: 337073 - DNA, 15 bp, Homo sapiens
tctgaatgaatagcc

SEQ ID NO: 337074 - DNA, 15 bp, Homo sapiens
atctgaatgaatagc

SEQ ID NO: 337075 - DNA, 15 bp, Homo sapiens
catctgaatgaatag

SEQ ID NO: 337076 - DNA, 15 bp, Homo sapiens
gcatctgaatgaata

SEQ ID NO: 337077 - DNA, 15 bp, Homo sapiens
agcatctgaatgaat

SEQ ID NO: 337078 - DNA, 15 bp, Homo sapiens
cagcatctgaatgaa

SEQ ID NO: 337079 - DNA, 15 bp, Homo sapiens
tcagcatctgaatga

SEQ ID NO: 337080 - DNA, 15 bp, Homo sapiens
ctcagcatctgaatg

SEQ ID NO: 337081 - DNA, 15 bp, Homo sapiens
tctcagcatctgaat

SEQ ID NO: 337082 - DNA, 15 bp, Homo sapiens
atctcagcatctgaa

SEQ ID NO: 337083 - DNA, 15 bp, Homo sapiens
tatctcagcatctga

SEQ ID NO: 337084 - DNA, 15 bp, Homo sapiens
ttatctcagcatctg

SEQ ID NO: 337085 - DNA, 15 bp, Homo sapiens
tttatctcagcatct

SEQ ID NO: 337086 - DNA, 15 bp, Homo sapiens
gtttatctcagcatc

SEQ ID NO: 337087 - DNA, 15 bp, Homo sapiens
agtttatctcagcat

SEQ ID NO: 337088 - DNA, 15 bp, Homo sapiens
aagtttatctcagca

SEQ ID NO: 337089 - DNA, 15 bp, Homo sapiens
taagtttatctcagc

SEQ ID NO: 337090 - DNA, 15 bp, Homo sapiens
ttaagtttatctcag

SEQ ID NO: 337091 - DNA, 15 bp, Homo sapiens
cttaagtttatctca

SEQ ID NO: 337092 - DNA, 15 bp, Homo sapiens
tcttaagtttatctc

SEQ ID NO: 337093 - DNA, 15 bp, Homo sapiens
ttcttaagtttatct

SEQ ID NO: 337094 - DNA, 15 bp, Homo sapiens
gttcttaagtttatc

SEQ ID NO: 337095 - DNA, 15 bp, Homo sapiens
cgttcttaagtttat

SEQ ID NO: 337096 - DNA, 15 bp, Homo sapiens
acgttcttaagttta

SEQ ID NO: 337097 - DNA, 15 bp, Homo sapiens
cacgttcttaagttt

SEQ ID NO: 337098 - DNA, 15 bp, Homo sapiens
ccacgttcttaagtt

SEQ ID NO: 337099 - DNA, 15 bp, Homo sapiens
cccacgttcttaagt

SEQ ID NO: 337100 - DNA, 15 bp, Homo sapiens
tcccacgttcttaag

SEQ ID NO: 337101 - DNA, 15 bp, Homo sapiens
ctcccacgttcttaa

SEQ ID NO: 337102 - DNA, 15 bp, Homo sapiens
cctcccacgttctta

SEQ ID NO: 337103 - DNA, 15 bp, Homo sapiens
ccctcccacgttctt

SEQ ID NO: 337104 - DNA, 15 bp, Homo sapiens
cccctcccacgttct

SEQ ID NO: 337105 - DNA, 15 bp, Homo sapiens
ccccctcccacgttc

SEQ ID NO: 337106 - DNA, 15 bp, Homo sapiens
gccccctcccacgtt

SEQ ID NO: 337107 - DNA, 15 bp, Homo sapiens
ggccccctcccacgt

SEQ ID NO: 337108 - DNA, 15 bp, Homo sapiens
gggccccctcccacg

SEQ ID NO: 337109 - DNA, 15 bp, Homo sapiens
tgggccccctcccac

SEQ ID NO: 337110 - DNA, 15 bp, Homo sapiens
ttgggccccctccca

SEQ ID NO: 337111 - DNA, 15 bp, Homo sapiens
attgggccccctccc

SEQ ID NO: 337112 - DNA, 15 bp, Homo sapiens
cattgggccccctcc

SEQ ID NO: 337113 - DNA, 15 bp, Homo sapiens
ccattgggccccctc

SEQ ID NO: 337114 - DNA, 15 bp, Homo sapiens
accattgggccccct

SEQ ID NO: 337115 - DNA, 15 bp, Homo sapiens
caccattgggccccc

SEQ ID NO: 337116 - DNA, 15 bp, Homo sapiens
tcaccattgggcccc

SEQ ID NO: 337117 - DNA, 15 bp, Homo sapiens
gtcaccattgggccc

SEQ ID NO: 337118 - DNA, 15 bp, Homo sapiens
agtcaccattgggcc

SEQ ID NO: 337119 - DNA, 15 bp, Homo sapiens
tagtcaccattgggc

SEQ ID NO: 337120 - DNA, 15 bp, Homo sapiens
atagtcaccattggg

SEQ ID NO: 337121 - DNA, 15 bp, Homo sapiens
aatagtcaccattgg

SEQ ID NO: 337122 - DNA, 15 bp, Homo sapiens
gaatagtcaccattg

SEQ ID NO: 337123 - DNA, 15 bp, Homo sapiens
ggaatagtcaccatt

SEQ ID NO: 337124 - DNA, 15 bp, Homo sapiens
tggaatagtcaccat

SEQ ID NO: 337125 - DNA, 15 bp, Homo sapiens
atggaatagtcacca

SEQ ID NO: 337126 - DNA, 15 bp, Homo sapiens
catggaatagtcacc

SEQ ID NO: 337127 - DNA, 15 bp, Homo sapiens
ccatggaatagtcac

SEQ ID NO: 337128 - DNA, 15 bp, Homo sapiens
accatggaatagtca

SEQ ID NO: 337129 - DNA, 15 bp, Homo sapiens
gaccatggaatagtc

SEQ ID NO: 337130 - DNA, 15 bp, Homo sapiens
tgaccatggaatagt

SEQ ID NO: 337131 - DNA, 15 bp, Homo sapiens
gtgaccatggaatag

SEQ ID NO: 337132 - DNA, 15 bp, Homo sapiens
tgtgaccatggaata

SEQ ID NO: 337133 - DNA, 15 bp, Homo sapiens
ctgtgaccatggaat

SEQ ID NO: 337134 - DNA, 15 bp, Homo sapiens
actgtgaccatggaa

SEQ ID NO: 337135 - DNA, 15 bp, Homo sapiens
aactgtgaccatgga

SEQ ID NO: 337136 - DNA, 15 bp, Homo sapiens
aaactgtgaccatgg

SEQ ID NO: 337137 - DNA, 15 bp, Homo sapiens
gaaactgtgaccatg

SEQ ID NO: 337138 - DNA, 15 bp, Homo sapiens
ggaaactgtgaccat

SEQ ID NO: 337139 - DNA, 15 bp, Homo sapiens
gggaaactgtgacca

SEQ ID NO: 337140 - DNA, 15 bp, Homo sapiens
agggaaactgtgacc

SEQ ID NO: 337141 - DNA, 15 bp, Homo sapiens
aagggaaactgtgac

SEQ ID NO: 337142 - DNA, 15 bp, Homo sapiens
aaagggaaactgtga

SEQ ID NO: 337143 - DNA, 15 bp, Homo sapiens
aaaagggaaactgtg

SEQ ID NO: 337144 - DNA, 15 bp, Homo sapiens
gaaaagggaaactgt

SEQ ID NO: 337145 - DNA, 15 bp, Homo sapiens
tgaaaagggaaactg

SEQ ID NO: 337146 - DNA, 15 bp, Homo sapiens
ttgaaaagggaaact

SEQ ID NO: 337147 - DNA, 15 bp, Homo sapiens
tttgaaaagggaaac

SEQ ID NO: 337148 - DNA, 15 bp, Homo sapiens
ctttgaaaagggaaa

SEQ ID NO: 337149 - DNA, 15 bp, Homo sapiens
cctttgaaaagggaa

SEQ ID NO: 337150 - DNA, 15 bp, Homo sapiens
gcctttgaaaaggga

SEQ ID NO: 337151 - DNA, 15 bp, Homo sapiens
agcctttgaaaaggg

SEQ ID NO: 337152 - DNA, 15 bp, Homo sapiens
tagcctttgaaaagg

SEQ ID NO: 337153 - DNA, 15 bp, Homo sapiens
gtagcctttgaaaag

SEQ ID NO: 337154 - DNA, 15 bp, Homo sapiens
agtagcctttgaaaa

SEQ ID NO: 337155 - DNA, 15 bp, Homo sapiens
cagtagcctttgaaa

SEQ ID NO: 337156 - DNA, 15 bp, Homo sapiens
ccagtagcctttgaa

SEQ ID NO: 337157 - DNA, 15 bp, Homo sapiens
gccagtagcctttga

SEQ ID NO: 337158 - DNA, 15 bp, Homo sapiens
agccagtagcctttg

SEQ ID NO: 337159 - DNA, 15 bp, Homo sapiens
gagccagtagccttt

SEQ ID NO: 337160 - DNA, 15 bp, Homo sapiens
agagccagtagcctt

SEQ ID NO: 337161 - DNA, 15 bp, Homo sapiens
tagagccagtagcct

SEQ ID NO: 337162 - DNA, 15 bp, Homo sapiens
ttagagccagtagcc

SEQ ID NO: 337163 - DNA, 15 bp, Homo sapiens
gttagagccagtagc

SEQ ID NO: 337164 - DNA, 15 bp, Homo sapiens
tgttagagccagtag

SEQ ID NO: 337165 - DNA, 15 bp, Homo sapiens
ttgttagagccagta

SEQ ID NO: 337166 - DNA, 15 bp, Homo sapiens
gttgttagagccagt

SEQ ID NO: 337167 - DNA, 15 bp, Homo sapiens
ggttgttagagccag

SEQ ID NO: 337168 - DNA, 15 bp, Homo sapiens
tggttgttagagcca

SEQ ID NO: 337169 - DNA, 15 bp, Homo sapiens
ctggttgttagagcc

SEQ ID NO: 337170 - DNA, 15 bp, Homo sapiens
actggttgttagagc

SEQ ID NO: 337171 - DNA, 15 bp, Homo sapiens
tactggttgttagag

SEQ ID NO: 337172 - DNA, 15 bp, Homo sapiens
atactggttgttaga

SEQ ID NO: 337173 - DNA, 15 bp, Homo sapiens
gatactggttgttag

SEQ ID NO: 337174 - DNA, 15 bp, Homo sapiens
agatactggttgtta

SEQ ID NO: 337175 - DNA, 15 bp, Homo sapiens
cagatactggttgtt

SEQ ID NO: 337176 - DNA, 15 bp, Homo sapiens
tcagatactggttgt

SEQ ID NO: 337177 - DNA, 15 bp, Homo sapiens
ctcagatactggttg

SEQ ID NO: 337178 - DNA, 15 bp, Homo sapiens
cctcagatactggtt

SEQ ID NO: 337179 - DNA, 15 bp, Homo sapiens
gcctcagatactggt

SEQ ID NO: 337180 - DNA, 15 bp, Homo sapiens
agcctcagatactgg

SEQ ID NO: 337181 - DNA, 15 bp, Homo sapiens
aagcctcagatactg

SEQ ID NO: 337182 - DNA, 15 bp, Homo sapiens
caagcctcagatact

SEQ ID NO: 337183 - DNA, 15 bp, Homo sapiens
ccaagcctcagatac

SEQ ID NO: 337184 - DNA, 15 bp, Homo sapiens
cccaagcctcagata

SEQ ID NO: 337185 - DNA, 15 bp, Homo sapiens
tcccaagcctcagat

SEQ ID NO: 337186 - DNA, 15 bp, Homo sapiens
ttcccaagcctcaga

SEQ ID NO: 337187 - DNA, 15 bp, Homo sapiens
tttcccaagcctcag

SEQ ID NO: 337188 - DNA, 15 bp, Homo sapiens
ttttcccaagcctca

SEQ ID NO: 337189 - DNA, 15 bp, Homo sapiens
cttttcccaagcctc

SEQ ID NO: 337190 - DNA, 15 bp, Homo sapiens
acttttcccaagcct

SEQ ID NO: 337191 - DNA, 15 bp, Homo sapiens
tacttttcccaagcc

SEQ ID NO: 337192 - DNA, 15 bp, Homo sapiens
atacttttcccaagc

SEQ ID NO: 337193 - DNA, 15 bp, Homo sapiens
catacttttcccaag

SEQ ID NO: 337194 - DNA, 15 bp, Homo sapiens
acatacttttcccaa

SEQ ID NO: 337195 - DNA, 15 bp, Homo sapiens
tacatacttttccca

SEQ ID NO: 337196 - DNA, 15 bp, Homo sapiens
ctacatacttttccc

SEQ ID NO: 337197 - DNA, 15 bp, Homo sapiens
tctacatacttttcc

SEQ ID NO: 337198 - DNA, 15 bp, Homo sapiens
atctacatacttttc

SEQ ID NO: 337199 - DNA, 15 bp, Homo sapiens
aatctacatactttt

SEQ ID NO: 337200 - DNA, 15 bp, Homo sapiens
aaatctacatacttt

SEQ ID NO: 337201 - DNA, 15 bp, Homo sapiens
aaaatctacatactt

SEQ ID NO: 337202 - DNA, 15 bp, Homo sapiens
gaaaatctacatact

SEQ ID NO: 337203 - DNA, 15 bp, Homo sapiens
ggaaaatctacatac

SEQ ID NO: 337204 - DNA, 15 bp, Homo sapiens
aggaaaatctacata

SEQ ID NO: 337205 - DNA, 15 bp, Homo sapiens
aaggaaaatctacat

SEQ ID NO: 337206 - DNA, 15 bp, Homo sapiens
caaggaaaatctaca

SEQ ID NO: 337207 - DNA, 15 bp, Homo sapiens
acaaggaaaatctac

SEQ ID NO: 337208 - DNA, 15 bp, Homo sapiens
gacaaggaaaatcta

SEQ ID NO: 337209 - DNA, 15 bp, Homo sapiens
tgacaaggaaaatct

SEQ ID NO: 337210 - DNA, 15 bp, Homo sapiens
atgacaaggaaaatc

SEQ ID NO: 337211 - DNA, 15 bp, Homo sapiens
tatgacaaggaaaat

SEQ ID NO: 337212 - DNA, 15 bp, Homo sapiens
ctatgacaaggaaaa

SEQ ID NO: 337213 - DNA, 15 bp, Homo sapiens
tctatgacaaggaaa

SEQ ID NO: 337214 - DNA, 15 bp, Homo sapiens
gtctatgacaaggaa

SEQ ID NO: 337215 - DNA, 15 bp, Homo sapiens
ggtctatgacaagga

SEQ ID NO: 337216 - DNA, 15 bp, Homo sapiens
aggtctatgacaagg

SEQ ID NO: 337217 - DNA, 15 bp, Homo sapiens
taggtctatgacaag

SEQ ID NO: 337218 - DNA, 15 bp, Homo sapiens
ttaggtctatgacaa

SEQ ID NO: 337219 - DNA, 15 bp, Homo sapiens
tttaggtctatgaca

SEQ ID NO: 337220 - DNA, 15 bp, Homo sapiens
ttttaggtctatgac

SEQ ID NO: 337221 - DNA, 15 bp, Homo sapiens
cttttaggtctatga

SEQ ID NO: 337222 - DNA, 15 bp, Homo sapiens
acttttaggtctatg

SEQ ID NO: 337223 - DNA, 15 bp, Homo sapiens
gacttttaggtctat

SEQ ID NO: 337224 - DNA, 15 bp, Homo sapiens
tgacttttaggtcta

SEQ ID NO: 337225 - DNA, 15 bp, Homo sapiens
atgacttttaggtct

SEQ ID NO: 337226 - DNA, 15 bp, Homo sapiens
gatgacttttaggtc

SEQ ID NO: 337227 - DNA, 15 bp, Homo sapiens
agatgacttttaggt

SEQ ID NO: 337228 - DNA, 15 bp, Homo sapiens
aagatgacttttagg

SEQ ID NO: 337229 - DNA, 15 bp, Homo sapiens
gaagatgacttttag

SEQ ID NO: 337230 - DNA, 15 bp, Homo sapiens
tgaagatgactttta

SEQ ID NO: 337231 - DNA, 15 bp, Homo sapiens
ctgaagatgactttt

SEQ ID NO: 337232 - DNA, 15 bp, Homo sapiens
actgaagatgacttt

SEQ ID NO: 337233 - DNA, 15 bp, Homo sapiens
cactgaagatgactt

SEQ ID NO: 337234 - DNA, 15 bp, Homo sapiens
ccactgaagatgact

SEQ ID NO: 337235 - DNA, 15 bp, Homo sapiens
gccactgaagatgac

SEQ ID NO: 337236 - DNA, 15 bp, Homo sapiens
agccactgaagatga

SEQ ID NO: 337237 - DNA, 15 bp, Homo sapiens
gagccactgaagatg

SEQ ID NO: 337238 - DNA, 15 bp, Homo sapiens
agagccactgaagat

SEQ ID NO: 337239 - DNA, 15 bp, Homo sapiens
gagagccactgaaga

SEQ ID NO: 337240 - DNA, 15 bp, Homo sapiens
agagagccactgaag

SEQ ID NO: 337241 - DNA, 15 bp, Homo sapiens
aagagagccactgaa

SEQ ID NO: 337242 - DNA, 15 bp, Homo sapiens
caagagagccactga

SEQ ID NO: 337243 - DNA, 15 bp, Homo sapiens
tcaagagagccactg

SEQ ID NO: 337244 - DNA, 15 bp, Homo sapiens
atcaagagagccact

SEQ ID NO: 337245 - DNA, 15 bp, Homo sapiens
catcaagagagccac

SEQ ID NO: 337246 - DNA, 15 bp, Homo sapiens
gcatcaagagagcca

SEQ ID NO: 337247 - DNA, 15 bp, Homo sapiens
ggcatcaagagagcc

SEQ ID NO: 337248 - DNA, 15 bp, Homo sapiens
aggcatcaagagagc

SEQ ID NO: 337249 - DNA, 15 bp, Homo sapiens
gaggcatcaagagag

SEQ ID NO: 337250 - DNA, 15 bp, Homo sapiens
tgaggcatcaagaga

SEQ ID NO: 337251 - DNA, 15 bp, Homo sapiens
ctgaggcatcaagag

SEQ ID NO: 337252 - DNA, 15 bp, Homo sapiens
actgaggcatcaaga

SEQ ID NO: 337253 - DNA, 15 bp, Homo sapiens
gactgaggcatcaag

SEQ ID NO: 337254 - DNA, 15 bp, Homo sapiens
tgactgaggcatcaa

SEQ ID NO: 337255 - DNA, 15 bp, Homo sapiens
gtgactgaggcatca

SEQ ID NO: 337256 - DNA, 15 bp, Homo sapiens
agtgactgaggcatc

SEQ ID NO: 337257 - DNA, 15 bp, Homo sapiens
cagtgactgaggcat

SEQ ID NO: 337258 - DNA, 15 bp, Homo sapiens
gcagtgactgaggca

SEQ ID NO: 337259 - DNA, 15 bp, Homo sapiens
ggcagtgactgaggc

SEQ ID NO: 337260 - DNA, 15 bp, Homo sapiens
gggcagtgactgagg

SEQ ID NO: 337261 - DNA, 15 bp, Homo sapiens
agggcagtgactgag

SEQ ID NO: 337262 - DNA, 15 bp, Homo sapiens
gagggcagtgactga

SEQ ID NO: 337263 - DNA, 15 bp, Homo sapiens
ggagggcagtgactg

SEQ ID NO: 337264 - DNA, 15 bp, Homo sapiens
aggagggcagtgact

SEQ ID NO: 337265 - DNA, 15 bp, Homo sapiens
caggagggcagtgac

SEQ ID NO: 337266 - DNA, 15 bp, Homo sapiens
acaggagggcagtga

SEQ ID NO: 337267 - DNA, 15 bp, Homo sapiens
gacaggagggcagtg

SEQ ID NO: 337268 - DNA, 15 bp, Homo sapiens
ggacaggagggcagt

SEQ ID NO: 337269 - DNA, 15 bp, Homo sapiens
aggacaggagggcag

SEQ ID NO: 337270 - DNA, 15 bp, Homo sapiens
gaggacaggagggca

SEQ ID NO: 337271 - DNA, 15 bp, Homo sapiens
agaggacaggagggc

SEQ ID NO: 337272 - DNA, 15 bp, Homo sapiens
aagaggacaggaggg

SEQ ID NO: 337273 - DNA, 15 bp, Homo sapiens
gaagaggacaggagg

SEQ ID NO: 337274 - DNA, 15 bp, Homo sapiens
agaagaggacaggag

SEQ ID NO: 337275 - DNA, 15 bp, Homo sapiens
cagaagaggacagga

SEQ ID NO: 337276 - DNA, 15 bp, Homo sapiens
gcagaagaggacagg

SEQ ID NO: 337277 - DNA, 15 bp, Homo sapiens
ggcagaagaggacag

SEQ ID NO: 337278 - DNA, 15 bp, Homo sapiens
aggcagaagaggaca

SEQ ID NO: 337279 - DNA, 15 bp, Homo sapiens
aaggcagaagaggac

SEQ ID NO: 337280 - DNA, 15 bp, Homo sapiens
gaaggcagaagagga

SEQ ID NO: 337281 - DNA, 15 bp, Homo sapiens
agaaggcagaagagg

SEQ ID NO: 337282 - DNA, 15 bp, Homo sapiens
cagaaggcagaagag

SEQ ID NO: 337283 - DNA, 15 bp, Homo sapiens
gcagaaggcagaaga

SEQ ID NO: 337284 - DNA, 15 bp, Homo sapiens
aggcagaaggcagaa

SEQ ID NO: 337285 - DNA, 15 bp, Homo sapiens
aaggcagaaggcaga

SEQ ID NO: 337286 - DNA, 15 bp, Homo sapiens
taaggcagaaggcag

SEQ ID NO: 337287 - DNA, 15 bp, Homo sapiens
ttaaggcagaaggca

SEQ ID NO: 337288 - DNA, 15 bp, Homo sapiens
cttaaggcagaaggc

SEQ ID NO: 337289 - DNA, 15 bp, Homo sapiens
acttaaggcagaagg

SEQ ID NO: 337290 - DNA, 15 bp, Homo sapiens
gacttaaggcagaag

SEQ ID NO: 337291 - DNA, 15 bp, Homo sapiens
tgacttaaggcagaa

SEQ ID NO: 337292 - DNA, 15 bp, Homo sapiens
gtgacttaaggcaga

SEQ ID NO: 337293 - DNA, 15 bp, Homo sapiens
agtgacttaaggcag

SEQ ID NO: 337294 - DNA, 15 bp, Homo sapiens
aagtgacttaaggca

SEQ ID NO: 337295 - DNA, 15 bp, Homo sapiens
gaagtgacttaaggc

SEQ ID NO: 337296 - DNA, 15 bp, Homo sapiens
ggaagtgacttaagg

SEQ ID NO: 337297 - DNA, 15 bp, Homo sapiens
gggaagtgacttaag

SEQ ID NO: 337298 - DNA, 15 bp, Homo sapiens
ggggaagtgacttaa

SEQ ID NO: 337299 - DNA, 15 bp, Homo sapiens
aggggaagtgactta

SEQ ID NO: 337300 - DNA, 15 bp, Homo sapiens
taggggaagtgactt

SEQ ID NO: 337301 - DNA, 15 bp, Homo sapiens
ctaggggaagtgact

SEQ ID NO: 337302 - DNA, 15 bp, Homo sapiens
cctaggggaagtgac

SEQ ID NO: 337303 - DNA, 15 bp, Homo sapiens
acctaggggaagtga

SEQ ID NO: 337304 - DNA, 15 bp, Homo sapiens
aacctaggggaagtg

SEQ ID NO: 337305 - DNA, 15 bp, Homo sapiens
caacctaggggaagt

SEQ ID NO: 337306 - DNA, 15 bp, Homo sapiens
acaacctaggggaag

SEQ ID NO: 337307 - DNA, 15 bp, Homo sapiens
gacaacctaggggaa

SEQ ID NO: 337308 - DNA, 15 bp, Homo sapiens
ggacaacctagggga

SEQ ID NO: 337309 - DNA, 15 bp, Homo sapiens
aggacaacctagggg

SEQ ID NO: 337310 - DNA, 15 bp, Homo sapiens
caggacaacctaggg

SEQ ID NO: 337311 - DNA, 15 bp, Homo sapiens
acaggacaacctagg

SEQ ID NO: 337312 - DNA, 15 bp, Homo sapiens
cacaggacaacctag

SEQ ID NO: 337313 - DNA, 15 bp, Homo sapiens
acacaggacaaccta

SEQ ID NO: 337314 - DNA, 15 bp, Homo sapiens
tacacaggacaacct

SEQ ID NO: 337315 - DNA, 15 bp, Homo sapiens
gtacacaggacaacc

SEQ ID NO: 337316 - DNA, 15 bp, Homo sapiens
ggtacacaggacaac

SEQ ID NO: 337317 - DNA, 15 bp, Homo sapiens
aggtacacaggacaa

SEQ ID NO: 337318 - DNA, 15 bp, Homo sapiens
caggtacacaggaca

SEQ ID NO: 337319 - DNA, 15 bp, Homo sapiens
acaggtacacaggac

SEQ ID NO: 337320 - DNA, 15 bp, Homo sapiens
cacaggtacacagga

SEQ ID NO: 337321 - DNA, 15 bp, Homo sapiens
ccacaggtacacagg

SEQ ID NO: 337322 - DNA, 15 bp, Homo sapiens
tccacaggtacacag

SEQ ID NO: 337323 - DNA, 15 bp, Homo sapiens
ttccacaggtacaca

SEQ ID NO: 337324 - DNA, 15 bp, Homo sapiens
attccacaggtacac

SEQ ID NO: 337325 - DNA, 15 bp, Homo sapiens
aattccacaggtaca

SEQ ID NO: 337326 - DNA, 15 bp, Homo sapiens
caattccacaggtac

SEQ ID NO: 337327 - DNA, 15 bp, Homo sapiens
tcaattccacaggta

SEQ ID NO: 337328 - DNA, 15 bp, Homo sapiens
ctcaattccacaggt

SEQ ID NO: 337329 - DNA, 15 bp, Homo sapiens
gctcaattccacagg

SEQ ID NO: 337330 - DNA, 15 bp, Homo sapiens
agctcaattccacag

SEQ ID NO: 337331 - DNA, 15 bp, Homo sapiens
gagctcaattccaca

SEQ ID NO: 337332 - DNA, 15 bp, Homo sapiens
agagctcaattccac

SEQ ID NO: 337333 - DNA, 15 bp, Homo sapiens
cagagctcaattcca

SEQ ID NO: 337334 - DNA, 15 bp, Homo sapiens
tcagagctcaattcc

SEQ ID NO: 337335 - DNA, 15 bp, Homo sapiens
ttcagagctcaattc

SEQ ID NO: 337336 - DNA, 15 bp, Homo sapiens
tttcagagctcaatt

SEQ ID NO: 337337 - DNA, 15 bp, Homo sapiens
gtttcagagctcaat

SEQ ID NO: 337338 - DNA, 15 bp, Homo sapiens
agtttcagagctcaa

SEQ ID NO: 337339 - DNA, 15 bp, Homo sapiens
cagtttcagagctca

SEQ ID NO: 337340 - DNA, 15 bp, Homo sapiens
tcagtttcagagctc

SEQ ID NO: 337341 - DNA, 15 bp, Homo sapiens
ttcagtttcagagct

SEQ ID NO: 337342 - DNA, 15 bp, Homo sapiens
cttcagtttcagagc

SEQ ID NO: 337343 - DNA, 15 bp, Homo sapiens
acttcagtttcagag

SEQ ID NO: 337344 - DNA, 15 bp, Homo sapiens
aacttcagtttcaga

SEQ ID NO: 337345 - DNA, 15 bp, Homo sapiens
gaacttcagtttcag

SEQ ID NO: 337346 - DNA, 15 bp, Homo sapiens
agaacttcagtttca

SEQ ID NO: 337347 - DNA, 15 bp, Homo sapiens
cagaacttcagtttc

SEQ ID NO: 337348 - DNA, 15 bp, Homo sapiens
ccagaacttcagttt

SEQ ID NO: 337349 - DNA, 15 bp, Homo sapiens
gccagaacttcagtt

SEQ ID NO: 337350 - DNA, 15 bp, Homo sapiens
agccagaacttcagt

SEQ ID NO: 337351 - DNA, 15 bp, Homo sapiens
gagccagaacttcag

SEQ ID NO: 337352 - DNA, 15 bp, Homo sapiens
tgagccagaacttca

SEQ ID NO: 337353 - DNA, 15 bp, Homo sapiens
ttgagccagaacttc

SEQ ID NO: 337354 - DNA, 15 bp, Homo sapiens
gttgagccagaactt

SEQ ID NO: 337355 - DNA, 15 bp, Homo sapiens
agttgagccagaact

SEQ ID NO: 337356 - DNA, 15 bp, Homo sapiens
aagttgagccagaac

SEQ ID NO: 337357 - DNA, 15 bp, Homo sapiens
caagttgagccagaa

SEQ ID NO: 337358 - DNA, 15 bp, Homo sapiens
ccaagttgagccaga

SEQ ID NO: 337359 - DNA, 15 bp, Homo sapiens
cccaagttgagccag

SEQ ID NO: 337360 - DNA, 15 bp, Homo sapiens
gcccaagttgagcca

SEQ ID NO: 337361 - DNA, 15 bp, Homo sapiens
tgcccaagttgagcc

SEQ ID NO: 337362 - DNA, 15 bp, Homo sapiens
atgcccaagttgagc

SEQ ID NO: 337363 - DNA, 15 bp, Homo sapiens
catgcccaagttgag

SEQ ID NO: 337364 - DNA, 15 bp, Homo sapiens
gcatgcccaagttga

SEQ ID NO: 337365 - DNA, 15 bp, Homo sapiens
tgcatgcccaagttg

SEQ ID NO: 337366 - DNA, 15 bp, Homo sapiens
ctgcatgcccaagtt

SEQ ID NO: 337367 - DNA, 15 bp, Homo sapiens
cctgcatgcccaagt

SEQ ID NO: 337368 - DNA, 15 bp, Homo sapiens
gcctgcatgcccaag

SEQ ID NO: 337369 - DNA, 15 bp, Homo sapiens
agcctgcatgcccaa

SEQ ID NO: 337370 - DNA, 15 bp, Homo sapiens
aagcctgcatgccca

SEQ ID NO: 337371 - DNA, 15 bp, Homo sapiens
aaagcctgcatgccc

SEQ ID NO: 337372 - DNA, 15 bp, Homo sapiens
gaaagcctgcatgcc

SEQ ID NO: 337373 - DNA, 15 bp, Homo sapiens
ggaaagcctgcatgc

SEQ ID NO: 337374 - DNA, 15 bp, Homo sapiens
aggaaagcctgcatg

SEQ ID NO: 337375 - DNA, 15 bp, Homo sapiens
caggaaagcctgcat

SEQ ID NO: 337376 - DNA, 15 bp, Homo sapiens
ccaggaaagcctgca

SEQ ID NO: 337377 - DNA, 15 bp, Homo sapiens
gccaggaaagcctgc

SEQ ID NO: 337378 - DNA, 15 bp, Homo sapiens
ggccaggaaagcctg

SEQ ID NO: 337379 - DNA, 15 bp, Homo sapiens
gggccaggaaagcct

SEQ ID NO: 337380 - DNA, 15 bp, Homo sapiens
tgggccaggaaagcc

SEQ ID NO: 337381 - DNA, 15 bp, Homo sapiens
atgggccaggaaagc

SEQ ID NO: 337382 - DNA, 15 bp, Homo sapiens
gatgggccaggaaag

SEQ ID NO: 337383 - DNA, 15 bp, Homo sapiens
tgatgggccaggaaa

SEQ ID NO: 337384 - DNA, 15 bp, Homo sapiens
gtgatgggccaggaa

SEQ ID NO: 337385 - DNA, 15 bp, Homo sapiens
agtgatgggccagga

SEQ ID NO: 337386 - DNA, 15 bp, Homo sapiens
cagtgatgggccagg

SEQ ID NO: 337387 - DNA, 15 bp, Homo sapiens
tcagtgatgggccag

SEQ ID NO: 337388 - DNA, 15 bp, Homo sapiens
ctcagtgatgggcca

SEQ ID NO: 337389 - DNA, 15 bp, Homo sapiens
tctcagtgatgggcc

SEQ ID NO: 337390 - DNA, 15 bp, Homo sapiens
ttctcagtgatgggc

SEQ ID NO: 337391 - DNA, 15 bp, Homo sapiens
cttctcagtgatggg

SEQ ID NO: 337392 - DNA, 15 bp, Homo sapiens
tcttctcagtgatgg

SEQ ID NO: 337393 - DNA, 15 bp, Homo sapiens
ctcttctcagtgatg

SEQ ID NO: 337394 - DNA, 15 bp, Homo sapiens
tctcttctcagtgat

SEQ ID NO: 337395 - DNA, 15 bp, Homo sapiens
ctctcttctcagtga

SEQ ID NO: 337396 - DNA, 15 bp, Homo sapiens
actctcttctcagtg

SEQ ID NO: 337397 - DNA, 15 bp, Homo sapiens
tactctcttctcagt

SEQ ID NO: 337398 - DNA, 15 bp, Homo sapiens
ctactctcttctcag

SEQ ID NO: 337399 - DNA, 15 bp, Homo sapiens
tctactctcttctca

SEQ ID NO: 337400 - DNA, 15 bp, Homo sapiens
ttctactctcttctc

SEQ ID NO: 337401 - DNA, 15 bp, Homo sapiens
cttctactctcttct

SEQ ID NO: 337402 - DNA, 15 bp, Homo sapiens
ccttctactctcttc

SEQ ID NO: 337403 - DNA, 15 bp, Homo sapiens
tccttctactctctt

SEQ ID NO: 337404 - DNA, 15 bp, Homo sapiens
atccttctactctct

SEQ ID NO: 337405 - DNA, 15 bp, Homo sapiens
aatccttctactctc

SEQ ID NO: 337406 - DNA, 15 bp, Homo sapiens
caatccttctactct

SEQ ID NO: 337407 - DNA, 15 bp, Homo sapiens
tcaatccttctactc

SEQ ID NO: 337408 - DNA, 15 bp, Homo sapiens
ctcaatccttctact

SEQ ID NO: 337409 - DNA, 15 bp, Homo sapiens
tctcaatccttctac

SEQ ID NO: 337410 - DNA, 15 bp, Homo sapiens
ttctcaatccttcta

SEQ ID NO: 337411 - DNA, 15 bp, Homo sapiens
cttctcaatccttct

SEQ ID NO: 337412 - DNA, 15 bp, Homo sapiens
tcttctcaatccttc

SEQ ID NO: 337413 - DNA, 15 bp, Homo sapiens
ttcttctcaatcctt

SEQ ID NO: 337414 - DNA, 15 bp, Homo sapiens
attcttctcaatcct

SEQ ID NO: 337415 - DNA, 15 bp, Homo sapiens
aattcttctcaatcc

SEQ ID NO: 337416 - DNA, 15 bp, Homo sapiens
aaattcttctcaatc

SEQ ID NO: 337417 - DNA, 15 bp, Homo sapiens
caaattcttctcaat

SEQ ID NO: 337418 - DNA, 15 bp, Homo sapiens
acaaattcttctcaa

SEQ ID NO: 337419 - DNA, 15 bp, Homo sapiens
cacaaattcttctca

SEQ ID NO: 337420 - DNA, 15 bp, Homo sapiens
ccacaaattcttctc

SEQ ID NO: 337421 - DNA, 15 bp, Homo sapiens
cccacaaattcttct

SEQ ID NO: 337422 - DNA, 15 bp, Homo sapiens
tcccacaaattcttc

SEQ ID NO: 337423 - DNA, 15 bp, Homo sapiens
atcccacaaattctt

SEQ ID NO: 337424 - DNA, 15 bp, Homo sapiens
aatcccacaaattct

SEQ ID NO: 337425 - DNA, 15 bp, Homo sapiens
aaatcccacaaattc

SEQ ID NO: 337426 - DNA, 15 bp, Homo sapiens
gaaatcccacaaatt

SEQ ID NO: 337427 - DNA, 15 bp, Homo sapiens
tgaaatcccacaaat

SEQ ID NO: 337428 - DNA, 15 bp, Homo sapiens
atgaaatcccacaaa

SEQ ID NO: 337429 - DNA, 15 bp, Homo sapiens
aatgaaatcccacaa

SEQ ID NO: 337430 - DNA, 15 bp, Homo sapiens
gaatgaaatcccaca

SEQ ID NO: 337431 - DNA, 15 bp, Homo sapiens
agaatgaaatcccac

SEQ ID NO: 337432 - DNA, 15 bp, Homo sapiens
cagaatgaaatccca

SEQ ID NO: 337433 - DNA, 15 bp, Homo sapiens
ccagaatgaaatccc

SEQ ID NO: 337434 - DNA, 15 bp, Homo sapiens
tccagaatgaaatcc

SEQ ID NO: 337435 - DNA, 15 bp, Homo sapiens
ctccagaatgaaatc

SEQ ID NO: 337436 - DNA, 15 bp, Homo sapiens
cctccagaatgaaat

SEQ ID NO: 337437 - DNA, 15 bp, Homo sapiens
gcctccagaatgaaa

SEQ ID NO: 337438 - DNA, 15 bp, Homo sapiens
tgcctccagaatgaa

SEQ ID NO: 337439 - DNA, 15 bp, Homo sapiens
ctgcctccagaatga

SEQ ID NO: 337440 - DNA, 15 bp, Homo sapiens
gctgcctccagaatg

SEQ ID NO: 337441 - DNA, 15 bp, Homo sapiens
cgctgcctccagaat

SEQ ID NO: 337442 - DNA, 15 bp, Homo sapiens
tcgctgcctccagaa

SEQ ID NO: 337443 - DNA, 15 bp, Homo sapiens
atcgctgcctccaga

SEQ ID NO: 337444 - DNA, 15 bp, Homo sapiens
catcgctgcctccag

SEQ ID NO: 337445 - DNA, 15 bp, Homo sapiens
gcatcgctgcctcca

SEQ ID NO: 337446 - DNA, 15 bp, Homo sapiens
agcatcgctgcctcc

SEQ ID NO: 337447 - DNA, 15 bp, Homo sapiens
aagcatcgctgcctc

SEQ ID NO: 337448 - DNA, 15 bp, Homo sapiens
taagcatcgctgcct

SEQ ID NO: 337449 - DNA, 15 bp, Homo sapiens
ttaagcatcgctgcc

SEQ ID NO: 337450 - DNA, 15 bp, Homo sapiens
tttaagcatcgctgc

SEQ ID NO: 337451 - DNA, 15 bp, Homo sapiens
atttaagcatcgctg

SEQ ID NO: 337452 - DNA, 15 bp, Homo sapiens
catttaagcatcgct

SEQ ID NO: 337453 - DNA, 15 bp, Homo sapiens
ccatttaagcatcgc

SEQ ID NO: 337454 - DNA, 15 bp, Homo sapiens
gccatttaagcatcg

SEQ ID NO: 337455 - DNA, 15 bp, Homo sapiens
tgccatttaagcatc

SEQ ID NO: 337456 - DNA, 15 bp, Homo sapiens
ctgccatttaagcat

SEQ ID NO: 337457 - DNA, 15 bp, Homo sapiens
cctgccatttaagca

SEQ ID NO: 337458 - DNA, 15 bp, Homo sapiens
tcctgccatttaagc

SEQ ID NO: 337459 - DNA, 15 bp, Homo sapiens
ctcctgccatttaag

SEQ ID NO: 337460 - DNA, 15 bp, Homo sapiens
tctcctgccatttaa

SEQ ID NO: 337461 - DNA, 15 bp, Homo sapiens
ttctcctgccattta

SEQ ID NO: 337462 - DNA, 15 bp, Homo sapiens
cttctcctgccattt

SEQ ID NO: 337463 - DNA, 15 bp, Homo sapiens
gcttctcctgccatt

SEQ ID NO: 337464 - DNA, 15 bp, Homo sapiens
tgcttctcctgccat

SEQ ID NO: 337465 - DNA, 15 bp, Homo sapiens
gtgcttctcctgcca

SEQ ID NO: 337466 - DNA, 15 bp, Homo sapiens
tgtgcttctcctgcc

SEQ ID NO: 337467 - DNA, 15 bp, Homo sapiens
gtgtgcttctcctgc

SEQ ID NO: 337468 - DNA, 15 bp, Homo sapiens
ggtgtgcttctcctg

SEQ ID NO: 337469 - DNA, 15 bp, Homo sapiens
gggtgtgcttctcct

SEQ ID NO: 337470 - DNA, 15 bp, Homo sapiens
tgggtgtgcttctcc

SEQ ID NO: 337471 - DNA, 15 bp, Homo sapiens
atgggtgtgcttctc

SEQ ID NO: 337472 - DNA, 15 bp, Homo sapiens
catgggtgtgcttct

SEQ ID NO: 337473 - DNA, 15 bp, Homo sapiens
acatgggtgtgcttc

SEQ ID NO: 337474 - DNA, 15 bp, Homo sapiens
tacatgggtgtgctt

SEQ ID NO: 337475 - DNA, 15 bp, Homo sapiens
atacatgggtgtgct

SEQ ID NO: 337476 - DNA, 15 bp, Homo sapiens
tatacatgggtgtgc

SEQ ID NO: 337477 - DNA, 15 bp, Homo sapiens
atatacatgggtgtg

SEQ ID NO: 337478 - DNA, 15 bp, Homo sapiens
aatatacatgggtgt

SEQ ID NO: 337479 - DNA, 15 bp, Homo sapiens
aaatatacatgggtg

SEQ ID NO: 337480 - DNA, 15 bp, Homo sapiens
taaatatacatgggt

SEQ ID NO: 337481 - DNA, 15 bp, Homo sapiens
ctaaatatacatggg

SEQ ID NO: 337482 - DNA, 15 bp, Homo sapiens
actaaatatacatgg

SEQ ID NO: 337483 - DNA, 15 bp, Homo sapiens
cactaaatatacatg

SEQ ID NO: 337484 - DNA, 15 bp, Homo sapiens
tcactaaatatacat

SEQ ID NO: 337485 - DNA, 15 bp, Homo sapiens
ttcactaaatataca

SEQ ID NO: 337486 - DNA, 15 bp, Homo sapiens
cttcactaaatatac

SEQ ID NO: 337487 - DNA, 15 bp, Homo sapiens
tcttcactaaatata

SEQ ID NO: 337488 - DNA, 15 bp, Homo sapiens
atcttcactaaatat

SEQ ID NO: 337489 - DNA, 15 bp, Homo sapiens
tatcttcactaaata

SEQ ID NO: 337490 - DNA, 15 bp, Homo sapiens
atatcttcactaaat

SEQ ID NO: 337491 - DNA, 15 bp, Homo sapiens
catatcttcactaaa

SEQ ID NO: 337492 - DNA, 15 bp, Homo sapiens
gcatatcttcactaa

SEQ ID NO: 337493 - DNA, 15 bp, Homo sapiens
tgcatatcttcacta

SEQ ID NO: 337494 - DNA, 15 bp, Homo sapiens
gtgcatatcttcact

SEQ ID NO: 337495 - DNA, 15 bp, Homo sapiens
tgtgcatatcttcac

SEQ ID NO: 337496 - DNA, 15 bp, Homo sapiens
atgtgcatatcttca

SEQ ID NO: 337497 - DNA, 15 bp, Homo sapiens
catgtgcatatcttc

SEQ ID NO: 337498 - DNA, 15 bp, Homo sapiens
tcatgtgcatatctt

SEQ ID NO: 337499 - DNA, 15 bp, Homo sapiens
ttcatgtgcatatct

SEQ ID NO: 337500 - DNA, 15 bp, Homo sapiens
tttcatgtgcatatc

SEQ ID NO: 337501 - DNA, 15 bp, Homo sapiens
atttcatgtgcatat

SEQ ID NO: 337502 - DNA, 15 bp, Homo sapiens
tatttcatgtgcata

SEQ ID NO: 337503 - DNA, 15 bp, Homo sapiens
ttatttcatgtgcat

SEQ ID NO: 337504 - DNA, 15 bp, Homo sapiens
cttatttcatgtgca

SEQ ID NO: 337505 - DNA, 15 bp, Homo sapiens
gcttatttcatgtgc

SEQ ID NO: 337506 - DNA, 15 bp, Homo sapiens
tgcttatttcatgtg

SEQ ID NO: 337507 - DNA, 15 bp, Homo sapiens
ttgcttatttcatgt

SEQ ID NO: 337508 - DNA, 15 bp, Homo sapiens
gttgcttatttcatg

SEQ ID NO: 337509 - DNA, 15 bp, Homo sapiens
agttgcttatttcat

SEQ ID NO: 337510 - DNA, 15 bp, Homo sapiens
cagttgcttatttca

SEQ ID NO: 337511 - DNA, 15 bp, Homo sapiens
ccagttgcttatttc

SEQ ID NO: 337512 - DNA, 15 bp, Homo sapiens
gccagttgcttattt

SEQ ID NO: 337513 - DNA, 15 bp, Homo sapiens
cgccagttgcttatt

SEQ ID NO: 337514 - DNA, 15 bp, Homo sapiens
tcgccagttgcttat

SEQ ID NO: 337515 - DNA, 15 bp, Homo sapiens
ttcgccagttgctta

SEQ ID NO: 337516 - DNA, 15 bp, Homo sapiens
attcgccagttgctt

SEQ ID NO: 337517 - DNA, 15 bp, Homo sapiens
aattcgccagttgct

SEQ ID NO: 337518 - DNA, 15 bp, Homo sapiens
aaattcgccagttgc

SEQ ID NO: 337519 - DNA, 15 bp, Homo sapiens
taaattcgccagttg

SEQ ID NO: 337520 - DNA, 15 bp, Homo sapiens
ataaattcgccagtt

SEQ ID NO: 337521 - DNA, 15 bp, Homo sapiens
cataaattcgccagt

SEQ ID NO: 337522 - DNA, 15 bp, Homo sapiens
ccataaattcgccag

SEQ ID NO: 337523 - DNA, 15 bp, Homo sapiens
accataaattcgcca

SEQ ID NO: 337524 - DNA, 15 bp, Homo sapiens
caccataaattcgcc

SEQ ID NO: 337525 - DNA, 15 bp, Homo sapiens
tcaccataaattcgc

SEQ ID NO: 337526 - DNA, 15 bp, Homo sapiens
gtcaccataaattcg

SEQ ID NO: 337527 - DNA, 15 bp, Homo sapiens
ggtcaccataaattc

SEQ ID NO: 337528 - DNA, 15 bp, Homo sapiens
gggtcaccataaatt

SEQ ID NO: 337529 - DNA, 15 bp, Homo sapiens
agggtcaccataaat

SEQ ID NO: 337530 - DNA, 15 bp, Homo sapiens
gagggtcaccataaa

SEQ ID NO: 337531 - DNA, 15 bp, Homo sapiens
tgagggtcaccataa

SEQ ID NO: 337532 - DNA, 15 bp, Homo sapiens
ttgagggtcaccata

SEQ ID NO: 337533 - DNA, 15 bp, Homo sapiens
attgagggtcaccat

SEQ ID NO: 337534 - DNA, 15 bp, Homo sapiens
tattgagggtcacca

SEQ ID NO: 337535 - DNA, 15 bp, Homo sapiens
ctattgagggtcacc

SEQ ID NO: 337536 - DNA, 15 bp, Homo sapiens
actattgagggtcac

SEQ ID NO: 337537 - DNA, 15 bp, Homo sapiens
cactattgagggtca

SEQ ID NO: 337538 - DNA, 15 bp, Homo sapiens
acactattgagggtc

SEQ ID NO: 337539 - DNA, 15 bp, Homo sapiens
aacactattgagggt

SEQ ID NO: 337540 - DNA, 15 bp, Homo sapiens
gaacactattgaggg

SEQ ID NO: 337541 - DNA, 15 bp, Homo sapiens
tgaacactattgagg

SEQ ID NO: 337542 - DNA, 15 bp, Homo sapiens
atgaacactattgag

SEQ ID NO: 337543 - DNA, 15 bp, Homo sapiens
tatgaacactattga

SEQ ID NO: 337544 - DNA, 15 bp, Homo sapiens
ttatgaacactattg

SEQ ID NO: 337545 - DNA, 15 bp, Homo sapiens
attatgaacactatt

SEQ ID NO: 337546 - DNA, 15 bp, Homo sapiens
gattatgaacactat

SEQ ID NO: 337547 - DNA, 15 bp, Homo sapiens
tgattatgaacacta

SEQ ID NO: 337548 - DNA, 15 bp, Homo sapiens
atgattatgaacact

SEQ ID NO: 337549 - DNA, 15 bp, Homo sapiens
gatgattatgaacac

SEQ ID NO: 337550 - DNA, 15 bp, Homo sapiens
tgatgattatgaaca

SEQ ID NO: 337551 - DNA, 15 bp, Homo sapiens
ttgatgattatgaac

SEQ ID NO: 337552 - DNA, 15 bp, Homo sapiens
tttgatgattatgaa

SEQ ID NO: 337553 - DNA, 15 bp, Homo sapiens
gtttgatgattatga

SEQ ID NO: 337554 - DNA, 15 bp, Homo sapiens
agtttgatgattatg

SEQ ID NO: 337555 - DNA, 15 bp, Homo sapiens
aagtttgatgattat

SEQ ID NO: 337556 - DNA, 15 bp, Homo sapiens
gaagtttgatgatta

SEQ ID NO: 337557 - DNA, 15 bp, Homo sapiens
agaagtttgatgatt

SEQ ID NO: 337558 - DNA, 15 bp, Homo sapiens
aagaagtttgatgat

SEQ ID NO: 337559 - DNA, 15 bp, Homo sapiens
gaagaagtttgatga

SEQ ID NO: 337560 - DNA, 15 bp, Homo sapiens
agaagaagtttgatg

SEQ ID NO: 337561 - DNA, 15 bp, Homo sapiens
gagaagaagtttgat

SEQ ID NO: 337562 - DNA, 15 bp, Homo sapiens
tgagaagaagtttga

SEQ ID NO: 337563 - DNA, 15 bp, Homo sapiens
atgagaagaagtttg

SEQ ID NO: 337564 - DNA, 15 bp, Homo sapiens
catgagaagaagttt

SEQ ID NO: 337565 - DNA, 15 bp, Homo sapiens
tcatgagaagaagtt

SEQ ID NO: 337566 - DNA, 15 bp, Homo sapiens
ttcatgagaagaagt

SEQ ID NO: 337567 - DNA, 15 bp, Homo sapiens
cttcatgagaagaag

SEQ ID NO: 337568 - DNA, 15 bp, Homo sapiens
acttcatgagaagaa

SEQ ID NO: 337569 - DNA, 15 bp, Homo sapiens
gacttcatgagaaga

SEQ ID NO: 337570 - DNA, 15 bp, Homo sapiens
tgacttcatgagaag

SEQ ID NO: 337571 - DNA, 15 bp, Homo sapiens
atgacttcatgagaa

SEQ ID NO: 337572 - DNA, 15 bp, Homo sapiens
aatgacttcatgaga

SEQ ID NO: 337573 - DNA, 15 bp, Homo sapiens
gaatgacttcatgag

SEQ ID NO: 337574 - DNA, 15 bp, Homo sapiens
agaatgacttcatga

SEQ ID NO: 337575 - DNA, 15 bp, Homo sapiens
aagaatgacttcatg

SEQ ID NO: 337576 - DNA, 15 bp, Homo sapiens
taagaatgacttcat

SEQ ID NO: 337577 - DNA, 15 bp, Homo sapiens
gtaagaatgacttca

SEQ ID NO: 337578 - DNA, 15 bp, Homo sapiens
ggtaagaatgacttc

SEQ ID NO: 337579 - DNA, 15 bp, Homo sapiens
gggtaagaatgactt

SEQ ID NO: 337580 - DNA, 15 bp, Homo sapiens
ggggtaagaatgact

SEQ ID NO: 337581 - DNA, 15 bp, Homo sapiens
aggggtaagaatgac

SEQ ID NO: 337582 - DNA, 15 bp, Homo sapiens
gaggggtaagaatga

SEQ ID NO: 337583 - DNA, 15 bp, Homo sapiens
ggaggggtaagaatg

SEQ ID NO: 337584 - DNA, 15 bp, Homo sapiens
tggaggggtaagaat

SEQ ID NO: 337585 - DNA, 15 bp, Homo sapiens
ttggaggggtaagaa

SEQ ID NO: 337586 - DNA, 15 bp, Homo sapiens
attggaggggtaaga

SEQ ID NO: 337587 - DNA, 15 bp, Homo sapiens
cattggaggggtaag

SEQ ID NO: 337588 - DNA, 15 bp, Homo sapiens
gcattggaggggtaa

SEQ ID NO: 337589 - DNA, 15 bp, Homo sapiens
ggcattggaggggta

SEQ ID NO: 337590 - DNA, 15 bp, Homo sapiens
cggcattggaggggt

SEQ ID NO: 337591 - DNA, 15 bp, Homo sapiens
acggcattggagggg

SEQ ID NO: 337592 - DNA, 15 bp, Homo sapiens
cacggcattggaggg

SEQ ID NO: 337593 - DNA, 15 bp, Homo sapiens
tcacggcattggagg

SEQ ID NO: 337594 - DNA, 15 bp, Homo sapiens
gtcacggcattggag

SEQ ID NO: 337595 - DNA, 15 bp, Homo sapiens
ggtcacggcattgga

SEQ ID NO: 337596 - DNA, 15 bp, Homo sapiens
gggtcacggcattgg

SEQ ID NO: 337597 - DNA, 15 bp, Homo sapiens
tgggtcacggcattg

SEQ ID NO: 337598 - DNA, 15 bp, Homo sapiens
gtgggtcacggcatt

SEQ ID NO: 337599 - DNA, 15 bp, Homo sapiens
ggtgggtcacggcat

SEQ ID NO: 337600 - DNA, 15 bp, Homo sapiens
cggtgggtcacggca

SEQ ID NO: 337601 - DNA, 15 bp, Homo sapiens
gcggtgggtcacggc

SEQ ID NO: 337602 - DNA, 15 bp, Homo sapiens
tgcggtgggtcacgg

SEQ ID NO: 337603 - DNA, 15 bp, Homo sapiens
gtgcggtgggtcacg

SEQ ID NO: 337604 - DNA, 15 bp, Homo sapiens
agtgcggtgggtcac

SEQ ID NO: 337605 - DNA, 15 bp, Homo sapiens
cagtgcggtgggtca

SEQ ID NO: 337606 - DNA, 15 bp, Homo sapiens
gcagtgcggtgggtc

SEQ ID NO: 337607 - DNA, 15 bp, Homo sapiens
ggcagtgcggtgggt

SEQ ID NO: 337608 - DNA, 15 bp, Homo sapiens
gggcagtgcggtggg

SEQ ID NO: 337609 - DNA, 15 bp, Homo sapiens
agggcagtgcggtgg

SEQ ID NO: 337610 - DNA, 15 bp, Homo sapiens
aagggcagtgcggtg

SEQ ID NO: 337611 - DNA, 15 bp, Homo sapiens
aaagggcagtgcggt

SEQ ID NO: 337612 - DNA, 15 bp, Homo sapiens
aaaagggcagtgcgg

SEQ ID NO: 337613 - DNA, 15 bp, Homo sapiens
gaaaagggcagtgcg

SEQ ID NO: 337614 - DNA, 15 bp, Homo sapiens
tgaaaagggcagtgc

SEQ ID NO: 337615 - DNA, 15 bp, Homo sapiens
ctgaaaagggcagtg

SEQ ID NO: 337616 - DNA, 15 bp, Homo sapiens
actgaaaagggcagt

SEQ ID NO: 337617 - DNA, 15 bp, Homo sapiens
aactgaaaagggcag

SEQ ID NO: 337618 - DNA, 15 bp, Homo sapiens
taactgaaaagggca

SEQ ID NO: 337619 - DNA, 15 bp, Homo sapiens
ttaactgaaaagggc

SEQ ID NO: 337620 - DNA, 15 bp, Homo sapiens
tttaactgaaaaggg

SEQ ID NO: 337621 - DNA, 15 bp, Homo sapiens
gtttaactgaaaagg

SEQ ID NO: 337622 - DNA, 15 bp, Homo sapiens
ggtttaactgaaaag

SEQ ID NO: 337623 - DNA, 15 bp, Homo sapiens
tggtttaactgaaaa

SEQ ID NO: 337624 - DNA, 15 bp, Homo sapiens
ctggtttaactgaaa

SEQ ID NO: 337625 - DNA, 15 bp, Homo sapiens
gctggtttaactgaa

SEQ ID NO: 337626 - DNA, 15 bp, Homo sapiens
ggctggtttaactga

SEQ ID NO: 337627 - DNA, 15 bp, Homo sapiens
gggctggtttaactg

SEQ ID NO: 337628 - DNA, 15 bp, Homo sapiens
tgggctggtttaact

SEQ ID NO: 337629 - DNA, 15 bp, Homo sapiens
atgggctggtttaac

SEQ ID NO: 337630 - DNA, 15 bp, Homo sapiens
tatgggctggtttaa

SEQ ID NO: 337631 - DNA, 15 bp, Homo sapiens
atatgggctggttta

SEQ ID NO: 337632 - DNA, 15 bp, Homo sapiens
aatatgggctggttt

SEQ ID NO: 337633 - DNA, 15 bp, Homo sapiens
aaatatgggctggtt

SEQ ID NO: 337634 - DNA, 15 bp, Homo sapiens
taaatatgggctggt

SEQ ID NO: 337635 - DNA, 15 bp, Homo sapiens
ataaatatgggctgg

SEQ ID NO: 337636 - DNA, 15 bp, Homo sapiens
cataaatatgggctg

SEQ ID NO: 337637 - DNA, 15 bp, Homo sapiens
ccataaatatgggct

SEQ ID NO: 337638 - DNA, 15 bp, Homo sapiens
tccataaatatgggc

SEQ ID NO: 337639 - DNA, 15 bp, Homo sapiens
ctccataaatatggg

SEQ ID NO: 337640 - DNA, 15 bp, Homo sapiens
gctccataaatatgg

SEQ ID NO: 337641 - DNA, 15 bp, Homo sapiens
ggctccataaatatg

SEQ ID NO: 337642 - DNA, 15 bp, Homo sapiens
gggctccataaatat

SEQ ID NO: 337643 - DNA, 15 bp, Homo sapiens
agggctccataaata

SEQ ID NO: 337644 - DNA, 15 bp, Homo sapiens
cagggctccataaat

SEQ ID NO: 337645 - DNA, 15 bp, Homo sapiens
tcagggctccataaa

SEQ ID NO: 337646 - DNA, 15 bp, Homo sapiens
gtcagggctccataa

SEQ ID NO: 337647 - DNA, 15 bp, Homo sapiens
ggtcagggctccata

SEQ ID NO: 337648 - DNA, 15 bp, Homo sapiens
gggtcagggctccat

SEQ ID NO: 337649 - DNA, 15 bp, Homo sapiens
tgggtcagggctcca

SEQ ID NO: 337650 - DNA, 15 bp, Homo sapiens
ctgggtcagggctcc

SEQ ID NO: 337651 - DNA, 15 bp, Homo sapiens
gctgggtcagggctc

SEQ ID NO: 337652 - DNA, 15 bp, Homo sapiens
tgctgggtcagggct

SEQ ID NO: 337653 - DNA, 15 bp, Homo sapiens
gtgctgggtcagggc

SEQ ID NO: 337654 - DNA, 15 bp, Homo sapiens
ggtgctgggtcaggg

SEQ ID NO: 337655 - DNA, 15 bp, Homo sapiens
tggtgctgggtcagg

SEQ ID NO: 337656 - DNA, 15 bp, Homo sapiens
ctggtgctgggtcag

SEQ ID NO: 337657 - DNA, 15 bp, Homo sapiens
cctggtgctgggtca

SEQ ID NO: 337658 - DNA, 15 bp, Homo sapiens
gcctggtgctgggtc

SEQ ID NO: 337659 - DNA, 15 bp, Homo sapiens
tgcctggtgctgggt

SEQ ID NO: 337660 - DNA, 15 bp, Homo sapiens
gtgcctggtgctggg

SEQ ID NO: 337661 - DNA, 15 bp, Homo sapiens
agtgcctggtgctgg

SEQ ID NO: 337662 - DNA, 15 bp, Homo sapiens
tagtgcctggtgctg

SEQ ID NO: 337663 - DNA, 15 bp, Homo sapiens
gtagtgcctggtgct

SEQ ID NO: 337664 - DNA, 15 bp, Homo sapiens
agtagtgcctggtgc

SEQ ID NO: 337665 - DNA, 15 bp, Homo sapiens
aagtagtgcctggtg

SEQ ID NO: 337666 - DNA, 15 bp, Homo sapiens
caagtagtgcctggt

SEQ ID NO: 337667 - DNA, 15 bp, Homo sapiens
gcaagtagtgcctgg

SEQ ID NO: 337668 - DNA, 15 bp, Homo sapiens
agcaagtagtgcctg

SEQ ID NO: 337669 - DNA, 15 bp, Homo sapiens
gagcaagtagtgcct

SEQ ID NO: 337670 - DNA, 15 bp, Homo sapiens
tgagcaagtagtgcc

SEQ ID NO: 337671 - DNA, 15 bp, Homo sapiens
gtgagcaagtagtgc

SEQ ID NO: 337672 - DNA, 15 bp, Homo sapiens
tgtgagcaagtagtg

SEQ ID NO: 337673 - DNA, 15 bp, Homo sapiens
gtgtgagcaagtagt

SEQ ID NO: 337674 - DNA, 15 bp, Homo sapiens
agtgtgagcaagtag

SEQ ID NO: 337675 - DNA, 15 bp, Homo sapiens
cagtgtgagcaagta

SEQ ID NO: 337676 - DNA, 15 bp, Homo sapiens
ccagtgtgagcaagt

SEQ ID NO: 337677 - DNA, 15 bp, Homo sapiens
tccagtgtgagcaag

SEQ ID NO: 337678 - DNA, 15 bp, Homo sapiens
atccagtgtgagcaa

SEQ ID NO: 337679 - DNA, 15 bp, Homo sapiens
catccagtgtgagca

SEQ ID NO: 337680 - DNA, 15 bp, Homo sapiens
tcatccagtgtgagc

SEQ ID NO: 337681 - DNA, 15 bp, Homo sapiens
ttcatccagtgtgag

SEQ ID NO: 337682 - DNA, 15 bp, Homo sapiens
attcatccagtgtga

SEQ ID NO: 337683 - DNA, 15 bp, Homo sapiens
tattcatccagtgtg

SEQ ID NO: 337684 - DNA, 15 bp, Homo sapiens
ttattcatccagtgt

SEQ ID NO: 337685 - DNA, 15 bp, Homo sapiens
attattcatccagtg

SEQ ID NO: 337686 - DNA, 15 bp, Homo sapiens
aattattcatccagt

SEQ ID NO: 337687 - DNA, 15 bp, Homo sapiens
gaattattcatccag

SEQ ID NO: 337688 - DNA, 15 bp, Homo sapiens
ggaattattcatcca

SEQ ID NO: 337689 - DNA, 15 bp, Homo sapiens
aggaattattcatcc

SEQ ID NO: 337690 - DNA, 15 bp, Homo sapiens
gaggaattattcatc

SEQ ID NO: 337691 - DNA, 15 bp, Homo sapiens
agaggaattattcat

SEQ ID NO: 337692 - DNA, 15 bp, Homo sapiens
gagaggaattattca

SEQ ID NO: 337693 - DNA, 15 bp, Homo sapiens
ggagaggaattattc

SEQ ID NO: 337694 - DNA, 15 bp, Homo sapiens
tggagaggaattatt

SEQ ID NO: 337695 - DNA, 15 bp, Homo sapiens
ctggagaggaattat

SEQ ID NO: 337696 - DNA, 15 bp, Homo sapiens
tctggagaggaatta

SEQ ID NO: 337697 - DNA, 15 bp, Homo sapiens
ttctggagaggaatt

SEQ ID NO: 337698 - DNA, 15 bp, Homo sapiens
tttctggagaggaat

SEQ ID NO: 337699 - DNA, 15 bp, Homo sapiens
ctttctggagaggaa

SEQ ID NO: 337700 - DNA, 15 bp, Homo sapiens
actttctggagagga

SEQ ID NO: 337701 - DNA, 15 bp, Homo sapiens
cactttctggagagg

SEQ ID NO: 337702 - DNA, 15 bp, Homo sapiens
gcactttctggagag

SEQ ID NO: 337703 - DNA, 15 bp, Homo sapiens
ggcactttctggaga

SEQ ID NO: 337704 - DNA, 15 bp, Homo sapiens
cggcactttctggag

SEQ ID NO: 337705 - DNA, 15 bp, Homo sapiens
acggcactttctgga

SEQ ID NO: 337706 - DNA, 15 bp, Homo sapiens
aacggcactttctgg

SEQ ID NO: 337707 - DNA, 15 bp, Homo sapiens
caacggcactttctg

SEQ ID NO: 337708 - DNA, 15 bp, Homo sapiens
ccaacggcactttct

SEQ ID NO: 337709 - DNA, 15 bp, Homo sapiens
tccaacggcactttc

SEQ ID NO: 337710 - DNA, 15 bp, Homo sapiens
atccaacggcacttt

SEQ ID NO: 337711 - DNA, 15 bp, Homo sapiens
tatccaacggcactt

SEQ ID NO: 337712 - DNA, 15 bp, Homo sapiens
gtatccaacggcact

SEQ ID NO: 337713 - DNA, 15 bp, Homo sapiens
agtatccaacggcac

SEQ ID NO: 337714 - DNA, 15 bp, Homo sapiens
tagtatccaacggca

SEQ ID NO: 337715 - DNA, 15 bp, Homo sapiens
atagtatccaacggc

SEQ ID NO: 337716 - DNA, 15 bp, Homo sapiens
aatagtatccaacgg

SEQ ID NO: 337717 - DNA, 15 bp, Homo sapiens
aaatagtatccaacg

SEQ ID NO: 337718 - DNA, 15 bp, Homo sapiens
aaaatagtatccaac

SEQ ID NO: 337719 - DNA, 15 bp, Homo sapiens
caaaatagtatccaa

SEQ ID NO: 337720 - DNA, 15 bp, Homo sapiens
ccaaaatagtatcca

SEQ ID NO: 337721 - DNA, 15 bp, Homo sapiens
gccaaaatagtatcc

SEQ ID NO: 337722 - DNA, 15 bp, Homo sapiens
tgccaaaatagtatc

SEQ ID NO: 337723 - DNA, 15 bp, Homo sapiens
atgccaaaatagtat

SEQ ID NO: 337724 - DNA, 15 bp, Homo sapiens
aatgccaaaatagta

SEQ ID NO: 337725 - DNA, 15 bp, Homo sapiens
caatgccaaaatagt

SEQ ID NO: 337726 - DNA, 15 bp, Homo sapiens
tcaatgccaaaatag

SEQ ID NO: 337727 - DNA, 15 bp, Homo sapiens
ttcaatgccaaaata

SEQ ID NO: 337728 - DNA, 15 bp, Homo sapiens
cttcaatgccaaaat

SEQ ID NO: 337729 - DNA, 15 bp, Homo sapiens
tcttcaatgccaaaa

SEQ ID NO: 337730 - DNA, 15 bp, Homo sapiens
atcttcaatgccaaa

SEQ ID NO: 337731 - DNA, 15 bp, Homo sapiens
catcttcaatgccaa

SEQ ID NO: 337732 - DNA, 15 bp, Homo sapiens
gcatcttcaatgcca

SEQ ID NO: 337733 - DNA, 15 bp, Homo sapiens
agcatcttcaatgcc

SEQ ID NO: 337734 - DNA, 15 bp, Homo sapiens
aagcatcttcaatgc

SEQ ID NO: 337735 - DNA, 15 bp, Homo sapiens
gaagcatcttcaatg

SEQ ID NO: 337736 - DNA, 15 bp, Homo sapiens
ggaagcatcttcaat

SEQ ID NO: 337737 - DNA, 15 bp, Homo sapiens
aggaagcatcttcaa

SEQ ID NO: 337738 - DNA, 15 bp, Homo sapiens
aaggaagcatcttca

SEQ ID NO: 337739 - DNA, 15 bp, Homo sapiens
caaggaagcatcttc

SEQ ID NO: 337740 - DNA, 15 bp, Homo sapiens
acaaggaagcatctt

SEQ ID NO: 337741 - DNA, 15 bp, Homo sapiens
cacaaggaagcatct

SEQ ID NO: 337742 - DNA, 15 bp, Homo sapiens
acacaaggaagcatc

SEQ ID NO: 337743 - DNA, 15 bp, Homo sapiens
aacacaaggaagcat

SEQ ID NO: 337744 - DNA, 15 bp, Homo sapiens
aaacacaaggaagca

SEQ ID NO: 337745 - DNA, 15 bp, Homo sapiens
gaaacacaaggaagc

SEQ ID NO: 337746 - DNA, 15 bp, Homo sapiens
agaaacacaaggaag

SEQ ID NO: 337747 - DNA, 15 bp, Homo sapiens
cagaaacacaaggaa

SEQ ID NO: 337748 - DNA, 15 bp, Homo sapiens
tcagaaacacaagga

SEQ ID NO: 337749 - DNA, 15 bp, Homo sapiens
ctcagaaacacaagg

SEQ ID NO: 337750 - DNA, 15 bp, Homo sapiens
cctcagaaacacaag

SEQ ID NO: 337751 - DNA, 15 bp, Homo sapiens
acctcagaaacacaa

SEQ ID NO: 337752 - DNA, 15 bp, Homo sapiens
cacctcagaaacaca

SEQ ID NO: 337753 - DNA, 15 bp, Homo sapiens
ccacctcagaaacac

SEQ ID NO: 337754 - DNA, 15 bp, Homo sapiens
tccacctcagaaaca

SEQ ID NO: 337755 - DNA, 15 bp, Homo sapiens
atccacctcagaaac

SEQ ID NO: 337756 - DNA, 15 bp, Homo sapiens
gatccacctcagaaa

SEQ ID NO: 337757 - DNA, 15 bp, Homo sapiens
agatccacctcagaa

SEQ ID NO: 337758 - DNA, 15 bp, Homo sapiens
aagatccacctcaga

SEQ ID NO: 337759 - DNA, 15 bp, Homo sapiens
aaagatccacctcag

SEQ ID NO: 337760 - DNA, 15 bp, Homo sapiens
aaaagatccacctca

SEQ ID NO: 337761 - DNA, 15 bp, Homo sapiens
taaaagatccacctc

SEQ ID NO: 337762 - DNA, 15 bp, Homo sapiens
ataaaagatccacct

SEQ ID NO: 337763 - DNA, 15 bp, Homo sapiens
aataaaagatccacc

SEQ ID NO: 337764 - DNA, 15 bp, Homo sapiens
gaataaaagatccac

SEQ ID NO: 337765 - DNA, 15 bp, Homo sapiens
agaataaaagatcca

SEQ ID NO: 337766 - DNA, 15 bp, Homo sapiens
tagaataaaagatcc

SEQ ID NO: 337767 - DNA, 15 bp, Homo sapiens
ttagaataaaagatc

SEQ ID NO: 337768 - DNA, 15 bp, Homo sapiens
cttagaataaaagat

SEQ ID NO: 337769 - DNA, 15 bp, Homo sapiens
gcttagaataaaaga

SEQ ID NO: 337770 - DNA, 15 bp, Homo sapiens
ggcttagaataaaag

SEQ ID NO: 337771 - DNA, 15 bp, Homo sapiens
tggcttagaataaaa

SEQ ID NO: 337772 - DNA, 15 bp, Homo sapiens
atggcttagaataaa

SEQ ID NO: 337773 - DNA, 15 bp, Homo sapiens
catggcttagaataa

SEQ ID NO: 337774 - DNA, 15 bp, Homo sapiens
tcatggcttagaata

SEQ ID NO: 337775 - DNA, 15 bp, Homo sapiens
gtcatggcttagaat

SEQ ID NO: 337776 - DNA, 15 bp, Homo sapiens
ggtcatggcttagaa

SEQ ID NO: 337777 - DNA, 15 bp, Homo sapiens
aggtcatggcttaga

SEQ ID NO: 337778 - DNA, 15 bp, Homo sapiens
caggtcatggcttag

SEQ ID NO: 337779 - DNA, 15 bp, Homo sapiens
acaggtcatggctta

SEQ ID NO: 337780 - DNA, 15 bp, Homo sapiens
gacaggtcatggctt

SEQ ID NO: 337781 - DNA, 15 bp, Homo sapiens
tgacaggtcatggct

SEQ ID NO: 337782 - DNA, 15 bp, Homo sapiens
ctgacaggtcatggc

SEQ ID NO: 337783 - DNA, 15 bp, Homo sapiens
gctgacaggtcatgg

SEQ ID NO: 337784 - DNA, 15 bp, Homo sapiens
agctgacaggtcatg

SEQ ID NO: 337785 - DNA, 15 bp, Homo sapiens
aagctgacaggtcat

SEQ ID NO: 337786 - DNA, 15 bp, Homo sapiens
taagctgacaggtca

SEQ ID NO: 337787 - DNA, 15 bp, Homo sapiens
ataagctgacaggtc

SEQ ID NO: 337788 - DNA, 15 bp, Homo sapiens
tataagctgacaggt

SEQ ID NO: 337789 - DNA, 15 bp, Homo sapiens
atataagctgacagg

SEQ ID NO: 337790 - DNA, 15 bp, Homo sapiens
gatataagctgacag

SEQ ID NO: 337791 - DNA, 15 bp, Homo sapiens
agatataagctgaca

SEQ ID NO: 337792 - DNA, 15 bp, Homo sapiens
tagatataagctgac

SEQ ID NO: 337793 - DNA, 15 bp, Homo sapiens
atagatataagctga

SEQ ID NO: 337794 - DNA, 15 bp, Homo sapiens
aatagatataagctg

SEQ ID NO: 337795 - DNA, 15 bp, Homo sapiens
aaatagatataagct

SEQ ID NO: 337796 - DNA, 15 bp, Homo sapiens
aaaatagatataagc

SEQ ID NO: 337797 - DNA, 15 bp, Homo sapiens
taaaatagatataag

SEQ ID NO: 337798 - DNA, 15 bp, Homo sapiens
cataaaatagatata

SEQ ID NO: 337799 - DNA, 15 bp, Homo sapiens
acataaaatagatat

SEQ ID NO: 337800 - DNA, 15 bp, Homo sapiens
aacataaaatagata

SEQ ID NO: 337801 - DNA, 15 bp, Homo sapiens
taacataaaatagat

SEQ ID NO: 337802 - DNA, 15 bp, Homo sapiens
gtaacataaaataga

SEQ ID NO: 337803 - DNA, 15 bp, Homo sapiens
ggtaacataaaatag

SEQ ID NO: 337804 - DNA, 15 bp, Homo sapiens
aggtaacataaaata

SEQ ID NO: 337805 - DNA, 15 bp, Homo sapiens
aaggtaacataaaat

SEQ ID NO: 337806 - DNA, 15 bp, Homo sapiens
aaaggtaacataaaa

SEQ ID NO: 337807 - DNA, 15 bp, Homo sapiens
caaaggtaacataaa

SEQ ID NO: 337808 - DNA, 15 bp, Homo sapiens
gcaaaggtaacataa

SEQ ID NO: 337809 - DNA, 15 bp, Homo sapiens
ggcaaaggtaacata

SEQ ID NO: 337810 - DNA, 15 bp, Homo sapiens
gggcaaaggtaacat

SEQ ID NO: 337811 - DNA, 15 bp, Homo sapiens
tgggcaaaggtaaca

SEQ ID NO: 337812 - DNA, 15 bp, Homo sapiens
ttgggcaaaggtaac

SEQ ID NO: 337813 - DNA, 15 bp, Homo sapiens
cttgggcaaaggtaa

SEQ ID NO: 337814 - DNA, 15 bp, Homo sapiens
tcttgggcaaaggta

SEQ ID NO: 337815 - DNA, 15 bp, Homo sapiens
ttcttgggcaaaggt

SEQ ID NO: 337816 - DNA, 15 bp, Homo sapiens
tttcttgggcaaagg

SEQ ID NO: 337817 - DNA, 15 bp, Homo sapiens
atttcttgggcaaag

SEQ ID NO: 337818 - DNA, 15 bp, Homo sapiens
tatttcttgggcaaa

SEQ ID NO: 337819 - DNA, 15 bp, Homo sapiens
atatttcttgggcaa

SEQ ID NO: 337820 - DNA, 15 bp, Homo sapiens
aatatttcttgggca

SEQ ID NO: 337821 - DNA, 15 bp, Homo sapiens
aaatatttcttgggc

SEQ ID NO: 337822 - DNA, 15 bp, Homo sapiens
caaatatttcttggg

SEQ ID NO: 337823 - DNA, 15 bp, Homo sapiens
acaaatatttcttgg

SEQ ID NO: 337824 - DNA, 15 bp, Homo sapiens
aacaaatatttcttg

SEQ ID NO: 337825 - DNA, 15 bp, Homo sapiens
aaacaaatatttctt

SEQ ID NO: 337826 - DNA, 15 bp, Homo sapiens
taaacaaatatttct

SEQ ID NO: 337827 - DNA, 15 bp, Homo sapiens
gtaaacaaatatttc

SEQ ID NO: 337828 - DNA, 15 bp, Homo sapiens
tgtaaacaaatattt

SEQ ID NO: 337829 - DNA, 15 bp, Homo sapiens
ctgtaaacaaatatt

SEQ ID NO: 337830 - DNA, 15 bp, Homo sapiens
tctgtaaacaaatat

SEQ ID NO: 337831 - DNA, 15 bp, Homo sapiens
atctgtaaacaaata

SEQ ID NO: 337832 - DNA, 15 bp, Homo sapiens
gatctgtaaacaaat

SEQ ID NO: 337833 - DNA, 15 bp, Homo sapiens
ggatctgtaaacaaa

SEQ ID NO: 337834 - DNA, 15 bp, Homo sapiens
tggatctgtaaacaa

SEQ ID NO: 337835 - DNA, 15 bp, Homo sapiens
ctggatctgtaaaca

SEQ ID NO: 337836 - DNA, 15 bp, Homo sapiens
tctggatctgtaaac

SEQ ID NO: 337837 - DNA, 15 bp, Homo sapiens
gtctggatctgtaaa

SEQ ID NO: 337838 - DNA, 15 bp, Homo sapiens
ggtctggatctgtaa

SEQ ID NO: 337839 - DNA, 15 bp, Homo sapiens
aggtctggatctgta

SEQ ID NO: 337840 - DNA, 15 bp, Homo sapiens
taggtctggatctgt

SEQ ID NO: 337841 - DNA, 15 bp, Homo sapiens
ctaggtctggatctg

SEQ ID NO: 337842 - DNA, 15 bp, Homo sapiens
gctaggtctggatct

SEQ ID NO: 337843 - DNA, 15 bp, Homo sapiens
tgctaggtctggatc

SEQ ID NO: 337844 - DNA, 15 bp, Homo sapiens
atgctaggtctggat

SEQ ID NO: 337845 - DNA, 15 bp, Homo sapiens
aatgctaggtctgga

SEQ ID NO: 337846 - DNA, 15 bp, Homo sapiens
aaatgctaggtctgg

SEQ ID NO: 337847 - DNA, 15 bp, Homo sapiens
taaatgctaggtctg

SEQ ID NO: 337848 - DNA, 15 bp, Homo sapiens
ttaaatgctaggtct

SEQ ID NO: 337849 - DNA, 15 bp, Homo sapiens
tttaaatgctaggtc

SEQ ID NO: 337850 - DNA, 15 bp, Homo sapiens
ttttaaatgctaggt

SEQ ID NO: 337851 - DNA, 15 bp, Homo sapiens
gttttaaatgctagg

SEQ ID NO: 337852 - DNA, 15 bp, Homo sapiens
ggttttaaatgctag

SEQ ID NO: 337853 - DNA, 15 bp, Homo sapiens
tggttttaaatgcta

SEQ ID NO: 337854 - DNA, 15 bp, Homo sapiens
ttggttttaaatgct

SEQ ID NO: 337855 - DNA, 15 bp, Homo sapiens
tttggttttaaatgc

SEQ ID NO: 337856 - DNA, 15 bp, Homo sapiens
ttttggttttaaatg

SEQ ID NO: 337857 - DNA, 15 bp, Homo sapiens
tttttggttttaaat

SEQ ID NO: 337858 - DNA, 15 bp, Homo sapiens
gtttttggttttaaa

SEQ ID NO: 337859 - DNA, 15 bp, Homo sapiens
agtttttggttttaa

SEQ ID NO: 337860 - DNA, 15 bp, Homo sapiens
aagtttttggtttta

SEQ ID NO: 337861 - DNA, 15 bp, Homo sapiens
gaagtttttggtttt

SEQ ID NO: 337862 - DNA, 15 bp, Homo sapiens
tgaagtttttggttt

SEQ ID NO: 337863 - DNA, 15 bp, Homo sapiens
atgaagtttttggtt

SEQ ID NO: 337864 - DNA, 15 bp, Homo sapiens
gatgaagtttttggt

SEQ ID NO: 337865 - DNA, 15 bp, Homo sapiens
tgatgaagtttttgg

SEQ ID NO: 337866 - DNA, 15 bp, Homo sapiens
ctgatgaagtttttg

SEQ ID NO: 337867 - DNA, 15 bp, Homo sapiens
tctgatgaagttttt

SEQ ID NO: 337868 - DNA, 15 bp, Homo sapiens
atctgatgaagtttt

SEQ ID NO: 337869 - DNA, 15 bp, Homo sapiens
gatctgatgaagttt

SEQ ID NO: 337870 - DNA, 15 bp, Homo sapiens
tgatctgatgaagtt

SEQ ID NO: 337871 - DNA, 15 bp, Homo sapiens
ctgatctgatgaagt

SEQ ID NO: 337872 - DNA, 15 bp, Homo sapiens
tctgatctgatgaag

SEQ ID NO: 337873 - DNA, 15 bp, Homo sapiens
ttctgatctgatgaa

SEQ ID NO: 337874 - DNA, 15 bp, Homo sapiens
tttctgatctgatga

SEQ ID NO: 337875 - DNA, 15 bp, Homo sapiens
atttctgatctgatg

SEQ ID NO: 337876 - DNA, 15 bp, Homo sapiens
catttctgatctgat

SEQ ID NO: 337877 - DNA, 15 bp, Homo sapiens
ccatttctgatctga

SEQ ID NO: 337878 - DNA, 15 bp, Homo sapiens
accatttctgatctg

SEQ ID NO: 337879 - DNA, 15 bp, Homo sapiens
aaccatttctgatct

SEQ ID NO: 337880 - DNA, 15 bp, Homo sapiens
taaccatttctgatc

SEQ ID NO: 337881 - DNA, 15 bp, Homo sapiens
ataaccatttctgat

SEQ ID NO: 337882 - DNA, 15 bp, Homo sapiens
aataaccatttctga

SEQ ID NO: 337883 - DNA, 15 bp, Homo sapiens
caataaccatttctg

SEQ ID NO: 337884 - DNA, 15 bp, Homo sapiens
tcaataaccatttct

SEQ ID NO: 337885 - DNA, 15 bp, Homo sapiens
atcaataaccatttc

SEQ ID NO: 337886 - DNA, 15 bp, Homo sapiens
aatcaataaccattt

SEQ ID NO: 337887 - DNA, 15 bp, Homo sapiens
caatcaataaccatt

SEQ ID NO: 337888 - DNA, 15 bp, Homo sapiens
tcaatcaataaccat

SEQ ID NO: 337889 - DNA, 15 bp, Homo sapiens
ctcaatcaataacca

SEQ ID NO: 337890 - DNA, 15 bp, Homo sapiens
cctcaatcaataacc

SEQ ID NO: 337891 - DNA, 15 bp, Homo sapiens
tcctcaatcaataac

SEQ ID NO: 337892 - DNA, 15 bp, Homo sapiens
gtcctcaatcaataa

SEQ ID NO: 337893 - DNA, 15 bp, Homo sapiens
agtcctcaatcaata

SEQ ID NO: 337894 - DNA, 15 bp, Homo sapiens
tagtcctcaatcaat

SEQ ID NO: 337895 - DNA, 15 bp, Homo sapiens
atagtcctcaatcaa

SEQ ID NO: 337896 - DNA, 15 bp, Homo sapiens
aatagtcctcaatca

SEQ ID NO: 337897 - DNA, 15 bp, Homo sapiens
caatagtcctcaatc

SEQ ID NO: 337898 - DNA, 15 bp, Homo sapiens
ccaatagtcctcaat

SEQ ID NO: 337899 - DNA, 15 bp, Homo sapiens
accaatagtcctcaa

SEQ ID NO: 337900 - DNA, 15 bp, Homo sapiens
gaccaatagtcctca

SEQ ID NO: 337901 - DNA, 15 bp, Homo sapiens
tgaccaatagtcctc

SEQ ID NO: 337902 - DNA, 15 bp, Homo sapiens
atgaccaatagtcct

SEQ ID NO: 337903 - DNA, 15 bp, Homo sapiens
gatgaccaatagtcc

SEQ ID NO: 337904 - DNA, 15 bp, Homo sapiens
agatgaccaatagtc

SEQ ID NO: 337905 - DNA, 15 bp, Homo sapiens
aagatgaccaatagt

SEQ ID NO: 337906 - DNA, 15 bp, Homo sapiens
gaagatgaccaatag

SEQ ID NO: 337907 - DNA, 15 bp, Homo sapiens
tgaagatgaccaata

SEQ ID NO: 337908 - DNA, 15 bp, Homo sapiens
gtgaagatgaccaat

SEQ ID NO: 337909 - DNA, 15 bp, Homo sapiens
tgtgaagatgaccaa

SEQ ID NO: 337910 - DNA, 15 bp, Homo sapiens
ttgtgaagatgacca

SEQ ID NO: 337911 - DNA, 15 bp, Homo sapiens
tttgtgaagatgacc

SEQ ID NO: 337912 - DNA, 15 bp, Homo sapiens
atttgtgaagatgac

SEQ ID NO: 337913 - DNA, 15 bp, Homo sapiens
aatttgtgaagatga

SEQ ID NO: 337914 - DNA, 15 bp, Homo sapiens
caatttgtgaagatg

SEQ ID NO: 337915 - DNA, 15 bp, Homo sapiens
tcaatttgtgaagat

SEQ ID NO: 337916 - DNA, 15 bp, Homo sapiens
ctcaatttgtgaaga

SEQ ID NO: 337917 - DNA, 15 bp, Homo sapiens
actcaatttgtgaag

SEQ ID NO: 337918 - DNA, 15 bp, Homo sapiens
cactcaatttgtgaa

SEQ ID NO: 337919 - DNA, 15 bp, Homo sapiens
ccactcaatttgtga

SEQ ID NO: 337920 - DNA, 15 bp, Homo sapiens
accactcaatttgtg

SEQ ID NO: 337921 - DNA, 15 bp, Homo sapiens
gaccactcaatttgt

SEQ ID NO: 337922 - DNA, 15 bp, Homo sapiens
tgaccactcaatttg

SEQ ID NO: 337923 - DNA, 15 bp, Homo sapiens
ctgaccactcaattt

SEQ ID NO: 337924 - DNA, 15 bp, Homo sapiens
cctgaccactcaatt

SEQ ID NO: 337925 - DNA, 15 bp, Homo sapiens
gcctgaccactcaat

SEQ ID NO: 337926 - DNA, 15 bp, Homo sapiens
ggcctgaccactcaa

SEQ ID NO: 337927 - DNA, 15 bp, Homo sapiens
gggcctgaccactca

SEQ ID NO: 337928 - DNA, 15 bp, Homo sapiens
agggcctgaccactc

SEQ ID NO: 337929 - DNA, 15 bp, Homo sapiens
tagggcctgaccact

SEQ ID NO: 337930 - DNA, 15 bp, Homo sapiens
atagggcctgaccac

SEQ ID NO: 337931 - DNA, 15 bp, Homo sapiens
tatagggcctgacca

SEQ ID NO: 337932 - DNA, 15 bp, Homo sapiens
ctatagggcctgacc

SEQ ID NO: 337933 - DNA, 15 bp, Homo sapiens
tctatagggcctgac

SEQ ID NO: 337934 - DNA, 15 bp, Homo sapiens
ttctatagggcctga

SEQ ID NO: 337935 - DNA, 15 bp, Homo sapiens
tttctatagggcctg

SEQ ID NO: 337936 - DNA, 15 bp, Homo sapiens
atttctatagggcct

SEQ ID NO: 337937 - DNA, 15 bp, Homo sapiens
aatttctatagggcc

SEQ ID NO: 337938 - DNA, 15 bp, Homo sapiens
caatttctatagggc

SEQ ID NO: 337939 - DNA, 15 bp, Homo sapiens
ccaatttctataggg

SEQ ID NO: 337940 - DNA, 15 bp, Homo sapiens
accaatttctatagg

SEQ ID NO: 337941 - DNA, 15 bp, Homo sapiens
gaccaatttctatag

SEQ ID NO: 337942 - DNA, 15 bp, Homo sapiens
tgaccaatttctata

SEQ ID NO: 337943 - DNA, 15 bp, Homo sapiens
ctgaccaatttctat

SEQ ID NO: 337944 - DNA, 15 bp, Homo sapiens
cctgaccaatttcta

SEQ ID NO: 337945 - DNA, 15 bp, Homo sapiens
tcctgaccaatttct

SEQ ID NO: 337946 - DNA, 15 bp, Homo sapiens
gtcctgaccaatttc

SEQ ID NO: 337947 - DNA, 15 bp, Homo sapiens
tgtcctgaccaattt

SEQ ID NO: 337948 - DNA, 15 bp, Homo sapiens
ttgtcctgaccaatt

SEQ ID NO: 337949 - DNA, 15 bp, Homo sapiens
attgtcctgaccaat

SEQ ID NO: 337950 - DNA, 15 bp, Homo sapiens
gattgtcctgaccaa

SEQ ID NO: 337951 - DNA, 15 bp, Homo sapiens
cgattgtcctgacca

SEQ ID NO: 337952 - DNA, 15 bp, Homo sapiens
gcgattgtcctgacc

SEQ ID NO: 337953 - DNA, 15 bp, Homo sapiens
agcgattgtcctgac

SEQ ID NO: 337954 - DNA, 15 bp, Homo sapiens
cagcgattgtcctga

SEQ ID NO: 337955 - DNA, 15 bp, Homo sapiens
tcagcgattgtcctg

SEQ ID NO: 337956 - DNA, 15 bp, Homo sapiens
atcagcgattgtcct

SEQ ID NO: 337957 - DNA, 15 bp, Homo sapiens
catcagcgattgtcc

SEQ ID NO: 337958 - DNA, 15 bp, Homo sapiens
ccatcagcgattgtc

SEQ ID NO: 337959 - DNA, 15 bp, Homo sapiens
accatcagcgattgt

SEQ ID NO: 337960 - DNA, 15 bp, Homo sapiens
gaccatcagcgattg

SEQ ID NO: 337961 - DNA, 15 bp, Homo sapiens
agaccatcagcgatt

SEQ ID NO: 337962 - DNA, 15 bp, Homo sapiens
tagaccatcagcgat

SEQ ID NO: 337963 - DNA, 15 bp, Homo sapiens
ttagaccatcagcga

SEQ ID NO: 337964 - DNA, 15 bp, Homo sapiens
cttagaccatcagcg

SEQ ID NO: 337965 - DNA, 15 bp, Homo sapiens
tcttagaccatcagc

SEQ ID NO: 337966 - DNA, 15 bp, Homo sapiens
ttcttagaccatcag

SEQ ID NO: 337967 - DNA, 15 bp, Homo sapiens
tttcttagaccatca

SEQ ID NO: 337968 - DNA, 15 bp, Homo sapiens
ctttcttagaccatc

SEQ ID NO: 337969 - DNA, 15 bp, Homo sapiens
actttcttagaccat

SEQ ID NO: 337970 - DNA, 15 bp, Homo sapiens
aactttcttagacca

SEQ ID NO: 337971 - DNA, 15 bp, Homo sapiens
gaactttcttagacc

SEQ ID NO: 337972 - DNA, 15 bp, Homo sapiens
tgaactttcttagac

SEQ ID NO: 337973 - DNA, 15 bp, Homo sapiens
ctgaactttcttaga

SEQ ID NO: 337974 - DNA, 15 bp, Homo sapiens
tctgaactttcttag

SEQ ID NO: 337975 - DNA, 15 bp, Homo sapiens
atctgaactttctta

SEQ ID NO: 337976 - DNA, 15 bp, Homo sapiens
gatctgaactttctt

SEQ ID NO: 337977 - DNA, 15 bp, Homo sapiens
ggatctgaactttct

SEQ ID NO: 337978 - DNA, 15 bp, Homo sapiens
tggatctgaactttc

SEQ ID NO: 337979 - DNA, 15 bp, Homo sapiens
gtggatctgaacttt

SEQ ID NO: 337980 - DNA, 15 bp, Homo sapiens
tgtggatctgaactt

SEQ ID NO: 337981 - DNA, 15 bp, Homo sapiens
atgtggatctgaact

SEQ ID NO: 337982 - DNA, 15 bp, Homo sapiens
gatgtggatctgaac

SEQ ID NO: 337983 - DNA, 15 bp, Homo sapiens
ggatgtggatctgaa

SEQ ID NO: 337984 - DNA, 15 bp, Homo sapiens
tggatgtggatctga

SEQ ID NO: 337985 - DNA, 15 bp, Homo sapiens
gtggatgtggatctg

SEQ ID NO: 337986 - DNA, 15 bp, Homo sapiens
tgtggatgtggatct

SEQ ID NO: 337987 - DNA, 15 bp, Homo sapiens
ctgtggatgtggatc

SEQ ID NO: 337988 - DNA, 15 bp, Homo sapiens
tctgtggatgtggat

SEQ ID NO: 337989 - DNA, 15 bp, Homo sapiens
atctgtggatgtgga

SEQ ID NO: 337990 - DNA, 15 bp, Homo sapiens
catctgtggatgtgg

SEQ ID NO: 337991 - DNA, 15 bp, Homo sapiens
ccatctgtggatgtg

SEQ ID NO: 337992 - DNA, 15 bp, Homo sapiens
cccatctgtggatgt

SEQ ID NO: 337993 - DNA, 15 bp, Homo sapiens
ccccatctgtggatg

SEQ ID NO: 337994 - DNA, 15 bp, Homo sapiens
tccccatctgtggat

SEQ ID NO: 337995 - DNA, 15 bp, Homo sapiens
ctccccatctgtgga

SEQ ID NO: 337996 - DNA, 15 bp, Homo sapiens
tctccccatctgtgg

SEQ ID NO: 337997 - DNA, 15 bp, Homo sapiens
ctctccccatctgtg

SEQ ID NO: 337998 - DNA, 15 bp, Homo sapiens
tctctccccatctgt

SEQ ID NO: 337999 - DNA, 15 bp, Homo sapiens
atctctccccatctg

SEQ ID NO: 338000 - DNA, 15 bp, Homo sapiens
aatctctccccatct

SEQ ID NO: 338001 - DNA, 15 bp, Homo sapiens
aaatctctccccatc

SEQ ID NO: 338002 - DNA, 15 bp, Homo sapiens
taaatctctccccat

SEQ ID NO: 338003 - DNA, 15 bp, Homo sapiens
ctaaatctctcccca

SEQ ID NO: 338004 - DNA, 15 bp, Homo sapiens
gctaaatctctcccc

SEQ ID NO: 338005 - DNA, 15 bp, Homo sapiens
agctaaatctctccc

SEQ ID NO: 338006 - DNA, 15 bp, Homo sapiens
tagctaaatctctcc

SEQ ID NO: 338007 - DNA, 15 bp, Homo sapiens
gtagctaaatctctc

SEQ ID NO: 338008 - DNA, 15 bp, Homo sapiens
agtagctaaatctct

SEQ ID NO: 338009 - DNA, 15 bp, Homo sapiens
gagtagctaaatctc

SEQ ID NO: 338010 - DNA, 15 bp, Homo sapiens
agagtagctaaatct

SEQ ID NO: 338011 - DNA, 15 bp, Homo sapiens
gagagtagctaaatc

SEQ ID NO: 338012 - DNA, 15 bp, Homo sapiens
tgagagtagctaaat

SEQ ID NO: 338013 - DNA, 15 bp, Homo sapiens
atgagagtagctaaa

SEQ ID NO: 338014 - DNA, 15 bp, Homo sapiens
tatgagagtagctaa

SEQ ID NO: 338015 - DNA, 15 bp, Homo sapiens
ctatgagagtagcta

SEQ ID NO: 338016 - DNA, 15 bp, Homo sapiens
gctatgagagtagct

SEQ ID NO: 338017 - DNA, 15 bp, Homo sapiens
agctatgagagtagc

SEQ ID NO: 338018 - DNA, 15 bp, Homo sapiens
cagctatgagagtag

SEQ ID NO: 338019 - DNA, 15 bp, Homo sapiens
tcagctatgagagta

SEQ ID NO: 338020 - DNA, 15 bp, Homo sapiens
ttcagctatgagagt

SEQ ID NO: 338021 - DNA, 15 bp, Homo sapiens
gttcagctatgagag

SEQ ID NO: 338022 - DNA, 15 bp, Homo sapiens
agttcagctatgaga

SEQ ID NO: 338023 - DNA, 15 bp, Homo sapiens
aagttcagctatgag

SEQ ID NO: 338024 - DNA, 15 bp, Homo sapiens
aaagttcagctatga

SEQ ID NO: 338025 - DNA, 15 bp, Homo sapiens
gaaagttcagctatg

SEQ ID NO: 338026 - DNA, 15 bp, Homo sapiens
ggaaagttcagctat

SEQ ID NO: 338027 - DNA, 15 bp, Homo sapiens
aggaaagttcagcta

SEQ ID NO: 338028 - DNA, 15 bp, Homo sapiens
taggaaagttcagct

SEQ ID NO: 338029 - DNA, 15 bp, Homo sapiens
ttaggaaagttcagc

SEQ ID NO: 338030 - DNA, 15 bp, Homo sapiens
tttaggaaagttcag

SEQ ID NO: 338031 - DNA, 15 bp, Homo sapiens
atttaggaaagttca

SEQ ID NO: 338032 - DNA, 15 bp, Homo sapiens
tatttaggaaagttc

SEQ ID NO: 338033 - DNA, 15 bp, Homo sapiens
atatttaggaaagtt

SEQ ID NO: 338034 - DNA, 15 bp, Homo sapiens
gaatatttaggaaag

SEQ ID NO: 338035 - DNA, 15 bp, Homo sapiens
ggaatatttaggaaa

SEQ ID NO: 338036 - DNA, 15 bp, Homo sapiens
gggaatatttaggaa

SEQ ID NO: 338037 - DNA, 15 bp, Homo sapiens
ggggaatatttagga

SEQ ID NO: 338038 - DNA, 15 bp, Homo sapiens
tggggaatatttagg

SEQ ID NO: 338039 - DNA, 15 bp, Homo sapiens
atggggaatatttag

SEQ ID NO: 338040 - DNA, 15 bp, Homo sapiens
aatggggaatattta

SEQ ID NO: 338041 - DNA, 15 bp, Homo sapiens
caatggggaatattt

SEQ ID NO: 338042 - DNA, 15 bp, Homo sapiens
acaatggggaatatt

SEQ ID NO: 338043 - DNA, 15 bp, Homo sapiens
tacaatggggaatat

SEQ ID NO: 338044 - DNA, 15 bp, Homo sapiens
ttacaatggggaata

SEQ ID NO: 338045 - DNA, 15 bp, Homo sapiens
tttacaatggggaat

SEQ ID NO: 338046 - DNA, 15 bp, Homo sapiens
atttacaatggggaa

SEQ ID NO: 338047 - DNA, 15 bp, Homo sapiens
catttacaatgggga

SEQ ID NO: 338048 - DNA, 15 bp, Homo sapiens
ccatttacaatgggg

SEQ ID NO: 338049 - DNA, 15 bp, Homo sapiens
tccatttacaatggg

SEQ ID NO: 338050 - DNA, 15 bp, Homo sapiens
atccatttacaatgg

SEQ ID NO: 338051 - DNA, 15 bp, Homo sapiens
gatccatttacaatg

SEQ ID NO: 338052 - DNA, 15 bp, Homo sapiens
tgatccatttacaat

SEQ ID NO: 338053 - DNA, 15 bp, Homo sapiens
atgatccatttacaa

SEQ ID NO: 338054 - DNA, 15 bp, Homo sapiens
aatgatccatttaca

SEQ ID NO: 338055 - DNA, 15 bp, Homo sapiens
taatgatccatttac

SEQ ID NO: 338056 - DNA, 15 bp, Homo sapiens
ttaatgatccattta

SEQ ID NO: 338057 - DNA, 15 bp, Homo sapiens
cttaatgatccattt

SEQ ID NO: 338058 - DNA, 15 bp, Homo sapiens
tcttaatgatccatt

SEQ ID NO: 338059 - DNA, 15 bp, Homo sapiens
atcttaatgatccat

SEQ ID NO: 338060 - DNA, 15 bp, Homo sapiens
aatcttaatgatcca

SEQ ID NO: 338061 - DNA, 15 bp, Homo sapiens
gaatcttaatgatcc

SEQ ID NO: 338062 - DNA, 15 bp, Homo sapiens
agaatcttaatgatc

SEQ ID NO: 338063 - DNA, 15 bp, Homo sapiens
aagaatcttaatgat

SEQ ID NO: 338064 - DNA, 15 bp, Homo sapiens
taagaatcttaatga

SEQ ID NO: 338065 - DNA, 15 bp, Homo sapiens
ataagaatcttaatg

SEQ ID NO: 338066 - DNA, 15 bp, Homo sapiens
aataagaatcttaat

SEQ ID NO: 338067 - DNA, 15 bp, Homo sapiens
taataagaatcttaa

SEQ ID NO: 338068 - DNA, 15 bp, Homo sapiens
ataataagaatctta

SEQ ID NO: 338069 - DNA, 15 bp, Homo sapiens
gataataagaatctt

SEQ ID NO: 338070 - DNA, 15 bp, Homo sapiens
agataataagaatct

SEQ ID NO: 338071 - DNA, 15 bp, Homo sapiens
aagataataagaatc

SEQ ID NO: 338072 - DNA, 15 bp, Homo sapiens
gaagataataagaat

SEQ ID NO: 338073 - DNA, 15 bp, Homo sapiens
agaagataataagaa

SEQ ID NO: 338074 - DNA, 15 bp, Homo sapiens
tagaagataataaga

SEQ ID NO: 338075 - DNA, 15 bp, Homo sapiens
ctagaagataataag

SEQ ID NO: 338076 - DNA, 15 bp, Homo sapiens
tctagaagataataa

SEQ ID NO: 338077 - DNA, 15 bp, Homo sapiens
atctagaagataata

SEQ ID NO: 338078 - DNA, 15 bp, Homo sapiens
aatctagaagataat

SEQ ID NO: 338079 - DNA, 15 bp, Homo sapiens
gaatctagaagataa

SEQ ID NO: 338080 - DNA, 15 bp, Homo sapiens
ggaatctagaagata

SEQ ID NO: 338081 - DNA, 15 bp, Homo sapiens
tggaatctagaagat

SEQ ID NO: 338082 - DNA, 15 bp, Homo sapiens
ctggaatctagaaga

SEQ ID NO: 338083 - DNA, 15 bp, Homo sapiens
cctggaatctagaag

SEQ ID NO: 338084 - DNA, 15 bp, Homo sapiens
gcctggaatctagaa

SEQ ID NO: 338085 - DNA, 15 bp, Homo sapiens
agcctggaatctaga

SEQ ID NO: 338086 - DNA, 15 bp, Homo sapiens
cagcctggaatctag

SEQ ID NO: 338087 - DNA, 15 bp, Homo sapiens
ccagcctggaatcta

SEQ ID NO: 338088 - DNA, 15 bp, Homo sapiens
accagcctggaatct

SEQ ID NO: 338089 - DNA, 15 bp, Homo sapiens
caccagcctggaatc

SEQ ID NO: 338090 - DNA, 15 bp, Homo sapiens
tcaccagcctggaat

SEQ ID NO: 338091 - DNA, 15 bp, Homo sapiens
ctcaccagcctggaa

SEQ ID NO: 338092 - DNA, 15 bp, Homo sapiens
cctcaccagcctgga

SEQ ID NO: 338093 - DNA, 15 bp, Homo sapiens
tcctcaccagcctgg

SEQ ID NO: 338094 - DNA, 15 bp, Homo sapiens
ttcctcaccagcctg

SEQ ID NO: 338095 - DNA, 15 bp, Homo sapiens
cttcctcaccagcct

SEQ ID NO: 338096 - DNA, 15 bp, Homo sapiens
acttcctcaccagcc

SEQ ID NO: 338097 - DNA, 15 bp, Homo sapiens
gacttcctcaccagc

SEQ ID NO: 338098 - DNA, 15 bp, Homo sapiens
ggacttcctcaccag

SEQ ID NO: 338099 - DNA, 15 bp, Homo sapiens
aggacttcctcacca

SEQ ID NO: 338100 - DNA, 15 bp, Homo sapiens
caggacttcctcacc

SEQ ID NO: 338101 - DNA, 15 bp, Homo sapiens
tcaggacttcctcac

SEQ ID NO: 338102 - DNA, 15 bp, Homo sapiens
ctcaggacttcctca

SEQ ID NO: 338103 - DNA, 15 bp, Homo sapiens
gctcaggacttcctc

SEQ ID NO: 338104 - DNA, 15 bp, Homo sapiens
agctcaggacttcct

SEQ ID NO: 338105 - DNA, 15 bp, Homo sapiens
cagctcaggacttcc

SEQ ID NO: 338106 - DNA, 15 bp, Homo sapiens
acagctcaggacttc

SEQ ID NO: 338107 - DNA, 15 bp, Homo sapiens
tacagctcaggactt

SEQ ID NO: 338108 - DNA, 15 bp, Homo sapiens
gtacagctcaggact

SEQ ID NO: 338109 - DNA, 15 bp, Homo sapiens
tgtacagctcaggac

SEQ ID NO: 338110 - DNA, 15 bp, Homo sapiens
atgtacagctcagga

SEQ ID NO: 338111 - DNA, 15 bp, Homo sapiens
catgtacagctcagg

SEQ ID NO: 338112 - DNA, 15 bp, Homo sapiens
tcatgtacagctcag

SEQ ID NO: 338113 - DNA, 15 bp, Homo sapiens
gtcatgtacagctca

SEQ ID NO: 338114 - DNA, 15 bp, Homo sapiens
tgtcatgtacagctc

SEQ ID NO: 338115 - DNA, 15 bp, Homo sapiens
atgtcatgtacagct

SEQ ID NO: 338116 - DNA, 15 bp, Homo sapiens
catgtcatgtacagc

SEQ ID NO: 338117 - DNA, 15 bp, Homo sapiens
acatgtcatgtacag

SEQ ID NO: 338118 - DNA, 15 bp, Homo sapiens
gacatgtcatgtaca

SEQ ID NO: 338119 - DNA, 15 bp, Homo sapiens
agacatgtcatgtac

SEQ ID NO: 338120 - DNA, 15 bp, Homo sapiens
tagacatgtcatgta

SEQ ID NO: 338121 - DNA, 15 bp, Homo sapiens
ttagacatgtcatgt

SEQ ID NO: 338122 - DNA, 15 bp, Homo sapiens
tttagacatgtcatg

SEQ ID NO: 338123 - DNA, 15 bp, Homo sapiens
ttttagacatgtcat

SEQ ID NO: 338124 - DNA, 15 bp, Homo sapiens
attttagacatgtca

SEQ ID NO: 338125 - DNA, 15 bp, Homo sapiens
tattttagacatgtc

SEQ ID NO: 338126 - DNA, 15 bp, Homo sapiens
ctattttagacatgt

SEQ ID NO: 338127 - DNA, 15 bp, Homo sapiens
tctattttagacatg

SEQ ID NO: 338128 - DNA, 15 bp, Homo sapiens
gtctattttagacat

SEQ ID NO: 338129 - DNA, 15 bp, Homo sapiens
tgtctattttagaca

SEQ ID NO: 338130 - DNA, 15 bp, Homo sapiens
atgtctattttagac

SEQ ID NO: 338131 - DNA, 15 bp, Homo sapiens
aatgtctattttaga

SEQ ID NO: 338132 - DNA, 15 bp, Homo sapiens
aaatgtctattttag

SEQ ID NO: 338133 - DNA, 15 bp, Homo sapiens
caaatgtctatttta

SEQ ID NO: 338134 - DNA, 15 bp, Homo sapiens
ccaaatgtctatttt

SEQ ID NO: 338135 - DNA, 15 bp, Homo sapiens
cccaaatgtctattt

SEQ ID NO: 338136 - DNA, 15 bp, Homo sapiens
ccccaaatgtctatt

SEQ ID NO: 338137 - DNA, 15 bp, Homo sapiens
accccaaatgtctat

SEQ ID NO: 338138 - DNA, 15 bp, Homo sapiens
taccccaaatgtcta

SEQ ID NO: 338139 - DNA, 15 bp, Homo sapiens
ctaccccaaatgtct

SEQ ID NO: 338140 - DNA, 15 bp, Homo sapiens
cctaccccaaatgtc

SEQ ID NO: 338141 - DNA, 15 bp, Homo sapiens
ccctaccccaaatgt

SEQ ID NO: 338142 - DNA, 15 bp, Homo sapiens
gccctaccccaaatg

SEQ ID NO: 338143 - DNA, 15 bp, Homo sapiens
cgccctaccccaaat

SEQ ID NO: 338144 - DNA, 15 bp, Homo sapiens
gcgccctaccccaaa

SEQ ID NO: 338145 - DNA, 15 bp, Homo sapiens
cgcgccctaccccaa

SEQ ID NO: 338146 - DNA, 15 bp, Homo sapiens
ccgcgccctacccca

SEQ ID NO: 338147 - DNA, 15 bp, Homo sapiens
accgcgccctacccc

SEQ ID NO: 338148 - DNA, 15 bp, Homo sapiens
caccgcgccctaccc

SEQ ID NO: 338149 - DNA, 15 bp, Homo sapiens
ccaccgcgccctacc

SEQ ID NO: 338150 - DNA, 15 bp, Homo sapiens
gccaccgcgccctac

SEQ ID NO: 338151 - DNA, 15 bp, Homo sapiens
agccaccgcgcccta

SEQ ID NO: 338152 - DNA, 15 bp, Homo sapiens
gagccaccgcgccct

SEQ ID NO: 338153 - DNA, 15 bp, Homo sapiens
atgagccaccgcgcc

SEQ ID NO: 338154 - DNA, 15 bp, Homo sapiens
catgagccaccgcgc

SEQ ID NO: 338155 - DNA, 15 bp, Homo sapiens
gcatgagccaccgcg

SEQ ID NO: 338156 - DNA, 15 bp, Homo sapiens
ggcatgagccaccgc

SEQ ID NO: 338157 - DNA, 15 bp, Homo sapiens
aggcatgagccaccg

SEQ ID NO: 338158 - DNA, 15 bp, Homo sapiens
agattacaggcatga

SEQ ID NO: 338159 - DNA, 15 bp, Homo sapiens
gagattacaggcatg

SEQ ID NO: 338160 - DNA, 15 bp, Homo sapiens
tgagattacaggcat

SEQ ID NO: 338161 - DNA, 15 bp, Homo sapiens
ctgagattacaggca

SEQ ID NO: 338162 - DNA, 15 bp, Homo sapiens
gctgagattacaggc

SEQ ID NO: 338163 - DNA, 15 bp, Homo sapiens
ccccaaagtgctgag

SEQ ID NO: 338164 - DNA, 15 bp, Homo sapiens
cccccaaagtgctga

SEQ ID NO: 338165 - DNA, 15 bp, Homo sapiens
gcccccaaagtgctg

SEQ ID NO: 338166 - DNA, 15 bp, Homo sapiens
ggcccccaaagtgct

SEQ ID NO: 338167 - DNA, 15 bp, Homo sapiens
tggcccccaaagtgc

SEQ ID NO: 338168 - DNA, 15 bp, Homo sapiens
ttggcccccaaagtg

SEQ ID NO: 338169 - DNA, 15 bp, Homo sapiens
cttggcccccaaagt

SEQ ID NO: 338170 - DNA, 15 bp, Homo sapiens
ccttggcccccaaag

SEQ ID NO: 338171 - DNA, 15 bp, Homo sapiens
accttggcccccaaa

SEQ ID NO: 338172 - DNA, 15 bp, Homo sapiens
caccttggcccccaa

SEQ ID NO: 338173 - DNA, 15 bp, Homo sapiens
tcaccttggccccca

SEQ ID NO: 338174 - DNA, 15 bp, Homo sapiens
ctcaccttggccccc

SEQ ID NO: 338175 - DNA, 15 bp, Homo sapiens
gctcaccttggcccc

SEQ ID NO: 338176 - DNA, 15 bp, Homo sapiens
tgctcaccttggccc

SEQ ID NO: 338177 - DNA, 15 bp, Homo sapiens
ctgctcaccttggcc

SEQ ID NO: 338178 - DNA, 15 bp, Homo sapiens
tctgctcaccttggc

SEQ ID NO: 338179 - DNA, 15 bp, Homo sapiens
atctgctcaccttgg

SEQ ID NO: 338180 - DNA, 15 bp, Homo sapiens
gatctgctcaccttg

SEQ ID NO: 338181 - DNA, 15 bp, Homo sapiens
tgatctgctcacctt

SEQ ID NO: 338182 - DNA, 15 bp, Homo sapiens
gtgatctgctcacct

SEQ ID NO: 338183 - DNA, 15 bp, Homo sapiens
agtgatctgctcacc

SEQ ID NO: 338184 - DNA, 15 bp, Homo sapiens
aagtgatctgctcac

SEQ ID NO: 338185 - DNA, 15 bp, Homo sapiens
tcaagtgatctgctc

SEQ ID NO: 338186 - DNA, 15 bp, Homo sapiens
ctcaagtgatctgct

SEQ ID NO: 338187 - DNA, 15 bp, Homo sapiens
aacctcaagtgatct

SEQ ID NO: 338188 - DNA, 15 bp, Homo sapiens
caacctcaagtgatc

SEQ ID NO: 338189 - DNA, 15 bp, Homo sapiens
ccaacctcaagtgat

SEQ ID NO: 338190 - DNA, 15 bp, Homo sapiens
cccaacctcaagtga

SEQ ID NO: 338191 - DNA, 15 bp, Homo sapiens
tcccaacctcaagtg

SEQ ID NO: 338192 - DNA, 15 bp, Homo sapiens
ctcccaacctcaagt

SEQ ID NO: 338193 - DNA, 15 bp, Homo sapiens
actcccaacctcaag

SEQ ID NO: 338194 - DNA, 15 bp, Homo sapiens
aactcccaacctcaa

SEQ ID NO: 338195 - DNA, 15 bp, Homo sapiens
gaactcccaacctca

SEQ ID NO: 338196 - DNA, 15 bp, Homo sapiens
tgaactcccaacctc

SEQ ID NO: 338197 - DNA, 15 bp, Homo sapiens
atgaactcccaacct

SEQ ID NO: 338198 - DNA, 15 bp, Homo sapiens
catgaactcccaacc

SEQ ID NO: 338199 - DNA, 15 bp, Homo sapiens
tcatgaactcccaac

SEQ ID NO: 338200 - DNA, 15 bp, Homo sapiens
gtcatgaactcccaa

SEQ ID NO: 338201 - DNA, 15 bp, Homo sapiens
ggtcatgaactccca

SEQ ID NO: 338202 - DNA, 15 bp, Homo sapiens
tggtcatgaactccc

SEQ ID NO: 338203 - DNA, 15 bp, Homo sapiens
ctggtcatgaactcc

SEQ ID NO: 338204 - DNA, 15 bp, Homo sapiens
gctggtcatgaactc

SEQ ID NO: 338205 - DNA, 15 bp, Homo sapiens
ggctggtcatgaact

SEQ ID NO: 338206 - DNA, 15 bp, Homo sapiens
aggctggtcatgaac

SEQ ID NO: 338207 - DNA, 15 bp, Homo sapiens
caggctggtcatgaa

SEQ ID NO: 338208 - DNA, 15 bp, Homo sapiens
ccaggctggtcatga

SEQ ID NO: 338209 - DNA, 15 bp, Homo sapiens
cccaggctggtcatg

SEQ ID NO: 338210 - DNA, 15 bp, Homo sapiens
gcccaggctggtcat

SEQ ID NO: 338211 - DNA, 15 bp, Homo sapiens
tgcccaggctggtca

SEQ ID NO: 338212 - DNA, 15 bp, Homo sapiens
ttcttgctatgttgc

SEQ ID NO: 338213 - DNA, 15 bp, Homo sapiens
gttcttgctatgttg

SEQ ID NO: 338214 - DNA, 15 bp, Homo sapiens
ggttcttgctatgtt

SEQ ID NO: 338215 - DNA, 15 bp, Homo sapiens
aggttcttgctatgt

SEQ ID NO: 338216 - DNA, 15 bp, Homo sapiens
taggttcttgctatg

SEQ ID NO: 338217 - DNA, 15 bp, Homo sapiens
ataggttcttgctat

SEQ ID NO: 338218 - DNA, 15 bp, Homo sapiens
gataggttcttgcta

SEQ ID NO: 338219 - DNA, 15 bp, Homo sapiens
agataggttcttgct

SEQ ID NO: 338220 - DNA, 15 bp, Homo sapiens
gagataggttcttgc

SEQ ID NO: 338221 - DNA, 15 bp, Homo sapiens
agagataggttcttg

SEQ ID NO: 338222 - DNA, 15 bp, Homo sapiens
tagagataggttctt

SEQ ID NO: 338223 - DNA, 15 bp, Homo sapiens
gtagagataggttct

SEQ ID NO: 338224 - DNA, 15 bp, Homo sapiens
tgtagagataggttc

SEQ ID NO: 338225 - DNA, 15 bp, Homo sapiens
ttgtagagataggtt

SEQ ID NO: 338226 - DNA, 15 bp, Homo sapiens
tttgtagagataggt

SEQ ID NO: 338227 - DNA, 15 bp, Homo sapiens
ttttgtagagatagg

SEQ ID NO: 338228 - DNA, 15 bp, Homo sapiens
tttttgtagagatag

SEQ ID NO: 338229 - DNA, 15 bp, Homo sapiens
gtttttgtagagata

SEQ ID NO: 338230 - DNA, 15 bp, Homo sapiens
ggtttttgtagagat

SEQ ID NO: 338231 - DNA, 15 bp, Homo sapiens
tggtttttgtagaga

SEQ ID NO: 338232 - DNA, 15 bp, Homo sapiens
ttggtttttgtagag

SEQ ID NO: 338233 - DNA, 15 bp, Homo sapiens
tttggtttttgtaga

SEQ ID NO: 338234 - DNA, 15 bp, Homo sapiens
ttttggtttttgtag

SEQ ID NO: 338235 - DNA, 15 bp, Homo sapiens
cttttggtttttgta

SEQ ID NO: 338236 - DNA, 15 bp, Homo sapiens
tcttttggtttttgt

SEQ ID NO: 338237 - DNA, 15 bp, Homo sapiens
ttcttttggtttttg

SEQ ID NO: 338238 - DNA, 15 bp, Homo sapiens
tttcttttggttttt

SEQ ID NO: 338239 - DNA, 15 bp, Homo sapiens
ttttcttttggtttt

SEQ ID NO: 338240 - DNA, 15 bp, Homo sapiens
attttcttttggttt

SEQ ID NO: 338241 - DNA, 15 bp, Homo sapiens
aattttcttttggtt

SEQ ID NO: 338242 - DNA, 15 bp, Homo sapiens
taattttcttttggt

SEQ ID NO: 338243 - DNA, 15 bp, Homo sapiens
ctaattttcttttgg

SEQ ID NO: 338244 - DNA, 15 bp, Homo sapiens
gctaattttcttttg

SEQ ID NO: 338245 - DNA, 15 bp, Homo sapiens
ggctaattttctttt

SEQ ID NO: 338246 - DNA, 15 bp, Homo sapiens
tggctaattttcttt

SEQ ID NO: 338247 - DNA, 15 bp, Homo sapiens
ctggctaattttctt

SEQ ID NO: 338248 - DNA, 15 bp, Homo sapiens
gctggctaattttct

SEQ ID NO: 338249 - DNA, 15 bp, Homo sapiens
agctggctaattttc

SEQ ID NO: 338250 - DNA, 15 bp, Homo sapiens
cagctggctaatttt

SEQ ID NO: 338251 - DNA, 15 bp, Homo sapiens
acagctggctaattt

SEQ ID NO: 338252 - DNA, 15 bp, Homo sapiens
cacagctggctaatt

SEQ ID NO: 338253 - DNA, 15 bp, Homo sapiens
ccacagctggctaat

SEQ ID NO: 338254 - DNA, 15 bp, Homo sapiens
accacagctggctaa

SEQ ID NO: 338255 - DNA, 15 bp, Homo sapiens
caccacagctggcta

SEQ ID NO: 338256 - DNA, 15 bp, Homo sapiens
ccaccacagctggct

SEQ ID NO: 338257 - DNA, 15 bp, Homo sapiens
gccaccacagctggc

SEQ ID NO: 338258 - DNA, 15 bp, Homo sapiens
tgccaccacagctgg

SEQ ID NO: 338259 - DNA, 15 bp, Homo sapiens
atgccaccacagctg

SEQ ID NO: 338260 - DNA, 15 bp, Homo sapiens
catgccaccacagct

SEQ ID NO: 338261 - DNA, 15 bp, Homo sapiens
gcatgccaccacagc

SEQ ID NO: 338262 - DNA, 15 bp, Homo sapiens
ggcatgccaccacag

SEQ ID NO: 338263 - DNA, 15 bp, Homo sapiens
aggcatgccaccaca

SEQ ID NO: 338264 - DNA, 15 bp, Homo sapiens
taggcatgccaccac

SEQ ID NO: 338265 - DNA, 15 bp, Homo sapiens
ataggcatgccacca

SEQ ID NO: 338266 - DNA, 15 bp, Homo sapiens
tataggcatgccacc

SEQ ID NO: 338267 - DNA, 15 bp, Homo sapiens
ctataggcatgccac

SEQ ID NO: 338268 - DNA, 15 bp, Homo sapiens
actataggcatgcca

SEQ ID NO: 338269 - DNA, 15 bp, Homo sapiens
gactataggcatgcc

SEQ ID NO: 338270 - DNA, 15 bp, Homo sapiens
ggactataggcatgc

SEQ ID NO: 338271 - DNA, 15 bp, Homo sapiens
gggactataggcatg

SEQ ID NO: 338272 - DNA, 15 bp, Homo sapiens
tgggactataggcat

SEQ ID NO: 338273 - DNA, 15 bp, Homo sapiens
ctgggactataggca

SEQ ID NO: 338274 - DNA, 15 bp, Homo sapiens
gctgggactataggc

SEQ ID NO: 338275 - DNA, 15 bp, Homo sapiens
agctgggactatagg

SEQ ID NO: 338276 - DNA, 15 bp, Homo sapiens
tagctgggactatag

SEQ ID NO: 338277 - DNA, 15 bp, Homo sapiens
gtagctgggactata

SEQ ID NO: 338278 - DNA, 15 bp, Homo sapiens
ggtagctgggactat

SEQ ID NO: 338279 - DNA, 15 bp, Homo sapiens
gggtagctgggacta

SEQ ID NO: 338280 - DNA, 15 bp, Homo sapiens
tgggtagctgggact

SEQ ID NO: 338281 - DNA, 15 bp, Homo sapiens
ctgggtagctgggac

SEQ ID NO: 338282 - DNA, 15 bp, Homo sapiens
cctgggtagctggga

SEQ ID NO: 338283 - DNA, 15 bp, Homo sapiens
tcctgggtagctggg

SEQ ID NO: 338284 - DNA, 15 bp, Homo sapiens
ttcctgggtagctgg

SEQ ID NO: 338285 - DNA, 15 bp, Homo sapiens
cttcctgggtagctg

SEQ ID NO: 338286 - DNA, 15 bp, Homo sapiens
acttcctgggtagct

SEQ ID NO: 338287 - DNA, 15 bp, Homo sapiens
aacttcctgggtagc

SEQ ID NO: 338288 - DNA, 15 bp, Homo sapiens
taacttcctgggtag

SEQ ID NO: 338289 - DNA, 15 bp, Homo sapiens
ttaacttcctgggta

SEQ ID NO: 338290 - DNA, 15 bp, Homo sapiens
cttaacttcctgggt

SEQ ID NO: 338291 - DNA, 15 bp, Homo sapiens
tcttaacttcctggg

SEQ ID NO: 338292 - DNA, 15 bp, Homo sapiens
gtcttaacttcctgg

SEQ ID NO: 338293 - DNA, 15 bp, Homo sapiens
tgtcttaacttcctg

SEQ ID NO: 338294 - DNA, 15 bp, Homo sapiens
ctgtcttaacttcct

SEQ ID NO: 338295 - DNA, 15 bp, Homo sapiens
cctgtcttaacttcc

SEQ ID NO: 338296 - DNA, 15 bp, Homo sapiens
tcctgtcttaacttc

SEQ ID NO: 338297 - DNA, 15 bp, Homo sapiens
ctcctgtcttaactt

SEQ ID NO: 338298 - DNA, 15 bp, Homo sapiens
cctcctgtcttaact

SEQ ID NO: 338299 - DNA, 15 bp, Homo sapiens
tcctcctgtcttaac

SEQ ID NO: 338300 - DNA, 15 bp, Homo sapiens
atcctcctgtcttaa

SEQ ID NO: 338301 - DNA, 15 bp, Homo sapiens
gatcctcctgtctta

SEQ ID NO: 338302 - DNA, 15 bp, Homo sapiens
cgatcctcctgtctt

SEQ ID NO: 338303 - DNA, 15 bp, Homo sapiens
gcgatcctcctgtct

SEQ ID NO: 338304 - DNA, 15 bp, Homo sapiens
agcgatcctcctgtc

SEQ ID NO: 338305 - DNA, 15 bp, Homo sapiens
aagcgatcctcctgt

SEQ ID NO: 338306 - DNA, 15 bp, Homo sapiens
gaagcgatcctcctg

SEQ ID NO: 338307 - DNA, 15 bp, Homo sapiens
tgaagcgatcctcct

SEQ ID NO: 338308 - DNA, 15 bp, Homo sapiens
ctgaagcgatcctcc

SEQ ID NO: 338309 - DNA, 15 bp, Homo sapiens
gctgaagcgatcctc

SEQ ID NO: 338310 - DNA, 15 bp, Homo sapiens
ggctgaagcgatcct

SEQ ID NO: 338311 - DNA, 15 bp, Homo sapiens
aggctgaagcgatcc

SEQ ID NO: 338312 - DNA, 15 bp, Homo sapiens
caggctgaagcgatc

SEQ ID NO: 338313 - DNA, 15 bp, Homo sapiens
ccaggctgaagcgat

SEQ ID NO: 338314 - DNA, 15 bp, Homo sapiens
cccaggctgaagcga

SEQ ID NO: 338315 - DNA, 15 bp, Homo sapiens
tcccaggctgaagcg

SEQ ID NO: 338316 - DNA, 15 bp, Homo sapiens
ctcccaggctgaagc

SEQ ID NO: 338317 - DNA, 15 bp, Homo sapiens
actcccaggctgaag

SEQ ID NO: 338318 - DNA, 15 bp, Homo sapiens
aactcccaggctgaa

SEQ ID NO: 338319 - DNA, 15 bp, Homo sapiens
gaactcccaggctga

SEQ ID NO: 338320 - DNA, 15 bp, Homo sapiens
tgaactcccaggctg

SEQ ID NO: 338321 - DNA, 15 bp, Homo sapiens
ttgaactcccaggct

SEQ ID NO: 338322 - DNA, 15 bp, Homo sapiens
cttgaactcccaggc

SEQ ID NO: 338323 - DNA, 15 bp, Homo sapiens
ccttgaactcccagg

SEQ ID NO: 338324 - DNA, 15 bp, Homo sapiens
gccttgaactcccag

SEQ ID NO: 338325 - DNA, 15 bp, Homo sapiens
agccttgaactccca

SEQ ID NO: 338326 - DNA, 15 bp, Homo sapiens
cagccttgaactccc

SEQ ID NO: 338327 - DNA, 15 bp, Homo sapiens
gcagccttgaactcc

SEQ ID NO: 338328 - DNA, 15 bp, Homo sapiens
tgcagccttgaactc

SEQ ID NO: 338329 - DNA, 15 bp, Homo sapiens
ttgcagccttgaact

SEQ ID NO: 338330 - DNA, 15 bp, Homo sapiens
attgcagccttgaac

SEQ ID NO: 338331 - DNA, 15 bp, Homo sapiens
aattgcagccttgaa

SEQ ID NO: 338332 - DNA, 15 bp, Homo sapiens
taattgcagccttga

SEQ ID NO: 338333 - DNA, 15 bp, Homo sapiens
gtaattgcagccttg

SEQ ID NO: 338334 - DNA, 15 bp, Homo sapiens
ggtaattgcagcctt

SEQ ID NO: 338335 - DNA, 15 bp, Homo sapiens
aggtaattgcagcct

SEQ ID NO: 338336 - DNA, 15 bp, Homo sapiens
gaggtaattgcagcc

SEQ ID NO: 338337 - DNA, 15 bp, Homo sapiens
agaggtaattgcagc

SEQ ID NO: 338338 - DNA, 15 bp, Homo sapiens
cagaggtaattgcag

SEQ ID NO: 338339 - DNA, 15 bp, Homo sapiens
tcagaggtaattgca

SEQ ID NO: 338340 - DNA, 15 bp, Homo sapiens
atcagaggtaattgc

SEQ ID NO: 338341 - DNA, 15 bp, Homo sapiens
aatcagaggtaattg

SEQ ID NO: 338342 - DNA, 15 bp, Homo sapiens
caatcagaggtaatt

SEQ ID NO: 338343 - DNA, 15 bp, Homo sapiens
tcaatcagaggtaat

SEQ ID NO: 338344 - DNA, 15 bp, Homo sapiens
ctcaatcagaggtaa

SEQ ID NO: 338345 - DNA, 15 bp, Homo sapiens
gctcaatcagaggta

SEQ ID NO: 338346 - DNA, 15 bp, Homo sapiens
ggctcaatcagaggt

SEQ ID NO: 338347 - DNA, 15 bp, Homo sapiens
tggctcaatcagagg

SEQ ID NO: 338348 - DNA, 15 bp, Homo sapiens
gtggctcaatcagag

SEQ ID NO: 338349 - DNA, 15 bp, Homo sapiens
agtggctcaatcaga

SEQ ID NO: 338350 - DNA, 15 bp, Homo sapiens
cagtggctcaatcag

SEQ ID NO: 338351 - DNA, 15 bp, Homo sapiens
acagtggctcaatca

SEQ ID NO: 338352 - DNA, 15 bp, Homo sapiens
tacagtggctcaatc

SEQ ID NO: 338353 - DNA, 15 bp, Homo sapiens
gtacagtggctcaat

SEQ ID NO: 338354 - DNA, 15 bp, Homo sapiens
agtacagtggctcaa

SEQ ID NO: 338355 - DNA, 15 bp, Homo sapiens
gagtacagtggctca

SEQ ID NO: 338356 - DNA, 15 bp, Homo sapiens
ggagtacagtggctc

SEQ ID NO: 338357 - DNA, 15 bp, Homo sapiens
tggagtacagtggct

SEQ ID NO: 338358 - DNA, 15 bp, Homo sapiens
attgctctgttgccc

SEQ ID NO: 338359 - DNA, 15 bp, Homo sapiens
tattgctctgttgcc

SEQ ID NO: 338360 - DNA, 15 bp, Homo sapiens
gtattgctctgttgc

SEQ ID NO: 338361 - DNA, 15 bp, Homo sapiens
ggtattgctctgttg

SEQ ID NO: 338362 - DNA, 15 bp, Homo sapiens
gggtattgctctgtt

SEQ ID NO: 338363 - DNA, 15 bp, Homo sapiens
agggtattgctctgt

SEQ ID NO: 338364 - DNA, 15 bp, Homo sapiens
cagggtattgctctg

SEQ ID NO: 338365 - DNA, 15 bp, Homo sapiens
acagggtattgctct

SEQ ID NO: 338366 - DNA, 15 bp, Homo sapiens
gacagggtattgctc

SEQ ID NO: 338367 - DNA, 15 bp, Homo sapiens
agacagggtattgct

SEQ ID NO: 338368 - DNA, 15 bp, Homo sapiens
gagacagggtattgc

SEQ ID NO: 338369 - DNA, 15 bp, Homo sapiens
agagacagggtattg

SEQ ID NO: 338370 - DNA, 15 bp, Homo sapiens
tagagacagggtatt

SEQ ID NO: 338371 - DNA, 15 bp, Homo sapiens
ttagagacagggtat

SEQ ID NO: 338372 - DNA, 15 bp, Homo sapiens
tttagagacagggta

SEQ ID NO: 338373 - DNA, 15 bp, Homo sapiens
attttttagagacag

SEQ ID NO: 338374 - DNA, 15 bp, Homo sapiens
tattttttagagaca

SEQ ID NO: 338375 - DNA, 15 bp, Homo sapiens
ttattttttagagac

SEQ ID NO: 338376 - DNA, 15 bp, Homo sapiens
tttattttttagaga

SEQ ID NO: 338377 - DNA, 15 bp, Homo sapiens
atttattttttagag

SEQ ID NO: 338378 - DNA, 15 bp, Homo sapiens
tatttattttttaga

SEQ ID NO: 338379 - DNA, 15 bp, Homo sapiens
ttatttattttttag

SEQ ID NO: 338380 - DNA, 15 bp, Homo sapiens
ttttatttatttttt

SEQ ID NO: 338381 - DNA, 15 bp, Homo sapiens
attttatttattttt

SEQ ID NO: 338382 - DNA, 15 bp, Homo sapiens
tattttatttatttt

SEQ ID NO: 338383 - DNA, 15 bp, Homo sapiens
atattttatttattt

SEQ ID NO: 338384 - DNA, 15 bp, Homo sapiens
tatattttatttatt

SEQ ID NO: 338385 - DNA, 15 bp, Homo sapiens
ttatattttatttat

SEQ ID NO: 338386 - DNA, 15 bp, Homo sapiens
attatattttattta

SEQ ID NO: 338387 - DNA, 15 bp, Homo sapiens
tattatattttattt

SEQ ID NO: 338388 - DNA, 15 bp, Homo sapiens
atattatattttatt

SEQ ID NO: 338389 - DNA, 15 bp, Homo sapiens
tatattatattttat

SEQ ID NO: 338390 - DNA, 15 bp, Homo sapiens
ttatattatatttta

SEQ ID NO: 338391 - DNA, 15 bp, Homo sapiens
tttatattatatttt

SEQ ID NO: 338392 - DNA, 15 bp, Homo sapiens
ttttatattatattt

SEQ ID NO: 338393 - DNA, 15 bp, Homo sapiens
attttatattatatt

SEQ ID NO: 338394 - DNA, 15 bp, Homo sapiens
tattttatattatat

SEQ ID NO: 338395 - DNA, 15 bp, Homo sapiens
ttattttatattata

SEQ ID NO: 338396 - DNA, 15 bp, Homo sapiens
tttattttatattat

SEQ ID NO: 338397 - DNA, 15 bp, Homo sapiens
ttttattttatatta

SEQ ID NO: 338398 - DNA, 15 bp, Homo sapiens
attttattttatatt

SEQ ID NO: 338399 - DNA, 15 bp, Homo sapiens
cattttattttatat

SEQ ID NO: 338400 - DNA, 15 bp, Homo sapiens
ccattttattttata

SEQ ID NO: 338401 - DNA, 15 bp, Homo sapiens
tccattttattttat

SEQ ID NO: 338402 - DNA, 15 bp, Homo sapiens
gtccattttatttta

SEQ ID NO: 338403 - DNA, 15 bp, Homo sapiens
tgtccattttatttt

SEQ ID NO: 338404 - DNA, 15 bp, Homo sapiens
atgtccattttattt

SEQ ID NO: 338405 - DNA, 15 bp, Homo sapiens
aatgtccattttatt

SEQ ID NO: 338406 - DNA, 15 bp, Homo sapiens
aaatgtccattttat

SEQ ID NO: 338407 - DNA, 15 bp, Homo sapiens
caaatgtccatttta

SEQ ID NO: 338408 - DNA, 15 bp, Homo sapiens
gcaaatgtccatttt

SEQ ID NO: 338409 - DNA, 15 bp, Homo sapiens
tgcaaatgtccattt

SEQ ID NO: 338410 - DNA, 15 bp, Homo sapiens
atgcaaatgtccatt

SEQ ID NO: 338411 - DNA, 15 bp, Homo sapiens
gatgcaaatgtccat

SEQ ID NO: 338412 - DNA, 15 bp, Homo sapiens
tgatgcaaatgtcca

SEQ ID NO: 338413 - DNA, 15 bp, Homo sapiens
gtgatgcaaatgtcc

SEQ ID NO: 338414 - DNA, 15 bp, Homo sapiens
agtgatgcaaatgtc

SEQ ID NO: 338415 - DNA, 15 bp, Homo sapiens
aagtgatgcaaatgt

SEQ ID NO: 338416 - DNA, 15 bp, Homo sapiens
aaagtgatgcaaatg

SEQ ID NO: 338417 - DNA, 15 bp, Homo sapiens
caaagtgatgcaaat

SEQ ID NO: 338418 - DNA, 15 bp, Homo sapiens
gcaaagtgatgcaaa

SEQ ID NO: 338419 - DNA, 15 bp, Homo sapiens
tgcaaagtgatgcaa

SEQ ID NO: 338420 - DNA, 15 bp, Homo sapiens
ctgcaaagtgatgca

SEQ ID NO: 338421 - DNA, 15 bp, Homo sapiens
gctgcaaagtgatgc

SEQ ID NO: 338422 - DNA, 15 bp, Homo sapiens
ggctgcaaagtgatg

SEQ ID NO: 338423 - DNA, 15 bp, Homo sapiens
gggctgcaaagtgat

SEQ ID NO: 338424 - DNA, 15 bp, Homo sapiens
ggggctgcaaagtga

SEQ ID NO: 338425 - DNA, 15 bp, Homo sapiens
aggggctgcaaagtg

SEQ ID NO: 338426 - DNA, 15 bp, Homo sapiens
aaggggctgcaaagt

SEQ ID NO: 338427 - DNA, 15 bp, Homo sapiens
taaggggctgcaaag

SEQ ID NO: 338428 - DNA, 15 bp, Homo sapiens
ctaaggggctgcaaa

SEQ ID NO: 338429 - DNA, 15 bp, Homo sapiens
gctaaggggctgcaa

SEQ ID NO: 338430 - DNA, 15 bp, Homo sapiens
agctaaggggctgca

SEQ ID NO: 338431 - DNA, 15 bp, Homo sapiens
aagctaaggggctgc

SEQ ID NO: 338432 - DNA, 15 bp, Homo sapiens
caagctaaggggctg

SEQ ID NO: 338433 - DNA, 15 bp, Homo sapiens
gcaagctaaggggct

SEQ ID NO: 338434 - DNA, 15 bp, Homo sapiens
agcaagctaaggggc

SEQ ID NO: 338435 - DNA, 15 bp, Homo sapiens
gagcaagctaagggg

SEQ ID NO: 338436 - DNA, 15 bp, Homo sapiens
ggagcaagctaaggg

SEQ ID NO: 338437 - DNA, 15 bp, Homo sapiens
tggagcaagctaagg

SEQ ID NO: 338438 - DNA, 15 bp, Homo sapiens
ttggagcaagctaag

SEQ ID NO: 338439 - DNA, 15 bp, Homo sapiens
attggagcaagctaa

SEQ ID NO: 338440 - DNA, 15 bp, Homo sapiens
gattggagcaagcta

SEQ ID NO: 338441 - DNA, 15 bp, Homo sapiens
tgattggagcaagct

SEQ ID NO: 338442 - DNA, 15 bp, Homo sapiens
atgattggagcaagc

SEQ ID NO: 338443 - DNA, 15 bp, Homo sapiens
tatgattggagcaag

SEQ ID NO: 338444 - DNA, 15 bp, Homo sapiens
atatgattggagcaa

SEQ ID NO: 338445 - DNA, 15 bp, Homo sapiens
catatgattggagca

SEQ ID NO: 338446 - DNA, 15 bp, Homo sapiens
ccatatgattggagc

SEQ ID NO: 338447 - DNA, 15 bp, Homo sapiens
gccatatgattggag

SEQ ID NO: 338448 - DNA, 15 bp, Homo sapiens
agccatatgattgga

SEQ ID NO: 338449 - DNA, 15 bp, Homo sapiens
aagccatatgattgg

SEQ ID NO: 338450 - DNA, 15 bp, Homo sapiens
gaagccatatgattg

SEQ ID NO: 338451 - DNA, 15 bp, Homo sapiens
tgaagccatatgatt

SEQ ID NO: 338452 - DNA, 15 bp, Homo sapiens
ctgaagccatatgat

SEQ ID NO: 338453 - DNA, 15 bp, Homo sapiens
actgaagccatatga

SEQ ID NO: 338454 - DNA, 15 bp, Homo sapiens
aactgaagccatatg

SEQ ID NO: 338455 - DNA, 15 bp, Homo sapiens
taactgaagccatat

SEQ ID NO: 338456 - DNA, 15 bp, Homo sapiens
ttaactgaagccata

SEQ ID NO: 338457 - DNA, 15 bp, Homo sapiens
cttaactgaagccat

SEQ ID NO: 338458 - DNA, 15 bp, Homo sapiens
acttaactgaagcca

SEQ ID NO: 338459 - DNA, 15 bp, Homo sapiens
aacttaactgaagcc

SEQ ID NO: 338460 - DNA, 15 bp, Homo sapiens
aaacttaactgaagc

SEQ ID NO: 338461 - DNA, 15 bp, Homo sapiens
caaacttaactgaag

SEQ ID NO: 338462 - DNA, 15 bp, Homo sapiens
ccaaacttaactgaa

SEQ ID NO: 338463 - DNA, 15 bp, Homo sapiens
gccaaacttaactga

SEQ ID NO: 338464 - DNA, 15 bp, Homo sapiens
agccaaacttaactg

SEQ ID NO: 338465 - DNA, 15 bp, Homo sapiens
aagccaaacttaact

SEQ ID NO: 338466 - DNA, 15 bp, Homo sapiens
taagccaaacttaac

SEQ ID NO: 338467 - DNA, 15 bp, Homo sapiens
ctaagccaaacttaa

SEQ ID NO: 338468 - DNA, 15 bp, Homo sapiens
tctaagccaaactta

SEQ ID NO: 338469 - DNA, 15 bp, Homo sapiens
ctctaagccaaactt

SEQ ID NO: 338470 - DNA, 15 bp, Homo sapiens
actctaagccaaact

SEQ ID NO: 338471 - DNA, 15 bp, Homo sapiens
aactctaagccaaac

SEQ ID NO: 338472 - DNA, 15 bp, Homo sapiens
gaactctaagccaaa

SEQ ID NO: 338473 - DNA, 15 bp, Homo sapiens
ggaactctaagccaa

SEQ ID NO: 338474 - DNA, 15 bp, Homo sapiens
aggaactctaagcca

SEQ ID NO: 338475 - DNA, 15 bp, Homo sapiens
caggaactctaagcc

SEQ ID NO: 338476 - DNA, 15 bp, Homo sapiens
tcaggaactctaagc

SEQ ID NO: 338477 - DNA, 15 bp, Homo sapiens
gtcaggaactctaag

SEQ ID NO: 338478 - DNA, 15 bp, Homo sapiens
ggtcaggaactctaa

SEQ ID NO: 338479 - DNA, 15 bp, Homo sapiens
cggtcaggaactcta

SEQ ID NO: 338480 - DNA, 15 bp, Homo sapiens
ccggtcaggaactct

SEQ ID NO: 338481 - DNA, 15 bp, Homo sapiens
accggtcaggaactc

SEQ ID NO: 338482 - DNA, 15 bp, Homo sapiens
caccggtcaggaact

SEQ ID NO: 338483 - DNA, 15 bp, Homo sapiens
ccaccggtcaggaac

SEQ ID NO: 338484 - DNA, 15 bp, Homo sapiens
tccaccggtcaggaa

SEQ ID NO: 338485 - DNA, 15 bp, Homo sapiens
ttccaccggtcagga

SEQ ID NO: 338486 - DNA, 15 bp, Homo sapiens
gttccaccggtcagg

SEQ ID NO: 338487 - DNA, 15 bp, Homo sapiens
agttccaccggtcag

SEQ ID NO: 338488 - DNA, 15 bp, Homo sapiens
aagttccaccggtca

SEQ ID NO: 338489 - DNA, 15 bp, Homo sapiens
taagttccaccggtc

SEQ ID NO: 338490 - DNA, 15 bp, Homo sapiens
ataagttccaccggt

SEQ ID NO: 338491 - DNA, 15 bp, Homo sapiens
cataagttccaccgg

SEQ ID NO: 338492 - DNA, 15 bp, Homo sapiens
tcataagttccaccg

SEQ ID NO: 338493 - DNA, 15 bp, Homo sapiens
atcataagttccacc

SEQ ID NO: 338494 - DNA, 15 bp, Homo sapiens
aatcataagttccac

SEQ ID NO: 338495 - DNA, 15 bp, Homo sapiens
aaatcataagttcca

SEQ ID NO: 338496 - DNA, 15 bp, Homo sapiens
gaaatcataagttcc

SEQ ID NO: 338497 - DNA, 15 bp, Homo sapiens
agaaatcataagttc

SEQ ID NO: 338498 - DNA, 15 bp, Homo sapiens
cagaaatcataagtt

SEQ ID NO: 338499 - DNA, 15 bp, Homo sapiens
gcagaaatcataagt

SEQ ID NO: 338500 - DNA, 15 bp, Homo sapiens
ggcagaaatcataag

SEQ ID NO: 338501 - DNA, 15 bp, Homo sapiens
aggcagaaatcataa

SEQ ID NO: 338502 - DNA, 15 bp, Homo sapiens
caggcagaaatcata

SEQ ID NO: 338503 - DNA, 15 bp, Homo sapiens
acaggcagaaatcat

SEQ ID NO: 338504 - DNA, 15 bp, Homo sapiens
tacaggcagaaatca

SEQ ID NO: 338505 - DNA, 15 bp, Homo sapiens
ttacaggcagaaatc

SEQ ID NO: 338506 - DNA, 15 bp, Homo sapiens
attacaggcagaaat

SEQ ID NO: 338507 - DNA, 15 bp, Homo sapiens
gattacaggcagaaa

SEQ ID NO: 338508 - DNA, 15 bp, Homo sapiens
tgattacaggcagaa

SEQ ID NO: 338509 - DNA, 15 bp, Homo sapiens
ctgattacaggcaga

SEQ ID NO: 338510 - DNA, 15 bp, Homo sapiens
tctgattacaggcag

SEQ ID NO: 338511 - DNA, 15 bp, Homo sapiens
gtctgattacaggca

SEQ ID NO: 338512 - DNA, 15 bp, Homo sapiens
agtctgattacaggc

SEQ ID NO: 338513 - DNA, 15 bp, Homo sapiens
aagtctgattacagg

SEQ ID NO: 338514 - DNA, 15 bp, Homo sapiens
aaagtctgattacag

SEQ ID NO: 338515 - DNA, 15 bp, Homo sapiens
caaagtctgattaca

SEQ ID NO: 338516 - DNA, 15 bp, Homo sapiens
gcaaagtctgattac

SEQ ID NO: 338517 - DNA, 15 bp, Homo sapiens
agcaaagtctgatta

SEQ ID NO: 338518 - DNA, 15 bp, Homo sapiens
tagcaaagtctgatt

SEQ ID NO: 338519 - DNA, 15 bp, Homo sapiens
ttagcaaagtctgat

SEQ ID NO: 338520 - DNA, 15 bp, Homo sapiens
cttagcaaagtctga

SEQ ID NO: 338521 - DNA, 15 bp, Homo sapiens
tcttagcaaagtctg

SEQ ID NO: 338522 - DNA, 15 bp, Homo sapiens
gtcttagcaaagtct

SEQ ID NO: 338523 - DNA, 15 bp, Homo sapiens
agtcttagcaaagtc

SEQ ID NO: 338524 - DNA, 15 bp, Homo sapiens
tagtcttagcaaagt

SEQ ID NO: 338525 - DNA, 15 bp, Homo sapiens
atagtcttagcaaag

SEQ ID NO: 338526 - DNA, 15 bp, Homo sapiens
gatagtcttagcaaa

SEQ ID NO: 338527 - DNA, 15 bp, Homo sapiens
tgatagtcttagcaa

SEQ ID NO: 338528 - DNA, 15 bp, Homo sapiens
atgatagtcttagca

SEQ ID NO: 338529 - DNA, 15 bp, Homo sapiens
catgatagtcttagc

SEQ ID NO: 338530 - DNA, 15 bp, Homo sapiens
tcatgatagtcttag

SEQ ID NO: 338531 - DNA, 15 bp, Homo sapiens
atcatgatagtctta

SEQ ID NO: 338532 - DNA, 15 bp, Homo sapiens
tatcatgatagtctt

SEQ ID NO: 338533 - DNA, 15 bp, Homo sapiens
gtatcatgatagtct

SEQ ID NO: 338534 - DNA, 15 bp, Homo sapiens
agtatcatgatagtc

SEQ ID NO: 338535 - DNA, 15 bp, Homo sapiens
cagtatcatgatagt

SEQ ID NO: 338536 - DNA, 15 bp, Homo sapiens
gcagtatcatgatag

SEQ ID NO: 338537 - DNA, 15 bp, Homo sapiens
ggcagtatcatgata

SEQ ID NO: 338538 - DNA, 15 bp, Homo sapiens
aggcagtatcatgat

SEQ ID NO: 338539 - DNA, 15 bp, Homo sapiens
taggcagtatcatga

SEQ ID NO: 338540 - DNA, 15 bp, Homo sapiens
ataggcagtatcatg

SEQ ID NO: 338541 - DNA, 15 bp, Homo sapiens
gataggcagtatcat

SEQ ID NO: 338542 - DNA, 15 bp, Homo sapiens
ggataggcagtatca

SEQ ID NO: 338543 - DNA, 15 bp, Homo sapiens
tggataggcagtatc

SEQ ID NO: 338544 - DNA, 15 bp, Homo sapiens
ctggataggcagtat

SEQ ID NO: 338545 - DNA, 15 bp, Homo sapiens
gctggataggcagta

SEQ ID NO: 338546 - DNA, 15 bp, Homo sapiens
ggctggataggcagt

SEQ ID NO: 338547 - DNA, 15 bp, Homo sapiens
tggctggataggcag

SEQ ID NO: 338548 - DNA, 15 bp, Homo sapiens
ctggctggataggca

SEQ ID NO: 338549 - DNA, 15 bp, Homo sapiens
tctggctggataggc

SEQ ID NO: 338550 - DNA, 15 bp, Homo sapiens
gtctggctggatagg

SEQ ID NO: 338551 - DNA, 15 bp, Homo sapiens
agtctggctggatag

SEQ ID NO: 338552 - DNA, 15 bp, Homo sapiens
gagtctggctggata

SEQ ID NO: 338553 - DNA, 15 bp, Homo sapiens
agagtctggctggat

SEQ ID NO: 338554 - DNA, 15 bp, Homo sapiens
tagagtctggctgga

SEQ ID NO: 338555 - DNA, 15 bp, Homo sapiens
ctagagtctggctgg

SEQ ID NO: 338556 - DNA, 15 bp, Homo sapiens
actagagtctggctg

SEQ ID NO: 338557 - DNA, 15 bp, Homo sapiens
cactagagtctggct

SEQ ID NO: 338558 - DNA, 15 bp, Homo sapiens
tcactagagtctggc

SEQ ID NO: 338559 - DNA, 15 bp, Homo sapiens
atcactagagtctgg

SEQ ID NO: 338560 - DNA, 15 bp, Homo sapiens
gatcactagagtctg

SEQ ID NO: 338561 - DNA, 15 bp, Homo sapiens
agatcactagagtct

SEQ ID NO: 338562 - DNA, 15 bp, Homo sapiens
aagatcactagagtc

SEQ ID NO: 338563 - DNA, 15 bp, Homo sapiens
caagatcactagagt

SEQ ID NO: 338564 - DNA, 15 bp, Homo sapiens
gcaagatcactagag

SEQ ID NO: 338565 - DNA, 15 bp, Homo sapiens
tgcaagatcactaga

SEQ ID NO: 338566 - DNA, 15 bp, Homo sapiens
ttgcaagatcactag

SEQ ID NO: 338567 - DNA, 15 bp, Homo sapiens
tttgcaagatcacta

SEQ ID NO: 338568 - DNA, 15 bp, Homo sapiens
ttttgcaagatcact

SEQ ID NO: 338569 - DNA, 15 bp, Homo sapiens
gttttgcaagatcac

SEQ ID NO: 338570 - DNA, 15 bp, Homo sapiens
agttttgcaagatca

SEQ ID NO: 338571 - DNA, 15 bp, Homo sapiens
cagttttgcaagatc

SEQ ID NO: 338572 - DNA, 15 bp, Homo sapiens
acagttttgcaagat

SEQ ID NO: 338573 - DNA, 15 bp, Homo sapiens
cacagttttgcaaga

SEQ ID NO: 338574 - DNA, 15 bp, Homo sapiens
tcacagttttgcaag

SEQ ID NO: 338575 - DNA, 15 bp, Homo sapiens
atcacagttttgcaa

SEQ ID NO: 338576 - DNA, 15 bp, Homo sapiens
catcacagttttgca

SEQ ID NO: 338577 - DNA, 15 bp, Homo sapiens
ccatcacagttttgc

SEQ ID NO: 338578 - DNA, 15 bp, Homo sapiens
accatcacagttttg

SEQ ID NO: 338579 - DNA, 15 bp, Homo sapiens
aaccatcacagtttt

SEQ ID NO: 338580 - DNA, 15 bp, Homo sapiens
aaaccatcacagttt

SEQ ID NO: 338581 - DNA, 15 bp, Homo sapiens
taaaccatcacagtt

SEQ ID NO: 338582 - DNA, 15 bp, Homo sapiens
ataaaccatcacagt

SEQ ID NO: 338583 - DNA, 15 bp, Homo sapiens
gataaaccatcacag

SEQ ID NO: 338584 - DNA, 15 bp, Homo sapiens
ggataaaccatcaca

SEQ ID NO: 338585 - DNA, 15 bp, Homo sapiens
tggataaaccatcac

SEQ ID NO: 338586 - DNA, 15 bp, Homo sapiens
gtggataaaccatca

SEQ ID NO: 338587 - DNA, 15 bp, Homo sapiens
agtggataaaccatc

SEQ ID NO: 338588 - DNA, 15 bp, Homo sapiens
gagtggataaaccat

SEQ ID NO: 338589 - DNA, 15 bp, Homo sapiens
ggagtggataaacca

SEQ ID NO: 338590 - DNA, 15 bp, Homo sapiens
tggagtggataaacc

SEQ ID NO: 338591 - DNA, 15 bp, Homo sapiens
ctggagtggataaac

SEQ ID NO: 338592 - DNA, 15 bp, Homo sapiens
actggagtggataaa

SEQ ID NO: 338593 - DNA, 15 bp, Homo sapiens
aactggagtggataa

SEQ ID NO: 338594 - DNA, 15 bp, Homo sapiens
gaactggagtggata

SEQ ID NO: 338595 - DNA, 15 bp, Homo sapiens
ggaactggagtggat

SEQ ID NO: 338596 - DNA, 15 bp, Homo sapiens
gggaactggagtgga

SEQ ID NO: 338597 - DNA, 15 bp, Homo sapiens
tgggaactggagtgg

SEQ ID NO: 338598 - DNA, 15 bp, Homo sapiens
tctgggaactggagt

SEQ ID NO: 338599 - DNA, 15 bp, Homo sapiens
gtctgggaactggag

SEQ ID NO: 338600 - DNA, 15 bp, Homo sapiens
agtctgggaactgga

SEQ ID NO: 338601 - DNA, 15 bp, Homo sapiens
tagtctgggaactgg

SEQ ID NO: 338602 - DNA, 15 bp, Homo sapiens
ttagtctgggaactg

SEQ ID NO: 338603 - DNA, 15 bp, Homo sapiens
tttagtctgggaact

SEQ ID NO: 338604 - DNA, 15 bp, Homo sapiens
gtttagtctgggaac

SEQ ID NO: 338605 - DNA, 15 bp, Homo sapiens
ggtttagtctgggaa

SEQ ID NO: 338606 - DNA, 15 bp, Homo sapiens
aggtttagtctggga

SEQ ID NO: 338607 - DNA, 15 bp, Homo sapiens
gaggtttagtctggg

SEQ ID NO: 338608 - DNA, 15 bp, Homo sapiens
agaggtttagtctgg

SEQ ID NO: 338609 - DNA, 15 bp, Homo sapiens
gagaggtttagtctg

SEQ ID NO: 338610 - DNA, 15 bp, Homo sapiens
ggagaggtttagtct

SEQ ID NO: 338611 - DNA, 15 bp, Homo sapiens
gggagaggtttagtc

SEQ ID NO: 338612 - DNA, 15 bp, Homo sapiens
agggagaggtttagt

SEQ ID NO: 338613 - DNA, 15 bp, Homo sapiens
aagggagaggtttag

SEQ ID NO: 338614 - DNA, 15 bp, Homo sapiens
caagggagaggttta

SEQ ID NO: 338615 - DNA, 15 bp, Homo sapiens
ccaagggagaggttt

SEQ ID NO: 338616 - DNA, 15 bp, Homo sapiens
gccaagggagaggtt

SEQ ID NO: 338617 - DNA, 15 bp, Homo sapiens
ggccaagggagaggt

SEQ ID NO: 338618 - DNA, 15 bp, Homo sapiens
tggccaagggagagg

SEQ ID NO: 338619 - DNA, 15 bp, Homo sapiens
ctggccaagggagag

SEQ ID NO: 338620 - DNA, 15 bp, Homo sapiens
actggccaagggaga

SEQ ID NO: 338621 - DNA, 15 bp, Homo sapiens
cactggccaagggag

SEQ ID NO: 338622 - DNA, 15 bp, Homo sapiens
ccactggccaaggga

SEQ ID NO: 338623 - DNA, 15 bp, Homo sapiens
tccactggccaaggg

SEQ ID NO: 338624 - DNA, 15 bp, Homo sapiens
ctccactggccaagg

SEQ ID NO: 338625 - DNA, 15 bp, Homo sapiens
cctccactggccaag

SEQ ID NO: 338626 - DNA, 15 bp, Homo sapiens
tcctccactggccaa

SEQ ID NO: 338627 - DNA, 15 bp, Homo sapiens
gtcctccactggcca

SEQ ID NO: 338628 - DNA, 15 bp, Homo sapiens
ggtcctccactggcc

SEQ ID NO: 338629 - DNA, 15 bp, Homo sapiens
gggtcctccactggc

SEQ ID NO: 338630 - DNA, 15 bp, Homo sapiens
ggggtcctccactgg

SEQ ID NO: 338631 - DNA, 15 bp, Homo sapiens
aggggtcctccactg

SEQ ID NO: 338632 - DNA, 15 bp, Homo sapiens
gaggggtcctccact

SEQ ID NO: 338633 - DNA, 15 bp, Homo sapiens
ggaggggtcctccac

SEQ ID NO: 338634 - DNA, 15 bp, Homo sapiens
tggaggggtcctcca

SEQ ID NO: 338635 - DNA, 15 bp, Homo sapiens
ttggaggggtcctcc

SEQ ID NO: 338636 - DNA, 15 bp, Homo sapiens
gttggaggggtcctc

SEQ ID NO: 338637 - DNA, 15 bp, Homo sapiens
tgttggaggggtcct

SEQ ID NO: 338638 - DNA, 15 bp, Homo sapiens
gtgttggaggggtcc

SEQ ID NO: 338639 - DNA, 15 bp, Homo sapiens
ggtgttggaggggtc

SEQ ID NO: 338640 - DNA, 15 bp, Homo sapiens
gggtgttggaggggt

SEQ ID NO: 338641 - DNA, 15 bp, Homo sapiens
ggggtgttggagggg

SEQ ID NO: 338642 - DNA, 15 bp, Homo sapiens
gggggtgttggaggg

SEQ ID NO: 338643 - DNA, 15 bp, Homo sapiens
agggggtgttggagg

SEQ ID NO: 338644 - DNA, 15 bp, Homo sapiens
gagggggtgttggag

SEQ ID NO: 338645 - DNA, 15 bp, Homo sapiens
ggagggggtgttgga

SEQ ID NO: 338646 - DNA, 15 bp, Homo sapiens
tggagggggtgttgg

SEQ ID NO: 338647 - DNA, 15 bp, Homo sapiens
gtggagggggtgttg

SEQ ID NO: 338648 - DNA, 15 bp, Homo sapiens
ggtggagggggtgtt

SEQ ID NO: 338649 - DNA, 15 bp, Homo sapiens
tggtggagggggtgt

SEQ ID NO: 338650 - DNA, 15 bp, Homo sapiens
atggtggagggggtg

SEQ ID NO: 338651 - DNA, 15 bp, Homo sapiens
catggtggagggggt

SEQ ID NO: 338652 - DNA, 15 bp, Homo sapiens
acatggtggaggggg

SEQ ID NO: 338653 - DNA, 15 bp, Homo sapiens
tacatggtggagggg

SEQ ID NO: 338654 - DNA, 15 bp, Homo sapiens
atacatggtggaggg

SEQ ID NO: 338655 - DNA, 15 bp, Homo sapiens
gatacatggtggagg

SEQ ID NO: 338656 - DNA, 15 bp, Homo sapiens
ggatacatggtggag

SEQ ID NO: 338657 - DNA, 15 bp, Homo sapiens
tggatacatggtgga

SEQ ID NO: 338658 - DNA, 15 bp, Homo sapiens
ctggatacatggtgg

SEQ ID NO: 338659 - DNA, 15 bp, Homo sapiens
cctggatacatggtg

SEQ ID NO: 338660 - DNA, 15 bp, Homo sapiens
tcctggatacatggt

SEQ ID NO: 338661 - DNA, 15 bp, Homo sapiens
ctcctggatacatgg

SEQ ID NO: 338662 - DNA, 15 bp, Homo sapiens
cctcctggatacatg

SEQ ID NO: 338663 - DNA, 15 bp, Homo sapiens
tcctcctggatacat

SEQ ID NO: 338664 - DNA, 15 bp, Homo sapiens
gtcctcctggataca

SEQ ID NO: 338665 - DNA, 15 bp, Homo sapiens
ggtcctcctggatac

SEQ ID NO: 338666 - DNA, 15 bp, Homo sapiens
aggtcctcctggata

SEQ ID NO: 338667 - DNA, 15 bp, Homo sapiens
gaggtcctcctggat

SEQ ID NO: 338668 - DNA, 15 bp, Homo sapiens
agaggtcctcctgga

SEQ ID NO: 338669 - DNA, 15 bp, Homo sapiens
cagaggtcctcctgg

SEQ ID NO: 338670 - DNA, 15 bp, Homo sapiens
acagaggtcctcctg

SEQ ID NO: 338671 - DNA, 15 bp, Homo sapiens
cacagaggtcctcct

SEQ ID NO: 338672 - DNA, 15 bp, Homo sapiens
ccacagaggtcctcc

SEQ ID NO: 338673 - DNA, 15 bp, Homo sapiens
cccacagaggtcctc

SEQ ID NO: 338674 - DNA, 15 bp, Homo sapiens
acccacagaggtcct

SEQ ID NO: 338675 - DNA, 15 bp, Homo sapiens
gacccacagaggtcc

SEQ ID NO: 338676 - DNA, 15 bp, Homo sapiens
ggacccacagaggtc

SEQ ID NO: 338677 - DNA, 15 bp, Homo sapiens
tggacccacagaggt

SEQ ID NO: 338678 - DNA, 15 bp, Homo sapiens
atggacccacagagg

SEQ ID NO: 338679 - DNA, 15 bp, Homo sapiens
aatggacccacagag

SEQ ID NO: 338680 - DNA, 15 bp, Homo sapiens
aaatggacccacaga

SEQ ID NO: 338681 - DNA, 15 bp, Homo sapiens
gaaatggacccacag

SEQ ID NO: 338682 - DNA, 15 bp, Homo sapiens
agaaatggacccaca

SEQ ID NO: 338683 - DNA, 15 bp, Homo sapiens
cagaaatggacccac

SEQ ID NO: 338684 - DNA, 15 bp, Homo sapiens
gcagaaatggaccca

SEQ ID NO: 338685 - DNA, 15 bp, Homo sapiens
agcagaaatggaccc

SEQ ID NO: 338686 - DNA, 15 bp, Homo sapiens
aagcagaaatggacc

SEQ ID NO: 338687 - DNA, 15 bp, Homo sapiens
caagcagaaatggac

SEQ ID NO: 338688 - DNA, 15 bp, Homo sapiens
gcaagcagaaatgga

SEQ ID NO: 338689 - DNA, 15 bp, Homo sapiens
ggcaagcagaaatgg

SEQ ID NO: 338690 - DNA, 15 bp, Homo sapiens
gggcaagcagaaatg

SEQ ID NO: 338691 - DNA, 15 bp, Homo sapiens
agggcaagcagaaat

SEQ ID NO: 338692 - DNA, 15 bp, Homo sapiens
cagggcaagcagaaa

SEQ ID NO: 338693 - DNA, 15 bp, Homo sapiens
tcagggcaagcagaa

SEQ ID NO: 338694 - DNA, 15 bp, Homo sapiens
ttcagggcaagcaga

SEQ ID NO: 338695 - DNA, 15 bp, Homo sapiens
cttcagggcaagcag

SEQ ID NO: 338696 - DNA, 15 bp, Homo sapiens
ccttcagggcaagca

SEQ ID NO: 338697 - DNA, 15 bp, Homo sapiens
tccttcagggcaagc

SEQ ID NO: 338698 - DNA, 15 bp, Homo sapiens
ctccttcagggcaag

SEQ ID NO: 338699 - DNA, 15 bp, Homo sapiens
gctccttcagggcaa

SEQ ID NO: 338700 - DNA, 15 bp, Homo sapiens
tgctccttcagggca

SEQ ID NO: 338701 - DNA, 15 bp, Homo sapiens
ctgctccttcagggc

SEQ ID NO: 338702 - DNA, 15 bp, Homo sapiens
tctgctccttcaggg

SEQ ID NO: 338703 - DNA, 15 bp, Homo sapiens
ttctgctccttcagg

SEQ ID NO: 338704 - DNA, 15 bp, Homo sapiens
cttctgctccttcag

SEQ ID NO: 338705 - DNA, 15 bp, Homo sapiens
gcttctgctccttca

SEQ ID NO: 338706 - DNA, 15 bp, Homo sapiens
agcttctgctccttc

SEQ ID NO: 338707 - DNA, 15 bp, Homo sapiens
cagcttctgctcctt

SEQ ID NO: 338708 - DNA, 15 bp, Homo sapiens
tcagcttctgctcct

SEQ ID NO: 338709 - DNA, 15 bp, Homo sapiens
ctcagcttctgctcc

SEQ ID NO: 338710 - DNA, 15 bp, Homo sapiens
tctcagcttctgctc

SEQ ID NO: 338711 - DNA, 15 bp, Homo sapiens
atctcagcttctgct

SEQ ID NO: 338712 - DNA, 15 bp, Homo sapiens
tatctcagcttctgc

SEQ ID NO: 338713 - DNA, 15 bp, Homo sapiens
atatctcagcttctg

SEQ ID NO: 338714 - DNA, 15 bp, Homo sapiens
tatatctcagcttct

SEQ ID NO: 338715 - DNA, 15 bp, Homo sapiens
gtatatctcagcttc

SEQ ID NO: 338716 - DNA, 15 bp, Homo sapiens
tgtatatctcagctt

SEQ ID NO: 338717 - DNA, 15 bp, Homo sapiens
ttgtatatctcagct

SEQ ID NO: 338718 - DNA, 15 bp, Homo sapiens
cttgtatatctcagc

SEQ ID NO: 338719 - DNA, 15 bp, Homo sapiens
gcttgtatatctcag

SEQ ID NO: 338720 - DNA, 15 bp, Homo sapiens
ggcttgtatatctca

SEQ ID NO: 338721 - DNA, 15 bp, Homo sapiens
aggcttgtatatctc

SEQ ID NO: 338722 - DNA, 15 bp, Homo sapiens
gaggcttgtatatct

SEQ ID NO: 338723 - DNA, 15 bp, Homo sapiens
agaggcttgtatatc

SEQ ID NO: 338724 - DNA, 15 bp, Homo sapiens
aagaggcttgtatat

SEQ ID NO: 338725 - DNA, 15 bp, Homo sapiens
aaagaggcttgtata

SEQ ID NO: 338726 - DNA, 15 bp, Homo sapiens
gaaagaggcttgtat

SEQ ID NO: 338727 - DNA, 15 bp, Homo sapiens
ggaaagaggcttgta

SEQ ID NO: 338728 - DNA, 15 bp, Homo sapiens
aggaaagaggcttgt

SEQ ID NO: 338729 - DNA, 15 bp, Homo sapiens
aaggaaagaggcttg

SEQ ID NO: 338730 - DNA, 15 bp, Homo sapiens
aaaggaaagaggctt

SEQ ID NO: 338731 - DNA, 15 bp, Homo sapiens
gaaaggaaagaggct

SEQ ID NO: 338732 - DNA, 15 bp, Homo sapiens
ggaaaggaaagaggc

SEQ ID NO: 338733 - DNA, 15 bp, Homo sapiens
tggaaaggaaagagg

SEQ ID NO: 338734 - DNA, 15 bp, Homo sapiens
gtggaaaggaaagag

SEQ ID NO: 338735 - DNA, 15 bp, Homo sapiens
ggtggaaaggaaaga

SEQ ID NO: 338736 - DNA, 15 bp, Homo sapiens
tggtggaaaggaaag

SEQ ID NO: 338737 - DNA, 15 bp, Homo sapiens
gtggtggaaaggaaa

SEQ ID NO: 338738 - DNA, 15 bp, Homo sapiens
ggtggtggaaaggaa

SEQ ID NO: 338739 - DNA, 15 bp, Homo sapiens
tggtggtggaaagga

SEQ ID NO: 338740 - DNA, 15 bp, Homo sapiens
gtggtggtggaaagg

SEQ ID NO: 338741 - DNA, 15 bp, Homo sapiens
ggtggtggtggaaag

SEQ ID NO: 338742 - DNA, 15 bp, Homo sapiens
aggtggtggtggaaa

SEQ ID NO: 338743 - DNA, 15 bp, Homo sapiens
aaggtggtggtggaa

SEQ ID NO: 338744 - DNA, 15 bp, Homo sapiens
gaaggtggtggtgga

SEQ ID NO: 338745 - DNA, 15 bp, Homo sapiens
tgaaggtggtggtgg

SEQ ID NO: 338746 - DNA, 15 bp, Homo sapiens
atgaaggtggtggtg

SEQ ID NO: 338747 - DNA, 15 bp, Homo sapiens
gatgaaggtggtggt

SEQ ID NO: 338748 - DNA, 15 bp, Homo sapiens
agatgaaggtggtgg

SEQ ID NO: 338749 - DNA, 15 bp, Homo sapiens
aagatgaaggtggtg

SEQ ID NO: 338750 - DNA, 15 bp, Homo sapiens
taagatgaaggtggt

SEQ ID NO: 338751 - DNA, 15 bp, Homo sapiens
ctaagatgaaggtgg

SEQ ID NO: 338752 - DNA, 15 bp, Homo sapiens
actaagatgaaggtg

SEQ ID NO: 338753 - DNA, 15 bp, Homo sapiens
cactaagatgaaggt

SEQ ID NO: 338754 - DNA, 15 bp, Homo sapiens
ccactaagatgaagg

SEQ ID NO: 338755 - DNA, 15 bp, Homo sapiens
cccactaagatgaag

SEQ ID NO: 338756 - DNA, 15 bp, Homo sapiens
tcccactaagatgaa

SEQ ID NO: 338757 - DNA, 15 bp, Homo sapiens
ttcccactaagatga

SEQ ID NO: 338758 - DNA, 15 bp, Homo sapiens
gttcccactaagatg

SEQ ID NO: 338759 - DNA, 15 bp, Homo sapiens
agttcccactaagat

SEQ ID NO: 338760 - DNA, 15 bp, Homo sapiens
cagttcccactaaga

SEQ ID NO: 338761 - DNA, 15 bp, Homo sapiens
tcagttcccactaag

SEQ ID NO: 338762 - DNA, 15 bp, Homo sapiens
ttcagttcccactaa

SEQ ID NO: 338763 - DNA, 15 bp, Homo sapiens
cttcagttcccacta

SEQ ID NO: 338764 - DNA, 15 bp, Homo sapiens
acttcagttcccact

SEQ ID NO: 338765 - DNA, 15 bp, Homo sapiens
cacttcagttcccac

SEQ ID NO: 338766 - DNA, 15 bp, Homo sapiens
ccacttcagttccca

SEQ ID NO: 338767 - DNA, 15 bp, Homo sapiens
cccacttcagttccc

SEQ ID NO: 338768 - DNA, 15 bp, Homo sapiens
tcccacttcagttcc

SEQ ID NO: 338769 - DNA, 15 bp, Homo sapiens
ctcccacttcagttc

SEQ ID NO: 338770 - DNA, 15 bp, Homo sapiens
tctcccacttcagtt

SEQ ID NO: 338771 - DNA, 15 bp, Homo sapiens
gtctcccacttcagt

SEQ ID NO: 338772 - DNA, 15 bp, Homo sapiens
ggtctcccacttcag

SEQ ID NO: 338773 - DNA, 15 bp, Homo sapiens
gggtctcccacttca

SEQ ID NO: 338774 - DNA, 15 bp, Homo sapiens
tgggtctcccacttc

SEQ ID NO: 338775 - DNA, 15 bp, Homo sapiens
ctgggtctcccactt

SEQ ID NO: 338776 - DNA, 15 bp, Homo sapiens
tctgggtctcccact

SEQ ID NO: 338777 - DNA, 15 bp, Homo sapiens
atctgggtctcccac

SEQ ID NO: 338778 - DNA, 15 bp, Homo sapiens
aatctgggtctccca

SEQ ID NO: 338779 - DNA, 15 bp, Homo sapiens
caatctgggtctccc

SEQ ID NO: 338780 - DNA, 15 bp, Homo sapiens
gcaatctgggtctcc

SEQ ID NO: 338781 - DNA, 15 bp, Homo sapiens
tgcaatctgggtctc

SEQ ID NO: 338782 - DNA, 15 bp, Homo sapiens
atgcaatctgggtct

SEQ ID NO: 338783 - DNA, 15 bp, Homo sapiens
gatgcaatctgggtc

SEQ ID NO: 338784 - DNA, 15 bp, Homo sapiens
ggatgcaatctgggt

SEQ ID NO: 338785 - DNA, 15 bp, Homo sapiens
aggatgcaatctggg

SEQ ID NO: 338786 - DNA, 15 bp, Homo sapiens
caggatgcaatctgg

SEQ ID NO: 338787 - DNA, 15 bp, Homo sapiens
ccaggatgcaatctg

SEQ ID NO: 338788 - DNA, 15 bp, Homo sapiens
cccaggatgcaatct

SEQ ID NO: 338789 - DNA, 15 bp, Homo sapiens
gcccaggatgcaatc

SEQ ID NO: 338790 - DNA, 15 bp, Homo sapiens
tgcccaggatgcaat

SEQ ID NO: 338791 - DNA, 15 bp, Homo sapiens
ttgcccaggatgcaa

SEQ ID NO: 338792 - DNA, 15 bp, Homo sapiens
cttgcccaggatgca

SEQ ID NO: 338793 - DNA, 15 bp, Homo sapiens
acttgcccaggatgc

SEQ ID NO: 338794 - DNA, 15 bp, Homo sapiens
gacttgcccaggatg

SEQ ID NO: 338795 - DNA, 15 bp, Homo sapiens
tgacttgcccaggat

SEQ ID NO: 338796 - DNA, 15 bp, Homo sapiens
gtgacttgcccagga

SEQ ID NO: 338797 - DNA, 15 bp, Homo sapiens
agtgacttgcccagg

SEQ ID NO: 338798 - DNA, 15 bp, Homo sapiens
aagtgacttgcccag

SEQ ID NO: 338799 - DNA, 15 bp, Homo sapiens
aaagtgacttgccca

SEQ ID NO: 338800 - DNA, 15 bp, Homo sapiens
aaaagtgacttgccc

SEQ ID NO: 338801 - DNA, 15 bp, Homo sapiens
taaaagtgacttgcc

SEQ ID NO: 338802 - DNA, 15 bp, Homo sapiens
gtaaaagtgacttgc

SEQ ID NO: 338803 - DNA, 15 bp, Homo sapiens
agtaaaagtgacttg

SEQ ID NO: 338804 - DNA, 15 bp, Homo sapiens
aagtaaaagtgactt

SEQ ID NO: 338805 - DNA, 15 bp, Homo sapiens
caagtaaaagtgact

SEQ ID NO: 338806 - DNA, 15 bp, Homo sapiens
gcaagtaaaagtgac

SEQ ID NO: 338807 - DNA, 15 bp, Homo sapiens
agcaagtaaaagtga

SEQ ID NO: 338808 - DNA, 15 bp, Homo sapiens
cagcaagtaaaagtg

SEQ ID NO: 338809 - DNA, 15 bp, Homo sapiens
acagcaagtaaaagt

SEQ ID NO: 338810 - DNA, 15 bp, Homo sapiens
cacagcaagtaaaag

SEQ ID NO: 338811 - DNA, 15 bp, Homo sapiens
ccacagcaagtaaaa

SEQ ID NO: 338812 - DNA, 15 bp, Homo sapiens
cccacagcaagtaaa

SEQ ID NO: 338813 - DNA, 15 bp, Homo sapiens
tcccacagcaagtaa

SEQ ID NO: 338814 - DNA, 15 bp, Homo sapiens
atcccacagcaagta

SEQ ID NO: 338815 - DNA, 15 bp, Homo sapiens
catcccacagcaagt

SEQ ID NO: 338816 - DNA, 15 bp, Homo sapiens
gcatcccacagcaag

SEQ ID NO: 338817 - DNA, 15 bp, Homo sapiens
ggcatcccacagcaa

SEQ ID NO: 338818 - DNA, 15 bp, Homo sapiens
tggcatcccacagca

SEQ ID NO: 338819 - DNA, 15 bp, Homo sapiens
ctggcatcccacagc

SEQ ID NO: 338820 - DNA, 15 bp, Homo sapiens
cctggcatcccacag

SEQ ID NO: 338821 - DNA, 15 bp, Homo sapiens
gcctggcatcccaca

SEQ ID NO: 338822 - DNA, 15 bp, Homo sapiens
tgcctggcatcccac

SEQ ID NO: 338823 - DNA, 15 bp, Homo sapiens
atgcctggcatccca

SEQ ID NO: 338824 - DNA, 15 bp, Homo sapiens
tatgcctggcatccc

SEQ ID NO: 338825 - DNA, 15 bp, Homo sapiens
atatgcctggcatcc

SEQ ID NO: 338826 - DNA, 15 bp, Homo sapiens
tatatgcctggcatc

SEQ ID NO: 338827 - DNA, 15 bp, Homo sapiens
atatatgcctggcat

SEQ ID NO: 338828 - DNA, 15 bp, Homo sapiens
catatatgcctggca

SEQ ID NO: 338829 - DNA, 15 bp, Homo sapiens
tcatatatgcctggc

SEQ ID NO: 338830 - DNA, 15 bp, Homo sapiens
gtcatatatgcctgg

SEQ ID NO: 338831 - DNA, 15 bp, Homo sapiens
agtcatatatgcctg

SEQ ID NO: 338832 - DNA, 15 bp, Homo sapiens
aagtcatatatgcct

SEQ ID NO: 338833 - DNA, 15 bp, Homo sapiens
taagtcatatatgcc

SEQ ID NO: 338834 - DNA, 15 bp, Homo sapiens
ttaagtcatatatgc

SEQ ID NO: 338835 - DNA, 15 bp, Homo sapiens
cttaagtcatatatg

SEQ ID NO: 338836 - DNA, 15 bp, Homo sapiens
ccttaagtcatatat

SEQ ID NO: 338837 - DNA, 15 bp, Homo sapiens
tccttaagtcatata

SEQ ID NO: 338838 - DNA, 15 bp, Homo sapiens
ttccttaagtcatat

SEQ ID NO: 338839 - DNA, 15 bp, Homo sapiens
tttccttaagtcata

SEQ ID NO: 338840 - DNA, 15 bp, Homo sapiens
ctttccttaagtcat

SEQ ID NO: 338841 - DNA, 15 bp, Homo sapiens
tctttccttaagtca

SEQ ID NO: 338842 - DNA, 15 bp, Homo sapiens
ctctttccttaagtc

SEQ ID NO: 338843 - DNA, 15 bp, Homo sapiens
actctttccttaagt

SEQ ID NO: 338844 - DNA, 15 bp, Homo sapiens
aactctttccttaag

SEQ ID NO: 338845 - DNA, 15 bp, Homo sapiens
aaactctttccttaa

SEQ ID NO: 338846 - DNA, 15 bp, Homo sapiens
gaaactctttcctta

SEQ ID NO: 338847 - DNA, 15 bp, Homo sapiens
tgaaactctttcctt

SEQ ID NO: 338848 - DNA, 15 bp, Homo sapiens
ctgaaactctttcct

SEQ ID NO: 338849 - DNA, 15 bp, Homo sapiens
tctgaaactctttcc

SEQ ID NO: 338850 - DNA, 15 bp, Homo sapiens
ctctgaaactctttc

SEQ ID NO: 338851 - DNA, 15 bp, Homo sapiens
tctctgaaactcttt

SEQ ID NO: 338852 - DNA, 15 bp, Homo sapiens
ctctctgaaactctt

SEQ ID NO: 338853 - DNA, 15 bp, Homo sapiens
cctctctgaaactct

SEQ ID NO: 338854 - DNA, 15 bp, Homo sapiens
acctctctgaaactc

SEQ ID NO: 338855 - DNA, 15 bp, Homo sapiens
aacctctctgaaact

SEQ ID NO: 338856 - DNA, 15 bp, Homo sapiens
taacctctctgaaac

SEQ ID NO: 338857 - DNA, 15 bp, Homo sapiens
gtaacctctctgaaa

SEQ ID NO: 338858 - DNA, 15 bp, Homo sapiens
ggtaacctctctgaa

SEQ ID NO: 338859 - DNA, 15 bp, Homo sapiens
aggtaacctctctga

SEQ ID NO: 338860 - DNA, 15 bp, Homo sapiens
caggtaacctctctg

SEQ ID NO: 338861 - DNA, 15 bp, Homo sapiens
tcaggtaacctctct

SEQ ID NO: 338862 - DNA, 15 bp, Homo sapiens
ttcaggtaacctctc

SEQ ID NO: 338863 - DNA, 15 bp, Homo sapiens
tttcaggtaacctct

SEQ ID NO: 338864 - DNA, 15 bp, Homo sapiens
ttttcaggtaacctc

SEQ ID NO: 338865 - DNA, 15 bp, Homo sapiens
cttttcaggtaacct

SEQ ID NO: 338866 - DNA, 15 bp, Homo sapiens
tcttttcaggtaacc

SEQ ID NO: 338867 - DNA, 15 bp, Homo sapiens
gtcttttcaggtaac

SEQ ID NO: 338868 - DNA, 15 bp, Homo sapiens
agtcttttcaggtaa

SEQ ID NO: 338869 - DNA, 15 bp, Homo sapiens
gagtcttttcaggta

SEQ ID NO: 338870 - DNA, 15 bp, Homo sapiens
tgagtcttttcaggt

SEQ ID NO: 338871 - DNA, 15 bp, Homo sapiens
ctgagtcttttcagg

SEQ ID NO: 338872 - DNA, 15 bp, Homo sapiens
cctgagtcttttcag

SEQ ID NO: 338873 - DNA, 15 bp, Homo sapiens
gcctgagtcttttca

SEQ ID NO: 338874 - DNA, 15 bp, Homo sapiens
tgcctgagtcttttc

SEQ ID NO: 338875 - DNA, 15 bp, Homo sapiens
ctgcctgagtctttt

SEQ ID NO: 338876 - DNA, 15 bp, Homo sapiens
actgcctgagtcttt

SEQ ID NO: 338877 - DNA, 15 bp, Homo sapiens
cactgcctgagtctt

SEQ ID NO: 338878 - DNA, 15 bp, Homo sapiens
tcactgcctgagtct

SEQ ID NO: 338879 - DNA, 15 bp, Homo sapiens
ctcactgcctgagtc

SEQ ID NO: 338880 - DNA, 15 bp, Homo sapiens
tctcactgcctgagt

SEQ ID NO: 338881 - DNA, 15 bp, Homo sapiens
ttctcactgcctgag

SEQ ID NO: 338882 - DNA, 15 bp, Homo sapiens
gttctcactgcctga

SEQ ID NO: 338883 - DNA, 15 bp, Homo sapiens
tgttctcactgcctg

SEQ ID NO: 338884 - DNA, 15 bp, Homo sapiens
gtgttctcactgcct

SEQ ID NO: 338885 - DNA, 15 bp, Homo sapiens
tgtgttctcactgcc

SEQ ID NO: 338886 - DNA, 15 bp, Homo sapiens
ctgtgttctcactgc

SEQ ID NO: 338887 - DNA, 15 bp, Homo sapiens
cctgtgttctcactg

SEQ ID NO: 338888 - DNA, 15 bp, Homo sapiens
ccctgtgttctcact

SEQ ID NO: 338889 - DNA, 15 bp, Homo sapiens
accctgtgttctcac

SEQ ID NO: 338890 - DNA, 15 bp, Homo sapiens
aaccctgtgttctca

SEQ ID NO: 338891 - DNA, 15 bp, Homo sapiens
caaccctgtgttctc

SEQ ID NO: 338892 - DNA, 15 bp, Homo sapiens
acaaccctgtgttct

SEQ ID NO: 338893 - DNA, 15 bp, Homo sapiens
aacaaccctgtgttc

SEQ ID NO: 338894 - DNA, 15 bp, Homo sapiens
caacaaccctgtgtt

SEQ ID NO: 338895 - DNA, 15 bp, Homo sapiens
tcaacaaccctgtgt

SEQ ID NO: 338896 - DNA, 15 bp, Homo sapiens
ttcaacaaccctgtg

SEQ ID NO: 338897 - DNA, 15 bp, Homo sapiens
cttcaacaaccctgt

SEQ ID NO: 338898 - DNA, 15 bp, Homo sapiens
ccttcaacaaccctg

SEQ ID NO: 338899 - DNA, 15 bp, Homo sapiens
tccttcaacaaccct

SEQ ID NO: 338900 - DNA, 15 bp, Homo sapiens
atccttcaacaaccc

SEQ ID NO: 338901 - DNA, 15 bp, Homo sapiens
aatccttcaacaacc

SEQ ID NO: 338902 - DNA, 15 bp, Homo sapiens
taatccttcaacaac

SEQ ID NO: 338903 - DNA, 15 bp, Homo sapiens
ctaatccttcaacaa

SEQ ID NO: 338904 - DNA, 15 bp, Homo sapiens
cctaatccttcaaca

SEQ ID NO: 338905 - DNA, 15 bp, Homo sapiens
acctaatccttcaac

SEQ ID NO: 338906 - DNA, 15 bp, Homo sapiens
cacctaatccttcaa

SEQ ID NO: 338907 - DNA, 15 bp, Homo sapiens
ccacctaatccttca

SEQ ID NO: 338908 - DNA, 15 bp, Homo sapiens
cccacctaatccttc

SEQ ID NO: 338909 - DNA, 15 bp, Homo sapiens
tcccacctaatcctt

SEQ ID NO: 338910 - DNA, 15 bp, Homo sapiens
atcccacctaatcct

SEQ ID NO: 338911 - DNA, 15 bp, Homo sapiens
aatcccacctaatcc

SEQ ID NO: 338912 - DNA, 15 bp, Homo sapiens
caatcccacctaatc

SEQ ID NO: 338913 - DNA, 15 bp, Homo sapiens
gcaatcccacctaat

SEQ ID NO: 338914 - DNA, 15 bp, Homo sapiens
tgcaatcccacctaa

SEQ ID NO: 338915 - DNA, 15 bp, Homo sapiens
atgcaatcccaccta

SEQ ID NO: 338916 - DNA, 15 bp, Homo sapiens
tatgcaatcccacct

SEQ ID NO: 338917 - DNA, 15 bp, Homo sapiens
ctatgcaatcccacc

SEQ ID NO: 338918 - DNA, 15 bp, Homo sapiens
cctatgcaatcccac

SEQ ID NO: 338919 - DNA, 15 bp, Homo sapiens
gcctatgcaatccca

SEQ ID NO: 338920 - DNA, 15 bp, Homo sapiens
ggcctatgcaatccc

SEQ ID NO: 338921 - DNA, 15 bp, Homo sapiens
tggcctatgcaatcc

SEQ ID NO: 338922 - DNA, 15 bp, Homo sapiens
gtggcctatgcaatc

SEQ ID NO: 338923 - DNA, 15 bp, Homo sapiens
tgtggcctatgcaat

SEQ ID NO: 338924 - DNA, 15 bp, Homo sapiens
ctgtggcctatgcaa

SEQ ID NO: 338925 - DNA, 15 bp, Homo sapiens
tctgtggcctatgca

SEQ ID NO: 338926 - DNA, 15 bp, Homo sapiens
ttctgtggcctatgc

SEQ ID NO: 338927 - DNA, 15 bp, Homo sapiens
attctgtggcctatg

SEQ ID NO: 338928 - DNA, 15 bp, Homo sapiens
tattctgtggcctat

SEQ ID NO: 338929 - DNA, 15 bp, Homo sapiens
gtattctgtggccta

SEQ ID NO: 338930 - DNA, 15 bp, Homo sapiens
agtattctgtggcct

SEQ ID NO: 338931 - DNA, 15 bp, Homo sapiens
aagtattctgtggcc

SEQ ID NO: 338932 - DNA, 15 bp, Homo sapiens
aaagtattctgtggc

SEQ ID NO: 338933 - DNA, 15 bp, Homo sapiens
taaagtattctgtgg

SEQ ID NO: 338934 - DNA, 15 bp, Homo sapiens
ataaagtattctgtg

SEQ ID NO: 338935 - DNA, 15 bp, Homo sapiens
tataaagtattctgt

SEQ ID NO: 338936 - DNA, 15 bp, Homo sapiens
atataaagtattctg

SEQ ID NO: 338937 - DNA, 15 bp, Homo sapiens
aatataaagtattct

SEQ ID NO: 338938 - DNA, 15 bp, Homo sapiens
caatataaagtattc

SEQ ID NO: 338939 - DNA, 15 bp, Homo sapiens
ccaatataaagtatt

SEQ ID NO: 338940 - DNA, 15 bp, Homo sapiens
accaatataaagtat

SEQ ID NO: 338941 - DNA, 15 bp, Homo sapiens
aaccaatataaagta

SEQ ID NO: 338942 - DNA, 15 bp, Homo sapiens
taaccaatataaagt

SEQ ID NO: 338943 - DNA, 15 bp, Homo sapiens
gtaaccaatataaag

SEQ ID NO: 338944 - DNA, 15 bp, Homo sapiens
tgtaaccaatataaa

SEQ ID NO: 338945 - DNA, 15 bp, Homo sapiens
atgtaaccaatataa

SEQ ID NO: 338946 - DNA, 15 bp, Homo sapiens
gatgtaaccaatata

SEQ ID NO: 338947 - DNA, 15 bp, Homo sapiens
ggatgtaaccaatat

SEQ ID NO: 338948 - DNA, 15 bp, Homo sapiens
aggatgtaaccaata

SEQ ID NO: 338949 - DNA, 15 bp, Homo sapiens
taggatgtaaccaat

SEQ ID NO: 338950 - DNA, 15 bp, Homo sapiens
ttaggatgtaaccaa

SEQ ID NO: 338951 - DNA, 15 bp, Homo sapiens
attaggatgtaacca

SEQ ID NO: 338952 - DNA, 15 bp, Homo sapiens
aattaggatgtaacc

SEQ ID NO: 338953 - DNA, 15 bp, Homo sapiens
aaattaggatgtaac

SEQ ID NO: 338954 - DNA, 15 bp, Homo sapiens
taaattaggatgtaa

SEQ ID NO: 338955 - DNA, 15 bp, Homo sapiens
gtaaattaggatgta

SEQ ID NO: 338956 - DNA, 15 bp, Homo sapiens
tgtaaattaggatgt

SEQ ID NO: 338957 - DNA, 15 bp, Homo sapiens
ctgtaaattaggatg

SEQ ID NO: 338958 - DNA, 15 bp, Homo sapiens
tctgtaaattaggat

SEQ ID NO: 338959 - DNA, 15 bp, Homo sapiens
atctgtaaattagga

SEQ ID NO: 338960 - DNA, 15 bp, Homo sapiens
tatctgtaaattagg

SEQ ID NO: 338961 - DNA, 15 bp, Homo sapiens
gtatctgtaaattag

SEQ ID NO: 338962 - DNA, 15 bp, Homo sapiens
ggtatctgtaaatta

SEQ ID NO: 338963 - DNA, 15 bp, Homo sapiens
tggtatctgtaaatt

SEQ ID NO: 338964 - DNA, 15 bp, Homo sapiens
atggtatctgtaaat

SEQ ID NO: 338965 - DNA, 15 bp, Homo sapiens
tatggtatctgtaaa

SEQ ID NO: 338966 - DNA, 15 bp, Homo sapiens
atatggtatctgtaa

SEQ ID NO: 338967 - DNA, 15 bp, Homo sapiens
catatggtatctgta

SEQ ID NO: 338968 - DNA, 15 bp, Homo sapiens
ccatatggtatctgt

SEQ ID NO: 338969 - DNA, 15 bp, Homo sapiens
gccatatggtatctg

SEQ ID NO: 338970 - DNA, 15 bp, Homo sapiens
tgccatatggtatct

SEQ ID NO: 338971 - DNA, 15 bp, Homo sapiens
gtgccatatggtatc

SEQ ID NO: 338972 - DNA, 15 bp, Homo sapiens
agtgccatatggtat

SEQ ID NO: 338973 - DNA, 15 bp, Homo sapiens
aagtgccatatggta

SEQ ID NO: 338974 - DNA, 15 bp, Homo sapiens
taagtgccatatggt

SEQ ID NO: 338975 - DNA, 15 bp, Homo sapiens
gtaagtgccatatgg

SEQ ID NO: 338976 - DNA, 15 bp, Homo sapiens
ggtaagtgccatatg

SEQ ID NO: 338977 - DNA, 15 bp, Homo sapiens
tggtaagtgccatat

SEQ ID NO: 338978 - DNA, 15 bp, Homo sapiens
atggtaagtgccata

SEQ ID NO: 338979 - DNA, 15 bp, Homo sapiens
aatggtaagtgccat

SEQ ID NO: 338980 - DNA, 15 bp, Homo sapiens
aaatggtaagtgcca

SEQ ID NO: 338981 - DNA, 15 bp, Homo sapiens
gaaatggtaagtgcc

SEQ ID NO: 338982 - DNA, 15 bp, Homo sapiens
tgaaatggtaagtgc

SEQ ID NO: 338983 - DNA, 15 bp, Homo sapiens
atgaaatggtaagtg

SEQ ID NO: 338984 - DNA, 15 bp, Homo sapiens
tatgaaatggtaagt

SEQ ID NO: 338985 - DNA, 15 bp, Homo sapiens
ctatgaaatggtaag

SEQ ID NO: 338986 - DNA, 15 bp, Homo sapiens
actatgaaatggtaa

SEQ ID NO: 338987 - DNA, 15 bp, Homo sapiens
cactatgaaatggta

SEQ ID NO: 338988 - DNA, 15 bp, Homo sapiens
gcactatgaaatggt

SEQ ID NO: 338989 - DNA, 15 bp, Homo sapiens
agcactatgaaatgg

SEQ ID NO: 338990 - DNA, 15 bp, Homo sapiens
aagcactatgaaatg

SEQ ID NO: 338991 - DNA, 15 bp, Homo sapiens
taagcactatgaaat

SEQ ID NO: 338992 - DNA, 15 bp, Homo sapiens
gtaagcactatgaaa

SEQ ID NO: 338993 - DNA, 15 bp, Homo sapiens
ggtaagcactatgaa

SEQ ID NO: 338994 - DNA, 15 bp, Homo sapiens
tggtaagcactatga

SEQ ID NO: 338995 - DNA, 15 bp, Homo sapiens
atggtaagcactatg

SEQ ID NO: 338996 - DNA, 15 bp, Homo sapiens
catggtaagcactat

SEQ ID NO: 338997 - DNA, 15 bp, Homo sapiens
ccatggtaagcacta

SEQ ID NO: 338998 - DNA, 15 bp, Homo sapiens
tccatggtaagcact

SEQ ID NO: 338999 - DNA, 15 bp, Homo sapiens
ctccatggtaagcac

SEQ ID NO: 339000 - DNA, 15 bp, Homo sapiens
gctccatggtaagca

SEQ ID NO: 339001 - DNA, 15 bp, Homo sapiens
tgctccatggtaagc

SEQ ID NO: 339002 - DNA, 15 bp, Homo sapiens
ctgctccatggtaag

SEQ ID NO: 339003 - DNA, 15 bp, Homo sapiens
tctgctccatggtaa

SEQ ID NO: 339004 - DNA, 15 bp, Homo sapiens
atctgctccatggta

SEQ ID NO: 339005 - DNA, 15 bp, Homo sapiens
aatctgctccatggt

SEQ ID NO: 339006 - DNA, 15 bp, Homo sapiens
taatctgctccatgg

SEQ ID NO: 339007 - DNA, 15 bp, Homo sapiens
gtaatctgctccatg

SEQ ID NO: 339008 - DNA, 15 bp, Homo sapiens
agtaatctgctccat

SEQ ID NO: 339009 - DNA, 15 bp, Homo sapiens
aagtaatctgctcca

SEQ ID NO: 339010 - DNA, 15 bp, Homo sapiens
caagtaatctgctcc

SEQ ID NO: 339011 - DNA, 15 bp, Homo sapiens
ccaagtaatctgctc

SEQ ID NO: 339012 - DNA, 15 bp, Homo sapiens
gccaagtaatctgct

SEQ ID NO: 339013 - DNA, 15 bp, Homo sapiens
ggccaagtaatctgc

SEQ ID NO: 339014 - DNA, 15 bp, Homo sapiens
gggccaagtaatctg

SEQ ID NO: 339015 - DNA, 15 bp, Homo sapiens
agggccaagtaatct

SEQ ID NO: 339016 - DNA, 15 bp, Homo sapiens
aagggccaagtaatc

SEQ ID NO: 339017 - DNA, 15 bp, Homo sapiens
gaagggccaagtaat

SEQ ID NO: 339018 - DNA, 15 bp, Homo sapiens
ggaagggccaagtaa

SEQ ID NO: 339019 - DNA, 15 bp, Homo sapiens
tggaagggccaagta

SEQ ID NO: 339020 - DNA, 15 bp, Homo sapiens
atggaagggccaagt

SEQ ID NO: 339021 - DNA, 15 bp, Homo sapiens
catggaagggccaag

SEQ ID NO: 339022 - DNA, 15 bp, Homo sapiens
acatggaagggccaa

SEQ ID NO: 339023 - DNA, 15 bp, Homo sapiens
tacatggaagggcca

SEQ ID NO: 339024 - DNA, 15 bp, Homo sapiens
atacatggaagggcc

SEQ ID NO: 339025 - DNA, 15 bp, Homo sapiens
gatacatggaagggc

SEQ ID NO: 339026 - DNA, 15 bp, Homo sapiens
tgatacatggaaggg

SEQ ID NO: 339027 - DNA, 15 bp, Homo sapiens
atgatacatggaagg

SEQ ID NO: 339028 - DNA, 15 bp, Homo sapiens
gatgatacatggaag

SEQ ID NO: 339029 - DNA, 15 bp, Homo sapiens
agatgatacatggaa

SEQ ID NO: 339030 - DNA, 15 bp, Homo sapiens
gagatgatacatgga

SEQ ID NO: 339031 - DNA, 15 bp, Homo sapiens
ggagatgatacatgg

SEQ ID NO: 339032 - DNA, 15 bp, Homo sapiens
aggagatgatacatg

SEQ ID NO: 339033 - DNA, 15 bp, Homo sapiens
aaggagatgatacat

SEQ ID NO: 339034 - DNA, 15 bp, Homo sapiens
taaggagatgataca

SEQ ID NO: 339035 - DNA, 15 bp, Homo sapiens
ctaaggagatgatac

SEQ ID NO: 339036 - DNA, 15 bp, Homo sapiens
tctaaggagatgata

SEQ ID NO: 339037 - DNA, 15 bp, Homo sapiens
atctaaggagatgat

SEQ ID NO: 339038 - DNA, 15 bp, Homo sapiens
tatctaaggagatga

SEQ ID NO: 339039 - DNA, 15 bp, Homo sapiens
atatctaaggagatg

SEQ ID NO: 339040 - DNA, 15 bp, Homo sapiens
gatatctaaggagat

SEQ ID NO: 339041 - DNA, 15 bp, Homo sapiens
tgatatctaaggaga

SEQ ID NO: 339042 - DNA, 15 bp, Homo sapiens
ctgatatctaaggag

SEQ ID NO: 339043 - DNA, 15 bp, Homo sapiens
cctgatatctaagga

SEQ ID NO: 339044 - DNA, 15 bp, Homo sapiens
tcctgatatctaagg

SEQ ID NO: 339045 - DNA, 15 bp, Homo sapiens
atcctgatatctaag

SEQ ID NO: 339046 - DNA, 15 bp, Homo sapiens
tatcctgatatctaa

SEQ ID NO: 339047 - DNA, 15 bp, Homo sapiens
ttatcctgatatcta

SEQ ID NO: 339048 - DNA, 15 bp, Homo sapiens
gttatcctgatatct

SEQ ID NO: 339049 - DNA, 15 bp, Homo sapiens
agttatcctgatatc

SEQ ID NO: 339050 - DNA, 15 bp, Homo sapiens
aagttatcctgatat

SEQ ID NO: 339051 - DNA, 15 bp, Homo sapiens
gaagttatcctgata

SEQ ID NO: 339052 - DNA, 15 bp, Homo sapiens
tgaagttatcctgat

SEQ ID NO: 339053 - DNA, 15 bp, Homo sapiens
atgaagttatcctga

SEQ ID NO: 339054 - DNA, 15 bp, Homo sapiens
catgaagttatcctg

SEQ ID NO: 339055 - DNA, 15 bp, Homo sapiens
tcatgaagttatcct

SEQ ID NO: 339056 - DNA, 15 bp, Homo sapiens
ttcatgaagttatcc

SEQ ID NO: 339057 - DNA, 15 bp, Homo sapiens
attcatgaagttatc

SEQ ID NO: 339058 - DNA, 15 bp, Homo sapiens
gattcatgaagttat

SEQ ID NO: 339059 - DNA, 15 bp, Homo sapiens
tgattcatgaagtta

SEQ ID NO: 339060 - DNA, 15 bp, Homo sapiens
ctgattcatgaagtt

SEQ ID NO: 339061 - DNA, 15 bp, Homo sapiens
cctgattcatgaagt

SEQ ID NO: 339062 - DNA, 15 bp, Homo sapiens
gcctgattcatgaag

SEQ ID NO: 339063 - DNA, 15 bp, Homo sapiens
tgcctgattcatgaa

SEQ ID NO: 339064 - DNA, 15 bp, Homo sapiens
gtgcctgattcatga

SEQ ID NO: 339065 - DNA, 15 bp, Homo sapiens
ggtgcctgattcatg

SEQ ID NO: 339066 - DNA, 15 bp, Homo sapiens
tggtgcctgattcat

SEQ ID NO: 339067 - DNA, 15 bp, Homo sapiens
ctggtgcctgattca

SEQ ID NO: 339068 - DNA, 15 bp, Homo sapiens
gctggtgcctgattc

SEQ ID NO: 339069 - DNA, 15 bp, Homo sapiens
agctggtgcctgatt

SEQ ID NO: 339070 - DNA, 15 bp, Homo sapiens
gagctggtgcctgat

SEQ ID NO: 339071 - DNA, 15 bp, Homo sapiens
agagctggtgcctga

SEQ ID NO: 339072 - DNA, 15 bp, Homo sapiens
cagagctggtgcctg

SEQ ID NO: 339073 - DNA, 15 bp, Homo sapiens
ccagagctggtgcct

SEQ ID NO: 339074 - DNA, 15 bp, Homo sapiens
gccagagctggtgcc

SEQ ID NO: 339075 - DNA, 15 bp, Homo sapiens
ggccagagctggtgc

SEQ ID NO: 339076 - DNA, 15 bp, Homo sapiens
gggccagagctggtg

SEQ ID NO: 339077 - DNA, 15 bp, Homo sapiens
ggggccagagctggt

SEQ ID NO: 339078 - DNA, 15 bp, Homo sapiens
aggggccagagctgg

SEQ ID NO: 339079 - DNA, 15 bp, Homo sapiens
gaggggccagagctg

SEQ ID NO: 339080 - DNA, 15 bp, Homo sapiens
tgaggggccagagct

SEQ ID NO: 339081 - DNA, 15 bp, Homo sapiens
ttgaggggccagagc

SEQ ID NO: 339082 - DNA, 15 bp, Homo sapiens
tttgaggggccagag

SEQ ID NO: 339083 - DNA, 15 bp, Homo sapiens
ctttgaggggccaga

SEQ ID NO: 339084 - DNA, 15 bp, Homo sapiens
cctttgaggggccag

SEQ ID NO: 339085 - DNA, 15 bp, Homo sapiens
gcctttgaggggcca

SEQ ID NO: 339086 - DNA, 15 bp, Homo sapiens
agcctttgaggggcc

SEQ ID NO: 339087 - DNA, 15 bp, Homo sapiens
gagcctttgaggggc

SEQ ID NO: 339088 - DNA, 15 bp, Homo sapiens
agagcctttgagggg

SEQ ID NO: 339089 - DNA, 15 bp, Homo sapiens
cagagcctttgaggg

SEQ ID NO: 339090 - DNA, 15 bp, Homo sapiens
ccagagcctttgagg

SEQ ID NO: 339091 - DNA, 15 bp, Homo sapiens
gccagagcctttgag

SEQ ID NO: 339092 - DNA, 15 bp, Homo sapiens
agccagagcctttga

SEQ ID NO: 339093 - DNA, 15 bp, Homo sapiens
aagccagagcctttg

SEQ ID NO: 339094 - DNA, 15 bp, Homo sapiens
aaagccagagccttt

SEQ ID NO: 339095 - DNA, 15 bp, Homo sapiens
aaaagccagagcctt

SEQ ID NO: 339096 - DNA, 15 bp, Homo sapiens
aaaaagccagagcct

SEQ ID NO: 339097 - DNA, 15 bp, Homo sapiens
taaaaagccagagcc

SEQ ID NO: 339098 - DNA, 15 bp, Homo sapiens
ttaaaaagccagagc

SEQ ID NO: 339099 - DNA, 15 bp, Homo sapiens
attaaaaagccagag

SEQ ID NO: 339100 - DNA, 15 bp, Homo sapiens
aattaaaaagccaga

SEQ ID NO: 339101 - DNA, 15 bp, Homo sapiens
caattaaaaagccag

SEQ ID NO: 339102 - DNA, 15 bp, Homo sapiens
acaattaaaaagcca

SEQ ID NO: 339103 - DNA, 15 bp, Homo sapiens
tacaattaaaaagcc

SEQ ID NO: 339104 - DNA, 15 bp, Homo sapiens
ttacaattaaaaagc

SEQ ID NO: 339105 - DNA, 15 bp, Homo sapiens
tttacaattaaaaag

SEQ ID NO: 339106 - DNA, 15 bp, Homo sapiens
ttttacaattaaaaa

SEQ ID NO: 339107 - DNA, 15 bp, Homo sapiens
attttacaattaaaa

SEQ ID NO: 339108 - DNA, 15 bp, Homo sapiens
cattttacaattaaa

SEQ ID NO: 339109 - DNA, 15 bp, Homo sapiens
gcattttacaattaa

SEQ ID NO: 339110 - DNA, 15 bp, Homo sapiens
tgcattttacaatta

SEQ ID NO: 339111 - DNA, 15 bp, Homo sapiens
ttgcattttacaatt

SEQ ID NO: 339112 - DNA, 15 bp, Homo sapiens
tttgcattttacaat

SEQ ID NO: 339113 - DNA, 15 bp, Homo sapiens
ttttgcattttacaa

SEQ ID NO: 339114 - DNA, 15 bp, Homo sapiens
attttgcattttaca

SEQ ID NO: 339115 - DNA, 15 bp, Homo sapiens
aattttgcattttac

SEQ ID NO: 339116 - DNA, 15 bp, Homo sapiens
caattttgcatttta

SEQ ID NO: 339117 - DNA, 15 bp, Homo sapiens
ccaattttgcatttt

SEQ ID NO: 339118 - DNA, 15 bp, Homo sapiens
accaattttgcattt

SEQ ID NO: 339119 - DNA, 15 bp, Homo sapiens
taccaattttgcatt

SEQ ID NO: 339120 - DNA, 15 bp, Homo sapiens
gtaccaattttgcat

SEQ ID NO: 339121 - DNA, 15 bp, Homo sapiens
tgtaccaattttgca

SEQ ID NO: 339122 - DNA, 15 bp, Homo sapiens
atgtaccaattttgc

SEQ ID NO: 339123 - DNA, 15 bp, Homo sapiens
aatgtaccaattttg

SEQ ID NO: 339124 - DNA, 15 bp, Homo sapiens
caatgtaccaatttt

SEQ ID NO: 339125 - DNA, 15 bp, Homo sapiens
acaatgtaccaattt

SEQ ID NO: 339126 - DNA, 15 bp, Homo sapiens
gacaatgtaccaatt

SEQ ID NO: 339127 - DNA, 15 bp, Homo sapiens
ggacaatgtaccaat

SEQ ID NO: 339128 - DNA, 15 bp, Homo sapiens
tggacaatgtaccaa

SEQ ID NO: 339129 - DNA, 15 bp, Homo sapiens
ttggacaatgtacca

SEQ ID NO: 339130 - DNA, 15 bp, Homo sapiens
cttggacaatgtacc

SEQ ID NO: 339131 - DNA, 15 bp, Homo sapiens
tcttggacaatgtac

SEQ ID NO: 339132 - DNA, 15 bp, Homo sapiens
gtcttggacaatgta

SEQ ID NO: 339133 - DNA, 15 bp, Homo sapiens
agtcttggacaatgt

SEQ ID NO: 339134 - DNA, 15 bp, Homo sapiens
tagtcttggacaatg

SEQ ID NO: 339135 - DNA, 15 bp, Homo sapiens
atagtcttggacaat

SEQ ID NO: 339136 - DNA, 15 bp, Homo sapiens
aatagtcttggacaa

SEQ ID NO: 339137 - DNA, 15 bp, Homo sapiens
aaatagtcttggaca

SEQ ID NO: 339138 - DNA, 15 bp, Homo sapiens
taaatagtcttggac

SEQ ID NO: 339139 - DNA, 15 bp, Homo sapiens
ctaaatagtcttgga

SEQ ID NO: 339140 - DNA, 15 bp, Homo sapiens
actaaatagtcttgg

SEQ ID NO: 339141 - DNA, 15 bp, Homo sapiens
aactaaatagtcttg

SEQ ID NO: 339142 - DNA, 15 bp, Homo sapiens
taactaaatagtctt

SEQ ID NO: 339143 - DNA, 15 bp, Homo sapiens
ataactaaatagtct

SEQ ID NO: 339144 - DNA, 15 bp, Homo sapiens
aataactaaatagtc

SEQ ID NO: 339145 - DNA, 15 bp, Homo sapiens
aaataactaaatagt

SEQ ID NO: 339146 - DNA, 15 bp, Homo sapiens
taaataactaaatag

SEQ ID NO: 339147 - DNA, 15 bp, Homo sapiens
ctaaataactaaata

SEQ ID NO: 339148 - DNA, 15 bp, Homo sapiens
actaaataactaaat

SEQ ID NO: 339149 - DNA, 15 bp, Homo sapiens
cactaaataactaaa

SEQ ID NO: 339150 - DNA, 15 bp, Homo sapiens
acactaaataactaa

SEQ ID NO: 339151 - DNA, 15 bp, Homo sapiens
gacactaaataacta

SEQ ID NO: 339152 - DNA, 15 bp, Homo sapiens
agacactaaataact

SEQ ID NO: 339153 - DNA, 15 bp, Homo sapiens
cagacactaaataac

SEQ ID NO: 339154 - DNA, 15 bp, Homo sapiens
tcagacactaaataa

SEQ ID NO: 339155 - DNA, 15 bp, Homo sapiens
ctcagacactaaata

SEQ ID NO: 339156 - DNA, 15 bp, Homo sapiens
gctcagacactaaat

SEQ ID NO: 339157 - DNA, 15 bp, Homo sapiens
agctcagacactaaa

SEQ ID NO: 339158 - DNA, 15 bp, Homo sapiens
cagctcagacactaa

SEQ ID NO: 339159 - DNA, 15 bp, Homo sapiens
tcagctcagacacta

SEQ ID NO: 339160 - DNA, 15 bp, Homo sapiens
ctcagctcagacact

SEQ ID NO: 339161 - DNA, 15 bp, Homo sapiens
actcagctcagacac

SEQ ID NO: 339162 - DNA, 15 bp, Homo sapiens
aactcagctcagaca

SEQ ID NO: 339163 - DNA, 15 bp, Homo sapiens
taactcagctcagac

SEQ ID NO: 339164 - DNA, 15 bp, Homo sapiens
ttaactcagctcaga

SEQ ID NO: 339165 - DNA, 15 bp, Homo sapiens
gttaactcagctcag

SEQ ID NO: 339166 - DNA, 15 bp, Homo sapiens
tgttaactcagctca

SEQ ID NO: 339167 - DNA, 15 bp, Homo sapiens
gtgttaactcagctc

SEQ ID NO: 339168 - DNA, 15 bp, Homo sapiens
tgtgttaactcagct

SEQ ID NO: 339169 - DNA, 15 bp, Homo sapiens
ctgtgttaactcagc

SEQ ID NO: 339170 - DNA, 15 bp, Homo sapiens
cctgtgttaactcag

SEQ ID NO: 339171 - DNA, 15 bp, Homo sapiens
ccctgtgttaactca

SEQ ID NO: 339172 - DNA, 15 bp, Homo sapiens
gccctgtgttaactc

SEQ ID NO: 339173 - DNA, 15 bp, Homo sapiens
agccctgtgttaact

SEQ ID NO: 339174 - DNA, 15 bp, Homo sapiens
tagccctgtgttaac

SEQ ID NO: 339175 - DNA, 15 bp, Homo sapiens
atagccctgtgttaa

SEQ ID NO: 339176 - DNA, 15 bp, Homo sapiens
gatagccctgtgtta

SEQ ID NO: 339177 - DNA, 15 bp, Homo sapiens
tgatagccctgtgtt

SEQ ID NO: 339178 - DNA, 15 bp, Homo sapiens
ctgatagccctgtgt

SEQ ID NO: 339179 - DNA, 15 bp, Homo sapiens
tctgatagccctgtg

SEQ ID NO: 339180 - DNA, 15 bp, Homo sapiens
ctctgatagccctgt

SEQ ID NO: 339181 - DNA, 15 bp, Homo sapiens
actctgatagccctg

SEQ ID NO: 339182 - DNA, 15 bp, Homo sapiens
tactctgatagccct

SEQ ID NO: 339183 - DNA, 15 bp, Homo sapiens
atactctgatagccc

SEQ ID NO: 339184 - DNA, 15 bp, Homo sapiens
catactctgatagcc

SEQ ID NO: 339185 - DNA, 15 bp, Homo sapiens
tcatactctgatagc

SEQ ID NO: 339186 - DNA, 15 bp, Homo sapiens
ttcatactctgatag

SEQ ID NO: 339187 - DNA, 15 bp, Homo sapiens
attcatactctgata

SEQ ID NO: 339188 - DNA, 15 bp, Homo sapiens
gattcatactctgat

SEQ ID NO: 339189 - DNA, 15 bp, Homo sapiens
agattcatactctga

SEQ ID NO: 339190 - DNA, 15 bp, Homo sapiens
gagattcatactctg

SEQ ID NO: 339191 - DNA, 15 bp, Homo sapiens
tgagattcatactct

SEQ ID NO: 339192 - DNA, 15 bp, Homo sapiens
gtgagattcatactc

SEQ ID NO: 339193 - DNA, 15 bp, Homo sapiens
tgtgagattcatact

SEQ ID NO: 339194 - DNA, 15 bp, Homo sapiens
atgtgagattcatac

SEQ ID NO: 339195 - DNA, 15 bp, Homo sapiens
catgtgagattcata

SEQ ID NO: 339196 - DNA, 15 bp, Homo sapiens
ccatgtgagattcat

SEQ ID NO: 339197 - DNA, 15 bp, Homo sapiens
accatgtgagattca

SEQ ID NO: 339198 - DNA, 15 bp, Homo sapiens
taccatgtgagattc

SEQ ID NO: 339199 - DNA, 15 bp, Homo sapiens
ctaccatgtgagatt

SEQ ID NO: 339200 - DNA, 15 bp, Homo sapiens
tctaccatgtgagat

SEQ ID NO: 339201 - DNA, 15 bp, Homo sapiens
atctaccatgtgaga

SEQ ID NO: 339202 - DNA, 15 bp, Homo sapiens
tatctaccatgtgag

SEQ ID NO: 339203 - DNA, 15 bp, Homo sapiens
atatctaccatgtga

SEQ ID NO: 339204 - DNA, 15 bp, Homo sapiens
catatctaccatgtg

SEQ ID NO: 339205 - DNA, 15 bp, Homo sapiens
acatatctaccatgt

SEQ ID NO: 339206 - DNA, 15 bp, Homo sapiens
tacatatctaccatg

SEQ ID NO: 339207 - DNA, 15 bp, Homo sapiens
ctacatatctaccat

SEQ ID NO: 339208 - DNA, 15 bp, Homo sapiens
cctacatatctacca

SEQ ID NO: 339209 - DNA, 15 bp, Homo sapiens
gcctacatatctacc

SEQ ID NO: 339210 - DNA, 15 bp, Homo sapiens
tgcctacatatctac

SEQ ID NO: 339211 - DNA, 15 bp, Homo sapiens
atgcctacatatcta

SEQ ID NO: 339212 - DNA, 15 bp, Homo sapiens
gatgcctacatatct

SEQ ID NO: 339213 - DNA, 15 bp, Homo sapiens
tgatgcctacatatc

SEQ ID NO: 339214 - DNA, 15 bp, Homo sapiens
atgatgcctacatat

SEQ ID NO: 339215 - DNA, 15 bp, Homo sapiens
catgatgcctacata

SEQ ID NO: 339216 - DNA, 15 bp, Homo sapiens
ccatgatgcctacat

SEQ ID NO: 339217 - DNA, 15 bp, Homo sapiens
tccatgatgcctaca

SEQ ID NO: 339218 - DNA, 15 bp, Homo sapiens
ttccatgatgcctac

SEQ ID NO: 339219 - DNA, 15 bp, Homo sapiens
gttccatgatgccta

SEQ ID NO: 339220 - DNA, 15 bp, Homo sapiens
ggttccatgatgcct

SEQ ID NO: 339221 - DNA, 15 bp, Homo sapiens
gggttccatgatgcc

SEQ ID NO: 339222 - DNA, 15 bp, Homo sapiens
tgggttccatgatgc

SEQ ID NO: 339223 - DNA, 15 bp, Homo sapiens
ttgggttccatgatg

SEQ ID NO: 339224 - DNA, 15 bp, Homo sapiens
gttgggttccatgat

SEQ ID NO: 339225 - DNA, 15 bp, Homo sapiens
tgttgggttccatga

SEQ ID NO: 339226 - DNA, 15 bp, Homo sapiens
ctgttgggttccatg

SEQ ID NO: 339227 - DNA, 15 bp, Homo sapiens
tctgttgggttccat

SEQ ID NO: 339228 - DNA, 15 bp, Homo sapiens
ctctgttgggttcca

SEQ ID NO: 339229 - DNA, 15 bp, Homo sapiens
tctctgttgggttcc

SEQ ID NO: 339230 - DNA, 15 bp, Homo sapiens
atctctgttgggttc

SEQ ID NO: 339231 - DNA, 15 bp, Homo sapiens
tatctctgttgggtt

SEQ ID NO: 339232 - DNA, 15 bp, Homo sapiens
ttatctctgttgggt

SEQ ID NO: 339233 - DNA, 15 bp, Homo sapiens
gttatctctgttggg

SEQ ID NO: 339234 - DNA, 15 bp, Homo sapiens
agttatctctgttgg

SEQ ID NO: 339235 - DNA, 15 bp, Homo sapiens
aagttatctctgttg

SEQ ID NO: 339236 - DNA, 15 bp, Homo sapiens
aaagttatctctgtt

SEQ ID NO: 339237 - DNA, 15 bp, Homo sapiens
caaagttatctctgt

SEQ ID NO: 339238 - DNA, 15 bp, Homo sapiens
ccaaagttatctctg

SEQ ID NO: 339239 - DNA, 15 bp, Homo sapiens
tccaaagttatctct

SEQ ID NO: 339240 - DNA, 15 bp, Homo sapiens
atccaaagttatctc

SEQ ID NO: 339241 - DNA, 15 bp, Homo sapiens
catccaaagttatct

SEQ ID NO: 339242 - DNA, 15 bp, Homo sapiens
ccatccaaagttatc

SEQ ID NO: 339243 - DNA, 15 bp, Homo sapiens
cccatccaaagttat

SEQ ID NO: 339244 - DNA, 15 bp, Homo sapiens
ccccatccaaagtta

SEQ ID NO: 339245 - DNA, 15 bp, Homo sapiens
tccccatccaaagtt

SEQ ID NO: 339246 - DNA, 15 bp, Homo sapiens
atccccatccaaagt

SEQ ID NO: 339247 - DNA, 15 bp, Homo sapiens
gatccccatccaaag

SEQ ID NO: 339248 - DNA, 15 bp, Homo sapiens
agatccccatccaaa

SEQ ID NO: 339249 - DNA, 15 bp, Homo sapiens
aagatccccatccaa

SEQ ID NO: 339250 - DNA, 15 bp, Homo sapiens
aaagatccccatcca

SEQ ID NO: 339251 - DNA, 15 bp, Homo sapiens
aaaagatccccatcc

SEQ ID NO: 339252 - DNA, 15 bp, Homo sapiens
aaaaagatccccatc

SEQ ID NO: 339253 - DNA, 15 bp, Homo sapiens
aaaaaagatccccat

SEQ ID NO: 339254 - DNA, 15 bp, Homo sapiens
caaaaaagatcccca

SEQ ID NO: 339255 - DNA, 15 bp, Homo sapiens
ccaaaaaagatcccc

SEQ ID NO: 339256 - DNA, 15 bp, Homo sapiens
gccaaaaaagatccc

SEQ ID NO: 339257 - DNA, 15 bp, Homo sapiens
tgccaaaaaagatcc

SEQ ID NO: 339258 - DNA, 15 bp, Homo sapiens
atgccaaaaaagatc

SEQ ID NO: 339259 - DNA, 15 bp, Homo sapiens
aatgccaaaaaagat

SEQ ID NO: 339260 - DNA, 15 bp, Homo sapiens
gaatgccaaaaaaga

SEQ ID NO: 339261 - DNA, 15 bp, Homo sapiens
agaatgccaaaaaag

SEQ ID NO: 339262 - DNA, 15 bp, Homo sapiens
aagaatgccaaaaaa

SEQ ID NO: 339263 - DNA, 15 bp, Homo sapiens
gaagaatgccaaaaa

SEQ ID NO: 339264 - DNA, 15 bp, Homo sapiens
tgaagaatgccaaaa

SEQ ID NO: 339265 - DNA, 15 bp, Homo sapiens
ttgaagaatgccaaa

SEQ ID NO: 339266 - DNA, 15 bp, Homo sapiens
tttgaagaatgccaa

SEQ ID NO: 339267 - DNA, 15 bp, Homo sapiens
atttgaagaatgcca

SEQ ID NO: 339268 - DNA, 15 bp, Homo sapiens
gatttgaagaatgcc

SEQ ID NO: 339269 - DNA, 15 bp, Homo sapiens
tgatttgaagaatgc

SEQ ID NO: 339270 - DNA, 15 bp, Homo sapiens
atgatttgaagaatg

SEQ ID NO: 339271 - DNA, 15 bp, Homo sapiens
catgatttgaagaat

SEQ ID NO: 339272 - DNA, 15 bp, Homo sapiens
gcatgatttgaagaa

SEQ ID NO: 339273 - DNA, 15 bp, Homo sapiens
ggcatgatttgaaga

SEQ ID NO: 339274 - DNA, 15 bp, Homo sapiens
gggcatgatttgaag

SEQ ID NO: 339275 - DNA, 15 bp, Homo sapiens
agggcatgatttgaa

SEQ ID NO: 339276 - DNA, 15 bp, Homo sapiens
cagggcatgatttga

SEQ ID NO: 339277 - DNA, 15 bp, Homo sapiens
acagggcatgatttg

SEQ ID NO: 339278 - DNA, 15 bp, Homo sapiens
cacagggcatgattt

SEQ ID NO: 339279 - DNA, 15 bp, Homo sapiens
tcacagggcatgatt

SEQ ID NO: 339280 - DNA, 15 bp, Homo sapiens
ttcacagggcatgat

SEQ ID NO: 339281 - DNA, 15 bp, Homo sapiens
gttcacagggcatga

SEQ ID NO: 339282 - DNA, 15 bp, Homo sapiens
tgttcacagggcatg

SEQ ID NO: 339283 - DNA, 15 bp, Homo sapiens
ttgttcacagggcat

SEQ ID NO: 339284 - DNA, 15 bp, Homo sapiens
gttgttcacagggca

SEQ ID NO: 339285 - DNA, 15 bp, Homo sapiens
ggttgttcacagggc

SEQ ID NO: 339286 - DNA, 15 bp, Homo sapiens
tggttgttcacaggg

SEQ ID NO: 339287 - DNA, 15 bp, Homo sapiens
atggttgttcacagg

SEQ ID NO: 339288 - DNA, 15 bp, Homo sapiens
aatggttgttcacag

SEQ ID NO: 339289 - DNA, 15 bp, Homo sapiens
taatggttgttcaca

SEQ ID NO: 339290 - DNA, 15 bp, Homo sapiens
gtaatggttgttcac

SEQ ID NO: 339291 - DNA, 15 bp, Homo sapiens
agtaatggttgttca

SEQ ID NO: 339292 - DNA, 15 bp, Homo sapiens
gagtaatggttgttc

SEQ ID NO: 339293 - DNA, 15 bp, Homo sapiens
agagtaatggttgtt

SEQ ID NO: 339294 - DNA, 15 bp, Homo sapiens
cagagtaatggttgt

SEQ ID NO: 339295 - DNA, 15 bp, Homo sapiens
gcagagtaatggttg

SEQ ID NO: 339296 - DNA, 15 bp, Homo sapiens
ggcagagtaatggtt

SEQ ID NO: 339297 - DNA, 15 bp, Homo sapiens
aggcagagtaatggt

SEQ ID NO: 339298 - DNA, 15 bp, Homo sapiens
gaggcagagtaatgg

SEQ ID NO: 339299 - DNA, 15 bp, Homo sapiens
ggaggcagagtaatg

SEQ ID NO: 339300 - DNA, 15 bp, Homo sapiens
tggaggcagagtaat

SEQ ID NO: 339301 - DNA, 15 bp, Homo sapiens
ttggaggcagagtaa

SEQ ID NO: 339302 - DNA, 15 bp, Homo sapiens
attggaggcagagta

SEQ ID NO: 339303 - DNA, 15 bp, Homo sapiens
cattggaggcagagt

SEQ ID NO: 339304 - DNA, 15 bp, Homo sapiens
tcattggaggcagag

SEQ ID NO: 339305 - DNA, 15 bp, Homo sapiens
ctcattggaggcaga

SEQ ID NO: 339306 - DNA, 15 bp, Homo sapiens
cctcattggaggcag

SEQ ID NO: 339307 - DNA, 15 bp, Homo sapiens
acctcattggaggca

SEQ ID NO: 339308 - DNA, 15 bp, Homo sapiens
gacctcattggaggc

SEQ ID NO: 339309 - DNA, 15 bp, Homo sapiens
tgacctcattggagg

SEQ ID NO: 339310 - DNA, 15 bp, Homo sapiens
gtgacctcattggag

SEQ ID NO: 339311 - DNA, 15 bp, Homo sapiens
tgtgacctcattgga

SEQ ID NO: 339312 - DNA, 15 bp, Homo sapiens
gtgtgacctcattgg

SEQ ID NO: 339313 - DNA, 15 bp, Homo sapiens
ggtgtgacctcattg

SEQ ID NO: 339314 - DNA, 15 bp, Homo sapiens
gggtgtgacctcatt

SEQ ID NO: 339315 - DNA, 15 bp, Homo sapiens
agggtgtgacctcat

SEQ ID NO: 339316 - DNA, 15 bp, Homo sapiens
cagggtgtgacctca

SEQ ID NO: 339317 - DNA, 15 bp, Homo sapiens
gcagggtgtgacctc

SEQ ID NO: 339318 - DNA, 15 bp, Homo sapiens
agcagggtgtgacct

SEQ ID NO: 339319 - DNA, 15 bp, Homo sapiens
cagcagggtgtgacc

SEQ ID NO: 339320 - DNA, 15 bp, Homo sapiens
acagcagggtgtgac

SEQ ID NO: 339321 - DNA, 15 bp, Homo sapiens
gacagcagggtgtga

SEQ ID NO: 339322 - DNA, 15 bp, Homo sapiens
agacagcagggtgtg

SEQ ID NO: 339323 - DNA, 15 bp, Homo sapiens
tagacagcagggtgt

SEQ ID NO: 339324 - DNA, 15 bp, Homo sapiens
atagacagcagggtg

SEQ ID NO: 339325 - DNA, 15 bp, Homo sapiens
gatagacagcagggt

SEQ ID NO: 339326 - DNA, 15 bp, Homo sapiens
agatagacagcaggg

SEQ ID NO: 339327 - DNA, 15 bp, Homo sapiens
aagatagacagcagg

SEQ ID NO: 339328 - DNA, 15 bp, Homo sapiens
taagatagacagcag

SEQ ID NO: 339329 - DNA, 15 bp, Homo sapiens
ttaagatagacagca

SEQ ID NO: 339330 - DNA, 15 bp, Homo sapiens
gttaagatagacagc

SEQ ID NO: 339331 - DNA, 15 bp, Homo sapiens
tgttaagatagacag

SEQ ID NO: 339332 - DNA, 15 bp, Homo sapiens
atgttaagatagaca

SEQ ID NO: 339333 - DNA, 15 bp, Homo sapiens
tatgttaagatagac

SEQ ID NO: 339334 - DNA, 15 bp, Homo sapiens
atatgttaagataga

SEQ ID NO: 339335 - DNA, 15 bp, Homo sapiens
aatatgttaagatag

SEQ ID NO: 339336 - DNA, 15 bp, Homo sapiens
aaatatgttaagata

SEQ ID NO: 339337 - DNA, 15 bp, Homo sapiens
caaatatgttaagat

SEQ ID NO: 339338 - DNA, 15 bp, Homo sapiens
acaaatatgttaaga

SEQ ID NO: 339339 - DNA, 15 bp, Homo sapiens
cacaaatatgttaag

SEQ ID NO: 339340 - DNA, 15 bp, Homo sapiens
acacaaatatgttaa

SEQ ID NO: 339341 - DNA, 15 bp, Homo sapiens
aacacaaatatgtta

SEQ ID NO: 339342 - DNA, 15 bp, Homo sapiens
caacacaaatatgtt

SEQ ID NO: 339343 - DNA, 15 bp, Homo sapiens
tcaacacaaatatgt

SEQ ID NO: 339344 - DNA, 15 bp, Homo sapiens
atcaacacaaatatg

SEQ ID NO: 339345 - DNA, 15 bp, Homo sapiens
tatcaacacaaatat

SEQ ID NO: 339346 - DNA, 15 bp, Homo sapiens
atatcaacacaaata

SEQ ID NO: 339347 - DNA, 15 bp, Homo sapiens
gatatcaacacaaat

SEQ ID NO: 339348 - DNA, 15 bp, Homo sapiens
agatatcaacacaaa

SEQ ID NO: 339349 - DNA, 15 bp, Homo sapiens
gagatatcaacacaa

SEQ ID NO: 339350 - DNA, 15 bp, Homo sapiens
agagatatcaacaca

SEQ ID NO: 339351 - DNA, 15 bp, Homo sapiens
tagagatatcaacac

SEQ ID NO: 339352 - DNA, 15 bp, Homo sapiens
ttagagatatcaaca

SEQ ID NO: 339353 - DNA, 15 bp, Homo sapiens
attagagatatcaac

SEQ ID NO: 339354 - DNA, 15 bp, Homo sapiens
tattagagatatcaa

SEQ ID NO: 339355 - DNA, 15 bp, Homo sapiens
ttattagagatatca

SEQ ID NO: 339356 - DNA, 15 bp, Homo sapiens
attattagagatatc

SEQ ID NO: 339357 - DNA, 15 bp, Homo sapiens
aattattagagatat

SEQ ID NO: 339358 - DNA, 15 bp, Homo sapiens
caattattagagata

SEQ ID NO: 339359 - DNA, 15 bp, Homo sapiens
tcaattattagagat

SEQ ID NO: 339360 - DNA, 15 bp, Homo sapiens
ctcaattattagaga

SEQ ID NO: 339361 - DNA, 15 bp, Homo sapiens
cctcaattattagag

SEQ ID NO: 339362 - DNA, 15 bp, Homo sapiens
tcctcaattattaga

SEQ ID NO: 339363 - DNA, 15 bp, Homo sapiens
atcctcaattattag

SEQ ID NO: 339364 - DNA, 15 bp, Homo sapiens
catcctcaattatta

SEQ ID NO: 339365 - DNA, 15 bp, Homo sapiens
gcatcctcaattatt

SEQ ID NO: 339366 - DNA, 15 bp, Homo sapiens
tgcatcctcaattat

SEQ ID NO: 339367 - DNA, 15 bp, Homo sapiens
ttgcatcctcaatta

SEQ ID NO: 339368 - DNA, 15 bp, Homo sapiens
attgcatcctcaatt

SEQ ID NO: 339369 - DNA, 15 bp, Homo sapiens
tattgcatcctcaat

SEQ ID NO: 339370 - DNA, 15 bp, Homo sapiens
ttattgcatcctcaa

SEQ ID NO: 339371 - DNA, 15 bp, Homo sapiens
tttattgcatcctca

SEQ ID NO: 339372 - DNA, 15 bp, Homo sapiens
atttattgcatcctc

SEQ ID NO: 339373 - DNA, 15 bp, Homo sapiens
aatttattgcatcct

SEQ ID NO: 339374 - DNA, 15 bp, Homo sapiens
gaatttattgcatcc

SEQ ID NO: 339375 - DNA, 15 bp, Homo sapiens
agaatttattgcatc

SEQ ID NO: 339376 - DNA, 15 bp, Homo sapiens
tagaatttattgcat

SEQ ID NO: 339377 - DNA, 15 bp, Homo sapiens
ctagaatttattgca

SEQ ID NO: 339378 - DNA, 15 bp, Homo sapiens
actagaatttattgc

SEQ ID NO: 339379 - DNA, 15 bp, Homo sapiens
aactagaatttattg

SEQ ID NO: 339380 - DNA, 15 bp, Homo sapiens
gaactagaatttatt

SEQ ID NO: 339381 - DNA, 15 bp, Homo sapiens
agaactagaatttat

SEQ ID NO: 339382 - DNA, 15 bp, Homo sapiens
gagaactagaattta

SEQ ID NO: 339383 - DNA, 15 bp, Homo sapiens
agagaactagaattt

SEQ ID NO: 339384 - DNA, 15 bp, Homo sapiens
aagagaactagaatt

SEQ ID NO: 339385 - DNA, 15 bp, Homo sapiens
gaagagaactagaat

SEQ ID NO: 339386 - DNA, 15 bp, Homo sapiens
agaagagaactagaa

SEQ ID NO: 339387 - DNA, 15 bp, Homo sapiens
aagaagagaactaga

SEQ ID NO: 339388 - DNA, 15 bp, Homo sapiens
gaagaagagaactag

SEQ ID NO: 339389 - DNA, 15 bp, Homo sapiens
ggaagaagagaacta

SEQ ID NO: 339390 - DNA, 15 bp, Homo sapiens
aggaagaagagaact

SEQ ID NO: 339391 - DNA, 15 bp, Homo sapiens
caggaagaagagaac

SEQ ID NO: 339392 - DNA, 15 bp, Homo sapiens
gcaggaagaagagaa

SEQ ID NO: 339393 - DNA, 15 bp, Homo sapiens
tgcaggaagaagaga

SEQ ID NO: 339394 - DNA, 15 bp, Homo sapiens
ttgcaggaagaagag

SEQ ID NO: 339395 - DNA, 15 bp, Homo sapiens
attgcaggaagaaga

SEQ ID NO: 339396 - DNA, 15 bp, Homo sapiens
tattgcaggaagaag

SEQ ID NO: 339397 - DNA, 15 bp, Homo sapiens
ttattgcaggaagaa

SEQ ID NO: 339398 - DNA, 15 bp, Homo sapiens
attattgcaggaaga

SEQ ID NO: 339399 - DNA, 15 bp, Homo sapiens
tattattgcaggaag

SEQ ID NO: 339400 - DNA, 15 bp, Homo sapiens
atattattgcaggaa

SEQ ID NO: 339401 - DNA, 15 bp, Homo sapiens
gatattattgcagga

SEQ ID NO: 339402 - DNA, 15 bp, Homo sapiens
ggatattattgcagg

SEQ ID NO: 339403 - DNA, 15 bp, Homo sapiens
aggatattattgcag

SEQ ID NO: 339404 - DNA, 15 bp, Homo sapiens
aaggatattattgca

SEQ ID NO: 339405 - DNA, 15 bp, Homo sapiens
gaaggatattattgc

SEQ ID NO: 339406 - DNA, 15 bp, Homo sapiens
ggaaggatattattg

SEQ ID NO: 339407 - DNA, 15 bp, Homo sapiens
gggaaggatattatt

SEQ ID NO: 339408 - DNA, 15 bp, Homo sapiens
ggggaaggatattat

SEQ ID NO: 339409 - DNA, 15 bp, Homo sapiens
tggggaaggatatta

SEQ ID NO: 339410 - DNA, 15 bp, Homo sapiens
ttggggaaggatatt

SEQ ID NO: 339411 - DNA, 15 bp, Homo sapiens
tttggggaaggatat

SEQ ID NO: 339412 - DNA, 15 bp, Homo sapiens
gtttggggaaggata

SEQ ID NO: 339413 - DNA, 15 bp, Homo sapiens
agtttggggaaggat

SEQ ID NO: 339414 - DNA, 15 bp, Homo sapiens
tagtttggggaagga

SEQ ID NO: 339415 - DNA, 15 bp, Homo sapiens
atagtttggggaagg

SEQ ID NO: 339416 - DNA, 15 bp, Homo sapiens
catagtttggggaag

SEQ ID NO: 339417 - DNA, 15 bp, Homo sapiens
ccatagtttggggaa

SEQ ID NO: 339418 - DNA, 15 bp, Homo sapiens
gccatagtttgggga

SEQ ID NO: 339419 - DNA, 15 bp, Homo sapiens
ggccatagtttgggg

SEQ ID NO: 339420 - DNA, 15 bp, Homo sapiens
gggccatagtttggg

SEQ ID NO: 339421 - DNA, 15 bp, Homo sapiens
agggccatagtttgg

SEQ ID NO: 339422 - DNA, 15 bp, Homo sapiens
tagggccatagtttg

SEQ ID NO: 339423 - DNA, 15 bp, Homo sapiens
ctagggccatagttt

SEQ ID NO: 339424 - DNA, 15 bp, Homo sapiens
tctagggccatagtt

SEQ ID NO: 339425 - DNA, 15 bp, Homo sapiens
ttctagggccatagt

SEQ ID NO: 339426 - DNA, 15 bp, Homo sapiens
attctagggccatag

SEQ ID NO: 339427 - DNA, 15 bp, Homo sapiens
gattctagggccata

SEQ ID NO: 339428 - DNA, 15 bp, Homo sapiens
agattctagggccat

SEQ ID NO: 339429 - DNA, 15 bp, Homo sapiens
aagattctagggcca

SEQ ID NO: 339430 - DNA, 15 bp, Homo sapiens
gaagattctagggcc

SEQ ID NO: 339431 - DNA, 15 bp, Homo sapiens
tgaagattctagggc

SEQ ID NO: 339432 - DNA, 15 bp, Homo sapiens
ttgaagattctaggg

SEQ ID NO: 339433 - DNA, 15 bp, Homo sapiens
tttgaagattctagg

SEQ ID NO: 339434 - DNA, 15 bp, Homo sapiens
ttttgaagattctag

SEQ ID NO: 339435 - DNA, 15 bp, Homo sapiens
cttttgaagattcta

SEQ ID NO: 339436 - DNA, 15 bp, Homo sapiens
acttttgaagattct

SEQ ID NO: 339437 - DNA, 15 bp, Homo sapiens
gacttttgaagattc

SEQ ID NO: 339438 - DNA, 15 bp, Homo sapiens
agacttttgaagatt

SEQ ID NO: 339439 - DNA, 15 bp, Homo sapiens
aagacttttgaagat

SEQ ID NO: 339440 - DNA, 15 bp, Homo sapiens
caagacttttgaaga

SEQ ID NO: 339441 - DNA, 15 bp, Homo sapiens
tcaagacttttgaag

SEQ ID NO: 339442 - DNA, 15 bp, Homo sapiens
ttcaagacttttgaa

SEQ ID NO: 339443 - DNA, 15 bp, Homo sapiens
tttcaagacttttga

SEQ ID NO: 339444 - DNA, 15 bp, Homo sapiens
ttttcaagacttttg

SEQ ID NO: 339445 - DNA, 15 bp, Homo sapiens
attttcaagactttt

SEQ ID NO: 339446 - DNA, 15 bp, Homo sapiens
tattttcaagacttt

SEQ ID NO: 339447 - DNA, 15 bp, Homo sapiens
atattttcaagactt

SEQ ID NO: 339448 - DNA, 15 bp, Homo sapiens
aatattttcaagact

SEQ ID NO: 339449 - DNA, 15 bp, Homo sapiens
aaatattttcaagac

SEQ ID NO: 339450 - DNA, 15 bp, Homo sapiens
gaaatattttcaaga

SEQ ID NO: 339451 - DNA, 15 bp, Homo sapiens
agaaatattttcaag

SEQ ID NO: 339452 - DNA, 15 bp, Homo sapiens
cagaaatattttcaa

SEQ ID NO: 339453 - DNA, 15 bp, Homo sapiens
ccagaaatattttca

SEQ ID NO: 339454 - DNA, 15 bp, Homo sapiens
accagaaatattttc

SEQ ID NO: 339455 - DNA, 15 bp, Homo sapiens
taccagaaatatttt

SEQ ID NO: 339456 - DNA, 15 bp, Homo sapiens
ttaccagaaatattt

SEQ ID NO: 339457 - DNA, 15 bp, Homo sapiens
tttaccagaaatatt

SEQ ID NO: 339458 - DNA, 15 bp, Homo sapiens
atttaccagaaatat

SEQ ID NO: 339459 - DNA, 15 bp, Homo sapiens
tatttaccagaaata

SEQ ID NO: 339460 - DNA, 15 bp, Homo sapiens
ttatttaccagaaat

SEQ ID NO: 339461 - DNA, 15 bp, Homo sapiens
tttatttaccagaaa

SEQ ID NO: 339462 - DNA, 15 bp, Homo sapiens
atttatttaccagaa

SEQ ID NO: 339463 - DNA, 15 bp, Homo sapiens
catttatttaccaga

SEQ ID NO: 339464 - DNA, 15 bp, Homo sapiens
acatttatttaccag

SEQ ID NO: 339465 - DNA, 15 bp, Homo sapiens
aacatttatttacca

SEQ ID NO: 339466 - DNA, 15 bp, Homo sapiens
gaacatttatttacc

SEQ ID NO: 339467 - DNA, 15 bp, Homo sapiens
ggaacatttatttac

SEQ ID NO: 339468 - DNA, 15 bp, Homo sapiens
gggaacatttattta

SEQ ID NO: 339469 - DNA, 15 bp, Homo sapiens
ggggaacatttattt

SEQ ID NO: 339470 - DNA, 15 bp, Homo sapiens
tggggaacatttatt

SEQ ID NO: 339471 - DNA, 15 bp, Homo sapiens
atggggaacatttat

SEQ ID NO: 339472 - DNA, 15 bp, Homo sapiens
aatggggaacattta

SEQ ID NO: 339473 - DNA, 15 bp, Homo sapiens
gaatggggaacattt

SEQ ID NO: 339474 - DNA, 15 bp, Homo sapiens
tgaatggggaacatt

SEQ ID NO: 339475 - DNA, 15 bp, Homo sapiens
gtgaatggggaacat

SEQ ID NO: 339476 - DNA, 15 bp, Homo sapiens
ggtgaatggggaaca

SEQ ID NO: 339477 - DNA, 15 bp, Homo sapiens
tggtgaatggggaac

SEQ ID NO: 339478 - DNA, 15 bp, Homo sapiens
atggtgaatggggaa

SEQ ID NO: 339479 - DNA, 15 bp, Homo sapiens
gatggtgaatgggga

SEQ ID NO: 339480 - DNA, 15 bp, Homo sapiens
ggatggtgaatgggg

SEQ ID NO: 339481 - DNA, 15 bp, Homo sapiens
tggatggtgaatggg

SEQ ID NO: 339482 - DNA, 15 bp, Homo sapiens
atggatggtgaatgg

SEQ ID NO: 339483 - DNA, 15 bp, Homo sapiens
gatggatggtgaatg

SEQ ID NO: 339484 - DNA, 15 bp, Homo sapiens
ggatggatggtgaat

SEQ ID NO: 339485 - DNA, 15 bp, Homo sapiens
gggatggatggtgaa

SEQ ID NO: 339486 - DNA, 15 bp, Homo sapiens
agggatggatggtga

SEQ ID NO: 339487 - DNA, 15 bp, Homo sapiens
gagggatggatggtg

SEQ ID NO: 339488 - DNA, 15 bp, Homo sapiens
tgagggatggatggt

SEQ ID NO: 339489 - DNA, 15 bp, Homo sapiens
catgtacatttacat

SEQ ID NO: 339490 - DNA, 15 bp, Homo sapiens
acatgtacatttaca

SEQ ID NO: 339491 - DNA, 15 bp, Homo sapiens
cacatgtacatttac

SEQ ID NO: 339492 - DNA, 15 bp, Homo sapiens
gcacatgtacattta

SEQ ID NO: 339493 - DNA, 15 bp, Homo sapiens
ggcacatgtacattt

SEQ ID NO: 339494 - DNA, 15 bp, Homo sapiens
tggcacatgtacatt

SEQ ID NO: 339495 - DNA, 15 bp, Homo sapiens
gtggcacatgtacat

SEQ ID NO: 339496 - DNA, 15 bp, Homo sapiens
tgtggcacatgtaca

SEQ ID NO: 339497 - DNA, 15 bp, Homo sapiens
ttgtggcacatgtac

SEQ ID NO: 339498 - DNA, 15 bp, Homo sapiens
cttgtggcacatgta

SEQ ID NO: 339499 - DNA, 15 bp, Homo sapiens
tcttgtggcacatgt

SEQ ID NO: 339500 - DNA, 15 bp, Homo sapiens
ttcttgtggcacatg

SEQ ID NO: 339501 - DNA, 15 bp, Homo sapiens
tttcttgtggcacat

SEQ ID NO: 339502 - DNA, 15 bp, Homo sapiens
gtttcttgtggcaca

SEQ ID NO: 339503 - DNA, 15 bp, Homo sapiens
tgtttcttgtggcac

SEQ ID NO: 339504 - DNA, 15 bp, Homo sapiens
atgtttcttgtggca

SEQ ID NO: 339505 - DNA, 15 bp, Homo sapiens
aatgtttcttgtggc

SEQ ID NO: 339506 - DNA, 15 bp, Homo sapiens
aaatgtttcttgtgg

SEQ ID NO: 339507 - DNA, 15 bp, Homo sapiens
aaaatgtttcttgtg

SEQ ID NO: 339508 - DNA, 15 bp, Homo sapiens
taaaatgtttcttgt

SEQ ID NO: 339509 - DNA, 15 bp, Homo sapiens
ttaaaatgtttcttg

SEQ ID NO: 339510 - DNA, 15 bp, Homo sapiens
tttaaaatgtttctt

SEQ ID NO: 339511 - DNA, 15 bp, Homo sapiens
ttttaaaatgtttct

SEQ ID NO: 339512 - DNA, 15 bp, Homo sapiens
attttaaaatgtttc

SEQ ID NO: 339513 - DNA, 15 bp, Homo sapiens
tattttaaaatgttt

SEQ ID NO: 339514 - DNA, 15 bp, Homo sapiens
atattttaaaatgtt

SEQ ID NO: 339515 - DNA, 15 bp, Homo sapiens
tatattttaaaatgt

SEQ ID NO: 339516 - DNA, 15 bp, Homo sapiens
atatattttaaaatg

SEQ ID NO: 339517 - DNA, 15 bp, Homo sapiens
catatattttaaaat

SEQ ID NO: 339518 - DNA, 15 bp, Homo sapiens
tcatatattttaaaa

SEQ ID NO: 339519 - DNA, 15 bp, Homo sapiens
atcatatattttaaa

SEQ ID NO: 339520 - DNA, 15 bp, Homo sapiens
tatcatatattttaa

SEQ ID NO: 339521 - DNA, 15 bp, Homo sapiens
ttatcatatatttta

SEQ ID NO: 339522 - DNA, 15 bp, Homo sapiens
tttatcatatatttt

SEQ ID NO: 339523 - DNA, 15 bp, Homo sapiens
ttttatcatatattt

SEQ ID NO: 339524 - DNA, 15 bp, Homo sapiens
attttatcatatatt

SEQ ID NO: 339525 - DNA, 15 bp, Homo sapiens
cattttatcatatat

SEQ ID NO: 339526 - DNA, 15 bp, Homo sapiens
gcattttatcatata

SEQ ID NO: 339527 - DNA, 15 bp, Homo sapiens
tgcattttatcatat

SEQ ID NO: 339528 - DNA, 15 bp, Homo sapiens
atgcattttatcata

SEQ ID NO: 339529 - DNA, 15 bp, Homo sapiens
tatgcattttatcat

SEQ ID NO: 339530 - DNA, 15 bp, Homo sapiens
atatgcattttatca

SEQ ID NO: 339531 - DNA, 15 bp, Homo sapiens
gatatgcattttatc

SEQ ID NO: 339532 - DNA, 15 bp, Homo sapiens
tgatatgcattttat

SEQ ID NO: 339533 - DNA, 15 bp, Homo sapiens
atgatatgcatttta

SEQ ID NO: 339534 - DNA, 15 bp, Homo sapiens
gatgatatgcatttt

SEQ ID NO: 339535 - DNA, 15 bp, Homo sapiens
ggatgatatgcattt

SEQ ID NO: 339536 - DNA, 15 bp, Homo sapiens
tggatgatatgcatt

SEQ ID NO: 339537 - DNA, 15 bp, Homo sapiens
ttggatgatatgcat

SEQ ID NO: 339538 - DNA, 15 bp, Homo sapiens
tttggatgatatgca

SEQ ID NO: 339539 - DNA, 15 bp, Homo sapiens
atttggatgatatgc

SEQ ID NO: 339540 - DNA, 15 bp, Homo sapiens
catttggatgatatg

SEQ ID NO: 339541 - DNA, 15 bp, Homo sapiens
acatttggatgatat

SEQ ID NO: 339542 - DNA, 15 bp, Homo sapiens
aacatttggatgata

SEQ ID NO: 339543 - DNA, 15 bp, Homo sapiens
gaacatttggatgat

SEQ ID NO: 339544 - DNA, 15 bp, Homo sapiens
tgaacatttggatga

SEQ ID NO: 339545 - DNA, 15 bp, Homo sapiens
ttgaacatttggatg

SEQ ID NO: 339546 - DNA, 15 bp, Homo sapiens
attgaacatttggat

SEQ ID NO: 339547 - DNA, 15 bp, Homo sapiens
gattgaacatttgga

SEQ ID NO: 339548 - DNA, 15 bp, Homo sapiens
agattgaacatttgg

SEQ ID NO: 339549 - DNA, 15 bp, Homo sapiens
tagattgaacatttg

SEQ ID NO: 339550 - DNA, 15 bp, Homo sapiens
atagattgaacattt

SEQ ID NO: 339551 - DNA, 15 bp, Homo sapiens
tatagattgaacatt

SEQ ID NO: 339552 - DNA, 15 bp, Homo sapiens
atatagattgaacat

SEQ ID NO: 339553 - DNA, 15 bp, Homo sapiens
aatatagattgaaca

SEQ ID NO: 339554 - DNA, 15 bp, Homo sapiens
caatatagattgaac

SEQ ID NO: 339555 - DNA, 15 bp, Homo sapiens
acaatatagattgaa

SEQ ID NO: 339556 - DNA, 15 bp, Homo sapiens
cacaatatagattga

SEQ ID NO: 339557 - DNA, 15 bp, Homo sapiens
acacaatatagattg

SEQ ID NO: 339558 - DNA, 15 bp, Homo sapiens
tacacaatatagatt

SEQ ID NO: 339559 - DNA, 15 bp, Homo sapiens
atacacaatatagat

SEQ ID NO: 339560 - DNA, 15 bp, Homo sapiens
aatacacaatataga

SEQ ID NO: 339561 - DNA, 15 bp, Homo sapiens
gaatacacaatatag

SEQ ID NO: 339562 - DNA, 15 bp, Homo sapiens
agaatacacaatata

SEQ ID NO: 339563 - DNA, 15 bp, Homo sapiens
cagaatacacaatat

SEQ ID NO: 339564 - DNA, 15 bp, Homo sapiens
tcagaatacacaata

SEQ ID NO: 339565 - DNA, 15 bp, Homo sapiens
atcagaatacacaat

SEQ ID NO: 339566 - DNA, 15 bp, Homo sapiens
tatcagaatacacaa

SEQ ID NO: 339567 - DNA, 15 bp, Homo sapiens
gtatcagaatacaca

SEQ ID NO: 339568 - DNA, 15 bp, Homo sapiens
tgtatcagaatacac

SEQ ID NO: 339569 - DNA, 15 bp, Homo sapiens
gtgtatcagaataca

SEQ ID NO: 339570 - DNA, 15 bp, Homo sapiens
agtgtatcagaatac

SEQ ID NO: 339571 - DNA, 15 bp, Homo sapiens
cagtgtatcagaata

SEQ ID NO: 339572 - DNA, 15 bp, Homo sapiens
acagtgtatcagaat

SEQ ID NO: 339573 - DNA, 15 bp, Homo sapiens
cacagtgtatcagaa

SEQ ID NO: 339574 - DNA, 15 bp, Homo sapiens
acacagtgtatcaga

SEQ ID NO: 339575 - DNA, 15 bp, Homo sapiens
cacacagtgtatcag

SEQ ID NO: 339576 - DNA, 15 bp, Homo sapiens
acacacagtgtatca

SEQ ID NO: 339577 - DNA, 15 bp, Homo sapiens
gacacacagtgtatc

SEQ ID NO: 339578 - DNA, 15 bp, Homo sapiens
gtgtgacacacagtg

SEQ ID NO: 339579 - DNA, 15 bp, Homo sapiens
agtgtgacacacagt

SEQ ID NO: 339580 - DNA, 15 bp, Homo sapiens
cagtgtgacacacag

SEQ ID NO: 339581 - DNA, 15 bp, Homo sapiens
acagtgtgacacaca

SEQ ID NO: 339582 - DNA, 15 bp, Homo sapiens
gacagtgtgacacac

SEQ ID NO: 339583 - DNA, 15 bp, Homo sapiens
agacagtgtgacaca

SEQ ID NO: 339584 - DNA, 15 bp, Homo sapiens
aagacagtgtgacac

SEQ ID NO: 339585 - DNA, 15 bp, Homo sapiens
taagacagtgtgaca

SEQ ID NO: 339586 - DNA, 15 bp, Homo sapiens
ctaagacagtgtgac

SEQ ID NO: 339587 - DNA, 15 bp, Homo sapiens
gctaagacagtgtga

SEQ ID NO: 339588 - DNA, 15 bp, Homo sapiens
ggctaagacagtgtg

SEQ ID NO: 339589 - DNA, 15 bp, Homo sapiens
aggctaagacagtgt

SEQ ID NO: 339590 - DNA, 15 bp, Homo sapiens
gaggctaagacagtg

SEQ ID NO: 339591 - DNA, 15 bp, Homo sapiens
tgaggctaagacagt

SEQ ID NO: 339592 - DNA, 15 bp, Homo sapiens
atgaggctaagacag

SEQ ID NO: 339593 - DNA, 15 bp, Homo sapiens
tatgaggctaagaca

SEQ ID NO: 339594 - DNA, 15 bp, Homo sapiens
gtatgaggctaagac

SEQ ID NO: 339595 - DNA, 15 bp, Homo sapiens
agtatgaggctaaga

SEQ ID NO: 339596 - DNA, 15 bp, Homo sapiens
tagtatgaggctaag

SEQ ID NO: 339597 - DNA, 15 bp, Homo sapiens
gtagtatgaggctaa

SEQ ID NO: 339598 - DNA, 15 bp, Homo sapiens
agtagtatgaggcta

SEQ ID NO: 339599 - DNA, 15 bp, Homo sapiens
gagtagtatgaggct

SEQ ID NO: 339600 - DNA, 15 bp, Homo sapiens
tgagtagtatgaggc

SEQ ID NO: 339601 - DNA, 15 bp, Homo sapiens
gtgagtagtatgagg

SEQ ID NO: 339602 - DNA, 15 bp, Homo sapiens
ggtgagtagtatgag

SEQ ID NO: 339603 - DNA, 15 bp, Homo sapiens
tggtgagtagtatga

SEQ ID NO: 339604 - DNA, 15 bp, Homo sapiens
atggtgagtagtatg

SEQ ID NO: 339605 - DNA, 15 bp, Homo sapiens
tatggtgagtagtat

SEQ ID NO: 339606 - DNA, 15 bp, Homo sapiens
atatggtgagtagta

SEQ ID NO: 339607 - DNA, 15 bp, Homo sapiens
tatatggtgagtagt

SEQ ID NO: 339608 - DNA, 15 bp, Homo sapiens
gtatatggtgagtag

SEQ ID NO: 339609 - DNA, 15 bp, Homo sapiens
agtatatggtgagta

SEQ ID NO: 339610 - DNA, 15 bp, Homo sapiens
tagtatatggtgagt

SEQ ID NO: 339611 - DNA, 15 bp, Homo sapiens
ttagtatatggtgag

SEQ ID NO: 339612 - DNA, 15 bp, Homo sapiens
attagtatatggtga

SEQ ID NO: 339613 - DNA, 15 bp, Homo sapiens
cattagtatatggtg

SEQ ID NO: 339614 - DNA, 15 bp, Homo sapiens
tcattagtatatggt

SEQ ID NO: 339615 - DNA, 15 bp, Homo sapiens
ctcattagtatatgg

SEQ ID NO: 339616 - DNA, 15 bp, Homo sapiens
cctcattagtatatg

SEQ ID NO: 339617 - DNA, 15 bp, Homo sapiens
ccctcattagtatat

SEQ ID NO: 339618 - DNA, 15 bp, Homo sapiens
cccctcattagtata

SEQ ID NO: 339619 - DNA, 15 bp, Homo sapiens
ccccctcattagtat

SEQ ID NO: 339620 - DNA, 15 bp, Homo sapiens
accccctcattagta

SEQ ID NO: 339621 - DNA, 15 bp, Homo sapiens
aaccccctcattagt

SEQ ID NO: 339622 - DNA, 15 bp, Homo sapiens
taaccccctcattag

SEQ ID NO: 339623 - DNA, 15 bp, Homo sapiens
ctaaccccctcatta

SEQ ID NO: 339624 - DNA, 15 bp, Homo sapiens
actaaccccctcatt

SEQ ID NO: 339625 - DNA, 15 bp, Homo sapiens
gactaaccccctcat

SEQ ID NO: 339626 - DNA, 15 bp, Homo sapiens
tgactaaccccctca

SEQ ID NO: 339627 - DNA, 15 bp, Homo sapiens
atgactaaccccctc

SEQ ID NO: 339628 - DNA, 15 bp, Homo sapiens
tatgactaaccccct

SEQ ID NO: 339629 - DNA, 15 bp, Homo sapiens
atatgactaaccccc

SEQ ID NO: 339630 - DNA, 15 bp, Homo sapiens
catatgactaacccc

SEQ ID NO: 339631 - DNA, 15 bp, Homo sapiens
ccatatgactaaccc

SEQ ID NO: 339632 - DNA, 15 bp, Homo sapiens
cccatatgactaacc

SEQ ID NO: 339633 - DNA, 15 bp, Homo sapiens
gcccatatgactaac

SEQ ID NO: 339634 - DNA, 15 bp, Homo sapiens
agcccatatgactaa

SEQ ID NO: 339635 - DNA, 15 bp, Homo sapiens
aagcccatatgacta

SEQ ID NO: 339636 - DNA, 15 bp, Homo sapiens
aaagcccatatgact

SEQ ID NO: 339637 - DNA, 15 bp, Homo sapiens
caaagcccatatgac

SEQ ID NO: 339638 - DNA, 15 bp, Homo sapiens
ccaaagcccatatga

SEQ ID NO: 339639 - DNA, 15 bp, Homo sapiens
cccaaagcccatatg

SEQ ID NO: 339640 - DNA, 15 bp, Homo sapiens
gcccaaagcccatat

SEQ ID NO: 339641 - DNA, 15 bp, Homo sapiens
tgcccaaagcccata

SEQ ID NO: 339642 - DNA, 15 bp, Homo sapiens
atgcccaaagcccat

SEQ ID NO: 339643 - DNA, 15 bp, Homo sapiens
tatgcccaaagccca

SEQ ID NO: 339644 - DNA, 15 bp, Homo sapiens
ttatgcccaaagccc

SEQ ID NO: 339645 - DNA, 15 bp, Homo sapiens
tttatgcccaaagcc

SEQ ID NO: 339646 - DNA, 15 bp, Homo sapiens
ttttatgcccaaagc

SEQ ID NO: 339647 - DNA, 15 bp, Homo sapiens
attttatgcccaaag

SEQ ID NO: 339648 - DNA, 15 bp, Homo sapiens
aattttatgcccaaa

SEQ ID NO: 339649 - DNA, 15 bp, Homo sapiens
aaattttatgcccaa

SEQ ID NO: 339650 - DNA, 15 bp, Homo sapiens
caaattttatgccca

SEQ ID NO: 339651 - DNA, 15 bp, Homo sapiens
ccaaattttatgccc

SEQ ID NO: 339652 - DNA, 15 bp, Homo sapiens
cccaaattttatgcc

SEQ ID NO: 339653 - DNA, 15 bp, Homo sapiens
acccaaattttatgc

SEQ ID NO: 339654 - DNA, 15 bp, Homo sapiens
cacccaaattttatg

SEQ ID NO: 339655 - DNA, 15 bp, Homo sapiens
ccacccaaattttat

SEQ ID NO: 339656 - DNA, 15 bp, Homo sapiens
cccacccaaatttta

SEQ ID NO: 339657 - DNA, 15 bp, Homo sapiens
acccacccaaatttt

SEQ ID NO: 339658 - DNA, 15 bp, Homo sapiens
cacccacccaaattt

SEQ ID NO: 339659 - DNA, 15 bp, Homo sapiens
ccacccacccaaatt

SEQ ID NO: 339660 - DNA, 15 bp, Homo sapiens
gccacccacccaaat

SEQ ID NO: 339661 - DNA, 15 bp, Homo sapiens
agccacccacccaaa

SEQ ID NO: 339662 - DNA, 15 bp, Homo sapiens
tagccacccacccaa

SEQ ID NO: 339663 - DNA, 15 bp, Homo sapiens
ttagccacccaccca

SEQ ID NO: 339664 - DNA, 15 bp, Homo sapiens
cttagccacccaccc

SEQ ID NO: 339665 - DNA, 15 bp, Homo sapiens
ccttagccacccacc

SEQ ID NO: 339666 - DNA, 15 bp, Homo sapiens
cccttagccacccac

SEQ ID NO: 339667 - DNA, 15 bp, Homo sapiens
tcccttagccaccca

SEQ ID NO: 339668 - DNA, 15 bp, Homo sapiens
gtcccttagccaccc

SEQ ID NO: 339669 - DNA, 15 bp, Homo sapiens
ggtcccttagccacc

SEQ ID NO: 339670 - DNA, 15 bp, Homo sapiens
aggtcccttagccac

SEQ ID NO: 339671 - DNA, 15 bp, Homo sapiens
aaggtcccttagcca

SEQ ID NO: 339672 - DNA, 15 bp, Homo sapiens
gaaggtcccttagcc

SEQ ID NO: 339673 - DNA, 15 bp, Homo sapiens
tgaaggtcccttagc

SEQ ID NO: 339674 - DNA, 15 bp, Homo sapiens
atgaaggtcccttag

SEQ ID NO: 339675 - DNA, 15 bp, Homo sapiens
gatgaaggtccctta

SEQ ID NO: 339676 - DNA, 15 bp, Homo sapiens
tgatgaaggtccctt

SEQ ID NO: 339677 - DNA, 15 bp, Homo sapiens
ttgatgaaggtccct

SEQ ID NO: 339678 - DNA, 15 bp, Homo sapiens
gttgatgaaggtccc

SEQ ID NO: 339679 - DNA, 15 bp, Homo sapiens
ggttgatgaaggtcc

SEQ ID NO: 339680 - DNA, 15 bp, Homo sapiens
aggttgatgaaggtc

SEQ ID NO: 339681 - DNA, 15 bp, Homo sapiens
taggttgatgaaggt

SEQ ID NO: 339682 - DNA, 15 bp, Homo sapiens
ctaggttgatgaagg

SEQ ID NO: 339683 - DNA, 15 bp, Homo sapiens
gctaggttgatgaag

SEQ ID NO: 339684 - DNA, 15 bp, Homo sapiens
tgctaggttgatgaa

SEQ ID NO: 339685 - DNA, 15 bp, Homo sapiens
ctgctaggttgatga

SEQ ID NO: 339686 - DNA, 15 bp, Homo sapiens
cctgctaggttgatg

SEQ ID NO: 339687 - DNA, 15 bp, Homo sapiens
tcctgctaggttgat

SEQ ID NO: 339688 - DNA, 15 bp, Homo sapiens
ctcctgctaggttga

SEQ ID NO: 339689 - DNA, 15 bp, Homo sapiens
tctcctgctaggttg

SEQ ID NO: 339690 - DNA, 15 bp, Homo sapiens
ctctcctgctaggtt

SEQ ID NO: 339691 - DNA, 15 bp, Homo sapiens
gctctcctgctaggt

SEQ ID NO: 339692 - DNA, 15 bp, Homo sapiens
tgctctcctgctagg

SEQ ID NO: 339693 - DNA, 15 bp, Homo sapiens
ttgctctcctgctag

SEQ ID NO: 339694 - DNA, 15 bp, Homo sapiens
tttgctctcctgcta

SEQ ID NO: 339695 - DNA, 15 bp, Homo sapiens
ctttgctctcctgct

SEQ ID NO: 339696 - DNA, 15 bp, Homo sapiens
actttgctctcctgc

SEQ ID NO: 339697 - DNA, 15 bp, Homo sapiens
cactttgctctcctg

SEQ ID NO: 339698 - DNA, 15 bp, Homo sapiens
tcactttgctctcct

SEQ ID NO: 339699 - DNA, 15 bp, Homo sapiens
atcactttgctctcc

SEQ ID NO: 339700 - DNA, 15 bp, Homo sapiens
gatcactttgctctc

SEQ ID NO: 339701 - DNA, 15 bp, Homo sapiens
tgatcactttgctct

SEQ ID NO: 339702 - DNA, 15 bp, Homo sapiens
atgatcactttgctc

SEQ ID NO: 339703 - DNA, 15 bp, Homo sapiens
catgatcactttgct

SEQ ID NO: 339704 - DNA, 15 bp, Homo sapiens
acatgatcactttgc

SEQ ID NO: 339705 - DNA, 15 bp, Homo sapiens
aacatgatcactttg

SEQ ID NO: 339706 - DNA, 15 bp, Homo sapiens
taacatgatcacttt

SEQ ID NO: 339707 - DNA, 15 bp, Homo sapiens
ttaacatgatcactt

SEQ ID NO: 339708 - DNA, 15 bp, Homo sapiens
cttaacatgatcact

SEQ ID NO: 339709 - DNA, 15 bp, Homo sapiens
tcttaacatgatcac

SEQ ID NO: 339710 - DNA, 15 bp, Homo sapiens
gtcttaacatgatca

SEQ ID NO: 339711 - DNA, 15 bp, Homo sapiens
tgtcttaacatgatc

SEQ ID NO: 339712 - DNA, 15 bp, Homo sapiens
atgtcttaacatgat

SEQ ID NO: 339713 - DNA, 15 bp, Homo sapiens
gatgtcttaacatga

SEQ ID NO: 339714 - DNA, 15 bp, Homo sapiens
agatgtcttaacatg

SEQ ID NO: 339715 - DNA, 15 bp, Homo sapiens
gagatgtcttaacat

SEQ ID NO: 339716 - DNA, 15 bp, Homo sapiens
agagatgtcttaaca

SEQ ID NO: 339717 - DNA, 15 bp, Homo sapiens
aagagatgtcttaac

SEQ ID NO: 339718 - DNA, 15 bp, Homo sapiens
gaagagatgtcttaa

SEQ ID NO: 339719 - DNA, 15 bp, Homo sapiens
agaagagatgtctta

SEQ ID NO: 339720 - DNA, 15 bp, Homo sapiens
cagaagagatgtctt

SEQ ID NO: 339721 - DNA, 15 bp, Homo sapiens
tcagaagagatgtct

SEQ ID NO: 339722 - DNA, 15 bp, Homo sapiens
ttcagaagagatgtc

SEQ ID NO: 339723 - DNA, 15 bp, Homo sapiens
cttcagaagagatgt

SEQ ID NO: 339724 - DNA, 15 bp, Homo sapiens
acttcagaagagatg

SEQ ID NO: 339725 - DNA, 15 bp, Homo sapiens
tacttcagaagagat

SEQ ID NO: 339726 - DNA, 15 bp, Homo sapiens
ctacttcagaagaga

SEQ ID NO: 339727 - DNA, 15 bp, Homo sapiens
gctacttcagaagag

SEQ ID NO: 339728 - DNA, 15 bp, Homo sapiens
agctacttcagaaga

SEQ ID NO: 339729 - DNA, 15 bp, Homo sapiens
gagctacttcagaag

SEQ ID NO: 339730 - DNA, 15 bp, Homo sapiens
tgagctacttcagaa

SEQ ID NO: 339731 - DNA, 15 bp, Homo sapiens
atgagctacttcaga

SEQ ID NO: 339732 - DNA, 15 bp, Homo sapiens
aatgagctacttcag

SEQ ID NO: 339733 - DNA, 15 bp, Homo sapiens
caatgagctacttca

SEQ ID NO: 339734 - DNA, 15 bp, Homo sapiens
tcaatgagctacttc

SEQ ID NO: 339735 - DNA, 15 bp, Homo sapiens
gtcaatgagctactt

SEQ ID NO: 339736 - DNA, 15 bp, Homo sapiens
tgtcaatgagctact

SEQ ID NO: 339737 - DNA, 15 bp, Homo sapiens
gtgtcaatgagctac

SEQ ID NO: 339738 - DNA, 15 bp, Homo sapiens
agtgtcaatgagcta

SEQ ID NO: 339739 - DNA, 15 bp, Homo sapiens
gagtgtcaatgagct

SEQ ID NO: 339740 - DNA, 15 bp, Homo sapiens
agagtgtcaatgagc

SEQ ID NO: 339741 - DNA, 15 bp, Homo sapiens
aagagtgtcaatgag

SEQ ID NO: 339742 - DNA, 15 bp, Homo sapiens
gaagagtgtcaatga

SEQ ID NO: 339743 - DNA, 15 bp, Homo sapiens
ggaagagtgtcaatg

SEQ ID NO: 339744 - DNA, 15 bp, Homo sapiens
gggaagagtgtcaat

SEQ ID NO: 339745 - DNA, 15 bp, Homo sapiens
agggaagagtgtcaa

SEQ ID NO: 339746 - DNA, 15 bp, Homo sapiens
gagggaagagtgtca

SEQ ID NO: 339747 - DNA, 15 bp, Homo sapiens
tgagggaagagtgtc

SEQ ID NO: 339748 - DNA, 15 bp, Homo sapiens
gtgagggaagagtgt

SEQ ID NO: 339749 - DNA, 15 bp, Homo sapiens
ggtgagggaagagtg

SEQ ID NO: 339750 - DNA, 15 bp, Homo sapiens
aggtgagggaagagt

SEQ ID NO: 339751 - DNA, 15 bp, Homo sapiens
aaggtgagggaagag

SEQ ID NO: 339752 - DNA, 15 bp, Homo sapiens
caaggtgagggaaga

SEQ ID NO: 339753 - DNA, 15 bp, Homo sapiens
ccaaggtgagggaag

SEQ ID NO: 339754 - DNA, 15 bp, Homo sapiens
accaaggtgagggaa

SEQ ID NO: 339755 - DNA, 15 bp, Homo sapiens
caccaaggtgaggga

SEQ ID NO: 339756 - DNA, 15 bp, Homo sapiens
ccaccaaggtgaggg

SEQ ID NO: 339757 - DNA, 15 bp, Homo sapiens
gccaccaaggtgagg

SEQ ID NO: 339758 - DNA, 15 bp, Homo sapiens
ggccaccaaggtgag

SEQ ID NO: 339759 - DNA, 15 bp, Homo sapiens
cggccaccaaggtga

SEQ ID NO: 339760 - DNA, 15 bp, Homo sapiens
gcggccaccaaggtg

SEQ ID NO: 339761 - DNA, 15 bp, Homo sapiens
agcggccaccaaggt

SEQ ID NO: 339762 - DNA, 15 bp, Homo sapiens
cagcggccaccaagg

SEQ ID NO: 339763 - DNA, 15 bp, Homo sapiens
gcagcggccaccaag

SEQ ID NO: 339764 - DNA, 15 bp, Homo sapiens
cgcagcggccaccaa

SEQ ID NO: 339765 - DNA, 15 bp, Homo sapiens
acgcagcggccacca

SEQ ID NO: 339766 - DNA, 15 bp, Homo sapiens
cacgcagcggccacc

SEQ ID NO: 339767 - DNA, 15 bp, Homo sapiens
gcacgcagcggccac

SEQ ID NO: 339768 - DNA, 15 bp, Homo sapiens
ggcacgcagcggcca

SEQ ID NO: 339769 - DNA, 15 bp, Homo sapiens
aggcacgcagcggcc

SEQ ID NO: 339770 - DNA, 15 bp, Homo sapiens
caggcacgcagcggc

SEQ ID NO: 339771 - DNA, 15 bp, Homo sapiens
tcaggcacgcagcgg

SEQ ID NO: 339772 - DNA, 15 bp, Homo sapiens
atcaggcacgcagcg

SEQ ID NO: 339773 - DNA, 15 bp, Homo sapiens
aatcaggcacgcagc

SEQ ID NO: 339774 - DNA, 15 bp, Homo sapiens
caatcaggcacgcag

SEQ ID NO: 339775 - DNA, 15 bp, Homo sapiens
gcaatcaggcacgca

SEQ ID NO: 339776 - DNA, 15 bp, Homo sapiens
agcaatcaggcacgc

SEQ ID NO: 339777 - DNA, 15 bp, Homo sapiens
tagcaatcaggcacg

SEQ ID NO: 339778 - DNA, 15 bp, Homo sapiens
ttagcaatcaggcac

SEQ ID NO: 339779 - DNA, 15 bp, Homo sapiens
cttagcaatcaggca

SEQ ID NO: 339780 - DNA, 15 bp, Homo sapiens
acttagcaatcaggc

SEQ ID NO: 339781 - DNA, 15 bp, Homo sapiens
cacttagcaatcagg

SEQ ID NO: 339782 - DNA, 15 bp, Homo sapiens
gcacttagcaatcag

SEQ ID NO: 339783 - DNA, 15 bp, Homo sapiens
tgcacttagcaatca

SEQ ID NO: 339784 - DNA, 15 bp, Homo sapiens
gtgcacttagcaatc

SEQ ID NO: 339785 - DNA, 15 bp, Homo sapiens
ggtgcacttagcaat

SEQ ID NO: 339786 - DNA, 15 bp, Homo sapiens
tggtgcacttagcaa

SEQ ID NO: 339787 - DNA, 15 bp, Homo sapiens
gtggtgcacttagca

SEQ ID NO: 339788 - DNA, 15 bp, Homo sapiens
ggtggtgcacttagc

SEQ ID NO: 339789 - DNA, 15 bp, Homo sapiens
cggtggtgcacttag

SEQ ID NO: 339790 - DNA, 15 bp, Homo sapiens
acggtggtgcactta

SEQ ID NO: 339791 - DNA, 15 bp, Homo sapiens
tacggtggtgcactt

SEQ ID NO: 339792 - DNA, 15 bp, Homo sapiens
ttacggtggtgcact

SEQ ID NO: 339793 - DNA, 15 bp, Homo sapiens
gttacggtggtgcac

SEQ ID NO: 339794 - DNA, 15 bp, Homo sapiens
tgttacggtggtgca

SEQ ID NO: 339795 - DNA, 15 bp, Homo sapiens
ttgttacggtggtgc

SEQ ID NO: 339796 - DNA, 15 bp, Homo sapiens
attgttacggtggtg

SEQ ID NO: 339797 - DNA, 15 bp, Homo sapiens
tattgttacggtggt

SEQ ID NO: 339798 - DNA, 15 bp, Homo sapiens
ttattgttacggtgg

SEQ ID NO: 339799 - DNA, 15 bp, Homo sapiens
gttattgttacggtg

SEQ ID NO: 339800 - DNA, 15 bp, Homo sapiens
tgttattgttacggt

SEQ ID NO: 339801 - DNA, 15 bp, Homo sapiens
ctgttattgttacgg

SEQ ID NO: 339802 - DNA, 15 bp, Homo sapiens
actgttattgttacg

SEQ ID NO: 339803 - DNA, 15 bp, Homo sapiens
gactgttattgttac

SEQ ID NO: 339804 - DNA, 15 bp, Homo sapiens
agactgttattgtta

SEQ ID NO: 339805 - DNA, 15 bp, Homo sapiens
tagactgttattgtt

SEQ ID NO: 339806 - DNA, 15 bp, Homo sapiens
atagactgttattgt

SEQ ID NO: 339807 - DNA, 15 bp, Homo sapiens
tatagactgttattg

SEQ ID NO: 339808 - DNA, 15 bp, Homo sapiens
ttatagactgttatt

SEQ ID NO: 339809 - DNA, 15 bp, Homo sapiens
attatagactgttat

SEQ ID NO: 339810 - DNA, 15 bp, Homo sapiens
cattatagactgtta

SEQ ID NO: 339811 - DNA, 15 bp, Homo sapiens
ccattatagactgtt

SEQ ID NO: 339812 - DNA, 15 bp, Homo sapiens
accattatagactgt

SEQ ID NO: 339813 - DNA, 15 bp, Homo sapiens
caccattatagactg

SEQ ID NO: 339814 - DNA, 15 bp, Homo sapiens
tcaccattatagact

SEQ ID NO: 339815 - DNA, 15 bp, Homo sapiens
atcaccattatagac

SEQ ID NO: 339816 - DNA, 15 bp, Homo sapiens
tatcaccattataga

SEQ ID NO: 339817 - DNA, 15 bp, Homo sapiens
atatcaccattatag

SEQ ID NO: 339818 - DNA, 15 bp, Homo sapiens
aatatcaccattata

SEQ ID NO: 339819 - DNA, 15 bp, Homo sapiens
taatatcaccattat

SEQ ID NO: 339820 - DNA, 15 bp, Homo sapiens
ataatatcaccatta

SEQ ID NO: 339821 - DNA, 15 bp, Homo sapiens
aataatatcaccatt

SEQ ID NO: 339822 - DNA, 15 bp, Homo sapiens
taataatatcaccat

SEQ ID NO: 339823 - DNA, 15 bp, Homo sapiens
ttaataatatcacca

SEQ ID NO: 339824 - DNA, 15 bp, Homo sapiens
gttaataatatcacc

SEQ ID NO: 339825 - DNA, 15 bp, Homo sapiens
agttaataatatcac

SEQ ID NO: 339826 - DNA, 15 bp, Homo sapiens
cagttaataatatca

SEQ ID NO: 339827 - DNA, 15 bp, Homo sapiens
gcagttaataatatc

SEQ ID NO: 339828 - DNA, 15 bp, Homo sapiens
tgcagttaataatat

SEQ ID NO: 339829 - DNA, 15 bp, Homo sapiens
atgcagttaataata

SEQ ID NO: 339830 - DNA, 15 bp, Homo sapiens
gatgcagttaataat

SEQ ID NO: 339831 - DNA, 15 bp, Homo sapiens
cgatgcagttaataa

SEQ ID NO: 339832 - DNA, 15 bp, Homo sapiens
acgatgcagttaata

SEQ ID NO: 339833 - DNA, 15 bp, Homo sapiens
cacgatgcagttaat

SEQ ID NO: 339834 - DNA, 15 bp, Homo sapiens
gcacgatgcagttaa

SEQ ID NO: 339835 - DNA, 15 bp, Homo sapiens
tgcacgatgcagtta

SEQ ID NO: 339836 - DNA, 15 bp, Homo sapiens
atgcacgatgcagtt

SEQ ID NO: 339837 - DNA, 15 bp, Homo sapiens
tatgcacgatgcagt

SEQ ID NO: 339838 - DNA, 15 bp, Homo sapiens
atatgcacgatgcag

SEQ ID NO: 339839 - DNA, 15 bp, Homo sapiens
aatatgcacgatgca

SEQ ID NO: 339840 - DNA, 15 bp, Homo sapiens
taatatgcacgatgc

SEQ ID NO: 339841 - DNA, 15 bp, Homo sapiens
ataatatgcacgatg

SEQ ID NO: 339842 - DNA, 15 bp, Homo sapiens
aataatatgcacgat

SEQ ID NO: 339843 - DNA, 15 bp, Homo sapiens
caataatatgcacga

SEQ ID NO: 339844 - DNA, 15 bp, Homo sapiens
tcaataatatgcacg

SEQ ID NO: 339845 - DNA, 15 bp, Homo sapiens
atcaataatatgcac

SEQ ID NO: 339846 - DNA, 15 bp, Homo sapiens
aatcaataatatgca

SEQ ID NO: 339847 - DNA, 15 bp, Homo sapiens
aaatcaataatatgc

SEQ ID NO: 339848 - DNA, 15 bp, Homo sapiens
taaatcaataatatg

SEQ ID NO: 339849 - DNA, 15 bp, Homo sapiens
gtaaatcaataatat

SEQ ID NO: 339850 - DNA, 15 bp, Homo sapiens
agtaaatcaataata

SEQ ID NO: 339851 - DNA, 15 bp, Homo sapiens
gagtaaatcaataat

SEQ ID NO: 339852 - DNA, 15 bp, Homo sapiens
agagtaaatcaataa

SEQ ID NO: 339853 - DNA, 15 bp, Homo sapiens
aagagtaaatcaata

SEQ ID NO: 339854 - DNA, 15 bp, Homo sapiens
aaagagtaaatcaat

SEQ ID NO: 339855 - DNA, 15 bp, Homo sapiens
caaagagtaaatcaa

SEQ ID NO: 339856 - DNA, 15 bp, Homo sapiens
acaaagagtaaatca

SEQ ID NO: 339857 - DNA, 15 bp, Homo sapiens
aacaaagagtaaatc

SEQ ID NO: 339858 - DNA, 15 bp, Homo sapiens
gaacaaagagtaaat

SEQ ID NO: 339859 - DNA, 15 bp, Homo sapiens
agaacaaagagtaaa

SEQ ID NO: 339860 - DNA, 15 bp, Homo sapiens
cagaacaaagagtaa

SEQ ID NO: 339861 - DNA, 15 bp, Homo sapiens
gcagaacaaagagta

SEQ ID NO: 339862 - DNA, 15 bp, Homo sapiens
tgcagaacaaagagt

SEQ ID NO: 339863 - DNA, 15 bp, Homo sapiens
atgcagaacaaagag

SEQ ID NO: 339864 - DNA, 15 bp, Homo sapiens
gatgcagaacaaaga

SEQ ID NO: 339865 - DNA, 15 bp, Homo sapiens
tgatgcagaacaaag

SEQ ID NO: 339866 - DNA, 15 bp, Homo sapiens
atgatgcagaacaaa

SEQ ID NO: 339867 - DNA, 15 bp, Homo sapiens
aatgatgcagaacaa

SEQ ID NO: 339868 - DNA, 15 bp, Homo sapiens
taatgatgcagaaca

SEQ ID NO: 339869 - DNA, 15 bp, Homo sapiens
ataatgatgcagaac

SEQ ID NO: 339870 - DNA, 15 bp, Homo sapiens
gataatgatgcagaa

SEQ ID NO: 339871 - DNA, 15 bp, Homo sapiens
ggataatgatgcaga

SEQ ID NO: 339872 - DNA, 15 bp, Homo sapiens
aggataatgatgcag

SEQ ID NO: 339873 - DNA, 15 bp, Homo sapiens
aaggataatgatgca

SEQ ID NO: 339874 - DNA, 15 bp, Homo sapiens
aaaggataatgatgc

SEQ ID NO: 339875 - DNA, 15 bp, Homo sapiens
gaaaggataatgatg

SEQ ID NO: 339876 - DNA, 15 bp, Homo sapiens
tgaaaggataatgat

SEQ ID NO: 339877 - DNA, 15 bp, Homo sapiens
gtgaaaggataatga

SEQ ID NO: 339878 - DNA, 15 bp, Homo sapiens
ggtgaaaggataatg

SEQ ID NO: 339879 - DNA, 15 bp, Homo sapiens
tggtgaaaggataat

SEQ ID NO: 339880 - DNA, 15 bp, Homo sapiens
ttggtgaaaggataa

SEQ ID NO: 339881 - DNA, 15 bp, Homo sapiens
attggtgaaaggata

SEQ ID NO: 339882 - DNA, 15 bp, Homo sapiens
cattggtgaaaggat

SEQ ID NO: 339883 - DNA, 15 bp, Homo sapiens
tcattggtgaaagga

SEQ ID NO: 339884 - DNA, 15 bp, Homo sapiens
ctcattggtgaaagg

SEQ ID NO: 339885 - DNA, 15 bp, Homo sapiens
actcattggtgaaag

SEQ ID NO: 339886 - DNA, 15 bp, Homo sapiens
aactcattggtgaaa

SEQ ID NO: 339887 - DNA, 15 bp, Homo sapiens
aaactcattggtgaa

SEQ ID NO: 339888 - DNA, 15 bp, Homo sapiens
taaactcattggtga

SEQ ID NO: 339889 - DNA, 15 bp, Homo sapiens
gtaaactcattggtg

SEQ ID NO: 339890 - DNA, 15 bp, Homo sapiens
agtaaactcattggt

SEQ ID NO: 339891 - DNA, 15 bp, Homo sapiens
cagtaaactcattgg

SEQ ID NO: 339892 - DNA, 15 bp, Homo sapiens
gcagtaaactcattg

SEQ ID NO: 339893 - DNA, 15 bp, Homo sapiens
tgcagtaaactcatt

SEQ ID NO: 339894 - DNA, 15 bp, Homo sapiens
atgcagtaaactcat

SEQ ID NO: 339895 - DNA, 15 bp, Homo sapiens
aatgcagtaaactca

SEQ ID NO: 339896 - DNA, 15 bp, Homo sapiens
taatgcagtaaactc

SEQ ID NO: 339897 - DNA, 15 bp, Homo sapiens
ataatgcagtaaact

SEQ ID NO: 339898 - DNA, 15 bp, Homo sapiens
aataatgcagtaaac

SEQ ID NO: 339899 - DNA, 15 bp, Homo sapiens
gaataatgcagtaaa

SEQ ID NO: 339900 - DNA, 15 bp, Homo sapiens
agaataatgcagtaa

SEQ ID NO: 339901 - DNA, 15 bp, Homo sapiens
gagaataatgcagta

SEQ ID NO: 339902 - DNA, 15 bp, Homo sapiens
tgagaataatgcagt

SEQ ID NO: 339903 - DNA, 15 bp, Homo sapiens
gtgagaataatgcag

SEQ ID NO: 339904 - DNA, 15 bp, Homo sapiens
tgtgagaataatgca

SEQ ID NO: 339905 - DNA, 15 bp, Homo sapiens
atgtgagaataatgc

SEQ ID NO: 339906 - DNA, 15 bp, Homo sapiens
tatgtgagaataatg

SEQ ID NO: 339907 - DNA, 15 bp, Homo sapiens
gtatgtgagaataat

SEQ ID NO: 339908 - DNA, 15 bp, Homo sapiens
agtatgtgagaataa

SEQ ID NO: 339909 - DNA, 15 bp, Homo sapiens
aagtatgtgagaata

SEQ ID NO: 339910 - DNA, 15 bp, Homo sapiens
taagtatgtgagaat

SEQ ID NO: 339911 - DNA, 15 bp, Homo sapiens
ctaagtatgtgagaa

SEQ ID NO: 339912 - DNA, 15 bp, Homo sapiens
actaagtatgtgaga

SEQ ID NO: 339913 - DNA, 15 bp, Homo sapiens
gactaagtatgtgag

SEQ ID NO: 339914 - DNA, 15 bp, Homo sapiens
tgactaagtatgtga

SEQ ID NO: 339915 - DNA, 15 bp, Homo sapiens
ttgactaagtatgtg

SEQ ID NO: 339916 - DNA, 15 bp, Homo sapiens
cttgactaagtatgt

SEQ ID NO: 339917 - DNA, 15 bp, Homo sapiens
gcttgactaagtatg

SEQ ID NO: 339918 - DNA, 15 bp, Homo sapiens
tgcttgactaagtat

SEQ ID NO: 339919 - DNA, 15 bp, Homo sapiens
gtgcttgactaagta

SEQ ID NO: 339920 - DNA, 15 bp, Homo sapiens
ggtgcttgactaagt

SEQ ID NO: 339921 - DNA, 15 bp, Homo sapiens
tggtgcttgactaag

SEQ ID NO: 339922 - DNA, 15 bp, Homo sapiens
ttggtgcttgactaa

SEQ ID NO: 339923 - DNA, 15 bp, Homo sapiens
tttggtgcttgacta

SEQ ID NO: 339924 - DNA, 15 bp, Homo sapiens
atttggtgcttgact

SEQ ID NO: 339925 - DNA, 15 bp, Homo sapiens
aatttggtgcttgac

SEQ ID NO: 339926 - DNA, 15 bp, Homo sapiens
taatttggtgcttga

SEQ ID NO: 339927 - DNA, 15 bp, Homo sapiens
gtaatttggtgcttg

SEQ ID NO: 339928 - DNA, 15 bp, Homo sapiens
tgtaatttggtgctt

SEQ ID NO: 339929 - DNA, 15 bp, Homo sapiens
ttgtaatttggtgct

SEQ ID NO: 339930 - DNA, 15 bp, Homo sapiens
gttgtaatttggtgc

SEQ ID NO: 339931 - DNA, 15 bp, Homo sapiens
cgttgtaatttggtg

SEQ ID NO: 339932 - DNA, 15 bp, Homo sapiens
tcgttgtaatttggt

SEQ ID NO: 339933 - DNA, 15 bp, Homo sapiens
ttcgttgtaatttgg

SEQ ID NO: 339934 - DNA, 15 bp, Homo sapiens
tttcgttgtaatttg

SEQ ID NO: 339935 - DNA, 15 bp, Homo sapiens
ctttcgttgtaattt

SEQ ID NO: 339936 - DNA, 15 bp, Homo sapiens
cctttcgttgtaatt

SEQ ID NO: 339937 - DNA, 15 bp, Homo sapiens
ccctttcgttgtaat

SEQ ID NO: 339938 - DNA, 15 bp, Homo sapiens
gccctttcgttgtaa

SEQ ID NO: 339939 - DNA, 15 bp, Homo sapiens
tgccctttcgttgta

SEQ ID NO: 339940 - DNA, 15 bp, Homo sapiens
ctgccctttcgttgt

SEQ ID NO: 339941 - DNA, 15 bp, Homo sapiens
cctgccctttcgttg

SEQ ID NO: 339942 - DNA, 15 bp, Homo sapiens
gcctgccctttcgtt

SEQ ID NO: 339943 - DNA, 15 bp, Homo sapiens
agcctgccctttcgt

SEQ ID NO: 339944 - DNA, 15 bp, Homo sapiens
gagcctgccctttcg

SEQ ID NO: 339945 - DNA, 15 bp, Homo sapiens
agagcctgccctttc

SEQ ID NO: 339946 - DNA, 15 bp, Homo sapiens
aagagcctgcccttt

SEQ ID NO: 339947 - DNA, 15 bp, Homo sapiens
taagagcctgccctt

SEQ ID NO: 339948 - DNA, 15 bp, Homo sapiens
ataagagcctgccct

SEQ ID NO: 339949 - DNA, 15 bp, Homo sapiens
tataagagcctgccc

SEQ ID NO: 339950 - DNA, 15 bp, Homo sapiens
ttataagagcctgcc

SEQ ID NO: 339951 - DNA, 15 bp, Homo sapiens
attataagagcctgc

SEQ ID NO: 339952 - DNA, 15 bp, Homo sapiens
cattataagagcctg

SEQ ID NO: 339953 - DNA, 15 bp, Homo sapiens
ccattataagagcct

SEQ ID NO: 339954 - DNA, 15 bp, Homo sapiens
gccattataagagcc

SEQ ID NO: 339955 - DNA, 15 bp, Homo sapiens
tgccattataagagc

SEQ ID NO: 339956 - DNA, 15 bp, Homo sapiens
atgccattataagag

SEQ ID NO: 339957 - DNA, 15 bp, Homo sapiens
gatgccattataaga

SEQ ID NO: 339958 - DNA, 15 bp, Homo sapiens
agatgccattataag

SEQ ID NO: 339959 - DNA, 15 bp, Homo sapiens
tagatgccattataa

SEQ ID NO: 339960 - DNA, 15 bp, Homo sapiens
ttagatgccattata

SEQ ID NO: 339961 - DNA, 15 bp, Homo sapiens
attagatgccattat

SEQ ID NO: 339962 - DNA, 15 bp, Homo sapiens
cattagatgccatta

SEQ ID NO: 339963 - DNA, 15 bp, Homo sapiens
ccattagatgccatt

SEQ ID NO: 339964 - DNA, 15 bp, Homo sapiens
tccattagatgccat

SEQ ID NO: 339965 - DNA, 15 bp, Homo sapiens
ttccattagatgcca

SEQ ID NO: 339966 - DNA, 15 bp, Homo sapiens
gttccattagatgcc

SEQ ID NO: 339967 - DNA, 15 bp, Homo sapiens
tgttccattagatgc

SEQ ID NO: 339968 - DNA, 15 bp, Homo sapiens
atgttccattagatg

SEQ ID NO: 339969 - DNA, 15 bp, Homo sapiens
aatgttccattagat

SEQ ID NO: 339970 - DNA, 15 bp, Homo sapiens
caatgttccattaga

SEQ ID NO: 339971 - DNA, 15 bp, Homo sapiens
gcaatgttccattag

SEQ ID NO: 339972 - DNA, 15 bp, Homo sapiens
tgcaatgttccatta

SEQ ID NO: 339973 - DNA, 15 bp, Homo sapiens
atgcaatgttccatt

SEQ ID NO: 339974 - DNA, 15 bp, Homo sapiens
tatgcaatgttccat

SEQ ID NO: 339975 - DNA, 15 bp, Homo sapiens
ttatgcaatgttcca

SEQ ID NO: 339976 - DNA, 15 bp, Homo sapiens
cttatgcaatgttcc

SEQ ID NO: 339977 - DNA, 15 bp, Homo sapiens
gcttatgcaatgttc

SEQ ID NO: 339978 - DNA, 15 bp, Homo sapiens
ggcttatgcaatgtt

SEQ ID NO: 339979 - DNA, 15 bp, Homo sapiens
tggcttatgcaatgt

SEQ ID NO: 339980 - DNA, 15 bp, Homo sapiens
atggcttatgcaatg

SEQ ID NO: 339981 - DNA, 15 bp, Homo sapiens
gatggcttatgcaat

SEQ ID NO: 339982 - DNA, 15 bp, Homo sapiens
tgatggcttatgcaa

SEQ ID NO: 339983 - DNA, 15 bp, Homo sapiens
atgatggcttatgca

SEQ ID NO: 339984 - DNA, 15 bp, Homo sapiens
gatgatggcttatgc

SEQ ID NO: 339985 - DNA, 15 bp, Homo sapiens
tgatgatggcttatg

SEQ ID NO: 339986 - DNA, 15 bp, Homo sapiens
gtgatgatggcttat

SEQ ID NO: 339987 - DNA, 15 bp, Homo sapiens
agtgatgatggctta

SEQ ID NO: 339988 - DNA, 15 bp, Homo sapiens
cagtgatgatggctt

SEQ ID NO: 339989 - DNA, 15 bp, Homo sapiens
gcagtgatgatggct

SEQ ID NO: 339990 - DNA, 15 bp, Homo sapiens
ggcagtgatgatggc

SEQ ID NO: 339991 - DNA, 15 bp, Homo sapiens
aggcagtgatgatgg

SEQ ID NO: 339992 - DNA, 15 bp, Homo sapiens
gaggcagtgatgatg

SEQ ID NO: 339993 - DNA, 15 bp, Homo sapiens
ggaggcagtgatgat

SEQ ID NO: 339994 - DNA, 15 bp, Homo sapiens
aggaggcagtgatga

SEQ ID NO: 339995 - DNA, 15 bp, Homo sapiens
taggaggcagtgatg

SEQ ID NO: 339996 - DNA, 15 bp, Homo sapiens
ataggaggcagtgat

SEQ ID NO: 339997 - DNA, 15 bp, Homo sapiens
aataggaggcagtga

SEQ ID NO: 339998 - DNA, 15 bp, Homo sapiens
taataggaggcagtg

SEQ ID NO: 339999 - DNA, 15 bp, Homo sapiens
ataataggaggcagt

SEQ ID NO: 340000 - DNA, 15 bp, Homo sapiens
cataataggaggcag

SEQ ID NO: 340001 - DNA, 15 bp, Homo sapiens
tcataataggaggca

SEQ ID NO: 340002 - DNA, 15 bp, Homo sapiens
ctcataataggaggc

SEQ ID NO: 340003 - DNA, 15 bp, Homo sapiens
gctcataataggagg

SEQ ID NO: 340004 - DNA, 15 bp, Homo sapiens
ggctcataataggag

SEQ ID NO: 340005 - DNA, 15 bp, Homo sapiens
tggctcataatagga

SEQ ID NO: 340006 - DNA, 15 bp, Homo sapiens
gtggctcataatagg

SEQ ID NO: 340007 - DNA, 15 bp, Homo sapiens
ggtggctcataatag

SEQ ID NO: 340008 - DNA, 15 bp, Homo sapiens
aggtggctcataata

SEQ ID NO: 340009 - DNA, 15 bp, Homo sapiens
gaggtggctcataat

SEQ ID NO: 340010 - DNA, 15 bp, Homo sapiens
ggaggtggctcataa

SEQ ID NO: 340011 - DNA, 15 bp, Homo sapiens
tggaggtggctcata

SEQ ID NO: 340012 - DNA, 15 bp, Homo sapiens
ctggaggtggctcat

SEQ ID NO: 340013 - DNA, 15 bp, Homo sapiens
gctggaggtggctca

SEQ ID NO: 340014 - DNA, 15 bp, Homo sapiens
ggctggaggtggctc

SEQ ID NO: 340015 - DNA, 15 bp, Homo sapiens
tggctggaggtggct

SEQ ID NO: 340016 - DNA, 15 bp, Homo sapiens
ttggctggaggtggc

SEQ ID NO: 340017 - DNA, 15 bp, Homo sapiens
attggctggaggtgg

SEQ ID NO: 340018 - DNA, 15 bp, Homo sapiens
cattggctggaggtg

SEQ ID NO: 340019 - DNA, 15 bp, Homo sapiens
tcattggctggaggt

SEQ ID NO: 340020 - DNA, 15 bp, Homo sapiens
ctcattggctggagg

SEQ ID NO: 340021 - DNA, 15 bp, Homo sapiens
gctcattggctggag

SEQ ID NO: 340022 - DNA, 15 bp, Homo sapiens
agctcattggctgga

SEQ ID NO: 340023 - DNA, 15 bp, Homo sapiens
aagctcattggctgg

SEQ ID NO: 340024 - DNA, 15 bp, Homo sapiens
aaagctcattggctg

SEQ ID NO: 340025 - DNA, 15 bp, Homo sapiens
gaaagctcattggct

SEQ ID NO: 340026 - DNA, 15 bp, Homo sapiens
agaaagctcattggc

SEQ ID NO: 340027 - DNA, 15 bp, Homo sapiens
cagaaagctcattgg

SEQ ID NO: 340028 - DNA, 15 bp, Homo sapiens
gcagaaagctcattg

SEQ ID NO: 340029 - DNA, 15 bp, Homo sapiens
ggcagaaagctcatt

SEQ ID NO: 340030 - DNA, 15 bp, Homo sapiens
aggcagaaagctcat

SEQ ID NO: 340031 - DNA, 15 bp, Homo sapiens
aaggcagaaagctca

SEQ ID NO: 340032 - DNA, 15 bp, Homo sapiens
taaggcagaaagctc

SEQ ID NO: 340033 - DNA, 15 bp, Homo sapiens
ctaaggcagaaagct

SEQ ID NO: 340034 - DNA, 15 bp, Homo sapiens
actaaggcagaaagc

SEQ ID NO: 340035 - DNA, 15 bp, Homo sapiens
cactaaggcagaaag

SEQ ID NO: 340036 - DNA, 15 bp, Homo sapiens
ccactaaggcagaaa

SEQ ID NO: 340037 - DNA, 15 bp, Homo sapiens
tccactaaggcagaa

SEQ ID NO: 340038 - DNA, 15 bp, Homo sapiens
ttccactaaggcaga

SEQ ID NO: 340039 - DNA, 15 bp, Homo sapiens
attccactaaggcag

SEQ ID NO: 340040 - DNA, 15 bp, Homo sapiens
cattccactaaggca

SEQ ID NO: 340041 - DNA, 15 bp, Homo sapiens
acattccactaaggc

SEQ ID NO: 340042 - DNA, 15 bp, Homo sapiens
cacattccactaagg

SEQ ID NO: 340043 - DNA, 15 bp, Homo sapiens
gcacattccactaag

SEQ ID NO: 340044 - DNA, 15 bp, Homo sapiens
tgcacattccactaa

SEQ ID NO: 340045 - DNA, 15 bp, Homo sapiens
gtgcacattccacta

SEQ ID NO: 340046 - DNA, 15 bp, Homo sapiens
tgtgcacattccact

SEQ ID NO: 340047 - DNA, 15 bp, Homo sapiens
ctgtgcacattccac

SEQ ID NO: 340048 - DNA, 15 bp, Homo sapiens
tctgtgcacattcca

SEQ ID NO: 340049 - DNA, 15 bp, Homo sapiens
ctctgtgcacattcc

SEQ ID NO: 340050 - DNA, 15 bp, Homo sapiens
gctctgtgcacattc

SEQ ID NO: 340051 - DNA, 15 bp, Homo sapiens
tgctctgtgcacatt

SEQ ID NO: 340052 - DNA, 15 bp, Homo sapiens
ttgctctgtgcacat

SEQ ID NO: 340053 - DNA, 15 bp, Homo sapiens
attgctctgtgcaca

SEQ ID NO: 340054 - DNA, 15 bp, Homo sapiens
aattgctctgtgcac

SEQ ID NO: 340055 - DNA, 15 bp, Homo sapiens
taattgctctgtgca

SEQ ID NO: 340056 - DNA, 15 bp, Homo sapiens
ataattgctctgtgc

SEQ ID NO: 340057 - DNA, 15 bp, Homo sapiens
cataattgctctgtg

SEQ ID NO: 340058 - DNA, 15 bp, Homo sapiens
tcataattgctctgt

SEQ ID NO: 340059 - DNA, 15 bp, Homo sapiens
ttcataattgctctg

SEQ ID NO: 340060 - DNA, 15 bp, Homo sapiens
cttcataattgctct

SEQ ID NO: 340061 - DNA, 15 bp, Homo sapiens
acttcataattgctc

SEQ ID NO: 340062 - DNA, 15 bp, Homo sapiens
cacttcataattgct

SEQ ID NO: 340063 - DNA, 15 bp, Homo sapiens
gcacttcataattgc

SEQ ID NO: 340064 - DNA, 15 bp, Homo sapiens
tgcacttcataattg

SEQ ID NO: 340065 - DNA, 15 bp, Homo sapiens
ttgcacttcataatt

SEQ ID NO: 340066 - DNA, 15 bp, Homo sapiens
cttgcacttcataat

SEQ ID NO: 340067 - DNA, 15 bp, Homo sapiens
ccttgcacttcataa

SEQ ID NO: 340068 - DNA, 15 bp, Homo sapiens
cccttgcacttcata

SEQ ID NO: 340069 - DNA, 15 bp, Homo sapiens
tcccttgcacttcat

SEQ ID NO: 340070 - DNA, 15 bp, Homo sapiens
gtcccttgcacttca

SEQ ID NO: 340071 - DNA, 15 bp, Homo sapiens
tgtcccttgcacttc

SEQ ID NO: 340072 - DNA, 15 bp, Homo sapiens
atgtcccttgcactt

SEQ ID NO: 340073 - DNA, 15 bp, Homo sapiens
catgtcccttgcact

SEQ ID NO: 340074 - DNA, 15 bp, Homo sapiens
ccatgtcccttgcac

SEQ ID NO: 340075 - DNA, 15 bp, Homo sapiens
gccatgtcccttgca

SEQ ID NO: 340076 - DNA, 15 bp, Homo sapiens
ggccatgtcccttgc

SEQ ID NO: 340077 - DNA, 15 bp, Homo sapiens
tggccatgtcccttg

SEQ ID NO: 340078 - DNA, 15 bp, Homo sapiens
atggccatgtccctt

SEQ ID NO: 340079 - DNA, 15 bp, Homo sapiens
aatggccatgtccct

SEQ ID NO: 340080 - DNA, 15 bp, Homo sapiens
gaatggccatgtccc

SEQ ID NO: 340081 - DNA, 15 bp, Homo sapiens
agaatggccatgtcc

SEQ ID NO: 340082 - DNA, 15 bp, Homo sapiens
tagaatggccatgtc

SEQ ID NO: 340083 - DNA, 15 bp, Homo sapiens
ttagaatggccatgt

SEQ ID NO: 340084 - DNA, 15 bp, Homo sapiens
tttagaatggccatg

SEQ ID NO: 340085 - DNA, 15 bp, Homo sapiens
atttagaatggccat

SEQ ID NO: 340086 - DNA, 15 bp, Homo sapiens
aatttagaatggcca

SEQ ID NO: 340087 - DNA, 15 bp, Homo sapiens
aaatttagaatggcc

SEQ ID NO: 340088 - DNA, 15 bp, Homo sapiens
aaaatttagaatggc

SEQ ID NO: 340089 - DNA, 15 bp, Homo sapiens
taaaatttagaatgg

SEQ ID NO: 340090 - DNA, 15 bp, Homo sapiens
gtaaaatttagaatg

SEQ ID NO: 340091 - DNA, 15 bp, Homo sapiens
ggtaaaatttagaat

SEQ ID NO: 340092 - DNA, 15 bp, Homo sapiens
gggtaaaatttagaa

SEQ ID NO: 340093 - DNA, 15 bp, Homo sapiens
tgggtaaaatttaga

SEQ ID NO: 340094 - DNA, 15 bp, Homo sapiens
ctgggtaaaatttag

SEQ ID NO: 340095 - DNA, 15 bp, Homo sapiens
cctgggtaaaattta

SEQ ID NO: 340096 - DNA, 15 bp, Homo sapiens
tcctgggtaaaattt

SEQ ID NO: 340097 - DNA, 15 bp, Homo sapiens
ttcctgggtaaaatt

SEQ ID NO: 340098 - DNA, 15 bp, Homo sapiens
tttcctgggtaaaat

SEQ ID NO: 340099 - DNA, 15 bp, Homo sapiens
atttcctgggtaaaa

SEQ ID NO: 340100 - DNA, 15 bp, Homo sapiens
aatttcctgggtaaa

SEQ ID NO: 340101 - DNA, 15 bp, Homo sapiens
taatttcctgggtaa

SEQ ID NO: 340102 - DNA, 15 bp, Homo sapiens
gtaatttcctgggta

SEQ ID NO: 340103 - DNA, 15 bp, Homo sapiens
ggtaatttcctgggt

SEQ ID NO: 340104 - DNA, 15 bp, Homo sapiens
tggtaatttcctggg

SEQ ID NO: 340105 - DNA, 15 bp, Homo sapiens
atggtaatttcctgg

SEQ ID NO: 340106 - DNA, 15 bp, Homo sapiens
catggtaatttcctg

SEQ ID NO: 340107 - DNA, 15 bp, Homo sapiens
gcatggtaatttcct

SEQ ID NO: 340108 - DNA, 15 bp, Homo sapiens
agcatggtaatttcc

SEQ ID NO: 340109 - DNA, 15 bp, Homo sapiens
cagcatggtaatttc

SEQ ID NO: 340110 - DNA, 15 bp, Homo sapiens
gcagcatggtaattt

SEQ ID NO: 340111 - DNA, 15 bp, Homo sapiens
tgcagcatggtaatt

SEQ ID NO: 340112 - DNA, 15 bp, Homo sapiens
atgcagcatggtaat

SEQ ID NO: 340113 - DNA, 15 bp, Homo sapiens
catgcagcatggtaa

SEQ ID NO: 340114 - DNA, 15 bp, Homo sapiens
acatgcagcatggta

SEQ ID NO: 340115 - DNA, 15 bp, Homo sapiens
aacatgcagcatggt

SEQ ID NO: 340116 - DNA, 15 bp, Homo sapiens
gaacatgcagcatgg

SEQ ID NO: 340117 - DNA, 15 bp, Homo sapiens
tgaacatgcagcatg

SEQ ID NO: 340118 - DNA, 15 bp, Homo sapiens
gtgaacatgcagcat

SEQ ID NO: 340119 - DNA, 15 bp, Homo sapiens
ggtgaacatgcagca

SEQ ID NO: 340120 - DNA, 15 bp, Homo sapiens
tggtgaacatgcagc

SEQ ID NO: 340121 - DNA, 15 bp, Homo sapiens
gtggtgaacatgcag

SEQ ID NO: 340122 - DNA, 15 bp, Homo sapiens
ggtggtgaacatgca

SEQ ID NO: 340123 - DNA, 15 bp, Homo sapiens
aggtggtgaacatgc

SEQ ID NO: 340124 - DNA, 15 bp, Homo sapiens
caggtggtgaacatg

SEQ ID NO: 340125 - DNA, 15 bp, Homo sapiens
gcaggtggtgaacat

SEQ ID NO: 340126 - DNA, 15 bp, Homo sapiens
ggcaggtggtgaaca

SEQ ID NO: 340127 - DNA, 15 bp, Homo sapiens
gggcaggtggtgaac

SEQ ID NO: 340128 - DNA, 15 bp, Homo sapiens
tgggcaggtggtgaa

SEQ ID NO: 340129 - DNA, 15 bp, Homo sapiens
ttgggcaggtggtga

SEQ ID NO: 340130 - DNA, 15 bp, Homo sapiens
cttgggcaggtggtg

SEQ ID NO: 340131 - DNA, 15 bp, Homo sapiens
acttgggcaggtggt

SEQ ID NO: 340132 - DNA, 15 bp, Homo sapiens
gacttgggcaggtgg

SEQ ID NO: 340133 - DNA, 15 bp, Homo sapiens
agacttgggcaggtg

SEQ ID NO: 340134 - DNA, 15 bp, Homo sapiens
gagacttgggcaggt

SEQ ID NO: 340135 - DNA, 15 bp, Homo sapiens
tgagacttgggcagg

SEQ ID NO: 340136 - DNA, 15 bp, Homo sapiens
ctgagacttgggcag

SEQ ID NO: 340137 - DNA, 15 bp, Homo sapiens
tctgagacttgggca

SEQ ID NO: 340138 - DNA, 15 bp, Homo sapiens
ctctgagacttgggc

SEQ ID NO: 340139 - DNA, 15 bp, Homo sapiens
gctctgagacttggg

SEQ ID NO: 340140 - DNA, 15 bp, Homo sapiens
cgctctgagacttgg

SEQ ID NO: 340141 - DNA, 15 bp, Homo sapiens
gcgctctgagacttg

SEQ ID NO: 340142 - DNA, 15 bp, Homo sapiens
tgcgctctgagactt

SEQ ID NO: 340143 - DNA, 15 bp, Homo sapiens
ctgcgctctgagact

SEQ ID NO: 340144 - DNA, 15 bp, Homo sapiens
gctgcgctctgagac

SEQ ID NO: 340145 - DNA, 15 bp, Homo sapiens
agctgcgctctgaga

SEQ ID NO: 340146 - DNA, 15 bp, Homo sapiens
tagctgcgctctgag

SEQ ID NO: 340147 - DNA, 15 bp, Homo sapiens
ctagctgcgctctga

SEQ ID NO: 340148 - DNA, 15 bp, Homo sapiens
tctagctgcgctctg

SEQ ID NO: 340149 - DNA, 15 bp, Homo sapiens
ctctagctgcgctct

SEQ ID NO: 340150 - DNA, 15 bp, Homo sapiens
tctctagctgcgctc

SEQ ID NO: 340151 - DNA, 15 bp, Homo sapiens
gtctctagctgcgct

SEQ ID NO: 340152 - DNA, 15 bp, Homo sapiens
agtctctagctgcgc

SEQ ID NO: 340153 - DNA, 15 bp, Homo sapiens
gagtctctagctgcg

SEQ ID NO: 340154 - DNA, 15 bp, Homo sapiens
tgagtctctagctgc

SEQ ID NO: 340155 - DNA, 15 bp, Homo sapiens
ctgagtctctagctg

SEQ ID NO: 340156 - DNA, 15 bp, Homo sapiens
tctgagtctctagct

SEQ ID NO: 340157 - DNA, 15 bp, Homo sapiens
atctgagtctctagc

SEQ ID NO: 340158 - DNA, 15 bp, Homo sapiens
catctgagtctctag

SEQ ID NO: 340159 - DNA, 15 bp, Homo sapiens
gcatctgagtctcta

SEQ ID NO: 340160 - DNA, 15 bp, Homo sapiens
agcatctgagtctct

SEQ ID NO: 340161 - DNA, 15 bp, Homo sapiens
cagcatctgagtctc

SEQ ID NO: 340162 - DNA, 15 bp, Homo sapiens
acagcatctgagtct

SEQ ID NO: 340163 - DNA, 15 bp, Homo sapiens
gacagcatctgagtc

SEQ ID NO: 340164 - DNA, 15 bp, Homo sapiens
tgacagcatctgagt

SEQ ID NO: 340165 - DNA, 15 bp, Homo sapiens
gtgacagcatctgag

SEQ ID NO: 340166 - DNA, 15 bp, Homo sapiens
agtgacagcatctga

SEQ ID NO: 340167 - DNA, 15 bp, Homo sapiens
tagtgacagcatctg

SEQ ID NO: 340168 - DNA, 15 bp, Homo sapiens
atagtgacagcatct

SEQ ID NO: 340169 - DNA, 15 bp, Homo sapiens
catagtgacagcatc

SEQ ID NO: 340170 - DNA, 15 bp, Homo sapiens
tcatagtgacagcat

SEQ ID NO: 340171 - DNA, 15 bp, Homo sapiens
ctcatagtgacagca

SEQ ID NO: 340172 - DNA, 15 bp, Homo sapiens
gctcatagtgacagc

SEQ ID NO: 340173 - DNA, 15 bp, Homo sapiens
ggctcatagtgacag

SEQ ID NO: 340174 - DNA, 15 bp, Homo sapiens
aggctcatagtgaca

SEQ ID NO: 340175 - DNA, 15 bp, Homo sapiens
caggctcatagtgac

SEQ ID NO: 340176 - DNA, 15 bp, Homo sapiens
ccaggctcatagtga

SEQ ID NO: 340177 - DNA, 15 bp, Homo sapiens
cccaggctcatagtg

SEQ ID NO: 340178 - DNA, 15 bp, Homo sapiens
ccccaggctcatagt

SEQ ID NO: 340179 - DNA, 15 bp, Homo sapiens
cccccaggctcatag

SEQ ID NO: 340180 - DNA, 15 bp, Homo sapiens
ccccccaggctcata

SEQ ID NO: 340181 - DNA, 15 bp, Homo sapiens
gccccccaggctcat

SEQ ID NO: 340182 - DNA, 15 bp, Homo sapiens
tgccccccaggctca

SEQ ID NO: 340183 - DNA, 15 bp, Homo sapiens
gtgccccccaggctc

SEQ ID NO: 340184 - DNA, 15 bp, Homo sapiens
tgtgccccccaggct

SEQ ID NO: 340185 - DNA, 15 bp, Homo sapiens
ctgtgccccccaggc

SEQ ID NO: 340186 - DNA, 15 bp, Homo sapiens
cctgtgccccccagg

SEQ ID NO: 340187 - DNA, 15 bp, Homo sapiens
ccctgtgccccccag

SEQ ID NO: 340188 - DNA, 15 bp, Homo sapiens
tccctgtgcccccca

SEQ ID NO: 340189 - DNA, 15 bp, Homo sapiens
gtccctgtgcccccc

SEQ ID NO: 340190 - DNA, 15 bp, Homo sapiens
tgtccctgtgccccc

SEQ ID NO: 340191 - DNA, 15 bp, Homo sapiens
ctgtccctgtgcccc

SEQ ID NO: 340192 - DNA, 15 bp, Homo sapiens
cctgtccctgtgccc

SEQ ID NO: 340193 - DNA, 15 bp, Homo sapiens
tcctgtccctgtgcc

SEQ ID NO: 340194 - DNA, 15 bp, Homo sapiens
ctcctgtccctgtgc

SEQ ID NO: 340195 - DNA, 15 bp, Homo sapiens
actcctgtccctgtg

SEQ ID NO: 340196 - DNA, 15 bp, Homo sapiens
gactcctgtccctgt

SEQ ID NO: 340197 - DNA, 15 bp, Homo sapiens
cgactcctgtccctg

SEQ ID NO: 340198 - DNA, 15 bp, Homo sapiens
tcgactcctgtccct

SEQ ID NO: 340199 - DNA, 15 bp, Homo sapiens
ctcgactcctgtccc

SEQ ID NO: 340200 - DNA, 15 bp, Homo sapiens
gctcgactcctgtcc

SEQ ID NO: 340201 - DNA, 15 bp, Homo sapiens
ggctcgactcctgtc

SEQ ID NO: 340202 - DNA, 15 bp, Homo sapiens
aggctcgactcctgt

SEQ ID NO: 340203 - DNA, 15 bp, Homo sapiens
gaggctcgactcctg

SEQ ID NO: 340204 - DNA, 15 bp, Homo sapiens
agaggctcgactcct

SEQ ID NO: 340205 - DNA, 15 bp, Homo sapiens
aagaggctcgactcc

SEQ ID NO: 340206 - DNA, 15 bp, Homo sapiens
caagaggctcgactc

SEQ ID NO: 340207 - DNA, 15 bp, Homo sapiens
gcaagaggctcgact

SEQ ID NO: 340208 - DNA, 15 bp, Homo sapiens
agcaagaggctcgac

SEQ ID NO: 340209 - DNA, 15 bp, Homo sapiens
tagcaagaggctcga

SEQ ID NO: 340210 - DNA, 15 bp, Homo sapiens
gtagcaagaggctcg

SEQ ID NO: 340211 - DNA, 15 bp, Homo sapiens
tgtagcaagaggctc

SEQ ID NO: 340212 - DNA, 15 bp, Homo sapiens
atgtagcaagaggct

SEQ ID NO: 340213 - DNA, 15 bp, Homo sapiens
tatgtagcaagaggc

SEQ ID NO: 340214 - DNA, 15 bp, Homo sapiens
gtatgtagcaagagg

SEQ ID NO: 340215 - DNA, 15 bp, Homo sapiens
tgtatgtagcaagag

SEQ ID NO: 340216 - DNA, 15 bp, Homo sapiens
ctgtatgtagcaaga

SEQ ID NO: 340217 - DNA, 15 bp, Homo sapiens
actgtatgtagcaag

SEQ ID NO: 340218 - DNA, 15 bp, Homo sapiens
gactgtatgtagcaa

SEQ ID NO: 340219 - DNA, 15 bp, Homo sapiens
agactgtatgtagca

SEQ ID NO: 340220 - DNA, 15 bp, Homo sapiens
gagactgtatgtagc

SEQ ID NO: 340221 - DNA, 15 bp, Homo sapiens
agagactgtatgtag

SEQ ID NO: 340222 - DNA, 15 bp, Homo sapiens
aagagactgtatgta

SEQ ID NO: 340223 - DNA, 15 bp, Homo sapiens
gaagagactgtatgt

SEQ ID NO: 340224 - DNA, 15 bp, Homo sapiens
tgaagagactgtatg

SEQ ID NO: 340225 - DNA, 15 bp, Homo sapiens
gtgaagagactgtat

SEQ ID NO: 340226 - DNA, 15 bp, Homo sapiens
agtgaagagactgta

SEQ ID NO: 340227 - DNA, 15 bp, Homo sapiens
tagtgaagagactgt

SEQ ID NO: 340228 - DNA, 15 bp, Homo sapiens
ctagtgaagagactg

SEQ ID NO: 340229 - DNA, 15 bp, Homo sapiens
tctagtgaagagact

SEQ ID NO: 340230 - DNA, 15 bp, Homo sapiens
ttctagtgaagagac

SEQ ID NO: 340231 - DNA, 15 bp, Homo sapiens
cttctagtgaagaga

SEQ ID NO: 340232 - DNA, 15 bp, Homo sapiens
gcttctagtgaagag

SEQ ID NO: 340233 - DNA, 15 bp, Homo sapiens
ggcttctagtgaaga

SEQ ID NO: 340234 - DNA, 15 bp, Homo sapiens
tggcttctagtgaag

SEQ ID NO: 340235 - DNA, 15 bp, Homo sapiens
ctggcttctagtgaa

SEQ ID NO: 340236 - DNA, 15 bp, Homo sapiens
actggcttctagtga

SEQ ID NO: 340237 - DNA, 15 bp, Homo sapiens
cactggcttctagtg

SEQ ID NO: 340238 - DNA, 15 bp, Homo sapiens
ccactggcttctagt

SEQ ID NO: 340239 - DNA, 15 bp, Homo sapiens
accactggcttctag

SEQ ID NO: 340240 - DNA, 15 bp, Homo sapiens
aaccactggcttcta

SEQ ID NO: 340241 - DNA, 15 bp, Homo sapiens
aaaccactggcttct

SEQ ID NO: 340242 - DNA, 15 bp, Homo sapiens
aaaaccactggcttc

SEQ ID NO: 340243 - DNA, 15 bp, Homo sapiens
taaaaccactggctt

SEQ ID NO: 340244 - DNA, 15 bp, Homo sapiens
ataaaaccactggct

SEQ ID NO: 340245 - DNA, 15 bp, Homo sapiens
gataaaaccactggc

SEQ ID NO: 340246 - DNA, 15 bp, Homo sapiens
agataaaaccactgg

SEQ ID NO: 340247 - DNA, 15 bp, Homo sapiens
gagataaaaccactg

SEQ ID NO: 340248 - DNA, 15 bp, Homo sapiens
ggagataaaaccact

SEQ ID NO: 340249 - DNA, 15 bp, Homo sapiens
tggagataaaaccac

SEQ ID NO: 340250 - DNA, 15 bp, Homo sapiens
gtggagataaaacca

SEQ ID NO: 340251 - DNA, 15 bp, Homo sapiens
tgtggagataaaacc

SEQ ID NO: 340252 - DNA, 15 bp, Homo sapiens
ctgtggagataaaac

SEQ ID NO: 340253 - DNA, 15 bp, Homo sapiens
actgtggagataaaa

SEQ ID NO: 340254 - DNA, 15 bp, Homo sapiens
gactgtggagataaa

SEQ ID NO: 340255 - DNA, 15 bp, Homo sapiens
tgactgtggagataa

SEQ ID NO: 340256 - DNA, 15 bp, Homo sapiens
ctgactgtggagata

SEQ ID NO: 340257 - DNA, 15 bp, Homo sapiens
actgactgtggagat

SEQ ID NO: 340258 - DNA, 15 bp, Homo sapiens
gactgactgtggaga

SEQ ID NO: 340259 - DNA, 15 bp, Homo sapiens
ggactgactgtggag

SEQ ID NO: 340260 - DNA, 15 bp, Homo sapiens
gggactgactgtgga

SEQ ID NO: 340261 - DNA, 15 bp, Homo sapiens
agggactgactgtgg

SEQ ID NO: 340262 - DNA, 15 bp, Homo sapiens
cagggactgactgtg

SEQ ID NO: 340263 - DNA, 15 bp, Homo sapiens
ccagggactgactgt

SEQ ID NO: 340264 - DNA, 15 bp, Homo sapiens
gccagggactgactg

SEQ ID NO: 340265 - DNA, 15 bp, Homo sapiens
agccagggactgact

SEQ ID NO: 340266 - DNA, 15 bp, Homo sapiens
aagccagggactgac

SEQ ID NO: 340267 - DNA, 15 bp, Homo sapiens
aaagccagggactga

SEQ ID NO: 340268 - DNA, 15 bp, Homo sapiens
aaaagccagggactg

SEQ ID NO: 340269 - DNA, 15 bp, Homo sapiens
aaaaagccagggact

SEQ ID NO: 340270 - DNA, 15 bp, Homo sapiens
caaaaagccagggac

SEQ ID NO: 340271 - DNA, 15 bp, Homo sapiens
acaaaaagccaggga

SEQ ID NO: 340272 - DNA, 15 bp, Homo sapiens
gacaaaaagccaggg

SEQ ID NO: 340273 - DNA, 15 bp, Homo sapiens
agacaaaaagccagg

SEQ ID NO: 340274 - DNA, 15 bp, Homo sapiens
aagacaaaaagccag

SEQ ID NO: 340275 - DNA, 15 bp, Homo sapiens
caagacaaaaagcca

SEQ ID NO: 340276 - DNA, 15 bp, Homo sapiens
acaagacaaaaagcc

SEQ ID NO: 340277 - DNA, 15 bp, Homo sapiens
cacaagacaaaaagc

SEQ ID NO: 340278 - DNA, 15 bp, Homo sapiens
ccacaagacaaaaag

SEQ ID NO: 340279 - DNA, 15 bp, Homo sapiens
gccacaagacaaaaa

SEQ ID NO: 340280 - DNA, 15 bp, Homo sapiens
agccacaagacaaaa

SEQ ID NO: 340281 - DNA, 15 bp, Homo sapiens
cagccacaagacaaa

SEQ ID NO: 340282 - DNA, 15 bp, Homo sapiens
tcagccacaagacaa

SEQ ID NO: 340283 - DNA, 15 bp, Homo sapiens
gtcagccacaagaca

SEQ ID NO: 340284 - DNA, 15 bp, Homo sapiens
agtcagccacaagac

SEQ ID NO: 340285 - DNA, 15 bp, Homo sapiens
gagtcagccacaaga

SEQ ID NO: 340286 - DNA, 15 bp, Homo sapiens
agagtcagccacaag

SEQ ID NO: 340287 - DNA, 15 bp, Homo sapiens
aagagtcagccacaa

SEQ ID NO: 340288 - DNA, 15 bp, Homo sapiens
caagagtcagccaca

SEQ ID NO: 340289 - DNA, 15 bp, Homo sapiens
gcaagagtcagccac

SEQ ID NO: 340290 - DNA, 15 bp, Homo sapiens
tgcaagagtcagcca

SEQ ID NO: 340291 - DNA, 15 bp, Homo sapiens
atgcaagagtcagcc

SEQ ID NO: 340292 - DNA, 15 bp, Homo sapiens
gatgcaagagtcagc

SEQ ID NO: 340293 - DNA, 15 bp, Homo sapiens
tgatgcaagagtcag

SEQ ID NO: 340294 - DNA, 15 bp, Homo sapiens
ttgatgcaagagtca

SEQ ID NO: 340295 - DNA, 15 bp, Homo sapiens
tttgatgcaagagtc

SEQ ID NO: 340296 - DNA, 15 bp, Homo sapiens
atttgatgcaagagt

SEQ ID NO: 340297 - DNA, 15 bp, Homo sapiens
catttgatgcaagag

SEQ ID NO: 340298 - DNA, 15 bp, Homo sapiens
gcatttgatgcaaga

SEQ ID NO: 340299 - DNA, 15 bp, Homo sapiens
agcatttgatgcaag

SEQ ID NO: 340300 - DNA, 15 bp, Homo sapiens
gagcatttgatgcaa

SEQ ID NO: 340301 - DNA, 15 bp, Homo sapiens
tgagcatttgatgca

SEQ ID NO: 340302 - DNA, 15 bp, Homo sapiens
gtgagcatttgatgc

SEQ ID NO: 340303 - DNA, 15 bp, Homo sapiens
agtgagcatttgatg

SEQ ID NO: 340304 - DNA, 15 bp, Homo sapiens
gagtgagcatttgat

SEQ ID NO: 340305 - DNA, 15 bp, Homo sapiens
ggagtgagcatttga

SEQ ID NO: 340306 - DNA, 15 bp, Homo sapiens
aggagtgagcatttg

SEQ ID NO: 340307 - DNA, 15 bp, Homo sapiens
caggagtgagcattt

SEQ ID NO: 340308 - DNA, 15 bp, Homo sapiens
tcaggagtgagcatt

SEQ ID NO: 340309 - DNA, 15 bp, Homo sapiens
gtcaggagtgagcat

SEQ ID NO: 340310 - DNA, 15 bp, Homo sapiens
agtcaggagtgagca

SEQ ID NO: 340311 - DNA, 15 bp, Homo sapiens
cagtcaggagtgagc

SEQ ID NO: 340312 - DNA, 15 bp, Homo sapiens
ccagtcaggagtgag

SEQ ID NO: 340313 - DNA, 15 bp, Homo sapiens
cccagtcaggagtga

SEQ ID NO: 340314 - DNA, 15 bp, Homo sapiens
gcccagtcaggagtg

SEQ ID NO: 340315 - DNA, 15 bp, Homo sapiens
tgcccagtcaggagt

SEQ ID NO: 340316 - DNA, 15 bp, Homo sapiens
atgcccagtcaggag

SEQ ID NO: 340317 - DNA, 15 bp, Homo sapiens
aatgcccagtcagga

SEQ ID NO: 340318 - DNA, 15 bp, Homo sapiens
taatgcccagtcagg

SEQ ID NO: 340319 - DNA, 15 bp, Homo sapiens
ataatgcccagtcag

SEQ ID NO: 340320 - DNA, 15 bp, Homo sapiens
cataatgcccagtca

SEQ ID NO: 340321 - DNA, 15 bp, Homo sapiens
acataatgcccagtc

SEQ ID NO: 340322 - DNA, 15 bp, Homo sapiens
cacataatgcccagt

SEQ ID NO: 340323 - DNA, 15 bp, Homo sapiens
ccacataatgcccag

SEQ ID NO: 340324 - DNA, 15 bp, Homo sapiens
gccacataatgccca

SEQ ID NO: 340325 - DNA, 15 bp, Homo sapiens
tgccacataatgccc

SEQ ID NO: 340326 - DNA, 15 bp, Homo sapiens
gtgccacataatgcc

SEQ ID NO: 340327 - DNA, 15 bp, Homo sapiens
tgtgccacataatgc

SEQ ID NO: 340328 - DNA, 15 bp, Homo sapiens
atgtgccacataatg

SEQ ID NO: 340329 - DNA, 15 bp, Homo sapiens
tatgtgccacataat

SEQ ID NO: 340330 - DNA, 15 bp, Homo sapiens
atatgtgccacataa

SEQ ID NO: 340331 - DNA, 15 bp, Homo sapiens
tatatgtgccacata

SEQ ID NO: 340332 - DNA, 15 bp, Homo sapiens
ttatatgtgccacat

SEQ ID NO: 340333 - DNA, 15 bp, Homo sapiens
cttatatgtgccaca

SEQ ID NO: 340334 - DNA, 15 bp, Homo sapiens
acttatatgtgccac

SEQ ID NO: 340335 - DNA, 15 bp, Homo sapiens
cacttatatgtgcca

SEQ ID NO: 340336 - DNA, 15 bp, Homo sapiens
ccacttatatgtgcc

SEQ ID NO: 340337 - DNA, 15 bp, Homo sapiens
gccacttatatgtgc

SEQ ID NO: 340338 - DNA, 15 bp, Homo sapiens
ggccacttatatgtg

SEQ ID NO: 340339 - DNA, 15 bp, Homo sapiens
tggccacttatatgt

SEQ ID NO: 340340 - DNA, 15 bp, Homo sapiens
atggccacttatatg

SEQ ID NO: 340341 - DNA, 15 bp, Homo sapiens
catggccacttatat

SEQ ID NO: 340342 - DNA, 15 bp, Homo sapiens
tcatggccacttata

SEQ ID NO: 340343 - DNA, 15 bp, Homo sapiens
gtcatggccacttat

SEQ ID NO: 340344 - DNA, 15 bp, Homo sapiens
tgtcatggccactta

SEQ ID NO: 340345 - DNA, 15 bp, Homo sapiens
atgtcatggccactt

SEQ ID NO: 340346 - DNA, 15 bp, Homo sapiens
aatgtcatggccact

SEQ ID NO: 340347 - DNA, 15 bp, Homo sapiens
caatgtcatggccac

SEQ ID NO: 340348 - DNA, 15 bp, Homo sapiens
gcaatgtcatggcca

SEQ ID NO: 340349 - DNA, 15 bp, Homo sapiens
ggcaatgtcatggcc

SEQ ID NO: 340350 - DNA, 15 bp, Homo sapiens
aggcaatgtcatggc

SEQ ID NO: 340351 - DNA, 15 bp, Homo sapiens
caggcaatgtcatgg

SEQ ID NO: 340352 - DNA, 15 bp, Homo sapiens
ccaggcaatgtcatg

SEQ ID NO: 340353 - DNA, 15 bp, Homo sapiens
accaggcaatgtcat

SEQ ID NO: 340354 - DNA, 15 bp, Homo sapiens
caccaggcaatgtca

SEQ ID NO: 340355 - DNA, 15 bp, Homo sapiens
gcaccaggcaatgtc

SEQ ID NO: 340356 - DNA, 15 bp, Homo sapiens
ggcaccaggcaatgt

SEQ ID NO: 340357 - DNA, 15 bp, Homo sapiens
tggcaccaggcaatg

SEQ ID NO: 340358 - DNA, 15 bp, Homo sapiens
ttggcaccaggcaat

SEQ ID NO: 340359 - DNA, 15 bp, Homo sapiens
tttggcaccaggcaa

SEQ ID NO: 340360 - DNA, 15 bp, Homo sapiens
ctttggcaccaggca

SEQ ID NO: 340361 - DNA, 15 bp, Homo sapiens
actttggcaccaggc

SEQ ID NO: 340362 - DNA, 15 bp, Homo sapiens
gactttggcaccagg

SEQ ID NO: 340363 - DNA, 15 bp, Homo sapiens
tgactttggcaccag

SEQ ID NO: 340364 - DNA, 15 bp, Homo sapiens
ctgactttggcacca

SEQ ID NO: 340365 - DNA, 15 bp, Homo sapiens
tctgactttggcacc

SEQ ID NO: 340366 - DNA, 15 bp, Homo sapiens
atctgactttggcac

SEQ ID NO: 340367 - DNA, 15 bp, Homo sapiens
aatctgactttggca

SEQ ID NO: 340368 - DNA, 15 bp, Homo sapiens
caatctgactttggc

SEQ ID NO: 340369 - DNA, 15 bp, Homo sapiens
ccaatctgactttgg

SEQ ID NO: 340370 - DNA, 15 bp, Homo sapiens
gccaatctgactttg

SEQ ID NO: 340371 - DNA, 15 bp, Homo sapiens
ggccaatctgacttt

SEQ ID NO: 340372 - DNA, 15 bp, Homo sapiens
tggccaatctgactt

SEQ ID NO: 340373 - DNA, 15 bp, Homo sapiens
ctggccaatctgact

SEQ ID NO: 340374 - DNA, 15 bp, Homo sapiens
cctggccaatctgac

SEQ ID NO: 340375 - DNA, 15 bp, Homo sapiens
tcctggccaatctga

SEQ ID NO: 340376 - DNA, 15 bp, Homo sapiens
ctcctggccaatctg

SEQ ID NO: 340377 - DNA, 15 bp, Homo sapiens
gctcctggccaatct

SEQ ID NO: 340378 - DNA, 15 bp, Homo sapiens
ggctcctggccaatc

SEQ ID NO: 340379 - DNA, 15 bp, Homo sapiens
gggctcctggccaat

SEQ ID NO: 340380 - DNA, 15 bp, Homo sapiens
ggggctcctggccaa

SEQ ID NO: 340381 - DNA, 15 bp, Homo sapiens
cggggctcctggcca

SEQ ID NO: 340382 - DNA, 15 bp, Homo sapiens
tcggggctcctggcc

SEQ ID NO: 340383 - DNA, 15 bp, Homo sapiens
ctcggggctcctggc

SEQ ID NO: 340384 - DNA, 15 bp, Homo sapiens
gctcggggctcctgg

SEQ ID NO: 340385 - DNA, 15 bp, Homo sapiens
cgctcggggctcctg

SEQ ID NO: 340386 - DNA, 15 bp, Homo sapiens
ccgctcggggctcct

SEQ ID NO: 340387 - DNA, 15 bp, Homo sapiens
accgctcggggctcc

SEQ ID NO: 340388 - DNA, 15 bp, Homo sapiens
aaccgctcggggctc

SEQ ID NO: 340389 - DNA, 15 bp, Homo sapiens
caaccgctcggggct

SEQ ID NO: 340390 - DNA, 15 bp, Homo sapiens
ccaaccgctcggggc

SEQ ID NO: 340391 - DNA, 15 bp, Homo sapiens
tccaaccgctcgggg

SEQ ID NO: 340392 - DNA, 15 bp, Homo sapiens
ctccaaccgctcggg

SEQ ID NO: 340393 - DNA, 15 bp, Homo sapiens
cctccaaccgctcgg

SEQ ID NO: 340394 - DNA, 15 bp, Homo sapiens
ccctccaaccgctcg

SEQ ID NO: 340395 - DNA, 15 bp, Homo sapiens
tccctccaaccgctc

SEQ ID NO: 340396 - DNA, 15 bp, Homo sapiens
gtccctccaaccgct

SEQ ID NO: 340397 - DNA, 15 bp, Homo sapiens
agtccctccaaccgc

SEQ ID NO: 340398 - DNA, 15 bp, Homo sapiens
cagtccctccaaccg

SEQ ID NO: 340399 - DNA, 15 bp, Homo sapiens
acagtccctccaacc

SEQ ID NO: 340400 - DNA, 15 bp, Homo sapiens
gacagtccctccaac

SEQ ID NO: 340401 - DNA, 15 bp, Homo sapiens
tgacagtccctccaa

SEQ ID NO: 340402 - DNA, 15 bp, Homo sapiens
ctgacagtccctcca

SEQ ID NO: 340403 - DNA, 15 bp, Homo sapiens
actgacagtccctcc

SEQ ID NO: 340404 - DNA, 15 bp, Homo sapiens
gactgacagtccctc

SEQ ID NO: 340405 - DNA, 15 bp, Homo sapiens
agactgacagtccct

SEQ ID NO: 340406 - DNA, 15 bp, Homo sapiens
gagactgacagtccc

SEQ ID NO: 340407 - DNA, 15 bp, Homo sapiens
tgagactgacagtcc

SEQ ID NO: 340408 - DNA, 15 bp, Homo sapiens
ttgagactgacagtc

SEQ ID NO: 340409 - DNA, 15 bp, Homo sapiens
gttgagactgacagt

SEQ ID NO: 340410 - DNA, 15 bp, Homo sapiens
tgttgagactgacag

SEQ ID NO: 340411 - DNA, 15 bp, Homo sapiens
ctgttgagactgaca

SEQ ID NO: 340412 - DNA, 15 bp, Homo sapiens
actgttgagactgac

SEQ ID NO: 340413 - DNA, 15 bp, Homo sapiens
aactgttgagactga

SEQ ID NO: 340414 - DNA, 15 bp, Homo sapiens
caactgttgagactg

SEQ ID NO: 340415 - DNA, 15 bp, Homo sapiens
acaactgttgagact

SEQ ID NO: 340416 - DNA, 15 bp, Homo sapiens
cacaactgttgagac

SEQ ID NO: 340417 - DNA, 15 bp, Homo sapiens
ccacaactgttgaga

SEQ ID NO: 340418 - DNA, 15 bp, Homo sapiens
cccacaactgttgag

SEQ ID NO: 340419 - DNA, 15 bp, Homo sapiens
ccccacaactgttga

SEQ ID NO: 340420 - DNA, 15 bp, Homo sapiens
gccccacaactgttg

SEQ ID NO: 340421 - DNA, 15 bp, Homo sapiens
agccccacaactgtt

SEQ ID NO: 340422 - DNA, 15 bp, Homo sapiens
gagccccacaactgt

SEQ ID NO: 340423 - DNA, 15 bp, Homo sapiens
tgagccccacaactg

SEQ ID NO: 340424 - DNA, 15 bp, Homo sapiens
atgagccccacaact

SEQ ID NO: 340425 - DNA, 15 bp, Homo sapiens
gatgagccccacaac

SEQ ID NO: 340426 - DNA, 15 bp, Homo sapiens
agatgagccccacaa

SEQ ID NO: 340427 - DNA, 15 bp, Homo sapiens
gagatgagccccaca

SEQ ID NO: 340428 - DNA, 15 bp, Homo sapiens
agagatgagccccac

SEQ ID NO: 340429 - DNA, 15 bp, Homo sapiens
aagagatgagcccca

SEQ ID NO: 340430 - DNA, 15 bp, Homo sapiens
gaagagatgagcccc

SEQ ID NO: 340431 - DNA, 15 bp, Homo sapiens
ggaagagatgagccc

SEQ ID NO: 340432 - DNA, 15 bp, Homo sapiens
cggaagagatgagcc

SEQ ID NO: 340433 - DNA, 15 bp, Homo sapiens
ccggaagagatgagc

SEQ ID NO: 340434 - DNA, 15 bp, Homo sapiens
cccggaagagatgag

SEQ ID NO: 340435 - DNA, 15 bp, Homo sapiens
acccggaagagatga

SEQ ID NO: 340436 - DNA, 15 bp, Homo sapiens
cacccggaagagatg

SEQ ID NO: 340437 - DNA, 15 bp, Homo sapiens
tcacccggaagagat

SEQ ID NO: 340438 - DNA, 15 bp, Homo sapiens
ctcacccggaagaga

SEQ ID NO: 340439 - DNA, 15 bp, Homo sapiens
gctcacccggaagag

SEQ ID NO: 340440 - DNA, 15 bp, Homo sapiens
ggctcacccggaaga

SEQ ID NO: 340441 - DNA, 15 bp, Homo sapiens
tggctcacccggaag

SEQ ID NO: 340442 - DNA, 15 bp, Homo sapiens
gtggctcacccggaa

SEQ ID NO: 340443 - DNA, 15 bp, Homo sapiens
agtggctcacccgga

SEQ ID NO: 340444 - DNA, 15 bp, Homo sapiens
tagtggctcacccgg

SEQ ID NO: 340445 - DNA, 15 bp, Homo sapiens
gtagtggctcacccg

SEQ ID NO: 340446 - DNA, 15 bp, Homo sapiens
agtagtggctcaccc

SEQ ID NO: 340447 - DNA, 15 bp, Homo sapiens
aagtagtggctcacc

SEQ ID NO: 340448 - DNA, 15 bp, Homo sapiens
gaagtagtggctcac

SEQ ID NO: 340449 - DNA, 15 bp, Homo sapiens
ggaagtagtggctca

SEQ ID NO: 340450 - DNA, 15 bp, Homo sapiens
tggaagtagtggctc

SEQ ID NO: 340451 - DNA, 15 bp, Homo sapiens
ctggaagtagtggct

SEQ ID NO: 340452 - DNA, 15 bp, Homo sapiens
tctggaagtagtggc

SEQ ID NO: 340453 - DNA, 15 bp, Homo sapiens
ttctggaagtagtgg

SEQ ID NO: 340454 - DNA, 15 bp, Homo sapiens
tttctggaagtagtg

SEQ ID NO: 340455 - DNA, 15 bp, Homo sapiens
gtttctggaagtagt

SEQ ID NO: 340456 - DNA, 15 bp, Homo sapiens
tgtttctggaagtag

SEQ ID NO: 340457 - DNA, 15 bp, Homo sapiens
ctgtttctggaagta

SEQ ID NO: 340458 - DNA, 15 bp, Homo sapiens
tctgtttctggaagt

SEQ ID NO: 340459 - DNA, 15 bp, Homo sapiens
ttctgtttctggaag

SEQ ID NO: 340460 - DNA, 15 bp, Homo sapiens
cttctgtttctggaa

SEQ ID NO: 340461 - DNA, 15 bp, Homo sapiens
acttctgtttctgga

SEQ ID NO: 340462 - DNA, 15 bp, Homo sapiens
gacttctgtttctgg

SEQ ID NO: 340463 - DNA, 15 bp, Homo sapiens
ggacttctgtttctg

SEQ ID NO: 340464 - DNA, 15 bp, Homo sapiens
tggacttctgtttct

SEQ ID NO: 340465 - DNA, 15 bp, Homo sapiens
ttggacttctgtttc

SEQ ID NO: 340466 - DNA, 15 bp, Homo sapiens
tttggacttctgttt

SEQ ID NO: 340467 - DNA, 15 bp, Homo sapiens
gtttggacttctgtt

SEQ ID NO: 340468 - DNA, 15 bp, Homo sapiens
ggtttggacttctgt

SEQ ID NO: 340469 - DNA, 15 bp, Homo sapiens
tggtttggacttctg

SEQ ID NO: 340470 - DNA, 15 bp, Homo sapiens
gtggtttggacttct

SEQ ID NO: 340471 - DNA, 15 bp, Homo sapiens
ggtggtttggacttc

SEQ ID NO: 340472 - DNA, 15 bp, Homo sapiens
gggtggtttggactt

SEQ ID NO: 340473 - DNA, 15 bp, Homo sapiens
agggtggtttggact

SEQ ID NO: 340474 - DNA, 15 bp, Homo sapiens
gagggtggtttggac

SEQ ID NO: 340475 - DNA, 15 bp, Homo sapiens
tgagggtggtttgga

SEQ ID NO: 340476 - DNA, 15 bp, Homo sapiens
ttgagggtggtttgg

SEQ ID NO: 340477 - DNA, 15 bp, Homo sapiens
tttgagggtggtttg

SEQ ID NO: 340478 - DNA, 15 bp, Homo sapiens
gtttgagggtggttt

SEQ ID NO: 340479 - DNA, 15 bp, Homo sapiens
tgtttgagggtggtt

SEQ ID NO: 340480 - DNA, 15 bp, Homo sapiens
ttgtttgagggtggt

SEQ ID NO: 340481 - DNA, 15 bp, Homo sapiens
cttgtttgagggtgg

SEQ ID NO: 340482 - DNA, 15 bp, Homo sapiens
ccttgtttgagggtg

SEQ ID NO: 340483 - DNA, 15 bp, Homo sapiens
cgccttgtttgaggg

SEQ ID NO: 340484 - DNA, 15 bp, Homo sapiens
tcgccttgtttgagg

SEQ ID NO: 340485 - DNA, 15 bp, Homo sapiens
ctcgccttgtttgag

SEQ ID NO: 340486 - DNA, 15 bp, Homo sapiens
gctcgccttgtttga

SEQ ID NO: 340487 - DNA, 15 bp, Homo sapiens
tgctcgccttgtttg

SEQ ID NO: 340488 - DNA, 15 bp, Homo sapiens
ttgctcgccttgttt

SEQ ID NO: 340489 - DNA, 15 bp, Homo sapiens
attgctcgccttgtt

SEQ ID NO: 340490 - DNA, 15 bp, Homo sapiens
aattgctcgccttgt

SEQ ID NO: 340491 - DNA, 15 bp, Homo sapiens
gaattgctcgccttg

SEQ ID NO: 340492 - DNA, 15 bp, Homo sapiens
ggaattgctcgcctt

SEQ ID NO: 340493 - DNA, 15 bp, Homo sapiens
tggaattgctcgcct

SEQ ID NO: 340494 - DNA, 15 bp, Homo sapiens
ctggaattgctcgcc

SEQ ID NO: 340495 - DNA, 15 bp, Homo sapiens
gctggaattgctcgc

SEQ ID NO: 340496 - DNA, 15 bp, Homo sapiens
ggctggaattgctcg

SEQ ID NO: 340497 - DNA, 15 bp, Homo sapiens
aggctggaattgctc

SEQ ID NO: 340498 - DNA, 15 bp, Homo sapiens
gaggctggaattgct

SEQ ID NO: 340499 - DNA, 15 bp, Homo sapiens
tgaggctggaattgc

SEQ ID NO: 340500 - DNA, 15 bp, Homo sapiens
atgaggctggaattg

SEQ ID NO: 340501 - DNA, 15 bp, Homo sapiens
gatgaggctggaatt

SEQ ID NO: 340502 - DNA, 15 bp, Homo sapiens
ggatgaggctggaat

SEQ ID NO: 340503 - DNA, 15 bp, Homo sapiens
gggatgaggctggaa

SEQ ID NO: 340504 - DNA, 15 bp, Homo sapiens
agggatgaggctgga

SEQ ID NO: 340505 - DNA, 15 bp, Homo sapiens
aagggatgaggctgg

SEQ ID NO: 340506 - DNA, 15 bp, Homo sapiens
gaagggatgaggctg

SEQ ID NO: 340507 - DNA, 15 bp, Homo sapiens
ggaagggatgaggct

SEQ ID NO: 340508 - DNA, 15 bp, Homo sapiens
gggaagggatgaggc

SEQ ID NO: 340509 - DNA, 15 bp, Homo sapiens
tgggaagggatgagg

SEQ ID NO: 340510 - DNA, 15 bp, Homo sapiens
ctgggaagggatgag

SEQ ID NO: 340511 - DNA, 15 bp, Homo sapiens
gctgggaagggatga

SEQ ID NO: 340512 - DNA, 15 bp, Homo sapiens
tgctgggaagggatg

SEQ ID NO: 340513 - DNA, 15 bp, Homo sapiens
atgctgggaagggat

SEQ ID NO: 340514 - DNA, 15 bp, Homo sapiens
gatgctgggaaggga

SEQ ID NO: 340515 - DNA, 15 bp, Homo sapiens
agatgctgggaaggg

SEQ ID NO: 340516 - DNA, 15 bp, Homo sapiens
gagatgctgggaagg

SEQ ID NO: 340517 - DNA, 15 bp, Homo sapiens
ggagatgctgggaag

SEQ ID NO: 340518 - DNA, 15 bp, Homo sapiens
gggagatgctgggaa

SEQ ID NO: 340519 - DNA, 15 bp, Homo sapiens
ggggagatgctggga

SEQ ID NO: 340520 - DNA, 15 bp, Homo sapiens
tggggagatgctggg

SEQ ID NO: 340521 - DNA, 15 bp, Homo sapiens
atggggagatgctgg

SEQ ID NO: 340522 - DNA, 15 bp, Homo sapiens
gatggggagatgctg

SEQ ID NO: 340523 - DNA, 15 bp, Homo sapiens
agatggggagatgct

SEQ ID NO: 340524 - DNA, 15 bp, Homo sapiens
aagatggggagatgc

SEQ ID NO: 340525 - DNA, 15 bp, Homo sapiens
caagatggggagatg

SEQ ID NO: 340526 - DNA, 15 bp, Homo sapiens
tcaagatggggagat

SEQ ID NO: 340527 - DNA, 15 bp, Homo sapiens
ctcaagatggggaga

SEQ ID NO: 340528 - DNA, 15 bp, Homo sapiens
cctcaagatggggag

SEQ ID NO: 340529 - DNA, 15 bp, Homo sapiens
acctcaagatgggga

SEQ ID NO: 340530 - DNA, 15 bp, Homo sapiens
tacctcaagatgggg

SEQ ID NO: 340531 - DNA, 15 bp, Homo sapiens
ttacctcaagatggg

SEQ ID NO: 340532 - DNA, 15 bp, Homo sapiens
tttacctcaagatgg

SEQ ID NO: 340533 - DNA, 15 bp, Homo sapiens
atttacctcaagatg

SEQ ID NO: 340534 - DNA, 15 bp, Homo sapiens
aatttacctcaagat

SEQ ID NO: 340535 - DNA, 15 bp, Homo sapiens
gaatttacctcaaga

SEQ ID NO: 340536 - DNA, 15 bp, Homo sapiens
ggaatttacctcaag

SEQ ID NO: 340537 - DNA, 15 bp, Homo sapiens
aggaatttacctcaa

SEQ ID NO: 340538 - DNA, 15 bp, Homo sapiens
aaggaatttacctca

SEQ ID NO: 340539 - DNA, 15 bp, Homo sapiens
aaaggaatttacctc

SEQ ID NO: 340540 - DNA, 15 bp, Homo sapiens
taaaggaatttacct

SEQ ID NO: 340541 - DNA, 15 bp, Homo sapiens
ctaaaggaatttacc

SEQ ID NO: 340542 - DNA, 15 bp, Homo sapiens
gctaaaggaatttac

SEQ ID NO: 340543 - DNA, 15 bp, Homo sapiens
agctaaaggaattta

SEQ ID NO: 340544 - DNA, 15 bp, Homo sapiens
gagctaaaggaattt

SEQ ID NO: 340545 - DNA, 15 bp, Homo sapiens
agagctaaaggaatt

SEQ ID NO: 340546 - DNA, 15 bp, Homo sapiens
gagagctaaaggaat

SEQ ID NO: 340547 - DNA, 15 bp, Homo sapiens
ggagagctaaaggaa

SEQ ID NO: 340548 - DNA, 15 bp, Homo sapiens
aggagagctaaagga

SEQ ID NO: 340549 - DNA, 15 bp, Homo sapiens
caggagagctaaagg

SEQ ID NO: 340550 - DNA, 15 bp, Homo sapiens
ccaggagagctaaag

SEQ ID NO: 340551 - DNA, 15 bp, Homo sapiens
tccaggagagctaaa

SEQ ID NO: 340552 - DNA, 15 bp, Homo sapiens
ttccaggagagctaa

SEQ ID NO: 340553 - DNA, 15 bp, Homo sapiens
tttccaggagagcta

SEQ ID NO: 340554 - DNA, 15 bp, Homo sapiens
atttccaggagagct

SEQ ID NO: 340555 - DNA, 15 bp, Homo sapiens
gatttccaggagagc

SEQ ID NO: 340556 - DNA, 15 bp, Homo sapiens
ggatttccaggagag

SEQ ID NO: 340557 - DNA, 15 bp, Homo sapiens
gggatttccaggaga

SEQ ID NO: 340558 - DNA, 15 bp, Homo sapiens
cgggatttccaggag

SEQ ID NO: 340559 - DNA, 15 bp, Homo sapiens
ccgggatttccagga

SEQ ID NO: 340560 - DNA, 15 bp, Homo sapiens
cccgggatttccagg

SEQ ID NO: 340561 - DNA, 15 bp, Homo sapiens
gcccgggatttccag

SEQ ID NO: 340562 - DNA, 15 bp, Homo sapiens
tgcccgggatttcca

SEQ ID NO: 340563 - DNA, 15 bp, Homo sapiens
gtgcccgggatttcc

SEQ ID NO: 340564 - DNA, 15 bp, Homo sapiens
ggtgcccgggatttc

SEQ ID NO: 340565 - DNA, 15 bp, Homo sapiens
gggtgcccgggattt

SEQ ID NO: 340566 - DNA, 15 bp, Homo sapiens
agggtgcccgggatt

SEQ ID NO: 340567 - DNA, 15 bp, Homo sapiens
tagggtgcccgggat

SEQ ID NO: 340568 - DNA, 15 bp, Homo sapiens
ttagggtgcccggga

SEQ ID NO: 340569 - DNA, 15 bp, Homo sapiens
cttagggtgcccggg

SEQ ID NO: 340570 - DNA, 15 bp, Homo sapiens
ccttagggtgcccgg

SEQ ID NO: 340571 - DNA, 15 bp, Homo sapiens
tccttagggtgcccg

SEQ ID NO: 340572 - DNA, 15 bp, Homo sapiens
ttccttagggtgccc

SEQ ID NO: 340573 - DNA, 15 bp, Homo sapiens
cttccttagggtgcc

SEQ ID NO: 340574 - DNA, 15 bp, Homo sapiens
gcttccttagggtgc

SEQ ID NO: 340575 - DNA, 15 bp, Homo sapiens
tgcttccttagggtg

SEQ ID NO: 340576 - DNA, 15 bp, Homo sapiens
ctgcttccttagggt

SEQ ID NO: 340577 - DNA, 15 bp, Homo sapiens
gctgcttccttaggg

SEQ ID NO: 340578 - DNA, 15 bp, Homo sapiens
ggctgcttccttagg

SEQ ID NO: 340579 - DNA, 15 bp, Homo sapiens
gggctgcttccttag

SEQ ID NO: 340580 - DNA, 15 bp, Homo sapiens
agggctgcttcctta

SEQ ID NO: 340581 - DNA, 15 bp, Homo sapiens
gagggctgcttcctt

SEQ ID NO: 340582 - DNA, 15 bp, Homo sapiens
agagggctgcttcct

SEQ ID NO: 340583 - DNA, 15 bp, Homo sapiens
cagagggctgcttcc

SEQ ID NO: 340584 - DNA, 15 bp, Homo sapiens
ccagagggctgcttc

SEQ ID NO: 340585 - DNA, 15 bp, Homo sapiens
cccagagggctgctt

SEQ ID NO: 340586 - DNA, 15 bp, Homo sapiens
ccccagagggctgct

SEQ ID NO: 340587 - DNA, 15 bp, Homo sapiens
tccccagagggctgc

SEQ ID NO: 340588 - DNA, 15 bp, Homo sapiens
gtccccagagggctg

SEQ ID NO: 340589 - DNA, 15 bp, Homo sapiens
cgtccccagagggct

SEQ ID NO: 340590 - DNA, 15 bp, Homo sapiens
gcgtccccagagggc

SEQ ID NO: 340591 - DNA, 15 bp, Homo sapiens
tgcgtccccagaggg

SEQ ID NO: 340592 - DNA, 15 bp, Homo sapiens
gtgcgtccccagagg

SEQ ID NO: 340593 - DNA, 15 bp, Homo sapiens
tgtgcgtccccagag

SEQ ID NO: 340594 - DNA, 15 bp, Homo sapiens
ctgtgcgtccccaga

SEQ ID NO: 340595 - DNA, 15 bp, Homo sapiens
gctgtgcgtccccag

SEQ ID NO: 340596 - DNA, 15 bp, Homo sapiens
ggctgtgcgtcccca

SEQ ID NO: 340597 - DNA, 15 bp, Homo sapiens
tggctgtgcgtcccc

SEQ ID NO: 340598 - DNA, 15 bp, Homo sapiens
ctggctgtgcgtccc

SEQ ID NO: 340599 - DNA, 15 bp, Homo sapiens
gctggctgtgcgtcc

SEQ ID NO: 340600 - DNA, 15 bp, Homo sapiens
agctggctgtgcgtc

SEQ ID NO: 340601 - DNA, 15 bp, Homo sapiens
cagctggctgtgcgt

SEQ ID NO: 340602 - DNA, 15 bp, Homo sapiens
ccagctggctgtgcg

SEQ ID NO: 340603 - DNA, 15 bp, Homo sapiens
gccagctggctgtgc

SEQ ID NO: 340604 - DNA, 15 bp, Homo sapiens
tgccagctggctgtg

SEQ ID NO: 340605 - DNA, 15 bp, Homo sapiens
atgccagctggctgt

SEQ ID NO: 340606 - DNA, 15 bp, Homo sapiens
catgccagctggctg

SEQ ID NO: 340607 - DNA, 15 bp, Homo sapiens
tcatgccagctggct

SEQ ID NO: 340608 - DNA, 15 bp, Homo sapiens
atcatgccagctggc

SEQ ID NO: 340609 - DNA, 15 bp, Homo sapiens
gatcatgccagctgg

SEQ ID NO: 340610 - DNA, 15 bp, Homo sapiens
agatcatgccagctg

SEQ ID NO: 340611 - DNA, 15 bp, Homo sapiens
aagatcatgccagct

SEQ ID NO: 340612 - DNA, 15 bp, Homo sapiens
gaagatcatgccagc

SEQ ID NO: 340613 - DNA, 15 bp, Homo sapiens
ggaagatcatgccag

SEQ ID NO: 340614 - DNA, 15 bp, Homo sapiens
tggaagatcatgcca

SEQ ID NO: 340615 - DNA, 15 bp, Homo sapiens
atggaagatcatgcc

SEQ ID NO: 340616 - DNA, 15 bp, Homo sapiens
aatggaagatcatgc

SEQ ID NO: 340617 - DNA, 15 bp, Homo sapiens
gaatggaagatcatg

SEQ ID NO: 340618 - DNA, 15 bp, Homo sapiens
ggaatggaagatcat

SEQ ID NO: 340619 - DNA, 15 bp, Homo sapiens
tggaatggaagatca

SEQ ID NO: 340620 - DNA, 15 bp, Homo sapiens
atggaatggaagatc

SEQ ID NO: 340621 - DNA, 15 bp, Homo sapiens
tatggaatggaagat

SEQ ID NO: 340622 - DNA, 15 bp, Homo sapiens
ctatggaatggaaga

SEQ ID NO: 340623 - DNA, 15 bp, Homo sapiens
cctatggaatggaag

SEQ ID NO: 340624 - DNA, 15 bp, Homo sapiens
gcctatggaatggaa

SEQ ID NO: 340625 - DNA, 15 bp, Homo sapiens
tgcctatggaatgga

SEQ ID NO: 340626 - DNA, 15 bp, Homo sapiens
atgcctatggaatgg

SEQ ID NO: 340627 - DNA, 15 bp, Homo sapiens
gatgcctatggaatg

SEQ ID NO: 340628 - DNA, 15 bp, Homo sapiens
ggatgcctatggaat

SEQ ID NO: 340629 - DNA, 15 bp, Homo sapiens
gggatgcctatggaa

SEQ ID NO: 340630 - DNA, 15 bp, Homo sapiens
tgggatgcctatgga

SEQ ID NO: 340631 - DNA, 15 bp, Homo sapiens
ctgggatgcctatgg

SEQ ID NO: 340632 - DNA, 15 bp, Homo sapiens
gctgggatgcctatg

SEQ ID NO: 340633 - DNA, 15 bp, Homo sapiens
ggctgggatgcctat

SEQ ID NO: 340634 - DNA, 15 bp, Homo sapiens
gggctgggatgccta

SEQ ID NO: 340635 - DNA, 15 bp, Homo sapiens
ggggctgggatgcct

SEQ ID NO: 340636 - DNA, 15 bp, Homo sapiens
tggggctgggatgcc

SEQ ID NO: 340637 - DNA, 15 bp, Homo sapiens
atggggctgggatgc

SEQ ID NO: 340638 - DNA, 15 bp, Homo sapiens
aatggggctgggatg

SEQ ID NO: 340639 - DNA, 15 bp, Homo sapiens
aaatggggctgggat

SEQ ID NO: 340640 - DNA, 15 bp, Homo sapiens
taaatggggctggga

SEQ ID NO: 340641 - DNA, 15 bp, Homo sapiens
ctaaatggggctggg

SEQ ID NO: 340642 - DNA, 15 bp, Homo sapiens
gctaaatggggctgg

SEQ ID NO: 340643 - DNA, 15 bp, Homo sapiens
ggctaaatggggctg

SEQ ID NO: 340644 - DNA, 15 bp, Homo sapiens
gggctaaatggggct

SEQ ID NO: 340645 - DNA, 15 bp, Homo sapiens
agggctaaatggggc

SEQ ID NO: 340646 - DNA, 15 bp, Homo sapiens
cagggctaaatgggg

SEQ ID NO: 340647 - DNA, 15 bp, Homo sapiens
tcagggctaaatggg

SEQ ID NO: 340648 - DNA, 15 bp, Homo sapiens
ctcagggctaaatgg

SEQ ID NO: 340649 - DNA, 15 bp, Homo sapiens
actcagggctaaatg

SEQ ID NO: 340650 - DNA, 15 bp, Homo sapiens
tactcagggctaaat

SEQ ID NO: 340651 - DNA, 15 bp, Homo sapiens
ttactcagggctaaa

SEQ ID NO: 340652 - DNA, 15 bp, Homo sapiens
attactcagggctaa

SEQ ID NO: 340653 - DNA, 15 bp, Homo sapiens
cattactcagggcta

SEQ ID NO: 340654 - DNA, 15 bp, Homo sapiens
gcattactcagggct

SEQ ID NO: 340655 - DNA, 15 bp, Homo sapiens
agcattactcagggc

SEQ ID NO: 340656 - DNA, 15 bp, Homo sapiens
gagcattactcaggg

SEQ ID NO: 340657 - DNA, 15 bp, Homo sapiens
tgagcattactcagg

SEQ ID NO: 340658 - DNA, 15 bp, Homo sapiens
gtgagcattactcag

SEQ ID NO: 340659 - DNA, 15 bp, Homo sapiens
agtgagcattactca

SEQ ID NO: 340660 - DNA, 15 bp, Homo sapiens
aagtgagcattactc

SEQ ID NO: 340661 - DNA, 15 bp, Homo sapiens
taagtgagcattact

SEQ ID NO: 340662 - DNA, 15 bp, Homo sapiens
gtaagtgagcattac

SEQ ID NO: 340663 - DNA, 15 bp, Homo sapiens
agtaagtgagcatta

SEQ ID NO: 340664 - DNA, 15 bp, Homo sapiens
cagtaagtgagcatt

SEQ ID NO: 340665 - DNA, 15 bp, Homo sapiens
acagtaagtgagcat

SEQ ID NO: 340666 - DNA, 15 bp, Homo sapiens
tacagtaagtgagca

SEQ ID NO: 340667 - DNA, 15 bp, Homo sapiens
ttacagtaagtgagc

SEQ ID NO: 340668 - DNA, 15 bp, Homo sapiens
tttacagtaagtgag

SEQ ID NO: 340669 - DNA, 15 bp, Homo sapiens
ctttacagtaagtga

SEQ ID NO: 340670 - DNA, 15 bp, Homo sapiens
actttacagtaagtg

SEQ ID NO: 340671 - DNA, 15 bp, Homo sapiens
cactttacagtaagt

SEQ ID NO: 340672 - DNA, 15 bp, Homo sapiens
acactttacagtaag

SEQ ID NO: 340673 - DNA, 15 bp, Homo sapiens
aacactttacagtaa

SEQ ID NO: 340674 - DNA, 15 bp, Homo sapiens
taacactttacagta

SEQ ID NO: 340675 - DNA, 15 bp, Homo sapiens
gtaacactttacagt

SEQ ID NO: 340676 - DNA, 15 bp, Homo sapiens
tgtaacactttacag

SEQ ID NO: 340677 - DNA, 15 bp, Homo sapiens
atgtaacactttaca

SEQ ID NO: 340678 - DNA, 15 bp, Homo sapiens
catgtaacactttac

SEQ ID NO: 340679 - DNA, 15 bp, Homo sapiens
gcatgtaacacttta

SEQ ID NO: 340680 - DNA, 15 bp, Homo sapiens
ggcatgtaacacttt

SEQ ID NO: 340681 - DNA, 15 bp, Homo sapiens
gggcatgtaacactt

SEQ ID NO: 340682 - DNA, 15 bp, Homo sapiens
ggggcatgtaacact

SEQ ID NO: 340683 - DNA, 15 bp, Homo sapiens
gggggcatgtaacac

SEQ ID NO: 340684 - DNA, 15 bp, Homo sapiens
tgggggcatgtaaca

SEQ ID NO: 340685 - DNA, 15 bp, Homo sapiens
atgggggcatgtaac

SEQ ID NO: 340686 - DNA, 15 bp, Homo sapiens
aatgggggcatgtaa

SEQ ID NO: 340687 - DNA, 15 bp, Homo sapiens
caatgggggcatgta

SEQ ID NO: 340688 - DNA, 15 bp, Homo sapiens
acaatgggggcatgt

SEQ ID NO: 340689 - DNA, 15 bp, Homo sapiens
gacaatgggggcatg

SEQ ID NO: 340690 - DNA, 15 bp, Homo sapiens
cgacaatgggggcat

SEQ ID NO: 340691 - DNA, 15 bp, Homo sapiens
ccgacaatgggggca

SEQ ID NO: 340692 - DNA, 15 bp, Homo sapiens
tccgacaatgggggc

SEQ ID NO: 340693 - DNA, 15 bp, Homo sapiens
ctccgacaatggggg

SEQ ID NO: 340694 - DNA, 15 bp, Homo sapiens
cctccgacaatgggg

SEQ ID NO: 340695 - DNA, 15 bp, Homo sapiens
tcctccgacaatggg

SEQ ID NO: 340696 - DNA, 15 bp, Homo sapiens
ctcctccgacaatgg

SEQ ID NO: 340697 - DNA, 15 bp, Homo sapiens
actcctccgacaatg

SEQ ID NO: 340698 - DNA, 15 bp, Homo sapiens
aactcctccgacaat

SEQ ID NO: 340699 - DNA, 15 bp, Homo sapiens
taactcctccgacaa

SEQ ID NO: 340700 - DNA, 15 bp, Homo sapiens
ataactcctccgaca

SEQ ID NO: 340701 - DNA, 15 bp, Homo sapiens
tataactcctccgac

SEQ ID NO: 340702 - DNA, 15 bp, Homo sapiens
ctataactcctccga

SEQ ID NO: 340703 - DNA, 15 bp, Homo sapiens
actataactcctccg

SEQ ID NO: 340704 - DNA, 15 bp, Homo sapiens
cactataactcctcc

SEQ ID NO: 340705 - DNA, 15 bp, Homo sapiens
ccactataactcctc

SEQ ID NO: 340706 - DNA, 15 bp, Homo sapiens
tccactataactcct

SEQ ID NO: 340707 - DNA, 15 bp, Homo sapiens
ttccactataactcc

SEQ ID NO: 340708 - DNA, 15 bp, Homo sapiens
tttccactataactc

SEQ ID NO: 340709 - DNA, 15 bp, Homo sapiens
ttttccactataact

SEQ ID NO: 340710 - DNA, 15 bp, Homo sapiens
tttttccactataac

SEQ ID NO: 340711 - DNA, 15 bp, Homo sapiens
atttttccactataa

SEQ ID NO: 340712 - DNA, 15 bp, Homo sapiens
catttttccactata

SEQ ID NO: 340713 - DNA, 15 bp, Homo sapiens
gcatttttccactat

SEQ ID NO: 340714 - DNA, 15 bp, Homo sapiens
tgcatttttccacta

SEQ ID NO: 340715 - DNA, 15 bp, Homo sapiens
ttgcatttttccact

SEQ ID NO: 340716 - DNA, 15 bp, Homo sapiens
tttgcatttttccac

SEQ ID NO: 340717 - DNA, 15 bp, Homo sapiens
ttttgcatttttcca

SEQ ID NO: 340718 - DNA, 15 bp, Homo sapiens
attttgcatttttcc

SEQ ID NO: 340719 - DNA, 15 bp, Homo sapiens
aattttgcatttttc

SEQ ID NO: 340720 - DNA, 15 bp, Homo sapiens
aaattttgcattttt

SEQ ID NO: 340721 - DNA, 15 bp, Homo sapiens
gaaattttgcatttt

SEQ ID NO: 340722 - DNA, 15 bp, Homo sapiens
ggaaattttgcattt

SEQ ID NO: 340723 - DNA, 15 bp, Homo sapiens
aggaaattttgcatt

SEQ ID NO: 340724 - DNA, 15 bp, Homo sapiens
aaggaaattttgcat

SEQ ID NO: 340725 - DNA, 15 bp, Homo sapiens
aaaggaaattttgca

SEQ ID NO: 340726 - DNA, 15 bp, Homo sapiens
aaaaggaaattttgc

SEQ ID NO: 340727 - DNA, 15 bp, Homo sapiens
aaaaaggaaattttg

SEQ ID NO: 340728 - DNA, 15 bp, Homo sapiens
taaaaaggaaatttt

SEQ ID NO: 340729 - DNA, 15 bp, Homo sapiens
gtaaaaaggaaattt

SEQ ID NO: 340730 - DNA, 15 bp, Homo sapiens
agtaaaaaggaaatt

SEQ ID NO: 340731 - DNA, 15 bp, Homo sapiens
cagtaaaaaggaaat

SEQ ID NO: 340732 - DNA, 15 bp, Homo sapiens
gcagtaaaaaggaaa

SEQ ID NO: 340733 - DNA, 15 bp, Homo sapiens
agcagtaaaaaggaa

SEQ ID NO: 340734 - DNA, 15 bp, Homo sapiens
aagcagtaaaaagga

SEQ ID NO: 340735 - DNA, 15 bp, Homo sapiens
taagcagtaaaaagg

SEQ ID NO: 340736 - DNA, 15 bp, Homo sapiens
ataagcagtaaaaag

SEQ ID NO: 340737 - DNA, 15 bp, Homo sapiens
cataagcagtaaaaa

SEQ ID NO: 340738 - DNA, 15 bp, Homo sapiens
ccataagcagtaaaa

SEQ ID NO: 340739 - DNA, 15 bp, Homo sapiens
gccataagcagtaaa

SEQ ID NO: 340740 - DNA, 15 bp, Homo sapiens
ggccataagcagtaa

SEQ ID NO: 340741 - DNA, 15 bp, Homo sapiens
tggccataagcagta

SEQ ID NO: 340742 - DNA, 15 bp, Homo sapiens
ctggccataagcagt

SEQ ID NO: 340743 - DNA, 15 bp, Homo sapiens
gctggccataagcag

SEQ ID NO: 340744 - DNA, 15 bp, Homo sapiens
tgctggccataagca

SEQ ID NO: 340745 - DNA, 15 bp, Homo sapiens
ctgctggccataagc

SEQ ID NO: 340746 - DNA, 15 bp, Homo sapiens
tctgctggccataag

SEQ ID NO: 340747 - DNA, 15 bp, Homo sapiens
ttctgctggccataa

SEQ ID NO: 340748 - DNA, 15 bp, Homo sapiens
gttctgctggccata

SEQ ID NO: 340749 - DNA, 15 bp, Homo sapiens
ggttctgctggccat

SEQ ID NO: 340750 - DNA, 15 bp, Homo sapiens
aggttctgctggcca

SEQ ID NO: 340751 - DNA, 15 bp, Homo sapiens
taggttctgctggcc

SEQ ID NO: 340752 - DNA, 15 bp, Homo sapiens
ataggttctgctggc

SEQ ID NO: 340753 - DNA, 15 bp, Homo sapiens
tataggttctgctgg

SEQ ID NO: 340754 - DNA, 15 bp, Homo sapiens
ttataggttctgctg

SEQ ID NO: 340755 - DNA, 15 bp, Homo sapiens
gttataggttctgct

SEQ ID NO: 340756 - DNA, 15 bp, Homo sapiens
cgttataggttctgc

SEQ ID NO: 340757 - DNA, 15 bp, Homo sapiens
acgttataggttctg

SEQ ID NO: 340758 - DNA, 15 bp, Homo sapiens
cacgttataggttct

SEQ ID NO: 340759 - DNA, 15 bp, Homo sapiens
acacgttataggttc

SEQ ID NO: 340760 - DNA, 15 bp, Homo sapiens
gacacgttataggtt

SEQ ID NO: 340761 - DNA, 15 bp, Homo sapiens
tgacacgttataggt

SEQ ID NO: 340762 - DNA, 15 bp, Homo sapiens
ctgacacgttatagg

SEQ ID NO: 340763 - DNA, 15 bp, Homo sapiens
cctgacacgttatag

SEQ ID NO: 340764 - DNA, 15 bp, Homo sapiens
gcctgacacgttata

SEQ ID NO: 340765 - DNA, 15 bp, Homo sapiens
ggcctgacacgttat

SEQ ID NO: 340766 - DNA, 15 bp, Homo sapiens
cggcctgacacgtta

SEQ ID NO: 340767 - DNA, 15 bp, Homo sapiens
gcggcctgacacgtt

SEQ ID NO: 340768 - DNA, 15 bp, Homo sapiens
tgcggcctgacacgt

SEQ ID NO: 340769 - DNA, 15 bp, Homo sapiens
gtgcggcctgacacg

SEQ ID NO: 340770 - DNA, 15 bp, Homo sapiens
tgtgcggcctgacac

SEQ ID NO: 340771 - DNA, 15 bp, Homo sapiens
atgtgcggcctgaca

SEQ ID NO: 340772 - DNA, 15 bp, Homo sapiens
aatgtgcggcctgac

SEQ ID NO: 340773 - DNA, 15 bp, Homo sapiens
taatgtgcggcctga

SEQ ID NO: 340774 - DNA, 15 bp, Homo sapiens
ctaatgtgcggcctg

SEQ ID NO: 340775 - DNA, 15 bp, Homo sapiens
gctaatgtgcggcct

SEQ ID NO: 340776 - DNA, 15 bp, Homo sapiens
ggctaatgtgcggcc

SEQ ID NO: 340777 - DNA, 15 bp, Homo sapiens
tggctaatgtgcggc

SEQ ID NO: 340778 - DNA, 15 bp, Homo sapiens
gtggctaatgtgcgg

SEQ ID NO: 340779 - DNA, 15 bp, Homo sapiens
ggtggctaatgtgcg

SEQ ID NO: 340780 - DNA, 15 bp, Homo sapiens
gggtggctaatgtgc

SEQ ID NO: 340781 - DNA, 15 bp, Homo sapiens
agggtggctaatgtg

SEQ ID NO: 340782 - DNA, 15 bp, Homo sapiens
cagggtggctaatgt

SEQ ID NO: 340783 - DNA, 15 bp, Homo sapiens
tcagggtggctaatg

SEQ ID NO: 340784 - DNA, 15 bp, Homo sapiens
atcagggtggctaat

SEQ ID NO: 340785 - DNA, 15 bp, Homo sapiens
tatcagggtggctaa

SEQ ID NO: 340786 - DNA, 15 bp, Homo sapiens
ttatcagggtggcta

SEQ ID NO: 340787 - DNA, 15 bp, Homo sapiens
tttatcagggtggct

SEQ ID NO: 340788 - DNA, 15 bp, Homo sapiens
ttttatcagggtggc

SEQ ID NO: 340789 - DNA, 15 bp, Homo sapiens
cttttatcagggtgg

SEQ ID NO: 340790 - DNA, 15 bp, Homo sapiens
acttttatcagggtg

SEQ ID NO: 340791 - DNA, 15 bp, Homo sapiens
gacttttatcagggt

SEQ ID NO: 340792 - DNA, 15 bp, Homo sapiens
agacttttatcaggg

SEQ ID NO: 340793 - DNA, 15 bp, Homo sapiens
cagacttttatcagg

SEQ ID NO: 340794 - DNA, 15 bp, Homo sapiens
gcagacttttatcag

SEQ ID NO: 340795 - DNA, 15 bp, Homo sapiens
agcagacttttatca

SEQ ID NO: 340796 - DNA, 15 bp, Homo sapiens
aagcagacttttatc

SEQ ID NO: 340797 - DNA, 15 bp, Homo sapiens
aaagcagacttttat

SEQ ID NO: 340798 - DNA, 15 bp, Homo sapiens
gaaagcagactttta

SEQ ID NO: 340799 - DNA, 15 bp, Homo sapiens
agaaagcagactttt

SEQ ID NO: 340800 - DNA, 15 bp, Homo sapiens
aagaaagcagacttt

SEQ ID NO: 340801 - DNA, 15 bp, Homo sapiens
taagaaagcagactt

SEQ ID NO: 340802 - DNA, 15 bp, Homo sapiens
gtaagaaagcagact

SEQ ID NO: 340803 - DNA, 15 bp, Homo sapiens
tgtaagaaagcagac

SEQ ID NO: 340804 - DNA, 15 bp, Homo sapiens
gtgtaagaaagcaga

SEQ ID NO: 340805 - DNA, 15 bp, Homo sapiens
tgtgtaagaaagcag

SEQ ID NO: 340806 - DNA, 15 bp, Homo sapiens
gtgtgtaagaaagca

SEQ ID NO: 340807 - DNA, 15 bp, Homo sapiens
tgtgtgtaagaaagc

SEQ ID NO: 340808 - DNA, 15 bp, Homo sapiens
ttgtgtgtaagaaag

SEQ ID NO: 340809 - DNA, 15 bp, Homo sapiens
tttgtgtgtaagaaa

SEQ ID NO: 340810 - DNA, 15 bp, Homo sapiens
ttttgtgtgtaagaa

SEQ ID NO: 340811 - DNA, 15 bp, Homo sapiens
attttgtgtgtaaga

SEQ ID NO: 340812 - DNA, 15 bp, Homo sapiens
gattttgtgtgtaag

SEQ ID NO: 340813 - DNA, 15 bp, Homo sapiens
tgattttgtgtgtaa

SEQ ID NO: 340814 - DNA, 15 bp, Homo sapiens
atgattttgtgtgta

SEQ ID NO: 340815 - DNA, 15 bp, Homo sapiens
gatgattttgtgtgt

SEQ ID NO: 340816 - DNA, 15 bp, Homo sapiens
cgatgattttgtgtg

SEQ ID NO: 340817 - DNA, 15 bp, Homo sapiens
acgatgattttgtgt

SEQ ID NO: 340818 - DNA, 15 bp, Homo sapiens
aacgatgattttgtg

SEQ ID NO: 340819 - DNA, 15 bp, Homo sapiens
aaacgatgattttgt

SEQ ID NO: 340820 - DNA, 15 bp, Homo sapiens
gaaacgatgattttg

SEQ ID NO: 340821 - DNA, 15 bp, Homo sapiens
tgaaacgatgatttt

SEQ ID NO: 340822 - DNA, 15 bp, Homo sapiens
ctgaaacgatgattt

SEQ ID NO: 340823 - DNA, 15 bp, Homo sapiens
gctgaaacgatgatt

SEQ ID NO: 340824 - DNA, 15 bp, Homo sapiens
tgctgaaacgatgat

SEQ ID NO: 340825 - DNA, 15 bp, Homo sapiens
ttgctgaaacgatga

SEQ ID NO: 340826 - DNA, 15 bp, Homo sapiens
cttgctgaaacgatg

SEQ ID NO: 340827 - DNA, 15 bp, Homo sapiens
tcttgctgaaacgat

SEQ ID NO: 340828 - DNA, 15 bp, Homo sapiens
atcttgctgaaacga

SEQ ID NO: 340829 - DNA, 15 bp, Homo sapiens
aatcttgctgaaacg

SEQ ID NO: 340830 - DNA, 15 bp, Homo sapiens
aaatcttgctgaaac

SEQ ID NO: 340831 - DNA, 15 bp, Homo sapiens
caaatcttgctgaaa

SEQ ID NO: 340832 - DNA, 15 bp, Homo sapiens
acaaatcttgctgaa

SEQ ID NO: 340833 - DNA, 15 bp, Homo sapiens
aacaaatcttgctga

SEQ ID NO: 340834 - DNA, 15 bp, Homo sapiens
taacaaatcttgctg

SEQ ID NO: 340835 - DNA, 15 bp, Homo sapiens
ataacaaatcttgct

SEQ ID NO: 340836 - DNA, 15 bp, Homo sapiens
gataacaaatcttgc

SEQ ID NO: 340837 - DNA, 15 bp, Homo sapiens
agataacaaatcttg

SEQ ID NO: 340838 - DNA, 15 bp, Homo sapiens
gagataacaaatctt

SEQ ID NO: 340839 - DNA, 15 bp, Homo sapiens
tgagataacaaatct

SEQ ID NO: 340840 - DNA, 15 bp, Homo sapiens
atgagataacaaatc

SEQ ID NO: 340841 - DNA, 15 bp, Homo sapiens
aatgagataacaaat

SEQ ID NO: 340842 - DNA, 15 bp, Homo sapiens
taatgagataacaaa

SEQ ID NO: 340843 - DNA, 15 bp, Homo sapiens
gtaatgagataacaa

SEQ ID NO: 340844 - DNA, 15 bp, Homo sapiens
ggtaatgagataaca

SEQ ID NO: 340845 - DNA, 15 bp, Homo sapiens
aggtaatgagataac

SEQ ID NO: 340846 - DNA, 15 bp, Homo sapiens
caggtaatgagataa

SEQ ID NO: 340847 - DNA, 15 bp, Homo sapiens
tcaggtaatgagata

SEQ ID NO: 340848 - DNA, 15 bp, Homo sapiens
atcaggtaatgagat

SEQ ID NO: 340849 - DNA, 15 bp, Homo sapiens
tatcaggtaatgaga

SEQ ID NO: 340850 - DNA, 15 bp, Homo sapiens
ttatcaggtaatgag

SEQ ID NO: 340851 - DNA, 15 bp, Homo sapiens
cttatcaggtaatga

SEQ ID NO: 340852 - DNA, 15 bp, Homo sapiens
gcttatcaggtaatg

SEQ ID NO: 340853 - DNA, 15 bp, Homo sapiens
agcttatcaggtaat

SEQ ID NO: 340854 - DNA, 15 bp, Homo sapiens
gagcttatcaggtaa

SEQ ID NO: 340855 - DNA, 15 bp, Homo sapiens
agagcttatcaggta

SEQ ID NO: 340856 - DNA, 15 bp, Homo sapiens
tagagcttatcaggt

SEQ ID NO: 340857 - DNA, 15 bp, Homo sapiens
atagagcttatcagg

SEQ ID NO: 340858 - DNA, 15 bp, Homo sapiens
catagagcttatcag

SEQ ID NO: 340859 - DNA, 15 bp, Homo sapiens
acatagagcttatca

SEQ ID NO: 340860 - DNA, 15 bp, Homo sapiens
gacatagagcttatc

SEQ ID NO: 340861 - DNA, 15 bp, Homo sapiens
tgacatagagcttat

SEQ ID NO: 340862 - DNA, 15 bp, Homo sapiens
atgacatagagctta

SEQ ID NO: 340863 - DNA, 15 bp, Homo sapiens
tatgacatagagctt

SEQ ID NO: 340864 - DNA, 15 bp, Homo sapiens
ttatgacatagagct

SEQ ID NO: 340865 - DNA, 15 bp, Homo sapiens
tttatgacatagagc

SEQ ID NO: 340866 - DNA, 15 bp, Homo sapiens
gtttatgacatagag

SEQ ID NO: 340867 - DNA, 15 bp, Homo sapiens
ggtttatgacataga

SEQ ID NO: 340868 - DNA, 15 bp, Homo sapiens
tggtttatgacatag

SEQ ID NO: 340869 - DNA, 15 bp, Homo sapiens
ttggtttatgacata

SEQ ID NO: 340870 - DNA, 15 bp, Homo sapiens
cttggtttatgacat

SEQ ID NO: 340871 - DNA, 15 bp, Homo sapiens
tcttggtttatgaca

SEQ ID NO: 340872 - DNA, 15 bp, Homo sapiens
gtcttggtttatgac

SEQ ID NO: 340873 - DNA, 15 bp, Homo sapiens
agtcttggtttatga

SEQ ID NO: 340874 - DNA, 15 bp, Homo sapiens
gagtcttggtttatg

SEQ ID NO: 340875 - DNA, 15 bp, Homo sapiens
tgagtcttggtttat

SEQ ID NO: 340876 - DNA, 15 bp, Homo sapiens
atgagtcttggttta

SEQ ID NO: 340877 - DNA, 15 bp, Homo sapiens
tatgagtcttggttt

SEQ ID NO: 340878 - DNA, 15 bp, Homo sapiens
gtatgagtcttggtt

SEQ ID NO: 340879 - DNA, 15 bp, Homo sapiens
tgtatgagtcttggt

SEQ ID NO: 340880 - DNA, 15 bp, Homo sapiens
ctgtatgagtcttgg

SEQ ID NO: 340881 - DNA, 15 bp, Homo sapiens
actgtatgagtcttg

SEQ ID NO: 340882 - DNA, 15 bp, Homo sapiens
tactgtatgagtctt

SEQ ID NO: 340883 - DNA, 15 bp, Homo sapiens
ttactgtatgagtct

SEQ ID NO: 340884 - DNA, 15 bp, Homo sapiens
tttactgtatgagtc

SEQ ID NO: 340885 - DNA, 15 bp, Homo sapiens
atttactgtatgagt

SEQ ID NO: 340886 - DNA, 15 bp, Homo sapiens
gatttactgtatgag

SEQ ID NO: 340887 - DNA, 15 bp, Homo sapiens
agatttactgtatga

SEQ ID NO: 340888 - DNA, 15 bp, Homo sapiens
gagatttactgtatg

SEQ ID NO: 340889 - DNA, 15 bp, Homo sapiens
ggagatttactgtat

SEQ ID NO: 340890 - DNA, 15 bp, Homo sapiens
gggagatttactgta

SEQ ID NO: 340891 - DNA, 15 bp, Homo sapiens
ggggagatttactgt

SEQ ID NO: 340892 - DNA, 15 bp, Homo sapiens
cggggagatttactg

SEQ ID NO: 340893 - DNA, 15 bp, Homo sapiens
ccggggagatttact

SEQ ID NO: 340894 - DNA, 15 bp, Homo sapiens
tccggggagatttac

SEQ ID NO: 340895 - DNA, 15 bp, Homo sapiens
ctccggggagattta

SEQ ID NO: 340896 - DNA, 15 bp, Homo sapiens
cctccggggagattt

SEQ ID NO: 340897 - DNA, 15 bp, Homo sapiens
tcctccggggagatt

SEQ ID NO: 340898 - DNA, 15 bp, Homo sapiens
gtcctccggggagat

SEQ ID NO: 340899 - DNA, 15 bp, Homo sapiens
cgtcctccggggaga

SEQ ID NO: 340900 - DNA, 15 bp, Homo sapiens
gcgtcctccggggag

SEQ ID NO: 340901 - DNA, 15 bp, Homo sapiens
agcgtcctccgggga

SEQ ID NO: 340902 - DNA, 15 bp, Homo sapiens
aagcgtcctccgggg

SEQ ID NO: 340903 - DNA, 15 bp, Homo sapiens
aaagcgtcctccggg

SEQ ID NO: 340904 - DNA, 15 bp, Homo sapiens
caaagcgtcctccgg

SEQ ID NO: 340905 - DNA, 15 bp, Homo sapiens
acaaagcgtcctccg

SEQ ID NO: 340906 - DNA, 15 bp, Homo sapiens
cacaaagcgtcctcc

SEQ ID NO: 340907 - DNA, 15 bp, Homo sapiens
ccacaaagcgtcctc

SEQ ID NO: 340908 - DNA, 15 bp, Homo sapiens
cccacaaagcgtcct

SEQ ID NO: 340909 - DNA, 15 bp, Homo sapiens
gcccacaaagcgtcc

SEQ ID NO: 340910 - DNA, 15 bp, Homo sapiens
tgcccacaaagcgtc

SEQ ID NO: 340911 - DNA, 15 bp, Homo sapiens
ctgcccacaaagcgt

SEQ ID NO: 340912 - DNA, 15 bp, Homo sapiens
tctgcccacaaagcg

SEQ ID NO: 340913 - DNA, 15 bp, Homo sapiens
ttctgcccacaaagc

SEQ ID NO: 340914 - DNA, 15 bp, Homo sapiens
tttctgcccacaaag

SEQ ID NO: 340915 - DNA, 15 bp, Homo sapiens
ctttctgcccacaaa

SEQ ID NO: 340916 - DNA, 15 bp, Homo sapiens
cctttctgcccacaa

SEQ ID NO: 340917 - DNA, 15 bp, Homo sapiens
ccctttctgcccaca

SEQ ID NO: 340918 - DNA, 15 bp, Homo sapiens
tccctttctgcccac

SEQ ID NO: 340919 - DNA, 15 bp, Homo sapiens
ctccctttctgccca

SEQ ID NO: 340920 - DNA, 15 bp, Homo sapiens
tctccctttctgccc

SEQ ID NO: 340921 - DNA, 15 bp, Homo sapiens
ctctccctttctgcc

SEQ ID NO: 340922 - DNA, 15 bp, Homo sapiens
tctctccctttctgc

SEQ ID NO: 340923 - DNA, 15 bp, Homo sapiens
atctctccctttctg

SEQ ID NO: 340924 - DNA, 15 bp, Homo sapiens
tatctctccctttct

SEQ ID NO: 340925 - DNA, 15 bp, Homo sapiens
atatctctccctttc

SEQ ID NO: 340926 - DNA, 15 bp, Homo sapiens
catatctctcccttt

SEQ ID NO: 340927 - DNA, 15 bp, Homo sapiens
tcatatctctccctt

SEQ ID NO: 340928 - DNA, 15 bp, Homo sapiens
ttcatatctctccct

SEQ ID NO: 340929 - DNA, 15 bp, Homo sapiens
attcatatctctccc

SEQ ID NO: 340930 - DNA, 15 bp, Homo sapiens
gattcatatctctcc

SEQ ID NO: 340931 - DNA, 15 bp, Homo sapiens
agattcatatctctc

SEQ ID NO: 340932 - DNA, 15 bp, Homo sapiens
cagattcatatctct

SEQ ID NO: 340933 - DNA, 15 bp, Homo sapiens
gcagattcatatctc

SEQ ID NO: 340934 - DNA, 15 bp, Homo sapiens
tgcagattcatatct

SEQ ID NO: 340935 - DNA, 15 bp, Homo sapiens
ttgcagattcatatc

SEQ ID NO: 340936 - DNA, 15 bp, Homo sapiens
cttgcagattcatat

SEQ ID NO: 340937 - DNA, 15 bp, Homo sapiens
ccttgcagattcata

SEQ ID NO: 340938 - DNA, 15 bp, Homo sapiens
cccttgcagattcat

SEQ ID NO: 340939 - DNA, 15 bp, Homo sapiens
tcccttgcagattca

SEQ ID NO: 340940 - DNA, 15 bp, Homo sapiens
gtcccttgcagattc

SEQ ID NO: 340941 - DNA, 15 bp, Homo sapiens
agtcccttgcagatt

SEQ ID NO: 340942 - DNA, 15 bp, Homo sapiens
aagtcccttgcagat

SEQ ID NO: 340943 - DNA, 15 bp, Homo sapiens
caagtcccttgcaga

SEQ ID NO: 340944 - DNA, 15 bp, Homo sapiens
tcaagtcccttgcag

SEQ ID NO: 340945 - DNA, 15 bp, Homo sapiens
atcaagtcccttgca

SEQ ID NO: 340946 - DNA, 15 bp, Homo sapiens
tatcaagtcccttgc

SEQ ID NO: 340947 - DNA, 15 bp, Homo sapiens
ttatcaagtcccttg

SEQ ID NO: 340948 - DNA, 15 bp, Homo sapiens
attatcaagtccctt

SEQ ID NO: 340949 - DNA, 15 bp, Homo sapiens
cattatcaagtccct

SEQ ID NO: 340950 - DNA, 15 bp, Homo sapiens
gcattatcaagtccc

SEQ ID NO: 340951 - DNA, 15 bp, Homo sapiens
tgcattatcaagtcc

SEQ ID NO: 340952 - DNA, 15 bp, Homo sapiens
ctgcattatcaagtc

SEQ ID NO: 340953 - DNA, 15 bp, Homo sapiens
gctgcattatcaagt

SEQ ID NO: 340954 - DNA, 15 bp, Homo sapiens
tgctgcattatcaag

SEQ ID NO: 340955 - DNA, 15 bp, Homo sapiens
atgctgcattatcaa

SEQ ID NO: 340956 - DNA, 15 bp, Homo sapiens
aatgctgcattatca

SEQ ID NO: 340957 - DNA, 15 bp, Homo sapiens
aaatgctgcattatc

SEQ ID NO: 340958 - DNA, 15 bp, Homo sapiens
taaatgctgcattat

SEQ ID NO: 340959 - DNA, 15 bp, Homo sapiens
ttaaatgctgcatta

SEQ ID NO: 340960 - DNA, 15 bp, Homo sapiens
cttaaatgctgcatt

SEQ ID NO: 340961 - DNA, 15 bp, Homo sapiens
gcttaaatgctgcat

SEQ ID NO: 340962 - DNA, 15 bp, Homo sapiens
tgcttaaatgctgca

SEQ ID NO: 340963 - DNA, 15 bp, Homo sapiens
gtgcttaaatgctgc

SEQ ID NO: 340964 - DNA, 15 bp, Homo sapiens
tgtgcttaaatgctg

SEQ ID NO: 340965 - DNA, 15 bp, Homo sapiens
ttgtgcttaaatgct

SEQ ID NO: 340966 - DNA, 15 bp, Homo sapiens
cttgtgcttaaatgc

SEQ ID NO: 340967 - DNA, 15 bp, Homo sapiens
gcttgtgcttaaatg

SEQ ID NO: 340968 - DNA, 15 bp, Homo sapiens
tgcttgtgcttaaat

SEQ ID NO: 340969 - DNA, 15 bp, Homo sapiens
atgcttgtgcttaaa

SEQ ID NO: 340970 - DNA, 15 bp, Homo sapiens
tatgcttgtgcttaa

SEQ ID NO: 340971 - DNA, 15 bp, Homo sapiens
ttatgcttgtgctta

SEQ ID NO: 340972 - DNA, 15 bp, Homo sapiens
attatgcttgtgctt

SEQ ID NO: 340973 - DNA, 15 bp, Homo sapiens
cattatgcttgtgct

SEQ ID NO: 340974 - DNA, 15 bp, Homo sapiens
acattatgcttgtgc

SEQ ID NO: 340975 - DNA, 15 bp, Homo sapiens
gacattatgcttgtg

SEQ ID NO: 340976 - DNA, 15 bp, Homo sapiens
tgacattatgcttgt

SEQ ID NO: 340977 - DNA, 15 bp, Homo sapiens
gtgacattatgcttg

SEQ ID NO: 340978 - DNA, 15 bp, Homo sapiens
agtgacattatgctt

SEQ ID NO: 340979 - DNA, 15 bp, Homo sapiens
aagtgacattatgct

SEQ ID NO: 340980 - DNA, 15 bp, Homo sapiens
taagtgacattatgc

SEQ ID NO: 340981 - DNA, 15 bp, Homo sapiens
ataagtgacattatg

SEQ ID NO: 340982 - DNA, 15 bp, Homo sapiens
aataagtgacattat

SEQ ID NO: 340983 - DNA, 15 bp, Homo sapiens
caataagtgacatta

SEQ ID NO: 340984 - DNA, 15 bp, Homo sapiens
acaataagtgacatt

SEQ ID NO: 340985 - DNA, 15 bp, Homo sapiens
aacaataagtgacat

SEQ ID NO: 340986 - DNA, 15 bp, Homo sapiens
taacaataagtgaca

SEQ ID NO: 340987 - DNA, 15 bp, Homo sapiens
ttaacaataagtgac

SEQ ID NO: 340988 - DNA, 15 bp, Homo sapiens
tttaacaataagtga

SEQ ID NO: 340989 - DNA, 15 bp, Homo sapiens
atttaacaataagtg

SEQ ID NO: 340990 - DNA, 15 bp, Homo sapiens
catttaacaataagt

SEQ ID NO: 340991 - DNA, 15 bp, Homo sapiens
gcatttaacaataag

SEQ ID NO: 340992 - DNA, 15 bp, Homo sapiens
tgcatttaacaataa

SEQ ID NO: 340993 - DNA, 15 bp, Homo sapiens
atgcatttaacaata

SEQ ID NO: 340994 - DNA, 15 bp, Homo sapiens
tatgcatttaacaat

SEQ ID NO: 340995 - DNA, 15 bp, Homo sapiens
ttatgcatttaacaa

SEQ ID NO: 340996 - DNA, 15 bp, Homo sapiens
tttatgcatttaaca

SEQ ID NO: 340997 - DNA, 15 bp, Homo sapiens
ttttatgcatttaac

SEQ ID NO: 340998 - DNA, 15 bp, Homo sapiens
gttttatgcatttaa

SEQ ID NO: 340999 - DNA, 15 bp, Homo sapiens
ggttttatgcattta

SEQ ID NO: 341000 - DNA, 15 bp, Homo sapiens
tggttttatgcattt

SEQ ID NO: 341001 - DNA, 15 bp, Homo sapiens
gtggttttatgcatt

SEQ ID NO: 341002 - DNA, 15 bp, Homo sapiens
agtggttttatgcat

SEQ ID NO: 341003 - DNA, 15 bp, Homo sapiens
aagtggttttatgca

SEQ ID NO: 341004 - DNA, 15 bp, Homo sapiens
caagtggttttatgc

SEQ ID NO: 341005 - DNA, 15 bp, Homo sapiens
ccaagtggttttatg

SEQ ID NO: 341006 - DNA, 15 bp, Homo sapiens
gccaagtggttttat

SEQ ID NO: 341007 - DNA, 15 bp, Homo sapiens
ggccaagtggtttta

SEQ ID NO: 341008 - DNA, 15 bp, Homo sapiens
tggccaagtggtttt

SEQ ID NO: 341009 - DNA, 15 bp, Homo sapiens
ttggccaagtggttt

SEQ ID NO: 341010 - DNA, 15 bp, Homo sapiens
tttggccaagtggtt

SEQ ID NO: 341011 - DNA, 15 bp, Homo sapiens
gtttggccaagtggt

SEQ ID NO: 341012 - DNA, 15 bp, Homo sapiens
tgtttggccaagtgg

SEQ ID NO: 341013 - DNA, 15 bp, Homo sapiens
ctgtttggccaagtg

SEQ ID NO: 341014 - DNA, 15 bp, Homo sapiens
actgtttggccaagt

SEQ ID NO: 341015 - DNA, 15 bp, Homo sapiens
aactgtttggccaag

SEQ ID NO: 341016 - DNA, 15 bp, Homo sapiens
caactgtttggccaa

SEQ ID NO: 341017 - DNA, 15 bp, Homo sapiens
ccaactgtttggcca

SEQ ID NO: 341018 - DNA, 15 bp, Homo sapiens
cccaactgtttggcc

SEQ ID NO: 341019 - DNA, 15 bp, Homo sapiens
gcccaactgtttggc

SEQ ID NO: 341020 - DNA, 15 bp, Homo sapiens
agcccaactgtttgg

SEQ ID NO: 341021 - DNA, 15 bp, Homo sapiens
aagcccaactgtttg

SEQ ID NO: 341022 - DNA, 15 bp, Homo sapiens
aaagcccaactgttt

SEQ ID NO: 341023 - DNA, 15 bp, Homo sapiens
aaaagcccaactgtt

SEQ ID NO: 341024 - DNA, 15 bp, Homo sapiens
taaaagcccaactgt

SEQ ID NO: 341025 - DNA, 15 bp, Homo sapiens
ttaaaagcccaactg

SEQ ID NO: 341026 - DNA, 15 bp, Homo sapiens
attaaaagcccaact

SEQ ID NO: 341027 - DNA, 15 bp, Homo sapiens
tattaaaagcccaac

SEQ ID NO: 341028 - DNA, 15 bp, Homo sapiens
ctattaaaagcccaa

SEQ ID NO: 341029 - DNA, 15 bp, Homo sapiens
cctattaaaagccca

SEQ ID NO: 341030 - DNA, 15 bp, Homo sapiens
tcctattaaaagccc

SEQ ID NO: 341031 - DNA, 15 bp, Homo sapiens
atcctattaaaagcc

SEQ ID NO: 341032 - DNA, 15 bp, Homo sapiens
aatcctattaaaagc

SEQ ID NO: 341033 - DNA, 15 bp, Homo sapiens
aaatcctattaaaag

SEQ ID NO: 341034 - DNA, 15 bp, Homo sapiens
aaaatcctattaaaa

SEQ ID NO: 341035 - DNA, 15 bp, Homo sapiens
caaaatcctattaaa

SEQ ID NO: 341036 - DNA, 15 bp, Homo sapiens
acaaaatcctattaa

SEQ ID NO: 341037 - DNA, 15 bp, Homo sapiens
cacaaaatcctatta

SEQ ID NO: 341038 - DNA, 15 bp, Homo sapiens
gcacaaaatcctatt

SEQ ID NO: 341039 - DNA, 15 bp, Homo sapiens
tgcacaaaatcctat

SEQ ID NO: 341040 - DNA, 15 bp, Homo sapiens
ctgcacaaaatccta

SEQ ID NO: 341041 - DNA, 15 bp, Homo sapiens
gctgcacaaaatcct

SEQ ID NO: 341042 - DNA, 15 bp, Homo sapiens
tgctgcacaaaatcc

SEQ ID NO: 341043 - DNA, 15 bp, Homo sapiens
atgctgcacaaaatc

SEQ ID NO: 341044 - DNA, 15 bp, Homo sapiens
gatgctgcacaaaat

SEQ ID NO: 341045 - DNA, 15 bp, Homo sapiens
tgatgctgcacaaaa

SEQ ID NO: 341046 - DNA, 15 bp, Homo sapiens
ctgatgctgcacaaa

SEQ ID NO: 341047 - DNA, 15 bp, Homo sapiens
cctgatgctgcacaa

SEQ ID NO: 341048 - DNA, 15 bp, Homo sapiens
acctgatgctgcaca

SEQ ID NO: 341049 - DNA, 15 bp, Homo sapiens
cacctgatgctgcac

SEQ ID NO: 341050 - DNA, 15 bp, Homo sapiens
tcacctgatgctgca

SEQ ID NO: 341051 - DNA, 15 bp, Homo sapiens
ctcacctgatgctgc

SEQ ID NO: 341052 - DNA, 15 bp, Homo sapiens
tctcacctgatgctg

SEQ ID NO: 341053 - DNA, 15 bp, Homo sapiens
ttctcacctgatgct

SEQ ID NO: 341054 - DNA, 15 bp, Homo sapiens
cttctcacctgatgc

SEQ ID NO: 341055 - DNA, 15 bp, Homo sapiens
gcttctcacctgatg

SEQ ID NO: 341056 - DNA, 15 bp, Homo sapiens
ggcttctcacctgat

SEQ ID NO: 341057 - DNA, 15 bp, Homo sapiens
tggcttctcacctga

SEQ ID NO: 341058 - DNA, 15 bp, Homo sapiens
atggcttctcacctg

SEQ ID NO: 341059 - DNA, 15 bp, Homo sapiens
tatggcttctcacct

SEQ ID NO: 341060 - DNA, 15 bp, Homo sapiens
atatggcttctcacc

SEQ ID NO: 341061 - DNA, 15 bp, Homo sapiens
catatggcttctcac

SEQ ID NO: 341062 - DNA, 15 bp, Homo sapiens
ccatatggcttctca

SEQ ID NO: 341063 - DNA, 15 bp, Homo sapiens
gccatatggcttctc

SEQ ID NO: 341064 - DNA, 15 bp, Homo sapiens
agccatatggcttct

SEQ ID NO: 341065 - DNA, 15 bp, Homo sapiens
aagccatatggcttc

SEQ ID NO: 341066 - DNA, 15 bp, Homo sapiens
aaaagccatatggct

SEQ ID NO: 341067 - DNA, 15 bp, Homo sapiens
gaaaagccatatggc

SEQ ID NO: 341068 - DNA, 15 bp, Homo sapiens
agaaaagccatatgg

SEQ ID NO: 341069 - DNA, 15 bp, Homo sapiens
cagaaaagccatatg

SEQ ID NO: 341070 - DNA, 15 bp, Homo sapiens
acagaaaagccatat

SEQ ID NO: 341071 - DNA, 15 bp, Homo sapiens
gacagaaaagccata

SEQ ID NO: 341072 - DNA, 15 bp, Homo sapiens
agacagaaaagccat

SEQ ID NO: 341073 - DNA, 15 bp, Homo sapiens
tagacagaaaagcca

SEQ ID NO: 341074 - DNA, 15 bp, Homo sapiens
ctagacagaaaagcc

SEQ ID NO: 341075 - DNA, 15 bp, Homo sapiens
cctagacagaaaagc

SEQ ID NO: 341076 - DNA, 15 bp, Homo sapiens
tcctagacagaaaag

SEQ ID NO: 341077 - DNA, 15 bp, Homo sapiens
ctcctagacagaaaa

SEQ ID NO: 341078 - DNA, 15 bp, Homo sapiens
actcctagacagaaa

SEQ ID NO: 341079 - DNA, 15 bp, Homo sapiens
gactcctagacagaa

SEQ ID NO: 341080 - DNA, 15 bp, Homo sapiens
agactcctagacaga

SEQ ID NO: 341081 - DNA, 15 bp, Homo sapiens
gagactcctagacag

SEQ ID NO: 341082 - DNA, 15 bp, Homo sapiens
tgagactcctagaca

SEQ ID NO: 341083 - DNA, 15 bp, Homo sapiens
ctgagactcctagac

SEQ ID NO: 341084 - DNA, 15 bp, Homo sapiens
gctgagactcctaga

SEQ ID NO: 341085 - DNA, 15 bp, Homo sapiens
tgctgagactcctag

SEQ ID NO: 341086 - DNA, 15 bp, Homo sapiens
gtgctgagactccta

SEQ ID NO: 341087 - DNA, 15 bp, Homo sapiens
ggtgctgagactcct

SEQ ID NO: 341088 - DNA, 15 bp, Homo sapiens
aggtgctgagactcc

SEQ ID NO: 341089 - DNA, 15 bp, Homo sapiens
caggtgctgagactc

SEQ ID NO: 341090 - DNA, 15 bp, Homo sapiens
gcaggtgctgagact

SEQ ID NO: 341091 - DNA, 15 bp, Homo sapiens
agcaggtgctgagac

SEQ ID NO: 341092 - DNA, 15 bp, Homo sapiens
tagcaggtgctgaga

SEQ ID NO: 341093 - DNA, 15 bp, Homo sapiens
ctagcaggtgctgag

SEQ ID NO: 341094 - DNA, 15 bp, Homo sapiens
gctagcaggtgctga

SEQ ID NO: 341095 - DNA, 15 bp, Homo sapiens
tgctagcaggtgctg

SEQ ID NO: 341096 - DNA, 15 bp, Homo sapiens
gtgctagcaggtgct

SEQ ID NO: 341097 - DNA, 15 bp, Homo sapiens
ggtgctagcaggtgc

SEQ ID NO: 341098 - DNA, 15 bp, Homo sapiens
cggtgctagcaggtg

SEQ ID NO: 341099 - DNA, 15 bp, Homo sapiens
gcggtgctagcaggt

SEQ ID NO: 341100 - DNA, 15 bp, Homo sapiens
agcggtgctagcagg

SEQ ID NO: 341101 - DNA, 15 bp, Homo sapiens
cagcggtgctagcag

SEQ ID NO: 341102 - DNA, 15 bp, Homo sapiens
gcagcggtgctagca

SEQ ID NO: 341103 - DNA, 15 bp, Homo sapiens
agcagcggtgctagc

SEQ ID NO: 341104 - DNA, 15 bp, Homo sapiens
aagcagcggtgctag

SEQ ID NO: 341105 - DNA, 15 bp, Homo sapiens
aaagcagcggtgcta

SEQ ID NO: 341106 - DNA, 15 bp, Homo sapiens
caaagcagcggtgct

SEQ ID NO: 341107 - DNA, 15 bp, Homo sapiens
gcaaagcagcggtgc

SEQ ID NO: 341108 - DNA, 15 bp, Homo sapiens
ggcaaagcagcggtg

SEQ ID NO: 341109 - DNA, 15 bp, Homo sapiens
aggcaaagcagcggt

SEQ ID NO: 341110 - DNA, 15 bp, Homo sapiens
gaggcaaagcagcgg

SEQ ID NO: 341111 - DNA, 15 bp, Homo sapiens
tgaggcaaagcagcg

SEQ ID NO: 341112 - DNA, 15 bp, Homo sapiens
gtgaggcaaagcagc

SEQ ID NO: 341113 - DNA, 15 bp, Homo sapiens
agtgaggcaaagcag

SEQ ID NO: 341114 - DNA, 15 bp, Homo sapiens
cagtgaggcaaagca

SEQ ID NO: 341115 - DNA, 15 bp, Homo sapiens
gcagtgaggcaaagc

SEQ ID NO: 341116 - DNA, 15 bp, Homo sapiens
ggcagtgaggcaaag

SEQ ID NO: 341117 - DNA, 15 bp, Homo sapiens
gggcagtgaggcaaa

SEQ ID NO: 341118 - DNA, 15 bp, Homo sapiens
agggcagtgaggcaa

SEQ ID NO: 341119 - DNA, 15 bp, Homo sapiens
gagggcagtgaggca

SEQ ID NO: 341120 - DNA, 15 bp, Homo sapiens
agagggcagtgaggc

SEQ ID NO: 341121 - DNA, 15 bp, Homo sapiens
cagagggcagtgagg

SEQ ID NO: 341122 - DNA, 15 bp, Homo sapiens
ccagagggcagtgag

SEQ ID NO: 341123 - DNA, 15 bp, Homo sapiens
cccagagggcagtga

SEQ ID NO: 341124 - DNA, 15 bp, Homo sapiens
ccccagagggcagtg

SEQ ID NO: 341125 - DNA, 15 bp, Homo sapiens
tccccagagggcagt

SEQ ID NO: 341126 - DNA, 15 bp, Homo sapiens
atccccagagggcag

SEQ ID NO: 341127 - DNA, 15 bp, Homo sapiens
catccccagagggca

SEQ ID NO: 341128 - DNA, 15 bp, Homo sapiens
ccatccccagagggc

SEQ ID NO: 341129 - DNA, 15 bp, Homo sapiens
cccatccccagaggg

SEQ ID NO: 341130 - DNA, 15 bp, Homo sapiens
tcccatccccagagg

SEQ ID NO: 341131 - DNA, 15 bp, Homo sapiens
ctcccatccccagag

SEQ ID NO: 341132 - DNA, 15 bp, Homo sapiens
gctcccatccccaga

SEQ ID NO: 341133 - DNA, 15 bp, Homo sapiens
agctcccatccccag

SEQ ID NO: 341134 - DNA, 15 bp, Homo sapiens
cagctcccatcccca

SEQ ID NO: 341135 - DNA, 15 bp, Homo sapiens
ccagctcccatcccc

SEQ ID NO: 341136 - DNA, 15 bp, Homo sapiens
cccagctcccatccc

SEQ ID NO: 341137 - DNA, 15 bp, Homo sapiens
gcccagctcccatcc

SEQ ID NO: 341138 - DNA, 15 bp, Homo sapiens
agcccagctcccatc

SEQ ID NO: 341139 - DNA, 15 bp, Homo sapiens
aagcccagctcccat

SEQ ID NO: 341140 - DNA, 15 bp, Homo sapiens
aaagcccagctccca

SEQ ID NO: 341141 - DNA, 15 bp, Homo sapiens
aaaagcccagctccc

SEQ ID NO: 341142 - DNA, 15 bp, Homo sapiens
taaaagcccagctcc

SEQ ID NO: 341143 - DNA, 15 bp, Homo sapiens
ataaaagcccagctc

SEQ ID NO: 341144 - DNA, 15 bp, Homo sapiens
cataaaagcccagct

SEQ ID NO: 341145 - DNA, 15 bp, Homo sapiens
ccataaaagcccagc

SEQ ID NO: 341146 - DNA, 15 bp, Homo sapiens
tccataaaagcccag

SEQ ID NO: 341147 - DNA, 15 bp, Homo sapiens
ctccataaaagccca

SEQ ID NO: 341148 - DNA, 15 bp, Homo sapiens
cctccataaaagccc

SEQ ID NO: 341149 - DNA, 15 bp, Homo sapiens
gcctccataaaagcc

SEQ ID NO: 341150 - DNA, 15 bp, Homo sapiens
cgcctccataaaagc

SEQ ID NO: 341151 - DNA, 15 bp, Homo sapiens
ccgcctccataaaag

SEQ ID NO: 341152 - DNA, 15 bp, Homo sapiens
tccgcctccataaaa

SEQ ID NO: 341153 - DNA, 15 bp, Homo sapiens
ctccgcctccataaa

SEQ ID NO: 341154 - DNA, 15 bp, Homo sapiens
cctccgcctccataa

SEQ ID NO: 341155 - DNA, 15 bp, Homo sapiens
ccctccgcctccata

SEQ ID NO: 341156 - DNA, 15 bp, Homo sapiens
tccctccgcctccat

SEQ ID NO: 341157 - DNA, 15 bp, Homo sapiens
ctccctccgcctcca

SEQ ID NO: 341158 - DNA, 15 bp, Homo sapiens
cctccctccgcctcc

SEQ ID NO: 341159 - DNA, 15 bp, Homo sapiens
tcctccctccgcctc

SEQ ID NO: 341160 - DNA, 15 bp, Homo sapiens
ctcctccctccgcct

SEQ ID NO: 341161 - DNA, 15 bp, Homo sapiens
tctcctccctccgcc

SEQ ID NO: 341162 - DNA, 15 bp, Homo sapiens
atctcctccctccgc

SEQ ID NO: 341163 - DNA, 15 bp, Homo sapiens
catctcctccctccg

SEQ ID NO: 341164 - DNA, 15 bp, Homo sapiens
ttcatctcctccctc

SEQ ID NO: 341165 - DNA, 15 bp, Homo sapiens
attcatctcctccct

SEQ ID NO: 341166 - DNA, 15 bp, Homo sapiens
cattcatctcctccc

SEQ ID NO: 341167 - DNA, 15 bp, Homo sapiens
gcattcatctcctcc

SEQ ID NO: 341168 - DNA, 15 bp, Homo sapiens
agcattcatctcctc

SEQ ID NO: 341169 - DNA, 15 bp, Homo sapiens
aagcattcatctcct

SEQ ID NO: 341170 - DNA, 15 bp, Homo sapiens
gaagcattcatctcc

SEQ ID NO: 341171 - DNA, 15 bp, Homo sapiens
ggaagcattcatctc

SEQ ID NO: 341172 - DNA, 15 bp, Homo sapiens
gggaagcattcatct

SEQ ID NO: 341173 - DNA, 15 bp, Homo sapiens
ggggaagcattcatc

SEQ ID NO: 341174 - DNA, 15 bp, Homo sapiens
aggggaagcattcat

SEQ ID NO: 341175 - DNA, 15 bp, Homo sapiens
caggggaagcattca

SEQ ID NO: 341176 - DNA, 15 bp, Homo sapiens
gcaggggaagcattc

SEQ ID NO: 341177 - DNA, 15 bp, Homo sapiens
tgcaggggaagcatt

SEQ ID NO: 341178 - DNA, 15 bp, Homo sapiens
ctgcaggggaagcat

SEQ ID NO: 341179 - DNA, 15 bp, Homo sapiens
gctgcaggggaagca

SEQ ID NO: 341180 - DNA, 15 bp, Homo sapiens
agctgcaggggaagc

SEQ ID NO: 341181 - DNA, 15 bp, Homo sapiens
cagctgcaggggaag

SEQ ID NO: 341182 - DNA, 15 bp, Homo sapiens
gcagctgcaggggaa

SEQ ID NO: 341183 - DNA, 15 bp, Homo sapiens
ggcagctgcagggga

SEQ ID NO: 341184 - DNA, 15 bp, Homo sapiens
aggcagctgcagggg

SEQ ID NO: 341185 - DNA, 15 bp, Homo sapiens
caggcagctgcaggg

SEQ ID NO: 341186 - DNA, 15 bp, Homo sapiens
ccaggcagctgcagg

SEQ ID NO: 341187 - DNA, 15 bp, Homo sapiens
gccaggcagctgcag

SEQ ID NO: 341188 - DNA, 15 bp, Homo sapiens
agccaggcagctgca

SEQ ID NO: 341189 - DNA, 15 bp, Homo sapiens
aagccaggcagctgc

SEQ ID NO: 341190 - DNA, 15 bp, Homo sapiens
gaagccaggcagctg

SEQ ID NO: 341191 - DNA, 15 bp, Homo sapiens
agaagccaggcagct

SEQ ID NO: 341192 - DNA, 15 bp, Homo sapiens
cagaagccaggcagc

SEQ ID NO: 341193 - DNA, 15 bp, Homo sapiens
gcagaagccaggcag

SEQ ID NO: 341194 - DNA, 15 bp, Homo sapiens
agcagaagccaggca

SEQ ID NO: 341195 - DNA, 15 bp, Homo sapiens
cagcagaagccaggc

SEQ ID NO: 341196 - DNA, 15 bp, Homo sapiens
acagcagaagccagg

SEQ ID NO: 341197 - DNA, 15 bp, Homo sapiens
gacagcagaagccag

SEQ ID NO: 341198 - DNA, 15 bp, Homo sapiens
agacagcagaagcca

SEQ ID NO: 341199 - DNA, 15 bp, Homo sapiens
aagacagcagaagcc

SEQ ID NO: 341200 - DNA, 15 bp, Homo sapiens
caagacagcagaagc

SEQ ID NO: 341201 - DNA, 15 bp, Homo sapiens
gcaagacagcagaag

SEQ ID NO: 341202 - DNA, 15 bp, Homo sapiens
ggcaagacagcagaa

SEQ ID NO: 341203 - DNA, 15 bp, Homo sapiens
tggcaagacagcaga

SEQ ID NO: 341204 - DNA, 15 bp, Homo sapiens
ctggcaagacagcag

SEQ ID NO: 341205 - DNA, 15 bp, Homo sapiens
cctggcaagacagca

SEQ ID NO: 341206 - DNA, 15 bp, Homo sapiens
ccctggcaagacagc

SEQ ID NO: 341207 - DNA, 15 bp, Homo sapiens
cccctggcaagacag

SEQ ID NO: 341208 - DNA, 15 bp, Homo sapiens
ccccctggcaagaca

SEQ ID NO: 341209 - DNA, 15 bp, Homo sapiens
accccctggcaagac

SEQ ID NO: 341210 - DNA, 15 bp, Homo sapiens
caccccctggcaaga

SEQ ID NO: 341211 - DNA, 15 bp, Homo sapiens
ccaccccctggcaag

SEQ ID NO: 341212 - DNA, 15 bp, Homo sapiens
cccaccccctggcaa

SEQ ID NO: 341213 - DNA, 15 bp, Homo sapiens
tcccaccccctggca

SEQ ID NO: 341214 - DNA, 15 bp, Homo sapiens
atcccaccccctggc

SEQ ID NO: 341215 - DNA, 15 bp, Homo sapiens
catcccaccccctgg

SEQ ID NO: 341216 - DNA, 15 bp, Homo sapiens
gcatcccaccccctg

SEQ ID NO: 341217 - DNA, 15 bp, Homo sapiens
tgcatcccaccccct

SEQ ID NO: 341218 - DNA, 15 bp, Homo sapiens
ctgcatcccaccccc

SEQ ID NO: 341219 - DNA, 15 bp, Homo sapiens
cctgcatcccacccc

SEQ ID NO: 341220 - DNA, 15 bp, Homo sapiens
ccctgcatcccaccc

SEQ ID NO: 341221 - DNA, 15 bp, Homo sapiens
accctgcatcccacc

SEQ ID NO: 341222 - DNA, 15 bp, Homo sapiens
gaccctgcatcccac

SEQ ID NO: 341223 - DNA, 15 bp, Homo sapiens
ggaccctgcatccca

SEQ ID NO: 341224 - DNA, 15 bp, Homo sapiens
aggaccctgcatccc

SEQ ID NO: 341225 - DNA, 15 bp, Homo sapiens
caggaccctgcatcc

SEQ ID NO: 341226 - DNA, 15 bp, Homo sapiens
acaggaccctgcatc

SEQ ID NO: 341227 - DNA, 15 bp, Homo sapiens
gacaggaccctgcat

SEQ ID NO: 341228 - DNA, 15 bp, Homo sapiens
cgacaggaccctgca

SEQ ID NO: 341229 - DNA, 15 bp, Homo sapiens
acgacaggaccctgc

SEQ ID NO: 341230 - DNA, 15 bp, Homo sapiens
cacgacaggaccctg

SEQ ID NO: 341231 - DNA, 15 bp, Homo sapiens
ccacgacaggaccct

SEQ ID NO: 341232 - DNA, 15 bp, Homo sapiens
accacgacaggaccc

SEQ ID NO: 341233 - DNA, 15 bp, Homo sapiens
caccacgacaggacc

SEQ ID NO: 341234 - DNA, 15 bp, Homo sapiens
gcaccacgacaggac

SEQ ID NO: 341235 - DNA, 15 bp, Homo sapiens
ggcaccacgacagga

SEQ ID NO: 341236 - DNA, 15 bp, Homo sapiens
aggcaccacgacagg

SEQ ID NO: 341237 - DNA, 15 bp, Homo sapiens
caggcaccacgacag

SEQ ID NO: 341238 - DNA, 15 bp, Homo sapiens
ccaggcaccacgaca

SEQ ID NO: 341239 - DNA, 15 bp, Homo sapiens
gccaggcaccacgac

SEQ ID NO: 341240 - DNA, 15 bp, Homo sapiens
ggccaggcaccacga

SEQ ID NO: 341241 - DNA, 15 bp, Homo sapiens
aggccaggcaccacg

SEQ ID NO: 341242 - DNA, 15 bp, Homo sapiens
caggccaggcaccac

SEQ ID NO: 341243 - DNA, 15 bp, Homo sapiens
tcaggccaggcacca

SEQ ID NO: 341244 - DNA, 15 bp, Homo sapiens
atcaggccaggcacc

SEQ ID NO: 341245 - DNA, 15 bp, Homo sapiens
gatcaggccaggcac

SEQ ID NO: 341246 - DNA, 15 bp, Homo sapiens
agatcaggccaggca

SEQ ID NO: 341247 - DNA, 15 bp, Homo sapiens
tagatcaggccaggc

SEQ ID NO: 341248 - DNA, 15 bp, Homo sapiens
ttagatcaggccagg

SEQ ID NO: 341249 - DNA, 15 bp, Homo sapiens
gttagatcaggccag

SEQ ID NO: 341250 - DNA, 15 bp, Homo sapiens
agttagatcaggcca

SEQ ID NO: 341251 - DNA, 15 bp, Homo sapiens
cagttagatcaggcc

SEQ ID NO: 341252 - DNA, 15 bp, Homo sapiens
ccagttagatcaggc

SEQ ID NO: 341253 - DNA, 15 bp, Homo sapiens
gccagttagatcagg

SEQ ID NO: 341254 - DNA, 15 bp, Homo sapiens
ggccagttagatcag

SEQ ID NO: 341255 - DNA, 15 bp, Homo sapiens
aggccagttagatca

SEQ ID NO: 341256 - DNA, 15 bp, Homo sapiens
gaggccagttagatc

SEQ ID NO: 341257 - DNA, 15 bp, Homo sapiens
agaggccagttagat

SEQ ID NO: 341258 - DNA, 15 bp, Homo sapiens
gagaggccagttaga

SEQ ID NO: 341259 - DNA, 15 bp, Homo sapiens
ggagaggccagttag

SEQ ID NO: 341260 - DNA, 15 bp, Homo sapiens
aggagaggccagtta

SEQ ID NO: 341261 - DNA, 15 bp, Homo sapiens
caggagaggccagtt

SEQ ID NO: 341262 - DNA, 15 bp, Homo sapiens
acaggagaggccagt

SEQ ID NO: 341263 - DNA, 15 bp, Homo sapiens
aacaggagaggccag

SEQ ID NO: 341264 - DNA, 15 bp, Homo sapiens
gaacaggagaggcca

SEQ ID NO: 341265 - DNA, 15 bp, Homo sapiens
tgaacaggagaggcc

SEQ ID NO: 341266 - DNA, 15 bp, Homo sapiens
ctgaacaggagaggc

SEQ ID NO: 341267 - DNA, 15 bp, Homo sapiens
cctgaacaggagagg

SEQ ID NO: 341268 - DNA, 15 bp, Homo sapiens
gcctgaacaggagag

SEQ ID NO: 341269 - DNA, 15 bp, Homo sapiens
tgcctgaacaggaga

SEQ ID NO: 341270 - DNA, 15 bp, Homo sapiens
gtgcctgaacaggag

SEQ ID NO: 341271 - DNA, 15 bp, Homo sapiens
tgtgcctgaacagga

SEQ ID NO: 341272 - DNA, 15 bp, Homo sapiens
atgtgcctgaacagg

SEQ ID NO: 341273 - DNA, 15 bp, Homo sapiens
aatgtgcctgaacag

SEQ ID NO: 341274 - DNA, 15 bp, Homo sapiens
caatgtgcctgaaca

SEQ ID NO: 341275 - DNA, 15 bp, Homo sapiens
acaatgtgcctgaac

SEQ ID NO: 341276 - DNA, 15 bp, Homo sapiens
cacaatgtgcctgaa

SEQ ID NO: 341277 - DNA, 15 bp, Homo sapiens
ccacaatgtgcctga

SEQ ID NO: 341278 - DNA, 15 bp, Homo sapiens
accacaatgtgcctg

SEQ ID NO: 341279 - DNA, 15 bp, Homo sapiens
gaccacaatgtgcct

SEQ ID NO: 341280 - DNA, 15 bp, Homo sapiens
agaccacaatgtgcc

SEQ ID NO: 341281 - DNA, 15 bp, Homo sapiens
cagaccacaatgtgc

SEQ ID NO: 341282 - DNA, 15 bp, Homo sapiens
gcagaccacaatgtg

SEQ ID NO: 341283 - DNA, 15 bp, Homo sapiens
cgcagaccacaatgt

SEQ ID NO: 341284 - DNA, 15 bp, Homo sapiens
ccgcagaccacaatg

SEQ ID NO: 341285 - DNA, 15 bp, Homo sapiens
tccgcagaccacaat

SEQ ID NO: 341286 - DNA, 15 bp, Homo sapiens
gtccgcagaccacaa

SEQ ID NO: 341287 - DNA, 15 bp, Homo sapiens
tgtccgcagaccaca

SEQ ID NO: 341288 - DNA, 15 bp, Homo sapiens
gtgtccgcagaccac

SEQ ID NO: 341289 - DNA, 15 bp, Homo sapiens
tgtgtccgcagacca

SEQ ID NO: 341290 - DNA, 15 bp, Homo sapiens
atgtgtccgcagacc

SEQ ID NO: 341291 - DNA, 15 bp, Homo sapiens
gatgtgtccgcagac

SEQ ID NO: 341292 - DNA, 15 bp, Homo sapiens
tgatgtgtccgcaga

SEQ ID NO: 341293 - DNA, 15 bp, Homo sapiens
gtgatgtgtccgcag

SEQ ID NO: 341294 - DNA, 15 bp, Homo sapiens
agtgatgtgtccgca

SEQ ID NO: 341295 - DNA, 15 bp, Homo sapiens
gagtgatgtgtccgc

SEQ ID NO: 341296 - DNA, 15 bp, Homo sapiens
agagtgatgtgtccg

SEQ ID NO: 341297 - DNA, 15 bp, Homo sapiens
cagagtgatgtgtcc

SEQ ID NO: 341298 - DNA, 15 bp, Homo sapiens
ccagagtgatgtgtc

SEQ ID NO: 341299 - DNA, 15 bp, Homo sapiens
tccagagtgatgtgt

SEQ ID NO: 341300 - DNA, 15 bp, Homo sapiens
ctccagagtgatgtg

SEQ ID NO: 341301 - DNA, 15 bp, Homo sapiens
tctccagagtgatgt

SEQ ID NO: 341302 - DNA, 15 bp, Homo sapiens
ctctccagagtgatg

SEQ ID NO: 341303 - DNA, 15 bp, Homo sapiens
actctccagagtgat

SEQ ID NO: 341304 - DNA, 15 bp, Homo sapiens
cactctccagagtga

SEQ ID NO: 341305 - DNA, 15 bp, Homo sapiens
acactctccagagtg

SEQ ID NO: 341306 - DNA, 15 bp, Homo sapiens
aacactctccagagt

SEQ ID NO: 341307 - DNA, 15 bp, Homo sapiens
aaacactctccagag

SEQ ID NO: 341308 - DNA, 15 bp, Homo sapiens
gaaacactctccaga

SEQ ID NO: 341309 - DNA, 15 bp, Homo sapiens
ggaaacactctccag

SEQ ID NO: 341310 - DNA, 15 bp, Homo sapiens
tggaaacactctcca

SEQ ID NO: 341311 - DNA, 15 bp, Homo sapiens
ttggaaacactctcc

SEQ ID NO: 341312 - DNA, 15 bp, Homo sapiens
gttggaaacactctc

SEQ ID NO: 341313 - DNA, 15 bp, Homo sapiens
agttggaaacactct

SEQ ID NO: 341314 - DNA, 15 bp, Homo sapiens
aagttggaaacactc

SEQ ID NO: 341315 - DNA, 15 bp, Homo sapiens
gaagttggaaacact

SEQ ID NO: 341316 - DNA, 15 bp, Homo sapiens
ggaagttggaaacac

SEQ ID NO: 341317 - DNA, 15 bp, Homo sapiens
aggaagttggaaaca

SEQ ID NO: 341318 - DNA, 15 bp, Homo sapiens
caggaagttggaaac

SEQ ID NO: 341319 - DNA, 15 bp, Homo sapiens
tcaggaagttggaaa

SEQ ID NO: 341320 - DNA, 15 bp, Homo sapiens
ttcaggaagttggaa

SEQ ID NO: 341321 - DNA, 15 bp, Homo sapiens
cttcaggaagttgga

SEQ ID NO: 341322 - DNA, 15 bp, Homo sapiens
ccttcaggaagttgg

SEQ ID NO: 341323 - DNA, 15 bp, Homo sapiens
tccttcaggaagttg

SEQ ID NO: 341324 - DNA, 15 bp, Homo sapiens
gtccttcaggaagtt

SEQ ID NO: 341325 - DNA, 15 bp, Homo sapiens
agtccttcaggaagt

SEQ ID NO: 341326 - DNA, 15 bp, Homo sapiens
aagtccttcaggaag

SEQ ID NO: 341327 - DNA, 15 bp, Homo sapiens
aaagtccttcaggaa

SEQ ID NO: 341328 - DNA, 15 bp, Homo sapiens
gaaagtccttcagga

SEQ ID NO: 341329 - DNA, 15 bp, Homo sapiens
agaaagtccttcagg

SEQ ID NO: 341330 - DNA, 15 bp, Homo sapiens
cagaaagtccttcag

SEQ ID NO: 341331 - DNA, 15 bp, Homo sapiens
gcagaaagtccttca

SEQ ID NO: 341332 - DNA, 15 bp, Homo sapiens
tgcagaaagtccttc

SEQ ID NO: 341333 - DNA, 15 bp, Homo sapiens
gtgcagaaagtcctt

SEQ ID NO: 341334 - DNA, 15 bp, Homo sapiens
tgtgcagaaagtcct

SEQ ID NO: 341335 - DNA, 15 bp, Homo sapiens
ttgtgcagaaagtcc

SEQ ID NO: 341336 - DNA, 15 bp, Homo sapiens
cttgtgcagaaagtc

SEQ ID NO: 341337 - DNA, 15 bp, Homo sapiens
ccttgtgcagaaagt

SEQ ID NO: 341338 - DNA, 15 bp, Homo sapiens
tccttgtgcagaaag

SEQ ID NO: 341339 - DNA, 15 bp, Homo sapiens
gtccttgtgcagaaa

SEQ ID NO: 341340 - DNA, 15 bp, Homo sapiens
ggtccttgtgcagaa

SEQ ID NO: 341341 - DNA, 15 bp, Homo sapiens
cggtccttgtgcaga

SEQ ID NO: 341342 - DNA, 15 bp, Homo sapiens
ccggtccttgtgcag

SEQ ID NO: 341343 - DNA, 15 bp, Homo sapiens
cccggtccttgtgca

SEQ ID NO: 341344 - DNA, 15 bp, Homo sapiens
tcccggtccttgtgc

SEQ ID NO: 341345 - DNA, 15 bp, Homo sapiens
atcccggtccttgtg

SEQ ID NO: 341346 - DNA, 15 bp, Homo sapiens
catcccggtccttgt

SEQ ID NO: 341347 - DNA, 15 bp, Homo sapiens
tcatcccggtccttg

SEQ ID NO: 341348 - DNA, 15 bp, Homo sapiens
gtcatcccggtcctt

SEQ ID NO: 341349 - DNA, 15 bp, Homo sapiens
cgtcatcccggtcct

SEQ ID NO: 341350 - DNA, 15 bp, Homo sapiens
acgtcatcccggtcc

SEQ ID NO: 341351 - DNA, 15 bp, Homo sapiens
gacgtcatcccggtc

SEQ ID NO: 341352 - DNA, 15 bp, Homo sapiens
tgacgtcatcccggt

SEQ ID NO: 341353 - DNA, 15 bp, Homo sapiens
ttgacgtcatcccgg

SEQ ID NO: 341354 - DNA, 15 bp, Homo sapiens
attgacgtcatcccg

SEQ ID NO: 341355 - DNA, 15 bp, Homo sapiens
cattgacgtcatccc

SEQ ID NO: 341356 - DNA, 15 bp, Homo sapiens
acattgacgtcatcc

SEQ ID NO: 341357 - DNA, 15 bp, Homo sapiens
cacattgacgtcatc

SEQ ID NO: 341358 - DNA, 15 bp, Homo sapiens
ccacattgacgtcat

SEQ ID NO: 341359 - DNA, 15 bp, Homo sapiens
tccacattgacgtca

SEQ ID NO: 341360 - DNA, 15 bp, Homo sapiens
ctccacattgacgtc

SEQ ID NO: 341361 - DNA, 15 bp, Homo sapiens
tctccacattgacgt

SEQ ID NO: 341362 - DNA, 15 bp, Homo sapiens
atctccacattgacg

SEQ ID NO: 341363 - DNA, 15 bp, Homo sapiens
gatctccacattgac

SEQ ID NO: 341364 - DNA, 15 bp, Homo sapiens
cgatctccacattga

SEQ ID NO: 341365 - DNA, 15 bp, Homo sapiens
acgatctccacattg

SEQ ID NO: 341366 - DNA, 15 bp, Homo sapiens
aacgatctccacatt

SEQ ID NO: 341367 - DNA, 15 bp, Homo sapiens
aaacgatctccacat

SEQ ID NO: 341368 - DNA, 15 bp, Homo sapiens
aaaacgatctccaca

SEQ ID NO: 341369 - DNA, 15 bp, Homo sapiens
aaaaacgatctccac

SEQ ID NO: 341370 - DNA, 15 bp, Homo sapiens
gaaaaacgatctcca

SEQ ID NO: 341371 - DNA, 15 bp, Homo sapiens
agaaaaacgatctcc

SEQ ID NO: 341372 - DNA, 15 bp, Homo sapiens
aagaaaaacgatctc

SEQ ID NO: 341373 - DNA, 15 bp, Homo sapiens
gaagaaaaacgatct

SEQ ID NO: 341374 - DNA, 15 bp, Homo sapiens
tgaagaaaaacgatc

SEQ ID NO: 341375 - DNA, 15 bp, Homo sapiens
gtgaagaaaaacgat

SEQ ID NO: 341376 - DNA, 15 bp, Homo sapiens
tgtgaagaaaaacga

SEQ ID NO: 341377 - DNA, 15 bp, Homo sapiens
ttgtgaagaaaaacg

SEQ ID NO: 341378 - DNA, 15 bp, Homo sapiens
cttgtgaagaaaaac

SEQ ID NO: 341379 - DNA, 15 bp, Homo sapiens
acttgtgaagaaaaa

SEQ ID NO: 341380 - DNA, 15 bp, Homo sapiens
tacttgtgaagaaaa

SEQ ID NO: 341381 - DNA, 15 bp, Homo sapiens
ttacttgtgaagaaa

SEQ ID NO: 341382 - DNA, 15 bp, Homo sapiens
cttacttgtgaagaa

SEQ ID NO: 341383 - DNA, 15 bp, Homo sapiens
tcttacttgtgaaga

SEQ ID NO: 341384 - DNA, 15 bp, Homo sapiens
ctcttacttgtgaag

SEQ ID NO: 341385 - DNA, 15 bp, Homo sapiens
gctcttacttgtgaa

SEQ ID NO: 341386 - DNA, 15 bp, Homo sapiens
agctcttacttgtga

SEQ ID NO: 341387 - DNA, 15 bp, Homo sapiens
aagctcttacttgtg

SEQ ID NO: 341388 - DNA, 15 bp, Homo sapiens
gaagctcttacttgt

SEQ ID NO: 341389 - DNA, 15 bp, Homo sapiens
ggaagctcttacttg

SEQ ID NO: 341390 - DNA, 15 bp, Homo sapiens
aggaagctcttactt

SEQ ID NO: 341391 - DNA, 15 bp, Homo sapiens
taggaagctcttact

SEQ ID NO: 341392 - DNA, 15 bp, Homo sapiens
gtaggaagctcttac

SEQ ID NO: 341393 - DNA, 15 bp, Homo sapiens
agtaggaagctctta

SEQ ID NO: 341394 - DNA, 15 bp, Homo sapiens
cagtaggaagctctt

SEQ ID NO: 341395 - DNA, 15 bp, Homo sapiens
gcagtaggaagctct

SEQ ID NO: 341396 - DNA, 15 bp, Homo sapiens
agcagtaggaagctc

SEQ ID NO: 341397 - DNA, 15 bp, Homo sapiens
cagcagtaggaagct

SEQ ID NO: 341398 - DNA, 15 bp, Homo sapiens
acagcagtaggaagc

SEQ ID NO: 341399 - DNA, 15 bp, Homo sapiens
gacagcagtaggaag

SEQ ID NO: 341400 - DNA, 15 bp, Homo sapiens
tgacagcagtaggaa

SEQ ID NO: 341401 - DNA, 15 bp, Homo sapiens
ctgacagcagtagga

SEQ ID NO: 341402 - DNA, 15 bp, Homo sapiens
tctgacagcagtagg

SEQ ID NO: 341403 - DNA, 15 bp, Homo sapiens
gtctgacagcagtag

SEQ ID NO: 341404 - DNA, 15 bp, Homo sapiens
ggtctgacagcagta

SEQ ID NO: 341405 - DNA, 15 bp, Homo sapiens
gggtctgacagcagt

SEQ ID NO: 341406 - DNA, 15 bp, Homo sapiens
agggtctgacagcag

SEQ ID NO: 341407 - DNA, 15 bp, Homo sapiens
gagggtctgacagca

SEQ ID NO: 341408 - DNA, 15 bp, Homo sapiens
agagggtctgacagc

SEQ ID NO: 341409 - DNA, 15 bp, Homo sapiens
cagagggtctgacag

SEQ ID NO: 341410 - DNA, 15 bp, Homo sapiens
gcagagggtctgaca

SEQ ID NO: 341411 - DNA, 15 bp, Homo sapiens
ggcagagggtctgac

SEQ ID NO: 341412 - DNA, 15 bp, Homo sapiens
gggcagagggtctga

SEQ ID NO: 341413 - DNA, 15 bp, Homo sapiens
tgggcagagggtctg

SEQ ID NO: 341414 - DNA, 15 bp, Homo sapiens
ttgggcagagggtct

SEQ ID NO: 341415 - DNA, 15 bp, Homo sapiens
gttgggcagagggtc

SEQ ID NO: 341416 - DNA, 15 bp, Homo sapiens
ggttgggcagagggt

SEQ ID NO: 341417 - DNA, 15 bp, Homo sapiens
tggttgggcagaggg

SEQ ID NO: 341418 - DNA, 15 bp, Homo sapiens
gtggttgggcagagg

SEQ ID NO: 341419 - DNA, 15 bp, Homo sapiens
tgtggttgggcagag

SEQ ID NO: 341420 - DNA, 15 bp, Homo sapiens
gtgtggttgggcaga

SEQ ID NO: 341421 - DNA, 15 bp, Homo sapiens
tgtgtggttgggcag

SEQ ID NO: 341422 - DNA, 15 bp, Homo sapiens
gtgtgtggttgggca

SEQ ID NO: 341423 - DNA, 15 bp, Homo sapiens
ggtgtgtggttgggc

SEQ ID NO: 341424 - DNA, 15 bp, Homo sapiens
gggtgtgtggttggg

SEQ ID NO: 341425 - DNA, 15 bp, Homo sapiens
agggtgtgtggttgg

SEQ ID NO: 341426 - DNA, 15 bp, Homo sapiens
cagggtgtgtggttg

SEQ ID NO: 341427 - DNA, 15 bp, Homo sapiens
gcagggtgtgtggtt

SEQ ID NO: 341428 - DNA, 15 bp, Homo sapiens
cgcagggtgtgtggt

SEQ ID NO: 341429 - DNA, 15 bp, Homo sapiens
tcgcagggtgtgtgg

SEQ ID NO: 341430 - DNA, 15 bp, Homo sapiens
ctcgcagggtgtgtg

SEQ ID NO: 341431 - DNA, 15 bp, Homo sapiens
cctcgcagggtgtgt

SEQ ID NO: 341432 - DNA, 15 bp, Homo sapiens
ccctcgcagggtgtg

SEQ ID NO: 341433 - DNA, 15 bp, Homo sapiens
tccctcgcagggtgt

SEQ ID NO: 341434 - DNA, 15 bp, Homo sapiens
gtccctcgcagggtg

SEQ ID NO: 341435 - DNA, 15 bp, Homo sapiens
agtccctcgcagggt

SEQ ID NO: 341436 - DNA, 15 bp, Homo sapiens
gagtccctcgcaggg

SEQ ID NO: 341437 - DNA, 15 bp, Homo sapiens
ggagtccctcgcagg

SEQ ID NO: 341438 - DNA, 15 bp, Homo sapiens
gggagtccctcgcag

SEQ ID NO: 341439 - DNA, 15 bp, Homo sapiens
agggagtccctcgca

SEQ ID NO: 341440 - DNA, 15 bp, Homo sapiens
cagggagtccctcgc

SEQ ID NO: 341441 - DNA, 15 bp, Homo sapiens
tcagggagtccctcg

SEQ ID NO: 341442 - DNA, 15 bp, Homo sapiens
ttcagggagtccctc

SEQ ID NO: 341443 - DNA, 15 bp, Homo sapiens
attcagggagtccct

SEQ ID NO: 341444 - DNA, 15 bp, Homo sapiens
cattcagggagtccc

SEQ ID NO: 341445 - DNA, 15 bp, Homo sapiens
acattcagggagtcc

SEQ ID NO: 341446 - DNA, 15 bp, Homo sapiens
gacattcagggagtc

SEQ ID NO: 341447 - DNA, 15 bp, Homo sapiens
agacattcagggagt

SEQ ID NO: 341448 - DNA, 15 bp, Homo sapiens
cagacattcagggag

SEQ ID NO: 341449 - DNA, 15 bp, Homo sapiens
acagacattcaggga

SEQ ID NO: 341450 - DNA, 15 bp, Homo sapiens
tacagacattcaggg

SEQ ID NO: 341451 - DNA, 15 bp, Homo sapiens
ttacagacattcagg

SEQ ID NO: 341452 - DNA, 15 bp, Homo sapiens
cttacagacattcag

SEQ ID NO: 341453 - DNA, 15 bp, Homo sapiens
tcttacagacattca

SEQ ID NO: 341454 - DNA, 15 bp, Homo sapiens
ctcttacagacattc

SEQ ID NO: 341455 - DNA, 15 bp, Homo sapiens
actcttacagacatt

SEQ ID NO: 341456 - DNA, 15 bp, Homo sapiens
cactcttacagacat

SEQ ID NO: 341457 - DNA, 15 bp, Homo sapiens
ccactcttacagaca

SEQ ID NO: 341458 - DNA, 15 bp, Homo sapiens
tccactcttacagac

SEQ ID NO: 341459 - DNA, 15 bp, Homo sapiens
ctccactcttacaga

SEQ ID NO: 341460 - DNA, 15 bp, Homo sapiens
cctccactcttacag

SEQ ID NO: 341461 - DNA, 15 bp, Homo sapiens
acctccactcttaca

SEQ ID NO: 341462 - DNA, 15 bp, Homo sapiens
gacctccactcttac

SEQ ID NO: 341463 - DNA, 15 bp, Homo sapiens
agacctccactctta

SEQ ID NO: 341464 - DNA, 15 bp, Homo sapiens
aagacctccactctt

SEQ ID NO: 341465 - DNA, 15 bp, Homo sapiens
caagacctccactct

SEQ ID NO: 341466 - DNA, 15 bp, Homo sapiens
ccaagacctccactc

SEQ ID NO: 341467 - DNA, 15 bp, Homo sapiens
cccaagacctccact

SEQ ID NO: 341468 - DNA, 15 bp, Homo sapiens
ccccaagacctccac

SEQ ID NO: 341469 - DNA, 15 bp, Homo sapiens
tccccaagacctcca

SEQ ID NO: 341470 - DNA, 15 bp, Homo sapiens
ttccccaagacctcc

SEQ ID NO: 341471 - DNA, 15 bp, Homo sapiens
attccccaagacctc

SEQ ID NO: 341472 - DNA, 15 bp, Homo sapiens
cattccccaagacct

SEQ ID NO: 341473 - DNA, 15 bp, Homo sapiens
ccattccccaagacc

SEQ ID NO: 341474 - DNA, 15 bp, Homo sapiens
gccattccccaagac

SEQ ID NO: 341475 - DNA, 15 bp, Homo sapiens
tgccattccccaaga

SEQ ID NO: 341476 - DNA, 15 bp, Homo sapiens
gtgccattccccaag

SEQ ID NO: 341477 - DNA, 15 bp, Homo sapiens
agtgccattccccaa

SEQ ID NO: 341478 - DNA, 15 bp, Homo sapiens
cagtgccattcccca

SEQ ID NO: 341479 - DNA, 15 bp, Homo sapiens
ccagtgccattcccc

SEQ ID NO: 341480 - DNA, 15 bp, Homo sapiens
cccagtgccattccc

SEQ ID NO: 341481 - DNA, 15 bp, Homo sapiens
ccccagtgccattcc

SEQ ID NO: 341482 - DNA, 15 bp, Homo sapiens
tccccagtgccattc

SEQ ID NO: 341483 - DNA, 15 bp, Homo sapiens
atccccagtgccatt

SEQ ID NO: 341484 - DNA, 15 bp, Homo sapiens
catccccagtgccat

SEQ ID NO: 341485 - DNA, 15 bp, Homo sapiens
ccatccccagtgcca

SEQ ID NO: 341486 - DNA, 15 bp, Homo sapiens
cccatccccagtgcc

SEQ ID NO: 341487 - DNA, 15 bp, Homo sapiens
ccccatccccagtgc

SEQ ID NO: 341488 - DNA, 15 bp, Homo sapiens
gccccatccccagtg

SEQ ID NO: 341489 - DNA, 15 bp, Homo sapiens
ggccccatccccagt

SEQ ID NO: 341490 - DNA, 15 bp, Homo sapiens
tggccccatccccag

SEQ ID NO: 341491 - DNA, 15 bp, Homo sapiens
ctggccccatcccca

SEQ ID NO: 341492 - DNA, 15 bp, Homo sapiens
tctggccccatcccc

SEQ ID NO: 341493 - DNA, 15 bp, Homo sapiens
ctctggccccatccc

SEQ ID NO: 341494 - DNA, 15 bp, Homo sapiens
actctggccccatcc

SEQ ID NO: 341495 - DNA, 15 bp, Homo sapiens
aactctggccccatc

SEQ ID NO: 341496 - DNA, 15 bp, Homo sapiens
caactctggccccat

SEQ ID NO: 341497 - DNA, 15 bp, Homo sapiens
ccaactctggcccca

SEQ ID NO: 341498 - DNA, 15 bp, Homo sapiens
acccaactctggccc

SEQ ID NO: 341499 - DNA, 15 bp, Homo sapiens
tacccaactctggcc

SEQ ID NO: 341500 - DNA, 15 bp, Homo sapiens
ttacccaactctggc

SEQ ID NO: 341501 - DNA, 15 bp, Homo sapiens
cttacccaactctgg

SEQ ID NO: 341502 - DNA, 15 bp, Homo sapiens
gcttacccaactctg

SEQ ID NO: 341503 - DNA, 15 bp, Homo sapiens
ggcttacccaactct

SEQ ID NO: 341504 - DNA, 15 bp, Homo sapiens
tggcttacccaactc

SEQ ID NO: 341505 - DNA, 15 bp, Homo sapiens
atggcttacccaact

SEQ ID NO: 341506 - DNA, 15 bp, Homo sapiens
catggcttacccaac

SEQ ID NO: 341507 - DNA, 15 bp, Homo sapiens
tcatggcttacccaa

SEQ ID NO: 341508 - DNA, 15 bp, Homo sapiens
atcatggcttaccca

SEQ ID NO: 341509 - DNA, 15 bp, Homo sapiens
gatcatggcttaccc

SEQ ID NO: 341510 - DNA, 15 bp, Homo sapiens
ggatcatggcttacc

SEQ ID NO: 341511 - DNA, 15 bp, Homo sapiens
gggatcatggcttac

SEQ ID NO: 341512 - DNA, 15 bp, Homo sapiens
agggatcatggctta

SEQ ID NO: 341513 - DNA, 15 bp, Homo sapiens
aagggatcatggctt

SEQ ID NO: 341514 - DNA, 15 bp, Homo sapiens
aaagggatcatggct

SEQ ID NO: 341515 - DNA, 15 bp, Homo sapiens
aaaagggatcatggc

SEQ ID NO: 341516 - DNA, 15 bp, Homo sapiens
caaaagggatcatgg

SEQ ID NO: 341517 - DNA, 15 bp, Homo sapiens
ccaaaagggatcatg

SEQ ID NO: 341518 - DNA, 15 bp, Homo sapiens
gccaaaagggatcat

SEQ ID NO: 341519 - DNA, 15 bp, Homo sapiens
ggccaaaagggatca

SEQ ID NO: 341520 - DNA, 15 bp, Homo sapiens
aggccaaaagggatc

SEQ ID NO: 341521 - DNA, 15 bp, Homo sapiens
gaggccaaaagggat

SEQ ID NO: 341522 - DNA, 15 bp, Homo sapiens
cgaggccaaaaggga

SEQ ID NO: 341523 - DNA, 15 bp, Homo sapiens
acgaggccaaaaggg

SEQ ID NO: 341524 - DNA, 15 bp, Homo sapiens
aacgaggccaaaagg

SEQ ID NO: 341525 - DNA, 15 bp, Homo sapiens
caacgaggccaaaag

SEQ ID NO: 341526 - DNA, 15 bp, Homo sapiens
ccaacgaggccaaaa

SEQ ID NO: 341527 - DNA, 15 bp, Homo sapiens
tccaacgaggccaaa

SEQ ID NO: 341528 - DNA, 15 bp, Homo sapiens
ctccaacgaggccaa

SEQ ID NO: 341529 - DNA, 15 bp, Homo sapiens
tctccaacgaggcca

SEQ ID NO: 341530 - DNA, 15 bp, Homo sapiens
ttctccaacgaggcc

SEQ ID NO: 341531 - DNA, 15 bp, Homo sapiens
cttctccaacgaggc

SEQ ID NO: 341532 - DNA, 15 bp, Homo sapiens
tcttctccaacgagg

SEQ ID NO: 341533 - DNA, 15 bp, Homo sapiens
atcttctccaacgag

SEQ ID NO: 341534 - DNA, 15 bp, Homo sapiens
tatcttctccaacga

SEQ ID NO: 341535 - DNA, 15 bp, Homo sapiens
atatcttctccaacg

SEQ ID NO: 341536 - DNA, 15 bp, Homo sapiens
aatatcttctccaac

SEQ ID NO: 341537 - DNA, 15 bp, Homo sapiens
caatatcttctccaa

SEQ ID NO: 341538 - DNA, 15 bp, Homo sapiens
gcaatatcttctcca

SEQ ID NO: 341539 - DNA, 15 bp, Homo sapiens
tgcaatatcttctcc

SEQ ID NO: 341540 - DNA, 15 bp, Homo sapiens
ctgcaatatcttctc

SEQ ID NO: 341541 - DNA, 15 bp, Homo sapiens
tctgcaatatcttct

SEQ ID NO: 341542 - DNA, 15 bp, Homo sapiens
ttctgcaatatcttc

SEQ ID NO: 341543 - DNA, 15 bp, Homo sapiens
gttctgcaatatctt

SEQ ID NO: 341544 - DNA, 15 bp, Homo sapiens
ggttctgcaatatct

SEQ ID NO: 341545 - DNA, 15 bp, Homo sapiens
tggttctgcaatatc

SEQ ID NO: 341546 - DNA, 15 bp, Homo sapiens
ttggttctgcaatat

SEQ ID NO: 341547 - DNA, 15 bp, Homo sapiens
attggttctgcaata

SEQ ID NO: 341548 - DNA, 15 bp, Homo sapiens
cattggttctgcaat

SEQ ID NO: 341549 - DNA, 15 bp, Homo sapiens
ccattggttctgcaa

SEQ ID NO: 341550 - DNA, 15 bp, Homo sapiens
tccattggttctgca

SEQ ID NO: 341551 - DNA, 15 bp, Homo sapiens
ttccattggttctgc

SEQ ID NO: 341552 - DNA, 15 bp, Homo sapiens
tttccattggttctg

SEQ ID NO: 341553 - DNA, 15 bp, Homo sapiens
ctttccattggttct

SEQ ID NO: 341554 - DNA, 15 bp, Homo sapiens
cctttccattggttc

SEQ ID NO: 341555 - DNA, 15 bp, Homo sapiens
ccctttccattggtt

SEQ ID NO: 341556 - DNA, 15 bp, Homo sapiens
tccctttccattggt

SEQ ID NO: 341557 - DNA, 15 bp, Homo sapiens
ttccctttccattgg

SEQ ID NO: 341558 - DNA, 15 bp, Homo sapiens
cttccctttccattg

SEQ ID NO: 341559 - DNA, 15 bp, Homo sapiens
gcttccctttccatt

SEQ ID NO: 341560 - DNA, 15 bp, Homo sapiens
tgcttccctttccat

SEQ ID NO: 341561 - DNA, 15 bp, Homo sapiens
ttgcttccctttcca

SEQ ID NO: 341562 - DNA, 15 bp, Homo sapiens
gttgcttccctttcc

SEQ ID NO: 341563 - DNA, 15 bp, Homo sapiens
tgttgcttccctttc

SEQ ID NO: 341564 - DNA, 15 bp, Homo sapiens
gtgttgcttcccttt

SEQ ID NO: 341565 - DNA, 15 bp, Homo sapiens
tgtgttgcttccctt

SEQ ID NO: 341566 - DNA, 15 bp, Homo sapiens
gtgtgttgcttccct

SEQ ID NO: 341567 - DNA, 15 bp, Homo sapiens
agtgtgttgcttccc

SEQ ID NO: 341568 - DNA, 15 bp, Homo sapiens
cagtgtgttgcttcc

SEQ ID NO: 341569 - DNA, 15 bp, Homo sapiens
ccagtgtgttgcttc

SEQ ID NO: 341570 - DNA, 15 bp, Homo sapiens
accagtgtgttgctt

SEQ ID NO: 341571 - DNA, 15 bp, Homo sapiens
aaccagtgtgttgct

SEQ ID NO: 341572 - DNA, 15 bp, Homo sapiens
gaaccagtgtgttgc

SEQ ID NO: 341573 - DNA, 15 bp, Homo sapiens
tgaaccagtgtgttg

SEQ ID NO: 341574 - DNA, 15 bp, Homo sapiens
ttgaaccagtgtgtt

SEQ ID NO: 341575 - DNA, 15 bp, Homo sapiens
attgaaccagtgtgt

SEQ ID NO: 341576 - DNA, 15 bp, Homo sapiens
cattgaaccagtgtg

SEQ ID NO: 341577 - DNA, 15 bp, Homo sapiens
tcattgaaccagtgt

SEQ ID NO: 341578 - DNA, 15 bp, Homo sapiens
atcattgaaccagtg

SEQ ID NO: 341579 - DNA, 15 bp, Homo sapiens
catcattgaaccagt

SEQ ID NO: 341580 - DNA, 15 bp, Homo sapiens
tcatcattgaaccag

SEQ ID NO: 341581 - DNA, 15 bp, Homo sapiens
ctcatcattgaacca

SEQ ID NO: 341582 - DNA, 15 bp, Homo sapiens
tctcatcattgaacc

SEQ ID NO: 341583 - DNA, 15 bp, Homo sapiens
ctctcatcattgaac

SEQ ID NO: 341584 - DNA, 15 bp, Homo sapiens
gctctcatcattgaa

SEQ ID NO: 341585 - DNA, 15 bp, Homo sapiens
tgctctcatcattga

SEQ ID NO: 341586 - DNA, 15 bp, Homo sapiens
ctgctctcatcattg

SEQ ID NO: 341587 - DNA, 15 bp, Homo sapiens
tctgctctcatcatt

SEQ ID NO: 341588 - DNA, 15 bp, Homo sapiens
ctctgctctcatcat

SEQ ID NO: 341589 - DNA, 15 bp, Homo sapiens
actctgctctcatca

SEQ ID NO: 341590 - DNA, 15 bp, Homo sapiens
gactctgctctcatc

SEQ ID NO: 341591 - DNA, 15 bp, Homo sapiens
agactctgctctcat

SEQ ID NO: 341592 - DNA, 15 bp, Homo sapiens
cagactctgctctca

SEQ ID NO: 341593 - DNA, 15 bp, Homo sapiens
gcagactctgctctc

SEQ ID NO: 341594 - DNA, 15 bp, Homo sapiens
ggcagactctgctct

SEQ ID NO: 341595 - DNA, 15 bp, Homo sapiens
aggcagactctgctc

SEQ ID NO: 341596 - DNA, 15 bp, Homo sapiens
gaggcagactctgct

SEQ ID NO: 341597 - DNA, 15 bp, Homo sapiens
agaggcagactctgc

SEQ ID NO: 341598 - DNA, 15 bp, Homo sapiens
cagaggcagactctg

SEQ ID NO: 341599 - DNA, 15 bp, Homo sapiens
acagaggcagactct

SEQ ID NO: 341600 - DNA, 15 bp, Homo sapiens
cacagaggcagactc

SEQ ID NO: 341601 - DNA, 15 bp, Homo sapiens
ccacagaggcagact

SEQ ID NO: 341602 - DNA, 15 bp, Homo sapiens
tccacagaggcagac

SEQ ID NO: 341603 - DNA, 15 bp, Homo sapiens
ctccacagaggcaga

SEQ ID NO: 341604 - DNA, 15 bp, Homo sapiens
cctccacagaggcag

SEQ ID NO: 341605 - DNA, 15 bp, Homo sapiens
gcctccacagaggca

SEQ ID NO: 341606 - DNA, 15 bp, Homo sapiens
cgcctccacagaggc

SEQ ID NO: 341607 - DNA, 15 bp, Homo sapiens
tcgcctccacagagg

SEQ ID NO: 341608 - DNA, 15 bp, Homo sapiens
atcgcctccacagag

SEQ ID NO: 341609 - DNA, 15 bp, Homo sapiens
aatcgcctccacaga

SEQ ID NO: 341610 - DNA, 15 bp, Homo sapiens
gaatcgcctccacag

SEQ ID NO: 341611 - DNA, 15 bp, Homo sapiens
agaatcgcctccaca

SEQ ID NO: 341612 - DNA, 15 bp, Homo sapiens
cagaatcgcctccac

SEQ ID NO: 341613 - DNA, 15 bp, Homo sapiens
ccagaatcgcctcca

SEQ ID NO: 341614 - DNA, 15 bp, Homo sapiens
cccagaatcgcctcc

SEQ ID NO: 341615 - DNA, 15 bp, Homo sapiens
tcccagaatcgcctc

SEQ ID NO: 341616 - DNA, 15 bp, Homo sapiens
gtcccagaatcgcct

SEQ ID NO: 341617 - DNA, 15 bp, Homo sapiens
ggtcccagaatcgcc

SEQ ID NO: 341618 - DNA, 15 bp, Homo sapiens
tggtcccagaatcgc

SEQ ID NO: 341619 - DNA, 15 bp, Homo sapiens
gtggtcccagaatcg

SEQ ID NO: 341620 - DNA, 15 bp, Homo sapiens
tgtggtcccagaatc

SEQ ID NO: 341621 - DNA, 15 bp, Homo sapiens
atgtggtcccagaat

SEQ ID NO: 341622 - DNA, 15 bp, Homo sapiens
gatgtggtcccagaa

SEQ ID NO: 341623 - DNA, 15 bp, Homo sapiens
ggatgtggtcccaga

SEQ ID NO: 341624 - DNA, 15 bp, Homo sapiens
cggatgtggtcccag

SEQ ID NO: 341625 - DNA, 15 bp, Homo sapiens
tcggatgtggtccca

SEQ ID NO: 341626 - DNA, 15 bp, Homo sapiens
ctcggatgtggtccc

SEQ ID NO: 341627 - DNA, 15 bp, Homo sapiens
actcggatgtggtcc

SEQ ID NO: 341628 - DNA, 15 bp, Homo sapiens
aactcggatgtggtc

SEQ ID NO: 341629 - DNA, 15 bp, Homo sapiens
aaactcggatgtggt

SEQ ID NO: 341630 - DNA, 15 bp, Homo sapiens
taaactcggatgtgg

SEQ ID NO: 341631 - DNA, 15 bp, Homo sapiens
ataaactcggatgtg

SEQ ID NO: 341632 - DNA, 15 bp, Homo sapiens
gataaactcggatgt

SEQ ID NO: 341633 - DNA, 15 bp, Homo sapiens
agataaactcggatg

SEQ ID NO: 341634 - DNA, 15 bp, Homo sapiens
gagataaactcggat

SEQ ID NO: 341635 - DNA, 15 bp, Homo sapiens
agagataaactcgga

SEQ ID NO: 341636 - DNA, 15 bp, Homo sapiens
cagagataaactcgg

SEQ ID NO: 341637 - DNA, 15 bp, Homo sapiens
ccagagataaactcg

SEQ ID NO: 341638 - DNA, 15 bp, Homo sapiens
tccagagataaactc

SEQ ID NO: 341639 - DNA, 15 bp, Homo sapiens
ttccagagataaact

SEQ ID NO: 341640 - DNA, 15 bp, Homo sapiens
cttccagagataaac

SEQ ID NO: 341641 - DNA, 15 bp, Homo sapiens
tcttccagagataaa

SEQ ID NO: 341642 - DNA, 15 bp, Homo sapiens
ttcttccagagataa

SEQ ID NO: 341643 - DNA, 15 bp, Homo sapiens
tttcttccagagata

SEQ ID NO: 341644 - DNA, 15 bp, Homo sapiens
atttcttccagagat

SEQ ID NO: 341645 - DNA, 15 bp, Homo sapiens
tatttcttccagaga

SEQ ID NO: 341646 - DNA, 15 bp, Homo sapiens
ttatttcttccagag

SEQ ID NO: 341647 - DNA, 15 bp, Homo sapiens
attatttcttccaga

SEQ ID NO: 341648 - DNA, 15 bp, Homo sapiens
tattatttcttccag

SEQ ID NO: 341649 - DNA, 15 bp, Homo sapiens
ctattatttcttcca

SEQ ID NO: 341650 - DNA, 15 bp, Homo sapiens
actattatttcttcc

SEQ ID NO: 341651 - DNA, 15 bp, Homo sapiens
cactattatttcttc

SEQ ID NO: 341652 - DNA, 15 bp, Homo sapiens
ccactattatttctt

SEQ ID NO: 341653 - DNA, 15 bp, Homo sapiens
tccactattatttct

SEQ ID NO: 341654 - DNA, 15 bp, Homo sapiens
ctccactattatttc

SEQ ID NO: 341655 - DNA, 15 bp, Homo sapiens
gctccactattattt

SEQ ID NO: 341656 - DNA, 15 bp, Homo sapiens
agctccactattatt

SEQ ID NO: 341657 - DNA, 15 bp, Homo sapiens
gagctccactattat

SEQ ID NO: 341658 - DNA, 15 bp, Homo sapiens
atgagctccactatt

SEQ ID NO: 341659 - DNA, 15 bp, Homo sapiens
aatgagctccactat

SEQ ID NO: 341660 - DNA, 15 bp, Homo sapiens
caatgagctccacta

SEQ ID NO: 341661 - DNA, 15 bp, Homo sapiens
acaatgagctccact

SEQ ID NO: 341662 - DNA, 15 bp, Homo sapiens
cacaatgagctccac

SEQ ID NO: 341663 - DNA, 15 bp, Homo sapiens
ccacaatgagctcca

SEQ ID NO: 341664 - DNA, 15 bp, Homo sapiens
cccacaatgagctcc

SEQ ID NO: 341665 - DNA, 15 bp, Homo sapiens
acccacaatgagctc

SEQ ID NO: 341666 - DNA, 15 bp, Homo sapiens
gacccacaatgagct

SEQ ID NO: 341667 - DNA, 15 bp, Homo sapiens
ggacccacaatgagc

SEQ ID NO: 341668 - DNA, 15 bp, Homo sapiens
tggacccacaatgag

SEQ ID NO: 341669 - DNA, 15 bp, Homo sapiens
ttggacccacaatga

SEQ ID NO: 341670 - DNA, 15 bp, Homo sapiens
cttggacccacaatg

SEQ ID NO: 341671 - DNA, 15 bp, Homo sapiens
acttggacccacaat

SEQ ID NO: 341672 - DNA, 15 bp, Homo sapiens
gacttggacccacaa

SEQ ID NO: 341673 - DNA, 15 bp, Homo sapiens
tgacttggacccaca

SEQ ID NO: 341674 - DNA, 15 bp, Homo sapiens
atgacttggacccac

SEQ ID NO: 341675 - DNA, 15 bp, Homo sapiens
gatgacttggaccca

SEQ ID NO: 341676 - DNA, 15 bp, Homo sapiens
tgatgacttggaccc

SEQ ID NO: 341677 - DNA, 15 bp, Homo sapiens
atgatgacttggacc

SEQ ID NO: 341678 - DNA, 15 bp, Homo sapiens
gatgatgacttggac

SEQ ID NO: 341679 - DNA, 15 bp, Homo sapiens
tgatgatgacttgga

SEQ ID NO: 341680 - DNA, 15 bp, Homo sapiens
atgatgatgacttgg

SEQ ID NO: 341681 - DNA, 15 bp, Homo sapiens
aatgatgatgacttg

SEQ ID NO: 341682 - DNA, 15 bp, Homo sapiens
caatgatgatgactt

SEQ ID NO: 341683 - DNA, 15 bp, Homo sapiens
acaatgatgatgact

SEQ ID NO: 341684 - DNA, 15 bp, Homo sapiens
gacaatgatgatgac

SEQ ID NO: 341685 - DNA, 15 bp, Homo sapiens
ggacaatgatgatga

SEQ ID NO: 341686 - DNA, 15 bp, Homo sapiens
gggacaatgatgatg

SEQ ID NO: 341687 - DNA, 15 bp, Homo sapiens
ggggacaatgatgat

SEQ ID NO: 341688 - DNA, 15 bp, Homo sapiens
aggggacaatgatga

SEQ ID NO: 341689 - DNA, 15 bp, Homo sapiens
aaggggacaatgatg

SEQ ID NO: 341690 - DNA, 15 bp, Homo sapiens
taaggggacaatgat

SEQ ID NO: 341691 - DNA, 15 bp, Homo sapiens
ctaaggggacaatga

SEQ ID NO: 341692 - DNA, 15 bp, Homo sapiens
gctaaggggacaatg

SEQ ID NO: 341693 - DNA, 15 bp, Homo sapiens
tgctaaggggacaat

SEQ ID NO: 341694 - DNA, 15 bp, Homo sapiens
ttgctaaggggacaa

SEQ ID NO: 341695 - DNA, 15 bp, Homo sapiens
attgctaaggggaca

SEQ ID NO: 341696 - DNA, 15 bp, Homo sapiens
gattgctaaggggac

SEQ ID NO: 341697 - DNA, 15 bp, Homo sapiens
agattgctaagggga

SEQ ID NO: 341698 - DNA, 15 bp, Homo sapiens
cagattgctaagggg

SEQ ID NO: 341699 - DNA, 15 bp, Homo sapiens
ccagattgctaaggg

SEQ ID NO: 341700 - DNA, 15 bp, Homo sapiens
gccagattgctaagg

SEQ ID NO: 341701 - DNA, 15 bp, Homo sapiens
cgccagattgctaag

SEQ ID NO: 341702 - DNA, 15 bp, Homo sapiens
acgccagattgctaa

SEQ ID NO: 341703 - DNA, 15 bp, Homo sapiens
cacgccagattgcta

SEQ ID NO: 341704 - DNA, 15 bp, Homo sapiens
acacgccagattgct

SEQ ID NO: 341705 - DNA, 15 bp, Homo sapiens
gacacgccagattgc

SEQ ID NO: 341706 - DNA, 15 bp, Homo sapiens
ggacacgccagattg

SEQ ID NO: 341707 - DNA, 15 bp, Homo sapiens
tggacacgccagatt

SEQ ID NO: 341708 - DNA, 15 bp, Homo sapiens
gtggacacgccagat

SEQ ID NO: 341709 - DNA, 15 bp, Homo sapiens
tgtggacacgccaga

SEQ ID NO: 341710 - DNA, 15 bp, Homo sapiens
atgtggacacgccag

SEQ ID NO: 341711 - DNA, 15 bp, Homo sapiens
aatgtggacacgcca

SEQ ID NO: 341712 - DNA, 15 bp, Homo sapiens
taatgtggacacgcc

SEQ ID NO: 341713 - DNA, 15 bp, Homo sapiens
ataatgtggacacgc

SEQ ID NO: 341714 - DNA, 15 bp, Homo sapiens
gataatgtggacacg

SEQ ID NO: 341715 - DNA, 15 bp, Homo sapiens
agataatgtggacac

SEQ ID NO: 341716 - DNA, 15 bp, Homo sapiens
cagataatgtggaca

SEQ ID NO: 341717 - DNA, 15 bp, Homo sapiens
gcagataatgtggac

SEQ ID NO: 341718 - DNA, 15 bp, Homo sapiens
agcagataatgtgga

SEQ ID NO: 341719 - DNA, 15 bp, Homo sapiens
cagcagataatgtgg

SEQ ID NO: 341720 - DNA, 15 bp, Homo sapiens
acagcagataatgtg

SEQ ID NO: 341721 - DNA, 15 bp, Homo sapiens
cacagcagataatgt

SEQ ID NO: 341722 - DNA, 15 bp, Homo sapiens
ccacagcagataatg

SEQ ID NO: 341723 - DNA, 15 bp, Homo sapiens
cccacagcagataat

SEQ ID NO: 341724 - DNA, 15 bp, Homo sapiens
tcccacagcagataa

SEQ ID NO: 341725 - DNA, 15 bp, Homo sapiens
atcccacagcagata

SEQ ID NO: 341726 - DNA, 15 bp, Homo sapiens
catcccacagcagat

SEQ ID NO: 341727 - DNA, 15 bp, Homo sapiens
tcatcccacagcaga

SEQ ID NO: 341728 - DNA, 15 bp, Homo sapiens
atcatcccacagcag

SEQ ID NO: 341729 - DNA, 15 bp, Homo sapiens
aatcatcccacagca

SEQ ID NO: 341730 - DNA, 15 bp, Homo sapiens
taatcatcccacagc

SEQ ID NO: 341731 - DNA, 15 bp, Homo sapiens
ctaatcatcccacag

SEQ ID NO: 341732 - DNA, 15 bp, Homo sapiens
gctaatcatcccaca

SEQ ID NO: 341733 - DNA, 15 bp, Homo sapiens
agctaatcatcccac

SEQ ID NO: 341734 - DNA, 15 bp, Homo sapiens
cagctaatcatccca

SEQ ID NO: 341735 - DNA, 15 bp, Homo sapiens
acagctaatcatccc

SEQ ID NO: 341736 - DNA, 15 bp, Homo sapiens
tacagctaatcatcc

SEQ ID NO: 341737 - DNA, 15 bp, Homo sapiens
atacagctaatcatc

SEQ ID NO: 341738 - DNA, 15 bp, Homo sapiens
catacagctaatcat

SEQ ID NO: 341739 - DNA, 15 bp, Homo sapiens
ccatacagctaatca

SEQ ID NO: 341740 - DNA, 15 bp, Homo sapiens
accatacagctaatc

SEQ ID NO: 341741 - DNA, 15 bp, Homo sapiens
caccatacagctaat

SEQ ID NO: 341742 - DNA, 15 bp, Homo sapiens
acaccatacagctaa

SEQ ID NO: 341743 - DNA, 15 bp, Homo sapiens
cacaccatacagcta

SEQ ID NO: 341744 - DNA, 15 bp, Homo sapiens
ccacaccatacagct

SEQ ID NO: 341745 - DNA, 15 bp, Homo sapiens
tccacaccatacagc

SEQ ID NO: 341746 - DNA, 15 bp, Homo sapiens
atccacaccatacag

SEQ ID NO: 341747 - DNA, 15 bp, Homo sapiens
tatccacaccataca

SEQ ID NO: 341748 - DNA, 15 bp, Homo sapiens
gtatccacaccatac

SEQ ID NO: 341749 - DNA, 15 bp, Homo sapiens
cgtatccacaccata

SEQ ID NO: 341750 - DNA, 15 bp, Homo sapiens
acgtatccacaccat

SEQ ID NO: 341751 - DNA, 15 bp, Homo sapiens
aacgtatccacacca

SEQ ID NO: 341752 - DNA, 15 bp, Homo sapiens
taacgtatccacacc

SEQ ID NO: 341753 - DNA, 15 bp, Homo sapiens
ctaacgtatccacac

SEQ ID NO: 341754 - DNA, 15 bp, Homo sapiens
cctaacgtatccaca

SEQ ID NO: 341755 - DNA, 15 bp, Homo sapiens
tcctaacgtatccac

SEQ ID NO: 341756 - DNA, 15 bp, Homo sapiens
ctcctaacgtatcca

SEQ ID NO: 341757 - DNA, 15 bp, Homo sapiens
actcctaacgtatcc

SEQ ID NO: 341758 - DNA, 15 bp, Homo sapiens
aactcctaacgtatc

SEQ ID NO: 341759 - DNA, 15 bp, Homo sapiens
gaactcctaacgtat

SEQ ID NO: 341760 - DNA, 15 bp, Homo sapiens
agaactcctaacgta

SEQ ID NO: 341761 - DNA, 15 bp, Homo sapiens
cagaactcctaacgt

SEQ ID NO: 341762 - DNA, 15 bp, Homo sapiens
ccagaactcctaacg

SEQ ID NO: 341763 - DNA, 15 bp, Homo sapiens
tccagaactcctaac

SEQ ID NO: 341764 - DNA, 15 bp, Homo sapiens
ctccagaactcctaa

SEQ ID NO: 341765 - DNA, 15 bp, Homo sapiens
actccagaactccta

SEQ ID NO: 341766 - DNA, 15 bp, Homo sapiens
gactccagaactcct

SEQ ID NO: 341767 - DNA, 15 bp, Homo sapiens
tgactccagaactcc

SEQ ID NO: 341768 - DNA, 15 bp, Homo sapiens
ctgactccagaactc

SEQ ID NO: 341769 - DNA, 15 bp, Homo sapiens
actgactccagaact

SEQ ID NO: 341770 - DNA, 15 bp, Homo sapiens
aactgactccagaac

SEQ ID NO: 341771 - DNA, 15 bp, Homo sapiens
caactgactccagaa

SEQ ID NO: 341772 - DNA, 15 bp, Homo sapiens
ccaactgactccaga

SEQ ID NO: 341773 - DNA, 15 bp, Homo sapiens
accaactgactccag

SEQ ID NO: 341774 - DNA, 15 bp, Homo sapiens
caccaactgactcca

SEQ ID NO: 341775 - DNA, 15 bp, Homo sapiens
tcaccaactgactcc

SEQ ID NO: 341776 - DNA, 15 bp, Homo sapiens
gtcaccaactgactc

SEQ ID NO: 341777 - DNA, 15 bp, Homo sapiens
ggtcaccaactgact

SEQ ID NO: 341778 - DNA, 15 bp, Homo sapiens
tggtcaccaactgac

SEQ ID NO: 341779 - DNA, 15 bp, Homo sapiens
ttggtcaccaactga

SEQ ID NO: 341780 - DNA, 15 bp, Homo sapiens
cttggtcaccaactg

SEQ ID NO: 341781 - DNA, 15 bp, Homo sapiens
gcttggtcaccaact

SEQ ID NO: 341782 - DNA, 15 bp, Homo sapiens
tgcttggtcaccaac

SEQ ID NO: 341783 - DNA, 15 bp, Homo sapiens
ttgcttggtcaccaa

SEQ ID NO: 341784 - DNA, 15 bp, Homo sapiens
cttgcttggtcacca

SEQ ID NO: 341785 - DNA, 15 bp, Homo sapiens
tcttgcttggtcacc

SEQ ID NO: 341786 - DNA, 15 bp, Homo sapiens
gtcttgcttggtcac

SEQ ID NO: 341787 - DNA, 15 bp, Homo sapiens
tgtcttgcttggtca

SEQ ID NO: 341788 - DNA, 15 bp, Homo sapiens
gtgtcttgcttggtc

SEQ ID NO: 341789 - DNA, 15 bp, Homo sapiens
ggtgtcttgcttggt

SEQ ID NO: 341790 - DNA, 15 bp, Homo sapiens
tggtgtcttgcttgg

SEQ ID NO: 341791 - DNA, 15 bp, Homo sapiens
ttggtgtcttgcttg

SEQ ID NO: 341792 - DNA, 15 bp, Homo sapiens
gttggtgtcttgctt

SEQ ID NO: 341793 - DNA, 15 bp, Homo sapiens
agttggtgtcttgct

SEQ ID NO: 341794 - DNA, 15 bp, Homo sapiens
aagttggtgtcttgc

SEQ ID NO: 341795 - DNA, 15 bp, Homo sapiens
taagttggtgtcttg

SEQ ID NO: 341796 - DNA, 15 bp, Homo sapiens
ttaagttggtgtctt

SEQ ID NO: 341797 - DNA, 15 bp, Homo sapiens
cttaagttggtgtct

SEQ ID NO: 341798 - DNA, 15 bp, Homo sapiens
tcttaagttggtgtc

SEQ ID NO: 341799 - DNA, 15 bp, Homo sapiens
ctcttaagttggtgt

SEQ ID NO: 341800 - DNA, 15 bp, Homo sapiens
cctcttaagttggtg

SEQ ID NO: 341801 - DNA, 15 bp, Homo sapiens
tcctcttaagttggt

SEQ ID NO: 341802 - DNA, 15 bp, Homo sapiens
ttcctcttaagttgg

SEQ ID NO: 341803 - DNA, 15 bp, Homo sapiens
cttcctcttaagttg

SEQ ID NO: 341804 - DNA, 15 bp, Homo sapiens
gcttcctcttaagtt

SEQ ID NO: 341805 - DNA, 15 bp, Homo sapiens
tgcttcctcttaagt

SEQ ID NO: 341806 - DNA, 15 bp, Homo sapiens
ctgcttcctcttaag

SEQ ID NO: 341807 - DNA, 15 bp, Homo sapiens
cctgcttcctcttaa

SEQ ID NO: 341808 - DNA, 15 bp, Homo sapiens
tcctgcttcctctta

SEQ ID NO: 341809 - DNA, 15 bp, Homo sapiens
gtcctgcttcctctt

SEQ ID NO: 341810 - DNA, 15 bp, Homo sapiens
tgtcctgcttcctct

SEQ ID NO: 341811 - DNA, 15 bp, Homo sapiens
ctgtcctgcttcctc

SEQ ID NO: 341812 - DNA, 15 bp, Homo sapiens
tctgtcctgcttcct

SEQ ID NO: 341813 - DNA, 15 bp, Homo sapiens
ttctgtcctgcttcc

SEQ ID NO: 341814 - DNA, 15 bp, Homo sapiens
cttctgtcctgcttc

SEQ ID NO: 341815 - DNA, 15 bp, Homo sapiens
ccttctgtcctgctt

SEQ ID NO: 341816 - DNA, 15 bp, Homo sapiens
accttctgtcctgct

SEQ ID NO: 341817 - DNA, 15 bp, Homo sapiens
taccttctgtcctgc

SEQ ID NO: 341818 - DNA, 15 bp, Homo sapiens
ttaccttctgtcctg

SEQ ID NO: 341819 - DNA, 15 bp, Homo sapiens
attaccttctgtcct

SEQ ID NO: 341820 - DNA, 15 bp, Homo sapiens
tattaccttctgtcc

SEQ ID NO: 341821 - DNA, 15 bp, Homo sapiens
ctattaccttctgtc

SEQ ID NO: 341822 - DNA, 15 bp, Homo sapiens
actattaccttctgt

SEQ ID NO: 341823 - DNA, 15 bp, Homo sapiens
tactattaccttctg

SEQ ID NO: 341824 - DNA, 15 bp, Homo sapiens
ttactattaccttct

SEQ ID NO: 341825 - DNA, 15 bp, Homo sapiens
attactattaccttc

SEQ ID NO: 341826 - DNA, 15 bp, Homo sapiens
tattactattacctt

SEQ ID NO: 341827 - DNA, 15 bp, Homo sapiens
ttattactattacct

SEQ ID NO: 341828 - DNA, 15 bp, Homo sapiens
gttattactattacc

SEQ ID NO: 341829 - DNA, 15 bp, Homo sapiens
tgttattactattac

SEQ ID NO: 341830 - DNA, 15 bp, Homo sapiens
ttgttattactatta

SEQ ID NO: 341831 - DNA, 15 bp, Homo sapiens
gttgttattactatt

SEQ ID NO: 341832 - DNA, 15 bp, Homo sapiens
agttgttattactat

SEQ ID NO: 341833 - DNA, 15 bp, Homo sapiens
cagttgttattacta

SEQ ID NO: 341834 - DNA, 15 bp, Homo sapiens
gcagttgttattact

SEQ ID NO: 341835 - DNA, 15 bp, Homo sapiens
ggcagttgttattac

SEQ ID NO: 341836 - DNA, 15 bp, Homo sapiens
cggcagttgttatta

SEQ ID NO: 341837 - DNA, 15 bp, Homo sapiens
acggcagttgttatt

SEQ ID NO: 341838 - DNA, 15 bp, Homo sapiens
aacggcagttgttat

SEQ ID NO: 341839 - DNA, 15 bp, Homo sapiens
gaacggcagttgtta

SEQ ID NO: 341840 - DNA, 15 bp, Homo sapiens
ggaacggcagttgtt

SEQ ID NO: 341841 - DNA, 15 bp, Homo sapiens
aggaacggcagttgt

SEQ ID NO: 341842 - DNA, 15 bp, Homo sapiens
taggaacggcagttg

SEQ ID NO: 341843 - DNA, 15 bp, Homo sapiens
ctaggaacggcagtt

SEQ ID NO: 341844 - DNA, 15 bp, Homo sapiens
cctaggaacggcagt

SEQ ID NO: 341845 - DNA, 15 bp, Homo sapiens
tcctaggaacggcag

SEQ ID NO: 341846 - DNA, 15 bp, Homo sapiens
ttcctaggaacggca

SEQ ID NO: 341847 - DNA, 15 bp, Homo sapiens
gttcctaggaacggc

SEQ ID NO: 341848 - DNA, 15 bp, Homo sapiens
ggttcctaggaacgg

SEQ ID NO: 341849 - DNA, 15 bp, Homo sapiens
gggttcctaggaacg

SEQ ID NO: 341850 - DNA, 15 bp, Homo sapiens
ggggttcctaggaac

SEQ ID NO: 341851 - DNA, 15 bp, Homo sapiens
gggggttcctaggaa

SEQ ID NO: 341852 - DNA, 15 bp, Homo sapiens
tgggggttcctagga

SEQ ID NO: 341853 - DNA, 15 bp, Homo sapiens
ctgggggttcctagg

SEQ ID NO: 341854 - DNA, 15 bp, Homo sapiens
gctgggggttcctag

SEQ ID NO: 341855 - DNA, 15 bp, Homo sapiens
tgctgggggttccta

SEQ ID NO: 341856 - DNA, 15 bp, Homo sapiens
atgctgggggttcct

SEQ ID NO: 341857 - DNA, 15 bp, Homo sapiens
catgctgggggttcc

SEQ ID NO: 341858 - DNA, 15 bp, Homo sapiens
ccatgctgggggttc

SEQ ID NO: 341859 - DNA, 15 bp, Homo sapiens
cccatgctgggggtt

SEQ ID NO: 341860 - DNA, 15 bp, Homo sapiens
tcccatgctgggggt

SEQ ID NO: 341861 - DNA, 15 bp, Homo sapiens
gtcccatgctggggg

SEQ ID NO: 341862 - DNA, 15 bp, Homo sapiens
ggtcccatgctgggg

SEQ ID NO: 341863 - DNA, 15 bp, Homo sapiens
gggtcccatgctggg

SEQ ID NO: 341864 - DNA, 15 bp, Homo sapiens
agggtcccatgctgg

SEQ ID NO: 341865 - DNA, 15 bp, Homo sapiens
tagggtcccatgctg

SEQ ID NO: 341866 - DNA, 15 bp, Homo sapiens
ctagggtcccatgct

SEQ ID NO: 341867 - DNA, 15 bp, Homo sapiens
gctagggtcccatgc

SEQ ID NO: 341868 - DNA, 15 bp, Homo sapiens
ggctagggtcccatg

SEQ ID NO: 341869 - DNA, 15 bp, Homo sapiens
gggctagggtcccat

SEQ ID NO: 341870 - DNA, 15 bp, Homo sapiens
cgggctagggtccca

SEQ ID NO: 341871 - DNA, 15 bp, Homo sapiens
acgggctagggtccc

SEQ ID NO: 341872 - DNA, 15 bp, Homo sapiens
gacgggctagggtcc

SEQ ID NO: 341873 - DNA, 15 bp, Homo sapiens
tgacgggctagggtc

SEQ ID NO: 341874 - DNA, 15 bp, Homo sapiens
gtgacgggctagggt

SEQ ID NO: 341875 - DNA, 15 bp, Homo sapiens
agtgacgggctaggg

SEQ ID NO: 341876 - DNA, 15 bp, Homo sapiens
cagtgacgggctagg

SEQ ID NO: 341877 - DNA, 15 bp, Homo sapiens
acagtgacgggctag

SEQ ID NO: 341878 - DNA, 15 bp, Homo sapiens
cacagtgacgggcta

SEQ ID NO: 341879 - DNA, 15 bp, Homo sapiens
gcacagtgacgggct

SEQ ID NO: 341880 - DNA, 15 bp, Homo sapiens
tgcacagtgacgggc

SEQ ID NO: 341881 - DNA, 15 bp, Homo sapiens
atgcacagtgacggg

SEQ ID NO: 341882 - DNA, 15 bp, Homo sapiens
catgcacagtgacgg

SEQ ID NO: 341883 - DNA, 15 bp, Homo sapiens
gcatgcacagtgacg

SEQ ID NO: 341884 - DNA, 15 bp, Homo sapiens
tgcatgcacagtgac

SEQ ID NO: 341885 - DNA, 15 bp, Homo sapiens
ctgcatgcacagtga

SEQ ID NO: 341886 - DNA, 15 bp, Homo sapiens
cctgcatgcacagtg

SEQ ID NO: 341887 - DNA, 15 bp, Homo sapiens
gcctgcatgcacagt

SEQ ID NO: 341888 - DNA, 15 bp, Homo sapiens
agcctgcatgcacag

SEQ ID NO: 341889 - DNA, 15 bp, Homo sapiens
gagcctgcatgcaca

SEQ ID NO: 341890 - DNA, 15 bp, Homo sapiens
ggagcctgcatgcac

SEQ ID NO: 341891 - DNA, 15 bp, Homo sapiens
gggagcctgcatgca

SEQ ID NO: 341892 - DNA, 15 bp, Homo sapiens
tgggagcctgcatgc

SEQ ID NO: 341893 - DNA, 15 bp, Homo sapiens
atgggagcctgcatg

SEQ ID NO: 341894 - DNA, 15 bp, Homo sapiens
aatgggagcctgcat

SEQ ID NO: 341895 - DNA, 15 bp, Homo sapiens
aaatgggagcctgca

SEQ ID NO: 341896 - DNA, 15 bp, Homo sapiens
taaatgggagcctgc

SEQ ID NO: 341897 - DNA, 15 bp, Homo sapiens
gtaaatgggagcctg

SEQ ID NO: 341898 - DNA, 15 bp, Homo sapiens
agtaaatgggagcct

SEQ ID NO: 341899 - DNA, 15 bp, Homo sapiens
gagtaaatgggagcc

SEQ ID NO: 341900 - DNA, 15 bp, Homo sapiens
ggagtaaatgggagc

SEQ ID NO: 341901 - DNA, 15 bp, Homo sapiens
tggagtaaatgggag

SEQ ID NO: 341902 - DNA, 15 bp, Homo sapiens
gtggagtaaatggga

SEQ ID NO: 341903 - DNA, 15 bp, Homo sapiens
tgtggagtaaatggg

SEQ ID NO: 341904 - DNA, 15 bp, Homo sapiens
ttgtggagtaaatgg

SEQ ID NO: 341905 - DNA, 15 bp, Homo sapiens
tttgtggagtaaatg

SEQ ID NO: 341906 - DNA, 15 bp, Homo sapiens
gtttgtggagtaaat

SEQ ID NO: 341907 - DNA, 15 bp, Homo sapiens
tgtttgtggagtaaa

SEQ ID NO: 341908 - DNA, 15 bp, Homo sapiens
ctgtttgtggagtaa

SEQ ID NO: 341909 - DNA, 15 bp, Homo sapiens
tctgtttgtggagta

SEQ ID NO: 341910 - DNA, 15 bp, Homo sapiens
ctctgtttgtggagt

SEQ ID NO: 341911 - DNA, 15 bp, Homo sapiens
actctgtttgtggag

SEQ ID NO: 341912 - DNA, 15 bp, Homo sapiens
tactctgtttgtgga

SEQ ID NO: 341913 - DNA, 15 bp, Homo sapiens
ttactctgtttgtgg

SEQ ID NO: 341914 - DNA, 15 bp, Homo sapiens
tttactctgtttgtg

SEQ ID NO: 341915 - DNA, 15 bp, Homo sapiens
ttttactctgtttgt

SEQ ID NO: 341916 - DNA, 15 bp, Homo sapiens
tttttactctgtttg

SEQ ID NO: 341917 - DNA, 15 bp, Homo sapiens
atttttactctgttt

SEQ ID NO: 341918 - DNA, 15 bp, Homo sapiens
tatttttactctgtt

SEQ ID NO: 341919 - DNA, 15 bp, Homo sapiens
gtatttttactctgt

SEQ ID NO: 341920 - DNA, 15 bp, Homo sapiens
tgtatttttactctg

SEQ ID NO: 341921 - DNA, 15 bp, Homo sapiens
atgtatttttactct

SEQ ID NO: 341922 - DNA, 15 bp, Homo sapiens
tatgtatttttactc

SEQ ID NO: 341923 - DNA, 15 bp, Homo sapiens
atatgtatttttact

SEQ ID NO: 341924 - DNA, 15 bp, Homo sapiens
aatatgtatttttac

SEQ ID NO: 341925 - DNA, 15 bp, Homo sapiens
gaatatgtattttta

SEQ ID NO: 341926 - DNA, 15 bp, Homo sapiens
agaatatgtattttt

SEQ ID NO: 341927 - DNA, 15 bp, Homo sapiens
cagaatatgtatttt

SEQ ID NO: 341928 - DNA, 15 bp, Homo sapiens
ccagaatatgtattt

SEQ ID NO: 341929 - DNA, 15 bp, Homo sapiens
tccagaatatgtatt

SEQ ID NO: 341930 - DNA, 15 bp, Homo sapiens
gtccagaatatgtat

SEQ ID NO: 341931 - DNA, 15 bp, Homo sapiens
agtccagaatatgta

SEQ ID NO: 341932 - DNA, 15 bp, Homo sapiens
gagtccagaatatgt

SEQ ID NO: 341933 - DNA, 15 bp, Homo sapiens
tgagtccagaatatg

SEQ ID NO: 341934 - DNA, 15 bp, Homo sapiens
ctgagtccagaatat

SEQ ID NO: 341935 - DNA, 15 bp, Homo sapiens
tctgagtccagaata

SEQ ID NO: 341936 - DNA, 15 bp, Homo sapiens
atctgagtccagaat

SEQ ID NO: 341937 - DNA, 15 bp, Homo sapiens
aatctgagtccagaa

SEQ ID NO: 341938 - DNA, 15 bp, Homo sapiens
gaatctgagtccaga

SEQ ID NO: 341939 - DNA, 15 bp, Homo sapiens
ggaatctgagtccag

SEQ ID NO: 341940 - DNA, 15 bp, Homo sapiens
gggaatctgagtcca

SEQ ID NO: 341941 - DNA, 15 bp, Homo sapiens
agggaatctgagtcc

SEQ ID NO: 341942 - DNA, 15 bp, Homo sapiens
cagggaatctgagtc

SEQ ID NO: 341943 - DNA, 15 bp, Homo sapiens
tcagggaatctgagt

SEQ ID NO: 341944 - DNA, 15 bp, Homo sapiens
atcagggaatctgag

SEQ ID NO: 341945 - DNA, 15 bp, Homo sapiens
gatcagggaatctga

SEQ ID NO: 341946 - DNA, 15 bp, Homo sapiens
agatcagggaatctg

SEQ ID NO: 341947 - DNA, 15 bp, Homo sapiens
cagatcagggaatct

SEQ ID NO: 341948 - DNA, 15 bp, Homo sapiens
tcagatcagggaatc

SEQ ID NO: 341949 - DNA, 15 bp, Homo sapiens
ttcagatcagggaat

SEQ ID NO: 341950 - DNA, 15 bp, Homo sapiens
attcagatcagggaa

SEQ ID NO: 341951 - DNA, 15 bp, Homo sapiens
gattcagatcaggga

SEQ ID NO: 341952 - DNA, 15 bp, Homo sapiens
ggattcagatcaggg

SEQ ID NO: 341953 - DNA, 15 bp, Homo sapiens
aggattcagatcagg

SEQ ID NO: 341954 - DNA, 15 bp, Homo sapiens
caggattcagatcag

SEQ ID NO: 341955 - DNA, 15 bp, Homo sapiens
tcaggattcagatca

SEQ ID NO: 341956 - DNA, 15 bp, Homo sapiens
gtcaggattcagatc

SEQ ID NO: 341957 - DNA, 15 bp, Homo sapiens
agtcaggattcagat

SEQ ID NO: 341958 - DNA, 15 bp, Homo sapiens
gagtcaggattcaga

SEQ ID NO: 341959 - DNA, 15 bp, Homo sapiens
tgagtcaggattcag

SEQ ID NO: 341960 - DNA, 15 bp, Homo sapiens
ttgagtcaggattca

SEQ ID NO: 341961 - DNA, 15 bp, Homo sapiens
gttgagtcaggattc

SEQ ID NO: 341962 - DNA, 15 bp, Homo sapiens
ggttgagtcaggatt

SEQ ID NO: 341963 - DNA, 15 bp, Homo sapiens
tggttgagtcaggat

SEQ ID NO: 341964 - DNA, 15 bp, Homo sapiens
ttggttgagtcagga

SEQ ID NO: 341965 - DNA, 15 bp, Homo sapiens
gttggttgagtcagg

SEQ ID NO: 341966 - DNA, 15 bp, Homo sapiens
agttggttgagtcag

SEQ ID NO: 341967 - DNA, 15 bp, Homo sapiens
tagttggttgagtca

SEQ ID NO: 341968 - DNA, 15 bp, Homo sapiens
gtagttggttgagtc

SEQ ID NO: 341969 - DNA, 15 bp, Homo sapiens
agtagttggttgagt

SEQ ID NO: 341970 - DNA, 15 bp, Homo sapiens
cagtagttggttgag

SEQ ID NO: 341971 - DNA, 15 bp, Homo sapiens
ccagtagttggttga

SEQ ID NO: 341972 - DNA, 15 bp, Homo sapiens
gccagtagttggttg

SEQ ID NO: 341973 - DNA, 15 bp, Homo sapiens
agccagtagttggtt

SEQ ID NO: 341974 - DNA, 15 bp, Homo sapiens
cagccagtagttggt

SEQ ID NO: 341975 - DNA, 15 bp, Homo sapiens
tcagccagtagttgg

SEQ ID NO: 341976 - DNA, 15 bp, Homo sapiens
ctcagccagtagttg

SEQ ID NO: 341977 - DNA, 15 bp, Homo sapiens
gctcagccagtagtt

SEQ ID NO: 341978 - DNA, 15 bp, Homo sapiens
tgctcagccagtagt

SEQ ID NO: 341979 - DNA, 15 bp, Homo sapiens
ttgctcagccagtag

SEQ ID NO: 341980 - DNA, 15 bp, Homo sapiens
cttgctcagccagta

SEQ ID NO: 341981 - DNA, 15 bp, Homo sapiens
acttgctcagccagt

SEQ ID NO: 341982 - DNA, 15 bp, Homo sapiens
aacttgctcagccag

SEQ ID NO: 341983 - DNA, 15 bp, Homo sapiens
taacttgctcagcca

SEQ ID NO: 341984 - DNA, 15 bp, Homo sapiens
gtaacttgctcagcc

SEQ ID NO: 341985 - DNA, 15 bp, Homo sapiens
agtaacttgctcagc

SEQ ID NO: 341986 - DNA, 15 bp, Homo sapiens
aagtaacttgctcag

SEQ ID NO: 341987 - DNA, 15 bp, Homo sapiens
cttaagtaacttgct

SEQ ID NO: 341988 - DNA, 15 bp, Homo sapiens
gcttaagtaacttgc

SEQ ID NO: 341989 - DNA, 15 bp, Homo sapiens
agcttaagtaacttg

SEQ ID NO: 341990 - DNA, 15 bp, Homo sapiens
gagcttaagtaactt

SEQ ID NO: 341991 - DNA, 15 bp, Homo sapiens
ggagcttaagtaact

SEQ ID NO: 341992 - DNA, 15 bp, Homo sapiens
gggagcttaagtaac

SEQ ID NO: 341993 - DNA, 15 bp, Homo sapiens
agggagcttaagtaa

SEQ ID NO: 341994 - DNA, 15 bp, Homo sapiens
cagggagcttaagta

SEQ ID NO: 341995 - DNA, 15 bp, Homo sapiens
acagggagcttaagt

SEQ ID NO: 341996 - DNA, 15 bp, Homo sapiens
cacagggagcttaag

SEQ ID NO: 341997 - DNA, 15 bp, Homo sapiens
gcacagggagcttaa

SEQ ID NO: 341998 - DNA, 15 bp, Homo sapiens
ggcacagggagctta

SEQ ID NO: 341999 - DNA, 15 bp, Homo sapiens
aggcacagggagctt

SEQ ID NO: 342000 - DNA, 15 bp, Homo sapiens
gaggcacagggagct

SEQ ID NO: 342001 - DNA, 15 bp, Homo sapiens
tgaggcacagggagc

SEQ ID NO: 342002 - DNA, 15 bp, Homo sapiens
ctgaggcacagggag

SEQ ID NO: 342003 - DNA, 15 bp, Homo sapiens
gctgaggcacaggga

SEQ ID NO: 342004 - DNA, 15 bp, Homo sapiens
agctgaggcacaggg

SEQ ID NO: 342005 - DNA, 15 bp, Homo sapiens
aagctgaggcacagg

SEQ ID NO: 342006 - DNA, 15 bp, Homo sapiens
gaagctgaggcacag

SEQ ID NO: 342007 - DNA, 15 bp, Homo sapiens
ggaagctgaggcaca

SEQ ID NO: 342008 - DNA, 15 bp, Homo sapiens
aggaagctgaggcac

SEQ ID NO: 342009 - DNA, 15 bp, Homo sapiens
gaggaagctgaggca

SEQ ID NO: 342010 - DNA, 15 bp, Homo sapiens
tgaggaagctgaggc

SEQ ID NO: 342011 - DNA, 15 bp, Homo sapiens
atgaggaagctgagg

SEQ ID NO: 342012 - DNA, 15 bp, Homo sapiens
gatgaggaagctgag

SEQ ID NO: 342013 - DNA, 15 bp, Homo sapiens
ggatgaggaagctga

SEQ ID NO: 342014 - DNA, 15 bp, Homo sapiens
tggatgaggaagctg

SEQ ID NO: 342015 - DNA, 15 bp, Homo sapiens
atggatgaggaagct

SEQ ID NO: 342016 - DNA, 15 bp, Homo sapiens
tatggatgaggaagc

SEQ ID NO: 342017 - DNA, 15 bp, Homo sapiens
ttatggatgaggaag

SEQ ID NO: 342018 - DNA, 15 bp, Homo sapiens
tttatggatgaggaa

SEQ ID NO: 342019 - DNA, 15 bp, Homo sapiens
atttatggatgagga

SEQ ID NO: 342020 - DNA, 15 bp, Homo sapiens
gatttatggatgagg

SEQ ID NO: 342021 - DNA, 15 bp, Homo sapiens
tgatttatggatgag

SEQ ID NO: 342022 - DNA, 15 bp, Homo sapiens
atgatttatggatga

SEQ ID NO: 342023 - DNA, 15 bp, Homo sapiens
catgatttatggatg

SEQ ID NO: 342024 - DNA, 15 bp, Homo sapiens
ccatgatttatggat

SEQ ID NO: 342025 - DNA, 15 bp, Homo sapiens
tccatgatttatgga

SEQ ID NO: 342026 - DNA, 15 bp, Homo sapiens
ctccatgatttatgg

SEQ ID NO: 342027 - DNA, 15 bp, Homo sapiens
tctccatgatttatg

SEQ ID NO: 342028 - DNA, 15 bp, Homo sapiens
atctccatgatttat

SEQ ID NO: 342029 - DNA, 15 bp, Homo sapiens
catctccatgattta

SEQ ID NO: 342030 - DNA, 15 bp, Homo sapiens
tcatctccatgattt

SEQ ID NO: 342031 - DNA, 15 bp, Homo sapiens
atcatctccatgatt

SEQ ID NO: 342032 - DNA, 15 bp, Homo sapiens
tatcatctccatgat

SEQ ID NO: 342033 - DNA, 15 bp, Homo sapiens
ctatcatctccatga

SEQ ID NO: 342034 - DNA, 15 bp, Homo sapiens
actatcatctccatg

SEQ ID NO: 342035 - DNA, 15 bp, Homo sapiens
tactatcatctccat

SEQ ID NO: 342036 - DNA, 15 bp, Homo sapiens
ctactatcatctcca

SEQ ID NO: 342037 - DNA, 15 bp, Homo sapiens
actactatcatctcc

SEQ ID NO: 342038 - DNA, 15 bp, Homo sapiens
aactactatcatctc

SEQ ID NO: 342039 - DNA, 15 bp, Homo sapiens
gaactactatcatct

SEQ ID NO: 342040 - DNA, 15 bp, Homo sapiens
ggaactactatcatc

SEQ ID NO: 342041 - DNA, 15 bp, Homo sapiens
aggaactactatcat

SEQ ID NO: 342042 - DNA, 15 bp, Homo sapiens
taggaactactatca

SEQ ID NO: 342043 - DNA, 15 bp, Homo sapiens
gtaggaactactatc

SEQ ID NO: 342044 - DNA, 15 bp, Homo sapiens
ggtaggaactactat

SEQ ID NO: 342045 - DNA, 15 bp, Homo sapiens
aggtaggaactacta

SEQ ID NO: 342046 - DNA, 15 bp, Homo sapiens
taggtaggaactact

SEQ ID NO: 342047 - DNA, 15 bp, Homo sapiens
ctaggtaggaactac

SEQ ID NO: 342048 - DNA, 15 bp, Homo sapiens
actaggtaggaacta

SEQ ID NO: 342049 - DNA, 15 bp, Homo sapiens
aactaggtaggaact

SEQ ID NO: 342050 - DNA, 15 bp, Homo sapiens
caactaggtaggaac

SEQ ID NO: 342051 - DNA, 15 bp, Homo sapiens
ccaactaggtaggaa

SEQ ID NO: 342052 - DNA, 15 bp, Homo sapiens
cccaactaggtagga

SEQ ID NO: 342053 - DNA, 15 bp, Homo sapiens
gcccaactaggtagg

SEQ ID NO: 342054 - DNA, 15 bp, Homo sapiens
agcccaactaggtag

SEQ ID NO: 342055 - DNA, 15 bp, Homo sapiens
cagcccaactaggta

SEQ ID NO: 342056 - DNA, 15 bp, Homo sapiens
acagcccaactaggt

SEQ ID NO: 342057 - DNA, 15 bp, Homo sapiens
cacagcccaactagg

SEQ ID NO: 342058 - DNA, 15 bp, Homo sapiens
tcacagcccaactag

SEQ ID NO: 342059 - DNA, 15 bp, Homo sapiens
atcacagcccaacta

SEQ ID NO: 342060 - DNA, 15 bp, Homo sapiens
catcacagcccaact

SEQ ID NO: 342061 - DNA, 15 bp, Homo sapiens
tcatcacagcccaac

SEQ ID NO: 342062 - DNA, 15 bp, Homo sapiens
ctcatcacagcccaa

SEQ ID NO: 342063 - DNA, 15 bp, Homo sapiens
tctcatcacagccca

SEQ ID NO: 342064 - DNA, 15 bp, Homo sapiens
ttctcatcacagccc

SEQ ID NO: 342065 - DNA, 15 bp, Homo sapiens
attctcatcacagcc

SEQ ID NO: 342066 - DNA, 15 bp, Homo sapiens
cattctcatcacagc

SEQ ID NO: 342067 - DNA, 15 bp, Homo sapiens
tcattctcatcacag

SEQ ID NO: 342068 - DNA, 15 bp, Homo sapiens
ttcattctcatcaca

SEQ ID NO: 342069 - DNA, 15 bp, Homo sapiens
tttcattctcatcac

SEQ ID NO: 342070 - DNA, 15 bp, Homo sapiens
atttcattctcatca

SEQ ID NO: 342071 - DNA, 15 bp, Homo sapiens
catttcattctcatc

SEQ ID NO: 342072 - DNA, 15 bp, Homo sapiens
tcatttcattctcat

SEQ ID NO: 342073 - DNA, 15 bp, Homo sapiens
ttcatttcattctca

SEQ ID NO: 342074 - DNA, 15 bp, Homo sapiens
attcatttcattctc

SEQ ID NO: 342075 - DNA, 15 bp, Homo sapiens
aattcatttcattct

SEQ ID NO: 342076 - DNA, 15 bp, Homo sapiens
taattcatttcattc

SEQ ID NO: 342077 - DNA, 15 bp, Homo sapiens
ttaattcatttcatt

SEQ ID NO: 342078 - DNA, 15 bp, Homo sapiens
attaattcatttcat

SEQ ID NO: 342079 - DNA, 15 bp, Homo sapiens
gattaattcatttca

SEQ ID NO: 342080 - DNA, 15 bp, Homo sapiens
ggattaattcatttc

SEQ ID NO: 342081 - DNA, 15 bp, Homo sapiens
tggattaattcattt

SEQ ID NO: 342082 - DNA, 15 bp, Homo sapiens
atggattaattcatt

SEQ ID NO: 342083 - DNA, 15 bp, Homo sapiens
tatggattaattcat

SEQ ID NO: 342084 - DNA, 15 bp, Homo sapiens
atatggattaattca

SEQ ID NO: 342085 - DNA, 15 bp, Homo sapiens
catatggattaattc

SEQ ID NO: 342086 - DNA, 15 bp, Homo sapiens
tcatatggattaatt

SEQ ID NO: 342087 - DNA, 15 bp, Homo sapiens
ttcatatggattaat

SEQ ID NO: 342088 - DNA, 15 bp, Homo sapiens
cttcatatggattaa

SEQ ID NO: 342089 - DNA, 15 bp, Homo sapiens
acttcatatggatta

SEQ ID NO: 342090 - DNA, 15 bp, Homo sapiens
cacttcatatggatt

SEQ ID NO: 342091 - DNA, 15 bp, Homo sapiens
acacttcatatggat

SEQ ID NO: 342092 - DNA, 15 bp, Homo sapiens
cacacttcatatgga

SEQ ID NO: 342093 - DNA, 15 bp, Homo sapiens
gcacacttcatatgg

SEQ ID NO: 342094 - DNA, 15 bp, Homo sapiens
tgcacacttcatatg

SEQ ID NO: 342095 - DNA, 15 bp, Homo sapiens
ctgcacacttcatat

SEQ ID NO: 342096 - DNA, 15 bp, Homo sapiens
tctgcacacttcata

SEQ ID NO: 342097 - DNA, 15 bp, Homo sapiens
ctctgcacacttcat

SEQ ID NO: 342098 - DNA, 15 bp, Homo sapiens
gctctgcacacttca

SEQ ID NO: 342099 - DNA, 15 bp, Homo sapiens
tgctctgcacacttc

SEQ ID NO: 342100 - DNA, 15 bp, Homo sapiens
ctgctctgcacactt

SEQ ID NO: 342101 - DNA, 15 bp, Homo sapiens
tctgctctgcacact

SEQ ID NO: 342102 - DNA, 15 bp, Homo sapiens
ctctgctctgcacac

SEQ ID NO: 342103 - DNA, 15 bp, Homo sapiens
actctgctctgcaca

SEQ ID NO: 342104 - DNA, 15 bp, Homo sapiens
gactctgctctgcac

SEQ ID NO: 342105 - DNA, 15 bp, Homo sapiens
tgactctgctctgca

SEQ ID NO: 342106 - DNA, 15 bp, Homo sapiens
ctgactctgctctgc

SEQ ID NO: 342107 - DNA, 15 bp, Homo sapiens
cctgactctgctctg

SEQ ID NO: 342108 - DNA, 15 bp, Homo sapiens
gcctgactctgctct

SEQ ID NO: 342109 - DNA, 15 bp, Homo sapiens
cgcctgactctgctc

SEQ ID NO: 342110 - DNA, 15 bp, Homo sapiens
acgcctgactctgct

SEQ ID NO: 342111 - DNA, 15 bp, Homo sapiens
cacgcctgactctgc

SEQ ID NO: 342112 - DNA, 15 bp, Homo sapiens
gcacgcctgactctg

SEQ ID NO: 342113 - DNA, 15 bp, Homo sapiens
tgcacgcctgactct

SEQ ID NO: 342114 - DNA, 15 bp, Homo sapiens
ctgcacgcctgactc

SEQ ID NO: 342115 - DNA, 15 bp, Homo sapiens
actgcacgcctgact

SEQ ID NO: 342116 - DNA, 15 bp, Homo sapiens
tactgcacgcctgac

SEQ ID NO: 342117 - DNA, 15 bp, Homo sapiens
ttactgcacgcctga

SEQ ID NO: 342118 - DNA, 15 bp, Homo sapiens
cttactgcacgcctg

SEQ ID NO: 342119 - DNA, 15 bp, Homo sapiens
acttactgcacgcct

SEQ ID NO: 342120 - DNA, 15 bp, Homo sapiens
gacttactgcacgcc

SEQ ID NO: 342121 - DNA, 15 bp, Homo sapiens
agacttactgcacgc

SEQ ID NO: 342122 - DNA, 15 bp, Homo sapiens
aagacttactgcacg

SEQ ID NO: 342123 - DNA, 15 bp, Homo sapiens
gaagacttactgcac

SEQ ID NO: 342124 - DNA, 15 bp, Homo sapiens
tgaagacttactgca

SEQ ID NO: 342125 - DNA, 15 bp, Homo sapiens
ttgaagacttactgc

SEQ ID NO: 342126 - DNA, 15 bp, Homo sapiens
attgaagacttactg

SEQ ID NO: 342127 - DNA, 15 bp, Homo sapiens
tattgaagacttact

SEQ ID NO: 342128 - DNA, 15 bp, Homo sapiens
ttattgaagacttac

SEQ ID NO: 342129 - DNA, 15 bp, Homo sapiens
cttattgaagactta

SEQ ID NO: 342130 - DNA, 15 bp, Homo sapiens
acttattgaagactt

SEQ ID NO: 342131 - DNA, 15 bp, Homo sapiens
cacttattgaagact

SEQ ID NO: 342132 - DNA, 15 bp, Homo sapiens
acacttattgaagac

SEQ ID NO: 342133 - DNA, 15 bp, Homo sapiens
aacacttattgaaga

SEQ ID NO: 342134 - DNA, 15 bp, Homo sapiens
taacacttattgaag

SEQ ID NO: 342135 - DNA, 15 bp, Homo sapiens
ctaacacttattgaa

SEQ ID NO: 342136 - DNA, 15 bp, Homo sapiens
gctaacacttattga

SEQ ID NO: 342137 - DNA, 15 bp, Homo sapiens
agctaacacttattg

SEQ ID NO: 342138 - DNA, 15 bp, Homo sapiens
tagctaacacttatt

SEQ ID NO: 342139 - DNA, 15 bp, Homo sapiens
atagctaacacttat

SEQ ID NO: 342140 - DNA, 15 bp, Homo sapiens
gatagctaacactta

SEQ ID NO: 342141 - DNA, 15 bp, Homo sapiens
tgatagctaacactt

SEQ ID NO: 342142 - DNA, 15 bp, Homo sapiens
ctgatagctaacact

SEQ ID NO: 342143 - DNA, 15 bp, Homo sapiens
gctgatagctaacac

SEQ ID NO: 342144 - DNA, 15 bp, Homo sapiens
ggctgatagctaaca

SEQ ID NO: 342145 - DNA, 15 bp, Homo sapiens
aggctgatagctaac

SEQ ID NO: 342146 - DNA, 15 bp, Homo sapiens
caggctgatagctaa

SEQ ID NO: 342147 - DNA, 15 bp, Homo sapiens
tcaggctgatagcta

SEQ ID NO: 342148 - DNA, 15 bp, Homo sapiens
ttcaggctgatagct

SEQ ID NO: 342149 - DNA, 15 bp, Homo sapiens
tttcaggctgatagc

SEQ ID NO: 342150 - DNA, 15 bp, Homo sapiens
ttttcaggctgatag

SEQ ID NO: 342151 - DNA, 15 bp, Homo sapiens
tttttcaggctgata

SEQ ID NO: 342152 - DNA, 15 bp, Homo sapiens
atttttcaggctgat

SEQ ID NO: 342153 - DNA, 15 bp, Homo sapiens
tatttttcaggctga

SEQ ID NO: 342154 - DNA, 15 bp, Homo sapiens
ttatttttcaggctg

SEQ ID NO: 342155 - DNA, 15 bp, Homo sapiens
gttatttttcaggct

SEQ ID NO: 342156 - DNA, 15 bp, Homo sapiens
tgttatttttcaggc

SEQ ID NO: 342157 - DNA, 15 bp, Homo sapiens
atgttatttttcagg

SEQ ID NO: 342158 - DNA, 15 bp, Homo sapiens
tatgttatttttcag

SEQ ID NO: 342159 - DNA, 15 bp, Homo sapiens
atatgttatttttca

SEQ ID NO: 342160 - DNA, 15 bp, Homo sapiens
tatatgttatttttc

SEQ ID NO: 342161 - DNA, 15 bp, Homo sapiens
atatatgttattttt

SEQ ID NO: 342162 - DNA, 15 bp, Homo sapiens
aatatatgttatttt

SEQ ID NO: 342163 - DNA, 15 bp, Homo sapiens
aaatatatgttattt

SEQ ID NO: 342164 - DNA, 15 bp, Homo sapiens
caaatatatgttatt

SEQ ID NO: 342165 - DNA, 15 bp, Homo sapiens
ccaaatatatgttat

SEQ ID NO: 342166 - DNA, 15 bp, Homo sapiens
accaaatatatgtta

SEQ ID NO: 342167 - DNA, 15 bp, Homo sapiens
aaccaaatatatgtt

SEQ ID NO: 342168 - DNA, 15 bp, Homo sapiens
caaccaaatatatgt

SEQ ID NO: 342169 - DNA, 15 bp, Homo sapiens
acaaccaaatatatg

SEQ ID NO: 342170 - DNA, 15 bp, Homo sapiens
tacaaccaaatatat

SEQ ID NO: 342171 - DNA, 15 bp, Homo sapiens
atacaaccaaatata

SEQ ID NO: 342172 - DNA, 15 bp, Homo sapiens
tatacaaccaaatat

SEQ ID NO: 342173 - DNA, 15 bp, Homo sapiens
ttatacaaccaaata

SEQ ID NO: 342174 - DNA, 15 bp, Homo sapiens
attatacaaccaaat

SEQ ID NO: 342175 - DNA, 15 bp, Homo sapiens
gattatacaaccaaa

SEQ ID NO: 342176 - DNA, 15 bp, Homo sapiens
ggattatacaaccaa

SEQ ID NO: 342177 - DNA, 15 bp, Homo sapiens
tggattatacaacca

SEQ ID NO: 342178 - DNA, 15 bp, Homo sapiens
gtggattatacaacc

SEQ ID NO: 342179 - DNA, 15 bp, Homo sapiens
agtggattatacaac

SEQ ID NO: 342180 - DNA, 15 bp, Homo sapiens
aagtggattatacaa

SEQ ID NO: 342181 - DNA, 15 bp, Homo sapiens
taagtggattataca

SEQ ID NO: 342182 - DNA, 15 bp, Homo sapiens
ctaagtggattatac

SEQ ID NO: 342183 - DNA, 15 bp, Homo sapiens
cctaagtggattata

SEQ ID NO: 342184 - DNA, 15 bp, Homo sapiens
tcctaagtggattat

SEQ ID NO: 342185 - DNA, 15 bp, Homo sapiens
ctcctaagtggatta

SEQ ID NO: 342186 - DNA, 15 bp, Homo sapiens
cctcctaagtggatt

SEQ ID NO: 342187 - DNA, 15 bp, Homo sapiens
acctcctaagtggat

SEQ ID NO: 342188 - DNA, 15 bp, Homo sapiens
tacctcctaagtgga

SEQ ID NO: 342189 - DNA, 15 bp, Homo sapiens
ctacctcctaagtgg

SEQ ID NO: 342190 - DNA, 15 bp, Homo sapiens
cctacctcctaagtg

SEQ ID NO: 342191 - DNA, 15 bp, Homo sapiens
acctacctcctaagt

SEQ ID NO: 342192 - DNA, 15 bp, Homo sapiens
gacctacctcctaag

SEQ ID NO: 342193 - DNA, 15 bp, Homo sapiens
agacctacctcctaa

SEQ ID NO: 342194 - DNA, 15 bp, Homo sapiens
aagacctacctccta

SEQ ID NO: 342195 - DNA, 15 bp, Homo sapiens
taagacctacctcct

SEQ ID NO: 342196 - DNA, 15 bp, Homo sapiens
ataagacctacctcc

SEQ ID NO: 342197 - DNA, 15 bp, Homo sapiens
gataagacctacctc

SEQ ID NO: 342198 - DNA, 15 bp, Homo sapiens
agataagacctacct

SEQ ID NO: 342199 - DNA, 15 bp, Homo sapiens
aagataagacctacc

SEQ ID NO: 342200 - DNA, 15 bp, Homo sapiens
caagataagacctac

SEQ ID NO: 342201 - DNA, 15 bp, Homo sapiens
acaagataagaccta

SEQ ID NO: 342202 - DNA, 15 bp, Homo sapiens
tacaagataagacct

SEQ ID NO: 342203 - DNA, 15 bp, Homo sapiens
atacaagataagacc

SEQ ID NO: 342204 - DNA, 15 bp, Homo sapiens
catacaagataagac

SEQ ID NO: 342205 - DNA, 15 bp, Homo sapiens
acatacaagataaga

SEQ ID NO: 342206 - DNA, 15 bp, Homo sapiens
aacatacaagataag

SEQ ID NO: 342207 - DNA, 15 bp, Homo sapiens
aaacatacaagataa

SEQ ID NO: 342208 - DNA, 15 bp, Homo sapiens
aaaacatacaagata

SEQ ID NO: 342209 - DNA, 15 bp, Homo sapiens
taaaacatacaagat

SEQ ID NO: 342210 - DNA, 15 bp, Homo sapiens
gtaaaacatacaaga

SEQ ID NO: 342211 - DNA, 15 bp, Homo sapiens
tgtaaaacatacaag

SEQ ID NO: 342212 - DNA, 15 bp, Homo sapiens
ctgtaaaacatacaa

SEQ ID NO: 342213 - DNA, 15 bp, Homo sapiens
cctgtaaaacataca

SEQ ID NO: 342214 - DNA, 15 bp, Homo sapiens
ccctgtaaaacatac

SEQ ID NO: 342215 - DNA, 15 bp, Homo sapiens
cccctgtaaaacata

SEQ ID NO: 342216 - DNA, 15 bp, Homo sapiens
tcccctgtaaaacat

SEQ ID NO: 342217 - DNA, 15 bp, Homo sapiens
ctcccctgtaaaaca

SEQ ID NO: 342218 - DNA, 15 bp, Homo sapiens
cctcccctgtaaaac

SEQ ID NO: 342219 - DNA, 15 bp, Homo sapiens
tcctcccctgtaaaa

SEQ ID NO: 342220 - DNA, 15 bp, Homo sapiens
ttcctcccctgtaaa

SEQ ID NO: 342221 - DNA, 15 bp, Homo sapiens
tttcctcccctgtaa

SEQ ID NO: 342222 - DNA, 15 bp, Homo sapiens
ctttcctcccctgta

SEQ ID NO: 342223 - DNA, 15 bp, Homo sapiens
gctttcctcccctgt

SEQ ID NO: 342224 - DNA, 15 bp, Homo sapiens
tgctttcctcccctg

SEQ ID NO: 342225 - DNA, 15 bp, Homo sapiens
ttgctttcctcccct

SEQ ID NO: 342226 - DNA, 15 bp, Homo sapiens
cttgctttcctcccc

SEQ ID NO: 342227 - DNA, 15 bp, Homo sapiens
ccttgctttcctccc

SEQ ID NO: 342228 - DNA, 15 bp, Homo sapiens
accttgctttcctcc

SEQ ID NO: 342229 - DNA, 15 bp, Homo sapiens
taccttgctttcctc

SEQ ID NO: 342230 - DNA, 15 bp, Homo sapiens
ataccttgctttcct

SEQ ID NO: 342231 - DNA, 15 bp, Homo sapiens
gataccttgctttcc

SEQ ID NO: 342232 - DNA, 15 bp, Homo sapiens
agataccttgctttc

SEQ ID NO: 342233 - DNA, 15 bp, Homo sapiens
gagataccttgcttt

SEQ ID NO: 342234 - DNA, 15 bp, Homo sapiens
ggagataccttgctt

SEQ ID NO: 342235 - DNA, 15 bp, Homo sapiens
gggagataccttgct

SEQ ID NO: 342236 - DNA, 15 bp, Homo sapiens
agggagataccttgc

SEQ ID NO: 342237 - DNA, 15 bp, Homo sapiens
aagggagataccttg

SEQ ID NO: 342238 - DNA, 15 bp, Homo sapiens
gaagggagatacctt

SEQ ID NO: 342239 - DNA, 15 bp, Homo sapiens
agaagggagatacct

SEQ ID NO: 342240 - DNA, 15 bp, Homo sapiens
tagaagggagatacc

SEQ ID NO: 342241 - DNA, 15 bp, Homo sapiens
gtagaagggagatac

SEQ ID NO: 342242 - DNA, 15 bp, Homo sapiens
ggtagaagggagata

SEQ ID NO: 342243 - DNA, 15 bp, Homo sapiens
gggtagaagggagat

SEQ ID NO: 342244 - DNA, 15 bp, Homo sapiens
tgggtagaagggaga

SEQ ID NO: 342245 - DNA, 15 bp, Homo sapiens
ttgggtagaagggag

SEQ ID NO: 342246 - DNA, 15 bp, Homo sapiens
attgggtagaaggga

SEQ ID NO: 342247 - DNA, 15 bp, Homo sapiens
cattgggtagaaggg

SEQ ID NO: 342248 - DNA, 15 bp, Homo sapiens
acattgggtagaagg

SEQ ID NO: 342249 - DNA, 15 bp, Homo sapiens
aacattgggtagaag

SEQ ID NO: 342250 - DNA, 15 bp, Homo sapiens
caacattgggtagaa

SEQ ID NO: 342251 - DNA, 15 bp, Homo sapiens
tcaacattgggtaga

SEQ ID NO: 342252 - DNA, 15 bp, Homo sapiens
ctcaacattgggtag

SEQ ID NO: 342253 - DNA, 15 bp, Homo sapiens
cctcaacattgggta

SEQ ID NO: 342254 - DNA, 15 bp, Homo sapiens
acctcaacattgggt

SEQ ID NO: 342255 - DNA, 15 bp, Homo sapiens
aacctcaacattggg

SEQ ID NO: 342256 - DNA, 15 bp, Homo sapiens
aaacctcaacattgg

SEQ ID NO: 342257 - DNA, 15 bp, Homo sapiens
aaaacctcaacattg

SEQ ID NO: 342258 - DNA, 15 bp, Homo sapiens
gaaaacctcaacatt

SEQ ID NO: 342259 - DNA, 15 bp, Homo sapiens
tgaaaacctcaacat

SEQ ID NO: 342260 - DNA, 15 bp, Homo sapiens
ttgaaaacctcaaca

SEQ ID NO: 342261 - DNA, 15 bp, Homo sapiens
gttgaaaacctcaac

SEQ ID NO: 342262 - DNA, 15 bp, Homo sapiens
agttgaaaacctcaa

SEQ ID NO: 342263 - DNA, 15 bp, Homo sapiens
aagttgaaaacctca

SEQ ID NO: 342264 - DNA, 15 bp, Homo sapiens
aaagttgaaaacctc

SEQ ID NO: 342265 - DNA, 15 bp, Homo sapiens
caaagttgaaaacct

SEQ ID NO: 342266 - DNA, 15 bp, Homo sapiens
tcaaagttgaaaacc

SEQ ID NO: 342267 - DNA, 15 bp, Homo sapiens
gtcaaagttgaaaac

SEQ ID NO: 342268 - DNA, 15 bp, Homo sapiens
agtcaaagttgaaaa

SEQ ID NO: 342269 - DNA, 15 bp, Homo sapiens
tagtcaaagttgaaa

SEQ ID NO: 342270 - DNA, 15 bp, Homo sapiens
ttagtcaaagttgaa

SEQ ID NO: 342271 - DNA, 15 bp, Homo sapiens
attagtcaaagttga

SEQ ID NO: 342272 - DNA, 15 bp, Homo sapiens
gattagtcaaagttg

SEQ ID NO: 342273 - DNA, 15 bp, Homo sapiens
ggattagtcaaagtt

SEQ ID NO: 342274 - DNA, 15 bp, Homo sapiens
aggattagtcaaagt

SEQ ID NO: 342275 - DNA, 15 bp, Homo sapiens
gaggattagtcaaag

SEQ ID NO: 342276 - DNA, 15 bp, Homo sapiens
agaggattagtcaaa

SEQ ID NO: 342277 - DNA, 15 bp, Homo sapiens
aagaggattagtcaa

SEQ ID NO: 342278 - DNA, 15 bp, Homo sapiens
aaagaggattagtca

SEQ ID NO: 342279 - DNA, 15 bp, Homo sapiens
aaaagaggattagtc

SEQ ID NO: 342280 - DNA, 15 bp, Homo sapiens
aaaaagaggattagt

SEQ ID NO: 342281 - DNA, 15 bp, Homo sapiens
taaaaagaggattag

SEQ ID NO: 342282 - DNA, 15 bp, Homo sapiens
ctaaaaagaggatta

SEQ ID NO: 342283 - DNA, 15 bp, Homo sapiens
tctaaaaagaggatt

SEQ ID NO: 342284 - DNA, 15 bp, Homo sapiens
atctaaaaagaggat

SEQ ID NO: 342285 - DNA, 15 bp, Homo sapiens
tatctaaaaagagga

SEQ ID NO: 342286 - DNA, 15 bp, Homo sapiens
ttatctaaaaagagg

SEQ ID NO: 342287 - DNA, 15 bp, Homo sapiens
tttatctaaaaagag

SEQ ID NO: 342288 - DNA, 15 bp, Homo sapiens
ttttatctaaaaaga

SEQ ID NO: 342289 - DNA, 15 bp, Homo sapiens
cttttatctaaaaag

SEQ ID NO: 342290 - DNA, 15 bp, Homo sapiens
ccttttatctaaaaa

SEQ ID NO: 342291 - DNA, 15 bp, Homo sapiens
accttttatctaaaa

SEQ ID NO: 342292 - DNA, 15 bp, Homo sapiens
taccttttatctaaa

SEQ ID NO: 342293 - DNA, 15 bp, Homo sapiens
ctaccttttatctaa

SEQ ID NO: 342294 - DNA, 15 bp, Homo sapiens
actaccttttatcta

SEQ ID NO: 342295 - DNA, 15 bp, Homo sapiens
gactaccttttatct

SEQ ID NO: 342296 - DNA, 15 bp, Homo sapiens
agactaccttttatc

SEQ ID NO: 342297 - DNA, 15 bp, Homo sapiens
cagactaccttttat

SEQ ID NO: 342298 - DNA, 15 bp, Homo sapiens
gcagactacctttta

SEQ ID NO: 342299 - DNA, 15 bp, Homo sapiens
ggcagactacctttt

SEQ ID NO: 342300 - DNA, 15 bp, Homo sapiens
gggcagactaccttt

SEQ ID NO: 342301 - DNA, 15 bp, Homo sapiens
ggggcagactacctt

SEQ ID NO: 342302 - DNA, 15 bp, Homo sapiens
tggggcagactacct

SEQ ID NO: 342303 - DNA, 15 bp, Homo sapiens
ctggggcagactacc

SEQ ID NO: 342304 - DNA, 15 bp, Homo sapiens
cctggggcagactac

SEQ ID NO: 342305 - DNA, 15 bp, Homo sapiens
tcctggggcagacta

SEQ ID NO: 342306 - DNA, 15 bp, Homo sapiens
ttcctggggcagact

SEQ ID NO: 342307 - DNA, 15 bp, Homo sapiens
attcctggggcagac

SEQ ID NO: 342308 - DNA, 15 bp, Homo sapiens
cattcctggggcaga

SEQ ID NO: 342309 - DNA, 15 bp, Homo sapiens
ccattcctggggcag

SEQ ID NO: 342310 - DNA, 15 bp, Homo sapiens
tccattcctggggca

SEQ ID NO: 342311 - DNA, 15 bp, Homo sapiens
ctccattcctggggc

SEQ ID NO: 342312 - DNA, 15 bp, Homo sapiens
tctccattcctgggg

SEQ ID NO: 342313 - DNA, 15 bp, Homo sapiens
ctctccattcctggg

SEQ ID NO: 342314 - DNA, 15 bp, Homo sapiens
tctctccattcctgg

SEQ ID NO: 342315 - DNA, 15 bp, Homo sapiens
ttctctccattcctg

SEQ ID NO: 342316 - DNA, 15 bp, Homo sapiens
attctctccattcct

SEQ ID NO: 342317 - DNA, 15 bp, Homo sapiens
aattctctccattcc

SEQ ID NO: 342318 - DNA, 15 bp, Homo sapiens
taattctctccattc

SEQ ID NO: 342319 - DNA, 15 bp, Homo sapiens
ctaattctctccatt

SEQ ID NO: 342320 - DNA, 15 bp, Homo sapiens
cctaattctctccat

SEQ ID NO: 342321 - DNA, 15 bp, Homo sapiens
ccctaattctctcca

SEQ ID NO: 342322 - DNA, 15 bp, Homo sapiens
cccctaattctctcc

SEQ ID NO: 342323 - DNA, 15 bp, Homo sapiens
ccccctaattctctc

SEQ ID NO: 342324 - DNA, 15 bp, Homo sapiens
gccccctaattctct

SEQ ID NO: 342325 - DNA, 15 bp, Homo sapiens
agccccctaattctc

SEQ ID NO: 342326 - DNA, 15 bp, Homo sapiens
gagccccctaattct

SEQ ID NO: 342327 - DNA, 15 bp, Homo sapiens
ggagccccctaattc

SEQ ID NO: 342328 - DNA, 15 bp, Homo sapiens
tggagccccctaatt

SEQ ID NO: 342329 - DNA, 15 bp, Homo sapiens
atggagccccctaat

SEQ ID NO: 342330 - DNA, 15 bp, Homo sapiens
aatggagccccctaa

SEQ ID NO: 342331 - DNA, 15 bp, Homo sapiens
taatggagcccccta

SEQ ID NO: 342332 - DNA, 15 bp, Homo sapiens
ataatggagccccct

SEQ ID NO: 342333 - DNA, 15 bp, Homo sapiens
cataatggagccccc

SEQ ID NO: 342334 - DNA, 15 bp, Homo sapiens
ccataatggagcccc

SEQ ID NO: 342335 - DNA, 15 bp, Homo sapiens
accataatggagccc

SEQ ID NO: 342336 - DNA, 15 bp, Homo sapiens
caccataatggagcc

SEQ ID NO: 342337 - DNA, 15 bp, Homo sapiens
tcaccataatggagc

SEQ ID NO: 342338 - DNA, 15 bp, Homo sapiens
gtcaccataatggag

SEQ ID NO: 342339 - DNA, 15 bp, Homo sapiens
tgtcaccataatgga

SEQ ID NO: 342340 - DNA, 15 bp, Homo sapiens
atgtcaccataatgg

SEQ ID NO: 342341 - DNA, 15 bp, Homo sapiens
catgtcaccataatg

SEQ ID NO: 342342 - DNA, 15 bp, Homo sapiens
acatgtcaccataat

SEQ ID NO: 342343 - DNA, 15 bp, Homo sapiens
cacatgtcaccataa

SEQ ID NO: 342344 - DNA, 15 bp, Homo sapiens
acacatgtcaccata

SEQ ID NO: 342345 - DNA, 15 bp, Homo sapiens
cacacatgtcaccat

SEQ ID NO: 342346 - DNA, 15 bp, Homo sapiens
ccacacatgtcacca

SEQ ID NO: 342347 - DNA, 15 bp, Homo sapiens
accacacatgtcacc

SEQ ID NO: 342348 - DNA, 15 bp, Homo sapiens
taccacacatgtcac

SEQ ID NO: 342349 - DNA, 15 bp, Homo sapiens
gtaccacacatgtca

SEQ ID NO: 342350 - DNA, 15 bp, Homo sapiens
ggtaccacacatgtc

SEQ ID NO: 342351 - DNA, 15 bp, Homo sapiens
tggtaccacacatgt

SEQ ID NO: 342352 - DNA, 15 bp, Homo sapiens
atggtaccacacatg

SEQ ID NO: 342353 - DNA, 15 bp, Homo sapiens
catggtaccacacat

SEQ ID NO: 342354 - DNA, 15 bp, Homo sapiens
ccatggtaccacaca

SEQ ID NO: 342355 - DNA, 15 bp, Homo sapiens
accatggtaccacac

SEQ ID NO: 342356 - DNA, 15 bp, Homo sapiens
gaccatggtaccaca

SEQ ID NO: 342357 - DNA, 15 bp, Homo sapiens
tgaccatggtaccac

SEQ ID NO: 342358 - DNA, 15 bp, Homo sapiens
atgaccatggtacca

SEQ ID NO: 342359 - DNA, 15 bp, Homo sapiens
gatgaccatggtacc

SEQ ID NO: 342360 - DNA, 15 bp, Homo sapiens
agatgaccatggtac

SEQ ID NO: 342361 - DNA, 15 bp, Homo sapiens
aagatgaccatggta

SEQ ID NO: 342362 - DNA, 15 bp, Homo sapiens
gaagatgaccatggt

SEQ ID NO: 342363 - DNA, 15 bp, Homo sapiens
agaagatgaccatgg

SEQ ID NO: 342364 - DNA, 15 bp, Homo sapiens
aagaagatgaccatg

SEQ ID NO: 342365 - DNA, 15 bp, Homo sapiens
aaagaagatgaccat

SEQ ID NO: 342366 - DNA, 15 bp, Homo sapiens
aaaagaagatgacca

SEQ ID NO: 342367 - DNA, 15 bp, Homo sapiens
taaaagaagatgacc

SEQ ID NO: 342368 - DNA, 15 bp, Homo sapiens
ataaaagaagatgac

SEQ ID NO: 342369 - DNA, 15 bp, Homo sapiens
cataaaagaagatga

SEQ ID NO: 342370 - DNA, 15 bp, Homo sapiens
ccataaaagaagatg

SEQ ID NO: 342371 - DNA, 15 bp, Homo sapiens
tccataaaagaagat

SEQ ID NO: 342372 - DNA, 15 bp, Homo sapiens
ctccataaaagaaga

SEQ ID NO: 342373 - DNA, 15 bp, Homo sapiens
tctccataaaagaag

SEQ ID NO: 342374 - DNA, 15 bp, Homo sapiens
atctccataaaagaa

SEQ ID NO: 342375 - DNA, 15 bp, Homo sapiens
catctccataaaaga

SEQ ID NO: 342376 - DNA, 15 bp, Homo sapiens
ccatctccataaaag

SEQ ID NO: 342377 - DNA, 15 bp, Homo sapiens
cccatctccataaaa

SEQ ID NO: 342378 - DNA, 15 bp, Homo sapiens
ccccatctccataaa

SEQ ID NO: 342379 - DNA, 15 bp, Homo sapiens
gccccatctccataa

SEQ ID NO: 342380 - DNA, 15 bp, Homo sapiens
agccccatctccata

SEQ ID NO: 342381 - DNA, 15 bp, Homo sapiens
cagccccatctccat

SEQ ID NO: 342382 - DNA, 15 bp, Homo sapiens
acagccccatctcca

SEQ ID NO: 342383 - DNA, 15 bp, Homo sapiens
gacagccccatctcc

SEQ ID NO: 342384 - DNA, 15 bp, Homo sapiens
tgacagccccatctc

SEQ ID NO: 342385 - DNA, 15 bp, Homo sapiens
atgacagccccatct

SEQ ID NO: 342386 - DNA, 15 bp, Homo sapiens
catgacagccccatc

SEQ ID NO: 342387 - DNA, 15 bp, Homo sapiens
ccatgacagccccat

SEQ ID NO: 342388 - DNA, 15 bp, Homo sapiens
cccatgacagcccca

SEQ ID NO: 342389 - DNA, 15 bp, Homo sapiens
ccccatgacagcccc

SEQ ID NO: 342390 - DNA, 15 bp, Homo sapiens
gccccatgacagccc

SEQ ID NO: 342391 - DNA, 15 bp, Homo sapiens
ggccccatgacagcc

SEQ ID NO: 342392 - DNA, 15 bp, Homo sapiens
tggccccatgacagc

SEQ ID NO: 342393 - DNA, 15 bp, Homo sapiens
ctggccccatgacag

SEQ ID NO: 342394 - DNA, 15 bp, Homo sapiens
actggccccatgaca

SEQ ID NO: 342395 - DNA, 15 bp, Homo sapiens
gactggccccatgac

SEQ ID NO: 342396 - DNA, 15 bp, Homo sapiens
ggactggccccatga

SEQ ID NO: 342397 - DNA, 15 bp, Homo sapiens
aggactggccccatg

SEQ ID NO: 342398 - DNA, 15 bp, Homo sapiens
caggactggccccat

SEQ ID NO: 342399 - DNA, 15 bp, Homo sapiens
ccaggactggcccca

SEQ ID NO: 342400 - DNA, 15 bp, Homo sapiens
gccaggactggcccc

SEQ ID NO: 342401 - DNA, 15 bp, Homo sapiens
tgccaggactggccc

SEQ ID NO: 342402 - DNA, 15 bp, Homo sapiens
gtgccaggactggcc

SEQ ID NO: 342403 - DNA, 15 bp, Homo sapiens
ggtgccaggactggc

SEQ ID NO: 342404 - DNA, 15 bp, Homo sapiens
tggtgccaggactgg

SEQ ID NO: 342405 - DNA, 15 bp, Homo sapiens
gtggtgccaggactg

SEQ ID NO: 342406 - DNA, 15 bp, Homo sapiens
tgtggtgccaggact

SEQ ID NO: 342407 - DNA, 15 bp, Homo sapiens
atgtggtgccaggac

SEQ ID NO: 342408 - DNA, 15 bp, Homo sapiens
gatgtggtgccagga

SEQ ID NO: 342409 - DNA, 15 bp, Homo sapiens
cgatgtggtgccagg

SEQ ID NO: 342410 - DNA, 15 bp, Homo sapiens
gcgatgtggtgccag

SEQ ID NO: 342411 - DNA, 15 bp, Homo sapiens
tgcgatgtggtgcca

SEQ ID NO: 342412 - DNA, 15 bp, Homo sapiens
ttgcgatgtggtgcc

SEQ ID NO: 342413 - DNA, 15 bp, Homo sapiens
tttgcgatgtggtgc

SEQ ID NO: 342414 - DNA, 15 bp, Homo sapiens
ctttgcgatgtggtg

SEQ ID NO: 342415 - DNA, 15 bp, Homo sapiens
actttgcgatgtggt

SEQ ID NO: 342416 - DNA, 15 bp, Homo sapiens
gactttgcgatgtgg

SEQ ID NO: 342417 - DNA, 15 bp, Homo sapiens
ggactttgcgatgtg

SEQ ID NO: 342418 - DNA, 15 bp, Homo sapiens
tggactttgcgatgt

SEQ ID NO: 342419 - DNA, 15 bp, Homo sapiens
ctggactttgcgatg

SEQ ID NO: 342420 - DNA, 15 bp, Homo sapiens
cctggactttgcgat

SEQ ID NO: 342421 - DNA, 15 bp, Homo sapiens
tcctggactttgcga

SEQ ID NO: 342422 - DNA, 15 bp, Homo sapiens
gtcctggactttgcg

SEQ ID NO: 342423 - DNA, 15 bp, Homo sapiens
tgtcctggactttgc

SEQ ID NO: 342424 - DNA, 15 bp, Homo sapiens
ttgtcctggactttg

SEQ ID NO: 342425 - DNA, 15 bp, Homo sapiens
tttgtcctggacttt

SEQ ID NO: 342426 - DNA, 15 bp, Homo sapiens
ctttgtcctggactt

SEQ ID NO: 342427 - DNA, 15 bp, Homo sapiens
gctttgtcctggact

SEQ ID NO: 342428 - DNA, 15 bp, Homo sapiens
agctttgtcctggac

SEQ ID NO: 342429 - DNA, 15 bp, Homo sapiens
tagctttgtcctgga

SEQ ID NO: 342430 - DNA, 15 bp, Homo sapiens
ttagctttgtcctgg

SEQ ID NO: 342431 - DNA, 15 bp, Homo sapiens
gttagctttgtcctg

SEQ ID NO: 342432 - DNA, 15 bp, Homo sapiens
tgttagctttgtcct

SEQ ID NO: 342433 - DNA, 15 bp, Homo sapiens
atgttagctttgtcc

SEQ ID NO: 342434 - DNA, 15 bp, Homo sapiens
catgttagctttgtc

SEQ ID NO: 342435 - DNA, 15 bp, Homo sapiens
acatgttagctttgt

SEQ ID NO: 342436 - DNA, 15 bp, Homo sapiens
aacatgttagctttg

SEQ ID NO: 342437 - DNA, 15 bp, Homo sapiens
aaacatgttagcttt

SEQ ID NO: 342438 - DNA, 15 bp, Homo sapiens
caaacatgttagctt

SEQ ID NO: 342439 - DNA, 15 bp, Homo sapiens
acaaacatgttagct

SEQ ID NO: 342440 - DNA, 15 bp, Homo sapiens
cacaaacatgttagc

SEQ ID NO: 342441 - DNA, 15 bp, Homo sapiens
gcacaaacatgttag

SEQ ID NO: 342442 - DNA, 15 bp, Homo sapiens
agcacaaacatgtta

SEQ ID NO: 342443 - DNA, 15 bp, Homo sapiens
cagcacaaacatgtt

SEQ ID NO: 342444 - DNA, 15 bp, Homo sapiens
ccagcacaaacatgt

SEQ ID NO: 342445 - DNA, 15 bp, Homo sapiens
gccagcacaaacatg

SEQ ID NO: 342446 - DNA, 15 bp, Homo sapiens
agccagcacaaacat

SEQ ID NO: 342447 - DNA, 15 bp, Homo sapiens
aagccagcacaaaca

SEQ ID NO: 342448 - DNA, 15 bp, Homo sapiens
caagccagcacaaac

SEQ ID NO: 342449 - DNA, 15 bp, Homo sapiens
tcaagccagcacaaa

SEQ ID NO: 342450 - DNA, 15 bp, Homo sapiens
gtcaagccagcacaa

SEQ ID NO: 342451 - DNA, 15 bp, Homo sapiens
cgtcaagccagcaca

SEQ ID NO: 342452 - DNA, 15 bp, Homo sapiens
acgtcaagccagcac

SEQ ID NO: 342453 - DNA, 15 bp, Homo sapiens
cacgtcaagccagca

SEQ ID NO: 342454 - DNA, 15 bp, Homo sapiens
gcacgtcaagccagc

SEQ ID NO: 342455 - DNA, 15 bp, Homo sapiens
agcacgtcaagccag

SEQ ID NO: 342456 - DNA, 15 bp, Homo sapiens
cagcacgtcaagcca

SEQ ID NO: 342457 - DNA, 15 bp, Homo sapiens
acagcacgtcaagcc

SEQ ID NO: 342458 - DNA, 15 bp, Homo sapiens
aacagcacgtcaagc

SEQ ID NO: 342459 - DNA, 15 bp, Homo sapiens
caacagcacgtcaag

SEQ ID NO: 342460 - DNA, 15 bp, Homo sapiens
tcaacagcacgtcaa

SEQ ID NO: 342461 - DNA, 15 bp, Homo sapiens
gtcaacagcacgtca

SEQ ID NO: 342462 - DNA, 15 bp, Homo sapiens
agtcaacagcacgtc

SEQ ID NO: 342463 - DNA, 15 bp, Homo sapiens
tagtcaacagcacgt

SEQ ID NO: 342464 - DNA, 15 bp, Homo sapiens
gtagtcaacagcacg

SEQ ID NO: 342465 - DNA, 15 bp, Homo sapiens
ggtagtcaacagcac

SEQ ID NO: 342466 - DNA, 15 bp, Homo sapiens
gggtagtcaacagca

SEQ ID NO: 342467 - DNA, 15 bp, Homo sapiens
tgggtagtcaacagc

SEQ ID NO: 342468 - DNA, 15 bp, Homo sapiens
ctgggtagtcaacag

SEQ ID NO: 342469 - DNA, 15 bp, Homo sapiens
gctgggtagtcaaca

SEQ ID NO: 342470 - DNA, 15 bp, Homo sapiens
tgctgggtagtcaac

SEQ ID NO: 342471 - DNA, 15 bp, Homo sapiens
gtgctgggtagtcaa

SEQ ID NO: 342472 - DNA, 15 bp, Homo sapiens
cgtgctgggtagtca

SEQ ID NO: 342473 - DNA, 15 bp, Homo sapiens
gcgtgctgggtagtc

SEQ ID NO: 342474 - DNA, 15 bp, Homo sapiens
cgcgtgctgggtagt

SEQ ID NO: 342475 - DNA, 15 bp, Homo sapiens
ccgcgtgctgggtag

SEQ ID NO: 342476 - DNA, 15 bp, Homo sapiens
accgcgtgctgggta

SEQ ID NO: 342477 - DNA, 15 bp, Homo sapiens
gaccgcgtgctgggt

SEQ ID NO: 342478 - DNA, 15 bp, Homo sapiens
ggaccgcgtgctggg

SEQ ID NO: 342479 - DNA, 15 bp, Homo sapiens
aggaccgcgtgctgg

SEQ ID NO: 342480 - DNA, 15 bp, Homo sapiens
taggaccgcgtgctg

SEQ ID NO: 342481 - DNA, 15 bp, Homo sapiens
gtaggaccgcgtgct

SEQ ID NO: 342482 - DNA, 15 bp, Homo sapiens
agtaggaccgcgtgc

SEQ ID NO: 342483 - DNA, 15 bp, Homo sapiens
gagtaggaccgcgtg

SEQ ID NO: 342484 - DNA, 15 bp, Homo sapiens
agagtaggaccgcgt

SEQ ID NO: 342485 - DNA, 15 bp, Homo sapiens
cagagtaggaccgcg

SEQ ID NO: 342486 - DNA, 15 bp, Homo sapiens
tcagagtaggaccgc

SEQ ID NO: 342487 - DNA, 15 bp, Homo sapiens
ctcagagtaggaccg

SEQ ID NO: 342488 - DNA, 15 bp, Homo sapiens
cctcagagtaggacc

SEQ ID NO: 342489 - DNA, 15 bp, Homo sapiens
acctcagagtaggac

SEQ ID NO: 342490 - DNA, 15 bp, Homo sapiens
aacctcagagtagga

SEQ ID NO: 342491 - DNA, 15 bp, Homo sapiens
gaacctcagagtagg

SEQ ID NO: 342492 - DNA, 15 bp, Homo sapiens
ggaacctcagagtag

SEQ ID NO: 342493 - DNA, 15 bp, Homo sapiens
tggaacctcagagta

SEQ ID NO: 342494 - DNA, 15 bp, Homo sapiens
gtggaacctcagagt

SEQ ID NO: 342495 - DNA, 15 bp, Homo sapiens
agtggaacctcagag

SEQ ID NO: 342496 - DNA, 15 bp, Homo sapiens
cagtggaacctcaga

SEQ ID NO: 342497 - DNA, 15 bp, Homo sapiens
tcagtggaacctcag

SEQ ID NO: 342498 - DNA, 15 bp, Homo sapiens
ctcagtggaacctca

SEQ ID NO: 342499 - DNA, 15 bp, Homo sapiens
cctcagtggaacctc

SEQ ID NO: 342500 - DNA, 15 bp, Homo sapiens
acctcagtggaacct

SEQ ID NO: 342501 - DNA, 15 bp, Homo sapiens
gacctcagtggaacc

SEQ ID NO: 342502 - DNA, 15 bp, Homo sapiens
cgacctcagtggaac

SEQ ID NO: 342503 - DNA, 15 bp, Homo sapiens
ccgacctcagtggaa

SEQ ID NO: 342504 - DNA, 15 bp, Homo sapiens
gccgacctcagtgga

SEQ ID NO: 342505 - DNA, 15 bp, Homo sapiens
agccgacctcagtgg

SEQ ID NO: 342506 - DNA, 15 bp, Homo sapiens
aagccgacctcagtg

SEQ ID NO: 342507 - DNA, 15 bp, Homo sapiens
gaagccgacctcagt

SEQ ID NO: 342508 - DNA, 15 bp, Homo sapiens
ggaagccgacctcag

SEQ ID NO: 342509 - DNA, 15 bp, Homo sapiens
gggaagccgacctca

SEQ ID NO: 342510 - DNA, 15 bp, Homo sapiens
agggaagccgacctc

SEQ ID NO: 342511 - DNA, 15 bp, Homo sapiens
tagggaagccgacct

SEQ ID NO: 342512 - DNA, 15 bp, Homo sapiens
gtagggaagccgacc

SEQ ID NO: 342513 - DNA, 15 bp, Homo sapiens
tgtagggaagccgac

SEQ ID NO: 342514 - DNA, 15 bp, Homo sapiens
ttgtagggaagccga

SEQ ID NO: 342515 - DNA, 15 bp, Homo sapiens
tttgtagggaagccg

SEQ ID NO: 342516 - DNA, 15 bp, Homo sapiens
gtttgtagggaagcc

SEQ ID NO: 342517 - DNA, 15 bp, Homo sapiens
agtttgtagggaagc

SEQ ID NO: 342518 - DNA, 15 bp, Homo sapiens
gagtttgtagggaag

SEQ ID NO: 342519 - DNA, 15 bp, Homo sapiens
ggagtttgtagggaa

SEQ ID NO: 342520 - DNA, 15 bp, Homo sapiens
gggagtttgtaggga

SEQ ID NO: 342521 - DNA, 15 bp, Homo sapiens
agggagtttgtaggg

SEQ ID NO: 342522 - DNA, 15 bp, Homo sapiens
cagggagtttgtagg

SEQ ID NO: 342523 - DNA, 15 bp, Homo sapiens
acagggagtttgtag

SEQ ID NO: 342524 - DNA, 15 bp, Homo sapiens
aacagggagtttgta

SEQ ID NO: 342525 - DNA, 15 bp, Homo sapiens
aaacagggagtttgt

SEQ ID NO: 342526 - DNA, 15 bp, Homo sapiens
caaacagggagtttg

SEQ ID NO: 342527 - DNA, 15 bp, Homo sapiens
ccaaacagggagttt

SEQ ID NO: 342528 - DNA, 15 bp, Homo sapiens
accaaacagggagtt

SEQ ID NO: 342529 - DNA, 15 bp, Homo sapiens
caccaaacagggagt

SEQ ID NO: 342530 - DNA, 15 bp, Homo sapiens
ccaccaaacagggag

SEQ ID NO: 342531 - DNA, 15 bp, Homo sapiens
tccaccaaacaggga

SEQ ID NO: 342532 - DNA, 15 bp, Homo sapiens
atccaccaaacaggg

SEQ ID NO: 342533 - DNA, 15 bp, Homo sapiens
gatccaccaaacagg

SEQ ID NO: 342534 - DNA, 15 bp, Homo sapiens
cgatccaccaaacag

SEQ ID NO: 342535 - DNA, 15 bp, Homo sapiens
acgatccaccaaaca

SEQ ID NO: 342536 - DNA, 15 bp, Homo sapiens
gacgatccaccaaac

SEQ ID NO: 342537 - DNA, 15 bp, Homo sapiens
cgacgatccaccaaa

SEQ ID NO: 342538 - DNA, 15 bp, Homo sapiens
acgacgatccaccaa

SEQ ID NO: 342539 - DNA, 15 bp, Homo sapiens
gacgacgatccacca

SEQ ID NO: 342540 - DNA, 15 bp, Homo sapiens
ggacgacgatccacc

SEQ ID NO: 342541 - DNA, 15 bp, Homo sapiens
aggacgacgatccac

SEQ ID NO: 342542 - DNA, 15 bp, Homo sapiens
gaggacgacgatcca

SEQ ID NO: 342543 - DNA, 15 bp, Homo sapiens
agaggacgacgatcc

SEQ ID NO: 342544 - DNA, 15 bp, Homo sapiens
cagaggacgacgatc

SEQ ID NO: 342545 - DNA, 15 bp, Homo sapiens
ccagaggacgacgat

SEQ ID NO: 342546 - DNA, 15 bp, Homo sapiens
gccagaggacgacga

SEQ ID NO: 342547 - DNA, 15 bp, Homo sapiens
tgccagaggacgacg

SEQ ID NO: 342548 - DNA, 15 bp, Homo sapiens
atgccagaggacgac

SEQ ID NO: 342549 - DNA, 15 bp, Homo sapiens
aatgccagaggacga

SEQ ID NO: 342550 - DNA, 15 bp, Homo sapiens
aaatgccagaggacg

SEQ ID NO: 342551 - DNA, 15 bp, Homo sapiens
caaatgccagaggac

SEQ ID NO: 342552 - DNA, 15 bp, Homo sapiens
gcaaatgccagagga

SEQ ID NO: 342553 - DNA, 15 bp, Homo sapiens
agcaaatgccagagg

SEQ ID NO: 342554 - DNA, 15 bp, Homo sapiens
gagcaaatgccagag

SEQ ID NO: 342555 - DNA, 15 bp, Homo sapiens
tgagcaaatgccaga

SEQ ID NO: 342556 - DNA, 15 bp, Homo sapiens
gtgagcaaatgccag

SEQ ID NO: 342557 - DNA, 15 bp, Homo sapiens
tgtgagcaaatgcca

SEQ ID NO: 342558 - DNA, 15 bp, Homo sapiens
ctgtgagcaaatgcc

SEQ ID NO: 342559 - DNA, 15 bp, Homo sapiens
tctgtgagcaaatgc

SEQ ID NO: 342560 - DNA, 15 bp, Homo sapiens
ttctgtgagcaaatg

SEQ ID NO: 342561 - DNA, 15 bp, Homo sapiens
attctgtgagcaaat

SEQ ID NO: 342562 - DNA, 15 bp, Homo sapiens
cattctgtgagcaaa

SEQ ID NO: 342563 - DNA, 15 bp, Homo sapiens
gcattctgtgagcaa

SEQ ID NO: 342564 - DNA, 15 bp, Homo sapiens
agcattctgtgagca

SEQ ID NO: 342565 - DNA, 15 bp, Homo sapiens
tagcattctgtgagc

SEQ ID NO: 342566 - DNA, 15 bp, Homo sapiens
ctagcattctgtgag

SEQ ID NO: 342567 - DNA, 15 bp, Homo sapiens
gtctagcattctgtg

SEQ ID NO: 342568 - DNA, 15 bp, Homo sapiens
agtctagcattctgt

SEQ ID NO: 342569 - DNA, 15 bp, Homo sapiens
aagtctagcattctg

SEQ ID NO: 342570 - DNA, 15 bp, Homo sapiens
gaagtctagcattct

SEQ ID NO: 342571 - DNA, 15 bp, Homo sapiens
agaagtctagcattc

SEQ ID NO: 342572 - DNA, 15 bp, Homo sapiens
cagaagtctagcatt

SEQ ID NO: 342573 - DNA, 15 bp, Homo sapiens
tcagaagtctagcat

SEQ ID NO: 342574 - DNA, 15 bp, Homo sapiens
gtcagaagtctagca

SEQ ID NO: 342575 - DNA, 15 bp, Homo sapiens
agtcagaagtctagc

SEQ ID NO: 342576 - DNA, 15 bp, Homo sapiens
aagtcagaagtctag

SEQ ID NO: 342577 - DNA, 15 bp, Homo sapiens
caagtcagaagtcta

SEQ ID NO: 342578 - DNA, 15 bp, Homo sapiens
acaagtcagaagtct

SEQ ID NO: 342579 - DNA, 15 bp, Homo sapiens
gacaagtcagaagtc

SEQ ID NO: 342580 - DNA, 15 bp, Homo sapiens
tgacaagtcagaagt

SEQ ID NO: 342581 - DNA, 15 bp, Homo sapiens
gtgacaagtcagaag

SEQ ID NO: 342582 - DNA, 15 bp, Homo sapiens
ggtgacaagtcagaa

SEQ ID NO: 342583 - DNA, 15 bp, Homo sapiens
tggtgacaagtcaga

SEQ ID NO: 342584 - DNA, 15 bp, Homo sapiens
atggtgacaagtcag

SEQ ID NO: 342585 - DNA, 15 bp, Homo sapiens
catggtgacaagtca

SEQ ID NO: 342586 - DNA, 15 bp, Homo sapiens
acatggtgacaagtc

SEQ ID NO: 342587 - DNA, 15 bp, Homo sapiens
aacatggtgacaagt

SEQ ID NO: 342588 - DNA, 15 bp, Homo sapiens
caacatggtgacaag

SEQ ID NO: 342589 - DNA, 15 bp, Homo sapiens
ccaacatggtgacaa

SEQ ID NO: 342590 - DNA, 15 bp, Homo sapiens
cccaacatggtgaca

SEQ ID NO: 342591 - DNA, 15 bp, Homo sapiens
ccccaacatggtgac

SEQ ID NO: 342592 - DNA, 15 bp, Homo sapiens
gccccaacatggtga

SEQ ID NO: 342593 - DNA, 15 bp, Homo sapiens
tgccccaacatggtg

SEQ ID NO: 342594 - DNA, 15 bp, Homo sapiens
gtgccccaacatggt

SEQ ID NO: 342595 - DNA, 15 bp, Homo sapiens
ggtgccccaacatgg

SEQ ID NO: 342596 - DNA, 15 bp, Homo sapiens
tggtgccccaacatg

SEQ ID NO: 342597 - DNA, 15 bp, Homo sapiens
ttggtgccccaacat

SEQ ID NO: 342598 - DNA, 15 bp, Homo sapiens
gttggtgccccaaca

SEQ ID NO: 342599 - DNA, 15 bp, Homo sapiens
tgttggtgccccaac

SEQ ID NO: 342600 - DNA, 15 bp, Homo sapiens
atgttggtgccccaa

SEQ ID NO: 342601 - DNA, 15 bp, Homo sapiens
aatgttggtgcccca

SEQ ID NO: 342602 - DNA, 15 bp, Homo sapiens
aaatgttggtgcccc

SEQ ID NO: 342603 - DNA, 15 bp, Homo sapiens
gaaatgttggtgccc

SEQ ID NO: 342604 - DNA, 15 bp, Homo sapiens
agaaatgttggtgcc

SEQ ID NO: 342605 - DNA, 15 bp, Homo sapiens
gagaaatgttggtgc

SEQ ID NO: 342606 - DNA, 15 bp, Homo sapiens
agagaaatgttggtg

SEQ ID NO: 342607 - DNA, 15 bp, Homo sapiens
aagagaaatgttggt

SEQ ID NO: 342608 - DNA, 15 bp, Homo sapiens
aaagagaaatgttgg

SEQ ID NO: 342609 - DNA, 15 bp, Homo sapiens
aaaagagaaatgttg

SEQ ID NO: 342610 - DNA, 15 bp, Homo sapiens
gaaaagagaaatgtt

SEQ ID NO: 342611 - DNA, 15 bp, Homo sapiens
agaaaagagaaatgt

SEQ ID NO: 342612 - DNA, 15 bp, Homo sapiens
cagaaaagagaaatg

SEQ ID NO: 342613 - DNA, 15 bp, Homo sapiens
gcagaaaagagaaat

SEQ ID NO: 342614 - DNA, 15 bp, Homo sapiens
tgcagaaaagagaaa

SEQ ID NO: 342615 - DNA, 15 bp, Homo sapiens
gtgcagaaaagagaa

SEQ ID NO: 342616 - DNA, 15 bp, Homo sapiens
agtgcagaaaagaga

SEQ ID NO: 342617 - DNA, 15 bp, Homo sapiens
cagtgcagaaaagag

SEQ ID NO: 342618 - DNA, 15 bp, Homo sapiens
tcagtgcagaaaaga

SEQ ID NO: 342619 - DNA, 15 bp, Homo sapiens
atcagtgcagaaaag

SEQ ID NO: 342620 - DNA, 15 bp, Homo sapiens
aatcagtgcagaaaa

SEQ ID NO: 342621 - DNA, 15 bp, Homo sapiens
aaatcagtgcagaaa

SEQ ID NO: 342622 - DNA, 15 bp, Homo sapiens
gaaatcagtgcagaa

SEQ ID NO: 342623 - DNA, 15 bp, Homo sapiens
agaaatcagtgcaga

SEQ ID NO: 342624 - DNA, 15 bp, Homo sapiens
gagaaatcagtgcag

SEQ ID NO: 342625 - DNA, 15 bp, Homo sapiens
ggagaaatcagtgca

SEQ ID NO: 342626 - DNA, 15 bp, Homo sapiens
tggagaaatcagtgc

SEQ ID NO: 342627 - DNA, 15 bp, Homo sapiens
ttggagaaatcagtg

SEQ ID NO: 342628 - DNA, 15 bp, Homo sapiens
tttggagaaatcagt

SEQ ID NO: 342629 - DNA, 15 bp, Homo sapiens
gtttggagaaatcag

SEQ ID NO: 342630 - DNA, 15 bp, Homo sapiens
agtttggagaaatca

SEQ ID NO: 342631 - DNA, 15 bp, Homo sapiens
aagtttggagaaatc

SEQ ID NO: 342632 - DNA, 15 bp, Homo sapiens
aaagtttggagaaat

SEQ ID NO: 342633 - DNA, 15 bp, Homo sapiens
caaagtttggagaaa

SEQ ID NO: 342634 - DNA, 15 bp, Homo sapiens
tcaaagtttggagaa

SEQ ID NO: 342635 - DNA, 15 bp, Homo sapiens
ttcaaagtttggaga

SEQ ID NO: 342636 - DNA, 15 bp, Homo sapiens
tttcaaagtttggag

SEQ ID NO: 342637 - DNA, 15 bp, Homo sapiens
ttttcaaagtttgga

SEQ ID NO: 342638 - DNA, 15 bp, Homo sapiens
tttttcaaagtttgg

SEQ ID NO: 342639 - DNA, 15 bp, Homo sapiens
ttttttcaaagtttg

SEQ ID NO: 342640 - DNA, 15 bp, Homo sapiens
gttttttcaaagttt

SEQ ID NO: 342641 - DNA, 15 bp, Homo sapiens
tgttttttcaaagtt

SEQ ID NO: 342642 - DNA, 15 bp, Homo sapiens
ctgttttttcaaagt

SEQ ID NO: 342643 - DNA, 15 bp, Homo sapiens
tctgttttttcaaag

SEQ ID NO: 342644 - DNA, 15 bp, Homo sapiens
gtctgttttttcaaa

SEQ ID NO: 342645 - DNA, 15 bp, Homo sapiens
ggtctgttttttcaa

SEQ ID NO: 342646 - DNA, 15 bp, Homo sapiens
tggtctgttttttca

SEQ ID NO: 342647 - DNA, 15 bp, Homo sapiens
ctggtctgttttttc

SEQ ID NO: 342648 - DNA, 15 bp, Homo sapiens
cctggtctgtttttt

SEQ ID NO: 342649 - DNA, 15 bp, Homo sapiens
gcctggtctgttttt

SEQ ID NO: 342650 - DNA, 15 bp, Homo sapiens
agcctggtctgtttt

SEQ ID NO: 342651 - DNA, 15 bp, Homo sapiens
tagcctggtctgttt

SEQ ID NO: 342652 - DNA, 15 bp, Homo sapiens
atagcctggtctgtt

SEQ ID NO: 342653 - DNA, 15 bp, Homo sapiens
catagcctggtctgt

SEQ ID NO: 342654 - DNA, 15 bp, Homo sapiens
acatagcctggtctg

SEQ ID NO: 342655 - DNA, 15 bp, Homo sapiens
aacatagcctggtct

SEQ ID NO: 342656 - DNA, 15 bp, Homo sapiens
taacatagcctggtc

SEQ ID NO: 342657 - DNA, 15 bp, Homo sapiens
ctaacatagcctggt

SEQ ID NO: 342658 - DNA, 15 bp, Homo sapiens
gctaacatagcctgg

SEQ ID NO: 342659 - DNA, 15 bp, Homo sapiens
tgctaacatagcctg

SEQ ID NO: 342660 - DNA, 15 bp, Homo sapiens
gtgctaacatagcct

SEQ ID NO: 342661 - DNA, 15 bp, Homo sapiens
tgtgctaacatagcc

SEQ ID NO: 342662 - DNA, 15 bp, Homo sapiens
ctgtgctaacatagc

SEQ ID NO: 342663 - DNA, 15 bp, Homo sapiens
cctgtgctaacatag

SEQ ID NO: 342664 - DNA, 15 bp, Homo sapiens
tcctgtgctaacata

SEQ ID NO: 342665 - DNA, 15 bp, Homo sapiens
ctcctgtgctaacat

SEQ ID NO: 342666 - DNA, 15 bp, Homo sapiens
gctcctgtgctaaca

SEQ ID NO: 342667 - DNA, 15 bp, Homo sapiens
tgctcctgtgctaac

SEQ ID NO: 342668 - DNA, 15 bp, Homo sapiens
ctgctcctgtgctaa

SEQ ID NO: 342669 - DNA, 15 bp, Homo sapiens
cctgctcctgtgcta

SEQ ID NO: 342670 - DNA, 15 bp, Homo sapiens
acctgctcctgtgct

SEQ ID NO: 342671 - DNA, 15 bp, Homo sapiens
tacctgctcctgtgc

SEQ ID NO: 342672 - DNA, 15 bp, Homo sapiens
gtacctgctcctgtg

SEQ ID NO: 342673 - DNA, 15 bp, Homo sapiens
ggtacctgctcctgt

SEQ ID NO: 342674 - DNA, 15 bp, Homo sapiens
gggtacctgctcctg

SEQ ID NO: 342675 - DNA, 15 bp, Homo sapiens
tgggtacctgctcct

SEQ ID NO: 342676 - DNA, 15 bp, Homo sapiens
gtgggtacctgctcc

SEQ ID NO: 342677 - DNA, 15 bp, Homo sapiens
tgtgggtacctgctc

SEQ ID NO: 342678 - DNA, 15 bp, Homo sapiens
ctgtgggtacctgct

SEQ ID NO: 342679 - DNA, 15 bp, Homo sapiens
cctgtgggtacctgc

SEQ ID NO: 342680 - DNA, 15 bp, Homo sapiens
acctgtgggtacctg

SEQ ID NO: 342681 - DNA, 15 bp, Homo sapiens
aacctgtgggtacct

SEQ ID NO: 342682 - DNA, 15 bp, Homo sapiens
gaacctgtgggtacc

SEQ ID NO: 342683 - DNA, 15 bp, Homo sapiens
ggaacctgtgggtac

SEQ ID NO: 342684 - DNA, 15 bp, Homo sapiens
tggaacctgtgggta

SEQ ID NO: 342685 - DNA, 15 bp, Homo sapiens
atggaacctgtgggt

SEQ ID NO: 342686 - DNA, 15 bp, Homo sapiens
aatggaacctgtggg

SEQ ID NO: 342687 - DNA, 15 bp, Homo sapiens
gaatggaacctgtgg

SEQ ID NO: 342688 - DNA, 15 bp, Homo sapiens
tgaatggaacctgtg

SEQ ID NO: 342689 - DNA, 15 bp, Homo sapiens
ctgaatggaacctgt

SEQ ID NO: 342690 - DNA, 15 bp, Homo sapiens
actgaatggaacctg

SEQ ID NO: 342691 - DNA, 15 bp, Homo sapiens
cactgaatggaacct

SEQ ID NO: 342692 - DNA, 15 bp, Homo sapiens
gcactgaatggaacc

SEQ ID NO: 342693 - DNA, 15 bp, Homo sapiens
agcactgaatggaac

SEQ ID NO: 342694 - DNA, 15 bp, Homo sapiens
aagcactgaatggaa

SEQ ID NO: 342695 - DNA, 15 bp, Homo sapiens
taagcactgaatgga

SEQ ID NO: 342696 - DNA, 15 bp, Homo sapiens
ctaagcactgaatgg

SEQ ID NO: 342697 - DNA, 15 bp, Homo sapiens
gctaagcactgaatg

SEQ ID NO: 342698 - DNA, 15 bp, Homo sapiens
ggctaagcactgaat

SEQ ID NO: 342699 - DNA, 15 bp, Homo sapiens
tggctaagcactgaa

SEQ ID NO: 342700 - DNA, 15 bp, Homo sapiens
gtggctaagcactga

SEQ ID NO: 342701 - DNA, 15 bp, Homo sapiens
agtggctaagcactg

SEQ ID NO: 342702 - DNA, 15 bp, Homo sapiens
cagtggctaagcact

SEQ ID NO: 342703 - DNA, 15 bp, Homo sapiens
tcagtggctaagcac

SEQ ID NO: 342704 - DNA, 15 bp, Homo sapiens
atcagtggctaagca

SEQ ID NO: 342705 - DNA, 15 bp, Homo sapiens
aatcagtggctaagc

SEQ ID NO: 342706 - DNA, 15 bp, Homo sapiens
taatcagtggctaag

SEQ ID NO: 342707 - DNA, 15 bp, Homo sapiens
gtaatcagtggctaa

SEQ ID NO: 342708 - DNA, 15 bp, Homo sapiens
ggtaatcagtggcta

SEQ ID NO: 342709 - DNA, 15 bp, Homo sapiens
aggtaatcagtggct

SEQ ID NO: 342710 - DNA, 15 bp, Homo sapiens
caggtaatcagtggc

SEQ ID NO: 342711 - DNA, 15 bp, Homo sapiens
gcaggtaatcagtgg

SEQ ID NO: 342712 - DNA, 15 bp, Homo sapiens
agcaggtaatcagtg

SEQ ID NO: 342713 - DNA, 15 bp, Homo sapiens
cagcaggtaatcagt

SEQ ID NO: 342714 - DNA, 15 bp, Homo sapiens
acagcaggtaatcag

SEQ ID NO: 342715 - DNA, 15 bp, Homo sapiens
cacagcaggtaatca

SEQ ID NO: 342716 - DNA, 15 bp, Homo sapiens
acacagcaggtaatc

SEQ ID NO: 342717 - DNA, 15 bp, Homo sapiens
cacacagcaggtaat

SEQ ID NO: 342718 - DNA, 15 bp, Homo sapiens
ccacacagcaggtaa

SEQ ID NO: 342719 - DNA, 15 bp, Homo sapiens
gccacacagcaggta

SEQ ID NO: 342720 - DNA, 15 bp, Homo sapiens
ggccacacagcaggt

SEQ ID NO: 342721 - DNA, 15 bp, Homo sapiens
gggccacacagcagg

SEQ ID NO: 342722 - DNA, 15 bp, Homo sapiens
tgggccacacagcag

SEQ ID NO: 342723 - DNA, 15 bp, Homo sapiens
atgggccacacagca

SEQ ID NO: 342724 - DNA, 15 bp, Homo sapiens
gatgggccacacagc

SEQ ID NO: 342725 - DNA, 15 bp, Homo sapiens
ggatgggccacacag

SEQ ID NO: 342726 - DNA, 15 bp, Homo sapiens
aggatgggccacaca

SEQ ID NO: 342727 - DNA, 15 bp, Homo sapiens
gaggatgggccacac

SEQ ID NO: 342728 - DNA, 15 bp, Homo sapiens
agaggatgggccaca

SEQ ID NO: 342729 - DNA, 15 bp, Homo sapiens
tagaggatgggccac

SEQ ID NO: 342730 - DNA, 15 bp, Homo sapiens
gtagaggatgggcca

SEQ ID NO: 342731 - DNA, 15 bp, Homo sapiens
agtagaggatgggcc

SEQ ID NO: 342732 - DNA, 15 bp, Homo sapiens
cagtagaggatgggc

SEQ ID NO: 342733 - DNA, 15 bp, Homo sapiens
tcagtagaggatggg

SEQ ID NO: 342734 - DNA, 15 bp, Homo sapiens
ctcagtagaggatgg

SEQ ID NO: 342735 - DNA, 15 bp, Homo sapiens
gctcagtagaggatg

SEQ ID NO: 342736 - DNA, 15 bp, Homo sapiens
cgctcagtagaggat

SEQ ID NO: 342737 - DNA, 15 bp, Homo sapiens
acgctcagtagagga

SEQ ID NO: 342738 - DNA, 15 bp, Homo sapiens
aacgctcagtagagg

SEQ ID NO: 342739 - DNA, 15 bp, Homo sapiens
aaacgctcagtagag

SEQ ID NO: 342740 - DNA, 15 bp, Homo sapiens
aaaacgctcagtaga

SEQ ID NO: 342741 - DNA, 15 bp, Homo sapiens
caaaacgctcagtag

SEQ ID NO: 342742 - DNA, 15 bp, Homo sapiens
ccaaaacgctcagta

SEQ ID NO: 342743 - DNA, 15 bp, Homo sapiens
tccaaaacgctcagt

SEQ ID NO: 342744 - DNA, 15 bp, Homo sapiens
ttccaaaacgctcag

SEQ ID NO: 342745 - DNA, 15 bp, Homo sapiens
tttccaaaacgctca

SEQ ID NO: 342746 - DNA, 15 bp, Homo sapiens
ctttccaaaacgctc

SEQ ID NO: 342747 - DNA, 15 bp, Homo sapiens
actttccaaaacgct

SEQ ID NO: 342748 - DNA, 15 bp, Homo sapiens
aactttccaaaacgc

SEQ ID NO: 342749 - DNA, 15 bp, Homo sapiens
gaactttccaaaacg

SEQ ID NO: 342750 - DNA, 15 bp, Homo sapiens
agaactttccaaaac

SEQ ID NO: 342751 - DNA, 15 bp, Homo sapiens
gagaactttccaaaa

SEQ ID NO: 342752 - DNA, 15 bp, Homo sapiens
agagaactttccaaa

SEQ ID NO: 342753 - DNA, 15 bp, Homo sapiens
tagagaactttccaa

SEQ ID NO: 342754 - DNA, 15 bp, Homo sapiens
ctagagaactttcca

SEQ ID NO: 342755 - DNA, 15 bp, Homo sapiens
tctagagaactttcc

SEQ ID NO: 342756 - DNA, 15 bp, Homo sapiens
ctctagagaactttc

SEQ ID NO: 342757 - DNA, 15 bp, Homo sapiens
cctctagagaacttt

SEQ ID NO: 342758 - DNA, 15 bp, Homo sapiens
acctctagagaactt

SEQ ID NO: 342759 - DNA, 15 bp, Homo sapiens
tacctctagagaact

SEQ ID NO: 342760 - DNA, 15 bp, Homo sapiens
atacctctagagaac

SEQ ID NO: 342761 - DNA, 15 bp, Homo sapiens
tatacctctagagaa

SEQ ID NO: 342762 - DNA, 15 bp, Homo sapiens
ctatacctctagaga

SEQ ID NO: 342763 - DNA, 15 bp, Homo sapiens
actatacctctagag

SEQ ID NO: 342764 - DNA, 15 bp, Homo sapiens
cactatacctctaga

SEQ ID NO: 342765 - DNA, 15 bp, Homo sapiens
acactatacctctag

SEQ ID NO: 342766 - DNA, 15 bp, Homo sapiens
cacactatacctcta

SEQ ID NO: 342767 - DNA, 15 bp, Homo sapiens
acacactatacctct

SEQ ID NO: 342768 - DNA, 15 bp, Homo sapiens
tacacactatacctc

SEQ ID NO: 342769 - DNA, 15 bp, Homo sapiens
ctacacactatacct

SEQ ID NO: 342770 - DNA, 15 bp, Homo sapiens
cctacacactatacc

SEQ ID NO: 342771 - DNA, 15 bp, Homo sapiens
gcctacacactatac

SEQ ID NO: 342772 - DNA, 15 bp, Homo sapiens
agcctacacactata

SEQ ID NO: 342773 - DNA, 15 bp, Homo sapiens
cagcctacacactat

SEQ ID NO: 342774 - DNA, 15 bp, Homo sapiens
acagcctacacacta

SEQ ID NO: 342775 - DNA, 15 bp, Homo sapiens
cacagcctacacact

SEQ ID NO: 342776 - DNA, 15 bp, Homo sapiens
gcacagcctacacac

SEQ ID NO: 342777 - DNA, 15 bp, Homo sapiens
ggcacagcctacaca

SEQ ID NO: 342778 - DNA, 15 bp, Homo sapiens
gggcacagcctacac

SEQ ID NO: 342779 - DNA, 15 bp, Homo sapiens
ggggcacagcctaca

SEQ ID NO: 342780 - DNA, 15 bp, Homo sapiens
gggggcacagcctac

SEQ ID NO: 342781 - DNA, 15 bp, Homo sapiens
tgggggcacagccta

SEQ ID NO: 342782 - DNA, 15 bp, Homo sapiens
gtgggggcacagcct

SEQ ID NO: 342783 - DNA, 15 bp, Homo sapiens
tgtgggggcacagcc

SEQ ID NO: 342784 - DNA, 15 bp, Homo sapiens
atgtgggggcacagc

SEQ ID NO: 342785 - DNA, 15 bp, Homo sapiens
catgtgggggcacag

SEQ ID NO: 342786 - DNA, 15 bp, Homo sapiens
tcatgtgggggcaca

SEQ ID NO: 342787 - DNA, 15 bp, Homo sapiens
ctcatgtgggggcac

SEQ ID NO: 342788 - DNA, 15 bp, Homo sapiens
actcatgtgggggca

SEQ ID NO: 342789 - DNA, 15 bp, Homo sapiens
aactcatgtgggggc

SEQ ID NO: 342790 - DNA, 15 bp, Homo sapiens
caactcatgtggggg

SEQ ID NO: 342791 - DNA, 15 bp, Homo sapiens
ccaactcatgtgggg

SEQ ID NO: 342792 - DNA, 15 bp, Homo sapiens
cccaactcatgtggg

SEQ ID NO: 342793 - DNA, 15 bp, Homo sapiens
gcccaactcatgtgg

SEQ ID NO: 342794 - DNA, 15 bp, Homo sapiens
tgcccaactcatgtg

SEQ ID NO: 342795 - DNA, 15 bp, Homo sapiens
atgcccaactcatgt

SEQ ID NO: 342796 - DNA, 15 bp, Homo sapiens
aatgcccaactcatg

SEQ ID NO: 342797 - DNA, 15 bp, Homo sapiens
aaatgcccaactcat

SEQ ID NO: 342798 - DNA, 15 bp, Homo sapiens
gaaatgcccaactca

SEQ ID NO: 342799 - DNA, 15 bp, Homo sapiens
tgaaatgcccaactc

SEQ ID NO: 342800 - DNA, 15 bp, Homo sapiens
ttgaaatgcccaact

SEQ ID NO: 342801 - DNA, 15 bp, Homo sapiens
cttgaaatgcccaac

SEQ ID NO: 342802 - DNA, 15 bp, Homo sapiens
tcttgaaatgcccaa

SEQ ID NO: 342803 - DNA, 15 bp, Homo sapiens
atcttgaaatgccca

SEQ ID NO: 342804 - DNA, 15 bp, Homo sapiens
catcttgaaatgccc

SEQ ID NO: 342805 - DNA, 15 bp, Homo sapiens
tcatcttgaaatgcc

SEQ ID NO: 342806 - DNA, 15 bp, Homo sapiens
ttcatcttgaaatgc

SEQ ID NO: 342807 - DNA, 15 bp, Homo sapiens
gttcatcttgaaatg

SEQ ID NO: 342808 - DNA, 15 bp, Homo sapiens
tgttcatcttgaaat

SEQ ID NO: 342809 - DNA, 15 bp, Homo sapiens
gtgttcatcttgaaa

SEQ ID NO: 342810 - DNA, 15 bp, Homo sapiens
tgtgttcatcttgaa

SEQ ID NO: 342811 - DNA, 15 bp, Homo sapiens
gtgtgttcatcttga

SEQ ID NO: 342812 - DNA, 15 bp, Homo sapiens
tgtgtgttcatcttg

SEQ ID NO: 342813 - DNA, 15 bp, Homo sapiens
atgtgtgttcatctt

SEQ ID NO: 342814 - DNA, 15 bp, Homo sapiens
catgtgtgttcatct

SEQ ID NO: 342815 - DNA, 15 bp, Homo sapiens
gcatgtgtgttcatc

SEQ ID NO: 342816 - DNA, 15 bp, Homo sapiens
tgcatgtgtgttcat

SEQ ID NO: 342817 - DNA, 15 bp, Homo sapiens
ttgcatgtgtgttca

SEQ ID NO: 342818 - DNA, 15 bp, Homo sapiens
gttgcatgtgtgttc

SEQ ID NO: 342819 - DNA, 15 bp, Homo sapiens
ggttgcatgtgtgtt

SEQ ID NO: 342820 - DNA, 15 bp, Homo sapiens
tggttgcatgtgtgt

SEQ ID NO: 342821 - DNA, 15 bp, Homo sapiens
atggttgcatgtgtg

SEQ ID NO: 342822 - DNA, 15 bp, Homo sapiens
aatggttgcatgtgt

SEQ ID NO: 342823 - DNA, 15 bp, Homo sapiens
taatggttgcatgtg

SEQ ID NO: 342824 - DNA, 15 bp, Homo sapiens
ctaatggttgcatgt

SEQ ID NO: 342825 - DNA, 15 bp, Homo sapiens
tctaatggttgcatg

SEQ ID NO: 342826 - DNA, 15 bp, Homo sapiens
ctctaatggttgcat

SEQ ID NO: 342827 - DNA, 15 bp, Homo sapiens
tctctaatggttgca

SEQ ID NO: 342828 - DNA, 15 bp, Homo sapiens
gtctctaatggttgc

SEQ ID NO: 342829 - DNA, 15 bp, Homo sapiens
tgtctctaatggttg

SEQ ID NO: 342830 - DNA, 15 bp, Homo sapiens
ttgtctctaatggtt

SEQ ID NO: 342831 - DNA, 15 bp, Homo sapiens
gttgtctctaatggt

SEQ ID NO: 342832 - DNA, 15 bp, Homo sapiens
tgttgtctctaatgg

SEQ ID NO: 342833 - DNA, 15 bp, Homo sapiens
atgttgtctctaatg

SEQ ID NO: 342834 - DNA, 15 bp, Homo sapiens
gatgttgtctctaat

SEQ ID NO: 342835 - DNA, 15 bp, Homo sapiens
tgatgttgtctctaa

SEQ ID NO: 342836 - DNA, 15 bp, Homo sapiens
ttgatgttgtctcta

SEQ ID NO: 342837 - DNA, 15 bp, Homo sapiens
gttgatgttgtctct

SEQ ID NO: 342838 - DNA, 15 bp, Homo sapiens
ggttgatgttgtctc

SEQ ID NO: 342839 - DNA, 15 bp, Homo sapiens
gggttgatgttgtct

SEQ ID NO: 342840 - DNA, 15 bp, Homo sapiens
agggttgatgttgtc

SEQ ID NO: 342841 - DNA, 15 bp, Homo sapiens
cagggttgatgttgt

SEQ ID NO: 342842 - DNA, 15 bp, Homo sapiens
acagggttgatgttg

SEQ ID NO: 342843 - DNA, 15 bp, Homo sapiens
cacagggttgatgtt

SEQ ID NO: 342844 - DNA, 15 bp, Homo sapiens
acacagggttgatgt

SEQ ID NO: 342845 - DNA, 15 bp, Homo sapiens
aacacagggttgatg

SEQ ID NO: 342846 - DNA, 15 bp, Homo sapiens
taacacagggttgat

SEQ ID NO: 342847 - DNA, 15 bp, Homo sapiens
ataacacagggttga

SEQ ID NO: 342848 - DNA, 15 bp, Homo sapiens
gataacacagggttg

SEQ ID NO: 342849 - DNA, 15 bp, Homo sapiens
ggataacacagggtt

SEQ ID NO: 342850 - DNA, 15 bp, Homo sapiens
tggataacacagggt

SEQ ID NO: 342851 - DNA, 15 bp, Homo sapiens
ttggataacacaggg

SEQ ID NO: 342852 - DNA, 15 bp, Homo sapiens
cttggataacacagg

SEQ ID NO: 342853 - DNA, 15 bp, Homo sapiens
ccttggataacacag

SEQ ID NO: 342854 - DNA, 15 bp, Homo sapiens
cccttggataacaca

SEQ ID NO: 342855 - DNA, 15 bp, Homo sapiens
tcccttggataacac

SEQ ID NO: 342856 - DNA, 15 bp, Homo sapiens
atcccttggataaca

SEQ ID NO: 342857 - DNA, 15 bp, Homo sapiens
catcccttggataac

SEQ ID NO: 342858 - DNA, 15 bp, Homo sapiens
gcatcccttggataa

SEQ ID NO: 342859 - DNA, 15 bp, Homo sapiens
agcatcccttggata

SEQ ID NO: 342860 - DNA, 15 bp, Homo sapiens
cagcatcccttggat

SEQ ID NO: 342861 - DNA, 15 bp, Homo sapiens
tcagcatcccttgga

SEQ ID NO: 342862 - DNA, 15 bp, Homo sapiens
ttcagcatcccttgg

SEQ ID NO: 342863 - DNA, 15 bp, Homo sapiens
cttcagcatcccttg

SEQ ID NO: 342864 - DNA, 15 bp, Homo sapiens
acttcagcatccctt

SEQ ID NO: 342865 - DNA, 15 bp, Homo sapiens
gacttcagcatccct

SEQ ID NO: 342866 - DNA, 15 bp, Homo sapiens
tgacttcagcatccc

SEQ ID NO: 342867 - DNA, 15 bp, Homo sapiens
atgacttcagcatcc

SEQ ID NO: 342868 - DNA, 15 bp, Homo sapiens
aatgacttcagcatc

SEQ ID NO: 342869 - DNA, 15 bp, Homo sapiens
aaatgacttcagcat

SEQ ID NO: 342870 - DNA, 15 bp, Homo sapiens
aaaatgacttcagca

SEQ ID NO: 342871 - DNA, 15 bp, Homo sapiens
caaaatgacttcagc

SEQ ID NO: 342872 - DNA, 15 bp, Homo sapiens
tcaaaatgacttcag

SEQ ID NO: 342873 - DNA, 15 bp, Homo sapiens
atcaaaatgacttca

SEQ ID NO: 342874 - DNA, 15 bp, Homo sapiens
gatcaaaatgacttc

SEQ ID NO: 342875 - DNA, 15 bp, Homo sapiens
tgatcaaaatgactt

SEQ ID NO: 342876 - DNA, 15 bp, Homo sapiens
ctgatcaaaatgact

SEQ ID NO: 342877 - DNA, 15 bp, Homo sapiens
cctgatcaaaatgac

SEQ ID NO: 342878 - DNA, 15 bp, Homo sapiens
acctgatcaaaatga

SEQ ID NO: 342879 - DNA, 15 bp, Homo sapiens
cacctgatcaaaatg

SEQ ID NO: 342880 - DNA, 15 bp, Homo sapiens
ccacctgatcaaaat

SEQ ID NO: 342881 - DNA, 15 bp, Homo sapiens
gccacctgatcaaaa

SEQ ID NO: 342882 - DNA, 15 bp, Homo sapiens
tgccacctgatcaaa

SEQ ID NO: 342883 - DNA, 15 bp, Homo sapiens
ctgccacctgatcaa

SEQ ID NO: 342884 - DNA, 15 bp, Homo sapiens
tctgccacctgatca

SEQ ID NO: 342885 - DNA, 15 bp, Homo sapiens
ttctgccacctgatc

SEQ ID NO: 342886 - DNA, 15 bp, Homo sapiens
cttctgccacctgat

SEQ ID NO: 342887 - DNA, 15 bp, Homo sapiens
acttctgccacctga

SEQ ID NO: 342888 - DNA, 15 bp, Homo sapiens
cacttctgccacctg

SEQ ID NO: 342889 - DNA, 15 bp, Homo sapiens
tcacttctgccacct

SEQ ID NO: 342890 - DNA, 15 bp, Homo sapiens
gtcacttctgccacc

SEQ ID NO: 342891 - DNA, 15 bp, Homo sapiens
agtcacttctgccac

SEQ ID NO: 342892 - DNA, 15 bp, Homo sapiens
cagtcacttctgcca

SEQ ID NO: 342893 - DNA, 15 bp, Homo sapiens
ccagtcacttctgcc

SEQ ID NO: 342894 - DNA, 15 bp, Homo sapiens
cccagtcacttctgc

SEQ ID NO: 342895 - DNA, 15 bp, Homo sapiens
ccccagtcacttctg

SEQ ID NO: 342896 - DNA, 15 bp, Homo sapiens
tccccagtcacttct

SEQ ID NO: 342897 - DNA, 15 bp, Homo sapiens
gtccccagtcacttc

SEQ ID NO: 342898 - DNA, 15 bp, Homo sapiens
tgtccccagtcactt

SEQ ID NO: 342899 - DNA, 15 bp, Homo sapiens
atgtccccagtcact

SEQ ID NO: 342900 - DNA, 15 bp, Homo sapiens
gatgtccccagtcac

SEQ ID NO: 342901 - DNA, 15 bp, Homo sapiens
agatgtccccagtca

SEQ ID NO: 342902 - DNA, 15 bp, Homo sapiens
gagatgtccccagtc

SEQ ID NO: 342903 - DNA, 15 bp, Homo sapiens
agagatgtccccagt

SEQ ID NO: 342904 - DNA, 15 bp, Homo sapiens
aagagatgtccccag

SEQ ID NO: 342905 - DNA, 15 bp, Homo sapiens
aaagagatgtcccca

SEQ ID NO: 342906 - DNA, 15 bp, Homo sapiens
gaaagagatgtcccc

SEQ ID NO: 342907 - DNA, 15 bp, Homo sapiens
tgaaagagatgtccc

SEQ ID NO: 342908 - DNA, 15 bp, Homo sapiens
ttgaaagagatgtcc

SEQ ID NO: 342909 - DNA, 15 bp, Homo sapiens
cttgaaagagatgtc

SEQ ID NO: 342910 - DNA, 15 bp, Homo sapiens
ccttgaaagagatgt

SEQ ID NO: 342911 - DNA, 15 bp, Homo sapiens
tccttgaaagagatg

SEQ ID NO: 342912 - DNA, 15 bp, Homo sapiens
ctccttgaaagagat

SEQ ID NO: 342913 - DNA, 15 bp, Homo sapiens
gctccttgaaagaga

SEQ ID NO: 342914 - DNA, 15 bp, Homo sapiens
tgctccttgaaagag

SEQ ID NO: 342915 - DNA, 15 bp, Homo sapiens
atgctccttgaaaga

SEQ ID NO: 342916 - DNA, 15 bp, Homo sapiens
gatgctccttgaaag

SEQ ID NO: 342917 - DNA, 15 bp, Homo sapiens
tgatgctccttgaaa

SEQ ID NO: 342918 - DNA, 15 bp, Homo sapiens
ctgatgctccttgaa

SEQ ID NO: 342919 - DNA, 15 bp, Homo sapiens
actgatgctccttga

SEQ ID NO: 342920 - DNA, 15 bp, Homo sapiens
gactgatgctccttg

SEQ ID NO: 342921 - DNA, 15 bp, Homo sapiens
agactgatgctcctt

SEQ ID NO: 342922 - DNA, 15 bp, Homo sapiens
tagactgatgctcct

SEQ ID NO: 342923 - DNA, 15 bp, Homo sapiens
atagactgatgctcc

SEQ ID NO: 342924 - DNA, 15 bp, Homo sapiens
catagactgatgctc

SEQ ID NO: 342925 - DNA, 15 bp, Homo sapiens
ccatagactgatgct

SEQ ID NO: 342926 - DNA, 15 bp, Homo sapiens
accatagactgatgc

SEQ ID NO: 342927 - DNA, 15 bp, Homo sapiens
taccatagactgatg

SEQ ID NO: 342928 - DNA, 15 bp, Homo sapiens
ataccatagactgat

SEQ ID NO: 342929 - DNA, 15 bp, Homo sapiens
aataccatagactga

SEQ ID NO: 342930 - DNA, 15 bp, Homo sapiens
taataccatagactg

SEQ ID NO: 342931 - DNA, 15 bp, Homo sapiens
gtaataccatagact

SEQ ID NO: 342932 - DNA, 15 bp, Homo sapiens
ggtaataccatagac

SEQ ID NO: 342933 - DNA, 15 bp, Homo sapiens
gggtaataccataga

SEQ ID NO: 342934 - DNA, 15 bp, Homo sapiens
cgggtaataccatag

SEQ ID NO: 342935 - DNA, 15 bp, Homo sapiens
ccgggtaataccata

SEQ ID NO: 342936 - DNA, 15 bp, Homo sapiens
cccgggtaataccat

SEQ ID NO: 342937 - DNA, 15 bp, Homo sapiens
gcccgggtaatacca

SEQ ID NO: 342938 - DNA, 15 bp, Homo sapiens
tgcccgggtaatacc

SEQ ID NO: 342939 - DNA, 15 bp, Homo sapiens
ctgcccgggtaatac

SEQ ID NO: 342940 - DNA, 15 bp, Homo sapiens
cctgcccgggtaata

SEQ ID NO: 342941 - DNA, 15 bp, Homo sapiens
gcctgcccgggtaat

SEQ ID NO: 342942 - DNA, 15 bp, Homo sapiens
agcctgcccgggtaa

SEQ ID NO: 342943 - DNA, 15 bp, Homo sapiens
aagcctgcccgggta

SEQ ID NO: 342944 - DNA, 15 bp, Homo sapiens
gaagcctgcccgggt

SEQ ID NO: 342945 - DNA, 15 bp, Homo sapiens
agaagcctgcccggg

SEQ ID NO: 342946 - DNA, 15 bp, Homo sapiens
cagaagcctgcccgg

SEQ ID NO: 342947 - DNA, 15 bp, Homo sapiens
tcagaagcctgcccg

SEQ ID NO: 342948 - DNA, 15 bp, Homo sapiens
ttcagaagcctgccc

SEQ ID NO: 342949 - DNA, 15 bp, Homo sapiens
attcagaagcctgcc

SEQ ID NO: 342950 - DNA, 15 bp, Homo sapiens
cattcagaagcctgc

SEQ ID NO: 342951 - DNA, 15 bp, Homo sapiens
tcattcagaagcctg

SEQ ID NO: 342952 - DNA, 15 bp, Homo sapiens
ctcattcagaagcct

SEQ ID NO: 342953 - DNA, 15 bp, Homo sapiens
cctcattcagaagcc

SEQ ID NO: 342954 - DNA, 15 bp, Homo sapiens
acctcattcagaagc

SEQ ID NO: 342955 - DNA, 15 bp, Homo sapiens
tacctcattcagaag

SEQ ID NO: 342956 - DNA, 15 bp, Homo sapiens
atacctcattcagaa

SEQ ID NO: 342957 - DNA, 15 bp, Homo sapiens
catacctcattcaga

SEQ ID NO: 342958 - DNA, 15 bp, Homo sapiens
tcatacctcattcag

SEQ ID NO: 342959 - DNA, 15 bp, Homo sapiens
gtcatacctcattca

SEQ ID NO: 342960 - DNA, 15 bp, Homo sapiens
agtcatacctcattc

SEQ ID NO: 342961 - DNA, 15 bp, Homo sapiens
aagtcatacctcatt

SEQ ID NO: 342962 - DNA, 15 bp, Homo sapiens
caagtcatacctcat

SEQ ID NO: 342963 - DNA, 15 bp, Homo sapiens
acaagtcatacctca

SEQ ID NO: 342964 - DNA, 15 bp, Homo sapiens
gacaagtcatacctc

SEQ ID NO: 342965 - DNA, 15 bp, Homo sapiens
tgacaagtcatacct

SEQ ID NO: 342966 - DNA, 15 bp, Homo sapiens
atgacaagtcatacc

SEQ ID NO: 342967 - DNA, 15 bp, Homo sapiens
catgacaagtcatac

SEQ ID NO: 342968 - DNA, 15 bp, Homo sapiens
ccatgacaagtcata

SEQ ID NO: 342969 - DNA, 15 bp, Homo sapiens
cccatgacaagtcat

SEQ ID NO: 342970 - DNA, 15 bp, Homo sapiens
acccatgacaagtca

SEQ ID NO: 342971 - DNA, 15 bp, Homo sapiens
gacccatgacaagtc

SEQ ID NO: 342972 - DNA, 15 bp, Homo sapiens
agacccatgacaagt

SEQ ID NO: 342973 - DNA, 15 bp, Homo sapiens
cagacccatgacaag

SEQ ID NO: 342974 - DNA, 15 bp, Homo sapiens
tcagacccatgacaa

SEQ ID NO: 342975 - DNA, 15 bp, Homo sapiens
ttcagacccatgaca

SEQ ID NO: 342976 - DNA, 15 bp, Homo sapiens
tttcagacccatgac

SEQ ID NO: 342977 - DNA, 15 bp, Homo sapiens
ctttcagacccatga

SEQ ID NO: 342978 - DNA, 15 bp, Homo sapiens
tctttcagacccatg

SEQ ID NO: 342979 - DNA, 15 bp, Homo sapiens
gtctttcagacccat

SEQ ID NO: 342980 - DNA, 15 bp, Homo sapiens
agtctttcagaccca

SEQ ID NO: 342981 - DNA, 15 bp, Homo sapiens
cagtctttcagaccc

SEQ ID NO: 342982 - DNA, 15 bp, Homo sapiens
ccagtctttcagacc

SEQ ID NO: 342983 - DNA, 15 bp, Homo sapiens
accagtctttcagac

SEQ ID NO: 342984 - DNA, 15 bp, Homo sapiens
gaccagtctttcaga

SEQ ID NO: 342985 - DNA, 15 bp, Homo sapiens
tgaccagtctttcag

SEQ ID NO: 342986 - DNA, 15 bp, Homo sapiens
ctgaccagtctttca

SEQ ID NO: 342987 - DNA, 15 bp, Homo sapiens
tctgaccagtctttc

SEQ ID NO: 342988 - DNA, 15 bp, Homo sapiens
atctgaccagtcttt

SEQ ID NO: 342989 - DNA, 15 bp, Homo sapiens
aatctgaccagtctt

SEQ ID NO: 342990 - DNA, 15 bp, Homo sapiens
gaatctgaccagtct

SEQ ID NO: 342991 - DNA, 15 bp, Homo sapiens
tgaatctgaccagtc

SEQ ID NO: 342992 - DNA, 15 bp, Homo sapiens
gtgaatctgaccagt

SEQ ID NO: 342993 - DNA, 15 bp, Homo sapiens
tgtgaatctgaccag

SEQ ID NO: 342994 - DNA, 15 bp, Homo sapiens
ctgtgaatctgacca

SEQ ID NO: 342995 - DNA, 15 bp, Homo sapiens
tctgtgaatctgacc

SEQ ID NO: 342996 - DNA, 15 bp, Homo sapiens
ctctgtgaatctgac

SEQ ID NO: 342997 - DNA, 15 bp, Homo sapiens
cctctgtgaatctga

SEQ ID NO: 342998 - DNA, 15 bp, Homo sapiens
gcctctgtgaatctg

SEQ ID NO: 342999 - DNA, 15 bp, Homo sapiens
tgcctctgtgaatct

SEQ ID NO: 343000 - DNA, 15 bp, Homo sapiens
ctgcctctgtgaatc

SEQ ID NO: 343001 - DNA, 15 bp, Homo sapiens
gctgcctctgtgaat

SEQ ID NO: 343002 - DNA, 15 bp, Homo sapiens
ggctgcctctgtgaa

SEQ ID NO: 343003 - DNA, 15 bp, Homo sapiens
tggctgcctctgtga

SEQ ID NO: 343004 - DNA, 15 bp, Homo sapiens
gtggctgcctctgtg

SEQ ID NO: 343005 - DNA, 15 bp, Homo sapiens
agtggctgcctctgt

SEQ ID NO: 343006 - DNA, 15 bp, Homo sapiens
aagtggctgcctctg

SEQ ID NO: 343007 - DNA, 15 bp, Homo sapiens
aaagtggctgcctct

SEQ ID NO: 343008 - DNA, 15 bp, Homo sapiens
aaaagtggctgcctc

SEQ ID NO: 343009 - DNA, 15 bp, Homo sapiens
gaaaagtggctgcct

SEQ ID NO: 343010 - DNA, 15 bp, Homo sapiens
agaaaagtggctgcc

SEQ ID NO: 343011 - DNA, 15 bp, Homo sapiens
gagaaaagtggctgc

SEQ ID NO: 343012 - DNA, 15 bp, Homo sapiens
agagaaaagtggctg

SEQ ID NO: 343013 - DNA, 15 bp, Homo sapiens
gagagaaaagtggct

SEQ ID NO: 343014 - DNA, 15 bp, Homo sapiens
tgagagaaaagtggc

SEQ ID NO: 343015 - DNA, 15 bp, Homo sapiens
atgagagaaaagtgg

SEQ ID NO: 343016 - DNA, 15 bp, Homo sapiens
gatgagagaaaagtg

SEQ ID NO: 343017 - DNA, 15 bp, Homo sapiens
ggatgagagaaaagt

SEQ ID NO: 343018 - DNA, 15 bp, Homo sapiens
tggatgagagaaaag

SEQ ID NO: 343019 - DNA, 15 bp, Homo sapiens
gtggatgagagaaaa

SEQ ID NO: 343020 - DNA, 15 bp, Homo sapiens
agtggatgagagaaa

SEQ ID NO: 343021 - DNA, 15 bp, Homo sapiens
cagtggatgagagaa

SEQ ID NO: 343022 - DNA, 15 bp, Homo sapiens
gcagtggatgagaga

SEQ ID NO: 343023 - DNA, 15 bp, Homo sapiens
agcagtggatgagag

SEQ ID NO: 343024 - DNA, 15 bp, Homo sapiens
aagcagtggatgaga

SEQ ID NO: 343025 - DNA, 15 bp, Homo sapiens
aaagcagtggatgag

SEQ ID NO: 343026 - DNA, 15 bp, Homo sapiens
taaagcagtggatga

SEQ ID NO: 343027 - DNA, 15 bp, Homo sapiens
ctaaagcagtggatg

SEQ ID NO: 343028 - DNA, 15 bp, Homo sapiens
actaaagcagtggat

SEQ ID NO: 343029 - DNA, 15 bp, Homo sapiens
aactaaagcagtgga

SEQ ID NO: 343030 - DNA, 15 bp, Homo sapiens
aaactaaagcagtgg

SEQ ID NO: 343031 - DNA, 15 bp, Homo sapiens
caaactaaagcagtg

SEQ ID NO: 343032 - DNA, 15 bp, Homo sapiens
tcaaactaaagcagt

SEQ ID NO: 343033 - DNA, 15 bp, Homo sapiens
ttcaaactaaagcag

SEQ ID NO: 343034 - DNA, 15 bp, Homo sapiens
attcaaactaaagca

SEQ ID NO: 343035 - DNA, 15 bp, Homo sapiens
tattcaaactaaagc

SEQ ID NO: 343036 - DNA, 15 bp, Homo sapiens
ttattcaaactaaag

SEQ ID NO: 343037 - DNA, 15 bp, Homo sapiens
tttattcaaactaaa

SEQ ID NO: 343038 - DNA, 15 bp, Homo sapiens
gtttattcaaactaa

SEQ ID NO: 343039 - DNA, 15 bp, Homo sapiens
tgtttattcaaacta

SEQ ID NO: 343040 - DNA, 15 bp, Homo sapiens
ttgtttattcaaact

SEQ ID NO: 343041 - DNA, 15 bp, Homo sapiens
cttgtttattcaaac

SEQ ID NO: 343042 - DNA, 15 bp, Homo sapiens
gcttgtttattcaaa

SEQ ID NO: 343043 - DNA, 15 bp, Homo sapiens
agcttgtttattcaa

SEQ ID NO: 343044 - DNA, 15 bp, Homo sapiens
cagcttgtttattca

SEQ ID NO: 343045 - DNA, 15 bp, Homo sapiens
ccagcttgtttattc

SEQ ID NO: 343046 - DNA, 15 bp, Homo sapiens
accagcttgtttatt

SEQ ID NO: 343047 - DNA, 15 bp, Homo sapiens
taccagcttgtttat

SEQ ID NO: 343048 - DNA, 15 bp, Homo sapiens
ttaccagcttgttta

SEQ ID NO: 343049 - DNA, 15 bp, Homo sapiens
cttaccagcttgttt

SEQ ID NO: 343050 - DNA, 15 bp, Homo sapiens
ccttaccagcttgtt

SEQ ID NO: 343051 - DNA, 15 bp, Homo sapiens
accttaccagcttgt

SEQ ID NO: 343052 - DNA, 15 bp, Homo sapiens
caccttaccagcttg

SEQ ID NO: 343053 - DNA, 15 bp, Homo sapiens
acaccttaccagctt

SEQ ID NO: 343054 - DNA, 15 bp, Homo sapiens
cacaccttaccagct

SEQ ID NO: 343055 - DNA, 15 bp, Homo sapiens
ccacaccttaccagc

SEQ ID NO: 343056 - DNA, 15 bp, Homo sapiens
accacaccttaccag

SEQ ID NO: 343057 - DNA, 15 bp, Homo sapiens
aaccacaccttacca

SEQ ID NO: 343058 - DNA, 15 bp, Homo sapiens
caaccacaccttacc

SEQ ID NO: 343059 - DNA, 15 bp, Homo sapiens
gcaaccacaccttac

SEQ ID NO: 343060 - DNA, 15 bp, Homo sapiens
agcaaccacacctta

SEQ ID NO: 343061 - DNA, 15 bp, Homo sapiens
gagcaaccacacctt

SEQ ID NO: 343062 - DNA, 15 bp, Homo sapiens
tgagcaaccacacct

SEQ ID NO: 343063 - DNA, 15 bp, Homo sapiens
atgagcaaccacacc

SEQ ID NO: 343064 - DNA, 15 bp, Homo sapiens
catgagcaaccacac

SEQ ID NO: 343065 - DNA, 15 bp, Homo sapiens
gcatgagcaaccaca

SEQ ID NO: 343066 - DNA, 15 bp, Homo sapiens
agcatgagcaaccac

SEQ ID NO: 343067 - DNA, 15 bp, Homo sapiens
aagcatgagcaacca

SEQ ID NO: 343068 - DNA, 15 bp, Homo sapiens
caagcatgagcaacc

SEQ ID NO: 343069 - DNA, 15 bp, Homo sapiens
acaagcatgagcaac

SEQ ID NO: 343070 - DNA, 15 bp, Homo sapiens
tacaagcatgagcaa

SEQ ID NO: 343071 - DNA, 15 bp, Homo sapiens
ttacaagcatgagca

SEQ ID NO: 343072 - DNA, 15 bp, Homo sapiens
attacaagcatgagc

SEQ ID NO: 343073 - DNA, 15 bp, Homo sapiens
gattacaagcatgag

SEQ ID NO: 343074 - DNA, 15 bp, Homo sapiens
ggattacaagcatga

SEQ ID NO: 343075 - DNA, 15 bp, Homo sapiens
gggattacaagcatg

SEQ ID NO: 343076 - DNA, 15 bp, Homo sapiens
tgggattacaagcat

SEQ ID NO: 343077 - DNA, 15 bp, Homo sapiens
ctgggattacaagca

SEQ ID NO: 343078 - DNA, 15 bp, Homo sapiens
gctgggattacaagc

SEQ ID NO: 343079 - DNA, 15 bp, Homo sapiens
ttcccaccttggcct

SEQ ID NO: 343080 - DNA, 15 bp, Homo sapiens
cttcccaccttggcc

SEQ ID NO: 343081 - DNA, 15 bp, Homo sapiens
tcttcccaccttggc

SEQ ID NO: 343082 - DNA, 15 bp, Homo sapiens
atcttcccaccttgg

SEQ ID NO: 343083 - DNA, 15 bp, Homo sapiens
gatcttcccaccttg

SEQ ID NO: 343084 - DNA, 15 bp, Homo sapiens
tgatcttcccacctt

SEQ ID NO: 343085 - DNA, 15 bp, Homo sapiens
gtgatcttcccacct

SEQ ID NO: 343086 - DNA, 15 bp, Homo sapiens
agtgatcttcccacc

SEQ ID NO: 343087 - DNA, 15 bp, Homo sapiens
aagtgatcttcccac

SEQ ID NO: 343088 - DNA, 15 bp, Homo sapiens
caagtgatcttccca

SEQ ID NO: 343089 - DNA, 15 bp, Homo sapiens
tcaagtgatcttccc

SEQ ID NO: 343090 - DNA, 15 bp, Homo sapiens
ctcaagtgatcttcc

SEQ ID NO: 343091 - DNA, 15 bp, Homo sapiens
gctcaagtgatcttc

SEQ ID NO: 343092 - DNA, 15 bp, Homo sapiens
agctcaagtgatctt

SEQ ID NO: 343093 - DNA, 15 bp, Homo sapiens
gagctcaagtgatct

SEQ ID NO: 343094 - DNA, 15 bp, Homo sapiens
tgagctcaagtgatc

SEQ ID NO: 343095 - DNA, 15 bp, Homo sapiens
ctgagctcaagtgat

SEQ ID NO: 343096 - DNA, 15 bp, Homo sapiens
cctgagctcaagtga

SEQ ID NO: 343097 - DNA, 15 bp, Homo sapiens
tcctgagctcaagtg

SEQ ID NO: 343098 - DNA, 15 bp, Homo sapiens
ctcctgagctcaagt

SEQ ID NO: 343099 - DNA, 15 bp, Homo sapiens
actcctgagctcaag

SEQ ID NO: 343100 - DNA, 15 bp, Homo sapiens
aactcctgagctcaa

SEQ ID NO: 343101 - DNA, 15 bp, Homo sapiens
gaactcctgagctca

SEQ ID NO: 343102 - DNA, 15 bp, Homo sapiens
tgaactcctgagctc

SEQ ID NO: 343103 - DNA, 15 bp, Homo sapiens
ttgaactcctgagct

SEQ ID NO: 343104 - DNA, 15 bp, Homo sapiens
cttgaactcctgagc

SEQ ID NO: 343105 - DNA, 15 bp, Homo sapiens
tcttgaactcctgag

SEQ ID NO: 343106 - DNA, 15 bp, Homo sapiens
agctggtcttgaact

SEQ ID NO: 343107 - DNA, 15 bp, Homo sapiens
aagctggtcttgaac

SEQ ID NO: 343108 - DNA, 15 bp, Homo sapiens
caagctggtcttgaa

SEQ ID NO: 343109 - DNA, 15 bp, Homo sapiens
ccaagctggtcttga

SEQ ID NO: 343110 - DNA, 15 bp, Homo sapiens
cccaagctggtcttg

SEQ ID NO: 343111 - DNA, 15 bp, Homo sapiens
gtgttgcccaagctg

SEQ ID NO: 343112 - DNA, 15 bp, Homo sapiens
tgtgttgcccaagct

SEQ ID NO: 343113 - DNA, 15 bp, Homo sapiens
ctgtgttgcccaagc

SEQ ID NO: 343114 - DNA, 15 bp, Homo sapiens
actgtgttgcccaag

SEQ ID NO: 343115 - DNA, 15 bp, Homo sapiens
cactgtgttgcccaa

SEQ ID NO: 343116 - DNA, 15 bp, Homo sapiens
tcactgtgttgccca

SEQ ID NO: 343117 - DNA, 15 bp, Homo sapiens
ctcactgtgttgccc

SEQ ID NO: 343118 - DNA, 15 bp, Homo sapiens
ggggtctcactgtgt

SEQ ID NO: 343119 - DNA, 15 bp, Homo sapiens
tggggtctcactgtg

SEQ ID NO: 343120 - DNA, 15 bp, Homo sapiens
atggggtctcactgt

SEQ ID NO: 343121 - DNA, 15 bp, Homo sapiens
gatggggtctcactg

SEQ ID NO: 343122 - DNA, 15 bp, Homo sapiens
agatggggtctcact

SEQ ID NO: 343123 - DNA, 15 bp, Homo sapiens
tagatggggtctcac

SEQ ID NO: 343124 - DNA, 15 bp, Homo sapiens
atagatggggtctca

SEQ ID NO: 343125 - DNA, 15 bp, Homo sapiens
tatagatggggtctc

SEQ ID NO: 343126 - DNA, 15 bp, Homo sapiens
gtatagatggggtct

SEQ ID NO: 343127 - DNA, 15 bp, Homo sapiens
tgtatagatggggtc

SEQ ID NO: 343128 - DNA, 15 bp, Homo sapiens
ttgtatagatggggt

SEQ ID NO: 343129 - DNA, 15 bp, Homo sapiens
tttgtatagatgggg

SEQ ID NO: 343130 - DNA, 15 bp, Homo sapiens
ttttgtatagatggg

SEQ ID NO: 343131 - DNA, 15 bp, Homo sapiens
tttttgtatagatgg

SEQ ID NO: 343132 - DNA, 15 bp, Homo sapiens
atttttgtatagatg

SEQ ID NO: 343133 - DNA, 15 bp, Homo sapiens
tatttttgtatagat

SEQ ID NO: 343134 - DNA, 15 bp, Homo sapiens
ctatttttgtataga

SEQ ID NO: 343135 - DNA, 15 bp, Homo sapiens
tctatttttgtatag

SEQ ID NO: 343136 - DNA, 15 bp, Homo sapiens
ttctatttttgtata

SEQ ID NO: 343137 - DNA, 15 bp, Homo sapiens
tttctatttttgtat

SEQ ID NO: 343138 - DNA, 15 bp, Homo sapiens
ctttctatttttgta

SEQ ID NO: 343139 - DNA, 15 bp, Homo sapiens
tctttctatttttgt

SEQ ID NO: 343140 - DNA, 15 bp, Homo sapiens
atctttctatttttg

SEQ ID NO: 343141 - DNA, 15 bp, Homo sapiens
aatctttctattttt

SEQ ID NO: 343142 - DNA, 15 bp, Homo sapiens
taatctttctatttt

SEQ ID NO: 343143 - DNA, 15 bp, Homo sapiens
ctaatctttctattt

SEQ ID NO: 343144 - DNA, 15 bp, Homo sapiens
gctaatctttctatt

SEQ ID NO: 343145 - DNA, 15 bp, Homo sapiens
ggctaatctttctat

SEQ ID NO: 343146 - DNA, 15 bp, Homo sapiens
tggctaatctttcta

SEQ ID NO: 343147 - DNA, 15 bp, Homo sapiens
ctggctaatctttct

SEQ ID NO: 343148 - DNA, 15 bp, Homo sapiens
cctggctaatctttc

SEQ ID NO: 343149 - DNA, 15 bp, Homo sapiens
gcctggctaatcttt

SEQ ID NO: 343150 - DNA, 15 bp, Homo sapiens
tgcctggctaatctt

SEQ ID NO: 343151 - DNA, 15 bp, Homo sapiens
atgcctggctaatct

SEQ ID NO: 343152 - DNA, 15 bp, Homo sapiens
tatgcctggctaatc

SEQ ID NO: 343153 - DNA, 15 bp, Homo sapiens
ctatgcctggctaat

SEQ ID NO: 343154 - DNA, 15 bp, Homo sapiens
cctatgcctggctaa

SEQ ID NO: 343155 - DNA, 15 bp, Homo sapiens
ccctatgcctggcta

SEQ ID NO: 343156 - DNA, 15 bp, Homo sapiens
cccctatgcctggct

SEQ ID NO: 343157 - DNA, 15 bp, Homo sapiens
gcccctatgcctggc

SEQ ID NO: 343158 - DNA, 15 bp, Homo sapiens
tgcccctatgcctgg

SEQ ID NO: 343159 - DNA, 15 bp, Homo sapiens
gtgcccctatgcctg

SEQ ID NO: 343160 - DNA, 15 bp, Homo sapiens
cgtgcccctatgcct

SEQ ID NO: 343161 - DNA, 15 bp, Homo sapiens
acgtgcccctatgcc

SEQ ID NO: 343162 - DNA, 15 bp, Homo sapiens
cacgtgcccctatgc

SEQ ID NO: 343163 - DNA, 15 bp, Homo sapiens
gcacgtgcccctatg

SEQ ID NO: 343164 - DNA, 15 bp, Homo sapiens
ggcacgtgcccctat

SEQ ID NO: 343165 - DNA, 15 bp, Homo sapiens
aggcacgtgccccta

SEQ ID NO: 343166 - DNA, 15 bp, Homo sapiens
caggcacgtgcccct

SEQ ID NO: 343167 - DNA, 15 bp, Homo sapiens
acaggcacgtgcccc

SEQ ID NO: 343168 - DNA, 15 bp, Homo sapiens
tacaggcacgtgccc

SEQ ID NO: 343169 - DNA, 15 bp, Homo sapiens
ctacaggcacgtgcc

SEQ ID NO: 343170 - DNA, 15 bp, Homo sapiens
gctacaggcacgtgc

SEQ ID NO: 343171 - DNA, 15 bp, Homo sapiens
ggctacaggcacgtg

SEQ ID NO: 343172 - DNA, 15 bp, Homo sapiens
gggctacaggcacgt

SEQ ID NO: 343173 - DNA, 15 bp, Homo sapiens
agggctacaggcacg

SEQ ID NO: 343174 - DNA, 15 bp, Homo sapiens
gagggctacaggcac

SEQ ID NO: 343175 - DNA, 15 bp, Homo sapiens
cgagggctacaggca

SEQ ID NO: 343176 - DNA, 15 bp, Homo sapiens
gcgagggctacaggc

SEQ ID NO: 343177 - DNA, 15 bp, Homo sapiens
agcgagggctacagg

SEQ ID NO: 343178 - DNA, 15 bp, Homo sapiens
tagcgagggctacag

SEQ ID NO: 343179 - DNA, 15 bp, Homo sapiens
gtagcgagggctaca

SEQ ID NO: 343180 - DNA, 15 bp, Homo sapiens
agtagcgagggctac

SEQ ID NO: 343181 - DNA, 15 bp, Homo sapiens
gagtagcgagggcta

SEQ ID NO: 343182 - DNA, 15 bp, Homo sapiens
agagtagcgagggct

SEQ ID NO: 343183 - DNA, 15 bp, Homo sapiens
cagagtagcgagggc

SEQ ID NO: 343184 - DNA, 15 bp, Homo sapiens
ccagagtagcgaggg

SEQ ID NO: 343185 - DNA, 15 bp, Homo sapiens
tccagagtagcgagg

SEQ ID NO: 343186 - DNA, 15 bp, Homo sapiens
ctccagagtagcgag

SEQ ID NO: 343187 - DNA, 15 bp, Homo sapiens
cctccagagtagcga

SEQ ID NO: 343188 - DNA, 15 bp, Homo sapiens
gcctccagagtagcg

SEQ ID NO: 343189 - DNA, 15 bp, Homo sapiens
acagcctccagagta

SEQ ID NO: 343190 - DNA, 15 bp, Homo sapiens
cacagcctccagagt

SEQ ID NO: 343191 - DNA, 15 bp, Homo sapiens
ccacagcctccagag

SEQ ID NO: 343192 - DNA, 15 bp, Homo sapiens
accacagcctccaga

SEQ ID NO: 343193 - DNA, 15 bp, Homo sapiens
caccacagcctccag

SEQ ID NO: 343194 - DNA, 15 bp, Homo sapiens
ccaccacagcctcca

SEQ ID NO: 343195 - DNA, 15 bp, Homo sapiens
cccaccacagcctcc

SEQ ID NO: 343196 - DNA, 15 bp, Homo sapiens
tcccaccacagcctc

SEQ ID NO: 343197 - DNA, 15 bp, Homo sapiens
ctcccaccacagcct

SEQ ID NO: 343198 - DNA, 15 bp, Homo sapiens
cctcccaccacagcc

SEQ ID NO: 343199 - DNA, 15 bp, Homo sapiens
tcctcccaccacagc

SEQ ID NO: 343200 - DNA, 15 bp, Homo sapiens
atcctcccaccacag

SEQ ID NO: 343201 - DNA, 15 bp, Homo sapiens
catcctcccaccaca

SEQ ID NO: 343202 - DNA, 15 bp, Homo sapiens
tcatcctcccaccac

SEQ ID NO: 343203 - DNA, 15 bp, Homo sapiens
gtcatcctcccacca

SEQ ID NO: 343204 - DNA, 15 bp, Homo sapiens
agtcatcctcccacc

SEQ ID NO: 343205 - DNA, 15 bp, Homo sapiens
aagtcatcctcccac

SEQ ID NO: 343206 - DNA, 15 bp, Homo sapiens
caagtcatcctccca

SEQ ID NO: 343207 - DNA, 15 bp, Homo sapiens
tcaagtcatcctccc

SEQ ID NO: 343208 - DNA, 15 bp, Homo sapiens
atcaagtcatcctcc

SEQ ID NO: 343209 - DNA, 15 bp, Homo sapiens
gatcaagtcatcctc

SEQ ID NO: 343210 - DNA, 15 bp, Homo sapiens
ggatcaagtcatcct

SEQ ID NO: 343211 - DNA, 15 bp, Homo sapiens
aggatcaagtcatcc

SEQ ID NO: 343212 - DNA, 15 bp, Homo sapiens
caggatcaagtcatc

SEQ ID NO: 343213 - DNA, 15 bp, Homo sapiens
tcaggatcaagtcat

SEQ ID NO: 343214 - DNA, 15 bp, Homo sapiens
ctcaggatcaagtca

SEQ ID NO: 343215 - DNA, 15 bp, Homo sapiens
tctcaggatcaagtc

SEQ ID NO: 343216 - DNA, 15 bp, Homo sapiens
ctctcaggatcaagt

SEQ ID NO: 343217 - DNA, 15 bp, Homo sapiens
cctctcaggatcaag

SEQ ID NO: 343218 - DNA, 15 bp, Homo sapiens
gcctctcaggatcaa

SEQ ID NO: 343219 - DNA, 15 bp, Homo sapiens
tgcctctcaggatca

SEQ ID NO: 343220 - DNA, 15 bp, Homo sapiens
ctgcctctcaggatc

SEQ ID NO: 343221 - DNA, 15 bp, Homo sapiens
tctgcctctcaggat

SEQ ID NO: 343222 - DNA, 15 bp, Homo sapiens
ctctgcctctcagga

SEQ ID NO: 343223 - DNA, 15 bp, Homo sapiens
cctctgcctctcagg

SEQ ID NO: 343224 - DNA, 15 bp, Homo sapiens
acctctgcctctcag

SEQ ID NO: 343225 - DNA, 15 bp, Homo sapiens
aacctctgcctctca

SEQ ID NO: 343226 - DNA, 15 bp, Homo sapiens
caacctctgcctctc

SEQ ID NO: 343227 - DNA, 15 bp, Homo sapiens
gcaacctctgcctct

SEQ ID NO: 343228 - DNA, 15 bp, Homo sapiens
tgactcactgcaacc

SEQ ID NO: 343229 - DNA, 15 bp, Homo sapiens
ttgactcactgcaac

SEQ ID NO: 343230 - DNA, 15 bp, Homo sapiens
cttgactcactgcaa

SEQ ID NO: 343231 - DNA, 15 bp, Homo sapiens
tcttgactcactgca

SEQ ID NO: 343232 - DNA, 15 bp, Homo sapiens
atcttgactcactgc

SEQ ID NO: 343233 - DNA, 15 bp, Homo sapiens
catcttgactcactg

SEQ ID NO: 343234 - DNA, 15 bp, Homo sapiens
ccatcttgactcact

SEQ ID NO: 343235 - DNA, 15 bp, Homo sapiens
gccatcttgactcac

SEQ ID NO: 343236 - DNA, 15 bp, Homo sapiens
tgccatcttgactca

SEQ ID NO: 343237 - DNA, 15 bp, Homo sapiens
gtgccatcttgactc

SEQ ID NO: 343238 - DNA, 15 bp, Homo sapiens
ggtgccatcttgact

SEQ ID NO: 343239 - DNA, 15 bp, Homo sapiens
tggtgccatcttgac

SEQ ID NO: 343240 - DNA, 15 bp, Homo sapiens
gtggtgccatcttga

SEQ ID NO: 343241 - DNA, 15 bp, Homo sapiens
agtggtgccatcttg

SEQ ID NO: 343242 - DNA, 15 bp, Homo sapiens
cagtggtgccatctt

SEQ ID NO: 343243 - DNA, 15 bp, Homo sapiens
gcagtggtgccatct

SEQ ID NO: 343244 - DNA, 15 bp, Homo sapiens
tgcagtggtgccatc

SEQ ID NO: 343245 - DNA, 15 bp, Homo sapiens
gtgcagtggtgccat

SEQ ID NO: 343246 - DNA, 15 bp, Homo sapiens
ggactggagtgcagt

SEQ ID NO: 343247 - DNA, 15 bp, Homo sapiens
gggactggagtgcag

SEQ ID NO: 343248 - DNA, 15 bp, Homo sapiens
agggactggagtgca

SEQ ID NO: 343249 - DNA, 15 bp, Homo sapiens
cagggactggagtgc

SEQ ID NO: 343250 - DNA, 15 bp, Homo sapiens
acagggactggagtg

SEQ ID NO: 343251 - DNA, 15 bp, Homo sapiens
gacagggactggagt

SEQ ID NO: 343252 - DNA, 15 bp, Homo sapiens
agacagggactggag

SEQ ID NO: 343253 - DNA, 15 bp, Homo sapiens
gagacagggactgga

SEQ ID NO: 343254 - DNA, 15 bp, Homo sapiens
ggagacagggactgg

SEQ ID NO: 343255 - DNA, 15 bp, Homo sapiens
tggagacagggactg

SEQ ID NO: 343256 - DNA, 15 bp, Homo sapiens
ttggagacagggact

SEQ ID NO: 343257 - DNA, 15 bp, Homo sapiens
tttggagacagggac

SEQ ID NO: 343258 - DNA, 15 bp, Homo sapiens
ttttggagacaggga

SEQ ID NO: 343259 - DNA, 15 bp, Homo sapiens
gttttttggagacag

SEQ ID NO: 343260 - DNA, 15 bp, Homo sapiens
tgttttttggagaca

SEQ ID NO: 343261 - DNA, 15 bp, Homo sapiens
ttgttttttggagac

SEQ ID NO: 343262 - DNA, 15 bp, Homo sapiens
tttgttttttggaga

SEQ ID NO: 343263 - DNA, 15 bp, Homo sapiens
ttttgttttttggag

SEQ ID NO: 343264 - DNA, 15 bp, Homo sapiens
gttttgttttttgga

SEQ ID NO: 343265 - DNA, 15 bp, Homo sapiens
tgttttgttttttgg

SEQ ID NO: 343266 - DNA, 15 bp, Homo sapiens
cagtttttgttttgt

SEQ ID NO: 343267 - DNA, 15 bp, Homo sapiens
ccagtttttgttttg

SEQ ID NO: 343268 - DNA, 15 bp, Homo sapiens
gccagtttttgtttt

SEQ ID NO: 343269 - DNA, 15 bp, Homo sapiens
agccagtttttgttt

SEQ ID NO: 343270 - DNA, 15 bp, Homo sapiens
cagccagtttttgtt

SEQ ID NO: 343271 - DNA, 15 bp, Homo sapiens
gcagccagtttttgt

SEQ ID NO: 343272 - DNA, 15 bp, Homo sapiens
agcagccagtttttg

SEQ ID NO: 343273 - DNA, 15 bp, Homo sapiens
gagcagccagttttt

SEQ ID NO: 343274 - DNA, 15 bp, Homo sapiens
tgagcagccagtttt

SEQ ID NO: 343275 - DNA, 15 bp, Homo sapiens
atgagcagccagttt

SEQ ID NO: 343276 - DNA, 15 bp, Homo sapiens
catgagcagccagtt

SEQ ID NO: 343277 - DNA, 15 bp, Homo sapiens
gcatgagcagccagt

SEQ ID NO: 343278 - DNA, 15 bp, Homo sapiens
agcatgagcagccag

SEQ ID NO: 343279 - DNA, 15 bp, Homo sapiens
aagcatgagcagcca

SEQ ID NO: 343280 - DNA, 15 bp, Homo sapiens
gaagcatgagcagcc

SEQ ID NO: 343281 - DNA, 15 bp, Homo sapiens
ggaagcatgagcagc

SEQ ID NO: 343282 - DNA, 15 bp, Homo sapiens
tggaagcatgagcag

SEQ ID NO: 343283 - DNA, 15 bp, Homo sapiens
atggaagcatgagca

SEQ ID NO: 343284 - DNA, 15 bp, Homo sapiens
aatggaagcatgagc

SEQ ID NO: 343285 - DNA, 15 bp, Homo sapiens
caatggaagcatgag

SEQ ID NO: 343286 - DNA, 15 bp, Homo sapiens
gcaatggaagcatga

SEQ ID NO: 343287 - DNA, 15 bp, Homo sapiens
agcaatggaagcatg

SEQ ID NO: 343288 - DNA, 15 bp, Homo sapiens
tagcaatggaagcat

SEQ ID NO: 343289 - DNA, 15 bp, Homo sapiens
ctagcaatggaagca

SEQ ID NO: 343290 - DNA, 15 bp, Homo sapiens
cctagcaatggaagc

SEQ ID NO: 343291 - DNA, 15 bp, Homo sapiens
tcctagcaatggaag

SEQ ID NO: 343292 - DNA, 15 bp, Homo sapiens
atcctagcaatggaa

SEQ ID NO: 343293 - DNA, 15 bp, Homo sapiens
aatcctagcaatgga

SEQ ID NO: 343294 - DNA, 15 bp, Homo sapiens
gaatcctagcaatgg

SEQ ID NO: 343295 - DNA, 15 bp, Homo sapiens
tgaatcctagcaatg

SEQ ID NO: 343296 - DNA, 15 bp, Homo sapiens
gtgaatcctagcaat

SEQ ID NO: 343297 - DNA, 15 bp, Homo sapiens
ggtgaatcctagcaa

SEQ ID NO: 343298 - DNA, 15 bp, Homo sapiens
aggtgaatcctagca

SEQ ID NO: 343299 - DNA, 15 bp, Homo sapiens
aaggtgaatcctagc

SEQ ID NO: 343300 - DNA, 15 bp, Homo sapiens
aaaggtgaatcctag

SEQ ID NO: 343301 - DNA, 15 bp, Homo sapiens
caaaggtgaatccta

SEQ ID NO: 343302 - DNA, 15 bp, Homo sapiens
acaaaggtgaatcct

SEQ ID NO: 343303 - DNA, 15 bp, Homo sapiens
tacaaaggtgaatcc

SEQ ID NO: 343304 - DNA, 15 bp, Homo sapiens
atacaaaggtgaatc

SEQ ID NO: 343305 - DNA, 15 bp, Homo sapiens
gatacaaaggtgaat

SEQ ID NO: 343306 - DNA, 15 bp, Homo sapiens
ggatacaaaggtgaa

SEQ ID NO: 343307 - DNA, 15 bp, Homo sapiens
gggatacaaaggtga

SEQ ID NO: 343308 - DNA, 15 bp, Homo sapiens
agggatacaaaggtg

SEQ ID NO: 343309 - DNA, 15 bp, Homo sapiens
tagggatacaaaggt

SEQ ID NO: 343310 - DNA, 15 bp, Homo sapiens
ttagggatacaaagg

SEQ ID NO: 343311 - DNA, 15 bp, Homo sapiens
gttagggatacaaag

SEQ ID NO: 343312 - DNA, 15 bp, Homo sapiens
tgttagggatacaaa

SEQ ID NO: 343313 - DNA, 15 bp, Homo sapiens
atgttagggatacaa

SEQ ID NO: 343314 - DNA, 15 bp, Homo sapiens
gatgttagggataca

SEQ ID NO: 343315 - DNA, 15 bp, Homo sapiens
ggatgttagggatac

SEQ ID NO: 343316 - DNA, 15 bp, Homo sapiens
tggatgttagggata

SEQ ID NO: 343317 - DNA, 15 bp, Homo sapiens
atggatgttagggat

SEQ ID NO: 343318 - DNA, 15 bp, Homo sapiens
gatggatgttaggga

SEQ ID NO: 343319 - DNA, 15 bp, Homo sapiens
tgatggatgttaggg

SEQ ID NO: 343320 - DNA, 15 bp, Homo sapiens
ttgatggatgttagg

SEQ ID NO: 343321 - DNA, 15 bp, Homo sapiens
attgatggatgttag

SEQ ID NO: 343322 - DNA, 15 bp, Homo sapiens
cattgatggatgtta

SEQ ID NO: 343323 - DNA, 15 bp, Homo sapiens
acattgatggatgtt

SEQ ID NO: 343324 - DNA, 15 bp, Homo sapiens
gacattgatggatgt

SEQ ID NO: 343325 - DNA, 15 bp, Homo sapiens
tgacattgatggatg

SEQ ID NO: 343326 - DNA, 15 bp, Homo sapiens
atgacattgatggat

SEQ ID NO: 343327 - DNA, 15 bp, Homo sapiens
tatgacattgatgga

SEQ ID NO: 343328 - DNA, 15 bp, Homo sapiens
gtatgacattgatgg

SEQ ID NO: 343329 - DNA, 15 bp, Homo sapiens
agtatgacattgatg

SEQ ID NO: 343330 - DNA, 15 bp, Homo sapiens
aagtatgacattgat

SEQ ID NO: 343331 - DNA, 15 bp, Homo sapiens
taagtatgacattga

SEQ ID NO: 343332 - DNA, 15 bp, Homo sapiens
ataagtatgacattg

SEQ ID NO: 343333 - DNA, 15 bp, Homo sapiens
tataagtatgacatt

SEQ ID NO: 343334 - DNA, 15 bp, Homo sapiens
ctataagtatgacat

SEQ ID NO: 343335 - DNA, 15 bp, Homo sapiens
actataagtatgaca

SEQ ID NO: 343336 - DNA, 15 bp, Homo sapiens
tactataagtatgac

SEQ ID NO: 343337 - DNA, 15 bp, Homo sapiens
ctactataagtatga

SEQ ID NO: 343338 - DNA, 15 bp, Homo sapiens
tctactataagtatg

SEQ ID NO: 343339 - DNA, 15 bp, Homo sapiens
atctactataagtat

SEQ ID NO: 343340 - DNA, 15 bp, Homo sapiens
catctactataagta

SEQ ID NO: 343341 - DNA, 15 bp, Homo sapiens
ccatctactataagt

SEQ ID NO: 343342 - DNA, 15 bp, Homo sapiens
gccatctactataag

SEQ ID NO: 343343 - DNA, 15 bp, Homo sapiens
ggccatctactataa

SEQ ID NO: 343344 - DNA, 15 bp, Homo sapiens
gggccatctactata

SEQ ID NO: 343345 - DNA, 15 bp, Homo sapiens
aatagaagtcagagc

SEQ ID NO: 343346 - DNA, 15 bp, Homo sapiens
taatagaagtcagag

SEQ ID NO: 343347 - DNA, 15 bp, Homo sapiens
ataatagaagtcaga

SEQ ID NO: 343348 - DNA, 15 bp, Homo sapiens
aataatagaagtcag

SEQ ID NO: 343349 - DNA, 15 bp, Homo sapiens
aaataatagaagtca

SEQ ID NO: 343350 - DNA, 15 bp, Homo sapiens
taaataatagaagtc

SEQ ID NO: 343351 - DNA, 15 bp, Homo sapiens
gtaaataatagaagt

SEQ ID NO: 343352 - DNA, 15 bp, Homo sapiens
tgtaaataatagaag

SEQ ID NO: 343353 - DNA, 15 bp, Homo sapiens
atgtaaataatagaa

SEQ ID NO: 343354 - DNA, 15 bp, Homo sapiens
gatgtaaataataga

SEQ ID NO: 343355 - DNA, 15 bp, Homo sapiens
agatgtaaataatag

SEQ ID NO: 343356 - DNA, 15 bp, Homo sapiens
cagatgtaaataata

SEQ ID NO: 343357 - DNA, 15 bp, Homo sapiens
tcagatgtaaataat

SEQ ID NO: 343358 - DNA, 15 bp, Homo sapiens
ttcagatgtaaataa

SEQ ID NO: 343359 - DNA, 15 bp, Homo sapiens
tttcagatgtaaata

SEQ ID NO: 343360 - DNA, 15 bp, Homo sapiens
ctttcagatgtaaat

SEQ ID NO: 343361 - DNA, 15 bp, Homo sapiens
tctttcagatgtaaa

SEQ ID NO: 343362 - DNA, 15 bp, Homo sapiens
ttctttcagatgtaa

SEQ ID NO: 343363 - DNA, 15 bp, Homo sapiens
tttctttcagatgta

SEQ ID NO: 343364 - DNA, 15 bp, Homo sapiens
gtttctttcagatgt

SEQ ID NO: 343365 - DNA, 15 bp, Homo sapiens
tgtttctttcagatg

SEQ ID NO: 343366 - DNA, 15 bp, Homo sapiens
atgtttctttcagat

SEQ ID NO: 343367 - DNA, 15 bp, Homo sapiens
aatgtttctttcaga

SEQ ID NO: 343368 - DNA, 15 bp, Homo sapiens
taatgtttctttcag

SEQ ID NO: 343369 - DNA, 15 bp, Homo sapiens
ctaatgtttctttca

SEQ ID NO: 343370 - DNA, 15 bp, Homo sapiens
cctaatgtttctttc

SEQ ID NO: 343371 - DNA, 15 bp, Homo sapiens
gcctaatgtttcttt

SEQ ID NO: 343372 - DNA, 15 bp, Homo sapiens
agcctaatgtttctt

SEQ ID NO: 343373 - DNA, 15 bp, Homo sapiens
tagcctaatgtttct

SEQ ID NO: 343374 - DNA, 15 bp, Homo sapiens
ttagcctaatgtttc

SEQ ID NO: 343375 - DNA, 15 bp, Homo sapiens
tttagcctaatgttt

SEQ ID NO: 343376 - DNA, 15 bp, Homo sapiens
ttttagcctaatgtt

SEQ ID NO: 343377 - DNA, 15 bp, Homo sapiens
attttagcctaatgt

SEQ ID NO: 343378 - DNA, 15 bp, Homo sapiens
tattttagcctaatg

SEQ ID NO: 343379 - DNA, 15 bp, Homo sapiens
atattttagcctaat

SEQ ID NO: 343380 - DNA, 15 bp, Homo sapiens
tatattttagcctaa

SEQ ID NO: 343381 - DNA, 15 bp, Homo sapiens
ttatattttagccta

SEQ ID NO: 343382 - DNA, 15 bp, Homo sapiens
tttatattttagcct

SEQ ID NO: 343383 - DNA, 15 bp, Homo sapiens
ttttatattttagcc

SEQ ID NO: 343384 - DNA, 15 bp, Homo sapiens
attttatattttagc

SEQ ID NO: 343385 - DNA, 15 bp, Homo sapiens
tattttatattttag

SEQ ID NO: 343386 - DNA, 15 bp, Homo sapiens
ttattttatatttta

SEQ ID NO: 343387 - DNA, 15 bp, Homo sapiens
tttattttatatttt

SEQ ID NO: 343388 - DNA, 15 bp, Homo sapiens
ttttattttatattt

SEQ ID NO: 343389 - DNA, 15 bp, Homo sapiens
aattttattttatat

SEQ ID NO: 343390 - DNA, 15 bp, Homo sapiens
aaattttattttata

SEQ ID NO: 343391 - DNA, 15 bp, Homo sapiens
aaaattttattttat

SEQ ID NO: 343392 - DNA, 15 bp, Homo sapiens
taaaattttatttta

SEQ ID NO: 343393 - DNA, 15 bp, Homo sapiens
gtaaaattttatttt

SEQ ID NO: 343394 - DNA, 15 bp, Homo sapiens
agtaaaattttattt

SEQ ID NO: 343395 - DNA, 15 bp, Homo sapiens
tagtaaaattttatt

SEQ ID NO: 343396 - DNA, 15 bp, Homo sapiens
ttagtaaaattttat

SEQ ID NO: 343397 - DNA, 15 bp, Homo sapiens
cttagtaaaatttta

SEQ ID NO: 343398 - DNA, 15 bp, Homo sapiens
gcttagtaaaatttt

SEQ ID NO: 343399 - DNA, 15 bp, Homo sapiens
cgcttagtaaaattt

SEQ ID NO: 343400 - DNA, 15 bp, Homo sapiens
tcgcttagtaaaatt

SEQ ID NO: 343401 - DNA, 15 bp, Homo sapiens
atcgcttagtaaaat

SEQ ID NO: 343402 - DNA, 15 bp, Homo sapiens
tatcgcttagtaaaa

SEQ ID NO: 343403 - DNA, 15 bp, Homo sapiens
ttatcgcttagtaaa

SEQ ID NO: 343404 - DNA, 15 bp, Homo sapiens
tttatcgcttagtaa

SEQ ID NO: 343405 - DNA, 15 bp, Homo sapiens
ttttatcgcttagta

SEQ ID NO: 343406 - DNA, 15 bp, Homo sapiens
gttttatcgcttagt

SEQ ID NO: 343407 - DNA, 15 bp, Homo sapiens
tgttttatcgcttag

SEQ ID NO: 343408 - DNA, 15 bp, Homo sapiens
atgttttatcgctta

SEQ ID NO: 343409 - DNA, 15 bp, Homo sapiens
aatgttttatcgctt

SEQ ID NO: 343410 - DNA, 15 bp, Homo sapiens
aaatgttttatcgct

SEQ ID NO: 343411 - DNA, 15 bp, Homo sapiens
caaatgttttatcgc

SEQ ID NO: 343412 - DNA, 15 bp, Homo sapiens
tcaaatgttttatcg

SEQ ID NO: 343413 - DNA, 15 bp, Homo sapiens
ctcaaatgttttatc

SEQ ID NO: 343414 - DNA, 15 bp, Homo sapiens
gctcaaatgttttat

SEQ ID NO: 343415 - DNA, 15 bp, Homo sapiens
agctcaaatgtttta

SEQ ID NO: 343416 - DNA, 15 bp, Homo sapiens
aagctcaaatgtttt

SEQ ID NO: 343417 - DNA, 15 bp, Homo sapiens
aaagctcaaatgttt

SEQ ID NO: 343418 - DNA, 15 bp, Homo sapiens
gaaagctcaaatgtt

SEQ ID NO: 343419 - DNA, 15 bp, Homo sapiens
agaaagctcaaatgt

SEQ ID NO: 343420 - DNA, 15 bp, Homo sapiens
aagaaagctcaaatg

SEQ ID NO: 343421 - DNA, 15 bp, Homo sapiens
aaagaaagctcaaat

SEQ ID NO: 343422 - DNA, 15 bp, Homo sapiens
aaaagaaagctcaaa

SEQ ID NO: 343423 - DNA, 15 bp, Homo sapiens
aaaaagaaagctcaa

SEQ ID NO: 343424 - DNA, 15 bp, Homo sapiens
aaaaaagaaagctca

SEQ ID NO: 343425 - DNA, 15 bp, Homo sapiens
gaaaaaagaaagctc

SEQ ID NO: 343426 - DNA, 15 bp, Homo sapiens
ggaaaaaagaaagct

SEQ ID NO: 343427 - DNA, 15 bp, Homo sapiens
gggaaaaaagaaagc

SEQ ID NO: 343428 - DNA, 15 bp, Homo sapiens
ggggaaaaaagaaag

SEQ ID NO: 343429 - DNA, 15 bp, Homo sapiens
tggggaaaaaagaaa

SEQ ID NO: 343430 - DNA, 15 bp, Homo sapiens
atggggaaaaaagaa

SEQ ID NO: 343431 - DNA, 15 bp, Homo sapiens
gatggggaaaaaaga

SEQ ID NO: 343432 - DNA, 15 bp, Homo sapiens
agatggggaaaaaag

SEQ ID NO: 343433 - DNA, 15 bp, Homo sapiens
tagatggggaaaaaa

SEQ ID NO: 343434 - DNA, 15 bp, Homo sapiens
ttagatggggaaaaa

SEQ ID NO: 343435 - DNA, 15 bp, Homo sapiens
cttagatggggaaaa

SEQ ID NO: 343436 - DNA, 15 bp, Homo sapiens
tcttagatggggaaa

SEQ ID NO: 343437 - DNA, 15 bp, Homo sapiens
gtcttagatggggaa

SEQ ID NO: 343438 - DNA, 15 bp, Homo sapiens
cgtcttagatgggga

SEQ ID NO: 343439 - DNA, 15 bp, Homo sapiens
gcgtcttagatgggg

SEQ ID NO: 343440 - DNA, 15 bp, Homo sapiens
tgcgtcttagatggg

SEQ ID NO: 343441 - DNA, 15 bp, Homo sapiens
ctgcgtcttagatgg

SEQ ID NO: 343442 - DNA, 15 bp, Homo sapiens
cctgcgtcttagatg

SEQ ID NO: 343443 - DNA, 15 bp, Homo sapiens
ccctgcgtcttagat

SEQ ID NO: 343444 - DNA, 15 bp, Homo sapiens
accctgcgtcttaga

SEQ ID NO: 343445 - DNA, 15 bp, Homo sapiens
caccctgcgtcttag

SEQ ID NO: 343446 - DNA, 15 bp, Homo sapiens
acaccctgcgtctta

SEQ ID NO: 343447 - DNA, 15 bp, Homo sapiens
tacaccctgcgtctt

SEQ ID NO: 343448 - DNA, 15 bp, Homo sapiens
ttacaccctgcgtct

SEQ ID NO: 343449 - DNA, 15 bp, Homo sapiens
tttacaccctgcgtc

SEQ ID NO: 343450 - DNA, 15 bp, Homo sapiens
ttttacaccctgcgt

SEQ ID NO: 343451 - DNA, 15 bp, Homo sapiens
gttttacaccctgcg

SEQ ID NO: 343452 - DNA, 15 bp, Homo sapiens
agttttacaccctgc

SEQ ID NO: 343453 - DNA, 15 bp, Homo sapiens
tagttttacaccctg

SEQ ID NO: 343454 - DNA, 15 bp, Homo sapiens
ttagttttacaccct

SEQ ID NO: 343455 - DNA, 15 bp, Homo sapiens
tttagttttacaccc

SEQ ID NO: 343456 - DNA, 15 bp, Homo sapiens
gtttagttttacacc

SEQ ID NO: 343457 - DNA, 15 bp, Homo sapiens
tgtttagttttacac

SEQ ID NO: 343458 - DNA, 15 bp, Homo sapiens
atgtttagttttaca

SEQ ID NO: 343459 - DNA, 15 bp, Homo sapiens
catgtttagttttac

SEQ ID NO: 343460 - DNA, 15 bp, Homo sapiens
gcatgtttagtttta

SEQ ID NO: 343461 - DNA, 15 bp, Homo sapiens
tgcatgtttagtttt

SEQ ID NO: 343462 - DNA, 15 bp, Homo sapiens
ctgcatgtttagttt

SEQ ID NO: 343463 - DNA, 15 bp, Homo sapiens
actgcatgtttagtt

SEQ ID NO: 343464 - DNA, 15 bp, Homo sapiens
aactgcatgtttagt

SEQ ID NO: 343465 - DNA, 15 bp, Homo sapiens
taactgcatgtttag

SEQ ID NO: 343466 - DNA, 15 bp, Homo sapiens
ataactgcatgttta

SEQ ID NO: 343467 - DNA, 15 bp, Homo sapiens
gataactgcatgttt

SEQ ID NO: 343468 - DNA, 15 bp, Homo sapiens
agataactgcatgtt

SEQ ID NO: 343469 - DNA, 15 bp, Homo sapiens
cagataactgcatgt

SEQ ID NO: 343470 - DNA, 15 bp, Homo sapiens
tcagataactgcatg

SEQ ID NO: 343471 - DNA, 15 bp, Homo sapiens
atcagataactgcat

SEQ ID NO: 343472 - DNA, 15 bp, Homo sapiens
tatcagataactgca

SEQ ID NO: 343473 - DNA, 15 bp, Homo sapiens
atatcagataactgc

SEQ ID NO: 343474 - DNA, 15 bp, Homo sapiens
gatatcagataactg

SEQ ID NO: 343475 - DNA, 15 bp, Homo sapiens
tgatatcagataact

SEQ ID NO: 343476 - DNA, 15 bp, Homo sapiens
atgatatcagataac

SEQ ID NO: 343477 - DNA, 15 bp, Homo sapiens
aatgatatcagataa

SEQ ID NO: 343478 - DNA, 15 bp, Homo sapiens
caatgatatcagata

SEQ ID NO: 343479 - DNA, 15 bp, Homo sapiens
tcaatgatatcagat

SEQ ID NO: 343480 - DNA, 15 bp, Homo sapiens
atcaatgatatcaga

SEQ ID NO: 343481 - DNA, 15 bp, Homo sapiens
tatcaatgatatcag

SEQ ID NO: 343482 - DNA, 15 bp, Homo sapiens
ttatcaatgatatca

SEQ ID NO: 343483 - DNA, 15 bp, Homo sapiens
attatcaatgatatc

SEQ ID NO: 343484 - DNA, 15 bp, Homo sapiens
cattatcaatgatat

SEQ ID NO: 343485 - DNA, 15 bp, Homo sapiens
ccattatcaatgata

SEQ ID NO: 343486 - DNA, 15 bp, Homo sapiens
cccattatcaatgat

SEQ ID NO: 343487 - DNA, 15 bp, Homo sapiens
gcccattatcaatga

SEQ ID NO: 343488 - DNA, 15 bp, Homo sapiens
cgcccattatcaatg

SEQ ID NO: 343489 - DNA, 15 bp, Homo sapiens
tcgcccattatcaat

SEQ ID NO: 343490 - DNA, 15 bp, Homo sapiens
ttcgcccattatcaa

SEQ ID NO: 343491 - DNA, 15 bp, Homo sapiens
attcgcccattatca

SEQ ID NO: 343492 - DNA, 15 bp, Homo sapiens
gattcgcccattatc

SEQ ID NO: 343493 - DNA, 15 bp, Homo sapiens
agattcgcccattat

SEQ ID NO: 343494 - DNA, 15 bp, Homo sapiens
aagattcgcccatta

SEQ ID NO: 343495 - DNA, 15 bp, Homo sapiens
aaagattcgcccatt

SEQ ID NO: 343496 - DNA, 15 bp, Homo sapiens
aaaagattcgcccat

SEQ ID NO: 343497 - DNA, 15 bp, Homo sapiens
aaaaagattcgccca

SEQ ID NO: 343498 - DNA, 15 bp, Homo sapiens
aaaaaagattcgccc

SEQ ID NO: 343499 - DNA, 15 bp, Homo sapiens
aaaaaaagattcgcc

SEQ ID NO: 343500 - DNA, 15 bp, Homo sapiens
gaaaaaaagattcgc

SEQ ID NO: 343501 - DNA, 15 bp, Homo sapiens
ggaaaaaaagattcg

SEQ ID NO: 343502 - DNA, 15 bp, Homo sapiens
tggaaaaaaagattc

SEQ ID NO: 343503 - DNA, 15 bp, Homo sapiens
ctggaaaaaaagatt

SEQ ID NO: 343504 - DNA, 15 bp, Homo sapiens
tctggaaaaaaagat

SEQ ID NO: 343505 - DNA, 15 bp, Homo sapiens
ttctggaaaaaaaga

SEQ ID NO: 343506 - DNA, 15 bp, Homo sapiens
tttctggaaaaaaag

SEQ ID NO: 343507 - DNA, 15 bp, Homo sapiens
gtttctggaaaaaaa

SEQ ID NO: 343508 - DNA, 15 bp, Homo sapiens
agtttctggaaaaaa

SEQ ID NO: 343509 - DNA, 15 bp, Homo sapiens
cagtttctggaaaaa

SEQ ID NO: 343510 - DNA, 15 bp, Homo sapiens
ccagtttctggaaaa

SEQ ID NO: 343511 - DNA, 15 bp, Homo sapiens
accagtttctggaaa

SEQ ID NO: 343512 - DNA, 15 bp, Homo sapiens
taccagtttctggaa

SEQ ID NO: 343513 - DNA, 15 bp, Homo sapiens
ttaccagtttctgga

SEQ ID NO: 343514 - DNA, 15 bp, Homo sapiens
attaccagtttctgg

SEQ ID NO: 343515 - DNA, 15 bp, Homo sapiens
aattaccagtttctg

SEQ ID NO: 343516 - DNA, 15 bp, Homo sapiens
aaattaccagtttct

SEQ ID NO: 343517 - DNA, 15 bp, Homo sapiens
taaattaccagtttc

SEQ ID NO: 343518 - DNA, 15 bp, Homo sapiens
ctaaattaccagttt

SEQ ID NO: 343519 - DNA, 15 bp, Homo sapiens
tctaaattaccagtt

SEQ ID NO: 343520 - DNA, 15 bp, Homo sapiens
ttctaaattaccagt

SEQ ID NO: 343521 - DNA, 15 bp, Homo sapiens
attctaaattaccag

SEQ ID NO: 343522 - DNA, 15 bp, Homo sapiens
gattctaaattacca

SEQ ID NO: 343523 - DNA, 15 bp, Homo sapiens
agattctaaattacc

SEQ ID NO: 343524 - DNA, 15 bp, Homo sapiens
aagattctaaattac

SEQ ID NO: 343525 - DNA, 15 bp, Homo sapiens
gaagattctaaatta

SEQ ID NO: 343526 - DNA, 15 bp, Homo sapiens
agaagattctaaatt

SEQ ID NO: 343527 - DNA, 15 bp, Homo sapiens
gagaagattctaaat

SEQ ID NO: 343528 - DNA, 15 bp, Homo sapiens
tgagaagattctaaa

SEQ ID NO: 343529 - DNA, 15 bp, Homo sapiens
atgagaagattctaa

SEQ ID NO: 343530 - DNA, 15 bp, Homo sapiens
tatgagaagattcta

SEQ ID NO: 343531 - DNA, 15 bp, Homo sapiens
ttatgagaagattct

SEQ ID NO: 343532 - DNA, 15 bp, Homo sapiens
tttatgagaagattc

SEQ ID NO: 343533 - DNA, 15 bp, Homo sapiens
ctttatgagaagatt

SEQ ID NO: 343534 - DNA, 15 bp, Homo sapiens
gctttatgagaagat

SEQ ID NO: 343535 - DNA, 15 bp, Homo sapiens
tgctttatgagaaga

SEQ ID NO: 343536 - DNA, 15 bp, Homo sapiens
gtgctttatgagaag

SEQ ID NO: 343537 - DNA, 15 bp, Homo sapiens
tgtgctttatgagaa

SEQ ID NO: 343538 - DNA, 15 bp, Homo sapiens
gtgtgctttatgaga

SEQ ID NO: 343539 - DNA, 15 bp, Homo sapiens
ggtgtgctttatgag

SEQ ID NO: 343540 - DNA, 15 bp, Homo sapiens
aggtgtgctttatga

SEQ ID NO: 343541 - DNA, 15 bp, Homo sapiens
caggtgtgctttatg

SEQ ID NO: 343542 - DNA, 15 bp, Homo sapiens
tcaggtgtgctttat

SEQ ID NO: 343543 - DNA, 15 bp, Homo sapiens
ctcaggtgtgcttta

SEQ ID NO: 343544 - DNA, 15 bp, Homo sapiens
cctcaggtgtgcttt

SEQ ID NO: 343545 - DNA, 15 bp, Homo sapiens
gcctcaggtgtgctt

SEQ ID NO: 343546 - DNA, 15 bp, Homo sapiens
agcctcaggtgtgct

SEQ ID NO: 343547 - DNA, 15 bp, Homo sapiens
aagcctcaggtgtgc

SEQ ID NO: 343548 - DNA, 15 bp, Homo sapiens
taagcctcaggtgtg

SEQ ID NO: 343549 - DNA, 15 bp, Homo sapiens
ctaagcctcaggtgt

SEQ ID NO: 343550 - DNA, 15 bp, Homo sapiens
tctaagcctcaggtg

SEQ ID NO: 343551 - DNA, 15 bp, Homo sapiens
ttctaagcctcaggt

SEQ ID NO: 343552 - DNA, 15 bp, Homo sapiens
cttctaagcctcagg

SEQ ID NO: 343553 - DNA, 15 bp, Homo sapiens
ccttctaagcctcag

SEQ ID NO: 343554 - DNA, 15 bp, Homo sapiens
cccttctaagcctca

SEQ ID NO: 343555 - DNA, 15 bp, Homo sapiens
tcccttctaagcctc

SEQ ID NO: 343556 - DNA, 15 bp, Homo sapiens
ttcccttctaagcct

SEQ ID NO: 343557 - DNA, 15 bp, Homo sapiens
tttcccttctaagcc

SEQ ID NO: 343558 - DNA, 15 bp, Homo sapiens
ctttcccttctaagc

SEQ ID NO: 343559 - DNA, 15 bp, Homo sapiens
cctttcccttctaag

SEQ ID NO: 343560 - DNA, 15 bp, Homo sapiens
acctttcccttctaa

SEQ ID NO: 343561 - DNA, 15 bp, Homo sapiens
tacctttcccttcta

SEQ ID NO: 343562 - DNA, 15 bp, Homo sapiens
gtacctttcccttct

SEQ ID NO: 343563 - DNA, 15 bp, Homo sapiens
tgtacctttcccttc

SEQ ID NO: 343564 - DNA, 15 bp, Homo sapiens
ttgtacctttccctt

SEQ ID NO: 343565 - DNA, 15 bp, Homo sapiens
cttgtacctttccct

SEQ ID NO: 343566 - DNA, 15 bp, Homo sapiens
ccttgtacctttccc

SEQ ID NO: 343567 - DNA, 15 bp, Homo sapiens
gccttgtacctttcc

SEQ ID NO: 343568 - DNA, 15 bp, Homo sapiens
tgccttgtacctttc

SEQ ID NO: 343569 - DNA, 15 bp, Homo sapiens
ttgccttgtaccttt

SEQ ID NO: 343570 - DNA, 15 bp, Homo sapiens
tttgccttgtacctt

SEQ ID NO: 343571 - DNA, 15 bp, Homo sapiens
ttttgccttgtacct

SEQ ID NO: 343572 - DNA, 15 bp, Homo sapiens
attttgccttgtacc

SEQ ID NO: 343573 - DNA, 15 bp, Homo sapiens
cattttgccttgtac

SEQ ID NO: 343574 - DNA, 15 bp, Homo sapiens
ccattttgccttgta

SEQ ID NO: 343575 - DNA, 15 bp, Homo sapiens
gccattttgccttgt

SEQ ID NO: 343576 - DNA, 15 bp, Homo sapiens
tgccattttgccttg

SEQ ID NO: 343577 - DNA, 15 bp, Homo sapiens
atgccattttgcctt

SEQ ID NO: 343578 - DNA, 15 bp, Homo sapiens
gatgccattttgcct

SEQ ID NO: 343579 - DNA, 15 bp, Homo sapiens
agatgccattttgcc

SEQ ID NO: 343580 - DNA, 15 bp, Homo sapiens
cagatgccattttgc

SEQ ID NO: 343581 - DNA, 15 bp, Homo sapiens
gcagatgccattttg

SEQ ID NO: 343582 - DNA, 15 bp, Homo sapiens
agcagatgccatttt

SEQ ID NO: 343583 - DNA, 15 bp, Homo sapiens
tagcagatgccattt

SEQ ID NO: 343584 - DNA, 15 bp, Homo sapiens
gtagcagatgccatt

SEQ ID NO: 343585 - DNA, 15 bp, Homo sapiens
agtagcagatgccat

SEQ ID NO: 343586 - DNA, 15 bp, Homo sapiens
aagtagcagatgcca

SEQ ID NO: 343587 - DNA, 15 bp, Homo sapiens
aaagtagcagatgcc

SEQ ID NO: 343588 - DNA, 15 bp, Homo sapiens
taaagtagcagatgc

SEQ ID NO: 343589 - DNA, 15 bp, Homo sapiens
gtaaagtagcagatg

SEQ ID NO: 343590 - DNA, 15 bp, Homo sapiens
ggtaaagtagcagat

SEQ ID NO: 343591 - DNA, 15 bp, Homo sapiens
aggtaaagtagcaga

SEQ ID NO: 343592 - DNA, 15 bp, Homo sapiens
taggtaaagtagcag

SEQ ID NO: 343593 - DNA, 15 bp, Homo sapiens
ataggtaaagtagca

SEQ ID NO: 343594 - DNA, 15 bp, Homo sapiens
cataggtaaagtagc

SEQ ID NO: 343595 - DNA, 15 bp, Homo sapiens
acataggtaaagtag

SEQ ID NO: 343596 - DNA, 15 bp, Homo sapiens
tacataggtaaagta

SEQ ID NO: 343597 - DNA, 15 bp, Homo sapiens
ttacataggtaaagt

SEQ ID NO: 343598 - DNA, 15 bp, Homo sapiens
attacataggtaaag

SEQ ID NO: 343599 - DNA, 15 bp, Homo sapiens
tattacataggtaaa

SEQ ID NO: 343600 - DNA, 15 bp, Homo sapiens
atattacataggtaa

SEQ ID NO: 343601 - DNA, 15 bp, Homo sapiens
tatattacataggta

SEQ ID NO: 343602 - DNA, 15 bp, Homo sapiens
ctatattacataggt

SEQ ID NO: 343603 - DNA, 15 bp, Homo sapiens
tctatattacatagg

SEQ ID NO: 343604 - DNA, 15 bp, Homo sapiens
atctatattacatag

SEQ ID NO: 343605 - DNA, 15 bp, Homo sapiens
aatctatattacata

SEQ ID NO: 343606 - DNA, 15 bp, Homo sapiens
aaatctatattacat

SEQ ID NO: 343607 - DNA, 15 bp, Homo sapiens
aaaatctatattaca

SEQ ID NO: 343608 - DNA, 15 bp, Homo sapiens
caaaatctatattac

SEQ ID NO: 343609 - DNA, 15 bp, Homo sapiens
acaaaatctatatta

SEQ ID NO: 343610 - DNA, 15 bp, Homo sapiens
tacaaaatctatatt

SEQ ID NO: 343611 - DNA, 15 bp, Homo sapiens
ttacaaaatctatat

SEQ ID NO: 343612 - DNA, 15 bp, Homo sapiens
cttacaaaatctata

SEQ ID NO: 343613 - DNA, 15 bp, Homo sapiens
gcttacaaaatctat

SEQ ID NO: 343614 - DNA, 15 bp, Homo sapiens
tgcttacaaaatcta

SEQ ID NO: 343615 - DNA, 15 bp, Homo sapiens
atgcttacaaaatct

SEQ ID NO: 343616 - DNA, 15 bp, Homo sapiens
catgcttacaaaatc

SEQ ID NO: 343617 - DNA, 15 bp, Homo sapiens
acatgcttacaaaat

SEQ ID NO: 343618 - DNA, 15 bp, Homo sapiens
aacatgcttacaaaa

SEQ ID NO: 343619 - DNA, 15 bp, Homo sapiens
gaacatgcttacaaa

SEQ ID NO: 343620 - DNA, 15 bp, Homo sapiens
tgaacatgcttacaa

SEQ ID NO: 343621 - DNA, 15 bp, Homo sapiens
ttgaacatgcttaca

SEQ ID NO: 343622 - DNA, 15 bp, Homo sapiens
attgaacatgcttac

SEQ ID NO: 343623 - DNA, 15 bp, Homo sapiens
tattgaacatgctta

SEQ ID NO: 343624 - DNA, 15 bp, Homo sapiens
atattgaacatgctt

SEQ ID NO: 343625 - DNA, 15 bp, Homo sapiens
aatattgaacatgct

SEQ ID NO: 343626 - DNA, 15 bp, Homo sapiens
aaatattgaacatgc

SEQ ID NO: 343627 - DNA, 15 bp, Homo sapiens
caaatattgaacatg

SEQ ID NO: 343628 - DNA, 15 bp, Homo sapiens
gcaaatattgaacat

SEQ ID NO: 343629 - DNA, 15 bp, Homo sapiens
tgcaaatattgaaca

SEQ ID NO: 343630 - DNA, 15 bp, Homo sapiens
atgcaaatattgaac

SEQ ID NO: 343631 - DNA, 15 bp, Homo sapiens
catgcaaatattgaa

SEQ ID NO: 343632 - DNA, 15 bp, Homo sapiens
gcatgcaaatattga

SEQ ID NO: 343633 - DNA, 15 bp, Homo sapiens
ggcatgcaaatattg

SEQ ID NO: 343634 - DNA, 15 bp, Homo sapiens
tggcatgcaaatatt

SEQ ID NO: 343635 - DNA, 15 bp, Homo sapiens
ctggcatgcaaatat

SEQ ID NO: 343636 - DNA, 15 bp, Homo sapiens
cctggcatgcaaata

SEQ ID NO: 343637 - DNA, 15 bp, Homo sapiens
ccctggcatgcaaat

SEQ ID NO: 343638 - DNA, 15 bp, Homo sapiens
cccctggcatgcaaa

SEQ ID NO: 343639 - DNA, 15 bp, Homo sapiens
ccccctggcatgcaa

SEQ ID NO: 343640 - DNA, 15 bp, Homo sapiens
accccctggcatgca

SEQ ID NO: 343641 - DNA, 15 bp, Homo sapiens
caccccctggcatgc

SEQ ID NO: 343642 - DNA, 15 bp, Homo sapiens
acaccccctggcatg

SEQ ID NO: 343643 - DNA, 15 bp, Homo sapiens
tacaccccctggcat

SEQ ID NO: 343644 - DNA, 15 bp, Homo sapiens
gtacaccccctggca

SEQ ID NO: 343645 - DNA, 15 bp, Homo sapiens
tgtacaccccctggc

SEQ ID NO: 343646 - DNA, 15 bp, Homo sapiens
atgtacaccccctgg

SEQ ID NO: 343647 - DNA, 15 bp, Homo sapiens
aatgtacaccccctg

SEQ ID NO: 343648 - DNA, 15 bp, Homo sapiens
taatgtacaccccct

SEQ ID NO: 343649 - DNA, 15 bp, Homo sapiens
ttaatgtacaccccc

SEQ ID NO: 343650 - DNA, 15 bp, Homo sapiens
attaatgtacacccc

SEQ ID NO: 343651 - DNA, 15 bp, Homo sapiens
tattaatgtacaccc

SEQ ID NO: 343652 - DNA, 15 bp, Homo sapiens
atattaatgtacacc

SEQ ID NO: 343653 - DNA, 15 bp, Homo sapiens
tatattaatgtacac

SEQ ID NO: 343654 - DNA, 15 bp, Homo sapiens
ttatattaatgtaca

SEQ ID NO: 343655 - DNA, 15 bp, Homo sapiens
attatattaatgtac

SEQ ID NO: 343656 - DNA, 15 bp, Homo sapiens
cattatattaatgta

SEQ ID NO: 343657 - DNA, 15 bp, Homo sapiens
tcattatattaatgt

SEQ ID NO: 343658 - DNA, 15 bp, Homo sapiens
ttcattatattaatg

SEQ ID NO: 343659 - DNA, 15 bp, Homo sapiens
attcattatattaat

SEQ ID NO: 343660 - DNA, 15 bp, Homo sapiens
aattcattatattaa

SEQ ID NO: 343661 - DNA, 15 bp, Homo sapiens
gaattcattatatta

SEQ ID NO: 343662 - DNA, 15 bp, Homo sapiens
tgaattcattatatt

SEQ ID NO: 343663 - DNA, 15 bp, Homo sapiens
gtgaattcattatat

SEQ ID NO: 343664 - DNA, 15 bp, Homo sapiens
agtgaattcattata

SEQ ID NO: 343665 - DNA, 15 bp, Homo sapiens
cagtgaattcattat

SEQ ID NO: 343666 - DNA, 15 bp, Homo sapiens
tcagtgaattcatta

SEQ ID NO: 343667 - DNA, 15 bp, Homo sapiens
ttcagtgaattcatt

SEQ ID NO: 343668 - DNA, 15 bp, Homo sapiens
cttcagtgaattcat

SEQ ID NO: 343669 - DNA, 15 bp, Homo sapiens
acttcagtgaattca

SEQ ID NO: 343670 - DNA, 15 bp, Homo sapiens
gacttcagtgaattc

SEQ ID NO: 343671 - DNA, 15 bp, Homo sapiens
agacttcagtgaatt

SEQ ID NO: 343672 - DNA, 15 bp, Homo sapiens
tagacttcagtgaat

SEQ ID NO: 343673 - DNA, 15 bp, Homo sapiens
ttagacttcagtgaa

SEQ ID NO: 343674 - DNA, 15 bp, Homo sapiens
tttagacttcagtga

SEQ ID NO: 343675 - DNA, 15 bp, Homo sapiens
atttagacttcagtg

SEQ ID NO: 343676 - DNA, 15 bp, Homo sapiens
catttagacttcagt

SEQ ID NO: 343677 - DNA, 15 bp, Homo sapiens
gcatttagacttcag

SEQ ID NO: 343678 - DNA, 15 bp, Homo sapiens
agcatttagacttca

SEQ ID NO: 343679 - DNA, 15 bp, Homo sapiens
tagcatttagacttc

SEQ ID NO: 343680 - DNA, 15 bp, Homo sapiens
ttagcatttagactt

SEQ ID NO: 343681 - DNA, 15 bp, Homo sapiens
gttagcatttagact

SEQ ID NO: 343682 - DNA, 15 bp, Homo sapiens
agttagcatttagac

SEQ ID NO: 343683 - DNA, 15 bp, Homo sapiens
cagttagcatttaga

SEQ ID NO: 343684 - DNA, 15 bp, Homo sapiens
acagttagcatttag

SEQ ID NO: 343685 - DNA, 15 bp, Homo sapiens
cacagttagcattta

SEQ ID NO: 343686 - DNA, 15 bp, Homo sapiens
ccacagttagcattt

SEQ ID NO: 343687 - DNA, 15 bp, Homo sapiens
accacagttagcatt

SEQ ID NO: 343688 - DNA, 15 bp, Homo sapiens
gaccacagttagcat

SEQ ID NO: 343689 - DNA, 15 bp, Homo sapiens
tgaccacagttagca

SEQ ID NO: 343690 - DNA, 15 bp, Homo sapiens
gtgaccacagttagc

SEQ ID NO: 343691 - DNA, 15 bp, Homo sapiens
ggtgaccacagttag

SEQ ID NO: 343692 - DNA, 15 bp, Homo sapiens
cggtgaccacagtta

SEQ ID NO: 343693 - DNA, 15 bp, Homo sapiens
gcggtgaccacagtt

SEQ ID NO: 343694 - DNA, 15 bp, Homo sapiens
tgcggtgaccacagt

SEQ ID NO: 343695 - DNA, 15 bp, Homo sapiens
atgcggtgaccacag

SEQ ID NO: 343696 - DNA, 15 bp, Homo sapiens
tatgcggtgaccaca

SEQ ID NO: 343697 - DNA, 15 bp, Homo sapiens
ttatgcggtgaccac

SEQ ID NO: 343698 - DNA, 15 bp, Homo sapiens
attatgcggtgacca

SEQ ID NO: 343699 - DNA, 15 bp, Homo sapiens
aattatgcggtgacc

SEQ ID NO: 343700 - DNA, 15 bp, Homo sapiens
aaattatgcggtgac

SEQ ID NO: 343701 - DNA, 15 bp, Homo sapiens
aaaattatgcggtga

SEQ ID NO: 343702 - DNA, 15 bp, Homo sapiens
caaaattatgcggtg

SEQ ID NO: 343703 - DNA, 15 bp, Homo sapiens
acaaaattatgcggt

SEQ ID NO: 343704 - DNA, 15 bp, Homo sapiens
tacaaaattatgcgg

SEQ ID NO: 343705 - DNA, 15 bp, Homo sapiens
ttacaaaattatgcg

SEQ ID NO: 343706 - DNA, 15 bp, Homo sapiens
tttacaaaattatgc

SEQ ID NO: 343707 - DNA, 15 bp, Homo sapiens
atttacaaaattatg

SEQ ID NO: 343708 - DNA, 15 bp, Homo sapiens
tatttacaaaattat

SEQ ID NO: 343709 - DNA, 15 bp, Homo sapiens
ttatttacaaaatta

SEQ ID NO: 343710 - DNA, 15 bp, Homo sapiens
attatttacaaaatt

SEQ ID NO: 343711 - DNA, 15 bp, Homo sapiens
tattatttacaaaat

SEQ ID NO: 343712 - DNA, 15 bp, Homo sapiens
atattatttacaaaa

SEQ ID NO: 343713 - DNA, 15 bp, Homo sapiens
tatattatttacaaa

SEQ ID NO: 343714 - DNA, 15 bp, Homo sapiens
ttatattatttacaa

SEQ ID NO: 343715 - DNA, 15 bp, Homo sapiens
attatattatttaca

SEQ ID NO: 343716 - DNA, 15 bp, Homo sapiens
aattatattatttac

SEQ ID NO: 343717 - DNA, 15 bp, Homo sapiens
caattatattattta

SEQ ID NO: 343718 - DNA, 15 bp, Homo sapiens
ccaattatattattt

SEQ ID NO: 343719 - DNA, 15 bp, Homo sapiens
gccaattatattatt

SEQ ID NO: 343720 - DNA, 15 bp, Homo sapiens
ggccaattatattat

SEQ ID NO: 343721 - DNA, 15 bp, Homo sapiens
tggccaattatatta

SEQ ID NO: 343722 - DNA, 15 bp, Homo sapiens
ttggccaattatatt

SEQ ID NO: 343723 - DNA, 15 bp, Homo sapiens
cttggccaattatat

SEQ ID NO: 343724 - DNA, 15 bp, Homo sapiens
tcttggccaattata

SEQ ID NO: 343725 - DNA, 15 bp, Homo sapiens
atcttggccaattat

SEQ ID NO: 343726 - DNA, 15 bp, Homo sapiens
catcttggccaatta

SEQ ID NO: 343727 - DNA, 15 bp, Homo sapiens
tcatcttggccaatt

SEQ ID NO: 343728 - DNA, 15 bp, Homo sapiens
ttcatcttggccaat

SEQ ID NO: 343729 - DNA, 15 bp, Homo sapiens
attcatcttggccaa

SEQ ID NO: 343730 - DNA, 15 bp, Homo sapiens
tattcatcttggcca

SEQ ID NO: 343731 - DNA, 15 bp, Homo sapiens
ttattcatcttggcc

SEQ ID NO: 343732 - DNA, 15 bp, Homo sapiens
attattcatcttggc

SEQ ID NO: 343733 - DNA, 15 bp, Homo sapiens
gattattcatcttgg

SEQ ID NO: 343734 - DNA, 15 bp, Homo sapiens
ggattattcatcttg

SEQ ID NO: 343735 - DNA, 15 bp, Homo sapiens
tggattattcatctt

SEQ ID NO: 343736 - DNA, 15 bp, Homo sapiens
ttggattattcatct

SEQ ID NO: 343737 - DNA, 15 bp, Homo sapiens
tttggattattcatc

SEQ ID NO: 343738 - DNA, 15 bp, Homo sapiens
ttttggattattcat

SEQ ID NO: 343739 - DNA, 15 bp, Homo sapiens
cttttggattattca

SEQ ID NO: 343740 - DNA, 15 bp, Homo sapiens
ccttttggattattc

SEQ ID NO: 343741 - DNA, 15 bp, Homo sapiens
tccttttggattatt

SEQ ID NO: 343742 - DNA, 15 bp, Homo sapiens
atccttttggattat

SEQ ID NO: 343743 - DNA, 15 bp, Homo sapiens
aatccttttggatta

SEQ ID NO: 343744 - DNA, 15 bp, Homo sapiens
aaatccttttggatt

SEQ ID NO: 343745 - DNA, 15 bp, Homo sapiens
caaatccttttggat

SEQ ID NO: 343746 - DNA, 15 bp, Homo sapiens
ccaaatccttttgga

SEQ ID NO: 343747 - DNA, 15 bp, Homo sapiens
tccaaatccttttgg

SEQ ID NO: 343748 - DNA, 15 bp, Homo sapiens
atccaaatccttttg

SEQ ID NO: 343749 - DNA, 15 bp, Homo sapiens
tatccaaatcctttt

SEQ ID NO: 343750 - DNA, 15 bp, Homo sapiens
ttatccaaatccttt

SEQ ID NO: 343751 - DNA, 15 bp, Homo sapiens
tttatccaaatcctt

SEQ ID NO: 343752 - DNA, 15 bp, Homo sapiens
atttatccaaatcct

SEQ ID NO: 343753 - DNA, 15 bp, Homo sapiens
aatttatccaaatcc

SEQ ID NO: 343754 - DNA, 15 bp, Homo sapiens
gaatttatccaaatc

SEQ ID NO: 343755 - DNA, 15 bp, Homo sapiens
agaatttatccaaat

SEQ ID NO: 343756 - DNA, 15 bp, Homo sapiens
aagaatttatccaaa

SEQ ID NO: 343757 - DNA, 15 bp, Homo sapiens
aaagaatttatccaa

SEQ ID NO: 343758 - DNA, 15 bp, Homo sapiens
gaaagaatttatcca

SEQ ID NO: 343759 - DNA, 15 bp, Homo sapiens
agaaagaatttatcc

SEQ ID NO: 343760 - DNA, 15 bp, Homo sapiens
aagaaagaatttatc

SEQ ID NO: 343761 - DNA, 15 bp, Homo sapiens
aaagaaagaatttat

SEQ ID NO: 343762 - DNA, 15 bp, Homo sapiens
taaagaaagaattta

SEQ ID NO: 343763 - DNA, 15 bp, Homo sapiens
ataaagaaagaattt

SEQ ID NO: 343764 - DNA, 15 bp, Homo sapiens
tataaagaaagaatt

SEQ ID NO: 343765 - DNA, 15 bp, Homo sapiens
atataaagaaagaat

SEQ ID NO: 343766 - DNA, 15 bp, Homo sapiens
aatataaagaaagaa

SEQ ID NO: 343767 - DNA, 15 bp, Homo sapiens
taatataaagaaaga

SEQ ID NO: 343768 - DNA, 15 bp, Homo sapiens
ataatataaagaaag

SEQ ID NO: 343769 - DNA, 15 bp, Homo sapiens
aataatataaagaaa

SEQ ID NO: 343770 - DNA, 15 bp, Homo sapiens
taataatataaagaa

SEQ ID NO: 343771 - DNA, 15 bp, Homo sapiens
ttaataatataaaga

SEQ ID NO: 343772 - DNA, 15 bp, Homo sapiens
tttaataatataaag

SEQ ID NO: 343773 - DNA, 15 bp, Homo sapiens
ctttaataatataaa

SEQ ID NO: 343774 - DNA, 15 bp, Homo sapiens
tctttaataatataa

SEQ ID NO: 343775 - DNA, 15 bp, Homo sapiens
ttctttaataatata

SEQ ID NO: 343776 - DNA, 15 bp, Homo sapiens
tttctttaataatat

SEQ ID NO: 343777 - DNA, 15 bp, Homo sapiens
atttctttaataata

SEQ ID NO: 343778 - DNA, 15 bp, Homo sapiens
gatttctttaataat

SEQ ID NO: 343779 - DNA, 15 bp, Homo sapiens
tgatttctttaataa

SEQ ID NO: 343780 - DNA, 15 bp, Homo sapiens
ctgatttctttaata

SEQ ID NO: 343781 - DNA, 15 bp, Homo sapiens
tctgatttctttaat

SEQ ID NO: 343782 - DNA, 15 bp, Homo sapiens
ctctgatttctttaa

SEQ ID NO: 343783 - DNA, 15 bp, Homo sapiens
tctctgatttcttta

SEQ ID NO: 343784 - DNA, 15 bp, Homo sapiens
atctctgatttcttt

SEQ ID NO: 343785 - DNA, 15 bp, Homo sapiens
catctctgatttctt

SEQ ID NO: 343786 - DNA, 15 bp, Homo sapiens
tcatctctgatttct

SEQ ID NO: 343787 - DNA, 15 bp, Homo sapiens
atcatctctgatttc

SEQ ID NO: 343788 - DNA, 15 bp, Homo sapiens
aatcatctctgattt

SEQ ID NO: 343789 - DNA, 15 bp, Homo sapiens
aaatcatctctgatt

SEQ ID NO: 343790 - DNA, 15 bp, Homo sapiens
caaatcatctctgat

SEQ ID NO: 343791 - DNA, 15 bp, Homo sapiens
acaaatcatctctga

SEQ ID NO: 343792 - DNA, 15 bp, Homo sapiens
cacaaatcatctctg

SEQ ID NO: 343793 - DNA, 15 bp, Homo sapiens
tcacaaatcatctct

SEQ ID NO: 343794 - DNA, 15 bp, Homo sapiens
gtcacaaatcatctc

SEQ ID NO: 343795 - DNA, 15 bp, Homo sapiens
tgtcacaaatcatct

SEQ ID NO: 343796 - DNA, 15 bp, Homo sapiens
atgtcacaaatcatc

SEQ ID NO: 343797 - DNA, 15 bp, Homo sapiens
tatgtcacaaatcat

SEQ ID NO: 343798 - DNA, 15 bp, Homo sapiens
gtatgtcacaaatca

SEQ ID NO: 343799 - DNA, 15 bp, Homo sapiens
ggtatgtcacaaatc

SEQ ID NO: 343800 - DNA, 15 bp, Homo sapiens
tggtatgtcacaaat

SEQ ID NO: 343801 - DNA, 15 bp, Homo sapiens
gtggtatgtcacaaa

SEQ ID NO: 343802 - DNA, 15 bp, Homo sapiens
cgtggtatgtcacaa

SEQ ID NO: 343803 - DNA, 15 bp, Homo sapiens
ccgtggtatgtcaca

SEQ ID NO: 343804 - DNA, 15 bp, Homo sapiens
tccgtggtatgtcac

SEQ ID NO: 343805 - DNA, 15 bp, Homo sapiens
ctccgtggtatgtca

SEQ ID NO: 343806 - DNA, 15 bp, Homo sapiens
cctccgtggtatgtc

SEQ ID NO: 343807 - DNA, 15 bp, Homo sapiens
tcctccgtggtatgt

SEQ ID NO: 343808 - DNA, 15 bp, Homo sapiens
atcctccgtggtatg

SEQ ID NO: 343809 - DNA, 15 bp, Homo sapiens
tatcctccgtggtat

SEQ ID NO: 343810 - DNA, 15 bp, Homo sapiens
atatcctccgtggta

SEQ ID NO: 343811 - DNA, 15 bp, Homo sapiens
aatatcctccgtggt

SEQ ID NO: 343812 - DNA, 15 bp, Homo sapiens
taatatcctccgtgg

SEQ ID NO: 343813 - DNA, 15 bp, Homo sapiens
ataatatcctccgtg

SEQ ID NO: 343814 - DNA, 15 bp, Homo sapiens
cataatatcctccgt

SEQ ID NO: 343815 - DNA, 15 bp, Homo sapiens
ccataatatcctccg

SEQ ID NO: 343816 - DNA, 15 bp, Homo sapiens
gccataatatcctcc

SEQ ID NO: 343817 - DNA, 15 bp, Homo sapiens
ggccataatatcctc

SEQ ID NO: 343818 - DNA, 15 bp, Homo sapiens
aggccataatatcct

SEQ ID NO: 343819 - DNA, 15 bp, Homo sapiens
gaggccataatatcc

SEQ ID NO: 343820 - DNA, 15 bp, Homo sapiens
ggaggccataatatc

SEQ ID NO: 343821 - DNA, 15 bp, Homo sapiens
gggaggccataatat

SEQ ID NO: 343822 - DNA, 15 bp, Homo sapiens
agggaggccataata

SEQ ID NO: 343823 - DNA, 15 bp, Homo sapiens
gagggaggccataat

SEQ ID NO: 343824 - DNA, 15 bp, Homo sapiens
tgagggaggccataa

SEQ ID NO: 343825 - DNA, 15 bp, Homo sapiens
ttgagggaggccata

SEQ ID NO: 343826 - DNA, 15 bp, Homo sapiens
tttgagggaggccat

SEQ ID NO: 343827 - DNA, 15 bp, Homo sapiens
ttttgagggaggcca

SEQ ID NO: 343828 - DNA, 15 bp, Homo sapiens
attttgagggaggcc

SEQ ID NO: 343829 - DNA, 15 bp, Homo sapiens
gattttgagggaggc

SEQ ID NO: 343830 - DNA, 15 bp, Homo sapiens
ggattttgagggagg

SEQ ID NO: 343831 - DNA, 15 bp, Homo sapiens
tggattttgagggag

SEQ ID NO: 343832 - DNA, 15 bp, Homo sapiens
ctggattttgaggga

SEQ ID NO: 343833 - DNA, 15 bp, Homo sapiens
cctggattttgaggg

SEQ ID NO: 343834 - DNA, 15 bp, Homo sapiens
tcctggattttgagg

SEQ ID NO: 343835 - DNA, 15 bp, Homo sapiens
ttcctggattttgag

SEQ ID NO: 343836 - DNA, 15 bp, Homo sapiens
attcctggattttga

SEQ ID NO: 343837 - DNA, 15 bp, Homo sapiens
cattcctggattttg

SEQ ID NO: 343838 - DNA, 15 bp, Homo sapiens
tcattcctggatttt

SEQ ID NO: 343839 - DNA, 15 bp, Homo sapiens
atcattcctggattt

SEQ ID NO: 343840 - DNA, 15 bp, Homo sapiens
gatcattcctggatt

SEQ ID NO: 343841 - DNA, 15 bp, Homo sapiens
agatcattcctggat

SEQ ID NO: 343842 - DNA, 15 bp, Homo sapiens
tagatcattcctgga

SEQ ID NO: 343843 - DNA, 15 bp, Homo sapiens
atagatcattcctgg

SEQ ID NO: 343844 - DNA, 15 bp, Homo sapiens
aatagatcattcctg

SEQ ID NO: 343845 - DNA, 15 bp, Homo sapiens
taatagatcattcct

SEQ ID NO: 343846 - DNA, 15 bp, Homo sapiens
ttaatagatcattcc

SEQ ID NO: 343847 - DNA, 15 bp, Homo sapiens
cttaatagatcattc

SEQ ID NO: 343848 - DNA, 15 bp, Homo sapiens
acttaatagatcatt

SEQ ID NO: 343849 - DNA, 15 bp, Homo sapiens
tacttaatagatcat

SEQ ID NO: 343850 - DNA, 15 bp, Homo sapiens
atacttaatagatca

SEQ ID NO: 343851 - DNA, 15 bp, Homo sapiens
tatacttaatagatc

SEQ ID NO: 343852 - DNA, 15 bp, Homo sapiens
ttatacttaatagat

SEQ ID NO: 343853 - DNA, 15 bp, Homo sapiens
gttatacttaataga

SEQ ID NO: 343854 - DNA, 15 bp, Homo sapiens
tgttatacttaatag

SEQ ID NO: 343855 - DNA, 15 bp, Homo sapiens
atgttatacttaata

SEQ ID NO: 343856 - DNA, 15 bp, Homo sapiens
tatgttatacttaat

SEQ ID NO: 343857 - DNA, 15 bp, Homo sapiens
gtatgttatacttaa

SEQ ID NO: 343858 - DNA, 15 bp, Homo sapiens
ggtatgttatactta

SEQ ID NO: 343859 - DNA, 15 bp, Homo sapiens
tggtatgttatactt

SEQ ID NO: 343860 - DNA, 15 bp, Homo sapiens
ttggtatgttatact

SEQ ID NO: 343861 - DNA, 15 bp, Homo sapiens
cttggtatgttatac

SEQ ID NO: 343862 - DNA, 15 bp, Homo sapiens
acttggtatgttata

SEQ ID NO: 343863 - DNA, 15 bp, Homo sapiens
tacttggtatgttat

SEQ ID NO: 343864 - DNA, 15 bp, Homo sapiens
ctacttggtatgtta

SEQ ID NO: 343865 - DNA, 15 bp, Homo sapiens
cctacttggtatgtt

SEQ ID NO: 343866 - DNA, 15 bp, Homo sapiens
tcctacttggtatgt

SEQ ID NO: 343867 - DNA, 15 bp, Homo sapiens
gtcctacttggtatg

SEQ ID NO: 343868 - DNA, 15 bp, Homo sapiens
tgtcctacttggtat

SEQ ID NO: 343869 - DNA, 15 bp, Homo sapiens
ctgtcctacttggta

SEQ ID NO: 343870 - DNA, 15 bp, Homo sapiens
tctgtcctacttggt

SEQ ID NO: 343871 - DNA, 15 bp, Homo sapiens
atctgtcctacttgg

SEQ ID NO: 343872 - DNA, 15 bp, Homo sapiens
aatctgtcctacttg

SEQ ID NO: 343873 - DNA, 15 bp, Homo sapiens
caatctgtcctactt

SEQ ID NO: 343874 - DNA, 15 bp, Homo sapiens
gcaatctgtcctact

SEQ ID NO: 343875 - DNA, 15 bp, Homo sapiens
tgcaatctgtcctac

SEQ ID NO: 343876 - DNA, 15 bp, Homo sapiens
ctgcaatctgtccta

SEQ ID NO: 343877 - DNA, 15 bp, Homo sapiens
tctgcaatctgtcct

SEQ ID NO: 343878 - DNA, 15 bp, Homo sapiens
gtctgcaatctgtcc

SEQ ID NO: 343879 - DNA, 15 bp, Homo sapiens
ggtctgcaatctgtc

SEQ ID NO: 343880 - DNA, 15 bp, Homo sapiens
aggtctgcaatctgt

SEQ ID NO: 343881 - DNA, 15 bp, Homo sapiens
caggtctgcaatctg

SEQ ID NO: 343882 - DNA, 15 bp, Homo sapiens
tcaggtctgcaatct

SEQ ID NO: 343883 - DNA, 15 bp, Homo sapiens
ctcaggtctgcaatc

SEQ ID NO: 343884 - DNA, 15 bp, Homo sapiens
gctcaggtctgcaat

SEQ ID NO: 343885 - DNA, 15 bp, Homo sapiens
ggctcaggtctgcaa

SEQ ID NO: 343886 - DNA, 15 bp, Homo sapiens
tggctcaggtctgca

SEQ ID NO: 343887 - DNA, 15 bp, Homo sapiens
ctggctcaggtctgc

SEQ ID NO: 343888 - DNA, 15 bp, Homo sapiens
gctggctcaggtctg

SEQ ID NO: 343889 - DNA, 15 bp, Homo sapiens
tgctggctcaggtct

SEQ ID NO: 343890 - DNA, 15 bp, Homo sapiens
atgctggctcaggtc

SEQ ID NO: 343891 - DNA, 15 bp, Homo sapiens
tatgctggctcaggt

SEQ ID NO: 343892 - DNA, 15 bp, Homo sapiens
ttatgctggctcagg

SEQ ID NO: 343893 - DNA, 15 bp, Homo sapiens
cttatgctggctcag

SEQ ID NO: 343894 - DNA, 15 bp, Homo sapiens
tcttatgctggctca

SEQ ID NO: 343895 - DNA, 15 bp, Homo sapiens
ttcttatgctggctc

SEQ ID NO: 343896 - DNA, 15 bp, Homo sapiens
attcttatgctggct

SEQ ID NO: 343897 - DNA, 15 bp, Homo sapiens
aattcttatgctggc

SEQ ID NO: 343898 - DNA, 15 bp, Homo sapiens
gaattcttatgctgg

SEQ ID NO: 343899 - DNA, 15 bp, Homo sapiens
agaattcttatgctg

SEQ ID NO: 343900 - DNA, 15 bp, Homo sapiens
aagaattcttatgct

SEQ ID NO: 343901 - DNA, 15 bp, Homo sapiens
taagaattcttatgc

SEQ ID NO: 343902 - DNA, 15 bp, Homo sapiens
ataagaattcttatg

SEQ ID NO: 343903 - DNA, 15 bp, Homo sapiens
cataagaattcttat

SEQ ID NO: 343904 - DNA, 15 bp, Homo sapiens
gcataagaattctta

SEQ ID NO: 343905 - DNA, 15 bp, Homo sapiens
agcataagaattctt

SEQ ID NO: 343906 - DNA, 15 bp, Homo sapiens
gagcataagaattct

SEQ ID NO: 343907 - DNA, 15 bp, Homo sapiens
tgagcataagaattc

SEQ ID NO: 343908 - DNA, 15 bp, Homo sapiens
atgagcataagaatt

SEQ ID NO: 343909 - DNA, 15 bp, Homo sapiens
tatgagcataagaat

SEQ ID NO: 343910 - DNA, 15 bp, Homo sapiens
ctatgagcataagaa

SEQ ID NO: 343911 - DNA, 15 bp, Homo sapiens
tctatgagcataaga

SEQ ID NO: 343912 - DNA, 15 bp, Homo sapiens
ctctatgagcataag

SEQ ID NO: 343913 - DNA, 15 bp, Homo sapiens
actctatgagcataa

SEQ ID NO: 343914 - DNA, 15 bp, Homo sapiens
gactctatgagcata

SEQ ID NO: 343915 - DNA, 15 bp, Homo sapiens
ggactctatgagcat

SEQ ID NO: 343916 - DNA, 15 bp, Homo sapiens
tggactctatgagca

SEQ ID NO: 343917 - DNA, 15 bp, Homo sapiens
ctggactctatgagc

SEQ ID NO: 343918 - DNA, 15 bp, Homo sapiens
actggactctatgag

SEQ ID NO: 343919 - DNA, 15 bp, Homo sapiens
aactggactctatga

SEQ ID NO: 343920 - DNA, 15 bp, Homo sapiens
taactggactctatg

SEQ ID NO: 343921 - DNA, 15 bp, Homo sapiens
ttaactggactctat

SEQ ID NO: 343922 - DNA, 15 bp, Homo sapiens
attaactggactcta

SEQ ID NO: 343923 - DNA, 15 bp, Homo sapiens
gattaactggactct

SEQ ID NO: 343924 - DNA, 15 bp, Homo sapiens
agattaactggactc

SEQ ID NO: 343925 - DNA, 15 bp, Homo sapiens
aagattaactggact

SEQ ID NO: 343926 - DNA, 15 bp, Homo sapiens
caagattaactggac

SEQ ID NO: 343927 - DNA, 15 bp, Homo sapiens
tcaagattaactgga

SEQ ID NO: 343928 - DNA, 15 bp, Homo sapiens
atcaagattaactgg

SEQ ID NO: 343929 - DNA, 15 bp, Homo sapiens
tatcaagattaactg

SEQ ID NO: 343930 - DNA, 15 bp, Homo sapiens
atatcaagattaact

SEQ ID NO: 343931 - DNA, 15 bp, Homo sapiens
aatatcaagattaac

SEQ ID NO: 343932 - DNA, 15 bp, Homo sapiens
taatatcaagattaa

SEQ ID NO: 343933 - DNA, 15 bp, Homo sapiens
ataatatcaagatta

SEQ ID NO: 343934 - DNA, 15 bp, Homo sapiens
gataatatcaagatt

SEQ ID NO: 343935 - DNA, 15 bp, Homo sapiens
ggataatatcaagat

SEQ ID NO: 343936 - DNA, 15 bp, Homo sapiens
tggataatatcaaga

SEQ ID NO: 343937 - DNA, 15 bp, Homo sapiens
ctggataatatcaag

SEQ ID NO: 343938 - DNA, 15 bp, Homo sapiens
tctggataatatcaa

SEQ ID NO: 343939 - DNA, 15 bp, Homo sapiens
gtctggataatatca

SEQ ID NO: 343940 - DNA, 15 bp, Homo sapiens
tgtctggataatatc

SEQ ID NO: 343941 - DNA, 15 bp, Homo sapiens
atgtctggataatat

SEQ ID NO: 343942 - DNA, 15 bp, Homo sapiens
tatgtctggataata

SEQ ID NO: 343943 - DNA, 15 bp, Homo sapiens
ttatgtctggataat

SEQ ID NO: 343944 - DNA, 15 bp, Homo sapiens
gttatgtctggataa

SEQ ID NO: 343945 - DNA, 15 bp, Homo sapiens
agttatgtctggata

SEQ ID NO: 343946 - DNA, 15 bp, Homo sapiens
gagttatgtctggat

SEQ ID NO: 343947 - DNA, 15 bp, Homo sapiens
tgagttatgtctgga

SEQ ID NO: 343948 - DNA, 15 bp, Homo sapiens
ttgagttatgtctgg

SEQ ID NO: 343949 - DNA, 15 bp, Homo sapiens
cttgagttatgtctg

SEQ ID NO: 343950 - DNA, 15 bp, Homo sapiens
acttgagttatgtct

SEQ ID NO: 343951 - DNA, 15 bp, Homo sapiens
aacttgagttatgtc

SEQ ID NO: 343952 - DNA, 15 bp, Homo sapiens
taacttgagttatgt

SEQ ID NO: 343953 - DNA, 15 bp, Homo sapiens
ataacttgagttatg

SEQ ID NO: 343954 - DNA, 15 bp, Homo sapiens
aataacttgagttat

SEQ ID NO: 343955 - DNA, 15 bp, Homo sapiens
caataacttgagtta

SEQ ID NO: 343956 - DNA, 15 bp, Homo sapiens
gcaataacttgagtt

SEQ ID NO: 343957 - DNA, 15 bp, Homo sapiens
agcaataacttgagt

SEQ ID NO: 343958 - DNA, 15 bp, Homo sapiens
aagcaataacttgag

SEQ ID NO: 343959 - DNA, 15 bp, Homo sapiens
taagcaataacttga

SEQ ID NO: 343960 - DNA, 15 bp, Homo sapiens
ataagcaataacttg

SEQ ID NO: 343961 - DNA, 15 bp, Homo sapiens
cataagcaataactt

SEQ ID NO: 343962 - DNA, 15 bp, Homo sapiens
acataagcaataact

SEQ ID NO: 343963 - DNA, 15 bp, Homo sapiens
tacataagcaataac

SEQ ID NO: 343964 - DNA, 15 bp, Homo sapiens
ttacataagcaataa

SEQ ID NO: 343965 - DNA, 15 bp, Homo sapiens
tttacataagcaata

SEQ ID NO: 343966 - DNA, 15 bp, Homo sapiens
ttttacataagcaat

SEQ ID NO: 343967 - DNA, 15 bp, Homo sapiens
attttacataagcaa

SEQ ID NO: 343968 - DNA, 15 bp, Homo sapiens
gattttacataagca

SEQ ID NO: 343969 - DNA, 15 bp, Homo sapiens
agattttacataagc

SEQ ID NO: 343970 - DNA, 15 bp, Homo sapiens
aagattttacataag

SEQ ID NO: 343971 - DNA, 15 bp, Homo sapiens
taagattttacataa

SEQ ID NO: 343972 - DNA, 15 bp, Homo sapiens
ataagattttacata

SEQ ID NO: 343973 - DNA, 15 bp, Homo sapiens
cataagattttacat

SEQ ID NO: 343974 - DNA, 15 bp, Homo sapiens
tcataagattttaca

SEQ ID NO: 343975 - DNA, 15 bp, Homo sapiens
ctcataagattttac

SEQ ID NO: 343976 - DNA, 15 bp, Homo sapiens
tctcataagatttta

SEQ ID NO: 343977 - DNA, 15 bp, Homo sapiens
ttctcataagatttt

SEQ ID NO: 343978 - DNA, 15 bp, Homo sapiens
gttctcataagattt

SEQ ID NO: 343979 - DNA, 15 bp, Homo sapiens
cgttctcataagatt

SEQ ID NO: 343980 - DNA, 15 bp, Homo sapiens
acgttctcataagat

SEQ ID NO: 343981 - DNA, 15 bp, Homo sapiens
tacgttctcataaga

SEQ ID NO: 343982 - DNA, 15 bp, Homo sapiens
ctacgttctcataag

SEQ ID NO: 343983 - DNA, 15 bp, Homo sapiens
cctacgttctcataa

SEQ ID NO: 343984 - DNA, 15 bp, Homo sapiens
ccctacgttctcata

SEQ ID NO: 343985 - DNA, 15 bp, Homo sapiens
tccctacgttctcat

SEQ ID NO: 343986 - DNA, 15 bp, Homo sapiens
gtccctacgttctca

SEQ ID NO: 343987 - DNA, 15 bp, Homo sapiens
tgtccctacgttctc

SEQ ID NO: 343988 - DNA, 15 bp, Homo sapiens
ttgtccctacgttct

SEQ ID NO: 343989 - DNA, 15 bp, Homo sapiens
attgtccctacgttc

SEQ ID NO: 343990 - DNA, 15 bp, Homo sapiens
aattgtccctacgtt

SEQ ID NO: 343991 - DNA, 15 bp, Homo sapiens
caattgtccctacgt

SEQ ID NO: 343992 - DNA, 15 bp, Homo sapiens
acaattgtccctacg

SEQ ID NO: 343993 - DNA, 15 bp, Homo sapiens
aacaattgtccctac

SEQ ID NO: 343994 - DNA, 15 bp, Homo sapiens
taacaattgtcccta

SEQ ID NO: 343995 - DNA, 15 bp, Homo sapiens
ataacaattgtccct

SEQ ID NO: 343996 - DNA, 15 bp, Homo sapiens
aataacaattgtccc

SEQ ID NO: 343997 - DNA, 15 bp, Homo sapiens
caataacaattgtcc

SEQ ID NO: 343998 - DNA, 15 bp, Homo sapiens
acaataacaattgtc

SEQ ID NO: 343999 - DNA, 15 bp, Homo sapiens
aacaataacaattgt

SEQ ID NO: 344000 - DNA, 15 bp, Homo sapiens
gaacaataacaattg

SEQ ID NO: 344001 - DNA, 15 bp, Homo sapiens
cgaacaataacaatt

SEQ ID NO: 344002 - DNA, 15 bp, Homo sapiens
acgaacaataacaat

SEQ ID NO: 344003 - DNA, 15 bp, Homo sapiens
cacgaacaataacaa

SEQ ID NO: 344004 - DNA, 15 bp, Homo sapiens
ccacgaacaataaca

SEQ ID NO: 344005 - DNA, 15 bp, Homo sapiens
tccacgaacaataac

SEQ ID NO: 344006 - DNA, 15 bp, Homo sapiens
gtccacgaacaataa

SEQ ID NO: 344007 - DNA, 15 bp, Homo sapiens
ggtccacgaacaata

SEQ ID NO: 344008 - DNA, 15 bp, Homo sapiens
aggtccacgaacaat

SEQ ID NO: 344009 - DNA, 15 bp, Homo sapiens
taggtccacgaacaa

SEQ ID NO: 344010 - DNA, 15 bp, Homo sapiens
ttaggtccacgaaca

SEQ ID NO: 344011 - DNA, 15 bp, Homo sapiens
attaggtccacgaac

SEQ ID NO: 344012 - DNA, 15 bp, Homo sapiens
aattaggtccacgaa

SEQ ID NO: 344013 - DNA, 15 bp, Homo sapiens
aaattaggtccacga

SEQ ID NO: 344014 - DNA, 15 bp, Homo sapiens
taaattaggtccacg

SEQ ID NO: 344015 - DNA, 15 bp, Homo sapiens
ttaaattaggtccac

SEQ ID NO: 344016 - DNA, 15 bp, Homo sapiens
tttaaattaggtcca

SEQ ID NO: 344017 - DNA, 15 bp, Homo sapiens
atttaaattaggtcc

SEQ ID NO: 344018 - DNA, 15 bp, Homo sapiens
catttaaattaggtc

SEQ ID NO: 344019 - DNA, 15 bp, Homo sapiens
gcatttaaattaggt

SEQ ID NO: 344020 - DNA, 15 bp, Homo sapiens
tgcatttaaattagg

SEQ ID NO: 344021 - DNA, 15 bp, Homo sapiens
ttgcatttaaattag

SEQ ID NO: 344022 - DNA, 15 bp, Homo sapiens
cttgcatttaaatta

SEQ ID NO: 344023 - DNA, 15 bp, Homo sapiens
gcttgcatttaaatt

SEQ ID NO: 344024 - DNA, 15 bp, Homo sapiens
tgcttgcatttaaat

SEQ ID NO: 344025 - DNA, 15 bp, Homo sapiens
ttgcttgcatttaaa

SEQ ID NO: 344026 - DNA, 15 bp, Homo sapiens
attgcttgcatttaa

SEQ ID NO: 344027 - DNA, 15 bp, Homo sapiens
gattgcttgcattta

SEQ ID NO: 344028 - DNA, 15 bp, Homo sapiens
tgattgcttgcattt

SEQ ID NO: 344029 - DNA, 15 bp, Homo sapiens
atgattgcttgcatt

SEQ ID NO: 344030 - DNA, 15 bp, Homo sapiens
aatgattgcttgcat

SEQ ID NO: 344031 - DNA, 15 bp, Homo sapiens
taatgattgcttgca

SEQ ID NO: 344032 - DNA, 15 bp, Homo sapiens
ctaatgattgcttgc

SEQ ID NO: 344033 - DNA, 15 bp, Homo sapiens
gctaatgattgcttg

SEQ ID NO: 344034 - DNA, 15 bp, Homo sapiens
tgctaatgattgctt

SEQ ID NO: 344035 - DNA, 15 bp, Homo sapiens
gtgctaatgattgct

SEQ ID NO: 344036 - DNA, 15 bp, Homo sapiens
tgtgctaatgattgc

SEQ ID NO: 344037 - DNA, 15 bp, Homo sapiens
atgtgctaatgattg

SEQ ID NO: 344038 - DNA, 15 bp, Homo sapiens
gatgtgctaatgatt

SEQ ID NO: 344039 - DNA, 15 bp, Homo sapiens
tgatgtgctaatgat

SEQ ID NO: 344040 - DNA, 15 bp, Homo sapiens
ttgatgtgctaatga

SEQ ID NO: 344041 - DNA, 15 bp, Homo sapiens
tttgatgtgctaatg

SEQ ID NO: 344042 - DNA, 15 bp, Homo sapiens
gtttgatgtgctaat

SEQ ID NO: 344043 - DNA, 15 bp, Homo sapiens
agtttgatgtgctaa

SEQ ID NO: 344044 - DNA, 15 bp, Homo sapiens
gagtttgatgtgcta

SEQ ID NO: 344045 - DNA, 15 bp, Homo sapiens
tgagtttgatgtgct

SEQ ID NO: 344046 - DNA, 15 bp, Homo sapiens
atgagtttgatgtgc

SEQ ID NO: 344047 - DNA, 15 bp, Homo sapiens
catgagtttgatgtg

SEQ ID NO: 344048 - DNA, 15 bp, Homo sapiens
ccatgagtttgatgt

SEQ ID NO: 344049 - DNA, 15 bp, Homo sapiens
accatgagtttgatg

SEQ ID NO: 344050 - DNA, 15 bp, Homo sapiens
gaccatgagtttgat

SEQ ID NO: 344051 - DNA, 15 bp, Homo sapiens
ggaccatgagtttga

SEQ ID NO: 344052 - DNA, 15 bp, Homo sapiens
gggaccatgagtttg

SEQ ID NO: 344053 - DNA, 15 bp, Homo sapiens
ggggaccatgagttt

SEQ ID NO: 344054 - DNA, 15 bp, Homo sapiens
aggggaccatgagtt

SEQ ID NO: 344055 - DNA, 15 bp, Homo sapiens
gaggggaccatgagt

SEQ ID NO: 344056 - DNA, 15 bp, Homo sapiens
agaggggaccatgag

SEQ ID NO: 344057 - DNA, 15 bp, Homo sapiens
tagaggggaccatga

SEQ ID NO: 344058 - DNA, 15 bp, Homo sapiens
ttagaggggaccatg

SEQ ID NO: 344059 - DNA, 15 bp, Homo sapiens
cttagaggggaccat

SEQ ID NO: 344060 - DNA, 15 bp, Homo sapiens
ccttagaggggacca

SEQ ID NO: 344061 - DNA, 15 bp, Homo sapiens
tccttagaggggacc

SEQ ID NO: 344062 - DNA, 15 bp, Homo sapiens
ttccttagaggggac

SEQ ID NO: 344063 - DNA, 15 bp, Homo sapiens
attccttagagggga

SEQ ID NO: 344064 - DNA, 15 bp, Homo sapiens
tattccttagagggg

SEQ ID NO: 344065 - DNA, 15 bp, Homo sapiens
ttattccttagaggg

SEQ ID NO: 344066 - DNA, 15 bp, Homo sapiens
tttattccttagagg

SEQ ID NO: 344067 - DNA, 15 bp, Homo sapiens
gtttattccttagag

SEQ ID NO: 344068 - DNA, 15 bp, Homo sapiens
ggtttattccttaga

SEQ ID NO: 344069 - DNA, 15 bp, Homo sapiens
gggtttattccttag

SEQ ID NO: 344070 - DNA, 15 bp, Homo sapiens
ggggtttattcctta

SEQ ID NO: 344071 - DNA, 15 bp, Homo sapiens
aggggtttattcctt

SEQ ID NO: 344072 - DNA, 15 bp, Homo sapiens
caggggtttattcct

SEQ ID NO: 344073 - DNA, 15 bp, Homo sapiens
acaggggtttattcc

SEQ ID NO: 344074 - DNA, 15 bp, Homo sapiens
cacaggggtttattc

SEQ ID NO: 344075 - DNA, 15 bp, Homo sapiens
ccacaggggtttatt

SEQ ID NO: 344076 - DNA, 15 bp, Homo sapiens
cccacaggggtttat

SEQ ID NO: 344077 - DNA, 15 bp, Homo sapiens
gcccacaggggttta

SEQ ID NO: 344078 - DNA, 15 bp, Homo sapiens
agcccacaggggttt

SEQ ID NO: 344079 - DNA, 15 bp, Homo sapiens
gagcccacaggggtt

SEQ ID NO: 344080 - DNA, 15 bp, Homo sapiens
cgagcccacaggggt

SEQ ID NO: 344081 - DNA, 15 bp, Homo sapiens
acgagcccacagggg

SEQ ID NO: 344082 - DNA, 15 bp, Homo sapiens
cacgagcccacaggg

SEQ ID NO: 344083 - DNA, 15 bp, Homo sapiens
acacgagcccacagg

SEQ ID NO: 344084 - DNA, 15 bp, Homo sapiens
aacacgagcccacag

SEQ ID NO: 344085 - DNA, 15 bp, Homo sapiens
aaacacgagcccaca

SEQ ID NO: 344086 - DNA, 15 bp, Homo sapiens
caaacacgagcccac

SEQ ID NO: 344087 - DNA, 15 bp, Homo sapiens
ccaaacacgagccca

SEQ ID NO: 344088 - DNA, 15 bp, Homo sapiens
tccaaacacgagccc

SEQ ID NO: 344089 - DNA, 15 bp, Homo sapiens
atccaaacacgagcc

SEQ ID NO: 344090 - DNA, 15 bp, Homo sapiens
tatccaaacacgagc

SEQ ID NO: 344091 - DNA, 15 bp, Homo sapiens
ttatccaaacacgag

SEQ ID NO: 344092 - DNA, 15 bp, Homo sapiens
cttatccaaacacga

SEQ ID NO: 344093 - DNA, 15 bp, Homo sapiens
acttatccaaacacg

SEQ ID NO: 344094 - DNA, 15 bp, Homo sapiens
gacttatccaaacac

SEQ ID NO: 344095 - DNA, 15 bp, Homo sapiens
tgacttatccaaaca

SEQ ID NO: 344096 - DNA, 15 bp, Homo sapiens
ctgacttatccaaac

SEQ ID NO: 344097 - DNA, 15 bp, Homo sapiens
actgacttatccaaa

SEQ ID NO: 344098 - DNA, 15 bp, Homo sapiens
tactgacttatccaa

SEQ ID NO: 344099 - DNA, 15 bp, Homo sapiens
ctactgacttatcca

SEQ ID NO: 344100 - DNA, 15 bp, Homo sapiens
cctactgacttatcc

SEQ ID NO: 344101 - DNA, 15 bp, Homo sapiens
acctactgacttatc

SEQ ID NO: 344102 - DNA, 15 bp, Homo sapiens
tacctactgacttat

SEQ ID NO: 344103 - DNA, 15 bp, Homo sapiens
atacctactgactta

SEQ ID NO: 344104 - DNA, 15 bp, Homo sapiens
tatacctactgactt

SEQ ID NO: 344105 - DNA, 15 bp, Homo sapiens
atatacctactgact

SEQ ID NO: 344106 - DNA, 15 bp, Homo sapiens
aatatacctactgac

SEQ ID NO: 344107 - DNA, 15 bp, Homo sapiens
aaatatacctactga

SEQ ID NO: 344108 - DNA, 15 bp, Homo sapiens
aaaatatacctactg

SEQ ID NO: 344109 - DNA, 15 bp, Homo sapiens
caaaatatacctact

SEQ ID NO: 344110 - DNA, 15 bp, Homo sapiens
tcaaaatatacctac

SEQ ID NO: 344111 - DNA, 15 bp, Homo sapiens
ctcaaaatataccta

SEQ ID NO: 344112 - DNA, 15 bp, Homo sapiens
actcaaaatatacct

SEQ ID NO: 344113 - DNA, 15 bp, Homo sapiens
aactcaaaatatacc

SEQ ID NO: 344114 - DNA, 15 bp, Homo sapiens
gaactcaaaatatac

SEQ ID NO: 344115 - DNA, 15 bp, Homo sapiens
tgaactcaaaatata

SEQ ID NO: 344116 - DNA, 15 bp, Homo sapiens
ttgaactcaaaatat

SEQ ID NO: 344117 - DNA, 15 bp, Homo sapiens
gttgaactcaaaata

SEQ ID NO: 344118 - DNA, 15 bp, Homo sapiens
agttgaactcaaaat

SEQ ID NO: 344119 - DNA, 15 bp, Homo sapiens
cagttgaactcaaaa

SEQ ID NO: 344120 - DNA, 15 bp, Homo sapiens
acagttgaactcaaa

SEQ ID NO: 344121 - DNA, 15 bp, Homo sapiens
tacagttgaactcaa

SEQ ID NO: 344122 - DNA, 15 bp, Homo sapiens
ttacagttgaactca

SEQ ID NO: 344123 - DNA, 15 bp, Homo sapiens
gttacagttgaactc

SEQ ID NO: 344124 - DNA, 15 bp, Homo sapiens
tgttacagttgaact

SEQ ID NO: 344125 - DNA, 15 bp, Homo sapiens
gtgttacagttgaac

SEQ ID NO: 344126 - DNA, 15 bp, Homo sapiens
tgtgttacagttgaa

SEQ ID NO: 344127 - DNA, 15 bp, Homo sapiens
atgtgttacagttga

SEQ ID NO: 344128 - DNA, 15 bp, Homo sapiens
aatgtgttacagttg

SEQ ID NO: 344129 - DNA, 15 bp, Homo sapiens
taatgtgttacagtt

SEQ ID NO: 344130 - DNA, 15 bp, Homo sapiens
ataatgtgttacagt

SEQ ID NO: 344131 - DNA, 15 bp, Homo sapiens
aataatgtgttacag

SEQ ID NO: 344132 - DNA, 15 bp, Homo sapiens
aaataatgtgttaca

SEQ ID NO: 344133 - DNA, 15 bp, Homo sapiens
gaaataatgtgttac

SEQ ID NO: 344134 - DNA, 15 bp, Homo sapiens
tgaaataatgtgtta

SEQ ID NO: 344135 - DNA, 15 bp, Homo sapiens
atgaaataatgtgtt

SEQ ID NO: 344136 - DNA, 15 bp, Homo sapiens
tatgaaataatgtgt

SEQ ID NO: 344137 - DNA, 15 bp, Homo sapiens
gtatgaaataatgtg

SEQ ID NO: 344138 - DNA, 15 bp, Homo sapiens
tgtatgaaataatgt

SEQ ID NO: 344139 - DNA, 15 bp, Homo sapiens
atgtatgaaataatg

SEQ ID NO: 344140 - DNA, 15 bp, Homo sapiens
tatgtatgaaataat

SEQ ID NO: 344141 - DNA, 15 bp, Homo sapiens
ctatgtatgaaataa

SEQ ID NO: 344142 - DNA, 15 bp, Homo sapiens
tctatgtatgaaata

SEQ ID NO: 344143 - DNA, 15 bp, Homo sapiens
atctatgtatgaaat

SEQ ID NO: 344144 - DNA, 15 bp, Homo sapiens
aatctatgtatgaaa

SEQ ID NO: 344145 - DNA, 15 bp, Homo sapiens
aaatctatgtatgaa

SEQ ID NO: 344146 - DNA, 15 bp, Homo sapiens
caaatctatgtatga

SEQ ID NO: 344147 - DNA, 15 bp, Homo sapiens
acaaatctatgtatg

SEQ ID NO: 344148 - DNA, 15 bp, Homo sapiens
aacaaatctatgtat

SEQ ID NO: 344149 - DNA, 15 bp, Homo sapiens
caacaaatctatgta

SEQ ID NO: 344150 - DNA, 15 bp, Homo sapiens
acaacaaatctatgt

SEQ ID NO: 344151 - DNA, 15 bp, Homo sapiens
gacaacaaatctatg

SEQ ID NO: 344152 - DNA, 15 bp, Homo sapiens
agacaacaaatctat

SEQ ID NO: 344153 - DNA, 15 bp, Homo sapiens
aagacaacaaatcta

SEQ ID NO: 344154 - DNA, 15 bp, Homo sapiens
gaagacaacaaatct

SEQ ID NO: 344155 - DNA, 15 bp, Homo sapiens
agaagacaacaaatc

SEQ ID NO: 344156 - DNA, 15 bp, Homo sapiens
cagaagacaacaaat

SEQ ID NO: 344157 - DNA, 15 bp, Homo sapiens
tcagaagacaacaaa

SEQ ID NO: 344158 - DNA, 15 bp, Homo sapiens
ttcagaagacaacaa

SEQ ID NO: 344159 - DNA, 15 bp, Homo sapiens
attcagaagacaaca

SEQ ID NO: 344160 - DNA, 15 bp, Homo sapiens
tattcagaagacaac

SEQ ID NO: 344161 - DNA, 15 bp, Homo sapiens
atattcagaagacaa

SEQ ID NO: 344162 - DNA, 15 bp, Homo sapiens
gatattcagaagaca

SEQ ID NO: 344163 - DNA, 15 bp, Homo sapiens
agatattcagaagac

SEQ ID NO: 344164 - DNA, 15 bp, Homo sapiens
cagatattcagaaga

SEQ ID NO: 344165 - DNA, 15 bp, Homo sapiens
tcagatattcagaag

SEQ ID NO: 344166 - DNA, 15 bp, Homo sapiens
ttcagatattcagaa

SEQ ID NO: 344167 - DNA, 15 bp, Homo sapiens
attcagatattcaga

SEQ ID NO: 344168 - DNA, 15 bp, Homo sapiens
tattcagatattcag

SEQ ID NO: 344169 - DNA, 15 bp, Homo sapiens
gtattcagatattca

SEQ ID NO: 344170 - DNA, 15 bp, Homo sapiens
agtattcagatattc

SEQ ID NO: 344171 - DNA, 15 bp, Homo sapiens
tagtattcagatatt

SEQ ID NO: 344172 - DNA, 15 bp, Homo sapiens
ttagtattcagatat

SEQ ID NO: 344173 - DNA, 15 bp, Homo sapiens
attagtattcagata

SEQ ID NO: 344174 - DNA, 15 bp, Homo sapiens
gattagtattcagat

SEQ ID NO: 344175 - DNA, 15 bp, Homo sapiens
cgattagtattcaga

SEQ ID NO: 344176 - DNA, 15 bp, Homo sapiens
ccgattagtattcag

SEQ ID NO: 344177 - DNA, 15 bp, Homo sapiens
tccgattagtattca

SEQ ID NO: 344178 - DNA, 15 bp, Homo sapiens
atccgattagtattc

SEQ ID NO: 344179 - DNA, 15 bp, Homo sapiens
tatccgattagtatt

SEQ ID NO: 344180 - DNA, 15 bp, Homo sapiens
gtatccgattagtat

SEQ ID NO: 344181 - DNA, 15 bp, Homo sapiens
agtatccgattagta

SEQ ID NO: 344182 - DNA, 15 bp, Homo sapiens
tagtatccgattagt

SEQ ID NO: 344183 - DNA, 15 bp, Homo sapiens
ttagtatccgattag

SEQ ID NO: 344184 - DNA, 15 bp, Homo sapiens
cttagtatccgatta

SEQ ID NO: 344185 - DNA, 15 bp, Homo sapiens
gcttagtatccgatt

SEQ ID NO: 344186 - DNA, 15 bp, Homo sapiens
tgcttagtatccgat

SEQ ID NO: 344187 - DNA, 15 bp, Homo sapiens
ttgcttagtatccga

SEQ ID NO: 344188 - DNA, 15 bp, Homo sapiens
attgcttagtatccg

SEQ ID NO: 344189 - DNA, 15 bp, Homo sapiens
tattgcttagtatcc

SEQ ID NO: 344190 - DNA, 15 bp, Homo sapiens
atattgcttagtatc

SEQ ID NO: 344191 - DNA, 15 bp, Homo sapiens
catattgcttagtat

SEQ ID NO: 344192 - DNA, 15 bp, Homo sapiens
ccatattgcttagta

SEQ ID NO: 344193 - DNA, 15 bp, Homo sapiens
accatattgcttagt

SEQ ID NO: 344194 - DNA, 15 bp, Homo sapiens
caccatattgcttag

SEQ ID NO: 344195 - DNA, 15 bp, Homo sapiens
tcaccatattgctta

SEQ ID NO: 344196 - DNA, 15 bp, Homo sapiens
atcaccatattgctt

SEQ ID NO: 344197 - DNA, 15 bp, Homo sapiens
catcaccatattgct

SEQ ID NO: 344198 - DNA, 15 bp, Homo sapiens
acatcaccatattgc

SEQ ID NO: 344199 - DNA, 15 bp, Homo sapiens
aacatcaccatattg

SEQ ID NO: 344200 - DNA, 15 bp, Homo sapiens
taacatcaccatatt

SEQ ID NO: 344201 - DNA, 15 bp, Homo sapiens
ataacatcaccatat

SEQ ID NO: 344202 - DNA, 15 bp, Homo sapiens
gataacatcaccata

SEQ ID NO: 344203 - DNA, 15 bp, Homo sapiens
agataacatcaccat

SEQ ID NO: 344204 - DNA, 15 bp, Homo sapiens
cagataacatcacca

SEQ ID NO: 344205 - DNA, 15 bp, Homo sapiens
tcagataacatcacc

SEQ ID NO: 344206 - DNA, 15 bp, Homo sapiens
atcagataacatcac

SEQ ID NO: 344207 - DNA, 15 bp, Homo sapiens
aatcagataacatca

SEQ ID NO: 344208 - DNA, 15 bp, Homo sapiens
aaatcagataacatc

SEQ ID NO: 344209 - DNA, 15 bp, Homo sapiens
taaatcagataacat

SEQ ID NO: 344210 - DNA, 15 bp, Homo sapiens
ctaaatcagataaca

SEQ ID NO: 344211 - DNA, 15 bp, Homo sapiens
tctaaatcagataac

SEQ ID NO: 344212 - DNA, 15 bp, Homo sapiens
ctctaaatcagataa

SEQ ID NO: 344213 - DNA, 15 bp, Homo sapiens
gctctaaatcagata

SEQ ID NO: 344214 - DNA, 15 bp, Homo sapiens
agctctaaatcagat

SEQ ID NO: 344215 - DNA, 15 bp, Homo sapiens
gagctctaaatcaga

SEQ ID NO: 344216 - DNA, 15 bp, Homo sapiens
agagctctaaatcag

SEQ ID NO: 344217 - DNA, 15 bp, Homo sapiens
cagagctctaaatca

SEQ ID NO: 344218 - DNA, 15 bp, Homo sapiens
tcagagctctaaatc

SEQ ID NO: 344219 - DNA, 15 bp, Homo sapiens
atcagagctctaaat

SEQ ID NO: 344220 - DNA, 15 bp, Homo sapiens
gatcagagctctaaa

SEQ ID NO: 344221 - DNA, 15 bp, Homo sapiens
agatcagagctctaa

SEQ ID NO: 344222 - DNA, 15 bp, Homo sapiens
gagatcagagctcta

SEQ ID NO: 344223 - DNA, 15 bp, Homo sapiens
agagatcagagctct

SEQ ID NO: 344224 - DNA, 15 bp, Homo sapiens
aagagatcagagctc

SEQ ID NO: 344225 - DNA, 15 bp, Homo sapiens
gaagagatcagagct

SEQ ID NO: 344226 - DNA, 15 bp, Homo sapiens
ggaagagatcagagc

SEQ ID NO: 344227 - DNA, 15 bp, Homo sapiens
gggaagagatcagag

SEQ ID NO: 344228 - DNA, 15 bp, Homo sapiens
tgggaagagatcaga

SEQ ID NO: 344229 - DNA, 15 bp, Homo sapiens
ctgggaagagatcag

SEQ ID NO: 344230 - DNA, 15 bp, Homo sapiens
gctgggaagagatca

SEQ ID NO: 344231 - DNA, 15 bp, Homo sapiens
ggctgggaagagatc

SEQ ID NO: 344232 - DNA, 15 bp, Homo sapiens
aggctgggaagagat

SEQ ID NO: 344233 - DNA, 15 bp, Homo sapiens
taggctgggaagaga

SEQ ID NO: 344234 - DNA, 15 bp, Homo sapiens
ataggctgggaagag

SEQ ID NO: 344235 - DNA, 15 bp, Homo sapiens
tataggctgggaaga

SEQ ID NO: 344236 - DNA, 15 bp, Homo sapiens
ctataggctgggaag

SEQ ID NO: 344237 - DNA, 15 bp, Homo sapiens
tctataggctgggaa

SEQ ID NO: 344238 - DNA, 15 bp, Homo sapiens
ttctataggctggga

SEQ ID NO: 344239 - DNA, 15 bp, Homo sapiens
tttctataggctggg

SEQ ID NO: 344240 - DNA, 15 bp, Homo sapiens
ttttctataggctgg

SEQ ID NO: 344241 - DNA, 15 bp, Homo sapiens
attttctataggctg

SEQ ID NO: 344242 - DNA, 15 bp, Homo sapiens
cattttctataggct

SEQ ID NO: 344243 - DNA, 15 bp, Homo sapiens
tcattttctataggc

SEQ ID NO: 344244 - DNA, 15 bp, Homo sapiens
ttcattttctatagg

SEQ ID NO: 344245 - DNA, 15 bp, Homo sapiens
cttcattttctatag

SEQ ID NO: 344246 - DNA, 15 bp, Homo sapiens
tcttcattttctata

SEQ ID NO: 344247 - DNA, 15 bp, Homo sapiens
atcttcattttctat

SEQ ID NO: 344248 - DNA, 15 bp, Homo sapiens
catcttcattttcta

SEQ ID NO: 344249 - DNA, 15 bp, Homo sapiens
acatcttcattttct

SEQ ID NO: 344250 - DNA, 15 bp, Homo sapiens
cacatcttcattttc

SEQ ID NO: 344251 - DNA, 15 bp, Homo sapiens
tcacatcttcatttt

SEQ ID NO: 344252 - DNA, 15 bp, Homo sapiens
ttcacatcttcattt

SEQ ID NO: 344253 - DNA, 15 bp, Homo sapiens
tttcacatcttcatt

SEQ ID NO: 344254 - DNA, 15 bp, Homo sapiens
ttttcacatcttcat

SEQ ID NO: 344255 - DNA, 15 bp, Homo sapiens
tttttcacatcttca

SEQ ID NO: 344256 - DNA, 15 bp, Homo sapiens
ctttttcacatcttc

SEQ ID NO: 344257 - DNA, 15 bp, Homo sapiens
cctttttcacatctt

SEQ ID NO: 344258 - DNA, 15 bp, Homo sapiens
acctttttcacatct

SEQ ID NO: 344259 - DNA, 15 bp, Homo sapiens
gacctttttcacatc

SEQ ID NO: 344260 - DNA, 15 bp, Homo sapiens
tgacctttttcacat

SEQ ID NO: 344261 - DNA, 15 bp, Homo sapiens
ctgacctttttcaca

SEQ ID NO: 344262 - DNA, 15 bp, Homo sapiens
tctgacctttttcac

SEQ ID NO: 344263 - DNA, 15 bp, Homo sapiens
atctgacctttttca

SEQ ID NO: 344264 - DNA, 15 bp, Homo sapiens
catctgacctttttc

SEQ ID NO: 344265 - DNA, 15 bp, Homo sapiens
tcatctgaccttttt

SEQ ID NO: 344266 - DNA, 15 bp, Homo sapiens
ttcatctgacctttt

SEQ ID NO: 344267 - DNA, 15 bp, Homo sapiens
cttcatctgaccttt

SEQ ID NO: 344268 - DNA, 15 bp, Homo sapiens
ccttcatctgacctt

SEQ ID NO: 344269 - DNA, 15 bp, Homo sapiens
tccttcatctgacct

SEQ ID NO: 344270 - DNA, 15 bp, Homo sapiens
gtccttcatctgacc

SEQ ID NO: 344271 - DNA, 15 bp, Homo sapiens
agtccttcatctgac

SEQ ID NO: 344272 - DNA, 15 bp, Homo sapiens
aagtccttcatctga

SEQ ID NO: 344273 - DNA, 15 bp, Homo sapiens
gaagtccttcatctg

SEQ ID NO: 344274 - DNA, 15 bp, Homo sapiens
tgaagtccttcatct

SEQ ID NO: 344275 - DNA, 15 bp, Homo sapiens
ctgaagtccttcatc

SEQ ID NO: 344276 - DNA, 15 bp, Homo sapiens
tctgaagtccttcat

SEQ ID NO: 344277 - DNA, 15 bp, Homo sapiens
ctctgaagtccttca

SEQ ID NO: 344278 - DNA, 15 bp, Homo sapiens
actctgaagtccttc

SEQ ID NO: 344279 - DNA, 15 bp, Homo sapiens
cactctgaagtcctt

SEQ ID NO: 344280 - DNA, 15 bp, Homo sapiens
acactctgaagtcct

SEQ ID NO: 344281 - DNA, 15 bp, Homo sapiens
tacactctgaagtcc

SEQ ID NO: 344282 - DNA, 15 bp, Homo sapiens
gtacactctgaagtc

SEQ ID NO: 344283 - DNA, 15 bp, Homo sapiens
tgtacactctgaagt

SEQ ID NO: 344284 - DNA, 15 bp, Homo sapiens
atgtacactctgaag

SEQ ID NO: 344285 - DNA, 15 bp, Homo sapiens
aatgtacactctgaa

SEQ ID NO: 344286 - DNA, 15 bp, Homo sapiens
aaatgtacactctga

SEQ ID NO: 344287 - DNA, 15 bp, Homo sapiens
gaaatgtacactctg

SEQ ID NO: 344288 - DNA, 15 bp, Homo sapiens
agaaatgtacactct

SEQ ID NO: 344289 - DNA, 15 bp, Homo sapiens
cagaaatgtacactc

SEQ ID NO: 344290 - DNA, 15 bp, Homo sapiens
tcagaaatgtacact

SEQ ID NO: 344291 - DNA, 15 bp, Homo sapiens
ttcagaaatgtacac

SEQ ID NO: 344292 - DNA, 15 bp, Homo sapiens
attcagaaatgtaca

SEQ ID NO: 344293 - DNA, 15 bp, Homo sapiens
gattcagaaatgtac

SEQ ID NO: 344294 - DNA, 15 bp, Homo sapiens
ggattcagaaatgta

SEQ ID NO: 344295 - DNA, 15 bp, Homo sapiens
gggattcagaaatgt

SEQ ID NO: 344296 - DNA, 15 bp, Homo sapiens
ggggattcagaaatg

SEQ ID NO: 344297 - DNA, 15 bp, Homo sapiens
tggggattcagaaat

SEQ ID NO: 344298 - DNA, 15 bp, Homo sapiens
ttggggattcagaaa

SEQ ID NO: 344299 - DNA, 15 bp, Homo sapiens
attggggattcagaa

SEQ ID NO: 344300 - DNA, 15 bp, Homo sapiens
tattggggattcaga

SEQ ID NO: 344301 - DNA, 15 bp, Homo sapiens
gtattggggattcag

SEQ ID NO: 344302 - DNA, 15 bp, Homo sapiens
agtattggggattca

SEQ ID NO: 344303 - DNA, 15 bp, Homo sapiens
gagtattggggattc

SEQ ID NO: 344304 - DNA, 15 bp, Homo sapiens
tgagtattggggatt

SEQ ID NO: 344305 - DNA, 15 bp, Homo sapiens
ctgagtattggggat

SEQ ID NO: 344306 - DNA, 15 bp, Homo sapiens
actgagtattgggga

SEQ ID NO: 344307 - DNA, 15 bp, Homo sapiens
aactgagtattgggg

SEQ ID NO: 344308 - DNA, 15 bp, Homo sapiens
taactgagtattggg

SEQ ID NO: 344309 - DNA, 15 bp, Homo sapiens
gtaactgagtattgg

SEQ ID NO: 344310 - DNA, 15 bp, Homo sapiens
ggtaactgagtattg

SEQ ID NO: 344311 - DNA, 15 bp, Homo sapiens
aggtaactgagtatt

SEQ ID NO: 344312 - DNA, 15 bp, Homo sapiens
aaggtaactgagtat

SEQ ID NO: 344313 - DNA, 15 bp, Homo sapiens
caaggtaactgagta

SEQ ID NO: 344314 - DNA, 15 bp, Homo sapiens
gcaaggtaactgagt

SEQ ID NO: 344315 - DNA, 15 bp, Homo sapiens
agcaaggtaactgag

SEQ ID NO: 344316 - DNA, 15 bp, Homo sapiens
tagcaaggtaactga

SEQ ID NO: 344317 - DNA, 15 bp, Homo sapiens
ttagcaaggtaactg

SEQ ID NO: 344318 - DNA, 15 bp, Homo sapiens
gttagcaaggtaact

SEQ ID NO: 344319 - DNA, 15 bp, Homo sapiens
agttagcaaggtaac

SEQ ID NO: 344320 - DNA, 15 bp, Homo sapiens
cagttagcaaggtaa

SEQ ID NO: 344321 - DNA, 15 bp, Homo sapiens
ccagttagcaaggta

SEQ ID NO: 344322 - DNA, 15 bp, Homo sapiens
tccagttagcaaggt

SEQ ID NO: 344323 - DNA, 15 bp, Homo sapiens
ctccagttagcaagg

SEQ ID NO: 344324 - DNA, 15 bp, Homo sapiens
tctccagttagcaag

SEQ ID NO: 344325 - DNA, 15 bp, Homo sapiens
ctctccagttagcaa

SEQ ID NO: 344326 - DNA, 15 bp, Homo sapiens
tctctccagttagca

SEQ ID NO: 344327 - DNA, 15 bp, Homo sapiens
ttctctccagttagc

SEQ ID NO: 344328 - DNA, 15 bp, Homo sapiens
cttctctccagttag

SEQ ID NO: 344329 - DNA, 15 bp, Homo sapiens
ccttctctccagtta

SEQ ID NO: 344330 - DNA, 15 bp, Homo sapiens
cccttctctccagtt

SEQ ID NO: 344331 - DNA, 15 bp, Homo sapiens
tcccttctctccagt

SEQ ID NO: 344332 - DNA, 15 bp, Homo sapiens
atcccttctctccag

SEQ ID NO: 344333 - DNA, 15 bp, Homo sapiens
aatcccttctctcca

SEQ ID NO: 344334 - DNA, 15 bp, Homo sapiens
aaatcccttctctcc

SEQ ID NO: 344335 - DNA, 15 bp, Homo sapiens
taaatcccttctctc

SEQ ID NO: 344336 - DNA, 15 bp, Homo sapiens
ttaaatcccttctct

SEQ ID NO: 344337 - DNA, 15 bp, Homo sapiens
gttaaatcccttctc

SEQ ID NO: 344338 - DNA, 15 bp, Homo sapiens
ggttaaatcccttct

SEQ ID NO: 344339 - DNA, 15 bp, Homo sapiens
gggttaaatcccttc

SEQ ID NO: 344340 - DNA, 15 bp, Homo sapiens
tgggttaaatccctt

SEQ ID NO: 344341 - DNA, 15 bp, Homo sapiens
gtgggttaaatccct

SEQ ID NO: 344342 - DNA, 15 bp, Homo sapiens
ggtgggttaaatccc

SEQ ID NO: 344343 - DNA, 15 bp, Homo sapiens
gggtgggttaaatcc

SEQ ID NO: 344344 - DNA, 15 bp, Homo sapiens
tgggtgggttaaatc

SEQ ID NO: 344345 - DNA, 15 bp, Homo sapiens
gtgggtgggttaaat

SEQ ID NO: 344346 - DNA, 15 bp, Homo sapiens
ggtgggtgggttaaa

SEQ ID NO: 344347 - DNA, 15 bp, Homo sapiens
aggtgggtgggttaa

SEQ ID NO: 344348 - DNA, 15 bp, Homo sapiens
gaggtgggtgggtta

SEQ ID NO: 344349 - DNA, 15 bp, Homo sapiens
ggaggtgggtgggtt

SEQ ID NO: 344350 - DNA, 15 bp, Homo sapiens
tggaggtgggtgggt

SEQ ID NO: 344351 - DNA, 15 bp, Homo sapiens
ttggaggtgggtggg

SEQ ID NO: 344352 - DNA, 15 bp, Homo sapiens
gttggaggtgggtgg

SEQ ID NO: 344353 - DNA, 15 bp, Homo sapiens
agttggaggtgggtg

SEQ ID NO: 344354 - DNA, 15 bp, Homo sapiens
gagttggaggtgggt

SEQ ID NO: 344355 - DNA, 15 bp, Homo sapiens
ggagttggaggtggg

SEQ ID NO: 344356 - DNA, 15 bp, Homo sapiens
aggagttggaggtgg

SEQ ID NO: 344357 - DNA, 15 bp, Homo sapiens
caggagttggaggtg

SEQ ID NO: 344358 - DNA, 15 bp, Homo sapiens
tcaggagttggaggt

SEQ ID NO: 344359 - DNA, 15 bp, Homo sapiens
atcaggagttggagg

SEQ ID NO: 344360 - DNA, 15 bp, Homo sapiens
tatcaggagttggag

SEQ ID NO: 344361 - DNA, 15 bp, Homo sapiens
ctatcaggagttgga

SEQ ID NO: 344362 - DNA, 15 bp, Homo sapiens
cctatcaggagttgg

SEQ ID NO: 344363 - DNA, 15 bp, Homo sapiens
tcctatcaggagttg

SEQ ID NO: 344364 - DNA, 15 bp, Homo sapiens
ttcctatcaggagtt

SEQ ID NO: 344365 - DNA, 15 bp, Homo sapiens
cttcctatcaggagt

SEQ ID NO: 344366 - DNA, 15 bp, Homo sapiens
tcttcctatcaggag

SEQ ID NO: 344367 - DNA, 15 bp, Homo sapiens
ttcttcctatcagga

SEQ ID NO: 344368 - DNA, 15 bp, Homo sapiens
attcttcctatcagg

SEQ ID NO: 344369 - DNA, 15 bp, Homo sapiens
aattcttcctatcag

SEQ ID NO: 344370 - DNA, 15 bp, Homo sapiens
taattcttcctatca

SEQ ID NO: 344371 - DNA, 15 bp, Homo sapiens
ctaattcttcctatc

SEQ ID NO: 344372 - DNA, 15 bp, Homo sapiens
cctaattcttcctat

SEQ ID NO: 344373 - DNA, 15 bp, Homo sapiens
tcctaattcttccta

SEQ ID NO: 344374 - DNA, 15 bp, Homo sapiens
atcctaattcttcct

SEQ ID NO: 344375 - DNA, 15 bp, Homo sapiens
catcctaattcttcc

SEQ ID NO: 344376 - DNA, 15 bp, Homo sapiens
tcatcctaattcttc

SEQ ID NO: 344377 - DNA, 15 bp, Homo sapiens
atcatcctaattctt

SEQ ID NO: 344378 - DNA, 15 bp, Homo sapiens
catcatcctaattct

SEQ ID NO: 344379 - DNA, 15 bp, Homo sapiens
ccatcatcctaattc

SEQ ID NO: 344380 - DNA, 15 bp, Homo sapiens
accatcatcctaatt

SEQ ID NO: 344381 - DNA, 15 bp, Homo sapiens
caccatcatcctaat

SEQ ID NO: 344382 - DNA, 15 bp, Homo sapiens
gcaccatcatcctaa

SEQ ID NO: 344383 - DNA, 15 bp, Homo sapiens
tgcaccatcatccta

SEQ ID NO: 344384 - DNA, 15 bp, Homo sapiens
ctgcaccatcatcct

SEQ ID NO: 344385 - DNA, 15 bp, Homo sapiens
tctgcaccatcatcc

SEQ ID NO: 344386 - DNA, 15 bp, Homo sapiens
atctgcaccatcatc

SEQ ID NO: 344387 - DNA, 15 bp, Homo sapiens
catctgcaccatcat

SEQ ID NO: 344388 - DNA, 15 bp, Homo sapiens
ccatctgcaccatca

SEQ ID NO: 344389 - DNA, 15 bp, Homo sapiens
accatctgcaccatc

SEQ ID NO: 344390 - DNA, 15 bp, Homo sapiens
aaccatctgcaccat

SEQ ID NO: 344391 - DNA, 15 bp, Homo sapiens
caaccatctgcacca

SEQ ID NO: 344392 - DNA, 15 bp, Homo sapiens
tcaaccatctgcacc

SEQ ID NO: 344393 - DNA, 15 bp, Homo sapiens
ctcaaccatctgcac

SEQ ID NO: 344394 - DNA, 15 bp, Homo sapiens
tctcaaccatctgca

SEQ ID NO: 344395 - DNA, 15 bp, Homo sapiens
ttctcaaccatctgc

SEQ ID NO: 344396 - DNA, 15 bp, Homo sapiens
tttctcaaccatctg

SEQ ID NO: 344397 - DNA, 15 bp, Homo sapiens
ctttctcaaccatct

SEQ ID NO: 344398 - DNA, 15 bp, Homo sapiens
cctttctcaaccatc

SEQ ID NO: 344399 - DNA, 15 bp, Homo sapiens
tcctttctcaaccat

SEQ ID NO: 344400 - DNA, 15 bp, Homo sapiens
ctcctttctcaacca

SEQ ID NO: 344401 - DNA, 15 bp, Homo sapiens
cctcctttctcaacc

SEQ ID NO: 344402 - DNA, 15 bp, Homo sapiens
acctcctttctcaac

SEQ ID NO: 344403 - DNA, 15 bp, Homo sapiens
cacctcctttctcaa

SEQ ID NO: 344404 - DNA, 15 bp, Homo sapiens
ccacctcctttctca

SEQ ID NO: 344405 - DNA, 15 bp, Homo sapiens
cccacctcctttctc

SEQ ID NO: 344406 - DNA, 15 bp, Homo sapiens
ccccacctcctttct

SEQ ID NO: 344407 - DNA, 15 bp, Homo sapiens
tccccacctcctttc

SEQ ID NO: 344408 - DNA, 15 bp, Homo sapiens
ctccccacctccttt

SEQ ID NO: 344409 - DNA, 15 bp, Homo sapiens
cctccccacctcctt

SEQ ID NO: 344410 - DNA, 15 bp, Homo sapiens
tcctccccacctcct

SEQ ID NO: 344411 - DNA, 15 bp, Homo sapiens
ctcctccccacctcc

SEQ ID NO: 344412 - DNA, 15 bp, Homo sapiens
tctcctccccacctc

SEQ ID NO: 344413 - DNA, 15 bp, Homo sapiens
gtctcctccccacct

SEQ ID NO: 344414 - DNA, 15 bp, Homo sapiens
agtctcctccccacc

SEQ ID NO: 344415 - DNA, 15 bp, Homo sapiens
cagtctcctccccac

SEQ ID NO: 344416 - DNA, 15 bp, Homo sapiens
tcagtctcctcccca

SEQ ID NO: 344417 - DNA, 15 bp, Homo sapiens
ttcagtctcctcccc

SEQ ID NO: 344418 - DNA, 15 bp, Homo sapiens
tttcagtctcctccc

SEQ ID NO: 344419 - DNA, 15 bp, Homo sapiens
ctttcagtctcctcc

SEQ ID NO: 344420 - DNA, 15 bp, Homo sapiens
cctttcagtctcctc

SEQ ID NO: 344421 - DNA, 15 bp, Homo sapiens
gcctttcagtctcct

SEQ ID NO: 344422 - DNA, 15 bp, Homo sapiens
agcctttcagtctcc

SEQ ID NO: 344423 - DNA, 15 bp, Homo sapiens
aagcctttcagtctc

SEQ ID NO: 344424 - DNA, 15 bp, Homo sapiens
taagcctttcagtct

SEQ ID NO: 344425 - DNA, 15 bp, Homo sapiens
ttaagcctttcagtc

SEQ ID NO: 344426 - DNA, 15 bp, Homo sapiens
attaagcctttcagt

SEQ ID NO: 344427 - DNA, 15 bp, Homo sapiens
aattaagcctttcag

SEQ ID NO: 344428 - DNA, 15 bp, Homo sapiens
taattaagcctttca

SEQ ID NO: 344429 - DNA, 15 bp, Homo sapiens
ttaattaagcctttc

SEQ ID NO: 344430 - DNA, 15 bp, Homo sapiens
attaattaagccttt

SEQ ID NO: 344431 - DNA, 15 bp, Homo sapiens
aattaattaagcctt

SEQ ID NO: 344432 - DNA, 15 bp, Homo sapiens
caattaattaagcct

SEQ ID NO: 344433 - DNA, 15 bp, Homo sapiens
acaattaattaagcc

SEQ ID NO: 344434 - DNA, 15 bp, Homo sapiens
aacaattaattaagc

SEQ ID NO: 344435 - DNA, 15 bp, Homo sapiens
taacaattaattaag

SEQ ID NO: 344436 - DNA, 15 bp, Homo sapiens
ataacaattaattaa

SEQ ID NO: 344437 - DNA, 15 bp, Homo sapiens
aataacaattaatta

SEQ ID NO: 344438 - DNA, 15 bp, Homo sapiens
aaataacaattaatt

SEQ ID NO: 344439 - DNA, 15 bp, Homo sapiens
taaataacaattaat

SEQ ID NO: 344440 - DNA, 15 bp, Homo sapiens
ttaaataacaattaa

SEQ ID NO: 344441 - DNA, 15 bp, Homo sapiens
tttaaataacaatta

SEQ ID NO: 344442 - DNA, 15 bp, Homo sapiens
ctttaaataacaatt

SEQ ID NO: 344443 - DNA, 15 bp, Homo sapiens
tctttaaataacaat

SEQ ID NO: 344444 - DNA, 15 bp, Homo sapiens
ttctttaaataacaa

SEQ ID NO: 344445 - DNA, 15 bp, Homo sapiens
tttctttaaataaca

SEQ ID NO: 344446 - DNA, 15 bp, Homo sapiens
atttctttaaataac

SEQ ID NO: 344447 - DNA, 15 bp, Homo sapiens
gatttctttaaataa

SEQ ID NO: 344448 - DNA, 15 bp, Homo sapiens
agatttctttaaata

SEQ ID NO: 344449 - DNA, 15 bp, Homo sapiens
cagatttctttaaat

SEQ ID NO: 344450 - DNA, 15 bp, Homo sapiens
ccagatttctttaaa

SEQ ID NO: 344451 - DNA, 15 bp, Homo sapiens
tccagatttctttaa

SEQ ID NO: 344452 - DNA, 15 bp, Homo sapiens
ttccagatttcttta

SEQ ID NO: 344453 - DNA, 15 bp, Homo sapiens
tttccagatttcttt

SEQ ID NO: 344454 - DNA, 15 bp, Homo sapiens
atttccagatttctt

SEQ ID NO: 344455 - DNA, 15 bp, Homo sapiens
gatttccagatttct

SEQ ID NO: 344456 - DNA, 15 bp, Homo sapiens
ggatttccagatttc

SEQ ID NO: 344457 - DNA, 15 bp, Homo sapiens
aggatttccagattt

SEQ ID NO: 344458 - DNA, 15 bp, Homo sapiens
taggatttccagatt

SEQ ID NO: 344459 - DNA, 15 bp, Homo sapiens
gtaggatttccagat

SEQ ID NO: 344460 - DNA, 15 bp, Homo sapiens
tgtaggatttccaga

SEQ ID NO: 344461 - DNA, 15 bp, Homo sapiens
ttgtaggatttccag

SEQ ID NO: 344462 - DNA, 15 bp, Homo sapiens
cttgtaggatttcca

SEQ ID NO: 344463 - DNA, 15 bp, Homo sapiens
acttgtaggatttcc

SEQ ID NO: 344464 - DNA, 15 bp, Homo sapiens
tacttgtaggatttc

SEQ ID NO: 344465 - DNA, 15 bp, Homo sapiens
ttacttgtaggattt

SEQ ID NO: 344466 - DNA, 15 bp, Homo sapiens
cttacttgtaggatt

SEQ ID NO: 344467 - DNA, 15 bp, Homo sapiens
gcttacttgtaggat

SEQ ID NO: 344468 - DNA, 15 bp, Homo sapiens
tgcttacttgtagga

SEQ ID NO: 344469 - DNA, 15 bp, Homo sapiens
ttgcttacttgtagg

SEQ ID NO: 344470 - DNA, 15 bp, Homo sapiens
gttgcttacttgtag

SEQ ID NO: 344471 - DNA, 15 bp, Homo sapiens
cgttgcttacttgta

SEQ ID NO: 344472 - DNA, 15 bp, Homo sapiens
tcgttgcttacttgt

SEQ ID NO: 344473 - DNA, 15 bp, Homo sapiens
atcgttgcttacttg

SEQ ID NO: 344474 - DNA, 15 bp, Homo sapiens
catcgttgcttactt

SEQ ID NO: 344475 - DNA, 15 bp, Homo sapiens
gcatcgttgcttact

SEQ ID NO: 344476 - DNA, 15 bp, Homo sapiens
ggcatcgttgcttac

SEQ ID NO: 344477 - DNA, 15 bp, Homo sapiens
tggcatcgttgctta

SEQ ID NO: 344478 - DNA, 15 bp, Homo sapiens
ttggcatcgttgctt

SEQ ID NO: 344479 - DNA, 15 bp, Homo sapiens
tttggcatcgttgct

SEQ ID NO: 344480 - DNA, 15 bp, Homo sapiens
atttggcatcgttgc

SEQ ID NO: 344481 - DNA, 15 bp, Homo sapiens
catttggcatcgttg

SEQ ID NO: 344482 - DNA, 15 bp, Homo sapiens
tcatttggcatcgtt

SEQ ID NO: 344483 - DNA, 15 bp, Homo sapiens
ttcatttggcatcgt

SEQ ID NO: 344484 - DNA, 15 bp, Homo sapiens
tttcatttggcatcg

SEQ ID NO: 344485 - DNA, 15 bp, Homo sapiens
ttttcatttggcatc

SEQ ID NO: 344486 - DNA, 15 bp, Homo sapiens
cttttcatttggcat

SEQ ID NO: 344487 - DNA, 15 bp, Homo sapiens
acttttcatttggca

SEQ ID NO: 344488 - DNA, 15 bp, Homo sapiens
tacttttcatttggc

SEQ ID NO: 344489 - DNA, 15 bp, Homo sapiens
atacttttcatttgg

SEQ ID NO: 344490 - DNA, 15 bp, Homo sapiens
tatacttttcatttg

SEQ ID NO: 344491 - DNA, 15 bp, Homo sapiens
ttatacttttcattt

SEQ ID NO: 344492 - DNA, 15 bp, Homo sapiens
attatacttttcatt

SEQ ID NO: 344493 - DNA, 15 bp, Homo sapiens
aattatacttttcat

SEQ ID NO: 344494 - DNA, 15 bp, Homo sapiens
taattatacttttca

SEQ ID NO: 344495 - DNA, 15 bp, Homo sapiens
gtaattatacttttc

SEQ ID NO: 344496 - DNA, 15 bp, Homo sapiens
ggtaattatactttt

SEQ ID NO: 344497 - DNA, 15 bp, Homo sapiens
tggtaattatacttt

SEQ ID NO: 344498 - DNA, 15 bp, Homo sapiens
ttggtaattatactt

SEQ ID NO: 344499 - DNA, 15 bp, Homo sapiens
cttggtaattatact

SEQ ID NO: 344500 - DNA, 15 bp, Homo sapiens
ccttggtaattatac

SEQ ID NO: 344501 - DNA, 15 bp, Homo sapiens
accttggtaattata

SEQ ID NO: 344502 - DNA, 15 bp, Homo sapiens
taccttggtaattat

SEQ ID NO: 344503 - DNA, 15 bp, Homo sapiens
gtaccttggtaatta

SEQ ID NO: 344504 - DNA, 15 bp, Homo sapiens
tgtaccttggtaatt

SEQ ID NO: 344505 - DNA, 15 bp, Homo sapiens
atgtaccttggtaat

SEQ ID NO: 344506 - DNA, 15 bp, Homo sapiens
catgtaccttggtaa

SEQ ID NO: 344507 - DNA, 15 bp, Homo sapiens
acatgtaccttggta

SEQ ID NO: 344508 - DNA, 15 bp, Homo sapiens
aacatgtaccttggt

SEQ ID NO: 344509 - DNA, 15 bp, Homo sapiens
caacatgtaccttgg

SEQ ID NO: 344510 - DNA, 15 bp, Homo sapiens
acaacatgtaccttg

SEQ ID NO: 344511 - DNA, 15 bp, Homo sapiens
tacaacatgtacctt

SEQ ID NO: 344512 - DNA, 15 bp, Homo sapiens
gtacaacatgtacct

SEQ ID NO: 344513 - DNA, 15 bp, Homo sapiens
ggtacaacatgtacc

SEQ ID NO: 344514 - DNA, 15 bp, Homo sapiens
gggtacaacatgtac

SEQ ID NO: 344515 - DNA, 15 bp, Homo sapiens
agggtacaacatgta

SEQ ID NO: 344516 - DNA, 15 bp, Homo sapiens
gagggtacaacatgt

SEQ ID NO: 344517 - DNA, 15 bp, Homo sapiens
ggagggtacaacatg

SEQ ID NO: 344518 - DNA, 15 bp, Homo sapiens
tggagggtacaacat

SEQ ID NO: 344519 - DNA, 15 bp, Homo sapiens
ttggagggtacaaca

SEQ ID NO: 344520 - DNA, 15 bp, Homo sapiens
gttggagggtacaac

SEQ ID NO: 344521 - DNA, 15 bp, Homo sapiens
tgttggagggtacaa

SEQ ID NO: 344522 - DNA, 15 bp, Homo sapiens
ctgttggagggtaca

SEQ ID NO: 344523 - DNA, 15 bp, Homo sapiens
gctgttggagggtac

SEQ ID NO: 344524 - DNA, 15 bp, Homo sapiens
tgctgttggagggta

SEQ ID NO: 344525 - DNA, 15 bp, Homo sapiens
ttgctgttggagggt

SEQ ID NO: 344526 - DNA, 15 bp, Homo sapiens
gttgctgttggaggg

SEQ ID NO: 344527 - DNA, 15 bp, Homo sapiens
tgttgctgttggagg

SEQ ID NO: 344528 - DNA, 15 bp, Homo sapiens
ttgttgctgttggag

SEQ ID NO: 344529 - DNA, 15 bp, Homo sapiens
cttgttgctgttgga

SEQ ID NO: 344530 - DNA, 15 bp, Homo sapiens
tcttgttgctgttgg

SEQ ID NO: 344531 - DNA, 15 bp, Homo sapiens
atcttgttgctgttg

SEQ ID NO: 344532 - DNA, 15 bp, Homo sapiens
catcttgttgctgtt

SEQ ID NO: 344533 - DNA, 15 bp, Homo sapiens
tcatcttgttgctgt

SEQ ID NO: 344534 - DNA, 15 bp, Homo sapiens
ttcatcttgttgctg

SEQ ID NO: 344535 - DNA, 15 bp, Homo sapiens
tttcatcttgttgct

SEQ ID NO: 344536 - DNA, 15 bp, Homo sapiens
atttcatcttgttgc

SEQ ID NO: 344537 - DNA, 15 bp, Homo sapiens
catttcatcttgttg

SEQ ID NO: 344538 - DNA, 15 bp, Homo sapiens
acatttcatcttgtt

SEQ ID NO: 344539 - DNA, 15 bp, Homo sapiens
aacatttcatcttgt

SEQ ID NO: 344540 - DNA, 15 bp, Homo sapiens
aaacatttcatcttg

SEQ ID NO: 344541 - DNA, 15 bp, Homo sapiens
taaacatttcatctt

SEQ ID NO: 344542 - DNA, 15 bp, Homo sapiens
ataaacatttcatct

SEQ ID NO: 344543 - DNA, 15 bp, Homo sapiens
tataaacatttcatc

SEQ ID NO: 344544 - DNA, 15 bp, Homo sapiens
gtataaacatttcat

SEQ ID NO: 344545 - DNA, 15 bp, Homo sapiens
ggtataaacatttca

SEQ ID NO: 344546 - DNA, 15 bp, Homo sapiens
tggtataaacatttc

SEQ ID NO: 344547 - DNA, 15 bp, Homo sapiens
atggtataaacattt

SEQ ID NO: 344548 - DNA, 15 bp, Homo sapiens
tatggtataaacatt

SEQ ID NO: 344549 - DNA, 15 bp, Homo sapiens
ttatggtataaacat

SEQ ID NO: 344550 - DNA, 15 bp, Homo sapiens
gttatggtataaaca

SEQ ID NO: 344551 - DNA, 15 bp, Homo sapiens
tgttatggtataaac

SEQ ID NO: 344552 - DNA, 15 bp, Homo sapiens
ttgttatggtataaa

SEQ ID NO: 344553 - DNA, 15 bp, Homo sapiens
cttgttatggtataa

SEQ ID NO: 344554 - DNA, 15 bp, Homo sapiens
tcttgttatggtata

SEQ ID NO: 344555 - DNA, 15 bp, Homo sapiens
ttcttgttatggtat

SEQ ID NO: 344556 - DNA, 15 bp, Homo sapiens
gttcttgttatggta

SEQ ID NO: 344557 - DNA, 15 bp, Homo sapiens
agttcttgttatggt

SEQ ID NO: 344558 - DNA, 15 bp, Homo sapiens
aagttcttgttatgg

SEQ ID NO: 344559 - DNA, 15 bp, Homo sapiens
caagttcttgttatg

SEQ ID NO: 344560 - DNA, 15 bp, Homo sapiens
ccaagttcttgttat

SEQ ID NO: 344561 - DNA, 15 bp, Homo sapiens
tccaagttcttgtta

SEQ ID NO: 344562 - DNA, 15 bp, Homo sapiens
ttccaagttcttgtt

SEQ ID NO: 344563 - DNA, 15 bp, Homo sapiens
gttccaagttcttgt

SEQ ID NO: 344564 - DNA, 15 bp, Homo sapiens
ggttccaagttcttg

SEQ ID NO: 344565 - DNA, 15 bp, Homo sapiens
aggttccaagttctt

SEQ ID NO: 344566 - DNA, 15 bp, Homo sapiens
taggttccaagttct

SEQ ID NO: 344567 - DNA, 15 bp, Homo sapiens
gtaggttccaagttc

SEQ ID NO: 344568 - DNA, 15 bp, Homo sapiens
tgtaggttccaagtt

SEQ ID NO: 344569 - DNA, 15 bp, Homo sapiens
gtgtaggttccaagt

SEQ ID NO: 344570 - DNA, 15 bp, Homo sapiens
agtgtaggttccaag

SEQ ID NO: 344571 - DNA, 15 bp, Homo sapiens
aagtgtaggttccaa

SEQ ID NO: 344572 - DNA, 15 bp, Homo sapiens
aaagtgtaggttcca

SEQ ID NO: 344573 - DNA, 15 bp, Homo sapiens
aaaagtgtaggttcc

SEQ ID NO: 344574 - DNA, 15 bp, Homo sapiens
caaaagtgtaggttc

SEQ ID NO: 344575 - DNA, 15 bp, Homo sapiens
tcaaaagtgtaggtt

SEQ ID NO: 344576 - DNA, 15 bp, Homo sapiens
gtcaaaagtgtaggt

SEQ ID NO: 344577 - DNA, 15 bp, Homo sapiens
tgtcaaaagtgtagg

SEQ ID NO: 344578 - DNA, 15 bp, Homo sapiens
ttgtcaaaagtgtag

SEQ ID NO: 344579 - DNA, 15 bp, Homo sapiens
tttgtcaaaagtgta

SEQ ID NO: 344580 - DNA, 15 bp, Homo sapiens
ttttgtcaaaagtgt

SEQ ID NO: 344581 - DNA, 15 bp, Homo sapiens
tttttgtcaaaagtg

SEQ ID NO: 344582 - DNA, 15 bp, Homo sapiens
gtttttgtcaaaagt

SEQ ID NO: 344583 - DNA, 15 bp, Homo sapiens
agtttttgtcaaaag

SEQ ID NO: 344584 - DNA, 15 bp, Homo sapiens
tagtttttgtcaaaa

SEQ ID NO: 344585 - DNA, 15 bp, Homo sapiens
atagtttttgtcaaa

SEQ ID NO: 344586 - DNA, 15 bp, Homo sapiens
tatagtttttgtcaa

SEQ ID NO: 344587 - DNA, 15 bp, Homo sapiens
ttatagtttttgtca

SEQ ID NO: 344588 - DNA, 15 bp, Homo sapiens
attatagtttttgtc

SEQ ID NO: 344589 - DNA, 15 bp, Homo sapiens
gattatagtttttgt

SEQ ID NO: 344590 - DNA, 15 bp, Homo sapiens
agattatagtttttg

SEQ ID NO: 344591 - DNA, 15 bp, Homo sapiens
gagattatagttttt

SEQ ID NO: 344592 - DNA, 15 bp, Homo sapiens
agagattatagtttt

SEQ ID NO: 344593 - DNA, 15 bp, Homo sapiens
gagagattatagttt

SEQ ID NO: 344594 - DNA, 15 bp, Homo sapiens
tgagagattatagtt

SEQ ID NO: 344595 - DNA, 15 bp, Homo sapiens
ctgagagattatagt

SEQ ID NO: 344596 - DNA, 15 bp, Homo sapiens
cctgagagattatag

SEQ ID NO: 344597 - DNA, 15 bp, Homo sapiens
gcctgagagattata

SEQ ID NO: 344598 - DNA, 15 bp, Homo sapiens
agcctgagagattat

SEQ ID NO: 344599 - DNA, 15 bp, Homo sapiens
gagcctgagagatta

SEQ ID NO: 344600 - DNA, 15 bp, Homo sapiens
agagcctgagagatt

SEQ ID NO: 344601 - DNA, 15 bp, Homo sapiens
gagagcctgagagat

SEQ ID NO: 344602 - DNA, 15 bp, Homo sapiens
tgagagcctgagaga

SEQ ID NO: 344603 - DNA, 15 bp, Homo sapiens
ctgagagcctgagag

SEQ ID NO: 344604 - DNA, 15 bp, Homo sapiens
cctgagagcctgaga

SEQ ID NO: 344605 - DNA, 15 bp, Homo sapiens
tcctgagagcctgag

SEQ ID NO: 344606 - DNA, 15 bp, Homo sapiens
atcctgagagcctga

SEQ ID NO: 344607 - DNA, 15 bp, Homo sapiens
aatcctgagagcctg

SEQ ID NO: 344608 - DNA, 15 bp, Homo sapiens
caatcctgagagcct

SEQ ID NO: 344609 - DNA, 15 bp, Homo sapiens
acaatcctgagagcc

SEQ ID NO: 344610 - DNA, 15 bp, Homo sapiens
aacaatcctgagagc

SEQ ID NO: 344611 - DNA, 15 bp, Homo sapiens
aaacaatcctgagag

SEQ ID NO: 344612 - DNA, 15 bp, Homo sapiens
aaaacaatcctgaga

SEQ ID NO: 344613 - DNA, 15 bp, Homo sapiens
aaaaacaatcctgag

SEQ ID NO: 344614 - DNA, 15 bp, Homo sapiens
aaaaaacaatcctga

SEQ ID NO: 344615 - DNA, 15 bp, Homo sapiens
aaaaaaacaatcctg

SEQ ID NO: 344616 - DNA, 15 bp, Homo sapiens
aaaaaaaacaatcct

SEQ ID NO: 344617 - DNA, 15 bp, Homo sapiens
aaaaaaaaacaatcc

SEQ ID NO: 344618 - DNA, 15 bp, Homo sapiens
aaaaaaaaaacaatc

SEQ ID NO: 344619 - DNA, 15 bp, Homo sapiens
aaaaaaaaaaacaat

SEQ ID NO: 344620 - DNA, 15 bp, Homo sapiens
gaaaaaaaaaaaaca

SEQ ID NO: 344621 - DNA, 15 bp, Homo sapiens
agaaaaaaaaaaaac

SEQ ID NO: 344622 - DNA, 15 bp, Homo sapiens
gcaaagaaaaaaaaa

SEQ ID NO: 344623 - DNA, 15 bp, Homo sapiens
tgcaaagaaaaaaaa

SEQ ID NO: 344624 - DNA, 15 bp, Homo sapiens
ttgcaaagaaaaaaa

SEQ ID NO: 344625 - DNA, 15 bp, Homo sapiens
tttgcaaagaaaaaa

SEQ ID NO: 344626 - DNA, 15 bp, Homo sapiens
ctttgcaaagaaaaa

SEQ ID NO: 344627 - DNA, 15 bp, Homo sapiens
gctttgcaaagaaaa

SEQ ID NO: 344628 - DNA, 15 bp, Homo sapiens
agctttgcaaagaaa

SEQ ID NO: 344629 - DNA, 15 bp, Homo sapiens
aagctttgcaaagaa

SEQ ID NO: 344630 - DNA, 15 bp, Homo sapiens
gaagctttgcaaaga

SEQ ID NO: 344631 - DNA, 15 bp, Homo sapiens
ggaagctttgcaaag

SEQ ID NO: 344632 - DNA, 15 bp, Homo sapiens
gggaagctttgcaaa

SEQ ID NO: 344633 - DNA, 15 bp, Homo sapiens
ggggaagctttgcaa

SEQ ID NO: 344634 - DNA, 15 bp, Homo sapiens
tggggaagctttgca

SEQ ID NO: 344635 - DNA, 15 bp, Homo sapiens
ttggggaagctttgc

SEQ ID NO: 344636 - DNA, 15 bp, Homo sapiens
cttggggaagctttg

SEQ ID NO: 344637 - DNA, 15 bp, Homo sapiens
tcttggggaagcttt

SEQ ID NO: 344638 - DNA, 15 bp, Homo sapiens
ttcttggggaagctt

SEQ ID NO: 344639 - DNA, 15 bp, Homo sapiens
cttcttggggaagct

SEQ ID NO: 344640 - DNA, 15 bp, Homo sapiens
gcttcttggggaagc

SEQ ID NO: 344641 - DNA, 15 bp, Homo sapiens
agcttcttggggaag

SEQ ID NO: 344642 - DNA, 15 bp, Homo sapiens
cagcttcttggggaa

SEQ ID NO: 344643 - DNA, 15 bp, Homo sapiens
acagcttcttgggga

SEQ ID NO: 344644 - DNA, 15 bp, Homo sapiens
gacagcttcttgggg

SEQ ID NO: 344645 - DNA, 15 bp, Homo sapiens
tgacagcttcttggg

SEQ ID NO: 344646 - DNA, 15 bp, Homo sapiens
ttgacagcttcttgg

SEQ ID NO: 344647 - DNA, 15 bp, Homo sapiens
gttgacagcttcttg

SEQ ID NO: 344648 - DNA, 15 bp, Homo sapiens
tgttgacagcttctt

SEQ ID NO: 344649 - DNA, 15 bp, Homo sapiens
ctgttgacagcttct

SEQ ID NO: 344650 - DNA, 15 bp, Homo sapiens
tctgttgacagcttc

SEQ ID NO: 344651 - DNA, 15 bp, Homo sapiens
ctctgttgacagctt

SEQ ID NO: 344652 - DNA, 15 bp, Homo sapiens
tctctgttgacagct

SEQ ID NO: 344653 - DNA, 15 bp, Homo sapiens
ctctctgttgacagc

SEQ ID NO: 344654 - DNA, 15 bp, Homo sapiens
tctctctgttgacag

SEQ ID NO: 344655 - DNA, 15 bp, Homo sapiens
ctctctctgttgaca

SEQ ID NO: 344656 - DNA, 15 bp, Homo sapiens
tctctctctgttgac

SEQ ID NO: 344657 - DNA, 15 bp, Homo sapiens
gtctctctctgttga

SEQ ID NO: 344658 - DNA, 15 bp, Homo sapiens
agtctctctctgttg

SEQ ID NO: 344659 - DNA, 15 bp, Homo sapiens
tagtctctctctgtt

SEQ ID NO: 344660 - DNA, 15 bp, Homo sapiens
gtagtctctctctgt

SEQ ID NO: 344661 - DNA, 15 bp, Homo sapiens
tgtagtctctctctg

SEQ ID NO: 344662 - DNA, 15 bp, Homo sapiens
gtgtagtctctctct

SEQ ID NO: 344663 - DNA, 15 bp, Homo sapiens
agtgtagtctctctc

SEQ ID NO: 344664 - DNA, 15 bp, Homo sapiens
gagtgtagtctctct

SEQ ID NO: 344665 - DNA, 15 bp, Homo sapiens
cgagtgtagtctctc

SEQ ID NO: 344666 - DNA, 15 bp, Homo sapiens
tcgagtgtagtctct

SEQ ID NO: 344667 - DNA, 15 bp, Homo sapiens
ctcgagtgtagtctc

SEQ ID NO: 344668 - DNA, 15 bp, Homo sapiens
gctcgagtgtagtct

SEQ ID NO: 344669 - DNA, 15 bp, Homo sapiens
tgctcgagtgtagtc

SEQ ID NO: 344670 - DNA, 15 bp, Homo sapiens
atgctcgagtgtagt

SEQ ID NO: 344671 - DNA, 15 bp, Homo sapiens
catgctcgagtgtag

SEQ ID NO: 344672 - DNA, 15 bp, Homo sapiens
ccatgctcgagtgta

SEQ ID NO: 344673 - DNA, 15 bp, Homo sapiens
gccatgctcgagtgt

SEQ ID NO: 344674 - DNA, 15 bp, Homo sapiens
agccatgctcgagtg

SEQ ID NO: 344675 - DNA, 15 bp, Homo sapiens
tagccatgctcgagt

SEQ ID NO: 344676 - DNA, 15 bp, Homo sapiens
atagccatgctcgag

SEQ ID NO: 344677 - DNA, 15 bp, Homo sapiens
aatagccatgctcga

SEQ ID NO: 344678 - DNA, 15 bp, Homo sapiens
aaatagccatgctcg

SEQ ID NO: 344679 - DNA, 15 bp, Homo sapiens
taaatagccatgctc

SEQ ID NO: 344680 - DNA, 15 bp, Homo sapiens
ataaatagccatgct

SEQ ID NO: 344681 - DNA, 15 bp, Homo sapiens
tataaatagccatgc

SEQ ID NO: 344682 - DNA, 15 bp, Homo sapiens
atataaatagccatg

SEQ ID NO: 344683 - DNA, 15 bp, Homo sapiens
catataaatagccat

SEQ ID NO: 344684 - DNA, 15 bp, Homo sapiens
acatataaatagcca

SEQ ID NO: 344685 - DNA, 15 bp, Homo sapiens
aacatataaatagcc

SEQ ID NO: 344686 - DNA, 15 bp, Homo sapiens
aaacatataaatagc

SEQ ID NO: 344687 - DNA, 15 bp, Homo sapiens
caaacatataaatag

SEQ ID NO: 344688 - DNA, 15 bp, Homo sapiens
acaaacatataaata

SEQ ID NO: 344689 - DNA, 15 bp, Homo sapiens
cacaaacatataaat

SEQ ID NO: 344690 - DNA, 15 bp, Homo sapiens
acacaaacatataaa

SEQ ID NO: 344691 - DNA, 15 bp, Homo sapiens
aacacaaacatataa

SEQ ID NO: 344692 - DNA, 15 bp, Homo sapiens
gaacacaaacatata

SEQ ID NO: 344693 - DNA, 15 bp, Homo sapiens
agaacacaaacatat

SEQ ID NO: 344694 - DNA, 15 bp, Homo sapiens
cagaacacaaacata

SEQ ID NO: 344695 - DNA, 15 bp, Homo sapiens
acagaacacaaacat

SEQ ID NO: 344696 - DNA, 15 bp, Homo sapiens
cacagaacacaaaca

SEQ ID NO: 344697 - DNA, 15 bp, Homo sapiens
tcacagaacacaaac

SEQ ID NO: 344698 - DNA, 15 bp, Homo sapiens
ttcacagaacacaaa

SEQ ID NO: 344699 - DNA, 15 bp, Homo sapiens
attcacagaacacaa

SEQ ID NO: 344700 - DNA, 15 bp, Homo sapiens
aattcacagaacaca

SEQ ID NO: 344701 - DNA, 15 bp, Homo sapiens
aaattcacagaacac

SEQ ID NO: 344702 - DNA, 15 bp, Homo sapiens
aaaattcacagaaca

SEQ ID NO: 344703 - DNA, 15 bp, Homo sapiens
gaaaattcacagaac

SEQ ID NO: 344704 - DNA, 15 bp, Homo sapiens
gaaaggaaaattcac

SEQ ID NO: 344705 - DNA, 15 bp, Homo sapiens
cgaaaggaaaattca

SEQ ID NO: 344706 - DNA, 15 bp, Homo sapiens
ccgaaaggaaaattc

SEQ ID NO: 344707 - DNA, 15 bp, Homo sapiens
accgaaaggaaaatt

SEQ ID NO: 344708 - DNA, 15 bp, Homo sapiens
caccgaaaggaaaat

SEQ ID NO: 344709 - DNA, 15 bp, Homo sapiens
acaccgaaaggaaaa

SEQ ID NO: 344710 - DNA, 15 bp, Homo sapiens
gacaccgaaaggaaa

SEQ ID NO: 344711 - DNA, 15 bp, Homo sapiens
agacaccgaaaggaa

SEQ ID NO: 344712 - DNA, 15 bp, Homo sapiens
aagacaccgaaagga

SEQ ID NO: 344713 - DNA, 15 bp, Homo sapiens
taagacaccgaaagg

SEQ ID NO: 344714 - DNA, 15 bp, Homo sapiens
ctaagacaccgaaag

SEQ ID NO: 344715 - DNA, 15 bp, Homo sapiens
tctaagacaccgaaa

SEQ ID NO: 344716 - DNA, 15 bp, Homo sapiens
atctaagacaccgaa

SEQ ID NO: 344717 - DNA, 15 bp, Homo sapiens
tatctaagacaccga

SEQ ID NO: 344718 - DNA, 15 bp, Homo sapiens
ctatctaagacaccg

SEQ ID NO: 344719 - DNA, 15 bp, Homo sapiens
tctatctaagacacc

SEQ ID NO: 344720 - DNA, 15 bp, Homo sapiens
ctctatctaagacac

SEQ ID NO: 344721 - DNA, 15 bp, Homo sapiens
actctatctaagaca

SEQ ID NO: 344722 - DNA, 15 bp, Homo sapiens
gactctatctaagac

SEQ ID NO: 344723 - DNA, 15 bp, Homo sapiens
tgactctatctaaga

SEQ ID NO: 344724 - DNA, 15 bp, Homo sapiens
ctgactctatctaag

SEQ ID NO: 344725 - DNA, 15 bp, Homo sapiens
gctgactctatctaa

SEQ ID NO: 344726 - DNA, 15 bp, Homo sapiens
tgctgactctatcta

SEQ ID NO: 344727 - DNA, 15 bp, Homo sapiens
ctgctgactctatct

SEQ ID NO: 344728 - DNA, 15 bp, Homo sapiens
tctgctgactctatc

SEQ ID NO: 344729 - DNA, 15 bp, Homo sapiens
atctgctgactctat

SEQ ID NO: 344730 - DNA, 15 bp, Homo sapiens
catctgctgactcta

SEQ ID NO: 344731 - DNA, 15 bp, Homo sapiens
gcatctgctgactct

SEQ ID NO: 344732 - DNA, 15 bp, Homo sapiens
tgcatctgctgactc

SEQ ID NO: 344733 - DNA, 15 bp, Homo sapiens
atgcatctgctgact

SEQ ID NO: 344734 - DNA, 15 bp, Homo sapiens
catgcatctgctgac

SEQ ID NO: 344735 - DNA, 15 bp, Homo sapiens
gcatgcatctgctga

SEQ ID NO: 344736 - DNA, 15 bp, Homo sapiens
ggcatgcatctgctg

SEQ ID NO: 344737 - DNA, 15 bp, Homo sapiens
aggcatgcatctgct

SEQ ID NO: 344738 - DNA, 15 bp, Homo sapiens
caggcatgcatctgc

SEQ ID NO: 344739 - DNA, 15 bp, Homo sapiens
tcaggcatgcatctg

SEQ ID NO: 344740 - DNA, 15 bp, Homo sapiens
atcaggcatgcatct

SEQ ID NO: 344741 - DNA, 15 bp, Homo sapiens
gatcaggcatgcatc

SEQ ID NO: 344742 - DNA, 15 bp, Homo sapiens
ggatcaggcatgcat

SEQ ID NO: 344743 - DNA, 15 bp, Homo sapiens
aggatcaggcatgca

SEQ ID NO: 344744 - DNA, 15 bp, Homo sapiens
aaggatcaggcatgc

SEQ ID NO: 344745 - DNA, 15 bp, Homo sapiens
caaggatcaggcatg

SEQ ID NO: 344746 - DNA, 15 bp, Homo sapiens
gcaaggatcaggcat

SEQ ID NO: 344747 - DNA, 15 bp, Homo sapiens
ggcaaggatcaggca

SEQ ID NO: 344748 - DNA, 15 bp, Homo sapiens
tggcaaggatcaggc

SEQ ID NO: 344749 - DNA, 15 bp, Homo sapiens
ttggcaaggatcagg

SEQ ID NO: 344750 - DNA, 15 bp, Homo sapiens
gttggcaaggatcag

SEQ ID NO: 344751 - DNA, 15 bp, Homo sapiens
tgttggcaaggatca

SEQ ID NO: 344752 - DNA, 15 bp, Homo sapiens
ttgttggcaaggatc

SEQ ID NO: 344753 - DNA, 15 bp, Homo sapiens
cttgttggcaaggat

SEQ ID NO: 344754 - DNA, 15 bp, Homo sapiens
acttgttggcaagga

SEQ ID NO: 344755 - DNA, 15 bp, Homo sapiens
tacttgttggcaagg

SEQ ID NO: 344756 - DNA, 15 bp, Homo sapiens
gtacttgttggcaag

SEQ ID NO: 344757 - DNA, 15 bp, Homo sapiens
agtacttgttggcaa

SEQ ID NO: 344758 - DNA, 15 bp, Homo sapiens
cagtacttgttggca

SEQ ID NO: 344759 - DNA, 15 bp, Homo sapiens
gcagtacttgttggc

SEQ ID NO: 344760 - DNA, 15 bp, Homo sapiens
cgcagtacttgttgg

SEQ ID NO: 344761 - DNA, 15 bp, Homo sapiens
gcgcagtacttgttg

SEQ ID NO: 344762 - DNA, 15 bp, Homo sapiens
agcgcagtacttgtt

SEQ ID NO: 344763 - DNA, 15 bp, Homo sapiens
cagcgcagtacttgt

SEQ ID NO: 344764 - DNA, 15 bp, Homo sapiens
tcagcgcagtacttg

SEQ ID NO: 344765 - DNA, 15 bp, Homo sapiens
gtcagcgcagtactt

SEQ ID NO: 344766 - DNA, 15 bp, Homo sapiens
ggtcagcgcagtact

SEQ ID NO: 344767 - DNA, 15 bp, Homo sapiens
gggtcagcgcagtac

SEQ ID NO: 344768 - DNA, 15 bp, Homo sapiens
cgggtcagcgcagta

SEQ ID NO: 344769 - DNA, 15 bp, Homo sapiens
ccgggtcagcgcagt

SEQ ID NO: 344770 - DNA, 15 bp, Homo sapiens
tccgggtcagcgcag

SEQ ID NO: 344771 - DNA, 15 bp, Homo sapiens
atccgggtcagcgca

SEQ ID NO: 344772 - DNA, 15 bp, Homo sapiens
catccgggtcagcgc

SEQ ID NO: 344773 - DNA, 15 bp, Homo sapiens
gcatccgggtcagcg

SEQ ID NO: 344774 - DNA, 15 bp, Homo sapiens
cgcatccgggtcagc

SEQ ID NO: 344775 - DNA, 15 bp, Homo sapiens
ccgcatccgggtcag

SEQ ID NO: 344776 - DNA, 15 bp, Homo sapiens
tccgcatccgggtca

SEQ ID NO: 344777 - DNA, 15 bp, Homo sapiens
ctccgcatccgggtc

SEQ ID NO: 344778 - DNA, 15 bp, Homo sapiens
cctccgcatccgggt

SEQ ID NO: 344779 - DNA, 15 bp, Homo sapiens
tcctccgcatccggg

SEQ ID NO: 344780 - DNA, 15 bp, Homo sapiens
atcctccgcatccgg

SEQ ID NO: 344781 - DNA, 15 bp, Homo sapiens
catcctccgcatccg

SEQ ID NO: 344782 - DNA, 15 bp, Homo sapiens
gcatcctccgcatcc

SEQ ID NO: 344783 - DNA, 15 bp, Homo sapiens
ggcatcctccgcatc

SEQ ID NO: 344784 - DNA, 15 bp, Homo sapiens
aggcatcctccgcat

SEQ ID NO: 344785 - DNA, 15 bp, Homo sapiens
gaggcatcctccgca

SEQ ID NO: 344786 - DNA, 15 bp, Homo sapiens
cgaggcatcctccgc

SEQ ID NO: 344787 - DNA, 15 bp, Homo sapiens
tcgaggcatcctccg

SEQ ID NO: 344788 - DNA, 15 bp, Homo sapiens
ttcgaggcatcctcc

SEQ ID NO: 344789 - DNA, 15 bp, Homo sapiens
attcgaggcatcctc

SEQ ID NO: 344790 - DNA, 15 bp, Homo sapiens
tattcgaggcatcct

SEQ ID NO: 344791 - DNA, 15 bp, Homo sapiens
atattcgaggcatcc

SEQ ID NO: 344792 - DNA, 15 bp, Homo sapiens
gatattcgaggcatc

SEQ ID NO: 344793 - DNA, 15 bp, Homo sapiens
actagaatttataaa

SEQ ID NO: 344794 - DNA, 15 bp, Homo sapiens
cactagaatttataa

SEQ ID NO: 344795 - DNA, 15 bp, Homo sapiens
acactagaatttata

SEQ ID NO: 344796 - DNA, 15 bp, Homo sapiens
gacactagaatttat

SEQ ID NO: 344797 - DNA, 15 bp, Homo sapiens
agacactagaattta

SEQ ID NO: 344798 - DNA, 15 bp, Homo sapiens
aagacactagaattt

SEQ ID NO: 344799 - DNA, 15 bp, Homo sapiens
taagacactagaatt

SEQ ID NO: 344800 - DNA, 15 bp, Homo sapiens
ctaagacactagaat

SEQ ID NO: 344801 - DNA, 15 bp, Homo sapiens
cctaagacactagaa

SEQ ID NO: 344802 - DNA, 15 bp, Homo sapiens
acctaagacactaga

SEQ ID NO: 344803 - DNA, 15 bp, Homo sapiens
cacctaagacactag

SEQ ID NO: 344804 - DNA, 15 bp, Homo sapiens
acacctaagacacta

SEQ ID NO: 344805 - DNA, 15 bp, Homo sapiens
cacacctaagacact

SEQ ID NO: 344806 - DNA, 15 bp, Homo sapiens
gcacacctaagacac

SEQ ID NO: 344807 - DNA, 15 bp, Homo sapiens
agcacacctaagaca

SEQ ID NO: 344808 - DNA, 15 bp, Homo sapiens
tagcacacctaagac

SEQ ID NO: 344809 - DNA, 15 bp, Homo sapiens
ctagcacacctaaga

SEQ ID NO: 344810 - DNA, 15 bp, Homo sapiens
actagcacacctaag

SEQ ID NO: 344811 - DNA, 15 bp, Homo sapiens
cactagcacacctaa

SEQ ID NO: 344812 - DNA, 15 bp, Homo sapiens
ccactagcacaccta

SEQ ID NO: 344813 - DNA, 15 bp, Homo sapiens
tccactagcacacct

SEQ ID NO: 344814 - DNA, 15 bp, Homo sapiens
ctccactagcacacc

SEQ ID NO: 344815 - DNA, 15 bp, Homo sapiens
tctccactagcacac

SEQ ID NO: 344816 - DNA, 15 bp, Homo sapiens
atctccactagcaca

SEQ ID NO: 344817 - DNA, 15 bp, Homo sapiens
aatctccactagcac

SEQ ID NO: 344818 - DNA, 15 bp, Homo sapiens
caatctccactagca

SEQ ID NO: 344819 - DNA, 15 bp, Homo sapiens
acaatctccactagc

SEQ ID NO: 344820 - DNA, 15 bp, Homo sapiens
cacaatctccactag

SEQ ID NO: 344821 - DNA, 15 bp, Homo sapiens
acacaatctccacta

SEQ ID NO: 344822 - DNA, 15 bp, Homo sapiens
cacacaatctccact

SEQ ID NO: 344823 - DNA, 15 bp, Homo sapiens
acacacaatctccac

SEQ ID NO: 344824 - DNA, 15 bp, Homo sapiens
cacacacaatctcca

SEQ ID NO: 344825 - DNA, 15 bp, Homo sapiens
acacacacaatctcc

SEQ ID NO: 344826 - DNA, 15 bp, Homo sapiens
cacacacacaatctc

SEQ ID NO: 344827 - DNA, 15 bp, Homo sapiens
acacacacacaatct

SEQ ID NO: 344828 - DNA, 15 bp, Homo sapiens
cacacacacacaatc

SEQ ID NO: 344829 - DNA, 15 bp, Homo sapiens
tcacacacacacaat

SEQ ID NO: 344830 - DNA, 15 bp, Homo sapiens
ctcacacacacacaa

SEQ ID NO: 344831 - DNA, 15 bp, Homo sapiens
actcacacacacaca

SEQ ID NO: 344832 - DNA, 15 bp, Homo sapiens
cactcacacacacac

SEQ ID NO: 344833 - DNA, 15 bp, Homo sapiens
acactcacacacaca

SEQ ID NO: 344834 - DNA, 15 bp, Homo sapiens
aacacactcacacac

SEQ ID NO: 344835 - DNA, 15 bp, Homo sapiens
aaacacactcacaca

SEQ ID NO: 344836 - DNA, 15 bp, Homo sapiens
caaacacactcacac

SEQ ID NO: 344837 - DNA, 15 bp, Homo sapiens
acaaacacactcaca

SEQ ID NO: 344838 - DNA, 15 bp, Homo sapiens
cacaaacacactcac

SEQ ID NO: 344839 - DNA, 15 bp, Homo sapiens
acacaaacacactca

SEQ ID NO: 344840 - DNA, 15 bp, Homo sapiens
cacacaaacacactc

SEQ ID NO: 344841 - DNA, 15 bp, Homo sapiens
acacacaaacacact

SEQ ID NO: 344842 - DNA, 15 bp, Homo sapiens
cacacacacacaaac

SEQ ID NO: 344843 - DNA, 15 bp, Homo sapiens
tttcacacacacaca

SEQ ID NO: 344844 - DNA, 15 bp, Homo sapiens
ctttcacacacacac

SEQ ID NO: 344845 - DNA, 15 bp, Homo sapiens
tctttcacacacaca

SEQ ID NO: 344846 - DNA, 15 bp, Homo sapiens
ctctttcacacacac

SEQ ID NO: 344847 - DNA, 15 bp, Homo sapiens
tctctttcacacaca

SEQ ID NO: 344848 - DNA, 15 bp, Homo sapiens
ctctctttcacacac

SEQ ID NO: 344849 - DNA, 15 bp, Homo sapiens
tctctctttcacaca

SEQ ID NO: 344850 - DNA, 15 bp, Homo sapiens
ctctctctttcacac

SEQ ID NO: 344851 - DNA, 15 bp, Homo sapiens
tctctctctttcaca

SEQ ID NO: 344852 - DNA, 15 bp, Homo sapiens
ctctctctctttcac

SEQ ID NO: 344853 - DNA, 15 bp, Homo sapiens
tctctctctctttca

SEQ ID NO: 344854 - DNA, 15 bp, Homo sapiens
ccttctctctctctc

SEQ ID NO: 344855 - DNA, 15 bp, Homo sapiens
tccttctctctctct

SEQ ID NO: 344856 - DNA, 15 bp, Homo sapiens
ctccttctctctctc

SEQ ID NO: 344857 - DNA, 15 bp, Homo sapiens
tctccttctctctct

SEQ ID NO: 344858 - DNA, 15 bp, Homo sapiens
ctctccttctctctc

SEQ ID NO: 344859 - DNA, 15 bp, Homo sapiens
tctctccttctctct

SEQ ID NO: 344860 - DNA, 15 bp, Homo sapiens
ttctctccttctctc

SEQ ID NO: 344861 - DNA, 15 bp, Homo sapiens
attctctccttctct

SEQ ID NO: 344862 - DNA, 15 bp, Homo sapiens
tattctctccttctc

SEQ ID NO: 344863 - DNA, 15 bp, Homo sapiens
ttattctctccttct

SEQ ID NO: 344864 - DNA, 15 bp, Homo sapiens
cttattctctccttc

SEQ ID NO: 344865 - DNA, 15 bp, Homo sapiens
tcttattctctcctt

SEQ ID NO: 344866 - DNA, 15 bp, Homo sapiens
ctcttattctctcct

SEQ ID NO: 344867 - DNA, 15 bp, Homo sapiens
tctcttattctctcc

SEQ ID NO: 344868 - DNA, 15 bp, Homo sapiens
ctctcttattctctc

SEQ ID NO: 344869 - DNA, 15 bp, Homo sapiens
actctcttattctct

SEQ ID NO: 344870 - DNA, 15 bp, Homo sapiens
cactctcttattctc

SEQ ID NO: 344871 - DNA, 15 bp, Homo sapiens
ccactctcttattct

SEQ ID NO: 344872 - DNA, 15 bp, Homo sapiens
cccactctcttattc

SEQ ID NO: 344873 - DNA, 15 bp, Homo sapiens
tcccactctcttatt

SEQ ID NO: 344874 - DNA, 15 bp, Homo sapiens
ctcccactctcttat

SEQ ID NO: 344875 - DNA, 15 bp, Homo sapiens
tctcccactctctta

SEQ ID NO: 344876 - DNA, 15 bp, Homo sapiens
ctctcccactctctt

SEQ ID NO: 344877 - DNA, 15 bp, Homo sapiens
tctctcccactctct

SEQ ID NO: 344878 - DNA, 15 bp, Homo sapiens
ctctctcccactctc

SEQ ID NO: 344879 - DNA, 15 bp, Homo sapiens
cctctctcccactct

SEQ ID NO: 344880 - DNA, 15 bp, Homo sapiens
ccctctctcccactc

SEQ ID NO: 344881 - DNA, 15 bp, Homo sapiens
accctctctcccact

SEQ ID NO: 344882 - DNA, 15 bp, Homo sapiens
caccctctctcccac

SEQ ID NO: 344883 - DNA, 15 bp, Homo sapiens
ccaccctctctccca

SEQ ID NO: 344884 - DNA, 15 bp, Homo sapiens
cccaccctctctccc

SEQ ID NO: 344885 - DNA, 15 bp, Homo sapiens
ccccaccctctctcc

SEQ ID NO: 344886 - DNA, 15 bp, Homo sapiens
tccccaccctctctc

SEQ ID NO: 344887 - DNA, 15 bp, Homo sapiens
atccccaccctctct

SEQ ID NO: 344888 - DNA, 15 bp, Homo sapiens
tatccccaccctctc

SEQ ID NO: 344889 - DNA, 15 bp, Homo sapiens
atatccccaccctct

SEQ ID NO: 344890 - DNA, 15 bp, Homo sapiens
aatatccccaccctc

SEQ ID NO: 344891 - DNA, 15 bp, Homo sapiens
gaatatccccaccct

SEQ ID NO: 344892 - DNA, 15 bp, Homo sapiens
agaatatccccaccc

SEQ ID NO: 344893 - DNA, 15 bp, Homo sapiens
cagaatatccccacc

SEQ ID NO: 344894 - DNA, 15 bp, Homo sapiens
tcagaatatccccac

SEQ ID NO: 344895 - DNA, 15 bp, Homo sapiens
ttcagaatatcccca

SEQ ID NO: 344896 - DNA, 15 bp, Homo sapiens
tttcagaatatcccc

SEQ ID NO: 344897 - DNA, 15 bp, Homo sapiens
gtttcagaatatccc

SEQ ID NO: 344898 - DNA, 15 bp, Homo sapiens
ggtttcagaatatcc

SEQ ID NO: 344899 - DNA, 15 bp, Homo sapiens
aggtttcagaatatc

SEQ ID NO: 344900 - DNA, 15 bp, Homo sapiens
aaggtttcagaatat

SEQ ID NO: 344901 - DNA, 15 bp, Homo sapiens
gaaggtttcagaata

SEQ ID NO: 344902 - DNA, 15 bp, Homo sapiens
ggaaggtttcagaat

SEQ ID NO: 344903 - DNA, 15 bp, Homo sapiens
gggaaggtttcagaa

SEQ ID NO: 344904 - DNA, 15 bp, Homo sapiens
tgggaaggtttcaga

SEQ ID NO: 344905 - DNA, 15 bp, Homo sapiens
gtgggaaggtttcag

SEQ ID NO: 344906 - DNA, 15 bp, Homo sapiens
agtgggaaggtttca

SEQ ID NO: 344907 - DNA, 15 bp, Homo sapiens
gagtgggaaggtttc

SEQ ID NO: 344908 - DNA, 15 bp, Homo sapiens
ggagtgggaaggttt

SEQ ID NO: 344909 - DNA, 15 bp, Homo sapiens
tggagtgggaaggtt

SEQ ID NO: 344910 - DNA, 15 bp, Homo sapiens
gtggagtgggaaggt

SEQ ID NO: 344911 - DNA, 15 bp, Homo sapiens
agtggagtgggaagg

SEQ ID NO: 344912 - DNA, 15 bp, Homo sapiens
gagtggagtgggaag

SEQ ID NO: 344913 - DNA, 15 bp, Homo sapiens
ggagtggagtgggaa

SEQ ID NO: 344914 - DNA, 15 bp, Homo sapiens
aggagtggagtggga

SEQ ID NO: 344915 - DNA, 15 bp, Homo sapiens
taggagtggagtggg

SEQ ID NO: 344916 - DNA, 15 bp, Homo sapiens
ataggagtggagtgg

SEQ ID NO: 344917 - DNA, 15 bp, Homo sapiens
gataggagtggagtg

SEQ ID NO: 344918 - DNA, 15 bp, Homo sapiens
tgataggagtggagt

SEQ ID NO: 344919 - DNA, 15 bp, Homo sapiens
ttgataggagtggag

SEQ ID NO: 344920 - DNA, 15 bp, Homo sapiens
tttgataggagtgga

SEQ ID NO: 344921 - DNA, 15 bp, Homo sapiens
ctttgataggagtgg

SEQ ID NO: 344922 - DNA, 15 bp, Homo sapiens
gctttgataggagtg

SEQ ID NO: 344923 - DNA, 15 bp, Homo sapiens
agctttgataggagt

SEQ ID NO: 344924 - DNA, 15 bp, Homo sapiens
aagctttgataggag

SEQ ID NO: 344925 - DNA, 15 bp, Homo sapiens
gaagctttgatagga

SEQ ID NO: 344926 - DNA, 15 bp, Homo sapiens
tgaagctttgatagg

SEQ ID NO: 344927 - DNA, 15 bp, Homo sapiens
atgaagctttgatag

SEQ ID NO: 344928 - DNA, 15 bp, Homo sapiens
tatgaagctttgata

SEQ ID NO: 344929 - DNA, 15 bp, Homo sapiens
ctatgaagctttgat

SEQ ID NO: 344930 - DNA, 15 bp, Homo sapiens
tctatgaagctttga

SEQ ID NO: 344931 - DNA, 15 bp, Homo sapiens
ctctatgaagctttg

SEQ ID NO: 344932 - DNA, 15 bp, Homo sapiens
tctctatgaagcttt

SEQ ID NO: 344933 - DNA, 15 bp, Homo sapiens
ttctctatgaagctt

SEQ ID NO: 344934 - DNA, 15 bp, Homo sapiens
tttctctatgaagct

SEQ ID NO: 344935 - DNA, 15 bp, Homo sapiens
ttttctctatgaagc

SEQ ID NO: 344936 - DNA, 15 bp, Homo sapiens
tttttctctatgaag

SEQ ID NO: 344937 - DNA, 15 bp, Homo sapiens
ctttttctctatgaa

SEQ ID NO: 344938 - DNA, 15 bp, Homo sapiens
tctttttctctatga

SEQ ID NO: 344939 - DNA, 15 bp, Homo sapiens
ctctttttctctatg

SEQ ID NO: 344940 - DNA, 15 bp, Homo sapiens
actctttttctctat

SEQ ID NO: 344941 - DNA, 15 bp, Homo sapiens
gactctttttctcta

SEQ ID NO: 344942 - DNA, 15 bp, Homo sapiens
agactctttttctct

SEQ ID NO: 344943 - DNA, 15 bp, Homo sapiens
aagactctttttctc

SEQ ID NO: 344944 - DNA, 15 bp, Homo sapiens
taagactctttttct

SEQ ID NO: 344945 - DNA, 15 bp, Homo sapiens
ttaagactctttttc

SEQ ID NO: 344946 - DNA, 15 bp, Homo sapiens
gttaagactcttttt

SEQ ID NO: 344947 - DNA, 15 bp, Homo sapiens
tgttaagactctttt

SEQ ID NO: 344948 - DNA, 15 bp, Homo sapiens
atgttaagactcttt

SEQ ID NO: 344949 - DNA, 15 bp, Homo sapiens
aatgttaagactctt

SEQ ID NO: 344950 - DNA, 15 bp, Homo sapiens
aaatgttaagactct

SEQ ID NO: 344951 - DNA, 15 bp, Homo sapiens
gaaatgttaagactc

SEQ ID NO: 344952 - DNA, 15 bp, Homo sapiens
ggaaatgttaagact

SEQ ID NO: 344953 - DNA, 15 bp, Homo sapiens
tggaaatgttaagac

SEQ ID NO: 344954 - DNA, 15 bp, Homo sapiens
atggaaatgttaaga

SEQ ID NO: 344955 - DNA, 15 bp, Homo sapiens
catggaaatgttaag

SEQ ID NO: 344956 - DNA, 15 bp, Homo sapiens
tcatggaaatgttaa

SEQ ID NO: 344957 - DNA, 15 bp, Homo sapiens
ttcatggaaatgtta

SEQ ID NO: 344958 - DNA, 15 bp, Homo sapiens
gttcatggaaatgtt

SEQ ID NO: 344959 - DNA, 15 bp, Homo sapiens
tgttcatggaaatgt

SEQ ID NO: 344960 - DNA, 15 bp, Homo sapiens
atgttcatggaaatg

SEQ ID NO: 344961 - DNA, 15 bp, Homo sapiens
aatgttcatggaaat

SEQ ID NO: 344962 - DNA, 15 bp, Homo sapiens
aaatgttcatggaaa

SEQ ID NO: 344963 - DNA, 15 bp, Homo sapiens
aaaatgttcatggaa

SEQ ID NO: 344964 - DNA, 15 bp, Homo sapiens
taaaatgttcatgga

SEQ ID NO: 344965 - DNA, 15 bp, Homo sapiens
ttaaaatgttcatgg

SEQ ID NO: 344966 - DNA, 15 bp, Homo sapiens
tttaaaatgttcatg

SEQ ID NO: 344967 - DNA, 15 bp, Homo sapiens
atttaaaatgttcat

SEQ ID NO: 344968 - DNA, 15 bp, Homo sapiens
gatttaaaatgttca

SEQ ID NO: 344969 - DNA, 15 bp, Homo sapiens
tgatttaaaatgttc

SEQ ID NO: 344970 - DNA, 15 bp, Homo sapiens
gtgatttaaaatgtt

SEQ ID NO: 344971 - DNA, 15 bp, Homo sapiens
agtgatttaaaatgt

SEQ ID NO: 344972 - DNA, 15 bp, Homo sapiens
aagtgatttaaaatg

SEQ ID NO: 344973 - DNA, 15 bp, Homo sapiens
gaagtgatttaaaat

SEQ ID NO: 344974 - DNA, 15 bp, Homo sapiens
agaagtgatttaaaa

SEQ ID NO: 344975 - DNA, 15 bp, Homo sapiens
gagaagtgatttaaa

SEQ ID NO: 344976 - DNA, 15 bp, Homo sapiens
agagaagtgatttaa

SEQ ID NO: 344977 - DNA, 15 bp, Homo sapiens
aagagaagtgattta

SEQ ID NO: 344978 - DNA, 15 bp, Homo sapiens
aaagagaagtgattt

SEQ ID NO: 344979 - DNA, 15 bp, Homo sapiens
aaaagagaagtgatt

SEQ ID NO: 344980 - DNA, 15 bp, Homo sapiens
gaaaagagaagtgat

SEQ ID NO: 344981 - DNA, 15 bp, Homo sapiens
agaaaagagaagtga

SEQ ID NO: 344982 - DNA, 15 bp, Homo sapiens
aagaaaagagaagtg

SEQ ID NO: 344983 - DNA, 15 bp, Homo sapiens
ccaagaaaagagaag

SEQ ID NO: 344984 - DNA, 15 bp, Homo sapiens
accaagaaaagagaa

SEQ ID NO: 344985 - DNA, 15 bp, Homo sapiens
caccaagaaaagaga

SEQ ID NO: 344986 - DNA, 15 bp, Homo sapiens
gcaccaagaaaagag

SEQ ID NO: 344987 - DNA, 15 bp, Homo sapiens
agcaccaagaaaaga

SEQ ID NO: 344988 - DNA, 15 bp, Homo sapiens
cagcaccaagaaaag

SEQ ID NO: 344989 - DNA, 15 bp, Homo sapiens
tcagcaccaagaaaa

SEQ ID NO: 344990 - DNA, 15 bp, Homo sapiens
ctcagcaccaagaaa

SEQ ID NO: 344991 - DNA, 15 bp, Homo sapiens
actcagcaccaagaa

SEQ ID NO: 344992 - DNA, 15 bp, Homo sapiens
gactcagcaccaaga

SEQ ID NO: 344993 - DNA, 15 bp, Homo sapiens
agactcagcaccaag

SEQ ID NO: 344994 - DNA, 15 bp, Homo sapiens
aagactcagcaccaa

SEQ ID NO: 344995 - DNA, 15 bp, Homo sapiens
caagactcagcacca

SEQ ID NO: 344996 - DNA, 15 bp, Homo sapiens
ccaagactcagcacc

SEQ ID NO: 344997 - DNA, 15 bp, Homo sapiens
tccaagactcagcac

SEQ ID NO: 344998 - DNA, 15 bp, Homo sapiens
ttccaagactcagca

SEQ ID NO: 344999 - DNA, 15 bp, Homo sapiens
tttccaagactcagc

SEQ ID NO: 345000 - DNA, 15 bp, Homo sapiens
atttccaagactcag

SEQ ID NO: 345001 - DNA, 15 bp, Homo sapiens
gatttccaagactca

SEQ ID NO: 345002 - DNA, 15 bp, Homo sapiens
ggatttccaagactc

SEQ ID NO: 345003 - DNA, 15 bp, Homo sapiens
cggatttccaagact

SEQ ID NO: 345004 - DNA, 15 bp, Homo sapiens
ccggatttccaagac

SEQ ID NO: 345005 - DNA, 15 bp, Homo sapiens
tccggatttccaaga

SEQ ID NO: 345006 - DNA, 15 bp, Homo sapiens
atccggatttccaag

SEQ ID NO: 345007 - DNA, 15 bp, Homo sapiens
catccggatttccaa

SEQ ID NO: 345008 - DNA, 15 bp, Homo sapiens
acatccggatttcca

SEQ ID NO: 345009 - DNA, 15 bp, Homo sapiens
aacatccggatttcc

SEQ ID NO: 345010 - DNA, 15 bp, Homo sapiens
aaacatccggatttc

SEQ ID NO: 345011 - DNA, 15 bp, Homo sapiens
gaaacatccggattt

SEQ ID NO: 345012 - DNA, 15 bp, Homo sapiens
tgaaacatccggatt

SEQ ID NO: 345013 - DNA, 15 bp, Homo sapiens
ttgaaacatccggat

SEQ ID NO: 345014 - DNA, 15 bp, Homo sapiens
tttgaaacatccgga

SEQ ID NO: 345015 - DNA, 15 bp, Homo sapiens
ctttgaaacatccgg

SEQ ID NO: 345016 - DNA, 15 bp, Homo sapiens
actttgaaacatccg

SEQ ID NO: 345017 - DNA, 15 bp, Homo sapiens
aactttgaaacatcc

SEQ ID NO: 345018 - DNA, 15 bp, Homo sapiens
aaactttgaaacatc

SEQ ID NO: 345019 - DNA, 15 bp, Homo sapiens
gaaactttgaaacat

SEQ ID NO: 345020 - DNA, 15 bp, Homo sapiens
agaaactttgaaaca

SEQ ID NO: 345021 - DNA, 15 bp, Homo sapiens
aagaaactttgaaac

SEQ ID NO: 345022 - DNA, 15 bp, Homo sapiens
aaagaaactttgaaa

SEQ ID NO: 345023 - DNA, 15 bp, Homo sapiens
taaagaaactttgaa

SEQ ID NO: 345024 - DNA, 15 bp, Homo sapiens
gtaaagaaactttga

SEQ ID NO: 345025 - DNA, 15 bp, Homo sapiens
ggtaaagaaactttg

SEQ ID NO: 345026 - DNA, 15 bp, Homo sapiens
aggtaaagaaacttt

SEQ ID NO: 345027 - DNA, 15 bp, Homo sapiens
caggtaaagaaactt

SEQ ID NO: 345028 - DNA, 15 bp, Homo sapiens
ccaggtaaagaaact

SEQ ID NO: 345029 - DNA, 15 bp, Homo sapiens
tccaggtaaagaaac

SEQ ID NO: 345030 - DNA, 15 bp, Homo sapiens
atccaggtaaagaaa

SEQ ID NO: 345031 - DNA, 15 bp, Homo sapiens
tatccaggtaaagaa

SEQ ID NO: 345032 - DNA, 15 bp, Homo sapiens
atatccaggtaaaga

SEQ ID NO: 345033 - DNA, 15 bp, Homo sapiens
aatatccaggtaaag

SEQ ID NO: 345034 - DNA, 15 bp, Homo sapiens
aaatatccaggtaaa

SEQ ID NO: 345035 - DNA, 15 bp, Homo sapiens
gaaatatccaggtaa

SEQ ID NO: 345036 - DNA, 15 bp, Homo sapiens
cgaaatatccaggta

SEQ ID NO: 345037 - DNA, 15 bp, Homo sapiens
tcgaaatatccaggt

SEQ ID NO: 345038 - DNA, 15 bp, Homo sapiens
atcgaaatatccagg

SEQ ID NO: 345039 - DNA, 15 bp, Homo sapiens
aatcgaaatatccag

SEQ ID NO: 345040 - DNA, 15 bp, Homo sapiens
aaatcgaaatatcca

SEQ ID NO: 345041 - DNA, 15 bp, Homo sapiens
gaaatcgaaatatcc

SEQ ID NO: 345042 - DNA, 15 bp, Homo sapiens
agaaatcgaaatatc

SEQ ID NO: 345043 - DNA, 15 bp, Homo sapiens
tagaaatcgaaatat

SEQ ID NO: 345044 - DNA, 15 bp, Homo sapiens
ctagaaatcgaaata

SEQ ID NO: 345045 - DNA, 15 bp, Homo sapiens
gctagaaatcgaaat

SEQ ID NO: 345046 - DNA, 15 bp, Homo sapiens
cgctagaaatcgaaa

SEQ ID NO: 345047 - DNA, 15 bp, Homo sapiens
ccgctagaaatcgaa

SEQ ID NO: 345048 - DNA, 15 bp, Homo sapiens
gccgctagaaatcga

SEQ ID NO: 345049 - DNA, 15 bp, Homo sapiens
agccgctagaaatcg

SEQ ID NO: 345050 - DNA, 15 bp, Homo sapiens
cagccgctagaaatc

SEQ ID NO: 345051 - DNA, 15 bp, Homo sapiens
acagccgctagaaat

SEQ ID NO: 345052 - DNA, 15 bp, Homo sapiens
gacagccgctagaaa

SEQ ID NO: 345053 - DNA, 15 bp, Homo sapiens
tgacagccgctagaa

SEQ ID NO: 345054 - DNA, 15 bp, Homo sapiens
atgacagccgctaga

SEQ ID NO: 345055 - DNA, 15 bp, Homo sapiens
aatgacagccgctag

SEQ ID NO: 345056 - DNA, 15 bp, Homo sapiens
aaatgacagccgcta

SEQ ID NO: 345057 - DNA, 15 bp, Homo sapiens
aaaatgacagccgct

SEQ ID NO: 345058 - DNA, 15 bp, Homo sapiens
taaaatgacagccgc

SEQ ID NO: 345059 - DNA, 15 bp, Homo sapiens
ttaaaatgacagccg

SEQ ID NO: 345060 - DNA, 15 bp, Homo sapiens
tttaaaatgacagcc

SEQ ID NO: 345061 - DNA, 15 bp, Homo sapiens
atttaaaatgacagc

SEQ ID NO: 345062 - DNA, 15 bp, Homo sapiens
aatttaaaatgacag

SEQ ID NO: 345063 - DNA, 15 bp, Homo sapiens
taatttaaaatgaca

SEQ ID NO: 345064 - DNA, 15 bp, Homo sapiens
ttaatttaaaatgac

SEQ ID NO: 345065 - DNA, 15 bp, Homo sapiens
tttaatttaaaatga

SEQ ID NO: 345066 - DNA, 15 bp, Homo sapiens
ctttaatttaaaatg

SEQ ID NO: 345067 - DNA, 15 bp, Homo sapiens
gctttaatttaaaat

SEQ ID NO: 345068 - DNA, 15 bp, Homo sapiens
agctttaatttaaaa

SEQ ID NO: 345069 - DNA, 15 bp, Homo sapiens
gagctttaatttaaa

SEQ ID NO: 345070 - DNA, 15 bp, Homo sapiens
ggagctttaatttaa

SEQ ID NO: 345071 - DNA, 15 bp, Homo sapiens
aggagctttaattta

SEQ ID NO: 345072 - DNA, 15 bp, Homo sapiens
caggagctttaattt

SEQ ID NO: 345073 - DNA, 15 bp, Homo sapiens
tcaggagctttaatt

SEQ ID NO: 345074 - DNA, 15 bp, Homo sapiens
ttcaggagctttaat

SEQ ID NO: 345075 - DNA, 15 bp, Homo sapiens
attcaggagctttaa

SEQ ID NO: 345076 - DNA, 15 bp, Homo sapiens
cattcaggagcttta

SEQ ID NO: 345077 - DNA, 15 bp, Homo sapiens
acattcaggagcttt

SEQ ID NO: 345078 - DNA, 15 bp, Homo sapiens
cacattcaggagctt

SEQ ID NO: 345079 - DNA, 15 bp, Homo sapiens
tcacattcaggagct

SEQ ID NO: 345080 - DNA, 15 bp, Homo sapiens
ttcacattcaggagc

SEQ ID NO: 345081 - DNA, 15 bp, Homo sapiens
attcacattcaggag

SEQ ID NO: 345082 - DNA, 15 bp, Homo sapiens
gattcacattcagga

SEQ ID NO: 345083 - DNA, 15 bp, Homo sapiens
agattcacattcagg

SEQ ID NO: 345084 - DNA, 15 bp, Homo sapiens
aagattcacattcag

SEQ ID NO: 345085 - DNA, 15 bp, Homo sapiens
aaagattcacattca

SEQ ID NO: 345086 - DNA, 15 bp, Homo sapiens
aaaagattcacattc

SEQ ID NO: 345087 - DNA, 15 bp, Homo sapiens
gaaaagattcacatt

SEQ ID NO: 345088 - DNA, 15 bp, Homo sapiens
ggaaaagattcacat

SEQ ID NO: 345089 - DNA, 15 bp, Homo sapiens
tggaaaagattcaca

SEQ ID NO: 345090 - DNA, 15 bp, Homo sapiens
atggaaaagattcac

SEQ ID NO: 345091 - DNA, 15 bp, Homo sapiens
aatggaaaagattca

SEQ ID NO: 345092 - DNA, 15 bp, Homo sapiens
gaatggaaaagattc

SEQ ID NO: 345093 - DNA, 15 bp, Homo sapiens
ggaatggaaaagatt

SEQ ID NO: 345094 - DNA, 15 bp, Homo sapiens
tggaatggaaaagat

SEQ ID NO: 345095 - DNA, 15 bp, Homo sapiens
ctggaatggaaaaga

SEQ ID NO: 345096 - DNA, 15 bp, Homo sapiens
gctggaatggaaaag

SEQ ID NO: 345097 - DNA, 15 bp, Homo sapiens
ggctggaatggaaaa

SEQ ID NO: 345098 - DNA, 15 bp, Homo sapiens
gggctggaatggaaa

SEQ ID NO: 345099 - DNA, 15 bp, Homo sapiens
ggggctggaatggaa

SEQ ID NO: 345100 - DNA, 15 bp, Homo sapiens
aggggctggaatgga

SEQ ID NO: 345101 - DNA, 15 bp, Homo sapiens
gaggggctggaatgg

SEQ ID NO: 345102 - DNA, 15 bp, Homo sapiens
cgaggggctggaatg

SEQ ID NO: 345103 - DNA, 15 bp, Homo sapiens
tcgaggggctggaat

SEQ ID NO: 345104 - DNA, 15 bp, Homo sapiens
atcgaggggctggaa

SEQ ID NO: 345105 - DNA, 15 bp, Homo sapiens
gatcgaggggctgga

SEQ ID NO: 345106 - DNA, 15 bp, Homo sapiens
ggatcgaggggctgg

SEQ ID NO: 345107 - DNA, 15 bp, Homo sapiens
tggatcgaggggctg

SEQ ID NO: 345108 - DNA, 15 bp, Homo sapiens
ctggatcgaggggct

SEQ ID NO: 345109 - DNA, 15 bp, Homo sapiens
tctggatcgaggggc

SEQ ID NO: 345110 - DNA, 15 bp, Homo sapiens
ttctggatcgagggg

SEQ ID NO: 345111 - DNA, 15 bp, Homo sapiens
cttctggatcgaggg

SEQ ID NO: 345112 - DNA, 15 bp, Homo sapiens
tcttctggatcgagg

SEQ ID NO: 345113 - DNA, 15 bp, Homo sapiens
gtcttctggatcgag

SEQ ID NO: 345114 - DNA, 15 bp, Homo sapiens
ggtcttctggatcga

SEQ ID NO: 345115 - DNA, 15 bp, Homo sapiens
aggtcttctggatcg

SEQ ID NO: 345116 - DNA, 15 bp, Homo sapiens
aaggtcttctggatc

SEQ ID NO: 345117 - DNA, 15 bp, Homo sapiens
caaggtcttctggat

SEQ ID NO: 345118 - DNA, 15 bp, Homo sapiens
acaaggtcttctgga

SEQ ID NO: 345119 - DNA, 15 bp, Homo sapiens
aacaaggtcttctgg

SEQ ID NO: 345120 - DNA, 15 bp, Homo sapiens
aaacaaggtcttctg

SEQ ID NO: 345121 - DNA, 15 bp, Homo sapiens
gaaacaaggtcttct

SEQ ID NO: 345122 - DNA, 15 bp, Homo sapiens
ggaaacaaggtcttc

SEQ ID NO: 345123 - DNA, 15 bp, Homo sapiens
gggaaacaaggtctt

SEQ ID NO: 345124 - DNA, 15 bp, Homo sapiens
tgggaaacaaggtct

SEQ ID NO: 345125 - DNA, 15 bp, Homo sapiens
ttgggaaacaaggtc

SEQ ID NO: 345126 - DNA, 15 bp, Homo sapiens
attgggaaacaaggt

SEQ ID NO: 345127 - DNA, 15 bp, Homo sapiens
cattgggaaacaagg

SEQ ID NO: 345128 - DNA, 15 bp, Homo sapiens
acattgggaaacaag

SEQ ID NO: 345129 - DNA, 15 bp, Homo sapiens
cacattgggaaacaa

SEQ ID NO: 345130 - DNA, 15 bp, Homo sapiens
gcacattgggaaaca

SEQ ID NO: 345131 - DNA, 15 bp, Homo sapiens
tgcacattgggaaac

SEQ ID NO: 345132 - DNA, 15 bp, Homo sapiens
ctgcacattgggaaa

SEQ ID NO: 345133 - DNA, 15 bp, Homo sapiens
actgcacattgggaa

SEQ ID NO: 345134 - DNA, 15 bp, Homo sapiens
cactgcacattggga

SEQ ID NO: 345135 - DNA, 15 bp, Homo sapiens
acactgcacattggg

SEQ ID NO: 345136 - DNA, 15 bp, Homo sapiens
aacactgcacattgg

SEQ ID NO: 345137 - DNA, 15 bp, Homo sapiens
aaacactgcacattg

SEQ ID NO: 345138 - DNA, 15 bp, Homo sapiens
caaacactgcacatt

SEQ ID NO: 345139 - DNA, 15 bp, Homo sapiens
acaaacactgcacat

SEQ ID NO: 345140 - DNA, 15 bp, Homo sapiens
tacaaacactgcaca

SEQ ID NO: 345141 - DNA, 15 bp, Homo sapiens
atacaaacactgcac

SEQ ID NO: 345142 - DNA, 15 bp, Homo sapiens
gatacaaacactgca

SEQ ID NO: 345143 - DNA, 15 bp, Homo sapiens
ggatacaaacactgc

SEQ ID NO: 345144 - DNA, 15 bp, Homo sapiens
cggatacaaacactg

SEQ ID NO: 345145 - DNA, 15 bp, Homo sapiens
acggatacaaacact

SEQ ID NO: 345146 - DNA, 15 bp, Homo sapiens
tacggatacaaacac

SEQ ID NO: 345147 - DNA, 15 bp, Homo sapiens
atacggatacaaaca

SEQ ID NO: 345148 - DNA, 15 bp, Homo sapiens
gatacggatacaaac

SEQ ID NO: 345149 - DNA, 15 bp, Homo sapiens
agatacggatacaaa

SEQ ID NO: 345150 - DNA, 15 bp, Homo sapiens
tagatacggatacaa

SEQ ID NO: 345151 - DNA, 15 bp, Homo sapiens
gtagatacggataca

SEQ ID NO: 345152 - DNA, 15 bp, Homo sapiens
agtagatacggatac

SEQ ID NO: 345153 - DNA, 15 bp, Homo sapiens
aagtagatacggata

SEQ ID NO: 345154 - DNA, 15 bp, Homo sapiens
gaagtagatacggat

SEQ ID NO: 345155 - DNA, 15 bp, Homo sapiens
tgaagtagatacgga

SEQ ID NO: 345156 - DNA, 15 bp, Homo sapiens
ttgaagtagatacgg

SEQ ID NO: 345157 - DNA, 15 bp, Homo sapiens
attgaagtagatacg

SEQ ID NO: 345158 - DNA, 15 bp, Homo sapiens
aattgaagtagatac

SEQ ID NO: 345159 - DNA, 15 bp, Homo sapiens
caattgaagtagata

SEQ ID NO: 345160 - DNA, 15 bp, Homo sapiens
gcaattgaagtagat

SEQ ID NO: 345161 - DNA, 15 bp, Homo sapiens
tgcaattgaagtaga

SEQ ID NO: 345162 - DNA, 15 bp, Homo sapiens
atgcaattgaagtag

SEQ ID NO: 345163 - DNA, 15 bp, Homo sapiens
catgcaattgaagta

SEQ ID NO: 345164 - DNA, 15 bp, Homo sapiens
acatgcaattgaagt

SEQ ID NO: 345165 - DNA, 15 bp, Homo sapiens
cacatgcaattgaag

SEQ ID NO: 345166 - DNA, 15 bp, Homo sapiens
gcacatgcaattgaa

SEQ ID NO: 345167 - DNA, 15 bp, Homo sapiens
ggcacatgcaattga

SEQ ID NO: 345168 - DNA, 15 bp, Homo sapiens
tggcacatgcaattg

SEQ ID NO: 345169 - DNA, 15 bp, Homo sapiens
ttggcacatgcaatt

SEQ ID NO: 345170 - DNA, 15 bp, Homo sapiens
gttggcacatgcaat

SEQ ID NO: 345171 - DNA, 15 bp, Homo sapiens
ggttggcacatgcaa

SEQ ID NO: 345172 - DNA, 15 bp, Homo sapiens
aggttggcacatgca

SEQ ID NO: 345173 - DNA, 15 bp, Homo sapiens
caggttggcacatgc

SEQ ID NO: 345174 - DNA, 15 bp, Homo sapiens
tcaggttggcacatg

SEQ ID NO: 345175 - DNA, 15 bp, Homo sapiens
gtcaggttggcacat

SEQ ID NO: 345176 - DNA, 15 bp, Homo sapiens
tgtcaggttggcaca

SEQ ID NO: 345177 - DNA, 15 bp, Homo sapiens
atgtcaggttggcac

SEQ ID NO: 345178 - DNA, 15 bp, Homo sapiens
aatgtcaggttggca

SEQ ID NO: 345179 - DNA, 15 bp, Homo sapiens
gaatgtcaggttggc

SEQ ID NO: 345180 - DNA, 15 bp, Homo sapiens
ggaatgtcaggttgg

SEQ ID NO: 345181 - DNA, 15 bp, Homo sapiens
gggaatgtcaggttg

SEQ ID NO: 345182 - DNA, 15 bp, Homo sapiens
tgggaatgtcaggtt

SEQ ID NO: 345183 - DNA, 15 bp, Homo sapiens
ctgggaatgtcaggt

SEQ ID NO: 345184 - DNA, 15 bp, Homo sapiens
cctgggaatgtcagg

SEQ ID NO: 345185 - DNA, 15 bp, Homo sapiens
ccctgggaatgtcag

SEQ ID NO: 345186 - DNA, 15 bp, Homo sapiens
cccctgggaatgtca

SEQ ID NO: 345187 - DNA, 15 bp, Homo sapiens
gcccctgggaatgtc

SEQ ID NO: 345188 - DNA, 15 bp, Homo sapiens
ggcccctgggaatgt

SEQ ID NO: 345189 - DNA, 15 bp, Homo sapiens
gggcccctgggaatg

SEQ ID NO: 345190 - DNA, 15 bp, Homo sapiens
agggcccctgggaat

SEQ ID NO: 345191 - DNA, 15 bp, Homo sapiens
gagggcccctgggaa

SEQ ID NO: 345192 - DNA, 15 bp, Homo sapiens
agagggcccctggga

SEQ ID NO: 345193 - DNA, 15 bp, Homo sapiens
cagagggcccctggg

SEQ ID NO: 345194 - DNA, 15 bp, Homo sapiens
ccagagggcccctgg

SEQ ID NO: 345195 - DNA, 15 bp, Homo sapiens
tccagagggcccctg

SEQ ID NO: 345196 - DNA, 15 bp, Homo sapiens
atccagagggcccct

SEQ ID NO: 345197 - DNA, 15 bp, Homo sapiens
tatccagagggcccc

SEQ ID NO: 345198 - DNA, 15 bp, Homo sapiens
ctatccagagggccc

SEQ ID NO: 345199 - DNA, 15 bp, Homo sapiens
gctatccagagggcc

SEQ ID NO: 345200 - DNA, 15 bp, Homo sapiens
agctatccagagggc

SEQ ID NO: 345201 - DNA, 15 bp, Homo sapiens
cagctatccagaggg

SEQ ID NO: 345202 - DNA, 15 bp, Homo sapiens
tcagctatccagagg

SEQ ID NO: 345203 - DNA, 15 bp, Homo sapiens
ttcagctatccagag

SEQ ID NO: 345204 - DNA, 15 bp, Homo sapiens
cttcagctatccaga

SEQ ID NO: 345205 - DNA, 15 bp, Homo sapiens
tcttcagctatccag

SEQ ID NO: 345206 - DNA, 15 bp, Homo sapiens
ctcttcagctatcca

SEQ ID NO: 345207 - DNA, 15 bp, Homo sapiens
cctcttcagctatcc

SEQ ID NO: 345208 - DNA, 15 bp, Homo sapiens
ccctcttcagctatc

SEQ ID NO: 345209 - DNA, 15 bp, Homo sapiens
cccctcttcagctat

SEQ ID NO: 345210 - DNA, 15 bp, Homo sapiens
gcccctcttcagcta

SEQ ID NO: 345211 - DNA, 15 bp, Homo sapiens
agcccctcttcagct

SEQ ID NO: 345212 - DNA, 15 bp, Homo sapiens
cagcccctcttcagc

SEQ ID NO: 345213 - DNA, 15 bp, Homo sapiens
ccagcccctcttcag

SEQ ID NO: 345214 - DNA, 15 bp, Homo sapiens
accagcccctcttca

SEQ ID NO: 345215 - DNA, 15 bp, Homo sapiens
caccagcccctcttc

SEQ ID NO: 345216 - DNA, 15 bp, Homo sapiens
gcaccagcccctctt

SEQ ID NO: 345217 - DNA, 15 bp, Homo sapiens
agcaccagcccctct

SEQ ID NO: 345218 - DNA, 15 bp, Homo sapiens
aagcaccagcccctc

SEQ ID NO: 345219 - DNA, 15 bp, Homo sapiens
aaagcaccagcccct

SEQ ID NO: 345220 - DNA, 15 bp, Homo sapiens
caaagcaccagcccc

SEQ ID NO: 345221 - DNA, 15 bp, Homo sapiens
ccaaagcaccagccc

SEQ ID NO: 345222 - DNA, 15 bp, Homo sapiens
cccaaagcaccagcc

SEQ ID NO: 345223 - DNA, 15 bp, Homo sapiens
acccaaagcaccagc

SEQ ID NO: 345224 - DNA, 15 bp, Homo sapiens
cacccaaagcaccag

SEQ ID NO: 345225 - DNA, 15 bp, Homo sapiens
ccacccaaagcacca

SEQ ID NO: 345226 - DNA, 15 bp, Homo sapiens
cccacccaaagcacc

SEQ ID NO: 345227 - DNA, 15 bp, Homo sapiens
ccccacccaaagcac

SEQ ID NO: 345228 - DNA, 15 bp, Homo sapiens
accccacccaaagca

SEQ ID NO: 345229 - DNA, 15 bp, Homo sapiens
aaccccacccaaagc

SEQ ID NO: 345230 - DNA, 15 bp, Homo sapiens
caaccccacccaaag

SEQ ID NO: 345231 - DNA, 15 bp, Homo sapiens
ccaaccccacccaaa

SEQ ID NO: 345232 - DNA, 15 bp, Homo sapiens
cccaaccccacccaa

SEQ ID NO: 345233 - DNA, 15 bp, Homo sapiens
acccaaccccaccca

SEQ ID NO: 345234 - DNA, 15 bp, Homo sapiens
aacccaaccccaccc

SEQ ID NO: 345235 - DNA, 15 bp, Homo sapiens
gaacccaaccccacc

SEQ ID NO: 345236 - DNA, 15 bp, Homo sapiens
tgaacccaaccccac

SEQ ID NO: 345237 - DNA, 15 bp, Homo sapiens
ctgaacccaacccca

SEQ ID NO: 345238 - DNA, 15 bp, Homo sapiens
cctgaacccaacccc

SEQ ID NO: 345239 - DNA, 15 bp, Homo sapiens
ccctgaacccaaccc

SEQ ID NO: 345240 - DNA, 15 bp, Homo sapiens
cccctgaacccaacc

SEQ ID NO: 345241 - DNA, 15 bp, Homo sapiens
ccccctgaacccaac

SEQ ID NO: 345242 - DNA, 15 bp, Homo sapiens
tccccctgaacccaa

SEQ ID NO: 345243 - DNA, 15 bp, Homo sapiens
ttccccctgaaccca

SEQ ID NO: 345244 - DNA, 15 bp, Homo sapiens
attccccctgaaccc

SEQ ID NO: 345245 - DNA, 15 bp, Homo sapiens
cattccccctgaacc

SEQ ID NO: 345246 - DNA, 15 bp, Homo sapiens
tcattccccctgaac

SEQ ID NO: 345247 - DNA, 15 bp, Homo sapiens
atcattccccctgaa

SEQ ID NO: 345248 - DNA, 15 bp, Homo sapiens
catcattccccctga

SEQ ID NO: 345249 - DNA, 15 bp, Homo sapiens
tcatcattccccctg

SEQ ID NO: 345250 - DNA, 15 bp, Homo sapiens
gtcatcattccccct

SEQ ID NO: 345251 - DNA, 15 bp, Homo sapiens
tgtcatcattccccc

SEQ ID NO: 345252 - DNA, 15 bp, Homo sapiens
ctgtcatcattcccc

SEQ ID NO: 345253 - DNA, 15 bp, Homo sapiens
actgtcatcattccc

SEQ ID NO: 345254 - DNA, 15 bp, Homo sapiens
aactgtcatcattcc

SEQ ID NO: 345255 - DNA, 15 bp, Homo sapiens
caactgtcatcattc

SEQ ID NO: 345256 - DNA, 15 bp, Homo sapiens
gcaactgtcatcatt

SEQ ID NO: 345257 - DNA, 15 bp, Homo sapiens
agcaactgtcatcat

SEQ ID NO: 345258 - DNA, 15 bp, Homo sapiens
aagcaactgtcatca

SEQ ID NO: 345259 - DNA, 15 bp, Homo sapiens
gaagcaactgtcatc

SEQ ID NO: 345260 - DNA, 15 bp, Homo sapiens
agaagcaactgtcat

SEQ ID NO: 345261 - DNA, 15 bp, Homo sapiens
aagaagcaactgtca

SEQ ID NO: 345262 - DNA, 15 bp, Homo sapiens
aaagaagcaactgtc

SEQ ID NO: 345263 - DNA, 15 bp, Homo sapiens
gaaagaagcaactgt

SEQ ID NO: 345264 - DNA, 15 bp, Homo sapiens
tgaaagaagcaactg

SEQ ID NO: 345265 - DNA, 15 bp, Homo sapiens
atgaaagaagcaact

SEQ ID NO: 345266 - DNA, 15 bp, Homo sapiens
gatgaaagaagcaac

SEQ ID NO: 345267 - DNA, 15 bp, Homo sapiens
ggatgaaagaagcaa

SEQ ID NO: 345268 - DNA, 15 bp, Homo sapiens
aggatgaaagaagca

SEQ ID NO: 345269 - DNA, 15 bp, Homo sapiens
gaggatgaaagaagc

SEQ ID NO: 345270 - DNA, 15 bp, Homo sapiens
ggaggatgaaagaag

SEQ ID NO: 345271 - DNA, 15 bp, Homo sapiens
gggaggatgaaagaa

SEQ ID NO: 345272 - DNA, 15 bp, Homo sapiens
agggaggatgaaaga

SEQ ID NO: 345273 - DNA, 15 bp, Homo sapiens
gagggaggatgaaag

SEQ ID NO: 345274 - DNA, 15 bp, Homo sapiens
tgagggaggatgaaa

SEQ ID NO: 345275 - DNA, 15 bp, Homo sapiens
gtgagggaggatgaa

SEQ ID NO: 345276 - DNA, 15 bp, Homo sapiens
ggtgagggaggatga

SEQ ID NO: 345277 - DNA, 15 bp, Homo sapiens
aggtgagggaggatg

SEQ ID NO: 345278 - DNA, 15 bp, Homo sapiens
caggtgagggaggat

SEQ ID NO: 345279 - DNA, 15 bp, Homo sapiens
tcaggtgagggagga

SEQ ID NO: 345280 - DNA, 15 bp, Homo sapiens
gtcaggtgagggagg

SEQ ID NO: 345281 - DNA, 15 bp, Homo sapiens
agtcaggtgagggag

SEQ ID NO: 345282 - DNA, 15 bp, Homo sapiens
aagtcaggtgaggga

SEQ ID NO: 345283 - DNA, 15 bp, Homo sapiens
caagtcaggtgaggg

SEQ ID NO: 345284 - DNA, 15 bp, Homo sapiens
acaagtcaggtgagg

SEQ ID NO: 345285 - DNA, 15 bp, Homo sapiens
cacaagtcaggtgag

SEQ ID NO: 345286 - DNA, 15 bp, Homo sapiens
ccacaagtcaggtga

SEQ ID NO: 345287 - DNA, 15 bp, Homo sapiens
cccacaagtcaggtg

SEQ ID NO: 345288 - DNA, 15 bp, Homo sapiens
ccccacaagtcaggt

SEQ ID NO: 345289 - DNA, 15 bp, Homo sapiens
accccacaagtcagg

SEQ ID NO: 345290 - DNA, 15 bp, Homo sapiens
caccccacaagtcag

SEQ ID NO: 345291 - DNA, 15 bp, Homo sapiens
tcaccccacaagtca

SEQ ID NO: 345292 - DNA, 15 bp, Homo sapiens
ctcaccccacaagtc

SEQ ID NO: 345293 - DNA, 15 bp, Homo sapiens
actcaccccacaagt

SEQ ID NO: 345294 - DNA, 15 bp, Homo sapiens
gactcaccccacaag

SEQ ID NO: 345295 - DNA, 15 bp, Homo sapiens
ggactcaccccacaa

SEQ ID NO: 345296 - DNA, 15 bp, Homo sapiens
aggactcaccccaca

SEQ ID NO: 345297 - DNA, 15 bp, Homo sapiens
gaggactcaccccac

SEQ ID NO: 345298 - DNA, 15 bp, Homo sapiens
agaggactcacccca

SEQ ID NO: 345299 - DNA, 15 bp, Homo sapiens
aagaggactcacccc

SEQ ID NO: 345300 - DNA, 15 bp, Homo sapiens
gaagaggactcaccc

SEQ ID NO: 345301 - DNA, 15 bp, Homo sapiens
tgaagaggactcacc

SEQ ID NO: 345302 - DNA, 15 bp, Homo sapiens
ttgaagaggactcac

SEQ ID NO: 345303 - DNA, 15 bp, Homo sapiens
gttgaagaggactca

SEQ ID NO: 345304 - DNA, 15 bp, Homo sapiens
tgttgaagaggactc

SEQ ID NO: 345305 - DNA, 15 bp, Homo sapiens
ctgttgaagaggact

SEQ ID NO: 345306 - DNA, 15 bp, Homo sapiens
gctgttgaagaggac

SEQ ID NO: 345307 - DNA, 15 bp, Homo sapiens
ggctgttgaagagga

SEQ ID NO: 345308 - DNA, 15 bp, Homo sapiens
gggctgttgaagagg

SEQ ID NO: 345309 - DNA, 15 bp, Homo sapiens
ggggctgttgaagag

SEQ ID NO: 345310 - DNA, 15 bp, Homo sapiens
tggggctgttgaaga

SEQ ID NO: 345311 - DNA, 15 bp, Homo sapiens
ttggggctgttgaag

SEQ ID NO: 345312 - DNA, 15 bp, Homo sapiens
tttggggctgttgaa

SEQ ID NO: 345313 - DNA, 15 bp, Homo sapiens
gtttggggctgttga

SEQ ID NO: 345314 - DNA, 15 bp, Homo sapiens
ggtttggggctgttg

SEQ ID NO: 345315 - DNA, 15 bp, Homo sapiens
aggtttggggctgtt

SEQ ID NO: 345316 - DNA, 15 bp, Homo sapiens
gaggtttggggctgt

SEQ ID NO: 345317 - DNA, 15 bp, Homo sapiens
ggaggtttggggctg

SEQ ID NO: 345318 - DNA, 15 bp, Homo sapiens
aggaggtttggggct

SEQ ID NO: 345319 - DNA, 15 bp, Homo sapiens
gaggaggtttggggc

SEQ ID NO: 345320 - DNA, 15 bp, Homo sapiens
agaggaggtttgggg

SEQ ID NO: 345321 - DNA, 15 bp, Homo sapiens
aagaggaggtttggg

SEQ ID NO: 345322 - DNA, 15 bp, Homo sapiens
aaagaggaggtttgg

SEQ ID NO: 345323 - DNA, 15 bp, Homo sapiens
caaagaggaggtttg

SEQ ID NO: 345324 - DNA, 15 bp, Homo sapiens
acaaagaggaggttt

SEQ ID NO: 345325 - DNA, 15 bp, Homo sapiens
tacaaagaggaggtt

SEQ ID NO: 345326 - DNA, 15 bp, Homo sapiens
atacaaagaggaggt

SEQ ID NO: 345327 - DNA, 15 bp, Homo sapiens
aatacaaagaggagg

SEQ ID NO: 345328 - DNA, 15 bp, Homo sapiens
aaatacaaagaggag

SEQ ID NO: 345329 - DNA, 15 bp, Homo sapiens
aaaatacaaagagga

SEQ ID NO: 345330 - DNA, 15 bp, Homo sapiens
gaaaatacaaagagg

SEQ ID NO: 345331 - DNA, 15 bp, Homo sapiens
agaaaatacaaagag

SEQ ID NO: 345332 - DNA, 15 bp, Homo sapiens
aagaaaatacaaaga

SEQ ID NO: 345333 - DNA, 15 bp, Homo sapiens
gaagaaaatacaaag

SEQ ID NO: 345334 - DNA, 15 bp, Homo sapiens
ggaagaaaatacaaa

SEQ ID NO: 345335 - DNA, 15 bp, Homo sapiens
aggaagaaaatacaa

SEQ ID NO: 345336 - DNA, 15 bp, Homo sapiens
caggaagaaaataca

SEQ ID NO: 345337 - DNA, 15 bp, Homo sapiens
tcaggaagaaaatac

SEQ ID NO: 345338 - DNA, 15 bp, Homo sapiens
ttcaggaagaaaata

SEQ ID NO: 345339 - DNA, 15 bp, Homo sapiens
cttcaggaagaaaat

SEQ ID NO: 345340 - DNA, 15 bp, Homo sapiens
ccttcaggaagaaaa

SEQ ID NO: 345341 - DNA, 15 bp, Homo sapiens
accttcaggaagaaa

SEQ ID NO: 345342 - DNA, 15 bp, Homo sapiens
caccttcaggaagaa

SEQ ID NO: 345343 - DNA, 15 bp, Homo sapiens
gcaccttcaggaaga

SEQ ID NO: 345344 - DNA, 15 bp, Homo sapiens
tgcaccttcaggaag

SEQ ID NO: 345345 - DNA, 15 bp, Homo sapiens
ttgcaccttcaggaa

SEQ ID NO: 345346 - DNA, 15 bp, Homo sapiens
tttgcaccttcagga

SEQ ID NO: 345347 - DNA, 15 bp, Homo sapiens
gtttgcaccttcagg

SEQ ID NO: 345348 - DNA, 15 bp, Homo sapiens
agtttgcaccttcag

SEQ ID NO: 345349 - DNA, 15 bp, Homo sapiens
gagtttgcaccttca

SEQ ID NO: 345350 - DNA, 15 bp, Homo sapiens
agagtttgcaccttc

SEQ ID NO: 345351 - DNA, 15 bp, Homo sapiens
tagagtttgcacctt

SEQ ID NO: 345352 - DNA, 15 bp, Homo sapiens
atagagtttgcacct

SEQ ID NO: 345353 - DNA, 15 bp, Homo sapiens
catagagtttgcacc

SEQ ID NO: 345354 - DNA, 15 bp, Homo sapiens
tcatagagtttgcac

SEQ ID NO: 345355 - DNA, 15 bp, Homo sapiens
gtcatagagtttgca

SEQ ID NO: 345356 - DNA, 15 bp, Homo sapiens
tgtcatagagtttgc

SEQ ID NO: 345357 - DNA, 15 bp, Homo sapiens
ctgtcatagagtttg

SEQ ID NO: 345358 - DNA, 15 bp, Homo sapiens
cctgtcatagagttt

SEQ ID NO: 345359 - DNA, 15 bp, Homo sapiens
acctgtcatagagtt

SEQ ID NO: 345360 - DNA, 15 bp, Homo sapiens
aacctgtcatagagt

SEQ ID NO: 345361 - DNA, 15 bp, Homo sapiens
aaacctgtcatagag

SEQ ID NO: 345362 - DNA, 15 bp, Homo sapiens
gaaacctgtcataga

SEQ ID NO: 345363 - DNA, 15 bp, Homo sapiens
ggaaacctgtcatag

SEQ ID NO: 345364 - DNA, 15 bp, Homo sapiens
tggaaacctgtcata

SEQ ID NO: 345365 - DNA, 15 bp, Homo sapiens
atggaaacctgtcat

SEQ ID NO: 345366 - DNA, 15 bp, Homo sapiens
catggaaacctgtca

SEQ ID NO: 345367 - DNA, 15 bp, Homo sapiens
acatggaaacctgtc

SEQ ID NO: 345368 - DNA, 15 bp, Homo sapiens
aacatggaaacctgt

SEQ ID NO: 345369 - DNA, 15 bp, Homo sapiens
aaacatggaaacctg

SEQ ID NO: 345370 - DNA, 15 bp, Homo sapiens
taaacatggaaacct

SEQ ID NO: 345371 - DNA, 15 bp, Homo sapiens
ttaaacatggaaacc

SEQ ID NO: 345372 - DNA, 15 bp, Homo sapiens
attaaacatggaaac

SEQ ID NO: 345373 - DNA, 15 bp, Homo sapiens
aattaaacatggaaa

SEQ ID NO: 345374 - DNA, 15 bp, Homo sapiens
taattaaacatggaa

SEQ ID NO: 345375 - DNA, 15 bp, Homo sapiens
ttaattaaacatgga

SEQ ID NO: 345376 - DNA, 15 bp, Homo sapiens
gttaattaaacatgg

SEQ ID NO: 345377 - DNA, 15 bp, Homo sapiens
tgttaattaaacatg

SEQ ID NO: 345378 - DNA, 15 bp, Homo sapiens
gtgttaattaaacat

SEQ ID NO: 345379 - DNA, 15 bp, Homo sapiens
ggtgttaattaaaca

SEQ ID NO: 345380 - DNA, 15 bp, Homo sapiens
tggtgttaattaaac

SEQ ID NO: 345381 - DNA, 15 bp, Homo sapiens
ctggtgttaattaaa

SEQ ID NO: 345382 - DNA, 15 bp, Homo sapiens
gctggtgttaattaa

SEQ ID NO: 345383 - DNA, 15 bp, Homo sapiens
tgctggtgttaatta

SEQ ID NO: 345384 - DNA, 15 bp, Homo sapiens
ttgctggtgttaatt

SEQ ID NO: 345385 - DNA, 15 bp, Homo sapiens
cttgctggtgttaat

SEQ ID NO: 345386 - DNA, 15 bp, Homo sapiens
acttgctggtgttaa

SEQ ID NO: 345387 - DNA, 15 bp, Homo sapiens
tacttgctggtgtta

SEQ ID NO: 345388 - DNA, 15 bp, Homo sapiens
ttacttgctggtgtt

SEQ ID NO: 345389 - DNA, 15 bp, Homo sapiens
attacttgctggtgt

SEQ ID NO: 345390 - DNA, 15 bp, Homo sapiens
cattacttgctggtg

SEQ ID NO: 345391 - DNA, 15 bp, Homo sapiens
acattacttgctggt

SEQ ID NO: 345392 - DNA, 15 bp, Homo sapiens
aacattacttgctgg

SEQ ID NO: 345393 - DNA, 15 bp, Homo sapiens
aaacattacttgctg

SEQ ID NO: 345394 - DNA, 15 bp, Homo sapiens
gaaacattacttgct

SEQ ID NO: 345395 - DNA, 15 bp, Homo sapiens
ggaaacattacttgc

SEQ ID NO: 345396 - DNA, 15 bp, Homo sapiens
tggaaacattacttg

SEQ ID NO: 345397 - DNA, 15 bp, Homo sapiens
ctggaaacattactt

SEQ ID NO: 345398 - DNA, 15 bp, Homo sapiens
actggaaacattact

SEQ ID NO: 345399 - DNA, 15 bp, Homo sapiens
tactggaaacattac

SEQ ID NO: 345400 - DNA, 15 bp, Homo sapiens
ttactggaaacatta

SEQ ID NO: 345401 - DNA, 15 bp, Homo sapiens
tttactggaaacatt

SEQ ID NO: 345402 - DNA, 15 bp, Homo sapiens
ctttactggaaacat

SEQ ID NO: 345403 - DNA, 15 bp, Homo sapiens
cctttactggaaaca

SEQ ID NO: 345404 - DNA, 15 bp, Homo sapiens
ccctttactggaaac

SEQ ID NO: 345405 - DNA, 15 bp, Homo sapiens
cccctttactggaaa

SEQ ID NO: 345406 - DNA, 15 bp, Homo sapiens
ccccctttactggaa

SEQ ID NO: 345407 - DNA, 15 bp, Homo sapiens
gccccctttactgga

SEQ ID NO: 345408 - DNA, 15 bp, Homo sapiens
agccccctttactgg

SEQ ID NO: 345409 - DNA, 15 bp, Homo sapiens
cagccccctttactg

SEQ ID NO: 345410 - DNA, 15 bp, Homo sapiens
tcagccccctttact

SEQ ID NO: 345411 - DNA, 15 bp, Homo sapiens
atcagccccctttac

SEQ ID NO: 345412 - DNA, 15 bp, Homo sapiens
aatcagcccccttta

SEQ ID NO: 345413 - DNA, 15 bp, Homo sapiens
aaatcagcccccttt

SEQ ID NO: 345414 - DNA, 15 bp, Homo sapiens
taaatcagccccctt

SEQ ID NO: 345415 - DNA, 15 bp, Homo sapiens
ttaaatcagccccct

SEQ ID NO: 345416 - DNA, 15 bp, Homo sapiens
attaaatcagccccc

SEQ ID NO: 345417 - DNA, 15 bp, Homo sapiens
cattaaatcagcccc

SEQ ID NO: 345418 - DNA, 15 bp, Homo sapiens
ccattaaatcagccc

SEQ ID NO: 345419 - DNA, 15 bp, Homo sapiens
gccattaaatcagcc

SEQ ID NO: 345420 - DNA, 15 bp, Homo sapiens
tgccattaaatcagc

SEQ ID NO: 345421 - DNA, 15 bp, Homo sapiens
ctgccattaaatcag

SEQ ID NO: 345422 - DNA, 15 bp, Homo sapiens
cctgccattaaatca

SEQ ID NO: 345423 - DNA, 15 bp, Homo sapiens
tcctgccattaaatc

SEQ ID NO: 345424 - DNA, 15 bp, Homo sapiens
ttcctgccattaaat

SEQ ID NO: 345425 - DNA, 15 bp, Homo sapiens
gttcctgccattaaa

SEQ ID NO: 345426 - DNA, 15 bp, Homo sapiens
tgttcctgccattaa

SEQ ID NO: 345427 - DNA, 15 bp, Homo sapiens
ttgttcctgccatta

SEQ ID NO: 345428 - DNA, 15 bp, Homo sapiens
attgttcctgccatt

SEQ ID NO: 345429 - DNA, 15 bp, Homo sapiens
cattgttcctgccat

SEQ ID NO: 345430 - DNA, 15 bp, Homo sapiens
acattgttcctgcca

SEQ ID NO: 345431 - DNA, 15 bp, Homo sapiens
tacattgttcctgcc

SEQ ID NO: 345432 - DNA, 15 bp, Homo sapiens
atacattgttcctgc

SEQ ID NO: 345433 - DNA, 15 bp, Homo sapiens
aatacattgttcctg

SEQ ID NO: 345434 - DNA, 15 bp, Homo sapiens
aaatacattgttcct

SEQ ID NO: 345435 - DNA, 15 bp, Homo sapiens
gaaatacattgttcc

SEQ ID NO: 345436 - DNA, 15 bp, Homo sapiens
ggaaatacattgttc

SEQ ID NO: 345437 - DNA, 15 bp, Homo sapiens
gggaaatacattgtt

SEQ ID NO: 345438 - DNA, 15 bp, Homo sapiens
agggaaatacattgt

SEQ ID NO: 345439 - DNA, 15 bp, Homo sapiens
gagggaaatacattg

SEQ ID NO: 345440 - DNA, 15 bp, Homo sapiens
agagggaaatacatt

SEQ ID NO: 345441 - DNA, 15 bp, Homo sapiens
cagagggaaatacat

SEQ ID NO: 345442 - DNA, 15 bp, Homo sapiens
ccagagggaaataca

SEQ ID NO: 345443 - DNA, 15 bp, Homo sapiens
cccagagggaaatac

SEQ ID NO: 345444 - DNA, 15 bp, Homo sapiens
acccagagggaaata

SEQ ID NO: 345445 - DNA, 15 bp, Homo sapiens
tacccagagggaaat

SEQ ID NO: 345446 - DNA, 15 bp, Homo sapiens
ctacccagagggaaa

SEQ ID NO: 345447 - DNA, 15 bp, Homo sapiens
cctacccagagggaa

SEQ ID NO: 345448 - DNA, 15 bp, Homo sapiens
gcctacccagaggga

SEQ ID NO: 345449 - DNA, 15 bp, Homo sapiens
tgcctacccagaggg

SEQ ID NO: 345450 - DNA, 15 bp, Homo sapiens
ctgcctacccagagg

SEQ ID NO: 345451 - DNA, 15 bp, Homo sapiens
tctgcctacccagag

SEQ ID NO: 345452 - DNA, 15 bp, Homo sapiens
ttctgcctacccaga

SEQ ID NO: 345453 - DNA, 15 bp, Homo sapiens
tttctgcctacccag

SEQ ID NO: 345454 - DNA, 15 bp, Homo sapiens
gtttctgcctaccca

SEQ ID NO: 345455 - DNA, 15 bp, Homo sapiens
tgtttctgcctaccc

SEQ ID NO: 345456 - DNA, 15 bp, Homo sapiens
ctgtttctgcctacc

SEQ ID NO: 345457 - DNA, 15 bp, Homo sapiens
actgtttctgcctac

SEQ ID NO: 345458 - DNA, 15 bp, Homo sapiens
aactgtttctgccta

SEQ ID NO: 345459 - DNA, 15 bp, Homo sapiens
caactgtttctgcct

SEQ ID NO: 345460 - DNA, 15 bp, Homo sapiens
ccaactgtttctgcc

SEQ ID NO: 345461 - DNA, 15 bp, Homo sapiens
tccaactgtttctgc

SEQ ID NO: 345462 - DNA, 15 bp, Homo sapiens
gtccaactgtttctg

SEQ ID NO: 345463 - DNA, 15 bp, Homo sapiens
agtccaactgtttct

SEQ ID NO: 345464 - DNA, 15 bp, Homo sapiens
gagtccaactgtttc

SEQ ID NO: 345465 - DNA, 15 bp, Homo sapiens
agagtccaactgttt

SEQ ID NO: 345466 - DNA, 15 bp, Homo sapiens
tagagtccaactgtt

SEQ ID NO: 345467 - DNA, 15 bp, Homo sapiens
ttagagtccaactgt

SEQ ID NO: 345468 - DNA, 15 bp, Homo sapiens
attagagtccaactg

SEQ ID NO: 345469 - DNA, 15 bp, Homo sapiens
aattagagtccaact

SEQ ID NO: 345470 - DNA, 15 bp, Homo sapiens
gaattagagtccaac

SEQ ID NO: 345471 - DNA, 15 bp, Homo sapiens
agaattagagtccaa

SEQ ID NO: 345472 - DNA, 15 bp, Homo sapiens
aagaattagagtcca

SEQ ID NO: 345473 - DNA, 15 bp, Homo sapiens
taagaattagagtcc

SEQ ID NO: 345474 - DNA, 15 bp, Homo sapiens
ttaagaattagagtc

SEQ ID NO: 345475 - DNA, 15 bp, Homo sapiens
cttaagaattagagt

SEQ ID NO: 345476 - DNA, 15 bp, Homo sapiens
tcttaagaattagag

SEQ ID NO: 345477 - DNA, 15 bp, Homo sapiens
ctcttaagaattaga

SEQ ID NO: 345478 - DNA, 15 bp, Homo sapiens
gctcttaagaattag

SEQ ID NO: 345479 - DNA, 15 bp, Homo sapiens
ggctcttaagaatta

SEQ ID NO: 345480 - DNA, 15 bp, Homo sapiens
aggctcttaagaatt

SEQ ID NO: 345481 - DNA, 15 bp, Homo sapiens
aaggctcttaagaat

SEQ ID NO: 345482 - DNA, 15 bp, Homo sapiens
aaaggctcttaagaa

SEQ ID NO: 345483 - DNA, 15 bp, Homo sapiens
caaaggctcttaaga

SEQ ID NO: 345484 - DNA, 15 bp, Homo sapiens
acaaaggctcttaag

SEQ ID NO: 345485 - DNA, 15 bp, Homo sapiens
aacaaaggctcttaa

SEQ ID NO: 345486 - DNA, 15 bp, Homo sapiens
gaacaaaggctctta

SEQ ID NO: 345487 - DNA, 15 bp, Homo sapiens
tgaacaaaggctctt

SEQ ID NO: 345488 - DNA, 15 bp, Homo sapiens
ctgaacaaaggctct

SEQ ID NO: 345489 - DNA, 15 bp, Homo sapiens
cctgaacaaaggctc

SEQ ID NO: 345490 - DNA, 15 bp, Homo sapiens
tcctgaacaaaggct

SEQ ID NO: 345491 - DNA, 15 bp, Homo sapiens
ttcctgaacaaaggc

SEQ ID NO: 345492 - DNA, 15 bp, Homo sapiens
gttcctgaacaaagg

SEQ ID NO: 345493 - DNA, 15 bp, Homo sapiens
tgttcctgaacaaag

SEQ ID NO: 345494 - DNA, 15 bp, Homo sapiens
atgttcctgaacaaa

SEQ ID NO: 345495 - DNA, 15 bp, Homo sapiens
gatgttcctgaacaa

SEQ ID NO: 345496 - DNA, 15 bp, Homo sapiens
agatgttcctgaaca

SEQ ID NO: 345497 - DNA, 15 bp, Homo sapiens
cagatgttcctgaac

SEQ ID NO: 345498 - DNA, 15 bp, Homo sapiens
ccagatgttcctgaa

SEQ ID NO: 345499 - DNA, 15 bp, Homo sapiens
cccagatgttcctga

SEQ ID NO: 345500 - DNA, 15 bp, Homo sapiens
acccagatgttcctg

SEQ ID NO: 345501 - DNA, 15 bp, Homo sapiens
aacccagatgttcct

SEQ ID NO: 345502 - DNA, 15 bp, Homo sapiens
caacccagatgttcc

SEQ ID NO: 345503 - DNA, 15 bp, Homo sapiens
tcaacccagatgttc

SEQ ID NO: 345504 - DNA, 15 bp, Homo sapiens
ttcaacccagatgtt

SEQ ID NO: 345505 - DNA, 15 bp, Homo sapiens
tttcaacccagatgt

SEQ ID NO: 345506 - DNA, 15 bp, Homo sapiens
gtttcaacccagatg

SEQ ID NO: 345507 - DNA, 15 bp, Homo sapiens
agtttcaacccagat

SEQ ID NO: 345508 - DNA, 15 bp, Homo sapiens
tagtttcaacccaga

SEQ ID NO: 345509 - DNA, 15 bp, Homo sapiens
gtagtttcaacccag

SEQ ID NO: 345510 - DNA, 15 bp, Homo sapiens
agtagtttcaaccca

SEQ ID NO: 345511 - DNA, 15 bp, Homo sapiens
cagtagtttcaaccc

SEQ ID NO: 345512 - DNA, 15 bp, Homo sapiens
acagtagtttcaacc

SEQ ID NO: 345513 - DNA, 15 bp, Homo sapiens
tacagtagtttcaac

SEQ ID NO: 345514 - DNA, 15 bp, Homo sapiens
ctacagtagtttcaa

SEQ ID NO: 345515 - DNA, 15 bp, Homo sapiens
actacagtagtttca

SEQ ID NO: 345516 - DNA, 15 bp, Homo sapiens
aactacagtagtttc

SEQ ID NO: 345517 - DNA, 15 bp, Homo sapiens
taactacagtagttt

SEQ ID NO: 345518 - DNA, 15 bp, Homo sapiens
ttaactacagtagtt

SEQ ID NO: 345519 - DNA, 15 bp, Homo sapiens
gttaactacagtagt

SEQ ID NO: 345520 - DNA, 15 bp, Homo sapiens
tgttaactacagtag

SEQ ID NO: 345521 - DNA, 15 bp, Homo sapiens
ctgttaactacagta

SEQ ID NO: 345522 - DNA, 15 bp, Homo sapiens
tctgttaactacagt

SEQ ID NO: 345523 - DNA, 15 bp, Homo sapiens
atctgttaactacag

SEQ ID NO: 345524 - DNA, 15 bp, Homo sapiens
catctgttaactaca

SEQ ID NO: 345525 - DNA, 15 bp, Homo sapiens
tcatctgttaactac

SEQ ID NO: 345526 - DNA, 15 bp, Homo sapiens
atcatctgttaacta

SEQ ID NO: 345527 - DNA, 15 bp, Homo sapiens
catcatctgttaact

SEQ ID NO: 345528 - DNA, 15 bp, Homo sapiens
acatcatctgttaac

SEQ ID NO: 345529 - DNA, 15 bp, Homo sapiens
aacatcatctgttaa

SEQ ID NO: 345530 - DNA, 15 bp, Homo sapiens
caacatcatctgtta

SEQ ID NO: 345531 - DNA, 15 bp, Homo sapiens
ccaacatcatctgtt

SEQ ID NO: 345532 - DNA, 15 bp, Homo sapiens
gccaacatcatctgt

SEQ ID NO: 345533 - DNA, 15 bp, Homo sapiens
tgccaacatcatctg

SEQ ID NO: 345534 - DNA, 15 bp, Homo sapiens
ctgccaacatcatct

SEQ ID NO: 345535 - DNA, 15 bp, Homo sapiens
actgccaacatcatc

SEQ ID NO: 345536 - DNA, 15 bp, Homo sapiens
tactgccaacatcat

SEQ ID NO: 345537 - DNA, 15 bp, Homo sapiens
ttactgccaacatca

SEQ ID NO: 345538 - DNA, 15 bp, Homo sapiens
tttactgccaacatc

SEQ ID NO: 345539 - DNA, 15 bp, Homo sapiens
ttttactgccaacat

SEQ ID NO: 345540 - DNA, 15 bp, Homo sapiens
tttttactgccaaca

SEQ ID NO: 345541 - DNA, 15 bp, Homo sapiens
ttttttactgccaac

SEQ ID NO: 345542 - DNA, 15 bp, Homo sapiens
tttttttactgccaa

SEQ ID NO: 345543 - DNA, 15 bp, Homo sapiens
ttttttttactgcca

SEQ ID NO: 345544 - DNA, 15 bp, Homo sapiens
tttttttttactgcc

SEQ ID NO: 345545 - DNA, 15 bp, Homo sapiens
cttttttttttttac

SEQ ID NO: 345546 - DNA, 15 bp, Homo sapiens
cctttttttttttta

SEQ ID NO: 345547 - DNA, 15 bp, Homo sapiens
ccctttttttttttt

SEQ ID NO: 345548 - DNA, 15 bp, Homo sapiens
ccccttttttttttt

SEQ ID NO: 345549 - DNA, 15 bp, Homo sapiens
ccccctttttttttt

SEQ ID NO: 345550 - DNA, 15 bp, Homo sapiens
ccccccttttttttt

SEQ ID NO: 345551 - DNA, 15 bp, Homo sapiens
acccccctttttttt

SEQ ID NO: 345552 - DNA, 15 bp, Homo sapiens
aaccccccttttttt

SEQ ID NO: 345553 - DNA, 15 bp, Homo sapiens
caacccccctttttt

SEQ ID NO: 345554 - DNA, 15 bp, Homo sapiens
ccaaccccccttttt

SEQ ID NO: 345555 - DNA, 15 bp, Homo sapiens
cccaacccccctttt

SEQ ID NO: 345556 - DNA, 15 bp, Homo sapiens
gcccaaccccccttt

SEQ ID NO: 345557 - DNA, 15 bp, Homo sapiens
agcccaacccccctt

SEQ ID NO: 345558 - DNA, 15 bp, Homo sapiens
aagcccaacccccct

SEQ ID NO: 345559 - DNA, 15 bp, Homo sapiens
aaagcccaacccccc

SEQ ID NO: 345560 - DNA, 15 bp, Homo sapiens
caaagcccaaccccc

SEQ ID NO: 345561 - DNA, 15 bp, Homo sapiens
acaaagcccaacccc

SEQ ID NO: 345562 - DNA, 15 bp, Homo sapiens
tacaaagcccaaccc

SEQ ID NO: 345563 - DNA, 15 bp, Homo sapiens
atacaaagcccaacc

SEQ ID NO: 345564 - DNA, 15 bp, Homo sapiens
tatacaaagcccaac

SEQ ID NO: 345565 - DNA, 15 bp, Homo sapiens
ttatacaaagcccaa

SEQ ID NO: 345566 - DNA, 15 bp, Homo sapiens
attatacaaagccca

SEQ ID NO: 345567 - DNA, 15 bp, Homo sapiens
cattatacaaagccc

SEQ ID NO: 345568 - DNA, 15 bp, Homo sapiens
acattatacaaagcc

SEQ ID NO: 345569 - DNA, 15 bp, Homo sapiens
gacattatacaaagc

SEQ ID NO: 345570 - DNA, 15 bp, Homo sapiens
cgacattatacaaag

SEQ ID NO: 345571 - DNA, 15 bp, Homo sapiens
acgacattatacaaa

SEQ ID NO: 345572 - DNA, 15 bp, Homo sapiens
aacgacattatacaa

SEQ ID NO: 345573 - DNA, 15 bp, Homo sapiens
caacgacattataca

SEQ ID NO: 345574 - DNA, 15 bp, Homo sapiens
acaacgacattatac

SEQ ID NO: 345575 - DNA, 15 bp, Homo sapiens
gacaacgacattata

SEQ ID NO: 345576 - DNA, 15 bp, Homo sapiens
tgacaacgacattat

SEQ ID NO: 345577 - DNA, 15 bp, Homo sapiens
ttgacaacgacatta

SEQ ID NO: 345578 - DNA, 15 bp, Homo sapiens
tttgacaacgacatt

SEQ ID NO: 345579 - DNA, 15 bp, Homo sapiens
atttgacaacgacat

SEQ ID NO: 345580 - DNA, 15 bp, Homo sapiens
aatttgacaacgaca

SEQ ID NO: 345581 - DNA, 15 bp, Homo sapiens
aaatttgacaacgac

SEQ ID NO: 345582 - DNA, 15 bp, Homo sapiens
caaatttgacaacga

SEQ ID NO: 345583 - DNA, 15 bp, Homo sapiens
ccaaatttgacaacg

SEQ ID NO: 345584 - DNA, 15 bp, Homo sapiens
accaaatttgacaac

SEQ ID NO: 345585 - DNA, 15 bp, Homo sapiens
taccaaatttgacaa

SEQ ID NO: 345586 - DNA, 15 bp, Homo sapiens
ctaccaaatttgaca

SEQ ID NO: 345587 - DNA, 15 bp, Homo sapiens
tctaccaaatttgac

SEQ ID NO: 345588 - DNA, 15 bp, Homo sapiens
gtctaccaaatttga

SEQ ID NO: 345589 - DNA, 15 bp, Homo sapiens
ggtctaccaaatttg

SEQ ID NO: 345590 - DNA, 15 bp, Homo sapiens
aggtctaccaaattt

SEQ ID NO: 345591 - DNA, 15 bp, Homo sapiens
aaggtctaccaaatt

SEQ ID NO: 345592 - DNA, 15 bp, Homo sapiens
aaaggtctaccaaat

SEQ ID NO: 345593 - DNA, 15 bp, Homo sapiens
taaaggtctaccaaa

SEQ ID NO: 345594 - DNA, 15 bp, Homo sapiens
gtaaaggtctaccaa

SEQ ID NO: 345595 - DNA, 15 bp, Homo sapiens
ggtaaaggtctacca

SEQ ID NO: 345596 - DNA, 15 bp, Homo sapiens
aggtaaaggtctacc

SEQ ID NO: 345597 - DNA, 15 bp, Homo sapiens
taggtaaaggtctac

SEQ ID NO: 345598 - DNA, 15 bp, Homo sapiens
ttaggtaaaggtcta

SEQ ID NO: 345599 - DNA, 15 bp, Homo sapiens
attaggtaaaggtct

SEQ ID NO: 345600 - DNA, 15 bp, Homo sapiens
tattaggtaaaggtc

SEQ ID NO: 345601 - DNA, 15 bp, Homo sapiens
ttattaggtaaaggt

SEQ ID NO: 345602 - DNA, 15 bp, Homo sapiens
attattaggtaaagg

SEQ ID NO: 345603 - DNA, 15 bp, Homo sapiens
aattattaggtaaag

SEQ ID NO: 345604 - DNA, 15 bp, Homo sapiens
taattattaggtaaa

SEQ ID NO: 345605 - DNA, 15 bp, Homo sapiens
ataattattaggtaa

SEQ ID NO: 345606 - DNA, 15 bp, Homo sapiens
gataattattaggta

SEQ ID NO: 345607 - DNA, 15 bp, Homo sapiens
tgataattattaggt

SEQ ID NO: 345608 - DNA, 15 bp, Homo sapiens
ttgataattattagg

SEQ ID NO: 345609 - DNA, 15 bp, Homo sapiens
cttgataattattag

SEQ ID NO: 345610 - DNA, 15 bp, Homo sapiens
tcttgataattatta

SEQ ID NO: 345611 - DNA, 15 bp, Homo sapiens
ttcttgataattatt

SEQ ID NO: 345612 - DNA, 15 bp, Homo sapiens
tttcttgataattat

SEQ ID NO: 345613 - DNA, 15 bp, Homo sapiens
ctttcttgataatta

SEQ ID NO: 345614 - DNA, 15 bp, Homo sapiens
gctttcttgataatt

SEQ ID NO: 345615 - DNA, 15 bp, Homo sapiens
tgctttcttgataat

SEQ ID NO: 345616 - DNA, 15 bp, Homo sapiens
ttgctttcttgataa

SEQ ID NO: 345617 - DNA, 15 bp, Homo sapiens
attgctttcttgata

SEQ ID NO: 345618 - DNA, 15 bp, Homo sapiens
gattgctttcttgat

SEQ ID NO: 345619 - DNA, 15 bp, Homo sapiens
agattgctttcttga

SEQ ID NO: 345620 - DNA, 15 bp, Homo sapiens
tagattgctttcttg

SEQ ID NO: 345621 - DNA, 15 bp, Homo sapiens
ttagattgctttctt

SEQ ID NO: 345622 - DNA, 15 bp, Homo sapiens
gttagattgctttct

SEQ ID NO: 345623 - DNA, 15 bp, Homo sapiens
agttagattgctttc

SEQ ID NO: 345624 - DNA, 15 bp, Homo sapiens
aagttagattgcttt

SEQ ID NO: 345625 - DNA, 15 bp, Homo sapiens
caagttagattgctt

SEQ ID NO: 345626 - DNA, 15 bp, Homo sapiens
acaagttagattgct

SEQ ID NO: 345627 - DNA, 15 bp, Homo sapiens
aacaagttagattgc

SEQ ID NO: 345628 - DNA, 15 bp, Homo sapiens
taacaagttagattg

SEQ ID NO: 345629 - DNA, 15 bp, Homo sapiens
ataacaagttagatt

SEQ ID NO: 345630 - DNA, 15 bp, Homo sapiens
aataacaagttagat

SEQ ID NO: 345631 - DNA, 15 bp, Homo sapiens
taataacaagttaga

SEQ ID NO: 345632 - DNA, 15 bp, Homo sapiens
ataataacaagttag

SEQ ID NO: 345633 - DNA, 15 bp, Homo sapiens
tataataacaagtta

SEQ ID NO: 345634 - DNA, 15 bp, Homo sapiens
ttataataacaagtt

SEQ ID NO: 345635 - DNA, 15 bp, Homo sapiens
gttataataacaagt

SEQ ID NO: 345636 - DNA, 15 bp, Homo sapiens
tgttataataacaag

SEQ ID NO: 345637 - DNA, 15 bp, Homo sapiens
ctgttataataacaa

SEQ ID NO: 345638 - DNA, 15 bp, Homo sapiens
actgttataataaca

SEQ ID NO: 345639 - DNA, 15 bp, Homo sapiens
aactgttataataac

SEQ ID NO: 345640 - DNA, 15 bp, Homo sapiens
aaactgttataataa

SEQ ID NO: 345641 - DNA, 15 bp, Homo sapiens
aaaactgttataata

SEQ ID NO: 345642 - DNA, 15 bp, Homo sapiens
taaaactgttataat

SEQ ID NO: 345643 - DNA, 15 bp, Homo sapiens
ataaaactgttataa

SEQ ID NO: 345644 - DNA, 15 bp, Homo sapiens
aataaaactgttata

SEQ ID NO: 345645 - DNA, 15 bp, Homo sapiens
caataaaactgttat

SEQ ID NO: 345646 - DNA, 15 bp, Homo sapiens
gcaataaaactgtta

SEQ ID NO: 345647 - DNA, 15 bp, Homo sapiens
tgcaataaaactgtt

SEQ ID NO: 345648 - DNA, 15 bp, Homo sapiens
ctgcaataaaactgt

SEQ ID NO: 345649 - DNA, 15 bp, Homo sapiens
tctgcaataaaactg

SEQ ID NO: 345650 - DNA, 15 bp, Homo sapiens
atctgcaataaaact

SEQ ID NO: 345651 - DNA, 15 bp, Homo sapiens
aatctgcaataaaac

SEQ ID NO: 345652 - DNA, 15 bp, Homo sapiens
caatctgcaataaaa

SEQ ID NO: 345653 - DNA, 15 bp, Homo sapiens
gcaatctgcaataaa

SEQ ID NO: 345654 - DNA, 15 bp, Homo sapiens
agcaatctgcaataa

SEQ ID NO: 345655 - DNA, 15 bp, Homo sapiens
cagcaatctgcaata

SEQ ID NO: 345656 - DNA, 15 bp, Homo sapiens
ccagcaatctgcaat

SEQ ID NO: 345657 - DNA, 15 bp, Homo sapiens
gccagcaatctgcaa

SEQ ID NO: 345658 - DNA, 15 bp, Homo sapiens
agccagcaatctgca

SEQ ID NO: 345659 - DNA, 15 bp, Homo sapiens
aagccagcaatctgc

SEQ ID NO: 345660 - DNA, 15 bp, Homo sapiens
taagccagcaatctg

SEQ ID NO: 345661 - DNA, 15 bp, Homo sapiens
ttaagccagcaatct

SEQ ID NO: 345662 - DNA, 15 bp, Homo sapiens
cttaagccagcaatc

SEQ ID NO: 345663 - DNA, 15 bp, Homo sapiens
tcttaagccagcaat

SEQ ID NO: 345664 - DNA, 15 bp, Homo sapiens
gtcttaagccagcaa

SEQ ID NO: 345665 - DNA, 15 bp, Homo sapiens
ggtcttaagccagca

SEQ ID NO: 345666 - DNA, 15 bp, Homo sapiens
aggtcttaagccagc

SEQ ID NO: 345667 - DNA, 15 bp, Homo sapiens
aaggtcttaagccag

SEQ ID NO: 345668 - DNA, 15 bp, Homo sapiens
aaaggtcttaagcca

SEQ ID NO: 345669 - DNA, 15 bp, Homo sapiens
aaaaggtcttaagcc

SEQ ID NO: 345670 - DNA, 15 bp, Homo sapiens
aaaaaggtcttaagc

SEQ ID NO: 345671 - DNA, 15 bp, Homo sapiens
caaaaaggtcttaag

SEQ ID NO: 345672 - DNA, 15 bp, Homo sapiens
acaaaaaggtcttaa

SEQ ID NO: 345673 - DNA, 15 bp, Homo sapiens
cacaaaaaggtctta

SEQ ID NO: 345674 - DNA, 15 bp, Homo sapiens
tcacaaaaaggtctt

SEQ ID NO: 345675 - DNA, 15 bp, Homo sapiens
gtcacaaaaaggtct

SEQ ID NO: 345676 - DNA, 15 bp, Homo sapiens
tgtcacaaaaaggtc

SEQ ID NO: 345677 - DNA, 15 bp, Homo sapiens
ttgtcacaaaaaggt

SEQ ID NO: 345678 - DNA, 15 bp, Homo sapiens
cttgtcacaaaaagg

SEQ ID NO: 345679 - DNA, 15 bp, Homo sapiens
acttgtcacaaaaag

SEQ ID NO: 345680 - DNA, 15 bp, Homo sapiens
cacttgtcacaaaaa

SEQ ID NO: 345681 - DNA, 15 bp, Homo sapiens
ccacttgtcacaaaa

SEQ ID NO: 345682 - DNA, 15 bp, Homo sapiens
gccacttgtcacaaa

SEQ ID NO: 345683 - DNA, 15 bp, Homo sapiens
tgccacttgtcacaa

SEQ ID NO: 345684 - DNA, 15 bp, Homo sapiens
atgccacttgtcaca

SEQ ID NO: 345685 - DNA, 15 bp, Homo sapiens
aatgccacttgtcac

SEQ ID NO: 345686 - DNA, 15 bp, Homo sapiens
aaatgccacttgtca

SEQ ID NO: 345687 - DNA, 15 bp, Homo sapiens
aaaatgccacttgtc

SEQ ID NO: 345688 - DNA, 15 bp, Homo sapiens
aaaaatgccacttgt

SEQ ID NO: 345689 - DNA, 15 bp, Homo sapiens
aaaaaatgccacttg

SEQ ID NO: 345690 - DNA, 15 bp, Homo sapiens
aaaaaaatgccactt

SEQ ID NO: 345691 - DNA, 15 bp, Homo sapiens
aaaaaaaatgccact

SEQ ID NO: 345692 - DNA, 15 bp, Homo sapiens
gaaaaaaaatgccac

SEQ ID NO: 345693 - DNA, 15 bp, Homo sapiens
agaaaaaaaatgcca

SEQ ID NO: 345694 - DNA, 15 bp, Homo sapiens
aagaaaaaaaatgcc

SEQ ID NO: 345695 - DNA, 15 bp, Homo sapiens
caagaaaaaaaatgc

SEQ ID NO: 345696 - DNA, 15 bp, Homo sapiens
tcaagaaaaaaaatg

SEQ ID NO: 345697 - DNA, 15 bp, Homo sapiens
ttcaagaaaaaaaat

SEQ ID NO: 345698 - DNA, 15 bp, Homo sapiens
tttcaagaaaaaaaa

SEQ ID NO: 345699 - DNA, 15 bp, Homo sapiens
ttttcaagaaaaaaa

SEQ ID NO: 345700 - DNA, 15 bp, Homo sapiens
tttttcaagaaaaaa

SEQ ID NO: 345701 - DNA, 15 bp, Homo sapiens
ttttttcaagaaaaa

SEQ ID NO: 345702 - DNA, 15 bp, Homo sapiens
cttttttcaagaaaa

SEQ ID NO: 345703 - DNA, 15 bp, Homo sapiens
tcttttttcaagaaa

SEQ ID NO: 345704 - DNA, 15 bp, Homo sapiens
ttcttttttcaagaa

SEQ ID NO: 345705 - DNA, 15 bp, Homo sapiens
cttcttttttcaaga

SEQ ID NO: 345706 - DNA, 15 bp, Homo sapiens
acttcttttttcaag

SEQ ID NO: 345707 - DNA, 15 bp, Homo sapiens
gacttcttttttcaa

SEQ ID NO: 345708 - DNA, 15 bp, Homo sapiens
tgacttcttttttca

SEQ ID NO: 345709 - DNA, 15 bp, Homo sapiens
atgacttcttttttc

SEQ ID NO: 345710 - DNA, 15 bp, Homo sapiens
aatgacttctttttt

SEQ ID NO: 345711 - DNA, 15 bp, Homo sapiens
aaatgacttcttttt

SEQ ID NO: 345712 - DNA, 15 bp, Homo sapiens
gaaatgacttctttt

SEQ ID NO: 345713 - DNA, 15 bp, Homo sapiens
agaaatgacttcttt

SEQ ID NO: 345714 - DNA, 15 bp, Homo sapiens
tagaaatgacttctt

SEQ ID NO: 345715 - DNA, 15 bp, Homo sapiens
atagaaatgacttct

SEQ ID NO: 345716 - DNA, 15 bp, Homo sapiens
aatagaaatgacttc

SEQ ID NO: 345717 - DNA, 15 bp, Homo sapiens
gaatagaaatgactt

SEQ ID NO: 345718 - DNA, 15 bp, Homo sapiens
ggaatagaaatgact

SEQ ID NO: 345719 - DNA, 15 bp, Homo sapiens
gggaatagaaatgac

SEQ ID NO: 345720 - DNA, 15 bp, Homo sapiens
ggggaatagaaatga

SEQ ID NO: 345721 - DNA, 15 bp, Homo sapiens
aggggaatagaaatg

SEQ ID NO: 345722 - DNA, 15 bp, Homo sapiens
caggggaatagaaat

SEQ ID NO: 345723 - DNA, 15 bp, Homo sapiens
acaggggaatagaaa

SEQ ID NO: 345724 - DNA, 15 bp, Homo sapiens
tacaggggaatagaa

SEQ ID NO: 345725 - DNA, 15 bp, Homo sapiens
ttacaggggaataga

SEQ ID NO: 345726 - DNA, 15 bp, Homo sapiens
attacaggggaatag

SEQ ID NO: 345727 - DNA, 15 bp, Homo sapiens
aattacaggggaata

SEQ ID NO: 345728 - DNA, 15 bp, Homo sapiens
taattacaggggaat

SEQ ID NO: 345729 - DNA, 15 bp, Homo sapiens
ataattacaggggaa

SEQ ID NO: 345730 - DNA, 15 bp, Homo sapiens
aataattacagggga

SEQ ID NO: 345731 - DNA, 15 bp, Homo sapiens
aaataattacagggg

SEQ ID NO: 345732 - DNA, 15 bp, Homo sapiens
aaaataattacaggg

SEQ ID NO: 345733 - DNA, 15 bp, Homo sapiens
aaaaataattacagg

SEQ ID NO: 345734 - DNA, 15 bp, Homo sapiens
caaaaataattacag

SEQ ID NO: 345735 - DNA, 15 bp, Homo sapiens
gcaaaaataattaca

SEQ ID NO: 345736 - DNA, 15 bp, Homo sapiens
tgcaaaaataattac

SEQ ID NO: 345737 - DNA, 15 bp, Homo sapiens
ttgcaaaaataatta

SEQ ID NO: 345738 - DNA, 15 bp, Homo sapiens
gttgcaaaaataatt

SEQ ID NO: 345739 - DNA, 15 bp, Homo sapiens
ggttgcaaaaataat

SEQ ID NO: 345740 - DNA, 15 bp, Homo sapiens
tggttgcaaaaataa

SEQ ID NO: 345741 - DNA, 15 bp, Homo sapiens
ctggttgcaaaaata

SEQ ID NO: 345742 - DNA, 15 bp, Homo sapiens
gctggttgcaaaaat

SEQ ID NO: 345743 - DNA, 15 bp, Homo sapiens
tgctggttgcaaaaa

SEQ ID NO: 345744 - DNA, 15 bp, Homo sapiens
ttgctggttgcaaaa

SEQ ID NO: 345745 - DNA, 15 bp, Homo sapiens
gttgctggttgcaaa

SEQ ID NO: 345746 - DNA, 15 bp, Homo sapiens
tgttgctggttgcaa

SEQ ID NO: 345747 - DNA, 15 bp, Homo sapiens
ttgttgctggttgca

SEQ ID NO: 345748 - DNA, 15 bp, Homo sapiens
gttgttgctggttgc

SEQ ID NO: 345749 - DNA, 15 bp, Homo sapiens
agttgttgctggttg

SEQ ID NO: 345750 - DNA, 15 bp, Homo sapiens
aagttgttgctggtt

SEQ ID NO: 345751 - DNA, 15 bp, Homo sapiens
gaagttgttgctggt

SEQ ID NO: 345752 - DNA, 15 bp, Homo sapiens
ggaagttgttgctgg

SEQ ID NO: 345753 - DNA, 15 bp, Homo sapiens
aggaagttgttgctg

SEQ ID NO: 345754 - DNA, 15 bp, Homo sapiens
caggaagttgttgct

SEQ ID NO: 345755 - DNA, 15 bp, Homo sapiens
gcaggaagttgttgc

SEQ ID NO: 345756 - DNA, 15 bp, Homo sapiens
cgcaggaagttgttg

SEQ ID NO: 345757 - DNA, 15 bp, Homo sapiens
acgcaggaagttgtt

SEQ ID NO: 345758 - DNA, 15 bp, Homo sapiens
aacgcaggaagttgt

SEQ ID NO: 345759 - DNA, 15 bp, Homo sapiens
caacgcaggaagttg

SEQ ID NO: 345760 - DNA, 15 bp, Homo sapiens
ccaacgcaggaagtt

SEQ ID NO: 345761 - DNA, 15 bp, Homo sapiens
tccaacgcaggaagt

SEQ ID NO: 345762 - DNA, 15 bp, Homo sapiens
gtccaacgcaggaag

SEQ ID NO: 345763 - DNA, 15 bp, Homo sapiens
tgtccaacgcaggaa

SEQ ID NO: 345764 - DNA, 15 bp, Homo sapiens
atgtccaacgcagga

SEQ ID NO: 345765 - DNA, 15 bp, Homo sapiens
tatgtccaacgcagg

SEQ ID NO: 345766 - DNA, 15 bp, Homo sapiens
gtatgtccaacgcag

SEQ ID NO: 345767 - DNA, 15 bp, Homo sapiens
agtatgtccaacgca

SEQ ID NO: 345768 - DNA, 15 bp, Homo sapiens
cagtatgtccaacgc

SEQ ID NO: 345769 - DNA, 15 bp, Homo sapiens
ccagtatgtccaacg

SEQ ID NO: 345770 - DNA, 15 bp, Homo sapiens
cccagtatgtccaac

SEQ ID NO: 345771 - DNA, 15 bp, Homo sapiens
ccccagtatgtccaa

SEQ ID NO: 345772 - DNA, 15 bp, Homo sapiens
gccccagtatgtcca

SEQ ID NO: 345773 - DNA, 15 bp, Homo sapiens
tgccccagtatgtcc

SEQ ID NO: 345774 - DNA, 15 bp, Homo sapiens
atgccccagtatgtc

SEQ ID NO: 345775 - DNA, 15 bp, Homo sapiens
aatgccccagtatgt

SEQ ID NO: 345776 - DNA, 15 bp, Homo sapiens
aaatgccccagtatg

SEQ ID NO: 345777 - DNA, 15 bp, Homo sapiens
aaaatgccccagtat

SEQ ID NO: 345778 - DNA, 15 bp, Homo sapiens
taaaatgccccagta

SEQ ID NO: 345779 - DNA, 15 bp, Homo sapiens
ataaaatgccccagt

SEQ ID NO: 345780 - DNA, 15 bp, Homo sapiens
aataaaatgccccag

SEQ ID NO: 345781 - DNA, 15 bp, Homo sapiens
aaataaaatgcccca

SEQ ID NO: 345782 - DNA, 15 bp, Homo sapiens
aaaataaaatgcccc

SEQ ID NO: 345783 - DNA, 15 bp, Homo sapiens
taaaataaaatgccc

SEQ ID NO: 345784 - DNA, 15 bp, Homo sapiens
ctaaaataaaatgcc

SEQ ID NO: 345785 - DNA, 15 bp, Homo sapiens
tctaaaataaaatgc

SEQ ID NO: 345786 - DNA, 15 bp, Homo sapiens
ttctaaaataaaatg

SEQ ID NO: 345787 - DNA, 15 bp, Homo sapiens
tttctaaaataaaat

SEQ ID NO: 345788 - DNA, 15 bp, Homo sapiens
gtttctaaaataaaa

SEQ ID NO: 345789 - DNA, 15 bp, Homo sapiens
ggtttctaaaataaa

SEQ ID NO: 345790 - DNA, 15 bp, Homo sapiens
tggtttctaaaataa

SEQ ID NO: 345791 - DNA, 15 bp, Homo sapiens
ttggtttctaaaata

SEQ ID NO: 345792 - DNA, 15 bp, Homo sapiens
attggtttctaaaat

SEQ ID NO: 345793 - DNA, 15 bp, Homo sapiens
tattggtttctaaaa

SEQ ID NO: 345794 - DNA, 15 bp, Homo sapiens
ttattggtttctaaa

SEQ ID NO: 345795 - DNA, 15 bp, Homo sapiens
attattggtttctaa

SEQ ID NO: 345796 - DNA, 15 bp, Homo sapiens
aattattggtttcta

SEQ ID NO: 345797 - DNA, 15 bp, Homo sapiens
taattattggtttct

SEQ ID NO: 345798 - DNA, 15 bp, Homo sapiens
ttaattattggtttc

SEQ ID NO: 345799 - DNA, 15 bp, Homo sapiens
tttaattattggttt

SEQ ID NO: 345800 - DNA, 15 bp, Homo sapiens
atttaattattggtt

SEQ ID NO: 345801 - DNA, 15 bp, Homo sapiens
aatttaattattggt

SEQ ID NO: 345802 - DNA, 15 bp, Homo sapiens
taatttaattattgg

SEQ ID NO: 345803 - DNA, 15 bp, Homo sapiens
ataatttaattattg

SEQ ID NO: 345804 - DNA, 15 bp, Homo sapiens
aataatttaattatt

SEQ ID NO: 345805 - DNA, 15 bp, Homo sapiens
caataatttaattat

SEQ ID NO: 345806 - DNA, 15 bp, Homo sapiens
gcaataatttaatta

SEQ ID NO: 345807 - DNA, 15 bp, Homo sapiens
agcaataatttaatt

SEQ ID NO: 345808 - DNA, 15 bp, Homo sapiens
tagcaataatttaat

SEQ ID NO: 345809 - DNA, 15 bp, Homo sapiens
ctagcaataatttaa

SEQ ID NO: 345810 - DNA, 15 bp, Homo sapiens
gctagcaataattta

SEQ ID NO: 345811 - DNA, 15 bp, Homo sapiens
agctagcaataattt

SEQ ID NO: 345812 - DNA, 15 bp, Homo sapiens
aagctagcaataatt

SEQ ID NO: 345813 - DNA, 15 bp, Homo sapiens
taagctagcaataat

SEQ ID NO: 345814 - DNA, 15 bp, Homo sapiens
ataagctagcaataa

SEQ ID NO: 345815 - DNA, 15 bp, Homo sapiens
cataagctagcaata

SEQ ID NO: 345816 - DNA, 15 bp, Homo sapiens
ccataagctagcaat

SEQ ID NO: 345817 - DNA, 15 bp, Homo sapiens
gccataagctagcaa

SEQ ID NO: 345818 - DNA, 15 bp, Homo sapiens
agccataagctagca

SEQ ID NO: 345819 - DNA, 15 bp, Homo sapiens
cagccataagctagc

SEQ ID NO: 345820 - DNA, 15 bp, Homo sapiens
tcagccataagctag

SEQ ID NO: 345821 - DNA, 15 bp, Homo sapiens
atcagccataagcta

SEQ ID NO: 345822 - DNA, 15 bp, Homo sapiens
aatcagccataagct

SEQ ID NO: 345823 - DNA, 15 bp, Homo sapiens
aaatcagccataagc

SEQ ID NO: 345824 - DNA, 15 bp, Homo sapiens
aaaatcagccataag

SEQ ID NO: 345825 - DNA, 15 bp, Homo sapiens
taaaatcagccataa

SEQ ID NO: 345826 - DNA, 15 bp, Homo sapiens
ataaaatcagccata

SEQ ID NO: 345827 - DNA, 15 bp, Homo sapiens
gataaaatcagccat

SEQ ID NO: 345828 - DNA, 15 bp, Homo sapiens
ggataaaatcagcca

SEQ ID NO: 345829 - DNA, 15 bp, Homo sapiens
gggataaaatcagcc

SEQ ID NO: 345830 - DNA, 15 bp, Homo sapiens
tgggataaaatcagc

SEQ ID NO: 345831 - DNA, 15 bp, Homo sapiens
atgggataaaatcag

SEQ ID NO: 345832 - DNA, 15 bp, Homo sapiens
aatgggataaaatca

SEQ ID NO: 345833 - DNA, 15 bp, Homo sapiens
aaatgggataaaatc

SEQ ID NO: 345834 - DNA, 15 bp, Homo sapiens
taaatgggataaaat

SEQ ID NO: 345835 - DNA, 15 bp, Homo sapiens
ataaatgggataaaa

SEQ ID NO: 345836 - DNA, 15 bp, Homo sapiens
gataaatgggataaa

SEQ ID NO: 345837 - DNA, 15 bp, Homo sapiens
tgataaatgggataa

SEQ ID NO: 345838 - DNA, 15 bp, Homo sapiens
gtgataaatgggata

SEQ ID NO: 345839 - DNA, 15 bp, Homo sapiens
tgtgataaatgggat

SEQ ID NO: 345840 - DNA, 15 bp, Homo sapiens
atgtgataaatggga

SEQ ID NO: 345841 - DNA, 15 bp, Homo sapiens
aatgtgataaatggg

SEQ ID NO: 345842 - DNA, 15 bp, Homo sapiens
caatgtgataaatgg

SEQ ID NO: 345843 - DNA, 15 bp, Homo sapiens
acaatgtgataaatg

SEQ ID NO: 345844 - DNA, 15 bp, Homo sapiens
cacaatgtgataaat

SEQ ID NO: 345845 - DNA, 15 bp, Homo sapiens
tcacaatgtgataaa

SEQ ID NO: 345846 - DNA, 15 bp, Homo sapiens
ttcacaatgtgataa

SEQ ID NO: 345847 - DNA, 15 bp, Homo sapiens
cttcacaatgtgata

SEQ ID NO: 345848 - DNA, 15 bp, Homo sapiens
ccttcacaatgtgat

SEQ ID NO: 345849 - DNA, 15 bp, Homo sapiens
gccttcacaatgtga

SEQ ID NO: 345850 - DNA, 15 bp, Homo sapiens
agccttcacaatgtg

SEQ ID NO: 345851 - DNA, 15 bp, Homo sapiens
aagccttcacaatgt

SEQ ID NO: 345852 - DNA, 15 bp, Homo sapiens
aaagccttcacaatg

SEQ ID NO: 345853 - DNA, 15 bp, Homo sapiens
gaaagccttcacaat

SEQ ID NO: 345854 - DNA, 15 bp, Homo sapiens
agaaagccttcacaa

SEQ ID NO: 345855 - DNA, 15 bp, Homo sapiens
aagaaagccttcaca

SEQ ID NO: 345856 - DNA, 15 bp, Homo sapiens
taagaaagccttcac

SEQ ID NO: 345857 - DNA, 15 bp, Homo sapiens
gtaagaaagccttca

SEQ ID NO: 345858 - DNA, 15 bp, Homo sapiens
agtaagaaagccttc

SEQ ID NO: 345859 - DNA, 15 bp, Homo sapiens
aagtaagaaagcctt

SEQ ID NO: 345860 - DNA, 15 bp, Homo sapiens
gaagtaagaaagcct

SEQ ID NO: 345861 - DNA, 15 bp, Homo sapiens
ggaagtaagaaagcc

SEQ ID NO: 345862 - DNA, 15 bp, Homo sapiens
aggaagtaagaaagc

SEQ ID NO: 345863 - DNA, 15 bp, Homo sapiens
aaggaagtaagaaag

SEQ ID NO: 345864 - DNA, 15 bp, Homo sapiens
aaaggaagtaagaaa

SEQ ID NO: 345865 - DNA, 15 bp, Homo sapiens
aaaaggaagtaagaa

SEQ ID NO: 345866 - DNA, 15 bp, Homo sapiens
aaaaaggaagtaaga

SEQ ID NO: 345867 - DNA, 15 bp, Homo sapiens
aaaaaaggaagtaag

SEQ ID NO: 345868 - DNA, 15 bp, Homo sapiens
gaaaaaaggaagtaa

SEQ ID NO: 345869 - DNA, 15 bp, Homo sapiens
ggaaaaaaggaagta

SEQ ID NO: 345870 - DNA, 15 bp, Homo sapiens
gggaaaaaaggaagt

SEQ ID NO: 345871 - DNA, 15 bp, Homo sapiens
ggggaaaaaaggaag

SEQ ID NO: 345872 - DNA, 15 bp, Homo sapiens
aggggaaaaaaggaa

SEQ ID NO: 345873 - DNA, 15 bp, Homo sapiens
aaggggaaaaaagga

SEQ ID NO: 345874 - DNA, 15 bp, Homo sapiens
taaggggaaaaaagg

SEQ ID NO: 345875 - DNA, 15 bp, Homo sapiens
gtaaggggaaaaaag

SEQ ID NO: 345876 - DNA, 15 bp, Homo sapiens
ggtaaggggaaaaaa

SEQ ID NO: 345877 - DNA, 15 bp, Homo sapiens
aggtaaggggaaaaa

SEQ ID NO: 345878 - DNA, 15 bp, Homo sapiens
gaggtaaggggaaaa

SEQ ID NO: 345879 - DNA, 15 bp, Homo sapiens
tgaggtaaggggaaa

SEQ ID NO: 345880 - DNA, 15 bp, Homo sapiens
gtgaggtaaggggaa

SEQ ID NO: 345881 - DNA, 15 bp, Homo sapiens
ggtgaggtaagggga

SEQ ID NO: 345882 - DNA, 15 bp, Homo sapiens
aggtgaggtaagggg

SEQ ID NO: 345883 - DNA, 15 bp, Homo sapiens
gaggtgaggtaaggg

SEQ ID NO: 345884 - DNA, 15 bp, Homo sapiens
tgaggtgaggtaagg

SEQ ID NO: 345885 - DNA, 15 bp, Homo sapiens
gtgaggtgaggtaag

SEQ ID NO: 345886 - DNA, 15 bp, Homo sapiens
ggtgaggtgaggtaa

SEQ ID NO: 345887 - DNA, 15 bp, Homo sapiens
gggtgaggtgaggta

SEQ ID NO: 345888 - DNA, 15 bp, Homo sapiens
agggtgaggtgaggt

SEQ ID NO: 345889 - DNA, 15 bp, Homo sapiens
cagggtgaggtgagg

SEQ ID NO: 345890 - DNA, 15 bp, Homo sapiens
gcagggtgaggtgag

SEQ ID NO: 345891 - DNA, 15 bp, Homo sapiens
agcagggtgaggtga

SEQ ID NO: 345892 - DNA, 15 bp, Homo sapiens
aagcagggtgaggtg

SEQ ID NO: 345893 - DNA, 15 bp, Homo sapiens
gaagcagggtgaggt

SEQ ID NO: 345894 - DNA, 15 bp, Homo sapiens
ggaagcagggtgagg

SEQ ID NO: 345895 - DNA, 15 bp, Homo sapiens
aggaagcagggtgag

SEQ ID NO: 345896 - DNA, 15 bp, Homo sapiens
caggaagcagggtga

SEQ ID NO: 345897 - DNA, 15 bp, Homo sapiens
tcaggaagcagggtg

SEQ ID NO: 345898 - DNA, 15 bp, Homo sapiens
atcaggaagcagggt

SEQ ID NO: 345899 - DNA, 15 bp, Homo sapiens
aaatcaggaagcagg

SEQ ID NO: 345900 - DNA, 15 bp, Homo sapiens
gaaatcaggaagcag

SEQ ID NO: 345901 - DNA, 15 bp, Homo sapiens
tgaaatcaggaagca

SEQ ID NO: 345902 - DNA, 15 bp, Homo sapiens
gtgaaatcaggaagc

SEQ ID NO: 345903 - DNA, 15 bp, Homo sapiens
tgtgaaatcaggaag

SEQ ID NO: 345904 - DNA, 15 bp, Homo sapiens
gtgtgaaatcaggaa

SEQ ID NO: 345905 - DNA, 15 bp, Homo sapiens
ggtgtgaaatcagga

SEQ ID NO: 345906 - DNA, 15 bp, Homo sapiens
tggtgtgaaatcagg

SEQ ID NO: 345907 - DNA, 15 bp, Homo sapiens
ttggtgtgaaatcag

SEQ ID NO: 345908 - DNA, 15 bp, Homo sapiens
attggtgtgaaatca

SEQ ID NO: 345909 - DNA, 15 bp, Homo sapiens
aattggtgtgaaatc

SEQ ID NO: 345910 - DNA, 15 bp, Homo sapiens
gaattggtgtgaaat

SEQ ID NO: 345911 - DNA, 15 bp, Homo sapiens
agaattggtgtgaaa

SEQ ID NO: 345912 - DNA, 15 bp, Homo sapiens
cagaattggtgtgaa

SEQ ID NO: 345913 - DNA, 15 bp, Homo sapiens
acagaattggtgtga

SEQ ID NO: 345914 - DNA, 15 bp, Homo sapiens
tacagaattggtgtg

SEQ ID NO: 345915 - DNA, 15 bp, Homo sapiens
atacagaattggtgt

SEQ ID NO: 345916 - DNA, 15 bp, Homo sapiens
tatacagaattggtg

SEQ ID NO: 345917 - DNA, 15 bp, Homo sapiens
atatacagaattggt

SEQ ID NO: 345918 - DNA, 15 bp, Homo sapiens
catatacagaattgg

SEQ ID NO: 345919 - DNA, 15 bp, Homo sapiens
acatatacagaattg

SEQ ID NO: 345920 - DNA, 15 bp, Homo sapiens
aacatatacagaatt

SEQ ID NO: 345921 - DNA, 15 bp, Homo sapiens
caacatatacagaat

SEQ ID NO: 345922 - DNA, 15 bp, Homo sapiens
tcaacatatacagaa

SEQ ID NO: 345923 - DNA, 15 bp, Homo sapiens
ttcaacatatacaga

SEQ ID NO: 345924 - DNA, 15 bp, Homo sapiens
tttcaacatatacag

SEQ ID NO: 345925 - DNA, 15 bp, Homo sapiens
gtttcaacatataca

SEQ ID NO: 345926 - DNA, 15 bp, Homo sapiens
tgtttcaacatatac

SEQ ID NO: 345927 - DNA, 15 bp, Homo sapiens
gtgtttcaacatata

SEQ ID NO: 345928 - DNA, 15 bp, Homo sapiens
agtgtttcaacatat

SEQ ID NO: 345929 - DNA, 15 bp, Homo sapiens
cagtgtttcaacata

SEQ ID NO: 345930 - DNA, 15 bp, Homo sapiens
acagtgtttcaacat

SEQ ID NO: 345931 - DNA, 15 bp, Homo sapiens
tacagtgtttcaaca

SEQ ID NO: 345932 - DNA, 15 bp, Homo sapiens
ttacagtgtttcaac

SEQ ID NO: 345933 - DNA, 15 bp, Homo sapiens
cttacagtgtttcaa

SEQ ID NO: 345934 - DNA, 15 bp, Homo sapiens
acttacagtgtttca

SEQ ID NO: 345935 - DNA, 15 bp, Homo sapiens
aacttacagtgtttc

SEQ ID NO: 345936 - DNA, 15 bp, Homo sapiens
caacttacagtgttt

SEQ ID NO: 345937 - DNA, 15 bp, Homo sapiens
tcaacttacagtgtt

SEQ ID NO: 345938 - DNA, 15 bp, Homo sapiens
ctcaacttacagtgt

SEQ ID NO: 345939 - DNA, 15 bp, Homo sapiens
actcaacttacagtg

SEQ ID NO: 345940 - DNA, 15 bp, Homo sapiens
tactcaacttacagt

SEQ ID NO: 345941 - DNA, 15 bp, Homo sapiens
ttactcaacttacag

SEQ ID NO: 345942 - DNA, 15 bp, Homo sapiens
tttactcaacttaca

SEQ ID NO: 345943 - DNA, 15 bp, Homo sapiens
ctttactcaacttac

SEQ ID NO: 345944 - DNA, 15 bp, Homo sapiens
cctttactcaactta

SEQ ID NO: 345945 - DNA, 15 bp, Homo sapiens
gcctttactcaactt

SEQ ID NO: 345946 - DNA, 15 bp, Homo sapiens
tgcctttactcaact

SEQ ID NO: 345947 - DNA, 15 bp, Homo sapiens
ctgcctttactcaac

SEQ ID NO: 345948 - DNA, 15 bp, Homo sapiens
tctgcctttactcaa

SEQ ID NO: 345949 - DNA, 15 bp, Homo sapiens
ttctgcctttactca

SEQ ID NO: 345950 - DNA, 15 bp, Homo sapiens
attctgcctttactc

SEQ ID NO: 345951 - DNA, 15 bp, Homo sapiens
aattctgcctttact

SEQ ID NO: 345952 - DNA, 15 bp, Homo sapiens
taattctgcctttac

SEQ ID NO: 345953 - DNA, 15 bp, Homo sapiens
ctaattctgccttta

SEQ ID NO: 345954 - DNA, 15 bp, Homo sapiens
tctaattctgccttt

SEQ ID NO: 345955 - DNA, 15 bp, Homo sapiens
ttctaattctgcctt

SEQ ID NO: 345956 - DNA, 15 bp, Homo sapiens
attctaattctgcct

SEQ ID NO: 345957 - DNA, 15 bp, Homo sapiens
tattctaattctgcc

SEQ ID NO: 345958 - DNA, 15 bp, Homo sapiens
ttattctaattctgc

SEQ ID NO: 345959 - DNA, 15 bp, Homo sapiens
cttattctaattctg

SEQ ID NO: 345960 - DNA, 15 bp, Homo sapiens
ccttattctaattct

SEQ ID NO: 345961 - DNA, 15 bp, Homo sapiens
tccttattctaattc

SEQ ID NO: 345962 - DNA, 15 bp, Homo sapiens
atccttattctaatt

SEQ ID NO: 345963 - DNA, 15 bp, Homo sapiens
aatccttattctaat

SEQ ID NO: 345964 - DNA, 15 bp, Homo sapiens
taatccttattctaa

SEQ ID NO: 345965 - DNA, 15 bp, Homo sapiens
ctaatccttattcta

SEQ ID NO: 345966 - DNA, 15 bp, Homo sapiens
tctaatccttattct

SEQ ID NO: 345967 - DNA, 15 bp, Homo sapiens
atctaatccttattc

SEQ ID NO: 345968 - DNA, 15 bp, Homo sapiens
catctaatccttatt

SEQ ID NO: 345969 - DNA, 15 bp, Homo sapiens
ccatctaatccttat

SEQ ID NO: 345970 - DNA, 15 bp, Homo sapiens
gccatctaatcctta

SEQ ID NO: 345971 - DNA, 15 bp, Homo sapiens
agccatctaatcctt

SEQ ID NO: 345972 - DNA, 15 bp, Homo sapiens
tagccatctaatcct

SEQ ID NO: 345973 - DNA, 15 bp, Homo sapiens
ttagccatctaatcc

SEQ ID NO: 345974 - DNA, 15 bp, Homo sapiens
attagccatctaatc

SEQ ID NO: 345975 - DNA, 15 bp, Homo sapiens
cattagccatctaat

SEQ ID NO: 345976 - DNA, 15 bp, Homo sapiens
gcattagccatctaa

SEQ ID NO: 345977 - DNA, 15 bp, Homo sapiens
agcattagccatcta

SEQ ID NO: 345978 - DNA, 15 bp, Homo sapiens
gagcattagccatct

SEQ ID NO: 345979 - DNA, 15 bp, Homo sapiens
tgagcattagccatc

SEQ ID NO: 345980 - DNA, 15 bp, Homo sapiens
atgagcattagccat

SEQ ID NO: 345981 - DNA, 15 bp, Homo sapiens
aatgagcattagcca

SEQ ID NO: 345982 - DNA, 15 bp, Homo sapiens
gaatgagcattagcc

SEQ ID NO: 345983 - DNA, 15 bp, Homo sapiens
agaatgagcattagc

SEQ ID NO: 345984 - DNA, 15 bp, Homo sapiens
aagaatgagcattag

SEQ ID NO: 345985 - DNA, 15 bp, Homo sapiens
gaagaatgagcatta

SEQ ID NO: 345986 - DNA, 15 bp, Homo sapiens
agaagaatgagcatt

SEQ ID NO: 345987 - DNA, 15 bp, Homo sapiens
aagaagaatgagcat

SEQ ID NO: 345988 - DNA, 15 bp, Homo sapiens
aaagaagaatgagca

SEQ ID NO: 345989 - DNA, 15 bp, Homo sapiens
taaagaagaatgagc

SEQ ID NO: 345990 - DNA, 15 bp, Homo sapiens
gtaaagaagaatgag

SEQ ID NO: 345991 - DNA, 15 bp, Homo sapiens
ggtaaagaagaatga

SEQ ID NO: 345992 - DNA, 15 bp, Homo sapiens
tggtaaagaagaatg

SEQ ID NO: 345993 - DNA, 15 bp, Homo sapiens
ttggtaaagaagaat

SEQ ID NO: 345994 - DNA, 15 bp, Homo sapiens
tttggtaaagaagaa

SEQ ID NO: 345995 - DNA, 15 bp, Homo sapiens
ttttggtaaagaaga

SEQ ID NO: 345996 - DNA, 15 bp, Homo sapiens
tttttggtaaagaag

SEQ ID NO: 345997 - DNA, 15 bp, Homo sapiens
ttttttggtaaagaa

SEQ ID NO: 345998 - DNA, 15 bp, Homo sapiens
attttttggtaaaga

SEQ ID NO: 345999 - DNA, 15 bp, Homo sapiens
cattttttggtaaag

SEQ ID NO: 346000 - DNA, 15 bp, Homo sapiens
ccattttttggtaaa

SEQ ID NO: 346001 - DNA, 15 bp, Homo sapiens
accattttttggtaa

SEQ ID NO: 346002 - DNA, 15 bp, Homo sapiens
caccattttttggta

SEQ ID NO: 346003 - DNA, 15 bp, Homo sapiens
acaccattttttggt

SEQ ID NO: 346004 - DNA, 15 bp, Homo sapiens
aacaccattttttgg

SEQ ID NO: 346005 - DNA, 15 bp, Homo sapiens
caacaccattttttg

SEQ ID NO: 346006 - DNA, 15 bp, Homo sapiens
tcaacaccatttttt

SEQ ID NO: 346007 - DNA, 15 bp, Homo sapiens
ctcaacaccattttt

SEQ ID NO: 346008 - DNA, 15 bp, Homo sapiens
actcaacaccatttt

SEQ ID NO: 346009 - DNA, 15 bp, Homo sapiens
cactcaacaccattt

SEQ ID NO: 346010 - DNA, 15 bp, Homo sapiens
tcactcaacaccatt

SEQ ID NO: 346011 - DNA, 15 bp, Homo sapiens
atcactcaacaccat

SEQ ID NO: 346012 - DNA, 15 bp, Homo sapiens
catcactcaacacca

SEQ ID NO: 346013 - DNA, 15 bp, Homo sapiens
gcatcactcaacacc

SEQ ID NO: 346014 - DNA, 15 bp, Homo sapiens
tgcatcactcaacac

SEQ ID NO: 346015 - DNA, 15 bp, Homo sapiens
ttgcatcactcaaca

SEQ ID NO: 346016 - DNA, 15 bp, Homo sapiens
cttgcatcactcaac

SEQ ID NO: 346017 - DNA, 15 bp, Homo sapiens
acttgcatcactcaa

SEQ ID NO: 346018 - DNA, 15 bp, Homo sapiens
tacttgcatcactca

SEQ ID NO: 346019 - DNA, 15 bp, Homo sapiens
ttacttgcatcactc

SEQ ID NO: 346020 - DNA, 15 bp, Homo sapiens
tttacttgcatcact

SEQ ID NO: 346021 - DNA, 15 bp, Homo sapiens
atttacttgcatcac

SEQ ID NO: 346022 - DNA, 15 bp, Homo sapiens
catttacttgcatca

SEQ ID NO: 346023 - DNA, 15 bp, Homo sapiens
acatttacttgcatc

SEQ ID NO: 346024 - DNA, 15 bp, Homo sapiens
aacatttacttgcat

SEQ ID NO: 346025 - DNA, 15 bp, Homo sapiens
aaacatttacttgca

SEQ ID NO: 346026 - DNA, 15 bp, Homo sapiens
taaacatttacttgc

SEQ ID NO: 346027 - DNA, 15 bp, Homo sapiens
ttaaacatttacttg

SEQ ID NO: 346028 - DNA, 15 bp, Homo sapiens
gttaaacatttactt

SEQ ID NO: 346029 - DNA, 15 bp, Homo sapiens
ggttaaacatttact

SEQ ID NO: 346030 - DNA, 15 bp, Homo sapiens
tggttaaacatttac

SEQ ID NO: 346031 - DNA, 15 bp, Homo sapiens
ctggttaaacattta

SEQ ID NO: 346032 - DNA, 15 bp, Homo sapiens
tctggttaaacattt

SEQ ID NO: 346033 - DNA, 15 bp, Homo sapiens
ctctggttaaacatt

SEQ ID NO: 346034 - DNA, 15 bp, Homo sapiens
tctctggttaaacat

SEQ ID NO: 346035 - DNA, 15 bp, Homo sapiens
ttctctggttaaaca

SEQ ID NO: 346036 - DNA, 15 bp, Homo sapiens
gttctctggttaaac

SEQ ID NO: 346037 - DNA, 15 bp, Homo sapiens
tgttctctggttaaa

SEQ ID NO: 346038 - DNA, 15 bp, Homo sapiens
atgttctctggttaa

SEQ ID NO: 346039 - DNA, 15 bp, Homo sapiens
gatgttctctggtta

SEQ ID NO: 346040 - DNA, 15 bp, Homo sapiens
tgatgttctctggtt

SEQ ID NO: 346041 - DNA, 15 bp, Homo sapiens
ctgatgttctctggt

SEQ ID NO: 346042 - DNA, 15 bp, Homo sapiens
actgatgttctctgg

SEQ ID NO: 346043 - DNA, 15 bp, Homo sapiens
aactgatgttctctg

SEQ ID NO: 346044 - DNA, 15 bp, Homo sapiens
gaactgatgttctct

SEQ ID NO: 346045 - DNA, 15 bp, Homo sapiens
agaactgatgttctc

SEQ ID NO: 346046 - DNA, 15 bp, Homo sapiens
cagaactgatgttct

SEQ ID NO: 346047 - DNA, 15 bp, Homo sapiens
ccagaactgatgttc

SEQ ID NO: 346048 - DNA, 15 bp, Homo sapiens
cccagaactgatgtt

SEQ ID NO: 346049 - DNA, 15 bp, Homo sapiens
acccagaactgatgt

SEQ ID NO: 346050 - DNA, 15 bp, Homo sapiens
tacccagaactgatg

SEQ ID NO: 346051 - DNA, 15 bp, Homo sapiens
atacccagaactgat

SEQ ID NO: 346052 - DNA, 15 bp, Homo sapiens
tatacccagaactga

SEQ ID NO: 346053 - DNA, 15 bp, Homo sapiens
gtatacccagaactg

SEQ ID NO: 346054 - DNA, 15 bp, Homo sapiens
agtatacccagaact

SEQ ID NO: 346055 - DNA, 15 bp, Homo sapiens
cagtatacccagaac

SEQ ID NO: 346056 - DNA, 15 bp, Homo sapiens
tcagtatacccagaa

SEQ ID NO: 346057 - DNA, 15 bp, Homo sapiens
ttcagtatacccaga

SEQ ID NO: 346058 - DNA, 15 bp, Homo sapiens
tttcagtatacccag

SEQ ID NO: 346059 - DNA, 15 bp, Homo sapiens
ctttcagtataccca

SEQ ID NO: 346060 - DNA, 15 bp, Homo sapiens
actttcagtataccc

SEQ ID NO: 346061 - DNA, 15 bp, Homo sapiens
tactttcagtatacc

SEQ ID NO: 346062 - DNA, 15 bp, Homo sapiens
atactttcagtatac

SEQ ID NO: 346063 - DNA, 15 bp, Homo sapiens
tatactttcagtata

SEQ ID NO: 346064 - DNA, 15 bp, Homo sapiens
atatactttcagtat

SEQ ID NO: 346065 - DNA, 15 bp, Homo sapiens
tatatactttcagta

SEQ ID NO: 346066 - DNA, 15 bp, Homo sapiens
atatatactttcagt

SEQ ID NO: 346067 - DNA, 15 bp, Homo sapiens
tatatatactttcag

SEQ ID NO: 346068 - DNA, 15 bp, Homo sapiens
atatatatactttca

SEQ ID NO: 346069 - DNA, 15 bp, Homo sapiens
aatatatatactttc

SEQ ID NO: 346070 - DNA, 15 bp, Homo sapiens
gaatatatatacttt

SEQ ID NO: 346071 - DNA, 15 bp, Homo sapiens
agaatatatatactt

SEQ ID NO: 346072 - DNA, 15 bp, Homo sapiens
aagaatatatatact

SEQ ID NO: 346073 - DNA, 15 bp, Homo sapiens
caagaatatatatac

SEQ ID NO: 346074 - DNA, 15 bp, Homo sapiens
ccaagaatatatata

SEQ ID NO: 346075 - DNA, 15 bp, Homo sapiens
cccaagaatatatat

SEQ ID NO: 346076 - DNA, 15 bp, Homo sapiens
tcccaagaatatata

SEQ ID NO: 346077 - DNA, 15 bp, Homo sapiens
ctcccaagaatatat

SEQ ID NO: 346078 - DNA, 15 bp, Homo sapiens
actcccaagaatata

SEQ ID NO: 346079 - DNA, 15 bp, Homo sapiens
cactcccaagaatat

SEQ ID NO: 346080 - DNA, 15 bp, Homo sapiens
acactcccaagaata

SEQ ID NO: 346081 - DNA, 15 bp, Homo sapiens
tacactcccaagaat

SEQ ID NO: 346082 - DNA, 15 bp, Homo sapiens
ttacactcccaagaa

SEQ ID NO: 346083 - DNA, 15 bp, Homo sapiens
cttacactcccaaga

SEQ ID NO: 346084 - DNA, 15 bp, Homo sapiens
ccttacactcccaag

SEQ ID NO: 346085 - DNA, 15 bp, Homo sapiens
cccttacactcccaa

SEQ ID NO: 346086 - DNA, 15 bp, Homo sapiens
ccccttacactccca

SEQ ID NO: 346087 - DNA, 15 bp, Homo sapiens
accccttacactccc

SEQ ID NO: 346088 - DNA, 15 bp, Homo sapiens
taccccttacactcc

SEQ ID NO: 346089 - DNA, 15 bp, Homo sapiens
gtaccccttacactc

SEQ ID NO: 346090 - DNA, 15 bp, Homo sapiens
tgtaccccttacact

SEQ ID NO: 346091 - DNA, 15 bp, Homo sapiens
atgtaccccttacac

SEQ ID NO: 346092 - DNA, 15 bp, Homo sapiens
tatgtaccccttaca

SEQ ID NO: 346093 - DNA, 15 bp, Homo sapiens
ttatgtaccccttac

SEQ ID NO: 346094 - DNA, 15 bp, Homo sapiens
cttatgtacccctta

SEQ ID NO: 346095 - DNA, 15 bp, Homo sapiens
ccttatgtacccctt

SEQ ID NO: 346096 - DNA, 15 bp, Homo sapiens
cccttatgtacccct

SEQ ID NO: 346097 - DNA, 15 bp, Homo sapiens
acccttatgtacccc

SEQ ID NO: 346098 - DNA, 15 bp, Homo sapiens
tacccttatgtaccc

SEQ ID NO: 346099 - DNA, 15 bp, Homo sapiens
atacccttatgtacc

SEQ ID NO: 346100 - DNA, 15 bp, Homo sapiens
tatacccttatgtac

SEQ ID NO: 346101 - DNA, 15 bp, Homo sapiens
ttatacccttatgta

SEQ ID NO: 346102 - DNA, 15 bp, Homo sapiens
cttatacccttatgt

SEQ ID NO: 346103 - DNA, 15 bp, Homo sapiens
tcttatacccttatg

SEQ ID NO: 346104 - DNA, 15 bp, Homo sapiens
ctcttatacccttat

SEQ ID NO: 346105 - DNA, 15 bp, Homo sapiens
cctcttataccctta

SEQ ID NO: 346106 - DNA, 15 bp, Homo sapiens
ccctcttataccctt

SEQ ID NO: 346107 - DNA, 15 bp, Homo sapiens
accctcttataccct

SEQ ID NO: 346108 - DNA, 15 bp, Homo sapiens
gaccctcttataccc

SEQ ID NO: 346109 - DNA, 15 bp, Homo sapiens
agaccctcttatacc

SEQ ID NO: 346110 - DNA, 15 bp, Homo sapiens
gagaccctcttatac

SEQ ID NO: 346111 - DNA, 15 bp, Homo sapiens
agagaccctcttata

SEQ ID NO: 346112 - DNA, 15 bp, Homo sapiens
tagagaccctcttat

SEQ ID NO: 346113 - DNA, 15 bp, Homo sapiens
ctagagaccctctta

SEQ ID NO: 346114 - DNA, 15 bp, Homo sapiens
tctagagaccctctt

SEQ ID NO: 346115 - DNA, 15 bp, Homo sapiens
ttctagagaccctct

SEQ ID NO: 346116 - DNA, 15 bp, Homo sapiens
cttctagagaccctc

SEQ ID NO: 346117 - DNA, 15 bp, Homo sapiens
ccttctagagaccct

SEQ ID NO: 346118 - DNA, 15 bp, Homo sapiens
accttctagagaccc

SEQ ID NO: 346119 - DNA, 15 bp, Homo sapiens
gaccttctagagacc

SEQ ID NO: 346120 - DNA, 15 bp, Homo sapiens
ggaccttctagagac

SEQ ID NO: 346121 - DNA, 15 bp, Homo sapiens
gggaccttctagaga

SEQ ID NO: 346122 - DNA, 15 bp, Homo sapiens
tgggaccttctagag

SEQ ID NO: 346123 - DNA, 15 bp, Homo sapiens
ttgggaccttctaga

SEQ ID NO: 346124 - DNA, 15 bp, Homo sapiens
cttgggaccttctag

SEQ ID NO: 346125 - DNA, 15 bp, Homo sapiens
ccttgggaccttcta

SEQ ID NO: 346126 - DNA, 15 bp, Homo sapiens
tccttgggaccttct

SEQ ID NO: 346127 - DNA, 15 bp, Homo sapiens
gtccttgggaccttc

SEQ ID NO: 346128 - DNA, 15 bp, Homo sapiens
tgtccttgggacctt

SEQ ID NO: 346129 - DNA, 15 bp, Homo sapiens
ttgtccttgggacct

SEQ ID NO: 346130 - DNA, 15 bp, Homo sapiens
tttgtccttgggacc

SEQ ID NO: 346131 - DNA, 15 bp, Homo sapiens
atttgtccttgggac

SEQ ID NO: 346132 - DNA, 15 bp, Homo sapiens
aatttgtccttggga

SEQ ID NO: 346133 - DNA, 15 bp, Homo sapiens
caatttgtccttggg

SEQ ID NO: 346134 - DNA, 15 bp, Homo sapiens
acaatttgtccttgg

SEQ ID NO: 346135 - DNA, 15 bp, Homo sapiens
aacaatttgtccttg

SEQ ID NO: 346136 - DNA, 15 bp, Homo sapiens
caacaatttgtcctt

SEQ ID NO: 346137 - DNA, 15 bp, Homo sapiens
acaacaatttgtcct

SEQ ID NO: 346138 - DNA, 15 bp, Homo sapiens
tacaacaatttgtcc

SEQ ID NO: 346139 - DNA, 15 bp, Homo sapiens
atacaacaatttgtc

SEQ ID NO: 346140 - DNA, 15 bp, Homo sapiens
gatacaacaatttgt

SEQ ID NO: 346141 - DNA, 15 bp, Homo sapiens
agatacaacaatttg

SEQ ID NO: 346142 - DNA, 15 bp, Homo sapiens
aagatacaacaattt

SEQ ID NO: 346143 - DNA, 15 bp, Homo sapiens
taagatacaacaatt

SEQ ID NO: 346144 - DNA, 15 bp, Homo sapiens
ctaagatacaacaat

SEQ ID NO: 346145 - DNA, 15 bp, Homo sapiens
tctaagatacaacaa

SEQ ID NO: 346146 - DNA, 15 bp, Homo sapiens
ttctaagatacaaca

SEQ ID NO: 346147 - DNA, 15 bp, Homo sapiens
attctaagatacaac

SEQ ID NO: 346148 - DNA, 15 bp, Homo sapiens
aattctaagatacaa

SEQ ID NO: 346149 - DNA, 15 bp, Homo sapiens
caattctaagataca

SEQ ID NO: 346150 - DNA, 15 bp, Homo sapiens
ccaattctaagatac

SEQ ID NO: 346151 - DNA, 15 bp, Homo sapiens
tccaattctaagata

SEQ ID NO: 346152 - DNA, 15 bp, Homo sapiens
gtccaattctaagat

SEQ ID NO: 346153 - DNA, 15 bp, Homo sapiens
agtccaattctaaga

SEQ ID NO: 346154 - DNA, 15 bp, Homo sapiens
aagtccaattctaag

SEQ ID NO: 346155 - DNA, 15 bp, Homo sapiens
caagtccaattctaa

SEQ ID NO: 346156 - DNA, 15 bp, Homo sapiens
gcaagtccaattcta

SEQ ID NO: 346157 - DNA, 15 bp, Homo sapiens
tgcaagtccaattct

SEQ ID NO: 346158 - DNA, 15 bp, Homo sapiens
atgcaagtccaattc

SEQ ID NO: 346159 - DNA, 15 bp, Homo sapiens
gatgcaagtccaatt

SEQ ID NO: 346160 - DNA, 15 bp, Homo sapiens
agatgcaagtccaat

SEQ ID NO: 346161 - DNA, 15 bp, Homo sapiens
aagatgcaagtccaa

SEQ ID NO: 346162 - DNA, 15 bp, Homo sapiens
caagatgcaagtcca

SEQ ID NO: 346163 - DNA, 15 bp, Homo sapiens
ccaagatgcaagtcc

SEQ ID NO: 346164 - DNA, 15 bp, Homo sapiens
gccaagatgcaagtc

SEQ ID NO: 346165 - DNA, 15 bp, Homo sapiens
tgccaagatgcaagt

SEQ ID NO: 346166 - DNA, 15 bp, Homo sapiens
atgccaagatgcaag

SEQ ID NO: 346167 - DNA, 15 bp, Homo sapiens
aatgccaagatgcaa

SEQ ID NO: 346168 - DNA, 15 bp, Homo sapiens
caatgccaagatgca

SEQ ID NO: 346169 - DNA, 15 bp, Homo sapiens
acaatgccaagatgc

SEQ ID NO: 346170 - DNA, 15 bp, Homo sapiens
cacaatgccaagatg

SEQ ID NO: 346171 - DNA, 15 bp, Homo sapiens
ccacaatgccaagat

SEQ ID NO: 346172 - DNA, 15 bp, Homo sapiens
tccacaatgccaaga

SEQ ID NO: 346173 - DNA, 15 bp, Homo sapiens
atccacaatgccaag

SEQ ID NO: 346174 - DNA, 15 bp, Homo sapiens
aatccacaatgccaa

SEQ ID NO: 346175 - DNA, 15 bp, Homo sapiens
caatccacaatgcca

SEQ ID NO: 346176 - DNA, 15 bp, Homo sapiens
tcaatccacaatgcc

SEQ ID NO: 346177 - DNA, 15 bp, Homo sapiens
ttcaatccacaatgc

SEQ ID NO: 346178 - DNA, 15 bp, Homo sapiens
cttcaatccacaatg

SEQ ID NO: 346179 - DNA, 15 bp, Homo sapiens
ccttcaatccacaat

SEQ ID NO: 346180 - DNA, 15 bp, Homo sapiens
gccttcaatccacaa

SEQ ID NO: 346181 - DNA, 15 bp, Homo sapiens
tgccttcaatccaca

SEQ ID NO: 346182 - DNA, 15 bp, Homo sapiens
ttgccttcaatccac

SEQ ID NO: 346183 - DNA, 15 bp, Homo sapiens
tttgccttcaatcca

SEQ ID NO: 346184 - DNA, 15 bp, Homo sapiens
ttttgccttcaatcc

SEQ ID NO: 346185 - DNA, 15 bp, Homo sapiens
tttttgccttcaatc

SEQ ID NO: 346186 - DNA, 15 bp, Homo sapiens
atttttgccttcaat

SEQ ID NO: 346187 - DNA, 15 bp, Homo sapiens
aatttttgccttcaa

SEQ ID NO: 346188 - DNA, 15 bp, Homo sapiens
taatttttgccttca

SEQ ID NO: 346189 - DNA, 15 bp, Homo sapiens
ctaatttttgccttc

SEQ ID NO: 346190 - DNA, 15 bp, Homo sapiens
tctaatttttgcctt

SEQ ID NO: 346191 - DNA, 15 bp, Homo sapiens
atctaatttttgcct

SEQ ID NO: 346192 - DNA, 15 bp, Homo sapiens
aatctaatttttgcc

SEQ ID NO: 346193 - DNA, 15 bp, Homo sapiens
gaatctaatttttgc

SEQ ID NO: 346194 - DNA, 15 bp, Homo sapiens
ggaatctaatttttg

SEQ ID NO: 346195 - DNA, 15 bp, Homo sapiens
gggaatctaattttt

SEQ ID NO: 346196 - DNA, 15 bp, Homo sapiens
tgggaatctaatttt

SEQ ID NO: 346197 - DNA, 15 bp, Homo sapiens
ctgggaatctaattt

SEQ ID NO: 346198 - DNA, 15 bp, Homo sapiens
tctgggaatctaatt

SEQ ID NO: 346199 - DNA, 15 bp, Homo sapiens
ctctgggaatctaat

SEQ ID NO: 346200 - DNA, 15 bp, Homo sapiens
gctctgggaatctaa

SEQ ID NO: 346201 - DNA, 15 bp, Homo sapiens
tgctctgggaatcta

SEQ ID NO: 346202 - DNA, 15 bp, Homo sapiens
atgctctgggaatct

SEQ ID NO: 346203 - DNA, 15 bp, Homo sapiens
tatgctctgggaatc

SEQ ID NO: 346204 - DNA, 15 bp, Homo sapiens
atatgctctgggaat

SEQ ID NO: 346205 - DNA, 15 bp, Homo sapiens
gatatgctctgggaa

SEQ ID NO: 346206 - DNA, 15 bp, Homo sapiens
tgatatgctctggga

SEQ ID NO: 346207 - DNA, 15 bp, Homo sapiens
gtgatatgctctggg

SEQ ID NO: 346208 - DNA, 15 bp, Homo sapiens
agtgatatgctctgg

SEQ ID NO: 346209 - DNA, 15 bp, Homo sapiens
tagtgatatgctctg

SEQ ID NO: 346210 - DNA, 15 bp, Homo sapiens
gtagtgatatgctct

SEQ ID NO: 346211 - DNA, 15 bp, Homo sapiens
agtagtgatatgctc

SEQ ID NO: 346212 - DNA, 15 bp, Homo sapiens
aagtagtgatatgct

SEQ ID NO: 346213 - DNA, 15 bp, Homo sapiens
aaagtagtgatatgc

SEQ ID NO: 346214 - DNA, 15 bp, Homo sapiens
aaaagtagtgatatg

SEQ ID NO: 346215 - DNA, 15 bp, Homo sapiens
taaaagtagtgatat

SEQ ID NO: 346216 - DNA, 15 bp, Homo sapiens
ataaaagtagtgata

SEQ ID NO: 346217 - DNA, 15 bp, Homo sapiens
aataaaagtagtgat

SEQ ID NO: 346218 - DNA, 15 bp, Homo sapiens
aaataaaagtagtga

SEQ ID NO: 346219 - DNA, 15 bp, Homo sapiens
gaaataaaagtagtg

SEQ ID NO: 346220 - DNA, 15 bp, Homo sapiens
ggaaataaaagtagt

SEQ ID NO: 346221 - DNA, 15 bp, Homo sapiens
aggaaataaaagtag

SEQ ID NO: 346222 - DNA, 15 bp, Homo sapiens
aaggaaataaaagta

SEQ ID NO: 346223 - DNA, 15 bp, Homo sapiens
gaaggaaataaaagt

SEQ ID NO: 346224 - DNA, 15 bp, Homo sapiens
agaaggaaataaaag

SEQ ID NO: 346225 - DNA, 15 bp, Homo sapiens
cagaaggaaataaaa

SEQ ID NO: 346226 - DNA, 15 bp, Homo sapiens
acagaaggaaataaa

SEQ ID NO: 346227 - DNA, 15 bp, Homo sapiens
tacagaaggaaataa

SEQ ID NO: 346228 - DNA, 15 bp, Homo sapiens
atacagaaggaaata

SEQ ID NO: 346229 - DNA, 15 bp, Homo sapiens
gatacagaaggaaat

SEQ ID NO: 346230 - DNA, 15 bp, Homo sapiens
ggatacagaaggaaa

SEQ ID NO: 346231 - DNA, 15 bp, Homo sapiens
aggatacagaaggaa

SEQ ID NO: 346232 - DNA, 15 bp, Homo sapiens
aaggatacagaagga

SEQ ID NO: 346233 - DNA, 15 bp, Homo sapiens
gaaggatacagaagg

SEQ ID NO: 346234 - DNA, 15 bp, Homo sapiens
ggaaggatacagaag

SEQ ID NO: 346235 - DNA, 15 bp, Homo sapiens
aggaaggatacagaa

SEQ ID NO: 346236 - DNA, 15 bp, Homo sapiens
aaggaaggatacaga

SEQ ID NO: 346237 - DNA, 15 bp, Homo sapiens
aaaggaaggatacag

SEQ ID NO: 346238 - DNA, 15 bp, Homo sapiens
gaaaggaaggataca

SEQ ID NO: 346239 - DNA, 15 bp, Homo sapiens
ggaaaggaaggatac

SEQ ID NO: 346240 - DNA, 15 bp, Homo sapiens
gggaaaggaaggata

SEQ ID NO: 346241 - DNA, 15 bp, Homo sapiens
tgggaaaggaaggat

SEQ ID NO: 346242 - DNA, 15 bp, Homo sapiens
atgggaaaggaagga

SEQ ID NO: 346243 - DNA, 15 bp, Homo sapiens
gatgggaaaggaagg

SEQ ID NO: 346244 - DNA, 15 bp, Homo sapiens
agatgggaaaggaag

SEQ ID NO: 346245 - DNA, 15 bp, Homo sapiens
cagatgggaaaggaa

SEQ ID NO: 346246 - DNA, 15 bp, Homo sapiens
acagatgggaaagga

SEQ ID NO: 346247 - DNA, 15 bp, Homo sapiens
gacagatgggaaagg

SEQ ID NO: 346248 - DNA, 15 bp, Homo sapiens
agacagatgggaaag

SEQ ID NO: 346249 - DNA, 15 bp, Homo sapiens
cagacagatgggaaa

SEQ ID NO: 346250 - DNA, 15 bp, Homo sapiens
gcagacagatgggaa

SEQ ID NO: 346251 - DNA, 15 bp, Homo sapiens
agcagacagatggga

SEQ ID NO: 346252 - DNA, 15 bp, Homo sapiens
aagcagacagatggg

SEQ ID NO: 346253 - DNA, 15 bp, Homo sapiens
gaagcagacagatgg

SEQ ID NO: 346254 - DNA, 15 bp, Homo sapiens
agaagcagacagatg

SEQ ID NO: 346255 - DNA, 15 bp, Homo sapiens
tagaagcagacagat

SEQ ID NO: 346256 - DNA, 15 bp, Homo sapiens
ttagaagcagacaga

SEQ ID NO: 346257 - DNA, 15 bp, Homo sapiens
gttagaagcagacag

SEQ ID NO: 346258 - DNA, 15 bp, Homo sapiens
tgttagaagcagaca

SEQ ID NO: 346259 - DNA, 15 bp, Homo sapiens
ttgttagaagcagac

SEQ ID NO: 346260 - DNA, 15 bp, Homo sapiens
tttgttagaagcaga

SEQ ID NO: 346261 - DNA, 15 bp, Homo sapiens
atttgttagaagcag

SEQ ID NO: 346262 - DNA, 15 bp, Homo sapiens
tatttgttagaagca

SEQ ID NO: 346263 - DNA, 15 bp, Homo sapiens
ttatttgttagaagc

SEQ ID NO: 346264 - DNA, 15 bp, Homo sapiens
cttatttgttagaag

SEQ ID NO: 346265 - DNA, 15 bp, Homo sapiens
tcttatttgttagaa

SEQ ID NO: 346266 - DNA, 15 bp, Homo sapiens
gtcttatttgttaga

SEQ ID NO: 346267 - DNA, 15 bp, Homo sapiens
tgtcttatttgttag

SEQ ID NO: 346268 - DNA, 15 bp, Homo sapiens
ttgtcttatttgtta

SEQ ID NO: 346269 - DNA, 15 bp, Homo sapiens
cttgtcttatttgtt

SEQ ID NO: 346270 - DNA, 15 bp, Homo sapiens
gcttgtcttatttgt

SEQ ID NO: 346271 - DNA, 15 bp, Homo sapiens
agcttgtcttatttg

SEQ ID NO: 346272 - DNA, 15 bp, Homo sapiens
tagcttgtcttattt

SEQ ID NO: 346273 - DNA, 15 bp, Homo sapiens
ttagcttgtcttatt

SEQ ID NO: 346274 - DNA, 15 bp, Homo sapiens
cttagcttgtcttat

SEQ ID NO: 346275 - DNA, 15 bp, Homo sapiens
tcttagcttgtctta

SEQ ID NO: 346276 - DNA, 15 bp, Homo sapiens
ttcttagcttgtctt

SEQ ID NO: 346277 - DNA, 15 bp, Homo sapiens
cttcttagcttgtct

SEQ ID NO: 346278 - DNA, 15 bp, Homo sapiens
gcttcttagcttgtc

SEQ ID NO: 346279 - DNA, 15 bp, Homo sapiens
tgcttcttagcttgt

SEQ ID NO: 346280 - DNA, 15 bp, Homo sapiens
ctgcttcttagcttg

SEQ ID NO: 346281 - DNA, 15 bp, Homo sapiens
gctgcttcttagctt

SEQ ID NO: 346282 - DNA, 15 bp, Homo sapiens
agctgcttcttagct

SEQ ID NO: 346283 - DNA, 15 bp, Homo sapiens
aagctgcttcttagc

SEQ ID NO: 346284 - DNA, 15 bp, Homo sapiens
caagctgcttcttag

SEQ ID NO: 346285 - DNA, 15 bp, Homo sapiens
acaagctgcttctta

SEQ ID NO: 346286 - DNA, 15 bp, Homo sapiens
aacaagctgcttctt

SEQ ID NO: 346287 - DNA, 15 bp, Homo sapiens
aaacaagctgcttct

SEQ ID NO: 346288 - DNA, 15 bp, Homo sapiens
gaaacaagctgcttc

SEQ ID NO: 346289 - DNA, 15 bp, Homo sapiens
tgaaacaagctgctt

SEQ ID NO: 346290 - DNA, 15 bp, Homo sapiens
atgaaacaagctgct

SEQ ID NO: 346291 - DNA, 15 bp, Homo sapiens
catgaaacaagctgc

SEQ ID NO: 346292 - DNA, 15 bp, Homo sapiens
tcatgaaacaagctg

SEQ ID NO: 346293 - DNA, 15 bp, Homo sapiens
atcatgaaacaagct

SEQ ID NO: 346294 - DNA, 15 bp, Homo sapiens
aatcatgaaacaagc

SEQ ID NO: 346295 - DNA, 15 bp, Homo sapiens
gaatcatgaaacaag

SEQ ID NO: 346296 - DNA, 15 bp, Homo sapiens
agaatcatgaaacaa

SEQ ID NO: 346297 - DNA, 15 bp, Homo sapiens
tagaatcatgaaaca

SEQ ID NO: 346298 - DNA, 15 bp, Homo sapiens
atagaatcatgaaac

SEQ ID NO: 346299 - DNA, 15 bp, Homo sapiens
tatagaatcatgaaa

SEQ ID NO: 346300 - DNA, 15 bp, Homo sapiens
gtatagaatcatgaa

SEQ ID NO: 346301 - DNA, 15 bp, Homo sapiens
agtatagaatcatga

SEQ ID NO: 346302 - DNA, 15 bp, Homo sapiens
gagtatagaatcatg

SEQ ID NO: 346303 - DNA, 15 bp, Homo sapiens
tgagtatagaatcat

SEQ ID NO: 346304 - DNA, 15 bp, Homo sapiens
gtgagtatagaatca

SEQ ID NO: 346305 - DNA, 15 bp, Homo sapiens
agtgagtatagaatc

SEQ ID NO: 346306 - DNA, 15 bp, Homo sapiens
aagtgagtatagaat

SEQ ID NO: 346307 - DNA, 15 bp, Homo sapiens
gaagtgagtatagaa

SEQ ID NO: 346308 - DNA, 15 bp, Homo sapiens
ggaagtgagtataga

SEQ ID NO: 346309 - DNA, 15 bp, Homo sapiens
tggaagtgagtatag

SEQ ID NO: 346310 - DNA, 15 bp, Homo sapiens
ttggaagtgagtata

SEQ ID NO: 346311 - DNA, 15 bp, Homo sapiens
cttggaagtgagtat

SEQ ID NO: 346312 - DNA, 15 bp, Homo sapiens
gcttggaagtgagta

SEQ ID NO: 346313 - DNA, 15 bp, Homo sapiens
agcttggaagtgagt

SEQ ID NO: 346314 - DNA, 15 bp, Homo sapiens
aagcttggaagtgag

SEQ ID NO: 346315 - DNA, 15 bp, Homo sapiens
aaagcttggaagtga

SEQ ID NO: 346316 - DNA, 15 bp, Homo sapiens
gaaagcttggaagtg

SEQ ID NO: 346317 - DNA, 15 bp, Homo sapiens
agaaagcttggaagt

SEQ ID NO: 346318 - DNA, 15 bp, Homo sapiens
gagaaagcttggaag

SEQ ID NO: 346319 - DNA, 15 bp, Homo sapiens
agagaaagcttggaa

SEQ ID NO: 346320 - DNA, 15 bp, Homo sapiens
cagagaaagcttgga

SEQ ID NO: 346321 - DNA, 15 bp, Homo sapiens
gcagagaaagcttgg

SEQ ID NO: 346322 - DNA, 15 bp, Homo sapiens
tgcagagaaagcttg

SEQ ID NO: 346323 - DNA, 15 bp, Homo sapiens
atgcagagaaagctt

SEQ ID NO: 346324 - DNA, 15 bp, Homo sapiens
tatgcagagaaagct

SEQ ID NO: 346325 - DNA, 15 bp, Homo sapiens
ctatgcagagaaagc

SEQ ID NO: 346326 - DNA, 15 bp, Homo sapiens
tctatgcagagaaag

SEQ ID NO: 346327 - DNA, 15 bp, Homo sapiens
gtctatgcagagaaa

SEQ ID NO: 346328 - DNA, 15 bp, Homo sapiens
agtctatgcagagaa

SEQ ID NO: 346329 - DNA, 15 bp, Homo sapiens
aagtctatgcagaga

SEQ ID NO: 346330 - DNA, 15 bp, Homo sapiens
aaagtctatgcagag

SEQ ID NO: 346331 - DNA, 15 bp, Homo sapiens
gaaagtctatgcaga

SEQ ID NO: 346332 - DNA, 15 bp, Homo sapiens
ggaaagtctatgcag

SEQ ID NO: 346333 - DNA, 15 bp, Homo sapiens
aggaaagtctatgca

SEQ ID NO: 346334 - DNA, 15 bp, Homo sapiens
taggaaagtctatgc

SEQ ID NO: 346335 - DNA, 15 bp, Homo sapiens
ctaggaaagtctatg

SEQ ID NO: 346336 - DNA, 15 bp, Homo sapiens
actaggaaagtctat

SEQ ID NO: 346337 - DNA, 15 bp, Homo sapiens
aactaggaaagtcta

SEQ ID NO: 346338 - DNA, 15 bp, Homo sapiens
aaactaggaaagtct

SEQ ID NO: 346339 - DNA, 15 bp, Homo sapiens
caaactaggaaagtc

SEQ ID NO: 346340 - DNA, 15 bp, Homo sapiens
gcaaactaggaaagt

SEQ ID NO: 346341 - DNA, 15 bp, Homo sapiens
ggcaaactaggaaag

SEQ ID NO: 346342 - DNA, 15 bp, Homo sapiens
tggcaaactaggaaa

SEQ ID NO: 346343 - DNA, 15 bp, Homo sapiens
gtggcaaactaggaa

SEQ ID NO: 346344 - DNA, 15 bp, Homo sapiens
agtggcaaactagga

SEQ ID NO: 346345 - DNA, 15 bp, Homo sapiens
aagtggcaaactagg

SEQ ID NO: 346346 - DNA, 15 bp, Homo sapiens
aaagtggcaaactag

SEQ ID NO: 346347 - DNA, 15 bp, Homo sapiens
taaagtggcaaacta

SEQ ID NO: 346348 - DNA, 15 bp, Homo sapiens
ataaagtggcaaact

SEQ ID NO: 346349 - DNA, 15 bp, Homo sapiens
gataaagtggcaaac

SEQ ID NO: 346350 - DNA, 15 bp, Homo sapiens
agataaagtggcaaa

SEQ ID NO: 346351 - DNA, 15 bp, Homo sapiens
aagataaagtggcaa

SEQ ID NO: 346352 - DNA, 15 bp, Homo sapiens
aaagataaagtggca

SEQ ID NO: 346353 - DNA, 15 bp, Homo sapiens
aaaagataaagtggc

SEQ ID NO: 346354 - DNA, 15 bp, Homo sapiens
gaaaagataaagtgg

SEQ ID NO: 346355 - DNA, 15 bp, Homo sapiens
agaaaagataaagtg

SEQ ID NO: 346356 - DNA, 15 bp, Homo sapiens
gagaaaagataaagt

SEQ ID NO: 346357 - DNA, 15 bp, Homo sapiens
ggagaaaagataaag

SEQ ID NO: 346358 - DNA, 15 bp, Homo sapiens
tggagaaaagataaa

SEQ ID NO: 346359 - DNA, 15 bp, Homo sapiens
atggagaaaagataa

SEQ ID NO: 346360 - DNA, 15 bp, Homo sapiens
gatggagaaaagata

SEQ ID NO: 346361 - DNA, 15 bp, Homo sapiens
ggatggagaaaagat

SEQ ID NO: 346362 - DNA, 15 bp, Homo sapiens
gggatggagaaaaga

SEQ ID NO: 346363 - DNA, 15 bp, Homo sapiens
agggatggagaaaag

SEQ ID NO: 346364 - DNA, 15 bp, Homo sapiens
ggagggatggagaaa

SEQ ID NO: 346365 - DNA, 15 bp, Homo sapiens
tggagggatggagaa

SEQ ID NO: 346366 - DNA, 15 bp, Homo sapiens
ctggagggatggaga

SEQ ID NO: 346367 - DNA, 15 bp, Homo sapiens
gctggagggatggag

SEQ ID NO: 346368 - DNA, 15 bp, Homo sapiens
ggctggagggatgga

SEQ ID NO: 346369 - DNA, 15 bp, Homo sapiens
tggctggagggatgg

SEQ ID NO: 346370 - DNA, 15 bp, Homo sapiens
ctggctggagggatg

SEQ ID NO: 346371 - DNA, 15 bp, Homo sapiens
actggctggagggat

SEQ ID NO: 346372 - DNA, 15 bp, Homo sapiens
gactggctggaggga

SEQ ID NO: 346373 - DNA, 15 bp, Homo sapiens
tgactggctggaggg

SEQ ID NO: 346374 - DNA, 15 bp, Homo sapiens
atgactggctggagg

SEQ ID NO: 346375 - DNA, 15 bp, Homo sapiens
catgactggctggag

SEQ ID NO: 346376 - DNA, 15 bp, Homo sapiens
tcatgactggctgga

SEQ ID NO: 346377 - DNA, 15 bp, Homo sapiens
ctcatgactggctgg

SEQ ID NO: 346378 - DNA, 15 bp, Homo sapiens
tctcatgactggctg

SEQ ID NO: 346379 - DNA, 15 bp, Homo sapiens
atctcatgactggct

SEQ ID NO: 346380 - DNA, 15 bp, Homo sapiens
aatctcatgactggc

SEQ ID NO: 346381 - DNA, 15 bp, Homo sapiens
gaatctcatgactgg

SEQ ID NO: 346382 - DNA, 15 bp, Homo sapiens
agaatctcatgactg

SEQ ID NO: 346383 - DNA, 15 bp, Homo sapiens
tagaatctcatgact

SEQ ID NO: 346384 - DNA, 15 bp, Homo sapiens
gtagaatctcatgac

SEQ ID NO: 346385 - DNA, 15 bp, Homo sapiens
agtagaatctcatga

SEQ ID NO: 346386 - DNA, 15 bp, Homo sapiens
gagtagaatctcatg

SEQ ID NO: 346387 - DNA, 15 bp, Homo sapiens
ggagtagaatctcat

SEQ ID NO: 346388 - DNA, 15 bp, Homo sapiens
gggagtagaatctca

SEQ ID NO: 346389 - DNA, 15 bp, Homo sapiens
ggggagtagaatctc

SEQ ID NO: 346390 - DNA, 15 bp, Homo sapiens
tggggagtagaatct

SEQ ID NO: 346391 - DNA, 15 bp, Homo sapiens
atggggagtagaatc

SEQ ID NO: 346392 - DNA, 15 bp, Homo sapiens
aatggggagtagaat

SEQ ID NO: 346393 - DNA, 15 bp, Homo sapiens
gaatggggagtagaa

SEQ ID NO: 346394 - DNA, 15 bp, Homo sapiens
tgaatggggagtaga

SEQ ID NO: 346395 - DNA, 15 bp, Homo sapiens
atgaatggggagtag

SEQ ID NO: 346396 - DNA, 15 bp, Homo sapiens
tatgaatggggagta

SEQ ID NO: 346397 - DNA, 15 bp, Homo sapiens
gtatgaatggggagt

SEQ ID NO: 346398 - DNA, 15 bp, Homo sapiens
tgtatgaatggggag

SEQ ID NO: 346399 - DNA, 15 bp, Homo sapiens
atgtatgaatgggga

SEQ ID NO: 346400 - DNA, 15 bp, Homo sapiens
catgtatgaatgggg

SEQ ID NO: 346401 - DNA, 15 bp, Homo sapiens
gcatgtatgaatggg

SEQ ID NO: 346402 - DNA, 15 bp, Homo sapiens
tgcatgtatgaatgg

SEQ ID NO: 346403 - DNA, 15 bp, Homo sapiens
atgcatgtatgaatg

SEQ ID NO: 346404 - DNA, 15 bp, Homo sapiens
aatgcatgtatgaat

SEQ ID NO: 346405 - DNA, 15 bp, Homo sapiens
aaatgcatgtatgaa

SEQ ID NO: 346406 - DNA, 15 bp, Homo sapiens
taaatgcatgtatga

SEQ ID NO: 346407 - DNA, 15 bp, Homo sapiens
ataaatgcatgtatg

SEQ ID NO: 346408 - DNA, 15 bp, Homo sapiens
aataaatgcatgtat

SEQ ID NO: 346409 - DNA, 15 bp, Homo sapiens
aaataaatgcatgta

SEQ ID NO: 346410 - DNA, 15 bp, Homo sapiens
taaataaatgcatgt

SEQ ID NO: 346411 - DNA, 15 bp, Homo sapiens
ataaataaatgcatg

SEQ ID NO: 346412 - DNA, 15 bp, Homo sapiens
gataaataaatgcat

SEQ ID NO: 346413 - DNA, 15 bp, Homo sapiens
ggataaataaatgca

SEQ ID NO: 346414 - DNA, 15 bp, Homo sapiens
tggataaataaatgc

SEQ ID NO: 346415 - DNA, 15 bp, Homo sapiens
ctggataaataaatg

SEQ ID NO: 346416 - DNA, 15 bp, Homo sapiens
tctggataaataaat

SEQ ID NO: 346417 - DNA, 15 bp, Homo sapiens
gtctggataaataaa

SEQ ID NO: 346418 - DNA, 15 bp, Homo sapiens
agtctggataaataa

SEQ ID NO: 346419 - DNA, 15 bp, Homo sapiens
aagtctggataaata

SEQ ID NO: 346420 - DNA, 15 bp, Homo sapiens
aaagtctggataaat

SEQ ID NO: 346421 - DNA, 15 bp, Homo sapiens
taaagtctggataaa

SEQ ID NO: 346422 - DNA, 15 bp, Homo sapiens
gtaaagtctggataa

SEQ ID NO: 346423 - DNA, 15 bp, Homo sapiens
agtaaagtctggata

SEQ ID NO: 346424 - DNA, 15 bp, Homo sapiens
cagtaaagtctggat

SEQ ID NO: 346425 - DNA, 15 bp, Homo sapiens
tcagtaaagtctgga

SEQ ID NO: 346426 - DNA, 15 bp, Homo sapiens
ttcagtaaagtctgg

SEQ ID NO: 346427 - DNA, 15 bp, Homo sapiens
cttcagtaaagtctg

SEQ ID NO: 346428 - DNA, 15 bp, Homo sapiens
ccttcagtaaagtct

SEQ ID NO: 346429 - DNA, 15 bp, Homo sapiens
gccttcagtaaagtc

SEQ ID NO: 346430 - DNA, 15 bp, Homo sapiens
agccttcagtaaagt

SEQ ID NO: 346431 - DNA, 15 bp, Homo sapiens
aagccttcagtaaag

SEQ ID NO: 346432 - DNA, 15 bp, Homo sapiens
taagccttcagtaaa

SEQ ID NO: 346433 - DNA, 15 bp, Homo sapiens
gtaagccttcagtaa

SEQ ID NO: 346434 - DNA, 15 bp, Homo sapiens
agtaagccttcagta

SEQ ID NO: 346435 - DNA, 15 bp, Homo sapiens
gagtaagccttcagt

SEQ ID NO: 346436 - DNA, 15 bp, Homo sapiens
agagtaagccttcag

SEQ ID NO: 346437 - DNA, 15 bp, Homo sapiens
aagagtaagccttca

SEQ ID NO: 346438 - DNA, 15 bp, Homo sapiens
aaagagtaagccttc

SEQ ID NO: 346439 - DNA, 15 bp, Homo sapiens
caaagagtaagcctt

SEQ ID NO: 346440 - DNA, 15 bp, Homo sapiens
tcaaagagtaagcct

SEQ ID NO: 346441 - DNA, 15 bp, Homo sapiens
ttcaaagagtaagcc

SEQ ID NO: 346442 - DNA, 15 bp, Homo sapiens
gttcaaagagtaagc

SEQ ID NO: 346443 - DNA, 15 bp, Homo sapiens
agttcaaagagtaag

SEQ ID NO: 346444 - DNA, 15 bp, Homo sapiens
aagttcaaagagtaa

SEQ ID NO: 346445 - DNA, 15 bp, Homo sapiens
aaagttcaaagagta

SEQ ID NO: 346446 - DNA, 15 bp, Homo sapiens
caaagttcaaagagt

SEQ ID NO: 346447 - DNA, 15 bp, Homo sapiens
gcaaagttcaaagag

SEQ ID NO: 346448 - DNA, 15 bp, Homo sapiens
tgcaaagttcaaaga

SEQ ID NO: 346449 - DNA, 15 bp, Homo sapiens
ttgcaaagttcaaag

SEQ ID NO: 346450 - DNA, 15 bp, Homo sapiens
tttgcaaagttcaaa

SEQ ID NO: 346451 - DNA, 15 bp, Homo sapiens
ttttgcaaagttcaa

SEQ ID NO: 346452 - DNA, 15 bp, Homo sapiens
attttgcaaagttca

SEQ ID NO: 346453 - DNA, 15 bp, Homo sapiens
cattttgcaaagttc

SEQ ID NO: 346454 - DNA, 15 bp, Homo sapiens
gcattttgcaaagtt

SEQ ID NO: 346455 - DNA, 15 bp, Homo sapiens
ggcattttgcaaagt

SEQ ID NO: 346456 - DNA, 15 bp, Homo sapiens
tggcattttgcaaag

SEQ ID NO: 346457 - DNA, 15 bp, Homo sapiens
ctggcattttgcaaa

SEQ ID NO: 346458 - DNA, 15 bp, Homo sapiens
actggcattttgcaa

SEQ ID NO: 346459 - DNA, 15 bp, Homo sapiens
cactggcattttgca

SEQ ID NO: 346460 - DNA, 15 bp, Homo sapiens
tcactggcattttgc

SEQ ID NO: 346461 - DNA, 15 bp, Homo sapiens
ctcactggcattttg

SEQ ID NO: 346462 - DNA, 15 bp, Homo sapiens
cctcactggcatttt

SEQ ID NO: 346463 - DNA, 15 bp, Homo sapiens
gcctcactggcattt

SEQ ID NO: 346464 - DNA, 15 bp, Homo sapiens
tgcctcactggcatt

SEQ ID NO: 346465 - DNA, 15 bp, Homo sapiens
ttgcctcactggcat

SEQ ID NO: 346466 - DNA, 15 bp, Homo sapiens
tttgcctcactggca

SEQ ID NO: 346467 - DNA, 15 bp, Homo sapiens
ctttgcctcactggc

SEQ ID NO: 346468 - DNA, 15 bp, Homo sapiens
gctttgcctcactgg

SEQ ID NO: 346469 - DNA, 15 bp, Homo sapiens
tgctttgcctcactg

SEQ ID NO: 346470 - DNA, 15 bp, Homo sapiens
atgctttgcctcact

SEQ ID NO: 346471 - DNA, 15 bp, Homo sapiens
catgctttgcctcac

SEQ ID NO: 346472 - DNA, 15 bp, Homo sapiens
gcatgctttgcctca

SEQ ID NO: 346473 - DNA, 15 bp, Homo sapiens
tgcatgctttgcctc

SEQ ID NO: 346474 - DNA, 15 bp, Homo sapiens
atgcatgctttgcct

SEQ ID NO: 346475 - DNA, 15 bp, Homo sapiens
gatgcatgctttgcc

SEQ ID NO: 346476 - DNA, 15 bp, Homo sapiens
ggatgcatgctttgc

SEQ ID NO: 346477 - DNA, 15 bp, Homo sapiens
aggatgcatgctttg

SEQ ID NO: 346478 - DNA, 15 bp, Homo sapiens
caggatgcatgcttt

SEQ ID NO: 346479 - DNA, 15 bp, Homo sapiens
acaggatgcatgctt

SEQ ID NO: 346480 - DNA, 15 bp, Homo sapiens
tacaggatgcatgct

SEQ ID NO: 346481 - DNA, 15 bp, Homo sapiens
gtacaggatgcatgc

SEQ ID NO: 346482 - DNA, 15 bp, Homo sapiens
tgtacaggatgcatg

SEQ ID NO: 346483 - DNA, 15 bp, Homo sapiens
ctgtacaggatgcat

SEQ ID NO: 346484 - DNA, 15 bp, Homo sapiens
cctgtacaggatgca

SEQ ID NO: 346485 - DNA, 15 bp, Homo sapiens
tcctgtacaggatgc

SEQ ID NO: 346486 - DNA, 15 bp, Homo sapiens
ttcctgtacaggatg

SEQ ID NO: 346487 - DNA, 15 bp, Homo sapiens
tttcctgtacaggat

SEQ ID NO: 346488 - DNA, 15 bp, Homo sapiens
ttttcctgtacagga

SEQ ID NO: 346489 - DNA, 15 bp, Homo sapiens
tttttcctgtacagg

SEQ ID NO: 346490 - DNA, 15 bp, Homo sapiens
gtttttcctgtacag

SEQ ID NO: 346491 - DNA, 15 bp, Homo sapiens
agtttttcctgtaca

SEQ ID NO: 346492 - DNA, 15 bp, Homo sapiens
gagtttttcctgtac

SEQ ID NO: 346493 - DNA, 15 bp, Homo sapiens
tgagtttttcctgta

SEQ ID NO: 346494 - DNA, 15 bp, Homo sapiens
ctgagtttttcctgt

SEQ ID NO: 346495 - DNA, 15 bp, Homo sapiens
actgagtttttcctg

SEQ ID NO: 346496 - DNA, 15 bp, Homo sapiens
gactgagtttttcct

SEQ ID NO: 346497 - DNA, 15 bp, Homo sapiens
agactgagtttttcc

SEQ ID NO: 346498 - DNA, 15 bp, Homo sapiens
tagactgagtttttc

SEQ ID NO: 346499 - DNA, 15 bp, Homo sapiens
ctagactgagttttt

SEQ ID NO: 346500 - DNA, 15 bp, Homo sapiens
tctagactgagtttt

SEQ ID NO: 346501 - DNA, 15 bp, Homo sapiens
ctctagactgagttt

SEQ ID NO: 346502 - DNA, 15 bp, Homo sapiens
cctctagactgagtt

SEQ ID NO: 346503 - DNA, 15 bp, Homo sapiens
ccctctagactgagt

SEQ ID NO: 346504 - DNA, 15 bp, Homo sapiens
cccctctagactgag

SEQ ID NO: 346505 - DNA, 15 bp, Homo sapiens
tcccctctagactga

SEQ ID NO: 346506 - DNA, 15 bp, Homo sapiens
ctcccctctagactg

SEQ ID NO: 346507 - DNA, 15 bp, Homo sapiens
tctcccctctagact

SEQ ID NO: 346508 - DNA, 15 bp, Homo sapiens
ctctcccctctagac

SEQ ID NO: 346509 - DNA, 15 bp, Homo sapiens
tctctcccctctaga

SEQ ID NO: 346510 - DNA, 15 bp, Homo sapiens
atctctcccctctag

SEQ ID NO: 346511 - DNA, 15 bp, Homo sapiens
tatctctcccctcta

SEQ ID NO: 346512 - DNA, 15 bp, Homo sapiens
ttatctctcccctct

SEQ ID NO: 346513 - DNA, 15 bp, Homo sapiens
cttatctctcccctc

SEQ ID NO: 346514 - DNA, 15 bp, Homo sapiens
gcttatctctcccct

SEQ ID NO: 346515 - DNA, 15 bp, Homo sapiens
tgcttatctctcccc

SEQ ID NO: 346516 - DNA, 15 bp, Homo sapiens
ttgcttatctctccc

SEQ ID NO: 346517 - DNA, 15 bp, Homo sapiens
tttgcttatctctcc

SEQ ID NO: 346518 - DNA, 15 bp, Homo sapiens
gtttgcttatctctc

SEQ ID NO: 346519 - DNA, 15 bp, Homo sapiens
tgtttgcttatctct

SEQ ID NO: 346520 - DNA, 15 bp, Homo sapiens
ttgtttgcttatctc

SEQ ID NO: 346521 - DNA, 15 bp, Homo sapiens
cttgtttgcttatct

SEQ ID NO: 346522 - DNA, 15 bp, Homo sapiens
acttgtttgcttatc

SEQ ID NO: 346523 - DNA, 15 bp, Homo sapiens
cacttgtttgcttat

SEQ ID NO: 346524 - DNA, 15 bp, Homo sapiens
tcacttgtttgctta

SEQ ID NO: 346525 - DNA, 15 bp, Homo sapiens
atcacttgtttgctt

SEQ ID NO: 346526 - DNA, 15 bp, Homo sapiens
aatcacttgtttgct

SEQ ID NO: 346527 - DNA, 15 bp, Homo sapiens
taatcacttgtttgc

SEQ ID NO: 346528 - DNA, 15 bp, Homo sapiens
gtaatcacttgtttg

SEQ ID NO: 346529 - DNA, 15 bp, Homo sapiens
ggtaatcacttgttt

SEQ ID NO: 346530 - DNA, 15 bp, Homo sapiens
tggtaatcacttgtt

SEQ ID NO: 346531 - DNA, 15 bp, Homo sapiens
gtggtaatcacttgt

SEQ ID NO: 346532 - DNA, 15 bp, Homo sapiens
tgtggtaatcacttg

SEQ ID NO: 346533 - DNA, 15 bp, Homo sapiens
gtgtggtaatcactt

SEQ ID NO: 346534 - DNA, 15 bp, Homo sapiens
ggtgtggtaatcact

SEQ ID NO: 346535 - DNA, 15 bp, Homo sapiens
tggtgtggtaatcac

SEQ ID NO: 346536 - DNA, 15 bp, Homo sapiens
ctggtgtggtaatca

SEQ ID NO: 346537 - DNA, 15 bp, Homo sapiens
gctggtgtggtaatc

SEQ ID NO: 346538 - DNA, 15 bp, Homo sapiens
agctggtgtggtaat

SEQ ID NO: 346539 - DNA, 15 bp, Homo sapiens
gagctggtgtggtaa

SEQ ID NO: 346540 - DNA, 15 bp, Homo sapiens
ggagctggtgtggta

SEQ ID NO: 346541 - DNA, 15 bp, Homo sapiens
gggagctggtgtggt

SEQ ID NO: 346542 - DNA, 15 bp, Homo sapiens
ggggagctggtgtgg

SEQ ID NO: 346543 - DNA, 15 bp, Homo sapiens
aggggagctggtgtg

SEQ ID NO: 346544 - DNA, 15 bp, Homo sapiens
caggggagctggtgt

SEQ ID NO: 346545 - DNA, 15 bp, Homo sapiens
acaggggagctggtg

SEQ ID NO: 346546 - DNA, 15 bp, Homo sapiens
aacaggggagctggt

SEQ ID NO: 346547 - DNA, 15 bp, Homo sapiens
gaacaggggagctgg

SEQ ID NO: 346548 - DNA, 15 bp, Homo sapiens
tgaacaggggagctg

SEQ ID NO: 346549 - DNA, 15 bp, Homo sapiens
atgaacaggggagct

SEQ ID NO: 346550 - DNA, 15 bp, Homo sapiens
aatgaacaggggagc

SEQ ID NO: 346551 - DNA, 15 bp, Homo sapiens
gaatgaacaggggag

SEQ ID NO: 346552 - DNA, 15 bp, Homo sapiens
tgaatgaacagggga

SEQ ID NO: 346553 - DNA, 15 bp, Homo sapiens
gtgaatgaacagggg

SEQ ID NO: 346554 - DNA, 15 bp, Homo sapiens
ggtgaatgaacaggg

SEQ ID NO: 346555 - DNA, 15 bp, Homo sapiens
aggtgaatgaacagg

SEQ ID NO: 346556 - DNA, 15 bp, Homo sapiens
aaggtgaatgaacag

SEQ ID NO: 346557 - DNA, 15 bp, Homo sapiens
caaggtgaatgaaca

SEQ ID NO: 346558 - DNA, 15 bp, Homo sapiens
gcaaggtgaatgaac

SEQ ID NO: 346559 - DNA, 15 bp, Homo sapiens
agcaaggtgaatgaa

SEQ ID NO: 346560 - DNA, 15 bp, Homo sapiens
gagcaaggtgaatga

SEQ ID NO: 346561 - DNA, 15 bp, Homo sapiens
agagcaaggtgaatg

SEQ ID NO: 346562 - DNA, 15 bp, Homo sapiens
cagagcaaggtgaat

SEQ ID NO: 346563 - DNA, 15 bp, Homo sapiens
gcagagcaaggtgaa

SEQ ID NO: 346564 - DNA, 15 bp, Homo sapiens
agcagagcaaggtga

SEQ ID NO: 346565 - DNA, 15 bp, Homo sapiens
gagcagagcaaggtg

SEQ ID NO: 346566 - DNA, 15 bp, Homo sapiens
agagcagagcaaggt

SEQ ID NO: 346567 - DNA, 15 bp, Homo sapiens
aagagcagagcaagg

SEQ ID NO: 346568 - DNA, 15 bp, Homo sapiens
gaagagcagagcaag

SEQ ID NO: 346569 - DNA, 15 bp, Homo sapiens
ggaagagcagagcaa

SEQ ID NO: 346570 - DNA, 15 bp, Homo sapiens
gggaagagcagagca

SEQ ID NO: 346571 - DNA, 15 bp, Homo sapiens
ggggaagagcagagc

SEQ ID NO: 346572 - DNA, 15 bp, Homo sapiens
tggggaagagcagag

SEQ ID NO: 346573 - DNA, 15 bp, Homo sapiens
ttggggaagagcaga

SEQ ID NO: 346574 - DNA, 15 bp, Homo sapiens
attggggaagagcag

SEQ ID NO: 346575 - DNA, 15 bp, Homo sapiens
cattggggaagagca

SEQ ID NO: 346576 - DNA, 15 bp, Homo sapiens
ccattggggaagagc

SEQ ID NO: 346577 - DNA, 15 bp, Homo sapiens
tccattggggaagag

SEQ ID NO: 346578 - DNA, 15 bp, Homo sapiens
gtccattggggaaga

SEQ ID NO: 346579 - DNA, 15 bp, Homo sapiens
tgtccattggggaag

SEQ ID NO: 346580 - DNA, 15 bp, Homo sapiens
gtgtccattggggaa

SEQ ID NO: 346581 - DNA, 15 bp, Homo sapiens
ggtgtccattgggga

SEQ ID NO: 346582 - DNA, 15 bp, Homo sapiens
aggtgtccattgggg

SEQ ID NO: 346583 - DNA, 15 bp, Homo sapiens
gaggtgtccattggg

SEQ ID NO: 346584 - DNA, 15 bp, Homo sapiens
ggaggtgtccattgg

SEQ ID NO: 346585 - DNA, 15 bp, Homo sapiens
tggaggtgtccattg

SEQ ID NO: 346586 - DNA, 15 bp, Homo sapiens
ttggaggtgtccatt

SEQ ID NO: 346587 - DNA, 15 bp, Homo sapiens
gttggaggtgtccat

SEQ ID NO: 346588 - DNA, 15 bp, Homo sapiens
tgttggaggtgtcca

SEQ ID NO: 346589 - DNA, 15 bp, Homo sapiens
ctgttggaggtgtcc

SEQ ID NO: 346590 - DNA, 15 bp, Homo sapiens
tctgttggaggtgtc

SEQ ID NO: 346591 - DNA, 15 bp, Homo sapiens
ctctgttggaggtgt

SEQ ID NO: 346592 - DNA, 15 bp, Homo sapiens
cctctgttggaggtg

SEQ ID NO: 346593 - DNA, 15 bp, Homo sapiens
gcctctgttggaggt

SEQ ID NO: 346594 - DNA, 15 bp, Homo sapiens
agcctctgttggagg

SEQ ID NO: 346595 - DNA, 15 bp, Homo sapiens
cagcctctgttggag

SEQ ID NO: 346596 - DNA, 15 bp, Homo sapiens
gcagcctctgttgga

SEQ ID NO: 346597 - DNA, 15 bp, Homo sapiens
tgcagcctctgttgg

SEQ ID NO: 346598 - DNA, 15 bp, Homo sapiens
atgcagcctctgttg

SEQ ID NO: 346599 - DNA, 15 bp, Homo sapiens
gatgcagcctctgtt

SEQ ID NO: 346600 - DNA, 15 bp, Homo sapiens
agatgcagcctctgt

SEQ ID NO: 346601 - DNA, 15 bp, Homo sapiens
gagatgcagcctctg

SEQ ID NO: 346602 - DNA, 15 bp, Homo sapiens
agagatgcagcctct

SEQ ID NO: 346603 - DNA, 15 bp, Homo sapiens
cagagatgcagcctc

SEQ ID NO: 346604 - DNA, 15 bp, Homo sapiens
gcagagatgcagcct

SEQ ID NO: 346605 - DNA, 15 bp, Homo sapiens
tgcagagatgcagcc

SEQ ID NO: 346606 - DNA, 15 bp, Homo sapiens
ttgcagagatgcagc

SEQ ID NO: 346607 - DNA, 15 bp, Homo sapiens
gttgcagagatgcag

SEQ ID NO: 346608 - DNA, 15 bp, Homo sapiens
tgttgcagagatgca

SEQ ID NO: 346609 - DNA, 15 bp, Homo sapiens
ctgttgcagagatgc

SEQ ID NO: 346610 - DNA, 15 bp, Homo sapiens
cctgttgcagagatg

SEQ ID NO: 346611 - DNA, 15 bp, Homo sapiens
tcctgttgcagagat

SEQ ID NO: 346612 - DNA, 15 bp, Homo sapiens
atcctgttgcagaga

SEQ ID NO: 346613 - DNA, 15 bp, Homo sapiens
catcctgttgcagag

SEQ ID NO: 346614 - DNA, 15 bp, Homo sapiens
gcatcctgttgcaga

SEQ ID NO: 346615 - DNA, 15 bp, Homo sapiens
tgcatcctgttgcag

SEQ ID NO: 346616 - DNA, 15 bp, Homo sapiens
ctgcatcctgttgca

SEQ ID NO: 346617 - DNA, 15 bp, Homo sapiens
actgcatcctgttgc

SEQ ID NO: 346618 - DNA, 15 bp, Homo sapiens
gactgcatcctgttg

SEQ ID NO: 346619 - DNA, 15 bp, Homo sapiens
ggactgcatcctgtt

SEQ ID NO: 346620 - DNA, 15 bp, Homo sapiens
aggactgcatcctgt

SEQ ID NO: 346621 - DNA, 15 bp, Homo sapiens
aaggactgcatcctg

SEQ ID NO: 346622 - DNA, 15 bp, Homo sapiens
taaggactgcatcct

SEQ ID NO: 346623 - DNA, 15 bp, Homo sapiens
ttaaggactgcatcc

SEQ ID NO: 346624 - DNA, 15 bp, Homo sapiens
cttaaggactgcatc

SEQ ID NO: 346625 - DNA, 15 bp, Homo sapiens
gcttaaggactgcat

SEQ ID NO: 346626 - DNA, 15 bp, Homo sapiens
ggcttaaggactgca

SEQ ID NO: 346627 - DNA, 15 bp, Homo sapiens
gggcttaaggactgc

SEQ ID NO: 346628 - DNA, 15 bp, Homo sapiens
tgggcttaaggactg

SEQ ID NO: 346629 - DNA, 15 bp, Homo sapiens
ctgggcttaaggact

SEQ ID NO: 346630 - DNA, 15 bp, Homo sapiens
cctgggcttaaggac

SEQ ID NO: 346631 - DNA, 15 bp, Homo sapiens
atcctgggcttaagg

SEQ ID NO: 346632 - DNA, 15 bp, Homo sapiens
aatcctgggcttaag

SEQ ID NO: 346633 - DNA, 15 bp, Homo sapiens
caatcctgggcttaa

SEQ ID NO: 346634 - DNA, 15 bp, Homo sapiens
acaatcctgggctta

SEQ ID NO: 346635 - DNA, 15 bp, Homo sapiens
cacaatcctgggctt

SEQ ID NO: 346636 - DNA, 15 bp, Homo sapiens
tcacaatcctgggct

SEQ ID NO: 346637 - DNA, 15 bp, Homo sapiens
gtcacaatcctgggc

SEQ ID NO: 346638 - DNA, 15 bp, Homo sapiens
tgtcacaatcctggg

SEQ ID NO: 346639 - DNA, 15 bp, Homo sapiens
atgtcacaatcctgg

SEQ ID NO: 346640 - DNA, 15 bp, Homo sapiens
aatgtcacaatcctg

SEQ ID NO: 346641 - DNA, 15 bp, Homo sapiens
caatgtcacaatcct

SEQ ID NO: 346642 - DNA, 15 bp, Homo sapiens
ccaatgtcacaatcc

SEQ ID NO: 346643 - DNA, 15 bp, Homo sapiens
gccaatgtcacaatc

SEQ ID NO: 346644 - DNA, 15 bp, Homo sapiens
ggccaatgtcacaat

SEQ ID NO: 346645 - DNA, 15 bp, Homo sapiens
tggccaatgtcacaa

SEQ ID NO: 346646 - DNA, 15 bp, Homo sapiens
ttggccaatgtcaca

SEQ ID NO: 346647 - DNA, 15 bp, Homo sapiens
gttggccaatgtcac

SEQ ID NO: 346648 - DNA, 15 bp, Homo sapiens
agttggccaatgtca

SEQ ID NO: 346649 - DNA, 15 bp, Homo sapiens
gagttggccaatgtc

SEQ ID NO: 346650 - DNA, 15 bp, Homo sapiens
agagttggccaatgt

SEQ ID NO: 346651 - DNA, 15 bp, Homo sapiens
gagagttggccaatg

SEQ ID NO: 346652 - DNA, 15 bp, Homo sapiens
agagagttggccaat

SEQ ID NO: 346653 - DNA, 15 bp, Homo sapiens
cagagagttggccaa

SEQ ID NO: 346654 - DNA, 15 bp, Homo sapiens
acagagagttggcca

SEQ ID NO: 346655 - DNA, 15 bp, Homo sapiens
cacagagagttggcc

SEQ ID NO: 346656 - DNA, 15 bp, Homo sapiens
ccacagagagttggc

SEQ ID NO: 346657 - DNA, 15 bp, Homo sapiens
gccacagagagttgg

SEQ ID NO: 346658 - DNA, 15 bp, Homo sapiens
tgccacagagagttg

SEQ ID NO: 346659 - DNA, 15 bp, Homo sapiens
ctgccacagagagtt

SEQ ID NO: 346660 - DNA, 15 bp, Homo sapiens
cctgccacagagagt

SEQ ID NO: 346661 - DNA, 15 bp, Homo sapiens
tcctgccacagagag

SEQ ID NO: 346662 - DNA, 15 bp, Homo sapiens
atcctgccacagaga

SEQ ID NO: 346663 - DNA, 15 bp, Homo sapiens
gatcctgccacagag

SEQ ID NO: 346664 - DNA, 15 bp, Homo sapiens
agatcctgccacaga

SEQ ID NO: 346665 - DNA, 15 bp, Homo sapiens
tagatcctgccacag

SEQ ID NO: 346666 - DNA, 15 bp, Homo sapiens
ttagatcctgccaca

SEQ ID NO: 346667 - DNA, 15 bp, Homo sapiens
gttagatcctgccac

SEQ ID NO: 346668 - DNA, 15 bp, Homo sapiens
tgttagatcctgcca

SEQ ID NO: 346669 - DNA, 15 bp, Homo sapiens
ctgttagatcctgcc

SEQ ID NO: 346670 - DNA, 15 bp, Homo sapiens
tctgttagatcctgc

SEQ ID NO: 346671 - DNA, 15 bp, Homo sapiens
ttctgttagatcctg

SEQ ID NO: 346672 - DNA, 15 bp, Homo sapiens
tttctgttagatcct

SEQ ID NO: 346673 - DNA, 15 bp, Homo sapiens
gtttctgttagatcc

SEQ ID NO: 346674 - DNA, 15 bp, Homo sapiens
cgtttctgttagatc

SEQ ID NO: 346675 - DNA, 15 bp, Homo sapiens
acgtttctgttagat

SEQ ID NO: 346676 - DNA, 15 bp, Homo sapiens
cacgtttctgttaga

SEQ ID NO: 346677 - DNA, 15 bp, Homo sapiens
acacgtttctgttag

SEQ ID NO: 346678 - DNA, 15 bp, Homo sapiens
cacacgtttctgtta

SEQ ID NO: 346679 - DNA, 15 bp, Homo sapiens
tcacacgtttctgtt

SEQ ID NO: 346680 - DNA, 15 bp, Homo sapiens
atcacacgtttctgt

SEQ ID NO: 346681 - DNA, 15 bp, Homo sapiens
aatcacacgtttctg

SEQ ID NO: 346682 - DNA, 15 bp, Homo sapiens
aaatcacacgtttct

SEQ ID NO: 346683 - DNA, 15 bp, Homo sapiens
caaatcacacgtttc

SEQ ID NO: 346684 - DNA, 15 bp, Homo sapiens
tcaaatcacacgttt

SEQ ID NO: 346685 - DNA, 15 bp, Homo sapiens
ttcaaatcacacgtt

SEQ ID NO: 346686 - DNA, 15 bp, Homo sapiens
gttcaaatcacacgt

SEQ ID NO: 346687 - DNA, 15 bp, Homo sapiens
tgttcaaatcacacg

SEQ ID NO: 346688 - DNA, 15 bp, Homo sapiens
gtgttcaaatcacac

SEQ ID NO: 346689 - DNA, 15 bp, Homo sapiens
agtgttcaaatcaca

SEQ ID NO: 346690 - DNA, 15 bp, Homo sapiens
gagtgttcaaatcac

SEQ ID NO: 346691 - DNA, 15 bp, Homo sapiens
tgagtgttcaaatca

SEQ ID NO: 346692 - DNA, 15 bp, Homo sapiens
gtgagtgttcaaatc

SEQ ID NO: 346693 - DNA, 15 bp, Homo sapiens
tgtgagtgttcaaat

SEQ ID NO: 346694 - DNA, 15 bp, Homo sapiens
ctgtgagtgttcaaa

SEQ ID NO: 346695 - DNA, 15 bp, Homo sapiens
tctgtgagtgttcaa

SEQ ID NO: 346696 - DNA, 15 bp, Homo sapiens
ctctgtgagtgttca

SEQ ID NO: 346697 - DNA, 15 bp, Homo sapiens
cctctgtgagtgttc

SEQ ID NO: 346698 - DNA, 15 bp, Homo sapiens
ccctctgtgagtgtt

SEQ ID NO: 346699 - DNA, 15 bp, Homo sapiens
tccctctgtgagtgt

SEQ ID NO: 346700 - DNA, 15 bp, Homo sapiens
ctccctctgtgagtg

SEQ ID NO: 346701 - DNA, 15 bp, Homo sapiens
gctccctctgtgagt

SEQ ID NO: 346702 - DNA, 15 bp, Homo sapiens
ggctccctctgtgag

SEQ ID NO: 346703 - DNA, 15 bp, Homo sapiens
tggctccctctgtga

SEQ ID NO: 346704 - DNA, 15 bp, Homo sapiens
atggctccctctgtg

SEQ ID NO: 346705 - DNA, 15 bp, Homo sapiens
tatggctccctctgt

SEQ ID NO: 346706 - DNA, 15 bp, Homo sapiens
ctatggctccctctg

SEQ ID NO: 346707 - DNA, 15 bp, Homo sapiens
gctatggctccctct

SEQ ID NO: 346708 - DNA, 15 bp, Homo sapiens
agctatggctccctc

SEQ ID NO: 346709 - DNA, 15 bp, Homo sapiens
gagctatggctccct

SEQ ID NO: 346710 - DNA, 15 bp, Homo sapiens
agagctatggctccc

SEQ ID NO: 346711 - DNA, 15 bp, Homo sapiens
aagagctatggctcc

SEQ ID NO: 346712 - DNA, 15 bp, Homo sapiens
caagagctatggctc

SEQ ID NO: 346713 - DNA, 15 bp, Homo sapiens
gcaagagctatggct

SEQ ID NO: 346714 - DNA, 15 bp, Homo sapiens
agcaagagctatggc

SEQ ID NO: 346715 - DNA, 15 bp, Homo sapiens
aagcaagagctatgg

SEQ ID NO: 346716 - DNA, 15 bp, Homo sapiens
gaagcaagagctatg

SEQ ID NO: 346717 - DNA, 15 bp, Homo sapiens
ggaagcaagagctat

SEQ ID NO: 346718 - DNA, 15 bp, Homo sapiens
tggaagcaagagcta

SEQ ID NO: 346719 - DNA, 15 bp, Homo sapiens
ctggaagcaagagct

SEQ ID NO: 346720 - DNA, 15 bp, Homo sapiens
actggaagcaagagc

SEQ ID NO: 346721 - DNA, 15 bp, Homo sapiens
cactggaagcaagag

SEQ ID NO: 346722 - DNA, 15 bp, Homo sapiens
acactggaagcaaga

SEQ ID NO: 346723 - DNA, 15 bp, Homo sapiens
tacactggaagcaag

SEQ ID NO: 346724 - DNA, 15 bp, Homo sapiens
ttacactggaagcaa

SEQ ID NO: 346725 - DNA, 15 bp, Homo sapiens
tttacactggaagca

SEQ ID NO: 346726 - DNA, 15 bp, Homo sapiens
atttacactggaagc

SEQ ID NO: 346727 - DNA, 15 bp, Homo sapiens
gatttacactggaag

SEQ ID NO: 346728 - DNA, 15 bp, Homo sapiens
tgatttacactggaa

SEQ ID NO: 346729 - DNA, 15 bp, Homo sapiens
atgatttacactgga

SEQ ID NO: 346730 - DNA, 15 bp, Homo sapiens
catgatttacactgg

SEQ ID NO: 346731 - DNA, 15 bp, Homo sapiens
ccatgatttacactg

SEQ ID NO: 346732 - DNA, 15 bp, Homo sapiens
accatgatttacact

SEQ ID NO: 346733 - DNA, 15 bp, Homo sapiens
caccatgatttacac

SEQ ID NO: 346734 - DNA, 15 bp, Homo sapiens
acaccatgatttaca

SEQ ID NO: 346735 - DNA, 15 bp, Homo sapiens
tacaccatgatttac

SEQ ID NO: 346736 - DNA, 15 bp, Homo sapiens
atacaccatgattta

SEQ ID NO: 346737 - DNA, 15 bp, Homo sapiens
aatacaccatgattt

SEQ ID NO: 346738 - DNA, 15 bp, Homo sapiens
taatacaccatgatt

SEQ ID NO: 346739 - DNA, 15 bp, Homo sapiens
ataatacaccatgat

SEQ ID NO: 346740 - DNA, 15 bp, Homo sapiens
tataatacaccatga

SEQ ID NO: 346741 - DNA, 15 bp, Homo sapiens
gtataatacaccatg

SEQ ID NO: 346742 - DNA, 15 bp, Homo sapiens
agtataatacaccat

SEQ ID NO: 346743 - DNA, 15 bp, Homo sapiens
aagtataatacacca

SEQ ID NO: 346744 - DNA, 15 bp, Homo sapiens
caagtataatacacc

SEQ ID NO: 346745 - DNA, 15 bp, Homo sapiens
tcaagtataatacac

SEQ ID NO: 346746 - DNA, 15 bp, Homo sapiens
atcaagtataataca

SEQ ID NO: 346747 - DNA, 15 bp, Homo sapiens
aatcaagtataatac

SEQ ID NO: 346748 - DNA, 15 bp, Homo sapiens
aaatcaagtataata

SEQ ID NO: 346749 - DNA, 15 bp, Homo sapiens
caaatcaagtataat

SEQ ID NO: 346750 - DNA, 15 bp, Homo sapiens
acaaatcaagtataa

SEQ ID NO: 346751 - DNA, 15 bp, Homo sapiens
tacaaatcaagtata

SEQ ID NO: 346752 - DNA, 15 bp, Homo sapiens
atacaaatcaagtat

SEQ ID NO: 346753 - DNA, 15 bp, Homo sapiens
aatacaaatcaagta

SEQ ID NO: 346754 - DNA, 15 bp, Homo sapiens
aaatacaaatcaagt

SEQ ID NO: 346755 - DNA, 15 bp, Homo sapiens
aaaatacaaatcaag

SEQ ID NO: 346756 - DNA, 15 bp, Homo sapiens
caaaatacaaatcaa

SEQ ID NO: 346757 - DNA, 15 bp, Homo sapiens
gcaaaatacaaatca

SEQ ID NO: 346758 - DNA, 15 bp, Homo sapiens
tgcaaaatacaaatc

SEQ ID NO: 346759 - DNA, 15 bp, Homo sapiens
ttgcaaaatacaaat

SEQ ID NO: 346760 - DNA, 15 bp, Homo sapiens
attgcaaaatacaaa

SEQ ID NO: 346761 - DNA, 15 bp, Homo sapiens
tattgcaaaatacaa

SEQ ID NO: 346762 - DNA, 15 bp, Homo sapiens
atattgcaaaataca

SEQ ID NO: 346763 - DNA, 15 bp, Homo sapiens
gatattgcaaaatac

SEQ ID NO: 346764 - DNA, 15 bp, Homo sapiens
agatattgcaaaata

SEQ ID NO: 346765 - DNA, 15 bp, Homo sapiens
tagatattgcaaaat

SEQ ID NO: 346766 - DNA, 15 bp, Homo sapiens
ctagatattgcaaaa

SEQ ID NO: 346767 - DNA, 15 bp, Homo sapiens
tctagatattgcaaa

SEQ ID NO: 346768 - DNA, 15 bp, Homo sapiens
ctctagatattgcaa

SEQ ID NO: 346769 - DNA, 15 bp, Homo sapiens
cctctagatattgca

SEQ ID NO: 346770 - DNA, 15 bp, Homo sapiens
tcctctagatattgc

SEQ ID NO: 346771 - DNA, 15 bp, Homo sapiens
atcctctagatattg

SEQ ID NO: 346772 - DNA, 15 bp, Homo sapiens
tatcctctagatatt

SEQ ID NO: 346773 - DNA, 15 bp, Homo sapiens
gtatcctctagatat

SEQ ID NO: 346774 - DNA, 15 bp, Homo sapiens
ggtatcctctagata

SEQ ID NO: 346775 - DNA, 15 bp, Homo sapiens
aggtatcctctagat

SEQ ID NO: 346776 - DNA, 15 bp, Homo sapiens
taggtatcctctaga

SEQ ID NO: 346777 - DNA, 15 bp, Homo sapiens
ataggtatcctctag

SEQ ID NO: 346778 - DNA, 15 bp, Homo sapiens
aataggtatcctcta

SEQ ID NO: 346779 - DNA, 15 bp, Homo sapiens
taataggtatcctct

SEQ ID NO: 346780 - DNA, 15 bp, Homo sapiens
ataataggtatcctc

SEQ ID NO: 346781 - DNA, 15 bp, Homo sapiens
tataataggtatcct

SEQ ID NO: 346782 - DNA, 15 bp, Homo sapiens
ctataataggtatcc

SEQ ID NO: 346783 - DNA, 15 bp, Homo sapiens
actataataggtatc

SEQ ID NO: 346784 - DNA, 15 bp, Homo sapiens
tactataataggtat

SEQ ID NO: 346785 - DNA, 15 bp, Homo sapiens
ctactataataggta

SEQ ID NO: 346786 - DNA, 15 bp, Homo sapiens
cctactataataggt

SEQ ID NO: 346787 - DNA, 15 bp, Homo sapiens
ccctactataatagg

SEQ ID NO: 346788 - DNA, 15 bp, Homo sapiens
tccctactataatag

SEQ ID NO: 346789 - DNA, 15 bp, Homo sapiens
atccctactataata

SEQ ID NO: 346790 - DNA, 15 bp, Homo sapiens
aatccctactataat

SEQ ID NO: 346791 - DNA, 15 bp, Homo sapiens
taatccctactataa

SEQ ID NO: 346792 - DNA, 15 bp, Homo sapiens
ttaatccctactata

SEQ ID NO: 346793 - DNA, 15 bp, Homo sapiens
tttaatccctactat

SEQ ID NO: 346794 - DNA, 15 bp, Homo sapiens
ttttaatccctacta

SEQ ID NO: 346795 - DNA, 15 bp, Homo sapiens
tttttaatccctact

SEQ ID NO: 346796 - DNA, 15 bp, Homo sapiens
gtttttaatccctac

SEQ ID NO: 346797 - DNA, 15 bp, Homo sapiens
agtttttaatcccta

SEQ ID NO: 346798 - DNA, 15 bp, Homo sapiens
aagtttttaatccct

SEQ ID NO: 346799 - DNA, 15 bp, Homo sapiens
taagtttttaatccc

SEQ ID NO: 346800 - DNA, 15 bp, Homo sapiens
ctaagtttttaatcc

SEQ ID NO: 346801 - DNA, 15 bp, Homo sapiens
tctaagtttttaatc

SEQ ID NO: 346802 - DNA, 15 bp, Homo sapiens
atctaagtttttaat

SEQ ID NO: 346803 - DNA, 15 bp, Homo sapiens
tatctaagtttttaa

SEQ ID NO: 346804 - DNA, 15 bp, Homo sapiens
gtatctaagttttta

SEQ ID NO: 346805 - DNA, 15 bp, Homo sapiens
ggtatctaagttttt

SEQ ID NO: 346806 - DNA, 15 bp, Homo sapiens
aggtatctaagtttt

SEQ ID NO: 346807 - DNA, 15 bp, Homo sapiens
taggtatctaagttt

SEQ ID NO: 346808 - DNA, 15 bp, Homo sapiens
ataggtatctaagtt

SEQ ID NO: 346809 - DNA, 15 bp, Homo sapiens
tataggtatctaagt

SEQ ID NO: 346810 - DNA, 15 bp, Homo sapiens
ctataggtatctaag

SEQ ID NO: 346811 - DNA, 15 bp, Homo sapiens
cctataggtatctaa

SEQ ID NO: 346812 - DNA, 15 bp, Homo sapiens
ccctataggtatcta

SEQ ID NO: 346813 - DNA, 15 bp, Homo sapiens
accctataggtatct

SEQ ID NO: 346814 - DNA, 15 bp, Homo sapiens
aaccctataggtatc

SEQ ID NO: 346815 - DNA, 15 bp, Homo sapiens
gaaccctataggtat

SEQ ID NO: 346816 - DNA, 15 bp, Homo sapiens
tgaaccctataggta

SEQ ID NO: 346817 - DNA, 15 bp, Homo sapiens
ctgaaccctataggt

SEQ ID NO: 346818 - DNA, 15 bp, Homo sapiens
cctgaaccctatagg

SEQ ID NO: 346819 - DNA, 15 bp, Homo sapiens
gcctgaaccctatag

SEQ ID NO: 346820 - DNA, 15 bp, Homo sapiens
tgcctgaaccctata

SEQ ID NO: 346821 - DNA, 15 bp, Homo sapiens
ctgcctgaaccctat

SEQ ID NO: 346822 - DNA, 15 bp, Homo sapiens
actgcctgaacccta

SEQ ID NO: 346823 - DNA, 15 bp, Homo sapiens
aactgcctgaaccct

SEQ ID NO: 346824 - DNA, 15 bp, Homo sapiens
taactgcctgaaccc

SEQ ID NO: 346825 - DNA, 15 bp, Homo sapiens
ctaactgcctgaacc

SEQ ID NO: 346826 - DNA, 15 bp, Homo sapiens
gctaactgcctgaac

SEQ ID NO: 346827 - DNA, 15 bp, Homo sapiens
tgctaactgcctgaa

SEQ ID NO: 346828 - DNA, 15 bp, Homo sapiens
ttgctaactgcctga

SEQ ID NO: 346829 - DNA, 15 bp, Homo sapiens
cttgctaactgcctg

SEQ ID NO: 346830 - DNA, 15 bp, Homo sapiens
tcttgctaactgcct

SEQ ID NO: 346831 - DNA, 15 bp, Homo sapiens
ttcttgctaactgcc

SEQ ID NO: 346832 - DNA, 15 bp, Homo sapiens
tttcttgctaactgc

SEQ ID NO: 346833 - DNA, 15 bp, Homo sapiens
ctttcttgctaactg

SEQ ID NO: 346834 - DNA, 15 bp, Homo sapiens
tctttcttgctaact

SEQ ID NO: 346835 - DNA, 15 bp, Homo sapiens
ttctttcttgctaac

SEQ ID NO: 346836 - DNA, 15 bp, Homo sapiens
attctttcttgctaa

SEQ ID NO: 346837 - DNA, 15 bp, Homo sapiens
cattctttcttgcta

SEQ ID NO: 346838 - DNA, 15 bp, Homo sapiens
tcattctttcttgct

SEQ ID NO: 346839 - DNA, 15 bp, Homo sapiens
ttcattctttcttgc

SEQ ID NO: 346840 - DNA, 15 bp, Homo sapiens
cttcattctttcttg

SEQ ID NO: 346841 - DNA, 15 bp, Homo sapiens
tcttcattctttctt

SEQ ID NO: 346842 - DNA, 15 bp, Homo sapiens
ctcttcattctttct

SEQ ID NO: 346843 - DNA, 15 bp, Homo sapiens
actcttcattctttc

SEQ ID NO: 346844 - DNA, 15 bp, Homo sapiens
cactcttcattcttt

SEQ ID NO: 346845 - DNA, 15 bp, Homo sapiens
tcactcttcattctt

SEQ ID NO: 346846 - DNA, 15 bp, Homo sapiens
ctcactcttcattct

SEQ ID NO: 346847 - DNA, 15 bp, Homo sapiens
cctcactcttcattc

SEQ ID NO: 346848 - DNA, 15 bp, Homo sapiens
gcctcactcttcatt

SEQ ID NO: 346849 - DNA, 15 bp, Homo sapiens
ggcctcactcttcat

SEQ ID NO: 346850 - DNA, 15 bp, Homo sapiens
tggcctcactcttca

SEQ ID NO: 346851 - DNA, 15 bp, Homo sapiens
atggcctcactcttc

SEQ ID NO: 346852 - DNA, 15 bp, Homo sapiens
gatggcctcactctt

SEQ ID NO: 346853 - DNA, 15 bp, Homo sapiens
agatggcctcactct

SEQ ID NO: 346854 - DNA, 15 bp, Homo sapiens
cagatggcctcactc

SEQ ID NO: 346855 - DNA, 15 bp, Homo sapiens
tcagatggcctcact

SEQ ID NO: 346856 - DNA, 15 bp, Homo sapiens
ctcagatggcctcac

SEQ ID NO: 346857 - DNA, 15 bp, Homo sapiens
tctcagatggcctca

SEQ ID NO: 346858 - DNA, 15 bp, Homo sapiens
gtctcagatggcctc

SEQ ID NO: 346859 - DNA, 15 bp, Homo sapiens
tgtctcagatggcct

SEQ ID NO: 346860 - DNA, 15 bp, Homo sapiens
ttgtctcagatggcc

SEQ ID NO: 346861 - DNA, 15 bp, Homo sapiens
attgtctcagatggc

SEQ ID NO: 346862 - DNA, 15 bp, Homo sapiens
tattgtctcagatgg

SEQ ID NO: 346863 - DNA, 15 bp, Homo sapiens
ctattgtctcagatg

SEQ ID NO: 346864 - DNA, 15 bp, Homo sapiens
tctattgtctcagat

SEQ ID NO: 346865 - DNA, 15 bp, Homo sapiens
ctctattgtctcaga

SEQ ID NO: 346866 - DNA, 15 bp, Homo sapiens
tctctattgtctcag

SEQ ID NO: 346867 - DNA, 15 bp, Homo sapiens
ctctctattgtctca

SEQ ID NO: 346868 - DNA, 15 bp, Homo sapiens
actctctattgtctc

SEQ ID NO: 346869 - DNA, 15 bp, Homo sapiens
cactctctattgtct

SEQ ID NO: 346870 - DNA, 15 bp, Homo sapiens
ccactctctattgtc

SEQ ID NO: 346871 - DNA, 15 bp, Homo sapiens
accactctctattgt

SEQ ID NO: 346872 - DNA, 15 bp, Homo sapiens
caccactctctattg

SEQ ID NO: 346873 - DNA, 15 bp, Homo sapiens
ccaccactctctatt

SEQ ID NO: 346874 - DNA, 15 bp, Homo sapiens
cccaccactctctat

SEQ ID NO: 346875 - DNA, 15 bp, Homo sapiens
tcccaccactctcta

SEQ ID NO: 346876 - DNA, 15 bp, Homo sapiens
ttcccaccactctct

SEQ ID NO: 346877 - DNA, 15 bp, Homo sapiens
gttcccaccactctc

SEQ ID NO: 346878 - DNA, 15 bp, Homo sapiens
agttcccaccactct

SEQ ID NO: 346879 - DNA, 15 bp, Homo sapiens
cagttcccaccactc

SEQ ID NO: 346880 - DNA, 15 bp, Homo sapiens
acagttcccaccact

SEQ ID NO: 346881 - DNA, 15 bp, Homo sapiens
cacagttcccaccac

SEQ ID NO: 346882 - DNA, 15 bp, Homo sapiens
ccacagttcccacca

SEQ ID NO: 346883 - DNA, 15 bp, Homo sapiens
gccacagttcccacc

SEQ ID NO: 346884 - DNA, 15 bp, Homo sapiens
tgccacagttcccac

SEQ ID NO: 346885 - DNA, 15 bp, Homo sapiens
gtgccacagttccca

SEQ ID NO: 346886 - DNA, 15 bp, Homo sapiens
tgtgccacagttccc

SEQ ID NO: 346887 - DNA, 15 bp, Homo sapiens
atgtgccacagttcc

SEQ ID NO: 346888 - DNA, 15 bp, Homo sapiens
aatgtgccacagttc

SEQ ID NO: 346889 - DNA, 15 bp, Homo sapiens
caatgtgccacagtt

SEQ ID NO: 346890 - DNA, 15 bp, Homo sapiens
ccaatgtgccacagt

SEQ ID NO: 346891 - DNA, 15 bp, Homo sapiens
tccaatgtgccacag

SEQ ID NO: 346892 - DNA, 15 bp, Homo sapiens
ctccaatgtgccaca

SEQ ID NO: 346893 - DNA, 15 bp, Homo sapiens
tctccaatgtgccac

SEQ ID NO: 346894 - DNA, 15 bp, Homo sapiens
ttctccaatgtgcca

SEQ ID NO: 346895 - DNA, 15 bp, Homo sapiens
gttctccaatgtgcc

SEQ ID NO: 346896 - DNA, 15 bp, Homo sapiens
tgttctccaatgtgc

SEQ ID NO: 346897 - DNA, 15 bp, Homo sapiens
ttgttctccaatgtg

SEQ ID NO: 346898 - DNA, 15 bp, Homo sapiens
tttgttctccaatgt

SEQ ID NO: 346899 - DNA, 15 bp, Homo sapiens
gtttgttctccaatg

SEQ ID NO: 346900 - DNA, 15 bp, Homo sapiens
tgtttgttctccaat

SEQ ID NO: 346901 - DNA, 15 bp, Homo sapiens
atgtttgttctccaa

SEQ ID NO: 346902 - DNA, 15 bp, Homo sapiens
gatgtttgttctcca

SEQ ID NO: 346903 - DNA, 15 bp, Homo sapiens
ggatgtttgttctcc

SEQ ID NO: 346904 - DNA, 15 bp, Homo sapiens
gggatgtttgttctc

SEQ ID NO: 346905 - DNA, 15 bp, Homo sapiens
tgggatgtttgttct

SEQ ID NO: 346906 - DNA, 15 bp, Homo sapiens
atgggatgtttgttc

SEQ ID NO: 346907 - DNA, 15 bp, Homo sapiens
gatgggatgtttgtt

SEQ ID NO: 346908 - DNA, 15 bp, Homo sapiens
ggatgggatgtttgt

SEQ ID NO: 346909 - DNA, 15 bp, Homo sapiens
tggatgggatgtttg

SEQ ID NO: 346910 - DNA, 15 bp, Homo sapiens
ctggatgggatgttt

SEQ ID NO: 346911 - DNA, 15 bp, Homo sapiens
tctggatgggatgtt

SEQ ID NO: 346912 - DNA, 15 bp, Homo sapiens
ctctggatgggatgt

SEQ ID NO: 346913 - DNA, 15 bp, Homo sapiens
cctctggatgggatg

SEQ ID NO: 346914 - DNA, 15 bp, Homo sapiens
ccctctggatgggat

SEQ ID NO: 346915 - DNA, 15 bp, Homo sapiens
tccctctggatggga

SEQ ID NO: 346916 - DNA, 15 bp, Homo sapiens
atccctctggatggg

SEQ ID NO: 346917 - DNA, 15 bp, Homo sapiens
tatccctctggatgg

SEQ ID NO: 346918 - DNA, 15 bp, Homo sapiens
ttatccctctggatg

SEQ ID NO: 346919 - DNA, 15 bp, Homo sapiens
cttatccctctggat

SEQ ID NO: 346920 - DNA, 15 bp, Homo sapiens
acttatccctctgga

SEQ ID NO: 346921 - DNA, 15 bp, Homo sapiens
cacttatccctctgg

SEQ ID NO: 346922 - DNA, 15 bp, Homo sapiens
gcacttatccctctg

SEQ ID NO: 346923 - DNA, 15 bp, Homo sapiens
agcacttatccctct

SEQ ID NO: 346924 - DNA, 15 bp, Homo sapiens
aagcacttatccctc

SEQ ID NO: 346925 - DNA, 15 bp, Homo sapiens
gaagcacttatccct

SEQ ID NO: 346926 - DNA, 15 bp, Homo sapiens
tgaagcacttatccc

SEQ ID NO: 346927 - DNA, 15 bp, Homo sapiens
gtgaagcacttatcc

SEQ ID NO: 346928 - DNA, 15 bp, Homo sapiens
tgtgaagcacttatc

SEQ ID NO: 346929 - DNA, 15 bp, Homo sapiens
ctgtgaagcacttat

SEQ ID NO: 346930 - DNA, 15 bp, Homo sapiens
gctgtgaagcactta

SEQ ID NO: 346931 - DNA, 15 bp, Homo sapiens
agctgtgaagcactt

SEQ ID NO: 346932 - DNA, 15 bp, Homo sapiens
cagctgtgaagcact

SEQ ID NO: 346933 - DNA, 15 bp, Homo sapiens
gcagctgtgaagcac

SEQ ID NO: 346934 - DNA, 15 bp, Homo sapiens
tgcagctgtgaagca

SEQ ID NO: 346935 - DNA, 15 bp, Homo sapiens
gtgcagctgtgaagc

SEQ ID NO: 346936 - DNA, 15 bp, Homo sapiens
agtgcagctgtgaag

SEQ ID NO: 346937 - DNA, 15 bp, Homo sapiens
gagtgcagctgtgaa

SEQ ID NO: 346938 - DNA, 15 bp, Homo sapiens
ggagtgcagctgtga

SEQ ID NO: 346939 - DNA, 15 bp, Homo sapiens
gggagtgcagctgtg

SEQ ID NO: 346940 - DNA, 15 bp, Homo sapiens
agggagtgcagctgt

SEQ ID NO: 346941 - DNA, 15 bp, Homo sapiens
aagggagtgcagctg

SEQ ID NO: 346942 - DNA, 15 bp, Homo sapiens
aaagggagtgcagct

SEQ ID NO: 346943 - DNA, 15 bp, Homo sapiens
aaaagggagtgcagc

SEQ ID NO: 346944 - DNA, 15 bp, Homo sapiens
taaaagggagtgcag

SEQ ID NO: 346945 - DNA, 15 bp, Homo sapiens
ctaaaagggagtgca

SEQ ID NO: 346946 - DNA, 15 bp, Homo sapiens
gctaaaagggagtgc

SEQ ID NO: 346947 - DNA, 15 bp, Homo sapiens
tgctaaaagggagtg

SEQ ID NO: 346948 - DNA, 15 bp, Homo sapiens
atgctaaaagggagt

SEQ ID NO: 346949 - DNA, 15 bp, Homo sapiens
catgctaaaagggag

SEQ ID NO: 346950 - DNA, 15 bp, Homo sapiens
acatgctaaaaggga

SEQ ID NO: 346951 - DNA, 15 bp, Homo sapiens
cacatgctaaaaggg

SEQ ID NO: 346952 - DNA, 15 bp, Homo sapiens
ccacatgctaaaagg

SEQ ID NO: 346953 - DNA, 15 bp, Homo sapiens
tccacatgctaaaag

SEQ ID NO: 346954 - DNA, 15 bp, Homo sapiens
ttccacatgctaaaa

SEQ ID NO: 346955 - DNA, 15 bp, Homo sapiens
attccacatgctaaa

SEQ ID NO: 346956 - DNA, 15 bp, Homo sapiens
cattccacatgctaa

SEQ ID NO: 346957 - DNA, 15 bp, Homo sapiens
acattccacatgcta

SEQ ID NO: 346958 - DNA, 15 bp, Homo sapiens
cacattccacatgct

SEQ ID NO: 346959 - DNA, 15 bp, Homo sapiens
ccacattccacatgc

SEQ ID NO: 346960 - DNA, 15 bp, Homo sapiens
accacattccacatg

SEQ ID NO: 346961 - DNA, 15 bp, Homo sapiens
caccacattccacat

SEQ ID NO: 346962 - DNA, 15 bp, Homo sapiens
gcaccacattccaca

SEQ ID NO: 346963 - DNA, 15 bp, Homo sapiens
ggcaccacattccac

SEQ ID NO: 346964 - DNA, 15 bp, Homo sapiens
tggcaccacattcca

SEQ ID NO: 346965 - DNA, 15 bp, Homo sapiens
ttggcaccacattcc

SEQ ID NO: 346966 - DNA, 15 bp, Homo sapiens
attggcaccacattc

SEQ ID NO: 346967 - DNA, 15 bp, Homo sapiens
cattggcaccacatt

SEQ ID NO: 346968 - DNA, 15 bp, Homo sapiens
acattggcaccacat

SEQ ID NO: 346969 - DNA, 15 bp, Homo sapiens
cacattggcaccaca

SEQ ID NO: 346970 - DNA, 15 bp, Homo sapiens
ccacattggcaccac

SEQ ID NO: 346971 - DNA, 15 bp, Homo sapiens
gccacattggcacca

SEQ ID NO: 346972 - DNA, 15 bp, Homo sapiens
ggccacattggcacc

SEQ ID NO: 346973 - DNA, 15 bp, Homo sapiens
gggccacattggcac

SEQ ID NO: 346974 - DNA, 15 bp, Homo sapiens
agggccacattggca

SEQ ID NO: 346975 - DNA, 15 bp, Homo sapiens
tagggccacattggc

SEQ ID NO: 346976 - DNA, 15 bp, Homo sapiens
atagggccacattgg

SEQ ID NO: 346977 - DNA, 15 bp, Homo sapiens
gatagggccacattg

SEQ ID NO: 346978 - DNA, 15 bp, Homo sapiens
agatagggccacatt

SEQ ID NO: 346979 - DNA, 15 bp, Homo sapiens
cagatagggccacat

SEQ ID NO: 346980 - DNA, 15 bp, Homo sapiens
tcagatagggccaca

SEQ ID NO: 346981 - DNA, 15 bp, Homo sapiens
atcagatagggccac

SEQ ID NO: 346982 - DNA, 15 bp, Homo sapiens
aatcagatagggcca

SEQ ID NO: 346983 - DNA, 15 bp, Homo sapiens
aaatcagatagggcc

SEQ ID NO: 346984 - DNA, 15 bp, Homo sapiens
aaaatcagatagggc

SEQ ID NO: 346985 - DNA, 15 bp, Homo sapiens
caaaatcagataggg

SEQ ID NO: 346986 - DNA, 15 bp, Homo sapiens
gcaaaatcagatagg

SEQ ID NO: 346987 - DNA, 15 bp, Homo sapiens
tgcaaaatcagatag

SEQ ID NO: 346988 - DNA, 15 bp, Homo sapiens
ttgcaaaatcagata

SEQ ID NO: 346989 - DNA, 15 bp, Homo sapiens
cttgcaaaatcagat

SEQ ID NO: 346990 - DNA, 15 bp, Homo sapiens
ccttgcaaaatcaga

SEQ ID NO: 346991 - DNA, 15 bp, Homo sapiens
tccttgcaaaatcag

SEQ ID NO: 346992 - DNA, 15 bp, Homo sapiens
ttccttgcaaaatca

SEQ ID NO: 346993 - DNA, 15 bp, Homo sapiens
tttccttgcaaaatc

SEQ ID NO: 346994 - DNA, 15 bp, Homo sapiens
ctttccttgcaaaat

SEQ ID NO: 346995 - DNA, 15 bp, Homo sapiens
gctttccttgcaaaa

SEQ ID NO: 346996 - DNA, 15 bp, Homo sapiens
agctttccttgcaaa

SEQ ID NO: 346997 - DNA, 15 bp, Homo sapiens
cagctttccttgcaa

SEQ ID NO: 346998 - DNA, 15 bp, Homo sapiens
tcagctttccttgca

SEQ ID NO: 346999 - DNA, 15 bp, Homo sapiens
ttcagctttccttgc

SEQ ID NO: 347000 - DNA, 15 bp, Homo sapiens
tttcagctttccttg

SEQ ID NO: 347001 - DNA, 15 bp, Homo sapiens
ttttcagctttcctt

SEQ ID NO: 347002 - DNA, 15 bp, Homo sapiens
cttttcagctttcct

SEQ ID NO: 347003 - DNA, 15 bp, Homo sapiens
gcttttcagctttcc

SEQ ID NO: 347004 - DNA, 15 bp, Homo sapiens
ggcttttcagctttc

SEQ ID NO: 347005 - DNA, 15 bp, Homo sapiens
tggcttttcagcttt

SEQ ID NO: 347006 - DNA, 15 bp, Homo sapiens
ctggcttttcagctt

SEQ ID NO: 347007 - DNA, 15 bp, Homo sapiens
actggcttttcagct

SEQ ID NO: 347008 - DNA, 15 bp, Homo sapiens
aactggcttttcagc

SEQ ID NO: 347009 - DNA, 15 bp, Homo sapiens
aaactggcttttcag

SEQ ID NO: 347010 - DNA, 15 bp, Homo sapiens
gaaactggcttttca

SEQ ID NO: 347011 - DNA, 15 bp, Homo sapiens
agaaactggcttttc

SEQ ID NO: 347012 - DNA, 15 bp, Homo sapiens
tagaaactggctttt

SEQ ID NO: 347013 - DNA, 15 bp, Homo sapiens
atagaaactggcttt

SEQ ID NO: 347014 - DNA, 15 bp, Homo sapiens
catagaaactggctt

SEQ ID NO: 347015 - DNA, 15 bp, Homo sapiens
acatagaaactggct

SEQ ID NO: 347016 - DNA, 15 bp, Homo sapiens
cacatagaaactggc

SEQ ID NO: 347017 - DNA, 15 bp, Homo sapiens
tcacatagaaactgg

SEQ ID NO: 347018 - DNA, 15 bp, Homo sapiens
ttcacatagaaactg

SEQ ID NO: 347019 - DNA, 15 bp, Homo sapiens
attcacatagaaact

SEQ ID NO: 347020 - DNA, 15 bp, Homo sapiens
aattcacatagaaac

SEQ ID NO: 347021 - DNA, 15 bp, Homo sapiens
gaattcacatagaaa

SEQ ID NO: 347022 - DNA, 15 bp, Homo sapiens
tgaattcacatagaa

SEQ ID NO: 347023 - DNA, 15 bp, Homo sapiens
gtgaattcacataga

SEQ ID NO: 347024 - DNA, 15 bp, Homo sapiens
agtgaattcacatag

SEQ ID NO: 347025 - DNA, 15 bp, Homo sapiens
aagtgaattcacata

SEQ ID NO: 347026 - DNA, 15 bp, Homo sapiens
caagtgaattcacat

SEQ ID NO: 347027 - DNA, 15 bp, Homo sapiens
acaagtgaattcaca

SEQ ID NO: 347028 - DNA, 15 bp, Homo sapiens
aacaagtgaattcac

SEQ ID NO: 347029 - DNA, 15 bp, Homo sapiens
caacaagtgaattca

SEQ ID NO: 347030 - DNA, 15 bp, Homo sapiens
ccaacaagtgaattc

SEQ ID NO: 347031 - DNA, 15 bp, Homo sapiens
gccaacaagtgaatt

SEQ ID NO: 347032 - DNA, 15 bp, Homo sapiens
tgccaacaagtgaat

SEQ ID NO: 347033 - DNA, 15 bp, Homo sapiens
atgccaacaagtgaa

SEQ ID NO: 347034 - DNA, 15 bp, Homo sapiens
gatgccaacaagtga

SEQ ID NO: 347035 - DNA, 15 bp, Homo sapiens
agatgccaacaagtg

SEQ ID NO: 347036 - DNA, 15 bp, Homo sapiens
tagatgccaacaagt

SEQ ID NO: 347037 - DNA, 15 bp, Homo sapiens
atagatgccaacaag

SEQ ID NO: 347038 - DNA, 15 bp, Homo sapiens
aatagatgccaacaa

SEQ ID NO: 347039 - DNA, 15 bp, Homo sapiens
aaatagatgccaaca

SEQ ID NO: 347040 - DNA, 15 bp, Homo sapiens
taaatagatgccaac

SEQ ID NO: 347041 - DNA, 15 bp, Homo sapiens
gtaaatagatgccaa

SEQ ID NO: 347042 - DNA, 15 bp, Homo sapiens
tgtaaatagatgcca

SEQ ID NO: 347043 - DNA, 15 bp, Homo sapiens
ctgtaaatagatgcc

SEQ ID NO: 347044 - DNA, 15 bp, Homo sapiens
actgtaaatagatgc

SEQ ID NO: 347045 - DNA, 15 bp, Homo sapiens
aactgtaaatagatg

SEQ ID NO: 347046 - DNA, 15 bp, Homo sapiens
aaactgtaaatagat

SEQ ID NO: 347047 - DNA, 15 bp, Homo sapiens
aaaactgtaaataga

SEQ ID NO: 347048 - DNA, 15 bp, Homo sapiens
aaaaactgtaaatag

SEQ ID NO: 347049 - DNA, 15 bp, Homo sapiens
aaaaaactgtaaata

SEQ ID NO: 347050 - DNA, 15 bp, Homo sapiens
taaaaaactgtaaat

SEQ ID NO: 347051 - DNA, 15 bp, Homo sapiens
ttaaaaaactgtaaa

SEQ ID NO: 347052 - DNA, 15 bp, Homo sapiens
tttaaaaaactgtaa

SEQ ID NO: 347053 - DNA, 15 bp, Homo sapiens
ttttaaaaaactgta

SEQ ID NO: 347054 - DNA, 15 bp, Homo sapiens
tttttaaaaaactgt

SEQ ID NO: 347055 - DNA, 15 bp, Homo sapiens
ttttttaaaaaactg

SEQ ID NO: 347056 - DNA, 15 bp, Homo sapiens
gttttttaaaaaact

SEQ ID NO: 347057 - DNA, 15 bp, Homo sapiens
tgttttttaaaaaac

SEQ ID NO: 347058 - DNA, 15 bp, Homo sapiens
gtgttttttaaaaaa

SEQ ID NO: 347059 - DNA, 15 bp, Homo sapiens
agtgttttttaaaaa

SEQ ID NO: 347060 - DNA, 15 bp, Homo sapiens
cagtgttttttaaaa

SEQ ID NO: 347061 - DNA, 15 bp, Homo sapiens
acagtgttttttaaa

SEQ ID NO: 347062 - DNA, 15 bp, Homo sapiens
tacagtgttttttaa

SEQ ID NO: 347063 - DNA, 15 bp, Homo sapiens
gtacagtgtttttta

SEQ ID NO: 347064 - DNA, 15 bp, Homo sapiens
agtacagtgtttttt

SEQ ID NO: 347065 - DNA, 15 bp, Homo sapiens
aagtacagtgttttt

SEQ ID NO: 347066 - DNA, 15 bp, Homo sapiens
taagtacagtgtttt

SEQ ID NO: 347067 - DNA, 15 bp, Homo sapiens
gtaagtacagtgttt

SEQ ID NO: 347068 - DNA, 15 bp, Homo sapiens
ggtaagtacagtgtt

SEQ ID NO: 347069 - DNA, 15 bp, Homo sapiens
tggtaagtacagtgt

SEQ ID NO: 347070 - DNA, 15 bp, Homo sapiens
ttggtaagtacagtg

SEQ ID NO: 347071 - DNA, 15 bp, Homo sapiens
tttggtaagtacagt

SEQ ID NO: 347072 - DNA, 15 bp, Homo sapiens
gtttggtaagtacag

SEQ ID NO: 347073 - DNA, 15 bp, Homo sapiens
tgtttggtaagtaca

SEQ ID NO: 347074 - DNA, 15 bp, Homo sapiens
ctgtttggtaagtac

SEQ ID NO: 347075 - DNA, 15 bp, Homo sapiens
tctgtttggtaagta

SEQ ID NO: 347076 - DNA, 15 bp, Homo sapiens
ttctgtttggtaagt

SEQ ID NO: 347077 - DNA, 15 bp, Homo sapiens
attctgtttggtaag

SEQ ID NO: 347078 - DNA, 15 bp, Homo sapiens
cattctgtttggtaa

SEQ ID NO: 347079 - DNA, 15 bp, Homo sapiens
acattctgtttggta

SEQ ID NO: 347080 - DNA, 15 bp, Homo sapiens
cacattctgtttggt

SEQ ID NO: 347081 - DNA, 15 bp, Homo sapiens
acacattctgtttgg

SEQ ID NO: 347082 - DNA, 15 bp, Homo sapiens
gacacattctgtttg

SEQ ID NO: 347083 - DNA, 15 bp, Homo sapiens
agacacattctgttt

SEQ ID NO: 347084 - DNA, 15 bp, Homo sapiens
cagacacattctgtt

SEQ ID NO: 347085 - DNA, 15 bp, Homo sapiens
gcagacacattctgt

SEQ ID NO: 347086 - DNA, 15 bp, Homo sapiens
ggcagacacattctg

SEQ ID NO: 347087 - DNA, 15 bp, Homo sapiens
aggcagacacattct

SEQ ID NO: 347088 - DNA, 15 bp, Homo sapiens
caggcagacacattc

SEQ ID NO: 347089 - DNA, 15 bp, Homo sapiens
acaggcagacacatt

SEQ ID NO: 347090 - DNA, 15 bp, Homo sapiens
aacaggcagacacat

SEQ ID NO: 347091 - DNA, 15 bp, Homo sapiens
caacaggcagacaca

SEQ ID NO: 347092 - DNA, 15 bp, Homo sapiens
ccaacaggcagacac

SEQ ID NO: 347093 - DNA, 15 bp, Homo sapiens
cccaacaggcagaca

SEQ ID NO: 347094 - DNA, 15 bp, Homo sapiens
gcccaacaggcagac

SEQ ID NO: 347095 - DNA, 15 bp, Homo sapiens
agcccaacaggcaga

SEQ ID NO: 347096 - DNA, 15 bp, Homo sapiens
aagcccaacaggcag

SEQ ID NO: 347097 - DNA, 15 bp, Homo sapiens
caagcccaacaggca

SEQ ID NO: 347098 - DNA, 15 bp, Homo sapiens
acaagcccaacaggc

SEQ ID NO: 347099 - DNA, 15 bp, Homo sapiens
cacaagcccaacagg

SEQ ID NO: 347100 - DNA, 15 bp, Homo sapiens
tcacaagcccaacag

SEQ ID NO: 347101 - DNA, 15 bp, Homo sapiens
gtcacaagcccaaca

SEQ ID NO: 347102 - DNA, 15 bp, Homo sapiens
agtcacaagcccaac

SEQ ID NO: 347103 - DNA, 15 bp, Homo sapiens
cagtcacaagcccaa

SEQ ID NO: 347104 - DNA, 15 bp, Homo sapiens
gcagtcacaagccca

SEQ ID NO: 347105 - DNA, 15 bp, Homo sapiens
ggcagtcacaagccc

SEQ ID NO: 347106 - DNA, 15 bp, Homo sapiens
tggcagtcacaagcc

SEQ ID NO: 347107 - DNA, 15 bp, Homo sapiens
gtggcagtcacaagc

SEQ ID NO: 347108 - DNA, 15 bp, Homo sapiens
agtggcagtcacaag

SEQ ID NO: 347109 - DNA, 15 bp, Homo sapiens
aagtggcagtcacaa

SEQ ID NO: 347110 - DNA, 15 bp, Homo sapiens
gaagtggcagtcaca

SEQ ID NO: 347111 - DNA, 15 bp, Homo sapiens
tgaagtggcagtcac

SEQ ID NO: 347112 - DNA, 15 bp, Homo sapiens
atgaagtggcagtca

SEQ ID NO: 347113 - DNA, 15 bp, Homo sapiens
aatgaagtggcagtc

SEQ ID NO: 347114 - DNA, 15 bp, Homo sapiens
aaatgaagtggcagt

SEQ ID NO: 347115 - DNA, 15 bp, Homo sapiens
gaaatgaagtggcag

SEQ ID NO: 347116 - DNA, 15 bp, Homo sapiens
ggaaatgaagtggca

SEQ ID NO: 347117 - DNA, 15 bp, Homo sapiens
aggaaatgaagtggc

SEQ ID NO: 347118 - DNA, 15 bp, Homo sapiens
gaggaaatgaagtgg

SEQ ID NO: 347119 - DNA, 15 bp, Homo sapiens
agaggaaatgaagtg

SEQ ID NO: 347120 - DNA, 15 bp, Homo sapiens
gagaggaaatgaagt

SEQ ID NO: 347121 - DNA, 15 bp, Homo sapiens
agagaggaaatgaag

SEQ ID NO: 347122 - DNA, 15 bp, Homo sapiens
aagagaggaaatgaa

SEQ ID NO: 347123 - DNA, 15 bp, Homo sapiens
gaagagaggaaatga

SEQ ID NO: 347124 - DNA, 15 bp, Homo sapiens
agaagagaggaaatg

SEQ ID NO: 347125 - DNA, 15 bp, Homo sapiens
cagaagagaggaaat

SEQ ID NO: 347126 - DNA, 15 bp, Homo sapiens
tcagaagagaggaaa

SEQ ID NO: 347127 - DNA, 15 bp, Homo sapiens
atcagaagagaggaa

SEQ ID NO: 347128 - DNA, 15 bp, Homo sapiens
catcagaagagagga

SEQ ID NO: 347129 - DNA, 15 bp, Homo sapiens
tcatcagaagagagg

SEQ ID NO: 347130 - DNA, 15 bp, Homo sapiens
ctcatcagaagagag

SEQ ID NO: 347131 - DNA, 15 bp, Homo sapiens
tctcatcagaagaga

SEQ ID NO: 347132 - DNA, 15 bp, Homo sapiens
ttctcatcagaagag

SEQ ID NO: 347133 - DNA, 15 bp, Homo sapiens
cttctcatcagaaga

SEQ ID NO: 347134 - DNA, 15 bp, Homo sapiens
gcttctcatcagaag

SEQ ID NO: 347135 - DNA, 15 bp, Homo sapiens
tgcttctcatcagaa

SEQ ID NO: 347136 - DNA, 15 bp, Homo sapiens
atgcttctcatcaga

SEQ ID NO: 347137 - DNA, 15 bp, Homo sapiens
gatgcttctcatcag

SEQ ID NO: 347138 - DNA, 15 bp, Homo sapiens
agatgcttctcatca

SEQ ID NO: 347139 - DNA, 15 bp, Homo sapiens
cagatgcttctcatc

SEQ ID NO: 347140 - DNA, 15 bp, Homo sapiens
acagatgcttctcat

SEQ ID NO: 347141 - DNA, 15 bp, Homo sapiens
cacagatgcttctca

SEQ ID NO: 347142 - DNA, 15 bp, Homo sapiens
gcacagatgcttctc

SEQ ID NO: 347143 - DNA, 15 bp, Homo sapiens
tgcacagatgcttct

SEQ ID NO: 347144 - DNA, 15 bp, Homo sapiens
ctgcacagatgcttc

SEQ ID NO: 347145 - DNA, 15 bp, Homo sapiens
gctgcacagatgctt

SEQ ID NO: 347146 - DNA, 15 bp, Homo sapiens
tgctgcacagatgct

SEQ ID NO: 347147 - DNA, 15 bp, Homo sapiens
gtgctgcacagatgc

SEQ ID NO: 347148 - DNA, 15 bp, Homo sapiens
tgtgctgcacagatg

SEQ ID NO: 347149 - DNA, 15 bp, Homo sapiens
atgtgctgcacagat

SEQ ID NO: 347150 - DNA, 15 bp, Homo sapiens
aatgtgctgcacaga

SEQ ID NO: 347151 - DNA, 15 bp, Homo sapiens
caatgtgctgcacag

SEQ ID NO: 347152 - DNA, 15 bp, Homo sapiens
gcaatgtgctgcaca

SEQ ID NO: 347153 - DNA, 15 bp, Homo sapiens
cgcaatgtgctgcac

SEQ ID NO: 347154 - DNA, 15 bp, Homo sapiens
acgcaatgtgctgca

SEQ ID NO: 347155 - DNA, 15 bp, Homo sapiens
gacgcaatgtgctgc

SEQ ID NO: 347156 - DNA, 15 bp, Homo sapiens
tgacgcaatgtgctg

SEQ ID NO: 347157 - DNA, 15 bp, Homo sapiens
ttgacgcaatgtgct

SEQ ID NO: 347158 - DNA, 15 bp, Homo sapiens
tttgacgcaatgtgc

SEQ ID NO: 347159 - DNA, 15 bp, Homo sapiens
ctttgacgcaatgtg

SEQ ID NO: 347160 - DNA, 15 bp, Homo sapiens
tctttgacgcaatgt

SEQ ID NO: 347161 - DNA, 15 bp, Homo sapiens
gtctttgacgcaatg

SEQ ID NO: 347162 - DNA, 15 bp, Homo sapiens
agtctttgacgcaat

SEQ ID NO: 347163 - DNA, 15 bp, Homo sapiens
gagtctttgacgcaa

SEQ ID NO: 347164 - DNA, 15 bp, Homo sapiens
cgagtctttgacgca

SEQ ID NO: 347165 - DNA, 15 bp, Homo sapiens
tcgagtctttgacgc

SEQ ID NO: 347166 - DNA, 15 bp, Homo sapiens
atcgagtctttgacg

SEQ ID NO: 347167 - DNA, 15 bp, Homo sapiens
aatcgagtctttgac

SEQ ID NO: 347168 - DNA, 15 bp, Homo sapiens
aaatcgagtctttga

SEQ ID NO: 347169 - DNA, 15 bp, Homo sapiens
gaaatcgagtctttg

SEQ ID NO: 347170 - DNA, 15 bp, Homo sapiens
ggaaatcgagtcttt

SEQ ID NO: 347171 - DNA, 15 bp, Homo sapiens
tggaaatcgagtctt

SEQ ID NO: 347172 - DNA, 15 bp, Homo sapiens
gtggaaatcgagtct

SEQ ID NO: 347173 - DNA, 15 bp, Homo sapiens
agtggaaatcgagtc

SEQ ID NO: 347174 - DNA, 15 bp, Homo sapiens
aagtggaaatcgagt

SEQ ID NO: 347175 - DNA, 15 bp, Homo sapiens
aaagtggaaatcgag

SEQ ID NO: 347176 - DNA, 15 bp, Homo sapiens
aaaagtggaaatcga

SEQ ID NO: 347177 - DNA, 15 bp, Homo sapiens
caaaagtggaaatcg

SEQ ID NO: 347178 - DNA, 15 bp, Homo sapiens
ccaaaagtggaaatc

SEQ ID NO: 347179 - DNA, 15 bp, Homo sapiens
gccaaaagtggaaat

SEQ ID NO: 347180 - DNA, 15 bp, Homo sapiens
agccaaaagtggaaa

SEQ ID NO: 347181 - DNA, 15 bp, Homo sapiens
aagccaaaagtggaa

SEQ ID NO: 347182 - DNA, 15 bp, Homo sapiens
aaagccaaaagtgga

SEQ ID NO: 347183 - DNA, 15 bp, Homo sapiens
aaaagccaaaagtgg

SEQ ID NO: 347184 - DNA, 15 bp, Homo sapiens
aaaaagccaaaagtg

SEQ ID NO: 347185 - DNA, 15 bp, Homo sapiens
taaaaagccaaaagt

SEQ ID NO: 347186 - DNA, 15 bp, Homo sapiens
gtaaaaagccaaaag

SEQ ID NO: 347187 - DNA, 15 bp, Homo sapiens
tgtaaaaagccaaaa

SEQ ID NO: 347188 - DNA, 15 bp, Homo sapiens
atgtaaaaagccaaa

SEQ ID NO: 347189 - DNA, 15 bp, Homo sapiens
tatgtaaaaagccaa

SEQ ID NO: 347190 - DNA, 15 bp, Homo sapiens
ttatgtaaaaagcca

SEQ ID NO: 347191 - DNA, 15 bp, Homo sapiens
tttatgtaaaaagcc

SEQ ID NO: 347192 - DNA, 15 bp, Homo sapiens
ttttatgtaaaaagc

SEQ ID NO: 347193 - DNA, 15 bp, Homo sapiens
cttttatgtaaaaag

SEQ ID NO: 347194 - DNA, 15 bp, Homo sapiens
acttttatgtaaaaa

SEQ ID NO: 347195 - DNA, 15 bp, Homo sapiens
gacttttatgtaaaa

SEQ ID NO: 347196 - DNA, 15 bp, Homo sapiens
tgacttttatgtaaa

SEQ ID NO: 347197 - DNA, 15 bp, Homo sapiens
ttgacttttatgtaa

SEQ ID NO: 347198 - DNA, 15 bp, Homo sapiens
attgacttttatgta

SEQ ID NO: 347199 - DNA, 15 bp, Homo sapiens
aattgacttttatgt

SEQ ID NO: 347200 - DNA, 15 bp, Homo sapiens
caattgacttttatg

SEQ ID NO: 347201 - DNA, 15 bp, Homo sapiens
tcaattgacttttat

SEQ ID NO: 347202 - DNA, 15 bp, Homo sapiens
gtcaattgactttta

SEQ ID NO: 347203 - DNA, 15 bp, Homo sapiens
ggtcaattgactttt

SEQ ID NO: 347204 - DNA, 15 bp, Homo sapiens
aggtcaattgacttt

SEQ ID NO: 347205 - DNA, 15 bp, Homo sapiens
aaggtcaattgactt

SEQ ID NO: 347206 - DNA, 15 bp, Homo sapiens
caaggtcaattgact

SEQ ID NO: 347207 - DNA, 15 bp, Homo sapiens
tcaaggtcaattgac

SEQ ID NO: 347208 - DNA, 15 bp, Homo sapiens
gtcaaggtcaattga

SEQ ID NO: 347209 - DNA, 15 bp, Homo sapiens
ggtcaaggtcaattg

SEQ ID NO: 347210 - DNA, 15 bp, Homo sapiens
aggtcaaggtcaatt

SEQ ID NO: 347211 - DNA, 15 bp, Homo sapiens
taggtcaaggtcaat

SEQ ID NO: 347212 - DNA, 15 bp, Homo sapiens
ctaggtcaaggtcaa

SEQ ID NO: 347213 - DNA, 15 bp, Homo sapiens
actaggtcaaggtca

SEQ ID NO: 347214 - DNA, 15 bp, Homo sapiens
aactaggtcaaggtc

SEQ ID NO: 347215 - DNA, 15 bp, Homo sapiens
caactaggtcaaggt

SEQ ID NO: 347216 - DNA, 15 bp, Homo sapiens
gcaactaggtcaagg

SEQ ID NO: 347217 - DNA, 15 bp, Homo sapiens
agcaactaggtcaag

SEQ ID NO: 347218 - DNA, 15 bp, Homo sapiens
gagcaactaggtcaa

SEQ ID NO: 347219 - DNA, 15 bp, Homo sapiens
agagcaactaggtca

SEQ ID NO: 347220 - DNA, 15 bp, Homo sapiens
gagagcaactaggtc

SEQ ID NO: 347221 - DNA, 15 bp, Homo sapiens
ggagagcaactaggt

SEQ ID NO: 347222 - DNA, 15 bp, Homo sapiens
aggagagcaactagg

SEQ ID NO: 347223 - DNA, 15 bp, Homo sapiens
gaggagagcaactag

SEQ ID NO: 347224 - DNA, 15 bp, Homo sapiens
agaggagagcaacta

SEQ ID NO: 347225 - DNA, 15 bp, Homo sapiens
cagaggagagcaact

SEQ ID NO: 347226 - DNA, 15 bp, Homo sapiens
acagaggagagcaac

SEQ ID NO: 347227 - DNA, 15 bp, Homo sapiens
aacagaggagagcaa

SEQ ID NO: 347228 - DNA, 15 bp, Homo sapiens
aaacagaggagagca

SEQ ID NO: 347229 - DNA, 15 bp, Homo sapiens
caaacagaggagagc

SEQ ID NO: 347230 - DNA, 15 bp, Homo sapiens
ccaaacagaggagag

SEQ ID NO: 347231 - DNA, 15 bp, Homo sapiens
cccaaacagaggaga

SEQ ID NO: 347232 - DNA, 15 bp, Homo sapiens
gcccaaacagaggag

SEQ ID NO: 347233 - DNA, 15 bp, Homo sapiens
agcccaaacagagga

SEQ ID NO: 347234 - DNA, 15 bp, Homo sapiens
gagcccaaacagagg

SEQ ID NO: 347235 - DNA, 15 bp, Homo sapiens
tgagcccaaacagag

SEQ ID NO: 347236 - DNA, 15 bp, Homo sapiens
ctgagcccaaacaga

SEQ ID NO: 347237 - DNA, 15 bp, Homo sapiens
actgagcccaaacag

SEQ ID NO: 347238 - DNA, 15 bp, Homo sapiens
aactgagcccaaaca

SEQ ID NO: 347239 - DNA, 15 bp, Homo sapiens
aaactgagcccaaac

SEQ ID NO: 347240 - DNA, 15 bp, Homo sapiens
caaactgagcccaaa

SEQ ID NO: 347241 - DNA, 15 bp, Homo sapiens
acaaactgagcccaa

SEQ ID NO: 347242 - DNA, 15 bp, Homo sapiens
aacaaactgagccca

SEQ ID NO: 347243 - DNA, 15 bp, Homo sapiens
taacaaactgagccc

SEQ ID NO: 347244 - DNA, 15 bp, Homo sapiens
ataacaaactgagcc

SEQ ID NO: 347245 - DNA, 15 bp, Homo sapiens
gataacaaactgagc

SEQ ID NO: 347246 - DNA, 15 bp, Homo sapiens
agataacaaactgag

SEQ ID NO: 347247 - DNA, 15 bp, Homo sapiens
cagataacaaactga

SEQ ID NO: 347248 - DNA, 15 bp, Homo sapiens
gcagataacaaactg

SEQ ID NO: 347249 - DNA, 15 bp, Homo sapiens
tgcagataacaaact

SEQ ID NO: 347250 - DNA, 15 bp, Homo sapiens
atgcagataacaaac

SEQ ID NO: 347251 - DNA, 15 bp, Homo sapiens
tatgcagataacaaa

SEQ ID NO: 347252 - DNA, 15 bp, Homo sapiens
ctatgcagataacaa

SEQ ID NO: 347253 - DNA, 15 bp, Homo sapiens
cctatgcagataaca

SEQ ID NO: 347254 - DNA, 15 bp, Homo sapiens
tcctatgcagataac

SEQ ID NO: 347255 - DNA, 15 bp, Homo sapiens
ttcctatgcagataa

SEQ ID NO: 347256 - DNA, 15 bp, Homo sapiens
cttcctatgcagata

SEQ ID NO: 347257 - DNA, 15 bp, Homo sapiens
ccttcctatgcagat

SEQ ID NO: 347258 - DNA, 15 bp, Homo sapiens
cccttcctatgcaga

SEQ ID NO: 347259 - DNA, 15 bp, Homo sapiens
gcccttcctatgcag

SEQ ID NO: 347260 - DNA, 15 bp, Homo sapiens
tgcccttcctatgca

SEQ ID NO: 347261 - DNA, 15 bp, Homo sapiens
ttgcccttcctatgc

SEQ ID NO: 347262 - DNA, 15 bp, Homo sapiens
cttgcccttcctatg

SEQ ID NO: 347263 - DNA, 15 bp, Homo sapiens
tcttgcccttcctat

SEQ ID NO: 347264 - DNA, 15 bp, Homo sapiens
atcttgcccttccta

SEQ ID NO: 347265 - DNA, 15 bp, Homo sapiens
gatcttgcccttcct

SEQ ID NO: 347266 - DNA, 15 bp, Homo sapiens
tgatcttgcccttcc

SEQ ID NO: 347267 - DNA, 15 bp, Homo sapiens
ctgatcttgcccttc

SEQ ID NO: 347268 - DNA, 15 bp, Homo sapiens
gctgatcttgccctt

SEQ ID NO: 347269 - DNA, 15 bp, Homo sapiens
ggctgatcttgccct

SEQ ID NO: 347270 - DNA, 15 bp, Homo sapiens
tggctgatcttgccc

SEQ ID NO: 347271 - DNA, 15 bp, Homo sapiens
ttggctgatcttgcc

SEQ ID NO: 347272 - DNA, 15 bp, Homo sapiens
attggctgatcttgc

SEQ ID NO: 347273 - DNA, 15 bp, Homo sapiens
gattggctgatcttg

SEQ ID NO: 347274 - DNA, 15 bp, Homo sapiens
agattggctgatctt

SEQ ID NO: 347275 - DNA, 15 bp, Homo sapiens
aagattggctgatct

SEQ ID NO: 347276 - DNA, 15 bp, Homo sapiens
caagattggctgatc

SEQ ID NO: 347277 - DNA, 15 bp, Homo sapiens
tcaagattggctgat

SEQ ID NO: 347278 - DNA, 15 bp, Homo sapiens
ttcaagattggctga

SEQ ID NO: 347279 - DNA, 15 bp, Homo sapiens
cttcaagattggctg

SEQ ID NO: 347280 - DNA, 15 bp, Homo sapiens
ccttcaagattggct

SEQ ID NO: 347281 - DNA, 15 bp, Homo sapiens
cccttcaagattggc

SEQ ID NO: 347282 - DNA, 15 bp, Homo sapiens
gcccttcaagattgg

SEQ ID NO: 347283 - DNA, 15 bp, Homo sapiens
agcccttcaagattg

SEQ ID NO: 347284 - DNA, 15 bp, Homo sapiens
aagcccttcaagatt

SEQ ID NO: 347285 - DNA, 15 bp, Homo sapiens
caagcccttcaagat

SEQ ID NO: 347286 - DNA, 15 bp, Homo sapiens
tcaagcccttcaaga

SEQ ID NO: 347287 - DNA, 15 bp, Homo sapiens
ctcaagcccttcaag

SEQ ID NO: 347288 - DNA, 15 bp, Homo sapiens
actcaagcccttcaa

SEQ ID NO: 347289 - DNA, 15 bp, Homo sapiens
gactcaagcccttca

SEQ ID NO: 347290 - DNA, 15 bp, Homo sapiens
agactcaagcccttc

SEQ ID NO: 347291 - DNA, 15 bp, Homo sapiens
cagactcaagccctt

SEQ ID NO: 347292 - DNA, 15 bp, Homo sapiens
tcagactcaagccct

SEQ ID NO: 347293 - DNA, 15 bp, Homo sapiens
ttcagactcaagccc

SEQ ID NO: 347294 - DNA, 15 bp, Homo sapiens
tttcagactcaagcc

SEQ ID NO: 347295 - DNA, 15 bp, Homo sapiens
ttttcagactcaagc

SEQ ID NO: 347296 - DNA, 15 bp, Homo sapiens
attttcagactcaag

SEQ ID NO: 347297 - DNA, 15 bp, Homo sapiens
gattttcagactcaa

SEQ ID NO: 347298 - DNA, 15 bp, Homo sapiens
acagattttcagact

SEQ ID NO: 347299 - DNA, 15 bp, Homo sapiens
cacagattttcagac

SEQ ID NO: 347300 - DNA, 15 bp, Homo sapiens
acacagattttcaga

SEQ ID NO: 347301 - DNA, 15 bp, Homo sapiens
aacacagattttcag

SEQ ID NO: 347302 - DNA, 15 bp, Homo sapiens
caacacagattttca

SEQ ID NO: 347303 - DNA, 15 bp, Homo sapiens
acaacacagattttc

SEQ ID NO: 347304 - DNA, 15 bp, Homo sapiens
cacaacacagatttt

SEQ ID NO: 347305 - DNA, 15 bp, Homo sapiens
ccacaacacagattt

SEQ ID NO: 347306 - DNA, 15 bp, Homo sapiens
gccacaacacagatt

SEQ ID NO: 347307 - DNA, 15 bp, Homo sapiens
tgccacaacacagat

SEQ ID NO: 347308 - DNA, 15 bp, Homo sapiens
gtgccacaacacaga

SEQ ID NO: 347309 - DNA, 15 bp, Homo sapiens
cgtgccacaacacag

SEQ ID NO: 347310 - DNA, 15 bp, Homo sapiens
ccgtgccacaacaca

SEQ ID NO: 347311 - DNA, 15 bp, Homo sapiens
gccgtgccacaacac

SEQ ID NO: 347312 - DNA, 15 bp, Homo sapiens
agccgtgccacaaca

SEQ ID NO: 347313 - DNA, 15 bp, Homo sapiens
aagccgtgccacaac

SEQ ID NO: 347314 - DNA, 15 bp, Homo sapiens
caagccgtgccacaa

SEQ ID NO: 347315 - DNA, 15 bp, Homo sapiens
gcaagccgtgccaca

SEQ ID NO: 347316 - DNA, 15 bp, Homo sapiens
ggcaagccgtgccac

SEQ ID NO: 347317 - DNA, 15 bp, Homo sapiens
aggcaagccgtgcca

SEQ ID NO: 347318 - DNA, 15 bp, Homo sapiens
taggcaagccgtgcc

SEQ ID NO: 347319 - DNA, 15 bp, Homo sapiens
ataggcaagccgtgc

SEQ ID NO: 347320 - DNA, 15 bp, Homo sapiens
cataggcaagccgtg

SEQ ID NO: 347321 - DNA, 15 bp, Homo sapiens
acataggcaagccgt

SEQ ID NO: 347322 - DNA, 15 bp, Homo sapiens
aacataggcaagccg

SEQ ID NO: 347323 - DNA, 15 bp, Homo sapiens
gaacataggcaagcc

SEQ ID NO: 347324 - DNA, 15 bp, Homo sapiens
agaacataggcaagc

SEQ ID NO: 347325 - DNA, 15 bp, Homo sapiens
gagaacataggcaag

SEQ ID NO: 347326 - DNA, 15 bp, Homo sapiens
agagaacataggcaa

SEQ ID NO: 347327 - DNA, 15 bp, Homo sapiens
gagagaacataggca

SEQ ID NO: 347328 - DNA, 15 bp, Homo sapiens
agagagaacataggc

SEQ ID NO: 347329 - DNA, 15 bp, Homo sapiens
cagagagaacatagg

SEQ ID NO: 347330 - DNA, 15 bp, Homo sapiens
acagagagaacatag

SEQ ID NO: 347331 - DNA, 15 bp, Homo sapiens
aacagagagaacata

SEQ ID NO: 347332 - DNA, 15 bp, Homo sapiens
gaacagagagaacat

SEQ ID NO: 347333 - DNA, 15 bp, Homo sapiens
tgaacagagagaaca

SEQ ID NO: 347334 - DNA, 15 bp, Homo sapiens
gtgaacagagagaac

SEQ ID NO: 347335 - DNA, 15 bp, Homo sapiens
tgtgaacagagagaa

SEQ ID NO: 347336 - DNA, 15 bp, Homo sapiens
atgtgaacagagaga

SEQ ID NO: 347337 - DNA, 15 bp, Homo sapiens
gatgtgaacagagag

SEQ ID NO: 347338 - DNA, 15 bp, Homo sapiens
tgatgtgaacagaga

SEQ ID NO: 347339 - DNA, 15 bp, Homo sapiens
atgatgtgaacagag

SEQ ID NO: 347340 - DNA, 15 bp, Homo sapiens
aatgatgtgaacaga

SEQ ID NO: 347341 - DNA, 15 bp, Homo sapiens
gaatgatgtgaacag

SEQ ID NO: 347342 - DNA, 15 bp, Homo sapiens
agaatgatgtgaaca

SEQ ID NO: 347343 - DNA, 15 bp, Homo sapiens
tagaatgatgtgaac

SEQ ID NO: 347344 - DNA, 15 bp, Homo sapiens
atagaatgatgtgaa

SEQ ID NO: 347345 - DNA, 15 bp, Homo sapiens
gatagaatgatgtga

SEQ ID NO: 347346 - DNA, 15 bp, Homo sapiens
ggatagaatgatgtg

SEQ ID NO: 347347 - DNA, 15 bp, Homo sapiens
gggatagaatgatgt

SEQ ID NO: 347348 - DNA, 15 bp, Homo sapiens
agggatagaatgatg

SEQ ID NO: 347349 - DNA, 15 bp, Homo sapiens
gagggatagaatgat

SEQ ID NO: 347350 - DNA, 15 bp, Homo sapiens
agagggatagaatga

SEQ ID NO: 347351 - DNA, 15 bp, Homo sapiens
gagagggatagaatg

SEQ ID NO: 347352 - DNA, 15 bp, Homo sapiens
ggagagggatagaat

SEQ ID NO: 347353 - DNA, 15 bp, Homo sapiens
aggagagggatagaa

SEQ ID NO: 347354 - DNA, 15 bp, Homo sapiens
aaggagagggataga

SEQ ID NO: 347355 - DNA, 15 bp, Homo sapiens
aaaggagagggatag

SEQ ID NO: 347356 - DNA, 15 bp, Homo sapiens
gaaaggagagggata

SEQ ID NO: 347357 - DNA, 15 bp, Homo sapiens
ggaaaggagagggat

SEQ ID NO: 347358 - DNA, 15 bp, Homo sapiens
aggaaaggagaggga

SEQ ID NO: 347359 - DNA, 15 bp, Homo sapiens
aaggaaaggagaggg

SEQ ID NO: 347360 - DNA, 15 bp, Homo sapiens
aaaggaaaggagagg

SEQ ID NO: 347361 - DNA, 15 bp, Homo sapiens
caaaggaaaggagag

SEQ ID NO: 347362 - DNA, 15 bp, Homo sapiens
ccaaaggaaaggaga

SEQ ID NO: 347363 - DNA, 15 bp, Homo sapiens
gccaaaggaaaggag

SEQ ID NO: 347364 - DNA, 15 bp, Homo sapiens
ggccaaaggaaagga

SEQ ID NO: 347365 - DNA, 15 bp, Homo sapiens
tggccaaaggaaagg

SEQ ID NO: 347366 - DNA, 15 bp, Homo sapiens
ctggccaaaggaaag

SEQ ID NO: 347367 - DNA, 15 bp, Homo sapiens
actggccaaaggaaa

SEQ ID NO: 347368 - DNA, 15 bp, Homo sapiens
cactggccaaaggaa

SEQ ID NO: 347369 - DNA, 15 bp, Homo sapiens
ccactggccaaagga

SEQ ID NO: 347370 - DNA, 15 bp, Homo sapiens
cccactggccaaagg

SEQ ID NO: 347371 - DNA, 15 bp, Homo sapiens
gcccactggccaaag

SEQ ID NO: 347372 - DNA, 15 bp, Homo sapiens
ggcccactggccaaa

SEQ ID NO: 347373 - DNA, 15 bp, Homo sapiens
tggcccactggccaa

SEQ ID NO: 347374 - DNA, 15 bp, Homo sapiens
gtggcccactggcca

SEQ ID NO: 347375 - DNA, 15 bp, Homo sapiens
tgtggcccactggcc

SEQ ID NO: 347376 - DNA, 15 bp, Homo sapiens
ctgtggcccactggc

SEQ ID NO: 347377 - DNA, 15 bp, Homo sapiens
gctgtggcccactgg

SEQ ID NO: 347378 - DNA, 15 bp, Homo sapiens
agctgtggcccactg

SEQ ID NO: 347379 - DNA, 15 bp, Homo sapiens
aagctgtggcccact

SEQ ID NO: 347380 - DNA, 15 bp, Homo sapiens
caagctgtggcccac

SEQ ID NO: 347381 - DNA, 15 bp, Homo sapiens
acaagctgtggccca

SEQ ID NO: 347382 - DNA, 15 bp, Homo sapiens
aacaagctgtggccc

SEQ ID NO: 347383 - DNA, 15 bp, Homo sapiens
aaacaagctgtggcc

SEQ ID NO: 347384 - DNA, 15 bp, Homo sapiens
aaaacaagctgtggc

SEQ ID NO: 347385 - DNA, 15 bp, Homo sapiens
caaaacaagctgtgg

SEQ ID NO: 347386 - DNA, 15 bp, Homo sapiens
ccaaaacaagctgtg

SEQ ID NO: 347387 - DNA, 15 bp, Homo sapiens
cccaaaacaagctgt

SEQ ID NO: 347388 - DNA, 15 bp, Homo sapiens
acccaaaacaagctg

SEQ ID NO: 347389 - DNA, 15 bp, Homo sapiens
gacccaaaacaagct

SEQ ID NO: 347390 - DNA, 15 bp, Homo sapiens
tgacccaaaacaagc

SEQ ID NO: 347391 - DNA, 15 bp, Homo sapiens
ttgacccaaaacaag

SEQ ID NO: 347392 - DNA, 15 bp, Homo sapiens
tttgacccaaaacaa

SEQ ID NO: 347393 - DNA, 15 bp, Homo sapiens
ctttgacccaaaaca

SEQ ID NO: 347394 - DNA, 15 bp, Homo sapiens
cctttgacccaaaac

SEQ ID NO: 347395 - DNA, 15 bp, Homo sapiens
tcctttgacccaaaa

SEQ ID NO: 347396 - DNA, 15 bp, Homo sapiens
gtcctttgacccaaa

SEQ ID NO: 347397 - DNA, 15 bp, Homo sapiens
agtcctttgacccaa

SEQ ID NO: 347398 - DNA, 15 bp, Homo sapiens
aagtcctttgaccca

SEQ ID NO: 347399 - DNA, 15 bp, Homo sapiens
aaagtcctttgaccc

SEQ ID NO: 347400 - DNA, 15 bp, Homo sapiens
aaaagtcctttgacc

SEQ ID NO: 347401 - DNA, 15 bp, Homo sapiens
aaaaagtcctttgac

SEQ ID NO: 347402 - DNA, 15 bp, Homo sapiens
taaaaagtcctttga

SEQ ID NO: 347403 - DNA, 15 bp, Homo sapiens
ttaaaaagtcctttg

SEQ ID NO: 347404 - DNA, 15 bp, Homo sapiens
tttaaaaagtccttt

SEQ ID NO: 347405 - DNA, 15 bp, Homo sapiens
ttttaaaaagtcctt

SEQ ID NO: 347406 - DNA, 15 bp, Homo sapiens
cttttaaaaagtcct

SEQ ID NO: 347407 - DNA, 15 bp, Homo sapiens
ccttttaaaaagtcc

SEQ ID NO: 347408 - DNA, 15 bp, Homo sapiens
cccttttaaaaagtc

SEQ ID NO: 347409 - DNA, 15 bp, Homo sapiens
ccccttttaaaaagt

SEQ ID NO: 347410 - DNA, 15 bp, Homo sapiens
gccccttttaaaaag

SEQ ID NO: 347411 - DNA, 15 bp, Homo sapiens
agccccttttaaaaa

SEQ ID NO: 347412 - DNA, 15 bp, Homo sapiens
aagccccttttaaaa

SEQ ID NO: 347413 - DNA, 15 bp, Homo sapiens
gaagccccttttaaa

SEQ ID NO: 347414 - DNA, 15 bp, Homo sapiens
agaagccccttttaa

SEQ ID NO: 347415 - DNA, 15 bp, Homo sapiens
tagaagcccctttta

SEQ ID NO: 347416 - DNA, 15 bp, Homo sapiens
atagaagcccctttt

SEQ ID NO: 347417 - DNA, 15 bp, Homo sapiens
tatagaagccccttt

SEQ ID NO: 347418 - DNA, 15 bp, Homo sapiens
ttatagaagcccctt

SEQ ID NO: 347419 - DNA, 15 bp, Homo sapiens
cttatagaagcccct

SEQ ID NO: 347420 - DNA, 15 bp, Homo sapiens
ccttatagaagcccc

SEQ ID NO: 347421 - DNA, 15 bp, Homo sapiens
gccttatagaagccc

SEQ ID NO: 347422 - DNA, 15 bp, Homo sapiens
tgccttatagaagcc

SEQ ID NO: 347423 - DNA, 15 bp, Homo sapiens
atgccttatagaagc

SEQ ID NO: 347424 - DNA, 15 bp, Homo sapiens
aatgccttatagaag

SEQ ID NO: 347425 - DNA, 15 bp, Homo sapiens
caatgccttatagaa

SEQ ID NO: 347426 - DNA, 15 bp, Homo sapiens
acaatgccttataga

SEQ ID NO: 347427 - DNA, 15 bp, Homo sapiens
tacaatgccttatag

SEQ ID NO: 347428 - DNA, 15 bp, Homo sapiens
ctacaatgccttata

SEQ ID NO: 347429 - DNA, 15 bp, Homo sapiens
tctacaatgccttat

SEQ ID NO: 347430 - DNA, 15 bp, Homo sapiens
ttctacaatgcctta

SEQ ID NO: 347431 - DNA, 15 bp, Homo sapiens
attctacaatgcctt

SEQ ID NO: 347432 - DNA, 15 bp, Homo sapiens
gattctacaatgcct

SEQ ID NO: 347433 - DNA, 15 bp, Homo sapiens
tgattctacaatgcc

SEQ ID NO: 347434 - DNA, 15 bp, Homo sapiens
ctgattctacaatgc

SEQ ID NO: 347435 - DNA, 15 bp, Homo sapiens
gctgattctacaatg

SEQ ID NO: 347436 - DNA, 15 bp, Homo sapiens
agctgattctacaat

SEQ ID NO: 347437 - DNA, 15 bp, Homo sapiens
aagctgattctacaa

SEQ ID NO: 347438 - DNA, 15 bp, Homo sapiens
caagctgattctaca

SEQ ID NO: 347439 - DNA, 15 bp, Homo sapiens
ccaagctgattctac

SEQ ID NO: 347440 - DNA, 15 bp, Homo sapiens
cccaagctgattcta

SEQ ID NO: 347441 - DNA, 15 bp, Homo sapiens
acccaagctgattct

SEQ ID NO: 347442 - DNA, 15 bp, Homo sapiens
tacccaagctgattc

SEQ ID NO: 347443 - DNA, 15 bp, Homo sapiens
atacccaagctgatt

SEQ ID NO: 347444 - DNA, 15 bp, Homo sapiens
catacccaagctgat

SEQ ID NO: 347445 - DNA, 15 bp, Homo sapiens
ccatacccaagctga

SEQ ID NO: 347446 - DNA, 15 bp, Homo sapiens
tccatacccaagctg

SEQ ID NO: 347447 - DNA, 15 bp, Homo sapiens
atccatacccaagct

SEQ ID NO: 347448 - DNA, 15 bp, Homo sapiens
aatccatacccaagc

SEQ ID NO: 347449 - DNA, 15 bp, Homo sapiens
aaatccatacccaag

SEQ ID NO: 347450 - DNA, 15 bp, Homo sapiens
caaatccatacccaa

SEQ ID NO: 347451 - DNA, 15 bp, Homo sapiens
tcaaatccataccca

SEQ ID NO: 347452 - DNA, 15 bp, Homo sapiens
ttcaaatccataccc

SEQ ID NO: 347453 - DNA, 15 bp, Homo sapiens
attcaaatccatacc

SEQ ID NO: 347454 - DNA, 15 bp, Homo sapiens
cattcaaatccatac

SEQ ID NO: 347455 - DNA, 15 bp, Homo sapiens
acattcaaatccata

SEQ ID NO: 347456 - DNA, 15 bp, Homo sapiens
aacattcaaatccat

SEQ ID NO: 347457 - DNA, 15 bp, Homo sapiens
aaacattcaaatcca

SEQ ID NO: 347458 - DNA, 15 bp, Homo sapiens
aaaacattcaaatcc

SEQ ID NO: 347459 - DNA, 15 bp, Homo sapiens
caaaacattcaaatc

SEQ ID NO: 347460 - DNA, 15 bp, Homo sapiens
tcaaaacattcaaat

SEQ ID NO: 347461 - DNA, 15 bp, Homo sapiens
ttcaaaacattcaaa

SEQ ID NO: 347462 - DNA, 15 bp, Homo sapiens
cttcaaaacattcaa

SEQ ID NO: 347463 - DNA, 15 bp, Homo sapiens
acttcaaaacattca

SEQ ID NO: 347464 - DNA, 15 bp, Homo sapiens
aacttcaaaacattc

SEQ ID NO: 347465 - DNA, 15 bp, Homo sapiens
taacttcaaaacatt

SEQ ID NO: 347466 - DNA, 15 bp, Homo sapiens
ataacttcaaaacat

SEQ ID NO: 347467 - DNA, 15 bp, Homo sapiens
cataacttcaaaaca

SEQ ID NO: 347468 - DNA, 15 bp, Homo sapiens
ccataacttcaaaac

SEQ ID NO: 347469 - DNA, 15 bp, Homo sapiens
tccataacttcaaaa

SEQ ID NO: 347470 - DNA, 15 bp, Homo sapiens
atccataacttcaaa

SEQ ID NO: 347471 - DNA, 15 bp, Homo sapiens
aatccataacttcaa

SEQ ID NO: 347472 - DNA, 15 bp, Homo sapiens
aaatccataacttca

SEQ ID NO: 347473 - DNA, 15 bp, Homo sapiens
taaatccataacttc

SEQ ID NO: 347474 - DNA, 15 bp, Homo sapiens
ttaaatccataactt

SEQ ID NO: 347475 - DNA, 15 bp, Homo sapiens
tttaaatccataact

SEQ ID NO: 347476 - DNA, 15 bp, Homo sapiens
ttttaaatccataac

SEQ ID NO: 347477 - DNA, 15 bp, Homo sapiens
gttttaaatccataa

SEQ ID NO: 347478 - DNA, 15 bp, Homo sapiens
agttttaaatccata

SEQ ID NO: 347479 - DNA, 15 bp, Homo sapiens
cagttttaaatccat

SEQ ID NO: 347480 - DNA, 15 bp, Homo sapiens
ccagttttaaatcca

SEQ ID NO: 347481 - DNA, 15 bp, Homo sapiens
tccagttttaaatcc

SEQ ID NO: 347482 - DNA, 15 bp, Homo sapiens
ttccagttttaaatc

SEQ ID NO: 347483 - DNA, 15 bp, Homo sapiens
cttccagttttaaat

SEQ ID NO: 347484 - DNA, 15 bp, Homo sapiens
tcttccagttttaaa

SEQ ID NO: 347485 - DNA, 15 bp, Homo sapiens
ctcttccagttttaa

SEQ ID NO: 347486 - DNA, 15 bp, Homo sapiens
cctcttccagtttta

SEQ ID NO: 347487 - DNA, 15 bp, Homo sapiens
tcctcttccagtttt

SEQ ID NO: 347488 - DNA, 15 bp, Homo sapiens
gtcctcttccagttt

SEQ ID NO: 347489 - DNA, 15 bp, Homo sapiens
agtcctcttccagtt

SEQ ID NO: 347490 - DNA, 15 bp, Homo sapiens
gagtcctcttccagt

SEQ ID NO: 347491 - DNA, 15 bp, Homo sapiens
tgagtcctcttccag

SEQ ID NO: 347492 - DNA, 15 bp, Homo sapiens
ctgagtcctcttcca

SEQ ID NO: 347493 - DNA, 15 bp, Homo sapiens
tctgagtcctcttcc

SEQ ID NO: 347494 - DNA, 15 bp, Homo sapiens
atctgagtcctcttc

SEQ ID NO: 347495 - DNA, 15 bp, Homo sapiens
gatctgagtcctctt

SEQ ID NO: 347496 - DNA, 15 bp, Homo sapiens
agatctgagtcctct

SEQ ID NO: 347497 - DNA, 15 bp, Homo sapiens
cagatctgagtcctc

SEQ ID NO: 347498 - DNA, 15 bp, Homo sapiens
gcagatctgagtcct

SEQ ID NO: 347499 - DNA, 15 bp, Homo sapiens
cgcagatctgagtcc

SEQ ID NO: 347500 - DNA, 15 bp, Homo sapiens
ccgcagatctgagtc

SEQ ID NO: 347501 - DNA, 15 bp, Homo sapiens
cccgcagatctgagt

SEQ ID NO: 347502 - DNA, 15 bp, Homo sapiens
acccgcagatctgag

SEQ ID NO: 347503 - DNA, 15 bp, Homo sapiens
gacccgcagatctga

SEQ ID NO: 347504 - DNA, 15 bp, Homo sapiens
ggacccgcagatctg

SEQ ID NO: 347505 - DNA, 15 bp, Homo sapiens
tggacccgcagatct

SEQ ID NO: 347506 - DNA, 15 bp, Homo sapiens
atggacccgcagatc

SEQ ID NO: 347507 - DNA, 15 bp, Homo sapiens
gatggacccgcagat

SEQ ID NO: 347508 - DNA, 15 bp, Homo sapiens
ggatggacccgcaga

SEQ ID NO: 347509 - DNA, 15 bp, Homo sapiens
gggatggacccgcag

SEQ ID NO: 347510 - DNA, 15 bp, Homo sapiens
ggggatggacccgca

SEQ ID NO: 347511 - DNA, 15 bp, Homo sapiens
aggggatggacccgc

SEQ ID NO: 347512 - DNA, 15 bp, Homo sapiens
taggggatggacccg

SEQ ID NO: 347513 - DNA, 15 bp, Homo sapiens
ataggggatggaccc

SEQ ID NO: 347514 - DNA, 15 bp, Homo sapiens
tataggggatggacc

SEQ ID NO: 347515 - DNA, 15 bp, Homo sapiens
ttataggggatggac

SEQ ID NO: 347516 - DNA, 15 bp, Homo sapiens
cttataggggatgga

SEQ ID NO: 347517 - DNA, 15 bp, Homo sapiens
ccttataggggatgg

SEQ ID NO: 347518 - DNA, 15 bp, Homo sapiens
accttataggggatg

SEQ ID NO: 347519 - DNA, 15 bp, Homo sapiens
aaccttataggggat

SEQ ID NO: 347520 - DNA, 15 bp, Homo sapiens
taaccttatagggga

SEQ ID NO: 347521 - DNA, 15 bp, Homo sapiens
ttaaccttatagggg

SEQ ID NO: 347522 - DNA, 15 bp, Homo sapiens
cttaaccttataggg

SEQ ID NO: 347523 - DNA, 15 bp, Homo sapiens
ccttaaccttatagg

SEQ ID NO: 347524 - DNA, 15 bp, Homo sapiens
tccttaaccttatag

SEQ ID NO: 347525 - DNA, 15 bp, Homo sapiens
ttccttaaccttata

SEQ ID NO: 347526 - DNA, 15 bp, Homo sapiens
attccttaaccttat

SEQ ID NO: 347527 - DNA, 15 bp, Homo sapiens
cattccttaacctta

SEQ ID NO: 347528 - DNA, 15 bp, Homo sapiens
tcattccttaacctt

SEQ ID NO: 347529 - DNA, 15 bp, Homo sapiens
ttcattccttaacct

SEQ ID NO: 347530 - DNA, 15 bp, Homo sapiens
attcattccttaacc

SEQ ID NO: 347531 - DNA, 15 bp, Homo sapiens
tattcattccttaac

SEQ ID NO: 347532 - DNA, 15 bp, Homo sapiens
gtattcattccttaa

SEQ ID NO: 347533 - DNA, 15 bp, Homo sapiens
tgtattcattcctta

SEQ ID NO: 347534 - DNA, 15 bp, Homo sapiens
ttgtattcattcctt

SEQ ID NO: 347535 - DNA, 15 bp, Homo sapiens
cttgtattcattcct

SEQ ID NO: 347536 - DNA, 15 bp, Homo sapiens
ccttgtattcattcc

SEQ ID NO: 347537 - DNA, 15 bp, Homo sapiens
gccttgtattcattc

SEQ ID NO: 347538 - DNA, 15 bp, Homo sapiens
ggccttgtattcatt

SEQ ID NO: 347539 - DNA, 15 bp, Homo sapiens
tggccttgtattcat

SEQ ID NO: 347540 - DNA, 15 bp, Homo sapiens
gtggccttgtattca

SEQ ID NO: 347541 - DNA, 15 bp, Homo sapiens
tgtggccttgtattc

SEQ ID NO: 347542 - DNA, 15 bp, Homo sapiens
atgtggccttgtatt

SEQ ID NO: 347543 - DNA, 15 bp, Homo sapiens
tatgtggccttgtat

SEQ ID NO: 347544 - DNA, 15 bp, Homo sapiens
ctatgtggccttgta

SEQ ID NO: 347545 - DNA, 15 bp, Homo sapiens
tctatgtggccttgt

SEQ ID NO: 347546 - DNA, 15 bp, Homo sapiens
gtctatgtggccttg

SEQ ID NO: 347547 - DNA, 15 bp, Homo sapiens
ggtctatgtggcctt

SEQ ID NO: 347548 - DNA, 15 bp, Homo sapiens
aggtctatgtggcct

SEQ ID NO: 347549 - DNA, 15 bp, Homo sapiens
aaggtctatgtggcc

SEQ ID NO: 347550 - DNA, 15 bp, Homo sapiens
taaggtctatgtggc

SEQ ID NO: 347551 - DNA, 15 bp, Homo sapiens
ctaaggtctatgtgg

SEQ ID NO: 347552 - DNA, 15 bp, Homo sapiens
cctaaggtctatgtg

SEQ ID NO: 347553 - DNA, 15 bp, Homo sapiens
tcctaaggtctatgt

SEQ ID NO: 347554 - DNA, 15 bp, Homo sapiens
gtcctaaggtctatg

SEQ ID NO: 347555 - DNA, 15 bp, Homo sapiens
agtcctaaggtctat

SEQ ID NO: 347556 - DNA, 15 bp, Homo sapiens
aagtcctaaggtcta

SEQ ID NO: 347557 - DNA, 15 bp, Homo sapiens
aaagtcctaaggtct

SEQ ID NO: 347558 - DNA, 15 bp, Homo sapiens
gaaagtcctaaggtc

SEQ ID NO: 347559 - DNA, 15 bp, Homo sapiens
agaaagtcctaaggt

SEQ ID NO: 347560 - DNA, 15 bp, Homo sapiens
aagaaagtcctaagg

SEQ ID NO: 347561 - DNA, 15 bp, Homo sapiens
caagaaagtcctaag

SEQ ID NO: 347562 - DNA, 15 bp, Homo sapiens
acaagaaagtcctaa

SEQ ID NO: 347563 - DNA, 15 bp, Homo sapiens
tacaagaaagtccta

SEQ ID NO: 347564 - DNA, 15 bp, Homo sapiens
ctacaagaaagtcct

SEQ ID NO: 347565 - DNA, 15 bp, Homo sapiens
tctacaagaaagtcc

SEQ ID NO: 347566 - DNA, 15 bp, Homo sapiens
ctctacaagaaagtc

SEQ ID NO: 347567 - DNA, 15 bp, Homo sapiens
cctctacaagaaagt

SEQ ID NO: 347568 - DNA, 15 bp, Homo sapiens
tcctctacaagaaag

SEQ ID NO: 347569 - DNA, 15 bp, Homo sapiens
ttcctctacaagaaa

SEQ ID NO: 347570 - DNA, 15 bp, Homo sapiens
tttcctctacaagaa

SEQ ID NO: 347571 - DNA, 15 bp, Homo sapiens
gtttcctctacaaga

SEQ ID NO: 347572 - DNA, 15 bp, Homo sapiens
agtttcctctacaag

SEQ ID NO: 347573 - DNA, 15 bp, Homo sapiens
gagtttcctctacaa

SEQ ID NO: 347574 - DNA, 15 bp, Homo sapiens
agagtttcctctaca

SEQ ID NO: 347575 - DNA, 15 bp, Homo sapiens
aagagtttcctctac

SEQ ID NO: 347576 - DNA, 15 bp, Homo sapiens
aaagagtttcctcta

SEQ ID NO: 347577 - DNA, 15 bp, Homo sapiens
aaaagagtttcctct

SEQ ID NO: 347578 - DNA, 15 bp, Homo sapiens
gaaaagagtttcctc

SEQ ID NO: 347579 - DNA, 15 bp, Homo sapiens
agaaaagagtttcct

SEQ ID NO: 347580 - DNA, 15 bp, Homo sapiens
aagaaaagagtttcc

SEQ ID NO: 347581 - DNA, 15 bp, Homo sapiens
aaagaaaagagtttc

SEQ ID NO: 347582 - DNA, 15 bp, Homo sapiens
aaaagaaaagagttt

SEQ ID NO: 347583 - DNA, 15 bp, Homo sapiens
aaaaagaaaagagtt

SEQ ID NO: 347584 - DNA, 15 bp, Homo sapiens
taaaaagaaaagagt

SEQ ID NO: 347585 - DNA, 15 bp, Homo sapiens
ataaaaagaaaagag

SEQ ID NO: 347586 - DNA, 15 bp, Homo sapiens
tataaaaagaaaaga

SEQ ID NO: 347587 - DNA, 15 bp, Homo sapiens
atataaaaagaaaag

SEQ ID NO: 347588 - DNA, 15 bp, Homo sapiens
gatataaaaagaaaa

SEQ ID NO: 347589 - DNA, 15 bp, Homo sapiens
ggatataaaaagaaa

SEQ ID NO: 347590 - DNA, 15 bp, Homo sapiens
tggatataaaaagaa

SEQ ID NO: 347591 - DNA, 15 bp, Homo sapiens
ctggatataaaaaga

SEQ ID NO: 347592 - DNA, 15 bp, Homo sapiens
actggatataaaaag

SEQ ID NO: 347593 - DNA, 15 bp, Homo sapiens
aactggatataaaaa

SEQ ID NO: 347594 - DNA, 15 bp, Homo sapiens
caactggatataaaa

SEQ ID NO: 347595 - DNA, 15 bp, Homo sapiens
ccaactggatataaa

SEQ ID NO: 347596 - DNA, 15 bp, Homo sapiens
accaactggatataa

SEQ ID NO: 347597 - DNA, 15 bp, Homo sapiens
taccaactggatata

SEQ ID NO: 347598 - DNA, 15 bp, Homo sapiens
ctaccaactggatat

SEQ ID NO: 347599 - DNA, 15 bp, Homo sapiens
tctaccaactggata

SEQ ID NO: 347600 - DNA, 15 bp, Homo sapiens
atctaccaactggat

SEQ ID NO: 347601 - DNA, 15 bp, Homo sapiens
catctaccaactgga

SEQ ID NO: 347602 - DNA, 15 bp, Homo sapiens
ccatctaccaactgg

SEQ ID NO: 347603 - DNA, 15 bp, Homo sapiens
accatctaccaactg

SEQ ID NO: 347604 - DNA, 15 bp, Homo sapiens
taccatctaccaact

SEQ ID NO: 347605 - DNA, 15 bp, Homo sapiens
gtaccatctaccaac

SEQ ID NO: 347606 - DNA, 15 bp, Homo sapiens
agtaccatctaccaa

SEQ ID NO: 347607 - DNA, 15 bp, Homo sapiens
cagtaccatctacca

SEQ ID NO: 347608 - DNA, 15 bp, Homo sapiens
acagtaccatctacc

SEQ ID NO: 347609 - DNA, 15 bp, Homo sapiens
tacagtaccatctac

SEQ ID NO: 347610 - DNA, 15 bp, Homo sapiens
ctacagtaccatcta

SEQ ID NO: 347611 - DNA, 15 bp, Homo sapiens
actacagtaccatct

SEQ ID NO: 347612 - DNA, 15 bp, Homo sapiens
tactacagtaccatc

SEQ ID NO: 347613 - DNA, 15 bp, Homo sapiens
ctactacagtaccat

SEQ ID NO: 347614 - DNA, 15 bp, Homo sapiens
gctactacagtacca

SEQ ID NO: 347615 - DNA, 15 bp, Homo sapiens
agctactacagtacc

SEQ ID NO: 347616 - DNA, 15 bp, Homo sapiens
tagctactacagtac

SEQ ID NO: 347617 - DNA, 15 bp, Homo sapiens
ctagctactacagta

SEQ ID NO: 347618 - DNA, 15 bp, Homo sapiens
cctagctactacagt

SEQ ID NO: 347619 - DNA, 15 bp, Homo sapiens
tcctagctactacag

SEQ ID NO: 347620 - DNA, 15 bp, Homo sapiens
ttcctagctactaca

SEQ ID NO: 347621 - DNA, 15 bp, Homo sapiens
cttcctagctactac

SEQ ID NO: 347622 - DNA, 15 bp, Homo sapiens
tcttcctagctacta

SEQ ID NO: 347623 - DNA, 15 bp, Homo sapiens
gtcttcctagctact

SEQ ID NO: 347624 - DNA, 15 bp, Homo sapiens
tgtcttcctagctac

SEQ ID NO: 347625 - DNA, 15 bp, Homo sapiens
atgtcttcctagcta

SEQ ID NO: 347626 - DNA, 15 bp, Homo sapiens
tatgtcttcctagct

SEQ ID NO: 347627 - DNA, 15 bp, Homo sapiens
ttatgtcttcctagc

SEQ ID NO: 347628 - DNA, 15 bp, Homo sapiens
attatgtcttcctag

SEQ ID NO: 347629 - DNA, 15 bp, Homo sapiens
aattatgtcttccta

SEQ ID NO: 347630 - DNA, 15 bp, Homo sapiens
gaattatgtcttcct

SEQ ID NO: 347631 - DNA, 15 bp, Homo sapiens
tgaattatgtcttcc

SEQ ID NO: 347632 - DNA, 15 bp, Homo sapiens
gtgaattatgtcttc

SEQ ID NO: 347633 - DNA, 15 bp, Homo sapiens
ggtgaattatgtctt

SEQ ID NO: 347634 - DNA, 15 bp, Homo sapiens
tggtgaattatgtct

SEQ ID NO: 347635 - DNA, 15 bp, Homo sapiens
atggtgaattatgtc

SEQ ID NO: 347636 - DNA, 15 bp, Homo sapiens
aatggtgaattatgt

SEQ ID NO: 347637 - DNA, 15 bp, Homo sapiens
taatggtgaattatg

SEQ ID NO: 347638 - DNA, 15 bp, Homo sapiens
gtaatggtgaattat

SEQ ID NO: 347639 - DNA, 15 bp, Homo sapiens
agtaatggtgaatta

SEQ ID NO: 347640 - DNA, 15 bp, Homo sapiens
tagtaatggtgaatt

SEQ ID NO: 347641 - DNA, 15 bp, Homo sapiens
gtagtaatggtgaat

SEQ ID NO: 347642 - DNA, 15 bp, Homo sapiens
cgtagtaatggtgaa

SEQ ID NO: 347643 - DNA, 15 bp, Homo sapiens
tcgtagtaatggtga

SEQ ID NO: 347644 - DNA, 15 bp, Homo sapiens
ttcgtagtaatggtg

SEQ ID NO: 347645 - DNA, 15 bp, Homo sapiens
gttcgtagtaatggt

SEQ ID NO: 347646 - DNA, 15 bp, Homo sapiens
agttcgtagtaatgg

SEQ ID NO: 347647 - DNA, 15 bp, Homo sapiens
cagttcgtagtaatg

SEQ ID NO: 347648 - DNA, 15 bp, Homo sapiens
acagttcgtagtaat

SEQ ID NO: 347649 - DNA, 15 bp, Homo sapiens
aacagttcgtagtaa

SEQ ID NO: 347650 - DNA, 15 bp, Homo sapiens
taacagttcgtagta

SEQ ID NO: 347651 - DNA, 15 bp, Homo sapiens
gtaacagttcgtagt

SEQ ID NO: 347652 - DNA, 15 bp, Homo sapiens
agtaacagttcgtag

SEQ ID NO: 347653 - DNA, 15 bp, Homo sapiens
aagtaacagttcgta

SEQ ID NO: 347654 - DNA, 15 bp, Homo sapiens
gaagtaacagttcgt

SEQ ID NO: 347655 - DNA, 15 bp, Homo sapiens
ggaagtaacagttcg

SEQ ID NO: 347656 - DNA, 15 bp, Homo sapiens
gggaagtaacagttc

SEQ ID NO: 347657 - DNA, 15 bp, Homo sapiens
agggaagtaacagtt

SEQ ID NO: 347658 - DNA, 15 bp, Homo sapiens
aagggaagtaacagt

SEQ ID NO: 347659 - DNA, 15 bp, Homo sapiens
gaagggaagtaacag

SEQ ID NO: 347660 - DNA, 15 bp, Homo sapiens
agaagggaagtaaca

SEQ ID NO: 347661 - DNA, 15 bp, Homo sapiens
aagaagggaagtaac

SEQ ID NO: 347662 - DNA, 15 bp, Homo sapiens
taagaagggaagtaa

SEQ ID NO: 347663 - DNA, 15 bp, Homo sapiens
gtaagaagggaagta

SEQ ID NO: 347664 - DNA, 15 bp, Homo sapiens
ggtaagaagggaagt

SEQ ID NO: 347665 - DNA, 15 bp, Homo sapiens
tggtaagaagggaag

SEQ ID NO: 347666 - DNA, 15 bp, Homo sapiens
ctggtaagaagggaa

SEQ ID NO: 347667 - DNA, 15 bp, Homo sapiens
gctggtaagaaggga

SEQ ID NO: 347668 - DNA, 15 bp, Homo sapiens
cgctggtaagaaggg

SEQ ID NO: 347669 - DNA, 15 bp, Homo sapiens
ccgctggtaagaagg

SEQ ID NO: 347670 - DNA, 15 bp, Homo sapiens
cccgctggtaagaag

SEQ ID NO: 347671 - DNA, 15 bp, Homo sapiens
tcccgctggtaagaa

SEQ ID NO: 347672 - DNA, 15 bp, Homo sapiens
atcccgctggtaaga

SEQ ID NO: 347673 - DNA, 15 bp, Homo sapiens
aatcccgctggtaag

SEQ ID NO: 347674 - DNA, 15 bp, Homo sapiens
taatcccgctggtaa

SEQ ID NO: 347675 - DNA, 15 bp, Homo sapiens
ctaatcccgctggta

SEQ ID NO: 347676 - DNA, 15 bp, Homo sapiens
cctaatcccgctggt

SEQ ID NO: 347677 - DNA, 15 bp, Homo sapiens
acctaatcccgctgg

SEQ ID NO: 347678 - DNA, 15 bp, Homo sapiens
aacctaatcccgctg

SEQ ID NO: 347679 - DNA, 15 bp, Homo sapiens
aaacctaatcccgct

SEQ ID NO: 347680 - DNA, 15 bp, Homo sapiens
taaacctaatcccgc

SEQ ID NO: 347681 - DNA, 15 bp, Homo sapiens
ataaacctaatcccg

SEQ ID NO: 347682 - DNA, 15 bp, Homo sapiens
tataaacctaatccc

SEQ ID NO: 347683 - DNA, 15 bp, Homo sapiens
ttataaacctaatcc

SEQ ID NO: 347684 - DNA, 15 bp, Homo sapiens
tttataaacctaatc

SEQ ID NO: 347685 - DNA, 15 bp, Homo sapiens
ttttataaacctaat

SEQ ID NO: 347686 - DNA, 15 bp, Homo sapiens
cttttataaacctaa

SEQ ID NO: 347687 - DNA, 15 bp, Homo sapiens
gcttttataaaccta

SEQ ID NO: 347688 - DNA, 15 bp, Homo sapiens
tgcttttataaacct

SEQ ID NO: 347689 - DNA, 15 bp, Homo sapiens
ttgcttttataaacc

SEQ ID NO: 347690 - DNA, 15 bp, Homo sapiens
attgcttttataaac

SEQ ID NO: 347691 - DNA, 15 bp, Homo sapiens
cattgcttttataaa

SEQ ID NO: 347692 - DNA, 15 bp, Homo sapiens
tcattgcttttataa

SEQ ID NO: 347693 - DNA, 15 bp, Homo sapiens
ttcattgcttttata

SEQ ID NO: 347694 - DNA, 15 bp, Homo sapiens
cttcattgcttttat

SEQ ID NO: 347695 - DNA, 15 bp, Homo sapiens
tcttcattgctttta

SEQ ID NO: 347696 - DNA, 15 bp, Homo sapiens
atcttcattgctttt

SEQ ID NO: 347697 - DNA, 15 bp, Homo sapiens
gatcttcattgcttt

SEQ ID NO: 347698 - DNA, 15 bp, Homo sapiens
agatcttcattgctt

SEQ ID NO: 347699 - DNA, 15 bp, Homo sapiens
aagatcttcattgct

SEQ ID NO: 347700 - DNA, 15 bp, Homo sapiens
aaagatcttcattgc

SEQ ID NO: 347701 - DNA, 15 bp, Homo sapiens
caaagatcttcattg

SEQ ID NO: 347702 - DNA, 15 bp, Homo sapiens
tcaaagatcttcatt

SEQ ID NO: 347703 - DNA, 15 bp, Homo sapiens
atcaaagatcttcat

SEQ ID NO: 347704 - DNA, 15 bp, Homo sapiens
gatcaaagatcttca

SEQ ID NO: 347705 - DNA, 15 bp, Homo sapiens
ggatcaaagatcttc

SEQ ID NO: 347706 - DNA, 15 bp, Homo sapiens
gggatcaaagatctt

SEQ ID NO: 347707 - DNA, 15 bp, Homo sapiens
tgggatcaaagatct

SEQ ID NO: 347708 - DNA, 15 bp, Homo sapiens
atgggatcaaagatc

SEQ ID NO: 347709 - DNA, 15 bp, Homo sapiens
catgggatcaaagat

SEQ ID NO: 347710 - DNA, 15 bp, Homo sapiens
tcatgggatcaaaga

SEQ ID NO: 347711 - DNA, 15 bp, Homo sapiens
ttcatgggatcaaag

SEQ ID NO: 347712 - DNA, 15 bp, Homo sapiens
gttcatgggatcaaa

SEQ ID NO: 347713 - DNA, 15 bp, Homo sapiens
agttcatgggatcaa

SEQ ID NO: 347714 - DNA, 15 bp, Homo sapiens
tagttcatgggatca

SEQ ID NO: 347715 - DNA, 15 bp, Homo sapiens
gtagttcatgggatc

SEQ ID NO: 347716 - DNA, 15 bp, Homo sapiens
ggtagttcatgggat

SEQ ID NO: 347717 - DNA, 15 bp, Homo sapiens
tggtagttcatggga

SEQ ID NO: 347718 - DNA, 15 bp, Homo sapiens
ctggtagttcatggg

SEQ ID NO: 347719 - DNA, 15 bp, Homo sapiens
tctggtagttcatgg

SEQ ID NO: 347720 - DNA, 15 bp, Homo sapiens
ctctggtagttcatg

SEQ ID NO: 347721 - DNA, 15 bp, Homo sapiens
actctggtagttcat

SEQ ID NO: 347722 - DNA, 15 bp, Homo sapiens
gactctggtagttca

SEQ ID NO: 347723 - DNA, 15 bp, Homo sapiens
ggactctggtagttc

SEQ ID NO: 347724 - DNA, 15 bp, Homo sapiens
gggactctggtagtt

SEQ ID NO: 347725 - DNA, 15 bp, Homo sapiens
tgggactctggtagt

SEQ ID NO: 347726 - DNA, 15 bp, Homo sapiens
ttgggactctggtag

SEQ ID NO: 347727 - DNA, 15 bp, Homo sapiens
tttgggactctggta

SEQ ID NO: 347728 - DNA, 15 bp, Homo sapiens
ctttgggactctggt

SEQ ID NO: 347729 - DNA, 15 bp, Homo sapiens
actttgggactctgg

SEQ ID NO: 347730 - DNA, 15 bp, Homo sapiens
cactttgggactctg

SEQ ID NO: 347731 - DNA, 15 bp, Homo sapiens
ccactttgggactct

SEQ ID NO: 347732 - DNA, 15 bp, Homo sapiens
tccactttgggactc

SEQ ID NO: 347733 - DNA, 15 bp, Homo sapiens
gtccactttgggact

SEQ ID NO: 347734 - DNA, 15 bp, Homo sapiens
agtccactttgggac

SEQ ID NO: 347735 - DNA, 15 bp, Homo sapiens
cagtccactttggga

SEQ ID NO: 347736 - DNA, 15 bp, Homo sapiens
ccagtccactttggg

SEQ ID NO: 347737 - DNA, 15 bp, Homo sapiens
accagtccactttgg

SEQ ID NO: 347738 - DNA, 15 bp, Homo sapiens
gaccagtccactttg

SEQ ID NO: 347739 - DNA, 15 bp, Homo sapiens
tgaccagtccacttt

SEQ ID NO: 347740 - DNA, 15 bp, Homo sapiens
atgaccagtccactt

SEQ ID NO: 347741 - DNA, 15 bp, Homo sapiens
aatgaccagtccact

SEQ ID NO: 347742 - DNA, 15 bp, Homo sapiens
caatgaccagtccac

SEQ ID NO: 347743 - DNA, 15 bp, Homo sapiens
gcaatgaccagtcca

SEQ ID NO: 347744 - DNA, 15 bp, Homo sapiens
agcaatgaccagtcc

SEQ ID NO: 347745 - DNA, 15 bp, Homo sapiens
gagcaatgaccagtc

SEQ ID NO: 347746 - DNA, 15 bp, Homo sapiens
tgagcaatgaccagt

SEQ ID NO: 347747 - DNA, 15 bp, Homo sapiens
atgagcaatgaccag

SEQ ID NO: 347748 - DNA, 15 bp, Homo sapiens
tatgagcaatgacca

SEQ ID NO: 347749 - DNA, 15 bp, Homo sapiens
ctatgagcaatgacc

SEQ ID NO: 347750 - DNA, 15 bp, Homo sapiens
cctatgagcaatgac

SEQ ID NO: 347751 - DNA, 15 bp, Homo sapiens
tcctatgagcaatga

SEQ ID NO: 347752 - DNA, 15 bp, Homo sapiens
atcctatgagcaatg

SEQ ID NO: 347753 - DNA, 15 bp, Homo sapiens
tatcctatgagcaat

SEQ ID NO: 347754 - DNA, 15 bp, Homo sapiens
atatcctatgagcaa

SEQ ID NO: 347755 - DNA, 15 bp, Homo sapiens
aatatcctatgagca

SEQ ID NO: 347756 - DNA, 15 bp, Homo sapiens
taatatcctatgagc

SEQ ID NO: 347757 - DNA, 15 bp, Homo sapiens
ctaatatcctatgag

SEQ ID NO: 347758 - DNA, 15 bp, Homo sapiens
gctaatatcctatga

SEQ ID NO: 347759 - DNA, 15 bp, Homo sapiens
tgctaatatcctatg

SEQ ID NO: 347760 - DNA, 15 bp, Homo sapiens
ttgctaatatcctat

SEQ ID NO: 347761 - DNA, 15 bp, Homo sapiens
tttgctaatatccta

SEQ ID NO: 347762 - DNA, 15 bp, Homo sapiens
atttgctaatatcct

SEQ ID NO: 347763 - DNA, 15 bp, Homo sapiens
aatttgctaatatcc

SEQ ID NO: 347764 - DNA, 15 bp, Homo sapiens
taatttgctaatatc

SEQ ID NO: 347765 - DNA, 15 bp, Homo sapiens
ttaatttgctaatat

SEQ ID NO: 347766 - DNA, 15 bp, Homo sapiens
gttaatttgctaata

SEQ ID NO: 347767 - DNA, 15 bp, Homo sapiens
ggttaatttgctaat

SEQ ID NO: 347768 - DNA, 15 bp, Homo sapiens
aggttaatttgctaa

SEQ ID NO: 347769 - DNA, 15 bp, Homo sapiens
aaggttaatttgcta

SEQ ID NO: 347770 - DNA, 15 bp, Homo sapiens
aaaggttaatttgct

SEQ ID NO: 347771 - DNA, 15 bp, Homo sapiens
caaaggttaatttgc

SEQ ID NO: 347772 - DNA, 15 bp, Homo sapiens
gcaaaggttaatttg

SEQ ID NO: 347773 - DNA, 15 bp, Homo sapiens
tgcaaaggttaattt

SEQ ID NO: 347774 - DNA, 15 bp, Homo sapiens
gtgcaaaggttaatt

SEQ ID NO: 347775 - DNA, 15 bp, Homo sapiens
cgtgcaaaggttaat

SEQ ID NO: 347776 - DNA, 15 bp, Homo sapiens
tcgtgcaaaggttaa

SEQ ID NO: 347777 - DNA, 15 bp, Homo sapiens
atcgtgcaaaggtta

SEQ ID NO: 347778 - DNA, 15 bp, Homo sapiens
gatcgtgcaaaggtt

SEQ ID NO: 347779 - DNA, 15 bp, Homo sapiens
ggatcgtgcaaaggt

SEQ ID NO: 347780 - DNA, 15 bp, Homo sapiens
tggatcgtgcaaagg

SEQ ID NO: 347781 - DNA, 15 bp, Homo sapiens
atggatcgtgcaaag

SEQ ID NO: 347782 - DNA, 15 bp, Homo sapiens
tatggatcgtgcaaa

SEQ ID NO: 347783 - DNA, 15 bp, Homo sapiens
gtatggatcgtgcaa

SEQ ID NO: 347784 - DNA, 15 bp, Homo sapiens
agtatggatcgtgca

SEQ ID NO: 347785 - DNA, 15 bp, Homo sapiens
tagtatggatcgtgc

SEQ ID NO: 347786 - DNA, 15 bp, Homo sapiens
ttagtatggatcgtg

SEQ ID NO: 347787 - DNA, 15 bp, Homo sapiens
cttagtatggatcgt

SEQ ID NO: 347788 - DNA, 15 bp, Homo sapiens
acttagtatggatcg

SEQ ID NO: 347789 - DNA, 15 bp, Homo sapiens
aacttagtatggatc

SEQ ID NO: 347790 - DNA, 15 bp, Homo sapiens
aaacttagtatggat

SEQ ID NO: 347791 - DNA, 15 bp, Homo sapiens
taaacttagtatgga

SEQ ID NO: 347792 - DNA, 15 bp, Homo sapiens
ttaaacttagtatgg

SEQ ID NO: 347793 - DNA, 15 bp, Homo sapiens
cttaaacttagtatg

SEQ ID NO: 347794 - DNA, 15 bp, Homo sapiens
tcttaaacttagtat

SEQ ID NO: 347795 - DNA, 15 bp, Homo sapiens
atcttaaacttagta

SEQ ID NO: 347796 - DNA, 15 bp, Homo sapiens
gatcttaaacttagt

SEQ ID NO: 347797 - DNA, 15 bp, Homo sapiens
tgatcttaaacttag

SEQ ID NO: 347798 - DNA, 15 bp, Homo sapiens
ctgatcttaaactta

SEQ ID NO: 347799 - DNA, 15 bp, Homo sapiens
gctgatcttaaactt

SEQ ID NO: 347800 - DNA, 15 bp, Homo sapiens
ggctgatcttaaact

SEQ ID NO: 347801 - DNA, 15 bp, Homo sapiens
aggctgatcttaaac

SEQ ID NO: 347802 - DNA, 15 bp, Homo sapiens
aaggctgatcttaaa

SEQ ID NO: 347803 - DNA, 15 bp, Homo sapiens
gaaggctgatcttaa

SEQ ID NO: 347804 - DNA, 15 bp, Homo sapiens
agaaggctgatctta

SEQ ID NO: 347805 - DNA, 15 bp, Homo sapiens
gagaaggctgatctt

SEQ ID NO: 347806 - DNA, 15 bp, Homo sapiens
ggagaaggctgatct

SEQ ID NO: 347807 - DNA, 15 bp, Homo sapiens
gggagaaggctgatc

SEQ ID NO: 347808 - DNA, 15 bp, Homo sapiens
agggagaaggctgat

SEQ ID NO: 347809 - DNA, 15 bp, Homo sapiens
cagggagaaggctga

SEQ ID NO: 347810 - DNA, 15 bp, Homo sapiens
tcagggagaaggctg

SEQ ID NO: 347811 - DNA, 15 bp, Homo sapiens
atcagggagaaggct

SEQ ID NO: 347812 - DNA, 15 bp, Homo sapiens
catcagggagaaggc

SEQ ID NO: 347813 - DNA, 15 bp, Homo sapiens
acatcagggagaagg

SEQ ID NO: 347814 - DNA, 15 bp, Homo sapiens
aacatcagggagaag

SEQ ID NO: 347815 - DNA, 15 bp, Homo sapiens
aaacatcagggagaa

SEQ ID NO: 347816 - DNA, 15 bp, Homo sapiens
aaaacatcagggaga

SEQ ID NO: 347817 - DNA, 15 bp, Homo sapiens
aaaaacatcagggag

SEQ ID NO: 347818 - DNA, 15 bp, Homo sapiens
caaaaacatcaggga

SEQ ID NO: 347819 - DNA, 15 bp, Homo sapiens
acaaaaacatcaggg

SEQ ID NO: 347820 - DNA, 15 bp, Homo sapiens
tacaaaaacatcagg

SEQ ID NO: 347821 - DNA, 15 bp, Homo sapiens
atacaaaaacatcag

SEQ ID NO: 347822 - DNA, 15 bp, Homo sapiens
aatacaaaaacatca

SEQ ID NO: 347823 - DNA, 15 bp, Homo sapiens
aaatacaaaaacatc

SEQ ID NO: 347824 - DNA, 15 bp, Homo sapiens
taaatacaaaaacat

SEQ ID NO: 347825 - DNA, 15 bp, Homo sapiens
ctaaatacaaaaaca

SEQ ID NO: 347826 - DNA, 15 bp, Homo sapiens
gctaaatacaaaaac

SEQ ID NO: 347827 - DNA, 15 bp, Homo sapiens
agctaaatacaaaaa

SEQ ID NO: 347828 - DNA, 15 bp, Homo sapiens
tagctaaatacaaaa

SEQ ID NO: 347829 - DNA, 15 bp, Homo sapiens
gtagctaaatacaaa

SEQ ID NO: 347830 - DNA, 15 bp, Homo sapiens
agtagctaaatacaa

SEQ ID NO: 347831 - DNA, 15 bp, Homo sapiens
tagtagctaaataca

SEQ ID NO: 347832 - DNA, 15 bp, Homo sapiens
atagtagctaaatac

SEQ ID NO: 347833 - DNA, 15 bp, Homo sapiens
aatagtagctaaata

SEQ ID NO: 347834 - DNA, 15 bp, Homo sapiens
aaatagtagctaaat

SEQ ID NO: 347835 - DNA, 15 bp, Homo sapiens
taaatagtagctaaa

SEQ ID NO: 347836 - DNA, 15 bp, Homo sapiens
gtaaatagtagctaa

SEQ ID NO: 347837 - DNA, 15 bp, Homo sapiens
tgtaaatagtagcta

SEQ ID NO: 347838 - DNA, 15 bp, Homo sapiens
atgtaaatagtagct

SEQ ID NO: 347839 - DNA, 15 bp, Homo sapiens
aatgtaaatagtagc

SEQ ID NO: 347840 - DNA, 15 bp, Homo sapiens
taatgtaaatagtag

SEQ ID NO: 347841 - DNA, 15 bp, Homo sapiens
ctaatgtaaatagta

SEQ ID NO: 347842 - DNA, 15 bp, Homo sapiens
tctaatgtaaatagt

SEQ ID NO: 347843 - DNA, 15 bp, Homo sapiens
ttctaatgtaaatag

SEQ ID NO: 347844 - DNA, 15 bp, Homo sapiens
tttctaatgtaaata

SEQ ID NO: 347845 - DNA, 15 bp, Homo sapiens
ctttctaatgtaaat

SEQ ID NO: 347846 - DNA, 15 bp, Homo sapiens
actttctaatgtaaa

SEQ ID NO: 347847 - DNA, 15 bp, Homo sapiens
cactttctaatgtaa

SEQ ID NO: 347848 - DNA, 15 bp, Homo sapiens
ccactttctaatgta

SEQ ID NO: 347849 - DNA, 15 bp, Homo sapiens
accactttctaatgt

SEQ ID NO: 347850 - DNA, 15 bp, Homo sapiens
aaccactttctaatg

SEQ ID NO: 347851 - DNA, 15 bp, Homo sapiens
taaccactttctaat

SEQ ID NO: 347852 - DNA, 15 bp, Homo sapiens
gtaaccactttctaa

SEQ ID NO: 347853 - DNA, 15 bp, Homo sapiens
agtaaccactttcta

SEQ ID NO: 347854 - DNA, 15 bp, Homo sapiens
aagtaaccactttct

SEQ ID NO: 347855 - DNA, 15 bp, Homo sapiens
taagtaaccactttc

SEQ ID NO: 347856 - DNA, 15 bp, Homo sapiens
ttaagtaaccacttt

SEQ ID NO: 347857 - DNA, 15 bp, Homo sapiens
attaagtaaccactt

SEQ ID NO: 347858 - DNA, 15 bp, Homo sapiens
aattaagtaaccact

SEQ ID NO: 347859 - DNA, 15 bp, Homo sapiens
aaattaagtaaccac

SEQ ID NO: 347860 - DNA, 15 bp, Homo sapiens
caaattaagtaacca

SEQ ID NO: 347861 - DNA, 15 bp, Homo sapiens
ccaaattaagtaacc

SEQ ID NO: 347862 - DNA, 15 bp, Homo sapiens
accaaattaagtaac

SEQ ID NO: 347863 - DNA, 15 bp, Homo sapiens
taccaaattaagtaa

SEQ ID NO: 347864 - DNA, 15 bp, Homo sapiens
ttaccaaattaagta

SEQ ID NO: 347865 - DNA, 15 bp, Homo sapiens
attaccaaattaagt

SEQ ID NO: 347866 - DNA, 15 bp, Homo sapiens
aattaccaaattaag

SEQ ID NO: 347867 - DNA, 15 bp, Homo sapiens
aaattaccaaattaa

SEQ ID NO: 347868 - DNA, 15 bp, Homo sapiens
caaattaccaaatta

SEQ ID NO: 347869 - DNA, 15 bp, Homo sapiens
ccaaattaccaaatt

SEQ ID NO: 347870 - DNA, 15 bp, Homo sapiens
accaaattaccaaat

SEQ ID NO: 347871 - DNA, 15 bp, Homo sapiens
aaccaaattaccaaa

SEQ ID NO: 347872 - DNA, 15 bp, Homo sapiens
gaaccaaattaccaa

SEQ ID NO: 347873 - DNA, 15 bp, Homo sapiens
tgaaccaaattacca

SEQ ID NO: 347874 - DNA, 15 bp, Homo sapiens
ttgaaccaaattacc

SEQ ID NO: 347875 - DNA, 15 bp, Homo sapiens
attgaaccaaattac

SEQ ID NO: 347876 - DNA, 15 bp, Homo sapiens
tattgaaccaaatta

SEQ ID NO: 347877 - DNA, 15 bp, Homo sapiens
ttattgaaccaaatt

SEQ ID NO: 347878 - DNA, 15 bp, Homo sapiens
tttattgaaccaaat

SEQ ID NO: 347879 - DNA, 15 bp, Homo sapiens
gtttattgaaccaaa

SEQ ID NO: 347880 - DNA, 15 bp, Homo sapiens
tgtttattgaaccaa

SEQ ID NO: 347881 - DNA, 15 bp, Homo sapiens
atgtttattgaacca

SEQ ID NO: 347882 - DNA, 15 bp, Homo sapiens
aatgtttattgaacc

SEQ ID NO: 347883 - DNA, 15 bp, Homo sapiens
caatgtttattgaac

SEQ ID NO: 347884 - DNA, 15 bp, Homo sapiens
gcaatgtttattgaa

SEQ ID NO: 347885 - DNA, 15 bp, Homo sapiens
tgcaatgtttattga

SEQ ID NO: 347886 - DNA, 15 bp, Homo sapiens
atgcaatgtttattg

SEQ ID NO: 347887 - DNA, 15 bp, Homo sapiens
tatgcaatgtttatt

SEQ ID NO: 347888 - DNA, 15 bp, Homo sapiens
ttatgcaatgtttat

SEQ ID NO: 347889 - DNA, 15 bp, Homo sapiens
cttatgcaatgttta

SEQ ID NO: 347890 - DNA, 15 bp, Homo sapiens
gcttatgcaatgttt

SEQ ID NO: 347891 - DNA, 15 bp, Homo sapiens
agcttatgcaatgtt

SEQ ID NO: 347892 - DNA, 15 bp, Homo sapiens
tagcttatgcaatgt

SEQ ID NO: 347893 - DNA, 15 bp, Homo sapiens
atagcttatgcaatg

SEQ ID NO: 347894 - DNA, 15 bp, Homo sapiens
gatagcttatgcaat

SEQ ID NO: 347895 - DNA, 15 bp, Homo sapiens
agatagcttatgcaa

SEQ ID NO: 347896 - DNA, 15 bp, Homo sapiens
aagatagcttatgca

SEQ ID NO: 347897 - DNA, 15 bp, Homo sapiens
taagatagcttatgc

SEQ ID NO: 347898 - DNA, 15 bp, Homo sapiens
ataagatagcttatg

SEQ ID NO: 347899 - DNA, 15 bp, Homo sapiens
aataagatagcttat

SEQ ID NO: 347900 - DNA, 15 bp, Homo sapiens
aaataagatagctta

SEQ ID NO: 347901 - DNA, 15 bp, Homo sapiens
aaaataagatagctt

SEQ ID NO: 347902 - DNA, 15 bp, Homo sapiens
aaaaataagatagct

SEQ ID NO: 347903 - DNA, 15 bp, Homo sapiens
aaaaaataagatagc

SEQ ID NO: 347904 - DNA, 15 bp, Homo sapiens
taaaaaataagatag

SEQ ID NO: 347905 - DNA, 15 bp, Homo sapiens
ttaaaaaataagata

SEQ ID NO: 347906 - DNA, 15 bp, Homo sapiens
tttaaaaaataagat

SEQ ID NO: 347907 - DNA, 15 bp, Homo sapiens
ttttaaaaaataaga

SEQ ID NO: 347908 - DNA, 15 bp, Homo sapiens
tttttaaaaaataag

SEQ ID NO: 347909 - DNA, 15 bp, Homo sapiens
ttttttaaaaaataa

SEQ ID NO: 347910 - DNA, 15 bp, Homo sapiens
tttttttaaaaaata

SEQ ID NO: 347911 - DNA, 15 bp, Homo sapiens
gtttttttaaaaaat

SEQ ID NO: 347912 - DNA, 15 bp, Homo sapiens
tgtttttttaaaaaa

SEQ ID NO: 347913 - DNA, 15 bp, Homo sapiens
ttgtttttttaaaaa

SEQ ID NO: 347914 - DNA, 15 bp, Homo sapiens
attgtttttttaaaa

SEQ ID NO: 347915 - DNA, 15 bp, Homo sapiens
taaattgttttttta

SEQ ID NO: 347916 - DNA, 15 bp, Homo sapiens
ttaaattgttttttt

SEQ ID NO: 347917 - DNA, 15 bp, Homo sapiens
cttaaattgtttttt

SEQ ID NO: 347918 - DNA, 15 bp, Homo sapiens
gcttaaattgttttt

SEQ ID NO: 347919 - DNA, 15 bp, Homo sapiens
agcttaaattgtttt

SEQ ID NO: 347920 - DNA, 15 bp, Homo sapiens
gagcttaaattgttt

SEQ ID NO: 347921 - DNA, 15 bp, Homo sapiens
ggagcttaaattgtt

SEQ ID NO: 347922 - DNA, 15 bp, Homo sapiens
tggagcttaaattgt

SEQ ID NO: 347923 - DNA, 15 bp, Homo sapiens
ctggagcttaaattg

SEQ ID NO: 347924 - DNA, 15 bp, Homo sapiens
tctggagcttaaatt

SEQ ID NO: 347925 - DNA, 15 bp, Homo sapiens
ttctggagcttaaat

SEQ ID NO: 347926 - DNA, 15 bp, Homo sapiens
cttctggagcttaaa

SEQ ID NO: 347927 - DNA, 15 bp, Homo sapiens
acttctggagcttaa

SEQ ID NO: 347928 - DNA, 15 bp, Homo sapiens
tacttctggagctta

SEQ ID NO: 347929 - DNA, 15 bp, Homo sapiens
ttacttctggagctt

SEQ ID NO: 347930 - DNA, 15 bp, Homo sapiens
gttacttctggagct

SEQ ID NO: 347931 - DNA, 15 bp, Homo sapiens
tgttacttctggagc

SEQ ID NO: 347932 - DNA, 15 bp, Homo sapiens
ctgttacttctggag

SEQ ID NO: 347933 - DNA, 15 bp, Homo sapiens
actgttacttctgga

SEQ ID NO: 347934 - DNA, 15 bp, Homo sapiens
gactgttacttctgg

SEQ ID NO: 347935 - DNA, 15 bp, Homo sapiens
ggactgttacttctg

SEQ ID NO: 347936 - DNA, 15 bp, Homo sapiens
gggactgttacttct

SEQ ID NO: 347937 - DNA, 15 bp, Homo sapiens
tgggactgttacttc

SEQ ID NO: 347938 - DNA, 15 bp, Homo sapiens
atgggactgttactt

SEQ ID NO: 347939 - DNA, 15 bp, Homo sapiens
tatgggactgttact

SEQ ID NO: 347940 - DNA, 15 bp, Homo sapiens
ttatgggactgttac

SEQ ID NO: 347941 - DNA, 15 bp, Homo sapiens
tttatgggactgtta

SEQ ID NO: 347942 - DNA, 15 bp, Homo sapiens
ctttatgggactgtt

SEQ ID NO: 347943 - DNA, 15 bp, Homo sapiens
cctttatgggactgt

SEQ ID NO: 347944 - DNA, 15 bp, Homo sapiens
ccctttatgggactg

SEQ ID NO: 347945 - DNA, 15 bp, Homo sapiens
accctttatgggact

SEQ ID NO: 347946 - DNA, 15 bp, Homo sapiens
caccctttatgggac

SEQ ID NO: 347947 - DNA, 15 bp, Homo sapiens
gcaccctttatggga

SEQ ID NO: 347948 - DNA, 15 bp, Homo sapiens
tgcaccctttatggg

SEQ ID NO: 347949 - DNA, 15 bp, Homo sapiens
atgcaccctttatgg

SEQ ID NO: 347950 - DNA, 15 bp, Homo sapiens
catgcaccctttatg

SEQ ID NO: 347951 - DNA, 15 bp, Homo sapiens
acatgcaccctttat

SEQ ID NO: 347952 - DNA, 15 bp, Homo sapiens
aacatgcacccttta

SEQ ID NO: 347953 - DNA, 15 bp, Homo sapiens
taacatgcacccttt

SEQ ID NO: 347954 - DNA, 15 bp, Homo sapiens
ctaacatgcaccctt

SEQ ID NO: 347955 - DNA, 15 bp, Homo sapiens
gctaacatgcaccct

SEQ ID NO: 347956 - DNA, 15 bp, Homo sapiens
tgctaacatgcaccc

SEQ ID NO: 347957 - DNA, 15 bp, Homo sapiens
ctgctaacatgcacc

SEQ ID NO: 347958 - DNA, 15 bp, Homo sapiens
actgctaacatgcac

SEQ ID NO: 347959 - DNA, 15 bp, Homo sapiens
cactgctaacatgca

SEQ ID NO: 347960 - DNA, 15 bp, Homo sapiens
gcactgctaacatgc

SEQ ID NO: 347961 - DNA, 15 bp, Homo sapiens
agcactgctaacatg

SEQ ID NO: 347962 - DNA, 15 bp, Homo sapiens
gagcactgctaacat

SEQ ID NO: 347963 - DNA, 15 bp, Homo sapiens
agagcactgctaaca

SEQ ID NO: 347964 - DNA, 15 bp, Homo sapiens
aagagcactgctaac

SEQ ID NO: 347965 - DNA, 15 bp, Homo sapiens
aaagagcactgctaa

SEQ ID NO: 347966 - DNA, 15 bp, Homo sapiens
caaagagcactgcta

SEQ ID NO: 347967 - DNA, 15 bp, Homo sapiens
ccaaagagcactgct

SEQ ID NO: 347968 - DNA, 15 bp, Homo sapiens
cccaaagagcactgc

SEQ ID NO: 347969 - DNA, 15 bp, Homo sapiens
tcccaaagagcactg

SEQ ID NO: 347970 - DNA, 15 bp, Homo sapiens
gtcccaaagagcact

SEQ ID NO: 347971 - DNA, 15 bp, Homo sapiens
tgtcccaaagagcac

SEQ ID NO: 347972 - DNA, 15 bp, Homo sapiens
atgtcccaaagagca

SEQ ID NO: 347973 - DNA, 15 bp, Homo sapiens
tatgtcccaaagagc

SEQ ID NO: 347974 - DNA, 15 bp, Homo sapiens
ttatgtcccaaagag

SEQ ID NO: 347975 - DNA, 15 bp, Homo sapiens
tttatgtcccaaaga

SEQ ID NO: 347976 - DNA, 15 bp, Homo sapiens
atttatgtcccaaag

SEQ ID NO: 347977 - DNA, 15 bp, Homo sapiens
aatttatgtcccaaa

SEQ ID NO: 347978 - DNA, 15 bp, Homo sapiens
taatttatgtcccaa

SEQ ID NO: 347979 - DNA, 15 bp, Homo sapiens
ttaatttatgtccca

SEQ ID NO: 347980 - DNA, 15 bp, Homo sapiens
cttaatttatgtccc

SEQ ID NO: 347981 - DNA, 15 bp, Homo sapiens
ccttaatttatgtcc

SEQ ID NO: 347982 - DNA, 15 bp, Homo sapiens
tccttaatttatgtc

SEQ ID NO: 347983 - DNA, 15 bp, Homo sapiens
atccttaatttatgt

SEQ ID NO: 347984 - DNA, 15 bp, Homo sapiens
catccttaatttatg

SEQ ID NO: 347985 - DNA, 15 bp, Homo sapiens
ccatccttaatttat

SEQ ID NO: 347986 - DNA, 15 bp, Homo sapiens
gccatccttaattta

SEQ ID NO: 347987 - DNA, 15 bp, Homo sapiens
tgccatccttaattt

SEQ ID NO: 347988 - DNA, 15 bp, Homo sapiens
atgccatccttaatt

SEQ ID NO: 347989 - DNA, 15 bp, Homo sapiens
aatgccatccttaat

SEQ ID NO: 347990 - DNA, 15 bp, Homo sapiens
aaatgccatccttaa

SEQ ID NO: 347991 - DNA, 15 bp, Homo sapiens
aaaatgccatcctta

SEQ ID NO: 347992 - DNA, 15 bp, Homo sapiens
gaaaatgccatcctt

SEQ ID NO: 347993 - DNA, 15 bp, Homo sapiens
ggaaaatgccatcct

SEQ ID NO: 347994 - DNA, 15 bp, Homo sapiens
tggaaaatgccatcc

SEQ ID NO: 347995 - DNA, 15 bp, Homo sapiens
ctggaaaatgccatc

SEQ ID NO: 347996 - DNA, 15 bp, Homo sapiens
gctggaaaatgccat

SEQ ID NO: 347997 - DNA, 15 bp, Homo sapiens
agctggaaaatgcca

SEQ ID NO: 347998 - DNA, 15 bp, Homo sapiens
cagctggaaaatgcc

SEQ ID NO: 347999 - DNA, 15 bp, Homo sapiens
acagctggaaaatgc

SEQ ID NO: 348000 - DNA, 15 bp, Homo sapiens
tacagctggaaaatg

SEQ ID NO: 348001 - DNA, 15 bp, Homo sapiens
ctacagctggaaaat

SEQ ID NO: 348002 - DNA, 15 bp, Homo sapiens
actacagctggaaaa

SEQ ID NO: 348003 - DNA, 15 bp, Homo sapiens
aactacagctggaaa

SEQ ID NO: 348004 - DNA, 15 bp, Homo sapiens
caactacagctggaa

SEQ ID NO: 348005 - DNA, 15 bp, Homo sapiens
ccaactacagctgga

SEQ ID NO: 348006 - DNA, 15 bp, Homo sapiens
tccaactacagctgg

SEQ ID NO: 348007 - DNA, 15 bp, Homo sapiens
atccaactacagctg

SEQ ID NO: 348008 - DNA, 15 bp, Homo sapiens
tatccaactacagct

SEQ ID NO: 348009 - DNA, 15 bp, Homo sapiens
atatccaactacagc

SEQ ID NO: 348010 - DNA, 15 bp, Homo sapiens
catatccaactacag

SEQ ID NO: 348011 - DNA, 15 bp, Homo sapiens
acatatccaactaca

SEQ ID NO: 348012 - DNA, 15 bp, Homo sapiens
cacatatccaactac

SEQ ID NO: 348013 - DNA, 15 bp, Homo sapiens
acacatatccaacta

SEQ ID NO: 348014 - DNA, 15 bp, Homo sapiens
cacacatatccaact

SEQ ID NO: 348015 - DNA, 15 bp, Homo sapiens
acacacatatccaac

SEQ ID NO: 348016 - DNA, 15 bp, Homo sapiens
aacacacatatccaa

SEQ ID NO: 348017 - DNA, 15 bp, Homo sapiens
caacacacatatcca

SEQ ID NO: 348018 - DNA, 15 bp, Homo sapiens
ccaacacacatatcc

SEQ ID NO: 348019 - DNA, 15 bp, Homo sapiens
accaacacacatatc

SEQ ID NO: 348020 - DNA, 15 bp, Homo sapiens
caccaacacacatat

SEQ ID NO: 348021 - DNA, 15 bp, Homo sapiens
acaccaacacacata

SEQ ID NO: 348022 - DNA, 15 bp, Homo sapiens
aacaccaacacacat

SEQ ID NO: 348023 - DNA, 15 bp, Homo sapiens
aaacaccaacacaca

SEQ ID NO: 348024 - DNA, 15 bp, Homo sapiens
gaaacaccaacacac

SEQ ID NO: 348025 - DNA, 15 bp, Homo sapiens
tgaaacaccaacaca

SEQ ID NO: 348026 - DNA, 15 bp, Homo sapiens
ctgaaacaccaacac

SEQ ID NO: 348027 - DNA, 15 bp, Homo sapiens
gctgaaacaccaaca

SEQ ID NO: 348028 - DNA, 15 bp, Homo sapiens
tgctgaaacaccaac

SEQ ID NO: 348029 - DNA, 15 bp, Homo sapiens
ttgctgaaacaccaa

SEQ ID NO: 348030 - DNA, 15 bp, Homo sapiens
cttgctgaaacacca

SEQ ID NO: 348031 - DNA, 15 bp, Homo sapiens
gcttgctgaaacacc

SEQ ID NO: 348032 - DNA, 15 bp, Homo sapiens
agcttgctgaaacac

SEQ ID NO: 348033 - DNA, 15 bp, Homo sapiens
cagcttgctgaaaca

SEQ ID NO: 348034 - DNA, 15 bp, Homo sapiens
gcagcttgctgaaac

SEQ ID NO: 348035 - DNA, 15 bp, Homo sapiens
tgcagcttgctgaaa

SEQ ID NO: 348036 - DNA, 15 bp, Homo sapiens
atgcagcttgctgaa

SEQ ID NO: 348037 - DNA, 15 bp, Homo sapiens
tatgcagcttgctga

SEQ ID NO: 348038 - DNA, 15 bp, Homo sapiens
ttatgcagcttgctg

SEQ ID NO: 348039 - DNA, 15 bp, Homo sapiens
attatgcagcttgct

SEQ ID NO: 348040 - DNA, 15 bp, Homo sapiens
gattatgcagcttgc

SEQ ID NO: 348041 - DNA, 15 bp, Homo sapiens
tgattatgcagcttg

SEQ ID NO: 348042 - DNA, 15 bp, Homo sapiens
ctgattatgcagctt

SEQ ID NO: 348043 - DNA, 15 bp, Homo sapiens
gctgattatgcagct

SEQ ID NO: 348044 - DNA, 15 bp, Homo sapiens
tgctgattatgcagc

SEQ ID NO: 348045 - DNA, 15 bp, Homo sapiens
gtgctgattatgcag

SEQ ID NO: 348046 - DNA, 15 bp, Homo sapiens
tgtgctgattatgca

SEQ ID NO: 348047 - DNA, 15 bp, Homo sapiens
ttgtgctgattatgc

SEQ ID NO: 348048 - DNA, 15 bp, Homo sapiens
tttgtgctgattatg

SEQ ID NO: 348049 - DNA, 15 bp, Homo sapiens
ctttgtgctgattat

SEQ ID NO: 348050 - DNA, 15 bp, Homo sapiens
gctttgtgctgatta

SEQ ID NO: 348051 - DNA, 15 bp, Homo sapiens
ggctttgtgctgatt

SEQ ID NO: 348052 - DNA, 15 bp, Homo sapiens
gggctttgtgctgat

SEQ ID NO: 348053 - DNA, 15 bp, Homo sapiens
tgggctttgtgctga

SEQ ID NO: 348054 - DNA, 15 bp, Homo sapiens
ctgggctttgtgctg

SEQ ID NO: 348055 - DNA, 15 bp, Homo sapiens
cctgggctttgtgct

SEQ ID NO: 348056 - DNA, 15 bp, Homo sapiens
acctgggctttgtgc

SEQ ID NO: 348057 - DNA, 15 bp, Homo sapiens
gacctgggctttgtg

SEQ ID NO: 348058 - DNA, 15 bp, Homo sapiens
tgacctgggctttgt

SEQ ID NO: 348059 - DNA, 15 bp, Homo sapiens
atgacctgggctttg

SEQ ID NO: 348060 - DNA, 15 bp, Homo sapiens
aatgacctgggcttt

SEQ ID NO: 348061 - DNA, 15 bp, Homo sapiens
taatgacctgggctt

SEQ ID NO: 348062 - DNA, 15 bp, Homo sapiens
ctaatgacctgggct

SEQ ID NO: 348063 - DNA, 15 bp, Homo sapiens
tctaatgacctgggc

SEQ ID NO: 348064 - DNA, 15 bp, Homo sapiens
atctaatgacctggg

SEQ ID NO: 348065 - DNA, 15 bp, Homo sapiens
aatctaatgacctgg

SEQ ID NO: 348066 - DNA, 15 bp, Homo sapiens
gaatctaatgacctg

SEQ ID NO: 348067 - DNA, 15 bp, Homo sapiens
agaatctaatgacct

SEQ ID NO: 348068 - DNA, 15 bp, Homo sapiens
cagaatctaatgacc

SEQ ID NO: 348069 - DNA, 15 bp, Homo sapiens
gcagaatctaatgac

SEQ ID NO: 348070 - DNA, 15 bp, Homo sapiens
agcagaatctaatga

SEQ ID NO: 348071 - DNA, 15 bp, Homo sapiens
cagcagaatctaatg

SEQ ID NO: 348072 - DNA, 15 bp, Homo sapiens
ccagcagaatctaat

SEQ ID NO: 348073 - DNA, 15 bp, Homo sapiens
gccagcagaatctaa

SEQ ID NO: 348074 - DNA, 15 bp, Homo sapiens
tgccagcagaatcta

SEQ ID NO: 348075 - DNA, 15 bp, Homo sapiens
ctgccagcagaatct

SEQ ID NO: 348076 - DNA, 15 bp, Homo sapiens
cctgccagcagaatc

SEQ ID NO: 348077 - DNA, 15 bp, Homo sapiens
tcctgccagcagaat

SEQ ID NO: 348078 - DNA, 15 bp, Homo sapiens
ttcctgccagcagaa

SEQ ID NO: 348079 - DNA, 15 bp, Homo sapiens
attcctgccagcaga

SEQ ID NO: 348080 - DNA, 15 bp, Homo sapiens
gattcctgccagcag

SEQ ID NO: 348081 - DNA, 15 bp, Homo sapiens
tgattcctgccagca

SEQ ID NO: 348082 - DNA, 15 bp, Homo sapiens
ctgattcctgccagc

SEQ ID NO: 348083 - DNA, 15 bp, Homo sapiens
tctgattcctgccag

SEQ ID NO: 348084 - DNA, 15 bp, Homo sapiens
ttctgattcctgcca

SEQ ID NO: 348085 - DNA, 15 bp, Homo sapiens
tttctgattcctgcc

SEQ ID NO: 348086 - DNA, 15 bp, Homo sapiens
ttttctgattcctgc

SEQ ID NO: 348087 - DNA, 15 bp, Homo sapiens
gttttctgattcctg

SEQ ID NO: 348088 - DNA, 15 bp, Homo sapiens
ggttttctgattcct

SEQ ID NO: 348089 - DNA, 15 bp, Homo sapiens
aggttttctgattcc

SEQ ID NO: 348090 - DNA, 15 bp, Homo sapiens
caggttttctgattc

SEQ ID NO: 348091 - DNA, 15 bp, Homo sapiens
gcaggttttctgatt

SEQ ID NO: 348092 - DNA, 15 bp, Homo sapiens
tgcaggttttctgat

SEQ ID NO: 348093 - DNA, 15 bp, Homo sapiens
ttgcaggttttctga

SEQ ID NO: 348094 - DNA, 15 bp, Homo sapiens
tttgcaggttttctg

SEQ ID NO: 348095 - DNA, 15 bp, Homo sapiens
atttgcaggttttct

SEQ ID NO: 348096 - DNA, 15 bp, Homo sapiens
gatttgcaggttttc

SEQ ID NO: 348097 - DNA, 15 bp, Homo sapiens
tgatttgcaggtttt

SEQ ID NO: 348098 - DNA, 15 bp, Homo sapiens
gtgatttgcaggttt

SEQ ID NO: 348099 - DNA, 15 bp, Homo sapiens
ggtgatttgcaggtt

SEQ ID NO: 348100 - DNA, 15 bp, Homo sapiens
tggtgatttgcaggt

SEQ ID NO: 348101 - DNA, 15 bp, Homo sapiens
ctggtgatttgcagg

SEQ ID NO: 348102 - DNA, 15 bp, Homo sapiens
cctggtgatttgcag

SEQ ID NO: 348103 - DNA, 15 bp, Homo sapiens
tcctggtgatttgca

SEQ ID NO: 348104 - DNA, 15 bp, Homo sapiens
ctcctggtgatttgc

SEQ ID NO: 348105 - DNA, 15 bp, Homo sapiens
tctcctggtgatttg

SEQ ID NO: 348106 - DNA, 15 bp, Homo sapiens
atctcctggtgattt

SEQ ID NO: 348107 - DNA, 15 bp, Homo sapiens
gatctcctggtgatt

SEQ ID NO: 348108 - DNA, 15 bp, Homo sapiens
ggatctcctggtgat

SEQ ID NO: 348109 - DNA, 15 bp, Homo sapiens
gggatctcctggtga

SEQ ID NO: 348110 - DNA, 15 bp, Homo sapiens
tgggatctcctggtg

SEQ ID NO: 348111 - DNA, 15 bp, Homo sapiens
ctgggatctcctggt

SEQ ID NO: 348112 - DNA, 15 bp, Homo sapiens
tctgggatctcctgg

SEQ ID NO: 348113 - DNA, 15 bp, Homo sapiens
atctgggatctcctg

SEQ ID NO: 348114 - DNA, 15 bp, Homo sapiens
tatctgggatctcct

SEQ ID NO: 348115 - DNA, 15 bp, Homo sapiens
atatctgggatctcc

SEQ ID NO: 348116 - DNA, 15 bp, Homo sapiens
catatctgggatctc

SEQ ID NO: 348117 - DNA, 15 bp, Homo sapiens
gcatatctgggatct

SEQ ID NO: 348118 - DNA, 15 bp, Homo sapiens
ggcatatctgggatc

SEQ ID NO: 348119 - DNA, 15 bp, Homo sapiens
aggcatatctgggat

SEQ ID NO: 348120 - DNA, 15 bp, Homo sapiens
caggcatatctggga

SEQ ID NO: 348121 - DNA, 15 bp, Homo sapiens
ccaggcatatctggg

SEQ ID NO: 348122 - DNA, 15 bp, Homo sapiens
tccaggcatatctgg

SEQ ID NO: 348123 - DNA, 15 bp, Homo sapiens
atccaggcatatctg

SEQ ID NO: 348124 - DNA, 15 bp, Homo sapiens
tatccaggcatatct

SEQ ID NO: 348125 - DNA, 15 bp, Homo sapiens
ctatccaggcatatc

SEQ ID NO: 348126 - DNA, 15 bp, Homo sapiens
tctatccaggcatat

SEQ ID NO: 348127 - DNA, 15 bp, Homo sapiens
ttctatccaggcata

SEQ ID NO: 348128 - DNA, 15 bp, Homo sapiens
cttctatccaggcat

SEQ ID NO: 348129 - DNA, 15 bp, Homo sapiens
acttctatccaggca

SEQ ID NO: 348130 - DNA, 15 bp, Homo sapiens
cacttctatccaggc

SEQ ID NO: 348131 - DNA, 15 bp, Homo sapiens
ccacttctatccagg

SEQ ID NO: 348132 - DNA, 15 bp, Homo sapiens
accacttctatccag

SEQ ID NO: 348133 - DNA, 15 bp, Homo sapiens
gaccacttctatcca

SEQ ID NO: 348134 - DNA, 15 bp, Homo sapiens
ggaccacttctatcc

SEQ ID NO: 348135 - DNA, 15 bp, Homo sapiens
aggaccacttctatc

SEQ ID NO: 348136 - DNA, 15 bp, Homo sapiens
aaggaccacttctat

SEQ ID NO: 348137 - DNA, 15 bp, Homo sapiens
aaaggaccacttcta

SEQ ID NO: 348138 - DNA, 15 bp, Homo sapiens
caaaggaccacttct

SEQ ID NO: 348139 - DNA, 15 bp, Homo sapiens
tcaaaggaccacttc

SEQ ID NO: 348140 - DNA, 15 bp, Homo sapiens
gtcaaaggaccactt

SEQ ID NO: 348141 - DNA, 15 bp, Homo sapiens
tgtcaaaggaccact

SEQ ID NO: 348142 - DNA, 15 bp, Homo sapiens
atgtcaaaggaccac

SEQ ID NO: 348143 - DNA, 15 bp, Homo sapiens
gatgtcaaaggacca

SEQ ID NO: 348144 - DNA, 15 bp, Homo sapiens
agatgtcaaaggacc

SEQ ID NO: 348145 - DNA, 15 bp, Homo sapiens
cagatgtcaaaggac

SEQ ID NO: 348146 - DNA, 15 bp, Homo sapiens
tcagatgtcaaagga

SEQ ID NO: 348147 - DNA, 15 bp, Homo sapiens
gtcagatgtcaaagg

SEQ ID NO: 348148 - DNA, 15 bp, Homo sapiens
agtcagatgtcaaag

SEQ ID NO: 348149 - DNA, 15 bp, Homo sapiens
cagtcagatgtcaaa

SEQ ID NO: 348150 - DNA, 15 bp, Homo sapiens
acagtcagatgtcaa

SEQ ID NO: 348151 - DNA, 15 bp, Homo sapiens
gacagtcagatgtca

SEQ ID NO: 348152 - DNA, 15 bp, Homo sapiens
agacagtcagatgtc

SEQ ID NO: 348153 - DNA, 15 bp, Homo sapiens
cagacagtcagatgt

SEQ ID NO: 348154 - DNA, 15 bp, Homo sapiens
gcagacagtcagatg

SEQ ID NO: 348155 - DNA, 15 bp, Homo sapiens
agcagacagtcagat

SEQ ID NO: 348156 - DNA, 15 bp, Homo sapiens
cagcagacagtcaga

SEQ ID NO: 348157 - DNA, 15 bp, Homo sapiens
tcagcagacagtcag

SEQ ID NO: 348158 - DNA, 15 bp, Homo sapiens
ttcagcagacagtca

SEQ ID NO: 348159 - DNA, 15 bp, Homo sapiens
cttcagcagacagtc

SEQ ID NO: 348160 - DNA, 15 bp, Homo sapiens
ccttcagcagacagt

SEQ ID NO: 348161 - DNA, 15 bp, Homo sapiens
gccttcagcagacag

SEQ ID NO: 348162 - DNA, 15 bp, Homo sapiens
tgccttcagcagaca

SEQ ID NO: 348163 - DNA, 15 bp, Homo sapiens
ctgccttcagcagac

SEQ ID NO: 348164 - DNA, 15 bp, Homo sapiens
actgccttcagcaga

SEQ ID NO: 348165 - DNA, 15 bp, Homo sapiens
cactgccttcagcag

SEQ ID NO: 348166 - DNA, 15 bp, Homo sapiens
gcactgccttcagca

SEQ ID NO: 348167 - DNA, 15 bp, Homo sapiens
agcactgccttcagc

SEQ ID NO: 348168 - DNA, 15 bp, Homo sapiens
cagcactgccttcag

SEQ ID NO: 348169 - DNA, 15 bp, Homo sapiens
acagcactgccttca

SEQ ID NO: 348170 - DNA, 15 bp, Homo sapiens
cacagcactgccttc

SEQ ID NO: 348171 - DNA, 15 bp, Homo sapiens
ccacagcactgcctt

SEQ ID NO: 348172 - DNA, 15 bp, Homo sapiens
tccacagcactgcct

SEQ ID NO: 348173 - DNA, 15 bp, Homo sapiens
gtccacagcactgcc

SEQ ID NO: 348174 - DNA, 15 bp, Homo sapiens
ggtccacagcactgc

SEQ ID NO: 348175 - DNA, 15 bp, Homo sapiens
tggtccacagcactg

SEQ ID NO: 348176 - DNA, 15 bp, Homo sapiens
gtggtccacagcact

SEQ ID NO: 348177 - DNA, 15 bp, Homo sapiens
tgtggtccacagcac

SEQ ID NO: 348178 - DNA, 15 bp, Homo sapiens
ttgtggtccacagca

SEQ ID NO: 348179 - DNA, 15 bp, Homo sapiens
gttgtggtccacagc

SEQ ID NO: 348180 - DNA, 15 bp, Homo sapiens
ggttgtggtccacag

SEQ ID NO: 348181 - DNA, 15 bp, Homo sapiens
aggttgtggtccaca

SEQ ID NO: 348182 - DNA, 15 bp, Homo sapiens
gaggttgtggtccac

SEQ ID NO: 348183 - DNA, 15 bp, Homo sapiens
tgaggttgtggtcca

SEQ ID NO: 348184 - DNA, 15 bp, Homo sapiens
gtgaggttgtggtcc

SEQ ID NO: 348185 - DNA, 15 bp, Homo sapiens
tgtgaggttgtggtc

SEQ ID NO: 348186 - DNA, 15 bp, Homo sapiens
atgtgaggttgtggt

SEQ ID NO: 348187 - DNA, 15 bp, Homo sapiens
catgtgaggttgtgg

SEQ ID NO: 348188 - DNA, 15 bp, Homo sapiens
acatgtgaggttgtg

SEQ ID NO: 348189 - DNA, 15 bp, Homo sapiens
tacatgtgaggttgt

SEQ ID NO: 348190 - DNA, 15 bp, Homo sapiens
ctacatgtgaggttg

SEQ ID NO: 348191 - DNA, 15 bp, Homo sapiens
cctacatgtgaggtt

SEQ ID NO: 348192 - DNA, 15 bp, Homo sapiens
tcctacatgtgaggt

SEQ ID NO: 348193 - DNA, 15 bp, Homo sapiens
ttcctacatgtgagg

SEQ ID NO: 348194 - DNA, 15 bp, Homo sapiens
attcctacatgtgag

SEQ ID NO: 348195 - DNA, 15 bp, Homo sapiens
cattcctacatgtga

SEQ ID NO: 348196 - DNA, 15 bp, Homo sapiens
tcattcctacatgtg

SEQ ID NO: 348197 - DNA, 15 bp, Homo sapiens
ctcattcctacatgt

SEQ ID NO: 348198 - DNA, 15 bp, Homo sapiens
gctcattcctacatg

SEQ ID NO: 348199 - DNA, 15 bp, Homo sapiens
tgctcattcctacat

SEQ ID NO: 348200 - DNA, 15 bp, Homo sapiens
ttgctcattcctaca

SEQ ID NO: 348201 - DNA, 15 bp, Homo sapiens
attgctcattcctac

SEQ ID NO: 348202 - DNA, 15 bp, Homo sapiens
aattgctcattccta

SEQ ID NO: 348203 - DNA, 15 bp, Homo sapiens
caattgctcattcct

SEQ ID NO: 348204 - DNA, 15 bp, Homo sapiens
ccaattgctcattcc

SEQ ID NO: 348205 - DNA, 15 bp, Homo sapiens
accaattgctcattc

SEQ ID NO: 348206 - DNA, 15 bp, Homo sapiens
aaccaattgctcatt

SEQ ID NO: 348207 - DNA, 15 bp, Homo sapiens
aaaccaattgctcat

SEQ ID NO: 348208 - DNA, 15 bp, Homo sapiens
gaaaccaattgctca

SEQ ID NO: 348209 - DNA, 15 bp, Homo sapiens
tgaaaccaattgctc

SEQ ID NO: 348210 - DNA, 15 bp, Homo sapiens
gtgaaaccaattgct

SEQ ID NO: 348211 - DNA, 15 bp, Homo sapiens
agtgaaaccaattgc

SEQ ID NO: 348212 - DNA, 15 bp, Homo sapiens
gagtgaaaccaattg

SEQ ID NO: 348213 - DNA, 15 bp, Homo sapiens
ggagtgaaaccaatt

SEQ ID NO: 348214 - DNA, 15 bp, Homo sapiens
gggagtgaaaccaat

SEQ ID NO: 348215 - DNA, 15 bp, Homo sapiens
agggagtgaaaccaa

SEQ ID NO: 348216 - DNA, 15 bp, Homo sapiens
cagggagtgaaacca

SEQ ID NO: 348217 - DNA, 15 bp, Homo sapiens
ccagggagtgaaacc

SEQ ID NO: 348218 - DNA, 15 bp, Homo sapiens
tccagggagtgaaac

SEQ ID NO: 348219 - DNA, 15 bp, Homo sapiens
ctccagggagtgaaa

SEQ ID NO: 348220 - DNA, 15 bp, Homo sapiens
tctccagggagtgaa

SEQ ID NO: 348221 - DNA, 15 bp, Homo sapiens
ctctccagggagtga

SEQ ID NO: 348222 - DNA, 15 bp, Homo sapiens
gctctccagggagtg

SEQ ID NO: 348223 - DNA, 15 bp, Homo sapiens
tgctctccagggagt

SEQ ID NO: 348224 - DNA, 15 bp, Homo sapiens
atgctctccagggag

SEQ ID NO: 348225 - DNA, 15 bp, Homo sapiens
catgctctccaggga

SEQ ID NO: 348226 - DNA, 15 bp, Homo sapiens
tcatgctctccaggg

SEQ ID NO: 348227 - DNA, 15 bp, Homo sapiens
ctcatgctctccagg

SEQ ID NO: 348228 - DNA, 15 bp, Homo sapiens
cctcatgctctccag

SEQ ID NO: 348229 - DNA, 15 bp, Homo sapiens
gcctcatgctctcca

SEQ ID NO: 348230 - DNA, 15 bp, Homo sapiens
ggcctcatgctctcc

SEQ ID NO: 348231 - DNA, 15 bp, Homo sapiens
aggcctcatgctctc

SEQ ID NO: 348232 - DNA, 15 bp, Homo sapiens
aaggcctcatgctct

SEQ ID NO: 348233 - DNA, 15 bp, Homo sapiens
gaaggcctcatgctc

SEQ ID NO: 348234 - DNA, 15 bp, Homo sapiens
tgaaggcctcatgct

SEQ ID NO: 348235 - DNA, 15 bp, Homo sapiens
ctgaaggcctcatgc

SEQ ID NO: 348236 - DNA, 15 bp, Homo sapiens
gctgaaggcctcatg

SEQ ID NO: 348237 - DNA, 15 bp, Homo sapiens
tgctgaaggcctcat

SEQ ID NO: 348238 - DNA, 15 bp, Homo sapiens
ctgctgaaggcctca

SEQ ID NO: 348239 - DNA, 15 bp, Homo sapiens
gctgctgaaggcctc

SEQ ID NO: 348240 - DNA, 15 bp, Homo sapiens
tgctgctgaaggcct

SEQ ID NO: 348241 - DNA, 15 bp, Homo sapiens
gtgctgctgaaggcc

SEQ ID NO: 348242 - DNA, 15 bp, Homo sapiens
agtgctgctgaaggc

SEQ ID NO: 348243 - DNA, 15 bp, Homo sapiens
aagtgctgctgaagg

SEQ ID NO: 348244 - DNA, 15 bp, Homo sapiens
aaagtgctgctgaag

SEQ ID NO: 348245 - DNA, 15 bp, Homo sapiens
gaaagtgctgctgaa

SEQ ID NO: 348246 - DNA, 15 bp, Homo sapiens
ggaaagtgctgctga

SEQ ID NO: 348247 - DNA, 15 bp, Homo sapiens
aggaaagtgctgctg

SEQ ID NO: 348248 - DNA, 15 bp, Homo sapiens
aaggaaagtgctgct

SEQ ID NO: 348249 - DNA, 15 bp, Homo sapiens
caaggaaagtgctgc

SEQ ID NO: 348250 - DNA, 15 bp, Homo sapiens
tcaaggaaagtgctg

SEQ ID NO: 348251 - DNA, 15 bp, Homo sapiens
ttcaaggaaagtgct

SEQ ID NO: 348252 - DNA, 15 bp, Homo sapiens
tttcaaggaaagtgc

SEQ ID NO: 348253 - DNA, 15 bp, Homo sapiens
ctttcaaggaaagtg

SEQ ID NO: 348254 - DNA, 15 bp, Homo sapiens
gctttcaaggaaagt

SEQ ID NO: 348255 - DNA, 15 bp, Homo sapiens
tgctttcaaggaaag

SEQ ID NO: 348256 - DNA, 15 bp, Homo sapiens
ttgctttcaaggaaa

SEQ ID NO: 348257 - DNA, 15 bp, Homo sapiens
gttgctttcaaggaa

SEQ ID NO: 348258 - DNA, 15 bp, Homo sapiens
tgttgctttcaagga

SEQ ID NO: 348259 - DNA, 15 bp, Homo sapiens
gtgttgctttcaagg

SEQ ID NO: 348260 - DNA, 15 bp, Homo sapiens
tgtgttgctttcaag

SEQ ID NO: 348261 - DNA, 15 bp, Homo sapiens
atgtgttgctttcaa

SEQ ID NO: 348262 - DNA, 15 bp, Homo sapiens
gatgtgttgctttca

SEQ ID NO: 348263 - DNA, 15 bp, Homo sapiens
ggatgtgttgctttc

SEQ ID NO: 348264 - DNA, 15 bp, Homo sapiens
gggatgtgttgcttt

SEQ ID NO: 348265 - DNA, 15 bp, Homo sapiens
ggggatgtgttgctt

SEQ ID NO: 348266 - DNA, 15 bp, Homo sapiens
gggggatgtgttgct

SEQ ID NO: 348267 - DNA, 15 bp, Homo sapiens
agggggatgtgttgc

SEQ ID NO: 348268 - DNA, 15 bp, Homo sapiens
tagggggatgtgttg

SEQ ID NO: 348269 - DNA, 15 bp, Homo sapiens
atagggggatgtgtt

SEQ ID NO: 348270 - DNA, 15 bp, Homo sapiens
gatagggggatgtgt

SEQ ID NO: 348271 - DNA, 15 bp, Homo sapiens
ggatagggggatgtg

SEQ ID NO: 348272 - DNA, 15 bp, Homo sapiens
tggatagggggatgt

SEQ ID NO: 348273 - DNA, 15 bp, Homo sapiens
ctggatagggggatg

SEQ ID NO: 348274 - DNA, 15 bp, Homo sapiens
gctggatagggggat

SEQ ID NO: 348275 - DNA, 15 bp, Homo sapiens
tgctggataggggga

SEQ ID NO: 348276 - DNA, 15 bp, Homo sapiens
gtgctggataggggg

SEQ ID NO: 348277 - DNA, 15 bp, Homo sapiens
tgtgctggatagggg

SEQ ID NO: 348278 - DNA, 15 bp, Homo sapiens
atgtgctggataggg

SEQ ID NO: 348279 - DNA, 15 bp, Homo sapiens
gatgtgctggatagg

SEQ ID NO: 348280 - DNA, 15 bp, Homo sapiens
agatgtgctggatag

SEQ ID NO: 348281 - DNA, 15 bp, Homo sapiens
cagatgtgctggata

SEQ ID NO: 348282 - DNA, 15 bp, Homo sapiens
tcagatgtgctggat

SEQ ID NO: 348283 - DNA, 15 bp, Homo sapiens
atcagatgtgctgga

SEQ ID NO: 348284 - DNA, 15 bp, Homo sapiens
aatcagatgtgctgg

SEQ ID NO: 348285 - DNA, 15 bp, Homo sapiens
taatcagatgtgctg

SEQ ID NO: 348286 - DNA, 15 bp, Homo sapiens
ataatcagatgtgct

SEQ ID NO: 348287 - DNA, 15 bp, Homo sapiens
cataatcagatgtgc

SEQ ID NO: 348288 - DNA, 15 bp, Homo sapiens
acataatcagatgtg

SEQ ID NO: 348289 - DNA, 15 bp, Homo sapiens
gacataatcagatgt

SEQ ID NO: 348290 - DNA, 15 bp, Homo sapiens
tgacataatcagatg

SEQ ID NO: 348291 - DNA, 15 bp, Homo sapiens
gtgacataatcagat

SEQ ID NO: 348292 - DNA, 15 bp, Homo sapiens
agtgacataatcaga

SEQ ID NO: 348293 - DNA, 15 bp, Homo sapiens
aagtgacataatcag

SEQ ID NO: 348294 - DNA, 15 bp, Homo sapiens
aaagtgacataatca

SEQ ID NO: 348295 - DNA, 15 bp, Homo sapiens
aaaagtgacataatc

SEQ ID NO: 348296 - DNA, 15 bp, Homo sapiens
gaaaagtgacataat

SEQ ID NO: 348297 - DNA, 15 bp, Homo sapiens
agaaaagtgacataa

SEQ ID NO: 348298 - DNA, 15 bp, Homo sapiens
gagaaaagtgacata

SEQ ID NO: 348299 - DNA, 15 bp, Homo sapiens
agagaaaagtgacat

SEQ ID NO: 348300 - DNA, 15 bp, Homo sapiens
aagagaaaagtgaca

SEQ ID NO: 348301 - DNA, 15 bp, Homo sapiens
aaagagaaaagtgac

SEQ ID NO: 348302 - DNA, 15 bp, Homo sapiens
aaaagagaaaagtga

SEQ ID NO: 348303 - DNA, 15 bp, Homo sapiens
taaaagagaaaagtg

SEQ ID NO: 348304 - DNA, 15 bp, Homo sapiens
ttaaaagagaaaagt

SEQ ID NO: 348305 - DNA, 15 bp, Homo sapiens
tttaaaagagaaaag

SEQ ID NO: 348306 - DNA, 15 bp, Homo sapiens
gtttaaaagagaaaa

SEQ ID NO: 348307 - DNA, 15 bp, Homo sapiens
ggtttaaaagagaaa

SEQ ID NO: 348308 - DNA, 15 bp, Homo sapiens
tggtttaaaagagaa

SEQ ID NO: 348309 - DNA, 15 bp, Homo sapiens
ttggtttaaaagaga

SEQ ID NO: 348310 - DNA, 15 bp, Homo sapiens
gttggtttaaaagag

SEQ ID NO: 348311 - DNA, 15 bp, Homo sapiens
agttggtttaaaaga

SEQ ID NO: 348312 - DNA, 15 bp, Homo sapiens
tagttggtttaaaag

SEQ ID NO: 348313 - DNA, 15 bp, Homo sapiens
ttagttggtttaaaa

SEQ ID NO: 348314 - DNA, 15 bp, Homo sapiens
tttagttggtttaaa

SEQ ID NO: 348315 - DNA, 15 bp, Homo sapiens
ttttagttggtttaa

SEQ ID NO: 348316 - DNA, 15 bp, Homo sapiens
attttagttggttta

SEQ ID NO: 348317 - DNA, 15 bp, Homo sapiens
gattttagttggttt

SEQ ID NO: 348318 - DNA, 15 bp, Homo sapiens
ggattttagttggtt

SEQ ID NO: 348319 - DNA, 15 bp, Homo sapiens
gggattttagttggt

SEQ ID NO: 348320 - DNA, 15 bp, Homo sapiens
ggggattttagttgg

SEQ ID NO: 348321 - DNA, 15 bp, Homo sapiens
gggggattttagttg

SEQ ID NO: 348322 - DNA, 15 bp, Homo sapiens
tgggggattttagtt

SEQ ID NO: 348323 - DNA, 15 bp, Homo sapiens
ttgggggattttagt

SEQ ID NO: 348324 - DNA, 15 bp, Homo sapiens
attgggggattttag

SEQ ID NO: 348325 - DNA, 15 bp, Homo sapiens
aattgggggatttta

SEQ ID NO: 348326 - DNA, 15 bp, Homo sapiens
gaattgggggatttt

SEQ ID NO: 348327 - DNA, 15 bp, Homo sapiens
ggaattgggggattt

SEQ ID NO: 348328 - DNA, 15 bp, Homo sapiens
tggaattgggggatt

SEQ ID NO: 348329 - DNA, 15 bp, Homo sapiens
gtggaattgggggat

SEQ ID NO: 348330 - DNA, 15 bp, Homo sapiens
agtggaattggggga

SEQ ID NO: 348331 - DNA, 15 bp, Homo sapiens
aagtggaattggggg

SEQ ID NO: 348332 - DNA, 15 bp, Homo sapiens
taagtggaattgggg

SEQ ID NO: 348333 - DNA, 15 bp, Homo sapiens
ataagtggaattggg

SEQ ID NO: 348334 - DNA, 15 bp, Homo sapiens
tataagtggaattgg

SEQ ID NO: 348335 - DNA, 15 bp, Homo sapiens
ttataagtggaattg

SEQ ID NO: 348336 - DNA, 15 bp, Homo sapiens
attataagtggaatt

SEQ ID NO: 348337 - DNA, 15 bp, Homo sapiens
tattataagtggaat

SEQ ID NO: 348338 - DNA, 15 bp, Homo sapiens
ttattataagtggaa

SEQ ID NO: 348339 - DNA, 15 bp, Homo sapiens
cttattataagtgga

SEQ ID NO: 348340 - DNA, 15 bp, Homo sapiens
gcttattataagtgg

SEQ ID NO: 348341 - DNA, 15 bp, Homo sapiens
agcttattataagtg

SEQ ID NO: 348342 - DNA, 15 bp, Homo sapiens
cagcttattataagt

SEQ ID NO: 348343 - DNA, 15 bp, Homo sapiens
acagcttattataag

SEQ ID NO: 348344 - DNA, 15 bp, Homo sapiens
tacagcttattataa

SEQ ID NO: 348345 - DNA, 15 bp, Homo sapiens
ctacagcttattata

SEQ ID NO: 348346 - DNA, 15 bp, Homo sapiens
tctacagcttattat

SEQ ID NO: 348347 - DNA, 15 bp, Homo sapiens
gtctacagcttatta

SEQ ID NO: 348348 - DNA, 15 bp, Homo sapiens
agtctacagcttatt

SEQ ID NO: 348349 - DNA, 15 bp, Homo sapiens
gagtctacagcttat

SEQ ID NO: 348350 - DNA, 15 bp, Homo sapiens
ggagtctacagctta

SEQ ID NO: 348351 - DNA, 15 bp, Homo sapiens
aggagtctacagctt

SEQ ID NO: 348352 - DNA, 15 bp, Homo sapiens
aaggagtctacagct

SEQ ID NO: 348353 - DNA, 15 bp, Homo sapiens
caaggagtctacagc

SEQ ID NO: 348354 - DNA, 15 bp, Homo sapiens
gcaaggagtctacag

SEQ ID NO: 348355 - DNA, 15 bp, Homo sapiens
agcaaggagtctaca

SEQ ID NO: 348356 - DNA, 15 bp, Homo sapiens
gagcaaggagtctac

SEQ ID NO: 348357 - DNA, 15 bp, Homo sapiens
agagcaaggagtcta

SEQ ID NO: 348358 - DNA, 15 bp, Homo sapiens
cagagcaaggagtct

SEQ ID NO: 348359 - DNA, 15 bp, Homo sapiens
ccagagcaaggagtc

SEQ ID NO: 348360 - DNA, 15 bp, Homo sapiens
tccagagcaaggagt

SEQ ID NO: 348361 - DNA, 15 bp, Homo sapiens
ttccagagcaaggag

SEQ ID NO: 348362 - DNA, 15 bp, Homo sapiens
tttccagagcaagga

SEQ ID NO: 348363 - DNA, 15 bp, Homo sapiens
ctttccagagcaagg

SEQ ID NO: 348364 - DNA, 15 bp, Homo sapiens
gctttccagagcaag

SEQ ID NO: 348365 - DNA, 15 bp, Homo sapiens
tgctttccagagcaa

SEQ ID NO: 348366 - DNA, 15 bp, Homo sapiens
ttgctttccagagca

SEQ ID NO: 348367 - DNA, 15 bp, Homo sapiens
tttgctttccagagc

SEQ ID NO: 348368 - DNA, 15 bp, Homo sapiens
ctttgctttccagag

SEQ ID NO: 348369 - DNA, 15 bp, Homo sapiens
tctttgctttccaga

SEQ ID NO: 348370 - DNA, 15 bp, Homo sapiens
gtctttgctttccag

SEQ ID NO: 348371 - DNA, 15 bp, Homo sapiens
ggtctttgctttcca

SEQ ID NO: 348372 - DNA, 15 bp, Homo sapiens
aggtctttgctttcc

SEQ ID NO: 348373 - DNA, 15 bp, Homo sapiens
gaggtctttgctttc

SEQ ID NO: 348374 - DNA, 15 bp, Homo sapiens
tgaggtctttgcttt

SEQ ID NO: 348375 - DNA, 15 bp, Homo sapiens
atgaggtctttgctt

SEQ ID NO: 348376 - DNA, 15 bp, Homo sapiens
catgaggtctttgct

SEQ ID NO: 348377 - DNA, 15 bp, Homo sapiens
tcatgaggtctttgc

SEQ ID NO: 348378 - DNA, 15 bp, Homo sapiens
atcatgaggtctttg

SEQ ID NO: 348379 - DNA, 15 bp, Homo sapiens
gatcatgaggtcttt

SEQ ID NO: 348380 - DNA, 15 bp, Homo sapiens
agatcatgaggtctt

SEQ ID NO: 348381 - DNA, 15 bp, Homo sapiens
aagatcatgaggtct

SEQ ID NO: 348382 - DNA, 15 bp, Homo sapiens
caagatcatgaggtc

SEQ ID NO: 348383 - DNA, 15 bp, Homo sapiens
gcaagatcatgaggt

SEQ ID NO: 348384 - DNA, 15 bp, Homo sapiens
agcaagatcatgagg

SEQ ID NO: 348385 - DNA, 15 bp, Homo sapiens
gagcaagatcatgag

SEQ ID NO: 348386 - DNA, 15 bp, Homo sapiens
ggagcaagatcatga

SEQ ID NO: 348387 - DNA, 15 bp, Homo sapiens
gggagcaagatcatg

SEQ ID NO: 348388 - DNA, 15 bp, Homo sapiens
ggggagcaagatcat

SEQ ID NO: 348389 - DNA, 15 bp, Homo sapiens
gggggagcaagatca

SEQ ID NO: 348390 - DNA, 15 bp, Homo sapiens
ggggggagcaagatc

SEQ ID NO: 348391 - DNA, 15 bp, Homo sapiens
aggggggagcaagat

SEQ ID NO: 348392 - DNA, 15 bp, Homo sapiens
gaggggggagcaaga

SEQ ID NO: 348393 - DNA, 15 bp, Homo sapiens
tgaggggggagcaag

SEQ ID NO: 348394 - DNA, 15 bp, Homo sapiens
atgaggggggagcaa

SEQ ID NO: 348395 - DNA, 15 bp, Homo sapiens
aatgaggggggagca

SEQ ID NO: 348396 - DNA, 15 bp, Homo sapiens
aaatgaggggggagc

SEQ ID NO: 348397 - DNA, 15 bp, Homo sapiens
gaaatgaggggggag

SEQ ID NO: 348398 - DNA, 15 bp, Homo sapiens
ggaaatgagggggga

SEQ ID NO: 348399 - DNA, 15 bp, Homo sapiens
aggaaatgagggggg

SEQ ID NO: 348400 - DNA, 15 bp, Homo sapiens
caggaaatgaggggg

SEQ ID NO: 348401 - DNA, 15 bp, Homo sapiens
tcaggaaatgagggg

SEQ ID NO: 348402 - DNA, 15 bp, Homo sapiens
gtcaggaaatgaggg

SEQ ID NO: 348403 - DNA, 15 bp, Homo sapiens
ggtcaggaaatgagg

SEQ ID NO: 348404 - DNA, 15 bp, Homo sapiens
aggtcaggaaatgag

SEQ ID NO: 348405 - DNA, 15 bp, Homo sapiens
taggtcaggaaatga

SEQ ID NO: 348406 - DNA, 15 bp, Homo sapiens
ttaggtcaggaaatg

SEQ ID NO: 348407 - DNA, 15 bp, Homo sapiens
attaggtcaggaaat

SEQ ID NO: 348408 - DNA, 15 bp, Homo sapiens
gattaggtcaggaaa

SEQ ID NO: 348409 - DNA, 15 bp, Homo sapiens
tgattaggtcaggaa

SEQ ID NO: 348410 - DNA, 15 bp, Homo sapiens
gtgattaggtcagga

SEQ ID NO: 348411 - DNA, 15 bp, Homo sapiens
agtgattaggtcagg

SEQ ID NO: 348412 - DNA, 15 bp, Homo sapiens
cagtgattaggtcag

SEQ ID NO: 348413 - DNA, 15 bp, Homo sapiens
acagtgattaggtca

SEQ ID NO: 348414 - DNA, 15 bp, Homo sapiens
gacagtgattaggtc

SEQ ID NO: 348415 - DNA, 15 bp, Homo sapiens
tgacagtgattaggt

SEQ ID NO: 348416 - DNA, 15 bp, Homo sapiens
gtgacagtgattagg

SEQ ID NO: 348417 - DNA, 15 bp, Homo sapiens
cgtgacagtgattag

SEQ ID NO: 348418 - DNA, 15 bp, Homo sapiens
gcgtgacagtgatta

SEQ ID NO: 348419 - DNA, 15 bp, Homo sapiens
agcgtgacagtgatt

SEQ ID NO: 348420 - DNA, 15 bp, Homo sapiens
aagcgtgacagtgat

SEQ ID NO: 348421 - DNA, 15 bp, Homo sapiens
caagcgtgacagtga

SEQ ID NO: 348422 - DNA, 15 bp, Homo sapiens
tcaagcgtgacagtg

SEQ ID NO: 348423 - DNA, 15 bp, Homo sapiens
gtcaagcgtgacagt

SEQ ID NO: 348424 - DNA, 15 bp, Homo sapiens
agtcaagcgtgacag

SEQ ID NO: 348425 - DNA, 15 bp, Homo sapiens
aagtcaagcgtgaca

SEQ ID NO: 348426 - DNA, 15 bp, Homo sapiens
aaagtcaagcgtgac

SEQ ID NO: 348427 - DNA, 15 bp, Homo sapiens
caaagtcaagcgtga

SEQ ID NO: 348428 - DNA, 15 bp, Homo sapiens
gcaaagtcaagcgtg

SEQ ID NO: 348429 - DNA, 15 bp, Homo sapiens
agcaaagtcaagcgt

SEQ ID NO: 348430 - DNA, 15 bp, Homo sapiens
gagcaaagtcaagcg

SEQ ID NO: 348431 - DNA, 15 bp, Homo sapiens
tgagcaaagtcaagc

SEQ ID NO: 348432 - DNA, 15 bp, Homo sapiens
gtgagcaaagtcaag

SEQ ID NO: 348433 - DNA, 15 bp, Homo sapiens
agtgagcaaagtcaa

SEQ ID NO: 348434 - DNA, 15 bp, Homo sapiens
gagtgagcaaagtca

SEQ ID NO: 348435 - DNA, 15 bp, Homo sapiens
tgagtgagcaaagtc

SEQ ID NO: 348436 - DNA, 15 bp, Homo sapiens
ctgagtgagcaaagt

SEQ ID NO: 348437 - DNA, 15 bp, Homo sapiens
gctgagtgagcaaag

SEQ ID NO: 348438 - DNA, 15 bp, Homo sapiens
agctgagtgagcaaa

SEQ ID NO: 348439 - DNA, 15 bp, Homo sapiens
cagctgagtgagcaa

SEQ ID NO: 348440 - DNA, 15 bp, Homo sapiens
gcagctgagtgagca

SEQ ID NO: 348441 - DNA, 15 bp, Homo sapiens
tgcagctgagtgagc

SEQ ID NO: 348442 - DNA, 15 bp, Homo sapiens
ctgcagctgagtgag

SEQ ID NO: 348443 - DNA, 15 bp, Homo sapiens
actgcagctgagtga

SEQ ID NO: 348444 - DNA, 15 bp, Homo sapiens
gactgcagctgagtg

SEQ ID NO: 348445 - DNA, 15 bp, Homo sapiens
agactgcagctgagt

SEQ ID NO: 348446 - DNA, 15 bp, Homo sapiens
aagactgcagctgag

SEQ ID NO: 348447 - DNA, 15 bp, Homo sapiens
taagactgcagctga

SEQ ID NO: 348448 - DNA, 15 bp, Homo sapiens
gtaagactgcagctg

SEQ ID NO: 348449 - DNA, 15 bp, Homo sapiens
agtaagactgcagct

SEQ ID NO: 348450 - DNA, 15 bp, Homo sapiens
cagtaagactgcagc

SEQ ID NO: 348451 - DNA, 15 bp, Homo sapiens
tcagtaagactgcag

SEQ ID NO: 348452 - DNA, 15 bp, Homo sapiens
ttcagtaagactgca

SEQ ID NO: 348453 - DNA, 15 bp, Homo sapiens
attcagtaagactgc

SEQ ID NO: 348454 - DNA, 15 bp, Homo sapiens
aattcagtaagactg

SEQ ID NO: 348455 - DNA, 15 bp, Homo sapiens
aaattcagtaagact

SEQ ID NO: 348456 - DNA, 15 bp, Homo sapiens
taaattcagtaagac

SEQ ID NO: 348457 - DNA, 15 bp, Homo sapiens
ataaattcagtaaga

SEQ ID NO: 348458 - DNA, 15 bp, Homo sapiens
aataaattcagtaag

SEQ ID NO: 348459 - DNA, 15 bp, Homo sapiens
caataaattcagtaa

SEQ ID NO: 348460 - DNA, 15 bp, Homo sapiens
gcaataaattcagta

SEQ ID NO: 348461 - DNA, 15 bp, Homo sapiens
agcaataaattcagt

SEQ ID NO: 348462 - DNA, 15 bp, Homo sapiens
cagcaataaattcag

SEQ ID NO: 348463 - DNA, 15 bp, Homo sapiens
tcagcaataaattca

SEQ ID NO: 348464 - DNA, 15 bp, Homo sapiens
atcagcaataaattc

SEQ ID NO: 348465 - DNA, 15 bp, Homo sapiens
gatcagcaataaatt

SEQ ID NO: 348466 - DNA, 15 bp, Homo sapiens
ggatcagcaataaat

SEQ ID NO: 348467 - DNA, 15 bp, Homo sapiens
aggatcagcaataaa

SEQ ID NO: 348468 - DNA, 15 bp, Homo sapiens
gaggatcagcaataa

SEQ ID NO: 348469 - DNA, 15 bp, Homo sapiens
tgaggatcagcaata

SEQ ID NO: 348470 - DNA, 15 bp, Homo sapiens
ttgaggatcagcaat

SEQ ID NO: 348471 - DNA, 15 bp, Homo sapiens
tttgaggatcagcaa

SEQ ID NO: 348472 - DNA, 15 bp, Homo sapiens
gtttgaggatcagca

SEQ ID NO: 348473 - DNA, 15 bp, Homo sapiens
tgtttgaggatcagc

SEQ ID NO: 348474 - DNA, 15 bp, Homo sapiens
gtgtttgaggatcag

SEQ ID NO: 348475 - DNA, 15 bp, Homo sapiens
agtgtttgaggatca

SEQ ID NO: 348476 - DNA, 15 bp, Homo sapiens
gagtgtttgaggatc

SEQ ID NO: 348477 - DNA, 15 bp, Homo sapiens
tgagtgtttgaggat

SEQ ID NO: 348478 - DNA, 15 bp, Homo sapiens
ctgagtgtttgagga

SEQ ID NO: 348479 - DNA, 15 bp, Homo sapiens
tctgagtgtttgagg

SEQ ID NO: 348480 - DNA, 15 bp, Homo sapiens
ctctgagtgtttgag

SEQ ID NO: 348481 - DNA, 15 bp, Homo sapiens
gctctgagtgtttga

SEQ ID NO: 348482 - DNA, 15 bp, Homo sapiens
agctctgagtgtttg

SEQ ID NO: 348483 - DNA, 15 bp, Homo sapiens
gagctctgagtgttt

SEQ ID NO: 348484 - DNA, 15 bp, Homo sapiens
agagctctgagtgtt

SEQ ID NO: 348485 - DNA, 15 bp, Homo sapiens
aagagctctgagtgt

SEQ ID NO: 348486 - DNA, 15 bp, Homo sapiens
gaagagctctgagtg

SEQ ID NO: 348487 - DNA, 15 bp, Homo sapiens
ggaagagctctgagt

SEQ ID NO: 348488 - DNA, 15 bp, Homo sapiens
gggaagagctctgag

SEQ ID NO: 348489 - DNA, 15 bp, Homo sapiens
agggaagagctctga

SEQ ID NO: 348490 - DNA, 15 bp, Homo sapiens
cagggaagagctctg

SEQ ID NO: 348491 - DNA, 15 bp, Homo sapiens
gcagggaagagctct

SEQ ID NO: 348492 - DNA, 15 bp, Homo sapiens
ggcagggaagagctc

SEQ ID NO: 348493 - DNA, 15 bp, Homo sapiens
aggcagggaagagct

SEQ ID NO: 348494 - DNA, 15 bp, Homo sapiens
gaggcagggaagagc

SEQ ID NO: 348495 - DNA, 15 bp, Homo sapiens
tgaggcagggaagag

SEQ ID NO: 348496 - DNA, 15 bp, Homo sapiens
ctgaggcagggaaga

SEQ ID NO: 348497 - DNA, 15 bp, Homo sapiens
cctgaggcagggaag

SEQ ID NO: 348498 - DNA, 15 bp, Homo sapiens
ccctgaggcagggaa

SEQ ID NO: 348499 - DNA, 15 bp, Homo sapiens
gccctgaggcaggga

SEQ ID NO: 348500 - DNA, 15 bp, Homo sapiens
ggccctgaggcaggg

SEQ ID NO: 348501 - DNA, 15 bp, Homo sapiens
aggccctgaggcagg

SEQ ID NO: 348502 - DNA, 15 bp, Homo sapiens
gaggccctgaggcag

SEQ ID NO: 348503 - DNA, 15 bp, Homo sapiens
agaggccctgaggca

SEQ ID NO: 348504 - DNA, 15 bp, Homo sapiens
cagaggccctgaggc

SEQ ID NO: 348505 - DNA, 15 bp, Homo sapiens
acagaggccctgagg

SEQ ID NO: 348506 - DNA, 15 bp, Homo sapiens
cacagaggccctgag

SEQ ID NO: 348507 - DNA, 15 bp, Homo sapiens
gcacagaggccctga

SEQ ID NO: 348508 - DNA, 15 bp, Homo sapiens
agcacagaggccctg

SEQ ID NO: 348509 - DNA, 15 bp, Homo sapiens
aagcacagaggccct

SEQ ID NO: 348510 - DNA, 15 bp, Homo sapiens
caagcacagaggccc

SEQ ID NO: 348511 - DNA, 15 bp, Homo sapiens
gcaagcacagaggcc

SEQ ID NO: 348512 - DNA, 15 bp, Homo sapiens
agcaagcacagaggc

SEQ ID NO: 348513 - DNA, 15 bp, Homo sapiens
cagcaagcacagagg

SEQ ID NO: 348514 - DNA, 15 bp, Homo sapiens
acagcaagcacagag

SEQ ID NO: 348515 - DNA, 15 bp, Homo sapiens
aacagcaagcacaga

SEQ ID NO: 348516 - DNA, 15 bp, Homo sapiens
aaacagcaagcacag

SEQ ID NO: 348517 - DNA, 15 bp, Homo sapiens
gaaacagcaagcaca

SEQ ID NO: 348518 - DNA, 15 bp, Homo sapiens
agaaacagcaagcac

SEQ ID NO: 348519 - DNA, 15 bp, Homo sapiens
tagaaacagcaagca

SEQ ID NO: 348520 - DNA, 15 bp, Homo sapiens
gtagaaacagcaagc

SEQ ID NO: 348521 - DNA, 15 bp, Homo sapiens
agtagaaacagcaag

SEQ ID NO: 348522 - DNA, 15 bp, Homo sapiens
aagtagaaacagcaa

SEQ ID NO: 348523 - DNA, 15 bp, Homo sapiens
gaagtagaaacagca

SEQ ID NO: 348524 - DNA, 15 bp, Homo sapiens
ggaagtagaaacagc

SEQ ID NO: 348525 - DNA, 15 bp, Homo sapiens
aggaagtagaaacag

SEQ ID NO: 348526 - DNA, 15 bp, Homo sapiens
taggaagtagaaaca

SEQ ID NO: 348527 - DNA, 15 bp, Homo sapiens
ctaggaagtagaaac

SEQ ID NO: 348528 - DNA, 15 bp, Homo sapiens
tctaggaagtagaaa

SEQ ID NO: 348529 - DNA, 15 bp, Homo sapiens
ttctaggaagtagaa

SEQ ID NO: 348530 - DNA, 15 bp, Homo sapiens
tttctaggaagtaga

SEQ ID NO: 348531 - DNA, 15 bp, Homo sapiens
ctttctaggaagtag

SEQ ID NO: 348532 - DNA, 15 bp, Homo sapiens
gctttctaggaagta

SEQ ID NO: 348533 - DNA, 15 bp, Homo sapiens
agctttctaggaagt

SEQ ID NO: 348534 - DNA, 15 bp, Homo sapiens
gagctttctaggaag

SEQ ID NO: 348535 - DNA, 15 bp, Homo sapiens
agagctttctaggaa

SEQ ID NO: 348536 - DNA, 15 bp, Homo sapiens
aagagctttctagga

SEQ ID NO: 348537 - DNA, 15 bp, Homo sapiens
aaagagctttctagg

SEQ ID NO: 348538 - DNA, 15 bp, Homo sapiens
gaaagagctttctag

SEQ ID NO: 348539 - DNA, 15 bp, Homo sapiens
ggaaagagctttcta

SEQ ID NO: 348540 - DNA, 15 bp, Homo sapiens
gggaaagagctttct

SEQ ID NO: 348541 - DNA, 15 bp, Homo sapiens
ggggaaagagctttc

SEQ ID NO: 348542 - DNA, 15 bp, Homo sapiens
tggggaaagagcttt

SEQ ID NO: 348543 - DNA, 15 bp, Homo sapiens
atggggaaagagctt

SEQ ID NO: 348544 - DNA, 15 bp, Homo sapiens
tatggggaaagagct

SEQ ID NO: 348545 - DNA, 15 bp, Homo sapiens
atatggggaaagagc

SEQ ID NO: 348546 - DNA, 15 bp, Homo sapiens
gatatggggaaagag

SEQ ID NO: 348547 - DNA, 15 bp, Homo sapiens
agatatggggaaaga

SEQ ID NO: 348548 - DNA, 15 bp, Homo sapiens
aagatatggggaaag

SEQ ID NO: 348549 - DNA, 15 bp, Homo sapiens
gaagatatggggaaa

SEQ ID NO: 348550 - DNA, 15 bp, Homo sapiens
agaagatatggggaa

SEQ ID NO: 348551 - DNA, 15 bp, Homo sapiens
gagaagatatgggga

SEQ ID NO: 348552 - DNA, 15 bp, Homo sapiens
tgagaagatatgggg

SEQ ID NO: 348553 - DNA, 15 bp, Homo sapiens
atgagaagatatggg

SEQ ID NO: 348554 - DNA, 15 bp, Homo sapiens
gatgagaagatatgg

SEQ ID NO: 348555 - DNA, 15 bp, Homo sapiens
tgatgagaagatatg

SEQ ID NO: 348556 - DNA, 15 bp, Homo sapiens
atgatgagaagatat

SEQ ID NO: 348557 - DNA, 15 bp, Homo sapiens
catgatgagaagata

SEQ ID NO: 348558 - DNA, 15 bp, Homo sapiens
gcatgatgagaagat

SEQ ID NO: 348559 - DNA, 15 bp, Homo sapiens
agcatgatgagaaga

SEQ ID NO: 348560 - DNA, 15 bp, Homo sapiens
cagcatgatgagaag

SEQ ID NO: 348561 - DNA, 15 bp, Homo sapiens
acagcatgatgagaa

SEQ ID NO: 348562 - DNA, 15 bp, Homo sapiens
aacagcatgatgaga

SEQ ID NO: 348563 - DNA, 15 bp, Homo sapiens
caacagcatgatgag

SEQ ID NO: 348564 - DNA, 15 bp, Homo sapiens
acaacagcatgatga

SEQ ID NO: 348565 - DNA, 15 bp, Homo sapiens
cacaacagcatgatg

SEQ ID NO: 348566 - DNA, 15 bp, Homo sapiens
gcacaacagcatgat

SEQ ID NO: 348567 - DNA, 15 bp, Homo sapiens
agcacaacagcatga

SEQ ID NO: 348568 - DNA, 15 bp, Homo sapiens
gagcacaacagcatg

SEQ ID NO: 348569 - DNA, 15 bp, Homo sapiens
ggagcacaacagcat

SEQ ID NO: 348570 - DNA, 15 bp, Homo sapiens
gggagcacaacagca

SEQ ID NO: 348571 - DNA, 15 bp, Homo sapiens
agggagcacaacagc

SEQ ID NO: 348572 - DNA, 15 bp, Homo sapiens
cagggagcacaacag

SEQ ID NO: 348573 - DNA, 15 bp, Homo sapiens
gcagggagcacaaca

SEQ ID NO: 348574 - DNA, 15 bp, Homo sapiens
tgcagggagcacaac

SEQ ID NO: 348575 - DNA, 15 bp, Homo sapiens
atgcagggagcacaa

SEQ ID NO: 348576 - DNA, 15 bp, Homo sapiens
gatgcagggagcaca

SEQ ID NO: 348577 - DNA, 15 bp, Homo sapiens
ggatgcagggagcac

SEQ ID NO: 348578 - DNA, 15 bp, Homo sapiens
aggatgcagggagca

SEQ ID NO: 348579 - DNA, 15 bp, Homo sapiens
gaggatgcagggagc

SEQ ID NO: 348580 - DNA, 15 bp, Homo sapiens
tgaggatgcagggag

SEQ ID NO: 348581 - DNA, 15 bp, Homo sapiens
ctgaggatgcaggga

SEQ ID NO: 348582 - DNA, 15 bp, Homo sapiens
tctgaggatgcaggg

SEQ ID NO: 348583 - DNA, 15 bp, Homo sapiens
ttctgaggatgcagg

SEQ ID NO: 348584 - DNA, 15 bp, Homo sapiens
attctgaggatgcag

SEQ ID NO: 348585 - DNA, 15 bp, Homo sapiens
cattctgaggatgca

SEQ ID NO: 348586 - DNA, 15 bp, Homo sapiens
ccattctgaggatgc

SEQ ID NO: 348587 - DNA, 15 bp, Homo sapiens
accattctgaggatg

SEQ ID NO: 348588 - DNA, 15 bp, Homo sapiens
gaccattctgaggat

SEQ ID NO: 348589 - DNA, 15 bp, Homo sapiens
ggaccattctgagga

SEQ ID NO: 348590 - DNA, 15 bp, Homo sapiens
aggaccattctgagg

SEQ ID NO: 348591 - DNA, 15 bp, Homo sapiens
gaggaccattctgag

SEQ ID NO: 348592 - DNA, 15 bp, Homo sapiens
ggaggaccattctga

SEQ ID NO: 348593 - DNA, 15 bp, Homo sapiens
aggaggaccattctg

SEQ ID NO: 348594 - DNA, 15 bp, Homo sapiens
caggaggaccattct

SEQ ID NO: 348595 - DNA, 15 bp, Homo sapiens
tcaggaggaccattc

SEQ ID NO: 348596 - DNA, 15 bp, Homo sapiens
ttcaggaggaccatt

SEQ ID NO: 348597 - DNA, 15 bp, Homo sapiens
gttcaggaggaccat

SEQ ID NO: 348598 - DNA, 15 bp, Homo sapiens
ggttcaggaggacca

SEQ ID NO: 348599 - DNA, 15 bp, Homo sapiens
tggttcaggaggacc

SEQ ID NO: 348600 - DNA, 15 bp, Homo sapiens
atggttcaggaggac

SEQ ID NO: 348601 - DNA, 15 bp, Homo sapiens
gatggttcaggagga

SEQ ID NO: 348602 - DNA, 15 bp, Homo sapiens
tgatggttcaggagg

SEQ ID NO: 348603 - DNA, 15 bp, Homo sapiens
gtgatggttcaggag

SEQ ID NO: 348604 - DNA, 15 bp, Homo sapiens
tgtgatggttcagga

SEQ ID NO: 348605 - DNA, 15 bp, Homo sapiens
ctgtgatggttcagg

SEQ ID NO: 348606 - DNA, 15 bp, Homo sapiens
atctgtgatggttca

SEQ ID NO: 348607 - DNA, 15 bp, Homo sapiens
catctgtgatggttc

SEQ ID NO: 348608 - DNA, 15 bp, Homo sapiens
tcatctgtgatggtt

SEQ ID NO: 348609 - DNA, 15 bp, Homo sapiens
atcatctgtgatggt

SEQ ID NO: 348610 - DNA, 15 bp, Homo sapiens
tatcatctgtgatgg

SEQ ID NO: 348611 - DNA, 15 bp, Homo sapiens
atatcatctgtgatg

SEQ ID NO: 348612 - DNA, 15 bp, Homo sapiens
tatatcatctgtgat

SEQ ID NO: 348613 - DNA, 15 bp, Homo sapiens
gtatatcatctgtga

SEQ ID NO: 348614 - DNA, 15 bp, Homo sapiens
ggtatatcatctgtg

SEQ ID NO: 348615 - DNA, 15 bp, Homo sapiens
gggtatatcatctgt

SEQ ID NO: 348616 - DNA, 15 bp, Homo sapiens
ggggtatatcatctg

SEQ ID NO: 348617 - DNA, 15 bp, Homo sapiens
aggggtatatcatct

SEQ ID NO: 348618 - DNA, 15 bp, Homo sapiens
aaggggtatatcatc

SEQ ID NO: 348619 - DNA, 15 bp, Homo sapiens
gaaggggtatatcat

SEQ ID NO: 348620 - DNA, 15 bp, Homo sapiens
agaaggggtatatca

SEQ ID NO: 348621 - DNA, 15 bp, Homo sapiens
cagaaggggtatatc

SEQ ID NO: 348622 - DNA, 15 bp, Homo sapiens
tcagaaggggtatat

SEQ ID NO: 348623 - DNA, 15 bp, Homo sapiens
ctcagaaggggtata

SEQ ID NO: 348624 - DNA, 15 bp, Homo sapiens
actcagaaggggtat

SEQ ID NO: 348625 - DNA, 15 bp, Homo sapiens
aactcagaaggggta

SEQ ID NO: 348626 - DNA, 15 bp, Homo sapiens
taactcagaaggggt

SEQ ID NO: 348627 - DNA, 15 bp, Homo sapiens
gtaactcagaagggg

SEQ ID NO: 348628 - DNA, 15 bp, Homo sapiens
agtaactcagaaggg

SEQ ID NO: 348629 - DNA, 15 bp, Homo sapiens
gagtaactcagaagg

SEQ ID NO: 348630 - DNA, 15 bp, Homo sapiens
agagtaactcagaag

SEQ ID NO: 348631 - DNA, 15 bp, Homo sapiens
aagagtaactcagaa

SEQ ID NO: 348632 - DNA, 15 bp, Homo sapiens
aaagagtaactcaga

SEQ ID NO: 348633 - DNA, 15 bp, Homo sapiens
taaagagtaactcag

SEQ ID NO: 348634 - DNA, 15 bp, Homo sapiens
ataaagagtaactca

SEQ ID NO: 348635 - DNA, 15 bp, Homo sapiens
tataaagagtaactc

SEQ ID NO: 348636 - DNA, 15 bp, Homo sapiens
atataaagagtaact

SEQ ID NO: 348637 - DNA, 15 bp, Homo sapiens
aatataaagagtaac

SEQ ID NO: 348638 - DNA, 15 bp, Homo sapiens
gaatataaagagtaa

SEQ ID NO: 348639 - DNA, 15 bp, Homo sapiens
agaatataaagagta

SEQ ID NO: 348640 - DNA, 15 bp, Homo sapiens
aagaatataaagagt

SEQ ID NO: 348641 - DNA, 15 bp, Homo sapiens
taagaatataaagag

SEQ ID NO: 348642 - DNA, 15 bp, Homo sapiens
ctaagaatataaaga

SEQ ID NO: 348643 - DNA, 15 bp, Homo sapiens
cctaagaatataaag

SEQ ID NO: 348644 - DNA, 15 bp, Homo sapiens
acctaagaatataaa

SEQ ID NO: 348645 - DNA, 15 bp, Homo sapiens
aacctaagaatataa

SEQ ID NO: 348646 - DNA, 15 bp, Homo sapiens
caacctaagaatata

SEQ ID NO: 348647 - DNA, 15 bp, Homo sapiens
acaacctaagaatat

SEQ ID NO: 348648 - DNA, 15 bp, Homo sapiens
aacaacctaagaata

SEQ ID NO: 348649 - DNA, 15 bp, Homo sapiens
aaacaacctaagaat

SEQ ID NO: 348650 - DNA, 15 bp, Homo sapiens
aaaacaacctaagaa

SEQ ID NO: 348651 - DNA, 15 bp, Homo sapiens
taaaacaacctaaga

SEQ ID NO: 348652 - DNA, 15 bp, Homo sapiens
ataaaacaacctaag

SEQ ID NO: 348653 - DNA, 15 bp, Homo sapiens
aataaaacaacctaa

SEQ ID NO: 348654 - DNA, 15 bp, Homo sapiens
aaataaaacaaccta

SEQ ID NO: 348655 - DNA, 15 bp, Homo sapiens
aaaataaaacaacct

SEQ ID NO: 348656 - DNA, 15 bp, Homo sapiens
gaaaataaaacaacc

SEQ ID NO: 348657 - DNA, 15 bp, Homo sapiens
tgaaaataaaacaac

SEQ ID NO: 348658 - DNA, 15 bp, Homo sapiens
ttgaaaataaaacaa

SEQ ID NO: 348659 - DNA, 15 bp, Homo sapiens
gttgaaaataaaaca

SEQ ID NO: 348660 - DNA, 15 bp, Homo sapiens
tgttgaaaataaaac

SEQ ID NO: 348661 - DNA, 15 bp, Homo sapiens
atgttgaaaataaaa

SEQ ID NO: 348662 - DNA, 15 bp, Homo sapiens
tatgttgaaaataaa

SEQ ID NO: 348663 - DNA, 15 bp, Homo sapiens
ctatgttgaaaataa

SEQ ID NO: 348664 - DNA, 15 bp, Homo sapiens
tctatgttgaaaata

SEQ ID NO: 348665 - DNA, 15 bp, Homo sapiens
ttctatgttgaaaat

SEQ ID NO: 348666 - DNA, 15 bp, Homo sapiens
gttctatgttgaaaa

SEQ ID NO: 348667 - DNA, 15 bp, Homo sapiens
agttctatgttgaaa

SEQ ID NO: 348668 - DNA, 15 bp, Homo sapiens
aagttctatgttgaa

SEQ ID NO: 348669 - DNA, 15 bp, Homo sapiens
caagttctatgttga

SEQ ID NO: 348670 - DNA, 15 bp, Homo sapiens
acaagttctatgttg

SEQ ID NO: 348671 - DNA, 15 bp, Homo sapiens
gacaagttctatgtt

SEQ ID NO: 348672 - DNA, 15 bp, Homo sapiens
tgacaagttctatgt

SEQ ID NO: 348673 - DNA, 15 bp, Homo sapiens
atgacaagttctatg

SEQ ID NO: 348674 - DNA, 15 bp, Homo sapiens
gatgacaagttctat

SEQ ID NO: 348675 - DNA, 15 bp, Homo sapiens
tgatgacaagttcta

SEQ ID NO: 348676 - DNA, 15 bp, Homo sapiens
atgatgacaagttct

SEQ ID NO: 348677 - DNA, 15 bp, Homo sapiens
gatgatgacaagttc

SEQ ID NO: 348678 - DNA, 15 bp, Homo sapiens
agatgatgacaagtt

SEQ ID NO: 348679 - DNA, 15 bp, Homo sapiens
tagatgatgacaagt

SEQ ID NO: 348680 - DNA, 15 bp, Homo sapiens
ctagatgatgacaag

SEQ ID NO: 348681 - DNA, 15 bp, Homo sapiens
cctagatgatgacaa

SEQ ID NO: 348682 - DNA, 15 bp, Homo sapiens
tcctagatgatgaca

SEQ ID NO: 348683 - DNA, 15 bp, Homo sapiens
ttcctagatgatgac

SEQ ID NO: 348684 - DNA, 15 bp, Homo sapiens
attcctagatgatga

SEQ ID NO: 348685 - DNA, 15 bp, Homo sapiens
aattcctagatgatg

SEQ ID NO: 348686 - DNA, 15 bp, Homo sapiens
aaattcctagatgat

SEQ ID NO: 348687 - DNA, 15 bp, Homo sapiens
taaattcctagatga

SEQ ID NO: 348688 - DNA, 15 bp, Homo sapiens
ataaattcctagatg

SEQ ID NO: 348689 - DNA, 15 bp, Homo sapiens
aataaattcctagat

SEQ ID NO: 348690 - DNA, 15 bp, Homo sapiens
caataaattcctaga

SEQ ID NO: 348691 - DNA, 15 bp, Homo sapiens
acaataaattcctag

SEQ ID NO: 348692 - DNA, 15 bp, Homo sapiens
aacaataaattccta

SEQ ID NO: 348693 - DNA, 15 bp, Homo sapiens
aaacaataaattcct

SEQ ID NO: 348694 - DNA, 15 bp, Homo sapiens
taaacaataaattcc

SEQ ID NO: 348695 - DNA, 15 bp, Homo sapiens
ataaacaataaattc

SEQ ID NO: 348696 - DNA, 15 bp, Homo sapiens
aataaacaataaatt

SEQ ID NO: 348697 - DNA, 15 bp, Homo sapiens
gaataaacaataaat

SEQ ID NO: 348698 - DNA, 15 bp, Homo sapiens
tgaataaacaataaa

SEQ ID NO: 348699 - DNA, 15 bp, Homo sapiens
gtgaataaacaataa

SEQ ID NO: 348700 - DNA, 15 bp, Homo sapiens
agtgaataaacaata

SEQ ID NO: 348701 - DNA, 15 bp, Homo sapiens
aagtgaataaacaat

SEQ ID NO: 348702 - DNA, 15 bp, Homo sapiens
caagtgaataaacaa

SEQ ID NO: 348703 - DNA, 15 bp, Homo sapiens
acaagtgaataaaca

SEQ ID NO: 348704 - DNA, 15 bp, Homo sapiens
tacaagtgaataaac

SEQ ID NO: 348705 - DNA, 15 bp, Homo sapiens
atacaagtgaataaa

SEQ ID NO: 348706 - DNA, 15 bp, Homo sapiens
tatacaagtgaataa

SEQ ID NO: 348707 - DNA, 15 bp, Homo sapiens
atatacaagtgaata

SEQ ID NO: 348708 - DNA, 15 bp, Homo sapiens
aatatacaagtgaat

SEQ ID NO: 348709 - DNA, 15 bp, Homo sapiens
aaatatacaagtgaa

SEQ ID NO: 348710 - DNA, 15 bp, Homo sapiens
aaaatatacaagtga

SEQ ID NO: 348711 - DNA, 15 bp, Homo sapiens
gaaaatatacaagtg

SEQ ID NO: 348712 - DNA, 15 bp, Homo sapiens
agaaaatatacaagt

SEQ ID NO: 348713 - DNA, 15 bp, Homo sapiens
aagaaaatatacaag

SEQ ID NO: 348714 - DNA, 15 bp, Homo sapiens
taagaaaatatacaa

SEQ ID NO: 348715 - DNA, 15 bp, Homo sapiens
ataagaaaatataca

SEQ ID NO: 348716 - DNA, 15 bp, Homo sapiens
aataagaaaatatac

SEQ ID NO: 348717 - DNA, 15 bp, Homo sapiens
caataagaaaatata

SEQ ID NO: 348718 - DNA, 15 bp, Homo sapiens
acaataagaaaatat

SEQ ID NO: 348719 - DNA, 15 bp, Homo sapiens
gacaataagaaaata

SEQ ID NO: 348720 - DNA, 15 bp, Homo sapiens
agacaataagaaaat

SEQ ID NO: 348721 - DNA, 15 bp, Homo sapiens
cagacaataagaaaa

SEQ ID NO: 348722 - DNA, 15 bp, Homo sapiens
acagacaataagaaa

SEQ ID NO: 348723 - DNA, 15 bp, Homo sapiens
gacagacaataagaa

SEQ ID NO: 348724 - DNA, 15 bp, Homo sapiens
agacagacaataaga

SEQ ID NO: 348725 - DNA, 15 bp, Homo sapiens
gagacagacaataag

SEQ ID NO: 348726 - DNA, 15 bp, Homo sapiens
agagacagacaataa

SEQ ID NO: 348727 - DNA, 15 bp, Homo sapiens
gagagacagacaata

SEQ ID NO: 348728 - DNA, 15 bp, Homo sapiens
ggagagacagacaat

SEQ ID NO: 348729 - DNA, 15 bp, Homo sapiens
gggagagacagacaa

SEQ ID NO: 348730 - DNA, 15 bp, Homo sapiens
tgggagagacagaca

SEQ ID NO: 348731 - DNA, 15 bp, Homo sapiens
ttgggagagacagac

SEQ ID NO: 348732 - DNA, 15 bp, Homo sapiens
attgggagagacaga

SEQ ID NO: 348733 - DNA, 15 bp, Homo sapiens
tattgggagagacag

SEQ ID NO: 348734 - DNA, 15 bp, Homo sapiens
gtattgggagagaca

SEQ ID NO: 348735 - DNA, 15 bp, Homo sapiens
tgtattgggagagac

SEQ ID NO: 348736 - DNA, 15 bp, Homo sapiens
ttgtattgggagaga

SEQ ID NO: 348737 - DNA, 15 bp, Homo sapiens
tttgtattgggagag

SEQ ID NO: 348738 - DNA, 15 bp, Homo sapiens
ttttgtattgggaga

SEQ ID NO: 348739 - DNA, 15 bp, Homo sapiens
attttgtattgggag

SEQ ID NO: 348740 - DNA, 15 bp, Homo sapiens
tattttgtattggga

SEQ ID NO: 348741 - DNA, 15 bp, Homo sapiens
ctattttgtattggg

SEQ ID NO: 348742 - DNA, 15 bp, Homo sapiens
cctattttgtattgg

SEQ ID NO: 348743 - DNA, 15 bp, Homo sapiens
gcctattttgtattg

SEQ ID NO: 348744 - DNA, 15 bp, Homo sapiens
agcctattttgtatt

SEQ ID NO: 348745 - DNA, 15 bp, Homo sapiens
aagcctattttgtat

SEQ ID NO: 348746 - DNA, 15 bp, Homo sapiens
gaagcctattttgta

SEQ ID NO: 348747 - DNA, 15 bp, Homo sapiens
tgaagcctattttgt

SEQ ID NO: 348748 - DNA, 15 bp, Homo sapiens
gtgaagcctattttg

SEQ ID NO: 348749 - DNA, 15 bp, Homo sapiens
agtgaagcctatttt

SEQ ID NO: 348750 - DNA, 15 bp, Homo sapiens
cagtgaagcctattt

SEQ ID NO: 348751 - DNA, 15 bp, Homo sapiens
ccagtgaagcctatt

SEQ ID NO: 348752 - DNA, 15 bp, Homo sapiens
tccagtgaagcctat

SEQ ID NO: 348753 - DNA, 15 bp, Homo sapiens
ctccagtgaagccta

SEQ ID NO: 348754 - DNA, 15 bp, Homo sapiens
tctccagtgaagcct

SEQ ID NO: 348755 - DNA, 15 bp, Homo sapiens
atctccagtgaagcc

SEQ ID NO: 348756 - DNA, 15 bp, Homo sapiens
gatctccagtgaagc

SEQ ID NO: 348757 - DNA, 15 bp, Homo sapiens
tgatctccagtgaag

SEQ ID NO: 348758 - DNA, 15 bp, Homo sapiens
ttgatctccagtgaa

SEQ ID NO: 348759 - DNA, 15 bp, Homo sapiens
cttgatctccagtga

SEQ ID NO: 348760 - DNA, 15 bp, Homo sapiens
tcttgatctccagtg

SEQ ID NO: 348761 - DNA, 15 bp, Homo sapiens
atcttgatctccagt

SEQ ID NO: 348762 - DNA, 15 bp, Homo sapiens
catcttgatctccag

SEQ ID NO: 348763 - DNA, 15 bp, Homo sapiens
acatcttgatctcca

SEQ ID NO: 348764 - DNA, 15 bp, Homo sapiens
tacatcttgatctcc

SEQ ID NO: 348765 - DNA, 15 bp, Homo sapiens
ctacatcttgatctc

SEQ ID NO: 348766 - DNA, 15 bp, Homo sapiens
cctacatcttgatct

SEQ ID NO: 348767 - DNA, 15 bp, Homo sapiens
ccctacatcttgatc

SEQ ID NO: 348768 - DNA, 15 bp, Homo sapiens
accctacatcttgat

SEQ ID NO: 348769 - DNA, 15 bp, Homo sapiens
taccctacatcttga

SEQ ID NO: 348770 - DNA, 15 bp, Homo sapiens
ataccctacatcttg

SEQ ID NO: 348771 - DNA, 15 bp, Homo sapiens
gataccctacatctt

SEQ ID NO: 348772 - DNA, 15 bp, Homo sapiens
ggataccctacatct

SEQ ID NO: 348773 - DNA, 15 bp, Homo sapiens
aggataccctacatc

SEQ ID NO: 348774 - DNA, 15 bp, Homo sapiens
caggataccctacat

SEQ ID NO: 348775 - DNA, 15 bp, Homo sapiens
gcaggataccctaca

SEQ ID NO: 348776 - DNA, 15 bp, Homo sapiens
ggcaggataccctac

SEQ ID NO: 348777 - DNA, 15 bp, Homo sapiens
tggcaggatacccta

SEQ ID NO: 348778 - DNA, 15 bp, Homo sapiens
ctggcaggataccct

SEQ ID NO: 348779 - DNA, 15 bp, Homo sapiens
cctggcaggataccc

SEQ ID NO: 348780 - DNA, 15 bp, Homo sapiens
acctggcaggatacc

SEQ ID NO: 348781 - DNA, 15 bp, Homo sapiens
tacctggcaggatac

SEQ ID NO: 348782 - DNA, 15 bp, Homo sapiens
atacctggcaggata

SEQ ID NO: 348783 - DNA, 15 bp, Homo sapiens
aatacctggcaggat

SEQ ID NO: 348784 - DNA, 15 bp, Homo sapiens
taatacctggcagga

SEQ ID NO: 348785 - DNA, 15 bp, Homo sapiens
ctaatacctggcagg

SEQ ID NO: 348786 - DNA, 15 bp, Homo sapiens
gctaatacctggcag

SEQ ID NO: 348787 - DNA, 15 bp, Homo sapiens
agctaatacctggca

SEQ ID NO: 348788 - DNA, 15 bp, Homo sapiens
tagctaatacctggc

SEQ ID NO: 348789 - DNA, 15 bp, Homo sapiens
ctagctaatacctgg

SEQ ID NO: 348790 - DNA, 15 bp, Homo sapiens
tctagctaatacctg

SEQ ID NO: 348791 - DNA, 15 bp, Homo sapiens
ctctagctaatacct

SEQ ID NO: 348792 - DNA, 15 bp, Homo sapiens
tctctagctaatacc

SEQ ID NO: 348793 - DNA, 15 bp, Homo sapiens
gtctctagctaatac

SEQ ID NO: 348794 - DNA, 15 bp, Homo sapiens
ggtctctagctaata

SEQ ID NO: 348795 - DNA, 15 bp, Homo sapiens
aggtctctagctaat

SEQ ID NO: 348796 - DNA, 15 bp, Homo sapiens
aaggtctctagctaa

SEQ ID NO: 348797 - DNA, 15 bp, Homo sapiens
taaggtctctagcta

SEQ ID NO: 348798 - DNA, 15 bp, Homo sapiens
ctaaggtctctagct

SEQ ID NO: 348799 - DNA, 15 bp, Homo sapiens
cctaaggtctctagc

SEQ ID NO: 348800 - DNA, 15 bp, Homo sapiens
gcctaaggtctctag

SEQ ID NO: 348801 - DNA, 15 bp, Homo sapiens
tgcctaaggtctcta

SEQ ID NO: 348802 - DNA, 15 bp, Homo sapiens
atgcctaaggtctct

SEQ ID NO: 348803 - DNA, 15 bp, Homo sapiens
catgcctaaggtctc

SEQ ID NO: 348804 - DNA, 15 bp, Homo sapiens
acatgcctaaggtct

SEQ ID NO: 348805 - DNA, 15 bp, Homo sapiens
aacatgcctaaggtc

SEQ ID NO: 348806 - DNA, 15 bp, Homo sapiens
taacatgcctaaggt

SEQ ID NO: 348807 - DNA, 15 bp, Homo sapiens
gtaacatgcctaagg

SEQ ID NO: 348808 - DNA, 15 bp, Homo sapiens
tgtaacatgcctaag

SEQ ID NO: 348809 - DNA, 15 bp, Homo sapiens
atgtaacatgcctaa

SEQ ID NO: 348810 - DNA, 15 bp, Homo sapiens
catgtaacatgccta

SEQ ID NO: 348811 - DNA, 15 bp, Homo sapiens
ccatgtaacatgcct

SEQ ID NO: 348812 - DNA, 15 bp, Homo sapiens
tccatgtaacatgcc

SEQ ID NO: 348813 - DNA, 15 bp, Homo sapiens
gtccatgtaacatgc

SEQ ID NO: 348814 - DNA, 15 bp, Homo sapiens
agtccatgtaacatg

SEQ ID NO: 348815 - DNA, 15 bp, Homo sapiens
aagtccatgtaacat

SEQ ID NO: 348816 - DNA, 15 bp, Homo sapiens
aaagtccatgtaaca

SEQ ID NO: 348817 - DNA, 15 bp, Homo sapiens
gaaagtccatgtaac

SEQ ID NO: 348818 - DNA, 15 bp, Homo sapiens
agaaagtccatgtaa

SEQ ID NO: 348819 - DNA, 15 bp, Homo sapiens
cagaaagtccatgta

SEQ ID NO: 348820 - DNA, 15 bp, Homo sapiens
tcagaaagtccatgt

SEQ ID NO: 348821 - DNA, 15 bp, Homo sapiens
atcagaaagtccatg

SEQ ID NO: 348822 - DNA, 15 bp, Homo sapiens
gatcagaaagtccat

SEQ ID NO: 348823 - DNA, 15 bp, Homo sapiens
ggatcagaaagtcca

SEQ ID NO: 348824 - DNA, 15 bp, Homo sapiens
aggatcagaaagtcc

SEQ ID NO: 348825 - DNA, 15 bp, Homo sapiens
aaggatcagaaagtc

SEQ ID NO: 348826 - DNA, 15 bp, Homo sapiens
caaggatcagaaagt

SEQ ID NO: 348827 - DNA, 15 bp, Homo sapiens
ccaaggatcagaaag

SEQ ID NO: 348828 - DNA, 15 bp, Homo sapiens
accaaggatcagaaa

SEQ ID NO: 348829 - DNA, 15 bp, Homo sapiens
aaccaaggatcagaa

SEQ ID NO: 348830 - DNA, 15 bp, Homo sapiens
aaaccaaggatcaga

SEQ ID NO: 348831 - DNA, 15 bp, Homo sapiens
gaaaccaaggatcag

SEQ ID NO: 348832 - DNA, 15 bp, Homo sapiens
tgaaaccaaggatca

SEQ ID NO: 348833 - DNA, 15 bp, Homo sapiens
cagcagttggatata

SEQ ID NO: 348834 - DNA, 15 bp, Homo sapiens
tcagcagttggatat

SEQ ID NO: 348835 - DNA, 15 bp, Homo sapiens
gtcagcagttggata

SEQ ID NO: 348836 - DNA, 15 bp, Homo sapiens
agtcagcagttggat

SEQ ID NO: 348837 - DNA, 15 bp, Homo sapiens
aagtcagcagttgga

SEQ ID NO: 348838 - DNA, 15 bp, Homo sapiens
taagtcagcagttgg

SEQ ID NO: 348839 - DNA, 15 bp, Homo sapiens
ttaagtcagcagttg

SEQ ID NO: 348840 - DNA, 15 bp, Homo sapiens
tttaagtcagcagtt

SEQ ID NO: 348841 - DNA, 15 bp, Homo sapiens
ttttaagtcagcagt

SEQ ID NO: 348842 - DNA, 15 bp, Homo sapiens
tttttaagtcagcag

SEQ ID NO: 348843 - DNA, 15 bp, Homo sapiens
ttttttaagtcagca

SEQ ID NO: 348844 - DNA, 15 bp, Homo sapiens
tttttttaagtcagc

SEQ ID NO: 348845 - DNA, 15 bp, Homo sapiens
ttttttttaagtcag

SEQ ID NO: 348846 - DNA, 15 bp, Homo sapiens
tttttttttaagtca

SEQ ID NO: 348847 - DNA, 15 bp, Homo sapiens
ttttttttttaagtc

SEQ ID NO: 348848 - DNA, 15 bp, Homo sapiens
tttttttttttaagt

SEQ ID NO: 348849 - DNA, 15 bp, Homo sapiens
gtttttttttttaag

SEQ ID NO: 348850 - DNA, 15 bp, Homo sapiens
agtttttttttttaa

SEQ ID NO: 348851 - DNA, 15 bp, Homo sapiens
cagttttttttttta

SEQ ID NO: 348852 - DNA, 15 bp, Homo sapiens
acagttttttttttt

SEQ ID NO: 348853 - DNA, 15 bp, Homo sapiens
aacagtttttttttt

SEQ ID NO: 348854 - DNA, 15 bp, Homo sapiens
aaacagttttttttt

SEQ ID NO: 348855 - DNA, 15 bp, Homo sapiens
caaacagtttttttt

SEQ ID NO: 348856 - DNA, 15 bp, Homo sapiens
ccaaacagttttttt

SEQ ID NO: 348857 - DNA, 15 bp, Homo sapiens
cccaaacagtttttt

SEQ ID NO: 348858 - DNA, 15 bp, Homo sapiens
acccaaacagttttt

SEQ ID NO: 348859 - DNA, 15 bp, Homo sapiens
tacccaaacagtttt

SEQ ID NO: 348860 - DNA, 15 bp, Homo sapiens
ttacccaaacagttt

SEQ ID NO: 348861 - DNA, 15 bp, Homo sapiens
tttacccaaacagtt

SEQ ID NO: 348862 - DNA, 15 bp, Homo sapiens
atttacccaaacagt

SEQ ID NO: 348863 - DNA, 15 bp, Homo sapiens
gatttacccaaacag

SEQ ID NO: 348864 - DNA, 15 bp, Homo sapiens
ggatttacccaaaca

SEQ ID NO: 348865 - DNA, 15 bp, Homo sapiens
tggatttacccaaac

SEQ ID NO: 348866 - DNA, 15 bp, Homo sapiens
ttggatttacccaaa

SEQ ID NO: 348867 - DNA, 15 bp, Homo sapiens
attggatttacccaa

SEQ ID NO: 348868 - DNA, 15 bp, Homo sapiens
aattggatttaccca

SEQ ID NO: 348869 - DNA, 15 bp, Homo sapiens
gaattggatttaccc

SEQ ID NO: 348870 - DNA, 15 bp, Homo sapiens
agaattggatttacc

SEQ ID NO: 348871 - DNA, 15 bp, Homo sapiens
aagaattggatttac

SEQ ID NO: 348872 - DNA, 15 bp, Homo sapiens
gaagaattggattta

SEQ ID NO: 348873 - DNA, 15 bp, Homo sapiens
ggaagaattggattt

SEQ ID NO: 348874 - DNA, 15 bp, Homo sapiens
aggaagaattggatt

SEQ ID NO: 348875 - DNA, 15 bp, Homo sapiens
taggaagaattggat

SEQ ID NO: 348876 - DNA, 15 bp, Homo sapiens
ataggaagaattgga

SEQ ID NO: 348877 - DNA, 15 bp, Homo sapiens
tataggaagaattgg

SEQ ID NO: 348878 - DNA, 15 bp, Homo sapiens
ttataggaagaattg

SEQ ID NO: 348879 - DNA, 15 bp, Homo sapiens
tttataggaagaatt

SEQ ID NO: 348880 - DNA, 15 bp, Homo sapiens
ctttataggaagaat

SEQ ID NO: 348881 - DNA, 15 bp, Homo sapiens
cctttataggaagaa

SEQ ID NO: 348882 - DNA, 15 bp, Homo sapiens
gcctttataggaaga

SEQ ID NO: 348883 - DNA, 15 bp, Homo sapiens
agcctttataggaag

SEQ ID NO: 348884 - DNA, 15 bp, Homo sapiens
cagcctttataggaa

SEQ ID NO: 348885 - DNA, 15 bp, Homo sapiens
acagcctttatagga

SEQ ID NO: 348886 - DNA, 15 bp, Homo sapiens
tacagcctttatagg

SEQ ID NO: 348887 - DNA, 15 bp, Homo sapiens
gtacagcctttatag

SEQ ID NO: 348888 - DNA, 15 bp, Homo sapiens
tgtacagcctttata

SEQ ID NO: 348889 - DNA, 15 bp, Homo sapiens
atgtacagcctttat

SEQ ID NO: 348890 - DNA, 15 bp, Homo sapiens
catgtacagccttta

SEQ ID NO: 348891 - DNA, 15 bp, Homo sapiens
ccatgtacagccttt

SEQ ID NO: 348892 - DNA, 15 bp, Homo sapiens
tccatgtacagcctt

SEQ ID NO: 348893 - DNA, 15 bp, Homo sapiens
ttccatgtacagcct

SEQ ID NO: 348894 - DNA, 15 bp, Homo sapiens
attccatgtacagcc

SEQ ID NO: 348895 - DNA, 15 bp, Homo sapiens
gattccatgtacagc

SEQ ID NO: 348896 - DNA, 15 bp, Homo sapiens
tgattccatgtacag

SEQ ID NO: 348897 - DNA, 15 bp, Homo sapiens
ttgattccatgtaca

SEQ ID NO: 348898 - DNA, 15 bp, Homo sapiens
attgattccatgtac

SEQ ID NO: 348899 - DNA, 15 bp, Homo sapiens
aattgattccatgta

SEQ ID NO: 348900 - DNA, 15 bp, Homo sapiens
aaattgattccatgt

SEQ ID NO: 348901 - DNA, 15 bp, Homo sapiens
gaaattgattccatg

SEQ ID NO: 348902 - DNA, 15 bp, Homo sapiens
ggaaattgattccat

SEQ ID NO: 348903 - DNA, 15 bp, Homo sapiens
tggaaattgattcca

SEQ ID NO: 348904 - DNA, 15 bp, Homo sapiens
atggaaattgattcc

SEQ ID NO: 348905 - DNA, 15 bp, Homo sapiens
catggaaattgattc

SEQ ID NO: 348906 - DNA, 15 bp, Homo sapiens
acatggaaattgatt

SEQ ID NO: 348907 - DNA, 15 bp, Homo sapiens
gacatggaaattgat

SEQ ID NO: 348908 - DNA, 15 bp, Homo sapiens
ggacatggaaattga

SEQ ID NO: 348909 - DNA, 15 bp, Homo sapiens
aggacatggaaattg

SEQ ID NO: 348910 - DNA, 15 bp, Homo sapiens
aaggacatggaaatt

SEQ ID NO: 348911 - DNA, 15 bp, Homo sapiens
taaggacatggaaat

SEQ ID NO: 348912 - DNA, 15 bp, Homo sapiens
ataaggacatggaaa

SEQ ID NO: 348913 - DNA, 15 bp, Homo sapiens
gataaggacatggaa

SEQ ID NO: 348914 - DNA, 15 bp, Homo sapiens
tgataaggacatgga

SEQ ID NO: 348915 - DNA, 15 bp, Homo sapiens
ttgataaggacatgg

SEQ ID NO: 348916 - DNA, 15 bp, Homo sapiens
attgataaggacatg

SEQ ID NO: 348917 - DNA, 15 bp, Homo sapiens
cattgataaggacat

SEQ ID NO: 348918 - DNA, 15 bp, Homo sapiens
acattgataaggaca

SEQ ID NO: 348919 - DNA, 15 bp, Homo sapiens
gacattgataaggac

SEQ ID NO: 348920 - DNA, 15 bp, Homo sapiens
atgacattgataagg

SEQ ID NO: 348921 - DNA, 15 bp, Homo sapiens
catgacattgataag

SEQ ID NO: 348922 - DNA, 15 bp, Homo sapiens
tcatgacattgataa

SEQ ID NO: 348923 - DNA, 15 bp, Homo sapiens
ttcatgacattgata

SEQ ID NO: 348924 - DNA, 15 bp, Homo sapiens
cttcatgacattgat

SEQ ID NO: 348925 - DNA, 15 bp, Homo sapiens
tcttcatgacattga

SEQ ID NO: 348926 - DNA, 15 bp, Homo sapiens
gtcttcatgacattg

SEQ ID NO: 348927 - DNA, 15 bp, Homo sapiens
cgtcttcatgacatt

SEQ ID NO: 348928 - DNA, 15 bp, Homo sapiens
acgtcttcatgacat

SEQ ID NO: 348929 - DNA, 15 bp, Homo sapiens
aacgtcttcatgaca

SEQ ID NO: 348930 - DNA, 15 bp, Homo sapiens
gaacgtcttcatgac

SEQ ID NO: 348931 - DNA, 15 bp, Homo sapiens
tgaacgtcttcatga

SEQ ID NO: 348932 - DNA, 15 bp, Homo sapiens
ctgaacgtcttcatg

SEQ ID NO: 348933 - DNA, 15 bp, Homo sapiens
gctgaacgtcttcat

SEQ ID NO: 348934 - DNA, 15 bp, Homo sapiens
agctgaacgtcttca

SEQ ID NO: 348935 - DNA, 15 bp, Homo sapiens
aagctgaacgtcttc

SEQ ID NO: 348936 - DNA, 15 bp, Homo sapiens
caagctgaacgtctt

SEQ ID NO: 348937 - DNA, 15 bp, Homo sapiens
gcaagctgaacgtct

SEQ ID NO: 348938 - DNA, 15 bp, Homo sapiens
agcaagctgaacgtc

SEQ ID NO: 348939 - DNA, 15 bp, Homo sapiens
aagcaagctgaacgt

SEQ ID NO: 348940 - DNA, 15 bp, Homo sapiens
gaagcaagctgaacg

SEQ ID NO: 348941 - DNA, 15 bp, Homo sapiens
ggaagcaagctgaac

SEQ ID NO: 348942 - DNA, 15 bp, Homo sapiens
cggaagcaagctgaa

SEQ ID NO: 348943 - DNA, 15 bp, Homo sapiens
gcggaagcaagctga

SEQ ID NO: 348944 - DNA, 15 bp, Homo sapiens
tgcggaagcaagctg

SEQ ID NO: 348945 - DNA, 15 bp, Homo sapiens
atgcggaagcaagct

SEQ ID NO: 348946 - DNA, 15 bp, Homo sapiens
aatgcggaagcaagc

SEQ ID NO: 348947 - DNA, 15 bp, Homo sapiens
caatgcggaagcaag

SEQ ID NO: 348948 - DNA, 15 bp, Homo sapiens
ccaatgcggaagcaa

SEQ ID NO: 348949 - DNA, 15 bp, Homo sapiens
accaatgcggaagca

SEQ ID NO: 348950 - DNA, 15 bp, Homo sapiens
aaccaatgcggaagc

SEQ ID NO: 348951 - DNA, 15 bp, Homo sapiens
taaccaatgcggaag

SEQ ID NO: 348952 - DNA, 15 bp, Homo sapiens
gtaaccaatgcggaa

SEQ ID NO: 348953 - DNA, 15 bp, Homo sapiens
cgtaaccaatgcgga

SEQ ID NO: 348954 - DNA, 15 bp, Homo sapiens
ccgtaaccaatgcgg

SEQ ID NO: 348955 - DNA, 15 bp, Homo sapiens
cccgtaaccaatgcg

SEQ ID NO: 348956 - DNA, 15 bp, Homo sapiens
acccgtaaccaatgc

SEQ ID NO: 348957 - DNA, 15 bp, Homo sapiens
cacccgtaaccaatg

SEQ ID NO: 348958 - DNA, 15 bp, Homo sapiens
acacccgtaaccaat

SEQ ID NO: 348959 - DNA, 15 bp, Homo sapiens
gacacccgtaaccaa

SEQ ID NO: 348960 - DNA, 15 bp, Homo sapiens
agacacccgtaacca

SEQ ID NO: 348961 - DNA, 15 bp, Homo sapiens
aagacacccgtaacc

SEQ ID NO: 348962 - DNA, 15 bp, Homo sapiens
caagacacccgtaac

SEQ ID NO: 348963 - DNA, 15 bp, Homo sapiens
acaagacacccgtaa

SEQ ID NO: 348964 - DNA, 15 bp, Homo sapiens
tacaagacacccgta

SEQ ID NO: 348965 - DNA, 15 bp, Homo sapiens
gtacaagacacccgt

SEQ ID NO: 348966 - DNA, 15 bp, Homo sapiens
ggtacaagacacccg

SEQ ID NO: 348967 - DNA, 15 bp, Homo sapiens
tggtacaagacaccc

SEQ ID NO: 348968 - DNA, 15 bp, Homo sapiens
atggtacaagacacc

SEQ ID NO: 348969 - DNA, 15 bp, Homo sapiens
aatggtacaagacac

SEQ ID NO: 348970 - DNA, 15 bp, Homo sapiens
gaatggtacaagaca

SEQ ID NO: 348971 - DNA, 15 bp, Homo sapiens
ggaatggtacaagac

SEQ ID NO: 348972 - DNA, 15 bp, Homo sapiens
gggaatggtacaaga

SEQ ID NO: 348973 - DNA, 15 bp, Homo sapiens
agggaatggtacaag

SEQ ID NO: 348974 - DNA, 15 bp, Homo sapiens
cagggaatggtacaa

SEQ ID NO: 348975 - DNA, 15 bp, Homo sapiens
gcagggaatggtaca

SEQ ID NO: 348976 - DNA, 15 bp, Homo sapiens
cgcagggaatggtac

SEQ ID NO: 348977 - DNA, 15 bp, Homo sapiens
ccgcagggaatggta

SEQ ID NO: 348978 - DNA, 15 bp, Homo sapiens
accgcagggaatggt

SEQ ID NO: 348979 - DNA, 15 bp, Homo sapiens
taccgcagggaatgg

SEQ ID NO: 348980 - DNA, 15 bp, Homo sapiens
ttaccgcagggaatg

SEQ ID NO: 348981 - DNA, 15 bp, Homo sapiens
attaccgcagggaat

SEQ ID NO: 348982 - DNA, 15 bp, Homo sapiens
tattaccgcagggaa

SEQ ID NO: 348983 - DNA, 15 bp, Homo sapiens
atattaccgcaggga

SEQ ID NO: 348984 - DNA, 15 bp, Homo sapiens
catattaccgcaggg

SEQ ID NO: 348985 - DNA, 15 bp, Homo sapiens
acatattaccgcagg

SEQ ID NO: 348986 - DNA, 15 bp, Homo sapiens
cacatattaccgcag

SEQ ID NO: 348987 - DNA, 15 bp, Homo sapiens
ccacatattaccgca

SEQ ID NO: 348988 - DNA, 15 bp, Homo sapiens
accacatattaccgc

SEQ ID NO: 348989 - DNA, 15 bp, Homo sapiens
caccacatattaccg

SEQ ID NO: 348990 - DNA, 15 bp, Homo sapiens
acaccacatattacc

SEQ ID NO: 348991 - DNA, 15 bp, Homo sapiens
cacaccacatattac

SEQ ID NO: 348992 - DNA, 15 bp, Homo sapiens
acacaccacatatta

SEQ ID NO: 348993 - DNA, 15 bp, Homo sapiens
cacacaccacatatt

SEQ ID NO: 348994 - DNA, 15 bp, Homo sapiens
acacacaccacatat

SEQ ID NO: 348995 - DNA, 15 bp, Homo sapiens
tacacacaccacata

SEQ ID NO: 348996 - DNA, 15 bp, Homo sapiens
gtacacacaccacat

SEQ ID NO: 348997 - DNA, 15 bp, Homo sapiens
tgtacacacaccaca

SEQ ID NO: 348998 - DNA, 15 bp, Homo sapiens
atgtacacacaccac

SEQ ID NO: 348999 - DNA, 15 bp, Homo sapiens
catgtacacacacca

SEQ ID NO: 349000 - DNA, 15 bp, Homo sapiens
tcatgtacacacacc

SEQ ID NO: 349001 - DNA, 15 bp, Homo sapiens
atcatgtacacacac

SEQ ID NO: 349002 - DNA, 15 bp, Homo sapiens
catcatgtacacaca

SEQ ID NO: 349003 - DNA, 15 bp, Homo sapiens
acatcatgtacacac

SEQ ID NO: 349004 - DNA, 15 bp, Homo sapiens
aacatcatgtacaca

SEQ ID NO: 349005 - DNA, 15 bp, Homo sapiens
taaacatcatgtaca

SEQ ID NO: 349006 - DNA, 15 bp, Homo sapiens
ataaacatcatgtac

SEQ ID NO: 349007 - DNA, 15 bp, Homo sapiens
cataaacatcatgta

SEQ ID NO: 349008 - DNA, 15 bp, Homo sapiens
acataaacatcatgt

SEQ ID NO: 349009 - DNA, 15 bp, Homo sapiens
tacataaacatcatg

SEQ ID NO: 349010 - DNA, 15 bp, Homo sapiens
atacataaacatcat

SEQ ID NO: 349011 - DNA, 15 bp, Homo sapiens
tatacataaacatca

SEQ ID NO: 349012 - DNA, 15 bp, Homo sapiens
atatacataaacatc

SEQ ID NO: 349013 - DNA, 15 bp, Homo sapiens
gatatacataaacat

SEQ ID NO: 349014 - DNA, 15 bp, Homo sapiens
agatatacataaaca

SEQ ID NO: 349015 - DNA, 15 bp, Homo sapiens
tagatatacataaac

SEQ ID NO: 349016 - DNA, 15 bp, Homo sapiens
atagatatacataaa

SEQ ID NO: 349017 - DNA, 15 bp, Homo sapiens
tatagatatacataa

SEQ ID NO: 349018 - DNA, 15 bp, Homo sapiens
ctatagatatacata

SEQ ID NO: 349019 - DNA, 15 bp, Homo sapiens
cctatagatatacat

SEQ ID NO: 349020 - DNA, 15 bp, Homo sapiens
ccctatagatataca

SEQ ID NO: 349021 - DNA, 15 bp, Homo sapiens
cccctatagatatac

SEQ ID NO: 349022 - DNA, 15 bp, Homo sapiens
acccctatagatata

SEQ ID NO: 349023 - DNA, 15 bp, Homo sapiens
gacccctatagatat

SEQ ID NO: 349024 - DNA, 15 bp, Homo sapiens
ggacccctatagata

SEQ ID NO: 349025 - DNA, 15 bp, Homo sapiens
gggacccctatagat

SEQ ID NO: 349026 - DNA, 15 bp, Homo sapiens
tgggacccctataga

SEQ ID NO: 349027 - DNA, 15 bp, Homo sapiens
atgggacccctatag

SEQ ID NO: 349028 - DNA, 15 bp, Homo sapiens
aatgggacccctata

SEQ ID NO: 349029 - DNA, 15 bp, Homo sapiens
taatgggacccctat

SEQ ID NO: 349030 - DNA, 15 bp, Homo sapiens
ttaatgggaccccta

SEQ ID NO: 349031 - DNA, 15 bp, Homo sapiens
attaatgggacccct

SEQ ID NO: 349032 - DNA, 15 bp, Homo sapiens
cattaatgggacccc

SEQ ID NO: 349033 - DNA, 15 bp, Homo sapiens
gcattaatgggaccc

SEQ ID NO: 349034 - DNA, 15 bp, Homo sapiens
agcattaatgggacc

SEQ ID NO: 349035 - DNA, 15 bp, Homo sapiens
gagcattaatgggac

SEQ ID NO: 349036 - DNA, 15 bp, Homo sapiens
agagcattaatggga

SEQ ID NO: 349037 - DNA, 15 bp, Homo sapiens
cagagcattaatggg

SEQ ID NO: 349038 - DNA, 15 bp, Homo sapiens
acagagcattaatgg

SEQ ID NO: 349039 - DNA, 15 bp, Homo sapiens
gacagagcattaatg

SEQ ID NO: 349040 - DNA, 15 bp, Homo sapiens
tgacagagcattaat

SEQ ID NO: 349041 - DNA, 15 bp, Homo sapiens
atgacagagcattaa

SEQ ID NO: 349042 - DNA, 15 bp, Homo sapiens
aatgacagagcatta

SEQ ID NO: 349043 - DNA, 15 bp, Homo sapiens
aaatgacagagcatt

SEQ ID NO: 349044 - DNA, 15 bp, Homo sapiens
taaatgacagagcat

SEQ ID NO: 349045 - DNA, 15 bp, Homo sapiens
ttaaatgacagagca

SEQ ID NO: 349046 - DNA, 15 bp, Homo sapiens
attaaatgacagagc

SEQ ID NO: 349047 - DNA, 15 bp, Homo sapiens
cattaaatgacagag

SEQ ID NO: 349048 - DNA, 15 bp, Homo sapiens
ccattaaatgacaga

SEQ ID NO: 349049 - DNA, 15 bp, Homo sapiens
tccattaaatgacag

SEQ ID NO: 349050 - DNA, 15 bp, Homo sapiens
ttccattaaatgaca

SEQ ID NO: 349051 - DNA, 15 bp, Homo sapiens
tttccattaaatgac

SEQ ID NO: 349052 - DNA, 15 bp, Homo sapiens
ttttccattaaatga

SEQ ID NO: 349053 - DNA, 15 bp, Homo sapiens
attttccattaaatg

SEQ ID NO: 349054 - DNA, 15 bp, Homo sapiens
aattttccattaaat

SEQ ID NO: 349055 - DNA, 15 bp, Homo sapiens
caattttccattaaa

SEQ ID NO: 349056 - DNA, 15 bp, Homo sapiens
acaattttccattaa

SEQ ID NO: 349057 - DNA, 15 bp, Homo sapiens
aacaattttccatta

SEQ ID NO: 349058 - DNA, 15 bp, Homo sapiens
caacaattttccatt

SEQ ID NO: 349059 - DNA, 15 bp, Homo sapiens
acaacaattttccat

SEQ ID NO: 349060 - DNA, 15 bp, Homo sapiens
tacaacaattttcca

SEQ ID NO: 349061 - DNA, 15 bp, Homo sapiens
ctacaacaattttcc

SEQ ID NO: 349062 - DNA, 15 bp, Homo sapiens
gctacaacaattttc

SEQ ID NO: 349063 - DNA, 15 bp, Homo sapiens
tgctacaacaatttt

SEQ ID NO: 349064 - DNA, 15 bp, Homo sapiens
ttgctacaacaattt

SEQ ID NO: 349065 - DNA, 15 bp, Homo sapiens
attgctacaacaatt

SEQ ID NO: 349066 - DNA, 15 bp, Homo sapiens
tattgctacaacaat

SEQ ID NO: 349067 - DNA, 15 bp, Homo sapiens
ctattgctacaacaa

SEQ ID NO: 349068 - DNA, 15 bp, Homo sapiens
gctattgctacaaca

SEQ ID NO: 349069 - DNA, 15 bp, Homo sapiens
agctattgctacaac

SEQ ID NO: 349070 - DNA, 15 bp, Homo sapiens
aagctattgctacaa

SEQ ID NO: 349071 - DNA, 15 bp, Homo sapiens
gaagctattgctaca

SEQ ID NO: 349072 - DNA, 15 bp, Homo sapiens
tgaagctattgctac

SEQ ID NO: 349073 - DNA, 15 bp, Homo sapiens
atgaagctattgcta

SEQ ID NO: 349074 - DNA, 15 bp, Homo sapiens
gatgaagctattgct

SEQ ID NO: 349075 - DNA, 15 bp, Homo sapiens
tgatgaagctattgc

SEQ ID NO: 349076 - DNA, 15 bp, Homo sapiens
ctgatgaagctattg

SEQ ID NO: 349077 - DNA, 15 bp, Homo sapiens
cctgatgaagctatt

SEQ ID NO: 349078 - DNA, 15 bp, Homo sapiens
gcctgatgaagctat

SEQ ID NO: 349079 - DNA, 15 bp, Homo sapiens
ggcctgatgaagcta

SEQ ID NO: 349080 - DNA, 15 bp, Homo sapiens
tggcctgatgaagct

SEQ ID NO: 349081 - DNA, 15 bp, Homo sapiens
ttggcctgatgaagc

SEQ ID NO: 349082 - DNA, 15 bp, Homo sapiens
attggcctgatgaag

SEQ ID NO: 349083 - DNA, 15 bp, Homo sapiens
tattggcctgatgaa

SEQ ID NO: 349084 - DNA, 15 bp, Homo sapiens
ttattggcctgatga

SEQ ID NO: 349085 - DNA, 15 bp, Homo sapiens
attattggcctgatg

SEQ ID NO: 349086 - DNA, 15 bp, Homo sapiens
cattattggcctgat

SEQ ID NO: 349087 - DNA, 15 bp, Homo sapiens
gcattattggcctga

SEQ ID NO: 349088 - DNA, 15 bp, Homo sapiens
agcattattggcctg

SEQ ID NO: 349089 - DNA, 15 bp, Homo sapiens
aagcattattggcct

SEQ ID NO: 349090 - DNA, 15 bp, Homo sapiens
gaagcattattggcc

SEQ ID NO: 349091 - DNA, 15 bp, Homo sapiens
ggaagcattattggc

SEQ ID NO: 349092 - DNA, 15 bp, Homo sapiens
cggaagcattattgg

SEQ ID NO: 349093 - DNA, 15 bp, Homo sapiens
acggaagcattattg

SEQ ID NO: 349094 - DNA, 15 bp, Homo sapiens
cacggaagcattatt

SEQ ID NO: 349095 - DNA, 15 bp, Homo sapiens
acacggaagcattat

SEQ ID NO: 349096 - DNA, 15 bp, Homo sapiens
aacacggaagcatta

SEQ ID NO: 349097 - DNA, 15 bp, Homo sapiens
caacacggaagcatt

SEQ ID NO: 349098 - DNA, 15 bp, Homo sapiens
tcaacacggaagcat

SEQ ID NO: 349099 - DNA, 15 bp, Homo sapiens
gtcaacacggaagca

SEQ ID NO: 349100 - DNA, 15 bp, Homo sapiens
ggtcaacacggaagc

SEQ ID NO: 349101 - DNA, 15 bp, Homo sapiens
tggtcaacacggaag

SEQ ID NO: 349102 - DNA, 15 bp, Homo sapiens
gtggtcaacacggaa

SEQ ID NO: 349103 - DNA, 15 bp, Homo sapiens
ggtggtcaacacgga

SEQ ID NO: 349104 - DNA, 15 bp, Homo sapiens
tggtggtcaacacgg

SEQ ID NO: 349105 - DNA, 15 bp, Homo sapiens
ttggtggtcaacacg

SEQ ID NO: 349106 - DNA, 15 bp, Homo sapiens
attggtggtcaacac

SEQ ID NO: 349107 - DNA, 15 bp, Homo sapiens
tattggtggtcaaca

SEQ ID NO: 349108 - DNA, 15 bp, Homo sapiens
ctattggtggtcaac

SEQ ID NO: 349109 - DNA, 15 bp, Homo sapiens
gctattggtggtcaa

SEQ ID NO: 349110 - DNA, 15 bp, Homo sapiens
tgctattggtggtca

SEQ ID NO: 349111 - DNA, 15 bp, Homo sapiens
ctgctattggtggtc

SEQ ID NO: 349112 - DNA, 15 bp, Homo sapiens
actgctattggtggt

SEQ ID NO: 349113 - DNA, 15 bp, Homo sapiens
aactgctattggtgg

SEQ ID NO: 349114 - DNA, 15 bp, Homo sapiens
aaactgctattggtg

SEQ ID NO: 349115 - DNA, 15 bp, Homo sapiens
gaaactgctattggt

SEQ ID NO: 349116 - DNA, 15 bp, Homo sapiens
tgaaactgctattgg

SEQ ID NO: 349117 - DNA, 15 bp, Homo sapiens
ttgaaactgctattg

SEQ ID NO: 349118 - DNA, 15 bp, Homo sapiens
tttgaaactgctatt

SEQ ID NO: 349119 - DNA, 15 bp, Homo sapiens
ttttgaaactgctat

SEQ ID NO: 349120 - DNA, 15 bp, Homo sapiens
cttttgaaactgcta

SEQ ID NO: 349121 - DNA, 15 bp, Homo sapiens
ccttttgaaactgct

SEQ ID NO: 349122 - DNA, 15 bp, Homo sapiens
tccttttgaaactgc

SEQ ID NO: 349123 - DNA, 15 bp, Homo sapiens
ttccttttgaaactg

SEQ ID NO: 349124 - DNA, 15 bp, Homo sapiens
attccttttgaaact

SEQ ID NO: 349125 - DNA, 15 bp, Homo sapiens
aattccttttgaaac

SEQ ID NO: 349126 - DNA, 15 bp, Homo sapiens
aaattccttttgaaa

SEQ ID NO: 349127 - DNA, 15 bp, Homo sapiens
taaattccttttgaa

SEQ ID NO: 349128 - DNA, 15 bp, Homo sapiens
ataaattccttttga

SEQ ID NO: 349129 - DNA, 15 bp, Homo sapiens
aataaattccttttg

SEQ ID NO: 349130 - DNA, 15 bp, Homo sapiens
gaataaattcctttt

SEQ ID NO: 349131 - DNA, 15 bp, Homo sapiens
agaataaattccttt

SEQ ID NO: 349132 - DNA, 15 bp, Homo sapiens
cagaataaattcctt

SEQ ID NO: 349133 - DNA, 15 bp, Homo sapiens
tcagaataaattcct

SEQ ID NO: 349134 - DNA, 15 bp, Homo sapiens
atcagaataaattcc

SEQ ID NO: 349135 - DNA, 15 bp, Homo sapiens
catcagaataaattc

SEQ ID NO: 349136 - DNA, 15 bp, Homo sapiens
ccatcagaataaatt

SEQ ID NO: 349137 - DNA, 15 bp, Homo sapiens
tccatcagaataaat

SEQ ID NO: 349138 - DNA, 15 bp, Homo sapiens
gtccatcagaataaa

SEQ ID NO: 349139 - DNA, 15 bp, Homo sapiens
agtccatcagaataa

SEQ ID NO: 349140 - DNA, 15 bp, Homo sapiens
aagtccatcagaata

SEQ ID NO: 349141 - DNA, 15 bp, Homo sapiens
aaagtccatcagaat

SEQ ID NO: 349142 - DNA, 15 bp, Homo sapiens
caaagtccatcagaa

SEQ ID NO: 349143 - DNA, 15 bp, Homo sapiens
gcaaagtccatcaga

SEQ ID NO: 349144 - DNA, 15 bp, Homo sapiens
agcaaagtccatcag

SEQ ID NO: 349145 - DNA, 15 bp, Homo sapiens
aagcaaagtccatca

SEQ ID NO: 349146 - DNA, 15 bp, Homo sapiens
gaagcaaagtccatc

SEQ ID NO: 349147 - DNA, 15 bp, Homo sapiens
tgaagcaaagtccat

SEQ ID NO: 349148 - DNA, 15 bp, Homo sapiens
ttgaagcaaagtcca

SEQ ID NO: 349149 - DNA, 15 bp, Homo sapiens
tttgaagcaaagtcc

SEQ ID NO: 349150 - DNA, 15 bp, Homo sapiens
atttgaagcaaagtc

SEQ ID NO: 349151 - DNA, 15 bp, Homo sapiens
gatttgaagcaaagt

SEQ ID NO: 349152 - DNA, 15 bp, Homo sapiens
tgatttgaagcaaag

SEQ ID NO: 349153 - DNA, 15 bp, Homo sapiens
atgatttgaagcaaa

SEQ ID NO: 349154 - DNA, 15 bp, Homo sapiens
catgatttgaagcaa

SEQ ID NO: 349155 - DNA, 15 bp, Homo sapiens
acatgatttgaagca

SEQ ID NO: 349156 - DNA, 15 bp, Homo sapiens
cacatgatttgaagc

SEQ ID NO: 349157 - DNA, 15 bp, Homo sapiens
gcacatgatttgaag

SEQ ID NO: 349158 - DNA, 15 bp, Homo sapiens
ggcacatgatttgaa

SEQ ID NO: 349159 - DNA, 15 bp, Homo sapiens
gggcacatgatttga

SEQ ID NO: 349160 - DNA, 15 bp, Homo sapiens
tgggcacatgatttg

SEQ ID NO: 349161 - DNA, 15 bp, Homo sapiens
atgggcacatgattt

SEQ ID NO: 349162 - DNA, 15 bp, Homo sapiens
catgggcacatgatt

SEQ ID NO: 349163 - DNA, 15 bp, Homo sapiens
tcatgggcacatgat

SEQ ID NO: 349164 - DNA, 15 bp, Homo sapiens
atcatgggcacatga

SEQ ID NO: 349165 - DNA, 15 bp, Homo sapiens
catcatgggcacatg

SEQ ID NO: 349166 - DNA, 15 bp, Homo sapiens
ccatcatgggcacat

SEQ ID NO: 349167 - DNA, 15 bp, Homo sapiens
gccatcatgggcaca

SEQ ID NO: 349168 - DNA, 15 bp, Homo sapiens
tgccatcatgggcac

SEQ ID NO: 349169 - DNA, 15 bp, Homo sapiens
ctgccatcatgggca

SEQ ID NO: 349170 - DNA, 15 bp, Homo sapiens
gctgccatcatgggc

SEQ ID NO: 349171 - DNA, 15 bp, Homo sapiens
agctgccatcatggg

SEQ ID NO: 349172 - DNA, 15 bp, Homo sapiens
tagctgccatcatgg

SEQ ID NO: 349173 - DNA, 15 bp, Homo sapiens
ctagctgccatcatg

SEQ ID NO: 349174 - DNA, 15 bp, Homo sapiens
tctagctgccatcat

SEQ ID NO: 349175 - DNA, 15 bp, Homo sapiens
gtctagctgccatca

SEQ ID NO: 349176 - DNA, 15 bp, Homo sapiens
agtctagctgccatc

SEQ ID NO: 349177 - DNA, 15 bp, Homo sapiens
cagtctagctgccat

SEQ ID NO: 349178 - DNA, 15 bp, Homo sapiens
gcagtctagctgcca

SEQ ID NO: 349179 - DNA, 15 bp, Homo sapiens
agcagtctagctgcc

SEQ ID NO: 349180 - DNA, 15 bp, Homo sapiens
gagcagtctagctgc

SEQ ID NO: 349181 - DNA, 15 bp, Homo sapiens
ggagcagtctagctg

SEQ ID NO: 349182 - DNA, 15 bp, Homo sapiens
tggagcagtctagct

SEQ ID NO: 349183 - DNA, 15 bp, Homo sapiens
atggagcagtctagc

SEQ ID NO: 349184 - DNA, 15 bp, Homo sapiens
aatggagcagtctag

SEQ ID NO: 349185 - DNA, 15 bp, Homo sapiens
taatggagcagtcta

SEQ ID NO: 349186 - DNA, 15 bp, Homo sapiens
ataatggagcagtct

SEQ ID NO: 349187 - DNA, 15 bp, Homo sapiens
tataatggagcagtc

SEQ ID NO: 349188 - DNA, 15 bp, Homo sapiens
atataatggagcagt

SEQ ID NO: 349189 - DNA, 15 bp, Homo sapiens
tatataatggagcag

SEQ ID NO: 349190 - DNA, 15 bp, Homo sapiens
ttatataatggagca

SEQ ID NO: 349191 - DNA, 15 bp, Homo sapiens
tttatataatggagc

SEQ ID NO: 349192 - DNA, 15 bp, Homo sapiens
gtttatataatggag

SEQ ID NO: 349193 - DNA, 15 bp, Homo sapiens
ggtttatataatgga

SEQ ID NO: 349194 - DNA, 15 bp, Homo sapiens
gggtttatataatgg

SEQ ID NO: 349195 - DNA, 15 bp, Homo sapiens
tgggtttatataatg

SEQ ID NO: 349196 - DNA, 15 bp, Homo sapiens
ctgggtttatataat

SEQ ID NO: 349197 - DNA, 15 bp, Homo sapiens
cctgggtttatataa

SEQ ID NO: 349198 - DNA, 15 bp, Homo sapiens
gcctgggtttatata

SEQ ID NO: 349199 - DNA, 15 bp, Homo sapiens
ggcctgggtttatat

SEQ ID NO: 349200 - DNA, 15 bp, Homo sapiens
gggcctgggtttata

SEQ ID NO: 349201 - DNA, 15 bp, Homo sapiens
agggcctgggtttat

SEQ ID NO: 349202 - DNA, 15 bp, Homo sapiens
tagggcctgggttta

SEQ ID NO: 349203 - DNA, 15 bp, Homo sapiens
ttagggcctgggttt

SEQ ID NO: 349204 - DNA, 15 bp, Homo sapiens
attagggcctgggtt

SEQ ID NO: 349205 - DNA, 15 bp, Homo sapiens
tattagggcctgggt

SEQ ID NO: 349206 - DNA, 15 bp, Homo sapiens
gtattagggcctggg

SEQ ID NO: 349207 - DNA, 15 bp, Homo sapiens
ggtattagggcctgg

SEQ ID NO: 349208 - DNA, 15 bp, Homo sapiens
aggtattagggcctg

SEQ ID NO: 349209 - DNA, 15 bp, Homo sapiens
aaggtattagggcct

SEQ ID NO: 349210 - DNA, 15 bp, Homo sapiens
caaggtattagggcc

SEQ ID NO: 349211 - DNA, 15 bp, Homo sapiens
tcaaggtattagggc

SEQ ID NO: 349212 - DNA, 15 bp, Homo sapiens
atcaaggtattaggg

SEQ ID NO: 349213 - DNA, 15 bp, Homo sapiens
aatcaaggtattagg

SEQ ID NO: 349214 - DNA, 15 bp, Homo sapiens
aaatcaaggtattag

SEQ ID NO: 349215 - DNA, 15 bp, Homo sapiens
caaatcaaggtatta

SEQ ID NO: 349216 - DNA, 15 bp, Homo sapiens
gcaaatcaaggtatt

SEQ ID NO: 349217 - DNA, 15 bp, Homo sapiens
agcaaatcaaggtat

SEQ ID NO: 349218 - DNA, 15 bp, Homo sapiens
aagcaaatcaaggta

SEQ ID NO: 349219 - DNA, 15 bp, Homo sapiens
aaagcaaatcaaggt

SEQ ID NO: 349220 - DNA, 15 bp, Homo sapiens
caaagcaaatcaagg

SEQ ID NO: 349221 - DNA, 15 bp, Homo sapiens
tcaaagcaaatcaag

SEQ ID NO: 349222 - DNA, 15 bp, Homo sapiens
atcaaagcaaatcaa

SEQ ID NO: 349223 - DNA, 15 bp, Homo sapiens
aatcaaagcaaatca

SEQ ID NO: 349224 - DNA, 15 bp, Homo sapiens
aaatcaaagcaaatc

SEQ ID NO: 349225 - DNA, 15 bp, Homo sapiens
gaaatcaaagcaaat

SEQ ID NO: 349226 - DNA, 15 bp, Homo sapiens
ggaaatcaaagcaaa

SEQ ID NO: 349227 - DNA, 15 bp, Homo sapiens
aggaaatcaaagcaa

SEQ ID NO: 349228 - DNA, 15 bp, Homo sapiens
gaggaaatcaaagca

SEQ ID NO: 349229 - DNA, 15 bp, Homo sapiens
tgaggaaatcaaagc

SEQ ID NO: 349230 - DNA, 15 bp, Homo sapiens
ttgaggaaatcaaag

SEQ ID NO: 349231 - DNA, 15 bp, Homo sapiens
gttgaggaaatcaaa

SEQ ID NO: 349232 - DNA, 15 bp, Homo sapiens
agttgaggaaatcaa

SEQ ID NO: 349233 - DNA, 15 bp, Homo sapiens
cagttgaggaaatca

SEQ ID NO: 349234 - DNA, 15 bp, Homo sapiens
ccagttgaggaaatc

SEQ ID NO: 349235 - DNA, 15 bp, Homo sapiens
cccagttgaggaaat

SEQ ID NO: 349236 - DNA, 15 bp, Homo sapiens
tcccagttgaggaaa

SEQ ID NO: 349237 - DNA, 15 bp, Homo sapiens
ctcccagttgaggaa

SEQ ID NO: 349238 - DNA, 15 bp, Homo sapiens
gctcccagttgagga

SEQ ID NO: 349239 - DNA, 15 bp, Homo sapiens
tgctcccagttgagg

SEQ ID NO: 349240 - DNA, 15 bp, Homo sapiens
atgctcccagttgag

SEQ ID NO: 349241 - DNA, 15 bp, Homo sapiens
catgctcccagttga

SEQ ID NO: 349242 - DNA, 15 bp, Homo sapiens
gcatgctcccagttg

SEQ ID NO: 349243 - DNA, 15 bp, Homo sapiens
ggcatgctcccagtt

SEQ ID NO: 349244 - DNA, 15 bp, Homo sapiens
tggcatgctcccagt

SEQ ID NO: 349245 - DNA, 15 bp, Homo sapiens
ctggcatgctcccag

SEQ ID NO: 349246 - DNA, 15 bp, Homo sapiens
gctggcatgctccca

SEQ ID NO: 349247 - DNA, 15 bp, Homo sapiens
ggctggcatgctccc

SEQ ID NO: 349248 - DNA, 15 bp, Homo sapiens
aggctggcatgctcc

SEQ ID NO: 349249 - DNA, 15 bp, Homo sapiens
caggctggcatgctc

SEQ ID NO: 349250 - DNA, 15 bp, Homo sapiens
ccaggctggcatgct

SEQ ID NO: 349251 - DNA, 15 bp, Homo sapiens
cccaggctggcatgc

SEQ ID NO: 349252 - DNA, 15 bp, Homo sapiens
tcccaggctggcatg

SEQ ID NO: 349253 - DNA, 15 bp, Homo sapiens
ttcccaggctggcat

SEQ ID NO: 349254 - DNA, 15 bp, Homo sapiens
cttcccaggctggca

SEQ ID NO: 349255 - DNA, 15 bp, Homo sapiens
acttcccaggctggc

SEQ ID NO: 349256 - DNA, 15 bp, Homo sapiens
tacttcccaggctgg

SEQ ID NO: 349257 - DNA, 15 bp, Homo sapiens
ttacttcccaggctg

SEQ ID NO: 349258 - DNA, 15 bp, Homo sapiens
cttacttcccaggct

SEQ ID NO: 349259 - DNA, 15 bp, Homo sapiens
gcttacttcccaggc

SEQ ID NO: 349260 - DNA, 15 bp, Homo sapiens
tgcttacttcccagg

SEQ ID NO: 349261 - DNA, 15 bp, Homo sapiens
ctgcttacttcccag

SEQ ID NO: 349262 - DNA, 15 bp, Homo sapiens
actgcttacttccca

SEQ ID NO: 349263 - DNA, 15 bp, Homo sapiens
tactgcttacttccc

SEQ ID NO: 349264 - DNA, 15 bp, Homo sapiens
ctactgcttacttcc

SEQ ID NO: 349265 - DNA, 15 bp, Homo sapiens
actactgcttacttc

SEQ ID NO: 349266 - DNA, 15 bp, Homo sapiens
cactactgcttactt

SEQ ID NO: 349267 - DNA, 15 bp, Homo sapiens
gcactactgcttact

SEQ ID NO: 349268 - DNA, 15 bp, Homo sapiens
agcactactgcttac

SEQ ID NO: 349269 - DNA, 15 bp, Homo sapiens
aagcactactgctta

SEQ ID NO: 349270 - DNA, 15 bp, Homo sapiens
taagcactactgctt

SEQ ID NO: 349271 - DNA, 15 bp, Homo sapiens
ttaagcactactgct

SEQ ID NO: 349272 - DNA, 15 bp, Homo sapiens
attaagcactactgc

SEQ ID NO: 349273 - DNA, 15 bp, Homo sapiens
cattaagcactactg

SEQ ID NO: 349274 - DNA, 15 bp, Homo sapiens
tcattaagcactact

SEQ ID NO: 349275 - DNA, 15 bp, Homo sapiens
atcattaagcactac

SEQ ID NO: 349276 - DNA, 15 bp, Homo sapiens
catcattaagcacta

SEQ ID NO: 349277 - DNA, 15 bp, Homo sapiens
ccatcattaagcact

SEQ ID NO: 349278 - DNA, 15 bp, Homo sapiens
gccatcattaagcac

SEQ ID NO: 349279 - DNA, 15 bp, Homo sapiens
tgccatcattaagca

SEQ ID NO: 349280 - DNA, 15 bp, Homo sapiens
atgccatcattaagc

SEQ ID NO: 349281 - DNA, 15 bp, Homo sapiens
aatgccatcattaag

SEQ ID NO: 349282 - DNA, 15 bp, Homo sapiens
taatgccatcattaa

SEQ ID NO: 349283 - DNA, 15 bp, Homo sapiens
ataatgccatcatta

SEQ ID NO: 349284 - DNA, 15 bp, Homo sapiens
gataatgccatcatt

SEQ ID NO: 349285 - DNA, 15 bp, Homo sapiens
ggataatgccatcat

SEQ ID NO: 349286 - DNA, 15 bp, Homo sapiens
tggataatgccatca

SEQ ID NO: 349287 - DNA, 15 bp, Homo sapiens
ttggataatgccatc

SEQ ID NO: 349288 - DNA, 15 bp, Homo sapiens
gttggataatgccat

SEQ ID NO: 349289 - DNA, 15 bp, Homo sapiens
agttggataatgcca

SEQ ID NO: 349290 - DNA, 15 bp, Homo sapiens
tagttggataatgcc

SEQ ID NO: 349291 - DNA, 15 bp, Homo sapiens
ttagttggataatgc

SEQ ID NO: 349292 - DNA, 15 bp, Homo sapiens
tttagttggataatg

SEQ ID NO: 349293 - DNA, 15 bp, Homo sapiens
atttagttggataat

SEQ ID NO: 349294 - DNA, 15 bp, Homo sapiens
catttagttggataa

SEQ ID NO: 349295 - DNA, 15 bp, Homo sapiens
acatttagttggata

SEQ ID NO: 349296 - DNA, 15 bp, Homo sapiens
tacatttagttggat

SEQ ID NO: 349297 - DNA, 15 bp, Homo sapiens
atacatttagttgga

SEQ ID NO: 349298 - DNA, 15 bp, Homo sapiens
catacatttagttgg

SEQ ID NO: 349299 - DNA, 15 bp, Homo sapiens
ccatacatttagttg

SEQ ID NO: 349300 - DNA, 15 bp, Homo sapiens
cccatacatttagtt

SEQ ID NO: 349301 - DNA, 15 bp, Homo sapiens
ccccatacatttagt

SEQ ID NO: 349302 - DNA, 15 bp, Homo sapiens
gccccatacatttag

SEQ ID NO: 349303 - DNA, 15 bp, Homo sapiens
tgccccatacattta

SEQ ID NO: 349304 - DNA, 15 bp, Homo sapiens
ctgccccatacattt

SEQ ID NO: 349305 - DNA, 15 bp, Homo sapiens
actgccccatacatt

SEQ ID NO: 349306 - DNA, 15 bp, Homo sapiens
cactgccccatacat

SEQ ID NO: 349307 - DNA, 15 bp, Homo sapiens
ccactgccccataca

SEQ ID NO: 349308 - DNA, 15 bp, Homo sapiens
tccactgccccatac

SEQ ID NO: 349309 - DNA, 15 bp, Homo sapiens
gtccactgccccata

SEQ ID NO: 349310 - DNA, 15 bp, Homo sapiens
tgtccactgccccat

SEQ ID NO: 349311 - DNA, 15 bp, Homo sapiens
atgtccactgcccca

SEQ ID NO: 349312 - DNA, 15 bp, Homo sapiens
aatgtccactgcccc

SEQ ID NO: 349313 - DNA, 15 bp, Homo sapiens
caatgtccactgccc

SEQ ID NO: 349314 - DNA, 15 bp, Homo sapiens
ccaatgtccactgcc

SEQ ID NO: 349315 - DNA, 15 bp, Homo sapiens
tccaatgtccactgc

SEQ ID NO: 349316 - DNA, 15 bp, Homo sapiens
gtccaatgtccactg

SEQ ID NO: 349317 - DNA, 15 bp, Homo sapiens
agtccaatgtccact

SEQ ID NO: 349318 - DNA, 15 bp, Homo sapiens
gagtccaatgtccac

SEQ ID NO: 349319 - DNA, 15 bp, Homo sapiens
agagtccaatgtcca

SEQ ID NO: 349320 - DNA, 15 bp, Homo sapiens
cagagtccaatgtcc

SEQ ID NO: 349321 - DNA, 15 bp, Homo sapiens
ccagagtccaatgtc

SEQ ID NO: 349322 - DNA, 15 bp, Homo sapiens
tccagagtccaatgt

SEQ ID NO: 349323 - DNA, 15 bp, Homo sapiens
gtccagagtccaatg

SEQ ID NO: 349324 - DNA, 15 bp, Homo sapiens
tgtccagagtccaat

SEQ ID NO: 349325 - DNA, 15 bp, Homo sapiens
ttgtccagagtccaa

SEQ ID NO: 349326 - DNA, 15 bp, Homo sapiens
tttgtccagagtcca

SEQ ID NO: 349327 - DNA, 15 bp, Homo sapiens
ttttgtccagagtcc

SEQ ID NO: 349328 - DNA, 15 bp, Homo sapiens
attttgtccagagtc

SEQ ID NO: 349329 - DNA, 15 bp, Homo sapiens
gattttgtccagagt

SEQ ID NO: 349330 - DNA, 15 bp, Homo sapiens
agattttgtccagag

SEQ ID NO: 349331 - DNA, 15 bp, Homo sapiens
aagattttgtccaga

SEQ ID NO: 349332 - DNA, 15 bp, Homo sapiens
aaagattttgtccag

SEQ ID NO: 349333 - DNA, 15 bp, Homo sapiens
caaagattttgtcca

SEQ ID NO: 349334 - DNA, 15 bp, Homo sapiens
ccaaagattttgtcc

SEQ ID NO: 349335 - DNA, 15 bp, Homo sapiens
cccaaagattttgtc

SEQ ID NO: 349336 - DNA, 15 bp, Homo sapiens
ccccaaagattttgt

SEQ ID NO: 349337 - DNA, 15 bp, Homo sapiens
tccccaaagattttg

SEQ ID NO: 349338 - DNA, 15 bp, Homo sapiens
ttccccaaagatttt

SEQ ID NO: 349339 - DNA, 15 bp, Homo sapiens
tttccccaaagattt

SEQ ID NO: 349340 - DNA, 15 bp, Homo sapiens
ctttccccaaagatt

SEQ ID NO: 349341 - DNA, 15 bp, Homo sapiens
gctttccccaaagat

SEQ ID NO: 349342 - DNA, 15 bp, Homo sapiens
agctttccccaaaga

SEQ ID NO: 349343 - DNA, 15 bp, Homo sapiens
aagctttccccaaag

SEQ ID NO: 349344 - DNA, 15 bp, Homo sapiens
aaagctttccccaaa

SEQ ID NO: 349345 - DNA, 15 bp, Homo sapiens
taaagctttccccaa

SEQ ID NO: 349346 - DNA, 15 bp, Homo sapiens
ctaaagctttcccca

SEQ ID NO: 349347 - DNA, 15 bp, Homo sapiens
tctaaagctttcccc

SEQ ID NO: 349348 - DNA, 15 bp, Homo sapiens
gtctaaagctttccc

SEQ ID NO: 349349 - DNA, 15 bp, Homo sapiens
agtctaaagctttcc

SEQ ID NO: 349350 - DNA, 15 bp, Homo sapiens
tagtctaaagctttc

SEQ ID NO: 349351 - DNA, 15 bp, Homo sapiens
ctagtctaaagcttt

SEQ ID NO: 349352 - DNA, 15 bp, Homo sapiens
actagtctaaagctt

SEQ ID NO: 349353 - DNA, 15 bp, Homo sapiens
cactagtctaaagct

SEQ ID NO: 349354 - DNA, 15 bp, Homo sapiens
ccactagtctaaagc

SEQ ID NO: 349355 - DNA, 15 bp, Homo sapiens
cccactagtctaaag

SEQ ID NO: 349356 - DNA, 15 bp, Homo sapiens
gcccactagtctaaa

SEQ ID NO: 349357 - DNA, 15 bp, Homo sapiens
ggcccactagtctaa

SEQ ID NO: 349358 - DNA, 15 bp, Homo sapiens
gggcccactagtcta

SEQ ID NO: 349359 - DNA, 15 bp, Homo sapiens
ggggcccactagtct

SEQ ID NO: 349360 - DNA, 15 bp, Homo sapiens
gggggcccactagtc

SEQ ID NO: 349361 - DNA, 15 bp, Homo sapiens
agggggcccactagt

SEQ ID NO: 349362 - DNA, 15 bp, Homo sapiens
tagggggcccactag

SEQ ID NO: 349363 - DNA, 15 bp, Homo sapiens
atagggggcccacta

SEQ ID NO: 349364 - DNA, 15 bp, Homo sapiens
tatagggggcccact

SEQ ID NO: 349365 - DNA, 15 bp, Homo sapiens
ttatagggggcccac

SEQ ID NO: 349366 - DNA, 15 bp, Homo sapiens
tttatagggggccca

SEQ ID NO: 349367 - DNA, 15 bp, Homo sapiens
gtttatagggggccc

SEQ ID NO: 349368 - DNA, 15 bp, Homo sapiens
tgtttatagggggcc

SEQ ID NO: 349369 - DNA, 15 bp, Homo sapiens
gtgtttatagggggc

SEQ ID NO: 349370 - DNA, 15 bp, Homo sapiens
tgtgtttataggggg

SEQ ID NO: 349371 - DNA, 15 bp, Homo sapiens
ttgtgtttatagggg

SEQ ID NO: 349372 - DNA, 15 bp, Homo sapiens
gttgtgtttataggg

SEQ ID NO: 349373 - DNA, 15 bp, Homo sapiens
tgttgtgtttatagg

SEQ ID NO: 349374 - DNA, 15 bp, Homo sapiens
ctgttgtgtttatag

SEQ ID NO: 349375 - DNA, 15 bp, Homo sapiens
actgttgtgtttata

SEQ ID NO: 349376 - DNA, 15 bp, Homo sapiens
tactgttgtgtttat

SEQ ID NO: 349377 - DNA, 15 bp, Homo sapiens
atactgttgtgttta

SEQ ID NO: 349378 - DNA, 15 bp, Homo sapiens
catactgttgtgttt

SEQ ID NO: 349379 - DNA, 15 bp, Homo sapiens
ccatactgttgtgtt

SEQ ID NO: 349380 - DNA, 15 bp, Homo sapiens
accatactgttgtgt

SEQ ID NO: 349381 - DNA, 15 bp, Homo sapiens
caccatactgttgtg

SEQ ID NO: 349382 - DNA, 15 bp, Homo sapiens
acaccatactgttgt

SEQ ID NO: 349383 - DNA, 15 bp, Homo sapiens
tacaccatactgttg

SEQ ID NO: 349384 - DNA, 15 bp, Homo sapiens
ctacaccatactgtt

SEQ ID NO: 349385 - DNA, 15 bp, Homo sapiens
gctacaccatactgt

SEQ ID NO: 349386 - DNA, 15 bp, Homo sapiens
ggctacaccatactg

SEQ ID NO: 349387 - DNA, 15 bp, Homo sapiens
aggctacaccatact

SEQ ID NO: 349388 - DNA, 15 bp, Homo sapiens
aaggctacaccatac

SEQ ID NO: 349389 - DNA, 15 bp, Homo sapiens
gaaggctacaccata

SEQ ID NO: 349390 - DNA, 15 bp, Homo sapiens
tgaaggctacaccat

SEQ ID NO: 349391 - DNA, 15 bp, Homo sapiens
ttgaaggctacacca

SEQ ID NO: 349392 - DNA, 15 bp, Homo sapiens
cttgaaggctacacc

SEQ ID NO: 349393 - DNA, 15 bp, Homo sapiens
ccttgaaggctacac

SEQ ID NO: 349394 - DNA, 15 bp, Homo sapiens
accttgaaggctaca

SEQ ID NO: 349395 - DNA, 15 bp, Homo sapiens
aaccttgaaggctac

SEQ ID NO: 349396 - DNA, 15 bp, Homo sapiens
aaaccttgaaggcta

SEQ ID NO: 349397 - DNA, 15 bp, Homo sapiens
aaaaccttgaaggct

SEQ ID NO: 349398 - DNA, 15 bp, Homo sapiens
taaaaccttgaaggc

SEQ ID NO: 349399 - DNA, 15 bp, Homo sapiens
ataaaaccttgaagg

SEQ ID NO: 349400 - DNA, 15 bp, Homo sapiens
aataaaaccttgaag

SEQ ID NO: 349401 - DNA, 15 bp, Homo sapiens
gaataaaaccttgaa

SEQ ID NO: 349402 - DNA, 15 bp, Homo sapiens
tgaataaaaccttga

SEQ ID NO: 349403 - DNA, 15 bp, Homo sapiens
ctgaataaaaccttg

SEQ ID NO: 349404 - DNA, 15 bp, Homo sapiens
tctgaataaaacctt

SEQ ID NO: 349405 - DNA, 15 bp, Homo sapiens
ttctgaataaaacct

SEQ ID NO: 349406 - DNA, 15 bp, Homo sapiens
gttctgaataaaacc

SEQ ID NO: 349407 - DNA, 15 bp, Homo sapiens
tgttctgaataaaac

SEQ ID NO: 349408 - DNA, 15 bp, Homo sapiens
atgttctgaataaaa

SEQ ID NO: 349409 - DNA, 15 bp, Homo sapiens
catgttctgaataaa

SEQ ID NO: 349410 - DNA, 15 bp, Homo sapiens
tcatgttctgaataa

SEQ ID NO: 349411 - DNA, 15 bp, Homo sapiens
gtcatgttctgaata

SEQ ID NO: 349412 - DNA, 15 bp, Homo sapiens
ggtcatgttctgaat

SEQ ID NO: 349413 - DNA, 15 bp, Homo sapiens
aggtcatgttctgaa

SEQ ID NO: 349414 - DNA, 15 bp, Homo sapiens
gaggtcatgttctga

SEQ ID NO: 349415 - DNA, 15 bp, Homo sapiens
tgaggtcatgttctg

SEQ ID NO: 349416 - DNA, 15 bp, Homo sapiens
gtgaggtcatgttct

SEQ ID NO: 349417 - DNA, 15 bp, Homo sapiens
tgtgaggtcatgttc

SEQ ID NO: 349418 - DNA, 15 bp, Homo sapiens
ttgtgaggtcatgtt

SEQ ID NO: 349419 - DNA, 15 bp, Homo sapiens
tttgtgaggtcatgt

SEQ ID NO: 349420 - DNA, 15 bp, Homo sapiens
atttgtgaggtcatg

SEQ ID NO: 349421 - DNA, 15 bp, Homo sapiens
catttgtgaggtcat

SEQ ID NO: 349422 - DNA, 15 bp, Homo sapiens
acatttgtgaggtca

SEQ ID NO: 349423 - DNA, 15 bp, Homo sapiens
tacatttgtgaggtc

SEQ ID NO: 349424 - DNA, 15 bp, Homo sapiens
atacatttgtgaggt

SEQ ID NO: 349425 - DNA, 15 bp, Homo sapiens
gatacatttgtgagg

SEQ ID NO: 349426 - DNA, 15 bp, Homo sapiens
agatacatttgtgag

SEQ ID NO: 349427 - DNA, 15 bp, Homo sapiens
aagatacatttgtga

SEQ ID NO: 349428 - DNA, 15 bp, Homo sapiens
gaagatacatttgtg

SEQ ID NO: 349429 - DNA, 15 bp, Homo sapiens
agaagatacatttgt

SEQ ID NO: 349430 - DNA, 15 bp, Homo sapiens
gagaagatacatttg

SEQ ID NO: 349431 - DNA, 15 bp, Homo sapiens
agagaagatacattt

SEQ ID NO: 349432 - DNA, 15 bp, Homo sapiens
cagagaagatacatt

SEQ ID NO: 349433 - DNA, 15 bp, Homo sapiens
acagagaagatacat

SEQ ID NO: 349434 - DNA, 15 bp, Homo sapiens
aacagagaagataca

SEQ ID NO: 349435 - DNA, 15 bp, Homo sapiens
aaacagagaagatac

SEQ ID NO: 349436 - DNA, 15 bp, Homo sapiens
caaacagagaagata

SEQ ID NO: 349437 - DNA, 15 bp, Homo sapiens
acaaacagagaagat

SEQ ID NO: 349438 - DNA, 15 bp, Homo sapiens
aacaaacagagaaga

SEQ ID NO: 349439 - DNA, 15 bp, Homo sapiens
aaacaaacagagaag

SEQ ID NO: 349440 - DNA, 15 bp, Homo sapiens
aaaacaaacagagaa

SEQ ID NO: 349441 - DNA, 15 bp, Homo sapiens
aaaaacaaacagaga

SEQ ID NO: 349442 - DNA, 15 bp, Homo sapiens
caaaaacaaacagag

SEQ ID NO: 349443 - DNA, 15 bp, Homo sapiens
acaaaaacaaacaga

SEQ ID NO: 349444 - DNA, 15 bp, Homo sapiens
aacaaaaacaaacag

SEQ ID NO: 349445 - DNA, 15 bp, Homo sapiens
gaacaaaaacaaaca

SEQ ID NO: 349446 - DNA, 15 bp, Homo sapiens
tgaacaaaaacaaac

SEQ ID NO: 349447 - DNA, 15 bp, Homo sapiens
gtgaacaaaaacaaa

SEQ ID NO: 349448 - DNA, 15 bp, Homo sapiens
agtgaacaaaaacaa

SEQ ID NO: 349449 - DNA, 15 bp, Homo sapiens
cagtgaacaaaaaca

SEQ ID NO: 349450 - DNA, 15 bp, Homo sapiens
tcagtgaacaaaaac

SEQ ID NO: 349451 - DNA, 15 bp, Homo sapiens
ctcagtgaacaaaaa

SEQ ID NO: 349452 - DNA, 15 bp, Homo sapiens
gctcagtgaacaaaa

SEQ ID NO: 349453 - DNA, 15 bp, Homo sapiens
tgctcagtgaacaaa

SEQ ID NO: 349454 - DNA, 15 bp, Homo sapiens
ctgctcagtgaacaa

SEQ ID NO: 349455 - DNA, 15 bp, Homo sapiens
actgctcagtgaaca

SEQ ID NO: 349456 - DNA, 15 bp, Homo sapiens
tactgctcagtgaac

SEQ ID NO: 349457 - DNA, 15 bp, Homo sapiens
atactgctcagtgaa

SEQ ID NO: 349458 - DNA, 15 bp, Homo sapiens
tatactgctcagtga

SEQ ID NO: 349459 - DNA, 15 bp, Homo sapiens
atatactgctcagtg

SEQ ID NO: 349460 - DNA, 15 bp, Homo sapiens
aatatactgctcagt

SEQ ID NO: 349461 - DNA, 15 bp, Homo sapiens
taatatactgctcag

SEQ ID NO: 349462 - DNA, 15 bp, Homo sapiens
ttaatatactgctca

SEQ ID NO: 349463 - DNA, 15 bp, Homo sapiens
attaatatactgctc

SEQ ID NO: 349464 - DNA, 15 bp, Homo sapiens
aattaatatactgct

SEQ ID NO: 349465 - DNA, 15 bp, Homo sapiens
taattaatatactgc

SEQ ID NO: 349466 - DNA, 15 bp, Homo sapiens
ttaattaatatactg

SEQ ID NO: 349467 - DNA, 15 bp, Homo sapiens
attaattaatatact

SEQ ID NO: 349468 - DNA, 15 bp, Homo sapiens
gattaattaatatac

SEQ ID NO: 349469 - DNA, 15 bp, Homo sapiens
ggattaattaatata

SEQ ID NO: 349470 - DNA, 15 bp, Homo sapiens
aggattaattaatat

SEQ ID NO: 349471 - DNA, 15 bp, Homo sapiens
caggattaattaata

SEQ ID NO: 349472 - DNA, 15 bp, Homo sapiens
ccaggattaattaat

SEQ ID NO: 349473 - DNA, 15 bp, Homo sapiens
tccaggattaattaa

SEQ ID NO: 349474 - DNA, 15 bp, Homo sapiens
ttccaggattaatta

SEQ ID NO: 349475 - DNA, 15 bp, Homo sapiens
tttccaggattaatt

SEQ ID NO: 349476 - DNA, 15 bp, Homo sapiens
gtttccaggattaat

SEQ ID NO: 349477 - DNA, 15 bp, Homo sapiens
ggtttccaggattaa

SEQ ID NO: 349478 - DNA, 15 bp, Homo sapiens
tggtttccaggatta

SEQ ID NO: 349479 - DNA, 15 bp, Homo sapiens
atggtttccaggatt

SEQ ID NO: 349480 - DNA, 15 bp, Homo sapiens
gatggtttccaggat

SEQ ID NO: 349481 - DNA, 15 bp, Homo sapiens
agatggtttccagga

SEQ ID NO: 349482 - DNA, 15 bp, Homo sapiens
aagatggtttccagg

SEQ ID NO: 349483 - DNA, 15 bp, Homo sapiens
taagatggtttccag

SEQ ID NO: 349484 - DNA, 15 bp, Homo sapiens
ttaagatggtttcca

SEQ ID NO: 349485 - DNA, 15 bp, Homo sapiens
cttaagatggtttcc

SEQ ID NO: 349486 - DNA, 15 bp, Homo sapiens
tcttaagatggtttc

SEQ ID NO: 349487 - DNA, 15 bp, Homo sapiens
atcttaagatggttt

SEQ ID NO: 349488 - DNA, 15 bp, Homo sapiens
gatcttaagatggtt

SEQ ID NO: 349489 - DNA, 15 bp, Homo sapiens
ggatcttaagatggt

SEQ ID NO: 349490 - DNA, 15 bp, Homo sapiens
tggatcttaagatgg

SEQ ID NO: 349491 - DNA, 15 bp, Homo sapiens
ttggatcttaagatg

SEQ ID NO: 349492 - DNA, 15 bp, Homo sapiens
cttggatcttaagat

SEQ ID NO: 349493 - DNA, 15 bp, Homo sapiens
tcttggatcttaaga

SEQ ID NO: 349494 - DNA, 15 bp, Homo sapiens
ttcttggatcttaag

SEQ ID NO: 349495 - DNA, 15 bp, Homo sapiens
cttcttggatcttaa

SEQ ID NO: 349496 - DNA, 15 bp, Homo sapiens
ccttcttggatctta

SEQ ID NO: 349497 - DNA, 15 bp, Homo sapiens
accttcttggatctt

SEQ ID NO: 349498 - DNA, 15 bp, Homo sapiens
taccttcttggatct

SEQ ID NO: 349499 - DNA, 15 bp, Homo sapiens
gtaccttcttggatc

SEQ ID NO: 349500 - DNA, 15 bp, Homo sapiens
agtaccttcttggat

SEQ ID NO: 349501 - DNA, 15 bp, Homo sapiens
aagtaccttcttgga

SEQ ID NO: 349502 - DNA, 15 bp, Homo sapiens
aaagtaccttcttgg

SEQ ID NO: 349503 - DNA, 15 bp, Homo sapiens
taaagtaccttcttg

SEQ ID NO: 349504 - DNA, 15 bp, Homo sapiens
ctaaagtaccttctt

SEQ ID NO: 349505 - DNA, 15 bp, Homo sapiens
cctaaagtaccttct

SEQ ID NO: 349506 - DNA, 15 bp, Homo sapiens
tcctaaagtaccttc

SEQ ID NO: 349507 - DNA, 15 bp, Homo sapiens
atcctaaagtacctt

SEQ ID NO: 349508 - DNA, 15 bp, Homo sapiens
aatcctaaagtacct

SEQ ID NO: 349509 - DNA, 15 bp, Homo sapiens
aaatcctaaagtacc

SEQ ID NO: 349510 - DNA, 15 bp, Homo sapiens
aaaatcctaaagtac

SEQ ID NO: 349511 - DNA, 15 bp, Homo sapiens
aaaaatcctaaagta

SEQ ID NO: 349512 - DNA, 15 bp, Homo sapiens
gaaaaatcctaaagt

SEQ ID NO: 349513 - DNA, 15 bp, Homo sapiens
tgaaaaatcctaaag

SEQ ID NO: 349514 - DNA, 15 bp, Homo sapiens
atgaaaaatcctaaa

SEQ ID NO: 349515 - DNA, 15 bp, Homo sapiens
gatgaaaaatcctaa

SEQ ID NO: 349516 - DNA, 15 bp, Homo sapiens
cgatgaaaaatccta

SEQ ID NO: 349517 - DNA, 15 bp, Homo sapiens
gcgatgaaaaatcct

SEQ ID NO: 349518 - DNA, 15 bp, Homo sapiens
tgcgatgaaaaatcc

SEQ ID NO: 349519 - DNA, 15 bp, Homo sapiens
ttgcgatgaaaaatc

SEQ ID NO: 349520 - DNA, 15 bp, Homo sapiens
cttgcgatgaaaaat

SEQ ID NO: 349521 - DNA, 15 bp, Homo sapiens
acttgcgatgaaaaa

SEQ ID NO: 349522 - DNA, 15 bp, Homo sapiens
cacttgcgatgaaaa

SEQ ID NO: 349523 - DNA, 15 bp, Homo sapiens
tcacttgcgatgaaa

SEQ ID NO: 349524 - DNA, 15 bp, Homo sapiens
atcacttgcgatgaa

SEQ ID NO: 349525 - DNA, 15 bp, Homo sapiens
catcacttgcgatga

SEQ ID NO: 349526 - DNA, 15 bp, Homo sapiens
gcatcacttgcgatg

SEQ ID NO: 349527 - DNA, 15 bp, Homo sapiens
ggcatcacttgcgat

SEQ ID NO: 349528 - DNA, 15 bp, Homo sapiens
tggcatcacttgcga

SEQ ID NO: 349529 - DNA, 15 bp, Homo sapiens
ttggcatcacttgcg

SEQ ID NO: 349530 - DNA, 15 bp, Homo sapiens
tttggcatcacttgc

SEQ ID NO: 349531 - DNA, 15 bp, Homo sapiens
ctttggcatcacttg

SEQ ID NO: 349532 - DNA, 15 bp, Homo sapiens
tctttggcatcactt

SEQ ID NO: 349533 - DNA, 15 bp, Homo sapiens
ttctttggcatcact

SEQ ID NO: 349534 - DNA, 15 bp, Homo sapiens
cttctttggcatcac

SEQ ID NO: 349535 - DNA, 15 bp, Homo sapiens
acttctttggcatca

SEQ ID NO: 349536 - DNA, 15 bp, Homo sapiens
aacttctttggcatc

SEQ ID NO: 349537 - DNA, 15 bp, Homo sapiens
taacttctttggcat

SEQ ID NO: 349538 - DNA, 15 bp, Homo sapiens
ttaacttctttggca

SEQ ID NO: 349539 - DNA, 15 bp, Homo sapiens
tttaacttctttggc

SEQ ID NO: 349540 - DNA, 15 bp, Homo sapiens
ttttaacttctttgg

SEQ ID NO: 349541 - DNA, 15 bp, Homo sapiens
cttttaacttctttg

SEQ ID NO: 349542 - DNA, 15 bp, Homo sapiens
ccttttaacttcttt

SEQ ID NO: 349543 - DNA, 15 bp, Homo sapiens
accttttaacttctt

SEQ ID NO: 349544 - DNA, 15 bp, Homo sapiens
taccttttaacttct

SEQ ID NO: 349545 - DNA, 15 bp, Homo sapiens
ttaccttttaacttc

SEQ ID NO: 349546 - DNA, 15 bp, Homo sapiens
cttaccttttaactt

SEQ ID NO: 349547 - DNA, 15 bp, Homo sapiens
tcttaccttttaact

SEQ ID NO: 349548 - DNA, 15 bp, Homo sapiens
ctcttaccttttaac

SEQ ID NO: 349549 - DNA, 15 bp, Homo sapiens
actcttaccttttaa

SEQ ID NO: 349550 - DNA, 15 bp, Homo sapiens
aactcttacctttta

SEQ ID NO: 349551 - DNA, 15 bp, Homo sapiens
aaactcttacctttt

SEQ ID NO: 349552 - DNA, 15 bp, Homo sapiens
taaactcttaccttt

SEQ ID NO: 349553 - DNA, 15 bp, Homo sapiens
ataaactcttacctt

SEQ ID NO: 349554 - DNA, 15 bp, Homo sapiens
aataaactcttacct

SEQ ID NO: 349555 - DNA, 15 bp, Homo sapiens
aaataaactcttacc

SEQ ID NO: 349556 - DNA, 15 bp, Homo sapiens
aaaataaactcttac

SEQ ID NO: 349557 - DNA, 15 bp, Homo sapiens
gaaaataaactctta

SEQ ID NO: 349558 - DNA, 15 bp, Homo sapiens
tgaaaataaactctt

SEQ ID NO: 349559 - DNA, 15 bp, Homo sapiens
ttgaaaataaactct

SEQ ID NO: 349560 - DNA, 15 bp, Homo sapiens
gttgaaaataaactc

SEQ ID NO: 349561 - DNA, 15 bp, Homo sapiens
agttgaaaataaact

SEQ ID NO: 349562 - DNA, 15 bp, Homo sapiens
cagttgaaaataaac

SEQ ID NO: 349563 - DNA, 15 bp, Homo sapiens
ccagttgaaaataaa

SEQ ID NO: 349564 - DNA, 15 bp, Homo sapiens
gccagttgaaaataa

SEQ ID NO: 349565 - DNA, 15 bp, Homo sapiens
agccagttgaaaata

SEQ ID NO: 349566 - DNA, 15 bp, Homo sapiens
aagccagttgaaaat

SEQ ID NO: 349567 - DNA, 15 bp, Homo sapiens
aaagccagttgaaaa

SEQ ID NO: 349568 - DNA, 15 bp, Homo sapiens
gaaagccagttgaaa

SEQ ID NO: 349569 - DNA, 15 bp, Homo sapiens
agaaagccagttgaa

SEQ ID NO: 349570 - DNA, 15 bp, Homo sapiens
aagaaagccagttga

SEQ ID NO: 349571 - DNA, 15 bp, Homo sapiens
aaagaaagccagttg

SEQ ID NO: 349572 - DNA, 15 bp, Homo sapiens
gaaagaaagccagtt

SEQ ID NO: 349573 - DNA, 15 bp, Homo sapiens
agaaagaaagccagt

SEQ ID NO: 349574 - DNA, 15 bp, Homo sapiens
cagaaagaaagccag

SEQ ID NO: 349575 - DNA, 15 bp, Homo sapiens
ccagaaagaaagcca

SEQ ID NO: 349576 - DNA, 15 bp, Homo sapiens
gccagaaagaaagcc

SEQ ID NO: 349577 - DNA, 15 bp, Homo sapiens
ggccagaaagaaagc

SEQ ID NO: 349578 - DNA, 15 bp, Homo sapiens
gggccagaaagaaag

SEQ ID NO: 349579 - DNA, 15 bp, Homo sapiens
cgggccagaaagaaa

SEQ ID NO: 349580 - DNA, 15 bp, Homo sapiens
ccgggccagaaagaa

SEQ ID NO: 349581 - DNA, 15 bp, Homo sapiens
gccgggccagaaaga

SEQ ID NO: 349582 - DNA, 15 bp, Homo sapiens
agccgggccagaaag

SEQ ID NO: 349583 - DNA, 15 bp, Homo sapiens
cagccgggccagaaa

SEQ ID NO: 349584 - DNA, 15 bp, Homo sapiens
acagccgggccagaa

SEQ ID NO: 349585 - DNA, 15 bp, Homo sapiens
tacagccgggccaga

SEQ ID NO: 349586 - DNA, 15 bp, Homo sapiens
ctacagccgggccag

SEQ ID NO: 349587 - DNA, 15 bp, Homo sapiens
tctacagccgggcca

SEQ ID NO: 349588 - DNA, 15 bp, Homo sapiens
gtctacagccgggcc

SEQ ID NO: 349589 - DNA, 15 bp, Homo sapiens
tgtctacagccgggc

SEQ ID NO: 349590 - DNA, 15 bp, Homo sapiens
gtgtctacagccggg

SEQ ID NO: 349591 - DNA, 15 bp, Homo sapiens
ggtgtctacagccgg

SEQ ID NO: 349592 - DNA, 15 bp, Homo sapiens
aggtgtctacagccg

SEQ ID NO: 349593 - DNA, 15 bp, Homo sapiens
aaggtgtctacagcc

SEQ ID NO: 349594 - DNA, 15 bp, Homo sapiens
caaggtgtctacagc

SEQ ID NO: 349595 - DNA, 15 bp, Homo sapiens
tcaaggtgtctacag

SEQ ID NO: 349596 - DNA, 15 bp, Homo sapiens
gtcaaggtgtctaca

SEQ ID NO: 349597 - DNA, 15 bp, Homo sapiens
ggtcaaggtgtctac

SEQ ID NO: 349598 - DNA, 15 bp, Homo sapiens
gggtcaaggtgtcta

SEQ ID NO: 349599 - DNA, 15 bp, Homo sapiens
tgggtcaaggtgtct

SEQ ID NO: 349600 - DNA, 15 bp, Homo sapiens
gtgggtcaaggtgtc

SEQ ID NO: 349601 - DNA, 15 bp, Homo sapiens
cgtgggtcaaggtgt

SEQ ID NO: 349602 - DNA, 15 bp, Homo sapiens
ccgtgggtcaaggtg

SEQ ID NO: 349603 - DNA, 15 bp, Homo sapiens
tccgtgggtcaaggt

SEQ ID NO: 349604 - DNA, 15 bp, Homo sapiens
ttccgtgggtcaagg

SEQ ID NO: 349605 - DNA, 15 bp, Homo sapiens
cttccgtgggtcaag

SEQ ID NO: 349606 - DNA, 15 bp, Homo sapiens
acttccgtgggtcaa

SEQ ID NO: 349607 - DNA, 15 bp, Homo sapiens
tacttccgtgggtca

SEQ ID NO: 349608 - DNA, 15 bp, Homo sapiens
ctacttccgtgggtc

SEQ ID NO: 349609 - DNA, 15 bp, Homo sapiens
cctacttccgtgggt

SEQ ID NO: 349610 - DNA, 15 bp, Homo sapiens
gcctacttccgtggg

SEQ ID NO: 349611 - DNA, 15 bp, Homo sapiens
tgcctacttccgtgg

SEQ ID NO: 349612 - DNA, 15 bp, Homo sapiens
ctgcctacttccgtg

SEQ ID NO: 349613 - DNA, 15 bp, Homo sapiens
cctgcctacttccgt

SEQ ID NO: 349614 - DNA, 15 bp, Homo sapiens
gcctgcctacttccg

SEQ ID NO: 349615 - DNA, 15 bp, Homo sapiens
agcctgcctacttcc

SEQ ID NO: 349616 - DNA, 15 bp, Homo sapiens
aagcctgcctacttc

SEQ ID NO: 349617 - DNA, 15 bp, Homo sapiens
gaagcctgcctactt

SEQ ID NO: 349618 - DNA, 15 bp, Homo sapiens
ggaagcctgcctact

SEQ ID NO: 349619 - DNA, 15 bp, Homo sapiens
tggaagcctgcctac

SEQ ID NO: 349620 - DNA, 15 bp, Homo sapiens
atggaagcctgccta

SEQ ID NO: 349621 - DNA, 15 bp, Homo sapiens
tatggaagcctgcct

SEQ ID NO: 349622 - DNA, 15 bp, Homo sapiens
ttatggaagcctgcc

SEQ ID NO: 349623 - DNA, 15 bp, Homo sapiens
gttatggaagcctgc

SEQ ID NO: 349624 - DNA, 15 bp, Homo sapiens
ggttatggaagcctg

SEQ ID NO: 349625 - DNA, 15 bp, Homo sapiens
gggttatggaagcct

SEQ ID NO: 349626 - DNA, 15 bp, Homo sapiens
ggggttatggaagcc

SEQ ID NO: 349627 - DNA, 15 bp, Homo sapiens
tggggttatggaagc

SEQ ID NO: 349628 - DNA, 15 bp, Homo sapiens
ttggggttatggaag

SEQ ID NO: 349629 - DNA, 15 bp, Homo sapiens
tttggggttatggaa

SEQ ID NO: 349630 - DNA, 15 bp, Homo sapiens
ttttggggttatgga

SEQ ID NO: 349631 - DNA, 15 bp, Homo sapiens
gttttggggttatgg

SEQ ID NO: 349632 - DNA, 15 bp, Homo sapiens
agttttggggttatg

SEQ ID NO: 349633 - DNA, 15 bp, Homo sapiens
gagttttggggttat

SEQ ID NO: 349634 - DNA, 15 bp, Homo sapiens
ggagttttggggtta

SEQ ID NO: 349635 - DNA, 15 bp, Homo sapiens
aggagttttggggtt

SEQ ID NO: 349636 - DNA, 15 bp, Homo sapiens
aaggagttttggggt

SEQ ID NO: 349637 - DNA, 15 bp, Homo sapiens
taaggagttttgggg

SEQ ID NO: 349638 - DNA, 15 bp, Homo sapiens
ttaaggagttttggg

SEQ ID NO: 349639 - DNA, 15 bp, Homo sapiens
gttaaggagttttgg

SEQ ID NO: 349640 - DNA, 15 bp, Homo sapiens
tgttaaggagttttg

SEQ ID NO: 349641 - DNA, 15 bp, Homo sapiens
atgttaaggagtttt

SEQ ID NO: 349642 - DNA, 15 bp, Homo sapiens
catgttaaggagttt

SEQ ID NO: 349643 - DNA, 15 bp, Homo sapiens
acatgttaaggagtt

SEQ ID NO: 349644 - DNA, 15 bp, Homo sapiens
gacatgttaaggagt

SEQ ID NO: 349645 - DNA, 15 bp, Homo sapiens
agacatgttaaggag

SEQ ID NO: 349646 - DNA, 15 bp, Homo sapiens
tagacatgttaagga

SEQ ID NO: 349647 - DNA, 15 bp, Homo sapiens
atagacatgttaagg

SEQ ID NO: 349648 - DNA, 15 bp, Homo sapiens
catagacatgttaag

SEQ ID NO: 349649 - DNA, 15 bp, Homo sapiens
ccatagacatgttaa

SEQ ID NO: 349650 - DNA, 15 bp, Homo sapiens
gccatagacatgtta

SEQ ID NO: 349651 - DNA, 15 bp, Homo sapiens
ggccatagacatgtt

SEQ ID NO: 349652 - DNA, 15 bp, Homo sapiens
tggccatagacatgt

SEQ ID NO: 349653 - DNA, 15 bp, Homo sapiens
atggccatagacatg

SEQ ID NO: 349654 - DNA, 15 bp, Homo sapiens
gatggccatagacat

SEQ ID NO: 349655 - DNA, 15 bp, Homo sapiens
tgatggccatagaca

SEQ ID NO: 349656 - DNA, 15 bp, Homo sapiens
ttgatggccatagac

SEQ ID NO: 349657 - DNA, 15 bp, Homo sapiens
gttgatggccataga

SEQ ID NO: 349658 - DNA, 15 bp, Homo sapiens
agttgatggccatag

SEQ ID NO: 349659 - DNA, 15 bp, Homo sapiens
cagttgatggccata

SEQ ID NO: 349660 - DNA, 15 bp, Homo sapiens
ccagttgatggccat

SEQ ID NO: 349661 - DNA, 15 bp, Homo sapiens
accagttgatggcca

SEQ ID NO: 349662 - DNA, 15 bp, Homo sapiens
caccagttgatggcc

SEQ ID NO: 349663 - DNA, 15 bp, Homo sapiens
acaccagttgatggc

SEQ ID NO: 349664 - DNA, 15 bp, Homo sapiens
tacaccagttgatgg

SEQ ID NO: 349665 - DNA, 15 bp, Homo sapiens
ttacaccagttgatg

SEQ ID NO: 349666 - DNA, 15 bp, Homo sapiens
cttacaccagttgat

SEQ ID NO: 349667 - DNA, 15 bp, Homo sapiens
tcttacaccagttga

SEQ ID NO: 349668 - DNA, 15 bp, Homo sapiens
ttcttacaccagttg

SEQ ID NO: 349669 - DNA, 15 bp, Homo sapiens
tttcttacaccagtt

SEQ ID NO: 349670 - DNA, 15 bp, Homo sapiens
ttttcttacaccagt

SEQ ID NO: 349671 - DNA, 15 bp, Homo sapiens
tttttcttacaccag

SEQ ID NO: 349672 - DNA, 15 bp, Homo sapiens
gtttttcttacacca

SEQ ID NO: 349673 - DNA, 15 bp, Homo sapiens
agtttttcttacacc

SEQ ID NO: 349674 - DNA, 15 bp, Homo sapiens
aagtttttcttacac

SEQ ID NO: 349675 - DNA, 15 bp, Homo sapiens
gaagtttttcttaca

SEQ ID NO: 349676 - DNA, 15 bp, Homo sapiens
ggaagtttttcttac

SEQ ID NO: 349677 - DNA, 15 bp, Homo sapiens
tggaagtttttctta

SEQ ID NO: 349678 - DNA, 15 bp, Homo sapiens
gtggaagtttttctt

SEQ ID NO: 349679 - DNA, 15 bp, Homo sapiens
cgtggaagtttttct

SEQ ID NO: 349680 - DNA, 15 bp, Homo sapiens
ccgtggaagtttttc

SEQ ID NO: 349681 - DNA, 15 bp, Homo sapiens
tccgtggaagttttt

SEQ ID NO: 349682 - DNA, 15 bp, Homo sapiens
gtccgtggaagtttt

SEQ ID NO: 349683 - DNA, 15 bp, Homo sapiens
agtccgtggaagttt

SEQ ID NO: 349684 - DNA, 15 bp, Homo sapiens
gagtccgtggaagtt

SEQ ID NO: 349685 - DNA, 15 bp, Homo sapiens
ggagtccgtggaagt

SEQ ID NO: 349686 - DNA, 15 bp, Homo sapiens
tggagtccgtggaag

SEQ ID NO: 349687 - DNA, 15 bp, Homo sapiens
ctggagtccgtggaa

SEQ ID NO: 349688 - DNA, 15 bp, Homo sapiens
actggagtccgtgga

SEQ ID NO: 349689 - DNA, 15 bp, Homo sapiens
aactggagtccgtgg

SEQ ID NO: 349690 - DNA, 15 bp, Homo sapiens
gaactggagtccgtg

SEQ ID NO: 349691 - DNA, 15 bp, Homo sapiens
tgaactggagtccgt

SEQ ID NO: 349692 - DNA, 15 bp, Homo sapiens
atgaactggagtccg

SEQ ID NO: 349693 - DNA, 15 bp, Homo sapiens
catgaactggagtcc

SEQ ID NO: 349694 - DNA, 15 bp, Homo sapiens
acatgaactggagtc

SEQ ID NO: 349695 - DNA, 15 bp, Homo sapiens
tacatgaactggagt

SEQ ID NO: 349696 - DNA, 15 bp, Homo sapiens
ctacatgaactggag

SEQ ID NO: 349697 - DNA, 15 bp, Homo sapiens
actacatgaactgga

SEQ ID NO: 349698 - DNA, 15 bp, Homo sapiens
cactacatgaactgg

SEQ ID NO: 349699 - DNA, 15 bp, Homo sapiens
tcactacatgaactg

SEQ ID NO: 349700 - DNA, 15 bp, Homo sapiens
ttcactacatgaact

SEQ ID NO: 349701 - DNA, 15 bp, Homo sapiens
attcactacatgaac

SEQ ID NO: 349702 - DNA, 15 bp, Homo sapiens
aattcactacatgaa

SEQ ID NO: 349703 - DNA, 15 bp, Homo sapiens
gaattcactacatga

SEQ ID NO: 349704 - DNA, 15 bp, Homo sapiens
ggaattcactacatg

SEQ ID NO: 349705 - DNA, 15 bp, Homo sapiens
tggaattcactacat

SEQ ID NO: 349706 - DNA, 15 bp, Homo sapiens
gtggaattcactaca

SEQ ID NO: 349707 - DNA, 15 bp, Homo sapiens
tgtggaattcactac

SEQ ID NO: 349708 - DNA, 15 bp, Homo sapiens
atgtggaattcacta

SEQ ID NO: 349709 - DNA, 15 bp, Homo sapiens
gatgtggaattcact

SEQ ID NO: 349710 - DNA, 15 bp, Homo sapiens
agatgtggaattcac

SEQ ID NO: 349711 - DNA, 15 bp, Homo sapiens
aagatgtggaattca

SEQ ID NO: 349712 - DNA, 15 bp, Homo sapiens
aaagatgtggaattc

SEQ ID NO: 349713 - DNA, 15 bp, Homo sapiens
caaagatgtggaatt

SEQ ID NO: 349714 - DNA, 15 bp, Homo sapiens
tcaaagatgtggaat

SEQ ID NO: 349715 - DNA, 15 bp, Homo sapiens
ttcaaagatgtggaa

SEQ ID NO: 349716 - DNA, 15 bp, Homo sapiens
attcaaagatgtgga

SEQ ID NO: 349717 - DNA, 15 bp, Homo sapiens
cattcaaagatgtgg

SEQ ID NO: 349718 - DNA, 15 bp, Homo sapiens
tcattcaaagatgtg

SEQ ID NO: 349719 - DNA, 15 bp, Homo sapiens
ctcattcaaagatgt

SEQ ID NO: 349720 - DNA, 15 bp, Homo sapiens
tctcattcaaagatg

SEQ ID NO: 349721 - DNA, 15 bp, Homo sapiens
ttctcattcaaagat

SEQ ID NO: 349722 - DNA, 15 bp, Homo sapiens
attctcattcaaaga

SEQ ID NO: 349723 - DNA, 15 bp, Homo sapiens
tattctcattcaaag

SEQ ID NO: 349724 - DNA, 15 bp, Homo sapiens
ttattctcattcaaa

SEQ ID NO: 349725 - DNA, 15 bp, Homo sapiens
attattctcattcaa

SEQ ID NO: 349726 - DNA, 15 bp, Homo sapiens
tattattctcattca

SEQ ID NO: 349727 - DNA, 15 bp, Homo sapiens
ttattattctcattc

SEQ ID NO: 349728 - DNA, 15 bp, Homo sapiens
tttattattctcatt

SEQ ID NO: 349729 - DNA, 15 bp, Homo sapiens
ttttattattctcat

SEQ ID NO: 349730 - DNA, 15 bp, Homo sapiens
attttattattctca

SEQ ID NO: 349731 - DNA, 15 bp, Homo sapiens
aattttattattctc

SEQ ID NO: 349732 - DNA, 15 bp, Homo sapiens
aaattttattattct

SEQ ID NO: 349733 - DNA, 15 bp, Homo sapiens
aaaattttattattc

SEQ ID NO: 349734 - DNA, 15 bp, Homo sapiens
taaaattttattatt

SEQ ID NO: 349735 - DNA, 15 bp, Homo sapiens
ctaaaattttattat

SEQ ID NO: 349736 - DNA, 15 bp, Homo sapiens
tctaaaattttatta

SEQ ID NO: 349737 - DNA, 15 bp, Homo sapiens
ttctaaaattttatt

SEQ ID NO: 349738 - DNA, 15 bp, Homo sapiens
gttctaaaattttat

SEQ ID NO: 349739 - DNA, 15 bp, Homo sapiens
agttctaaaatttta

SEQ ID NO: 349740 - DNA, 15 bp, Homo sapiens
tagttctaaaatttt

SEQ ID NO: 349741 - DNA, 15 bp, Homo sapiens
ctagttctaaaattt

SEQ ID NO: 349742 - DNA, 15 bp, Homo sapiens
cctagttctaaaatt

SEQ ID NO: 349743 - DNA, 15 bp, Homo sapiens
tcctagttctaaaat

SEQ ID NO: 349744 - DNA, 15 bp, Homo sapiens
ttcctagttctaaaa

SEQ ID NO: 349745 - DNA, 15 bp, Homo sapiens
cttcctagttctaaa

SEQ ID NO: 349746 - DNA, 15 bp, Homo sapiens
gcttcctagttctaa

SEQ ID NO: 349747 - DNA, 15 bp, Homo sapiens
ggcttcctagttcta

SEQ ID NO: 349748 - DNA, 15 bp, Homo sapiens
aggcttcctagttct

SEQ ID NO: 349749 - DNA, 15 bp, Homo sapiens
taggcttcctagttc

SEQ ID NO: 349750 - DNA, 15 bp, Homo sapiens
ctaggcttcctagtt

SEQ ID NO: 349751 - DNA, 15 bp, Homo sapiens
actaggcttcctagt

SEQ ID NO: 349752 - DNA, 15 bp, Homo sapiens
aactaggcttcctag

SEQ ID NO: 349753 - DNA, 15 bp, Homo sapiens
taactaggcttccta

SEQ ID NO: 349754 - DNA, 15 bp, Homo sapiens
gtaactaggcttcct

SEQ ID NO: 349755 - DNA, 15 bp, Homo sapiens
ggtaactaggcttcc

SEQ ID NO: 349756 - DNA, 15 bp, Homo sapiens
aggtaactaggcttc

SEQ ID NO: 349757 - DNA, 15 bp, Homo sapiens
caggtaactaggctt

SEQ ID NO: 349758 - DNA, 15 bp, Homo sapiens
gcaggtaactaggct

SEQ ID NO: 349759 - DNA, 15 bp, Homo sapiens
agcaggtaactaggc

SEQ ID NO: 349760 - DNA, 15 bp, Homo sapiens
gagcaggtaactagg

SEQ ID NO: 349761 - DNA, 15 bp, Homo sapiens
tgagcaggtaactag

SEQ ID NO: 349762 - DNA, 15 bp, Homo sapiens
atgagcaggtaacta

SEQ ID NO: 349763 - DNA, 15 bp, Homo sapiens
aatgagcaggtaact

SEQ ID NO: 349764 - DNA, 15 bp, Homo sapiens
aaatgagcaggtaac

SEQ ID NO: 349765 - DNA, 15 bp, Homo sapiens
taaatgagcaggtaa

SEQ ID NO: 349766 - DNA, 15 bp, Homo sapiens
ataaatgagcaggta

SEQ ID NO: 349767 - DNA, 15 bp, Homo sapiens
aataaatgagcaggt

SEQ ID NO: 349768 - DNA, 15 bp, Homo sapiens
aaataaatgagcagg

SEQ ID NO: 349769 - DNA, 15 bp, Homo sapiens
aaaataaatgagcag

SEQ ID NO: 349770 - DNA, 15 bp, Homo sapiens
caaaataaatgagca

SEQ ID NO: 349771 - DNA, 15 bp, Homo sapiens
acaaaataaatgagc

SEQ ID NO: 349772 - DNA, 15 bp, Homo sapiens
cacaaaataaatgag

SEQ ID NO: 349773 - DNA, 15 bp, Homo sapiens
tcacaaaataaatga

SEQ ID NO: 349774 - DNA, 15 bp, Homo sapiens
ctcacaaaataaatg

SEQ ID NO: 349775 - DNA, 15 bp, Homo sapiens
cctcacaaaataaat

SEQ ID NO: 349776 - DNA, 15 bp, Homo sapiens
ccctcacaaaataaa

SEQ ID NO: 349777 - DNA, 15 bp, Homo sapiens
tccctcacaaaataa

SEQ ID NO: 349778 - DNA, 15 bp, Homo sapiens
ctccctcacaaaata

SEQ ID NO: 349779 - DNA, 15 bp, Homo sapiens
tctccctcacaaaat

SEQ ID NO: 349780 - DNA, 15 bp, Homo sapiens
ttctccctcacaaaa

SEQ ID NO: 349781 - DNA, 15 bp, Homo sapiens
tttctccctcacaaa

SEQ ID NO: 349782 - DNA, 15 bp, Homo sapiens
ttttctccctcacaa

SEQ ID NO: 349783 - DNA, 15 bp, Homo sapiens
attttctccctcaca

SEQ ID NO: 349784 - DNA, 15 bp, Homo sapiens
cattttctccctcac

SEQ ID NO: 349785 - DNA, 15 bp, Homo sapiens
ccattttctccctca

SEQ ID NO: 349786 - DNA, 15 bp, Homo sapiens
cccattttctccctc

SEQ ID NO: 349787 - DNA, 15 bp, Homo sapiens
ccccattttctccct

SEQ ID NO: 349788 - DNA, 15 bp, Homo sapiens
cccccattttctccc

SEQ ID NO: 349789 - DNA, 15 bp, Homo sapiens
gcccccattttctcc

SEQ ID NO: 349790 - DNA, 15 bp, Homo sapiens
agcccccattttctc

SEQ ID NO: 349791 - DNA, 15 bp, Homo sapiens
gagcccccattttct

SEQ ID NO: 349792 - DNA, 15 bp, Homo sapiens
tgagcccccattttc

SEQ ID NO: 349793 - DNA, 15 bp, Homo sapiens
ctgagcccccatttt

SEQ ID NO: 349794 - DNA, 15 bp, Homo sapiens
tctgagcccccattt

SEQ ID NO: 349795 - DNA, 15 bp, Homo sapiens
ctctgagcccccatt

SEQ ID NO: 349796 - DNA, 15 bp, Homo sapiens
tctctgagcccccat

SEQ ID NO: 349797 - DNA, 15 bp, Homo sapiens
ctctctgagccccca

SEQ ID NO: 349798 - DNA, 15 bp, Homo sapiens
gctctctgagccccc

SEQ ID NO: 349799 - DNA, 15 bp, Homo sapiens
agctctctgagcccc

SEQ ID NO: 349800 - DNA, 15 bp, Homo sapiens
cagctctctgagccc

SEQ ID NO: 349801 - DNA, 15 bp, Homo sapiens
tcagctctctgagcc

SEQ ID NO: 349802 - DNA, 15 bp, Homo sapiens
ttcagctctctgagc

SEQ ID NO: 349803 - DNA, 15 bp, Homo sapiens
attcagctctctgag

SEQ ID NO: 349804 - DNA, 15 bp, Homo sapiens
cattcagctctctga

SEQ ID NO: 349805 - DNA, 15 bp, Homo sapiens
tcattcagctctctg

SEQ ID NO: 349806 - DNA, 15 bp, Homo sapiens
gtcattcagctctct

SEQ ID NO: 349807 - DNA, 15 bp, Homo sapiens
agtcattcagctctc

SEQ ID NO: 349808 - DNA, 15 bp, Homo sapiens
cagtcattcagctct

SEQ ID NO: 349809 - DNA, 15 bp, Homo sapiens
gcagtcattcagctc

SEQ ID NO: 349810 - DNA, 15 bp, Homo sapiens
agcagtcattcagct

SEQ ID NO: 349811 - DNA, 15 bp, Homo sapiens
gagcagtcattcagc

SEQ ID NO: 349812 - DNA, 15 bp, Homo sapiens
cgagcagtcattcag

SEQ ID NO: 349813 - DNA, 15 bp, Homo sapiens
tcgagcagtcattca

SEQ ID NO: 349814 - DNA, 15 bp, Homo sapiens
ctcgagcagtcattc

SEQ ID NO: 349815 - DNA, 15 bp, Homo sapiens
cctcgagcagtcatt

SEQ ID NO: 349816 - DNA, 15 bp, Homo sapiens
acctcgagcagtcat

SEQ ID NO: 349817 - DNA, 15 bp, Homo sapiens
gacctcgagcagtca

SEQ ID NO: 349818 - DNA, 15 bp, Homo sapiens
tgacctcgagcagtc

SEQ ID NO: 349819 - DNA, 15 bp, Homo sapiens
atgacctcgagcagt

SEQ ID NO: 349820 - DNA, 15 bp, Homo sapiens
gatgacctcgagcag

SEQ ID NO: 349821 - DNA, 15 bp, Homo sapiens
ggatgacctcgagca

SEQ ID NO: 349822 - DNA, 15 bp, Homo sapiens
aggatgacctcgagc

SEQ ID NO: 349823 - DNA, 15 bp, Homo sapiens
caggatgacctcgag

SEQ ID NO: 349824 - DNA, 15 bp, Homo sapiens
tcaggatgacctcga

SEQ ID NO: 349825 - DNA, 15 bp, Homo sapiens
atcaggatgacctcg

SEQ ID NO: 349826 - DNA, 15 bp, Homo sapiens
aatcaggatgacctc

SEQ ID NO: 349827 - DNA, 15 bp, Homo sapiens
gaatcaggatgacct

SEQ ID NO: 349828 - DNA, 15 bp, Homo sapiens
ggaatcaggatgacc

SEQ ID NO: 349829 - DNA, 15 bp, Homo sapiens
aggaatcaggatgac

SEQ ID NO: 349830 - DNA, 15 bp, Homo sapiens
caggaatcaggatga

SEQ ID NO: 349831 - DNA, 15 bp, Homo sapiens
tcaggaatcaggatg

SEQ ID NO: 349832 - DNA, 15 bp, Homo sapiens
atcaggaatcaggat

SEQ ID NO: 349833 - DNA, 15 bp, Homo sapiens
catcaggaatcagga

SEQ ID NO: 349834 - DNA, 15 bp, Homo sapiens
tcatcaggaatcagg

SEQ ID NO: 349835 - DNA, 15 bp, Homo sapiens
atcatcaggaatcag

SEQ ID NO: 349836 - DNA, 15 bp, Homo sapiens
aatcatcaggaatca

SEQ ID NO: 349837 - DNA, 15 bp, Homo sapiens
gaatcatcaggaatc

SEQ ID NO: 349838 - DNA, 15 bp, Homo sapiens
tgaatcatcaggaat

SEQ ID NO: 349839 - DNA, 15 bp, Homo sapiens
ctgaatcatcaggaa

SEQ ID NO: 349840 - DNA, 15 bp, Homo sapiens
tctgaatcatcagga

SEQ ID NO: 349841 - DNA, 15 bp, Homo sapiens
ttctgaatcatcagg

SEQ ID NO: 349842 - DNA, 15 bp, Homo sapiens
gttctgaatcatcag

SEQ ID NO: 349843 - DNA, 15 bp, Homo sapiens
tgttctgaatcatca

SEQ ID NO: 349844 - DNA, 15 bp, Homo sapiens
ttgttctgaatcatc

SEQ ID NO: 349845 - DNA, 15 bp, Homo sapiens
gttgttctgaatcat

SEQ ID NO: 349846 - DNA, 15 bp, Homo sapiens
tgttgttctgaatca

SEQ ID NO: 349847 - DNA, 15 bp, Homo sapiens
atgttgttctgaatc

SEQ ID NO: 349848 - DNA, 15 bp, Homo sapiens
tatgttgttctgaat

SEQ ID NO: 349849 - DNA, 15 bp, Homo sapiens
ttatgttgttctgaa

SEQ ID NO: 349850 - DNA, 15 bp, Homo sapiens
gttatgttgttctga

SEQ ID NO: 349851 - DNA, 15 bp, Homo sapiens
tgttatgttgttctg

SEQ ID NO: 349852 - DNA, 15 bp, Homo sapiens
ttgttatgttgttct

SEQ ID NO: 349853 - DNA, 15 bp, Homo sapiens
cttgttatgttgttc

SEQ ID NO: 349854 - DNA, 15 bp, Homo sapiens
tcttgttatgttgtt

SEQ ID NO: 349855 - DNA, 15 bp, Homo sapiens
gtcttgttatgttgt

SEQ ID NO: 349856 - DNA, 15 bp, Homo sapiens
tgtcttgttatgttg

SEQ ID NO: 349857 - DNA, 15 bp, Homo sapiens
ttgtcttgttatgtt

SEQ ID NO: 349858 - DNA, 15 bp, Homo sapiens
gttgtcttgttatgt

SEQ ID NO: 349859 - DNA, 15 bp, Homo sapiens
agttgtcttgttatg

SEQ ID NO: 349860 - DNA, 15 bp, Homo sapiens
cagttgtcttgttat

SEQ ID NO: 349861 - DNA, 15 bp, Homo sapiens
ccagttgtcttgtta

SEQ ID NO: 349862 - DNA, 15 bp, Homo sapiens
gccagttgtcttgtt

SEQ ID NO: 349863 - DNA, 15 bp, Homo sapiens
agccagttgtcttgt

SEQ ID NO: 349864 - DNA, 15 bp, Homo sapiens
gagccagttgtcttg

SEQ ID NO: 349865 - DNA, 15 bp, Homo sapiens
ggagccagttgtctt

SEQ ID NO: 349866 - DNA, 15 bp, Homo sapiens
aggagccagttgtct

SEQ ID NO: 349867 - DNA, 15 bp, Homo sapiens
aaggagccagttgtc

SEQ ID NO: 349868 - DNA, 15 bp, Homo sapiens
taaggagccagttgt

SEQ ID NO: 349869 - DNA, 15 bp, Homo sapiens
ataaggagccagttg

SEQ ID NO: 349870 - DNA, 15 bp, Homo sapiens
gataaggagccagtt

SEQ ID NO: 349871 - DNA, 15 bp, Homo sapiens
agataaggagccagt

SEQ ID NO: 349872 - DNA, 15 bp, Homo sapiens
tagataaggagccag

SEQ ID NO: 349873 - DNA, 15 bp, Homo sapiens
ctagataaggagcca

SEQ ID NO: 349874 - DNA, 15 bp, Homo sapiens
actagataaggagcc

SEQ ID NO: 349875 - DNA, 15 bp, Homo sapiens
cactagataaggagc

SEQ ID NO: 349876 - DNA, 15 bp, Homo sapiens
gcactagataaggag

SEQ ID NO: 349877 - DNA, 15 bp, Homo sapiens
agcactagataagga

SEQ ID NO: 349878 - DNA, 15 bp, Homo sapiens
gagcactagataagg

SEQ ID NO: 349879 - DNA, 15 bp, Homo sapiens
agagcactagataag

SEQ ID NO: 349880 - DNA, 15 bp, Homo sapiens
aagagcactagataa

SEQ ID NO: 349881 - DNA, 15 bp, Homo sapiens
aaagagcactagata

SEQ ID NO: 349882 - DNA, 15 bp, Homo sapiens
taaagagcactagat

SEQ ID NO: 349883 - DNA, 15 bp, Homo sapiens
gtaaagagcactaga

SEQ ID NO: 349884 - DNA, 15 bp, Homo sapiens
agtaaagagcactag

SEQ ID NO: 349885 - DNA, 15 bp, Homo sapiens
aagtaaagagcacta

SEQ ID NO: 349886 - DNA, 15 bp, Homo sapiens
taagtaaagagcact

SEQ ID NO: 349887 - DNA, 15 bp, Homo sapiens
ttaagtaaagagcac

SEQ ID NO: 349888 - DNA, 15 bp, Homo sapiens
attaagtaaagagca

SEQ ID NO: 349889 - DNA, 15 bp, Homo sapiens
tattaagtaaagagc

SEQ ID NO: 349890 - DNA, 15 bp, Homo sapiens
atattaagtaaagag

SEQ ID NO: 349891 - DNA, 15 bp, Homo sapiens
aatattaagtaaaga

SEQ ID NO: 349892 - DNA, 15 bp, Homo sapiens
taatattaagtaaag

SEQ ID NO: 349893 - DNA, 15 bp, Homo sapiens
ataatattaagtaaa

SEQ ID NO: 349894 - DNA, 15 bp, Homo sapiens
gataatattaagtaa

SEQ ID NO: 349895 - DNA, 15 bp, Homo sapiens
agataatattaagta

SEQ ID NO: 349896 - DNA, 15 bp, Homo sapiens
cagataatattaagt

SEQ ID NO: 349897 - DNA, 15 bp, Homo sapiens
ccagataatattaag

SEQ ID NO: 349898 - DNA, 15 bp, Homo sapiens
cccagataatattaa

SEQ ID NO: 349899 - DNA, 15 bp, Homo sapiens
tcccagataatatta

SEQ ID NO: 349900 - DNA, 15 bp, Homo sapiens
ttcccagataatatt

SEQ ID NO: 349901 - DNA, 15 bp, Homo sapiens
tttcccagataatat

SEQ ID NO: 349902 - DNA, 15 bp, Homo sapiens
atttcccagataata

SEQ ID NO: 349903 - DNA, 15 bp, Homo sapiens
aatttcccagataat

SEQ ID NO: 349904 - DNA, 15 bp, Homo sapiens
aaatttcccagataa

SEQ ID NO: 349905 - DNA, 15 bp, Homo sapiens
taaatttcccagata

SEQ ID NO: 349906 - DNA, 15 bp, Homo sapiens
gtaaatttcccagat

SEQ ID NO: 349907 - DNA, 15 bp, Homo sapiens
agtaaatttcccaga

SEQ ID NO: 349908 - DNA, 15 bp, Homo sapiens
aagtaaatttcccag

SEQ ID NO: 349909 - DNA, 15 bp, Homo sapiens
caagtaaatttccca

SEQ ID NO: 349910 - DNA, 15 bp, Homo sapiens
tcaagtaaatttccc

SEQ ID NO: 349911 - DNA, 15 bp, Homo sapiens
ctcaagtaaatttcc

SEQ ID NO: 349912 - DNA, 15 bp, Homo sapiens
tctcaagtaaatttc

SEQ ID NO: 349913 - DNA, 15 bp, Homo sapiens
ttctcaagtaaattt

SEQ ID NO: 349914 - DNA, 15 bp, Homo sapiens
attctcaagtaaatt

SEQ ID NO: 349915 - DNA, 15 bp, Homo sapiens
aattctcaagtaaat

SEQ ID NO: 349916 - DNA, 15 bp, Homo sapiens
taattctcaagtaaa

SEQ ID NO: 349917 - DNA, 15 bp, Homo sapiens
ataattctcaagtaa

SEQ ID NO: 349918 - DNA, 15 bp, Homo sapiens
gataattctcaagta

SEQ ID NO: 349919 - DNA, 15 bp, Homo sapiens
tgataattctcaagt

SEQ ID NO: 349920 - DNA, 15 bp, Homo sapiens
ctgataattctcaag

SEQ ID NO: 349921 - DNA, 15 bp, Homo sapiens
actgataattctcaa

SEQ ID NO: 349922 - DNA, 15 bp, Homo sapiens
aactgataattctca

SEQ ID NO: 349923 - DNA, 15 bp, Homo sapiens
aaactgataattctc

SEQ ID NO: 349924 - DNA, 15 bp, Homo sapiens
aaaactgataattct

SEQ ID NO: 349925 - DNA, 15 bp, Homo sapiens
gaaaactgataattc

SEQ ID NO: 349926 - DNA, 15 bp, Homo sapiens
agaaaactgataatt

SEQ ID NO: 349927 - DNA, 15 bp, Homo sapiens
tagaaaactgataat

SEQ ID NO: 349928 - DNA, 15 bp, Homo sapiens
gtagaaaactgataa

SEQ ID NO: 349929 - DNA, 15 bp, Homo sapiens
agtagaaaactgata

SEQ ID NO: 349930 - DNA, 15 bp, Homo sapiens
tagtagaaaactgat

SEQ ID NO: 349931 - DNA, 15 bp, Homo sapiens
agtagtagaaaactg

SEQ ID NO: 349932 - DNA, 15 bp, Homo sapiens
gagtagtagaaaact

SEQ ID NO: 349933 - DNA, 15 bp, Homo sapiens
agagtagtagaaaac

SEQ ID NO: 349934 - DNA, 15 bp, Homo sapiens
gagagtagtagaaaa

SEQ ID NO: 349935 - DNA, 15 bp, Homo sapiens
ggagagtagtagaaa

SEQ ID NO: 349936 - DNA, 15 bp, Homo sapiens
gggagagtagtagaa

SEQ ID NO: 349937 - DNA, 15 bp, Homo sapiens
agggagagtagtaga

SEQ ID NO: 349938 - DNA, 15 bp, Homo sapiens
cagggagagtagtag

SEQ ID NO: 349939 - DNA, 15 bp, Homo sapiens
gcagggagagtagta

SEQ ID NO: 349940 - DNA, 15 bp, Homo sapiens
ggcagggagagtagt

SEQ ID NO: 349941 - DNA, 15 bp, Homo sapiens
tggcagggagagtag

SEQ ID NO: 349942 - DNA, 15 bp, Homo sapiens
ttggcagggagagta

SEQ ID NO: 349943 - DNA, 15 bp, Homo sapiens
tttggcagggagagt

SEQ ID NO: 349944 - DNA, 15 bp, Homo sapiens
atttggcagggagag

SEQ ID NO: 349945 - DNA, 15 bp, Homo sapiens
tatttggcagggaga

SEQ ID NO: 349946 - DNA, 15 bp, Homo sapiens
ctatttggcagggag

SEQ ID NO: 349947 - DNA, 15 bp, Homo sapiens
tctatttggcaggga

SEQ ID NO: 349948 - DNA, 15 bp, Homo sapiens
ttctatttggcaggg

SEQ ID NO: 349949 - DNA, 15 bp, Homo sapiens
attctatttggcagg

SEQ ID NO: 349950 - DNA, 15 bp, Homo sapiens
aattctatttggcag

SEQ ID NO: 349951 - DNA, 15 bp, Homo sapiens
aaattctatttggca

SEQ ID NO: 349952 - DNA, 15 bp, Homo sapiens
gaaattctatttggc

SEQ ID NO: 349953 - DNA, 15 bp, Homo sapiens
tgaaattctatttgg

SEQ ID NO: 349954 - DNA, 15 bp, Homo sapiens
ttgaaattctatttg

SEQ ID NO: 349955 - DNA, 15 bp, Homo sapiens
tttgaaattctattt

SEQ ID NO: 349956 - DNA, 15 bp, Homo sapiens
ttttgaaattctatt

SEQ ID NO: 349957 - DNA, 15 bp, Homo sapiens
cttttgaaattctat

SEQ ID NO: 349958 - DNA, 15 bp, Homo sapiens
ccttttgaaattcta

SEQ ID NO: 349959 - DNA, 15 bp, Homo sapiens
accttttgaaattct

SEQ ID NO: 349960 - DNA, 15 bp, Homo sapiens
aaccttttgaaattc

SEQ ID NO: 349961 - DNA, 15 bp, Homo sapiens
caaccttttgaaatt

SEQ ID NO: 349962 - DNA, 15 bp, Homo sapiens
ccaaccttttgaaat

SEQ ID NO: 349963 - DNA, 15 bp, Homo sapiens
cccaaccttttgaaa

SEQ ID NO: 349964 - DNA, 15 bp, Homo sapiens
tcccaaccttttgaa

SEQ ID NO: 349965 - DNA, 15 bp, Homo sapiens
atcccaaccttttga

SEQ ID NO: 349966 - DNA, 15 bp, Homo sapiens
aatcccaaccttttg

SEQ ID NO: 349967 - DNA, 15 bp, Homo sapiens
taatcccaacctttt

SEQ ID NO: 349968 - DNA, 15 bp, Homo sapiens
ttaatcccaaccttt

SEQ ID NO: 349969 - DNA, 15 bp, Homo sapiens
attaatcccaacctt

SEQ ID NO: 349970 - DNA, 15 bp, Homo sapiens
aattaatcccaacct

SEQ ID NO: 349971 - DNA, 15 bp, Homo sapiens
aaattaatcccaacc

SEQ ID NO: 349972 - DNA, 15 bp, Homo sapiens
gaaattaatcccaac

SEQ ID NO: 349973 - DNA, 15 bp, Homo sapiens
tgaaattaatcccaa

SEQ ID NO: 349974 - DNA, 15 bp, Homo sapiens
ctgaaattaatccca

SEQ ID NO: 349975 - DNA, 15 bp, Homo sapiens
tctgaaattaatccc

SEQ ID NO: 349976 - DNA, 15 bp, Homo sapiens
atctgaaattaatcc

SEQ ID NO: 349977 - DNA, 15 bp, Homo sapiens
catctgaaattaatc

SEQ ID NO: 349978 - DNA, 15 bp, Homo sapiens
ccatctgaaattaat

SEQ ID NO: 349979 - DNA, 15 bp, Homo sapiens
tccatctgaaattaa

SEQ ID NO: 349980 - DNA, 15 bp, Homo sapiens
ttccatctgaaatta

SEQ ID NO: 349981 - DNA, 15 bp, Homo sapiens
attccatctgaaatt

SEQ ID NO: 349982 - DNA, 15 bp, Homo sapiens
tattccatctgaaat

SEQ ID NO: 349983 - DNA, 15 bp, Homo sapiens
atattccatctgaaa

SEQ ID NO: 349984 - DNA, 15 bp, Homo sapiens
catattccatctgaa

SEQ ID NO: 349985 - DNA, 15 bp, Homo sapiens
tcatattccatctga

SEQ ID NO: 349986 - DNA, 15 bp, Homo sapiens
ttcatattccatctg

SEQ ID NO: 349987 - DNA, 15 bp, Homo sapiens
tttcatattccatct

SEQ ID NO: 349988 - DNA, 15 bp, Homo sapiens
gtttcatattccatc

SEQ ID NO: 349989 - DNA, 15 bp, Homo sapiens
agtttcatattccat

SEQ ID NO: 349990 - DNA, 15 bp, Homo sapiens
cagtttcatattcca

SEQ ID NO: 349991 - DNA, 15 bp, Homo sapiens
ccagtttcatattcc

SEQ ID NO: 349992 - DNA, 15 bp, Homo sapiens
gccagtttcatattc

SEQ ID NO: 349993 - DNA, 15 bp, Homo sapiens
agccagtttcatatt

SEQ ID NO: 349994 - DNA, 15 bp, Homo sapiens
gagccagtttcatat

SEQ ID NO: 349995 - DNA, 15 bp, Homo sapiens
agagccagtttcata

SEQ ID NO: 349996 - DNA, 15 bp, Homo sapiens
tagagccagtttcat

SEQ ID NO: 349997 - DNA, 15 bp, Homo sapiens
atagagccagtttca

SEQ ID NO: 349998 - DNA, 15 bp, Homo sapiens
aatagagccagtttc

SEQ ID NO: 349999 - DNA, 15 bp, Homo sapiens
aaatagagccagttt

SEQ ID NO: 350000 - DNA, 15 bp, Homo sapiens
gaaatagagccagtt

SEQ ID NO: 350001 - DNA, 15 bp, Homo sapiens
agaaatagagccagt

SEQ ID NO: 350002 - DNA, 15 bp, Homo sapiens
tagaaatagagccag

SEQ ID NO: 350003 - DNA, 15 bp, Homo sapiens
atagaaatagagcca

SEQ ID NO: 350004 - DNA, 15 bp, Homo sapiens
aatagaaatagagcc

SEQ ID NO: 350005 - DNA, 15 bp, Homo sapiens
aaatagaaatagagc

SEQ ID NO: 350006 - DNA, 15 bp, Homo sapiens
caaatagaaatagag

SEQ ID NO: 350007 - DNA, 15 bp, Homo sapiens
acaaatagaaataga

SEQ ID NO: 350008 - DNA, 15 bp, Homo sapiens
cacaaatagaaatag

SEQ ID NO: 350009 - DNA, 15 bp, Homo sapiens
ccacaaatagaaata

SEQ ID NO: 350010 - DNA, 15 bp, Homo sapiens
gccacaaatagaaat

SEQ ID NO: 350011 - DNA, 15 bp, Homo sapiens
ggccacaaatagaaa

SEQ ID NO: 350012 - DNA, 15 bp, Homo sapiens
aggccacaaatagaa

SEQ ID NO: 350013 - DNA, 15 bp, Homo sapiens
gaggccacaaataga

SEQ ID NO: 350014 - DNA, 15 bp, Homo sapiens
ggaggccacaaatag

SEQ ID NO: 350015 - DNA, 15 bp, Homo sapiens
aggaggccacaaata

SEQ ID NO: 350016 - DNA, 15 bp, Homo sapiens
taggaggccacaaat

SEQ ID NO: 350017 - DNA, 15 bp, Homo sapiens
ctaggaggccacaaa

SEQ ID NO: 350018 - DNA, 15 bp, Homo sapiens
cctaggaggccacaa

SEQ ID NO: 350019 - DNA, 15 bp, Homo sapiens
acctaggaggccaca

SEQ ID NO: 350020 - DNA, 15 bp, Homo sapiens
tacctaggaggccac

SEQ ID NO: 350021 - DNA, 15 bp, Homo sapiens
ttacctaggaggcca

SEQ ID NO: 350022 - DNA, 15 bp, Homo sapiens
cttacctaggaggcc

SEQ ID NO: 350023 - DNA, 15 bp, Homo sapiens
acttacctaggaggc

SEQ ID NO: 350024 - DNA, 15 bp, Homo sapiens
cacttacctaggagg

SEQ ID NO: 350025 - DNA, 15 bp, Homo sapiens
ccacttacctaggag

SEQ ID NO: 350026 - DNA, 15 bp, Homo sapiens
gccacttacctagga

SEQ ID NO: 350027 - DNA, 15 bp, Homo sapiens
agccacttacctagg

SEQ ID NO: 350028 - DNA, 15 bp, Homo sapiens
cagccacttacctag

SEQ ID NO: 350029 - DNA, 15 bp, Homo sapiens
tcagccacttaccta

SEQ ID NO: 350030 - DNA, 15 bp, Homo sapiens
ttcagccacttacct

SEQ ID NO: 350031 - DNA, 15 bp, Homo sapiens
cttcagccacttacc

SEQ ID NO: 350032 - DNA, 15 bp, Homo sapiens
acttcagccacttac

SEQ ID NO: 350033 - DNA, 15 bp, Homo sapiens
aacttcagccactta

SEQ ID NO: 350034 - DNA, 15 bp, Homo sapiens
caacttcagccactt

SEQ ID NO: 350035 - DNA, 15 bp, Homo sapiens
acaacttcagccact

SEQ ID NO: 350036 - DNA, 15 bp, Homo sapiens
gacaacttcagccac

SEQ ID NO: 350037 - DNA, 15 bp, Homo sapiens
tgacaacttcagcca

SEQ ID NO: 350038 - DNA, 15 bp, Homo sapiens
ctgacaacttcagcc

SEQ ID NO: 350039 - DNA, 15 bp, Homo sapiens
gctgacaacttcagc

SEQ ID NO: 350040 - DNA, 15 bp, Homo sapiens
agctgacaacttcag

SEQ ID NO: 350041 - DNA, 15 bp, Homo sapiens
aagctgacaacttca

SEQ ID NO: 350042 - DNA, 15 bp, Homo sapiens
gaagctgacaacttc

SEQ ID NO: 350043 - DNA, 15 bp, Homo sapiens
tgaagctgacaactt

SEQ ID NO: 350044 - DNA, 15 bp, Homo sapiens
ttgaagctgacaact

SEQ ID NO: 350045 - DNA, 15 bp, Homo sapiens
attgaagctgacaac

SEQ ID NO: 350046 - DNA, 15 bp, Homo sapiens
aattgaagctgacaa

SEQ ID NO: 350047 - DNA, 15 bp, Homo sapiens
caattgaagctgaca

SEQ ID NO: 350048 - DNA, 15 bp, Homo sapiens
acaattgaagctgac

SEQ ID NO: 350049 - DNA, 15 bp, Homo sapiens
aacaattgaagctga

SEQ ID NO: 350050 - DNA, 15 bp, Homo sapiens
taacaattgaagctg

SEQ ID NO: 350051 - DNA, 15 bp, Homo sapiens
ttaacaattgaagct

SEQ ID NO: 350052 - DNA, 15 bp, Homo sapiens
cttaacaattgaagc

SEQ ID NO: 350053 - DNA, 15 bp, Homo sapiens
gcttaacaattgaag

SEQ ID NO: 350054 - DNA, 15 bp, Homo sapiens
ggcttaacaattgaa

SEQ ID NO: 350055 - DNA, 15 bp, Homo sapiens
tggcttaacaattga

SEQ ID NO: 350056 - DNA, 15 bp, Homo sapiens
gtggcttaacaattg

SEQ ID NO: 350057 - DNA, 15 bp, Homo sapiens
agtggcttaacaatt

SEQ ID NO: 350058 - DNA, 15 bp, Homo sapiens
cagtggcttaacaat

SEQ ID NO: 350059 - DNA, 15 bp, Homo sapiens
acagtggcttaacaa

SEQ ID NO: 350060 - DNA, 15 bp, Homo sapiens
tacagtggcttaaca

SEQ ID NO: 350061 - DNA, 15 bp, Homo sapiens
ttacagtggcttaac

SEQ ID NO: 350062 - DNA, 15 bp, Homo sapiens
cttacagtggcttaa

SEQ ID NO: 350063 - DNA, 15 bp, Homo sapiens
acttacagtggctta

SEQ ID NO: 350064 - DNA, 15 bp, Homo sapiens
cacttacagtggctt

SEQ ID NO: 350065 - DNA, 15 bp, Homo sapiens
gcacttacagtggct

SEQ ID NO: 350066 - DNA, 15 bp, Homo sapiens
tgcacttacagtggc

SEQ ID NO: 350067 - DNA, 15 bp, Homo sapiens
ctgcacttacagtgg

SEQ ID NO: 350068 - DNA, 15 bp, Homo sapiens
gctgcacttacagtg

SEQ ID NO: 350069 - DNA, 15 bp, Homo sapiens
tgctgcacttacagt

SEQ ID NO: 350070 - DNA, 15 bp, Homo sapiens
gtgctgcacttacag

SEQ ID NO: 350071 - DNA, 15 bp, Homo sapiens
tgtgctgcacttaca

SEQ ID NO: 350072 - DNA, 15 bp, Homo sapiens
ctgtgctgcacttac

SEQ ID NO: 350073 - DNA, 15 bp, Homo sapiens
cctgtgctgcactta

SEQ ID NO: 350074 - DNA, 15 bp, Homo sapiens
tcctgtgctgcactt

SEQ ID NO: 350075 - DNA, 15 bp, Homo sapiens
atcctgtgctgcact

SEQ ID NO: 350076 - DNA, 15 bp, Homo sapiens
aatcctgtgctgcac

SEQ ID NO: 350077 - DNA, 15 bp, Homo sapiens
aaatcctgtgctgca

SEQ ID NO: 350078 - DNA, 15 bp, Homo sapiens
gaaatcctgtgctgc

SEQ ID NO: 350079 - DNA, 15 bp, Homo sapiens
tgaaatcctgtgctg

SEQ ID NO: 350080 - DNA, 15 bp, Homo sapiens
gtgaaatcctgtgct

SEQ ID NO: 350081 - DNA, 15 bp, Homo sapiens
agtgaaatcctgtgc

SEQ ID NO: 350082 - DNA, 15 bp, Homo sapiens
cagtgaaatcctgtg

SEQ ID NO: 350083 - DNA, 15 bp, Homo sapiens
ccagtgaaatcctgt

SEQ ID NO: 350084 - DNA, 15 bp, Homo sapiens
gccagtgaaatcctg

SEQ ID NO: 350085 - DNA, 15 bp, Homo sapiens
ggccagtgaaatcct

SEQ ID NO: 350086 - DNA, 15 bp, Homo sapiens
aggccagtgaaatcc

SEQ ID NO: 350087 - DNA, 15 bp, Homo sapiens
taggccagtgaaatc

SEQ ID NO: 350088 - DNA, 15 bp, Homo sapiens
gtaggccagtgaaat

SEQ ID NO: 350089 - DNA, 15 bp, Homo sapiens
tgtaggccagtgaaa

SEQ ID NO: 350090 - DNA, 15 bp, Homo sapiens
atgtaggccagtgaa

SEQ ID NO: 350091 - DNA, 15 bp, Homo sapiens
catgtaggccagtga

SEQ ID NO: 350092 - DNA, 15 bp, Homo sapiens
acatgtaggccagtg

SEQ ID NO: 350093 - DNA, 15 bp, Homo sapiens
aacatgtaggccagt

SEQ ID NO: 350094 - DNA, 15 bp, Homo sapiens
gaaacatgtaggcca

SEQ ID NO: 350095 - DNA, 15 bp, Homo sapiens
tgaaacatgtaggcc

SEQ ID NO: 350096 - DNA, 15 bp, Homo sapiens
atgaaacatgtaggc

SEQ ID NO: 350097 - DNA, 15 bp, Homo sapiens
catgaaacatgtagg

SEQ ID NO: 350098 - DNA, 15 bp, Homo sapiens
tcatgaaacatgtag

SEQ ID NO: 350099 - DNA, 15 bp, Homo sapiens
gtcatgaaacatgta

SEQ ID NO: 350100 - DNA, 15 bp, Homo sapiens
tgtcatgaaacatgt

SEQ ID NO: 350101 - DNA, 15 bp, Homo sapiens
atgtcatgaaacatg

SEQ ID NO: 350102 - DNA, 15 bp, Homo sapiens
aatgtcatgaaacat

SEQ ID NO: 350103 - DNA, 15 bp, Homo sapiens
aaatgtcatgaaaca

SEQ ID NO: 350104 - DNA, 15 bp, Homo sapiens
aaaatgtcatgaaac

SEQ ID NO: 350105 - DNA, 15 bp, Homo sapiens
aaaaatgtcatgaaa

SEQ ID NO: 350106 - DNA, 15 bp, Homo sapiens
taaaaatgtcatgaa

SEQ ID NO: 350107 - DNA, 15 bp, Homo sapiens
ataaaaatgtcatga

SEQ ID NO: 350108 - DNA, 15 bp, Homo sapiens
aataaaaatgtcatg

SEQ ID NO: 350109 - DNA, 15 bp, Homo sapiens
gaataaaaatgtcat

SEQ ID NO: 350110 - DNA, 15 bp, Homo sapiens
cgaataaaaatgtca

SEQ ID NO: 350111 - DNA, 15 bp, Homo sapiens
acgaataaaaatgtc

SEQ ID NO: 350112 - DNA, 15 bp, Homo sapiens
tacgaataaaaatgt

SEQ ID NO: 350113 - DNA, 15 bp, Homo sapiens
atacgaataaaaatg

SEQ ID NO: 350114 - DNA, 15 bp, Homo sapiens
gatacgaataaaaat

SEQ ID NO: 350115 - DNA, 15 bp, Homo sapiens
ggatacgaataaaaa

SEQ ID NO: 350116 - DNA, 15 bp, Homo sapiens
aggatacgaataaaa

SEQ ID NO: 350117 - DNA, 15 bp, Homo sapiens
aaggatacgaataaa

SEQ ID NO: 350118 - DNA, 15 bp, Homo sapiens
taaggatacgaataa

SEQ ID NO: 350119 - DNA, 15 bp, Homo sapiens
ttaaggatacgaata

SEQ ID NO: 350120 - DNA, 15 bp, Homo sapiens
tttaaggatacgaat

SEQ ID NO: 350121 - DNA, 15 bp, Homo sapiens
gtttaaggatacgaa

SEQ ID NO: 350122 - DNA, 15 bp, Homo sapiens
ggtttaaggatacga

SEQ ID NO: 350123 - DNA, 15 bp, Homo sapiens
aggtttaaggatacg

SEQ ID NO: 350124 - DNA, 15 bp, Homo sapiens
caggtttaaggatac

SEQ ID NO: 350125 - DNA, 15 bp, Homo sapiens
acaggtttaaggata

SEQ ID NO: 350126 - DNA, 15 bp, Homo sapiens
aacaggtttaaggat

SEQ ID NO: 350127 - DNA, 15 bp, Homo sapiens
aaacaggtttaagga

SEQ ID NO: 350128 - DNA, 15 bp, Homo sapiens
taaacaggtttaagg

SEQ ID NO: 350129 - DNA, 15 bp, Homo sapiens
ttaaacaggtttaag

SEQ ID NO: 350130 - DNA, 15 bp, Homo sapiens
cttaaacaggtttaa

SEQ ID NO: 350131 - DNA, 15 bp, Homo sapiens
gcttaaacaggttta

SEQ ID NO: 350132 - DNA, 15 bp, Homo sapiens
tgcttaaacaggttt

SEQ ID NO: 350133 - DNA, 15 bp, Homo sapiens
ctgcttaaacaggtt

SEQ ID NO: 350134 - DNA, 15 bp, Homo sapiens
gctgcttaaacaggt

SEQ ID NO: 350135 - DNA, 15 bp, Homo sapiens
ggctgcttaaacagg

SEQ ID NO: 350136 - DNA, 15 bp, Homo sapiens
aggctgcttaaacag

SEQ ID NO: 350137 - DNA, 15 bp, Homo sapiens
taggctgcttaaaca

SEQ ID NO: 350138 - DNA, 15 bp, Homo sapiens
ctaggctgcttaaac

SEQ ID NO: 350139 - DNA, 15 bp, Homo sapiens
cctaggctgcttaaa

SEQ ID NO: 350140 - DNA, 15 bp, Homo sapiens
tcctaggctgcttaa

SEQ ID NO: 350141 - DNA, 15 bp, Homo sapiens
ttcctaggctgctta

SEQ ID NO: 350142 - DNA, 15 bp, Homo sapiens
attcctaggctgctt

SEQ ID NO: 350143 - DNA, 15 bp, Homo sapiens
aattcctaggctgct

SEQ ID NO: 350144 - DNA, 15 bp, Homo sapiens
gaattcctaggctgc

SEQ ID NO: 350145 - DNA, 15 bp, Homo sapiens
tgaattcctaggctg

SEQ ID NO: 350146 - DNA, 15 bp, Homo sapiens
gtgaattcctaggct

SEQ ID NO: 350147 - DNA, 15 bp, Homo sapiens
tgtgaattcctaggc

SEQ ID NO: 350148 - DNA, 15 bp, Homo sapiens
ctgtgaattcctagg

SEQ ID NO: 350149 - DNA, 15 bp, Homo sapiens
cctgtgaattcctag

SEQ ID NO: 350150 - DNA, 15 bp, Homo sapiens
ccctgtgaattccta

SEQ ID NO: 350151 - DNA, 15 bp, Homo sapiens
gccctgtgaattcct

SEQ ID NO: 350152 - DNA, 15 bp, Homo sapiens
ggccctgtgaattcc

SEQ ID NO: 350153 - DNA, 15 bp, Homo sapiens
gggccctgtgaattc

SEQ ID NO: 350154 - DNA, 15 bp, Homo sapiens
agggccctgtgaatt

SEQ ID NO: 350155 - DNA, 15 bp, Homo sapiens
aagggccctgtgaat

SEQ ID NO: 350156 - DNA, 15 bp, Homo sapiens
aaagggccctgtgaa

SEQ ID NO: 350157 - DNA, 15 bp, Homo sapiens
caaagggccctgtga

SEQ ID NO: 350158 - DNA, 15 bp, Homo sapiens
gcaaagggccctgtg

SEQ ID NO: 350159 - DNA, 15 bp, Homo sapiens
tgcaaagggccctgt

SEQ ID NO: 350160 - DNA, 15 bp, Homo sapiens
ctgcaaagggccctg

SEQ ID NO: 350161 - DNA, 15 bp, Homo sapiens
gctgcaaagggccct

SEQ ID NO: 350162 - DNA, 15 bp, Homo sapiens
tgctgcaaagggccc

SEQ ID NO: 350163 - DNA, 15 bp, Homo sapiens
gtgctgcaaagggcc

SEQ ID NO: 350164 - DNA, 15 bp, Homo sapiens
tgtgctgcaaagggc

SEQ ID NO: 350165 - DNA, 15 bp, Homo sapiens
ttgtgctgcaaaggg

SEQ ID NO: 350166 - DNA, 15 bp, Homo sapiens
gttgtgctgcaaagg

SEQ ID NO: 350167 - DNA, 15 bp, Homo sapiens
tgttgtgctgcaaag

SEQ ID NO: 350168 - DNA, 15 bp, Homo sapiens
atgttgtgctgcaaa

SEQ ID NO: 350169 - DNA, 15 bp, Homo sapiens
catgttgtgctgcaa

SEQ ID NO: 350170 - DNA, 15 bp, Homo sapiens
ccatgttgtgctgca

SEQ ID NO: 350171 - DNA, 15 bp, Homo sapiens
tccatgttgtgctgc

SEQ ID NO: 350172 - DNA, 15 bp, Homo sapiens
ttccatgttgtgctg

SEQ ID NO: 350173 - DNA, 15 bp, Homo sapiens
attccatgttgtgct

SEQ ID NO: 350174 - DNA, 15 bp, Homo sapiens
tattccatgttgtgc

SEQ ID NO: 350175 - DNA, 15 bp, Homo sapiens
atattccatgttgtg

SEQ ID NO: 350176 - DNA, 15 bp, Homo sapiens
aatattccatgttgt

SEQ ID NO: 350177 - DNA, 15 bp, Homo sapiens
taatattccatgttg

SEQ ID NO: 350178 - DNA, 15 bp, Homo sapiens
ataatattccatgtt

SEQ ID NO: 350179 - DNA, 15 bp, Homo sapiens
aataatattccatgt

SEQ ID NO: 350180 - DNA, 15 bp, Homo sapiens
caataatattccatg

SEQ ID NO: 350181 - DNA, 15 bp, Homo sapiens
acaataatattccat

SEQ ID NO: 350182 - DNA, 15 bp, Homo sapiens
tacaataatattcca

SEQ ID NO: 350183 - DNA, 15 bp, Homo sapiens
atacaataatattcc

SEQ ID NO: 350184 - DNA, 15 bp, Homo sapiens
aatacaataatattc

SEQ ID NO: 350185 - DNA, 15 bp, Homo sapiens
aaatacaataatatt

SEQ ID NO: 350186 - DNA, 15 bp, Homo sapiens
caaatacaataatat

SEQ ID NO: 350187 - DNA, 15 bp, Homo sapiens
tcaaatacaataata

SEQ ID NO: 350188 - DNA, 15 bp, Homo sapiens
atcaaatacaataat

SEQ ID NO: 350189 - DNA, 15 bp, Homo sapiens
aatcaaatacaataa

SEQ ID NO: 350190 - DNA, 15 bp, Homo sapiens
gaatcaaatacaata

SEQ ID NO: 350191 - DNA, 15 bp, Homo sapiens
agaatcaaatacaat

SEQ ID NO: 350192 - DNA, 15 bp, Homo sapiens
tagaatcaaatacaa

SEQ ID NO: 350193 - DNA, 15 bp, Homo sapiens
atagaatcaaataca

SEQ ID NO: 350194 - DNA, 15 bp, Homo sapiens
gatagaatcaaatac

SEQ ID NO: 350195 - DNA, 15 bp, Homo sapiens
agatagaatcaaata

SEQ ID NO: 350196 - DNA, 15 bp, Homo sapiens
aagatagaatcaaat

SEQ ID NO: 350197 - DNA, 15 bp, Homo sapiens
taagatagaatcaaa

SEQ ID NO: 350198 - DNA, 15 bp, Homo sapiens
ataagatagaatcaa

SEQ ID NO: 350199 - DNA, 15 bp, Homo sapiens
cataagatagaatca

SEQ ID NO: 350200 - DNA, 15 bp, Homo sapiens
tcataagatagaatc

SEQ ID NO: 350201 - DNA, 15 bp, Homo sapiens
ttcataagatagaat

SEQ ID NO: 350202 - DNA, 15 bp, Homo sapiens
gttcataagatagaa

SEQ ID NO: 350203 - DNA, 15 bp, Homo sapiens
agttcataagataga

SEQ ID NO: 350204 - DNA, 15 bp, Homo sapiens
aagttcataagatag

SEQ ID NO: 350205 - DNA, 15 bp, Homo sapiens
caagttcataagata

SEQ ID NO: 350206 - DNA, 15 bp, Homo sapiens
ccaagttcataagat

SEQ ID NO: 350207 - DNA, 15 bp, Homo sapiens
tccaagttcataaga

SEQ ID NO: 350208 - DNA, 15 bp, Homo sapiens
ctccaagttcataag

SEQ ID NO: 350209 - DNA, 15 bp, Homo sapiens
tctccaagttcataa

SEQ ID NO: 350210 - DNA, 15 bp, Homo sapiens
ttctccaagttcata

SEQ ID NO: 350211 - DNA, 15 bp, Homo sapiens
tttctccaagttcat

SEQ ID NO: 350212 - DNA, 15 bp, Homo sapiens
atttctccaagttca

SEQ ID NO: 350213 - DNA, 15 bp, Homo sapiens
aatttctccaagttc

SEQ ID NO: 350214 - DNA, 15 bp, Homo sapiens
aaatttctccaagtt

SEQ ID NO: 350215 - DNA, 15 bp, Homo sapiens
taaatttctccaagt

SEQ ID NO: 350216 - DNA, 15 bp, Homo sapiens
gtaaatttctccaag

SEQ ID NO: 350217 - DNA, 15 bp, Homo sapiens
agtaaatttctccaa

SEQ ID NO: 350218 - DNA, 15 bp, Homo sapiens
tagtaaatttctcca

SEQ ID NO: 350219 - DNA, 15 bp, Homo sapiens
ctagtaaatttctcc

SEQ ID NO: 350220 - DNA, 15 bp, Homo sapiens
gctagtaaatttctc

SEQ ID NO: 350221 - DNA, 15 bp, Homo sapiens
tgctagtaaatttct

SEQ ID NO: 350222 - DNA, 15 bp, Homo sapiens
ctgctagtaaatttc

SEQ ID NO: 350223 - DNA, 15 bp, Homo sapiens
tctgctagtaaattt

SEQ ID NO: 350224 - DNA, 15 bp, Homo sapiens
ttctgctagtaaatt

SEQ ID NO: 350225 - DNA, 15 bp, Homo sapiens
tttctgctagtaaat

SEQ ID NO: 350226 - DNA, 15 bp, Homo sapiens
ttttctgctagtaaa

SEQ ID NO: 350227 - DNA, 15 bp, Homo sapiens
attttctgctagtaa

SEQ ID NO: 350228 - DNA, 15 bp, Homo sapiens
cattttctgctagta

SEQ ID NO: 350229 - DNA, 15 bp, Homo sapiens
acattttctgctagt

SEQ ID NO: 350230 - DNA, 15 bp, Homo sapiens
cacattttctgctag

SEQ ID NO: 350231 - DNA, 15 bp, Homo sapiens
tcacattttctgcta

SEQ ID NO: 350232 - DNA, 15 bp, Homo sapiens
atcacattttctgct

SEQ ID NO: 350233 - DNA, 15 bp, Homo sapiens
catcacattttctgc

SEQ ID NO: 350234 - DNA, 15 bp, Homo sapiens
gcatcacattttctg

SEQ ID NO: 350235 - DNA, 15 bp, Homo sapiens
tgcatcacattttct

SEQ ID NO: 350236 - DNA, 15 bp, Homo sapiens
ttgcatcacattttc

SEQ ID NO: 350237 - DNA, 15 bp, Homo sapiens
tttgcatcacatttt

SEQ ID NO: 350238 - DNA, 15 bp, Homo sapiens
atttgcatcacattt

SEQ ID NO: 350239 - DNA, 15 bp, Homo sapiens
catttgcatcacatt

SEQ ID NO: 350240 - DNA, 15 bp, Homo sapiens
acatttgcatcacat

SEQ ID NO: 350241 - DNA, 15 bp, Homo sapiens
aacatttgcatcaca

SEQ ID NO: 350242 - DNA, 15 bp, Homo sapiens
gaacatttgcatcac

SEQ ID NO: 350243 - DNA, 15 bp, Homo sapiens
tgaacatttgcatca

SEQ ID NO: 350244 - DNA, 15 bp, Homo sapiens
ctgaacatttgcatc

SEQ ID NO: 350245 - DNA, 15 bp, Homo sapiens
tctgaacatttgcat

SEQ ID NO: 350246 - DNA, 15 bp, Homo sapiens
gtctgaacatttgca

SEQ ID NO: 350247 - DNA, 15 bp, Homo sapiens
tgtctgaacatttgc

SEQ ID NO: 350248 - DNA, 15 bp, Homo sapiens
ctgtctgaacatttg

SEQ ID NO: 350249 - DNA, 15 bp, Homo sapiens
cctgtctgaacattt

SEQ ID NO: 350250 - DNA, 15 bp, Homo sapiens
acctgtctgaacatt

SEQ ID NO: 350251 - DNA, 15 bp, Homo sapiens
gacctgtctgaacat

SEQ ID NO: 350252 - DNA, 15 bp, Homo sapiens
tgacctgtctgaaca

SEQ ID NO: 350253 - DNA, 15 bp, Homo sapiens
atgacctgtctgaac

SEQ ID NO: 350254 - DNA, 15 bp, Homo sapiens
aatgacctgtctgaa

SEQ ID NO: 350255 - DNA, 15 bp, Homo sapiens
gaatgacctgtctga

SEQ ID NO: 350256 - DNA, 15 bp, Homo sapiens
tgaatgacctgtctg

SEQ ID NO: 350257 - DNA, 15 bp, Homo sapiens
ctgaatgacctgtct

SEQ ID NO: 350258 - DNA, 15 bp, Homo sapiens
gctgaatgacctgtc

SEQ ID NO: 350259 - DNA, 15 bp, Homo sapiens
agctgaatgacctgt

SEQ ID NO: 350260 - DNA, 15 bp, Homo sapiens
gagctgaatgacctg

SEQ ID NO: 350261 - DNA, 15 bp, Homo sapiens
tgagctgaatgacct

SEQ ID NO: 350262 - DNA, 15 bp, Homo sapiens
ttgagctgaatgacc

SEQ ID NO: 350263 - DNA, 15 bp, Homo sapiens
gttgagctgaatgac

SEQ ID NO: 350264 - DNA, 15 bp, Homo sapiens
tgttgagctgaatga

SEQ ID NO: 350265 - DNA, 15 bp, Homo sapiens
ctgttgagctgaatg

SEQ ID NO: 350266 - DNA, 15 bp, Homo sapiens
actgttgagctgaat

SEQ ID NO: 350267 - DNA, 15 bp, Homo sapiens
tactgttgagctgaa

SEQ ID NO: 350268 - DNA, 15 bp, Homo sapiens
ttactgttgagctga

SEQ ID NO: 350269 - DNA, 15 bp, Homo sapiens
attactgttgagctg

SEQ ID NO: 350270 - DNA, 15 bp, Homo sapiens
tattactgttgagct

SEQ ID NO: 350271 - DNA, 15 bp, Homo sapiens
atattactgttgagc

SEQ ID NO: 350272 - DNA, 15 bp, Homo sapiens
aatattactgttgag

SEQ ID NO: 350273 - DNA, 15 bp, Homo sapiens
caatattactgttga

SEQ ID NO: 350274 - DNA, 15 bp, Homo sapiens
gcaatattactgttg

SEQ ID NO: 350275 - DNA, 15 bp, Homo sapiens
tgcaatattactgtt

SEQ ID NO: 350276 - DNA, 15 bp, Homo sapiens
atgcaatattactgt

SEQ ID NO: 350277 - DNA, 15 bp, Homo sapiens
tatgcaatattactg

SEQ ID NO: 350278 - DNA, 15 bp, Homo sapiens
ttatgcaatattact

SEQ ID NO: 350279 - DNA, 15 bp, Homo sapiens
tttatgcaatattac

SEQ ID NO: 350280 - DNA, 15 bp, Homo sapiens
ttttatgcaatatta

SEQ ID NO: 350281 - DNA, 15 bp, Homo sapiens
attttatgcaatatt

SEQ ID NO: 350282 - DNA, 15 bp, Homo sapiens
tattttatgcaatat

SEQ ID NO: 350283 - DNA, 15 bp, Homo sapiens
atattttatgcaata

SEQ ID NO: 350284 - DNA, 15 bp, Homo sapiens
aatattttatgcaat

SEQ ID NO: 350285 - DNA, 15 bp, Homo sapiens
aaatattttatgcaa

SEQ ID NO: 350286 - DNA, 15 bp, Homo sapiens
aaaatattttatgca

SEQ ID NO: 350287 - DNA, 15 bp, Homo sapiens
taaaatattttatgc

SEQ ID NO: 350288 - DNA, 15 bp, Homo sapiens
ttaaaatattttatg

SEQ ID NO: 350289 - DNA, 15 bp, Homo sapiens
cttaaaatattttat

SEQ ID NO: 350290 - DNA, 15 bp, Homo sapiens
acttaaaatatttta

SEQ ID NO: 350291 - DNA, 15 bp, Homo sapiens
tacttaaaatatttt

SEQ ID NO: 350292 - DNA, 15 bp, Homo sapiens
gtacttaaaatattt

SEQ ID NO: 350293 - DNA, 15 bp, Homo sapiens
tgtacttaaaatatt

SEQ ID NO: 350294 - DNA, 15 bp, Homo sapiens
atgtacttaaaatat

SEQ ID NO: 350295 - DNA, 15 bp, Homo sapiens
aatgtacttaaaata

SEQ ID NO: 350296 - DNA, 15 bp, Homo sapiens
taatgtacttaaaat

SEQ ID NO: 350297 - DNA, 15 bp, Homo sapiens
ataatgtacttaaaa

SEQ ID NO: 350298 - DNA, 15 bp, Homo sapiens
aataatgtacttaaa

SEQ ID NO: 350299 - DNA, 15 bp, Homo sapiens
taataatgtacttaa

SEQ ID NO: 350300 - DNA, 15 bp, Homo sapiens
ttaataatgtactta

SEQ ID NO: 350301 - DNA, 15 bp, Homo sapiens
attaataatgtactt

SEQ ID NO: 350302 - DNA, 15 bp, Homo sapiens
aattaataatgtact

SEQ ID NO: 350303 - DNA, 15 bp, Homo sapiens
caattaataatgtac

SEQ ID NO: 350304 - DNA, 15 bp, Homo sapiens
acaattaataatgta

SEQ ID NO: 350305 - DNA, 15 bp, Homo sapiens
cacaattaataatgt

SEQ ID NO: 350306 - DNA, 15 bp, Homo sapiens
tcacaattaataatg

SEQ ID NO: 350307 - DNA, 15 bp, Homo sapiens
ttcacaattaataat

SEQ ID NO: 350308 - DNA, 15 bp, Homo sapiens
cttcacaattaataa

SEQ ID NO: 350309 - DNA, 15 bp, Homo sapiens
ccttcacaattaata

SEQ ID NO: 350310 - DNA, 15 bp, Homo sapiens
accttcacaattaat

SEQ ID NO: 350311 - DNA, 15 bp, Homo sapiens
gaccttcacaattaa

SEQ ID NO: 350312 - DNA, 15 bp, Homo sapiens
agaccttcacaatta

SEQ ID NO: 350313 - DNA, 15 bp, Homo sapiens
tagaccttcacaatt

SEQ ID NO: 350314 - DNA, 15 bp, Homo sapiens
atagaccttcacaat

SEQ ID NO: 350315 - DNA, 15 bp, Homo sapiens
gatagaccttcacaa

SEQ ID NO: 350316 - DNA, 15 bp, Homo sapiens
tgatagaccttcaca

SEQ ID NO: 350317 - DNA, 15 bp, Homo sapiens
atgatagaccttcac

SEQ ID NO: 350318 - DNA, 15 bp, Homo sapiens
aatgatagaccttca

SEQ ID NO: 350319 - DNA, 15 bp, Homo sapiens
taatgatagaccttc

SEQ ID NO: 350320 - DNA, 15 bp, Homo sapiens
ctaatgatagacctt

SEQ ID NO: 350321 - DNA, 15 bp, Homo sapiens
actaatgatagacct

SEQ ID NO: 350322 - DNA, 15 bp, Homo sapiens
aactaatgatagacc

SEQ ID NO: 350323 - DNA, 15 bp, Homo sapiens
taactaatgatagac

SEQ ID NO: 350324 - DNA, 15 bp, Homo sapiens
ataactaatgataga

SEQ ID NO: 350325 - DNA, 15 bp, Homo sapiens
tataactaatgatag

SEQ ID NO: 350326 - DNA, 15 bp, Homo sapiens
atataactaatgata

SEQ ID NO: 350327 - DNA, 15 bp, Homo sapiens
tatataactaatgat

SEQ ID NO: 350328 - DNA, 15 bp, Homo sapiens
ttatataactaatga

SEQ ID NO: 350329 - DNA, 15 bp, Homo sapiens
cttatataactaatg

SEQ ID NO: 350330 - DNA, 15 bp, Homo sapiens
gcttatataactaat

SEQ ID NO: 350331 - DNA, 15 bp, Homo sapiens
ggcttatataactaa

SEQ ID NO: 350332 - DNA, 15 bp, Homo sapiens
aggcttatataacta

SEQ ID NO: 350333 - DNA, 15 bp, Homo sapiens
taggcttatataact

SEQ ID NO: 350334 - DNA, 15 bp, Homo sapiens
ataggcttatataac

SEQ ID NO: 350335 - DNA, 15 bp, Homo sapiens
aataggcttatataa

SEQ ID NO: 350336 - DNA, 15 bp, Homo sapiens
caataggcttatata

SEQ ID NO: 350337 - DNA, 15 bp, Homo sapiens
acaataggcttatat

SEQ ID NO: 350338 - DNA, 15 bp, Homo sapiens
gacaataggcttata

SEQ ID NO: 350339 - DNA, 15 bp, Homo sapiens
agacaataggcttat

SEQ ID NO: 350340 - DNA, 15 bp, Homo sapiens
aagacaataggctta

SEQ ID NO: 350341 - DNA, 15 bp, Homo sapiens
gaagacaataggctt

SEQ ID NO: 350342 - DNA, 15 bp, Homo sapiens
tgaagacaataggct

SEQ ID NO: 350343 - DNA, 15 bp, Homo sapiens
atgaagacaataggc

SEQ ID NO: 350344 - DNA, 15 bp, Homo sapiens
aatgaagacaatagg

SEQ ID NO: 350345 - DNA, 15 bp, Homo sapiens
caatgaagacaatag

SEQ ID NO: 350346 - DNA, 15 bp, Homo sapiens
tcaatgaagacaata

SEQ ID NO: 350347 - DNA, 15 bp, Homo sapiens
ttcaatgaagacaat

SEQ ID NO: 350348 - DNA, 15 bp, Homo sapiens
attcaatgaagacaa

SEQ ID NO: 350349 - DNA, 15 bp, Homo sapiens
cattcaatgaagaca

SEQ ID NO: 350350 - DNA, 15 bp, Homo sapiens
tcattcaatgaagac

SEQ ID NO: 350351 - DNA, 15 bp, Homo sapiens
ctcattcaatgaaga

SEQ ID NO: 350352 - DNA, 15 bp, Homo sapiens
actcattcaatgaag

SEQ ID NO: 350353 - DNA, 15 bp, Homo sapiens
aactcattcaatgaa

SEQ ID NO: 350354 - DNA, 15 bp, Homo sapiens
gaactcattcaatga

SEQ ID NO: 350355 - DNA, 15 bp, Homo sapiens
ggaactcattcaatg

SEQ ID NO: 350356 - DNA, 15 bp, Homo sapiens
aggaactcattcaat

SEQ ID NO: 350357 - DNA, 15 bp, Homo sapiens
taggaactcattcaa

SEQ ID NO: 350358 - DNA, 15 bp, Homo sapiens
ctaggaactcattca

SEQ ID NO: 350359 - DNA, 15 bp, Homo sapiens
actaggaactcattc

SEQ ID NO: 350360 - DNA, 15 bp, Homo sapiens
gactaggaactcatt

SEQ ID NO: 350361 - DNA, 15 bp, Homo sapiens
tgactaggaactcat

SEQ ID NO: 350362 - DNA, 15 bp, Homo sapiens
ttgactaggaactca

SEQ ID NO: 350363 - DNA, 15 bp, Homo sapiens
tttgactaggaactc

SEQ ID NO: 350364 - DNA, 15 bp, Homo sapiens
ctttgactaggaact

SEQ ID NO: 350365 - DNA, 15 bp, Homo sapiens
gctttgactaggaac

SEQ ID NO: 350366 - DNA, 15 bp, Homo sapiens
ggctttgactaggaa

SEQ ID NO: 350367 - DNA, 15 bp, Homo sapiens
tggctttgactagga

SEQ ID NO: 350368 - DNA, 15 bp, Homo sapiens
ctggctttgactagg

SEQ ID NO: 350369 - DNA, 15 bp, Homo sapiens
cctggctttgactag

SEQ ID NO: 350370 - DNA, 15 bp, Homo sapiens
gcctggctttgacta

SEQ ID NO: 350371 - DNA, 15 bp, Homo sapiens
ggcctggctttgact

SEQ ID NO: 350372 - DNA, 15 bp, Homo sapiens
aggcctggctttgac

SEQ ID NO: 350373 - DNA, 15 bp, Homo sapiens
caggcctggctttga

SEQ ID NO: 350374 - DNA, 15 bp, Homo sapiens
acaggcctggctttg

SEQ ID NO: 350375 - DNA, 15 bp, Homo sapiens
aacaggcctggcttt

SEQ ID NO: 350376 - DNA, 15 bp, Homo sapiens
gaacaggcctggctt

SEQ ID NO: 350377 - DNA, 15 bp, Homo sapiens
agaacaggcctggct

SEQ ID NO: 350378 - DNA, 15 bp, Homo sapiens
tagaacaggcctggc

SEQ ID NO: 350379 - DNA, 15 bp, Homo sapiens
ctagaacaggcctgg

SEQ ID NO: 350380 - DNA, 15 bp, Homo sapiens
cctagaacaggcctg

SEQ ID NO: 350381 - DNA, 15 bp, Homo sapiens
acctagaacaggcct

SEQ ID NO: 350382 - DNA, 15 bp, Homo sapiens
cacctagaacaggcc

SEQ ID NO: 350383 - DNA, 15 bp, Homo sapiens
acacctagaacaggc

SEQ ID NO: 350384 - DNA, 15 bp, Homo sapiens
cacacctagaacagg

SEQ ID NO: 350385 - DNA, 15 bp, Homo sapiens
gcacacctagaacag

SEQ ID NO: 350386 - DNA, 15 bp, Homo sapiens
agcacacctagaaca

SEQ ID NO: 350387 - DNA, 15 bp, Homo sapiens
tagcacacctagaac

SEQ ID NO: 350388 - DNA, 15 bp, Homo sapiens
gtagcacacctagaa

SEQ ID NO: 350389 - DNA, 15 bp, Homo sapiens
tgtagcacacctaga

SEQ ID NO: 350390 - DNA, 15 bp, Homo sapiens
atgtagcacacctag

SEQ ID NO: 350391 - DNA, 15 bp, Homo sapiens
aatgtagcacaccta

SEQ ID NO: 350392 - DNA, 15 bp, Homo sapiens
gaatgtagcacacct

SEQ ID NO: 350393 - DNA, 15 bp, Homo sapiens
agaatgtagcacacc

SEQ ID NO: 350394 - DNA, 15 bp, Homo sapiens
aagaatgtagcacac

SEQ ID NO: 350395 - DNA, 15 bp, Homo sapiens
aaagaatgtagcaca

SEQ ID NO: 350396 - DNA, 15 bp, Homo sapiens
taaagaatgtagcac

SEQ ID NO: 350397 - DNA, 15 bp, Homo sapiens
ataaagaatgtagca

SEQ ID NO: 350398 - DNA, 15 bp, Homo sapiens
aataaagaatgtagc

SEQ ID NO: 350399 - DNA, 15 bp, Homo sapiens
caataaagaatgtag

SEQ ID NO: 350400 - DNA, 15 bp, Homo sapiens
gcaataaagaatgta

SEQ ID NO: 350401 - DNA, 15 bp, Homo sapiens
agcaataaagaatgt

SEQ ID NO: 350402 - DNA, 15 bp, Homo sapiens
cagcaataaagaatg

SEQ ID NO: 350403 - DNA, 15 bp, Homo sapiens
gcagcaataaagaat

SEQ ID NO: 350404 - DNA, 15 bp, Homo sapiens
agcagcaataaagaa

SEQ ID NO: 350405 - DNA, 15 bp, Homo sapiens
gagcagcaataaaga

SEQ ID NO: 350406 - DNA, 15 bp, Homo sapiens
agagcagcaataaag

SEQ ID NO: 350407 - DNA, 15 bp, Homo sapiens
aagagcagcaataaa

SEQ ID NO: 350408 - DNA, 15 bp, Homo sapiens
gaagagcagcaataa

SEQ ID NO: 350409 - DNA, 15 bp, Homo sapiens
tgaagagcagcaata

SEQ ID NO: 350410 - DNA, 15 bp, Homo sapiens
ttgaagagcagcaat

SEQ ID NO: 350411 - DNA, 15 bp, Homo sapiens
tttgaagagcagcaa

SEQ ID NO: 350412 - DNA, 15 bp, Homo sapiens
ttttgaagagcagca

SEQ ID NO: 350413 - DNA, 15 bp, Homo sapiens
attttgaagagcagc

SEQ ID NO: 350414 - DNA, 15 bp, Homo sapiens
tattttgaagagcag

SEQ ID NO: 350415 - DNA, 15 bp, Homo sapiens
ttattttgaagagca

SEQ ID NO: 350416 - DNA, 15 bp, Homo sapiens
gttattttgaagagc

SEQ ID NO: 350417 - DNA, 15 bp, Homo sapiens
ggttattttgaagag

SEQ ID NO: 350418 - DNA, 15 bp, Homo sapiens
gggttattttgaaga

SEQ ID NO: 350419 - DNA, 15 bp, Homo sapiens
agggttattttgaag

SEQ ID NO: 350420 - DNA, 15 bp, Homo sapiens
cagggttattttgaa

SEQ ID NO: 350421 - DNA, 15 bp, Homo sapiens
ccagggttattttga

SEQ ID NO: 350422 - DNA, 15 bp, Homo sapiens
tccagggttattttg

SEQ ID NO: 350423 - DNA, 15 bp, Homo sapiens
ttccagggttatttt

SEQ ID NO: 350424 - DNA, 15 bp, Homo sapiens
cttccagggttattt

SEQ ID NO: 350425 - DNA, 15 bp, Homo sapiens
ccttccagggttatt

SEQ ID NO: 350426 - DNA, 15 bp, Homo sapiens
accttccagggttat

SEQ ID NO: 350427 - DNA, 15 bp, Homo sapiens
taccttccagggtta

SEQ ID NO: 350428 - DNA, 15 bp, Homo sapiens
ttaccttccagggtt

SEQ ID NO: 350429 - DNA, 15 bp, Homo sapiens
cttaccttccagggt

SEQ ID NO: 350430 - DNA, 15 bp, Homo sapiens
acttaccttccaggg

SEQ ID NO: 350431 - DNA, 15 bp, Homo sapiens
gacttaccttccagg

SEQ ID NO: 350432 - DNA, 15 bp, Homo sapiens
agacttaccttccag

SEQ ID NO: 350433 - DNA, 15 bp, Homo sapiens
aagacttaccttcca

SEQ ID NO: 350434 - DNA, 15 bp, Homo sapiens
gaagacttaccttcc

SEQ ID NO: 350435 - DNA, 15 bp, Homo sapiens
agaagacttaccttc

SEQ ID NO: 350436 - DNA, 15 bp, Homo sapiens
gagaagacttacctt

SEQ ID NO: 350437 - DNA, 15 bp, Homo sapiens
tgagaagacttacct

SEQ ID NO: 350438 - DNA, 15 bp, Homo sapiens
ttgagaagacttacc

SEQ ID NO: 350439 - DNA, 15 bp, Homo sapiens
tttgagaagacttac

SEQ ID NO: 350440 - DNA, 15 bp, Homo sapiens
gtttgagaagactta

SEQ ID NO: 350441 - DNA, 15 bp, Homo sapiens
tgtttgagaagactt

SEQ ID NO: 350442 - DNA, 15 bp, Homo sapiens
gtgtttgagaagact

SEQ ID NO: 350443 - DNA, 15 bp, Homo sapiens
agtgtttgagaagac

SEQ ID NO: 350444 - DNA, 15 bp, Homo sapiens
gagtgtttgagaaga

SEQ ID NO: 350445 - DNA, 15 bp, Homo sapiens
tgagtgtttgagaag

SEQ ID NO: 350446 - DNA, 15 bp, Homo sapiens
ctgagtgtttgagaa

SEQ ID NO: 350447 - DNA, 15 bp, Homo sapiens
tctgagtgtttgaga

SEQ ID NO: 350448 - DNA, 15 bp, Homo sapiens
aagctctgagtgttt

SEQ ID NO: 350449 - DNA, 15 bp, Homo sapiens
aaagctctgagtgtt

SEQ ID NO: 350450 - DNA, 15 bp, Homo sapiens
caaagctctgagtgt

SEQ ID NO: 350451 - DNA, 15 bp, Homo sapiens
ccaaagctctgagtg

SEQ ID NO: 350452 - DNA, 15 bp, Homo sapiens
accaaagctctgagt

SEQ ID NO: 350453 - DNA, 15 bp, Homo sapiens
aaccaaagctctgag

SEQ ID NO: 350454 - DNA, 15 bp, Homo sapiens
aaaccaaagctctga

SEQ ID NO: 350455 - DNA, 15 bp, Homo sapiens
gaaaccaaagctctg

SEQ ID NO: 350456 - DNA, 15 bp, Homo sapiens
ggaaaccaaagctct

SEQ ID NO: 350457 - DNA, 15 bp, Homo sapiens
aggaaaccaaagctc

SEQ ID NO: 350458 - DNA, 15 bp, Homo sapiens
gaggaaaccaaagct

SEQ ID NO: 350459 - DNA, 15 bp, Homo sapiens
tgaggaaaccaaagc

SEQ ID NO: 350460 - DNA, 15 bp, Homo sapiens
atgaggaaaccaaag

SEQ ID NO: 350461 - DNA, 15 bp, Homo sapiens
gatgaggaaaccaaa

SEQ ID NO: 350462 - DNA, 15 bp, Homo sapiens
agatgaggaaaccaa

SEQ ID NO: 350463 - DNA, 15 bp, Homo sapiens
cagatgaggaaacca

SEQ ID NO: 350464 - DNA, 15 bp, Homo sapiens
acagatgaggaaacc

SEQ ID NO: 350465 - DNA, 15 bp, Homo sapiens
attttacagatgagg

SEQ ID NO: 350466 - DNA, 15 bp, Homo sapiens
gattttacagatgag

SEQ ID NO: 350467 - DNA, 15 bp, Homo sapiens
cgattttacagatga

SEQ ID NO: 350468 - DNA, 15 bp, Homo sapiens
tcgattttacagatg

SEQ ID NO: 350469 - DNA, 15 bp, Homo sapiens
ctcgattttacagat

SEQ ID NO: 350470 - DNA, 15 bp, Homo sapiens
tctcgattttacaga

SEQ ID NO: 350471 - DNA, 15 bp, Homo sapiens
atctcgattttacag

SEQ ID NO: 350472 - DNA, 15 bp, Homo sapiens
tatctcgattttaca

SEQ ID NO: 350473 - DNA, 15 bp, Homo sapiens
ttatctcgattttac

SEQ ID NO: 350474 - DNA, 15 bp, Homo sapiens
cttatctcgatttta

SEQ ID NO: 350475 - DNA, 15 bp, Homo sapiens
acttatctcgatttt

SEQ ID NO: 350476 - DNA, 15 bp, Homo sapiens
cacttatctcgattt

SEQ ID NO: 350477 - DNA, 15 bp, Homo sapiens
tcacttatctcgatt

SEQ ID NO: 350478 - DNA, 15 bp, Homo sapiens
atcacttatctcgat

SEQ ID NO: 350479 - DNA, 15 bp, Homo sapiens
aatcacttatctcga

SEQ ID NO: 350480 - DNA, 15 bp, Homo sapiens
aaatcacttatctcg

SEQ ID NO: 350481 - DNA, 15 bp, Homo sapiens
caaatcacttatctc

SEQ ID NO: 350482 - DNA, 15 bp, Homo sapiens
acaaatcacttatct

SEQ ID NO: 350483 - DNA, 15 bp, Homo sapiens
gacaaatcacttatc

SEQ ID NO: 350484 - DNA, 15 bp, Homo sapiens
ggacaaatcacttat

SEQ ID NO: 350485 - DNA, 15 bp, Homo sapiens
tggacaaatcactta

SEQ ID NO: 350486 - DNA, 15 bp, Homo sapiens
ttggacaaatcactt

SEQ ID NO: 350487 - DNA, 15 bp, Homo sapiens
cttggacaaatcact

SEQ ID NO: 350488 - DNA, 15 bp, Homo sapiens
ccttggacaaatcac

SEQ ID NO: 350489 - DNA, 15 bp, Homo sapiens
gccttggacaaatca

SEQ ID NO: 350490 - DNA, 15 bp, Homo sapiens
ggccttggacaaatc

SEQ ID NO: 350491 - DNA, 15 bp, Homo sapiens
tggccttggacaaat

SEQ ID NO: 350492 - DNA, 15 bp, Homo sapiens
atggccttggacaaa

SEQ ID NO: 350493 - DNA, 15 bp, Homo sapiens
catggccttggacaa

SEQ ID NO: 350494 - DNA, 15 bp, Homo sapiens
tcatggccttggaca

SEQ ID NO: 350495 - DNA, 15 bp, Homo sapiens
ctcatggccttggac

SEQ ID NO: 350496 - DNA, 15 bp, Homo sapiens
cctcatggccttgga

SEQ ID NO: 350497 - DNA, 15 bp, Homo sapiens
gcctcatggccttgg

SEQ ID NO: 350498 - DNA, 15 bp, Homo sapiens
tgcctcatggccttg

SEQ ID NO: 350499 - DNA, 15 bp, Homo sapiens
gtgcctcatggcctt

SEQ ID NO: 350500 - DNA, 15 bp, Homo sapiens
tgtgcctcatggcct

SEQ ID NO: 350501 - DNA, 15 bp, Homo sapiens
atgtgcctcatggcc

SEQ ID NO: 350502 - DNA, 15 bp, Homo sapiens
tatgtgcctcatggc

SEQ ID NO: 350503 - DNA, 15 bp, Homo sapiens
ttatgtgcctcatgg

SEQ ID NO: 350504 - DNA, 15 bp, Homo sapiens
cttatgtgcctcatg

SEQ ID NO: 350505 - DNA, 15 bp, Homo sapiens
acttatgtgcctcat

SEQ ID NO: 350506 - DNA, 15 bp, Homo sapiens
tacttatgtgcctca

SEQ ID NO: 350507 - DNA, 15 bp, Homo sapiens
ttacttatgtgcctc

SEQ ID NO: 350508 - DNA, 15 bp, Homo sapiens
cttacttatgtgcct

SEQ ID NO: 350509 - DNA, 15 bp, Homo sapiens
acttacttatgtgcc

SEQ ID NO: 350510 - DNA, 15 bp, Homo sapiens
cacttacttatgtgc

SEQ ID NO: 350511 - DNA, 15 bp, Homo sapiens
ccacttacttatgtg

SEQ ID NO: 350512 - DNA, 15 bp, Homo sapiens
accacttacttatgt

SEQ ID NO: 350513 - DNA, 15 bp, Homo sapiens
caccacttacttatg

SEQ ID NO: 350514 - DNA, 15 bp, Homo sapiens
ccaccacttacttat

SEQ ID NO: 350515 - DNA, 15 bp, Homo sapiens
tccaccacttactta

SEQ ID NO: 350516 - DNA, 15 bp, Homo sapiens
ctccaccacttactt

SEQ ID NO: 350517 - DNA, 15 bp, Homo sapiens
gctccaccacttact

SEQ ID NO: 350518 - DNA, 15 bp, Homo sapiens
ggctccaccacttac

SEQ ID NO: 350519 - DNA, 15 bp, Homo sapiens
gggctccaccactta

SEQ ID NO: 350520 - DNA, 15 bp, Homo sapiens
tgggctccaccactt

SEQ ID NO: 350521 - DNA, 15 bp, Homo sapiens
ctgggctccaccact

SEQ ID NO: 350522 - DNA, 15 bp, Homo sapiens
tctgggctccaccac

SEQ ID NO: 350523 - DNA, 15 bp, Homo sapiens
ctctgggctccacca

SEQ ID NO: 350524 - DNA, 15 bp, Homo sapiens
actctgggctccacc

SEQ ID NO: 350525 - DNA, 15 bp, Homo sapiens
cactctgggctccac

SEQ ID NO: 350526 - DNA, 15 bp, Homo sapiens
ccactctgggctcca

SEQ ID NO: 350527 - DNA, 15 bp, Homo sapiens
tccactctgggctcc

SEQ ID NO: 350528 - DNA, 15 bp, Homo sapiens
ttccactctgggctc

SEQ ID NO: 350529 - DNA, 15 bp, Homo sapiens
gttccactctgggct

SEQ ID NO: 350530 - DNA, 15 bp, Homo sapiens
agttccactctgggc

SEQ ID NO: 350531 - DNA, 15 bp, Homo sapiens
cagttccactctggg

SEQ ID NO: 350532 - DNA, 15 bp, Homo sapiens
ccagttccactctgg

SEQ ID NO: 350533 - DNA, 15 bp, Homo sapiens
accagttccactctg

SEQ ID NO: 350534 - DNA, 15 bp, Homo sapiens
gaccagttccactct

SEQ ID NO: 350535 - DNA, 15 bp, Homo sapiens
agaccagttccactc

SEQ ID NO: 350536 - DNA, 15 bp, Homo sapiens
aagaccagttccact

SEQ ID NO: 350537 - DNA, 15 bp, Homo sapiens
aaagaccagttccac

SEQ ID NO: 350538 - DNA, 15 bp, Homo sapiens
gaaagaccagttcca

SEQ ID NO: 350539 - DNA, 15 bp, Homo sapiens
ggaaagaccagttcc

SEQ ID NO: 350540 - DNA, 15 bp, Homo sapiens
aggaaagaccagttc

SEQ ID NO: 350541 - DNA, 15 bp, Homo sapiens
aaggaaagaccagtt

SEQ ID NO: 350542 - DNA, 15 bp, Homo sapiens
aaaggaaagaccagt

SEQ ID NO: 350543 - DNA, 15 bp, Homo sapiens
aaaaggaaagaccag

SEQ ID NO: 350544 - DNA, 15 bp, Homo sapiens
gaaaaggaaagacca

SEQ ID NO: 350545 - DNA, 15 bp, Homo sapiens
agaaaaggaaagacc

SEQ ID NO: 350546 - DNA, 15 bp, Homo sapiens
tagaaaaggaaagac

SEQ ID NO: 350547 - DNA, 15 bp, Homo sapiens
ttagaaaaggaaaga

SEQ ID NO: 350548 - DNA, 15 bp, Homo sapiens
tttagaaaaggaaag

SEQ ID NO: 350549 - DNA, 15 bp, Homo sapiens
ttttagaaaaggaaa

SEQ ID NO: 350550 - DNA, 15 bp, Homo sapiens
attttagaaaaggaa

SEQ ID NO: 350551 - DNA, 15 bp, Homo sapiens
gattttagaaaagga

SEQ ID NO: 350552 - DNA, 15 bp, Homo sapiens
ggattttagaaaagg

SEQ ID NO: 350553 - DNA, 15 bp, Homo sapiens
tggattttagaaaag

SEQ ID NO: 350554 - DNA, 15 bp, Homo sapiens
gtggattttagaaaa

SEQ ID NO: 350555 - DNA, 15 bp, Homo sapiens
agtggattttagaaa

SEQ ID NO: 350556 - DNA, 15 bp, Homo sapiens
gagtggattttagaa

SEQ ID NO: 350557 - DNA, 15 bp, Homo sapiens
agagtggattttaga

SEQ ID NO: 350558 - DNA, 15 bp, Homo sapiens
gagagtggattttag

SEQ ID NO: 350559 - DNA, 15 bp, Homo sapiens
agagagtggatttta

SEQ ID NO: 350560 - DNA, 15 bp, Homo sapiens
aagagagtggatttt

SEQ ID NO: 350561 - DNA, 15 bp, Homo sapiens
aaagagagtggattt

SEQ ID NO: 350562 - DNA, 15 bp, Homo sapiens
gaaagagagtggatt

SEQ ID NO: 350563 - DNA, 15 bp, Homo sapiens
agaaagagagtggat

SEQ ID NO: 350564 - DNA, 15 bp, Homo sapiens
tagaaagagagtgga

SEQ ID NO: 350565 - DNA, 15 bp, Homo sapiens
gtagaaagagagtgg

SEQ ID NO: 350566 - DNA, 15 bp, Homo sapiens
ggtagaaagagagtg

SEQ ID NO: 350567 - DNA, 15 bp, Homo sapiens
tggtagaaagagagt

SEQ ID NO: 350568 - DNA, 15 bp, Homo sapiens
ttggtagaaagagag

SEQ ID NO: 350569 - DNA, 15 bp, Homo sapiens
tttggtagaaagaga

SEQ ID NO: 350570 - DNA, 15 bp, Homo sapiens
atttggtagaaagag

SEQ ID NO: 350571 - DNA, 15 bp, Homo sapiens
aatttggtagaaaga

SEQ ID NO: 350572 - DNA, 15 bp, Homo sapiens
aaatttggtagaaag

SEQ ID NO: 350573 - DNA, 15 bp, Homo sapiens
taaatttggtagaaa

SEQ ID NO: 350574 - DNA, 15 bp, Homo sapiens
ttaaatttggtagaa

SEQ ID NO: 350575 - DNA, 15 bp, Homo sapiens
attaaatttggtaga

SEQ ID NO: 350576 - DNA, 15 bp, Homo sapiens
tattaaatttggtag

SEQ ID NO: 350577 - DNA, 15 bp, Homo sapiens
ttattaaatttggta

SEQ ID NO: 350578 - DNA, 15 bp, Homo sapiens
attattaaatttggt

SEQ ID NO: 350579 - DNA, 15 bp, Homo sapiens
tattattaaatttgg

SEQ ID NO: 350580 - DNA, 15 bp, Homo sapiens
gtattattaaatttg

SEQ ID NO: 350581 - DNA, 15 bp, Homo sapiens
agtattattaaattt

SEQ ID NO: 350582 - DNA, 15 bp, Homo sapiens
tagtattattaaatt

SEQ ID NO: 350583 - DNA, 15 bp, Homo sapiens
gtagtattattaaat

SEQ ID NO: 350584 - DNA, 15 bp, Homo sapiens
ggtagtattattaaa

SEQ ID NO: 350585 - DNA, 15 bp, Homo sapiens
tggtagtattattaa

SEQ ID NO: 350586 - DNA, 15 bp, Homo sapiens
gtggtagtattatta

SEQ ID NO: 350587 - DNA, 15 bp, Homo sapiens
tgtggtagtattatt

SEQ ID NO: 350588 - DNA, 15 bp, Homo sapiens
atgtggtagtattat

SEQ ID NO: 350589 - DNA, 15 bp, Homo sapiens
aatgtggtagtatta

SEQ ID NO: 350590 - DNA, 15 bp, Homo sapiens
gaatgtggtagtatt

SEQ ID NO: 350591 - DNA, 15 bp, Homo sapiens
agaatgtggtagtat

SEQ ID NO: 350592 - DNA, 15 bp, Homo sapiens
aagaatgtggtagta

SEQ ID NO: 350593 - DNA, 15 bp, Homo sapiens
taagaatgtggtagt

SEQ ID NO: 350594 - DNA, 15 bp, Homo sapiens
gtaagaatgtggtag

SEQ ID NO: 350595 - DNA, 15 bp, Homo sapiens
tgtaagaatgtggta

SEQ ID NO: 350596 - DNA, 15 bp, Homo sapiens
ctgtaagaatgtggt

SEQ ID NO: 350597 - DNA, 15 bp, Homo sapiens
tctgtaagaatgtgg

SEQ ID NO: 350598 - DNA, 15 bp, Homo sapiens
ctctgtaagaatgtg

SEQ ID NO: 350599 - DNA, 15 bp, Homo sapiens
cctctgtaagaatgt

SEQ ID NO: 350600 - DNA, 15 bp, Homo sapiens
tcctctgtaagaatg

SEQ ID NO: 350601 - DNA, 15 bp, Homo sapiens
ctcctctgtaagaat

SEQ ID NO: 350602 - DNA, 15 bp, Homo sapiens
cctcctctgtaagaa

SEQ ID NO: 350603 - DNA, 15 bp, Homo sapiens
ccctcctctgtaaga

SEQ ID NO: 350604 - DNA, 15 bp, Homo sapiens
accctcctctgtaag

SEQ ID NO: 350605 - DNA, 15 bp, Homo sapiens
aaccctcctctgtaa

SEQ ID NO: 350606 - DNA, 15 bp, Homo sapiens
aaaccctcctctgta

SEQ ID NO: 350607 - DNA, 15 bp, Homo sapiens
taaaccctcctctgt

SEQ ID NO: 350608 - DNA, 15 bp, Homo sapiens
ataaaccctcctctg

SEQ ID NO: 350609 - DNA, 15 bp, Homo sapiens
aataaaccctcctct

SEQ ID NO: 350610 - DNA, 15 bp, Homo sapiens
taataaaccctcctc

SEQ ID NO: 350611 - DNA, 15 bp, Homo sapiens
gtaataaaccctcct

SEQ ID NO: 350612 - DNA, 15 bp, Homo sapiens
tgtaataaaccctcc

SEQ ID NO: 350613 - DNA, 15 bp, Homo sapiens
gtgtaataaaccctc

SEQ ID NO: 350614 - DNA, 15 bp, Homo sapiens
ggtgtaataaaccct

SEQ ID NO: 350615 - DNA, 15 bp, Homo sapiens
gggtgtaataaaccc

SEQ ID NO: 350616 - DNA, 15 bp, Homo sapiens
ggggtgtaataaacc

SEQ ID NO: 350617 - DNA, 15 bp, Homo sapiens
tggggtgtaataaac

SEQ ID NO: 350618 - DNA, 15 bp, Homo sapiens
ctggggtgtaataaa

SEQ ID NO: 350619 - DNA, 15 bp, Homo sapiens
gctggggtgtaataa

SEQ ID NO: 350620 - DNA, 15 bp, Homo sapiens
tgctggggtgtaata

SEQ ID NO: 350621 - DNA, 15 bp, Homo sapiens
gtgctggggtgtaat

SEQ ID NO: 350622 - DNA, 15 bp, Homo sapiens
agtgctggggtgtaa

SEQ ID NO: 350623 - DNA, 15 bp, Homo sapiens
tagtgctggggtgta

SEQ ID NO: 350624 - DNA, 15 bp, Homo sapiens
atagtgctggggtgt

SEQ ID NO: 350625 - DNA, 15 bp, Homo sapiens
aatagtgctggggtg

SEQ ID NO: 350626 - DNA, 15 bp, Homo sapiens
gaatagtgctggggt

SEQ ID NO: 350627 - DNA, 15 bp, Homo sapiens
agaatagtgctgggg

SEQ ID NO: 350628 - DNA, 15 bp, Homo sapiens
tagaatagtgctggg

SEQ ID NO: 350629 - DNA, 15 bp, Homo sapiens
ctagaatagtgctgg

SEQ ID NO: 350630 - DNA, 15 bp, Homo sapiens
cctagaatagtgctg

SEQ ID NO: 350631 - DNA, 15 bp, Homo sapiens
acctagaatagtgct

SEQ ID NO: 350632 - DNA, 15 bp, Homo sapiens
tacctagaatagtgc

SEQ ID NO: 350633 - DNA, 15 bp, Homo sapiens
gtacctagaatagtg

SEQ ID NO: 350634 - DNA, 15 bp, Homo sapiens
agtacctagaatagt

SEQ ID NO: 350635 - DNA, 15 bp, Homo sapiens
tagtacctagaatag

SEQ ID NO: 350636 - DNA, 15 bp, Homo sapiens
ctagtacctagaata

SEQ ID NO: 350637 - DNA, 15 bp, Homo sapiens
cctagtacctagaat

SEQ ID NO: 350638 - DNA, 15 bp, Homo sapiens
acctagtacctagaa

SEQ ID NO: 350639 - DNA, 15 bp, Homo sapiens
aacctagtacctaga

SEQ ID NO: 350640 - DNA, 15 bp, Homo sapiens
gaacctagtacctag

SEQ ID NO: 350641 - DNA, 15 bp, Homo sapiens
agaacctagtaccta

SEQ ID NO: 350642 - DNA, 15 bp, Homo sapiens
gagaacctagtacct

SEQ ID NO: 350643 - DNA, 15 bp, Homo sapiens
agagaacctagtacc

SEQ ID NO: 350644 - DNA, 15 bp, Homo sapiens
cagagaacctagtac

SEQ ID NO: 350645 - DNA, 15 bp, Homo sapiens
acagagaacctagta

SEQ ID NO: 350646 - DNA, 15 bp, Homo sapiens
tacagagaacctagt

SEQ ID NO: 350647 - DNA, 15 bp, Homo sapiens
atacagagaacctag

SEQ ID NO: 350648 - DNA, 15 bp, Homo sapiens
gatacagagaaccta

SEQ ID NO: 350649 - DNA, 15 bp, Homo sapiens
agatacagagaacct

SEQ ID NO: 350650 - DNA, 15 bp, Homo sapiens
tagatacagagaacc

SEQ ID NO: 350651 - DNA, 15 bp, Homo sapiens
ttagatacagagaac

SEQ ID NO: 350652 - DNA, 15 bp, Homo sapiens
tttagatacagagaa

SEQ ID NO: 350653 - DNA, 15 bp, Homo sapiens
ttttagatacagaga

SEQ ID NO: 350654 - DNA, 15 bp, Homo sapiens
gttttagatacagag

SEQ ID NO: 350655 - DNA, 15 bp, Homo sapiens
agttttagatacaga

SEQ ID NO: 350656 - DNA, 15 bp, Homo sapiens
aagttttagatacag

SEQ ID NO: 350657 - DNA, 15 bp, Homo sapiens
caagttttagataca

SEQ ID NO: 350658 - DNA, 15 bp, Homo sapiens
acaagttttagatac

SEQ ID NO: 350659 - DNA, 15 bp, Homo sapiens
aacaagttttagata

SEQ ID NO: 350660 - DNA, 15 bp, Homo sapiens
taacaagttttagat

SEQ ID NO: 350661 - DNA, 15 bp, Homo sapiens
ttaacaagttttaga

SEQ ID NO: 350662 - DNA, 15 bp, Homo sapiens
tttaacaagttttag

SEQ ID NO: 350663 - DNA, 15 bp, Homo sapiens
gtttaacaagtttta

SEQ ID NO: 350664 - DNA, 15 bp, Homo sapiens
agtttaacaagtttt

SEQ ID NO: 350665 - DNA, 15 bp, Homo sapiens
gagtttaacaagttt

SEQ ID NO: 350666 - DNA, 15 bp, Homo sapiens
agagtttaacaagtt

SEQ ID NO: 350667 - DNA, 15 bp, Homo sapiens
gagagtttaacaagt

SEQ ID NO: 350668 - DNA, 15 bp, Homo sapiens
tgagagtttaacaag

SEQ ID NO: 350669 - DNA, 15 bp, Homo sapiens
gtgagagtttaacaa

SEQ ID NO: 350670 - DNA, 15 bp, Homo sapiens
cgtgagagtttaaca

SEQ ID NO: 350671 - DNA, 15 bp, Homo sapiens
gcgtgagagtttaac

SEQ ID NO: 350672 - DNA, 15 bp, Homo sapiens
tgcgtgagagtttaa

SEQ ID NO: 350673 - DNA, 15 bp, Homo sapiens
ttgcgtgagagttta

SEQ ID NO: 350674 - DNA, 15 bp, Homo sapiens
gttgcgtgagagttt

SEQ ID NO: 350675 - DNA, 15 bp, Homo sapiens
ggttgcgtgagagtt

SEQ ID NO: 350676 - DNA, 15 bp, Homo sapiens
gggttgcgtgagagt

SEQ ID NO: 350677 - DNA, 15 bp, Homo sapiens
ggggttgcgtgagag

SEQ ID NO: 350678 - DNA, 15 bp, Homo sapiens
tggggttgcgtgaga

SEQ ID NO: 350679 - DNA, 15 bp, Homo sapiens
atggggttgcgtgag

SEQ ID NO: 350680 - DNA, 15 bp, Homo sapiens
catggggttgcgtga

SEQ ID NO: 350681 - DNA, 15 bp, Homo sapiens
tcatggggttgcgtg

SEQ ID NO: 350682 - DNA, 15 bp, Homo sapiens
ctcatggggttgcgt

SEQ ID NO: 350683 - DNA, 15 bp, Homo sapiens
tctcatggggttgcg

SEQ ID NO: 350684 - DNA, 15 bp, Homo sapiens
atctcatggggttgc

SEQ ID NO: 350685 - DNA, 15 bp, Homo sapiens
tatctcatggggttg

SEQ ID NO: 350686 - DNA, 15 bp, Homo sapiens
ctatctcatggggtt

SEQ ID NO: 350687 - DNA, 15 bp, Homo sapiens
cctatctcatggggt

SEQ ID NO: 350688 - DNA, 15 bp, Homo sapiens
acctatctcatgggg

SEQ ID NO: 350689 - DNA, 15 bp, Homo sapiens
tacctatctcatggg

SEQ ID NO: 350690 - DNA, 15 bp, Homo sapiens
ctacctatctcatgg

SEQ ID NO: 350691 - DNA, 15 bp, Homo sapiens
gctacctatctcatg

SEQ ID NO: 350692 - DNA, 15 bp, Homo sapiens
tgctacctatctcat

SEQ ID NO: 350693 - DNA, 15 bp, Homo sapiens
atgctacctatctca

SEQ ID NO: 350694 - DNA, 15 bp, Homo sapiens
aatgctacctatctc

SEQ ID NO: 350695 - DNA, 15 bp, Homo sapiens
taatgctacctatct

SEQ ID NO: 350696 - DNA, 15 bp, Homo sapiens
gtaatgctacctatc

SEQ ID NO: 350697 - DNA, 15 bp, Homo sapiens
agtaatgctacctat

SEQ ID NO: 350698 - DNA, 15 bp, Homo sapiens
gagtaatgctaccta

SEQ ID NO: 350699 - DNA, 15 bp, Homo sapiens
agagtaatgctacct

SEQ ID NO: 350700 - DNA, 15 bp, Homo sapiens
aagagtaatgctacc

SEQ ID NO: 350701 - DNA, 15 bp, Homo sapiens
aaagagtaatgctac

SEQ ID NO: 350702 - DNA, 15 bp, Homo sapiens
gaaagagtaatgcta

SEQ ID NO: 350703 - DNA, 15 bp, Homo sapiens
ggaaagagtaatgct

SEQ ID NO: 350704 - DNA, 15 bp, Homo sapiens
gggaaagagtaatgc

SEQ ID NO: 350705 - DNA, 15 bp, Homo sapiens
tgggaaagagtaatg

SEQ ID NO: 350706 - DNA, 15 bp, Homo sapiens
gtgggaaagagtaat

SEQ ID NO: 350707 - DNA, 15 bp, Homo sapiens
agtgggaaagagtaa

SEQ ID NO: 350708 - DNA, 15 bp, Homo sapiens
aagtgggaaagagta

SEQ ID NO: 350709 - DNA, 15 bp, Homo sapiens
aaagtgggaaagagt

SEQ ID NO: 350710 - DNA, 15 bp, Homo sapiens
taaagtgggaaagag

SEQ ID NO: 350711 - DNA, 15 bp, Homo sapiens
gtaaagtgggaaaga

SEQ ID NO: 350712 - DNA, 15 bp, Homo sapiens
tgtaaagtgggaaag

SEQ ID NO: 350713 - DNA, 15 bp, Homo sapiens
atgtaaagtgggaaa

SEQ ID NO: 350714 - DNA, 15 bp, Homo sapiens
tatgtaaagtgggaa

SEQ ID NO: 350715 - DNA, 15 bp, Homo sapiens
atatgtaaagtggga

SEQ ID NO: 350716 - DNA, 15 bp, Homo sapiens
catatgtaaagtggg

SEQ ID NO: 350717 - DNA, 15 bp, Homo sapiens
tcatatgtaaagtgg

SEQ ID NO: 350718 - DNA, 15 bp, Homo sapiens
ctcatatgtaaagtg

SEQ ID NO: 350719 - DNA, 15 bp, Homo sapiens
cctcatatgtaaagt

SEQ ID NO: 350720 - DNA, 15 bp, Homo sapiens
tcctcatatgtaaag

SEQ ID NO: 350721 - DNA, 15 bp, Homo sapiens
ttcctcatatgtaaa

SEQ ID NO: 350722 - DNA, 15 bp, Homo sapiens
tttcctcatatgtaa

SEQ ID NO: 350723 - DNA, 15 bp, Homo sapiens
gtttcctcatatgta

SEQ ID NO: 350724 - DNA, 15 bp, Homo sapiens
agtttcctcatatgt

SEQ ID NO: 350725 - DNA, 15 bp, Homo sapiens
cagtttcctcatatg

SEQ ID NO: 350726 - DNA, 15 bp, Homo sapiens
tcagtttcctcatat

SEQ ID NO: 350727 - DNA, 15 bp, Homo sapiens
ctcagtttcctcata

SEQ ID NO: 350728 - DNA, 15 bp, Homo sapiens
ttgtgcctcagtttc

SEQ ID NO: 350729 - DNA, 15 bp, Homo sapiens
gttgtgcctcagttt

SEQ ID NO: 350730 - DNA, 15 bp, Homo sapiens
agttgtgcctcagtt

SEQ ID NO: 350731 - DNA, 15 bp, Homo sapiens
aagttgtgcctcagt

SEQ ID NO: 350732 - DNA, 15 bp, Homo sapiens
caagttgtgcctcag

SEQ ID NO: 350733 - DNA, 15 bp, Homo sapiens
ccaagttgtgcctca

SEQ ID NO: 350734 - DNA, 15 bp, Homo sapiens
gccaagttgtgcctc

SEQ ID NO: 350735 - DNA, 15 bp, Homo sapiens
agccaagttgtgcct

SEQ ID NO: 350736 - DNA, 15 bp, Homo sapiens
tagccaagttgtgcc

SEQ ID NO: 350737 - DNA, 15 bp, Homo sapiens
ttagccaagttgtgc

SEQ ID NO: 350738 - DNA, 15 bp, Homo sapiens
gttagccaagttgtg

SEQ ID NO: 350739 - DNA, 15 bp, Homo sapiens
agttagccaagttgt

SEQ ID NO: 350740 - DNA, 15 bp, Homo sapiens
tagttagccaagttg

SEQ ID NO: 350741 - DNA, 15 bp, Homo sapiens
ttagttagccaagtt

SEQ ID NO: 350742 - DNA, 15 bp, Homo sapiens
gttagttagccaagt

SEQ ID NO: 350743 - DNA, 15 bp, Homo sapiens
agttagttagccaag

SEQ ID NO: 350744 - DNA, 15 bp, Homo sapiens
aagttagttagccaa

SEQ ID NO: 350745 - DNA, 15 bp, Homo sapiens
caagttagttagcca

SEQ ID NO: 350746 - DNA, 15 bp, Homo sapiens
gcaagttagttagcc

SEQ ID NO: 350747 - DNA, 15 bp, Homo sapiens
ggcaagttagttagc

SEQ ID NO: 350748 - DNA, 15 bp, Homo sapiens
gggcaagttagttag

SEQ ID NO: 350749 - DNA, 15 bp, Homo sapiens
tgggcaagttagtta

SEQ ID NO: 350750 - DNA, 15 bp, Homo sapiens
ttgggcaagttagtt

SEQ ID NO: 350751 - DNA, 15 bp, Homo sapiens
tttgggcaagttagt

SEQ ID NO: 350752 - DNA, 15 bp, Homo sapiens
ctttgggcaagttag

SEQ ID NO: 350753 - DNA, 15 bp, Homo sapiens
gctttgggcaagtta

SEQ ID NO: 350754 - DNA, 15 bp, Homo sapiens
ggctttgggcaagtt

SEQ ID NO: 350755 - DNA, 15 bp, Homo sapiens
tggctttgggcaagt

SEQ ID NO: 350756 - DNA, 15 bp, Homo sapiens
atggctttgggcaag

SEQ ID NO: 350757 - DNA, 15 bp, Homo sapiens
tatggctttgggcaa

SEQ ID NO: 350758 - DNA, 15 bp, Homo sapiens
gtatggctttgggca

SEQ ID NO: 350759 - DNA, 15 bp, Homo sapiens
agtatggctttgggc

SEQ ID NO: 350760 - DNA, 15 bp, Homo sapiens
cagtatggctttggg

SEQ ID NO: 350761 - DNA, 15 bp, Homo sapiens
gcagtatggctttgg

SEQ ID NO: 350762 - DNA, 15 bp, Homo sapiens
agcagtatggctttg

SEQ ID NO: 350763 - DNA, 15 bp, Homo sapiens
tagcagtatggcttt

SEQ ID NO: 350764 - DNA, 15 bp, Homo sapiens
ctagcagtatggctt

SEQ ID NO: 350765 - DNA, 15 bp, Homo sapiens
actagcagtatggct

SEQ ID NO: 350766 - DNA, 15 bp, Homo sapiens
cactagcagtatggc

SEQ ID NO: 350767 - DNA, 15 bp, Homo sapiens
tcactagcagtatgg

SEQ ID NO: 350768 - DNA, 15 bp, Homo sapiens
ctcactagcagtatg

SEQ ID NO: 350769 - DNA, 15 bp, Homo sapiens
cctcactagcagtat

SEQ ID NO: 350770 - DNA, 15 bp, Homo sapiens
tcctcactagcagta

SEQ ID NO: 350771 - DNA, 15 bp, Homo sapiens
ttcctcactagcagt

SEQ ID NO: 350772 - DNA, 15 bp, Homo sapiens
attcctcactagcag

SEQ ID NO: 350773 - DNA, 15 bp, Homo sapiens
tattcctcactagca

SEQ ID NO: 350774 - DNA, 15 bp, Homo sapiens
ttattcctcactagc

SEQ ID NO: 350775 - DNA, 15 bp, Homo sapiens
tttattcctcactag

SEQ ID NO: 350776 - DNA, 15 bp, Homo sapiens
ctttattcctcacta

SEQ ID NO: 350777 - DNA, 15 bp, Homo sapiens
gctttattcctcact

SEQ ID NO: 350778 - DNA, 15 bp, Homo sapiens
ggctttattcctcac

SEQ ID NO: 350779 - DNA, 15 bp, Homo sapiens
tggctttattcctca

SEQ ID NO: 350780 - DNA, 15 bp, Homo sapiens
ctggctttattcctc

SEQ ID NO: 350781 - DNA, 15 bp, Homo sapiens
cctggctttattcct

SEQ ID NO: 350782 - DNA, 15 bp, Homo sapiens
tcctggctttattcc

SEQ ID NO: 350783 - DNA, 15 bp, Homo sapiens
ttcctggctttattc

SEQ ID NO: 350784 - DNA, 15 bp, Homo sapiens
cttcctggctttatt

SEQ ID NO: 350785 - DNA, 15 bp, Homo sapiens
acttcctggctttat

SEQ ID NO: 350786 - DNA, 15 bp, Homo sapiens
aacttcctggcttta

SEQ ID NO: 350787 - DNA, 15 bp, Homo sapiens
caacttcctggcttt

SEQ ID NO: 350788 - DNA, 15 bp, Homo sapiens
ccaacttcctggctt

SEQ ID NO: 350789 - DNA, 15 bp, Homo sapiens
tccaacttcctggct

SEQ ID NO: 350790 - DNA, 15 bp, Homo sapiens
ctccaacttcctggc

SEQ ID NO: 350791 - DNA, 15 bp, Homo sapiens
gctccaacttcctgg

SEQ ID NO: 350792 - DNA, 15 bp, Homo sapiens
agctccaacttcctg

SEQ ID NO: 350793 - DNA, 15 bp, Homo sapiens
aagctccaacttcct

SEQ ID NO: 350794 - DNA, 15 bp, Homo sapiens
caagctccaacttcc

SEQ ID NO: 350795 - DNA, 15 bp, Homo sapiens
gcaagctccaacttc

SEQ ID NO: 350796 - DNA, 15 bp, Homo sapiens
tgcaagctccaactt

SEQ ID NO: 350797 - DNA, 15 bp, Homo sapiens
gtgcaagctccaact

SEQ ID NO: 350798 - DNA, 15 bp, Homo sapiens
agtgcaagctccaac

SEQ ID NO: 350799 - DNA, 15 bp, Homo sapiens
gagtgcaagctccaa

SEQ ID NO: 350800 - DNA, 15 bp, Homo sapiens
agagtgcaagctcca

SEQ ID NO: 350801 - DNA, 15 bp, Homo sapiens
aagagtgcaagctcc

SEQ ID NO: 350802 - DNA, 15 bp, Homo sapiens
taagagtgcaagctc

SEQ ID NO: 350803 - DNA, 15 bp, Homo sapiens
ttaagagtgcaagct

SEQ ID NO: 350804 - DNA, 15 bp, Homo sapiens
attaagagtgcaagc

SEQ ID NO: 350805 - DNA, 15 bp, Homo sapiens
aattaagagtgcaag

SEQ ID NO: 350806 - DNA, 15 bp, Homo sapiens
taattaagagtgcaa

SEQ ID NO: 350807 - DNA, 15 bp, Homo sapiens
ataattaagagtgca

SEQ ID NO: 350808 - DNA, 15 bp, Homo sapiens
aataattaagagtgc

SEQ ID NO: 350809 - DNA, 15 bp, Homo sapiens
aaataattaagagtg

SEQ ID NO: 350810 - DNA, 15 bp, Homo sapiens
caaataattaagagt

SEQ ID NO: 350811 - DNA, 15 bp, Homo sapiens
gcaaataattaagag

SEQ ID NO: 350812 - DNA, 15 bp, Homo sapiens
ggcaaataattaaga

SEQ ID NO: 350813 - DNA, 15 bp, Homo sapiens
aggcaaataattaag

SEQ ID NO: 350814 - DNA, 15 bp, Homo sapiens
taggcaaataattaa

SEQ ID NO: 350815 - DNA, 15 bp, Homo sapiens
ctaggcaaataatta

SEQ ID NO: 350816 - DNA, 15 bp, Homo sapiens
cctaggcaaataatt

SEQ ID NO: 350817 - DNA, 15 bp, Homo sapiens
acctaggcaaataat

SEQ ID NO: 350818 - DNA, 15 bp, Homo sapiens
aacctaggcaaataa

SEQ ID NO: 350819 - DNA, 15 bp, Homo sapiens
taacctaggcaaata

SEQ ID NO: 350820 - DNA, 15 bp, Homo sapiens
ttaacctaggcaaat

SEQ ID NO: 350821 - DNA, 15 bp, Homo sapiens
cttaacctaggcaaa

SEQ ID NO: 350822 - DNA, 15 bp, Homo sapiens
gcttaacctaggcaa

SEQ ID NO: 350823 - DNA, 15 bp, Homo sapiens
ggcttaacctaggca

SEQ ID NO: 350824 - DNA, 15 bp, Homo sapiens
aggcttaacctaggc

SEQ ID NO: 350825 - DNA, 15 bp, Homo sapiens
caggcttaacctagg

SEQ ID NO: 350826 - DNA, 15 bp, Homo sapiens
tcaggcttaacctag

SEQ ID NO: 350827 - DNA, 15 bp, Homo sapiens
atcaggcttaaccta

SEQ ID NO: 350828 - DNA, 15 bp, Homo sapiens
tatcaggcttaacct

SEQ ID NO: 350829 - DNA, 15 bp, Homo sapiens
gtatcaggcttaacc

SEQ ID NO: 350830 - DNA, 15 bp, Homo sapiens
cgtatcaggcttaac

SEQ ID NO: 350831 - DNA, 15 bp, Homo sapiens
gcgtatcaggcttaa

SEQ ID NO: 350832 - DNA, 15 bp, Homo sapiens
agcgtatcaggctta

SEQ ID NO: 350833 - DNA, 15 bp, Homo sapiens
cagcgtatcaggctt

SEQ ID NO: 350834 - DNA, 15 bp, Homo sapiens
tcagcgtatcaggct

SEQ ID NO: 350835 - DNA, 15 bp, Homo sapiens
ctcagcgtatcaggc

SEQ ID NO: 350836 - DNA, 15 bp, Homo sapiens
gctcagcgtatcagg

SEQ ID NO: 350837 - DNA, 15 bp, Homo sapiens
tgctcagcgtatcag

SEQ ID NO: 350838 - DNA, 15 bp, Homo sapiens
gtgctcagcgtatca

SEQ ID NO: 350839 - DNA, 15 bp, Homo sapiens
tgtgctcagcgtatc

SEQ ID NO: 350840 - DNA, 15 bp, Homo sapiens
ctgtgctcagcgtat

SEQ ID NO: 350841 - DNA, 15 bp, Homo sapiens
tctgtgctcagcgta

SEQ ID NO: 350842 - DNA, 15 bp, Homo sapiens
ttctgtgctcagcgt

SEQ ID NO: 350843 - DNA, 15 bp, Homo sapiens
gttctgtgctcagcg

SEQ ID NO: 350844 - DNA, 15 bp, Homo sapiens
cgttctgtgctcagc

SEQ ID NO: 350845 - DNA, 15 bp, Homo sapiens
tcgttctgtgctcag

SEQ ID NO: 350846 - DNA, 15 bp, Homo sapiens
atcgttctgtgctca

SEQ ID NO: 350847 - DNA, 15 bp, Homo sapiens
catcgttctgtgctc

SEQ ID NO: 350848 - DNA, 15 bp, Homo sapiens
tcatcgttctgtgct

SEQ ID NO: 350849 - DNA, 15 bp, Homo sapiens
gtcatcgttctgtgc

SEQ ID NO: 350850 - DNA, 15 bp, Homo sapiens
tgtcatcgttctgtg

SEQ ID NO: 350851 - DNA, 15 bp, Homo sapiens
atgtcatcgttctgt

SEQ ID NO: 350852 - DNA, 15 bp, Homo sapiens
catgtcatcgttctg

SEQ ID NO: 350853 - DNA, 15 bp, Homo sapiens
acatgtcatcgttct

SEQ ID NO: 350854 - DNA, 15 bp, Homo sapiens
cacatgtcatcgttc

SEQ ID NO: 350855 - DNA, 15 bp, Homo sapiens
tcacatgtcatcgtt

SEQ ID NO: 350856 - DNA, 15 bp, Homo sapiens
gtcacatgtcatcgt

SEQ ID NO: 350857 - DNA, 15 bp, Homo sapiens
ggtcacatgtcatcg

SEQ ID NO: 350858 - DNA, 15 bp, Homo sapiens
cggtcacatgtcatc

SEQ ID NO: 350859 - DNA, 15 bp, Homo sapiens
acggtcacatgtcat

SEQ ID NO: 350860 - DNA, 15 bp, Homo sapiens
cacggtcacatgtca

SEQ ID NO: 350861 - DNA, 15 bp, Homo sapiens
ccacggtcacatgtc

SEQ ID NO: 350862 - DNA, 15 bp, Homo sapiens
tccacggtcacatgt

SEQ ID NO: 350863 - DNA, 15 bp, Homo sapiens
atccacggtcacatg

SEQ ID NO: 350864 - DNA, 15 bp, Homo sapiens
tatccacggtcacat

SEQ ID NO: 350865 - DNA, 15 bp, Homo sapiens
gtatccacggtcaca

SEQ ID NO: 350866 - DNA, 15 bp, Homo sapiens
agtatccacggtcac

SEQ ID NO: 350867 - DNA, 15 bp, Homo sapiens
aagtatccacggtca

SEQ ID NO: 350868 - DNA, 15 bp, Homo sapiens
taagtatccacggtc

SEQ ID NO: 350869 - DNA, 15 bp, Homo sapiens
ctaagtatccacggt

SEQ ID NO: 350870 - DNA, 15 bp, Homo sapiens
cctaagtatccacgg

SEQ ID NO: 350871 - DNA, 15 bp, Homo sapiens
ccctaagtatccacg

SEQ ID NO: 350872 - DNA, 15 bp, Homo sapiens
accctaagtatccac

SEQ ID NO: 350873 - DNA, 15 bp, Homo sapiens
gaccctaagtatcca

SEQ ID NO: 350874 - DNA, 15 bp, Homo sapiens
ggaccctaagtatcc

SEQ ID NO: 350875 - DNA, 15 bp, Homo sapiens
aggaccctaagtatc

SEQ ID NO: 350876 - DNA, 15 bp, Homo sapiens
gaggaccctaagtat

SEQ ID NO: 350877 - DNA, 15 bp, Homo sapiens
agaggaccctaagta

SEQ ID NO: 350878 - DNA, 15 bp, Homo sapiens
aagaggaccctaagt

SEQ ID NO: 350879 - DNA, 15 bp, Homo sapiens
gaagaggaccctaag

SEQ ID NO: 350880 - DNA, 15 bp, Homo sapiens
ggaagaggaccctaa

SEQ ID NO: 350881 - DNA, 15 bp, Homo sapiens
aggaagaggacccta

SEQ ID NO: 350882 - DNA, 15 bp, Homo sapiens
gaggaagaggaccct

SEQ ID NO: 350883 - DNA, 15 bp, Homo sapiens
ggaggaagaggaccc

SEQ ID NO: 350884 - DNA, 15 bp, Homo sapiens
gggaggaagaggacc

SEQ ID NO: 350885 - DNA, 15 bp, Homo sapiens
ggggaggaagaggac

SEQ ID NO: 350886 - DNA, 15 bp, Homo sapiens
tggggaggaagagga

SEQ ID NO: 350887 - DNA, 15 bp, Homo sapiens
atggggaggaagagg

SEQ ID NO: 350888 - DNA, 15 bp, Homo sapiens
gatggggaggaagag

SEQ ID NO: 350889 - DNA, 15 bp, Homo sapiens
ggatggggaggaaga

SEQ ID NO: 350890 - DNA, 15 bp, Homo sapiens
tggatggggaggaag

SEQ ID NO: 350891 - DNA, 15 bp, Homo sapiens
gtggatggggaggaa

SEQ ID NO: 350892 - DNA, 15 bp, Homo sapiens
agtggatggggagga

SEQ ID NO: 350893 - DNA, 15 bp, Homo sapiens
gagtggatggggagg

SEQ ID NO: 350894 - DNA, 15 bp, Homo sapiens
agagtggatggggag

SEQ ID NO: 350895 - DNA, 15 bp, Homo sapiens
tagagtggatgggga

SEQ ID NO: 350896 - DNA, 15 bp, Homo sapiens
ctagagtggatgggg

SEQ ID NO: 350897 - DNA, 15 bp, Homo sapiens
gctagagtggatggg

SEQ ID NO: 350898 - DNA, 15 bp, Homo sapiens
tgctagagtggatgg

SEQ ID NO: 350899 - DNA, 15 bp, Homo sapiens
ttgctagagtggatg

SEQ ID NO: 350900 - DNA, 15 bp, Homo sapiens
tttgctagagtggat

SEQ ID NO: 350901 - DNA, 15 bp, Homo sapiens
gtttgctagagtgga

SEQ ID NO: 350902 - DNA, 15 bp, Homo sapiens
agtttgctagagtgg

SEQ ID NO: 350903 - DNA, 15 bp, Homo sapiens
tagtttgctagagtg

SEQ ID NO: 350904 - DNA, 15 bp, Homo sapiens
ttagtttgctagagt

SEQ ID NO: 350905 - DNA, 15 bp, Homo sapiens
cttagtttgctagag

SEQ ID NO: 350906 - DNA, 15 bp, Homo sapiens
gcttagtttgctaga

SEQ ID NO: 350907 - DNA, 15 bp, Homo sapiens
ggcttagtttgctag

SEQ ID NO: 350908 - DNA, 15 bp, Homo sapiens
tggcttagtttgcta

SEQ ID NO: 350909 - DNA, 15 bp, Homo sapiens
atggcttagtttgct

SEQ ID NO: 350910 - DNA, 15 bp, Homo sapiens
tatggcttagtttgc

SEQ ID NO: 350911 - DNA, 15 bp, Homo sapiens
gtatggcttagtttg

SEQ ID NO: 350912 - DNA, 15 bp, Homo sapiens
agtatggcttagttt

SEQ ID NO: 350913 - DNA, 15 bp, Homo sapiens
cagtatggcttagtt

SEQ ID NO: 350914 - DNA, 15 bp, Homo sapiens
ccagtatggcttagt

SEQ ID NO: 350915 - DNA, 15 bp, Homo sapiens
gccagtatggcttag

SEQ ID NO: 350916 - DNA, 15 bp, Homo sapiens
agccagtatggctta

SEQ ID NO: 350917 - DNA, 15 bp, Homo sapiens
tagccagtatggctt

SEQ ID NO: 350918 - DNA, 15 bp, Homo sapiens
gtagccagtatggct

SEQ ID NO: 350919 - DNA, 15 bp, Homo sapiens
tgtagccagtatggc

SEQ ID NO: 350920 - DNA, 15 bp, Homo sapiens
ctgtagccagtatgg

SEQ ID NO: 350921 - DNA, 15 bp, Homo sapiens
tctgtagccagtatg

SEQ ID NO: 350922 - DNA, 15 bp, Homo sapiens
ttctgtagccagtat

SEQ ID NO: 350923 - DNA, 15 bp, Homo sapiens
cttctgtagccagta

SEQ ID NO: 350924 - DNA, 15 bp, Homo sapiens
gcttctgtagccagt

SEQ ID NO: 350925 - DNA, 15 bp, Homo sapiens
agcttctgtagccag

SEQ ID NO: 350926 - DNA, 15 bp, Homo sapiens
aagcttctgtagcca

SEQ ID NO: 350927 - DNA, 15 bp, Homo sapiens
aaagcttctgtagcc

SEQ ID NO: 350928 - DNA, 15 bp, Homo sapiens
aaaagcttctgtagc

SEQ ID NO: 350929 - DNA, 15 bp, Homo sapiens
caaaagcttctgtag

SEQ ID NO: 350930 - DNA, 15 bp, Homo sapiens
ccaaaagcttctgta

SEQ ID NO: 350931 - DNA, 15 bp, Homo sapiens
cccaaaagcttctgt

SEQ ID NO: 350932 - DNA, 15 bp, Homo sapiens
tcccaaaagcttctg

SEQ ID NO: 350933 - DNA, 15 bp, Homo sapiens
ttcccaaaagcttct

SEQ ID NO: 350934 - DNA, 15 bp, Homo sapiens
tttcccaaaagcttc

SEQ ID NO: 350935 - DNA, 15 bp, Homo sapiens
ttttcccaaaagctt

SEQ ID NO: 350936 - DNA, 15 bp, Homo sapiens
tttttcccaaaagct

SEQ ID NO: 350937 - DNA, 15 bp, Homo sapiens
ctttttcccaaaagc

SEQ ID NO: 350938 - DNA, 15 bp, Homo sapiens
tctttttcccaaaag

SEQ ID NO: 350939 - DNA, 15 bp, Homo sapiens
ttctttttcccaaaa

SEQ ID NO: 350940 - DNA, 15 bp, Homo sapiens
tttctttttcccaaa

SEQ ID NO: 350941 - DNA, 15 bp, Homo sapiens
ttttctttttcccaa

SEQ ID NO: 350942 - DNA, 15 bp, Homo sapiens
gttttctttttccca

SEQ ID NO: 350943 - DNA, 15 bp, Homo sapiens
tgttttctttttccc

SEQ ID NO: 350944 - DNA, 15 bp, Homo sapiens
atgttttctttttcc

SEQ ID NO: 350945 - DNA, 15 bp, Homo sapiens
catgttttctttttc

SEQ ID NO: 350946 - DNA, 15 bp, Homo sapiens
ccatgttttcttttt

SEQ ID NO: 350947 - DNA, 15 bp, Homo sapiens
cccatgttttctttt

SEQ ID NO: 350948 - DNA, 15 bp, Homo sapiens
gcccatgttttcttt

SEQ ID NO: 350949 - DNA, 15 bp, Homo sapiens
agcccatgttttctt

SEQ ID NO: 350950 - DNA, 15 bp, Homo sapiens
cagcccatgttttct

SEQ ID NO: 350951 - DNA, 15 bp, Homo sapiens
acagcccatgttttc

SEQ ID NO: 350952 - DNA, 15 bp, Homo sapiens
aacagcccatgtttt

SEQ ID NO: 350953 - DNA, 15 bp, Homo sapiens
caacagcccatgttt

SEQ ID NO: 350954 - DNA, 15 bp, Homo sapiens
ccaacagcccatgtt

SEQ ID NO: 350955 - DNA, 15 bp, Homo sapiens
tccaacagcccatgt

SEQ ID NO: 350956 - DNA, 15 bp, Homo sapiens
ttccaacagcccatg

SEQ ID NO: 350957 - DNA, 15 bp, Homo sapiens
cttccaacagcccat

SEQ ID NO: 350958 - DNA, 15 bp, Homo sapiens
ccttccaacagccca

SEQ ID NO: 350959 - DNA, 15 bp, Homo sapiens
tccttccaacagccc

SEQ ID NO: 350960 - DNA, 15 bp, Homo sapiens
ttccttccaacagcc

SEQ ID NO: 350961 - DNA, 15 bp, Homo sapiens
tttccttccaacagc

SEQ ID NO: 350962 - DNA, 15 bp, Homo sapiens
ttttccttccaacag

SEQ ID NO: 350963 - DNA, 15 bp, Homo sapiens
tttttccttccaaca

SEQ ID NO: 350964 - DNA, 15 bp, Homo sapiens
ctttttccttccaac

SEQ ID NO: 350965 - DNA, 15 bp, Homo sapiens
tctttttccttccaa

SEQ ID NO: 350966 - DNA, 15 bp, Homo sapiens
ttctttttccttcca

SEQ ID NO: 350967 - DNA, 15 bp, Homo sapiens
attctttttccttcc

SEQ ID NO: 350968 - DNA, 15 bp, Homo sapiens
aattctttttccttc

SEQ ID NO: 350969 - DNA, 15 bp, Homo sapiens
gaattctttttcctt

SEQ ID NO: 350970 - DNA, 15 bp, Homo sapiens
agaattctttttcct

SEQ ID NO: 350971 - DNA, 15 bp, Homo sapiens
aagaattctttttcc

SEQ ID NO: 350972 - DNA, 15 bp, Homo sapiens
taagaattctttttc

SEQ ID NO: 350973 - DNA, 15 bp, Homo sapiens
ttaagaattcttttt

SEQ ID NO: 350974 - DNA, 15 bp, Homo sapiens
tttaagaattctttt

SEQ ID NO: 350975 - DNA, 15 bp, Homo sapiens
gtttaagaattcttt

SEQ ID NO: 350976 - DNA, 15 bp, Homo sapiens
agtttaagaattctt

SEQ ID NO: 350977 - DNA, 15 bp, Homo sapiens
cagtttaagaattct

SEQ ID NO: 350978 - DNA, 15 bp, Homo sapiens
tcagtttaagaattc

SEQ ID NO: 350979 - DNA, 15 bp, Homo sapiens
ctcagtttaagaatt

SEQ ID NO: 350980 - DNA, 15 bp, Homo sapiens
actcagtttaagaat

SEQ ID NO: 350981 - DNA, 15 bp, Homo sapiens
cactcagtttaagaa

SEQ ID NO: 350982 - DNA, 15 bp, Homo sapiens
gcactcagtttaaga

SEQ ID NO: 350983 - DNA, 15 bp, Homo sapiens
agcactcagtttaag

SEQ ID NO: 350984 - DNA, 15 bp, Homo sapiens
gagcactcagtttaa

SEQ ID NO: 350985 - DNA, 15 bp, Homo sapiens
agagcactcagttta

SEQ ID NO: 350986 - DNA, 15 bp, Homo sapiens
tagagcactcagttt

SEQ ID NO: 350987 - DNA, 15 bp, Homo sapiens
ttagagcactcagtt

SEQ ID NO: 350988 - DNA, 15 bp, Homo sapiens
attagagcactcagt

SEQ ID NO: 350989 - DNA, 15 bp, Homo sapiens
tattagagcactcag

SEQ ID NO: 350990 - DNA, 15 bp, Homo sapiens
ttattagagcactca

SEQ ID NO: 350991 - DNA, 15 bp, Homo sapiens
gttattagagcactc

SEQ ID NO: 350992 - DNA, 15 bp, Homo sapiens
agttattagagcact

SEQ ID NO: 350993 - DNA, 15 bp, Homo sapiens
aagttattagagcac

SEQ ID NO: 350994 - DNA, 15 bp, Homo sapiens
taagttattagagca

SEQ ID NO: 350995 - DNA, 15 bp, Homo sapiens
ttaagttattagagc

SEQ ID NO: 350996 - DNA, 15 bp, Homo sapiens
tttaagttattagag

SEQ ID NO: 350997 - DNA, 15 bp, Homo sapiens
atttaagttattaga

SEQ ID NO: 350998 - DNA, 15 bp, Homo sapiens
aatttaagttattag

SEQ ID NO: 350999 - DNA, 15 bp, Homo sapiens
aaatttaagttatta

SEQ ID NO: 351000 - DNA, 15 bp, Homo sapiens
taaatttaagttatt

SEQ ID NO: 351001 - DNA, 15 bp, Homo sapiens
ataaatttaagttat

SEQ ID NO: 351002 - DNA, 15 bp, Homo sapiens
aataaatttaagtta

SEQ ID NO: 351003 - DNA, 15 bp, Homo sapiens
aaataaatttaagtt

SEQ ID NO: 351004 - DNA, 15 bp, Homo sapiens
gaaataaatttaagt

SEQ ID NO: 351005 - DNA, 15 bp, Homo sapiens
agaaataaatttaag

SEQ ID NO: 351006 - DNA, 15 bp, Homo sapiens
cagaaataaatttaa

SEQ ID NO: 351007 - DNA, 15 bp, Homo sapiens
gcagaaataaattta

SEQ ID NO: 351008 - DNA, 15 bp, Homo sapiens
tgcagaaataaattt

SEQ ID NO: 351009 - DNA, 15 bp, Homo sapiens
ttgcagaaataaatt

SEQ ID NO: 351010 - DNA, 15 bp, Homo sapiens
tttgcagaaataaat

SEQ ID NO: 351011 - DNA, 15 bp, Homo sapiens
atttgcagaaataaa

SEQ ID NO: 351012 - DNA, 15 bp, Homo sapiens
aatttgcagaaataa

SEQ ID NO: 351013 - DNA, 15 bp, Homo sapiens
caatttgcagaaata

SEQ ID NO: 351014 - DNA, 15 bp, Homo sapiens
ccaatttgcagaaat

SEQ ID NO: 351015 - DNA, 15 bp, Homo sapiens
cccaatttgcagaaa

SEQ ID NO: 351016 - DNA, 15 bp, Homo sapiens
ccccaatttgcagaa

SEQ ID NO: 351017 - DNA, 15 bp, Homo sapiens
tccccaatttgcaga

SEQ ID NO: 351018 - DNA, 15 bp, Homo sapiens
ttccccaatttgcag

SEQ ID NO: 351019 - DNA, 15 bp, Homo sapiens
tttccccaatttgca

SEQ ID NO: 351020 - DNA, 15 bp, Homo sapiens
ctttccccaatttgc

SEQ ID NO: 351021 - DNA, 15 bp, Homo sapiens
tctttccccaatttg

SEQ ID NO: 351022 - DNA, 15 bp, Homo sapiens
atctttccccaattt

SEQ ID NO: 351023 - DNA, 15 bp, Homo sapiens
aatctttccccaatt

SEQ ID NO: 351024 - DNA, 15 bp, Homo sapiens
caatctttccccaat

SEQ ID NO: 351025 - DNA, 15 bp, Homo sapiens
gcaatctttccccaa

SEQ ID NO: 351026 - DNA, 15 bp, Homo sapiens
ggcaatctttcccca

SEQ ID NO: 351027 - DNA, 15 bp, Homo sapiens
tggcaatctttcccc

SEQ ID NO: 351028 - DNA, 15 bp, Homo sapiens
atggcaatctttccc

SEQ ID NO: 351029 - DNA, 15 bp, Homo sapiens
catggcaatctttcc

SEQ ID NO: 351030 - DNA, 15 bp, Homo sapiens
tcatggcaatctttc

SEQ ID NO: 351031 - DNA, 15 bp, Homo sapiens
atcatggcaatcttt

SEQ ID NO: 351032 - DNA, 15 bp, Homo sapiens
aatcatggcaatctt

SEQ ID NO: 351033 - DNA, 15 bp, Homo sapiens
caatcatggcaatct

SEQ ID NO: 351034 - DNA, 15 bp, Homo sapiens
tcaatcatggcaatc

SEQ ID NO: 351035 - DNA, 15 bp, Homo sapiens
ctcaatcatggcaat

SEQ ID NO: 351036 - DNA, 15 bp, Homo sapiens
actcaatcatggcaa

SEQ ID NO: 351037 - DNA, 15 bp, Homo sapiens
aactcaatcatggca

SEQ ID NO: 351038 - DNA, 15 bp, Homo sapiens
caactcaatcatggc

SEQ ID NO: 351039 - DNA, 15 bp, Homo sapiens
acaactcaatcatgg

SEQ ID NO: 351040 - DNA, 15 bp, Homo sapiens
cacaactcaatcatg

SEQ ID NO: 351041 - DNA, 15 bp, Homo sapiens
ccacaactcaatcat

SEQ ID NO: 351042 - DNA, 15 bp, Homo sapiens
cccacaactcaatca

SEQ ID NO: 351043 - DNA, 15 bp, Homo sapiens
ccccacaactcaatc

SEQ ID NO: 351044 - DNA, 15 bp, Homo sapiens
cccccacaactcaat

SEQ ID NO: 351045 - DNA, 15 bp, Homo sapiens
tcccccacaactcaa

SEQ ID NO: 351046 - DNA, 15 bp, Homo sapiens
ttcccccacaactca

SEQ ID NO: 351047 - DNA, 15 bp, Homo sapiens
tttcccccacaactc

SEQ ID NO: 351048 - DNA, 15 bp, Homo sapiens
ttttcccccacaact

SEQ ID NO: 351049 - DNA, 15 bp, Homo sapiens
tttttcccccacaac

SEQ ID NO: 351050 - DNA, 15 bp, Homo sapiens
atttttcccccacaa

SEQ ID NO: 351051 - DNA, 15 bp, Homo sapiens
tatttttcccccaca

SEQ ID NO: 351052 - DNA, 15 bp, Homo sapiens
gtatttttcccccac

SEQ ID NO: 351053 - DNA, 15 bp, Homo sapiens
ggtatttttccccca

SEQ ID NO: 351054 - DNA, 15 bp, Homo sapiens
aggtatttttccccc

SEQ ID NO: 351055 - DNA, 15 bp, Homo sapiens
gaggtatttttcccc

SEQ ID NO: 351056 - DNA, 15 bp, Homo sapiens
ggaggtatttttccc

SEQ ID NO: 351057 - DNA, 15 bp, Homo sapiens
gggaggtatttttcc

SEQ ID NO: 351058 - DNA, 15 bp, Homo sapiens
agggaggtatttttc

SEQ ID NO: 351059 - DNA, 15 bp, Homo sapiens
tagggaggtattttt

SEQ ID NO: 351060 - DNA, 15 bp, Homo sapiens
gtagggaggtatttt

SEQ ID NO: 351061 - DNA, 15 bp, Homo sapiens
agtagggaggtattt

SEQ ID NO: 351062 - DNA, 15 bp, Homo sapiens
gagtagggaggtatt

SEQ ID NO: 351063 - DNA, 15 bp, Homo sapiens
tgagtagggaggtat

SEQ ID NO: 351064 - DNA, 15 bp, Homo sapiens
ctgagtagggaggta

SEQ ID NO: 351065 - DNA, 15 bp, Homo sapiens
actgagtagggaggt

SEQ ID NO: 351066 - DNA, 15 bp, Homo sapiens
aactgagtagggagg

SEQ ID NO: 351067 - DNA, 15 bp, Homo sapiens
gaactgagtagggag

SEQ ID NO: 351068 - DNA, 15 bp, Homo sapiens
tgaactgagtaggga

SEQ ID NO: 351069 - DNA, 15 bp, Homo sapiens
gtgaactgagtaggg

SEQ ID NO: 351070 - DNA, 15 bp, Homo sapiens
tgtgaactgagtagg

SEQ ID NO: 351071 - DNA, 15 bp, Homo sapiens
ctgtgaactgagtag

SEQ ID NO: 351072 - DNA, 15 bp, Homo sapiens
tctgtgaactgagta

SEQ ID NO: 351073 - DNA, 15 bp, Homo sapiens
ttctgtgaactgagt

SEQ ID NO: 351074 - DNA, 15 bp, Homo sapiens
attctgtgaactgag

SEQ ID NO: 351075 - DNA, 15 bp, Homo sapiens
gattctgtgaactga

SEQ ID NO: 351076 - DNA, 15 bp, Homo sapiens
agattctgtgaactg

SEQ ID NO: 351077 - DNA, 15 bp, Homo sapiens
gagattctgtgaact

SEQ ID NO: 351078 - DNA, 15 bp, Homo sapiens
ggagattctgtgaac

SEQ ID NO: 351079 - DNA, 15 bp, Homo sapiens
gggagattctgtgaa

SEQ ID NO: 351080 - DNA, 15 bp, Homo sapiens
cgggagattctgtga

SEQ ID NO: 351081 - DNA, 15 bp, Homo sapiens
ccgggagattctgtg

SEQ ID NO: 351082 - DNA, 15 bp, Homo sapiens
accgggagattctgt

SEQ ID NO: 351083 - DNA, 15 bp, Homo sapiens
aaccgggagattctg

SEQ ID NO: 351084 - DNA, 15 bp, Homo sapiens
caaccgggagattct

SEQ ID NO: 351085 - DNA, 15 bp, Homo sapiens
acaaccgggagattc

SEQ ID NO: 351086 - DNA, 15 bp, Homo sapiens
aacaaccgggagatt

SEQ ID NO: 351087 - DNA, 15 bp, Homo sapiens
gaacaaccgggagat

SEQ ID NO: 351088 - DNA, 15 bp, Homo sapiens
tgaacaaccgggaga

SEQ ID NO: 351089 - DNA, 15 bp, Homo sapiens
ttgaacaaccgggag

SEQ ID NO: 351090 - DNA, 15 bp, Homo sapiens
cttgaacaaccggga

SEQ ID NO: 351091 - DNA, 15 bp, Homo sapiens
tcttgaacaaccggg

SEQ ID NO: 351092 - DNA, 15 bp, Homo sapiens
ctcttgaacaaccgg

SEQ ID NO: 351093 - DNA, 15 bp, Homo sapiens
actcttgaacaaccg

SEQ ID NO: 351094 - DNA, 15 bp, Homo sapiens
tactcttgaacaacc

SEQ ID NO: 351095 - DNA, 15 bp, Homo sapiens
atactcttgaacaac

SEQ ID NO: 351096 - DNA, 15 bp, Homo sapiens
gatactcttgaacaa

SEQ ID NO: 351097 - DNA, 15 bp, Homo sapiens
ggatactcttgaaca

SEQ ID NO: 351098 - DNA, 15 bp, Homo sapiens
aggatactcttgaac

SEQ ID NO: 351099 - DNA, 15 bp, Homo sapiens
caggatactcttgaa

SEQ ID NO: 351100 - DNA, 15 bp, Homo sapiens
tcaggatactcttga

SEQ ID NO: 351101 - DNA, 15 bp, Homo sapiens
ctcaggatactcttg

SEQ ID NO: 351102 - DNA, 15 bp, Homo sapiens
tctcaggatactctt

SEQ ID NO: 351103 - DNA, 15 bp, Homo sapiens
ttctcaggatactct

SEQ ID NO: 351104 - DNA, 15 bp, Homo sapiens
gttctcaggatactc

SEQ ID NO: 351105 - DNA, 15 bp, Homo sapiens
agttctcaggatact

SEQ ID NO: 351106 - DNA, 15 bp, Homo sapiens
cagttctcaggatac

SEQ ID NO: 351107 - DNA, 15 bp, Homo sapiens
ccagttctcaggata

SEQ ID NO: 351108 - DNA, 15 bp, Homo sapiens
cccagttctcaggat

SEQ ID NO: 351109 - DNA, 15 bp, Homo sapiens
acccagttctcagga

SEQ ID NO: 351110 - DNA, 15 bp, Homo sapiens
tacccagttctcagg

SEQ ID NO: 351111 - DNA, 15 bp, Homo sapiens
gtacccagttctcag

SEQ ID NO: 351112 - DNA, 15 bp, Homo sapiens
tgtacccagttctca

SEQ ID NO: 351113 - DNA, 15 bp, Homo sapiens
gtgtacccagttctc

SEQ ID NO: 351114 - DNA, 15 bp, Homo sapiens
ggtgtacccagttct

SEQ ID NO: 351115 - DNA, 15 bp, Homo sapiens
aggtgtacccagttc

SEQ ID NO: 351116 - DNA, 15 bp, Homo sapiens
caggtgtacccagtt

SEQ ID NO: 351117 - DNA, 15 bp, Homo sapiens
tcaggtgtacccagt

SEQ ID NO: 351118 - DNA, 15 bp, Homo sapiens
ctcaggtgtacccag

SEQ ID NO: 351119 - DNA, 15 bp, Homo sapiens
tctcaggtgtaccca

SEQ ID NO: 351120 - DNA, 15 bp, Homo sapiens
ttctcaggtgtaccc

SEQ ID NO: 351121 - DNA, 15 bp, Homo sapiens
cttctcaggtgtacc

SEQ ID NO: 351122 - DNA, 15 bp, Homo sapiens
ccttctcaggtgtac

SEQ ID NO: 351123 - DNA, 15 bp, Homo sapiens
cccttctcaggtgta

SEQ ID NO: 351124 - DNA, 15 bp, Homo sapiens
tcccttctcaggtgt

SEQ ID NO: 351125 - DNA, 15 bp, Homo sapiens
ttcccttctcaggtg

SEQ ID NO: 351126 - DNA, 15 bp, Homo sapiens
tttcccttctcaggt

SEQ ID NO: 351127 - DNA, 15 bp, Homo sapiens
atttcccttctcagg

SEQ ID NO: 351128 - DNA, 15 bp, Homo sapiens
aatttcccttctcag

SEQ ID NO: 351129 - DNA, 15 bp, Homo sapiens
taatttcccttctca

SEQ ID NO: 351130 - DNA, 15 bp, Homo sapiens
ctaatttcccttctc

SEQ ID NO: 351131 - DNA, 15 bp, Homo sapiens
cctaatttcccttct

SEQ ID NO: 351132 - DNA, 15 bp, Homo sapiens
tcctaatttcccttc

SEQ ID NO: 351133 - DNA, 15 bp, Homo sapiens
atcctaatttccctt

SEQ ID NO: 351134 - DNA, 15 bp, Homo sapiens
aatcctaatttccct

SEQ ID NO: 351135 - DNA, 15 bp, Homo sapiens
taatcctaatttccc

SEQ ID NO: 351136 - DNA, 15 bp, Homo sapiens
ttaatcctaatttcc

SEQ ID NO: 351137 - DNA, 15 bp, Homo sapiens
attaatcctaatttc

SEQ ID NO: 351138 - DNA, 15 bp, Homo sapiens
cattaatcctaattt

SEQ ID NO: 351139 - DNA, 15 bp, Homo sapiens
ccattaatcctaatt

SEQ ID NO: 351140 - DNA, 15 bp, Homo sapiens
cccattaatcctaat

SEQ ID NO: 351141 - DNA, 15 bp, Homo sapiens
tcccattaatcctaa

SEQ ID NO: 351142 - DNA, 15 bp, Homo sapiens
gtcccattaatccta

SEQ ID NO: 351143 - DNA, 15 bp, Homo sapiens
agtcccattaatcct

SEQ ID NO: 351144 - DNA, 15 bp, Homo sapiens
cagtcccattaatcc

SEQ ID NO: 351145 - DNA, 15 bp, Homo sapiens
tcagtcccattaatc

SEQ ID NO: 351146 - DNA, 15 bp, Homo sapiens
ttcagtcccattaat

SEQ ID NO: 351147 - DNA, 15 bp, Homo sapiens
gttcagtcccattaa

SEQ ID NO: 351148 - DNA, 15 bp, Homo sapiens
ggttcagtcccatta

SEQ ID NO: 351149 - DNA, 15 bp, Homo sapiens
aggttcagtcccatt

SEQ ID NO: 351150 - DNA, 15 bp, Homo sapiens
aaggttcagtcccat

SEQ ID NO: 351151 - DNA, 15 bp, Homo sapiens
gaaggttcagtccca

SEQ ID NO: 351152 - DNA, 15 bp, Homo sapiens
ggaaggttcagtccc

SEQ ID NO: 351153 - DNA, 15 bp, Homo sapiens
gggaaggttcagtcc

SEQ ID NO: 351154 - DNA, 15 bp, Homo sapiens
agggaaggttcagtc

SEQ ID NO: 351155 - DNA, 15 bp, Homo sapiens
gagggaaggttcagt

SEQ ID NO: 351156 - DNA, 15 bp, Homo sapiens
agagggaaggttcag

SEQ ID NO: 351157 - DNA, 15 bp, Homo sapiens
gagagggaaggttca

SEQ ID NO: 351158 - DNA, 15 bp, Homo sapiens
ggagagggaaggttc

SEQ ID NO: 351159 - DNA, 15 bp, Homo sapiens
gggagagggaaggtt

SEQ ID NO: 351160 - DNA, 15 bp, Homo sapiens
agggagagggaaggt

SEQ ID NO: 351161 - DNA, 15 bp, Homo sapiens
cagggagagggaagg

SEQ ID NO: 351162 - DNA, 15 bp, Homo sapiens
acagggagagggaag

SEQ ID NO: 351163 - DNA, 15 bp, Homo sapiens
cacagggagagggaa

SEQ ID NO: 351164 - DNA, 15 bp, Homo sapiens
gcacagggagaggga

SEQ ID NO: 351165 - DNA, 15 bp, Homo sapiens
agcacagggagaggg

SEQ ID NO: 351166 - DNA, 15 bp, Homo sapiens
gagcacagggagagg

SEQ ID NO: 351167 - DNA, 15 bp, Homo sapiens
ggagcacagggagag

SEQ ID NO: 351168 - DNA, 15 bp, Homo sapiens
tggagcacagggaga

SEQ ID NO: 351169 - DNA, 15 bp, Homo sapiens
ttggagcacagggag

SEQ ID NO: 351170 - DNA, 15 bp, Homo sapiens
attggagcacaggga

SEQ ID NO: 351171 - DNA, 15 bp, Homo sapiens
gattggagcacaggg

SEQ ID NO: 351172 - DNA, 15 bp, Homo sapiens
tgattggagcacagg

SEQ ID NO: 351173 - DNA, 15 bp, Homo sapiens
ctgattggagcacag

SEQ ID NO: 351174 - DNA, 15 bp, Homo sapiens
cctgattggagcaca

SEQ ID NO: 351175 - DNA, 15 bp, Homo sapiens
acctgattggagcac

SEQ ID NO: 351176 - DNA, 15 bp, Homo sapiens
gacctgattggagca

SEQ ID NO: 351177 - DNA, 15 bp, Homo sapiens
agacctgattggagc

SEQ ID NO: 351178 - DNA, 15 bp, Homo sapiens
gagacctgattggag

SEQ ID NO: 351179 - DNA, 15 bp, Homo sapiens
ggagacctgattgga

SEQ ID NO: 351180 - DNA, 15 bp, Homo sapiens
aggagacctgattgg

SEQ ID NO: 351181 - DNA, 15 bp, Homo sapiens
caggagacctgattg

SEQ ID NO: 351182 - DNA, 15 bp, Homo sapiens
ccaggagacctgatt

SEQ ID NO: 351183 - DNA, 15 bp, Homo sapiens
tccaggagacctgat

SEQ ID NO: 351184 - DNA, 15 bp, Homo sapiens
ctccaggagacctga

SEQ ID NO: 351185 - DNA, 15 bp, Homo sapiens
tctccaggagacctg

SEQ ID NO: 351186 - DNA, 15 bp, Homo sapiens
ttctccaggagacct

SEQ ID NO: 351187 - DNA, 15 bp, Homo sapiens
cttctccaggagacc

SEQ ID NO: 351188 - DNA, 15 bp, Homo sapiens
tcttctccaggagac

SEQ ID NO: 351189 - DNA, 15 bp, Homo sapiens
ttcttctccaggaga

SEQ ID NO: 351190 - DNA, 15 bp, Homo sapiens
cttcttctccaggag

SEQ ID NO: 351191 - DNA, 15 bp, Homo sapiens
gcttcttctccagga

SEQ ID NO: 351192 - DNA, 15 bp, Homo sapiens
agcttcttctccagg

SEQ ID NO: 351193 - DNA, 15 bp, Homo sapiens
aagcttcttctccag

SEQ ID NO: 351194 - DNA, 15 bp, Homo sapiens
caagcttcttctcca

SEQ ID NO: 351195 - DNA, 15 bp, Homo sapiens
acaagcttcttctcc

SEQ ID NO: 351196 - DNA, 15 bp, Homo sapiens
cacaagcttcttctc

SEQ ID NO: 351197 - DNA, 15 bp, Homo sapiens
gcacaagcttcttct

SEQ ID NO: 351198 - DNA, 15 bp, Homo sapiens
ggcacaagcttcttc

SEQ ID NO: 351199 - DNA, 15 bp, Homo sapiens
gggcacaagcttctt

SEQ ID NO: 351200 - DNA, 15 bp, Homo sapiens
aagggcacaagcttc

SEQ ID NO: 351201 - DNA, 15 bp, Homo sapiens
caagggcacaagctt

SEQ ID NO: 351202 - DNA, 15 bp, Homo sapiens
acaagggcacaagct

SEQ ID NO: 351203 - DNA, 15 bp, Homo sapiens
gacaagggcacaagc

SEQ ID NO: 351204 - DNA, 15 bp, Homo sapiens
ggacaagggcacaag

SEQ ID NO: 351205 - DNA, 15 bp, Homo sapiens
tggacaagggcacaa

SEQ ID NO: 351206 - DNA, 15 bp, Homo sapiens
ctggacaagggcaca

SEQ ID NO: 351207 - DNA, 15 bp, Homo sapiens
tctggacaagggcac

SEQ ID NO: 351208 - DNA, 15 bp, Homo sapiens
gtctggacaagggca

SEQ ID NO: 351209 - DNA, 15 bp, Homo sapiens
agtctggacaagggc

SEQ ID NO: 351210 - DNA, 15 bp, Homo sapiens
cagtctggacaaggg

SEQ ID NO: 351211 - DNA, 15 bp, Homo sapiens
acagtctggacaagg

SEQ ID NO: 351212 - DNA, 15 bp, Homo sapiens
cacagtctggacaag

SEQ ID NO: 351213 - DNA, 15 bp, Homo sapiens
tcatatttctttaaa

SEQ ID NO: 351214 - DNA, 15 bp, Homo sapiens
ttcatatttctttaa

SEQ ID NO: 351215 - DNA, 15 bp, Homo sapiens
tttcatatttcttta

SEQ ID NO: 351216 - DNA, 15 bp, Homo sapiens
atttcatatttcttt

SEQ ID NO: 351217 - DNA, 15 bp, Homo sapiens
tatttcatatttctt

SEQ ID NO: 351218 - DNA, 15 bp, Homo sapiens
ttatttcatatttct

SEQ ID NO: 351219 - DNA, 15 bp, Homo sapiens
tttatttcatatttc

SEQ ID NO: 351220 - DNA, 15 bp, Homo sapiens
atttatttcatattt

SEQ ID NO: 351221 - DNA, 15 bp, Homo sapiens
tatttatttcatatt

SEQ ID NO: 351222 - DNA, 15 bp, Homo sapiens
gtatttatttcatat

SEQ ID NO: 351223 - DNA, 15 bp, Homo sapiens
ggtatttatttcata

SEQ ID NO: 351224 - DNA, 15 bp, Homo sapiens
aggtatttatttcat

SEQ ID NO: 351225 - DNA, 15 bp, Homo sapiens
caggtatttatttca

SEQ ID NO: 351226 - DNA, 15 bp, Homo sapiens
acaggtatttatttc

SEQ ID NO: 351227 - DNA, 15 bp, Homo sapiens
gacaggtatttattt

SEQ ID NO: 351228 - DNA, 15 bp, Homo sapiens
ggacaggtatttatt

SEQ ID NO: 351229 - DNA, 15 bp, Homo sapiens
aggacaggtatttat

SEQ ID NO: 351230 - DNA, 15 bp, Homo sapiens
aaggacaggtattta

SEQ ID NO: 351231 - DNA, 15 bp, Homo sapiens
caaggacaggtattt

SEQ ID NO: 351232 - DNA, 15 bp, Homo sapiens
gcaaggacaggtatt

SEQ ID NO: 351233 - DNA, 15 bp, Homo sapiens
agcaaggacaggtat

SEQ ID NO: 351234 - DNA, 15 bp, Homo sapiens
aagcaaggacaggta

SEQ ID NO: 351235 - DNA, 15 bp, Homo sapiens
aaagcaaggacaggt

SEQ ID NO: 351236 - DNA, 15 bp, Homo sapiens
caaagcaaggacagg

SEQ ID NO: 351237 - DNA, 15 bp, Homo sapiens
acaaagcaaggacag

SEQ ID NO: 351238 - DNA, 15 bp, Homo sapiens
aacaaagcaaggaca

SEQ ID NO: 351239 - DNA, 15 bp, Homo sapiens
taacaaagcaaggac

SEQ ID NO: 351240 - DNA, 15 bp, Homo sapiens
ctaacaaagcaagga

SEQ ID NO: 351241 - DNA, 15 bp, Homo sapiens
tctaacaaagcaagg

SEQ ID NO: 351242 - DNA, 15 bp, Homo sapiens
ctctaacaaagcaag

SEQ ID NO: 351243 - DNA, 15 bp, Homo sapiens
gctctaacaaagcaa

SEQ ID NO: 351244 - DNA, 15 bp, Homo sapiens
tgctctaacaaagca

SEQ ID NO: 351245 - DNA, 15 bp, Homo sapiens
ctgctctaacaaagc

SEQ ID NO: 351246 - DNA, 15 bp, Homo sapiens
tctgctctaacaaag

SEQ ID NO: 351247 - DNA, 15 bp, Homo sapiens
ctctgctctaacaaa

SEQ ID NO: 351248 - DNA, 15 bp, Homo sapiens
cctctgctctaacaa

SEQ ID NO: 351249 - DNA, 15 bp, Homo sapiens
tcctctgctctaaca

SEQ ID NO: 351250 - DNA, 15 bp, Homo sapiens
atcctctgctctaac

SEQ ID NO: 351251 - DNA, 15 bp, Homo sapiens
catcctctgctctaa

SEQ ID NO: 351252 - DNA, 15 bp, Homo sapiens
tcatcctctgctcta

SEQ ID NO: 351253 - DNA, 15 bp, Homo sapiens
ttcatcctctgctct

SEQ ID NO: 351254 - DNA, 15 bp, Homo sapiens
tttcatcctctgctc

SEQ ID NO: 351255 - DNA, 15 bp, Homo sapiens
ttttcatcctctgct

SEQ ID NO: 351256 - DNA, 15 bp, Homo sapiens
tttttcatcctctgc

SEQ ID NO: 351257 - DNA, 15 bp, Homo sapiens
atttttcatcctctg

SEQ ID NO: 351258 - DNA, 15 bp, Homo sapiens
gatttttcatcctct

SEQ ID NO: 351259 - DNA, 15 bp, Homo sapiens
tgatttttcatcctc

SEQ ID NO: 351260 - DNA, 15 bp, Homo sapiens
gtgatttttcatcct

SEQ ID NO: 351261 - DNA, 15 bp, Homo sapiens
ggtgatttttcatcc

SEQ ID NO: 351262 - DNA, 15 bp, Homo sapiens
tggtgatttttcatc

SEQ ID NO: 351263 - DNA, 15 bp, Homo sapiens
gtggtgatttttcat

SEQ ID NO: 351264 - DNA, 15 bp, Homo sapiens
ggtggtgatttttca

SEQ ID NO: 351265 - DNA, 15 bp, Homo sapiens
tggtggtgatttttc

SEQ ID NO: 351266 - DNA, 15 bp, Homo sapiens
atggtggtgattttt

SEQ ID NO: 351267 - DNA, 15 bp, Homo sapiens
gatggtggtgatttt

SEQ ID NO: 351268 - DNA, 15 bp, Homo sapiens
tgatggtggtgattt

SEQ ID NO: 351269 - DNA, 15 bp, Homo sapiens
ttgatggtggtgatt

SEQ ID NO: 351270 - DNA, 15 bp, Homo sapiens
gttgatggtggtgat

SEQ ID NO: 351271 - DNA, 15 bp, Homo sapiens
tgttgatggtggtga

SEQ ID NO: 351272 - DNA, 15 bp, Homo sapiens
gtgttgatggtggtg

SEQ ID NO: 351273 - DNA, 15 bp, Homo sapiens
ggtgttgatggtggt

SEQ ID NO: 351274 - DNA, 15 bp, Homo sapiens
aggtgttgatggtgg

SEQ ID NO: 351275 - DNA, 15 bp, Homo sapiens
taggtgttgatggtg

SEQ ID NO: 351276 - DNA, 15 bp, Homo sapiens
ctaggtgttgatggt

SEQ ID NO: 351277 - DNA, 15 bp, Homo sapiens
cctaggtgttgatgg

SEQ ID NO: 351278 - DNA, 15 bp, Homo sapiens
tcctaggtgttgatg

SEQ ID NO: 351279 - DNA, 15 bp, Homo sapiens
ttcctaggtgttgat

SEQ ID NO: 351280 - DNA, 15 bp, Homo sapiens
attcctaggtgttga

SEQ ID NO: 351281 - DNA, 15 bp, Homo sapiens
cattcctaggtgttg

SEQ ID NO: 351282 - DNA, 15 bp, Homo sapiens
tcattcctaggtgtt

SEQ ID NO: 351283 - DNA, 15 bp, Homo sapiens
ttcattcctaggtgt

SEQ ID NO: 351284 - DNA, 15 bp, Homo sapiens
tttcattcctaggtg

SEQ ID NO: 351285 - DNA, 15 bp, Homo sapiens
gtttcattcctaggt

SEQ ID NO: 351286 - DNA, 15 bp, Homo sapiens
ggtttcattcctagg

SEQ ID NO: 351287 - DNA, 15 bp, Homo sapiens
aggtttcattcctag

SEQ ID NO: 351288 - DNA, 15 bp, Homo sapiens
caggtttcattccta

SEQ ID NO: 351289 - DNA, 15 bp, Homo sapiens
acaggtttcattcct

SEQ ID NO: 351290 - DNA, 15 bp, Homo sapiens
cacaggtttcattcc

SEQ ID NO: 351291 - DNA, 15 bp, Homo sapiens
gcacaggtttcattc

SEQ ID NO: 351292 - DNA, 15 bp, Homo sapiens
ggcacaggtttcatt

SEQ ID NO: 351293 - DNA, 15 bp, Homo sapiens
aggcacaggtttcat

SEQ ID NO: 351294 - DNA, 15 bp, Homo sapiens
taggcacaggtttca

SEQ ID NO: 351295 - DNA, 15 bp, Homo sapiens
ctaggcacaggtttc

SEQ ID NO: 351296 - DNA, 15 bp, Homo sapiens
actaggcacaggttt

SEQ ID NO: 351297 - DNA, 15 bp, Homo sapiens
gactaggcacaggtt

SEQ ID NO: 351298 - DNA, 15 bp, Homo sapiens
ggactaggcacaggt

SEQ ID NO: 351299 - DNA, 15 bp, Homo sapiens
gggactaggcacagg

SEQ ID NO: 351300 - DNA, 15 bp, Homo sapiens
agggactaggcacag

SEQ ID NO: 351301 - DNA, 15 bp, Homo sapiens
cagggactaggcaca

SEQ ID NO: 351302 - DNA, 15 bp, Homo sapiens
gcagggactaggcac

SEQ ID NO: 351303 - DNA, 15 bp, Homo sapiens
agcagggactaggca

SEQ ID NO: 351304 - DNA, 15 bp, Homo sapiens
aagcagggactaggc

SEQ ID NO: 351305 - DNA, 15 bp, Homo sapiens
gaagcagggactagg

SEQ ID NO: 351306 - DNA, 15 bp, Homo sapiens
agaagcagggactag

SEQ ID NO: 351307 - DNA, 15 bp, Homo sapiens
aagaagcagggacta

SEQ ID NO: 351308 - DNA, 15 bp, Homo sapiens
aaagaagcagggact

SEQ ID NO: 351309 - DNA, 15 bp, Homo sapiens
taaagaagcagggac

SEQ ID NO: 351310 - DNA, 15 bp, Homo sapiens
gtaaagaagcaggga

SEQ ID NO: 351311 - DNA, 15 bp, Homo sapiens
agtaaagaagcaggg

SEQ ID NO: 351312 - DNA, 15 bp, Homo sapiens
gagtaaagaagcagg

SEQ ID NO: 351313 - DNA, 15 bp, Homo sapiens
agagtaaagaagcag

SEQ ID NO: 351314 - DNA, 15 bp, Homo sapiens
tagagtaaagaagca

SEQ ID NO: 351315 - DNA, 15 bp, Homo sapiens
ctagagtaaagaagc

SEQ ID NO: 351316 - DNA, 15 bp, Homo sapiens
tctagagtaaagaag

SEQ ID NO: 351317 - DNA, 15 bp, Homo sapiens
ctctagagtaaagaa

SEQ ID NO: 351318 - DNA, 15 bp, Homo sapiens
cctctagagtaaaga

SEQ ID NO: 351319 - DNA, 15 bp, Homo sapiens
acctctagagtaaag

SEQ ID NO: 351320 - DNA, 15 bp, Homo sapiens
cacctctagagtaaa

SEQ ID NO: 351321 - DNA, 15 bp, Homo sapiens
gcacctctagagtaa

SEQ ID NO: 351322 - DNA, 15 bp, Homo sapiens
ggcacctctagagta

SEQ ID NO: 351323 - DNA, 15 bp, Homo sapiens
aggcacctctagagt

SEQ ID NO: 351324 - DNA, 15 bp, Homo sapiens
gaggcacctctagag

SEQ ID NO: 351325 - DNA, 15 bp, Homo sapiens
tgaggcacctctaga

SEQ ID NO: 351326 - DNA, 15 bp, Homo sapiens
ctgaggcacctctag

SEQ ID NO: 351327 - DNA, 15 bp, Homo sapiens
actgaggcacctcta

SEQ ID NO: 351328 - DNA, 15 bp, Homo sapiens
tactgaggcacctct

SEQ ID NO: 351329 - DNA, 15 bp, Homo sapiens
ctactgaggcacctc

SEQ ID NO: 351330 - DNA, 15 bp, Homo sapiens
tctactgaggcacct

SEQ ID NO: 351331 - DNA, 15 bp, Homo sapiens
atctactgaggcacc

SEQ ID NO: 351332 - DNA, 15 bp, Homo sapiens
catctactgaggcac

SEQ ID NO: 351333 - DNA, 15 bp, Homo sapiens
acatctactgaggca

SEQ ID NO: 351334 - DNA, 15 bp, Homo sapiens
cacatctactgaggc

SEQ ID NO: 351335 - DNA, 15 bp, Homo sapiens
acacatctactgagg

SEQ ID NO: 351336 - DNA, 15 bp, Homo sapiens
gacacatctactgag

SEQ ID NO: 351337 - DNA, 15 bp, Homo sapiens
ggacacatctactga

SEQ ID NO: 351338 - DNA, 15 bp, Homo sapiens
tggacacatctactg

SEQ ID NO: 351339 - DNA, 15 bp, Homo sapiens
ctggacacatctact

SEQ ID NO: 351340 - DNA, 15 bp, Homo sapiens
actggacacatctac

SEQ ID NO: 351341 - DNA, 15 bp, Homo sapiens
gactggacacatcta

SEQ ID NO: 351342 - DNA, 15 bp, Homo sapiens
agactggacacatct

SEQ ID NO: 351343 - DNA, 15 bp, Homo sapiens
tagactggacacatc

SEQ ID NO: 351344 - DNA, 15 bp, Homo sapiens
ttagactggacacat

SEQ ID NO: 351345 - DNA, 15 bp, Homo sapiens
gttagactggacaca

SEQ ID NO: 351346 - DNA, 15 bp, Homo sapiens
tgttagactggacac

SEQ ID NO: 351347 - DNA, 15 bp, Homo sapiens
ctgttagactggaca

SEQ ID NO: 351348 - DNA, 15 bp, Homo sapiens
tctgttagactggac

SEQ ID NO: 351349 - DNA, 15 bp, Homo sapiens
ctctgttagactgga

SEQ ID NO: 351350 - DNA, 15 bp, Homo sapiens
tctctgttagactgg

SEQ ID NO: 351351 - DNA, 15 bp, Homo sapiens
gtctctgttagactg

SEQ ID NO: 351352 - DNA, 15 bp, Homo sapiens
tgtctctgttagact

SEQ ID NO: 351353 - DNA, 15 bp, Homo sapiens
ttgtctctgttagac

SEQ ID NO: 351354 - DNA, 15 bp, Homo sapiens
cttgtctctgttaga

SEQ ID NO: 351355 - DNA, 15 bp, Homo sapiens
acttgtctctgttag

SEQ ID NO: 351356 - DNA, 15 bp, Homo sapiens
tacttgtctctgtta

SEQ ID NO: 351357 - DNA, 15 bp, Homo sapiens
atacttgtctctgtt

SEQ ID NO: 351358 - DNA, 15 bp, Homo sapiens
catacttgtctctgt

SEQ ID NO: 351359 - DNA, 15 bp, Homo sapiens
tcatacttgtctctg

SEQ ID NO: 351360 - DNA, 15 bp, Homo sapiens
atcatacttgtctct

SEQ ID NO: 351361 - DNA, 15 bp, Homo sapiens
catcatacttgtctc

SEQ ID NO: 351362 - DNA, 15 bp, Homo sapiens
acatcatacttgtct

SEQ ID NO: 351363 - DNA, 15 bp, Homo sapiens
tacatcatacttgtc

SEQ ID NO: 351364 - DNA, 15 bp, Homo sapiens
atacatcatacttgt

SEQ ID NO: 351365 - DNA, 15 bp, Homo sapiens
tatacatcatacttg

SEQ ID NO: 351366 - DNA, 15 bp, Homo sapiens
ttatacatcatactt

SEQ ID NO: 351367 - DNA, 15 bp, Homo sapiens
attatacatcatact

SEQ ID NO: 351368 - DNA, 15 bp, Homo sapiens
tattatacatcatac

SEQ ID NO: 351369 - DNA, 15 bp, Homo sapiens
ttattatacatcata

SEQ ID NO: 351370 - DNA, 15 bp, Homo sapiens
cttattatacatcat

SEQ ID NO: 351371 - DNA, 15 bp, Homo sapiens
ccttattatacatca

SEQ ID NO: 351372 - DNA, 15 bp, Homo sapiens
tccttattatacatc

SEQ ID NO: 351373 - DNA, 15 bp, Homo sapiens
ctccttattatacat

SEQ ID NO: 351374 - DNA, 15 bp, Homo sapiens
cctccttattataca

SEQ ID NO: 351375 - DNA, 15 bp, Homo sapiens
tcctccttattatac

SEQ ID NO: 351376 - DNA, 15 bp, Homo sapiens
ctcctccttattata

SEQ ID NO: 351377 - DNA, 15 bp, Homo sapiens
tctcctccttattat

SEQ ID NO: 351378 - DNA, 15 bp, Homo sapiens
ttctcctccttatta

SEQ ID NO: 351379 - DNA, 15 bp, Homo sapiens
gttctcctccttatt

SEQ ID NO: 351380 - DNA, 15 bp, Homo sapiens
agttctcctccttat

SEQ ID NO: 351381 - DNA, 15 bp, Homo sapiens
tagttctcctcctta

SEQ ID NO: 351382 - DNA, 15 bp, Homo sapiens
ttagttctcctcctt

SEQ ID NO: 351383 - DNA, 15 bp, Homo sapiens
tttagttctcctcct

SEQ ID NO: 351384 - DNA, 15 bp, Homo sapiens
ctttagttctcctcc

SEQ ID NO: 351385 - DNA, 15 bp, Homo sapiens
gctttagttctcctc

SEQ ID NO: 351386 - DNA, 15 bp, Homo sapiens
ggctttagttctcct

SEQ ID NO: 351387 - DNA, 15 bp, Homo sapiens
tggctttagttctcc

SEQ ID NO: 351388 - DNA, 15 bp, Homo sapiens
gtggctttagttctc

SEQ ID NO: 351389 - DNA, 15 bp, Homo sapiens
tgtggctttagttct

SEQ ID NO: 351390 - DNA, 15 bp, Homo sapiens
ctgtggctttagttc

SEQ ID NO: 351391 - DNA, 15 bp, Homo sapiens
tctgtggctttagtt

SEQ ID NO: 351392 - DNA, 15 bp, Homo sapiens
ctctgtggctttagt

SEQ ID NO: 351393 - DNA, 15 bp, Homo sapiens
gctctgtggctttag

SEQ ID NO: 351394 - DNA, 15 bp, Homo sapiens
tgctctgtggcttta

SEQ ID NO: 351395 - DNA, 15 bp, Homo sapiens
gtgctctgtggcttt

SEQ ID NO: 351396 - DNA, 15 bp, Homo sapiens
tgtgctctgtggctt

SEQ ID NO: 351397 - DNA, 15 bp, Homo sapiens
ttgtgctctgtggct

SEQ ID NO: 351398 - DNA, 15 bp, Homo sapiens
tttgtgctctgtggc

SEQ ID NO: 351399 - DNA, 15 bp, Homo sapiens
ctttgtgctctgtgg

SEQ ID NO: 351400 - DNA, 15 bp, Homo sapiens
actttgtgctctgtg

SEQ ID NO: 351401 - DNA, 15 bp, Homo sapiens
cactttgtgctctgt

SEQ ID NO: 351402 - DNA, 15 bp, Homo sapiens
acactttgtgctctg

SEQ ID NO: 351403 - DNA, 15 bp, Homo sapiens
aacactttgtgctct

SEQ ID NO: 351404 - DNA, 15 bp, Homo sapiens
aaacactttgtgctc

SEQ ID NO: 351405 - DNA, 15 bp, Homo sapiens
aaaacactttgtgct

SEQ ID NO: 351406 - DNA, 15 bp, Homo sapiens
aaaaacactttgtgc

SEQ ID NO: 351407 - DNA, 15 bp, Homo sapiens
caaaaacactttgtg

SEQ ID NO: 351408 - DNA, 15 bp, Homo sapiens
acaaaaacactttgt

SEQ ID NO: 351409 - DNA, 15 bp, Homo sapiens
tacaaaaacactttg

SEQ ID NO: 351410 - DNA, 15 bp, Homo sapiens
atacaaaaacacttt

SEQ ID NO: 351411 - DNA, 15 bp, Homo sapiens
gatacaaaaacactt

SEQ ID NO: 351412 - DNA, 15 bp, Homo sapiens
cgatacaaaaacact

SEQ ID NO: 351413 - DNA, 15 bp, Homo sapiens
acgatacaaaaacac

SEQ ID NO: 351414 - DNA, 15 bp, Homo sapiens
cacgatacaaaaaca

SEQ ID NO: 351415 - DNA, 15 bp, Homo sapiens
tcacgatacaaaaac

SEQ ID NO: 351416 - DNA, 15 bp, Homo sapiens
atcacgatacaaaaa

SEQ ID NO: 351417 - DNA, 15 bp, Homo sapiens
aatcacgatacaaaa

SEQ ID NO: 351418 - DNA, 15 bp, Homo sapiens
aaatcacgatacaaa

SEQ ID NO: 351419 - DNA, 15 bp, Homo sapiens
gaaatcacgatacaa

SEQ ID NO: 351420 - DNA, 15 bp, Homo sapiens
ggaaatcacgataca

SEQ ID NO: 351421 - DNA, 15 bp, Homo sapiens
tggaaatcacgatac

SEQ ID NO: 351422 - DNA, 15 bp, Homo sapiens
ctggaaatcacgata

SEQ ID NO: 351423 - DNA, 15 bp, Homo sapiens
actggaaatcacgat

SEQ ID NO: 351424 - DNA, 15 bp, Homo sapiens
cactggaaatcacga

SEQ ID NO: 351425 - DNA, 15 bp, Homo sapiens
ccactggaaatcacg

SEQ ID NO: 351426 - DNA, 15 bp, Homo sapiens
tccactggaaatcac

SEQ ID NO: 351427 - DNA, 15 bp, Homo sapiens
atccactggaaatca

SEQ ID NO: 351428 - DNA, 15 bp, Homo sapiens
aatccactggaaatc

SEQ ID NO: 351429 - DNA, 15 bp, Homo sapiens
caatccactggaaat

SEQ ID NO: 351430 - DNA, 15 bp, Homo sapiens
ccaatccactggaaa

SEQ ID NO: 351431 - DNA, 15 bp, Homo sapiens
cccaatccactggaa

SEQ ID NO: 351432 - DNA, 15 bp, Homo sapiens
ccccaatccactgga

SEQ ID NO: 351433 - DNA, 15 bp, Homo sapiens
cccccaatccactgg

SEQ ID NO: 351434 - DNA, 15 bp, Homo sapiens
acccccaatccactg

SEQ ID NO: 351435 - DNA, 15 bp, Homo sapiens
gacccccaatccact

SEQ ID NO: 351436 - DNA, 15 bp, Homo sapiens
ggacccccaatccac

SEQ ID NO: 351437 - DNA, 15 bp, Homo sapiens
gggacccccaatcca

SEQ ID NO: 351438 - DNA, 15 bp, Homo sapiens
agggacccccaatcc

SEQ ID NO: 351439 - DNA, 15 bp, Homo sapiens
cagggacccccaatc

SEQ ID NO: 351440 - DNA, 15 bp, Homo sapiens
tcagggacccccaat

SEQ ID NO: 351441 - DNA, 15 bp, Homo sapiens
ctcagggacccccaa

SEQ ID NO: 351442 - DNA, 15 bp, Homo sapiens
actcagggaccccca

SEQ ID NO: 351443 - DNA, 15 bp, Homo sapiens
tactcagggaccccc

SEQ ID NO: 351444 - DNA, 15 bp, Homo sapiens
atactcagggacccc

SEQ ID NO: 351445 - DNA, 15 bp, Homo sapiens
tatactcagggaccc

SEQ ID NO: 351446 - DNA, 15 bp, Homo sapiens
atatactcagggacc

SEQ ID NO: 351447 - DNA, 15 bp, Homo sapiens
tatatactcagggac

SEQ ID NO: 351448 - DNA, 15 bp, Homo sapiens
ctatatactcaggga

SEQ ID NO: 351449 - DNA, 15 bp, Homo sapiens
cctatatactcaggg

SEQ ID NO: 351450 - DNA, 15 bp, Homo sapiens
ccctatatactcagg

SEQ ID NO: 351451 - DNA, 15 bp, Homo sapiens
accctatatactcag

SEQ ID NO: 351452 - DNA, 15 bp, Homo sapiens
aaccctatatactca

SEQ ID NO: 351453 - DNA, 15 bp, Homo sapiens
caaccctatatactc

SEQ ID NO: 351454 - DNA, 15 bp, Homo sapiens
tcaaccctatatact

SEQ ID NO: 351455 - DNA, 15 bp, Homo sapiens
ctcaaccctatatac

SEQ ID NO: 351456 - DNA, 15 bp, Homo sapiens
tctcaaccctatata

SEQ ID NO: 351457 - DNA, 15 bp, Homo sapiens
ctctcaaccctatat

SEQ ID NO: 351458 - DNA, 15 bp, Homo sapiens
tctctcaaccctata

SEQ ID NO: 351459 - DNA, 15 bp, Homo sapiens
ctctctcaaccctat

SEQ ID NO: 351460 - DNA, 15 bp, Homo sapiens
tctctctcaacccta

SEQ ID NO: 351461 - DNA, 15 bp, Homo sapiens
ttctctctcaaccct

SEQ ID NO: 351462 - DNA, 15 bp, Homo sapiens
tttctctctcaaccc

SEQ ID NO: 351463 - DNA, 15 bp, Homo sapiens
gtttctctctcaacc

SEQ ID NO: 351464 - DNA, 15 bp, Homo sapiens
agtttctctctcaac

SEQ ID NO: 351465 - DNA, 15 bp, Homo sapiens
tagtttctctctcaa

SEQ ID NO: 351466 - DNA, 15 bp, Homo sapiens
ttagtttctctctca

SEQ ID NO: 351467 - DNA, 15 bp, Homo sapiens
tttagtttctctctc

SEQ ID NO: 351468 - DNA, 15 bp, Homo sapiens
atttagtttctctct

SEQ ID NO: 351469 - DNA, 15 bp, Homo sapiens
gatttagtttctctc

SEQ ID NO: 351470 - DNA, 15 bp, Homo sapiens
agatttagtttctct

SEQ ID NO: 351471 - DNA, 15 bp, Homo sapiens
cagatttagtttctc

SEQ ID NO: 351472 - DNA, 15 bp, Homo sapiens
tcagatttagtttct

SEQ ID NO: 351473 - DNA, 15 bp, Homo sapiens
ctcagatttagtttc

SEQ ID NO: 351474 - DNA, 15 bp, Homo sapiens
cctcagatttagttt

SEQ ID NO: 351475 - DNA, 15 bp, Homo sapiens
tcctcagatttagtt

SEQ ID NO: 351476 - DNA, 15 bp, Homo sapiens
gtcctcagatttagt

SEQ ID NO: 351477 - DNA, 15 bp, Homo sapiens
agtcctcagatttag

SEQ ID NO: 351478 - DNA, 15 bp, Homo sapiens
aagtcctcagattta

SEQ ID NO: 351479 - DNA, 15 bp, Homo sapiens
caagtcctcagattt

SEQ ID NO: 351480 - DNA, 15 bp, Homo sapiens
ccaagtcctcagatt

SEQ ID NO: 351481 - DNA, 15 bp, Homo sapiens
accaagtcctcagat

SEQ ID NO: 351482 - DNA, 15 bp, Homo sapiens
gaccaagtcctcaga

SEQ ID NO: 351483 - DNA, 15 bp, Homo sapiens
agaccaagtcctcag

SEQ ID NO: 351484 - DNA, 15 bp, Homo sapiens
gagaccaagtcctca

SEQ ID NO: 351485 - DNA, 15 bp, Homo sapiens
ggagaccaagtcctc

SEQ ID NO: 351486 - DNA, 15 bp, Homo sapiens
tggagaccaagtcct

SEQ ID NO: 351487 - DNA, 15 bp, Homo sapiens
ttggagaccaagtcc

SEQ ID NO: 351488 - DNA, 15 bp, Homo sapiens
tttggagaccaagtc

SEQ ID NO: 351489 - DNA, 15 bp, Homo sapiens
ttttggagaccaagt

SEQ ID NO: 351490 - DNA, 15 bp, Homo sapiens
attttggagaccaag

SEQ ID NO: 351491 - DNA, 15 bp, Homo sapiens
cattttggagaccaa

SEQ ID NO: 351492 - DNA, 15 bp, Homo sapiens
ccattttggagacca

SEQ ID NO: 351493 - DNA, 15 bp, Homo sapiens
cccattttggagacc

SEQ ID NO: 351494 - DNA, 15 bp, Homo sapiens
tcccattttggagac

SEQ ID NO: 351495 - DNA, 15 bp, Homo sapiens
ctcccattttggaga

SEQ ID NO: 351496 - DNA, 15 bp, Homo sapiens
actcccattttggag

SEQ ID NO: 351497 - DNA, 15 bp, Homo sapiens
aactcccattttgga

SEQ ID NO: 351498 - DNA, 15 bp, Homo sapiens
caactcccattttgg

SEQ ID NO: 351499 - DNA, 15 bp, Homo sapiens
tcaactcccattttg

SEQ ID NO: 351500 - DNA, 15 bp, Homo sapiens
gtcaactcccatttt

SEQ ID NO: 351501 - DNA, 15 bp, Homo sapiens
agtcaactcccattt

SEQ ID NO: 351502 - DNA, 15 bp, Homo sapiens
gagtcaactcccatt

SEQ ID NO: 351503 - DNA, 15 bp, Homo sapiens
agagtcaactcccat

SEQ ID NO: 351504 - DNA, 15 bp, Homo sapiens
aagagtcaactccca

SEQ ID NO: 351505 - DNA, 15 bp, Homo sapiens
aaagagtcaactccc

SEQ ID NO: 351506 - DNA, 15 bp, Homo sapiens
gaaagagtcaactcc

SEQ ID NO: 351507 - DNA, 15 bp, Homo sapiens
ggaaagagtcaactc

SEQ ID NO: 351508 - DNA, 15 bp, Homo sapiens
tggaaagagtcaact

SEQ ID NO: 351509 - DNA, 15 bp, Homo sapiens
atggaaagagtcaac

SEQ ID NO: 351510 - DNA, 15 bp, Homo sapiens
aatggaaagagtcaa

SEQ ID NO: 351511 - DNA, 15 bp, Homo sapiens
aaatggaaagagtca

SEQ ID NO: 351512 - DNA, 15 bp, Homo sapiens
caaatggaaagagtc

SEQ ID NO: 351513 - DNA, 15 bp, Homo sapiens
ccaaatggaaagagt

SEQ ID NO: 351514 - DNA, 15 bp, Homo sapiens
tccaaatggaaagag

SEQ ID NO: 351515 - DNA, 15 bp, Homo sapiens
ttccaaatggaaaga

SEQ ID NO: 351516 - DNA, 15 bp, Homo sapiens
attccaaatggaaag

SEQ ID NO: 351517 - DNA, 15 bp, Homo sapiens
aattccaaatggaaa

SEQ ID NO: 351518 - DNA, 15 bp, Homo sapiens
gaattccaaatggaa

SEQ ID NO: 351519 - DNA, 15 bp, Homo sapiens
ggaattccaaatgga

SEQ ID NO: 351520 - DNA, 15 bp, Homo sapiens
aggaattccaaatgg

SEQ ID NO: 351521 - DNA, 15 bp, Homo sapiens
caggaattccaaatg

SEQ ID NO: 351522 - DNA, 15 bp, Homo sapiens
gcaggaattccaaat

SEQ ID NO: 351523 - DNA, 15 bp, Homo sapiens
agcaggaattccaaa

SEQ ID NO: 351524 - DNA, 15 bp, Homo sapiens
tagcaggaattccaa

SEQ ID NO: 351525 - DNA, 15 bp, Homo sapiens
ctagcaggaattcca

SEQ ID NO: 351526 - DNA, 15 bp, Homo sapiens
actagcaggaattcc

SEQ ID NO: 351527 - DNA, 15 bp, Homo sapiens
aactagcaggaattc

SEQ ID NO: 351528 - DNA, 15 bp, Homo sapiens
aaactagcaggaatt

SEQ ID NO: 351529 - DNA, 15 bp, Homo sapiens
aaaactagcaggaat

SEQ ID NO: 351530 - DNA, 15 bp, Homo sapiens
taaaactagcaggaa

SEQ ID NO: 351531 - DNA, 15 bp, Homo sapiens
ttaaaactagcagga

SEQ ID NO: 351532 - DNA, 15 bp, Homo sapiens
attaaaactagcagg

SEQ ID NO: 351533 - DNA, 15 bp, Homo sapiens
tattaaaactagcag

SEQ ID NO: 351534 - DNA, 15 bp, Homo sapiens
gtattaaaactagca

SEQ ID NO: 351535 - DNA, 15 bp, Homo sapiens
ggtattaaaactagc

SEQ ID NO: 351536 - DNA, 15 bp, Homo sapiens
tggtattaaaactag

SEQ ID NO: 351537 - DNA, 15 bp, Homo sapiens
gtggtattaaaacta

SEQ ID NO: 351538 - DNA, 15 bp, Homo sapiens
tgtggtattaaaact

SEQ ID NO: 351539 - DNA, 15 bp, Homo sapiens
ctgtggtattaaaac

SEQ ID NO: 351540 - DNA, 15 bp, Homo sapiens
cctgtggtattaaaa

SEQ ID NO: 351541 - DNA, 15 bp, Homo sapiens
gcctgtggtattaaa

SEQ ID NO: 351542 - DNA, 15 bp, Homo sapiens
ggcctgtggtattaa

SEQ ID NO: 351543 - DNA, 15 bp, Homo sapiens
tggcctgtggtatta

SEQ ID NO: 351544 - DNA, 15 bp, Homo sapiens
ctggcctgtggtatt

SEQ ID NO: 351545 - DNA, 15 bp, Homo sapiens
tctggcctgtggtat

SEQ ID NO: 351546 - DNA, 15 bp, Homo sapiens
ctctggcctgtggta

SEQ ID NO: 351547 - DNA, 15 bp, Homo sapiens
actctggcctgtggt

SEQ ID NO: 351548 - DNA, 15 bp, Homo sapiens
aactctggcctgtgg

SEQ ID NO: 351549 - DNA, 15 bp, Homo sapiens
caactctggcctgtg

SEQ ID NO: 351550 - DNA, 15 bp, Homo sapiens
ccaactctggcctgt

SEQ ID NO: 351551 - DNA, 15 bp, Homo sapiens
gccaactctggcctg

SEQ ID NO: 351552 - DNA, 15 bp, Homo sapiens
tgccaactctggcct

SEQ ID NO: 351553 - DNA, 15 bp, Homo sapiens
ttgccaactctggcc

SEQ ID NO: 351554 - DNA, 15 bp, Homo sapiens
gttgccaactctggc

SEQ ID NO: 351555 - DNA, 15 bp, Homo sapiens
agttgccaactctgg

SEQ ID NO: 351556 - DNA, 15 bp, Homo sapiens
cagttgccaactctg

SEQ ID NO: 351557 - DNA, 15 bp, Homo sapiens
acagttgccaactct

SEQ ID NO: 351558 - DNA, 15 bp, Homo sapiens
cacagttgccaactc

SEQ ID NO: 351559 - DNA, 15 bp, Homo sapiens
tcacagttgccaact

SEQ ID NO: 351560 - DNA, 15 bp, Homo sapiens
atcacagttgccaac

SEQ ID NO: 351561 - DNA, 15 bp, Homo sapiens
tatcacagttgccaa

SEQ ID NO: 351562 - DNA, 15 bp, Homo sapiens
gtatcacagttgcca

SEQ ID NO: 351563 - DNA, 15 bp, Homo sapiens
ggtatcacagttgcc

SEQ ID NO: 351564 - DNA, 15 bp, Homo sapiens
aggtatcacagttgc

SEQ ID NO: 351565 - DNA, 15 bp, Homo sapiens
aaggtatcacagttg

SEQ ID NO: 351566 - DNA, 15 bp, Homo sapiens
gaaggtatcacagtt

SEQ ID NO: 351567 - DNA, 15 bp, Homo sapiens
tgaaggtatcacagt

SEQ ID NO: 351568 - DNA, 15 bp, Homo sapiens
ctgaaggtatcacag

SEQ ID NO: 351569 - DNA, 15 bp, Homo sapiens
tctgaaggtatcaca

SEQ ID NO: 351570 - DNA, 15 bp, Homo sapiens
gtctgaaggtatcac

SEQ ID NO: 351571 - DNA, 15 bp, Homo sapiens
agtctgaaggtatca

SEQ ID NO: 351572 - DNA, 15 bp, Homo sapiens
cagtctgaaggtatc

SEQ ID NO: 351573 - DNA, 15 bp, Homo sapiens
gcagtctgaaggtat

SEQ ID NO: 351574 - DNA, 15 bp, Homo sapiens
ggcagtctgaaggta

SEQ ID NO: 351575 - DNA, 15 bp, Homo sapiens
gggcagtctgaaggt

SEQ ID NO: 351576 - DNA, 15 bp, Homo sapiens
ggggcagtctgaagg

SEQ ID NO: 351577 - DNA, 15 bp, Homo sapiens
gggggcagtctgaag

SEQ ID NO: 351578 - DNA, 15 bp, Homo sapiens
tgggggcagtctgaa

SEQ ID NO: 351579 - DNA, 15 bp, Homo sapiens
ttgggggcagtctga

SEQ ID NO: 351580 - DNA, 15 bp, Homo sapiens
cttgggggcagtctg

SEQ ID NO: 351581 - DNA, 15 bp, Homo sapiens
tcttgggggcagtct

SEQ ID NO: 351582 - DNA, 15 bp, Homo sapiens
ttcttgggggcagtc

SEQ ID NO: 351583 - DNA, 15 bp, Homo sapiens
tttcttgggggcagt

SEQ ID NO: 351584 - DNA, 15 bp, Homo sapiens
ttttcttgggggcag

SEQ ID NO: 351585 - DNA, 15 bp, Homo sapiens
cttttcttgggggca

SEQ ID NO: 351586 - DNA, 15 bp, Homo sapiens
tcttttcttgggggc

SEQ ID NO: 351587 - DNA, 15 bp, Homo sapiens
ttcttttcttggggg

SEQ ID NO: 351588 - DNA, 15 bp, Homo sapiens
gttcttttcttgggg

SEQ ID NO: 351589 - DNA, 15 bp, Homo sapiens
agttcttttcttggg

SEQ ID NO: 351590 - DNA, 15 bp, Homo sapiens
aagttcttttcttgg

SEQ ID NO: 351591 - DNA, 15 bp, Homo sapiens
aaagttcttttcttg

SEQ ID NO: 351592 - DNA, 15 bp, Homo sapiens
gaaagttcttttctt

SEQ ID NO: 351593 - DNA, 15 bp, Homo sapiens
ggaaagttcttttct

SEQ ID NO: 351594 - DNA, 15 bp, Homo sapiens
tggaaagttcttttc

SEQ ID NO: 351595 - DNA, 15 bp, Homo sapiens
gtggaaagttctttt

SEQ ID NO: 351596 - DNA, 15 bp, Homo sapiens
agtggaaagttcttt

SEQ ID NO: 351597 - DNA, 15 bp, Homo sapiens
cagtggaaagttctt

SEQ ID NO: 351598 - DNA, 15 bp, Homo sapiens
gcagtggaaagttct

SEQ ID NO: 351599 - DNA, 15 bp, Homo sapiens
ggcagtggaaagttc

SEQ ID NO: 351600 - DNA, 15 bp, Homo sapiens
tggcagtggaaagtt

SEQ ID NO: 351601 - DNA, 15 bp, Homo sapiens
ttggcagtggaaagt

SEQ ID NO: 351602 - DNA, 15 bp, Homo sapiens
tttggcagtggaaag

SEQ ID NO: 351603 - DNA, 15 bp, Homo sapiens
ctttggcagtggaaa

SEQ ID NO: 351604 - DNA, 15 bp, Homo sapiens
cctttggcagtggaa

SEQ ID NO: 351605 - DNA, 15 bp, Homo sapiens
ccctttggcagtgga

SEQ ID NO: 351606 - DNA, 15 bp, Homo sapiens
gccctttggcagtgg

SEQ ID NO: 351607 - DNA, 15 bp, Homo sapiens
agccctttggcagtg

SEQ ID NO: 351608 - DNA, 15 bp, Homo sapiens
aagccctttggcagt

SEQ ID NO: 351609 - DNA, 15 bp, Homo sapiens
gaagccctttggcag

SEQ ID NO: 351610 - DNA, 15 bp, Homo sapiens
tgaagccctttggca

SEQ ID NO: 351611 - DNA, 15 bp, Homo sapiens
ctgaagccctttggc

SEQ ID NO: 351612 - DNA, 15 bp, Homo sapiens
actgaagccctttgg

SEQ ID NO: 351613 - DNA, 15 bp, Homo sapiens
aactgaagccctttg

SEQ ID NO: 351614 - DNA, 15 bp, Homo sapiens
caactgaagcccttt

SEQ ID NO: 351615 - DNA, 15 bp, Homo sapiens
gcaactgaagccctt

SEQ ID NO: 351616 - DNA, 15 bp, Homo sapiens
ggcaactgaagccct

SEQ ID NO: 351617 - DNA, 15 bp, Homo sapiens
tggcaactgaagccc

SEQ ID NO: 351618 - DNA, 15 bp, Homo sapiens
atggcaactgaagcc

SEQ ID NO: 351619 - DNA, 15 bp, Homo sapiens
gatggcaactgaagc

SEQ ID NO: 351620 - DNA, 15 bp, Homo sapiens
cgatggcaactgaag

SEQ ID NO: 351621 - DNA, 15 bp, Homo sapiens
acgatggcaactgaa

SEQ ID NO: 351622 - DNA, 15 bp, Homo sapiens
gacgatggcaactga

SEQ ID NO: 351623 - DNA, 15 bp, Homo sapiens
ggacgatggcaactg

SEQ ID NO: 351624 - DNA, 15 bp, Homo sapiens
tggacgatggcaact

SEQ ID NO: 351625 - DNA, 15 bp, Homo sapiens
ttggacgatggcaac

SEQ ID NO: 351626 - DNA, 15 bp, Homo sapiens
tttggacgatggcaa

SEQ ID NO: 351627 - DNA, 15 bp, Homo sapiens
ctttggacgatggca

SEQ ID NO: 351628 - DNA, 15 bp, Homo sapiens
cctttggacgatggc

SEQ ID NO: 351629 - DNA, 15 bp, Homo sapiens
acctttggacgatgg

SEQ ID NO: 351630 - DNA, 15 bp, Homo sapiens
gacctttggacgatg

SEQ ID NO: 351631 - DNA, 15 bp, Homo sapiens
cgacctttggacgat

SEQ ID NO: 351632 - DNA, 15 bp, Homo sapiens
tcgacctttggacga

SEQ ID NO: 351633 - DNA, 15 bp, Homo sapiens
gtcgacctttggacg

SEQ ID NO: 351634 - DNA, 15 bp, Homo sapiens
ggtcgacctttggac

SEQ ID NO: 351635 - DNA, 15 bp, Homo sapiens
aggtcgacctttgga

SEQ ID NO: 351636 - DNA, 15 bp, Homo sapiens
gaggtcgacctttgg

SEQ ID NO: 351637 - DNA, 15 bp, Homo sapiens
tgaggtcgacctttg

SEQ ID NO: 351638 - DNA, 15 bp, Homo sapiens
ttgaggtcgaccttt

SEQ ID NO: 351639 - DNA, 15 bp, Homo sapiens
cttgaggtcgacctt

SEQ ID NO: 351640 - DNA, 15 bp, Homo sapiens
gcttgaggtcgacct

SEQ ID NO: 351641 - DNA, 15 bp, Homo sapiens
tgcttgaggtcgacc

SEQ ID NO: 351642 - DNA, 15 bp, Homo sapiens
atgcttgaggtcgac

SEQ ID NO: 351643 - DNA, 15 bp, Homo sapiens
gatgcttgaggtcga

SEQ ID NO: 351644 - DNA, 15 bp, Homo sapiens
tgatgcttgaggtcg

SEQ ID NO: 351645 - DNA, 15 bp, Homo sapiens
atgatgcttgaggtc

SEQ ID NO: 351646 - DNA, 15 bp, Homo sapiens
gatgatgcttgaggt

SEQ ID NO: 351647 - DNA, 15 bp, Homo sapiens
cgatgatgcttgagg

SEQ ID NO: 351648 - DNA, 15 bp, Homo sapiens
gcgatgatgcttgag

SEQ ID NO: 351649 - DNA, 15 bp, Homo sapiens
agcgatgatgcttga

SEQ ID NO: 351650 - DNA, 15 bp, Homo sapiens
gagcgatgatgcttg

SEQ ID NO: 351651 - DNA, 15 bp, Homo sapiens
agagcgatgatgctt

SEQ ID NO: 351652 - DNA, 15 bp, Homo sapiens
aagagcgatgatgct

SEQ ID NO: 351653 - DNA, 15 bp, Homo sapiens
aaagagcgatgatgc

SEQ ID NO: 351654 - DNA, 15 bp, Homo sapiens
caaagagcgatgatg

SEQ ID NO: 351655 - DNA, 15 bp, Homo sapiens
ccaaagagcgatgat

SEQ ID NO: 351656 - DNA, 15 bp, Homo sapiens
cccaaagagcgatga

SEQ ID NO: 351657 - DNA, 15 bp, Homo sapiens
ccccaaagagcgatg

SEQ ID NO: 351658 - DNA, 15 bp, Homo sapiens
accccaaagagcgat

SEQ ID NO: 351659 - DNA, 15 bp, Homo sapiens
taccccaaagagcga

SEQ ID NO: 351660 - DNA, 15 bp, Homo sapiens
ctaccccaaagagcg

SEQ ID NO: 351661 - DNA, 15 bp, Homo sapiens
tctaccccaaagagc

SEQ ID NO: 351662 - DNA, 15 bp, Homo sapiens
gtctaccccaaagag

SEQ ID NO: 351663 - DNA, 15 bp, Homo sapiens
agtctaccccaaaga

SEQ ID NO: 351664 - DNA, 15 bp, Homo sapiens
tagtctaccccaaag

SEQ ID NO: 351665 - DNA, 15 bp, Homo sapiens
ctagtctaccccaaa

SEQ ID NO: 351666 - DNA, 15 bp, Homo sapiens
tctagtctaccccaa

SEQ ID NO: 351667 - DNA, 15 bp, Homo sapiens
gtctagtctacccca

SEQ ID NO: 351668 - DNA, 15 bp, Homo sapiens
agtctagtctacccc

SEQ ID NO: 351669 - DNA, 15 bp, Homo sapiens
cagtctagtctaccc

SEQ ID NO: 351670 - DNA, 15 bp, Homo sapiens
ccagtctagtctacc

SEQ ID NO: 351671 - DNA, 15 bp, Homo sapiens
cccagtctagtctac

SEQ ID NO: 351672 - DNA, 15 bp, Homo sapiens
gcccagtctagtcta

SEQ ID NO: 351673 - DNA, 15 bp, Homo sapiens
agcccagtctagtct

SEQ ID NO: 351674 - DNA, 15 bp, Homo sapiens
gagcccagtctagtc

SEQ ID NO: 351675 - DNA, 15 bp, Homo sapiens
tgagcccagtctagt

SEQ ID NO: 351676 - DNA, 15 bp, Homo sapiens
ctgagcccagtctag

SEQ ID NO: 351677 - DNA, 15 bp, Homo sapiens
actgagcccagtcta

SEQ ID NO: 351678 - DNA, 15 bp, Homo sapiens
aactgagcccagtct

SEQ ID NO: 351679 - DNA, 15 bp, Homo sapiens
caactgagcccagtc

SEQ ID NO: 351680 - DNA, 15 bp, Homo sapiens
acaactgagcccagt

SEQ ID NO: 351681 - DNA, 15 bp, Homo sapiens
aacaactgagcccag

SEQ ID NO: 351682 - DNA, 15 bp, Homo sapiens
aaacaactgagccca

SEQ ID NO: 351683 - DNA, 15 bp, Homo sapiens
gaaacaactgagccc

SEQ ID NO: 351684 - DNA, 15 bp, Homo sapiens
agaaacaactgagcc

SEQ ID NO: 351685 - DNA, 15 bp, Homo sapiens
cagaaacaactgagc

SEQ ID NO: 351686 - DNA, 15 bp, Homo sapiens
ccagaaacaactgag

SEQ ID NO: 351687 - DNA, 15 bp, Homo sapiens
gccagaaacaactga

SEQ ID NO: 351688 - DNA, 15 bp, Homo sapiens
tgccagaaacaactg

SEQ ID NO: 351689 - DNA, 15 bp, Homo sapiens
atgccagaaacaact

SEQ ID NO: 351690 - DNA, 15 bp, Homo sapiens
tatgccagaaacaac

SEQ ID NO: 351691 - DNA, 15 bp, Homo sapiens
atatgccagaaacaa

SEQ ID NO: 351692 - DNA, 15 bp, Homo sapiens
aatatgccagaaaca

SEQ ID NO: 351693 - DNA, 15 bp, Homo sapiens
gaatatgccagaaac

SEQ ID NO: 351694 - DNA, 15 bp, Homo sapiens
agaatatgccagaaa

SEQ ID NO: 351695 - DNA, 15 bp, Homo sapiens
cagaatatgccagaa

SEQ ID NO: 351696 - DNA, 15 bp, Homo sapiens
acagaatatgccaga

SEQ ID NO: 351697 - DNA, 15 bp, Homo sapiens
gacagaatatgccag

SEQ ID NO: 351698 - DNA, 15 bp, Homo sapiens
agacagaatatgcca

SEQ ID NO: 351699 - DNA, 15 bp, Homo sapiens
gagacagaatatgcc

SEQ ID NO: 351700 - DNA, 15 bp, Homo sapiens
tgagacagaatatgc

SEQ ID NO: 351701 - DNA, 15 bp, Homo sapiens
ttgagacagaatatg

SEQ ID NO: 351702 - DNA, 15 bp, Homo sapiens
cttgagacagaatat

SEQ ID NO: 351703 - DNA, 15 bp, Homo sapiens
acttgagacagaata

SEQ ID NO: 351704 - DNA, 15 bp, Homo sapiens
gacttgagacagaat

SEQ ID NO: 351705 - DNA, 15 bp, Homo sapiens
ggacttgagacagaa

SEQ ID NO: 351706 - DNA, 15 bp, Homo sapiens
gggacttgagacaga

SEQ ID NO: 351707 - DNA, 15 bp, Homo sapiens
agggacttgagacag

SEQ ID NO: 351708 - DNA, 15 bp, Homo sapiens
aagggacttgagaca

SEQ ID NO: 351709 - DNA, 15 bp, Homo sapiens
gaagggacttgagac

SEQ ID NO: 351710 - DNA, 15 bp, Homo sapiens
agaagggacttgaga

SEQ ID NO: 351711 - DNA, 15 bp, Homo sapiens
tagaagggacttgag

SEQ ID NO: 351712 - DNA, 15 bp, Homo sapiens
ttagaagggacttga

SEQ ID NO: 351713 - DNA, 15 bp, Homo sapiens
tttagaagggacttg

SEQ ID NO: 351714 - DNA, 15 bp, Homo sapiens
ctttagaagggactt

SEQ ID NO: 351715 - DNA, 15 bp, Homo sapiens
gctttagaagggact

SEQ ID NO: 351716 - DNA, 15 bp, Homo sapiens
tgctttagaagggac

SEQ ID NO: 351717 - DNA, 15 bp, Homo sapiens
ctgctttagaaggga

SEQ ID NO: 351718 - DNA, 15 bp, Homo sapiens
actgctttagaaggg

SEQ ID NO: 351719 - DNA, 15 bp, Homo sapiens
aactgctttagaagg

SEQ ID NO: 351720 - DNA, 15 bp, Homo sapiens
aaactgctttagaag

SEQ ID NO: 351721 - DNA, 15 bp, Homo sapiens
caaactgctttagaa

SEQ ID NO: 351722 - DNA, 15 bp, Homo sapiens
gcaaactgctttaga

SEQ ID NO: 351723 - DNA, 15 bp, Homo sapiens
ggcaaactgctttag

SEQ ID NO: 351724 - DNA, 15 bp, Homo sapiens
tggcaaactgcttta

SEQ ID NO: 351725 - DNA, 15 bp, Homo sapiens
gtggcaaactgcttt

SEQ ID NO: 351726 - DNA, 15 bp, Homo sapiens
agtggcaaactgctt

SEQ ID NO: 351727 - DNA, 15 bp, Homo sapiens
cagtggcaaactgct

SEQ ID NO: 351728 - DNA, 15 bp, Homo sapiens
ccagtggcaaactgc

SEQ ID NO: 351729 - DNA, 15 bp, Homo sapiens
cccagtggcaaactg

SEQ ID NO: 351730 - DNA, 15 bp, Homo sapiens
ccccagtggcaaact

SEQ ID NO: 351731 - DNA, 15 bp, Homo sapiens
gccccagtggcaaac

SEQ ID NO: 351732 - DNA, 15 bp, Homo sapiens
ggccccagtggcaaa

SEQ ID NO: 351733 - DNA, 15 bp, Homo sapiens
aggccccagtggcaa

SEQ ID NO: 351734 - DNA, 15 bp, Homo sapiens
gaggccccagtggca

SEQ ID NO: 351735 - DNA, 15 bp, Homo sapiens
agaggccccagtggc

SEQ ID NO: 351736 - DNA, 15 bp, Homo sapiens
aagaggccccagtgg

SEQ ID NO: 351737 - DNA, 15 bp, Homo sapiens
caagaggccccagtg

SEQ ID NO: 351738 - DNA, 15 bp, Homo sapiens
tcaagaggccccagt

SEQ ID NO: 351739 - DNA, 15 bp, Homo sapiens
ctcaagaggccccag

SEQ ID NO: 351740 - DNA, 15 bp, Homo sapiens
tctcaagaggcccca

SEQ ID NO: 351741 - DNA, 15 bp, Homo sapiens
ttctcaagaggcccc

SEQ ID NO: 351742 - DNA, 15 bp, Homo sapiens
tttctcaagaggccc

SEQ ID NO: 351743 - DNA, 15 bp, Homo sapiens
ctttctcaagaggcc

SEQ ID NO: 351744 - DNA, 15 bp, Homo sapiens
tctttctcaagaggc

SEQ ID NO: 351745 - DNA, 15 bp, Homo sapiens
atctttctcaagagg

SEQ ID NO: 351746 - DNA, 15 bp, Homo sapiens
tatctttctcaagag

SEQ ID NO: 351747 - DNA, 15 bp, Homo sapiens
atatctttctcaaga

SEQ ID NO: 351748 - DNA, 15 bp, Homo sapiens
tatatctttctcaag

SEQ ID NO: 351749 - DNA, 15 bp, Homo sapiens
ctatatctttctcaa

SEQ ID NO: 351750 - DNA, 15 bp, Homo sapiens
actatatctttctca

SEQ ID NO: 351751 - DNA, 15 bp, Homo sapiens
cactatatctttctc

SEQ ID NO: 351752 - DNA, 15 bp, Homo sapiens
tcactatatctttct

SEQ ID NO: 351753 - DNA, 15 bp, Homo sapiens
ctcactatatctttc

SEQ ID NO: 351754 - DNA, 15 bp, Homo sapiens
actcactatatcttt

SEQ ID NO: 351755 - DNA, 15 bp, Homo sapiens
gactcactatatctt

SEQ ID NO: 351756 - DNA, 15 bp, Homo sapiens
ggactcactatatct

SEQ ID NO: 351757 - DNA, 15 bp, Homo sapiens
tggactcactatatc

SEQ ID NO: 351758 - DNA, 15 bp, Homo sapiens
ctggactcactatat

SEQ ID NO: 351759 - DNA, 15 bp, Homo sapiens
tctggactcactata

SEQ ID NO: 351760 - DNA, 15 bp, Homo sapiens
ttctggactcactat

SEQ ID NO: 351761 - DNA, 15 bp, Homo sapiens
gttctggactcacta

SEQ ID NO: 351762 - DNA, 15 bp, Homo sapiens
cgttctggactcact

SEQ ID NO: 351763 - DNA, 15 bp, Homo sapiens
acgttctggactcac

SEQ ID NO: 351764 - DNA, 15 bp, Homo sapiens
cacgttctggactca

SEQ ID NO: 351765 - DNA, 15 bp, Homo sapiens
ccacgttctggactc

SEQ ID NO: 351766 - DNA, 15 bp, Homo sapiens
tccacgttctggact

SEQ ID NO: 351767 - DNA, 15 bp, Homo sapiens
ttccacgttctggac

SEQ ID NO: 351768 - DNA, 15 bp, Homo sapiens
attccacgttctgga

SEQ ID NO: 351769 - DNA, 15 bp, Homo sapiens
aattccacgttctgg

SEQ ID NO: 351770 - DNA, 15 bp, Homo sapiens
caattccacgttctg

SEQ ID NO: 351771 - DNA, 15 bp, Homo sapiens
acaattccacgttct

SEQ ID NO: 351772 - DNA, 15 bp, Homo sapiens
cacaattccacgttc

SEQ ID NO: 351773 - DNA, 15 bp, Homo sapiens
tcacaattccacgtt

SEQ ID NO: 351774 - DNA, 15 bp, Homo sapiens
ctcacaattccacgt

SEQ ID NO: 351775 - DNA, 15 bp, Homo sapiens
gctcacaattccacg

SEQ ID NO: 351776 - DNA, 15 bp, Homo sapiens
agctcacaattccac

SEQ ID NO: 351777 - DNA, 15 bp, Homo sapiens
gagctcacaattcca

SEQ ID NO: 351778 - DNA, 15 bp, Homo sapiens
ggagctcacaattcc

SEQ ID NO: 351779 - DNA, 15 bp, Homo sapiens
aggagctcacaattc

SEQ ID NO: 351780 - DNA, 15 bp, Homo sapiens
caggagctcacaatt

SEQ ID NO: 351781 - DNA, 15 bp, Homo sapiens
tcaggagctcacaat

SEQ ID NO: 351782 - DNA, 15 bp, Homo sapiens
ctcaggagctcacaa

SEQ ID NO: 351783 - DNA, 15 bp, Homo sapiens
tctcaggagctcaca

SEQ ID NO: 351784 - DNA, 15 bp, Homo sapiens
atctcaggagctcac

SEQ ID NO: 351785 - DNA, 15 bp, Homo sapiens
tatctcaggagctca

SEQ ID NO: 351786 - DNA, 15 bp, Homo sapiens
gtatctcaggagctc

SEQ ID NO: 351787 - DNA, 15 bp, Homo sapiens
ggtatctcaggagct

SEQ ID NO: 351788 - DNA, 15 bp, Homo sapiens
tggtatctcaggagc

SEQ ID NO: 351789 - DNA, 15 bp, Homo sapiens
atggtatctcaggag

SEQ ID NO: 351790 - DNA, 15 bp, Homo sapiens
catggtatctcagga

SEQ ID NO: 351791 - DNA, 15 bp, Homo sapiens
tcatggtatctcagg

SEQ ID NO: 351792 - DNA, 15 bp, Homo sapiens
gtcatggtatctcag

SEQ ID NO: 351793 - DNA, 15 bp, Homo sapiens
agtcatggtatctca

SEQ ID NO: 351794 - DNA, 15 bp, Homo sapiens
aagtcatggtatctc

SEQ ID NO: 351795 - DNA, 15 bp, Homo sapiens
taagtcatggtatct

SEQ ID NO: 351796 - DNA, 15 bp, Homo sapiens
ttaagtcatggtatc

SEQ ID NO: 351797 - DNA, 15 bp, Homo sapiens
cttaagtcatggtat

SEQ ID NO: 351798 - DNA, 15 bp, Homo sapiens
acttaagtcatggta

SEQ ID NO: 351799 - DNA, 15 bp, Homo sapiens
cacttaagtcatggt

SEQ ID NO: 351800 - DNA, 15 bp, Homo sapiens
ccacttaagtcatgg

SEQ ID NO: 351801 - DNA, 15 bp, Homo sapiens
accacttaagtcatg

SEQ ID NO: 351802 - DNA, 15 bp, Homo sapiens
gaccacttaagtcat

SEQ ID NO: 351803 - DNA, 15 bp, Homo sapiens
agaccacttaagtca

SEQ ID NO: 351804 - DNA, 15 bp, Homo sapiens
aagaccacttaagtc

SEQ ID NO: 351805 - DNA, 15 bp, Homo sapiens
aaagaccacttaagt

SEQ ID NO: 351806 - DNA, 15 bp, Homo sapiens
caaagaccacttaag

SEQ ID NO: 351807 - DNA, 15 bp, Homo sapiens
gcaaagaccacttaa

SEQ ID NO: 351808 - DNA, 15 bp, Homo sapiens
agcaaagaccactta

SEQ ID NO: 351809 - DNA, 15 bp, Homo sapiens
aagcaaagaccactt

SEQ ID NO: 351810 - DNA, 15 bp, Homo sapiens
aaagcaaagaccact

SEQ ID NO: 351811 - DNA, 15 bp, Homo sapiens
caaagcaaagaccac

SEQ ID NO: 351812 - DNA, 15 bp, Homo sapiens
tcaaagcaaagacca

SEQ ID NO: 351813 - DNA, 15 bp, Homo sapiens
ctcaaagcaaagacc

SEQ ID NO: 351814 - DNA, 15 bp, Homo sapiens
tctcaaagcaaagac

SEQ ID NO: 351815 - DNA, 15 bp, Homo sapiens
ttctcaaagcaaaga

SEQ ID NO: 351816 - DNA, 15 bp, Homo sapiens
cttctcaaagcaaag

SEQ ID NO: 351817 - DNA, 15 bp, Homo sapiens
ccttctcaaagcaaa

SEQ ID NO: 351818 - DNA, 15 bp, Homo sapiens
accttctcaaagcaa

SEQ ID NO: 351819 - DNA, 15 bp, Homo sapiens
aaccttctcaaagca

SEQ ID NO: 351820 - DNA, 15 bp, Homo sapiens
caaccttctcaaagc

SEQ ID NO: 351821 - DNA, 15 bp, Homo sapiens
acaaccttctcaaag

SEQ ID NO: 351822 - DNA, 15 bp, Homo sapiens
cacaaccttctcaaa

SEQ ID NO: 351823 - DNA, 15 bp, Homo sapiens
gcacaaccttctcaa

SEQ ID NO: 351824 - DNA, 15 bp, Homo sapiens
ggcacaaccttctca

SEQ ID NO: 351825 - DNA, 15 bp, Homo sapiens
aggcacaaccttctc

SEQ ID NO: 351826 - DNA, 15 bp, Homo sapiens
aaggcacaaccttct

SEQ ID NO: 351827 - DNA, 15 bp, Homo sapiens
aaaggcacaaccttc

SEQ ID NO: 351828 - DNA, 15 bp, Homo sapiens
aaaaggcacaacctt

SEQ ID NO: 351829 - DNA, 15 bp, Homo sapiens
caaaaggcacaacct

SEQ ID NO: 351830 - DNA, 15 bp, Homo sapiens
gcaaaaggcacaacc

SEQ ID NO: 351831 - DNA, 15 bp, Homo sapiens
tgcaaaaggcacaac

SEQ ID NO: 351832 - DNA, 15 bp, Homo sapiens
ctgcaaaaggcacaa

SEQ ID NO: 351833 - DNA, 15 bp, Homo sapiens
actgcaaaaggcaca

SEQ ID NO: 351834 - DNA, 15 bp, Homo sapiens
tactgcaaaaggcac

SEQ ID NO: 351835 - DNA, 15 bp, Homo sapiens
ttactgcaaaaggca

SEQ ID NO: 351836 - DNA, 15 bp, Homo sapiens
attactgcaaaaggc

SEQ ID NO: 351837 - DNA, 15 bp, Homo sapiens
aattactgcaaaagg

SEQ ID NO: 351838 - DNA, 15 bp, Homo sapiens
taattactgcaaaag

SEQ ID NO: 351839 - DNA, 15 bp, Homo sapiens
ataattactgcaaaa

SEQ ID NO: 351840 - DNA, 15 bp, Homo sapiens
cataattactgcaaa

SEQ ID NO: 351841 - DNA, 15 bp, Homo sapiens
gcataattactgcaa

SEQ ID NO: 351842 - DNA, 15 bp, Homo sapiens
agcataattactgca

SEQ ID NO: 351843 - DNA, 15 bp, Homo sapiens
cagcataattactgc

SEQ ID NO: 351844 - DNA, 15 bp, Homo sapiens
acagcataattactg

SEQ ID NO: 351845 - DNA, 15 bp, Homo sapiens
tacagcataattact

SEQ ID NO: 351846 - DNA, 15 bp, Homo sapiens
atacagcataattac

SEQ ID NO: 351847 - DNA, 15 bp, Homo sapiens
aatacagcataatta

SEQ ID NO: 351848 - DNA, 15 bp, Homo sapiens
caatacagcataatt

SEQ ID NO: 351849 - DNA, 15 bp, Homo sapiens
gcaatacagcataat

SEQ ID NO: 351850 - DNA, 15 bp, Homo sapiens
ggcaatacagcataa

SEQ ID NO: 351851 - DNA, 15 bp, Homo sapiens
aggcaatacagcata

SEQ ID NO: 351852 - DNA, 15 bp, Homo sapiens
taggcaatacagcat

SEQ ID NO: 351853 - DNA, 15 bp, Homo sapiens
ttaggcaatacagca

SEQ ID NO: 351854 - DNA, 15 bp, Homo sapiens
attaggcaatacagc

SEQ ID NO: 351855 - DNA, 15 bp, Homo sapiens
tattaggcaatacag

SEQ ID NO: 351856 - DNA, 15 bp, Homo sapiens
ctattaggcaataca

SEQ ID NO: 351857 - DNA, 15 bp, Homo sapiens
tctattaggcaatac

SEQ ID NO: 351858 - DNA, 15 bp, Homo sapiens
ttctattaggcaata

SEQ ID NO: 351859 - DNA, 15 bp, Homo sapiens
tttctattaggcaat

SEQ ID NO: 351860 - DNA, 15 bp, Homo sapiens
atttctattaggcaa

SEQ ID NO: 351861 - DNA, 15 bp, Homo sapiens
aatttctattaggca

SEQ ID NO: 351862 - DNA, 15 bp, Homo sapiens
caatttctattaggc

SEQ ID NO: 351863 - DNA, 15 bp, Homo sapiens
acaatttctattagg

SEQ ID NO: 351864 - DNA, 15 bp, Homo sapiens
aacaatttctattag

SEQ ID NO: 351865 - DNA, 15 bp, Homo sapiens
gaacaatttctatta

SEQ ID NO: 351866 - DNA, 15 bp, Homo sapiens
agaacaatttctatt

SEQ ID NO: 351867 - DNA, 15 bp, Homo sapiens
gagaacaatttctat

SEQ ID NO: 351868 - DNA, 15 bp, Homo sapiens
tgagaacaatttcta

SEQ ID NO: 351869 - DNA, 15 bp, Homo sapiens
ttgagaacaatttct

SEQ ID NO: 351870 - DNA, 15 bp, Homo sapiens
gttgagaacaatttc

SEQ ID NO: 351871 - DNA, 15 bp, Homo sapiens
ggttgagaacaattt

SEQ ID NO: 351872 - DNA, 15 bp, Homo sapiens
gggttgagaacaatt

SEQ ID NO: 351873 - DNA, 15 bp, Homo sapiens
agggttgagaacaat

SEQ ID NO: 351874 - DNA, 15 bp, Homo sapiens
aagggttgagaacaa

SEQ ID NO: 351875 - DNA, 15 bp, Homo sapiens
caagggttgagaaca

SEQ ID NO: 351876 - DNA, 15 bp, Homo sapiens
tcaagggttgagaac

SEQ ID NO: 351877 - DNA, 15 bp, Homo sapiens
ttcaagggttgagaa

SEQ ID NO: 351878 - DNA, 15 bp, Homo sapiens
tttcaagggttgaga

SEQ ID NO: 351879 - DNA, 15 bp, Homo sapiens
ttttcaagggttgag

SEQ ID NO: 351880 - DNA, 15 bp, Homo sapiens
tttttcaagggttga

SEQ ID NO: 351881 - DNA, 15 bp, Homo sapiens
gtttttcaagggttg

SEQ ID NO: 351882 - DNA, 15 bp, Homo sapiens
tgtttttcaagggtt

SEQ ID NO: 351883 - DNA, 15 bp, Homo sapiens
ttgtttttcaagggt

SEQ ID NO: 351884 - DNA, 15 bp, Homo sapiens
tttgtttttcaaggg

SEQ ID NO: 351885 - DNA, 15 bp, Homo sapiens
gtttgtttttcaagg

SEQ ID NO: 351886 - DNA, 15 bp, Homo sapiens
tgtttgtttttcaag

SEQ ID NO: 351887 - DNA, 15 bp, Homo sapiens
ttgtttgtttttcaa

SEQ ID NO: 351888 - DNA, 15 bp, Homo sapiens
tttgtttgtttttca

SEQ ID NO: 351889 - DNA, 15 bp, Homo sapiens
ttttgtttgtttttc

SEQ ID NO: 351890 - DNA, 15 bp, Homo sapiens
tttttgtttgttttt

SEQ ID NO: 351891 - DNA, 15 bp, Homo sapiens
ttttttgtttgtttt

SEQ ID NO: 351892 - DNA, 15 bp, Homo sapiens
attttttgtttgttt

SEQ ID NO: 351893 - DNA, 15 bp, Homo sapiens
cattttttgtttgtt

SEQ ID NO: 351894 - DNA, 15 bp, Homo sapiens
tcattttttgtttgt

SEQ ID NO: 351895 - DNA, 15 bp, Homo sapiens
atcattttttgtttg

SEQ ID NO: 351896 - DNA, 15 bp, Homo sapiens
catcattttttgttt

SEQ ID NO: 351897 - DNA, 15 bp, Homo sapiens
gcatcattttttgtt

SEQ ID NO: 351898 - DNA, 15 bp, Homo sapiens
ggcatcattttttgt

SEQ ID NO: 351899 - DNA, 15 bp, Homo sapiens
tggcatcattttttg

SEQ ID NO: 351900 - DNA, 15 bp, Homo sapiens
atggcatcatttttt

SEQ ID NO: 351901 - DNA, 15 bp, Homo sapiens
gatggcatcattttt

SEQ ID NO: 351902 - DNA, 15 bp, Homo sapiens
ggatggcatcatttt

SEQ ID NO: 351903 - DNA, 15 bp, Homo sapiens
aggatggcatcattt

SEQ ID NO: 351904 - DNA, 15 bp, Homo sapiens
aaggatggcatcatt

SEQ ID NO: 351905 - DNA, 15 bp, Homo sapiens
gaaggatggcatcat

SEQ ID NO: 351906 - DNA, 15 bp, Homo sapiens
ggaaggatggcatca

SEQ ID NO: 351907 - DNA, 15 bp, Homo sapiens
aggaaggatggcatc

SEQ ID NO: 351908 - DNA, 15 bp, Homo sapiens
taggaaggatggcat

SEQ ID NO: 351909 - DNA, 15 bp, Homo sapiens
ataggaaggatggca

SEQ ID NO: 351910 - DNA, 15 bp, Homo sapiens
cataggaaggatggc

SEQ ID NO: 351911 - DNA, 15 bp, Homo sapiens
ccataggaaggatgg

SEQ ID NO: 351912 - DNA, 15 bp, Homo sapiens
accataggaaggatg

SEQ ID NO: 351913 - DNA, 15 bp, Homo sapiens
caccataggaaggat

SEQ ID NO: 351914 - DNA, 15 bp, Homo sapiens
tcaccataggaagga

SEQ ID NO: 351915 - DNA, 15 bp, Homo sapiens
ctcaccataggaagg

SEQ ID NO: 351916 - DNA, 15 bp, Homo sapiens
actcaccataggaag

SEQ ID NO: 351917 - DNA, 15 bp, Homo sapiens
aactcaccataggaa

SEQ ID NO: 351918 - DNA, 15 bp, Homo sapiens
taactcaccatagga

SEQ ID NO: 351919 - DNA, 15 bp, Homo sapiens
ctaactcaccatagg

SEQ ID NO: 351920 - DNA, 15 bp, Homo sapiens
actaactcaccatag

SEQ ID NO: 351921 - DNA, 15 bp, Homo sapiens
gactaactcaccata

SEQ ID NO: 351922 - DNA, 15 bp, Homo sapiens
agactaactcaccat

SEQ ID NO: 351923 - DNA, 15 bp, Homo sapiens
aagactaactcacca

SEQ ID NO: 351924 - DNA, 15 bp, Homo sapiens
aaagactaactcacc

SEQ ID NO: 351925 - DNA, 15 bp, Homo sapiens
aaaagactaactcac

SEQ ID NO: 351926 - DNA, 15 bp, Homo sapiens
taaaagactaactca

SEQ ID NO: 351927 - DNA, 15 bp, Homo sapiens
ttaaaagactaactc

SEQ ID NO: 351928 - DNA, 15 bp, Homo sapiens
tttaaaagactaact

SEQ ID NO: 351929 - DNA, 15 bp, Homo sapiens
ttttaaaagactaac

SEQ ID NO: 351930 - DNA, 15 bp, Homo sapiens
cttttaaaagactaa

SEQ ID NO: 351931 - DNA, 15 bp, Homo sapiens
gcttttaaaagacta

SEQ ID NO: 351932 - DNA, 15 bp, Homo sapiens
agcttttaaaagact

SEQ ID NO: 351933 - DNA, 15 bp, Homo sapiens
gagcttttaaaagac

SEQ ID NO: 351934 - DNA, 15 bp, Homo sapiens
ggagcttttaaaaga

SEQ ID NO: 351935 - DNA, 15 bp, Homo sapiens
aggagcttttaaaag

SEQ ID NO: 351936 - DNA, 15 bp, Homo sapiens
aaggagcttttaaaa

SEQ ID NO: 351937 - DNA, 15 bp, Homo sapiens
taaggagcttttaaa

SEQ ID NO: 351938 - DNA, 15 bp, Homo sapiens
ataaggagcttttaa

SEQ ID NO: 351939 - DNA, 15 bp, Homo sapiens
tataaggagctttta

SEQ ID NO: 351940 - DNA, 15 bp, Homo sapiens
ttataaggagctttt

SEQ ID NO: 351941 - DNA, 15 bp, Homo sapiens
attataaggagcttt

SEQ ID NO: 351942 - DNA, 15 bp, Homo sapiens
gattataaggagctt

SEQ ID NO: 351943 - DNA, 15 bp, Homo sapiens
tgattataaggagct

SEQ ID NO: 351944 - DNA, 15 bp, Homo sapiens
atgattataaggagc

SEQ ID NO: 351945 - DNA, 15 bp, Homo sapiens
aatgattataaggag

SEQ ID NO: 351946 - DNA, 15 bp, Homo sapiens
caatgattataagga

SEQ ID NO: 351947 - DNA, 15 bp, Homo sapiens
gcaatgattataagg

SEQ ID NO: 351948 - DNA, 15 bp, Homo sapiens
agcaatgattataag

SEQ ID NO: 351949 - DNA, 15 bp, Homo sapiens
aagcaatgattataa

SEQ ID NO: 351950 - DNA, 15 bp, Homo sapiens
aaagcaatgattata

SEQ ID NO: 351951 - DNA, 15 bp, Homo sapiens
caaagcaatgattat

SEQ ID NO: 351952 - DNA, 15 bp, Homo sapiens
tcaaagcaatgatta

SEQ ID NO: 351953 - DNA, 15 bp, Homo sapiens
atcaaagcaatgatt

SEQ ID NO: 351954 - DNA, 15 bp, Homo sapiens
aatcaaagcaatgat

SEQ ID NO: 351955 - DNA, 15 bp, Homo sapiens
gaatcaaagcaatga

SEQ ID NO: 351956 - DNA, 15 bp, Homo sapiens
agaatcaaagcaatg

SEQ ID NO: 351957 - DNA, 15 bp, Homo sapiens
gagaatcaaagcaat

SEQ ID NO: 351958 - DNA, 15 bp, Homo sapiens
tgagaatcaaagcaa

SEQ ID NO: 351959 - DNA, 15 bp, Homo sapiens
gtgagaatcaaagca

SEQ ID NO: 351960 - DNA, 15 bp, Homo sapiens
ggtgagaatcaaagc

SEQ ID NO: 351961 - DNA, 15 bp, Homo sapiens
gggtgagaatcaaag

SEQ ID NO: 351962 - DNA, 15 bp, Homo sapiens
agggtgagaatcaaa

SEQ ID NO: 351963 - DNA, 15 bp, Homo sapiens
tagggtgagaatcaa

SEQ ID NO: 351964 - DNA, 15 bp, Homo sapiens
ttagggtgagaatca

SEQ ID NO: 351965 - DNA, 15 bp, Homo sapiens
gttagggtgagaatc

SEQ ID NO: 351966 - DNA, 15 bp, Homo sapiens
ggttagggtgagaat

SEQ ID NO: 351967 - DNA, 15 bp, Homo sapiens
gggttagggtgagaa

SEQ ID NO: 351968 - DNA, 15 bp, Homo sapiens
ggggttagggtgaga

SEQ ID NO: 351969 - DNA, 15 bp, Homo sapiens
tggggttagggtgag

SEQ ID NO: 351970 - DNA, 15 bp, Homo sapiens
atggggttagggtga

SEQ ID NO: 351971 - DNA, 15 bp, Homo sapiens
catggggttagggtg

SEQ ID NO: 351972 - DNA, 15 bp, Homo sapiens
acatggggttagggt

SEQ ID NO: 351973 - DNA, 15 bp, Homo sapiens
tacatggggttaggg

SEQ ID NO: 351974 - DNA, 15 bp, Homo sapiens
ttacatggggttagg

SEQ ID NO: 351975 - DNA, 15 bp, Homo sapiens
attacatggggttag

SEQ ID NO: 351976 - DNA, 15 bp, Homo sapiens
aattacatggggtta

SEQ ID NO: 351977 - DNA, 15 bp, Homo sapiens
caattacatggggtt

SEQ ID NO: 351978 - DNA, 15 bp, Homo sapiens
ccaattacatggggt

SEQ ID NO: 351979 - DNA, 15 bp, Homo sapiens
gccaattacatgggg

SEQ ID NO: 351980 - DNA, 15 bp, Homo sapiens
tgccaattacatggg

SEQ ID NO: 351981 - DNA, 15 bp, Homo sapiens
ctgccaattacatgg

SEQ ID NO: 351982 - DNA, 15 bp, Homo sapiens
cctgccaattacatg

SEQ ID NO: 351983 - DNA, 15 bp, Homo sapiens
ccctgccaattacat

SEQ ID NO: 351984 - DNA, 15 bp, Homo sapiens
cccctgccaattaca

SEQ ID NO: 351985 - DNA, 15 bp, Homo sapiens
acccctgccaattac

SEQ ID NO: 351986 - DNA, 15 bp, Homo sapiens
cacccctgccaatta

SEQ ID NO: 351987 - DNA, 15 bp, Homo sapiens
acacccctgccaatt

SEQ ID NO: 351988 - DNA, 15 bp, Homo sapiens
aacacccctgccaat

SEQ ID NO: 351989 - DNA, 15 bp, Homo sapiens
taacacccctgccaa

SEQ ID NO: 351990 - DNA, 15 bp, Homo sapiens
ataacacccctgcca

SEQ ID NO: 351991 - DNA, 15 bp, Homo sapiens
aataacacccctgcc

SEQ ID NO: 351992 - DNA, 15 bp, Homo sapiens
taataacacccctgc

SEQ ID NO: 351993 - DNA, 15 bp, Homo sapiens
ttaataacacccctg

SEQ ID NO: 351994 - DNA, 15 bp, Homo sapiens
attaataacacccct

SEQ ID NO: 351995 - DNA, 15 bp, Homo sapiens
gattaataacacccc

SEQ ID NO: 351996 - DNA, 15 bp, Homo sapiens
ggattaataacaccc

SEQ ID NO: 351997 - DNA, 15 bp, Homo sapiens
gggattaataacacc

SEQ ID NO: 351998 - DNA, 15 bp, Homo sapiens
tgggattaataacac

SEQ ID NO: 351999 - DNA, 15 bp, Homo sapiens
atgggattaataaca

SEQ ID NO: 352000 - DNA, 15 bp, Homo sapiens
aatgggattaataac

SEQ ID NO: 352001 - DNA, 15 bp, Homo sapiens
aaatgggattaataa

SEQ ID NO: 352002 - DNA, 15 bp, Homo sapiens
aaaatgggattaata

SEQ ID NO: 352003 - DNA, 15 bp, Homo sapiens
taaaatgggattaat

SEQ ID NO: 352004 - DNA, 15 bp, Homo sapiens
gtaaaatgggattaa

SEQ ID NO: 352005 - DNA, 15 bp, Homo sapiens
tgtaaaatgggatta

SEQ ID NO: 352006 - DNA, 15 bp, Homo sapiens
ttgtaaaatgggatt

SEQ ID NO: 352007 - DNA, 15 bp, Homo sapiens
tttttgtaaaatggg

SEQ ID NO: 352008 - DNA, 15 bp, Homo sapiens
ctttttgtaaaatgg

SEQ ID NO: 352009 - DNA, 15 bp, Homo sapiens
tctttttgtaaaatg

SEQ ID NO: 352010 - DNA, 15 bp, Homo sapiens
ctctttttgtaaaat

SEQ ID NO: 352011 - DNA, 15 bp, Homo sapiens
cctctttttgtaaaa

SEQ ID NO: 352012 - DNA, 15 bp, Homo sapiens
tcctctttttgtaaa

SEQ ID NO: 352013 - DNA, 15 bp, Homo sapiens
ttcctctttttgtaa

SEQ ID NO: 352014 - DNA, 15 bp, Homo sapiens
tttcctctttttgta

SEQ ID NO: 352015 - DNA, 15 bp, Homo sapiens
gtttcctctttttgt

SEQ ID NO: 352016 - DNA, 15 bp, Homo sapiens
agtttcctctttttg

SEQ ID NO: 352017 - DNA, 15 bp, Homo sapiens
tagtttcctcttttt

SEQ ID NO: 352018 - DNA, 15 bp, Homo sapiens
ttagtttcctctttt

SEQ ID NO: 352019 - DNA, 15 bp, Homo sapiens
cttagtttcctcttt

SEQ ID NO: 352020 - DNA, 15 bp, Homo sapiens
gcttagtttcctctt

SEQ ID NO: 352021 - DNA, 15 bp, Homo sapiens
agcttagtttcctct

SEQ ID NO: 352022 - DNA, 15 bp, Homo sapiens
aagcttagtttcctc

SEQ ID NO: 352023 - DNA, 15 bp, Homo sapiens
gaagcttagtttcct

SEQ ID NO: 352024 - DNA, 15 bp, Homo sapiens
ggaagcttagtttcc

SEQ ID NO: 352025 - DNA, 15 bp, Homo sapiens
tggaagcttagtttc

SEQ ID NO: 352026 - DNA, 15 bp, Homo sapiens
ttggaagcttagttt

SEQ ID NO: 352027 - DNA, 15 bp, Homo sapiens
cttggaagcttagtt

SEQ ID NO: 352028 - DNA, 15 bp, Homo sapiens
acttggaagcttagt

SEQ ID NO: 352029 - DNA, 15 bp, Homo sapiens
aacttggaagcttag

SEQ ID NO: 352030 - DNA, 15 bp, Homo sapiens
aaacttggaagctta

SEQ ID NO: 352031 - DNA, 15 bp, Homo sapiens
caaacttggaagctt

SEQ ID NO: 352032 - DNA, 15 bp, Homo sapiens
tcaaacttggaagct

SEQ ID NO: 352033 - DNA, 15 bp, Homo sapiens
ctcaaacttggaagc

SEQ ID NO: 352034 - DNA, 15 bp, Homo sapiens
tctcaaacttggaag

SEQ ID NO: 352035 - DNA, 15 bp, Homo sapiens
ctctcaaacttggaa

SEQ ID NO: 352036 - DNA, 15 bp, Homo sapiens
cctctcaaacttgga

SEQ ID NO: 352037 - DNA, 15 bp, Homo sapiens
tcctctcaaacttgg

SEQ ID NO: 352038 - DNA, 15 bp, Homo sapiens
atcctctcaaacttg

SEQ ID NO: 352039 - DNA, 15 bp, Homo sapiens
catcctctcaaactt

SEQ ID NO: 352040 - DNA, 15 bp, Homo sapiens
tcatcctctcaaact

SEQ ID NO: 352041 - DNA, 15 bp, Homo sapiens
ctcatcctctcaaac

SEQ ID NO: 352042 - DNA, 15 bp, Homo sapiens
tctcatcctctcaaa

SEQ ID NO: 352043 - DNA, 15 bp, Homo sapiens
atctcatcctctcaa

SEQ ID NO: 352044 - DNA, 15 bp, Homo sapiens
aatctcatcctctca

SEQ ID NO: 352045 - DNA, 15 bp, Homo sapiens
caatctcatcctctc

SEQ ID NO: 352046 - DNA, 15 bp, Homo sapiens
gcaatctcatcctct

SEQ ID NO: 352047 - DNA, 15 bp, Homo sapiens
agcaatctcatcctc

SEQ ID NO: 352048 - DNA, 15 bp, Homo sapiens
cagcaatctcatcct

SEQ ID NO: 352049 - DNA, 15 bp, Homo sapiens
tcagcaatctcatcc

SEQ ID NO: 352050 - DNA, 15 bp, Homo sapiens
gtcagcaatctcatc

SEQ ID NO: 352051 - DNA, 15 bp, Homo sapiens
tgtcagcaatctcat

SEQ ID NO: 352052 - DNA, 15 bp, Homo sapiens
ctgtcagcaatctca

SEQ ID NO: 352053 - DNA, 15 bp, Homo sapiens
actgtcagcaatctc

SEQ ID NO: 352054 - DNA, 15 bp, Homo sapiens
gactgtcagcaatct

SEQ ID NO: 352055 - DNA, 15 bp, Homo sapiens
tgactgtcagcaatc

SEQ ID NO: 352056 - DNA, 15 bp, Homo sapiens
gtgactgtcagcaat

SEQ ID NO: 352057 - DNA, 15 bp, Homo sapiens
tgtgactgtcagcaa

SEQ ID NO: 352058 - DNA, 15 bp, Homo sapiens
gtgtgactgtcagca

SEQ ID NO: 352059 - DNA, 15 bp, Homo sapiens
tgtgtgactgtcagc

SEQ ID NO: 352060 - DNA, 15 bp, Homo sapiens
ctgtgtgactgtcag

SEQ ID NO: 352061 - DNA, 15 bp, Homo sapiens
gctgtgtgactgtca

SEQ ID NO: 352062 - DNA, 15 bp, Homo sapiens
ggctgtgtgactgtc

SEQ ID NO: 352063 - DNA, 15 bp, Homo sapiens
tggctgtgtgactgt

SEQ ID NO: 352064 - DNA, 15 bp, Homo sapiens
ttggctgtgtgactg

SEQ ID NO: 352065 - DNA, 15 bp, Homo sapiens
gttggctgtgtgact

SEQ ID NO: 352066 - DNA, 15 bp, Homo sapiens
tgttggctgtgtgac

SEQ ID NO: 352067 - DNA, 15 bp, Homo sapiens
atgttggctgtgtga

SEQ ID NO: 352068 - DNA, 15 bp, Homo sapiens
tatgttggctgtgtg

SEQ ID NO: 352069 - DNA, 15 bp, Homo sapiens
gtatgttggctgtgt

SEQ ID NO: 352070 - DNA, 15 bp, Homo sapiens
tgtatgttggctgtg

SEQ ID NO: 352071 - DNA, 15 bp, Homo sapiens
ctgtatgttggctgt

SEQ ID NO: 352072 - DNA, 15 bp, Homo sapiens
cctgtatgttggctg

SEQ ID NO: 352073 - DNA, 15 bp, Homo sapiens
ccctgtatgttggct

SEQ ID NO: 352074 - DNA, 15 bp, Homo sapiens
tccctgtatgttggc

SEQ ID NO: 352075 - DNA, 15 bp, Homo sapiens
atccctgtatgttgg

SEQ ID NO: 352076 - DNA, 15 bp, Homo sapiens
aatccctgtatgttg

SEQ ID NO: 352077 - DNA, 15 bp, Homo sapiens
aaatccctgtatgtt

SEQ ID NO: 352078 - DNA, 15 bp, Homo sapiens
caaatccctgtatgt

SEQ ID NO: 352079 - DNA, 15 bp, Homo sapiens
ccaaatccctgtatg

SEQ ID NO: 352080 - DNA, 15 bp, Homo sapiens
cccaaatccctgtat

SEQ ID NO: 352081 - DNA, 15 bp, Homo sapiens
gcccaaatccctgta

SEQ ID NO: 352082 - DNA, 15 bp, Homo sapiens
tgcccaaatccctgt

SEQ ID NO: 352083 - DNA, 15 bp, Homo sapiens
gtgcccaaatccctg

SEQ ID NO: 352084 - DNA, 15 bp, Homo sapiens
tgtgcccaaatccct

SEQ ID NO: 352085 - DNA, 15 bp, Homo sapiens
gtgtgcccaaatccc

SEQ ID NO: 352086 - DNA, 15 bp, Homo sapiens
ggtgtgcccaaatcc

SEQ ID NO: 352087 - DNA, 15 bp, Homo sapiens
aggtgtgcccaaatc

SEQ ID NO: 352088 - DNA, 15 bp, Homo sapiens
caggtgtgcccaaat

SEQ ID NO: 352089 - DNA, 15 bp, Homo sapiens
tcaggtgtgcccaaa

SEQ ID NO: 352090 - DNA, 15 bp, Homo sapiens
ttcaggtgtgcccaa

SEQ ID NO: 352091 - DNA, 15 bp, Homo sapiens
cttcaggtgtgccca

SEQ ID NO: 352092 - DNA, 15 bp, Homo sapiens
ccttcaggtgtgccc

SEQ ID NO: 352093 - DNA, 15 bp, Homo sapiens
gccttcaggtgtgcc

SEQ ID NO: 352094 - DNA, 15 bp, Homo sapiens
ggccttcaggtgtgc

SEQ ID NO: 352095 - DNA, 15 bp, Homo sapiens
aggccttcaggtgtg

SEQ ID NO: 352096 - DNA, 15 bp, Homo sapiens
gaggccttcaggtgt

SEQ ID NO: 352097 - DNA, 15 bp, Homo sapiens
agaggccttcaggtg

SEQ ID NO: 352098 - DNA, 15 bp, Homo sapiens
tagaggccttcaggt

SEQ ID NO: 352099 - DNA, 15 bp, Homo sapiens
atagaggccttcagg

SEQ ID NO: 352100 - DNA, 15 bp, Homo sapiens
aatagaggccttcag

SEQ ID NO: 352101 - DNA, 15 bp, Homo sapiens
caatagaggccttca

SEQ ID NO: 352102 - DNA, 15 bp, Homo sapiens
tcaatagaggccttc

SEQ ID NO: 352103 - DNA, 15 bp, Homo sapiens
atcaatagaggcctt

SEQ ID NO: 352104 - DNA, 15 bp, Homo sapiens
aatcaatagaggcct

SEQ ID NO: 352105 - DNA, 15 bp, Homo sapiens
gaatcaatagaggcc

SEQ ID NO: 352106 - DNA, 15 bp, Homo sapiens
agaatcaatagaggc

SEQ ID NO: 352107 - DNA, 15 bp, Homo sapiens
gagaatcaatagagg

SEQ ID NO: 352108 - DNA, 15 bp, Homo sapiens
agagaatcaatagag

SEQ ID NO: 352109 - DNA, 15 bp, Homo sapiens
cagagaatcaataga

SEQ ID NO: 352110 - DNA, 15 bp, Homo sapiens
ccagagaatcaatag

SEQ ID NO: 352111 - DNA, 15 bp, Homo sapiens
cccagagaatcaata

SEQ ID NO: 352112 - DNA, 15 bp, Homo sapiens
acccagagaatcaat

SEQ ID NO: 352113 - DNA, 15 bp, Homo sapiens
cacccagagaatcaa

SEQ ID NO: 352114 - DNA, 15 bp, Homo sapiens
gcacccagagaatca

SEQ ID NO: 352115 - DNA, 15 bp, Homo sapiens
agcacccagagaatc

SEQ ID NO: 352116 - DNA, 15 bp, Homo sapiens
gagcacccagagaat

SEQ ID NO: 352117 - DNA, 15 bp, Homo sapiens
agagcacccagagaa

SEQ ID NO: 352118 - DNA, 15 bp, Homo sapiens
tagagcacccagaga

SEQ ID NO: 352119 - DNA, 15 bp, Homo sapiens
ttagagcacccagag

SEQ ID NO: 352120 - DNA, 15 bp, Homo sapiens
gttagagcacccaga

SEQ ID NO: 352121 - DNA, 15 bp, Homo sapiens
tgttagagcacccag

SEQ ID NO: 352122 - DNA, 15 bp, Homo sapiens
atgttagagcaccca

SEQ ID NO: 352123 - DNA, 15 bp, Homo sapiens
aatgttagagcaccc

SEQ ID NO: 352124 - DNA, 15 bp, Homo sapiens
aaatgttagagcacc

SEQ ID NO: 352125 - DNA, 15 bp, Homo sapiens
aaaatgttagagcac

SEQ ID NO: 352126 - DNA, 15 bp, Homo sapiens
aaaaatgttagagca

SEQ ID NO: 352127 - DNA, 15 bp, Homo sapiens
aaaaaatgttagagc

SEQ ID NO: 352128 - DNA, 15 bp, Homo sapiens
aaaaaaatgttagag

SEQ ID NO: 352129 - DNA, 15 bp, Homo sapiens
caaaaaaatgttaga

SEQ ID NO: 352130 - DNA, 15 bp, Homo sapiens
gcaaaaaaatgttag

SEQ ID NO: 352131 - DNA, 15 bp, Homo sapiens
tgcaaaaaaatgtta

SEQ ID NO: 352132 - DNA, 15 bp, Homo sapiens
ctgcaaaaaaatgtt

SEQ ID NO: 352133 - DNA, 15 bp, Homo sapiens
tctgcaaaaaaatgt

SEQ ID NO: 352134 - DNA, 15 bp, Homo sapiens
ttctgcaaaaaaatg

SEQ ID NO: 352135 - DNA, 15 bp, Homo sapiens
cttctgcaaaaaaat

SEQ ID NO: 352136 - DNA, 15 bp, Homo sapiens
ccttctgcaaaaaaa

SEQ ID NO: 352137 - DNA, 15 bp, Homo sapiens
cccttctgcaaaaaa

SEQ ID NO: 352138 - DNA, 15 bp, Homo sapiens
tcccttctgcaaaaa

SEQ ID NO: 352139 - DNA, 15 bp, Homo sapiens
ttcccttctgcaaaa

SEQ ID NO: 352140 - DNA, 15 bp, Homo sapiens
tttcccttctgcaaa

SEQ ID NO: 352141 - DNA, 15 bp, Homo sapiens
ctttcccttctgcaa

SEQ ID NO: 352142 - DNA, 15 bp, Homo sapiens
cctttcccttctgca

SEQ ID NO: 352143 - DNA, 15 bp, Homo sapiens
gcctttcccttctgc

SEQ ID NO: 352144 - DNA, 15 bp, Homo sapiens
tgcctttcccttctg

SEQ ID NO: 352145 - DNA, 15 bp, Homo sapiens
ttgcctttcccttct

SEQ ID NO: 352146 - DNA, 15 bp, Homo sapiens
attgcctttcccttc

SEQ ID NO: 352147 - DNA, 15 bp, Homo sapiens
cattgcctttccctt

SEQ ID NO: 352148 - DNA, 15 bp, Homo sapiens
acattgcctttccct

SEQ ID NO: 352149 - DNA, 15 bp, Homo sapiens
cacattgcctttccc

SEQ ID NO: 352150 - DNA, 15 bp, Homo sapiens
ccacattgcctttcc

SEQ ID NO: 352151 - DNA, 15 bp, Homo sapiens
cccacattgcctttc

SEQ ID NO: 352152 - DNA, 15 bp, Homo sapiens
gcccacattgccttt

SEQ ID NO: 352153 - DNA, 15 bp, Homo sapiens
tgcccacattgcctt

SEQ ID NO: 352154 - DNA, 15 bp, Homo sapiens
ctgcccacattgcct

SEQ ID NO: 352155 - DNA, 15 bp, Homo sapiens
actgcccacattgcc

SEQ ID NO: 352156 - DNA, 15 bp, Homo sapiens
gactgcccacattgc

SEQ ID NO: 352157 - DNA, 15 bp, Homo sapiens
agactgcccacattg

SEQ ID NO: 352158 - DNA, 15 bp, Homo sapiens
aagactgcccacatt

SEQ ID NO: 352159 - DNA, 15 bp, Homo sapiens
caagactgcccacat

SEQ ID NO: 352160 - DNA, 15 bp, Homo sapiens
ccaagactgcccaca

SEQ ID NO: 352161 - DNA, 15 bp, Homo sapiens
cccaagactgcccac

SEQ ID NO: 352162 - DNA, 15 bp, Homo sapiens
acccaagactgccca

SEQ ID NO: 352163 - DNA, 15 bp, Homo sapiens
gacccaagactgccc

SEQ ID NO: 352164 - DNA, 15 bp, Homo sapiens
agacccaagactgcc

SEQ ID NO: 352165 - DNA, 15 bp, Homo sapiens
cagacccaagactgc

SEQ ID NO: 352166 - DNA, 15 bp, Homo sapiens
tcagacccaagactg

SEQ ID NO: 352167 - DNA, 15 bp, Homo sapiens
atcagacccaagact

SEQ ID NO: 352168 - DNA, 15 bp, Homo sapiens
catcagacccaagac

SEQ ID NO: 352169 - DNA, 15 bp, Homo sapiens
tcatcagacccaaga

SEQ ID NO: 352170 - DNA, 15 bp, Homo sapiens
ctcatcagacccaag

SEQ ID NO: 352171 - DNA, 15 bp, Homo sapiens
actcatcagacccaa

SEQ ID NO: 352172 - DNA, 15 bp, Homo sapiens
tactcatcagaccca

SEQ ID NO: 352173 - DNA, 15 bp, Homo sapiens
ttactcatcagaccc

SEQ ID NO: 352174 - DNA, 15 bp, Homo sapiens
cttactcatcagacc

SEQ ID NO: 352175 - DNA, 15 bp, Homo sapiens
tcttactcatcagac

SEQ ID NO: 352176 - DNA, 15 bp, Homo sapiens
ttcttactcatcaga

SEQ ID NO: 352177 - DNA, 15 bp, Homo sapiens
gttcttactcatcag

SEQ ID NO: 352178 - DNA, 15 bp, Homo sapiens
tgttcttactcatca

SEQ ID NO: 352179 - DNA, 15 bp, Homo sapiens
ttgttcttactcatc

SEQ ID NO: 352180 - DNA, 15 bp, Homo sapiens
attgttcttactcat

SEQ ID NO: 352181 - DNA, 15 bp, Homo sapiens
aattgttcttactca

SEQ ID NO: 352182 - DNA, 15 bp, Homo sapiens
taattgttcttactc

SEQ ID NO: 352183 - DNA, 15 bp, Homo sapiens
ataattgttcttact

SEQ ID NO: 352184 - DNA, 15 bp, Homo sapiens
cataattgttcttac

SEQ ID NO: 352185 - DNA, 15 bp, Homo sapiens
tcataattgttctta

SEQ ID NO: 352186 - DNA, 15 bp, Homo sapiens
ttcataattgttctt

SEQ ID NO: 352187 - DNA, 15 bp, Homo sapiens
tttcataattgttct

SEQ ID NO: 352188 - DNA, 15 bp, Homo sapiens
ctttcataattgttc

SEQ ID NO: 352189 - DNA, 15 bp, Homo sapiens
tctttcataattgtt

SEQ ID NO: 352190 - DNA, 15 bp, Homo sapiens
ctctttcataattgt

SEQ ID NO: 352191 - DNA, 15 bp, Homo sapiens
actctttcataattg

SEQ ID NO: 352192 - DNA, 15 bp, Homo sapiens
tactctttcataatt

SEQ ID NO: 352193 - DNA, 15 bp, Homo sapiens
gtactctttcataat

SEQ ID NO: 352194 - DNA, 15 bp, Homo sapiens
ggtactctttcataa

SEQ ID NO: 352195 - DNA, 15 bp, Homo sapiens
gggtactctttcata

SEQ ID NO: 352196 - DNA, 15 bp, Homo sapiens
ggggtactctttcat

SEQ ID NO: 352197 - DNA, 15 bp, Homo sapiens
tggggtactctttca

SEQ ID NO: 352198 - DNA, 15 bp, Homo sapiens
atggggtactctttc

SEQ ID NO: 352199 - DNA, 15 bp, Homo sapiens
tatggggtactcttt

SEQ ID NO: 352200 - DNA, 15 bp, Homo sapiens
ttatggggtactctt

SEQ ID NO: 352201 - DNA, 15 bp, Homo sapiens
tttatggggtactct

SEQ ID NO: 352202 - DNA, 15 bp, Homo sapiens
ttttatggggtactc

SEQ ID NO: 352203 - DNA, 15 bp, Homo sapiens
attttatggggtact

SEQ ID NO: 352204 - DNA, 15 bp, Homo sapiens
gattttatggggtac

SEQ ID NO: 352205 - DNA, 15 bp, Homo sapiens
ggattttatggggta

SEQ ID NO: 352206 - DNA, 15 bp, Homo sapiens
aggattttatggggt

SEQ ID NO: 352207 - DNA, 15 bp, Homo sapiens
aaggattttatgggg

SEQ ID NO: 352208 - DNA, 15 bp, Homo sapiens
caaggattttatggg

SEQ ID NO: 352209 - DNA, 15 bp, Homo sapiens
acaaggattttatgg

SEQ ID NO: 352210 - DNA, 15 bp, Homo sapiens
aacaaggattttatg

SEQ ID NO: 352211 - DNA, 15 bp, Homo sapiens
gaacaaggattttat

SEQ ID NO: 352212 - DNA, 15 bp, Homo sapiens
tgaacaaggatttta

SEQ ID NO: 352213 - DNA, 15 bp, Homo sapiens
gtgaacaaggatttt

SEQ ID NO: 352214 - DNA, 15 bp, Homo sapiens
tgtgaacaaggattt

SEQ ID NO: 352215 - DNA, 15 bp, Homo sapiens
ttgtgaacaaggatt

SEQ ID NO: 352216 - DNA, 15 bp, Homo sapiens
cttgtgaacaaggat

SEQ ID NO: 352217 - DNA, 15 bp, Homo sapiens
gcttgtgaacaagga

SEQ ID NO: 352218 - DNA, 15 bp, Homo sapiens
tgcttgtgaacaagg

SEQ ID NO: 352219 - DNA, 15 bp, Homo sapiens
ctgcttgtgaacaag

SEQ ID NO: 352220 - DNA, 15 bp, Homo sapiens
tctgcttgtgaacaa

SEQ ID NO: 352221 - DNA, 15 bp, Homo sapiens
ttctgcttgtgaaca

SEQ ID NO: 352222 - DNA, 15 bp, Homo sapiens
cttctgcttgtgaac

SEQ ID NO: 352223 - DNA, 15 bp, Homo sapiens
gcttctgcttgtgaa

SEQ ID NO: 352224 - DNA, 15 bp, Homo sapiens
ggcttctgcttgtga

SEQ ID NO: 352225 - DNA, 15 bp, Homo sapiens
tggcttctgcttgtg

SEQ ID NO: 352226 - DNA, 15 bp, Homo sapiens
ctggcttctgcttgt

SEQ ID NO: 352227 - DNA, 15 bp, Homo sapiens
tctggcttctgcttg

SEQ ID NO: 352228 - DNA, 15 bp, Homo sapiens
gtctggcttctgctt

SEQ ID NO: 352229 - DNA, 15 bp, Homo sapiens
tgtctggcttctgct

SEQ ID NO: 352230 - DNA, 15 bp, Homo sapiens
ctgtctggcttctgc

SEQ ID NO: 352231 - DNA, 15 bp, Homo sapiens
tctgtctggcttctg

SEQ ID NO: 352232 - DNA, 15 bp, Homo sapiens
ttctgtctggcttct

SEQ ID NO: 352233 - DNA, 15 bp, Homo sapiens
cttctgtctggcttc

SEQ ID NO: 352234 - DNA, 15 bp, Homo sapiens
tcttctgtctggctt

SEQ ID NO: 352235 - DNA, 15 bp, Homo sapiens
ctcttctgtctggct

SEQ ID NO: 352236 - DNA, 15 bp, Homo sapiens
gctcttctgtctggc

SEQ ID NO: 352237 - DNA, 15 bp, Homo sapiens
tgctcttctgtctgg

SEQ ID NO: 352238 - DNA, 15 bp, Homo sapiens
gtgctcttctgtctg

SEQ ID NO: 352239 - DNA, 15 bp, Homo sapiens
ggtgctcttctgtct

SEQ ID NO: 352240 - DNA, 15 bp, Homo sapiens
tggtgctcttctgtc

SEQ ID NO: 352241 - DNA, 15 bp, Homo sapiens
atggtgctcttctgt

SEQ ID NO: 352242 - DNA, 15 bp, Homo sapiens
aatggtgctcttctg

SEQ ID NO: 352243 - DNA, 15 bp, Homo sapiens
gaatggtgctcttct

SEQ ID NO: 352244 - DNA, 15 bp, Homo sapiens
ggaatggtgctcttc

SEQ ID NO: 352245 - DNA, 15 bp, Homo sapiens
aggaatggtgctctt

SEQ ID NO: 352246 - DNA, 15 bp, Homo sapiens
taggaatggtgctct

SEQ ID NO: 352247 - DNA, 15 bp, Homo sapiens
ttaggaatggtgctc

SEQ ID NO: 352248 - DNA, 15 bp, Homo sapiens
tttaggaatggtgct

SEQ ID NO: 352249 - DNA, 15 bp, Homo sapiens
ctttaggaatggtgc

SEQ ID NO: 352250 - DNA, 15 bp, Homo sapiens
actttaggaatggtg

SEQ ID NO: 352251 - DNA, 15 bp, Homo sapiens
tactttaggaatggt

SEQ ID NO: 352252 - DNA, 15 bp, Homo sapiens
atactttaggaatgg

SEQ ID NO: 352253 - DNA, 15 bp, Homo sapiens
catactttaggaatg

SEQ ID NO: 352254 - DNA, 15 bp, Homo sapiens
gcatactttaggaat

SEQ ID NO: 352255 - DNA, 15 bp, Homo sapiens
ggcatactttaggaa

SEQ ID NO: 352256 - DNA, 15 bp, Homo sapiens
tggcatactttagga

SEQ ID NO: 352257 - DNA, 15 bp, Homo sapiens
gtggcatactttagg

SEQ ID NO: 352258 - DNA, 15 bp, Homo sapiens
agtggcatactttag

SEQ ID NO: 352259 - DNA, 15 bp, Homo sapiens
cagtggcatacttta

SEQ ID NO: 352260 - DNA, 15 bp, Homo sapiens
tcagtggcatacttt

SEQ ID NO: 352261 - DNA, 15 bp, Homo sapiens
ttcagtggcatactt

SEQ ID NO: 352262 - DNA, 15 bp, Homo sapiens
cttcagtggcatact

SEQ ID NO: 352263 - DNA, 15 bp, Homo sapiens
ccttcagtggcatac

SEQ ID NO: 352264 - DNA, 15 bp, Homo sapiens
tccttcagtggcata

SEQ ID NO: 352265 - DNA, 15 bp, Homo sapiens
ttccttcagtggcat

SEQ ID NO: 352266 - DNA, 15 bp, Homo sapiens
cttccttcagtggca

SEQ ID NO: 352267 - DNA, 15 bp, Homo sapiens
ccttccttcagtggc

SEQ ID NO: 352268 - DNA, 15 bp, Homo sapiens
tccttccttcagtgg

SEQ ID NO: 352269 - DNA, 15 bp, Homo sapiens
gtccttccttcagtg

SEQ ID NO: 352270 - DNA, 15 bp, Homo sapiens
ggtccttccttcagt

SEQ ID NO: 352271 - DNA, 15 bp, Homo sapiens
aggtccttccttcag

SEQ ID NO: 352272 - DNA, 15 bp, Homo sapiens
aaggtccttccttca

SEQ ID NO: 352273 - DNA, 15 bp, Homo sapiens
aaaggtccttccttc

SEQ ID NO: 352274 - DNA, 15 bp, Homo sapiens
aaaaggtccttcctt

SEQ ID NO: 352275 - DNA, 15 bp, Homo sapiens
aaaaaggtccttcct

SEQ ID NO: 352276 - DNA, 15 bp, Homo sapiens
gaaaaaggtccttcc

SEQ ID NO: 352277 - DNA, 15 bp, Homo sapiens
tgaaaaaggtccttc

SEQ ID NO: 352278 - DNA, 15 bp, Homo sapiens
atgaaaaaggtcctt

SEQ ID NO: 352279 - DNA, 15 bp, Homo sapiens
aatgaaaaaggtcct

SEQ ID NO: 352280 - DNA, 15 bp, Homo sapiens
caatgaaaaaggtcc

SEQ ID NO: 352281 - DNA, 15 bp, Homo sapiens
acaatgaaaaaggtc

SEQ ID NO: 352282 - DNA, 15 bp, Homo sapiens
tacaatgaaaaaggt

SEQ ID NO: 352283 - DNA, 15 bp, Homo sapiens
gtacaatgaaaaagg

SEQ ID NO: 352284 - DNA, 15 bp, Homo sapiens
agtacaatgaaaaag

SEQ ID NO: 352285 - DNA, 15 bp, Homo sapiens
gagtacaatgaaaaa

SEQ ID NO: 352286 - DNA, 15 bp, Homo sapiens
ggagtacaatgaaaa

SEQ ID NO: 352287 - DNA, 15 bp, Homo sapiens
aggagtacaatgaaa

SEQ ID NO: 352288 - DNA, 15 bp, Homo sapiens
taggagtacaatgaa

SEQ ID NO: 352289 - DNA, 15 bp, Homo sapiens
ctaggagtacaatga

SEQ ID NO: 352290 - DNA, 15 bp, Homo sapiens
tctaggagtacaatg

SEQ ID NO: 352291 - DNA, 15 bp, Homo sapiens
ctctaggagtacaat

SEQ ID NO: 352292 - DNA, 15 bp, Homo sapiens
actctaggagtacaa

SEQ ID NO: 352293 - DNA, 15 bp, Homo sapiens
cactctaggagtaca

SEQ ID NO: 352294 - DNA, 15 bp, Homo sapiens
ccactctaggagtac

SEQ ID NO: 352295 - DNA, 15 bp, Homo sapiens
cccactctaggagta

SEQ ID NO: 352296 - DNA, 15 bp, Homo sapiens
ccccactctaggagt

SEQ ID NO: 352297 - DNA, 15 bp, Homo sapiens
accccactctaggag

SEQ ID NO: 352298 - DNA, 15 bp, Homo sapiens
taccccactctagga

SEQ ID NO: 352299 - DNA, 15 bp, Homo sapiens
gtaccccactctagg

SEQ ID NO: 352300 - DNA, 15 bp, Homo sapiens
tgtaccccactctag

SEQ ID NO: 352301 - DNA, 15 bp, Homo sapiens
ctgtaccccactcta

SEQ ID NO: 352302 - DNA, 15 bp, Homo sapiens
tctgtaccccactct

SEQ ID NO: 352303 - DNA, 15 bp, Homo sapiens
ttctgtaccccactc

SEQ ID NO: 352304 - DNA, 15 bp, Homo sapiens
tttctgtaccccact

SEQ ID NO: 352305 - DNA, 15 bp, Homo sapiens
ttttctgtaccccac

SEQ ID NO: 352306 - DNA, 15 bp, Homo sapiens
attttctgtacccca

SEQ ID NO: 352307 - DNA, 15 bp, Homo sapiens
cattttctgtacccc

SEQ ID NO: 352308 - DNA, 15 bp, Homo sapiens
acattttctgtaccc

SEQ ID NO: 352309 - DNA, 15 bp, Homo sapiens
tacattttctgtacc

SEQ ID NO: 352310 - DNA, 15 bp, Homo sapiens
ctacattttctgtac

SEQ ID NO: 352311 - DNA, 15 bp, Homo sapiens
tctacattttctgta

SEQ ID NO: 352312 - DNA, 15 bp, Homo sapiens
ttctacattttctgt

SEQ ID NO: 352313 - DNA, 15 bp, Homo sapiens
gttctacattttctg

SEQ ID NO: 352314 - DNA, 15 bp, Homo sapiens
ggttctacattttct

SEQ ID NO: 352315 - DNA, 15 bp, Homo sapiens
tggttctacattttc

SEQ ID NO: 352316 - DNA, 15 bp, Homo sapiens
ctggttctacatttt

SEQ ID NO: 352317 - DNA, 15 bp, Homo sapiens
actggttctacattt

SEQ ID NO: 352318 - DNA, 15 bp, Homo sapiens
gactggttctacatt

SEQ ID NO: 352319 - DNA, 15 bp, Homo sapiens
tgactggttctacat

SEQ ID NO: 352320 - DNA, 15 bp, Homo sapiens
atgactggttctaca

SEQ ID NO: 352321 - DNA, 15 bp, Homo sapiens
gatgactggttctac

SEQ ID NO: 352322 - DNA, 15 bp, Homo sapiens
agatgactggttcta

SEQ ID NO: 352323 - DNA, 15 bp, Homo sapiens
tagatgactggttct

SEQ ID NO: 352324 - DNA, 15 bp, Homo sapiens
atagatgactggttc

SEQ ID NO: 352325 - DNA, 15 bp, Homo sapiens
tatagatgactggtt

SEQ ID NO: 352326 - DNA, 15 bp, Homo sapiens
ttatagatgactggt

SEQ ID NO: 352327 - DNA, 15 bp, Homo sapiens
tttatagatgactgg

SEQ ID NO: 352328 - DNA, 15 bp, Homo sapiens
atttatagatgactg

SEQ ID NO: 352329 - DNA, 15 bp, Homo sapiens
tatttatagatgact

SEQ ID NO: 352330 - DNA, 15 bp, Homo sapiens
atatttatagatgac

SEQ ID NO: 352331 - DNA, 15 bp, Homo sapiens
gatatttatagatga

SEQ ID NO: 352332 - DNA, 15 bp, Homo sapiens
tgatatttatagatg

SEQ ID NO: 352333 - DNA, 15 bp, Homo sapiens
gtgatatttatagat

SEQ ID NO: 352334 - DNA, 15 bp, Homo sapiens
agtgatatttataga

SEQ ID NO: 352335 - DNA, 15 bp, Homo sapiens
gagtgatatttatag

SEQ ID NO: 352336 - DNA, 15 bp, Homo sapiens
agagtgatatttata

SEQ ID NO: 352337 - DNA, 15 bp, Homo sapiens
cagagtgatatttat

SEQ ID NO: 352338 - DNA, 15 bp, Homo sapiens
gcagagtgatattta

SEQ ID NO: 352339 - DNA, 15 bp, Homo sapiens
agcagagtgatattt

SEQ ID NO: 352340 - DNA, 15 bp, Homo sapiens
cagcagagtgatatt

SEQ ID NO: 352341 - DNA, 15 bp, Homo sapiens
ccagcagagtgatat

SEQ ID NO: 352342 - DNA, 15 bp, Homo sapiens
tccagcagagtgata

SEQ ID NO: 352343 - DNA, 15 bp, Homo sapiens
ctccagcagagtgat

SEQ ID NO: 352344 - DNA, 15 bp, Homo sapiens
cctccagcagagtga

SEQ ID NO: 352345 - DNA, 15 bp, Homo sapiens
ccctccagcagagtg

SEQ ID NO: 352346 - DNA, 15 bp, Homo sapiens
accctccagcagagt

SEQ ID NO: 352347 - DNA, 15 bp, Homo sapiens
taccctccagcagag

SEQ ID NO: 352348 - DNA, 15 bp, Homo sapiens
ttaccctccagcaga

SEQ ID NO: 352349 - DNA, 15 bp, Homo sapiens
tttaccctccagcag

SEQ ID NO: 352350 - DNA, 15 bp, Homo sapiens
ctttaccctccagca

SEQ ID NO: 352351 - DNA, 15 bp, Homo sapiens
tctttaccctccagc

SEQ ID NO: 352352 - DNA, 15 bp, Homo sapiens
ttctttaccctccag

SEQ ID NO: 352353 - DNA, 15 bp, Homo sapiens
cttctttaccctcca

SEQ ID NO: 352354 - DNA, 15 bp, Homo sapiens
acttctttaccctcc

SEQ ID NO: 352355 - DNA, 15 bp, Homo sapiens
aacttctttaccctc

SEQ ID NO: 352356 - DNA, 15 bp, Homo sapiens
gaacttctttaccct

SEQ ID NO: 352357 - DNA, 15 bp, Homo sapiens
ggaacttctttaccc

SEQ ID NO: 352358 - DNA, 15 bp, Homo sapiens
aggaacttctttacc

SEQ ID NO: 352359 - DNA, 15 bp, Homo sapiens
gaggaacttctttac

SEQ ID NO: 352360 - DNA, 15 bp, Homo sapiens
tgaggaacttcttta

SEQ ID NO: 352361 - DNA, 15 bp, Homo sapiens
ttgaggaacttcttt

SEQ ID NO: 352362 - DNA, 15 bp, Homo sapiens
gttgaggaacttctt

SEQ ID NO: 352363 - DNA, 15 bp, Homo sapiens
ggttgaggaacttct

SEQ ID NO: 352364 - DNA, 15 bp, Homo sapiens
gggttgaggaacttc

SEQ ID NO: 352365 - DNA, 15 bp, Homo sapiens
tgggttgaggaactt

SEQ ID NO: 352366 - DNA, 15 bp, Homo sapiens
atgggttgaggaact

SEQ ID NO: 352367 - DNA, 15 bp, Homo sapiens
catgggttgaggaac

SEQ ID NO: 352368 - DNA, 15 bp, Homo sapiens
ccatgggttgaggaa

SEQ ID NO: 352369 - DNA, 15 bp, Homo sapiens
cccatgggttgagga

SEQ ID NO: 352370 - DNA, 15 bp, Homo sapiens
ccccatgggttgagg

SEQ ID NO: 352371 - DNA, 15 bp, Homo sapiens
tccccatgggttgag

SEQ ID NO: 352372 - DNA, 15 bp, Homo sapiens
ttccccatgggttga

SEQ ID NO: 352373 - DNA, 15 bp, Homo sapiens
tttccccatgggttg

SEQ ID NO: 352374 - DNA, 15 bp, Homo sapiens
ttttccccatgggtt

SEQ ID NO: 352375 - DNA, 15 bp, Homo sapiens
attttccccatgggt

SEQ ID NO: 352376 - DNA, 15 bp, Homo sapiens
aattttccccatggg

SEQ ID NO: 352377 - DNA, 15 bp, Homo sapiens
gaattttccccatgg

SEQ ID NO: 352378 - DNA, 15 bp, Homo sapiens
ggaattttccccatg

SEQ ID NO: 352379 - DNA, 15 bp, Homo sapiens
gggaattttccccat

SEQ ID NO: 352380 - DNA, 15 bp, Homo sapiens
agggaattttcccca

SEQ ID NO: 352381 - DNA, 15 bp, Homo sapiens
aagggaattttcccc

SEQ ID NO: 352382 - DNA, 15 bp, Homo sapiens
caagggaattttccc

SEQ ID NO: 352383 - DNA, 15 bp, Homo sapiens
ccaagggaattttcc

SEQ ID NO: 352384 - DNA, 15 bp, Homo sapiens
cccaagggaattttc

SEQ ID NO: 352385 - DNA, 15 bp, Homo sapiens
ccccaagggaatttt

SEQ ID NO: 352386 - DNA, 15 bp, Homo sapiens
accccaagggaattt

SEQ ID NO: 352387 - DNA, 15 bp, Homo sapiens
caccccaagggaatt

SEQ ID NO: 352388 - DNA, 15 bp, Homo sapiens
gcaccccaagggaat

SEQ ID NO: 352389 - DNA, 15 bp, Homo sapiens
tgcaccccaagggaa

SEQ ID NO: 352390 - DNA, 15 bp, Homo sapiens
gtgcaccccaaggga

SEQ ID NO: 352391 - DNA, 15 bp, Homo sapiens
agtgcaccccaaggg

SEQ ID NO: 352392 - DNA, 15 bp, Homo sapiens
gagtgcaccccaagg

SEQ ID NO: 352393 - DNA, 15 bp, Homo sapiens
agagtgcaccccaag

SEQ ID NO: 352394 - DNA, 15 bp, Homo sapiens
aagagtgcaccccaa

SEQ ID NO: 352395 - DNA, 15 bp, Homo sapiens
caagagtgcacccca

SEQ ID NO: 352396 - DNA, 15 bp, Homo sapiens
ccaagagtgcacccc

SEQ ID NO: 352397 - DNA, 15 bp, Homo sapiens
accaagagtgcaccc

SEQ ID NO: 352398 - DNA, 15 bp, Homo sapiens
gaccaagagtgcacc

SEQ ID NO: 352399 - DNA, 15 bp, Homo sapiens
agaccaagagtgcac

SEQ ID NO: 352400 - DNA, 15 bp, Homo sapiens
tagaccaagagtgca

SEQ ID NO: 352401 - DNA, 15 bp, Homo sapiens
ctagaccaagagtgc

SEQ ID NO: 352402 - DNA, 15 bp, Homo sapiens
tctagaccaagagtg

SEQ ID NO: 352403 - DNA, 15 bp, Homo sapiens
ctctagaccaagagt

SEQ ID NO: 352404 - DNA, 15 bp, Homo sapiens
tctctagaccaagag

SEQ ID NO: 352405 - DNA, 15 bp, Homo sapiens
ttctctagaccaaga

SEQ ID NO: 352406 - DNA, 15 bp, Homo sapiens
cttctctagaccaag

SEQ ID NO: 352407 - DNA, 15 bp, Homo sapiens
acttctctagaccaa

SEQ ID NO: 352408 - DNA, 15 bp, Homo sapiens
aacttctctagacca

SEQ ID NO: 352409 - DNA, 15 bp, Homo sapiens
aaacttctctagacc

SEQ ID NO: 352410 - DNA, 15 bp, Homo sapiens
gaaacttctctagac

SEQ ID NO: 352411 - DNA, 15 bp, Homo sapiens
agaaacttctctaga

SEQ ID NO: 352412 - DNA, 15 bp, Homo sapiens
cagaaacttctctag

SEQ ID NO: 352413 - DNA, 15 bp, Homo sapiens
gcagaaacttctcta

SEQ ID NO: 352414 - DNA, 15 bp, Homo sapiens
tgcagaaacttctct

SEQ ID NO: 352415 - DNA, 15 bp, Homo sapiens
ctgcagaaacttctc

SEQ ID NO: 352416 - DNA, 15 bp, Homo sapiens
tctgcagaaacttct

SEQ ID NO: 352417 - DNA, 15 bp, Homo sapiens
ttctgcagaaacttc

SEQ ID NO: 352418 - DNA, 15 bp, Homo sapiens
tttctgcagaaactt

SEQ ID NO: 352419 - DNA, 15 bp, Homo sapiens
atttctgcagaaact

SEQ ID NO: 352420 - DNA, 15 bp, Homo sapiens
gatttctgcagaaac

SEQ ID NO: 352421 - DNA, 15 bp, Homo sapiens
ggatttctgcagaaa

SEQ ID NO: 352422 - DNA, 15 bp, Homo sapiens
gggatttctgcagaa

SEQ ID NO: 352423 - DNA, 15 bp, Homo sapiens
ggggatttctgcaga

SEQ ID NO: 352424 - DNA, 15 bp, Homo sapiens
aggggatttctgcag

SEQ ID NO: 352425 - DNA, 15 bp, Homo sapiens
gaggggatttctgca

SEQ ID NO: 352426 - DNA, 15 bp, Homo sapiens
tgaggggatttctgc

SEQ ID NO: 352427 - DNA, 15 bp, Homo sapiens
ctgaggggatttctg

SEQ ID NO: 352428 - DNA, 15 bp, Homo sapiens
cctgaggggatttct

SEQ ID NO: 352429 - DNA, 15 bp, Homo sapiens
ccctgaggggatttc

SEQ ID NO: 352430 - DNA, 15 bp, Homo sapiens
accctgaggggattt

SEQ ID NO: 352431 - DNA, 15 bp, Homo sapiens
caccctgaggggatt

SEQ ID NO: 352432 - DNA, 15 bp, Homo sapiens
ccaccctgaggggat

SEQ ID NO: 352433 - DNA, 15 bp, Homo sapiens
cccaccctgagggga

SEQ ID NO: 352434 - DNA, 15 bp, Homo sapiens
ccccaccctgagggg

SEQ ID NO: 352435 - DNA, 15 bp, Homo sapiens
gccccaccctgaggg

SEQ ID NO: 352436 - DNA, 15 bp, Homo sapiens
tgccccaccctgagg

SEQ ID NO: 352437 - DNA, 15 bp, Homo sapiens
ctgccccaccctgag

SEQ ID NO: 352438 - DNA, 15 bp, Homo sapiens
gctgccccaccctga

SEQ ID NO: 352439 - DNA, 15 bp, Homo sapiens
agctgccccaccctg

SEQ ID NO: 352440 - DNA, 15 bp, Homo sapiens
aagctgccccaccct

SEQ ID NO: 352441 - DNA, 15 bp, Homo sapiens
taagctgccccaccc

SEQ ID NO: 352442 - DNA, 15 bp, Homo sapiens
ctaagctgccccacc

SEQ ID NO: 352443 - DNA, 15 bp, Homo sapiens
cctaagctgccccac

SEQ ID NO: 352444 - DNA, 15 bp, Homo sapiens
tcctaagctgcccca

SEQ ID NO: 352445 - DNA, 15 bp, Homo sapiens
gtcctaagctgcccc

SEQ ID NO: 352446 - DNA, 15 bp, Homo sapiens
ggtcctaagctgccc

SEQ ID NO: 352447 - DNA, 15 bp, Homo sapiens
tggtcctaagctgcc

SEQ ID NO: 352448 - DNA, 15 bp, Homo sapiens
atggtcctaagctgc

SEQ ID NO: 352449 - DNA, 15 bp, Homo sapiens
catggtcctaagctg

SEQ ID NO: 352450 - DNA, 15 bp, Homo sapiens
ccatggtcctaagct

SEQ ID NO: 352451 - DNA, 15 bp, Homo sapiens
cccatggtcctaagc

SEQ ID NO: 352452 - DNA, 15 bp, Homo sapiens
acccatggtcctaag

SEQ ID NO: 352453 - DNA, 15 bp, Homo sapiens
aacccatggtcctaa

SEQ ID NO: 352454 - DNA, 15 bp, Homo sapiens
aaacccatggtccta

SEQ ID NO: 352455 - DNA, 15 bp, Homo sapiens
gaaacccatggtcct

SEQ ID NO: 352456 - DNA, 15 bp, Homo sapiens
ggaaacccatggtcc

SEQ ID NO: 352457 - DNA, 15 bp, Homo sapiens
aggaaacccatggtc

SEQ ID NO: 352458 - DNA, 15 bp, Homo sapiens
gaggaaacccatggt

SEQ ID NO: 352459 - DNA, 15 bp, Homo sapiens
ggaggaaacccatgg

SEQ ID NO: 352460 - DNA, 15 bp, Homo sapiens
gggaggaaacccatg

SEQ ID NO: 352461 - DNA, 15 bp, Homo sapiens
ggggaggaaacccat

SEQ ID NO: 352462 - DNA, 15 bp, Homo sapiens
gggggaggaaaccca

SEQ ID NO: 352463 - DNA, 15 bp, Homo sapiens
agggggaggaaaccc

SEQ ID NO: 352464 - DNA, 15 bp, Homo sapiens
cagggggaggaaacc

SEQ ID NO: 352465 - DNA, 15 bp, Homo sapiens
acagggggaggaaac

SEQ ID NO: 352466 - DNA, 15 bp, Homo sapiens
aacagggggaggaaa

SEQ ID NO: 352467 - DNA, 15 bp, Homo sapiens
aaacagggggaggaa

SEQ ID NO: 352468 - DNA, 15 bp, Homo sapiens
gaaacagggggagga

SEQ ID NO: 352469 - DNA, 15 bp, Homo sapiens
ggaaacagggggagg

SEQ ID NO: 352470 - DNA, 15 bp, Homo sapiens
tggaaacagggggag

SEQ ID NO: 352471 - DNA, 15 bp, Homo sapiens
gtggaaacaggggga

SEQ ID NO: 352472 - DNA, 15 bp, Homo sapiens
agtggaaacaggggg

SEQ ID NO: 352473 - DNA, 15 bp, Homo sapiens
cagtggaaacagggg

SEQ ID NO: 352474 - DNA, 15 bp, Homo sapiens
tcagtggaaacaggg

SEQ ID NO: 352475 - DNA, 15 bp, Homo sapiens
gtcagtggaaacagg

SEQ ID NO: 352476 - DNA, 15 bp, Homo sapiens
agtcagtggaaacag

SEQ ID NO: 352477 - DNA, 15 bp, Homo sapiens
aagtcagtggaaaca

SEQ ID NO: 352478 - DNA, 15 bp, Homo sapiens
taagtcagtggaaac

SEQ ID NO: 352479 - DNA, 15 bp, Homo sapiens
ttaagtcagtggaaa

SEQ ID NO: 352480 - DNA, 15 bp, Homo sapiens
attaagtcagtggaa

SEQ ID NO: 352481 - DNA, 15 bp, Homo sapiens
tattaagtcagtgga

SEQ ID NO: 352482 - DNA, 15 bp, Homo sapiens
gtattaagtcagtgg

SEQ ID NO: 352483 - DNA, 15 bp, Homo sapiens
tgtattaagtcagtg

SEQ ID NO: 352484 - DNA, 15 bp, Homo sapiens
ctgtattaagtcagt

SEQ ID NO: 352485 - DNA, 15 bp, Homo sapiens
gctgtattaagtcag

SEQ ID NO: 352486 - DNA, 15 bp, Homo sapiens
agctgtattaagtca

SEQ ID NO: 352487 - DNA, 15 bp, Homo sapiens
cagctgtattaagtc

SEQ ID NO: 352488 - DNA, 15 bp, Homo sapiens
ccagctgtattaagt

SEQ ID NO: 352489 - DNA, 15 bp, Homo sapiens
accagctgtattaag

SEQ ID NO: 352490 - DNA, 15 bp, Homo sapiens
gaccagctgtattaa

SEQ ID NO: 352491 - DNA, 15 bp, Homo sapiens
ggaccagctgtatta

SEQ ID NO: 352492 - DNA, 15 bp, Homo sapiens
gggaccagctgtatt

SEQ ID NO: 352493 - DNA, 15 bp, Homo sapiens
ggggaccagctgtat

SEQ ID NO: 352494 - DNA, 15 bp, Homo sapiens
aggggaccagctgta

SEQ ID NO: 352495 - DNA, 15 bp, Homo sapiens
aaggggaccagctgt

SEQ ID NO: 352496 - DNA, 15 bp, Homo sapiens
gaaggggaccagctg

SEQ ID NO: 352497 - DNA, 15 bp, Homo sapiens
ggaaggggaccagct

SEQ ID NO: 352498 - DNA, 15 bp, Homo sapiens
gggaaggggaccagc

SEQ ID NO: 352499 - DNA, 15 bp, Homo sapiens
ggggaaggggaccag

SEQ ID NO: 352500 - DNA, 15 bp, Homo sapiens
gggggaaggggacca

SEQ ID NO: 352501 - DNA, 15 bp, Homo sapiens
tgggggaaggggacc

SEQ ID NO: 352502 - DNA, 15 bp, Homo sapiens
ctgggggaaggggac

SEQ ID NO: 352503 - DNA, 15 bp, Homo sapiens
tctgggggaagggga

SEQ ID NO: 352504 - DNA, 15 bp, Homo sapiens
gtctgggggaagggg

SEQ ID NO: 352505 - DNA, 15 bp, Homo sapiens
agtctgggggaaggg

SEQ ID NO: 352506 - DNA, 15 bp, Homo sapiens
gagtctgggggaagg

SEQ ID NO: 352507 - DNA, 15 bp, Homo sapiens
agagtctgggggaag

SEQ ID NO: 352508 - DNA, 15 bp, Homo sapiens
aagagtctgggggaa

SEQ ID NO: 352509 - DNA, 15 bp, Homo sapiens
taagagtctggggga

SEQ ID NO: 352510 - DNA, 15 bp, Homo sapiens
ataagagtctggggg

SEQ ID NO: 352511 - DNA, 15 bp, Homo sapiens
gataagagtctgggg

SEQ ID NO: 352512 - DNA, 15 bp, Homo sapiens
cgataagagtctggg

SEQ ID NO: 352513 - DNA, 15 bp, Homo sapiens
tcgataagagtctgg

SEQ ID NO: 352514 - DNA, 15 bp, Homo sapiens
ctcgataagagtctg

SEQ ID NO: 352515 - DNA, 15 bp, Homo sapiens
tctcgataagagtct

SEQ ID NO: 352516 - DNA, 15 bp, Homo sapiens
atctcgataagagtc

SEQ ID NO: 352517 - DNA, 15 bp, Homo sapiens
catctcgataagagt

SEQ ID NO: 352518 - DNA, 15 bp, Homo sapiens
tcatctcgataagag

SEQ ID NO: 352519 - DNA, 15 bp, Homo sapiens
ctcatctcgataaga

SEQ ID NO: 352520 - DNA, 15 bp, Homo sapiens
actcatctcgataag

SEQ ID NO: 352521 - DNA, 15 bp, Homo sapiens
tactcatctcgataa

SEQ ID NO: 352522 - DNA, 15 bp, Homo sapiens
atactcatctcgata

SEQ ID NO: 352523 - DNA, 15 bp, Homo sapiens
aatactcatctcgat

SEQ ID NO: 352524 - DNA, 15 bp, Homo sapiens
aaatactcatctcga

SEQ ID NO: 352525 - DNA, 15 bp, Homo sapiens
taaatactcatctcg

SEQ ID NO: 352526 - DNA, 15 bp, Homo sapiens
ataaatactcatctc

SEQ ID NO: 352527 - DNA, 15 bp, Homo sapiens
caataaatactcatc

SEQ ID NO: 352528 - DNA, 15 bp, Homo sapiens
tcaataaatactcat

SEQ ID NO: 352529 - DNA, 15 bp, Homo sapiens
atcaataaatactca

SEQ ID NO: 352530 - DNA, 15 bp, Homo sapiens
tatcaataaatactc

SEQ ID NO: 352531 - DNA, 15 bp, Homo sapiens
atatcaataaatact

SEQ ID NO: 352532 - DNA, 15 bp, Homo sapiens
gatatcaataaatac

SEQ ID NO: 352533 - DNA, 15 bp, Homo sapiens
agatatcaataaata

SEQ ID NO: 352534 - DNA, 15 bp, Homo sapiens
gagatatcaataaat

SEQ ID NO: 352535 - DNA, 15 bp, Homo sapiens
tgagatatcaataaa

SEQ ID NO: 352536 - DNA, 15 bp, Homo sapiens
ttgagatatcaataa

SEQ ID NO: 352537 - DNA, 15 bp, Homo sapiens
tttgagatatcaata

SEQ ID NO: 352538 - DNA, 15 bp, Homo sapiens
ttttgagatatcaat

SEQ ID NO: 352539 - DNA, 15 bp, Homo sapiens
gttttgagatatcaa

SEQ ID NO: 352540 - DNA, 15 bp, Homo sapiens
tgttttgagatatca

SEQ ID NO: 352541 - DNA, 15 bp, Homo sapiens
ttgttttgagatatc

SEQ ID NO: 352542 - DNA, 15 bp, Homo sapiens
cttgttttgagatat

SEQ ID NO: 352543 - DNA, 15 bp, Homo sapiens
tcttgttttgagata

SEQ ID NO: 352544 - DNA, 15 bp, Homo sapiens
ctcttgttttgagat

SEQ ID NO: 352545 - DNA, 15 bp, Homo sapiens
gctcttgttttgaga

SEQ ID NO: 352546 - DNA, 15 bp, Homo sapiens
ggctcttgttttgag

SEQ ID NO: 352547 - DNA, 15 bp, Homo sapiens
aggctcttgttttga

SEQ ID NO: 352548 - DNA, 15 bp, Homo sapiens
gaggctcttgttttg

SEQ ID NO: 352549 - DNA, 15 bp, Homo sapiens
agaggctcttgtttt

SEQ ID NO: 352550 - DNA, 15 bp, Homo sapiens
tagaggctcttgttt

SEQ ID NO: 352551 - DNA, 15 bp, Homo sapiens
ttagaggctcttgtt

SEQ ID NO: 352552 - DNA, 15 bp, Homo sapiens
attagaggctcttgt

SEQ ID NO: 352553 - DNA, 15 bp, Homo sapiens
aattagaggctcttg

SEQ ID NO: 352554 - DNA, 15 bp, Homo sapiens
aaattagaggctctt

SEQ ID NO: 352555 - DNA, 15 bp, Homo sapiens
gaaattagaggctct

SEQ ID NO: 352556 - DNA, 15 bp, Homo sapiens
agaaattagaggctc

SEQ ID NO: 352557 - DNA, 15 bp, Homo sapiens
aagaaattagaggct

SEQ ID NO: 352558 - DNA, 15 bp, Homo sapiens
caagaaattagaggc

SEQ ID NO: 352559 - DNA, 15 bp, Homo sapiens
ccaagaaattagagg

SEQ ID NO: 352560 - DNA, 15 bp, Homo sapiens
cccaagaaattagag

SEQ ID NO: 352561 - DNA, 15 bp, Homo sapiens
tcccaagaaattaga

SEQ ID NO: 352562 - DNA, 15 bp, Homo sapiens
gtcccaagaaattag

SEQ ID NO: 352563 - DNA, 15 bp, Homo sapiens
tgtcccaagaaatta

SEQ ID NO: 352564 - DNA, 15 bp, Homo sapiens
ttgtcccaagaaatt

SEQ ID NO: 352565 - DNA, 15 bp, Homo sapiens
cttgtcccaagaaat

SEQ ID NO: 352566 - DNA, 15 bp, Homo sapiens
tcttgtcccaagaaa

SEQ ID NO: 352567 - DNA, 15 bp, Homo sapiens
ttcttgtcccaagaa

SEQ ID NO: 352568 - DNA, 15 bp, Homo sapiens
attcttgtcccaaga

SEQ ID NO: 352569 - DNA, 15 bp, Homo sapiens
aattcttgtcccaag

SEQ ID NO: 352570 - DNA, 15 bp, Homo sapiens
gaattcttgtcccaa

SEQ ID NO: 352571 - DNA, 15 bp, Homo sapiens
ggaattcttgtccca

SEQ ID NO: 352572 - DNA, 15 bp, Homo sapiens
gggaattcttgtccc

SEQ ID NO: 352573 - DNA, 15 bp, Homo sapiens
ggggaattcttgtcc

SEQ ID NO: 352574 - DNA, 15 bp, Homo sapiens
cggggaattcttgtc

SEQ ID NO: 352575 - DNA, 15 bp, Homo sapiens
tcggggaattcttgt

SEQ ID NO: 352576 - DNA, 15 bp, Homo sapiens
atcggggaattcttg

SEQ ID NO: 352577 - DNA, 15 bp, Homo sapiens
aatcggggaattctt

SEQ ID NO: 352578 - DNA, 15 bp, Homo sapiens
gaatcggggaattct

SEQ ID NO: 352579 - DNA, 15 bp, Homo sapiens
agaatcggggaattc

SEQ ID NO: 352580 - DNA, 15 bp, Homo sapiens
cagaatcggggaatt

SEQ ID NO: 352581 - DNA, 15 bp, Homo sapiens
tcagaatcggggaat

SEQ ID NO: 352582 - DNA, 15 bp, Homo sapiens
gtcagaatcggggaa

SEQ ID NO: 352583 - DNA, 15 bp, Homo sapiens
tgtcagaatcgggga

SEQ ID NO: 352584 - DNA, 15 bp, Homo sapiens
ttgtcagaatcgggg

SEQ ID NO: 352585 - DNA, 15 bp, Homo sapiens
gttgtcagaatcggg

SEQ ID NO: 352586 - DNA, 15 bp, Homo sapiens
ggttgtcagaatcgg

SEQ ID NO: 352587 - DNA, 15 bp, Homo sapiens
aggttgtcagaatcg

SEQ ID NO: 352588 - DNA, 15 bp, Homo sapiens
taggttgtcagaatc

SEQ ID NO: 352589 - DNA, 15 bp, Homo sapiens
gtaggttgtcagaat

SEQ ID NO: 352590 - DNA, 15 bp, Homo sapiens
ggtaggttgtcagaa

SEQ ID NO: 352591 - DNA, 15 bp, Homo sapiens
cggtaggttgtcaga

SEQ ID NO: 352592 - DNA, 15 bp, Homo sapiens
tcggtaggttgtcag

SEQ ID NO: 352593 - DNA, 15 bp, Homo sapiens
ctcggtaggttgtca

SEQ ID NO: 352594 - DNA, 15 bp, Homo sapiens
tctcggtaggttgtc

SEQ ID NO: 352595 - DNA, 15 bp, Homo sapiens
ttctcggtaggttgt

SEQ ID NO: 352596 - DNA, 15 bp, Homo sapiens
cttctcggtaggttg

SEQ ID NO: 352597 - DNA, 15 bp, Homo sapiens
tcttctcggtaggtt

SEQ ID NO: 352598 - DNA, 15 bp, Homo sapiens
ctcttctcggtaggt

SEQ ID NO: 352599 - DNA, 15 bp, Homo sapiens
gctcttctcggtagg

SEQ ID NO: 352600 - DNA, 15 bp, Homo sapiens
tgctcttctcggtag

SEQ ID NO: 352601 - DNA, 15 bp, Homo sapiens
atgctcttctcggta

SEQ ID NO: 352602 - DNA, 15 bp, Homo sapiens
gatgctcttctcggt

SEQ ID NO: 352603 - DNA, 15 bp, Homo sapiens
agatgctcttctcgg

SEQ ID NO: 352604 - DNA, 15 bp, Homo sapiens
tagatgctcttctcg

SEQ ID NO: 352605 - DNA, 15 bp, Homo sapiens
ttagatgctcttctc

SEQ ID NO: 352606 - DNA, 15 bp, Homo sapiens
cttagatgctcttct

SEQ ID NO: 352607 - DNA, 15 bp, Homo sapiens
tcttagatgctcttc

SEQ ID NO: 352608 - DNA, 15 bp, Homo sapiens
ctcttagatgctctt

SEQ ID NO: 352609 - DNA, 15 bp, Homo sapiens
tctcttagatgctct

SEQ ID NO: 352610 - DNA, 15 bp, Homo sapiens
ctctcttagatgctc

SEQ ID NO: 352611 - DNA, 15 bp, Homo sapiens
tctctcttagatgct

SEQ ID NO: 352612 - DNA, 15 bp, Homo sapiens
ttctctcttagatgc

SEQ ID NO: 352613 - DNA, 15 bp, Homo sapiens
gttctctcttagatg

SEQ ID NO: 352614 - DNA, 15 bp, Homo sapiens
tgttctctcttagat

SEQ ID NO: 352615 - DNA, 15 bp, Homo sapiens
ttgttctctcttaga

SEQ ID NO: 352616 - DNA, 15 bp, Homo sapiens
cttgttctctcttag

SEQ ID NO: 352617 - DNA, 15 bp, Homo sapiens
ccttgttctctctta

SEQ ID NO: 352618 - DNA, 15 bp, Homo sapiens
gccttgttctctctt

SEQ ID NO: 352619 - DNA, 15 bp, Homo sapiens
ggccttgttctctct

SEQ ID NO: 352620 - DNA, 15 bp, Homo sapiens
aggccttgttctctc

SEQ ID NO: 352621 - DNA, 15 bp, Homo sapiens
taggccttgttctct

SEQ ID NO: 352622 - DNA, 15 bp, Homo sapiens
ctaggccttgttctc

SEQ ID NO: 352623 - DNA, 15 bp, Homo sapiens
tctaggccttgttct

SEQ ID NO: 352624 - DNA, 15 bp, Homo sapiens
ttctaggccttgttc

SEQ ID NO: 352625 - DNA, 15 bp, Homo sapiens
attctaggccttgtt

SEQ ID NO: 352626 - DNA, 15 bp, Homo sapiens
cattctaggccttgt

SEQ ID NO: 352627 - DNA, 15 bp, Homo sapiens
tcattctaggccttg

SEQ ID NO: 352628 - DNA, 15 bp, Homo sapiens
ttcattctaggcctt

SEQ ID NO: 352629 - DNA, 15 bp, Homo sapiens
gttcattctaggcct

SEQ ID NO: 352630 - DNA, 15 bp, Homo sapiens
ggttcattctaggcc

SEQ ID NO: 352631 - DNA, 15 bp, Homo sapiens
aggttcattctaggc

SEQ ID NO: 352632 - DNA, 15 bp, Homo sapiens
gaggttcattctagg

SEQ ID NO: 352633 - DNA, 15 bp, Homo sapiens
tgaggttcattctag

SEQ ID NO: 352634 - DNA, 15 bp, Homo sapiens
gtgaggttcattcta

SEQ ID NO: 352635 - DNA, 15 bp, Homo sapiens
agtgaggttcattct

SEQ ID NO: 352636 - DNA, 15 bp, Homo sapiens
gagtgaggttcattc

SEQ ID NO: 352637 - DNA, 15 bp, Homo sapiens
ggagtgaggttcatt

SEQ ID NO: 352638 - DNA, 15 bp, Homo sapiens
gggagtgaggttcat

SEQ ID NO: 352639 - DNA, 15 bp, Homo sapiens
ggggagtgaggttca

SEQ ID NO: 352640 - DNA, 15 bp, Homo sapiens
tggggagtgaggttc

SEQ ID NO: 352641 - DNA, 15 bp, Homo sapiens
atggggagtgaggtt

SEQ ID NO: 352642 - DNA, 15 bp, Homo sapiens
aatggggagtgaggt

SEQ ID NO: 352643 - DNA, 15 bp, Homo sapiens
gaatggggagtgagg

SEQ ID NO: 352644 - DNA, 15 bp, Homo sapiens
tgaatggggagtgag

SEQ ID NO: 352645 - DNA, 15 bp, Homo sapiens
ttgaatggggagtga

SEQ ID NO: 352646 - DNA, 15 bp, Homo sapiens
gttgaatggggagtg

SEQ ID NO: 352647 - DNA, 15 bp, Homo sapiens
ggttgaatggggagt

SEQ ID NO: 352648 - DNA, 15 bp, Homo sapiens
gggttgaatggggag

SEQ ID NO: 352649 - DNA, 15 bp, Homo sapiens
ggggttgaatgggga

SEQ ID NO: 352650 - DNA, 15 bp, Homo sapiens
gggggttgaatgggg

SEQ ID NO: 352651 - DNA, 15 bp, Homo sapiens
tgggggttgaatggg

SEQ ID NO: 352652 - DNA, 15 bp, Homo sapiens
gtgggggttgaatgg

SEQ ID NO: 352653 - DNA, 15 bp, Homo sapiens
tgtgggggttgaatg

SEQ ID NO: 352654 - DNA, 15 bp, Homo sapiens
ctgtgggggttgaat

SEQ ID NO: 352655 - DNA, 15 bp, Homo sapiens
tctgtgggggttgaa

SEQ ID NO: 352656 - DNA, 15 bp, Homo sapiens
gtctgtgggggttga

SEQ ID NO: 352657 - DNA, 15 bp, Homo sapiens
ggtctgtgggggttg

SEQ ID NO: 352658 - DNA, 15 bp, Homo sapiens
gggtctgtgggggtt

SEQ ID NO: 352659 - DNA, 15 bp, Homo sapiens
ggggtctgtgggggt

SEQ ID NO: 352660 - DNA, 15 bp, Homo sapiens
tggggtctgtggggg

SEQ ID NO: 352661 - DNA, 15 bp, Homo sapiens
atggggtctgtgggg

SEQ ID NO: 352662 - DNA, 15 bp, Homo sapiens
catggggtctgtggg

SEQ ID NO: 352663 - DNA, 15 bp, Homo sapiens
tcatggggtctgtgg

SEQ ID NO: 352664 - DNA, 15 bp, Homo sapiens
ttcatggggtctgtg

SEQ ID NO: 352665 - DNA, 15 bp, Homo sapiens
attcatggggtctgt

SEQ ID NO: 352666 - DNA, 15 bp, Homo sapiens
gattcatggggtctg

SEQ ID NO: 352667 - DNA, 15 bp, Homo sapiens
ggattcatggggtct

SEQ ID NO: 352668 - DNA, 15 bp, Homo sapiens
tggattcatggggtc

SEQ ID NO: 352669 - DNA, 15 bp, Homo sapiens
ttggattcatggggt

SEQ ID NO: 352670 - DNA, 15 bp, Homo sapiens
tttggattcatgggg

SEQ ID NO: 352671 - DNA, 15 bp, Homo sapiens
ctttggattcatggg

SEQ ID NO: 352672 - DNA, 15 bp, Homo sapiens
tctttggattcatgg

SEQ ID NO: 352673 - DNA, 15 bp, Homo sapiens
gtctttggattcatg

SEQ ID NO: 352674 - DNA, 15 bp, Homo sapiens
ggtctttggattcat

SEQ ID NO: 352675 - DNA, 15 bp, Homo sapiens
aggtctttggattca

SEQ ID NO: 352676 - DNA, 15 bp, Homo sapiens
aaggtctttggattc

SEQ ID NO: 352677 - DNA, 15 bp, Homo sapiens
gaaggtctttggatt

SEQ ID NO: 352678 - DNA, 15 bp, Homo sapiens
agaaggtctttggat

SEQ ID NO: 352679 - DNA, 15 bp, Homo sapiens
aagaaggtctttgga

SEQ ID NO: 352680 - DNA, 15 bp, Homo sapiens
gaagaaggtctttgg

SEQ ID NO: 352681 - DNA, 15 bp, Homo sapiens
tgaagaaggtctttg

SEQ ID NO: 352682 - DNA, 15 bp, Homo sapiens
gtgaagaaggtcttt

SEQ ID NO: 352683 - DNA, 15 bp, Homo sapiens
ggtgaagaaggtctt

SEQ ID NO: 352684 - DNA, 15 bp, Homo sapiens
tggtgaagaaggtct

SEQ ID NO: 352685 - DNA, 15 bp, Homo sapiens
ctggtgaagaaggtc

SEQ ID NO: 352686 - DNA, 15 bp, Homo sapiens
cctggtgaagaaggt

SEQ ID NO: 352687 - DNA, 15 bp, Homo sapiens
gcctggtgaagaagg

SEQ ID NO: 352688 - DNA, 15 bp, Homo sapiens
tgcctggtgaagaag

SEQ ID NO: 352689 - DNA, 15 bp, Homo sapiens
ctgcctggtgaagaa

SEQ ID NO: 352690 - DNA, 15 bp, Homo sapiens
actgcctggtgaaga

SEQ ID NO: 352691 - DNA, 15 bp, Homo sapiens
gactgcctggtgaag

SEQ ID NO: 352692 - DNA, 15 bp, Homo sapiens
ggactgcctggtgaa

SEQ ID NO: 352693 - DNA, 15 bp, Homo sapiens
tggactgcctggtga

SEQ ID NO: 352694 - DNA, 15 bp, Homo sapiens
atggactgcctggtg

SEQ ID NO: 352695 - DNA, 15 bp, Homo sapiens
gatggactgcctggt

SEQ ID NO: 352696 - DNA, 15 bp, Homo sapiens
ggatggactgcctgg

SEQ ID NO: 352697 - DNA, 15 bp, Homo sapiens
gggatggactgcctg

SEQ ID NO: 352698 - DNA, 15 bp, Homo sapiens
tgggatggactgcct

SEQ ID NO: 352699 - DNA, 15 bp, Homo sapiens
ctgggatggactgcc

SEQ ID NO: 352700 - DNA, 15 bp, Homo sapiens
gctgggatggactgc

SEQ ID NO: 352701 - DNA, 15 bp, Homo sapiens
ggctgggatggactg

SEQ ID NO: 352702 - DNA, 15 bp, Homo sapiens
tggctgggatggact

SEQ ID NO: 352703 - DNA, 15 bp, Homo sapiens
atggctgggatggac

SEQ ID NO: 352704 - DNA, 15 bp, Homo sapiens
catggctgggatgga

SEQ ID NO: 352705 - DNA, 15 bp, Homo sapiens
gcatggctgggatgg

SEQ ID NO: 352706 - DNA, 15 bp, Homo sapiens
agcatggctgggatg

SEQ ID NO: 352707 - DNA, 15 bp, Homo sapiens
aagcatggctgggat

SEQ ID NO: 352708 - DNA, 15 bp, Homo sapiens
taagcatggctggga

SEQ ID NO: 352709 - DNA, 15 bp, Homo sapiens
ctaagcatggctggg

SEQ ID NO: 352710 - DNA, 15 bp, Homo sapiens
actaagcatggctgg

SEQ ID NO: 352711 - DNA, 15 bp, Homo sapiens
aactaagcatggctg

SEQ ID NO: 352712 - DNA, 15 bp, Homo sapiens
caactaagcatggct

SEQ ID NO: 352713 - DNA, 15 bp, Homo sapiens
ccaactaagcatggc

SEQ ID NO: 352714 - DNA, 15 bp, Homo sapiens
accaactaagcatgg

SEQ ID NO: 352715 - DNA, 15 bp, Homo sapiens
aaccaactaagcatg

SEQ ID NO: 352716 - DNA, 15 bp, Homo sapiens
caaccaactaagcat

SEQ ID NO: 352717 - DNA, 15 bp, Homo sapiens
acaaccaactaagca

SEQ ID NO: 352718 - DNA, 15 bp, Homo sapiens
cacaaccaactaagc

SEQ ID NO: 352719 - DNA, 15 bp, Homo sapiens
ccacaaccaactaag

SEQ ID NO: 352720 - DNA, 15 bp, Homo sapiens
tccacaaccaactaa

SEQ ID NO: 352721 - DNA, 15 bp, Homo sapiens
gtccacaaccaacta

SEQ ID NO: 352722 - DNA, 15 bp, Homo sapiens
tgtccacaaccaact

SEQ ID NO: 352723 - DNA, 15 bp, Homo sapiens
gtgtccacaaccaac

SEQ ID NO: 352724 - DNA, 15 bp, Homo sapiens
tgtgtccacaaccaa

SEQ ID NO: 352725 - DNA, 15 bp, Homo sapiens
ctgtgtccacaacca

SEQ ID NO: 352726 - DNA, 15 bp, Homo sapiens
gctgtgtccacaacc

SEQ ID NO: 352727 - DNA, 15 bp, Homo sapiens
tgctgtgtccacaac

SEQ ID NO: 352728 - DNA, 15 bp, Homo sapiens
ctgctgtgtccacaa

SEQ ID NO: 352729 - DNA, 15 bp, Homo sapiens
gctgctgtgtccaca

SEQ ID NO: 352730 - DNA, 15 bp, Homo sapiens
tgctgctgtgtccac

SEQ ID NO: 352731 - DNA, 15 bp, Homo sapiens
gtgctgctgtgtcca

SEQ ID NO: 352732 - DNA, 15 bp, Homo sapiens
cgtgctgctgtgtcc

SEQ ID NO: 352733 - DNA, 15 bp, Homo sapiens
ccgtgctgctgtgtc

SEQ ID NO: 352734 - DNA, 15 bp, Homo sapiens
tccgtgctgctgtgt

SEQ ID NO: 352735 - DNA, 15 bp, Homo sapiens
atccgtgctgctgtg

SEQ ID NO: 352736 - DNA, 15 bp, Homo sapiens
catccgtgctgctgt

SEQ ID NO: 352737 - DNA, 15 bp, Homo sapiens
tcatccgtgctgctg

SEQ ID NO: 352738 - DNA, 15 bp, Homo sapiens
ctcatccgtgctgct

SEQ ID NO: 352739 - DNA, 15 bp, Homo sapiens
actcatccgtgctgc

SEQ ID NO: 352740 - DNA, 15 bp, Homo sapiens
aactcatccgtgctg

SEQ ID NO: 352741 - DNA, 15 bp, Homo sapiens
caactcatccgtgct

SEQ ID NO: 352742 - DNA, 15 bp, Homo sapiens
tcaactcatccgtgc

SEQ ID NO: 352743 - DNA, 15 bp, Homo sapiens
gtcaactcatccgtg

SEQ ID NO: 352744 - DNA, 15 bp, Homo sapiens
ggtcaactcatccgt

SEQ ID NO: 352745 - DNA, 15 bp, Homo sapiens
tggtcaactcatccg

SEQ ID NO: 352746 - DNA, 15 bp, Homo sapiens
ctggtcaactcatcc

SEQ ID NO: 352747 - DNA, 15 bp, Homo sapiens
tctggtcaactcatc

SEQ ID NO: 352748 - DNA, 15 bp, Homo sapiens
gtctggtcaactcat

SEQ ID NO: 352749 - DNA, 15 bp, Homo sapiens
tgtctggtcaactca

SEQ ID NO: 352750 - DNA, 15 bp, Homo sapiens
atgtctggtcaactc

SEQ ID NO: 352751 - DNA, 15 bp, Homo sapiens
gatgtctggtcaact

SEQ ID NO: 352752 - DNA, 15 bp, Homo sapiens
agatgtctggtcaac

SEQ ID NO: 352753 - DNA, 15 bp, Homo sapiens
gagatgtctggtcaa

SEQ ID NO: 352754 - DNA, 15 bp, Homo sapiens
ggagatgtctggtca

SEQ ID NO: 352755 - DNA, 15 bp, Homo sapiens
aggagatgtctggtc

SEQ ID NO: 352756 - DNA, 15 bp, Homo sapiens
caggagatgtctggt

SEQ ID NO: 352757 - DNA, 15 bp, Homo sapiens
tcaggagatgtctgg

SEQ ID NO: 352758 - DNA, 15 bp, Homo sapiens
ttcaggagatgtctg

SEQ ID NO: 352759 - DNA, 15 bp, Homo sapiens
attcaggagatgtct

SEQ ID NO: 352760 - DNA, 15 bp, Homo sapiens
gattcaggagatgtc

SEQ ID NO: 352761 - DNA, 15 bp, Homo sapiens
tgattcaggagatgt

SEQ ID NO: 352762 - DNA, 15 bp, Homo sapiens
atgattcaggagatg

SEQ ID NO: 352763 - DNA, 15 bp, Homo sapiens
aatgattcaggagat

SEQ ID NO: 352764 - DNA, 15 bp, Homo sapiens
aaatgattcaggaga

SEQ ID NO: 352765 - DNA, 15 bp, Homo sapiens
gaaatgattcaggag

SEQ ID NO: 352766 - DNA, 15 bp, Homo sapiens
tgaaatgattcagga

SEQ ID NO: 352767 - DNA, 15 bp, Homo sapiens
ttgaaatgattcagg

SEQ ID NO: 352768 - DNA, 15 bp, Homo sapiens
attgaaatgattcag

SEQ ID NO: 352769 - DNA, 15 bp, Homo sapiens
gattgaaatgattca

SEQ ID NO: 352770 - DNA, 15 bp, Homo sapiens
tgattgaaatgattc

SEQ ID NO: 352771 - DNA, 15 bp, Homo sapiens
ctgattgaaatgatt

SEQ ID NO: 352772 - DNA, 15 bp, Homo sapiens
tctgattgaaatgat

SEQ ID NO: 352773 - DNA, 15 bp, Homo sapiens
ttctgattgaaatga

SEQ ID NO: 352774 - DNA, 15 bp, Homo sapiens
cttctgattgaaatg

SEQ ID NO: 352775 - DNA, 15 bp, Homo sapiens
ccttctgattgaaat

SEQ ID NO: 352776 - DNA, 15 bp, Homo sapiens
tccttctgattgaaa

SEQ ID NO: 352777 - DNA, 15 bp, Homo sapiens
ctccttctgattgaa

SEQ ID NO: 352778 - DNA, 15 bp, Homo sapiens
gctccttctgattga

SEQ ID NO: 352779 - DNA, 15 bp, Homo sapiens
tgctccttctgattg

SEQ ID NO: 352780 - DNA, 15 bp, Homo sapiens
gtgctccttctgatt

SEQ ID NO: 352781 - DNA, 15 bp, Homo sapiens
tgtgctccttctgat

SEQ ID NO: 352782 - DNA, 15 bp, Homo sapiens
ctgtgctccttctga

SEQ ID NO: 352783 - DNA, 15 bp, Homo sapiens
gctgtgctccttctg

SEQ ID NO: 352784 - DNA, 15 bp, Homo sapiens
tgctgtgctccttct

SEQ ID NO: 352785 - DNA, 15 bp, Homo sapiens
ctgctgtgctccttc

SEQ ID NO: 352786 - DNA, 15 bp, Homo sapiens
actgctgtgctcctt

SEQ ID NO: 352787 - DNA, 15 bp, Homo sapiens
gactgctgtgctcct

SEQ ID NO: 352788 - DNA, 15 bp, Homo sapiens
agactgctgtgctcc

SEQ ID NO: 352789 - DNA, 15 bp, Homo sapiens
cagactgctgtgctc

SEQ ID NO: 352790 - DNA, 15 bp, Homo sapiens
tcagactgctgtgct

SEQ ID NO: 352791 - DNA, 15 bp, Homo sapiens
ctcagactgctgtgc

SEQ ID NO: 352792 - DNA, 15 bp, Homo sapiens
cctcagactgctgtg

SEQ ID NO: 352793 - DNA, 15 bp, Homo sapiens
ccctcagactgctgt

SEQ ID NO: 352794 - DNA, 15 bp, Homo sapiens
accctcagactgctg

SEQ ID NO: 352795 - DNA, 15 bp, Homo sapiens
aaccctcagactgct

SEQ ID NO: 352796 - DNA, 15 bp, Homo sapiens
caaccctcagactgc

SEQ ID NO: 352797 - DNA, 15 bp, Homo sapiens
tcaaccctcagactg

SEQ ID NO: 352798 - DNA, 15 bp, Homo sapiens
ctcaaccctcagact

SEQ ID NO: 352799 - DNA, 15 bp, Homo sapiens
cctcaaccctcagac

SEQ ID NO: 352800 - DNA, 15 bp, Homo sapiens
ccctcaaccctcaga

SEQ ID NO: 352801 - DNA, 15 bp, Homo sapiens
tccctcaaccctcag

SEQ ID NO: 352802 - DNA, 15 bp, Homo sapiens
ttccctcaaccctca

SEQ ID NO: 352803 - DNA, 15 bp, Homo sapiens
tttccctcaaccctc

SEQ ID NO: 352804 - DNA, 15 bp, Homo sapiens
atttccctcaaccct

SEQ ID NO: 352805 - DNA, 15 bp, Homo sapiens
tatttccctcaaccc

SEQ ID NO: 352806 - DNA, 15 bp, Homo sapiens
ttatttccctcaacc

SEQ ID NO: 352807 - DNA, 15 bp, Homo sapiens
cttatttccctcaac

SEQ ID NO: 352808 - DNA, 15 bp, Homo sapiens
tcttatttccctcaa

SEQ ID NO: 352809 - DNA, 15 bp, Homo sapiens
ctcttatttccctca

SEQ ID NO: 352810 - DNA, 15 bp, Homo sapiens
tctcttatttccctc

SEQ ID NO: 352811 - DNA, 15 bp, Homo sapiens
ctctcttatttccct

SEQ ID NO: 352812 - DNA, 15 bp, Homo sapiens
tctctcttatttccc

SEQ ID NO: 352813 - DNA, 15 bp, Homo sapiens
ttctctcttatttcc

SEQ ID NO: 352814 - DNA, 15 bp, Homo sapiens
gttctctcttatttc

SEQ ID NO: 352815 - DNA, 15 bp, Homo sapiens
tgttctctcttattt

SEQ ID NO: 352816 - DNA, 15 bp, Homo sapiens
ttgttctctcttatt

SEQ ID NO: 352817 - DNA, 15 bp, Homo sapiens
gttgttctctcttat

SEQ ID NO: 352818 - DNA, 15 bp, Homo sapiens
tgttgttctctctta

SEQ ID NO: 352819 - DNA, 15 bp, Homo sapiens
ttgttgttctctctt

SEQ ID NO: 352820 - DNA, 15 bp, Homo sapiens
tttgttgttctctct

SEQ ID NO: 352821 - DNA, 15 bp, Homo sapiens
atttgttgttctctc

SEQ ID NO: 352822 - DNA, 15 bp, Homo sapiens
tatttgttgttctct

SEQ ID NO: 352823 - DNA, 15 bp, Homo sapiens
gtatttgttgttctc

SEQ ID NO: 352824 - DNA, 15 bp, Homo sapiens
tgtatttgttgttct

SEQ ID NO: 352825 - DNA, 15 bp, Homo sapiens
ttgtatttgttgttc

SEQ ID NO: 352826 - DNA, 15 bp, Homo sapiens
cttgtatttgttgtt

SEQ ID NO: 352827 - DNA, 15 bp, Homo sapiens
tcttgtatttgttgt

SEQ ID NO: 352828 - DNA, 15 bp, Homo sapiens
ctcttgtatttgttg

SEQ ID NO: 352829 - DNA, 15 bp, Homo sapiens
cctcttgtatttgtt

SEQ ID NO: 352830 - DNA, 15 bp, Homo sapiens
acctcttgtatttgt

SEQ ID NO: 352831 - DNA, 15 bp, Homo sapiens
cacctcttgtatttg

SEQ ID NO: 352832 - DNA, 15 bp, Homo sapiens
tcacctcttgtattt

SEQ ID NO: 352833 - DNA, 15 bp, Homo sapiens
ttcacctcttgtatt

SEQ ID NO: 352834 - DNA, 15 bp, Homo sapiens
gttcacctcttgtat

SEQ ID NO: 352835 - DNA, 15 bp, Homo sapiens
tgttcacctcttgta

SEQ ID NO: 352836 - DNA, 15 bp, Homo sapiens
gtgttcacctcttgt

SEQ ID NO: 352837 - DNA, 15 bp, Homo sapiens
agtgttcacctcttg

SEQ ID NO: 352838 - DNA, 15 bp, Homo sapiens
aagtgttcacctctt

SEQ ID NO: 352839 - DNA, 15 bp, Homo sapiens
gaagtgttcacctct

SEQ ID NO: 352840 - DNA, 15 bp, Homo sapiens
agaagtgttcacctc

SEQ ID NO: 352841 - DNA, 15 bp, Homo sapiens
cagaagtgttcacct

SEQ ID NO: 352842 - DNA, 15 bp, Homo sapiens
acagaagtgttcacc

SEQ ID NO: 352843 - DNA, 15 bp, Homo sapiens
tacagaagtgttcac

SEQ ID NO: 352844 - DNA, 15 bp, Homo sapiens
ttacagaagtgttca

SEQ ID NO: 352845 - DNA, 15 bp, Homo sapiens
tttacagaagtgttc

SEQ ID NO: 352846 - DNA, 15 bp, Homo sapiens
ctttacagaagtgtt

SEQ ID NO: 352847 - DNA, 15 bp, Homo sapiens
tctttacagaagtgt

SEQ ID NO: 352848 - DNA, 15 bp, Homo sapiens
ttctttacagaagtg

SEQ ID NO: 352849 - DNA, 15 bp, Homo sapiens
tttctttacagaagt

SEQ ID NO: 352850 - DNA, 15 bp, Homo sapiens
gtttctttacagaag

SEQ ID NO: 352851 - DNA, 15 bp, Homo sapiens
cgtttctttacagaa

SEQ ID NO: 352852 - DNA, 15 bp, Homo sapiens
gcgtttctttacaga

SEQ ID NO: 352853 - DNA, 15 bp, Homo sapiens
agcgtttctttacag

SEQ ID NO: 352854 - DNA, 15 bp, Homo sapiens
aagcgtttctttaca

SEQ ID NO: 352855 - DNA, 15 bp, Homo sapiens
caagcgtttctttac

SEQ ID NO: 352856 - DNA, 15 bp, Homo sapiens
acaagcgtttcttta

SEQ ID NO: 352857 - DNA, 15 bp, Homo sapiens
tacaagcgtttcttt

SEQ ID NO: 352858 - DNA, 15 bp, Homo sapiens
ctacaagcgtttctt

SEQ ID NO: 352859 - DNA, 15 bp, Homo sapiens
actacaagcgtttct

SEQ ID NO: 352860 - DNA, 15 bp, Homo sapiens
cactacaagcgtttc

SEQ ID NO: 352861 - DNA, 15 bp, Homo sapiens
tcactacaagcgttt

SEQ ID NO: 352862 - DNA, 15 bp, Homo sapiens
ctcactacaagcgtt

SEQ ID NO: 352863 - DNA, 15 bp, Homo sapiens
cctcactacaagcgt

SEQ ID NO: 352864 - DNA, 15 bp, Homo sapiens
ccctcactacaagcg

SEQ ID NO: 352865 - DNA, 15 bp, Homo sapiens
cccctcactacaagc

SEQ ID NO: 352866 - DNA, 15 bp, Homo sapiens
acccctcactacaag

SEQ ID NO: 352867 - DNA, 15 bp, Homo sapiens
aacccctcactacaa

SEQ ID NO: 352868 - DNA, 15 bp, Homo sapiens
caacccctcactaca

SEQ ID NO: 352869 - DNA, 15 bp, Homo sapiens
ccaacccctcactac

SEQ ID NO: 352870 - DNA, 15 bp, Homo sapiens
cccaacccctcacta

SEQ ID NO: 352871 - DNA, 15 bp, Homo sapiens
tcccaacccctcact

SEQ ID NO: 352872 - DNA, 15 bp, Homo sapiens
ttcccaacccctcac

SEQ ID NO: 352873 - DNA, 15 bp, Homo sapiens
tttcccaacccctca

SEQ ID NO: 352874 - DNA, 15 bp, Homo sapiens
ctttcccaacccctc

SEQ ID NO: 352875 - DNA, 15 bp, Homo sapiens
cctttcccaacccct

SEQ ID NO: 352876 - DNA, 15 bp, Homo sapiens
ccctttcccaacccc

SEQ ID NO: 352877 - DNA, 15 bp, Homo sapiens
tccctttcccaaccc

SEQ ID NO: 352878 - DNA, 15 bp, Homo sapiens
ctccctttcccaacc

SEQ ID NO: 352879 - DNA, 15 bp, Homo sapiens
cctccctttcccaac

SEQ ID NO: 352880 - DNA, 15 bp, Homo sapiens
tcctccctttcccaa

SEQ ID NO: 352881 - DNA, 15 bp, Homo sapiens
ttcctccctttccca

SEQ ID NO: 352882 - DNA, 15 bp, Homo sapiens
tttcctccctttccc

SEQ ID NO: 352883 - DNA, 15 bp, Homo sapiens
ctttcctccctttcc

SEQ ID NO: 352884 - DNA, 15 bp, Homo sapiens
cctttcctccctttc

SEQ ID NO: 352885 - DNA, 15 bp, Homo sapiens
acctttcctcccttt

SEQ ID NO: 352886 - DNA, 15 bp, Homo sapiens
cacctttcctccctt

SEQ ID NO: 352887 - DNA, 15 bp, Homo sapiens
tcacctttcctccct

SEQ ID NO: 352888 - DNA, 15 bp, Homo sapiens
ctcacctttcctccc

SEQ ID NO: 352889 - DNA, 15 bp, Homo sapiens
cctcacctttcctcc

SEQ ID NO: 352890 - DNA, 15 bp, Homo sapiens
gcctcacctttcctc

SEQ ID NO: 352891 - DNA, 15 bp, Homo sapiens
ggcctcacctttcct

SEQ ID NO: 352892 - DNA, 15 bp, Homo sapiens
tggcctcacctttcc

SEQ ID NO: 352893 - DNA, 15 bp, Homo sapiens
ttggcctcacctttc

SEQ ID NO: 352894 - DNA, 15 bp, Homo sapiens
attggcctcaccttt

SEQ ID NO: 352895 - DNA, 15 bp, Homo sapiens
tattggcctcacctt

SEQ ID NO: 352896 - DNA, 15 bp, Homo sapiens
ttattggcctcacct

SEQ ID NO: 352897 - DNA, 15 bp, Homo sapiens
gttattggcctcacc

SEQ ID NO: 352898 - DNA, 15 bp, Homo sapiens
ggttattggcctcac

SEQ ID NO: 352899 - DNA, 15 bp, Homo sapiens
gggttattggcctca

SEQ ID NO: 352900 - DNA, 15 bp, Homo sapiens
ggggttattggcctc

SEQ ID NO: 352901 - DNA, 15 bp, Homo sapiens
aggggttattggcct

SEQ ID NO: 352902 - DNA, 15 bp, Homo sapiens
caggggttattggcc

SEQ ID NO: 352903 - DNA, 15 bp, Homo sapiens
tcaggggttattggc

SEQ ID NO: 352904 - DNA, 15 bp, Homo sapiens
gtcaggggttattgg

SEQ ID NO: 352905 - DNA, 15 bp, Homo sapiens
tgtcaggggttattg

SEQ ID NO: 352906 - DNA, 15 bp, Homo sapiens
ctgtcaggggttatt

SEQ ID NO: 352907 - DNA, 15 bp, Homo sapiens
cctgtcaggggttat

SEQ ID NO: 352908 - DNA, 15 bp, Homo sapiens
tcctgtcaggggtta

SEQ ID NO: 352909 - DNA, 15 bp, Homo sapiens
atcctgtcaggggtt

SEQ ID NO: 352910 - DNA, 15 bp, Homo sapiens
tatcctgtcaggggt

SEQ ID NO: 352911 - DNA, 15 bp, Homo sapiens
atatcctgtcagggg

SEQ ID NO: 352912 - DNA, 15 bp, Homo sapiens
aatatcctgtcaggg

SEQ ID NO: 352913 - DNA, 15 bp, Homo sapiens
aaatatcctgtcagg

SEQ ID NO: 352914 - DNA, 15 bp, Homo sapiens
caaatatcctgtcag

SEQ ID NO: 352915 - DNA, 15 bp, Homo sapiens
gcaaatatcctgtca

SEQ ID NO: 352916 - DNA, 15 bp, Homo sapiens
ggcaaatatcctgtc

SEQ ID NO: 352917 - DNA, 15 bp, Homo sapiens
tggcaaatatcctgt

SEQ ID NO: 352918 - DNA, 15 bp, Homo sapiens
ctggcaaatatcctg

SEQ ID NO: 352919 - DNA, 15 bp, Homo sapiens
tctggcaaatatcct

SEQ ID NO: 352920 - DNA, 15 bp, Homo sapiens
gtctggcaaatatcc

SEQ ID NO: 352921 - DNA, 15 bp, Homo sapiens
ggtctggcaaatatc

SEQ ID NO: 352922 - DNA, 15 bp, Homo sapiens
gggtctggcaaatat

SEQ ID NO: 352923 - DNA, 15 bp, Homo sapiens
agggtctggcaaata

SEQ ID NO: 352924 - DNA, 15 bp, Homo sapiens
gagggtctggcaaat

SEQ ID NO: 352925 - DNA, 15 bp, Homo sapiens
tgagggtctggcaaa

SEQ ID NO: 352926 - DNA, 15 bp, Homo sapiens
atgagggtctggcaa

SEQ ID NO: 352927 - DNA, 15 bp, Homo sapiens
gatgagggtctggca

SEQ ID NO: 352928 - DNA, 15 bp, Homo sapiens
ggatgagggtctggc

SEQ ID NO: 352929 - DNA, 15 bp, Homo sapiens
gggatgagggtctgg

SEQ ID NO: 352930 - DNA, 15 bp, Homo sapiens
tgggatgagggtctg

SEQ ID NO: 352931 - DNA, 15 bp, Homo sapiens
gtgggatgagggtct

SEQ ID NO: 352932 - DNA, 15 bp, Homo sapiens
tgtgggatgagggtc

SEQ ID NO: 352933 - DNA, 15 bp, Homo sapiens
ctgtgggatgagggt

SEQ ID NO: 352934 - DNA, 15 bp, Homo sapiens
tctgtgggatgaggg

SEQ ID NO: 352935 - DNA, 15 bp, Homo sapiens
ctctgtgggatgagg

SEQ ID NO: 352936 - DNA, 15 bp, Homo sapiens
actctgtgggatgag

SEQ ID NO: 352937 - DNA, 15 bp, Homo sapiens
tactctgtgggatga

SEQ ID NO: 352938 - DNA, 15 bp, Homo sapiens
atactctgtgggatg

SEQ ID NO: 352939 - DNA, 15 bp, Homo sapiens
gatactctgtgggat

SEQ ID NO: 352940 - DNA, 15 bp, Homo sapiens
tgatactctgtggga

SEQ ID NO: 352941 - DNA, 15 bp, Homo sapiens
ttgatactctgtggg

SEQ ID NO: 352942 - DNA, 15 bp, Homo sapiens
cttgatactctgtgg

SEQ ID NO: 352943 - DNA, 15 bp, Homo sapiens
ccttgatactctgtg

SEQ ID NO: 352944 - DNA, 15 bp, Homo sapiens
tccttgatactctgt

SEQ ID NO: 352945 - DNA, 15 bp, Homo sapiens
ttccttgatactctg

SEQ ID NO: 352946 - DNA, 15 bp, Homo sapiens
tttccttgatactct

SEQ ID NO: 352947 - DNA, 15 bp, Homo sapiens
atttccttgatactc

SEQ ID NO: 352948 - DNA, 15 bp, Homo sapiens
tatttccttgatact

SEQ ID NO: 352949 - DNA, 15 bp, Homo sapiens
ctatttccttgatac

SEQ ID NO: 352950 - DNA, 15 bp, Homo sapiens
gctatttccttgata

SEQ ID NO: 352951 - DNA, 15 bp, Homo sapiens
tgctatttccttgat

SEQ ID NO: 352952 - DNA, 15 bp, Homo sapiens
ttgctatttccttga

SEQ ID NO: 352953 - DNA, 15 bp, Homo sapiens
cttgctatttccttg

SEQ ID NO: 352954 - DNA, 15 bp, Homo sapiens
tcttgctatttcctt

SEQ ID NO: 352955 - DNA, 15 bp, Homo sapiens
gtcttgctatttcct

SEQ ID NO: 352956 - DNA, 15 bp, Homo sapiens
agtcttgctatttcc

SEQ ID NO: 352957 - DNA, 15 bp, Homo sapiens
cagtcttgctatttc

SEQ ID NO: 352958 - DNA, 15 bp, Homo sapiens
acagtcttgctattt

SEQ ID NO: 352959 - DNA, 15 bp, Homo sapiens
cacagtcttgctatt

SEQ ID NO: 352960 - DNA, 15 bp, Homo sapiens
tcacagtcttgctat

SEQ ID NO: 352961 - DNA, 15 bp, Homo sapiens
atcacagtcttgcta

SEQ ID NO: 352962 - DNA, 15 bp, Homo sapiens
aatcacagtcttgct

SEQ ID NO: 352963 - DNA, 15 bp, Homo sapiens
gaatcacagtcttgc

SEQ ID NO: 352964 - DNA, 15 bp, Homo sapiens
tgaatcacagtcttg

SEQ ID NO: 352965 - DNA, 15 bp, Homo sapiens
gtgaatcacagtctt

SEQ ID NO: 352966 - DNA, 15 bp, Homo sapiens
tgtgaatcacagtct

SEQ ID NO: 352967 - DNA, 15 bp, Homo sapiens
atgtgaatcacagtc

SEQ ID NO: 352968 - DNA, 15 bp, Homo sapiens
tatgtgaatcacagt

SEQ ID NO: 352969 - DNA, 15 bp, Homo sapiens
atatgtgaatcacag

SEQ ID NO: 352970 - DNA, 15 bp, Homo sapiens
aatatgtgaatcaca

SEQ ID NO: 352971 - DNA, 15 bp, Homo sapiens
caatatgtgaatcac

SEQ ID NO: 352972 - DNA, 15 bp, Homo sapiens
tcaatatgtgaatca

SEQ ID NO: 352973 - DNA, 15 bp, Homo sapiens
atcaatatgtgaatc

SEQ ID NO: 352974 - DNA, 15 bp, Homo sapiens
aatcaatatgtgaat

SEQ ID NO: 352975 - DNA, 15 bp, Homo sapiens
taatcaatatgtgaa

SEQ ID NO: 352976 - DNA, 15 bp, Homo sapiens
ctaatcaatatgtga

SEQ ID NO: 352977 - DNA, 15 bp, Homo sapiens
gctaatcaatatgtg

SEQ ID NO: 352978 - DNA, 15 bp, Homo sapiens
ggctaatcaatatgt

SEQ ID NO: 352979 - DNA, 15 bp, Homo sapiens
cggctaatcaatatg

SEQ ID NO: 352980 - DNA, 15 bp, Homo sapiens
acggctaatcaatat

SEQ ID NO: 352981 - DNA, 15 bp, Homo sapiens
aacggctaatcaata

SEQ ID NO: 352982 - DNA, 15 bp, Homo sapiens
gaacggctaatcaat

SEQ ID NO: 352983 - DNA, 15 bp, Homo sapiens
tgaacggctaatcaa

SEQ ID NO: 352984 - DNA, 15 bp, Homo sapiens
gtgaacggctaatca

SEQ ID NO: 352985 - DNA, 15 bp, Homo sapiens
tgtgaacggctaatc

SEQ ID NO: 352986 - DNA, 15 bp, Homo sapiens
atgtgaacggctaat

SEQ ID NO: 352987 - DNA, 15 bp, Homo sapiens
tatgtgaacggctaa

SEQ ID NO: 352988 - DNA, 15 bp, Homo sapiens
atatgtgaacggcta

SEQ ID NO: 352989 - DNA, 15 bp, Homo sapiens
aatatgtgaacggct

SEQ ID NO: 352990 - DNA, 15 bp, Homo sapiens
aaatatgtgaacggc

SEQ ID NO: 352991 - DNA, 15 bp, Homo sapiens
aaaatatgtgaacgg

SEQ ID NO: 352992 - DNA, 15 bp, Homo sapiens
aaaaatatgtgaacg

SEQ ID NO: 352993 - DNA, 15 bp, Homo sapiens
caaaaatatgtgaac

SEQ ID NO: 352994 - DNA, 15 bp, Homo sapiens
tcaaaaatatgtgaa

SEQ ID NO: 352995 - DNA, 15 bp, Homo sapiens
ctcaaaaatatgtga

SEQ ID NO: 352996 - DNA, 15 bp, Homo sapiens
actcaaaaatatgtg

SEQ ID NO: 352997 - DNA, 15 bp, Homo sapiens
tactcaaaaatatgt

SEQ ID NO: 352998 - DNA, 15 bp, Homo sapiens
atactcaaaaatatg

SEQ ID NO: 352999 - DNA, 15 bp, Homo sapiens
gatactcaaaaatat

SEQ ID NO: 353000 - DNA, 15 bp, Homo sapiens
agatactcaaaaata

SEQ ID NO: 353001 - DNA, 15 bp, Homo sapiens
aagatactcaaaaat

SEQ ID NO: 353002 - DNA, 15 bp, Homo sapiens
gaagatactcaaaaa

SEQ ID NO: 353003 - DNA, 15 bp, Homo sapiens
agaagatactcaaaa

SEQ ID NO: 353004 - DNA, 15 bp, Homo sapiens
aagaagatactcaaa

SEQ ID NO: 353005 - DNA, 15 bp, Homo sapiens
aaagaagatactcaa

SEQ ID NO: 353006 - DNA, 15 bp, Homo sapiens
caaagaagatactca

SEQ ID NO: 353007 - DNA, 15 bp, Homo sapiens
ccaaagaagatactc

SEQ ID NO: 353008 - DNA, 15 bp, Homo sapiens
tccaaagaagatact

SEQ ID NO: 353009 - DNA, 15 bp, Homo sapiens
atccaaagaagatac

SEQ ID NO: 353010 - DNA, 15 bp, Homo sapiens
catccaaagaagata

SEQ ID NO: 353011 - DNA, 15 bp, Homo sapiens
tcatccaaagaagat

SEQ ID NO: 353012 - DNA, 15 bp, Homo sapiens
ctcatccaaagaaga

SEQ ID NO: 353013 - DNA, 15 bp, Homo sapiens
gctcatccaaagaag

SEQ ID NO: 353014 - DNA, 15 bp, Homo sapiens
agctcatccaaagaa

SEQ ID NO: 353015 - DNA, 15 bp, Homo sapiens
cagctcatccaaaga

SEQ ID NO: 353016 - DNA, 15 bp, Homo sapiens
gcagctcatccaaag

SEQ ID NO: 353017 - DNA, 15 bp, Homo sapiens
agcagctcatccaaa

SEQ ID NO: 353018 - DNA, 15 bp, Homo sapiens
tagcagctcatccaa

SEQ ID NO: 353019 - DNA, 15 bp, Homo sapiens
atagcagctcatcca

SEQ ID NO: 353020 - DNA, 15 bp, Homo sapiens
aatagcagctcatcc

SEQ ID NO: 353021 - DNA, 15 bp, Homo sapiens
aaatagcagctcatc

SEQ ID NO: 353022 - DNA, 15 bp, Homo sapiens
aaaatagcagctcat

SEQ ID NO: 353023 - DNA, 15 bp, Homo sapiens
aaaaatagcagctca

SEQ ID NO: 353024 - DNA, 15 bp, Homo sapiens
caaaaatagcagctc

SEQ ID NO: 353025 - DNA, 15 bp, Homo sapiens
ccaaaaatagcagct

SEQ ID NO: 353026 - DNA, 15 bp, Homo sapiens
accaaaaatagcagc

SEQ ID NO: 353027 - DNA, 15 bp, Homo sapiens
aaccaaaaatagcag

SEQ ID NO: 353028 - DNA, 15 bp, Homo sapiens
aaaccaaaaatagca

SEQ ID NO: 353029 - DNA, 15 bp, Homo sapiens
gaaaccaaaaatagc

SEQ ID NO: 353030 - DNA, 15 bp, Homo sapiens
tgaaaccaaaaatag

SEQ ID NO: 353031 - DNA, 15 bp, Homo sapiens
ctgaaaccaaaaata

SEQ ID NO: 353032 - DNA, 15 bp, Homo sapiens
cctgaaaccaaaaat

SEQ ID NO: 353033 - DNA, 15 bp, Homo sapiens
ccctgaaaccaaaaa

SEQ ID NO: 353034 - DNA, 15 bp, Homo sapiens
tccctgaaaccaaaa

SEQ ID NO: 353035 - DNA, 15 bp, Homo sapiens
atccctgaaaccaaa

SEQ ID NO: 353036 - DNA, 15 bp, Homo sapiens
catccctgaaaccaa

SEQ ID NO: 353037 - DNA, 15 bp, Homo sapiens
ccatccctgaaacca

SEQ ID NO: 353038 - DNA, 15 bp, Homo sapiens
tccatccctgaaacc

SEQ ID NO: 353039 - DNA, 15 bp, Homo sapiens
ctccatccctgaaac

SEQ ID NO: 353040 - DNA, 15 bp, Homo sapiens
actccatccctgaaa

SEQ ID NO: 353041 - DNA, 15 bp, Homo sapiens
cactccatccctgaa

SEQ ID NO: 353042 - DNA, 15 bp, Homo sapiens
ccactccatccctga

SEQ ID NO: 353043 - DNA, 15 bp, Homo sapiens
accactccatccctg

SEQ ID NO: 353044 - DNA, 15 bp, Homo sapiens
gaccactccatccct

SEQ ID NO: 353045 - DNA, 15 bp, Homo sapiens
tgaccactccatccc

SEQ ID NO: 353046 - DNA, 15 bp, Homo sapiens
ttgaccactccatcc

SEQ ID NO: 353047 - DNA, 15 bp, Homo sapiens
gttgaccactccatc

SEQ ID NO: 353048 - DNA, 15 bp, Homo sapiens
tgttgaccactccat

SEQ ID NO: 353049 - DNA, 15 bp, Homo sapiens
ttgttgaccactcca

SEQ ID NO: 353050 - DNA, 15 bp, Homo sapiens
cttgttgaccactcc

SEQ ID NO: 353051 - DNA, 15 bp, Homo sapiens
ccttgttgaccactc

SEQ ID NO: 353052 - DNA, 15 bp, Homo sapiens
accttgttgaccact

SEQ ID NO: 353053 - DNA, 15 bp, Homo sapiens
taccttgttgaccac

SEQ ID NO: 353054 - DNA, 15 bp, Homo sapiens
ttaccttgttgacca

SEQ ID NO: 353055 - DNA, 15 bp, Homo sapiens
tttaccttgttgacc

SEQ ID NO: 353056 - DNA, 15 bp, Homo sapiens
ctttaccttgttgac

SEQ ID NO: 353057 - DNA, 15 bp, Homo sapiens
actttaccttgttga

SEQ ID NO: 353058 - DNA, 15 bp, Homo sapiens
gactttaccttgttg

SEQ ID NO: 353059 - DNA, 15 bp, Homo sapiens
ggactttaccttgtt

SEQ ID NO: 353060 - DNA, 15 bp, Homo sapiens
gggactttaccttgt

SEQ ID NO: 353061 - DNA, 15 bp, Homo sapiens
agggactttaccttg

SEQ ID NO: 353062 - DNA, 15 bp, Homo sapiens
cagggactttacctt

SEQ ID NO: 353063 - DNA, 15 bp, Homo sapiens
gcagggactttacct

SEQ ID NO: 353064 - DNA, 15 bp, Homo sapiens
ggcagggactttacc

SEQ ID NO: 353065 - DNA, 15 bp, Homo sapiens
gggcagggactttac

SEQ ID NO: 353066 - DNA, 15 bp, Homo sapiens
agggcagggacttta

SEQ ID NO: 353067 - DNA, 15 bp, Homo sapiens
gagggcagggacttt

SEQ ID NO: 353068 - DNA, 15 bp, Homo sapiens
ggagggcagggactt

SEQ ID NO: 353069 - DNA, 15 bp, Homo sapiens
aggagggcagggact

SEQ ID NO: 353070 - DNA, 15 bp, Homo sapiens
caggagggcagggac

SEQ ID NO: 353071 - DNA, 15 bp, Homo sapiens
tcaggagggcaggga

SEQ ID NO: 353072 - DNA, 15 bp, Homo sapiens
ttcaggagggcaggg

SEQ ID NO: 353073 - DNA, 15 bp, Homo sapiens
attcaggagggcagg

SEQ ID NO: 353074 - DNA, 15 bp, Homo sapiens
gattcaggagggcag

SEQ ID NO: 353075 - DNA, 15 bp, Homo sapiens
ggattcaggagggca

SEQ ID NO: 353076 - DNA, 15 bp, Homo sapiens
aggattcaggagggc

SEQ ID NO: 353077 - DNA, 15 bp, Homo sapiens
aaggattcaggaggg

SEQ ID NO: 353078 - DNA, 15 bp, Homo sapiens
aaaggattcaggagg

SEQ ID NO: 353079 - DNA, 15 bp, Homo sapiens
taaaggattcaggag

SEQ ID NO: 353080 - DNA, 15 bp, Homo sapiens
gtaaaggattcagga

SEQ ID NO: 353081 - DNA, 15 bp, Homo sapiens
agtaaaggattcagg

SEQ ID NO: 353082 - DNA, 15 bp, Homo sapiens
gagtaaaggattcag

SEQ ID NO: 353083 - DNA, 15 bp, Homo sapiens
agagtaaaggattca

SEQ ID NO: 353084 - DNA, 15 bp, Homo sapiens
cagagtaaaggattc

SEQ ID NO: 353085 - DNA, 15 bp, Homo sapiens
ccagagtaaaggatt

SEQ ID NO: 353086 - DNA, 15 bp, Homo sapiens
accagagtaaaggat

SEQ ID NO: 353087 - DNA, 15 bp, Homo sapiens
caccagagtaaagga

SEQ ID NO: 353088 - DNA, 15 bp, Homo sapiens
tcaccagagtaaagg

SEQ ID NO: 353089 - DNA, 15 bp, Homo sapiens
ttcaccagagtaaag

SEQ ID NO: 353090 - DNA, 15 bp, Homo sapiens
attcaccagagtaaa

SEQ ID NO: 353091 - DNA, 15 bp, Homo sapiens
cattcaccagagtaa

SEQ ID NO: 353092 - DNA, 15 bp, Homo sapiens
ccattcaccagagta

SEQ ID NO: 353093 - DNA, 15 bp, Homo sapiens
tccattcaccagagt

SEQ ID NO: 353094 - DNA, 15 bp, Homo sapiens
ctccattcaccagag

SEQ ID NO: 353095 - DNA, 15 bp, Homo sapiens
tctccattcaccaga

SEQ ID NO: 353096 - DNA, 15 bp, Homo sapiens
gtctccattcaccag

SEQ ID NO: 353097 - DNA, 15 bp, Homo sapiens
tgtctccattcacca

SEQ ID NO: 353098 - DNA, 15 bp, Homo sapiens
ttgtctccattcacc

SEQ ID NO: 353099 - DNA, 15 bp, Homo sapiens
tttgtctccattcac

SEQ ID NO: 353100 - DNA, 15 bp, Homo sapiens
gtttgtctccattca

SEQ ID NO: 353101 - DNA, 15 bp, Homo sapiens
ggtttgtctccattc

SEQ ID NO: 353102 - DNA, 15 bp, Homo sapiens
tggtttgtctccatt

SEQ ID NO: 353103 - DNA, 15 bp, Homo sapiens
atggtttgtctccat

SEQ ID NO: 353104 - DNA, 15 bp, Homo sapiens
catggtttgtctcca

SEQ ID NO: 353105 - DNA, 15 bp, Homo sapiens
tcatggtttgtctcc

SEQ ID NO: 353106 - DNA, 15 bp, Homo sapiens
atcatggtttgtctc

SEQ ID NO: 353107 - DNA, 15 bp, Homo sapiens
catcatggtttgtct

SEQ ID NO: 353108 - DNA, 15 bp, Homo sapiens
tcatcatggtttgtc

SEQ ID NO: 353109 - DNA, 15 bp, Homo sapiens
atcatcatggtttgt

SEQ ID NO: 353110 - DNA, 15 bp, Homo sapiens
catcatcatggtttg

SEQ ID NO: 353111 - DNA, 15 bp, Homo sapiens
acatcatcatggttt

SEQ ID NO: 353112 - DNA, 15 bp, Homo sapiens
tacatcatcatggtt

SEQ ID NO: 353113 - DNA, 15 bp, Homo sapiens
ttacatcatcatggt

SEQ ID NO: 353114 - DNA, 15 bp, Homo sapiens
tttacatcatcatgg

SEQ ID NO: 353115 - DNA, 15 bp, Homo sapiens
atttacatcatcatg

SEQ ID NO: 353116 - DNA, 15 bp, Homo sapiens
tatttacatcatcat

SEQ ID NO: 353117 - DNA, 15 bp, Homo sapiens
ttatttacatcatca

SEQ ID NO: 353118 - DNA, 15 bp, Homo sapiens
tttatttacatcatc

SEQ ID NO: 353119 - DNA, 15 bp, Homo sapiens
atttatttacatcat

SEQ ID NO: 353120 - DNA, 15 bp, Homo sapiens
tatttatttacatca

SEQ ID NO: 353121 - DNA, 15 bp, Homo sapiens
ttatttatttacatc

SEQ ID NO: 353122 - DNA, 15 bp, Homo sapiens
tttatttatttacat

SEQ ID NO: 353123 - DNA, 15 bp, Homo sapiens
atttatttatttaca

SEQ ID NO: 353124 - DNA, 15 bp, Homo sapiens
aatttatttatttac

SEQ ID NO: 353125 - DNA, 15 bp, Homo sapiens
gaatttatttattta

SEQ ID NO: 353126 - DNA, 15 bp, Homo sapiens
tgaatttatttattt

SEQ ID NO: 353127 - DNA, 15 bp, Homo sapiens
ctgaatttatttatt

SEQ ID NO: 353128 - DNA, 15 bp, Homo sapiens
tctgaatttatttat

SEQ ID NO: 353129 - DNA, 15 bp, Homo sapiens
ctctgaatttattta

SEQ ID NO: 353130 - DNA, 15 bp, Homo sapiens
tctctgaatttattt

SEQ ID NO: 353131 - DNA, 15 bp, Homo sapiens
atctctgaatttatt

SEQ ID NO: 353132 - DNA, 15 bp, Homo sapiens
tatctctgaatttat

SEQ ID NO: 353133 - DNA, 15 bp, Homo sapiens
ctatctctgaattta

SEQ ID NO: 353134 - DNA, 15 bp, Homo sapiens
gctatctctgaattt

SEQ ID NO: 353135 - DNA, 15 bp, Homo sapiens
ggctatctctgaatt

SEQ ID NO: 353136 - DNA, 15 bp, Homo sapiens
tggctatctctgaat

SEQ ID NO: 353137 - DNA, 15 bp, Homo sapiens
ctggctatctctgaa

SEQ ID NO: 353138 - DNA, 15 bp, Homo sapiens
actggctatctctga

SEQ ID NO: 353139 - DNA, 15 bp, Homo sapiens
cactggctatctctg

SEQ ID NO: 353140 - DNA, 15 bp, Homo sapiens
gcactggctatctct

SEQ ID NO: 353141 - DNA, 15 bp, Homo sapiens
agcactggctatctc

SEQ ID NO: 353142 - DNA, 15 bp, Homo sapiens
tagcactggctatct

SEQ ID NO: 353143 - DNA, 15 bp, Homo sapiens
ttagcactggctatc

SEQ ID NO: 353144 - DNA, 15 bp, Homo sapiens
cttagcactggctat

SEQ ID NO: 353145 - DNA, 15 bp, Homo sapiens
tcttagcactggcta

SEQ ID NO: 353146 - DNA, 15 bp, Homo sapiens
ttcttagcactggct

SEQ ID NO: 353147 - DNA, 15 bp, Homo sapiens
cttcttagcactggc

SEQ ID NO: 353148 - DNA, 15 bp, Homo sapiens
tcttcttagcactgg

SEQ ID NO: 353149 - DNA, 15 bp, Homo sapiens
ctcttcttagcactg

SEQ ID NO: 353150 - DNA, 15 bp, Homo sapiens
tctcttcttagcact

SEQ ID NO: 353151 - DNA, 15 bp, Homo sapiens
ctctcttcttagcac

SEQ ID NO: 353152 - DNA, 15 bp, Homo sapiens
tctctcttcttagca

SEQ ID NO: 353153 - DNA, 15 bp, Homo sapiens
ttctctcttcttagc

SEQ ID NO: 353154 - DNA, 15 bp, Homo sapiens
cttctctcttcttag

SEQ ID NO: 353155 - DNA, 15 bp, Homo sapiens
tcttctctcttctta

SEQ ID NO: 353156 - DNA, 15 bp, Homo sapiens
ctcttctctcttctt

SEQ ID NO: 353157 - DNA, 15 bp, Homo sapiens
tctcttctctcttct

SEQ ID NO: 353158 - DNA, 15 bp, Homo sapiens
gtctcttctctcttc

SEQ ID NO: 353159 - DNA, 15 bp, Homo sapiens
agtctcttctctctt

SEQ ID NO: 353160 - DNA, 15 bp, Homo sapiens
cagtctcttctctct

SEQ ID NO: 353161 - DNA, 15 bp, Homo sapiens
gcagtctcttctctc

SEQ ID NO: 353162 - DNA, 15 bp, Homo sapiens
ggcagtctcttctct

SEQ ID NO: 353163 - DNA, 15 bp, Homo sapiens
aggcagtctcttctc

SEQ ID NO: 353164 - DNA, 15 bp, Homo sapiens
caggcagtctcttct

SEQ ID NO: 353165 - DNA, 15 bp, Homo sapiens
tcaggcagtctcttc

SEQ ID NO: 353166 - DNA, 15 bp, Homo sapiens
ctcaggcagtctctt

SEQ ID NO: 353167 - DNA, 15 bp, Homo sapiens
cctcaggcagtctct

SEQ ID NO: 353168 - DNA, 15 bp, Homo sapiens
ccctcaggcagtctc

SEQ ID NO: 353169 - DNA, 15 bp, Homo sapiens
accctcaggcagtct

SEQ ID NO: 353170 - DNA, 15 bp, Homo sapiens
aaccctcaggcagtc

SEQ ID NO: 353171 - DNA, 15 bp, Homo sapiens
caaccctcaggcagt

SEQ ID NO: 353172 - DNA, 15 bp, Homo sapiens
tcaaccctcaggcag

SEQ ID NO: 353173 - DNA, 15 bp, Homo sapiens
ctcaaccctcaggca

SEQ ID NO: 353174 - DNA, 15 bp, Homo sapiens
cctcaaccctcaggc

SEQ ID NO: 353175 - DNA, 15 bp, Homo sapiens
tcctcaaccctcagg

SEQ ID NO: 353176 - DNA, 15 bp, Homo sapiens
ttcctcaaccctcag

SEQ ID NO: 353177 - DNA, 15 bp, Homo sapiens
attcctcaaccctca

SEQ ID NO: 353178 - DNA, 15 bp, Homo sapiens
gattcctcaaccctc

SEQ ID NO: 353179 - DNA, 15 bp, Homo sapiens
ggattcctcaaccct

SEQ ID NO: 353180 - DNA, 15 bp, Homo sapiens
aggattcctcaaccc

SEQ ID NO: 353181 - DNA, 15 bp, Homo sapiens
caggattcctcaacc

SEQ ID NO: 353182 - DNA, 15 bp, Homo sapiens
gcaggattcctcaac

SEQ ID NO: 353183 - DNA, 15 bp, Homo sapiens
tgcaggattcctcaa

SEQ ID NO: 353184 - DNA, 15 bp, Homo sapiens
ctgcaggattcctca

SEQ ID NO: 353185 - DNA, 15 bp, Homo sapiens
actgcaggattcctc

SEQ ID NO: 353186 - DNA, 15 bp, Homo sapiens
cactgcaggattcct

SEQ ID NO: 353187 - DNA, 15 bp, Homo sapiens
ccactgcaggattcc

SEQ ID NO: 353188 - DNA, 15 bp, Homo sapiens
accactgcaggattc

SEQ ID NO: 353189 - DNA, 15 bp, Homo sapiens
caccactgcaggatt

SEQ ID NO: 353190 - DNA, 15 bp, Homo sapiens
gcaccactgcaggat

SEQ ID NO: 353191 - DNA, 15 bp, Homo sapiens
agcaccactgcagga

SEQ ID NO: 353192 - DNA, 15 bp, Homo sapiens
tagcaccactgcagg

SEQ ID NO: 353193 - DNA, 15 bp, Homo sapiens
gtagcaccactgcag

SEQ ID NO: 353194 - DNA, 15 bp, Homo sapiens
agtagcaccactgca

SEQ ID NO: 353195 - DNA, 15 bp, Homo sapiens
aagtagcaccactgc

SEQ ID NO: 353196 - DNA, 15 bp, Homo sapiens
aaagtagcaccactg

SEQ ID NO: 353197 - DNA, 15 bp, Homo sapiens
taaagtagcaccact

SEQ ID NO: 353198 - DNA, 15 bp, Homo sapiens
ataaagtagcaccac

SEQ ID NO: 353199 - DNA, 15 bp, Homo sapiens
tataaagtagcacca

SEQ ID NO: 353200 - DNA, 15 bp, Homo sapiens
ctataaagtagcacc

SEQ ID NO: 353201 - DNA, 15 bp, Homo sapiens
gctataaagtagcac

SEQ ID NO: 353202 - DNA, 15 bp, Homo sapiens
agctataaagtagca

SEQ ID NO: 353203 - DNA, 15 bp, Homo sapiens
aagctataaagtagc

SEQ ID NO: 353204 - DNA, 15 bp, Homo sapiens
caagctataaagtag

SEQ ID NO: 353205 - DNA, 15 bp, Homo sapiens
ccaagctataaagta

SEQ ID NO: 353206 - DNA, 15 bp, Homo sapiens
tccaagctataaagt

SEQ ID NO: 353207 - DNA, 15 bp, Homo sapiens
ttccaagctataaag

SEQ ID NO: 353208 - DNA, 15 bp, Homo sapiens
cttccaagctataaa

SEQ ID NO: 353209 - DNA, 15 bp, Homo sapiens
ccttccaagctataa

SEQ ID NO: 353210 - DNA, 15 bp, Homo sapiens
accttccaagctata

SEQ ID NO: 353211 - DNA, 15 bp, Homo sapiens
gaccttccaagctat

SEQ ID NO: 353212 - DNA, 15 bp, Homo sapiens
tgaccttccaagcta

SEQ ID NO: 353213 - DNA, 15 bp, Homo sapiens
ctgaccttccaagct

SEQ ID NO: 353214 - DNA, 15 bp, Homo sapiens
cctgaccttccaagc

SEQ ID NO: 353215 - DNA, 15 bp, Homo sapiens
tcctgaccttccaag

SEQ ID NO: 353216 - DNA, 15 bp, Homo sapiens
ttcctgaccttccaa

SEQ ID NO: 353217 - DNA, 15 bp, Homo sapiens
cttcctgaccttcca

SEQ ID NO: 353218 - DNA, 15 bp, Homo sapiens
ccttcctgaccttcc

SEQ ID NO: 353219 - DNA, 15 bp, Homo sapiens
gccttcctgaccttc

SEQ ID NO: 353220 - DNA, 15 bp, Homo sapiens
ggccttcctgacctt

SEQ ID NO: 353221 - DNA, 15 bp, Homo sapiens
aggccttcctgacct

SEQ ID NO: 353222 - DNA, 15 bp, Homo sapiens
gaggccttcctgacc

SEQ ID NO: 353223 - DNA, 15 bp, Homo sapiens
tgaggccttcctgac

SEQ ID NO: 353224 - DNA, 15 bp, Homo sapiens
ctgaggccttcctga

SEQ ID NO: 353225 - DNA, 15 bp, Homo sapiens
actgaggccttcctg

SEQ ID NO: 353226 - DNA, 15 bp, Homo sapiens
gactgaggccttcct

SEQ ID NO: 353227 - DNA, 15 bp, Homo sapiens
tgactgaggccttcc

SEQ ID NO: 353228 - DNA, 15 bp, Homo sapiens
ctgactgaggccttc

SEQ ID NO: 353229 - DNA, 15 bp, Homo sapiens
cctgactgaggcctt

SEQ ID NO: 353230 - DNA, 15 bp, Homo sapiens
ccctgactgaggcct

SEQ ID NO: 353231 - DNA, 15 bp, Homo sapiens
cccctgactgaggcc

SEQ ID NO: 353232 - DNA, 15 bp, Homo sapiens
acccctgactgaggc

SEQ ID NO: 353233 - DNA, 15 bp, Homo sapiens
cacccctgactgagg

SEQ ID NO: 353234 - DNA, 15 bp, Homo sapiens
tcacccctgactgag

SEQ ID NO: 353235 - DNA, 15 bp, Homo sapiens
atcacccctgactga

SEQ ID NO: 353236 - DNA, 15 bp, Homo sapiens
catcacccctgactg

SEQ ID NO: 353237 - DNA, 15 bp, Homo sapiens
acatcacccctgact

SEQ ID NO: 353238 - DNA, 15 bp, Homo sapiens
aacatcacccctgac

SEQ ID NO: 353239 - DNA, 15 bp, Homo sapiens
caacatcacccctga

SEQ ID NO: 353240 - DNA, 15 bp, Homo sapiens
tcaacatcacccctg

SEQ ID NO: 353241 - DNA, 15 bp, Homo sapiens
ctcaacatcacccct

SEQ ID NO: 353242 - DNA, 15 bp, Homo sapiens
cctcaacatcacccc

SEQ ID NO: 353243 - DNA, 15 bp, Homo sapiens
gcctcaacatcaccc

SEQ ID NO: 353244 - DNA, 15 bp, Homo sapiens
ggcctcaacatcacc

SEQ ID NO: 353245 - DNA, 15 bp, Homo sapiens
tggcctcaacatcac

SEQ ID NO: 353246 - DNA, 15 bp, Homo sapiens
ttggcctcaacatca

SEQ ID NO: 353247 - DNA, 15 bp, Homo sapiens
cttggcctcaacatc

SEQ ID NO: 353248 - DNA, 15 bp, Homo sapiens
tcttggcctcaacat

SEQ ID NO: 353249 - DNA, 15 bp, Homo sapiens
gtcttggcctcaaca

SEQ ID NO: 353250 - DNA, 15 bp, Homo sapiens
ggtcttggcctcaac

SEQ ID NO: 353251 - DNA, 15 bp, Homo sapiens
gggtcttggcctcaa

SEQ ID NO: 353252 - DNA, 15 bp, Homo sapiens
tgggtcttggcctca

SEQ ID NO: 353253 - DNA, 15 bp, Homo sapiens
ttgggtcttggcctc

SEQ ID NO: 353254 - DNA, 15 bp, Homo sapiens
attgggtcttggcct

SEQ ID NO: 353255 - DNA, 15 bp, Homo sapiens
gattgggtcttggcc

SEQ ID NO: 353256 - DNA, 15 bp, Homo sapiens
ggattgggtcttggc

SEQ ID NO: 353257 - DNA, 15 bp, Homo sapiens
tggattgggtcttgg

SEQ ID NO: 353258 - DNA, 15 bp, Homo sapiens
ctggattgggtcttg

SEQ ID NO: 353259 - DNA, 15 bp, Homo sapiens
tctggattgggtctt

SEQ ID NO: 353260 - DNA, 15 bp, Homo sapiens
atctggattgggtct

SEQ ID NO: 353261 - DNA, 15 bp, Homo sapiens
tatctggattgggtc

SEQ ID NO: 353262 - DNA, 15 bp, Homo sapiens
ctatctggattgggt

SEQ ID NO: 353263 - DNA, 15 bp, Homo sapiens
cctatctggattggg

SEQ ID NO: 353264 - DNA, 15 bp, Homo sapiens
ccctatctggattgg

SEQ ID NO: 353265 - DNA, 15 bp, Homo sapiens
tccctatctggattg

SEQ ID NO: 353266 - DNA, 15 bp, Homo sapiens
ctccctatctggatt

SEQ ID NO: 353267 - DNA, 15 bp, Homo sapiens
tctccctatctggat

SEQ ID NO: 353268 - DNA, 15 bp, Homo sapiens
gtctccctatctgga

SEQ ID NO: 353269 - DNA, 15 bp, Homo sapiens
cgtctccctatctgg

SEQ ID NO: 353270 - DNA, 15 bp, Homo sapiens
tcgtctccctatctg

SEQ ID NO: 353271 - DNA, 15 bp, Homo sapiens
ctcgtctccctatct

SEQ ID NO: 353272 - DNA, 15 bp, Homo sapiens
gctcgtctccctatc

SEQ ID NO: 353273 - DNA, 15 bp, Homo sapiens
tgctcgtctccctat

SEQ ID NO: 353274 - DNA, 15 bp, Homo sapiens
ttgctcgtctcccta

SEQ ID NO: 353275 - DNA, 15 bp, Homo sapiens
tttgctcgtctccct

SEQ ID NO: 353276 - DNA, 15 bp, Homo sapiens
ctttgctcgtctccc

SEQ ID NO: 353277 - DNA, 15 bp, Homo sapiens
cctttgctcgtctcc

SEQ ID NO: 353278 - DNA, 15 bp, Homo sapiens
acctttgctcgtctc

SEQ ID NO: 353279 - DNA, 15 bp, Homo sapiens
gacctttgctcgtct

SEQ ID NO: 353280 - DNA, 15 bp, Homo sapiens
tgacctttgctcgtc

SEQ ID NO: 353281 - DNA, 15 bp, Homo sapiens
ttgacctttgctcgt

SEQ ID NO: 353282 - DNA, 15 bp, Homo sapiens
cttgacctttgctcg

SEQ ID NO: 353283 - DNA, 15 bp, Homo sapiens
ccttgacctttgctc

SEQ ID NO: 353284 - DNA, 15 bp, Homo sapiens
accttgacctttgct

SEQ ID NO: 353285 - DNA, 15 bp, Homo sapiens
gaccttgacctttgc

SEQ ID NO: 353286 - DNA, 15 bp, Homo sapiens
tgaccttgacctttg

SEQ ID NO: 353287 - DNA, 15 bp, Homo sapiens
ctgaccttgaccttt

SEQ ID NO: 353288 - DNA, 15 bp, Homo sapiens
cctgaccttgacctt

SEQ ID NO: 353289 - DNA, 15 bp, Homo sapiens
tcctgaccttgacct

SEQ ID NO: 353290 - DNA, 15 bp, Homo sapiens
ctcctgaccttgacc

SEQ ID NO: 353291 - DNA, 15 bp, Homo sapiens
cctcctgaccttgac

SEQ ID NO: 353292 - DNA, 15 bp, Homo sapiens
gcctcctgaccttga

SEQ ID NO: 353293 - DNA, 15 bp, Homo sapiens
tgcctcctgaccttg

SEQ ID NO: 353294 - DNA, 15 bp, Homo sapiens
ctgcctcctgacctt

SEQ ID NO: 353295 - DNA, 15 bp, Homo sapiens
cctgcctcctgacct

SEQ ID NO: 353296 - DNA, 15 bp, Homo sapiens
tcctgcctcctgacc

SEQ ID NO: 353297 - DNA, 15 bp, Homo sapiens
ttcctgcctcctgac

SEQ ID NO: 353298 - DNA, 15 bp, Homo sapiens
attcctgcctcctga

SEQ ID NO: 353299 - DNA, 15 bp, Homo sapiens
tattcctgcctcctg

SEQ ID NO: 353300 - DNA, 15 bp, Homo sapiens
ttattcctgcctcct

SEQ ID NO: 353301 - DNA, 15 bp, Homo sapiens
cttattcctgcctcc

SEQ ID NO: 353302 - DNA, 15 bp, Homo sapiens
acttattcctgcctc

SEQ ID NO: 353303 - DNA, 15 bp, Homo sapiens
aacttattcctgcct

SEQ ID NO: 353304 - DNA, 15 bp, Homo sapiens
aaacttattcctgcc

SEQ ID NO: 353305 - DNA, 15 bp, Homo sapiens
caaacttattcctgc

SEQ ID NO: 353306 - DNA, 15 bp, Homo sapiens
acaaacttattcctg

SEQ ID NO: 353307 - DNA, 15 bp, Homo sapiens
cacaaacttattcct

SEQ ID NO: 353308 - DNA, 15 bp, Homo sapiens
ccacaaacttattcc

SEQ ID NO: 353309 - DNA, 15 bp, Homo sapiens
accacaaacttattc

SEQ ID NO: 353310 - DNA, 15 bp, Homo sapiens
caccacaaacttatt

SEQ ID NO: 353311 - DNA, 15 bp, Homo sapiens
acaccacaaacttat

SEQ ID NO: 353312 - DNA, 15 bp, Homo sapiens
aacaccacaaactta

SEQ ID NO: 353313 - DNA, 15 bp, Homo sapiens
aaacaccacaaactt

SEQ ID NO: 353314 - DNA, 15 bp, Homo sapiens
caaacaccacaaact

SEQ ID NO: 353315 - DNA, 15 bp, Homo sapiens
tcaaacaccacaaac

SEQ ID NO: 353316 - DNA, 15 bp, Homo sapiens
ttcaaacaccacaaa

SEQ ID NO: 353317 - DNA, 15 bp, Homo sapiens
cttcaaacaccacaa

SEQ ID NO: 353318 - DNA, 15 bp, Homo sapiens
ccttcaaacaccaca

SEQ ID NO: 353319 - DNA, 15 bp, Homo sapiens
tccttcaaacaccac

SEQ ID NO: 353320 - DNA, 15 bp, Homo sapiens
atccttcaaacacca

SEQ ID NO: 353321 - DNA, 15 bp, Homo sapiens
catccttcaaacacc

SEQ ID NO: 353322 - DNA, 15 bp, Homo sapiens
ccatccttcaaacac

SEQ ID NO: 353323 - DNA, 15 bp, Homo sapiens
tccatccttcaaaca

SEQ ID NO: 353324 - DNA, 15 bp, Homo sapiens
ttccatccttcaaac

SEQ ID NO: 353325 - DNA, 15 bp, Homo sapiens
cttccatccttcaaa

SEQ ID NO: 353326 - DNA, 15 bp, Homo sapiens
tcttccatccttcaa

SEQ ID NO: 353327 - DNA, 15 bp, Homo sapiens
ttcttccatccttca

SEQ ID NO: 353328 - DNA, 15 bp, Homo sapiens
tttcttccatccttc

SEQ ID NO: 353329 - DNA, 15 bp, Homo sapiens
ctttcttccatcctt

SEQ ID NO: 353330 - DNA, 15 bp, Homo sapiens
cctttcttccatcct

SEQ ID NO: 353331 - DNA, 15 bp, Homo sapiens
gcctttcttccatcc

SEQ ID NO: 353332 - DNA, 15 bp, Homo sapiens
ggcctttcttccatc

SEQ ID NO: 353333 - DNA, 15 bp, Homo sapiens
tggcctttcttccat

SEQ ID NO: 353334 - DNA, 15 bp, Homo sapiens
ctggcctttcttcca

SEQ ID NO: 353335 - DNA, 15 bp, Homo sapiens
actggcctttcttcc

SEQ ID NO: 353336 - DNA, 15 bp, Homo sapiens
cactggcctttcttc

SEQ ID NO: 353337 - DNA, 15 bp, Homo sapiens
ccactggcctttctt

SEQ ID NO: 353338 - DNA, 15 bp, Homo sapiens
gccactggcctttct

SEQ ID NO: 353339 - DNA, 15 bp, Homo sapiens
tgccactggcctttc

SEQ ID NO: 353340 - DNA, 15 bp, Homo sapiens
gtgccactggccttt

SEQ ID NO: 353341 - DNA, 15 bp, Homo sapiens
agtgccactggcctt

SEQ ID NO: 353342 - DNA, 15 bp, Homo sapiens
cagtgccactggcct

SEQ ID NO: 353343 - DNA, 15 bp, Homo sapiens
ccagtgccactggcc

SEQ ID NO: 353344 - DNA, 15 bp, Homo sapiens
cccagtgccactggc

SEQ ID NO: 353345 - DNA, 15 bp, Homo sapiens
ccccagtgccactgg

SEQ ID NO: 353346 - DNA, 15 bp, Homo sapiens
tccccagtgccactg

SEQ ID NO: 353347 - DNA, 15 bp, Homo sapiens
ttccccagtgccact

SEQ ID NO: 353348 - DNA, 15 bp, Homo sapiens
tttccccagtgccac

SEQ ID NO: 353349 - DNA, 15 bp, Homo sapiens
ctttccccagtgcca

SEQ ID NO: 353350 - DNA, 15 bp, Homo sapiens
cctttccccagtgcc

SEQ ID NO: 353351 - DNA, 15 bp, Homo sapiens
ccctttccccagtgc

SEQ ID NO: 353352 - DNA, 15 bp, Homo sapiens
accctttccccagtg

SEQ ID NO: 353353 - DNA, 15 bp, Homo sapiens
taccctttccccagt

SEQ ID NO: 353354 - DNA, 15 bp, Homo sapiens
ctaccctttccccag

SEQ ID NO: 353355 - DNA, 15 bp, Homo sapiens
actaccctttcccca

SEQ ID NO: 353356 - DNA, 15 bp, Homo sapiens
tactaccctttcccc

SEQ ID NO: 353357 - DNA, 15 bp, Homo sapiens
atactaccctttccc

SEQ ID NO: 353358 - DNA, 15 bp, Homo sapiens
catactaccctttcc

SEQ ID NO: 353359 - DNA, 15 bp, Homo sapiens
tcatactaccctttc

SEQ ID NO: 353360 - DNA, 15 bp, Homo sapiens
ctcatactacccttt

SEQ ID NO: 353361 - DNA, 15 bp, Homo sapiens
tctcatactaccctt

SEQ ID NO: 353362 - DNA, 15 bp, Homo sapiens
atctcatactaccct

SEQ ID NO: 353363 - DNA, 15 bp, Homo sapiens
catctcatactaccc

SEQ ID NO: 353364 - DNA, 15 bp, Homo sapiens
tcatctcatactacc

SEQ ID NO: 353365 - DNA, 15 bp, Homo sapiens
ctcatctcatactac

SEQ ID NO: 353366 - DNA, 15 bp, Homo sapiens
tctcatctcatacta

SEQ ID NO: 353367 - DNA, 15 bp, Homo sapiens
atctcatctcatact

SEQ ID NO: 353368 - DNA, 15 bp, Homo sapiens
aatctcatctcatac

SEQ ID NO: 353369 - DNA, 15 bp, Homo sapiens
taatctcatctcata

SEQ ID NO: 353370 - DNA, 15 bp, Homo sapiens
ctaatctcatctcat

SEQ ID NO: 353371 - DNA, 15 bp, Homo sapiens
tctaatctcatctca

SEQ ID NO: 353372 - DNA, 15 bp, Homo sapiens
ctctaatctcatctc

SEQ ID NO: 353373 - DNA, 15 bp, Homo sapiens
tctctaatctcatct

SEQ ID NO: 353374 - DNA, 15 bp, Homo sapiens
gtctctaatctcatc

SEQ ID NO: 353375 - DNA, 15 bp, Homo sapiens
cgtctctaatctcat

SEQ ID NO: 353376 - DNA, 15 bp, Homo sapiens
ccgtctctaatctca

SEQ ID NO: 353377 - DNA, 15 bp, Homo sapiens
tccgtctctaatctc

SEQ ID NO: 353378 - DNA, 15 bp, Homo sapiens
ctccgtctctaatct

SEQ ID NO: 353379 - DNA, 15 bp, Homo sapiens
tctccgtctctaatc

SEQ ID NO: 353380 - DNA, 15 bp, Homo sapiens
gtctccgtctctaat

SEQ ID NO: 353381 - DNA, 15 bp, Homo sapiens
tgtctccgtctctaa

SEQ ID NO: 353382 - DNA, 15 bp, Homo sapiens
ctgtctccgtctcta

SEQ ID NO: 353383 - DNA, 15 bp, Homo sapiens
cctgtctccgtctct

SEQ ID NO: 353384 - DNA, 15 bp, Homo sapiens
ccctgtctccgtctc

SEQ ID NO: 353385 - DNA, 15 bp, Homo sapiens
cccctgtctccgtct

SEQ ID NO: 353386 - DNA, 15 bp, Homo sapiens
tcccctgtctccgtc

SEQ ID NO: 353387 - DNA, 15 bp, Homo sapiens
gtcccctgtctccgt

SEQ ID NO: 353388 - DNA, 15 bp, Homo sapiens
cgtcccctgtctccg

SEQ ID NO: 353389 - DNA, 15 bp, Homo sapiens
acgtcccctgtctcc

SEQ ID NO: 353390 - DNA, 15 bp, Homo sapiens
cacgtcccctgtctc

SEQ ID NO: 353391 - DNA, 15 bp, Homo sapiens
ccacgtcccctgtct

SEQ ID NO: 353392 - DNA, 15 bp, Homo sapiens
accacgtcccctgtc

SEQ ID NO: 353393 - DNA, 15 bp, Homo sapiens
taccacgtcccctgt

SEQ ID NO: 353394 - DNA, 15 bp, Homo sapiens
ttaccacgtcccctg

SEQ ID NO: 353395 - DNA, 15 bp, Homo sapiens
cttaccacgtcccct

SEQ ID NO: 353396 - DNA, 15 bp, Homo sapiens
tcttaccacgtcccc

SEQ ID NO: 353397 - DNA, 15 bp, Homo sapiens
ttcttaccacgtccc

SEQ ID NO: 353398 - DNA, 15 bp, Homo sapiens
cttcttaccacgtcc

SEQ ID NO: 353399 - DNA, 15 bp, Homo sapiens
acttcttaccacgtc

SEQ ID NO: 353400 - DNA, 15 bp, Homo sapiens
cacttcttaccacgt

SEQ ID NO: 353401 - DNA, 15 bp, Homo sapiens
acacttcttaccacg

SEQ ID NO: 353402 - DNA, 15 bp, Homo sapiens
cacacttcttaccac

SEQ ID NO: 353403 - DNA, 15 bp, Homo sapiens
ccacacttcttacca

SEQ ID NO: 353404 - DNA, 15 bp, Homo sapiens
cccacacttcttacc

SEQ ID NO: 353405 - DNA, 15 bp, Homo sapiens
acccacacttcttac

SEQ ID NO: 353406 - DNA, 15 bp, Homo sapiens
aacccacacttctta

SEQ ID NO: 353407 - DNA, 15 bp, Homo sapiens
aaacccacacttctt

SEQ ID NO: 353408 - DNA, 15 bp, Homo sapiens
aaaacccacacttct

SEQ ID NO: 353409 - DNA, 15 bp, Homo sapiens
taaaacccacacttc

SEQ ID NO: 353410 - DNA, 15 bp, Homo sapiens
ctaaaacccacactt

SEQ ID NO: 353411 - DNA, 15 bp, Homo sapiens
actaaaacccacact

SEQ ID NO: 353412 - DNA, 15 bp, Homo sapiens
gactaaaacccacac

SEQ ID NO: 353413 - DNA, 15 bp, Homo sapiens
ggactaaaacccaca

SEQ ID NO: 353414 - DNA, 15 bp, Homo sapiens
aggactaaaacccac

SEQ ID NO: 353415 - DNA, 15 bp, Homo sapiens
taggactaaaaccca

SEQ ID NO: 353416 - DNA, 15 bp, Homo sapiens
ataggactaaaaccc

SEQ ID NO: 353417 - DNA, 15 bp, Homo sapiens
tataggactaaaacc

SEQ ID NO: 353418 - DNA, 15 bp, Homo sapiens
atataggactaaaac

SEQ ID NO: 353419 - DNA, 15 bp, Homo sapiens
aatataggactaaaa

SEQ ID NO: 353420 - DNA, 15 bp, Homo sapiens
taatataggactaaa

SEQ ID NO: 353421 - DNA, 15 bp, Homo sapiens
ctaatataggactaa

SEQ ID NO: 353422 - DNA, 15 bp, Homo sapiens
cctaatataggacta

SEQ ID NO: 353423 - DNA, 15 bp, Homo sapiens
tcctaatataggact

SEQ ID NO: 353424 - DNA, 15 bp, Homo sapiens
ttcctaatataggac

SEQ ID NO: 353425 - DNA, 15 bp, Homo sapiens
cttcctaatatagga

SEQ ID NO: 353426 - DNA, 15 bp, Homo sapiens
gcttcctaatatagg

SEQ ID NO: 353427 - DNA, 15 bp, Homo sapiens
ggcttcctaatatag

SEQ ID NO: 353428 - DNA, 15 bp, Homo sapiens
aggcttcctaatata

SEQ ID NO: 353429 - DNA, 15 bp, Homo sapiens
aaggcttcctaatat

SEQ ID NO: 353430 - DNA, 15 bp, Homo sapiens
aaaggcttcctaata

SEQ ID NO: 353431 - DNA, 15 bp, Homo sapiens
caaaggcttcctaat

SEQ ID NO: 353432 - DNA, 15 bp, Homo sapiens
ccaaaggcttcctaa

SEQ ID NO: 353433 - DNA, 15 bp, Homo sapiens
tccaaaggcttccta

SEQ ID NO: 353434 - DNA, 15 bp, Homo sapiens
ttccaaaggcttcct

SEQ ID NO: 353435 - DNA, 15 bp, Homo sapiens
cttccaaaggcttcc

SEQ ID NO: 353436 - DNA, 15 bp, Homo sapiens
tcttccaaaggcttc

SEQ ID NO: 353437 - DNA, 15 bp, Homo sapiens
atcttccaaaggctt

SEQ ID NO: 353438 - DNA, 15 bp, Homo sapiens
aatcttccaaaggct

SEQ ID NO: 353439 - DNA, 15 bp, Homo sapiens
aaatcttccaaaggc

SEQ ID NO: 353440 - DNA, 15 bp, Homo sapiens
aaaatcttccaaagg

SEQ ID NO: 353441 - DNA, 15 bp, Homo sapiens
taaaatcttccaaag

SEQ ID NO: 353442 - DNA, 15 bp, Homo sapiens
ttaaaatcttccaaa

SEQ ID NO: 353443 - DNA, 15 bp, Homo sapiens
cttaaaatcttccaa

SEQ ID NO: 353444 - DNA, 15 bp, Homo sapiens
acttaaaatcttcca

SEQ ID NO: 353445 - DNA, 15 bp, Homo sapiens
cacttaaaatcttcc

SEQ ID NO: 353446 - DNA, 15 bp, Homo sapiens
tcacttaaaatcttc

SEQ ID NO: 353447 - DNA, 15 bp, Homo sapiens
ctcacttaaaatctt

SEQ ID NO: 353448 - DNA, 15 bp, Homo sapiens
cctcacttaaaatct

SEQ ID NO: 353449 - DNA, 15 bp, Homo sapiens
tcctcacttaaaatc

SEQ ID NO: 353450 - DNA, 15 bp, Homo sapiens
ttcctcacttaaaat

SEQ ID NO: 353451 - DNA, 15 bp, Homo sapiens
tttcctcacttaaaa

SEQ ID NO: 353452 - DNA, 15 bp, Homo sapiens
atttcctcacttaaa

SEQ ID NO: 353453 - DNA, 15 bp, Homo sapiens
catttcctcacttaa

SEQ ID NO: 353454 - DNA, 15 bp, Homo sapiens
acatttcctcactta

SEQ ID NO: 353455 - DNA, 15 bp, Homo sapiens
gacatttcctcactt

SEQ ID NO: 353456 - DNA, 15 bp, Homo sapiens
tgacatttcctcact

SEQ ID NO: 353457 - DNA, 15 bp, Homo sapiens
atgacatttcctcac

SEQ ID NO: 353458 - DNA, 15 bp, Homo sapiens
gatgacatttcctca

SEQ ID NO: 353459 - DNA, 15 bp, Homo sapiens
tgatgacatttcctc

SEQ ID NO: 353460 - DNA, 15 bp, Homo sapiens
atgatgacatttcct

SEQ ID NO: 353461 - DNA, 15 bp, Homo sapiens
aatgatgacatttcc

SEQ ID NO: 353462 - DNA, 15 bp, Homo sapiens
taatgatgacatttc

SEQ ID NO: 353463 - DNA, 15 bp, Homo sapiens
ctaatgatgacattt

SEQ ID NO: 353464 - DNA, 15 bp, Homo sapiens
actaatgatgacatt

SEQ ID NO: 353465 - DNA, 15 bp, Homo sapiens
aactaatgatgacat

SEQ ID NO: 353466 - DNA, 15 bp, Homo sapiens
gaactaatgatgaca

SEQ ID NO: 353467 - DNA, 15 bp, Homo sapiens
agaactaatgatgac

SEQ ID NO: 353468 - DNA, 15 bp, Homo sapiens
aagaactaatgatga

SEQ ID NO: 353469 - DNA, 15 bp, Homo sapiens
taagaactaatgatg

SEQ ID NO: 353470 - DNA, 15 bp, Homo sapiens
ctaagaactaatgat

SEQ ID NO: 353471 - DNA, 15 bp, Homo sapiens
actaagaactaatga

SEQ ID NO: 353472 - DNA, 15 bp, Homo sapiens
aactaagaactaatg

SEQ ID NO: 353473 - DNA, 15 bp, Homo sapiens
aaactaagaactaat

SEQ ID NO: 353474 - DNA, 15 bp, Homo sapiens
taaactaagaactaa

SEQ ID NO: 353475 - DNA, 15 bp, Homo sapiens
ttaaactaagaacta

SEQ ID NO: 353476 - DNA, 15 bp, Homo sapiens
tttaaactaagaact

SEQ ID NO: 353477 - DNA, 15 bp, Homo sapiens
ttttaaactaagaac

SEQ ID NO: 353478 - DNA, 15 bp, Homo sapiens
cttttaaactaagaa

SEQ ID NO: 353479 - DNA, 15 bp, Homo sapiens
tcttttaaactaaga

SEQ ID NO: 353480 - DNA, 15 bp, Homo sapiens
atcttttaaactaag

SEQ ID NO: 353481 - DNA, 15 bp, Homo sapiens
catcttttaaactaa

SEQ ID NO: 353482 - DNA, 15 bp, Homo sapiens
acatcttttaaacta

SEQ ID NO: 353483 - DNA, 15 bp, Homo sapiens
gacatcttttaaact

SEQ ID NO: 353484 - DNA, 15 bp, Homo sapiens
ggacatcttttaaac

SEQ ID NO: 353485 - DNA, 15 bp, Homo sapiens
gggacatcttttaaa

SEQ ID NO: 353486 - DNA, 15 bp, Homo sapiens
agggacatcttttaa

SEQ ID NO: 353487 - DNA, 15 bp, Homo sapiens
cagggacatctttta

SEQ ID NO: 353488 - DNA, 15 bp, Homo sapiens
ccagggacatctttt

SEQ ID NO: 353489 - DNA, 15 bp, Homo sapiens
accagggacatcttt

SEQ ID NO: 353490 - DNA, 15 bp, Homo sapiens
caccagggacatctt

SEQ ID NO: 353491 - DNA, 15 bp, Homo sapiens
acaccagggacatct

SEQ ID NO: 353492 - DNA, 15 bp, Homo sapiens
gacaccagggacatc

SEQ ID NO: 353493 - DNA, 15 bp, Homo sapiens
agacaccagggacat

SEQ ID NO: 353494 - DNA, 15 bp, Homo sapiens
cagacaccagggaca

SEQ ID NO: 353495 - DNA, 15 bp, Homo sapiens
ccagacaccagggac

SEQ ID NO: 353496 - DNA, 15 bp, Homo sapiens
tccagacaccaggga

SEQ ID NO: 353497 - DNA, 15 bp, Homo sapiens
atccagacaccaggg

SEQ ID NO: 353498 - DNA, 15 bp, Homo sapiens
catccagacaccagg

SEQ ID NO: 353499 - DNA, 15 bp, Homo sapiens
ccatccagacaccag

SEQ ID NO: 353500 - DNA, 15 bp, Homo sapiens
tccatccagacacca

SEQ ID NO: 353501 - DNA, 15 bp, Homo sapiens
ctccatccagacacc

SEQ ID NO: 353502 - DNA, 15 bp, Homo sapiens
tctccatccagacac

SEQ ID NO: 353503 - DNA, 15 bp, Homo sapiens
ctctccatccagaca

SEQ ID NO: 353504 - DNA, 15 bp, Homo sapiens
gctctccatccagac

SEQ ID NO: 353505 - DNA, 15 bp, Homo sapiens
tgctctccatccaga

SEQ ID NO: 353506 - DNA, 15 bp, Homo sapiens
atgctctccatccag

SEQ ID NO: 353507 - DNA, 15 bp, Homo sapiens
aatgctctccatcca

SEQ ID NO: 353508 - DNA, 15 bp, Homo sapiens
gaatgctctccatcc

SEQ ID NO: 353509 - DNA, 15 bp, Homo sapiens
agaatgctctccatc

SEQ ID NO: 353510 - DNA, 15 bp, Homo sapiens
gagaatgctctccat

SEQ ID NO: 353511 - DNA, 15 bp, Homo sapiens
cgagaatgctctcca

SEQ ID NO: 353512 - DNA, 15 bp, Homo sapiens
ccgagaatgctctcc

SEQ ID NO: 353513 - DNA, 15 bp, Homo sapiens
cccgagaatgctctc

SEQ ID NO: 353514 - DNA, 15 bp, Homo sapiens
tcccgagaatgctct

SEQ ID NO: 353515 - DNA, 15 bp, Homo sapiens
ctcccgagaatgctc

SEQ ID NO: 353516 - DNA, 15 bp, Homo sapiens
cctcccgagaatgct

SEQ ID NO: 353517 - DNA, 15 bp, Homo sapiens
tcctcccgagaatgc

SEQ ID NO: 353518 - DNA, 15 bp, Homo sapiens
ttcctcccgagaatg

SEQ ID NO: 353519 - DNA, 15 bp, Homo sapiens
cttcctcccgagaat

SEQ ID NO: 353520 - DNA, 15 bp, Homo sapiens
ccttcctcccgagaa

SEQ ID NO: 353521 - DNA, 15 bp, Homo sapiens
tccttcctcccgaga

SEQ ID NO: 353522 - DNA, 15 bp, Homo sapiens
ctccttcctcccgag

SEQ ID NO: 353523 - DNA, 15 bp, Homo sapiens
actccttcctcccga

SEQ ID NO: 353524 - DNA, 15 bp, Homo sapiens
cactccttcctcccg

SEQ ID NO: 353525 - DNA, 15 bp, Homo sapiens
ccactccttcctccc

SEQ ID NO: 353526 - DNA, 15 bp, Homo sapiens
tccactccttcctcc

SEQ ID NO: 353527 - DNA, 15 bp, Homo sapiens
ttccactccttcctc

SEQ ID NO: 353528 - DNA, 15 bp, Homo sapiens
cttccactccttcct

SEQ ID NO: 353529 - DNA, 15 bp, Homo sapiens
acttccactccttcc

SEQ ID NO: 353530 - DNA, 15 bp, Homo sapiens
cacttccactccttc

SEQ ID NO: 353531 - DNA, 15 bp, Homo sapiens
ccacttccactcctt

SEQ ID NO: 353532 - DNA, 15 bp, Homo sapiens
tccacttccactcct

SEQ ID NO: 353533 - DNA, 15 bp, Homo sapiens
ttccacttccactcc

SEQ ID NO: 353534 - DNA, 15 bp, Homo sapiens
cttccacttccactc

SEQ ID NO: 353535 - DNA, 15 bp, Homo sapiens
ccttccacttccact

SEQ ID NO: 353536 - DNA, 15 bp, Homo sapiens
tccttccacttccac

SEQ ID NO: 353537 - DNA, 15 bp, Homo sapiens
atccttccacttcca

SEQ ID NO: 353538 - DNA, 15 bp, Homo sapiens
catccttccacttcc

SEQ ID NO: 353539 - DNA, 15 bp, Homo sapiens
tcatccttccacttc

SEQ ID NO: 353540 - DNA, 15 bp, Homo sapiens
ttcatccttccactt

SEQ ID NO: 353541 - DNA, 15 bp, Homo sapiens
cttcatccttccact

SEQ ID NO: 353542 - DNA, 15 bp, Homo sapiens
acttcatccttccac

SEQ ID NO: 353543 - DNA, 15 bp, Homo sapiens
cacttcatccttcca

SEQ ID NO: 353544 - DNA, 15 bp, Homo sapiens
tcacttcatccttcc

SEQ ID NO: 353545 - DNA, 15 bp, Homo sapiens
ctcacttcatccttc

SEQ ID NO: 353546 - DNA, 15 bp, Homo sapiens
tctcacttcatcctt

SEQ ID NO: 353547 - DNA, 15 bp, Homo sapiens
ttctcacttcatcct

SEQ ID NO: 353548 - DNA, 15 bp, Homo sapiens
gttctcacttcatcc

SEQ ID NO: 353549 - DNA, 15 bp, Homo sapiens
agttctcacttcatc

SEQ ID NO: 353550 - DNA, 15 bp, Homo sapiens
aagttctcacttcat

SEQ ID NO: 353551 - DNA, 15 bp, Homo sapiens
gaagttctcacttca

SEQ ID NO: 353552 - DNA, 15 bp, Homo sapiens
agaagttctcacttc

SEQ ID NO: 353553 - DNA, 15 bp, Homo sapiens
gagaagttctcactt

SEQ ID NO: 353554 - DNA, 15 bp, Homo sapiens
agagaagttctcact

SEQ ID NO: 353555 - DNA, 15 bp, Homo sapiens
cagagaagttctcac

SEQ ID NO: 353556 - DNA, 15 bp, Homo sapiens
tcagagaagttctca

SEQ ID NO: 353557 - DNA, 15 bp, Homo sapiens
gtcagagaagttctc

SEQ ID NO: 353558 - DNA, 15 bp, Homo sapiens
agtcagagaagttct

SEQ ID NO: 353559 - DNA, 15 bp, Homo sapiens
gagtcagagaagttc

SEQ ID NO: 353560 - DNA, 15 bp, Homo sapiens
agagtcagagaagtt

SEQ ID NO: 353561 - DNA, 15 bp, Homo sapiens
aagagtcagagaagt

SEQ ID NO: 353562 - DNA, 15 bp, Homo sapiens
caagagtcagagaag

SEQ ID NO: 353563 - DNA, 15 bp, Homo sapiens
gcaagagtcagagaa

SEQ ID NO: 353564 - DNA, 15 bp, Homo sapiens
agcaagagtcagaga

SEQ ID NO: 353565 - DNA, 15 bp, Homo sapiens
gagcaagagtcagag

SEQ ID NO: 353566 - DNA, 15 bp, Homo sapiens
agagcaagagtcaga

SEQ ID NO: 353567 - DNA, 15 bp, Homo sapiens
cagagcaagagtcag

SEQ ID NO: 353568 - DNA, 15 bp, Homo sapiens
tcagagcaagagtca

SEQ ID NO: 353569 - DNA, 15 bp, Homo sapiens
gtcagagcaagagtc

SEQ ID NO: 353570 - DNA, 15 bp, Homo sapiens
tgtcagagcaagagt

SEQ ID NO: 353571 - DNA, 15 bp, Homo sapiens
atgtcagagcaagag

SEQ ID NO: 353572 - DNA, 15 bp, Homo sapiens
aatgtcagagcaaga

SEQ ID NO: 353573 - DNA, 15 bp, Homo sapiens
caatgtcagagcaag

SEQ ID NO: 353574 - DNA, 15 bp, Homo sapiens
ccaatgtcagagcaa

SEQ ID NO: 353575 - DNA, 15 bp, Homo sapiens
tccaatgtcagagca

SEQ ID NO: 353576 - DNA, 15 bp, Homo sapiens
ttccaatgtcagagc

SEQ ID NO: 353577 - DNA, 15 bp, Homo sapiens
attccaatgtcagag

SEQ ID NO: 353578 - DNA, 15 bp, Homo sapiens
cattccaatgtcaga

SEQ ID NO: 353579 - DNA, 15 bp, Homo sapiens
acattccaatgtcag

SEQ ID NO: 353580 - DNA, 15 bp, Homo sapiens
gacattccaatgtca

SEQ ID NO: 353581 - DNA, 15 bp, Homo sapiens
ggacattccaatgtc

SEQ ID NO: 353582 - DNA, 15 bp, Homo sapiens
gggacattccaatgt

SEQ ID NO: 353583 - DNA, 15 bp, Homo sapiens
agggacattccaatg

SEQ ID NO: 353584 - DNA, 15 bp, Homo sapiens
gagggacattccaat

SEQ ID NO: 353585 - DNA, 15 bp, Homo sapiens
tgagggacattccaa

SEQ ID NO: 353586 - DNA, 15 bp, Homo sapiens
atgagggacattcca

SEQ ID NO: 353587 - DNA, 15 bp, Homo sapiens
tatgagggacattcc

SEQ ID NO: 353588 - DNA, 15 bp, Homo sapiens
ctatgagggacattc

SEQ ID NO: 353589 - DNA, 15 bp, Homo sapiens
cctatgagggacatt

SEQ ID NO: 353590 - DNA, 15 bp, Homo sapiens
tcctatgagggacat

SEQ ID NO: 353591 - DNA, 15 bp, Homo sapiens
gtcctatgagggaca

SEQ ID NO: 353592 - DNA, 15 bp, Homo sapiens
cgtcctatgagggac

SEQ ID NO: 353593 - DNA, 15 bp, Homo sapiens
gcgtcctatgaggga

SEQ ID NO: 353594 - DNA, 15 bp, Homo sapiens
ggcgtcctatgaggg

SEQ ID NO: 353595 - DNA, 15 bp, Homo sapiens
tggcgtcctatgagg

SEQ ID NO: 353596 - DNA, 15 bp, Homo sapiens
atggcgtcctatgag

SEQ ID NO: 353597 - DNA, 15 bp, Homo sapiens
tatggcgtcctatga

SEQ ID NO: 353598 - DNA, 15 bp, Homo sapiens
ctatggcgtcctatg

SEQ ID NO: 353599 - DNA, 15 bp, Homo sapiens
actatggcgtcctat

SEQ ID NO: 353600 - DNA, 15 bp, Homo sapiens
cactatggcgtccta

SEQ ID NO: 353601 - DNA, 15 bp, Homo sapiens
ccactatggcgtcct

SEQ ID NO: 353602 - DNA, 15 bp, Homo sapiens
tccactatggcgtcc

SEQ ID NO: 353603 - DNA, 15 bp, Homo sapiens
ttccactatggcgtc

SEQ ID NO: 353604 - DNA, 15 bp, Homo sapiens
gttccactatggcgt

SEQ ID NO: 353605 - DNA, 15 bp, Homo sapiens
tgttccactatggcg

SEQ ID NO: 353606 - DNA, 15 bp, Homo sapiens
gtgttccactatggc

SEQ ID NO: 353607 - DNA, 15 bp, Homo sapiens
tgtgttccactatgg

SEQ ID NO: 353608 - DNA, 15 bp, Homo sapiens
ctgtgttccactatg

SEQ ID NO: 353609 - DNA, 15 bp, Homo sapiens
gctgtgttccactat

SEQ ID NO: 353610 - DNA, 15 bp, Homo sapiens
tgctgtgttccacta

SEQ ID NO: 353611 - DNA, 15 bp, Homo sapiens
ctgctgtgttccact

SEQ ID NO: 353612 - DNA, 15 bp, Homo sapiens
tctgctgtgttccac

SEQ ID NO: 353613 - DNA, 15 bp, Homo sapiens
gtctgctgtgttcca

SEQ ID NO: 353614 - DNA, 15 bp, Homo sapiens
agtctgctgtgttcc

SEQ ID NO: 353615 - DNA, 15 bp, Homo sapiens
tagtctgctgtgttc

SEQ ID NO: 353616 - DNA, 15 bp, Homo sapiens
ttagtctgctgtgtt

SEQ ID NO: 353617 - DNA, 15 bp, Homo sapiens
tttagtctgctgtgt

SEQ ID NO: 353618 - DNA, 15 bp, Homo sapiens
atttagtctgctgtg

SEQ ID NO: 353619 - DNA, 15 bp, Homo sapiens
aatttagtctgctgt

SEQ ID NO: 353620 - DNA, 15 bp, Homo sapiens
caatttagtctgctg

SEQ ID NO: 353621 - DNA, 15 bp, Homo sapiens
acaatttagtctgct

SEQ ID NO: 353622 - DNA, 15 bp, Homo sapiens
gacaatttagtctgc

SEQ ID NO: 353623 - DNA, 15 bp, Homo sapiens
ggacaatttagtctg

SEQ ID NO: 353624 - DNA, 15 bp, Homo sapiens
gggacaatttagtct

SEQ ID NO: 353625 - DNA, 15 bp, Homo sapiens
agggacaatttagtc

SEQ ID NO: 353626 - DNA, 15 bp, Homo sapiens
tagggacaatttagt

SEQ ID NO: 353627 - DNA, 15 bp, Homo sapiens
ctagggacaatttag

SEQ ID NO: 353628 - DNA, 15 bp, Homo sapiens
tctagggacaattta

SEQ ID NO: 353629 - DNA, 15 bp, Homo sapiens
ttctagggacaattt

SEQ ID NO: 353630 - DNA, 15 bp, Homo sapiens
tttctagggacaatt

SEQ ID NO: 353631 - DNA, 15 bp, Homo sapiens
atttctagggacaat

SEQ ID NO: 353632 - DNA, 15 bp, Homo sapiens
tatttctagggacaa

SEQ ID NO: 353633 - DNA, 15 bp, Homo sapiens
ttatttctagggaca

SEQ ID NO: 353634 - DNA, 15 bp, Homo sapiens
cttatttctagggac

SEQ ID NO: 353635 - DNA, 15 bp, Homo sapiens
tcttatttctaggga

SEQ ID NO: 353636 - DNA, 15 bp, Homo sapiens
ttcttatttctaggg

SEQ ID NO: 353637 - DNA, 15 bp, Homo sapiens
tttcttatttctagg

SEQ ID NO: 353638 - DNA, 15 bp, Homo sapiens
atttcttatttctag

SEQ ID NO: 353639 - DNA, 15 bp, Homo sapiens
tatttcttatttcta

SEQ ID NO: 353640 - DNA, 15 bp, Homo sapiens
ttatttcttatttct

SEQ ID NO: 353641 - DNA, 15 bp, Homo sapiens
cttatttcttatttc

SEQ ID NO: 353642 - DNA, 15 bp, Homo sapiens
ccttatttcttattt

SEQ ID NO: 353643 - DNA, 15 bp, Homo sapiens
tccttatttcttatt

SEQ ID NO: 353644 - DNA, 15 bp, Homo sapiens
atccttatttcttat

SEQ ID NO: 353645 - DNA, 15 bp, Homo sapiens
aatccttatttctta

SEQ ID NO: 353646 - DNA, 15 bp, Homo sapiens
aaatccttatttctt

SEQ ID NO: 353647 - DNA, 15 bp, Homo sapiens
caaatccttatttct

SEQ ID NO: 353648 - DNA, 15 bp, Homo sapiens
ccaaatccttatttc

SEQ ID NO: 353649 - DNA, 15 bp, Homo sapiens
gccaaatccttattt

SEQ ID NO: 353650 - DNA, 15 bp, Homo sapiens
ggccaaatccttatt

SEQ ID NO: 353651 - DNA, 15 bp, Homo sapiens
aggccaaatccttat

SEQ ID NO: 353652 - DNA, 15 bp, Homo sapiens
gaggccaaatcctta

SEQ ID NO: 353653 - DNA, 15 bp, Homo sapiens
agaggccaaatcctt

SEQ ID NO: 353654 - DNA, 15 bp, Homo sapiens
tagaggccaaatcct

SEQ ID NO: 353655 - DNA, 15 bp, Homo sapiens
ctagaggccaaatcc

SEQ ID NO: 353656 - DNA, 15 bp, Homo sapiens
cctagaggccaaatc

SEQ ID NO: 353657 - DNA, 15 bp, Homo sapiens
ccctagaggccaaat

SEQ ID NO: 353658 - DNA, 15 bp, Homo sapiens
accctagaggccaaa

SEQ ID NO: 353659 - DNA, 15 bp, Homo sapiens
taccctagaggccaa

SEQ ID NO: 353660 - DNA, 15 bp, Homo sapiens
ataccctagaggcca

SEQ ID NO: 353661 - DNA, 15 bp, Homo sapiens
aataccctagaggcc

SEQ ID NO: 353662 - DNA, 15 bp, Homo sapiens
aaataccctagaggc

SEQ ID NO: 353663 - DNA, 15 bp, Homo sapiens
aaaataccctagagg

SEQ ID NO: 353664 - DNA, 15 bp, Homo sapiens
aaaaataccctagag

SEQ ID NO: 353665 - DNA, 15 bp, Homo sapiens
gaaaaataccctaga

SEQ ID NO: 353666 - DNA, 15 bp, Homo sapiens
ggaaaaataccctag

SEQ ID NO: 353667 - DNA, 15 bp, Homo sapiens
tggaaaaatacccta

SEQ ID NO: 353668 - DNA, 15 bp, Homo sapiens
gtggaaaaataccct

SEQ ID NO: 353669 - DNA, 15 bp, Homo sapiens
ggtggaaaaataccc

SEQ ID NO: 353670 - DNA, 15 bp, Homo sapiens
aggtggaaaaatacc

SEQ ID NO: 353671 - DNA, 15 bp, Homo sapiens
aaggtggaaaaatac

SEQ ID NO: 353672 - DNA, 15 bp, Homo sapiens
caaggtggaaaaata

SEQ ID NO: 353673 - DNA, 15 bp, Homo sapiens
ccaaggtggaaaaat

SEQ ID NO: 353674 - DNA, 15 bp, Homo sapiens
accaaggtggaaaaa

SEQ ID NO: 353675 - DNA, 15 bp, Homo sapiens
aaccaaggtggaaaa

SEQ ID NO: 353676 - DNA, 15 bp, Homo sapiens
gaaccaaggtggaaa

SEQ ID NO: 353677 - DNA, 15 bp, Homo sapiens
ggaaccaaggtggaa

SEQ ID NO: 353678 - DNA, 15 bp, Homo sapiens
tggaaccaaggtgga

SEQ ID NO: 353679 - DNA, 15 bp, Homo sapiens
ctggaaccaaggtgg

SEQ ID NO: 353680 - DNA, 15 bp, Homo sapiens
tctggaaccaaggtg

SEQ ID NO: 353681 - DNA, 15 bp, Homo sapiens
gtctggaaccaaggt

SEQ ID NO: 353682 - DNA, 15 bp, Homo sapiens
tgtctggaaccaagg

SEQ ID NO: 353683 - DNA, 15 bp, Homo sapiens
ctgtctggaaccaag

SEQ ID NO: 353684 - DNA, 15 bp, Homo sapiens
cctgtctggaaccaa

SEQ ID NO: 353685 - DNA, 15 bp, Homo sapiens
acctgtctggaacca

SEQ ID NO: 353686 - DNA, 15 bp, Homo sapiens
tacctgtctggaacc

SEQ ID NO: 353687 - DNA, 15 bp, Homo sapiens
ttacctgtctggaac

SEQ ID NO: 353688 - DNA, 15 bp, Homo sapiens
tttacctgtctggaa

SEQ ID NO: 353689 - DNA, 15 bp, Homo sapiens
gtttacctgtctgga

SEQ ID NO: 353690 - DNA, 15 bp, Homo sapiens
tgtttacctgtctgg

SEQ ID NO: 353691 - DNA, 15 bp, Homo sapiens
ctgtttacctgtctg

SEQ ID NO: 353692 - DNA, 15 bp, Homo sapiens
gctgtttacctgtct

SEQ ID NO: 353693 - DNA, 15 bp, Homo sapiens
tgctgtttacctgtc

SEQ ID NO: 353694 - DNA, 15 bp, Homo sapiens
ctgctgtttacctgt

SEQ ID NO: 353695 - DNA, 15 bp, Homo sapiens
gctgctgtttacctg

SEQ ID NO: 353696 - DNA, 15 bp, Homo sapiens
tgctgctgtttacct

SEQ ID NO: 353697 - DNA, 15 bp, Homo sapiens
ctgctgctgtttacc

SEQ ID NO: 353698 - DNA, 15 bp, Homo sapiens
cctgctgctgtttac

SEQ ID NO: 353699 - DNA, 15 bp, Homo sapiens
gcctgctgctgttta

SEQ ID NO: 353700 - DNA, 15 bp, Homo sapiens
agcctgctgctgttt

SEQ ID NO: 353701 - DNA, 15 bp, Homo sapiens
aagcctgctgctgtt

SEQ ID NO: 353702 - DNA, 15 bp, Homo sapiens
aaagcctgctgctgt

SEQ ID NO: 353703 - DNA, 15 bp, Homo sapiens
taaagcctgctgctg

SEQ ID NO: 353704 - DNA, 15 bp, Homo sapiens
ctaaagcctgctgct

SEQ ID NO: 353705 - DNA, 15 bp, Homo sapiens
gctaaagcctgctgc

SEQ ID NO: 353706 - DNA, 15 bp, Homo sapiens
agctaaagcctgctg

SEQ ID NO: 353707 - DNA, 15 bp, Homo sapiens
aagctaaagcctgct

SEQ ID NO: 353708 - DNA, 15 bp, Homo sapiens
gaagctaaagcctgc

SEQ ID NO: 353709 - DNA, 15 bp, Homo sapiens
tgaagctaaagcctg

SEQ ID NO: 353710 - DNA, 15 bp, Homo sapiens
atgaagctaaagcct

SEQ ID NO: 353711 - DNA, 15 bp, Homo sapiens
gatgaagctaaagcc

SEQ ID NO: 353712 - DNA, 15 bp, Homo sapiens
ggatgaagctaaagc

SEQ ID NO: 353713 - DNA, 15 bp, Homo sapiens
aggatgaagctaaag

SEQ ID NO: 353714 - DNA, 15 bp, Homo sapiens
caggatgaagctaaa

SEQ ID NO: 353715 - DNA, 15 bp, Homo sapiens
ccaggatgaagctaa

SEQ ID NO: 353716 - DNA, 15 bp, Homo sapiens
tccaggatgaagcta

SEQ ID NO: 353717 - DNA, 15 bp, Homo sapiens
ctccaggatgaagct

SEQ ID NO: 353718 - DNA, 15 bp, Homo sapiens
tctccaggatgaagc

SEQ ID NO: 353719 - DNA, 15 bp, Homo sapiens
ctctccaggatgaag

SEQ ID NO: 353720 - DNA, 15 bp, Homo sapiens
tctctccaggatgaa

SEQ ID NO: 353721 - DNA, 15 bp, Homo sapiens
ctctctccaggatga

SEQ ID NO: 353722 - DNA, 15 bp, Homo sapiens
tctctctccaggatg

SEQ ID NO: 353723 - DNA, 15 bp, Homo sapiens
ctctctctccaggat

SEQ ID NO: 353724 - DNA, 15 bp, Homo sapiens
cctctctctccagga

SEQ ID NO: 353725 - DNA, 15 bp, Homo sapiens
gcctctctctccagg

SEQ ID NO: 353726 - DNA, 15 bp, Homo sapiens
ggcctctctctccag

SEQ ID NO: 353727 - DNA, 15 bp, Homo sapiens
gggcctctctctcca

SEQ ID NO: 353728 - DNA, 15 bp, Homo sapiens
tgggcctctctctcc

SEQ ID NO: 353729 - DNA, 15 bp, Homo sapiens
atgggcctctctctc

SEQ ID NO: 353730 - DNA, 15 bp, Homo sapiens
tatgggcctctctct

SEQ ID NO: 353731 - DNA, 15 bp, Homo sapiens
ttatgggcctctctc

SEQ ID NO: 353732 - DNA, 15 bp, Homo sapiens
attatgggcctctct

SEQ ID NO: 353733 - DNA, 15 bp, Homo sapiens
aattatgggcctctc

SEQ ID NO: 353734 - DNA, 15 bp, Homo sapiens
caattatgggcctct

SEQ ID NO: 353735 - DNA, 15 bp, Homo sapiens
acaattatgggcctc

SEQ ID NO: 353736 - DNA, 15 bp, Homo sapiens
aacaattatgggcct

SEQ ID NO: 353737 - DNA, 15 bp, Homo sapiens
aaacaattatgggcc

SEQ ID NO: 353738 - DNA, 15 bp, Homo sapiens
caaacaattatgggc

SEQ ID NO: 353739 - DNA, 15 bp, Homo sapiens
tcaaacaattatggg

SEQ ID NO: 353740 - DNA, 15 bp, Homo sapiens
ttcaaacaattatgg

SEQ ID NO: 353741 - DNA, 15 bp, Homo sapiens
tttcaaacaattatg

SEQ ID NO: 353742 - DNA, 15 bp, Homo sapiens
atttcaaacaattat

SEQ ID NO: 353743 - DNA, 15 bp, Homo sapiens
tatttcaaacaatta

SEQ ID NO: 353744 - DNA, 15 bp, Homo sapiens
ttatttcaaacaatt

SEQ ID NO: 353745 - DNA, 15 bp, Homo sapiens
attatttcaaacaat

SEQ ID NO: 353746 - DNA, 15 bp, Homo sapiens
aattatttcaaacaa

SEQ ID NO: 353747 - DNA, 15 bp, Homo sapiens
aaattatttcaaaca

SEQ ID NO: 353748 - DNA, 15 bp, Homo sapiens
aaaattatttcaaac

SEQ ID NO: 353749 - DNA, 15 bp, Homo sapiens
gaaaattatttcaaa

SEQ ID NO: 353750 - DNA, 15 bp, Homo sapiens
agaaaattatttcaa

SEQ ID NO: 353751 - DNA, 15 bp, Homo sapiens
aagaaaattatttca

SEQ ID NO: 353752 - DNA, 15 bp, Homo sapiens
gaagaaaattatttc

SEQ ID NO: 353753 - DNA, 15 bp, Homo sapiens
agaagaaaattattt

SEQ ID NO: 353754 - DNA, 15 bp, Homo sapiens
gagaagaaaattatt

SEQ ID NO: 353755 - DNA, 15 bp, Homo sapiens
agagaagaaaattat

SEQ ID NO: 353756 - DNA, 15 bp, Homo sapiens
aagagaagaaaatta

SEQ ID NO: 353757 - DNA, 15 bp, Homo sapiens
gaagagaagaaaatt

SEQ ID NO: 353758 - DNA, 15 bp, Homo sapiens
tgaagagaagaaaat

SEQ ID NO: 353759 - DNA, 15 bp, Homo sapiens
atgaagagaagaaaa

SEQ ID NO: 353760 - DNA, 15 bp, Homo sapiens
aatgaagagaagaaa

SEQ ID NO: 353761 - DNA, 15 bp, Homo sapiens
aaatgaagagaagaa

SEQ ID NO: 353762 - DNA, 15 bp, Homo sapiens
gaaatgaagagaaga

SEQ ID NO: 353763 - DNA, 15 bp, Homo sapiens
ggaaatgaagagaag

SEQ ID NO: 353764 - DNA, 15 bp, Homo sapiens
aggaaatgaagagaa

SEQ ID NO: 353765 - DNA, 15 bp, Homo sapiens
aaggaaatgaagaga

SEQ ID NO: 353766 - DNA, 15 bp, Homo sapiens
aaaggaaatgaagag

SEQ ID NO: 353767 - DNA, 15 bp, Homo sapiens
taaaggaaatgaaga

SEQ ID NO: 353768 - DNA, 15 bp, Homo sapiens
ttaaaggaaatgaag

SEQ ID NO: 353769 - DNA, 15 bp, Homo sapiens
tttaaaggaaatgaa

SEQ ID NO: 353770 - DNA, 15 bp, Homo sapiens
ctttaaaggaaatga

SEQ ID NO: 353771 - DNA, 15 bp, Homo sapiens
actttaaaggaaatg

SEQ ID NO: 353772 - DNA, 15 bp, Homo sapiens
aactttaaaggaaat

SEQ ID NO: 353773 - DNA, 15 bp, Homo sapiens
caactttaaaggaaa

SEQ ID NO: 353774 - DNA, 15 bp, Homo sapiens
ccaactttaaaggaa

SEQ ID NO: 353775 - DNA, 15 bp, Homo sapiens
accaactttaaagga

SEQ ID NO: 353776 - DNA, 15 bp, Homo sapiens
caccaactttaaagg

SEQ ID NO: 353777 - DNA, 15 bp, Homo sapiens
ccaccaactttaaag

SEQ ID NO: 353778 - DNA, 15 bp, Homo sapiens
tccaccaactttaaa

SEQ ID NO: 353779 - DNA, 15 bp, Homo sapiens
ctccaccaactttaa

SEQ ID NO: 353780 - DNA, 15 bp, Homo sapiens
gctccaccaacttta

SEQ ID NO: 353781 - DNA, 15 bp, Homo sapiens
agctccaccaacttt

SEQ ID NO: 353782 - DNA, 15 bp, Homo sapiens
tagctccaccaactt

SEQ ID NO: 353783 - DNA, 15 bp, Homo sapiens
ctagctccaccaact

SEQ ID NO: 353784 - DNA, 15 bp, Homo sapiens
actagctccaccaac

SEQ ID NO: 353785 - DNA, 15 bp, Homo sapiens
cactagctccaccaa

SEQ ID NO: 353786 - DNA, 15 bp, Homo sapiens
tcactagctccacca

SEQ ID NO: 353787 - DNA, 15 bp, Homo sapiens
ctcactagctccacc

SEQ ID NO: 353788 - DNA, 15 bp, Homo sapiens
cctcactagctccac

SEQ ID NO: 353789 - DNA, 15 bp, Homo sapiens
acctcactagctcca

SEQ ID NO: 353790 - DNA, 15 bp, Homo sapiens
tacctcactagctcc

SEQ ID NO: 353791 - DNA, 15 bp, Homo sapiens
atacctcactagctc

SEQ ID NO: 353792 - DNA, 15 bp, Homo sapiens
tatacctcactagct

SEQ ID NO: 353793 - DNA, 15 bp, Homo sapiens
atatacctcactagc

SEQ ID NO: 353794 - DNA, 15 bp, Homo sapiens
tatatacctcactag

SEQ ID NO: 353795 - DNA, 15 bp, Homo sapiens
ttatatacctcacta

SEQ ID NO: 353796 - DNA, 15 bp, Homo sapiens
attatatacctcact

SEQ ID NO: 353797 - DNA, 15 bp, Homo sapiens
gattatatacctcac

SEQ ID NO: 353798 - DNA, 15 bp, Homo sapiens
agattatatacctca

SEQ ID NO: 353799 - DNA, 15 bp, Homo sapiens
gagattatatacctc

SEQ ID NO: 353800 - DNA, 15 bp, Homo sapiens
ggagattatatacct

SEQ ID NO: 353801 - DNA, 15 bp, Homo sapiens
gggagattatatacc

SEQ ID NO: 353802 - DNA, 15 bp, Homo sapiens
tgggagattatatac

SEQ ID NO: 353803 - DNA, 15 bp, Homo sapiens
atgggagattatata

SEQ ID NO: 353804 - DNA, 15 bp, Homo sapiens
aatgggagattatat

SEQ ID NO: 353805 - DNA, 15 bp, Homo sapiens
taatgggagattata

SEQ ID NO: 353806 - DNA, 15 bp, Homo sapiens
ataatgggagattat

SEQ ID NO: 353807 - DNA, 15 bp, Homo sapiens
cataatgggagatta

SEQ ID NO: 353808 - DNA, 15 bp, Homo sapiens
gcataatgggagatt

SEQ ID NO: 353809 - DNA, 15 bp, Homo sapiens
tgcataatgggagat

SEQ ID NO: 353810 - DNA, 15 bp, Homo sapiens
gtgcataatgggaga

SEQ ID NO: 353811 - DNA, 15 bp, Homo sapiens
agtgcataatgggag

SEQ ID NO: 353812 - DNA, 15 bp, Homo sapiens
cagtgcataatggga

SEQ ID NO: 353813 - DNA, 15 bp, Homo sapiens
gcagtgcataatggg

SEQ ID NO: 353814 - DNA, 15 bp, Homo sapiens
tgcagtgcataatgg

SEQ ID NO: 353815 - DNA, 15 bp, Homo sapiens
gtgcagtgcataatg

SEQ ID NO: 353816 - DNA, 15 bp, Homo sapiens
ggtgcagtgcataat

SEQ ID NO: 353817 - DNA, 15 bp, Homo sapiens
tggtgcagtgcataa

SEQ ID NO: 353818 - DNA, 15 bp, Homo sapiens
ttggtgcagtgcata

SEQ ID NO: 353819 - DNA, 15 bp, Homo sapiens
attggtgcagtgcat

SEQ ID NO: 353820 - DNA, 15 bp, Homo sapiens
aattggtgcagtgca

SEQ ID NO: 353821 - DNA, 15 bp, Homo sapiens
caattggtgcagtgc

SEQ ID NO: 353822 - DNA, 15 bp, Homo sapiens
gcaattggtgcagtg

SEQ ID NO: 353823 - DNA, 15 bp, Homo sapiens
agcaattggtgcagt

SEQ ID NO: 353824 - DNA, 15 bp, Homo sapiens
cagcaattggtgcag

SEQ ID NO: 353825 - DNA, 15 bp, Homo sapiens
gcagcaattggtgca

SEQ ID NO: 353826 - DNA, 15 bp, Homo sapiens
tgcagcaattggtgc

SEQ ID NO: 353827 - DNA, 15 bp, Homo sapiens
ttgcagcaattggtg

SEQ ID NO: 353828 - DNA, 15 bp, Homo sapiens
tttgcagcaattggt

SEQ ID NO: 353829 - DNA, 15 bp, Homo sapiens
ttttgcagcaattgg

SEQ ID NO: 353830 - DNA, 15 bp, Homo sapiens
cttttgcagcaattg

SEQ ID NO: 353831 - DNA, 15 bp, Homo sapiens
ccttttgcagcaatt

SEQ ID NO: 353832 - DNA, 15 bp, Homo sapiens
gccttttgcagcaat

SEQ ID NO: 353833 - DNA, 15 bp, Homo sapiens
ggccttttgcagcaa

SEQ ID NO: 353834 - DNA, 15 bp, Homo sapiens
aggccttttgcagca

SEQ ID NO: 353835 - DNA, 15 bp, Homo sapiens
caggccttttgcagc

SEQ ID NO: 353836 - DNA, 15 bp, Homo sapiens
gcaggccttttgcag

SEQ ID NO: 353837 - DNA, 15 bp, Homo sapiens
ggcaggccttttgca

SEQ ID NO: 353838 - DNA, 15 bp, Homo sapiens
aggcaggccttttgc

SEQ ID NO: 353839 - DNA, 15 bp, Homo sapiens
gaggcaggccttttg

SEQ ID NO: 353840 - DNA, 15 bp, Homo sapiens
agaggcaggcctttt

SEQ ID NO: 353841 - DNA, 15 bp, Homo sapiens
tagaggcaggccttt

SEQ ID NO: 353842 - DNA, 15 bp, Homo sapiens
gtagaggcaggcctt

SEQ ID NO: 353843 - DNA, 15 bp, Homo sapiens
tgtagaggcaggcct

SEQ ID NO: 353844 - DNA, 15 bp, Homo sapiens
ttgtagaggcaggcc

SEQ ID NO: 353845 - DNA, 15 bp, Homo sapiens
tttgtagaggcaggc

SEQ ID NO: 353846 - DNA, 15 bp, Homo sapiens
ctttgtagaggcagg

SEQ ID NO: 353847 - DNA, 15 bp, Homo sapiens
gctttgtagaggcag

SEQ ID NO: 353848 - DNA, 15 bp, Homo sapiens
ggctttgtagaggca

SEQ ID NO: 353849 - DNA, 15 bp, Homo sapiens
tggctttgtagaggc

SEQ ID NO: 353850 - DNA, 15 bp, Homo sapiens
ttggctttgtagagg

SEQ ID NO: 353851 - DNA, 15 bp, Homo sapiens
cttggctttgtagag

SEQ ID NO: 353852 - DNA, 15 bp, Homo sapiens
gcttggctttgtaga

SEQ ID NO: 353853 - DNA, 15 bp, Homo sapiens
ggcttggctttgtag

SEQ ID NO: 353854 - DNA, 15 bp, Homo sapiens
tggcttggctttgta

SEQ ID NO: 353855 - DNA, 15 bp, Homo sapiens
ctggcttggctttgt

SEQ ID NO: 353856 - DNA, 15 bp, Homo sapiens
actggcttggctttg

SEQ ID NO: 353857 - DNA, 15 bp, Homo sapiens
cactggcttggcttt

SEQ ID NO: 353858 - DNA, 15 bp, Homo sapiens
acactggcttggctt

SEQ ID NO: 353859 - DNA, 15 bp, Homo sapiens
tacactggcttggct

SEQ ID NO: 353860 - DNA, 15 bp, Homo sapiens
ttacactggcttggc

SEQ ID NO: 353861 - DNA, 15 bp, Homo sapiens
gttacactggcttgg

SEQ ID NO: 353862 - DNA, 15 bp, Homo sapiens
tgttacactggcttg

SEQ ID NO: 353863 - DNA, 15 bp, Homo sapiens
ttgttacactggctt

SEQ ID NO: 353864 - DNA, 15 bp, Homo sapiens
cttgttacactggct

SEQ ID NO: 353865 - DNA, 15 bp, Homo sapiens
ccttgttacactggc

SEQ ID NO: 353866 - DNA, 15 bp, Homo sapiens
cccttgttacactgg

SEQ ID NO: 353867 - DNA, 15 bp, Homo sapiens
gcccttgttacactg

SEQ ID NO: 353868 - DNA, 15 bp, Homo sapiens
ggcccttgttacact

SEQ ID NO: 353869 - DNA, 15 bp, Homo sapiens
aggcccttgttacac

SEQ ID NO: 353870 - DNA, 15 bp, Homo sapiens
gaggcccttgttaca

SEQ ID NO: 353871 - DNA, 15 bp, Homo sapiens
cgaggcccttgttac

SEQ ID NO: 353872 - DNA, 15 bp, Homo sapiens
gcgaggcccttgtta

SEQ ID NO: 353873 - DNA, 15 bp, Homo sapiens
agcgaggcccttgtt

SEQ ID NO: 353874 - DNA, 15 bp, Homo sapiens
aagcgaggcccttgt

SEQ ID NO: 353875 - DNA, 15 bp, Homo sapiens
gaagcgaggcccttg

SEQ ID NO: 353876 - DNA, 15 bp, Homo sapiens
ggaagcgaggccctt

SEQ ID NO: 353877 - DNA, 15 bp, Homo sapiens
aggaagcgaggccct

SEQ ID NO: 353878 - DNA, 15 bp, Homo sapiens
aaggaagcgaggccc

SEQ ID NO: 353879 - DNA, 15 bp, Homo sapiens
gaaggaagcgaggcc

SEQ ID NO: 353880 - DNA, 15 bp, Homo sapiens
agaaggaagcgaggc

SEQ ID NO: 353881 - DNA, 15 bp, Homo sapiens
gagaaggaagcgagg

SEQ ID NO: 353882 - DNA, 15 bp, Homo sapiens
agagaaggaagcgag

SEQ ID NO: 353883 - DNA, 15 bp, Homo sapiens
cagagaaggaagcga

SEQ ID NO: 353884 - DNA, 15 bp, Homo sapiens
acagagaaggaagcg

SEQ ID NO: 353885 - DNA, 15 bp, Homo sapiens
tacagagaaggaagc

SEQ ID NO: 353886 - DNA, 15 bp, Homo sapiens
gtacagagaaggaag

SEQ ID NO: 353887 - DNA, 15 bp, Homo sapiens
tgtacagagaaggaa

SEQ ID NO: 353888 - DNA, 15 bp, Homo sapiens
atgtacagagaagga

SEQ ID NO: 353889 - DNA, 15 bp, Homo sapiens
gatgtacagagaagg

SEQ ID NO: 353890 - DNA, 15 bp, Homo sapiens
ggatgtacagagaag

SEQ ID NO: 353891 - DNA, 15 bp, Homo sapiens
gggatgtacagagaa

SEQ ID NO: 353892 - DNA, 15 bp, Homo sapiens
agggatgtacagaga

SEQ ID NO: 353893 - DNA, 15 bp, Homo sapiens
cagggatgtacagag

SEQ ID NO: 353894 - DNA, 15 bp, Homo sapiens
acagggatgtacaga

SEQ ID NO: 353895 - DNA, 15 bp, Homo sapiens
cacagggatgtacag

SEQ ID NO: 353896 - DNA, 15 bp, Homo sapiens
gcacagggatgtaca

SEQ ID NO: 353897 - DNA, 15 bp, Homo sapiens
ggcacagggatgtac

SEQ ID NO: 353898 - DNA, 15 bp, Homo sapiens
aggcacagggatgta

SEQ ID NO: 353899 - DNA, 15 bp, Homo sapiens
gaggcacagggatgt

SEQ ID NO: 353900 - DNA, 15 bp, Homo sapiens
ggaggcacagggatg

SEQ ID NO: 353901 - DNA, 15 bp, Homo sapiens
aggaggcacagggat

SEQ ID NO: 353902 - DNA, 15 bp, Homo sapiens
gaggaggcacaggga

SEQ ID NO: 353903 - DNA, 15 bp, Homo sapiens
ggaggaggcacaggg

SEQ ID NO: 353904 - DNA, 15 bp, Homo sapiens
gggaggaggcacagg

SEQ ID NO: 353905 - DNA, 15 bp, Homo sapiens
ggggaggaggcacag

SEQ ID NO: 353906 - DNA, 15 bp, Homo sapiens
gggggaggaggcaca

SEQ ID NO: 353907 - DNA, 15 bp, Homo sapiens
tgggggaggaggcac

SEQ ID NO: 353908 - DNA, 15 bp, Homo sapiens
ttgggggaggaggca

SEQ ID NO: 353909 - DNA, 15 bp, Homo sapiens
gttgggggaggaggc

SEQ ID NO: 353910 - DNA, 15 bp, Homo sapiens
ggttgggggaggagg

SEQ ID NO: 353911 - DNA, 15 bp, Homo sapiens
aggttgggggaggag

SEQ ID NO: 353912 - DNA, 15 bp, Homo sapiens
gaggttgggggagga

SEQ ID NO: 353913 - DNA, 15 bp, Homo sapiens
tgaggttgggggagg

SEQ ID NO: 353914 - DNA, 15 bp, Homo sapiens
ctgaggttgggggag

SEQ ID NO: 353915 - DNA, 15 bp, Homo sapiens
gctgaggttggggga

SEQ ID NO: 353916 - DNA, 15 bp, Homo sapiens
agctgaggttggggg

SEQ ID NO: 353917 - DNA, 15 bp, Homo sapiens
aagctgaggttgggg

SEQ ID NO: 353918 - DNA, 15 bp, Homo sapiens
gaagctgaggttggg

SEQ ID NO: 353919 - DNA, 15 bp, Homo sapiens
agaagctgaggttgg

SEQ ID NO: 353920 - DNA, 15 bp, Homo sapiens
aagaagctgaggttg

SEQ ID NO: 353921 - DNA, 15 bp, Homo sapiens
gaagaagctgaggtt

SEQ ID NO: 353922 - DNA, 15 bp, Homo sapiens
tgaagaagctgaggt

SEQ ID NO: 353923 - DNA, 15 bp, Homo sapiens
atgaagaagctgagg

SEQ ID NO: 353924 - DNA, 15 bp, Homo sapiens
gatgaagaagctgag

SEQ ID NO: 353925 - DNA, 15 bp, Homo sapiens
agatgaagaagctga

SEQ ID NO: 353926 - DNA, 15 bp, Homo sapiens
gagatgaagaagctg

SEQ ID NO: 353927 - DNA, 15 bp, Homo sapiens
tgagatgaagaagct

SEQ ID NO: 353928 - DNA, 15 bp, Homo sapiens
gtgagatgaagaagc

SEQ ID NO: 353929 - DNA, 15 bp, Homo sapiens
tgtgagatgaagaag

SEQ ID NO: 353930 - DNA, 15 bp, Homo sapiens
ttgtgagatgaagaa

SEQ ID NO: 353931 - DNA, 15 bp, Homo sapiens
tttgtgagatgaaga

SEQ ID NO: 353932 - DNA, 15 bp, Homo sapiens
ctttgtgagatgaag

SEQ ID NO: 353933 - DNA, 15 bp, Homo sapiens
cctttgtgagatgaa

SEQ ID NO: 353934 - DNA, 15 bp, Homo sapiens
gcctttgtgagatga

SEQ ID NO: 353935 - DNA, 15 bp, Homo sapiens
ggcctttgtgagatg

SEQ ID NO: 353936 - DNA, 15 bp, Homo sapiens
aggcctttgtgagat

SEQ ID NO: 353937 - DNA, 15 bp, Homo sapiens
aaggcctttgtgaga

SEQ ID NO: 353938 - DNA, 15 bp, Homo sapiens
aaaggcctttgtgag

SEQ ID NO: 353939 - DNA, 15 bp, Homo sapiens
caaaggcctttgtga

SEQ ID NO: 353940 - DNA, 15 bp, Homo sapiens
ccaaaggcctttgtg

SEQ ID NO: 353941 - DNA, 15 bp, Homo sapiens
gccaaaggcctttgt

SEQ ID NO: 353942 - DNA, 15 bp, Homo sapiens
agccaaaggcctttg

SEQ ID NO: 353943 - DNA, 15 bp, Homo sapiens
tagccaaaggccttt

SEQ ID NO: 353944 - DNA, 15 bp, Homo sapiens
atagccaaaggcctt

SEQ ID NO: 353945 - DNA, 15 bp, Homo sapiens
catagccaaaggcct

SEQ ID NO: 353946 - DNA, 15 bp, Homo sapiens
acatagccaaaggcc

SEQ ID NO: 353947 - DNA, 15 bp, Homo sapiens
tacatagccaaaggc

SEQ ID NO: 353948 - DNA, 15 bp, Homo sapiens
ttacatagccaaagg

SEQ ID NO: 353949 - DNA, 15 bp, Homo sapiens
gttacatagccaaag

SEQ ID NO: 353950 - DNA, 15 bp, Homo sapiens
tgttacatagccaaa

SEQ ID NO: 353951 - DNA, 15 bp, Homo sapiens
ttgttacatagccaa

SEQ ID NO: 353952 - DNA, 15 bp, Homo sapiens
attgttacatagcca

SEQ ID NO: 353953 - DNA, 15 bp, Homo sapiens
gattgttacatagcc

SEQ ID NO: 353954 - DNA, 15 bp, Homo sapiens
tgattgttacatagc

SEQ ID NO: 353955 - DNA, 15 bp, Homo sapiens
ctgattgttacatag

SEQ ID NO: 353956 - DNA, 15 bp, Homo sapiens
tctgattgttacata

SEQ ID NO: 353957 - DNA, 15 bp, Homo sapiens
ttctgattgttacat

SEQ ID NO: 353958 - DNA, 15 bp, Homo sapiens
attctgattgttaca

SEQ ID NO: 353959 - DNA, 15 bp, Homo sapiens
aattctgattgttac

SEQ ID NO: 353960 - DNA, 15 bp, Homo sapiens
caattctgattgtta

SEQ ID NO: 353961 - DNA, 15 bp, Homo sapiens
acaattctgattgtt

SEQ ID NO: 353962 - DNA, 15 bp, Homo sapiens
gacaattctgattgt

SEQ ID NO: 353963 - DNA, 15 bp, Homo sapiens
agacaattctgattg

SEQ ID NO: 353964 - DNA, 15 bp, Homo sapiens
cagacaattctgatt

SEQ ID NO: 353965 - DNA, 15 bp, Homo sapiens
tcagacaattctgat

SEQ ID NO: 353966 - DNA, 15 bp, Homo sapiens
ttcagacaattctga

SEQ ID NO: 353967 - DNA, 15 bp, Homo sapiens
attcagacaattctg

SEQ ID NO: 353968 - DNA, 15 bp, Homo sapiens
tattcagacaattct

SEQ ID NO: 353969 - DNA, 15 bp, Homo sapiens
atattcagacaattc

SEQ ID NO: 353970 - DNA, 15 bp, Homo sapiens
aatattcagacaatt

SEQ ID NO: 353971 - DNA, 15 bp, Homo sapiens
caatattcagacaat

SEQ ID NO: 353972 - DNA, 15 bp, Homo sapiens
gcaatattcagacaa

SEQ ID NO: 353973 - DNA, 15 bp, Homo sapiens
agcaatattcagaca

SEQ ID NO: 353974 - DNA, 15 bp, Homo sapiens
gagcaatattcagac

SEQ ID NO: 353975 - DNA, 15 bp, Homo sapiens
ggagcaatattcaga

SEQ ID NO: 353976 - DNA, 15 bp, Homo sapiens
aggagcaatattcag

SEQ ID NO: 353977 - DNA, 15 bp, Homo sapiens
taggagcaatattca

SEQ ID NO: 353978 - DNA, 15 bp, Homo sapiens
gtaggagcaatattc

SEQ ID NO: 353979 - DNA, 15 bp, Homo sapiens
agtaggagcaatatt

SEQ ID NO: 353980 - DNA, 15 bp, Homo sapiens
tagtaggagcaatat

SEQ ID NO: 353981 - DNA, 15 bp, Homo sapiens
ttagtaggagcaata

SEQ ID NO: 353982 - DNA, 15 bp, Homo sapiens
attagtaggagcaat

SEQ ID NO: 353983 - DNA, 15 bp, Homo sapiens
aattagtaggagcaa

SEQ ID NO: 353984 - DNA, 15 bp, Homo sapiens
taattagtaggagca

SEQ ID NO: 353985 - DNA, 15 bp, Homo sapiens
ttaattagtaggagc

SEQ ID NO: 353986 - DNA, 15 bp, Homo sapiens
tttaattagtaggag

SEQ ID NO: 353987 - DNA, 15 bp, Homo sapiens
ttttaattagtagga

SEQ ID NO: 353988 - DNA, 15 bp, Homo sapiens
cttttaattagtagg

SEQ ID NO: 353989 - DNA, 15 bp, Homo sapiens
ccttttaattagtag

SEQ ID NO: 353990 - DNA, 15 bp, Homo sapiens
gccttttaattagta

SEQ ID NO: 353991 - DNA, 15 bp, Homo sapiens
ggccttttaattagt

SEQ ID NO: 353992 - DNA, 15 bp, Homo sapiens
tggccttttaattag

SEQ ID NO: 353993 - DNA, 15 bp, Homo sapiens
atggccttttaatta

SEQ ID NO: 353994 - DNA, 15 bp, Homo sapiens
tatggccttttaatt

SEQ ID NO: 353995 - DNA, 15 bp, Homo sapiens
ctatggccttttaat

SEQ ID NO: 353996 - DNA, 15 bp, Homo sapiens
tctatggccttttaa

SEQ ID NO: 353997 - DNA, 15 bp, Homo sapiens
ttctatggcctttta

SEQ ID NO: 353998 - DNA, 15 bp, Homo sapiens
gttctatggcctttt

SEQ ID NO: 353999 - DNA, 15 bp, Homo sapiens
tgttctatggccttt

SEQ ID NO: 354000 - DNA, 15 bp, Homo sapiens
ctgttctatggcctt

SEQ ID NO: 354001 - DNA, 15 bp, Homo sapiens
tctgttctatggcct

SEQ ID NO: 354002 - DNA, 15 bp, Homo sapiens
ctctgttctatggcc

SEQ ID NO: 354003 - DNA, 15 bp, Homo sapiens
cctctgttctatggc

SEQ ID NO: 354004 - DNA, 15 bp, Homo sapiens
ccctctgttctatgg

SEQ ID NO: 354005 - DNA, 15 bp, Homo sapiens
gccctctgttctatg

SEQ ID NO: 354006 - DNA, 15 bp, Homo sapiens
tgccctctgttctat

SEQ ID NO: 354007 - DNA, 15 bp, Homo sapiens
ctgccctctgttcta

SEQ ID NO: 354008 - DNA, 15 bp, Homo sapiens
cctgccctctgttct

SEQ ID NO: 354009 - DNA, 15 bp, Homo sapiens
tcctgccctctgttc

SEQ ID NO: 354010 - DNA, 15 bp, Homo sapiens
atcctgccctctgtt

SEQ ID NO: 354011 - DNA, 15 bp, Homo sapiens
catcctgccctctgt

SEQ ID NO: 354012 - DNA, 15 bp, Homo sapiens
gcatcctgccctctg

SEQ ID NO: 354013 - DNA, 15 bp, Homo sapiens
tgcatcctgccctct

SEQ ID NO: 354014 - DNA, 15 bp, Homo sapiens
ctgcatcctgccctc

SEQ ID NO: 354015 - DNA, 15 bp, Homo sapiens
tctgcatcctgccct

SEQ ID NO: 354016 - DNA, 15 bp, Homo sapiens
atctgcatcctgccc

SEQ ID NO: 354017 - DNA, 15 bp, Homo sapiens
catctgcatcctgcc

SEQ ID NO: 354018 - DNA, 15 bp, Homo sapiens
acatctgcatcctgc

SEQ ID NO: 354019 - DNA, 15 bp, Homo sapiens
cacatctgcatcctg

SEQ ID NO: 354020 - DNA, 15 bp, Homo sapiens
acacatctgcatcct

SEQ ID NO: 354021 - DNA, 15 bp, Homo sapiens
cacacatctgcatcc

SEQ ID NO: 354022 - DNA, 15 bp, Homo sapiens
acacacatctgcatc

SEQ ID NO: 354023 - DNA, 15 bp, Homo sapiens
cacacacatctgcat

SEQ ID NO: 354024 - DNA, 15 bp, Homo sapiens
acacacacatctgca

SEQ ID NO: 354025 - DNA, 15 bp, Homo sapiens
cacacacacatctgc

SEQ ID NO: 354026 - DNA, 15 bp, Homo sapiens
tcacacacacatctg

SEQ ID NO: 354027 - DNA, 15 bp, Homo sapiens
ctcacacacacatct

SEQ ID NO: 354028 - DNA, 15 bp, Homo sapiens
cctcacacacacatc

SEQ ID NO: 354029 - DNA, 15 bp, Homo sapiens
acctcacacacacat

SEQ ID NO: 354030 - DNA, 15 bp, Homo sapiens
cacctcacacacaca

SEQ ID NO: 354031 - DNA, 15 bp, Homo sapiens
tcacctcacacacac

SEQ ID NO: 354032 - DNA, 15 bp, Homo sapiens
ctcacctcacacaca

SEQ ID NO: 354033 - DNA, 15 bp, Homo sapiens
cctcacctcacacac

SEQ ID NO: 354034 - DNA, 15 bp, Homo sapiens
ccctcacctcacaca

SEQ ID NO: 354035 - DNA, 15 bp, Homo sapiens
cccctcacctcacac

SEQ ID NO: 354036 - DNA, 15 bp, Homo sapiens
ccccctcacctcaca

SEQ ID NO: 354037 - DNA, 15 bp, Homo sapiens
accccctcacctcac

SEQ ID NO: 354038 - DNA, 15 bp, Homo sapiens
caccccctcacctca

SEQ ID NO: 354039 - DNA, 15 bp, Homo sapiens
ccaccccctcacctc

SEQ ID NO: 354040 - DNA, 15 bp, Homo sapiens
accaccccctcacct

SEQ ID NO: 354041 - DNA, 15 bp, Homo sapiens
aaccaccccctcacc

SEQ ID NO: 354042 - DNA, 15 bp, Homo sapiens
taaccaccccctcac

SEQ ID NO: 354043 - DNA, 15 bp, Homo sapiens
ctaaccaccccctca

SEQ ID NO: 354044 - DNA, 15 bp, Homo sapiens
tctaaccaccccctc

SEQ ID NO: 354045 - DNA, 15 bp, Homo sapiens
ttctaaccaccccct

SEQ ID NO: 354046 - DNA, 15 bp, Homo sapiens
attctaaccaccccc

SEQ ID NO: 354047 - DNA, 15 bp, Homo sapiens
tattctaaccacccc

SEQ ID NO: 354048 - DNA, 15 bp, Homo sapiens
ttattctaaccaccc

SEQ ID NO: 354049 - DNA, 15 bp, Homo sapiens
tttattctaaccacc

SEQ ID NO: 354050 - DNA, 15 bp, Homo sapiens
ttttattctaaccac

SEQ ID NO: 354051 - DNA, 15 bp, Homo sapiens
attttattctaacca

SEQ ID NO: 354052 - DNA, 15 bp, Homo sapiens
cattttattctaacc

SEQ ID NO: 354053 - DNA, 15 bp, Homo sapiens
tcattttattctaac

SEQ ID NO: 354054 - DNA, 15 bp, Homo sapiens
ttcattttattctaa

SEQ ID NO: 354055 - DNA, 15 bp, Homo sapiens
attcattttattcta

SEQ ID NO: 354056 - DNA, 15 bp, Homo sapiens
aattcattttattct

SEQ ID NO: 354057 - DNA, 15 bp, Homo sapiens
taattcattttattc

SEQ ID NO: 354058 - DNA, 15 bp, Homo sapiens
ataattcattttatt

SEQ ID NO: 354059 - DNA, 15 bp, Homo sapiens
aataattcattttat

SEQ ID NO: 354060 - DNA, 15 bp, Homo sapiens
taataattcatttta

SEQ ID NO: 354061 - DNA, 15 bp, Homo sapiens
ttaataattcatttt

SEQ ID NO: 354062 - DNA, 15 bp, Homo sapiens
tttaataattcattt

SEQ ID NO: 354063 - DNA, 15 bp, Homo sapiens
ttttaataattcatt

SEQ ID NO: 354064 - DNA, 15 bp, Homo sapiens
tttttaataattcat

SEQ ID NO: 354065 - DNA, 15 bp, Homo sapiens
atttttaataattca

SEQ ID NO: 354066 - DNA, 15 bp, Homo sapiens
tatttttaataattc

SEQ ID NO: 354067 - DNA, 15 bp, Homo sapiens
ttatttttaataatt

SEQ ID NO: 354068 - DNA, 15 bp, Homo sapiens
tttatttttaataat

SEQ ID NO: 354069 - DNA, 15 bp, Homo sapiens
gtttatttttaataa

SEQ ID NO: 354070 - DNA, 15 bp, Homo sapiens
ggtttatttttaata

SEQ ID NO: 354071 - DNA, 15 bp, Homo sapiens
aggtttatttttaat

SEQ ID NO: 354072 - DNA, 15 bp, Homo sapiens
gaggtttatttttaa

SEQ ID NO: 354073 - DNA, 15 bp, Homo sapiens
ggaggtttattttta

SEQ ID NO: 354074 - DNA, 15 bp, Homo sapiens
gggaggtttattttt

SEQ ID NO: 354075 - DNA, 15 bp, Homo sapiens
ggggaggtttatttt

SEQ ID NO: 354076 - DNA, 15 bp, Homo sapiens
tggggaggtttattt

SEQ ID NO: 354077 - DNA, 15 bp, Homo sapiens
atggggaggtttatt

SEQ ID NO: 354078 - DNA, 15 bp, Homo sapiens
catggggaggtttat

SEQ ID NO: 354079 - DNA, 15 bp, Homo sapiens
acatggggaggttta

SEQ ID NO: 354080 - DNA, 15 bp, Homo sapiens
tacatggggaggttt

SEQ ID NO: 354081 - DNA, 15 bp, Homo sapiens
ctacatggggaggtt

SEQ ID NO: 354082 - DNA, 15 bp, Homo sapiens
cctacatggggaggt

SEQ ID NO: 354083 - DNA, 15 bp, Homo sapiens
acctacatggggagg

SEQ ID NO: 354084 - DNA, 15 bp, Homo sapiens
gacctacatggggag

SEQ ID NO: 354085 - DNA, 15 bp, Homo sapiens
tgacctacatgggga

SEQ ID NO: 354086 - DNA, 15 bp, Homo sapiens
ctgacctacatgggg

SEQ ID NO: 354087 - DNA, 15 bp, Homo sapiens
cctgacctacatggg

SEQ ID NO: 354088 - DNA, 15 bp, Homo sapiens
gcctgacctacatgg

SEQ ID NO: 354089 - DNA, 15 bp, Homo sapiens
tgcctgacctacatg

SEQ ID NO: 354090 - DNA, 15 bp, Homo sapiens
ttgcctgacctacat

SEQ ID NO: 354091 - DNA, 15 bp, Homo sapiens
cttgcctgacctaca

SEQ ID NO: 354092 - DNA, 15 bp, Homo sapiens
acttgcctgacctac

SEQ ID NO: 354093 - DNA, 15 bp, Homo sapiens
cacttgcctgaccta

SEQ ID NO: 354094 - DNA, 15 bp, Homo sapiens
tcacttgcctgacct

SEQ ID NO: 354095 - DNA, 15 bp, Homo sapiens
ctcacttgcctgacc

SEQ ID NO: 354096 - DNA, 15 bp, Homo sapiens
cctcacttgcctgac

SEQ ID NO: 354097 - DNA, 15 bp, Homo sapiens
tcctcacttgcctga

SEQ ID NO: 354098 - DNA, 15 bp, Homo sapiens
ttcctcacttgcctg

SEQ ID NO: 354099 - DNA, 15 bp, Homo sapiens
tttcctcacttgcct

SEQ ID NO: 354100 - DNA, 15 bp, Homo sapiens
atttcctcacttgcc

SEQ ID NO: 354101 - DNA, 15 bp, Homo sapiens
aatttcctcacttgc

SEQ ID NO: 354102 - DNA, 15 bp, Homo sapiens
caatttcctcacttg

SEQ ID NO: 354103 - DNA, 15 bp, Homo sapiens
ccaatttcctcactt

SEQ ID NO: 354104 - DNA, 15 bp, Homo sapiens
tccaatttcctcact

SEQ ID NO: 354105 - DNA, 15 bp, Homo sapiens
ctccaatttcctcac

SEQ ID NO: 354106 - DNA, 15 bp, Homo sapiens
tctccaatttcctca

SEQ ID NO: 354107 - DNA, 15 bp, Homo sapiens
ttctccaatttcctc

SEQ ID NO: 354108 - DNA, 15 bp, Homo sapiens
cttctccaatttcct

SEQ ID NO: 354109 - DNA, 15 bp, Homo sapiens
tcttctccaatttcc

SEQ ID NO: 354110 - DNA, 15 bp, Homo sapiens
atcttctccaatttc

SEQ ID NO: 354111 - DNA, 15 bp, Homo sapiens
catcttctccaattt

SEQ ID NO: 354112 - DNA, 15 bp, Homo sapiens
acatcttctccaatt

SEQ ID NO: 354113 - DNA, 15 bp, Homo sapiens
aacatcttctccaat

SEQ ID NO: 354114 - DNA, 15 bp, Homo sapiens
aaacatcttctccaa

SEQ ID NO: 354115 - DNA, 15 bp, Homo sapiens
aaaacatcttctcca

SEQ ID NO: 354116 - DNA, 15 bp, Homo sapiens
taaaacatcttctcc

SEQ ID NO: 354117 - DNA, 15 bp, Homo sapiens
ctaaaacatcttctc

SEQ ID NO: 354118 - DNA, 15 bp, Homo sapiens
actaaaacatcttct

SEQ ID NO: 354119 - DNA, 15 bp, Homo sapiens
aactaaaacatcttc

SEQ ID NO: 354120 - DNA, 15 bp, Homo sapiens
caactaaaacatctt

SEQ ID NO: 354121 - DNA, 15 bp, Homo sapiens
gcaactaaaacatct

SEQ ID NO: 354122 - DNA, 15 bp, Homo sapiens
tgcaactaaaacatc

SEQ ID NO: 354123 - DNA, 15 bp, Homo sapiens
ttgcaactaaaacat

SEQ ID NO: 354124 - DNA, 15 bp, Homo sapiens
tttgcaactaaaaca

SEQ ID NO: 354125 - DNA, 15 bp, Homo sapiens
ctttgcaactaaaac

SEQ ID NO: 354126 - DNA, 15 bp, Homo sapiens
tctttgcaactaaaa

SEQ ID NO: 354127 - DNA, 15 bp, Homo sapiens
ttctttgcaactaaa

SEQ ID NO: 354128 - DNA, 15 bp, Homo sapiens
tttctttgcaactaa

SEQ ID NO: 354129 - DNA, 15 bp, Homo sapiens
gtttctttgcaacta

SEQ ID NO: 354130 - DNA, 15 bp, Homo sapiens
agtttctttgcaact

SEQ ID NO: 354131 - DNA, 15 bp, Homo sapiens
aagtttctttgcaac

SEQ ID NO: 354132 - DNA, 15 bp, Homo sapiens
aaagtttctttgcaa

SEQ ID NO: 354133 - DNA, 15 bp, Homo sapiens
taaagtttctttgca

SEQ ID NO: 354134 - DNA, 15 bp, Homo sapiens
ttaaagtttctttgc

SEQ ID NO: 354135 - DNA, 15 bp, Homo sapiens
attaaagtttctttg

SEQ ID NO: 354136 - DNA, 15 bp, Homo sapiens
aattaaagtttcttt

SEQ ID NO: 354137 - DNA, 15 bp, Homo sapiens
taattaaagtttctt

SEQ ID NO: 354138 - DNA, 15 bp, Homo sapiens
ctaattaaagtttct

SEQ ID NO: 354139 - DNA, 15 bp, Homo sapiens
tctaattaaagtttc

SEQ ID NO: 354140 - DNA, 15 bp, Homo sapiens
ttctaattaaagttt

SEQ ID NO: 354141 - DNA, 15 bp, Homo sapiens
cttctaattaaagtt

SEQ ID NO: 354142 - DNA, 15 bp, Homo sapiens
tcttctaattaaagt

SEQ ID NO: 354143 - DNA, 15 bp, Homo sapiens
ttcttctaattaaag

SEQ ID NO: 354144 - DNA, 15 bp, Homo sapiens
tttcttctaattaaa

SEQ ID NO: 354145 - DNA, 15 bp, Homo sapiens
gtttcttctaattaa

SEQ ID NO: 354146 - DNA, 15 bp, Homo sapiens
agtttcttctaatta

SEQ ID NO: 354147 - DNA, 15 bp, Homo sapiens
tagtttcttctaatt

SEQ ID NO: 354148 - DNA, 15 bp, Homo sapiens
ctagtttcttctaat

SEQ ID NO: 354149 - DNA, 15 bp, Homo sapiens
cctagtttcttctaa

SEQ ID NO: 354150 - DNA, 15 bp, Homo sapiens
tcctagtttcttcta

SEQ ID NO: 354151 - DNA, 15 bp, Homo sapiens
atcctagtttcttct

SEQ ID NO: 354152 - DNA, 15 bp, Homo sapiens
aatcctagtttcttc

SEQ ID NO: 354153 - DNA, 15 bp, Homo sapiens
taatcctagtttctt

SEQ ID NO: 354154 - DNA, 15 bp, Homo sapiens
ataatcctagtttct

SEQ ID NO: 354155 - DNA, 15 bp, Homo sapiens
aataatcctagtttc

SEQ ID NO: 354156 - DNA, 15 bp, Homo sapiens
taataatcctagttt

SEQ ID NO: 354157 - DNA, 15 bp, Homo sapiens
ctaataatcctagtt

SEQ ID NO: 354158 - DNA, 15 bp, Homo sapiens
actaataatcctagt

SEQ ID NO: 354159 - DNA, 15 bp, Homo sapiens
tactaataatcctag

SEQ ID NO: 354160 - DNA, 15 bp, Homo sapiens
ttactaataatccta

SEQ ID NO: 354161 - DNA, 15 bp, Homo sapiens
gttactaataatcct

SEQ ID NO: 354162 - DNA, 15 bp, Homo sapiens
tgttactaataatcc

SEQ ID NO: 354163 - DNA, 15 bp, Homo sapiens
gtgttactaataatc

SEQ ID NO: 354164 - DNA, 15 bp, Homo sapiens
tgtgttactaataat

SEQ ID NO: 354165 - DNA, 15 bp, Homo sapiens
gtgtgttactaataa

SEQ ID NO: 354166 - DNA, 15 bp, Homo sapiens
agtgtgttactaata

SEQ ID NO: 354167 - DNA, 15 bp, Homo sapiens
cagtgtgttactaat

SEQ ID NO: 354168 - DNA, 15 bp, Homo sapiens
ccagtgtgttactaa

SEQ ID NO: 354169 - DNA, 15 bp, Homo sapiens
cccagtgtgttacta

SEQ ID NO: 354170 - DNA, 15 bp, Homo sapiens
ccccagtgtgttact

SEQ ID NO: 354171 - DNA, 15 bp, Homo sapiens
cccccagtgtgttac

SEQ ID NO: 354172 - DNA, 15 bp, Homo sapiens
ccccccagtgtgtta

SEQ ID NO: 354173 - DNA, 15 bp, Homo sapiens
tccccccagtgtgtt

SEQ ID NO: 354174 - DNA, 15 bp, Homo sapiens
gtccccccagtgtgt

SEQ ID NO: 354175 - DNA, 15 bp, Homo sapiens
ggtccccccagtgtg

SEQ ID NO: 354176 - DNA, 15 bp, Homo sapiens
gggtccccccagtgt

SEQ ID NO: 354177 - DNA, 15 bp, Homo sapiens
ggggtccccccagtg

SEQ ID NO: 354178 - DNA, 15 bp, Homo sapiens
gggggtccccccagt

SEQ ID NO: 354179 - DNA, 15 bp, Homo sapiens
tgggggtccccccag

SEQ ID NO: 354180 - DNA, 15 bp, Homo sapiens
atgggggtcccccca

SEQ ID NO: 354181 - DNA, 15 bp, Homo sapiens
catgggggtcccccc

SEQ ID NO: 354182 - DNA, 15 bp, Homo sapiens
gcatgggggtccccc

SEQ ID NO: 354183 - DNA, 15 bp, Homo sapiens
ggcatgggggtcccc

SEQ ID NO: 354184 - DNA, 15 bp, Homo sapiens
aggcatgggggtccc

SEQ ID NO: 354185 - DNA, 15 bp, Homo sapiens
aaggcatgggggtcc

SEQ ID NO: 354186 - DNA, 15 bp, Homo sapiens
gaaggcatgggggtc

SEQ ID NO: 354187 - DNA, 15 bp, Homo sapiens
cgaaggcatgggggt

SEQ ID NO: 354188 - DNA, 15 bp, Homo sapiens
tcgaaggcatggggg

SEQ ID NO: 354189 - DNA, 15 bp, Homo sapiens
ttcgaaggcatgggg

SEQ ID NO: 354190 - DNA, 15 bp, Homo sapiens
gttcgaaggcatggg

SEQ ID NO: 354191 - DNA, 15 bp, Homo sapiens
tgttcgaaggcatgg

SEQ ID NO: 354192 - DNA, 15 bp, Homo sapiens
ctgttcgaaggcatg

SEQ ID NO: 354193 - DNA, 15 bp, Homo sapiens
tctgttcgaaggcat

SEQ ID NO: 354194 - DNA, 15 bp, Homo sapiens
gtctgttcgaaggca

SEQ ID NO: 354195 - DNA, 15 bp, Homo sapiens
tgtctgttcgaaggc

SEQ ID NO: 354196 - DNA, 15 bp, Homo sapiens
atgtctgttcgaagg

SEQ ID NO: 354197 - DNA, 15 bp, Homo sapiens
aatgtctgttcgaag

SEQ ID NO: 354198 - DNA, 15 bp, Homo sapiens
caatgtctgttcgaa

SEQ ID NO: 354199 - DNA, 15 bp, Homo sapiens
gcaatgtctgttcga

SEQ ID NO: 354200 - DNA, 15 bp, Homo sapiens
agcaatgtctgttcg

SEQ ID NO: 354201 - DNA, 15 bp, Homo sapiens
aagcaatgtctgttc

SEQ ID NO: 354202 - DNA, 15 bp, Homo sapiens
caagcaatgtctgtt

SEQ ID NO: 354203 - DNA, 15 bp, Homo sapiens
ccaagcaatgtctgt

SEQ ID NO: 354204 - DNA, 15 bp, Homo sapiens
accaagcaatgtctg

SEQ ID NO: 354205 - DNA, 15 bp, Homo sapiens
aaccaagcaatgtct

SEQ ID NO: 354206 - DNA, 15 bp, Homo sapiens
gaaccaagcaatgtc

SEQ ID NO: 354207 - DNA, 15 bp, Homo sapiens
ggaaccaagcaatgt

SEQ ID NO: 354208 - DNA, 15 bp, Homo sapiens
gggaaccaagcaatg

SEQ ID NO: 354209 - DNA, 15 bp, Homo sapiens
agggaaccaagcaat

SEQ ID NO: 354210 - DNA, 15 bp, Homo sapiens
gagggaaccaagcaa

SEQ ID NO: 354211 - DNA, 15 bp, Homo sapiens
agagggaaccaagca

SEQ ID NO: 354212 - DNA, 15 bp, Homo sapiens
gagagggaaccaagc

SEQ ID NO: 354213 - DNA, 15 bp, Homo sapiens
agagagggaaccaag

SEQ ID NO: 354214 - DNA, 15 bp, Homo sapiens
tagagagggaaccaa

SEQ ID NO: 354215 - DNA, 15 bp, Homo sapiens
ttagagagggaacca

SEQ ID NO: 354216 - DNA, 15 bp, Homo sapiens
cttagagagggaacc

SEQ ID NO: 354217 - DNA, 15 bp, Homo sapiens
acttagagagggaac

SEQ ID NO: 354218 - DNA, 15 bp, Homo sapiens
aacttagagagggaa

SEQ ID NO: 354219 - DNA, 15 bp, Homo sapiens
caacttagagaggga

SEQ ID NO: 354220 - DNA, 15 bp, Homo sapiens
ccaacttagagaggg

SEQ ID NO: 354221 - DNA, 15 bp, Homo sapiens
tccaacttagagagg

SEQ ID NO: 354222 - DNA, 15 bp, Homo sapiens
ctccaacttagagag

SEQ ID NO: 354223 - DNA, 15 bp, Homo sapiens
tctccaacttagaga

SEQ ID NO: 354224 - DNA, 15 bp, Homo sapiens
ttctccaacttagag

SEQ ID NO: 354225 - DNA, 15 bp, Homo sapiens
cttctccaacttaga

SEQ ID NO: 354226 - DNA, 15 bp, Homo sapiens
tcttctccaacttag

SEQ ID NO: 354227 - DNA, 15 bp, Homo sapiens
gtcttctccaactta

SEQ ID NO: 354228 - DNA, 15 bp, Homo sapiens
tgtcttctccaactt

SEQ ID NO: 354229 - DNA, 15 bp, Homo sapiens
ctgtcttctccaact

SEQ ID NO: 354230 - DNA, 15 bp, Homo sapiens
gctgtcttctccaac

SEQ ID NO: 354231 - DNA, 15 bp, Homo sapiens
agctgtcttctccaa

SEQ ID NO: 354232 - DNA, 15 bp, Homo sapiens
cagctgtcttctcca

SEQ ID NO: 354233 - DNA, 15 bp, Homo sapiens
tcagctgtcttctcc

SEQ ID NO: 354234 - DNA, 15 bp, Homo sapiens
gtcagctgtcttctc

SEQ ID NO: 354235 - DNA, 15 bp, Homo sapiens
ggtcagctgtcttct

SEQ ID NO: 354236 - DNA, 15 bp, Homo sapiens
gggtcagctgtcttc

SEQ ID NO: 354237 - DNA, 15 bp, Homo sapiens
tgggtcagctgtctt

SEQ ID NO: 354238 - DNA, 15 bp, Homo sapiens
gtgggtcagctgtct

SEQ ID NO: 354239 - DNA, 15 bp, Homo sapiens
tgtgggtcagctgtc

SEQ ID NO: 354240 - DNA, 15 bp, Homo sapiens
atgtgggtcagctgt

SEQ ID NO: 354241 - DNA, 15 bp, Homo sapiens
tatgtgggtcagctg

SEQ ID NO: 354242 - DNA, 15 bp, Homo sapiens
gtatgtgggtcagct

SEQ ID NO: 354243 - DNA, 15 bp, Homo sapiens
agtatgtgggtcagc

SEQ ID NO: 354244 - DNA, 15 bp, Homo sapiens
gagtatgtgggtcag

SEQ ID NO: 354245 - DNA, 15 bp, Homo sapiens
tgagtatgtgggtca

SEQ ID NO: 354246 - DNA, 15 bp, Homo sapiens
atgagtatgtgggtc

SEQ ID NO: 354247 - DNA, 15 bp, Homo sapiens
gatgagtatgtgggt

SEQ ID NO: 354248 - DNA, 15 bp, Homo sapiens
agatgagtatgtggg

SEQ ID NO: 354249 - DNA, 15 bp, Homo sapiens
cagatgagtatgtgg

SEQ ID NO: 354250 - DNA, 15 bp, Homo sapiens
acagatgagtatgtg

SEQ ID NO: 354251 - DNA, 15 bp, Homo sapiens
gacagatgagtatgt

SEQ ID NO: 354252 - DNA, 15 bp, Homo sapiens
ggacagatgagtatg

SEQ ID NO: 354253 - DNA, 15 bp, Homo sapiens
tggacagatgagtat

SEQ ID NO: 354254 - DNA, 15 bp, Homo sapiens
ttggacagatgagta

SEQ ID NO: 354255 - DNA, 15 bp, Homo sapiens
tttggacagatgagt

SEQ ID NO: 354256 - DNA, 15 bp, Homo sapiens
gtttggacagatgag

SEQ ID NO: 354257 - DNA, 15 bp, Homo sapiens
cgtttggacagatga

SEQ ID NO: 354258 - DNA, 15 bp, Homo sapiens
acgtttggacagatg

SEQ ID NO: 354259 - DNA, 15 bp, Homo sapiens
cacgtttggacagat

SEQ ID NO: 354260 - DNA, 15 bp, Homo sapiens
acacgtttggacaga

SEQ ID NO: 354261 - DNA, 15 bp, Homo sapiens
aacacgtttggacag

SEQ ID NO: 354262 - DNA, 15 bp, Homo sapiens
taacacgtttggaca

SEQ ID NO: 354263 - DNA, 15 bp, Homo sapiens
ctaacacgtttggac

SEQ ID NO: 354264 - DNA, 15 bp, Homo sapiens
actaacacgtttgga

SEQ ID NO: 354265 - DNA, 15 bp, Homo sapiens
gactaacacgtttgg

SEQ ID NO: 354266 - DNA, 15 bp, Homo sapiens
ggactaacacgtttg

SEQ ID NO: 354267 - DNA, 15 bp, Homo sapiens
tggactaacacgttt

SEQ ID NO: 354268 - DNA, 15 bp, Homo sapiens
ctggactaacacgtt

SEQ ID NO: 354269 - DNA, 15 bp, Homo sapiens
cctggactaacacgt

SEQ ID NO: 354270 - DNA, 15 bp, Homo sapiens
acctggactaacacg

SEQ ID NO: 354271 - DNA, 15 bp, Homo sapiens
tacctggactaacac

SEQ ID NO: 354272 - DNA, 15 bp, Homo sapiens
atacctggactaaca

SEQ ID NO: 354273 - DNA, 15 bp, Homo sapiens
aatacctggactaac

SEQ ID NO: 354274 - DNA, 15 bp, Homo sapiens
taatacctggactaa

SEQ ID NO: 354275 - DNA, 15 bp, Homo sapiens
ttaatacctggacta

SEQ ID NO: 354276 - DNA, 15 bp, Homo sapiens
attaatacctggact

SEQ ID NO: 354277 - DNA, 15 bp, Homo sapiens
tattaatacctggac

SEQ ID NO: 354278 - DNA, 15 bp, Homo sapiens
ttattaatacctgga

SEQ ID NO: 354279 - DNA, 15 bp, Homo sapiens
attattaatacctgg

SEQ ID NO: 354280 - DNA, 15 bp, Homo sapiens
aattattaatacctg

SEQ ID NO: 354281 - DNA, 15 bp, Homo sapiens
gaattattaatacct

SEQ ID NO: 354282 - DNA, 15 bp, Homo sapiens
tgaattattaatacc

SEQ ID NO: 354283 - DNA, 15 bp, Homo sapiens
gtgaattattaatac

SEQ ID NO: 354284 - DNA, 15 bp, Homo sapiens
ggtgaattattaata

SEQ ID NO: 354285 - DNA, 15 bp, Homo sapiens
gggtgaattattaat

SEQ ID NO: 354286 - DNA, 15 bp, Homo sapiens
agggtgaattattaa

SEQ ID NO: 354287 - DNA, 15 bp, Homo sapiens
cagggtgaattatta

SEQ ID NO: 354288 - DNA, 15 bp, Homo sapiens
ccagggtgaattatt

SEQ ID NO: 354289 - DNA, 15 bp, Homo sapiens
tccagggtgaattat

SEQ ID NO: 354290 - DNA, 15 bp, Homo sapiens
ttccagggtgaatta

SEQ ID NO: 354291 - DNA, 15 bp, Homo sapiens
attccagggtgaatt

SEQ ID NO: 354292 - DNA, 15 bp, Homo sapiens
cattccagggtgaat

SEQ ID NO: 354293 - DNA, 15 bp, Homo sapiens
ccattccagggtgaa

SEQ ID NO: 354294 - DNA, 15 bp, Homo sapiens
accattccagggtga

SEQ ID NO: 354295 - DNA, 15 bp, Homo sapiens
taccattccagggtg

SEQ ID NO: 354296 - DNA, 15 bp, Homo sapiens
ctaccattccagggt

SEQ ID NO: 354297 - DNA, 15 bp, Homo sapiens
tctaccattccaggg

SEQ ID NO: 354298 - DNA, 15 bp, Homo sapiens
atctaccattccagg

SEQ ID NO: 354299 - DNA, 15 bp, Homo sapiens
gatctaccattccag

SEQ ID NO: 354300 - DNA, 15 bp, Homo sapiens
ggatctaccattcca

SEQ ID NO: 354301 - DNA, 15 bp, Homo sapiens
gggatctaccattcc

SEQ ID NO: 354302 - DNA, 15 bp, Homo sapiens
tgggatctaccattc

SEQ ID NO: 354303 - DNA, 15 bp, Homo sapiens
atgggatctaccatt

SEQ ID NO: 354304 - DNA, 15 bp, Homo sapiens
catgggatctaccat

SEQ ID NO: 354305 - DNA, 15 bp, Homo sapiens
tcatgggatctacca

SEQ ID NO: 354306 - DNA, 15 bp, Homo sapiens
ctcatgggatctacc

SEQ ID NO: 354307 - DNA, 15 bp, Homo sapiens
cctcatgggatctac

SEQ ID NO: 354308 - DNA, 15 bp, Homo sapiens
ccctcatgggatcta

SEQ ID NO: 354309 - DNA, 15 bp, Homo sapiens
gccctcatgggatct

SEQ ID NO: 354310 - DNA, 15 bp, Homo sapiens
tgccctcatgggatc

SEQ ID NO: 354311 - DNA, 15 bp, Homo sapiens
ctgccctcatgggat

SEQ ID NO: 354312 - DNA, 15 bp, Homo sapiens
tctgccctcatggga

SEQ ID NO: 354313 - DNA, 15 bp, Homo sapiens
ctctgccctcatggg

SEQ ID NO: 354314 - DNA, 15 bp, Homo sapiens
gctctgccctcatgg

SEQ ID NO: 354315 - DNA, 15 bp, Homo sapiens
agctctgccctcatg

SEQ ID NO: 354316 - DNA, 15 bp, Homo sapiens
gagctctgccctcat

SEQ ID NO: 354317 - DNA, 15 bp, Homo sapiens
tgagctctgccctca

SEQ ID NO: 354318 - DNA, 15 bp, Homo sapiens
atgagctctgccctc

SEQ ID NO: 354319 - DNA, 15 bp, Homo sapiens
catgagctctgccct

SEQ ID NO: 354320 - DNA, 15 bp, Homo sapiens
tcatgagctctgccc

SEQ ID NO: 354321 - DNA, 15 bp, Homo sapiens
gtcatgagctctgcc

SEQ ID NO: 354322 - DNA, 15 bp, Homo sapiens
tgtcatgagctctgc

SEQ ID NO: 354323 - DNA, 15 bp, Homo sapiens
ctgtcatgagctctg

SEQ ID NO: 354324 - DNA, 15 bp, Homo sapiens
actgtcatgagctct

SEQ ID NO: 354325 - DNA, 15 bp, Homo sapiens
gactgtcatgagctc

SEQ ID NO: 354326 - DNA, 15 bp, Homo sapiens
tgactgtcatgagct

SEQ ID NO: 354327 - DNA, 15 bp, Homo sapiens
gtgactgtcatgagc

SEQ ID NO: 354328 - DNA, 15 bp, Homo sapiens
agtgactgtcatgag

SEQ ID NO: 354329 - DNA, 15 bp, Homo sapiens
cagtgactgtcatga

SEQ ID NO: 354330 - DNA, 15 bp, Homo sapiens
ccagtgactgtcatg

SEQ ID NO: 354331 - DNA, 15 bp, Homo sapiens
gccagtgactgtcat

SEQ ID NO: 354332 - DNA, 15 bp, Homo sapiens
ggccagtgactgtca

SEQ ID NO: 354333 - DNA, 15 bp, Homo sapiens
gggccagtgactgtc

SEQ ID NO: 354334 - DNA, 15 bp, Homo sapiens
agggccagtgactgt

SEQ ID NO: 354335 - DNA, 15 bp, Homo sapiens
aagggccagtgactg

SEQ ID NO: 354336 - DNA, 15 bp, Homo sapiens
taagggccagtgact

SEQ ID NO: 354337 - DNA, 15 bp, Homo sapiens
gtaagggccagtgac

SEQ ID NO: 354338 - DNA, 15 bp, Homo sapiens
ggtaagggccagtga

SEQ ID NO: 354339 - DNA, 15 bp, Homo sapiens
gggtaagggccagtg

SEQ ID NO: 354340 - DNA, 15 bp, Homo sapiens
tgggtaagggccagt

SEQ ID NO: 354341 - DNA, 15 bp, Homo sapiens
atgggtaagggccag

SEQ ID NO: 354342 - DNA, 15 bp, Homo sapiens
tatgggtaagggcca

SEQ ID NO: 354343 - DNA, 15 bp, Homo sapiens
ctatgggtaagggcc

SEQ ID NO: 354344 - DNA, 15 bp, Homo sapiens
gctatgggtaagggc

SEQ ID NO: 354345 - DNA, 15 bp, Homo sapiens
agctatgggtaaggg

SEQ ID NO: 354346 - DNA, 15 bp, Homo sapiens
aagctatgggtaagg

SEQ ID NO: 354347 - DNA, 15 bp, Homo sapiens
gaagctatgggtaag

SEQ ID NO: 354348 - DNA, 15 bp, Homo sapiens
ggaagctatgggtaa

SEQ ID NO: 354349 - DNA, 15 bp, Homo sapiens
aggaagctatgggta

SEQ ID NO: 354350 - DNA, 15 bp, Homo sapiens
taggaagctatgggt

SEQ ID NO: 354351 - DNA, 15 bp, Homo sapiens
ttaggaagctatggg

SEQ ID NO: 354352 - DNA, 15 bp, Homo sapiens
gttaggaagctatgg

SEQ ID NO: 354353 - DNA, 15 bp, Homo sapiens
ggttaggaagctatg

SEQ ID NO: 354354 - DNA, 15 bp, Homo sapiens
gggttaggaagctat

SEQ ID NO: 354355 - DNA, 15 bp, Homo sapiens
agggttaggaagcta

SEQ ID NO: 354356 - DNA, 15 bp, Homo sapiens
gagggttaggaagct

SEQ ID NO: 354357 - DNA, 15 bp, Homo sapiens
ggagggttaggaagc

SEQ ID NO: 354358 - DNA, 15 bp, Homo sapiens
aggagggttaggaag

SEQ ID NO: 354359 - DNA, 15 bp, Homo sapiens
aaggagggttaggaa

SEQ ID NO: 354360 - DNA, 15 bp, Homo sapiens
gaaggagggttagga

SEQ ID NO: 354361 - DNA, 15 bp, Homo sapiens
ggaaggagggttagg

SEQ ID NO: 354362 - DNA, 15 bp, Homo sapiens
gggaaggagggttag

SEQ ID NO: 354363 - DNA, 15 bp, Homo sapiens
ggggaaggagggtta

SEQ ID NO: 354364 - DNA, 15 bp, Homo sapiens
tggggaaggagggtt

SEQ ID NO: 354365 - DNA, 15 bp, Homo sapiens
ttggggaaggagggt

SEQ ID NO: 354366 - DNA, 15 bp, Homo sapiens
gttggggaaggaggg

SEQ ID NO: 354367 - DNA, 15 bp, Homo sapiens
ggttggggaaggagg

SEQ ID NO: 354368 - DNA, 15 bp, Homo sapiens
gggttggggaaggag

SEQ ID NO: 354369 - DNA, 15 bp, Homo sapiens
tgggttggggaagga

SEQ ID NO: 354370 - DNA, 15 bp, Homo sapiens
ctgggttggggaagg

SEQ ID NO: 354371 - DNA, 15 bp, Homo sapiens
gctgggttggggaag

SEQ ID NO: 354372 - DNA, 15 bp, Homo sapiens
ggctgggttggggaa

SEQ ID NO: 354373 - DNA, 15 bp, Homo sapiens
aggctgggttgggga

SEQ ID NO: 354374 - DNA, 15 bp, Homo sapiens
aaggctgggttgggg

SEQ ID NO: 354375 - DNA, 15 bp, Homo sapiens
gaaggctgggttggg

SEQ ID NO: 354376 - DNA, 15 bp, Homo sapiens
ggaaggctgggttgg

SEQ ID NO: 354377 - DNA, 15 bp, Homo sapiens
gggaaggctgggttg

SEQ ID NO: 354378 - DNA, 15 bp, Homo sapiens
ggggaaggctgggtt

SEQ ID NO: 354379 - DNA, 15 bp, Homo sapiens
aggggaaggctgggt

SEQ ID NO: 354380 - DNA, 15 bp, Homo sapiens
aaggggaaggctggg

SEQ ID NO: 354381 - DNA, 15 bp, Homo sapiens
aaaggggaaggctgg

SEQ ID NO: 354382 - DNA, 15 bp, Homo sapiens
gaaaggggaaggctg

SEQ ID NO: 354383 - DNA, 15 bp, Homo sapiens
tgaaaggggaaggct

SEQ ID NO: 354384 - DNA, 15 bp, Homo sapiens
gtgaaaggggaaggc

SEQ ID NO: 354385 - DNA, 15 bp, Homo sapiens
agtgaaaggggaagg

SEQ ID NO: 354386 - DNA, 15 bp, Homo sapiens
aagtgaaaggggaag

SEQ ID NO: 354387 - DNA, 15 bp, Homo sapiens
gaagtgaaaggggaa

SEQ ID NO: 354388 - DNA, 15 bp, Homo sapiens
ggaagtgaaagggga

SEQ ID NO: 354389 - DNA, 15 bp, Homo sapiens
tggaagtgaaagggg

SEQ ID NO: 354390 - DNA, 15 bp, Homo sapiens
gtggaagtgaaaggg

SEQ ID NO: 354391 - DNA, 15 bp, Homo sapiens
ggtggaagtgaaagg

SEQ ID NO: 354392 - DNA, 15 bp, Homo sapiens
gggtggaagtgaaag

SEQ ID NO: 354393 - DNA, 15 bp, Homo sapiens
ggggtggaagtgaaa

SEQ ID NO: 354394 - DNA, 15 bp, Homo sapiens
aggggtggaagtgaa

SEQ ID NO: 354395 - DNA, 15 bp, Homo sapiens
taggggtggaagtga

SEQ ID NO: 354396 - DNA, 15 bp, Homo sapiens
ctaggggtggaagtg

SEQ ID NO: 354397 - DNA, 15 bp, Homo sapiens
gctaggggtggaagt

SEQ ID NO: 354398 - DNA, 15 bp, Homo sapiens
agctaggggtggaag

SEQ ID NO: 354399 - DNA, 15 bp, Homo sapiens
gagctaggggtggaa

SEQ ID NO: 354400 - DNA, 15 bp, Homo sapiens
ggagctaggggtgga

SEQ ID NO: 354401 - DNA, 15 bp, Homo sapiens
aggagctaggggtgg

SEQ ID NO: 354402 - DNA, 15 bp, Homo sapiens
gaggagctaggggtg

SEQ ID NO: 354403 - DNA, 15 bp, Homo sapiens
tgaggagctaggggt

SEQ ID NO: 354404 - DNA, 15 bp, Homo sapiens
atgaggagctagggg

SEQ ID NO: 354405 - DNA, 15 bp, Homo sapiens
aatgaggagctaggg

SEQ ID NO: 354406 - DNA, 15 bp, Homo sapiens
gaatgaggagctagg

SEQ ID NO: 354407 - DNA, 15 bp, Homo sapiens
tgaatgaggagctag

SEQ ID NO: 354408 - DNA, 15 bp, Homo sapiens
gtgaatgaggagcta

SEQ ID NO: 354409 - DNA, 15 bp, Homo sapiens
agtgaatgaggagct

SEQ ID NO: 354410 - DNA, 15 bp, Homo sapiens
aagtgaatgaggagc

SEQ ID NO: 354411 - DNA, 15 bp, Homo sapiens
aaagtgaatgaggag

SEQ ID NO: 354412 - DNA, 15 bp, Homo sapiens
gaaagtgaatgagga

SEQ ID NO: 354413 - DNA, 15 bp, Homo sapiens
tgaaagtgaatgagg

SEQ ID NO: 354414 - DNA, 15 bp, Homo sapiens
atgaaagtgaatgag

SEQ ID NO: 354415 - DNA, 15 bp, Homo sapiens
aatgaaagtgaatga

SEQ ID NO: 354416 - DNA, 15 bp, Homo sapiens
gaatgaaagtgaatg

SEQ ID NO: 354417 - DNA, 15 bp, Homo sapiens
tgaatgaaagtgaat

SEQ ID NO: 354418 - DNA, 15 bp, Homo sapiens
ctgaatgaaagtgaa

SEQ ID NO: 354419 - DNA, 15 bp, Homo sapiens
actgaatgaaagtga

SEQ ID NO: 354420 - DNA, 15 bp, Homo sapiens
tactgaatgaaagtg

SEQ ID NO: 354421 - DNA, 15 bp, Homo sapiens
ttactgaatgaaagt

SEQ ID NO: 354422 - DNA, 15 bp, Homo sapiens
gttactgaatgaaag

SEQ ID NO: 354423 - DNA, 15 bp, Homo sapiens
ggttactgaatgaaa

SEQ ID NO: 354424 - DNA, 15 bp, Homo sapiens
aggttactgaatgaa

SEQ ID NO: 354425 - DNA, 15 bp, Homo sapiens
aaggttactgaatga

SEQ ID NO: 354426 - DNA, 15 bp, Homo sapiens
gaaggttactgaatg

SEQ ID NO: 354427 - DNA, 15 bp, Homo sapiens
tgaaggttactgaat

SEQ ID NO: 354428 - DNA, 15 bp, Homo sapiens
ttgaaggttactgaa

SEQ ID NO: 354429 - DNA, 15 bp, Homo sapiens
gttgaaggttactga

SEQ ID NO: 354430 - DNA, 15 bp, Homo sapiens
tgttgaaggttactg

SEQ ID NO: 354431 - DNA, 15 bp, Homo sapiens
atgttgaaggttact

SEQ ID NO: 354432 - DNA, 15 bp, Homo sapiens
aatgttgaaggttac

SEQ ID NO: 354433 - DNA, 15 bp, Homo sapiens
aaatgttgaaggtta

SEQ ID NO: 354434 - DNA, 15 bp, Homo sapiens
gaaatgttgaaggtt

SEQ ID NO: 354435 - DNA, 15 bp, Homo sapiens
tgaaatgttgaaggt

SEQ ID NO: 354436 - DNA, 15 bp, Homo sapiens
gtgaaatgttgaagg

SEQ ID NO: 354437 - DNA, 15 bp, Homo sapiens
cgtgaaatgttgaag

SEQ ID NO: 354438 - DNA, 15 bp, Homo sapiens
acgtgaaatgttgaa

SEQ ID NO: 354439 - DNA, 15 bp, Homo sapiens
gacgtgaaatgttga

SEQ ID NO: 354440 - DNA, 15 bp, Homo sapiens
tgacgtgaaatgttg

SEQ ID NO: 354441 - DNA, 15 bp, Homo sapiens
atgacgtgaaatgtt

SEQ ID NO: 354442 - DNA, 15 bp, Homo sapiens
gatgacgtgaaatgt

SEQ ID NO: 354443 - DNA, 15 bp, Homo sapiens
agatgacgtgaaatg

SEQ ID NO: 354444 - DNA, 15 bp, Homo sapiens
gagatgacgtgaaat

SEQ ID NO: 354445 - DNA, 15 bp, Homo sapiens
tgagatgacgtgaaa

SEQ ID NO: 354446 - DNA, 15 bp, Homo sapiens
atgagatgacgtgaa

SEQ ID NO: 354447 - DNA, 15 bp, Homo sapiens
gatgagatgacgtga

SEQ ID NO: 354448 - DNA, 15 bp, Homo sapiens
ggatgagatgacgtg

SEQ ID NO: 354449 - DNA, 15 bp, Homo sapiens
cggatgagatgacgt

SEQ ID NO: 354450 - DNA, 15 bp, Homo sapiens
ccggatgagatgacg

SEQ ID NO: 354451 - DNA, 15 bp, Homo sapiens
tccggatgagatgac

SEQ ID NO: 354452 - DNA, 15 bp, Homo sapiens
ctccggatgagatga

SEQ ID NO: 354453 - DNA, 15 bp, Homo sapiens
tctccggatgagatg

SEQ ID NO: 354454 - DNA, 15 bp, Homo sapiens
ttctccggatgagat

SEQ ID NO: 354455 - DNA, 15 bp, Homo sapiens
tttctccggatgaga

SEQ ID NO: 354456 - DNA, 15 bp, Homo sapiens
atttctccggatgag

SEQ ID NO: 354457 - DNA, 15 bp, Homo sapiens
tatttctccggatga

SEQ ID NO: 354458 - DNA, 15 bp, Homo sapiens
atatttctccggatg

SEQ ID NO: 354459 - DNA, 15 bp, Homo sapiens
gatatttctccggat

SEQ ID NO: 354460 - DNA, 15 bp, Homo sapiens
tgatatttctccgga

SEQ ID NO: 354461 - DNA, 15 bp, Homo sapiens
ctgatatttctccgg

SEQ ID NO: 354462 - DNA, 15 bp, Homo sapiens
cctgatatttctccg

SEQ ID NO: 354463 - DNA, 15 bp, Homo sapiens
acctgatatttctcc

SEQ ID NO: 354464 - DNA, 15 bp, Homo sapiens
cacctgatatttctc

SEQ ID NO: 354465 - DNA, 15 bp, Homo sapiens
gcacctgatatttct

SEQ ID NO: 354466 - DNA, 15 bp, Homo sapiens
cgcacctgatatttc

SEQ ID NO: 354467 - DNA, 15 bp, Homo sapiens
ccgcacctgatattt

SEQ ID NO: 354468 - DNA, 15 bp, Homo sapiens
tccgcacctgatatt

SEQ ID NO: 354469 - DNA, 15 bp, Homo sapiens
gtccgcacctgatat

SEQ ID NO: 354470 - DNA, 15 bp, Homo sapiens
tgtccgcacctgata

SEQ ID NO: 354471 - DNA, 15 bp, Homo sapiens
atgtccgcacctgat

SEQ ID NO: 354472 - DNA, 15 bp, Homo sapiens
aatgtccgcacctga

SEQ ID NO: 354473 - DNA, 15 bp, Homo sapiens
gaatgtccgcacctg

SEQ ID NO: 354474 - DNA, 15 bp, Homo sapiens
ggaatgtccgcacct

SEQ ID NO: 354475 - DNA, 15 bp, Homo sapiens
tggaatgtccgcacc

SEQ ID NO: 354476 - DNA, 15 bp, Homo sapiens
atggaatgtccgcac

SEQ ID NO: 354477 - DNA, 15 bp, Homo sapiens
aatggaatgtccgca

SEQ ID NO: 354478 - DNA, 15 bp, Homo sapiens
aaatggaatgtccgc

SEQ ID NO: 354479 - DNA, 15 bp, Homo sapiens
gaaatggaatgtccg

SEQ ID NO: 354480 - DNA, 15 bp, Homo sapiens
agaaatggaatgtcc

SEQ ID NO: 354481 - DNA, 15 bp, Homo sapiens
cagaaatggaatgtc

SEQ ID NO: 354482 - DNA, 15 bp, Homo sapiens
ccagaaatggaatgt

SEQ ID NO: 354483 - DNA, 15 bp, Homo sapiens
tccagaaatggaatg

SEQ ID NO: 354484 - DNA, 15 bp, Homo sapiens
ttccagaaatggaat

SEQ ID NO: 354485 - DNA, 15 bp, Homo sapiens
tttccagaaatggaa

SEQ ID NO: 354486 - DNA, 15 bp, Homo sapiens
atttccagaaatgga

SEQ ID NO: 354487 - DNA, 15 bp, Homo sapiens
gatttccagaaatgg

SEQ ID NO: 354488 - DNA, 15 bp, Homo sapiens
ggatttccagaaatg

SEQ ID NO: 354489 - DNA, 15 bp, Homo sapiens
aggatttccagaaat

SEQ ID NO: 354490 - DNA, 15 bp, Homo sapiens
caggatttccagaaa

SEQ ID NO: 354491 - DNA, 15 bp, Homo sapiens
acaggatttccagaa

SEQ ID NO: 354492 - DNA, 15 bp, Homo sapiens
cacaggatttccaga

SEQ ID NO: 354493 - DNA, 15 bp, Homo sapiens
tcacaggatttccag

SEQ ID NO: 354494 - DNA, 15 bp, Homo sapiens
atcacaggatttcca

SEQ ID NO: 354495 - DNA, 15 bp, Homo sapiens
tatcacaggatttcc

SEQ ID NO: 354496 - DNA, 15 bp, Homo sapiens
ctatcacaggatttc

SEQ ID NO: 354497 - DNA, 15 bp, Homo sapiens
actatcacaggattt

SEQ ID NO: 354498 - DNA, 15 bp, Homo sapiens
tactatcacaggatt

SEQ ID NO: 354499 - DNA, 15 bp, Homo sapiens
atactatcacaggat

SEQ ID NO: 354500 - DNA, 15 bp, Homo sapiens
tatactatcacagga

SEQ ID NO: 354501 - DNA, 15 bp, Homo sapiens
ctatactatcacagg

SEQ ID NO: 354502 - DNA, 15 bp, Homo sapiens
actatactatcacag

SEQ ID NO: 354503 - DNA, 15 bp, Homo sapiens
aactatactatcaca

SEQ ID NO: 354504 - DNA, 15 bp, Homo sapiens
aaactatactatcac

SEQ ID NO: 354505 - DNA, 15 bp, Homo sapiens
taaactatactatca

SEQ ID NO: 354506 - DNA, 15 bp, Homo sapiens
ttaaactatactatc

SEQ ID NO: 354507 - DNA, 15 bp, Homo sapiens
gttaaactatactat

SEQ ID NO: 354508 - DNA, 15 bp, Homo sapiens
cgttaaactatacta

SEQ ID NO: 354509 - DNA, 15 bp, Homo sapiens
acgttaaactatact

SEQ ID NO: 354510 - DNA, 15 bp, Homo sapiens
aacgttaaactatac

SEQ ID NO: 354511 - DNA, 15 bp, Homo sapiens
aaacgttaaactata

SEQ ID NO: 354512 - DNA, 15 bp, Homo sapiens
caaacgttaaactat

SEQ ID NO: 354513 - DNA, 15 bp, Homo sapiens
gcaaacgttaaacta

SEQ ID NO: 354514 - DNA, 15 bp, Homo sapiens
tgcaaacgttaaact

SEQ ID NO: 354515 - DNA, 15 bp, Homo sapiens
atgcaaacgttaaac

SEQ ID NO: 354516 - DNA, 15 bp, Homo sapiens
aatgcaaacgttaaa

SEQ ID NO: 354517 - DNA, 15 bp, Homo sapiens
aaatgcaaacgttaa

SEQ ID NO: 354518 - DNA, 15 bp, Homo sapiens
gaaatgcaaacgtta

SEQ ID NO: 354519 - DNA, 15 bp, Homo sapiens
agaaatgcaaacgtt

SEQ ID NO: 354520 - DNA, 15 bp, Homo sapiens
aagaaatgcaaacgt

SEQ ID NO: 354521 - DNA, 15 bp, Homo sapiens
aaagaaatgcaaacg

SEQ ID NO: 354522 - DNA, 15 bp, Homo sapiens
gaaagaaatgcaaac

SEQ ID NO: 354523 - DNA, 15 bp, Homo sapiens
ggaaagaaatgcaaa

SEQ ID NO: 354524 - DNA, 15 bp, Homo sapiens
tggaaagaaatgcaa

SEQ ID NO: 354525 - DNA, 15 bp, Homo sapiens
atggaaagaaatgca

SEQ ID NO: 354526 - DNA, 15 bp, Homo sapiens
aatggaaagaaatgc

SEQ ID NO: 354527 - DNA, 15 bp, Homo sapiens
aaatggaaagaaatg

SEQ ID NO: 354528 - DNA, 15 bp, Homo sapiens
gaaatggaaagaaat

SEQ ID NO: 354529 - DNA, 15 bp, Homo sapiens
agaaatggaaagaaa

SEQ ID NO: 354530 - DNA, 15 bp, Homo sapiens
aagaaatggaaagaa

SEQ ID NO: 354531 - DNA, 15 bp, Homo sapiens
gaagaaatggaaaga

SEQ ID NO: 354532 - DNA, 15 bp, Homo sapiens
tgaagaaatggaaag

SEQ ID NO: 354533 - DNA, 15 bp, Homo sapiens
atgaagaaatggaaa

SEQ ID NO: 354534 - DNA, 15 bp, Homo sapiens
tatgaagaaatggaa

SEQ ID NO: 354535 - DNA, 15 bp, Homo sapiens
ctatgaagaaatgga

SEQ ID NO: 354536 - DNA, 15 bp, Homo sapiens
gctatgaagaaatgg

SEQ ID NO: 354537 - DNA, 15 bp, Homo sapiens
agctatgaagaaatg

SEQ ID NO: 354538 - DNA, 15 bp, Homo sapiens
gagctatgaagaaat

SEQ ID NO: 354539 - DNA, 15 bp, Homo sapiens
agagctatgaagaaa

SEQ ID NO: 354540 - DNA, 15 bp, Homo sapiens
gagagctatgaagaa

SEQ ID NO: 354541 - DNA, 15 bp, Homo sapiens
agagagctatgaaga

SEQ ID NO: 354542 - DNA, 15 bp, Homo sapiens
tagagagctatgaag

SEQ ID NO: 354543 - DNA, 15 bp, Homo sapiens
atagagagctatgaa

SEQ ID NO: 354544 - DNA, 15 bp, Homo sapiens
gatagagagctatga

SEQ ID NO: 354545 - DNA, 15 bp, Homo sapiens
tgatagagagctatg

SEQ ID NO: 354546 - DNA, 15 bp, Homo sapiens
ttgatagagagctat

SEQ ID NO: 354547 - DNA, 15 bp, Homo sapiens
cttgatagagagcta

SEQ ID NO: 354548 - DNA, 15 bp, Homo sapiens
ccttgatagagagct

SEQ ID NO: 354549 - DNA, 15 bp, Homo sapiens
tccttgatagagagc

SEQ ID NO: 354550 - DNA, 15 bp, Homo sapiens
ttccttgatagagag

SEQ ID NO: 354551 - DNA, 15 bp, Homo sapiens
tttccttgatagaga

SEQ ID NO: 354552 - DNA, 15 bp, Homo sapiens
ttttccttgatagag

SEQ ID NO: 354553 - DNA, 15 bp, Homo sapiens
cttttccttgataga

SEQ ID NO: 354554 - DNA, 15 bp, Homo sapiens
tcttttccttgatag

SEQ ID NO: 354555 - DNA, 15 bp, Homo sapiens
ctcttttccttgata

SEQ ID NO: 354556 - DNA, 15 bp, Homo sapiens
actcttttccttgat

SEQ ID NO: 354557 - DNA, 15 bp, Homo sapiens
gactcttttccttga

SEQ ID NO: 354558 - DNA, 15 bp, Homo sapiens
tgactcttttccttg

SEQ ID NO: 354559 - DNA, 15 bp, Homo sapiens
ttgactcttttcctt

SEQ ID NO: 354560 - DNA, 15 bp, Homo sapiens
tttgactcttttcct

SEQ ID NO: 354561 - DNA, 15 bp, Homo sapiens
atttgactcttttcc

SEQ ID NO: 354562 - DNA, 15 bp, Homo sapiens
aatttgactcttttc

SEQ ID NO: 354563 - DNA, 15 bp, Homo sapiens
gaatttgactctttt

SEQ ID NO: 354564 - DNA, 15 bp, Homo sapiens
tgaatttgactcttt

SEQ ID NO: 354565 - DNA, 15 bp, Homo sapiens
ctgaatttgactctt

SEQ ID NO: 354566 - DNA, 15 bp, Homo sapiens
gctgaatttgactct

SEQ ID NO: 354567 - DNA, 15 bp, Homo sapiens
agctgaatttgactc

SEQ ID NO: 354568 - DNA, 15 bp, Homo sapiens
cagctgaatttgact

SEQ ID NO: 354569 - DNA, 15 bp, Homo sapiens
acagctgaatttgac

SEQ ID NO: 354570 - DNA, 15 bp, Homo sapiens
gacagctgaatttga

SEQ ID NO: 354571 - DNA, 15 bp, Homo sapiens
agacagctgaatttg

SEQ ID NO: 354572 - DNA, 15 bp, Homo sapiens
cagacagctgaattt

SEQ ID NO: 354573 - DNA, 15 bp, Homo sapiens
ccagacagctgaatt

SEQ ID NO: 354574 - DNA, 15 bp, Homo sapiens
gccagacagctgaat

SEQ ID NO: 354575 - DNA, 15 bp, Homo sapiens
ggccagacagctgaa

SEQ ID NO: 354576 - DNA, 15 bp, Homo sapiens
cggccagacagctga

SEQ ID NO: 354577 - DNA, 15 bp, Homo sapiens
tcggccagacagctg

SEQ ID NO: 354578 - DNA, 15 bp, Homo sapiens
ctcggccagacagct

SEQ ID NO: 354579 - DNA, 15 bp, Homo sapiens
cctcggccagacagc

SEQ ID NO: 354580 - DNA, 15 bp, Homo sapiens
tcctcggccagacag

SEQ ID NO: 354581 - DNA, 15 bp, Homo sapiens
ctcctcggccagaca

SEQ ID NO: 354582 - DNA, 15 bp, Homo sapiens
gctcctcggccagac

SEQ ID NO: 354583 - DNA, 15 bp, Homo sapiens
tgctcctcggccaga

SEQ ID NO: 354584 - DNA, 15 bp, Homo sapiens
ttgctcctcggccag

SEQ ID NO: 354585 - DNA, 15 bp, Homo sapiens
cttgctcctcggcca

SEQ ID NO: 354586 - DNA, 15 bp, Homo sapiens
acttgctcctcggcc

SEQ ID NO: 354587 - DNA, 15 bp, Homo sapiens
aacttgctcctcggc

SEQ ID NO: 354588 - DNA, 15 bp, Homo sapiens
gaacttgctcctcgg

SEQ ID NO: 354589 - DNA, 15 bp, Homo sapiens
agaacttgctcctcg

SEQ ID NO: 354590 - DNA, 15 bp, Homo sapiens
gagaacttgctcctc

SEQ ID NO: 354591 - DNA, 15 bp, Homo sapiens
tgagaacttgctcct

SEQ ID NO: 354592 - DNA, 15 bp, Homo sapiens
ctgagaacttgctcc

SEQ ID NO: 354593 - DNA, 15 bp, Homo sapiens
cctgagaacttgctc

SEQ ID NO: 354594 - DNA, 15 bp, Homo sapiens
ccctgagaacttgct

SEQ ID NO: 354595 - DNA, 15 bp, Homo sapiens
accctgagaacttgc

SEQ ID NO: 354596 - DNA, 15 bp, Homo sapiens
gaccctgagaacttg

SEQ ID NO: 354597 - DNA, 15 bp, Homo sapiens
agaccctgagaactt

SEQ ID NO: 354598 - DNA, 15 bp, Homo sapiens
tagaccctgagaact

SEQ ID NO: 354599 - DNA, 15 bp, Homo sapiens
gtagaccctgagaac

SEQ ID NO: 354600 - DNA, 15 bp, Homo sapiens
agtagaccctgagaa

SEQ ID NO: 354601 - DNA, 15 bp, Homo sapiens
tagtagaccctgaga

SEQ ID NO: 354602 - DNA, 15 bp, Homo sapiens
atagtagaccctgag

SEQ ID NO: 354603 - DNA, 15 bp, Homo sapiens
aatagtagaccctga

SEQ ID NO: 354604 - DNA, 15 bp, Homo sapiens
aaatagtagaccctg

SEQ ID NO: 354605 - DNA, 15 bp, Homo sapiens
taaatagtagaccct

SEQ ID NO: 354606 - DNA, 15 bp, Homo sapiens
gtaaatagtagaccc

SEQ ID NO: 354607 - DNA, 15 bp, Homo sapiens
agtaaatagtagacc

SEQ ID NO: 354608 - DNA, 15 bp, Homo sapiens
gagtaaatagtagac

SEQ ID NO: 354609 - DNA, 15 bp, Homo sapiens
tgagtaaatagtaga

SEQ ID NO: 354610 - DNA, 15 bp, Homo sapiens
atgagtaaatagtag

SEQ ID NO: 354611 - DNA, 15 bp, Homo sapiens
aatgagtaaatagta

SEQ ID NO: 354612 - DNA, 15 bp, Homo sapiens
aaatgagtaaatagt

SEQ ID NO: 354613 - DNA, 15 bp, Homo sapiens
aaaatgagtaaatag

SEQ ID NO: 354614 - DNA, 15 bp, Homo sapiens
gaaaatgagtaaata

SEQ ID NO: 354615 - DNA, 15 bp, Homo sapiens
agaaaatgagtaaat

SEQ ID NO: 354616 - DNA, 15 bp, Homo sapiens
aagaaaatgagtaaa

SEQ ID NO: 354617 - DNA, 15 bp, Homo sapiens
aaagaaaatgagtaa

SEQ ID NO: 354618 - DNA, 15 bp, Homo sapiens
aaaagaaaatgagta

SEQ ID NO: 354619 - DNA, 15 bp, Homo sapiens
aaaaagaaaatgagt

SEQ ID NO: 354620 - DNA, 15 bp, Homo sapiens
gaaaaagaaaatgag

SEQ ID NO: 354621 - DNA, 15 bp, Homo sapiens
agaaaaagaaaatga

SEQ ID NO: 354622 - DNA, 15 bp, Homo sapiens
tagaaaaagaaaatg

SEQ ID NO: 354623 - DNA, 15 bp, Homo sapiens
atagaaaaagaaaat

SEQ ID NO: 354624 - DNA, 15 bp, Homo sapiens
tatagaaaaagaaaa

SEQ ID NO: 354625 - DNA, 15 bp, Homo sapiens
atatagaaaaagaaa

SEQ ID NO: 354626 - DNA, 15 bp, Homo sapiens
tatatagaaaaagaa

SEQ ID NO: 354627 - DNA, 15 bp, Homo sapiens
ttatatagaaaaaga

SEQ ID NO: 354628 - DNA, 15 bp, Homo sapiens
gttatatagaaaaag

SEQ ID NO: 354629 - DNA, 15 bp, Homo sapiens
tgttatatagaaaaa

SEQ ID NO: 354630 - DNA, 15 bp, Homo sapiens
ttgttatatagaaaa

SEQ ID NO: 354631 - DNA, 15 bp, Homo sapiens
tttgttatatagaaa

SEQ ID NO: 354632 - DNA, 15 bp, Homo sapiens
gtttgttatatagaa

SEQ ID NO: 354633 - DNA, 15 bp, Homo sapiens
ggtttgttatataga

SEQ ID NO: 354634 - DNA, 15 bp, Homo sapiens
aggtttgttatatag

SEQ ID NO: 354635 - DNA, 15 bp, Homo sapiens
aaggtttgttatata

SEQ ID NO: 354636 - DNA, 15 bp, Homo sapiens
caaggtttgttatat

SEQ ID NO: 354637 - DNA, 15 bp, Homo sapiens
acaaggtttgttata

SEQ ID NO: 354638 - DNA, 15 bp, Homo sapiens
gacaaggtttgttat

SEQ ID NO: 354639 - DNA, 15 bp, Homo sapiens
agacaaggtttgtta

SEQ ID NO: 354640 - DNA, 15 bp, Homo sapiens
tagacaaggtttgtt

SEQ ID NO: 354641 - DNA, 15 bp, Homo sapiens
ttagacaaggtttgt

SEQ ID NO: 354642 - DNA, 15 bp, Homo sapiens
attagacaaggtttg

SEQ ID NO: 354643 - DNA, 15 bp, Homo sapiens
cattagacaaggttt

SEQ ID NO: 354644 - DNA, 15 bp, Homo sapiens
tcattagacaaggtt

SEQ ID NO: 354645 - DNA, 15 bp, Homo sapiens
atcattagacaaggt

SEQ ID NO: 354646 - DNA, 15 bp, Homo sapiens
aatcattagacaagg

SEQ ID NO: 354647 - DNA, 15 bp, Homo sapiens
aaatcattagacaag

SEQ ID NO: 354648 - DNA, 15 bp, Homo sapiens
taaatcattagacaa

SEQ ID NO: 354649 - DNA, 15 bp, Homo sapiens
gtaaatcattagaca

SEQ ID NO: 354650 - DNA, 15 bp, Homo sapiens
tgtaaatcattagac

SEQ ID NO: 354651 - DNA, 15 bp, Homo sapiens
atgtaaatcattaga

SEQ ID NO: 354652 - DNA, 15 bp, Homo sapiens
aatgtaaatcattag

SEQ ID NO: 354653 - DNA, 15 bp, Homo sapiens
aaatgtaaatcatta

SEQ ID NO: 354654 - DNA, 15 bp, Homo sapiens
gaaatgtaaatcatt

SEQ ID NO: 354655 - DNA, 15 bp, Homo sapiens
agaaatgtaaatcat

SEQ ID NO: 354656 - DNA, 15 bp, Homo sapiens
aagaaatgtaaatca

SEQ ID NO: 354657 - DNA, 15 bp, Homo sapiens
gaagaaatgtaaatc

SEQ ID NO: 354658 - DNA, 15 bp, Homo sapiens
ggaagaaatgtaaat

SEQ ID NO: 354659 - DNA, 15 bp, Homo sapiens
gggaagaaatgtaaa

SEQ ID NO: 354660 - DNA, 15 bp, Homo sapiens
ggggaagaaatgtaa

SEQ ID NO: 354661 - DNA, 15 bp, Homo sapiens
gggggaagaaatgta

SEQ ID NO: 354662 - DNA, 15 bp, Homo sapiens
tgggggaagaaatgt

SEQ ID NO: 354663 - DNA, 15 bp, Homo sapiens
ctgggggaagaaatg

SEQ ID NO: 354664 - DNA, 15 bp, Homo sapiens
tctgggggaagaaat

SEQ ID NO: 354665 - DNA, 15 bp, Homo sapiens
gtctgggggaagaaa

SEQ ID NO: 354666 - DNA, 15 bp, Homo sapiens
agtctgggggaagaa

SEQ ID NO: 354667 - DNA, 15 bp, Homo sapiens
gagtctgggggaaga

SEQ ID NO: 354668 - DNA, 15 bp, Homo sapiens
tagagtctgggggaa

SEQ ID NO: 354669 - DNA, 15 bp, Homo sapiens
ttagagtctggggga

SEQ ID NO: 354670 - DNA, 15 bp, Homo sapiens
tttagagtctggggg

SEQ ID NO: 354671 - DNA, 15 bp, Homo sapiens
ttttagagtctgggg

SEQ ID NO: 354672 - DNA, 15 bp, Homo sapiens
cttttagagtctggg

SEQ ID NO: 354673 - DNA, 15 bp, Homo sapiens
acttttagagtctgg

SEQ ID NO: 354674 - DNA, 15 bp, Homo sapiens
aacttttagagtctg

SEQ ID NO: 354675 - DNA, 15 bp, Homo sapiens
aaacttttagagtct

SEQ ID NO: 354676 - DNA, 15 bp, Homo sapiens
caaacttttagagtc

SEQ ID NO: 354677 - DNA, 15 bp, Homo sapiens
gcaaacttttagagt

SEQ ID NO: 354678 - DNA, 15 bp, Homo sapiens
ggcaaacttttagag

SEQ ID NO: 354679 - DNA, 15 bp, Homo sapiens
tggcaaacttttaga

SEQ ID NO: 354680 - DNA, 15 bp, Homo sapiens
ttggcaaacttttag

SEQ ID NO: 354681 - DNA, 15 bp, Homo sapiens
tttggcaaactttta

SEQ ID NO: 354682 - DNA, 15 bp, Homo sapiens
ctttggcaaactttt

SEQ ID NO: 354683 - DNA, 15 bp, Homo sapiens
actttggcaaacttt

SEQ ID NO: 354684 - DNA, 15 bp, Homo sapiens
cactttggcaaactt

SEQ ID NO: 354685 - DNA, 15 bp, Homo sapiens
acactttggcaaact

SEQ ID NO: 354686 - DNA, 15 bp, Homo sapiens
cacactttggcaaac

SEQ ID NO: 354687 - DNA, 15 bp, Homo sapiens
ccacactttggcaaa

SEQ ID NO: 354688 - DNA, 15 bp, Homo sapiens
tccacactttggcaa

SEQ ID NO: 354689 - DNA, 15 bp, Homo sapiens
gtccacactttggca

SEQ ID NO: 354690 - DNA, 15 bp, Homo sapiens
agtccacactttggc

SEQ ID NO: 354691 - DNA, 15 bp, Homo sapiens
gagtccacactttgg

SEQ ID NO: 354692 - DNA, 15 bp, Homo sapiens
ggagtccacactttg

SEQ ID NO: 354693 - DNA, 15 bp, Homo sapiens
aggagtccacacttt

SEQ ID NO: 354694 - DNA, 15 bp, Homo sapiens
taggagtccacactt

SEQ ID NO: 354695 - DNA, 15 bp, Homo sapiens
ctaggagtccacact

SEQ ID NO: 354696 - DNA, 15 bp, Homo sapiens
actaggagtccacac

SEQ ID NO: 354697 - DNA, 15 bp, Homo sapiens
cactaggagtccaca

SEQ ID NO: 354698 - DNA, 15 bp, Homo sapiens
ccactaggagtccac

SEQ ID NO: 354699 - DNA, 15 bp, Homo sapiens
tccactaggagtcca

SEQ ID NO: 354700 - DNA, 15 bp, Homo sapiens
gtccactaggagtcc

SEQ ID NO: 354701 - DNA, 15 bp, Homo sapiens
tgtccactaggagtc

SEQ ID NO: 354702 - DNA, 15 bp, Homo sapiens
ttgtccactaggagt

SEQ ID NO: 354703 - DNA, 15 bp, Homo sapiens
cttgtccactaggag

SEQ ID NO: 354704 - DNA, 15 bp, Homo sapiens
acttgtccactagga

SEQ ID NO: 354705 - DNA, 15 bp, Homo sapiens
tacttgtccactagg

SEQ ID NO: 354706 - DNA, 15 bp, Homo sapiens
ttacttgtccactag

SEQ ID NO: 354707 - DNA, 15 bp, Homo sapiens
attacttgtccacta

SEQ ID NO: 354708 - DNA, 15 bp, Homo sapiens
cattacttgtccact

SEQ ID NO: 354709 - DNA, 15 bp, Homo sapiens
acattacttgtccac

SEQ ID NO: 354710 - DNA, 15 bp, Homo sapiens
gacattacttgtcca

SEQ ID NO: 354711 - DNA, 15 bp, Homo sapiens
agacattacttgtcc

SEQ ID NO: 354712 - DNA, 15 bp, Homo sapiens
tagacattacttgtc

SEQ ID NO: 354713 - DNA, 15 bp, Homo sapiens
ctagacattacttgt

SEQ ID NO: 354714 - DNA, 15 bp, Homo sapiens
actagacattacttg

SEQ ID NO: 354715 - DNA, 15 bp, Homo sapiens
aactagacattactt

SEQ ID NO: 354716 - DNA, 15 bp, Homo sapiens
aaactagacattact

SEQ ID NO: 354717 - DNA, 15 bp, Homo sapiens
caaactagacattac

SEQ ID NO: 354718 - DNA, 15 bp, Homo sapiens
tcaaactagacatta

SEQ ID NO: 354719 - DNA, 15 bp, Homo sapiens
atcaaactagacatt

SEQ ID NO: 354720 - DNA, 15 bp, Homo sapiens
catcaaactagacat

SEQ ID NO: 354721 - DNA, 15 bp, Homo sapiens
acatcaaactagaca

SEQ ID NO: 354722 - DNA, 15 bp, Homo sapiens
cacatcaaactagac

SEQ ID NO: 354723 - DNA, 15 bp, Homo sapiens
acacatcaaactaga

SEQ ID NO: 354724 - DNA, 15 bp, Homo sapiens
aacacatcaaactag

SEQ ID NO: 354725 - DNA, 15 bp, Homo sapiens
aaacacatcaaacta

SEQ ID NO: 354726 - DNA, 15 bp, Homo sapiens
caaacacatcaaact

SEQ ID NO: 354727 - DNA, 15 bp, Homo sapiens
tcaaacacatcaaac

SEQ ID NO: 354728 - DNA, 15 bp, Homo sapiens
ttcaaacacatcaaa

SEQ ID NO: 354729 - DNA, 15 bp, Homo sapiens
cttcaaacacatcaa

SEQ ID NO: 354730 - DNA, 15 bp, Homo sapiens
ccttcaaacacatca

SEQ ID NO: 354731 - DNA, 15 bp, Homo sapiens
tccttcaaacacatc

SEQ ID NO: 354732 - DNA, 15 bp, Homo sapiens
ttccttcaaacacat

SEQ ID NO: 354733 - DNA, 15 bp, Homo sapiens
attccttcaaacaca

SEQ ID NO: 354734 - DNA, 15 bp, Homo sapiens
aattccttcaaacac

SEQ ID NO: 354735 - DNA, 15 bp, Homo sapiens
aaattccttcaaaca

SEQ ID NO: 354736 - DNA, 15 bp, Homo sapiens
aaaattccttcaaac

SEQ ID NO: 354737 - DNA, 15 bp, Homo sapiens
gaaaattccttcaaa

SEQ ID NO: 354738 - DNA, 15 bp, Homo sapiens
agaaaattccttcaa

SEQ ID NO: 354739 - DNA, 15 bp, Homo sapiens
aagaaaattccttca

SEQ ID NO: 354740 - DNA, 15 bp, Homo sapiens
aaagaaaattccttc

SEQ ID NO: 354741 - DNA, 15 bp, Homo sapiens
caaagaaaattcctt

SEQ ID NO: 354742 - DNA, 15 bp, Homo sapiens
tcaaagaaaattcct

SEQ ID NO: 354743 - DNA, 15 bp, Homo sapiens
gtcaaagaaaattcc

SEQ ID NO: 354744 - DNA, 15 bp, Homo sapiens
agtcaaagaaaattc

SEQ ID NO: 354745 - DNA, 15 bp, Homo sapiens
aagtcaaagaaaatt

SEQ ID NO: 354746 - DNA, 15 bp, Homo sapiens
gaagtcaaagaaaat

SEQ ID NO: 354747 - DNA, 15 bp, Homo sapiens
tgaagtcaaagaaaa

SEQ ID NO: 354748 - DNA, 15 bp, Homo sapiens
ttgaagtcaaagaaa

SEQ ID NO: 354749 - DNA, 15 bp, Homo sapiens
tttgaagtcaaagaa

SEQ ID NO: 354750 - DNA, 15 bp, Homo sapiens
atttgaagtcaaaga

SEQ ID NO: 354751 - DNA, 15 bp, Homo sapiens
gatttgaagtcaaag

SEQ ID NO: 354752 - DNA, 15 bp, Homo sapiens
tgatttgaagtcaaa

SEQ ID NO: 354753 - DNA, 15 bp, Homo sapiens
atgatttgaagtcaa

SEQ ID NO: 354754 - DNA, 15 bp, Homo sapiens
aatgatttgaagtca

SEQ ID NO: 354755 - DNA, 15 bp, Homo sapiens
caatgatttgaagtc

SEQ ID NO: 354756 - DNA, 15 bp, Homo sapiens
tcaatgatttgaagt

SEQ ID NO: 354757 - DNA, 15 bp, Homo sapiens
gtcaatgatttgaag

SEQ ID NO: 354758 - DNA, 15 bp, Homo sapiens
tgtcaatgatttgaa

SEQ ID NO: 354759 - DNA, 15 bp, Homo sapiens
atgtcaatgatttga

SEQ ID NO: 354760 - DNA, 15 bp, Homo sapiens
tatgtcaatgatttg

SEQ ID NO: 354761 - DNA, 15 bp, Homo sapiens
atatgtcaatgattt

SEQ ID NO: 354762 - DNA, 15 bp, Homo sapiens
gatatgtcaatgatt

SEQ ID NO: 354763 - DNA, 15 bp, Homo sapiens
agatatgtcaatgat

SEQ ID NO: 354764 - DNA, 15 bp, Homo sapiens
aagatatgtcaatga

SEQ ID NO: 354765 - DNA, 15 bp, Homo sapiens
aaagatatgtcaatg

SEQ ID NO: 354766 - DNA, 15 bp, Homo sapiens
caaagatatgtcaat

SEQ ID NO: 354767 - DNA, 15 bp, Homo sapiens
tcaaagatatgtcaa

SEQ ID NO: 354768 - DNA, 15 bp, Homo sapiens
atcaaagatatgtca

SEQ ID NO: 354769 - DNA, 15 bp, Homo sapiens
aatcaaagatatgtc

SEQ ID NO: 354770 - DNA, 15 bp, Homo sapiens
aaatcaaagatatgt

SEQ ID NO: 354771 - DNA, 15 bp, Homo sapiens
taaatcaaagatatg

SEQ ID NO: 354772 - DNA, 15 bp, Homo sapiens
ataaatcaaagatat

SEQ ID NO: 354773 - DNA, 15 bp, Homo sapiens
aataaatcaaagata

SEQ ID NO: 354774 - DNA, 15 bp, Homo sapiens
aaataaatcaaagat

SEQ ID NO: 354775 - DNA, 15 bp, Homo sapiens
aaaataaatcaaaga

SEQ ID NO: 354776 - DNA, 15 bp, Homo sapiens
aaaaataaatcaaag

SEQ ID NO: 354777 - DNA, 15 bp, Homo sapiens
aaaaaataaatcaaa

SEQ ID NO: 354778 - DNA, 15 bp, Homo sapiens
aaaaaaataaatcaa

SEQ ID NO: 354779 - DNA, 15 bp, Homo sapiens
aaaaaaaataaatca

SEQ ID NO: 354780 - DNA, 15 bp, Homo sapiens
gaaaaaaaataaatc

SEQ ID NO: 354781 - DNA, 15 bp, Homo sapiens
agaaaaaaaataaat

SEQ ID NO: 354782 - DNA, 15 bp, Homo sapiens
gagaaaaaaaataaa

SEQ ID NO: 354783 - DNA, 15 bp, Homo sapiens
agagaaaaaaaataa

SEQ ID NO: 354784 - DNA, 15 bp, Homo sapiens
caaagagaaaaaaaa

SEQ ID NO: 354785 - DNA, 15 bp, Homo sapiens
gcaaagagaaaaaaa

SEQ ID NO: 354786 - DNA, 15 bp, Homo sapiens
agcaaagagaaaaaa

SEQ ID NO: 354787 - DNA, 15 bp, Homo sapiens
cagcaaagagaaaaa

SEQ ID NO: 354788 - DNA, 15 bp, Homo sapiens
gcagcaaagagaaaa

SEQ ID NO: 354789 - DNA, 15 bp, Homo sapiens
ggcagcaaagagaaa

SEQ ID NO: 354790 - DNA, 15 bp, Homo sapiens
aggcagcaaagagaa

SEQ ID NO: 354791 - DNA, 15 bp, Homo sapiens
aaggcagcaaagaga

SEQ ID NO: 354792 - DNA, 15 bp, Homo sapiens
caaggcagcaaagag

SEQ ID NO: 354793 - DNA, 15 bp, Homo sapiens
ccaaggcagcaaaga

SEQ ID NO: 354794 - DNA, 15 bp, Homo sapiens
tccaaggcagcaaag

SEQ ID NO: 354795 - DNA, 15 bp, Homo sapiens
ttccaaggcagcaaa

SEQ ID NO: 354796 - DNA, 15 bp, Homo sapiens
attccaaggcagcaa

SEQ ID NO: 354797 - DNA, 15 bp, Homo sapiens
tattccaaggcagca

SEQ ID NO: 354798 - DNA, 15 bp, Homo sapiens
gtattccaaggcagc

SEQ ID NO: 354799 - DNA, 15 bp, Homo sapiens
cgtattccaaggcag

SEQ ID NO: 354800 - DNA, 15 bp, Homo sapiens
ccgtattccaaggca

SEQ ID NO: 354801 - DNA, 15 bp, Homo sapiens
gccgtattccaaggc

SEQ ID NO: 354802 - DNA, 15 bp, Homo sapiens
ggccgtattccaagg

SEQ ID NO: 354803 - DNA, 15 bp, Homo sapiens
gggccgtattccaag

SEQ ID NO: 354804 - DNA, 15 bp, Homo sapiens
ggggccgtattccaa

SEQ ID NO: 354805 - DNA, 15 bp, Homo sapiens
aggggccgtattcca

SEQ ID NO: 354806 - DNA, 15 bp, Homo sapiens
taggggccgtattcc

SEQ ID NO: 354807 - DNA, 15 bp, Homo sapiens
gtaggggccgtattc

SEQ ID NO: 354808 - DNA, 15 bp, Homo sapiens
agtaggggccgtatt

SEQ ID NO: 354809 - DNA, 15 bp, Homo sapiens
gagtaggggccgtat

SEQ ID NO: 354810 - DNA, 15 bp, Homo sapiens
agagtaggggccgta

SEQ ID NO: 354811 - DNA, 15 bp, Homo sapiens
tagagtaggggccgt

SEQ ID NO: 354812 - DNA, 15 bp, Homo sapiens
atagagtaggggccg

SEQ ID NO: 354813 - DNA, 15 bp, Homo sapiens
aatagagtaggggcc

SEQ ID NO: 354814 - DNA, 15 bp, Homo sapiens
aaatagagtaggggc

SEQ ID NO: 354815 - DNA, 15 bp, Homo sapiens
aaaatagagtagggg

SEQ ID NO: 354816 - DNA, 15 bp, Homo sapiens
taaaatagagtaggg

SEQ ID NO: 354817 - DNA, 15 bp, Homo sapiens
ttaaaatagagtagg

SEQ ID NO: 354818 - DNA, 15 bp, Homo sapiens
gttaaaatagagtag

SEQ ID NO: 354819 - DNA, 15 bp, Homo sapiens
agttaaaatagagta

SEQ ID NO: 354820 - DNA, 15 bp, Homo sapiens
cagttaaaatagagt

SEQ ID NO: 354821 - DNA, 15 bp, Homo sapiens
gcagttaaaatagag

SEQ ID NO: 354822 - DNA, 15 bp, Homo sapiens
tgcagttaaaataga

SEQ ID NO: 354823 - DNA, 15 bp, Homo sapiens
gtgcagttaaaatag

SEQ ID NO: 354824 - DNA, 15 bp, Homo sapiens
tgtgcagttaaaata

SEQ ID NO: 354825 - DNA, 15 bp, Homo sapiens
gtgtgcagttaaaat

SEQ ID NO: 354826 - DNA, 15 bp, Homo sapiens
agtgtgcagttaaaa

SEQ ID NO: 354827 - DNA, 15 bp, Homo sapiens
cagtgtgcagttaaa

SEQ ID NO: 354828 - DNA, 15 bp, Homo sapiens
ccagtgtgcagttaa

SEQ ID NO: 354829 - DNA, 15 bp, Homo sapiens
accagtgtgcagtta

SEQ ID NO: 354830 - DNA, 15 bp, Homo sapiens
taccagtgtgcagtt

SEQ ID NO: 354831 - DNA, 15 bp, Homo sapiens
ctaccagtgtgcagt

SEQ ID NO: 354832 - DNA, 15 bp, Homo sapiens
actaccagtgtgcag

SEQ ID NO: 354833 - DNA, 15 bp, Homo sapiens
cactaccagtgtgca

SEQ ID NO: 354834 - DNA, 15 bp, Homo sapiens
tcactaccagtgtgc

SEQ ID NO: 354835 - DNA, 15 bp, Homo sapiens
atcactaccagtgtg

SEQ ID NO: 354836 - DNA, 15 bp, Homo sapiens
tatcactaccagtgt

SEQ ID NO: 354837 - DNA, 15 bp, Homo sapiens
atatcactaccagtg

SEQ ID NO: 354838 - DNA, 15 bp, Homo sapiens
tatatcactaccagt

SEQ ID NO: 354839 - DNA, 15 bp, Homo sapiens
atatatcactaccag

SEQ ID NO: 354840 - DNA, 15 bp, Homo sapiens
aatatatcactacca

SEQ ID NO: 354841 - DNA, 15 bp, Homo sapiens
caatatatcactacc

SEQ ID NO: 354842 - DNA, 15 bp, Homo sapiens
acaatatatcactac

SEQ ID NO: 354843 - DNA, 15 bp, Homo sapiens
cacaatatatcacta

SEQ ID NO: 354844 - DNA, 15 bp, Homo sapiens
tcacaatatatcact

SEQ ID NO: 354845 - DNA, 15 bp, Homo sapiens
ctcacaatatatcac

SEQ ID NO: 354846 - DNA, 15 bp, Homo sapiens
actcacaatatatca

SEQ ID NO: 354847 - DNA, 15 bp, Homo sapiens
tactcacaatatatc

SEQ ID NO: 354848 - DNA, 15 bp, Homo sapiens
ttactcacaatatat

SEQ ID NO: 354849 - DNA, 15 bp, Homo sapiens
tttactcacaatata

SEQ ID NO: 354850 - DNA, 15 bp, Homo sapiens
ttttactcacaatat

SEQ ID NO: 354851 - DNA, 15 bp, Homo sapiens
gttttactcacaata

SEQ ID NO: 354852 - DNA, 15 bp, Homo sapiens
cgttttactcacaat

SEQ ID NO: 354853 - DNA, 15 bp, Homo sapiens
ccgttttactcacaa

SEQ ID NO: 354854 - DNA, 15 bp, Homo sapiens
cccgttttactcaca

SEQ ID NO: 354855 - DNA, 15 bp, Homo sapiens
acccgttttactcac

SEQ ID NO: 354856 - DNA, 15 bp, Homo sapiens
aacccgttttactca

SEQ ID NO: 354857 - DNA, 15 bp, Homo sapiens
gaacccgttttactc

SEQ ID NO: 354858 - DNA, 15 bp, Homo sapiens
ggaacccgttttact

SEQ ID NO: 354859 - DNA, 15 bp, Homo sapiens
gggaacccgttttac

SEQ ID NO: 354860 - DNA, 15 bp, Homo sapiens
tgggaacccgtttta

SEQ ID NO: 354861 - DNA, 15 bp, Homo sapiens
ctgggaacccgtttt

SEQ ID NO: 354862 - DNA, 15 bp, Homo sapiens
gctgggaacccgttt

SEQ ID NO: 354863 - DNA, 15 bp, Homo sapiens
tgctgggaacccgtt

SEQ ID NO: 354864 - DNA, 15 bp, Homo sapiens
ctgctgggaacccgt

SEQ ID NO: 354865 - DNA, 15 bp, Homo sapiens
gctgctgggaacccg

SEQ ID NO: 354866 - DNA, 15 bp, Homo sapiens
ggctgctgggaaccc

SEQ ID NO: 354867 - DNA, 15 bp, Homo sapiens
gggctgctgggaacc

SEQ ID NO: 354868 - DNA, 15 bp, Homo sapiens
cgggctgctgggaac

SEQ ID NO: 354869 - DNA, 15 bp, Homo sapiens
ccgggctgctgggaa

SEQ ID NO: 354870 - DNA, 15 bp, Homo sapiens
tccgggctgctggga

SEQ ID NO: 354871 - DNA, 15 bp, Homo sapiens
ctccgggctgctggg

SEQ ID NO: 354872 - DNA, 15 bp, Homo sapiens
actccgggctgctgg

SEQ ID NO: 354873 - DNA, 15 bp, Homo sapiens
gactccgggctgctg

SEQ ID NO: 354874 - DNA, 15 bp, Homo sapiens
ggactccgggctgct

SEQ ID NO: 354875 - DNA, 15 bp, Homo sapiens
tggactccgggctgc

SEQ ID NO: 354876 - DNA, 15 bp, Homo sapiens
ctggactccgggctg

SEQ ID NO: 354877 - DNA, 15 bp, Homo sapiens
actggactccgggct

SEQ ID NO: 354878 - DNA, 15 bp, Homo sapiens
aactggactccgggc

SEQ ID NO: 354879 - DNA, 15 bp, Homo sapiens
gaactggactccggg

SEQ ID NO: 354880 - DNA, 15 bp, Homo sapiens
ggaactggactccgg

SEQ ID NO: 354881 - DNA, 15 bp, Homo sapiens
gggaactggactccg

SEQ ID NO: 354882 - DNA, 15 bp, Homo sapiens
ggggaactggactcc

SEQ ID NO: 354883 - DNA, 15 bp, Homo sapiens
gggggaactggactc

SEQ ID NO: 354884 - DNA, 15 bp, Homo sapiens
agggggaactggact

SEQ ID NO: 354885 - DNA, 15 bp, Homo sapiens
cagggggaactggac

SEQ ID NO: 354886 - DNA, 15 bp, Homo sapiens
acagggggaactgga

SEQ ID NO: 354887 - DNA, 15 bp, Homo sapiens
gacagggggaactgg

SEQ ID NO: 354888 - DNA, 15 bp, Homo sapiens
agacagggggaactg

SEQ ID NO: 354889 - DNA, 15 bp, Homo sapiens
aagacagggggaact

SEQ ID NO: 354890 - DNA, 15 bp, Homo sapiens
aaagacagggggaac

SEQ ID NO: 354891 - DNA, 15 bp, Homo sapiens
gaaagacagggggaa

SEQ ID NO: 354892 - DNA, 15 bp, Homo sapiens
agaaagacaggggga

SEQ ID NO: 354893 - DNA, 15 bp, Homo sapiens
gagaaagacaggggg

SEQ ID NO: 354894 - DNA, 15 bp, Homo sapiens
agagaaagacagggg

SEQ ID NO: 354895 - DNA, 15 bp, Homo sapiens
tagagaaagacaggg

SEQ ID NO: 354896 - DNA, 15 bp, Homo sapiens
ctagagaaagacagg

SEQ ID NO: 354897 - DNA, 15 bp, Homo sapiens
tctagagaaagacag

SEQ ID NO: 354898 - DNA, 15 bp, Homo sapiens
ttctagagaaagaca

SEQ ID NO: 354899 - DNA, 15 bp, Homo sapiens
cttctagagaaagac

SEQ ID NO: 354900 - DNA, 15 bp, Homo sapiens
tcttctagagaaaga

SEQ ID NO: 354901 - DNA, 15 bp, Homo sapiens
ctcttctagagaaag

SEQ ID NO: 354902 - DNA, 15 bp, Homo sapiens
tctcttctagagaaa

SEQ ID NO: 354903 - DNA, 15 bp, Homo sapiens
atctcttctagagaa

SEQ ID NO: 354904 - DNA, 15 bp, Homo sapiens
tatctcttctagaga

SEQ ID NO: 354905 - DNA, 15 bp, Homo sapiens
gtatctcttctagag

SEQ ID NO: 354906 - DNA, 15 bp, Homo sapiens
agtatctcttctaga

SEQ ID NO: 354907 - DNA, 15 bp, Homo sapiens
gagtatctcttctag

SEQ ID NO: 354908 - DNA, 15 bp, Homo sapiens
agagtatctcttcta

SEQ ID NO: 354909 - DNA, 15 bp, Homo sapiens
aagagtatctcttct

SEQ ID NO: 354910 - DNA, 15 bp, Homo sapiens
aaagagtatctcttc

SEQ ID NO: 354911 - DNA, 15 bp, Homo sapiens
aaaagagtatctctt

SEQ ID NO: 354912 - DNA, 15 bp, Homo sapiens
taaaagagtatctct

SEQ ID NO: 354913 - DNA, 15 bp, Homo sapiens
ttaaaagagtatctc

SEQ ID NO: 354914 - DNA, 15 bp, Homo sapiens
attaaaagagtatct

SEQ ID NO: 354915 - DNA, 15 bp, Homo sapiens
aattaaaagagtatc

SEQ ID NO: 354916 - DNA, 15 bp, Homo sapiens
aaattaaaagagtat

SEQ ID NO: 354917 - DNA, 15 bp, Homo sapiens
aaaattaaaagagta

SEQ ID NO: 354918 - DNA, 15 bp, Homo sapiens
gaaaattaaaagagt

SEQ ID NO: 354919 - DNA, 15 bp, Homo sapiens
agaaaattaaaagag

SEQ ID NO: 354920 - DNA, 15 bp, Homo sapiens
cagaaaattaaaaga

SEQ ID NO: 354921 - DNA, 15 bp, Homo sapiens
acagaaaattaaaag

SEQ ID NO: 354922 - DNA, 15 bp, Homo sapiens
tacagaaaattaaaa

SEQ ID NO: 354923 - DNA, 15 bp, Homo sapiens
gtacagaaaattaaa

SEQ ID NO: 354924 - DNA, 15 bp, Homo sapiens
tgtacagaaaattaa

SEQ ID NO: 354925 - DNA, 15 bp, Homo sapiens
ctgtacagaaaatta

SEQ ID NO: 354926 - DNA, 15 bp, Homo sapiens
actgtacagaaaatt

SEQ ID NO: 354927 - DNA, 15 bp, Homo sapiens
aactgtacagaaaat

SEQ ID NO: 354928 - DNA, 15 bp, Homo sapiens
aaactgtacagaaaa

SEQ ID NO: 354929 - DNA, 15 bp, Homo sapiens
aaaactgtacagaaa

SEQ ID NO: 354930 - DNA, 15 bp, Homo sapiens
taaaactgtacagaa

SEQ ID NO: 354931 - DNA, 15 bp, Homo sapiens
ctaaaactgtacaga

SEQ ID NO: 354932 - DNA, 15 bp, Homo sapiens
actaaaactgtacag

SEQ ID NO: 354933 - DNA, 15 bp, Homo sapiens
aactaaaactgtaca

SEQ ID NO: 354934 - DNA, 15 bp, Homo sapiens
aaactaaaactgtac

SEQ ID NO: 354935 - DNA, 15 bp, Homo sapiens
gaaactaaaactgta

SEQ ID NO: 354936 - DNA, 15 bp, Homo sapiens
ggaaactaaaactgt

SEQ ID NO: 354937 - DNA, 15 bp, Homo sapiens
gggaaactaaaactg

SEQ ID NO: 354938 - DNA, 15 bp, Homo sapiens
agggaaactaaaact

SEQ ID NO: 354939 - DNA, 15 bp, Homo sapiens
aagggaaactaaaac

SEQ ID NO: 354940 - DNA, 15 bp, Homo sapiens
aaagggaaactaaaa

SEQ ID NO: 354941 - DNA, 15 bp, Homo sapiens
aaaagggaaactaaa

SEQ ID NO: 354942 - DNA, 15 bp, Homo sapiens
taaaagggaaactaa

SEQ ID NO: 354943 - DNA, 15 bp, Homo sapiens
gtaaaagggaaacta

SEQ ID NO: 354944 - DNA, 15 bp, Homo sapiens
agtaaaagggaaact

SEQ ID NO: 354945 - DNA, 15 bp, Homo sapiens
aagtaaaagggaaac

SEQ ID NO: 354946 - DNA, 15 bp, Homo sapiens
aaagtaaaagggaaa

SEQ ID NO: 354947 - DNA, 15 bp, Homo sapiens
aaaagtaaaagggaa

SEQ ID NO: 354948 - DNA, 15 bp, Homo sapiens
caaaagtaaaaggga

SEQ ID NO: 354949 - DNA, 15 bp, Homo sapiens
ccaaaagtaaaaggg

SEQ ID NO: 354950 - DNA, 15 bp, Homo sapiens
accaaaagtaaaagg

SEQ ID NO: 354951 - DNA, 15 bp, Homo sapiens
taccaaaagtaaaag

SEQ ID NO: 354952 - DNA, 15 bp, Homo sapiens
ataccaaaagtaaaa

SEQ ID NO: 354953 - DNA, 15 bp, Homo sapiens
aataccaaaagtaaa

SEQ ID NO: 354954 - DNA, 15 bp, Homo sapiens
aaataccaaaagtaa

SEQ ID NO: 354955 - DNA, 15 bp, Homo sapiens
taaataccaaaagta

SEQ ID NO: 354956 - DNA, 15 bp, Homo sapiens
ataaataccaaaagt

SEQ ID NO: 354957 - DNA, 15 bp, Homo sapiens
cataaataccaaaag

SEQ ID NO: 354958 - DNA, 15 bp, Homo sapiens
acataaataccaaaa

SEQ ID NO: 354959 - DNA, 15 bp, Homo sapiens
aacataaataccaaa

SEQ ID NO: 354960 - DNA, 15 bp, Homo sapiens
caacataaataccaa

SEQ ID NO: 354961 - DNA, 15 bp, Homo sapiens
gcaacataaatacca

SEQ ID NO: 354962 - DNA, 15 bp, Homo sapiens
tgcaacataaatacc

SEQ ID NO: 354963 - DNA, 15 bp, Homo sapiens
atgcaacataaatac

SEQ ID NO: 354964 - DNA, 15 bp, Homo sapiens
catgcaacataaata

SEQ ID NO: 354965 - DNA, 15 bp, Homo sapiens
acatgcaacataaat

SEQ ID NO: 354966 - DNA, 15 bp, Homo sapiens
tacatgcaacataaa

SEQ ID NO: 354967 - DNA, 15 bp, Homo sapiens
ctacatgcaacataa

SEQ ID NO: 354968 - DNA, 15 bp, Homo sapiens
gctacatgcaacata

SEQ ID NO: 354969 - DNA, 15 bp, Homo sapiens
tgctacatgcaacat

SEQ ID NO: 354970 - DNA, 15 bp, Homo sapiens
ctgctacatgcaaca

SEQ ID NO: 354971 - DNA, 15 bp, Homo sapiens
actgctacatgcaac

SEQ ID NO: 354972 - DNA, 15 bp, Homo sapiens
cactgctacatgcaa

SEQ ID NO: 354973 - DNA, 15 bp, Homo sapiens
tcactgctacatgca

SEQ ID NO: 354974 - DNA, 15 bp, Homo sapiens
gtcactgctacatgc

SEQ ID NO: 354975 - DNA, 15 bp, Homo sapiens
tgtcactgctacatg

SEQ ID NO: 354976 - DNA, 15 bp, Homo sapiens
atgtcactgctacat

SEQ ID NO: 354977 - DNA, 15 bp, Homo sapiens
gatgtcactgctaca

SEQ ID NO: 354978 - DNA, 15 bp, Homo sapiens
tgatgtcactgctac

SEQ ID NO: 354979 - DNA, 15 bp, Homo sapiens
atgatgtcactgcta

SEQ ID NO: 354980 - DNA, 15 bp, Homo sapiens
catgatgtcactgct

SEQ ID NO: 354981 - DNA, 15 bp, Homo sapiens
gcatgatgtcactgc

SEQ ID NO: 354982 - DNA, 15 bp, Homo sapiens
ggcatgatgtcactg

SEQ ID NO: 354983 - DNA, 15 bp, Homo sapiens
gggcatgatgtcact

SEQ ID NO: 354984 - DNA, 15 bp, Homo sapiens
ggggcatgatgtcac

SEQ ID NO: 354985 - DNA, 15 bp, Homo sapiens
tggggcatgatgtca

SEQ ID NO: 354986 - DNA, 15 bp, Homo sapiens
ttggggcatgatgtc

SEQ ID NO: 354987 - DNA, 15 bp, Homo sapiens
gttggggcatgatgt

SEQ ID NO: 354988 - DNA, 15 bp, Homo sapiens
agttggggcatgatg

SEQ ID NO: 354989 - DNA, 15 bp, Homo sapiens
gagttggggcatgat

SEQ ID NO: 354990 - DNA, 15 bp, Homo sapiens
ggagttggggcatga

SEQ ID NO: 354991 - DNA, 15 bp, Homo sapiens
aggagttggggcatg

SEQ ID NO: 354992 - DNA, 15 bp, Homo sapiens
aaggagttggggcat

SEQ ID NO: 354993 - DNA, 15 bp, Homo sapiens
gaaggagttggggca

SEQ ID NO: 354994 - DNA, 15 bp, Homo sapiens
tgaaggagttggggc

SEQ ID NO: 354995 - DNA, 15 bp, Homo sapiens
atgaaggagttgggg

SEQ ID NO: 354996 - DNA, 15 bp, Homo sapiens
gatgaaggagttggg

SEQ ID NO: 354997 - DNA, 15 bp, Homo sapiens
ggatgaaggagttgg

SEQ ID NO: 354998 - DNA, 15 bp, Homo sapiens
gggatgaaggagttg

SEQ ID NO: 354999 - DNA, 15 bp, Homo sapiens
ggggatgaaggagtt

SEQ ID NO: 355000 - DNA, 15 bp, Homo sapiens
gggggatgaaggagt

SEQ ID NO: 355001 - DNA, 15 bp, Homo sapiens
tgggggatgaaggag

SEQ ID NO: 355002 - DNA, 15 bp, Homo sapiens
ttgggggatgaagga

SEQ ID NO: 355003 - DNA, 15 bp, Homo sapiens
attgggggatgaagg

SEQ ID NO: 355004 - DNA, 15 bp, Homo sapiens
cattgggggatgaag

SEQ ID NO: 355005 - DNA, 15 bp, Homo sapiens
gcattgggggatgaa

SEQ ID NO: 355006 - DNA, 15 bp, Homo sapiens
tgcattgggggatga

SEQ ID NO: 355007 - DNA, 15 bp, Homo sapiens
ctgcattgggggatg

SEQ ID NO: 355008 - DNA, 15 bp, Homo sapiens
actgcattgggggat

SEQ ID NO: 355009 - DNA, 15 bp, Homo sapiens
gactgcattggggga

SEQ ID NO: 355010 - DNA, 15 bp, Homo sapiens
agactgcattggggg

SEQ ID NO: 355011 - DNA, 15 bp, Homo sapiens
tagactgcattgggg

SEQ ID NO: 355012 - DNA, 15 bp, Homo sapiens
gtagactgcattggg

SEQ ID NO: 355013 - DNA, 15 bp, Homo sapiens
tgtagactgcattgg

SEQ ID NO: 355014 - DNA, 15 bp, Homo sapiens
ctgtagactgcattg

SEQ ID NO: 355015 - DNA, 15 bp, Homo sapiens
tctgtagactgcatt

SEQ ID NO: 355016 - DNA, 15 bp, Homo sapiens
ctctgtagactgcat

SEQ ID NO: 355017 - DNA, 15 bp, Homo sapiens
actctgtagactgca

SEQ ID NO: 355018 - DNA, 15 bp, Homo sapiens
tactctgtagactgc

SEQ ID NO: 355019 - DNA, 15 bp, Homo sapiens
ctactctgtagactg

SEQ ID NO: 355020 - DNA, 15 bp, Homo sapiens
gctactctgtagact

SEQ ID NO: 355021 - DNA, 15 bp, Homo sapiens
ggctactctgtagac

SEQ ID NO: 355022 - DNA, 15 bp, Homo sapiens
aggctactctgtaga

SEQ ID NO: 355023 - DNA, 15 bp, Homo sapiens
caggctactctgtag

SEQ ID NO: 355024 - DNA, 15 bp, Homo sapiens
ccaggctactctgta

SEQ ID NO: 355025 - DNA, 15 bp, Homo sapiens
tccaggctactctgt

SEQ ID NO: 355026 - DNA, 15 bp, Homo sapiens
ctccaggctactctg

SEQ ID NO: 355027 - DNA, 15 bp, Homo sapiens
gctccaggctactct

SEQ ID NO: 355028 - DNA, 15 bp, Homo sapiens
ggctccaggctactc

SEQ ID NO: 355029 - DNA, 15 bp, Homo sapiens
tggctccaggctact

SEQ ID NO: 355030 - DNA, 15 bp, Homo sapiens
ctggctccaggctac

SEQ ID NO: 355031 - DNA, 15 bp, Homo sapiens
tctggctccaggcta

SEQ ID NO: 355032 - DNA, 15 bp, Homo sapiens
ctctggctccaggct

SEQ ID NO: 355033 - DNA, 15 bp, Homo sapiens
tctctggctccaggc

SEQ ID NO: 355034 - DNA, 15 bp, Homo sapiens
ctctctggctccagg

SEQ ID NO: 355035 - DNA, 15 bp, Homo sapiens
actctctggctccag

SEQ ID NO: 355036 - DNA, 15 bp, Homo sapiens
gactctctggctcca

SEQ ID NO: 355037 - DNA, 15 bp, Homo sapiens
ggactctctggctcc

SEQ ID NO: 355038 - DNA, 15 bp, Homo sapiens
gggactctctggctc

SEQ ID NO: 355039 - DNA, 15 bp, Homo sapiens
ggggactctctggct

SEQ ID NO: 355040 - DNA, 15 bp, Homo sapiens
tggggactctctggc

SEQ ID NO: 355041 - DNA, 15 bp, Homo sapiens
ctggggactctctgg

SEQ ID NO: 355042 - DNA, 15 bp, Homo sapiens
cctggggactctctg

SEQ ID NO: 355043 - DNA, 15 bp, Homo sapiens
ccctggggactctct

SEQ ID NO: 355044 - DNA, 15 bp, Homo sapiens
tccctggggactctc

SEQ ID NO: 355045 - DNA, 15 bp, Homo sapiens
ctccctggggactct

SEQ ID NO: 355046 - DNA, 15 bp, Homo sapiens
gctccctggggactc

SEQ ID NO: 355047 - DNA, 15 bp, Homo sapiens
ggctccctggggact

SEQ ID NO: 355048 - DNA, 15 bp, Homo sapiens
aggctccctggggac

SEQ ID NO: 355049 - DNA, 15 bp, Homo sapiens
caggctccctgggga

SEQ ID NO: 355050 - DNA, 15 bp, Homo sapiens
gcaggctccctgggg

SEQ ID NO: 355051 - DNA, 15 bp, Homo sapiens
agcaggctccctggg

SEQ ID NO: 355052 - DNA, 15 bp, Homo sapiens
gagcaggctccctgg

SEQ ID NO: 355053 - DNA, 15 bp, Homo sapiens
agagcaggctccctg

SEQ ID NO: 355054 - DNA, 15 bp, Homo sapiens
gagagcaggctccct

SEQ ID NO: 355055 - DNA, 15 bp, Homo sapiens
ggagagcaggctccc

SEQ ID NO: 355056 - DNA, 15 bp, Homo sapiens
tggagagcaggctcc

SEQ ID NO: 355057 - DNA, 15 bp, Homo sapiens
atggagagcaggctc

SEQ ID NO: 355058 - DNA, 15 bp, Homo sapiens
gatggagagcaggct

SEQ ID NO: 355059 - DNA, 15 bp, Homo sapiens
ggatggagagcaggc

SEQ ID NO: 355060 - DNA, 15 bp, Homo sapiens
tggatggagagcagg

SEQ ID NO: 355061 - DNA, 15 bp, Homo sapiens
atggatggagagcag

SEQ ID NO: 355062 - DNA, 15 bp, Homo sapiens
gatggatggagagca

SEQ ID NO: 355063 - DNA, 15 bp, Homo sapiens
ggatggatggagagc

SEQ ID NO: 355064 - DNA, 15 bp, Homo sapiens
tggatggatggagag

SEQ ID NO: 355065 - DNA, 15 bp, Homo sapiens
gtggatggatggaga

SEQ ID NO: 355066 - DNA, 15 bp, Homo sapiens
ggtggatggatggag

SEQ ID NO: 355067 - DNA, 15 bp, Homo sapiens
gggtggatggatgga

SEQ ID NO: 355068 - DNA, 15 bp, Homo sapiens
ggggtggatggatgg

SEQ ID NO: 355069 - DNA, 15 bp, Homo sapiens
tggggtggatggatg

SEQ ID NO: 355070 - DNA, 15 bp, Homo sapiens
ctggggtggatggat

SEQ ID NO: 355071 - DNA, 15 bp, Homo sapiens
actggggtggatgga

SEQ ID NO: 355072 - DNA, 15 bp, Homo sapiens
gactggggtggatgg

SEQ ID NO: 355073 - DNA, 15 bp, Homo sapiens
ggactggggtggatg

SEQ ID NO: 355074 - DNA, 15 bp, Homo sapiens
gggactggggtggat

SEQ ID NO: 355075 - DNA, 15 bp, Homo sapiens
ggggactggggtgga

SEQ ID NO: 355076 - DNA, 15 bp, Homo sapiens
cggggactggggtgg

SEQ ID NO: 355077 - DNA, 15 bp, Homo sapiens
ccggggactggggtg

SEQ ID NO: 355078 - DNA, 15 bp, Homo sapiens
cccggggactggggt

SEQ ID NO: 355079 - DNA, 15 bp, Homo sapiens
gcccggggactgggg

SEQ ID NO: 355080 - DNA, 15 bp, Homo sapiens
agcccggggactggg

SEQ ID NO: 355081 - DNA, 15 bp, Homo sapiens
gagcccggggactgg

SEQ ID NO: 355082 - DNA, 15 bp, Homo sapiens
agagcccggggactg

SEQ ID NO: 355083 - DNA, 15 bp, Homo sapiens
cagagcccggggact

SEQ ID NO: 355084 - DNA, 15 bp, Homo sapiens
ccagagcccggggac

SEQ ID NO: 355085 - DNA, 15 bp, Homo sapiens
gccagagcccgggga

SEQ ID NO: 355086 - DNA, 15 bp, Homo sapiens
ggccagagcccgggg

SEQ ID NO: 355087 - DNA, 15 bp, Homo sapiens
tggccagagcccggg

SEQ ID NO: 355088 - DNA, 15 bp, Homo sapiens
ctggccagagcccgg

SEQ ID NO: 355089 - DNA, 15 bp, Homo sapiens
gctggccagagcccg

SEQ ID NO: 355090 - DNA, 15 bp, Homo sapiens
agctggccagagccc

SEQ ID NO: 355091 - DNA, 15 bp, Homo sapiens
aagctggccagagcc

SEQ ID NO: 355092 - DNA, 15 bp, Homo sapiens
gaagctggccagagc

SEQ ID NO: 355093 - DNA, 15 bp, Homo sapiens
cgaagctggccagag

SEQ ID NO: 355094 - DNA, 15 bp, Homo sapiens
ccgaagctggccaga

SEQ ID NO: 355095 - DNA, 15 bp, Homo sapiens
cccgaagctggccag

SEQ ID NO: 355096 - DNA, 15 bp, Homo sapiens
gcccgaagctggcca

SEQ ID NO: 355097 - DNA, 15 bp, Homo sapiens
tgcccgaagctggcc

SEQ ID NO: 355098 - DNA, 15 bp, Homo sapiens
gtgcccgaagctggc

SEQ ID NO: 355099 - DNA, 15 bp, Homo sapiens
agtgcccgaagctgg

SEQ ID NO: 355100 - DNA, 15 bp, Homo sapiens
cagtgcccgaagctg

SEQ ID NO: 355101 - DNA, 15 bp, Homo sapiens
acagtgcccgaagct

SEQ ID NO: 355102 - DNA, 15 bp, Homo sapiens
gacagtgcccgaagc

SEQ ID NO: 355103 - DNA, 15 bp, Homo sapiens
agacagtgcccgaag

SEQ ID NO: 355104 - DNA, 15 bp, Homo sapiens
aagacagtgcccgaa

SEQ ID NO: 355105 - DNA, 15 bp, Homo sapiens
taagacagtgcccga

SEQ ID NO: 355106 - DNA, 15 bp, Homo sapiens
ataagacagtgcccg

SEQ ID NO: 355107 - DNA, 15 bp, Homo sapiens
aataagacagtgccc

SEQ ID NO: 355108 - DNA, 15 bp, Homo sapiens
aaataagacagtgcc

SEQ ID NO: 355109 - DNA, 15 bp, Homo sapiens
aaaataagacagtgc

SEQ ID NO: 355110 - DNA, 15 bp, Homo sapiens
aaaaataagacagtg

SEQ ID NO: 355111 - DNA, 15 bp, Homo sapiens
gaaaaataagacagt

SEQ ID NO: 355112 - DNA, 15 bp, Homo sapiens
agaaaaataagacag

SEQ ID NO: 355113 - DNA, 15 bp, Homo sapiens
tagaaaaataagaca

SEQ ID NO: 355114 - DNA, 15 bp, Homo sapiens
atagaaaaataagac

SEQ ID NO: 355115 - DNA, 15 bp, Homo sapiens
aatagaaaaataaga

SEQ ID NO: 355116 - DNA, 15 bp, Homo sapiens
aaatagaaaaataag

SEQ ID NO: 355117 - DNA, 15 bp, Homo sapiens
caaatagaaaaataa

SEQ ID NO: 355118 - DNA, 15 bp, Homo sapiens
tcaaatagaaaaata

SEQ ID NO: 355119 - DNA, 15 bp, Homo sapiens
ttcaaatagaaaaat

SEQ ID NO: 355120 - DNA, 15 bp, Homo sapiens
tttcaaatagaaaaa

SEQ ID NO: 355121 - DNA, 15 bp, Homo sapiens
ttttcaaatagaaaa

SEQ ID NO: 355122 - DNA, 15 bp, Homo sapiens
attttcaaatagaaa

SEQ ID NO: 355123 - DNA, 15 bp, Homo sapiens
tattttcaaatagaa

SEQ ID NO: 355124 - DNA, 15 bp, Homo sapiens
ttattttcaaataga

SEQ ID NO: 355125 - DNA, 15 bp, Homo sapiens
cttattttcaaatag

SEQ ID NO: 355126 - DNA, 15 bp, Homo sapiens
tcttattttcaaata

SEQ ID NO: 355127 - DNA, 15 bp, Homo sapiens
gtcttattttcaaat

SEQ ID NO: 355128 - DNA, 15 bp, Homo sapiens
ggtcttattttcaaa

SEQ ID NO: 355129 - DNA, 15 bp, Homo sapiens
aggtcttattttcaa

SEQ ID NO: 355130 - DNA, 15 bp, Homo sapiens
aaggtcttattttca

SEQ ID NO: 355131 - DNA, 15 bp, Homo sapiens
caaggtcttattttc

SEQ ID NO: 355132 - DNA, 15 bp, Homo sapiens
tcaaggtcttatttt

SEQ ID NO: 355133 - DNA, 15 bp, Homo sapiens
gtcaaggtcttattt

SEQ ID NO: 355134 - DNA, 15 bp, Homo sapiens
tgtcaaggtcttatt

SEQ ID NO: 355135 - DNA, 15 bp, Homo sapiens
ttgtcaaggtcttat

SEQ ID NO: 355136 - DNA, 15 bp, Homo sapiens
gttgtcaaggtctta

SEQ ID NO: 355137 - DNA, 15 bp, Homo sapiens
tgttgtcaaggtctt

SEQ ID NO: 355138 - DNA, 15 bp, Homo sapiens
ctgttgtcaaggtct

SEQ ID NO: 355139 - DNA, 15 bp, Homo sapiens
actgttgtcaaggtc

SEQ ID NO: 355140 - DNA, 15 bp, Homo sapiens
cactgttgtcaaggt

SEQ ID NO: 355141 - DNA, 15 bp, Homo sapiens
acactgttgtcaagg

SEQ ID NO: 355142 - DNA, 15 bp, Homo sapiens
cacactgttgtcaag

SEQ ID NO: 355143 - DNA, 15 bp, Homo sapiens
acacactgttgtcaa

SEQ ID NO: 355144 - DNA, 15 bp, Homo sapiens
aacacactgttgtca

SEQ ID NO: 355145 - DNA, 15 bp, Homo sapiens
aaacacactgttgtc

SEQ ID NO: 355146 - DNA, 15 bp, Homo sapiens
gaaacacactgttgt

SEQ ID NO: 355147 - DNA, 15 bp, Homo sapiens
agaaacacactgttg

SEQ ID NO: 355148 - DNA, 15 bp, Homo sapiens
gagaaacacactgtt

SEQ ID NO: 355149 - DNA, 15 bp, Homo sapiens
agagaaacacactgt

SEQ ID NO: 355150 - DNA, 15 bp, Homo sapiens
aagagaaacacactg

SEQ ID NO: 355151 - DNA, 15 bp, Homo sapiens
caagagaaacacact

SEQ ID NO: 355152 - DNA, 15 bp, Homo sapiens
tcaagagaaacacac

SEQ ID NO: 355153 - DNA, 15 bp, Homo sapiens
ttcaagagaaacaca

SEQ ID NO: 355154 - DNA, 15 bp, Homo sapiens
cttcaagagaaacac

SEQ ID NO: 355155 - DNA, 15 bp, Homo sapiens
ccttcaagagaaaca

SEQ ID NO: 355156 - DNA, 15 bp, Homo sapiens
gccttcaagagaaac

SEQ ID NO: 355157 - DNA, 15 bp, Homo sapiens
ggccttcaagagaaa

SEQ ID NO: 355158 - DNA, 15 bp, Homo sapiens
aggccttcaagagaa

SEQ ID NO: 355159 - DNA, 15 bp, Homo sapiens
aaggccttcaagaga

SEQ ID NO: 355160 - DNA, 15 bp, Homo sapiens
caaggccttcaagag

SEQ ID NO: 355161 - DNA, 15 bp, Homo sapiens
acaaggccttcaaga

SEQ ID NO: 355162 - DNA, 15 bp, Homo sapiens
gacaaggccttcaag

SEQ ID NO: 355163 - DNA, 15 bp, Homo sapiens
agacaaggccttcaa

SEQ ID NO: 355164 - DNA, 15 bp, Homo sapiens
gagacaaggccttca

SEQ ID NO: 355165 - DNA, 15 bp, Homo sapiens
tgagacaaggccttc

SEQ ID NO: 355166 - DNA, 15 bp, Homo sapiens
ctgagacaaggcctt

SEQ ID NO: 355167 - DNA, 15 bp, Homo sapiens
cctgagacaaggcct

SEQ ID NO: 355168 - DNA, 15 bp, Homo sapiens
tcctgagacaaggcc

SEQ ID NO: 355169 - DNA, 15 bp, Homo sapiens
gtcctgagacaaggc

SEQ ID NO: 355170 - DNA, 15 bp, Homo sapiens
agtcctgagacaagg

SEQ ID NO: 355171 - DNA, 15 bp, Homo sapiens
aagtcctgagacaag

SEQ ID NO: 355172 - DNA, 15 bp, Homo sapiens
aaagtcctgagacaa

SEQ ID NO: 355173 - DNA, 15 bp, Homo sapiens
aaaagtcctgagaca

SEQ ID NO: 355174 - DNA, 15 bp, Homo sapiens
taaaagtcctgagac

SEQ ID NO: 355175 - DNA, 15 bp, Homo sapiens
ttaaaagtcctgaga

SEQ ID NO: 355176 - DNA, 15 bp, Homo sapiens
cttaaaagtcctgag

SEQ ID NO: 355177 - DNA, 15 bp, Homo sapiens
ccttaaaagtcctga

SEQ ID NO: 355178 - DNA, 15 bp, Homo sapiens
cccttaaaagtcctg

SEQ ID NO: 355179 - DNA, 15 bp, Homo sapiens
tcccttaaaagtcct

SEQ ID NO: 355180 - DNA, 15 bp, Homo sapiens
gtcccttaaaagtcc

SEQ ID NO: 355181 - DNA, 15 bp, Homo sapiens
tgtcccttaaaagtc

SEQ ID NO: 355182 - DNA, 15 bp, Homo sapiens
gtgtcccttaaaagt

SEQ ID NO: 355183 - DNA, 15 bp, Homo sapiens
agtgtcccttaaaag

SEQ ID NO: 355184 - DNA, 15 bp, Homo sapiens
cagtgtcccttaaaa

SEQ ID NO: 355185 - DNA, 15 bp, Homo sapiens
tcagtgtcccttaaa

SEQ ID NO: 355186 - DNA, 15 bp, Homo sapiens
atcagtgtcccttaa

SEQ ID NO: 355187 - DNA, 15 bp, Homo sapiens
aatcagtgtccctta

SEQ ID NO: 355188 - DNA, 15 bp, Homo sapiens
taatcagtgtccctt

SEQ ID NO: 355189 - DNA, 15 bp, Homo sapiens
gcctaatcagtgtcc

SEQ ID NO: 355190 - DNA, 15 bp, Homo sapiens
agcctaatcagtgtc

SEQ ID NO: 355191 - DNA, 15 bp, Homo sapiens
cagcctaatcagtgt

SEQ ID NO: 355192 - DNA, 15 bp, Homo sapiens
tcagcctaatcagtg

SEQ ID NO: 355193 - DNA, 15 bp, Homo sapiens
ttcagcctaatcagt

SEQ ID NO: 355194 - DNA, 15 bp, Homo sapiens
cttcagcctaatcag

SEQ ID NO: 355195 - DNA, 15 bp, Homo sapiens
acttcagcctaatca

SEQ ID NO: 355196 - DNA, 15 bp, Homo sapiens
tacttcagcctaatc

SEQ ID NO: 355197 - DNA, 15 bp, Homo sapiens
ttacttcagcctaat

SEQ ID NO: 355198 - DNA, 15 bp, Homo sapiens
attacttcagcctaa

SEQ ID NO: 355199 - DNA, 15 bp, Homo sapiens
aattacttcagccta

SEQ ID NO: 355200 - DNA, 15 bp, Homo sapiens
taattacttcagcct

SEQ ID NO: 355201 - DNA, 15 bp, Homo sapiens
gtaattacttcagcc

SEQ ID NO: 355202 - DNA, 15 bp, Homo sapiens
ggtaattacttcagc

SEQ ID NO: 355203 - DNA, 15 bp, Homo sapiens
tggtaattacttcag

SEQ ID NO: 355204 - DNA, 15 bp, Homo sapiens
gtggtaattacttca

SEQ ID NO: 355205 - DNA, 15 bp, Homo sapiens
agtggtaattacttc

SEQ ID NO: 355206 - DNA, 15 bp, Homo sapiens
tagtggtaattactt

SEQ ID NO: 355207 - DNA, 15 bp, Homo sapiens
atagtggtaattact

SEQ ID NO: 355208 - DNA, 15 bp, Homo sapiens
tatagtggtaattac

SEQ ID NO: 355209 - DNA, 15 bp, Homo sapiens
ttatagtggtaatta

SEQ ID NO: 355210 - DNA, 15 bp, Homo sapiens
gttatagtggtaatt

SEQ ID NO: 355211 - DNA, 15 bp, Homo sapiens
agttatagtggtaat

SEQ ID NO: 355212 - DNA, 15 bp, Homo sapiens
gagttatagtggtaa

SEQ ID NO: 355213 - DNA, 15 bp, Homo sapiens
ggagttatagtggta

SEQ ID NO: 355214 - DNA, 15 bp, Homo sapiens
tggagttatagtggt

SEQ ID NO: 355215 - DNA, 15 bp, Homo sapiens
ctggagttatagtgg

SEQ ID NO: 355216 - DNA, 15 bp, Homo sapiens
tctggagttatagtg

SEQ ID NO: 355217 - DNA, 15 bp, Homo sapiens
atctggagttatagt

SEQ ID NO: 355218 - DNA, 15 bp, Homo sapiens
catctggagttatag

SEQ ID NO: 355219 - DNA, 15 bp, Homo sapiens
gcatctggagttata

SEQ ID NO: 355220 - DNA, 15 bp, Homo sapiens
agcatctggagttat

SEQ ID NO: 355221 - DNA, 15 bp, Homo sapiens
aagcatctggagtta

SEQ ID NO: 355222 - DNA, 15 bp, Homo sapiens
gaagcatctggagtt

SEQ ID NO: 355223 - DNA, 15 bp, Homo sapiens
tgaagcatctggagt

SEQ ID NO: 355224 - DNA, 15 bp, Homo sapiens
atgaagcatctggag

SEQ ID NO: 355225 - DNA, 15 bp, Homo sapiens
gatgaagcatctgga

SEQ ID NO: 355226 - DNA, 15 bp, Homo sapiens
tgatgaagcatctgg

SEQ ID NO: 355227 - DNA, 15 bp, Homo sapiens
ctgatgaagcatctg

SEQ ID NO: 355228 - DNA, 15 bp, Homo sapiens
gctgatgaagcatct

SEQ ID NO: 355229 - DNA, 15 bp, Homo sapiens
agctgatgaagcatc

SEQ ID NO: 355230 - DNA, 15 bp, Homo sapiens
cagctgatgaagcat

SEQ ID NO: 355231 - DNA, 15 bp, Homo sapiens
ccagctgatgaagca

SEQ ID NO: 355232 - DNA, 15 bp, Homo sapiens
cccagctgatgaagc

SEQ ID NO: 355233 - DNA, 15 bp, Homo sapiens
ccccagctgatgaag

SEQ ID NO: 355234 - DNA, 15 bp, Homo sapiens
accccagctgatgaa

SEQ ID NO: 355235 - DNA, 15 bp, Homo sapiens
taccccagctgatga

SEQ ID NO: 355236 - DNA, 15 bp, Homo sapiens
ttaccccagctgatg

SEQ ID NO: 355237 - DNA, 15 bp, Homo sapiens
attaccccagctgat

SEQ ID NO: 355238 - DNA, 15 bp, Homo sapiens
aattaccccagctga

SEQ ID NO: 355239 - DNA, 15 bp, Homo sapiens
caattaccccagctg

SEQ ID NO: 355240 - DNA, 15 bp, Homo sapiens
acaattaccccagct

SEQ ID NO: 355241 - DNA, 15 bp, Homo sapiens
gacaattaccccagc

SEQ ID NO: 355242 - DNA, 15 bp, Homo sapiens
tgacaattaccccag

SEQ ID NO: 355243 - DNA, 15 bp, Homo sapiens
atgacaattacccca

SEQ ID NO: 355244 - DNA, 15 bp, Homo sapiens
catgacaattacccc

SEQ ID NO: 355245 - DNA, 15 bp, Homo sapiens
gcatgacaattaccc

SEQ ID NO: 355246 - DNA, 15 bp, Homo sapiens
agcatgacaattacc

SEQ ID NO: 355247 - DNA, 15 bp, Homo sapiens
aagcatgacaattac

SEQ ID NO: 355248 - DNA, 15 bp, Homo sapiens
caagcatgacaatta

SEQ ID NO: 355249 - DNA, 15 bp, Homo sapiens
gcaagcatgacaatt

SEQ ID NO: 355250 - DNA, 15 bp, Homo sapiens
ggcaagcatgacaat

SEQ ID NO: 355251 - DNA, 15 bp, Homo sapiens
aggcaagcatgacaa

SEQ ID NO: 355252 - DNA, 15 bp, Homo sapiens
aaggcaagcatgaca

SEQ ID NO: 355253 - DNA, 15 bp, Homo sapiens
aaaggcaagcatgac

SEQ ID NO: 355254 - DNA, 15 bp, Homo sapiens
caaaggcaagcatga

SEQ ID NO: 355255 - DNA, 15 bp, Homo sapiens
tcaaaggcaagcatg

SEQ ID NO: 355256 - DNA, 15 bp, Homo sapiens
atcaaaggcaagcat

SEQ ID NO: 355257 - DNA, 15 bp, Homo sapiens
tatcaaaggcaagca

SEQ ID NO: 355258 - DNA, 15 bp, Homo sapiens
ttatcaaaggcaagc

SEQ ID NO: 355259 - DNA, 15 bp, Homo sapiens
tttatcaaaggcaag

SEQ ID NO: 355260 - DNA, 15 bp, Homo sapiens
atttatcaaaggcaa

SEQ ID NO: 355261 - DNA, 15 bp, Homo sapiens
aatttatcaaaggca

SEQ ID NO: 355262 - DNA, 15 bp, Homo sapiens
taatttatcaaaggc

SEQ ID NO: 355263 - DNA, 15 bp, Homo sapiens
ataatttatcaaagg

SEQ ID NO: 355264 - DNA, 15 bp, Homo sapiens
tataatttatcaaag

SEQ ID NO: 355265 - DNA, 15 bp, Homo sapiens
gtataatttatcaaa

SEQ ID NO: 355266 - DNA, 15 bp, Homo sapiens
agtataatttatcaa

SEQ ID NO: 355267 - DNA, 15 bp, Homo sapiens
aagtataatttatca

SEQ ID NO: 355268 - DNA, 15 bp, Homo sapiens
caagtataatttatc

SEQ ID NO: 355269 - DNA, 15 bp, Homo sapiens
ccaagtataatttat

SEQ ID NO: 355270 - DNA, 15 bp, Homo sapiens
accaagtataattta

SEQ ID NO: 355271 - DNA, 15 bp, Homo sapiens
gaccaagtataattt

SEQ ID NO: 355272 - DNA, 15 bp, Homo sapiens
agaccaagtataatt

SEQ ID NO: 355273 - DNA, 15 bp, Homo sapiens
gagaccaagtataat

SEQ ID NO: 355274 - DNA, 15 bp, Homo sapiens
ggagaccaagtataa

SEQ ID NO: 355275 - DNA, 15 bp, Homo sapiens
aggagaccaagtata

SEQ ID NO: 355276 - DNA, 15 bp, Homo sapiens
tttgacttttacatg

SEQ ID NO: 355277 - DNA, 15 bp, Homo sapiens
gtttgacttttacat

SEQ ID NO: 355278 - DNA, 15 bp, Homo sapiens
ggtttgacttttaca

SEQ ID NO: 355279 - DNA, 15 bp, Homo sapiens
gggtttgacttttac

SEQ ID NO: 355280 - DNA, 15 bp, Homo sapiens
agggtttgactttta

SEQ ID NO: 355281 - DNA, 15 bp, Homo sapiens
cagggtttgactttt

SEQ ID NO: 355282 - DNA, 15 bp, Homo sapiens
tcagggtttgacttt

SEQ ID NO: 355283 - DNA, 15 bp, Homo sapiens
gtcagggtttgactt

SEQ ID NO: 355284 - DNA, 15 bp, Homo sapiens
cgtcagggtttgact

SEQ ID NO: 355285 - DNA, 15 bp, Homo sapiens
ccgtcagggtttgac

SEQ ID NO: 355286 - DNA, 15 bp, Homo sapiens
cccgtcagggtttga

SEQ ID NO: 355287 - DNA, 15 bp, Homo sapiens
acccgtcagggtttg

SEQ ID NO: 355288 - DNA, 15 bp, Homo sapiens
aacccgtcagggttt

SEQ ID NO: 355289 - DNA, 15 bp, Homo sapiens
aaacccgtcagggtt

SEQ ID NO: 355290 - DNA, 15 bp, Homo sapiens
gaaacccgtcagggt

SEQ ID NO: 355291 - DNA, 15 bp, Homo sapiens
ggaaacccgtcaggg

SEQ ID NO: 355292 - DNA, 15 bp, Homo sapiens
aggaaacccgtcagg

SEQ ID NO: 355293 - DNA, 15 bp, Homo sapiens
aaggaaacccgtcag

SEQ ID NO: 355294 - DNA, 15 bp, Homo sapiens
gaaggaaacccgtca

SEQ ID NO: 355295 - DNA, 15 bp, Homo sapiens
ggaaggaaacccgtc

SEQ ID NO: 355296 - DNA, 15 bp, Homo sapiens
tggaaggaaacccgt

SEQ ID NO: 355297 - DNA, 15 bp, Homo sapiens
ctggaaggaaacccg

SEQ ID NO: 355298 - DNA, 15 bp, Homo sapiens
actggaaggaaaccc

SEQ ID NO: 355299 - DNA, 15 bp, Homo sapiens
aactggaaggaaacc

SEQ ID NO: 355300 - DNA, 15 bp, Homo sapiens
gaactggaaggaaac

SEQ ID NO: 355301 - DNA, 15 bp, Homo sapiens
agaactggaaggaaa

SEQ ID NO: 355302 - DNA, 15 bp, Homo sapiens
gagaactggaaggaa

SEQ ID NO: 355303 - DNA, 15 bp, Homo sapiens
agagaactggaagga

SEQ ID NO: 355304 - DNA, 15 bp, Homo sapiens
cagagaactggaagg

SEQ ID NO: 355305 - DNA, 15 bp, Homo sapiens
acagagaactggaag

SEQ ID NO: 355306 - DNA, 15 bp, Homo sapiens
tacagagaactggaa

SEQ ID NO: 355307 - DNA, 15 bp, Homo sapiens
ctacagagaactgga

SEQ ID NO: 355308 - DNA, 15 bp, Homo sapiens
tctacagagaactgg

SEQ ID NO: 355309 - DNA, 15 bp, Homo sapiens
ctctacagagaactg

SEQ ID NO: 355310 - DNA, 15 bp, Homo sapiens
cctctacagagaact

SEQ ID NO: 355311 - DNA, 15 bp, Homo sapiens
ccctctacagagaac

SEQ ID NO: 355312 - DNA, 15 bp, Homo sapiens
cccctctacagagaa

SEQ ID NO: 355313 - DNA, 15 bp, Homo sapiens
tcccctctacagaga

SEQ ID NO: 355314 - DNA, 15 bp, Homo sapiens
atcccctctacagag

SEQ ID NO: 355315 - DNA, 15 bp, Homo sapiens
catcccctctacaga

SEQ ID NO: 355316 - DNA, 15 bp, Homo sapiens
ccatcccctctacag

SEQ ID NO: 355317 - DNA, 15 bp, Homo sapiens
cccatcccctctaca

SEQ ID NO: 355318 - DNA, 15 bp, Homo sapiens
tcccatcccctctac

SEQ ID NO: 355319 - DNA, 15 bp, Homo sapiens
atcccatcccctcta

SEQ ID NO: 355320 - DNA, 15 bp, Homo sapiens
gatcccatcccctct

SEQ ID NO: 355321 - DNA, 15 bp, Homo sapiens
tgatcccatcccctc

SEQ ID NO: 355322 - DNA, 15 bp, Homo sapiens
ctgatcccatcccct

SEQ ID NO: 355323 - DNA, 15 bp, Homo sapiens
gctgatcccatcccc

SEQ ID NO: 355324 - DNA, 15 bp, Homo sapiens
agctgatcccatccc

SEQ ID NO: 355325 - DNA, 15 bp, Homo sapiens
cagctgatcccatcc

SEQ ID NO: 355326 - DNA, 15 bp, Homo sapiens
ccagctgatcccatc

SEQ ID NO: 355327 - DNA, 15 bp, Homo sapiens
tccagctgatcccat

SEQ ID NO: 355328 - DNA, 15 bp, Homo sapiens
ctccagctgatccca

SEQ ID NO: 355329 - DNA, 15 bp, Homo sapiens
actccagctgatccc

SEQ ID NO: 355330 - DNA, 15 bp, Homo sapiens
tactccagctgatcc

SEQ ID NO: 355331 - DNA, 15 bp, Homo sapiens
ctactccagctgatc

SEQ ID NO: 355332 - DNA, 15 bp, Homo sapiens
actactccagctgat

SEQ ID NO: 355333 - DNA, 15 bp, Homo sapiens
aactactccagctga

SEQ ID NO: 355334 - DNA, 15 bp, Homo sapiens
caactactccagctg

SEQ ID NO: 355335 - DNA, 15 bp, Homo sapiens
tcaactactccagct

SEQ ID NO: 355336 - DNA, 15 bp, Homo sapiens
ttcaactactccagc

SEQ ID NO: 355337 - DNA, 15 bp, Homo sapiens
cttcaactactccag

SEQ ID NO: 355338 - DNA, 15 bp, Homo sapiens
tcttcaactactcca

SEQ ID NO: 355339 - DNA, 15 bp, Homo sapiens
gtcttcaactactcc

SEQ ID NO: 355340 - DNA, 15 bp, Homo sapiens
tgtcttcaactactc

SEQ ID NO: 355341 - DNA, 15 bp, Homo sapiens
ttgtcttcaactact

SEQ ID NO: 355342 - DNA, 15 bp, Homo sapiens
cttgtcttcaactac

SEQ ID NO: 355343 - DNA, 15 bp, Homo sapiens
tcttgtcttcaacta

SEQ ID NO: 355344 - DNA, 15 bp, Homo sapiens
ttcttgtcttcaact

SEQ ID NO: 355345 - DNA, 15 bp, Homo sapiens
tttcttgtcttcaac

SEQ ID NO: 355346 - DNA, 15 bp, Homo sapiens
atttcttgtcttcaa

SEQ ID NO: 355347 - DNA, 15 bp, Homo sapiens
tatttcttgtcttca

SEQ ID NO: 355348 - DNA, 15 bp, Homo sapiens
ctatttcttgtcttc

SEQ ID NO: 355349 - DNA, 15 bp, Homo sapiens
gctatttcttgtctt

SEQ ID NO: 355350 - DNA, 15 bp, Homo sapiens
ggctatttcttgtct

SEQ ID NO: 355351 - DNA, 15 bp, Homo sapiens
tggctatttcttgtc

SEQ ID NO: 355352 - DNA, 15 bp, Homo sapiens
atggctatttcttgt

SEQ ID NO: 355353 - DNA, 15 bp, Homo sapiens
gatggctatttcttg

SEQ ID NO: 355354 - DNA, 15 bp, Homo sapiens
ggatggctatttctt

SEQ ID NO: 355355 - DNA, 15 bp, Homo sapiens
aggatggctatttct

SEQ ID NO: 355356 - DNA, 15 bp, Homo sapiens
caggatggctatttc

SEQ ID NO: 355357 - DNA, 15 bp, Homo sapiens
tcaggatggctattt

SEQ ID NO: 355358 - DNA, 15 bp, Homo sapiens
ttcaggatggctatt

SEQ ID NO: 355359 - DNA, 15 bp, Homo sapiens
tttcaggatggctat

SEQ ID NO: 355360 - DNA, 15 bp, Homo sapiens
atttcaggatggcta

SEQ ID NO: 355361 - DNA, 15 bp, Homo sapiens
gatttcaggatggct

SEQ ID NO: 355362 - DNA, 15 bp, Homo sapiens
tgatttcaggatggc

SEQ ID NO: 355363 - DNA, 15 bp, Homo sapiens
ctgatttcaggatgg

SEQ ID NO: 355364 - DNA, 15 bp, Homo sapiens
cctgatttcaggatg

SEQ ID NO: 355365 - DNA, 15 bp, Homo sapiens
ccctgatttcaggat

SEQ ID NO: 355366 - DNA, 15 bp, Homo sapiens
accctgatttcagga

SEQ ID NO: 355367 - DNA, 15 bp, Homo sapiens
taccctgatttcagg

SEQ ID NO: 355368 - DNA, 15 bp, Homo sapiens
ttaccctgatttcag

SEQ ID NO: 355369 - DNA, 15 bp, Homo sapiens
tttaccctgatttca

SEQ ID NO: 355370 - DNA, 15 bp, Homo sapiens
atttaccctgatttc

SEQ ID NO: 355371 - DNA, 15 bp, Homo sapiens
aatttaccctgattt

SEQ ID NO: 355372 - DNA, 15 bp, Homo sapiens
aaatttaccctgatt

SEQ ID NO: 355373 - DNA, 15 bp, Homo sapiens
taaatttaccctgat

SEQ ID NO: 355374 - DNA, 15 bp, Homo sapiens
gtaaatttaccctga

SEQ ID NO: 355375 - DNA, 15 bp, Homo sapiens
ggtaaatttaccctg

SEQ ID NO: 355376 - DNA, 15 bp, Homo sapiens
aggtaaatttaccct

SEQ ID NO: 355377 - DNA, 15 bp, Homo sapiens
caggtaaatttaccc

SEQ ID NO: 355378 - DNA, 15 bp, Homo sapiens
ccaggtaaatttacc

SEQ ID NO: 355379 - DNA, 15 bp, Homo sapiens
gccaggtaaatttac

SEQ ID NO: 355380 - DNA, 15 bp, Homo sapiens
agccaggtaaattta

SEQ ID NO: 355381 - DNA, 15 bp, Homo sapiens
cagccaggtaaattt

SEQ ID NO: 355382 - DNA, 15 bp, Homo sapiens
ccagccaggtaaatt

SEQ ID NO: 355383 - DNA, 15 bp, Homo sapiens
cccagccaggtaaat

SEQ ID NO: 355384 - DNA, 15 bp, Homo sapiens
gcccagccaggtaaa

SEQ ID NO: 355385 - DNA, 15 bp, Homo sapiens
agcccagccaggtaa

SEQ ID NO: 355386 - DNA, 15 bp, Homo sapiens
cagcccagccaggta

SEQ ID NO: 355387 - DNA, 15 bp, Homo sapiens
acagcccagccaggt

SEQ ID NO: 355388 - DNA, 15 bp, Homo sapiens
cacagcccagccagg

SEQ ID NO: 355389 - DNA, 15 bp, Homo sapiens
tcacagcccagccag

SEQ ID NO: 355390 - DNA, 15 bp, Homo sapiens
ctcacagcccagcca

SEQ ID NO: 355391 - DNA, 15 bp, Homo sapiens
cctcacagcccagcc

SEQ ID NO: 355392 - DNA, 15 bp, Homo sapiens
tcctcacagcccagc

SEQ ID NO: 355393 - DNA, 15 bp, Homo sapiens
ttcctcacagcccag

SEQ ID NO: 355394 - DNA, 15 bp, Homo sapiens
attcctcacagccca

SEQ ID NO: 355395 - DNA, 15 bp, Homo sapiens
tattcctcacagccc

SEQ ID NO: 355396 - DNA, 15 bp, Homo sapiens
ctattcctcacagcc

SEQ ID NO: 355397 - DNA, 15 bp, Homo sapiens
cctattcctcacagc

SEQ ID NO: 355398 - DNA, 15 bp, Homo sapiens
gcctattcctcacag

SEQ ID NO: 355399 - DNA, 15 bp, Homo sapiens
ggcctattcctcaca

SEQ ID NO: 355400 - DNA, 15 bp, Homo sapiens
aggcctattcctcac

SEQ ID NO: 355401 - DNA, 15 bp, Homo sapiens
aaggcctattcctca

SEQ ID NO: 355402 - DNA, 15 bp, Homo sapiens
caaggcctattcctc

SEQ ID NO: 355403 - DNA, 15 bp, Homo sapiens
acaaggcctattcct

SEQ ID NO: 355404 - DNA, 15 bp, Homo sapiens
cacaaggcctattcc

SEQ ID NO: 355405 - DNA, 15 bp, Homo sapiens
tcacaaggcctattc

SEQ ID NO: 355406 - DNA, 15 bp, Homo sapiens
ctcacaaggcctatt

SEQ ID NO: 355407 - DNA, 15 bp, Homo sapiens
actcacaaggcctat

SEQ ID NO: 355408 - DNA, 15 bp, Homo sapiens
aactcacaaggccta

SEQ ID NO: 355409 - DNA, 15 bp, Homo sapiens
aaactcacaaggcct

SEQ ID NO: 355410 - DNA, 15 bp, Homo sapiens
gaaactcacaaggcc

SEQ ID NO: 355411 - DNA, 15 bp, Homo sapiens
tgaaactcacaaggc

SEQ ID NO: 355412 - DNA, 15 bp, Homo sapiens
gtgaaactcacaagg

SEQ ID NO: 355413 - DNA, 15 bp, Homo sapiens
cgtgaaactcacaag

SEQ ID NO: 355414 - DNA, 15 bp, Homo sapiens
ccgtgaaactcacaa

SEQ ID NO: 355415 - DNA, 15 bp, Homo sapiens
cccgtgaaactcaca

SEQ ID NO: 355416 - DNA, 15 bp, Homo sapiens
tcccgtgaaactcac

SEQ ID NO: 355417 - DNA, 15 bp, Homo sapiens
gtcccgtgaaactca

SEQ ID NO: 355418 - DNA, 15 bp, Homo sapiens
ggtcccgtgaaactc

SEQ ID NO: 355419 - DNA, 15 bp, Homo sapiens
gggtcccgtgaaact

SEQ ID NO: 355420 - DNA, 15 bp, Homo sapiens
ggggtcccgtgaaac

SEQ ID NO: 355421 - DNA, 15 bp, Homo sapiens
aggggtcccgtgaaa

SEQ ID NO: 355422 - DNA, 15 bp, Homo sapiens
aaggggtcccgtgaa

SEQ ID NO: 355423 - DNA, 15 bp, Homo sapiens
aaaggggtcccgtga

SEQ ID NO: 355424 - DNA, 15 bp, Homo sapiens
gaaaggggtcccgtg

SEQ ID NO: 355425 - DNA, 15 bp, Homo sapiens
agaaaggggtcccgt

SEQ ID NO: 355426 - DNA, 15 bp, Homo sapiens
cagaaaggggtcccg

SEQ ID NO: 355427 - DNA, 15 bp, Homo sapiens
tcagaaaggggtccc

SEQ ID NO: 355428 - DNA, 15 bp, Homo sapiens
ctcagaaaggggtcc

SEQ ID NO: 355429 - DNA, 15 bp, Homo sapiens
cctcagaaaggggtc

SEQ ID NO: 355430 - DNA, 15 bp, Homo sapiens
gcctcagaaaggggt

SEQ ID NO: 355431 - DNA, 15 bp, Homo sapiens
tgcctcagaaagggg

SEQ ID NO: 355432 - DNA, 15 bp, Homo sapiens
atgcctcagaaaggg

SEQ ID NO: 355433 - DNA, 15 bp, Homo sapiens
aatgcctcagaaagg

SEQ ID NO: 355434 - DNA, 15 bp, Homo sapiens
taatgcctcagaaag

SEQ ID NO: 355435 - DNA, 15 bp, Homo sapiens
ctaatgcctcagaaa

SEQ ID NO: 355436 - DNA, 15 bp, Homo sapiens
tctaatgcctcagaa

SEQ ID NO: 355437 - DNA, 15 bp, Homo sapiens
atctaatgcctcaga

SEQ ID NO: 355438 - DNA, 15 bp, Homo sapiens
tatctaatgcctcag

SEQ ID NO: 355439 - DNA, 15 bp, Homo sapiens
ttatctaatgcctca

SEQ ID NO: 355440 - DNA, 15 bp, Homo sapiens
gttatctaatgcctc

SEQ ID NO: 355441 - DNA, 15 bp, Homo sapiens
agttatctaatgcct

SEQ ID NO: 355442 - DNA, 15 bp, Homo sapiens
aagttatctaatgcc

SEQ ID NO: 355443 - DNA, 15 bp, Homo sapiens
aaagttatctaatgc

SEQ ID NO: 355444 - DNA, 15 bp, Homo sapiens
taaagttatctaatg

SEQ ID NO: 355445 - DNA, 15 bp, Homo sapiens
ataaagttatctaat

SEQ ID NO: 355446 - DNA, 15 bp, Homo sapiens
aataaagttatctaa

SEQ ID NO: 355447 - DNA, 15 bp, Homo sapiens
aaataaagttatcta

SEQ ID NO: 355448 - DNA, 15 bp, Homo sapiens
aaaataaagttatct

SEQ ID NO: 355449 - DNA, 15 bp, Homo sapiens
gaaaataaagttatc

SEQ ID NO: 355450 - DNA, 15 bp, Homo sapiens
ggaaaataaagttat

SEQ ID NO: 355451 - DNA, 15 bp, Homo sapiens
aggaaaataaagtta

SEQ ID NO: 355452 - DNA, 15 bp, Homo sapiens
caggaaaataaagtt

SEQ ID NO: 355453 - DNA, 15 bp, Homo sapiens
acaggaaaataaagt

SEQ ID NO: 355454 - DNA, 15 bp, Homo sapiens
aacaggaaaataaag

SEQ ID NO: 355455 - DNA, 15 bp, Homo sapiens
caacaggaaaataaa

SEQ ID NO: 355456 - DNA, 15 bp, Homo sapiens
tcaacaggaaaataa

SEQ ID NO: 355457 - DNA, 15 bp, Homo sapiens
ttcaacaggaaaata

SEQ ID NO: 355458 - DNA, 15 bp, Homo sapiens
attcaacaggaaaat

SEQ ID NO: 355459 - DNA, 15 bp, Homo sapiens
tattcaacaggaaaa

SEQ ID NO: 355460 - DNA, 15 bp, Homo sapiens
ttattcaacaggaaa

SEQ ID NO: 355461 - DNA, 15 bp, Homo sapiens
cttattcaacaggaa

SEQ ID NO: 355462 - DNA, 15 bp, Homo sapiens
gcttattcaacagga

SEQ ID NO: 355463 - DNA, 15 bp, Homo sapiens
agcttattcaacagg

SEQ ID NO: 355464 - DNA, 15 bp, Homo sapiens
gagcttattcaacag

SEQ ID NO: 355465 - DNA, 15 bp, Homo sapiens
agagcttattcaaca

SEQ ID NO: 355466 - DNA, 15 bp, Homo sapiens
gagagcttattcaac

SEQ ID NO: 355467 - DNA, 15 bp, Homo sapiens
ggagagcttattcaa

SEQ ID NO: 355468 - DNA, 15 bp, Homo sapiens
tggagagcttattca

SEQ ID NO: 355469 - DNA, 15 bp, Homo sapiens
ctggagagcttattc

SEQ ID NO: 355470 - DNA, 15 bp, Homo sapiens
tctggagagcttatt

SEQ ID NO: 355471 - DNA, 15 bp, Homo sapiens
ttctggagagcttat

SEQ ID NO: 355472 - DNA, 15 bp, Homo sapiens
tttctggagagctta

SEQ ID NO: 355473 - DNA, 15 bp, Homo sapiens
ttttctggagagctt

SEQ ID NO: 355474 - DNA, 15 bp, Homo sapiens
tttttctggagagct

SEQ ID NO: 355475 - DNA, 15 bp, Homo sapiens
ttttttctggagagc

SEQ ID NO: 355476 - DNA, 15 bp, Homo sapiens
tttttttctggagag

SEQ ID NO: 355477 - DNA, 15 bp, Homo sapiens
ttttttttctggaga

SEQ ID NO: 355478 - DNA, 15 bp, Homo sapiens
cttttttttctggag

SEQ ID NO: 355479 - DNA, 15 bp, Homo sapiens
tcttttttttctgga

SEQ ID NO: 355480 - DNA, 15 bp, Homo sapiens
ttcttttttttctgg

SEQ ID NO: 355481 - DNA, 15 bp, Homo sapiens
tttcttttttttctg

SEQ ID NO: 355482 - DNA, 15 bp, Homo sapiens
tttttcttttttttc

SEQ ID NO: 355483 - DNA, 15 bp, Homo sapiens
atttttctttttttt

SEQ ID NO: 355484 - DNA, 15 bp, Homo sapiens
catttttcttttttt

SEQ ID NO: 355485 - DNA, 15 bp, Homo sapiens
tcatttttctttttt

SEQ ID NO: 355486 - DNA, 15 bp, Homo sapiens
ctcatttttcttttt

SEQ ID NO: 355487 - DNA, 15 bp, Homo sapiens
tctcatttttctttt

SEQ ID NO: 355488 - DNA, 15 bp, Homo sapiens
ttctcatttttcttt

SEQ ID NO: 355489 - DNA, 15 bp, Homo sapiens
gttctcatttttctt

SEQ ID NO: 355490 - DNA, 15 bp, Homo sapiens
agttctcatttttct

SEQ ID NO: 355491 - DNA, 15 bp, Homo sapiens
aagttctcatttttc

SEQ ID NO: 355492 - DNA, 15 bp, Homo sapiens
gaagttctcattttt

SEQ ID NO: 355493 - DNA, 15 bp, Homo sapiens
tgaagttctcatttt

SEQ ID NO: 355494 - DNA, 15 bp, Homo sapiens
ttgaagttctcattt

SEQ ID NO: 355495 - DNA, 15 bp, Homo sapiens
attgaagttctcatt

SEQ ID NO: 355496 - DNA, 15 bp, Homo sapiens
cattgaagttctcat

SEQ ID NO: 355497 - DNA, 15 bp, Homo sapiens
ccattgaagttctca

SEQ ID NO: 355498 - DNA, 15 bp, Homo sapiens
tccattgaagttctc

SEQ ID NO: 355499 - DNA, 15 bp, Homo sapiens
ttccattgaagttct

SEQ ID NO: 355500 - DNA, 15 bp, Homo sapiens
gttccattgaagttc

SEQ ID NO: 355501 - DNA, 15 bp, Homo sapiens
agttccattgaagtt

SEQ ID NO: 355502 - DNA, 15 bp, Homo sapiens
cagttccattgaagt

SEQ ID NO: 355503 - DNA, 15 bp, Homo sapiens
ccagttccattgaag

SEQ ID NO: 355504 - DNA, 15 bp, Homo sapiens
tccagttccattgaa

SEQ ID NO: 355505 - DNA, 15 bp, Homo sapiens
gtccagttccattga

SEQ ID NO: 355506 - DNA, 15 bp, Homo sapiens
tgtccagttccattg

SEQ ID NO: 355507 - DNA, 15 bp, Homo sapiens
ctgtccagttccatt

SEQ ID NO: 355508 - DNA, 15 bp, Homo sapiens
actgtccagttccat

SEQ ID NO: 355509 - DNA, 15 bp, Homo sapiens
aactgtccagttcca

SEQ ID NO: 355510 - DNA, 15 bp, Homo sapiens
caactgtccagttcc

SEQ ID NO: 355511 - DNA, 15 bp, Homo sapiens
gcaactgtccagttc

SEQ ID NO: 355512 - DNA, 15 bp, Homo sapiens
ggcaactgtccagtt

SEQ ID NO: 355513 - DNA, 15 bp, Homo sapiens
tggcaactgtccagt

SEQ ID NO: 355514 - DNA, 15 bp, Homo sapiens
ttggcaactgtccag

SEQ ID NO: 355515 - DNA, 15 bp, Homo sapiens
cttggcaactgtcca

SEQ ID NO: 355516 - DNA, 15 bp, Homo sapiens
ccttggcaactgtcc

SEQ ID NO: 355517 - DNA, 15 bp, Homo sapiens
cccttggcaactgtc

SEQ ID NO: 355518 - DNA, 15 bp, Homo sapiens
gcccttggcaactgt

SEQ ID NO: 355519 - DNA, 15 bp, Homo sapiens
ggcccttggcaactg

SEQ ID NO: 355520 - DNA, 15 bp, Homo sapiens
aggcccttggcaact

SEQ ID NO: 355521 - DNA, 15 bp, Homo sapiens
gaggcccttggcaac

SEQ ID NO: 355522 - DNA, 15 bp, Homo sapiens
ggaggcccttggcaa

SEQ ID NO: 355523 - DNA, 15 bp, Homo sapiens
gggaggcccttggca

SEQ ID NO: 355524 - DNA, 15 bp, Homo sapiens
agggaggcccttggc

SEQ ID NO: 355525 - DNA, 15 bp, Homo sapiens
cagggaggcccttgg

SEQ ID NO: 355526 - DNA, 15 bp, Homo sapiens
gcagggaggcccttg

SEQ ID NO: 355527 - DNA, 15 bp, Homo sapiens
agcagggaggccctt

SEQ ID NO: 355528 - DNA, 15 bp, Homo sapiens
aagcagggaggccct

SEQ ID NO: 355529 - DNA, 15 bp, Homo sapiens
aaagcagggaggccc

SEQ ID NO: 355530 - DNA, 15 bp, Homo sapiens
taaagcagggaggcc

SEQ ID NO: 355531 - DNA, 15 bp, Homo sapiens
ataaagcagggaggc

SEQ ID NO: 355532 - DNA, 15 bp, Homo sapiens
aataaagcagggagg

SEQ ID NO: 355533 - DNA, 15 bp, Homo sapiens
aaataaagcagggag

SEQ ID NO: 355534 - DNA, 15 bp, Homo sapiens
gaaataaagcaggga

SEQ ID NO: 355535 - DNA, 15 bp, Homo sapiens
ggaaataaagcaggg

SEQ ID NO: 355536 - DNA, 15 bp, Homo sapiens
tggaaataaagcagg

SEQ ID NO: 355537 - DNA, 15 bp, Homo sapiens
atggaaataaagcag

SEQ ID NO: 355538 - DNA, 15 bp, Homo sapiens
catggaaataaagca

SEQ ID NO: 355539 - DNA, 15 bp, Homo sapiens
gcatggaaataaagc

SEQ ID NO: 355540 - DNA, 15 bp, Homo sapiens
tgcatggaaataaag

SEQ ID NO: 355541 - DNA, 15 bp, Homo sapiens
atgcatggaaataaa

SEQ ID NO: 355542 - DNA, 15 bp, Homo sapiens
catgcatggaaataa

SEQ ID NO: 355543 - DNA, 15 bp, Homo sapiens
tcatgcatggaaata

SEQ ID NO: 355544 - DNA, 15 bp, Homo sapiens
ttcatgcatggaaat

SEQ ID NO: 355545 - DNA, 15 bp, Homo sapiens
attcatgcatggaaa

SEQ ID NO: 355546 - DNA, 15 bp, Homo sapiens
cattcatgcatggaa

SEQ ID NO: 355547 - DNA, 15 bp, Homo sapiens
acattcatgcatgga

SEQ ID NO: 355548 - DNA, 15 bp, Homo sapiens
cacattcatgcatgg

SEQ ID NO: 355549 - DNA, 15 bp, Homo sapiens
acacattcatgcatg

SEQ ID NO: 355550 - DNA, 15 bp, Homo sapiens
cacacattcatgcat

SEQ ID NO: 355551 - DNA, 15 bp, Homo sapiens
acacacattcatgca

SEQ ID NO: 355552 - DNA, 15 bp, Homo sapiens
aacacacattcatgc

SEQ ID NO: 355553 - DNA, 15 bp, Homo sapiens
aaacacacattcatg

SEQ ID NO: 355554 - DNA, 15 bp, Homo sapiens
gaaacacacattcat

SEQ ID NO: 355555 - DNA, 15 bp, Homo sapiens
agaaacacacattca

SEQ ID NO: 355556 - DNA, 15 bp, Homo sapiens
aagaaacacacattc

SEQ ID NO: 355557 - DNA, 15 bp, Homo sapiens
taagaaacacacatt

SEQ ID NO: 355558 - DNA, 15 bp, Homo sapiens
gtaagaaacacacat

SEQ ID NO: 355559 - DNA, 15 bp, Homo sapiens
ggtaagaaacacaca

SEQ ID NO: 355560 - DNA, 15 bp, Homo sapiens
aggtaagaaacacac

SEQ ID NO: 355561 - DNA, 15 bp, Homo sapiens
aaggtaagaaacaca

SEQ ID NO: 355562 - DNA, 15 bp, Homo sapiens
caaggtaagaaacac

SEQ ID NO: 355563 - DNA, 15 bp, Homo sapiens
ccaaggtaagaaaca

SEQ ID NO: 355564 - DNA, 15 bp, Homo sapiens
tccaaggtaagaaac

SEQ ID NO: 355565 - DNA, 15 bp, Homo sapiens
ttccaaggtaagaaa

SEQ ID NO: 355566 - DNA, 15 bp, Homo sapiens
tttccaaggtaagaa

SEQ ID NO: 355567 - DNA, 15 bp, Homo sapiens
ctttccaaggtaaga

SEQ ID NO: 355568 - DNA, 15 bp, Homo sapiens
cctttccaaggtaag

SEQ ID NO: 355569 - DNA, 15 bp, Homo sapiens
tcctttccaaggtaa

SEQ ID NO: 355570 - DNA, 15 bp, Homo sapiens
ttcctttccaaggta

SEQ ID NO: 355571 - DNA, 15 bp, Homo sapiens
tttcctttccaaggt

SEQ ID NO: 355572 - DNA, 15 bp, Homo sapiens
ctttcctttccaagg

SEQ ID NO: 355573 - DNA, 15 bp, Homo sapiens
actttcctttccaag

SEQ ID NO: 355574 - DNA, 15 bp, Homo sapiens
cactttcctttccaa

SEQ ID NO: 355575 - DNA, 15 bp, Homo sapiens
ccactttcctttcca

SEQ ID NO: 355576 - DNA, 15 bp, Homo sapiens
cccactttcctttcc

SEQ ID NO: 355577 - DNA, 15 bp, Homo sapiens
gcccactttcctttc

SEQ ID NO: 355578 - DNA, 15 bp, Homo sapiens
agcccactttccttt

SEQ ID NO: 355579 - DNA, 15 bp, Homo sapiens
cagcccactttcctt

SEQ ID NO: 355580 - DNA, 15 bp, Homo sapiens
tcagcccactttcct

SEQ ID NO: 355581 - DNA, 15 bp, Homo sapiens
ctcagcccactttcc

SEQ ID NO: 355582 - DNA, 15 bp, Homo sapiens
gctcagcccactttc

SEQ ID NO: 355583 - DNA, 15 bp, Homo sapiens
cgctcagcccacttt

SEQ ID NO: 355584 - DNA, 15 bp, Homo sapiens
tcgctcagcccactt

SEQ ID NO: 355585 - DNA, 15 bp, Homo sapiens
ctcgctcagcccact

SEQ ID NO: 355586 - DNA, 15 bp, Homo sapiens
gctcgctcagcccac

SEQ ID NO: 355587 - DNA, 15 bp, Homo sapiens
agctcgctcagccca

SEQ ID NO: 355588 - DNA, 15 bp, Homo sapiens
tagctcgctcagccc

SEQ ID NO: 355589 - DNA, 15 bp, Homo sapiens
ctagctcgctcagcc

SEQ ID NO: 355590 - DNA, 15 bp, Homo sapiens
cctagctcgctcagc

SEQ ID NO: 355591 - DNA, 15 bp, Homo sapiens
gcctagctcgctcag

SEQ ID NO: 355592 - DNA, 15 bp, Homo sapiens
tgcctagctcgctca

SEQ ID NO: 355593 - DNA, 15 bp, Homo sapiens
ctgcctagctcgctc

SEQ ID NO: 355594 - DNA, 15 bp, Homo sapiens
actgcctagctcgct

SEQ ID NO: 355595 - DNA, 15 bp, Homo sapiens
aactgcctagctcgc

SEQ ID NO: 355596 - DNA, 15 bp, Homo sapiens
aaactgcctagctcg

SEQ ID NO: 355597 - DNA, 15 bp, Homo sapiens
gaaactgcctagctc

SEQ ID NO: 355598 - DNA, 15 bp, Homo sapiens
agaaactgcctagct

SEQ ID NO: 355599 - DNA, 15 bp, Homo sapiens
cagaaactgcctagc

SEQ ID NO: 355600 - DNA, 15 bp, Homo sapiens
tcagaaactgcctag

SEQ ID NO: 355601 - DNA, 15 bp, Homo sapiens
atcagaaactgccta

SEQ ID NO: 355602 - DNA, 15 bp, Homo sapiens
tatcagaaactgcct

SEQ ID NO: 355603 - DNA, 15 bp, Homo sapiens
ctatcagaaactgcc

SEQ ID NO: 355604 - DNA, 15 bp, Homo sapiens
tctatcagaaactgc

SEQ ID NO: 355605 - DNA, 15 bp, Homo sapiens
gtctatcagaaactg

SEQ ID NO: 355606 - DNA, 15 bp, Homo sapiens
agtctatcagaaact

SEQ ID NO: 355607 - DNA, 15 bp, Homo sapiens
aagtctatcagaaac

SEQ ID NO: 355608 - DNA, 15 bp, Homo sapiens
aaagtctatcagaaa

SEQ ID NO: 355609 - DNA, 15 bp, Homo sapiens
aaaagtctatcagaa

SEQ ID NO: 355610 - DNA, 15 bp, Homo sapiens
caaaagtctatcaga

SEQ ID NO: 355611 - DNA, 15 bp, Homo sapiens
gcaaaagtctatcag

SEQ ID NO: 355612 - DNA, 15 bp, Homo sapiens
tgcaaaagtctatca

SEQ ID NO: 355613 - DNA, 15 bp, Homo sapiens
ttgcaaaagtctatc

SEQ ID NO: 355614 - DNA, 15 bp, Homo sapiens
cttgcaaaagtctat

SEQ ID NO: 355615 - DNA, 15 bp, Homo sapiens
tcttgcaaaagtcta

SEQ ID NO: 355616 - DNA, 15 bp, Homo sapiens
atcttgcaaaagtct

SEQ ID NO: 355617 - DNA, 15 bp, Homo sapiens
catcttgcaaaagtc

SEQ ID NO: 355618 - DNA, 15 bp, Homo sapiens
gcatcttgcaaaagt

SEQ ID NO: 355619 - DNA, 15 bp, Homo sapiens
tgcatcttgcaaaag

SEQ ID NO: 355620 - DNA, 15 bp, Homo sapiens
ttgcatcttgcaaaa

SEQ ID NO: 355621 - DNA, 15 bp, Homo sapiens
tttgcatcttgcaaa

SEQ ID NO: 355622 - DNA, 15 bp, Homo sapiens
ctttgcatcttgcaa

SEQ ID NO: 355623 - DNA, 15 bp, Homo sapiens
gctttgcatcttgca

SEQ ID NO: 355624 - DNA, 15 bp, Homo sapiens
ggctttgcatcttgc

SEQ ID NO: 355625 - DNA, 15 bp, Homo sapiens
gggctttgcatcttg

SEQ ID NO: 355626 - DNA, 15 bp, Homo sapiens
tgggctttgcatctt

SEQ ID NO: 355627 - DNA, 15 bp, Homo sapiens
gtgggctttgcatct

SEQ ID NO: 355628 - DNA, 15 bp, Homo sapiens
ggtgggctttgcatc

SEQ ID NO: 355629 - DNA, 15 bp, Homo sapiens
gggtgggctttgcat

SEQ ID NO: 355630 - DNA, 15 bp, Homo sapiens
tgggtgggctttgca

SEQ ID NO: 355631 - DNA, 15 bp, Homo sapiens
gtgggtgggctttgc

SEQ ID NO: 355632 - DNA, 15 bp, Homo sapiens
agtgggtgggctttg

SEQ ID NO: 355633 - DNA, 15 bp, Homo sapiens
tagtgggtgggcttt

SEQ ID NO: 355634 - DNA, 15 bp, Homo sapiens
atagtgggtgggctt

SEQ ID NO: 355635 - DNA, 15 bp, Homo sapiens
gatagtgggtgggct

SEQ ID NO: 355636 - DNA, 15 bp, Homo sapiens
ggatagtgggtgggc

SEQ ID NO: 355637 - DNA, 15 bp, Homo sapiens
aggatagtgggtggg

SEQ ID NO: 355638 - DNA, 15 bp, Homo sapiens
gaggatagtgggtgg

SEQ ID NO: 355639 - DNA, 15 bp, Homo sapiens
agaggatagtgggtg

SEQ ID NO: 355640 - DNA, 15 bp, Homo sapiens
aagaggatagtgggt

SEQ ID NO: 355641 - DNA, 15 bp, Homo sapiens
aaagaggatagtggg

SEQ ID NO: 355642 - DNA, 15 bp, Homo sapiens
caaagaggatagtgg

SEQ ID NO: 355643 - DNA, 15 bp, Homo sapiens
tcaaagaggatagtg

SEQ ID NO: 355644 - DNA, 15 bp, Homo sapiens
ttcaaagaggatagt

SEQ ID NO: 355645 - DNA, 15 bp, Homo sapiens
gttcaaagaggatag

SEQ ID NO: 355646 - DNA, 15 bp, Homo sapiens
agttcaaagaggata

SEQ ID NO: 355647 - DNA, 15 bp, Homo sapiens
aagttcaaagaggat

SEQ ID NO: 355648 - DNA, 15 bp, Homo sapiens
gaagttcaaagagga

SEQ ID NO: 355649 - DNA, 15 bp, Homo sapiens
tgaagttcaaagagg

SEQ ID NO: 355650 - DNA, 15 bp, Homo sapiens
ctgaagttcaaagag

SEQ ID NO: 355651 - DNA, 15 bp, Homo sapiens
actgaagttcaaaga

SEQ ID NO: 355652 - DNA, 15 bp, Homo sapiens
tactgaagttcaaag

SEQ ID NO: 355653 - DNA, 15 bp, Homo sapiens
atactgaagttcaaa

SEQ ID NO: 355654 - DNA, 15 bp, Homo sapiens
aatactgaagttcaa

SEQ ID NO: 355655 - DNA, 15 bp, Homo sapiens
aaatactgaagttca

SEQ ID NO: 355656 - DNA, 15 bp, Homo sapiens
atttaaatactgaag

SEQ ID NO: 355657 - DNA, 15 bp, Homo sapiens
gatttaaatactgaa

SEQ ID NO: 355658 - DNA, 15 bp, Homo sapiens
tgatttaaatactga

SEQ ID NO: 355659 - DNA, 15 bp, Homo sapiens
ctgatttaaatactg

SEQ ID NO: 355660 - DNA, 15 bp, Homo sapiens
tctgatttaaatact

SEQ ID NO: 355661 - DNA, 15 bp, Homo sapiens
ttctgatttaaatac

SEQ ID NO: 355662 - DNA, 15 bp, Homo sapiens
cttctgatttaaata

SEQ ID NO: 355663 - DNA, 15 bp, Homo sapiens
tcttctgatttaaat

SEQ ID NO: 355664 - DNA, 15 bp, Homo sapiens
ttcttctgatttaaa

SEQ ID NO: 355665 - DNA, 15 bp, Homo sapiens
tttcttctgatttaa

SEQ ID NO: 355666 - DNA, 15 bp, Homo sapiens
ttttcttctgattta

SEQ ID NO: 355667 - DNA, 15 bp, Homo sapiens
tttttcttctgattt

SEQ ID NO: 355668 - DNA, 15 bp, Homo sapiens
atttttcttctgatt

SEQ ID NO: 355669 - DNA, 15 bp, Homo sapiens
tatttttcttctgat

SEQ ID NO: 355670 - DNA, 15 bp, Homo sapiens
ctatttttcttctga

SEQ ID NO: 355671 - DNA, 15 bp, Homo sapiens
gctatttttcttctg

SEQ ID NO: 355672 - DNA, 15 bp, Homo sapiens
agctatttttcttct

SEQ ID NO: 355673 - DNA, 15 bp, Homo sapiens
aagctatttttcttc

SEQ ID NO: 355674 - DNA, 15 bp, Homo sapiens
aaagctatttttctt

SEQ ID NO: 355675 - DNA, 15 bp, Homo sapiens
gaaagctatttttct

SEQ ID NO: 355676 - DNA, 15 bp, Homo sapiens
ggaaagctatttttc

SEQ ID NO: 355677 - DNA, 15 bp, Homo sapiens
gggaaagctattttt

SEQ ID NO: 355678 - DNA, 15 bp, Homo sapiens
tgggaaagctatttt

SEQ ID NO: 355679 - DNA, 15 bp, Homo sapiens
ctgggaaagctattt

SEQ ID NO: 355680 - DNA, 15 bp, Homo sapiens
tctgggaaagctatt

SEQ ID NO: 355681 - DNA, 15 bp, Homo sapiens
ctctgggaaagctat

SEQ ID NO: 355682 - DNA, 15 bp, Homo sapiens
cctctgggaaagcta

SEQ ID NO: 355683 - DNA, 15 bp, Homo sapiens
gcctctgggaaagct

SEQ ID NO: 355684 - DNA, 15 bp, Homo sapiens
agcctctgggaaagc

SEQ ID NO: 355685 - DNA, 15 bp, Homo sapiens
aagcctctgggaaag

SEQ ID NO: 355686 - DNA, 15 bp, Homo sapiens
gaagcctctgggaaa

SEQ ID NO: 355687 - DNA, 15 bp, Homo sapiens
tgaagcctctgggaa

SEQ ID NO: 355688 - DNA, 15 bp, Homo sapiens
ctgaagcctctggga

SEQ ID NO: 355689 - DNA, 15 bp, Homo sapiens
tctgaagcctctggg

SEQ ID NO: 355690 - DNA, 15 bp, Homo sapiens
atctgaagcctctgg

SEQ ID NO: 355691 - DNA, 15 bp, Homo sapiens
aatctgaagcctctg

SEQ ID NO: 355692 - DNA, 15 bp, Homo sapiens
taatctgaagcctct

SEQ ID NO: 355693 - DNA, 15 bp, Homo sapiens
ataatctgaagcctc

SEQ ID NO: 355694 - DNA, 15 bp, Homo sapiens
aataatctgaagcct

SEQ ID NO: 355695 - DNA, 15 bp, Homo sapiens
taataatctgaagcc

SEQ ID NO: 355696 - DNA, 15 bp, Homo sapiens
gtaataatctgaagc

SEQ ID NO: 355697 - DNA, 15 bp, Homo sapiens
agtaataatctgaag

SEQ ID NO: 355698 - DNA, 15 bp, Homo sapiens
tagtaataatctgaa

SEQ ID NO: 355699 - DNA, 15 bp, Homo sapiens
ttagtaataatctga

SEQ ID NO: 355700 - DNA, 15 bp, Homo sapiens
tttagtaataatctg

SEQ ID NO: 355701 - DNA, 15 bp, Homo sapiens
atttagtaataatct

SEQ ID NO: 355702 - DNA, 15 bp, Homo sapiens
tatttagtaataatc

SEQ ID NO: 355703 - DNA, 15 bp, Homo sapiens
atatttagtaataat

SEQ ID NO: 355704 - DNA, 15 bp, Homo sapiens
aatatttagtaataa

SEQ ID NO: 355705 - DNA, 15 bp, Homo sapiens
caatatttagtaata

SEQ ID NO: 355706 - DNA, 15 bp, Homo sapiens
acaatatttagtaat

SEQ ID NO: 355707 - DNA, 15 bp, Homo sapiens
cacaatatttagtaa

SEQ ID NO: 355708 - DNA, 15 bp, Homo sapiens
gcacaatatttagta

SEQ ID NO: 355709 - DNA, 15 bp, Homo sapiens
tgcacaatatttagt

SEQ ID NO: 355710 - DNA, 15 bp, Homo sapiens
ttgcacaatatttag

SEQ ID NO: 355711 - DNA, 15 bp, Homo sapiens
tttgcacaatattta

SEQ ID NO: 355712 - DNA, 15 bp, Homo sapiens
atttgcacaatattt

SEQ ID NO: 355713 - DNA, 15 bp, Homo sapiens
aatttgcacaatatt

SEQ ID NO: 355714 - DNA, 15 bp, Homo sapiens
gaatttgcacaatat

SEQ ID NO: 355715 - DNA, 15 bp, Homo sapiens
agaatttgcacaata

SEQ ID NO: 355716 - DNA, 15 bp, Homo sapiens
tagaatttgcacaat

SEQ ID NO: 355717 - DNA, 15 bp, Homo sapiens
atagaatttgcacaa

SEQ ID NO: 355718 - DNA, 15 bp, Homo sapiens
gatagaatttgcaca

SEQ ID NO: 355719 - DNA, 15 bp, Homo sapiens
tgatagaatttgcac

SEQ ID NO: 355720 - DNA, 15 bp, Homo sapiens
atgatagaatttgca

SEQ ID NO: 355721 - DNA, 15 bp, Homo sapiens
aatgatagaatttgc

SEQ ID NO: 355722 - DNA, 15 bp, Homo sapiens
aaatgatagaatttg

SEQ ID NO: 355723 - DNA, 15 bp, Homo sapiens
caaatgatagaattt

SEQ ID NO: 355724 - DNA, 15 bp, Homo sapiens
ccaaatgatagaatt

SEQ ID NO: 355725 - DNA, 15 bp, Homo sapiens
tccaaatgatagaat

SEQ ID NO: 355726 - DNA, 15 bp, Homo sapiens
ttccaaatgatagaa

SEQ ID NO: 355727 - DNA, 15 bp, Homo sapiens
attccaaatgataga

SEQ ID NO: 355728 - DNA, 15 bp, Homo sapiens
cattccaaatgatag

SEQ ID NO: 355729 - DNA, 15 bp, Homo sapiens
acattccaaatgata

SEQ ID NO: 355730 - DNA, 15 bp, Homo sapiens
tacattccaaatgat

SEQ ID NO: 355731 - DNA, 15 bp, Homo sapiens
ttacattccaaatga

SEQ ID NO: 355732 - DNA, 15 bp, Homo sapiens
tttacattccaaatg

SEQ ID NO: 355733 - DNA, 15 bp, Homo sapiens
gtttacattccaaat

SEQ ID NO: 355734 - DNA, 15 bp, Homo sapiens
cgtttacattccaaa

SEQ ID NO: 355735 - DNA, 15 bp, Homo sapiens
gcgtttacattccaa

SEQ ID NO: 355736 - DNA, 15 bp, Homo sapiens
agcgtttacattcca

SEQ ID NO: 355737 - DNA, 15 bp, Homo sapiens
aagcgtttacattcc

SEQ ID NO: 355738 - DNA, 15 bp, Homo sapiens
taagcgtttacattc

SEQ ID NO: 355739 - DNA, 15 bp, Homo sapiens
gtaagcgtttacatt

SEQ ID NO: 355740 - DNA, 15 bp, Homo sapiens
tgtaagcgtttacat

SEQ ID NO: 355741 - DNA, 15 bp, Homo sapiens
gtgtaagcgtttaca

SEQ ID NO: 355742 - DNA, 15 bp, Homo sapiens
agtgtaagcgtttac

SEQ ID NO: 355743 - DNA, 15 bp, Homo sapiens
gagtgtaagcgttta

SEQ ID NO: 355744 - DNA, 15 bp, Homo sapiens
agagtgtaagcgttt

SEQ ID NO: 355745 - DNA, 15 bp, Homo sapiens
gagagtgtaagcgtt

SEQ ID NO: 355746 - DNA, 15 bp, Homo sapiens
agagagtgtaagcgt

SEQ ID NO: 355747 - DNA, 15 bp, Homo sapiens
cagagagtgtaagcg

SEQ ID NO: 355748 - DNA, 15 bp, Homo sapiens
gcagagagtgtaagc

SEQ ID NO: 355749 - DNA, 15 bp, Homo sapiens
ggcagagagtgtaag

SEQ ID NO: 355750 - DNA, 15 bp, Homo sapiens
gggcagagagtgtaa

SEQ ID NO: 355751 - DNA, 15 bp, Homo sapiens
agggcagagagtgta

SEQ ID NO: 355752 - DNA, 15 bp, Homo sapiens
aagggcagagagtgt

SEQ ID NO: 355753 - DNA, 15 bp, Homo sapiens
aaagggcagagagtg

SEQ ID NO: 355754 - DNA, 15 bp, Homo sapiens
taaagggcagagagt

SEQ ID NO: 355755 - DNA, 15 bp, Homo sapiens
ataaagggcagagag

SEQ ID NO: 355756 - DNA, 15 bp, Homo sapiens
tataaagggcagaga

SEQ ID NO: 355757 - DNA, 15 bp, Homo sapiens
gtataaagggcagag

SEQ ID NO: 355758 - DNA, 15 bp, Homo sapiens
ggtataaagggcaga

SEQ ID NO: 355759 - DNA, 15 bp, Homo sapiens
aggtataaagggcag

SEQ ID NO: 355760 - DNA, 15 bp, Homo sapiens
gaggtataaagggca

SEQ ID NO: 355761 - DNA, 15 bp, Homo sapiens
ggaggtataaagggc

SEQ ID NO: 355762 - DNA, 15 bp, Homo sapiens
tggaggtataaaggg

SEQ ID NO: 355763 - DNA, 15 bp, Homo sapiens
ttggaggtataaagg

SEQ ID NO: 355764 - DNA, 15 bp, Homo sapiens
gttggaggtataaag

SEQ ID NO: 355765 - DNA, 15 bp, Homo sapiens
agttggaggtataaa

SEQ ID NO: 355766 - DNA, 15 bp, Homo sapiens
cagttggaggtataa

SEQ ID NO: 355767 - DNA, 15 bp, Homo sapiens
acagttggaggtata

SEQ ID NO: 355768 - DNA, 15 bp, Homo sapiens
cacagttggaggtat

SEQ ID NO: 355769 - DNA, 15 bp, Homo sapiens
gcacagttggaggta

SEQ ID NO: 355770 - DNA, 15 bp, Homo sapiens
ggcacagttggaggt

SEQ ID NO: 355771 - DNA, 15 bp, Homo sapiens
gggcacagttggagg

SEQ ID NO: 355772 - DNA, 15 bp, Homo sapiens
agggcacagttggag

SEQ ID NO: 355773 - DNA, 15 bp, Homo sapiens
gagggcacagttgga

SEQ ID NO: 355774 - DNA, 15 bp, Homo sapiens
tgagggcacagttgg

SEQ ID NO: 355775 - DNA, 15 bp, Homo sapiens
ttgagggcacagttg

SEQ ID NO: 355776 - DNA, 15 bp, Homo sapiens
tttgagggcacagtt

SEQ ID NO: 355777 - DNA, 15 bp, Homo sapiens
gtttgagggcacagt

SEQ ID NO: 355778 - DNA, 15 bp, Homo sapiens
tgtttgagggcacag

SEQ ID NO: 355779 - DNA, 15 bp, Homo sapiens
gtgtttgagggcaca

SEQ ID NO: 355780 - DNA, 15 bp, Homo sapiens
tgtgtttgagggcac

SEQ ID NO: 355781 - DNA, 15 bp, Homo sapiens
atgtgtttgagggca

SEQ ID NO: 355782 - DNA, 15 bp, Homo sapiens
aatgtgtttgagggc

SEQ ID NO: 355783 - DNA, 15 bp, Homo sapiens
aaatgtgtttgaggg

SEQ ID NO: 355784 - DNA, 15 bp, Homo sapiens
aaaatgtgtttgagg

SEQ ID NO: 355785 - DNA, 15 bp, Homo sapiens
gaaaatgtgtttgag

SEQ ID NO: 355786 - DNA, 15 bp, Homo sapiens
ggaaaatgtgtttga

SEQ ID NO: 355787 - DNA, 15 bp, Homo sapiens
aggaaaatgtgtttg

SEQ ID NO: 355788 - DNA, 15 bp, Homo sapiens
caggaaaatgtgttt

SEQ ID NO: 355789 - DNA, 15 bp, Homo sapiens
gcaggaaaatgtgtt

SEQ ID NO: 355790 - DNA, 15 bp, Homo sapiens
agcaggaaaatgtgt

SEQ ID NO: 355791 - DNA, 15 bp, Homo sapiens
gagcaggaaaatgtg

SEQ ID NO: 355792 - DNA, 15 bp, Homo sapiens
agagcaggaaaatgt

SEQ ID NO: 355793 - DNA, 15 bp, Homo sapiens
tagagcaggaaaatg

SEQ ID NO: 355794 - DNA, 15 bp, Homo sapiens
ctagagcaggaaaat

SEQ ID NO: 355795 - DNA, 15 bp, Homo sapiens
gctagagcaggaaaa

SEQ ID NO: 355796 - DNA, 15 bp, Homo sapiens
ggctagagcaggaaa

SEQ ID NO: 355797 - DNA, 15 bp, Homo sapiens
tggctagagcaggaa

SEQ ID NO: 355798 - DNA, 15 bp, Homo sapiens
ttggctagagcagga

SEQ ID NO: 355799 - DNA, 15 bp, Homo sapiens
tttggctagagcagg

SEQ ID NO: 355800 - DNA, 15 bp, Homo sapiens
atttggctagagcag

SEQ ID NO: 355801 - DNA, 15 bp, Homo sapiens
aatttggctagagca

SEQ ID NO: 355802 - DNA, 15 bp, Homo sapiens
caatttggctagagc

SEQ ID NO: 355803 - DNA, 15 bp, Homo sapiens
tcaatttggctagag

SEQ ID NO: 355804 - DNA, 15 bp, Homo sapiens
gtcaatttggctaga

SEQ ID NO: 355805 - DNA, 15 bp, Homo sapiens
agtcaatttggctag

SEQ ID NO: 355806 - DNA, 15 bp, Homo sapiens
aagtcaatttggcta

SEQ ID NO: 355807 - DNA, 15 bp, Homo sapiens
aaagtcaatttggct

SEQ ID NO: 355808 - DNA, 15 bp, Homo sapiens
gaaagtcaatttggc

SEQ ID NO: 355809 - DNA, 15 bp, Homo sapiens
agaaagtcaatttgg

SEQ ID NO: 355810 - DNA, 15 bp, Homo sapiens
aagaaagtcaatttg

SEQ ID NO: 355811 - DNA, 15 bp, Homo sapiens
taagaaagtcaattt

SEQ ID NO: 355812 - DNA, 15 bp, Homo sapiens
gtaagaaagtcaatt

SEQ ID NO: 355813 - DNA, 15 bp, Homo sapiens
tgtaagaaagtcaat

SEQ ID NO: 355814 - DNA, 15 bp, Homo sapiens
ctgtaagaaagtcaa

SEQ ID NO: 355815 - DNA, 15 bp, Homo sapiens
actgtaagaaagtca

SEQ ID NO: 355816 - DNA, 15 bp, Homo sapiens
aactgtaagaaagtc

SEQ ID NO: 355817 - DNA, 15 bp, Homo sapiens
aaactgtaagaaagt

SEQ ID NO: 355818 - DNA, 15 bp, Homo sapiens
taaactgtaagaaag

SEQ ID NO: 355819 - DNA, 15 bp, Homo sapiens
ataaactgtaagaaa

SEQ ID NO: 355820 - DNA, 15 bp, Homo sapiens
tataaactgtaagaa

SEQ ID NO: 355821 - DNA, 15 bp, Homo sapiens
gtataaactgtaaga

SEQ ID NO: 355822 - DNA, 15 bp, Homo sapiens
tgtataaactgtaag

SEQ ID NO: 355823 - DNA, 15 bp, Homo sapiens
ctgtataaactgtaa

SEQ ID NO: 355824 - DNA, 15 bp, Homo sapiens
actgtataaactgta

SEQ ID NO: 355825 - DNA, 15 bp, Homo sapiens
aactgtataaactgt

SEQ ID NO: 355826 - DNA, 15 bp, Homo sapiens
aaactgtataaactg

SEQ ID NO: 355827 - DNA, 15 bp, Homo sapiens
taaactgtataaact

SEQ ID NO: 355828 - DNA, 15 bp, Homo sapiens
ctaaactgtataaac

SEQ ID NO: 355829 - DNA, 15 bp, Homo sapiens
actaaactgtataaa

SEQ ID NO: 355830 - DNA, 15 bp, Homo sapiens
tactaaactgtataa

SEQ ID NO: 355831 - DNA, 15 bp, Homo sapiens
atactaaactgtata

SEQ ID NO: 355832 - DNA, 15 bp, Homo sapiens
aatactaaactgtat

SEQ ID NO: 355833 - DNA, 15 bp, Homo sapiens
aaatactaaactgta

SEQ ID NO: 355834 - DNA, 15 bp, Homo sapiens
aaaatactaaactgt

SEQ ID NO: 355835 - DNA, 15 bp, Homo sapiens
gaaaatactaaactg

SEQ ID NO: 355836 - DNA, 15 bp, Homo sapiens
ggaaaatactaaact

SEQ ID NO: 355837 - DNA, 15 bp, Homo sapiens
tggaaaatactaaac

SEQ ID NO: 355838 - DNA, 15 bp, Homo sapiens
ttggaaaatactaaa

SEQ ID NO: 355839 - DNA, 15 bp, Homo sapiens
gttggaaaatactaa

SEQ ID NO: 355840 - DNA, 15 bp, Homo sapiens
ggttggaaaatacta

SEQ ID NO: 355841 - DNA, 15 bp, Homo sapiens
tggttggaaaatact

SEQ ID NO: 355842 - DNA, 15 bp, Homo sapiens
gtggttggaaaatac

SEQ ID NO: 355843 - DNA, 15 bp, Homo sapiens
ggtggttggaaaata

SEQ ID NO: 355844 - DNA, 15 bp, Homo sapiens
aggtggttggaaaat

SEQ ID NO: 355845 - DNA, 15 bp, Homo sapiens
aaggtggttggaaaa

SEQ ID NO: 355846 - DNA, 15 bp, Homo sapiens
caaggtggttggaaa

SEQ ID NO: 355847 - DNA, 15 bp, Homo sapiens
gcaaggtggttggaa

SEQ ID NO: 355848 - DNA, 15 bp, Homo sapiens
ggcaaggtggttgga

SEQ ID NO: 355849 - DNA, 15 bp, Homo sapiens
aggcaaggtggttgg

SEQ ID NO: 355850 - DNA, 15 bp, Homo sapiens
aaggcaaggtggttg

SEQ ID NO: 355851 - DNA, 15 bp, Homo sapiens
caaggcaaggtggtt

SEQ ID NO: 355852 - DNA, 15 bp, Homo sapiens
ccaaggcaaggtggt

SEQ ID NO: 355853 - DNA, 15 bp, Homo sapiens
accaaggcaaggtgg

SEQ ID NO: 355854 - DNA, 15 bp, Homo sapiens
aaccaaggcaaggtg

SEQ ID NO: 355855 - DNA, 15 bp, Homo sapiens
gaaccaaggcaaggt

SEQ ID NO: 355856 - DNA, 15 bp, Homo sapiens
tgaaccaaggcaagg

SEQ ID NO: 355857 - DNA, 15 bp, Homo sapiens
ttgaaccaaggcaag

SEQ ID NO: 355858 - DNA, 15 bp, Homo sapiens
tttgaaccaaggcaa

SEQ ID NO: 355859 - DNA, 15 bp, Homo sapiens
gtttgaaccaaggca

SEQ ID NO: 355860 - DNA, 15 bp, Homo sapiens
agtttgaaccaaggc

SEQ ID NO: 355861 - DNA, 15 bp, Homo sapiens
cagtttgaaccaagg

SEQ ID NO: 355862 - DNA, 15 bp, Homo sapiens
acagtttgaaccaag

SEQ ID NO: 355863 - DNA, 15 bp, Homo sapiens
cacagtttgaaccaa

SEQ ID NO: 355864 - DNA, 15 bp, Homo sapiens
acacagtttgaacca

SEQ ID NO: 355865 - DNA, 15 bp, Homo sapiens
gacacagtttgaacc

SEQ ID NO: 355866 - DNA, 15 bp, Homo sapiens
ggacacagtttgaac

SEQ ID NO: 355867 - DNA, 15 bp, Homo sapiens
aggacacagtttgaa

SEQ ID NO: 355868 - DNA, 15 bp, Homo sapiens
gaggacacagtttga

SEQ ID NO: 355869 - DNA, 15 bp, Homo sapiens
ggaggacacagtttg

SEQ ID NO: 355870 - DNA, 15 bp, Homo sapiens
tggaggacacagttt

SEQ ID NO: 355871 - DNA, 15 bp, Homo sapiens
gtggaggacacagtt

SEQ ID NO: 355872 - DNA, 15 bp, Homo sapiens
ggtggaggacacagt

SEQ ID NO: 355873 - DNA, 15 bp, Homo sapiens
aggtggaggacacag

SEQ ID NO: 355874 - DNA, 15 bp, Homo sapiens
caggtggaggacaca

SEQ ID NO: 355875 - DNA, 15 bp, Homo sapiens
ccaggtggaggacac

SEQ ID NO: 355876 - DNA, 15 bp, Homo sapiens
gccaggtggaggaca

SEQ ID NO: 355877 - DNA, 15 bp, Homo sapiens
tgccaggtggaggac

SEQ ID NO: 355878 - DNA, 15 bp, Homo sapiens
atgccaggtggagga

SEQ ID NO: 355879 - DNA, 15 bp, Homo sapiens
catgccaggtggagg

SEQ ID NO: 355880 - DNA, 15 bp, Homo sapiens
gcatgccaggtggag

SEQ ID NO: 355881 - DNA, 15 bp, Homo sapiens
ggcatgccaggtgga

SEQ ID NO: 355882 - DNA, 15 bp, Homo sapiens
gggcatgccaggtgg

SEQ ID NO: 355883 - DNA, 15 bp, Homo sapiens
agggcatgccaggtg

SEQ ID NO: 355884 - DNA, 15 bp, Homo sapiens
aagggcatgccaggt

SEQ ID NO: 355885 - DNA, 15 bp, Homo sapiens
gaagggcatgccagg

SEQ ID NO: 355886 - DNA, 15 bp, Homo sapiens
ggaagggcatgccag

SEQ ID NO: 355887 - DNA, 15 bp, Homo sapiens
gggaagggcatgcca

SEQ ID NO: 355888 - DNA, 15 bp, Homo sapiens
tgggaagggcatgcc

SEQ ID NO: 355889 - DNA, 15 bp, Homo sapiens
gtgggaagggcatgc

SEQ ID NO: 355890 - DNA, 15 bp, Homo sapiens
ggtgggaagggcatg

SEQ ID NO: 355891 - DNA, 15 bp, Homo sapiens
gggtgggaagggcat

SEQ ID NO: 355892 - DNA, 15 bp, Homo sapiens
agggtgggaagggca

SEQ ID NO: 355893 - DNA, 15 bp, Homo sapiens
gagggtgggaagggc

SEQ ID NO: 355894 - DNA, 15 bp, Homo sapiens
agagggtgggaaggg

SEQ ID NO: 355895 - DNA, 15 bp, Homo sapiens
tagagggtgggaagg

SEQ ID NO: 355896 - DNA, 15 bp, Homo sapiens
gtagagggtgggaag

SEQ ID NO: 355897 - DNA, 15 bp, Homo sapiens
agtagagggtgggaa

SEQ ID NO: 355898 - DNA, 15 bp, Homo sapiens
cagtagagggtggga

SEQ ID NO: 355899 - DNA, 15 bp, Homo sapiens
gcagtagagggtggg

SEQ ID NO: 355900 - DNA, 15 bp, Homo sapiens
ggcagtagagggtgg

SEQ ID NO: 355901 - DNA, 15 bp, Homo sapiens
tggcagtagagggtg

SEQ ID NO: 355902 - DNA, 15 bp, Homo sapiens
gtggcagtagagggt

SEQ ID NO: 355903 - DNA, 15 bp, Homo sapiens
agtggcagtagaggg

SEQ ID NO: 355904 - DNA, 15 bp, Homo sapiens
gagtggcagtagagg

SEQ ID NO: 355905 - DNA, 15 bp, Homo sapiens
ggagtggcagtagag

SEQ ID NO: 355906 - DNA, 15 bp, Homo sapiens
aggagtggcagtaga

SEQ ID NO: 355907 - DNA, 15 bp, Homo sapiens
aaggagtggcagtag

SEQ ID NO: 355908 - DNA, 15 bp, Homo sapiens
taaggagtggcagta

SEQ ID NO: 355909 - DNA, 15 bp, Homo sapiens
ctaaggagtggcagt

SEQ ID NO: 355910 - DNA, 15 bp, Homo sapiens
actaaggagtggcag

SEQ ID NO: 355911 - DNA, 15 bp, Homo sapiens
gactaaggagtggca

SEQ ID NO: 355912 - DNA, 15 bp, Homo sapiens
agactaaggagtggc

SEQ ID NO: 355913 - DNA, 15 bp, Homo sapiens
cagactaaggagtgg

SEQ ID NO: 355914 - DNA, 15 bp, Homo sapiens
acagactaaggagtg

SEQ ID NO: 355915 - DNA, 15 bp, Homo sapiens
aacagactaaggagt

SEQ ID NO: 355916 - DNA, 15 bp, Homo sapiens
gaacagactaaggag

SEQ ID NO: 355917 - DNA, 15 bp, Homo sapiens
tgaacagactaagga

SEQ ID NO: 355918 - DNA, 15 bp, Homo sapiens
ctgaacagactaagg

SEQ ID NO: 355919 - DNA, 15 bp, Homo sapiens
gctgaacagactaag

SEQ ID NO: 355920 - DNA, 15 bp, Homo sapiens
tgctgaacagactaa

SEQ ID NO: 355921 - DNA, 15 bp, Homo sapiens
atgctgaacagacta

SEQ ID NO: 355922 - DNA, 15 bp, Homo sapiens
gatgctgaacagact

SEQ ID NO: 355923 - DNA, 15 bp, Homo sapiens
tgatgctgaacagac

SEQ ID NO: 355924 - DNA, 15 bp, Homo sapiens
atgatgctgaacaga

SEQ ID NO: 355925 - DNA, 15 bp, Homo sapiens
catgatgctgaacag

SEQ ID NO: 355926 - DNA, 15 bp, Homo sapiens
ccatgatgctgaaca

SEQ ID NO: 355927 - DNA, 15 bp, Homo sapiens
cccatgatgctgaac

SEQ ID NO: 355928 - DNA, 15 bp, Homo sapiens
acccatgatgctgaa

SEQ ID NO: 355929 - DNA, 15 bp, Homo sapiens
gacccatgatgctga

SEQ ID NO: 355930 - DNA, 15 bp, Homo sapiens
tgacccatgatgctg

SEQ ID NO: 355931 - DNA, 15 bp, Homo sapiens
ttgacccatgatgct

SEQ ID NO: 355932 - DNA, 15 bp, Homo sapiens
cttgacccatgatgc

SEQ ID NO: 355933 - DNA, 15 bp, Homo sapiens
acttgacccatgatg

SEQ ID NO: 355934 - DNA, 15 bp, Homo sapiens
cacttgacccatgat

SEQ ID NO: 355935 - DNA, 15 bp, Homo sapiens
gcacttgacccatga

SEQ ID NO: 355936 - DNA, 15 bp, Homo sapiens
ggcacttgacccatg

SEQ ID NO: 355937 - DNA, 15 bp, Homo sapiens
gggcacttgacccat

SEQ ID NO: 355938 - DNA, 15 bp, Homo sapiens
ggggcacttgaccca

SEQ ID NO: 355939 - DNA, 15 bp, Homo sapiens
gggggcacttgaccc

SEQ ID NO: 355940 - DNA, 15 bp, Homo sapiens
agggggcacttgacc

SEQ ID NO: 355941 - DNA, 15 bp, Homo sapiens
cagggggcacttgac

SEQ ID NO: 355942 - DNA, 15 bp, Homo sapiens
tcagggggcacttga

SEQ ID NO: 355943 - DNA, 15 bp, Homo sapiens
ctcagggggcacttg

SEQ ID NO: 355944 - DNA, 15 bp, Homo sapiens
actcagggggcactt

SEQ ID NO: 355945 - DNA, 15 bp, Homo sapiens
cactcagggggcact

SEQ ID NO: 355946 - DNA, 15 bp, Homo sapiens
gcactcagggggcac

SEQ ID NO: 355947 - DNA, 15 bp, Homo sapiens
ggcactcagggggca

SEQ ID NO: 355948 - DNA, 15 bp, Homo sapiens
tggcactcagggggc

SEQ ID NO: 355949 - DNA, 15 bp, Homo sapiens
ctggcactcaggggg

SEQ ID NO: 355950 - DNA, 15 bp, Homo sapiens
cctggcactcagggg

SEQ ID NO: 355951 - DNA, 15 bp, Homo sapiens
gcctggcactcaggg

SEQ ID NO: 355952 - DNA, 15 bp, Homo sapiens
ggcctggcactcagg

SEQ ID NO: 355953 - DNA, 15 bp, Homo sapiens
gggcctggcactcag

SEQ ID NO: 355954 - DNA, 15 bp, Homo sapiens
agggcctggcactca

SEQ ID NO: 355955 - DNA, 15 bp, Homo sapiens
cagggcctggcactc

SEQ ID NO: 355956 - DNA, 15 bp, Homo sapiens
acagggcctggcact

SEQ ID NO: 355957 - DNA, 15 bp, Homo sapiens
cacagggcctggcac

SEQ ID NO: 355958 - DNA, 15 bp, Homo sapiens
gcacagggcctggca

SEQ ID NO: 355959 - DNA, 15 bp, Homo sapiens
agcacagggcctggc

SEQ ID NO: 355960 - DNA, 15 bp, Homo sapiens
gagcacagggcctgg

SEQ ID NO: 355961 - DNA, 15 bp, Homo sapiens
ggagcacagggcctg

SEQ ID NO: 355962 - DNA, 15 bp, Homo sapiens
tggagcacagggcct

SEQ ID NO: 355963 - DNA, 15 bp, Homo sapiens
atggagcacagggcc

SEQ ID NO: 355964 - DNA, 15 bp, Homo sapiens
gatggagcacagggc

SEQ ID NO: 355965 - DNA, 15 bp, Homo sapiens
agatggagcacaggg

SEQ ID NO: 355966 - DNA, 15 bp, Homo sapiens
cagatggagcacagg

SEQ ID NO: 355967 - DNA, 15 bp, Homo sapiens
ccagatggagcacag

SEQ ID NO: 355968 - DNA, 15 bp, Homo sapiens
cccagatggagcaca

SEQ ID NO: 355969 - DNA, 15 bp, Homo sapiens
ccccagatggagcac

SEQ ID NO: 355970 - DNA, 15 bp, Homo sapiens
tccccagatggagca

SEQ ID NO: 355971 - DNA, 15 bp, Homo sapiens
atccccagatggagc

SEQ ID NO: 355972 - DNA, 15 bp, Homo sapiens
tatccccagatggag

SEQ ID NO: 355973 - DNA, 15 bp, Homo sapiens
atatccccagatgga

SEQ ID NO: 355974 - DNA, 15 bp, Homo sapiens
tatatccccagatgg

SEQ ID NO: 355975 - DNA, 15 bp, Homo sapiens
gtatatccccagatg

SEQ ID NO: 355976 - DNA, 15 bp, Homo sapiens
cgtatatccccagat

SEQ ID NO: 355977 - DNA, 15 bp, Homo sapiens
ccgtatatccccaga

SEQ ID NO: 355978 - DNA, 15 bp, Homo sapiens
cccgtatatccccag

SEQ ID NO: 355979 - DNA, 15 bp, Homo sapiens
tcccgtatatcccca

SEQ ID NO: 355980 - DNA, 15 bp, Homo sapiens
gtcccgtatatcccc

SEQ ID NO: 355981 - DNA, 15 bp, Homo sapiens
ggtcccgtatatccc

SEQ ID NO: 355982 - DNA, 15 bp, Homo sapiens
aggtcccgtatatcc

SEQ ID NO: 355983 - DNA, 15 bp, Homo sapiens
gaggtcccgtatatc

SEQ ID NO: 355984 - DNA, 15 bp, Homo sapiens
agaggtcccgtatat

SEQ ID NO: 355985 - DNA, 15 bp, Homo sapiens
gagaggtcccgtata

SEQ ID NO: 355986 - DNA, 15 bp, Homo sapiens
agagaggtcccgtat

SEQ ID NO: 355987 - DNA, 15 bp, Homo sapiens
tagagaggtcccgta

SEQ ID NO: 355988 - DNA, 15 bp, Homo sapiens
atagagaggtcccgt

SEQ ID NO: 355989 - DNA, 15 bp, Homo sapiens
aatagagaggtcccg

SEQ ID NO: 355990 - DNA, 15 bp, Homo sapiens
gaatagagaggtccc

SEQ ID NO: 355991 - DNA, 15 bp, Homo sapiens
tgaatagagaggtcc

SEQ ID NO: 355992 - DNA, 15 bp, Homo sapiens
atgaatagagaggtc

SEQ ID NO: 355993 - DNA, 15 bp, Homo sapiens
gatgaatagagaggt

SEQ ID NO: 355994 - DNA, 15 bp, Homo sapiens
ggatgaatagagagg

SEQ ID NO: 355995 - DNA, 15 bp, Homo sapiens
aggatgaatagagag

SEQ ID NO: 355996 - DNA, 15 bp, Homo sapiens
taggatgaatagaga

SEQ ID NO: 355997 - DNA, 15 bp, Homo sapiens
ataggatgaatagag

SEQ ID NO: 355998 - DNA, 15 bp, Homo sapiens
aataggatgaataga

SEQ ID NO: 355999 - DNA, 15 bp, Homo sapiens
gaataggatgaatag

SEQ ID NO: 356000 - DNA, 15 bp, Homo sapiens
agaataggatgaata

SEQ ID NO: 356001 - DNA, 15 bp, Homo sapiens
aagaataggatgaat

SEQ ID NO: 356002 - DNA, 15 bp, Homo sapiens
caagaataggatgaa

SEQ ID NO: 356003 - DNA, 15 bp, Homo sapiens
acaagaataggatga

SEQ ID NO: 356004 - DNA, 15 bp, Homo sapiens
aacaagaataggatg

SEQ ID NO: 356005 - DNA, 15 bp, Homo sapiens
aaacaagaataggat

SEQ ID NO: 356006 - DNA, 15 bp, Homo sapiens
gaaacaagaatagga

SEQ ID NO: 356007 - DNA, 15 bp, Homo sapiens
tgaaacaagaatagg

SEQ ID NO: 356008 - DNA, 15 bp, Homo sapiens
ttgaaacaagaatag

SEQ ID NO: 356009 - DNA, 15 bp, Homo sapiens
cttgaaacaagaata

SEQ ID NO: 356010 - DNA, 15 bp, Homo sapiens
acttgaaacaagaat

SEQ ID NO: 356011 - DNA, 15 bp, Homo sapiens
gacttgaaacaagaa

SEQ ID NO: 356012 - DNA, 15 bp, Homo sapiens
cgacttgaaacaaga

SEQ ID NO: 356013 - DNA, 15 bp, Homo sapiens
acgacttgaaacaag

SEQ ID NO: 356014 - DNA, 15 bp, Homo sapiens
gacgacttgaaacaa

SEQ ID NO: 356015 - DNA, 15 bp, Homo sapiens
agacgacttgaaaca

SEQ ID NO: 356016 - DNA, 15 bp, Homo sapiens
aagacgacttgaaac

SEQ ID NO: 356017 - DNA, 15 bp, Homo sapiens
gaagacgacttgaaa

SEQ ID NO: 356018 - DNA, 15 bp, Homo sapiens
agaagacgacttgaa

SEQ ID NO: 356019 - DNA, 15 bp, Homo sapiens
aagaagacgacttga

SEQ ID NO: 356020 - DNA, 15 bp, Homo sapiens
aaagaagacgacttg

SEQ ID NO: 356021 - DNA, 15 bp, Homo sapiens
aaaagaagacgactt

SEQ ID NO: 356022 - DNA, 15 bp, Homo sapiens
aaaaagaagacgact

SEQ ID NO: 356023 - DNA, 15 bp, Homo sapiens
gaaaaagaagacgac

SEQ ID NO: 356024 - DNA, 15 bp, Homo sapiens
agaaaaagaagacga

SEQ ID NO: 356025 - DNA, 15 bp, Homo sapiens
aagaaaaagaagacg

SEQ ID NO: 356026 - DNA, 15 bp, Homo sapiens
gaagaaaaagaagac

SEQ ID NO: 356027 - DNA, 15 bp, Homo sapiens
ggaagaaaaagaaga

SEQ ID NO: 356028 - DNA, 15 bp, Homo sapiens
aggaagaaaaagaag

SEQ ID NO: 356029 - DNA, 15 bp, Homo sapiens
aaggaagaaaaagaa

SEQ ID NO: 356030 - DNA, 15 bp, Homo sapiens
aaaggaagaaaaaga

SEQ ID NO: 356031 - DNA, 15 bp, Homo sapiens
gaaaggaagaaaaag

SEQ ID NO: 356032 - DNA, 15 bp, Homo sapiens
agaaaggaagaaaaa

SEQ ID NO: 356033 - DNA, 15 bp, Homo sapiens
aagaaaggaagaaaa

SEQ ID NO: 356034 - DNA, 15 bp, Homo sapiens
aaagaaaggaagaaa

SEQ ID NO: 356035 - DNA, 15 bp, Homo sapiens
aaaagaaaggaagaa

SEQ ID NO: 356036 - DNA, 15 bp, Homo sapiens
aaaaagaaaggaaga

SEQ ID NO: 356037 - DNA, 15 bp, Homo sapiens
aaaaaagaaaggaag

SEQ ID NO: 356038 - DNA, 15 bp, Homo sapiens
aaaaaaagaaaggaa

SEQ ID NO: 356039 - DNA, 15 bp, Homo sapiens
aaaaaaaagaaagga

SEQ ID NO: 356040 - DNA, 15 bp, Homo sapiens
aaaaaaaaagaaagg

SEQ ID NO: 356041 - DNA, 15 bp, Homo sapiens
ttcaggaaaaaaaaa

SEQ ID NO: 356042 - DNA, 15 bp, Homo sapiens
gttcaggaaaaaaaa

SEQ ID NO: 356043 - DNA, 15 bp, Homo sapiens
tgttcaggaaaaaaa

SEQ ID NO: 356044 - DNA, 15 bp, Homo sapiens
ttgttcaggaaaaaa

SEQ ID NO: 356045 - DNA, 15 bp, Homo sapiens
attgttcaggaaaaa

SEQ ID NO: 356046 - DNA, 15 bp, Homo sapiens
aattgttcaggaaaa

SEQ ID NO: 356047 - DNA, 15 bp, Homo sapiens
gaattgttcaggaaa

SEQ ID NO: 356048 - DNA, 15 bp, Homo sapiens
agaattgttcaggaa

SEQ ID NO: 356049 - DNA, 15 bp, Homo sapiens
gagaattgttcagga

SEQ ID NO: 356050 - DNA, 15 bp, Homo sapiens
agagaattgttcagg

SEQ ID NO: 356051 - DNA, 15 bp, Homo sapiens
gagagaattgttcag

SEQ ID NO: 356052 - DNA, 15 bp, Homo sapiens
agagagaattgttca

SEQ ID NO: 356053 - DNA, 15 bp, Homo sapiens
gagagagaattgttc

SEQ ID NO: 356054 - DNA, 15 bp, Homo sapiens
agagagagaattgtt

SEQ ID NO: 356055 - DNA, 15 bp, Homo sapiens
tagagagagaattgt

SEQ ID NO: 356056 - DNA, 15 bp, Homo sapiens
ctagagagagaattg

SEQ ID NO: 356057 - DNA, 15 bp, Homo sapiens
cctagagagagaatt

SEQ ID NO: 356058 - DNA, 15 bp, Homo sapiens
tcctagagagagaat

SEQ ID NO: 356059 - DNA, 15 bp, Homo sapiens
gtcctagagagagaa

SEQ ID NO: 356060 - DNA, 15 bp, Homo sapiens
agtcctagagagaga

SEQ ID NO: 356061 - DNA, 15 bp, Homo sapiens
aagtcctagagagag

SEQ ID NO: 356062 - DNA, 15 bp, Homo sapiens
taagtcctagagaga

SEQ ID NO: 356063 - DNA, 15 bp, Homo sapiens
ttaagtcctagagag

SEQ ID NO: 356064 - DNA, 15 bp, Homo sapiens
gttaagtcctagaga

SEQ ID NO: 356065 - DNA, 15 bp, Homo sapiens
agttaagtcctagag

SEQ ID NO: 356066 - DNA, 15 bp, Homo sapiens
aagttaagtcctaga

SEQ ID NO: 356067 - DNA, 15 bp, Homo sapiens
taagttaagtcctag

SEQ ID NO: 356068 - DNA, 15 bp, Homo sapiens
ataagttaagtccta

SEQ ID NO: 356069 - DNA, 15 bp, Homo sapiens
aataagttaagtcct

SEQ ID NO: 356070 - DNA, 15 bp, Homo sapiens
caataagttaagtcc

SEQ ID NO: 356071 - DNA, 15 bp, Homo sapiens
acaataagttaagtc

SEQ ID NO: 356072 - DNA, 15 bp, Homo sapiens
gacaataagttaagt

SEQ ID NO: 356073 - DNA, 15 bp, Homo sapiens
agacaataagttaag

SEQ ID NO: 356074 - DNA, 15 bp, Homo sapiens
tagacaataagttaa

SEQ ID NO: 356075 - DNA, 15 bp, Homo sapiens
ttagacaataagtta

SEQ ID NO: 356076 - DNA, 15 bp, Homo sapiens
cttagacaataagtt

SEQ ID NO: 356077 - DNA, 15 bp, Homo sapiens
tcttagacaataagt

SEQ ID NO: 356078 - DNA, 15 bp, Homo sapiens
gtcttagacaataag

SEQ ID NO: 356079 - DNA, 15 bp, Homo sapiens
tgtcttagacaataa

SEQ ID NO: 356080 - DNA, 15 bp, Homo sapiens
atgtcttagacaata

SEQ ID NO: 356081 - DNA, 15 bp, Homo sapiens
aatgtcttagacaat

SEQ ID NO: 356082 - DNA, 15 bp, Homo sapiens
aaatgtcttagacaa

SEQ ID NO: 356083 - DNA, 15 bp, Homo sapiens
gaaatgtcttagaca

SEQ ID NO: 356084 - DNA, 15 bp, Homo sapiens
tgaaatgtcttagac

SEQ ID NO: 356085 - DNA, 15 bp, Homo sapiens
atgaaatgtcttaga

SEQ ID NO: 356086 - DNA, 15 bp, Homo sapiens
catgaaatgtcttag

SEQ ID NO: 356087 - DNA, 15 bp, Homo sapiens
acatgaaatgtctta

SEQ ID NO: 356088 - DNA, 15 bp, Homo sapiens
tacatgaaatgtctt

SEQ ID NO: 356089 - DNA, 15 bp, Homo sapiens
ctacatgaaatgtct

SEQ ID NO: 356090 - DNA, 15 bp, Homo sapiens
gctacatgaaatgtc

SEQ ID NO: 356091 - DNA, 15 bp, Homo sapiens
ggctacatgaaatgt

SEQ ID NO: 356092 - DNA, 15 bp, Homo sapiens
gggctacatgaaatg

SEQ ID NO: 356093 - DNA, 15 bp, Homo sapiens
agggctacatgaaat

SEQ ID NO: 356094 - DNA, 15 bp, Homo sapiens
gagggctacatgaaa

SEQ ID NO: 356095 - DNA, 15 bp, Homo sapiens
ggagggctacatgaa

SEQ ID NO: 356096 - DNA, 15 bp, Homo sapiens
gggagggctacatga

SEQ ID NO: 356097 - DNA, 15 bp, Homo sapiens
agggagggctacatg

SEQ ID NO: 356098 - DNA, 15 bp, Homo sapiens
aagggagggctacat

SEQ ID NO: 356099 - DNA, 15 bp, Homo sapiens
caagggagggctaca

SEQ ID NO: 356100 - DNA, 15 bp, Homo sapiens
tcaagggagggctac

SEQ ID NO: 356101 - DNA, 15 bp, Homo sapiens
gtcaagggagggcta

SEQ ID NO: 356102 - DNA, 15 bp, Homo sapiens
tgtcaagggagggct

SEQ ID NO: 356103 - DNA, 15 bp, Homo sapiens
atgtcaagggagggc

SEQ ID NO: 356104 - DNA, 15 bp, Homo sapiens
aatgtcaagggaggg

SEQ ID NO: 356105 - DNA, 15 bp, Homo sapiens
gaatgtcaagggagg

SEQ ID NO: 356106 - DNA, 15 bp, Homo sapiens
agaatgtcaagggag

SEQ ID NO: 356107 - DNA, 15 bp, Homo sapiens
gagaatgtcaaggga

SEQ ID NO: 356108 - DNA, 15 bp, Homo sapiens
tgagaatgtcaaggg

SEQ ID NO: 356109 - DNA, 15 bp, Homo sapiens
atgagaatgtcaagg

SEQ ID NO: 356110 - DNA, 15 bp, Homo sapiens
catgagaatgtcaag

SEQ ID NO: 356111 - DNA, 15 bp, Homo sapiens
gcatgagaatgtcaa

SEQ ID NO: 356112 - DNA, 15 bp, Homo sapiens
tgcatgagaatgtca

SEQ ID NO: 356113 - DNA, 15 bp, Homo sapiens
ttgcatgagaatgtc

SEQ ID NO: 356114 - DNA, 15 bp, Homo sapiens
gttgcatgagaatgt

SEQ ID NO: 356115 - DNA, 15 bp, Homo sapiens
tgttgcatgagaatg

SEQ ID NO: 356116 - DNA, 15 bp, Homo sapiens
atgttgcatgagaat

SEQ ID NO: 356117 - DNA, 15 bp, Homo sapiens
gatgttgcatgagaa

SEQ ID NO: 356118 - DNA, 15 bp, Homo sapiens
agatgttgcatgaga

SEQ ID NO: 356119 - DNA, 15 bp, Homo sapiens
aagatgttgcatgag

SEQ ID NO: 356120 - DNA, 15 bp, Homo sapiens
aaagatgttgcatga

SEQ ID NO: 356121 - DNA, 15 bp, Homo sapiens
aaaagatgttgcatg

SEQ ID NO: 356122 - DNA, 15 bp, Homo sapiens
caaaagatgttgcat

SEQ ID NO: 356123 - DNA, 15 bp, Homo sapiens
acaaaagatgttgca

SEQ ID NO: 356124 - DNA, 15 bp, Homo sapiens
tacaaaagatgttgc

SEQ ID NO: 356125 - DNA, 15 bp, Homo sapiens
gtacaaaagatgttg

SEQ ID NO: 356126 - DNA, 15 bp, Homo sapiens
agtacaaaagatgtt

SEQ ID NO: 356127 - DNA, 15 bp, Homo sapiens
cagtacaaaagatgt

SEQ ID NO: 356128 - DNA, 15 bp, Homo sapiens
acagtacaaaagatg

SEQ ID NO: 356129 - DNA, 15 bp, Homo sapiens
aacagtacaaaagat

SEQ ID NO: 356130 - DNA, 15 bp, Homo sapiens
caacagtacaaaaga

SEQ ID NO: 356131 - DNA, 15 bp, Homo sapiens
gcaacagtacaaaag

SEQ ID NO: 356132 - DNA, 15 bp, Homo sapiens
tgcaacagtacaaaa

SEQ ID NO: 356133 - DNA, 15 bp, Homo sapiens
atgcaacagtacaaa

SEQ ID NO: 356134 - DNA, 15 bp, Homo sapiens
aatgcaacagtacaa

SEQ ID NO: 356135 - DNA, 15 bp, Homo sapiens
aaatgcaacagtaca

SEQ ID NO: 356136 - DNA, 15 bp, Homo sapiens
taaatgcaacagtac

SEQ ID NO: 356137 - DNA, 15 bp, Homo sapiens
ataaatgcaacagta

SEQ ID NO: 356138 - DNA, 15 bp, Homo sapiens
cataaatgcaacagt

SEQ ID NO: 356139 - DNA, 15 bp, Homo sapiens
acataaatgcaacag

SEQ ID NO: 356140 - DNA, 15 bp, Homo sapiens
tacataaatgcaaca

SEQ ID NO: 356141 - DNA, 15 bp, Homo sapiens
ttacataaatgcaac

SEQ ID NO: 356142 - DNA, 15 bp, Homo sapiens
gttacataaatgcaa

SEQ ID NO: 356143 - DNA, 15 bp, Homo sapiens
agttacataaatgca

SEQ ID NO: 356144 - DNA, 15 bp, Homo sapiens
aagttacataaatgc

SEQ ID NO: 356145 - DNA, 15 bp, Homo sapiens
taagttacataaatg

SEQ ID NO: 356146 - DNA, 15 bp, Homo sapiens
ataagttacataaat

SEQ ID NO: 356147 - DNA, 15 bp, Homo sapiens
cataagttacataaa

SEQ ID NO: 356148 - DNA, 15 bp, Homo sapiens
tcataagttacataa

SEQ ID NO: 356149 - DNA, 15 bp, Homo sapiens
ctcataagttacata

SEQ ID NO: 356150 - DNA, 15 bp, Homo sapiens
actcataagttacat

SEQ ID NO: 356151 - DNA, 15 bp, Homo sapiens
aactcataagttaca

SEQ ID NO: 356152 - DNA, 15 bp, Homo sapiens
gaactcataagttac

SEQ ID NO: 356153 - DNA, 15 bp, Homo sapiens
cgaactcataagtta

SEQ ID NO: 356154 - DNA, 15 bp, Homo sapiens
acgaactcataagtt

SEQ ID NO: 356155 - DNA, 15 bp, Homo sapiens
tacgaactcataagt

SEQ ID NO: 356156 - DNA, 15 bp, Homo sapiens
atacgaactcataag

SEQ ID NO: 356157 - DNA, 15 bp, Homo sapiens
tatacgaactcataa

SEQ ID NO: 356158 - DNA, 15 bp, Homo sapiens
atatacgaactcata

SEQ ID NO: 356159 - DNA, 15 bp, Homo sapiens
aatatacgaactcat

SEQ ID NO: 356160 - DNA, 15 bp, Homo sapiens
gaatatacgaactca

SEQ ID NO: 356161 - DNA, 15 bp, Homo sapiens
cgaatatacgaactc

SEQ ID NO: 356162 - DNA, 15 bp, Homo sapiens
acgaatatacgaact

SEQ ID NO: 356163 - DNA, 15 bp, Homo sapiens
tacgaatatacgaac

SEQ ID NO: 356164 - DNA, 15 bp, Homo sapiens
atacgaatatacgaa

SEQ ID NO: 356165 - DNA, 15 bp, Homo sapiens
aatacgaatatacga

SEQ ID NO: 356166 - DNA, 15 bp, Homo sapiens
aaatacgaatatacg

SEQ ID NO: 356167 - DNA, 15 bp, Homo sapiens
taaatacgaatatac

SEQ ID NO: 356168 - DNA, 15 bp, Homo sapiens
ttaaatacgaatata

SEQ ID NO: 356169 - DNA, 15 bp, Homo sapiens
attaaatacgaatat

SEQ ID NO: 356170 - DNA, 15 bp, Homo sapiens
cattaaatacgaata

SEQ ID NO: 356171 - DNA, 15 bp, Homo sapiens
gcattaaatacgaat

SEQ ID NO: 356172 - DNA, 15 bp, Homo sapiens
tgcattaaatacgaa

SEQ ID NO: 356173 - DNA, 15 bp, Homo sapiens
ttgcattaaatacga

SEQ ID NO: 356174 - DNA, 15 bp, Homo sapiens
attgcattaaatacg

SEQ ID NO: 356175 - DNA, 15 bp, Homo sapiens
aattgcattaaatac

SEQ ID NO: 356176 - DNA, 15 bp, Homo sapiens
taattgcattaaata

SEQ ID NO: 356177 - DNA, 15 bp, Homo sapiens
ataattgcattaaat

SEQ ID NO: 356178 - DNA, 15 bp, Homo sapiens
gataattgcattaaa

SEQ ID NO: 356179 - DNA, 15 bp, Homo sapiens
agataattgcattaa

SEQ ID NO: 356180 - DNA, 15 bp, Homo sapiens
tagataattgcatta

SEQ ID NO: 356181 - DNA, 15 bp, Homo sapiens
ttagataattgcatt

SEQ ID NO: 356182 - DNA, 15 bp, Homo sapiens
attagataattgcat

SEQ ID NO: 356183 - DNA, 15 bp, Homo sapiens
aattagataattgca

SEQ ID NO: 356184 - DNA, 15 bp, Homo sapiens
aaattagataattgc

SEQ ID NO: 356185 - DNA, 15 bp, Homo sapiens
gaaattagataattg

SEQ ID NO: 356186 - DNA, 15 bp, Homo sapiens
agaaattagataatt

SEQ ID NO: 356187 - DNA, 15 bp, Homo sapiens
gagaaattagataat

SEQ ID NO: 356188 - DNA, 15 bp, Homo sapiens
agagaaattagataa

SEQ ID NO: 356189 - DNA, 15 bp, Homo sapiens
cagagaaattagata

SEQ ID NO: 356190 - DNA, 15 bp, Homo sapiens
ccagagaaattagat

SEQ ID NO: 356191 - DNA, 15 bp, Homo sapiens
gccagagaaattaga

SEQ ID NO: 356192 - DNA, 15 bp, Homo sapiens
agccagagaaattag

SEQ ID NO: 356193 - DNA, 15 bp, Homo sapiens
tagccagagaaatta

SEQ ID NO: 356194 - DNA, 15 bp, Homo sapiens
ctagccagagaaatt

SEQ ID NO: 356195 - DNA, 15 bp, Homo sapiens
cctagccagagaaat

SEQ ID NO: 356196 - DNA, 15 bp, Homo sapiens
gcctagccagagaaa

SEQ ID NO: 356197 - DNA, 15 bp, Homo sapiens
agcctagccagagaa

SEQ ID NO: 356198 - DNA, 15 bp, Homo sapiens
aagcctagccagaga

SEQ ID NO: 356199 - DNA, 15 bp, Homo sapiens
caagcctagccagag

SEQ ID NO: 356200 - DNA, 15 bp, Homo sapiens
acaagcctagccaga

SEQ ID NO: 356201 - DNA, 15 bp, Homo sapiens
cacaagcctagccag

SEQ ID NO: 356202 - DNA, 15 bp, Homo sapiens
ccacaagcctagcca

SEQ ID NO: 356203 - DNA, 15 bp, Homo sapiens
accacaagcctagcc

SEQ ID NO: 356204 - DNA, 15 bp, Homo sapiens
aaccacaagcctagc

SEQ ID NO: 356205 - DNA, 15 bp, Homo sapiens
gaaccacaagcctag

SEQ ID NO: 356206 - DNA, 15 bp, Homo sapiens
agaaccacaagccta

SEQ ID NO: 356207 - DNA, 15 bp, Homo sapiens
gagaaccacaagcct

SEQ ID NO: 356208 - DNA, 15 bp, Homo sapiens
agagaaccacaagcc

SEQ ID NO: 356209 - DNA, 15 bp, Homo sapiens
gagagaaccacaagc

SEQ ID NO: 356210 - DNA, 15 bp, Homo sapiens
agagagaaccacaag

SEQ ID NO: 356211 - DNA, 15 bp, Homo sapiens
aagagagaaccacaa

SEQ ID NO: 356212 - DNA, 15 bp, Homo sapiens
taagagagaaccaca

SEQ ID NO: 356213 - DNA, 15 bp, Homo sapiens
ataagagagaaccac

SEQ ID NO: 356214 - DNA, 15 bp, Homo sapiens
aataagagagaacca

SEQ ID NO: 356215 - DNA, 15 bp, Homo sapiens
caataagagagaacc

SEQ ID NO: 356216 - DNA, 15 bp, Homo sapiens
acaataagagagaac

SEQ ID NO: 356217 - DNA, 15 bp, Homo sapiens
cacaataagagagaa

SEQ ID NO: 356218 - DNA, 15 bp, Homo sapiens
gcacaataagagaga

SEQ ID NO: 356219 - DNA, 15 bp, Homo sapiens
tgcacaataagagag

SEQ ID NO: 356220 - DNA, 15 bp, Homo sapiens
atgcacaataagaga

SEQ ID NO: 356221 - DNA, 15 bp, Homo sapiens
gatgcacaataagag

SEQ ID NO: 356222 - DNA, 15 bp, Homo sapiens
agatgcacaataaga

SEQ ID NO: 356223 - DNA, 15 bp, Homo sapiens
aagatgcacaataag

SEQ ID NO: 356224 - DNA, 15 bp, Homo sapiens
aaagatgcacaataa

SEQ ID NO: 356225 - DNA, 15 bp, Homo sapiens
taaagatgcacaata

SEQ ID NO: 356226 - DNA, 15 bp, Homo sapiens
ttaaagatgcacaat

SEQ ID NO: 356227 - DNA, 15 bp, Homo sapiens
tttaaagatgcacaa

SEQ ID NO: 356228 - DNA, 15 bp, Homo sapiens
ttttaaagatgcaca

SEQ ID NO: 356229 - DNA, 15 bp, Homo sapiens
tttttaaagatgcac

SEQ ID NO: 356230 - DNA, 15 bp, Homo sapiens
ctttttaaagatgca

SEQ ID NO: 356231 - DNA, 15 bp, Homo sapiens
tctttttaaagatgc

SEQ ID NO: 356232 - DNA, 15 bp, Homo sapiens
atctttttaaagatg

SEQ ID NO: 356233 - DNA, 15 bp, Homo sapiens
aatctttttaaagat

SEQ ID NO: 356234 - DNA, 15 bp, Homo sapiens
aaatctttttaaaga

SEQ ID NO: 356235 - DNA, 15 bp, Homo sapiens
aaaatctttttaaag

SEQ ID NO: 356236 - DNA, 15 bp, Homo sapiens
taaaatctttttaaa

SEQ ID NO: 356237 - DNA, 15 bp, Homo sapiens
ttaaaatctttttaa

SEQ ID NO: 356238 - DNA, 15 bp, Homo sapiens
tttaaaatcttttta

SEQ ID NO: 356239 - DNA, 15 bp, Homo sapiens
ctttaaaatcttttt

SEQ ID NO: 356240 - DNA, 15 bp, Homo sapiens
tctttaaaatctttt

SEQ ID NO: 356241 - DNA, 15 bp, Homo sapiens
ttctttaaaatcttt

SEQ ID NO: 356242 - DNA, 15 bp, Homo sapiens
tttctttaaaatctt

SEQ ID NO: 356243 - DNA, 15 bp, Homo sapiens
ttttctttaaaatct

SEQ ID NO: 356244 - DNA, 15 bp, Homo sapiens
cttttctttaaaatc

SEQ ID NO: 356245 - DNA, 15 bp, Homo sapiens
tcttttctttaaaat

SEQ ID NO: 356246 - DNA, 15 bp, Homo sapiens
ttcttttctttaaaa

SEQ ID NO: 356247 - DNA, 15 bp, Homo sapiens
gttcttttctttaaa

SEQ ID NO: 356248 - DNA, 15 bp, Homo sapiens
tgttcttttctttaa

SEQ ID NO: 356249 - DNA, 15 bp, Homo sapiens
ttgttcttttcttta

SEQ ID NO: 356250 - DNA, 15 bp, Homo sapiens
cttgttcttttcttt

SEQ ID NO: 356251 - DNA, 15 bp, Homo sapiens
tcttgttcttttctt

SEQ ID NO: 356252 - DNA, 15 bp, Homo sapiens
ttcttgttcttttct

SEQ ID NO: 356253 - DNA, 15 bp, Homo sapiens
tttcttgttcttttc

SEQ ID NO: 356254 - DNA, 15 bp, Homo sapiens
ttttcttgttctttt

SEQ ID NO: 356255 - DNA, 15 bp, Homo sapiens
tttttcttgttcttt

SEQ ID NO: 356256 - DNA, 15 bp, Homo sapiens
ctttttcttgttctt

SEQ ID NO: 356257 - DNA, 15 bp, Homo sapiens
cctttttcttgttct

SEQ ID NO: 356258 - DNA, 15 bp, Homo sapiens
acctttttcttgttc

SEQ ID NO: 356259 - DNA, 15 bp, Homo sapiens
tacctttttcttgtt

SEQ ID NO: 356260 - DNA, 15 bp, Homo sapiens
atacctttttcttgt

SEQ ID NO: 356261 - DNA, 15 bp, Homo sapiens
catacctttttcttg

SEQ ID NO: 356262 - DNA, 15 bp, Homo sapiens
gcatacctttttctt

SEQ ID NO: 356263 - DNA, 15 bp, Homo sapiens
ggcatacctttttct

SEQ ID NO: 356264 - DNA, 15 bp, Homo sapiens
gggcatacctttttc

SEQ ID NO: 356265 - DNA, 15 bp, Homo sapiens
cgggcataccttttt

SEQ ID NO: 356266 - DNA, 15 bp, Homo sapiens
tcgggcatacctttt

SEQ ID NO: 356267 - DNA, 15 bp, Homo sapiens
gtcgggcataccttt

SEQ ID NO: 356268 - DNA, 15 bp, Homo sapiens
tgtcgggcatacctt

SEQ ID NO: 356269 - DNA, 15 bp, Homo sapiens
atgtcgggcatacct

SEQ ID NO: 356270 - DNA, 15 bp, Homo sapiens
aatgtcgggcatacc

SEQ ID NO: 356271 - DNA, 15 bp, Homo sapiens
taatgtcgggcatac

SEQ ID NO: 356272 - DNA, 15 bp, Homo sapiens
ttaatgtcgggcata

SEQ ID NO: 356273 - DNA, 15 bp, Homo sapiens
tttaatgtcgggcat

SEQ ID NO: 356274 - DNA, 15 bp, Homo sapiens
gtttaatgtcgggca

SEQ ID NO: 356275 - DNA, 15 bp, Homo sapiens
agtttaatgtcgggc

SEQ ID NO: 356276 - DNA, 15 bp, Homo sapiens
gagtttaatgtcggg

SEQ ID NO: 356277 - DNA, 15 bp, Homo sapiens
tgagtttaatgtcgg

SEQ ID NO: 356278 - DNA, 15 bp, Homo sapiens
ctgagtttaatgtcg

SEQ ID NO: 356279 - DNA, 15 bp, Homo sapiens
tctgagtttaatgtc

SEQ ID NO: 356280 - DNA, 15 bp, Homo sapiens
ctctgagtttaatgt

SEQ ID NO: 356281 - DNA, 15 bp, Homo sapiens
actctgagtttaatg

SEQ ID NO: 356282 - DNA, 15 bp, Homo sapiens
gactctgagtttaat

SEQ ID NO: 356283 - DNA, 15 bp, Homo sapiens
tgactctgagtttaa

SEQ ID NO: 356284 - DNA, 15 bp, Homo sapiens
atgactctgagttta

SEQ ID NO: 356285 - DNA, 15 bp, Homo sapiens
aatgactctgagttt

SEQ ID NO: 356286 - DNA, 15 bp, Homo sapiens
taatgactctgagtt

SEQ ID NO: 356287 - DNA, 15 bp, Homo sapiens
gtaatgactctgagt

SEQ ID NO: 356288 - DNA, 15 bp, Homo sapiens
tgtaatgactctgag

SEQ ID NO: 356289 - DNA, 15 bp, Homo sapiens
ttgtaatgactctga

SEQ ID NO: 356290 - DNA, 15 bp, Homo sapiens
tttgtaatgactctg

SEQ ID NO: 356291 - DNA, 15 bp, Homo sapiens
atttgtaatgactct

SEQ ID NO: 356292 - DNA, 15 bp, Homo sapiens
gatttgtaatgactc

SEQ ID NO: 356293 - DNA, 15 bp, Homo sapiens
tgatttgtaatgact

SEQ ID NO: 356294 - DNA, 15 bp, Homo sapiens
ctgatttgtaatgac

SEQ ID NO: 356295 - DNA, 15 bp, Homo sapiens
tctgatttgtaatga

SEQ ID NO: 356296 - DNA, 15 bp, Homo sapiens
ctctgatttgtaatg

SEQ ID NO: 356297 - DNA, 15 bp, Homo sapiens
gctctgatttgtaat

SEQ ID NO: 356298 - DNA, 15 bp, Homo sapiens
ggctctgatttgtaa

SEQ ID NO: 356299 - DNA, 15 bp, Homo sapiens
tggctctgatttgta

SEQ ID NO: 356300 - DNA, 15 bp, Homo sapiens
ctggctctgatttgt

SEQ ID NO: 356301 - DNA, 15 bp, Homo sapiens
tctggctctgatttg

SEQ ID NO: 356302 - DNA, 15 bp, Homo sapiens
ttctggctctgattt

SEQ ID NO: 356303 - DNA, 15 bp, Homo sapiens
cttctggctctgatt

SEQ ID NO: 356304 - DNA, 15 bp, Homo sapiens
ccttctggctctgat

SEQ ID NO: 356305 - DNA, 15 bp, Homo sapiens
cccttctggctctga

SEQ ID NO: 356306 - DNA, 15 bp, Homo sapiens
acccttctggctctg

SEQ ID NO: 356307 - DNA, 15 bp, Homo sapiens
gacccttctggctct

SEQ ID NO: 356308 - DNA, 15 bp, Homo sapiens
agacccttctggctc

SEQ ID NO: 356309 - DNA, 15 bp, Homo sapiens
gagacccttctggct

SEQ ID NO: 356310 - DNA, 15 bp, Homo sapiens
tgagacccttctggc

SEQ ID NO: 356311 - DNA, 15 bp, Homo sapiens
atgagacccttctgg

SEQ ID NO: 356312 - DNA, 15 bp, Homo sapiens
tatgagacccttctg

SEQ ID NO: 356313 - DNA, 15 bp, Homo sapiens
gtatgagacccttct

SEQ ID NO: 356314 - DNA, 15 bp, Homo sapiens
agtatgagacccttc

SEQ ID NO: 356315 - DNA, 15 bp, Homo sapiens
aagtatgagaccctt

SEQ ID NO: 356316 - DNA, 15 bp, Homo sapiens
taagtatgagaccct

SEQ ID NO: 356317 - DNA, 15 bp, Homo sapiens
ttaagtatgagaccc

SEQ ID NO: 356318 - DNA, 15 bp, Homo sapiens
gttaagtatgagacc

SEQ ID NO: 356319 - DNA, 15 bp, Homo sapiens
agttaagtatgagac

SEQ ID NO: 356320 - DNA, 15 bp, Homo sapiens
tagttaagtatgaga

SEQ ID NO: 356321 - DNA, 15 bp, Homo sapiens
ttagttaagtatgag

SEQ ID NO: 356322 - DNA, 15 bp, Homo sapiens
attagttaagtatga

SEQ ID NO: 356323 - DNA, 15 bp, Homo sapiens
cattagttaagtatg

SEQ ID NO: 356324 - DNA, 15 bp, Homo sapiens
gcattagttaagtat

SEQ ID NO: 356325 - DNA, 15 bp, Homo sapiens
agcattagttaagta

SEQ ID NO: 356326 - DNA, 15 bp, Homo sapiens
gagcattagttaagt

SEQ ID NO: 356327 - DNA, 15 bp, Homo sapiens
tgagcattagttaag

SEQ ID NO: 356328 - DNA, 15 bp, Homo sapiens
atgagcattagttaa

SEQ ID NO: 356329 - DNA, 15 bp, Homo sapiens
gatgagcattagtta

SEQ ID NO: 356330 - DNA, 15 bp, Homo sapiens
ggatgagcattagtt

SEQ ID NO: 356331 - DNA, 15 bp, Homo sapiens
gggatgagcattagt

SEQ ID NO: 356332 - DNA, 15 bp, Homo sapiens
ggggatgagcattag

SEQ ID NO: 356333 - DNA, 15 bp, Homo sapiens
gggggatgagcatta

SEQ ID NO: 356334 - DNA, 15 bp, Homo sapiens
ggggggatgagcatt

SEQ ID NO: 356335 - DNA, 15 bp, Homo sapiens
tggggggatgagcat

SEQ ID NO: 356336 - DNA, 15 bp, Homo sapiens
ctggggggatgagca

SEQ ID NO: 356337 - DNA, 15 bp, Homo sapiens
cctggggggatgagc

SEQ ID NO: 356338 - DNA, 15 bp, Homo sapiens
tcctggggggatgag

SEQ ID NO: 356339 - DNA, 15 bp, Homo sapiens
ttcctggggggatga

SEQ ID NO: 356340 - DNA, 15 bp, Homo sapiens
tttcctggggggatg

SEQ ID NO: 356341 - DNA, 15 bp, Homo sapiens
ctttcctggggggat

SEQ ID NO: 356342 - DNA, 15 bp, Homo sapiens
cctttcctgggggga

SEQ ID NO: 356343 - DNA, 15 bp, Homo sapiens
ccctttcctgggggg

SEQ ID NO: 356344 - DNA, 15 bp, Homo sapiens
tccctttcctggggg

SEQ ID NO: 356345 - DNA, 15 bp, Homo sapiens
ttccctttcctgggg

SEQ ID NO: 356346 - DNA, 15 bp, Homo sapiens
cttccctttcctggg

SEQ ID NO: 356347 - DNA, 15 bp, Homo sapiens
acttccctttcctgg

SEQ ID NO: 356348 - DNA, 15 bp, Homo sapiens
cacttccctttcctg

SEQ ID NO: 356349 - DNA, 15 bp, Homo sapiens
acacttccctttcct

SEQ ID NO: 356350 - DNA, 15 bp, Homo sapiens
gacacttccctttcc

SEQ ID NO: 356351 - DNA, 15 bp, Homo sapiens
agacacttccctttc

SEQ ID NO: 356352 - DNA, 15 bp, Homo sapiens
aagacacttcccttt

SEQ ID NO: 356353 - DNA, 15 bp, Homo sapiens
caagacacttccctt

SEQ ID NO: 356354 - DNA, 15 bp, Homo sapiens
gcaagacacttccct

SEQ ID NO: 356355 - DNA, 15 bp, Homo sapiens
ggcaagacacttccc

SEQ ID NO: 356356 - DNA, 15 bp, Homo sapiens
tggcaagacacttcc

SEQ ID NO: 356357 - DNA, 15 bp, Homo sapiens
ttggcaagacacttc

SEQ ID NO: 356358 - DNA, 15 bp, Homo sapiens
cttggcaagacactt

SEQ ID NO: 356359 - DNA, 15 bp, Homo sapiens
ccttggcaagacact

SEQ ID NO: 356360 - DNA, 15 bp, Homo sapiens
gccttggcaagacac

SEQ ID NO: 356361 - DNA, 15 bp, Homo sapiens
ggccttggcaagaca

SEQ ID NO: 356362 - DNA, 15 bp, Homo sapiens
tggccttggcaagac

SEQ ID NO: 356363 - DNA, 15 bp, Homo sapiens
gtggccttggcaaga

SEQ ID NO: 356364 - DNA, 15 bp, Homo sapiens
actgtgtggccttgg

SEQ ID NO: 356365 - DNA, 15 bp, Homo sapiens
aactgtgtggccttg

SEQ ID NO: 356366 - DNA, 15 bp, Homo sapiens
caactgtgtggcctt

SEQ ID NO: 356367 - DNA, 15 bp, Homo sapiens
tcaactgtgtggcct

SEQ ID NO: 356368 - DNA, 15 bp, Homo sapiens
atcaactgtgtggcc

SEQ ID NO: 356369 - DNA, 15 bp, Homo sapiens
gatcaactgtgtggc

SEQ ID NO: 356370 - DNA, 15 bp, Homo sapiens
ggatcaactgtgtgg

SEQ ID NO: 356371 - DNA, 15 bp, Homo sapiens
tggatcaactgtgtg

SEQ ID NO: 356372 - DNA, 15 bp, Homo sapiens
ttggatcaactgtgt

SEQ ID NO: 356373 - DNA, 15 bp, Homo sapiens
cttggatcaactgtg

SEQ ID NO: 356374 - DNA, 15 bp, Homo sapiens
ccttggatcaactgt

SEQ ID NO: 356375 - DNA, 15 bp, Homo sapiens
gccttggatcaactg

SEQ ID NO: 356376 - DNA, 15 bp, Homo sapiens
tgccttggatcaact

SEQ ID NO: 356377 - DNA, 15 bp, Homo sapiens
ctgccttggatcaac

SEQ ID NO: 356378 - DNA, 15 bp, Homo sapiens
cctgccttggatcaa

SEQ ID NO: 356379 - DNA, 15 bp, Homo sapiens
gcctgccttggatca

SEQ ID NO: 356380 - DNA, 15 bp, Homo sapiens
ggcctgccttggatc

SEQ ID NO: 356381 - DNA, 15 bp, Homo sapiens
aggcctgccttggat

SEQ ID NO: 356382 - DNA, 15 bp, Homo sapiens
taggcctgccttgga

SEQ ID NO: 356383 - DNA, 15 bp, Homo sapiens
ctaggcctgccttgg

SEQ ID NO: 356384 - DNA, 15 bp, Homo sapiens
tctaggcctgccttg

SEQ ID NO: 356385 - DNA, 15 bp, Homo sapiens
ttctaggcctgcctt

SEQ ID NO: 356386 - DNA, 15 bp, Homo sapiens
gttctaggcctgcct

SEQ ID NO: 356387 - DNA, 15 bp, Homo sapiens
ggttctaggcctgcc

SEQ ID NO: 356388 - DNA, 15 bp, Homo sapiens
gggttctaggcctgc

SEQ ID NO: 356389 - DNA, 15 bp, Homo sapiens
ggggttctaggcctg

SEQ ID NO: 356390 - DNA, 15 bp, Homo sapiens
cggggttctaggcct

SEQ ID NO: 356391 - DNA, 15 bp, Homo sapiens
ccggggttctaggcc

SEQ ID NO: 356392 - DNA, 15 bp, Homo sapiens
cccggggttctaggc

SEQ ID NO: 356393 - DNA, 15 bp, Homo sapiens
ccccggggttctagg

SEQ ID NO: 356394 - DNA, 15 bp, Homo sapiens
gccccggggttctag

SEQ ID NO: 356395 - DNA, 15 bp, Homo sapiens
agccccggggttcta

SEQ ID NO: 356396 - DNA, 15 bp, Homo sapiens
gagccccggggttct

SEQ ID NO: 356397 - DNA, 15 bp, Homo sapiens
ggagccccggggttc

SEQ ID NO: 356398 - DNA, 15 bp, Homo sapiens
aggagccccggggtt

SEQ ID NO: 356399 - DNA, 15 bp, Homo sapiens
caggagccccggggt

SEQ ID NO: 356400 - DNA, 15 bp, Homo sapiens
tcaggagccccgggg

SEQ ID NO: 356401 - DNA, 15 bp, Homo sapiens
atcaggagccccggg

SEQ ID NO: 356402 - DNA, 15 bp, Homo sapiens
gatcaggagccccgg

SEQ ID NO: 356403 - DNA, 15 bp, Homo sapiens
tgatcaggagccccg

SEQ ID NO: 356404 - DNA, 15 bp, Homo sapiens
gtgatcaggagcccc

SEQ ID NO: 356405 - DNA, 15 bp, Homo sapiens
agtgatcaggagccc

SEQ ID NO: 356406 - DNA, 15 bp, Homo sapiens
tagtgatcaggagcc

SEQ ID NO: 356407 - DNA, 15 bp, Homo sapiens
ttagtgatcaggagc

SEQ ID NO: 356408 - DNA, 15 bp, Homo sapiens
cttagtgatcaggag

SEQ ID NO: 356409 - DNA, 15 bp, Homo sapiens
gcttagtgatcagga

SEQ ID NO: 356410 - DNA, 15 bp, Homo sapiens
agcttagtgatcagg

SEQ ID NO: 356411 - DNA, 15 bp, Homo sapiens
cagcttagtgatcag

SEQ ID NO: 356412 - DNA, 15 bp, Homo sapiens
acagcttagtgatca

SEQ ID NO: 356413 - DNA, 15 bp, Homo sapiens
cacagcttagtgatc

SEQ ID NO: 356414 - DNA, 15 bp, Homo sapiens
gcacagcttagtgat

SEQ ID NO: 356415 - DNA, 15 bp, Homo sapiens
agcacagcttagtga

SEQ ID NO: 356416 - DNA, 15 bp, Homo sapiens
aagcacagcttagtg

SEQ ID NO: 356417 - DNA, 15 bp, Homo sapiens
gaagcacagcttagt

SEQ ID NO: 356418 - DNA, 15 bp, Homo sapiens
agaagcacagcttag

SEQ ID NO: 356419 - DNA, 15 bp, Homo sapiens
gagaagcacagctta

SEQ ID NO: 356420 - DNA, 15 bp, Homo sapiens
ggagaagcacagctt

SEQ ID NO: 356421 - DNA, 15 bp, Homo sapiens
gggagaagcacagct

SEQ ID NO: 356422 - DNA, 15 bp, Homo sapiens
ggggagaagcacagc

SEQ ID NO: 356423 - DNA, 15 bp, Homo sapiens
aggggagaagcacag

SEQ ID NO: 356424 - DNA, 15 bp, Homo sapiens
aaggggagaagcaca

SEQ ID NO: 356425 - DNA, 15 bp, Homo sapiens
aaaggggagaagcac

SEQ ID NO: 356426 - DNA, 15 bp, Homo sapiens
caaaggggagaagca

SEQ ID NO: 356427 - DNA, 15 bp, Homo sapiens
gcaaaggggagaagc

SEQ ID NO: 356428 - DNA, 15 bp, Homo sapiens
tgcaaaggggagaag

SEQ ID NO: 356429 - DNA, 15 bp, Homo sapiens
ttgcaaaggggagaa

SEQ ID NO: 356430 - DNA, 15 bp, Homo sapiens
gttgcaaaggggaga

SEQ ID NO: 356431 - DNA, 15 bp, Homo sapiens
tgttgcaaaggggag

SEQ ID NO: 356432 - DNA, 15 bp, Homo sapiens
atgttgcaaagggga

SEQ ID NO: 356433 - DNA, 15 bp, Homo sapiens
gatgttgcaaagggg

SEQ ID NO: 356434 - DNA, 15 bp, Homo sapiens
cgatgttgcaaaggg

SEQ ID NO: 356435 - DNA, 15 bp, Homo sapiens
gcgatgttgcaaagg

SEQ ID NO: 356436 - DNA, 15 bp, Homo sapiens
ggcgatgttgcaaag

SEQ ID NO: 356437 - DNA, 15 bp, Homo sapiens
aggcgatgttgcaaa

SEQ ID NO: 356438 - DNA, 15 bp, Homo sapiens
gaggcgatgttgcaa

SEQ ID NO: 356439 - DNA, 15 bp, Homo sapiens
agaggcgatgttgca

SEQ ID NO: 356440 - DNA, 15 bp, Homo sapiens
cagaggcgatgttgc

SEQ ID NO: 356441 - DNA, 15 bp, Homo sapiens
acagaggcgatgttg

SEQ ID NO: 356442 - DNA, 15 bp, Homo sapiens
tacagaggcgatgtt

SEQ ID NO: 356443 - DNA, 15 bp, Homo sapiens
ctacagaggcgatgt

SEQ ID NO: 356444 - DNA, 15 bp, Homo sapiens
gctacagaggcgatg

SEQ ID NO: 356445 - DNA, 15 bp, Homo sapiens
agctacagaggcgat

SEQ ID NO: 356446 - DNA, 15 bp, Homo sapiens
cagctacagaggcga

SEQ ID NO: 356447 - DNA, 15 bp, Homo sapiens
gcagctacagaggcg

SEQ ID NO: 356448 - DNA, 15 bp, Homo sapiens
agcagctacagaggc

SEQ ID NO: 356449 - DNA, 15 bp, Homo sapiens
gagcagctacagagg

SEQ ID NO: 356450 - DNA, 15 bp, Homo sapiens
cgagcagctacagag

SEQ ID NO: 356451 - DNA, 15 bp, Homo sapiens
ccgagcagctacaga

SEQ ID NO: 356452 - DNA, 15 bp, Homo sapiens
tccgagcagctacag

SEQ ID NO: 356453 - DNA, 15 bp, Homo sapiens
ctccgagcagctaca

SEQ ID NO: 356454 - DNA, 15 bp, Homo sapiens
gctccgagcagctac

SEQ ID NO: 356455 - DNA, 15 bp, Homo sapiens
agctccgagcagcta

SEQ ID NO: 356456 - DNA, 15 bp, Homo sapiens
tagctccgagcagct

SEQ ID NO: 356457 - DNA, 15 bp, Homo sapiens
atagctccgagcagc

SEQ ID NO: 356458 - DNA, 15 bp, Homo sapiens
aatagctccgagcag

SEQ ID NO: 356459 - DNA, 15 bp, Homo sapiens
aaatagctccgagca

SEQ ID NO: 356460 - DNA, 15 bp, Homo sapiens
taaatagctccgagc

SEQ ID NO: 356461 - DNA, 15 bp, Homo sapiens
ataaatagctccgag

SEQ ID NO: 356462 - DNA, 15 bp, Homo sapiens
aataaatagctccga

SEQ ID NO: 356463 - DNA, 15 bp, Homo sapiens
caataaatagctccg

SEQ ID NO: 356464 - DNA, 15 bp, Homo sapiens
ccaataaatagctcc

SEQ ID NO: 356465 - DNA, 15 bp, Homo sapiens
cccaataaatagctc

SEQ ID NO: 356466 - DNA, 15 bp, Homo sapiens
tcccaataaatagct

SEQ ID NO: 356467 - DNA, 15 bp, Homo sapiens
ttcccaataaatagc

SEQ ID NO: 356468 - DNA, 15 bp, Homo sapiens
gttcccaataaatag

SEQ ID NO: 356469 - DNA, 15 bp, Homo sapiens
agttcccaataaata

SEQ ID NO: 356470 - DNA, 15 bp, Homo sapiens
aagttcccaataaat

SEQ ID NO: 356471 - DNA, 15 bp, Homo sapiens
aaagttcccaataaa

SEQ ID NO: 356472 - DNA, 15 bp, Homo sapiens
aaaagttcccaataa

SEQ ID NO: 356473 - DNA, 15 bp, Homo sapiens
gaaaagttcccaata

SEQ ID NO: 356474 - DNA, 15 bp, Homo sapiens
tgaaaagttcccaat

SEQ ID NO: 356475 - DNA, 15 bp, Homo sapiens
ctgaaaagttcccaa

SEQ ID NO: 356476 - DNA, 15 bp, Homo sapiens
cctgaaaagttccca

SEQ ID NO: 356477 - DNA, 15 bp, Homo sapiens
ccctgaaaagttccc

SEQ ID NO: 356478 - DNA, 15 bp, Homo sapiens
gccctgaaaagttcc

SEQ ID NO: 356479 - DNA, 15 bp, Homo sapiens
ggccctgaaaagttc

SEQ ID NO: 356480 - DNA, 15 bp, Homo sapiens
gggccctgaaaagtt

SEQ ID NO: 356481 - DNA, 15 bp, Homo sapiens
tgggccctgaaaagt

SEQ ID NO: 356482 - DNA, 15 bp, Homo sapiens
ctgggccctgaaaag

SEQ ID NO: 356483 - DNA, 15 bp, Homo sapiens
gctgggccctgaaaa

SEQ ID NO: 356484 - DNA, 15 bp, Homo sapiens
tgctgggccctgaaa

SEQ ID NO: 356485 - DNA, 15 bp, Homo sapiens
atgctgggccctgaa

SEQ ID NO: 356486 - DNA, 15 bp, Homo sapiens
aatgctgggccctga

SEQ ID NO: 356487 - DNA, 15 bp, Homo sapiens
caatgctgggccctg

SEQ ID NO: 356488 - DNA, 15 bp, Homo sapiens
acaatgctgggccct

SEQ ID NO: 356489 - DNA, 15 bp, Homo sapiens
cacaatgctgggccc

SEQ ID NO: 356490 - DNA, 15 bp, Homo sapiens
tcacaatgctgggcc

SEQ ID NO: 356491 - DNA, 15 bp, Homo sapiens
ctcacaatgctgggc

SEQ ID NO: 356492 - DNA, 15 bp, Homo sapiens
tctcacaatgctggg

SEQ ID NO: 356493 - DNA, 15 bp, Homo sapiens
ctctcacaatgctgg

SEQ ID NO: 356494 - DNA, 15 bp, Homo sapiens
tctctcacaatgctg

SEQ ID NO: 356495 - DNA, 15 bp, Homo sapiens
gtctctcacaatgct

SEQ ID NO: 356496 - DNA, 15 bp, Homo sapiens
agtctctcacaatgc

SEQ ID NO: 356497 - DNA, 15 bp, Homo sapiens
gagtctctcacaatg

SEQ ID NO: 356498 - DNA, 15 bp, Homo sapiens
tgagtctctcacaat

SEQ ID NO: 356499 - DNA, 15 bp, Homo sapiens
ctgagtctctcacaa

SEQ ID NO: 356500 - DNA, 15 bp, Homo sapiens
actgagtctctcaca

SEQ ID NO: 356501 - DNA, 15 bp, Homo sapiens
cactgagtctctcac

SEQ ID NO: 356502 - DNA, 15 bp, Homo sapiens
tcactgagtctctca

SEQ ID NO: 356503 - DNA, 15 bp, Homo sapiens
atcactgagtctctc

SEQ ID NO: 356504 - DNA, 15 bp, Homo sapiens
tatcactgagtctct

SEQ ID NO: 356505 - DNA, 15 bp, Homo sapiens
atatcactgagtctc

SEQ ID NO: 356506 - DNA, 15 bp, Homo sapiens
catatcactgagtct

SEQ ID NO: 356507 - DNA, 15 bp, Homo sapiens
acatatcactgagtc

SEQ ID NO: 356508 - DNA, 15 bp, Homo sapiens
cacatatcactgagt

SEQ ID NO: 356509 - DNA, 15 bp, Homo sapiens
tcacatatcactgag

SEQ ID NO: 356510 - DNA, 15 bp, Homo sapiens
ttcacatatcactga

SEQ ID NO: 356511 - DNA, 15 bp, Homo sapiens
gttcacatatcactg

SEQ ID NO: 356512 - DNA, 15 bp, Homo sapiens
agttcacatatcact

SEQ ID NO: 356513 - DNA, 15 bp, Homo sapiens
gagttcacatatcac

SEQ ID NO: 356514 - DNA, 15 bp, Homo sapiens
ggagttcacatatca

SEQ ID NO: 356515 - DNA, 15 bp, Homo sapiens
tggagttcacatatc

SEQ ID NO: 356516 - DNA, 15 bp, Homo sapiens
ttggagttcacatat

SEQ ID NO: 356517 - DNA, 15 bp, Homo sapiens
gttggagttcacata

SEQ ID NO: 356518 - DNA, 15 bp, Homo sapiens
tgttggagttcacat

SEQ ID NO: 356519 - DNA, 15 bp, Homo sapiens
ctgttggagttcaca

SEQ ID NO: 356520 - DNA, 15 bp, Homo sapiens
tctgttggagttcac

SEQ ID NO: 356521 - DNA, 15 bp, Homo sapiens
ctctgttggagttca

SEQ ID NO: 356522 - DNA, 15 bp, Homo sapiens
cctctgttggagttc

SEQ ID NO: 356523 - DNA, 15 bp, Homo sapiens
tcctctgttggagtt

SEQ ID NO: 356524 - DNA, 15 bp, Homo sapiens
ctcctctgttggagt

SEQ ID NO: 356525 - DNA, 15 bp, Homo sapiens
gctcctctgttggag

SEQ ID NO: 356526 - DNA, 15 bp, Homo sapiens
agctcctctgttgga

SEQ ID NO: 356527 - DNA, 15 bp, Homo sapiens
aagctcctctgttgg

SEQ ID NO: 356528 - DNA, 15 bp, Homo sapiens
taagctcctctgttg

SEQ ID NO: 356529 - DNA, 15 bp, Homo sapiens
ataagctcctctgtt

SEQ ID NO: 356530 - DNA, 15 bp, Homo sapiens
tataagctcctctgt

SEQ ID NO: 356531 - DNA, 15 bp, Homo sapiens
ttataagctcctctg

SEQ ID NO: 356532 - DNA, 15 bp, Homo sapiens
cttataagctcctct

SEQ ID NO: 356533 - DNA, 15 bp, Homo sapiens
gcttataagctcctc

SEQ ID NO: 356534 - DNA, 15 bp, Homo sapiens
ggcttataagctcct

SEQ ID NO: 356535 - DNA, 15 bp, Homo sapiens
aggcttataagctcc

SEQ ID NO: 356536 - DNA, 15 bp, Homo sapiens
taggcttataagctc

SEQ ID NO: 356537 - DNA, 15 bp, Homo sapiens
ctaggcttataagct

SEQ ID NO: 356538 - DNA, 15 bp, Homo sapiens
gctaggcttataagc

SEQ ID NO: 356539 - DNA, 15 bp, Homo sapiens
agctaggcttataag

SEQ ID NO: 356540 - DNA, 15 bp, Homo sapiens
cagctaggcttataa

SEQ ID NO: 356541 - DNA, 15 bp, Homo sapiens
ccagctaggcttata

SEQ ID NO: 356542 - DNA, 15 bp, Homo sapiens
cccagctaggcttat

SEQ ID NO: 356543 - DNA, 15 bp, Homo sapiens
ccccagctaggctta

SEQ ID NO: 356544 - DNA, 15 bp, Homo sapiens
cccccagctaggctt

SEQ ID NO: 356545 - DNA, 15 bp, Homo sapiens
tcccccagctaggct

SEQ ID NO: 356546 - DNA, 15 bp, Homo sapiens
ctcccccagctaggc

SEQ ID NO: 356547 - DNA, 15 bp, Homo sapiens
actcccccagctagg

SEQ ID NO: 356548 - DNA, 15 bp, Homo sapiens
tactcccccagctag

SEQ ID NO: 356549 - DNA, 15 bp, Homo sapiens
ctactcccccagcta

SEQ ID NO: 356550 - DNA, 15 bp, Homo sapiens
tctactcccccagct

SEQ ID NO: 356551 - DNA, 15 bp, Homo sapiens
ttctactcccccagc

SEQ ID NO: 356552 - DNA, 15 bp, Homo sapiens
gttctactcccccag

SEQ ID NO: 356553 - DNA, 15 bp, Homo sapiens
tgttctactccccca

SEQ ID NO: 356554 - DNA, 15 bp, Homo sapiens
gtgttctactccccc

SEQ ID NO: 356555 - DNA, 15 bp, Homo sapiens
tgtgttctactcccc

SEQ ID NO: 356556 - DNA, 15 bp, Homo sapiens
atgtgttctactccc

SEQ ID NO: 356557 - DNA, 15 bp, Homo sapiens
aatgtgttctactcc

SEQ ID NO: 356558 - DNA, 15 bp, Homo sapiens
taatgtgttctactc

SEQ ID NO: 356559 - DNA, 15 bp, Homo sapiens
ctaatgtgttctact

SEQ ID NO: 356560 - DNA, 15 bp, Homo sapiens
tctaatgtgttctac

SEQ ID NO: 356561 - DNA, 15 bp, Homo sapiens
ttctaatgtgttcta

SEQ ID NO: 356562 - DNA, 15 bp, Homo sapiens
attctaatgtgttct

SEQ ID NO: 356563 - DNA, 15 bp, Homo sapiens
aattctaatgtgttc

SEQ ID NO: 356564 - DNA, 15 bp, Homo sapiens
caattctaatgtgtt

SEQ ID NO: 356565 - DNA, 15 bp, Homo sapiens
tcaattctaatgtgt

SEQ ID NO: 356566 - DNA, 15 bp, Homo sapiens
ttcaattctaatgtg

SEQ ID NO: 356567 - DNA, 15 bp, Homo sapiens
gttcaattctaatgt

SEQ ID NO: 356568 - DNA, 15 bp, Homo sapiens
tgttcaattctaatg

SEQ ID NO: 356569 - DNA, 15 bp, Homo sapiens
gtgttcaattctaat

SEQ ID NO: 356570 - DNA, 15 bp, Homo sapiens
tgtgttcaattctaa

SEQ ID NO: 356571 - DNA, 15 bp, Homo sapiens
ttgtgttcaattcta

SEQ ID NO: 356572 - DNA, 15 bp, Homo sapiens
tttgtgttcaattct

SEQ ID NO: 356573 - DNA, 15 bp, Homo sapiens
atttgtgttcaattc

SEQ ID NO: 356574 - DNA, 15 bp, Homo sapiens
aatttgtgttcaatt

SEQ ID NO: 356575 - DNA, 15 bp, Homo sapiens
taatttgtgttcaat

SEQ ID NO: 356576 - DNA, 15 bp, Homo sapiens
ataatttgtgttcaa

SEQ ID NO: 356577 - DNA, 15 bp, Homo sapiens
tataatttgtgttca

SEQ ID NO: 356578 - DNA, 15 bp, Homo sapiens
ttataatttgtgttc

SEQ ID NO: 356579 - DNA, 15 bp, Homo sapiens
attataatttgtgtt

SEQ ID NO: 356580 - DNA, 15 bp, Homo sapiens
tattataatttgtgt

SEQ ID NO: 356581 - DNA, 15 bp, Homo sapiens
ttattataatttgtg

SEQ ID NO: 356582 - DNA, 15 bp, Homo sapiens
attattataatttgt

SEQ ID NO: 356583 - DNA, 15 bp, Homo sapiens
cattattataatttg

SEQ ID NO: 356584 - DNA, 15 bp, Homo sapiens
gcattattataattt

SEQ ID NO: 356585 - DNA, 15 bp, Homo sapiens
tgcattattataatt

SEQ ID NO: 356586 - DNA, 15 bp, Homo sapiens
ttgcattattataat

SEQ ID NO: 356587 - DNA, 15 bp, Homo sapiens
cttgcattattataa

SEQ ID NO: 356588 - DNA, 15 bp, Homo sapiens
ccttgcattattata

SEQ ID NO: 356589 - DNA, 15 bp, Homo sapiens
gccttgcattattat

SEQ ID NO: 356590 - DNA, 15 bp, Homo sapiens
tgccttgcattatta

SEQ ID NO: 356591 - DNA, 15 bp, Homo sapiens
atgccttgcattatt

SEQ ID NO: 356592 - DNA, 15 bp, Homo sapiens
catgccttgcattat

SEQ ID NO: 356593 - DNA, 15 bp, Homo sapiens
tcatgccttgcatta

SEQ ID NO: 356594 - DNA, 15 bp, Homo sapiens
ctcatgccttgcatt

SEQ ID NO: 356595 - DNA, 15 bp, Homo sapiens
tctcatgccttgcat

SEQ ID NO: 356596 - DNA, 15 bp, Homo sapiens
atctcatgccttgca

SEQ ID NO: 356597 - DNA, 15 bp, Homo sapiens
gatctcatgccttgc

SEQ ID NO: 356598 - DNA, 15 bp, Homo sapiens
tgatctcatgccttg

SEQ ID NO: 356599 - DNA, 15 bp, Homo sapiens
ctgatctcatgcctt

SEQ ID NO: 356600 - DNA, 15 bp, Homo sapiens
tctgatctcatgcct

SEQ ID NO: 356601 - DNA, 15 bp, Homo sapiens
ttctgatctcatgcc

SEQ ID NO: 356602 - DNA, 15 bp, Homo sapiens
cttctgatctcatgc

SEQ ID NO: 356603 - DNA, 15 bp, Homo sapiens
acttctgatctcatg

SEQ ID NO: 356604 - DNA, 15 bp, Homo sapiens
cacttctgatctcat

SEQ ID NO: 356605 - DNA, 15 bp, Homo sapiens
gcacttctgatctca

SEQ ID NO: 356606 - DNA, 15 bp, Homo sapiens
ggcacttctgatctc

SEQ ID NO: 356607 - DNA, 15 bp, Homo sapiens
tggcacttctgatct

SEQ ID NO: 356608 - DNA, 15 bp, Homo sapiens
ctggcacttctgatc

SEQ ID NO: 356609 - DNA, 15 bp, Homo sapiens
cctggcacttctgat

SEQ ID NO: 356610 - DNA, 15 bp, Homo sapiens
ccctggcacttctga

SEQ ID NO: 356611 - DNA, 15 bp, Homo sapiens
cccctggcacttctg

SEQ ID NO: 356612 - DNA, 15 bp, Homo sapiens
tcccctggcacttct

SEQ ID NO: 356613 - DNA, 15 bp, Homo sapiens
atcccctggcacttc

SEQ ID NO: 356614 - DNA, 15 bp, Homo sapiens
aatcccctggcactt

SEQ ID NO: 356615 - DNA, 15 bp, Homo sapiens
aaatcccctggcact

SEQ ID NO: 356616 - DNA, 15 bp, Homo sapiens
aaaatcccctggcac

SEQ ID NO: 356617 - DNA, 15 bp, Homo sapiens
aaaaatcccctggca

SEQ ID NO: 356618 - DNA, 15 bp, Homo sapiens
aaaaaatcccctggc

SEQ ID NO: 356619 - DNA, 15 bp, Homo sapiens
taaaaaatcccctgg

SEQ ID NO: 356620 - DNA, 15 bp, Homo sapiens
ttaaaaaatcccctg

SEQ ID NO: 356621 - DNA, 15 bp, Homo sapiens
tttaaaaaatcccct

SEQ ID NO: 356622 - DNA, 15 bp, Homo sapiens
ctttaaaaaatcccc

SEQ ID NO: 356623 - DNA, 15 bp, Homo sapiens
tctttaaaaaatccc

SEQ ID NO: 356624 - DNA, 15 bp, Homo sapiens
ttctttaaaaaatcc

SEQ ID NO: 356625 - DNA, 15 bp, Homo sapiens
tttctttaaaaaatc

SEQ ID NO: 356626 - DNA, 15 bp, Homo sapiens
tcctttctttaaaaa

SEQ ID NO: 356627 - DNA, 15 bp, Homo sapiens
ctcctttctttaaaa

SEQ ID NO: 356628 - DNA, 15 bp, Homo sapiens
tctcctttctttaaa

SEQ ID NO: 356629 - DNA, 15 bp, Homo sapiens
ctctcctttctttaa

SEQ ID NO: 356630 - DNA, 15 bp, Homo sapiens
tctctcctttcttta

SEQ ID NO: 356631 - DNA, 15 bp, Homo sapiens
ttctctcctttcttt

SEQ ID NO: 356632 - DNA, 15 bp, Homo sapiens
attctctcctttctt

SEQ ID NO: 356633 - DNA, 15 bp, Homo sapiens
aattctctcctttct

SEQ ID NO: 356634 - DNA, 15 bp, Homo sapiens
caattctctcctttc

SEQ ID NO: 356635 - DNA, 15 bp, Homo sapiens
tcaattctctccttt

SEQ ID NO: 356636 - DNA, 15 bp, Homo sapiens
atcaattctctcctt

SEQ ID NO: 356637 - DNA, 15 bp, Homo sapiens
gatcaattctctcct

SEQ ID NO: 356638 - DNA, 15 bp, Homo sapiens
agatcaattctctcc

SEQ ID NO: 356639 - DNA, 15 bp, Homo sapiens
aagatcaattctctc

SEQ ID NO: 356640 - DNA, 15 bp, Homo sapiens
caagatcaattctct

SEQ ID NO: 356641 - DNA, 15 bp, Homo sapiens
acaagatcaattctc

SEQ ID NO: 356642 - DNA, 15 bp, Homo sapiens
gacaagatcaattct

SEQ ID NO: 356643 - DNA, 15 bp, Homo sapiens
tgacaagatcaattc

SEQ ID NO: 356644 - DNA, 15 bp, Homo sapiens
atgacaagatcaatt

SEQ ID NO: 356645 - DNA, 15 bp, Homo sapiens
tatgacaagatcaat

SEQ ID NO: 356646 - DNA, 15 bp, Homo sapiens
ttatgacaagatcaa

SEQ ID NO: 356647 - DNA, 15 bp, Homo sapiens
attatgacaagatca

SEQ ID NO: 356648 - DNA, 15 bp, Homo sapiens
gattatgacaagatc

SEQ ID NO: 356649 - DNA, 15 bp, Homo sapiens
tgattatgacaagat

SEQ ID NO: 356650 - DNA, 15 bp, Homo sapiens
atgattatgacaaga

SEQ ID NO: 356651 - DNA, 15 bp, Homo sapiens
gatgattatgacaag

SEQ ID NO: 356652 - DNA, 15 bp, Homo sapiens
agatgattatgacaa

SEQ ID NO: 356653 - DNA, 15 bp, Homo sapiens
cagatgattatgaca

SEQ ID NO: 356654 - DNA, 15 bp, Homo sapiens
ccagatgattatgac

SEQ ID NO: 356655 - DNA, 15 bp, Homo sapiens
cccagatgattatga

SEQ ID NO: 356656 - DNA, 15 bp, Homo sapiens
tcccagatgattatg

SEQ ID NO: 356657 - DNA, 15 bp, Homo sapiens
ttcccagatgattat

SEQ ID NO: 356658 - DNA, 15 bp, Homo sapiens
cttcccagatgatta

SEQ ID NO: 356659 - DNA, 15 bp, Homo sapiens
ccttcccagatgatt

SEQ ID NO: 356660 - DNA, 15 bp, Homo sapiens
gccttcccagatgat

SEQ ID NO: 356661 - DNA, 15 bp, Homo sapiens
ggccttcccagatga

SEQ ID NO: 356662 - DNA, 15 bp, Homo sapiens
gggccttcccagatg

SEQ ID NO: 356663 - DNA, 15 bp, Homo sapiens
ggggccttcccagat

SEQ ID NO: 356664 - DNA, 15 bp, Homo sapiens
gggggccttcccaga

SEQ ID NO: 356665 - DNA, 15 bp, Homo sapiens
agggggccttcccag

SEQ ID NO: 356666 - DNA, 15 bp, Homo sapiens
cagggggccttccca

SEQ ID NO: 356667 - DNA, 15 bp, Homo sapiens
ccagggggccttccc

SEQ ID NO: 356668 - DNA, 15 bp, Homo sapiens
tccagggggccttcc

SEQ ID NO: 356669 - DNA, 15 bp, Homo sapiens
ctccagggggccttc

SEQ ID NO: 356670 - DNA, 15 bp, Homo sapiens
cctccagggggcctt

SEQ ID NO: 356671 - DNA, 15 bp, Homo sapiens
tcctccagggggcct

SEQ ID NO: 356672 - DNA, 15 bp, Homo sapiens
ctcctccagggggcc

SEQ ID NO: 356673 - DNA, 15 bp, Homo sapiens
cctcctccagggggc

SEQ ID NO: 356674 - DNA, 15 bp, Homo sapiens
gcctcctccaggggg

SEQ ID NO: 356675 - DNA, 15 bp, Homo sapiens
tgcctcctccagggg

SEQ ID NO: 356676 - DNA, 15 bp, Homo sapiens
ctgcctcctccaggg

SEQ ID NO: 356677 - DNA, 15 bp, Homo sapiens
gctgcctcctccagg

SEQ ID NO: 356678 - DNA, 15 bp, Homo sapiens
aggctgcctcctcca

SEQ ID NO: 356679 - DNA, 15 bp, Homo sapiens
taggctgcctcctcc

SEQ ID NO: 356680 - DNA, 15 bp, Homo sapiens
ctaggctgcctcctc

SEQ ID NO: 356681 - DNA, 15 bp, Homo sapiens
cctaggctgcctcct

SEQ ID NO: 356682 - DNA, 15 bp, Homo sapiens
gcctaggctgcctcc

SEQ ID NO: 356683 - DNA, 15 bp, Homo sapiens
agcctaggctgcctc

SEQ ID NO: 356684 - DNA, 15 bp, Homo sapiens
cagcctaggctgcct

SEQ ID NO: 356685 - DNA, 15 bp, Homo sapiens
acagcctaggctgcc

SEQ ID NO: 356686 - DNA, 15 bp, Homo sapiens
gacagcctaggctgc

SEQ ID NO: 356687 - DNA, 15 bp, Homo sapiens
ggacagcctaggctg

SEQ ID NO: 356688 - DNA, 15 bp, Homo sapiens
gggacagcctaggct

SEQ ID NO: 356689 - DNA, 15 bp, Homo sapiens
agggacagcctaggc

SEQ ID NO: 356690 - DNA, 15 bp, Homo sapiens
aagggacagcctagg

SEQ ID NO: 356691 - DNA, 15 bp, Homo sapiens
gaagggacagcctag

SEQ ID NO: 356692 - DNA, 15 bp, Homo sapiens
tgaagggacagccta

SEQ ID NO: 356693 - DNA, 15 bp, Homo sapiens
ttgaagggacagcct

SEQ ID NO: 356694 - DNA, 15 bp, Homo sapiens
cttgaagggacagcc

SEQ ID NO: 356695 - DNA, 15 bp, Homo sapiens
ccttgaagggacagc

SEQ ID NO: 356696 - DNA, 15 bp, Homo sapiens
cccttgaagggacag

SEQ ID NO: 356697 - DNA, 15 bp, Homo sapiens
acccttgaagggaca

SEQ ID NO: 356698 - DNA, 15 bp, Homo sapiens
cacccttgaagggac

SEQ ID NO: 356699 - DNA, 15 bp, Homo sapiens
ccacccttgaaggga

SEQ ID NO: 356700 - DNA, 15 bp, Homo sapiens
accacccttgaaggg

SEQ ID NO: 356701 - DNA, 15 bp, Homo sapiens
gaccacccttgaagg

SEQ ID NO: 356702 - DNA, 15 bp, Homo sapiens
tgaccacccttgaag

SEQ ID NO: 356703 - DNA, 15 bp, Homo sapiens
ttgaccacccttgaa

SEQ ID NO: 356704 - DNA, 15 bp, Homo sapiens
cttgaccacccttga

SEQ ID NO: 356705 - DNA, 15 bp, Homo sapiens
acttgaccacccttg

SEQ ID NO: 356706 - DNA, 15 bp, Homo sapiens
tacttgaccaccctt

SEQ ID NO: 356707 - DNA, 15 bp, Homo sapiens
ctacttgaccaccct

SEQ ID NO: 356708 - DNA, 15 bp, Homo sapiens
actacttgaccaccc

SEQ ID NO: 356709 - DNA, 15 bp, Homo sapiens
gactacttgaccacc

SEQ ID NO: 356710 - DNA, 15 bp, Homo sapiens
tgactacttgaccac

SEQ ID NO: 356711 - DNA, 15 bp, Homo sapiens
ctgactacttgacca

SEQ ID NO: 356712 - DNA, 15 bp, Homo sapiens
cctgactacttgacc

SEQ ID NO: 356713 - DNA, 15 bp, Homo sapiens
acctgactacttgac

SEQ ID NO: 356714 - DNA, 15 bp, Homo sapiens
cacctgactacttga

SEQ ID NO: 356715 - DNA, 15 bp, Homo sapiens
tcacctgactacttg

SEQ ID NO: 356716 - DNA, 15 bp, Homo sapiens
ttcacctgactactt

SEQ ID NO: 356717 - DNA, 15 bp, Homo sapiens
tttcacctgactact

SEQ ID NO: 356718 - DNA, 15 bp, Homo sapiens
ctttcacctgactac

SEQ ID NO: 356719 - DNA, 15 bp, Homo sapiens
cctttcacctgacta

SEQ ID NO: 356720 - DNA, 15 bp, Homo sapiens
tcctttcacctgact

SEQ ID NO: 356721 - DNA, 15 bp, Homo sapiens
ttcctttcacctgac

SEQ ID NO: 356722 - DNA, 15 bp, Homo sapiens
cttcctttcacctga

SEQ ID NO: 356723 - DNA, 15 bp, Homo sapiens
tcttcctttcacctg

SEQ ID NO: 356724 - DNA, 15 bp, Homo sapiens
gtcttcctttcacct

SEQ ID NO: 356725 - DNA, 15 bp, Homo sapiens
tgtcttcctttcacc

SEQ ID NO: 356726 - DNA, 15 bp, Homo sapiens
atgtcttcctttcac

SEQ ID NO: 356727 - DNA, 15 bp, Homo sapiens
catgtcttcctttca

SEQ ID NO: 356728 - DNA, 15 bp, Homo sapiens
ccatgtcttcctttc

SEQ ID NO: 356729 - DNA, 15 bp, Homo sapiens
accatgtcttccttt

SEQ ID NO: 356730 - DNA, 15 bp, Homo sapiens
caccatgtcttcctt

SEQ ID NO: 356731 - DNA, 15 bp, Homo sapiens
ccaccatgtcttcct

SEQ ID NO: 356732 - DNA, 15 bp, Homo sapiens
cccaccatgtcttcc

SEQ ID NO: 356733 - DNA, 15 bp, Homo sapiens
tcccaccatgtcttc

SEQ ID NO: 356734 - DNA, 15 bp, Homo sapiens
ctcccaccatgtctt

SEQ ID NO: 356735 - DNA, 15 bp, Homo sapiens
tctcccaccatgtct

SEQ ID NO: 356736 - DNA, 15 bp, Homo sapiens
ctctcccaccatgtc

SEQ ID NO: 356737 - DNA, 15 bp, Homo sapiens
gctctcccaccatgt

SEQ ID NO: 356738 - DNA, 15 bp, Homo sapiens
ggctctcccaccatg

SEQ ID NO: 356739 - DNA, 15 bp, Homo sapiens
aggctctcccaccat

SEQ ID NO: 356740 - DNA, 15 bp, Homo sapiens
caggctctcccacca

SEQ ID NO: 356741 - DNA, 15 bp, Homo sapiens
ccaggctctcccacc

SEQ ID NO: 356742 - DNA, 15 bp, Homo sapiens
accaggctctcccac

SEQ ID NO: 356743 - DNA, 15 bp, Homo sapiens
caccaggctctccca

SEQ ID NO: 356744 - DNA, 15 bp, Homo sapiens
tcaccaggctctccc

SEQ ID NO: 356745 - DNA, 15 bp, Homo sapiens
ttcaccaggctctcc

SEQ ID NO: 356746 - DNA, 15 bp, Homo sapiens
cttcaccaggctctc

SEQ ID NO: 356747 - DNA, 15 bp, Homo sapiens
ccttcaccaggctct

SEQ ID NO: 356748 - DNA, 15 bp, Homo sapiens
tccttcaccaggctc

SEQ ID NO: 356749 - DNA, 15 bp, Homo sapiens
ctccttcaccaggct

SEQ ID NO: 356750 - DNA, 15 bp, Homo sapiens
actccttcaccaggc

SEQ ID NO: 356751 - DNA, 15 bp, Homo sapiens
gactccttcaccagg

SEQ ID NO: 356752 - DNA, 15 bp, Homo sapiens
tgactccttcaccag

SEQ ID NO: 356753 - DNA, 15 bp, Homo sapiens
gtgactccttcacca

SEQ ID NO: 356754 - DNA, 15 bp, Homo sapiens
agtgactccttcacc

SEQ ID NO: 356755 - DNA, 15 bp, Homo sapiens
cagtgactccttcac

SEQ ID NO: 356756 - DNA, 15 bp, Homo sapiens
gcagtgactccttca

SEQ ID NO: 356757 - DNA, 15 bp, Homo sapiens
ggcagtgactccttc

SEQ ID NO: 356758 - DNA, 15 bp, Homo sapiens
aggcagtgactcctt

SEQ ID NO: 356759 - DNA, 15 bp, Homo sapiens
gaggcagtgactcct

SEQ ID NO: 356760 - DNA, 15 bp, Homo sapiens
agaggcagtgactcc

SEQ ID NO: 356761 - DNA, 15 bp, Homo sapiens
gagaggcagtgactc

SEQ ID NO: 356762 - DNA, 15 bp, Homo sapiens
agagaggcagtgact

SEQ ID NO: 356763 - DNA, 15 bp, Homo sapiens
tagagaggcagtgac

SEQ ID NO: 356764 - DNA, 15 bp, Homo sapiens
gtagagaggcagtga

SEQ ID NO: 356765 - DNA, 15 bp, Homo sapiens
ggtagagaggcagtg

SEQ ID NO: 356766 - DNA, 15 bp, Homo sapiens
gggtagagaggcagt

SEQ ID NO: 356767 - DNA, 15 bp, Homo sapiens
ggggtagagaggcag

SEQ ID NO: 356768 - DNA, 15 bp, Homo sapiens
cggggtagagaggca

SEQ ID NO: 356769 - DNA, 15 bp, Homo sapiens
gcggggtagagaggc

SEQ ID NO: 356770 - DNA, 15 bp, Homo sapiens
ggcggggtagagagg

SEQ ID NO: 356771 - DNA, 15 bp, Homo sapiens
tggcggggtagagag

SEQ ID NO: 356772 - DNA, 15 bp, Homo sapiens
atggcggggtagaga

SEQ ID NO: 356773 - DNA, 15 bp, Homo sapiens
catggcggggtagag

SEQ ID NO: 356774 - DNA, 15 bp, Homo sapiens
gcatggcggggtaga

SEQ ID NO: 356775 - DNA, 15 bp, Homo sapiens
ggcatggcggggtag

SEQ ID NO: 356776 - DNA, 15 bp, Homo sapiens
aggcatggcggggta

SEQ ID NO: 356777 - DNA, 15 bp, Homo sapiens
gaggcatggcggggt

SEQ ID NO: 356778 - DNA, 15 bp, Homo sapiens
agaggcatggcgggg

SEQ ID NO: 356779 - DNA, 15 bp, Homo sapiens
cagaggcatggcggg

SEQ ID NO: 356780 - DNA, 15 bp, Homo sapiens
gcagaggcatggcgg

SEQ ID NO: 356781 - DNA, 15 bp, Homo sapiens
ggcagaggcatggcg

SEQ ID NO: 356782 - DNA, 15 bp, Homo sapiens
gggcagaggcatggc

SEQ ID NO: 356783 - DNA, 15 bp, Homo sapiens
ggggcagaggcatgg

SEQ ID NO: 356784 - DNA, 15 bp, Homo sapiens
aggggcagaggcatg

SEQ ID NO: 356785 - DNA, 15 bp, Homo sapiens
aaggggcagaggcat

SEQ ID NO: 356786 - DNA, 15 bp, Homo sapiens
gaaggggcagaggca

SEQ ID NO: 356787 - DNA, 15 bp, Homo sapiens
agaaggggcagaggc

SEQ ID NO: 356788 - DNA, 15 bp, Homo sapiens
aagaaggggcagagg

SEQ ID NO: 356789 - DNA, 15 bp, Homo sapiens
gaagaaggggcagag

SEQ ID NO: 356790 - DNA, 15 bp, Homo sapiens
agaagaaggggcaga

SEQ ID NO: 356791 - DNA, 15 bp, Homo sapiens
cagaagaaggggcag

SEQ ID NO: 356792 - DNA, 15 bp, Homo sapiens
acagaagaaggggca

SEQ ID NO: 356793 - DNA, 15 bp, Homo sapiens
gacagaagaaggggc

SEQ ID NO: 356794 - DNA, 15 bp, Homo sapiens
agacagaagaagggg

SEQ ID NO: 356795 - DNA, 15 bp, Homo sapiens
gagacagaagaaggg

SEQ ID NO: 356796 - DNA, 15 bp, Homo sapiens
ggagacagaagaagg

SEQ ID NO: 356797 - DNA, 15 bp, Homo sapiens
gggagacagaagaag

SEQ ID NO: 356798 - DNA, 15 bp, Homo sapiens
tgggagacagaagaa

SEQ ID NO: 356799 - DNA, 15 bp, Homo sapiens
atgggagacagaaga

SEQ ID NO: 356800 - DNA, 15 bp, Homo sapiens
catgggagacagaag

SEQ ID NO: 356801 - DNA, 15 bp, Homo sapiens
acatgggagacagaa

SEQ ID NO: 356802 - DNA, 15 bp, Homo sapiens
cacatgggagacaga

SEQ ID NO: 356803 - DNA, 15 bp, Homo sapiens
acacatgggagacag

SEQ ID NO: 356804 - DNA, 15 bp, Homo sapiens
gacacatgggagaca

SEQ ID NO: 356805 - DNA, 15 bp, Homo sapiens
agacacatgggagac

SEQ ID NO: 356806 - DNA, 15 bp, Homo sapiens
cagacacatgggaga

SEQ ID NO: 356807 - DNA, 15 bp, Homo sapiens
gcagacacatgggag

SEQ ID NO: 356808 - DNA, 15 bp, Homo sapiens
tgcagacacatggga

SEQ ID NO: 356809 - DNA, 15 bp, Homo sapiens
gtgcagacacatggg

SEQ ID NO: 356810 - DNA, 15 bp, Homo sapiens
tgtgcagacacatgg

SEQ ID NO: 356811 - DNA, 15 bp, Homo sapiens
gtgtgcagacacatg

SEQ ID NO: 356812 - DNA, 15 bp, Homo sapiens
cgtgtgcagacacat

SEQ ID NO: 356813 - DNA, 15 bp, Homo sapiens
gcgtgtgcagacaca

SEQ ID NO: 356814 - DNA, 15 bp, Homo sapiens
ggcgtgtgcagacac

SEQ ID NO: 356815 - DNA, 15 bp, Homo sapiens
cggcgtgtgcagaca

SEQ ID NO: 356816 - DNA, 15 bp, Homo sapiens
tcggcgtgtgcagac

SEQ ID NO: 356817 - DNA, 15 bp, Homo sapiens
atcggcgtgtgcaga

SEQ ID NO: 356818 - DNA, 15 bp, Homo sapiens
gatcggcgtgtgcag

SEQ ID NO: 356819 - DNA, 15 bp, Homo sapiens
tgatcggcgtgtgca

SEQ ID NO: 356820 - DNA, 15 bp, Homo sapiens
ttgatcggcgtgtgc

SEQ ID NO: 356821 - DNA, 15 bp, Homo sapiens
attgatcggcgtgtg

SEQ ID NO: 356822 - DNA, 15 bp, Homo sapiens
gattgatcggcgtgt

SEQ ID NO: 356823 - DNA, 15 bp, Homo sapiens
ggattgatcggcgtg

SEQ ID NO: 356824 - DNA, 15 bp, Homo sapiens
gggattgatcggcgt

SEQ ID NO: 356825 - DNA, 15 bp, Homo sapiens
tgggattgatcggcg

SEQ ID NO: 356826 - DNA, 15 bp, Homo sapiens
atgggattgatcggc

SEQ ID NO: 356827 - DNA, 15 bp, Homo sapiens
catgggattgatcgg

SEQ ID NO: 356828 - DNA, 15 bp, Homo sapiens
tcatgggattgatcg

SEQ ID NO: 356829 - DNA, 15 bp, Homo sapiens
gtcatgggattgatc

SEQ ID NO: 356830 - DNA, 15 bp, Homo sapiens
ggtcatgggattgat

SEQ ID NO: 356831 - DNA, 15 bp, Homo sapiens
aggtcatgggattga

SEQ ID NO: 356832 - DNA, 15 bp, Homo sapiens
gaggtcatgggattg

SEQ ID NO: 356833 - DNA, 15 bp, Homo sapiens
ggaggtcatgggatt

SEQ ID NO: 356834 - DNA, 15 bp, Homo sapiens
gggaggtcatgggat

SEQ ID NO: 356835 - DNA, 15 bp, Homo sapiens
tgggaggtcatggga

SEQ ID NO: 356836 - DNA, 15 bp, Homo sapiens
ctgggaggtcatggg

SEQ ID NO: 356837 - DNA, 15 bp, Homo sapiens
gctgggaggtcatgg

SEQ ID NO: 356838 - DNA, 15 bp, Homo sapiens
tgctgggaggtcatg

SEQ ID NO: 356839 - DNA, 15 bp, Homo sapiens
ctgctgggaggtcat

SEQ ID NO: 356840 - DNA, 15 bp, Homo sapiens
tctgctgggaggtca

SEQ ID NO: 356841 - DNA, 15 bp, Homo sapiens
ttctgctgggaggtc

SEQ ID NO: 356842 - DNA, 15 bp, Homo sapiens
tttctgctgggaggt

SEQ ID NO: 356843 - DNA, 15 bp, Homo sapiens
atttctgctgggagg

SEQ ID NO: 356844 - DNA, 15 bp, Homo sapiens
aatttctgctgggag

SEQ ID NO: 356845 - DNA, 15 bp, Homo sapiens
gaatttctgctggga

SEQ ID NO: 356846 - DNA, 15 bp, Homo sapiens
tgaatttctgctggg

SEQ ID NO: 356847 - DNA, 15 bp, Homo sapiens
ttgaatttctgctgg

SEQ ID NO: 356848 - DNA, 15 bp, Homo sapiens
cttgaatttctgctg

SEQ ID NO: 356849 - DNA, 15 bp, Homo sapiens
ccttgaatttctgct

SEQ ID NO: 356850 - DNA, 15 bp, Homo sapiens
cccttgaatttctgc

SEQ ID NO: 356851 - DNA, 15 bp, Homo sapiens
tcccttgaatttctg

SEQ ID NO: 356852 - DNA, 15 bp, Homo sapiens
ttcccttgaatttct

SEQ ID NO: 356853 - DNA, 15 bp, Homo sapiens
tttcccttgaatttc

SEQ ID NO: 356854 - DNA, 15 bp, Homo sapiens
ctttcccttgaattt

SEQ ID NO: 356855 - DNA, 15 bp, Homo sapiens
tctttcccttgaatt

SEQ ID NO: 356856 - DNA, 15 bp, Homo sapiens
ttctttcccttgaat

SEQ ID NO: 356857 - DNA, 15 bp, Homo sapiens
tttctttcccttgaa

SEQ ID NO: 356858 - DNA, 15 bp, Homo sapiens
ttttctttcccttga

SEQ ID NO: 356859 - DNA, 15 bp, Homo sapiens
cttttctttcccttg

SEQ ID NO: 356860 - DNA, 15 bp, Homo sapiens
tcttttctttccctt

SEQ ID NO: 356861 - DNA, 15 bp, Homo sapiens
ctcttttctttccct

SEQ ID NO: 356862 - DNA, 15 bp, Homo sapiens
cctcttttctttccc

SEQ ID NO: 356863 - DNA, 15 bp, Homo sapiens
gcctcttttctttcc

SEQ ID NO: 356864 - DNA, 15 bp, Homo sapiens
ggcctcttttctttc

SEQ ID NO: 356865 - DNA, 15 bp, Homo sapiens
gggcctcttttcttt

SEQ ID NO: 356866 - DNA, 15 bp, Homo sapiens
agggcctcttttctt

SEQ ID NO: 356867 - DNA, 15 bp, Homo sapiens
gagggcctcttttct

SEQ ID NO: 356868 - DNA, 15 bp, Homo sapiens
tgagggcctcttttc

SEQ ID NO: 356869 - DNA, 15 bp, Homo sapiens
gtgagggcctctttt

SEQ ID NO: 356870 - DNA, 15 bp, Homo sapiens
tgtgagggcctcttt

SEQ ID NO: 356871 - DNA, 15 bp, Homo sapiens
ttgtgagggcctctt

SEQ ID NO: 356872 - DNA, 15 bp, Homo sapiens
attgtgagggcctct

SEQ ID NO: 356873 - DNA, 15 bp, Homo sapiens
gattgtgagggcctc

SEQ ID NO: 356874 - DNA, 15 bp, Homo sapiens
tgattgtgagggcct

SEQ ID NO: 356875 - DNA, 15 bp, Homo sapiens
ctgattgtgagggcc

SEQ ID NO: 356876 - DNA, 15 bp, Homo sapiens
tctgattgtgagggc

SEQ ID NO: 356877 - DNA, 15 bp, Homo sapiens
gtctgattgtgaggg

SEQ ID NO: 356878 - DNA, 15 bp, Homo sapiens
cgtctgattgtgagg

SEQ ID NO: 356879 - DNA, 15 bp, Homo sapiens
ccgtctgattgtgag

SEQ ID NO: 356880 - DNA, 15 bp, Homo sapiens
gccgtctgattgtga

SEQ ID NO: 356881 - DNA, 15 bp, Homo sapiens
cgccgtctgattgtg

SEQ ID NO: 356882 - DNA, 15 bp, Homo sapiens
acgccgtctgattgt

SEQ ID NO: 356883 - DNA, 15 bp, Homo sapiens
cacgccgtctgattg

SEQ ID NO: 356884 - DNA, 15 bp, Homo sapiens
tcacgccgtctgatt

SEQ ID NO: 356885 - DNA, 15 bp, Homo sapiens
ttcacgccgtctgat

SEQ ID NO: 356886 - DNA, 15 bp, Homo sapiens
attcacgccgtctga

SEQ ID NO: 356887 - DNA, 15 bp, Homo sapiens
aattcacgccgtctg

SEQ ID NO: 356888 - DNA, 15 bp, Homo sapiens
aaattcacgccgtct

SEQ ID NO: 356889 - DNA, 15 bp, Homo sapiens
gaaattcacgccgtc

SEQ ID NO: 356890 - DNA, 15 bp, Homo sapiens
ggaaattcacgccgt

SEQ ID NO: 356891 - DNA, 15 bp, Homo sapiens
aggaaattcacgccg

SEQ ID NO: 356892 - DNA, 15 bp, Homo sapiens
caggaaattcacgcc

SEQ ID NO: 356893 - DNA, 15 bp, Homo sapiens
acaggaaattcacgc

SEQ ID NO: 356894 - DNA, 15 bp, Homo sapiens
tacaggaaattcacg

SEQ ID NO: 356895 - DNA, 15 bp, Homo sapiens
ttacaggaaattcac

SEQ ID NO: 356896 - DNA, 15 bp, Homo sapiens
attacaggaaattca

SEQ ID NO: 356897 - DNA, 15 bp, Homo sapiens
aattacaggaaattc

SEQ ID NO: 356898 - DNA, 15 bp, Homo sapiens
aaattacaggaaatt

SEQ ID NO: 356899 - DNA, 15 bp, Homo sapiens
taaattacaggaaat

SEQ ID NO: 356900 - DNA, 15 bp, Homo sapiens
ctaaattacaggaaa

SEQ ID NO: 356901 - DNA, 15 bp, Homo sapiens
tctaaattacaggaa

SEQ ID NO: 356902 - DNA, 15 bp, Homo sapiens
ctctaaattacagga

SEQ ID NO: 356903 - DNA, 15 bp, Homo sapiens
cctctaaattacagg

SEQ ID NO: 356904 - DNA, 15 bp, Homo sapiens
tcctctaaattacag

SEQ ID NO: 356905 - DNA, 15 bp, Homo sapiens
ttcctctaaattaca

SEQ ID NO: 356906 - DNA, 15 bp, Homo sapiens
tttcctctaaattac

SEQ ID NO: 356907 - DNA, 15 bp, Homo sapiens
gtttcctctaaatta

SEQ ID NO: 356908 - DNA, 15 bp, Homo sapiens
tgtttcctctaaatt

SEQ ID NO: 356909 - DNA, 15 bp, Homo sapiens
ctgtttcctctaaat

SEQ ID NO: 356910 - DNA, 15 bp, Homo sapiens
actgtttcctctaaa

SEQ ID NO: 356911 - DNA, 15 bp, Homo sapiens
cactgtttcctctaa

SEQ ID NO: 356912 - DNA, 15 bp, Homo sapiens
ccactgtttcctcta

SEQ ID NO: 356913 - DNA, 15 bp, Homo sapiens
cccactgtttcctct

SEQ ID NO: 356914 - DNA, 15 bp, Homo sapiens
ccccactgtttcctc

SEQ ID NO: 356915 - DNA, 15 bp, Homo sapiens
accccactgtttcct

SEQ ID NO: 356916 - DNA, 15 bp, Homo sapiens
aaccccactgtttcc

SEQ ID NO: 356917 - DNA, 15 bp, Homo sapiens
gaaccccactgtttc

SEQ ID NO: 356918 - DNA, 15 bp, Homo sapiens
ggaaccccactgttt

SEQ ID NO: 356919 - DNA, 15 bp, Homo sapiens
aggaaccccactgtt

SEQ ID NO: 356920 - DNA, 15 bp, Homo sapiens
gaggaaccccactgt

SEQ ID NO: 356921 - DNA, 15 bp, Homo sapiens
agaggaaccccactg

SEQ ID NO: 356922 - DNA, 15 bp, Homo sapiens
cagaggaaccccact

SEQ ID NO: 356923 - DNA, 15 bp, Homo sapiens
acagaggaaccccac

SEQ ID NO: 356924 - DNA, 15 bp, Homo sapiens
gacagaggaacccca

SEQ ID NO: 356925 - DNA, 15 bp, Homo sapiens
ggacagaggaacccc

SEQ ID NO: 356926 - DNA, 15 bp, Homo sapiens
gggacagaggaaccc

SEQ ID NO: 356927 - DNA, 15 bp, Homo sapiens
ggggacagaggaacc

SEQ ID NO: 356928 - DNA, 15 bp, Homo sapiens
tggggacagaggaac

SEQ ID NO: 356929 - DNA, 15 bp, Homo sapiens
atggggacagaggaa

SEQ ID NO: 356930 - DNA, 15 bp, Homo sapiens
gatggggacagagga

SEQ ID NO: 356931 - DNA, 15 bp, Homo sapiens
agatggggacagagg

SEQ ID NO: 356932 - DNA, 15 bp, Homo sapiens
cagatggggacagag

SEQ ID NO: 356933 - DNA, 15 bp, Homo sapiens
acagatggggacaga

SEQ ID NO: 356934 - DNA, 15 bp, Homo sapiens
gacagatggggacag

SEQ ID NO: 356935 - DNA, 15 bp, Homo sapiens
agacagatggggaca

SEQ ID NO: 356936 - DNA, 15 bp, Homo sapiens
aagacagatggggac

SEQ ID NO: 356937 - DNA, 15 bp, Homo sapiens
aaagacagatgggga

SEQ ID NO: 356938 - DNA, 15 bp, Homo sapiens
gaaagacagatgggg

SEQ ID NO: 356939 - DNA, 15 bp, Homo sapiens
tgaaagacagatggg

SEQ ID NO: 356940 - DNA, 15 bp, Homo sapiens
atgaaagacagatgg

SEQ ID NO: 356941 - DNA, 15 bp, Homo sapiens
aatgaaagacagatg

SEQ ID NO: 356942 - DNA, 15 bp, Homo sapiens
aaatgaaagacagat

SEQ ID NO: 356943 - DNA, 15 bp, Homo sapiens
caaatgaaagacaga

SEQ ID NO: 356944 - DNA, 15 bp, Homo sapiens
acaaatgaaagacag

SEQ ID NO: 356945 - DNA, 15 bp, Homo sapiens
aacaaatgaaagaca

SEQ ID NO: 356946 - DNA, 15 bp, Homo sapiens
gaacaaatgaaagac

SEQ ID NO: 356947 - DNA, 15 bp, Homo sapiens
agaacaaatgaaaga

SEQ ID NO: 356948 - DNA, 15 bp, Homo sapiens
aagaacaaatgaaag

SEQ ID NO: 356949 - DNA, 15 bp, Homo sapiens
caagaacaaatgaaa

SEQ ID NO: 356950 - DNA, 15 bp, Homo sapiens
gcaagaacaaatgaa

SEQ ID NO: 356951 - DNA, 15 bp, Homo sapiens
ggcaagaacaaatga

SEQ ID NO: 356952 - DNA, 15 bp, Homo sapiens
gggcaagaacaaatg

SEQ ID NO: 356953 - DNA, 15 bp, Homo sapiens
agggcaagaacaaat

SEQ ID NO: 356954 - DNA, 15 bp, Homo sapiens
cagggcaagaacaaa

SEQ ID NO: 356955 - DNA, 15 bp, Homo sapiens
tcagggcaagaacaa

SEQ ID NO: 356956 - DNA, 15 bp, Homo sapiens
ttcagggcaagaaca

SEQ ID NO: 356957 - DNA, 15 bp, Homo sapiens
attcagggcaagaac

SEQ ID NO: 356958 - DNA, 15 bp, Homo sapiens
cattcagggcaagaa

SEQ ID NO: 356959 - DNA, 15 bp, Homo sapiens
ccattcagggcaaga

SEQ ID NO: 356960 - DNA, 15 bp, Homo sapiens
accattcagggcaag

SEQ ID NO: 356961 - DNA, 15 bp, Homo sapiens
aaccattcagggcaa

SEQ ID NO: 356962 - DNA, 15 bp, Homo sapiens
gaaccattcagggca

SEQ ID NO: 356963 - DNA, 15 bp, Homo sapiens
ggaaccattcagggc

SEQ ID NO: 356964 - DNA, 15 bp, Homo sapiens
tggaaccattcaggg

SEQ ID NO: 356965 - DNA, 15 bp, Homo sapiens
ctggaaccattcagg

SEQ ID NO: 356966 - DNA, 15 bp, Homo sapiens
gctggaaccattcag

SEQ ID NO: 356967 - DNA, 15 bp, Homo sapiens
ggctggaaccattca

SEQ ID NO: 356968 - DNA, 15 bp, Homo sapiens
aggctggaaccattc

SEQ ID NO: 356969 - DNA, 15 bp, Homo sapiens
aaggctggaaccatt

SEQ ID NO: 356970 - DNA, 15 bp, Homo sapiens
gaaggctggaaccat

SEQ ID NO: 356971 - DNA, 15 bp, Homo sapiens
agaaggctggaacca

SEQ ID NO: 356972 - DNA, 15 bp, Homo sapiens
gagaaggctggaacc

SEQ ID NO: 356973 - DNA, 15 bp, Homo sapiens
ggagaaggctggaac

SEQ ID NO: 356974 - DNA, 15 bp, Homo sapiens
tggagaaggctggaa

SEQ ID NO: 356975 - DNA, 15 bp, Homo sapiens
ttggagaaggctgga

SEQ ID NO: 356976 - DNA, 15 bp, Homo sapiens
attggagaaggctgg

SEQ ID NO: 356977 - DNA, 15 bp, Homo sapiens
aattggagaaggctg

SEQ ID NO: 356978 - DNA, 15 bp, Homo sapiens
caattggagaaggct

SEQ ID NO: 356979 - DNA, 15 bp, Homo sapiens
tcaattggagaaggc

SEQ ID NO: 356980 - DNA, 15 bp, Homo sapiens
ctcaattggagaagg

SEQ ID NO: 356981 - DNA, 15 bp, Homo sapiens
cctcaattggagaag

SEQ ID NO: 356982 - DNA, 15 bp, Homo sapiens
acctcaattggagaa

SEQ ID NO: 356983 - DNA, 15 bp, Homo sapiens
gacctcaattggaga

SEQ ID NO: 356984 - DNA, 15 bp, Homo sapiens
ggacctcaattggag

SEQ ID NO: 356985 - DNA, 15 bp, Homo sapiens
cggacctcaattgga

SEQ ID NO: 356986 - DNA, 15 bp, Homo sapiens
acggacctcaattgg

SEQ ID NO: 356987 - DNA, 15 bp, Homo sapiens
aacggacctcaattg

SEQ ID NO: 356988 - DNA, 15 bp, Homo sapiens
aaacggacctcaatt

SEQ ID NO: 356989 - DNA, 15 bp, Homo sapiens
taaacggacctcaat

SEQ ID NO: 356990 - DNA, 15 bp, Homo sapiens
ttaaacggacctcaa

SEQ ID NO: 356991 - DNA, 15 bp, Homo sapiens
tttaaacggacctca

SEQ ID NO: 356992 - DNA, 15 bp, Homo sapiens
gtttaaacggacctc

SEQ ID NO: 356993 - DNA, 15 bp, Homo sapiens
cgtttaaacggacct

SEQ ID NO: 356994 - DNA, 15 bp, Homo sapiens
acgtttaaacggacc

SEQ ID NO: 356995 - DNA, 15 bp, Homo sapiens
aacgtttaaacggac

SEQ ID NO: 356996 - DNA, 15 bp, Homo sapiens
aaacgtttaaacgga

SEQ ID NO: 356997 - DNA, 15 bp, Homo sapiens
aaaacgtttaaacgg

SEQ ID NO: 356998 - DNA, 15 bp, Homo sapiens
gaaaacgtttaaacg

SEQ ID NO: 356999 - DNA, 15 bp, Homo sapiens
agaaaacgtttaaac

SEQ ID NO: 357000 - DNA, 15 bp, Homo sapiens
cagaaaacgtttaaa

SEQ ID NO: 357001 - DNA, 15 bp, Homo sapiens
ccagaaaacgtttaa

SEQ ID NO: 357002 - DNA, 15 bp, Homo sapiens
gccagaaaacgttta

SEQ ID NO: 357003 - DNA, 15 bp, Homo sapiens
agccagaaaacgttt

SEQ ID NO: 357004 - DNA, 15 bp, Homo sapiens
aagccagaaaacgtt

SEQ ID NO: 357005 - DNA, 15 bp, Homo sapiens
aaagccagaaaacgt

SEQ ID NO: 357006 - DNA, 15 bp, Homo sapiens
aaaagccagaaaacg

SEQ ID NO: 357007 - DNA, 15 bp, Homo sapiens
gaaaagccagaaaac

SEQ ID NO: 357008 - DNA, 15 bp, Homo sapiens
agaaaagccagaaaa

SEQ ID NO: 357009 - DNA, 15 bp, Homo sapiens
aagaaaagccagaaa

SEQ ID NO: 357010 - DNA, 15 bp, Homo sapiens
caagaaaagccagaa

SEQ ID NO: 357011 - DNA, 15 bp, Homo sapiens
acaagaaaagccaga

SEQ ID NO: 357012 - DNA, 15 bp, Homo sapiens
aacaagaaaagccag

SEQ ID NO: 357013 - DNA, 15 bp, Homo sapiens
aaacaagaaaagcca

SEQ ID NO: 357014 - DNA, 15 bp, Homo sapiens
aaaacaagaaaagcc

SEQ ID NO: 357015 - DNA, 15 bp, Homo sapiens
aaaaacaagaaaagc

SEQ ID NO: 357016 - DNA, 15 bp, Homo sapiens
taaaaacaagaaaag

SEQ ID NO: 357017 - DNA, 15 bp, Homo sapiens
ataaaaacaagaaaa

SEQ ID NO: 357018 - DNA, 15 bp, Homo sapiens
cataaaaacaagaaa

SEQ ID NO: 357019 - DNA, 15 bp, Homo sapiens
tcataaaaacaagaa

SEQ ID NO: 357020 - DNA, 15 bp, Homo sapiens
gtcataaaaacaaga

SEQ ID NO: 357021 - DNA, 15 bp, Homo sapiens
tgtcataaaaacaag

SEQ ID NO: 357022 - DNA, 15 bp, Homo sapiens
atgtcataaaaacaa

SEQ ID NO: 357023 - DNA, 15 bp, Homo sapiens
aatgtcataaaaaca

SEQ ID NO: 357024 - DNA, 15 bp, Homo sapiens
aaatgtcataaaaac

SEQ ID NO: 357025 - DNA, 15 bp, Homo sapiens
caaatgtcataaaaa

SEQ ID NO: 357026 - DNA, 15 bp, Homo sapiens
ccaaatgtcataaaa

SEQ ID NO: 357027 - DNA, 15 bp, Homo sapiens
gccaaatgtcataaa

SEQ ID NO: 357028 - DNA, 15 bp, Homo sapiens
tgccaaatgtcataa

SEQ ID NO: 357029 - DNA, 15 bp, Homo sapiens
ttgccaaatgtcata

SEQ ID NO: 357030 - DNA, 15 bp, Homo sapiens
tttgccaaatgtcat

SEQ ID NO: 357031 - DNA, 15 bp, Homo sapiens
ttttgccaaatgtca

SEQ ID NO: 357032 - DNA, 15 bp, Homo sapiens
gttttgccaaatgtc

SEQ ID NO: 357033 - DNA, 15 bp, Homo sapiens
ggttttgccaaatgt

SEQ ID NO: 357034 - DNA, 15 bp, Homo sapiens
aggttttgccaaatg

SEQ ID NO: 357035 - DNA, 15 bp, Homo sapiens
taggttttgccaaat

SEQ ID NO: 357036 - DNA, 15 bp, Homo sapiens
ttaggttttgccaaa

SEQ ID NO: 357037 - DNA, 15 bp, Homo sapiens
attaggttttgccaa

SEQ ID NO: 357038 - DNA, 15 bp, Homo sapiens
aattaggttttgcca

SEQ ID NO: 357039 - DNA, 15 bp, Homo sapiens
taattaggttttgcc

SEQ ID NO: 357040 - DNA, 15 bp, Homo sapiens
ataattaggttttgc

SEQ ID NO: 357041 - DNA, 15 bp, Homo sapiens
aataattaggttttg

SEQ ID NO: 357042 - DNA, 15 bp, Homo sapiens
aaataattaggtttt

SEQ ID NO: 357043 - DNA, 15 bp, Homo sapiens
caaataattaggttt

SEQ ID NO: 357044 - DNA, 15 bp, Homo sapiens
tcaaataattaggtt

SEQ ID NO: 357045 - DNA, 15 bp, Homo sapiens
gtcaaataattaggt

SEQ ID NO: 357046 - DNA, 15 bp, Homo sapiens
agtcaaataattagg

SEQ ID NO: 357047 - DNA, 15 bp, Homo sapiens
aagtcaaataattag

SEQ ID NO: 357048 - DNA, 15 bp, Homo sapiens
caagtcaaataatta

SEQ ID NO: 357049 - DNA, 15 bp, Homo sapiens
tcaagtcaaataatt

SEQ ID NO: 357050 - DNA, 15 bp, Homo sapiens
ctcaagtcaaataat

SEQ ID NO: 357051 - DNA, 15 bp, Homo sapiens
gctcaagtcaaataa

SEQ ID NO: 357052 - DNA, 15 bp, Homo sapiens
tgctcaagtcaaata

SEQ ID NO: 357053 - DNA, 15 bp, Homo sapiens
gtgctcaagtcaaat

SEQ ID NO: 357054 - DNA, 15 bp, Homo sapiens
agtgctcaagtcaaa

SEQ ID NO: 357055 - DNA, 15 bp, Homo sapiens
aagtgctcaagtcaa

SEQ ID NO: 357056 - DNA, 15 bp, Homo sapiens
gaagtgctcaagtca

SEQ ID NO: 357057 - DNA, 15 bp, Homo sapiens
tgaagtgctcaagtc

SEQ ID NO: 357058 - DNA, 15 bp, Homo sapiens
atgaagtgctcaagt

SEQ ID NO: 357059 - DNA, 15 bp, Homo sapiens
aatgaagtgctcaag

SEQ ID NO: 357060 - DNA, 15 bp, Homo sapiens
caatgaagtgctcaa

SEQ ID NO: 357061 - DNA, 15 bp, Homo sapiens
ccaatgaagtgctca

SEQ ID NO: 357062 - DNA, 15 bp, Homo sapiens
cccaatgaagtgctc

SEQ ID NO: 357063 - DNA, 15 bp, Homo sapiens
ccccaatgaagtgct

SEQ ID NO: 357064 - DNA, 15 bp, Homo sapiens
gccccaatgaagtgc

SEQ ID NO: 357065 - DNA, 15 bp, Homo sapiens
ggccccaatgaagtg

SEQ ID NO: 357066 - DNA, 15 bp, Homo sapiens
tggccccaatgaagt

SEQ ID NO: 357067 - DNA, 15 bp, Homo sapiens
atggccccaatgaag

SEQ ID NO: 357068 - DNA, 15 bp, Homo sapiens
tatggccccaatgaa

SEQ ID NO: 357069 - DNA, 15 bp, Homo sapiens
atatggccccaatga

SEQ ID NO: 357070 - DNA, 15 bp, Homo sapiens
catatggccccaatg

SEQ ID NO: 357071 - DNA, 15 bp, Homo sapiens
tcatatggccccaat

SEQ ID NO: 357072 - DNA, 15 bp, Homo sapiens
ttcatatggccccaa

SEQ ID NO: 357073 - DNA, 15 bp, Homo sapiens
tttcatatggcccca

SEQ ID NO: 357074 - DNA, 15 bp, Homo sapiens
gtttcatatggcccc

SEQ ID NO: 357075 - DNA, 15 bp, Homo sapiens
tgtttcatatggccc

SEQ ID NO: 357076 - DNA, 15 bp, Homo sapiens
ttgtttcatatggcc

SEQ ID NO: 357077 - DNA, 15 bp, Homo sapiens
cttgtttcatatggc

SEQ ID NO: 357078 - DNA, 15 bp, Homo sapiens
ccttgtttcatatgg

SEQ ID NO: 357079 - DNA, 15 bp, Homo sapiens
cccttgtttcatatg

SEQ ID NO: 357080 - DNA, 15 bp, Homo sapiens
tcccttgtttcatat

SEQ ID NO: 357081 - DNA, 15 bp, Homo sapiens
gtcccttgtttcata

SEQ ID NO: 357082 - DNA, 15 bp, Homo sapiens
tgtcccttgtttcat

SEQ ID NO: 357083 - DNA, 15 bp, Homo sapiens
ttgtcccttgtttca

SEQ ID NO: 357084 - DNA, 15 bp, Homo sapiens
tttgtcccttgtttc

SEQ ID NO: 357085 - DNA, 15 bp, Homo sapiens
ctttgtcccttgttt

SEQ ID NO: 357086 - DNA, 15 bp, Homo sapiens
cctttgtcccttgtt

SEQ ID NO: 357087 - DNA, 15 bp, Homo sapiens
acctttgtcccttgt

SEQ ID NO: 357088 - DNA, 15 bp, Homo sapiens
cacctttgtcccttg

SEQ ID NO: 357089 - DNA, 15 bp, Homo sapiens
tcacctttgtccctt

SEQ ID NO: 357090 - DNA, 15 bp, Homo sapiens
gtcacctttgtccct

SEQ ID NO: 357091 - DNA, 15 bp, Homo sapiens
tgtcacctttgtccc

SEQ ID NO: 357092 - DNA, 15 bp, Homo sapiens
ctgtcacctttgtcc

SEQ ID NO: 357093 - DNA, 15 bp, Homo sapiens
actgtcacctttgtc

SEQ ID NO: 357094 - DNA, 15 bp, Homo sapiens
aactgtcacctttgt

SEQ ID NO: 357095 - DNA, 15 bp, Homo sapiens
caactgtcacctttg

SEQ ID NO: 357096 - DNA, 15 bp, Homo sapiens
tcaactgtcaccttt

SEQ ID NO: 357097 - DNA, 15 bp, Homo sapiens
ttcaactgtcacctt

SEQ ID NO: 357098 - DNA, 15 bp, Homo sapiens
attcaactgtcacct

SEQ ID NO: 357099 - DNA, 15 bp, Homo sapiens
cattcaactgtcacc

SEQ ID NO: 357100 - DNA, 15 bp, Homo sapiens
tcattcaactgtcac

SEQ ID NO: 357101 - DNA, 15 bp, Homo sapiens
ctcattcaactgtca

SEQ ID NO: 357102 - DNA, 15 bp, Homo sapiens
tctcattcaactgtc

SEQ ID NO: 357103 - DNA, 15 bp, Homo sapiens
atctcattcaactgt

SEQ ID NO: 357104 - DNA, 15 bp, Homo sapiens
catctcattcaactg

SEQ ID NO: 357105 - DNA, 15 bp, Homo sapiens
gcatctcattcaact

SEQ ID NO: 357106 - DNA, 15 bp, Homo sapiens
tgcatctcattcaac

SEQ ID NO: 357107 - DNA, 15 bp, Homo sapiens
ttgcatctcattcaa

SEQ ID NO: 357108 - DNA, 15 bp, Homo sapiens
cttgcatctcattca

SEQ ID NO: 357109 - DNA, 15 bp, Homo sapiens
ccttgcatctcattc

SEQ ID NO: 357110 - DNA, 15 bp, Homo sapiens
gccttgcatctcatt

SEQ ID NO: 357111 - DNA, 15 bp, Homo sapiens
agccttgcatctcat

SEQ ID NO: 357112 - DNA, 15 bp, Homo sapiens
tagccttgcatctca

SEQ ID NO: 357113 - DNA, 15 bp, Homo sapiens
ctagccttgcatctc

SEQ ID NO: 357114 - DNA, 15 bp, Homo sapiens
cctagccttgcatct

SEQ ID NO: 357115 - DNA, 15 bp, Homo sapiens
ccctagccttgcatc

SEQ ID NO: 357116 - DNA, 15 bp, Homo sapiens
cccctagccttgcat

SEQ ID NO: 357117 - DNA, 15 bp, Homo sapiens
acccctagccttgca

SEQ ID NO: 357118 - DNA, 15 bp, Homo sapiens
gacccctagccttgc

SEQ ID NO: 357119 - DNA, 15 bp, Homo sapiens
tgacccctagccttg

SEQ ID NO: 357120 - DNA, 15 bp, Homo sapiens
ctgacccctagcctt

SEQ ID NO: 357121 - DNA, 15 bp, Homo sapiens
cctgacccctagcct

SEQ ID NO: 357122 - DNA, 15 bp, Homo sapiens
acctgacccctagcc

SEQ ID NO: 357123 - DNA, 15 bp, Homo sapiens
cacctgacccctagc

SEQ ID NO: 357124 - DNA, 15 bp, Homo sapiens
ccacctgacccctag

SEQ ID NO: 357125 - DNA, 15 bp, Homo sapiens
cccacctgaccccta

SEQ ID NO: 357126 - DNA, 15 bp, Homo sapiens
ccccacctgacccct

SEQ ID NO: 357127 - DNA, 15 bp, Homo sapiens
cccccacctgacccc

SEQ ID NO: 357128 - DNA, 15 bp, Homo sapiens
acccccacctgaccc

SEQ ID NO: 357129 - DNA, 15 bp, Homo sapiens
cacccccacctgacc

SEQ ID NO: 357130 - DNA, 15 bp, Homo sapiens
ccacccccacctgac

SEQ ID NO: 357131 - DNA, 15 bp, Homo sapiens
cccacccccacctga

SEQ ID NO: 357132 - DNA, 15 bp, Homo sapiens
tcccacccccacctg

SEQ ID NO: 357133 - DNA, 15 bp, Homo sapiens
ttcccacccccacct

SEQ ID NO: 357134 - DNA, 15 bp, Homo sapiens
attcccacccccacc

SEQ ID NO: 357135 - DNA, 15 bp, Homo sapiens
cattcccacccccac

SEQ ID NO: 357136 - DNA, 15 bp, Homo sapiens
gcattcccaccccca

SEQ ID NO: 357137 - DNA, 15 bp, Homo sapiens
agcattcccaccccc

SEQ ID NO: 357138 - DNA, 15 bp, Homo sapiens
gagcattcccacccc

SEQ ID NO: 357139 - DNA, 15 bp, Homo sapiens
tgagcattcccaccc

SEQ ID NO: 357140 - DNA, 15 bp, Homo sapiens
gtgagcattcccacc

SEQ ID NO: 357141 - DNA, 15 bp, Homo sapiens
ggtgagcattcccac

SEQ ID NO: 357142 - DNA, 15 bp, Homo sapiens
gggtgagcattccca

SEQ ID NO: 357143 - DNA, 15 bp, Homo sapiens
ggggtgagcattccc

SEQ ID NO: 357144 - DNA, 15 bp, Homo sapiens
tggggtgagcattcc

SEQ ID NO: 357145 - DNA, 15 bp, Homo sapiens
atggggtgagcattc

SEQ ID NO: 357146 - DNA, 15 bp, Homo sapiens
aatggggtgagcatt

SEQ ID NO: 357147 - DNA, 15 bp, Homo sapiens
gaatggggtgagcat

SEQ ID NO: 357148 - DNA, 15 bp, Homo sapiens
agaatggggtgagca

SEQ ID NO: 357149 - DNA, 15 bp, Homo sapiens
tagaatggggtgagc

SEQ ID NO: 357150 - DNA, 15 bp, Homo sapiens
ttagaatggggtgag

SEQ ID NO: 357151 - DNA, 15 bp, Homo sapiens
cttagaatggggtga

SEQ ID NO: 357152 - DNA, 15 bp, Homo sapiens
acttagaatggggtg

SEQ ID NO: 357153 - DNA, 15 bp, Homo sapiens
cacttagaatggggt

SEQ ID NO: 357154 - DNA, 15 bp, Homo sapiens
acacttagaatgggg

SEQ ID NO: 357155 - DNA, 15 bp, Homo sapiens
aacacttagaatggg

SEQ ID NO: 357156 - DNA, 15 bp, Homo sapiens
caacacttagaatgg

SEQ ID NO: 357157 - DNA, 15 bp, Homo sapiens
ccaacacttagaatg

SEQ ID NO: 357158 - DNA, 15 bp, Homo sapiens
accaacacttagaat

SEQ ID NO: 357159 - DNA, 15 bp, Homo sapiens
aaccaacacttagaa

SEQ ID NO: 357160 - DNA, 15 bp, Homo sapiens
taaccaacacttaga

SEQ ID NO: 357161 - DNA, 15 bp, Homo sapiens
ctaaccaacacttag

SEQ ID NO: 357162 - DNA, 15 bp, Homo sapiens
gctaaccaacactta

SEQ ID NO: 357163 - DNA, 15 bp, Homo sapiens
cgctaaccaacactt

SEQ ID NO: 357164 - DNA, 15 bp, Homo sapiens
ccgctaaccaacact

SEQ ID NO: 357165 - DNA, 15 bp, Homo sapiens
gccgctaaccaacac

SEQ ID NO: 357166 - DNA, 15 bp, Homo sapiens
agccgctaaccaaca

SEQ ID NO: 357167 - DNA, 15 bp, Homo sapiens
gagccgctaaccaac

SEQ ID NO: 357168 - DNA, 15 bp, Homo sapiens
tgagccgctaaccaa

SEQ ID NO: 357169 - DNA, 15 bp, Homo sapiens
ttgagccgctaacca

SEQ ID NO: 357170 - DNA, 15 bp, Homo sapiens
attgagccgctaacc

SEQ ID NO: 357171 - DNA, 15 bp, Homo sapiens
aattgagccgctaac

SEQ ID NO: 357172 - DNA, 15 bp, Homo sapiens
caattgagccgctaa

SEQ ID NO: 357173 - DNA, 15 bp, Homo sapiens
gcaattgagccgcta

SEQ ID NO: 357174 - DNA, 15 bp, Homo sapiens
agcaattgagccgct

SEQ ID NO: 357175 - DNA, 15 bp, Homo sapiens
aagcaattgagccgc

SEQ ID NO: 357176 - DNA, 15 bp, Homo sapiens
caagcaattgagccg

SEQ ID NO: 357177 - DNA, 15 bp, Homo sapiens
ccaagcaattgagcc

SEQ ID NO: 357178 - DNA, 15 bp, Homo sapiens
cccaagcaattgagc

SEQ ID NO: 357179 - DNA, 15 bp, Homo sapiens
ccccaagcaattgag

SEQ ID NO: 357180 - DNA, 15 bp, Homo sapiens
tccccaagcaattga

SEQ ID NO: 357181 - DNA, 15 bp, Homo sapiens
ttccccaagcaattg

SEQ ID NO: 357182 - DNA, 15 bp, Homo sapiens
cttccccaagcaatt

SEQ ID NO: 357183 - DNA, 15 bp, Homo sapiens
ccttccccaagcaat

SEQ ID NO: 357184 - DNA, 15 bp, Homo sapiens
tccttccccaagcaa

SEQ ID NO: 357185 - DNA, 15 bp, Homo sapiens
ctccttccccaagca

SEQ ID NO: 357186 - DNA, 15 bp, Homo sapiens
tctccttccccaagc

SEQ ID NO: 357187 - DNA, 15 bp, Homo sapiens
ctctccttccccaag

SEQ ID NO: 357188 - DNA, 15 bp, Homo sapiens
tctctccttccccaa

SEQ ID NO: 357189 - DNA, 15 bp, Homo sapiens
ctctctccttcccca

SEQ ID NO: 357190 - DNA, 15 bp, Homo sapiens
tctctctccttcccc

SEQ ID NO: 357191 - DNA, 15 bp, Homo sapiens
ctctctctccttccc

SEQ ID NO: 357192 - DNA, 15 bp, Homo sapiens
actctctctccttcc

SEQ ID NO: 357193 - DNA, 15 bp, Homo sapiens
tactctctctccttc

SEQ ID NO: 357194 - DNA, 15 bp, Homo sapiens
atactctctctcctt

SEQ ID NO: 357195 - DNA, 15 bp, Homo sapiens
catactctctctcct

SEQ ID NO: 357196 - DNA, 15 bp, Homo sapiens
ccatactctctctcc

SEQ ID NO: 357197 - DNA, 15 bp, Homo sapiens
tccatactctctctc

SEQ ID NO: 357198 - DNA, 15 bp, Homo sapiens
gtccatactctctct

SEQ ID NO: 357199 - DNA, 15 bp, Homo sapiens
ggtccatactctctc

SEQ ID NO: 357200 - DNA, 15 bp, Homo sapiens
gggtccatactctct

SEQ ID NO: 357201 - DNA, 15 bp, Homo sapiens
tgggtccatactctc

SEQ ID NO: 357202 - DNA, 15 bp, Homo sapiens
atgggtccatactct

SEQ ID NO: 357203 - DNA, 15 bp, Homo sapiens
catgggtccatactc

SEQ ID NO: 357204 - DNA, 15 bp, Homo sapiens
acatgggtccatact

SEQ ID NO: 357205 - DNA, 15 bp, Homo sapiens
cacatgggtccatac

SEQ ID NO: 357206 - DNA, 15 bp, Homo sapiens
tcacatgggtccata

SEQ ID NO: 357207 - DNA, 15 bp, Homo sapiens
ttcacatgggtccat

SEQ ID NO: 357208 - DNA, 15 bp, Homo sapiens
attcacatgggtcca

SEQ ID NO: 357209 - DNA, 15 bp, Homo sapiens
aattcacatgggtcc

SEQ ID NO: 357210 - DNA, 15 bp, Homo sapiens
taattcacatgggtc

SEQ ID NO: 357211 - DNA, 15 bp, Homo sapiens
gtaattcacatgggt

SEQ ID NO: 357212 - DNA, 15 bp, Homo sapiens
tgtaattcacatggg

SEQ ID NO: 357213 - DNA, 15 bp, Homo sapiens
gtgtaattcacatgg

SEQ ID NO: 357214 - DNA, 15 bp, Homo sapiens
ggtgtaattcacatg

SEQ ID NO: 357215 - DNA, 15 bp, Homo sapiens
tggtgtaattcacat

SEQ ID NO: 357216 - DNA, 15 bp, Homo sapiens
atggtgtaattcaca

SEQ ID NO: 357217 - DNA, 15 bp, Homo sapiens
catggtgtaattcac

SEQ ID NO: 357218 - DNA, 15 bp, Homo sapiens
acatggtgtaattca

SEQ ID NO: 357219 - DNA, 15 bp, Homo sapiens
gacatggtgtaattc

SEQ ID NO: 357220 - DNA, 15 bp, Homo sapiens
ggacatggtgtaatt

SEQ ID NO: 357221 - DNA, 15 bp, Homo sapiens
tggacatggtgtaat

SEQ ID NO: 357222 - DNA, 15 bp, Homo sapiens
ttggacatggtgtaa

SEQ ID NO: 357223 - DNA, 15 bp, Homo sapiens
tttggacatggtgta

SEQ ID NO: 357224 - DNA, 15 bp, Homo sapiens
atttggacatggtgt

SEQ ID NO: 357225 - DNA, 15 bp, Homo sapiens
catttggacatggtg

SEQ ID NO: 357226 - DNA, 15 bp, Homo sapiens
acatttggacatggt

SEQ ID NO: 357227 - DNA, 15 bp, Homo sapiens
cacatttggacatgg

SEQ ID NO: 357228 - DNA, 15 bp, Homo sapiens
ccacatttggacatg

SEQ ID NO: 357229 - DNA, 15 bp, Homo sapiens
gccacatttggacat

SEQ ID NO: 357230 - DNA, 15 bp, Homo sapiens
tgccacatttggaca

SEQ ID NO: 357231 - DNA, 15 bp, Homo sapiens
ctgccacatttggac

SEQ ID NO: 357232 - DNA, 15 bp, Homo sapiens
tctgccacatttgga

SEQ ID NO: 357233 - DNA, 15 bp, Homo sapiens
gtctgccacatttgg

SEQ ID NO: 357234 - DNA, 15 bp, Homo sapiens
agtctgccacatttg

SEQ ID NO: 357235 - DNA, 15 bp, Homo sapiens
cagtctgccacattt

SEQ ID NO: 357236 - DNA, 15 bp, Homo sapiens
ccagtctgccacatt

SEQ ID NO: 357237 - DNA, 15 bp, Homo sapiens
accagtctgccacat

SEQ ID NO: 357238 - DNA, 15 bp, Homo sapiens
caccagtctgccaca

SEQ ID NO: 357239 - DNA, 15 bp, Homo sapiens
acaccagtctgccac

SEQ ID NO: 357240 - DNA, 15 bp, Homo sapiens
cacaccagtctgcca

SEQ ID NO: 357241 - DNA, 15 bp, Homo sapiens
ccacaccagtctgcc

SEQ ID NO: 357242 - DNA, 15 bp, Homo sapiens
tccacaccagtctgc

SEQ ID NO: 357243 - DNA, 15 bp, Homo sapiens
ctccacaccagtctg

SEQ ID NO: 357244 - DNA, 15 bp, Homo sapiens
tctccacaccagtct

SEQ ID NO: 357245 - DNA, 15 bp, Homo sapiens
ttctccacaccagtc

SEQ ID NO: 357246 - DNA, 15 bp, Homo sapiens
cttctccacaccagt

SEQ ID NO: 357247 - DNA, 15 bp, Homo sapiens
ccttctccacaccag

SEQ ID NO: 357248 - DNA, 15 bp, Homo sapiens
tccttctccacacca

SEQ ID NO: 357249 - DNA, 15 bp, Homo sapiens
gtccttctccacacc

SEQ ID NO: 357250 - DNA, 15 bp, Homo sapiens
ggtccttctccacac

SEQ ID NO: 357251 - DNA, 15 bp, Homo sapiens
gggtccttctccaca

SEQ ID NO: 357252 - DNA, 15 bp, Homo sapiens
tgggtccttctccac

SEQ ID NO: 357253 - DNA, 15 bp, Homo sapiens
ctgggtccttctcca

SEQ ID NO: 357254 - DNA, 15 bp, Homo sapiens
gctgggtccttctcc

SEQ ID NO: 357255 - DNA, 15 bp, Homo sapiens
tgctgggtccttctc

SEQ ID NO: 357256 - DNA, 15 bp, Homo sapiens
ctgctgggtccttct

SEQ ID NO: 357257 - DNA, 15 bp, Homo sapiens
tgctgctgggtcctt

SEQ ID NO: 357258 - DNA, 15 bp, Homo sapiens
ctgctgctgggtcct

SEQ ID NO: 357259 - DNA, 15 bp, Homo sapiens
tctgctgctgggtcc

SEQ ID NO: 357260 - DNA, 15 bp, Homo sapiens
ctctgctgctgggtc

SEQ ID NO: 357261 - DNA, 15 bp, Homo sapiens
tctctgctgctgggt

SEQ ID NO: 357262 - DNA, 15 bp, Homo sapiens
ttctctgctgctggg

SEQ ID NO: 357263 - DNA, 15 bp, Homo sapiens
gttctctgctgctgg

SEQ ID NO: 357264 - DNA, 15 bp, Homo sapiens
agttctctgctgctg

SEQ ID NO: 357265 - DNA, 15 bp, Homo sapiens
gagttctctgctgct

SEQ ID NO: 357266 - DNA, 15 bp, Homo sapiens
agagttctctgctgc

SEQ ID NO: 357267 - DNA, 15 bp, Homo sapiens
gagagttctctgctg

SEQ ID NO: 357268 - DNA, 15 bp, Homo sapiens
tgagagttctctgct

SEQ ID NO: 357269 - DNA, 15 bp, Homo sapiens
atgagagttctctgc

SEQ ID NO: 357270 - DNA, 15 bp, Homo sapiens
aatgagagttctctg

SEQ ID NO: 357271 - DNA, 15 bp, Homo sapiens
caatgagagttctct

SEQ ID NO: 357272 - DNA, 15 bp, Homo sapiens
gcaatgagagttctc

SEQ ID NO: 357273 - DNA, 15 bp, Homo sapiens
agcaatgagagttct

SEQ ID NO: 357274 - DNA, 15 bp, Homo sapiens
gagcaatgagagttc

SEQ ID NO: 357275 - DNA, 15 bp, Homo sapiens
agagcaatgagagtt

SEQ ID NO: 357276 - DNA, 15 bp, Homo sapiens
cagagcaatgagagt

SEQ ID NO: 357277 - DNA, 15 bp, Homo sapiens
tcagagcaatgagag

SEQ ID NO: 357278 - DNA, 15 bp, Homo sapiens
gtcagagcaatgaga

SEQ ID NO: 357279 - DNA, 15 bp, Homo sapiens
agtcagagcaatgag

SEQ ID NO: 357280 - DNA, 15 bp, Homo sapiens
gagtcagagcaatga

SEQ ID NO: 357281 - DNA, 15 bp, Homo sapiens
agagtcagagcaatg

SEQ ID NO: 357282 - DNA, 15 bp, Homo sapiens
aagagtcagagcaat

SEQ ID NO: 357283 - DNA, 15 bp, Homo sapiens
gaagagtcagagcaa

SEQ ID NO: 357284 - DNA, 15 bp, Homo sapiens
tgaagagtcagagca

SEQ ID NO: 357285 - DNA, 15 bp, Homo sapiens
ttgaagagtcagagc

SEQ ID NO: 357286 - DNA, 15 bp, Homo sapiens
tttgaagagtcagag

SEQ ID NO: 357287 - DNA, 15 bp, Homo sapiens
ctttgaagagtcaga

SEQ ID NO: 357288 - DNA, 15 bp, Homo sapiens
gctttgaagagtcag

SEQ ID NO: 357289 - DNA, 15 bp, Homo sapiens
ggctttgaagagtca

SEQ ID NO: 357290 - DNA, 15 bp, Homo sapiens
tggctttgaagagtc

SEQ ID NO: 357291 - DNA, 15 bp, Homo sapiens
ttggctttgaagagt

SEQ ID NO: 357292 - DNA, 15 bp, Homo sapiens
cttggctttgaagag

SEQ ID NO: 357293 - DNA, 15 bp, Homo sapiens
ccttggctttgaaga

SEQ ID NO: 357294 - DNA, 15 bp, Homo sapiens
gccttggctttgaag

SEQ ID NO: 357295 - DNA, 15 bp, Homo sapiens
tgccttggctttgaa

SEQ ID NO: 357296 - DNA, 15 bp, Homo sapiens
ttgccttggctttga

SEQ ID NO: 357297 - DNA, 15 bp, Homo sapiens
attgccttggctttg

SEQ ID NO: 357298 - DNA, 15 bp, Homo sapiens
tattgccttggcttt

SEQ ID NO: 357299 - DNA, 15 bp, Homo sapiens
ttattgccttggctt

SEQ ID NO: 357300 - DNA, 15 bp, Homo sapiens
attattgccttggct

SEQ ID NO: 357301 - DNA, 15 bp, Homo sapiens
gattattgccttggc

SEQ ID NO: 357302 - DNA, 15 bp, Homo sapiens
tgattattgccttgg

SEQ ID NO: 357303 - DNA, 15 bp, Homo sapiens
atgattattgccttg

SEQ ID NO: 357304 - DNA, 15 bp, Homo sapiens
catgattattgcctt

SEQ ID NO: 357305 - DNA, 15 bp, Homo sapiens
ccatgattattgcct

SEQ ID NO: 357306 - DNA, 15 bp, Homo sapiens
cccatgattattgcc

SEQ ID NO: 357307 - DNA, 15 bp, Homo sapiens
acccatgattattgc

SEQ ID NO: 357308 - DNA, 15 bp, Homo sapiens
tacccatgattattg

SEQ ID NO: 357309 - DNA, 15 bp, Homo sapiens
ctacccatgattatt

SEQ ID NO: 357310 - DNA, 15 bp, Homo sapiens
gctacccatgattat

SEQ ID NO: 357311 - DNA, 15 bp, Homo sapiens
tgctacccatgatta

SEQ ID NO: 357312 - DNA, 15 bp, Homo sapiens
atgctacccatgatt

SEQ ID NO: 357313 - DNA, 15 bp, Homo sapiens
aatgctacccatgat

SEQ ID NO: 357314 - DNA, 15 bp, Homo sapiens
aaatgctacccatga

SEQ ID NO: 357315 - DNA, 15 bp, Homo sapiens
taaatgctacccatg

SEQ ID NO: 357316 - DNA, 15 bp, Homo sapiens
ctaaatgctacccat

SEQ ID NO: 357317 - DNA, 15 bp, Homo sapiens
tctaaatgctaccca

SEQ ID NO: 357318 - DNA, 15 bp, Homo sapiens
ttctaaatgctaccc

SEQ ID NO: 357319 - DNA, 15 bp, Homo sapiens
tttctaaatgctacc

SEQ ID NO: 357320 - DNA, 15 bp, Homo sapiens
ctttctaaatgctac

SEQ ID NO: 357321 - DNA, 15 bp, Homo sapiens
tctttctaaatgcta

SEQ ID NO: 357322 - DNA, 15 bp, Homo sapiens
ctctttctaaatgct

SEQ ID NO: 357323 - DNA, 15 bp, Homo sapiens
gctctttctaaatgc

SEQ ID NO: 357324 - DNA, 15 bp, Homo sapiens
agctctttctaaatg

SEQ ID NO: 357325 - DNA, 15 bp, Homo sapiens
gagctctttctaaat

SEQ ID NO: 357326 - DNA, 15 bp, Homo sapiens
tgagctctttctaaa

SEQ ID NO: 357327 - DNA, 15 bp, Homo sapiens
gtgagctctttctaa

SEQ ID NO: 357328 - DNA, 15 bp, Homo sapiens
ggtgagctctttcta

SEQ ID NO: 357329 - DNA, 15 bp, Homo sapiens
tggtgagctctttct

SEQ ID NO: 357330 - DNA, 15 bp, Homo sapiens
ctggtgagctctttc

SEQ ID NO: 357331 - DNA, 15 bp, Homo sapiens
cctggtgagctcttt

SEQ ID NO: 357332 - DNA, 15 bp, Homo sapiens
tcctggtgagctctt

SEQ ID NO: 357333 - DNA, 15 bp, Homo sapiens
ttcctggtgagctct

SEQ ID NO: 357334 - DNA, 15 bp, Homo sapiens
attcctggtgagctc

SEQ ID NO: 357335 - DNA, 15 bp, Homo sapiens
aattcctggtgagct

SEQ ID NO: 357336 - DNA, 15 bp, Homo sapiens
gaattcctggtgagc

SEQ ID NO: 357337 - DNA, 15 bp, Homo sapiens
agaattcctggtgag

SEQ ID NO: 357338 - DNA, 15 bp, Homo sapiens
aagaattcctggtga

SEQ ID NO: 357339 - DNA, 15 bp, Homo sapiens
aaagaattcctggtg

SEQ ID NO: 357340 - DNA, 15 bp, Homo sapiens
aaaagaattcctggt

SEQ ID NO: 357341 - DNA, 15 bp, Homo sapiens
taaaagaattcctgg

SEQ ID NO: 357342 - DNA, 15 bp, Homo sapiens
ttaaaagaattcctg

SEQ ID NO: 357343 - DNA, 15 bp, Homo sapiens
cttaaaagaattcct

SEQ ID NO: 357344 - DNA, 15 bp, Homo sapiens
acttaaaagaattcc

SEQ ID NO: 357345 - DNA, 15 bp, Homo sapiens
cacttaaaagaattc

SEQ ID NO: 357346 - DNA, 15 bp, Homo sapiens
gcacttaaaagaatt

SEQ ID NO: 357347 - DNA, 15 bp, Homo sapiens
agcacttaaaagaat

SEQ ID NO: 357348 - DNA, 15 bp, Homo sapiens
aagcacttaaaagaa

SEQ ID NO: 357349 - DNA, 15 bp, Homo sapiens
aaagcacttaaaaga

SEQ ID NO: 357350 - DNA, 15 bp, Homo sapiens
aaaagcacttaaaag

SEQ ID NO: 357351 - DNA, 15 bp, Homo sapiens
gaaaagcacttaaaa

SEQ ID NO: 357352 - DNA, 15 bp, Homo sapiens
tgaaaagcacttaaa

SEQ ID NO: 357353 - DNA, 15 bp, Homo sapiens
gtgaaaagcacttaa

SEQ ID NO: 357354 - DNA, 15 bp, Homo sapiens
tgtgaaaagcactta

SEQ ID NO: 357355 - DNA, 15 bp, Homo sapiens
atgtgaaaagcactt

SEQ ID NO: 357356 - DNA, 15 bp, Homo sapiens
aatgtgaaaagcact

SEQ ID NO: 357357 - DNA, 15 bp, Homo sapiens
aaatgtgaaaagcac

SEQ ID NO: 357358 - DNA, 15 bp, Homo sapiens
aaaatgtgaaaagca

SEQ ID NO: 357359 - DNA, 15 bp, Homo sapiens
gaaaatgtgaaaagc

SEQ ID NO: 357360 - DNA, 15 bp, Homo sapiens
tgaaaatgtgaaaag

SEQ ID NO: 357361 - DNA, 15 bp, Homo sapiens
ctgaaaatgtgaaaa

SEQ ID NO: 357362 - DNA, 15 bp, Homo sapiens
actgaaaatgtgaaa

SEQ ID NO: 357363 - DNA, 15 bp, Homo sapiens
gactgaaaatgtgaa

SEQ ID NO: 357364 - DNA, 15 bp, Homo sapiens
tgactgaaaatgtga

SEQ ID NO: 357365 - DNA, 15 bp, Homo sapiens
ttgactgaaaatgtg

SEQ ID NO: 357366 - DNA, 15 bp, Homo sapiens
attgactgaaaatgt

SEQ ID NO: 357367 - DNA, 15 bp, Homo sapiens
aattgactgaaaatg

SEQ ID NO: 357368 - DNA, 15 bp, Homo sapiens
gaattgactgaaaat

SEQ ID NO: 357369 - DNA, 15 bp, Homo sapiens
agaattgactgaaaa

SEQ ID NO: 357370 - DNA, 15 bp, Homo sapiens
gagaattgactgaaa

SEQ ID NO: 357371 - DNA, 15 bp, Homo sapiens
tgagaattgactgaa

SEQ ID NO: 357372 - DNA, 15 bp, Homo sapiens
gtgagaattgactga

SEQ ID NO: 357373 - DNA, 15 bp, Homo sapiens
tgtgagaattgactg

SEQ ID NO: 357374 - DNA, 15 bp, Homo sapiens
ttgtgagaattgact

SEQ ID NO: 357375 - DNA, 15 bp, Homo sapiens
gttgtgagaattgac

SEQ ID NO: 357376 - DNA, 15 bp, Homo sapiens
tgttgtgagaattga

SEQ ID NO: 357377 - DNA, 15 bp, Homo sapiens
ttgttgtgagaattg

SEQ ID NO: 357378 - DNA, 15 bp, Homo sapiens
gttgttgtgagaatt

SEQ ID NO: 357379 - DNA, 15 bp, Homo sapiens
ggttgttgtgagaat

SEQ ID NO: 357380 - DNA, 15 bp, Homo sapiens
aggttgttgtgagaa

SEQ ID NO: 357381 - DNA, 15 bp, Homo sapiens
taggttgttgtgaga

SEQ ID NO: 357382 - DNA, 15 bp, Homo sapiens
ataggttgttgtgag

SEQ ID NO: 357383 - DNA, 15 bp, Homo sapiens
aataggttgttgtga

SEQ ID NO: 357384 - DNA, 15 bp, Homo sapiens
taataggttgttgtg

SEQ ID NO: 357385 - DNA, 15 bp, Homo sapiens
ctaataggttgttgt

SEQ ID NO: 357386 - DNA, 15 bp, Homo sapiens
tctaataggttgttg

SEQ ID NO: 357387 - DNA, 15 bp, Homo sapiens
atctaataggttgtt

SEQ ID NO: 357388 - DNA, 15 bp, Homo sapiens
tatctaataggttgt

SEQ ID NO: 357389 - DNA, 15 bp, Homo sapiens
ctatctaataggttg

SEQ ID NO: 357390 - DNA, 15 bp, Homo sapiens
cctatctaataggtt

SEQ ID NO: 357391 - DNA, 15 bp, Homo sapiens
acctatctaataggt

SEQ ID NO: 357392 - DNA, 15 bp, Homo sapiens
tacctatctaatagg

SEQ ID NO: 357393 - DNA, 15 bp, Homo sapiens
gtacctatctaatag

SEQ ID NO: 357394 - DNA, 15 bp, Homo sapiens
agtacctatctaata

SEQ ID NO: 357395 - DNA, 15 bp, Homo sapiens
gagtacctatctaat

SEQ ID NO: 357396 - DNA, 15 bp, Homo sapiens
agagtacctatctaa

SEQ ID NO: 357397 - DNA, 15 bp, Homo sapiens
tagagtacctatcta

SEQ ID NO: 357398 - DNA, 15 bp, Homo sapiens
ttagagtacctatct

SEQ ID NO: 357399 - DNA, 15 bp, Homo sapiens
attagagtacctatc

SEQ ID NO: 357400 - DNA, 15 bp, Homo sapiens
aattagagtacctat

SEQ ID NO: 357401 - DNA, 15 bp, Homo sapiens
gaattagagtaccta

SEQ ID NO: 357402 - DNA, 15 bp, Homo sapiens
agaattagagtacct

SEQ ID NO: 357403 - DNA, 15 bp, Homo sapiens
gagaattagagtacc

SEQ ID NO: 357404 - DNA, 15 bp, Homo sapiens
tgagaattagagtac

SEQ ID NO: 357405 - DNA, 15 bp, Homo sapiens
atgagaattagagta

SEQ ID NO: 357406 - DNA, 15 bp, Homo sapiens
aatgagaattagagt

SEQ ID NO: 357407 - DNA, 15 bp, Homo sapiens
aaatgagaattagag

SEQ ID NO: 357408 - DNA, 15 bp, Homo sapiens
aaaatgagaattaga

SEQ ID NO: 357409 - DNA, 15 bp, Homo sapiens
taaaatgagaattag

SEQ ID NO: 357410 - DNA, 15 bp, Homo sapiens
ataaaatgagaatta

SEQ ID NO: 357411 - DNA, 15 bp, Homo sapiens
aataaaatgagaatt

SEQ ID NO: 357412 - DNA, 15 bp, Homo sapiens
caataaaatgagaat

SEQ ID NO: 357413 - DNA, 15 bp, Homo sapiens
ccaataaaatgagaa

SEQ ID NO: 357414 - DNA, 15 bp, Homo sapiens
accaataaaatgaga

SEQ ID NO: 357415 - DNA, 15 bp, Homo sapiens
caccaataaaatgag

SEQ ID NO: 357416 - DNA, 15 bp, Homo sapiens
tcaccaataaaatga

SEQ ID NO: 357417 - DNA, 15 bp, Homo sapiens
ctcaccaataaaatg

SEQ ID NO: 357418 - DNA, 15 bp, Homo sapiens
tctcaccaataaaat

SEQ ID NO: 357419 - DNA, 15 bp, Homo sapiens
ttctcaccaataaaa

SEQ ID NO: 357420 - DNA, 15 bp, Homo sapiens
tttctcaccaataaa

SEQ ID NO: 357421 - DNA, 15 bp, Homo sapiens
ttttctcaccaataa

SEQ ID NO: 357422 - DNA, 15 bp, Homo sapiens
gttttctcaccaata

SEQ ID NO: 357423 - DNA, 15 bp, Homo sapiens
agttttctcaccaat

SEQ ID NO: 357424 - DNA, 15 bp, Homo sapiens
cagttttctcaccaa

SEQ ID NO: 357425 - DNA, 15 bp, Homo sapiens
tcagttttctcacca

SEQ ID NO: 357426 - DNA, 15 bp, Homo sapiens
ttcagttttctcacc

SEQ ID NO: 357427 - DNA, 15 bp, Homo sapiens
cttcagttttctcac

SEQ ID NO: 357428 - DNA, 15 bp, Homo sapiens
acttcagttttctca

SEQ ID NO: 357429 - DNA, 15 bp, Homo sapiens
aacttcagttttctc

SEQ ID NO: 357430 - DNA, 15 bp, Homo sapiens
taacttcagttttct

SEQ ID NO: 357431 - DNA, 15 bp, Homo sapiens
ctaacttcagttttc

SEQ ID NO: 357432 - DNA, 15 bp, Homo sapiens
tctaacttcagtttt

SEQ ID NO: 357433 - DNA, 15 bp, Homo sapiens
atctaacttcagttt

SEQ ID NO: 357434 - DNA, 15 bp, Homo sapiens
tatctaacttcagtt

SEQ ID NO: 357435 - DNA, 15 bp, Homo sapiens
ttatctaacttcagt

SEQ ID NO: 357436 - DNA, 15 bp, Homo sapiens
attatctaacttcag

SEQ ID NO: 357437 - DNA, 15 bp, Homo sapiens
aattatctaacttca

SEQ ID NO: 357438 - DNA, 15 bp, Homo sapiens
aaattatctaacttc

SEQ ID NO: 357439 - DNA, 15 bp, Homo sapiens
caaattatctaactt

SEQ ID NO: 357440 - DNA, 15 bp, Homo sapiens
gcaaattatctaact

SEQ ID NO: 357441 - DNA, 15 bp, Homo sapiens
ggcaaattatctaac

SEQ ID NO: 357442 - DNA, 15 bp, Homo sapiens
tggcaaattatctaa

SEQ ID NO: 357443 - DNA, 15 bp, Homo sapiens
ttggcaaattatcta

SEQ ID NO: 357444 - DNA, 15 bp, Homo sapiens
tttggcaaattatct

SEQ ID NO: 357445 - DNA, 15 bp, Homo sapiens
atttggcaaattatc

SEQ ID NO: 357446 - DNA, 15 bp, Homo sapiens
tatttggcaaattat

SEQ ID NO: 357447 - DNA, 15 bp, Homo sapiens
gtatttggcaaatta

SEQ ID NO: 357448 - DNA, 15 bp, Homo sapiens
ggtatttggcaaatt

SEQ ID NO: 357449 - DNA, 15 bp, Homo sapiens
aggtatttggcaaat

SEQ ID NO: 357450 - DNA, 15 bp, Homo sapiens
taggtatttggcaaa

SEQ ID NO: 357451 - DNA, 15 bp, Homo sapiens
ctaggtatttggcaa

SEQ ID NO: 357452 - DNA, 15 bp, Homo sapiens
cctaggtatttggca

SEQ ID NO: 357453 - DNA, 15 bp, Homo sapiens
acctaggtatttggc

SEQ ID NO: 357454 - DNA, 15 bp, Homo sapiens
aacctaggtatttgg

SEQ ID NO: 357455 - DNA, 15 bp, Homo sapiens
gaacctaggtatttg

SEQ ID NO: 357456 - DNA, 15 bp, Homo sapiens
tgaacctaggtattt

SEQ ID NO: 357457 - DNA, 15 bp, Homo sapiens
ctgaacctaggtatt

SEQ ID NO: 357458 - DNA, 15 bp, Homo sapiens
tctgaacctaggtat

SEQ ID NO: 357459 - DNA, 15 bp, Homo sapiens
gtctgaacctaggta

SEQ ID NO: 357460 - DNA, 15 bp, Homo sapiens
ggtctgaacctaggt

SEQ ID NO: 357461 - DNA, 15 bp, Homo sapiens
gggtctgaacctagg

SEQ ID NO: 357462 - DNA, 15 bp, Homo sapiens
tgggtctgaacctag

SEQ ID NO: 357463 - DNA, 15 bp, Homo sapiens
ttgggtctgaaccta

SEQ ID NO: 357464 - DNA, 15 bp, Homo sapiens
gttgggtctgaacct

SEQ ID NO: 357465 - DNA, 15 bp, Homo sapiens
tgttgggtctgaacc

SEQ ID NO: 357466 - DNA, 15 bp, Homo sapiens
ttgttgggtctgaac

SEQ ID NO: 357467 - DNA, 15 bp, Homo sapiens
attgttgggtctgaa

SEQ ID NO: 357468 - DNA, 15 bp, Homo sapiens
cattgttgggtctga

SEQ ID NO: 357469 - DNA, 15 bp, Homo sapiens
acattgttgggtctg

SEQ ID NO: 357470 - DNA, 15 bp, Homo sapiens
cacattgttgggtct

SEQ ID NO: 357471 - DNA, 15 bp, Homo sapiens
ccacattgttgggtc

SEQ ID NO: 357472 - DNA, 15 bp, Homo sapiens
gccacattgttgggt

SEQ ID NO: 357473 - DNA, 15 bp, Homo sapiens
agccacattgttggg

SEQ ID NO: 357474 - DNA, 15 bp, Homo sapiens
aagccacattgttgg

SEQ ID NO: 357475 - DNA, 15 bp, Homo sapiens
aaagccacattgttg

SEQ ID NO: 357476 - DNA, 15 bp, Homo sapiens
taaagccacattgtt

SEQ ID NO: 357477 - DNA, 15 bp, Homo sapiens
ttaaagccacattgt

SEQ ID NO: 357478 - DNA, 15 bp, Homo sapiens
cttaaagccacattg

SEQ ID NO: 357479 - DNA, 15 bp, Homo sapiens
tcttaaagccacatt

SEQ ID NO: 357480 - DNA, 15 bp, Homo sapiens
gtcttaaagccacat

SEQ ID NO: 357481 - DNA, 15 bp, Homo sapiens
ggtcttaaagccaca

SEQ ID NO: 357482 - DNA, 15 bp, Homo sapiens
aggtcttaaagccac

SEQ ID NO: 357483 - DNA, 15 bp, Homo sapiens
caggtcttaaagcca

SEQ ID NO: 357484 - DNA, 15 bp, Homo sapiens
acaggtcttaaagcc

SEQ ID NO: 357485 - DNA, 15 bp, Homo sapiens
cacaggtcttaaagc

SEQ ID NO: 357486 - DNA, 15 bp, Homo sapiens
acacaggtcttaaag

SEQ ID NO: 357487 - DNA, 15 bp, Homo sapiens
cacacaggtcttaaa

SEQ ID NO: 357488 - DNA, 15 bp, Homo sapiens
ccacacaggtcttaa

SEQ ID NO: 357489 - DNA, 15 bp, Homo sapiens
accacacaggtctta

SEQ ID NO: 357490 - DNA, 15 bp, Homo sapiens
aaccacacaggtctt

SEQ ID NO: 357491 - DNA, 15 bp, Homo sapiens
taaccacacaggtct

SEQ ID NO: 357492 - DNA, 15 bp, Homo sapiens
ttaaccacacaggtc

SEQ ID NO: 357493 - DNA, 15 bp, Homo sapiens
gttaaccacacaggt

SEQ ID NO: 357494 - DNA, 15 bp, Homo sapiens
agttaaccacacagg

SEQ ID NO: 357495 - DNA, 15 bp, Homo sapiens
gagttaaccacacag

SEQ ID NO: 357496 - DNA, 15 bp, Homo sapiens
agagttaaccacaca

SEQ ID NO: 357497 - DNA, 15 bp, Homo sapiens
aagagttaaccacac

SEQ ID NO: 357498 - DNA, 15 bp, Homo sapiens
taagagttaaccaca

SEQ ID NO: 357499 - DNA, 15 bp, Homo sapiens
ttaagagttaaccac

SEQ ID NO: 357500 - DNA, 15 bp, Homo sapiens
gttaagagttaacca

SEQ ID NO: 357501 - DNA, 15 bp, Homo sapiens
ggttaagagttaacc

SEQ ID NO: 357502 - DNA, 15 bp, Homo sapiens
aggttaagagttaac

SEQ ID NO: 357503 - DNA, 15 bp, Homo sapiens
gaggttaagagttaa

SEQ ID NO: 357504 - DNA, 15 bp, Homo sapiens
agaggttaagagtta

SEQ ID NO: 357505 - DNA, 15 bp, Homo sapiens
gagaggttaagagtt

SEQ ID NO: 357506 - DNA, 15 bp, Homo sapiens
agagaggttaagagt

SEQ ID NO: 357507 - DNA, 15 bp, Homo sapiens
tagagaggttaagag

SEQ ID NO: 357508 - DNA, 15 bp, Homo sapiens
gtagagaggttaaga

SEQ ID NO: 357509 - DNA, 15 bp, Homo sapiens
ggtagagaggttaag

SEQ ID NO: 357510 - DNA, 15 bp, Homo sapiens
gggtagagaggttaa

SEQ ID NO: 357511 - DNA, 15 bp, Homo sapiens
tgggtagagaggtta

SEQ ID NO: 357512 - DNA, 15 bp, Homo sapiens
gtgggtagagaggtt

SEQ ID NO: 357513 - DNA, 15 bp, Homo sapiens
agtgggtagagaggt

SEQ ID NO: 357514 - DNA, 15 bp, Homo sapiens
gagtgggtagagagg

SEQ ID NO: 357515 - DNA, 15 bp, Homo sapiens
tgagtgggtagagag

SEQ ID NO: 357516 - DNA, 15 bp, Homo sapiens
ttgagtgggtagaga

SEQ ID NO: 357517 - DNA, 15 bp, Homo sapiens
attgagtgggtagag

SEQ ID NO: 357518 - DNA, 15 bp, Homo sapiens
cattgagtgggtaga

SEQ ID NO: 357519 - DNA, 15 bp, Homo sapiens
acattgagtgggtag

SEQ ID NO: 357520 - DNA, 15 bp, Homo sapiens
cacattgagtgggta

SEQ ID NO: 357521 - DNA, 15 bp, Homo sapiens
tcacattgagtgggt

SEQ ID NO: 357522 - DNA, 15 bp, Homo sapiens
ctcacattgagtggg

SEQ ID NO: 357523 - DNA, 15 bp, Homo sapiens
actcacattgagtgg

SEQ ID NO: 357524 - DNA, 15 bp, Homo sapiens
tactcacattgagtg

SEQ ID NO: 357525 - DNA, 15 bp, Homo sapiens
ctactcacattgagt

SEQ ID NO: 357526 - DNA, 15 bp, Homo sapiens
cctactcacattgag

SEQ ID NO: 357527 - DNA, 15 bp, Homo sapiens
gcctactcacattga

SEQ ID NO: 357528 - DNA, 15 bp, Homo sapiens
tgcctactcacattg

SEQ ID NO: 357529 - DNA, 15 bp, Homo sapiens
atgcctactcacatt

SEQ ID NO: 357530 - DNA, 15 bp, Homo sapiens
aatgcctactcacat

SEQ ID NO: 357531 - DNA, 15 bp, Homo sapiens
aaatgcctactcaca

SEQ ID NO: 357532 - DNA, 15 bp, Homo sapiens
caaatgcctactcac

SEQ ID NO: 357533 - DNA, 15 bp, Homo sapiens
acaaatgcctactca

SEQ ID NO: 357534 - DNA, 15 bp, Homo sapiens
cacaaatgcctactc

SEQ ID NO: 357535 - DNA, 15 bp, Homo sapiens
ccacaaatgcctact

SEQ ID NO: 357536 - DNA, 15 bp, Homo sapiens
tccacaaatgcctac

SEQ ID NO: 357537 - DNA, 15 bp, Homo sapiens
ctccacaaatgccta

SEQ ID NO: 357538 - DNA, 15 bp, Homo sapiens
cctccacaaatgcct

SEQ ID NO: 357539 - DNA, 15 bp, Homo sapiens
ccctccacaaatgcc

SEQ ID NO: 357540 - DNA, 15 bp, Homo sapiens
tccctccacaaatgc

SEQ ID NO: 357541 - DNA, 15 bp, Homo sapiens
atccctccacaaatg

SEQ ID NO: 357542 - DNA, 15 bp, Homo sapiens
tatccctccacaaat

SEQ ID NO: 357543 - DNA, 15 bp, Homo sapiens
atatccctccacaaa

SEQ ID NO: 357544 - DNA, 15 bp, Homo sapiens
gatatccctccacaa

SEQ ID NO: 357545 - DNA, 15 bp, Homo sapiens
ggatatccctccaca

SEQ ID NO: 357546 - DNA, 15 bp, Homo sapiens
gggatatccctccac

SEQ ID NO: 357547 - DNA, 15 bp, Homo sapiens
tgggatatccctcca

SEQ ID NO: 357548 - DNA, 15 bp, Homo sapiens
atgggatatccctcc

SEQ ID NO: 357549 - DNA, 15 bp, Homo sapiens
catgggatatccctc

SEQ ID NO: 357550 - DNA, 15 bp, Homo sapiens
gcatgggatatccct

SEQ ID NO: 357551 - DNA, 15 bp, Homo sapiens
ggcatgggatatccc

SEQ ID NO: 357552 - DNA, 15 bp, Homo sapiens
aggcatgggatatcc

SEQ ID NO: 357553 - DNA, 15 bp, Homo sapiens
aaggcatgggatatc

SEQ ID NO: 357554 - DNA, 15 bp, Homo sapiens
taaggcatgggatat

SEQ ID NO: 357555 - DNA, 15 bp, Homo sapiens
ttaaggcatgggata

SEQ ID NO: 357556 - DNA, 15 bp, Homo sapiens
tttaaggcatgggat

SEQ ID NO: 357557 - DNA, 15 bp, Homo sapiens
ttttaaggcatggga

SEQ ID NO: 357558 - DNA, 15 bp, Homo sapiens
attttaaggcatggg

SEQ ID NO: 357559 - DNA, 15 bp, Homo sapiens
gattttaaggcatgg

SEQ ID NO: 357560 - DNA, 15 bp, Homo sapiens
agattttaaggcatg

SEQ ID NO: 357561 - DNA, 15 bp, Homo sapiens
aagattttaaggcat

SEQ ID NO: 357562 - DNA, 15 bp, Homo sapiens
aaagattttaaggca

SEQ ID NO: 357563 - DNA, 15 bp, Homo sapiens
taaagattttaaggc

SEQ ID NO: 357564 - DNA, 15 bp, Homo sapiens
ataaagattttaagg

SEQ ID NO: 357565 - DNA, 15 bp, Homo sapiens
aataaagattttaag

SEQ ID NO: 357566 - DNA, 15 bp, Homo sapiens
aaataaagattttaa

SEQ ID NO: 357567 - DNA, 15 bp, Homo sapiens
gaaataaagatttta

SEQ ID NO: 357568 - DNA, 15 bp, Homo sapiens
cgaaataaagatttt

SEQ ID NO: 357569 - DNA, 15 bp, Homo sapiens
ccgaaataaagattt

SEQ ID NO: 357570 - DNA, 15 bp, Homo sapiens
cccgaaataaagatt

SEQ ID NO: 357571 - DNA, 15 bp, Homo sapiens
ccccgaaataaagat

SEQ ID NO: 357572 - DNA, 15 bp, Homo sapiens
tccccgaaataaaga

SEQ ID NO: 357573 - DNA, 15 bp, Homo sapiens
atccccgaaataaag

SEQ ID NO: 357574 - DNA, 15 bp, Homo sapiens
catccccgaaataaa

SEQ ID NO: 357575 - DNA, 15 bp, Homo sapiens
ccatccccgaaataa

SEQ ID NO: 357576 - DNA, 15 bp, Homo sapiens
accatccccgaaata

SEQ ID NO: 357577 - DNA, 15 bp, Homo sapiens
taccatccccgaaat

SEQ ID NO: 357578 - DNA, 15 bp, Homo sapiens
gtaccatccccgaaa

SEQ ID NO: 357579 - DNA, 15 bp, Homo sapiens
tgtaccatccccgaa

SEQ ID NO: 357580 - DNA, 15 bp, Homo sapiens
gtgtaccatccccga

SEQ ID NO: 357581 - DNA, 15 bp, Homo sapiens
agtgtaccatccccg

SEQ ID NO: 357582 - DNA, 15 bp, Homo sapiens
aagtgtaccatcccc

SEQ ID NO: 357583 - DNA, 15 bp, Homo sapiens
caagtgtaccatccc

SEQ ID NO: 357584 - DNA, 15 bp, Homo sapiens
tcaagtgtaccatcc

SEQ ID NO: 357585 - DNA, 15 bp, Homo sapiens
ctcaagtgtaccatc

SEQ ID NO: 357586 - DNA, 15 bp, Homo sapiens
actcaagtgtaccat

SEQ ID NO: 357587 - DNA, 15 bp, Homo sapiens
cactcaagtgtacca

SEQ ID NO: 357588 - DNA, 15 bp, Homo sapiens
acactcaagtgtacc

SEQ ID NO: 357589 - DNA, 15 bp, Homo sapiens
gacactcaagtgtac

SEQ ID NO: 357590 - DNA, 15 bp, Homo sapiens
tgacactcaagtgta

SEQ ID NO: 357591 - DNA, 15 bp, Homo sapiens
gtgacactcaagtgt

SEQ ID NO: 357592 - DNA, 15 bp, Homo sapiens
agtgacactcaagtg

SEQ ID NO: 357593 - DNA, 15 bp, Homo sapiens
cagtgacactcaagt

SEQ ID NO: 357594 - DNA, 15 bp, Homo sapiens
ccagtgacactcaag

SEQ ID NO: 357595 - DNA, 15 bp, Homo sapiens
accagtgacactcaa

SEQ ID NO: 357596 - DNA, 15 bp, Homo sapiens
aaccagtgacactca

SEQ ID NO: 357597 - DNA, 15 bp, Homo sapiens
gaaccagtgacactc

SEQ ID NO: 357598 - DNA, 15 bp, Homo sapiens
ggaaccagtgacact

SEQ ID NO: 357599 - DNA, 15 bp, Homo sapiens
tggaaccagtgacac

SEQ ID NO: 357600 - DNA, 15 bp, Homo sapiens
ctggaaccagtgaca

SEQ ID NO: 357601 - DNA, 15 bp, Homo sapiens
cctggaaccagtgac

SEQ ID NO: 357602 - DNA, 15 bp, Homo sapiens
ccctggaaccagtga

SEQ ID NO: 357603 - DNA, 15 bp, Homo sapiens
gccctggaaccagtg

SEQ ID NO: 357604 - DNA, 15 bp, Homo sapiens
ggccctggaaccagt

SEQ ID NO: 357605 - DNA, 15 bp, Homo sapiens
tggccctggaaccag

SEQ ID NO: 357606 - DNA, 15 bp, Homo sapiens
ctggccctggaacca

SEQ ID NO: 357607 - DNA, 15 bp, Homo sapiens
tctggccctggaacc

SEQ ID NO: 357608 - DNA, 15 bp, Homo sapiens
ttctggccctggaac

SEQ ID NO: 357609 - DNA, 15 bp, Homo sapiens
tttctggccctggaa

SEQ ID NO: 357610 - DNA, 15 bp, Homo sapiens
atttctggccctgga

SEQ ID NO: 357611 - DNA, 15 bp, Homo sapiens
catttctggccctgg

SEQ ID NO: 357612 - DNA, 15 bp, Homo sapiens
gcatttctggccctg

SEQ ID NO: 357613 - DNA, 15 bp, Homo sapiens
tgcatttctggccct

SEQ ID NO: 357614 - DNA, 15 bp, Homo sapiens
ttgcatttctggccc

SEQ ID NO: 357615 - DNA, 15 bp, Homo sapiens
tttgcatttctggcc

SEQ ID NO: 357616 - DNA, 15 bp, Homo sapiens
gtttgcatttctggc

SEQ ID NO: 357617 - DNA, 15 bp, Homo sapiens
tgtttgcatttctgg

SEQ ID NO: 357618 - DNA, 15 bp, Homo sapiens
atgtttgcatttctg

SEQ ID NO: 357619 - DNA, 15 bp, Homo sapiens
catgtttgcatttct

SEQ ID NO: 357620 - DNA, 15 bp, Homo sapiens
ccatgtttgcatttc

SEQ ID NO: 357621 - DNA, 15 bp, Homo sapiens
cccatgtttgcattt

SEQ ID NO: 357622 - DNA, 15 bp, Homo sapiens
ccccatgtttgcatt

SEQ ID NO: 357623 - DNA, 15 bp, Homo sapiens
accccatgtttgcat

SEQ ID NO: 357624 - DNA, 15 bp, Homo sapiens
caccccatgtttgca

SEQ ID NO: 357625 - DNA, 15 bp, Homo sapiens
acaccccatgtttgc

SEQ ID NO: 357626 - DNA, 15 bp, Homo sapiens
gacaccccatgtttg

SEQ ID NO: 357627 - DNA, 15 bp, Homo sapiens
agacaccccatgttt

SEQ ID NO: 357628 - DNA, 15 bp, Homo sapiens
cagacaccccatgtt

SEQ ID NO: 357629 - DNA, 15 bp, Homo sapiens
gcagacaccccatgt

SEQ ID NO: 357630 - DNA, 15 bp, Homo sapiens
ggcagacaccccatg

SEQ ID NO: 357631 - DNA, 15 bp, Homo sapiens
gggcagacaccccat

SEQ ID NO: 357632 - DNA, 15 bp, Homo sapiens
agggcagacacccca

SEQ ID NO: 357633 - DNA, 15 bp, Homo sapiens
tagggcagacacccc

SEQ ID NO: 357634 - DNA, 15 bp, Homo sapiens
atagggcagacaccc

SEQ ID NO: 357635 - DNA, 15 bp, Homo sapiens
tatagggcagacacc

SEQ ID NO: 357636 - DNA, 15 bp, Homo sapiens
atatagggcagacac

SEQ ID NO: 357637 - DNA, 15 bp, Homo sapiens
tatatagggcagaca

SEQ ID NO: 357638 - DNA, 15 bp, Homo sapiens
atatatagggcagac

SEQ ID NO: 357639 - DNA, 15 bp, Homo sapiens
catatatagggcaga

SEQ ID NO: 357640 - DNA, 15 bp, Homo sapiens
ccatatatagggcag

SEQ ID NO: 357641 - DNA, 15 bp, Homo sapiens
cccatatatagggca

SEQ ID NO: 357642 - DNA, 15 bp, Homo sapiens
ccccatatatagggc

SEQ ID NO: 357643 - DNA, 15 bp, Homo sapiens
cccccatatataggg

SEQ ID NO: 357644 - DNA, 15 bp, Homo sapiens
acccccatatatagg

SEQ ID NO: 357645 - DNA, 15 bp, Homo sapiens
tacccccatatatag

SEQ ID NO: 357646 - DNA, 15 bp, Homo sapiens
gtacccccatatata

SEQ ID NO: 357647 - DNA, 15 bp, Homo sapiens
tgtacccccatatat

SEQ ID NO: 357648 - DNA, 15 bp, Homo sapiens
ctgtacccccatata

SEQ ID NO: 357649 - DNA, 15 bp, Homo sapiens
actgtacccccatat

SEQ ID NO: 357650 - DNA, 15 bp, Homo sapiens
tactgtacccccata

SEQ ID NO: 357651 - DNA, 15 bp, Homo sapiens
ctactgtacccccat

SEQ ID NO: 357652 - DNA, 15 bp, Homo sapiens
cctactgtaccccca

SEQ ID NO: 357653 - DNA, 15 bp, Homo sapiens
gcctactgtaccccc

SEQ ID NO: 357654 - DNA, 15 bp, Homo sapiens
tgcctactgtacccc

SEQ ID NO: 357655 - DNA, 15 bp, Homo sapiens
ctgcctactgtaccc

SEQ ID NO: 357656 - DNA, 15 bp, Homo sapiens
gctgcctactgtacc

SEQ ID NO: 357657 - DNA, 15 bp, Homo sapiens
tgctgcctactgtac

SEQ ID NO: 357658 - DNA, 15 bp, Homo sapiens
ctgctgcctactgta

SEQ ID NO: 357659 - DNA, 15 bp, Homo sapiens
actgctgcctactgt

SEQ ID NO: 357660 - DNA, 15 bp, Homo sapiens
cactgctgcctactg

SEQ ID NO: 357661 - DNA, 15 bp, Homo sapiens
ccactgctgcctact

SEQ ID NO: 357662 - DNA, 15 bp, Homo sapiens
cccactgctgcctac

SEQ ID NO: 357663 - DNA, 15 bp, Homo sapiens
ccccactgctgccta

SEQ ID NO: 357664 - DNA, 15 bp, Homo sapiens
gccccactgctgcct

SEQ ID NO: 357665 - DNA, 15 bp, Homo sapiens
tgccccactgctgcc

SEQ ID NO: 357666 - DNA, 15 bp, Homo sapiens
atgccccactgctgc

SEQ ID NO: 357667 - DNA, 15 bp, Homo sapiens
aatgccccactgctg

SEQ ID NO: 357668 - DNA, 15 bp, Homo sapiens
aaatgccccactgct

SEQ ID NO: 357669 - DNA, 15 bp, Homo sapiens
caaatgccccactgc

SEQ ID NO: 357670 - DNA, 15 bp, Homo sapiens
tcaaatgccccactg

SEQ ID NO: 357671 - DNA, 15 bp, Homo sapiens
ctcaaatgccccact

SEQ ID NO: 357672 - DNA, 15 bp, Homo sapiens
gctcaaatgccccac

SEQ ID NO: 357673 - DNA, 15 bp, Homo sapiens
tgctcaaatgcccca

SEQ ID NO: 357674 - DNA, 15 bp, Homo sapiens
ctgctcaaatgcccc

SEQ ID NO: 357675 - DNA, 15 bp, Homo sapiens
gctgctcaaatgccc

SEQ ID NO: 357676 - DNA, 15 bp, Homo sapiens
agctgctcaaatgcc

SEQ ID NO: 357677 - DNA, 15 bp, Homo sapiens
cagctgctcaaatgc

SEQ ID NO: 357678 - DNA, 15 bp, Homo sapiens
tcagctgctcaaatg

SEQ ID NO: 357679 - DNA, 15 bp, Homo sapiens
atcagctgctcaaat

SEQ ID NO: 357680 - DNA, 15 bp, Homo sapiens
tatcagctgctcaaa

SEQ ID NO: 357681 - DNA, 15 bp, Homo sapiens
ttatcagctgctcaa

SEQ ID NO: 357682 - DNA, 15 bp, Homo sapiens
cttatcagctgctca

SEQ ID NO: 357683 - DNA, 15 bp, Homo sapiens
gcttatcagctgctc

SEQ ID NO: 357684 - DNA, 15 bp, Homo sapiens
agcttatcagctgct

SEQ ID NO: 357685 - DNA, 15 bp, Homo sapiens
gagcttatcagctgc

SEQ ID NO: 357686 - DNA, 15 bp, Homo sapiens
ggagcttatcagctg

SEQ ID NO: 357687 - DNA, 15 bp, Homo sapiens
aggagcttatcagct

SEQ ID NO: 357688 - DNA, 15 bp, Homo sapiens
caggagcttatcagc

SEQ ID NO: 357689 - DNA, 15 bp, Homo sapiens
gcaggagcttatcag

SEQ ID NO: 357690 - DNA, 15 bp, Homo sapiens
ggcaggagcttatca

SEQ ID NO: 357691 - DNA, 15 bp, Homo sapiens
gggcaggagcttatc

SEQ ID NO: 357692 - DNA, 15 bp, Homo sapiens
ggggcaggagcttat

SEQ ID NO: 357693 - DNA, 15 bp, Homo sapiens
tggggcaggagctta

SEQ ID NO: 357694 - DNA, 15 bp, Homo sapiens
ctggggcaggagctt

SEQ ID NO: 357695 - DNA, 15 bp, Homo sapiens
cctggggcaggagct

SEQ ID NO: 357696 - DNA, 15 bp, Homo sapiens
tcctggggcaggagc

SEQ ID NO: 357697 - DNA, 15 bp, Homo sapiens
ctcctggggcaggag

SEQ ID NO: 357698 - DNA, 15 bp, Homo sapiens
tctcctggggcagga

SEQ ID NO: 357699 - DNA, 15 bp, Homo sapiens
ttctcctggggcagg

SEQ ID NO: 357700 - DNA, 15 bp, Homo sapiens
attctcctggggcag

SEQ ID NO: 357701 - DNA, 15 bp, Homo sapiens
cattctcctggggca

SEQ ID NO: 357702 - DNA, 15 bp, Homo sapiens
ccattctcctggggc

SEQ ID NO: 357703 - DNA, 15 bp, Homo sapiens
gccattctcctgggg

SEQ ID NO: 357704 - DNA, 15 bp, Homo sapiens
tgccattctcctggg

SEQ ID NO: 357705 - DNA, 15 bp, Homo sapiens
gtgccattctcctgg

SEQ ID NO: 357706 - DNA, 15 bp, Homo sapiens
ggtgccattctcctg

SEQ ID NO: 357707 - DNA, 15 bp, Homo sapiens
gggtgccattctcct

SEQ ID NO: 357708 - DNA, 15 bp, Homo sapiens
agggtgccattctcc

SEQ ID NO: 357709 - DNA, 15 bp, Homo sapiens
aagggtgccattctc

SEQ ID NO: 357710 - DNA, 15 bp, Homo sapiens
aaagggtgccattct

SEQ ID NO: 357711 - DNA, 15 bp, Homo sapiens
aaaagggtgccattc

SEQ ID NO: 357712 - DNA, 15 bp, Homo sapiens
caaaagggtgccatt

SEQ ID NO: 357713 - DNA, 15 bp, Homo sapiens
ccaaaagggtgccat

SEQ ID NO: 357714 - DNA, 15 bp, Homo sapiens
tccaaaagggtgcca

SEQ ID NO: 357715 - DNA, 15 bp, Homo sapiens
ttccaaaagggtgcc

SEQ ID NO: 357716 - DNA, 15 bp, Homo sapiens
attccaaaagggtgc

SEQ ID NO: 357717 - DNA, 15 bp, Homo sapiens
cattccaaaagggtg

SEQ ID NO: 357718 - DNA, 15 bp, Homo sapiens
tcattccaaaagggt

SEQ ID NO: 357719 - DNA, 15 bp, Homo sapiens
ttcattccaaaaggg

SEQ ID NO: 357720 - DNA, 15 bp, Homo sapiens
cttcattccaaaagg

SEQ ID NO: 357721 - DNA, 15 bp, Homo sapiens
tcttcattccaaaag

SEQ ID NO: 357722 - DNA, 15 bp, Homo sapiens
gtcttcattccaaaa

SEQ ID NO: 357723 - DNA, 15 bp, Homo sapiens
agtcttcattccaaa

SEQ ID NO: 357724 - DNA, 15 bp, Homo sapiens
gagtcttcattccaa

SEQ ID NO: 357725 - DNA, 15 bp, Homo sapiens
tgagtcttcattcca

SEQ ID NO: 357726 - DNA, 15 bp, Homo sapiens
ctgagtcttcattcc

SEQ ID NO: 357727 - DNA, 15 bp, Homo sapiens
actgagtcttcattc

SEQ ID NO: 357728 - DNA, 15 bp, Homo sapiens
gactgagtcttcatt

SEQ ID NO: 357729 - DNA, 15 bp, Homo sapiens
ggactgagtcttcat

SEQ ID NO: 357730 - DNA, 15 bp, Homo sapiens
aggactgagtcttca

SEQ ID NO: 357731 - DNA, 15 bp, Homo sapiens
gaggactgagtcttc

SEQ ID NO: 357732 - DNA, 15 bp, Homo sapiens
agaggactgagtctt

SEQ ID NO: 357733 - DNA, 15 bp, Homo sapiens
tagaggactgagtct

SEQ ID NO: 357734 - DNA, 15 bp, Homo sapiens
gtagaggactgagtc

SEQ ID NO: 357735 - DNA, 15 bp, Homo sapiens
tgtagaggactgagt

SEQ ID NO: 357736 - DNA, 15 bp, Homo sapiens
ttgtagaggactgag

SEQ ID NO: 357737 - DNA, 15 bp, Homo sapiens
cttgtagaggactga

SEQ ID NO: 357738 - DNA, 15 bp, Homo sapiens
tcttgtagaggactg

SEQ ID NO: 357739 - DNA, 15 bp, Homo sapiens
atcttgtagaggact

SEQ ID NO: 357740 - DNA, 15 bp, Homo sapiens
aatcttgtagaggac

SEQ ID NO: 357741 - DNA, 15 bp, Homo sapiens
aaatcttgtagagga

SEQ ID NO: 357742 - DNA, 15 bp, Homo sapiens
aaaatcttgtagagg

SEQ ID NO: 357743 - DNA, 15 bp, Homo sapiens
aaaaatcttgtagag

SEQ ID NO: 357744 - DNA, 15 bp, Homo sapiens
taaaaatcttgtaga

SEQ ID NO: 357745 - DNA, 15 bp, Homo sapiens
ttaaaaatcttgtag

SEQ ID NO: 357746 - DNA, 15 bp, Homo sapiens
attaaaaatcttgta

SEQ ID NO: 357747 - DNA, 15 bp, Homo sapiens
aattaaaaatcttgt

SEQ ID NO: 357748 - DNA, 15 bp, Homo sapiens
taattaaaaatcttg

SEQ ID NO: 357749 - DNA, 15 bp, Homo sapiens
ctaattaaaaatctt

SEQ ID NO: 357750 - DNA, 15 bp, Homo sapiens
tctaattaaaaatct

SEQ ID NO: 357751 - DNA, 15 bp, Homo sapiens
ttctaattaaaaatc

SEQ ID NO: 357752 - DNA, 15 bp, Homo sapiens
cttctaattaaaaat

SEQ ID NO: 357753 - DNA, 15 bp, Homo sapiens
acttctaattaaaaa

SEQ ID NO: 357754 - DNA, 15 bp, Homo sapiens
aacttctaattaaaa

SEQ ID NO: 357755 - DNA, 15 bp, Homo sapiens
taacttctaattaaa

SEQ ID NO: 357756 - DNA, 15 bp, Homo sapiens
ctaacttctaattaa

SEQ ID NO: 357757 - DNA, 15 bp, Homo sapiens
tctaacttctaatta

SEQ ID NO: 357758 - DNA, 15 bp, Homo sapiens
ttctaacttctaatt

SEQ ID NO: 357759 - DNA, 15 bp, Homo sapiens
tttctaacttctaat

SEQ ID NO: 357760 - DNA, 15 bp, Homo sapiens
atttctaacttctaa

SEQ ID NO: 357761 - DNA, 15 bp, Homo sapiens
gatttctaacttcta

SEQ ID NO: 357762 - DNA, 15 bp, Homo sapiens
ggatttctaacttct

SEQ ID NO: 357763 - DNA, 15 bp, Homo sapiens
tggatttctaacttc

SEQ ID NO: 357764 - DNA, 15 bp, Homo sapiens
atggatttctaactt

SEQ ID NO: 357765 - DNA, 15 bp, Homo sapiens
tatggatttctaact

SEQ ID NO: 357766 - DNA, 15 bp, Homo sapiens
atatggatttctaac

SEQ ID NO: 357767 - DNA, 15 bp, Homo sapiens
aatatggatttctaa

SEQ ID NO: 357768 - DNA, 15 bp, Homo sapiens
aaatatggatttcta

SEQ ID NO: 357769 - DNA, 15 bp, Homo sapiens
caaatatggatttct

SEQ ID NO: 357770 - DNA, 15 bp, Homo sapiens
acaaatatggatttc

SEQ ID NO: 357771 - DNA, 15 bp, Homo sapiens
tacaaatatggattt

SEQ ID NO: 357772 - DNA, 15 bp, Homo sapiens
atacaaatatggatt

SEQ ID NO: 357773 - DNA, 15 bp, Homo sapiens
catacaaatatggat

SEQ ID NO: 357774 - DNA, 15 bp, Homo sapiens
ccatacaaatatgga

SEQ ID NO: 357775 - DNA, 15 bp, Homo sapiens
tccatacaaatatgg

SEQ ID NO: 357776 - DNA, 15 bp, Homo sapiens
gtccatacaaatatg

SEQ ID NO: 357777 - DNA, 15 bp, Homo sapiens
tgtccatacaaatat

SEQ ID NO: 357778 - DNA, 15 bp, Homo sapiens
ttgtccatacaaata

SEQ ID NO: 357779 - DNA, 15 bp, Homo sapiens
attgtccatacaaat

SEQ ID NO: 357780 - DNA, 15 bp, Homo sapiens
gattgtccatacaaa

SEQ ID NO: 357781 - DNA, 15 bp, Homo sapiens
agattgtccatacaa

SEQ ID NO: 357782 - DNA, 15 bp, Homo sapiens
aagattgtccataca

SEQ ID NO: 357783 - DNA, 15 bp, Homo sapiens
gaagattgtccatac

SEQ ID NO: 357784 - DNA, 15 bp, Homo sapiens
tgaagattgtccata

SEQ ID NO: 357785 - DNA, 15 bp, Homo sapiens
ctgaagattgtccat

SEQ ID NO: 357786 - DNA, 15 bp, Homo sapiens
tctgaagattgtcca

SEQ ID NO: 357787 - DNA, 15 bp, Homo sapiens
gtctgaagattgtcc

SEQ ID NO: 357788 - DNA, 15 bp, Homo sapiens
agtctgaagattgtc

SEQ ID NO: 357789 - DNA, 15 bp, Homo sapiens
aagtctgaagattgt

SEQ ID NO: 357790 - DNA, 15 bp, Homo sapiens
taagtctgaagattg

SEQ ID NO: 357791 - DNA, 15 bp, Homo sapiens
ttaagtctgaagatt

SEQ ID NO: 357792 - DNA, 15 bp, Homo sapiens
tttaagtctgaagat

SEQ ID NO: 357793 - DNA, 15 bp, Homo sapiens
ctttaagtctgaaga

SEQ ID NO: 357794 - DNA, 15 bp, Homo sapiens
tctttaagtctgaag

SEQ ID NO: 357795 - DNA, 15 bp, Homo sapiens
atctttaagtctgaa

SEQ ID NO: 357796 - DNA, 15 bp, Homo sapiens
aatctttaagtctga

SEQ ID NO: 357797 - DNA, 15 bp, Homo sapiens
caatctttaagtctg

SEQ ID NO: 357798 - DNA, 15 bp, Homo sapiens
acaatctttaagtct

SEQ ID NO: 357799 - DNA, 15 bp, Homo sapiens
gacaatctttaagtc

SEQ ID NO: 357800 - DNA, 15 bp, Homo sapiens
ggacaatctttaagt

SEQ ID NO: 357801 - DNA, 15 bp, Homo sapiens
gggacaatctttaag

SEQ ID NO: 357802 - DNA, 15 bp, Homo sapiens
tgggacaatctttaa

SEQ ID NO: 357803 - DNA, 15 bp, Homo sapiens
gtgggacaatcttta

SEQ ID NO: 357804 - DNA, 15 bp, Homo sapiens
tgtgggacaatcttt

SEQ ID NO: 357805 - DNA, 15 bp, Homo sapiens
atgtgggacaatctt

SEQ ID NO: 357806 - DNA, 15 bp, Homo sapiens
catgtgggacaatct

SEQ ID NO: 357807 - DNA, 15 bp, Homo sapiens
acatgtgggacaatc

SEQ ID NO: 357808 - DNA, 15 bp, Homo sapiens
cacatgtgggacaat

SEQ ID NO: 357809 - DNA, 15 bp, Homo sapiens
tcacatgtgggacaa

SEQ ID NO: 357810 - DNA, 15 bp, Homo sapiens
ttcacatgtgggaca

SEQ ID NO: 357811 - DNA, 15 bp, Homo sapiens
tttcacatgtgggac

SEQ ID NO: 357812 - DNA, 15 bp, Homo sapiens
atttcacatgtggga

SEQ ID NO: 357813 - DNA, 15 bp, Homo sapiens
gatttcacatgtggg

SEQ ID NO: 357814 - DNA, 15 bp, Homo sapiens
ggatttcacatgtgg

SEQ ID NO: 357815 - DNA, 15 bp, Homo sapiens
aggatttcacatgtg

SEQ ID NO: 357816 - DNA, 15 bp, Homo sapiens
caggatttcacatgt

SEQ ID NO: 357817 - DNA, 15 bp, Homo sapiens
acaggatttcacatg

SEQ ID NO: 357818 - DNA, 15 bp, Homo sapiens
cacaggatttcacat

SEQ ID NO: 357819 - DNA, 15 bp, Homo sapiens
acacaggatttcaca

SEQ ID NO: 357820 - DNA, 15 bp, Homo sapiens
tacacaggatttcac

SEQ ID NO: 357821 - DNA, 15 bp, Homo sapiens
atacacaggatttca

SEQ ID NO: 357822 - DNA, 15 bp, Homo sapiens
gatacacaggatttc

SEQ ID NO: 357823 - DNA, 15 bp, Homo sapiens
tgatacacaggattt

SEQ ID NO: 357824 - DNA, 15 bp, Homo sapiens
ctgatacacaggatt

SEQ ID NO: 357825 - DNA, 15 bp, Homo sapiens
gctgatacacaggat

SEQ ID NO: 357826 - DNA, 15 bp, Homo sapiens
tgctgatacacagga

SEQ ID NO: 357827 - DNA, 15 bp, Homo sapiens
ctgctgatacacagg

SEQ ID NO: 357828 - DNA, 15 bp, Homo sapiens
cctgctgatacacag

SEQ ID NO: 357829 - DNA, 15 bp, Homo sapiens
ccctgctgatacaca

SEQ ID NO: 357830 - DNA, 15 bp, Homo sapiens
accctgctgatacac

SEQ ID NO: 357831 - DNA, 15 bp, Homo sapiens
caccctgctgataca

SEQ ID NO: 357832 - DNA, 15 bp, Homo sapiens
ccaccctgctgatac

SEQ ID NO: 357833 - DNA, 15 bp, Homo sapiens
accaccctgctgata

SEQ ID NO: 357834 - DNA, 15 bp, Homo sapiens
caccaccctgctgat

SEQ ID NO: 357835 - DNA, 15 bp, Homo sapiens
gcaccaccctgctga

SEQ ID NO: 357836 - DNA, 15 bp, Homo sapiens
ggcaccaccctgctg

SEQ ID NO: 357837 - DNA, 15 bp, Homo sapiens
tggcaccaccctgct

SEQ ID NO: 357838 - DNA, 15 bp, Homo sapiens
ttggcaccaccctgc

SEQ ID NO: 357839 - DNA, 15 bp, Homo sapiens
cttggcaccaccctg

SEQ ID NO: 357840 - DNA, 15 bp, Homo sapiens
gcttggcaccaccct

SEQ ID NO: 357841 - DNA, 15 bp, Homo sapiens
agcttggcaccaccc

SEQ ID NO: 357842 - DNA, 15 bp, Homo sapiens
gagcttggcaccacc

SEQ ID NO: 357843 - DNA, 15 bp, Homo sapiens
tgagcttggcaccac

SEQ ID NO: 357844 - DNA, 15 bp, Homo sapiens
ctgagcttggcacca

SEQ ID NO: 357845 - DNA, 15 bp, Homo sapiens
gctgagcttggcacc

SEQ ID NO: 357846 - DNA, 15 bp, Homo sapiens
tgctgagcttggcac

SEQ ID NO: 357847 - DNA, 15 bp, Homo sapiens
gtgctgagcttggca

SEQ ID NO: 357848 - DNA, 15 bp, Homo sapiens
tgtgctgagcttggc

SEQ ID NO: 357849 - DNA, 15 bp, Homo sapiens
gtgtgctgagcttgg

SEQ ID NO: 357850 - DNA, 15 bp, Homo sapiens
agtgtgctgagcttg

SEQ ID NO: 357851 - DNA, 15 bp, Homo sapiens
cagtgtgctgagctt

SEQ ID NO: 357852 - DNA, 15 bp, Homo sapiens
ccagtgtgctgagct

SEQ ID NO: 357853 - DNA, 15 bp, Homo sapiens
cccagtgtgctgagc

SEQ ID NO: 357854 - DNA, 15 bp, Homo sapiens
ccccagtgtgctgag

SEQ ID NO: 357855 - DNA, 15 bp, Homo sapiens
tccccagtgtgctga

SEQ ID NO: 357856 - DNA, 15 bp, Homo sapiens
gtccccagtgtgctg

SEQ ID NO: 357857 - DNA, 15 bp, Homo sapiens
tgtccccagtgtgct

SEQ ID NO: 357858 - DNA, 15 bp, Homo sapiens
ctgtccccagtgtgc

SEQ ID NO: 357859 - DNA, 15 bp, Homo sapiens
actgtccccagtgtg

SEQ ID NO: 357860 - DNA, 15 bp, Homo sapiens
tactgtccccagtgt

SEQ ID NO: 357861 - DNA, 15 bp, Homo sapiens
ctactgtccccagtg

SEQ ID NO: 357862 - DNA, 15 bp, Homo sapiens
actactgtccccagt

SEQ ID NO: 357863 - DNA, 15 bp, Homo sapiens
aactactgtccccag

SEQ ID NO: 357864 - DNA, 15 bp, Homo sapiens
caactactgtcccca

SEQ ID NO: 357865 - DNA, 15 bp, Homo sapiens
ccaactactgtcccc

SEQ ID NO: 357866 - DNA, 15 bp, Homo sapiens
accaactactgtccc

SEQ ID NO: 357867 - DNA, 15 bp, Homo sapiens
gaccaactactgtcc

SEQ ID NO: 357868 - DNA, 15 bp, Homo sapiens
ggaccaactactgtc

SEQ ID NO: 357869 - DNA, 15 bp, Homo sapiens
aggaccaactactgt

SEQ ID NO: 357870 - DNA, 15 bp, Homo sapiens
gaggaccaactactg

SEQ ID NO: 357871 - DNA, 15 bp, Homo sapiens
tgaggaccaactact

SEQ ID NO: 357872 - DNA, 15 bp, Homo sapiens
ctgaggaccaactac

SEQ ID NO: 357873 - DNA, 15 bp, Homo sapiens
cctgaggaccaacta

SEQ ID NO: 357874 - DNA, 15 bp, Homo sapiens
gcctgaggaccaact

SEQ ID NO: 357875 - DNA, 15 bp, Homo sapiens
agcctgaggaccaac

SEQ ID NO: 357876 - DNA, 15 bp, Homo sapiens
cagcctgaggaccaa

SEQ ID NO: 357877 - DNA, 15 bp, Homo sapiens
acagcctgaggacca

SEQ ID NO: 357878 - DNA, 15 bp, Homo sapiens
gacagcctgaggacc

SEQ ID NO: 357879 - DNA, 15 bp, Homo sapiens
tgacagcctgaggac

SEQ ID NO: 357880 - DNA, 15 bp, Homo sapiens
ctgacagcctgagga

SEQ ID NO: 357881 - DNA, 15 bp, Homo sapiens
gctgacagcctgagg

SEQ ID NO: 357882 - DNA, 15 bp, Homo sapiens
ggctgacagcctgag

SEQ ID NO: 357883 - DNA, 15 bp, Homo sapiens
aggctgacagcctga

SEQ ID NO: 357884 - DNA, 15 bp, Homo sapiens
caggctgacagcctg

SEQ ID NO: 357885 - DNA, 15 bp, Homo sapiens
gcaggctgacagcct

SEQ ID NO: 357886 - DNA, 15 bp, Homo sapiens
tgcaggctgacagcc

SEQ ID NO: 357887 - DNA, 15 bp, Homo sapiens
ctgcaggctgacagc

SEQ ID NO: 357888 - DNA, 15 bp, Homo sapiens
gctgcaggctgacag

SEQ ID NO: 357889 - DNA, 15 bp, Homo sapiens
ggctgcaggctgaca

SEQ ID NO: 357890 - DNA, 15 bp, Homo sapiens
gggctgcaggctgac

SEQ ID NO: 357891 - DNA, 15 bp, Homo sapiens
ggggctgcaggctga

SEQ ID NO: 357892 - DNA, 15 bp, Homo sapiens
gggggctgcaggctg

SEQ ID NO: 357893 - DNA, 15 bp, Homo sapiens
agggggctgcaggct

SEQ ID NO: 357894 - DNA, 15 bp, Homo sapiens
cagggggctgcaggc

SEQ ID NO: 357895 - DNA, 15 bp, Homo sapiens
ccagggggctgcagg

SEQ ID NO: 357896 - DNA, 15 bp, Homo sapiens
accagggggctgcag

SEQ ID NO: 357897 - DNA, 15 bp, Homo sapiens
aaccagggggctgca

SEQ ID NO: 357898 - DNA, 15 bp, Homo sapiens
taaccagggggctgc

SEQ ID NO: 357899 - DNA, 15 bp, Homo sapiens
ataaccagggggctg

SEQ ID NO: 357900 - DNA, 15 bp, Homo sapiens
cataaccagggggct

SEQ ID NO: 357901 - DNA, 15 bp, Homo sapiens
acataaccagggggc

SEQ ID NO: 357902 - DNA, 15 bp, Homo sapiens
gacataaccaggggg

SEQ ID NO: 357903 - DNA, 15 bp, Homo sapiens
tgacataaccagggg

SEQ ID NO: 357904 - DNA, 15 bp, Homo sapiens
gtgacataaccaggg

SEQ ID NO: 357905 - DNA, 15 bp, Homo sapiens
tgtgacataaccagg

SEQ ID NO: 357906 - DNA, 15 bp, Homo sapiens
atgtgacataaccag

SEQ ID NO: 357907 - DNA, 15 bp, Homo sapiens
tatgtgacataacca

SEQ ID NO: 357908 - DNA, 15 bp, Homo sapiens
ttatgtgacataacc

SEQ ID NO: 357909 - DNA, 15 bp, Homo sapiens
attatgtgacataac

SEQ ID NO: 357910 - DNA, 15 bp, Homo sapiens
gattatgtgacataa

SEQ ID NO: 357911 - DNA, 15 bp, Homo sapiens
ggattatgtgacata

SEQ ID NO: 357912 - DNA, 15 bp, Homo sapiens
gggattatgtgacat

SEQ ID NO: 357913 - DNA, 15 bp, Homo sapiens
tgggattatgtgaca

SEQ ID NO: 357914 - DNA, 15 bp, Homo sapiens
ttgggattatgtgac

SEQ ID NO: 357915 - DNA, 15 bp, Homo sapiens
tttgggattatgtga

SEQ ID NO: 357916 - DNA, 15 bp, Homo sapiens
ctttgggattatgtg

SEQ ID NO: 357917 - DNA, 15 bp, Homo sapiens
gctttgggattatgt

SEQ ID NO: 357918 - DNA, 15 bp, Homo sapiens
tgctttgggattatg

SEQ ID NO: 357919 - DNA, 15 bp, Homo sapiens
atgctttgggattat

SEQ ID NO: 357920 - DNA, 15 bp, Homo sapiens
gatgctttgggatta

SEQ ID NO: 357921 - DNA, 15 bp, Homo sapiens
agatgctttgggatt

SEQ ID NO: 357922 - DNA, 15 bp, Homo sapiens
gagatgctttgggat

SEQ ID NO: 357923 - DNA, 15 bp, Homo sapiens
ggagatgctttggga

SEQ ID NO: 357924 - DNA, 15 bp, Homo sapiens
cggagatgctttggg

SEQ ID NO: 357925 - DNA, 15 bp, Homo sapiens
tcggagatgctttgg

SEQ ID NO: 357926 - DNA, 15 bp, Homo sapiens
ttcggagatgctttg

SEQ ID NO: 357927 - DNA, 15 bp, Homo sapiens
tttcggagatgcttt

SEQ ID NO: 357928 - DNA, 15 bp, Homo sapiens
atttcggagatgctt

SEQ ID NO: 357929 - DNA, 15 bp, Homo sapiens
aatttcggagatgct

SEQ ID NO: 357930 - DNA, 15 bp, Homo sapiens
aaatttcggagatgc

SEQ ID NO: 357931 - DNA, 15 bp, Homo sapiens
caaatttcggagatg

SEQ ID NO: 357932 - DNA, 15 bp, Homo sapiens
ccaaatttcggagat

SEQ ID NO: 357933 - DNA, 15 bp, Homo sapiens
accaaatttcggaga

SEQ ID NO: 357934 - DNA, 15 bp, Homo sapiens
caccaaatttcggag

SEQ ID NO: 357935 - DNA, 15 bp, Homo sapiens
acaccaaatttcgga

SEQ ID NO: 357936 - DNA, 15 bp, Homo sapiens
gacaccaaatttcgg

SEQ ID NO: 357937 - DNA, 15 bp, Homo sapiens
ggacaccaaatttcg

SEQ ID NO: 357938 - DNA, 15 bp, Homo sapiens
aggacaccaaatttc

SEQ ID NO: 357939 - DNA, 15 bp, Homo sapiens
aaggacaccaaattt

SEQ ID NO: 357940 - DNA, 15 bp, Homo sapiens
caaggacaccaaatt

SEQ ID NO: 357941 - DNA, 15 bp, Homo sapiens
ccaaggacaccaaat

SEQ ID NO: 357942 - DNA, 15 bp, Homo sapiens
accaaggacaccaaa

SEQ ID NO: 357943 - DNA, 15 bp, Homo sapiens
gaccaaggacaccaa

SEQ ID NO: 357944 - DNA, 15 bp, Homo sapiens
ggaccaaggacacca

SEQ ID NO: 357945 - DNA, 15 bp, Homo sapiens
tggaccaaggacacc

SEQ ID NO: 357946 - DNA, 15 bp, Homo sapiens
ctggaccaaggacac

SEQ ID NO: 357947 - DNA, 15 bp, Homo sapiens
actggaccaaggaca

SEQ ID NO: 357948 - DNA, 15 bp, Homo sapiens
tactggaccaaggac

SEQ ID NO: 357949 - DNA, 15 bp, Homo sapiens
ctactggaccaagga

SEQ ID NO: 357950 - DNA, 15 bp, Homo sapiens
cctactggaccaagg

SEQ ID NO: 357951 - DNA, 15 bp, Homo sapiens
ccctactggaccaag

SEQ ID NO: 357952 - DNA, 15 bp, Homo sapiens
tccctactggaccaa

SEQ ID NO: 357953 - DNA, 15 bp, Homo sapiens
atccctactggacca

SEQ ID NO: 357954 - DNA, 15 bp, Homo sapiens
gatccctactggacc

SEQ ID NO: 357955 - DNA, 15 bp, Homo sapiens
tgatccctactggac

SEQ ID NO: 357956 - DNA, 15 bp, Homo sapiens
gtgatccctactgga

SEQ ID NO: 357957 - DNA, 15 bp, Homo sapiens
tgtgatccctactgg

SEQ ID NO: 357958 - DNA, 15 bp, Homo sapiens
ctgtgatccctactg

SEQ ID NO: 357959 - DNA, 15 bp, Homo sapiens
actgtgatccctact

SEQ ID NO: 357960 - DNA, 15 bp, Homo sapiens
tactgtgatccctac

SEQ ID NO: 357961 - DNA, 15 bp, Homo sapiens
ctactgtgatcccta

SEQ ID NO: 357962 - DNA, 15 bp, Homo sapiens
tctactgtgatccct

SEQ ID NO: 357963 - DNA, 15 bp, Homo sapiens
atctactgtgatccc

SEQ ID NO: 357964 - DNA, 15 bp, Homo sapiens
gatctactgtgatcc

SEQ ID NO: 357965 - DNA, 15 bp, Homo sapiens
cgatctactgtgatc

SEQ ID NO: 357966 - DNA, 15 bp, Homo sapiens
acgatctactgtgat

SEQ ID NO: 357967 - DNA, 15 bp, Homo sapiens
tacgatctactgtga

SEQ ID NO: 357968 - DNA, 15 bp, Homo sapiens
ctacgatctactgtg

SEQ ID NO: 357969 - DNA, 15 bp, Homo sapiens
cctacgatctactgt

SEQ ID NO: 357970 - DNA, 15 bp, Homo sapiens
tcctacgatctactg

SEQ ID NO: 357971 - DNA, 15 bp, Homo sapiens
gtcctacgatctact

SEQ ID NO: 357972 - DNA, 15 bp, Homo sapiens
tgtcctacgatctac

SEQ ID NO: 357973 - DNA, 15 bp, Homo sapiens
atgtcctacgatcta

SEQ ID NO: 357974 - DNA, 15 bp, Homo sapiens
aatgtcctacgatct

SEQ ID NO: 357975 - DNA, 15 bp, Homo sapiens
caatgtcctacgatc

SEQ ID NO: 357976 - DNA, 15 bp, Homo sapiens
tcaatgtcctacgat

SEQ ID NO: 357977 - DNA, 15 bp, Homo sapiens
ctcaatgtcctacga

SEQ ID NO: 357978 - DNA, 15 bp, Homo sapiens
cctcaatgtcctacg

SEQ ID NO: 357979 - DNA, 15 bp, Homo sapiens
acctcaatgtcctac

SEQ ID NO: 357980 - DNA, 15 bp, Homo sapiens
tacctcaatgtccta

SEQ ID NO: 357981 - DNA, 15 bp, Homo sapiens
atacctcaatgtcct

SEQ ID NO: 357982 - DNA, 15 bp, Homo sapiens
catacctcaatgtcc

SEQ ID NO: 357983 - DNA, 15 bp, Homo sapiens
ccatacctcaatgtc

SEQ ID NO: 357984 - DNA, 15 bp, Homo sapiens
tccatacctcaatgt

SEQ ID NO: 357985 - DNA, 15 bp, Homo sapiens
ctccatacctcaatg

SEQ ID NO: 357986 - DNA, 15 bp, Homo sapiens
actccatacctcaat

SEQ ID NO: 357987 - DNA, 15 bp, Homo sapiens
tactccatacctcaa

SEQ ID NO: 357988 - DNA, 15 bp, Homo sapiens
ttactccatacctca

SEQ ID NO: 357989 - DNA, 15 bp, Homo sapiens
gttactccatacctc

SEQ ID NO: 357990 - DNA, 15 bp, Homo sapiens
agttactccatacct

SEQ ID NO: 357991 - DNA, 15 bp, Homo sapiens
cagttactccatacc

SEQ ID NO: 357992 - DNA, 15 bp, Homo sapiens
ccagttactccatac

SEQ ID NO: 357993 - DNA, 15 bp, Homo sapiens
accagttactccata

SEQ ID NO: 357994 - DNA, 15 bp, Homo sapiens
gaccagttactccat

SEQ ID NO: 357995 - DNA, 15 bp, Homo sapiens
agaccagttactcca

SEQ ID NO: 357996 - DNA, 15 bp, Homo sapiens
cagaccagttactcc

SEQ ID NO: 357997 - DNA, 15 bp, Homo sapiens
tcagaccagttactc

SEQ ID NO: 357998 - DNA, 15 bp, Homo sapiens
ctcagaccagttact

SEQ ID NO: 357999 - DNA, 15 bp, Homo sapiens
tctcagaccagttac

SEQ ID NO: 358000 - DNA, 15 bp, Homo sapiens
atctcagaccagtta

SEQ ID NO: 358001 - DNA, 15 bp, Homo sapiens
gatctcagaccagtt

SEQ ID NO: 358002 - DNA, 15 bp, Homo sapiens
tgatctcagaccagt

SEQ ID NO: 358003 - DNA, 15 bp, Homo sapiens
ctgatctcagaccag

SEQ ID NO: 358004 - DNA, 15 bp, Homo sapiens
tctgatctcagacca

SEQ ID NO: 358005 - DNA, 15 bp, Homo sapiens
ctctgatctcagacc

SEQ ID NO: 358006 - DNA, 15 bp, Homo sapiens
gctctgatctcagac

SEQ ID NO: 358007 - DNA, 15 bp, Homo sapiens
agctctgatctcaga

SEQ ID NO: 358008 - DNA, 15 bp, Homo sapiens
gagctctgatctcag

SEQ ID NO: 358009 - DNA, 15 bp, Homo sapiens
agagctctgatctca

SEQ ID NO: 358010 - DNA, 15 bp, Homo sapiens
tagagctctgatctc

SEQ ID NO: 358011 - DNA, 15 bp, Homo sapiens
ttagagctctgatct

SEQ ID NO: 358012 - DNA, 15 bp, Homo sapiens
tttagagctctgatc

SEQ ID NO: 358013 - DNA, 15 bp, Homo sapiens
ctttagagctctgat

SEQ ID NO: 358014 - DNA, 15 bp, Homo sapiens
tctttagagctctga

SEQ ID NO: 358015 - DNA, 15 bp, Homo sapiens
ctctttagagctctg

SEQ ID NO: 358016 - DNA, 15 bp, Homo sapiens
cctctttagagctct

SEQ ID NO: 358017 - DNA, 15 bp, Homo sapiens
ccctctttagagctc

SEQ ID NO: 358018 - DNA, 15 bp, Homo sapiens
accctctttagagct

SEQ ID NO: 358019 - DNA, 15 bp, Homo sapiens
gaccctctttagagc

SEQ ID NO: 358020 - DNA, 15 bp, Homo sapiens
tgaccctctttagag

SEQ ID NO: 358021 - DNA, 15 bp, Homo sapiens
ctgaccctctttaga

SEQ ID NO: 358022 - DNA, 15 bp, Homo sapiens
tctgaccctctttag

SEQ ID NO: 358023 - DNA, 15 bp, Homo sapiens
ctctgaccctcttta

SEQ ID NO: 358024 - DNA, 15 bp, Homo sapiens
gctctgaccctcttt

SEQ ID NO: 358025 - DNA, 15 bp, Homo sapiens
agctctgaccctctt

SEQ ID NO: 358026 - DNA, 15 bp, Homo sapiens
cagctctgaccctct

SEQ ID NO: 358027 - DNA, 15 bp, Homo sapiens
ccagctctgaccctc

SEQ ID NO: 358028 - DNA, 15 bp, Homo sapiens
cccagctctgaccct

SEQ ID NO: 358029 - DNA, 15 bp, Homo sapiens
tcccagctctgaccc

SEQ ID NO: 358030 - DNA, 15 bp, Homo sapiens
gtcccagctctgacc

SEQ ID NO: 358031 - DNA, 15 bp, Homo sapiens
agtcccagctctgac

SEQ ID NO: 358032 - DNA, 15 bp, Homo sapiens
aagtcccagctctga

SEQ ID NO: 358033 - DNA, 15 bp, Homo sapiens
caagtcccagctctg

SEQ ID NO: 358034 - DNA, 15 bp, Homo sapiens
ccaagtcccagctct

SEQ ID NO: 358035 - DNA, 15 bp, Homo sapiens
cccaagtcccagctc

SEQ ID NO: 358036 - DNA, 15 bp, Homo sapiens
gcccaagtcccagct

SEQ ID NO: 358037 - DNA, 15 bp, Homo sapiens
tgcccaagtcccagc

SEQ ID NO: 358038 - DNA, 15 bp, Homo sapiens
ctgcccaagtcccag

SEQ ID NO: 358039 - DNA, 15 bp, Homo sapiens
cctgcccaagtccca

SEQ ID NO: 358040 - DNA, 15 bp, Homo sapiens
acctgcccaagtccc

SEQ ID NO: 358041 - DNA, 15 bp, Homo sapiens
cacctgcccaagtcc

SEQ ID NO: 358042 - DNA, 15 bp, Homo sapiens
ccacctgcccaagtc

SEQ ID NO: 358043 - DNA, 15 bp, Homo sapiens
tccacctgcccaagt

SEQ ID NO: 358044 - DNA, 15 bp, Homo sapiens
gtccacctgcccaag

SEQ ID NO: 358045 - DNA, 15 bp, Homo sapiens
agtccacctgcccaa

SEQ ID NO: 358046 - DNA, 15 bp, Homo sapiens
cagtccacctgccca

SEQ ID NO: 358047 - DNA, 15 bp, Homo sapiens
tcagtccacctgccc

SEQ ID NO: 358048 - DNA, 15 bp, Homo sapiens
gtcagtccacctgcc

SEQ ID NO: 358049 - DNA, 15 bp, Homo sapiens
agtcagtccacctgc

SEQ ID NO: 358050 - DNA, 15 bp, Homo sapiens
gagtcagtccacctg

SEQ ID NO: 358051 - DNA, 15 bp, Homo sapiens
tgagtcagtccacct

SEQ ID NO: 358052 - DNA, 15 bp, Homo sapiens
ttgagtcagtccacc

SEQ ID NO: 358053 - DNA, 15 bp, Homo sapiens
cttgagtcagtccac

SEQ ID NO: 358054 - DNA, 15 bp, Homo sapiens
tcttgagtcagtcca

SEQ ID NO: 358055 - DNA, 15 bp, Homo sapiens
ttcttgagtcagtcc

SEQ ID NO: 358056 - DNA, 15 bp, Homo sapiens
cttcttgagtcagtc

SEQ ID NO: 358057 - DNA, 15 bp, Homo sapiens
gcttcttgagtcagt

SEQ ID NO: 358058 - DNA, 15 bp, Homo sapiens
agcttcttgagtcag

SEQ ID NO: 358059 - DNA, 15 bp, Homo sapiens
gagcttcttgagtca

SEQ ID NO: 358060 - DNA, 15 bp, Homo sapiens
tgagcttcttgagtc

SEQ ID NO: 358061 - DNA, 15 bp, Homo sapiens
atgagcttcttgagt

SEQ ID NO: 358062 - DNA, 15 bp, Homo sapiens
tatgagcttcttgag

SEQ ID NO: 358063 - DNA, 15 bp, Homo sapiens
atatgagcttcttga

SEQ ID NO: 358064 - DNA, 15 bp, Homo sapiens
gatatgagcttcttg

SEQ ID NO: 358065 - DNA, 15 bp, Homo sapiens
ggatatgagcttctt

SEQ ID NO: 358066 - DNA, 15 bp, Homo sapiens
aggatatgagcttct

SEQ ID NO: 358067 - DNA, 15 bp, Homo sapiens
gaggatatgagcttc

SEQ ID NO: 358068 - DNA, 15 bp, Homo sapiens
tgaggatatgagctt

SEQ ID NO: 358069 - DNA, 15 bp, Homo sapiens
atgaggatatgagct

SEQ ID NO: 358070 - DNA, 15 bp, Homo sapiens
catgaggatatgagc

SEQ ID NO: 358071 - DNA, 15 bp, Homo sapiens
gcatgaggatatgag

SEQ ID NO: 358072 - DNA, 15 bp, Homo sapiens
agcatgaggatatga

SEQ ID NO: 358073 - DNA, 15 bp, Homo sapiens
cagcatgaggatatg

SEQ ID NO: 358074 - DNA, 15 bp, Homo sapiens
acagcatgaggatat

SEQ ID NO: 358075 - DNA, 15 bp, Homo sapiens
aacagcatgaggata

SEQ ID NO: 358076 - DNA, 15 bp, Homo sapiens
gaacagcatgaggat

SEQ ID NO: 358077 - DNA, 15 bp, Homo sapiens
agaacagcatgagga

SEQ ID NO: 358078 - DNA, 15 bp, Homo sapiens
gagaacagcatgagg

SEQ ID NO: 358079 - DNA, 15 bp, Homo sapiens
tgagaacagcatgag

SEQ ID NO: 358080 - DNA, 15 bp, Homo sapiens
gtgagaacagcatga

SEQ ID NO: 358081 - DNA, 15 bp, Homo sapiens
agtgagaacagcatg

SEQ ID NO: 358082 - DNA, 15 bp, Homo sapiens
gagtgagaacagcat

SEQ ID NO: 358083 - DNA, 15 bp, Homo sapiens
tgagtgagaacagca

SEQ ID NO: 358084 - DNA, 15 bp, Homo sapiens
gtgagtgagaacagc

SEQ ID NO: 358085 - DNA, 15 bp, Homo sapiens
tgtgagtgagaacag

SEQ ID NO: 358086 - DNA, 15 bp, Homo sapiens
ctgtgagtgagaaca

SEQ ID NO: 358087 - DNA, 15 bp, Homo sapiens
cctgtgagtgagaac

SEQ ID NO: 358088 - DNA, 15 bp, Homo sapiens
gcctgtgagtgagaa

SEQ ID NO: 358089 - DNA, 15 bp, Homo sapiens
tgcctgtgagtgaga

SEQ ID NO: 358090 - DNA, 15 bp, Homo sapiens
ctgcctgtgagtgag

SEQ ID NO: 358091 - DNA, 15 bp, Homo sapiens
tctgcctgtgagtga

SEQ ID NO: 358092 - DNA, 15 bp, Homo sapiens
ttctgcctgtgagtg

SEQ ID NO: 358093 - DNA, 15 bp, Homo sapiens
attctgcctgtgagt

SEQ ID NO: 358094 - DNA, 15 bp, Homo sapiens
aattctgcctgtgag

SEQ ID NO: 358095 - DNA, 15 bp, Homo sapiens
gaattctgcctgtga

SEQ ID NO: 358096 - DNA, 15 bp, Homo sapiens
agaattctgcctgtg

SEQ ID NO: 358097 - DNA, 15 bp, Homo sapiens
cagaattctgcctgt

SEQ ID NO: 358098 - DNA, 15 bp, Homo sapiens
ccagaattctgcctg

SEQ ID NO: 358099 - DNA, 15 bp, Homo sapiens
gccagaattctgcct

SEQ ID NO: 358100 - DNA, 15 bp, Homo sapiens
tgccagaattctgcc

SEQ ID NO: 358101 - DNA, 15 bp, Homo sapiens
ctgccagaattctgc

SEQ ID NO: 358102 - DNA, 15 bp, Homo sapiens
gctgccagaattctg

SEQ ID NO: 358103 - DNA, 15 bp, Homo sapiens
tgctgccagaattct

SEQ ID NO: 358104 - DNA, 15 bp, Homo sapiens
ttgctgccagaattc

SEQ ID NO: 358105 - DNA, 15 bp, Homo sapiens
tttgctgccagaatt

SEQ ID NO: 358106 - DNA, 15 bp, Homo sapiens
atttgctgccagaat

SEQ ID NO: 358107 - DNA, 15 bp, Homo sapiens
catttgctgccagaa

SEQ ID NO: 358108 - DNA, 15 bp, Homo sapiens
tcatttgctgccaga

SEQ ID NO: 358109 - DNA, 15 bp, Homo sapiens
atcatttgctgccag

SEQ ID NO: 358110 - DNA, 15 bp, Homo sapiens
gatcatttgctgcca

SEQ ID NO: 358111 - DNA, 15 bp, Homo sapiens
agatcatttgctgcc

SEQ ID NO: 358112 - DNA, 15 bp, Homo sapiens
cagatcatttgctgc

SEQ ID NO: 358113 - DNA, 15 bp, Homo sapiens
tcagatcatttgctg

SEQ ID NO: 358114 - DNA, 15 bp, Homo sapiens
ttcagatcatttgct

SEQ ID NO: 358115 - DNA, 15 bp, Homo sapiens
attcagatcatttgc

SEQ ID NO: 358116 - DNA, 15 bp, Homo sapiens
aattcagatcatttg

SEQ ID NO: 358117 - DNA, 15 bp, Homo sapiens
taattcagatcattt

SEQ ID NO: 358118 - DNA, 15 bp, Homo sapiens
ctaattcagatcatt

SEQ ID NO: 358119 - DNA, 15 bp, Homo sapiens
tctaattcagatcat

SEQ ID NO: 358120 - DNA, 15 bp, Homo sapiens
ttctaattcagatca

SEQ ID NO: 358121 - DNA, 15 bp, Homo sapiens
cttctaattcagatc

SEQ ID NO: 358122 - DNA, 15 bp, Homo sapiens
acttctaattcagat

SEQ ID NO: 358123 - DNA, 15 bp, Homo sapiens
gacttctaattcaga

SEQ ID NO: 358124 - DNA, 15 bp, Homo sapiens
tgacttctaattcag

SEQ ID NO: 358125 - DNA, 15 bp, Homo sapiens
ctgacttctaattca

SEQ ID NO: 358126 - DNA, 15 bp, Homo sapiens
gctgacttctaattc

SEQ ID NO: 358127 - DNA, 15 bp, Homo sapiens
ggctgacttctaatt

SEQ ID NO: 358128 - DNA, 15 bp, Homo sapiens
cggctgacttctaat

SEQ ID NO: 358129 - DNA, 15 bp, Homo sapiens
tcggctgacttctaa

SEQ ID NO: 358130 - DNA, 15 bp, Homo sapiens
gtcggctgacttcta

SEQ ID NO: 358131 - DNA, 15 bp, Homo sapiens
ggtcggctgacttct

SEQ ID NO: 358132 - DNA, 15 bp, Homo sapiens
aggtcggctgacttc

SEQ ID NO: 358133 - DNA, 15 bp, Homo sapiens
caggtcggctgactt

SEQ ID NO: 358134 - DNA, 15 bp, Homo sapiens
ccaggtcggctgact

SEQ ID NO: 358135 - DNA, 15 bp, Homo sapiens
cccaggtcggctgac

SEQ ID NO: 358136 - DNA, 15 bp, Homo sapiens
acccaggtcggctga

SEQ ID NO: 358137 - DNA, 15 bp, Homo sapiens
gacccaggtcggctg

SEQ ID NO: 358138 - DNA, 15 bp, Homo sapiens
ggacccaggtcggct

SEQ ID NO: 358139 - DNA, 15 bp, Homo sapiens
aggacccaggtcggc

SEQ ID NO: 358140 - DNA, 15 bp, Homo sapiens
caggacccaggtcgg

SEQ ID NO: 358141 - DNA, 15 bp, Homo sapiens
ccaggacccaggtcg

SEQ ID NO: 358142 - DNA, 15 bp, Homo sapiens
cccaggacccaggtc

SEQ ID NO: 358143 - DNA, 15 bp, Homo sapiens
acccaggacccaggt

SEQ ID NO: 358144 - DNA, 15 bp, Homo sapiens
gacccaggacccagg

SEQ ID NO: 358145 - DNA, 15 bp, Homo sapiens
tgacccaggacccag

SEQ ID NO: 358146 - DNA, 15 bp, Homo sapiens
ctgacccaggaccca

SEQ ID NO: 358147 - DNA, 15 bp, Homo sapiens
cctgacccaggaccc

SEQ ID NO: 358148 - DNA, 15 bp, Homo sapiens
ccctgacccaggacc

SEQ ID NO: 358149 - DNA, 15 bp, Homo sapiens
accctgacccaggac

SEQ ID NO: 358150 - DNA, 15 bp, Homo sapiens
gaccctgacccagga

SEQ ID NO: 358151 - DNA, 15 bp, Homo sapiens
agaccctgacccagg

SEQ ID NO: 358152 - DNA, 15 bp, Homo sapiens
cagaccctgacccag

SEQ ID NO: 358153 - DNA, 15 bp, Homo sapiens
gcagaccctgaccca

SEQ ID NO: 358154 - DNA, 15 bp, Homo sapiens
cgcagaccctgaccc

SEQ ID NO: 358155 - DNA, 15 bp, Homo sapiens
acgcagaccctgacc

SEQ ID NO: 358156 - DNA, 15 bp, Homo sapiens
tacgcagaccctgac

SEQ ID NO: 358157 - DNA, 15 bp, Homo sapiens
atacgcagaccctga

SEQ ID NO: 358158 - DNA, 15 bp, Homo sapiens
catacgcagaccctg

SEQ ID NO: 358159 - DNA, 15 bp, Homo sapiens
tcatacgcagaccct

SEQ ID NO: 358160 - DNA, 15 bp, Homo sapiens
ctcatacgcagaccc

SEQ ID NO: 358161 - DNA, 15 bp, Homo sapiens
actcatacgcagacc

SEQ ID NO: 358162 - DNA, 15 bp, Homo sapiens
cactcatacgcagac

SEQ ID NO: 358163 - DNA, 15 bp, Homo sapiens
gcactcatacgcaga

SEQ ID NO: 358164 - DNA, 15 bp, Homo sapiens
tgcactcatacgcag

SEQ ID NO: 358165 - DNA, 15 bp, Homo sapiens
ctgcactcatacgca

SEQ ID NO: 358166 - DNA, 15 bp, Homo sapiens
gctgcactcatacgc

SEQ ID NO: 358167 - DNA, 15 bp, Homo sapiens
agctgcactcatacg

SEQ ID NO: 358168 - DNA, 15 bp, Homo sapiens
tagctgcactcatac

SEQ ID NO: 358169 - DNA, 15 bp, Homo sapiens
atagctgcactcata

SEQ ID NO: 358170 - DNA, 15 bp, Homo sapiens
catagctgcactcat

SEQ ID NO: 358171 - DNA, 15 bp, Homo sapiens
tcatagctgcactca

SEQ ID NO: 358172 - DNA, 15 bp, Homo sapiens
gtcatagctgcactc

SEQ ID NO: 358173 - DNA, 15 bp, Homo sapiens
cgtcatagctgcact

SEQ ID NO: 358174 - DNA, 15 bp, Homo sapiens
gcgtcatagctgcac

SEQ ID NO: 358175 - DNA, 15 bp, Homo sapiens
tgcgtcatagctgca

SEQ ID NO: 358176 - DNA, 15 bp, Homo sapiens
ttgcgtcatagctgc

SEQ ID NO: 358177 - DNA, 15 bp, Homo sapiens
tttgcgtcatagctg

SEQ ID NO: 358178 - DNA, 15 bp, Homo sapiens
ttttgcgtcatagct

SEQ ID NO: 358179 - DNA, 15 bp, Homo sapiens
cttttgcgtcatagc

SEQ ID NO: 358180 - DNA, 15 bp, Homo sapiens
tcttttgcgtcatag

SEQ ID NO: 358181 - DNA, 15 bp, Homo sapiens
ctcttttgcgtcata

SEQ ID NO: 358182 - DNA, 15 bp, Homo sapiens
cctcttttgcgtcat

SEQ ID NO: 358183 - DNA, 15 bp, Homo sapiens
ccctcttttgcgtca

SEQ ID NO: 358184 - DNA, 15 bp, Homo sapiens
accctcttttgcgtc

SEQ ID NO: 358185 - DNA, 15 bp, Homo sapiens
caccctcttttgcgt

SEQ ID NO: 358186 - DNA, 15 bp, Homo sapiens
tcaccctcttttgcg

SEQ ID NO: 358187 - DNA, 15 bp, Homo sapiens
ctcaccctcttttgc

SEQ ID NO: 358188 - DNA, 15 bp, Homo sapiens
cctcaccctcttttg

SEQ ID NO: 358189 - DNA, 15 bp, Homo sapiens
gcctcaccctctttt

SEQ ID NO: 358190 - DNA, 15 bp, Homo sapiens
ggcctcaccctcttt

SEQ ID NO: 358191 - DNA, 15 bp, Homo sapiens
tggcctcaccctctt

SEQ ID NO: 358192 - DNA, 15 bp, Homo sapiens
ctggcctcaccctct

SEQ ID NO: 358193 - DNA, 15 bp, Homo sapiens
tctggcctcaccctc

SEQ ID NO: 358194 - DNA, 15 bp, Homo sapiens
ctctggcctcaccct

SEQ ID NO: 358195 - DNA, 15 bp, Homo sapiens
gctctggcctcaccc

SEQ ID NO: 358196 - DNA, 15 bp, Homo sapiens
tgctctggcctcacc

SEQ ID NO: 358197 - DNA, 15 bp, Homo sapiens
atgctctggcctcac

SEQ ID NO: 358198 - DNA, 15 bp, Homo sapiens
gatgctctggcctca

SEQ ID NO: 358199 - DNA, 15 bp, Homo sapiens
ggatgctctggcctc

SEQ ID NO: 358200 - DNA, 15 bp, Homo sapiens
gggatgctctggcct

SEQ ID NO: 358201 - DNA, 15 bp, Homo sapiens
ggggatgctctggcc

SEQ ID NO: 358202 - DNA, 15 bp, Homo sapiens
tggggatgctctggc

SEQ ID NO: 358203 - DNA, 15 bp, Homo sapiens
ttggggatgctctgg

SEQ ID NO: 358204 - DNA, 15 bp, Homo sapiens
cttggggatgctctg

SEQ ID NO: 358205 - DNA, 15 bp, Homo sapiens
gcttggggatgctct

SEQ ID NO: 358206 - DNA, 15 bp, Homo sapiens
ggcttggggatgctc

SEQ ID NO: 358207 - DNA, 15 bp, Homo sapiens
cggcttggggatgct

SEQ ID NO: 358208 - DNA, 15 bp, Homo sapiens
gcggcttggggatgc

SEQ ID NO: 358209 - DNA, 15 bp, Homo sapiens
agcggcttggggatg

SEQ ID NO: 358210 - DNA, 15 bp, Homo sapiens
aagcggcttggggat

SEQ ID NO: 358211 - DNA, 15 bp, Homo sapiens
gaagcggcttgggga

SEQ ID NO: 358212 - DNA, 15 bp, Homo sapiens
ggaagcggcttgggg

SEQ ID NO: 358213 - DNA, 15 bp, Homo sapiens
tggaagcggcttggg

SEQ ID NO: 358214 - DNA, 15 bp, Homo sapiens
ctggaagcggcttgg

SEQ ID NO: 358215 - DNA, 15 bp, Homo sapiens
gctggaagcggcttg

SEQ ID NO: 358216 - DNA, 15 bp, Homo sapiens
ggctggaagcggctt

SEQ ID NO: 358217 - DNA, 15 bp, Homo sapiens
gggctggaagcggct

SEQ ID NO: 358218 - DNA, 15 bp, Homo sapiens
agggctggaagcggc

SEQ ID NO: 358219 - DNA, 15 bp, Homo sapiens
aagggctggaagcgg

SEQ ID NO: 358220 - DNA, 15 bp, Homo sapiens
gaagggctggaagcg

SEQ ID NO: 358221 - DNA, 15 bp, Homo sapiens
agaagggctggaagc

SEQ ID NO: 358222 - DNA, 15 bp, Homo sapiens
cagaagggctggaag

SEQ ID NO: 358223 - DNA, 15 bp, Homo sapiens
acagaagggctggaa

SEQ ID NO: 358224 - DNA, 15 bp, Homo sapiens
aacagaagggctgga

SEQ ID NO: 358225 - DNA, 15 bp, Homo sapiens
caacagaagggctgg

SEQ ID NO: 358226 - DNA, 15 bp, Homo sapiens
gcaacagaagggctg

SEQ ID NO: 358227 - DNA, 15 bp, Homo sapiens
tgcaacagaagggct

SEQ ID NO: 358228 - DNA, 15 bp, Homo sapiens
gtgcaacagaagggc

SEQ ID NO: 358229 - DNA, 15 bp, Homo sapiens
agtgcaacagaaggg

SEQ ID NO: 358230 - DNA, 15 bp, Homo sapiens
gagtgcaacagaagg

SEQ ID NO: 358231 - DNA, 15 bp, Homo sapiens
ggagtgcaacagaag

SEQ ID NO: 358232 - DNA, 15 bp, Homo sapiens
tggagtgcaacagaa

SEQ ID NO: 358233 - DNA, 15 bp, Homo sapiens
gtggagtgcaacaga

SEQ ID NO: 358234 - DNA, 15 bp, Homo sapiens
tgtggagtgcaacag

SEQ ID NO: 358235 - DNA, 15 bp, Homo sapiens
gtgtggagtgcaaca

SEQ ID NO: 358236 - DNA, 15 bp, Homo sapiens
ggtgtggagtgcaac

SEQ ID NO: 358237 - DNA, 15 bp, Homo sapiens
aggtgtggagtgcaa

SEQ ID NO: 358238 - DNA, 15 bp, Homo sapiens
aaggtgtggagtgca

SEQ ID NO: 358239 - DNA, 15 bp, Homo sapiens
caaggtgtggagtgc

SEQ ID NO: 358240 - DNA, 15 bp, Homo sapiens
acaaggtgtggagtg

SEQ ID NO: 358241 - DNA, 15 bp, Homo sapiens
aacaaggtgtggagt

SEQ ID NO: 358242 - DNA, 15 bp, Homo sapiens
gaacaaggtgtggag

SEQ ID NO: 358243 - DNA, 15 bp, Homo sapiens
agaacaaggtgtgga

SEQ ID NO: 358244 - DNA, 15 bp, Homo sapiens
gagaacaaggtgtgg

SEQ ID NO: 358245 - DNA, 15 bp, Homo sapiens
ggagaacaaggtgtg

SEQ ID NO: 358246 - DNA, 15 bp, Homo sapiens
tggagaacaaggtgt

SEQ ID NO: 358247 - DNA, 15 bp, Homo sapiens
ttggagaacaaggtg

SEQ ID NO: 358248 - DNA, 15 bp, Homo sapiens
attggagaacaaggt

SEQ ID NO: 358249 - DNA, 15 bp, Homo sapiens
cattggagaacaagg

SEQ ID NO: 358250 - DNA, 15 bp, Homo sapiens
gcattggagaacaag

SEQ ID NO: 358251 - DNA, 15 bp, Homo sapiens
tgcattggagaacaa

SEQ ID NO: 358252 - DNA, 15 bp, Homo sapiens
atgcattggagaaca

SEQ ID NO: 358253 - DNA, 15 bp, Homo sapiens
aatgcattggagaac

SEQ ID NO: 358254 - DNA, 15 bp, Homo sapiens
caatgcattggagaa

SEQ ID NO: 358255 - DNA, 15 bp, Homo sapiens
tcaatgcattggaga

SEQ ID NO: 358256 - DNA, 15 bp, Homo sapiens
gtcaatgcattggag

SEQ ID NO: 358257 - DNA, 15 bp, Homo sapiens
ggtcaatgcattgga

SEQ ID NO: 358258 - DNA, 15 bp, Homo sapiens
tggtcaatgcattgg

SEQ ID NO: 358259 - DNA, 15 bp, Homo sapiens
ctggtcaatgcattg

SEQ ID NO: 358260 - DNA, 15 bp, Homo sapiens
tctggtcaatgcatt

SEQ ID NO: 358261 - DNA, 15 bp, Homo sapiens
ttctggtcaatgcat

SEQ ID NO: 358262 - DNA, 15 bp, Homo sapiens
tttctggtcaatgca

SEQ ID NO: 358263 - DNA, 15 bp, Homo sapiens
ctttctggtcaatgc

SEQ ID NO: 358264 - DNA, 15 bp, Homo sapiens
cctttctggtcaatg

SEQ ID NO: 358265 - DNA, 15 bp, Homo sapiens
gcctttctggtcaat

SEQ ID NO: 358266 - DNA, 15 bp, Homo sapiens
ggcctttctggtcaa

SEQ ID NO: 358267 - DNA, 15 bp, Homo sapiens
gggcctttctggtca

SEQ ID NO: 358268 - DNA, 15 bp, Homo sapiens
tgggcctttctggtc

SEQ ID NO: 358269 - DNA, 15 bp, Homo sapiens
gtgggcctttctggt

SEQ ID NO: 358270 - DNA, 15 bp, Homo sapiens
ggtgggcctttctgg

SEQ ID NO: 358271 - DNA, 15 bp, Homo sapiens
tggtgggcctttctg

SEQ ID NO: 358272 - DNA, 15 bp, Homo sapiens
atggtgggcctttct

SEQ ID NO: 358273 - DNA, 15 bp, Homo sapiens
tatggtgggcctttc

SEQ ID NO: 358274 - DNA, 15 bp, Homo sapiens
gtatggtgggccttt

SEQ ID NO: 358275 - DNA, 15 bp, Homo sapiens
tgtatggtgggcctt

SEQ ID NO: 358276 - DNA, 15 bp, Homo sapiens
gtgtatggtgggcct

SEQ ID NO: 358277 - DNA, 15 bp, Homo sapiens
agtgtatggtgggcc

SEQ ID NO: 358278 - DNA, 15 bp, Homo sapiens
tagtgtatggtgggc

SEQ ID NO: 358279 - DNA, 15 bp, Homo sapiens
ctagtgtatggtggg

SEQ ID NO: 358280 - DNA, 15 bp, Homo sapiens
gctagtgtatggtgg

SEQ ID NO: 358281 - DNA, 15 bp, Homo sapiens
tgctagtgtatggtg

SEQ ID NO: 358282 - DNA, 15 bp, Homo sapiens
atgctagtgtatggt

SEQ ID NO: 358283 - DNA, 15 bp, Homo sapiens
aatgctagtgtatgg

SEQ ID NO: 358284 - DNA, 15 bp, Homo sapiens
taatgctagtgtatg

SEQ ID NO: 358285 - DNA, 15 bp, Homo sapiens
ataatgctagtgtat

SEQ ID NO: 358286 - DNA, 15 bp, Homo sapiens
tataatgctagtgta

SEQ ID NO: 358287 - DNA, 15 bp, Homo sapiens
ttataatgctagtgt

SEQ ID NO: 358288 - DNA, 15 bp, Homo sapiens
tttataatgctagtg

SEQ ID NO: 358289 - DNA, 15 bp, Homo sapiens
ttttataatgctagt

SEQ ID NO: 358290 - DNA, 15 bp, Homo sapiens
attttataatgctag

SEQ ID NO: 358291 - DNA, 15 bp, Homo sapiens
tattttataatgcta

SEQ ID NO: 358292 - DNA, 15 bp, Homo sapiens
atattttataatgct

SEQ ID NO: 358293 - DNA, 15 bp, Homo sapiens
aatattttataatgc

SEQ ID NO: 358294 - DNA, 15 bp, Homo sapiens
caatattttataatg

SEQ ID NO: 358295 - DNA, 15 bp, Homo sapiens
gcaatattttataat

SEQ ID NO: 358296 - DNA, 15 bp, Homo sapiens
tgcaatattttataa

SEQ ID NO: 358297 - DNA, 15 bp, Homo sapiens
gtgcaatattttata

SEQ ID NO: 358298 - DNA, 15 bp, Homo sapiens
tgtgcaatattttat

SEQ ID NO: 358299 - DNA, 15 bp, Homo sapiens
ctgtgcaatatttta

SEQ ID NO: 358300 - DNA, 15 bp, Homo sapiens
cctgtgcaatatttt

SEQ ID NO: 358301 - DNA, 15 bp, Homo sapiens
tcctgtgcaatattt

SEQ ID NO: 358302 - DNA, 15 bp, Homo sapiens
atcctgtgcaatatt

SEQ ID NO: 358303 - DNA, 15 bp, Homo sapiens
catcctgtgcaatat

SEQ ID NO: 358304 - DNA, 15 bp, Homo sapiens
acatcctgtgcaata

SEQ ID NO: 358305 - DNA, 15 bp, Homo sapiens
cacatcctgtgcaat

SEQ ID NO: 358306 - DNA, 15 bp, Homo sapiens
acacatcctgtgcaa

SEQ ID NO: 358307 - DNA, 15 bp, Homo sapiens
gacacatcctgtgca

SEQ ID NO: 358308 - DNA, 15 bp, Homo sapiens
ggacacatcctgtgc

SEQ ID NO: 358309 - DNA, 15 bp, Homo sapiens
cggacacatcctgtg

SEQ ID NO: 358310 - DNA, 15 bp, Homo sapiens
tcggacacatcctgt

SEQ ID NO: 358311 - DNA, 15 bp, Homo sapiens
ctcggacacatcctg

SEQ ID NO: 358312 - DNA, 15 bp, Homo sapiens
cctcggacacatcct

SEQ ID NO: 358313 - DNA, 15 bp, Homo sapiens
tcctcggacacatcc

SEQ ID NO: 358314 - DNA, 15 bp, Homo sapiens
atcctcggacacatc

SEQ ID NO: 358315 - DNA, 15 bp, Homo sapiens
tatcctcggacacat

SEQ ID NO: 358316 - DNA, 15 bp, Homo sapiens
ttatcctcggacaca

SEQ ID NO: 358317 - DNA, 15 bp, Homo sapiens
tttatcctcggacac

SEQ ID NO: 358318 - DNA, 15 bp, Homo sapiens
atttatcctcggaca

SEQ ID NO: 358319 - DNA, 15 bp, Homo sapiens
aatttatcctcggac

SEQ ID NO: 358320 - DNA, 15 bp, Homo sapiens
taatttatcctcgga

SEQ ID NO: 358321 - DNA, 15 bp, Homo sapiens
ataatttatcctcgg

SEQ ID NO: 358322 - DNA, 15 bp, Homo sapiens
cataatttatcctcg

SEQ ID NO: 358323 - DNA, 15 bp, Homo sapiens
tcataatttatcctc

SEQ ID NO: 358324 - DNA, 15 bp, Homo sapiens
atcataatttatcct

SEQ ID NO: 358325 - DNA, 15 bp, Homo sapiens
tatcataatttatcc

SEQ ID NO: 358326 - DNA, 15 bp, Homo sapiens
ctatcataatttatc

SEQ ID NO: 358327 - DNA, 15 bp, Homo sapiens
gctatcataatttat

SEQ ID NO: 358328 - DNA, 15 bp, Homo sapiens
tgctatcataattta

SEQ ID NO: 358329 - DNA, 15 bp, Homo sapiens
atgctatcataattt

SEQ ID NO: 358330 - DNA, 15 bp, Homo sapiens
tatgctatcataatt

SEQ ID NO: 358331 - DNA, 15 bp, Homo sapiens
gtatgctatcataat

SEQ ID NO: 358332 - DNA, 15 bp, Homo sapiens
tgtatgctatcataa

SEQ ID NO: 358333 - DNA, 15 bp, Homo sapiens
ctgtatgctatcata

SEQ ID NO: 358334 - DNA, 15 bp, Homo sapiens
tctgtatgctatcat

SEQ ID NO: 358335 - DNA, 15 bp, Homo sapiens
atctgtatgctatca

SEQ ID NO: 358336 - DNA, 15 bp, Homo sapiens
tatctgtatgctatc

SEQ ID NO: 358337 - DNA, 15 bp, Homo sapiens
ttatctgtatgctat

SEQ ID NO: 358338 - DNA, 15 bp, Homo sapiens
tttatctgtatgcta

SEQ ID NO: 358339 - DNA, 15 bp, Homo sapiens
ctttatctgtatgct

SEQ ID NO: 358340 - DNA, 15 bp, Homo sapiens
tctttatctgtatgc

SEQ ID NO: 358341 - DNA, 15 bp, Homo sapiens
atctttatctgtatg

SEQ ID NO: 358342 - DNA, 15 bp, Homo sapiens
aatctttatctgtat

SEQ ID NO: 358343 - DNA, 15 bp, Homo sapiens
aaatctttatctgta

SEQ ID NO: 358344 - DNA, 15 bp, Homo sapiens
aaaatctttatctgt

SEQ ID NO: 358345 - DNA, 15 bp, Homo sapiens
taaaatctttatctg

SEQ ID NO: 358346 - DNA, 15 bp, Homo sapiens
ataaaatctttatct

SEQ ID NO: 358347 - DNA, 15 bp, Homo sapiens
tataaaatctttatc

SEQ ID NO: 358348 - DNA, 15 bp, Homo sapiens
ctataaaatctttat

SEQ ID NO: 358349 - DNA, 15 bp, Homo sapiens
actataaaatcttta

SEQ ID NO: 358350 - DNA, 15 bp, Homo sapiens
gaactataaaatctt

SEQ ID NO: 358351 - DNA, 15 bp, Homo sapiens
tgaactataaaatct

SEQ ID NO: 358352 - DNA, 15 bp, Homo sapiens
ttgaactataaaatc

SEQ ID NO: 358353 - DNA, 15 bp, Homo sapiens
cttgaactataaaat

SEQ ID NO: 358354 - DNA, 15 bp, Homo sapiens
tcttgaactataaaa

SEQ ID NO: 358355 - DNA, 15 bp, Homo sapiens
ttcttgaactataaa

SEQ ID NO: 358356 - DNA, 15 bp, Homo sapiens
gttcttgaactataa

SEQ ID NO: 358357 - DNA, 15 bp, Homo sapiens
tgttcttgaactata

SEQ ID NO: 358358 - DNA, 15 bp, Homo sapiens
atgttcttgaactat

SEQ ID NO: 358359 - DNA, 15 bp, Homo sapiens
gatgttcttgaacta

SEQ ID NO: 358360 - DNA, 15 bp, Homo sapiens
agatgttcttgaact

SEQ ID NO: 358361 - DNA, 15 bp, Homo sapiens
tagatgttcttgaac

SEQ ID NO: 358362 - DNA, 15 bp, Homo sapiens
atagatgttcttgaa

SEQ ID NO: 358363 - DNA, 15 bp, Homo sapiens
tatagatgttcttga

SEQ ID NO: 358364 - DNA, 15 bp, Homo sapiens
ctatagatgttcttg

SEQ ID NO: 358365 - DNA, 15 bp, Homo sapiens
tctatagatgttctt

SEQ ID NO: 358366 - DNA, 15 bp, Homo sapiens
ttctatagatgttct

SEQ ID NO: 358367 - DNA, 15 bp, Homo sapiens
cttctatagatgttc

SEQ ID NO: 358368 - DNA, 15 bp, Homo sapiens
ccttctatagatgtt

SEQ ID NO: 358369 - DNA, 15 bp, Homo sapiens
accttctatagatgt

SEQ ID NO: 358370 - DNA, 15 bp, Homo sapiens
caccttctatagatg

SEQ ID NO: 358371 - DNA, 15 bp, Homo sapiens
tcaccttctatagat

SEQ ID NO: 358372 - DNA, 15 bp, Homo sapiens
atcaccttctataga

SEQ ID NO: 358373 - DNA, 15 bp, Homo sapiens
aatcaccttctatag

SEQ ID NO: 358374 - DNA, 15 bp, Homo sapiens
taatcaccttctata

SEQ ID NO: 358375 - DNA, 15 bp, Homo sapiens
ataatcaccttctat

SEQ ID NO: 358376 - DNA, 15 bp, Homo sapiens
cataatcaccttcta

SEQ ID NO: 358377 - DNA, 15 bp, Homo sapiens
gcataatcaccttct

SEQ ID NO: 358378 - DNA, 15 bp, Homo sapiens
ggcataatcaccttc

SEQ ID NO: 358379 - DNA, 15 bp, Homo sapiens
gggcataatcacctt

SEQ ID NO: 358380 - DNA, 15 bp, Homo sapiens
agggcataatcacct

SEQ ID NO: 358381 - DNA, 15 bp, Homo sapiens
aagggcataatcacc

SEQ ID NO: 358382 - DNA, 15 bp, Homo sapiens
taagggcataatcac

SEQ ID NO: 358383 - DNA, 15 bp, Homo sapiens
ttaagggcataatca

SEQ ID NO: 358384 - DNA, 15 bp, Homo sapiens
cttaagggcataatc

SEQ ID NO: 358385 - DNA, 15 bp, Homo sapiens
tcttaagggcataat

SEQ ID NO: 358386 - DNA, 15 bp, Homo sapiens
ttcttaagggcataa

SEQ ID NO: 358387 - DNA, 15 bp, Homo sapiens
tttcttaagggcata

SEQ ID NO: 358388 - DNA, 15 bp, Homo sapiens
atttcttaagggcat

SEQ ID NO: 358389 - DNA, 15 bp, Homo sapiens
tatttcttaagggca

SEQ ID NO: 358390 - DNA, 15 bp, Homo sapiens
atatttcttaagggc

SEQ ID NO: 358391 - DNA, 15 bp, Homo sapiens
tatatttcttaaggg

SEQ ID NO: 358392 - DNA, 15 bp, Homo sapiens
gtatatttcttaagg

SEQ ID NO: 358393 - DNA, 15 bp, Homo sapiens
agtatatttcttaag

SEQ ID NO: 358394 - DNA, 15 bp, Homo sapiens
tagtatatttcttaa

SEQ ID NO: 358395 - DNA, 15 bp, Homo sapiens
ttagtatatttctta

SEQ ID NO: 358396 - DNA, 15 bp, Homo sapiens
tttagtatatttctt

SEQ ID NO: 358397 - DNA, 15 bp, Homo sapiens
atttagtatatttct

SEQ ID NO: 358398 - DNA, 15 bp, Homo sapiens
catttagtatatttc

SEQ ID NO: 358399 - DNA, 15 bp, Homo sapiens
gcatttagtatattt

SEQ ID NO: 358400 - DNA, 15 bp, Homo sapiens
agcatttagtatatt

SEQ ID NO: 358401 - DNA, 15 bp, Homo sapiens
cagcatttagtatat

SEQ ID NO: 358402 - DNA, 15 bp, Homo sapiens
acagcatttagtata

SEQ ID NO: 358403 - DNA, 15 bp, Homo sapiens
cacagcatttagtat

SEQ ID NO: 358404 - DNA, 15 bp, Homo sapiens
acacagcatttagta

SEQ ID NO: 358405 - DNA, 15 bp, Homo sapiens
aacacagcatttagt

SEQ ID NO: 358406 - DNA, 15 bp, Homo sapiens
aaacacagcatttag

SEQ ID NO: 358407 - DNA, 15 bp, Homo sapiens
taaacacagcattta

SEQ ID NO: 358408 - DNA, 15 bp, Homo sapiens
ctaaacacagcattt

SEQ ID NO: 358409 - DNA, 15 bp, Homo sapiens
actaaacacagcatt

SEQ ID NO: 358410 - DNA, 15 bp, Homo sapiens
cactaaacacagcat

SEQ ID NO: 358411 - DNA, 15 bp, Homo sapiens
acactaaacacagca

SEQ ID NO: 358412 - DNA, 15 bp, Homo sapiens
tacactaaacacagc

SEQ ID NO: 358413 - DNA, 15 bp, Homo sapiens
ttacactaaacacag

SEQ ID NO: 358414 - DNA, 15 bp, Homo sapiens
tttacactaaacaca

SEQ ID NO: 358415 - DNA, 15 bp, Homo sapiens
ctttacactaaacac

SEQ ID NO: 358416 - DNA, 15 bp, Homo sapiens
actttacactaaaca

SEQ ID NO: 358417 - DNA, 15 bp, Homo sapiens
gactttacactaaac

SEQ ID NO: 358418 - DNA, 15 bp, Homo sapiens
tgactttacactaaa

SEQ ID NO: 358419 - DNA, 15 bp, Homo sapiens
atgactttacactaa

SEQ ID NO: 358420 - DNA, 15 bp, Homo sapiens
tatgactttacacta

SEQ ID NO: 358421 - DNA, 15 bp, Homo sapiens
ttatgactttacact

SEQ ID NO: 358422 - DNA, 15 bp, Homo sapiens
attatgactttacac

SEQ ID NO: 358423 - DNA, 15 bp, Homo sapiens
gattatgactttaca

SEQ ID NO: 358424 - DNA, 15 bp, Homo sapiens
ggattatgactttac

SEQ ID NO: 358425 - DNA, 15 bp, Homo sapiens
tggattatgacttta

SEQ ID NO: 358426 - DNA, 15 bp, Homo sapiens
gtggattatgacttt

SEQ ID NO: 358427 - DNA, 15 bp, Homo sapiens
tgtggattatgactt

SEQ ID NO: 358428 - DNA, 15 bp, Homo sapiens
gtgtggattatgact

SEQ ID NO: 358429 - DNA, 15 bp, Homo sapiens
agtgtggattatgac

SEQ ID NO: 358430 - DNA, 15 bp, Homo sapiens
cagtgtggattatga

SEQ ID NO: 358431 - DNA, 15 bp, Homo sapiens
ccagtgtggattatg

SEQ ID NO: 358432 - DNA, 15 bp, Homo sapiens
accagtgtggattat

SEQ ID NO: 358433 - DNA, 15 bp, Homo sapiens
gaccagtgtggatta

SEQ ID NO: 358434 - DNA, 15 bp, Homo sapiens
ggaccagtgtggatt

SEQ ID NO: 358435 - DNA, 15 bp, Homo sapiens
aggaccagtgtggat

SEQ ID NO: 358436 - DNA, 15 bp, Homo sapiens
aaggaccagtgtgga

SEQ ID NO: 358437 - DNA, 15 bp, Homo sapiens
taaggaccagtgtgg

SEQ ID NO: 358438 - DNA, 15 bp, Homo sapiens
gtaaggaccagtgtg

SEQ ID NO: 358439 - DNA, 15 bp, Homo sapiens
ggtaaggaccagtgt

SEQ ID NO: 358440 - DNA, 15 bp, Homo sapiens
aggtaaggaccagtg

SEQ ID NO: 358441 - DNA, 15 bp, Homo sapiens
gaggtaaggaccagt

SEQ ID NO: 358442 - DNA, 15 bp, Homo sapiens
ggaggtaaggaccag

SEQ ID NO: 358443 - DNA, 15 bp, Homo sapiens
gggaggtaaggacca

SEQ ID NO: 358444 - DNA, 15 bp, Homo sapiens
tgggaggtaaggacc

SEQ ID NO: 358445 - DNA, 15 bp, Homo sapiens
ttgggaggtaaggac

SEQ ID NO: 358446 - DNA, 15 bp, Homo sapiens
cttgggaggtaagga

SEQ ID NO: 358447 - DNA, 15 bp, Homo sapiens
ccttgggaggtaagg

SEQ ID NO: 358448 - DNA, 15 bp, Homo sapiens
accttgggaggtaag

SEQ ID NO: 358449 - DNA, 15 bp, Homo sapiens
aaccttgggaggtaa

SEQ ID NO: 358450 - DNA, 15 bp, Homo sapiens
taaccttgggaggta

SEQ ID NO: 358451 - DNA, 15 bp, Homo sapiens
ttaaccttgggaggt

SEQ ID NO: 358452 - DNA, 15 bp, Homo sapiens
tttaaccttgggagg

SEQ ID NO: 358453 - DNA, 15 bp, Homo sapiens
ttttaaccttgggag

SEQ ID NO: 358454 - DNA, 15 bp, Homo sapiens
cttttaaccttggga

SEQ ID NO: 358455 - DNA, 15 bp, Homo sapiens
gcttttaaccttggg

SEQ ID NO: 358456 - DNA, 15 bp, Homo sapiens
tgcttttaaccttgg

SEQ ID NO: 358457 - DNA, 15 bp, Homo sapiens
atgcttttaaccttg

SEQ ID NO: 358458 - DNA, 15 bp, Homo sapiens
tatgcttttaacctt

SEQ ID NO: 358459 - DNA, 15 bp, Homo sapiens
gtatgcttttaacct

SEQ ID NO: 358460 - DNA, 15 bp, Homo sapiens
agtatgcttttaacc

SEQ ID NO: 358461 - DNA, 15 bp, Homo sapiens
cagtatgcttttaac

SEQ ID NO: 358462 - DNA, 15 bp, Homo sapiens
acagtatgcttttaa

SEQ ID NO: 358463 - DNA, 15 bp, Homo sapiens
tacagtatgctttta

SEQ ID NO: 358464 - DNA, 15 bp, Homo sapiens
atacagtatgctttt

SEQ ID NO: 358465 - DNA, 15 bp, Homo sapiens
aatacagtatgcttt

SEQ ID NO: 358466 - DNA, 15 bp, Homo sapiens
aaatacagtatgctt

SEQ ID NO: 358467 - DNA, 15 bp, Homo sapiens
gaaatacagtatgct

SEQ ID NO: 358468 - DNA, 15 bp, Homo sapiens
agaaatacagtatgc

SEQ ID NO: 358469 - DNA, 15 bp, Homo sapiens
tagaaatacagtatg

SEQ ID NO: 358470 - DNA, 15 bp, Homo sapiens
ttagaaatacagtat

SEQ ID NO: 358471 - DNA, 15 bp, Homo sapiens
tttagaaatacagta

SEQ ID NO: 358472 - DNA, 15 bp, Homo sapiens
ctttagaaatacagt

SEQ ID NO: 358473 - DNA, 15 bp, Homo sapiens
actttagaaatacag

SEQ ID NO: 358474 - DNA, 15 bp, Homo sapiens
cactttagaaataca

SEQ ID NO: 358475 - DNA, 15 bp, Homo sapiens
acactttagaaatac

SEQ ID NO: 358476 - DNA, 15 bp, Homo sapiens
aacactttagaaata

SEQ ID NO: 358477 - DNA, 15 bp, Homo sapiens
gaacactttagaaat

SEQ ID NO: 358478 - DNA, 15 bp, Homo sapiens
agaacactttagaaa

SEQ ID NO: 358479 - DNA, 15 bp, Homo sapiens
cagaacactttagaa

SEQ ID NO: 358480 - DNA, 15 bp, Homo sapiens
ccagaacactttaga

SEQ ID NO: 358481 - DNA, 15 bp, Homo sapiens
gccagaacactttag

SEQ ID NO: 358482 - DNA, 15 bp, Homo sapiens
tgccagaacacttta

SEQ ID NO: 358483 - DNA, 15 bp, Homo sapiens
ctgccagaacacttt

SEQ ID NO: 358484 - DNA, 15 bp, Homo sapiens
tctgccagaacactt

SEQ ID NO: 358485 - DNA, 15 bp, Homo sapiens
ttctgccagaacact

SEQ ID NO: 358486 - DNA, 15 bp, Homo sapiens
attctgccagaacac

SEQ ID NO: 358487 - DNA, 15 bp, Homo sapiens
tattctgccagaaca

SEQ ID NO: 358488 - DNA, 15 bp, Homo sapiens
atattctgccagaac

SEQ ID NO: 358489 - DNA, 15 bp, Homo sapiens
aatattctgccagaa

SEQ ID NO: 358490 - DNA, 15 bp, Homo sapiens
gaatattctgccaga

SEQ ID NO: 358491 - DNA, 15 bp, Homo sapiens
agaatattctgccag

SEQ ID NO: 358492 - DNA, 15 bp, Homo sapiens
aagaatattctgcca

SEQ ID NO: 358493 - DNA, 15 bp, Homo sapiens
gaagaatattctgcc

SEQ ID NO: 358494 - DNA, 15 bp, Homo sapiens
cgaagaatattctgc

SEQ ID NO: 358495 - DNA, 15 bp, Homo sapiens
acgaagaatattctg

SEQ ID NO: 358496 - DNA, 15 bp, Homo sapiens
gacgaagaatattct

SEQ ID NO: 358497 - DNA, 15 bp, Homo sapiens
cgacgaagaatattc

SEQ ID NO: 358498 - DNA, 15 bp, Homo sapiens
ccgacgaagaatatt

SEQ ID NO: 358499 - DNA, 15 bp, Homo sapiens
cccgacgaagaatat

SEQ ID NO: 358500 - DNA, 15 bp, Homo sapiens
gcccgacgaagaata

SEQ ID NO: 358501 - DNA, 15 bp, Homo sapiens
tgcccgacgaagaat

SEQ ID NO: 358502 - DNA, 15 bp, Homo sapiens
gtgcccgacgaagaa

SEQ ID NO: 358503 - DNA, 15 bp, Homo sapiens
ggtgcccgacgaaga

SEQ ID NO: 358504 - DNA, 15 bp, Homo sapiens
aggtgcccgacgaag

SEQ ID NO: 358505 - DNA, 15 bp, Homo sapiens
caggtgcccgacgaa

SEQ ID NO: 358506 - DNA, 15 bp, Homo sapiens
ccaggtgcccgacga

SEQ ID NO: 358507 - DNA, 15 bp, Homo sapiens
gccaggtgcccgacg

SEQ ID NO: 358508 - DNA, 15 bp, Homo sapiens
agccaggtgcccgac

SEQ ID NO: 358509 - DNA, 15 bp, Homo sapiens
aagccaggtgcccga

SEQ ID NO: 358510 - DNA, 15 bp, Homo sapiens
caagccaggtgcccg

SEQ ID NO: 358511 - DNA, 15 bp, Homo sapiens
gcaagccaggtgccc

SEQ ID NO: 358512 - DNA, 15 bp, Homo sapiens
tgcaagccaggtgcc

SEQ ID NO: 358513 - DNA, 15 bp, Homo sapiens
gtgcaagccaggtgc

SEQ ID NO: 358514 - DNA, 15 bp, Homo sapiens
agtgcaagccaggtg

SEQ ID NO: 358515 - DNA, 15 bp, Homo sapiens
tagtgcaagccaggt

SEQ ID NO: 358516 - DNA, 15 bp, Homo sapiens
ttagtgcaagccagg

SEQ ID NO: 358517 - DNA, 15 bp, Homo sapiens
tttagtgcaagccag

SEQ ID NO: 358518 - DNA, 15 bp, Homo sapiens
ttttagtgcaagcca

SEQ ID NO: 358519 - DNA, 15 bp, Homo sapiens
tttttagtgcaagcc

SEQ ID NO: 358520 - DNA, 15 bp, Homo sapiens
gtttttagtgcaagc

SEQ ID NO: 358521 - DNA, 15 bp, Homo sapiens
ggtttttagtgcaag

SEQ ID NO: 358522 - DNA, 15 bp, Homo sapiens
gggtttttagtgcaa

SEQ ID NO: 358523 - DNA, 15 bp, Homo sapiens
tgggtttttagtgca

SEQ ID NO: 358524 - DNA, 15 bp, Homo sapiens
atgggtttttagtgc

SEQ ID NO: 358525 - DNA, 15 bp, Homo sapiens
catgggtttttagtg

SEQ ID NO: 358526 - DNA, 15 bp, Homo sapiens
gcatgggtttttagt

SEQ ID NO: 358527 - DNA, 15 bp, Homo sapiens
tgcatgggtttttag

SEQ ID NO: 358528 - DNA, 15 bp, Homo sapiens
atgcatgggttttta

SEQ ID NO: 358529 - DNA, 15 bp, Homo sapiens
aatgcatgggttttt

SEQ ID NO: 358530 - DNA, 15 bp, Homo sapiens
aaatgcatgggtttt

SEQ ID NO: 358531 - DNA, 15 bp, Homo sapiens
aaaatgcatgggttt

SEQ ID NO: 358532 - DNA, 15 bp, Homo sapiens
taaaatgcatgggtt

SEQ ID NO: 358533 - DNA, 15 bp, Homo sapiens
gtaaaatgcatgggt

SEQ ID NO: 358534 - DNA, 15 bp, Homo sapiens
ggtaaaatgcatggg

SEQ ID NO: 358535 - DNA, 15 bp, Homo sapiens
aggtaaaatgcatgg

SEQ ID NO: 358536 - DNA, 15 bp, Homo sapiens
aaggtaaaatgcatg

SEQ ID NO: 358537 - DNA, 15 bp, Homo sapiens
aaaggtaaaatgcat

SEQ ID NO: 358538 - DNA, 15 bp, Homo sapiens
taaaggtaaaatgca

SEQ ID NO: 358539 - DNA, 15 bp, Homo sapiens
ataaaggtaaaatgc

SEQ ID NO: 358540 - DNA, 15 bp, Homo sapiens
gataaaggtaaaatg

SEQ ID NO: 358541 - DNA, 15 bp, Homo sapiens
agataaaggtaaaat

SEQ ID NO: 358542 - DNA, 15 bp, Homo sapiens
cagataaaggtaaaa

SEQ ID NO: 358543 - DNA, 15 bp, Homo sapiens
tcagataaaggtaaa

SEQ ID NO: 358544 - DNA, 15 bp, Homo sapiens
ctcagataaaggtaa

SEQ ID NO: 358545 - DNA, 15 bp, Homo sapiens
actcagataaaggta

SEQ ID NO: 358546 - DNA, 15 bp, Homo sapiens
aactcagataaaggt

SEQ ID NO: 358547 - DNA, 15 bp, Homo sapiens
aaactcagataaagg

SEQ ID NO: 358548 - DNA, 15 bp, Homo sapiens
caaactcagataaag

SEQ ID NO: 358549 - DNA, 15 bp, Homo sapiens
tcaaactcagataaa

SEQ ID NO: 358550 - DNA, 15 bp, Homo sapiens
ttcaaactcagataa

SEQ ID NO: 358551 - DNA, 15 bp, Homo sapiens
tttcaaactcagata

SEQ ID NO: 358552 - DNA, 15 bp, Homo sapiens
ctttcaaactcagat

SEQ ID NO: 358553 - DNA, 15 bp, Homo sapiens
tctttcaaactcaga

SEQ ID NO: 358554 - DNA, 15 bp, Homo sapiens
ttctttcaaactcag

SEQ ID NO: 358555 - DNA, 15 bp, Homo sapiens
tttctttcaaactca

SEQ ID NO: 358556 - DNA, 15 bp, Homo sapiens
atttctttcaaactc

SEQ ID NO: 358557 - DNA, 15 bp, Homo sapiens
aatttctttcaaact

SEQ ID NO: 358558 - DNA, 15 bp, Homo sapiens
taatttctttcaaac

SEQ ID NO: 358559 - DNA, 15 bp, Homo sapiens
ataatttctttcaaa

SEQ ID NO: 358560 - DNA, 15 bp, Homo sapiens
gataatttctttcaa

SEQ ID NO: 358561 - DNA, 15 bp, Homo sapiens
tgataatttctttca

SEQ ID NO: 358562 - DNA, 15 bp, Homo sapiens
ctgataatttctttc

SEQ ID NO: 358563 - DNA, 15 bp, Homo sapiens
actgataatttcttt

SEQ ID NO: 358564 - DNA, 15 bp, Homo sapiens
cactgataatttctt

SEQ ID NO: 358565 - DNA, 15 bp, Homo sapiens
gcactgataatttct

SEQ ID NO: 358566 - DNA, 15 bp, Homo sapiens
tgcactgataatttc

SEQ ID NO: 358567 - DNA, 15 bp, Homo sapiens
gtgcactgataattt

SEQ ID NO: 358568 - DNA, 15 bp, Homo sapiens
ggtgcactgataatt

SEQ ID NO: 358569 - DNA, 15 bp, Homo sapiens
gggtgcactgataat

SEQ ID NO: 358570 - DNA, 15 bp, Homo sapiens
tgggtgcactgataa

SEQ ID NO: 358571 - DNA, 15 bp, Homo sapiens
atgggtgcactgata

SEQ ID NO: 358572 - DNA, 15 bp, Homo sapiens
gatgggtgcactgat

SEQ ID NO: 358573 - DNA, 15 bp, Homo sapiens
agatgggtgcactga

SEQ ID NO: 358574 - DNA, 15 bp, Homo sapiens
cagatgggtgcactg

SEQ ID NO: 358575 - DNA, 15 bp, Homo sapiens
ccagatgggtgcact

SEQ ID NO: 358576 - DNA, 15 bp, Homo sapiens
tccagatgggtgcac

SEQ ID NO: 358577 - DNA, 15 bp, Homo sapiens
ttccagatgggtgca

SEQ ID NO: 358578 - DNA, 15 bp, Homo sapiens
attccagatgggtgc

SEQ ID NO: 358579 - DNA, 15 bp, Homo sapiens
tattccagatgggtg

SEQ ID NO: 358580 - DNA, 15 bp, Homo sapiens
atattccagatgggt

SEQ ID NO: 358581 - DNA, 15 bp, Homo sapiens
tatattccagatggg

SEQ ID NO: 358582 - DNA, 15 bp, Homo sapiens
atatattccagatgg

SEQ ID NO: 358583 - DNA, 15 bp, Homo sapiens
tatatattccagatg

SEQ ID NO: 358584 - DNA, 15 bp, Homo sapiens
atatatattccagat

SEQ ID NO: 358585 - DNA, 15 bp, Homo sapiens
aatatatattccaga

SEQ ID NO: 358586 - DNA, 15 bp, Homo sapiens
taatatatattccag

SEQ ID NO: 358587 - DNA, 15 bp, Homo sapiens
ctaatatatattcca

SEQ ID NO: 358588 - DNA, 15 bp, Homo sapiens
tctaatatatattcc

SEQ ID NO: 358589 - DNA, 15 bp, Homo sapiens
ttctaatatatattc

SEQ ID NO: 358590 - DNA, 15 bp, Homo sapiens
attctaatatatatt

SEQ ID NO: 358591 - DNA, 15 bp, Homo sapiens
aattctaatatatat

SEQ ID NO: 358592 - DNA, 15 bp, Homo sapiens
gaattctaatatata

SEQ ID NO: 358593 - DNA, 15 bp, Homo sapiens
agaattctaatatat

SEQ ID NO: 358594 - DNA, 15 bp, Homo sapiens
tagaattctaatata

SEQ ID NO: 358595 - DNA, 15 bp, Homo sapiens
ctagaattctaatat

SEQ ID NO: 358596 - DNA, 15 bp, Homo sapiens
cctagaattctaata

SEQ ID NO: 358597 - DNA, 15 bp, Homo sapiens
ccctagaattctaat

SEQ ID NO: 358598 - DNA, 15 bp, Homo sapiens
cccctagaattctaa

SEQ ID NO: 358599 - DNA, 15 bp, Homo sapiens
ccccctagaattcta

SEQ ID NO: 358600 - DNA, 15 bp, Homo sapiens
gccccctagaattct

SEQ ID NO: 358601 - DNA, 15 bp, Homo sapiens
agccccctagaattc

SEQ ID NO: 358602 - DNA, 15 bp, Homo sapiens
gagccccctagaatt

SEQ ID NO: 358603 - DNA, 15 bp, Homo sapiens
agagccccctagaat

SEQ ID NO: 358604 - DNA, 15 bp, Homo sapiens
aagagccccctagaa

SEQ ID NO: 358605 - DNA, 15 bp, Homo sapiens
caagagccccctaga

SEQ ID NO: 358606 - DNA, 15 bp, Homo sapiens
tcaagagccccctag

SEQ ID NO: 358607 - DNA, 15 bp, Homo sapiens
gtcaagagcccccta

SEQ ID NO: 358608 - DNA, 15 bp, Homo sapiens
tgtcaagagccccct

SEQ ID NO: 358609 - DNA, 15 bp, Homo sapiens
gtgtcaagagccccc

SEQ ID NO: 358610 - DNA, 15 bp, Homo sapiens
ggtgtcaagagcccc

SEQ ID NO: 358611 - DNA, 15 bp, Homo sapiens
tggtgtcaagagccc

SEQ ID NO: 358612 - DNA, 15 bp, Homo sapiens
atggtgtcaagagcc

SEQ ID NO: 358613 - DNA, 15 bp, Homo sapiens
aatggtgtcaagagc

SEQ ID NO: 358614 - DNA, 15 bp, Homo sapiens
caatggtgtcaagag

SEQ ID NO: 358615 - DNA, 15 bp, Homo sapiens
ccaatggtgtcaaga

SEQ ID NO: 358616 - DNA, 15 bp, Homo sapiens
gccaatggtgtcaag

SEQ ID NO: 358617 - DNA, 15 bp, Homo sapiens
agccaatggtgtcaa

SEQ ID NO: 358618 - DNA, 15 bp, Homo sapiens
gagccaatggtgtca

SEQ ID NO: 358619 - DNA, 15 bp, Homo sapiens
tgagccaatggtgtc

SEQ ID NO: 358620 - DNA, 15 bp, Homo sapiens
ttgagccaatggtgt

SEQ ID NO: 358621 - DNA, 15 bp, Homo sapiens
attgagccaatggtg

SEQ ID NO: 358622 - DNA, 15 bp, Homo sapiens
cattgagccaatggt

SEQ ID NO: 358623 - DNA, 15 bp, Homo sapiens
ccattgagccaatgg

SEQ ID NO: 358624 - DNA, 15 bp, Homo sapiens
tccattgagccaatg

SEQ ID NO: 358625 - DNA, 15 bp, Homo sapiens
ttccattgagccaat

SEQ ID NO: 358626 - DNA, 15 bp, Homo sapiens
cttccattgagccaa

SEQ ID NO: 358627 - DNA, 15 bp, Homo sapiens
tcttccattgagcca

SEQ ID NO: 358628 - DNA, 15 bp, Homo sapiens
atcttccattgagcc

SEQ ID NO: 358629 - DNA, 15 bp, Homo sapiens
tatcttccattgagc

SEQ ID NO: 358630 - DNA, 15 bp, Homo sapiens
atatcttccattgag

SEQ ID NO: 358631 - DNA, 15 bp, Homo sapiens
catatcttccattga

SEQ ID NO: 358632 - DNA, 15 bp, Homo sapiens
ccatatcttccattg

SEQ ID NO: 358633 - DNA, 15 bp, Homo sapiens
accatatcttccatt

SEQ ID NO: 358634 - DNA, 15 bp, Homo sapiens
taccatatcttccat

SEQ ID NO: 358635 - DNA, 15 bp, Homo sapiens
ataccatatcttcca

SEQ ID NO: 358636 - DNA, 15 bp, Homo sapiens
aataccatatcttcc

SEQ ID NO: 358637 - DNA, 15 bp, Homo sapiens
aaataccatatcttc

SEQ ID NO: 358638 - DNA, 15 bp, Homo sapiens
gaaataccatatctt

SEQ ID NO: 358639 - DNA, 15 bp, Homo sapiens
ggaaataccatatct

SEQ ID NO: 358640 - DNA, 15 bp, Homo sapiens
cggaaataccatatc

SEQ ID NO: 358641 - DNA, 15 bp, Homo sapiens
ccggaaataccatat

SEQ ID NO: 358642 - DNA, 15 bp, Homo sapiens
tccggaaataccata

SEQ ID NO: 358643 - DNA, 15 bp, Homo sapiens
atccggaaataccat

SEQ ID NO: 358644 - DNA, 15 bp, Homo sapiens
catccggaaatacca

SEQ ID NO: 358645 - DNA, 15 bp, Homo sapiens
tcatccggaaatacc

SEQ ID NO: 358646 - DNA, 15 bp, Homo sapiens
ctcatccggaaatac

SEQ ID NO: 358647 - DNA, 15 bp, Homo sapiens
gctcatccggaaata

SEQ ID NO: 358648 - DNA, 15 bp, Homo sapiens
ggctcatccggaaat

SEQ ID NO: 358649 - DNA, 15 bp, Homo sapiens
tggctcatccggaaa

SEQ ID NO: 358650 - DNA, 15 bp, Homo sapiens
ttggctcatccggaa

SEQ ID NO: 358651 - DNA, 15 bp, Homo sapiens
attggctcatccgga

SEQ ID NO: 358652 - DNA, 15 bp, Homo sapiens
tattggctcatccgg

SEQ ID NO: 358653 - DNA, 15 bp, Homo sapiens
ctattggctcatccg

SEQ ID NO: 358654 - DNA, 15 bp, Homo sapiens
actattggctcatcc

SEQ ID NO: 358655 - DNA, 15 bp, Homo sapiens
tactattggctcatc

SEQ ID NO: 358656 - DNA, 15 bp, Homo sapiens
ttactattggctcat

SEQ ID NO: 358657 - DNA, 15 bp, Homo sapiens
attactattggctca

SEQ ID NO: 358658 - DNA, 15 bp, Homo sapiens
tattactattggctc

SEQ ID NO: 358659 - DNA, 15 bp, Homo sapiens
ttattactattggct

SEQ ID NO: 358660 - DNA, 15 bp, Homo sapiens
attattactattggc

SEQ ID NO: 358661 - DNA, 15 bp, Homo sapiens
cattattactattgg

SEQ ID NO: 358662 - DNA, 15 bp, Homo sapiens
acattattactattg

SEQ ID NO: 358663 - DNA, 15 bp, Homo sapiens
aacattattactatt

SEQ ID NO: 358664 - DNA, 15 bp, Homo sapiens
taacattattactat

SEQ ID NO: 358665 - DNA, 15 bp, Homo sapiens
ttaacattattacta

SEQ ID NO: 358666 - DNA, 15 bp, Homo sapiens
attaacattattact

SEQ ID NO: 358667 - DNA, 15 bp, Homo sapiens
tattaacattattac

SEQ ID NO: 358668 - DNA, 15 bp, Homo sapiens
ttattaacattatta

SEQ ID NO: 358669 - DNA, 15 bp, Homo sapiens
attattaacattatt

SEQ ID NO: 358670 - DNA, 15 bp, Homo sapiens
tattattaacattat

SEQ ID NO: 358671 - DNA, 15 bp, Homo sapiens
ttattattaacatta

SEQ ID NO: 358672 - DNA, 15 bp, Homo sapiens
attattattaacatt

SEQ ID NO: 358673 - DNA, 15 bp, Homo sapiens
tattattattaacat

SEQ ID NO: 358674 - DNA, 15 bp, Homo sapiens
ctattattattaaca

SEQ ID NO: 358675 - DNA, 15 bp, Homo sapiens
actattattattaac

SEQ ID NO: 358676 - DNA, 15 bp, Homo sapiens
cactattattattaa

SEQ ID NO: 358677 - DNA, 15 bp, Homo sapiens
ccactattattatta

SEQ ID NO: 358678 - DNA, 15 bp, Homo sapiens
accactattattatt

SEQ ID NO: 358679 - DNA, 15 bp, Homo sapiens
aaccactattattat

SEQ ID NO: 358680 - DNA, 15 bp, Homo sapiens
aaaccactattatta

SEQ ID NO: 358681 - DNA, 15 bp, Homo sapiens
caaaccactattatt

SEQ ID NO: 358682 - DNA, 15 bp, Homo sapiens
acaaaccactattat

SEQ ID NO: 358683 - DNA, 15 bp, Homo sapiens
tacaaaccactatta

SEQ ID NO: 358684 - DNA, 15 bp, Homo sapiens
atacaaaccactatt

SEQ ID NO: 358685 - DNA, 15 bp, Homo sapiens
aatacaaaccactat

SEQ ID NO: 358686 - DNA, 15 bp, Homo sapiens
aaatacaaaccacta

SEQ ID NO: 358687 - DNA, 15 bp, Homo sapiens
taaatacaaaccact

SEQ ID NO: 358688 - DNA, 15 bp, Homo sapiens
ataaatacaaaccac

SEQ ID NO: 358689 - DNA, 15 bp, Homo sapiens
tataaatacaaacca

SEQ ID NO: 358690 - DNA, 15 bp, Homo sapiens
atataaatacaaacc

SEQ ID NO: 358691 - DNA, 15 bp, Homo sapiens
tatataaatacaaac

SEQ ID NO: 358692 - DNA, 15 bp, Homo sapiens
ttatataaatacaaa

SEQ ID NO: 358693 - DNA, 15 bp, Homo sapiens
gttatataaatacaa

SEQ ID NO: 358694 - DNA, 15 bp, Homo sapiens
tgttatataaataca

SEQ ID NO: 358695 - DNA, 15 bp, Homo sapiens
atgttatataaatac

SEQ ID NO: 358696 - DNA, 15 bp, Homo sapiens
gatgttatataaata

SEQ ID NO: 358697 - DNA, 15 bp, Homo sapiens
agatgttatataaat

SEQ ID NO: 358698 - DNA, 15 bp, Homo sapiens
aagatgttatataaa

SEQ ID NO: 358699 - DNA, 15 bp, Homo sapiens
taagatgttatataa

SEQ ID NO: 358700 - DNA, 15 bp, Homo sapiens
ataagatgttatata

SEQ ID NO: 358701 - DNA, 15 bp, Homo sapiens
cataagatgttatat

SEQ ID NO: 358702 - DNA, 15 bp, Homo sapiens
ccataagatgttata

SEQ ID NO: 358703 - DNA, 15 bp, Homo sapiens
accataagatgttat

SEQ ID NO: 358704 - DNA, 15 bp, Homo sapiens
aaccataagatgtta

SEQ ID NO: 358705 - DNA, 15 bp, Homo sapiens
aaaccataagatgtt

SEQ ID NO: 358706 - DNA, 15 bp, Homo sapiens
taaaccataagatgt

SEQ ID NO: 358707 - DNA, 15 bp, Homo sapiens
ctaaaccataagatg

SEQ ID NO: 358708 - DNA, 15 bp, Homo sapiens
tctaaaccataagat

SEQ ID NO: 358709 - DNA, 15 bp, Homo sapiens
ttctaaaccataaga

SEQ ID NO: 358710 - DNA, 15 bp, Homo sapiens
tttctaaaccataag

SEQ ID NO: 358711 - DNA, 15 bp, Homo sapiens
ttttctaaaccataa

SEQ ID NO: 358712 - DNA, 15 bp, Homo sapiens
gttttctaaaccata

SEQ ID NO: 358713 - DNA, 15 bp, Homo sapiens
tgttttctaaaccat

SEQ ID NO: 358714 - DNA, 15 bp, Homo sapiens
ctgttttctaaacca

SEQ ID NO: 358715 - DNA, 15 bp, Homo sapiens
actgttttctaaacc

SEQ ID NO: 358716 - DNA, 15 bp, Homo sapiens
aactgttttctaaac

SEQ ID NO: 358717 - DNA, 15 bp, Homo sapiens
aaactgttttctaaa

SEQ ID NO: 358718 - DNA, 15 bp, Homo sapiens
gaaactgttttctaa

SEQ ID NO: 358719 - DNA, 15 bp, Homo sapiens
tgaaactgttttcta

SEQ ID NO: 358720 - DNA, 15 bp, Homo sapiens
gtgaaactgttttct

SEQ ID NO: 358721 - DNA, 15 bp, Homo sapiens
tgtgaaactgttttc

SEQ ID NO: 358722 - DNA, 15 bp, Homo sapiens
atgtgaaactgtttt

SEQ ID NO: 358723 - DNA, 15 bp, Homo sapiens
tatgtgaaactgttt

SEQ ID NO: 358724 - DNA, 15 bp, Homo sapiens
atatgtgaaactgtt

SEQ ID NO: 358725 - DNA, 15 bp, Homo sapiens
tatatgtgaaactgt

SEQ ID NO: 358726 - DNA, 15 bp, Homo sapiens
gtatatgtgaaactg

SEQ ID NO: 358727 - DNA, 15 bp, Homo sapiens
tgtatatgtgaaact

SEQ ID NO: 358728 - DNA, 15 bp, Homo sapiens
gtgtatatgtgaaac

SEQ ID NO: 358729 - DNA, 15 bp, Homo sapiens
tgtgtatatgtgaaa

SEQ ID NO: 358730 - DNA, 15 bp, Homo sapiens
ttgtgtatatgtgaa

SEQ ID NO: 358731 - DNA, 15 bp, Homo sapiens
attgtgtatatgtga

SEQ ID NO: 358732 - DNA, 15 bp, Homo sapiens
aattgtgtatatgtg

SEQ ID NO: 358733 - DNA, 15 bp, Homo sapiens
taattgtgtatatgt

SEQ ID NO: 358734 - DNA, 15 bp, Homo sapiens
ctaattgtgtatatg

SEQ ID NO: 358735 - DNA, 15 bp, Homo sapiens
tctaattgtgtatat

SEQ ID NO: 358736 - DNA, 15 bp, Homo sapiens
atctaattgtgtata

SEQ ID NO: 358737 - DNA, 15 bp, Homo sapiens
aatctaattgtgtat

SEQ ID NO: 358738 - DNA, 15 bp, Homo sapiens
gaatctaattgtgta

SEQ ID NO: 358739 - DNA, 15 bp, Homo sapiens
agaatctaattgtgt

SEQ ID NO: 358740 - DNA, 15 bp, Homo sapiens
tagaatctaattgtg

SEQ ID NO: 358741 - DNA, 15 bp, Homo sapiens
ctagaatctaattgt

SEQ ID NO: 358742 - DNA, 15 bp, Homo sapiens
cctagaatctaattg

SEQ ID NO: 358743 - DNA, 15 bp, Homo sapiens
gcctagaatctaatt

SEQ ID NO: 358744 - DNA, 15 bp, Homo sapiens
agcctagaatctaat

SEQ ID NO: 358745 - DNA, 15 bp, Homo sapiens
cagcctagaatctaa

SEQ ID NO: 358746 - DNA, 15 bp, Homo sapiens
ccagcctagaatcta

SEQ ID NO: 358747 - DNA, 15 bp, Homo sapiens
accagcctagaatct

SEQ ID NO: 358748 - DNA, 15 bp, Homo sapiens
gaccagcctagaatc

SEQ ID NO: 358749 - DNA, 15 bp, Homo sapiens
agaccagcctagaat

SEQ ID NO: 358750 - DNA, 15 bp, Homo sapiens
aagaccagcctagaa

SEQ ID NO: 358751 - DNA, 15 bp, Homo sapiens
aaagaccagcctaga

SEQ ID NO: 358752 - DNA, 15 bp, Homo sapiens
taaagaccagcctag

SEQ ID NO: 358753 - DNA, 15 bp, Homo sapiens
ttaaagaccagccta

SEQ ID NO: 358754 - DNA, 15 bp, Homo sapiens
tttaaagaccagcct

SEQ ID NO: 358755 - DNA, 15 bp, Homo sapiens
atttaaagaccagcc

SEQ ID NO: 358756 - DNA, 15 bp, Homo sapiens
tatttaaagaccagc

SEQ ID NO: 358757 - DNA, 15 bp, Homo sapiens
atatttaaagaccag

SEQ ID NO: 358758 - DNA, 15 bp, Homo sapiens
gatatttaaagacca

SEQ ID NO: 358759 - DNA, 15 bp, Homo sapiens
tgatatttaaagacc

SEQ ID NO: 358760 - DNA, 15 bp, Homo sapiens
gtgatatttaaagac

SEQ ID NO: 358761 - DNA, 15 bp, Homo sapiens
tgtgatatttaaaga

SEQ ID NO: 358762 - DNA, 15 bp, Homo sapiens
ttgtgatatttaaag

SEQ ID NO: 358763 - DNA, 15 bp, Homo sapiens
attgtgatatttaaa

SEQ ID NO: 358764 - DNA, 15 bp, Homo sapiens
gattgtgatatttaa

SEQ ID NO: 358765 - DNA, 15 bp, Homo sapiens
tgattgtgatattta

SEQ ID NO: 358766 - DNA, 15 bp, Homo sapiens
atgattgtgatattt

SEQ ID NO: 358767 - DNA, 15 bp, Homo sapiens
aatgattgtgatatt

SEQ ID NO: 358768 - DNA, 15 bp, Homo sapiens
caatgattgtgatat

SEQ ID NO: 358769 - DNA, 15 bp, Homo sapiens
ccaatgattgtgata

SEQ ID NO: 358770 - DNA, 15 bp, Homo sapiens
cccaatgattgtgat

SEQ ID NO: 358771 - DNA, 15 bp, Homo sapiens
ccccaatgattgtga

SEQ ID NO: 358772 - DNA, 15 bp, Homo sapiens
gccccaatgattgtg

SEQ ID NO: 358773 - DNA, 15 bp, Homo sapiens
tgccccaatgattgt

SEQ ID NO: 358774 - DNA, 15 bp, Homo sapiens
ttgccccaatgattg

SEQ ID NO: 358775 - DNA, 15 bp, Homo sapiens
cttgccccaatgatt

SEQ ID NO: 358776 - DNA, 15 bp, Homo sapiens
gcttgccccaatgat

SEQ ID NO: 358777 - DNA, 15 bp, Homo sapiens
tgcttgccccaatga

SEQ ID NO: 358778 - DNA, 15 bp, Homo sapiens
atgcttgccccaatg

SEQ ID NO: 358779 - DNA, 15 bp, Homo sapiens
aatgcttgccccaat

SEQ ID NO: 358780 - DNA, 15 bp, Homo sapiens
taatgcttgccccaa

SEQ ID NO: 358781 - DNA, 15 bp, Homo sapiens
ttaatgcttgcccca

SEQ ID NO: 358782 - DNA, 15 bp, Homo sapiens
attaatgcttgcccc

SEQ ID NO: 358783 - DNA, 15 bp, Homo sapiens
aattaatgcttgccc

SEQ ID NO: 358784 - DNA, 15 bp, Homo sapiens
aaattaatgcttgcc

SEQ ID NO: 358785 - DNA, 15 bp, Homo sapiens
taaattaatgcttgc

SEQ ID NO: 358786 - DNA, 15 bp, Homo sapiens
ttaaattaatgcttg

SEQ ID NO: 358787 - DNA, 15 bp, Homo sapiens
tttaaattaatgctt

SEQ ID NO: 358788 - DNA, 15 bp, Homo sapiens
ctttaaattaatgct

SEQ ID NO: 358789 - DNA, 15 bp, Homo sapiens
tctttaaattaatgc

SEQ ID NO: 358790 - DNA, 15 bp, Homo sapiens
ttctttaaattaatg

SEQ ID NO: 358791 - DNA, 15 bp, Homo sapiens
attctttaaattaat

SEQ ID NO: 358792 - DNA, 15 bp, Homo sapiens
cattctttaaattaa

SEQ ID NO: 358793 - DNA, 15 bp, Homo sapiens
acattctttaaatta

SEQ ID NO: 358794 - DNA, 15 bp, Homo sapiens
tacattctttaaatt

SEQ ID NO: 358795 - DNA, 15 bp, Homo sapiens
ttacattctttaaat

SEQ ID NO: 358796 - DNA, 15 bp, Homo sapiens
tttacattctttaaa

SEQ ID NO: 358797 - DNA, 15 bp, Homo sapiens
gtttacattctttaa

SEQ ID NO: 358798 - DNA, 15 bp, Homo sapiens
tgtttacattcttta

SEQ ID NO: 358799 - DNA, 15 bp, Homo sapiens
ctgtttacattcttt

SEQ ID NO: 358800 - DNA, 15 bp, Homo sapiens
gctgtttacattctt

SEQ ID NO: 358801 - DNA, 15 bp, Homo sapiens
tgctgtttacattct

SEQ ID NO: 358802 - DNA, 15 bp, Homo sapiens
ttgctgtttacattc

SEQ ID NO: 358803 - DNA, 15 bp, Homo sapiens
tttgctgtttacatt

SEQ ID NO: 358804 - DNA, 15 bp, Homo sapiens
ctttgctgtttacat

SEQ ID NO: 358805 - DNA, 15 bp, Homo sapiens
actttgctgtttaca

SEQ ID NO: 358806 - DNA, 15 bp, Homo sapiens
cactttgctgtttac

SEQ ID NO: 358807 - DNA, 15 bp, Homo sapiens
tcactttgctgttta

SEQ ID NO: 358808 - DNA, 15 bp, Homo sapiens
ttcactttgctgttt

SEQ ID NO: 358809 - DNA, 15 bp, Homo sapiens
tttcactttgctgtt

SEQ ID NO: 358810 - DNA, 15 bp, Homo sapiens
ttttcactttgctgt

SEQ ID NO: 358811 - DNA, 15 bp, Homo sapiens
attttcactttgctg

SEQ ID NO: 358812 - DNA, 15 bp, Homo sapiens
cattttcactttgct

SEQ ID NO: 358813 - DNA, 15 bp, Homo sapiens
ccattttcactttgc

SEQ ID NO: 358814 - DNA, 15 bp, Homo sapiens
tccattttcactttg

SEQ ID NO: 358815 - DNA, 15 bp, Homo sapiens
ttccattttcacttt

SEQ ID NO: 358816 - DNA, 15 bp, Homo sapiens
tttccattttcactt

SEQ ID NO: 358817 - DNA, 15 bp, Homo sapiens
atttccattttcact

SEQ ID NO: 358818 - DNA, 15 bp, Homo sapiens
catttccattttcac

SEQ ID NO: 358819 - DNA, 15 bp, Homo sapiens
tcatttccattttca

SEQ ID NO: 358820 - DNA, 15 bp, Homo sapiens
ttcatttccattttc

SEQ ID NO: 358821 - DNA, 15 bp, Homo sapiens
tttcatttccatttt

SEQ ID NO: 358822 - DNA, 15 bp, Homo sapiens
atttcatttccattt

SEQ ID NO: 358823 - DNA, 15 bp, Homo sapiens
catttcatttccatt

SEQ ID NO: 358824 - DNA, 15 bp, Homo sapiens
acatttcatttccat

SEQ ID NO: 358825 - DNA, 15 bp, Homo sapiens
cacatttcatttcca

SEQ ID NO: 358826 - DNA, 15 bp, Homo sapiens
tcacatttcatttcc

SEQ ID NO: 358827 - DNA, 15 bp, Homo sapiens
atcacatttcatttc

SEQ ID NO: 358828 - DNA, 15 bp, Homo sapiens
aatcacatttcattt

SEQ ID NO: 358829 - DNA, 15 bp, Homo sapiens
caatcacatttcatt

SEQ ID NO: 358830 - DNA, 15 bp, Homo sapiens
tcaatcacatttcat

SEQ ID NO: 358831 - DNA, 15 bp, Homo sapiens
gtcaatcacatttca

SEQ ID NO: 358832 - DNA, 15 bp, Homo sapiens
tgtcaatcacatttc

SEQ ID NO: 358833 - DNA, 15 bp, Homo sapiens
atgtcaatcacattt

SEQ ID NO: 358834 - DNA, 15 bp, Homo sapiens
gatgtcaatcacatt

SEQ ID NO: 358835 - DNA, 15 bp, Homo sapiens
agatgtcaatcacat

SEQ ID NO: 358836 - DNA, 15 bp, Homo sapiens
aagatgtcaatcaca

SEQ ID NO: 358837 - DNA, 15 bp, Homo sapiens
gaagatgtcaatcac

SEQ ID NO: 358838 - DNA, 15 bp, Homo sapiens
agaagatgtcaatca

SEQ ID NO: 358839 - DNA, 15 bp, Homo sapiens
cagaagatgtcaatc

SEQ ID NO: 358840 - DNA, 15 bp, Homo sapiens
gcagaagatgtcaat

SEQ ID NO: 358841 - DNA, 15 bp, Homo sapiens
ggcagaagatgtcaa

SEQ ID NO: 358842 - DNA, 15 bp, Homo sapiens
tggcagaagatgtca

SEQ ID NO: 358843 - DNA, 15 bp, Homo sapiens
ctggcagaagatgtc

SEQ ID NO: 358844 - DNA, 15 bp, Homo sapiens
actggcagaagatgt

SEQ ID NO: 358845 - DNA, 15 bp, Homo sapiens
gactggcagaagatg

SEQ ID NO: 358846 - DNA, 15 bp, Homo sapiens
tgactggcagaagat

SEQ ID NO: 358847 - DNA, 15 bp, Homo sapiens
atgactggcagaaga

SEQ ID NO: 358848 - DNA, 15 bp, Homo sapiens
catgactggcagaag

SEQ ID NO: 358849 - DNA, 15 bp, Homo sapiens
ccatgactggcagaa

SEQ ID NO: 358850 - DNA, 15 bp, Homo sapiens
gccatgactggcaga

SEQ ID NO: 358851 - DNA, 15 bp, Homo sapiens
agccatgactggcag

SEQ ID NO: 358852 - DNA, 15 bp, Homo sapiens
tagccatgactggca

SEQ ID NO: 358853 - DNA, 15 bp, Homo sapiens
atagccatgactggc

SEQ ID NO: 358854 - DNA, 15 bp, Homo sapiens
aatagccatgactgg

SEQ ID NO: 358855 - DNA, 15 bp, Homo sapiens
aaatagccatgactg

SEQ ID NO: 358856 - DNA, 15 bp, Homo sapiens
caaatagccatgact

SEQ ID NO: 358857 - DNA, 15 bp, Homo sapiens
tcaaatagccatgac

SEQ ID NO: 358858 - DNA, 15 bp, Homo sapiens
ttcaaatagccatga

SEQ ID NO: 358859 - DNA, 15 bp, Homo sapiens
gttcaaatagccatg

SEQ ID NO: 358860 - DNA, 15 bp, Homo sapiens
ggttcaaatagccat

SEQ ID NO: 358861 - DNA, 15 bp, Homo sapiens
aggttcaaatagcca

SEQ ID NO: 358862 - DNA, 15 bp, Homo sapiens
caggttcaaatagcc

SEQ ID NO: 358863 - DNA, 15 bp, Homo sapiens
acaggttcaaatagc

SEQ ID NO: 358864 - DNA, 15 bp, Homo sapiens
aacaggttcaaatag

SEQ ID NO: 358865 - DNA, 15 bp, Homo sapiens
aaacaggttcaaata

SEQ ID NO: 358866 - DNA, 15 bp, Homo sapiens
caaacaggttcaaat

SEQ ID NO: 358867 - DNA, 15 bp, Homo sapiens
ccaaacaggttcaaa

SEQ ID NO: 358868 - DNA, 15 bp, Homo sapiens
cccaaacaggttcaa

SEQ ID NO: 358869 - DNA, 15 bp, Homo sapiens
ccccaaacaggttca

SEQ ID NO: 358870 - DNA, 15 bp, Homo sapiens
cccccaaacaggttc

SEQ ID NO: 358871 - DNA, 15 bp, Homo sapiens
acccccaaacaggtt

SEQ ID NO: 358872 - DNA, 15 bp, Homo sapiens
cacccccaaacaggt

SEQ ID NO: 358873 - DNA, 15 bp, Homo sapiens
ccacccccaaacagg

SEQ ID NO: 358874 - DNA, 15 bp, Homo sapiens
cccacccccaaacag

SEQ ID NO: 358875 - DNA, 15 bp, Homo sapiens
ccccacccccaaaca

SEQ ID NO: 358876 - DNA, 15 bp, Homo sapiens
cccccacccccaaac

SEQ ID NO: 358877 - DNA, 15 bp, Homo sapiens
ccccccacccccaaa

SEQ ID NO: 358878 - DNA, 15 bp, Homo sapiens
tccccccacccccaa

SEQ ID NO: 358879 - DNA, 15 bp, Homo sapiens
ttccccccaccccca

SEQ ID NO: 358880 - DNA, 15 bp, Homo sapiens
tttccccccaccccc

SEQ ID NO: 358881 - DNA, 15 bp, Homo sapiens
ctttccccccacccc

SEQ ID NO: 358882 - DNA, 15 bp, Homo sapiens
tctttccccccaccc

SEQ ID NO: 358883 - DNA, 15 bp, Homo sapiens
ttctttccccccacc

SEQ ID NO: 358884 - DNA, 15 bp, Homo sapiens
tttctttccccccac

SEQ ID NO: 358885 - DNA, 15 bp, Homo sapiens
ttttctttcccccca

SEQ ID NO: 358886 - DNA, 15 bp, Homo sapiens
tttttctttcccccc

SEQ ID NO: 358887 - DNA, 15 bp, Homo sapiens
ctttttctttccccc

SEQ ID NO: 358888 - DNA, 15 bp, Homo sapiens
tctttttctttcccc

SEQ ID NO: 358889 - DNA, 15 bp, Homo sapiens
ttctttttctttccc

SEQ ID NO: 358890 - DNA, 15 bp, Homo sapiens
tttctttttctttcc

SEQ ID NO: 358891 - DNA, 15 bp, Homo sapiens
actttctttttcttt

SEQ ID NO: 358892 - DNA, 15 bp, Homo sapiens
tactttctttttctt

SEQ ID NO: 358893 - DNA, 15 bp, Homo sapiens
ttactttctttttct

SEQ ID NO: 358894 - DNA, 15 bp, Homo sapiens
gttactttctttttc

SEQ ID NO: 358895 - DNA, 15 bp, Homo sapiens
tgttactttcttttt

SEQ ID NO: 358896 - DNA, 15 bp, Homo sapiens
atgttactttctttt

SEQ ID NO: 358897 - DNA, 15 bp, Homo sapiens
aatgttactttcttt

SEQ ID NO: 358898 - DNA, 15 bp, Homo sapiens
caatgttactttctt

SEQ ID NO: 358899 - DNA, 15 bp, Homo sapiens
ccaatgttactttct

SEQ ID NO: 358900 - DNA, 15 bp, Homo sapiens
accaatgttactttc

SEQ ID NO: 358901 - DNA, 15 bp, Homo sapiens
caccaatgttacttt

SEQ ID NO: 358902 - DNA, 15 bp, Homo sapiens
acaccaatgttactt

SEQ ID NO: 358903 - DNA, 15 bp, Homo sapiens
gacaccaatgttact

SEQ ID NO: 358904 - DNA, 15 bp, Homo sapiens
tgacaccaatgttac

SEQ ID NO: 358905 - DNA, 15 bp, Homo sapiens
ttgacaccaatgtta

SEQ ID NO: 358906 - DNA, 15 bp, Homo sapiens
tttgacaccaatgtt

SEQ ID NO: 358907 - DNA, 15 bp, Homo sapiens
ttttgacaccaatgt

SEQ ID NO: 358908 - DNA, 15 bp, Homo sapiens
attttgacaccaatg

SEQ ID NO: 358909 - DNA, 15 bp, Homo sapiens
tattttgacaccaat

SEQ ID NO: 358910 - DNA, 15 bp, Homo sapiens
atattttgacaccaa

SEQ ID NO: 358911 - DNA, 15 bp, Homo sapiens
catattttgacacca

SEQ ID NO: 358912 - DNA, 15 bp, Homo sapiens
acatattttgacacc

SEQ ID NO: 358913 - DNA, 15 bp, Homo sapiens
tacatattttgacac

SEQ ID NO: 358914 - DNA, 15 bp, Homo sapiens
ttacatattttgaca

SEQ ID NO: 358915 - DNA, 15 bp, Homo sapiens
cttacatattttgac

SEQ ID NO: 358916 - DNA, 15 bp, Homo sapiens
gcttacatattttga

SEQ ID NO: 358917 - DNA, 15 bp, Homo sapiens
tgcttacatattttg

SEQ ID NO: 358918 - DNA, 15 bp, Homo sapiens
ttgcttacatatttt

SEQ ID NO: 358919 - DNA, 15 bp, Homo sapiens
tttgcttacatattt

SEQ ID NO: 358920 - DNA, 15 bp, Homo sapiens
atttgcttacatatt

SEQ ID NO: 358921 - DNA, 15 bp, Homo sapiens
tatttgcttacatat

SEQ ID NO: 358922 - DNA, 15 bp, Homo sapiens
ttatttgcttacata

SEQ ID NO: 358923 - DNA, 15 bp, Homo sapiens
tttatttgcttacat

SEQ ID NO: 358924 - DNA, 15 bp, Homo sapiens
ttttatttgcttaca

SEQ ID NO: 358925 - DNA, 15 bp, Homo sapiens
tttttatttgcttac

SEQ ID NO: 358926 - DNA, 15 bp, Homo sapiens
gtttttatttgctta

SEQ ID NO: 358927 - DNA, 15 bp, Homo sapiens
agtttttatttgctt

SEQ ID NO: 358928 - DNA, 15 bp, Homo sapiens
aagtttttatttgct

SEQ ID NO: 358929 - DNA, 15 bp, Homo sapiens
aaagtttttatttgc

SEQ ID NO: 358930 - DNA, 15 bp, Homo sapiens
gaaagtttttatttg

SEQ ID NO: 358931 - DNA, 15 bp, Homo sapiens
tgaaagtttttattt

SEQ ID NO: 358932 - DNA, 15 bp, Homo sapiens
gtgaaagtttttatt

SEQ ID NO: 358933 - DNA, 15 bp, Homo sapiens
ggtgaaagtttttat

SEQ ID NO: 358934 - DNA, 15 bp, Homo sapiens
gggtgaaagttttta

SEQ ID NO: 358935 - DNA, 15 bp, Homo sapiens
ggggtgaaagttttt

SEQ ID NO: 358936 - DNA, 15 bp, Homo sapiens
tggggtgaaagtttt

SEQ ID NO: 358937 - DNA, 15 bp, Homo sapiens
ttggggtgaaagttt

SEQ ID NO: 358938 - DNA, 15 bp, Homo sapiens
tttggggtgaaagtt

SEQ ID NO: 358939 - DNA, 15 bp, Homo sapiens
ctttggggtgaaagt

SEQ ID NO: 358940 - DNA, 15 bp, Homo sapiens
actttggggtgaaag

SEQ ID NO: 358941 - DNA, 15 bp, Homo sapiens
cactttggggtgaaa

SEQ ID NO: 358942 - DNA, 15 bp, Homo sapiens
ccactttggggtgaa

SEQ ID NO: 358943 - DNA, 15 bp, Homo sapiens
tccactttggggtga

SEQ ID NO: 358944 - DNA, 15 bp, Homo sapiens
ttccactttggggtg

SEQ ID NO: 358945 - DNA, 15 bp, Homo sapiens
tttccactttggggt

SEQ ID NO: 358946 - DNA, 15 bp, Homo sapiens
atttccactttgggg

SEQ ID NO: 358947 - DNA, 15 bp, Homo sapiens
catttccactttggg

SEQ ID NO: 358948 - DNA, 15 bp, Homo sapiens
acatttccactttgg

SEQ ID NO: 358949 - DNA, 15 bp, Homo sapiens
tacatttccactttg

SEQ ID NO: 358950 - DNA, 15 bp, Homo sapiens
ttacatttccacttt

SEQ ID NO: 358951 - DNA, 15 bp, Homo sapiens
tttacatttccactt

SEQ ID NO: 358952 - DNA, 15 bp, Homo sapiens
atttacatttccact

SEQ ID NO: 358953 - DNA, 15 bp, Homo sapiens
gatttacatttccac

SEQ ID NO: 358954 - DNA, 15 bp, Homo sapiens
tgatttacatttcca

SEQ ID NO: 358955 - DNA, 15 bp, Homo sapiens
ttgatttacatttcc

SEQ ID NO: 358956 - DNA, 15 bp, Homo sapiens
gttgatttacatttc

SEQ ID NO: 358957 - DNA, 15 bp, Homo sapiens
tgttgatttacattt

SEQ ID NO: 358958 - DNA, 15 bp, Homo sapiens
atgttgatttacatt

SEQ ID NO: 358959 - DNA, 15 bp, Homo sapiens
aatgttgatttacat

SEQ ID NO: 358960 - DNA, 15 bp, Homo sapiens
caatgttgatttaca

SEQ ID NO: 358961 - DNA, 15 bp, Homo sapiens
acaatgttgatttac

SEQ ID NO: 358962 - DNA, 15 bp, Homo sapiens
cacaatgttgattta

SEQ ID NO: 358963 - DNA, 15 bp, Homo sapiens
acacaatgttgattt

SEQ ID NO: 358964 - DNA, 15 bp, Homo sapiens
aacacaatgttgatt

SEQ ID NO: 358965 - DNA, 15 bp, Homo sapiens
taacacaatgttgat

SEQ ID NO: 358966 - DNA, 15 bp, Homo sapiens
ttaacacaatgttga

SEQ ID NO: 358967 - DNA, 15 bp, Homo sapiens
gttaacacaatgttg

SEQ ID NO: 358968 - DNA, 15 bp, Homo sapiens
ggttaacacaatgtt

SEQ ID NO: 358969 - DNA, 15 bp, Homo sapiens
tggttaacacaatgt

SEQ ID NO: 358970 - DNA, 15 bp, Homo sapiens
ctggttaacacaatg

SEQ ID NO: 358971 - DNA, 15 bp, Homo sapiens
cctggttaacacaat

SEQ ID NO: 358972 - DNA, 15 bp, Homo sapiens
tcctggttaacacaa

SEQ ID NO: 358973 - DNA, 15 bp, Homo sapiens
ctcctggttaacaca

SEQ ID NO: 358974 - DNA, 15 bp, Homo sapiens
cctcctggttaacac

SEQ ID NO: 358975 - DNA, 15 bp, Homo sapiens
tcctcctggttaaca

SEQ ID NO: 358976 - DNA, 15 bp, Homo sapiens
atcctcctggttaac

SEQ ID NO: 358977 - DNA, 15 bp, Homo sapiens
aatcctcctggttaa

SEQ ID NO: 358978 - DNA, 15 bp, Homo sapiens
aaatcctcctggtta

SEQ ID NO: 358979 - DNA, 15 bp, Homo sapiens
caaatcctcctggtt

SEQ ID NO: 358980 - DNA, 15 bp, Homo sapiens
tcaaatcctcctggt

SEQ ID NO: 358981 - DNA, 15 bp, Homo sapiens
atcaaatcctcctgg

SEQ ID NO: 358982 - DNA, 15 bp, Homo sapiens
catcaaatcctcctg

SEQ ID NO: 358983 - DNA, 15 bp, Homo sapiens
acatcaaatcctcct

SEQ ID NO: 358984 - DNA, 15 bp, Homo sapiens
cacatcaaatcctcc

SEQ ID NO: 358985 - DNA, 15 bp, Homo sapiens
ccacatcaaatcctc

SEQ ID NO: 358986 - DNA, 15 bp, Homo sapiens
cccacatcaaatcct

SEQ ID NO: 358987 - DNA, 15 bp, Homo sapiens
tcccacatcaaatcc

SEQ ID NO: 358988 - DNA, 15 bp, Homo sapiens
atcccacatcaaatc

SEQ ID NO: 358989 - DNA, 15 bp, Homo sapiens
catcccacatcaaat

SEQ ID NO: 358990 - DNA, 15 bp, Homo sapiens
acatcccacatcaaa

SEQ ID NO: 358991 - DNA, 15 bp, Homo sapiens
cacatcccacatcaa

SEQ ID NO: 358992 - DNA, 15 bp, Homo sapiens
tcacatcccacatca

SEQ ID NO: 358993 - DNA, 15 bp, Homo sapiens
ttcacatcccacatc

SEQ ID NO: 358994 - DNA, 15 bp, Homo sapiens
tttcacatcccacat

SEQ ID NO: 358995 - DNA, 15 bp, Homo sapiens
atttcacatcccaca

SEQ ID NO: 358996 - DNA, 15 bp, Homo sapiens
tatttcacatcccac

SEQ ID NO: 358997 - DNA, 15 bp, Homo sapiens
ttatttcacatccca

SEQ ID NO: 358998 - DNA, 15 bp, Homo sapiens
tttatttcacatccc

SEQ ID NO: 358999 - DNA, 15 bp, Homo sapiens
ctttatttcacatcc

SEQ ID NO: 359000 - DNA, 15 bp, Homo sapiens
actttatttcacatc

SEQ ID NO: 359001 - DNA, 15 bp, Homo sapiens
gactttatttcacat

SEQ ID NO: 359002 - DNA, 15 bp, Homo sapiens
ggactttatttcaca

SEQ ID NO: 359003 - DNA, 15 bp, Homo sapiens
tggactttatttcac

SEQ ID NO: 359004 - DNA, 15 bp, Homo sapiens
gtggactttatttca

SEQ ID NO: 359005 - DNA, 15 bp, Homo sapiens
cgtggactttatttc

SEQ ID NO: 359006 - DNA, 15 bp, Homo sapiens
tcgtggactttattt

SEQ ID NO: 359007 - DNA, 15 bp, Homo sapiens
ctcgtggactttatt

SEQ ID NO: 359008 - DNA, 15 bp, Homo sapiens
tctcgtggactttat

SEQ ID NO: 359009 - DNA, 15 bp, Homo sapiens
ctctcgtggacttta

SEQ ID NO: 359010 - DNA, 15 bp, Homo sapiens
tctctcgtggacttt

SEQ ID NO: 359011 - DNA, 15 bp, Homo sapiens
gtctctcgtggactt

SEQ ID NO: 359012 - DNA, 15 bp, Homo sapiens
ggtctctcgtggact

SEQ ID NO: 359013 - DNA, 15 bp, Homo sapiens
aggtctctcgtggac

SEQ ID NO: 359014 - DNA, 15 bp, Homo sapiens
caggtctctcgtgga

SEQ ID NO: 359015 - DNA, 15 bp, Homo sapiens
tcaggtctctcgtgg

SEQ ID NO: 359016 - DNA, 15 bp, Homo sapiens
gtcaggtctctcgtg

SEQ ID NO: 359017 - DNA, 15 bp, Homo sapiens
ggtcaggtctctcgt

SEQ ID NO: 359018 - DNA, 15 bp, Homo sapiens
gggtcaggtctctcg

SEQ ID NO: 359019 - DNA, 15 bp, Homo sapiens
ggggtcaggtctctc

SEQ ID NO: 359020 - DNA, 15 bp, Homo sapiens
tggggtcaggtctct

SEQ ID NO: 359021 - DNA, 15 bp, Homo sapiens
ctggggtcaggtctc

SEQ ID NO: 359022 - DNA, 15 bp, Homo sapiens
gctggggtcaggtct

SEQ ID NO: 359023 - DNA, 15 bp, Homo sapiens
agctggggtcaggtc

SEQ ID NO: 359024 - DNA, 15 bp, Homo sapiens
gagctggggtcaggt

SEQ ID NO: 359025 - DNA, 15 bp, Homo sapiens
agagctggggtcagg

SEQ ID NO: 359026 - DNA, 15 bp, Homo sapiens
gagagctggggtcag

SEQ ID NO: 359027 - DNA, 15 bp, Homo sapiens
agagagctggggtca

SEQ ID NO: 359028 - DNA, 15 bp, Homo sapiens
aagagagctggggtc

SEQ ID NO: 359029 - DNA, 15 bp, Homo sapiens
aaagagagctggggt

SEQ ID NO: 359030 - DNA, 15 bp, Homo sapiens
aaaagagagctgggg

SEQ ID NO: 359031 - DNA, 15 bp, Homo sapiens
gaaaagagagctggg

SEQ ID NO: 359032 - DNA, 15 bp, Homo sapiens
agaaaagagagctgg

SEQ ID NO: 359033 - DNA, 15 bp, Homo sapiens
cagaaaagagagctg

SEQ ID NO: 359034 - DNA, 15 bp, Homo sapiens
acagaaaagagagct

SEQ ID NO: 359035 - DNA, 15 bp, Homo sapiens
aacagaaaagagagc

SEQ ID NO: 359036 - DNA, 15 bp, Homo sapiens
aaacagaaaagagag

SEQ ID NO: 359037 - DNA, 15 bp, Homo sapiens
gaaacagaaaagaga

SEQ ID NO: 359038 - DNA, 15 bp, Homo sapiens
agaaacagaaaagag

SEQ ID NO: 359039 - DNA, 15 bp, Homo sapiens
gagaaacagaaaaga

SEQ ID NO: 359040 - DNA, 15 bp, Homo sapiens
tgagaaacagaaaag

SEQ ID NO: 359041 - DNA, 15 bp, Homo sapiens
gtgagaaacagaaaa

SEQ ID NO: 359042 - DNA, 15 bp, Homo sapiens
agtgagaaacagaaa

SEQ ID NO: 359043 - DNA, 15 bp, Homo sapiens
gagtgagaaacagaa

SEQ ID NO: 359044 - DNA, 15 bp, Homo sapiens
agagtgagaaacaga

SEQ ID NO: 359045 - DNA, 15 bp, Homo sapiens
cagagtgagaaacag

SEQ ID NO: 359046 - DNA, 15 bp, Homo sapiens
ccagagtgagaaaca

SEQ ID NO: 359047 - DNA, 15 bp, Homo sapiens
cccagagtgagaaac

SEQ ID NO: 359048 - DNA, 15 bp, Homo sapiens
gcccagagtgagaaa

SEQ ID NO: 359049 - DNA, 15 bp, Homo sapiens
tgcccagagtgagaa

SEQ ID NO: 359050 - DNA, 15 bp, Homo sapiens
ctgcccagagtgaga

SEQ ID NO: 359051 - DNA, 15 bp, Homo sapiens
cctgcccagagtgag

SEQ ID NO: 359052 - DNA, 15 bp, Homo sapiens
acctgcccagagtga

SEQ ID NO: 359053 - DNA, 15 bp, Homo sapiens
cacctgcccagagtg

SEQ ID NO: 359054 - DNA, 15 bp, Homo sapiens
ccacctgcccagagt

SEQ ID NO: 359055 - DNA, 15 bp, Homo sapiens
gccacctgcccagag

SEQ ID NO: 359056 - DNA, 15 bp, Homo sapiens
tgccacctgcccaga

SEQ ID NO: 359057 - DNA, 15 bp, Homo sapiens
ttgccacctgcccag

SEQ ID NO: 359058 - DNA, 15 bp, Homo sapiens
tttgccacctgccca

SEQ ID NO: 359059 - DNA, 15 bp, Homo sapiens
atttgccacctgccc

SEQ ID NO: 359060 - DNA, 15 bp, Homo sapiens
gatttgccacctgcc

SEQ ID NO: 359061 - DNA, 15 bp, Homo sapiens
agatttgccacctgc

SEQ ID NO: 359062 - DNA, 15 bp, Homo sapiens
gagatttgccacctg

SEQ ID NO: 359063 - DNA, 15 bp, Homo sapiens
tgagatttgccacct

SEQ ID NO: 359064 - DNA, 15 bp, Homo sapiens
ctgagatttgccacc

SEQ ID NO: 359065 - DNA, 15 bp, Homo sapiens
tctgagatttgccac

SEQ ID NO: 359066 - DNA, 15 bp, Homo sapiens
atctgagatttgcca

SEQ ID NO: 359067 - DNA, 15 bp, Homo sapiens
aatctgagatttgcc

SEQ ID NO: 359068 - DNA, 15 bp, Homo sapiens
gaatctgagatttgc

SEQ ID NO: 359069 - DNA, 15 bp, Homo sapiens
ggaatctgagatttg

SEQ ID NO: 359070 - DNA, 15 bp, Homo sapiens
aggaatctgagattt

SEQ ID NO: 359071 - DNA, 15 bp, Homo sapiens
caggaatctgagatt

SEQ ID NO: 359072 - DNA, 15 bp, Homo sapiens
tcaggaatctgagat

SEQ ID NO: 359073 - DNA, 15 bp, Homo sapiens
ctcaggaatctgaga

SEQ ID NO: 359074 - DNA, 15 bp, Homo sapiens
cctcaggaatctgag

SEQ ID NO: 359075 - DNA, 15 bp, Homo sapiens
gcctcaggaatctga

SEQ ID NO: 359076 - DNA, 15 bp, Homo sapiens
tgcctcaggaatctg

SEQ ID NO: 359077 - DNA, 15 bp, Homo sapiens
ctgcctcaggaatct

SEQ ID NO: 359078 - DNA, 15 bp, Homo sapiens
gctgcctcaggaatc

SEQ ID NO: 359079 - DNA, 15 bp, Homo sapiens
tgctgcctcaggaat

SEQ ID NO: 359080 - DNA, 15 bp, Homo sapiens
atgctgcctcaggaa

SEQ ID NO: 359081 - DNA, 15 bp, Homo sapiens
catgctgcctcagga

SEQ ID NO: 359082 - DNA, 15 bp, Homo sapiens
tcatgctgcctcagg

SEQ ID NO: 359083 - DNA, 15 bp, Homo sapiens
atcatgctgcctcag

SEQ ID NO: 359084 - DNA, 15 bp, Homo sapiens
gatcatgctgcctca

SEQ ID NO: 359085 - DNA, 15 bp, Homo sapiens
agatcatgctgcctc

SEQ ID NO: 359086 - DNA, 15 bp, Homo sapiens
aagatcatgctgcct

SEQ ID NO: 359087 - DNA, 15 bp, Homo sapiens
aaagatcatgctgcc

SEQ ID NO: 359088 - DNA, 15 bp, Homo sapiens
aaaagatcatgctgc

SEQ ID NO: 359089 - DNA, 15 bp, Homo sapiens
gaaaagatcatgctg

SEQ ID NO: 359090 - DNA, 15 bp, Homo sapiens
agaaaagatcatgct

SEQ ID NO: 359091 - DNA, 15 bp, Homo sapiens
gagaaaagatcatgc

SEQ ID NO: 359092 - DNA, 15 bp, Homo sapiens
ggagaaaagatcatg

SEQ ID NO: 359093 - DNA, 15 bp, Homo sapiens
tggagaaaagatcat

SEQ ID NO: 359094 - DNA, 15 bp, Homo sapiens
gtggagaaaagatca

SEQ ID NO: 359095 - DNA, 15 bp, Homo sapiens
agtggagaaaagatc

SEQ ID NO: 359096 - DNA, 15 bp, Homo sapiens
gagtggagaaaagat

SEQ ID NO: 359097 - DNA, 15 bp, Homo sapiens
ggagtggagaaaaga

SEQ ID NO: 359098 - DNA, 15 bp, Homo sapiens
aggagtggagaaaag

SEQ ID NO: 359099 - DNA, 15 bp, Homo sapiens
aaggagtggagaaaa

SEQ ID NO: 359100 - DNA, 15 bp, Homo sapiens
caaggagtggagaaa

SEQ ID NO: 359101 - DNA, 15 bp, Homo sapiens
ccaaggagtggagaa

SEQ ID NO: 359102 - DNA, 15 bp, Homo sapiens
cccaaggagtggaga

SEQ ID NO: 359103 - DNA, 15 bp, Homo sapiens
tcccaaggagtggag

SEQ ID NO: 359104 - DNA, 15 bp, Homo sapiens
atcccaaggagtgga

SEQ ID NO: 359105 - DNA, 15 bp, Homo sapiens
catcccaaggagtgg

SEQ ID NO: 359106 - DNA, 15 bp, Homo sapiens
gcatcccaaggagtg

SEQ ID NO: 359107 - DNA, 15 bp, Homo sapiens
ggcatcccaaggagt

SEQ ID NO: 359108 - DNA, 15 bp, Homo sapiens
aggcatcccaaggag

SEQ ID NO: 359109 - DNA, 15 bp, Homo sapiens
caggcatcccaagga

SEQ ID NO: 359110 - DNA, 15 bp, Homo sapiens
tcaggcatcccaagg

SEQ ID NO: 359111 - DNA, 15 bp, Homo sapiens
gtcaggcatcccaag

SEQ ID NO: 359112 - DNA, 15 bp, Homo sapiens
tgtcaggcatcccaa

SEQ ID NO: 359113 - DNA, 15 bp, Homo sapiens
ttgtcaggcatccca

SEQ ID NO: 359114 - DNA, 15 bp, Homo sapiens
attgtcaggcatccc

SEQ ID NO: 359115 - DNA, 15 bp, Homo sapiens
aattgtcaggcatcc

SEQ ID NO: 359116 - DNA, 15 bp, Homo sapiens
aaattgtcaggcatc

SEQ ID NO: 359117 - DNA, 15 bp, Homo sapiens
caaattgtcaggcat

SEQ ID NO: 359118 - DNA, 15 bp, Homo sapiens
acaaattgtcaggca

SEQ ID NO: 359119 - DNA, 15 bp, Homo sapiens
tacaaattgtcaggc

SEQ ID NO: 359120 - DNA, 15 bp, Homo sapiens
ttacaaattgtcagg

SEQ ID NO: 359121 - DNA, 15 bp, Homo sapiens
tttacaaattgtcag

SEQ ID NO: 359122 - DNA, 15 bp, Homo sapiens
atttacaaattgtca

SEQ ID NO: 359123 - DNA, 15 bp, Homo sapiens
gatttacaaattgtc

SEQ ID NO: 359124 - DNA, 15 bp, Homo sapiens
ggatttacaaattgt

SEQ ID NO: 359125 - DNA, 15 bp, Homo sapiens
tggatttacaaattg

SEQ ID NO: 359126 - DNA, 15 bp, Homo sapiens
gtggatttacaaatt

SEQ ID NO: 359127 - DNA, 15 bp, Homo sapiens
cgtggatttacaaat

SEQ ID NO: 359128 - DNA, 15 bp, Homo sapiens
tcgtggatttacaaa

SEQ ID NO: 359129 - DNA, 15 bp, Homo sapiens
ctcgtggatttacaa

SEQ ID NO: 359130 - DNA, 15 bp, Homo sapiens
cctcgtggatttaca

SEQ ID NO: 359131 - DNA, 15 bp, Homo sapiens
tcctcgtggatttac

SEQ ID NO: 359132 - DNA, 15 bp, Homo sapiens
ttcctcgtggattta

SEQ ID NO: 359133 - DNA, 15 bp, Homo sapiens
cttcctcgtggattt

SEQ ID NO: 359134 - DNA, 15 bp, Homo sapiens
acttcctcgtggatt

SEQ ID NO: 359135 - DNA, 15 bp, Homo sapiens
cacttcctcgtggat

SEQ ID NO: 359136 - DNA, 15 bp, Homo sapiens
acacttcctcgtgga

SEQ ID NO: 359137 - DNA, 15 bp, Homo sapiens
aacacttcctcgtgg

SEQ ID NO: 359138 - DNA, 15 bp, Homo sapiens
aaacacttcctcgtg

SEQ ID NO: 359139 - DNA, 15 bp, Homo sapiens
caaacacttcctcgt

SEQ ID NO: 359140 - DNA, 15 bp, Homo sapiens
acaaacacttcctcg

SEQ ID NO: 359141 - DNA, 15 bp, Homo sapiens
aacaaacacttcctc

SEQ ID NO: 359142 - DNA, 15 bp, Homo sapiens
caacaaacacttcct

SEQ ID NO: 359143 - DNA, 15 bp, Homo sapiens
gcaacaaacacttcc

SEQ ID NO: 359144 - DNA, 15 bp, Homo sapiens
tgcaacaaacacttc

SEQ ID NO: 359145 - DNA, 15 bp, Homo sapiens
ttgcaacaaacactt

SEQ ID NO: 359146 - DNA, 15 bp, Homo sapiens
cttgcaacaaacact

SEQ ID NO: 359147 - DNA, 15 bp, Homo sapiens
ccttgcaacaaacac

SEQ ID NO: 359148 - DNA, 15 bp, Homo sapiens
cccttgcaacaaaca

SEQ ID NO: 359149 - DNA, 15 bp, Homo sapiens
gcccttgcaacaaac

SEQ ID NO: 359150 - DNA, 15 bp, Homo sapiens
ggcccttgcaacaaa

SEQ ID NO: 359151 - DNA, 15 bp, Homo sapiens
aggcccttgcaacaa

SEQ ID NO: 359152 - DNA, 15 bp, Homo sapiens
aaggcccttgcaaca

SEQ ID NO: 359153 - DNA, 15 bp, Homo sapiens
gaaggcccttgcaac

SEQ ID NO: 359154 - DNA, 15 bp, Homo sapiens
ggaaggcccttgcaa

SEQ ID NO: 359155 - DNA, 15 bp, Homo sapiens
aggaaggcccttgca

SEQ ID NO: 359156 - DNA, 15 bp, Homo sapiens
aaggaaggcccttgc

SEQ ID NO: 359157 - DNA, 15 bp, Homo sapiens
taaggaaggcccttg

SEQ ID NO: 359158 - DNA, 15 bp, Homo sapiens
ttaaggaaggccctt

SEQ ID NO: 359159 - DNA, 15 bp, Homo sapiens
gttaaggaaggccct

SEQ ID NO: 359160 - DNA, 15 bp, Homo sapiens
tgttaaggaaggccc

SEQ ID NO: 359161 - DNA, 15 bp, Homo sapiens
ttgttaaggaaggcc

SEQ ID NO: 359162 - DNA, 15 bp, Homo sapiens
attgttaaggaaggc

SEQ ID NO: 359163 - DNA, 15 bp, Homo sapiens
gattgttaaggaagg

SEQ ID NO: 359164 - DNA, 15 bp, Homo sapiens
agattgttaaggaag

SEQ ID NO: 359165 - DNA, 15 bp, Homo sapiens
gagattgttaaggaa

SEQ ID NO: 359166 - DNA, 15 bp, Homo sapiens
tgagattgttaagga

SEQ ID NO: 359167 - DNA, 15 bp, Homo sapiens
atgagattgttaagg

SEQ ID NO: 359168 - DNA, 15 bp, Homo sapiens
catgagattgttaag

SEQ ID NO: 359169 - DNA, 15 bp, Homo sapiens
gcatgagattgttaa

SEQ ID NO: 359170 - DNA, 15 bp, Homo sapiens
tgcatgagattgtta

SEQ ID NO: 359171 - DNA, 15 bp, Homo sapiens
ttgcatgagattgtt

SEQ ID NO: 359172 - DNA, 15 bp, Homo sapiens
tttgcatgagattgt

SEQ ID NO: 359173 - DNA, 15 bp, Homo sapiens
gtttgcatgagattg

SEQ ID NO: 359174 - DNA, 15 bp, Homo sapiens
tgtttgcatgagatt

SEQ ID NO: 359175 - DNA, 15 bp, Homo sapiens
ctgtttgcatgagat

SEQ ID NO: 359176 - DNA, 15 bp, Homo sapiens
gctgtttgcatgaga

SEQ ID NO: 359177 - DNA, 15 bp, Homo sapiens
tgctgtttgcatgag

SEQ ID NO: 359178 - DNA, 15 bp, Homo sapiens
atgctgtttgcatga

SEQ ID NO: 359179 - DNA, 15 bp, Homo sapiens
catgctgtttgcatg

SEQ ID NO: 359180 - DNA, 15 bp, Homo sapiens
tcatgctgtttgcat

SEQ ID NO: 359181 - DNA, 15 bp, Homo sapiens
ttcatgctgtttgca

SEQ ID NO: 359182 - DNA, 15 bp, Homo sapiens
cttcatgctgtttgc

SEQ ID NO: 359183 - DNA, 15 bp, Homo sapiens
acttcatgctgtttg

SEQ ID NO: 359184 - DNA, 15 bp, Homo sapiens
cacttcatgctgttt

SEQ ID NO: 359185 - DNA, 15 bp, Homo sapiens
tcacttcatgctgtt

SEQ ID NO: 359186 - DNA, 15 bp, Homo sapiens
atcacttcatgctgt

SEQ ID NO: 359187 - DNA, 15 bp, Homo sapiens
gatcacttcatgctg

SEQ ID NO: 359188 - DNA, 15 bp, Homo sapiens
tgatcacttcatgct

SEQ ID NO: 359189 - DNA, 15 bp, Homo sapiens
ttgatcacttcatgc

SEQ ID NO: 359190 - DNA, 15 bp, Homo sapiens
tttgatcacttcatg

SEQ ID NO: 359191 - DNA, 15 bp, Homo sapiens
ttttgatcacttcat

SEQ ID NO: 359192 - DNA, 15 bp, Homo sapiens
cttttgatcacttca

SEQ ID NO: 359193 - DNA, 15 bp, Homo sapiens
tcttttgatcacttc

SEQ ID NO: 359194 - DNA, 15 bp, Homo sapiens
ttcttttgatcactt

SEQ ID NO: 359195 - DNA, 15 bp, Homo sapiens
tttcttttgatcact

SEQ ID NO: 359196 - DNA, 15 bp, Homo sapiens
atttcttttgatcac

SEQ ID NO: 359197 - DNA, 15 bp, Homo sapiens
tatttcttttgatca

SEQ ID NO: 359198 - DNA, 15 bp, Homo sapiens
ttatttcttttgatc

SEQ ID NO: 359199 - DNA, 15 bp, Homo sapiens
cttatttcttttgat

SEQ ID NO: 359200 - DNA, 15 bp, Homo sapiens
acttatttcttttga

SEQ ID NO: 359201 - DNA, 15 bp, Homo sapiens
gacttatttcttttg

SEQ ID NO: 359202 - DNA, 15 bp, Homo sapiens
agacttatttctttt

SEQ ID NO: 359203 - DNA, 15 bp, Homo sapiens
aagacttatttcttt

SEQ ID NO: 359204 - DNA, 15 bp, Homo sapiens
caagacttatttctt

SEQ ID NO: 359205 - DNA, 15 bp, Homo sapiens
acaagacttatttct

SEQ ID NO: 359206 - DNA, 15 bp, Homo sapiens
cacaagacttatttc

SEQ ID NO: 359207 - DNA, 15 bp, Homo sapiens
acacaagacttattt

SEQ ID NO: 359208 - DNA, 15 bp, Homo sapiens
aacacaagacttatt

SEQ ID NO: 359209 - DNA, 15 bp, Homo sapiens
taacacaagacttat

SEQ ID NO: 359210 - DNA, 15 bp, Homo sapiens
ctaacacaagactta

SEQ ID NO: 359211 - DNA, 15 bp, Homo sapiens
tctaacacaagactt

SEQ ID NO: 359212 - DNA, 15 bp, Homo sapiens
atctaacacaagact

SEQ ID NO: 359213 - DNA, 15 bp, Homo sapiens
aatctaacacaagac

SEQ ID NO: 359214 - DNA, 15 bp, Homo sapiens
aaatctaacacaaga

SEQ ID NO: 359215 - DNA, 15 bp, Homo sapiens
caaatctaacacaag

SEQ ID NO: 359216 - DNA, 15 bp, Homo sapiens
gcaaatctaacacaa

SEQ ID NO: 359217 - DNA, 15 bp, Homo sapiens
ggcaaatctaacaca

SEQ ID NO: 359218 - DNA, 15 bp, Homo sapiens
aggcaaatctaacac

SEQ ID NO: 359219 - DNA, 15 bp, Homo sapiens
aaggcaaatctaaca

SEQ ID NO: 359220 - DNA, 15 bp, Homo sapiens
caaggcaaatctaac

SEQ ID NO: 359221 - DNA, 15 bp, Homo sapiens
acaaggcaaatctaa

SEQ ID NO: 359222 - DNA, 15 bp, Homo sapiens
gacaaggcaaatcta

SEQ ID NO: 359223 - DNA, 15 bp, Homo sapiens
ggacaaggcaaatct

SEQ ID NO: 359224 - DNA, 15 bp, Homo sapiens
tggacaaggcaaatc

SEQ ID NO: 359225 - DNA, 15 bp, Homo sapiens
ctggacaaggcaaat

SEQ ID NO: 359226 - DNA, 15 bp, Homo sapiens
actggacaaggcaaa

SEQ ID NO: 359227 - DNA, 15 bp, Homo sapiens
aactggacaaggcaa

SEQ ID NO: 359228 - DNA, 15 bp, Homo sapiens
gaactggacaaggca

SEQ ID NO: 359229 - DNA, 15 bp, Homo sapiens
agaactggacaaggc

SEQ ID NO: 359230 - DNA, 15 bp, Homo sapiens
cagaactggacaagg

SEQ ID NO: 359231 - DNA, 15 bp, Homo sapiens
acagaactggacaag

SEQ ID NO: 359232 - DNA, 15 bp, Homo sapiens
cacagaactggacaa

SEQ ID NO: 359233 - DNA, 15 bp, Homo sapiens
ccacagaactggaca

SEQ ID NO: 359234 - DNA, 15 bp, Homo sapiens
cccacagaactggac

SEQ ID NO: 359235 - DNA, 15 bp, Homo sapiens
ccccacagaactgga

SEQ ID NO: 359236 - DNA, 15 bp, Homo sapiens
accccacagaactgg

SEQ ID NO: 359237 - DNA, 15 bp, Homo sapiens
caccccacagaactg

SEQ ID NO: 359238 - DNA, 15 bp, Homo sapiens
ccaccccacagaact

SEQ ID NO: 359239 - DNA, 15 bp, Homo sapiens
gccaccccacagaac

SEQ ID NO: 359240 - DNA, 15 bp, Homo sapiens
tgccaccccacagaa

SEQ ID NO: 359241 - DNA, 15 bp, Homo sapiens
ctgccaccccacaga

SEQ ID NO: 359242 - DNA, 15 bp, Homo sapiens
tctgccaccccacag

SEQ ID NO: 359243 - DNA, 15 bp, Homo sapiens
ttctgccaccccaca

SEQ ID NO: 359244 - DNA, 15 bp, Homo sapiens
gttctgccaccccac

SEQ ID NO: 359245 - DNA, 15 bp, Homo sapiens
ggttctgccacccca

SEQ ID NO: 359246 - DNA, 15 bp, Homo sapiens
tggttctgccacccc

SEQ ID NO: 359247 - DNA, 15 bp, Homo sapiens
ctggttctgccaccc

SEQ ID NO: 359248 - DNA, 15 bp, Homo sapiens
actggttctgccacc

SEQ ID NO: 359249 - DNA, 15 bp, Homo sapiens
tactggttctgccac

SEQ ID NO: 359250 - DNA, 15 bp, Homo sapiens
gtactggttctgcca

SEQ ID NO: 359251 - DNA, 15 bp, Homo sapiens
ggtactggttctgcc

SEQ ID NO: 359252 - DNA, 15 bp, Homo sapiens
aggtactggttctgc

SEQ ID NO: 359253 - DNA, 15 bp, Homo sapiens
gaggtactggttctg

SEQ ID NO: 359254 - DNA, 15 bp, Homo sapiens
tgaggtactggttct

SEQ ID NO: 359255 - DNA, 15 bp, Homo sapiens
ttgaggtactggttc

SEQ ID NO: 359256 - DNA, 15 bp, Homo sapiens
tttgaggtactggtt

SEQ ID NO: 359257 - DNA, 15 bp, Homo sapiens
gtttgaggtactggt

SEQ ID NO: 359258 - DNA, 15 bp, Homo sapiens
tgtttgaggtactgg

SEQ ID NO: 359259 - DNA, 15 bp, Homo sapiens
gtgtttgaggtactg

SEQ ID NO: 359260 - DNA, 15 bp, Homo sapiens
ggtgtttgaggtact

SEQ ID NO: 359261 - DNA, 15 bp, Homo sapiens
aggtgtttgaggtac

SEQ ID NO: 359262 - DNA, 15 bp, Homo sapiens
aaggtgtttgaggta

SEQ ID NO: 359263 - DNA, 15 bp, Homo sapiens
aaaggtgtttgaggt

SEQ ID NO: 359264 - DNA, 15 bp, Homo sapiens
caaaggtgtttgagg

SEQ ID NO: 359265 - DNA, 15 bp, Homo sapiens
tcaaaggtgtttgag

SEQ ID NO: 359266 - DNA, 15 bp, Homo sapiens
ctcaaaggtgtttga

SEQ ID NO: 359267 - DNA, 15 bp, Homo sapiens
tctcaaaggtgtttg

SEQ ID NO: 359268 - DNA, 15 bp, Homo sapiens
ttctcaaaggtgttt

SEQ ID NO: 359269 - DNA, 15 bp, Homo sapiens
tttctcaaaggtgtt

SEQ ID NO: 359270 - DNA, 15 bp, Homo sapiens
atttctcaaaggtgt

SEQ ID NO: 359271 - DNA, 15 bp, Homo sapiens
catttctcaaaggtg

SEQ ID NO: 359272 - DNA, 15 bp, Homo sapiens
ccatttctcaaaggt

SEQ ID NO: 359273 - DNA, 15 bp, Homo sapiens
accatttctcaaagg

SEQ ID NO: 359274 - DNA, 15 bp, Homo sapiens
caccatttctcaaag

SEQ ID NO: 359275 - DNA, 15 bp, Homo sapiens
acaccatttctcaaa

SEQ ID NO: 359276 - DNA, 15 bp, Homo sapiens
aacaccatttctcaa

SEQ ID NO: 359277 - DNA, 15 bp, Homo sapiens
gaacaccatttctca

SEQ ID NO: 359278 - DNA, 15 bp, Homo sapiens
tgaacaccatttctc

SEQ ID NO: 359279 - DNA, 15 bp, Homo sapiens
ctgaacaccatttct

SEQ ID NO: 359280 - DNA, 15 bp, Homo sapiens
cctgaacaccatttc

SEQ ID NO: 359281 - DNA, 15 bp, Homo sapiens
ccctgaacaccattt

SEQ ID NO: 359282 - DNA, 15 bp, Homo sapiens
gccctgaacaccatt

SEQ ID NO: 359283 - DNA, 15 bp, Homo sapiens
agccctgaacaccat

SEQ ID NO: 359284 - DNA, 15 bp, Homo sapiens
cagccctgaacacca

SEQ ID NO: 359285 - DNA, 15 bp, Homo sapiens
ccagccctgaacacc

SEQ ID NO: 359286 - DNA, 15 bp, Homo sapiens
tccagccctgaacac

SEQ ID NO: 359287 - DNA, 15 bp, Homo sapiens
ttccagccctgaaca

SEQ ID NO: 359288 - DNA, 15 bp, Homo sapiens
tttccagccctgaac

SEQ ID NO: 359289 - DNA, 15 bp, Homo sapiens
atttccagccctgaa

SEQ ID NO: 359290 - DNA, 15 bp, Homo sapiens
aatttccagccctga

SEQ ID NO: 359291 - DNA, 15 bp, Homo sapiens
caatttccagccctg

SEQ ID NO: 359292 - DNA, 15 bp, Homo sapiens
ccaatttccagccct

SEQ ID NO: 359293 - DNA, 15 bp, Homo sapiens
cccaatttccagccc

SEQ ID NO: 359294 - DNA, 15 bp, Homo sapiens
gcccaatttccagcc

SEQ ID NO: 359295 - DNA, 15 bp, Homo sapiens
cgcccaatttccagc

SEQ ID NO: 359296 - DNA, 15 bp, Homo sapiens
tcgcccaatttccag

SEQ ID NO: 359297 - DNA, 15 bp, Homo sapiens
ctcgcccaatttcca

SEQ ID NO: 359298 - DNA, 15 bp, Homo sapiens
cctcgcccaatttcc

SEQ ID NO: 359299 - DNA, 15 bp, Homo sapiens
acctcgcccaatttc

SEQ ID NO: 359300 - DNA, 15 bp, Homo sapiens
cacctcgcccaattt

SEQ ID NO: 359301 - DNA, 15 bp, Homo sapiens
tcacctcgcccaatt

SEQ ID NO: 359302 - DNA, 15 bp, Homo sapiens
ctcacctcgcccaat

SEQ ID NO: 359303 - DNA, 15 bp, Homo sapiens
tctcacctcgcccaa

SEQ ID NO: 359304 - DNA, 15 bp, Homo sapiens
ctctcacctcgccca

SEQ ID NO: 359305 - DNA, 15 bp, Homo sapiens
tctctcacctcgccc

SEQ ID NO: 359306 - DNA, 15 bp, Homo sapiens
ttctctcacctcgcc

SEQ ID NO: 359307 - DNA, 15 bp, Homo sapiens
cttctctcacctcgc

SEQ ID NO: 359308 - DNA, 15 bp, Homo sapiens
gcttctctcacctcg

SEQ ID NO: 359309 - DNA, 15 bp, Homo sapiens
agcttctctcacctc

SEQ ID NO: 359310 - DNA, 15 bp, Homo sapiens
aagcttctctcacct

SEQ ID NO: 359311 - DNA, 15 bp, Homo sapiens
aaagcttctctcacc

SEQ ID NO: 359312 - DNA, 15 bp, Homo sapiens
aaaagcttctctcac

SEQ ID NO: 359313 - DNA, 15 bp, Homo sapiens
caaaagcttctctca

SEQ ID NO: 359314 - DNA, 15 bp, Homo sapiens
gcaaaagcttctctc

SEQ ID NO: 359315 - DNA, 15 bp, Homo sapiens
ggcaaaagcttctct

SEQ ID NO: 359316 - DNA, 15 bp, Homo sapiens
gggcaaaagcttctc

SEQ ID NO: 359317 - DNA, 15 bp, Homo sapiens
agggcaaaagcttct

SEQ ID NO: 359318 - DNA, 15 bp, Homo sapiens
cagggcaaaagcttc

SEQ ID NO: 359319 - DNA, 15 bp, Homo sapiens
ccagggcaaaagctt

SEQ ID NO: 359320 - DNA, 15 bp, Homo sapiens
gtcactgaaggccat

SEQ ID NO: 359321 - DNA, 15 bp, Homo sapiens
tgtcactgaaggcca

SEQ ID NO: 359322 - DNA, 15 bp, Homo sapiens
ttgtcactgaaggcc

SEQ ID NO: 359323 - DNA, 15 bp, Homo sapiens
gttgtcactgaaggc

SEQ ID NO: 359324 - DNA, 15 bp, Homo sapiens
ggttgtcactgaagg

SEQ ID NO: 359325 - DNA, 15 bp, Homo sapiens
tggttgtcactgaag

SEQ ID NO: 359326 - DNA, 15 bp, Homo sapiens
gtggttgtcactgaa

SEQ ID NO: 359327 - DNA, 15 bp, Homo sapiens
agtggttgtcactga

SEQ ID NO: 359328 - DNA, 15 bp, Homo sapiens
aagtggttgtcactg

SEQ ID NO: 359329 - DNA, 15 bp, Homo sapiens
gaagtggttgtcact

SEQ ID NO: 359330 - DNA, 15 bp, Homo sapiens
ggaagtggttgtcac

SEQ ID NO: 359331 - DNA, 15 bp, Homo sapiens
aggaagtggttgtca

SEQ ID NO: 359332 - DNA, 15 bp, Homo sapiens
gaggaagtggttgtc

SEQ ID NO: 359333 - DNA, 15 bp, Homo sapiens
agaggaagtggttgt

SEQ ID NO: 359334 - DNA, 15 bp, Homo sapiens
cagaggaagtggttg

SEQ ID NO: 359335 - DNA, 15 bp, Homo sapiens
gcagaggaagtggtt

SEQ ID NO: 359336 - DNA, 15 bp, Homo sapiens
tgcagaggaagtggt

SEQ ID NO: 359337 - DNA, 15 bp, Homo sapiens
atgcagaggaagtgg

SEQ ID NO: 359338 - DNA, 15 bp, Homo sapiens
gatgcagaggaagtg

SEQ ID NO: 359339 - DNA, 15 bp, Homo sapiens
agatgcagaggaagt

SEQ ID NO: 359340 - DNA, 15 bp, Homo sapiens
aagatgcagaggaag

SEQ ID NO: 359341 - DNA, 15 bp, Homo sapiens
aaagatgcagaggaa

SEQ ID NO: 359342 - DNA, 15 bp, Homo sapiens
gaaagatgcagagga

SEQ ID NO: 359343 - DNA, 15 bp, Homo sapiens
tgaaagatgcagagg

SEQ ID NO: 359344 - DNA, 15 bp, Homo sapiens
gtgaaagatgcagag

SEQ ID NO: 359345 - DNA, 15 bp, Homo sapiens
tgtgaaagatgcaga

SEQ ID NO: 359346 - DNA, 15 bp, Homo sapiens
atgtgaaagatgcag

SEQ ID NO: 359347 - DNA, 15 bp, Homo sapiens
gatgtgaaagatgca

SEQ ID NO: 359348 - DNA, 15 bp, Homo sapiens
ggatgtgaaagatgc

SEQ ID NO: 359349 - DNA, 15 bp, Homo sapiens
aggatgtgaaagatg

SEQ ID NO: 359350 - DNA, 15 bp, Homo sapiens
gaggatgtgaaagat

SEQ ID NO: 359351 - DNA, 15 bp, Homo sapiens
agaggatgtgaaaga

SEQ ID NO: 359352 - DNA, 15 bp, Homo sapiens
cagaggatgtgaaag

SEQ ID NO: 359353 - DNA, 15 bp, Homo sapiens
tcagaggatgtgaaa

SEQ ID NO: 359354 - DNA, 15 bp, Homo sapiens
ctcagaggatgtgaa

SEQ ID NO: 359355 - DNA, 15 bp, Homo sapiens
tctcagaggatgtga

SEQ ID NO: 359356 - DNA, 15 bp, Homo sapiens
atctcagaggatgtg

SEQ ID NO: 359357 - DNA, 15 bp, Homo sapiens
catctcagaggatgt

SEQ ID NO: 359358 - DNA, 15 bp, Homo sapiens
acatctcagaggatg

SEQ ID NO: 359359 - DNA, 15 bp, Homo sapiens
tacatctcagaggat

SEQ ID NO: 359360 - DNA, 15 bp, Homo sapiens
ttacatctcagagga

SEQ ID NO: 359361 - DNA, 15 bp, Homo sapiens
attacatctcagagg

SEQ ID NO: 359362 - DNA, 15 bp, Homo sapiens
aattacatctcagag

SEQ ID NO: 359363 - DNA, 15 bp, Homo sapiens
gaattacatctcaga

SEQ ID NO: 359364 - DNA, 15 bp, Homo sapiens
tgaattacatctcag

SEQ ID NO: 359365 - DNA, 15 bp, Homo sapiens
ctgaattacatctca

SEQ ID NO: 359366 - DNA, 15 bp, Homo sapiens
cctgaattacatctc

SEQ ID NO: 359367 - DNA, 15 bp, Homo sapiens
ccctgaattacatct

SEQ ID NO: 359368 - DNA, 15 bp, Homo sapiens
cccctgaattacatc

SEQ ID NO: 359369 - DNA, 15 bp, Homo sapiens
ccccctgaattacat

SEQ ID NO: 359370 - DNA, 15 bp, Homo sapiens
gccccctgaattaca

SEQ ID NO: 359371 - DNA, 15 bp, Homo sapiens
tgccccctgaattac

SEQ ID NO: 359372 - DNA, 15 bp, Homo sapiens
gtgccccctgaatta

SEQ ID NO: 359373 - DNA, 15 bp, Homo sapiens
agtgccccctgaatt

SEQ ID NO: 359374 - DNA, 15 bp, Homo sapiens
aagtgccccctgaat

SEQ ID NO: 359375 - DNA, 15 bp, Homo sapiens
aaagtgccccctgaa

SEQ ID NO: 359376 - DNA, 15 bp, Homo sapiens
gaaagtgccccctga

SEQ ID NO: 359377 - DNA, 15 bp, Homo sapiens
ggaaagtgccccctg

SEQ ID NO: 359378 - DNA, 15 bp, Homo sapiens
tggaaagtgccccct

SEQ ID NO: 359379 - DNA, 15 bp, Homo sapiens
atggaaagtgccccc

SEQ ID NO: 359380 - DNA, 15 bp, Homo sapiens
aatggaaagtgcccc

SEQ ID NO: 359381 - DNA, 15 bp, Homo sapiens
aaatggaaagtgccc

SEQ ID NO: 359382 - DNA, 15 bp, Homo sapiens
ataaatggaaagtgc

SEQ ID NO: 359383 - DNA, 15 bp, Homo sapiens
tataaatggaaagtg

SEQ ID NO: 359384 - DNA, 15 bp, Homo sapiens
ttataaatggaaagt

SEQ ID NO: 359385 - DNA, 15 bp, Homo sapiens
attataaatggaaag

SEQ ID NO: 359386 - DNA, 15 bp, Homo sapiens
aattataaatggaaa

SEQ ID NO: 359387 - DNA, 15 bp, Homo sapiens
aaattataaatggaa

SEQ ID NO: 359388 - DNA, 15 bp, Homo sapiens
taaattataaatgga

SEQ ID NO: 359389 - DNA, 15 bp, Homo sapiens
ataaattataaatgg

SEQ ID NO: 359390 - DNA, 15 bp, Homo sapiens
gataaattataaatg

SEQ ID NO: 359391 - DNA, 15 bp, Homo sapiens
tgataaattataaat

SEQ ID NO: 359392 - DNA, 15 bp, Homo sapiens
gtgataaattataaa

SEQ ID NO: 359393 - DNA, 15 bp, Homo sapiens
tgtgataaattataa

SEQ ID NO: 359394 - DNA, 15 bp, Homo sapiens
atgtgataaattata

SEQ ID NO: 359395 - DNA, 15 bp, Homo sapiens
aatgtgataaattat

SEQ ID NO: 359396 - DNA, 15 bp, Homo sapiens
aaatgtgataaatta

SEQ ID NO: 359397 - DNA, 15 bp, Homo sapiens
aaaatgtgataaatt

SEQ ID NO: 359398 - DNA, 15 bp, Homo sapiens
gaaaatgtgataaat

SEQ ID NO: 359399 - DNA, 15 bp, Homo sapiens
ggaaaatgtgataaa

SEQ ID NO: 359400 - DNA, 15 bp, Homo sapiens
tggaaaatgtgataa

SEQ ID NO: 359401 - DNA, 15 bp, Homo sapiens
gtggaaaatgtgata

SEQ ID NO: 359402 - DNA, 15 bp, Homo sapiens
agtggaaaatgtgat

SEQ ID NO: 359403 - DNA, 15 bp, Homo sapiens
aagtggaaaatgtga

SEQ ID NO: 359404 - DNA, 15 bp, Homo sapiens
taagtggaaaatgtg

SEQ ID NO: 359405 - DNA, 15 bp, Homo sapiens
ctaagtggaaaatgt

SEQ ID NO: 359406 - DNA, 15 bp, Homo sapiens
cctaagtggaaaatg

SEQ ID NO: 359407 - DNA, 15 bp, Homo sapiens
acctaagtggaaaat

SEQ ID NO: 359408 - DNA, 15 bp, Homo sapiens
aacctaagtggaaaa

SEQ ID NO: 359409 - DNA, 15 bp, Homo sapiens
aaacctaagtggaaa

SEQ ID NO: 359410 - DNA, 15 bp, Homo sapiens
aaaacctaagtggaa

SEQ ID NO: 359411 - DNA, 15 bp, Homo sapiens
gaaaacctaagtgga

SEQ ID NO: 359412 - DNA, 15 bp, Homo sapiens
ggaaaacctaagtgg

SEQ ID NO: 359413 - DNA, 15 bp, Homo sapiens
aggaaaacctaagtg

SEQ ID NO: 359414 - DNA, 15 bp, Homo sapiens
caggaaaacctaagt

SEQ ID NO: 359415 - DNA, 15 bp, Homo sapiens
acaggaaaacctaag

SEQ ID NO: 359416 - DNA, 15 bp, Homo sapiens
gacaggaaaacctaa

SEQ ID NO: 359417 - DNA, 15 bp, Homo sapiens
ggacaggaaaaccta

SEQ ID NO: 359418 - DNA, 15 bp, Homo sapiens
aggacaggaaaacct

SEQ ID NO: 359419 - DNA, 15 bp, Homo sapiens
aaggacaggaaaacc

SEQ ID NO: 359420 - DNA, 15 bp, Homo sapiens
aaaggacaggaaaac

SEQ ID NO: 359421 - DNA, 15 bp, Homo sapiens
aaaaggacaggaaaa

SEQ ID NO: 359422 - DNA, 15 bp, Homo sapiens
gaaaaggacaggaaa

SEQ ID NO: 359423 - DNA, 15 bp, Homo sapiens
agaaaaggacaggaa

SEQ ID NO: 359424 - DNA, 15 bp, Homo sapiens
aagaaaaggacagga

SEQ ID NO: 359425 - DNA, 15 bp, Homo sapiens
gaagaaaaggacagg

SEQ ID NO: 359426 - DNA, 15 bp, Homo sapiens
ggaagaaaaggacag

SEQ ID NO: 359427 - DNA, 15 bp, Homo sapiens
gggaagaaaaggaca

SEQ ID NO: 359428 - DNA, 15 bp, Homo sapiens
tgggaagaaaaggac

SEQ ID NO: 359429 - DNA, 15 bp, Homo sapiens
ctgggaagaaaagga

SEQ ID NO: 359430 - DNA, 15 bp, Homo sapiens
cctgggaagaaaagg

SEQ ID NO: 359431 - DNA, 15 bp, Homo sapiens
gcctgggaagaaaag

SEQ ID NO: 359432 - DNA, 15 bp, Homo sapiens
tgcctgggaagaaaa

SEQ ID NO: 359433 - DNA, 15 bp, Homo sapiens
atgcctgggaagaaa

SEQ ID NO: 359434 - DNA, 15 bp, Homo sapiens
catgcctgggaagaa

SEQ ID NO: 359435 - DNA, 15 bp, Homo sapiens
tcatgcctgggaaga

SEQ ID NO: 359436 - DNA, 15 bp, Homo sapiens
gtcatgcctgggaag

SEQ ID NO: 359437 - DNA, 15 bp, Homo sapiens
ggtcatgcctgggaa

SEQ ID NO: 359438 - DNA, 15 bp, Homo sapiens
gggtcatgcctggga

SEQ ID NO: 359439 - DNA, 15 bp, Homo sapiens
ggggtcatgcctggg

SEQ ID NO: 359440 - DNA, 15 bp, Homo sapiens
aggggtcatgcctgg

SEQ ID NO: 359441 - DNA, 15 bp, Homo sapiens
aaggggtcatgcctg

SEQ ID NO: 359442 - DNA, 15 bp, Homo sapiens
caaggggtcatgcct

SEQ ID NO: 359443 - DNA, 15 bp, Homo sapiens
acaaggggtcatgcc

SEQ ID NO: 359444 - DNA, 15 bp, Homo sapiens
aacaaggggtcatgc

SEQ ID NO: 359445 - DNA, 15 bp, Homo sapiens
taacaaggggtcatg

SEQ ID NO: 359446 - DNA, 15 bp, Homo sapiens
ttaacaaggggtcat

SEQ ID NO: 359447 - DNA, 15 bp, Homo sapiens
attaacaaggggtca

SEQ ID NO: 359448 - DNA, 15 bp, Homo sapiens
aattaacaaggggtc

SEQ ID NO: 359449 - DNA, 15 bp, Homo sapiens
gaattaacaaggggt

SEQ ID NO: 359450 - DNA, 15 bp, Homo sapiens
ggaattaacaagggg

SEQ ID NO: 359451 - DNA, 15 bp, Homo sapiens
aggaattaacaaggg

SEQ ID NO: 359452 - DNA, 15 bp, Homo sapiens
caggaattaacaagg

SEQ ID NO: 359453 - DNA, 15 bp, Homo sapiens
ccaggaattaacaag

SEQ ID NO: 359454 - DNA, 15 bp, Homo sapiens
gccaggaattaacaa

SEQ ID NO: 359455 - DNA, 15 bp, Homo sapiens
tgccaggaattaaca

SEQ ID NO: 359456 - DNA, 15 bp, Homo sapiens
ttgccaggaattaac

SEQ ID NO: 359457 - DNA, 15 bp, Homo sapiens
attgccaggaattaa

SEQ ID NO: 359458 - DNA, 15 bp, Homo sapiens
cattgccaggaatta

SEQ ID NO: 359459 - DNA, 15 bp, Homo sapiens
tcattgccaggaatt

SEQ ID NO: 359460 - DNA, 15 bp, Homo sapiens
atcattgccaggaat

SEQ ID NO: 359461 - DNA, 15 bp, Homo sapiens
gatcattgccaggaa

SEQ ID NO: 359462 - DNA, 15 bp, Homo sapiens
tgatcattgccagga

SEQ ID NO: 359463 - DNA, 15 bp, Homo sapiens
ctgatcattgccagg

SEQ ID NO: 359464 - DNA, 15 bp, Homo sapiens
tctgatcattgccag

SEQ ID NO: 359465 - DNA, 15 bp, Homo sapiens
atctgatcattgcca

SEQ ID NO: 359466 - DNA, 15 bp, Homo sapiens
aatctgatcattgcc

SEQ ID NO: 359467 - DNA, 15 bp, Homo sapiens
caatctgatcattgc

SEQ ID NO: 359468 - DNA, 15 bp, Homo sapiens
tcaatctgatcattg

SEQ ID NO: 359469 - DNA, 15 bp, Homo sapiens
gtcaatctgatcatt

SEQ ID NO: 359470 - DNA, 15 bp, Homo sapiens
tgtcaatctgatcat

SEQ ID NO: 359471 - DNA, 15 bp, Homo sapiens
ttgtcaatctgatca

SEQ ID NO: 359472 - DNA, 15 bp, Homo sapiens
gttgtcaatctgatc

SEQ ID NO: 359473 - DNA, 15 bp, Homo sapiens
tgttgtcaatctgat

SEQ ID NO: 359474 - DNA, 15 bp, Homo sapiens
atgttgtcaatctga

SEQ ID NO: 359475 - DNA, 15 bp, Homo sapiens
catgttgtcaatctg

SEQ ID NO: 359476 - DNA, 15 bp, Homo sapiens
ccatgttgtcaatct

SEQ ID NO: 359477 - DNA, 15 bp, Homo sapiens
tccatgttgtcaatc

SEQ ID NO: 359478 - DNA, 15 bp, Homo sapiens
gtccatgttgtcaat

SEQ ID NO: 359479 - DNA, 15 bp, Homo sapiens
agtccatgttgtcaa

SEQ ID NO: 359480 - DNA, 15 bp, Homo sapiens
gagtccatgttgtca

SEQ ID NO: 359481 - DNA, 15 bp, Homo sapiens
ggagtccatgttgtc

SEQ ID NO: 359482 - DNA, 15 bp, Homo sapiens
tggagtccatgttgt

SEQ ID NO: 359483 - DNA, 15 bp, Homo sapiens
ttggagtccatgttg

SEQ ID NO: 359484 - DNA, 15 bp, Homo sapiens
attggagtccatgtt

SEQ ID NO: 359485 - DNA, 15 bp, Homo sapiens
cattggagtccatgt

SEQ ID NO: 359486 - DNA, 15 bp, Homo sapiens
acattggagtccatg

SEQ ID NO: 359487 - DNA, 15 bp, Homo sapiens
cacattggagtccat

SEQ ID NO: 359488 - DNA, 15 bp, Homo sapiens
tcacattggagtcca

SEQ ID NO: 359489 - DNA, 15 bp, Homo sapiens
ttcacattggagtcc

SEQ ID NO: 359490 - DNA, 15 bp, Homo sapiens
cttcacattggagtc

SEQ ID NO: 359491 - DNA, 15 bp, Homo sapiens
tcttcacattggagt

SEQ ID NO: 359492 - DNA, 15 bp, Homo sapiens
ttcttcacattggag

SEQ ID NO: 359493 - DNA, 15 bp, Homo sapiens
cttcttcacattgga

SEQ ID NO: 359494 - DNA, 15 bp, Homo sapiens
acttcttcacattgg

SEQ ID NO: 359495 - DNA, 15 bp, Homo sapiens
tacttcttcacattg

SEQ ID NO: 359496 - DNA, 15 bp, Homo sapiens
gtacttcttcacatt

SEQ ID NO: 359497 - DNA, 15 bp, Homo sapiens
cgtacttcttcacat

SEQ ID NO: 359498 - DNA, 15 bp, Homo sapiens
tcgtacttcttcaca

SEQ ID NO: 359499 - DNA, 15 bp, Homo sapiens
gtcgtacttcttcac

SEQ ID NO: 359500 - DNA, 15 bp, Homo sapiens
agtcgtacttcttca

SEQ ID NO: 359501 - DNA, 15 bp, Homo sapiens
gagtcgtacttcttc

SEQ ID NO: 359502 - DNA, 15 bp, Homo sapiens
agagtcgtacttctt

SEQ ID NO: 359503 - DNA, 15 bp, Homo sapiens
tagagtcgtacttct

SEQ ID NO: 359504 - DNA, 15 bp, Homo sapiens
gtagagtcgtacttc

SEQ ID NO: 359505 - DNA, 15 bp, Homo sapiens
agtagagtcgtactt

SEQ ID NO: 359506 - DNA, 15 bp, Homo sapiens
cagtagagtcgtact

SEQ ID NO: 359507 - DNA, 15 bp, Homo sapiens
ccagtagagtcgtac

SEQ ID NO: 359508 - DNA, 15 bp, Homo sapiens
cccagtagagtcgta

SEQ ID NO: 359509 - DNA, 15 bp, Homo sapiens
tcccagtagagtcgt

SEQ ID NO: 359510 - DNA, 15 bp, Homo sapiens
atcccagtagagtcg

SEQ ID NO: 359511 - DNA, 15 bp, Homo sapiens
catcccagtagagtc

SEQ ID NO: 359512 - DNA, 15 bp, Homo sapiens
acatcccagtagagt

SEQ ID NO: 359513 - DNA, 15 bp, Homo sapiens
aacatcccagtagag

SEQ ID NO: 359514 - DNA, 15 bp, Homo sapiens
aaacatcccagtaga

SEQ ID NO: 359515 - DNA, 15 bp, Homo sapiens
gaaacatcccagtag

SEQ ID NO: 359516 - DNA, 15 bp, Homo sapiens
tgaaacatcccagta

SEQ ID NO: 359517 - DNA, 15 bp, Homo sapiens
gtgaaacatcccagt

SEQ ID NO: 359518 - DNA, 15 bp, Homo sapiens
agtgaaacatcccag

SEQ ID NO: 359519 - DNA, 15 bp, Homo sapiens
cagtgaaacatccca

SEQ ID NO: 359520 - DNA, 15 bp, Homo sapiens
ccagtgaaacatccc

SEQ ID NO: 359521 - DNA, 15 bp, Homo sapiens
accagtgaaacatcc

SEQ ID NO: 359522 - DNA, 15 bp, Homo sapiens
caccagtgaaacatc

SEQ ID NO: 359523 - DNA, 15 bp, Homo sapiens
acaccagtgaaacat

SEQ ID NO: 359524 - DNA, 15 bp, Homo sapiens
cacaccagtgaaaca

SEQ ID NO: 359525 - DNA, 15 bp, Homo sapiens
gcacaccagtgaaac

SEQ ID NO: 359526 - DNA, 15 bp, Homo sapiens
tgcacaccagtgaaa

SEQ ID NO: 359527 - DNA, 15 bp, Homo sapiens
gtgcacaccagtgaa

SEQ ID NO: 359528 - DNA, 15 bp, Homo sapiens
ggtgcacaccagtga

SEQ ID NO: 359529 - DNA, 15 bp, Homo sapiens
gggtgcacaccagtg

SEQ ID NO: 359530 - DNA, 15 bp, Homo sapiens
tgggtgcacaccagt

SEQ ID NO: 359531 - DNA, 15 bp, Homo sapiens
ttgggtgcacaccag

SEQ ID NO: 359532 - DNA, 15 bp, Homo sapiens
cttgggtgcacacca

SEQ ID NO: 359533 - DNA, 15 bp, Homo sapiens
ccttgggtgcacacc

SEQ ID NO: 359534 - DNA, 15 bp, Homo sapiens
tccttgggtgcacac

SEQ ID NO: 359535 - DNA, 15 bp, Homo sapiens
ctccttgggtgcaca

SEQ ID NO: 359536 - DNA, 15 bp, Homo sapiens
tctccttgggtgcac

SEQ ID NO: 359537 - DNA, 15 bp, Homo sapiens
atctccttgggtgca

SEQ ID NO: 359538 - DNA, 15 bp, Homo sapiens
tatctccttgggtgc

SEQ ID NO: 359539 - DNA, 15 bp, Homo sapiens
ctatctccttgggtg

SEQ ID NO: 359540 - DNA, 15 bp, Homo sapiens
tctatctccttgggt

SEQ ID NO: 359541 - DNA, 15 bp, Homo sapiens
ctctatctccttggg

SEQ ID NO: 359542 - DNA, 15 bp, Homo sapiens
tctctatctccttgg

SEQ ID NO: 359543 - DNA, 15 bp, Homo sapiens
ttctctatctccttg

SEQ ID NO: 359544 - DNA, 15 bp, Homo sapiens
tttctctatctcctt

SEQ ID NO: 359545 - DNA, 15 bp, Homo sapiens
ctttctctatctcct

SEQ ID NO: 359546 - DNA, 15 bp, Homo sapiens
actttctctatctcc

SEQ ID NO: 359547 - DNA, 15 bp, Homo sapiens
gactttctctatctc

SEQ ID NO: 359548 - DNA, 15 bp, Homo sapiens
tgactttctctatct

SEQ ID NO: 359549 - DNA, 15 bp, Homo sapiens
atgactttctctatc

SEQ ID NO: 359550 - DNA, 15 bp, Homo sapiens
gatgactttctctat

SEQ ID NO: 359551 - DNA, 15 bp, Homo sapiens
ggatgactttctcta

SEQ ID NO: 359552 - DNA, 15 bp, Homo sapiens
aggatgactttctct

SEQ ID NO: 359553 - DNA, 15 bp, Homo sapiens
caggatgactttctc

SEQ ID NO: 359554 - DNA, 15 bp, Homo sapiens
ccaggatgactttct

SEQ ID NO: 359555 - DNA, 15 bp, Homo sapiens
accaggatgactttc

SEQ ID NO: 359556 - DNA, 15 bp, Homo sapiens
caccaggatgacttt

SEQ ID NO: 359557 - DNA, 15 bp, Homo sapiens
tcaccaggatgactt

SEQ ID NO: 359558 - DNA, 15 bp, Homo sapiens
ctcaccaggatgact

SEQ ID NO: 359559 - DNA, 15 bp, Homo sapiens
actcaccaggatgac

SEQ ID NO: 359560 - DNA, 15 bp, Homo sapiens
cactcaccaggatga

SEQ ID NO: 359561 - DNA, 15 bp, Homo sapiens
tcactcaccaggatg

SEQ ID NO: 359562 - DNA, 15 bp, Homo sapiens
ctcactcaccaggat

SEQ ID NO: 359563 - DNA, 15 bp, Homo sapiens
cctcactcaccagga

SEQ ID NO: 359564 - DNA, 15 bp, Homo sapiens
ccctcactcaccagg

SEQ ID NO: 359565 - DNA, 15 bp, Homo sapiens
tccctcactcaccag

SEQ ID NO: 359566 - DNA, 15 bp, Homo sapiens
gtccctcactcacca

SEQ ID NO: 359567 - DNA, 15 bp, Homo sapiens
agtccctcactcacc

SEQ ID NO: 359568 - DNA, 15 bp, Homo sapiens
cagtccctcactcac

SEQ ID NO: 359569 - DNA, 15 bp, Homo sapiens
acagtccctcactca

SEQ ID NO: 359570 - DNA, 15 bp, Homo sapiens
cacagtccctcactc

SEQ ID NO: 359571 - DNA, 15 bp, Homo sapiens
gcacagtccctcact

SEQ ID NO: 359572 - DNA, 15 bp, Homo sapiens
tgcacagtccctcac

SEQ ID NO: 359573 - DNA, 15 bp, Homo sapiens
atgcacagtccctca

SEQ ID NO: 359574 - DNA, 15 bp, Homo sapiens
gatgcacagtccctc

SEQ ID NO: 359575 - DNA, 15 bp, Homo sapiens
agatgcacagtccct

SEQ ID NO: 359576 - DNA, 15 bp, Homo sapiens
cagatgcacagtccc

SEQ ID NO: 359577 - DNA, 15 bp, Homo sapiens
tcagatgcacagtcc

SEQ ID NO: 359578 - DNA, 15 bp, Homo sapiens
atcagatgcacagtc

SEQ ID NO: 359579 - DNA, 15 bp, Homo sapiens
catcagatgcacagt

SEQ ID NO: 359580 - DNA, 15 bp, Homo sapiens
acatcagatgcacag

SEQ ID NO: 359581 - DNA, 15 bp, Homo sapiens
aacatcagatgcaca

SEQ ID NO: 359582 - DNA, 15 bp, Homo sapiens
caacatcagatgcac

SEQ ID NO: 359583 - DNA, 15 bp, Homo sapiens
gcaacatcagatgca

SEQ ID NO: 359584 - DNA, 15 bp, Homo sapiens
ggcaacatcagatgc

SEQ ID NO: 359585 - DNA, 15 bp, Homo sapiens
gggcaacatcagatg

SEQ ID NO: 359586 - DNA, 15 bp, Homo sapiens
cgggcaacatcagat

SEQ ID NO: 359587 - DNA, 15 bp, Homo sapiens
gcgggcaacatcaga

SEQ ID NO: 359588 - DNA, 15 bp, Homo sapiens
agcgggcaacatcag

SEQ ID NO: 359589 - DNA, 15 bp, Homo sapiens
aagcgggcaacatca

SEQ ID NO: 359590 - DNA, 15 bp, Homo sapiens
gaagcgggcaacatc

SEQ ID NO: 359591 - DNA, 15 bp, Homo sapiens
agaagcgggcaacat

SEQ ID NO: 359592 - DNA, 15 bp, Homo sapiens
cagaagcgggcaaca

SEQ ID NO: 359593 - DNA, 15 bp, Homo sapiens
gcagaagcgggcaac

SEQ ID NO: 359594 - DNA, 15 bp, Homo sapiens
ggcagaagcgggcaa

SEQ ID NO: 359595 - DNA, 15 bp, Homo sapiens
gggcagaagcgggca

SEQ ID NO: 359596 - DNA, 15 bp, Homo sapiens
ggggcagaagcgggc

SEQ ID NO: 359597 - DNA, 15 bp, Homo sapiens
tggggcagaagcggg

SEQ ID NO: 359598 - DNA, 15 bp, Homo sapiens
ttggggcagaagcgg

SEQ ID NO: 359599 - DNA, 15 bp, Homo sapiens
tttggggcagaagcg

SEQ ID NO: 359600 - DNA, 15 bp, Homo sapiens
gtttggggcagaagc

SEQ ID NO: 359601 - DNA, 15 bp, Homo sapiens
ggtttggggcagaag

SEQ ID NO: 359602 - DNA, 15 bp, Homo sapiens
tggtttggggcagaa

SEQ ID NO: 359603 - DNA, 15 bp, Homo sapiens
gtggtttggggcaga

SEQ ID NO: 359604 - DNA, 15 bp, Homo sapiens
tgtggtttggggcag

SEQ ID NO: 359605 - DNA, 15 bp, Homo sapiens
atgtggtttggggca

SEQ ID NO: 359606 - DNA, 15 bp, Homo sapiens
aatgtggtttggggc

SEQ ID NO: 359607 - DNA, 15 bp, Homo sapiens
aaatgtggtttgggg

SEQ ID NO: 359608 - DNA, 15 bp, Homo sapiens
caaatgtggtttggg

SEQ ID NO: 359609 - DNA, 15 bp, Homo sapiens
gcaaatgtggtttgg

SEQ ID NO: 359610 - DNA, 15 bp, Homo sapiens
agcaaatgtggtttg

SEQ ID NO: 359611 - DNA, 15 bp, Homo sapiens
tagcaaatgtggttt

SEQ ID NO: 359612 - DNA, 15 bp, Homo sapiens
ctagcaaatgtggtt

SEQ ID NO: 359613 - DNA, 15 bp, Homo sapiens
cctagcaaatgtggt

SEQ ID NO: 359614 - DNA, 15 bp, Homo sapiens
tcctagcaaatgtgg

SEQ ID NO: 359615 - DNA, 15 bp, Homo sapiens
ttcctagcaaatgtg

SEQ ID NO: 359616 - DNA, 15 bp, Homo sapiens
attcctagcaaatgt

SEQ ID NO: 359617 - DNA, 15 bp, Homo sapiens
cattcctagcaaatg

SEQ ID NO: 359618 - DNA, 15 bp, Homo sapiens
ccattcctagcaaat

SEQ ID NO: 359619 - DNA, 15 bp, Homo sapiens
cccattcctagcaaa

SEQ ID NO: 359620 - DNA, 15 bp, Homo sapiens
ccccattcctagcaa

SEQ ID NO: 359621 - DNA, 15 bp, Homo sapiens
accccattcctagca

SEQ ID NO: 359622 - DNA, 15 bp, Homo sapiens
aaccccattcctagc

SEQ ID NO: 359623 - DNA, 15 bp, Homo sapiens
aaaccccattcctag

SEQ ID NO: 359624 - DNA, 15 bp, Homo sapiens
gaaaccccattccta

SEQ ID NO: 359625 - DNA, 15 bp, Homo sapiens
ggaaaccccattcct

SEQ ID NO: 359626 - DNA, 15 bp, Homo sapiens
gggaaaccccattcc

SEQ ID NO: 359627 - DNA, 15 bp, Homo sapiens
agggaaaccccattc

SEQ ID NO: 359628 - DNA, 15 bp, Homo sapiens
tagggaaaccccatt

SEQ ID NO: 359629 - DNA, 15 bp, Homo sapiens
ctagggaaaccccat

SEQ ID NO: 359630 - DNA, 15 bp, Homo sapiens
actagggaaacccca

SEQ ID NO: 359631 - DNA, 15 bp, Homo sapiens
aactagggaaacccc

SEQ ID NO: 359632 - DNA, 15 bp, Homo sapiens
caactagggaaaccc

SEQ ID NO: 359633 - DNA, 15 bp, Homo sapiens
ccaactagggaaacc

SEQ ID NO: 359634 - DNA, 15 bp, Homo sapiens
tccaactagggaaac

SEQ ID NO: 359635 - DNA, 15 bp, Homo sapiens
gtccaactagggaaa

SEQ ID NO: 359636 - DNA, 15 bp, Homo sapiens
tgtccaactagggaa

SEQ ID NO: 359637 - DNA, 15 bp, Homo sapiens
ctgtccaactaggga

SEQ ID NO: 359638 - DNA, 15 bp, Homo sapiens
actgtccaactaggg

SEQ ID NO: 359639 - DNA, 15 bp, Homo sapiens
cactgtccaactagg

SEQ ID NO: 359640 - DNA, 15 bp, Homo sapiens
ccactgtccaactag

SEQ ID NO: 359641 - DNA, 15 bp, Homo sapiens
cccactgtccaacta

SEQ ID NO: 359642 - DNA, 15 bp, Homo sapiens
tcccactgtccaact

SEQ ID NO: 359643 - DNA, 15 bp, Homo sapiens
atcccactgtccaac

SEQ ID NO: 359644 - DNA, 15 bp, Homo sapiens
tatcccactgtccaa

SEQ ID NO: 359645 - DNA, 15 bp, Homo sapiens
ttatcccactgtcca

SEQ ID NO: 359646 - DNA, 15 bp, Homo sapiens
attatcccactgtcc

SEQ ID NO: 359647 - DNA, 15 bp, Homo sapiens
tattatcccactgtc

SEQ ID NO: 359648 - DNA, 15 bp, Homo sapiens
gtattatcccactgt

SEQ ID NO: 359649 - DNA, 15 bp, Homo sapiens
agtattatcccactg

SEQ ID NO: 359650 - DNA, 15 bp, Homo sapiens
cagtattatcccact

SEQ ID NO: 359651 - DNA, 15 bp, Homo sapiens
acagtattatcccac

SEQ ID NO: 359652 - DNA, 15 bp, Homo sapiens
gacagtattatccca

SEQ ID NO: 359653 - DNA, 15 bp, Homo sapiens
ggacagtattatccc

SEQ ID NO: 359654 - DNA, 15 bp, Homo sapiens
gggacagtattatcc

SEQ ID NO: 359655 - DNA, 15 bp, Homo sapiens
agggacagtattatc

SEQ ID NO: 359656 - DNA, 15 bp, Homo sapiens
cagggacagtattat

SEQ ID NO: 359657 - DNA, 15 bp, Homo sapiens
ccagggacagtatta

SEQ ID NO: 359658 - DNA, 15 bp, Homo sapiens
accagggacagtatt

SEQ ID NO: 359659 - DNA, 15 bp, Homo sapiens
gaccagggacagtat

SEQ ID NO: 359660 - DNA, 15 bp, Homo sapiens
ggaccagggacagta

SEQ ID NO: 359661 - DNA, 15 bp, Homo sapiens
aggaccagggacagt

SEQ ID NO: 359662 - DNA, 15 bp, Homo sapiens
taggaccagggacag

SEQ ID NO: 359663 - DNA, 15 bp, Homo sapiens
ttaggaccagggaca

SEQ ID NO: 359664 - DNA, 15 bp, Homo sapiens
attaggaccagggac

SEQ ID NO: 359665 - DNA, 15 bp, Homo sapiens
aattaggaccaggga

SEQ ID NO: 359666 - DNA, 15 bp, Homo sapiens
taattaggaccaggg

SEQ ID NO: 359667 - DNA, 15 bp, Homo sapiens
ataattaggaccagg

SEQ ID NO: 359668 - DNA, 15 bp, Homo sapiens
aataattaggaccag

SEQ ID NO: 359669 - DNA, 15 bp, Homo sapiens
aaataattaggacca

SEQ ID NO: 359670 - DNA, 15 bp, Homo sapiens
aaaataattaggacc

SEQ ID NO: 359671 - DNA, 15 bp, Homo sapiens
aaaaataattaggac

SEQ ID NO: 359672 - DNA, 15 bp, Homo sapiens
caaaaataattagga

SEQ ID NO: 359673 - DNA, 15 bp, Homo sapiens
tcaaaaataattagg

SEQ ID NO: 359674 - DNA, 15 bp, Homo sapiens
atcaaaaataattag

SEQ ID NO: 359675 - DNA, 15 bp, Homo sapiens
catcaaaaataatta

SEQ ID NO: 359676 - DNA, 15 bp, Homo sapiens
tcatcaaaaataatt

SEQ ID NO: 359677 - DNA, 15 bp, Homo sapiens
ctcatcaaaaataat

SEQ ID NO: 359678 - DNA, 15 bp, Homo sapiens
actcatcaaaaataa

SEQ ID NO: 359679 - DNA, 15 bp, Homo sapiens
cactcatcaaaaata

SEQ ID NO: 359680 - DNA, 15 bp, Homo sapiens
tcactcatcaaaaat

SEQ ID NO: 359681 - DNA, 15 bp, Homo sapiens
ttcactcatcaaaaa

SEQ ID NO: 359682 - DNA, 15 bp, Homo sapiens
tttcactcatcaaaa

SEQ ID NO: 359683 - DNA, 15 bp, Homo sapiens
atttcactcatcaaa

SEQ ID NO: 359684 - DNA, 15 bp, Homo sapiens
aatttcactcatcaa

SEQ ID NO: 359685 - DNA, 15 bp, Homo sapiens
gaatttcactcatca

SEQ ID NO: 359686 - DNA, 15 bp, Homo sapiens
agaatttcactcatc

SEQ ID NO: 359687 - DNA, 15 bp, Homo sapiens
cagaatttcactcat

SEQ ID NO: 359688 - DNA, 15 bp, Homo sapiens
tcagaatttcactca

SEQ ID NO: 359689 - DNA, 15 bp, Homo sapiens
ctcagaatttcactc

SEQ ID NO: 359690 - DNA, 15 bp, Homo sapiens
gctcagaatttcact

SEQ ID NO: 359691 - DNA, 15 bp, Homo sapiens
tgctcagaatttcac

SEQ ID NO: 359692 - DNA, 15 bp, Homo sapiens
atgctcagaatttca

SEQ ID NO: 359693 - DNA, 15 bp, Homo sapiens
tatgctcagaatttc

SEQ ID NO: 359694 - DNA, 15 bp, Homo sapiens
ctatgctcagaattt

SEQ ID NO: 359695 - DNA, 15 bp, Homo sapiens
tctatgctcagaatt

SEQ ID NO: 359696 - DNA, 15 bp, Homo sapiens
atctatgctcagaat

SEQ ID NO: 359697 - DNA, 15 bp, Homo sapiens
aatctatgctcagaa

SEQ ID NO: 359698 - DNA, 15 bp, Homo sapiens
caatctatgctcaga

SEQ ID NO: 359699 - DNA, 15 bp, Homo sapiens
tcaatctatgctcag

SEQ ID NO: 359700 - DNA, 15 bp, Homo sapiens
ttcaatctatgctca

SEQ ID NO: 359701 - DNA, 15 bp, Homo sapiens
cttcaatctatgctc

SEQ ID NO: 359702 - DNA, 15 bp, Homo sapiens
gcttcaatctatgct

SEQ ID NO: 359703 - DNA, 15 bp, Homo sapiens
tgcttcaatctatgc

SEQ ID NO: 359704 - DNA, 15 bp, Homo sapiens
ctgcttcaatctatg

SEQ ID NO: 359705 - DNA, 15 bp, Homo sapiens
gctgcttcaatctat

SEQ ID NO: 359706 - DNA, 15 bp, Homo sapiens
agctgcttcaatcta

SEQ ID NO: 359707 - DNA, 15 bp, Homo sapiens
tagctgcttcaatct

SEQ ID NO: 359708 - DNA, 15 bp, Homo sapiens
ctagctgcttcaatc

SEQ ID NO: 359709 - DNA, 15 bp, Homo sapiens
tctagctgcttcaat

SEQ ID NO: 359710 - DNA, 15 bp, Homo sapiens
gtctagctgcttcaa

SEQ ID NO: 359711 - DNA, 15 bp, Homo sapiens
ggtctagctgcttca

SEQ ID NO: 359712 - DNA, 15 bp, Homo sapiens
aggtctagctgcttc

SEQ ID NO: 359713 - DNA, 15 bp, Homo sapiens
gaggtctagctgctt

SEQ ID NO: 359714 - DNA, 15 bp, Homo sapiens
agaggtctagctgct

SEQ ID NO: 359715 - DNA, 15 bp, Homo sapiens
cagaggtctagctgc

SEQ ID NO: 359716 - DNA, 15 bp, Homo sapiens
tcagaggtctagctg

SEQ ID NO: 359717 - DNA, 15 bp, Homo sapiens
atcagaggtctagct

SEQ ID NO: 359718 - DNA, 15 bp, Homo sapiens
gatcagaggtctagc

SEQ ID NO: 359719 - DNA, 15 bp, Homo sapiens
tgatcagaggtctag

SEQ ID NO: 359720 - DNA, 15 bp, Homo sapiens
ctgatcagaggtcta

SEQ ID NO: 359721 - DNA, 15 bp, Homo sapiens
tctgatcagaggtct

SEQ ID NO: 359722 - DNA, 15 bp, Homo sapiens
ttctgatcagaggtc

SEQ ID NO: 359723 - DNA, 15 bp, Homo sapiens
gttctgatcagaggt

SEQ ID NO: 359724 - DNA, 15 bp, Homo sapiens
tgttctgatcagagg

SEQ ID NO: 359725 - DNA, 15 bp, Homo sapiens
atgttctgatcagag

SEQ ID NO: 359726 - DNA, 15 bp, Homo sapiens
tatgttctgatcaga

SEQ ID NO: 359727 - DNA, 15 bp, Homo sapiens
ttatgttctgatcag

SEQ ID NO: 359728 - DNA, 15 bp, Homo sapiens
cttatgttctgatca

SEQ ID NO: 359729 - DNA, 15 bp, Homo sapiens
gcttatgttctgatc

SEQ ID NO: 359730 - DNA, 15 bp, Homo sapiens
tgcttatgttctgat

SEQ ID NO: 359731 - DNA, 15 bp, Homo sapiens
ttgcttatgttctga

SEQ ID NO: 359732 - DNA, 15 bp, Homo sapiens
attgcttatgttctg

SEQ ID NO: 359733 - DNA, 15 bp, Homo sapiens
tattgcttatgttct

SEQ ID NO: 359734 - DNA, 15 bp, Homo sapiens
atattgcttatgttc

SEQ ID NO: 359735 - DNA, 15 bp, Homo sapiens
aatattgcttatgtt

SEQ ID NO: 359736 - DNA, 15 bp, Homo sapiens
gaatattgcttatgt

SEQ ID NO: 359737 - DNA, 15 bp, Homo sapiens
tgaatattgcttatg

SEQ ID NO: 359738 - DNA, 15 bp, Homo sapiens
ctgaatattgcttat

SEQ ID NO: 359739 - DNA, 15 bp, Homo sapiens
tctgaatattgctta

SEQ ID NO: 359740 - DNA, 15 bp, Homo sapiens
atctgaatattgctt

SEQ ID NO: 359741 - DNA, 15 bp, Homo sapiens
aatctgaatattgct

SEQ ID NO: 359742 - DNA, 15 bp, Homo sapiens
aaatctgaatattgc

SEQ ID NO: 359743 - DNA, 15 bp, Homo sapiens
aaaatctgaatattg

SEQ ID NO: 359744 - DNA, 15 bp, Homo sapiens
aaaaatctgaatatt

SEQ ID NO: 359745 - DNA, 15 bp, Homo sapiens
gaaaaatctgaatat

SEQ ID NO: 359746 - DNA, 15 bp, Homo sapiens
tgaaaaatctgaata

SEQ ID NO: 359747 - DNA, 15 bp, Homo sapiens
ttgaaaaatctgaat

SEQ ID NO: 359748 - DNA, 15 bp, Homo sapiens
attgaaaaatctgaa

SEQ ID NO: 359749 - DNA, 15 bp, Homo sapiens
gattgaaaaatctga

SEQ ID NO: 359750 - DNA, 15 bp, Homo sapiens
agattgaaaaatctg

SEQ ID NO: 359751 - DNA, 15 bp, Homo sapiens
gagattgaaaaatct

SEQ ID NO: 359752 - DNA, 15 bp, Homo sapiens
agagattgaaaaatc

SEQ ID NO: 359753 - DNA, 15 bp, Homo sapiens
cagagattgaaaaat

SEQ ID NO: 359754 - DNA, 15 bp, Homo sapiens
tcagagattgaaaaa

SEQ ID NO: 359755 - DNA, 15 bp, Homo sapiens
ttcagagattgaaaa

SEQ ID NO: 359756 - DNA, 15 bp, Homo sapiens
attcagagattgaaa

SEQ ID NO: 359757 - DNA, 15 bp, Homo sapiens
tattcagagattgaa

SEQ ID NO: 359758 - DNA, 15 bp, Homo sapiens
atattcagagattga

SEQ ID NO: 359759 - DNA, 15 bp, Homo sapiens
tatattcagagattg

SEQ ID NO: 359760 - DNA, 15 bp, Homo sapiens
atatattcagagatt

SEQ ID NO: 359761 - DNA, 15 bp, Homo sapiens
aatatattcagagat

SEQ ID NO: 359762 - DNA, 15 bp, Homo sapiens
caatatattcagaga

SEQ ID NO: 359763 - DNA, 15 bp, Homo sapiens
ccaatatattcagag

SEQ ID NO: 359764 - DNA, 15 bp, Homo sapiens
gccaatatattcaga

SEQ ID NO: 359765 - DNA, 15 bp, Homo sapiens
agccaatatattcag

SEQ ID NO: 359766 - DNA, 15 bp, Homo sapiens
gagccaatatattca

SEQ ID NO: 359767 - DNA, 15 bp, Homo sapiens
ggagccaatatattc

SEQ ID NO: 359768 - DNA, 15 bp, Homo sapiens
aggagccaatatatt

SEQ ID NO: 359769 - DNA, 15 bp, Homo sapiens
gaggagccaatatat

SEQ ID NO: 359770 - DNA, 15 bp, Homo sapiens
tgaggagccaatata

SEQ ID NO: 359771 - DNA, 15 bp, Homo sapiens
atgaggagccaatat

SEQ ID NO: 359772 - DNA, 15 bp, Homo sapiens
tatgaggagccaata

SEQ ID NO: 359773 - DNA, 15 bp, Homo sapiens
ttatgaggagccaat

SEQ ID NO: 359774 - DNA, 15 bp, Homo sapiens
cttatgaggagccaa

SEQ ID NO: 359775 - DNA, 15 bp, Homo sapiens
tcttatgaggagcca

SEQ ID NO: 359776 - DNA, 15 bp, Homo sapiens
ctcttatgaggagcc

SEQ ID NO: 359777 - DNA, 15 bp, Homo sapiens
actcttatgaggagc

SEQ ID NO: 359778 - DNA, 15 bp, Homo sapiens
tactcttatgaggag

SEQ ID NO: 359779 - DNA, 15 bp, Homo sapiens
ctactcttatgagga

SEQ ID NO: 359780 - DNA, 15 bp, Homo sapiens
cctactcttatgagg

SEQ ID NO: 359781 - DNA, 15 bp, Homo sapiens
acctactcttatgag

SEQ ID NO: 359782 - DNA, 15 bp, Homo sapiens
cacctactcttatga

SEQ ID NO: 359783 - DNA, 15 bp, Homo sapiens
tcacctactcttatg

SEQ ID NO: 359784 - DNA, 15 bp, Homo sapiens
ctcacctactcttat

SEQ ID NO: 359785 - DNA, 15 bp, Homo sapiens
gctcacctactctta

SEQ ID NO: 359786 - DNA, 15 bp, Homo sapiens
tgctcacctactctt

SEQ ID NO: 359787 - DNA, 15 bp, Homo sapiens
gtgctcacctactct

SEQ ID NO: 359788 - DNA, 15 bp, Homo sapiens
agtgctcacctactc

SEQ ID NO: 359789 - DNA, 15 bp, Homo sapiens
aagtgctcacctact

SEQ ID NO: 359790 - DNA, 15 bp, Homo sapiens
caagtgctcacctac

SEQ ID NO: 359791 - DNA, 15 bp, Homo sapiens
gcaagtgctcaccta

SEQ ID NO: 359792 - DNA, 15 bp, Homo sapiens
agcaagtgctcacct

SEQ ID NO: 359793 - DNA, 15 bp, Homo sapiens
cagcaagtgctcacc

SEQ ID NO: 359794 - DNA, 15 bp, Homo sapiens
acagcaagtgctcac

SEQ ID NO: 359795 - DNA, 15 bp, Homo sapiens
cacagcaagtgctca

SEQ ID NO: 359796 - DNA, 15 bp, Homo sapiens
ccacagcaagtgctc

SEQ ID NO: 359797 - DNA, 15 bp, Homo sapiens
cccacagcaagtgct

SEQ ID NO: 359798 - DNA, 15 bp, Homo sapiens
tcccacagcaagtgc

SEQ ID NO: 359799 - DNA, 15 bp, Homo sapiens
ttcccacagcaagtg

SEQ ID NO: 359800 - DNA, 15 bp, Homo sapiens
tttcccacagcaagt

SEQ ID NO: 359801 - DNA, 15 bp, Homo sapiens
ctttcccacagcaag

SEQ ID NO: 359802 - DNA, 15 bp, Homo sapiens
gctttcccacagcaa

SEQ ID NO: 359803 - DNA, 15 bp, Homo sapiens
ggctttcccacagca

SEQ ID NO: 359804 - DNA, 15 bp, Homo sapiens
tggctttcccacagc

SEQ ID NO: 359805 - DNA, 15 bp, Homo sapiens
atggctttcccacag

SEQ ID NO: 359806 - DNA, 15 bp, Homo sapiens
catggctttcccaca

SEQ ID NO: 359807 - DNA, 15 bp, Homo sapiens
ccatggctttcccac

SEQ ID NO: 359808 - DNA, 15 bp, Homo sapiens
accatggctttccca

SEQ ID NO: 359809 - DNA, 15 bp, Homo sapiens
caccatggctttccc

SEQ ID NO: 359810 - DNA, 15 bp, Homo sapiens
ccaccatggctttcc

SEQ ID NO: 359811 - DNA, 15 bp, Homo sapiens
cccaccatggctttc

SEQ ID NO: 359812 - DNA, 15 bp, Homo sapiens
tcccaccatggcttt

SEQ ID NO: 359813 - DNA, 15 bp, Homo sapiens
ctcccaccatggctt

SEQ ID NO: 359814 - DNA, 15 bp, Homo sapiens
cctcccaccatggct

SEQ ID NO: 359815 - DNA, 15 bp, Homo sapiens
acctcccaccatggc

SEQ ID NO: 359816 - DNA, 15 bp, Homo sapiens
cacctcccaccatgg

SEQ ID NO: 359817 - DNA, 15 bp, Homo sapiens
ccacctcccaccatg

SEQ ID NO: 359818 - DNA, 15 bp, Homo sapiens
accacctcccaccat

SEQ ID NO: 359819 - DNA, 15 bp, Homo sapiens
taccacctcccacca

SEQ ID NO: 359820 - DNA, 15 bp, Homo sapiens
ataccacctcccacc

SEQ ID NO: 359821 - DNA, 15 bp, Homo sapiens
cataccacctcccac

SEQ ID NO: 359822 - DNA, 15 bp, Homo sapiens
tcataccacctccca

SEQ ID NO: 359823 - DNA, 15 bp, Homo sapiens
ttcataccacctccc

SEQ ID NO: 359824 - DNA, 15 bp, Homo sapiens
gttcataccacctcc

SEQ ID NO: 359825 - DNA, 15 bp, Homo sapiens
tgttcataccacctc

SEQ ID NO: 359826 - DNA, 15 bp, Homo sapiens
atgttcataccacct

SEQ ID NO: 359827 - DNA, 15 bp, Homo sapiens
tatgttcataccacc

SEQ ID NO: 359828 - DNA, 15 bp, Homo sapiens
ttatgttcataccac

SEQ ID NO: 359829 - DNA, 15 bp, Homo sapiens
attatgttcatacca

SEQ ID NO: 359830 - DNA, 15 bp, Homo sapiens
aattatgttcatacc

SEQ ID NO: 359831 - DNA, 15 bp, Homo sapiens
gaattatgttcatac

SEQ ID NO: 359832 - DNA, 15 bp, Homo sapiens
ggaattatgttcata

SEQ ID NO: 359833 - DNA, 15 bp, Homo sapiens
aggaattatgttcat

SEQ ID NO: 359834 - DNA, 15 bp, Homo sapiens
caggaattatgttca

SEQ ID NO: 359835 - DNA, 15 bp, Homo sapiens
acaggaattatgttc

SEQ ID NO: 359836 - DNA, 15 bp, Homo sapiens
cacaggaattatgtt

SEQ ID NO: 359837 - DNA, 15 bp, Homo sapiens
ccacaggaattatgt

SEQ ID NO: 359838 - DNA, 15 bp, Homo sapiens
gccacaggaattatg

SEQ ID NO: 359839 - DNA, 15 bp, Homo sapiens
ggccacaggaattat

SEQ ID NO: 359840 - DNA, 15 bp, Homo sapiens
tggccacaggaatta

SEQ ID NO: 359841 - DNA, 15 bp, Homo sapiens
atggccacaggaatt

SEQ ID NO: 359842 - DNA, 15 bp, Homo sapiens
catggccacaggaat

SEQ ID NO: 359843 - DNA, 15 bp, Homo sapiens
ccatggccacaggaa

SEQ ID NO: 359844 - DNA, 15 bp, Homo sapiens
gccatggccacagga

SEQ ID NO: 359845 - DNA, 15 bp, Homo sapiens
cgccatggccacagg

SEQ ID NO: 359846 - DNA, 15 bp, Homo sapiens
gcgccatggccacag

SEQ ID NO: 359847 - DNA, 15 bp, Homo sapiens
agcgccatggccaca

SEQ ID NO: 359848 - DNA, 15 bp, Homo sapiens
cagcgccatggccac

SEQ ID NO: 359849 - DNA, 15 bp, Homo sapiens
ccagcgccatggcca

SEQ ID NO: 359850 - DNA, 15 bp, Homo sapiens
accagcgccatggcc

SEQ ID NO: 359851 - DNA, 15 bp, Homo sapiens
caccagcgccatggc

SEQ ID NO: 359852 - DNA, 15 bp, Homo sapiens
acaccagcgccatgg

SEQ ID NO: 359853 - DNA, 15 bp, Homo sapiens
gacaccagcgccatg

SEQ ID NO: 359854 - DNA, 15 bp, Homo sapiens
tgacaccagcgccat

SEQ ID NO: 359855 - DNA, 15 bp, Homo sapiens
ctgacaccagcgcca

SEQ ID NO: 359856 - DNA, 15 bp, Homo sapiens
tctgacaccagcgcc

SEQ ID NO: 359857 - DNA, 15 bp, Homo sapiens
ctctgacaccagcgc

SEQ ID NO: 359858 - DNA, 15 bp, Homo sapiens
gctctgacaccagcg

SEQ ID NO: 359859 - DNA, 15 bp, Homo sapiens
ggctctgacaccagc

SEQ ID NO: 359860 - DNA, 15 bp, Homo sapiens
aggctctgacaccag

SEQ ID NO: 359861 - DNA, 15 bp, Homo sapiens
caggctctgacacca

SEQ ID NO: 359862 - DNA, 15 bp, Homo sapiens
gcaggctctgacacc

SEQ ID NO: 359863 - DNA, 15 bp, Homo sapiens
ggcaggctctgacac

SEQ ID NO: 359864 - DNA, 15 bp, Homo sapiens
aggcaggctctgaca

SEQ ID NO: 359865 - DNA, 15 bp, Homo sapiens
caggcaggctctgac

SEQ ID NO: 359866 - DNA, 15 bp, Homo sapiens
acaggcaggctctga

SEQ ID NO: 359867 - DNA, 15 bp, Homo sapiens
tacaggcaggctctg

SEQ ID NO: 359868 - DNA, 15 bp, Homo sapiens
gtacaggcaggctct

SEQ ID NO: 359869 - DNA, 15 bp, Homo sapiens
ggtacaggcaggctc

SEQ ID NO: 359870 - DNA, 15 bp, Homo sapiens
tggtacaggcaggct

SEQ ID NO: 359871 - DNA, 15 bp, Homo sapiens
ttggtacaggcaggc

SEQ ID NO: 359872 - DNA, 15 bp, Homo sapiens
attggtacaggcagg

SEQ ID NO: 359873 - DNA, 15 bp, Homo sapiens
aattggtacaggcag

SEQ ID NO: 359874 - DNA, 15 bp, Homo sapiens
taattggtacaggca

SEQ ID NO: 359875 - DNA, 15 bp, Homo sapiens
ataattggtacaggc

SEQ ID NO: 359876 - DNA, 15 bp, Homo sapiens
aataattggtacagg

SEQ ID NO: 359877 - DNA, 15 bp, Homo sapiens
taataattggtacag

SEQ ID NO: 359878 - DNA, 15 bp, Homo sapiens
ctaataattggtaca

SEQ ID NO: 359879 - DNA, 15 bp, Homo sapiens
gctaataattggtac

SEQ ID NO: 359880 - DNA, 15 bp, Homo sapiens
agctaataattggta

SEQ ID NO: 359881 - DNA, 15 bp, Homo sapiens
cagctaataattggt

SEQ ID NO: 359882 - DNA, 15 bp, Homo sapiens
gcagctaataattgg

SEQ ID NO: 359883 - DNA, 15 bp, Homo sapiens
tgcagctaataattg

SEQ ID NO: 359884 - DNA, 15 bp, Homo sapiens
atgcagctaataatt

SEQ ID NO: 359885 - DNA, 15 bp, Homo sapiens
catgcagctaataat

SEQ ID NO: 359886 - DNA, 15 bp, Homo sapiens
ccatgcagctaataa

SEQ ID NO: 359887 - DNA, 15 bp, Homo sapiens
gccatgcagctaata

SEQ ID NO: 359888 - DNA, 15 bp, Homo sapiens
agccatgcagctaat

SEQ ID NO: 359889 - DNA, 15 bp, Homo sapiens
aagccatgcagctaa

SEQ ID NO: 359890 - DNA, 15 bp, Homo sapiens
caagccatgcagcta

SEQ ID NO: 359891 - DNA, 15 bp, Homo sapiens
ccaagccatgcagct

SEQ ID NO: 359892 - DNA, 15 bp, Homo sapiens
cccaagccatgcagc

SEQ ID NO: 359893 - DNA, 15 bp, Homo sapiens
acccaagccatgcag

SEQ ID NO: 359894 - DNA, 15 bp, Homo sapiens
tacccaagccatgca

SEQ ID NO: 359895 - DNA, 15 bp, Homo sapiens
ttacccaagccatgc

SEQ ID NO: 359896 - DNA, 15 bp, Homo sapiens
attacccaagccatg

SEQ ID NO: 359897 - DNA, 15 bp, Homo sapiens
aattacccaagccat

SEQ ID NO: 359898 - DNA, 15 bp, Homo sapiens
gaattacccaagcca

SEQ ID NO: 359899 - DNA, 15 bp, Homo sapiens
tgaattacccaagcc

SEQ ID NO: 359900 - DNA, 15 bp, Homo sapiens
atgaattacccaagc

SEQ ID NO: 359901 - DNA, 15 bp, Homo sapiens
aatgaattacccaag

SEQ ID NO: 359902 - DNA, 15 bp, Homo sapiens
aaatgaattacccaa

SEQ ID NO: 359903 - DNA, 15 bp, Homo sapiens
caaatgaattaccca

SEQ ID NO: 359904 - DNA, 15 bp, Homo sapiens
tcaaatgaattaccc

SEQ ID NO: 359905 - DNA, 15 bp, Homo sapiens
gtcaaatgaattacc

SEQ ID NO: 359906 - DNA, 15 bp, Homo sapiens
agtcaaatgaattac

SEQ ID NO: 359907 - DNA, 15 bp, Homo sapiens
aagtcaaatgaatta

SEQ ID NO: 359908 - DNA, 15 bp, Homo sapiens
aaagtcaaatgaatt

SEQ ID NO: 359909 - DNA, 15 bp, Homo sapiens
aaaagtcaaatgaat

SEQ ID NO: 359910 - DNA, 15 bp, Homo sapiens
aaaaagtcaaatgaa

SEQ ID NO: 359911 - DNA, 15 bp, Homo sapiens
caaaaagtcaaatga

SEQ ID NO: 359912 - DNA, 15 bp, Homo sapiens
gcaaaaagtcaaatg

SEQ ID NO: 359913 - DNA, 15 bp, Homo sapiens
tgcaaaaagtcaaat

SEQ ID NO: 359914 - DNA, 15 bp, Homo sapiens
gtgcaaaaagtcaaa

SEQ ID NO: 359915 - DNA, 15 bp, Homo sapiens
agtgcaaaaagtcaa

SEQ ID NO: 359916 - DNA, 15 bp, Homo sapiens
aagtgcaaaaagtca

SEQ ID NO: 359917 - DNA, 15 bp, Homo sapiens
gaagtgcaaaaagtc

SEQ ID NO: 359918 - DNA, 15 bp, Homo sapiens
cgaagtgcaaaaagt

SEQ ID NO: 359919 - DNA, 15 bp, Homo sapiens
ccgaagtgcaaaaag

SEQ ID NO: 359920 - DNA, 15 bp, Homo sapiens
accgaagtgcaaaaa

SEQ ID NO: 359921 - DNA, 15 bp, Homo sapiens
aaccgaagtgcaaaa

SEQ ID NO: 359922 - DNA, 15 bp, Homo sapiens
aaaccgaagtgcaaa

SEQ ID NO: 359923 - DNA, 15 bp, Homo sapiens
aaaaccgaagtgcaa

SEQ ID NO: 359924 - DNA, 15 bp, Homo sapiens
gaaaaccgaagtgca

SEQ ID NO: 359925 - DNA, 15 bp, Homo sapiens
agaaaaccgaagtgc

SEQ ID NO: 359926 - DNA, 15 bp, Homo sapiens
aagaaaaccgaagtg

SEQ ID NO: 359927 - DNA, 15 bp, Homo sapiens
taagaaaaccgaagt

SEQ ID NO: 359928 - DNA, 15 bp, Homo sapiens
ataagaaaaccgaag

SEQ ID NO: 359929 - DNA, 15 bp, Homo sapiens
gataagaaaaccgaa

SEQ ID NO: 359930 - DNA, 15 bp, Homo sapiens
agataagaaaaccga

SEQ ID NO: 359931 - DNA, 15 bp, Homo sapiens
cagataagaaaaccg

SEQ ID NO: 359932 - DNA, 15 bp, Homo sapiens
acagataagaaaacc

SEQ ID NO: 359933 - DNA, 15 bp, Homo sapiens
tacagataagaaaac

SEQ ID NO: 359934 - DNA, 15 bp, Homo sapiens
ttacagataagaaaa

SEQ ID NO: 359935 - DNA, 15 bp, Homo sapiens
tttacagataagaaa

SEQ ID NO: 359936 - DNA, 15 bp, Homo sapiens
ttttacagataagaa

SEQ ID NO: 359937 - DNA, 15 bp, Homo sapiens
tttttacagataaga

SEQ ID NO: 359938 - DNA, 15 bp, Homo sapiens
ctttttacagataag

SEQ ID NO: 359939 - DNA, 15 bp, Homo sapiens
tctttttacagataa

SEQ ID NO: 359940 - DNA, 15 bp, Homo sapiens
atctttttacagata

SEQ ID NO: 359941 - DNA, 15 bp, Homo sapiens
catctttttacagat

SEQ ID NO: 359942 - DNA, 15 bp, Homo sapiens
tcatctttttacaga

SEQ ID NO: 359943 - DNA, 15 bp, Homo sapiens
ctcatctttttacag

SEQ ID NO: 359944 - DNA, 15 bp, Homo sapiens
tctcatctttttaca

SEQ ID NO: 359945 - DNA, 15 bp, Homo sapiens
atctcatctttttac

SEQ ID NO: 359946 - DNA, 15 bp, Homo sapiens
catctcatcttttta

SEQ ID NO: 359947 - DNA, 15 bp, Homo sapiens
tcatctcatcttttt

SEQ ID NO: 359948 - DNA, 15 bp, Homo sapiens
ctcatctcatctttt

SEQ ID NO: 359949 - DNA, 15 bp, Homo sapiens
tctcatctcatcttt

SEQ ID NO: 359950 - DNA, 15 bp, Homo sapiens
ttctcatctcatctt

SEQ ID NO: 359951 - DNA, 15 bp, Homo sapiens
attctcatctcatct

SEQ ID NO: 359952 - DNA, 15 bp, Homo sapiens
cattctcatctcatc

SEQ ID NO: 359953 - DNA, 15 bp, Homo sapiens
tcattctcatctcat

SEQ ID NO: 359954 - DNA, 15 bp, Homo sapiens
gtcattctcatctca

SEQ ID NO: 359955 - DNA, 15 bp, Homo sapiens
ggtcattctcatctc

SEQ ID NO: 359956 - DNA, 15 bp, Homo sapiens
gggtcattctcatct

SEQ ID NO: 359957 - DNA, 15 bp, Homo sapiens
agggtcattctcatc

SEQ ID NO: 359958 - DNA, 15 bp, Homo sapiens
tagggtcattctcat

SEQ ID NO: 359959 - DNA, 15 bp, Homo sapiens
ttagggtcattctca

SEQ ID NO: 359960 - DNA, 15 bp, Homo sapiens
gttagggtcattctc

SEQ ID NO: 359961 - DNA, 15 bp, Homo sapiens
agttagggtcattct

SEQ ID NO: 359962 - DNA, 15 bp, Homo sapiens
gagttagggtcattc

SEQ ID NO: 359963 - DNA, 15 bp, Homo sapiens
tgagttagggtcatt

SEQ ID NO: 359964 - DNA, 15 bp, Homo sapiens
atgagttagggtcat

SEQ ID NO: 359965 - DNA, 15 bp, Homo sapiens
tatgagttagggtca

SEQ ID NO: 359966 - DNA, 15 bp, Homo sapiens
ctatgagttagggtc

SEQ ID NO: 359967 - DNA, 15 bp, Homo sapiens
cctatgagttagggt

SEQ ID NO: 359968 - DNA, 15 bp, Homo sapiens
ccctatgagttaggg

SEQ ID NO: 359969 - DNA, 15 bp, Homo sapiens
gccctatgagttagg

SEQ ID NO: 359970 - DNA, 15 bp, Homo sapiens
agccctatgagttag

SEQ ID NO: 359971 - DNA, 15 bp, Homo sapiens
cagccctatgagtta

SEQ ID NO: 359972 - DNA, 15 bp, Homo sapiens
acagccctatgagtt

SEQ ID NO: 359973 - DNA, 15 bp, Homo sapiens
tacagccctatgagt

SEQ ID NO: 359974 - DNA, 15 bp, Homo sapiens
ctacagccctatgag

SEQ ID NO: 359975 - DNA, 15 bp, Homo sapiens
actacagccctatga

SEQ ID NO: 359976 - DNA, 15 bp, Homo sapiens
cactacagccctatg

SEQ ID NO: 359977 - DNA, 15 bp, Homo sapiens
tcactacagccctat

SEQ ID NO: 359978 - DNA, 15 bp, Homo sapiens
ttcactacagcccta

SEQ ID NO: 359979 - DNA, 15 bp, Homo sapiens
cttcactacagccct

SEQ ID NO: 359980 - DNA, 15 bp, Homo sapiens
tcttcactacagccc

SEQ ID NO: 359981 - DNA, 15 bp, Homo sapiens
atcttcactacagcc

SEQ ID NO: 359982 - DNA, 15 bp, Homo sapiens
aatcttcactacagc

SEQ ID NO: 359983 - DNA, 15 bp, Homo sapiens
taatcttcactacag

SEQ ID NO: 359984 - DNA, 15 bp, Homo sapiens
ttaatcttcactaca

SEQ ID NO: 359985 - DNA, 15 bp, Homo sapiens
tttaatcttcactac

SEQ ID NO: 359986 - DNA, 15 bp, Homo sapiens
ttttaatcttcacta

SEQ ID NO: 359987 - DNA, 15 bp, Homo sapiens
attttaatcttcact

SEQ ID NO: 359988 - DNA, 15 bp, Homo sapiens
gattttaatcttcac

SEQ ID NO: 359989 - DNA, 15 bp, Homo sapiens
ggattttaatcttca

SEQ ID NO: 359990 - DNA, 15 bp, Homo sapiens
tggattttaatcttc

SEQ ID NO: 359991 - DNA, 15 bp, Homo sapiens
ttggattttaatctt

SEQ ID NO: 359992 - DNA, 15 bp, Homo sapiens
gttggattttaatct

SEQ ID NO: 359993 - DNA, 15 bp, Homo sapiens
tgttggattttaatc

SEQ ID NO: 359994 - DNA, 15 bp, Homo sapiens
ctgttggattttaat

SEQ ID NO: 359995 - DNA, 15 bp, Homo sapiens
tctgttggattttaa

SEQ ID NO: 359996 - DNA, 15 bp, Homo sapiens
atctgttggatttta

SEQ ID NO: 359997 - DNA, 15 bp, Homo sapiens
catctgttggatttt

SEQ ID NO: 359998 - DNA, 15 bp, Homo sapiens
tcatctgttggattt

SEQ ID NO: 359999 - DNA, 15 bp, Homo sapiens
gtcatctgttggatt

SEQ ID NO: 360000 - DNA, 15 bp, Homo sapiens
agtcatctgttggat

SEQ ID NO: 360001 - DNA, 15 bp, Homo sapiens
gagtcatctgttgga

SEQ ID NO: 360002 - DNA, 15 bp, Homo sapiens
tgagtcatctgttgg

SEQ ID NO: 360003 - DNA, 15 bp, Homo sapiens
ctgagtcatctgttg

SEQ ID NO: 360004 - DNA, 15 bp, Homo sapiens
actgagtcatctgtt

SEQ ID NO: 360005 - DNA, 15 bp, Homo sapiens
tactgagtcatctgt

SEQ ID NO: 360006 - DNA, 15 bp, Homo sapiens
ttactgagtcatctg

SEQ ID NO: 360007 - DNA, 15 bp, Homo sapiens
tttactgagtcatct

SEQ ID NO: 360008 - DNA, 15 bp, Homo sapiens
ctttactgagtcatc

SEQ ID NO: 360009 - DNA, 15 bp, Homo sapiens
actttactgagtcat

SEQ ID NO: 360010 - DNA, 15 bp, Homo sapiens
aactttactgagtca

SEQ ID NO: 360011 - DNA, 15 bp, Homo sapiens
taactttactgagtc

SEQ ID NO: 360012 - DNA, 15 bp, Homo sapiens
gtaactttactgagt

SEQ ID NO: 360013 - DNA, 15 bp, Homo sapiens
ggtaactttactgag

SEQ ID NO: 360014 - DNA, 15 bp, Homo sapiens
aggtaactttactga

SEQ ID NO: 360015 - DNA, 15 bp, Homo sapiens
gaggtaactttactg

SEQ ID NO: 360016 - DNA, 15 bp, Homo sapiens
agaggtaactttact

SEQ ID NO: 360017 - DNA, 15 bp, Homo sapiens
aagaggtaactttac

SEQ ID NO: 360018 - DNA, 15 bp, Homo sapiens
taagaggtaacttta

SEQ ID NO: 360019 - DNA, 15 bp, Homo sapiens
ataagaggtaacttt

SEQ ID NO: 360020 - DNA, 15 bp, Homo sapiens
aataagaggtaactt

SEQ ID NO: 360021 - DNA, 15 bp, Homo sapiens
gaataagaggtaact

SEQ ID NO: 360022 - DNA, 15 bp, Homo sapiens
agaataagaggtaac

SEQ ID NO: 360023 - DNA, 15 bp, Homo sapiens
aagaataagaggtaa

SEQ ID NO: 360024 - DNA, 15 bp, Homo sapiens
taagaataagaggta

SEQ ID NO: 360025 - DNA, 15 bp, Homo sapiens
gtaagaataagaggt

SEQ ID NO: 360026 - DNA, 15 bp, Homo sapiens
agtaagaataagagg

SEQ ID NO: 360027 - DNA, 15 bp, Homo sapiens
tagtaagaataagag

SEQ ID NO: 360028 - DNA, 15 bp, Homo sapiens
atagtaagaataaga

SEQ ID NO: 360029 - DNA, 15 bp, Homo sapiens
aatagtaagaataag

SEQ ID NO: 360030 - DNA, 15 bp, Homo sapiens
taatagtaagaataa

SEQ ID NO: 360031 - DNA, 15 bp, Homo sapiens
ataatagtaagaata

SEQ ID NO: 360032 - DNA, 15 bp, Homo sapiens
aataatagtaagaat

SEQ ID NO: 360033 - DNA, 15 bp, Homo sapiens
taataatagtaagaa

SEQ ID NO: 360034 - DNA, 15 bp, Homo sapiens
ttaataatagtaaga

SEQ ID NO: 360035 - DNA, 15 bp, Homo sapiens
tttaataatagtaag

SEQ ID NO: 360036 - DNA, 15 bp, Homo sapiens
atttaataatagtaa

SEQ ID NO: 360037 - DNA, 15 bp, Homo sapiens
catttaataatagta

SEQ ID NO: 360038 - DNA, 15 bp, Homo sapiens
gcatttaataatagt

SEQ ID NO: 360039 - DNA, 15 bp, Homo sapiens
agcatttaataatag

SEQ ID NO: 360040 - DNA, 15 bp, Homo sapiens
cagcatttaataata

SEQ ID NO: 360041 - DNA, 15 bp, Homo sapiens
acagcatttaataat

SEQ ID NO: 360042 - DNA, 15 bp, Homo sapiens
cacagcatttaataa

SEQ ID NO: 360043 - DNA, 15 bp, Homo sapiens
tcacagcatttaata

SEQ ID NO: 360044 - DNA, 15 bp, Homo sapiens
ctcacagcatttaat

SEQ ID NO: 360045 - DNA, 15 bp, Homo sapiens
cctcacagcatttaa

SEQ ID NO: 360046 - DNA, 15 bp, Homo sapiens
tcctcacagcattta

SEQ ID NO: 360047 - DNA, 15 bp, Homo sapiens
ttcctcacagcattt

SEQ ID NO: 360048 - DNA, 15 bp, Homo sapiens
tttcctcacagcatt

SEQ ID NO: 360049 - DNA, 15 bp, Homo sapiens
ctttcctcacagcat

SEQ ID NO: 360050 - DNA, 15 bp, Homo sapiens
gctttcctcacagca

SEQ ID NO: 360051 - DNA, 15 bp, Homo sapiens
agctttcctcacagc

SEQ ID NO: 360052 - DNA, 15 bp, Homo sapiens
cagctttcctcacag

SEQ ID NO: 360053 - DNA, 15 bp, Homo sapiens
tcagctttcctcaca

SEQ ID NO: 360054 - DNA, 15 bp, Homo sapiens
ttcagctttcctcac

SEQ ID NO: 360055 - DNA, 15 bp, Homo sapiens
attcagctttcctca

SEQ ID NO: 360056 - DNA, 15 bp, Homo sapiens
cattcagctttcctc

SEQ ID NO: 360057 - DNA, 15 bp, Homo sapiens
gcattcagctttcct

SEQ ID NO: 360058 - DNA, 15 bp, Homo sapiens
agcattcagctttcc

SEQ ID NO: 360059 - DNA, 15 bp, Homo sapiens
cagcattcagctttc

SEQ ID NO: 360060 - DNA, 15 bp, Homo sapiens
gcagcattcagcttt

SEQ ID NO: 360061 - DNA, 15 bp, Homo sapiens
ggcagcattcagctt

SEQ ID NO: 360062 - DNA, 15 bp, Homo sapiens
aggcagcattcagct

SEQ ID NO: 360063 - DNA, 15 bp, Homo sapiens
caggcagcattcagc

SEQ ID NO: 360064 - DNA, 15 bp, Homo sapiens
acaggcagcattcag

SEQ ID NO: 360065 - DNA, 15 bp, Homo sapiens
tacaggcagcattca

SEQ ID NO: 360066 - DNA, 15 bp, Homo sapiens
atacaggcagcattc

SEQ ID NO: 360067 - DNA, 15 bp, Homo sapiens
aatacaggcagcatt

SEQ ID NO: 360068 - DNA, 15 bp, Homo sapiens
caatacaggcagcat

SEQ ID NO: 360069 - DNA, 15 bp, Homo sapiens
acaatacaggcagca

SEQ ID NO: 360070 - DNA, 15 bp, Homo sapiens
aacaatacaggcagc

SEQ ID NO: 360071 - DNA, 15 bp, Homo sapiens
taacaatacaggcag

SEQ ID NO: 360072 - DNA, 15 bp, Homo sapiens
ataacaatacaggca

SEQ ID NO: 360073 - DNA, 15 bp, Homo sapiens
aataacaatacaggc

SEQ ID NO: 360074 - DNA, 15 bp, Homo sapiens
caataacaatacagg

SEQ ID NO: 360075 - DNA, 15 bp, Homo sapiens
ccaataacaatacag

SEQ ID NO: 360076 - DNA, 15 bp, Homo sapiens
accaataacaataca

SEQ ID NO: 360077 - DNA, 15 bp, Homo sapiens
aaccaataacaatac

SEQ ID NO: 360078 - DNA, 15 bp, Homo sapiens
aaaccaataacaata

SEQ ID NO: 360079 - DNA, 15 bp, Homo sapiens
taaaccaataacaat

SEQ ID NO: 360080 - DNA, 15 bp, Homo sapiens
ataaaccaataacaa

SEQ ID NO: 360081 - DNA, 15 bp, Homo sapiens
tataaaccaataaca

SEQ ID NO: 360082 - DNA, 15 bp, Homo sapiens
ctataaaccaataac

SEQ ID NO: 360083 - DNA, 15 bp, Homo sapiens
gctataaaccaataa

SEQ ID NO: 360084 - DNA, 15 bp, Homo sapiens
tgctataaaccaata

SEQ ID NO: 360085 - DNA, 15 bp, Homo sapiens
ttgctataaaccaat

SEQ ID NO: 360086 - DNA, 15 bp, Homo sapiens
attgctataaaccaa

SEQ ID NO: 360087 - DNA, 15 bp, Homo sapiens
cattgctataaacca

SEQ ID NO: 360088 - DNA, 15 bp, Homo sapiens
acattgctataaacc

SEQ ID NO: 360089 - DNA, 15 bp, Homo sapiens
aacattgctataaac

SEQ ID NO: 360090 - DNA, 15 bp, Homo sapiens
aaacattgctataaa

SEQ ID NO: 360091 - DNA, 15 bp, Homo sapiens
aaaacattgctataa

SEQ ID NO: 360092 - DNA, 15 bp, Homo sapiens
caaaacattgctata

SEQ ID NO: 360093 - DNA, 15 bp, Homo sapiens
acaaaacattgctat

SEQ ID NO: 360094 - DNA, 15 bp, Homo sapiens
tacaaaacattgcta

SEQ ID NO: 360095 - DNA, 15 bp, Homo sapiens
atacaaaacattgct

SEQ ID NO: 360096 - DNA, 15 bp, Homo sapiens
aatacaaaacattgc

SEQ ID NO: 360097 - DNA, 15 bp, Homo sapiens
gaatacaaaacattg

SEQ ID NO: 360098 - DNA, 15 bp, Homo sapiens
agaatacaaaacatt

SEQ ID NO: 360099 - DNA, 15 bp, Homo sapiens
aagaatacaaaacat

SEQ ID NO: 360100 - DNA, 15 bp, Homo sapiens
taagaatacaaaaca

SEQ ID NO: 360101 - DNA, 15 bp, Homo sapiens
ataagaatacaaaac

SEQ ID NO: 360102 - DNA, 15 bp, Homo sapiens
tataagaatacaaaa

SEQ ID NO: 360103 - DNA, 15 bp, Homo sapiens
ctataagaatacaaa

SEQ ID NO: 360104 - DNA, 15 bp, Homo sapiens
tctataagaatacaa

SEQ ID NO: 360105 - DNA, 15 bp, Homo sapiens
atctataagaataca

SEQ ID NO: 360106 - DNA, 15 bp, Homo sapiens
tatctataagaatac

SEQ ID NO: 360107 - DNA, 15 bp, Homo sapiens
ttatctataagaata

SEQ ID NO: 360108 - DNA, 15 bp, Homo sapiens
attatctataagaat

SEQ ID NO: 360109 - DNA, 15 bp, Homo sapiens
tattatctataagaa

SEQ ID NO: 360110 - DNA, 15 bp, Homo sapiens
ctattatctataaga

SEQ ID NO: 360111 - DNA, 15 bp, Homo sapiens
gctattatctataag

SEQ ID NO: 360112 - DNA, 15 bp, Homo sapiens
ggctattatctataa

SEQ ID NO: 360113 - DNA, 15 bp, Homo sapiens
aggctattatctata

SEQ ID NO: 360114 - DNA, 15 bp, Homo sapiens
aaggctattatctat

SEQ ID NO: 360115 - DNA, 15 bp, Homo sapiens
caaggctattatcta

SEQ ID NO: 360116 - DNA, 15 bp, Homo sapiens
acaaggctattatct

SEQ ID NO: 360117 - DNA, 15 bp, Homo sapiens
cacaaggctattatc

SEQ ID NO: 360118 - DNA, 15 bp, Homo sapiens
gcacaaggctattat

SEQ ID NO: 360119 - DNA, 15 bp, Homo sapiens
tgcacaaggctatta

SEQ ID NO: 360120 - DNA, 15 bp, Homo sapiens
atgcacaaggctatt

SEQ ID NO: 360121 - DNA, 15 bp, Homo sapiens
gatgcacaaggctat

SEQ ID NO: 360122 - DNA, 15 bp, Homo sapiens
agatgcacaaggcta

SEQ ID NO: 360123 - DNA, 15 bp, Homo sapiens
cagatgcacaaggct

SEQ ID NO: 360124 - DNA, 15 bp, Homo sapiens
acagatgcacaaggc

SEQ ID NO: 360125 - DNA, 15 bp, Homo sapiens
cacagatgcacaagg

SEQ ID NO: 360126 - DNA, 15 bp, Homo sapiens
tcacagatgcacaag

SEQ ID NO: 360127 - DNA, 15 bp, Homo sapiens
ctcacagatgcacaa

SEQ ID NO: 360128 - DNA, 15 bp, Homo sapiens
gctcacagatgcaca

SEQ ID NO: 360129 - DNA, 15 bp, Homo sapiens
agctcacagatgcac

SEQ ID NO: 360130 - DNA, 15 bp, Homo sapiens
aagctcacagatgca

SEQ ID NO: 360131 - DNA, 15 bp, Homo sapiens
aaagctcacagatgc

SEQ ID NO: 360132 - DNA, 15 bp, Homo sapiens
gaaagctcacagatg

SEQ ID NO: 360133 - DNA, 15 bp, Homo sapiens
agaaagctcacagat

SEQ ID NO: 360134 - DNA, 15 bp, Homo sapiens
aagaaagctcacaga

SEQ ID NO: 360135 - DNA, 15 bp, Homo sapiens
taagaaagctcacag

SEQ ID NO: 360136 - DNA, 15 bp, Homo sapiens
ctaagaaagctcaca

SEQ ID NO: 360137 - DNA, 15 bp, Homo sapiens
actaagaaagctcac

SEQ ID NO: 360138 - DNA, 15 bp, Homo sapiens
cactaagaaagctca

SEQ ID NO: 360139 - DNA, 15 bp, Homo sapiens
gcactaagaaagctc

SEQ ID NO: 360140 - DNA, 15 bp, Homo sapiens
tgcactaagaaagct

SEQ ID NO: 360141 - DNA, 15 bp, Homo sapiens
atgcactaagaaagc

SEQ ID NO: 360142 - DNA, 15 bp, Homo sapiens
catgcactaagaaag

SEQ ID NO: 360143 - DNA, 15 bp, Homo sapiens
acatgcactaagaaa

SEQ ID NO: 360144 - DNA, 15 bp, Homo sapiens
aacatgcactaagaa

SEQ ID NO: 360145 - DNA, 15 bp, Homo sapiens
caacatgcactaaga

SEQ ID NO: 360146 - DNA, 15 bp, Homo sapiens
acaacatgcactaag

SEQ ID NO: 360147 - DNA, 15 bp, Homo sapiens
tacaacatgcactaa

SEQ ID NO: 360148 - DNA, 15 bp, Homo sapiens
ctacaacatgcacta

SEQ ID NO: 360149 - DNA, 15 bp, Homo sapiens
tctacaacatgcact

SEQ ID NO: 360150 - DNA, 15 bp, Homo sapiens
gtctacaacatgcac

SEQ ID NO: 360151 - DNA, 15 bp, Homo sapiens
tgtctacaacatgca

SEQ ID NO: 360152 - DNA, 15 bp, Homo sapiens
ctgtctacaacatgc

SEQ ID NO: 360153 - DNA, 15 bp, Homo sapiens
cctgtctacaacatg

SEQ ID NO: 360154 - DNA, 15 bp, Homo sapiens
ccctgtctacaacat

SEQ ID NO: 360155 - DNA, 15 bp, Homo sapiens
tccctgtctacaaca

SEQ ID NO: 360156 - DNA, 15 bp, Homo sapiens
ttccctgtctacaac

SEQ ID NO: 360157 - DNA, 15 bp, Homo sapiens
tttccctgtctacaa

SEQ ID NO: 360158 - DNA, 15 bp, Homo sapiens
atttccctgtctaca

SEQ ID NO: 360159 - DNA, 15 bp, Homo sapiens
catttccctgtctac

SEQ ID NO: 360160 - DNA, 15 bp, Homo sapiens
gcatttccctgtcta

SEQ ID NO: 360161 - DNA, 15 bp, Homo sapiens
tgcatttccctgtct

SEQ ID NO: 360162 - DNA, 15 bp, Homo sapiens
atgcatttccctgtc

SEQ ID NO: 360163 - DNA, 15 bp, Homo sapiens
catgcatttccctgt

SEQ ID NO: 360164 - DNA, 15 bp, Homo sapiens
tcatgcatttccctg

SEQ ID NO: 360165 - DNA, 15 bp, Homo sapiens
atcatgcatttccct

SEQ ID NO: 360166 - DNA, 15 bp, Homo sapiens
catcatgcatttccc

SEQ ID NO: 360167 - DNA, 15 bp, Homo sapiens
tcatcatgcatttcc

SEQ ID NO: 360168 - DNA, 15 bp, Homo sapiens
atcatcatgcatttc

SEQ ID NO: 360169 - DNA, 15 bp, Homo sapiens
catcatcatgcattt

SEQ ID NO: 360170 - DNA, 15 bp, Homo sapiens
gcatcatcatgcatt

SEQ ID NO: 360171 - DNA, 15 bp, Homo sapiens
tgcatcatcatgcat

SEQ ID NO: 360172 - DNA, 15 bp, Homo sapiens
atgcatcatcatgca

SEQ ID NO: 360173 - DNA, 15 bp, Homo sapiens
catgcatcatcatgc

SEQ ID NO: 360174 - DNA, 15 bp, Homo sapiens
tcatgcatcatcatg

SEQ ID NO: 360175 - DNA, 15 bp, Homo sapiens
gtcatgcatcatcat

SEQ ID NO: 360176 - DNA, 15 bp, Homo sapiens
tgtcatgcatcatca

SEQ ID NO: 360177 - DNA, 15 bp, Homo sapiens
atgtcatgcatcatc

SEQ ID NO: 360178 - DNA, 15 bp, Homo sapiens
tatgtcatgcatcat

SEQ ID NO: 360179 - DNA, 15 bp, Homo sapiens
ttatgtcatgcatca

SEQ ID NO: 360180 - DNA, 15 bp, Homo sapiens
attatgtcatgcatc

SEQ ID NO: 360181 - DNA, 15 bp, Homo sapiens
cattatgtcatgcat

SEQ ID NO: 360182 - DNA, 15 bp, Homo sapiens
tcattatgtcatgca

SEQ ID NO: 360183 - DNA, 15 bp, Homo sapiens
atcattatgtcatgc

SEQ ID NO: 360184 - DNA, 15 bp, Homo sapiens
catcattatgtcatg

SEQ ID NO: 360185 - DNA, 15 bp, Homo sapiens
tcatcattatgtcat

SEQ ID NO: 360186 - DNA, 15 bp, Homo sapiens
gtcatcattatgtca

SEQ ID NO: 360187 - DNA, 15 bp, Homo sapiens
tgtcatcattatgtc

SEQ ID NO: 360188 - DNA, 15 bp, Homo sapiens
ttgtcatcattatgt

SEQ ID NO: 360189 - DNA, 15 bp, Homo sapiens
attgtcatcattatg

SEQ ID NO: 360190 - DNA, 15 bp, Homo sapiens
tattgtcatcattat

SEQ ID NO: 360191 - DNA, 15 bp, Homo sapiens
ttattgtcatcatta

SEQ ID NO: 360192 - DNA, 15 bp, Homo sapiens
attattgtcatcatt

SEQ ID NO: 360193 - DNA, 15 bp, Homo sapiens
cattattgtcatcat

SEQ ID NO: 360194 - DNA, 15 bp, Homo sapiens
tcattattgtcatca

SEQ ID NO: 360195 - DNA, 15 bp, Homo sapiens
ttcattattgtcatc

SEQ ID NO: 360196 - DNA, 15 bp, Homo sapiens
gttcattattgtcat

SEQ ID NO: 360197 - DNA, 15 bp, Homo sapiens
agttcattattgtca

SEQ ID NO: 360198 - DNA, 15 bp, Homo sapiens
tagttcattattgtc

SEQ ID NO: 360199 - DNA, 15 bp, Homo sapiens
gtagttcattattgt

SEQ ID NO: 360200 - DNA, 15 bp, Homo sapiens
tgtagttcattattg

SEQ ID NO: 360201 - DNA, 15 bp, Homo sapiens
ctgtagttcattatt

SEQ ID NO: 360202 - DNA, 15 bp, Homo sapiens
actgtagttcattat

SEQ ID NO: 360203 - DNA, 15 bp, Homo sapiens
gactgtagttcatta

SEQ ID NO: 360204 - DNA, 15 bp, Homo sapiens
ggactgtagttcatt

SEQ ID NO: 360205 - DNA, 15 bp, Homo sapiens
gggactgtagttcat

SEQ ID NO: 360206 - DNA, 15 bp, Homo sapiens
ggggactgtagttca

SEQ ID NO: 360207 - DNA, 15 bp, Homo sapiens
aggggactgtagttc

SEQ ID NO: 360208 - DNA, 15 bp, Homo sapiens
aaggggactgtagtt

SEQ ID NO: 360209 - DNA, 15 bp, Homo sapiens
caaggggactgtagt

SEQ ID NO: 360210 - DNA, 15 bp, Homo sapiens
ccaaggggactgtag

SEQ ID NO: 360211 - DNA, 15 bp, Homo sapiens
cccaaggggactgta

SEQ ID NO: 360212 - DNA, 15 bp, Homo sapiens
ccccaaggggactgt

SEQ ID NO: 360213 - DNA, 15 bp, Homo sapiens
tccccaaggggactg

SEQ ID NO: 360214 - DNA, 15 bp, Homo sapiens
ctccccaaggggact

SEQ ID NO: 360215 - DNA, 15 bp, Homo sapiens
cctccccaaggggac

SEQ ID NO: 360216 - DNA, 15 bp, Homo sapiens
gcctccccaagggga

SEQ ID NO: 360217 - DNA, 15 bp, Homo sapiens
agcctccccaagggg

SEQ ID NO: 360218 - DNA, 15 bp, Homo sapiens
cagcctccccaaggg

SEQ ID NO: 360219 - DNA, 15 bp, Homo sapiens
ccagcctccccaagg

SEQ ID NO: 360220 - DNA, 15 bp, Homo sapiens
cccagcctccccaag

SEQ ID NO: 360221 - DNA, 15 bp, Homo sapiens
ccccagcctccccaa

SEQ ID NO: 360222 - DNA, 15 bp, Homo sapiens
gccccagcctcccca

SEQ ID NO: 360223 - DNA, 15 bp, Homo sapiens
agccccagcctcccc

SEQ ID NO: 360224 - DNA, 15 bp, Homo sapiens
gagccccagcctccc

SEQ ID NO: 360225 - DNA, 15 bp, Homo sapiens
tgagccccagcctcc

SEQ ID NO: 360226 - DNA, 15 bp, Homo sapiens
tctgagccccagcct

SEQ ID NO: 360227 - DNA, 15 bp, Homo sapiens
ctctgagccccagcc

SEQ ID NO: 360228 - DNA, 15 bp, Homo sapiens
gctctgagccccagc

SEQ ID NO: 360229 - DNA, 15 bp, Homo sapiens
ggctctgagccccag

SEQ ID NO: 360230 - DNA, 15 bp, Homo sapiens
gggctctgagcccca

SEQ ID NO: 360231 - DNA, 15 bp, Homo sapiens
agggctctgagcccc

SEQ ID NO: 360232 - DNA, 15 bp, Homo sapiens
tagggctctgagccc

SEQ ID NO: 360233 - DNA, 15 bp, Homo sapiens
atagggctctgagcc

SEQ ID NO: 360234 - DNA, 15 bp, Homo sapiens
aatagggctctgagc

SEQ ID NO: 360235 - DNA, 15 bp, Homo sapiens
aaatagggctctgag

SEQ ID NO: 360236 - DNA, 15 bp, Homo sapiens
gaaatagggctctga

SEQ ID NO: 360237 - DNA, 15 bp, Homo sapiens
cgaaatagggctctg

SEQ ID NO: 360238 - DNA, 15 bp, Homo sapiens
acgaaatagggctct

SEQ ID NO: 360239 - DNA, 15 bp, Homo sapiens
cacgaaatagggctc

SEQ ID NO: 360240 - DNA, 15 bp, Homo sapiens
ccacgaaatagggct

SEQ ID NO: 360241 - DNA, 15 bp, Homo sapiens
tccacgaaatagggc

SEQ ID NO: 360242 - DNA, 15 bp, Homo sapiens
ttccacgaaataggg

SEQ ID NO: 360243 - DNA, 15 bp, Homo sapiens
cttccacgaaatagg

SEQ ID NO: 360244 - DNA, 15 bp, Homo sapiens
ccttccacgaaatag

SEQ ID NO: 360245 - DNA, 15 bp, Homo sapiens
gccttccacgaaata

SEQ ID NO: 360246 - DNA, 15 bp, Homo sapiens
agccttccacgaaat

SEQ ID NO: 360247 - DNA, 15 bp, Homo sapiens
aagccttccacgaaa

SEQ ID NO: 360248 - DNA, 15 bp, Homo sapiens
caagccttccacgaa

SEQ ID NO: 360249 - DNA, 15 bp, Homo sapiens
acaagccttccacga

SEQ ID NO: 360250 - DNA, 15 bp, Homo sapiens
cacaagccttccacg

SEQ ID NO: 360251 - DNA, 15 bp, Homo sapiens
tcacaagccttccac

SEQ ID NO: 360252 - DNA, 15 bp, Homo sapiens
ttcacaagccttcca

SEQ ID NO: 360253 - DNA, 15 bp, Homo sapiens
gttcacaagccttcc

SEQ ID NO: 360254 - DNA, 15 bp, Homo sapiens
tgttcacaagccttc

SEQ ID NO: 360255 - DNA, 15 bp, Homo sapiens
atgttcacaagcctt

SEQ ID NO: 360256 - DNA, 15 bp, Homo sapiens
gatgttcacaagcct

SEQ ID NO: 360257 - DNA, 15 bp, Homo sapiens
agatgttcacaagcc

SEQ ID NO: 360258 - DNA, 15 bp, Homo sapiens
aagatgttcacaagc

SEQ ID NO: 360259 - DNA, 15 bp, Homo sapiens
gaagatgttcacaag

SEQ ID NO: 360260 - DNA, 15 bp, Homo sapiens
tgaagatgttcacaa

SEQ ID NO: 360261 - DNA, 15 bp, Homo sapiens
atgaagatgttcaca

SEQ ID NO: 360262 - DNA, 15 bp, Homo sapiens
tatgaagatgttcac

SEQ ID NO: 360263 - DNA, 15 bp, Homo sapiens
ctatgaagatgttca

SEQ ID NO: 360264 - DNA, 15 bp, Homo sapiens
gctatgaagatgttc

SEQ ID NO: 360265 - DNA, 15 bp, Homo sapiens
tgctatgaagatgtt

SEQ ID NO: 360266 - DNA, 15 bp, Homo sapiens
ctgctatgaagatgt

SEQ ID NO: 360267 - DNA, 15 bp, Homo sapiens
gctgctatgaagatg

SEQ ID NO: 360268 - DNA, 15 bp, Homo sapiens
tgctgctatgaagat

SEQ ID NO: 360269 - DNA, 15 bp, Homo sapiens
ctgctgctatgaaga

SEQ ID NO: 360270 - DNA, 15 bp, Homo sapiens
actgctgctatgaag

SEQ ID NO: 360271 - DNA, 15 bp, Homo sapiens
cactgctgctatgaa

SEQ ID NO: 360272 - DNA, 15 bp, Homo sapiens
ccactgctgctatga

SEQ ID NO: 360273 - DNA, 15 bp, Homo sapiens
cccactgctgctatg

SEQ ID NO: 360274 - DNA, 15 bp, Homo sapiens
gcccactgctgctat

SEQ ID NO: 360275 - DNA, 15 bp, Homo sapiens
agcccactgctgcta

SEQ ID NO: 360276 - DNA, 15 bp, Homo sapiens
gagcccactgctgct

SEQ ID NO: 360277 - DNA, 15 bp, Homo sapiens
tgagcccactgctgc

SEQ ID NO: 360278 - DNA, 15 bp, Homo sapiens
gtgagcccactgctg

SEQ ID NO: 360279 - DNA, 15 bp, Homo sapiens
ggtgagcccactgct

SEQ ID NO: 360280 - DNA, 15 bp, Homo sapiens
gggtgagcccactgc

SEQ ID NO: 360281 - DNA, 15 bp, Homo sapiens
tgggtgagcccactg

SEQ ID NO: 360282 - DNA, 15 bp, Homo sapiens
ctgggtgagcccact

SEQ ID NO: 360283 - DNA, 15 bp, Homo sapiens
actgggtgagcccac

SEQ ID NO: 360284 - DNA, 15 bp, Homo sapiens
gactgggtgagccca

SEQ ID NO: 360285 - DNA, 15 bp, Homo sapiens
agactgggtgagccc

SEQ ID NO: 360286 - DNA, 15 bp, Homo sapiens
gagactgggtgagcc

SEQ ID NO: 360287 - DNA, 15 bp, Homo sapiens
agagactgggtgagc

SEQ ID NO: 360288 - DNA, 15 bp, Homo sapiens
gagagactgggtgag

SEQ ID NO: 360289 - DNA, 15 bp, Homo sapiens
ggagagactgggtga

SEQ ID NO: 360290 - DNA, 15 bp, Homo sapiens
gggagagactgggtg

SEQ ID NO: 360291 - DNA, 15 bp, Homo sapiens
tgggagagactgggt

SEQ ID NO: 360292 - DNA, 15 bp, Homo sapiens
ctgggagagactggg

SEQ ID NO: 360293 - DNA, 15 bp, Homo sapiens
cctgggagagactgg

SEQ ID NO: 360294 - DNA, 15 bp, Homo sapiens
tcctgggagagactg

SEQ ID NO: 360295 - DNA, 15 bp, Homo sapiens
ttcctgggagagact

SEQ ID NO: 360296 - DNA, 15 bp, Homo sapiens
attcctgggagagac

SEQ ID NO: 360297 - DNA, 15 bp, Homo sapiens
cattcctgggagaga

SEQ ID NO: 360298 - DNA, 15 bp, Homo sapiens
acattcctgggagag

SEQ ID NO: 360299 - DNA, 15 bp, Homo sapiens
gacattcctgggaga

SEQ ID NO: 360300 - DNA, 15 bp, Homo sapiens
tgacattcctgggag

SEQ ID NO: 360301 - DNA, 15 bp, Homo sapiens
ctgacattcctggga

SEQ ID NO: 360302 - DNA, 15 bp, Homo sapiens
gctgacattcctggg

SEQ ID NO: 360303 - DNA, 15 bp, Homo sapiens
tgctgacattcctgg

SEQ ID NO: 360304 - DNA, 15 bp, Homo sapiens
atgctgacattcctg

SEQ ID NO: 360305 - DNA, 15 bp, Homo sapiens
tatgctgacattcct

SEQ ID NO: 360306 - DNA, 15 bp, Homo sapiens
ctatgctgacattcc

SEQ ID NO: 360307 - DNA, 15 bp, Homo sapiens
cctatgctgacattc

SEQ ID NO: 360308 - DNA, 15 bp, Homo sapiens
acctatgctgacatt

SEQ ID NO: 360309 - DNA, 15 bp, Homo sapiens
tacctatgctgacat

SEQ ID NO: 360310 - DNA, 15 bp, Homo sapiens
ttacctatgctgaca

SEQ ID NO: 360311 - DNA, 15 bp, Homo sapiens
gttacctatgctgac

SEQ ID NO: 360312 - DNA, 15 bp, Homo sapiens
tgttacctatgctga

SEQ ID NO: 360313 - DNA, 15 bp, Homo sapiens
ttgttacctatgctg

SEQ ID NO: 360314 - DNA, 15 bp, Homo sapiens
attgttacctatgct

SEQ ID NO: 360315 - DNA, 15 bp, Homo sapiens
gattgttacctatgc

SEQ ID NO: 360316 - DNA, 15 bp, Homo sapiens
ggattgttacctatg

SEQ ID NO: 360317 - DNA, 15 bp, Homo sapiens
tggattgttacctat

SEQ ID NO: 360318 - DNA, 15 bp, Homo sapiens
atggattgttaccta

SEQ ID NO: 360319 - DNA, 15 bp, Homo sapiens
aatggattgttacct

SEQ ID NO: 360320 - DNA, 15 bp, Homo sapiens
gaatggattgttacc

SEQ ID NO: 360321 - DNA, 15 bp, Homo sapiens
agaatggattgttac

SEQ ID NO: 360322 - DNA, 15 bp, Homo sapiens
tagaatggattgtta

SEQ ID NO: 360323 - DNA, 15 bp, Homo sapiens
gtagaatggattgtt

SEQ ID NO: 360324 - DNA, 15 bp, Homo sapiens
agtagaatggattgt

SEQ ID NO: 360325 - DNA, 15 bp, Homo sapiens
gagtagaatggattg

SEQ ID NO: 360326 - DNA, 15 bp, Homo sapiens
agagtagaatggatt

SEQ ID NO: 360327 - DNA, 15 bp, Homo sapiens
gagagtagaatggat

SEQ ID NO: 360328 - DNA, 15 bp, Homo sapiens
agagagtagaatgga

SEQ ID NO: 360329 - DNA, 15 bp, Homo sapiens
cagagagtagaatgg

SEQ ID NO: 360330 - DNA, 15 bp, Homo sapiens
gcagagagtagaatg

SEQ ID NO: 360331 - DNA, 15 bp, Homo sapiens
ggcagagagtagaat

SEQ ID NO: 360332 - DNA, 15 bp, Homo sapiens
gggcagagagtagaa

SEQ ID NO: 360333 - DNA, 15 bp, Homo sapiens
agggcagagagtaga

SEQ ID NO: 360334 - DNA, 15 bp, Homo sapiens
aagggcagagagtag

SEQ ID NO: 360335 - DNA, 15 bp, Homo sapiens
caagggcagagagta

SEQ ID NO: 360336 - DNA, 15 bp, Homo sapiens
acaagggcagagagt

SEQ ID NO: 360337 - DNA, 15 bp, Homo sapiens
aacaagggcagagag

SEQ ID NO: 360338 - DNA, 15 bp, Homo sapiens
gaacaagggcagaga

SEQ ID NO: 360339 - DNA, 15 bp, Homo sapiens
agaacaagggcagag

SEQ ID NO: 360340 - DNA, 15 bp, Homo sapiens
tagaacaagggcaga

SEQ ID NO: 360341 - DNA, 15 bp, Homo sapiens
atagaacaagggcag

SEQ ID NO: 360342 - DNA, 15 bp, Homo sapiens
aatagaacaagggca

SEQ ID NO: 360343 - DNA, 15 bp, Homo sapiens
taatagaacaagggc

SEQ ID NO: 360344 - DNA, 15 bp, Homo sapiens
ttaatagaacaaggg

SEQ ID NO: 360345 - DNA, 15 bp, Homo sapiens
gttaatagaacaagg

SEQ ID NO: 360346 - DNA, 15 bp, Homo sapiens
tgttaatagaacaag

SEQ ID NO: 360347 - DNA, 15 bp, Homo sapiens
ctgttaatagaacaa

SEQ ID NO: 360348 - DNA, 15 bp, Homo sapiens
gctgttaatagaaca

SEQ ID NO: 360349 - DNA, 15 bp, Homo sapiens
agctgttaatagaac

SEQ ID NO: 360350 - DNA, 15 bp, Homo sapiens
aagctgttaatagaa

SEQ ID NO: 360351 - DNA, 15 bp, Homo sapiens
aaagctgttaataga

SEQ ID NO: 360352 - DNA, 15 bp, Homo sapiens
caaagctgttaatag

SEQ ID NO: 360353 - DNA, 15 bp, Homo sapiens
ccaaagctgttaata

SEQ ID NO: 360354 - DNA, 15 bp, Homo sapiens
cccaaagctgttaat

SEQ ID NO: 360355 - DNA, 15 bp, Homo sapiens
acccaaagctgttaa

SEQ ID NO: 360356 - DNA, 15 bp, Homo sapiens
gacccaaagctgtta

SEQ ID NO: 360357 - DNA, 15 bp, Homo sapiens
agacccaaagctgtt

SEQ ID NO: 360358 - DNA, 15 bp, Homo sapiens
aagacccaaagctgt

SEQ ID NO: 360359 - DNA, 15 bp, Homo sapiens
taagacccaaagctg

SEQ ID NO: 360360 - DNA, 15 bp, Homo sapiens
ttaagacccaaagct

SEQ ID NO: 360361 - DNA, 15 bp, Homo sapiens
attaagacccaaagc

SEQ ID NO: 360362 - DNA, 15 bp, Homo sapiens
cattaagacccaaag

SEQ ID NO: 360363 - DNA, 15 bp, Homo sapiens
gcattaagacccaaa

SEQ ID NO: 360364 - DNA, 15 bp, Homo sapiens
ggcattaagacccaa

SEQ ID NO: 360365 - DNA, 15 bp, Homo sapiens
aggcattaagaccca

SEQ ID NO: 360366 - DNA, 15 bp, Homo sapiens
taggcattaagaccc

SEQ ID NO: 360367 - DNA, 15 bp, Homo sapiens
gtaggcattaagacc

SEQ ID NO: 360368 - DNA, 15 bp, Homo sapiens
tgtaggcattaagac

SEQ ID NO: 360369 - DNA, 15 bp, Homo sapiens
gtgtaggcattaaga

SEQ ID NO: 360370 - DNA, 15 bp, Homo sapiens
agtgtaggcattaag

SEQ ID NO: 360371 - DNA, 15 bp, Homo sapiens
cagtgtaggcattaa

SEQ ID NO: 360372 - DNA, 15 bp, Homo sapiens
ccagtgtaggcatta

SEQ ID NO: 360373 - DNA, 15 bp, Homo sapiens
gccagtgtaggcatt

SEQ ID NO: 360374 - DNA, 15 bp, Homo sapiens
agccagtgtaggcat

SEQ ID NO: 360375 - DNA, 15 bp, Homo sapiens
aagccagtgtaggca

SEQ ID NO: 360376 - DNA, 15 bp, Homo sapiens
aaagccagtgtaggc

SEQ ID NO: 360377 - DNA, 15 bp, Homo sapiens
gaaagccagtgtagg

SEQ ID NO: 360378 - DNA, 15 bp, Homo sapiens
ggaaagccagtgtag

SEQ ID NO: 360379 - DNA, 15 bp, Homo sapiens
aggaaagccagtgta

SEQ ID NO: 360380 - DNA, 15 bp, Homo sapiens
taggaaagccagtgt

SEQ ID NO: 360381 - DNA, 15 bp, Homo sapiens
gtaggaaagccagtg

SEQ ID NO: 360382 - DNA, 15 bp, Homo sapiens
tgtaggaaagccagt

SEQ ID NO: 360383 - DNA, 15 bp, Homo sapiens
ctgtaggaaagccag

SEQ ID NO: 360384 - DNA, 15 bp, Homo sapiens
actgtaggaaagcca

SEQ ID NO: 360385 - DNA, 15 bp, Homo sapiens
aactgtaggaaagcc

SEQ ID NO: 360386 - DNA, 15 bp, Homo sapiens
aaactgtaggaaagc

SEQ ID NO: 360387 - DNA, 15 bp, Homo sapiens
taaactgtaggaaag

SEQ ID NO: 360388 - DNA, 15 bp, Homo sapiens
ataaactgtaggaaa

SEQ ID NO: 360389 - DNA, 15 bp, Homo sapiens
aataaactgtaggaa

SEQ ID NO: 360390 - DNA, 15 bp, Homo sapiens
caataaactgtagga

SEQ ID NO: 360391 - DNA, 15 bp, Homo sapiens
acaataaactgtagg

SEQ ID NO: 360392 - DNA, 15 bp, Homo sapiens
gacaataaactgtag

SEQ ID NO: 360393 - DNA, 15 bp, Homo sapiens
agacaataaactgta

SEQ ID NO: 360394 - DNA, 15 bp, Homo sapiens
aagacaataaactgt

SEQ ID NO: 360395 - DNA, 15 bp, Homo sapiens
caagacaataaactg

SEQ ID NO: 360396 - DNA, 15 bp, Homo sapiens
gcaagacaataaact

SEQ ID NO: 360397 - DNA, 15 bp, Homo sapiens
agcaagacaataaac

SEQ ID NO: 360398 - DNA, 15 bp, Homo sapiens
tagcaagacaataaa

SEQ ID NO: 360399 - DNA, 15 bp, Homo sapiens
ttagcaagacaataa

SEQ ID NO: 360400 - DNA, 15 bp, Homo sapiens
attagcaagacaata

SEQ ID NO: 360401 - DNA, 15 bp, Homo sapiens
gattagcaagacaat

SEQ ID NO: 360402 - DNA, 15 bp, Homo sapiens
ggattagcaagacaa

SEQ ID NO: 360403 - DNA, 15 bp, Homo sapiens
tggattagcaagaca

SEQ ID NO: 360404 - DNA, 15 bp, Homo sapiens
atggattagcaagac

SEQ ID NO: 360405 - DNA, 15 bp, Homo sapiens
catggattagcaaga

SEQ ID NO: 360406 - DNA, 15 bp, Homo sapiens
tcatggattagcaag

SEQ ID NO: 360407 - DNA, 15 bp, Homo sapiens
ctcatggattagcaa

SEQ ID NO: 360408 - DNA, 15 bp, Homo sapiens
tctcatggattagca

SEQ ID NO: 360409 - DNA, 15 bp, Homo sapiens
ttctcatggattagc

SEQ ID NO: 360410 - DNA, 15 bp, Homo sapiens
tttctcatggattag

SEQ ID NO: 360411 - DNA, 15 bp, Homo sapiens
atttctcatggatta

SEQ ID NO: 360412 - DNA, 15 bp, Homo sapiens
catttctcatggatt

SEQ ID NO: 360413 - DNA, 15 bp, Homo sapiens
ccatttctcatggat

SEQ ID NO: 360414 - DNA, 15 bp, Homo sapiens
tccatttctcatgga

SEQ ID NO: 360415 - DNA, 15 bp, Homo sapiens
atccatttctcatgg

SEQ ID NO: 360416 - DNA, 15 bp, Homo sapiens
aatccatttctcatg

SEQ ID NO: 360417 - DNA, 15 bp, Homo sapiens
taatccatttctcat

SEQ ID NO: 360418 - DNA, 15 bp, Homo sapiens
ttaatccatttctca

SEQ ID NO: 360419 - DNA, 15 bp, Homo sapiens
attaatccatttctc

SEQ ID NO: 360420 - DNA, 15 bp, Homo sapiens
tattaatccatttct

SEQ ID NO: 360421 - DNA, 15 bp, Homo sapiens
ttattaatccatttc

SEQ ID NO: 360422 - DNA, 15 bp, Homo sapiens
attattaatccattt

SEQ ID NO: 360423 - DNA, 15 bp, Homo sapiens
gattattaatccatt

SEQ ID NO: 360424 - DNA, 15 bp, Homo sapiens
tgattattaatccat

SEQ ID NO: 360425 - DNA, 15 bp, Homo sapiens
ctgattattaatcca

SEQ ID NO: 360426 - DNA, 15 bp, Homo sapiens
cctgattattaatcc

SEQ ID NO: 360427 - DNA, 15 bp, Homo sapiens
tcctgattattaatc

SEQ ID NO: 360428 - DNA, 15 bp, Homo sapiens
ttcctgattattaat

SEQ ID NO: 360429 - DNA, 15 bp, Homo sapiens
tttcctgattattaa

SEQ ID NO: 360430 - DNA, 15 bp, Homo sapiens
ctttcctgattatta

SEQ ID NO: 360431 - DNA, 15 bp, Homo sapiens
actttcctgattatt

SEQ ID NO: 360432 - DNA, 15 bp, Homo sapiens
gactttcctgattat

SEQ ID NO: 360433 - DNA, 15 bp, Homo sapiens
tgactttcctgatta

SEQ ID NO: 360434 - DNA, 15 bp, Homo sapiens
ctgactttcctgatt

SEQ ID NO: 360435 - DNA, 15 bp, Homo sapiens
tctgactttcctgat

SEQ ID NO: 360436 - DNA, 15 bp, Homo sapiens
atctgactttcctga

SEQ ID NO: 360437 - DNA, 15 bp, Homo sapiens
catctgactttcctg

SEQ ID NO: 360438 - DNA, 15 bp, Homo sapiens
ccatctgactttcct

SEQ ID NO: 360439 - DNA, 15 bp, Homo sapiens
tccatctgactttcc

SEQ ID NO: 360440 - DNA, 15 bp, Homo sapiens
ttccatctgactttc

SEQ ID NO: 360441 - DNA, 15 bp, Homo sapiens
cttccatctgacttt

SEQ ID NO: 360442 - DNA, 15 bp, Homo sapiens
ccttccatctgactt

SEQ ID NO: 360443 - DNA, 15 bp, Homo sapiens
cccttccatctgact

SEQ ID NO: 360444 - DNA, 15 bp, Homo sapiens
acccttccatctgac

SEQ ID NO: 360445 - DNA, 15 bp, Homo sapiens
aacccttccatctga

SEQ ID NO: 360446 - DNA, 15 bp, Homo sapiens
gaacccttccatctg

SEQ ID NO: 360447 - DNA, 15 bp, Homo sapiens
agaacccttccatct

SEQ ID NO: 360448 - DNA, 15 bp, Homo sapiens
aagaacccttccatc

SEQ ID NO: 360449 - DNA, 15 bp, Homo sapiens
aaagaacccttccat

SEQ ID NO: 360450 - DNA, 15 bp, Homo sapiens
gaaagaacccttcca

SEQ ID NO: 360451 - DNA, 15 bp, Homo sapiens
agaaagaacccttcc

SEQ ID NO: 360452 - DNA, 15 bp, Homo sapiens
gagaaagaacccttc

SEQ ID NO: 360453 - DNA, 15 bp, Homo sapiens
ggagaaagaaccctt

SEQ ID NO: 360454 - DNA, 15 bp, Homo sapiens
gggagaaagaaccct

SEQ ID NO: 360455 - DNA, 15 bp, Homo sapiens
agggagaaagaaccc

SEQ ID NO: 360456 - DNA, 15 bp, Homo sapiens
aagggagaaagaacc

SEQ ID NO: 360457 - DNA, 15 bp, Homo sapiens
caagggagaaagaac

SEQ ID NO: 360458 - DNA, 15 bp, Homo sapiens
ccaagggagaaagaa

SEQ ID NO: 360459 - DNA, 15 bp, Homo sapiens
cccaagggagaaaga

SEQ ID NO: 360460 - DNA, 15 bp, Homo sapiens
gcccaagggagaaag

SEQ ID NO: 360461 - DNA, 15 bp, Homo sapiens
ggcccaagggagaaa

SEQ ID NO: 360462 - DNA, 15 bp, Homo sapiens
aggcccaagggagaa

SEQ ID NO: 360463 - DNA, 15 bp, Homo sapiens
gaggcccaagggaga

SEQ ID NO: 360464 - DNA, 15 bp, Homo sapiens
agaggcccaagggag

SEQ ID NO: 360465 - DNA, 15 bp, Homo sapiens
tagaggcccaaggga

SEQ ID NO: 360466 - DNA, 15 bp, Homo sapiens
ttagaggcccaaggg

SEQ ID NO: 360467 - DNA, 15 bp, Homo sapiens
attagaggcccaagg

SEQ ID NO: 360468 - DNA, 15 bp, Homo sapiens
gattagaggcccaag

SEQ ID NO: 360469 - DNA, 15 bp, Homo sapiens
ggattagaggcccaa

SEQ ID NO: 360470 - DNA, 15 bp, Homo sapiens
gggattagaggccca

SEQ ID NO: 360471 - DNA, 15 bp, Homo sapiens
ggggattagaggccc

SEQ ID NO: 360472 - DNA, 15 bp, Homo sapiens
tggggattagaggcc

SEQ ID NO: 360473 - DNA, 15 bp, Homo sapiens
ctggggattagaggc

SEQ ID NO: 360474 - DNA, 15 bp, Homo sapiens
tctggggattagagg

SEQ ID NO: 360475 - DNA, 15 bp, Homo sapiens
atctggggattagag

SEQ ID NO: 360476 - DNA, 15 bp, Homo sapiens
aatctggggattaga

SEQ ID NO: 360477 - DNA, 15 bp, Homo sapiens
caatctggggattag

SEQ ID NO: 360478 - DNA, 15 bp, Homo sapiens
ccaatctggggatta

SEQ ID NO: 360479 - DNA, 15 bp, Homo sapiens
accaatctggggatt

SEQ ID NO: 360480 - DNA, 15 bp, Homo sapiens
taccaatctggggat

SEQ ID NO: 360481 - DNA, 15 bp, Homo sapiens
ataccaatctgggga

SEQ ID NO: 360482 - DNA, 15 bp, Homo sapiens
cataccaatctgggg

SEQ ID NO: 360483 - DNA, 15 bp, Homo sapiens
ccataccaatctggg

SEQ ID NO: 360484 - DNA, 15 bp, Homo sapiens
cccataccaatctgg

SEQ ID NO: 360485 - DNA, 15 bp, Homo sapiens
acccataccaatctg

SEQ ID NO: 360486 - DNA, 15 bp, Homo sapiens
gacccataccaatct

SEQ ID NO: 360487 - DNA, 15 bp, Homo sapiens
agacccataccaatc

SEQ ID NO: 360488 - DNA, 15 bp, Homo sapiens
cagacccataccaat

SEQ ID NO: 360489 - DNA, 15 bp, Homo sapiens
acagacccataccaa

SEQ ID NO: 360490 - DNA, 15 bp, Homo sapiens
aacagacccatacca

SEQ ID NO: 360491 - DNA, 15 bp, Homo sapiens
gaacagacccatacc

SEQ ID NO: 360492 - DNA, 15 bp, Homo sapiens
ggaacagacccatac

SEQ ID NO: 360493 - DNA, 15 bp, Homo sapiens
aggaacagacccata

SEQ ID NO: 360494 - DNA, 15 bp, Homo sapiens
aaggaacagacccat

SEQ ID NO: 360495 - DNA, 15 bp, Homo sapiens
aaaggaacagaccca

SEQ ID NO: 360496 - DNA, 15 bp, Homo sapiens
aaaaggaacagaccc

SEQ ID NO: 360497 - DNA, 15 bp, Homo sapiens
aaaaaggaacagacc

SEQ ID NO: 360498 - DNA, 15 bp, Homo sapiens
caaaaaggaacagac

SEQ ID NO: 360499 - DNA, 15 bp, Homo sapiens
acaaaaaggaacaga

SEQ ID NO: 360500 - DNA, 15 bp, Homo sapiens
gacaaaaaggaacag

SEQ ID NO: 360501 - DNA, 15 bp, Homo sapiens
tgacaaaaaggaaca

SEQ ID NO: 360502 - DNA, 15 bp, Homo sapiens
ctgacaaaaaggaac

SEQ ID NO: 360503 - DNA, 15 bp, Homo sapiens
gctgacaaaaaggaa

SEQ ID NO: 360504 - DNA, 15 bp, Homo sapiens
ggctgacaaaaagga

SEQ ID NO: 360505 - DNA, 15 bp, Homo sapiens
tggctgacaaaaagg

SEQ ID NO: 360506 - DNA, 15 bp, Homo sapiens
ctggctgacaaaaag

SEQ ID NO: 360507 - DNA, 15 bp, Homo sapiens
cctggctgacaaaaa

SEQ ID NO: 360508 - DNA, 15 bp, Homo sapiens
tcctggctgacaaaa

SEQ ID NO: 360509 - DNA, 15 bp, Homo sapiens
ttcctggctgacaaa

SEQ ID NO: 360510 - DNA, 15 bp, Homo sapiens
tttcctggctgacaa

SEQ ID NO: 360511 - DNA, 15 bp, Homo sapiens
ttttcctggctgaca

SEQ ID NO: 360512 - DNA, 15 bp, Homo sapiens
attttcctggctgac

SEQ ID NO: 360513 - DNA, 15 bp, Homo sapiens
gattttcctggctga

SEQ ID NO: 360514 - DNA, 15 bp, Homo sapiens
ggattttcctggctg

SEQ ID NO: 360515 - DNA, 15 bp, Homo sapiens
aggattttcctggct

SEQ ID NO: 360516 - DNA, 15 bp, Homo sapiens
taggattttcctggc

SEQ ID NO: 360517 - DNA, 15 bp, Homo sapiens
ataggattttcctgg

SEQ ID NO: 360518 - DNA, 15 bp, Homo sapiens
gataggattttcctg

SEQ ID NO: 360519 - DNA, 15 bp, Homo sapiens
tgataggattttcct

SEQ ID NO: 360520 - DNA, 15 bp, Homo sapiens
atgataggattttcc

SEQ ID NO: 360521 - DNA, 15 bp, Homo sapiens
aatgataggattttc

SEQ ID NO: 360522 - DNA, 15 bp, Homo sapiens
aaatgataggatttt

SEQ ID NO: 360523 - DNA, 15 bp, Homo sapiens
gaaatgataggattt

SEQ ID NO: 360524 - DNA, 15 bp, Homo sapiens
agaaatgataggatt

SEQ ID NO: 360525 - DNA, 15 bp, Homo sapiens
cagaaatgataggat

SEQ ID NO: 360526 - DNA, 15 bp, Homo sapiens
tcagaaatgatagga

SEQ ID NO: 360527 - DNA, 15 bp, Homo sapiens
atcagaaatgatagg

SEQ ID NO: 360528 - DNA, 15 bp, Homo sapiens
catcagaaatgatag

SEQ ID NO: 360529 - DNA, 15 bp, Homo sapiens
acatcagaaatgata

SEQ ID NO: 360530 - DNA, 15 bp, Homo sapiens
gacatcagaaatgat

SEQ ID NO: 360531 - DNA, 15 bp, Homo sapiens
tgacatcagaaatga

SEQ ID NO: 360532 - DNA, 15 bp, Homo sapiens
ctgacatcagaaatg

SEQ ID NO: 360533 - DNA, 15 bp, Homo sapiens
cctgacatcagaaat

SEQ ID NO: 360534 - DNA, 15 bp, Homo sapiens
tcctgacatcagaaa

SEQ ID NO: 360535 - DNA, 15 bp, Homo sapiens
gtcctgacatcagaa

SEQ ID NO: 360536 - DNA, 15 bp, Homo sapiens
ggtcctgacatcaga

SEQ ID NO: 360537 - DNA, 15 bp, Homo sapiens
tggtcctgacatcag

SEQ ID NO: 360538 - DNA, 15 bp, Homo sapiens
gtggtcctgacatca

SEQ ID NO: 360539 - DNA, 15 bp, Homo sapiens
ggtggtcctgacatc

SEQ ID NO: 360540 - DNA, 15 bp, Homo sapiens
gggtggtcctgacat

SEQ ID NO: 360541 - DNA, 15 bp, Homo sapiens
agggtggtcctgaca

SEQ ID NO: 360542 - DNA, 15 bp, Homo sapiens
aagggtggtcctgac

SEQ ID NO: 360543 - DNA, 15 bp, Homo sapiens
gaagggtggtcctga

SEQ ID NO: 360544 - DNA, 15 bp, Homo sapiens
ggaagggtggtcctg

SEQ ID NO: 360545 - DNA, 15 bp, Homo sapiens
aggaagggtggtcct

SEQ ID NO: 360546 - DNA, 15 bp, Homo sapiens
taggaagggtggtcc

SEQ ID NO: 360547 - DNA, 15 bp, Homo sapiens
ttaggaagggtggtc

SEQ ID NO: 360548 - DNA, 15 bp, Homo sapiens
tttaggaagggtggt

SEQ ID NO: 360549 - DNA, 15 bp, Homo sapiens
gtttaggaagggtgg

SEQ ID NO: 360550 - DNA, 15 bp, Homo sapiens
tgtttaggaagggtg

SEQ ID NO: 360551 - DNA, 15 bp, Homo sapiens
ttgtttaggaagggt

SEQ ID NO: 360552 - DNA, 15 bp, Homo sapiens
cttgtttaggaaggg

SEQ ID NO: 360553 - DNA, 15 bp, Homo sapiens
ccttgtttaggaagg

SEQ ID NO: 360554 - DNA, 15 bp, Homo sapiens
tccttgtttaggaag

SEQ ID NO: 360555 - DNA, 15 bp, Homo sapiens
gtccttgtttaggaa

SEQ ID NO: 360556 - DNA, 15 bp, Homo sapiens
agtccttgtttagga

SEQ ID NO: 360557 - DNA, 15 bp, Homo sapiens
cagtccttgtttagg

SEQ ID NO: 360558 - DNA, 15 bp, Homo sapiens
acagtccttgtttag

SEQ ID NO: 360559 - DNA, 15 bp, Homo sapiens
aacagtccttgttta

SEQ ID NO: 360560 - DNA, 15 bp, Homo sapiens
gaacagtccttgttt

SEQ ID NO: 360561 - DNA, 15 bp, Homo sapiens
agaacagtccttgtt

SEQ ID NO: 360562 - DNA, 15 bp, Homo sapiens
cagaacagtccttgt

SEQ ID NO: 360563 - DNA, 15 bp, Homo sapiens
ccagaacagtccttg

SEQ ID NO: 360564 - DNA, 15 bp, Homo sapiens
cccagaacagtcctt

SEQ ID NO: 360565 - DNA, 15 bp, Homo sapiens
acccagaacagtcct

SEQ ID NO: 360566 - DNA, 15 bp, Homo sapiens
gacccagaacagtcc

SEQ ID NO: 360567 - DNA, 15 bp, Homo sapiens
ggacccagaacagtc

SEQ ID NO: 360568 - DNA, 15 bp, Homo sapiens
aggacccagaacagt

SEQ ID NO: 360569 - DNA, 15 bp, Homo sapiens
gaggacccagaacag

SEQ ID NO: 360570 - DNA, 15 bp, Homo sapiens
cgaggacccagaaca

SEQ ID NO: 360571 - DNA, 15 bp, Homo sapiens
ccgaggacccagaac

SEQ ID NO: 360572 - DNA, 15 bp, Homo sapiens
tccgaggacccagaa

SEQ ID NO: 360573 - DNA, 15 bp, Homo sapiens
ttccgaggacccaga

SEQ ID NO: 360574 - DNA, 15 bp, Homo sapiens
attccgaggacccag

SEQ ID NO: 360575 - DNA, 15 bp, Homo sapiens
cattccgaggaccca

SEQ ID NO: 360576 - DNA, 15 bp, Homo sapiens
ccattccgaggaccc

SEQ ID NO: 360577 - DNA, 15 bp, Homo sapiens
gccattccgaggacc

SEQ ID NO: 360578 - DNA, 15 bp, Homo sapiens
agccattccgaggac

SEQ ID NO: 360579 - DNA, 15 bp, Homo sapiens
aagccattccgagga

SEQ ID NO: 360580 - DNA, 15 bp, Homo sapiens
aaagccattccgagg

SEQ ID NO: 360581 - DNA, 15 bp, Homo sapiens
caaagccattccgag

SEQ ID NO: 360582 - DNA, 15 bp, Homo sapiens
acaaagccattccga

SEQ ID NO: 360583 - DNA, 15 bp, Homo sapiens
tacaaagccattccg

SEQ ID NO: 360584 - DNA, 15 bp, Homo sapiens
atacaaagccattcc

SEQ ID NO: 360585 - DNA, 15 bp, Homo sapiens
catacaaagccattc

SEQ ID NO: 360586 - DNA, 15 bp, Homo sapiens
gcatacaaagccatt

SEQ ID NO: 360587 - DNA, 15 bp, Homo sapiens
agcatacaaagccat

SEQ ID NO: 360588 - DNA, 15 bp, Homo sapiens
tagcatacaaagcca

SEQ ID NO: 360589 - DNA, 15 bp, Homo sapiens
ttagcatacaaagcc

SEQ ID NO: 360590 - DNA, 15 bp, Homo sapiens
gttagcatacaaagc

SEQ ID NO: 360591 - DNA, 15 bp, Homo sapiens
tgttagcatacaaag

SEQ ID NO: 360592 - DNA, 15 bp, Homo sapiens
gtgttagcatacaaa

SEQ ID NO: 360593 - DNA, 15 bp, Homo sapiens
tgtgttagcatacaa

SEQ ID NO: 360594 - DNA, 15 bp, Homo sapiens
gtgtgttagcataca

SEQ ID NO: 360595 - DNA, 15 bp, Homo sapiens
agtgtgttagcatac

SEQ ID NO: 360596 - DNA, 15 bp, Homo sapiens
cagtgtgttagcata

SEQ ID NO: 360597 - DNA, 15 bp, Homo sapiens
ccagtgtgttagcat

SEQ ID NO: 360598 - DNA, 15 bp, Homo sapiens
tccagtgtgttagca

SEQ ID NO: 360599 - DNA, 15 bp, Homo sapiens
gtccagtgtgttagc

SEQ ID NO: 360600 - DNA, 15 bp, Homo sapiens
agtccagtgtgttag

SEQ ID NO: 360601 - DNA, 15 bp, Homo sapiens
aagtccagtgtgtta

SEQ ID NO: 360602 - DNA, 15 bp, Homo sapiens
aaagtccagtgtgtt

SEQ ID NO: 360603 - DNA, 15 bp, Homo sapiens
gaaagtccagtgtgt

SEQ ID NO: 360604 - DNA, 15 bp, Homo sapiens
ggaaagtccagtgtg

SEQ ID NO: 360605 - DNA, 15 bp, Homo sapiens
gggaaagtccagtgt

SEQ ID NO: 360606 - DNA, 15 bp, Homo sapiens
ggggaaagtccagtg

SEQ ID NO: 360607 - DNA, 15 bp, Homo sapiens
aggggaaagtccagt

SEQ ID NO: 360608 - DNA, 15 bp, Homo sapiens
taggggaaagtccag

SEQ ID NO: 360609 - DNA, 15 bp, Homo sapiens
ataggggaaagtcca

SEQ ID NO: 360610 - DNA, 15 bp, Homo sapiens
cataggggaaagtcc

SEQ ID NO: 360611 - DNA, 15 bp, Homo sapiens
gcataggggaaagtc

SEQ ID NO: 360612 - DNA, 15 bp, Homo sapiens
agcataggggaaagt

SEQ ID NO: 360613 - DNA, 15 bp, Homo sapiens
aagcataggggaaag

SEQ ID NO: 360614 - DNA, 15 bp, Homo sapiens
aaagcataggggaaa

SEQ ID NO: 360615 - DNA, 15 bp, Homo sapiens
taaagcataggggaa

SEQ ID NO: 360616 - DNA, 15 bp, Homo sapiens
ataaagcatagggga

SEQ ID NO: 360617 - DNA, 15 bp, Homo sapiens
gataaagcatagggg

SEQ ID NO: 360618 - DNA, 15 bp, Homo sapiens
agataaagcataggg

SEQ ID NO: 360619 - DNA, 15 bp, Homo sapiens
tagataaagcatagg

SEQ ID NO: 360620 - DNA, 15 bp, Homo sapiens
atagataaagcatag

SEQ ID NO: 360621 - DNA, 15 bp, Homo sapiens
catagataaagcata

SEQ ID NO: 360622 - DNA, 15 bp, Homo sapiens
acatagataaagcat

SEQ ID NO: 360623 - DNA, 15 bp, Homo sapiens
cacatagataaagca

SEQ ID NO: 360624 - DNA, 15 bp, Homo sapiens
acacatagataaagc

SEQ ID NO: 360625 - DNA, 15 bp, Homo sapiens
tacacatagataaag

SEQ ID NO: 360626 - DNA, 15 bp, Homo sapiens
atacacatagataaa

SEQ ID NO: 360627 - DNA, 15 bp, Homo sapiens
catacacatagataa

SEQ ID NO: 360628 - DNA, 15 bp, Homo sapiens
acatacacatagata

SEQ ID NO: 360629 - DNA, 15 bp, Homo sapiens
cacatacacatagat

SEQ ID NO: 360630 - DNA, 15 bp, Homo sapiens
acacatacacataga

SEQ ID NO: 360631 - DNA, 15 bp, Homo sapiens
cacacatacacatag

SEQ ID NO: 360632 - DNA, 15 bp, Homo sapiens
aacacacatacacat

SEQ ID NO: 360633 - DNA, 15 bp, Homo sapiens
gaacacacatacaca

SEQ ID NO: 360634 - DNA, 15 bp, Homo sapiens
agaacacacatacac

SEQ ID NO: 360635 - DNA, 15 bp, Homo sapiens
gagaacacacataca

SEQ ID NO: 360636 - DNA, 15 bp, Homo sapiens
tgagaacacacatac

SEQ ID NO: 360637 - DNA, 15 bp, Homo sapiens
ctgagaacacacata

SEQ ID NO: 360638 - DNA, 15 bp, Homo sapiens
gctgagaacacacat

SEQ ID NO: 360639 - DNA, 15 bp, Homo sapiens
agctgagaacacaca

SEQ ID NO: 360640 - DNA, 15 bp, Homo sapiens
aagctgagaacacac

SEQ ID NO: 360641 - DNA, 15 bp, Homo sapiens
taagctgagaacaca

SEQ ID NO: 360642 - DNA, 15 bp, Homo sapiens
ttaagctgagaacac

SEQ ID NO: 360643 - DNA, 15 bp, Homo sapiens
attaagctgagaaca

SEQ ID NO: 360644 - DNA, 15 bp, Homo sapiens
aattaagctgagaac

SEQ ID NO: 360645 - DNA, 15 bp, Homo sapiens
taattaagctgagaa

SEQ ID NO: 360646 - DNA, 15 bp, Homo sapiens
ataattaagctgaga

SEQ ID NO: 360647 - DNA, 15 bp, Homo sapiens
tataattaagctgag

SEQ ID NO: 360648 - DNA, 15 bp, Homo sapiens
ttataattaagctga

SEQ ID NO: 360649 - DNA, 15 bp, Homo sapiens
tttataattaagctg

SEQ ID NO: 360650 - DNA, 15 bp, Homo sapiens
atttataattaagct

SEQ ID NO: 360651 - DNA, 15 bp, Homo sapiens
catttataattaagc

SEQ ID NO: 360652 - DNA, 15 bp, Homo sapiens
tcatttataattaag

SEQ ID NO: 360653 - DNA, 15 bp, Homo sapiens
ctcatttataattaa

SEQ ID NO: 360654 - DNA, 15 bp, Homo sapiens
gctcatttataatta

SEQ ID NO: 360655 - DNA, 15 bp, Homo sapiens
tgctcatttataatt

SEQ ID NO: 360656 - DNA, 15 bp, Homo sapiens
atgctcatttataat

SEQ ID NO: 360657 - DNA, 15 bp, Homo sapiens
aatgctcatttataa

SEQ ID NO: 360658 - DNA, 15 bp, Homo sapiens
taatgctcatttata

SEQ ID NO: 360659 - DNA, 15 bp, Homo sapiens
ttaatgctcatttat

SEQ ID NO: 360660 - DNA, 15 bp, Homo sapiens
gttaatgctcattta

SEQ ID NO: 360661 - DNA, 15 bp, Homo sapiens
tgttaatgctcattt

SEQ ID NO: 360662 - DNA, 15 bp, Homo sapiens
ctgttaatgctcatt

SEQ ID NO: 360663 - DNA, 15 bp, Homo sapiens
gctgttaatgctcat

SEQ ID NO: 360664 - DNA, 15 bp, Homo sapiens
ggctgttaatgctca

SEQ ID NO: 360665 - DNA, 15 bp, Homo sapiens
tggctgttaatgctc

SEQ ID NO: 360666 - DNA, 15 bp, Homo sapiens
ttggctgttaatgct

SEQ ID NO: 360667 - DNA, 15 bp, Homo sapiens
attggctgttaatgc

SEQ ID NO: 360668 - DNA, 15 bp, Homo sapiens
tattggctgttaatg

SEQ ID NO: 360669 - DNA, 15 bp, Homo sapiens
gtattggctgttaat

SEQ ID NO: 360670 - DNA, 15 bp, Homo sapiens
tgtattggctgttaa

SEQ ID NO: 360671 - DNA, 15 bp, Homo sapiens
ctgtattggctgtta

SEQ ID NO: 360672 - DNA, 15 bp, Homo sapiens
actgtattggctgtt

SEQ ID NO: 360673 - DNA, 15 bp, Homo sapiens
tactgtattggctgt

SEQ ID NO: 360674 - DNA, 15 bp, Homo sapiens
atactgtattggctg

SEQ ID NO: 360675 - DNA, 15 bp, Homo sapiens
gatactgtattggct

SEQ ID NO: 360676 - DNA, 15 bp, Homo sapiens
tgatactgtattggc

SEQ ID NO: 360677 - DNA, 15 bp, Homo sapiens
ttgatactgtattgg

SEQ ID NO: 360678 - DNA, 15 bp, Homo sapiens
cttgatactgtattg

SEQ ID NO: 360679 - DNA, 15 bp, Homo sapiens
gcttgatactgtatt

SEQ ID NO: 360680 - DNA, 15 bp, Homo sapiens
agcttgatactgtat

SEQ ID NO: 360681 - DNA, 15 bp, Homo sapiens
cagcttgatactgta

SEQ ID NO: 360682 - DNA, 15 bp, Homo sapiens
ccagcttgatactgt

SEQ ID NO: 360683 - DNA, 15 bp, Homo sapiens
tccagcttgatactg

SEQ ID NO: 360684 - DNA, 15 bp, Homo sapiens
ctccagcttgatact

SEQ ID NO: 360685 - DNA, 15 bp, Homo sapiens
cctccagcttgatac

SEQ ID NO: 360686 - DNA, 15 bp, Homo sapiens
gcctccagcttgata

SEQ ID NO: 360687 - DNA, 15 bp, Homo sapiens
agcctccagcttgat

SEQ ID NO: 360688 - DNA, 15 bp, Homo sapiens
cagcctccagcttga

SEQ ID NO: 360689 - DNA, 15 bp, Homo sapiens
acagcctccagcttg

SEQ ID NO: 360690 - DNA, 15 bp, Homo sapiens
gacagcctccagctt

SEQ ID NO: 360691 - DNA, 15 bp, Homo sapiens
agacagcctccagct

SEQ ID NO: 360692 - DNA, 15 bp, Homo sapiens
gagacagcctccagc

SEQ ID NO: 360693 - DNA, 15 bp, Homo sapiens
tgagacagcctccag

SEQ ID NO: 360694 - DNA, 15 bp, Homo sapiens
ctgagacagcctcca

SEQ ID NO: 360695 - DNA, 15 bp, Homo sapiens
tctgagacagcctcc

SEQ ID NO: 360696 - DNA, 15 bp, Homo sapiens
ctctgagacagcctc

SEQ ID NO: 360697 - DNA, 15 bp, Homo sapiens
cctctgagacagcct

SEQ ID NO: 360698 - DNA, 15 bp, Homo sapiens
acctctgagacagcc

SEQ ID NO: 360699 - DNA, 15 bp, Homo sapiens
cacctctgagacagc

SEQ ID NO: 360700 - DNA, 15 bp, Homo sapiens
ccacctctgagacag

SEQ ID NO: 360701 - DNA, 15 bp, Homo sapiens
cccacctctgagaca

SEQ ID NO: 360702 - DNA, 15 bp, Homo sapiens
tcccacctctgagac

SEQ ID NO: 360703 - DNA, 15 bp, Homo sapiens
ttcccacctctgaga

SEQ ID NO: 360704 - DNA, 15 bp, Homo sapiens
tttcccacctctgag

SEQ ID NO: 360705 - DNA, 15 bp, Homo sapiens
ctttcccacctctga

SEQ ID NO: 360706 - DNA, 15 bp, Homo sapiens
actttcccacctctg

SEQ ID NO: 360707 - DNA, 15 bp, Homo sapiens
aactttcccacctct

SEQ ID NO: 360708 - DNA, 15 bp, Homo sapiens
caactttcccacctc

SEQ ID NO: 360709 - DNA, 15 bp, Homo sapiens
gcaactttcccacct

SEQ ID NO: 360710 - DNA, 15 bp, Homo sapiens
tgcaactttcccacc

SEQ ID NO: 360711 - DNA, 15 bp, Homo sapiens
ctgcaactttcccac

SEQ ID NO: 360712 - DNA, 15 bp, Homo sapiens
cctgcaactttccca

SEQ ID NO: 360713 - DNA, 15 bp, Homo sapiens
gcctgcaactttccc

SEQ ID NO: 360714 - DNA, 15 bp, Homo sapiens
tgcctgcaactttcc

SEQ ID NO: 360715 - DNA, 15 bp, Homo sapiens
ttgcctgcaactttc

SEQ ID NO: 360716 - DNA, 15 bp, Homo sapiens
cttgcctgcaacttt

SEQ ID NO: 360717 - DNA, 15 bp, Homo sapiens
tcttgcctgcaactt

SEQ ID NO: 360718 - DNA, 15 bp, Homo sapiens
ctcttgcctgcaact

SEQ ID NO: 360719 - DNA, 15 bp, Homo sapiens
gctcttgcctgcaac

SEQ ID NO: 360720 - DNA, 15 bp, Homo sapiens
tgctcttgcctgcaa

SEQ ID NO: 360721 - DNA, 15 bp, Homo sapiens
gtgctcttgcctgca

SEQ ID NO: 360722 - DNA, 15 bp, Homo sapiens
tgtgctcttgcctgc

SEQ ID NO: 360723 - DNA, 15 bp, Homo sapiens
ctgtgctcttgcctg

SEQ ID NO: 360724 - DNA, 15 bp, Homo sapiens
tctgtgctcttgcct

SEQ ID NO: 360725 - DNA, 15 bp, Homo sapiens
ttctgtgctcttgcc

SEQ ID NO: 360726 - DNA, 15 bp, Homo sapiens
tttctgtgctcttgc

SEQ ID NO: 360727 - DNA, 15 bp, Homo sapiens
ctttctgtgctcttg

SEQ ID NO: 360728 - DNA, 15 bp, Homo sapiens
actttctgtgctctt

SEQ ID NO: 360729 - DNA, 15 bp, Homo sapiens
gactttctgtgctct

SEQ ID NO: 360730 - DNA, 15 bp, Homo sapiens
tgactttctgtgctc

SEQ ID NO: 360731 - DNA, 15 bp, Homo sapiens
ctgactttctgtgct

SEQ ID NO: 360732 - DNA, 15 bp, Homo sapiens
tctgactttctgtgc

SEQ ID NO: 360733 - DNA, 15 bp, Homo sapiens
ttctgactttctgtg

SEQ ID NO: 360734 - DNA, 15 bp, Homo sapiens
attctgactttctgt

SEQ ID NO: 360735 - DNA, 15 bp, Homo sapiens
aattctgactttctg

SEQ ID NO: 360736 - DNA, 15 bp, Homo sapiens
gaattctgactttct

SEQ ID NO: 360737 - DNA, 15 bp, Homo sapiens
agaattctgactttc

SEQ ID NO: 360738 - DNA, 15 bp, Homo sapiens
aagaattctgacttt

SEQ ID NO: 360739 - DNA, 15 bp, Homo sapiens
taagaattctgactt

SEQ ID NO: 360740 - DNA, 15 bp, Homo sapiens
ctaagaattctgact

SEQ ID NO: 360741 - DNA, 15 bp, Homo sapiens
gctaagaattctgac

SEQ ID NO: 360742 - DNA, 15 bp, Homo sapiens
tgctaagaattctga

SEQ ID NO: 360743 - DNA, 15 bp, Homo sapiens
ttgctaagaattctg

SEQ ID NO: 360744 - DNA, 15 bp, Homo sapiens
tttgctaagaattct

SEQ ID NO: 360745 - DNA, 15 bp, Homo sapiens
gtttgctaagaattc

SEQ ID NO: 360746 - DNA, 15 bp, Homo sapiens
tgtttgctaagaatt

SEQ ID NO: 360747 - DNA, 15 bp, Homo sapiens
ctgtttgctaagaat

SEQ ID NO: 360748 - DNA, 15 bp, Homo sapiens
gctgtttgctaagaa

SEQ ID NO: 360749 - DNA, 15 bp, Homo sapiens
agctgtttgctaaga

SEQ ID NO: 360750 - DNA, 15 bp, Homo sapiens
cagctgtttgctaag

SEQ ID NO: 360751 - DNA, 15 bp, Homo sapiens
acagctgtttgctaa

SEQ ID NO: 360752 - DNA, 15 bp, Homo sapiens
aacagctgtttgcta

SEQ ID NO: 360753 - DNA, 15 bp, Homo sapiens
caacagctgtttgct

SEQ ID NO: 360754 - DNA, 15 bp, Homo sapiens
acaacagctgtttgc

SEQ ID NO: 360755 - DNA, 15 bp, Homo sapiens
gacaacagctgtttg

SEQ ID NO: 360756 - DNA, 15 bp, Homo sapiens
ggacaacagctgttt

SEQ ID NO: 360757 - DNA, 15 bp, Homo sapiens
tggacaacagctgtt

SEQ ID NO: 360758 - DNA, 15 bp, Homo sapiens
ttggacaacagctgt

SEQ ID NO: 360759 - DNA, 15 bp, Homo sapiens
gttggacaacagctg

SEQ ID NO: 360760 - DNA, 15 bp, Homo sapiens
agttggacaacagct

SEQ ID NO: 360761 - DNA, 15 bp, Homo sapiens
cagttggacaacagc

SEQ ID NO: 360762 - DNA, 15 bp, Homo sapiens
tcagttggacaacag

SEQ ID NO: 360763 - DNA, 15 bp, Homo sapiens
gtcagttggacaaca

SEQ ID NO: 360764 - DNA, 15 bp, Homo sapiens
ggtcagttggacaac

SEQ ID NO: 360765 - DNA, 15 bp, Homo sapiens
tggtcagttggacaa

SEQ ID NO: 360766 - DNA, 15 bp, Homo sapiens
ctggtcagttggaca

SEQ ID NO: 360767 - DNA, 15 bp, Homo sapiens
cctggtcagttggac

SEQ ID NO: 360768 - DNA, 15 bp, Homo sapiens
tcctggtcagttgga

SEQ ID NO: 360769 - DNA, 15 bp, Homo sapiens
ctcctggtcagttgg

SEQ ID NO: 360770 - DNA, 15 bp, Homo sapiens
actcctggtcagttg

SEQ ID NO: 360771 - DNA, 15 bp, Homo sapiens
cactcctggtcagtt

SEQ ID NO: 360772 - DNA, 15 bp, Homo sapiens
gcactcctggtcagt

SEQ ID NO: 360773 - DNA, 15 bp, Homo sapiens
tgcactcctggtcag

SEQ ID NO: 360774 - DNA, 15 bp, Homo sapiens
ttgcactcctggtca

SEQ ID NO: 360775 - DNA, 15 bp, Homo sapiens
tttgcactcctggtc

SEQ ID NO: 360776 - DNA, 15 bp, Homo sapiens
atttgcactcctggt

SEQ ID NO: 360777 - DNA, 15 bp, Homo sapiens
aatttgcactcctgg

SEQ ID NO: 360778 - DNA, 15 bp, Homo sapiens
caatttgcactcctg

SEQ ID NO: 360779 - DNA, 15 bp, Homo sapiens
acaatttgcactcct

SEQ ID NO: 360780 - DNA, 15 bp, Homo sapiens
aacaatttgcactcc

SEQ ID NO: 360781 - DNA, 15 bp, Homo sapiens
gaacaatttgcactc

SEQ ID NO: 360782 - DNA, 15 bp, Homo sapiens
agaacaatttgcact

SEQ ID NO: 360783 - DNA, 15 bp, Homo sapiens
tagaacaatttgcac

SEQ ID NO: 360784 - DNA, 15 bp, Homo sapiens
gtagaacaatttgca

SEQ ID NO: 360785 - DNA, 15 bp, Homo sapiens
agtagaacaatttgc

SEQ ID NO: 360786 - DNA, 15 bp, Homo sapiens
gagtagaacaatttg

SEQ ID NO: 360787 - DNA, 15 bp, Homo sapiens
cgagtagaacaattt

SEQ ID NO: 360788 - DNA, 15 bp, Homo sapiens
gcgagtagaacaatt

SEQ ID NO: 360789 - DNA, 15 bp, Homo sapiens
tgcgagtagaacaat

SEQ ID NO: 360790 - DNA, 15 bp, Homo sapiens
ttgcgagtagaacaa

SEQ ID NO: 360791 - DNA, 15 bp, Homo sapiens
tttgcgagtagaaca

SEQ ID NO: 360792 - DNA, 15 bp, Homo sapiens
ctttgcgagtagaac

SEQ ID NO: 360793 - DNA, 15 bp, Homo sapiens
gctttgcgagtagaa

SEQ ID NO: 360794 - DNA, 15 bp, Homo sapiens
agctttgcgagtaga

SEQ ID NO: 360795 - DNA, 15 bp, Homo sapiens
cagctttgcgagtag

SEQ ID NO: 360796 - DNA, 15 bp, Homo sapiens
gcagctttgcgagta

SEQ ID NO: 360797 - DNA, 15 bp, Homo sapiens
agcagctttgcgagt

SEQ ID NO: 360798 - DNA, 15 bp, Homo sapiens
aagcagctttgcgag

SEQ ID NO: 360799 - DNA, 15 bp, Homo sapiens
gaagcagctttgcga

SEQ ID NO: 360800 - DNA, 15 bp, Homo sapiens
tgaagcagctttgcg

SEQ ID NO: 360801 - DNA, 15 bp, Homo sapiens
gtgaagcagctttgc

SEQ ID NO: 360802 - DNA, 15 bp, Homo sapiens
cgtgaagcagctttg

SEQ ID NO: 360803 - DNA, 15 bp, Homo sapiens
acgtgaagcagcttt

SEQ ID NO: 360804 - DNA, 15 bp, Homo sapiens
tacgtgaagcagctt

SEQ ID NO: 360805 - DNA, 15 bp, Homo sapiens
atacgtgaagcagct

SEQ ID NO: 360806 - DNA, 15 bp, Homo sapiens
catacgtgaagcagc

SEQ ID NO: 360807 - DNA, 15 bp, Homo sapiens
acatacgtgaagcag

SEQ ID NO: 360808 - DNA, 15 bp, Homo sapiens
tacatacgtgaagca

SEQ ID NO: 360809 - DNA, 15 bp, Homo sapiens
gtacatacgtgaagc

SEQ ID NO: 360810 - DNA, 15 bp, Homo sapiens
tgtacatacgtgaag

SEQ ID NO: 360811 - DNA, 15 bp, Homo sapiens
atgtacatacgtgaa

SEQ ID NO: 360812 - DNA, 15 bp, Homo sapiens
aatgtacatacgtga

SEQ ID NO: 360813 - DNA, 15 bp, Homo sapiens
gaatgtacatacgtg

SEQ ID NO: 360814 - DNA, 15 bp, Homo sapiens
agaatgtacatacgt

SEQ ID NO: 360815 - DNA, 15 bp, Homo sapiens
aagaatgtacatacg

SEQ ID NO: 360816 - DNA, 15 bp, Homo sapiens
aaagaatgtacatac

SEQ ID NO: 360817 - DNA, 15 bp, Homo sapiens
aaaagaatgtacata

SEQ ID NO: 360818 - DNA, 15 bp, Homo sapiens
aaaaagaatgtacat

SEQ ID NO: 360819 - DNA, 15 bp, Homo sapiens
caaaaagaatgtaca

SEQ ID NO: 360820 - DNA, 15 bp, Homo sapiens
acaaaaagaatgtac

SEQ ID NO: 360821 - DNA, 15 bp, Homo sapiens
aacaaaaagaatgta

SEQ ID NO: 360822 - DNA, 15 bp, Homo sapiens
aaaacaaaaagaatg

SEQ ID NO: 360823 - DNA, 15 bp, Homo sapiens
caaaacaaaaagaat

SEQ ID NO: 360824 - DNA, 15 bp, Homo sapiens
acaaaacaaaaagaa

SEQ ID NO: 360825 - DNA, 15 bp, Homo sapiens
aacaaaacaaaaaga

SEQ ID NO: 360826 - DNA, 15 bp, Homo sapiens
aaacaaaacaaaaag

SEQ ID NO: 360827 - DNA, 15 bp, Homo sapiens
aaaaaaacaaaacaa

SEQ ID NO: 360828 - DNA, 15 bp, Homo sapiens
caaaaaaacaaaaca

SEQ ID NO: 360829 - DNA, 15 bp, Homo sapiens
tcaaaaaaacaaaac

SEQ ID NO: 360830 - DNA, 15 bp, Homo sapiens
tggcgacagagcgag

SEQ ID NO: 360831 - DNA, 15 bp, Homo sapiens
ctggcgacagagcga

SEQ ID NO: 360832 - DNA, 15 bp, Homo sapiens
cctggcgacagagcg

SEQ ID NO: 360833 - DNA, 15 bp, Homo sapiens
tctgcactccagcct

SEQ ID NO: 360834 - DNA, 15 bp, Homo sapiens
ctctgcactccagcc

SEQ ID NO: 360835 - DNA, 15 bp, Homo sapiens
gctctgcactccagc

SEQ ID NO: 360836 - DNA, 15 bp, Homo sapiens
ggctctgcactccag

SEQ ID NO: 360837 - DNA, 15 bp, Homo sapiens
gggctctgcactcca

SEQ ID NO: 360838 - DNA, 15 bp, Homo sapiens
agggctctgcactcc

SEQ ID NO: 360839 - DNA, 15 bp, Homo sapiens
tagggctctgcactc

SEQ ID NO: 360840 - DNA, 15 bp, Homo sapiens
atagggctctgcact

SEQ ID NO: 360841 - DNA, 15 bp, Homo sapiens
gatagggctctgcac

SEQ ID NO: 360842 - DNA, 15 bp, Homo sapiens
tgatagggctctgca

SEQ ID NO: 360843 - DNA, 15 bp, Homo sapiens
ctgatagggctctgc

SEQ ID NO: 360844 - DNA, 15 bp, Homo sapiens
gctgatagggctctg

SEQ ID NO: 360845 - DNA, 15 bp, Homo sapiens
agctgatagggctct

SEQ ID NO: 360846 - DNA, 15 bp, Homo sapiens
gagctgatagggctc

SEQ ID NO: 360847 - DNA, 15 bp, Homo sapiens
tgagctgatagggct

SEQ ID NO: 360848 - DNA, 15 bp, Homo sapiens
gtgagctgatagggc

SEQ ID NO: 360849 - DNA, 15 bp, Homo sapiens
agtgagctgataggg

SEQ ID NO: 360850 - DNA, 15 bp, Homo sapiens
cagtgagctgatagg

SEQ ID NO: 360851 - DNA, 15 bp, Homo sapiens
tcagtgagctgatag

SEQ ID NO: 360852 - DNA, 15 bp, Homo sapiens
ttcagtgagctgata

SEQ ID NO: 360853 - DNA, 15 bp, Homo sapiens
tttcagtgagctgat

SEQ ID NO: 360854 - DNA, 15 bp, Homo sapiens
gtttcagtgagctga

SEQ ID NO: 360855 - DNA, 15 bp, Homo sapiens
tgtttcagtgagctg

SEQ ID NO: 360856 - DNA, 15 bp, Homo sapiens
atgtttcagtgagct

SEQ ID NO: 360857 - DNA, 15 bp, Homo sapiens
gatgtttcagtgagc

SEQ ID NO: 360858 - DNA, 15 bp, Homo sapiens
agatgtttcagtgag

SEQ ID NO: 360859 - DNA, 15 bp, Homo sapiens
cagatgtttcagtga

SEQ ID NO: 360860 - DNA, 15 bp, Homo sapiens
gcagatgtttcagtg

SEQ ID NO: 360861 - DNA, 15 bp, Homo sapiens
ggcagatgtttcagt

SEQ ID NO: 360862 - DNA, 15 bp, Homo sapiens
aggcagatgtttcag

SEQ ID NO: 360863 - DNA, 15 bp, Homo sapiens
gaggcagatgtttca

SEQ ID NO: 360864 - DNA, 15 bp, Homo sapiens
ggaggcagatgtttc

SEQ ID NO: 360865 - DNA, 15 bp, Homo sapiens
gggaggcagatgttt

SEQ ID NO: 360866 - DNA, 15 bp, Homo sapiens
tgggaggcagatgtt

SEQ ID NO: 360867 - DNA, 15 bp, Homo sapiens
ctgggaggcagatgt

SEQ ID NO: 360868 - DNA, 15 bp, Homo sapiens
tctgggaggcagatg

SEQ ID NO: 360869 - DNA, 15 bp, Homo sapiens
atctgggaggcagat

SEQ ID NO: 360870 - DNA, 15 bp, Homo sapiens
aatctgggaggcaga

SEQ ID NO: 360871 - DNA, 15 bp, Homo sapiens
gaatctgggaggcag

SEQ ID NO: 360872 - DNA, 15 bp, Homo sapiens
tgaatctgggaggca

SEQ ID NO: 360873 - DNA, 15 bp, Homo sapiens
ttgaatctgggaggc

SEQ ID NO: 360874 - DNA, 15 bp, Homo sapiens
cgcttgaatctggga

SEQ ID NO: 360875 - DNA, 15 bp, Homo sapiens
tcgcttgaatctggg

SEQ ID NO: 360876 - DNA, 15 bp, Homo sapiens
atcgcttgaatctgg

SEQ ID NO: 360877 - DNA, 15 bp, Homo sapiens
aatcgcttgaatctg

SEQ ID NO: 360878 - DNA, 15 bp, Homo sapiens
gaatcgcttgaatct

SEQ ID NO: 360879 - DNA, 15 bp, Homo sapiens
acctatagtcccagc

SEQ ID NO: 360880 - DNA, 15 bp, Homo sapiens
aacctatagtcccag

SEQ ID NO: 360881 - DNA, 15 bp, Homo sapiens
gaacctatagtccca

SEQ ID NO: 360882 - DNA, 15 bp, Homo sapiens
cgaacctatagtccc

SEQ ID NO: 360883 - DNA, 15 bp, Homo sapiens
gcgaacctatagtcc

SEQ ID NO: 360884 - DNA, 15 bp, Homo sapiens
cgcgaacctatagtc

SEQ ID NO: 360885 - DNA, 15 bp, Homo sapiens
gcgcgaacctatagt

SEQ ID NO: 360886 - DNA, 15 bp, Homo sapiens
ggcgcgaacctatag

SEQ ID NO: 360887 - DNA, 15 bp, Homo sapiens
tggcgcgaacctata

SEQ ID NO: 360888 - DNA, 15 bp, Homo sapiens
gtggcgcgaacctat

SEQ ID NO: 360889 - DNA, 15 bp, Homo sapiens
ggtggcgcgaaccta

SEQ ID NO: 360890 - DNA, 15 bp, Homo sapiens
tggtggcgcgaacct

SEQ ID NO: 360891 - DNA, 15 bp, Homo sapiens
atggtggcgcgaacc

SEQ ID NO: 360892 - DNA, 15 bp, Homo sapiens
tatggtggcgcgaac

SEQ ID NO: 360893 - DNA, 15 bp, Homo sapiens
gtatggtggcgcgaa

SEQ ID NO: 360894 - DNA, 15 bp, Homo sapiens
ggtatggtggcgcga

SEQ ID NO: 360895 - DNA, 15 bp, Homo sapiens
gggtatggtggcgcg

SEQ ID NO: 360896 - DNA, 15 bp, Homo sapiens
tgggtatggtggcgc

SEQ ID NO: 360897 - DNA, 15 bp, Homo sapiens
ctgggtatggtggcg

SEQ ID NO: 360898 - DNA, 15 bp, Homo sapiens
actgggtatggtggc

SEQ ID NO: 360899 - DNA, 15 bp, Homo sapiens
aactgggtatggtgg

SEQ ID NO: 360900 - DNA, 15 bp, Homo sapiens
taactgggtatggtg

SEQ ID NO: 360901 - DNA, 15 bp, Homo sapiens
ataactgggtatggt

SEQ ID NO: 360902 - DNA, 15 bp, Homo sapiens
aataactgggtatgg

SEQ ID NO: 360903 - DNA, 15 bp, Homo sapiens
aaataactgggtatg

SEQ ID NO: 360904 - DNA, 15 bp, Homo sapiens
aaaataactgggtat

SEQ ID NO: 360905 - DNA, 15 bp, Homo sapiens
aaaaataactgggta

SEQ ID NO: 360906 - DNA, 15 bp, Homo sapiens
aaaaaataactgggt

SEQ ID NO: 360907 - DNA, 15 bp, Homo sapiens
aaaaaaataactggg

SEQ ID NO: 360908 - DNA, 15 bp, Homo sapiens
caaaaaaataactgg

SEQ ID NO: 360909 - DNA, 15 bp, Homo sapiens
acaaaaaaataactg

SEQ ID NO: 360910 - DNA, 15 bp, Homo sapiens
tacaaaaaaataact

SEQ ID NO: 360911 - DNA, 15 bp, Homo sapiens
atacaaaaaaataac

SEQ ID NO: 360912 - DNA, 15 bp, Homo sapiens
aatacaaaaaaataa

SEQ ID NO: 360913 - DNA, 15 bp, Homo sapiens
aaatacaaaaaaata

SEQ ID NO: 360914 - DNA, 15 bp, Homo sapiens
tcctggccaatatgg

SEQ ID NO: 360915 - DNA, 15 bp, Homo sapiens
atcctggccaatatg

SEQ ID NO: 360916 - DNA, 15 bp, Homo sapiens
catcctggccaatat

SEQ ID NO: 360917 - DNA, 15 bp, Homo sapiens
ccatcctggccaata

SEQ ID NO: 360918 - DNA, 15 bp, Homo sapiens
accatcctggccaat

SEQ ID NO: 360919 - DNA, 15 bp, Homo sapiens
gaccatcctggccaa

SEQ ID NO: 360920 - DNA, 15 bp, Homo sapiens
agaccatcctggcca

SEQ ID NO: 360921 - DNA, 15 bp, Homo sapiens
gagaccatcctggcc

SEQ ID NO: 360922 - DNA, 15 bp, Homo sapiens
aatcgagaccatcct

SEQ ID NO: 360923 - DNA, 15 bp, Homo sapiens
aaatcgagaccatcc

SEQ ID NO: 360924 - DNA, 15 bp, Homo sapiens
gaaatcgagaccatc

SEQ ID NO: 360925 - DNA, 15 bp, Homo sapiens
agaaatcgagaccat

SEQ ID NO: 360926 - DNA, 15 bp, Homo sapiens
aagaaatcgagacca

SEQ ID NO: 360927 - DNA, 15 bp, Homo sapiens
caagaaatcgagacc

SEQ ID NO: 360928 - DNA, 15 bp, Homo sapiens
tcaagaaatcgagac

SEQ ID NO: 360929 - DNA, 15 bp, Homo sapiens
ctcaagaaatcgaga

SEQ ID NO: 360930 - DNA, 15 bp, Homo sapiens
gctcaagaaatcgag

SEQ ID NO: 360931 - DNA, 15 bp, Homo sapiens
agctcaagaaatcga

SEQ ID NO: 360932 - DNA, 15 bp, Homo sapiens
gagctcaagaaatcg

SEQ ID NO: 360933 - DNA, 15 bp, Homo sapiens
tgagctcaagaaatc

SEQ ID NO: 360934 - DNA, 15 bp, Homo sapiens
atgagctcaagaaat

SEQ ID NO: 360935 - DNA, 15 bp, Homo sapiens
catgagctcaagaaa

SEQ ID NO: 360936 - DNA, 15 bp, Homo sapiens
tcatgagctcaagaa

SEQ ID NO: 360937 - DNA, 15 bp, Homo sapiens
atcatgagctcaaga

SEQ ID NO: 360938 - DNA, 15 bp, Homo sapiens
gatcatgagctcaag

SEQ ID NO: 360939 - DNA, 15 bp, Homo sapiens
ggatcatgagctcaa

SEQ ID NO: 360940 - DNA, 15 bp, Homo sapiens
cggatcatgagctca

SEQ ID NO: 360941 - DNA, 15 bp, Homo sapiens
gcggatcatgagctc

SEQ ID NO: 360942 - DNA, 15 bp, Homo sapiens
ggcggatcatgagct

SEQ ID NO: 360943 - DNA, 15 bp, Homo sapiens
tggcggatcatgagc

SEQ ID NO: 360944 - DNA, 15 bp, Homo sapiens
ttggcggatcatgag

SEQ ID NO: 360945 - DNA, 15 bp, Homo sapiens
gttggcggatcatga

SEQ ID NO: 360946 - DNA, 15 bp, Homo sapiens
ggttggcggatcatg

SEQ ID NO: 360947 - DNA, 15 bp, Homo sapiens
aggttggcggatcat

SEQ ID NO: 360948 - DNA, 15 bp, Homo sapiens
aaggttggcggatca

SEQ ID NO: 360949 - DNA, 15 bp, Homo sapiens
caaggttggcggatc

SEQ ID NO: 360950 - DNA, 15 bp, Homo sapiens
ccaaggttggcggat

SEQ ID NO: 360951 - DNA, 15 bp, Homo sapiens
gccaaggttggcgga

SEQ ID NO: 360952 - DNA, 15 bp, Homo sapiens
ggccaaggttggcgg

SEQ ID NO: 360953 - DNA, 15 bp, Homo sapiens
aggccaaggttggcg

SEQ ID NO: 360954 - DNA, 15 bp, Homo sapiens
gaggccaaggttggc

SEQ ID NO: 360955 - DNA, 15 bp, Homo sapiens
ggaggccaaggttgg

SEQ ID NO: 360956 - DNA, 15 bp, Homo sapiens
gggaggccaaggttg

SEQ ID NO: 360957 - DNA, 15 bp, Homo sapiens
tgggaggccaaggtt

SEQ ID NO: 360958 - DNA, 15 bp, Homo sapiens
gcagtgactcacgcc

SEQ ID NO: 360959 - DNA, 15 bp, Homo sapiens
tgcagtgactcacgc

SEQ ID NO: 360960 - DNA, 15 bp, Homo sapiens
gtgcagtgactcacg

SEQ ID NO: 360961 - DNA, 15 bp, Homo sapiens
ggtgcagtgactcac

SEQ ID NO: 360962 - DNA, 15 bp, Homo sapiens
gggtgcagtgactca

SEQ ID NO: 360963 - DNA, 15 bp, Homo sapiens
tgggtgcagtgactc

SEQ ID NO: 360964 - DNA, 15 bp, Homo sapiens
ctgggtgcagtgact

SEQ ID NO: 360965 - DNA, 15 bp, Homo sapiens
gctgggtgcagtgac

SEQ ID NO: 360966 - DNA, 15 bp, Homo sapiens
ggctgggtgcagtga

SEQ ID NO: 360967 - DNA, 15 bp, Homo sapiens
tggctgggtgcagtg

SEQ ID NO: 360968 - DNA, 15 bp, Homo sapiens
atggctgggtgcagt

SEQ ID NO: 360969 - DNA, 15 bp, Homo sapiens
tatggctgggtgcag

SEQ ID NO: 360970 - DNA, 15 bp, Homo sapiens
atatggctgggtgca

SEQ ID NO: 360971 - DNA, 15 bp, Homo sapiens
tatatggctgggtgc

SEQ ID NO: 360972 - DNA, 15 bp, Homo sapiens
atatatggctgggtg

SEQ ID NO: 360973 - DNA, 15 bp, Homo sapiens
catatatggctgggt

SEQ ID NO: 360974 - DNA, 15 bp, Homo sapiens
acatatatggctggg

SEQ ID NO: 360975 - DNA, 15 bp, Homo sapiens
tacatatatggctgg

SEQ ID NO: 360976 - DNA, 15 bp, Homo sapiens
gtacatatatggctg

SEQ ID NO: 360977 - DNA, 15 bp, Homo sapiens
tgtacatatatggct

SEQ ID NO: 360978 - DNA, 15 bp, Homo sapiens
atgtacatatatggc

SEQ ID NO: 360979 - DNA, 15 bp, Homo sapiens
aatgtacatatatgg

SEQ ID NO: 360980 - DNA, 15 bp, Homo sapiens
gaatgtacatatatg

SEQ ID NO: 360981 - DNA, 15 bp, Homo sapiens
agaatgtacatatat

SEQ ID NO: 360982 - DNA, 15 bp, Homo sapiens
cagaatgtacatata

SEQ ID NO: 360983 - DNA, 15 bp, Homo sapiens
tcagaatgtacatat

SEQ ID NO: 360984 - DNA, 15 bp, Homo sapiens
atcagaatgtacata

SEQ ID NO: 360985 - DNA, 15 bp, Homo sapiens
catcagaatgtacat

SEQ ID NO: 360986 - DNA, 15 bp, Homo sapiens
acatcagaatgtaca

SEQ ID NO: 360987 - DNA, 15 bp, Homo sapiens
tacatcagaatgtac

SEQ ID NO: 360988 - DNA, 15 bp, Homo sapiens
atacatcagaatgta

SEQ ID NO: 360989 - DNA, 15 bp, Homo sapiens
aatacatcagaatgt

SEQ ID NO: 360990 - DNA, 15 bp, Homo sapiens
gaatacatcagaatg

SEQ ID NO: 360991 - DNA, 15 bp, Homo sapiens
tgaatacatcagaat

SEQ ID NO: 360992 - DNA, 15 bp, Homo sapiens
atgaatacatcagaa

SEQ ID NO: 360993 - DNA, 15 bp, Homo sapiens
catgaatacatcaga

SEQ ID NO: 360994 - DNA, 15 bp, Homo sapiens
ccatgaatacatcag

SEQ ID NO: 360995 - DNA, 15 bp, Homo sapiens
gccatgaatacatca

SEQ ID NO: 360996 - DNA, 15 bp, Homo sapiens
tgccatgaatacatc

SEQ ID NO: 360997 - DNA, 15 bp, Homo sapiens
gtgccatgaatacat

SEQ ID NO: 360998 - DNA, 15 bp, Homo sapiens
agtgccatgaataca

SEQ ID NO: 360999 - DNA, 15 bp, Homo sapiens
aagtgccatgaatac

SEQ ID NO: 361000 - DNA, 15 bp, Homo sapiens
aaagtgccatgaata

SEQ ID NO: 361001 - DNA, 15 bp, Homo sapiens
aaaagtgccatgaat

SEQ ID NO: 361002 - DNA, 15 bp, Homo sapiens
caaaagtgccatgaa

SEQ ID NO: 361003 - DNA, 15 bp, Homo sapiens
gcaaaagtgccatga

SEQ ID NO: 361004 - DNA, 15 bp, Homo sapiens
ggcaaaagtgccatg

SEQ ID NO: 361005 - DNA, 15 bp, Homo sapiens
gggcaaaagtgccat

SEQ ID NO: 361006 - DNA, 15 bp, Homo sapiens
agggcaaaagtgcca

SEQ ID NO: 361007 - DNA, 15 bp, Homo sapiens
cagggcaaaagtgcc

SEQ ID NO: 361008 - DNA, 15 bp, Homo sapiens
ccagggcaaaagtgc

SEQ ID NO: 361009 - DNA, 15 bp, Homo sapiens
accagggcaaaagtg

SEQ ID NO: 361010 - DNA, 15 bp, Homo sapiens
caccagggcaaaagt

SEQ ID NO: 361011 - DNA, 15 bp, Homo sapiens
gccaccagggcaaaa

SEQ ID NO: 361012 - DNA, 15 bp, Homo sapiens
ggccaccagggcaaa

SEQ ID NO: 361013 - DNA, 15 bp, Homo sapiens
aggccaccagggcaa

SEQ ID NO: 361014 - DNA, 15 bp, Homo sapiens
taggccaccagggca

SEQ ID NO: 361015 - DNA, 15 bp, Homo sapiens
ttaggccaccagggc

SEQ ID NO: 361016 - DNA, 15 bp, Homo sapiens
tttaggccaccaggg

SEQ ID NO: 361017 - DNA, 15 bp, Homo sapiens
atttaggccaccagg

SEQ ID NO: 361018 - DNA, 15 bp, Homo sapiens
aatttaggccaccag

SEQ ID NO: 361019 - DNA, 15 bp, Homo sapiens
aaatttaggccacca

SEQ ID NO: 361020 - DNA, 15 bp, Homo sapiens
taaatttaggccacc

SEQ ID NO: 361021 - DNA, 15 bp, Homo sapiens
ctaaatttaggccac

SEQ ID NO: 361022 - DNA, 15 bp, Homo sapiens
gctaaatttaggcca

SEQ ID NO: 361023 - DNA, 15 bp, Homo sapiens
ggctaaatttaggcc

SEQ ID NO: 361024 - DNA, 15 bp, Homo sapiens
aggctaaatttaggc

SEQ ID NO: 361025 - DNA, 15 bp, Homo sapiens
caggctaaatttagg

SEQ ID NO: 361026 - DNA, 15 bp, Homo sapiens
tcaggctaaatttag

SEQ ID NO: 361027 - DNA, 15 bp, Homo sapiens
atcaggctaaattta

SEQ ID NO: 361028 - DNA, 15 bp, Homo sapiens
catcaggctaaattt

SEQ ID NO: 361029 - DNA, 15 bp, Homo sapiens
acatcaggctaaatt

SEQ ID NO: 361030 - DNA, 15 bp, Homo sapiens
aacatcaggctaaat

SEQ ID NO: 361031 - DNA, 15 bp, Homo sapiens
taacatcaggctaaa

SEQ ID NO: 361032 - DNA, 15 bp, Homo sapiens
gtaacatcaggctaa

SEQ ID NO: 361033 - DNA, 15 bp, Homo sapiens
ggtaacatcaggcta

SEQ ID NO: 361034 - DNA, 15 bp, Homo sapiens
tggtaacatcaggct

SEQ ID NO: 361035 - DNA, 15 bp, Homo sapiens
gtggtaacatcaggc

SEQ ID NO: 361036 - DNA, 15 bp, Homo sapiens
agtggtaacatcagg

SEQ ID NO: 361037 - DNA, 15 bp, Homo sapiens
aagtggtaacatcag

SEQ ID NO: 361038 - DNA, 15 bp, Homo sapiens
caagtggtaacatca

SEQ ID NO: 361039 - DNA, 15 bp, Homo sapiens
acaagtggtaacatc

SEQ ID NO: 361040 - DNA, 15 bp, Homo sapiens
cacaagtggtaacat

SEQ ID NO: 361041 - DNA, 15 bp, Homo sapiens
ccacaagtggtaaca

SEQ ID NO: 361042 - DNA, 15 bp, Homo sapiens
gccacaagtggtaac

SEQ ID NO: 361043 - DNA, 15 bp, Homo sapiens
tgccacaagtggtaa

SEQ ID NO: 361044 - DNA, 15 bp, Homo sapiens
ctgccacaagtggta

SEQ ID NO: 361045 - DNA, 15 bp, Homo sapiens
cctgccacaagtggt

SEQ ID NO: 361046 - DNA, 15 bp, Homo sapiens
acctgccacaagtgg

SEQ ID NO: 361047 - DNA, 15 bp, Homo sapiens
gacctgccacaagtg

SEQ ID NO: 361048 - DNA, 15 bp, Homo sapiens
tgacctgccacaagt

SEQ ID NO: 361049 - DNA, 15 bp, Homo sapiens
gtgacctgccacaag

SEQ ID NO: 361050 - DNA, 15 bp, Homo sapiens
tgtgacctgccacaa

SEQ ID NO: 361051 - DNA, 15 bp, Homo sapiens
ctgtgacctgccaca

SEQ ID NO: 361052 - DNA, 15 bp, Homo sapiens
cctgtgacctgccac

SEQ ID NO: 361053 - DNA, 15 bp, Homo sapiens
gcctgtgacctgcca

SEQ ID NO: 361054 - DNA, 15 bp, Homo sapiens
agcctgtgacctgcc

SEQ ID NO: 361055 - DNA, 15 bp, Homo sapiens
cagcctgtgacctgc

SEQ ID NO: 361056 - DNA, 15 bp, Homo sapiens
ccagcctgtgacctg

SEQ ID NO: 361057 - DNA, 15 bp, Homo sapiens
tccagcctgtgacct

SEQ ID NO: 361058 - DNA, 15 bp, Homo sapiens
atccagcctgtgacc

SEQ ID NO: 361059 - DNA, 15 bp, Homo sapiens
catccagcctgtgac

SEQ ID NO: 361060 - DNA, 15 bp, Homo sapiens
gcatccagcctgtga

SEQ ID NO: 361061 - DNA, 15 bp, Homo sapiens
ggcatccagcctgtg

SEQ ID NO: 361062 - DNA, 15 bp, Homo sapiens
cggcatccagcctgt

SEQ ID NO: 361063 - DNA, 15 bp, Homo sapiens
acggcatccagcctg

SEQ ID NO: 361064 - DNA, 15 bp, Homo sapiens
tacggcatccagcct

SEQ ID NO: 361065 - DNA, 15 bp, Homo sapiens
atacggcatccagcc

SEQ ID NO: 361066 - DNA, 15 bp, Homo sapiens
gatacggcatccagc

SEQ ID NO: 361067 - DNA, 15 bp, Homo sapiens
agatacggcatccag

SEQ ID NO: 361068 - DNA, 15 bp, Homo sapiens
cagatacggcatcca

SEQ ID NO: 361069 - DNA, 15 bp, Homo sapiens
ccagatacggcatcc

SEQ ID NO: 361070 - DNA, 15 bp, Homo sapiens
cccagatacggcatc

SEQ ID NO: 361071 - DNA, 15 bp, Homo sapiens
tcccagatacggcat

SEQ ID NO: 361072 - DNA, 15 bp, Homo sapiens
gtcccagatacggca

SEQ ID NO: 361073 - DNA, 15 bp, Homo sapiens
ggtcccagatacggc

SEQ ID NO: 361074 - DNA, 15 bp, Homo sapiens
aggtcccagatacgg

SEQ ID NO: 361075 - DNA, 15 bp, Homo sapiens
taggtcccagatacg

SEQ ID NO: 361076 - DNA, 15 bp, Homo sapiens
ctaggtcccagatac

SEQ ID NO: 361077 - DNA, 15 bp, Homo sapiens
cctaggtcccagata

SEQ ID NO: 361078 - DNA, 15 bp, Homo sapiens
ccctaggtcccagat

SEQ ID NO: 361079 - DNA, 15 bp, Homo sapiens
accctaggtcccaga

SEQ ID NO: 361080 - DNA, 15 bp, Homo sapiens
aaccctaggtcccag

SEQ ID NO: 361081 - DNA, 15 bp, Homo sapiens
aaaccctaggtccca

SEQ ID NO: 361082 - DNA, 15 bp, Homo sapiens
aaaaccctaggtccc

SEQ ID NO: 361083 - DNA, 15 bp, Homo sapiens
taaaaccctaggtcc

SEQ ID NO: 361084 - DNA, 15 bp, Homo sapiens
ttaaaaccctaggtc

SEQ ID NO: 361085 - DNA, 15 bp, Homo sapiens
attaaaaccctaggt

SEQ ID NO: 361086 - DNA, 15 bp, Homo sapiens
cattaaaaccctagg

SEQ ID NO: 361087 - DNA, 15 bp, Homo sapiens
tcattaaaaccctag

SEQ ID NO: 361088 - DNA, 15 bp, Homo sapiens
gtcattaaaacccta

SEQ ID NO: 361089 - DNA, 15 bp, Homo sapiens
agtcattaaaaccct

SEQ ID NO: 361090 - DNA, 15 bp, Homo sapiens
aagtcattaaaaccc

SEQ ID NO: 361091 - DNA, 15 bp, Homo sapiens
caagtcattaaaacc

SEQ ID NO: 361092 - DNA, 15 bp, Homo sapiens
gcaagtcattaaaac

SEQ ID NO: 361093 - DNA, 15 bp, Homo sapiens
ggcaagtcattaaaa

SEQ ID NO: 361094 - DNA, 15 bp, Homo sapiens
aggcaagtcattaaa

SEQ ID NO: 361095 - DNA, 15 bp, Homo sapiens
caggcaagtcattaa

SEQ ID NO: 361096 - DNA, 15 bp, Homo sapiens
ccaggcaagtcatta

SEQ ID NO: 361097 - DNA, 15 bp, Homo sapiens
tccaggcaagtcatt

SEQ ID NO: 361098 - DNA, 15 bp, Homo sapiens
atccaggcaagtcat

SEQ ID NO: 361099 - DNA, 15 bp, Homo sapiens
tatccaggcaagtca

SEQ ID NO: 361100 - DNA, 15 bp, Homo sapiens
atatccaggcaagtc

SEQ ID NO: 361101 - DNA, 15 bp, Homo sapiens
aatatccaggcaagt

SEQ ID NO: 361102 - DNA, 15 bp, Homo sapiens
caatatccaggcaag

SEQ ID NO: 361103 - DNA, 15 bp, Homo sapiens
ccaatatccaggcaa

SEQ ID NO: 361104 - DNA, 15 bp, Homo sapiens
accaatatccaggca

SEQ ID NO: 361105 - DNA, 15 bp, Homo sapiens
caccaatatccaggc

SEQ ID NO: 361106 - DNA, 15 bp, Homo sapiens
acaccaatatccagg

SEQ ID NO: 361107 - DNA, 15 bp, Homo sapiens
tacaccaatatccag

SEQ ID NO: 361108 - DNA, 15 bp, Homo sapiens
ctacaccaatatcca

SEQ ID NO: 361109 - DNA, 15 bp, Homo sapiens
actacaccaatatcc

SEQ ID NO: 361110 - DNA, 15 bp, Homo sapiens
tactacaccaatatc

SEQ ID NO: 361111 - DNA, 15 bp, Homo sapiens
atactacaccaatat

SEQ ID NO: 361112 - DNA, 15 bp, Homo sapiens
catactacaccaata

SEQ ID NO: 361113 - DNA, 15 bp, Homo sapiens
gcatactacaccaat

SEQ ID NO: 361114 - DNA, 15 bp, Homo sapiens
tgcatactacaccaa

SEQ ID NO: 361115 - DNA, 15 bp, Homo sapiens
atgcatactacacca

SEQ ID NO: 361116 - DNA, 15 bp, Homo sapiens
catgcatactacacc

SEQ ID NO: 361117 - DNA, 15 bp, Homo sapiens
gcatgcatactacac

SEQ ID NO: 361118 - DNA, 15 bp, Homo sapiens
ggcatgcatactaca

SEQ ID NO: 361119 - DNA, 15 bp, Homo sapiens
tggcatgcatactac

SEQ ID NO: 361120 - DNA, 15 bp, Homo sapiens
ttggcatgcatacta

SEQ ID NO: 361121 - DNA, 15 bp, Homo sapiens
gttggcatgcatact

SEQ ID NO: 361122 - DNA, 15 bp, Homo sapiens
agttggcatgcatac

SEQ ID NO: 361123 - DNA, 15 bp, Homo sapiens
cagttggcatgcata

SEQ ID NO: 361124 - DNA, 15 bp, Homo sapiens
tcagttggcatgcat

SEQ ID NO: 361125 - DNA, 15 bp, Homo sapiens
atcagttggcatgca

SEQ ID NO: 361126 - DNA, 15 bp, Homo sapiens
tatcagttggcatgc

SEQ ID NO: 361127 - DNA, 15 bp, Homo sapiens
atatcagttggcatg

SEQ ID NO: 361128 - DNA, 15 bp, Homo sapiens
aatatcagttggcat

SEQ ID NO: 361129 - DNA, 15 bp, Homo sapiens
gaatatcagttggca

SEQ ID NO: 361130 - DNA, 15 bp, Homo sapiens
tgaatatcagttggc

SEQ ID NO: 361131 - DNA, 15 bp, Homo sapiens
ttgaatatcagttgg

SEQ ID NO: 361132 - DNA, 15 bp, Homo sapiens
attgaatatcagttg

SEQ ID NO: 361133 - DNA, 15 bp, Homo sapiens
gattgaatatcagtt

SEQ ID NO: 361134 - DNA, 15 bp, Homo sapiens
tgattgaatatcagt

SEQ ID NO: 361135 - DNA, 15 bp, Homo sapiens
ttgattgaatatcag

SEQ ID NO: 361136 - DNA, 15 bp, Homo sapiens
gttgattgaatatca

SEQ ID NO: 361137 - DNA, 15 bp, Homo sapiens
tgttgattgaatatc

SEQ ID NO: 361138 - DNA, 15 bp, Homo sapiens
atgttgattgaatat

SEQ ID NO: 361139 - DNA, 15 bp, Homo sapiens
gatgttgattgaata

SEQ ID NO: 361140 - DNA, 15 bp, Homo sapiens
agatgttgattgaat

SEQ ID NO: 361141 - DNA, 15 bp, Homo sapiens
gagatgttgattgaa

SEQ ID NO: 361142 - DNA, 15 bp, Homo sapiens
ggagatgttgattga

SEQ ID NO: 361143 - DNA, 15 bp, Homo sapiens
aggagatgttgattg

SEQ ID NO: 361144 - DNA, 15 bp, Homo sapiens
caggagatgttgatt

SEQ ID NO: 361145 - DNA, 15 bp, Homo sapiens
gcaggagatgttgat

SEQ ID NO: 361146 - DNA, 15 bp, Homo sapiens
ggcaggagatgttga

SEQ ID NO: 361147 - DNA, 15 bp, Homo sapiens
tggcaggagatgttg

SEQ ID NO: 361148 - DNA, 15 bp, Homo sapiens
ctggcaggagatgtt

SEQ ID NO: 361149 - DNA, 15 bp, Homo sapiens
gctggcaggagatgt

SEQ ID NO: 361150 - DNA, 15 bp, Homo sapiens
tgctggcaggagatg

SEQ ID NO: 361151 - DNA, 15 bp, Homo sapiens
atgctggcaggagat

SEQ ID NO: 361152 - DNA, 15 bp, Homo sapiens
tatgctggcaggaga

SEQ ID NO: 361153 - DNA, 15 bp, Homo sapiens
ttatgctggcaggag

SEQ ID NO: 361154 - DNA, 15 bp, Homo sapiens
tttatgctggcagga

SEQ ID NO: 361155 - DNA, 15 bp, Homo sapiens
ttttatgctggcagg

SEQ ID NO: 361156 - DNA, 15 bp, Homo sapiens
tttttatgctggcag

SEQ ID NO: 361157 - DNA, 15 bp, Homo sapiens
ttttttatgctggca

SEQ ID NO: 361158 - DNA, 15 bp, Homo sapiens
cttttttatgctggc

SEQ ID NO: 361159 - DNA, 15 bp, Homo sapiens
acttttttatgctgg

SEQ ID NO: 361160 - DNA, 15 bp, Homo sapiens
aacttttttatgctg

SEQ ID NO: 361161 - DNA, 15 bp, Homo sapiens
aaacttttttatgct

SEQ ID NO: 361162 - DNA, 15 bp, Homo sapiens
taaacttttttatgc

SEQ ID NO: 361163 - DNA, 15 bp, Homo sapiens
ttaaacttttttatg

SEQ ID NO: 361164 - DNA, 15 bp, Homo sapiens
cttaaacttttttat

SEQ ID NO: 361165 - DNA, 15 bp, Homo sapiens
ccttaaactttttta

SEQ ID NO: 361166 - DNA, 15 bp, Homo sapiens
tccttaaactttttt

SEQ ID NO: 361167 - DNA, 15 bp, Homo sapiens
ctccttaaacttttt

SEQ ID NO: 361168 - DNA, 15 bp, Homo sapiens
cctccttaaactttt

SEQ ID NO: 361169 - DNA, 15 bp, Homo sapiens
acctccttaaacttt

SEQ ID NO: 361170 - DNA, 15 bp, Homo sapiens
cacctccttaaactt

SEQ ID NO: 361171 - DNA, 15 bp, Homo sapiens
tcacctccttaaact

SEQ ID NO: 361172 - DNA, 15 bp, Homo sapiens
ctcacctccttaaac

SEQ ID NO: 361173 - DNA, 15 bp, Homo sapiens
actcacctccttaaa

SEQ ID NO: 361174 - DNA, 15 bp, Homo sapiens
aactcacctccttaa

SEQ ID NO: 361175 - DNA, 15 bp, Homo sapiens
taactcacctcctta

SEQ ID NO: 361176 - DNA, 15 bp, Homo sapiens
gtaactcacctcctt

SEQ ID NO: 361177 - DNA, 15 bp, Homo sapiens
agtaactcacctcct

SEQ ID NO: 361178 - DNA, 15 bp, Homo sapiens
tagtaactcacctcc

SEQ ID NO: 361179 - DNA, 15 bp, Homo sapiens
gtagtaactcacctc

SEQ ID NO: 361180 - DNA, 15 bp, Homo sapiens
agtagtaactcacct

SEQ ID NO: 361181 - DNA, 15 bp, Homo sapiens
aagtagtaactcacc

SEQ ID NO: 361182 - DNA, 15 bp, Homo sapiens
gaagtagtaactcac

SEQ ID NO: 361183 - DNA, 15 bp, Homo sapiens
agaagtagtaactca

SEQ ID NO: 361184 - DNA, 15 bp, Homo sapiens
tagaagtagtaactc

SEQ ID NO: 361185 - DNA, 15 bp, Homo sapiens
atagaagtagtaact

SEQ ID NO: 361186 - DNA, 15 bp, Homo sapiens
gatagaagtagtaac

SEQ ID NO: 361187 - DNA, 15 bp, Homo sapiens
ggatagaagtagtaa

SEQ ID NO: 361188 - DNA, 15 bp, Homo sapiens
aggatagaagtagta

SEQ ID NO: 361189 - DNA, 15 bp, Homo sapiens
taggatagaagtagt

SEQ ID NO: 361190 - DNA, 15 bp, Homo sapiens
ataggatagaagtag

SEQ ID NO: 361191 - DNA, 15 bp, Homo sapiens
cataggatagaagta

SEQ ID NO: 361192 - DNA, 15 bp, Homo sapiens
tcataggatagaagt

SEQ ID NO: 361193 - DNA, 15 bp, Homo sapiens
ttcataggatagaag

SEQ ID NO: 361194 - DNA, 15 bp, Homo sapiens
tttcataggatagaa

SEQ ID NO: 361195 - DNA, 15 bp, Homo sapiens
ttttcataggataga

SEQ ID NO: 361196 - DNA, 15 bp, Homo sapiens
tttttcataggatag

SEQ ID NO: 361197 - DNA, 15 bp, Homo sapiens
atttttcataggata

SEQ ID NO: 361198 - DNA, 15 bp, Homo sapiens
tatttttcataggat

SEQ ID NO: 361199 - DNA, 15 bp, Homo sapiens
ttatttttcatagga

SEQ ID NO: 361200 - DNA, 15 bp, Homo sapiens
gttatttttcatagg

SEQ ID NO: 361201 - DNA, 15 bp, Homo sapiens
tgttatttttcatag

SEQ ID NO: 361202 - DNA, 15 bp, Homo sapiens
atgttatttttcata

SEQ ID NO: 361203 - DNA, 15 bp, Homo sapiens
gatgttatttttcat

SEQ ID NO: 361204 - DNA, 15 bp, Homo sapiens
tgatgttatttttca

SEQ ID NO: 361205 - DNA, 15 bp, Homo sapiens
atgatgttatttttc

SEQ ID NO: 361206 - DNA, 15 bp, Homo sapiens
aatgatgttattttt

SEQ ID NO: 361207 - DNA, 15 bp, Homo sapiens
aaatgatgttatttt

SEQ ID NO: 361208 - DNA, 15 bp, Homo sapiens
taaatgatgttattt

SEQ ID NO: 361209 - DNA, 15 bp, Homo sapiens
ttaaatgatgttatt

SEQ ID NO: 361210 - DNA, 15 bp, Homo sapiens
gttaaatgatgttat

SEQ ID NO: 361211 - DNA, 15 bp, Homo sapiens
tgttaaatgatgtta

SEQ ID NO: 361212 - DNA, 15 bp, Homo sapiens
ttgttaaatgatgtt

SEQ ID NO: 361213 - DNA, 15 bp, Homo sapiens
tttgttaaatgatgt

SEQ ID NO: 361214 - DNA, 15 bp, Homo sapiens
ttttgttaaatgatg

SEQ ID NO: 361215 - DNA, 15 bp, Homo sapiens
gttttgttaaatgat

SEQ ID NO: 361216 - DNA, 15 bp, Homo sapiens
tgttttgttaaatga

SEQ ID NO: 361217 - DNA, 15 bp, Homo sapiens
atgttttgttaaatg

SEQ ID NO: 361218 - DNA, 15 bp, Homo sapiens
gatgttttgttaaat

SEQ ID NO: 361219 - DNA, 15 bp, Homo sapiens
agatgttttgttaaa

SEQ ID NO: 361220 - DNA, 15 bp, Homo sapiens
gagatgttttgttaa

SEQ ID NO: 361221 - DNA, 15 bp, Homo sapiens
ggagatgttttgtta

SEQ ID NO: 361222 - DNA, 15 bp, Homo sapiens
tggagatgttttgtt

SEQ ID NO: 361223 - DNA, 15 bp, Homo sapiens
ctggagatgttttgt

SEQ ID NO: 361224 - DNA, 15 bp, Homo sapiens
cctggagatgttttg

SEQ ID NO: 361225 - DNA, 15 bp, Homo sapiens
tcctggagatgtttt

SEQ ID NO: 361226 - DNA, 15 bp, Homo sapiens
ctcctggagatgttt

SEQ ID NO: 361227 - DNA, 15 bp, Homo sapiens
cctcctggagatgtt

SEQ ID NO: 361228 - DNA, 15 bp, Homo sapiens
gcctcctggagatgt

SEQ ID NO: 361229 - DNA, 15 bp, Homo sapiens
ggcctcctggagatg

SEQ ID NO: 361230 - DNA, 15 bp, Homo sapiens
aggcctcctggagat

SEQ ID NO: 361231 - DNA, 15 bp, Homo sapiens
taggcctcctggaga

SEQ ID NO: 361232 - DNA, 15 bp, Homo sapiens
gtaggcctcctggag

SEQ ID NO: 361233 - DNA, 15 bp, Homo sapiens
agtaggcctcctgga

SEQ ID NO: 361234 - DNA, 15 bp, Homo sapiens
tagtaggcctcctgg

SEQ ID NO: 361235 - DNA, 15 bp, Homo sapiens
atagtaggcctcctg

SEQ ID NO: 361236 - DNA, 15 bp, Homo sapiens
catagtaggcctcct

SEQ ID NO: 361237 - DNA, 15 bp, Homo sapiens
acatagtaggcctcc

SEQ ID NO: 361238 - DNA, 15 bp, Homo sapiens
cacatagtaggcctc

SEQ ID NO: 361239 - DNA, 15 bp, Homo sapiens
gcacatagtaggcct

SEQ ID NO: 361240 - DNA, 15 bp, Homo sapiens
ggcacatagtaggcc

SEQ ID NO: 361241 - DNA, 15 bp, Homo sapiens
tggcacatagtaggc

SEQ ID NO: 361242 - DNA, 15 bp, Homo sapiens
gtggcacatagtagg

SEQ ID NO: 361243 - DNA, 15 bp, Homo sapiens
tgtggcacatagtag

SEQ ID NO: 361244 - DNA, 15 bp, Homo sapiens
gtgtggcacatagta

SEQ ID NO: 361245 - DNA, 15 bp, Homo sapiens
tgtgtggcacatagt

SEQ ID NO: 361246 - DNA, 15 bp, Homo sapiens
gtgtgtggcacatag

SEQ ID NO: 361247 - DNA, 15 bp, Homo sapiens
ggtgtgtggcacata

SEQ ID NO: 361248 - DNA, 15 bp, Homo sapiens
tggtgtgtggcacat

SEQ ID NO: 361249 - DNA, 15 bp, Homo sapiens
atggtgtgtggcaca

SEQ ID NO: 361250 - DNA, 15 bp, Homo sapiens
aatggtgtgtggcac

SEQ ID NO: 361251 - DNA, 15 bp, Homo sapiens
gaatggtgtgtggca

SEQ ID NO: 361252 - DNA, 15 bp, Homo sapiens
agaatggtgtgtggc

SEQ ID NO: 361253 - DNA, 15 bp, Homo sapiens
tagaatggtgtgtgg

SEQ ID NO: 361254 - DNA, 15 bp, Homo sapiens
ctagaatggtgtgtg

SEQ ID NO: 361255 - DNA, 15 bp, Homo sapiens
actagaatggtgtgt

SEQ ID NO: 361256 - DNA, 15 bp, Homo sapiens
aactagaatggtgtg

SEQ ID NO: 361257 - DNA, 15 bp, Homo sapiens
taactagaatggtgt

SEQ ID NO: 361258 - DNA, 15 bp, Homo sapiens
gtaactagaatggtg

SEQ ID NO: 361259 - DNA, 15 bp, Homo sapiens
agtaactagaatggt

SEQ ID NO: 361260 - DNA, 15 bp, Homo sapiens
cagtaactagaatgg

SEQ ID NO: 361261 - DNA, 15 bp, Homo sapiens
ccagtaactagaatg

SEQ ID NO: 361262 - DNA, 15 bp, Homo sapiens
tccagtaactagaat

SEQ ID NO: 361263 - DNA, 15 bp, Homo sapiens
ctccagtaactagaa

SEQ ID NO: 361264 - DNA, 15 bp, Homo sapiens
tctccagtaactaga

SEQ ID NO: 361265 - DNA, 15 bp, Homo sapiens
atctccagtaactag

SEQ ID NO: 361266 - DNA, 15 bp, Homo sapiens
catctccagtaacta

SEQ ID NO: 361267 - DNA, 15 bp, Homo sapiens
gcatctccagtaact

SEQ ID NO: 361268 - DNA, 15 bp, Homo sapiens
tgcatctccagtaac

SEQ ID NO: 361269 - DNA, 15 bp, Homo sapiens
ttgcatctccagtaa

SEQ ID NO: 361270 - DNA, 15 bp, Homo sapiens
attgcatctccagta

SEQ ID NO: 361271 - DNA, 15 bp, Homo sapiens
gattgcatctccagt

SEQ ID NO: 361272 - DNA, 15 bp, Homo sapiens
ggattgcatctccag

SEQ ID NO: 361273 - DNA, 15 bp, Homo sapiens
gggattgcatctcca

SEQ ID NO: 361274 - DNA, 15 bp, Homo sapiens
agggattgcatctcc

SEQ ID NO: 361275 - DNA, 15 bp, Homo sapiens
cagggattgcatctc

SEQ ID NO: 361276 - DNA, 15 bp, Homo sapiens
tcagggattgcatct

SEQ ID NO: 361277 - DNA, 15 bp, Homo sapiens
gtcagggattgcatc

SEQ ID NO: 361278 - DNA, 15 bp, Homo sapiens
tgtcagggattgcat

SEQ ID NO: 361279 - DNA, 15 bp, Homo sapiens
ttgtcagggattgca

SEQ ID NO: 361280 - DNA, 15 bp, Homo sapiens
gttgtcagggattgc

SEQ ID NO: 361281 - DNA, 15 bp, Homo sapiens
cgttgtcagggattg

SEQ ID NO: 361282 - DNA, 15 bp, Homo sapiens
tcgttgtcagggatt

SEQ ID NO: 361283 - DNA, 15 bp, Homo sapiens
gtcgttgtcagggat

SEQ ID NO: 361284 - DNA, 15 bp, Homo sapiens
agtcgttgtcaggga

SEQ ID NO: 361285 - DNA, 15 bp, Homo sapiens
cagtcgttgtcaggg

SEQ ID NO: 361286 - DNA, 15 bp, Homo sapiens
gcagtcgttgtcagg

SEQ ID NO: 361287 - DNA, 15 bp, Homo sapiens
agcagtcgttgtcag

SEQ ID NO: 361288 - DNA, 15 bp, Homo sapiens
gagcagtcgttgtca

SEQ ID NO: 361289 - DNA, 15 bp, Homo sapiens
agagcagtcgttgtc

SEQ ID NO: 361290 - DNA, 15 bp, Homo sapiens
gagagcagtcgttgt

SEQ ID NO: 361291 - DNA, 15 bp, Homo sapiens
tgagagcagtcgttg

SEQ ID NO: 361292 - DNA, 15 bp, Homo sapiens
gtgagagcagtcgtt

SEQ ID NO: 361293 - DNA, 15 bp, Homo sapiens
tgtgagagcagtcgt

SEQ ID NO: 361294 - DNA, 15 bp, Homo sapiens
ctgtgagagcagtcg

SEQ ID NO: 361295 - DNA, 15 bp, Homo sapiens
tctgtgagagcagtc

SEQ ID NO: 361296 - DNA, 15 bp, Homo sapiens
ctctgtgagagcagt

SEQ ID NO: 361297 - DNA, 15 bp, Homo sapiens
gctctgtgagagcag

SEQ ID NO: 361298 - DNA, 15 bp, Homo sapiens
agctctgtgagagca

SEQ ID NO: 361299 - DNA, 15 bp, Homo sapiens
aagctctgtgagagc

SEQ ID NO: 361300 - DNA, 15 bp, Homo sapiens
caagctctgtgagag

SEQ ID NO: 361301 - DNA, 15 bp, Homo sapiens
acaagctctgtgaga

SEQ ID NO: 361302 - DNA, 15 bp, Homo sapiens
cacaagctctgtgag

SEQ ID NO: 361303 - DNA, 15 bp, Homo sapiens
acacaagctctgtga

SEQ ID NO: 361304 - DNA, 15 bp, Homo sapiens
aacacaagctctgtg

SEQ ID NO: 361305 - DNA, 15 bp, Homo sapiens
gaacacaagctctgt

SEQ ID NO: 361306 - DNA, 15 bp, Homo sapiens
agaacacaagctctg

SEQ ID NO: 361307 - DNA, 15 bp, Homo sapiens
tagaacacaagctct

SEQ ID NO: 361308 - DNA, 15 bp, Homo sapiens
ctagaacacaagctc

SEQ ID NO: 361309 - DNA, 15 bp, Homo sapiens
gctagaacacaagct

SEQ ID NO: 361310 - DNA, 15 bp, Homo sapiens
tgctagaacacaagc

SEQ ID NO: 361311 - DNA, 15 bp, Homo sapiens
ctgctagaacacaag

SEQ ID NO: 361312 - DNA, 15 bp, Homo sapiens
cctgctagaacacaa

SEQ ID NO: 361313 - DNA, 15 bp, Homo sapiens
ccctgctagaacaca

SEQ ID NO: 361314 - DNA, 15 bp, Homo sapiens
accctgctagaacac

SEQ ID NO: 361315 - DNA, 15 bp, Homo sapiens
caccctgctagaaca

SEQ ID NO: 361316 - DNA, 15 bp, Homo sapiens
ccaccctgctagaac

SEQ ID NO: 361317 - DNA, 15 bp, Homo sapiens
cccaccctgctagaa

SEQ ID NO: 361318 - DNA, 15 bp, Homo sapiens
ccccaccctgctaga

SEQ ID NO: 361319 - DNA, 15 bp, Homo sapiens
gccccaccctgctag

SEQ ID NO: 361320 - DNA, 15 bp, Homo sapiens
agccccaccctgcta

SEQ ID NO: 361321 - DNA, 15 bp, Homo sapiens
cagccccaccctgct

SEQ ID NO: 361322 - DNA, 15 bp, Homo sapiens
ccagccccaccctgc

SEQ ID NO: 361323 - DNA, 15 bp, Homo sapiens
cccagccccaccctg

SEQ ID NO: 361324 - DNA, 15 bp, Homo sapiens
ccccagccccaccct

SEQ ID NO: 361325 - DNA, 15 bp, Homo sapiens
cccccagccccaccc

SEQ ID NO: 361326 - DNA, 15 bp, Homo sapiens
tcccccagccccacc

SEQ ID NO: 361327 - DNA, 15 bp, Homo sapiens
ttcccccagccccac

SEQ ID NO: 361328 - DNA, 15 bp, Homo sapiens
cttcccccagcccca

SEQ ID NO: 361329 - DNA, 15 bp, Homo sapiens
tcttcccccagcccc

SEQ ID NO: 361330 - DNA, 15 bp, Homo sapiens
ctcttcccccagccc

SEQ ID NO: 361331 - DNA, 15 bp, Homo sapiens
cctcttcccccagcc

SEQ ID NO: 361332 - DNA, 15 bp, Homo sapiens
tcctcttcccccagc

SEQ ID NO: 361333 - DNA, 15 bp, Homo sapiens
ctcctcttcccccag

SEQ ID NO: 361334 - DNA, 15 bp, Homo sapiens
actcctcttccccca

SEQ ID NO: 361335 - DNA, 15 bp, Homo sapiens
aactcctcttccccc

SEQ ID NO: 361336 - DNA, 15 bp, Homo sapiens
taactcctcttcccc

SEQ ID NO: 361337 - DNA, 15 bp, Homo sapiens
ataactcctcttccc

SEQ ID NO: 361338 - DNA, 15 bp, Homo sapiens
gataactcctcttcc

SEQ ID NO: 361339 - DNA, 15 bp, Homo sapiens
agataactcctcttc

SEQ ID NO: 361340 - DNA, 15 bp, Homo sapiens
gagataactcctctt

SEQ ID NO: 361341 - DNA, 15 bp, Homo sapiens
agagataactcctct

SEQ ID NO: 361342 - DNA, 15 bp, Homo sapiens
aagagataactcctc

SEQ ID NO: 361343 - DNA, 15 bp, Homo sapiens
aaagagataactcct

SEQ ID NO: 361344 - DNA, 15 bp, Homo sapiens
caaagagataactcc

SEQ ID NO: 361345 - DNA, 15 bp, Homo sapiens
acaaagagataactc

SEQ ID NO: 361346 - DNA, 15 bp, Homo sapiens
cacaaagagataact

SEQ ID NO: 361347 - DNA, 15 bp, Homo sapiens
acacaaagagataac

SEQ ID NO: 361348 - DNA, 15 bp, Homo sapiens
aacacaaagagataa

SEQ ID NO: 361349 - DNA, 15 bp, Homo sapiens
gaacacaaagagata

SEQ ID NO: 361350 - DNA, 15 bp, Homo sapiens
agaacacaaagagat

SEQ ID NO: 361351 - DNA, 15 bp, Homo sapiens
tagaacacaaagaga

SEQ ID NO: 361352 - DNA, 15 bp, Homo sapiens
ctagaacacaaagag

SEQ ID NO: 361353 - DNA, 15 bp, Homo sapiens
gctagaacacaaaga

SEQ ID NO: 361354 - DNA, 15 bp, Homo sapiens
tgctagaacacaaag

SEQ ID NO: 361355 - DNA, 15 bp, Homo sapiens
ctgctagaacacaaa

SEQ ID NO: 361356 - DNA, 15 bp, Homo sapiens
tagagataactcctc

SEQ ID NO: 361357 - DNA, 15 bp, Homo sapiens
ctagagataactcct

SEQ ID NO: 361358 - DNA, 15 bp, Homo sapiens
cctagagataactcc

SEQ ID NO: 361359 - DNA, 15 bp, Homo sapiens
acctagagataactc

SEQ ID NO: 361360 - DNA, 15 bp, Homo sapiens
tacctagagataact

SEQ ID NO: 361361 - DNA, 15 bp, Homo sapiens
ctacctagagataac

SEQ ID NO: 361362 - DNA, 15 bp, Homo sapiens
tctacctagagataa

SEQ ID NO: 361363 - DNA, 15 bp, Homo sapiens
gtctacctagagata

SEQ ID NO: 361364 - DNA, 15 bp, Homo sapiens
tgtctacctagagat

SEQ ID NO: 361365 - DNA, 15 bp, Homo sapiens
ttgtctacctagaga

SEQ ID NO: 361366 - DNA, 15 bp, Homo sapiens
tttgtctacctagag

SEQ ID NO: 361367 - DNA, 15 bp, Homo sapiens
atttgtctacctaga

SEQ ID NO: 361368 - DNA, 15 bp, Homo sapiens
catttgtctacctag

SEQ ID NO: 361369 - DNA, 15 bp, Homo sapiens
tcatttgtctaccta

SEQ ID NO: 361370 - DNA, 15 bp, Homo sapiens
ctcatttgtctacct

SEQ ID NO: 361371 - DNA, 15 bp, Homo sapiens
actcatttgtctacc

SEQ ID NO: 361372 - DNA, 15 bp, Homo sapiens
tactcatttgtctac

SEQ ID NO: 361373 - DNA, 15 bp, Homo sapiens
gtactcatttgtcta

SEQ ID NO: 361374 - DNA, 15 bp, Homo sapiens
agtactcatttgtct

SEQ ID NO: 361375 - DNA, 15 bp, Homo sapiens
aagtactcatttgtc

SEQ ID NO: 361376 - DNA, 15 bp, Homo sapiens
taagtactcatttgt

SEQ ID NO: 361377 - DNA, 15 bp, Homo sapiens
ttaagtactcatttg

SEQ ID NO: 361378 - DNA, 15 bp, Homo sapiens
attaagtactcattt

SEQ ID NO: 361379 - DNA, 15 bp, Homo sapiens
tattaagtactcatt

SEQ ID NO: 361380 - DNA, 15 bp, Homo sapiens
ttattaagtactcat

SEQ ID NO: 361381 - DNA, 15 bp, Homo sapiens
gttattaagtactca

SEQ ID NO: 361382 - DNA, 15 bp, Homo sapiens
tgttattaagtactc

SEQ ID NO: 361383 - DNA, 15 bp, Homo sapiens
atgttattaagtact

SEQ ID NO: 361384 - DNA, 15 bp, Homo sapiens
aatgttattaagtac

SEQ ID NO: 361385 - DNA, 15 bp, Homo sapiens
aaatgttattaagta

SEQ ID NO: 361386 - DNA, 15 bp, Homo sapiens
gaaatgttattaagt

SEQ ID NO: 361387 - DNA, 15 bp, Homo sapiens
tgaaatgttattaag

SEQ ID NO: 361388 - DNA, 15 bp, Homo sapiens
ctgaaatgttattaa

SEQ ID NO: 361389 - DNA, 15 bp, Homo sapiens
tctgaaatgttatta

SEQ ID NO: 361390 - DNA, 15 bp, Homo sapiens
atctgaaatgttatt

SEQ ID NO: 361391 - DNA, 15 bp, Homo sapiens
tatctgaaatgttat

SEQ ID NO: 361392 - DNA, 15 bp, Homo sapiens
atatctgaaatgtta

SEQ ID NO: 361393 - DNA, 15 bp, Homo sapiens
aatatctgaaatgtt

SEQ ID NO: 361394 - DNA, 15 bp, Homo sapiens
aaatatctgaaatgt

SEQ ID NO: 361395 - DNA, 15 bp, Homo sapiens
taaatatctgaaatg

SEQ ID NO: 361396 - DNA, 15 bp, Homo sapiens
ataaatatctgaaat

SEQ ID NO: 361397 - DNA, 15 bp, Homo sapiens
tataaatatctgaaa

SEQ ID NO: 361398 - DNA, 15 bp, Homo sapiens
ctataaatatctgaa

SEQ ID NO: 361399 - DNA, 15 bp, Homo sapiens
cctataaatatctga

SEQ ID NO: 361400 - DNA, 15 bp, Homo sapiens
tcctataaatatctg

SEQ ID NO: 361401 - DNA, 15 bp, Homo sapiens
atcctataaatatct

SEQ ID NO: 361402 - DNA, 15 bp, Homo sapiens
catcctataaatatc

SEQ ID NO: 361403 - DNA, 15 bp, Homo sapiens
gcatcctataaatat

SEQ ID NO: 361404 - DNA, 15 bp, Homo sapiens
agcatcctataaata

SEQ ID NO: 361405 - DNA, 15 bp, Homo sapiens
aagcatcctataaat

SEQ ID NO: 361406 - DNA, 15 bp, Homo sapiens
aaagcatcctataaa

SEQ ID NO: 361407 - DNA, 15 bp, Homo sapiens
caaagcatcctataa

SEQ ID NO: 361408 - DNA, 15 bp, Homo sapiens
tcaaagcatcctata

SEQ ID NO: 361409 - DNA, 15 bp, Homo sapiens
ttcaaagcatcctat

SEQ ID NO: 361410 - DNA, 15 bp, Homo sapiens
tttcaaagcatccta

SEQ ID NO: 361411 - DNA, 15 bp, Homo sapiens
ttttcaaagcatcct

SEQ ID NO: 361412 - DNA, 15 bp, Homo sapiens
tttttcaaagcatcc

SEQ ID NO: 361413 - DNA, 15 bp, Homo sapiens
ttttttcaaagcatc

SEQ ID NO: 361414 - DNA, 15 bp, Homo sapiens
cttttttcaaagcat

SEQ ID NO: 361415 - DNA, 15 bp, Homo sapiens
acttttttcaaagca

SEQ ID NO: 361416 - DNA, 15 bp, Homo sapiens
tacttttttcaaagc

SEQ ID NO: 361417 - DNA, 15 bp, Homo sapiens
ttacttttttcaaag

SEQ ID NO: 361418 - DNA, 15 bp, Homo sapiens
tttacttttttcaaa

SEQ ID NO: 361419 - DNA, 15 bp, Homo sapiens
ctttacttttttcaa

SEQ ID NO: 361420 - DNA, 15 bp, Homo sapiens
gctttacttttttca

SEQ ID NO: 361421 - DNA, 15 bp, Homo sapiens
tgctttacttttttc

SEQ ID NO: 361422 - DNA, 15 bp, Homo sapiens
ctgctttactttttt

SEQ ID NO: 361423 - DNA, 15 bp, Homo sapiens
gctgctttacttttt

SEQ ID NO: 361424 - DNA, 15 bp, Homo sapiens
tgctgctttactttt

SEQ ID NO: 361425 - DNA, 15 bp, Homo sapiens
atgctgctttacttt

SEQ ID NO: 361426 - DNA, 15 bp, Homo sapiens
aatgctgctttactt

SEQ ID NO: 361427 - DNA, 15 bp, Homo sapiens
caatgctgctttact

SEQ ID NO: 361428 - DNA, 15 bp, Homo sapiens
acaatgctgctttac

SEQ ID NO: 361429 - DNA, 15 bp, Homo sapiens
tacaatgctgcttta

SEQ ID NO: 361430 - DNA, 15 bp, Homo sapiens
ctacaatgctgcttt

SEQ ID NO: 361431 - DNA, 15 bp, Homo sapiens
cctacaatgctgctt

SEQ ID NO: 361432 - DNA, 15 bp, Homo sapiens
gcctacaatgctgct

SEQ ID NO: 361433 - DNA, 15 bp, Homo sapiens
agcctacaatgctgc

SEQ ID NO: 361434 - DNA, 15 bp, Homo sapiens
tagcctacaatgctg

SEQ ID NO: 361435 - DNA, 15 bp, Homo sapiens
ctagcctacaatgct

SEQ ID NO: 361436 - DNA, 15 bp, Homo sapiens
tctagcctacaatgc

SEQ ID NO: 361437 - DNA, 15 bp, Homo sapiens
ttctagcctacaatg

SEQ ID NO: 361438 - DNA, 15 bp, Homo sapiens
tttctagcctacaat

SEQ ID NO: 361439 - DNA, 15 bp, Homo sapiens
ctttctagcctacaa

SEQ ID NO: 361440 - DNA, 15 bp, Homo sapiens
tctttctagcctaca

SEQ ID NO: 361441 - DNA, 15 bp, Homo sapiens
ctctttctagcctac

SEQ ID NO: 361442 - DNA, 15 bp, Homo sapiens
tctctttctagccta

SEQ ID NO: 361443 - DNA, 15 bp, Homo sapiens
gtctctttctagcct

SEQ ID NO: 361444 - DNA, 15 bp, Homo sapiens
agtctctttctagcc

SEQ ID NO: 361445 - DNA, 15 bp, Homo sapiens
cagtctctttctagc

SEQ ID NO: 361446 - DNA, 15 bp, Homo sapiens
ccagtctctttctag

SEQ ID NO: 361447 - DNA, 15 bp, Homo sapiens
cccagtctctttcta

SEQ ID NO: 361448 - DNA, 15 bp, Homo sapiens
tcccagtctctttct

SEQ ID NO: 361449 - DNA, 15 bp, Homo sapiens
ctcccagtctctttc

SEQ ID NO: 361450 - DNA, 15 bp, Homo sapiens
cctcccagtctcttt

SEQ ID NO: 361451 - DNA, 15 bp, Homo sapiens
acctcccagtctctt

SEQ ID NO: 361452 - DNA, 15 bp, Homo sapiens
cacctcccagtctct

SEQ ID NO: 361453 - DNA, 15 bp, Homo sapiens
gcacctcccagtctc

SEQ ID NO: 361454 - DNA, 15 bp, Homo sapiens
agcacctcccagtct

SEQ ID NO: 361455 - DNA, 15 bp, Homo sapiens
cagcacctcccagtc

SEQ ID NO: 361456 - DNA, 15 bp, Homo sapiens
acagcacctcccagt

SEQ ID NO: 361457 - DNA, 15 bp, Homo sapiens
gacagcacctcccag

SEQ ID NO: 361458 - DNA, 15 bp, Homo sapiens
agacagcacctccca

SEQ ID NO: 361459 - DNA, 15 bp, Homo sapiens
cagacagcacctccc

SEQ ID NO: 361460 - DNA, 15 bp, Homo sapiens
ccagacagcacctcc

SEQ ID NO: 361461 - DNA, 15 bp, Homo sapiens
tccagacagcacctc

SEQ ID NO: 361462 - DNA, 15 bp, Homo sapiens
ttccagacagcacct

SEQ ID NO: 361463 - DNA, 15 bp, Homo sapiens
tttccagacagcacc

SEQ ID NO: 361464 - DNA, 15 bp, Homo sapiens
ctttccagacagcac

SEQ ID NO: 361465 - DNA, 15 bp, Homo sapiens
actttccagacagca

SEQ ID NO: 361466 - DNA, 15 bp, Homo sapiens
tactttccagacagc

SEQ ID NO: 361467 - DNA, 15 bp, Homo sapiens
atactttccagacag

SEQ ID NO: 361468 - DNA, 15 bp, Homo sapiens
catactttccagaca

SEQ ID NO: 361469 - DNA, 15 bp, Homo sapiens
tcatactttccagac

SEQ ID NO: 361470 - DNA, 15 bp, Homo sapiens
atcatactttccaga

SEQ ID NO: 361471 - DNA, 15 bp, Homo sapiens
gatcatactttccag

SEQ ID NO: 361472 - DNA, 15 bp, Homo sapiens
ggatcatactttcca

SEQ ID NO: 361473 - DNA, 15 bp, Homo sapiens
tggatcatactttcc

SEQ ID NO: 361474 - DNA, 15 bp, Homo sapiens
ttggatcatactttc

SEQ ID NO: 361475 - DNA, 15 bp, Homo sapiens
cttggatcatacttt

SEQ ID NO: 361476 - DNA, 15 bp, Homo sapiens
tcttggatcatactt

SEQ ID NO: 361477 - DNA, 15 bp, Homo sapiens
ttcttggatcatact

SEQ ID NO: 361478 - DNA, 15 bp, Homo sapiens
cttcttggatcatac

SEQ ID NO: 361479 - DNA, 15 bp, Homo sapiens
gcttcttggatcata

SEQ ID NO: 361480 - DNA, 15 bp, Homo sapiens
ggcttcttggatcat

SEQ ID NO: 361481 - DNA, 15 bp, Homo sapiens
gggcttcttggatca

SEQ ID NO: 361482 - DNA, 15 bp, Homo sapiens
agggcttcttggatc

SEQ ID NO: 361483 - DNA, 15 bp, Homo sapiens
gagggcttcttggat

SEQ ID NO: 361484 - DNA, 15 bp, Homo sapiens
agagggcttcttgga

SEQ ID NO: 361485 - DNA, 15 bp, Homo sapiens
gagagggcttcttgg

SEQ ID NO: 361486 - DNA, 15 bp, Homo sapiens
agagagggcttcttg

SEQ ID NO: 361487 - DNA, 15 bp, Homo sapiens
tagagagggcttctt

SEQ ID NO: 361488 - DNA, 15 bp, Homo sapiens
ttagagagggcttct

SEQ ID NO: 361489 - DNA, 15 bp, Homo sapiens
tttagagagggcttc

SEQ ID NO: 361490 - DNA, 15 bp, Homo sapiens
ctttagagagggctt

SEQ ID NO: 361491 - DNA, 15 bp, Homo sapiens
actttagagagggct

SEQ ID NO: 361492 - DNA, 15 bp, Homo sapiens
tactttagagagggc

SEQ ID NO: 361493 - DNA, 15 bp, Homo sapiens
ttactttagagaggg

SEQ ID NO: 361494 - DNA, 15 bp, Homo sapiens
gttactttagagagg

SEQ ID NO: 361495 - DNA, 15 bp, Homo sapiens
tgttactttagagag

SEQ ID NO: 361496 - DNA, 15 bp, Homo sapiens
gtgttactttagaga

SEQ ID NO: 361497 - DNA, 15 bp, Homo sapiens
cgtgttactttagag

SEQ ID NO: 361498 - DNA, 15 bp, Homo sapiens
ccgtgttactttaga

SEQ ID NO: 361499 - DNA, 15 bp, Homo sapiens
gccgtgttactttag

SEQ ID NO: 361500 - DNA, 15 bp, Homo sapiens
agccgtgttacttta

SEQ ID NO: 361501 - DNA, 15 bp, Homo sapiens
tagccgtgttacttt

SEQ ID NO: 361502 - DNA, 15 bp, Homo sapiens
ctagccgtgttactt

SEQ ID NO: 361503 - DNA, 15 bp, Homo sapiens
tctagccgtgttact

SEQ ID NO: 361504 - DNA, 15 bp, Homo sapiens
ctctagccgtgttac

SEQ ID NO: 361505 - DNA, 15 bp, Homo sapiens
tctctagccgtgtta

SEQ ID NO: 361506 - DNA, 15 bp, Homo sapiens
atctctagccgtgtt

SEQ ID NO: 361507 - DNA, 15 bp, Homo sapiens
tatctctagccgtgt

SEQ ID NO: 361508 - DNA, 15 bp, Homo sapiens
ttatctctagccgtg

SEQ ID NO: 361509 - DNA, 15 bp, Homo sapiens
cttatctctagccgt

SEQ ID NO: 361510 - DNA, 15 bp, Homo sapiens
tcttatctctagccg

SEQ ID NO: 361511 - DNA, 15 bp, Homo sapiens
ttcttatctctagcc

SEQ ID NO: 361512 - DNA, 15 bp, Homo sapiens
attcttatctctagc

SEQ ID NO: 361513 - DNA, 15 bp, Homo sapiens
cattcttatctctag

SEQ ID NO: 361514 - DNA, 15 bp, Homo sapiens
tcattcttatctcta

SEQ ID NO: 361515 - DNA, 15 bp, Homo sapiens
gtcattcttatctct

SEQ ID NO: 361516 - DNA, 15 bp, Homo sapiens
tgtcattcttatctc

SEQ ID NO: 361517 - DNA, 15 bp, Homo sapiens
ctgtcattcttatct

SEQ ID NO: 361518 - DNA, 15 bp, Homo sapiens
cctgtcattcttatc

SEQ ID NO: 361519 - DNA, 15 bp, Homo sapiens
acctgtcattcttat

SEQ ID NO: 361520 - DNA, 15 bp, Homo sapiens
tacctgtcattctta

SEQ ID NO: 361521 - DNA, 15 bp, Homo sapiens
ctacctgtcattctt

SEQ ID NO: 361522 - DNA, 15 bp, Homo sapiens
cctacctgtcattct

SEQ ID NO: 361523 - DNA, 15 bp, Homo sapiens
ccctacctgtcattc

SEQ ID NO: 361524 - DNA, 15 bp, Homo sapiens
gccctacctgtcatt

SEQ ID NO: 361525 - DNA, 15 bp, Homo sapiens
ggccctacctgtcat

SEQ ID NO: 361526 - DNA, 15 bp, Homo sapiens
tggccctacctgtca

SEQ ID NO: 361527 - DNA, 15 bp, Homo sapiens
ctggccctacctgtc

SEQ ID NO: 361528 - DNA, 15 bp, Homo sapiens
gctggccctacctgt

SEQ ID NO: 361529 - DNA, 15 bp, Homo sapiens
agctggccctacctg

SEQ ID NO: 361530 - DNA, 15 bp, Homo sapiens
tagctggccctacct

SEQ ID NO: 361531 - DNA, 15 bp, Homo sapiens
gtagctggccctacc

SEQ ID NO: 361532 - DNA, 15 bp, Homo sapiens
tgtagctggccctac

SEQ ID NO: 361533 - DNA, 15 bp, Homo sapiens
atgtagctggcccta

SEQ ID NO: 361534 - DNA, 15 bp, Homo sapiens
catgtagctggccct

SEQ ID NO: 361535 - DNA, 15 bp, Homo sapiens
tcatgtagctggccc

SEQ ID NO: 361536 - DNA, 15 bp, Homo sapiens
ctcatgtagctggcc

SEQ ID NO: 361537 - DNA, 15 bp, Homo sapiens
cctcatgtagctggc

SEQ ID NO: 361538 - DNA, 15 bp, Homo sapiens
tcctcatgtagctgg

SEQ ID NO: 361539 - DNA, 15 bp, Homo sapiens
atcctcatgtagctg

SEQ ID NO: 361540 - DNA, 15 bp, Homo sapiens
catcctcatgtagct

SEQ ID NO: 361541 - DNA, 15 bp, Homo sapiens
gcatcctcatgtagc

SEQ ID NO: 361542 - DNA, 15 bp, Homo sapiens
agcatcctcatgtag

SEQ ID NO: 361543 - DNA, 15 bp, Homo sapiens
aagcatcctcatgta

SEQ ID NO: 361544 - DNA, 15 bp, Homo sapiens
aaagcatcctcatgt

SEQ ID NO: 361545 - DNA, 15 bp, Homo sapiens
caaagcatcctcatg

SEQ ID NO: 361546 - DNA, 15 bp, Homo sapiens
tcaaagcatcctcat

SEQ ID NO: 361547 - DNA, 15 bp, Homo sapiens
ctcaaagcatcctca

SEQ ID NO: 361548 - DNA, 15 bp, Homo sapiens
cctcaaagcatcctc

SEQ ID NO: 361549 - DNA, 15 bp, Homo sapiens
acctcaaagcatcct

SEQ ID NO: 361550 - DNA, 15 bp, Homo sapiens
aacctcaaagcatcc

SEQ ID NO: 361551 - DNA, 15 bp, Homo sapiens
caacctcaaagcatc

SEQ ID NO: 361552 - DNA, 15 bp, Homo sapiens
acaacctcaaagcat

SEQ ID NO: 361553 - DNA, 15 bp, Homo sapiens
cacaacctcaaagca

SEQ ID NO: 361554 - DNA, 15 bp, Homo sapiens
acacaacctcaaagc

SEQ ID NO: 361555 - DNA, 15 bp, Homo sapiens
tacacaacctcaaag

SEQ ID NO: 361556 - DNA, 15 bp, Homo sapiens
gtacacaacctcaaa

SEQ ID NO: 361557 - DNA, 15 bp, Homo sapiens
ggtacacaacctcaa

SEQ ID NO: 361558 - DNA, 15 bp, Homo sapiens
gggtacacaacctca

SEQ ID NO: 361559 - DNA, 15 bp, Homo sapiens
tgggtacacaacctc

SEQ ID NO: 361560 - DNA, 15 bp, Homo sapiens
gtgggtacacaacct

SEQ ID NO: 361561 - DNA, 15 bp, Homo sapiens
agtgggtacacaacc

SEQ ID NO: 361562 - DNA, 15 bp, Homo sapiens
cagtgggtacacaac

SEQ ID NO: 361563 - DNA, 15 bp, Homo sapiens
ccagtgggtacacaa

SEQ ID NO: 361564 - DNA, 15 bp, Homo sapiens
cccagtgggtacaca

SEQ ID NO: 361565 - DNA, 15 bp, Homo sapiens
gcccagtgggtacac

SEQ ID NO: 361566 - DNA, 15 bp, Homo sapiens
tgcccagtgggtaca

SEQ ID NO: 361567 - DNA, 15 bp, Homo sapiens
gtgcccagtgggtac

SEQ ID NO: 361568 - DNA, 15 bp, Homo sapiens
cgtgcccagtgggta

SEQ ID NO: 361569 - DNA, 15 bp, Homo sapiens
ccgtgcccagtgggt

SEQ ID NO: 361570 - DNA, 15 bp, Homo sapiens
cccgtgcccagtggg

SEQ ID NO: 361571 - DNA, 15 bp, Homo sapiens
tcccgtgcccagtgg

SEQ ID NO: 361572 - DNA, 15 bp, Homo sapiens
ttcccgtgcccagtg

SEQ ID NO: 361573 - DNA, 15 bp, Homo sapiens
tttcccgtgcccagt

SEQ ID NO: 361574 - DNA, 15 bp, Homo sapiens
gtttcccgtgcccag

SEQ ID NO: 361575 - DNA, 15 bp, Homo sapiens
agtttcccgtgccca

SEQ ID NO: 361576 - DNA, 15 bp, Homo sapiens
tagtttcccgtgccc

SEQ ID NO: 361577 - DNA, 15 bp, Homo sapiens
ttagtttcccgtgcc

SEQ ID NO: 361578 - DNA, 15 bp, Homo sapiens
gttagtttcccgtgc

SEQ ID NO: 361579 - DNA, 15 bp, Homo sapiens
agttagtttcccgtg

SEQ ID NO: 361580 - DNA, 15 bp, Homo sapiens
tagttagtttcccgt

SEQ ID NO: 361581 - DNA, 15 bp, Homo sapiens
gtagttagtttcccg

SEQ ID NO: 361582 - DNA, 15 bp, Homo sapiens
agtagttagtttccc

SEQ ID NO: 361583 - DNA, 15 bp, Homo sapiens
aagtagttagtttcc

SEQ ID NO: 361584 - DNA, 15 bp, Homo sapiens
aaagtagttagtttc

SEQ ID NO: 361585 - DNA, 15 bp, Homo sapiens
caaagtagttagttt

SEQ ID NO: 361586 - DNA, 15 bp, Homo sapiens
ccaaagtagttagtt

SEQ ID NO: 361587 - DNA, 15 bp, Homo sapiens
cccaaagtagttagt

SEQ ID NO: 361588 - DNA, 15 bp, Homo sapiens
ccccaaagtagttag

SEQ ID NO: 361589 - DNA, 15 bp, Homo sapiens
tccccaaagtagtta

SEQ ID NO: 361590 - DNA, 15 bp, Homo sapiens
atccccaaagtagtt

SEQ ID NO: 361591 - DNA, 15 bp, Homo sapiens
aatccccaaagtagt

SEQ ID NO: 361592 - DNA, 15 bp, Homo sapiens
aaatccccaaagtag

SEQ ID NO: 361593 - DNA, 15 bp, Homo sapiens
caaatccccaaagta

SEQ ID NO: 361594 - DNA, 15 bp, Homo sapiens
tcaaatccccaaagt

SEQ ID NO: 361595 - DNA, 15 bp, Homo sapiens
ttcaaatccccaaag

SEQ ID NO: 361596 - DNA, 15 bp, Homo sapiens
cttcaaatccccaaa

SEQ ID NO: 361597 - DNA, 15 bp, Homo sapiens
tcttcaaatccccaa

SEQ ID NO: 361598 - DNA, 15 bp, Homo sapiens
atcttcaaatcccca

SEQ ID NO: 361599 - DNA, 15 bp, Homo sapiens
tatcttcaaatcccc

SEQ ID NO: 361600 - DNA, 15 bp, Homo sapiens
atatcttcaaatccc

SEQ ID NO: 361601 - DNA, 15 bp, Homo sapiens
tatatcttcaaatcc

SEQ ID NO: 361602 - DNA, 15 bp, Homo sapiens
ttatatcttcaaatc

SEQ ID NO: 361603 - DNA, 15 bp, Homo sapiens
cttatatcttcaaat

SEQ ID NO: 361604 - DNA, 15 bp, Homo sapiens
tcttatatcttcaaa

SEQ ID NO: 361605 - DNA, 15 bp, Homo sapiens
ctcttatatcttcaa

SEQ ID NO: 361606 - DNA, 15 bp, Homo sapiens
tctcttatatcttca

SEQ ID NO: 361607 - DNA, 15 bp, Homo sapiens
atctcttatatcttc

SEQ ID NO: 361608 - DNA, 15 bp, Homo sapiens
tatctcttatatctt

SEQ ID NO: 361609 - DNA, 15 bp, Homo sapiens
ctatctcttatatct

SEQ ID NO: 361610 - DNA, 15 bp, Homo sapiens
actatctcttatatc

SEQ ID NO: 361611 - DNA, 15 bp, Homo sapiens
gactatctcttatat

SEQ ID NO: 361612 - DNA, 15 bp, Homo sapiens
ggactatctcttata

SEQ ID NO: 361613 - DNA, 15 bp, Homo sapiens
gggactatctcttat

SEQ ID NO: 361614 - DNA, 15 bp, Homo sapiens
tgggactatctctta

SEQ ID NO: 361615 - DNA, 15 bp, Homo sapiens
ttgggactatctctt

SEQ ID NO: 361616 - DNA, 15 bp, Homo sapiens
attgggactatctct

SEQ ID NO: 361617 - DNA, 15 bp, Homo sapiens
aattgggactatctc

SEQ ID NO: 361618 - DNA, 15 bp, Homo sapiens
caattgggactatct

SEQ ID NO: 361619 - DNA, 15 bp, Homo sapiens
acaattgggactatc

SEQ ID NO: 361620 - DNA, 15 bp, Homo sapiens
tacaattgggactat

SEQ ID NO: 361621 - DNA, 15 bp, Homo sapiens
ttacaattgggacta

SEQ ID NO: 361622 - DNA, 15 bp, Homo sapiens
attacaattgggact

SEQ ID NO: 361623 - DNA, 15 bp, Homo sapiens
aattacaattgggac

SEQ ID NO: 361624 - DNA, 15 bp, Homo sapiens
aaattacaattggga

SEQ ID NO: 361625 - DNA, 15 bp, Homo sapiens
gaaattacaattggg

SEQ ID NO: 361626 - DNA, 15 bp, Homo sapiens
ggaaattacaattgg

SEQ ID NO: 361627 - DNA, 15 bp, Homo sapiens
aggaaattacaattg

SEQ ID NO: 361628 - DNA, 15 bp, Homo sapiens
caggaaattacaatt

SEQ ID NO: 361629 - DNA, 15 bp, Homo sapiens
ccaggaaattacaat

SEQ ID NO: 361630 - DNA, 15 bp, Homo sapiens
tccaggaaattacaa

SEQ ID NO: 361631 - DNA, 15 bp, Homo sapiens
atccaggaaattaca

SEQ ID NO: 361632 - DNA, 15 bp, Homo sapiens
aatccaggaaattac

SEQ ID NO: 361633 - DNA, 15 bp, Homo sapiens
taatccaggaaatta

SEQ ID NO: 361634 - DNA, 15 bp, Homo sapiens
ttaatccaggaaatt

SEQ ID NO: 361635 - DNA, 15 bp, Homo sapiens
attaatccaggaaat

SEQ ID NO: 361636 - DNA, 15 bp, Homo sapiens
aattaatccaggaaa

SEQ ID NO: 361637 - DNA, 15 bp, Homo sapiens
taattaatccaggaa

SEQ ID NO: 361638 - DNA, 15 bp, Homo sapiens
ctaattaatccagga

SEQ ID NO: 361639 - DNA, 15 bp, Homo sapiens
tctaattaatccagg

SEQ ID NO: 361640 - DNA, 15 bp, Homo sapiens
ctctaattaatccag

SEQ ID NO: 361641 - DNA, 15 bp, Homo sapiens
tctctaattaatcca

SEQ ID NO: 361642 - DNA, 15 bp, Homo sapiens
ctctctaattaatcc

SEQ ID NO: 361643 - DNA, 15 bp, Homo sapiens
tctctctaattaatc

SEQ ID NO: 361644 - DNA, 15 bp, Homo sapiens
ttctctctaattaat

SEQ ID NO: 361645 - DNA, 15 bp, Homo sapiens
cttctctctaattaa

SEQ ID NO: 361646 - DNA, 15 bp, Homo sapiens
tcttctctctaatta

SEQ ID NO: 361647 - DNA, 15 bp, Homo sapiens
atcttctctctaatt

SEQ ID NO: 361648 - DNA, 15 bp, Homo sapiens
tatcttctctctaat

SEQ ID NO: 361649 - DNA, 15 bp, Homo sapiens
atatcttctctctaa

SEQ ID NO: 361650 - DNA, 15 bp, Homo sapiens
tatatcttctctcta

SEQ ID NO: 361651 - DNA, 15 bp, Homo sapiens
ttatatcttctctct

SEQ ID NO: 361652 - DNA, 15 bp, Homo sapiens
tttatatcttctctc

SEQ ID NO: 361653 - DNA, 15 bp, Homo sapiens
ttttatatcttctct

SEQ ID NO: 361654 - DNA, 15 bp, Homo sapiens
attttatatcttctc

SEQ ID NO: 361655 - DNA, 15 bp, Homo sapiens
cattttatatcttct

SEQ ID NO: 361656 - DNA, 15 bp, Homo sapiens
acattttatatcttc

SEQ ID NO: 361657 - DNA, 15 bp, Homo sapiens
tacattttatatctt

SEQ ID NO: 361658 - DNA, 15 bp, Homo sapiens
ttacattttatatct

SEQ ID NO: 361659 - DNA, 15 bp, Homo sapiens
gttacattttatatc

SEQ ID NO: 361660 - DNA, 15 bp, Homo sapiens
ggttacattttatat

SEQ ID NO: 361661 - DNA, 15 bp, Homo sapiens
gggttacattttata

SEQ ID NO: 361662 - DNA, 15 bp, Homo sapiens
tgggttacattttat

SEQ ID NO: 361663 - DNA, 15 bp, Homo sapiens
atgggttacatttta

SEQ ID NO: 361664 - DNA, 15 bp, Homo sapiens
catgggttacatttt

SEQ ID NO: 361665 - DNA, 15 bp, Homo sapiens
tcatgggttacattt

SEQ ID NO: 361666 - DNA, 15 bp, Homo sapiens
ttcatgggttacatt

SEQ ID NO: 361667 - DNA, 15 bp, Homo sapiens
tttcatgggttacat

SEQ ID NO: 361668 - DNA, 15 bp, Homo sapiens
gtttcatgggttaca

SEQ ID NO: 361669 - DNA, 15 bp, Homo sapiens
tgtttcatgggttac

SEQ ID NO: 361670 - DNA, 15 bp, Homo sapiens
ctgtttcatgggtta

SEQ ID NO: 361671 - DNA, 15 bp, Homo sapiens
actgtttcatgggtt

SEQ ID NO: 361672 - DNA, 15 bp, Homo sapiens
cactgtttcatgggt

SEQ ID NO: 361673 - DNA, 15 bp, Homo sapiens
acactgtttcatggg

SEQ ID NO: 361674 - DNA, 15 bp, Homo sapiens
tacactgtttcatgg

SEQ ID NO: 361675 - DNA, 15 bp, Homo sapiens
atacactgtttcatg

SEQ ID NO: 361676 - DNA, 15 bp, Homo sapiens
aatacactgtttcat

SEQ ID NO: 361677 - DNA, 15 bp, Homo sapiens
aaatacactgtttca

SEQ ID NO: 361678 - DNA, 15 bp, Homo sapiens
taaatacactgtttc

SEQ ID NO: 361679 - DNA, 15 bp, Homo sapiens
ttaaatacactgttt

SEQ ID NO: 361680 - DNA, 15 bp, Homo sapiens
tttaaatacactgtt

SEQ ID NO: 361681 - DNA, 15 bp, Homo sapiens
ctttaaatacactgt

SEQ ID NO: 361682 - DNA, 15 bp, Homo sapiens
gctttaaatacactg

SEQ ID NO: 361683 - DNA, 15 bp, Homo sapiens
agctttaaatacact

SEQ ID NO: 361684 - DNA, 15 bp, Homo sapiens
tagctttaaatacac

SEQ ID NO: 361685 - DNA, 15 bp, Homo sapiens
ttagctttaaataca

SEQ ID NO: 361686 - DNA, 15 bp, Homo sapiens
cttagctttaaatac

SEQ ID NO: 361687 - DNA, 15 bp, Homo sapiens
acttagctttaaata

SEQ ID NO: 361688 - DNA, 15 bp, Homo sapiens
cacttagctttaaat

SEQ ID NO: 361689 - DNA, 15 bp, Homo sapiens
ccacttagctttaaa

SEQ ID NO: 361690 - DNA, 15 bp, Homo sapiens
accacttagctttaa

SEQ ID NO: 361691 - DNA, 15 bp, Homo sapiens
taccacttagcttta

SEQ ID NO: 361692 - DNA, 15 bp, Homo sapiens
ttaccacttagcttt

SEQ ID NO: 361693 - DNA, 15 bp, Homo sapiens
cttaccacttagctt

SEQ ID NO: 361694 - DNA, 15 bp, Homo sapiens
tcttaccacttagct

SEQ ID NO: 361695 - DNA, 15 bp, Homo sapiens
ctcttaccacttagc

SEQ ID NO: 361696 - DNA, 15 bp, Homo sapiens
cctcttaccacttag

SEQ ID NO: 361697 - DNA, 15 bp, Homo sapiens
acctcttaccactta

SEQ ID NO: 361698 - DNA, 15 bp, Homo sapiens
cacctcttaccactt

SEQ ID NO: 361699 - DNA, 15 bp, Homo sapiens
gcacctcttaccact

SEQ ID NO: 361700 - DNA, 15 bp, Homo sapiens
tgcacctcttaccac

SEQ ID NO: 361701 - DNA, 15 bp, Homo sapiens
ttgcacctcttacca

SEQ ID NO: 361702 - DNA, 15 bp, Homo sapiens
tttgcacctcttacc

SEQ ID NO: 361703 - DNA, 15 bp, Homo sapiens
ttttgcacctcttac

SEQ ID NO: 361704 - DNA, 15 bp, Homo sapiens
attttgcacctctta

SEQ ID NO: 361705 - DNA, 15 bp, Homo sapiens
cattttgcacctctt

SEQ ID NO: 361706 - DNA, 15 bp, Homo sapiens
gcattttgcacctct

SEQ ID NO: 361707 - DNA, 15 bp, Homo sapiens
agcattttgcacctc

SEQ ID NO: 361708 - DNA, 15 bp, Homo sapiens
tagcattttgcacct

SEQ ID NO: 361709 - DNA, 15 bp, Homo sapiens
atagcattttgcacc

SEQ ID NO: 361710 - DNA, 15 bp, Homo sapiens
aatagcattttgcac

SEQ ID NO: 361711 - DNA, 15 bp, Homo sapiens
caatagcattttgca

SEQ ID NO: 361712 - DNA, 15 bp, Homo sapiens
tcaatagcattttgc

SEQ ID NO: 361713 - DNA, 15 bp, Homo sapiens
ttcaatagcattttg

SEQ ID NO: 361714 - DNA, 15 bp, Homo sapiens
tttcaatagcatttt

SEQ ID NO: 361715 - DNA, 15 bp, Homo sapiens
atttcaatagcattt

SEQ ID NO: 361716 - DNA, 15 bp, Homo sapiens
catttcaatagcatt

SEQ ID NO: 361717 - DNA, 15 bp, Homo sapiens
acatttcaatagcat

SEQ ID NO: 361718 - DNA, 15 bp, Homo sapiens
tacatttcaatagca

SEQ ID NO: 361719 - DNA, 15 bp, Homo sapiens
ctacatttcaatagc

SEQ ID NO: 361720 - DNA, 15 bp, Homo sapiens
cctacatttcaatag

SEQ ID NO: 361721 - DNA, 15 bp, Homo sapiens
ccctacatttcaata

SEQ ID NO: 361722 - DNA, 15 bp, Homo sapiens
cccctacatttcaat

SEQ ID NO: 361723 - DNA, 15 bp, Homo sapiens
tcccctacatttcaa

SEQ ID NO: 361724 - DNA, 15 bp, Homo sapiens
ctcccctacatttca

SEQ ID NO: 361725 - DNA, 15 bp, Homo sapiens
tctcccctacatttc

SEQ ID NO: 361726 - DNA, 15 bp, Homo sapiens
ttctcccctacattt

SEQ ID NO: 361727 - DNA, 15 bp, Homo sapiens
cttctcccctacatt

SEQ ID NO: 361728 - DNA, 15 bp, Homo sapiens
ccttctcccctacat

SEQ ID NO: 361729 - DNA, 15 bp, Homo sapiens
tccttctcccctaca

SEQ ID NO: 361730 - DNA, 15 bp, Homo sapiens
gtccttctcccctac

SEQ ID NO: 361731 - DNA, 15 bp, Homo sapiens
agtccttctccccta

SEQ ID NO: 361732 - DNA, 15 bp, Homo sapiens
tagtccttctcccct

SEQ ID NO: 361733 - DNA, 15 bp, Homo sapiens
ctagtccttctcccc

SEQ ID NO: 361734 - DNA, 15 bp, Homo sapiens
cctagtccttctccc

SEQ ID NO: 361735 - DNA, 15 bp, Homo sapiens
ccctagtccttctcc

SEQ ID NO: 361736 - DNA, 15 bp, Homo sapiens
accctagtccttctc

SEQ ID NO: 361737 - DNA, 15 bp, Homo sapiens
caccctagtccttct

SEQ ID NO: 361738 - DNA, 15 bp, Homo sapiens
acaccctagtccttc

SEQ ID NO: 361739 - DNA, 15 bp, Homo sapiens
cacaccctagtcctt

SEQ ID NO: 361740 - DNA, 15 bp, Homo sapiens
acacaccctagtcct

SEQ ID NO: 361741 - DNA, 15 bp, Homo sapiens
aacacaccctagtcc

SEQ ID NO: 361742 - DNA, 15 bp, Homo sapiens
aaacacaccctagtc

SEQ ID NO: 361743 - DNA, 15 bp, Homo sapiens
taaacacaccctagt

SEQ ID NO: 361744 - DNA, 15 bp, Homo sapiens
ttaaacacaccctag

SEQ ID NO: 361745 - DNA, 15 bp, Homo sapiens
cttaaacacacccta

SEQ ID NO: 361746 - DNA, 15 bp, Homo sapiens
acttaaacacaccct

SEQ ID NO: 361747 - DNA, 15 bp, Homo sapiens
cacttaaacacaccc

SEQ ID NO: 361748 - DNA, 15 bp, Homo sapiens
tcacttaaacacacc

SEQ ID NO: 361749 - DNA, 15 bp, Homo sapiens
gtcacttaaacacac

SEQ ID NO: 361750 - DNA, 15 bp, Homo sapiens
ggtcacttaaacaca

SEQ ID NO: 361751 - DNA, 15 bp, Homo sapiens
tggtcacttaaacac

SEQ ID NO: 361752 - DNA, 15 bp, Homo sapiens
ctggtcacttaaaca

SEQ ID NO: 361753 - DNA, 15 bp, Homo sapiens
cctggtcacttaaac

SEQ ID NO: 361754 - DNA, 15 bp, Homo sapiens
gcctggtcacttaaa

SEQ ID NO: 361755 - DNA, 15 bp, Homo sapiens
tgcctggtcacttaa

SEQ ID NO: 361756 - DNA, 15 bp, Homo sapiens
ttgcctggtcactta

SEQ ID NO: 361757 - DNA, 15 bp, Homo sapiens
cttgcctggtcactt

SEQ ID NO: 361758 - DNA, 15 bp, Homo sapiens
acttgcctggtcact

SEQ ID NO: 361759 - DNA, 15 bp, Homo sapiens
gacttgcctggtcac

SEQ ID NO: 361760 - DNA, 15 bp, Homo sapiens
ggacttgcctggtca

SEQ ID NO: 361761 - DNA, 15 bp, Homo sapiens
gggacttgcctggtc

SEQ ID NO: 361762 - DNA, 15 bp, Homo sapiens
cgggacttgcctggt

SEQ ID NO: 361763 - DNA, 15 bp, Homo sapiens
acgggacttgcctgg

SEQ ID NO: 361764 - DNA, 15 bp, Homo sapiens
gacgggacttgcctg

SEQ ID NO: 361765 - DNA, 15 bp, Homo sapiens
tgacgggacttgcct

SEQ ID NO: 361766 - DNA, 15 bp, Homo sapiens
atgacgggacttgcc

SEQ ID NO: 361767 - DNA, 15 bp, Homo sapiens
tatgacgggacttgc

SEQ ID NO: 361768 - DNA, 15 bp, Homo sapiens
gtatgacgggacttg

SEQ ID NO: 361769 - DNA, 15 bp, Homo sapiens
tgtatgacgggactt

SEQ ID NO: 361770 - DNA, 15 bp, Homo sapiens
gtgtatgacgggact

SEQ ID NO: 361771 - DNA, 15 bp, Homo sapiens
tgtgtatgacgggac

SEQ ID NO: 361772 - DNA, 15 bp, Homo sapiens
gtgtgtatgacggga

SEQ ID NO: 361773 - DNA, 15 bp, Homo sapiens
tgtgtgtatgacggg

SEQ ID NO: 361774 - DNA, 15 bp, Homo sapiens
atgtgtgtatgacgg

SEQ ID NO: 361775 - DNA, 15 bp, Homo sapiens
tatgtgtgtatgacg

SEQ ID NO: 361776 - DNA, 15 bp, Homo sapiens
ctatgtgtgtatgac

SEQ ID NO: 361777 - DNA, 15 bp, Homo sapiens
cctatgtgtgtatga

SEQ ID NO: 361778 - DNA, 15 bp, Homo sapiens
acctatgtgtgtatg

SEQ ID NO: 361779 - DNA, 15 bp, Homo sapiens
aacctatgtgtgtat

SEQ ID NO: 361780 - DNA, 15 bp, Homo sapiens
caacctatgtgtgta

SEQ ID NO: 361781 - DNA, 15 bp, Homo sapiens
acaacctatgtgtgt

SEQ ID NO: 361782 - DNA, 15 bp, Homo sapiens
cacaacctatgtgtg

SEQ ID NO: 361783 - DNA, 15 bp, Homo sapiens
gcacaacctatgtgt

SEQ ID NO: 361784 - DNA, 15 bp, Homo sapiens
agcacaacctatgtg

SEQ ID NO: 361785 - DNA, 15 bp, Homo sapiens
aagcacaacctatgt

SEQ ID NO: 361786 - DNA, 15 bp, Homo sapiens
caagcacaacctatg

SEQ ID NO: 361787 - DNA, 15 bp, Homo sapiens
ccaagcacaacctat

SEQ ID NO: 361788 - DNA, 15 bp, Homo sapiens
cccaagcacaaccta

SEQ ID NO: 361789 - DNA, 15 bp, Homo sapiens
acccaagcacaacct

SEQ ID NO: 361790 - DNA, 15 bp, Homo sapiens
aacccaagcacaacc

SEQ ID NO: 361791 - DNA, 15 bp, Homo sapiens
caacccaagcacaac

SEQ ID NO: 361792 - DNA, 15 bp, Homo sapiens
ccaacccaagcacaa

SEQ ID NO: 361793 - DNA, 15 bp, Homo sapiens
cccaacccaagcaca

SEQ ID NO: 361794 - DNA, 15 bp, Homo sapiens
gcccaacccaagcac

SEQ ID NO: 361795 - DNA, 15 bp, Homo sapiens
ggcccaacccaagca

SEQ ID NO: 361796 - DNA, 15 bp, Homo sapiens
aggcccaacccaagc

SEQ ID NO: 361797 - DNA, 15 bp, Homo sapiens
caggcccaacccaag

SEQ ID NO: 361798 - DNA, 15 bp, Homo sapiens
ccaggcccaacccaa

SEQ ID NO: 361799 - DNA, 15 bp, Homo sapiens
tccaggcccaaccca

SEQ ID NO: 361800 - DNA, 15 bp, Homo sapiens
ttccaggcccaaccc

SEQ ID NO: 361801 - DNA, 15 bp, Homo sapiens
cttccaggcccaacc

SEQ ID NO: 361802 - DNA, 15 bp, Homo sapiens
ccttccaggcccaac

SEQ ID NO: 361803 - DNA, 15 bp, Homo sapiens
tccttccaggcccaa

SEQ ID NO: 361804 - DNA, 15 bp, Homo sapiens
atccttccaggccca

SEQ ID NO: 361805 - DNA, 15 bp, Homo sapiens
catccttccaggccc

SEQ ID NO: 361806 - DNA, 15 bp, Homo sapiens
gcatccttccaggcc

SEQ ID NO: 361807 - DNA, 15 bp, Homo sapiens
tgcatccttccaggc

SEQ ID NO: 361808 - DNA, 15 bp, Homo sapiens
atgcatccttccagg

SEQ ID NO: 361809 - DNA, 15 bp, Homo sapiens
catgcatccttccag

SEQ ID NO: 361810 - DNA, 15 bp, Homo sapiens
ccatgcatccttcca

SEQ ID NO: 361811 - DNA, 15 bp, Homo sapiens
cccatgcatccttcc

SEQ ID NO: 361812 - DNA, 15 bp, Homo sapiens
tcccatgcatccttc

SEQ ID NO: 361813 - DNA, 15 bp, Homo sapiens
ttcccatgcatcctt

SEQ ID NO: 361814 - DNA, 15 bp, Homo sapiens
attcccatgcatcct

SEQ ID NO: 361815 - DNA, 15 bp, Homo sapiens
aattcccatgcatcc

SEQ ID NO: 361816 - DNA, 15 bp, Homo sapiens
gaattcccatgcatc

SEQ ID NO: 361817 - DNA, 15 bp, Homo sapiens
ggaattcccatgcat

SEQ ID NO: 361818 - DNA, 15 bp, Homo sapiens
tggaattcccatgca

SEQ ID NO: 361819 - DNA, 15 bp, Homo sapiens
ctggaattcccatgc

SEQ ID NO: 361820 - DNA, 15 bp, Homo sapiens
tctggaattcccatg

SEQ ID NO: 361821 - DNA, 15 bp, Homo sapiens
atctggaattcccat

SEQ ID NO: 361822 - DNA, 15 bp, Homo sapiens
tatctggaattccca

SEQ ID NO: 361823 - DNA, 15 bp, Homo sapiens
gtatctggaattccc

SEQ ID NO: 361824 - DNA, 15 bp, Homo sapiens
tgtatctggaattcc

SEQ ID NO: 361825 - DNA, 15 bp, Homo sapiens
atgtatctggaattc

SEQ ID NO: 361826 - DNA, 15 bp, Homo sapiens
tatgtatctggaatt

SEQ ID NO: 361827 - DNA, 15 bp, Homo sapiens
ctatgtatctggaat

SEQ ID NO: 361828 - DNA, 15 bp, Homo sapiens
tctatgtatctggaa

SEQ ID NO: 361829 - DNA, 15 bp, Homo sapiens
ctctatgtatctgga

SEQ ID NO: 361830 - DNA, 15 bp, Homo sapiens
tctctatgtatctgg

SEQ ID NO: 361831 - DNA, 15 bp, Homo sapiens
ttctctatgtatctg

SEQ ID NO: 361832 - DNA, 15 bp, Homo sapiens
tttctctatgtatct

SEQ ID NO: 361833 - DNA, 15 bp, Homo sapiens
atttctctatgtatc

SEQ ID NO: 361834 - DNA, 15 bp, Homo sapiens
catttctctatgtat

SEQ ID NO: 361835 - DNA, 15 bp, Homo sapiens
tcatttctctatgta

SEQ ID NO: 361836 - DNA, 15 bp, Homo sapiens
atcatttctctatgt

SEQ ID NO: 361837 - DNA, 15 bp, Homo sapiens
gatcatttctctatg

SEQ ID NO: 361838 - DNA, 15 bp, Homo sapiens
tgatcatttctctat

SEQ ID NO: 361839 - DNA, 15 bp, Homo sapiens
ctgatcatttctcta

SEQ ID NO: 361840 - DNA, 15 bp, Homo sapiens
actgatcatttctct

SEQ ID NO: 361841 - DNA, 15 bp, Homo sapiens
aactgatcatttctc

SEQ ID NO: 361842 - DNA, 15 bp, Homo sapiens
aaactgatcatttct

SEQ ID NO: 361843 - DNA, 15 bp, Homo sapiens
gaaactgatcatttc

SEQ ID NO: 361844 - DNA, 15 bp, Homo sapiens
agaaactgatcattt

SEQ ID NO: 361845 - DNA, 15 bp, Homo sapiens
gagaaactgatcatt

SEQ ID NO: 361846 - DNA, 15 bp, Homo sapiens
agagaaactgatcat

SEQ ID NO: 361847 - DNA, 15 bp, Homo sapiens
gagagaaactgatca

SEQ ID NO: 361848 - DNA, 15 bp, Homo sapiens
agagagaaactgatc

SEQ ID NO: 361849 - DNA, 15 bp, Homo sapiens
gagagagaaactgat

SEQ ID NO: 361850 - DNA, 15 bp, Homo sapiens
agagagagaaactga

SEQ ID NO: 361851 - DNA, 15 bp, Homo sapiens
tagagagagaaactg

SEQ ID NO: 361852 - DNA, 15 bp, Homo sapiens
ctagagagagaaact

SEQ ID NO: 361853 - DNA, 15 bp, Homo sapiens
actagagagagaaac

SEQ ID NO: 361854 - DNA, 15 bp, Homo sapiens
cactagagagagaaa

SEQ ID NO: 361855 - DNA, 15 bp, Homo sapiens
acactagagagagaa

SEQ ID NO: 361856 - DNA, 15 bp, Homo sapiens
cacactagagagaga

SEQ ID NO: 361857 - DNA, 15 bp, Homo sapiens
gcacactagagagag

SEQ ID NO: 361858 - DNA, 15 bp, Homo sapiens
agcacactagagaga

SEQ ID NO: 361859 - DNA, 15 bp, Homo sapiens
aagcacactagagag

SEQ ID NO: 361860 - DNA, 15 bp, Homo sapiens
aaagcacactagaga

SEQ ID NO: 361861 - DNA, 15 bp, Homo sapiens
taaagcacactagag

SEQ ID NO: 361862 - DNA, 15 bp, Homo sapiens
ttaaagcacactaga

SEQ ID NO: 361863 - DNA, 15 bp, Homo sapiens
tttaaagcacactag

SEQ ID NO: 361864 - DNA, 15 bp, Homo sapiens
gtttaaagcacacta

SEQ ID NO: 361865 - DNA, 15 bp, Homo sapiens
ggtttaaagcacact

SEQ ID NO: 361866 - DNA, 15 bp, Homo sapiens
gggtttaaagcacac

SEQ ID NO: 361867 - DNA, 15 bp, Homo sapiens
cgggtttaaagcaca

SEQ ID NO: 361868 - DNA, 15 bp, Homo sapiens
ccgggtttaaagcac

SEQ ID NO: 361869 - DNA, 15 bp, Homo sapiens
gccgggtttaaagca

SEQ ID NO: 361870 - DNA, 15 bp, Homo sapiens
tgccgggtttaaagc

SEQ ID NO: 361871 - DNA, 15 bp, Homo sapiens
ttgccgggtttaaag

SEQ ID NO: 361872 - DNA, 15 bp, Homo sapiens
tttgccgggtttaaa

SEQ ID NO: 361873 - DNA, 15 bp, Homo sapiens
ttttgccgggtttaa

SEQ ID NO: 361874 - DNA, 15 bp, Homo sapiens
attttgccgggttta

SEQ ID NO: 361875 - DNA, 15 bp, Homo sapiens
gattttgccgggttt

SEQ ID NO: 361876 - DNA, 15 bp, Homo sapiens
tgattttgccgggtt

SEQ ID NO: 361877 - DNA, 15 bp, Homo sapiens
ctgattttgccgggt

SEQ ID NO: 361878 - DNA, 15 bp, Homo sapiens
tctgattttgccggg

SEQ ID NO: 361879 - DNA, 15 bp, Homo sapiens
gtctgattttgccgg

SEQ ID NO: 361880 - DNA, 15 bp, Homo sapiens
tgtctgattttgccg

SEQ ID NO: 361881 - DNA, 15 bp, Homo sapiens
gtgtctgattttgcc

SEQ ID NO: 361882 - DNA, 15 bp, Homo sapiens
tgtgtctgattttgc

SEQ ID NO: 361883 - DNA, 15 bp, Homo sapiens
gtgtgtctgattttg

SEQ ID NO: 361884 - DNA, 15 bp, Homo sapiens
ggtgtgtctgatttt

SEQ ID NO: 361885 - DNA, 15 bp, Homo sapiens
cggtgtgtctgattt

SEQ ID NO: 361886 - DNA, 15 bp, Homo sapiens
ccggtgtgtctgatt

SEQ ID NO: 361887 - DNA, 15 bp, Homo sapiens
cccggtgtgtctgat

SEQ ID NO: 361888 - DNA, 15 bp, Homo sapiens
ccccggtgtgtctga

SEQ ID NO: 361889 - DNA, 15 bp, Homo sapiens
gccccggtgtgtctg

SEQ ID NO: 361890 - DNA, 15 bp, Homo sapiens
agccccggtgtgtct

SEQ ID NO: 361891 - DNA, 15 bp, Homo sapiens
cagccccggtgtgtc

SEQ ID NO: 361892 - DNA, 15 bp, Homo sapiens
tcagccccggtgtgt

SEQ ID NO: 361893 - DNA, 15 bp, Homo sapiens
ctcagccccggtgtg

SEQ ID NO: 361894 - DNA, 15 bp, Homo sapiens
cctcagccccggtgt

SEQ ID NO: 361895 - DNA, 15 bp, Homo sapiens
gcctcagccccggtg

SEQ ID NO: 361896 - DNA, 15 bp, Homo sapiens
agcctcagccccggt

SEQ ID NO: 361897 - DNA, 15 bp, Homo sapiens
gagcctcagccccgg

SEQ ID NO: 361898 - DNA, 15 bp, Homo sapiens
agagcctcagccccg

SEQ ID NO: 361899 - DNA, 15 bp, Homo sapiens
tagagcctcagcccc

SEQ ID NO: 361900 - DNA, 15 bp, Homo sapiens
ctagagcctcagccc

SEQ ID NO: 361901 - DNA, 15 bp, Homo sapiens
tctagagcctcagcc

SEQ ID NO: 361902 - DNA, 15 bp, Homo sapiens
ttctagagcctcagc

SEQ ID NO: 361903 - DNA, 15 bp, Homo sapiens
attctagagcctcag

SEQ ID NO: 361904 - DNA, 15 bp, Homo sapiens
aattctagagcctca

SEQ ID NO: 361905 - DNA, 15 bp, Homo sapiens
taattctagagcctc

SEQ ID NO: 361906 - DNA, 15 bp, Homo sapiens
ctaattctagagcct

SEQ ID NO: 361907 - DNA, 15 bp, Homo sapiens
cctaattctagagcc

SEQ ID NO: 361908 - DNA, 15 bp, Homo sapiens
tcctaattctagagc

SEQ ID NO: 361909 - DNA, 15 bp, Homo sapiens
atcctaattctagag

SEQ ID NO: 361910 - DNA, 15 bp, Homo sapiens
tatcctaattctaga

SEQ ID NO: 361911 - DNA, 15 bp, Homo sapiens
atatcctaattctag

SEQ ID NO: 361912 - DNA, 15 bp, Homo sapiens
aatatcctaattcta

SEQ ID NO: 361913 - DNA, 15 bp, Homo sapiens
gaatatcctaattct

SEQ ID NO: 361914 - DNA, 15 bp, Homo sapiens
tgaatatcctaattc

SEQ ID NO: 361915 - DNA, 15 bp, Homo sapiens
atgaatatcctaatt

SEQ ID NO: 361916 - DNA, 15 bp, Homo sapiens
tatgaatatcctaat

SEQ ID NO: 361917 - DNA, 15 bp, Homo sapiens
ttatgaatatcctaa

SEQ ID NO: 361918 - DNA, 15 bp, Homo sapiens
cttatgaatatccta

SEQ ID NO: 361919 - DNA, 15 bp, Homo sapiens
ccttatgaatatcct

SEQ ID NO: 361920 - DNA, 15 bp, Homo sapiens
accttatgaatatcc

SEQ ID NO: 361921 - DNA, 15 bp, Homo sapiens
aaccttatgaatatc

SEQ ID NO: 361922 - DNA, 15 bp, Homo sapiens
gaaccttatgaatat

SEQ ID NO: 361923 - DNA, 15 bp, Homo sapiens
agaaccttatgaata

SEQ ID NO: 361924 - DNA, 15 bp, Homo sapiens
gagaaccttatgaat

SEQ ID NO: 361925 - DNA, 15 bp, Homo sapiens
agagaaccttatgaa

SEQ ID NO: 361926 - DNA, 15 bp, Homo sapiens
cagagaaccttatga

SEQ ID NO: 361927 - DNA, 15 bp, Homo sapiens
ccagagaaccttatg

SEQ ID NO: 361928 - DNA, 15 bp, Homo sapiens
cccagagaaccttat

SEQ ID NO: 361929 - DNA, 15 bp, Homo sapiens
acccagagaacctta

SEQ ID NO: 361930 - DNA, 15 bp, Homo sapiens
cacccagagaacctt

SEQ ID NO: 361931 - DNA, 15 bp, Homo sapiens
tcacccagagaacct

SEQ ID NO: 361932 - DNA, 15 bp, Homo sapiens
atcacccagagaacc

SEQ ID NO: 361933 - DNA, 15 bp, Homo sapiens
catcacccagagaac

SEQ ID NO: 361934 - DNA, 15 bp, Homo sapiens
acatcacccagagaa

SEQ ID NO: 361935 - DNA, 15 bp, Homo sapiens
tacatcacccagaga

SEQ ID NO: 361936 - DNA, 15 bp, Homo sapiens
ctacatcacccagag

SEQ ID NO: 361937 - DNA, 15 bp, Homo sapiens
gctacatcacccaga

SEQ ID NO: 361938 - DNA, 15 bp, Homo sapiens
agctacatcacccag

SEQ ID NO: 361939 - DNA, 15 bp, Homo sapiens
cagctacatcaccca

SEQ ID NO: 361940 - DNA, 15 bp, Homo sapiens
acagctacatcaccc

SEQ ID NO: 361941 - DNA, 15 bp, Homo sapiens
cacagctacatcacc

SEQ ID NO: 361942 - DNA, 15 bp, Homo sapiens
ccacagctacatcac

SEQ ID NO: 361943 - DNA, 15 bp, Homo sapiens
gccacagctacatca

SEQ ID NO: 361944 - DNA, 15 bp, Homo sapiens
ggccacagctacatc

SEQ ID NO: 361945 - DNA, 15 bp, Homo sapiens
tggccacagctacat

SEQ ID NO: 361946 - DNA, 15 bp, Homo sapiens
ctggccacagctaca

SEQ ID NO: 361947 - DNA, 15 bp, Homo sapiens
actggccacagctac

SEQ ID NO: 361948 - DNA, 15 bp, Homo sapiens
gactggccacagcta

SEQ ID NO: 361949 - DNA, 15 bp, Homo sapiens
agactggccacagct

SEQ ID NO: 361950 - DNA, 15 bp, Homo sapiens
cagactggccacagc

SEQ ID NO: 361951 - DNA, 15 bp, Homo sapiens
tcagactggccacag

SEQ ID NO: 361952 - DNA, 15 bp, Homo sapiens
ctcagactggccaca

SEQ ID NO: 361953 - DNA, 15 bp, Homo sapiens
cctcagactggccac

SEQ ID NO: 361954 - DNA, 15 bp, Homo sapiens
tcctcagactggcca

SEQ ID NO: 361955 - DNA, 15 bp, Homo sapiens
atcctcagactggcc

SEQ ID NO: 361956 - DNA, 15 bp, Homo sapiens
catcctcagactggc

SEQ ID NO: 361957 - DNA, 15 bp, Homo sapiens
ccatcctcagactgg

SEQ ID NO: 361958 - DNA, 15 bp, Homo sapiens
cccatcctcagactg

SEQ ID NO: 361959 - DNA, 15 bp, Homo sapiens
acccatcctcagact

SEQ ID NO: 361960 - DNA, 15 bp, Homo sapiens
cacccatcctcagac

SEQ ID NO: 361961 - DNA, 15 bp, Homo sapiens
acacccatcctcaga

SEQ ID NO: 361962 - DNA, 15 bp, Homo sapiens
aacacccatcctcag

SEQ ID NO: 361963 - DNA, 15 bp, Homo sapiens
aaacacccatcctca

SEQ ID NO: 361964 - DNA, 15 bp, Homo sapiens
aaaacacccatcctc

SEQ ID NO: 361965 - DNA, 15 bp, Homo sapiens
caaaacacccatcct

SEQ ID NO: 361966 - DNA, 15 bp, Homo sapiens
tcaaaacacccatcc

SEQ ID NO: 361967 - DNA, 15 bp, Homo sapiens
ggatcaaaacaccca

SEQ ID NO: 361968 - DNA, 15 bp, Homo sapiens
gggatcaaaacaccc

SEQ ID NO: 361969 - DNA, 15 bp, Homo sapiens
tgggatcaaaacacc

SEQ ID NO: 361970 - DNA, 15 bp, Homo sapiens
ctgggatcaaaacac

SEQ ID NO: 361971 - DNA, 15 bp, Homo sapiens
tctgggatcaaaaca

SEQ ID NO: 361972 - DNA, 15 bp, Homo sapiens
atctgggatcaaaac

SEQ ID NO: 361973 - DNA, 15 bp, Homo sapiens
gatctgggatcaaaa

SEQ ID NO: 361974 - DNA, 15 bp, Homo sapiens
cgatctgggatcaaa

SEQ ID NO: 361975 - DNA, 15 bp, Homo sapiens
tcgatctgggatcaa

SEQ ID NO: 361976 - DNA, 15 bp, Homo sapiens
ttcgatctgggatca

SEQ ID NO: 361977 - DNA, 15 bp, Homo sapiens
cttcgatctgggatc

SEQ ID NO: 361978 - DNA, 15 bp, Homo sapiens
acttcgatctgggat

SEQ ID NO: 361979 - DNA, 15 bp, Homo sapiens
aacttcgatctggga

SEQ ID NO: 361980 - DNA, 15 bp, Homo sapiens
gaacttcgatctggg

SEQ ID NO: 361981 - DNA, 15 bp, Homo sapiens
ggaacttcgatctgg

SEQ ID NO: 361982 - DNA, 15 bp, Homo sapiens
aggaacttcgatctg

SEQ ID NO: 361983 - DNA, 15 bp, Homo sapiens
caggaacttcgatct

SEQ ID NO: 361984 - DNA, 15 bp, Homo sapiens
ccaggaacttcgatc

SEQ ID NO: 361985 - DNA, 15 bp, Homo sapiens
cccaggaacttcgat

SEQ ID NO: 361986 - DNA, 15 bp, Homo sapiens
ccccaggaacttcga

SEQ ID NO: 361987 - DNA, 15 bp, Homo sapiens
accccaggaacttcg

SEQ ID NO: 361988 - DNA, 15 bp, Homo sapiens
gaccccaggaacttc

SEQ ID NO: 361989 - DNA, 15 bp, Homo sapiens
tgaccccaggaactt

SEQ ID NO: 361990 - DNA, 15 bp, Homo sapiens
ctgaccccaggaact

SEQ ID NO: 361991 - DNA, 15 bp, Homo sapiens
gctgaccccaggaac

SEQ ID NO: 361992 - DNA, 15 bp, Homo sapiens
tgctgaccccaggaa

SEQ ID NO: 361993 - DNA, 15 bp, Homo sapiens
atgctgaccccagga

SEQ ID NO: 361994 - DNA, 15 bp, Homo sapiens
gatgctgaccccagg

SEQ ID NO: 361995 - DNA, 15 bp, Homo sapiens
agatgctgaccccag

SEQ ID NO: 361996 - DNA, 15 bp, Homo sapiens
cagatgctgacccca

SEQ ID NO: 361997 - DNA, 15 bp, Homo sapiens
acagatgctgacccc

SEQ ID NO: 361998 - DNA, 15 bp, Homo sapiens
cacagatgctgaccc

SEQ ID NO: 361999 - DNA, 15 bp, Homo sapiens
gcacagatgctgacc

SEQ ID NO: 362000 - DNA, 15 bp, Homo sapiens
ggcacagatgctgac

SEQ ID NO: 362001 - DNA, 15 bp, Homo sapiens
aggcacagatgctga

SEQ ID NO: 362002 - DNA, 15 bp, Homo sapiens
gaggcacagatgctg

SEQ ID NO: 362003 - DNA, 15 bp, Homo sapiens
cgaggcacagatgct

SEQ ID NO: 362004 - DNA, 15 bp, Homo sapiens
ccgaggcacagatgc

SEQ ID NO: 362005 - DNA, 15 bp, Homo sapiens
gccgaggcacagatg

SEQ ID NO: 362006 - DNA, 15 bp, Homo sapiens
ggccgaggcacagat

SEQ ID NO: 362007 - DNA, 15 bp, Homo sapiens
tggccgaggcacaga

SEQ ID NO: 362008 - DNA, 15 bp, Homo sapiens
gtggccgaggcacag

SEQ ID NO: 362009 - DNA, 15 bp, Homo sapiens
agtggccgaggcaca

SEQ ID NO: 362010 - DNA, 15 bp, Homo sapiens
gagtggccgaggcac

SEQ ID NO: 362011 - DNA, 15 bp, Homo sapiens
tgagtggccgaggca

SEQ ID NO: 362012 - DNA, 15 bp, Homo sapiens
ttgagtggccgaggc

SEQ ID NO: 362013 - DNA, 15 bp, Homo sapiens
gttgagtggccgagg

SEQ ID NO: 362014 - DNA, 15 bp, Homo sapiens
agttgagtggccgag

SEQ ID NO: 362015 - DNA, 15 bp, Homo sapiens
tagttgagtggccga

SEQ ID NO: 362016 - DNA, 15 bp, Homo sapiens
ttagttgagtggccg

SEQ ID NO: 362017 - DNA, 15 bp, Homo sapiens
gttagttgagtggcc

SEQ ID NO: 362018 - DNA, 15 bp, Homo sapiens
agttagttgagtggc

SEQ ID NO: 362019 - DNA, 15 bp, Homo sapiens
cagttagttgagtgg

SEQ ID NO: 362020 - DNA, 15 bp, Homo sapiens
acagttagttgagtg

SEQ ID NO: 362021 - DNA, 15 bp, Homo sapiens
cacagttagttgagt

SEQ ID NO: 362022 - DNA, 15 bp, Homo sapiens
gcacagttagttgag

SEQ ID NO: 362023 - DNA, 15 bp, Homo sapiens
ggcacagttagttga

SEQ ID NO: 362024 - DNA, 15 bp, Homo sapiens
aggcacagttagttg

SEQ ID NO: 362025 - DNA, 15 bp, Homo sapiens
aaggcacagttagtt

SEQ ID NO: 362026 - DNA, 15 bp, Homo sapiens
gaaggcacagttagt

SEQ ID NO: 362027 - DNA, 15 bp, Homo sapiens
ggaaggcacagttag

SEQ ID NO: 362028 - DNA, 15 bp, Homo sapiens
gggaaggcacagtta

SEQ ID NO: 362029 - DNA, 15 bp, Homo sapiens
ggggaaggcacagtt

SEQ ID NO: 362030 - DNA, 15 bp, Homo sapiens
tggggaaggcacagt

SEQ ID NO: 362031 - DNA, 15 bp, Homo sapiens
gtggggaaggcacag

SEQ ID NO: 362032 - DNA, 15 bp, Homo sapiens
ggtggggaaggcaca

SEQ ID NO: 362033 - DNA, 15 bp, Homo sapiens
aggtggggaaggcac

SEQ ID NO: 362034 - DNA, 15 bp, Homo sapiens
gaggtggggaaggca

SEQ ID NO: 362035 - DNA, 15 bp, Homo sapiens
ggaggtggggaaggc

SEQ ID NO: 362036 - DNA, 15 bp, Homo sapiens
gggaggtggggaagg

SEQ ID NO: 362037 - DNA, 15 bp, Homo sapiens
agggaggtggggaag

SEQ ID NO: 362038 - DNA, 15 bp, Homo sapiens
tagggaggtggggaa

SEQ ID NO: 362039 - DNA, 15 bp, Homo sapiens
atagggaggtgggga

SEQ ID NO: 362040 - DNA, 15 bp, Homo sapiens
aatagggaggtgggg

SEQ ID NO: 362041 - DNA, 15 bp, Homo sapiens
gaatagggaggtggg

SEQ ID NO: 362042 - DNA, 15 bp, Homo sapiens
agaatagggaggtgg

SEQ ID NO: 362043 - DNA, 15 bp, Homo sapiens
tagaatagggaggtg

SEQ ID NO: 362044 - DNA, 15 bp, Homo sapiens
ctagaatagggaggt

SEQ ID NO: 362045 - DNA, 15 bp, Homo sapiens
tctagaatagggagg

SEQ ID NO: 362046 - DNA, 15 bp, Homo sapiens
ttctagaatagggag

SEQ ID NO: 362047 - DNA, 15 bp, Homo sapiens
attctagaataggga

SEQ ID NO: 362048 - DNA, 15 bp, Homo sapiens
aattctagaataggg

SEQ ID NO: 362049 - DNA, 15 bp, Homo sapiens
gaattctagaatagg

SEQ ID NO: 362050 - DNA, 15 bp, Homo sapiens
tgaattctagaatag

SEQ ID NO: 362051 - DNA, 15 bp, Homo sapiens
gtgaattctagaata

SEQ ID NO: 362052 - DNA, 15 bp, Homo sapiens
agtgaattctagaat

SEQ ID NO: 362053 - DNA, 15 bp, Homo sapiens
aagtgaattctagaa

SEQ ID NO: 362054 - DNA, 15 bp, Homo sapiens
gaagtgaattctaga

SEQ ID NO: 362055 - DNA, 15 bp, Homo sapiens
ggaagtgaattctag

SEQ ID NO: 362056 - DNA, 15 bp, Homo sapiens
tggaagtgaattcta

SEQ ID NO: 362057 - DNA, 15 bp, Homo sapiens
gtggaagtgaattct

SEQ ID NO: 362058 - DNA, 15 bp, Homo sapiens
ggtggaagtgaattc

SEQ ID NO: 362059 - DNA, 15 bp, Homo sapiens
gggtggaagtgaatt

SEQ ID NO: 362060 - DNA, 15 bp, Homo sapiens
agggtggaagtgaat

SEQ ID NO: 362061 - DNA, 15 bp, Homo sapiens
cagggtggaagtgaa

SEQ ID NO: 362062 - DNA, 15 bp, Homo sapiens
ccagggtggaagtga

SEQ ID NO: 362063 - DNA, 15 bp, Homo sapiens
cccagggtggaagtg

SEQ ID NO: 362064 - DNA, 15 bp, Homo sapiens
gcccagggtggaagt

SEQ ID NO: 362065 - DNA, 15 bp, Homo sapiens
ggcccagggtggaag

SEQ ID NO: 362066 - DNA, 15 bp, Homo sapiens
gggcccagggtggaa

SEQ ID NO: 362067 - DNA, 15 bp, Homo sapiens
tgggcccagggtgga

SEQ ID NO: 362068 - DNA, 15 bp, Homo sapiens
ctgggcccagggtgg

SEQ ID NO: 362069 - DNA, 15 bp, Homo sapiens
actgggcccagggtg

SEQ ID NO: 362070 - DNA, 15 bp, Homo sapiens
aactgggcccagggt

SEQ ID NO: 362071 - DNA, 15 bp, Homo sapiens
aaactgggcccaggg

SEQ ID NO: 362072 - DNA, 15 bp, Homo sapiens
taaactgggcccagg

SEQ ID NO: 362073 - DNA, 15 bp, Homo sapiens
ataaactgggcccag

SEQ ID NO: 362074 - DNA, 15 bp, Homo sapiens
tataaactgggccca

SEQ ID NO: 362075 - DNA, 15 bp, Homo sapiens
atataaactgggccc

SEQ ID NO: 362076 - DNA, 15 bp, Homo sapiens
aatataaactgggcc

SEQ ID NO: 362077 - DNA, 15 bp, Homo sapiens
gaatataaactgggc

SEQ ID NO: 362078 - DNA, 15 bp, Homo sapiens
ggaatataaactggg

SEQ ID NO: 362079 - DNA, 15 bp, Homo sapiens
aggaatataaactgg

SEQ ID NO: 362080 - DNA, 15 bp, Homo sapiens
gaggaatataaactg

SEQ ID NO: 362081 - DNA, 15 bp, Homo sapiens
agaggaatataaact

SEQ ID NO: 362082 - DNA, 15 bp, Homo sapiens
cagaggaatataaac

SEQ ID NO: 362083 - DNA, 15 bp, Homo sapiens
ccagaggaatataaa

SEQ ID NO: 362084 - DNA, 15 bp, Homo sapiens
gccagaggaatataa

SEQ ID NO: 362085 - DNA, 15 bp, Homo sapiens
agccagaggaatata

SEQ ID NO: 362086 - DNA, 15 bp, Homo sapiens
aagccagaggaatat

SEQ ID NO: 362087 - DNA, 15 bp, Homo sapiens
caagccagaggaata

SEQ ID NO: 362088 - DNA, 15 bp, Homo sapiens
acaagccagaggaat

SEQ ID NO: 362089 - DNA, 15 bp, Homo sapiens
aacaagccagaggaa

SEQ ID NO: 362090 - DNA, 15 bp, Homo sapiens
caacaagccagagga

SEQ ID NO: 362091 - DNA, 15 bp, Homo sapiens
tcaacaagccagagg

SEQ ID NO: 362092 - DNA, 15 bp, Homo sapiens
ttcaacaagccagag

SEQ ID NO: 362093 - DNA, 15 bp, Homo sapiens
cttcaacaagccaga

SEQ ID NO: 362094 - DNA, 15 bp, Homo sapiens
ccttcaacaagccag

SEQ ID NO: 362095 - DNA, 15 bp, Homo sapiens
cccttcaacaagcca

SEQ ID NO: 362096 - DNA, 15 bp, Homo sapiens
tcccttcaacaagcc

SEQ ID NO: 362097 - DNA, 15 bp, Homo sapiens
ctcccttcaacaagc

SEQ ID NO: 362098 - DNA, 15 bp, Homo sapiens
gctcccttcaacaag

SEQ ID NO: 362099 - DNA, 15 bp, Homo sapiens
agctcccttcaacaa

SEQ ID NO: 362100 - DNA, 15 bp, Homo sapiens
tagctcccttcaaca

SEQ ID NO: 362101 - DNA, 15 bp, Homo sapiens
ctagctcccttcaac

SEQ ID NO: 362102 - DNA, 15 bp, Homo sapiens
gctagctcccttcaa

SEQ ID NO: 362103 - DNA, 15 bp, Homo sapiens
ggctagctcccttca

SEQ ID NO: 362104 - DNA, 15 bp, Homo sapiens
aggctagctcccttc

SEQ ID NO: 362105 - DNA, 15 bp, Homo sapiens
gaggctagctccctt

SEQ ID NO: 362106 - DNA, 15 bp, Homo sapiens
ggaggctagctccct

SEQ ID NO: 362107 - DNA, 15 bp, Homo sapiens
gggaggctagctccc

SEQ ID NO: 362108 - DNA, 15 bp, Homo sapiens
tgggaggctagctcc

SEQ ID NO: 362109 - DNA, 15 bp, Homo sapiens
ctgggaggctagctc

SEQ ID NO: 362110 - DNA, 15 bp, Homo sapiens
cctgggaggctagct

SEQ ID NO: 362111 - DNA, 15 bp, Homo sapiens
acctgggaggctagc

SEQ ID NO: 362112 - DNA, 15 bp, Homo sapiens
cacctgggaggctag

SEQ ID NO: 362113 - DNA, 15 bp, Homo sapiens
tcacctgggaggcta

SEQ ID NO: 362114 - DNA, 15 bp, Homo sapiens
gtcacctgggaggct

SEQ ID NO: 362115 - DNA, 15 bp, Homo sapiens
ggtcacctgggaggc

SEQ ID NO: 362116 - DNA, 15 bp, Homo sapiens
aggtcacctgggagg

SEQ ID NO: 362117 - DNA, 15 bp, Homo sapiens
caggtcacctgggag

SEQ ID NO: 362118 - DNA, 15 bp, Homo sapiens
ccaggtcacctggga

SEQ ID NO: 362119 - DNA, 15 bp, Homo sapiens
gccaggtcacctggg

SEQ ID NO: 362120 - DNA, 15 bp, Homo sapiens
ggccaggtcacctgg

SEQ ID NO: 362121 - DNA, 15 bp, Homo sapiens
tggccaggtcacctg

SEQ ID NO: 362122 - DNA, 15 bp, Homo sapiens
ttggccaggtcacct

SEQ ID NO: 362123 - DNA, 15 bp, Homo sapiens
attggccaggtcacc

SEQ ID NO: 362124 - DNA, 15 bp, Homo sapiens
aattggccaggtcac

SEQ ID NO: 362125 - DNA, 15 bp, Homo sapiens
taattggccaggtca

SEQ ID NO: 362126 - DNA, 15 bp, Homo sapiens
gtaattggccaggtc

SEQ ID NO: 362127 - DNA, 15 bp, Homo sapiens
tgtaattggccaggt

SEQ ID NO: 362128 - DNA, 15 bp, Homo sapiens
ttgtaattggccagg

SEQ ID NO: 362129 - DNA, 15 bp, Homo sapiens
tttgtaattggccag

SEQ ID NO: 362130 - DNA, 15 bp, Homo sapiens
atttgtaattggcca

SEQ ID NO: 362131 - DNA, 15 bp, Homo sapiens
tatttgtaattggcc

SEQ ID NO: 362132 - DNA, 15 bp, Homo sapiens
ttatttgtaattggc

SEQ ID NO: 362133 - DNA, 15 bp, Homo sapiens
attatttgtaattgg

SEQ ID NO: 362134 - DNA, 15 bp, Homo sapiens
aattatttgtaattg

SEQ ID NO: 362135 - DNA, 15 bp, Homo sapiens
taattatttgtaatt

SEQ ID NO: 362136 - DNA, 15 bp, Homo sapiens
ctaattatttgtaat

SEQ ID NO: 362137 - DNA, 15 bp, Homo sapiens
cctaattatttgtaa

SEQ ID NO: 362138 - DNA, 15 bp, Homo sapiens
tcctaattatttgta

SEQ ID NO: 362139 - DNA, 15 bp, Homo sapiens
ctcctaattatttgt

SEQ ID NO: 362140 - DNA, 15 bp, Homo sapiens
gctcctaattatttg

SEQ ID NO: 362141 - DNA, 15 bp, Homo sapiens
ggctcctaattattt

SEQ ID NO: 362142 - DNA, 15 bp, Homo sapiens
gggctcctaattatt

SEQ ID NO: 362143 - DNA, 15 bp, Homo sapiens
ggggctcctaattat

SEQ ID NO: 362144 - DNA, 15 bp, Homo sapiens
tggggctcctaatta

SEQ ID NO: 362145 - DNA, 15 bp, Homo sapiens
atggggctcctaatt

SEQ ID NO: 362146 - DNA, 15 bp, Homo sapiens
gatggggctcctaat

SEQ ID NO: 362147 - DNA, 15 bp, Homo sapiens
tgatggggctcctaa

SEQ ID NO: 362148 - DNA, 15 bp, Homo sapiens
gtgatggggctccta

SEQ ID NO: 362149 - DNA, 15 bp, Homo sapiens
tgtgatggggctcct

SEQ ID NO: 362150 - DNA, 15 bp, Homo sapiens
atgtgatggggctcc

SEQ ID NO: 362151 - DNA, 15 bp, Homo sapiens
tatgtgatggggctc

SEQ ID NO: 362152 - DNA, 15 bp, Homo sapiens
ttatgtgatggggct

SEQ ID NO: 362153 - DNA, 15 bp, Homo sapiens
gttatgtgatggggc

SEQ ID NO: 362154 - DNA, 15 bp, Homo sapiens
tgttatgtgatgggg

SEQ ID NO: 362155 - DNA, 15 bp, Homo sapiens
ctgttatgtgatggg

SEQ ID NO: 362156 - DNA, 15 bp, Homo sapiens
actgttatgtgatgg

SEQ ID NO: 362157 - DNA, 15 bp, Homo sapiens
cactgttatgtgatg

SEQ ID NO: 362158 - DNA, 15 bp, Homo sapiens
gcactgttatgtgat

SEQ ID NO: 362159 - DNA, 15 bp, Homo sapiens
agcactgttatgtga

SEQ ID NO: 362160 - DNA, 15 bp, Homo sapiens
aagcactgttatgtg

SEQ ID NO: 362161 - DNA, 15 bp, Homo sapiens
aaagcactgttatgt

SEQ ID NO: 362162 - DNA, 15 bp, Homo sapiens
taaagcactgttatg

SEQ ID NO: 362163 - DNA, 15 bp, Homo sapiens
ataaagcactgttat

SEQ ID NO: 362164 - DNA, 15 bp, Homo sapiens
tataaagcactgtta

SEQ ID NO: 362165 - DNA, 15 bp, Homo sapiens
ctataaagcactgtt

SEQ ID NO: 362166 - DNA, 15 bp, Homo sapiens
tctataaagcactgt

SEQ ID NO: 362167 - DNA, 15 bp, Homo sapiens
gtctataaagcactg

SEQ ID NO: 362168 - DNA, 15 bp, Homo sapiens
agtctataaagcact

SEQ ID NO: 362169 - DNA, 15 bp, Homo sapiens
cagtctataaagcac

SEQ ID NO: 362170 - DNA, 15 bp, Homo sapiens
ccagtctataaagca

SEQ ID NO: 362171 - DNA, 15 bp, Homo sapiens
accagtctataaagc

SEQ ID NO: 362172 - DNA, 15 bp, Homo sapiens
aaccagtctataaag

SEQ ID NO: 362173 - DNA, 15 bp, Homo sapiens
caaccagtctataaa

SEQ ID NO: 362174 - DNA, 15 bp, Homo sapiens
ccaaccagtctataa

SEQ ID NO: 362175 - DNA, 15 bp, Homo sapiens
gccaaccagtctata

SEQ ID NO: 362176 - DNA, 15 bp, Homo sapiens
agccaaccagtctat

SEQ ID NO: 362177 - DNA, 15 bp, Homo sapiens
cagccaaccagtcta

SEQ ID NO: 362178 - DNA, 15 bp, Homo sapiens
acagccaaccagtct

SEQ ID NO: 362179 - DNA, 15 bp, Homo sapiens
gacagccaaccagtc

SEQ ID NO: 362180 - DNA, 15 bp, Homo sapiens
agacagccaaccagt

SEQ ID NO: 362181 - DNA, 15 bp, Homo sapiens
gagacagccaaccag

SEQ ID NO: 362182 - DNA, 15 bp, Homo sapiens
ggagacagccaacca

SEQ ID NO: 362183 - DNA, 15 bp, Homo sapiens
aggagacagccaacc

SEQ ID NO: 362184 - DNA, 15 bp, Homo sapiens
caggagacagccaac

SEQ ID NO: 362185 - DNA, 15 bp, Homo sapiens
ccaggagacagccaa

SEQ ID NO: 362186 - DNA, 15 bp, Homo sapiens
accaggagacagcca

SEQ ID NO: 362187 - DNA, 15 bp, Homo sapiens
caccaggagacagcc

SEQ ID NO: 362188 - DNA, 15 bp, Homo sapiens
ccaccaggagacagc

SEQ ID NO: 362189 - DNA, 15 bp, Homo sapiens
gccaccaggagacag

SEQ ID NO: 362190 - DNA, 15 bp, Homo sapiens
tgccaccaggagaca

SEQ ID NO: 362191 - DNA, 15 bp, Homo sapiens
gtgccaccaggagac

SEQ ID NO: 362192 - DNA, 15 bp, Homo sapiens
ggtgccaccaggaga

SEQ ID NO: 362193 - DNA, 15 bp, Homo sapiens
gggtgccaccaggag

SEQ ID NO: 362194 - DNA, 15 bp, Homo sapiens
tgggtgccaccagga

SEQ ID NO: 362195 - DNA, 15 bp, Homo sapiens
ctgggtgccaccagg

SEQ ID NO: 362196 - DNA, 15 bp, Homo sapiens
cctgggtgccaccag

SEQ ID NO: 362197 - DNA, 15 bp, Homo sapiens
gcctgggtgccacca

SEQ ID NO: 362198 - DNA, 15 bp, Homo sapiens
tgcctgggtgccacc

SEQ ID NO: 362199 - DNA, 15 bp, Homo sapiens
gtgcctgggtgccac

SEQ ID NO: 362200 - DNA, 15 bp, Homo sapiens
agtgcctgggtgcca

SEQ ID NO: 362201 - DNA, 15 bp, Homo sapiens
aagtgcctgggtgcc

SEQ ID NO: 362202 - DNA, 15 bp, Homo sapiens
caagtgcctgggtgc

SEQ ID NO: 362203 - DNA, 15 bp, Homo sapiens
gcaagtgcctgggtg

SEQ ID NO: 362204 - DNA, 15 bp, Homo sapiens
tgcaagtgcctgggt

SEQ ID NO: 362205 - DNA, 15 bp, Homo sapiens
gtgcaagtgcctggg

SEQ ID NO: 362206 - DNA, 15 bp, Homo sapiens
agtgcaagtgcctgg

SEQ ID NO: 362207 - DNA, 15 bp, Homo sapiens
aagtgcaagtgcctg

SEQ ID NO: 362208 - DNA, 15 bp, Homo sapiens
gaagtgcaagtgcct

SEQ ID NO: 362209 - DNA, 15 bp, Homo sapiens
ggaagtgcaagtgcc

SEQ ID NO: 362210 - DNA, 15 bp, Homo sapiens
cggaagtgcaagtgc

SEQ ID NO: 362211 - DNA, 15 bp, Homo sapiens
acggaagtgcaagtg

SEQ ID NO: 362212 - DNA, 15 bp, Homo sapiens
cacggaagtgcaagt

SEQ ID NO: 362213 - DNA, 15 bp, Homo sapiens
gcacggaagtgcaag

SEQ ID NO: 362214 - DNA, 15 bp, Homo sapiens
cgcacggaagtgcaa

SEQ ID NO: 362215 - DNA, 15 bp, Homo sapiens
ccgcacggaagtgca

SEQ ID NO: 362216 - DNA, 15 bp, Homo sapiens
gccgcacggaagtgc

SEQ ID NO: 362217 - DNA, 15 bp, Homo sapiens
ggccgcacggaagtg

SEQ ID NO: 362218 - DNA, 15 bp, Homo sapiens
gggccgcacggaagt

SEQ ID NO: 362219 - DNA, 15 bp, Homo sapiens
tgggccgcacggaag

SEQ ID NO: 362220 - DNA, 15 bp, Homo sapiens
ctgggccgcacggaa

SEQ ID NO: 362221 - DNA, 15 bp, Homo sapiens
tctgggccgcacgga

SEQ ID NO: 362222 - DNA, 15 bp, Homo sapiens
atctgggccgcacgg

SEQ ID NO: 362223 - DNA, 15 bp, Homo sapiens
tatctgggccgcacg

SEQ ID NO: 362224 - DNA, 15 bp, Homo sapiens
ttatctgggccgcac

SEQ ID NO: 362225 - DNA, 15 bp, Homo sapiens
gttatctgggccgca

SEQ ID NO: 362226 - DNA, 15 bp, Homo sapiens
agttatctgggccgc

SEQ ID NO: 362227 - DNA, 15 bp, Homo sapiens
tagttatctgggccg

SEQ ID NO: 362228 - DNA, 15 bp, Homo sapiens
ttagttatctgggcc

SEQ ID NO: 362229 - DNA, 15 bp, Homo sapiens
gttagttatctgggc

SEQ ID NO: 362230 - DNA, 15 bp, Homo sapiens
agttagttatctggg

SEQ ID NO: 362231 - DNA, 15 bp, Homo sapiens
gagttagttatctgg

SEQ ID NO: 362232 - DNA, 15 bp, Homo sapiens
ggagttagttatctg

SEQ ID NO: 362233 - DNA, 15 bp, Homo sapiens
tggagttagttatct

SEQ ID NO: 362234 - DNA, 15 bp, Homo sapiens
ctggagttagttatc

SEQ ID NO: 362235 - DNA, 15 bp, Homo sapiens
cctggagttagttat

SEQ ID NO: 362236 - DNA, 15 bp, Homo sapiens
acctggagttagtta

SEQ ID NO: 362237 - DNA, 15 bp, Homo sapiens
gacctggagttagtt

SEQ ID NO: 362238 - DNA, 15 bp, Homo sapiens
agacctggagttagt

SEQ ID NO: 362239 - DNA, 15 bp, Homo sapiens
aagacctggagttag

SEQ ID NO: 362240 - DNA, 15 bp, Homo sapiens
gaagacctggagtta

SEQ ID NO: 362241 - DNA, 15 bp, Homo sapiens
agaagacctggagtt

SEQ ID NO: 362242 - DNA, 15 bp, Homo sapiens
cagaagacctggagt

SEQ ID NO: 362243 - DNA, 15 bp, Homo sapiens
gcagaagacctggag

SEQ ID NO: 362244 - DNA, 15 bp, Homo sapiens
tgcagaagacctgga

SEQ ID NO: 362245 - DNA, 15 bp, Homo sapiens
ctgcagaagacctgg

SEQ ID NO: 362246 - DNA, 15 bp, Homo sapiens
cctgcagaagacctg

SEQ ID NO: 362247 - DNA, 15 bp, Homo sapiens
tcctgcagaagacct

SEQ ID NO: 362248 - DNA, 15 bp, Homo sapiens
ttcctgcagaagacc

SEQ ID NO: 362249 - DNA, 15 bp, Homo sapiens
cttcctgcagaagac

SEQ ID NO: 362250 - DNA, 15 bp, Homo sapiens
acttcctgcagaaga

SEQ ID NO: 362251 - DNA, 15 bp, Homo sapiens
cacttcctgcagaag

SEQ ID NO: 362252 - DNA, 15 bp, Homo sapiens
ccacttcctgcagaa

SEQ ID NO: 362253 - DNA, 15 bp, Homo sapiens
cccacttcctgcaga

SEQ ID NO: 362254 - DNA, 15 bp, Homo sapiens
ccccacttcctgcag

SEQ ID NO: 362255 - DNA, 15 bp, Homo sapiens
tccccacttcctgca

SEQ ID NO: 362256 - DNA, 15 bp, Homo sapiens
atccccacttcctgc

SEQ ID NO: 362257 - DNA, 15 bp, Homo sapiens
tatccccacttcctg

SEQ ID NO: 362258 - DNA, 15 bp, Homo sapiens
atatccccacttcct

SEQ ID NO: 362259 - DNA, 15 bp, Homo sapiens
catatccccacttcc

SEQ ID NO: 362260 - DNA, 15 bp, Homo sapiens
acatatccccacttc

SEQ ID NO: 362261 - DNA, 15 bp, Homo sapiens
cacatatccccactt

SEQ ID NO: 362262 - DNA, 15 bp, Homo sapiens
tcacatatccccact

SEQ ID NO: 362263 - DNA, 15 bp, Homo sapiens
atcacatatccccac

SEQ ID NO: 362264 - DNA, 15 bp, Homo sapiens
catcacatatcccca

SEQ ID NO: 362265 - DNA, 15 bp, Homo sapiens
acatcacatatcccc

SEQ ID NO: 362266 - DNA, 15 bp, Homo sapiens
cacatcacatatccc

SEQ ID NO: 362267 - DNA, 15 bp, Homo sapiens
tcacatcacatatcc

SEQ ID NO: 362268 - DNA, 15 bp, Homo sapiens
ctcacatcacatatc

SEQ ID NO: 362269 - DNA, 15 bp, Homo sapiens
gctcacatcacatat

SEQ ID NO: 362270 - DNA, 15 bp, Homo sapiens
agctcacatcacata

SEQ ID NO: 362271 - DNA, 15 bp, Homo sapiens
gagctcacatcacat

SEQ ID NO: 362272 - DNA, 15 bp, Homo sapiens
ggagctcacatcaca

SEQ ID NO: 362273 - DNA, 15 bp, Homo sapiens
gggagctcacatcac

SEQ ID NO: 362274 - DNA, 15 bp, Homo sapiens
ggggagctcacatca

SEQ ID NO: 362275 - DNA, 15 bp, Homo sapiens
tggggagctcacatc

SEQ ID NO: 362276 - DNA, 15 bp, Homo sapiens
ctggggagctcacat

SEQ ID NO: 362277 - DNA, 15 bp, Homo sapiens
actggggagctcaca

SEQ ID NO: 362278 - DNA, 15 bp, Homo sapiens
cactggggagctcac

SEQ ID NO: 362279 - DNA, 15 bp, Homo sapiens
ccactggggagctca

SEQ ID NO: 362280 - DNA, 15 bp, Homo sapiens
cccactggggagctc

SEQ ID NO: 362281 - DNA, 15 bp, Homo sapiens
acccactggggagct

SEQ ID NO: 362282 - DNA, 15 bp, Homo sapiens
gacccactggggagc

SEQ ID NO: 362283 - DNA, 15 bp, Homo sapiens
agacccactggggag

SEQ ID NO: 362284 - DNA, 15 bp, Homo sapiens
aagacccactgggga

SEQ ID NO: 362285 - DNA, 15 bp, Homo sapiens
gaagacccactgggg

SEQ ID NO: 362286 - DNA, 15 bp, Homo sapiens
ggaagacccactggg

SEQ ID NO: 362287 - DNA, 15 bp, Homo sapiens
aggaagacccactgg

SEQ ID NO: 362288 - DNA, 15 bp, Homo sapiens
aaggaagacccactg

SEQ ID NO: 362289 - DNA, 15 bp, Homo sapiens
caaggaagacccact

SEQ ID NO: 362290 - DNA, 15 bp, Homo sapiens
ccaaggaagacccac

SEQ ID NO: 362291 - DNA, 15 bp, Homo sapiens
accaaggaagaccca

SEQ ID NO: 362292 - DNA, 15 bp, Homo sapiens
gaccaaggaagaccc

SEQ ID NO: 362293 - DNA, 15 bp, Homo sapiens
tgaccaaggaagacc

SEQ ID NO: 362294 - DNA, 15 bp, Homo sapiens
gtgaccaaggaagac

SEQ ID NO: 362295 - DNA, 15 bp, Homo sapiens
tgtgaccaaggaaga

SEQ ID NO: 362296 - DNA, 15 bp, Homo sapiens
ctgtgaccaaggaag

SEQ ID NO: 362297 - DNA, 15 bp, Homo sapiens
actgtgaccaaggaa

SEQ ID NO: 362298 - DNA, 15 bp, Homo sapiens
aactgtgaccaagga

SEQ ID NO: 362299 - DNA, 15 bp, Homo sapiens
aaactgtgaccaagg

SEQ ID NO: 362300 - DNA, 15 bp, Homo sapiens
gaaactgtgaccaag

SEQ ID NO: 362301 - DNA, 15 bp, Homo sapiens
agaaactgtgaccaa

SEQ ID NO: 362302 - DNA, 15 bp, Homo sapiens
tagaaactgtgacca

SEQ ID NO: 362303 - DNA, 15 bp, Homo sapiens
ttagaaactgtgacc

SEQ ID NO: 362304 - DNA, 15 bp, Homo sapiens
cttagaaactgtgac

SEQ ID NO: 362305 - DNA, 15 bp, Homo sapiens
ccttagaaactgtga

SEQ ID NO: 362306 - DNA, 15 bp, Homo sapiens
gccttagaaactgtg

SEQ ID NO: 362307 - DNA, 15 bp, Homo sapiens
tgccttagaaactgt

SEQ ID NO: 362308 - DNA, 15 bp, Homo sapiens
atgccttagaaactg

SEQ ID NO: 362309 - DNA, 15 bp, Homo sapiens
aatgccttagaaact

SEQ ID NO: 362310 - DNA, 15 bp, Homo sapiens
aaatgccttagaaac

SEQ ID NO: 362311 - DNA, 15 bp, Homo sapiens
gaaatgccttagaaa

SEQ ID NO: 362312 - DNA, 15 bp, Homo sapiens
agaaatgccttagaa

SEQ ID NO: 362313 - DNA, 15 bp, Homo sapiens
aagaaatgccttaga

SEQ ID NO: 362314 - DNA, 15 bp, Homo sapiens
taagaaatgccttag

SEQ ID NO: 362315 - DNA, 15 bp, Homo sapiens
gtaagaaatgcctta

SEQ ID NO: 362316 - DNA, 15 bp, Homo sapiens
tgtaagaaatgcctt

SEQ ID NO: 362317 - DNA, 15 bp, Homo sapiens
ctgtaagaaatgcct

SEQ ID NO: 362318 - DNA, 15 bp, Homo sapiens
gctgtaagaaatgcc

SEQ ID NO: 362319 - DNA, 15 bp, Homo sapiens
agctgtaagaaatgc

SEQ ID NO: 362320 - DNA, 15 bp, Homo sapiens
aagctgtaagaaatg

SEQ ID NO: 362321 - DNA, 15 bp, Homo sapiens
taagctgtaagaaat

SEQ ID NO: 362322 - DNA, 15 bp, Homo sapiens
ataagctgtaagaaa

SEQ ID NO: 362323 - DNA, 15 bp, Homo sapiens
cataagctgtaagaa

SEQ ID NO: 362324 - DNA, 15 bp, Homo sapiens
acataagctgtaaga

SEQ ID NO: 362325 - DNA, 15 bp, Homo sapiens
gacataagctgtaag

SEQ ID NO: 362326 - DNA, 15 bp, Homo sapiens
agacataagctgtaa

SEQ ID NO: 362327 - DNA, 15 bp, Homo sapiens
gagacataagctgta

SEQ ID NO: 362328 - DNA, 15 bp, Homo sapiens
ggagacataagctgt

SEQ ID NO: 362329 - DNA, 15 bp, Homo sapiens
cggagacataagctg

SEQ ID NO: 362330 - DNA, 15 bp, Homo sapiens
ccggagacataagct

SEQ ID NO: 362331 - DNA, 15 bp, Homo sapiens
accggagacataagc

SEQ ID NO: 362332 - DNA, 15 bp, Homo sapiens
aaccggagacataag

SEQ ID NO: 362333 - DNA, 15 bp, Homo sapiens
aaaccggagacataa

SEQ ID NO: 362334 - DNA, 15 bp, Homo sapiens
gaaaccggagacata

SEQ ID NO: 362335 - DNA, 15 bp, Homo sapiens
ggaaaccggagacat

SEQ ID NO: 362336 - DNA, 15 bp, Homo sapiens
gggaaaccggagaca

SEQ ID NO: 362337 - DNA, 15 bp, Homo sapiens
agggaaaccggagac

SEQ ID NO: 362338 - DNA, 15 bp, Homo sapiens
cagggaaaccggaga

SEQ ID NO: 362339 - DNA, 15 bp, Homo sapiens
ccagggaaaccggag

SEQ ID NO: 362340 - DNA, 15 bp, Homo sapiens
tccagggaaaccgga

SEQ ID NO: 362341 - DNA, 15 bp, Homo sapiens
gtccagggaaaccgg

SEQ ID NO: 362342 - DNA, 15 bp, Homo sapiens
agtccagggaaaccg

SEQ ID NO: 362343 - DNA, 15 bp, Homo sapiens
tagtccagggaaacc

SEQ ID NO: 362344 - DNA, 15 bp, Homo sapiens
atagtccagggaaac

SEQ ID NO: 362345 - DNA, 15 bp, Homo sapiens
aatagtccagggaaa

SEQ ID NO: 362346 - DNA, 15 bp, Homo sapiens
caatagtccagggaa

SEQ ID NO: 362347 - DNA, 15 bp, Homo sapiens
gcaatagtccaggga

SEQ ID NO: 362348 - DNA, 15 bp, Homo sapiens
tgcaatagtccaggg

SEQ ID NO: 362349 - DNA, 15 bp, Homo sapiens
ctgcaatagtccagg

SEQ ID NO: 362350 - DNA, 15 bp, Homo sapiens
tctgcaatagtccag

SEQ ID NO: 362351 - DNA, 15 bp, Homo sapiens
ctctgcaatagtcca

SEQ ID NO: 362352 - DNA, 15 bp, Homo sapiens
cctctgcaatagtcc

SEQ ID NO: 362353 - DNA, 15 bp, Homo sapiens
ccctctgcaatagtc

SEQ ID NO: 362354 - DNA, 15 bp, Homo sapiens
tccctctgcaatagt

SEQ ID NO: 362355 - DNA, 15 bp, Homo sapiens
ttccctctgcaatag

SEQ ID NO: 362356 - DNA, 15 bp, Homo sapiens
tttccctctgcaata

SEQ ID NO: 362357 - DNA, 15 bp, Homo sapiens
gtttccctctgcaat

SEQ ID NO: 362358 - DNA, 15 bp, Homo sapiens
ggtttccctctgcaa

SEQ ID NO: 362359 - DNA, 15 bp, Homo sapiens
tggtttccctctgca

SEQ ID NO: 362360 - DNA, 15 bp, Homo sapiens
ttggtttccctctgc

SEQ ID NO: 362361 - DNA, 15 bp, Homo sapiens
attggtttccctctg

SEQ ID NO: 362362 - DNA, 15 bp, Homo sapiens
tattggtttccctct

SEQ ID NO: 362363 - DNA, 15 bp, Homo sapiens
ttattggtttccctc

SEQ ID NO: 362364 - DNA, 15 bp, Homo sapiens
attattggtttccct

SEQ ID NO: 362365 - DNA, 15 bp, Homo sapiens
cattattggtttccc

SEQ ID NO: 362366 - DNA, 15 bp, Homo sapiens
ccattattggtttcc

SEQ ID NO: 362367 - DNA, 15 bp, Homo sapiens
accattattggtttc

SEQ ID NO: 362368 - DNA, 15 bp, Homo sapiens
caccattattggttt

SEQ ID NO: 362369 - DNA, 15 bp, Homo sapiens
tcaccattattggtt

SEQ ID NO: 362370 - DNA, 15 bp, Homo sapiens
gtcaccattattggt

SEQ ID NO: 362371 - DNA, 15 bp, Homo sapiens
tgtcaccattattgg

SEQ ID NO: 362372 - DNA, 15 bp, Homo sapiens
ctgtcaccattattg

SEQ ID NO: 362373 - DNA, 15 bp, Homo sapiens
gctgtcaccattatt

SEQ ID NO: 362374 - DNA, 15 bp, Homo sapiens
ggctgtcaccattat

SEQ ID NO: 362375 - DNA, 15 bp, Homo sapiens
gggctgtcaccatta

SEQ ID NO: 362376 - DNA, 15 bp, Homo sapiens
ggggctgtcaccatt

SEQ ID NO: 362377 - DNA, 15 bp, Homo sapiens
aggggctgtcaccat

SEQ ID NO: 362378 - DNA, 15 bp, Homo sapiens
caggggctgtcacca

SEQ ID NO: 362379 - DNA, 15 bp, Homo sapiens
gcaggggctgtcacc

SEQ ID NO: 362380 - DNA, 15 bp, Homo sapiens
agcaggggctgtcac

SEQ ID NO: 362381 - DNA, 15 bp, Homo sapiens
aagcaggggctgtca

SEQ ID NO: 362382 - DNA, 15 bp, Homo sapiens
aaagcaggggctgtc

SEQ ID NO: 362383 - DNA, 15 bp, Homo sapiens
taaagcaggggctgt

SEQ ID NO: 362384 - DNA, 15 bp, Homo sapiens
ataaagcaggggctg

SEQ ID NO: 362385 - DNA, 15 bp, Homo sapiens
aataaagcaggggct

SEQ ID NO: 362386 - DNA, 15 bp, Homo sapiens
gaataaagcaggggc

SEQ ID NO: 362387 - DNA, 15 bp, Homo sapiens
agaataaagcagggg

SEQ ID NO: 362388 - DNA, 15 bp, Homo sapiens
tagaataaagcaggg

SEQ ID NO: 362389 - DNA, 15 bp, Homo sapiens
ttagaataaagcagg

SEQ ID NO: 362390 - DNA, 15 bp, Homo sapiens
attagaataaagcag

SEQ ID NO: 362391 - DNA, 15 bp, Homo sapiens
cattagaataaagca

SEQ ID NO: 362392 - DNA, 15 bp, Homo sapiens
tcattagaataaagc

SEQ ID NO: 362393 - DNA, 15 bp, Homo sapiens
atcattagaataaag

SEQ ID NO: 362394 - DNA, 15 bp, Homo sapiens
gatcattagaataaa

SEQ ID NO: 362395 - DNA, 15 bp, Homo sapiens
tgatcattagaataa

SEQ ID NO: 362396 - DNA, 15 bp, Homo sapiens
ctgatcattagaata

SEQ ID NO: 362397 - DNA, 15 bp, Homo sapiens
ctctgatcattagaa

SEQ ID NO: 362398 - DNA, 15 bp, Homo sapiens
tctctgatcattaga

SEQ ID NO: 362399 - DNA, 15 bp, Homo sapiens
ctctctgatcattag

SEQ ID NO: 362400 - DNA, 15 bp, Homo sapiens
actctctgatcatta

SEQ ID NO: 362401 - DNA, 15 bp, Homo sapiens
cactctctgatcatt

SEQ ID NO: 362402 - DNA, 15 bp, Homo sapiens
tcactctctgatcat

SEQ ID NO: 362403 - DNA, 15 bp, Homo sapiens
ttcactctctgatca

SEQ ID NO: 362404 - DNA, 15 bp, Homo sapiens
tttcactctctgatc

SEQ ID NO: 362405 - DNA, 15 bp, Homo sapiens
ctttcactctctgat

SEQ ID NO: 362406 - DNA, 15 bp, Homo sapiens
gctttcactctctga

SEQ ID NO: 362407 - DNA, 15 bp, Homo sapiens
agctttcactctctg

SEQ ID NO: 362408 - DNA, 15 bp, Homo sapiens
tagctttcactctct

SEQ ID NO: 362409 - DNA, 15 bp, Homo sapiens
ctagctttcactctc

SEQ ID NO: 362410 - DNA, 15 bp, Homo sapiens
actagctttcactct

SEQ ID NO: 362411 - DNA, 15 bp, Homo sapiens
aactagctttcactc

SEQ ID NO: 362412 - DNA, 15 bp, Homo sapiens
aaactagctttcact

SEQ ID NO: 362413 - DNA, 15 bp, Homo sapiens
gaaactagctttcac

SEQ ID NO: 362414 - DNA, 15 bp, Homo sapiens
agaaactagctttca

SEQ ID NO: 362415 - DNA, 15 bp, Homo sapiens
aagaaactagctttc

SEQ ID NO: 362416 - DNA, 15 bp, Homo sapiens
gaagaaactagcttt

SEQ ID NO: 362417 - DNA, 15 bp, Homo sapiens
ggaagaaactagctt

SEQ ID NO: 362418 - DNA, 15 bp, Homo sapiens
aggaagaaactagct

SEQ ID NO: 362419 - DNA, 15 bp, Homo sapiens
gaggaagaaactagc

SEQ ID NO: 362420 - DNA, 15 bp, Homo sapiens
agaggaagaaactag

SEQ ID NO: 362421 - DNA, 15 bp, Homo sapiens
gagaggaagaaacta

SEQ ID NO: 362422 - DNA, 15 bp, Homo sapiens
ggagaggaagaaact

SEQ ID NO: 362423 - DNA, 15 bp, Homo sapiens
aggagaggaagaaac

SEQ ID NO: 362424 - DNA, 15 bp, Homo sapiens
aaggagaggaagaaa

SEQ ID NO: 362425 - DNA, 15 bp, Homo sapiens
caaggagaggaagaa

SEQ ID NO: 362426 - DNA, 15 bp, Homo sapiens
ccaaggagaggaaga

SEQ ID NO: 362427 - DNA, 15 bp, Homo sapiens
cccaaggagaggaag

SEQ ID NO: 362428 - DNA, 15 bp, Homo sapiens
ccccaaggagaggaa

SEQ ID NO: 362429 - DNA, 15 bp, Homo sapiens
cccccaaggagagga

SEQ ID NO: 362430 - DNA, 15 bp, Homo sapiens
acccccaaggagagg

SEQ ID NO: 362431 - DNA, 15 bp, Homo sapiens
aacccccaaggagag

SEQ ID NO: 362432 - DNA, 15 bp, Homo sapiens
taacccccaaggaga

SEQ ID NO: 362433 - DNA, 15 bp, Homo sapiens
gtaacccccaaggag

SEQ ID NO: 362434 - DNA, 15 bp, Homo sapiens
agtaacccccaagga

SEQ ID NO: 362435 - DNA, 15 bp, Homo sapiens
cagtaacccccaagg

SEQ ID NO: 362436 - DNA, 15 bp, Homo sapiens
acagtaacccccaag

SEQ ID NO: 362437 - DNA, 15 bp, Homo sapiens
tacagtaacccccaa

SEQ ID NO: 362438 - DNA, 15 bp, Homo sapiens
ttacagtaaccccca

SEQ ID NO: 362439 - DNA, 15 bp, Homo sapiens
attacagtaaccccc

SEQ ID NO: 362440 - DNA, 15 bp, Homo sapiens
tattacagtaacccc

SEQ ID NO: 362441 - DNA, 15 bp, Homo sapiens
ttattacagtaaccc

SEQ ID NO: 362442 - DNA, 15 bp, Homo sapiens
gttattacagtaacc

SEQ ID NO: 362443 - DNA, 15 bp, Homo sapiens
ggttattacagtaac

SEQ ID NO: 362444 - DNA, 15 bp, Homo sapiens
gggttattacagtaa

SEQ ID NO: 362445 - DNA, 15 bp, Homo sapiens
agggttattacagta

SEQ ID NO: 362446 - DNA, 15 bp, Homo sapiens
cagggttattacagt

SEQ ID NO: 362447 - DNA, 15 bp, Homo sapiens
tcagggttattacag

SEQ ID NO: 362448 - DNA, 15 bp, Homo sapiens
gtcagggttattaca

SEQ ID NO: 362449 - DNA, 15 bp, Homo sapiens
tgtcagggttattac

SEQ ID NO: 362450 - DNA, 15 bp, Homo sapiens
atgtcagggttatta

SEQ ID NO: 362451 - DNA, 15 bp, Homo sapiens
aatgtcagggttatt

SEQ ID NO: 362452 - DNA, 15 bp, Homo sapiens
caatgtcagggttat

SEQ ID NO: 362453 - DNA, 15 bp, Homo sapiens
acaatgtcagggtta

SEQ ID NO: 362454 - DNA, 15 bp, Homo sapiens
aacaatgtcagggtt

SEQ ID NO: 362455 - DNA, 15 bp, Homo sapiens
caacaatgtcagggt

SEQ ID NO: 362456 - DNA, 15 bp, Homo sapiens
acaacaatgtcaggg

SEQ ID NO: 362457 - DNA, 15 bp, Homo sapiens
cacaacaatgtcagg

SEQ ID NO: 362458 - DNA, 15 bp, Homo sapiens
tcacaacaatgtcag

SEQ ID NO: 362459 - DNA, 15 bp, Homo sapiens
ttcacaacaatgtca

SEQ ID NO: 362460 - DNA, 15 bp, Homo sapiens
attcacaacaatgtc

SEQ ID NO: 362461 - DNA, 15 bp, Homo sapiens
aattcacaacaatgt

SEQ ID NO: 362462 - DNA, 15 bp, Homo sapiens
caattcacaacaatg

SEQ ID NO: 362463 - DNA, 15 bp, Homo sapiens
gcaattcacaacaat

SEQ ID NO: 362464 - DNA, 15 bp, Homo sapiens
tgcaattcacaacaa

SEQ ID NO: 362465 - DNA, 15 bp, Homo sapiens
ttgcaattcacaaca

SEQ ID NO: 362466 - DNA, 15 bp, Homo sapiens
gttgcaattcacaac

SEQ ID NO: 362467 - DNA, 15 bp, Homo sapiens
tgttgcaattcacaa

SEQ ID NO: 362468 - DNA, 15 bp, Homo sapiens
atgttgcaattcaca

SEQ ID NO: 362469 - DNA, 15 bp, Homo sapiens
aatgttgcaattcac

SEQ ID NO: 362470 - DNA, 15 bp, Homo sapiens
caatgttgcaattca

SEQ ID NO: 362471 - DNA, 15 bp, Homo sapiens
ccaatgttgcaattc

SEQ ID NO: 362472 - DNA, 15 bp, Homo sapiens
gccaatgttgcaatt

SEQ ID NO: 362473 - DNA, 15 bp, Homo sapiens
tgccaatgttgcaat

SEQ ID NO: 362474 - DNA, 15 bp, Homo sapiens
atgccaatgttgcaa

SEQ ID NO: 362475 - DNA, 15 bp, Homo sapiens
aatgccaatgttgca

SEQ ID NO: 362476 - DNA, 15 bp, Homo sapiens
aaatgccaatgttgc

SEQ ID NO: 362477 - DNA, 15 bp, Homo sapiens
taaatgccaatgttg

SEQ ID NO: 362478 - DNA, 15 bp, Homo sapiens
ataaatgccaatgtt

SEQ ID NO: 362479 - DNA, 15 bp, Homo sapiens
tataaatgccaatgt

SEQ ID NO: 362480 - DNA, 15 bp, Homo sapiens
gtataaatgccaatg

SEQ ID NO: 362481 - DNA, 15 bp, Homo sapiens
tgtataaatgccaat

SEQ ID NO: 362482 - DNA, 15 bp, Homo sapiens
ttgtataaatgccaa

SEQ ID NO: 362483 - DNA, 15 bp, Homo sapiens
attgtataaatgcca

SEQ ID NO: 362484 - DNA, 15 bp, Homo sapiens
gattgtataaatgcc

SEQ ID NO: 362485 - DNA, 15 bp, Homo sapiens
tgattgtataaatgc

SEQ ID NO: 362486 - DNA, 15 bp, Homo sapiens
ttgattgtataaatg

SEQ ID NO: 362487 - DNA, 15 bp, Homo sapiens
attgattgtataaat

SEQ ID NO: 362488 - DNA, 15 bp, Homo sapiens
cattgattgtataaa

SEQ ID NO: 362489 - DNA, 15 bp, Homo sapiens
gcattgattgtataa

SEQ ID NO: 362490 - DNA, 15 bp, Homo sapiens
tgcattgattgtata

SEQ ID NO: 362491 - DNA, 15 bp, Homo sapiens
ctgcattgattgtat

SEQ ID NO: 362492 - DNA, 15 bp, Homo sapiens
actgcattgattgta

SEQ ID NO: 362493 - DNA, 15 bp, Homo sapiens
cactgcattgattgt

SEQ ID NO: 362494 - DNA, 15 bp, Homo sapiens
ccactgcattgattg

SEQ ID NO: 362495 - DNA, 15 bp, Homo sapiens
accactgcattgatt

SEQ ID NO: 362496 - DNA, 15 bp, Homo sapiens
gaccactgcattgat

SEQ ID NO: 362497 - DNA, 15 bp, Homo sapiens
tgaccactgcattga

SEQ ID NO: 362498 - DNA, 15 bp, Homo sapiens
ttgaccactgcattg

SEQ ID NO: 362499 - DNA, 15 bp, Homo sapiens
attgaccactgcatt

SEQ ID NO: 362500 - DNA, 15 bp, Homo sapiens
aattgaccactgcat

SEQ ID NO: 362501 - DNA, 15 bp, Homo sapiens
gaattgaccactgca

SEQ ID NO: 362502 - DNA, 15 bp, Homo sapiens
agaattgaccactgc

SEQ ID NO: 362503 - DNA, 15 bp, Homo sapiens
tagaattgaccactg

SEQ ID NO: 362504 - DNA, 15 bp, Homo sapiens
ctagaattgaccact

SEQ ID NO: 362505 - DNA, 15 bp, Homo sapiens
tctagaattgaccac

SEQ ID NO: 362506 - DNA, 15 bp, Homo sapiens
ctctagaattgacca

SEQ ID NO: 362507 - DNA, 15 bp, Homo sapiens
tctctagaattgacc

SEQ ID NO: 362508 - DNA, 15 bp, Homo sapiens
atctctagaattgac

SEQ ID NO: 362509 - DNA, 15 bp, Homo sapiens
aatctctagaattga

SEQ ID NO: 362510 - DNA, 15 bp, Homo sapiens
taatctctagaattg

SEQ ID NO: 362511 - DNA, 15 bp, Homo sapiens
ttaatctctagaatt

SEQ ID NO: 362512 - DNA, 15 bp, Homo sapiens
tttaatctctagaat

SEQ ID NO: 362513 - DNA, 15 bp, Homo sapiens
atttaatctctagaa

SEQ ID NO: 362514 - DNA, 15 bp, Homo sapiens
gatttaatctctaga

SEQ ID NO: 362515 - DNA, 15 bp, Homo sapiens
tgatttaatctctag

SEQ ID NO: 362516 - DNA, 15 bp, Homo sapiens
ttgatttaatctcta

SEQ ID NO: 362517 - DNA, 15 bp, Homo sapiens
cttgatttaatctct

SEQ ID NO: 362518 - DNA, 15 bp, Homo sapiens
gcttgatttaatctc

SEQ ID NO: 362519 - DNA, 15 bp, Homo sapiens
tgcttgatttaatct

SEQ ID NO: 362520 - DNA, 15 bp, Homo sapiens
ctgcttgatttaatc

SEQ ID NO: 362521 - DNA, 15 bp, Homo sapiens
tctgcttgatttaat

SEQ ID NO: 362522 - DNA, 15 bp, Homo sapiens
ctctgcttgatttaa

SEQ ID NO: 362523 - DNA, 15 bp, Homo sapiens
actctgcttgattta

SEQ ID NO: 362524 - DNA, 15 bp, Homo sapiens
aactctgcttgattt

SEQ ID NO: 362525 - DNA, 15 bp, Homo sapiens
aaactctgcttgatt

SEQ ID NO: 362526 - DNA, 15 bp, Homo sapiens
caaactctgcttgat

SEQ ID NO: 362527 - DNA, 15 bp, Homo sapiens
tcaaactctgcttga

SEQ ID NO: 362528 - DNA, 15 bp, Homo sapiens
atcaaactctgcttg

SEQ ID NO: 362529 - DNA, 15 bp, Homo sapiens
tatcaaactctgctt

SEQ ID NO: 362530 - DNA, 15 bp, Homo sapiens
atatcaaactctgct

SEQ ID NO: 362531 - DNA, 15 bp, Homo sapiens
catatcaaactctgc

SEQ ID NO: 362532 - DNA, 15 bp, Homo sapiens
acatatcaaactctg

SEQ ID NO: 362533 - DNA, 15 bp, Homo sapiens
tacatatcaaactct

SEQ ID NO: 362534 - DNA, 15 bp, Homo sapiens
gtacatatcaaactc

SEQ ID NO: 362535 - DNA, 15 bp, Homo sapiens
tgtacatatcaaact

SEQ ID NO: 362536 - DNA, 15 bp, Homo sapiens
ctgtacatatcaaac

SEQ ID NO: 362537 - DNA, 15 bp, Homo sapiens
actgtacatatcaaa

SEQ ID NO: 362538 - DNA, 15 bp, Homo sapiens
cactgtacatatcaa

SEQ ID NO: 362539 - DNA, 15 bp, Homo sapiens
ccactgtacatatca

SEQ ID NO: 362540 - DNA, 15 bp, Homo sapiens
tccactgtacatatc

SEQ ID NO: 362541 - DNA, 15 bp, Homo sapiens
gtccactgtacatat

SEQ ID NO: 362542 - DNA, 15 bp, Homo sapiens
tgtccactgtacata

SEQ ID NO: 362543 - DNA, 15 bp, Homo sapiens
atgtccactgtacat

SEQ ID NO: 362544 - DNA, 15 bp, Homo sapiens
aatgtccactgtaca

SEQ ID NO: 362545 - DNA, 15 bp, Homo sapiens
taatgtccactgtac

SEQ ID NO: 362546 - DNA, 15 bp, Homo sapiens
ttaatgtccactgta

SEQ ID NO: 362547 - DNA, 15 bp, Homo sapiens
attaatgtccactgt

SEQ ID NO: 362548 - DNA, 15 bp, Homo sapiens
tattaatgtccactg

SEQ ID NO: 362549 - DNA, 15 bp, Homo sapiens
atattaatgtccact

SEQ ID NO: 362550 - DNA, 15 bp, Homo sapiens
catattaatgtccac

SEQ ID NO: 362551 - DNA, 15 bp, Homo sapiens
gcatattaatgtcca

SEQ ID NO: 362552 - DNA, 15 bp, Homo sapiens
ggcatattaatgtcc

SEQ ID NO: 362553 - DNA, 15 bp, Homo sapiens
aggcatattaatgtc

SEQ ID NO: 362554 - DNA, 15 bp, Homo sapiens
gaggcatattaatgt

SEQ ID NO: 362555 - DNA, 15 bp, Homo sapiens
ggaggcatattaatg

SEQ ID NO: 362556 - DNA, 15 bp, Homo sapiens
gggaggcatattaat

SEQ ID NO: 362557 - DNA, 15 bp, Homo sapiens
ggggaggcatattaa

SEQ ID NO: 362558 - DNA, 15 bp, Homo sapiens
gggggaggcatatta

SEQ ID NO: 362559 - DNA, 15 bp, Homo sapiens
tgggggaggcatatt

SEQ ID NO: 362560 - DNA, 15 bp, Homo sapiens
ttgggggaggcatat

SEQ ID NO: 362561 - DNA, 15 bp, Homo sapiens
tttgggggaggcata

SEQ ID NO: 362562 - DNA, 15 bp, Homo sapiens
ctttgggggaggcat

SEQ ID NO: 362563 - DNA, 15 bp, Homo sapiens
gctttgggggaggca

SEQ ID NO: 362564 - DNA, 15 bp, Homo sapiens
tgctttgggggaggc

SEQ ID NO: 362565 - DNA, 15 bp, Homo sapiens
atgctttgggggagg

SEQ ID NO: 362566 - DNA, 15 bp, Homo sapiens
aatgctttgggggag

SEQ ID NO: 362567 - DNA, 15 bp, Homo sapiens
caatgctttggggga

SEQ ID NO: 362568 - DNA, 15 bp, Homo sapiens
acaatgctttggggg

SEQ ID NO: 362569 - DNA, 15 bp, Homo sapiens
tacaatgctttgggg

SEQ ID NO: 362570 - DNA, 15 bp, Homo sapiens
ttacaatgctttggg

SEQ ID NO: 362571 - DNA, 15 bp, Homo sapiens
cttacaatgctttgg

SEQ ID NO: 362572 - DNA, 15 bp, Homo sapiens
gcttacaatgctttg

SEQ ID NO: 362573 - DNA, 15 bp, Homo sapiens
ggcttacaatgcttt

SEQ ID NO: 362574 - DNA, 15 bp, Homo sapiens
tggcttacaatgctt

SEQ ID NO: 362575 - DNA, 15 bp, Homo sapiens
gtggcttacaatgct

SEQ ID NO: 362576 - DNA, 15 bp, Homo sapiens
tgtggcttacaatgc

SEQ ID NO: 362577 - DNA, 15 bp, Homo sapiens
atgtggcttacaatg

SEQ ID NO: 362578 - DNA, 15 bp, Homo sapiens
catgtggcttacaat

SEQ ID NO: 362579 - DNA, 15 bp, Homo sapiens
ccatgtggcttacaa

SEQ ID NO: 362580 - DNA, 15 bp, Homo sapiens
cccatgtggcttaca

SEQ ID NO: 362581 - DNA, 15 bp, Homo sapiens
ccccatgtggcttac

SEQ ID NO: 362582 - DNA, 15 bp, Homo sapiens
gccccatgtggctta

SEQ ID NO: 362583 - DNA, 15 bp, Homo sapiens
ggccccatgtggctt

SEQ ID NO: 362584 - DNA, 15 bp, Homo sapiens
tggccccatgtggct

SEQ ID NO: 362585 - DNA, 15 bp, Homo sapiens
atggccccatgtggc

SEQ ID NO: 362586 - DNA, 15 bp, Homo sapiens
gatggccccatgtgg

SEQ ID NO: 362587 - DNA, 15 bp, Homo sapiens
ggatggccccatgtg

SEQ ID NO: 362588 - DNA, 15 bp, Homo sapiens
tggatggccccatgt

SEQ ID NO: 362589 - DNA, 15 bp, Homo sapiens
ctggatggccccatg

SEQ ID NO: 362590 - DNA, 15 bp, Homo sapiens
cctggatggccccat

SEQ ID NO: 362591 - DNA, 15 bp, Homo sapiens
gcctggatggcccca

SEQ ID NO: 362592 - DNA, 15 bp, Homo sapiens
tgcctggatggcccc

SEQ ID NO: 362593 - DNA, 15 bp, Homo sapiens
atgcctggatggccc

SEQ ID NO: 362594 - DNA, 15 bp, Homo sapiens
catgcctggatggcc

SEQ ID NO: 362595 - DNA, 15 bp, Homo sapiens
gcatgcctggatggc

SEQ ID NO: 362596 - DNA, 15 bp, Homo sapiens
tgcatgcctggatgg

SEQ ID NO: 362597 - DNA, 15 bp, Homo sapiens
ctgcatgcctggatg

SEQ ID NO: 362598 - DNA, 15 bp, Homo sapiens
actgcatgcctggat

SEQ ID NO: 362599 - DNA, 15 bp, Homo sapiens
cactgcatgcctgga

SEQ ID NO: 362600 - DNA, 15 bp, Homo sapiens
ccactgcatgcctgg

SEQ ID NO: 362601 - DNA, 15 bp, Homo sapiens
cccactgcatgcctg

SEQ ID NO: 362602 - DNA, 15 bp, Homo sapiens
acccactgcatgcct

SEQ ID NO: 362603 - DNA, 15 bp, Homo sapiens
cacccactgcatgcc

SEQ ID NO: 362604 - DNA, 15 bp, Homo sapiens
ccacccactgcatgc

SEQ ID NO: 362605 - DNA, 15 bp, Homo sapiens
tccacccactgcatg

SEQ ID NO: 362606 - DNA, 15 bp, Homo sapiens
gtccacccactgcat

SEQ ID NO: 362607 - DNA, 15 bp, Homo sapiens
tgtccacccactgca

SEQ ID NO: 362608 - DNA, 15 bp, Homo sapiens
ctgtccacccactgc

SEQ ID NO: 362609 - DNA, 15 bp, Homo sapiens
cctgtccacccactg

SEQ ID NO: 362610 - DNA, 15 bp, Homo sapiens
tcctgtccacccact

SEQ ID NO: 362611 - DNA, 15 bp, Homo sapiens
ttcctgtccacccac

SEQ ID NO: 362612 - DNA, 15 bp, Homo sapiens
attcctgtccaccca

SEQ ID NO: 362613 - DNA, 15 bp, Homo sapiens
cattcctgtccaccc

SEQ ID NO: 362614 - DNA, 15 bp, Homo sapiens
ccattcctgtccacc

SEQ ID NO: 362615 - DNA, 15 bp, Homo sapiens
cccattcctgtccac

SEQ ID NO: 362616 - DNA, 15 bp, Homo sapiens
tcccattcctgtcca

SEQ ID NO: 362617 - DNA, 15 bp, Homo sapiens
ctcccattcctgtcc

SEQ ID NO: 362618 - DNA, 15 bp, Homo sapiens
cctcccattcctgtc

SEQ ID NO: 362619 - DNA, 15 bp, Homo sapiens
gcctcccattcctgt

SEQ ID NO: 362620 - DNA, 15 bp, Homo sapiens
tgcctcccattcctg

SEQ ID NO: 362621 - DNA, 15 bp, Homo sapiens
atgcctcccattcct

SEQ ID NO: 362622 - DNA, 15 bp, Homo sapiens
aatgcctcccattcc

SEQ ID NO: 362623 - DNA, 15 bp, Homo sapiens
caatgcctcccattc

SEQ ID NO: 362624 - DNA, 15 bp, Homo sapiens
tcaatgcctcccatt

SEQ ID NO: 362625 - DNA, 15 bp, Homo sapiens
ttcaatgcctcccat

SEQ ID NO: 362626 - DNA, 15 bp, Homo sapiens
gttcaatgcctccca

SEQ ID NO: 362627 - DNA, 15 bp, Homo sapiens
ggttcaatgcctccc

SEQ ID NO: 362628 - DNA, 15 bp, Homo sapiens
tggttcaatgcctcc

SEQ ID NO: 362629 - DNA, 15 bp, Homo sapiens
ctggttcaatgcctc

SEQ ID NO: 362630 - DNA, 15 bp, Homo sapiens
tctggttcaatgcct

SEQ ID NO: 362631 - DNA, 15 bp, Homo sapiens
ttctggttcaatgcc

SEQ ID NO: 362632 - DNA, 15 bp, Homo sapiens
cttctggttcaatgc

SEQ ID NO: 362633 - DNA, 15 bp, Homo sapiens
ccttctggttcaatg

SEQ ID NO: 362634 - DNA, 15 bp, Homo sapiens
tccttctggttcaat

SEQ ID NO: 362635 - DNA, 15 bp, Homo sapiens
ctccttctggttcaa

SEQ ID NO: 362636 - DNA, 15 bp, Homo sapiens
tctccttctggttca

SEQ ID NO: 362637 - DNA, 15 bp, Homo sapiens
ctctccttctggttc

SEQ ID NO: 362638 - DNA, 15 bp, Homo sapiens
cctctccttctggtt

SEQ ID NO: 362639 - DNA, 15 bp, Homo sapiens
gcctctccttctggt

SEQ ID NO: 362640 - DNA, 15 bp, Homo sapiens
tgcctctccttctgg

SEQ ID NO: 362641 - DNA, 15 bp, Homo sapiens
ctgcctctccttctg

SEQ ID NO: 362642 - DNA, 15 bp, Homo sapiens
tctgcctctccttct

SEQ ID NO: 362643 - DNA, 15 bp, Homo sapiens
ctctgcctctccttc

SEQ ID NO: 362644 - DNA, 15 bp, Homo sapiens
tctctgcctctcctt

SEQ ID NO: 362645 - DNA, 15 bp, Homo sapiens
ttctctgcctctcct

SEQ ID NO: 362646 - DNA, 15 bp, Homo sapiens
tttctctgcctctcc

SEQ ID NO: 362647 - DNA, 15 bp, Homo sapiens
ctttctctgcctctc

SEQ ID NO: 362648 - DNA, 15 bp, Homo sapiens
cctttctctgcctct

SEQ ID NO: 362649 - DNA, 15 bp, Homo sapiens
acctttctctgcctc

SEQ ID NO: 362650 - DNA, 15 bp, Homo sapiens
gacctttctctgcct

SEQ ID NO: 362651 - DNA, 15 bp, Homo sapiens
ggacctttctctgcc

SEQ ID NO: 362652 - DNA, 15 bp, Homo sapiens
tggacctttctctgc

SEQ ID NO: 362653 - DNA, 15 bp, Homo sapiens
gtggacctttctctg

SEQ ID NO: 362654 - DNA, 15 bp, Homo sapiens
cgtggacctttctct

SEQ ID NO: 362655 - DNA, 15 bp, Homo sapiens
ccgtggacctttctc

SEQ ID NO: 362656 - DNA, 15 bp, Homo sapiens
gccgtggacctttct

SEQ ID NO: 362657 - DNA, 15 bp, Homo sapiens
agccgtggacctttc

SEQ ID NO: 362658 - DNA, 15 bp, Homo sapiens
cagccgtggaccttt

SEQ ID NO: 362659 - DNA, 15 bp, Homo sapiens
ccagccgtggacctt

SEQ ID NO: 362660 - DNA, 15 bp, Homo sapiens
gccagccgtggacct

SEQ ID NO: 362661 - DNA, 15 bp, Homo sapiens
ggccagccgtggacc

SEQ ID NO: 362662 - DNA, 15 bp, Homo sapiens
aggccagccgtggac

SEQ ID NO: 362663 - DNA, 15 bp, Homo sapiens
gaggccagccgtgga

SEQ ID NO: 362664 - DNA, 15 bp, Homo sapiens
ggaggccagccgtgg

SEQ ID NO: 362665 - DNA, 15 bp, Homo sapiens
aggaggccagccgtg

SEQ ID NO: 362666 - DNA, 15 bp, Homo sapiens
caggaggccagccgt

SEQ ID NO: 362667 - DNA, 15 bp, Homo sapiens
ccaggaggccagccg

SEQ ID NO: 362668 - DNA, 15 bp, Homo sapiens
gccaggaggccagcc

SEQ ID NO: 362669 - DNA, 15 bp, Homo sapiens
agccaggaggccagc

SEQ ID NO: 362670 - DNA, 15 bp, Homo sapiens
aagccaggaggccag

SEQ ID NO: 362671 - DNA, 15 bp, Homo sapiens
gaagccaggaggcca

SEQ ID NO: 362672 - DNA, 15 bp, Homo sapiens
tgaagccaggaggcc

SEQ ID NO: 362673 - DNA, 15 bp, Homo sapiens
gtgaagccaggaggc

SEQ ID NO: 362674 - DNA, 15 bp, Homo sapiens
agtgaagccaggagg

SEQ ID NO: 362675 - DNA, 15 bp, Homo sapiens
tagtgaagccaggag

SEQ ID NO: 362676 - DNA, 15 bp, Homo sapiens
ctagtgaagccagga

SEQ ID NO: 362677 - DNA, 15 bp, Homo sapiens
gctagtgaagccagg

SEQ ID NO: 362678 - DNA, 15 bp, Homo sapiens
agctagtgaagccag

SEQ ID NO: 362679 - DNA, 15 bp, Homo sapiens
gagctagtgaagcca

SEQ ID NO: 362680 - DNA, 15 bp, Homo sapiens
tgagctagtgaagcc

SEQ ID NO: 362681 - DNA, 15 bp, Homo sapiens
ctgagctagtgaagc

SEQ ID NO: 362682 - DNA, 15 bp, Homo sapiens
actgagctagtgaag

SEQ ID NO: 362683 - DNA, 15 bp, Homo sapiens
cactgagctagtgaa

SEQ ID NO: 362684 - DNA, 15 bp, Homo sapiens
tcactgagctagtga

SEQ ID NO: 362685 - DNA, 15 bp, Homo sapiens
ttcactgagctagtg

SEQ ID NO: 362686 - DNA, 15 bp, Homo sapiens
attcactgagctagt

SEQ ID NO: 362687 - DNA, 15 bp, Homo sapiens
gattcactgagctag

SEQ ID NO: 362688 - DNA, 15 bp, Homo sapiens
tgattcactgagcta

SEQ ID NO: 362689 - DNA, 15 bp, Homo sapiens
ttgattcactgagct

SEQ ID NO: 362690 - DNA, 15 bp, Homo sapiens
tttgattcactgagc

SEQ ID NO: 362691 - DNA, 15 bp, Homo sapiens
ctttgattcactgag

SEQ ID NO: 362692 - DNA, 15 bp, Homo sapiens
cctttgattcactga

SEQ ID NO: 362693 - DNA, 15 bp, Homo sapiens
ccctttgattcactg

SEQ ID NO: 362694 - DNA, 15 bp, Homo sapiens
gccctttgattcact

SEQ ID NO: 362695 - DNA, 15 bp, Homo sapiens
ggccctttgattcac

SEQ ID NO: 362696 - DNA, 15 bp, Homo sapiens
tggccctttgattca

SEQ ID NO: 362697 - DNA, 15 bp, Homo sapiens
ctggccctttgattc

SEQ ID NO: 362698 - DNA, 15 bp, Homo sapiens
gctggccctttgatt

SEQ ID NO: 362699 - DNA, 15 bp, Homo sapiens
tgctggccctttgat

SEQ ID NO: 362700 - DNA, 15 bp, Homo sapiens
ctgctggccctttga

SEQ ID NO: 362701 - DNA, 15 bp, Homo sapiens
actgctggccctttg

SEQ ID NO: 362702 - DNA, 15 bp, Homo sapiens
cactgctggcccttt

SEQ ID NO: 362703 - DNA, 15 bp, Homo sapiens
tcactgctggccctt

SEQ ID NO: 362704 - DNA, 15 bp, Homo sapiens
gtcactgctggccct

SEQ ID NO: 362705 - DNA, 15 bp, Homo sapiens
agtcactgctggccc

SEQ ID NO: 362706 - DNA, 15 bp, Homo sapiens
tagtcactgctggcc

SEQ ID NO: 362707 - DNA, 15 bp, Homo sapiens
ttagtcactgctggc

SEQ ID NO: 362708 - DNA, 15 bp, Homo sapiens
tttagtcactgctgg

SEQ ID NO: 362709 - DNA, 15 bp, Homo sapiens
gtttagtcactgctg

SEQ ID NO: 362710 - DNA, 15 bp, Homo sapiens
tgtttagtcactgct

SEQ ID NO: 362711 - DNA, 15 bp, Homo sapiens
atgtttagtcactgc

SEQ ID NO: 362712 - DNA, 15 bp, Homo sapiens
aatgtttagtcactg

SEQ ID NO: 362713 - DNA, 15 bp, Homo sapiens
aaatgtttagtcact

SEQ ID NO: 362714 - DNA, 15 bp, Homo sapiens
caaatgtttagtcac

SEQ ID NO: 362715 - DNA, 15 bp, Homo sapiens
acaaatgtttagtca

SEQ ID NO: 362716 - DNA, 15 bp, Homo sapiens
tacaaatgtttagtc

SEQ ID NO: 362717 - DNA, 15 bp, Homo sapiens
atacaaatgtttagt

SEQ ID NO: 362718 - DNA, 15 bp, Homo sapiens
aatacaaatgtttag

SEQ ID NO: 362719 - DNA, 15 bp, Homo sapiens
aaatacaaatgttta

SEQ ID NO: 362720 - DNA, 15 bp, Homo sapiens
ggaaatacaaatgtt

SEQ ID NO: 362721 - DNA, 15 bp, Homo sapiens
aggaaatacaaatgt

SEQ ID NO: 362722 - DNA, 15 bp, Homo sapiens
caggaaatacaaatg

SEQ ID NO: 362723 - DNA, 15 bp, Homo sapiens
ccaggaaatacaaat

SEQ ID NO: 362724 - DNA, 15 bp, Homo sapiens
cccaggaaatacaaa

SEQ ID NO: 362725 - DNA, 15 bp, Homo sapiens
tcccaggaaatacaa

SEQ ID NO: 362726 - DNA, 15 bp, Homo sapiens
ttcccaggaaataca

SEQ ID NO: 362727 - DNA, 15 bp, Homo sapiens
cttcccaggaaatac

SEQ ID NO: 362728 - DNA, 15 bp, Homo sapiens
acttcccaggaaata

SEQ ID NO: 362729 - DNA, 15 bp, Homo sapiens
aacttcccaggaaat

SEQ ID NO: 362730 - DNA, 15 bp, Homo sapiens
caacttcccaggaaa

SEQ ID NO: 362731 - DNA, 15 bp, Homo sapiens
ccaacttcccaggaa

SEQ ID NO: 362732 - DNA, 15 bp, Homo sapiens
cccaacttcccagga

SEQ ID NO: 362733 - DNA, 15 bp, Homo sapiens
ccccaacttcccagg

SEQ ID NO: 362734 - DNA, 15 bp, Homo sapiens
accccaacttcccag

SEQ ID NO: 362735 - DNA, 15 bp, Homo sapiens
aaccccaacttccca

SEQ ID NO: 362736 - DNA, 15 bp, Homo sapiens
gaaccccaacttccc

SEQ ID NO: 362737 - DNA, 15 bp, Homo sapiens
agaaccccaacttcc

SEQ ID NO: 362738 - DNA, 15 bp, Homo sapiens
gagaaccccaacttc

SEQ ID NO: 362739 - DNA, 15 bp, Homo sapiens
ggagaaccccaactt

SEQ ID NO: 362740 - DNA, 15 bp, Homo sapiens
aggagaaccccaact

SEQ ID NO: 362741 - DNA, 15 bp, Homo sapiens
gaggagaaccccaac

SEQ ID NO: 362742 - DNA, 15 bp, Homo sapiens
agaggagaaccccaa

SEQ ID NO: 362743 - DNA, 15 bp, Homo sapiens
tagaggagaacccca

SEQ ID NO: 362744 - DNA, 15 bp, Homo sapiens
ttagaggagaacccc

SEQ ID NO: 362745 - DNA, 15 bp, Homo sapiens
attagaggagaaccc

SEQ ID NO: 362746 - DNA, 15 bp, Homo sapiens
tattagaggagaacc

SEQ ID NO: 362747 - DNA, 15 bp, Homo sapiens
ctattagaggagaac

SEQ ID NO: 362748 - DNA, 15 bp, Homo sapiens
tctattagaggagaa

SEQ ID NO: 362749 - DNA, 15 bp, Homo sapiens
ctctattagaggaga

SEQ ID NO: 362750 - DNA, 15 bp, Homo sapiens
actctattagaggag

SEQ ID NO: 362751 - DNA, 15 bp, Homo sapiens
cactctattagagga

SEQ ID NO: 362752 - DNA, 15 bp, Homo sapiens
tcactctattagagg

SEQ ID NO: 362753 - DNA, 15 bp, Homo sapiens
gtcactctattagag

SEQ ID NO: 362754 - DNA, 15 bp, Homo sapiens
agtcactctattaga

SEQ ID NO: 362755 - DNA, 15 bp, Homo sapiens
cagtcactctattag

SEQ ID NO: 362756 - DNA, 15 bp, Homo sapiens
acagtcactctatta

SEQ ID NO: 362757 - DNA, 15 bp, Homo sapiens
cacagtcactctatt

SEQ ID NO: 362758 - DNA, 15 bp, Homo sapiens
acacagtcactctat

SEQ ID NO: 362759 - DNA, 15 bp, Homo sapiens
aacacagtcactcta

SEQ ID NO: 362760 - DNA, 15 bp, Homo sapiens
gaacacagtcactct

SEQ ID NO: 362761 - DNA, 15 bp, Homo sapiens
agaacacagtcactc

SEQ ID NO: 362762 - DNA, 15 bp, Homo sapiens
aagaacacagtcact

SEQ ID NO: 362763 - DNA, 15 bp, Homo sapiens
aaagaacacagtcac

SEQ ID NO: 362764 - DNA, 15 bp, Homo sapiens
gaaagaacacagtca

SEQ ID NO: 362765 - DNA, 15 bp, Homo sapiens
tgaaagaacacagtc

SEQ ID NO: 362766 - DNA, 15 bp, Homo sapiens
atgaaagaacacagt

SEQ ID NO: 362767 - DNA, 15 bp, Homo sapiens
aatgaaagaacacag

SEQ ID NO: 362768 - DNA, 15 bp, Homo sapiens
aaatgaaagaacaca

SEQ ID NO: 362769 - DNA, 15 bp, Homo sapiens
caaatgaaagaacac

SEQ ID NO: 362770 - DNA, 15 bp, Homo sapiens
acaaatgaaagaaca

SEQ ID NO: 362771 - DNA, 15 bp, Homo sapiens
gacaaatgaaagaac

SEQ ID NO: 362772 - DNA, 15 bp, Homo sapiens
agacaaatgaaagaa

SEQ ID NO: 362773 - DNA, 15 bp, Homo sapiens
gagacaaatgaaaga

SEQ ID NO: 362774 - DNA, 15 bp, Homo sapiens
ggagacaaatgaaag

SEQ ID NO: 362775 - DNA, 15 bp, Homo sapiens
aggagacaaatgaaa

SEQ ID NO: 362776 - DNA, 15 bp, Homo sapiens
aaggagacaaatgaa

SEQ ID NO: 362777 - DNA, 15 bp, Homo sapiens
aaaggagacaaatga

SEQ ID NO: 362778 - DNA, 15 bp, Homo sapiens
caaaggagacaaatg

SEQ ID NO: 362779 - DNA, 15 bp, Homo sapiens
acaaaggagacaaat

SEQ ID NO: 362780 - DNA, 15 bp, Homo sapiens
tacaaaggagacaaa

SEQ ID NO: 362781 - DNA, 15 bp, Homo sapiens
ctacaaaggagacaa

SEQ ID NO: 362782 - DNA, 15 bp, Homo sapiens
tctacaaaggagaca

SEQ ID NO: 362783 - DNA, 15 bp, Homo sapiens
atctacaaaggagac

SEQ ID NO: 362784 - DNA, 15 bp, Homo sapiens
tatctacaaaggaga

SEQ ID NO: 362785 - DNA, 15 bp, Homo sapiens
ctatctacaaaggag

SEQ ID NO: 362786 - DNA, 15 bp, Homo sapiens
tctatctacaaagga

SEQ ID NO: 362787 - DNA, 15 bp, Homo sapiens
ctctatctacaaagg

SEQ ID NO: 362788 - DNA, 15 bp, Homo sapiens
cctctatctacaaag

SEQ ID NO: 362789 - DNA, 15 bp, Homo sapiens
acctctatctacaaa

SEQ ID NO: 362790 - DNA, 15 bp, Homo sapiens
aacctctatctacaa

SEQ ID NO: 362791 - DNA, 15 bp, Homo sapiens
aaacctctatctaca

SEQ ID NO: 362792 - DNA, 15 bp, Homo sapiens
caaacctctatctac

SEQ ID NO: 362793 - DNA, 15 bp, Homo sapiens
ccaaacctctatcta

SEQ ID NO: 362794 - DNA, 15 bp, Homo sapiens
tccaaacctctatct

SEQ ID NO: 362795 - DNA, 15 bp, Homo sapiens
ctccaaacctctatc

SEQ ID NO: 362796 - DNA, 15 bp, Homo sapiens
actccaaacctctat

SEQ ID NO: 362797 - DNA, 15 bp, Homo sapiens
aactccaaacctcta

SEQ ID NO: 362798 - DNA, 15 bp, Homo sapiens
caactccaaacctct

SEQ ID NO: 362799 - DNA, 15 bp, Homo sapiens
ccaactccaaacctc

SEQ ID NO: 362800 - DNA, 15 bp, Homo sapiens
tccaactccaaacct

SEQ ID NO: 362801 - DNA, 15 bp, Homo sapiens
ctccaactccaaacc

SEQ ID NO: 362802 - DNA, 15 bp, Homo sapiens
cctccaactccaaac

SEQ ID NO: 362803 - DNA, 15 bp, Homo sapiens
atacatgaagaaaga

SEQ ID NO: 362804 - DNA, 15 bp, Homo sapiens
tatacatgaagaaag

SEQ ID NO: 362805 - DNA, 15 bp, Homo sapiens
atatacatgaagaaa

SEQ ID NO: 362806 - DNA, 15 bp, Homo sapiens
catatacatgaagaa

SEQ ID NO: 362807 - DNA, 15 bp, Homo sapiens
tcatatacatgaaga

SEQ ID NO: 362808 - DNA, 15 bp, Homo sapiens
ttcatatacatgaag

SEQ ID NO: 362809 - DNA, 15 bp, Homo sapiens
attcatatacatgaa

SEQ ID NO: 362810 - DNA, 15 bp, Homo sapiens
cattcatatacatga

SEQ ID NO: 362811 - DNA, 15 bp, Homo sapiens
tcattcatatacatg

SEQ ID NO: 362812 - DNA, 15 bp, Homo sapiens
ctcattcatatacat

SEQ ID NO: 362813 - DNA, 15 bp, Homo sapiens
gctcattcatataca

SEQ ID NO: 362814 - DNA, 15 bp, Homo sapiens
agctcattcatatac

SEQ ID NO: 362815 - DNA, 15 bp, Homo sapiens
cagctcattcatata

SEQ ID NO: 362816 - DNA, 15 bp, Homo sapiens
acagctcattcatat

SEQ ID NO: 362817 - DNA, 15 bp, Homo sapiens
gacagctcattcata

SEQ ID NO: 362818 - DNA, 15 bp, Homo sapiens
tgacagctcattcat

SEQ ID NO: 362819 - DNA, 15 bp, Homo sapiens
atgacagctcattca

SEQ ID NO: 362820 - DNA, 15 bp, Homo sapiens
gatgacagctcattc

SEQ ID NO: 362821 - DNA, 15 bp, Homo sapiens
agatgacagctcatt

SEQ ID NO: 362822 - DNA, 15 bp, Homo sapiens
aagatgacagctcat

SEQ ID NO: 362823 - DNA, 15 bp, Homo sapiens
aaagatgacagctca

SEQ ID NO: 362824 - DNA, 15 bp, Homo sapiens
caaagatgacagctc

SEQ ID NO: 362825 - DNA, 15 bp, Homo sapiens
gcaaagatgacagct

SEQ ID NO: 362826 - DNA, 15 bp, Homo sapiens
tgcaaagatgacagc

SEQ ID NO: 362827 - DNA, 15 bp, Homo sapiens
ctgcaaagatgacag

SEQ ID NO: 362828 - DNA, 15 bp, Homo sapiens
cctgcaaagatgaca

SEQ ID NO: 362829 - DNA, 15 bp, Homo sapiens
acctgcaaagatgac

SEQ ID NO: 362830 - DNA, 15 bp, Homo sapiens
gacctgcaaagatga

SEQ ID NO: 362831 - DNA, 15 bp, Homo sapiens
tgacctgcaaagatg

SEQ ID NO: 362832 - DNA, 15 bp, Homo sapiens
atgacctgcaaagat

SEQ ID NO: 362833 - DNA, 15 bp, Homo sapiens
aatgacctgcaaaga

SEQ ID NO: 362834 - DNA, 15 bp, Homo sapiens
aaatgacctgcaaag

SEQ ID NO: 362835 - DNA, 15 bp, Homo sapiens
gaaatgacctgcaaa

SEQ ID NO: 362836 - DNA, 15 bp, Homo sapiens
tgaaatgacctgcaa

SEQ ID NO: 362837 - DNA, 15 bp, Homo sapiens
ttgaaatgacctgca

SEQ ID NO: 362838 - DNA, 15 bp, Homo sapiens
tttgaaatgacctgc

SEQ ID NO: 362839 - DNA, 15 bp, Homo sapiens
gtttgaaatgacctg

SEQ ID NO: 362840 - DNA, 15 bp, Homo sapiens
ggtttgaaatgacct

SEQ ID NO: 362841 - DNA, 15 bp, Homo sapiens
gggtttgaaatgacc

SEQ ID NO: 362842 - DNA, 15 bp, Homo sapiens
agggtttgaaatgac

SEQ ID NO: 362843 - DNA, 15 bp, Homo sapiens
gagggtttgaaatga

SEQ ID NO: 362844 - DNA, 15 bp, Homo sapiens
ggagggtttgaaatg

SEQ ID NO: 362845 - DNA, 15 bp, Homo sapiens
tggagggtttgaaat

SEQ ID NO: 362846 - DNA, 15 bp, Homo sapiens
ttggagggtttgaaa

SEQ ID NO: 362847 - DNA, 15 bp, Homo sapiens
tttggagggtttgaa

SEQ ID NO: 362848 - DNA, 15 bp, Homo sapiens
ttttggagggtttga

SEQ ID NO: 362849 - DNA, 15 bp, Homo sapiens
attttggagggtttg

SEQ ID NO: 362850 - DNA, 15 bp, Homo sapiens
aattttggagggttt

SEQ ID NO: 362851 - DNA, 15 bp, Homo sapiens
aaattttggagggtt

SEQ ID NO: 362852 - DNA, 15 bp, Homo sapiens
taaattttggagggt

SEQ ID NO: 362853 - DNA, 15 bp, Homo sapiens
ttaaattttggaggg

SEQ ID NO: 362854 - DNA, 15 bp, Homo sapiens
gttaaattttggagg

SEQ ID NO: 362855 - DNA, 15 bp, Homo sapiens
tgttaaattttggag

SEQ ID NO: 362856 - DNA, 15 bp, Homo sapiens
atgttaaattttgga

SEQ ID NO: 362857 - DNA, 15 bp, Homo sapiens
tatgttaaattttgg

SEQ ID NO: 362858 - DNA, 15 bp, Homo sapiens
gtatgttaaattttg

SEQ ID NO: 362859 - DNA, 15 bp, Homo sapiens
agtatgttaaatttt

SEQ ID NO: 362860 - DNA, 15 bp, Homo sapiens
gagtatgttaaattt

SEQ ID NO: 362861 - DNA, 15 bp, Homo sapiens
tgagtatgttaaatt

SEQ ID NO: 362862 - DNA, 15 bp, Homo sapiens
ttgagtatgttaaat

SEQ ID NO: 362863 - DNA, 15 bp, Homo sapiens
cttgagtatgttaaa

SEQ ID NO: 362864 - DNA, 15 bp, Homo sapiens
gcttgagtatgttaa

SEQ ID NO: 362865 - DNA, 15 bp, Homo sapiens
tgcttgagtatgtta

SEQ ID NO: 362866 - DNA, 15 bp, Homo sapiens
gtgcttgagtatgtt

SEQ ID NO: 362867 - DNA, 15 bp, Homo sapiens
tgtgcttgagtatgt

SEQ ID NO: 362868 - DNA, 15 bp, Homo sapiens
ttgtgcttgagtatg

SEQ ID NO: 362869 - DNA, 15 bp, Homo sapiens
attgtgcttgagtat

SEQ ID NO: 362870 - DNA, 15 bp, Homo sapiens
tattgtgcttgagta

SEQ ID NO: 362871 - DNA, 15 bp, Homo sapiens
ctattgtgcttgagt

SEQ ID NO: 362872 - DNA, 15 bp, Homo sapiens
tctattgtgcttgag

SEQ ID NO: 362873 - DNA, 15 bp, Homo sapiens
atctattgtgcttga

SEQ ID NO: 362874 - DNA, 15 bp, Homo sapiens
aatctattgtgcttg

SEQ ID NO: 362875 - DNA, 15 bp, Homo sapiens
aaatctattgtgctt

SEQ ID NO: 362876 - DNA, 15 bp, Homo sapiens
aaaatctattgtgct

SEQ ID NO: 362877 - DNA, 15 bp, Homo sapiens
gaaaatctattgtgc

SEQ ID NO: 362878 - DNA, 15 bp, Homo sapiens
tgaaaatctattgtg

SEQ ID NO: 362879 - DNA, 15 bp, Homo sapiens
gtgaaaatctattgt

SEQ ID NO: 362880 - DNA, 15 bp, Homo sapiens
tgtgaaaatctattg

SEQ ID NO: 362881 - DNA, 15 bp, Homo sapiens
ttgtgaaaatctatt

SEQ ID NO: 362882 - DNA, 15 bp, Homo sapiens
tttgtgaaaatctat

SEQ ID NO: 362883 - DNA, 15 bp, Homo sapiens
ttttgtgaaaatcta

SEQ ID NO: 362884 - DNA, 15 bp, Homo sapiens
attttgtgaaaatct

SEQ ID NO: 362885 - DNA, 15 bp, Homo sapiens
cattttgtgaaaatc

SEQ ID NO: 362886 - DNA, 15 bp, Homo sapiens
ccattttgtgaaaat

SEQ ID NO: 362887 - DNA, 15 bp, Homo sapiens
cccattttgtgaaaa

SEQ ID NO: 362888 - DNA, 15 bp, Homo sapiens
gcccattttgtgaaa

SEQ ID NO: 362889 - DNA, 15 bp, Homo sapiens
ggcccattttgtgaa

SEQ ID NO: 362890 - DNA, 15 bp, Homo sapiens
aggcccattttgtga

SEQ ID NO: 362891 - DNA, 15 bp, Homo sapiens
aaggcccattttgtg

SEQ ID NO: 362892 - DNA, 15 bp, Homo sapiens
gaaggcccattttgt

SEQ ID NO: 362893 - DNA, 15 bp, Homo sapiens
tgaaggcccattttg

SEQ ID NO: 362894 - DNA, 15 bp, Homo sapiens
gtgaaggcccatttt

SEQ ID NO: 362895 - DNA, 15 bp, Homo sapiens
ggtgaaggcccattt

SEQ ID NO: 362896 - DNA, 15 bp, Homo sapiens
aggtgaaggcccatt

SEQ ID NO: 362897 - DNA, 15 bp, Homo sapiens
taggtgaaggcccat

SEQ ID NO: 362898 - DNA, 15 bp, Homo sapiens
ataggtgaaggccca

SEQ ID NO: 362899 - DNA, 15 bp, Homo sapiens
cataggtgaaggccc

SEQ ID NO: 362900 - DNA, 15 bp, Homo sapiens
acataggtgaaggcc

SEQ ID NO: 362901 - DNA, 15 bp, Homo sapiens
gacataggtgaaggc

SEQ ID NO: 362902 - DNA, 15 bp, Homo sapiens
agacataggtgaagg

SEQ ID NO: 362903 - DNA, 15 bp, Homo sapiens
aagacataggtgaag

SEQ ID NO: 362904 - DNA, 15 bp, Homo sapiens
gaagacataggtgaa

SEQ ID NO: 362905 - DNA, 15 bp, Homo sapiens
tgaagacataggtga

SEQ ID NO: 362906 - DNA, 15 bp, Homo sapiens
gtgaagacataggtg

SEQ ID NO: 362907 - DNA, 15 bp, Homo sapiens
tgtgaagacataggt

SEQ ID NO: 362908 - DNA, 15 bp, Homo sapiens
ctgtgaagacatagg

SEQ ID NO: 362909 - DNA, 15 bp, Homo sapiens
tctgtgaagacatag

SEQ ID NO: 362910 - DNA, 15 bp, Homo sapiens
ctctgtgaagacata

SEQ ID NO: 362911 - DNA, 15 bp, Homo sapiens
actctgtgaagacat

SEQ ID NO: 362912 - DNA, 15 bp, Homo sapiens
aactctgtgaagaca

SEQ ID NO: 362913 - DNA, 15 bp, Homo sapiens
aaactctgtgaagac

SEQ ID NO: 362914 - DNA, 15 bp, Homo sapiens
taaactctgtgaaga

SEQ ID NO: 362915 - DNA, 15 bp, Homo sapiens
ataaactctgtgaag

SEQ ID NO: 362916 - DNA, 15 bp, Homo sapiens
aataaactctgtgaa

SEQ ID NO: 362917 - DNA, 15 bp, Homo sapiens
caataaactctgtga

SEQ ID NO: 362918 - DNA, 15 bp, Homo sapiens
ccaataaactctgtg

SEQ ID NO: 362919 - DNA, 15 bp, Homo sapiens
accaataaactctgt

SEQ ID NO: 362920 - DNA, 15 bp, Homo sapiens
aaccaataaactctg

SEQ ID NO: 362921 - DNA, 15 bp, Homo sapiens
taaccaataaactct

SEQ ID NO: 362922 - DNA, 15 bp, Homo sapiens
ttaaccaataaactc

SEQ ID NO: 362923 - DNA, 15 bp, Homo sapiens
tttaaccaataaact

SEQ ID NO: 362924 - DNA, 15 bp, Homo sapiens
gtttaaccaataaac

SEQ ID NO: 362925 - DNA, 15 bp, Homo sapiens
tgtttaaccaataaa

SEQ ID NO: 362926 - DNA, 15 bp, Homo sapiens
ctgtttaaccaataa

SEQ ID NO: 362927 - DNA, 15 bp, Homo sapiens
actgtttaaccaata

SEQ ID NO: 362928 - DNA, 15 bp, Homo sapiens
tactgtttaaccaat

SEQ ID NO: 362929 - DNA, 15 bp, Homo sapiens
gtactgtttaaccaa

SEQ ID NO: 362930 - DNA, 15 bp, Homo sapiens
ggtactgtttaacca

SEQ ID NO: 362931 - DNA, 15 bp, Homo sapiens
gggtactgtttaacc

SEQ ID NO: 362932 - DNA, 15 bp, Homo sapiens
agggtactgtttaac

SEQ ID NO: 362933 - DNA, 15 bp, Homo sapiens
cagggtactgtttaa

SEQ ID NO: 362934 - DNA, 15 bp, Homo sapiens
gcagggtactgttta

SEQ ID NO: 362935 - DNA, 15 bp, Homo sapiens
ggcagggtactgttt

SEQ ID NO: 362936 - DNA, 15 bp, Homo sapiens
aggcagggtactgtt

SEQ ID NO: 362937 - DNA, 15 bp, Homo sapiens
taggcagggtactgt

SEQ ID NO: 362938 - DNA, 15 bp, Homo sapiens
ataggcagggtactg

SEQ ID NO: 362939 - DNA, 15 bp, Homo sapiens
tataggcagggtact

SEQ ID NO: 362940 - DNA, 15 bp, Homo sapiens
ctataggcagggtac

SEQ ID NO: 362941 - DNA, 15 bp, Homo sapiens
cctataggcagggta

SEQ ID NO: 362942 - DNA, 15 bp, Homo sapiens
ccctataggcagggt

SEQ ID NO: 362943 - DNA, 15 bp, Homo sapiens
gccctataggcaggg

SEQ ID NO: 362944 - DNA, 15 bp, Homo sapiens
ggccctataggcagg

SEQ ID NO: 362945 - DNA, 15 bp, Homo sapiens
tggccctataggcag

SEQ ID NO: 362946 - DNA, 15 bp, Homo sapiens
ctggccctataggca

SEQ ID NO: 362947 - DNA, 15 bp, Homo sapiens
gctggccctataggc

SEQ ID NO: 362948 - DNA, 15 bp, Homo sapiens
ggctggccctatagg

SEQ ID NO: 362949 - DNA, 15 bp, Homo sapiens
gggctggccctatag

SEQ ID NO: 362950 - DNA, 15 bp, Homo sapiens
tgggctggccctata

SEQ ID NO: 362951 - DNA, 15 bp, Homo sapiens
ctgggctggccctat

SEQ ID NO: 362952 - DNA, 15 bp, Homo sapiens
tctgggctggcccta

SEQ ID NO: 362953 - DNA, 15 bp, Homo sapiens
ctctgggctggccct

SEQ ID NO: 362954 - DNA, 15 bp, Homo sapiens
tctctgggctggccc

SEQ ID NO: 362955 - DNA, 15 bp, Homo sapiens
ttctctgggctggcc

SEQ ID NO: 362956 - DNA, 15 bp, Homo sapiens
tttctctgggctggc

SEQ ID NO: 362957 - DNA, 15 bp, Homo sapiens
gtttctctgggctgg

SEQ ID NO: 362958 - DNA, 15 bp, Homo sapiens
tgtttctctgggctg

SEQ ID NO: 362959 - DNA, 15 bp, Homo sapiens
atgtttctctgggct

SEQ ID NO: 362960 - DNA, 15 bp, Homo sapiens
tatgtttctctgggc

SEQ ID NO: 362961 - DNA, 15 bp, Homo sapiens
ttatgtttctctggg

SEQ ID NO: 362962 - DNA, 15 bp, Homo sapiens
cttatgtttctctgg

SEQ ID NO: 362963 - DNA, 15 bp, Homo sapiens
gcttatgtttctctg

SEQ ID NO: 362964 - DNA, 15 bp, Homo sapiens
cgcttatgtttctct

SEQ ID NO: 362965 - DNA, 15 bp, Homo sapiens
tcgcttatgtttctc

SEQ ID NO: 362966 - DNA, 15 bp, Homo sapiens
atcgcttatgtttct

SEQ ID NO: 362967 - DNA, 15 bp, Homo sapiens
aatcgcttatgtttc

SEQ ID NO: 362968 - DNA, 15 bp, Homo sapiens
aaatcgcttatgttt

SEQ ID NO: 362969 - DNA, 15 bp, Homo sapiens
gaaatcgcttatgtt

SEQ ID NO: 362970 - DNA, 15 bp, Homo sapiens
agaaatcgcttatgt

SEQ ID NO: 362971 - DNA, 15 bp, Homo sapiens
tagaaatcgcttatg

SEQ ID NO: 362972 - DNA, 15 bp, Homo sapiens
atagaaatcgcttat

SEQ ID NO: 362973 - DNA, 15 bp, Homo sapiens
catagaaatcgctta

SEQ ID NO: 362974 - DNA, 15 bp, Homo sapiens
acatagaaatcgctt

SEQ ID NO: 362975 - DNA, 15 bp, Homo sapiens
tacatagaaatcgct

SEQ ID NO: 362976 - DNA, 15 bp, Homo sapiens
atacatagaaatcgc

SEQ ID NO: 362977 - DNA, 15 bp, Homo sapiens
catacatagaaatcg

SEQ ID NO: 362978 - DNA, 15 bp, Homo sapiens
acatacatagaaatc

SEQ ID NO: 362979 - DNA, 15 bp, Homo sapiens
gacatacatagaaat

SEQ ID NO: 362980 - DNA, 15 bp, Homo sapiens
tgacatacatagaaa

SEQ ID NO: 362981 - DNA, 15 bp, Homo sapiens
atgacatacatagaa

SEQ ID NO: 362982 - DNA, 15 bp, Homo sapiens
aatgacatacataga

SEQ ID NO: 362983 - DNA, 15 bp, Homo sapiens
aaatgacatacatag

SEQ ID NO: 362984 - DNA, 15 bp, Homo sapiens
caaatgacatacata

SEQ ID NO: 362985 - DNA, 15 bp, Homo sapiens
acaaatgacatacat

SEQ ID NO: 362986 - DNA, 15 bp, Homo sapiens
tacaaatgacataca

SEQ ID NO: 362987 - DNA, 15 bp, Homo sapiens
atacaaatgacatac

SEQ ID NO: 362988 - DNA, 15 bp, Homo sapiens
aatacaaatgacata

SEQ ID NO: 362989 - DNA, 15 bp, Homo sapiens
aaatacaaatgacat

SEQ ID NO: 362990 - DNA, 15 bp, Homo sapiens
gaaatacaaatgaca

SEQ ID NO: 362991 - DNA, 15 bp, Homo sapiens
agaaatacaaatgac

SEQ ID NO: 362992 - DNA, 15 bp, Homo sapiens
aagaaatacaaatga

SEQ ID NO: 362993 - DNA, 15 bp, Homo sapiens
caagaaatacaaatg

SEQ ID NO: 362994 - DNA, 15 bp, Homo sapiens
acaagaaatacaaat

SEQ ID NO: 362995 - DNA, 15 bp, Homo sapiens
tacaagaaatacaaa

SEQ ID NO: 362996 - DNA, 15 bp, Homo sapiens
ctacaagaaatacaa

SEQ ID NO: 362997 - DNA, 15 bp, Homo sapiens
actacaagaaataca

SEQ ID NO: 362998 - DNA, 15 bp, Homo sapiens
aactacaagaaatac

SEQ ID NO: 362999 - DNA, 15 bp, Homo sapiens
aaactacaagaaata

SEQ ID NO: 363000 - DNA, 15 bp, Homo sapiens
caaactacaagaaat

SEQ ID NO: 363001 - DNA, 15 bp, Homo sapiens
tcaaactacaagaaa

SEQ ID NO: 363002 - DNA, 15 bp, Homo sapiens
ttcaaactacaagaa

SEQ ID NO: 363003 - DNA, 15 bp, Homo sapiens
tttcaaactacaaga

SEQ ID NO: 363004 - DNA, 15 bp, Homo sapiens
atttcaaactacaag

SEQ ID NO: 363005 - DNA, 15 bp, Homo sapiens
gatttcaaactacaa

SEQ ID NO: 363006 - DNA, 15 bp, Homo sapiens
tgatttcaaactaca

SEQ ID NO: 363007 - DNA, 15 bp, Homo sapiens
gtgatttcaaactac

SEQ ID NO: 363008 - DNA, 15 bp, Homo sapiens
cgtgatttcaaacta

SEQ ID NO: 363009 - DNA, 15 bp, Homo sapiens
acgtgatttcaaact

SEQ ID NO: 363010 - DNA, 15 bp, Homo sapiens
cacgtgatttcaaac

SEQ ID NO: 363011 - DNA, 15 bp, Homo sapiens
acacgtgatttcaaa

SEQ ID NO: 363012 - DNA, 15 bp, Homo sapiens
cacacgtgatttcaa

SEQ ID NO: 363013 - DNA, 15 bp, Homo sapiens
acacacgtgatttca

SEQ ID NO: 363014 - DNA, 15 bp, Homo sapiens
tacacacgtgatttc

SEQ ID NO: 363015 - DNA, 15 bp, Homo sapiens
gtacacacgtgattt

SEQ ID NO: 363016 - DNA, 15 bp, Homo sapiens
tgtacacacgtgatt

SEQ ID NO: 363017 - DNA, 15 bp, Homo sapiens
ttgtacacacgtgat

SEQ ID NO: 363018 - DNA, 15 bp, Homo sapiens
gttgtacacacgtga

SEQ ID NO: 363019 - DNA, 15 bp, Homo sapiens
agttgtacacacgtg

SEQ ID NO: 363020 - DNA, 15 bp, Homo sapiens
cagttgtacacacgt

SEQ ID NO: 363021 - DNA, 15 bp, Homo sapiens
gcagttgtacacacg

SEQ ID NO: 363022 - DNA, 15 bp, Homo sapiens
tgcagttgtacacac

SEQ ID NO: 363023 - DNA, 15 bp, Homo sapiens
gtgcagttgtacaca

SEQ ID NO: 363024 - DNA, 15 bp, Homo sapiens
tgtgcagttgtacac

SEQ ID NO: 363025 - DNA, 15 bp, Homo sapiens
ctgtgcagttgtaca

SEQ ID NO: 363026 - DNA, 15 bp, Homo sapiens
cctgtgcagttgtac

SEQ ID NO: 363027 - DNA, 15 bp, Homo sapiens
ccctgtgcagttgta

SEQ ID NO: 363028 - DNA, 15 bp, Homo sapiens
tccctgtgcagttgt

SEQ ID NO: 363029 - DNA, 15 bp, Homo sapiens
atccctgtgcagttg

SEQ ID NO: 363030 - DNA, 15 bp, Homo sapiens
gatccctgtgcagtt

SEQ ID NO: 363031 - DNA, 15 bp, Homo sapiens
tgatccctgtgcagt

SEQ ID NO: 363032 - DNA, 15 bp, Homo sapiens
atgatccctgtgcag

SEQ ID NO: 363033 - DNA, 15 bp, Homo sapiens
gatgatccctgtgca

SEQ ID NO: 363034 - DNA, 15 bp, Homo sapiens
agatgatccctgtgc

SEQ ID NO: 363035 - DNA, 15 bp, Homo sapiens
aagatgatccctgtg

SEQ ID NO: 363036 - DNA, 15 bp, Homo sapiens
taagatgatccctgt

SEQ ID NO: 363037 - DNA, 15 bp, Homo sapiens
ataagatgatccctg

SEQ ID NO: 363038 - DNA, 15 bp, Homo sapiens
tataagatgatccct

SEQ ID NO: 363039 - DNA, 15 bp, Homo sapiens
atataagatgatccc

SEQ ID NO: 363040 - DNA, 15 bp, Homo sapiens
gatataagatgatcc

SEQ ID NO: 363041 - DNA, 15 bp, Homo sapiens
tgatataagatgatc

SEQ ID NO: 363042 - DNA, 15 bp, Homo sapiens
gtgatataagatgat

SEQ ID NO: 363043 - DNA, 15 bp, Homo sapiens
tgtgatataagatga

SEQ ID NO: 363044 - DNA, 15 bp, Homo sapiens
ttgtgatataagatg

SEQ ID NO: 363045 - DNA, 15 bp, Homo sapiens
attgtgatataagat

SEQ ID NO: 363046 - DNA, 15 bp, Homo sapiens
aattgtgatataaga

SEQ ID NO: 363047 - DNA, 15 bp, Homo sapiens
taattgtgatataag

SEQ ID NO: 363048 - DNA, 15 bp, Homo sapiens
gtaattgtgatataa

SEQ ID NO: 363049 - DNA, 15 bp, Homo sapiens
cgtaattgtgatata

SEQ ID NO: 363050 - DNA, 15 bp, Homo sapiens
ccgtaattgtgatat

SEQ ID NO: 363051 - DNA, 15 bp, Homo sapiens
gccgtaattgtgata

SEQ ID NO: 363052 - DNA, 15 bp, Homo sapiens
agccgtaattgtgat

SEQ ID NO: 363053 - DNA, 15 bp, Homo sapiens
cagccgtaattgtga

SEQ ID NO: 363054 - DNA, 15 bp, Homo sapiens
ccagccgtaattgtg

SEQ ID NO: 363055 - DNA, 15 bp, Homo sapiens
gccagccgtaattgt

SEQ ID NO: 363056 - DNA, 15 bp, Homo sapiens
agccagccgtaattg

SEQ ID NO: 363057 - DNA, 15 bp, Homo sapiens
aagccagccgtaatt

SEQ ID NO: 363058 - DNA, 15 bp, Homo sapiens
gaagccagccgtaat

SEQ ID NO: 363059 - DNA, 15 bp, Homo sapiens
ggaagccagccgtaa

SEQ ID NO: 363060 - DNA, 15 bp, Homo sapiens
gggaagccagccgta

SEQ ID NO: 363061 - DNA, 15 bp, Homo sapiens
agggaagccagccgt

SEQ ID NO: 363062 - DNA, 15 bp, Homo sapiens
tagggaagccagccg

SEQ ID NO: 363063 - DNA, 15 bp, Homo sapiens
gtagggaagccagcc

SEQ ID NO: 363064 - DNA, 15 bp, Homo sapiens
tgtagggaagccagc

SEQ ID NO: 363065 - DNA, 15 bp, Homo sapiens
ttgtagggaagccag

SEQ ID NO: 363066 - DNA, 15 bp, Homo sapiens
cttgtagggaagcca

SEQ ID NO: 363067 - DNA, 15 bp, Homo sapiens
tcttgtagggaagcc

SEQ ID NO: 363068 - DNA, 15 bp, Homo sapiens
atcttgtagggaagc

SEQ ID NO: 363069 - DNA, 15 bp, Homo sapiens
catcttgtagggaag

SEQ ID NO: 363070 - DNA, 15 bp, Homo sapiens
tcatcttgtagggaa

SEQ ID NO: 363071 - DNA, 15 bp, Homo sapiens
ttcatcttgtaggga

SEQ ID NO: 363072 - DNA, 15 bp, Homo sapiens
tttcatcttgtaggg

SEQ ID NO: 363073 - DNA, 15 bp, Homo sapiens
ttttcatcttgtagg

SEQ ID NO: 363074 - DNA, 15 bp, Homo sapiens
attttcatcttgtag

SEQ ID NO: 363075 - DNA, 15 bp, Homo sapiens
aattttcatcttgta

SEQ ID NO: 363076 - DNA, 15 bp, Homo sapiens
taattttcatcttgt

SEQ ID NO: 363077 - DNA, 15 bp, Homo sapiens
ttaattttcatcttg

SEQ ID NO: 363078 - DNA, 15 bp, Homo sapiens
tttaattttcatctt

SEQ ID NO: 363079 - DNA, 15 bp, Homo sapiens
ttttaattttcatct

SEQ ID NO: 363080 - DNA, 15 bp, Homo sapiens
cttttaattttcatc

SEQ ID NO: 363081 - DNA, 15 bp, Homo sapiens
tcttttaattttcat

SEQ ID NO: 363082 - DNA, 15 bp, Homo sapiens
ttcttttaattttca

SEQ ID NO: 363083 - DNA, 15 bp, Homo sapiens
attcttttaattttc

SEQ ID NO: 363084 - DNA, 15 bp, Homo sapiens
tattcttttaatttt

SEQ ID NO: 363085 - DNA, 15 bp, Homo sapiens
atattcttttaattt

SEQ ID NO: 363086 - DNA, 15 bp, Homo sapiens
catattcttttaatt

SEQ ID NO: 363087 - DNA, 15 bp, Homo sapiens
ccatattcttttaat

SEQ ID NO: 363088 - DNA, 15 bp, Homo sapiens
tccatattcttttaa

SEQ ID NO: 363089 - DNA, 15 bp, Homo sapiens
atccatattctttta

SEQ ID NO: 363090 - DNA, 15 bp, Homo sapiens
catccatattctttt

SEQ ID NO: 363091 - DNA, 15 bp, Homo sapiens
gcatccatattcttt

SEQ ID NO: 363092 - DNA, 15 bp, Homo sapiens
tgcatccatattctt

SEQ ID NO: 363093 - DNA, 15 bp, Homo sapiens
ctgcatccatattct

SEQ ID NO: 363094 - DNA, 15 bp, Homo sapiens
cctgcatccatattc

SEQ ID NO: 363095 - DNA, 15 bp, Homo sapiens
gcctgcatccatatt

SEQ ID NO: 363096 - DNA, 15 bp, Homo sapiens
tgcctgcatccatat

SEQ ID NO: 363097 - DNA, 15 bp, Homo sapiens
ttgcctgcatccata

SEQ ID NO: 363098 - DNA, 15 bp, Homo sapiens
attgcctgcatccat

SEQ ID NO: 363099 - DNA, 15 bp, Homo sapiens
aattgcctgcatcca

SEQ ID NO: 363100 - DNA, 15 bp, Homo sapiens
caattgcctgcatcc

SEQ ID NO: 363101 - DNA, 15 bp, Homo sapiens
tcaattgcctgcatc

SEQ ID NO: 363102 - DNA, 15 bp, Homo sapiens
ttcaattgcctgcat

SEQ ID NO: 363103 - DNA, 15 bp, Homo sapiens
cttcaattgcctgca

SEQ ID NO: 363104 - DNA, 15 bp, Homo sapiens
gcttcaattgcctgc

SEQ ID NO: 363105 - DNA, 15 bp, Homo sapiens
agcttcaattgcctg

SEQ ID NO: 363106 - DNA, 15 bp, Homo sapiens
aagcttcaattgcct

SEQ ID NO: 363107 - DNA, 15 bp, Homo sapiens
taagcttcaattgcc

SEQ ID NO: 363108 - DNA, 15 bp, Homo sapiens
ataagcttcaattgc

SEQ ID NO: 363109 - DNA, 15 bp, Homo sapiens
cataagcttcaattg

SEQ ID NO: 363110 - DNA, 15 bp, Homo sapiens
gcataagcttcaatt

SEQ ID NO: 363111 - DNA, 15 bp, Homo sapiens
tgcataagcttcaat

SEQ ID NO: 363112 - DNA, 15 bp, Homo sapiens
gtgcataagcttcaa

SEQ ID NO: 363113 - DNA, 15 bp, Homo sapiens
agtgcataagcttca

SEQ ID NO: 363114 - DNA, 15 bp, Homo sapiens
cagtgcataagcttc

SEQ ID NO: 363115 - DNA, 15 bp, Homo sapiens
ccagtgcataagctt

SEQ ID NO: 363116 - DNA, 15 bp, Homo sapiens
gccagtgcataagct

SEQ ID NO: 363117 - DNA, 15 bp, Homo sapiens
tgccagtgcataagc

SEQ ID NO: 363118 - DNA, 15 bp, Homo sapiens
ttgccagtgcataag

SEQ ID NO: 363119 - DNA, 15 bp, Homo sapiens
tttgccagtgcataa

SEQ ID NO: 363120 - DNA, 15 bp, Homo sapiens
ttttgccagtgcata

SEQ ID NO: 363121 - DNA, 15 bp, Homo sapiens
attttgccagtgcat

SEQ ID NO: 363122 - DNA, 15 bp, Homo sapiens
cattttgccagtgca

SEQ ID NO: 363123 - DNA, 15 bp, Homo sapiens
tcattttgccagtgc

SEQ ID NO: 363124 - DNA, 15 bp, Homo sapiens
atcattttgccagtg

SEQ ID NO: 363125 - DNA, 15 bp, Homo sapiens
aatcattttgccagt

SEQ ID NO: 363126 - DNA, 15 bp, Homo sapiens
gaatcattttgccag

SEQ ID NO: 363127 - DNA, 15 bp, Homo sapiens
tgaatcattttgcca

SEQ ID NO: 363128 - DNA, 15 bp, Homo sapiens
ctgaatcattttgcc

SEQ ID NO: 363129 - DNA, 15 bp, Homo sapiens
cctgaatcattttgc

SEQ ID NO: 363130 - DNA, 15 bp, Homo sapiens
tcctgaatcattttg

SEQ ID NO: 363131 - DNA, 15 bp, Homo sapiens
ttcctgaatcatttt

SEQ ID NO: 363132 - DNA, 15 bp, Homo sapiens
cttcctgaatcattt

SEQ ID NO: 363133 - DNA, 15 bp, Homo sapiens
acttcctgaatcatt

SEQ ID NO: 363134 - DNA, 15 bp, Homo sapiens
aacttcctgaatcat

SEQ ID NO: 363135 - DNA, 15 bp, Homo sapiens
ccaacttcctgaatc

SEQ ID NO: 363136 - DNA, 15 bp, Homo sapiens
accaacttcctgaat

SEQ ID NO: 363137 - DNA, 15 bp, Homo sapiens
aaccaacttcctgaa

SEQ ID NO: 363138 - DNA, 15 bp, Homo sapiens
caaccaacttcctga

SEQ ID NO: 363139 - DNA, 15 bp, Homo sapiens
ccaaccaacttcctg

SEQ ID NO: 363140 - DNA, 15 bp, Homo sapiens
tccaaccaacttcct

SEQ ID NO: 363141 - DNA, 15 bp, Homo sapiens
gtccaaccaacttcc

SEQ ID NO: 363142 - DNA, 15 bp, Homo sapiens
agtccaaccaacttc

SEQ ID NO: 363143 - DNA, 15 bp, Homo sapiens
aagtccaaccaactt

SEQ ID NO: 363144 - DNA, 15 bp, Homo sapiens
caagtccaaccaact

SEQ ID NO: 363145 - DNA, 15 bp, Homo sapiens
acaagtccaaccaac

SEQ ID NO: 363146 - DNA, 15 bp, Homo sapiens
aacaagtccaaccaa

SEQ ID NO: 363147 - DNA, 15 bp, Homo sapiens
aaacaagtccaacca

SEQ ID NO: 363148 - DNA, 15 bp, Homo sapiens
aaaacaagtccaacc

SEQ ID NO: 363149 - DNA, 15 bp, Homo sapiens
caaaacaagtccaac

SEQ ID NO: 363150 - DNA, 15 bp, Homo sapiens
acaaaacaagtccaa

SEQ ID NO: 363151 - DNA, 15 bp, Homo sapiens
tacaaaacaagtcca

SEQ ID NO: 363152 - DNA, 15 bp, Homo sapiens
gtacaaaacaagtcc

SEQ ID NO: 363153 - DNA, 15 bp, Homo sapiens
ggtacaaaacaagtc

SEQ ID NO: 363154 - DNA, 15 bp, Homo sapiens
tggtacaaaacaagt

SEQ ID NO: 363155 - DNA, 15 bp, Homo sapiens
ttggtacaaaacaag

SEQ ID NO: 363156 - DNA, 15 bp, Homo sapiens
cttggtacaaaacaa

SEQ ID NO: 363157 - DNA, 15 bp, Homo sapiens
tcttggtacaaaaca

SEQ ID NO: 363158 - DNA, 15 bp, Homo sapiens
ctcttggtacaaaac

SEQ ID NO: 363159 - DNA, 15 bp, Homo sapiens
tctcttggtacaaaa

SEQ ID NO: 363160 - DNA, 15 bp, Homo sapiens
atctcttggtacaaa

SEQ ID NO: 363161 - DNA, 15 bp, Homo sapiens
gatctcttggtacaa

SEQ ID NO: 363162 - DNA, 15 bp, Homo sapiens
tgatctcttggtaca

SEQ ID NO: 363163 - DNA, 15 bp, Homo sapiens
gtgatctcttggtac

SEQ ID NO: 363164 - DNA, 15 bp, Homo sapiens
tgtgatctcttggta

SEQ ID NO: 363165 - DNA, 15 bp, Homo sapiens
ctgtgatctcttggt

SEQ ID NO: 363166 - DNA, 15 bp, Homo sapiens
cctgtgatctcttgg

SEQ ID NO: 363167 - DNA, 15 bp, Homo sapiens
tcctgtgatctcttg

SEQ ID NO: 363168 - DNA, 15 bp, Homo sapiens
ctcctgtgatctctt

SEQ ID NO: 363169 - DNA, 15 bp, Homo sapiens
tctcctgtgatctct

SEQ ID NO: 363170 - DNA, 15 bp, Homo sapiens
ttctcctgtgatctc

SEQ ID NO: 363171 - DNA, 15 bp, Homo sapiens
cttctcctgtgatct

SEQ ID NO: 363172 - DNA, 15 bp, Homo sapiens
tcttctcctgtgatc

SEQ ID NO: 363173 - DNA, 15 bp, Homo sapiens
ctcttctcctgtgat

SEQ ID NO: 363174 - DNA, 15 bp, Homo sapiens
cctcttctcctgtga

SEQ ID NO: 363175 - DNA, 15 bp, Homo sapiens
ccctcttctcctgtg

SEQ ID NO: 363176 - DNA, 15 bp, Homo sapiens
gccctcttctcctgt

SEQ ID NO: 363177 - DNA, 15 bp, Homo sapiens
tgccctcttctcctg

SEQ ID NO: 363178 - DNA, 15 bp, Homo sapiens
atgccctcttctcct

SEQ ID NO: 363179 - DNA, 15 bp, Homo sapiens
aatgccctcttctcc

SEQ ID NO: 363180 - DNA, 15 bp, Homo sapiens
gaatgccctcttctc

SEQ ID NO: 363181 - DNA, 15 bp, Homo sapiens
agaatgccctcttct

SEQ ID NO: 363182 - DNA, 15 bp, Homo sapiens
gagaatgccctcttc

SEQ ID NO: 363183 - DNA, 15 bp, Homo sapiens
ggagaatgccctctt

SEQ ID NO: 363184 - DNA, 15 bp, Homo sapiens
aggagaatgccctct

SEQ ID NO: 363185 - DNA, 15 bp, Homo sapiens
aaggagaatgccctc

SEQ ID NO: 363186 - DNA, 15 bp, Homo sapiens
gaaggagaatgccct

SEQ ID NO: 363187 - DNA, 15 bp, Homo sapiens
agaaggagaatgccc

SEQ ID NO: 363188 - DNA, 15 bp, Homo sapiens
gagaaggagaatgcc

SEQ ID NO: 363189 - DNA, 15 bp, Homo sapiens
agagaaggagaatgc

SEQ ID NO: 363190 - DNA, 15 bp, Homo sapiens
gagagaaggagaatg

SEQ ID NO: 363191 - DNA, 15 bp, Homo sapiens
tgagagaaggagaat

SEQ ID NO: 363192 - DNA, 15 bp, Homo sapiens
ttgagagaaggagaa

SEQ ID NO: 363193 - DNA, 15 bp, Homo sapiens
tttgagagaaggaga

SEQ ID NO: 363194 - DNA, 15 bp, Homo sapiens
ttttgagagaaggag

SEQ ID NO: 363195 - DNA, 15 bp, Homo sapiens
tttttgagagaagga

SEQ ID NO: 363196 - DNA, 15 bp, Homo sapiens
ctttttgagagaagg

SEQ ID NO: 363197 - DNA, 15 bp, Homo sapiens
tctttttgagagaag

SEQ ID NO: 363198 - DNA, 15 bp, Homo sapiens
gtctttttgagagaa

SEQ ID NO: 363199 - DNA, 15 bp, Homo sapiens
cgtctttttgagaga

SEQ ID NO: 363200 - DNA, 15 bp, Homo sapiens
gcgtctttttgagag

SEQ ID NO: 363201 - DNA, 15 bp, Homo sapiens
agcgtctttttgaga

SEQ ID NO: 363202 - DNA, 15 bp, Homo sapiens
cagcgtctttttgag

SEQ ID NO: 363203 - DNA, 15 bp, Homo sapiens
gcagcgtctttttga

SEQ ID NO: 363204 - DNA, 15 bp, Homo sapiens
agcagcgtctttttg

SEQ ID NO: 363205 - DNA, 15 bp, Homo sapiens
gagcagcgtcttttt

SEQ ID NO: 363206 - DNA, 15 bp, Homo sapiens
ggagcagcgtctttt

SEQ ID NO: 363207 - DNA, 15 bp, Homo sapiens
tggagcagcgtcttt

SEQ ID NO: 363208 - DNA, 15 bp, Homo sapiens
ctggagcagcgtctt

SEQ ID NO: 363209 - DNA, 15 bp, Homo sapiens
tctggagcagcgtct

SEQ ID NO: 363210 - DNA, 15 bp, Homo sapiens
ctctggagcagcgtc

SEQ ID NO: 363211 - DNA, 15 bp, Homo sapiens
gctctggagcagcgt

SEQ ID NO: 363212 - DNA, 15 bp, Homo sapiens
agctctggagcagcg

SEQ ID NO: 363213 - DNA, 15 bp, Homo sapiens
aagctctggagcagc

SEQ ID NO: 363214 - DNA, 15 bp, Homo sapiens
caagctctggagcag

SEQ ID NO: 363215 - DNA, 15 bp, Homo sapiens
ccaagctctggagca

SEQ ID NO: 363216 - DNA, 15 bp, Homo sapiens
tccaagctctggagc

SEQ ID NO: 363217 - DNA, 15 bp, Homo sapiens
ttccaagctctggag

SEQ ID NO: 363218 - DNA, 15 bp, Homo sapiens
gttccaagctctgga

SEQ ID NO: 363219 - DNA, 15 bp, Homo sapiens
agttccaagctctgg

SEQ ID NO: 363220 - DNA, 15 bp, Homo sapiens
tagttccaagctctg

SEQ ID NO: 363221 - DNA, 15 bp, Homo sapiens
ctagttccaagctct

SEQ ID NO: 363222 - DNA, 15 bp, Homo sapiens
actagttccaagctc

SEQ ID NO: 363223 - DNA, 15 bp, Homo sapiens
aactagttccaagct

SEQ ID NO: 363224 - DNA, 15 bp, Homo sapiens
caactagttccaagc

SEQ ID NO: 363225 - DNA, 15 bp, Homo sapiens
acaactagttccaag

SEQ ID NO: 363226 - DNA, 15 bp, Homo sapiens
cacaactagttccaa

SEQ ID NO: 363227 - DNA, 15 bp, Homo sapiens
acacaactagttcca

SEQ ID NO: 363228 - DNA, 15 bp, Homo sapiens
gacacaactagttcc

SEQ ID NO: 363229 - DNA, 15 bp, Homo sapiens
agacacaactagttc

SEQ ID NO: 363230 - DNA, 15 bp, Homo sapiens
gagacacaactagtt

SEQ ID NO: 363231 - DNA, 15 bp, Homo sapiens
tgagacacaactagt

SEQ ID NO: 363232 - DNA, 15 bp, Homo sapiens
ctgagacacaactag

SEQ ID NO: 363233 - DNA, 15 bp, Homo sapiens
gctgagacacaacta

SEQ ID NO: 363234 - DNA, 15 bp, Homo sapiens
tgctgagacacaact

SEQ ID NO: 363235 - DNA, 15 bp, Homo sapiens
ctgctgagacacaac

SEQ ID NO: 363236 - DNA, 15 bp, Homo sapiens
gctgctgagacacaa

SEQ ID NO: 363237 - DNA, 15 bp, Homo sapiens
tgctgctgagacaca

SEQ ID NO: 363238 - DNA, 15 bp, Homo sapiens
ttgctgctgagacac

SEQ ID NO: 363239 - DNA, 15 bp, Homo sapiens
gttgctgctgagaca

SEQ ID NO: 363240 - DNA, 15 bp, Homo sapiens
ggttgctgctgagac

SEQ ID NO: 363241 - DNA, 15 bp, Homo sapiens
tggttgctgctgaga

SEQ ID NO: 363242 - DNA, 15 bp, Homo sapiens
gtggttgctgctgag

SEQ ID NO: 363243 - DNA, 15 bp, Homo sapiens
tgtggttgctgctga

SEQ ID NO: 363244 - DNA, 15 bp, Homo sapiens
ctgtggttgctgctg

SEQ ID NO: 363245 - DNA, 15 bp, Homo sapiens
actgtggttgctgct

SEQ ID NO: 363246 - DNA, 15 bp, Homo sapiens
cactgtggttgctgc

SEQ ID NO: 363247 - DNA, 15 bp, Homo sapiens
gcactgtggttgctg

SEQ ID NO: 363248 - DNA, 15 bp, Homo sapiens
agcactgtggttgct

SEQ ID NO: 363249 - DNA, 15 bp, Homo sapiens
tagcactgtggttgc

SEQ ID NO: 363250 - DNA, 15 bp, Homo sapiens
ttagcactgtggttg

SEQ ID NO: 363251 - DNA, 15 bp, Homo sapiens
tttagcactgtggtt

SEQ ID NO: 363252 - DNA, 15 bp, Homo sapiens
atttagcactgtggt

SEQ ID NO: 363253 - DNA, 15 bp, Homo sapiens
catttagcactgtgg

SEQ ID NO: 363254 - DNA, 15 bp, Homo sapiens
gcatttagcactgtg

SEQ ID NO: 363255 - DNA, 15 bp, Homo sapiens
ggcatttagcactgt

SEQ ID NO: 363256 - DNA, 15 bp, Homo sapiens
gggcatttagcactg

SEQ ID NO: 363257 - DNA, 15 bp, Homo sapiens
ggggcatttagcact

SEQ ID NO: 363258 - DNA, 15 bp, Homo sapiens
aggggcatttagcac

SEQ ID NO: 363259 - DNA, 15 bp, Homo sapiens
aaggggcatttagca

SEQ ID NO: 363260 - DNA, 15 bp, Homo sapiens
gaaggggcatttagc

SEQ ID NO: 363261 - DNA, 15 bp, Homo sapiens
ggaaggggcatttag

SEQ ID NO: 363262 - DNA, 15 bp, Homo sapiens
aggaaggggcattta

SEQ ID NO: 363263 - DNA, 15 bp, Homo sapiens
gaggaaggggcattt

SEQ ID NO: 363264 - DNA, 15 bp, Homo sapiens
ggaggaaggggcatt

SEQ ID NO: 363265 - DNA, 15 bp, Homo sapiens
tggaggaaggggcat

SEQ ID NO: 363266 - DNA, 15 bp, Homo sapiens
atggaggaaggggca

SEQ ID NO: 363267 - DNA, 15 bp, Homo sapiens
tatggaggaaggggc

SEQ ID NO: 363268 - DNA, 15 bp, Homo sapiens
ctatggaggaagggg

SEQ ID NO: 363269 - DNA, 15 bp, Homo sapiens
actatggaggaaggg

SEQ ID NO: 363270 - DNA, 15 bp, Homo sapiens
aactatggaggaagg

SEQ ID NO: 363271 - DNA, 15 bp, Homo sapiens
caactatggaggaag

SEQ ID NO: 363272 - DNA, 15 bp, Homo sapiens
gcaactatggaggaa

SEQ ID NO: 363273 - DNA, 15 bp, Homo sapiens
tgcaactatggagga

SEQ ID NO: 363274 - DNA, 15 bp, Homo sapiens
gtgcaactatggagg

SEQ ID NO: 363275 - DNA, 15 bp, Homo sapiens
tgtgcaactatggag

SEQ ID NO: 363276 - DNA, 15 bp, Homo sapiens
ttgtgcaactatgga

SEQ ID NO: 363277 - DNA, 15 bp, Homo sapiens
attgtgcaactatgg

SEQ ID NO: 363278 - DNA, 15 bp, Homo sapiens
tattgtgcaactatg

SEQ ID NO: 363279 - DNA, 15 bp, Homo sapiens
atattgtgcaactat

SEQ ID NO: 363280 - DNA, 15 bp, Homo sapiens
aatattgtgcaacta

SEQ ID NO: 363281 - DNA, 15 bp, Homo sapiens
aaatattgtgcaact

SEQ ID NO: 363282 - DNA, 15 bp, Homo sapiens
aaaatattgtgcaac

SEQ ID NO: 363283 - DNA, 15 bp, Homo sapiens
taaaatattgtgcaa

SEQ ID NO: 363284 - DNA, 15 bp, Homo sapiens
ctaaaatattgtgca

SEQ ID NO: 363285 - DNA, 15 bp, Homo sapiens
cctaaaatattgtgc

SEQ ID NO: 363286 - DNA, 15 bp, Homo sapiens
ccctaaaatattgtg

SEQ ID NO: 363287 - DNA, 15 bp, Homo sapiens
gccctaaaatattgt

SEQ ID NO: 363288 - DNA, 15 bp, Homo sapiens
ggccctaaaatattg

SEQ ID NO: 363289 - DNA, 15 bp, Homo sapiens
aggccctaaaatatt

SEQ ID NO: 363290 - DNA, 15 bp, Homo sapiens
caggccctaaaatat

SEQ ID NO: 363291 - DNA, 15 bp, Homo sapiens
tcaggccctaaaata

SEQ ID NO: 363292 - DNA, 15 bp, Homo sapiens
ctcaggccctaaaat

SEQ ID NO: 363293 - DNA, 15 bp, Homo sapiens
tctcaggccctaaaa

SEQ ID NO: 363294 - DNA, 15 bp, Homo sapiens
ttctcaggccctaaa

SEQ ID NO: 363295 - DNA, 15 bp, Homo sapiens
attctcaggccctaa

SEQ ID NO: 363296 - DNA, 15 bp, Homo sapiens
tattctcaggcccta

SEQ ID NO: 363297 - DNA, 15 bp, Homo sapiens
ctattctcaggccct

SEQ ID NO: 363298 - DNA, 15 bp, Homo sapiens
tctattctcaggccc

SEQ ID NO: 363299 - DNA, 15 bp, Homo sapiens
ttctattctcaggcc

SEQ ID NO: 363300 - DNA, 15 bp, Homo sapiens
attctattctcaggc

SEQ ID NO: 363301 - DNA, 15 bp, Homo sapiens
gattctattctcagg

SEQ ID NO: 363302 - DNA, 15 bp, Homo sapiens
tgattctattctcag

SEQ ID NO: 363303 - DNA, 15 bp, Homo sapiens
atgattctattctca

SEQ ID NO: 363304 - DNA, 15 bp, Homo sapiens
catgattctattctc

SEQ ID NO: 363305 - DNA, 15 bp, Homo sapiens
tcatgattctattct

SEQ ID NO: 363306 - DNA, 15 bp, Homo sapiens
gtcatgattctattc

SEQ ID NO: 363307 - DNA, 15 bp, Homo sapiens
agtcatgattctatt

SEQ ID NO: 363308 - DNA, 15 bp, Homo sapiens
tagtcatgattctat

SEQ ID NO: 363309 - DNA, 15 bp, Homo sapiens
gtagtcatgattcta

SEQ ID NO: 363310 - DNA, 15 bp, Homo sapiens
ggtagtcatgattct

SEQ ID NO: 363311 - DNA, 15 bp, Homo sapiens
tggtagtcatgattc

SEQ ID NO: 363312 - DNA, 15 bp, Homo sapiens
ctggtagtcatgatt

SEQ ID NO: 363313 - DNA, 15 bp, Homo sapiens
actggtagtcatgat

SEQ ID NO: 363314 - DNA, 15 bp, Homo sapiens
cactggtagtcatga

SEQ ID NO: 363315 - DNA, 15 bp, Homo sapiens
tcactggtagtcatg

SEQ ID NO: 363316 - DNA, 15 bp, Homo sapiens
gtcactggtagtcat

SEQ ID NO: 363317 - DNA, 15 bp, Homo sapiens
agtcactggtagtca

SEQ ID NO: 363318 - DNA, 15 bp, Homo sapiens
gagtcactggtagtc

SEQ ID NO: 363319 - DNA, 15 bp, Homo sapiens
tgagtcactggtagt

SEQ ID NO: 363320 - DNA, 15 bp, Homo sapiens
atgagtcactggtag

SEQ ID NO: 363321 - DNA, 15 bp, Homo sapiens
tatgagtcactggta

SEQ ID NO: 363322 - DNA, 15 bp, Homo sapiens
ttatgagtcactggt

SEQ ID NO: 363323 - DNA, 15 bp, Homo sapiens
tttatgagtcactgg

SEQ ID NO: 363324 - DNA, 15 bp, Homo sapiens
ttttatgagtcactg

SEQ ID NO: 363325 - DNA, 15 bp, Homo sapiens
cttttatgagtcact

SEQ ID NO: 363326 - DNA, 15 bp, Homo sapiens
tcttttatgagtcac

SEQ ID NO: 363327 - DNA, 15 bp, Homo sapiens
ctcttttatgagtca

SEQ ID NO: 363328 - DNA, 15 bp, Homo sapiens
cctcttttatgagtc

SEQ ID NO: 363329 - DNA, 15 bp, Homo sapiens
ccctcttttatgagt

SEQ ID NO: 363330 - DNA, 15 bp, Homo sapiens
accctcttttatgag

SEQ ID NO: 363331 - DNA, 15 bp, Homo sapiens
taccctcttttatga

SEQ ID NO: 363332 - DNA, 15 bp, Homo sapiens
ctaccctcttttatg

SEQ ID NO: 363333 - DNA, 15 bp, Homo sapiens
tctaccctcttttat

SEQ ID NO: 363334 - DNA, 15 bp, Homo sapiens
atctaccctctttta

SEQ ID NO: 363335 - DNA, 15 bp, Homo sapiens
tatctaccctctttt

SEQ ID NO: 363336 - DNA, 15 bp, Homo sapiens
ctatctaccctcttt

SEQ ID NO: 363337 - DNA, 15 bp, Homo sapiens
cctatctaccctctt

SEQ ID NO: 363338 - DNA, 15 bp, Homo sapiens
gcctatctaccctct

SEQ ID NO: 363339 - DNA, 15 bp, Homo sapiens
agcctatctaccctc

SEQ ID NO: 363340 - DNA, 15 bp, Homo sapiens
gagcctatctaccct

SEQ ID NO: 363341 - DNA, 15 bp, Homo sapiens
ggagcctatctaccc

SEQ ID NO: 363342 - DNA, 15 bp, Homo sapiens
tggagcctatctacc

SEQ ID NO: 363343 - DNA, 15 bp, Homo sapiens
atggagcctatctac

SEQ ID NO: 363344 - DNA, 15 bp, Homo sapiens
gatggagcctatcta

SEQ ID NO: 363345 - DNA, 15 bp, Homo sapiens
agatggagcctatct

SEQ ID NO: 363346 - DNA, 15 bp, Homo sapiens
gagatggagcctatc

SEQ ID NO: 363347 - DNA, 15 bp, Homo sapiens
agagatggagcctat

SEQ ID NO: 363348 - DNA, 15 bp, Homo sapiens
cagagatggagccta

SEQ ID NO: 363349 - DNA, 15 bp, Homo sapiens
gcagagatggagcct

SEQ ID NO: 363350 - DNA, 15 bp, Homo sapiens
tgcagagatggagcc

SEQ ID NO: 363351 - DNA, 15 bp, Homo sapiens
ctgcagagatggagc

SEQ ID NO: 363352 - DNA, 15 bp, Homo sapiens
gctgcagagatggag

SEQ ID NO: 363353 - DNA, 15 bp, Homo sapiens
ggctgcagagatgga

SEQ ID NO: 363354 - DNA, 15 bp, Homo sapiens
tggctgcagagatgg

SEQ ID NO: 363355 - DNA, 15 bp, Homo sapiens
ttggctgcagagatg

SEQ ID NO: 363356 - DNA, 15 bp, Homo sapiens
cttggctgcagagat

SEQ ID NO: 363357 - DNA, 15 bp, Homo sapiens
acttggctgcagaga

SEQ ID NO: 363358 - DNA, 15 bp, Homo sapiens
gacttggctgcagag

SEQ ID NO: 363359 - DNA, 15 bp, Homo sapiens
agacttggctgcaga

SEQ ID NO: 363360 - DNA, 15 bp, Homo sapiens
gagacttggctgcag

SEQ ID NO: 363361 - DNA, 15 bp, Homo sapiens
agagacttggctgca

SEQ ID NO: 363362 - DNA, 15 bp, Homo sapiens
aagagacttggctgc

SEQ ID NO: 363363 - DNA, 15 bp, Homo sapiens
aaagagacttggctg

SEQ ID NO: 363364 - DNA, 15 bp, Homo sapiens
gaaagagacttggct

SEQ ID NO: 363365 - DNA, 15 bp, Homo sapiens
ggaaagagacttggc

SEQ ID NO: 363366 - DNA, 15 bp, Homo sapiens
tggaaagagacttgg

SEQ ID NO: 363367 - DNA, 15 bp, Homo sapiens
ttggaaagagacttg

SEQ ID NO: 363368 - DNA, 15 bp, Homo sapiens
tttggaaagagactt

SEQ ID NO: 363369 - DNA, 15 bp, Homo sapiens
ctttggaaagagact

SEQ ID NO: 363370 - DNA, 15 bp, Homo sapiens
gctttggaaagagac

SEQ ID NO: 363371 - DNA, 15 bp, Homo sapiens
ggctttggaaagaga

SEQ ID NO: 363372 - DNA, 15 bp, Homo sapiens
tggctttggaaagag

SEQ ID NO: 363373 - DNA, 15 bp, Homo sapiens
ctggctttggaaaga

SEQ ID NO: 363374 - DNA, 15 bp, Homo sapiens
actggctttggaaag

SEQ ID NO: 363375 - DNA, 15 bp, Homo sapiens
aactggctttggaaa

SEQ ID NO: 363376 - DNA, 15 bp, Homo sapiens
gaactggctttggaa

SEQ ID NO: 363377 - DNA, 15 bp, Homo sapiens
agaactggctttgga

SEQ ID NO: 363378 - DNA, 15 bp, Homo sapiens
gagaactggctttgg

SEQ ID NO: 363379 - DNA, 15 bp, Homo sapiens
ggagaactggctttg

SEQ ID NO: 363380 - DNA, 15 bp, Homo sapiens
tggagaactggcttt

SEQ ID NO: 363381 - DNA, 15 bp, Homo sapiens
ctggagaactggctt

SEQ ID NO: 363382 - DNA, 15 bp, Homo sapiens
tctggagaactggct

SEQ ID NO: 363383 - DNA, 15 bp, Homo sapiens
ttctggagaactggc

SEQ ID NO: 363384 - DNA, 15 bp, Homo sapiens
tttctggagaactgg

SEQ ID NO: 363385 - DNA, 15 bp, Homo sapiens
ctttctggagaactg

SEQ ID NO: 363386 - DNA, 15 bp, Homo sapiens
cctttctggagaact

SEQ ID NO: 363387 - DNA, 15 bp, Homo sapiens
ccctttctggagaac

SEQ ID NO: 363388 - DNA, 15 bp, Homo sapiens
tccctttctggagaa

SEQ ID NO: 363389 - DNA, 15 bp, Homo sapiens
ctccctttctggaga

SEQ ID NO: 363390 - DNA, 15 bp, Homo sapiens
tctccctttctggag

SEQ ID NO: 363391 - DNA, 15 bp, Homo sapiens
atctccctttctgga

SEQ ID NO: 363392 - DNA, 15 bp, Homo sapiens
aatctccctttctgg

SEQ ID NO: 363393 - DNA, 15 bp, Homo sapiens
taatctccctttctg

SEQ ID NO: 363394 - DNA, 15 bp, Homo sapiens
ctaatctccctttct

SEQ ID NO: 363395 - DNA, 15 bp, Homo sapiens
tctaatctccctttc

SEQ ID NO: 363396 - DNA, 15 bp, Homo sapiens
ctctaatctcccttt

SEQ ID NO: 363397 - DNA, 15 bp, Homo sapiens
cctctaatctccctt

SEQ ID NO: 363398 - DNA, 15 bp, Homo sapiens
tcctctaatctccct

SEQ ID NO: 363399 - DNA, 15 bp, Homo sapiens
ctcctctaatctccc

SEQ ID NO: 363400 - DNA, 15 bp, Homo sapiens
cctcctctaatctcc

SEQ ID NO: 363401 - DNA, 15 bp, Homo sapiens
tcctcctctaatctc

SEQ ID NO: 363402 - DNA, 15 bp, Homo sapiens
gtcctcctctaatct

SEQ ID NO: 363403 - DNA, 15 bp, Homo sapiens
tgtcctcctctaatc

SEQ ID NO: 363404 - DNA, 15 bp, Homo sapiens
atgtcctcctctaat

SEQ ID NO: 363405 - DNA, 15 bp, Homo sapiens
aatgtcctcctctaa

SEQ ID NO: 363406 - DNA, 15 bp, Homo sapiens
gaatgtcctcctcta

SEQ ID NO: 363407 - DNA, 15 bp, Homo sapiens
ggaatgtcctcctct

SEQ ID NO: 363408 - DNA, 15 bp, Homo sapiens
gggaatgtcctcctc

SEQ ID NO: 363409 - DNA, 15 bp, Homo sapiens
tgggaatgtcctcct

SEQ ID NO: 363410 - DNA, 15 bp, Homo sapiens
ctgggaatgtcctcc

SEQ ID NO: 363411 - DNA, 15 bp, Homo sapiens
tctgggaatgtcctc

SEQ ID NO: 363412 - DNA, 15 bp, Homo sapiens
atctgggaatgtcct

SEQ ID NO: 363413 - DNA, 15 bp, Homo sapiens
tatctgggaatgtcc

SEQ ID NO: 363414 - DNA, 15 bp, Homo sapiens
atatctgggaatgtc

SEQ ID NO: 363415 - DNA, 15 bp, Homo sapiens
catatctgggaatgt

SEQ ID NO: 363416 - DNA, 15 bp, Homo sapiens
acatatctgggaatg

SEQ ID NO: 363417 - DNA, 15 bp, Homo sapiens
cacatatctgggaat

SEQ ID NO: 363418 - DNA, 15 bp, Homo sapiens
tcacatatctgggaa

SEQ ID NO: 363419 - DNA, 15 bp, Homo sapiens
gtcacatatctggga

SEQ ID NO: 363420 - DNA, 15 bp, Homo sapiens
tgtcacatatctggg

SEQ ID NO: 363421 - DNA, 15 bp, Homo sapiens
ctgtcacatatctgg

SEQ ID NO: 363422 - DNA, 15 bp, Homo sapiens
actgtcacatatctg

SEQ ID NO: 363423 - DNA, 15 bp, Homo sapiens
aactgtcacatatct

SEQ ID NO: 363424 - DNA, 15 bp, Homo sapiens
caactgtcacatatc

SEQ ID NO: 363425 - DNA, 15 bp, Homo sapiens
ccaactgtcacatat

SEQ ID NO: 363426 - DNA, 15 bp, Homo sapiens
gccaactgtcacata

SEQ ID NO: 363427 - DNA, 15 bp, Homo sapiens
tgccaactgtcacat

SEQ ID NO: 363428 - DNA, 15 bp, Homo sapiens
ttgccaactgtcaca

SEQ ID NO: 363429 - DNA, 15 bp, Homo sapiens
tttgccaactgtcac

SEQ ID NO: 363430 - DNA, 15 bp, Homo sapiens
gtttgccaactgtca

SEQ ID NO: 363431 - DNA, 15 bp, Homo sapiens
ggtttgccaactgtc

SEQ ID NO: 363432 - DNA, 15 bp, Homo sapiens
gggtttgccaactgt

SEQ ID NO: 363433 - DNA, 15 bp, Homo sapiens
agggtttgccaactg

SEQ ID NO: 363434 - DNA, 15 bp, Homo sapiens
aagggtttgccaact

SEQ ID NO: 363435 - DNA, 15 bp, Homo sapiens
caagggtttgccaac

SEQ ID NO: 363436 - DNA, 15 bp, Homo sapiens
ccaagggtttgccaa

SEQ ID NO: 363437 - DNA, 15 bp, Homo sapiens
accaagggtttgcca

SEQ ID NO: 363438 - DNA, 15 bp, Homo sapiens
gaccaagggtttgcc

SEQ ID NO: 363439 - DNA, 15 bp, Homo sapiens
agaccaagggtttgc

SEQ ID NO: 363440 - DNA, 15 bp, Homo sapiens
tagaccaagggtttg

SEQ ID NO: 363441 - DNA, 15 bp, Homo sapiens
gtagaccaagggttt

SEQ ID NO: 363442 - DNA, 15 bp, Homo sapiens
tgtagaccaagggtt

SEQ ID NO: 363443 - DNA, 15 bp, Homo sapiens
gtgtagaccaagggt

SEQ ID NO: 363444 - DNA, 15 bp, Homo sapiens
tgtgtagaccaaggg

SEQ ID NO: 363445 - DNA, 15 bp, Homo sapiens
ttgtgtagaccaagg

SEQ ID NO: 363446 - DNA, 15 bp, Homo sapiens
attgtgtagaccaag

SEQ ID NO: 363447 - DNA, 15 bp, Homo sapiens
gattgtgtagaccaa

SEQ ID NO: 363448 - DNA, 15 bp, Homo sapiens
tgattgtgtagacca

SEQ ID NO: 363449 - DNA, 15 bp, Homo sapiens
ctgattgtgtagacc

SEQ ID NO: 363450 - DNA, 15 bp, Homo sapiens
actgattgtgtagac

SEQ ID NO: 363451 - DNA, 15 bp, Homo sapiens
cactgattgtgtaga

SEQ ID NO: 363452 - DNA, 15 bp, Homo sapiens
tcactgattgtgtag

SEQ ID NO: 363453 - DNA, 15 bp, Homo sapiens
ctcactgattgtgta

SEQ ID NO: 363454 - DNA, 15 bp, Homo sapiens
actcactgattgtgt

SEQ ID NO: 363455 - DNA, 15 bp, Homo sapiens
aactcactgattgtg

SEQ ID NO: 363456 - DNA, 15 bp, Homo sapiens
caactcactgattgt

SEQ ID NO: 363457 - DNA, 15 bp, Homo sapiens
tcaactcactgattg

SEQ ID NO: 363458 - DNA, 15 bp, Homo sapiens
ttcaactcactgatt

SEQ ID NO: 363459 - DNA, 15 bp, Homo sapiens
cttcaactcactgat

SEQ ID NO: 363460 - DNA, 15 bp, Homo sapiens
ccttcaactcactga

SEQ ID NO: 363461 - DNA, 15 bp, Homo sapiens
accttcaactcactg

SEQ ID NO: 363462 - DNA, 15 bp, Homo sapiens
taccttcaactcact

SEQ ID NO: 363463 - DNA, 15 bp, Homo sapiens
ttaccttcaactcac

SEQ ID NO: 363464 - DNA, 15 bp, Homo sapiens
gttaccttcaactca

SEQ ID NO: 363465 - DNA, 15 bp, Homo sapiens
agttaccttcaactc

SEQ ID NO: 363466 - DNA, 15 bp, Homo sapiens
gagttaccttcaact

SEQ ID NO: 363467 - DNA, 15 bp, Homo sapiens
tgagttaccttcaac

SEQ ID NO: 363468 - DNA, 15 bp, Homo sapiens
ctgagttaccttcaa

SEQ ID NO: 363469 - DNA, 15 bp, Homo sapiens
cctgagttaccttca

SEQ ID NO: 363470 - DNA, 15 bp, Homo sapiens
acctgagttaccttc

SEQ ID NO: 363471 - DNA, 15 bp, Homo sapiens
gacctgagttacctt

SEQ ID NO: 363472 - DNA, 15 bp, Homo sapiens
tgacctgagttacct

SEQ ID NO: 363473 - DNA, 15 bp, Homo sapiens
gtgacctgagttacc

SEQ ID NO: 363474 - DNA, 15 bp, Homo sapiens
ggtgacctgagttac

SEQ ID NO: 363475 - DNA, 15 bp, Homo sapiens
tggtgacctgagtta

SEQ ID NO: 363476 - DNA, 15 bp, Homo sapiens
gtggtgacctgagtt

SEQ ID NO: 363477 - DNA, 15 bp, Homo sapiens
tgtggtgacctgagt

SEQ ID NO: 363478 - DNA, 15 bp, Homo sapiens
gtgtggtgacctgag

SEQ ID NO: 363479 - DNA, 15 bp, Homo sapiens
tgtgtggtgacctga

SEQ ID NO: 363480 - DNA, 15 bp, Homo sapiens
ctgtgtggtgacctg

SEQ ID NO: 363481 - DNA, 15 bp, Homo sapiens
cctgtgtggtgacct

SEQ ID NO: 363482 - DNA, 15 bp, Homo sapiens
gcctgtgtggtgacc

SEQ ID NO: 363483 - DNA, 15 bp, Homo sapiens
tgcctgtgtggtgac

SEQ ID NO: 363484 - DNA, 15 bp, Homo sapiens
ttgcctgtgtggtga

SEQ ID NO: 363485 - DNA, 15 bp, Homo sapiens
tttgcctgtgtggtg

SEQ ID NO: 363486 - DNA, 15 bp, Homo sapiens
ctttgcctgtgtggt

SEQ ID NO: 363487 - DNA, 15 bp, Homo sapiens
tctttgcctgtgtgg

SEQ ID NO: 363488 - DNA, 15 bp, Homo sapiens
ctctttgcctgtgtg

SEQ ID NO: 363489 - DNA, 15 bp, Homo sapiens
cctctttgcctgtgt

SEQ ID NO: 363490 - DNA, 15 bp, Homo sapiens
tcctctttgcctgtg

SEQ ID NO: 363491 - DNA, 15 bp, Homo sapiens
ttcctctttgcctgt

SEQ ID NO: 363492 - DNA, 15 bp, Homo sapiens
cttcctctttgcctg

SEQ ID NO: 363493 - DNA, 15 bp, Homo sapiens
gcttcctctttgcct

SEQ ID NO: 363494 - DNA, 15 bp, Homo sapiens
agcttcctctttgcc

SEQ ID NO: 363495 - DNA, 15 bp, Homo sapiens
tagcttcctctttgc

SEQ ID NO: 363496 - DNA, 15 bp, Homo sapiens
ctagcttcctctttg

SEQ ID NO: 363497 - DNA, 15 bp, Homo sapiens
tctagcttcctcttt

SEQ ID NO: 363498 - DNA, 15 bp, Homo sapiens
atctagcttcctctt

SEQ ID NO: 363499 - DNA, 15 bp, Homo sapiens
aatctagcttcctct

SEQ ID NO: 363500 - DNA, 15 bp, Homo sapiens
gaatctagcttcctc

SEQ ID NO: 363501 - DNA, 15 bp, Homo sapiens
tgaatctagcttcct

SEQ ID NO: 363502 - DNA, 15 bp, Homo sapiens
ttgaatctagcttcc

SEQ ID NO: 363503 - DNA, 15 bp, Homo sapiens
cttgaatctagcttc

SEQ ID NO: 363504 - DNA, 15 bp, Homo sapiens
gcttgaatctagctt

SEQ ID NO: 363505 - DNA, 15 bp, Homo sapiens
agcttgaatctagct

SEQ ID NO: 363506 - DNA, 15 bp, Homo sapiens
tagcttgaatctagc

SEQ ID NO: 363507 - DNA, 15 bp, Homo sapiens
ctagcttgaatctag

SEQ ID NO: 363508 - DNA, 15 bp, Homo sapiens
tctagcttgaatcta

SEQ ID NO: 363509 - DNA, 15 bp, Homo sapiens
ctctagcttgaatct

SEQ ID NO: 363510 - DNA, 15 bp, Homo sapiens
cctctagcttgaatc

SEQ ID NO: 363511 - DNA, 15 bp, Homo sapiens
tcctctagcttgaat

SEQ ID NO: 363512 - DNA, 15 bp, Homo sapiens
gtcctctagcttgaa

SEQ ID NO: 363513 - DNA, 15 bp, Homo sapiens
ggtcctctagcttga

SEQ ID NO: 363514 - DNA, 15 bp, Homo sapiens
tggtcctctagcttg

SEQ ID NO: 363515 - DNA, 15 bp, Homo sapiens
ttggtcctctagctt

SEQ ID NO: 363516 - DNA, 15 bp, Homo sapiens
attggtcctctagct

SEQ ID NO: 363517 - DNA, 15 bp, Homo sapiens
cattggtcctctagc

SEQ ID NO: 363518 - DNA, 15 bp, Homo sapiens
tcattggtcctctag

SEQ ID NO: 363519 - DNA, 15 bp, Homo sapiens
ttcattggtcctcta

SEQ ID NO: 363520 - DNA, 15 bp, Homo sapiens
cttcattggtcctct

SEQ ID NO: 363521 - DNA, 15 bp, Homo sapiens
gcttcattggtcctc

SEQ ID NO: 363522 - DNA, 15 bp, Homo sapiens
agcttcattggtcct

SEQ ID NO: 363523 - DNA, 15 bp, Homo sapiens
cagcttcattggtcc

SEQ ID NO: 363524 - DNA, 15 bp, Homo sapiens
ccagcttcattggtc

SEQ ID NO: 363525 - DNA, 15 bp, Homo sapiens
accagcttcattggt

SEQ ID NO: 363526 - DNA, 15 bp, Homo sapiens
caccagcttcattgg

SEQ ID NO: 363527 - DNA, 15 bp, Homo sapiens
ccaccagcttcattg

SEQ ID NO: 363528 - DNA, 15 bp, Homo sapiens
gccaccagcttcatt

SEQ ID NO: 363529 - DNA, 15 bp, Homo sapiens
ggccaccagcttcat

SEQ ID NO: 363530 - DNA, 15 bp, Homo sapiens
tggccaccagcttca

SEQ ID NO: 363531 - DNA, 15 bp, Homo sapiens
ctggccaccagcttc

SEQ ID NO: 363532 - DNA, 15 bp, Homo sapiens
tctggccaccagctt

SEQ ID NO: 363533 - DNA, 15 bp, Homo sapiens
gtctggccaccagct

SEQ ID NO: 363534 - DNA, 15 bp, Homo sapiens
tgtctggccaccagc

SEQ ID NO: 363535 - DNA, 15 bp, Homo sapiens
ctgtctggccaccag

SEQ ID NO: 363536 - DNA, 15 bp, Homo sapiens
cctgtctggccacca

SEQ ID NO: 363537 - DNA, 15 bp, Homo sapiens
tcctgtctggccacc

SEQ ID NO: 363538 - DNA, 15 bp, Homo sapiens
ctcctgtctggccac

SEQ ID NO: 363539 - DNA, 15 bp, Homo sapiens
gctcctgtctggcca

SEQ ID NO: 363540 - DNA, 15 bp, Homo sapiens
ggctcctgtctggcc

SEQ ID NO: 363541 - DNA, 15 bp, Homo sapiens
gggctcctgtctggc

SEQ ID NO: 363542 - DNA, 15 bp, Homo sapiens
ggggctcctgtctgg

SEQ ID NO: 363543 - DNA, 15 bp, Homo sapiens
tggggctcctgtctg

SEQ ID NO: 363544 - DNA, 15 bp, Homo sapiens
ttggggctcctgtct

SEQ ID NO: 363545 - DNA, 15 bp, Homo sapiens
tttggggctcctgtc

SEQ ID NO: 363546 - DNA, 15 bp, Homo sapiens
ttttggggctcctgt

SEQ ID NO: 363547 - DNA, 15 bp, Homo sapiens
attttggggctcctg

SEQ ID NO: 363548 - DNA, 15 bp, Homo sapiens
cattttggggctcct

SEQ ID NO: 363549 - DNA, 15 bp, Homo sapiens
tcattttggggctcc

SEQ ID NO: 363550 - DNA, 15 bp, Homo sapiens
atcattttggggctc

SEQ ID NO: 363551 - DNA, 15 bp, Homo sapiens
catcattttggggct

SEQ ID NO: 363552 - DNA, 15 bp, Homo sapiens
gcatcattttggggc

SEQ ID NO: 363553 - DNA, 15 bp, Homo sapiens
ggcatcattttgggg

SEQ ID NO: 363554 - DNA, 15 bp, Homo sapiens
cggcatcattttggg

SEQ ID NO: 363555 - DNA, 15 bp, Homo sapiens
gcggcatcattttgg

SEQ ID NO: 363556 - DNA, 15 bp, Homo sapiens
cgcggcatcattttg

SEQ ID NO: 363557 - DNA, 15 bp, Homo sapiens
acgcggcatcatttt

SEQ ID NO: 363558 - DNA, 15 bp, Homo sapiens
cacgcggcatcattt

SEQ ID NO: 363559 - DNA, 15 bp, Homo sapiens
ccacgcggcatcatt

SEQ ID NO: 363560 - DNA, 15 bp, Homo sapiens
gccacgcggcatcat

SEQ ID NO: 363561 - DNA, 15 bp, Homo sapiens
ggccacgcggcatca

SEQ ID NO: 363562 - DNA, 15 bp, Homo sapiens
tggccacgcggcatc

SEQ ID NO: 363563 - DNA, 15 bp, Homo sapiens
gtggccacgcggcat

SEQ ID NO: 363564 - DNA, 15 bp, Homo sapiens
agtggccacgcggca

SEQ ID NO: 363565 - DNA, 15 bp, Homo sapiens
cagtggccacgcggc

SEQ ID NO: 363566 - DNA, 15 bp, Homo sapiens
ccagtggccacgcgg

SEQ ID NO: 363567 - DNA, 15 bp, Homo sapiens
cccagtggccacgcg

SEQ ID NO: 363568 - DNA, 15 bp, Homo sapiens
ccccagtggccacgc

SEQ ID NO: 363569 - DNA, 15 bp, Homo sapiens
tccccagtggccacg

SEQ ID NO: 363570 - DNA, 15 bp, Homo sapiens
ctccccagtggccac

SEQ ID NO: 363571 - DNA, 15 bp, Homo sapiens
gctccccagtggcca

SEQ ID NO: 363572 - DNA, 15 bp, Homo sapiens
agctccccagtggcc

SEQ ID NO: 363573 - DNA, 15 bp, Homo sapiens
tagctccccagtggc

SEQ ID NO: 363574 - DNA, 15 bp, Homo sapiens
atagctccccagtgg

SEQ ID NO: 363575 - DNA, 15 bp, Homo sapiens
catagctccccagtg

SEQ ID NO: 363576 - DNA, 15 bp, Homo sapiens
ccatagctccccagt

SEQ ID NO: 363577 - DNA, 15 bp, Homo sapiens
gccatagctccccag

SEQ ID NO: 363578 - DNA, 15 bp, Homo sapiens
tgccatagctcccca

SEQ ID NO: 363579 - DNA, 15 bp, Homo sapiens
atgccatagctcccc

SEQ ID NO: 363580 - DNA, 15 bp, Homo sapiens
catgccatagctccc

SEQ ID NO: 363581 - DNA, 15 bp, Homo sapiens
ccatgccatagctcc

SEQ ID NO: 363582 - DNA, 15 bp, Homo sapiens
cccatgccatagctc

SEQ ID NO: 363583 - DNA, 15 bp, Homo sapiens
ccccatgccatagct

SEQ ID NO: 363584 - DNA, 15 bp, Homo sapiens
accccatgccatagc

SEQ ID NO: 363585 - DNA, 15 bp, Homo sapiens
caccccatgccatag

SEQ ID NO: 363586 - DNA, 15 bp, Homo sapiens
ccaccccatgccata

SEQ ID NO: 363587 - DNA, 15 bp, Homo sapiens
gccaccccatgccat

SEQ ID NO: 363588 - DNA, 15 bp, Homo sapiens
ggccaccccatgcca

SEQ ID NO: 363589 - DNA, 15 bp, Homo sapiens
aggccaccccatgcc

SEQ ID NO: 363590 - DNA, 15 bp, Homo sapiens
caggccaccccatgc

SEQ ID NO: 363591 - DNA, 15 bp, Homo sapiens
tcaggccaccccatg

SEQ ID NO: 363592 - DNA, 15 bp, Homo sapiens
atcaggccaccccat

SEQ ID NO: 363593 - DNA, 15 bp, Homo sapiens
catcaggccacccca

SEQ ID NO: 363594 - DNA, 15 bp, Homo sapiens
tcatcaggccacccc

SEQ ID NO: 363595 - DNA, 15 bp, Homo sapiens
atcatcaggccaccc

SEQ ID NO: 363596 - DNA, 15 bp, Homo sapiens
aatcatcaggccacc

SEQ ID NO: 363597 - DNA, 15 bp, Homo sapiens
aaatcatcaggccac

SEQ ID NO: 363598 - DNA, 15 bp, Homo sapiens
aaaatcatcaggcca

SEQ ID NO: 363599 - DNA, 15 bp, Homo sapiens
caaaatcatcaggcc

SEQ ID NO: 363600 - DNA, 15 bp, Homo sapiens
gcaaaatcatcaggc

SEQ ID NO: 363601 - DNA, 15 bp, Homo sapiens
agcaaaatcatcagg

SEQ ID NO: 363602 - DNA, 15 bp, Homo sapiens
cagcaaaatcatcag

SEQ ID NO: 363603 - DNA, 15 bp, Homo sapiens
acagcaaaatcatca

SEQ ID NO: 363604 - DNA, 15 bp, Homo sapiens
cacagcaaaatcatc

SEQ ID NO: 363605 - DNA, 15 bp, Homo sapiens
ccacagcaaaatcat

SEQ ID NO: 363606 - DNA, 15 bp, Homo sapiens
gccacagcaaaatca

SEQ ID NO: 363607 - DNA, 15 bp, Homo sapiens
agccacagcaaaatc

SEQ ID NO: 363608 - DNA, 15 bp, Homo sapiens
aagccacagcaaaat

SEQ ID NO: 363609 - DNA, 15 bp, Homo sapiens
gaagccacagcaaaa

SEQ ID NO: 363610 - DNA, 15 bp, Homo sapiens
tgaagccacagcaaa

SEQ ID NO: 363611 - DNA, 15 bp, Homo sapiens
gtgaagccacagcaa

SEQ ID NO: 363612 - DNA, 15 bp, Homo sapiens
ggtgaagccacagca

SEQ ID NO: 363613 - DNA, 15 bp, Homo sapiens
aggtgaagccacagc

SEQ ID NO: 363614 - DNA, 15 bp, Homo sapiens
caggtgaagccacag

SEQ ID NO: 363615 - DNA, 15 bp, Homo sapiens
tcaggtgaagccaca

SEQ ID NO: 363616 - DNA, 15 bp, Homo sapiens
ttcaggtgaagccac

SEQ ID NO: 363617 - DNA, 15 bp, Homo sapiens
cttcaggtgaagcca

SEQ ID NO: 363618 - DNA, 15 bp, Homo sapiens
tcttcaggtgaagcc

SEQ ID NO: 363619 - DNA, 15 bp, Homo sapiens
gtcttcaggtgaagc

SEQ ID NO: 363620 - DNA, 15 bp, Homo sapiens
tgtcttcaggtgaag

SEQ ID NO: 363621 - DNA, 15 bp, Homo sapiens
gtgtcttcaggtgaa

SEQ ID NO: 363622 - DNA, 15 bp, Homo sapiens
tgtgtcttcaggtga

SEQ ID NO: 363623 - DNA, 15 bp, Homo sapiens
ctgtgtcttcaggtg

SEQ ID NO: 363624 - DNA, 15 bp, Homo sapiens
tctgtgtcttcaggt

SEQ ID NO: 363625 - DNA, 15 bp, Homo sapiens
ctctgtgtcttcagg

SEQ ID NO: 363626 - DNA, 15 bp, Homo sapiens
gctctgtgtcttcag

SEQ ID NO: 363627 - DNA, 15 bp, Homo sapiens
tgctctgtgtcttca

SEQ ID NO: 363628 - DNA, 15 bp, Homo sapiens
atgctctgtgtcttc

SEQ ID NO: 363629 - DNA, 15 bp, Homo sapiens
catgctctgtgtctt

SEQ ID NO: 363630 - DNA, 15 bp, Homo sapiens
acatgctctgtgtct

SEQ ID NO: 363631 - DNA, 15 bp, Homo sapiens
cacatgctctgtgtc

SEQ ID NO: 363632 - DNA, 15 bp, Homo sapiens
ccacatgctctgtgt

SEQ ID NO: 363633 - DNA, 15 bp, Homo sapiens
tccacatgctctgtg

SEQ ID NO: 363634 - DNA, 15 bp, Homo sapiens
ctccacatgctctgt

SEQ ID NO: 363635 - DNA, 15 bp, Homo sapiens
cctccacatgctctg

SEQ ID NO: 363636 - DNA, 15 bp, Homo sapiens
gcctccacatgctct

SEQ ID NO: 363637 - DNA, 15 bp, Homo sapiens
ggcctccacatgctc

SEQ ID NO: 363638 - DNA, 15 bp, Homo sapiens
tggcctccacatgct

SEQ ID NO: 363639 - DNA, 15 bp, Homo sapiens
atggcctccacatgc

SEQ ID NO: 363640 - DNA, 15 bp, Homo sapiens
catggcctccacatg

SEQ ID NO: 363641 - DNA, 15 bp, Homo sapiens
ccatggcctccacat

SEQ ID NO: 363642 - DNA, 15 bp, Homo sapiens
gccatggcctccaca

SEQ ID NO: 363643 - DNA, 15 bp, Homo sapiens
ggccatggcctccac

SEQ ID NO: 363644 - DNA, 15 bp, Homo sapiens
gggccatggcctcca

SEQ ID NO: 363645 - DNA, 15 bp, Homo sapiens
agggccatggcctcc

SEQ ID NO: 363646 - DNA, 15 bp, Homo sapiens
cagggccatggcctc

SEQ ID NO: 363647 - DNA, 15 bp, Homo sapiens
acagggccatggcct

SEQ ID NO: 363648 - DNA, 15 bp, Homo sapiens
gacagggccatggcc

SEQ ID NO: 363649 - DNA, 15 bp, Homo sapiens
ggacagggccatggc

SEQ ID NO: 363650 - DNA, 15 bp, Homo sapiens
aggacagggccatgg

SEQ ID NO: 363651 - DNA, 15 bp, Homo sapiens
taggacagggccatg

SEQ ID NO: 363652 - DNA, 15 bp, Homo sapiens
ttaggacagggccat

SEQ ID NO: 363653 - DNA, 15 bp, Homo sapiens
gttaggacagggcca

SEQ ID NO: 363654 - DNA, 15 bp, Homo sapiens
ggttaggacagggcc

SEQ ID NO: 363655 - DNA, 15 bp, Homo sapiens
aggttaggacagggc

SEQ ID NO: 363656 - DNA, 15 bp, Homo sapiens
taggttaggacaggg

SEQ ID NO: 363657 - DNA, 15 bp, Homo sapiens
ttaggttaggacagg

SEQ ID NO: 363658 - DNA, 15 bp, Homo sapiens
gttaggttaggacag

SEQ ID NO: 363659 - DNA, 15 bp, Homo sapiens
ggttaggttaggaca

SEQ ID NO: 363660 - DNA, 15 bp, Homo sapiens
gggttaggttaggac

SEQ ID NO: 363661 - DNA, 15 bp, Homo sapiens
agggttaggttagga

SEQ ID NO: 363662 - DNA, 15 bp, Homo sapiens
aagggttaggttagg

SEQ ID NO: 363663 - DNA, 15 bp, Homo sapiens
gaagggttaggttag

SEQ ID NO: 363664 - DNA, 15 bp, Homo sapiens
agaagggttaggtta

SEQ ID NO: 363665 - DNA, 15 bp, Homo sapiens
tagaagggttaggtt

SEQ ID NO: 363666 - DNA, 15 bp, Homo sapiens
atagaagggttaggt

SEQ ID NO: 363667 - DNA, 15 bp, Homo sapiens
aatagaagggttagg

SEQ ID NO: 363668 - DNA, 15 bp, Homo sapiens
aaatagaagggttag

SEQ ID NO: 363669 - DNA, 15 bp, Homo sapiens
aaaatagaagggtta

SEQ ID NO: 363670 - DNA, 15 bp, Homo sapiens
gaaaatagaagggtt

SEQ ID NO: 363671 - DNA, 15 bp, Homo sapiens
ggaaaatagaagggt

SEQ ID NO: 363672 - DNA, 15 bp, Homo sapiens
gggaaaatagaaggg

SEQ ID NO: 363673 - DNA, 15 bp, Homo sapiens
agggaaaatagaagg

SEQ ID NO: 363674 - DNA, 15 bp, Homo sapiens
tagggaaaatagaag

SEQ ID NO: 363675 - DNA, 15 bp, Homo sapiens
atagggaaaatagaa

SEQ ID NO: 363676 - DNA, 15 bp, Homo sapiens
catagggaaaataga

SEQ ID NO: 363677 - DNA, 15 bp, Homo sapiens
gcatagggaaaatag

SEQ ID NO: 363678 - DNA, 15 bp, Homo sapiens
agcatagggaaaata

SEQ ID NO: 363679 - DNA, 15 bp, Homo sapiens
aagcatagggaaaat

SEQ ID NO: 363680 - DNA, 15 bp, Homo sapiens
caagcatagggaaaa

SEQ ID NO: 363681 - DNA, 15 bp, Homo sapiens
gcaagcatagggaaa

SEQ ID NO: 363682 - DNA, 15 bp, Homo sapiens
tgcaagcatagggaa

SEQ ID NO: 363683 - DNA, 15 bp, Homo sapiens
atgcaagcataggga

SEQ ID NO: 363684 - DNA, 15 bp, Homo sapiens
aatgcaagcataggg

SEQ ID NO: 363685 - DNA, 15 bp, Homo sapiens
gaatgcaagcatagg

SEQ ID NO: 363686 - DNA, 15 bp, Homo sapiens
ggaatgcaagcatag

SEQ ID NO: 363687 - DNA, 15 bp, Homo sapiens
gggaatgcaagcata

SEQ ID NO: 363688 - DNA, 15 bp, Homo sapiens
cgggaatgcaagcat

SEQ ID NO: 363689 - DNA, 15 bp, Homo sapiens
ccgggaatgcaagca

SEQ ID NO: 363690 - DNA, 15 bp, Homo sapiens
tccgggaatgcaagc

SEQ ID NO: 363691 - DNA, 15 bp, Homo sapiens
gtccgggaatgcaag

SEQ ID NO: 363692 - DNA, 15 bp, Homo sapiens
agtccgggaatgcaa

SEQ ID NO: 363693 - DNA, 15 bp, Homo sapiens
gagtccgggaatgca

SEQ ID NO: 363694 - DNA, 15 bp, Homo sapiens
agagtccgggaatgc

SEQ ID NO: 363695 - DNA, 15 bp, Homo sapiens
cagagtccgggaatg

SEQ ID NO: 363696 - DNA, 15 bp, Homo sapiens
acagagtccgggaat

SEQ ID NO: 363697 - DNA, 15 bp, Homo sapiens
aacagagtccgggaa

SEQ ID NO: 363698 - DNA, 15 bp, Homo sapiens
caacagagtccggga

SEQ ID NO: 363699 - DNA, 15 bp, Homo sapiens
acaacagagtccggg

SEQ ID NO: 363700 - DNA, 15 bp, Homo sapiens
aacaacagagtccgg

SEQ ID NO: 363701 - DNA, 15 bp, Homo sapiens
taacaacagagtccg

SEQ ID NO: 363702 - DNA, 15 bp, Homo sapiens
gtaacaacagagtcc

SEQ ID NO: 363703 - DNA, 15 bp, Homo sapiens
agtaacaacagagtc

SEQ ID NO: 363704 - DNA, 15 bp, Homo sapiens
aagtaacaacagagt

SEQ ID NO: 363705 - DNA, 15 bp, Homo sapiens
gaagtaacaacagag

SEQ ID NO: 363706 - DNA, 15 bp, Homo sapiens
ggaagtaacaacaga

SEQ ID NO: 363707 - DNA, 15 bp, Homo sapiens
aggaagtaacaacag

SEQ ID NO: 363708 - DNA, 15 bp, Homo sapiens
caggaagtaacaaca

SEQ ID NO: 363709 - DNA, 15 bp, Homo sapiens
ccaggaagtaacaac

SEQ ID NO: 363710 - DNA, 15 bp, Homo sapiens
tccaggaagtaacaa

SEQ ID NO: 363711 - DNA, 15 bp, Homo sapiens
atccaggaagtaaca

SEQ ID NO: 363712 - DNA, 15 bp, Homo sapiens
gatccaggaagtaac

SEQ ID NO: 363713 - DNA, 15 bp, Homo sapiens
agatccaggaagtaa

SEQ ID NO: 363714 - DNA, 15 bp, Homo sapiens
cagatccaggaagta

SEQ ID NO: 363715 - DNA, 15 bp, Homo sapiens
ccagatccaggaagt

SEQ ID NO: 363716 - DNA, 15 bp, Homo sapiens
cccagatccaggaag

SEQ ID NO: 363717 - DNA, 15 bp, Homo sapiens
tcccagatccaggaa

SEQ ID NO: 363718 - DNA, 15 bp, Homo sapiens
atcccagatccagga

SEQ ID NO: 363719 - DNA, 15 bp, Homo sapiens
aatcccagatccagg

SEQ ID NO: 363720 - DNA, 15 bp, Homo sapiens
aaatcccagatccag

SEQ ID NO: 363721 - DNA, 15 bp, Homo sapiens
aaaatcccagatcca

SEQ ID NO: 363722 - DNA, 15 bp, Homo sapiens
aaaaatcccagatcc

SEQ ID NO: 363723 - DNA, 15 bp, Homo sapiens
gaaaaatcccagatc

SEQ ID NO: 363724 - DNA, 15 bp, Homo sapiens
ggaaaaatcccagat

SEQ ID NO: 363725 - DNA, 15 bp, Homo sapiens
tggaaaaatcccaga

SEQ ID NO: 363726 - DNA, 15 bp, Homo sapiens
gtggaaaaatcccag

SEQ ID NO: 363727 - DNA, 15 bp, Homo sapiens
agtggaaaaatccca

SEQ ID NO: 363728 - DNA, 15 bp, Homo sapiens
cagtggaaaaatccc

SEQ ID NO: 363729 - DNA, 15 bp, Homo sapiens
acagtggaaaaatcc

SEQ ID NO: 363730 - DNA, 15 bp, Homo sapiens
gacagtggaaaaatc

SEQ ID NO: 363731 - DNA, 15 bp, Homo sapiens
agacagtggaaaaat

SEQ ID NO: 363732 - DNA, 15 bp, Homo sapiens
aagacagtggaaaaa

SEQ ID NO: 363733 - DNA, 15 bp, Homo sapiens
aaagacagtggaaaa

SEQ ID NO: 363734 - DNA, 15 bp, Homo sapiens
aaaagacagtggaaa

SEQ ID NO: 363735 - DNA, 15 bp, Homo sapiens
caaaagacagtggaa

SEQ ID NO: 363736 - DNA, 15 bp, Homo sapiens
acaaaagacagtgga

SEQ ID NO: 363737 - DNA, 15 bp, Homo sapiens
aacaaaagacagtgg

SEQ ID NO: 363738 - DNA, 15 bp, Homo sapiens
caacaaaagacagtg

SEQ ID NO: 363739 - DNA, 15 bp, Homo sapiens
acaacaaaagacagt

SEQ ID NO: 363740 - DNA, 15 bp, Homo sapiens
aacaacaaaagacag

SEQ ID NO: 363741 - DNA, 15 bp, Homo sapiens
taacaacaaaagaca

SEQ ID NO: 363742 - DNA, 15 bp, Homo sapiens
ataacaacaaaagac

SEQ ID NO: 363743 - DNA, 15 bp, Homo sapiens
aataacaacaaaaga

SEQ ID NO: 363744 - DNA, 15 bp, Homo sapiens
aaataacaacaaaag

SEQ ID NO: 363745 - DNA, 15 bp, Homo sapiens
aaaataacaacaaaa

SEQ ID NO: 363746 - DNA, 15 bp, Homo sapiens
aaaaataacaacaaa

SEQ ID NO: 363747 - DNA, 15 bp, Homo sapiens
aaaaaataacaacaa

SEQ ID NO: 363748 - DNA, 15 bp, Homo sapiens
taaaaaataacaaca

SEQ ID NO: 363749 - DNA, 15 bp, Homo sapiens
ataaaaaataacaac

SEQ ID NO: 363750 - DNA, 15 bp, Homo sapiens
cataaaaaataacaa

SEQ ID NO: 363751 - DNA, 15 bp, Homo sapiens
acataaaaaataaca

SEQ ID NO: 363752 - DNA, 15 bp, Homo sapiens
aacataaaaaataac

SEQ ID NO: 363753 - DNA, 15 bp, Homo sapiens
taacataaaaaataa

SEQ ID NO: 363754 - DNA, 15 bp, Homo sapiens
ttaacataaaaaata

SEQ ID NO: 363755 - DNA, 15 bp, Homo sapiens
tttaacataaaaaat

SEQ ID NO: 363756 - DNA, 15 bp, Homo sapiens
ttttaacataaaaaa

SEQ ID NO: 363757 - DNA, 15 bp, Homo sapiens
tttttaacataaaaa

SEQ ID NO: 363758 - DNA, 15 bp, Homo sapiens
ttttttaacataaaa

SEQ ID NO: 363759 - DNA, 15 bp, Homo sapiens
attttttaacataaa

SEQ ID NO: 363760 - DNA, 15 bp, Homo sapiens
gattttttaacataa

SEQ ID NO: 363761 - DNA, 15 bp, Homo sapiens
agattttttaacata

SEQ ID NO: 363762 - DNA, 15 bp, Homo sapiens
cagattttttaacat

SEQ ID NO: 363763 - DNA, 15 bp, Homo sapiens
acagattttttaaca

SEQ ID NO: 363764 - DNA, 15 bp, Homo sapiens
aacagattttttaac

SEQ ID NO: 363765 - DNA, 15 bp, Homo sapiens
aaacagattttttaa

SEQ ID NO: 363766 - DNA, 15 bp, Homo sapiens
taaacagatttttta

SEQ ID NO: 363767 - DNA, 15 bp, Homo sapiens
gtaaacagatttttt

SEQ ID NO: 363768 - DNA, 15 bp, Homo sapiens
agtaaacagattttt

SEQ ID NO: 363769 - DNA, 15 bp, Homo sapiens
cagtaaacagatttt

SEQ ID NO: 363770 - DNA, 15 bp, Homo sapiens
ccagtaaacagattt

SEQ ID NO: 363771 - DNA, 15 bp, Homo sapiens
gccagtaaacagatt

SEQ ID NO: 363772 - DNA, 15 bp, Homo sapiens
agccagtaaacagat

SEQ ID NO: 363773 - DNA, 15 bp, Homo sapiens
aagccagtaaacaga

SEQ ID NO: 363774 - DNA, 15 bp, Homo sapiens
taagccagtaaacag

SEQ ID NO: 363775 - DNA, 15 bp, Homo sapiens
ataagccagtaaaca

SEQ ID NO: 363776 - DNA, 15 bp, Homo sapiens
aataagccagtaaac

SEQ ID NO: 363777 - DNA, 15 bp, Homo sapiens
aaataagccagtaaa

SEQ ID NO: 363778 - DNA, 15 bp, Homo sapiens
taaataagccagtaa

SEQ ID NO: 363779 - DNA, 15 bp, Homo sapiens
ataaataagccagta

SEQ ID NO: 363780 - DNA, 15 bp, Homo sapiens
aataaataagccagt

SEQ ID NO: 363781 - DNA, 15 bp, Homo sapiens
aaataaataagccag

SEQ ID NO: 363782 - DNA, 15 bp, Homo sapiens
aaaataaataagcca

SEQ ID NO: 363783 - DNA, 15 bp, Homo sapiens
aaaaataaataagcc

SEQ ID NO: 363784 - DNA, 15 bp, Homo sapiens
aaaaaataaataagc

SEQ ID NO: 363785 - DNA, 15 bp, Homo sapiens
taaaaaataaataag

SEQ ID NO: 363786 - DNA, 15 bp, Homo sapiens
ttaaaaaataaataa

SEQ ID NO: 363787 - DNA, 15 bp, Homo sapiens
tttaaaaaataaata

SEQ ID NO: 363788 - DNA, 15 bp, Homo sapiens
atttaaaaaataaat

SEQ ID NO: 363789 - DNA, 15 bp, Homo sapiens
catttaaaaaataaa

SEQ ID NO: 363790 - DNA, 15 bp, Homo sapiens
acatttaaaaaataa

SEQ ID NO: 363791 - DNA, 15 bp, Homo sapiens
tacatttaaaaaata

SEQ ID NO: 363792 - DNA, 15 bp, Homo sapiens
gtacatttaaaaaat

SEQ ID NO: 363793 - DNA, 15 bp, Homo sapiens
ggtacatttaaaaaa

SEQ ID NO: 363794 - DNA, 15 bp, Homo sapiens
aggtacatttaaaaa

SEQ ID NO: 363795 - DNA, 15 bp, Homo sapiens
caggtacatttaaaa

SEQ ID NO: 363796 - DNA, 15 bp, Homo sapiens
acaggtacatttaaa

SEQ ID NO: 363797 - DNA, 15 bp, Homo sapiens
tacaggtacatttaa

SEQ ID NO: 363798 - DNA, 15 bp, Homo sapiens
ttacaggtacattta

SEQ ID NO: 363799 - DNA, 15 bp, Homo sapiens
attacaggtacattt

SEQ ID NO: 363800 - DNA, 15 bp, Homo sapiens
tattacaggtacatt

SEQ ID NO: 363801 - DNA, 15 bp, Homo sapiens
atattacaggtacat

SEQ ID NO: 363802 - DNA, 15 bp, Homo sapiens
tatattacaggtaca

SEQ ID NO: 363803 - DNA, 15 bp, Homo sapiens
gtatattacaggtac

SEQ ID NO: 363804 - DNA, 15 bp, Homo sapiens
tgtatattacaggta

SEQ ID NO: 363805 - DNA, 15 bp, Homo sapiens
ttgtatattacaggt

SEQ ID NO: 363806 - DNA, 15 bp, Homo sapiens
tttgtatattacagg

SEQ ID NO: 363807 - DNA, 15 bp, Homo sapiens
atttgtatattacag

SEQ ID NO: 363808 - DNA, 15 bp, Homo sapiens
tatttgtatattaca

SEQ ID NO: 363809 - DNA, 15 bp, Homo sapiens
atatttgtatattac

SEQ ID NO: 363810 - DNA, 15 bp, Homo sapiens
catatttgtatatta

SEQ ID NO: 363811 - DNA, 15 bp, Homo sapiens
acatatttgtatatt

SEQ ID NO: 363812 - DNA, 15 bp, Homo sapiens
aacatatttgtatat

SEQ ID NO: 363813 - DNA, 15 bp, Homo sapiens
gaacatatttgtata

SEQ ID NO: 363814 - DNA, 15 bp, Homo sapiens
agaacatatttgtat

SEQ ID NO: 363815 - DNA, 15 bp, Homo sapiens
aagaacatatttgta

SEQ ID NO: 363816 - DNA, 15 bp, Homo sapiens
caagaacatatttgt

SEQ ID NO: 363817 - DNA, 15 bp, Homo sapiens
acaagaacatatttg

SEQ ID NO: 363818 - DNA, 15 bp, Homo sapiens
aacaagaacatattt

SEQ ID NO: 363819 - DNA, 15 bp, Homo sapiens
taacaagaacatatt

SEQ ID NO: 363820 - DNA, 15 bp, Homo sapiens
ataacaagaacatat

SEQ ID NO: 363821 - DNA, 15 bp, Homo sapiens
tataacaagaacata

SEQ ID NO: 363822 - DNA, 15 bp, Homo sapiens
ttataacaagaacat

SEQ ID NO: 363823 - DNA, 15 bp, Homo sapiens
tttataacaagaaca

SEQ ID NO: 363824 - DNA, 15 bp, Homo sapiens
ttttataacaagaac

SEQ ID NO: 363825 - DNA, 15 bp, Homo sapiens
attttataacaagaa

SEQ ID NO: 363826 - DNA, 15 bp, Homo sapiens
tattttataacaaga

SEQ ID NO: 363827 - DNA, 15 bp, Homo sapiens
atattttataacaag

SEQ ID NO: 363828 - DNA, 15 bp, Homo sapiens
aatattttataacaa

SEQ ID NO: 363829 - DNA, 15 bp, Homo sapiens
gaatattttataaca

SEQ ID NO: 363830 - DNA, 15 bp, Homo sapiens
tgaatattttataac

SEQ ID NO: 363831 - DNA, 15 bp, Homo sapiens
ttgaatattttataa

SEQ ID NO: 363832 - DNA, 15 bp, Homo sapiens
cttgaatattttata

SEQ ID NO: 363833 - DNA, 15 bp, Homo sapiens
gcttgaatattttat

SEQ ID NO: 363834 - DNA, 15 bp, Homo sapiens
tgcttgaatatttta

SEQ ID NO: 363835 - DNA, 15 bp, Homo sapiens
ttgcttgaatatttt

SEQ ID NO: 363836 - DNA, 15 bp, Homo sapiens
attgcttgaatattt

SEQ ID NO: 363837 - DNA, 15 bp, Homo sapiens
tattgcttgaatatt

SEQ ID NO: 363838 - DNA, 15 bp, Homo sapiens
atattgcttgaatat

SEQ ID NO: 363839 - DNA, 15 bp, Homo sapiens
tatattgcttgaata

SEQ ID NO: 363840 - DNA, 15 bp, Homo sapiens
ctatattgcttgaat

SEQ ID NO: 363841 - DNA, 15 bp, Homo sapiens
tctatattgcttgaa

SEQ ID NO: 363842 - DNA, 15 bp, Homo sapiens
ttctatattgcttga

SEQ ID NO: 363843 - DNA, 15 bp, Homo sapiens
cttctatattgcttg

SEQ ID NO: 363844 - DNA, 15 bp, Homo sapiens
acttctatattgctt

SEQ ID NO: 363845 - DNA, 15 bp, Homo sapiens
tacttctatattgct

SEQ ID NO: 363846 - DNA, 15 bp, Homo sapiens
atacttctatattgc

SEQ ID NO: 363847 - DNA, 15 bp, Homo sapiens
tatacttctatattg

SEQ ID NO: 363848 - DNA, 15 bp, Homo sapiens
atatacttctatatt

SEQ ID NO: 363849 - DNA, 15 bp, Homo sapiens
tatatacttctatat

SEQ ID NO: 363850 - DNA, 15 bp, Homo sapiens
ttatatacttctata

SEQ ID NO: 363851 - DNA, 15 bp, Homo sapiens
tttatatacttctat

SEQ ID NO: 363852 - DNA, 15 bp, Homo sapiens
ctttatatacttcta

SEQ ID NO: 363853 - DNA, 15 bp, Homo sapiens
actttatatacttct

SEQ ID NO: 363854 - DNA, 15 bp, Homo sapiens
cactttatatacttc

SEQ ID NO: 363855 - DNA, 15 bp, Homo sapiens
tcactttatatactt

SEQ ID NO: 363856 - DNA, 15 bp, Homo sapiens
ttcactttatatact

SEQ ID NO: 363857 - DNA, 15 bp, Homo sapiens
tttcactttatatac

SEQ ID NO: 363858 - DNA, 15 bp, Homo sapiens
ttttcactttatata

SEQ ID NO: 363859 - DNA, 15 bp, Homo sapiens
cttttcactttatat

SEQ ID NO: 363860 - DNA, 15 bp, Homo sapiens
gcttttcactttata

SEQ ID NO: 363861 - DNA, 15 bp, Homo sapiens
tgcttttcactttat

SEQ ID NO: 363862 - DNA, 15 bp, Homo sapiens
ttgcttttcacttta

SEQ ID NO: 363863 - DNA, 15 bp, Homo sapiens
tttgcttttcacttt

SEQ ID NO: 363864 - DNA, 15 bp, Homo sapiens
gtttgcttttcactt

SEQ ID NO: 363865 - DNA, 15 bp, Homo sapiens
agtttgcttttcact

SEQ ID NO: 363866 - DNA, 15 bp, Homo sapiens
aagtttgcttttcac

SEQ ID NO: 363867 - DNA, 15 bp, Homo sapiens
aaagtttgcttttca

SEQ ID NO: 363868 - DNA, 15 bp, Homo sapiens
gaaagtttgcttttc

SEQ ID NO: 363869 - DNA, 15 bp, Homo sapiens
ggaaagtttgctttt

SEQ ID NO: 363870 - DNA, 15 bp, Homo sapiens
gggaaagtttgcttt

SEQ ID NO: 363871 - DNA, 15 bp, Homo sapiens
ggggaaagtttgctt

SEQ ID NO: 363872 - DNA, 15 bp, Homo sapiens
aggggaaagtttgct

SEQ ID NO: 363873 - DNA, 15 bp, Homo sapiens
gaggggaaagtttgc

SEQ ID NO: 363874 - DNA, 15 bp, Homo sapiens
tgaggggaaagtttg

SEQ ID NO: 363875 - DNA, 15 bp, Homo sapiens
gtgaggggaaagttt

SEQ ID NO: 363876 - DNA, 15 bp, Homo sapiens
ggtgaggggaaagtt

SEQ ID NO: 363877 - DNA, 15 bp, Homo sapiens
gggtgaggggaaagt

SEQ ID NO: 363878 - DNA, 15 bp, Homo sapiens
ggggtgaggggaaag

SEQ ID NO: 363879 - DNA, 15 bp, Homo sapiens
gggggtgaggggaaa

SEQ ID NO: 363880 - DNA, 15 bp, Homo sapiens
tgggggtgaggggaa

SEQ ID NO: 363881 - DNA, 15 bp, Homo sapiens
gtgggggtgagggga

SEQ ID NO: 363882 - DNA, 15 bp, Homo sapiens
cgtgggggtgagggg

SEQ ID NO: 363883 - DNA, 15 bp, Homo sapiens
tcgtgggggtgaggg

SEQ ID NO: 363884 - DNA, 15 bp, Homo sapiens
ttcgtgggggtgagg

SEQ ID NO: 363885 - DNA, 15 bp, Homo sapiens
attcgtgggggtgag

SEQ ID NO: 363886 - DNA, 15 bp, Homo sapiens
gattcgtgggggtga

SEQ ID NO: 363887 - DNA, 15 bp, Homo sapiens
ggattcgtgggggtg

SEQ ID NO: 363888 - DNA, 15 bp, Homo sapiens
aggattcgtgggggt

SEQ ID NO: 363889 - DNA, 15 bp, Homo sapiens
taggattcgtggggg

SEQ ID NO: 363890 - DNA, 15 bp, Homo sapiens
ataggattcgtgggg

SEQ ID NO: 363891 - DNA, 15 bp, Homo sapiens
aataggattcgtggg

SEQ ID NO: 363892 - DNA, 15 bp, Homo sapiens
aaataggattcgtgg

SEQ ID NO: 363893 - DNA, 15 bp, Homo sapiens
gaaataggattcgtg

SEQ ID NO: 363894 - DNA, 15 bp, Homo sapiens
ggaaataggattcgt

SEQ ID NO: 363895 - DNA, 15 bp, Homo sapiens
gggaaataggattcg

SEQ ID NO: 363896 - DNA, 15 bp, Homo sapiens
agggaaataggattc

SEQ ID NO: 363897 - DNA, 15 bp, Homo sapiens
aagggaaataggatt

SEQ ID NO: 363898 - DNA, 15 bp, Homo sapiens
gaagggaaataggat

SEQ ID NO: 363899 - DNA, 15 bp, Homo sapiens
ggaagggaaatagga

SEQ ID NO: 363900 - DNA, 15 bp, Homo sapiens
gggaagggaaatagg

SEQ ID NO: 363901 - DNA, 15 bp, Homo sapiens
tgggaagggaaatag

SEQ ID NO: 363902 - DNA, 15 bp, Homo sapiens
ctgggaagggaaata

SEQ ID NO: 363903 - DNA, 15 bp, Homo sapiens
tctgggaagggaaat

SEQ ID NO: 363904 - DNA, 15 bp, Homo sapiens
ctctgggaagggaaa

SEQ ID NO: 363905 - DNA, 15 bp, Homo sapiens
cctctgggaagggaa

SEQ ID NO: 363906 - DNA, 15 bp, Homo sapiens
ccctctgggaaggga

SEQ ID NO: 363907 - DNA, 15 bp, Homo sapiens
tccctctgggaaggg

SEQ ID NO: 363908 - DNA, 15 bp, Homo sapiens
ttccctctgggaagg

SEQ ID NO: 363909 - DNA, 15 bp, Homo sapiens
attccctctgggaag

SEQ ID NO: 363910 - DNA, 15 bp, Homo sapiens
aattccctctgggaa

SEQ ID NO: 363911 - DNA, 15 bp, Homo sapiens
taattccctctggga

SEQ ID NO: 363912 - DNA, 15 bp, Homo sapiens
gtaattccctctggg

SEQ ID NO: 363913 - DNA, 15 bp, Homo sapiens
ggtaattccctctgg

SEQ ID NO: 363914 - DNA, 15 bp, Homo sapiens
tggtaattccctctg

SEQ ID NO: 363915 - DNA, 15 bp, Homo sapiens
atggtaattccctct

SEQ ID NO: 363916 - DNA, 15 bp, Homo sapiens
aatggtaattccctc

SEQ ID NO: 363917 - DNA, 15 bp, Homo sapiens
taatggtaattccct

SEQ ID NO: 363918 - DNA, 15 bp, Homo sapiens
ataatggtaattccc

SEQ ID NO: 363919 - DNA, 15 bp, Homo sapiens
aataatggtaattcc

SEQ ID NO: 363920 - DNA, 15 bp, Homo sapiens
taataatggtaattc

SEQ ID NO: 363921 - DNA, 15 bp, Homo sapiens
ctaataatggtaatt

SEQ ID NO: 363922 - DNA, 15 bp, Homo sapiens
actaataatggtaat

SEQ ID NO: 363923 - DNA, 15 bp, Homo sapiens
cactaataatggtaa

SEQ ID NO: 363924 - DNA, 15 bp, Homo sapiens
acactaataatggta

SEQ ID NO: 363925 - DNA, 15 bp, Homo sapiens
tacactaataatggt

SEQ ID NO: 363926 - DNA, 15 bp, Homo sapiens
ttacactaataatgg

SEQ ID NO: 363927 - DNA, 15 bp, Homo sapiens
attacactaataatg

SEQ ID NO: 363928 - DNA, 15 bp, Homo sapiens
cattacactaataat

SEQ ID NO: 363929 - DNA, 15 bp, Homo sapiens
ccattacactaataa

SEQ ID NO: 363930 - DNA, 15 bp, Homo sapiens
gccattacactaata

SEQ ID NO: 363931 - DNA, 15 bp, Homo sapiens
agccattacactaat

SEQ ID NO: 363932 - DNA, 15 bp, Homo sapiens
tagccattacactaa

SEQ ID NO: 363933 - DNA, 15 bp, Homo sapiens
atagccattacacta

SEQ ID NO: 363934 - DNA, 15 bp, Homo sapiens
aatagccattacact

SEQ ID NO: 363935 - DNA, 15 bp, Homo sapiens
aaatagccattacac

SEQ ID NO: 363936 - DNA, 15 bp, Homo sapiens
aaaatagccattaca

SEQ ID NO: 363937 - DNA, 15 bp, Homo sapiens
aaaaatagccattac

SEQ ID NO: 363938 - DNA, 15 bp, Homo sapiens
gaaaaatagccatta

SEQ ID NO: 363939 - DNA, 15 bp, Homo sapiens
ggaaaaatagccatt

SEQ ID NO: 363940 - DNA, 15 bp, Homo sapiens
aggaaaaatagccat

SEQ ID NO: 363941 - DNA, 15 bp, Homo sapiens
caggaaaaatagcca

SEQ ID NO: 363942 - DNA, 15 bp, Homo sapiens
acaggaaaaatagcc

SEQ ID NO: 363943 - DNA, 15 bp, Homo sapiens
cacaggaaaaatagc

SEQ ID NO: 363944 - DNA, 15 bp, Homo sapiens
gcacaggaaaaatag

SEQ ID NO: 363945 - DNA, 15 bp, Homo sapiens
agcacaggaaaaata

SEQ ID NO: 363946 - DNA, 15 bp, Homo sapiens
aagcacaggaaaaat

SEQ ID NO: 363947 - DNA, 15 bp, Homo sapiens
aaagcacaggaaaaa

SEQ ID NO: 363948 - DNA, 15 bp, Homo sapiens
gaaagcacaggaaaa

SEQ ID NO: 363949 - DNA, 15 bp, Homo sapiens
ggaaagcacaggaaa

SEQ ID NO: 363950 - DNA, 15 bp, Homo sapiens
aggaaagcacaggaa

SEQ ID NO: 363951 - DNA, 15 bp, Homo sapiens
aaggaaagcacagga

SEQ ID NO: 363952 - DNA, 15 bp, Homo sapiens
gaaggaaagcacagg

SEQ ID NO: 363953 - DNA, 15 bp, Homo sapiens
ggaaggaaagcacag

SEQ ID NO: 363954 - DNA, 15 bp, Homo sapiens
tggaaggaaagcaca

SEQ ID NO: 363955 - DNA, 15 bp, Homo sapiens
ttggaaggaaagcac

SEQ ID NO: 363956 - DNA, 15 bp, Homo sapiens
tttggaaggaaagca

SEQ ID NO: 363957 - DNA, 15 bp, Homo sapiens
atttggaaggaaagc

SEQ ID NO: 363958 - DNA, 15 bp, Homo sapiens
aatttggaaggaaag

SEQ ID NO: 363959 - DNA, 15 bp, Homo sapiens
aaatttggaaggaaa

SEQ ID NO: 363960 - DNA, 15 bp, Homo sapiens
taaatttggaaggaa

SEQ ID NO: 363961 - DNA, 15 bp, Homo sapiens
gtaaatttggaagga

SEQ ID NO: 363962 - DNA, 15 bp, Homo sapiens
tgtaaatttggaagg

SEQ ID NO: 363963 - DNA, 15 bp, Homo sapiens
atgtaaatttggaag

SEQ ID NO: 363964 - DNA, 15 bp, Homo sapiens
tatgtaaatttggaa

SEQ ID NO: 363965 - DNA, 15 bp, Homo sapiens
gtatgtaaatttgga

SEQ ID NO: 363966 - DNA, 15 bp, Homo sapiens
tgtatgtaaatttgg

SEQ ID NO: 363967 - DNA, 15 bp, Homo sapiens
atgtatgtaaatttg

SEQ ID NO: 363968 - DNA, 15 bp, Homo sapiens
aatgtatgtaaattt

SEQ ID NO: 363969 - DNA, 15 bp, Homo sapiens
aaatgtatgtaaatt

SEQ ID NO: 363970 - DNA, 15 bp, Homo sapiens
taaatgtatgtaaat

SEQ ID NO: 363971 - DNA, 15 bp, Homo sapiens
ataaatgtatgtaaa

SEQ ID NO: 363972 - DNA, 15 bp, Homo sapiens
tataaatgtatgtaa

SEQ ID NO: 363973 - DNA, 15 bp, Homo sapiens
atataaatgtatgta

SEQ ID NO: 363974 - DNA, 15 bp, Homo sapiens
tatataaatgtatgt

SEQ ID NO: 363975 - DNA, 15 bp, Homo sapiens
atatataaatgtatg

SEQ ID NO: 363976 - DNA, 15 bp, Homo sapiens
tatatataaatgtat

SEQ ID NO: 363977 - DNA, 15 bp, Homo sapiens
catatatataaatgt

SEQ ID NO: 363978 - DNA, 15 bp, Homo sapiens
acatatatataaatg

SEQ ID NO: 363979 - DNA, 15 bp, Homo sapiens
tacatatatataaat

SEQ ID NO: 363980 - DNA, 15 bp, Homo sapiens
ttacatatatataaa

SEQ ID NO: 363981 - DNA, 15 bp, Homo sapiens
attacatatatataa

SEQ ID NO: 363982 - DNA, 15 bp, Homo sapiens
aattacatatatata

SEQ ID NO: 363983 - DNA, 15 bp, Homo sapiens
aaattacatatatat

SEQ ID NO: 363984 - DNA, 15 bp, Homo sapiens
aaaattacatatata

SEQ ID NO: 363985 - DNA, 15 bp, Homo sapiens
taaaattacatatat

SEQ ID NO: 363986 - DNA, 15 bp, Homo sapiens
ataaaattacatata

SEQ ID NO: 363987 - DNA, 15 bp, Homo sapiens
aataaaattacatat

SEQ ID NO: 363988 - DNA, 15 bp, Homo sapiens
aaataaaattacata

SEQ ID NO: 363989 - DNA, 15 bp, Homo sapiens
aaaataaaattacat

SEQ ID NO: 363990 - DNA, 15 bp, Homo sapiens
caaaataaaattaca

SEQ ID NO: 363991 - DNA, 15 bp, Homo sapiens
acaaaataaaattac

SEQ ID NO: 363992 - DNA, 15 bp, Homo sapiens
cacaaaataaaatta

SEQ ID NO: 363993 - DNA, 15 bp, Homo sapiens
ccacaaaataaaatt

SEQ ID NO: 363994 - DNA, 15 bp, Homo sapiens
cccacaaaataaaat

SEQ ID NO: 363995 - DNA, 15 bp, Homo sapiens
acccacaaaataaaa

SEQ ID NO: 363996 - DNA, 15 bp, Homo sapiens
aacccacaaaataaa

SEQ ID NO: 363997 - DNA, 15 bp, Homo sapiens
aaacccacaaaataa

SEQ ID NO: 363998 - DNA, 15 bp, Homo sapiens
aaaacccacaaaata

SEQ ID NO: 363999 - DNA, 15 bp, Homo sapiens
aaaaacccacaaaat

SEQ ID NO: 364000 - DNA, 15 bp, Homo sapiens
aaaaaacccacaaaa

SEQ ID NO: 364001 - DNA, 15 bp, Homo sapiens
aaaaaaacccacaaa

SEQ ID NO: 364002 - DNA, 15 bp, Homo sapiens
aaaaaaaacccacaa

SEQ ID NO: 364003 - DNA, 15 bp, Homo sapiens
aaaaaaaaacccaca

SEQ ID NO: 364004 - DNA, 15 bp, Homo sapiens
taaaaaaaaaaaccc

SEQ ID NO: 364005 - DNA, 15 bp, Homo sapiens
gtaaaaaaaaaaacc

SEQ ID NO: 364006 - DNA, 15 bp, Homo sapiens
tgtaaaaaaaaaaac

SEQ ID NO: 364007 - DNA, 15 bp, Homo sapiens
atgtaaaaaaaaaaa

SEQ ID NO: 364008 - DNA, 15 bp, Homo sapiens
tatgtaaaaaaaaaa

SEQ ID NO: 364009 - DNA, 15 bp, Homo sapiens
ttatgtaaaaaaaaa

SEQ ID NO: 364010 - DNA, 15 bp, Homo sapiens
tttatgtaaaaaaaa

SEQ ID NO: 364011 - DNA, 15 bp, Homo sapiens
atttatgtaaaaaaa

SEQ ID NO: 364012 - DNA, 15 bp, Homo sapiens
catttatgtaaaaaa

SEQ ID NO: 364013 - DNA, 15 bp, Homo sapiens
tcatttatgtaaaaa

SEQ ID NO: 364014 - DNA, 15 bp, Homo sapiens
ttcatttatgtaaaa

SEQ ID NO: 364015 - DNA, 15 bp, Homo sapiens
tttcatttatgtaaa

SEQ ID NO: 364016 - DNA, 15 bp, Homo sapiens
gtttcatttatgtaa

SEQ ID NO: 364017 - DNA, 15 bp, Homo sapiens
agtttcatttatgta

SEQ ID NO: 364018 - DNA, 15 bp, Homo sapiens
tagtttcatttatgt

SEQ ID NO: 364019 - DNA, 15 bp, Homo sapiens
atagtttcatttatg

SEQ ID NO: 364020 - DNA, 15 bp, Homo sapiens
tatagtttcatttat

SEQ ID NO: 364021 - DNA, 15 bp, Homo sapiens
gtatagtttcattta

SEQ ID NO: 364022 - DNA, 15 bp, Homo sapiens
agtatagtttcattt

SEQ ID NO: 364023 - DNA, 15 bp, Homo sapiens
aagtatagtttcatt

SEQ ID NO: 364024 - DNA, 15 bp, Homo sapiens
aaagtatagtttcat

SEQ ID NO: 364025 - DNA, 15 bp, Homo sapiens
aaaagtatagtttca

SEQ ID NO: 364026 - DNA, 15 bp, Homo sapiens
aaaaagtatagtttc

SEQ ID NO: 364027 - DNA, 15 bp, Homo sapiens
aaaaaagtatagttt

SEQ ID NO: 364028 - DNA, 15 bp, Homo sapiens
aaaaaaagtatagtt

SEQ ID NO: 364029 - DNA, 15 bp, Homo sapiens
aaaaaaaagtatagt

SEQ ID NO: 364030 - DNA, 15 bp, Homo sapiens
taaaaaaaagtatag

SEQ ID NO: 364031 - DNA, 15 bp, Homo sapiens
ttaaaaaaaagtata

SEQ ID NO: 364032 - DNA, 15 bp, Homo sapiens
gttaaaaaaaagtat

SEQ ID NO: 364033 - DNA, 15 bp, Homo sapiens
agttaaaaaaaagta

SEQ ID NO: 364034 - DNA, 15 bp, Homo sapiens
cagttaaaaaaaagt

SEQ ID NO: 364035 - DNA, 15 bp, Homo sapiens
gcagttaaaaaaaag

SEQ ID NO: 364036 - DNA, 15 bp, Homo sapiens
agcagttaaaaaaaa

SEQ ID NO: 364037 - DNA, 15 bp, Homo sapiens
cagcagttaaaaaaa

SEQ ID NO: 364038 - DNA, 15 bp, Homo sapiens
acagcagttaaaaaa

SEQ ID NO: 364039 - DNA, 15 bp, Homo sapiens
tacagcagttaaaaa

SEQ ID NO: 364040 - DNA, 15 bp, Homo sapiens
ctacagcagttaaaa

SEQ ID NO: 364041 - DNA, 15 bp, Homo sapiens
tctacagcagttaaa

SEQ ID NO: 364042 - DNA, 15 bp, Homo sapiens
ttctacagcagttaa

SEQ ID NO: 364043 - DNA, 15 bp, Homo sapiens
gttctacagcagtta

SEQ ID NO: 364044 - DNA, 15 bp, Homo sapiens
agttctacagcagtt

SEQ ID NO: 364045 - DNA, 15 bp, Homo sapiens
aagttctacagcagt

SEQ ID NO: 364046 - DNA, 15 bp, Homo sapiens
aaagttctacagcag

SEQ ID NO: 364047 - DNA, 15 bp, Homo sapiens
aaaagttctacagca

SEQ ID NO: 364048 - DNA, 15 bp, Homo sapiens
aaaaagttctacagc

SEQ ID NO: 364049 - DNA, 15 bp, Homo sapiens
aaaaaagttctacag

SEQ ID NO: 364050 - DNA, 15 bp, Homo sapiens
aaaaaaagttctaca

SEQ ID NO: 364051 - DNA, 15 bp, Homo sapiens
aaaaaaaagttctac

SEQ ID NO: 364052 - DNA, 15 bp, Homo sapiens
aaaaaaaaagttcta

SEQ ID NO: 364053 - DNA, 15 bp, Homo sapiens
gaaaaaaaaagttct

SEQ ID NO: 364054 - DNA, 15 bp, Homo sapiens
tgaaaaaaaaagttc

SEQ ID NO: 364055 - DNA, 15 bp, Homo sapiens
gtgaaaaaaaaagtt

SEQ ID NO: 364056 - DNA, 15 bp, Homo sapiens
agtgaaaaaaaaagt

SEQ ID NO: 364057 - DNA, 15 bp, Homo sapiens
aagtgaaaaaaaaag

SEQ ID NO: 364058 - DNA, 15 bp, Homo sapiens
gaagtgaaaaaaaaa

SEQ ID NO: 364059 - DNA, 15 bp, Homo sapiens
ggaagtgaaaaaaaa

SEQ ID NO: 364060 - DNA, 15 bp, Homo sapiens
gggaagtgaaaaaaa

SEQ ID NO: 364061 - DNA, 15 bp, Homo sapiens
ggggaagtgaaaaaa

SEQ ID NO: 364062 - DNA, 15 bp, Homo sapiens
gggggaagtgaaaaa

SEQ ID NO: 364063 - DNA, 15 bp, Homo sapiens
agggggaagtgaaaa

SEQ ID NO: 364064 - DNA, 15 bp, Homo sapiens
gagggggaagtgaaa

SEQ ID NO: 364065 - DNA, 15 bp, Homo sapiens
agagggggaagtgaa

SEQ ID NO: 364066 - DNA, 15 bp, Homo sapiens
tagagggggaagtga

SEQ ID NO: 364067 - DNA, 15 bp, Homo sapiens
atagagggggaagtg

SEQ ID NO: 364068 - DNA, 15 bp, Homo sapiens
gatagagggggaagt

SEQ ID NO: 364069 - DNA, 15 bp, Homo sapiens
agatagagggggaag

SEQ ID NO: 364070 - DNA, 15 bp, Homo sapiens
aagatagagggggaa

SEQ ID NO: 364071 - DNA, 15 bp, Homo sapiens
taagatagaggggga

SEQ ID NO: 364072 - DNA, 15 bp, Homo sapiens
ctaagatagaggggg

SEQ ID NO: 364073 - DNA, 15 bp, Homo sapiens
cctaagatagagggg

SEQ ID NO: 364074 - DNA, 15 bp, Homo sapiens
gcctaagatagaggg

SEQ ID NO: 364075 - DNA, 15 bp, Homo sapiens
agcctaagatagagg

SEQ ID NO: 364076 - DNA, 15 bp, Homo sapiens
aagcctaagatagag

SEQ ID NO: 364077 - DNA, 15 bp, Homo sapiens
gaagcctaagataga

SEQ ID NO: 364078 - DNA, 15 bp, Homo sapiens
agaagcctaagatag

SEQ ID NO: 364079 - DNA, 15 bp, Homo sapiens
tagaagcctaagata

SEQ ID NO: 364080 - DNA, 15 bp, Homo sapiens
ttagaagcctaagat

SEQ ID NO: 364081 - DNA, 15 bp, Homo sapiens
tttagaagcctaaga

SEQ ID NO: 364082 - DNA, 15 bp, Homo sapiens
gtttagaagcctaag

SEQ ID NO: 364083 - DNA, 15 bp, Homo sapiens
ggtttagaagcctaa

SEQ ID NO: 364084 - DNA, 15 bp, Homo sapiens
tggtttagaagccta

SEQ ID NO: 364085 - DNA, 15 bp, Homo sapiens
ttggtttagaagcct

SEQ ID NO: 364086 - DNA, 15 bp, Homo sapiens
attggtttagaagcc

SEQ ID NO: 364087 - DNA, 15 bp, Homo sapiens
cattggtttagaagc

SEQ ID NO: 364088 - DNA, 15 bp, Homo sapiens
gcattggtttagaag

SEQ ID NO: 364089 - DNA, 15 bp, Homo sapiens
ggcattggtttagaa

SEQ ID NO: 364090 - DNA, 15 bp, Homo sapiens
aggcattggtttaga

SEQ ID NO: 364091 - DNA, 15 bp, Homo sapiens
caggcattggtttag

SEQ ID NO: 364092 - DNA, 15 bp, Homo sapiens
gcaggcattggttta

SEQ ID NO: 364093 - DNA, 15 bp, Homo sapiens
tgcaggcattggttt

SEQ ID NO: 364094 - DNA, 15 bp, Homo sapiens
atgcaggcattggtt

SEQ ID NO: 364095 - DNA, 15 bp, Homo sapiens
catgcaggcattggt

SEQ ID NO: 364096 - DNA, 15 bp, Homo sapiens
ccatgcaggcattgg

SEQ ID NO: 364097 - DNA, 15 bp, Homo sapiens
tccatgcaggcattg

SEQ ID NO: 364098 - DNA, 15 bp, Homo sapiens
ctccatgcaggcatt

SEQ ID NO: 364099 - DNA, 15 bp, Homo sapiens
tctccatgcaggcat

SEQ ID NO: 364100 - DNA, 15 bp, Homo sapiens
ctctccatgcaggca

SEQ ID NO: 364101 - DNA, 15 bp, Homo sapiens
gctctccatgcaggc

SEQ ID NO: 364102 - DNA, 15 bp, Homo sapiens
ggctctccatgcagg

SEQ ID NO: 364103 - DNA, 15 bp, Homo sapiens
tggctctccatgcag

SEQ ID NO: 364104 - DNA, 15 bp, Homo sapiens
ctggctctccatgca

SEQ ID NO: 364105 - DNA, 15 bp, Homo sapiens
gctggctctccatgc

SEQ ID NO: 364106 - DNA, 15 bp, Homo sapiens
agctggctctccatg

SEQ ID NO: 364107 - DNA, 15 bp, Homo sapiens
gagctggctctccat

SEQ ID NO: 364108 - DNA, 15 bp, Homo sapiens
agagctggctctcca

SEQ ID NO: 364109 - DNA, 15 bp, Homo sapiens
cagagctggctctcc

SEQ ID NO: 364110 - DNA, 15 bp, Homo sapiens
gcagagctggctctc

SEQ ID NO: 364111 - DNA, 15 bp, Homo sapiens
ggcagagctggctct

SEQ ID NO: 364112 - DNA, 15 bp, Homo sapiens
aggcagagctggctc

SEQ ID NO: 364113 - DNA, 15 bp, Homo sapiens
gaggcagagctggct

SEQ ID NO: 364114 - DNA, 15 bp, Homo sapiens
agaggcagagctggc

SEQ ID NO: 364115 - DNA, 15 bp, Homo sapiens
aagaggcagagctgg

SEQ ID NO: 364116 - DNA, 15 bp, Homo sapiens
aaagaggcagagctg

SEQ ID NO: 364117 - DNA, 15 bp, Homo sapiens
taaagaggcagagct

SEQ ID NO: 364118 - DNA, 15 bp, Homo sapiens
gtaaagaggcagagc

SEQ ID NO: 364119 - DNA, 15 bp, Homo sapiens
ggtaaagaggcagag

SEQ ID NO: 364120 - DNA, 15 bp, Homo sapiens
aggtaaagaggcaga

SEQ ID NO: 364121 - DNA, 15 bp, Homo sapiens
gaggtaaagaggcag

SEQ ID NO: 364122 - DNA, 15 bp, Homo sapiens
ggaggtaaagaggca

SEQ ID NO: 364123 - DNA, 15 bp, Homo sapiens
aggaggtaaagaggc

SEQ ID NO: 364124 - DNA, 15 bp, Homo sapiens
caggaggtaaagagg

SEQ ID NO: 364125 - DNA, 15 bp, Homo sapiens
gcaggaggtaaagag

SEQ ID NO: 364126 - DNA, 15 bp, Homo sapiens
tgcaggaggtaaaga

SEQ ID NO: 364127 - DNA, 15 bp, Homo sapiens
atgcaggaggtaaag

SEQ ID NO: 364128 - DNA, 15 bp, Homo sapiens
tatgcaggaggtaaa

SEQ ID NO: 364129 - DNA, 15 bp, Homo sapiens
gtatgcaggaggtaa

SEQ ID NO: 364130 - DNA, 15 bp, Homo sapiens
tgtatgcaggaggta

SEQ ID NO: 364131 - DNA, 15 bp, Homo sapiens
atgtatgcaggaggt

SEQ ID NO: 364132 - DNA, 15 bp, Homo sapiens
aatgtatgcaggagg

SEQ ID NO: 364133 - DNA, 15 bp, Homo sapiens
aaatgtatgcaggag

SEQ ID NO: 364134 - DNA, 15 bp, Homo sapiens
aaaatgtatgcagga

SEQ ID NO: 364135 - DNA, 15 bp, Homo sapiens
gaaaatgtatgcagg

SEQ ID NO: 364136 - DNA, 15 bp, Homo sapiens
tgaaaatgtatgcag

SEQ ID NO: 364137 - DNA, 15 bp, Homo sapiens
gtgaaaatgtatgca

SEQ ID NO: 364138 - DNA, 15 bp, Homo sapiens
agtgaaaatgtatgc

SEQ ID NO: 364139 - DNA, 15 bp, Homo sapiens
cagtgaaaatgtatg

SEQ ID NO: 364140 - DNA, 15 bp, Homo sapiens
acagtgaaaatgtat

SEQ ID NO: 364141 - DNA, 15 bp, Homo sapiens
cacagtgaaaatgta

SEQ ID NO: 364142 - DNA, 15 bp, Homo sapiens
acacagtgaaaatgt

SEQ ID NO: 364143 - DNA, 15 bp, Homo sapiens
cacacagtgaaaatg

SEQ ID NO: 364144 - DNA, 15 bp, Homo sapiens
gcacacagtgaaaat

SEQ ID NO: 364145 - DNA, 15 bp, Homo sapiens
tgcacacagtgaaaa

SEQ ID NO: 364146 - DNA, 15 bp, Homo sapiens
atgcacacagtgaaa

SEQ ID NO: 364147 - DNA, 15 bp, Homo sapiens
catgcacacagtgaa

SEQ ID NO: 364148 - DNA, 15 bp, Homo sapiens
acatgcacacagtga

SEQ ID NO: 364149 - DNA, 15 bp, Homo sapiens
gacatgcacacagtg

SEQ ID NO: 364150 - DNA, 15 bp, Homo sapiens
ggacatgcacacagt

SEQ ID NO: 364151 - DNA, 15 bp, Homo sapiens
tggacatgcacacag

SEQ ID NO: 364152 - DNA, 15 bp, Homo sapiens
ttggacatgcacaca

SEQ ID NO: 364153 - DNA, 15 bp, Homo sapiens
tttggacatgcacac

SEQ ID NO: 364154 - DNA, 15 bp, Homo sapiens
ttttggacatgcaca

SEQ ID NO: 364155 - DNA, 15 bp, Homo sapiens
cttttggacatgcac

SEQ ID NO: 364156 - DNA, 15 bp, Homo sapiens
acttttggacatgca

SEQ ID NO: 364157 - DNA, 15 bp, Homo sapiens
tacttttggacatgc

SEQ ID NO: 364158 - DNA, 15 bp, Homo sapiens
atacttttggacatg

SEQ ID NO: 364159 - DNA, 15 bp, Homo sapiens
tatacttttggacat

SEQ ID NO: 364160 - DNA, 15 bp, Homo sapiens
atatacttttggaca

SEQ ID NO: 364161 - DNA, 15 bp, Homo sapiens
aatatacttttggac

SEQ ID NO: 364162 - DNA, 15 bp, Homo sapiens
aaatatacttttgga

SEQ ID NO: 364163 - DNA, 15 bp, Homo sapiens
gaaatatacttttgg

SEQ ID NO: 364164 - DNA, 15 bp, Homo sapiens
agaaatatacttttg

SEQ ID NO: 364165 - DNA, 15 bp, Homo sapiens
gagaaatatactttt

SEQ ID NO: 364166 - DNA, 15 bp, Homo sapiens
ggagaaatatacttt

SEQ ID NO: 364167 - DNA, 15 bp, Homo sapiens
tggagaaatatactt

SEQ ID NO: 364168 - DNA, 15 bp, Homo sapiens
atggagaaatatact

SEQ ID NO: 364169 - DNA, 15 bp, Homo sapiens
aatggagaaatatac

SEQ ID NO: 364170 - DNA, 15 bp, Homo sapiens
gaatggagaaatata

SEQ ID NO: 364171 - DNA, 15 bp, Homo sapiens
ggaatggagaaatat

SEQ ID NO: 364172 - DNA, 15 bp, Homo sapiens
aggaatggagaaata

SEQ ID NO: 364173 - DNA, 15 bp, Homo sapiens
taggaatggagaaat

SEQ ID NO: 364174 - DNA, 15 bp, Homo sapiens
ataggaatggagaaa

SEQ ID NO: 364175 - DNA, 15 bp, Homo sapiens
cataggaatggagaa

SEQ ID NO: 364176 - DNA, 15 bp, Homo sapiens
acataggaatggaga

SEQ ID NO: 364177 - DNA, 15 bp, Homo sapiens
aacataggaatggag

SEQ ID NO: 364178 - DNA, 15 bp, Homo sapiens
caacataggaatgga

SEQ ID NO: 364179 - DNA, 15 bp, Homo sapiens
acaacataggaatgg

SEQ ID NO: 364180 - DNA, 15 bp, Homo sapiens
aacaacataggaatg

SEQ ID NO: 364181 - DNA, 15 bp, Homo sapiens
caacaacataggaat

SEQ ID NO: 364182 - DNA, 15 bp, Homo sapiens
ccaacaacataggaa

SEQ ID NO: 364183 - DNA, 15 bp, Homo sapiens
tccaacaacatagga

SEQ ID NO: 364184 - DNA, 15 bp, Homo sapiens
gtccaacaacatagg

SEQ ID NO: 364185 - DNA, 15 bp, Homo sapiens
tgtccaacaacatag

SEQ ID NO: 364186 - DNA, 15 bp, Homo sapiens
ttgtccaacaacata

SEQ ID NO: 364187 - DNA, 15 bp, Homo sapiens
attgtccaacaacat

SEQ ID NO: 364188 - DNA, 15 bp, Homo sapiens
aattgtccaacaaca

SEQ ID NO: 364189 - DNA, 15 bp, Homo sapiens
taattgtccaacaac

SEQ ID NO: 364190 - DNA, 15 bp, Homo sapiens
ctaattgtccaacaa

SEQ ID NO: 364191 - DNA, 15 bp, Homo sapiens
cctaattgtccaaca

SEQ ID NO: 364192 - DNA, 15 bp, Homo sapiens
acctaattgtccaac

SEQ ID NO: 364193 - DNA, 15 bp, Homo sapiens
gacctaattgtccaa

SEQ ID NO: 364194 - DNA, 15 bp, Homo sapiens
tgacctaattgtcca

SEQ ID NO: 364195 - DNA, 15 bp, Homo sapiens
atgacctaattgtcc

SEQ ID NO: 364196 - DNA, 15 bp, Homo sapiens
aatgacctaattgtc

SEQ ID NO: 364197 - DNA, 15 bp, Homo sapiens
aaatgacctaattgt

SEQ ID NO: 364198 - DNA, 15 bp, Homo sapiens
gaaatgacctaattg

SEQ ID NO: 364199 - DNA, 15 bp, Homo sapiens
ggaaatgacctaatt

SEQ ID NO: 364200 - DNA, 15 bp, Homo sapiens
gggaaatgacctaat

SEQ ID NO: 364201 - DNA, 15 bp, Homo sapiens
agggaaatgacctaa

SEQ ID NO: 364202 - DNA, 15 bp, Homo sapiens
cagggaaatgaccta

SEQ ID NO: 364203 - DNA, 15 bp, Homo sapiens
acagggaaatgacct

SEQ ID NO: 364204 - DNA, 15 bp, Homo sapiens
cacagggaaatgacc

SEQ ID NO: 364205 - DNA, 15 bp, Homo sapiens
acacagggaaatgac

SEQ ID NO: 364206 - DNA, 15 bp, Homo sapiens
tacacagggaaatga

SEQ ID NO: 364207 - DNA, 15 bp, Homo sapiens
atacacagggaaatg

SEQ ID NO: 364208 - DNA, 15 bp, Homo sapiens
aatacacagggaaat

SEQ ID NO: 364209 - DNA, 15 bp, Homo sapiens
aaatacacagggaaa

SEQ ID NO: 364210 - DNA, 15 bp, Homo sapiens
aaaatacacagggaa

SEQ ID NO: 364211 - DNA, 15 bp, Homo sapiens
aaaaatacacaggga

SEQ ID NO: 364212 - DNA, 15 bp, Homo sapiens
aaaaaatacacaggg

SEQ ID NO: 364213 - DNA, 15 bp, Homo sapiens
aaaaaaatacacagg

SEQ ID NO: 364214 - DNA, 15 bp, Homo sapiens
gaaaaaaatacacag

SEQ ID NO: 364215 - DNA, 15 bp, Homo sapiens
agaaaaaaatacaca

SEQ ID NO: 364216 - DNA, 15 bp, Homo sapiens
aagaaaaaaatacac

SEQ ID NO: 364217 - DNA, 15 bp, Homo sapiens
caagaaaaaaataca

SEQ ID NO: 364218 - DNA, 15 bp, Homo sapiens
gcaagaaaaaaatac

SEQ ID NO: 364219 - DNA, 15 bp, Homo sapiens
agcaagaaaaaaata

SEQ ID NO: 364220 - DNA, 15 bp, Homo sapiens
cagcaagaaaaaaat

SEQ ID NO: 364221 - DNA, 15 bp, Homo sapiens
tcagcaagaaaaaaa

SEQ ID NO: 364222 - DNA, 15 bp, Homo sapiens
ttcagcaagaaaaaa

SEQ ID NO: 364223 - DNA, 15 bp, Homo sapiens
tttcagcaagaaaaa

SEQ ID NO: 364224 - DNA, 15 bp, Homo sapiens
ttttcagcaagaaaa

SEQ ID NO: 364225 - DNA, 15 bp, Homo sapiens
attttcagcaagaaa

SEQ ID NO: 364226 - DNA, 15 bp, Homo sapiens
tattttcagcaagaa

SEQ ID NO: 364227 - DNA, 15 bp, Homo sapiens
atattttcagcaaga

SEQ ID NO: 364228 - DNA, 15 bp, Homo sapiens
catattttcagcaag

SEQ ID NO: 364229 - DNA, 15 bp, Homo sapiens
gcatattttcagcaa

SEQ ID NO: 364230 - DNA, 15 bp, Homo sapiens
tgcatattttcagca

SEQ ID NO: 364231 - DNA, 15 bp, Homo sapiens
ttgcatattttcagc

SEQ ID NO: 364232 - DNA, 15 bp, Homo sapiens
attgcatattttcag

SEQ ID NO: 364233 - DNA, 15 bp, Homo sapiens
tattgcatattttca

SEQ ID NO: 364234 - DNA, 15 bp, Homo sapiens
ttattgcatattttc

SEQ ID NO: 364235 - DNA, 15 bp, Homo sapiens
tttattgcatatttt

SEQ ID NO: 364236 - DNA, 15 bp, Homo sapiens
ttttattgcatattt

SEQ ID NO: 364237 - DNA, 15 bp, Homo sapiens
attttattgcatatt

SEQ ID NO: 364238 - DNA, 15 bp, Homo sapiens
aattttattgcatat

SEQ ID NO: 364239 - DNA, 15 bp, Homo sapiens
taattttattgcata

SEQ ID NO: 364240 - DNA, 15 bp, Homo sapiens
ataattttattgcat

SEQ ID NO: 364241 - DNA, 15 bp, Homo sapiens
tataattttattgca

SEQ ID NO: 364242 - DNA, 15 bp, Homo sapiens
atataattttattgc

SEQ ID NO: 364243 - DNA, 15 bp, Homo sapiens
catataattttattg

SEQ ID NO: 364244 - DNA, 15 bp, Homo sapiens
tcatataattttatt

SEQ ID NO: 364245 - DNA, 15 bp, Homo sapiens
atcatataattttat

SEQ ID NO: 364246 - DNA, 15 bp, Homo sapiens
gatcatataatttta

SEQ ID NO: 364247 - DNA, 15 bp, Homo sapiens
agatcatataatttt

SEQ ID NO: 364248 - DNA, 15 bp, Homo sapiens
cagatcatataattt

SEQ ID NO: 364249 - DNA, 15 bp, Homo sapiens
tcagatcatataatt

SEQ ID NO: 364250 - DNA, 15 bp, Homo sapiens
ttcagatcatataat

SEQ ID NO: 364251 - DNA, 15 bp, Homo sapiens
cttcagatcatataa

SEQ ID NO: 364252 - DNA, 15 bp, Homo sapiens
gcttcagatcatata

SEQ ID NO: 364253 - DNA, 15 bp, Homo sapiens
agcttcagatcatat

SEQ ID NO: 364254 - DNA, 15 bp, Homo sapiens
aagcttcagatcata

SEQ ID NO: 364255 - DNA, 15 bp, Homo sapiens
taagcttcagatcat

SEQ ID NO: 364256 - DNA, 15 bp, Homo sapiens
ttaagcttcagatca

SEQ ID NO: 364257 - DNA, 15 bp, Homo sapiens
gttaagcttcagatc

SEQ ID NO: 364258 - DNA, 15 bp, Homo sapiens
agttaagcttcagat

SEQ ID NO: 364259 - DNA, 15 bp, Homo sapiens
gagttaagcttcaga

SEQ ID NO: 364260 - DNA, 15 bp, Homo sapiens
ggagttaagcttcag

SEQ ID NO: 364261 - DNA, 15 bp, Homo sapiens
aggagttaagcttca

SEQ ID NO: 364262 - DNA, 15 bp, Homo sapiens
aaggagttaagcttc

SEQ ID NO: 364263 - DNA, 15 bp, Homo sapiens
aaaggagttaagctt

SEQ ID NO: 364264 - DNA, 15 bp, Homo sapiens
gaaaggagttaagct

SEQ ID NO: 364265 - DNA, 15 bp, Homo sapiens
ggaaaggagttaagc

SEQ ID NO: 364266 - DNA, 15 bp, Homo sapiens
tggaaaggagttaag

SEQ ID NO: 364267 - DNA, 15 bp, Homo sapiens
atggaaaggagttaa

SEQ ID NO: 364268 - DNA, 15 bp, Homo sapiens
tatggaaaggagtta

SEQ ID NO: 364269 - DNA, 15 bp, Homo sapiens
atatggaaaggagtt

SEQ ID NO: 364270 - DNA, 15 bp, Homo sapiens
gatatggaaaggagt

SEQ ID NO: 364271 - DNA, 15 bp, Homo sapiens
agatatggaaaggag

SEQ ID NO: 364272 - DNA, 15 bp, Homo sapiens
gagatatggaaagga

SEQ ID NO: 364273 - DNA, 15 bp, Homo sapiens
agagatatggaaagg

SEQ ID NO: 364274 - DNA, 15 bp, Homo sapiens
aagagatatggaaag

SEQ ID NO: 364275 - DNA, 15 bp, Homo sapiens
aaagagatatggaaa

SEQ ID NO: 364276 - DNA, 15 bp, Homo sapiens
aaaagagatatggaa

SEQ ID NO: 364277 - DNA, 15 bp, Homo sapiens
caaaagagatatgga

SEQ ID NO: 364278 - DNA, 15 bp, Homo sapiens
gcaaaagagatatgg

SEQ ID NO: 364279 - DNA, 15 bp, Homo sapiens
tgcaaaagagatatg

SEQ ID NO: 364280 - DNA, 15 bp, Homo sapiens
atgcaaaagagatat

SEQ ID NO: 364281 - DNA, 15 bp, Homo sapiens
aatgcaaaagagata

SEQ ID NO: 364282 - DNA, 15 bp, Homo sapiens
caatgcaaaagagat

SEQ ID NO: 364283 - DNA, 15 bp, Homo sapiens
gcaatgcaaaagaga

SEQ ID NO: 364284 - DNA, 15 bp, Homo sapiens
tgcaatgcaaaagag

SEQ ID NO: 364285 - DNA, 15 bp, Homo sapiens
gtgcaatgcaaaaga

SEQ ID NO: 364286 - DNA, 15 bp, Homo sapiens
tgtgcaatgcaaaag

SEQ ID NO: 364287 - DNA, 15 bp, Homo sapiens
gtgtgcaatgcaaaa

SEQ ID NO: 364288 - DNA, 15 bp, Homo sapiens
tgtgtgcaatgcaaa

SEQ ID NO: 364289 - DNA, 15 bp, Homo sapiens
atgtgtgcaatgcaa

SEQ ID NO: 364290 - DNA, 15 bp, Homo sapiens
aatgtgtgcaatgca

SEQ ID NO: 364291 - DNA, 15 bp, Homo sapiens
taatgtgtgcaatgc

SEQ ID NO: 364292 - DNA, 15 bp, Homo sapiens
ttaatgtgtgcaatg

SEQ ID NO: 364293 - DNA, 15 bp, Homo sapiens
attaatgtgtgcaat

SEQ ID NO: 364294 - DNA, 15 bp, Homo sapiens
aattaatgtgtgcaa

SEQ ID NO: 364295 - DNA, 15 bp, Homo sapiens
gaattaatgtgtgca

SEQ ID NO: 364296 - DNA, 15 bp, Homo sapiens
ggaattaatgtgtgc

SEQ ID NO: 364297 - DNA, 15 bp, Homo sapiens
tggaattaatgtgtg

SEQ ID NO: 364298 - DNA, 15 bp, Homo sapiens
gtggaattaatgtgt

SEQ ID NO: 364299 - DNA, 15 bp, Homo sapiens
agtggaattaatgtg

SEQ ID NO: 364300 - DNA, 15 bp, Homo sapiens
gagtggaattaatgt

SEQ ID NO: 364301 - DNA, 15 bp, Homo sapiens
ggagtggaattaatg

SEQ ID NO: 364302 - DNA, 15 bp, Homo sapiens
tggagtggaattaat

SEQ ID NO: 364303 - DNA, 15 bp, Homo sapiens
atggagtggaattaa

SEQ ID NO: 364304 - DNA, 15 bp, Homo sapiens
gatggagtggaatta

SEQ ID NO: 364305 - DNA, 15 bp, Homo sapiens
ggatggagtggaatt

SEQ ID NO: 364306 - DNA, 15 bp, Homo sapiens
tggatggagtggaat

SEQ ID NO: 364307 - DNA, 15 bp, Homo sapiens
atggatggagtggaa

SEQ ID NO: 364308 - DNA, 15 bp, Homo sapiens
tatggatggagtgga

SEQ ID NO: 364309 - DNA, 15 bp, Homo sapiens
ctatggatggagtgg

SEQ ID NO: 364310 - DNA, 15 bp, Homo sapiens
gctatggatggagtg

SEQ ID NO: 364311 - DNA, 15 bp, Homo sapiens
ggctatggatggagt

SEQ ID NO: 364312 - DNA, 15 bp, Homo sapiens
aggctatggatggag

SEQ ID NO: 364313 - DNA, 15 bp, Homo sapiens
gaggctatggatgga

SEQ ID NO: 364314 - DNA, 15 bp, Homo sapiens
ggaggctatggatgg

SEQ ID NO: 364315 - DNA, 15 bp, Homo sapiens
tggaggctatggatg

SEQ ID NO: 364316 - DNA, 15 bp, Homo sapiens
ttggaggctatggat

SEQ ID NO: 364317 - DNA, 15 bp, Homo sapiens
tttggaggctatgga

SEQ ID NO: 364318 - DNA, 15 bp, Homo sapiens
atttggaggctatgg

SEQ ID NO: 364319 - DNA, 15 bp, Homo sapiens
aatttggaggctatg

SEQ ID NO: 364320 - DNA, 15 bp, Homo sapiens
caatttggaggctat

SEQ ID NO: 364321 - DNA, 15 bp, Homo sapiens
tcaatttggaggcta

SEQ ID NO: 364322 - DNA, 15 bp, Homo sapiens
ctcaatttggaggct

SEQ ID NO: 364323 - DNA, 15 bp, Homo sapiens
gctcaatttggaggc

SEQ ID NO: 364324 - DNA, 15 bp, Homo sapiens
ggctcaatttggagg

SEQ ID NO: 364325 - DNA, 15 bp, Homo sapiens
cggctcaatttggag

SEQ ID NO: 364326 - DNA, 15 bp, Homo sapiens
gcggctcaatttgga

SEQ ID NO: 364327 - DNA, 15 bp, Homo sapiens
tgcggctcaatttgg

SEQ ID NO: 364328 - DNA, 15 bp, Homo sapiens
gtgcggctcaatttg

SEQ ID NO: 364329 - DNA, 15 bp, Homo sapiens
tgtgcggctcaattt

SEQ ID NO: 364330 - DNA, 15 bp, Homo sapiens
atgtgcggctcaatt

SEQ ID NO: 364331 - DNA, 15 bp, Homo sapiens
gatgtgcggctcaat

SEQ ID NO: 364332 - DNA, 15 bp, Homo sapiens
ggatgtgcggctcaa

SEQ ID NO: 364333 - DNA, 15 bp, Homo sapiens
tggatgtgcggctca

SEQ ID NO: 364334 - DNA, 15 bp, Homo sapiens
ctggatgtgcggctc

SEQ ID NO: 364335 - DNA, 15 bp, Homo sapiens
cctggatgtgcggct

SEQ ID NO: 364336 - DNA, 15 bp, Homo sapiens
gcctggatgtgcggc

SEQ ID NO: 364337 - DNA, 15 bp, Homo sapiens
ggcctggatgtgcgg

SEQ ID NO: 364338 - DNA, 15 bp, Homo sapiens
gggcctggatgtgcg

SEQ ID NO: 364339 - DNA, 15 bp, Homo sapiens
tgggcctggatgtgc

SEQ ID NO: 364340 - DNA, 15 bp, Homo sapiens
gtgggcctggatgtg

SEQ ID NO: 364341 - DNA, 15 bp, Homo sapiens
ggtgggcctggatgt

SEQ ID NO: 364342 - DNA, 15 bp, Homo sapiens
aggtgggcctggatg

SEQ ID NO: 364343 - DNA, 15 bp, Homo sapiens
gaggtgggcctggat

SEQ ID NO: 364344 - DNA, 15 bp, Homo sapiens
tgaggtgggcctgga

SEQ ID NO: 364345 - DNA, 15 bp, Homo sapiens
atgaggtgggcctgg

SEQ ID NO: 364346 - DNA, 15 bp, Homo sapiens
gatgaggtgggcctg

SEQ ID NO: 364347 - DNA, 15 bp, Homo sapiens
tgatgaggtgggcct

SEQ ID NO: 364348 - DNA, 15 bp, Homo sapiens
gtgatgaggtgggcc

SEQ ID NO: 364349 - DNA, 15 bp, Homo sapiens
agtgatgaggtgggc

SEQ ID NO: 364350 - DNA, 15 bp, Homo sapiens
gagtgatgaggtggg

SEQ ID NO: 364351 - DNA, 15 bp, Homo sapiens
agagtgatgaggtgg

SEQ ID NO: 364352 - DNA, 15 bp, Homo sapiens
cagagtgatgaggtg

SEQ ID NO: 364353 - DNA, 15 bp, Homo sapiens
acagagtgatgaggt

SEQ ID NO: 364354 - DNA, 15 bp, Homo sapiens
cacagagtgatgagg

SEQ ID NO: 364355 - DNA, 15 bp, Homo sapiens
gcacagagtgatgag

SEQ ID NO: 364356 - DNA, 15 bp, Homo sapiens
agcacagagtgatga

SEQ ID NO: 364357 - DNA, 15 bp, Homo sapiens
gagcacagagtgatg

SEQ ID NO: 364358 - DNA, 15 bp, Homo sapiens
tgagcacagagtgat

SEQ ID NO: 364359 - DNA, 15 bp, Homo sapiens
gtgagcacagagtga

SEQ ID NO: 364360 - DNA, 15 bp, Homo sapiens
agtgagcacagagtg

SEQ ID NO: 364361 - DNA, 15 bp, Homo sapiens
cagtgagcacagagt

SEQ ID NO: 364362 - DNA, 15 bp, Homo sapiens
ccagtgagcacagag

SEQ ID NO: 364363 - DNA, 15 bp, Homo sapiens
gccagtgagcacaga

SEQ ID NO: 364364 - DNA, 15 bp, Homo sapiens
ggccagtgagcacag

SEQ ID NO: 364365 - DNA, 15 bp, Homo sapiens
tggccagtgagcaca

SEQ ID NO: 364366 - DNA, 15 bp, Homo sapiens
atggccagtgagcac

SEQ ID NO: 364367 - DNA, 15 bp, Homo sapiens
aatggccagtgagca

SEQ ID NO: 364368 - DNA, 15 bp, Homo sapiens
aaatggccagtgagc

SEQ ID NO: 364369 - DNA, 15 bp, Homo sapiens
gaaatggccagtgag

SEQ ID NO: 364370 - DNA, 15 bp, Homo sapiens
agaaatggccagtga

SEQ ID NO: 364371 - DNA, 15 bp, Homo sapiens
gagaaatggccagtg

SEQ ID NO: 364372 - DNA, 15 bp, Homo sapiens
ggagaaatggccagt

SEQ ID NO: 364373 - DNA, 15 bp, Homo sapiens
aggagaaatggccag

SEQ ID NO: 364374 - DNA, 15 bp, Homo sapiens
aaggagaaatggcca

SEQ ID NO: 364375 - DNA, 15 bp, Homo sapiens
caaggagaaatggcc

SEQ ID NO: 364376 - DNA, 15 bp, Homo sapiens
ccaaggagaaatggc

SEQ ID NO: 364377 - DNA, 15 bp, Homo sapiens
gccaaggagaaatgg

SEQ ID NO: 364378 - DNA, 15 bp, Homo sapiens
agccaaggagaaatg

SEQ ID NO: 364379 - DNA, 15 bp, Homo sapiens
cagccaaggagaaat

SEQ ID NO: 364380 - DNA, 15 bp, Homo sapiens
gcagccaaggagaaa

SEQ ID NO: 364381 - DNA, 15 bp, Homo sapiens
tgcagccaaggagaa

SEQ ID NO: 364382 - DNA, 15 bp, Homo sapiens
atgcagccaaggaga

SEQ ID NO: 364383 - DNA, 15 bp, Homo sapiens
aatgcagccaaggag

SEQ ID NO: 364384 - DNA, 15 bp, Homo sapiens
caatgcagccaagga

SEQ ID NO: 364385 - DNA, 15 bp, Homo sapiens
ccaatgcagccaagg

SEQ ID NO: 364386 - DNA, 15 bp, Homo sapiens
tccaatgcagccaag

SEQ ID NO: 364387 - DNA, 15 bp, Homo sapiens
ttccaatgcagccaa

SEQ ID NO: 364388 - DNA, 15 bp, Homo sapiens
gttccaatgcagcca

SEQ ID NO: 364389 - DNA, 15 bp, Homo sapiens
agttccaatgcagcc

SEQ ID NO: 364390 - DNA, 15 bp, Homo sapiens
cagttccaatgcagc

SEQ ID NO: 364391 - DNA, 15 bp, Homo sapiens
gcagttccaatgcag

SEQ ID NO: 364392 - DNA, 15 bp, Homo sapiens
agcagttccaatgca

SEQ ID NO: 364393 - DNA, 15 bp, Homo sapiens
cagcagttccaatgc

SEQ ID NO: 364394 - DNA, 15 bp, Homo sapiens
acagcagttccaatg

SEQ ID NO: 364395 - DNA, 15 bp, Homo sapiens
gacagcagttccaat

SEQ ID NO: 364396 - DNA, 15 bp, Homo sapiens
agacagcagttccaa

SEQ ID NO: 364397 - DNA, 15 bp, Homo sapiens
aagacagcagttcca

SEQ ID NO: 364398 - DNA, 15 bp, Homo sapiens
aaagacagcagttcc

SEQ ID NO: 364399 - DNA, 15 bp, Homo sapiens
aaaagacagcagttc

SEQ ID NO: 364400 - DNA, 15 bp, Homo sapiens
caaaagacagcagtt

SEQ ID NO: 364401 - DNA, 15 bp, Homo sapiens
gcaaaagacagcagt

SEQ ID NO: 364402 - DNA, 15 bp, Homo sapiens
ggcaaaagacagcag

SEQ ID NO: 364403 - DNA, 15 bp, Homo sapiens
aggcaaaagacagca

SEQ ID NO: 364404 - DNA, 15 bp, Homo sapiens
caggcaaaagacagc

SEQ ID NO: 364405 - DNA, 15 bp, Homo sapiens
tcaggcaaaagacag

SEQ ID NO: 364406 - DNA, 15 bp, Homo sapiens
ctcaggcaaaagaca

SEQ ID NO: 364407 - DNA, 15 bp, Homo sapiens
tctcaggcaaaagac

SEQ ID NO: 364408 - DNA, 15 bp, Homo sapiens
gtctcaggcaaaaga

SEQ ID NO: 364409 - DNA, 15 bp, Homo sapiens
tgtctcaggcaaaag

SEQ ID NO: 364410 - DNA, 15 bp, Homo sapiens
ctgtctcaggcaaaa

SEQ ID NO: 364411 - DNA, 15 bp, Homo sapiens
tctgtctcaggcaaa

SEQ ID NO: 364412 - DNA, 15 bp, Homo sapiens
ttctgtctcaggcaa

SEQ ID NO: 364413 - DNA, 15 bp, Homo sapiens
cttctgtctcaggca

SEQ ID NO: 364414 - DNA, 15 bp, Homo sapiens
acttctgtctcaggc

SEQ ID NO: 364415 - DNA, 15 bp, Homo sapiens
cacttctgtctcagg

SEQ ID NO: 364416 - DNA, 15 bp, Homo sapiens
tcacttctgtctcag

SEQ ID NO: 364417 - DNA, 15 bp, Homo sapiens
gtcacttctgtctca

SEQ ID NO: 364418 - DNA, 15 bp, Homo sapiens
ggtcacttctgtctc

SEQ ID NO: 364419 - DNA, 15 bp, Homo sapiens
gggtcacttctgtct

SEQ ID NO: 364420 - DNA, 15 bp, Homo sapiens
cgggtcacttctgtc

SEQ ID NO: 364421 - DNA, 15 bp, Homo sapiens
gcgggtcacttctgt

SEQ ID NO: 364422 - DNA, 15 bp, Homo sapiens
agcgggtcacttctg

SEQ ID NO: 364423 - DNA, 15 bp, Homo sapiens
tagcgggtcacttct

SEQ ID NO: 364424 - DNA, 15 bp, Homo sapiens
atagcgggtcacttc

SEQ ID NO: 364425 - DNA, 15 bp, Homo sapiens
aatagcgggtcactt

SEQ ID NO: 364426 - DNA, 15 bp, Homo sapiens
taatagcgggtcact

SEQ ID NO: 364427 - DNA, 15 bp, Homo sapiens
ttaatagcgggtcac

SEQ ID NO: 364428 - DNA, 15 bp, Homo sapiens
tttaatagcgggtca

SEQ ID NO: 364429 - DNA, 15 bp, Homo sapiens
atttaatagcgggtc

SEQ ID NO: 364430 - DNA, 15 bp, Homo sapiens
tatttaatagcgggt

SEQ ID NO: 364431 - DNA, 15 bp, Homo sapiens
ttatttaatagcggg

SEQ ID NO: 364432 - DNA, 15 bp, Homo sapiens
tttatttaatagcgg

SEQ ID NO: 364433 - DNA, 15 bp, Homo sapiens
gtttatttaatagcg

SEQ ID NO: 364434 - DNA, 15 bp, Homo sapiens
tgtttatttaatagc

SEQ ID NO: 364435 - DNA, 15 bp, Homo sapiens
ctgtttatttaatag

SEQ ID NO: 364436 - DNA, 15 bp, Homo sapiens
cctgtttatttaata

SEQ ID NO: 364437 - DNA, 15 bp, Homo sapiens
gcctgtttatttaat

SEQ ID NO: 364438 - DNA, 15 bp, Homo sapiens
tgcctgtttatttaa

SEQ ID NO: 364439 - DNA, 15 bp, Homo sapiens
atgcctgtttattta

SEQ ID NO: 364440 - DNA, 15 bp, Homo sapiens
aatgcctgtttattt

SEQ ID NO: 364441 - DNA, 15 bp, Homo sapiens
aaatgcctgtttatt

SEQ ID NO: 364442 - DNA, 15 bp, Homo sapiens
caaatgcctgtttat

SEQ ID NO: 364443 - DNA, 15 bp, Homo sapiens
tcaaatgcctgttta

SEQ ID NO: 364444 - DNA, 15 bp, Homo sapiens
ttcaaatgcctgttt

SEQ ID NO: 364445 - DNA, 15 bp, Homo sapiens
tttcaaatgcctgtt

SEQ ID NO: 364446 - DNA, 15 bp, Homo sapiens
gtttcaaatgcctgt

SEQ ID NO: 364447 - DNA, 15 bp, Homo sapiens
ggtttcaaatgcctg

SEQ ID NO: 364448 - DNA, 15 bp, Homo sapiens
gggtttcaaatgcct

SEQ ID NO: 364449 - DNA, 15 bp, Homo sapiens
tgggtttcaaatgcc

SEQ ID NO: 364450 - DNA, 15 bp, Homo sapiens
gtgggtttcaaatgc

SEQ ID NO: 364451 - DNA, 15 bp, Homo sapiens
ggtgggtttcaaatg

SEQ ID NO: 364452 - DNA, 15 bp, Homo sapiens
gggtgggtttcaaat

SEQ ID NO: 364453 - DNA, 15 bp, Homo sapiens
ggggtgggtttcaaa

SEQ ID NO: 364454 - DNA, 15 bp, Homo sapiens
gggggtgggtttcaa

SEQ ID NO: 364455 - DNA, 15 bp, Homo sapiens
agggggtgggtttca

SEQ ID NO: 364456 - DNA, 15 bp, Homo sapiens
aagggggtgggtttc

SEQ ID NO: 364457 - DNA, 15 bp, Homo sapiens
caagggggtgggttt

SEQ ID NO: 364458 - DNA, 15 bp, Homo sapiens
acaagggggtgggtt

SEQ ID NO: 364459 - DNA, 15 bp, Homo sapiens
aacaagggggtgggt

SEQ ID NO: 364460 - DNA, 15 bp, Homo sapiens
taacaagggggtggg

SEQ ID NO: 364461 - DNA, 15 bp, Homo sapiens
gtaacaagggggtgg

SEQ ID NO: 364462 - DNA, 15 bp, Homo sapiens
tgtaacaagggggtg

SEQ ID NO: 364463 - DNA, 15 bp, Homo sapiens
atgtaacaagggggt

SEQ ID NO: 364464 - DNA, 15 bp, Homo sapiens
aatgtaacaaggggg

SEQ ID NO: 364465 - DNA, 15 bp, Homo sapiens
gaatgtaacaagggg

SEQ ID NO: 364466 - DNA, 15 bp, Homo sapiens
agaatgtaacaaggg

SEQ ID NO: 364467 - DNA, 15 bp, Homo sapiens
cagaatgtaacaagg

SEQ ID NO: 364468 - DNA, 15 bp, Homo sapiens
tcagaatgtaacaag

SEQ ID NO: 364469 - DNA, 15 bp, Homo sapiens
ttcagaatgtaacaa

SEQ ID NO: 364470 - DNA, 15 bp, Homo sapiens
tttcagaatgtaaca

SEQ ID NO: 364471 - DNA, 15 bp, Homo sapiens
ctttcagaatgtaac

SEQ ID NO: 364472 - DNA, 15 bp, Homo sapiens
gctttcagaatgtaa

SEQ ID NO: 364473 - DNA, 15 bp, Homo sapiens
ggctttcagaatgta

SEQ ID NO: 364474 - DNA, 15 bp, Homo sapiens
tggctttcagaatgt

SEQ ID NO: 364475 - DNA, 15 bp, Homo sapiens
ctggctttcagaatg

SEQ ID NO: 364476 - DNA, 15 bp, Homo sapiens
tctggctttcagaat

SEQ ID NO: 364477 - DNA, 15 bp, Homo sapiens
ctctggctttcagaa

SEQ ID NO: 364478 - DNA, 15 bp, Homo sapiens
cctctggctttcaga

SEQ ID NO: 364479 - DNA, 15 bp, Homo sapiens
acctctggctttcag

SEQ ID NO: 364480 - DNA, 15 bp, Homo sapiens
aacctctggctttca

SEQ ID NO: 364481 - DNA, 15 bp, Homo sapiens
caacctctggctttc

SEQ ID NO: 364482 - DNA, 15 bp, Homo sapiens
gcaacctctggcttt

SEQ ID NO: 364483 - DNA, 15 bp, Homo sapiens
ggcaacctctggctt

SEQ ID NO: 364484 - DNA, 15 bp, Homo sapiens
tggcaacctctggct

SEQ ID NO: 364485 - DNA, 15 bp, Homo sapiens
gtggcaacctctggc

SEQ ID NO: 364486 - DNA, 15 bp, Homo sapiens
tgtggcaacctctgg

SEQ ID NO: 364487 - DNA, 15 bp, Homo sapiens
ctgtggcaacctctg

SEQ ID NO: 364488 - DNA, 15 bp, Homo sapiens
cctgtggcaacctct

SEQ ID NO: 364489 - DNA, 15 bp, Homo sapiens
tcctgtggcaacctc

SEQ ID NO: 364490 - DNA, 15 bp, Homo sapiens
gtcctgtggcaacct

SEQ ID NO: 364491 - DNA, 15 bp, Homo sapiens
tgtcctgtggcaacc

SEQ ID NO: 364492 - DNA, 15 bp, Homo sapiens
ctgtcctgtggcaac

SEQ ID NO: 364493 - DNA, 15 bp, Homo sapiens
actgtcctgtggcaa

SEQ ID NO: 364494 - DNA, 15 bp, Homo sapiens
aactgtcctgtggca

SEQ ID NO: 364495 - DNA, 15 bp, Homo sapiens
taactgtcctgtggc

SEQ ID NO: 364496 - DNA, 15 bp, Homo sapiens
gtaactgtcctgtgg

SEQ ID NO: 364497 - DNA, 15 bp, Homo sapiens
agtaactgtcctgtg

SEQ ID NO: 364498 - DNA, 15 bp, Homo sapiens
aagtaactgtcctgt

SEQ ID NO: 364499 - DNA, 15 bp, Homo sapiens
taagtaactgtcctg

SEQ ID NO: 364500 - DNA, 15 bp, Homo sapiens
ttaagtaactgtcct

SEQ ID NO: 364501 - DNA, 15 bp, Homo sapiens
tttaagtaactgtcc

SEQ ID NO: 364502 - DNA, 15 bp, Homo sapiens
atttaagtaactgtc

SEQ ID NO: 364503 - DNA, 15 bp, Homo sapiens
gatttaagtaactgt

SEQ ID NO: 364504 - DNA, 15 bp, Homo sapiens
tgatttaagtaactg

SEQ ID NO: 364505 - DNA, 15 bp, Homo sapiens
ttgatttaagtaact

SEQ ID NO: 364506 - DNA, 15 bp, Homo sapiens
cttgatttaagtaac

SEQ ID NO: 364507 - DNA, 15 bp, Homo sapiens
tcttgatttaagtaa

SEQ ID NO: 364508 - DNA, 15 bp, Homo sapiens
gtcttgatttaagta

SEQ ID NO: 364509 - DNA, 15 bp, Homo sapiens
tgtcttgatttaagt

SEQ ID NO: 364510 - DNA, 15 bp, Homo sapiens
ttgtcttgatttaag

SEQ ID NO: 364511 - DNA, 15 bp, Homo sapiens
attgtcttgatttaa

SEQ ID NO: 364512 - DNA, 15 bp, Homo sapiens
aattgtcttgattta

SEQ ID NO: 364513 - DNA, 15 bp, Homo sapiens
aaattgtcttgattt

SEQ ID NO: 364514 - DNA, 15 bp, Homo sapiens
gaaattgtcttgatt

SEQ ID NO: 364515 - DNA, 15 bp, Homo sapiens
ggaaattgtcttgat

SEQ ID NO: 364516 - DNA, 15 bp, Homo sapiens
tggaaattgtcttga

SEQ ID NO: 364517 - DNA, 15 bp, Homo sapiens
ctggaaattgtcttg

SEQ ID NO: 364518 - DNA, 15 bp, Homo sapiens
cctggaaattgtctt

SEQ ID NO: 364519 - DNA, 15 bp, Homo sapiens
gcctggaaattgtct

SEQ ID NO: 364520 - DNA, 15 bp, Homo sapiens
tgcctggaaattgtc

SEQ ID NO: 364521 - DNA, 15 bp, Homo sapiens
ctgcctggaaattgt

SEQ ID NO: 364522 - DNA, 15 bp, Homo sapiens
cctgcctggaaattg

SEQ ID NO: 364523 - DNA, 15 bp, Homo sapiens
tcctgcctggaaatt

SEQ ID NO: 364524 - DNA, 15 bp, Homo sapiens
ttcctgcctggaaat

SEQ ID NO: 364525 - DNA, 15 bp, Homo sapiens
cttcctgcctggaaa

SEQ ID NO: 364526 - DNA, 15 bp, Homo sapiens
tcttcctgcctggaa

SEQ ID NO: 364527 - DNA, 15 bp, Homo sapiens
ttcttcctgcctgga

SEQ ID NO: 364528 - DNA, 15 bp, Homo sapiens
cttcttcctgcctgg

SEQ ID NO: 364529 - DNA, 15 bp, Homo sapiens
tcttcttcctgcctg

SEQ ID NO: 364530 - DNA, 15 bp, Homo sapiens
atcttcttcctgcct

SEQ ID NO: 364531 - DNA, 15 bp, Homo sapiens
catcttcttcctgcc

SEQ ID NO: 364532 - DNA, 15 bp, Homo sapiens
acatcttcttcctgc

SEQ ID NO: 364533 - DNA, 15 bp, Homo sapiens
tacatcttcttcctg

SEQ ID NO: 364534 - DNA, 15 bp, Homo sapiens
ctacatcttcttcct

SEQ ID NO: 364535 - DNA, 15 bp, Homo sapiens
tctacatcttcttcc

SEQ ID NO: 364536 - DNA, 15 bp, Homo sapiens
ttctacatcttcttc

SEQ ID NO: 364537 - DNA, 15 bp, Homo sapiens
gttctacatcttctt

SEQ ID NO: 364538 - DNA, 15 bp, Homo sapiens
ggttctacatcttct

SEQ ID NO: 364539 - DNA, 15 bp, Homo sapiens
gggttctacatcttc

SEQ ID NO: 364540 - DNA, 15 bp, Homo sapiens
agggttctacatctt

SEQ ID NO: 364541 - DNA, 15 bp, Homo sapiens
cagggttctacatct

SEQ ID NO: 364542 - DNA, 15 bp, Homo sapiens
ccagggttctacatc

SEQ ID NO: 364543 - DNA, 15 bp, Homo sapiens
gccagggttctacat

SEQ ID NO: 364544 - DNA, 15 bp, Homo sapiens
tgccagggttctaca

SEQ ID NO: 364545 - DNA, 15 bp, Homo sapiens
atgccagggttctac

SEQ ID NO: 364546 - DNA, 15 bp, Homo sapiens
aatgccagggttcta

SEQ ID NO: 364547 - DNA, 15 bp, Homo sapiens
taatgccagggttct

SEQ ID NO: 364548 - DNA, 15 bp, Homo sapiens
ataatgccagggttc

SEQ ID NO: 364549 - DNA, 15 bp, Homo sapiens
aataatgccagggtt

SEQ ID NO: 364550 - DNA, 15 bp, Homo sapiens
gaataatgccagggt

SEQ ID NO: 364551 - DNA, 15 bp, Homo sapiens
ggaataatgccaggg

SEQ ID NO: 364552 - DNA, 15 bp, Homo sapiens
aggaataatgccagg

SEQ ID NO: 364553 - DNA, 15 bp, Homo sapiens
gaggaataatgccag

SEQ ID NO: 364554 - DNA, 15 bp, Homo sapiens
agaggaataatgcca

SEQ ID NO: 364555 - DNA, 15 bp, Homo sapiens
gagaggaataatgcc

SEQ ID NO: 364556 - DNA, 15 bp, Homo sapiens
ggagaggaataatgc

SEQ ID NO: 364557 - DNA, 15 bp, Homo sapiens
gggagaggaataatg

SEQ ID NO: 364558 - DNA, 15 bp, Homo sapiens
cgggagaggaataat

SEQ ID NO: 364559 - DNA, 15 bp, Homo sapiens
gcgggagaggaataa

SEQ ID NO: 364560 - DNA, 15 bp, Homo sapiens
cgcgggagaggaata

SEQ ID NO: 364561 - DNA, 15 bp, Homo sapiens
acgcgggagaggaat

SEQ ID NO: 364562 - DNA, 15 bp, Homo sapiens
aacgcgggagaggaa

SEQ ID NO: 364563 - DNA, 15 bp, Homo sapiens
aaacgcgggagagga

SEQ ID NO: 364564 - DNA, 15 bp, Homo sapiens
caaacgcgggagagg

SEQ ID NO: 364565 - DNA, 15 bp, Homo sapiens
acaaacgcgggagag

SEQ ID NO: 364566 - DNA, 15 bp, Homo sapiens
aacaaacgcgggaga

SEQ ID NO: 364567 - DNA, 15 bp, Homo sapiens
taacaaacgcgggag

SEQ ID NO: 364568 - DNA, 15 bp, Homo sapiens
ctaacaaacgcggga

SEQ ID NO: 364569 - DNA, 15 bp, Homo sapiens
actaacaaacgcggg

SEQ ID NO: 364570 - DNA, 15 bp, Homo sapiens
tactaacaaacgcgg

SEQ ID NO: 364571 - DNA, 15 bp, Homo sapiens
ttactaacaaacgcg

SEQ ID NO: 364572 - DNA, 15 bp, Homo sapiens
attactaacaaacgc

SEQ ID NO: 364573 - DNA, 15 bp, Homo sapiens
tattactaacaaacg

SEQ ID NO: 364574 - DNA, 15 bp, Homo sapiens
ctattactaacaaac

SEQ ID NO: 364575 - DNA, 15 bp, Homo sapiens
gctattactaacaaa

SEQ ID NO: 364576 - DNA, 15 bp, Homo sapiens
agctattactaacaa

SEQ ID NO: 364577 - DNA, 15 bp, Homo sapiens
aagctattactaaca

SEQ ID NO: 364578 - DNA, 15 bp, Homo sapiens
caagctattactaac

SEQ ID NO: 364579 - DNA, 15 bp, Homo sapiens
tcaagctattactaa

SEQ ID NO: 364580 - DNA, 15 bp, Homo sapiens
atcaagctattacta

SEQ ID NO: 364581 - DNA, 15 bp, Homo sapiens
aatcaagctattact

SEQ ID NO: 364582 - DNA, 15 bp, Homo sapiens
caatcaagctattac

SEQ ID NO: 364583 - DNA, 15 bp, Homo sapiens
tcaatcaagctatta

SEQ ID NO: 364584 - DNA, 15 bp, Homo sapiens
ctcaatcaagctatt

SEQ ID NO: 364585 - DNA, 15 bp, Homo sapiens
actcaatcaagctat

SEQ ID NO: 364586 - DNA, 15 bp, Homo sapiens
tactcaatcaagcta

SEQ ID NO: 364587 - DNA, 15 bp, Homo sapiens
atactcaatcaagct

SEQ ID NO: 364588 - DNA, 15 bp, Homo sapiens
aatactcaatcaagc

SEQ ID NO: 364589 - DNA, 15 bp, Homo sapiens
caatactcaatcaag

SEQ ID NO: 364590 - DNA, 15 bp, Homo sapiens
tcaatactcaatcaa

SEQ ID NO: 364591 - DNA, 15 bp, Homo sapiens
ctcaatactcaatca

SEQ ID NO: 364592 - DNA, 15 bp, Homo sapiens
tctcaatactcaatc

SEQ ID NO: 364593 - DNA, 15 bp, Homo sapiens
ttctcaatactcaat

SEQ ID NO: 364594 - DNA, 15 bp, Homo sapiens
gttctcaatactcaa

SEQ ID NO: 364595 - DNA, 15 bp, Homo sapiens
tgttctcaatactca

SEQ ID NO: 364596 - DNA, 15 bp, Homo sapiens
ttgttctcaatactc

SEQ ID NO: 364597 - DNA, 15 bp, Homo sapiens
cttgttctcaatact

SEQ ID NO: 364598 - DNA, 15 bp, Homo sapiens
gcttgttctcaatac

SEQ ID NO: 364599 - DNA, 15 bp, Homo sapiens
agcttgttctcaata

SEQ ID NO: 364600 - DNA, 15 bp, Homo sapiens
aagcttgttctcaat

SEQ ID NO: 364601 - DNA, 15 bp, Homo sapiens
taagcttgttctcaa

SEQ ID NO: 364602 - DNA, 15 bp, Homo sapiens
ttaagcttgttctca

SEQ ID NO: 364603 - DNA, 15 bp, Homo sapiens
tttaagcttgttctc

SEQ ID NO: 364604 - DNA, 15 bp, Homo sapiens
ttttaagcttgttct

SEQ ID NO: 364605 - DNA, 15 bp, Homo sapiens
attttaagcttgttc

SEQ ID NO: 364606 - DNA, 15 bp, Homo sapiens
cattttaagcttgtt

SEQ ID NO: 364607 - DNA, 15 bp, Homo sapiens
gcattttaagcttgt

SEQ ID NO: 364608 - DNA, 15 bp, Homo sapiens
agcattttaagcttg

SEQ ID NO: 364609 - DNA, 15 bp, Homo sapiens
cagcattttaagctt

SEQ ID NO: 364610 - DNA, 15 bp, Homo sapiens
gcagcattttaagct

SEQ ID NO: 364611 - DNA, 15 bp, Homo sapiens
ggcagcattttaagc

SEQ ID NO: 364612 - DNA, 15 bp, Homo sapiens
tggcagcattttaag

SEQ ID NO: 364613 - DNA, 15 bp, Homo sapiens
atggcagcattttaa

SEQ ID NO: 364614 - DNA, 15 bp, Homo sapiens
gatggcagcatttta

SEQ ID NO: 364615 - DNA, 15 bp, Homo sapiens
tgatggcagcatttt

SEQ ID NO: 364616 - DNA, 15 bp, Homo sapiens
ctgatggcagcattt

SEQ ID NO: 364617 - DNA, 15 bp, Homo sapiens
gctgatggcagcatt

SEQ ID NO: 364618 - DNA, 15 bp, Homo sapiens
tgctgatggcagcat

SEQ ID NO: 364619 - DNA, 15 bp, Homo sapiens
gtgctgatggcagca

SEQ ID NO: 364620 - DNA, 15 bp, Homo sapiens
ggtgctgatggcagc

SEQ ID NO: 364621 - DNA, 15 bp, Homo sapiens
cggtgctgatggcag

SEQ ID NO: 364622 - DNA, 15 bp, Homo sapiens
tcggtgctgatggca

SEQ ID NO: 364623 - DNA, 15 bp, Homo sapiens
gtcggtgctgatggc

SEQ ID NO: 364624 - DNA, 15 bp, Homo sapiens
agtcggtgctgatgg

SEQ ID NO: 364625 - DNA, 15 bp, Homo sapiens
tagtcggtgctgatg

SEQ ID NO: 364626 - DNA, 15 bp, Homo sapiens
gtagtcggtgctgat

SEQ ID NO: 364627 - DNA, 15 bp, Homo sapiens
ggtagtcggtgctga

SEQ ID NO: 364628 - DNA, 15 bp, Homo sapiens
gggtagtcggtgctg

SEQ ID NO: 364629 - DNA, 15 bp, Homo sapiens
agggtagtcggtgct

SEQ ID NO: 364630 - DNA, 15 bp, Homo sapiens
aagggtagtcggtgc

SEQ ID NO: 364631 - DNA, 15 bp, Homo sapiens
aaagggtagtcggtg

SEQ ID NO: 364632 - DNA, 15 bp, Homo sapiens
taaagggtagtcggt

SEQ ID NO: 364633 - DNA, 15 bp, Homo sapiens
ctaaagggtagtcgg

SEQ ID NO: 364634 - DNA, 15 bp, Homo sapiens
tctaaagggtagtcg

SEQ ID NO: 364635 - DNA, 15 bp, Homo sapiens
atctaaagggtagtc

SEQ ID NO: 364636 - DNA, 15 bp, Homo sapiens
aatctaaagggtagt

SEQ ID NO: 364637 - DNA, 15 bp, Homo sapiens
taatctaaagggtag

SEQ ID NO: 364638 - DNA, 15 bp, Homo sapiens
ctaatctaaagggta

SEQ ID NO: 364639 - DNA, 15 bp, Homo sapiens
gctaatctaaagggt

SEQ ID NO: 364640 - DNA, 15 bp, Homo sapiens
tgctaatctaaaggg

SEQ ID NO: 364641 - DNA, 15 bp, Homo sapiens
gtgctaatctaaagg

SEQ ID NO: 364642 - DNA, 15 bp, Homo sapiens
tgtgctaatctaaag

SEQ ID NO: 364643 - DNA, 15 bp, Homo sapiens
gtgtgctaatctaaa

SEQ ID NO: 364644 - DNA, 15 bp, Homo sapiens
tgtgtgctaatctaa

SEQ ID NO: 364645 - DNA, 15 bp, Homo sapiens
ctgtgtgctaatcta

SEQ ID NO: 364646 - DNA, 15 bp, Homo sapiens
gctgtgtgctaatct

SEQ ID NO: 364647 - DNA, 15 bp, Homo sapiens
agctgtgtgctaatc

SEQ ID NO: 364648 - DNA, 15 bp, Homo sapiens
gagctgtgtgctaat

SEQ ID NO: 364649 - DNA, 15 bp, Homo sapiens
ggagctgtgtgctaa

SEQ ID NO: 364650 - DNA, 15 bp, Homo sapiens
aggagctgtgtgcta

SEQ ID NO: 364651 - DNA, 15 bp, Homo sapiens
taggagctgtgtgct

SEQ ID NO: 364652 - DNA, 15 bp, Homo sapiens
ataggagctgtgtgc

SEQ ID NO: 364653 - DNA, 15 bp, Homo sapiens
aataggagctgtgtg

SEQ ID NO: 364654 - DNA, 15 bp, Homo sapiens
gaataggagctgtgt

SEQ ID NO: 364655 - DNA, 15 bp, Homo sapiens
ggaataggagctgtg

SEQ ID NO: 364656 - DNA, 15 bp, Homo sapiens
gggaataggagctgt

SEQ ID NO: 364657 - DNA, 15 bp, Homo sapiens
agggaataggagctg

SEQ ID NO: 364658 - DNA, 15 bp, Homo sapiens
aagggaataggagct

SEQ ID NO: 364659 - DNA, 15 bp, Homo sapiens
caagggaataggagc

SEQ ID NO: 364660 - DNA, 15 bp, Homo sapiens
tcaagggaataggag

SEQ ID NO: 364661 - DNA, 15 bp, Homo sapiens
ttcaagggaatagga

SEQ ID NO: 364662 - DNA, 15 bp, Homo sapiens
attcaagggaatagg

SEQ ID NO: 364663 - DNA, 15 bp, Homo sapiens
cattcaagggaatag

SEQ ID NO: 364664 - DNA, 15 bp, Homo sapiens
acattcaagggaata

SEQ ID NO: 364665 - DNA, 15 bp, Homo sapiens
tacattcaagggaat

SEQ ID NO: 364666 - DNA, 15 bp, Homo sapiens
ctacattcaagggaa

SEQ ID NO: 364667 - DNA, 15 bp, Homo sapiens
actacattcaaggga

SEQ ID NO: 364668 - DNA, 15 bp, Homo sapiens
aactacattcaaggg

SEQ ID NO: 364669 - DNA, 15 bp, Homo sapiens
taactacattcaagg

SEQ ID NO: 364670 - DNA, 15 bp, Homo sapiens
ctaactacattcaag

SEQ ID NO: 364671 - DNA, 15 bp, Homo sapiens
cctaactacattcaa

SEQ ID NO: 364672 - DNA, 15 bp, Homo sapiens
gcctaactacattca

SEQ ID NO: 364673 - DNA, 15 bp, Homo sapiens
ggcctaactacattc

SEQ ID NO: 364674 - DNA, 15 bp, Homo sapiens
tggcctaactacatt

SEQ ID NO: 364675 - DNA, 15 bp, Homo sapiens
ctggcctaactacat

SEQ ID NO: 364676 - DNA, 15 bp, Homo sapiens
gctggcctaactaca

SEQ ID NO: 364677 - DNA, 15 bp, Homo sapiens
agctggcctaactac

SEQ ID NO: 364678 - DNA, 15 bp, Homo sapiens
aagctggcctaacta

SEQ ID NO: 364679 - DNA, 15 bp, Homo sapiens
taagctggcctaact

SEQ ID NO: 364680 - DNA, 15 bp, Homo sapiens
ttaagctggcctaac

SEQ ID NO: 364681 - DNA, 15 bp, Homo sapiens
attaagctggcctaa

SEQ ID NO: 364682 - DNA, 15 bp, Homo sapiens
cattaagctggccta

SEQ ID NO: 364683 - DNA, 15 bp, Homo sapiens
acattaagctggcct

SEQ ID NO: 364684 - DNA, 15 bp, Homo sapiens
gacattaagctggcc

SEQ ID NO: 364685 - DNA, 15 bp, Homo sapiens
tgacattaagctggc

SEQ ID NO: 364686 - DNA, 15 bp, Homo sapiens
ttgacattaagctgg

SEQ ID NO: 364687 - DNA, 15 bp, Homo sapiens
cttgacattaagctg

SEQ ID NO: 364688 - DNA, 15 bp, Homo sapiens
ccttgacattaagct

SEQ ID NO: 364689 - DNA, 15 bp, Homo sapiens
gccttgacattaagc

SEQ ID NO: 364690 - DNA, 15 bp, Homo sapiens
tgccttgacattaag

SEQ ID NO: 364691 - DNA, 15 bp, Homo sapiens
atgccttgacattaa

SEQ ID NO: 364692 - DNA, 15 bp, Homo sapiens
tatgccttgacatta

SEQ ID NO: 364693 - DNA, 15 bp, Homo sapiens
ttatgccttgacatt

SEQ ID NO: 364694 - DNA, 15 bp, Homo sapiens
tttatgccttgacat

SEQ ID NO: 364695 - DNA, 15 bp, Homo sapiens
ttttatgccttgaca

SEQ ID NO: 364696 - DNA, 15 bp, Homo sapiens
tttttatgccttgac

SEQ ID NO: 364697 - DNA, 15 bp, Homo sapiens
ttttttatgccttga

SEQ ID NO: 364698 - DNA, 15 bp, Homo sapiens
cttttttatgccttg

SEQ ID NO: 364699 - DNA, 15 bp, Homo sapiens
tcttttttatgcctt

SEQ ID NO: 364700 - DNA, 15 bp, Homo sapiens
atcttttttatgcct

SEQ ID NO: 364701 - DNA, 15 bp, Homo sapiens
tatcttttttatgcc

SEQ ID NO: 364702 - DNA, 15 bp, Homo sapiens
gtatcttttttatgc

SEQ ID NO: 364703 - DNA, 15 bp, Homo sapiens
agtatcttttttatg

SEQ ID NO: 364704 - DNA, 15 bp, Homo sapiens
aagtatcttttttat

SEQ ID NO: 364705 - DNA, 15 bp, Homo sapiens
caagtatctttttta

SEQ ID NO: 364706 - DNA, 15 bp, Homo sapiens
acaagtatctttttt

SEQ ID NO: 364707 - DNA, 15 bp, Homo sapiens
aacaagtatcttttt

SEQ ID NO: 364708 - DNA, 15 bp, Homo sapiens
taacaagtatctttt

SEQ ID NO: 364709 - DNA, 15 bp, Homo sapiens
ttaacaagtatcttt

SEQ ID NO: 364710 - DNA, 15 bp, Homo sapiens
tttaacaagtatctt

SEQ ID NO: 364711 - DNA, 15 bp, Homo sapiens
atttaacaagtatct

SEQ ID NO: 364712 - DNA, 15 bp, Homo sapiens
tatttaacaagtatc

SEQ ID NO: 364713 - DNA, 15 bp, Homo sapiens
ttatttaacaagtat

SEQ ID NO: 364714 - DNA, 15 bp, Homo sapiens
attatttaacaagta

SEQ ID NO: 364715 - DNA, 15 bp, Homo sapiens
aattatttaacaagt

SEQ ID NO: 364716 - DNA, 15 bp, Homo sapiens
aaattatttaacaag

SEQ ID NO: 364717 - DNA, 15 bp, Homo sapiens
gaaattatttaacaa

SEQ ID NO: 364718 - DNA, 15 bp, Homo sapiens
ggaaattatttaaca

SEQ ID NO: 364719 - DNA, 15 bp, Homo sapiens
gggaaattatttaac

SEQ ID NO: 364720 - DNA, 15 bp, Homo sapiens
tgggaaattatttaa

SEQ ID NO: 364721 - DNA, 15 bp, Homo sapiens
ttgggaaattattta

SEQ ID NO: 364722 - DNA, 15 bp, Homo sapiens
tttgggaaattattt

SEQ ID NO: 364723 - DNA, 15 bp, Homo sapiens
ctttgggaaattatt

SEQ ID NO: 364724 - DNA, 15 bp, Homo sapiens
gctttgggaaattat

SEQ ID NO: 364725 - DNA, 15 bp, Homo sapiens
agctttgggaaatta

SEQ ID NO: 364726 - DNA, 15 bp, Homo sapiens
gagctttgggaaatt

SEQ ID NO: 364727 - DNA, 15 bp, Homo sapiens
ggagctttgggaaat

SEQ ID NO: 364728 - DNA, 15 bp, Homo sapiens
cggagctttgggaaa

SEQ ID NO: 364729 - DNA, 15 bp, Homo sapiens
tcggagctttgggaa

SEQ ID NO: 364730 - DNA, 15 bp, Homo sapiens
gtcggagctttggga

SEQ ID NO: 364731 - DNA, 15 bp, Homo sapiens
agtcggagctttggg

SEQ ID NO: 364732 - DNA, 15 bp, Homo sapiens
gagtcggagctttgg

SEQ ID NO: 364733 - DNA, 15 bp, Homo sapiens
tgagtcggagctttg

SEQ ID NO: 364734 - DNA, 15 bp, Homo sapiens
ttgagtcggagcttt

SEQ ID NO: 364735 - DNA, 15 bp, Homo sapiens
attgagtcggagctt

SEQ ID NO: 364736 - DNA, 15 bp, Homo sapiens
gattgagtcggagct

SEQ ID NO: 364737 - DNA, 15 bp, Homo sapiens
agattgagtcggagc

SEQ ID NO: 364738 - DNA, 15 bp, Homo sapiens
aagattgagtcggag

SEQ ID NO: 364739 - DNA, 15 bp, Homo sapiens
aaagattgagtcgga

SEQ ID NO: 364740 - DNA, 15 bp, Homo sapiens
taaagattgagtcgg

SEQ ID NO: 364741 - DNA, 15 bp, Homo sapiens
ttaaagattgagtcg

SEQ ID NO: 364742 - DNA, 15 bp, Homo sapiens
attaaagattgagtc

SEQ ID NO: 364743 - DNA, 15 bp, Homo sapiens
aattaaagattgagt

SEQ ID NO: 364744 - DNA, 15 bp, Homo sapiens
aaattaaagattgag

SEQ ID NO: 364745 - DNA, 15 bp, Homo sapiens
caaattaaagattga

SEQ ID NO: 364746 - DNA, 15 bp, Homo sapiens
acaaattaaagattg

SEQ ID NO: 364747 - DNA, 15 bp, Homo sapiens
aacaaattaaagatt

SEQ ID NO: 364748 - DNA, 15 bp, Homo sapiens
aaacaaattaaagat

SEQ ID NO: 364749 - DNA, 15 bp, Homo sapiens
aaaacaaattaaaga

SEQ ID NO: 364750 - DNA, 15 bp, Homo sapiens
gaaaacaaattaaag

SEQ ID NO: 364751 - DNA, 15 bp, Homo sapiens
gaggaaaacaaatta

SEQ ID NO: 364752 - DNA, 15 bp, Homo sapiens
agaggaaaacaaatt

SEQ ID NO: 364753 - DNA, 15 bp, Homo sapiens
aagaggaaaacaaat

SEQ ID NO: 364754 - DNA, 15 bp, Homo sapiens
aaagaggaaaacaaa

SEQ ID NO: 364755 - DNA, 15 bp, Homo sapiens
gaaagaggaaaacaa

SEQ ID NO: 364756 - DNA, 15 bp, Homo sapiens
ggaaagaggaaaaca

SEQ ID NO: 364757 - DNA, 15 bp, Homo sapiens
gggaaagaggaaaac

SEQ ID NO: 364758 - DNA, 15 bp, Homo sapiens
agggaaagaggaaaa

SEQ ID NO: 364759 - DNA, 15 bp, Homo sapiens
gagggaaagaggaaa

SEQ ID NO: 364760 - DNA, 15 bp, Homo sapiens
agagggaaagaggaa

SEQ ID NO: 364761 - DNA, 15 bp, Homo sapiens
gagagggaaagagga

SEQ ID NO: 364762 - DNA, 15 bp, Homo sapiens
ggagagggaaagagg

SEQ ID NO: 364763 - DNA, 15 bp, Homo sapiens
aggagagggaaagag

SEQ ID NO: 364764 - DNA, 15 bp, Homo sapiens
gaggagagggaaaga

SEQ ID NO: 364765 - DNA, 15 bp, Homo sapiens
agaggagagggaaag

SEQ ID NO: 364766 - DNA, 15 bp, Homo sapiens
gagaggagagggaaa

SEQ ID NO: 364767 - DNA, 15 bp, Homo sapiens
tgagaggagagggaa

SEQ ID NO: 364768 - DNA, 15 bp, Homo sapiens
gtgagaggagaggga

SEQ ID NO: 364769 - DNA, 15 bp, Homo sapiens
agtgagaggagaggg

SEQ ID NO: 364770 - DNA, 15 bp, Homo sapiens
aagtgagaggagagg

SEQ ID NO: 364771 - DNA, 15 bp, Homo sapiens
aaagtgagaggagag

SEQ ID NO: 364772 - DNA, 15 bp, Homo sapiens
aaaagtgagaggaga

SEQ ID NO: 364773 - DNA, 15 bp, Homo sapiens
caaaagtgagaggag

SEQ ID NO: 364774 - DNA, 15 bp, Homo sapiens
gcaaaagtgagagga

SEQ ID NO: 364775 - DNA, 15 bp, Homo sapiens
agcaaaagtgagagg

SEQ ID NO: 364776 - DNA, 15 bp, Homo sapiens
gagcaaaagtgagag

SEQ ID NO: 364777 - DNA, 15 bp, Homo sapiens
ggagcaaaagtgaga

SEQ ID NO: 364778 - DNA, 15 bp, Homo sapiens
aggagcaaaagtgag

SEQ ID NO: 364779 - DNA, 15 bp, Homo sapiens
gaggagcaaaagtga

SEQ ID NO: 364780 - DNA, 15 bp, Homo sapiens
agaggagcaaaagtg

SEQ ID NO: 364781 - DNA, 15 bp, Homo sapiens
gagaggagcaaaagt

SEQ ID NO: 364782 - DNA, 15 bp, Homo sapiens
agagaggagcaaaag

SEQ ID NO: 364783 - DNA, 15 bp, Homo sapiens
gagagaggagcaaaa

SEQ ID NO: 364784 - DNA, 15 bp, Homo sapiens
agagagaggagcaaa

SEQ ID NO: 364785 - DNA, 15 bp, Homo sapiens
gagagagaggagcaa

SEQ ID NO: 364786 - DNA, 15 bp, Homo sapiens
agagagagaggagca

SEQ ID NO: 364787 - DNA, 15 bp, Homo sapiens
gagagagagaggagc

SEQ ID NO: 364788 - DNA, 15 bp, Homo sapiens
agagagagagaggag

SEQ ID NO: 364789 - DNA, 15 bp, Homo sapiens
gagagagagagagga

SEQ ID NO: 364790 - DNA, 15 bp, Homo sapiens
aagagacagagagag

SEQ ID NO: 364791 - DNA, 15 bp, Homo sapiens
aaagagacagagaga

SEQ ID NO: 364792 - DNA, 15 bp, Homo sapiens
gaaagagacagagag

SEQ ID NO: 364793 - DNA, 15 bp, Homo sapiens
agaaagagacagaga

SEQ ID NO: 364794 - DNA, 15 bp, Homo sapiens
gagaaagagacagag

SEQ ID NO: 364795 - DNA, 15 bp, Homo sapiens
ggagaaagagacaga

SEQ ID NO: 364796 - DNA, 15 bp, Homo sapiens
gggagaaagagacag

SEQ ID NO: 364797 - DNA, 15 bp, Homo sapiens
ggggagaaagagaca

SEQ ID NO: 364798 - DNA, 15 bp, Homo sapiens
gggggagaaagagac

SEQ ID NO: 364799 - DNA, 15 bp, Homo sapiens
ggggggagaaagaga

SEQ ID NO: 364800 - DNA, 15 bp, Homo sapiens
tggggggagaaagag

SEQ ID NO: 364801 - DNA, 15 bp, Homo sapiens
atggggggagaaaga

SEQ ID NO: 364802 - DNA, 15 bp, Homo sapiens
gatggggggagaaag

SEQ ID NO: 364803 - DNA, 15 bp, Homo sapiens
agatggggggagaaa

SEQ ID NO: 364804 - DNA, 15 bp, Homo sapiens
gagatggggggagaa

SEQ ID NO: 364805 - DNA, 15 bp, Homo sapiens
agagatggggggaga

SEQ ID NO: 364806 - DNA, 15 bp, Homo sapiens
cagagatggggggag

SEQ ID NO: 364807 - DNA, 15 bp, Homo sapiens
acagagatgggggga

SEQ ID NO: 364808 - DNA, 15 bp, Homo sapiens
aacagagatgggggg

SEQ ID NO: 364809 - DNA, 15 bp, Homo sapiens
aaacagagatggggg

SEQ ID NO: 364810 - DNA, 15 bp, Homo sapiens
aaaacagagatgggg

SEQ ID NO: 364811 - DNA, 15 bp, Homo sapiens
aaaaacagagatggg

SEQ ID NO: 364812 - DNA, 15 bp, Homo sapiens
aaaaaacagagatgg

SEQ ID NO: 364813 - DNA, 15 bp, Homo sapiens
aaaaaaacagagatg

SEQ ID NO: 364814 - DNA, 15 bp, Homo sapiens
aaaaaaaacagagat

SEQ ID NO: 364815 - DNA, 15 bp, Homo sapiens
aaaaaaaaacagaga

SEQ ID NO: 364816 - DNA, 15 bp, Homo sapiens
gaaaaaaaaacagag

SEQ ID NO: 364817 - DNA, 15 bp, Homo sapiens
agaaaaaaaaacaga

SEQ ID NO: 364818 - DNA, 15 bp, Homo sapiens
aagaaaaaaaaacag

SEQ ID NO: 364819 - DNA, 15 bp, Homo sapiens
aaagaaaaaaaaaca

SEQ ID NO: 364820 - DNA, 15 bp, Homo sapiens
gaaagaaaaaaaaac

SEQ ID NO: 364821 - DNA, 15 bp, Homo sapiens
ggaaagaaaaaaaaa

SEQ ID NO: 364822 - DNA, 15 bp, Homo sapiens
aggaaagaaaaaaaa

SEQ ID NO: 364823 - DNA, 15 bp, Homo sapiens
gaggaaagaaaaaaa

SEQ ID NO: 364824 - DNA, 15 bp, Homo sapiens
agaggaaagaaaaaa

SEQ ID NO: 364825 - DNA, 15 bp, Homo sapiens
tagaggaaagaaaaa

SEQ ID NO: 364826 - DNA, 15 bp, Homo sapiens
atagaggaaagaaaa

SEQ ID NO: 364827 - DNA, 15 bp, Homo sapiens
catagaggaaagaaa

SEQ ID NO: 364828 - DNA, 15 bp, Homo sapiens
gcatagaggaaagaa

SEQ ID NO: 364829 - DNA, 15 bp, Homo sapiens
ggcatagaggaaaga

SEQ ID NO: 364830 - DNA, 15 bp, Homo sapiens
tggcatagaggaaag

SEQ ID NO: 364831 - DNA, 15 bp, Homo sapiens
ttggcatagaggaaa

SEQ ID NO: 364832 - DNA, 15 bp, Homo sapiens
tttggcatagaggaa

SEQ ID NO: 364833 - DNA, 15 bp, Homo sapiens
ctttggcatagagga

SEQ ID NO: 364834 - DNA, 15 bp, Homo sapiens
cctttggcatagagg

SEQ ID NO: 364835 - DNA, 15 bp, Homo sapiens
ccctttggcatagag

SEQ ID NO: 364836 - DNA, 15 bp, Homo sapiens
accctttggcataga

SEQ ID NO: 364837 - DNA, 15 bp, Homo sapiens
taccctttggcatag

SEQ ID NO: 364838 - DNA, 15 bp, Homo sapiens
gtaccctttggcata

SEQ ID NO: 364839 - DNA, 15 bp, Homo sapiens
cgtaccctttggcat

SEQ ID NO: 364840 - DNA, 15 bp, Homo sapiens
gcgtaccctttggca

SEQ ID NO: 364841 - DNA, 15 bp, Homo sapiens
ggcgtaccctttggc

SEQ ID NO: 364842 - DNA, 15 bp, Homo sapiens
tggcgtaccctttgg

SEQ ID NO: 364843 - DNA, 15 bp, Homo sapiens
atggcgtaccctttg

SEQ ID NO: 364844 - DNA, 15 bp, Homo sapiens
aatggcgtacccttt

SEQ ID NO: 364845 - DNA, 15 bp, Homo sapiens
taatggcgtaccctt

SEQ ID NO: 364846 - DNA, 15 bp, Homo sapiens
ttaatggcgtaccct

SEQ ID NO: 364847 - DNA, 15 bp, Homo sapiens
cttaatggcgtaccc

SEQ ID NO: 364848 - DNA, 15 bp, Homo sapiens
acttaatggcgtacc

SEQ ID NO: 364849 - DNA, 15 bp, Homo sapiens
gacttaatggcgtac

SEQ ID NO: 364850 - DNA, 15 bp, Homo sapiens
cgacttaatggcgta

SEQ ID NO: 364851 - DNA, 15 bp, Homo sapiens
ccgacttaatggcgt

SEQ ID NO: 364852 - DNA, 15 bp, Homo sapiens
cccgacttaatggcg

SEQ ID NO: 364853 - DNA, 15 bp, Homo sapiens
gcccgacttaatggc

SEQ ID NO: 364854 - DNA, 15 bp, Homo sapiens
agcccgacttaatgg

SEQ ID NO: 364855 - DNA, 15 bp, Homo sapiens
cagcccgacttaatg

SEQ ID NO: 364856 - DNA, 15 bp, Homo sapiens
tcagcccgacttaat

SEQ ID NO: 364857 - DNA, 15 bp, Homo sapiens
atcagcccgacttaa

SEQ ID NO: 364858 - DNA, 15 bp, Homo sapiens
aatcagcccgactta

SEQ ID NO: 364859 - DNA, 15 bp, Homo sapiens
aaatcagcccgactt

SEQ ID NO: 364860 - DNA, 15 bp, Homo sapiens
taaatcagcccgact

SEQ ID NO: 364861 - DNA, 15 bp, Homo sapiens
ttaaatcagcccgac

SEQ ID NO: 364862 - DNA, 15 bp, Homo sapiens
cttaaatcagcccga

SEQ ID NO: 364863 - DNA, 15 bp, Homo sapiens
ccttaaatcagcccg

SEQ ID NO: 364864 - DNA, 15 bp, Homo sapiens
cccttaaatcagccc

SEQ ID NO: 364865 - DNA, 15 bp, Homo sapiens
gcccttaaatcagcc

SEQ ID NO: 364866 - DNA, 15 bp, Homo sapiens
agcccttaaatcagc

SEQ ID NO: 364867 - DNA, 15 bp, Homo sapiens
cagcccttaaatcag

SEQ ID NO: 364868 - DNA, 15 bp, Homo sapiens
acagcccttaaatca

SEQ ID NO: 364869 - DNA, 15 bp, Homo sapiens
gacagcccttaaatc

SEQ ID NO: 364870 - DNA, 15 bp, Homo sapiens
tgacagcccttaaat

SEQ ID NO: 364871 - DNA, 15 bp, Homo sapiens
ttgacagcccttaaa

SEQ ID NO: 364872 - DNA, 15 bp, Homo sapiens
gttgacagcccttaa

SEQ ID NO: 364873 - DNA, 15 bp, Homo sapiens
tgttgacagccctta

SEQ ID NO: 364874 - DNA, 15 bp, Homo sapiens
atgttgacagccctt

SEQ ID NO: 364875 - DNA, 15 bp, Homo sapiens
gatgttgacagccct

SEQ ID NO: 364876 - DNA, 15 bp, Homo sapiens
tgatgttgacagccc

SEQ ID NO: 364877 - DNA, 15 bp, Homo sapiens
ttgatgttgacagcc

SEQ ID NO: 364878 - DNA, 15 bp, Homo sapiens
gttgatgttgacagc

SEQ ID NO: 364879 - DNA, 15 bp, Homo sapiens
ggttgatgttgacag

SEQ ID NO: 364880 - DNA, 15 bp, Homo sapiens
aggttgatgttgaca

SEQ ID NO: 364881 - DNA, 15 bp, Homo sapiens
gaggttgatgttgac

SEQ ID NO: 364882 - DNA, 15 bp, Homo sapiens
agaggttgatgttga

SEQ ID NO: 364883 - DNA, 15 bp, Homo sapiens
cagaggttgatgttg

SEQ ID NO: 364884 - DNA, 15 bp, Homo sapiens
acagaggttgatgtt

SEQ ID NO: 364885 - DNA, 15 bp, Homo sapiens
cacagaggttgatgt

SEQ ID NO: 364886 - DNA, 15 bp, Homo sapiens
tcacagaggttgatg

SEQ ID NO: 364887 - DNA, 15 bp, Homo sapiens
gtcacagaggttgat

SEQ ID NO: 364888 - DNA, 15 bp, Homo sapiens
tgtcacagaggttga

SEQ ID NO: 364889 - DNA, 15 bp, Homo sapiens
atgtcacagaggttg

SEQ ID NO: 364890 - DNA, 15 bp, Homo sapiens
catgtcacagaggtt

SEQ ID NO: 364891 - DNA, 15 bp, Homo sapiens
acatgtcacagaggt

SEQ ID NO: 364892 - DNA, 15 bp, Homo sapiens
cacatgtcacagagg

SEQ ID NO: 364893 - DNA, 15 bp, Homo sapiens
gcacatgtcacagag

SEQ ID NO: 364894 - DNA, 15 bp, Homo sapiens
cgcacatgtcacaga

SEQ ID NO: 364895 - DNA, 15 bp, Homo sapiens
acgcacatgtcacag

SEQ ID NO: 364896 - DNA, 15 bp, Homo sapiens
aacgcacatgtcaca

SEQ ID NO: 364897 - DNA, 15 bp, Homo sapiens
taacgcacatgtcac

SEQ ID NO: 364898 - DNA, 15 bp, Homo sapiens
ataacgcacatgtca

SEQ ID NO: 364899 - DNA, 15 bp, Homo sapiens
gataacgcacatgtc

SEQ ID NO: 364900 - DNA, 15 bp, Homo sapiens
ggataacgcacatgt

SEQ ID NO: 364901 - DNA, 15 bp, Homo sapiens
aggataacgcacatg

SEQ ID NO: 364902 - DNA, 15 bp, Homo sapiens
caggataacgcacat

SEQ ID NO: 364903 - DNA, 15 bp, Homo sapiens
acaggataacgcaca

SEQ ID NO: 364904 - DNA, 15 bp, Homo sapiens
gacaggataacgcac

SEQ ID NO: 364905 - DNA, 15 bp, Homo sapiens
tgacaggataacgca

SEQ ID NO: 364906 - DNA, 15 bp, Homo sapiens
ctgacaggataacgc

SEQ ID NO: 364907 - DNA, 15 bp, Homo sapiens
gctgacaggataacg

SEQ ID NO: 364908 - DNA, 15 bp, Homo sapiens
ggctgacaggataac

SEQ ID NO: 364909 - DNA, 15 bp, Homo sapiens
tggctgacaggataa

SEQ ID NO: 364910 - DNA, 15 bp, Homo sapiens
ttggctgacaggata

SEQ ID NO: 364911 - DNA, 15 bp, Homo sapiens
attggctgacaggat

SEQ ID NO: 364912 - DNA, 15 bp, Homo sapiens
gattggctgacagga

SEQ ID NO: 364913 - DNA, 15 bp, Homo sapiens
tgattggctgacagg

SEQ ID NO: 364914 - DNA, 15 bp, Homo sapiens
ctgattggctgacag

SEQ ID NO: 364915 - DNA, 15 bp, Homo sapiens
tctgattggctgaca

SEQ ID NO: 364916 - DNA, 15 bp, Homo sapiens
ttctgattggctgac

SEQ ID NO: 364917 - DNA, 15 bp, Homo sapiens
attctgattggctga

SEQ ID NO: 364918 - DNA, 15 bp, Homo sapiens
tattctgattggctg

SEQ ID NO: 364919 - DNA, 15 bp, Homo sapiens
ttattctgattggct

SEQ ID NO: 364920 - DNA, 15 bp, Homo sapiens
attattctgattggc

SEQ ID NO: 364921 - DNA, 15 bp, Homo sapiens
tattattctgattgg

SEQ ID NO: 364922 - DNA, 15 bp, Homo sapiens
atattattctgattg

SEQ ID NO: 364923 - DNA, 15 bp, Homo sapiens
aatattattctgatt

SEQ ID NO: 364924 - DNA, 15 bp, Homo sapiens
caatattattctgat

SEQ ID NO: 364925 - DNA, 15 bp, Homo sapiens
tcaatattattctga

SEQ ID NO: 364926 - DNA, 15 bp, Homo sapiens
atcaatattattctg

SEQ ID NO: 364927 - DNA, 15 bp, Homo sapiens
catcaatattattct

SEQ ID NO: 364928 - DNA, 15 bp, Homo sapiens
tcatcaatattattc

SEQ ID NO: 364929 - DNA, 15 bp, Homo sapiens
atcatcaatattatt

SEQ ID NO: 364930 - DNA, 15 bp, Homo sapiens
tatcatcaatattat

SEQ ID NO: 364931 - DNA, 15 bp, Homo sapiens
gtatcatcaatatta

SEQ ID NO: 364932 - DNA, 15 bp, Homo sapiens
agtatcatcaatatt

SEQ ID NO: 364933 - DNA, 15 bp, Homo sapiens
aagtatcatcaatat

SEQ ID NO: 364934 - DNA, 15 bp, Homo sapiens
gaagtatcatcaata

SEQ ID NO: 364935 - DNA, 15 bp, Homo sapiens
cgaagtatcatcaat

SEQ ID NO: 364936 - DNA, 15 bp, Homo sapiens
gcgaagtatcatcaa

SEQ ID NO: 364937 - DNA, 15 bp, Homo sapiens
agcgaagtatcatca

SEQ ID NO: 364938 - DNA, 15 bp, Homo sapiens
cagcgaagtatcatc

SEQ ID NO: 364939 - DNA, 15 bp, Homo sapiens
gcagcgaagtatcat

SEQ ID NO: 364940 - DNA, 15 bp, Homo sapiens
tgcagcgaagtatca

SEQ ID NO: 364941 - DNA, 15 bp, Homo sapiens
ctgcagcgaagtatc

SEQ ID NO: 364942 - DNA, 15 bp, Homo sapiens
cctgcagcgaagtat

SEQ ID NO: 364943 - DNA, 15 bp, Homo sapiens
tcctgcagcgaagta

SEQ ID NO: 364944 - DNA, 15 bp, Homo sapiens
gtcctgcagcgaagt

SEQ ID NO: 364945 - DNA, 15 bp, Homo sapiens
tgtcctgcagcgaag

SEQ ID NO: 364946 - DNA, 15 bp, Homo sapiens
ttgtcctgcagcgaa

SEQ ID NO: 364947 - DNA, 15 bp, Homo sapiens
cttgtcctgcagcga

SEQ ID NO: 364948 - DNA, 15 bp, Homo sapiens
ccttgtcctgcagcg

SEQ ID NO: 364949 - DNA, 15 bp, Homo sapiens
tccttgtcctgcagc

SEQ ID NO: 364950 - DNA, 15 bp, Homo sapiens
ttccttgtcctgcag

SEQ ID NO: 364951 - DNA, 15 bp, Homo sapiens
attccttgtcctgca

SEQ ID NO: 364952 - DNA, 15 bp, Homo sapiens
cattccttgtcctgc

SEQ ID NO: 364953 - DNA, 15 bp, Homo sapiens
gcattccttgtcctg

SEQ ID NO: 364954 - DNA, 15 bp, Homo sapiens
tgcattccttgtcct

SEQ ID NO: 364955 - DNA, 15 bp, Homo sapiens
atgcattccttgtcc

SEQ ID NO: 364956 - DNA, 15 bp, Homo sapiens
gatgcattccttgtc

SEQ ID NO: 364957 - DNA, 15 bp, Homo sapiens
agatgcattccttgt

SEQ ID NO: 364958 - DNA, 15 bp, Homo sapiens
aagatgcattccttg

SEQ ID NO: 364959 - DNA, 15 bp, Homo sapiens
caagatgcattcctt

SEQ ID NO: 364960 - DNA, 15 bp, Homo sapiens
ccaagatgcattcct

SEQ ID NO: 364961 - DNA, 15 bp, Homo sapiens
gccaagatgcattcc

SEQ ID NO: 364962 - DNA, 15 bp, Homo sapiens
cgccaagatgcattc

SEQ ID NO: 364963 - DNA, 15 bp, Homo sapiens
acgccaagatgcatt

SEQ ID NO: 364964 - DNA, 15 bp, Homo sapiens
gacgccaagatgcat

SEQ ID NO: 364965 - DNA, 15 bp, Homo sapiens
tgacgccaagatgca

SEQ ID NO: 364966 - DNA, 15 bp, Homo sapiens
gtgacgccaagatgc

SEQ ID NO: 364967 - DNA, 15 bp, Homo sapiens
agtgacgccaagatg

SEQ ID NO: 364968 - DNA, 15 bp, Homo sapiens
gagtgacgccaagat

SEQ ID NO: 364969 - DNA, 15 bp, Homo sapiens
tgagtgacgccaaga

SEQ ID NO: 364970 - DNA, 15 bp, Homo sapiens
ttgagtgacgccaag

SEQ ID NO: 364971 - DNA, 15 bp, Homo sapiens
gttgagtgacgccaa

SEQ ID NO: 364972 - DNA, 15 bp, Homo sapiens
tgttgagtgacgcca

SEQ ID NO: 364973 - DNA, 15 bp, Homo sapiens
atgttgagtgacgcc

SEQ ID NO: 364974 - DNA, 15 bp, Homo sapiens
gatgttgagtgacgc

SEQ ID NO: 364975 - DNA, 15 bp, Homo sapiens
tgatgttgagtgacg

SEQ ID NO: 364976 - DNA, 15 bp, Homo sapiens
ttgatgttgagtgac

SEQ ID NO: 364977 - DNA, 15 bp, Homo sapiens
tttgatgttgagtga

SEQ ID NO: 364978 - DNA, 15 bp, Homo sapiens
atttgatgttgagtg

SEQ ID NO: 364979 - DNA, 15 bp, Homo sapiens
gatttgatgttgagt

SEQ ID NO: 364980 - DNA, 15 bp, Homo sapiens
agatttgatgttgag

SEQ ID NO: 364981 - DNA, 15 bp, Homo sapiens
tagatttgatgttga

SEQ ID NO: 364982 - DNA, 15 bp, Homo sapiens
atagatttgatgttg

SEQ ID NO: 364983 - DNA, 15 bp, Homo sapiens
catagatttgatgtt

SEQ ID NO: 364984 - DNA, 15 bp, Homo sapiens
gcatagatttgatgt

SEQ ID NO: 364985 - DNA, 15 bp, Homo sapiens
tgcatagatttgatg

SEQ ID NO: 364986 - DNA, 15 bp, Homo sapiens
ctgcatagatttgat

SEQ ID NO: 364987 - DNA, 15 bp, Homo sapiens
actgcatagatttga

SEQ ID NO: 364988 - DNA, 15 bp, Homo sapiens
aactgcatagatttg

SEQ ID NO: 364989 - DNA, 15 bp, Homo sapiens
aaactgcatagattt

SEQ ID NO: 364990 - DNA, 15 bp, Homo sapiens
caaactgcatagatt

SEQ ID NO: 364991 - DNA, 15 bp, Homo sapiens
tcaaactgcatagat

SEQ ID NO: 364992 - DNA, 15 bp, Homo sapiens
atcaaactgcataga

SEQ ID NO: 364993 - DNA, 15 bp, Homo sapiens
catcaaactgcatag

SEQ ID NO: 364994 - DNA, 15 bp, Homo sapiens
tcatcaaactgcata

SEQ ID NO: 364995 - DNA, 15 bp, Homo sapiens
gtcatcaaactgcat

SEQ ID NO: 364996 - DNA, 15 bp, Homo sapiens
tgtcatcaaactgca

SEQ ID NO: 364997 - DNA, 15 bp, Homo sapiens
ctgtcatcaaactgc

SEQ ID NO: 364998 - DNA, 15 bp, Homo sapiens
gctgtcatcaaactg

SEQ ID NO: 364999 - DNA, 15 bp, Homo sapiens
tgctgtcatcaaact

SEQ ID NO: 365000 - DNA, 15 bp, Homo sapiens
atgctgtcatcaaac

SEQ ID NO: 365001 - DNA, 15 bp, Homo sapiens
gatgctgtcatcaaa

SEQ ID NO: 365002 - DNA, 15 bp, Homo sapiens
cgatgctgtcatcaa

SEQ ID NO: 365003 - DNA, 15 bp, Homo sapiens
ccgatgctgtcatca

SEQ ID NO: 365004 - DNA, 15 bp, Homo sapiens
tccgatgctgtcatc

SEQ ID NO: 365005 - DNA, 15 bp, Homo sapiens
ctccgatgctgtcat

SEQ ID NO: 365006 - DNA, 15 bp, Homo sapiens
actccgatgctgtca

SEQ ID NO: 365007 - DNA, 15 bp, Homo sapiens
gactccgatgctgtc

SEQ ID NO: 365008 - DNA, 15 bp, Homo sapiens
agactccgatgctgt

SEQ ID NO: 365009 - DNA, 15 bp, Homo sapiens
aagactccgatgctg

SEQ ID NO: 365010 - DNA, 15 bp, Homo sapiens
caagactccgatgct

SEQ ID NO: 365011 - DNA, 15 bp, Homo sapiens
gcaagactccgatgc

SEQ ID NO: 365012 - DNA, 15 bp, Homo sapiens
tgcaagactccgatg

SEQ ID NO: 365013 - DNA, 15 bp, Homo sapiens
ctgcaagactccgat

SEQ ID NO: 365014 - DNA, 15 bp, Homo sapiens
cctgcaagactccga

SEQ ID NO: 365015 - DNA, 15 bp, Homo sapiens
gcctgcaagactccg

SEQ ID NO: 365016 - DNA, 15 bp, Homo sapiens
agcctgcaagactcc

SEQ ID NO: 365017 - DNA, 15 bp, Homo sapiens
tagcctgcaagactc

SEQ ID NO: 365018 - DNA, 15 bp, Homo sapiens
ttagcctgcaagact

SEQ ID NO: 365019 - DNA, 15 bp, Homo sapiens
attagcctgcaagac

SEQ ID NO: 365020 - DNA, 15 bp, Homo sapiens
aattagcctgcaaga

SEQ ID NO: 365021 - DNA, 15 bp, Homo sapiens
gaattagcctgcaag

SEQ ID NO: 365022 - DNA, 15 bp, Homo sapiens
ggaattagcctgcaa

SEQ ID NO: 365023 - DNA, 15 bp, Homo sapiens
gggaattagcctgca

SEQ ID NO: 365024 - DNA, 15 bp, Homo sapiens
tgggaattagcctgc

SEQ ID NO: 365025 - DNA, 15 bp, Homo sapiens
ttgggaattagcctg

SEQ ID NO: 365026 - DNA, 15 bp, Homo sapiens
cttgggaattagcct

SEQ ID NO: 365027 - DNA, 15 bp, Homo sapiens
ccttgggaattagcc

SEQ ID NO: 365028 - DNA, 15 bp, Homo sapiens
accttgggaattagc

SEQ ID NO: 365029 - DNA, 15 bp, Homo sapiens
taccttgggaattag

SEQ ID NO: 365030 - DNA, 15 bp, Homo sapiens
ttaccttgggaatta

SEQ ID NO: 365031 - DNA, 15 bp, Homo sapiens
cttaccttgggaatt

SEQ ID NO: 365032 - DNA, 15 bp, Homo sapiens
ccttaccttgggaat

SEQ ID NO: 365033 - DNA, 15 bp, Homo sapiens
tccttaccttgggaa

SEQ ID NO: 365034 - DNA, 15 bp, Homo sapiens
gtccttaccttggga

SEQ ID NO: 365035 - DNA, 15 bp, Homo sapiens
tgtccttaccttggg

SEQ ID NO: 365036 - DNA, 15 bp, Homo sapiens
ctgtccttaccttgg

SEQ ID NO: 365037 - DNA, 15 bp, Homo sapiens
gctgtccttaccttg

SEQ ID NO: 365038 - DNA, 15 bp, Homo sapiens
ggctgtccttacctt

SEQ ID NO: 365039 - DNA, 15 bp, Homo sapiens
aggctgtccttacct

SEQ ID NO: 365040 - DNA, 15 bp, Homo sapiens
caggctgtccttacc

SEQ ID NO: 365041 - DNA, 15 bp, Homo sapiens
acaggctgtccttac

SEQ ID NO: 365042 - DNA, 15 bp, Homo sapiens
tacaggctgtcctta

SEQ ID NO: 365043 - DNA, 15 bp, Homo sapiens
ttacaggctgtcctt

SEQ ID NO: 365044 - DNA, 15 bp, Homo sapiens
attacaggctgtcct

SEQ ID NO: 365045 - DNA, 15 bp, Homo sapiens
tattacaggctgtcc

SEQ ID NO: 365046 - DNA, 15 bp, Homo sapiens
gtattacaggctgtc

SEQ ID NO: 365047 - DNA, 15 bp, Homo sapiens
agtattacaggctgt

SEQ ID NO: 365048 - DNA, 15 bp, Homo sapiens
aagtattacaggctg

SEQ ID NO: 365049 - DNA, 15 bp, Homo sapiens
gaagtattacaggct

SEQ ID NO: 365050 - DNA, 15 bp, Homo sapiens
agaagtattacaggc

SEQ ID NO: 365051 - DNA, 15 bp, Homo sapiens
aagaagtattacagg

SEQ ID NO: 365052 - DNA, 15 bp, Homo sapiens
aaagaagtattacag

SEQ ID NO: 365053 - DNA, 15 bp, Homo sapiens
caaagaagtattaca

SEQ ID NO: 365054 - DNA, 15 bp, Homo sapiens
gcaaagaagtattac

SEQ ID NO: 365055 - DNA, 15 bp, Homo sapiens
agcaaagaagtatta

SEQ ID NO: 365056 - DNA, 15 bp, Homo sapiens
cagcaaagaagtatt

SEQ ID NO: 365057 - DNA, 15 bp, Homo sapiens
acagcaaagaagtat

SEQ ID NO: 365058 - DNA, 15 bp, Homo sapiens
cacagcaaagaagta

SEQ ID NO: 365059 - DNA, 15 bp, Homo sapiens
gcacagcaaagaagt

SEQ ID NO: 365060 - DNA, 15 bp, Homo sapiens
ggcacagcaaagaag

SEQ ID NO: 365061 - DNA, 15 bp, Homo sapiens
aggcacagcaaagaa

SEQ ID NO: 365062 - DNA, 15 bp, Homo sapiens
caggcacagcaaaga

SEQ ID NO: 365063 - DNA, 15 bp, Homo sapiens
gcaggcacagcaaag

SEQ ID NO: 365064 - DNA, 15 bp, Homo sapiens
tgcaggcacagcaaa

SEQ ID NO: 365065 - DNA, 15 bp, Homo sapiens
ctgcaggcacagcaa

SEQ ID NO: 365066 - DNA, 15 bp, Homo sapiens
cctgcaggcacagca

SEQ ID NO: 365067 - DNA, 15 bp, Homo sapiens
ccctgcaggcacagc

SEQ ID NO: 365068 - DNA, 15 bp, Homo sapiens
cccctgcaggcacag

SEQ ID NO: 365069 - DNA, 15 bp, Homo sapiens
tcccctgcaggcaca

SEQ ID NO: 365070 - DNA, 15 bp, Homo sapiens
gtcccctgcaggcac

SEQ ID NO: 365071 - DNA, 15 bp, Homo sapiens
tgtcccctgcaggca

SEQ ID NO: 365072 - DNA, 15 bp, Homo sapiens
ctgtcccctgcaggc

SEQ ID NO: 365073 - DNA, 15 bp, Homo sapiens
cctgtcccctgcagg

SEQ ID NO: 365074 - DNA, 15 bp, Homo sapiens
ccctgtcccctgcag

SEQ ID NO: 365075 - DNA, 15 bp, Homo sapiens
cccctgtcccctgca

SEQ ID NO: 365076 - DNA, 15 bp, Homo sapiens
gcccctgtcccctgc

SEQ ID NO: 365077 - DNA, 15 bp, Homo sapiens
agcccctgtcccctg

SEQ ID NO: 365078 - DNA, 15 bp, Homo sapiens
cagcccctgtcccct

SEQ ID NO: 365079 - DNA, 15 bp, Homo sapiens
ccagcccctgtcccc

SEQ ID NO: 365080 - DNA, 15 bp, Homo sapiens
gccagcccctgtccc

SEQ ID NO: 365081 - DNA, 15 bp, Homo sapiens
tgccagcccctgtcc

SEQ ID NO: 365082 - DNA, 15 bp, Homo sapiens
ttgccagcccctgtc

SEQ ID NO: 365083 - DNA, 15 bp, Homo sapiens
cttgccagcccctgt

SEQ ID NO: 365084 - DNA, 15 bp, Homo sapiens
tcttgccagcccctg

SEQ ID NO: 365085 - DNA, 15 bp, Homo sapiens
ctcttgccagcccct

SEQ ID NO: 365086 - DNA, 15 bp, Homo sapiens
cctcttgccagcccc

SEQ ID NO: 365087 - DNA, 15 bp, Homo sapiens
ccctcttgccagccc

SEQ ID NO: 365088 - DNA, 15 bp, Homo sapiens
tccctcttgccagcc

SEQ ID NO: 365089 - DNA, 15 bp, Homo sapiens
atccctcttgccagc

SEQ ID NO: 365090 - DNA, 15 bp, Homo sapiens
tatccctcttgccag

SEQ ID NO: 365091 - DNA, 15 bp, Homo sapiens
atatccctcttgcca

SEQ ID NO: 365092 - DNA, 15 bp, Homo sapiens
gatatccctcttgcc

SEQ ID NO: 365093 - DNA, 15 bp, Homo sapiens
ggatatccctcttgc

SEQ ID NO: 365094 - DNA, 15 bp, Homo sapiens
aggatatccctcttg

SEQ ID NO: 365095 - DNA, 15 bp, Homo sapiens
aaggatatccctctt

SEQ ID NO: 365096 - DNA, 15 bp, Homo sapiens
gaaggatatccctct

SEQ ID NO: 365097 - DNA, 15 bp, Homo sapiens
tgaaggatatccctc

SEQ ID NO: 365098 - DNA, 15 bp, Homo sapiens
gtgaaggatatccct

SEQ ID NO: 365099 - DNA, 15 bp, Homo sapiens
agtgaaggatatccc

SEQ ID NO: 365100 - DNA, 15 bp, Homo sapiens
gagtgaaggatatcc

SEQ ID NO: 365101 - DNA, 15 bp, Homo sapiens
tgagtgaaggatatc

SEQ ID NO: 365102 - DNA, 15 bp, Homo sapiens
ctgagtgaaggatat

SEQ ID NO: 365103 - DNA, 15 bp, Homo sapiens
actgagtgaaggata

SEQ ID NO: 365104 - DNA, 15 bp, Homo sapiens
tactgagtgaaggat

SEQ ID NO: 365105 - DNA, 15 bp, Homo sapiens
ttactgagtgaagga

SEQ ID NO: 365106 - DNA, 15 bp, Homo sapiens
attactgagtgaagg

SEQ ID NO: 365107 - DNA, 15 bp, Homo sapiens
aattactgagtgaag

SEQ ID NO: 365108 - DNA, 15 bp, Homo sapiens
gaattactgagtgaa

SEQ ID NO: 365109 - DNA, 15 bp, Homo sapiens
tgaattactgagtga

SEQ ID NO: 365110 - DNA, 15 bp, Homo sapiens
ttgaattactgagtg

SEQ ID NO: 365111 - DNA, 15 bp, Homo sapiens
tttgaattactgagt

SEQ ID NO: 365112 - DNA, 15 bp, Homo sapiens
ctttgaattactgag

SEQ ID NO: 365113 - DNA, 15 bp, Homo sapiens
tctttgaattactga

SEQ ID NO: 365114 - DNA, 15 bp, Homo sapiens
ctctttgaattactg

SEQ ID NO: 365115 - DNA, 15 bp, Homo sapiens
cctctttgaattact

SEQ ID NO: 365116 - DNA, 15 bp, Homo sapiens
gcctctttgaattac

SEQ ID NO: 365117 - DNA, 15 bp, Homo sapiens
agcctctttgaatta

SEQ ID NO: 365118 - DNA, 15 bp, Homo sapiens
gagcctctttgaatt

SEQ ID NO: 365119 - DNA, 15 bp, Homo sapiens
tgagcctctttgaat

SEQ ID NO: 365120 - DNA, 15 bp, Homo sapiens
gtgagcctctttgaa

SEQ ID NO: 365121 - DNA, 15 bp, Homo sapiens
tgtgagcctctttga

SEQ ID NO: 365122 - DNA, 15 bp, Homo sapiens
atgtgagcctctttg

SEQ ID NO: 365123 - DNA, 15 bp, Homo sapiens
gatgtgagcctcttt

SEQ ID NO: 365124 - DNA, 15 bp, Homo sapiens
tgatgtgagcctctt

SEQ ID NO: 365125 - DNA, 15 bp, Homo sapiens
ctgatgtgagcctct

SEQ ID NO: 365126 - DNA, 15 bp, Homo sapiens
gctgatgtgagcctc

SEQ ID NO: 365127 - DNA, 15 bp, Homo sapiens
ggctgatgtgagcct

SEQ ID NO: 365128 - DNA, 15 bp, Homo sapiens
aggctgatgtgagcc

SEQ ID NO: 365129 - DNA, 15 bp, Homo sapiens
caggctgatgtgagc

SEQ ID NO: 365130 - DNA, 15 bp, Homo sapiens
gcaggctgatgtgag

SEQ ID NO: 365131 - DNA, 15 bp, Homo sapiens
ggcaggctgatgtga

SEQ ID NO: 365132 - DNA, 15 bp, Homo sapiens
aggcaggctgatgtg

SEQ ID NO: 365133 - DNA, 15 bp, Homo sapiens
caggcaggctgatgt

SEQ ID NO: 365134 - DNA, 15 bp, Homo sapiens
ccaggcaggctgatg

SEQ ID NO: 365135 - DNA, 15 bp, Homo sapiens
gccaggcaggctgat

SEQ ID NO: 365136 - DNA, 15 bp, Homo sapiens
tgccaggcaggctga

SEQ ID NO: 365137 - DNA, 15 bp, Homo sapiens
ctgccaggcaggctg

SEQ ID NO: 365138 - DNA, 15 bp, Homo sapiens
actgccaggcaggct

SEQ ID NO: 365139 - DNA, 15 bp, Homo sapiens
cactgccaggcaggc

SEQ ID NO: 365140 - DNA, 15 bp, Homo sapiens
tcactgccaggcagg

SEQ ID NO: 365141 - DNA, 15 bp, Homo sapiens
ttcactgccaggcag

SEQ ID NO: 365142 - DNA, 15 bp, Homo sapiens
tttcactgccaggca

SEQ ID NO: 365143 - DNA, 15 bp, Homo sapiens
gtttcactgccaggc

SEQ ID NO: 365144 - DNA, 15 bp, Homo sapiens
ggtttcactgccagg

SEQ ID NO: 365145 - DNA, 15 bp, Homo sapiens
aggtttcactgccag

SEQ ID NO: 365146 - DNA, 15 bp, Homo sapiens
caggtttcactgcca

SEQ ID NO: 365147 - DNA, 15 bp, Homo sapiens
gcaggtttcactgcc

SEQ ID NO: 365148 - DNA, 15 bp, Homo sapiens
cgcaggtttcactgc

SEQ ID NO: 365149 - DNA, 15 bp, Homo sapiens
ccgcaggtttcactg

SEQ ID NO: 365150 - DNA, 15 bp, Homo sapiens
accgcaggtttcact

SEQ ID NO: 365151 - DNA, 15 bp, Homo sapiens
gaccgcaggtttcac

SEQ ID NO: 365152 - DNA, 15 bp, Homo sapiens
tgaccgcaggtttca

SEQ ID NO: 365153 - DNA, 15 bp, Homo sapiens
gtgaccgcaggtttc

SEQ ID NO: 365154 - DNA, 15 bp, Homo sapiens
ggtgaccgcaggttt

SEQ ID NO: 365155 - DNA, 15 bp, Homo sapiens
tggtgaccgcaggtt

SEQ ID NO: 365156 - DNA, 15 bp, Homo sapiens
atggtgaccgcaggt

SEQ ID NO: 365157 - DNA, 15 bp, Homo sapiens
catggtgaccgcagg

SEQ ID NO: 365158 - DNA, 15 bp, Homo sapiens
tcatggtgaccgcag

SEQ ID NO: 365159 - DNA, 15 bp, Homo sapiens
atcatggtgaccgca

SEQ ID NO: 365160 - DNA, 15 bp, Homo sapiens
catcatggtgaccgc

SEQ ID NO: 365161 - DNA, 15 bp, Homo sapiens
ccatcatggtgaccg

SEQ ID NO: 365162 - DNA, 15 bp, Homo sapiens
gccatcatggtgacc

SEQ ID NO: 365163 - DNA, 15 bp, Homo sapiens
agccatcatggtgac

SEQ ID NO: 365164 - DNA, 15 bp, Homo sapiens
aagccatcatggtga

SEQ ID NO: 365165 - DNA, 15 bp, Homo sapiens
aaagccatcatggtg

SEQ ID NO: 365166 - DNA, 15 bp, Homo sapiens
gaaagccatcatggt

SEQ ID NO: 365167 - DNA, 15 bp, Homo sapiens
tgaaagccatcatgg

SEQ ID NO: 365168 - DNA, 15 bp, Homo sapiens
ttgaaagccatcatg

SEQ ID NO: 365169 - DNA, 15 bp, Homo sapiens
tttgaaagccatcat

SEQ ID NO: 365170 - DNA, 15 bp, Homo sapiens
ctttgaaagccatca

SEQ ID NO: 365171 - DNA, 15 bp, Homo sapiens
cctttgaaagccatc

SEQ ID NO: 365172 - DNA, 15 bp, Homo sapiens
ccctttgaaagccat

SEQ ID NO: 365173 - DNA, 15 bp, Homo sapiens
cccctttgaaagcca

SEQ ID NO: 365174 - DNA, 15 bp, Homo sapiens
gcccctttgaaagcc

SEQ ID NO: 365175 - DNA, 15 bp, Homo sapiens
tgcccctttgaaagc

SEQ ID NO: 365176 - DNA, 15 bp, Homo sapiens
atgcccctttgaaag

SEQ ID NO: 365177 - DNA, 15 bp, Homo sapiens
gatgcccctttgaaa

SEQ ID NO: 365178 - DNA, 15 bp, Homo sapiens
agatgcccctttgaa

SEQ ID NO: 365179 - DNA, 15 bp, Homo sapiens
cagatgcccctttga

SEQ ID NO: 365180 - DNA, 15 bp, Homo sapiens
gcagatgcccctttg

SEQ ID NO: 365181 - DNA, 15 bp, Homo sapiens
agcagatgccccttt

SEQ ID NO: 365182 - DNA, 15 bp, Homo sapiens
cagcagatgcccctt

SEQ ID NO: 365183 - DNA, 15 bp, Homo sapiens
gcagcagatgcccct

SEQ ID NO: 365184 - DNA, 15 bp, Homo sapiens
ggcagcagatgcccc

SEQ ID NO: 365185 - DNA, 15 bp, Homo sapiens
aggcagcagatgccc

SEQ ID NO: 365186 - DNA, 15 bp, Homo sapiens
gaggcagcagatgcc

SEQ ID NO: 365187 - DNA, 15 bp, Homo sapiens
agaggcagcagatgc

SEQ ID NO: 365188 - DNA, 15 bp, Homo sapiens
aagaggcagcagatg

SEQ ID NO: 365189 - DNA, 15 bp, Homo sapiens
gaagaggcagcagat

SEQ ID NO: 365190 - DNA, 15 bp, Homo sapiens
agaagaggcagcaga

SEQ ID NO: 365191 - DNA, 15 bp, Homo sapiens
aagaagaggcagcag

SEQ ID NO: 365192 - DNA, 15 bp, Homo sapiens
aaagaagaggcagca

SEQ ID NO: 365193 - DNA, 15 bp, Homo sapiens
gaaagaagaggcagc

SEQ ID NO: 365194 - DNA, 15 bp, Homo sapiens
ggaaagaagaggcag

SEQ ID NO: 365195 - DNA, 15 bp, Homo sapiens
tggaaagaagaggca

SEQ ID NO: 365196 - DNA, 15 bp, Homo sapiens
atggaaagaagaggc

SEQ ID NO: 365197 - DNA, 15 bp, Homo sapiens
aatggaaagaagagg

SEQ ID NO: 365198 - DNA, 15 bp, Homo sapiens
gaatggaaagaagag

SEQ ID NO: 365199 - DNA, 15 bp, Homo sapiens
ggaatggaaagaaga

SEQ ID NO: 365200 - DNA, 15 bp, Homo sapiens
tggaatggaaagaag

SEQ ID NO: 365201 - DNA, 15 bp, Homo sapiens
ctggaatggaaagaa

SEQ ID NO: 365202 - DNA, 15 bp, Homo sapiens
tctggaatggaaaga

SEQ ID NO: 365203 - DNA, 15 bp, Homo sapiens
ttctggaatggaaag

SEQ ID NO: 365204 - DNA, 15 bp, Homo sapiens
attctggaatggaaa

SEQ ID NO: 365205 - DNA, 15 bp, Homo sapiens
cattctggaatggaa

SEQ ID NO: 365206 - DNA, 15 bp, Homo sapiens
gcattctggaatgga

SEQ ID NO: 365207 - DNA, 15 bp, Homo sapiens
tgcattctggaatgg

SEQ ID NO: 365208 - DNA, 15 bp, Homo sapiens
ctgcattctggaatg

SEQ ID NO: 365209 - DNA, 15 bp, Homo sapiens
cctgcattctggaat

SEQ ID NO: 365210 - DNA, 15 bp, Homo sapiens
gcctgcattctggaa

SEQ ID NO: 365211 - DNA, 15 bp, Homo sapiens
agcctgcattctgga

SEQ ID NO: 365212 - DNA, 15 bp, Homo sapiens
aagcctgcattctgg

SEQ ID NO: 365213 - DNA, 15 bp, Homo sapiens
caagcctgcattctg

SEQ ID NO: 365214 - DNA, 15 bp, Homo sapiens
tcaagcctgcattct

SEQ ID NO: 365215 - DNA, 15 bp, Homo sapiens
ctcaagcctgcattc

SEQ ID NO: 365216 - DNA, 15 bp, Homo sapiens
tctcaagcctgcatt

SEQ ID NO: 365217 - DNA, 15 bp, Homo sapiens
gtctcaagcctgcat

SEQ ID NO: 365218 - DNA, 15 bp, Homo sapiens
ggtctcaagcctgca

SEQ ID NO: 365219 - DNA, 15 bp, Homo sapiens
aggtctcaagcctgc

SEQ ID NO: 365220 - DNA, 15 bp, Homo sapiens
caggtctcaagcctg

SEQ ID NO: 365221 - DNA, 15 bp, Homo sapiens
ccaggtctcaagcct

SEQ ID NO: 365222 - DNA, 15 bp, Homo sapiens
accaggtctcaagcc

SEQ ID NO: 365223 - DNA, 15 bp, Homo sapiens
gaccaggtctcaagc

SEQ ID NO: 365224 - DNA, 15 bp, Homo sapiens
tgaccaggtctcaag

SEQ ID NO: 365225 - DNA, 15 bp, Homo sapiens
gtgaccaggtctcaa

SEQ ID NO: 365226 - DNA, 15 bp, Homo sapiens
ggtgaccaggtctca

SEQ ID NO: 365227 - DNA, 15 bp, Homo sapiens
gggtgaccaggtctc

SEQ ID NO: 365228 - DNA, 15 bp, Homo sapiens
tgggtgaccaggtct

SEQ ID NO: 365229 - DNA, 15 bp, Homo sapiens
gtgggtgaccaggtc

SEQ ID NO: 365230 - DNA, 15 bp, Homo sapiens
tgtgggtgaccaggt

SEQ ID NO: 365231 - DNA, 15 bp, Homo sapiens
gtgtgggtgaccagg

SEQ ID NO: 365232 - DNA, 15 bp, Homo sapiens
tgtgtgggtgaccag

SEQ ID NO: 365233 - DNA, 15 bp, Homo sapiens
gtgtgtgggtgacca

SEQ ID NO: 365234 - DNA, 15 bp, Homo sapiens
tgtgtgtgggtgacc

SEQ ID NO: 365235 - DNA, 15 bp, Homo sapiens
ctgtgtgtgggtgac

SEQ ID NO: 365236 - DNA, 15 bp, Homo sapiens
tctgtgtgtgggtga

SEQ ID NO: 365237 - DNA, 15 bp, Homo sapiens
gtctgtgtgtgggtg

SEQ ID NO: 365238 - DNA, 15 bp, Homo sapiens
agtctgtgtgtgggt

SEQ ID NO: 365239 - DNA, 15 bp, Homo sapiens
tagtctgtgtgtggg

SEQ ID NO: 365240 - DNA, 15 bp, Homo sapiens
ctagtctgtgtgtgg

SEQ ID NO: 365241 - DNA, 15 bp, Homo sapiens
cctagtctgtgtgtg

SEQ ID NO: 365242 - DNA, 15 bp, Homo sapiens
acctagtctgtgtgt

SEQ ID NO: 365243 - DNA, 15 bp, Homo sapiens
aacctagtctgtgtg

SEQ ID NO: 365244 - DNA, 15 bp, Homo sapiens
caacctagtctgtgt

SEQ ID NO: 365245 - DNA, 15 bp, Homo sapiens
gcaacctagtctgtg

SEQ ID NO: 365246 - DNA, 15 bp, Homo sapiens
ggcaacctagtctgt

SEQ ID NO: 365247 - DNA, 15 bp, Homo sapiens
aggcaacctagtctg

SEQ ID NO: 365248 - DNA, 15 bp, Homo sapiens
aaggcaacctagtct

SEQ ID NO: 365249 - DNA, 15 bp, Homo sapiens
aaaggcaacctagtc

SEQ ID NO: 365250 - DNA, 15 bp, Homo sapiens
gaaaggcaacctagt

SEQ ID NO: 365251 - DNA, 15 bp, Homo sapiens
ggaaaggcaacctag

SEQ ID NO: 365252 - DNA, 15 bp, Homo sapiens
tggaaaggcaaccta

SEQ ID NO: 365253 - DNA, 15 bp, Homo sapiens
ctggaaaggcaacct

SEQ ID NO: 365254 - DNA, 15 bp, Homo sapiens
tctggaaaggcaacc

SEQ ID NO: 365255 - DNA, 15 bp, Homo sapiens
ctctggaaaggcaac

SEQ ID NO: 365256 - DNA, 15 bp, Homo sapiens
cctctggaaaggcaa

SEQ ID NO: 365257 - DNA, 15 bp, Homo sapiens
tcctctggaaaggca

SEQ ID NO: 365258 - DNA, 15 bp, Homo sapiens
atcctctggaaaggc

SEQ ID NO: 365259 - DNA, 15 bp, Homo sapiens
tatcctctggaaagg

SEQ ID NO: 365260 - DNA, 15 bp, Homo sapiens
ttatcctctggaaag

SEQ ID NO: 365261 - DNA, 15 bp, Homo sapiens
tttatcctctggaaa

SEQ ID NO: 365262 - DNA, 15 bp, Homo sapiens
gtttatcctctggaa

SEQ ID NO: 365263 - DNA, 15 bp, Homo sapiens
tgtttatcctctgga

SEQ ID NO: 365264 - DNA, 15 bp, Homo sapiens
ttgtttatcctctgg

SEQ ID NO: 365265 - DNA, 15 bp, Homo sapiens
cttgtttatcctctg

SEQ ID NO: 365266 - DNA, 15 bp, Homo sapiens
gcttgtttatcctct

SEQ ID NO: 365267 - DNA, 15 bp, Homo sapiens
ggcttgtttatcctc

SEQ ID NO: 365268 - DNA, 15 bp, Homo sapiens
aggcttgtttatcct

SEQ ID NO: 365269 - DNA, 15 bp, Homo sapiens
aaggcttgtttatcc

SEQ ID NO: 365270 - DNA, 15 bp, Homo sapiens
aaaggcttgtttatc

SEQ ID NO: 365271 - DNA, 15 bp, Homo sapiens
taaaggcttgtttat

SEQ ID NO: 365272 - DNA, 15 bp, Homo sapiens
ttaaaggcttgttta

SEQ ID NO: 365273 - DNA, 15 bp, Homo sapiens
tttaaaggcttgttt

SEQ ID NO: 365274 - DNA, 15 bp, Homo sapiens
atttaaaggcttgtt

SEQ ID NO: 365275 - DNA, 15 bp, Homo sapiens
tatttaaaggcttgt

SEQ ID NO: 365276 - DNA, 15 bp, Homo sapiens
ctatttaaaggcttg

SEQ ID NO: 365277 - DNA, 15 bp, Homo sapiens
gctatttaaaggctt

SEQ ID NO: 365278 - DNA, 15 bp, Homo sapiens
ggctatttaaaggct

SEQ ID NO: 365279 - DNA, 15 bp, Homo sapiens
tggctatttaaaggc

SEQ ID NO: 365280 - DNA, 15 bp, Homo sapiens
gtggctatttaaagg

SEQ ID NO: 365281 - DNA, 15 bp, Homo sapiens
ggtggctatttaaag

SEQ ID NO: 365282 - DNA, 15 bp, Homo sapiens
gggtggctatttaaa

SEQ ID NO: 365283 - DNA, 15 bp, Homo sapiens
ggggtggctatttaa

SEQ ID NO: 365284 - DNA, 15 bp, Homo sapiens
gggggtggctattta

SEQ ID NO: 365285 - DNA, 15 bp, Homo sapiens
agggggtggctattt

SEQ ID NO: 365286 - DNA, 15 bp, Homo sapiens
gagggggtggctatt

SEQ ID NO: 365287 - DNA, 15 bp, Homo sapiens
tgagggggtggctat

SEQ ID NO: 365288 - DNA, 15 bp, Homo sapiens
ctgagggggtggcta

SEQ ID NO: 365289 - DNA, 15 bp, Homo sapiens
gctgagggggtggct

SEQ ID NO: 365290 - DNA, 15 bp, Homo sapiens
agctgagggggtggc

SEQ ID NO: 365291 - DNA, 15 bp, Homo sapiens
aagctgagggggtgg

SEQ ID NO: 365292 - DNA, 15 bp, Homo sapiens
aaagctgagggggtg

SEQ ID NO: 365293 - DNA, 15 bp, Homo sapiens
gaaagctgagggggt

SEQ ID NO: 365294 - DNA, 15 bp, Homo sapiens
ggaaagctgaggggg

SEQ ID NO: 365295 - DNA, 15 bp, Homo sapiens
gggaaagctgagggg

SEQ ID NO: 365296 - DNA, 15 bp, Homo sapiens
tgggaaagctgaggg

SEQ ID NO: 365297 - DNA, 15 bp, Homo sapiens
ttgggaaagctgagg

SEQ ID NO: 365298 - DNA, 15 bp, Homo sapiens
cttgggaaagctgag

SEQ ID NO: 365299 - DNA, 15 bp, Homo sapiens
ccttgggaaagctga

SEQ ID NO: 365300 - DNA, 15 bp, Homo sapiens
tccttgggaaagctg

SEQ ID NO: 365301 - DNA, 15 bp, Homo sapiens
ctccttgggaaagct

SEQ ID NO: 365302 - DNA, 15 bp, Homo sapiens
actccttgggaaagc

SEQ ID NO: 365303 - DNA, 15 bp, Homo sapiens
cactccttgggaaag

SEQ ID NO: 365304 - DNA, 15 bp, Homo sapiens
ccactccttgggaaa

SEQ ID NO: 365305 - DNA, 15 bp, Homo sapiens
gccactccttgggaa

SEQ ID NO: 365306 - DNA, 15 bp, Homo sapiens
agccactccttggga

SEQ ID NO: 365307 - DNA, 15 bp, Homo sapiens
aagccactccttggg

SEQ ID NO: 365308 - DNA, 15 bp, Homo sapiens
gaagccactccttgg

SEQ ID NO: 365309 - DNA, 15 bp, Homo sapiens
tgaagccactccttg

SEQ ID NO: 365310 - DNA, 15 bp, Homo sapiens
atgaagccactcctt

SEQ ID NO: 365311 - DNA, 15 bp, Homo sapiens
catgaagccactcct

SEQ ID NO: 365312 - DNA, 15 bp, Homo sapiens
tcatgaagccactcc

SEQ ID NO: 365313 - DNA, 15 bp, Homo sapiens
gtcatgaagccactc

SEQ ID NO: 365314 - DNA, 15 bp, Homo sapiens
ggtcatgaagccact

SEQ ID NO: 365315 - DNA, 15 bp, Homo sapiens
tggtcatgaagccac

SEQ ID NO: 365316 - DNA, 15 bp, Homo sapiens
ctggtcatgaagcca

SEQ ID NO: 365317 - DNA, 15 bp, Homo sapiens
actggtcatgaagcc

SEQ ID NO: 365318 - DNA, 15 bp, Homo sapiens
cactggtcatgaagc

SEQ ID NO: 365319 - DNA, 15 bp, Homo sapiens
acactggtcatgaag

SEQ ID NO: 365320 - DNA, 15 bp, Homo sapiens
gacactggtcatgaa

SEQ ID NO: 365321 - DNA, 15 bp, Homo sapiens
tgacactggtcatga

SEQ ID NO: 365322 - DNA, 15 bp, Homo sapiens
atgacactggtcatg

SEQ ID NO: 365323 - DNA, 15 bp, Homo sapiens
gatgacactggtcat

SEQ ID NO: 365324 - DNA, 15 bp, Homo sapiens
tgatgacactggtca

SEQ ID NO: 365325 - DNA, 15 bp, Homo sapiens
ctgatgacactggtc

SEQ ID NO: 365326 - DNA, 15 bp, Homo sapiens
gctgatgacactggt

SEQ ID NO: 365327 - DNA, 15 bp, Homo sapiens
agctgatgacactgg

SEQ ID NO: 365328 - DNA, 15 bp, Homo sapiens
tagctgatgacactg

SEQ ID NO: 365329 - DNA, 15 bp, Homo sapiens
ttagctgatgacact

SEQ ID NO: 365330 - DNA, 15 bp, Homo sapiens
tttagctgatgacac

SEQ ID NO: 365331 - DNA, 15 bp, Homo sapiens
atttagctgatgaca

SEQ ID NO: 365332 - DNA, 15 bp, Homo sapiens
catttagctgatgac

SEQ ID NO: 365333 - DNA, 15 bp, Homo sapiens
acatttagctgatga

SEQ ID NO: 365334 - DNA, 15 bp, Homo sapiens
gacatttagctgatg

SEQ ID NO: 365335 - DNA, 15 bp, Homo sapiens
tgacatttagctgat

SEQ ID NO: 365336 - DNA, 15 bp, Homo sapiens
ctgacatttagctga

SEQ ID NO: 365337 - DNA, 15 bp, Homo sapiens
tctgacatttagctg

SEQ ID NO: 365338 - DNA, 15 bp, Homo sapiens
ctctgacatttagct

SEQ ID NO: 365339 - DNA, 15 bp, Homo sapiens
gctctgacatttagc

SEQ ID NO: 365340 - DNA, 15 bp, Homo sapiens
tgctctgacatttag

SEQ ID NO: 365341 - DNA, 15 bp, Homo sapiens
gtgctctgacattta

SEQ ID NO: 365342 - DNA, 15 bp, Homo sapiens
agtgctctgacattt

SEQ ID NO: 365343 - DNA, 15 bp, Homo sapiens
cagtgctctgacatt

SEQ ID NO: 365344 - DNA, 15 bp, Homo sapiens
tcagtgctctgacat

SEQ ID NO: 365345 - DNA, 15 bp, Homo sapiens
ttcagtgctctgaca

SEQ ID NO: 365346 - DNA, 15 bp, Homo sapiens
tttcagtgctctgac

SEQ ID NO: 365347 - DNA, 15 bp, Homo sapiens
ttttcagtgctctga

SEQ ID NO: 365348 - DNA, 15 bp, Homo sapiens
cttttcagtgctctg

SEQ ID NO: 365349 - DNA, 15 bp, Homo sapiens
tcttttcagtgctct

SEQ ID NO: 365350 - DNA, 15 bp, Homo sapiens
ttcttttcagtgctc

SEQ ID NO: 365351 - DNA, 15 bp, Homo sapiens
cttcttttcagtgct

SEQ ID NO: 365352 - DNA, 15 bp, Homo sapiens
gcttcttttcagtgc

SEQ ID NO: 365353 - DNA, 15 bp, Homo sapiens
agcttcttttcagtg

SEQ ID NO: 365354 - DNA, 15 bp, Homo sapiens
cagcttcttttcagt

SEQ ID NO: 365355 - DNA, 15 bp, Homo sapiens
ccagcttcttttcag

SEQ ID NO: 365356 - DNA, 15 bp, Homo sapiens
gccagcttcttttca

SEQ ID NO: 365357 - DNA, 15 bp, Homo sapiens
agccagcttcttttc

SEQ ID NO: 365358 - DNA, 15 bp, Homo sapiens
cagccagcttctttt

SEQ ID NO: 365359 - DNA, 15 bp, Homo sapiens
gcagccagcttcttt

SEQ ID NO: 365360 - DNA, 15 bp, Homo sapiens
tgcagccagcttctt

SEQ ID NO: 365361 - DNA, 15 bp, Homo sapiens
gtgcagccagcttct

SEQ ID NO: 365362 - DNA, 15 bp, Homo sapiens
tgtgcagccagcttc

SEQ ID NO: 365363 - DNA, 15 bp, Homo sapiens
ttgtgcagccagctt

SEQ ID NO: 365364 - DNA, 15 bp, Homo sapiens
attgtgcagccagct

SEQ ID NO: 365365 - DNA, 15 bp, Homo sapiens
aattgtgcagccagc

SEQ ID NO: 365366 - DNA, 15 bp, Homo sapiens
gaattgtgcagccag

SEQ ID NO: 365367 - DNA, 15 bp, Homo sapiens
agaattgtgcagcca

SEQ ID NO: 365368 - DNA, 15 bp, Homo sapiens
cagaattgtgcagcc

SEQ ID NO: 365369 - DNA, 15 bp, Homo sapiens
tcagaattgtgcagc

SEQ ID NO: 365370 - DNA, 15 bp, Homo sapiens
gtcagaattgtgcag

SEQ ID NO: 365371 - DNA, 15 bp, Homo sapiens
ggtcagaattgtgca

SEQ ID NO: 365372 - DNA, 15 bp, Homo sapiens
cggtcagaattgtgc

SEQ ID NO: 365373 - DNA, 15 bp, Homo sapiens
acggtcagaattgtg

SEQ ID NO: 365374 - DNA, 15 bp, Homo sapiens
aacggtcagaattgt

SEQ ID NO: 365375 - DNA, 15 bp, Homo sapiens
aaacggtcagaattg

SEQ ID NO: 365376 - DNA, 15 bp, Homo sapiens
gaaacggtcagaatt

SEQ ID NO: 365377 - DNA, 15 bp, Homo sapiens
ggaaacggtcagaat

SEQ ID NO: 365378 - DNA, 15 bp, Homo sapiens
aggaaacggtcagaa

SEQ ID NO: 365379 - DNA, 15 bp, Homo sapiens
aaggaaacggtcaga

SEQ ID NO: 365380 - DNA, 15 bp, Homo sapiens
gaaggaaacggtcag

SEQ ID NO: 365381 - DNA, 15 bp, Homo sapiens
ggaaggaaacggtca

SEQ ID NO: 365382 - DNA, 15 bp, Homo sapiens
tggaaggaaacggtc

SEQ ID NO: 365383 - DNA, 15 bp, Homo sapiens
ctggaaggaaacggt

SEQ ID NO: 365384 - DNA, 15 bp, Homo sapiens
actggaaggaaacgg

SEQ ID NO: 365385 - DNA, 15 bp, Homo sapiens
tactggaaggaaacg

SEQ ID NO: 365386 - DNA, 15 bp, Homo sapiens
atactggaaggaaac

SEQ ID NO: 365387 - DNA, 15 bp, Homo sapiens
tatactggaaggaaa

SEQ ID NO: 365388 - DNA, 15 bp, Homo sapiens
atatactggaaggaa

SEQ ID NO: 365389 - DNA, 15 bp, Homo sapiens
catatactggaagga

SEQ ID NO: 365390 - DNA, 15 bp, Homo sapiens
acatatactggaagg

SEQ ID NO: 365391 - DNA, 15 bp, Homo sapiens
aacatatactggaag

SEQ ID NO: 365392 - DNA, 15 bp, Homo sapiens
aaacatatactggaa

SEQ ID NO: 365393 - DNA, 15 bp, Homo sapiens
aaaacatatactgga

SEQ ID NO: 365394 - DNA, 15 bp, Homo sapiens
aaaaacatatactgg

SEQ ID NO: 365395 - DNA, 15 bp, Homo sapiens
caaaaacatatactg

SEQ ID NO: 365396 - DNA, 15 bp, Homo sapiens
gcaaaaacatatact

SEQ ID NO: 365397 - DNA, 15 bp, Homo sapiens
ggcaaaaacatatac

SEQ ID NO: 365398 - DNA, 15 bp, Homo sapiens
tggcaaaaacatata

SEQ ID NO: 365399 - DNA, 15 bp, Homo sapiens
atggcaaaaacatat

SEQ ID NO: 365400 - DNA, 15 bp, Homo sapiens
aatggcaaaaacata

SEQ ID NO: 365401 - DNA, 15 bp, Homo sapiens
caatggcaaaaacat

SEQ ID NO: 365402 - DNA, 15 bp, Homo sapiens
tcaatggcaaaaaca

SEQ ID NO: 365403 - DNA, 15 bp, Homo sapiens
ctcaatggcaaaaac

SEQ ID NO: 365404 - DNA, 15 bp, Homo sapiens
gctcaatggcaaaaa

SEQ ID NO: 365405 - DNA, 15 bp, Homo sapiens
agctcaatggcaaaa

SEQ ID NO: 365406 - DNA, 15 bp, Homo sapiens
cagctcaatggcaaa

SEQ ID NO: 365407 - DNA, 15 bp, Homo sapiens
ccagctcaatggcaa

SEQ ID NO: 365408 - DNA, 15 bp, Homo sapiens
cccagctcaatggca

SEQ ID NO: 365409 - DNA, 15 bp, Homo sapiens
tcccagctcaatggc

SEQ ID NO: 365410 - DNA, 15 bp, Homo sapiens
atcccagctcaatgg

SEQ ID NO: 365411 - DNA, 15 bp, Homo sapiens
catcccagctcaatg

SEQ ID NO: 365412 - DNA, 15 bp, Homo sapiens
ccatcccagctcaat

SEQ ID NO: 365413 - DNA, 15 bp, Homo sapiens
cccatcccagctcaa

SEQ ID NO: 365414 - DNA, 15 bp, Homo sapiens
tcccatcccagctca

SEQ ID NO: 365415 - DNA, 15 bp, Homo sapiens
ttcccatcccagctc

SEQ ID NO: 365416 - DNA, 15 bp, Homo sapiens
attcccatcccagct

SEQ ID NO: 365417 - DNA, 15 bp, Homo sapiens
cattcccatcccagc

SEQ ID NO: 365418 - DNA, 15 bp, Homo sapiens
tcattcccatcccag

SEQ ID NO: 365419 - DNA, 15 bp, Homo sapiens
ttcattcccatccca

SEQ ID NO: 365420 - DNA, 15 bp, Homo sapiens
cttcattcccatccc

SEQ ID NO: 365421 - DNA, 15 bp, Homo sapiens
gcttcattcccatcc

SEQ ID NO: 365422 - DNA, 15 bp, Homo sapiens
agcttcattcccatc

SEQ ID NO: 365423 - DNA, 15 bp, Homo sapiens
aagcttcattcccat

SEQ ID NO: 365424 - DNA, 15 bp, Homo sapiens
aaagcttcattccca

SEQ ID NO: 365425 - DNA, 15 bp, Homo sapiens
caaagcttcattccc

SEQ ID NO: 365426 - DNA, 15 bp, Homo sapiens
gcaaagcttcattcc

SEQ ID NO: 365427 - DNA, 15 bp, Homo sapiens
agcaaagcttcattc

SEQ ID NO: 365428 - DNA, 15 bp, Homo sapiens
tagcaaagcttcatt

SEQ ID NO: 365429 - DNA, 15 bp, Homo sapiens
atagcaaagcttcat

SEQ ID NO: 365430 - DNA, 15 bp, Homo sapiens
aatagcaaagcttca

SEQ ID NO: 365431 - DNA, 15 bp, Homo sapiens
caatagcaaagcttc

SEQ ID NO: 365432 - DNA, 15 bp, Homo sapiens
acaatagcaaagctt

SEQ ID NO: 365433 - DNA, 15 bp, Homo sapiens
aacaatagcaaagct

SEQ ID NO: 365434 - DNA, 15 bp, Homo sapiens
taacaatagcaaagc

SEQ ID NO: 365435 - DNA, 15 bp, Homo sapiens
ctaacaatagcaaag

SEQ ID NO: 365436 - DNA, 15 bp, Homo sapiens
tctaacaatagcaaa

SEQ ID NO: 365437 - DNA, 15 bp, Homo sapiens
ctctaacaatagcaa

SEQ ID NO: 365438 - DNA, 15 bp, Homo sapiens
gctctaacaatagca

SEQ ID NO: 365439 - DNA, 15 bp, Homo sapiens
ggctctaacaatagc

SEQ ID NO: 365440 - DNA, 15 bp, Homo sapiens
cggctctaacaatag

SEQ ID NO: 365441 - DNA, 15 bp, Homo sapiens
gcggctctaacaata

SEQ ID NO: 365442 - DNA, 15 bp, Homo sapiens
ggcggctctaacaat

SEQ ID NO: 365443 - DNA, 15 bp, Homo sapiens
aggcggctctaacaa

SEQ ID NO: 365444 - DNA, 15 bp, Homo sapiens
gaggcggctctaaca

SEQ ID NO: 365445 - DNA, 15 bp, Homo sapiens
agaggcggctctaac

SEQ ID NO: 365446 - DNA, 15 bp, Homo sapiens
tagaggcggctctaa

SEQ ID NO: 365447 - DNA, 15 bp, Homo sapiens
ctagaggcggctcta

SEQ ID NO: 365448 - DNA, 15 bp, Homo sapiens
cctagaggcggctct

SEQ ID NO: 365449 - DNA, 15 bp, Homo sapiens
tcctagaggcggctc

SEQ ID NO: 365450 - DNA, 15 bp, Homo sapiens
gtcctagaggcggct

SEQ ID NO: 365451 - DNA, 15 bp, Homo sapiens
agtcctagaggcggc

SEQ ID NO: 365452 - DNA, 15 bp, Homo sapiens
gagtcctagaggcgg

SEQ ID NO: 365453 - DNA, 15 bp, Homo sapiens
agagtcctagaggcg

SEQ ID NO: 365454 - DNA, 15 bp, Homo sapiens
cagagtcctagaggc

SEQ ID NO: 365455 - DNA, 15 bp, Homo sapiens
gcagagtcctagagg

SEQ ID NO: 365456 - DNA, 15 bp, Homo sapiens
agcagagtcctagag

SEQ ID NO: 365457 - DNA, 15 bp, Homo sapiens
cagcagagtcctaga

SEQ ID NO: 365458 - DNA, 15 bp, Homo sapiens
tcagcagagtcctag

SEQ ID NO: 365459 - DNA, 15 bp, Homo sapiens
gtcagcagagtccta

SEQ ID NO: 365460 - DNA, 15 bp, Homo sapiens
ggtcagcagagtcct

SEQ ID NO: 365461 - DNA, 15 bp, Homo sapiens
tggtcagcagagtcc

SEQ ID NO: 365462 - DNA, 15 bp, Homo sapiens
ttggtcagcagagtc

SEQ ID NO: 365463 - DNA, 15 bp, Homo sapiens
cttggtcagcagagt

SEQ ID NO: 365464 - DNA, 15 bp, Homo sapiens
ccttggtcagcagag

SEQ ID NO: 365465 - DNA, 15 bp, Homo sapiens
cccttggtcagcaga

SEQ ID NO: 365466 - DNA, 15 bp, Homo sapiens
tcccttggtcagcag

SEQ ID NO: 365467 - DNA, 15 bp, Homo sapiens
atcccttggtcagca

SEQ ID NO: 365468 - DNA, 15 bp, Homo sapiens
catcccttggtcagc

SEQ ID NO: 365469 - DNA, 15 bp, Homo sapiens
ccatcccttggtcag

SEQ ID NO: 365470 - DNA, 15 bp, Homo sapiens
accatcccttggtca

SEQ ID NO: 365471 - DNA, 15 bp, Homo sapiens
taccatcccttggtc

SEQ ID NO: 365472 - DNA, 15 bp, Homo sapiens
ttaccatcccttggt

SEQ ID NO: 365473 - DNA, 15 bp, Homo sapiens
attaccatcccttgg

SEQ ID NO: 365474 - DNA, 15 bp, Homo sapiens
gattaccatcccttg

SEQ ID NO: 365475 - DNA, 15 bp, Homo sapiens
agattaccatccctt

SEQ ID NO: 365476 - DNA, 15 bp, Homo sapiens
gagattaccatccct

SEQ ID NO: 365477 - DNA, 15 bp, Homo sapiens
agagattaccatccc

SEQ ID NO: 365478 - DNA, 15 bp, Homo sapiens
cagagattaccatcc

SEQ ID NO: 365479 - DNA, 15 bp, Homo sapiens
ccagagattaccatc

SEQ ID NO: 365480 - DNA, 15 bp, Homo sapiens
tccagagattaccat

SEQ ID NO: 365481 - DNA, 15 bp, Homo sapiens
ctccagagattacca

SEQ ID NO: 365482 - DNA, 15 bp, Homo sapiens
tctccagagattacc

SEQ ID NO: 365483 - DNA, 15 bp, Homo sapiens
ctctccagagattac

SEQ ID NO: 365484 - DNA, 15 bp, Homo sapiens
actctccagagatta

SEQ ID NO: 365485 - DNA, 15 bp, Homo sapiens
cactctccagagatt

SEQ ID NO: 365486 - DNA, 15 bp, Homo sapiens
ccactctccagagat

SEQ ID NO: 365487 - DNA, 15 bp, Homo sapiens
gccactctccagaga

SEQ ID NO: 365488 - DNA, 15 bp, Homo sapiens
tgccactctccagag

SEQ ID NO: 365489 - DNA, 15 bp, Homo sapiens
ttgccactctccaga

SEQ ID NO: 365490 - DNA, 15 bp, Homo sapiens
gttgccactctccag

SEQ ID NO: 365491 - DNA, 15 bp, Homo sapiens
agttgccactctcca

SEQ ID NO: 365492 - DNA, 15 bp, Homo sapiens
gagttgccactctcc

SEQ ID NO: 365493 - DNA, 15 bp, Homo sapiens
agagttgccactctc

SEQ ID NO: 365494 - DNA, 15 bp, Homo sapiens
tagagttgccactct

SEQ ID NO: 365495 - DNA, 15 bp, Homo sapiens
atagagttgccactc

SEQ ID NO: 365496 - DNA, 15 bp, Homo sapiens
catagagttgccact

SEQ ID NO: 365497 - DNA, 15 bp, Homo sapiens
ccatagagttgccac

SEQ ID NO: 365498 - DNA, 15 bp, Homo sapiens
tccatagagttgcca

SEQ ID NO: 365499 - DNA, 15 bp, Homo sapiens
gtccatagagttgcc

SEQ ID NO: 365500 - DNA, 15 bp, Homo sapiens
tgtccatagagttgc

SEQ ID NO: 365501 - DNA, 15 bp, Homo sapiens
gtgtccatagagttg

SEQ ID NO: 365502 - DNA, 15 bp, Homo sapiens
agtgtccatagagtt

SEQ ID NO: 365503 - DNA, 15 bp, Homo sapiens
tagtgtccatagagt

SEQ ID NO: 365504 - DNA, 15 bp, Homo sapiens
ttagtgtccatagag

SEQ ID NO: 365505 - DNA, 15 bp, Homo sapiens
tttagtgtccataga

SEQ ID NO: 365506 - DNA, 15 bp, Homo sapiens
ttttagtgtccatag

SEQ ID NO: 365507 - DNA, 15 bp, Homo sapiens
cttttagtgtccata

SEQ ID NO: 365508 - DNA, 15 bp, Homo sapiens
acttttagtgtccat

SEQ ID NO: 365509 - DNA, 15 bp, Homo sapiens
gacttttagtgtcca

SEQ ID NO: 365510 - DNA, 15 bp, Homo sapiens
tgacttttagtgtcc

SEQ ID NO: 365511 - DNA, 15 bp, Homo sapiens
atgacttttagtgtc

SEQ ID NO: 365512 - DNA, 15 bp, Homo sapiens
aatgacttttagtgt

SEQ ID NO: 365513 - DNA, 15 bp, Homo sapiens
aaatgacttttagtg

SEQ ID NO: 365514 - DNA, 15 bp, Homo sapiens
taaatgacttttagt

SEQ ID NO: 365515 - DNA, 15 bp, Homo sapiens
ctaaatgacttttag

SEQ ID NO: 365516 - DNA, 15 bp, Homo sapiens
gctaaatgactttta

SEQ ID NO: 365517 - DNA, 15 bp, Homo sapiens
tgctaaatgactttt

SEQ ID NO: 365518 - DNA, 15 bp, Homo sapiens
ttgctaaatgacttt

SEQ ID NO: 365519 - DNA, 15 bp, Homo sapiens
tttgctaaatgactt

SEQ ID NO: 365520 - DNA, 15 bp, Homo sapiens
atttgctaaatgact

SEQ ID NO: 365521 - DNA, 15 bp, Homo sapiens
catttgctaaatgac

SEQ ID NO: 365522 - DNA, 15 bp, Homo sapiens
ccatttgctaaatga

SEQ ID NO: 365523 - DNA, 15 bp, Homo sapiens
accatttgctaaatg

SEQ ID NO: 365524 - DNA, 15 bp, Homo sapiens
caccatttgctaaat

SEQ ID NO: 365525 - DNA, 15 bp, Homo sapiens
tcaccatttgctaaa

SEQ ID NO: 365526 - DNA, 15 bp, Homo sapiens
gtcaccatttgctaa

SEQ ID NO: 365527 - DNA, 15 bp, Homo sapiens
tgtcaccatttgcta

SEQ ID NO: 365528 - DNA, 15 bp, Homo sapiens
gtgtcaccatttgct

SEQ ID NO: 365529 - DNA, 15 bp, Homo sapiens
agtgtcaccatttgc

SEQ ID NO: 365530 - DNA, 15 bp, Homo sapiens
aagtgtcaccatttg

SEQ ID NO: 365531 - DNA, 15 bp, Homo sapiens
caagtgtcaccattt

SEQ ID NO: 365532 - DNA, 15 bp, Homo sapiens
acaagtgtcaccatt

SEQ ID NO: 365533 - DNA, 15 bp, Homo sapiens
gacaagtgtcaccat

SEQ ID NO: 365534 - DNA, 15 bp, Homo sapiens
tgacaagtgtcacca

SEQ ID NO: 365535 - DNA, 15 bp, Homo sapiens
ctgacaagtgtcacc

SEQ ID NO: 365536 - DNA, 15 bp, Homo sapiens
tctgacaagtgtcac

SEQ ID NO: 365537 - DNA, 15 bp, Homo sapiens
gtctgacaagtgtca

SEQ ID NO: 365538 - DNA, 15 bp, Homo sapiens
ggtctgacaagtgtc

SEQ ID NO: 365539 - DNA, 15 bp, Homo sapiens
tggtctgacaagtgt

SEQ ID NO: 365540 - DNA, 15 bp, Homo sapiens
gtggtctgacaagtg

SEQ ID NO: 365541 - DNA, 15 bp, Homo sapiens
tgtggtctgacaagt

SEQ ID NO: 365542 - DNA, 15 bp, Homo sapiens
gtgtggtctgacaag

SEQ ID NO: 365543 - DNA, 15 bp, Homo sapiens
tgtgtggtctgacaa

SEQ ID NO: 365544 - DNA, 15 bp, Homo sapiens
atgtgtggtctgaca

SEQ ID NO: 365545 - DNA, 15 bp, Homo sapiens
aatgtgtggtctgac

SEQ ID NO: 365546 - DNA, 15 bp, Homo sapiens
aaatgtgtggtctga

SEQ ID NO: 365547 - DNA, 15 bp, Homo sapiens
aaaatgtgtggtctg

SEQ ID NO: 365548 - DNA, 15 bp, Homo sapiens
gaaaatgtgtggtct

SEQ ID NO: 365549 - DNA, 15 bp, Homo sapiens
ggaaaatgtgtggtc

SEQ ID NO: 365550 - DNA, 15 bp, Homo sapiens
aggaaaatgtgtggt

SEQ ID NO: 365551 - DNA, 15 bp, Homo sapiens
taggaaaatgtgtgg

SEQ ID NO: 365552 - DNA, 15 bp, Homo sapiens
ataggaaaatgtgtg

SEQ ID NO: 365553 - DNA, 15 bp, Homo sapiens
tataggaaaatgtgt

SEQ ID NO: 365554 - DNA, 15 bp, Homo sapiens
ctataggaaaatgtg

SEQ ID NO: 365555 - DNA, 15 bp, Homo sapiens
cctataggaaaatgt

SEQ ID NO: 365556 - DNA, 15 bp, Homo sapiens
tcctataggaaaatg

SEQ ID NO: 365557 - DNA, 15 bp, Homo sapiens
ctcctataggaaaat

SEQ ID NO: 365558 - DNA, 15 bp, Homo sapiens
cctcctataggaaaa

SEQ ID NO: 365559 - DNA, 15 bp, Homo sapiens
gcctcctataggaaa

SEQ ID NO: 365560 - DNA, 15 bp, Homo sapiens
tgcctcctataggaa

SEQ ID NO: 365561 - DNA, 15 bp, Homo sapiens
ttgcctcctatagga

SEQ ID NO: 365562 - DNA, 15 bp, Homo sapiens
tttgcctcctatagg

SEQ ID NO: 365563 - DNA, 15 bp, Homo sapiens
ctttgcctcctatag

SEQ ID NO: 365564 - DNA, 15 bp, Homo sapiens
gctttgcctcctata

SEQ ID NO: 365565 - DNA, 15 bp, Homo sapiens
tgctttgcctcctat

SEQ ID NO: 365566 - DNA, 15 bp, Homo sapiens
ctgctttgcctccta

SEQ ID NO: 365567 - DNA, 15 bp, Homo sapiens
gctgctttgcctcct

SEQ ID NO: 365568 - DNA, 15 bp, Homo sapiens
ggctgctttgcctcc

SEQ ID NO: 365569 - DNA, 15 bp, Homo sapiens
aggctgctttgcctc

SEQ ID NO: 365570 - DNA, 15 bp, Homo sapiens
aaggctgctttgcct

SEQ ID NO: 365571 - DNA, 15 bp, Homo sapiens
taaggctgctttgcc

SEQ ID NO: 365572 - DNA, 15 bp, Homo sapiens
ttaaggctgctttgc

SEQ ID NO: 365573 - DNA, 15 bp, Homo sapiens
cttaaggctgctttg

SEQ ID NO: 365574 - DNA, 15 bp, Homo sapiens
acttaaggctgcttt

SEQ ID NO: 365575 - DNA, 15 bp, Homo sapiens
cacttaaggctgctt

SEQ ID NO: 365576 - DNA, 15 bp, Homo sapiens
tcacttaaggctgct

SEQ ID NO: 365577 - DNA, 15 bp, Homo sapiens
gtcacttaaggctgc

SEQ ID NO: 365578 - DNA, 15 bp, Homo sapiens
tgtcacttaaggctg

SEQ ID NO: 365579 - DNA, 15 bp, Homo sapiens
gtgtcacttaaggct

SEQ ID NO: 365580 - DNA, 15 bp, Homo sapiens
tgtgtcacttaaggc

SEQ ID NO: 365581 - DNA, 15 bp, Homo sapiens
gtgtgtcacttaagg

SEQ ID NO: 365582 - DNA, 15 bp, Homo sapiens
cgtgtgtcacttaag

SEQ ID NO: 365583 - DNA, 15 bp, Homo sapiens
acgtgtgtcacttaa

SEQ ID NO: 365584 - DNA, 15 bp, Homo sapiens
gacgtgtgtcactta

SEQ ID NO: 365585 - DNA, 15 bp, Homo sapiens
agacgtgtgtcactt

SEQ ID NO: 365586 - DNA, 15 bp, Homo sapiens
cagacgtgtgtcact

SEQ ID NO: 365587 - DNA, 15 bp, Homo sapiens
gcagacgtgtgtcac

SEQ ID NO: 365588 - DNA, 15 bp, Homo sapiens
ggcagacgtgtgtca

SEQ ID NO: 365589 - DNA, 15 bp, Homo sapiens
aggcagacgtgtgtc

SEQ ID NO: 365590 - DNA, 15 bp, Homo sapiens
aaggcagacgtgtgt

SEQ ID NO: 365591 - DNA, 15 bp, Homo sapiens
gaaggcagacgtgtg

SEQ ID NO: 365592 - DNA, 15 bp, Homo sapiens
ggaaggcagacgtgt

SEQ ID NO: 365593 - DNA, 15 bp, Homo sapiens
aggaaggcagacgtg

SEQ ID NO: 365594 - DNA, 15 bp, Homo sapiens
taggaaggcagacgt

SEQ ID NO: 365595 - DNA, 15 bp, Homo sapiens
gtaggaaggcagacg

SEQ ID NO: 365596 - DNA, 15 bp, Homo sapiens
agtaggaaggcagac

SEQ ID NO: 365597 - DNA, 15 bp, Homo sapiens
gagtaggaaggcaga

SEQ ID NO: 365598 - DNA, 15 bp, Homo sapiens
agagtaggaaggcag

SEQ ID NO: 365599 - DNA, 15 bp, Homo sapiens
cagagtaggaaggca

SEQ ID NO: 365600 - DNA, 15 bp, Homo sapiens
gcagagtaggaaggc

SEQ ID NO: 365601 - DNA, 15 bp, Homo sapiens
ggcagagtaggaagg

SEQ ID NO: 365602 - DNA, 15 bp, Homo sapiens
gggcagagtaggaag

SEQ ID NO: 365603 - DNA, 15 bp, Homo sapiens
ggggcagagtaggaa

SEQ ID NO: 365604 - DNA, 15 bp, Homo sapiens
aggggcagagtagga

SEQ ID NO: 365605 - DNA, 15 bp, Homo sapiens
taggggcagagtagg

SEQ ID NO: 365606 - DNA, 15 bp, Homo sapiens
ctaggggcagagtag

SEQ ID NO: 365607 - DNA, 15 bp, Homo sapiens
actaggggcagagta

SEQ ID NO: 365608 - DNA, 15 bp, Homo sapiens
gactaggggcagagt

SEQ ID NO: 365609 - DNA, 15 bp, Homo sapiens
agactaggggcagag

SEQ ID NO: 365610 - DNA, 15 bp, Homo sapiens
aagactaggggcaga

SEQ ID NO: 365611 - DNA, 15 bp, Homo sapiens
aaagactaggggcag

SEQ ID NO: 365612 - DNA, 15 bp, Homo sapiens
gaaagactaggggca

SEQ ID NO: 365613 - DNA, 15 bp, Homo sapiens
ggaaagactaggggc

SEQ ID NO: 365614 - DNA, 15 bp, Homo sapiens
aggaaagactagggg

SEQ ID NO: 365615 - DNA, 15 bp, Homo sapiens
caggaaagactaggg

SEQ ID NO: 365616 - DNA, 15 bp, Homo sapiens
acaggaaagactagg

SEQ ID NO: 365617 - DNA, 15 bp, Homo sapiens
gacaggaaagactag

SEQ ID NO: 365618 - DNA, 15 bp, Homo sapiens
tgacaggaaagacta

SEQ ID NO: 365619 - DNA, 15 bp, Homo sapiens
atgacaggaaagact

SEQ ID NO: 365620 - DNA, 15 bp, Homo sapiens
aatgacaggaaagac

SEQ ID NO: 365621 - DNA, 15 bp, Homo sapiens
aaatgacaggaaaga

SEQ ID NO: 365622 - DNA, 15 bp, Homo sapiens
caaatgacaggaaag

SEQ ID NO: 365623 - DNA, 15 bp, Homo sapiens
gcaaatgacaggaaa

SEQ ID NO: 365624 - DNA, 15 bp, Homo sapiens
agcaaatgacaggaa

SEQ ID NO: 365625 - DNA, 15 bp, Homo sapiens
aagcaaatgacagga

SEQ ID NO: 365626 - DNA, 15 bp, Homo sapiens
aaagcaaatgacagg

SEQ ID NO: 365627 - DNA, 15 bp, Homo sapiens
caaagcaaatgacag

SEQ ID NO: 365628 - DNA, 15 bp, Homo sapiens
ccaaagcaaatgaca

SEQ ID NO: 365629 - DNA, 15 bp, Homo sapiens
cccaaagcaaatgac

SEQ ID NO: 365630 - DNA, 15 bp, Homo sapiens
tcccaaagcaaatga

SEQ ID NO: 365631 - DNA, 15 bp, Homo sapiens
gtcccaaagcaaatg

SEQ ID NO: 365632 - DNA, 15 bp, Homo sapiens
ggtcccaaagcaaat

SEQ ID NO: 365633 - DNA, 15 bp, Homo sapiens
gggtcccaaagcaaa

SEQ ID NO: 365634 - DNA, 15 bp, Homo sapiens
agggtcccaaagcaa

SEQ ID NO: 365635 - DNA, 15 bp, Homo sapiens
cagggtcccaaagca

SEQ ID NO: 365636 - DNA, 15 bp, Homo sapiens
ccagggtcccaaagc

SEQ ID NO: 365637 - DNA, 15 bp, Homo sapiens
cccagggtcccaaag

SEQ ID NO: 365638 - DNA, 15 bp, Homo sapiens
gcccagggtcccaaa

SEQ ID NO: 365639 - DNA, 15 bp, Homo sapiens
tgcccagggtcccaa

SEQ ID NO: 365640 - DNA, 15 bp, Homo sapiens
ctgcccagggtccca

SEQ ID NO: 365641 - DNA, 15 bp, Homo sapiens
cctgcccagggtccc

SEQ ID NO: 365642 - DNA, 15 bp, Homo sapiens
acctgcccagggtcc

SEQ ID NO: 365643 - DNA, 15 bp, Homo sapiens
cacctgcccagggtc

SEQ ID NO: 365644 - DNA, 15 bp, Homo sapiens
ccacctgcccagggt

SEQ ID NO: 365645 - DNA, 15 bp, Homo sapiens
accacctgcccaggg

SEQ ID NO: 365646 - DNA, 15 bp, Homo sapiens
aaccacctgcccagg

SEQ ID NO: 365647 - DNA, 15 bp, Homo sapiens
taaccacctgcccag

SEQ ID NO: 365648 - DNA, 15 bp, Homo sapiens
gtaaccacctgccca

SEQ ID NO: 365649 - DNA, 15 bp, Homo sapiens
tgtaaccacctgccc

SEQ ID NO: 365650 - DNA, 15 bp, Homo sapiens
ttgtaaccacctgcc

SEQ ID NO: 365651 - DNA, 15 bp, Homo sapiens
cttgtaaccacctgc

SEQ ID NO: 365652 - DNA, 15 bp, Homo sapiens
acttgtaaccacctg

SEQ ID NO: 365653 - DNA, 15 bp, Homo sapiens
tacttgtaaccacct

SEQ ID NO: 365654 - DNA, 15 bp, Homo sapiens
ttacttgtaaccacc

SEQ ID NO: 365655 - DNA, 15 bp, Homo sapiens
tttacttgtaaccac

SEQ ID NO: 365656 - DNA, 15 bp, Homo sapiens
ctttacttgtaacca

SEQ ID NO: 365657 - DNA, 15 bp, Homo sapiens
tctttacttgtaacc

SEQ ID NO: 365658 - DNA, 15 bp, Homo sapiens
atctttacttgtaac

SEQ ID NO: 365659 - DNA, 15 bp, Homo sapiens
catctttacttgtaa

SEQ ID NO: 365660 - DNA, 15 bp, Homo sapiens
acatctttacttgta

SEQ ID NO: 365661 - DNA, 15 bp, Homo sapiens
gacatctttacttgt

SEQ ID NO: 365662 - DNA, 15 bp, Homo sapiens
agacatctttacttg

SEQ ID NO: 365663 - DNA, 15 bp, Homo sapiens
tagacatctttactt

SEQ ID NO: 365664 - DNA, 15 bp, Homo sapiens
ctagacatctttact

SEQ ID NO: 365665 - DNA, 15 bp, Homo sapiens
cctagacatctttac

SEQ ID NO: 365666 - DNA, 15 bp, Homo sapiens
ccctagacatcttta

SEQ ID NO: 365667 - DNA, 15 bp, Homo sapiens
cccctagacatcttt

SEQ ID NO: 365668 - DNA, 15 bp, Homo sapiens
acccctagacatctt

SEQ ID NO: 365669 - DNA, 15 bp, Homo sapiens
gacccctagacatct

SEQ ID NO: 365670 - DNA, 15 bp, Homo sapiens
agacccctagacatc

SEQ ID NO: 365671 - DNA, 15 bp, Homo sapiens
gagacccctagacat

SEQ ID NO: 365672 - DNA, 15 bp, Homo sapiens
tgagacccctagaca

SEQ ID NO: 365673 - DNA, 15 bp, Homo sapiens
ctgagacccctagac

SEQ ID NO: 365674 - DNA, 15 bp, Homo sapiens
tctgagacccctaga

SEQ ID NO: 365675 - DNA, 15 bp, Homo sapiens
ttctgagacccctag

SEQ ID NO: 365676 - DNA, 15 bp, Homo sapiens
tttctgagaccccta

SEQ ID NO: 365677 - DNA, 15 bp, Homo sapiens
ctttctgagacccct

SEQ ID NO: 365678 - DNA, 15 bp, Homo sapiens
cctttctgagacccc

SEQ ID NO: 365679 - DNA, 15 bp, Homo sapiens
gcctttctgagaccc

SEQ ID NO: 365680 - DNA, 15 bp, Homo sapiens
tgcctttctgagacc

SEQ ID NO: 365681 - DNA, 15 bp, Homo sapiens
ttgcctttctgagac

SEQ ID NO: 365682 - DNA, 15 bp, Homo sapiens
gttgcctttctgaga

SEQ ID NO: 365683 - DNA, 15 bp, Homo sapiens
tgttgcctttctgag

SEQ ID NO: 365684 - DNA, 15 bp, Homo sapiens
gtgttgcctttctga

SEQ ID NO: 365685 - DNA, 15 bp, Homo sapiens
tgtgttgcctttctg

SEQ ID NO: 365686 - DNA, 15 bp, Homo sapiens
ctgtgttgcctttct

SEQ ID NO: 365687 - DNA, 15 bp, Homo sapiens
gctgtgttgcctttc

SEQ ID NO: 365688 - DNA, 15 bp, Homo sapiens
tgctgtgttgccttt

SEQ ID NO: 365689 - DNA, 15 bp, Homo sapiens
ttgctgtgttgcctt

SEQ ID NO: 365690 - DNA, 15 bp, Homo sapiens
tttgctgtgttgcct

SEQ ID NO: 365691 - DNA, 15 bp, Homo sapiens
ttttgctgtgttgcc

SEQ ID NO: 365692 - DNA, 15 bp, Homo sapiens
gttttgctgtgttgc

SEQ ID NO: 365693 - DNA, 15 bp, Homo sapiens
ggttttgctgtgttg

SEQ ID NO: 365694 - DNA, 15 bp, Homo sapiens
aggttttgctgtgtt

SEQ ID NO: 365695 - DNA, 15 bp, Homo sapiens
aaggttttgctgtgt

SEQ ID NO: 365696 - DNA, 15 bp, Homo sapiens
gaaggttttgctgtg

SEQ ID NO: 365697 - DNA, 15 bp, Homo sapiens
tgaaggttttgctgt

SEQ ID NO: 365698 - DNA, 15 bp, Homo sapiens
atgaaggttttgctg

SEQ ID NO: 365699 - DNA, 15 bp, Homo sapiens
tatgaaggttttgct

SEQ ID NO: 365700 - DNA, 15 bp, Homo sapiens
ttatgaaggttttgc

SEQ ID NO: 365701 - DNA, 15 bp, Homo sapiens
tttatgaaggttttg

SEQ ID NO: 365702 - DNA, 15 bp, Homo sapiens
ttttatgaaggtttt

SEQ ID NO: 365703 - DNA, 15 bp, Homo sapiens
tttttatgaaggttt

SEQ ID NO: 365704 - DNA, 15 bp, Homo sapiens
ttttttatgaaggtt

SEQ ID NO: 365705 - DNA, 15 bp, Homo sapiens
attttttatgaaggt

SEQ ID NO: 365706 - DNA, 15 bp, Homo sapiens
cattttttatgaagg

SEQ ID NO: 365707 - DNA, 15 bp, Homo sapiens
tcattttttatgaag

SEQ ID NO: 365708 - DNA, 15 bp, Homo sapiens
gtcattttttatgaa

SEQ ID NO: 365709 - DNA, 15 bp, Homo sapiens
ggtcattttttatga

SEQ ID NO: 365710 - DNA, 15 bp, Homo sapiens
aggtcattttttatg

SEQ ID NO: 365711 - DNA, 15 bp, Homo sapiens
gaggtcattttttat

SEQ ID NO: 365712 - DNA, 15 bp, Homo sapiens
agaggtcatttttta

SEQ ID NO: 365713 - DNA, 15 bp, Homo sapiens
cagaggtcatttttt

SEQ ID NO: 365714 - DNA, 15 bp, Homo sapiens
acagaggtcattttt

SEQ ID NO: 365715 - DNA, 15 bp, Homo sapiens
tacagaggtcatttt

SEQ ID NO: 365716 - DNA, 15 bp, Homo sapiens
ttacagaggtcattt

SEQ ID NO: 365717 - DNA, 15 bp, Homo sapiens
attacagaggtcatt

SEQ ID NO: 365718 - DNA, 15 bp, Homo sapiens
gattacagaggtcat

SEQ ID NO: 365719 - DNA, 15 bp, Homo sapiens
tgattacagaggtca

SEQ ID NO: 365720 - DNA, 15 bp, Homo sapiens
ctgattacagaggtc

SEQ ID NO: 365721 - DNA, 15 bp, Homo sapiens
cctgattacagaggt

SEQ ID NO: 365722 - DNA, 15 bp, Homo sapiens
atcctgattacagag

SEQ ID NO: 365723 - DNA, 15 bp, Homo sapiens
gatcctgattacaga

SEQ ID NO: 365724 - DNA, 15 bp, Homo sapiens
agatcctgattacag

SEQ ID NO: 365725 - DNA, 15 bp, Homo sapiens
cagatcctgattaca

SEQ ID NO: 365726 - DNA, 15 bp, Homo sapiens
ccagatcctgattac

SEQ ID NO: 365727 - DNA, 15 bp, Homo sapiens
gccagatcctgatta

SEQ ID NO: 365728 - DNA, 15 bp, Homo sapiens
tgccagatcctgatt

SEQ ID NO: 365729 - DNA, 15 bp, Homo sapiens
ctgccagatcctgat

SEQ ID NO: 365730 - DNA, 15 bp, Homo sapiens
cctgccagatcctga

SEQ ID NO: 365731 - DNA, 15 bp, Homo sapiens
tcctgccagatcctg

SEQ ID NO: 365732 - DNA, 15 bp, Homo sapiens
atcctgccagatcct

SEQ ID NO: 365733 - DNA, 15 bp, Homo sapiens
tatcctgccagatcc

SEQ ID NO: 365734 - DNA, 15 bp, Homo sapiens
ctatcctgccagatc

SEQ ID NO: 365735 - DNA, 15 bp, Homo sapiens
cctatcctgccagat

SEQ ID NO: 365736 - DNA, 15 bp, Homo sapiens
tcctatcctgccaga

SEQ ID NO: 365737 - DNA, 15 bp, Homo sapiens
atcctatcctgccag

SEQ ID NO: 365738 - DNA, 15 bp, Homo sapiens
catcctatcctgcca

SEQ ID NO: 365739 - DNA, 15 bp, Homo sapiens
gcatcctatcctgcc

SEQ ID NO: 365740 - DNA, 15 bp, Homo sapiens
tgcatcctatcctgc

SEQ ID NO: 365741 - DNA, 15 bp, Homo sapiens
ttgcatcctatcctg

SEQ ID NO: 365742 - DNA, 15 bp, Homo sapiens
tttgcatcctatcct

SEQ ID NO: 365743 - DNA, 15 bp, Homo sapiens
ctttgcatcctatcc

SEQ ID NO: 365744 - DNA, 15 bp, Homo sapiens
gctttgcatcctatc

SEQ ID NO: 365745 - DNA, 15 bp, Homo sapiens
tgctttgcatcctat

SEQ ID NO: 365746 - DNA, 15 bp, Homo sapiens
atgctttgcatccta

SEQ ID NO: 365747 - DNA, 15 bp, Homo sapiens
aatgctttgcatcct

SEQ ID NO: 365748 - DNA, 15 bp, Homo sapiens
aaatgctttgcatcc

SEQ ID NO: 365749 - DNA, 15 bp, Homo sapiens
aaaatgctttgcatc

SEQ ID NO: 365750 - DNA, 15 bp, Homo sapiens
gaaaatgctttgcat

SEQ ID NO: 365751 - DNA, 15 bp, Homo sapiens
ggaaaatgctttgca

SEQ ID NO: 365752 - DNA, 15 bp, Homo sapiens
tggaaaatgctttgc

SEQ ID NO: 365753 - DNA, 15 bp, Homo sapiens
atggaaaatgctttg

SEQ ID NO: 365754 - DNA, 15 bp, Homo sapiens
aatggaaaatgcttt

SEQ ID NO: 365755 - DNA, 15 bp, Homo sapiens
caatggaaaatgctt

SEQ ID NO: 365756 - DNA, 15 bp, Homo sapiens
tcaatggaaaatgct

SEQ ID NO: 365757 - DNA, 15 bp, Homo sapiens
ctcaatggaaaatgc

SEQ ID NO: 365758 - DNA, 15 bp, Homo sapiens
actcaatggaaaatg

SEQ ID NO: 365759 - DNA, 15 bp, Homo sapiens
cactcaatggaaaat

SEQ ID NO: 365760 - DNA, 15 bp, Homo sapiens
tcactcaatggaaaa

SEQ ID NO: 365761 - DNA, 15 bp, Homo sapiens
gtcactcaatggaaa

SEQ ID NO: 365762 - DNA, 15 bp, Homo sapiens
tgtcactcaatggaa

SEQ ID NO: 365763 - DNA, 15 bp, Homo sapiens
gtgtcactcaatgga

SEQ ID NO: 365764 - DNA, 15 bp, Homo sapiens
ggtgtcactcaatgg

SEQ ID NO: 365765 - DNA, 15 bp, Homo sapiens
aggtgtcactcaatg

SEQ ID NO: 365766 - DNA, 15 bp, Homo sapiens
gaggtgtcactcaat

SEQ ID NO: 365767 - DNA, 15 bp, Homo sapiens
ggaggtgtcactcaa

SEQ ID NO: 365768 - DNA, 15 bp, Homo sapiens
cggaggtgtcactca

SEQ ID NO: 365769 - DNA, 15 bp, Homo sapiens
acggaggtgtcactc

SEQ ID NO: 365770 - DNA, 15 bp, Homo sapiens
cacggaggtgtcact

SEQ ID NO: 365771 - DNA, 15 bp, Homo sapiens
acacggaggtgtcac

SEQ ID NO: 365772 - DNA, 15 bp, Homo sapiens
tacacggaggtgtca

SEQ ID NO: 365773 - DNA, 15 bp, Homo sapiens
ctacacggaggtgtc

SEQ ID NO: 365774 - DNA, 15 bp, Homo sapiens
cctacacggaggtgt

SEQ ID NO: 365775 - DNA, 15 bp, Homo sapiens
gcctacacggaggtg

SEQ ID NO: 365776 - DNA, 15 bp, Homo sapiens
agcctacacggaggt

SEQ ID NO: 365777 - DNA, 15 bp, Homo sapiens
tagcctacacggagg

SEQ ID NO: 365778 - DNA, 15 bp, Homo sapiens
ctagcctacacggag

SEQ ID NO: 365779 - DNA, 15 bp, Homo sapiens
gctagcctacacgga

SEQ ID NO: 365780 - DNA, 15 bp, Homo sapiens
ggctagcctacacgg

SEQ ID NO: 365781 - DNA, 15 bp, Homo sapiens
tggctagcctacacg

SEQ ID NO: 365782 - DNA, 15 bp, Homo sapiens
atggctagcctacac

SEQ ID NO: 365783 - DNA, 15 bp, Homo sapiens
catggctagcctaca

SEQ ID NO: 365784 - DNA, 15 bp, Homo sapiens
tcatggctagcctac

SEQ ID NO: 365785 - DNA, 15 bp, Homo sapiens
ttcatggctagccta

SEQ ID NO: 365786 - DNA, 15 bp, Homo sapiens
attcatggctagcct

SEQ ID NO: 365787 - DNA, 15 bp, Homo sapiens
aattcatggctagcc

SEQ ID NO: 365788 - DNA, 15 bp, Homo sapiens
caattcatggctagc

SEQ ID NO: 365789 - DNA, 15 bp, Homo sapiens
ccaattcatggctag

SEQ ID NO: 365790 - DNA, 15 bp, Homo sapiens
tccaattcatggcta

SEQ ID NO: 365791 - DNA, 15 bp, Homo sapiens
ctccaattcatggct

SEQ ID NO: 365792 - DNA, 15 bp, Homo sapiens
cctccaattcatggc

SEQ ID NO: 365793 - DNA, 15 bp, Homo sapiens
tcctccaattcatgg

SEQ ID NO: 365794 - DNA, 15 bp, Homo sapiens
atcctccaattcatg

SEQ ID NO: 365795 - DNA, 15 bp, Homo sapiens
tatcctccaattcat

SEQ ID NO: 365796 - DNA, 15 bp, Homo sapiens
ctatcctccaattca

SEQ ID NO: 365797 - DNA, 15 bp, Homo sapiens
actatcctccaattc

SEQ ID NO: 365798 - DNA, 15 bp, Homo sapiens
aactatcctccaatt

SEQ ID NO: 365799 - DNA, 15 bp, Homo sapiens
caactatcctccaat

SEQ ID NO: 365800 - DNA, 15 bp, Homo sapiens
acaactatcctccaa

SEQ ID NO: 365801 - DNA, 15 bp, Homo sapiens
aacaactatcctcca

SEQ ID NO: 365802 - DNA, 15 bp, Homo sapiens
taacaactatcctcc

SEQ ID NO: 365803 - DNA, 15 bp, Homo sapiens
gtaacaactatcctc

SEQ ID NO: 365804 - DNA, 15 bp, Homo sapiens
tgtaacaactatcct

SEQ ID NO: 365805 - DNA, 15 bp, Homo sapiens
ctgtaacaactatcc

SEQ ID NO: 365806 - DNA, 15 bp, Homo sapiens
tctgtaacaactatc

SEQ ID NO: 365807 - DNA, 15 bp, Homo sapiens
gtctgtaacaactat

SEQ ID NO: 365808 - DNA, 15 bp, Homo sapiens
cgtctgtaacaacta

SEQ ID NO: 365809 - DNA, 15 bp, Homo sapiens
tcgtctgtaacaact

SEQ ID NO: 365810 - DNA, 15 bp, Homo sapiens
ctcgtctgtaacaac

SEQ ID NO: 365811 - DNA, 15 bp, Homo sapiens
gctcgtctgtaacaa

SEQ ID NO: 365812 - DNA, 15 bp, Homo sapiens
agctcgtctgtaaca

SEQ ID NO: 365813 - DNA, 15 bp, Homo sapiens
cagctcgtctgtaac

SEQ ID NO: 365814 - DNA, 15 bp, Homo sapiens
gcagctcgtctgtaa

SEQ ID NO: 365815 - DNA, 15 bp, Homo sapiens
ggcagctcgtctgta

SEQ ID NO: 365816 - DNA, 15 bp, Homo sapiens
tggcagctcgtctgt

SEQ ID NO: 365817 - DNA, 15 bp, Homo sapiens
ctggcagctcgtctg

SEQ ID NO: 365818 - DNA, 15 bp, Homo sapiens
tctggcagctcgtct

SEQ ID NO: 365819 - DNA, 15 bp, Homo sapiens
ctctggcagctcgtc

SEQ ID NO: 365820 - DNA, 15 bp, Homo sapiens
cctctggcagctcgt

SEQ ID NO: 365821 - DNA, 15 bp, Homo sapiens
ccctctggcagctcg

SEQ ID NO: 365822 - DNA, 15 bp, Homo sapiens
accctctggcagctc

SEQ ID NO: 365823 - DNA, 15 bp, Homo sapiens
caccctctggcagct

SEQ ID NO: 365824 - DNA, 15 bp, Homo sapiens
ccaccctctggcagc

SEQ ID NO: 365825 - DNA, 15 bp, Homo sapiens
gccaccctctggcag

SEQ ID NO: 365826 - DNA, 15 bp, Homo sapiens
tgccaccctctggca

SEQ ID NO: 365827 - DNA, 15 bp, Homo sapiens
atgccaccctctggc

SEQ ID NO: 365828 - DNA, 15 bp, Homo sapiens
aatgccaccctctgg

SEQ ID NO: 365829 - DNA, 15 bp, Homo sapiens
caatgccaccctctg

SEQ ID NO: 365830 - DNA, 15 bp, Homo sapiens
ccaatgccaccctct

SEQ ID NO: 365831 - DNA, 15 bp, Homo sapiens
gccaatgccaccctc

SEQ ID NO: 365832 - DNA, 15 bp, Homo sapiens
agccaatgccaccct

SEQ ID NO: 365833 - DNA, 15 bp, Homo sapiens
cagccaatgccaccc

SEQ ID NO: 365834 - DNA, 15 bp, Homo sapiens
gcagccaatgccacc

SEQ ID NO: 365835 - DNA, 15 bp, Homo sapiens
ggcagccaatgccac

SEQ ID NO: 365836 - DNA, 15 bp, Homo sapiens
aggcagccaatgcca

SEQ ID NO: 365837 - DNA, 15 bp, Homo sapiens
caggcagccaatgcc

SEQ ID NO: 365838 - DNA, 15 bp, Homo sapiens
tcaggcagccaatgc

SEQ ID NO: 365839 - DNA, 15 bp, Homo sapiens
atcaggcagccaatg

SEQ ID NO: 365840 - DNA, 15 bp, Homo sapiens
catcaggcagccaat

SEQ ID NO: 365841 - DNA, 15 bp, Homo sapiens
ccatcaggcagccaa

SEQ ID NO: 365842 - DNA, 15 bp, Homo sapiens
cccatcaggcagcca

SEQ ID NO: 365843 - DNA, 15 bp, Homo sapiens
ccccatcaggcagcc

SEQ ID NO: 365844 - DNA, 15 bp, Homo sapiens
tccccatcaggcagc

SEQ ID NO: 365845 - DNA, 15 bp, Homo sapiens
gtccccatcaggcag

SEQ ID NO: 365846 - DNA, 15 bp, Homo sapiens
ggtccccatcaggca

SEQ ID NO: 365847 - DNA, 15 bp, Homo sapiens
tggtccccatcaggc

SEQ ID NO: 365848 - DNA, 15 bp, Homo sapiens
ctggtccccatcagg

SEQ ID NO: 365849 - DNA, 15 bp, Homo sapiens
tctggtccccatcag

SEQ ID NO: 365850 - DNA, 15 bp, Homo sapiens
ttctggtccccatca

SEQ ID NO: 365851 - DNA, 15 bp, Homo sapiens
attctggtccccatc

SEQ ID NO: 365852 - DNA, 15 bp, Homo sapiens
gattctggtccccat

SEQ ID NO: 365853 - DNA, 15 bp, Homo sapiens
ggattctggtcccca

SEQ ID NO: 365854 - DNA, 15 bp, Homo sapiens
gggattctggtcccc

SEQ ID NO: 365855 - DNA, 15 bp, Homo sapiens
tgggattctggtccc

SEQ ID NO: 365856 - DNA, 15 bp, Homo sapiens
atgggattctggtcc

SEQ ID NO: 365857 - DNA, 15 bp, Homo sapiens
gatgggattctggtc

SEQ ID NO: 365858 - DNA, 15 bp, Homo sapiens
tgatgggattctggt

SEQ ID NO: 365859 - DNA, 15 bp, Homo sapiens
ctgatgggattctgg

SEQ ID NO: 365860 - DNA, 15 bp, Homo sapiens
actgatgggattctg

SEQ ID NO: 365861 - DNA, 15 bp, Homo sapiens
gactgatgggattct

SEQ ID NO: 365862 - DNA, 15 bp, Homo sapiens
ggactgatgggattc

SEQ ID NO: 365863 - DNA, 15 bp, Homo sapiens
tggactgatgggatt

SEQ ID NO: 365864 - DNA, 15 bp, Homo sapiens
ctggactgatgggat

SEQ ID NO: 365865 - DNA, 15 bp, Homo sapiens
cctggactgatggga

SEQ ID NO: 365866 - DNA, 15 bp, Homo sapiens
tcctggactgatggg

SEQ ID NO: 365867 - DNA, 15 bp, Homo sapiens
atcctggactgatgg

SEQ ID NO: 365868 - DNA, 15 bp, Homo sapiens
catcctggactgatg

SEQ ID NO: 365869 - DNA, 15 bp, Homo sapiens
ccatcctggactgat

SEQ ID NO: 365870 - DNA, 15 bp, Homo sapiens
tccatcctggactga

SEQ ID NO: 365871 - DNA, 15 bp, Homo sapiens
ttccatcctggactg

SEQ ID NO: 365872 - DNA, 15 bp, Homo sapiens
cttccatcctggact

SEQ ID NO: 365873 - DNA, 15 bp, Homo sapiens
ccttccatcctggac

SEQ ID NO: 365874 - DNA, 15 bp, Homo sapiens
cccttccatcctgga

SEQ ID NO: 365875 - DNA, 15 bp, Homo sapiens
acccttccatcctgg

SEQ ID NO: 365876 - DNA, 15 bp, Homo sapiens
cacccttccatcctg

SEQ ID NO: 365877 - DNA, 15 bp, Homo sapiens
acacccttccatcct

SEQ ID NO: 365878 - DNA, 15 bp, Homo sapiens
tacacccttccatcc

SEQ ID NO: 365879 - DNA, 15 bp, Homo sapiens
ctacacccttccatc

SEQ ID NO: 365880 - DNA, 15 bp, Homo sapiens
cctacacccttccat

SEQ ID NO: 365881 - DNA, 15 bp, Homo sapiens
tcctacacccttcca

SEQ ID NO: 365882 - DNA, 15 bp, Homo sapiens
ctcctacacccttcc

SEQ ID NO: 365883 - DNA, 15 bp, Homo sapiens
gctcctacacccttc

SEQ ID NO: 365884 - DNA, 15 bp, Homo sapiens
tgctcctacaccctt

SEQ ID NO: 365885 - DNA, 15 bp, Homo sapiens
gtgctcctacaccct

SEQ ID NO: 365886 - DNA, 15 bp, Homo sapiens
tgtgctcctacaccc

SEQ ID NO: 365887 - DNA, 15 bp, Homo sapiens
ctgtgctcctacacc

SEQ ID NO: 365888 - DNA, 15 bp, Homo sapiens
gctgtgctcctacac

SEQ ID NO: 365889 - DNA, 15 bp, Homo sapiens
ggctgtgctcctaca

SEQ ID NO: 365890 - DNA, 15 bp, Homo sapiens
gggctgtgctcctac

SEQ ID NO: 365891 - DNA, 15 bp, Homo sapiens
tgggctgtgctccta

SEQ ID NO: 365892 - DNA, 15 bp, Homo sapiens
atgggctgtgctcct

SEQ ID NO: 365893 - DNA, 15 bp, Homo sapiens
catgggctgtgctcc

SEQ ID NO: 365894 - DNA, 15 bp, Homo sapiens
tcatgggctgtgctc

SEQ ID NO: 365895 - DNA, 15 bp, Homo sapiens
ctcatgggctgtgct

SEQ ID NO: 365896 - DNA, 15 bp, Homo sapiens
tctcatgggctgtgc

SEQ ID NO: 365897 - DNA, 15 bp, Homo sapiens
ctctcatgggctgtg

SEQ ID NO: 365898 - DNA, 15 bp, Homo sapiens
gctctcatgggctgt

SEQ ID NO: 365899 - DNA, 15 bp, Homo sapiens
agctctcatgggctg

SEQ ID NO: 365900 - DNA, 15 bp, Homo sapiens
tagctctcatgggct

SEQ ID NO: 365901 - DNA, 15 bp, Homo sapiens
atagctctcatgggc

SEQ ID NO: 365902 - DNA, 15 bp, Homo sapiens
catagctctcatggg

SEQ ID NO: 365903 - DNA, 15 bp, Homo sapiens
ccatagctctcatgg

SEQ ID NO: 365904 - DNA, 15 bp, Homo sapiens
gccatagctctcatg

SEQ ID NO: 365905 - DNA, 15 bp, Homo sapiens
agccatagctctcat

SEQ ID NO: 365906 - DNA, 15 bp, Homo sapiens
tagccatagctctca

SEQ ID NO: 365907 - DNA, 15 bp, Homo sapiens
gtagccatagctctc

SEQ ID NO: 365908 - DNA, 15 bp, Homo sapiens
agtagccatagctct

SEQ ID NO: 365909 - DNA, 15 bp, Homo sapiens
cagtagccatagctc

SEQ ID NO: 365910 - DNA, 15 bp, Homo sapiens
ccagtagccatagct

SEQ ID NO: 365911 - DNA, 15 bp, Homo sapiens
cccagtagccatagc

SEQ ID NO: 365912 - DNA, 15 bp, Homo sapiens
tcccagtagccatag

SEQ ID NO: 365913 - DNA, 15 bp, Homo sapiens
atcccagtagccata

SEQ ID NO: 365914 - DNA, 15 bp, Homo sapiens
tatcccagtagccat

SEQ ID NO: 365915 - DNA, 15 bp, Homo sapiens
atatcccagtagcca

SEQ ID NO: 365916 - DNA, 15 bp, Homo sapiens
catatcccagtagcc

SEQ ID NO: 365917 - DNA, 15 bp, Homo sapiens
tcatatcccagtagc

SEQ ID NO: 365918 - DNA, 15 bp, Homo sapiens
ttcatatcccagtag

SEQ ID NO: 365919 - DNA, 15 bp, Homo sapiens
cttcatatcccagta

SEQ ID NO: 365920 - DNA, 15 bp, Homo sapiens
gcttcatatcccagt

SEQ ID NO: 365921 - DNA, 15 bp, Homo sapiens
tgcttcatatcccag

SEQ ID NO: 365922 - DNA, 15 bp, Homo sapiens
atgcttcatatccca

SEQ ID NO: 365923 - DNA, 15 bp, Homo sapiens
gatgcttcatatccc

SEQ ID NO: 365924 - DNA, 15 bp, Homo sapiens
tgatgcttcatatcc

SEQ ID NO: 365925 - DNA, 15 bp, Homo sapiens
gtgatgcttcatatc

SEQ ID NO: 365926 - DNA, 15 bp, Homo sapiens
ggtgatgcttcatat

SEQ ID NO: 365927 - DNA, 15 bp, Homo sapiens
aggtgatgcttcata

SEQ ID NO: 365928 - DNA, 15 bp, Homo sapiens
aaggtgatgcttcat

SEQ ID NO: 365929 - DNA, 15 bp, Homo sapiens
taaggtgatgcttca

SEQ ID NO: 365930 - DNA, 15 bp, Homo sapiens
ataaggtgatgcttc

SEQ ID NO: 365931 - DNA, 15 bp, Homo sapiens
aataaggtgatgctt

SEQ ID NO: 365932 - DNA, 15 bp, Homo sapiens
caataaggtgatgct

SEQ ID NO: 365933 - DNA, 15 bp, Homo sapiens
tcaataaggtgatgc

SEQ ID NO: 365934 - DNA, 15 bp, Homo sapiens
atcaataaggtgatg

SEQ ID NO: 365935 - DNA, 15 bp, Homo sapiens
tatcaataaggtgat

SEQ ID NO: 365936 - DNA, 15 bp, Homo sapiens
ctatcaataaggtga

SEQ ID NO: 365937 - DNA, 15 bp, Homo sapiens
gctatcaataaggtg

SEQ ID NO: 365938 - DNA, 15 bp, Homo sapiens
agctatcaataaggt

SEQ ID NO: 365939 - DNA, 15 bp, Homo sapiens
aagctatcaataagg

SEQ ID NO: 365940 - DNA, 15 bp, Homo sapiens
caagctatcaataag

SEQ ID NO: 365941 - DNA, 15 bp, Homo sapiens
ccaagctatcaataa

SEQ ID NO: 365942 - DNA, 15 bp, Homo sapiens
gccaagctatcaata

SEQ ID NO: 365943 - DNA, 15 bp, Homo sapiens
tgccaagctatcaat

SEQ ID NO: 365944 - DNA, 15 bp, Homo sapiens
ttgccaagctatcaa

SEQ ID NO: 365945 - DNA, 15 bp, Homo sapiens
cttgccaagctatca

SEQ ID NO: 365946 - DNA, 15 bp, Homo sapiens
acttgccaagctatc

SEQ ID NO: 365947 - DNA, 15 bp, Homo sapiens
cacttgccaagctat

SEQ ID NO: 365948 - DNA, 15 bp, Homo sapiens
acacttgccaagcta

SEQ ID NO: 365949 - DNA, 15 bp, Homo sapiens
gacacttgccaagct

SEQ ID NO: 365950 - DNA, 15 bp, Homo sapiens
agacacttgccaagc

SEQ ID NO: 365951 - DNA, 15 bp, Homo sapiens
cagacacttgccaag

SEQ ID NO: 365952 - DNA, 15 bp, Homo sapiens
tcagacacttgccaa

SEQ ID NO: 365953 - DNA, 15 bp, Homo sapiens
gtcagacacttgcca

SEQ ID NO: 365954 - DNA, 15 bp, Homo sapiens
ggtcagacacttgcc

SEQ ID NO: 365955 - DNA, 15 bp, Homo sapiens
aggtcagacacttgc

SEQ ID NO: 365956 - DNA, 15 bp, Homo sapiens
gaggtcagacacttg

SEQ ID NO: 365957 - DNA, 15 bp, Homo sapiens
ggaggtcagacactt

SEQ ID NO: 365958 - DNA, 15 bp, Homo sapiens
aggaggtcagacact

SEQ ID NO: 365959 - DNA, 15 bp, Homo sapiens
gaggaggtcagacac

SEQ ID NO: 365960 - DNA, 15 bp, Homo sapiens
ggaggaggtcagaca

SEQ ID NO: 365961 - DNA, 15 bp, Homo sapiens
gggaggaggtcagac

SEQ ID NO: 365962 - DNA, 15 bp, Homo sapiens
ggggaggaggtcaga

SEQ ID NO: 365963 - DNA, 15 bp, Homo sapiens
tggggaggaggtcag

SEQ ID NO: 365964 - DNA, 15 bp, Homo sapiens
atggggaggaggtca

SEQ ID NO: 365965 - DNA, 15 bp, Homo sapiens
gatggggaggaggtc

SEQ ID NO: 365966 - DNA, 15 bp, Homo sapiens
tgatggggaggaggt

SEQ ID NO: 365967 - DNA, 15 bp, Homo sapiens
atgatggggaggagg

SEQ ID NO: 365968 - DNA, 15 bp, Homo sapiens
catgatggggaggag

SEQ ID NO: 365969 - DNA, 15 bp, Homo sapiens
gcatgatggggagga

SEQ ID NO: 365970 - DNA, 15 bp, Homo sapiens
ggcatgatggggagg

SEQ ID NO: 365971 - DNA, 15 bp, Homo sapiens
tggcatgatggggag

SEQ ID NO: 365972 - DNA, 15 bp, Homo sapiens
ctggcatgatgggga

SEQ ID NO: 365973 - DNA, 15 bp, Homo sapiens
cctggcatgatgggg

SEQ ID NO: 365974 - DNA, 15 bp, Homo sapiens
gcctggcatgatggg

SEQ ID NO: 365975 - DNA, 15 bp, Homo sapiens
agcctggcatgatgg

SEQ ID NO: 365976 - DNA, 15 bp, Homo sapiens
aagcctggcatgatg

SEQ ID NO: 365977 - DNA, 15 bp, Homo sapiens
aaagcctggcatgat

SEQ ID NO: 365978 - DNA, 15 bp, Homo sapiens
gaaagcctggcatga

SEQ ID NO: 365979 - DNA, 15 bp, Homo sapiens
agaaagcctggcatg

SEQ ID NO: 365980 - DNA, 15 bp, Homo sapiens
tagaaagcctggcat

SEQ ID NO: 365981 - DNA, 15 bp, Homo sapiens
ctagaaagcctggca

SEQ ID NO: 365982 - DNA, 15 bp, Homo sapiens
tctagaaagcctggc

SEQ ID NO: 365983 - DNA, 15 bp, Homo sapiens
ttctagaaagcctgg

SEQ ID NO: 365984 - DNA, 15 bp, Homo sapiens
cttctagaaagcctg

SEQ ID NO: 365985 - DNA, 15 bp, Homo sapiens
gcttctagaaagcct

SEQ ID NO: 365986 - DNA, 15 bp, Homo sapiens
agcttctagaaagcc

SEQ ID NO: 365987 - DNA, 15 bp, Homo sapiens
gagcttctagaaagc

SEQ ID NO: 365988 - DNA, 15 bp, Homo sapiens
tgagcttctagaaag

SEQ ID NO: 365989 - DNA, 15 bp, Homo sapiens
ctgagcttctagaaa

SEQ ID NO: 365990 - DNA, 15 bp, Homo sapiens
gctgagcttctagaa

SEQ ID NO: 365991 - DNA, 15 bp, Homo sapiens
agctgagcttctaga

SEQ ID NO: 365992 - DNA, 15 bp, Homo sapiens
cagctgagcttctag

SEQ ID NO: 365993 - DNA, 15 bp, Homo sapiens
tcagctgagcttcta

SEQ ID NO: 365994 - DNA, 15 bp, Homo sapiens
ttcagctgagcttct

SEQ ID NO: 365995 - DNA, 15 bp, Homo sapiens
attcagctgagcttc

SEQ ID NO: 365996 - DNA, 15 bp, Homo sapiens
gattcagctgagctt

SEQ ID NO: 365997 - DNA, 15 bp, Homo sapiens
tgattcagctgagct

SEQ ID NO: 365998 - DNA, 15 bp, Homo sapiens
atgattcagctgagc

SEQ ID NO: 365999 - DNA, 15 bp, Homo sapiens
catgattcagctgag

SEQ ID NO: 366000 - DNA, 15 bp, Homo sapiens
gcatgattcagctga

SEQ ID NO: 366001 - DNA, 15 bp, Homo sapiens
tgcatgattcagctg

SEQ ID NO: 366002 - DNA, 15 bp, Homo sapiens
atgcatgattcagct

SEQ ID NO: 366003 - DNA, 15 bp, Homo sapiens
gatgcatgattcagc

SEQ ID NO: 366004 - DNA, 15 bp, Homo sapiens
ggatgcatgattcag

SEQ ID NO: 366005 - DNA, 15 bp, Homo sapiens
aggatgcatgattca

SEQ ID NO: 366006 - DNA, 15 bp, Homo sapiens
caggatgcatgattc

SEQ ID NO: 366007 - DNA, 15 bp, Homo sapiens
ccaggatgcatgatt

SEQ ID NO: 366008 - DNA, 15 bp, Homo sapiens
tccaggatgcatgat

SEQ ID NO: 366009 - DNA, 15 bp, Homo sapiens
gtccaggatgcatga

SEQ ID NO: 366010 - DNA, 15 bp, Homo sapiens
ggtccaggatgcatg

SEQ ID NO: 366011 - DNA, 15 bp, Homo sapiens
aggtccaggatgcat

SEQ ID NO: 366012 - DNA, 15 bp, Homo sapiens
caggtccaggatgca

SEQ ID NO: 366013 - DNA, 15 bp, Homo sapiens
acaggtccaggatgc

SEQ ID NO: 366014 - DNA, 15 bp, Homo sapiens
cacaggtccaggatg

SEQ ID NO: 366015 - DNA, 15 bp, Homo sapiens
tcacaggtccaggat

SEQ ID NO: 366016 - DNA, 15 bp, Homo sapiens
ctcacaggtccagga

SEQ ID NO: 366017 - DNA, 15 bp, Homo sapiens
gctcacaggtccagg

SEQ ID NO: 366018 - DNA, 15 bp, Homo sapiens
agctcacaggtccag

SEQ ID NO: 366019 - DNA, 15 bp, Homo sapiens
tagctcacaggtcca

SEQ ID NO: 366020 - DNA, 15 bp, Homo sapiens
gtagctcacaggtcc

SEQ ID NO: 366021 - DNA, 15 bp, Homo sapiens
tgtagctcacaggtc

SEQ ID NO: 366022 - DNA, 15 bp, Homo sapiens
atgtagctcacaggt

SEQ ID NO: 366023 - DNA, 15 bp, Homo sapiens
aatgtagctcacagg

SEQ ID NO: 366024 - DNA, 15 bp, Homo sapiens
taatgtagctcacag

SEQ ID NO: 366025 - DNA, 15 bp, Homo sapiens
ataatgtagctcaca

SEQ ID NO: 366026 - DNA, 15 bp, Homo sapiens
aataatgtagctcac

SEQ ID NO: 366027 - DNA, 15 bp, Homo sapiens
aaataatgtagctca

SEQ ID NO: 366028 - DNA, 15 bp, Homo sapiens
aaaataatgtagctc

SEQ ID NO: 366029 - DNA, 15 bp, Homo sapiens
aaaaataatgtagct

SEQ ID NO: 366030 - DNA, 15 bp, Homo sapiens
aaaaaataatgtagc

SEQ ID NO: 366031 - DNA, 15 bp, Homo sapiens
caaaaaataatgtag

SEQ ID NO: 366032 - DNA, 15 bp, Homo sapiens
acaaaaaataatgta

SEQ ID NO: 366033 - DNA, 15 bp, Homo sapiens
gacaaaaaataatgt

SEQ ID NO: 366034 - DNA, 15 bp, Homo sapiens
tgacaaaaaataatg

SEQ ID NO: 366035 - DNA, 15 bp, Homo sapiens
ttgacaaaaaataat

SEQ ID NO: 366036 - DNA, 15 bp, Homo sapiens
gttgacaaaaaataa

SEQ ID NO: 366037 - DNA, 15 bp, Homo sapiens
agttgacaaaaaata

SEQ ID NO: 366038 - DNA, 15 bp, Homo sapiens
aagttgacaaaaaat

SEQ ID NO: 366039 - DNA, 15 bp, Homo sapiens
caagttgacaaaaaa

SEQ ID NO: 366040 - DNA, 15 bp, Homo sapiens
tcaagttgacaaaaa

SEQ ID NO: 366041 - DNA, 15 bp, Homo sapiens
gtcaagttgacaaaa

SEQ ID NO: 366042 - DNA, 15 bp, Homo sapiens
tgtcaagttgacaaa

SEQ ID NO: 366043 - DNA, 15 bp, Homo sapiens
atgtcaagttgacaa

SEQ ID NO: 366044 - DNA, 15 bp, Homo sapiens
gatgtcaagttgaca

SEQ ID NO: 366045 - DNA, 15 bp, Homo sapiens
tgatgtcaagttgac

SEQ ID NO: 366046 - DNA, 15 bp, Homo sapiens
gtgatgtcaagttga

SEQ ID NO: 366047 - DNA, 15 bp, Homo sapiens
ggtgatgtcaagttg

SEQ ID NO: 366048 - DNA, 15 bp, Homo sapiens
tggtgatgtcaagtt

SEQ ID NO: 366049 - DNA, 15 bp, Homo sapiens
gtggtgatgtcaagt

SEQ ID NO: 366050 - DNA, 15 bp, Homo sapiens
ggtggtgatgtcaag

SEQ ID NO: 366051 - DNA, 15 bp, Homo sapiens
tggtggtgatgtcaa

SEQ ID NO: 366052 - DNA, 15 bp, Homo sapiens
gtggtggtgatgtca

SEQ ID NO: 366053 - DNA, 15 bp, Homo sapiens
agtggtggtgatgtc

SEQ ID NO: 366054 - DNA, 15 bp, Homo sapiens
cagtggtggtgatgt

SEQ ID NO: 366055 - DNA, 15 bp, Homo sapiens
gcagtggtggtgatg

SEQ ID NO: 366056 - DNA, 15 bp, Homo sapiens
ggcagtggtggtgat

SEQ ID NO: 366057 - DNA, 15 bp, Homo sapiens
aggcagtggtggtga

SEQ ID NO: 366058 - DNA, 15 bp, Homo sapiens
aaggcagtggtggtg

SEQ ID NO: 366059 - DNA, 15 bp, Homo sapiens
gaaggcagtggtggt

SEQ ID NO: 366060 - DNA, 15 bp, Homo sapiens
agaaggcagtggtgg

SEQ ID NO: 366061 - DNA, 15 bp, Homo sapiens
tagaaggcagtggtg

SEQ ID NO: 366062 - DNA, 15 bp, Homo sapiens
ttagaaggcagtggt

SEQ ID NO: 366063 - DNA, 15 bp, Homo sapiens
gttagaaggcagtgg

SEQ ID NO: 366064 - DNA, 15 bp, Homo sapiens
tgttagaaggcagtg

SEQ ID NO: 366065 - DNA, 15 bp, Homo sapiens
atgttagaaggcagt

SEQ ID NO: 366066 - DNA, 15 bp, Homo sapiens
aatgttagaaggcag

SEQ ID NO: 366067 - DNA, 15 bp, Homo sapiens
aaatgttagaaggca

SEQ ID NO: 366068 - DNA, 15 bp, Homo sapiens
caaatgttagaaggc

SEQ ID NO: 366069 - DNA, 15 bp, Homo sapiens
gcaaatgttagaagg

SEQ ID NO: 366070 - DNA, 15 bp, Homo sapiens
agcaaatgttagaag

SEQ ID NO: 366071 - DNA, 15 bp, Homo sapiens
aagcaaatgttagaa

SEQ ID NO: 366072 - DNA, 15 bp, Homo sapiens
taagcaaatgttaga

SEQ ID NO: 366073 - DNA, 15 bp, Homo sapiens
ctaagcaaatgttag

SEQ ID NO: 366074 - DNA, 15 bp, Homo sapiens
gctaagcaaatgtta

SEQ ID NO: 366075 - DNA, 15 bp, Homo sapiens
tgctaagcaaatgtt

SEQ ID NO: 366076 - DNA, 15 bp, Homo sapiens
atgctaagcaaatgt

SEQ ID NO: 366077 - DNA, 15 bp, Homo sapiens
aatgctaagcaaatg

SEQ ID NO: 366078 - DNA, 15 bp, Homo sapiens
caatgctaagcaaat

SEQ ID NO: 366079 - DNA, 15 bp, Homo sapiens
gcaatgctaagcaaa

SEQ ID NO: 366080 - DNA, 15 bp, Homo sapiens
tgcaatgctaagcaa

SEQ ID NO: 366081 - DNA, 15 bp, Homo sapiens
ctgcaatgctaagca

SEQ ID NO: 366082 - DNA, 15 bp, Homo sapiens
tctgcaatgctaagc

SEQ ID NO: 366083 - DNA, 15 bp, Homo sapiens
ttctgcaatgctaag

SEQ ID NO: 366084 - DNA, 15 bp, Homo sapiens
tttctgcaatgctaa

SEQ ID NO: 366085 - DNA, 15 bp, Homo sapiens
ttttctgcaatgcta

SEQ ID NO: 366086 - DNA, 15 bp, Homo sapiens
cttttctgcaatgct

SEQ ID NO: 366087 - DNA, 15 bp, Homo sapiens
gcttttctgcaatgc

SEQ ID NO: 366088 - DNA, 15 bp, Homo sapiens
ggcttttctgcaatg

SEQ ID NO: 366089 - DNA, 15 bp, Homo sapiens
tggcttttctgcaat

SEQ ID NO: 366090 - DNA, 15 bp, Homo sapiens
ctggcttttctgcaa

SEQ ID NO: 366091 - DNA, 15 bp, Homo sapiens
cctggcttttctgca

SEQ ID NO: 366092 - DNA, 15 bp, Homo sapiens
tcctggcttttctgc

SEQ ID NO: 366093 - DNA, 15 bp, Homo sapiens
ttcctggcttttctg

SEQ ID NO: 366094 - DNA, 15 bp, Homo sapiens
gttcctggcttttct

SEQ ID NO: 366095 - DNA, 15 bp, Homo sapiens
tgttcctggcttttc

SEQ ID NO: 366096 - DNA, 15 bp, Homo sapiens
ttgttcctggctttt

SEQ ID NO: 366097 - DNA, 15 bp, Homo sapiens
attgttcctggcttt

SEQ ID NO: 366098 - DNA, 15 bp, Homo sapiens
tattgttcctggctt

SEQ ID NO: 366099 - DNA, 15 bp, Homo sapiens
ctattgttcctggct

SEQ ID NO: 366100 - DNA, 15 bp, Homo sapiens
actattgttcctggc

SEQ ID NO: 366101 - DNA, 15 bp, Homo sapiens
aactattgttcctgg

SEQ ID NO: 366102 - DNA, 15 bp, Homo sapiens
gaactattgttcctg

SEQ ID NO: 366103 - DNA, 15 bp, Homo sapiens
ggaactattgttcct

SEQ ID NO: 366104 - DNA, 15 bp, Homo sapiens
aggaactattgttcc

SEQ ID NO: 366105 - DNA, 15 bp, Homo sapiens
caggaactattgttc

SEQ ID NO: 366106 - DNA, 15 bp, Homo sapiens
ccaggaactattgtt

SEQ ID NO: 366107 - DNA, 15 bp, Homo sapiens
tccaggaactattgt

SEQ ID NO: 366108 - DNA, 15 bp, Homo sapiens
ttccaggaactattg

SEQ ID NO: 366109 - DNA, 15 bp, Homo sapiens
attccaggaactatt

SEQ ID NO: 366110 - DNA, 15 bp, Homo sapiens
gattccaggaactat

SEQ ID NO: 366111 - DNA, 15 bp, Homo sapiens
ggattccaggaacta

SEQ ID NO: 366112 - DNA, 15 bp, Homo sapiens
aggattccaggaact

SEQ ID NO: 366113 - DNA, 15 bp, Homo sapiens
gaggattccaggaac

SEQ ID NO: 366114 - DNA, 15 bp, Homo sapiens
agaggattccaggaa

SEQ ID NO: 366115 - DNA, 15 bp, Homo sapiens
aagaggattccagga

SEQ ID NO: 366116 - DNA, 15 bp, Homo sapiens
gaagaggattccagg

SEQ ID NO: 366117 - DNA, 15 bp, Homo sapiens
ggaagaggattccag

SEQ ID NO: 366118 - DNA, 15 bp, Homo sapiens
gggaagaggattcca

SEQ ID NO: 366119 - DNA, 15 bp, Homo sapiens
agggaagaggattcc

SEQ ID NO: 366120 - DNA, 15 bp, Homo sapiens
cagggaagaggattc

SEQ ID NO: 366121 - DNA, 15 bp, Homo sapiens
gcagggaagaggatt

SEQ ID NO: 366122 - DNA, 15 bp, Homo sapiens
tgcagggaagaggat

SEQ ID NO: 366123 - DNA, 15 bp, Homo sapiens
atgcagggaagagga

SEQ ID NO: 366124 - DNA, 15 bp, Homo sapiens
catgcagggaagagg

SEQ ID NO: 366125 - DNA, 15 bp, Homo sapiens
ccatgcagggaagag

SEQ ID NO: 366126 - DNA, 15 bp, Homo sapiens
gccatgcagggaaga

SEQ ID NO: 366127 - DNA, 15 bp, Homo sapiens
agccatgcagggaag

SEQ ID NO: 366128 - DNA, 15 bp, Homo sapiens
gagccatgcagggaa

SEQ ID NO: 366129 - DNA, 15 bp, Homo sapiens
agagccatgcaggga

SEQ ID NO: 366130 - DNA, 15 bp, Homo sapiens
cagagccatgcaggg

SEQ ID NO: 366131 - DNA, 15 bp, Homo sapiens
ccagagccatgcagg

SEQ ID NO: 366132 - DNA, 15 bp, Homo sapiens
cccagagccatgcag

SEQ ID NO: 366133 - DNA, 15 bp, Homo sapiens
gcccagagccatgca

SEQ ID NO: 366134 - DNA, 15 bp, Homo sapiens
agcccagagccatgc

SEQ ID NO: 366135 - DNA, 15 bp, Homo sapiens
tagcccagagccatg

SEQ ID NO: 366136 - DNA, 15 bp, Homo sapiens
ctagcccagagccat

SEQ ID NO: 366137 - DNA, 15 bp, Homo sapiens
tctagcccagagcca

SEQ ID NO: 366138 - DNA, 15 bp, Homo sapiens
ctctagcccagagcc

SEQ ID NO: 366139 - DNA, 15 bp, Homo sapiens
actctagcccagagc

SEQ ID NO: 366140 - DNA, 15 bp, Homo sapiens
gactctagcccagag

SEQ ID NO: 366141 - DNA, 15 bp, Homo sapiens
tgactctagcccaga

SEQ ID NO: 366142 - DNA, 15 bp, Homo sapiens
ctgactctagcccag

SEQ ID NO: 366143 - DNA, 15 bp, Homo sapiens
gctgactctagccca

SEQ ID NO: 366144 - DNA, 15 bp, Homo sapiens
agctgactctagccc

SEQ ID NO: 366145 - DNA, 15 bp, Homo sapiens
cagctgactctagcc

SEQ ID NO: 366146 - DNA, 15 bp, Homo sapiens
ccagctgactctagc

SEQ ID NO: 366147 - DNA, 15 bp, Homo sapiens
accagctgactctag

SEQ ID NO: 366148 - DNA, 15 bp, Homo sapiens
caccagctgactcta

SEQ ID NO: 366149 - DNA, 15 bp, Homo sapiens
ccaccagctgactct

SEQ ID NO: 366150 - DNA, 15 bp, Homo sapiens
cccaccagctgactc

SEQ ID NO: 366151 - DNA, 15 bp, Homo sapiens
tcccaccagctgact

SEQ ID NO: 366152 - DNA, 15 bp, Homo sapiens
ctcccaccagctgac

SEQ ID NO: 366153 - DNA, 15 bp, Homo sapiens
tctcccaccagctga

SEQ ID NO: 366154 - DNA, 15 bp, Homo sapiens
atctcccaccagctg

SEQ ID NO: 366155 - DNA, 15 bp, Homo sapiens
catctcccaccagct

SEQ ID NO: 366156 - DNA, 15 bp, Homo sapiens
ccatctcccaccagc

SEQ ID NO: 366157 - DNA, 15 bp, Homo sapiens
gcccatctcccacca

SEQ ID NO: 366158 - DNA, 15 bp, Homo sapiens
tgcccatctcccacc

SEQ ID NO: 366159 - DNA, 15 bp, Homo sapiens
gtgcccatctcccac

SEQ ID NO: 366160 - DNA, 15 bp, Homo sapiens
agtgcccatctccca

SEQ ID NO: 366161 - DNA, 15 bp, Homo sapiens
cagtgcccatctccc

SEQ ID NO: 366162 - DNA, 15 bp, Homo sapiens
ccagtgcccatctcc

SEQ ID NO: 366163 - DNA, 15 bp, Homo sapiens
cccagtgcccatctc

SEQ ID NO: 366164 - DNA, 15 bp, Homo sapiens
ccccagtgcccatct

SEQ ID NO: 366165 - DNA, 15 bp, Homo sapiens
accccagtgcccatc

SEQ ID NO: 366166 - DNA, 15 bp, Homo sapiens
caccccagtgcccat

SEQ ID NO: 366167 - DNA, 15 bp, Homo sapiens
tcaccccagtgccca

SEQ ID NO: 366168 - DNA, 15 bp, Homo sapiens
ctcaccccagtgccc

SEQ ID NO: 366169 - DNA, 15 bp, Homo sapiens
tctcaccccagtgcc

SEQ ID NO: 366170 - DNA, 15 bp, Homo sapiens
atctcaccccagtgc

SEQ ID NO: 366171 - DNA, 15 bp, Homo sapiens
aatctcaccccagtg

SEQ ID NO: 366172 - DNA, 15 bp, Homo sapiens
aaatctcaccccagt

SEQ ID NO: 366173 - DNA, 15 bp, Homo sapiens
caaatctcaccccag

SEQ ID NO: 366174 - DNA, 15 bp, Homo sapiens
ccaaatctcacccca

SEQ ID NO: 366175 - DNA, 15 bp, Homo sapiens
tccaaatctcacccc

SEQ ID NO: 366176 - DNA, 15 bp, Homo sapiens
ttccaaatctcaccc

SEQ ID NO: 366177 - DNA, 15 bp, Homo sapiens
tttccaaatctcacc

SEQ ID NO: 366178 - DNA, 15 bp, Homo sapiens
ctttccaaatctcac

SEQ ID NO: 366179 - DNA, 15 bp, Homo sapiens
actttccaaatctca

SEQ ID NO: 366180 - DNA, 15 bp, Homo sapiens
cactttccaaatctc

SEQ ID NO: 366181 - DNA, 15 bp, Homo sapiens
ccactttccaaatct

SEQ ID NO: 366182 - DNA, 15 bp, Homo sapiens
tccactttccaaatc

SEQ ID NO: 366183 - DNA, 15 bp, Homo sapiens
ctccactttccaaat

SEQ ID NO: 366184 - DNA, 15 bp, Homo sapiens
cctccactttccaaa

SEQ ID NO: 366185 - DNA, 15 bp, Homo sapiens
tcctccactttccaa

SEQ ID NO: 366186 - DNA, 15 bp, Homo sapiens
ctcctccactttcca

SEQ ID NO: 366187 - DNA, 15 bp, Homo sapiens
tctcctccactttcc

SEQ ID NO: 366188 - DNA, 15 bp, Homo sapiens
ttctcctccactttc

SEQ ID NO: 366189 - DNA, 15 bp, Homo sapiens
tttctcctccacttt

SEQ ID NO: 366190 - DNA, 15 bp, Homo sapiens
ctttctcctccactt

SEQ ID NO: 366191 - DNA, 15 bp, Homo sapiens
tctttctcctccact

SEQ ID NO: 366192 - DNA, 15 bp, Homo sapiens
atctttctcctccac

SEQ ID NO: 366193 - DNA, 15 bp, Homo sapiens
tatctttctcctcca

SEQ ID NO: 366194 - DNA, 15 bp, Homo sapiens
ctatctttctcctcc

SEQ ID NO: 366195 - DNA, 15 bp, Homo sapiens
cctatctttctcctc

SEQ ID NO: 366196 - DNA, 15 bp, Homo sapiens
gcctatctttctcct

SEQ ID NO: 366197 - DNA, 15 bp, Homo sapiens
agcctatctttctcc

SEQ ID NO: 366198 - DNA, 15 bp, Homo sapiens
aagcctatctttctc

SEQ ID NO: 366199 - DNA, 15 bp, Homo sapiens
aaagcctatctttct

SEQ ID NO: 366200 - DNA, 15 bp, Homo sapiens
caaagcctatctttc

SEQ ID NO: 366201 - DNA, 15 bp, Homo sapiens
tcaaagcctatcttt

SEQ ID NO: 366202 - DNA, 15 bp, Homo sapiens
atcaaagcctatctt

SEQ ID NO: 366203 - DNA, 15 bp, Homo sapiens
aatcaaagcctatct

SEQ ID NO: 366204 - DNA, 15 bp, Homo sapiens
gaatcaaagcctatc

SEQ ID NO: 366205 - DNA, 15 bp, Homo sapiens
agaatcaaagcctat

SEQ ID NO: 366206 - DNA, 15 bp, Homo sapiens
aagaatcaaagccta

SEQ ID NO: 366207 - DNA, 15 bp, Homo sapiens
aaagaatcaaagcct

SEQ ID NO: 366208 - DNA, 15 bp, Homo sapiens
caaagaatcaaagcc

SEQ ID NO: 366209 - DNA, 15 bp, Homo sapiens
ccaaagaatcaaagc

SEQ ID NO: 366210 - DNA, 15 bp, Homo sapiens
tccaaagaatcaaag

SEQ ID NO: 366211 - DNA, 15 bp, Homo sapiens
ctccaaagaatcaaa

SEQ ID NO: 366212 - DNA, 15 bp, Homo sapiens
cctccaaagaatcaa

SEQ ID NO: 366213 - DNA, 15 bp, Homo sapiens
gcctccaaagaatca

SEQ ID NO: 366214 - DNA, 15 bp, Homo sapiens
tgcctccaaagaatc

SEQ ID NO: 366215 - DNA, 15 bp, Homo sapiens
ttgcctccaaagaat

SEQ ID NO: 366216 - DNA, 15 bp, Homo sapiens
gttgcctccaaagaa

SEQ ID NO: 366217 - DNA, 15 bp, Homo sapiens
agttgcctccaaaga

SEQ ID NO: 366218 - DNA, 15 bp, Homo sapiens
cagttgcctccaaag

SEQ ID NO: 366219 - DNA, 15 bp, Homo sapiens
gcagttgcctccaaa

SEQ ID NO: 366220 - DNA, 15 bp, Homo sapiens
tgcagttgcctccaa

SEQ ID NO: 366221 - DNA, 15 bp, Homo sapiens
ctgcagttgcctcca

SEQ ID NO: 366222 - DNA, 15 bp, Homo sapiens
gctgcagttgcctcc

SEQ ID NO: 366223 - DNA, 15 bp, Homo sapiens
ggctgcagttgcctc

SEQ ID NO: 366224 - DNA, 15 bp, Homo sapiens
tggctgcagttgcct

SEQ ID NO: 366225 - DNA, 15 bp, Homo sapiens
ctggctgcagttgcc

SEQ ID NO: 366226 - DNA, 15 bp, Homo sapiens
tctggctgcagttgc

SEQ ID NO: 366227 - DNA, 15 bp, Homo sapiens
gtctggctgcagttg

SEQ ID NO: 366228 - DNA, 15 bp, Homo sapiens
ggtctggctgcagtt

SEQ ID NO: 366229 - DNA, 15 bp, Homo sapiens
gggtctggctgcagt

SEQ ID NO: 366230 - DNA, 15 bp, Homo sapiens
agggtctggctgcag

SEQ ID NO: 366231 - DNA, 15 bp, Homo sapiens
cagggtctggctgca

SEQ ID NO: 366232 - DNA, 15 bp, Homo sapiens
ccagggtctggctgc

SEQ ID NO: 366233 - DNA, 15 bp, Homo sapiens
gccagggtctggctg

SEQ ID NO: 366234 - DNA, 15 bp, Homo sapiens
tgccagggtctggct

SEQ ID NO: 366235 - DNA, 15 bp, Homo sapiens
ctgccagggtctggc

SEQ ID NO: 366236 - DNA, 15 bp, Homo sapiens
tctgccagggtctgg

SEQ ID NO: 366237 - DNA, 15 bp, Homo sapiens
gtctgccagggtctg

SEQ ID NO: 366238 - DNA, 15 bp, Homo sapiens
ggtctgccagggtct

SEQ ID NO: 366239 - DNA, 15 bp, Homo sapiens
gggtctgccagggtc

SEQ ID NO: 366240 - DNA, 15 bp, Homo sapiens
tgggtctgccagggt

SEQ ID NO: 366241 - DNA, 15 bp, Homo sapiens
ctgggtctgccaggg

SEQ ID NO: 366242 - DNA, 15 bp, Homo sapiens
cctgggtctgccagg

SEQ ID NO: 366243 - DNA, 15 bp, Homo sapiens
acctgggtctgccag

SEQ ID NO: 366244 - DNA, 15 bp, Homo sapiens
aacctgggtctgcca

SEQ ID NO: 366245 - DNA, 15 bp, Homo sapiens
gaacctgggtctgcc

SEQ ID NO: 366246 - DNA, 15 bp, Homo sapiens
tgaacctgggtctgc

SEQ ID NO: 366247 - DNA, 15 bp, Homo sapiens
ttgaacctgggtctg

SEQ ID NO: 366248 - DNA, 15 bp, Homo sapiens
tttgaacctgggtct

SEQ ID NO: 366249 - DNA, 15 bp, Homo sapiens
atttgaacctgggtc

SEQ ID NO: 366250 - DNA, 15 bp, Homo sapiens
gatttgaacctgggt

SEQ ID NO: 366251 - DNA, 15 bp, Homo sapiens
agatttgaacctggg

SEQ ID NO: 366252 - DNA, 15 bp, Homo sapiens
aagatttgaacctgg

SEQ ID NO: 366253 - DNA, 15 bp, Homo sapiens
gaagatttgaacctg

SEQ ID NO: 366254 - DNA, 15 bp, Homo sapiens
agaagatttgaacct

SEQ ID NO: 366255 - DNA, 15 bp, Homo sapiens
tagaagatttgaacc

SEQ ID NO: 366256 - DNA, 15 bp, Homo sapiens
atagaagatttgaac

SEQ ID NO: 366257 - DNA, 15 bp, Homo sapiens
gatagaagatttgaa

SEQ ID NO: 366258 - DNA, 15 bp, Homo sapiens
tgatagaagatttga

SEQ ID NO: 366259 - DNA, 15 bp, Homo sapiens
ctgatagaagatttg

SEQ ID NO: 366260 - DNA, 15 bp, Homo sapiens
tctgatagaagattt

SEQ ID NO: 366261 - DNA, 15 bp, Homo sapiens
atctgatagaagatt

SEQ ID NO: 366262 - DNA, 15 bp, Homo sapiens
catctgatagaagat

SEQ ID NO: 366263 - DNA, 15 bp, Homo sapiens
tcatctgatagaaga

SEQ ID NO: 366264 - DNA, 15 bp, Homo sapiens
ctcatctgatagaag

SEQ ID NO: 366265 - DNA, 15 bp, Homo sapiens
gctcatctgatagaa

SEQ ID NO: 366266 - DNA, 15 bp, Homo sapiens
agctcatctgataga

SEQ ID NO: 366267 - DNA, 15 bp, Homo sapiens
aagctcatctgatag

SEQ ID NO: 366268 - DNA, 15 bp, Homo sapiens
aaagctcatctgata

SEQ ID NO: 366269 - DNA, 15 bp, Homo sapiens
gaaagctcatctgat

SEQ ID NO: 366270 - DNA, 15 bp, Homo sapiens
agaaagctcatctga

SEQ ID NO: 366271 - DNA, 15 bp, Homo sapiens
cagaaagctcatctg

SEQ ID NO: 366272 - DNA, 15 bp, Homo sapiens
ccagaaagctcatct

SEQ ID NO: 366273 - DNA, 15 bp, Homo sapiens
cccagaaagctcatc

SEQ ID NO: 366274 - DNA, 15 bp, Homo sapiens
tcccagaaagctcat

SEQ ID NO: 366275 - DNA, 15 bp, Homo sapiens
ctcccagaaagctca

SEQ ID NO: 366276 - DNA, 15 bp, Homo sapiens
gctcccagaaagctc

SEQ ID NO: 366277 - DNA, 15 bp, Homo sapiens
ggctcccagaaagct

SEQ ID NO: 366278 - DNA, 15 bp, Homo sapiens
tggctcccagaaagc

SEQ ID NO: 366279 - DNA, 15 bp, Homo sapiens
ctggctcccagaaag

SEQ ID NO: 366280 - DNA, 15 bp, Homo sapiens
actggctcccagaaa

SEQ ID NO: 366281 - DNA, 15 bp, Homo sapiens
cactggctcccagaa

SEQ ID NO: 366282 - DNA, 15 bp, Homo sapiens
acactggctcccaga

SEQ ID NO: 366283 - DNA, 15 bp, Homo sapiens
gacactggctcccag

SEQ ID NO: 366284 - DNA, 15 bp, Homo sapiens
agacactggctccca

SEQ ID NO: 366285 - DNA, 15 bp, Homo sapiens
aagacactggctccc

SEQ ID NO: 366286 - DNA, 15 bp, Homo sapiens
gaagacactggctcc

SEQ ID NO: 366287 - DNA, 15 bp, Homo sapiens
tgaagacactggctc

SEQ ID NO: 366288 - DNA, 15 bp, Homo sapiens
gtgaagacactggct

SEQ ID NO: 366289 - DNA, 15 bp, Homo sapiens
agtgaagacactggc

SEQ ID NO: 366290 - DNA, 15 bp, Homo sapiens
cagtgaagacactgg

SEQ ID NO: 366291 - DNA, 15 bp, Homo sapiens
gcagtgaagacactg

SEQ ID NO: 366292 - DNA, 15 bp, Homo sapiens
agcagtgaagacact

SEQ ID NO: 366293 - DNA, 15 bp, Homo sapiens
tagcagtgaagacac

SEQ ID NO: 366294 - DNA, 15 bp, Homo sapiens
gtagcagtgaagaca

SEQ ID NO: 366295 - DNA, 15 bp, Homo sapiens
tgtagcagtgaagac

SEQ ID NO: 366296 - DNA, 15 bp, Homo sapiens
ctgtagcagtgaaga

SEQ ID NO: 366297 - DNA, 15 bp, Homo sapiens
tctgtagcagtgaag

SEQ ID NO: 366298 - DNA, 15 bp, Homo sapiens
gtctgtagcagtgaa

SEQ ID NO: 366299 - DNA, 15 bp, Homo sapiens
agtctgtagcagtga

SEQ ID NO: 366300 - DNA, 15 bp, Homo sapiens
cagtctgtagcagtg

SEQ ID NO: 366301 - DNA, 15 bp, Homo sapiens
tcagtctgtagcagt

SEQ ID NO: 366302 - DNA, 15 bp, Homo sapiens
ctcagtctgtagcag

SEQ ID NO: 366303 - DNA, 15 bp, Homo sapiens
tctcagtctgtagca

SEQ ID NO: 366304 - DNA, 15 bp, Homo sapiens
ctctcagtctgtagc

SEQ ID NO: 366305 - DNA, 15 bp, Homo sapiens
tctctcagtctgtag

SEQ ID NO: 366306 - DNA, 15 bp, Homo sapiens
ctctctcagtctgta

SEQ ID NO: 366307 - DNA, 15 bp, Homo sapiens
cctctctcagtctgt

SEQ ID NO: 366308 - DNA, 15 bp, Homo sapiens
ccctctctcagtctg

SEQ ID NO: 366309 - DNA, 15 bp, Homo sapiens
cccctctctcagtct

SEQ ID NO: 366310 - DNA, 15 bp, Homo sapiens
gcccctctctcagtc

SEQ ID NO: 366311 - DNA, 15 bp, Homo sapiens
agcccctctctcagt

SEQ ID NO: 366312 - DNA, 15 bp, Homo sapiens
cagcccctctctcag

SEQ ID NO: 366313 - DNA, 15 bp, Homo sapiens
ccagcccctctctca

SEQ ID NO: 366314 - DNA, 15 bp, Homo sapiens
cccagcccctctctc

SEQ ID NO: 366315 - DNA, 15 bp, Homo sapiens
ccccagcccctctct

SEQ ID NO: 366316 - DNA, 15 bp, Homo sapiens
gccccagcccctctc

SEQ ID NO: 366317 - DNA, 15 bp, Homo sapiens
agccccagcccctct

SEQ ID NO: 366318 - DNA, 15 bp, Homo sapiens
aagccccagcccctc

SEQ ID NO: 366319 - DNA, 15 bp, Homo sapiens
gaagccccagcccct

SEQ ID NO: 366320 - DNA, 15 bp, Homo sapiens
agaagccccagcccc

SEQ ID NO: 366321 - DNA, 15 bp, Homo sapiens
gagaagccccagccc

SEQ ID NO: 366322 - DNA, 15 bp, Homo sapiens
agagaagccccagcc

SEQ ID NO: 366323 - DNA, 15 bp, Homo sapiens
cagagaagccccagc

SEQ ID NO: 366324 - DNA, 15 bp, Homo sapiens
tcagagaagccccag

SEQ ID NO: 366325 - DNA, 15 bp, Homo sapiens
ctcagagaagcccca

SEQ ID NO: 366326 - DNA, 15 bp, Homo sapiens
cctcagagaagcccc

SEQ ID NO: 366327 - DNA, 15 bp, Homo sapiens
tcctcagagaagccc

SEQ ID NO: 366328 - DNA, 15 bp, Homo sapiens
atcctcagagaagcc

SEQ ID NO: 366329 - DNA, 15 bp, Homo sapiens
gatcctcagagaagc

SEQ ID NO: 366330 - DNA, 15 bp, Homo sapiens
agatcctcagagaag

SEQ ID NO: 366331 - DNA, 15 bp, Homo sapiens
aagatcctcagagaa

SEQ ID NO: 366332 - DNA, 15 bp, Homo sapiens
caagatcctcagaga

SEQ ID NO: 366333 - DNA, 15 bp, Homo sapiens
tcaagatcctcagag

SEQ ID NO: 366334 - DNA, 15 bp, Homo sapiens
ctcaagatcctcaga

SEQ ID NO: 366335 - DNA, 15 bp, Homo sapiens
tctcaagatcctcag

SEQ ID NO: 366336 - DNA, 15 bp, Homo sapiens
atctcaagatcctca

SEQ ID NO: 366337 - DNA, 15 bp, Homo sapiens
aatctcaagatcctc

SEQ ID NO: 366338 - DNA, 15 bp, Homo sapiens
gaatctcaagatcct

SEQ ID NO: 366339 - DNA, 15 bp, Homo sapiens
tgaatctcaagatcc

SEQ ID NO: 366340 - DNA, 15 bp, Homo sapiens
gtgaatctcaagatc

SEQ ID NO: 366341 - DNA, 15 bp, Homo sapiens
tgtgaatctcaagat

SEQ ID NO: 366342 - DNA, 15 bp, Homo sapiens
ctgtgaatctcaaga

SEQ ID NO: 366343 - DNA, 15 bp, Homo sapiens
gctgtgaatctcaag

SEQ ID NO: 366344 - DNA, 15 bp, Homo sapiens
tgctgtgaatctcaa

SEQ ID NO: 366345 - DNA, 15 bp, Homo sapiens
ctgctgtgaatctca

SEQ ID NO: 366346 - DNA, 15 bp, Homo sapiens
gctgctgtgaatctc

SEQ ID NO: 366347 - DNA, 15 bp, Homo sapiens
agctgctgtgaatct

SEQ ID NO: 366348 - DNA, 15 bp, Homo sapiens
aagctgctgtgaatc

SEQ ID NO: 366349 - DNA, 15 bp, Homo sapiens
gaagctgctgtgaat

SEQ ID NO: 366350 - DNA, 15 bp, Homo sapiens
agaagctgctgtgaa

SEQ ID NO: 366351 - DNA, 15 bp, Homo sapiens
cagaagctgctgtga

SEQ ID NO: 366352 - DNA, 15 bp, Homo sapiens
ccagaagctgctgtg

SEQ ID NO: 366353 - DNA, 15 bp, Homo sapiens
accagaagctgctgt

SEQ ID NO: 366354 - DNA, 15 bp, Homo sapiens
tgaccagaagctgct

SEQ ID NO: 366355 - DNA, 15 bp, Homo sapiens
ttgaccagaagctgc

SEQ ID NO: 366356 - DNA, 15 bp, Homo sapiens
cttgaccagaagctg

SEQ ID NO: 366357 - DNA, 15 bp, Homo sapiens
gcttgaccagaagct

SEQ ID NO: 366358 - DNA, 15 bp, Homo sapiens
agcttgaccagaagc

SEQ ID NO: 366359 - DNA, 15 bp, Homo sapiens
aagcttgaccagaag

SEQ ID NO: 366360 - DNA, 15 bp, Homo sapiens
taagcttgaccagaa

SEQ ID NO: 366361 - DNA, 15 bp, Homo sapiens
ttaagcttgaccaga

SEQ ID NO: 366362 - DNA, 15 bp, Homo sapiens
cttaagcttgaccag

SEQ ID NO: 366363 - DNA, 15 bp, Homo sapiens
tcttaagcttgacca

SEQ ID NO: 366364 - DNA, 15 bp, Homo sapiens
ctcttaagcttgacc

SEQ ID NO: 366365 - DNA, 15 bp, Homo sapiens
tctcttaagcttgac

SEQ ID NO: 366366 - DNA, 15 bp, Homo sapiens
ttctcttaagcttga

SEQ ID NO: 366367 - DNA, 15 bp, Homo sapiens
gttctcttaagcttg

SEQ ID NO: 366368 - DNA, 15 bp, Homo sapiens
ggttctcttaagctt

SEQ ID NO: 366369 - DNA, 15 bp, Homo sapiens
aggttctcttaagct

SEQ ID NO: 366370 - DNA, 15 bp, Homo sapiens
aaggttctcttaagc

SEQ ID NO: 366371 - DNA, 15 bp, Homo sapiens
gaaggttctcttaag

SEQ ID NO: 366372 - DNA, 15 bp, Homo sapiens
ggaaggttctcttaa

SEQ ID NO: 366373 - DNA, 15 bp, Homo sapiens
gggaaggttctctta

SEQ ID NO: 366374 - DNA, 15 bp, Homo sapiens
ggggaaggttctctt

SEQ ID NO: 366375 - DNA, 15 bp, Homo sapiens
aggggaaggttctct

SEQ ID NO: 366376 - DNA, 15 bp, Homo sapiens
aaggggaaggttctc

SEQ ID NO: 366377 - DNA, 15 bp, Homo sapiens
aaaggggaaggttct

SEQ ID NO: 366378 - DNA, 15 bp, Homo sapiens
caaaggggaaggttc

SEQ ID NO: 366379 - DNA, 15 bp, Homo sapiens
ccaaaggggaaggtt

SEQ ID NO: 366380 - DNA, 15 bp, Homo sapiens
accaaaggggaaggt

SEQ ID NO: 366381 - DNA, 15 bp, Homo sapiens
caccaaaggggaagg

SEQ ID NO: 366382 - DNA, 15 bp, Homo sapiens
ccaccaaaggggaag

SEQ ID NO: 366383 - DNA, 15 bp, Homo sapiens
accaccaaaggggaa

SEQ ID NO: 366384 - DNA, 15 bp, Homo sapiens
caccaccaaagggga

SEQ ID NO: 366385 - DNA, 15 bp, Homo sapiens
gcaccaccaaagggg

SEQ ID NO: 366386 - DNA, 15 bp, Homo sapiens
tgcaccaccaaaggg

SEQ ID NO: 366387 - DNA, 15 bp, Homo sapiens
atgcaccaccaaagg

SEQ ID NO: 366388 - DNA, 15 bp, Homo sapiens
catgcaccaccaaag

SEQ ID NO: 366389 - DNA, 15 bp, Homo sapiens
acatgcaccaccaaa

SEQ ID NO: 366390 - DNA, 15 bp, Homo sapiens
cacatgcaccaccaa

SEQ ID NO: 366391 - DNA, 15 bp, Homo sapiens
tcacatgcaccacca

SEQ ID NO: 366392 - DNA, 15 bp, Homo sapiens
ttcacatgcaccacc

SEQ ID NO: 366393 - DNA, 15 bp, Homo sapiens
tttcacatgcaccac

SEQ ID NO: 366394 - DNA, 15 bp, Homo sapiens
atttcacatgcacca

SEQ ID NO: 366395 - DNA, 15 bp, Homo sapiens
catttcacatgcacc

SEQ ID NO: 366396 - DNA, 15 bp, Homo sapiens
ccatttcacatgcac

SEQ ID NO: 366397 - DNA, 15 bp, Homo sapiens
gccatttcacatgca

SEQ ID NO: 366398 - DNA, 15 bp, Homo sapiens
agccatttcacatgc

SEQ ID NO: 366399 - DNA, 15 bp, Homo sapiens
aagccatttcacatg

SEQ ID NO: 366400 - DNA, 15 bp, Homo sapiens
gaagccatttcacat

SEQ ID NO: 366401 - DNA, 15 bp, Homo sapiens
agaagccatttcaca

SEQ ID NO: 366402 - DNA, 15 bp, Homo sapiens
cagaagccatttcac

SEQ ID NO: 366403 - DNA, 15 bp, Homo sapiens
acagaagccatttca

SEQ ID NO: 366404 - DNA, 15 bp, Homo sapiens
gacagaagccatttc

SEQ ID NO: 366405 - DNA, 15 bp, Homo sapiens
ggacagaagccattt

SEQ ID NO: 366406 - DNA, 15 bp, Homo sapiens
aggacagaagccatt

SEQ ID NO: 366407 - DNA, 15 bp, Homo sapiens
aaggacagaagccat

SEQ ID NO: 366408 - DNA, 15 bp, Homo sapiens
gaaggacagaagcca

SEQ ID NO: 366409 - DNA, 15 bp, Homo sapiens
agaaggacagaagcc

SEQ ID NO: 366410 - DNA, 15 bp, Homo sapiens
cagaaggacagaagc

SEQ ID NO: 366411 - DNA, 15 bp, Homo sapiens
tcagaaggacagaag

SEQ ID NO: 366412 - DNA, 15 bp, Homo sapiens
gtcagaaggacagaa

SEQ ID NO: 366413 - DNA, 15 bp, Homo sapiens
tgtcagaaggacaga

SEQ ID NO: 366414 - DNA, 15 bp, Homo sapiens
atgtcagaaggacag

SEQ ID NO: 366415 - DNA, 15 bp, Homo sapiens
gatgtcagaaggaca

SEQ ID NO: 366416 - DNA, 15 bp, Homo sapiens
tgatgtcagaaggac

SEQ ID NO: 366417 - DNA, 15 bp, Homo sapiens
gtgatgtcagaagga

SEQ ID NO: 366418 - DNA, 15 bp, Homo sapiens
ggtgatgtcagaagg

SEQ ID NO: 366419 - DNA, 15 bp, Homo sapiens
gggtgatgtcagaag

SEQ ID NO: 366420 - DNA, 15 bp, Homo sapiens
agggtgatgtcagaa

SEQ ID NO: 366421 - DNA, 15 bp, Homo sapiens
cagggtgatgtcaga

SEQ ID NO: 366422 - DNA, 15 bp, Homo sapiens
tcagggtgatgtcag

SEQ ID NO: 366423 - DNA, 15 bp, Homo sapiens
atcagggtgatgtca

SEQ ID NO: 366424 - DNA, 15 bp, Homo sapiens
tatcagggtgatgtc

SEQ ID NO: 366425 - DNA, 15 bp, Homo sapiens
gtatcagggtgatgt

SEQ ID NO: 366426 - DNA, 15 bp, Homo sapiens
tgtatcagggtgatg

SEQ ID NO: 366427 - DNA, 15 bp, Homo sapiens
ctgtatcagggtgat

SEQ ID NO: 366428 - DNA, 15 bp, Homo sapiens
gctgtatcagggtga

SEQ ID NO: 366429 - DNA, 15 bp, Homo sapiens
ggctgtatcagggtg

SEQ ID NO: 366430 - DNA, 15 bp, Homo sapiens
aggctgtatcagggt

SEQ ID NO: 366431 - DNA, 15 bp, Homo sapiens
caggctgtatcaggg

SEQ ID NO: 366432 - DNA, 15 bp, Homo sapiens
tcaggctgtatcagg

SEQ ID NO: 366433 - DNA, 15 bp, Homo sapiens
ttcaggctgtatcag

SEQ ID NO: 366434 - DNA, 15 bp, Homo sapiens
cttcaggctgtatca

SEQ ID NO: 366435 - DNA, 15 bp, Homo sapiens
gcttcaggctgtatc

SEQ ID NO: 366436 - DNA, 15 bp, Homo sapiens
ggcttcaggctgtat

SEQ ID NO: 366437 - DNA, 15 bp, Homo sapiens
aggcttcaggctgta

SEQ ID NO: 366438 - DNA, 15 bp, Homo sapiens
taggcttcaggctgt

SEQ ID NO: 366439 - DNA, 15 bp, Homo sapiens
ttaggcttcaggctg

SEQ ID NO: 366440 - DNA, 15 bp, Homo sapiens
attaggcttcaggct

SEQ ID NO: 366441 - DNA, 15 bp, Homo sapiens
aattaggcttcaggc

SEQ ID NO: 366442 - DNA, 15 bp, Homo sapiens
aaattaggcttcagg

SEQ ID NO: 366443 - DNA, 15 bp, Homo sapiens
aaaattaggcttcag

SEQ ID NO: 366444 - DNA, 15 bp, Homo sapiens
caaaattaggcttca

SEQ ID NO: 366445 - DNA, 15 bp, Homo sapiens
tcaaaattaggcttc

SEQ ID NO: 366446 - DNA, 15 bp, Homo sapiens
gtcaaaattaggctt

SEQ ID NO: 366447 - DNA, 15 bp, Homo sapiens
ggtcaaaattaggct

SEQ ID NO: 366448 - DNA, 15 bp, Homo sapiens
aggtcaaaattaggc

SEQ ID NO: 366449 - DNA, 15 bp, Homo sapiens
gaggtcaaaattagg

SEQ ID NO: 366450 - DNA, 15 bp, Homo sapiens
agaggtcaaaattag

SEQ ID NO: 366451 - DNA, 15 bp, Homo sapiens
gagaggtcaaaatta

SEQ ID NO: 366452 - DNA, 15 bp, Homo sapiens
ggagaggtcaaaatt

SEQ ID NO: 366453 - DNA, 15 bp, Homo sapiens
tggagaggtcaaaat

SEQ ID NO: 366454 - DNA, 15 bp, Homo sapiens
atggagaggtcaaaa

SEQ ID NO: 366455 - DNA, 15 bp, Homo sapiens
catggagaggtcaaa

SEQ ID NO: 366456 - DNA, 15 bp, Homo sapiens
gcatggagaggtcaa

SEQ ID NO: 366457 - DNA, 15 bp, Homo sapiens
ggcatggagaggtca

SEQ ID NO: 366458 - DNA, 15 bp, Homo sapiens
tggcatggagaggtc

SEQ ID NO: 366459 - DNA, 15 bp, Homo sapiens
gtggcatggagaggt

SEQ ID NO: 366460 - DNA, 15 bp, Homo sapiens
ggtggcatggagagg

SEQ ID NO: 366461 - DNA, 15 bp, Homo sapiens
cggtggcatggagag

SEQ ID NO: 366462 - DNA, 15 bp, Homo sapiens
acggtggcatggaga

SEQ ID NO: 366463 - DNA, 15 bp, Homo sapiens
gacggtggcatggag

SEQ ID NO: 366464 - DNA, 15 bp, Homo sapiens
ggacggtggcatgga

SEQ ID NO: 366465 - DNA, 15 bp, Homo sapiens
aggacggtggcatgg

SEQ ID NO: 366466 - DNA, 15 bp, Homo sapiens
gaggacggtggcatg

SEQ ID NO: 366467 - DNA, 15 bp, Homo sapiens
ggaggacggtggcat

SEQ ID NO: 366468 - DNA, 15 bp, Homo sapiens
gggaggacggtggca

SEQ ID NO: 366469 - DNA, 15 bp, Homo sapiens
agggaggacggtggc

SEQ ID NO: 366470 - DNA, 15 bp, Homo sapiens
cagggaggacggtgg

SEQ ID NO: 366471 - DNA, 15 bp, Homo sapiens
gcagggaggacggtg

SEQ ID NO: 366472 - DNA, 15 bp, Homo sapiens
ggcagggaggacggt

SEQ ID NO: 366473 - DNA, 15 bp, Homo sapiens
tggcagggaggacgg

SEQ ID NO: 366474 - DNA, 15 bp, Homo sapiens
gtggcagggaggacg

SEQ ID NO: 366475 - DNA, 15 bp, Homo sapiens
tgtggcagggaggac

SEQ ID NO: 366476 - DNA, 15 bp, Homo sapiens
gtgtggcagggagga

SEQ ID NO: 366477 - DNA, 15 bp, Homo sapiens
ggtgtggcagggagg

SEQ ID NO: 366478 - DNA, 15 bp, Homo sapiens
gggtgtggcagggag

SEQ ID NO: 366479 - DNA, 15 bp, Homo sapiens
tgggtgtggcaggga

SEQ ID NO: 366480 - DNA, 15 bp, Homo sapiens
ttgggtgtggcaggg

SEQ ID NO: 366481 - DNA, 15 bp, Homo sapiens
tttgggtgtggcagg

SEQ ID NO: 366482 - DNA, 15 bp, Homo sapiens
atttgggtgtggcag

SEQ ID NO: 366483 - DNA, 15 bp, Homo sapiens
gatttgggtgtggca

SEQ ID NO: 366484 - DNA, 15 bp, Homo sapiens
agatttgggtgtggc

SEQ ID NO: 366485 - DNA, 15 bp, Homo sapiens
tagatttgggtgtgg

SEQ ID NO: 366486 - DNA, 15 bp, Homo sapiens
ttagatttgggtgtg

SEQ ID NO: 366487 - DNA, 15 bp, Homo sapiens
tttagatttgggtgt

SEQ ID NO: 366488 - DNA, 15 bp, Homo sapiens
atttagatttgggtg

SEQ ID NO: 366489 - DNA, 15 bp, Homo sapiens
gatttagatttgggt

SEQ ID NO: 366490 - DNA, 15 bp, Homo sapiens
agatttagatttggg

SEQ ID NO: 366491 - DNA, 15 bp, Homo sapiens
aagatttagatttgg

SEQ ID NO: 366492 - DNA, 15 bp, Homo sapiens
caagatttagatttg

SEQ ID NO: 366493 - DNA, 15 bp, Homo sapiens
ccaagatttagattt

SEQ ID NO: 366494 - DNA, 15 bp, Homo sapiens
accaagatttagatt

SEQ ID NO: 366495 - DNA, 15 bp, Homo sapiens
taccaagatttagat

SEQ ID NO: 366496 - DNA, 15 bp, Homo sapiens
ataccaagatttaga

SEQ ID NO: 366497 - DNA, 15 bp, Homo sapiens
gataccaagatttag

SEQ ID NO: 366498 - DNA, 15 bp, Homo sapiens
ggataccaagattta

SEQ ID NO: 366499 - DNA, 15 bp, Homo sapiens
tggataccaagattt

SEQ ID NO: 366500 - DNA, 15 bp, Homo sapiens
gtggataccaagatt

SEQ ID NO: 366501 - DNA, 15 bp, Homo sapiens
ggtggataccaagat

SEQ ID NO: 366502 - DNA, 15 bp, Homo sapiens
aggtggataccaaga

SEQ ID NO: 366503 - DNA, 15 bp, Homo sapiens
caggtggataccaag

SEQ ID NO: 366504 - DNA, 15 bp, Homo sapiens
gcaggtggataccaa

SEQ ID NO: 366505 - DNA, 15 bp, Homo sapiens
agcaggtggatacca

SEQ ID NO: 366506 - DNA, 15 bp, Homo sapiens
gagcaggtggatacc

SEQ ID NO: 366507 - DNA, 15 bp, Homo sapiens
tgagcaggtggatac

SEQ ID NO: 366508 - DNA, 15 bp, Homo sapiens
ctgagcaggtggata

SEQ ID NO: 366509 - DNA, 15 bp, Homo sapiens
gctgagcaggtggat

SEQ ID NO: 366510 - DNA, 15 bp, Homo sapiens
agctgagcaggtgga

SEQ ID NO: 366511 - DNA, 15 bp, Homo sapiens
cagctgagcaggtgg

SEQ ID NO: 366512 - DNA, 15 bp, Homo sapiens
acagctgagcaggtg

SEQ ID NO: 366513 - DNA, 15 bp, Homo sapiens
cacagctgagcaggt

SEQ ID NO: 366514 - DNA, 15 bp, Homo sapiens
gcacagctgagcagg

SEQ ID NO: 366515 - DNA, 15 bp, Homo sapiens
ggcacagctgagcag

SEQ ID NO: 366516 - DNA, 15 bp, Homo sapiens
gggcacagctgagca

SEQ ID NO: 366517 - DNA, 15 bp, Homo sapiens
cgggcacagctgagc

SEQ ID NO: 366518 - DNA, 15 bp, Homo sapiens
gcgggcacagctgag

SEQ ID NO: 366519 - DNA, 15 bp, Homo sapiens
tgcgggcacagctga

SEQ ID NO: 366520 - DNA, 15 bp, Homo sapiens
ctgcgggcacagctg

SEQ ID NO: 366521 - DNA, 15 bp, Homo sapiens
cctgcgggcacagct

SEQ ID NO: 366522 - DNA, 15 bp, Homo sapiens
tcctgcgggcacagc

SEQ ID NO: 366523 - DNA, 15 bp, Homo sapiens
gtcctgcgggcacag

SEQ ID NO: 366524 - DNA, 15 bp, Homo sapiens
tgtcctgcgggcaca

SEQ ID NO: 366525 - DNA, 15 bp, Homo sapiens
aacaactgagaaaaa

SEQ ID NO: 366526 - DNA, 15 bp, Homo sapiens
caacaactgagaaaa

SEQ ID NO: 366527 - DNA, 15 bp, Homo sapiens
acaacaactgagaaa

SEQ ID NO: 366528 - DNA, 15 bp, Homo sapiens
tacaacaactgagaa

SEQ ID NO: 366529 - DNA, 15 bp, Homo sapiens
gtacaacaactgaga

SEQ ID NO: 366530 - DNA, 15 bp, Homo sapiens
agtacaacaactgag

SEQ ID NO: 366531 - DNA, 15 bp, Homo sapiens
tagtacaacaactga

SEQ ID NO: 366532 - DNA, 15 bp, Homo sapiens
ctagtacaacaactg

SEQ ID NO: 366533 - DNA, 15 bp, Homo sapiens
actagtacaacaact

SEQ ID NO: 366534 - DNA, 15 bp, Homo sapiens
aactagtacaacaac

SEQ ID NO: 366535 - DNA, 15 bp, Homo sapiens
caactagtacaacaa

SEQ ID NO: 366536 - DNA, 15 bp, Homo sapiens
ccaactagtacaaca

SEQ ID NO: 366537 - DNA, 15 bp, Homo sapiens
cccaactagtacaac

SEQ ID NO: 366538 - DNA, 15 bp, Homo sapiens
tcccaactagtacaa

SEQ ID NO: 366539 - DNA, 15 bp, Homo sapiens
gtcccaactagtaca

SEQ ID NO: 366540 - DNA, 15 bp, Homo sapiens
tgtcccaactagtac

SEQ ID NO: 366541 - DNA, 15 bp, Homo sapiens
atgtcccaactagta

SEQ ID NO: 366542 - DNA, 15 bp, Homo sapiens
aatgtcccaactagt

SEQ ID NO: 366543 - DNA, 15 bp, Homo sapiens
aaatgtcccaactag

SEQ ID NO: 366544 - DNA, 15 bp, Homo sapiens
aaaatgtcccaacta

SEQ ID NO: 366545 - DNA, 15 bp, Homo sapiens
caaaatgtcccaact

SEQ ID NO: 366546 - DNA, 15 bp, Homo sapiens
ccaaaatgtcccaac

SEQ ID NO: 366547 - DNA, 15 bp, Homo sapiens
gccaaaatgtcccaa

SEQ ID NO: 366548 - DNA, 15 bp, Homo sapiens
tgccaaaatgtccca

SEQ ID NO: 366549 - DNA, 15 bp, Homo sapiens
gtgccaaaatgtccc

SEQ ID NO: 366550 - DNA, 15 bp, Homo sapiens
tgtgccaaaatgtcc

SEQ ID NO: 366551 - DNA, 15 bp, Homo sapiens
ttgtgccaaaatgtc

SEQ ID NO: 366552 - DNA, 15 bp, Homo sapiens
cttgtgccaaaatgt

SEQ ID NO: 366553 - DNA, 15 bp, Homo sapiens
acttgtgccaaaatg

SEQ ID NO: 366554 - DNA, 15 bp, Homo sapiens
cacttgtgccaaaat

SEQ ID NO: 366555 - DNA, 15 bp, Homo sapiens
tcacttgtgccaaaa

SEQ ID NO: 366556 - DNA, 15 bp, Homo sapiens
ttcacttgtgccaaa

SEQ ID NO: 366557 - DNA, 15 bp, Homo sapiens
tttcacttgtgccaa

SEQ ID NO: 366558 - DNA, 15 bp, Homo sapiens
atttcacttgtgcca

SEQ ID NO: 366559 - DNA, 15 bp, Homo sapiens
gatttcacttgtgcc

SEQ ID NO: 366560 - DNA, 15 bp, Homo sapiens
ggatttcacttgtgc

SEQ ID NO: 366561 - DNA, 15 bp, Homo sapiens
tggatttcacttgtg

SEQ ID NO: 366562 - DNA, 15 bp, Homo sapiens
ttggatttcacttgt

SEQ ID NO: 366563 - DNA, 15 bp, Homo sapiens
attggatttcacttg

SEQ ID NO: 366564 - DNA, 15 bp, Homo sapiens
cattggatttcactt

SEQ ID NO: 366565 - DNA, 15 bp, Homo sapiens
gcattggatttcact

SEQ ID NO: 366566 - DNA, 15 bp, Homo sapiens
tgcattggatttcac

SEQ ID NO: 366567 - DNA, 15 bp, Homo sapiens
ttgcattggatttca

SEQ ID NO: 366568 - DNA, 15 bp, Homo sapiens
tttgcattggatttc

SEQ ID NO: 366569 - DNA, 15 bp, Homo sapiens
ttttgcattggattt

SEQ ID NO: 366570 - DNA, 15 bp, Homo sapiens
tttttgcattggatt

SEQ ID NO: 366571 - DNA, 15 bp, Homo sapiens
ctttttgcattggat

SEQ ID NO: 366572 - DNA, 15 bp, Homo sapiens
cctttttgcattgga

SEQ ID NO: 366573 - DNA, 15 bp, Homo sapiens
gcctttttgcattgg

SEQ ID NO: 366574 - DNA, 15 bp, Homo sapiens
agcctttttgcattg

SEQ ID NO: 366575 - DNA, 15 bp, Homo sapiens
aagcctttttgcatt

SEQ ID NO: 366576 - DNA, 15 bp, Homo sapiens
taagcctttttgcat

SEQ ID NO: 366577 - DNA, 15 bp, Homo sapiens
ttaagcctttttgca

SEQ ID NO: 366578 - DNA, 15 bp, Homo sapiens
cttaagcctttttgc

SEQ ID NO: 366579 - DNA, 15 bp, Homo sapiens
acttaagcctttttg

SEQ ID NO: 366580 - DNA, 15 bp, Homo sapiens
tacttaagccttttt

SEQ ID NO: 366581 - DNA, 15 bp, Homo sapiens
ttacttaagcctttt

SEQ ID NO: 366582 - DNA, 15 bp, Homo sapiens
tttacttaagccttt

SEQ ID NO: 366583 - DNA, 15 bp, Homo sapiens
ttttacttaagcctt

SEQ ID NO: 366584 - DNA, 15 bp, Homo sapiens
tttttacttaagcct

SEQ ID NO: 366585 - DNA, 15 bp, Homo sapiens
gtttttacttaagcc

SEQ ID NO: 366586 - DNA, 15 bp, Homo sapiens
tgtttttacttaagc

SEQ ID NO: 366587 - DNA, 15 bp, Homo sapiens
ctgtttttacttaag

SEQ ID NO: 366588 - DNA, 15 bp, Homo sapiens
tctgtttttacttaa

SEQ ID NO: 366589 - DNA, 15 bp, Homo sapiens
ctctgtttttactta

SEQ ID NO: 366590 - DNA, 15 bp, Homo sapiens
tctctgtttttactt

SEQ ID NO: 366591 - DNA, 15 bp, Homo sapiens
gtctctgtttttact

SEQ ID NO: 366592 - DNA, 15 bp, Homo sapiens
tgtctctgtttttac

SEQ ID NO: 366593 - DNA, 15 bp, Homo sapiens
atgtctctgttttta

SEQ ID NO: 366594 - DNA, 15 bp, Homo sapiens
tatgtctctgttttt

SEQ ID NO: 366595 - DNA, 15 bp, Homo sapiens
atatgtctctgtttt

SEQ ID NO: 366596 - DNA, 15 bp, Homo sapiens
tatatgtctctgttt

SEQ ID NO: 366597 - DNA, 15 bp, Homo sapiens
ttatatgtctctgtt

SEQ ID NO: 366598 - DNA, 15 bp, Homo sapiens
gttatatgtctctgt

SEQ ID NO: 366599 - DNA, 15 bp, Homo sapiens
agttatatgtctctg

SEQ ID NO: 366600 - DNA, 15 bp, Homo sapiens
cagttatatgtctct

SEQ ID NO: 366601 - DNA, 15 bp, Homo sapiens
ccagttatatgtctc

SEQ ID NO: 366602 - DNA, 15 bp, Homo sapiens
tccagttatatgtct

SEQ ID NO: 366603 - DNA, 15 bp, Homo sapiens
ttccagttatatgtc

SEQ ID NO: 366604 - DNA, 15 bp, Homo sapiens
attccagttatatgt

SEQ ID NO: 366605 - DNA, 15 bp, Homo sapiens
cattccagttatatg

SEQ ID NO: 366606 - DNA, 15 bp, Homo sapiens
acattccagttatat

SEQ ID NO: 366607 - DNA, 15 bp, Homo sapiens
gacattccagttata

SEQ ID NO: 366608 - DNA, 15 bp, Homo sapiens
agacattccagttat

SEQ ID NO: 366609 - DNA, 15 bp, Homo sapiens
gagacattccagtta

SEQ ID NO: 366610 - DNA, 15 bp, Homo sapiens
agagacattccagtt

SEQ ID NO: 366611 - DNA, 15 bp, Homo sapiens
cagagacattccagt

SEQ ID NO: 366612 - DNA, 15 bp, Homo sapiens
ccagagacattccag

SEQ ID NO: 366613 - DNA, 15 bp, Homo sapiens
accagagacattcca

SEQ ID NO: 366614 - DNA, 15 bp, Homo sapiens
aaccagagacattcc

SEQ ID NO: 366615 - DNA, 15 bp, Homo sapiens
aaaccagagacattc

SEQ ID NO: 366616 - DNA, 15 bp, Homo sapiens
aaaaccagagacatt

SEQ ID NO: 366617 - DNA, 15 bp, Homo sapiens
taaaaccagagacat

SEQ ID NO: 366618 - DNA, 15 bp, Homo sapiens
ctaaaaccagagaca

SEQ ID NO: 366619 - DNA, 15 bp, Homo sapiens
cctaaaaccagagac

SEQ ID NO: 366620 - DNA, 15 bp, Homo sapiens
gcctaaaaccagaga

SEQ ID NO: 366621 - DNA, 15 bp, Homo sapiens
tgcctaaaaccagag

SEQ ID NO: 366622 - DNA, 15 bp, Homo sapiens
gtgcctaaaaccaga

SEQ ID NO: 366623 - DNA, 15 bp, Homo sapiens
tgtgcctaaaaccag

SEQ ID NO: 366624 - DNA, 15 bp, Homo sapiens
atgtgcctaaaacca

SEQ ID NO: 366625 - DNA, 15 bp, Homo sapiens
aatgtgcctaaaacc

SEQ ID NO: 366626 - DNA, 15 bp, Homo sapiens
aaatgtgcctaaaac

SEQ ID NO: 366627 - DNA, 15 bp, Homo sapiens
caaatgtgcctaaaa

SEQ ID NO: 366628 - DNA, 15 bp, Homo sapiens
acaaatgtgcctaaa

SEQ ID NO: 366629 - DNA, 15 bp, Homo sapiens
cacaaatgtgcctaa

SEQ ID NO: 366630 - DNA, 15 bp, Homo sapiens
acacaaatgtgccta

SEQ ID NO: 366631 - DNA, 15 bp, Homo sapiens
cacacaaatgtgcct

SEQ ID NO: 366632 - DNA, 15 bp, Homo sapiens
gcacacaaatgtgcc

SEQ ID NO: 366633 - DNA, 15 bp, Homo sapiens
tgcacacaaatgtgc

SEQ ID NO: 366634 - DNA, 15 bp, Homo sapiens
ctgcacacaaatgtg

SEQ ID NO: 366635 - DNA, 15 bp, Homo sapiens
cctgcacacaaatgt

SEQ ID NO: 366636 - DNA, 15 bp, Homo sapiens
tcctgcacacaaatg

SEQ ID NO: 366637 - DNA, 15 bp, Homo sapiens
ttcctgcacacaaat

SEQ ID NO: 366638 - DNA, 15 bp, Homo sapiens
gttcctgcacacaaa

SEQ ID NO: 366639 - DNA, 15 bp, Homo sapiens
agttcctgcacacaa

SEQ ID NO: 366640 - DNA, 15 bp, Homo sapiens
aagttcctgcacaca

SEQ ID NO: 366641 - DNA, 15 bp, Homo sapiens
caagttcctgcacac

SEQ ID NO: 366642 - DNA, 15 bp, Homo sapiens
tcaagttcctgcaca

SEQ ID NO: 366643 - DNA, 15 bp, Homo sapiens
ttcaagttcctgcac

SEQ ID NO: 366644 - DNA, 15 bp, Homo sapiens
gttcaagttcctgca

SEQ ID NO: 366645 - DNA, 15 bp, Homo sapiens
tgttcaagttcctgc

SEQ ID NO: 366646 - DNA, 15 bp, Homo sapiens
ttgttcaagttcctg

SEQ ID NO: 366647 - DNA, 15 bp, Homo sapiens
attgttcaagttcct

SEQ ID NO: 366648 - DNA, 15 bp, Homo sapiens
cattgttcaagttcc

SEQ ID NO: 366649 - DNA, 15 bp, Homo sapiens
tcattgttcaagttc

SEQ ID NO: 366650 - DNA, 15 bp, Homo sapiens
gtcattgttcaagtt

SEQ ID NO: 366651 - DNA, 15 bp, Homo sapiens
tgtcattgttcaagt

SEQ ID NO: 366652 - DNA, 15 bp, Homo sapiens
ctgtcattgttcaag

SEQ ID NO: 366653 - DNA, 15 bp, Homo sapiens
tctgtcattgttcaa

SEQ ID NO: 366654 - DNA, 15 bp, Homo sapiens
ctctgtcattgttca

SEQ ID NO: 366655 - DNA, 15 bp, Homo sapiens
gctctgtcattgttc

SEQ ID NO: 366656 - DNA, 15 bp, Homo sapiens
agctctgtcattgtt

SEQ ID NO: 366657 - DNA, 15 bp, Homo sapiens
gagctctgtcattgt

SEQ ID NO: 366658 - DNA, 15 bp, Homo sapiens
agagctctgtcattg

SEQ ID NO: 366659 - DNA, 15 bp, Homo sapiens
tagagctctgtcatt

SEQ ID NO: 366660 - DNA, 15 bp, Homo sapiens
atagagctctgtcat

SEQ ID NO: 366661 - DNA, 15 bp, Homo sapiens
gatagagctctgtca

SEQ ID NO: 366662 - DNA, 15 bp, Homo sapiens
agatagagctctgtc

SEQ ID NO: 366663 - DNA, 15 bp, Homo sapiens
gagatagagctctgt

SEQ ID NO: 366664 - DNA, 15 bp, Homo sapiens
tgagatagagctctg

SEQ ID NO: 366665 - DNA, 15 bp, Homo sapiens
atgagatagagctct

SEQ ID NO: 366666 - DNA, 15 bp, Homo sapiens
aatgagatagagctc

SEQ ID NO: 366667 - DNA, 15 bp, Homo sapiens
gaatgagatagagct

SEQ ID NO: 366668 - DNA, 15 bp, Homo sapiens
agaatgagatagagc

SEQ ID NO: 366669 - DNA, 15 bp, Homo sapiens
gagaatgagatagag

SEQ ID NO: 366670 - DNA, 15 bp, Homo sapiens
agagaatgagataga

SEQ ID NO: 366671 - DNA, 15 bp, Homo sapiens
gagagaatgagatag

SEQ ID NO: 366672 - DNA, 15 bp, Homo sapiens
ggagagaatgagata

SEQ ID NO: 366673 - DNA, 15 bp, Homo sapiens
tggagagaatgagat

SEQ ID NO: 366674 - DNA, 15 bp, Homo sapiens
gtggagagaatgaga

SEQ ID NO: 366675 - DNA, 15 bp, Homo sapiens
ggtggagagaatgag

SEQ ID NO: 366676 - DNA, 15 bp, Homo sapiens
aggtggagagaatga

SEQ ID NO: 366677 - DNA, 15 bp, Homo sapiens
gaggtggagagaatg

SEQ ID NO: 366678 - DNA, 15 bp, Homo sapiens
agaggtggagagaat

SEQ ID NO: 366679 - DNA, 15 bp, Homo sapiens
aagaggtggagagaa

SEQ ID NO: 366680 - DNA, 15 bp, Homo sapiens
caagaggtggagaga

SEQ ID NO: 366681 - DNA, 15 bp, Homo sapiens
ccaagaggtggagag

SEQ ID NO: 366682 - DNA, 15 bp, Homo sapiens
accaagaggtggaga

SEQ ID NO: 366683 - DNA, 15 bp, Homo sapiens
aaccaagaggtggag

SEQ ID NO: 366684 - DNA, 15 bp, Homo sapiens
gaaccaagaggtgga

SEQ ID NO: 366685 - DNA, 15 bp, Homo sapiens
tgaaccaagaggtgg

SEQ ID NO: 366686 - DNA, 15 bp, Homo sapiens
atgaaccaagaggtg

SEQ ID NO: 366687 - DNA, 15 bp, Homo sapiens
aatgaaccaagaggt

SEQ ID NO: 366688 - DNA, 15 bp, Homo sapiens
aaatgaaccaagagg

SEQ ID NO: 366689 - DNA, 15 bp, Homo sapiens
caaatgaaccaagag

SEQ ID NO: 366690 - DNA, 15 bp, Homo sapiens
gcaaatgaaccaaga

SEQ ID NO: 366691 - DNA, 15 bp, Homo sapiens
ggcaaatgaaccaag

SEQ ID NO: 366692 - DNA, 15 bp, Homo sapiens
gggcaaatgaaccaa

SEQ ID NO: 366693 - DNA, 15 bp, Homo sapiens
agggcaaatgaacca

SEQ ID NO: 366694 - DNA, 15 bp, Homo sapiens
cagggcaaatgaacc

SEQ ID NO: 366695 - DNA, 15 bp, Homo sapiens
acagggcaaatgaac

SEQ ID NO: 366696 - DNA, 15 bp, Homo sapiens
aacagggcaaatgaa

SEQ ID NO: 366697 - DNA, 15 bp, Homo sapiens
aaacagggcaaatga

SEQ ID NO: 366698 - DNA, 15 bp, Homo sapiens
aaaacagggcaaatg

SEQ ID NO: 366699 - DNA, 15 bp, Homo sapiens
gaaaacagggcaaat

SEQ ID NO: 366700 - DNA, 15 bp, Homo sapiens
tgaaaacagggcaaa

SEQ ID NO: 366701 - DNA, 15 bp, Homo sapiens
atgaaaacagggcaa

SEQ ID NO: 366702 - DNA, 15 bp, Homo sapiens
aatgaaaacagggca

SEQ ID NO: 366703 - DNA, 15 bp, Homo sapiens
gaatgaaaacagggc

SEQ ID NO: 366704 - DNA, 15 bp, Homo sapiens
tgaatgaaaacaggg

SEQ ID NO: 366705 - DNA, 15 bp, Homo sapiens
gtgaatgaaaacagg

SEQ ID NO: 366706 - DNA, 15 bp, Homo sapiens
ggtgaatgaaaacag

SEQ ID NO: 366707 - DNA, 15 bp, Homo sapiens
gggtgaatgaaaaca

SEQ ID NO: 366708 - DNA, 15 bp, Homo sapiens
ggggtgaatgaaaac

SEQ ID NO: 366709 - DNA, 15 bp, Homo sapiens
tggggtgaatgaaaa

SEQ ID NO: 366710 - DNA, 15 bp, Homo sapiens
atggggtgaatgaaa

SEQ ID NO: 366711 - DNA, 15 bp, Homo sapiens
catggggtgaatgaa

SEQ ID NO: 366712 - DNA, 15 bp, Homo sapiens
ccatggggtgaatga

SEQ ID NO: 366713 - DNA, 15 bp, Homo sapiens
accatggggtgaatg

SEQ ID NO: 366714 - DNA, 15 bp, Homo sapiens
caccatggggtgaat

SEQ ID NO: 366715 - DNA, 15 bp, Homo sapiens
ccaccatggggtgaa

SEQ ID NO: 366716 - DNA, 15 bp, Homo sapiens
cccaccatggggtga

SEQ ID NO: 366717 - DNA, 15 bp, Homo sapiens
gcccaccatggggtg

SEQ ID NO: 366718 - DNA, 15 bp, Homo sapiens
agcccaccatggggt

SEQ ID NO: 366719 - DNA, 15 bp, Homo sapiens
tagcccaccatgggg

SEQ ID NO: 366720 - DNA, 15 bp, Homo sapiens
ttagcccaccatggg

SEQ ID NO: 366721 - DNA, 15 bp, Homo sapiens
gttagcccaccatgg

SEQ ID NO: 366722 - DNA, 15 bp, Homo sapiens
agttagcccaccatg

SEQ ID NO: 366723 - DNA, 15 bp, Homo sapiens
cagttagcccaccat

SEQ ID NO: 366724 - DNA, 15 bp, Homo sapiens
gcagttagcccacca

SEQ ID NO: 366725 - DNA, 15 bp, Homo sapiens
agcagttagcccacc

SEQ ID NO: 366726 - DNA, 15 bp, Homo sapiens
aagcagttagcccac

SEQ ID NO: 366727 - DNA, 15 bp, Homo sapiens
caagcagttagccca

SEQ ID NO: 366728 - DNA, 15 bp, Homo sapiens
gcaagcagttagccc

SEQ ID NO: 366729 - DNA, 15 bp, Homo sapiens
ggcaagcagttagcc

SEQ ID NO: 366730 - DNA, 15 bp, Homo sapiens
tggcaagcagttagc

SEQ ID NO: 366731 - DNA, 15 bp, Homo sapiens
ctggcaagcagttag

SEQ ID NO: 366732 - DNA, 15 bp, Homo sapiens
actggcaagcagtta

SEQ ID NO: 366733 - DNA, 15 bp, Homo sapiens
tactggcaagcagtt

SEQ ID NO: 366734 - DNA, 15 bp, Homo sapiens
ctactggcaagcagt

SEQ ID NO: 366735 - DNA, 15 bp, Homo sapiens
gctactggcaagcag

SEQ ID NO: 366736 - DNA, 15 bp, Homo sapiens
ggctactggcaagca

SEQ ID NO: 366737 - DNA, 15 bp, Homo sapiens
gggctactggcaagc

SEQ ID NO: 366738 - DNA, 15 bp, Homo sapiens
ggggctactggcaag

SEQ ID NO: 366739 - DNA, 15 bp, Homo sapiens
tggggctactggcaa

SEQ ID NO: 366740 - DNA, 15 bp, Homo sapiens
gtggggctactggca

SEQ ID NO: 366741 - DNA, 15 bp, Homo sapiens
tgtggggctactggc

SEQ ID NO: 366742 - DNA, 15 bp, Homo sapiens
gtgtggggctactgg

SEQ ID NO: 366743 - DNA, 15 bp, Homo sapiens
ggtgtggggctactg

SEQ ID NO: 366744 - DNA, 15 bp, Homo sapiens
aggtgtggggctact

SEQ ID NO: 366745 - DNA, 15 bp, Homo sapiens
caggtgtggggctac

SEQ ID NO: 366746 - DNA, 15 bp, Homo sapiens
gcaggtgtggggcta

SEQ ID NO: 366747 - DNA, 15 bp, Homo sapiens
tgcaggtgtggggct

SEQ ID NO: 366748 - DNA, 15 bp, Homo sapiens
ctgcaggtgtggggc

SEQ ID NO: 366749 - DNA, 15 bp, Homo sapiens
tctgcaggtgtgggg

SEQ ID NO: 366750 - DNA, 15 bp, Homo sapiens
gtctgcaggtgtggg

SEQ ID NO: 366751 - DNA, 15 bp, Homo sapiens
agtctgcaggtgtgg

SEQ ID NO: 366752 - DNA, 15 bp, Homo sapiens
gagtctgcaggtgtg

SEQ ID NO: 366753 - DNA, 15 bp, Homo sapiens
ggagtctgcaggtgt

SEQ ID NO: 366754 - DNA, 15 bp, Homo sapiens
aggagtctgcaggtg

SEQ ID NO: 366755 - DNA, 15 bp, Homo sapiens
caggagtctgcaggt

SEQ ID NO: 366756 - DNA, 15 bp, Homo sapiens
tcaggagtctgcagg

SEQ ID NO: 366757 - DNA, 15 bp, Homo sapiens
aagtcaggagtctgc

SEQ ID NO: 366758 - DNA, 15 bp, Homo sapiens
aaagtcaggagtctg

SEQ ID NO: 366759 - DNA, 15 bp, Homo sapiens
caaagtcaggagtct

SEQ ID NO: 366760 - DNA, 15 bp, Homo sapiens
gcaaagtcaggagtc

SEQ ID NO: 366761 - DNA, 15 bp, Homo sapiens
tgcaaagtcaggagt

SEQ ID NO: 366762 - DNA, 15 bp, Homo sapiens
ttgcaaagtcaggag

SEQ ID NO: 366763 - DNA, 15 bp, Homo sapiens
gttgcaaagtcagga

SEQ ID NO: 366764 - DNA, 15 bp, Homo sapiens
ggttgcaaagtcagg

SEQ ID NO: 366765 - DNA, 15 bp, Homo sapiens
tggttgcaaagtcag

SEQ ID NO: 366766 - DNA, 15 bp, Homo sapiens
gtggttgcaaagtca

SEQ ID NO: 366767 - DNA, 15 bp, Homo sapiens
tgtggttgcaaagtc

SEQ ID NO: 366768 - DNA, 15 bp, Homo sapiens
ctgtggttgcaaagt

SEQ ID NO: 366769 - DNA, 15 bp, Homo sapiens
tctgtggttgcaaag

SEQ ID NO: 366770 - DNA, 15 bp, Homo sapiens
ttctgtggttgcaaa

SEQ ID NO: 366771 - DNA, 15 bp, Homo sapiens
gttctgtggttgcaa

SEQ ID NO: 366772 - DNA, 15 bp, Homo sapiens
ggttctgtggttgca

SEQ ID NO: 366773 - DNA, 15 bp, Homo sapiens
aggttctgtggttgc

SEQ ID NO: 366774 - DNA, 15 bp, Homo sapiens
aaggttctgtggttg

SEQ ID NO: 366775 - DNA, 15 bp, Homo sapiens
aaaggttctgtggtt

SEQ ID NO: 366776 - DNA, 15 bp, Homo sapiens
taaaggttctgtggt

SEQ ID NO: 366777 - DNA, 15 bp, Homo sapiens
gtaaaggttctgtgg

SEQ ID NO: 366778 - DNA, 15 bp, Homo sapiens
ggtaaaggttctgtg

SEQ ID NO: 366779 - DNA, 15 bp, Homo sapiens
tggtaaaggttctgt

SEQ ID NO: 366780 - DNA, 15 bp, Homo sapiens
atggtaaaggttctg

SEQ ID NO: 366781 - DNA, 15 bp, Homo sapiens
gatggtaaaggttct

SEQ ID NO: 366782 - DNA, 15 bp, Homo sapiens
agatggtaaaggttc

SEQ ID NO: 366783 - DNA, 15 bp, Homo sapiens
aagatggtaaaggtt

SEQ ID NO: 366784 - DNA, 15 bp, Homo sapiens
aaagatggtaaaggt

SEQ ID NO: 366785 - DNA, 15 bp, Homo sapiens
aaaagatggtaaagg

SEQ ID NO: 366786 - DNA, 15 bp, Homo sapiens
taaaagatggtaaag

SEQ ID NO: 366787 - DNA, 15 bp, Homo sapiens
gtaaaagatggtaaa

SEQ ID NO: 366788 - DNA, 15 bp, Homo sapiens
tgtaaaagatggtaa

SEQ ID NO: 366789 - DNA, 15 bp, Homo sapiens
atgtaaaagatggta

SEQ ID NO: 366790 - DNA, 15 bp, Homo sapiens
tatgtaaaagatggt

SEQ ID NO: 366791 - DNA, 15 bp, Homo sapiens
ttatgtaaaagatgg

SEQ ID NO: 366792 - DNA, 15 bp, Homo sapiens
attatgtaaaagatg

SEQ ID NO: 366793 - DNA, 15 bp, Homo sapiens
cattatgtaaaagat

SEQ ID NO: 366794 - DNA, 15 bp, Homo sapiens
acattatgtaaaaga

SEQ ID NO: 366795 - DNA, 15 bp, Homo sapiens
gacattatgtaaaag

SEQ ID NO: 366796 - DNA, 15 bp, Homo sapiens
ggacattatgtaaaa

SEQ ID NO: 366797 - DNA, 15 bp, Homo sapiens
aggacattatgtaaa

SEQ ID NO: 366798 - DNA, 15 bp, Homo sapiens
caggacattatgtaa

SEQ ID NO: 366799 - DNA, 15 bp, Homo sapiens
ccaggacattatgta

SEQ ID NO: 366800 - DNA, 15 bp, Homo sapiens
cccaggacattatgt

SEQ ID NO: 366801 - DNA, 15 bp, Homo sapiens
ccccaggacattatg

SEQ ID NO: 366802 - DNA, 15 bp, Homo sapiens
tccccaggacattat

SEQ ID NO: 366803 - DNA, 15 bp, Homo sapiens
ctccccaggacatta

SEQ ID NO: 366804 - DNA, 15 bp, Homo sapiens
tctccccaggacatt

SEQ ID NO: 366805 - DNA, 15 bp, Homo sapiens
ttctccccaggacat

SEQ ID NO: 366806 - DNA, 15 bp, Homo sapiens
attctccccaggaca

SEQ ID NO: 366807 - DNA, 15 bp, Homo sapiens
tattctccccaggac

SEQ ID NO: 366808 - DNA, 15 bp, Homo sapiens
gtattctccccagga

SEQ ID NO: 366809 - DNA, 15 bp, Homo sapiens
cgtattctccccagg

SEQ ID NO: 366810 - DNA, 15 bp, Homo sapiens
ccgtattctccccag

SEQ ID NO: 366811 - DNA, 15 bp, Homo sapiens
tccgtattctcccca

SEQ ID NO: 366812 - DNA, 15 bp, Homo sapiens
gtccgtattctcccc

SEQ ID NO: 366813 - DNA, 15 bp, Homo sapiens
tgtccgtattctccc

SEQ ID NO: 366814 - DNA, 15 bp, Homo sapiens
ctgtccgtattctcc

SEQ ID NO: 366815 - DNA, 15 bp, Homo sapiens
cctgtccgtattctc

SEQ ID NO: 366816 - DNA, 15 bp, Homo sapiens
gcctgtccgtattct

SEQ ID NO: 366817 - DNA, 15 bp, Homo sapiens
ggcctgtccgtattc

SEQ ID NO: 366818 - DNA, 15 bp, Homo sapiens
gggcctgtccgtatt

SEQ ID NO: 366819 - DNA, 15 bp, Homo sapiens
agggcctgtccgtat

SEQ ID NO: 366820 - DNA, 15 bp, Homo sapiens
tagggcctgtccgta

SEQ ID NO: 366821 - DNA, 15 bp, Homo sapiens
ctagggcctgtccgt

SEQ ID NO: 366822 - DNA, 15 bp, Homo sapiens
tctagggcctgtccg

SEQ ID NO: 366823 - DNA, 15 bp, Homo sapiens
atctagggcctgtcc

SEQ ID NO: 366824 - DNA, 15 bp, Homo sapiens
aatctagggcctgtc

SEQ ID NO: 366825 - DNA, 15 bp, Homo sapiens
caatctagggcctgt

SEQ ID NO: 366826 - DNA, 15 bp, Homo sapiens
tcaatctagggcctg

SEQ ID NO: 366827 - DNA, 15 bp, Homo sapiens
ctcaatctagggcct

SEQ ID NO: 366828 - DNA, 15 bp, Homo sapiens
cctcaatctagggcc

SEQ ID NO: 366829 - DNA, 15 bp, Homo sapiens
tcctcaatctagggc

SEQ ID NO: 366830 - DNA, 15 bp, Homo sapiens
ctcctcaatctaggg

SEQ ID NO: 366831 - DNA, 15 bp, Homo sapiens
cctcctcaatctagg

SEQ ID NO: 366832 - DNA, 15 bp, Homo sapiens
tcctcctcaatctag

SEQ ID NO: 366833 - DNA, 15 bp, Homo sapiens
gtcctcctcaatcta

SEQ ID NO: 366834 - DNA, 15 bp, Homo sapiens
tgtcctcctcaatct

SEQ ID NO: 366835 - DNA, 15 bp, Homo sapiens
ctgtcctcctcaatc

SEQ ID NO: 366836 - DNA, 15 bp, Homo sapiens
tctgtcctcctcaat

SEQ ID NO: 366837 - DNA, 15 bp, Homo sapiens
gtctgtcctcctcaa

SEQ ID NO: 366838 - DNA, 15 bp, Homo sapiens
agtctgtcctcctca

SEQ ID NO: 366839 - DNA, 15 bp, Homo sapiens
gagtctgtcctcctc

SEQ ID NO: 366840 - DNA, 15 bp, Homo sapiens
tgagtctgtcctcct

SEQ ID NO: 366841 - DNA, 15 bp, Homo sapiens
atgagtctgtcctcc

SEQ ID NO: 366842 - DNA, 15 bp, Homo sapiens
gatgagtctgtcctc

SEQ ID NO: 366843 - DNA, 15 bp, Homo sapiens
agatgagtctgtcct

SEQ ID NO: 366844 - DNA, 15 bp, Homo sapiens
gagatgagtctgtcc

SEQ ID NO: 366845 - DNA, 15 bp, Homo sapiens
agagatgagtctgtc

SEQ ID NO: 366846 - DNA, 15 bp, Homo sapiens
tagagatgagtctgt

SEQ ID NO: 366847 - DNA, 15 bp, Homo sapiens
ttagagatgagtctg

SEQ ID NO: 366848 - DNA, 15 bp, Homo sapiens
tttagagatgagtct

SEQ ID NO: 366849 - DNA, 15 bp, Homo sapiens
gtttagagatgagtc

SEQ ID NO: 366850 - DNA, 15 bp, Homo sapiens
agtttagagatgagt

SEQ ID NO: 366851 - DNA, 15 bp, Homo sapiens
cagtttagagatgag

SEQ ID NO: 366852 - DNA, 15 bp, Homo sapiens
tcagtttagagatga

SEQ ID NO: 366853 - DNA, 15 bp, Homo sapiens
atcagtttagagatg

SEQ ID NO: 366854 - DNA, 15 bp, Homo sapiens
catcagtttagagat

SEQ ID NO: 366855 - DNA, 15 bp, Homo sapiens
tcatcagtttagaga

SEQ ID NO: 366856 - DNA, 15 bp, Homo sapiens
atcatcagtttagag

SEQ ID NO: 366857 - DNA, 15 bp, Homo sapiens
catcatcagtttaga

SEQ ID NO: 366858 - DNA, 15 bp, Homo sapiens
acatcatcagtttag

SEQ ID NO: 366859 - DNA, 15 bp, Homo sapiens
cacatcatcagttta

SEQ ID NO: 366860 - DNA, 15 bp, Homo sapiens
ccacatcatcagttt

SEQ ID NO: 366861 - DNA, 15 bp, Homo sapiens
gccacatcatcagtt

SEQ ID NO: 366862 - DNA, 15 bp, Homo sapiens
ggccacatcatcagt

SEQ ID NO: 366863 - DNA, 15 bp, Homo sapiens
tggccacatcatcag

SEQ ID NO: 366864 - DNA, 15 bp, Homo sapiens
ctggccacatcatca

SEQ ID NO: 366865 - DNA, 15 bp, Homo sapiens
cctggccacatcatc

SEQ ID NO: 366866 - DNA, 15 bp, Homo sapiens
tcctggccacatcat

SEQ ID NO: 366867 - DNA, 15 bp, Homo sapiens
atcctggccacatca

SEQ ID NO: 366868 - DNA, 15 bp, Homo sapiens
aatcctggccacatc

SEQ ID NO: 366869 - DNA, 15 bp, Homo sapiens
taatcctggccacat

SEQ ID NO: 366870 - DNA, 15 bp, Homo sapiens
ataatcctggccaca

SEQ ID NO: 366871 - DNA, 15 bp, Homo sapiens
cataatcctggccac

SEQ ID NO: 366872 - DNA, 15 bp, Homo sapiens
gcataatcctggcca

SEQ ID NO: 366873 - DNA, 15 bp, Homo sapiens
tgcataatcctggcc

SEQ ID NO: 366874 - DNA, 15 bp, Homo sapiens
ctgcataatcctggc

SEQ ID NO: 366875 - DNA, 15 bp, Homo sapiens
cctgcataatcctgg

SEQ ID NO: 366876 - DNA, 15 bp, Homo sapiens
tcctgcataatcctg

SEQ ID NO: 366877 - DNA, 15 bp, Homo sapiens
gtcctgcataatcct

SEQ ID NO: 366878 - DNA, 15 bp, Homo sapiens
ggtcctgcataatcc

SEQ ID NO: 366879 - DNA, 15 bp, Homo sapiens
tggtcctgcataatc

SEQ ID NO: 366880 - DNA, 15 bp, Homo sapiens
atggtcctgcataat

SEQ ID NO: 366881 - DNA, 15 bp, Homo sapiens
gatggtcctgcataa

SEQ ID NO: 366882 - DNA, 15 bp, Homo sapiens
tgatggtcctgcata

SEQ ID NO: 366883 - DNA, 15 bp, Homo sapiens
ctgatggtcctgcat

SEQ ID NO: 366884 - DNA, 15 bp, Homo sapiens
gctgatggtcctgca

SEQ ID NO: 366885 - DNA, 15 bp, Homo sapiens
cgctgatggtcctgc

SEQ ID NO: 366886 - DNA, 15 bp, Homo sapiens
ccgctgatggtcctg

SEQ ID NO: 366887 - DNA, 15 bp, Homo sapiens
gccgctgatggtcct

SEQ ID NO: 366888 - DNA, 15 bp, Homo sapiens
ggccgctgatggtcc

SEQ ID NO: 366889 - DNA, 15 bp, Homo sapiens
gggccgctgatggtc

SEQ ID NO: 366890 - DNA, 15 bp, Homo sapiens
agggccgctgatggt

SEQ ID NO: 366891 - DNA, 15 bp, Homo sapiens
cagggccgctgatgg

SEQ ID NO: 366892 - DNA, 15 bp, Homo sapiens
acagggccgctgatg

SEQ ID NO: 366893 - DNA, 15 bp, Homo sapiens
cacagggccgctgat

SEQ ID NO: 366894 - DNA, 15 bp, Homo sapiens
tcacagggccgctga

SEQ ID NO: 366895 - DNA, 15 bp, Homo sapiens
ttcacagggccgctg

SEQ ID NO: 366896 - DNA, 15 bp, Homo sapiens
cttcacagggccgct

SEQ ID NO: 366897 - DNA, 15 bp, Homo sapiens
acttcacagggccgc

SEQ ID NO: 366898 - DNA, 15 bp, Homo sapiens
gacttcacagggccg

SEQ ID NO: 366899 - DNA, 15 bp, Homo sapiens
tgacttcacagggcc

SEQ ID NO: 366900 - DNA, 15 bp, Homo sapiens
ctgacttcacagggc

SEQ ID NO: 366901 - DNA, 15 bp, Homo sapiens
cctgacttcacaggg

SEQ ID NO: 366902 - DNA, 15 bp, Homo sapiens
tcctgacttcacagg

SEQ ID NO: 366903 - DNA, 15 bp, Homo sapiens
atcctgacttcacag

SEQ ID NO: 366904 - DNA, 15 bp, Homo sapiens
catcctgacttcaca

SEQ ID NO: 366905 - DNA, 15 bp, Homo sapiens
gcatcctgacttcac

SEQ ID NO: 366906 - DNA, 15 bp, Homo sapiens
ggcatcctgacttca

SEQ ID NO: 366907 - DNA, 15 bp, Homo sapiens
aggcatcctgacttc

SEQ ID NO: 366908 - DNA, 15 bp, Homo sapiens
caggcatcctgactt

SEQ ID NO: 366909 - DNA, 15 bp, Homo sapiens
ccaggcatcctgact

SEQ ID NO: 366910 - DNA, 15 bp, Homo sapiens
gccaggcatcctgac

SEQ ID NO: 366911 - DNA, 15 bp, Homo sapiens
agccaggcatcctga

SEQ ID NO: 366912 - DNA, 15 bp, Homo sapiens
aagccaggcatcctg

SEQ ID NO: 366913 - DNA, 15 bp, Homo sapiens
gaagccaggcatcct

SEQ ID NO: 366914 - DNA, 15 bp, Homo sapiens
tgaagccaggcatcc

SEQ ID NO: 366915 - DNA, 15 bp, Homo sapiens
atgaagccaggcatc

SEQ ID NO: 366916 - DNA, 15 bp, Homo sapiens
catgaagccaggcat

SEQ ID NO: 366917 - DNA, 15 bp, Homo sapiens
acatgaagccaggca

SEQ ID NO: 366918 - DNA, 15 bp, Homo sapiens
aacatgaagccaggc

SEQ ID NO: 366919 - DNA, 15 bp, Homo sapiens
caacatgaagccagg

SEQ ID NO: 366920 - DNA, 15 bp, Homo sapiens
gcaacatgaagccag

SEQ ID NO: 366921 - DNA, 15 bp, Homo sapiens
ggcaacatgaagcca

SEQ ID NO: 366922 - DNA, 15 bp, Homo sapiens
tggcaacatgaagcc

SEQ ID NO: 366923 - DNA, 15 bp, Homo sapiens
gtggcaacatgaagc

SEQ ID NO: 366924 - DNA, 15 bp, Homo sapiens
agtggcaacatgaag

SEQ ID NO: 366925 - DNA, 15 bp, Homo sapiens
aagtggcaacatgaa

SEQ ID NO: 366926 - DNA, 15 bp, Homo sapiens
gaagtggcaacatga

SEQ ID NO: 366927 - DNA, 15 bp, Homo sapiens
agaagtggcaacatg

SEQ ID NO: 366928 - DNA, 15 bp, Homo sapiens
cagaagtggcaacat

SEQ ID NO: 366929 - DNA, 15 bp, Homo sapiens
acagaagtggcaaca

SEQ ID NO: 366930 - DNA, 15 bp, Homo sapiens
aacagaagtggcaac

SEQ ID NO: 366931 - DNA, 15 bp, Homo sapiens
aaacagaagtggcaa

SEQ ID NO: 366932 - DNA, 15 bp, Homo sapiens
gaaacagaagtggca

SEQ ID NO: 366933 - DNA, 15 bp, Homo sapiens
ggaaacagaagtggc

SEQ ID NO: 366934 - DNA, 15 bp, Homo sapiens
tggaaacagaagtgg

SEQ ID NO: 366935 - DNA, 15 bp, Homo sapiens
ctggaaacagaagtg

SEQ ID NO: 366936 - DNA, 15 bp, Homo sapiens
cctggaaacagaagt

SEQ ID NO: 366937 - DNA, 15 bp, Homo sapiens
ccctggaaacagaag

SEQ ID NO: 366938 - DNA, 15 bp, Homo sapiens
ccaccctggaaacag

SEQ ID NO: 366939 - DNA, 15 bp, Homo sapiens
cccaccctggaaaca

SEQ ID NO: 366940 - DNA, 15 bp, Homo sapiens
ccccaccctggaaac

SEQ ID NO: 366941 - DNA, 15 bp, Homo sapiens
cccccaccctggaaa

SEQ ID NO: 366942 - DNA, 15 bp, Homo sapiens
gcccccaccctggaa

SEQ ID NO: 366943 - DNA, 15 bp, Homo sapiens
cgcccccaccctgga

SEQ ID NO: 366944 - DNA, 15 bp, Homo sapiens
ccgcccccaccctgg

SEQ ID NO: 366945 - DNA, 15 bp, Homo sapiens
tccgcccccaccctg

SEQ ID NO: 366946 - DNA, 15 bp, Homo sapiens
ctccgcccccaccct

SEQ ID NO: 366947 - DNA, 15 bp, Homo sapiens
actccgcccccaccc

SEQ ID NO: 366948 - DNA, 15 bp, Homo sapiens
aactccgcccccacc

SEQ ID NO: 366949 - DNA, 15 bp, Homo sapiens
aaactccgcccccac

SEQ ID NO: 366950 - DNA, 15 bp, Homo sapiens
gaaactccgccccca

SEQ ID NO: 366951 - DNA, 15 bp, Homo sapiens
agaaactccgccccc

SEQ ID NO: 366952 - DNA, 15 bp, Homo sapiens
aagaaactccgcccc

SEQ ID NO: 366953 - DNA, 15 bp, Homo sapiens
gaagaaactccgccc

SEQ ID NO: 366954 - DNA, 15 bp, Homo sapiens
ggaagaaactccgcc

SEQ ID NO: 366955 - DNA, 15 bp, Homo sapiens
gggaagaaactccgc

SEQ ID NO: 366956 - DNA, 15 bp, Homo sapiens
agggaagaaactccg

SEQ ID NO: 366957 - DNA, 15 bp, Homo sapiens
cagggaagaaactcc

SEQ ID NO: 366958 - DNA, 15 bp, Homo sapiens
gcagggaagaaactc

SEQ ID NO: 366959 - DNA, 15 bp, Homo sapiens
tgcagggaagaaact

SEQ ID NO: 366960 - DNA, 15 bp, Homo sapiens
gtgcagggaagaaac

SEQ ID NO: 366961 - DNA, 15 bp, Homo sapiens
ggtgcagggaagaaa

SEQ ID NO: 366962 - DNA, 15 bp, Homo sapiens
gggtgcagggaagaa

SEQ ID NO: 366963 - DNA, 15 bp, Homo sapiens
ggggtgcagggaaga

SEQ ID NO: 366964 - DNA, 15 bp, Homo sapiens
gggggtgcagggaag

SEQ ID NO: 366965 - DNA, 15 bp, Homo sapiens
tgggggtgcagggaa

SEQ ID NO: 366966 - DNA, 15 bp, Homo sapiens
ttgggggtgcaggga

SEQ ID NO: 366967 - DNA, 15 bp, Homo sapiens
gttgggggtgcaggg

SEQ ID NO: 366968 - DNA, 15 bp, Homo sapiens
tgttgggggtgcagg

SEQ ID NO: 366969 - DNA, 15 bp, Homo sapiens
ttgttgggggtgcag

SEQ ID NO: 366970 - DNA, 15 bp, Homo sapiens
tttgttgggggtgca

SEQ ID NO: 366971 - DNA, 15 bp, Homo sapiens
gtttgttgggggtgc

SEQ ID NO: 366972 - DNA, 15 bp, Homo sapiens
tgtttgttgggggtg

SEQ ID NO: 366973 - DNA, 15 bp, Homo sapiens
gtgtttgttgggggt

SEQ ID NO: 366974 - DNA, 15 bp, Homo sapiens
agtgtttgttggggg

SEQ ID NO: 366975 - DNA, 15 bp, Homo sapiens
cagtgtttgttgggg

SEQ ID NO: 366976 - DNA, 15 bp, Homo sapiens
acagtgtttgttggg

SEQ ID NO: 366977 - DNA, 15 bp, Homo sapiens
tccacagtgtttgtt

SEQ ID NO: 366978 - DNA, 15 bp, Homo sapiens
ttccacagtgtttgt

SEQ ID NO: 366979 - DNA, 15 bp, Homo sapiens
attccacagtgtttg

SEQ ID NO: 366980 - DNA, 15 bp, Homo sapiens
cattccacagtgttt

SEQ ID NO: 366981 - DNA, 15 bp, Homo sapiens
ccattccacagtgtt

SEQ ID NO: 366982 - DNA, 15 bp, Homo sapiens
cccattccacagtgt

SEQ ID NO: 366983 - DNA, 15 bp, Homo sapiens
acccattccacagtg

SEQ ID NO: 366984 - DNA, 15 bp, Homo sapiens
aacccattccacagt

SEQ ID NO: 366985 - DNA, 15 bp, Homo sapiens
aaacccattccacag

SEQ ID NO: 366986 - DNA, 15 bp, Homo sapiens
gaaacccattccaca

SEQ ID NO: 366987 - DNA, 15 bp, Homo sapiens
agaaacccattccac

SEQ ID NO: 366988 - DNA, 15 bp, Homo sapiens
aagaaacccattcca

SEQ ID NO: 366989 - DNA, 15 bp, Homo sapiens
taagaaacccattcc

SEQ ID NO: 366990 - DNA, 15 bp, Homo sapiens
ataagaaacccattc

SEQ ID NO: 366991 - DNA, 15 bp, Homo sapiens
cataagaaacccatt

SEQ ID NO: 366992 - DNA, 15 bp, Homo sapiens
gcataagaaacccat

SEQ ID NO: 366993 - DNA, 15 bp, Homo sapiens
tgcataagaaaccca

SEQ ID NO: 366994 - DNA, 15 bp, Homo sapiens
atgcataagaaaccc

SEQ ID NO: 366995 - DNA, 15 bp, Homo sapiens
tatgcataagaaacc

SEQ ID NO: 366996 - DNA, 15 bp, Homo sapiens
ctatgcataagaaac

SEQ ID NO: 366997 - DNA, 15 bp, Homo sapiens
tctatgcataagaaa

SEQ ID NO: 366998 - DNA, 15 bp, Homo sapiens
ttctatgcataagaa

SEQ ID NO: 366999 - DNA, 15 bp, Homo sapiens
cttctatgcataaga

SEQ ID NO: 367000 - DNA, 15 bp, Homo sapiens
ccttctatgcataag

SEQ ID NO: 367001 - DNA, 15 bp, Homo sapiens
tccttctatgcataa

SEQ ID NO: 367002 - DNA, 15 bp, Homo sapiens
ctccttctatgcata

SEQ ID NO: 367003 - DNA, 15 bp, Homo sapiens
actccttctatgcat

SEQ ID NO: 367004 - DNA, 15 bp, Homo sapiens
aactccttctatgca

SEQ ID NO: 367005 - DNA, 15 bp, Homo sapiens
taactccttctatgc

SEQ ID NO: 367006 - DNA, 15 bp, Homo sapiens
ttaactccttctatg

SEQ ID NO: 367007 - DNA, 15 bp, Homo sapiens
tttaactccttctat

SEQ ID NO: 367008 - DNA, 15 bp, Homo sapiens
ttttaactccttcta

SEQ ID NO: 367009 - DNA, 15 bp, Homo sapiens
tttttaactccttct

SEQ ID NO: 367010 - DNA, 15 bp, Homo sapiens
ctttttaactccttc

SEQ ID NO: 367011 - DNA, 15 bp, Homo sapiens
cctttttaactcctt

SEQ ID NO: 367012 - DNA, 15 bp, Homo sapiens
tcctttttaactcct

SEQ ID NO: 367013 - DNA, 15 bp, Homo sapiens
ttcctttttaactcc

SEQ ID NO: 367014 - DNA, 15 bp, Homo sapiens
gttcctttttaactc

SEQ ID NO: 367015 - DNA, 15 bp, Homo sapiens
tgttcctttttaact

SEQ ID NO: 367016 - DNA, 15 bp, Homo sapiens
ctgttcctttttaac

SEQ ID NO: 367017 - DNA, 15 bp, Homo sapiens
tctgttcctttttaa

SEQ ID NO: 367018 - DNA, 15 bp, Homo sapiens
ttctgttccttttta

SEQ ID NO: 367019 - DNA, 15 bp, Homo sapiens
tttctgttccttttt

SEQ ID NO: 367020 - DNA, 15 bp, Homo sapiens
ttttctgttcctttt

SEQ ID NO: 367021 - DNA, 15 bp, Homo sapiens
gttttctgttccttt

SEQ ID NO: 367022 - DNA, 15 bp, Homo sapiens
tgttttctgttcctt

SEQ ID NO: 367023 - DNA, 15 bp, Homo sapiens
ctgttttctgttcct

SEQ ID NO: 367024 - DNA, 15 bp, Homo sapiens
gctgttttctgttcc

SEQ ID NO: 367025 - DNA, 15 bp, Homo sapiens
tgctgttttctgttc

SEQ ID NO: 367026 - DNA, 15 bp, Homo sapiens
ctgctgttttctgtt

SEQ ID NO: 367027 - DNA, 15 bp, Homo sapiens
tctgctgttttctgt

SEQ ID NO: 367028 - DNA, 15 bp, Homo sapiens
atctgctgttttctg

SEQ ID NO: 367029 - DNA, 15 bp, Homo sapiens
tatctgctgttttct

SEQ ID NO: 367030 - DNA, 15 bp, Homo sapiens
atatctgctgttttc

SEQ ID NO: 367031 - DNA, 15 bp, Homo sapiens
gatatctgctgtttt

SEQ ID NO: 367032 - DNA, 15 bp, Homo sapiens
tgatatctgctgttt

SEQ ID NO: 367033 - DNA, 15 bp, Homo sapiens
ttgatatctgctgtt

SEQ ID NO: 367034 - DNA, 15 bp, Homo sapiens
gttgatatctgctgt

SEQ ID NO: 367035 - DNA, 15 bp, Homo sapiens
agttgatatctgctg

SEQ ID NO: 367036 - DNA, 15 bp, Homo sapiens
tagttgatatctgct

SEQ ID NO: 367037 - DNA, 15 bp, Homo sapiens
atagttgatatctgc

SEQ ID NO: 367038 - DNA, 15 bp, Homo sapiens
gatagttgatatctg

SEQ ID NO: 367039 - DNA, 15 bp, Homo sapiens
ggatagttgatatct

SEQ ID NO: 367040 - DNA, 15 bp, Homo sapiens
aggatagttgatatc

SEQ ID NO: 367041 - DNA, 15 bp, Homo sapiens
caggatagttgatat

SEQ ID NO: 367042 - DNA, 15 bp, Homo sapiens
ccaggatagttgata

SEQ ID NO: 367043 - DNA, 15 bp, Homo sapiens
accaggatagttgat

SEQ ID NO: 367044 - DNA, 15 bp, Homo sapiens
aaccaggatagttga

SEQ ID NO: 367045 - DNA, 15 bp, Homo sapiens
gaaccaggatagttg

SEQ ID NO: 367046 - DNA, 15 bp, Homo sapiens
agaaccaggatagtt

SEQ ID NO: 367047 - DNA, 15 bp, Homo sapiens
cagaaccaggatagt

SEQ ID NO: 367048 - DNA, 15 bp, Homo sapiens
gcagaaccaggatag

SEQ ID NO: 367049 - DNA, 15 bp, Homo sapiens
agcagaaccaggata

SEQ ID NO: 367050 - DNA, 15 bp, Homo sapiens
cagcagaaccaggat

SEQ ID NO: 367051 - DNA, 15 bp, Homo sapiens
gcagcagaaccagga

SEQ ID NO: 367052 - DNA, 15 bp, Homo sapiens
agcagcagaaccagg

SEQ ID NO: 367053 - DNA, 15 bp, Homo sapiens
tagcagcagaaccag

SEQ ID NO: 367054 - DNA, 15 bp, Homo sapiens
ttagcagcagaacca

SEQ ID NO: 367055 - DNA, 15 bp, Homo sapiens
gttagcagcagaacc

SEQ ID NO: 367056 - DNA, 15 bp, Homo sapiens
agttagcagcagaac

SEQ ID NO: 367057 - DNA, 15 bp, Homo sapiens
cagttagcagcagaa

SEQ ID NO: 367058 - DNA, 15 bp, Homo sapiens
ccagttagcagcaga

SEQ ID NO: 367059 - DNA, 15 bp, Homo sapiens
accagttagcagcag

SEQ ID NO: 367060 - DNA, 15 bp, Homo sapiens
aaccagttagcagca

SEQ ID NO: 367061 - DNA, 15 bp, Homo sapiens
gaaccagttagcagc

SEQ ID NO: 367062 - DNA, 15 bp, Homo sapiens
agaaccagttagcag

SEQ ID NO: 367063 - DNA, 15 bp, Homo sapiens
cagaaccagttagca

SEQ ID NO: 367064 - DNA, 15 bp, Homo sapiens
acagaaccagttagc

SEQ ID NO: 367065 - DNA, 15 bp, Homo sapiens
cacagaaccagttag

SEQ ID NO: 367066 - DNA, 15 bp, Homo sapiens
tcacagaaccagtta

SEQ ID NO: 367067 - DNA, 15 bp, Homo sapiens
gtcacagaaccagtt

SEQ ID NO: 367068 - DNA, 15 bp, Homo sapiens
ggtcacagaaccagt

SEQ ID NO: 367069 - DNA, 15 bp, Homo sapiens
aggtcacagaaccag

SEQ ID NO: 367070 - DNA, 15 bp, Homo sapiens
aaggtcacagaacca

SEQ ID NO: 367071 - DNA, 15 bp, Homo sapiens
caaggtcacagaacc

SEQ ID NO: 367072 - DNA, 15 bp, Homo sapiens
ccaaggtcacagaac

SEQ ID NO: 367073 - DNA, 15 bp, Homo sapiens
tccaaggtcacagaa

SEQ ID NO: 367074 - DNA, 15 bp, Homo sapiens
atccaaggtcacaga

SEQ ID NO: 367075 - DNA, 15 bp, Homo sapiens
tatccaaggtcacag

SEQ ID NO: 367076 - DNA, 15 bp, Homo sapiens
atatccaaggtcaca

SEQ ID NO: 367077 - DNA, 15 bp, Homo sapiens
tatatccaaggtcac

SEQ ID NO: 367078 - DNA, 15 bp, Homo sapiens
ttatatccaaggtca

SEQ ID NO: 367079 - DNA, 15 bp, Homo sapiens
attatatccaaggtc

SEQ ID NO: 367080 - DNA, 15 bp, Homo sapiens
tattatatccaaggt

SEQ ID NO: 367081 - DNA, 15 bp, Homo sapiens
ttattatatccaagg

SEQ ID NO: 367082 - DNA, 15 bp, Homo sapiens
gttattatatccaag

SEQ ID NO: 367083 - DNA, 15 bp, Homo sapiens
agttattatatccaa

SEQ ID NO: 367084 - DNA, 15 bp, Homo sapiens
aagttattatatcca

SEQ ID NO: 367085 - DNA, 15 bp, Homo sapiens
gaagttattatatcc

SEQ ID NO: 367086 - DNA, 15 bp, Homo sapiens
agaagttattatatc

SEQ ID NO: 367087 - DNA, 15 bp, Homo sapiens
gagaagttattatat

SEQ ID NO: 367088 - DNA, 15 bp, Homo sapiens
ggagaagttattata

SEQ ID NO: 367089 - DNA, 15 bp, Homo sapiens
tggagaagttattat

SEQ ID NO: 367090 - DNA, 15 bp, Homo sapiens
atggagaagttatta

SEQ ID NO: 367091 - DNA, 15 bp, Homo sapiens
aatggagaagttatt

SEQ ID NO: 367092 - DNA, 15 bp, Homo sapiens
gaatggagaagttat

SEQ ID NO: 367093 - DNA, 15 bp, Homo sapiens
agaatggagaagtta

SEQ ID NO: 367094 - DNA, 15 bp, Homo sapiens
tagaatggagaagtt

SEQ ID NO: 367095 - DNA, 15 bp, Homo sapiens
ttagaatggagaagt

SEQ ID NO: 367096 - DNA, 15 bp, Homo sapiens
cttagaatggagaag

SEQ ID NO: 367097 - DNA, 15 bp, Homo sapiens
gcttagaatggagaa

SEQ ID NO: 367098 - DNA, 15 bp, Homo sapiens
ggcttagaatggaga

SEQ ID NO: 367099 - DNA, 15 bp, Homo sapiens
aggcttagaatggag

SEQ ID NO: 367100 - DNA, 15 bp, Homo sapiens
gaggcttagaatgga

SEQ ID NO: 367101 - DNA, 15 bp, Homo sapiens
tgaggcttagaatgg

SEQ ID NO: 367102 - DNA, 15 bp, Homo sapiens
ctgaggcttagaatg

SEQ ID NO: 367103 - DNA, 15 bp, Homo sapiens
actgaggcttagaat

SEQ ID NO: 367104 - DNA, 15 bp, Homo sapiens
aactgaggcttagaa

SEQ ID NO: 367105 - DNA, 15 bp, Homo sapiens
agaaactgaggctta

SEQ ID NO: 367106 - DNA, 15 bp, Homo sapiens
aagaaactgaggctt

SEQ ID NO: 367107 - DNA, 15 bp, Homo sapiens
gaagaaactgaggct

SEQ ID NO: 367108 - DNA, 15 bp, Homo sapiens
tcaaatgaagaaact

SEQ ID NO: 367109 - DNA, 15 bp, Homo sapiens
ttcaaatgaagaaac

SEQ ID NO: 367110 - DNA, 15 bp, Homo sapiens
cttcaaatgaagaaa

SEQ ID NO: 367111 - DNA, 15 bp, Homo sapiens
tcttcaaatgaagaa

SEQ ID NO: 367112 - DNA, 15 bp, Homo sapiens
ttcttcaaatgaaga

SEQ ID NO: 367113 - DNA, 15 bp, Homo sapiens
attcttcaaatgaag

SEQ ID NO: 367114 - DNA, 15 bp, Homo sapiens
cattcttcaaatgaa

SEQ ID NO: 367115 - DNA, 15 bp, Homo sapiens
ccattcttcaaatga

SEQ ID NO: 367116 - DNA, 15 bp, Homo sapiens
tccattcttcaaatg

SEQ ID NO: 367117 - DNA, 15 bp, Homo sapiens
ctccattcttcaaat

SEQ ID NO: 367118 - DNA, 15 bp, Homo sapiens
cctccattcttcaaa

SEQ ID NO: 367119 - DNA, 15 bp, Homo sapiens
tcctccattcttcaa

SEQ ID NO: 367120 - DNA, 15 bp, Homo sapiens
ttcctccattcttca

SEQ ID NO: 367121 - DNA, 15 bp, Homo sapiens
attcctccattcttc

SEQ ID NO: 367122 - DNA, 15 bp, Homo sapiens
aattcctccattctt

SEQ ID NO: 367123 - DNA, 15 bp, Homo sapiens
caattcctccattct

SEQ ID NO: 367124 - DNA, 15 bp, Homo sapiens
tcaattcctccattc

SEQ ID NO: 367125 - DNA, 15 bp, Homo sapiens
atcaattcctccatt

SEQ ID NO: 367126 - DNA, 15 bp, Homo sapiens
aatcaattcctccat

SEQ ID NO: 367127 - DNA, 15 bp, Homo sapiens
taatcaattcctcca

SEQ ID NO: 367128 - DNA, 15 bp, Homo sapiens
ctaatcaattcctcc

SEQ ID NO: 367129 - DNA, 15 bp, Homo sapiens
tctaatcaattcctc

SEQ ID NO: 367130 - DNA, 15 bp, Homo sapiens
ctctaatcaattcct

SEQ ID NO: 367131 - DNA, 15 bp, Homo sapiens
cctctaatcaattcc

SEQ ID NO: 367132 - DNA, 15 bp, Homo sapiens
tcctctaatcaattc

SEQ ID NO: 367133 - DNA, 15 bp, Homo sapiens
atcctctaatcaatt

SEQ ID NO: 367134 - DNA, 15 bp, Homo sapiens
aatcctctaatcaat

SEQ ID NO: 367135 - DNA, 15 bp, Homo sapiens
aaatcctctaatcaa

SEQ ID NO: 367136 - DNA, 15 bp, Homo sapiens
aaaatcctctaatca

SEQ ID NO: 367137 - DNA, 15 bp, Homo sapiens
caaaatcctctaatc

SEQ ID NO: 367138 - DNA, 15 bp, Homo sapiens
tcaaaatcctctaat

SEQ ID NO: 367139 - DNA, 15 bp, Homo sapiens
ttcaaaatcctctaa

SEQ ID NO: 367140 - DNA, 15 bp, Homo sapiens
tttcaaaatcctcta

SEQ ID NO: 367141 - DNA, 15 bp, Homo sapiens
ttttcaaaatcctct

SEQ ID NO: 367142 - DNA, 15 bp, Homo sapiens
gttttcaaaatcctc

SEQ ID NO: 367143 - DNA, 15 bp, Homo sapiens
agttttcaaaatcct

SEQ ID NO: 367144 - DNA, 15 bp, Homo sapiens
gagttttcaaaatcc

SEQ ID NO: 367145 - DNA, 15 bp, Homo sapiens
agagttttcaaaatc

SEQ ID NO: 367146 - DNA, 15 bp, Homo sapiens
gagagttttcaaaat

SEQ ID NO: 367147 - DNA, 15 bp, Homo sapiens
cgagagttttcaaaa

SEQ ID NO: 367148 - DNA, 15 bp, Homo sapiens
acgagagttttcaaa

SEQ ID NO: 367149 - DNA, 15 bp, Homo sapiens
cacgagagttttcaa

SEQ ID NO: 367150 - DNA, 15 bp, Homo sapiens
acacgagagttttca

SEQ ID NO: 367151 - DNA, 15 bp, Homo sapiens
aacacgagagttttc

SEQ ID NO: 367152 - DNA, 15 bp, Homo sapiens
aaacacgagagtttt

SEQ ID NO: 367153 - DNA, 15 bp, Homo sapiens
gaaacacgagagttt

SEQ ID NO: 367154 - DNA, 15 bp, Homo sapiens
agaaacacgagagtt

SEQ ID NO: 367155 - DNA, 15 bp, Homo sapiens
tagaaacacgagagt

SEQ ID NO: 367156 - DNA, 15 bp, Homo sapiens
ctagaaacacgagag

SEQ ID NO: 367157 - DNA, 15 bp, Homo sapiens
gctagaaacacgaga

SEQ ID NO: 367158 - DNA, 15 bp, Homo sapiens
tgctagaaacacgag

SEQ ID NO: 367159 - DNA, 15 bp, Homo sapiens
atgctagaaacacga

SEQ ID NO: 367160 - DNA, 15 bp, Homo sapiens
tatgctagaaacacg

SEQ ID NO: 367161 - DNA, 15 bp, Homo sapiens
ctatgctagaaacac

SEQ ID NO: 367162 - DNA, 15 bp, Homo sapiens
tctatgctagaaaca

SEQ ID NO: 367163 - DNA, 15 bp, Homo sapiens
ttctatgctagaaac

SEQ ID NO: 367164 - DNA, 15 bp, Homo sapiens
attctatgctagaaa

SEQ ID NO: 367165 - DNA, 15 bp, Homo sapiens
cattctatgctagaa

SEQ ID NO: 367166 - DNA, 15 bp, Homo sapiens
tcattctatgctaga

SEQ ID NO: 367167 - DNA, 15 bp, Homo sapiens
atcattctatgctag

SEQ ID NO: 367168 - DNA, 15 bp, Homo sapiens
aatcattctatgcta

SEQ ID NO: 367169 - DNA, 15 bp, Homo sapiens
caatcattctatgct

SEQ ID NO: 367170 - DNA, 15 bp, Homo sapiens
gcaatcattctatgc

SEQ ID NO: 367171 - DNA, 15 bp, Homo sapiens
agcaatcattctatg

SEQ ID NO: 367172 - DNA, 15 bp, Homo sapiens
cagcaatcattctat

SEQ ID NO: 367173 - DNA, 15 bp, Homo sapiens
tcagcaatcattcta

SEQ ID NO: 367174 - DNA, 15 bp, Homo sapiens
ttcagcaatcattct

SEQ ID NO: 367175 - DNA, 15 bp, Homo sapiens
cttcagcaatcattc

SEQ ID NO: 367176 - DNA, 15 bp, Homo sapiens
tcttcagcaatcatt

SEQ ID NO: 367177 - DNA, 15 bp, Homo sapiens
ctcttcagcaatcat

SEQ ID NO: 367178 - DNA, 15 bp, Homo sapiens
cctcttcagcaatca

SEQ ID NO: 367179 - DNA, 15 bp, Homo sapiens
gcctcttcagcaatc

SEQ ID NO: 367180 - DNA, 15 bp, Homo sapiens
tgcctcttcagcaat

SEQ ID NO: 367181 - DNA, 15 bp, Homo sapiens
ttgcctcttcagcaa

SEQ ID NO: 367182 - DNA, 15 bp, Homo sapiens
tttgcctcttcagca

SEQ ID NO: 367183 - DNA, 15 bp, Homo sapiens
ttttgcctcttcagc

SEQ ID NO: 367184 - DNA, 15 bp, Homo sapiens
cttttgcctcttcag

SEQ ID NO: 367185 - DNA, 15 bp, Homo sapiens
tcttttgcctcttca

SEQ ID NO: 367186 - DNA, 15 bp, Homo sapiens
gtcttttgcctcttc

SEQ ID NO: 367187 - DNA, 15 bp, Homo sapiens
tgtcttttgcctctt

SEQ ID NO: 367188 - DNA, 15 bp, Homo sapiens
gtgtcttttgcctct

SEQ ID NO: 367189 - DNA, 15 bp, Homo sapiens
ggtgtcttttgcctc

SEQ ID NO: 367190 - DNA, 15 bp, Homo sapiens
aggtgtcttttgcct

SEQ ID NO: 367191 - DNA, 15 bp, Homo sapiens
aaggtgtcttttgcc

SEQ ID NO: 367192 - DNA, 15 bp, Homo sapiens
taaggtgtcttttgc

SEQ ID NO: 367193 - DNA, 15 bp, Homo sapiens
ataaggtgtcttttg

SEQ ID NO: 367194 - DNA, 15 bp, Homo sapiens
cataaggtgtctttt

SEQ ID NO: 367195 - DNA, 15 bp, Homo sapiens
ccataaggtgtcttt

SEQ ID NO: 367196 - DNA, 15 bp, Homo sapiens
accataaggtgtctt

SEQ ID NO: 367197 - DNA, 15 bp, Homo sapiens
aaccataaggtgtct

SEQ ID NO: 367198 - DNA, 15 bp, Homo sapiens
aaaccataaggtgtc

SEQ ID NO: 367199 - DNA, 15 bp, Homo sapiens
caaaccataaggtgt

SEQ ID NO: 367200 - DNA, 15 bp, Homo sapiens
ccaaaccataaggtg

SEQ ID NO: 367201 - DNA, 15 bp, Homo sapiens
gccaaaccataaggt

SEQ ID NO: 367202 - DNA, 15 bp, Homo sapiens
agccaaaccataagg

SEQ ID NO: 367203 - DNA, 15 bp, Homo sapiens
gagccaaaccataag

SEQ ID NO: 367204 - DNA, 15 bp, Homo sapiens
tgagccaaaccataa

SEQ ID NO: 367205 - DNA, 15 bp, Homo sapiens
ctgagccaaaccata

SEQ ID NO: 367206 - DNA, 15 bp, Homo sapiens
cctgagccaaaccat

SEQ ID NO: 367207 - DNA, 15 bp, Homo sapiens
tcctgagccaaacca

SEQ ID NO: 367208 - DNA, 15 bp, Homo sapiens
ctcctgagccaaacc

SEQ ID NO: 367209 - DNA, 15 bp, Homo sapiens
actcctgagccaaac

SEQ ID NO: 367210 - DNA, 15 bp, Homo sapiens
gactcctgagccaaa

SEQ ID NO: 367211 - DNA, 15 bp, Homo sapiens
tgactcctgagccaa

SEQ ID NO: 367212 - DNA, 15 bp, Homo sapiens
gtgactcctgagcca

SEQ ID NO: 367213 - DNA, 15 bp, Homo sapiens
tgtgactcctgagcc

SEQ ID NO: 367214 - DNA, 15 bp, Homo sapiens
ctgtgactcctgagc

SEQ ID NO: 367215 - DNA, 15 bp, Homo sapiens
tctgtgactcctgag

SEQ ID NO: 367216 - DNA, 15 bp, Homo sapiens
ttctgtgactcctga

SEQ ID NO: 367217 - DNA, 15 bp, Homo sapiens
attctgtgactcctg

SEQ ID NO: 367218 - DNA, 15 bp, Homo sapiens
aattctgtgactcct

SEQ ID NO: 367219 - DNA, 15 bp, Homo sapiens
taattctgtgactcc

SEQ ID NO: 367220 - DNA, 15 bp, Homo sapiens
ataattctgtgactc

SEQ ID NO: 367221 - DNA, 15 bp, Homo sapiens
gataattctgtgact

SEQ ID NO: 367222 - DNA, 15 bp, Homo sapiens
agataattctgtgac

SEQ ID NO: 367223 - DNA, 15 bp, Homo sapiens
cagataattctgtga

SEQ ID NO: 367224 - DNA, 15 bp, Homo sapiens
acagataattctgtg

SEQ ID NO: 367225 - DNA, 15 bp, Homo sapiens
aacagataattctgt

SEQ ID NO: 367226 - DNA, 15 bp, Homo sapiens
aaacagataattctg

SEQ ID NO: 367227 - DNA, 15 bp, Homo sapiens
taaacagataattct

SEQ ID NO: 367228 - DNA, 15 bp, Homo sapiens
ataaacagataattc

SEQ ID NO: 367229 - DNA, 15 bp, Homo sapiens
tataaacagataatt

SEQ ID NO: 367230 - DNA, 15 bp, Homo sapiens
gtataaacagataat

SEQ ID NO: 367231 - DNA, 15 bp, Homo sapiens
tgtataaacagataa

SEQ ID NO: 367232 - DNA, 15 bp, Homo sapiens
ctgtataaacagata

SEQ ID NO: 367233 - DNA, 15 bp, Homo sapiens
actgtataaacagat

SEQ ID NO: 367234 - DNA, 15 bp, Homo sapiens
aactgtataaacaga

SEQ ID NO: 367235 - DNA, 15 bp, Homo sapiens
aaactgtataaacag

SEQ ID NO: 367236 - DNA, 15 bp, Homo sapiens
gaaactgtataaaca

SEQ ID NO: 367237 - DNA, 15 bp, Homo sapiens
ggaaactgtataaac

SEQ ID NO: 367238 - DNA, 15 bp, Homo sapiens
tggaaactgtataaa

SEQ ID NO: 367239 - DNA, 15 bp, Homo sapiens
ttggaaactgtataa

SEQ ID NO: 367240 - DNA, 15 bp, Homo sapiens
cttggaaactgtata

SEQ ID NO: 367241 - DNA, 15 bp, Homo sapiens
gcttggaaactgtat

SEQ ID NO: 367242 - DNA, 15 bp, Homo sapiens
tgcttggaaactgta

SEQ ID NO: 367243 - DNA, 15 bp, Homo sapiens
gtgcttggaaactgt

SEQ ID NO: 367244 - DNA, 15 bp, Homo sapiens
agtgcttggaaactg

SEQ ID NO: 367245 - DNA, 15 bp, Homo sapiens
cagtgcttggaaact

SEQ ID NO: 367246 - DNA, 15 bp, Homo sapiens
acagtgcttggaaac

SEQ ID NO: 367247 - DNA, 15 bp, Homo sapiens
gacagtgcttggaaa

SEQ ID NO: 367248 - DNA, 15 bp, Homo sapiens
tgacagtgcttggaa

SEQ ID NO: 367249 - DNA, 15 bp, Homo sapiens
atgacagtgcttgga

SEQ ID NO: 367250 - DNA, 15 bp, Homo sapiens
aatgacagtgcttgg

SEQ ID NO: 367251 - DNA, 15 bp, Homo sapiens
taatgacagtgcttg

SEQ ID NO: 367252 - DNA, 15 bp, Homo sapiens
ctaatgacagtgctt

SEQ ID NO: 367253 - DNA, 15 bp, Homo sapiens
cctaatgacagtgct

SEQ ID NO: 367254 - DNA, 15 bp, Homo sapiens
gcctaatgacagtgc

SEQ ID NO: 367255 - DNA, 15 bp, Homo sapiens
agcctaatgacagtg

SEQ ID NO: 367256 - DNA, 15 bp, Homo sapiens
aagcctaatgacagt

SEQ ID NO: 367257 - DNA, 15 bp, Homo sapiens
aaagcctaatgacag

SEQ ID NO: 367258 - DNA, 15 bp, Homo sapiens
caaagcctaatgaca

SEQ ID NO: 367259 - DNA, 15 bp, Homo sapiens
acaaagcctaatgac

SEQ ID NO: 367260 - DNA, 15 bp, Homo sapiens
cacaaagcctaatga

SEQ ID NO: 367261 - DNA, 15 bp, Homo sapiens
gcacaaagcctaatg

SEQ ID NO: 367262 - DNA, 15 bp, Homo sapiens
cgcacaaagcctaat

SEQ ID NO: 367263 - DNA, 15 bp, Homo sapiens
ccgcacaaagcctaa

SEQ ID NO: 367264 - DNA, 15 bp, Homo sapiens
cccgcacaaagccta

SEQ ID NO: 367265 - DNA, 15 bp, Homo sapiens
ccccgcacaaagcct

SEQ ID NO: 367266 - DNA, 15 bp, Homo sapiens
cccccgcacaaagcc

SEQ ID NO: 367267 - DNA, 15 bp, Homo sapiens
tcccccgcacaaagc

SEQ ID NO: 367268 - DNA, 15 bp, Homo sapiens
ctcccccgcacaaag

SEQ ID NO: 367269 - DNA, 15 bp, Homo sapiens
actcccccgcacaaa

SEQ ID NO: 367270 - DNA, 15 bp, Homo sapiens
gactcccccgcacaa

SEQ ID NO: 367271 - DNA, 15 bp, Homo sapiens
tgactcccccgcaca

SEQ ID NO: 367272 - DNA, 15 bp, Homo sapiens
gtgactcccccgcac

SEQ ID NO: 367273 - DNA, 15 bp, Homo sapiens
tgtgactcccccgca

SEQ ID NO: 367274 - DNA, 15 bp, Homo sapiens
ttgtgactcccccgc

SEQ ID NO: 367275 - DNA, 15 bp, Homo sapiens
tttgtgactcccccg

SEQ ID NO: 367276 - DNA, 15 bp, Homo sapiens
atttgtgactccccc

SEQ ID NO: 367277 - DNA, 15 bp, Homo sapiens
aatttgtgactcccc

SEQ ID NO: 367278 - DNA, 15 bp, Homo sapiens
caatttgtgactccc

SEQ ID NO: 367279 - DNA, 15 bp, Homo sapiens
ccaatttgtgactcc

SEQ ID NO: 367280 - DNA, 15 bp, Homo sapiens
gccaatttgtgactc

SEQ ID NO: 367281 - DNA, 15 bp, Homo sapiens
tgccaatttgtgact

SEQ ID NO: 367282 - DNA, 15 bp, Homo sapiens
ctgccaatttgtgac

SEQ ID NO: 367283 - DNA, 15 bp, Homo sapiens
cctgccaatttgtga

SEQ ID NO: 367284 - DNA, 15 bp, Homo sapiens
ccctgccaatttgtg

SEQ ID NO: 367285 - DNA, 15 bp, Homo sapiens
cccctgccaatttgt

SEQ ID NO: 367286 - DNA, 15 bp, Homo sapiens
gcccctgccaatttg

SEQ ID NO: 367287 - DNA, 15 bp, Homo sapiens
tgcccctgccaattt

SEQ ID NO: 367288 - DNA, 15 bp, Homo sapiens
atgcccctgccaatt

SEQ ID NO: 367289 - DNA, 15 bp, Homo sapiens
aatgcccctgccaat

SEQ ID NO: 367290 - DNA, 15 bp, Homo sapiens
aaatgcccctgccaa

SEQ ID NO: 367291 - DNA, 15 bp, Homo sapiens
gaaatgcccctgcca

SEQ ID NO: 367292 - DNA, 15 bp, Homo sapiens
ggaaatgcccctgcc

SEQ ID NO: 367293 - DNA, 15 bp, Homo sapiens
gggaaatgcccctgc

SEQ ID NO: 367294 - DNA, 15 bp, Homo sapiens
ggggaaatgcccctg

SEQ ID NO: 367295 - DNA, 15 bp, Homo sapiens
cggggaaatgcccct

SEQ ID NO: 367296 - DNA, 15 bp, Homo sapiens
gcggggaaatgcccc

SEQ ID NO: 367297 - DNA, 15 bp, Homo sapiens
agcggggaaatgccc

SEQ ID NO: 367298 - DNA, 15 bp, Homo sapiens
aagcggggaaatgcc

SEQ ID NO: 367299 - DNA, 15 bp, Homo sapiens
gaagcggggaaatgc

SEQ ID NO: 367300 - DNA, 15 bp, Homo sapiens
ggaagcggggaaatg

SEQ ID NO: 367301 - DNA, 15 bp, Homo sapiens
gggaagcggggaaat

SEQ ID NO: 367302 - DNA, 15 bp, Homo sapiens
agggaagcggggaaa

SEQ ID NO: 367303 - DNA, 15 bp, Homo sapiens
gagggaagcggggaa

SEQ ID NO: 367304 - DNA, 15 bp, Homo sapiens
ggagggaagcgggga

SEQ ID NO: 367305 - DNA, 15 bp, Homo sapiens
aggagggaagcgggg

SEQ ID NO: 367306 - DNA, 15 bp, Homo sapiens
aaggagggaagcggg

SEQ ID NO: 367307 - DNA, 15 bp, Homo sapiens
caaggagggaagcgg

SEQ ID NO: 367308 - DNA, 15 bp, Homo sapiens
tcaaggagggaagcg

SEQ ID NO: 367309 - DNA, 15 bp, Homo sapiens
gtcaaggagggaagc

SEQ ID NO: 367310 - DNA, 15 bp, Homo sapiens
tgtcaaggagggaag

SEQ ID NO: 367311 - DNA, 15 bp, Homo sapiens
gtgtcaaggagggaa

SEQ ID NO: 367312 - DNA, 15 bp, Homo sapiens
agtgtcaaggaggga

SEQ ID NO: 367313 - DNA, 15 bp, Homo sapiens
cagtgtcaaggaggg

SEQ ID NO: 367314 - DNA, 15 bp, Homo sapiens
tcagtgtcaaggagg

SEQ ID NO: 367315 - DNA, 15 bp, Homo sapiens
gtcagtgtcaaggag

SEQ ID NO: 367316 - DNA, 15 bp, Homo sapiens
ggtcagtgtcaagga

SEQ ID NO: 367317 - DNA, 15 bp, Homo sapiens
aggtcagtgtcaagg

SEQ ID NO: 367318 - DNA, 15 bp, Homo sapiens
gaggtcagtgtcaag

SEQ ID NO: 367319 - DNA, 15 bp, Homo sapiens
ggaggtcagtgtcaa

SEQ ID NO: 367320 - DNA, 15 bp, Homo sapiens
tggaggtcagtgtca

SEQ ID NO: 367321 - DNA, 15 bp, Homo sapiens
ctggaggtcagtgtc

SEQ ID NO: 367322 - DNA, 15 bp, Homo sapiens
gctggaggtcagtgt

SEQ ID NO: 367323 - DNA, 15 bp, Homo sapiens
tgctggaggtcagtg

SEQ ID NO: 367324 - DNA, 15 bp, Homo sapiens
gtgctggaggtcagt

SEQ ID NO: 367325 - DNA, 15 bp, Homo sapiens
ggtgctggaggtcag

SEQ ID NO: 367326 - DNA, 15 bp, Homo sapiens
aggtgctggaggtca

SEQ ID NO: 367327 - DNA, 15 bp, Homo sapiens
aaggtgctggaggtc

SEQ ID NO: 367328 - DNA, 15 bp, Homo sapiens
caaggtgctggaggt

SEQ ID NO: 367329 - DNA, 15 bp, Homo sapiens
acaaggtgctggagg

SEQ ID NO: 367330 - DNA, 15 bp, Homo sapiens
aacaaggtgctggag

SEQ ID NO: 367331 - DNA, 15 bp, Homo sapiens
caacaaggtgctgga

SEQ ID NO: 367332 - DNA, 15 bp, Homo sapiens
ccaacaaggtgctgg

SEQ ID NO: 367333 - DNA, 15 bp, Homo sapiens
cccaacaaggtgctg

SEQ ID NO: 367334 - DNA, 15 bp, Homo sapiens
ccccaacaaggtgct

SEQ ID NO: 367335 - DNA, 15 bp, Homo sapiens
cccccaacaaggtgc

SEQ ID NO: 367336 - DNA, 15 bp, Homo sapiens
gcccccaacaaggtg

SEQ ID NO: 367337 - DNA, 15 bp, Homo sapiens
agcccccaacaaggt

SEQ ID NO: 367338 - DNA, 15 bp, Homo sapiens
tagcccccaacaagg

SEQ ID NO: 367339 - DNA, 15 bp, Homo sapiens
gtagcccccaacaag

SEQ ID NO: 367340 - DNA, 15 bp, Homo sapiens
ggtagcccccaacaa

SEQ ID NO: 367341 - DNA, 15 bp, Homo sapiens
aggtagcccccaaca

SEQ ID NO: 367342 - DNA, 15 bp, Homo sapiens
gaggtagcccccaac

SEQ ID NO: 367343 - DNA, 15 bp, Homo sapiens
agaggtagcccccaa

SEQ ID NO: 367344 - DNA, 15 bp, Homo sapiens
tagaggtagccccca

SEQ ID NO: 367345 - DNA, 15 bp, Homo sapiens
gtagaggtagccccc

SEQ ID NO: 367346 - DNA, 15 bp, Homo sapiens
ggtagaggtagcccc

SEQ ID NO: 367347 - DNA, 15 bp, Homo sapiens
gggtagaggtagccc

SEQ ID NO: 367348 - DNA, 15 bp, Homo sapiens
agggtagaggtagcc

SEQ ID NO: 367349 - DNA, 15 bp, Homo sapiens
cagggtagaggtagc

SEQ ID NO: 367350 - DNA, 15 bp, Homo sapiens
acagggtagaggtag

SEQ ID NO: 367351 - DNA, 15 bp, Homo sapiens
aacagggtagaggta

SEQ ID NO: 367352 - DNA, 15 bp, Homo sapiens
caacagggtagaggt

SEQ ID NO: 367353 - DNA, 15 bp, Homo sapiens
ccaacagggtagagg

SEQ ID NO: 367354 - DNA, 15 bp, Homo sapiens
cccaacagggtagag

SEQ ID NO: 367355 - DNA, 15 bp, Homo sapiens
ccccaacagggtaga

SEQ ID NO: 367356 - DNA, 15 bp, Homo sapiens
accccaacagggtag

SEQ ID NO: 367357 - DNA, 15 bp, Homo sapiens
caccccaacagggta

SEQ ID NO: 367358 - DNA, 15 bp, Homo sapiens
ccaccccaacagggt

SEQ ID NO: 367359 - DNA, 15 bp, Homo sapiens
gccaccccaacaggg

SEQ ID NO: 367360 - DNA, 15 bp, Homo sapiens
ggccaccccaacagg

SEQ ID NO: 367361 - DNA, 15 bp, Homo sapiens
aggccaccccaacag

SEQ ID NO: 367362 - DNA, 15 bp, Homo sapiens
aaggccaccccaaca

SEQ ID NO: 367363 - DNA, 15 bp, Homo sapiens
aaaggccaccccaac

SEQ ID NO: 367364 - DNA, 15 bp, Homo sapiens
caaaggccaccccaa

SEQ ID NO: 367365 - DNA, 15 bp, Homo sapiens
ccaaaggccacccca

SEQ ID NO: 367366 - DNA, 15 bp, Homo sapiens
cccaaaggccacccc

SEQ ID NO: 367367 - DNA, 15 bp, Homo sapiens
ccccaaaggccaccc

SEQ ID NO: 367368 - DNA, 15 bp, Homo sapiens
tccccaaaggccacc

SEQ ID NO: 367369 - DNA, 15 bp, Homo sapiens
ctccccaaaggccac

SEQ ID NO: 367370 - DNA, 15 bp, Homo sapiens
actccccaaaggcca

SEQ ID NO: 367371 - DNA, 15 bp, Homo sapiens
aactccccaaaggcc

SEQ ID NO: 367372 - DNA, 15 bp, Homo sapiens
aaactccccaaaggc

SEQ ID NO: 367373 - DNA, 15 bp, Homo sapiens
gaaactccccaaagg

SEQ ID NO: 367374 - DNA, 15 bp, Homo sapiens
tgaaactccccaaag

SEQ ID NO: 367375 - DNA, 15 bp, Homo sapiens
ctgaaactccccaaa

SEQ ID NO: 367376 - DNA, 15 bp, Homo sapiens
cctgaaactccccaa

SEQ ID NO: 367377 - DNA, 15 bp, Homo sapiens
tcctgaaactcccca

SEQ ID NO: 367378 - DNA, 15 bp, Homo sapiens
ctcctgaaactcccc

SEQ ID NO: 367379 - DNA, 15 bp, Homo sapiens
tctcctgaaactccc

SEQ ID NO: 367380 - DNA, 15 bp, Homo sapiens
ttctcctgaaactcc

SEQ ID NO: 367381 - DNA, 15 bp, Homo sapiens
cttctcctgaaactc

SEQ ID NO: 367382 - DNA, 15 bp, Homo sapiens
gcttctcctgaaact

SEQ ID NO: 367383 - DNA, 15 bp, Homo sapiens
agcttctcctgaaac

SEQ ID NO: 367384 - DNA, 15 bp, Homo sapiens
cagcttctcctgaaa

SEQ ID NO: 367385 - DNA, 15 bp, Homo sapiens
gcagcttctcctgaa

SEQ ID NO: 367386 - DNA, 15 bp, Homo sapiens
agcagcttctcctga

SEQ ID NO: 367387 - DNA, 15 bp, Homo sapiens
cagcagcttctcctg

SEQ ID NO: 367388 - DNA, 15 bp, Homo sapiens
gcagcagcttctcct

SEQ ID NO: 367389 - DNA, 15 bp, Homo sapiens
ggcagcagcttctcc

SEQ ID NO: 367390 - DNA, 15 bp, Homo sapiens
aggcagcagcttctc

SEQ ID NO: 367391 - DNA, 15 bp, Homo sapiens
aaggcagcagcttct

SEQ ID NO: 367392 - DNA, 15 bp, Homo sapiens
caaggcagcagcttc

SEQ ID NO: 367393 - DNA, 15 bp, Homo sapiens
ccaaggcagcagctt

SEQ ID NO: 367394 - DNA, 15 bp, Homo sapiens
accaaggcagcagct

SEQ ID NO: 367395 - DNA, 15 bp, Homo sapiens
taccaaggcagcagc

SEQ ID NO: 367396 - DNA, 15 bp, Homo sapiens
ttaccaaggcagcag

SEQ ID NO: 367397 - DNA, 15 bp, Homo sapiens
tttaccaaggcagca

SEQ ID NO: 367398 - DNA, 15 bp, Homo sapiens
atttaccaaggcagc

SEQ ID NO: 367399 - DNA, 15 bp, Homo sapiens
tatttaccaaggcag

SEQ ID NO: 367400 - DNA, 15 bp, Homo sapiens
ttatttaccaaggca

SEQ ID NO: 367401 - DNA, 15 bp, Homo sapiens
attatttaccaaggc

SEQ ID NO: 367402 - DNA, 15 bp, Homo sapiens
gattatttaccaagg

SEQ ID NO: 367403 - DNA, 15 bp, Homo sapiens
agattatttaccaag

SEQ ID NO: 367404 - DNA, 15 bp, Homo sapiens
aagattatttaccaa

SEQ ID NO: 367405 - DNA, 15 bp, Homo sapiens
aaagattatttacca

SEQ ID NO: 367406 - DNA, 15 bp, Homo sapiens
aaaagattatttacc

SEQ ID NO: 367407 - DNA, 15 bp, Homo sapiens
aaaaagattatttac

SEQ ID NO: 367408 - DNA, 15 bp, Homo sapiens
aaaaaagattattta

SEQ ID NO: 367409 - DNA, 15 bp, Homo sapiens
aaaaaaagattattt

SEQ ID NO: 367410 - DNA, 15 bp, Homo sapiens
aaaaaaaagattatt

SEQ ID NO: 367411 - DNA, 15 bp, Homo sapiens
taaaaaaaagattat

SEQ ID NO: 367412 - DNA, 15 bp, Homo sapiens
ataaaaaaaagatta

SEQ ID NO: 367413 - DNA, 15 bp, Homo sapiens
aataaaaaaaagatt

SEQ ID NO: 367414 - DNA, 15 bp, Homo sapiens
caataaaaaaaagat

SEQ ID NO: 367415 - DNA, 15 bp, Homo sapiens
tcaataaaaaaaaga

SEQ ID NO: 367416 - DNA, 15 bp, Homo sapiens
ctcaataaaaaaaag

SEQ ID NO: 367417 - DNA, 15 bp, Homo sapiens
actcaataaaaaaaa

SEQ ID NO: 367418 - DNA, 15 bp, Homo sapiens
tactcaataaaaaaa

SEQ ID NO: 367419 - DNA, 15 bp, Homo sapiens
ttactcaataaaaaa

SEQ ID NO: 367420 - DNA, 15 bp, Homo sapiens
tttactcaataaaaa

SEQ ID NO: 367421 - DNA, 15 bp, Homo sapiens
gtttactcaataaaa

SEQ ID NO: 367422 - DNA, 15 bp, Homo sapiens
tgtttactcaataaa

SEQ ID NO: 367423 - DNA, 15 bp, Homo sapiens
atgtttactcaataa

SEQ ID NO: 367424 - DNA, 15 bp, Homo sapiens
catgtttactcaata

SEQ ID NO: 367425 - DNA, 15 bp, Homo sapiens
ccatgtttactcaat

SEQ ID NO: 367426 - DNA, 15 bp, Homo sapiens
accatgtttactcaa

SEQ ID NO: 367427 - DNA, 15 bp, Homo sapiens
gaccatgtttactca

SEQ ID NO: 367428 - DNA, 15 bp, Homo sapiens
tgaccatgtttactc

SEQ ID NO: 367429 - DNA, 15 bp, Homo sapiens
ctgaccatgtttact

SEQ ID NO: 367430 - DNA, 15 bp, Homo sapiens
gctgaccatgtttac

SEQ ID NO: 367431 - DNA, 15 bp, Homo sapiens
agctgaccatgttta

SEQ ID NO: 367432 - DNA, 15 bp, Homo sapiens
cagctgaccatgttt

SEQ ID NO: 367433 - DNA, 15 bp, Homo sapiens
gcagctgaccatgtt

SEQ ID NO: 367434 - DNA, 15 bp, Homo sapiens
ggcagctgaccatgt

SEQ ID NO: 367435 - DNA, 15 bp, Homo sapiens
aggcagctgaccatg

SEQ ID NO: 367436 - DNA, 15 bp, Homo sapiens
caggcagctgaccat

SEQ ID NO: 367437 - DNA, 15 bp, Homo sapiens
ccaggcagctgacca

SEQ ID NO: 367438 - DNA, 15 bp, Homo sapiens
gccaggcagctgacc

SEQ ID NO: 367439 - DNA, 15 bp, Homo sapiens
ggccaggcagctgac

SEQ ID NO: 367440 - DNA, 15 bp, Homo sapiens
aggccaggcagctga

SEQ ID NO: 367441 - DNA, 15 bp, Homo sapiens
aaggccaggcagctg

SEQ ID NO: 367442 - DNA, 15 bp, Homo sapiens
gaaggccaggcagct

SEQ ID NO: 367443 - DNA, 15 bp, Homo sapiens
ggaaggccaggcagc

SEQ ID NO: 367444 - DNA, 15 bp, Homo sapiens
aggaaggccaggcag

SEQ ID NO: 367445 - DNA, 15 bp, Homo sapiens
caggaaggccaggca

SEQ ID NO: 367446 - DNA, 15 bp, Homo sapiens
tcaggaaggccaggc

SEQ ID NO: 367447 - DNA, 15 bp, Homo sapiens
gtcaggaaggccagg

SEQ ID NO: 367448 - DNA, 15 bp, Homo sapiens
cagagtcaggaaggc

SEQ ID NO: 367449 - DNA, 15 bp, Homo sapiens
ccagagtcaggaagg

SEQ ID NO: 367450 - DNA, 15 bp, Homo sapiens
tccagagtcaggaag

SEQ ID NO: 367451 - DNA, 15 bp, Homo sapiens
atccagagtcaggaa

SEQ ID NO: 367452 - DNA, 15 bp, Homo sapiens
aatccagagtcagga

SEQ ID NO: 367453 - DNA, 15 bp, Homo sapiens
gaatccagagtcagg

SEQ ID NO: 367454 - DNA, 15 bp, Homo sapiens
agaatccagagtcag

SEQ ID NO: 367455 - DNA, 15 bp, Homo sapiens
tagaatccagagtca

SEQ ID NO: 367456 - DNA, 15 bp, Homo sapiens
ctagaatccagagtc

SEQ ID NO: 367457 - DNA, 15 bp, Homo sapiens
gctagaatccagagt

SEQ ID NO: 367458 - DNA, 15 bp, Homo sapiens
agctagaatccagag

SEQ ID NO: 367459 - DNA, 15 bp, Homo sapiens
aagctagaatccaga

SEQ ID NO: 367460 - DNA, 15 bp, Homo sapiens
gaagctagaatccag

SEQ ID NO: 367461 - DNA, 15 bp, Homo sapiens
tgaagctagaatcca

SEQ ID NO: 367462 - DNA, 15 bp, Homo sapiens
atgaagctagaatcc

SEQ ID NO: 367463 - DNA, 15 bp, Homo sapiens
tatgaagctagaatc

SEQ ID NO: 367464 - DNA, 15 bp, Homo sapiens
ctatgaagctagaat

SEQ ID NO: 367465 - DNA, 15 bp, Homo sapiens
cctatgaagctagaa

SEQ ID NO: 367466 - DNA, 15 bp, Homo sapiens
tcctatgaagctaga

SEQ ID NO: 367467 - DNA, 15 bp, Homo sapiens
ttcctatgaagctag

SEQ ID NO: 367468 - DNA, 15 bp, Homo sapiens
cttcctatgaagcta

SEQ ID NO: 367469 - DNA, 15 bp, Homo sapiens
gcttcctatgaagct

SEQ ID NO: 367470 - DNA, 15 bp, Homo sapiens
ggcttcctatgaagc

SEQ ID NO: 367471 - DNA, 15 bp, Homo sapiens
tggcttcctatgaag

SEQ ID NO: 367472 - DNA, 15 bp, Homo sapiens
gtggcttcctatgaa

SEQ ID NO: 367473 - DNA, 15 bp, Homo sapiens
agtggcttcctatga

SEQ ID NO: 367474 - DNA, 15 bp, Homo sapiens
cagtggcttcctatg

SEQ ID NO: 367475 - DNA, 15 bp, Homo sapiens
tcagtggcttcctat

SEQ ID NO: 367476 - DNA, 15 bp, Homo sapiens
ttcagtggcttccta

SEQ ID NO: 367477 - DNA, 15 bp, Homo sapiens
tttcagtggcttcct

SEQ ID NO: 367478 - DNA, 15 bp, Homo sapiens
ttttcagtggcttcc

SEQ ID NO: 367479 - DNA, 15 bp, Homo sapiens
gttttcagtggcttc

SEQ ID NO: 367480 - DNA, 15 bp, Homo sapiens
agttttcagtggctt

SEQ ID NO: 367481 - DNA, 15 bp, Homo sapiens
tagttttcagtggct

SEQ ID NO: 367482 - DNA, 15 bp, Homo sapiens
gtagttttcagtggc

SEQ ID NO: 367483 - DNA, 15 bp, Homo sapiens
agtagttttcagtgg

SEQ ID NO: 367484 - DNA, 15 bp, Homo sapiens
cagtagttttcagtg

SEQ ID NO: 367485 - DNA, 15 bp, Homo sapiens
acagtagttttcagt

SEQ ID NO: 367486 - DNA, 15 bp, Homo sapiens
cacagtagttttcag

SEQ ID NO: 367487 - DNA, 15 bp, Homo sapiens
tcacagtagttttca

SEQ ID NO: 367488 - DNA, 15 bp, Homo sapiens
ttcacagtagttttc

SEQ ID NO: 367489 - DNA, 15 bp, Homo sapiens
tttcacagtagtttt

SEQ ID NO: 367490 - DNA, 15 bp, Homo sapiens
ttttcacagtagttt

SEQ ID NO: 367491 - DNA, 15 bp, Homo sapiens
tttttcacagtagtt

SEQ ID NO: 367492 - DNA, 15 bp, Homo sapiens
ttttttcacagtagt

SEQ ID NO: 367493 - DNA, 15 bp, Homo sapiens
attttttcacagtag

SEQ ID NO: 367494 - DNA, 15 bp, Homo sapiens
tattttttcacagta

SEQ ID NO: 367495 - DNA, 15 bp, Homo sapiens
atattttttcacagt

SEQ ID NO: 367496 - DNA, 15 bp, Homo sapiens
aatattttttcacag

SEQ ID NO: 367497 - DNA, 15 bp, Homo sapiens
taatattttttcaca

SEQ ID NO: 367498 - DNA, 15 bp, Homo sapiens
gtaatattttttcac

SEQ ID NO: 367499 - DNA, 15 bp, Homo sapiens
tgtaatattttttca

SEQ ID NO: 367500 - DNA, 15 bp, Homo sapiens
ttgtaatattttttc

SEQ ID NO: 367501 - DNA, 15 bp, Homo sapiens
cttgtaatatttttt

SEQ ID NO: 367502 - DNA, 15 bp, Homo sapiens
ccttgtaatattttt

SEQ ID NO: 367503 - DNA, 15 bp, Homo sapiens
accttgtaatatttt

SEQ ID NO: 367504 - DNA, 15 bp, Homo sapiens
aaccttgtaatattt

SEQ ID NO: 367505 - DNA, 15 bp, Homo sapiens
taaccttgtaatatt

SEQ ID NO: 367506 - DNA, 15 bp, Homo sapiens
ttaaccttgtaatat

SEQ ID NO: 367507 - DNA, 15 bp, Homo sapiens
tttaaccttgtaata

SEQ ID NO: 367508 - DNA, 15 bp, Homo sapiens
gtttaaccttgtaat

SEQ ID NO: 367509 - DNA, 15 bp, Homo sapiens
agtttaaccttgtaa

SEQ ID NO: 367510 - DNA, 15 bp, Homo sapiens
cagtttaaccttgta

SEQ ID NO: 367511 - DNA, 15 bp, Homo sapiens
tcagtttaaccttgt

SEQ ID NO: 367512 - DNA, 15 bp, Homo sapiens
ctcagtttaaccttg

SEQ ID NO: 367513 - DNA, 15 bp, Homo sapiens
cctcagtttaacctt

SEQ ID NO: 367514 - DNA, 15 bp, Homo sapiens
acctcagtttaacct

SEQ ID NO: 367515 - DNA, 15 bp, Homo sapiens
aacctcagtttaacc

SEQ ID NO: 367516 - DNA, 15 bp, Homo sapiens
aaacctcagtttaac

SEQ ID NO: 367517 - DNA, 15 bp, Homo sapiens
aaaacctcagtttaa

SEQ ID NO: 367518 - DNA, 15 bp, Homo sapiens
aaaaacctcagttta

SEQ ID NO: 367519 - DNA, 15 bp, Homo sapiens
gaaaaacctcagttt

SEQ ID NO: 367520 - DNA, 15 bp, Homo sapiens
ggaaaaacctcagtt

SEQ ID NO: 367521 - DNA, 15 bp, Homo sapiens
aggaaaaacctcagt

SEQ ID NO: 367522 - DNA, 15 bp, Homo sapiens
aaggaaaaacctcag

SEQ ID NO: 367523 - DNA, 15 bp, Homo sapiens
aaaggaaaaacctca

SEQ ID NO: 367524 - DNA, 15 bp, Homo sapiens
caaaggaaaaacctc

SEQ ID NO: 367525 - DNA, 15 bp, Homo sapiens
ccaaaggaaaaacct

SEQ ID NO: 367526 - DNA, 15 bp, Homo sapiens
gccaaaggaaaaacc

SEQ ID NO: 367527 - DNA, 15 bp, Homo sapiens
agccaaaggaaaaac

SEQ ID NO: 367528 - DNA, 15 bp, Homo sapiens
cagccaaaggaaaaa

SEQ ID NO: 367529 - DNA, 15 bp, Homo sapiens
ccagccaaaggaaaa

SEQ ID NO: 367530 - DNA, 15 bp, Homo sapiens
tccagccaaaggaaa

SEQ ID NO: 367531 - DNA, 15 bp, Homo sapiens
atccagccaaaggaa

SEQ ID NO: 367532 - DNA, 15 bp, Homo sapiens
aatccagccaaagga

SEQ ID NO: 367533 - DNA, 15 bp, Homo sapiens
aaatccagccaaagg

SEQ ID NO: 367534 - DNA, 15 bp, Homo sapiens
aaaatccagccaaag

SEQ ID NO: 367535 - DNA, 15 bp, Homo sapiens
aaaaatccagccaaa

SEQ ID NO: 367536 - DNA, 15 bp, Homo sapiens
gaaaaatccagccaa

SEQ ID NO: 367537 - DNA, 15 bp, Homo sapiens
agaaaaatccagcca

SEQ ID NO: 367538 - DNA, 15 bp, Homo sapiens
aagaaaaatccagcc

SEQ ID NO: 367539 - DNA, 15 bp, Homo sapiens
caagaaaaatccagc

SEQ ID NO: 367540 - DNA, 15 bp, Homo sapiens
gcaagaaaaatccag

SEQ ID NO: 367541 - DNA, 15 bp, Homo sapiens
tgcaagaaaaatcca

SEQ ID NO: 367542 - DNA, 15 bp, Homo sapiens
ctgcaagaaaaatcc

SEQ ID NO: 367543 - DNA, 15 bp, Homo sapiens
actgcaagaaaaatc

SEQ ID NO: 367544 - DNA, 15 bp, Homo sapiens
gactgcaagaaaaat

SEQ ID NO: 367545 - DNA, 15 bp, Homo sapiens
tgactgcaagaaaaa

SEQ ID NO: 367546 - DNA, 15 bp, Homo sapiens
atgactgcaagaaaa

SEQ ID NO: 367547 - DNA, 15 bp, Homo sapiens
aatgactgcaagaaa

SEQ ID NO: 367548 - DNA, 15 bp, Homo sapiens
aaatgactgcaagaa

SEQ ID NO: 367549 - DNA, 15 bp, Homo sapiens
gaaatgactgcaaga

SEQ ID NO: 367550 - DNA, 15 bp, Homo sapiens
ggaaatgactgcaag

SEQ ID NO: 367551 - DNA, 15 bp, Homo sapiens
tggaaatgactgcaa

SEQ ID NO: 367552 - DNA, 15 bp, Homo sapiens
ttggaaatgactgca

SEQ ID NO: 367553 - DNA, 15 bp, Homo sapiens
tttggaaatgactgc

SEQ ID NO: 367554 - DNA, 15 bp, Homo sapiens
ttttggaaatgactg

SEQ ID NO: 367555 - DNA, 15 bp, Homo sapiens
tttttggaaatgact

SEQ ID NO: 367556 - DNA, 15 bp, Homo sapiens
gtttttggaaatgac

SEQ ID NO: 367557 - DNA, 15 bp, Homo sapiens
ggtttttggaaatga

SEQ ID NO: 367558 - DNA, 15 bp, Homo sapiens
aggtttttggaaatg

SEQ ID NO: 367559 - DNA, 15 bp, Homo sapiens
caggtttttggaaat

SEQ ID NO: 367560 - DNA, 15 bp, Homo sapiens
acaggtttttggaaa

SEQ ID NO: 367561 - DNA, 15 bp, Homo sapiens
aacaggtttttggaa

SEQ ID NO: 367562 - DNA, 15 bp, Homo sapiens
aaacaggtttttgga

SEQ ID NO: 367563 - DNA, 15 bp, Homo sapiens
gaaacaggtttttgg

SEQ ID NO: 367564 - DNA, 15 bp, Homo sapiens
ggaaacaggtttttg

SEQ ID NO: 367565 - DNA, 15 bp, Homo sapiens
gggaaacaggttttt

SEQ ID NO: 367566 - DNA, 15 bp, Homo sapiens
tgggaaacaggtttt

SEQ ID NO: 367567 - DNA, 15 bp, Homo sapiens
ttgggaaacaggttt

SEQ ID NO: 367568 - DNA, 15 bp, Homo sapiens
tttgggaaacaggtt

SEQ ID NO: 367569 - DNA, 15 bp, Homo sapiens
atttgggaaacaggt

SEQ ID NO: 367570 - DNA, 15 bp, Homo sapiens
gatttgggaaacagg

SEQ ID NO: 367571 - DNA, 15 bp, Homo sapiens
tgatttgggaaacag

SEQ ID NO: 367572 - DNA, 15 bp, Homo sapiens
ttgatttgggaaaca

SEQ ID NO: 367573 - DNA, 15 bp, Homo sapiens
gttgatttgggaaac

SEQ ID NO: 367574 - DNA, 15 bp, Homo sapiens
ggttgatttgggaaa

SEQ ID NO: 367575 - DNA, 15 bp, Homo sapiens
aggttgatttgggaa

SEQ ID NO: 367576 - DNA, 15 bp, Homo sapiens
caggttgatttggga

SEQ ID NO: 367577 - DNA, 15 bp, Homo sapiens
ccaggttgatttggg

SEQ ID NO: 367578 - DNA, 15 bp, Homo sapiens
accaggttgatttgg

SEQ ID NO: 367579 - DNA, 15 bp, Homo sapiens
caccaggttgatttg

SEQ ID NO: 367580 - DNA, 15 bp, Homo sapiens
acaccaggttgattt

SEQ ID NO: 367581 - DNA, 15 bp, Homo sapiens
cacaccaggttgatt

SEQ ID NO: 367582 - DNA, 15 bp, Homo sapiens
acacaccaggttgat

SEQ ID NO: 367583 - DNA, 15 bp, Homo sapiens
cacacaccaggttga

SEQ ID NO: 367584 - DNA, 15 bp, Homo sapiens
acacacaccaggttg

SEQ ID NO: 367585 - DNA, 15 bp, Homo sapiens
cacacacaccaggtt

SEQ ID NO: 367586 - DNA, 15 bp, Homo sapiens
ccacacacaccaggt

SEQ ID NO: 367587 - DNA, 15 bp, Homo sapiens
tccacacacaccagg

SEQ ID NO: 367588 - DNA, 15 bp, Homo sapiens
atccacacacaccag

SEQ ID NO: 367589 - DNA, 15 bp, Homo sapiens
aatccacacacacca

SEQ ID NO: 367590 - DNA, 15 bp, Homo sapiens
aaatccacacacacc

SEQ ID NO: 367591 - DNA, 15 bp, Homo sapiens
aaaatccacacacac

SEQ ID NO: 367592 - DNA, 15 bp, Homo sapiens
gaaaatccacacaca

SEQ ID NO: 367593 - DNA, 15 bp, Homo sapiens
agaaaatccacacac

SEQ ID NO: 367594 - DNA, 15 bp, Homo sapiens
aagaaaatccacaca

SEQ ID NO: 367595 - DNA, 15 bp, Homo sapiens
gaagaaaatccacac

SEQ ID NO: 367596 - DNA, 15 bp, Homo sapiens
ggaagaaaatccaca

SEQ ID NO: 367597 - DNA, 15 bp, Homo sapiens
gggaagaaaatccac

SEQ ID NO: 367598 - DNA, 15 bp, Homo sapiens
ggggaagaaaatcca

SEQ ID NO: 367599 - DNA, 15 bp, Homo sapiens
aggggaagaaaatcc

SEQ ID NO: 367600 - DNA, 15 bp, Homo sapiens
taggggaagaaaatc

SEQ ID NO: 367601 - DNA, 15 bp, Homo sapiens
gtaggggaagaaaat

SEQ ID NO: 367602 - DNA, 15 bp, Homo sapiens
tgtaggggaagaaaa

SEQ ID NO: 367603 - DNA, 15 bp, Homo sapiens
ttgtaggggaagaaa

SEQ ID NO: 367604 - DNA, 15 bp, Homo sapiens
cttgtaggggaagaa

SEQ ID NO: 367605 - DNA, 15 bp, Homo sapiens
acttgtaggggaaga

SEQ ID NO: 367606 - DNA, 15 bp, Homo sapiens
aacttgtaggggaag

SEQ ID NO: 367607 - DNA, 15 bp, Homo sapiens
taacttgtaggggaa

SEQ ID NO: 367608 - DNA, 15 bp, Homo sapiens
ctaacttgtagggga

SEQ ID NO: 367609 - DNA, 15 bp, Homo sapiens
tctaacttgtagggg

SEQ ID NO: 367610 - DNA, 15 bp, Homo sapiens
ttctaacttgtaggg

SEQ ID NO: 367611 - DNA, 15 bp, Homo sapiens
tttctaacttgtagg

SEQ ID NO: 367612 - DNA, 15 bp, Homo sapiens
ctttctaacttgtag

SEQ ID NO: 367613 - DNA, 15 bp, Homo sapiens
gctttctaacttgta

SEQ ID NO: 367614 - DNA, 15 bp, Homo sapiens
tgctttctaacttgt

SEQ ID NO: 367615 - DNA, 15 bp, Homo sapiens
ttgctttctaacttg

SEQ ID NO: 367616 - DNA, 15 bp, Homo sapiens
attgctttctaactt

SEQ ID NO: 367617 - DNA, 15 bp, Homo sapiens
aattgctttctaact

SEQ ID NO: 367618 - DNA, 15 bp, Homo sapiens
caattgctttctaac

SEQ ID NO: 367619 - DNA, 15 bp, Homo sapiens
acaattgctttctaa

SEQ ID NO: 367620 - DNA, 15 bp, Homo sapiens
cacaattgctttcta

SEQ ID NO: 367621 - DNA, 15 bp, Homo sapiens
gcacaattgctttct

SEQ ID NO: 367622 - DNA, 15 bp, Homo sapiens
agcacaattgctttc

SEQ ID NO: 367623 - DNA, 15 bp, Homo sapiens
aagcacaattgcttt

SEQ ID NO: 367624 - DNA, 15 bp, Homo sapiens
gaagcacaattgctt

SEQ ID NO: 367625 - DNA, 15 bp, Homo sapiens
agaagcacaattgct

SEQ ID NO: 367626 - DNA, 15 bp, Homo sapiens
tagaagcacaattgc

SEQ ID NO: 367627 - DNA, 15 bp, Homo sapiens
atagaagcacaattg

SEQ ID NO: 367628 - DNA, 15 bp, Homo sapiens
tatagaagcacaatt

SEQ ID NO: 367629 - DNA, 15 bp, Homo sapiens
gtatagaagcacaat

SEQ ID NO: 367630 - DNA, 15 bp, Homo sapiens
tgtatagaagcacaa

SEQ ID NO: 367631 - DNA, 15 bp, Homo sapiens
atgtatagaagcaca

SEQ ID NO: 367632 - DNA, 15 bp, Homo sapiens
catgtatagaagcac

SEQ ID NO: 367633 - DNA, 15 bp, Homo sapiens
ccatgtatagaagca

SEQ ID NO: 367634 - DNA, 15 bp, Homo sapiens
tccatgtatagaagc

SEQ ID NO: 367635 - DNA, 15 bp, Homo sapiens
ttccatgtatagaag

SEQ ID NO: 367636 - DNA, 15 bp, Homo sapiens
attccatgtatagaa

SEQ ID NO: 367637 - DNA, 15 bp, Homo sapiens
aattccatgtataga

SEQ ID NO: 367638 - DNA, 15 bp, Homo sapiens
aaattccatgtatag

SEQ ID NO: 367639 - DNA, 15 bp, Homo sapiens
aaaattccatgtata

SEQ ID NO: 367640 - DNA, 15 bp, Homo sapiens
gaaaattccatgtat

SEQ ID NO: 367641 - DNA, 15 bp, Homo sapiens
agaaaattccatgta

SEQ ID NO: 367642 - DNA, 15 bp, Homo sapiens
aagaaaattccatgt

SEQ ID NO: 367643 - DNA, 15 bp, Homo sapiens
aaagaaaattccatg

SEQ ID NO: 367644 - DNA, 15 bp, Homo sapiens
taaagaaaattccat

SEQ ID NO: 367645 - DNA, 15 bp, Homo sapiens
gtaaagaaaattcca

SEQ ID NO: 367646 - DNA, 15 bp, Homo sapiens
agtaaagaaaattcc

SEQ ID NO: 367647 - DNA, 15 bp, Homo sapiens
aagtaaagaaaattc

SEQ ID NO: 367648 - DNA, 15 bp, Homo sapiens
gaagtaaagaaaatt

SEQ ID NO: 367649 - DNA, 15 bp, Homo sapiens
tgaagtaaagaaaat

SEQ ID NO: 367650 - DNA, 15 bp, Homo sapiens
ctgaagtaaagaaaa

SEQ ID NO: 367651 - DNA, 15 bp, Homo sapiens
gctgaagtaaagaaa

SEQ ID NO: 367652 - DNA, 15 bp, Homo sapiens
agctgaagtaaagaa

SEQ ID NO: 367653 - DNA, 15 bp, Homo sapiens
cagctgaagtaaaga

SEQ ID NO: 367654 - DNA, 15 bp, Homo sapiens
gcagctgaagtaaag

SEQ ID NO: 367655 - DNA, 15 bp, Homo sapiens
agcagctgaagtaaa

SEQ ID NO: 367656 - DNA, 15 bp, Homo sapiens
cagcagctgaagtaa

SEQ ID NO: 367657 - DNA, 15 bp, Homo sapiens
tcagcagctgaagta

SEQ ID NO: 367658 - DNA, 15 bp, Homo sapiens
ttcagcagctgaagt

SEQ ID NO: 367659 - DNA, 15 bp, Homo sapiens
cttcagcagctgaag

SEQ ID NO: 367660 - DNA, 15 bp, Homo sapiens
gcttcagcagctgaa

SEQ ID NO: 367661 - DNA, 15 bp, Homo sapiens
tgcttcagcagctga

SEQ ID NO: 367662 - DNA, 15 bp, Homo sapiens
atgcttcagcagctg

SEQ ID NO: 367663 - DNA, 15 bp, Homo sapiens
aatgcttcagcagct

SEQ ID NO: 367664 - DNA, 15 bp, Homo sapiens
gaatgcttcagcagc

SEQ ID NO: 367665 - DNA, 15 bp, Homo sapiens
cgaatgcttcagcag

SEQ ID NO: 367666 - DNA, 15 bp, Homo sapiens
acgaatgcttcagca

SEQ ID NO: 367667 - DNA, 15 bp, Homo sapiens
aacgaatgcttcagc

SEQ ID NO: 367668 - DNA, 15 bp, Homo sapiens
caacgaatgcttcag

SEQ ID NO: 367669 - DNA, 15 bp, Homo sapiens
ccaacgaatgcttca

SEQ ID NO: 367670 - DNA, 15 bp, Homo sapiens
tccaacgaatgcttc

SEQ ID NO: 367671 - DNA, 15 bp, Homo sapiens
ttccaacgaatgctt

SEQ ID NO: 367672 - DNA, 15 bp, Homo sapiens
attccaacgaatgct

SEQ ID NO: 367673 - DNA, 15 bp, Homo sapiens
tattccaacgaatgc

SEQ ID NO: 367674 - DNA, 15 bp, Homo sapiens
gtattccaacgaatg

SEQ ID NO: 367675 - DNA, 15 bp, Homo sapiens
tgtattccaacgaat

SEQ ID NO: 367676 - DNA, 15 bp, Homo sapiens
atgtattccaacgaa

SEQ ID NO: 367677 - DNA, 15 bp, Homo sapiens
tatgtattccaacga

SEQ ID NO: 367678 - DNA, 15 bp, Homo sapiens
gtatgtattccaacg

SEQ ID NO: 367679 - DNA, 15 bp, Homo sapiens
agtatgtattccaac

SEQ ID NO: 367680 - DNA, 15 bp, Homo sapiens
cagtatgtattccaa

SEQ ID NO: 367681 - DNA, 15 bp, Homo sapiens
gcagtatgtattcca

SEQ ID NO: 367682 - DNA, 15 bp, Homo sapiens
tgcagtatgtattcc

SEQ ID NO: 367683 - DNA, 15 bp, Homo sapiens
ttgcagtatgtattc

SEQ ID NO: 367684 - DNA, 15 bp, Homo sapiens
tttgcagtatgtatt

SEQ ID NO: 367685 - DNA, 15 bp, Homo sapiens
ttttgcagtatgtat

SEQ ID NO: 367686 - DNA, 15 bp, Homo sapiens
tttttgcagtatgta

SEQ ID NO: 367687 - DNA, 15 bp, Homo sapiens
atttttgcagtatgt

SEQ ID NO: 367688 - DNA, 15 bp, Homo sapiens
catttttgcagtatg

SEQ ID NO: 367689 - DNA, 15 bp, Homo sapiens
tcatttttgcagtat

SEQ ID NO: 367690 - DNA, 15 bp, Homo sapiens
gtcatttttgcagta

SEQ ID NO: 367691 - DNA, 15 bp, Homo sapiens
agtcatttttgcagt

SEQ ID NO: 367692 - DNA, 15 bp, Homo sapiens
cagtcatttttgcag

SEQ ID NO: 367693 - DNA, 15 bp, Homo sapiens
gcagtcatttttgca

SEQ ID NO: 367694 - DNA, 15 bp, Homo sapiens
agcagtcatttttgc

SEQ ID NO: 367695 - DNA, 15 bp, Homo sapiens
cagcagtcatttttg

SEQ ID NO: 367696 - DNA, 15 bp, Homo sapiens
acagcagtcattttt

SEQ ID NO: 367697 - DNA, 15 bp, Homo sapiens
cacagcagtcatttt

SEQ ID NO: 367698 - DNA, 15 bp, Homo sapiens
ccacagcagtcattt

SEQ ID NO: 367699 - DNA, 15 bp, Homo sapiens
gccacagcagtcatt

SEQ ID NO: 367700 - DNA, 15 bp, Homo sapiens
agccacagcagtcat

SEQ ID NO: 367701 - DNA, 15 bp, Homo sapiens
tagccacagcagtca

SEQ ID NO: 367702 - DNA, 15 bp, Homo sapiens
atagccacagcagtc

SEQ ID NO: 367703 - DNA, 15 bp, Homo sapiens
aatagccacagcagt

SEQ ID NO: 367704 - DNA, 15 bp, Homo sapiens
taatagccacagcag

SEQ ID NO: 367705 - DNA, 15 bp, Homo sapiens
gtaatagccacagca

SEQ ID NO: 367706 - DNA, 15 bp, Homo sapiens
ggtaatagccacagc

SEQ ID NO: 367707 - DNA, 15 bp, Homo sapiens
cggtaatagccacag

SEQ ID NO: 367708 - DNA, 15 bp, Homo sapiens
acggtaatagccaca

SEQ ID NO: 367709 - DNA, 15 bp, Homo sapiens
tacggtaatagccac

SEQ ID NO: 367710 - DNA, 15 bp, Homo sapiens
ctacggtaatagcca

SEQ ID NO: 367711 - DNA, 15 bp, Homo sapiens
actacggtaatagcc

SEQ ID NO: 367712 - DNA, 15 bp, Homo sapiens
aactacggtaatagc

SEQ ID NO: 367713 - DNA, 15 bp, Homo sapiens
caactacggtaatag

SEQ ID NO: 367714 - DNA, 15 bp, Homo sapiens
gcaactacggtaata

SEQ ID NO: 367715 - DNA, 15 bp, Homo sapiens
agcaactacggtaat

SEQ ID NO: 367716 - DNA, 15 bp, Homo sapiens
gagcaactacggtaa

SEQ ID NO: 367717 - DNA, 15 bp, Homo sapiens
tgagcaactacggta

SEQ ID NO: 367718 - DNA, 15 bp, Homo sapiens
ctgagcaactacggt

SEQ ID NO: 367719 - DNA, 15 bp, Homo sapiens
cctgagcaactacgg

SEQ ID NO: 367720 - DNA, 15 bp, Homo sapiens
ccctgagcaactacg

SEQ ID NO: 367721 - DNA, 15 bp, Homo sapiens
cccctgagcaactac

SEQ ID NO: 367722 - DNA, 15 bp, Homo sapiens
tcccctgagcaacta

SEQ ID NO: 367723 - DNA, 15 bp, Homo sapiens
ctcccctgagcaact

SEQ ID NO: 367724 - DNA, 15 bp, Homo sapiens
gctcccctgagcaac

SEQ ID NO: 367725 - DNA, 15 bp, Homo sapiens
agctcccctgagcaa

SEQ ID NO: 367726 - DNA, 15 bp, Homo sapiens
tagctcccctgagca

SEQ ID NO: 367727 - DNA, 15 bp, Homo sapiens
atagctcccctgagc

SEQ ID NO: 367728 - DNA, 15 bp, Homo sapiens
aatagctcccctgag

SEQ ID NO: 367729 - DNA, 15 bp, Homo sapiens
gaatagctcccctga

SEQ ID NO: 367730 - DNA, 15 bp, Homo sapiens
tgaatagctcccctg

SEQ ID NO: 367731 - DNA, 15 bp, Homo sapiens
ctgaatagctcccct

SEQ ID NO: 367732 - DNA, 15 bp, Homo sapiens
tctgaatagctcccc

SEQ ID NO: 367733 - DNA, 15 bp, Homo sapiens
atctgaatagctccc

SEQ ID NO: 367734 - DNA, 15 bp, Homo sapiens
catctgaatagctcc

SEQ ID NO: 367735 - DNA, 15 bp, Homo sapiens
gcatctgaatagctc

SEQ ID NO: 367736 - DNA, 15 bp, Homo sapiens
ggcatctgaatagct

SEQ ID NO: 367737 - DNA, 15 bp, Homo sapiens
aggcatctgaatagc

SEQ ID NO: 367738 - DNA, 15 bp, Homo sapiens
gaggcatctgaatag

SEQ ID NO: 367739 - DNA, 15 bp, Homo sapiens
tgaggcatctgaata

SEQ ID NO: 367740 - DNA, 15 bp, Homo sapiens
atgaggcatctgaat

SEQ ID NO: 367741 - DNA, 15 bp, Homo sapiens
aatgaggcatctgaa

SEQ ID NO: 367742 - DNA, 15 bp, Homo sapiens
aaatgaggcatctga

SEQ ID NO: 367743 - DNA, 15 bp, Homo sapiens
taaatgaggcatctg

SEQ ID NO: 367744 - DNA, 15 bp, Homo sapiens
ataaatgaggcatct

SEQ ID NO: 367745 - DNA, 15 bp, Homo sapiens
aataaatgaggcatc

SEQ ID NO: 367746 - DNA, 15 bp, Homo sapiens
caataaatgaggcat

SEQ ID NO: 367747 - DNA, 15 bp, Homo sapiens
ccaataaatgaggca

SEQ ID NO: 367748 - DNA, 15 bp, Homo sapiens
tccaataaatgaggc

SEQ ID NO: 367749 - DNA, 15 bp, Homo sapiens
ctccaataaatgagg

SEQ ID NO: 367750 - DNA, 15 bp, Homo sapiens
gctccaataaatgag

SEQ ID NO: 367751 - DNA, 15 bp, Homo sapiens
agctccaataaatga

SEQ ID NO: 367752 - DNA, 15 bp, Homo sapiens
aagctccaataaatg

SEQ ID NO: 367753 - DNA, 15 bp, Homo sapiens
taagctccaataaat

SEQ ID NO: 367754 - DNA, 15 bp, Homo sapiens
ttaagctccaataaa

SEQ ID NO: 367755 - DNA, 15 bp, Homo sapiens
attaagctccaataa

SEQ ID NO: 367756 - DNA, 15 bp, Homo sapiens
tattaagctccaata

SEQ ID NO: 367757 - DNA, 15 bp, Homo sapiens
ctattaagctccaat

SEQ ID NO: 367758 - DNA, 15 bp, Homo sapiens
tctattaagctccaa

SEQ ID NO: 367759 - DNA, 15 bp, Homo sapiens
atctattaagctcca

SEQ ID NO: 367760 - DNA, 15 bp, Homo sapiens
aatctattaagctcc

SEQ ID NO: 367761 - DNA, 15 bp, Homo sapiens
taatctattaagctc

SEQ ID NO: 367762 - DNA, 15 bp, Homo sapiens
ttaatctattaagct

SEQ ID NO: 367763 - DNA, 15 bp, Homo sapiens
tttaatctattaagc

SEQ ID NO: 367764 - DNA, 15 bp, Homo sapiens
ttttaatctattaag

SEQ ID NO: 367765 - DNA, 15 bp, Homo sapiens
cttttaatctattaa

SEQ ID NO: 367766 - DNA, 15 bp, Homo sapiens
acttttaatctatta

SEQ ID NO: 367767 - DNA, 15 bp, Homo sapiens
gacttttaatctatt

SEQ ID NO: 367768 - DNA, 15 bp, Homo sapiens
ggacttttaatctat

SEQ ID NO: 367769 - DNA, 15 bp, Homo sapiens
tggacttttaatcta

SEQ ID NO: 367770 - DNA, 15 bp, Homo sapiens
ttggacttttaatct

SEQ ID NO: 367771 - DNA, 15 bp, Homo sapiens
tttggacttttaatc

SEQ ID NO: 367772 - DNA, 15 bp, Homo sapiens
atttggacttttaat

SEQ ID NO: 367773 - DNA, 15 bp, Homo sapiens
aatttggacttttaa

SEQ ID NO: 367774 - DNA, 15 bp, Homo sapiens
caatttggactttta

SEQ ID NO: 367775 - DNA, 15 bp, Homo sapiens
tcaatttggactttt

SEQ ID NO: 367776 - DNA, 15 bp, Homo sapiens
ctcaatttggacttt

SEQ ID NO: 367777 - DNA, 15 bp, Homo sapiens
actcaatttggactt

SEQ ID NO: 367778 - DNA, 15 bp, Homo sapiens
gactcaatttggact

SEQ ID NO: 367779 - DNA, 15 bp, Homo sapiens
agactcaatttggac

SEQ ID NO: 367780 - DNA, 15 bp, Homo sapiens
gagactcaatttgga

SEQ ID NO: 367781 - DNA, 15 bp, Homo sapiens
tgagactcaatttgg

SEQ ID NO: 367782 - DNA, 15 bp, Homo sapiens
atgagactcaatttg

SEQ ID NO: 367783 - DNA, 15 bp, Homo sapiens
catgagactcaattt

SEQ ID NO: 367784 - DNA, 15 bp, Homo sapiens
tcatgagactcaatt

SEQ ID NO: 367785 - DNA, 15 bp, Homo sapiens
atcatgagactcaat

SEQ ID NO: 367786 - DNA, 15 bp, Homo sapiens
tatcatgagactcaa

SEQ ID NO: 367787 - DNA, 15 bp, Homo sapiens
atatcatgagactca

SEQ ID NO: 367788 - DNA, 15 bp, Homo sapiens
tatatcatgagactc

SEQ ID NO: 367789 - DNA, 15 bp, Homo sapiens
ttatatcatgagact

SEQ ID NO: 367790 - DNA, 15 bp, Homo sapiens
cttatatcatgagac

SEQ ID NO: 367791 - DNA, 15 bp, Homo sapiens
gcttatatcatgaga

SEQ ID NO: 367792 - DNA, 15 bp, Homo sapiens
ggcttatatcatgag

SEQ ID NO: 367793 - DNA, 15 bp, Homo sapiens
aggcttatatcatga

SEQ ID NO: 367794 - DNA, 15 bp, Homo sapiens
taggcttatatcatg

SEQ ID NO: 367795 - DNA, 15 bp, Homo sapiens
ttaggcttatatcat

SEQ ID NO: 367796 - DNA, 15 bp, Homo sapiens
attaggcttatatca

SEQ ID NO: 367797 - DNA, 15 bp, Homo sapiens
gattaggcttatatc

SEQ ID NO: 367798 - DNA, 15 bp, Homo sapiens
tgattaggcttatat

SEQ ID NO: 367799 - DNA, 15 bp, Homo sapiens
ttgattaggcttata

SEQ ID NO: 367800 - DNA, 15 bp, Homo sapiens
cttgattaggcttat

SEQ ID NO: 367801 - DNA, 15 bp, Homo sapiens
acttgattaggctta

SEQ ID NO: 367802 - DNA, 15 bp, Homo sapiens
aacttgattaggctt

SEQ ID NO: 367803 - DNA, 15 bp, Homo sapiens
gaacttgattaggct

SEQ ID NO: 367804 - DNA, 15 bp, Homo sapiens
agaacttgattaggc

SEQ ID NO: 367805 - DNA, 15 bp, Homo sapiens
tagaacttgattagg

SEQ ID NO: 367806 - DNA, 15 bp, Homo sapiens
ttagaacttgattag

SEQ ID NO: 367807 - DNA, 15 bp, Homo sapiens
attagaacttgatta

SEQ ID NO: 367808 - DNA, 15 bp, Homo sapiens
gattagaacttgatt

SEQ ID NO: 367809 - DNA, 15 bp, Homo sapiens
agattagaacttgat

SEQ ID NO: 367810 - DNA, 15 bp, Homo sapiens
cagattagaacttga

SEQ ID NO: 367811 - DNA, 15 bp, Homo sapiens
gcagattagaacttg

SEQ ID NO: 367812 - DNA, 15 bp, Homo sapiens
tgcagattagaactt

SEQ ID NO: 367813 - DNA, 15 bp, Homo sapiens
atgcagattagaact

SEQ ID NO: 367814 - DNA, 15 bp, Homo sapiens
tatgcagattagaac

SEQ ID NO: 367815 - DNA, 15 bp, Homo sapiens
ttatgcagattagaa

SEQ ID NO: 367816 - DNA, 15 bp, Homo sapiens
attatgcagattaga

SEQ ID NO: 367817 - DNA, 15 bp, Homo sapiens
aattatgcagattag

SEQ ID NO: 367818 - DNA, 15 bp, Homo sapiens
aaattatgcagatta

SEQ ID NO: 367819 - DNA, 15 bp, Homo sapiens
aaaattatgcagatt

SEQ ID NO: 367820 - DNA, 15 bp, Homo sapiens
gaaaattatgcagat

SEQ ID NO: 367821 - DNA, 15 bp, Homo sapiens
ggaaaattatgcaga

SEQ ID NO: 367822 - DNA, 15 bp, Homo sapiens
gggaaaattatgcag

SEQ ID NO: 367823 - DNA, 15 bp, Homo sapiens
tgggaaaattatgca

SEQ ID NO: 367824 - DNA, 15 bp, Homo sapiens
atgggaaaattatgc

SEQ ID NO: 367825 - DNA, 15 bp, Homo sapiens
tatgggaaaattatg

SEQ ID NO: 367826 - DNA, 15 bp, Homo sapiens
ttatgggaaaattat

SEQ ID NO: 367827 - DNA, 15 bp, Homo sapiens
cttatgggaaaatta

SEQ ID NO: 367828 - DNA, 15 bp, Homo sapiens
gcttatgggaaaatt

SEQ ID NO: 367829 - DNA, 15 bp, Homo sapiens
tgcttatgggaaaat

SEQ ID NO: 367830 - DNA, 15 bp, Homo sapiens
ctgcttatgggaaaa

SEQ ID NO: 367831 - DNA, 15 bp, Homo sapiens
gctgcttatgggaaa

SEQ ID NO: 367832 - DNA, 15 bp, Homo sapiens
tgctgcttatgggaa

SEQ ID NO: 367833 - DNA, 15 bp, Homo sapiens
ttgctgcttatggga

SEQ ID NO: 367834 - DNA, 15 bp, Homo sapiens
attgctgcttatggg

SEQ ID NO: 367835 - DNA, 15 bp, Homo sapiens
cattgctgcttatgg

SEQ ID NO: 367836 - DNA, 15 bp, Homo sapiens
ccattgctgcttatg

SEQ ID NO: 367837 - DNA, 15 bp, Homo sapiens
cccattgctgcttat

SEQ ID NO: 367838 - DNA, 15 bp, Homo sapiens
tcccattgctgctta

SEQ ID NO: 367839 - DNA, 15 bp, Homo sapiens
ttcccattgctgctt

SEQ ID NO: 367840 - DNA, 15 bp, Homo sapiens
tttcccattgctgct

SEQ ID NO: 367841 - DNA, 15 bp, Homo sapiens
atttcccattgctgc

SEQ ID NO: 367842 - DNA, 15 bp, Homo sapiens
aatttcccattgctg

SEQ ID NO: 367843 - DNA, 15 bp, Homo sapiens
aaatttcccattgct

SEQ ID NO: 367844 - DNA, 15 bp, Homo sapiens
caaatttcccattgc

SEQ ID NO: 367845 - DNA, 15 bp, Homo sapiens
ccaaatttcccattg

SEQ ID NO: 367846 - DNA, 15 bp, Homo sapiens
tccaaatttcccatt

SEQ ID NO: 367847 - DNA, 15 bp, Homo sapiens
atccaaatttcccat

SEQ ID NO: 367848 - DNA, 15 bp, Homo sapiens
tatccaaatttccca

SEQ ID NO: 367849 - DNA, 15 bp, Homo sapiens
ttatccaaatttccc

SEQ ID NO: 367850 - DNA, 15 bp, Homo sapiens
attatccaaatttcc

SEQ ID NO: 367851 - DNA, 15 bp, Homo sapiens
aattatccaaatttc

SEQ ID NO: 367852 - DNA, 15 bp, Homo sapiens
aaattatccaaattt

SEQ ID NO: 367853 - DNA, 15 bp, Homo sapiens
taaattatccaaatt

SEQ ID NO: 367854 - DNA, 15 bp, Homo sapiens
ataaattatccaaat

SEQ ID NO: 367855 - DNA, 15 bp, Homo sapiens
cataaattatccaaa

SEQ ID NO: 367856 - DNA, 15 bp, Homo sapiens
acataaattatccaa

SEQ ID NO: 367857 - DNA, 15 bp, Homo sapiens
aacataaattatcca

SEQ ID NO: 367858 - DNA, 15 bp, Homo sapiens
aaacataaattatcc

SEQ ID NO: 367859 - DNA, 15 bp, Homo sapiens
gaaacataaattatc

SEQ ID NO: 367860 - DNA, 15 bp, Homo sapiens
tgaaacataaattat

SEQ ID NO: 367861 - DNA, 15 bp, Homo sapiens
ctgaaacataaatta

SEQ ID NO: 367862 - DNA, 15 bp, Homo sapiens
gctgaaacataaatt

SEQ ID NO: 367863 - DNA, 15 bp, Homo sapiens
tgctgaaacataaat

SEQ ID NO: 367864 - DNA, 15 bp, Homo sapiens
ctgctgaaacataaa

SEQ ID NO: 367865 - DNA, 15 bp, Homo sapiens
actgctgaaacataa

SEQ ID NO: 367866 - DNA, 15 bp, Homo sapiens
aactgctgaaacata

SEQ ID NO: 367867 - DNA, 15 bp, Homo sapiens
caactgctgaaacat

SEQ ID NO: 367868 - DNA, 15 bp, Homo sapiens
gcaactgctgaaaca

SEQ ID NO: 367869 - DNA, 15 bp, Homo sapiens
ggcaactgctgaaac

SEQ ID NO: 367870 - DNA, 15 bp, Homo sapiens
tggcaactgctgaaa

SEQ ID NO: 367871 - DNA, 15 bp, Homo sapiens
ttggcaactgctgaa

SEQ ID NO: 367872 - DNA, 15 bp, Homo sapiens
attggcaactgctga

SEQ ID NO: 367873 - DNA, 15 bp, Homo sapiens
gattggcaactgctg

SEQ ID NO: 367874 - DNA, 15 bp, Homo sapiens
tgattggcaactgct

SEQ ID NO: 367875 - DNA, 15 bp, Homo sapiens
atgattggcaactgc

SEQ ID NO: 367876 - DNA, 15 bp, Homo sapiens
catgattggcaactg

SEQ ID NO: 367877 - DNA, 15 bp, Homo sapiens
acatgattggcaact

SEQ ID NO: 367878 - DNA, 15 bp, Homo sapiens
cacatgattggcaac

SEQ ID NO: 367879 - DNA, 15 bp, Homo sapiens
acacatgattggcaa

SEQ ID NO: 367880 - DNA, 15 bp, Homo sapiens
aacacatgattggca

SEQ ID NO: 367881 - DNA, 15 bp, Homo sapiens
taacacatgattggc

SEQ ID NO: 367882 - DNA, 15 bp, Homo sapiens
ttaacacatgattgg

SEQ ID NO: 367883 - DNA, 15 bp, Homo sapiens
tttaacacatgattg

SEQ ID NO: 367884 - DNA, 15 bp, Homo sapiens
atttaacacatgatt

SEQ ID NO: 367885 - DNA, 15 bp, Homo sapiens
tatttaacacatgat

SEQ ID NO: 367886 - DNA, 15 bp, Homo sapiens
ctatttaacacatga

SEQ ID NO: 367887 - DNA, 15 bp, Homo sapiens
gctatttaacacatg

SEQ ID NO: 367888 - DNA, 15 bp, Homo sapiens
tgctatttaacacat

SEQ ID NO: 367889 - DNA, 15 bp, Homo sapiens
atgctatttaacaca

SEQ ID NO: 367890 - DNA, 15 bp, Homo sapiens
aatgctatttaacac

SEQ ID NO: 367891 - DNA, 15 bp, Homo sapiens
caatgctatttaaca

SEQ ID NO: 367892 - DNA, 15 bp, Homo sapiens
acaatgctatttaac

SEQ ID NO: 367893 - DNA, 15 bp, Homo sapiens
aacaatgctatttaa

SEQ ID NO: 367894 - DNA, 15 bp, Homo sapiens
caacaatgctattta

SEQ ID NO: 367895 - DNA, 15 bp, Homo sapiens
gcaacaatgctattt

SEQ ID NO: 367896 - DNA, 15 bp, Homo sapiens
tgcaacaatgctatt

SEQ ID NO: 367897 - DNA, 15 bp, Homo sapiens
atgcaacaatgctat

SEQ ID NO: 367898 - DNA, 15 bp, Homo sapiens
aatgcaacaatgcta

SEQ ID NO: 367899 - DNA, 15 bp, Homo sapiens
aaatgcaacaatgct

SEQ ID NO: 367900 - DNA, 15 bp, Homo sapiens
taaatgcaacaatgc

SEQ ID NO: 367901 - DNA, 15 bp, Homo sapiens
gtaaatgcaacaatg

SEQ ID NO: 367902 - DNA, 15 bp, Homo sapiens
agtaaatgcaacaat

SEQ ID NO: 367903 - DNA, 15 bp, Homo sapiens
aagtaaatgcaacaa

SEQ ID NO: 367904 - DNA, 15 bp, Homo sapiens
taagtaaatgcaaca

SEQ ID NO: 367905 - DNA, 15 bp, Homo sapiens
ataagtaaatgcaac

SEQ ID NO: 367906 - DNA, 15 bp, Homo sapiens
gataagtaaatgcaa

SEQ ID NO: 367907 - DNA, 15 bp, Homo sapiens
tgataagtaaatgca

SEQ ID NO: 367908 - DNA, 15 bp, Homo sapiens
ttgataagtaaatgc

SEQ ID NO: 367909 - DNA, 15 bp, Homo sapiens
tttgataagtaaatg

SEQ ID NO: 367910 - DNA, 15 bp, Homo sapiens
ttttgataagtaaat

SEQ ID NO: 367911 - DNA, 15 bp, Homo sapiens
attttgataagtaaa

SEQ ID NO: 367912 - DNA, 15 bp, Homo sapiens
tattttgataagtaa

SEQ ID NO: 367913 - DNA, 15 bp, Homo sapiens
atattttgataagta

SEQ ID NO: 367914 - DNA, 15 bp, Homo sapiens
aatattttgataagt

SEQ ID NO: 367915 - DNA, 15 bp, Homo sapiens
aaatattttgataag

SEQ ID NO: 367916 - DNA, 15 bp, Homo sapiens
aaaatattttgataa

SEQ ID NO: 367917 - DNA, 15 bp, Homo sapiens
aaaaatattttgata

SEQ ID NO: 367918 - DNA, 15 bp, Homo sapiens
taaaaatattttgat

SEQ ID NO: 367919 - DNA, 15 bp, Homo sapiens
ataaaaatattttga

SEQ ID NO: 367920 - DNA, 15 bp, Homo sapiens
aataaaaatattttg

SEQ ID NO: 367921 - DNA, 15 bp, Homo sapiens
caataaaaatatttt

SEQ ID NO: 367922 - DNA, 15 bp, Homo sapiens
tcaataaaaatattt

SEQ ID NO: 367923 - DNA, 15 bp, Homo sapiens
atcaataaaaatatt

SEQ ID NO: 367924 - DNA, 15 bp, Homo sapiens
gatcaataaaaatat

SEQ ID NO: 367925 - DNA, 15 bp, Homo sapiens
agatcaataaaaata

SEQ ID NO: 367926 - DNA, 15 bp, Homo sapiens
cagatcaataaaaat

SEQ ID NO: 367927 - DNA, 15 bp, Homo sapiens
gcagatcaataaaaa

SEQ ID NO: 367928 - DNA, 15 bp, Homo sapiens
tgcagatcaataaaa

SEQ ID NO: 367929 - DNA, 15 bp, Homo sapiens
gtgcagatcaataaa

SEQ ID NO: 367930 - DNA, 15 bp, Homo sapiens
agtgcagatcaataa

SEQ ID NO: 367931 - DNA, 15 bp, Homo sapiens
aagtgcagatcaata

SEQ ID NO: 367932 - DNA, 15 bp, Homo sapiens
gaagtgcagatcaat

SEQ ID NO: 367933 - DNA, 15 bp, Homo sapiens
tgaagtgcagatcaa

SEQ ID NO: 367934 - DNA, 15 bp, Homo sapiens
atgaagtgcagatca

SEQ ID NO: 367935 - DNA, 15 bp, Homo sapiens
gatgaagtgcagatc

SEQ ID NO: 367936 - DNA, 15 bp, Homo sapiens
agatgaagtgcagat

SEQ ID NO: 367937 - DNA, 15 bp, Homo sapiens
cagatgaagtgcaga

SEQ ID NO: 367938 - DNA, 15 bp, Homo sapiens
tcagatgaagtgcag

SEQ ID NO: 367939 - DNA, 15 bp, Homo sapiens
gtcagatgaagtgca

SEQ ID NO: 367940 - DNA, 15 bp, Homo sapiens
tgtcagatgaagtgc

SEQ ID NO: 367941 - DNA, 15 bp, Homo sapiens
atgtcagatgaagtg

SEQ ID NO: 367942 - DNA, 15 bp, Homo sapiens
aatgtcagatgaagt

SEQ ID NO: 367943 - DNA, 15 bp, Homo sapiens
aaatgtcagatgaag

SEQ ID NO: 367944 - DNA, 15 bp, Homo sapiens
caaatgtcagatgaa

SEQ ID NO: 367945 - DNA, 15 bp, Homo sapiens
gcaaatgtcagatga

SEQ ID NO: 367946 - DNA, 15 bp, Homo sapiens
ggcaaatgtcagatg

SEQ ID NO: 367947 - DNA, 15 bp, Homo sapiens
aggcaaatgtcagat

SEQ ID NO: 367948 - DNA, 15 bp, Homo sapiens
aaggcaaatgtcaga

SEQ ID NO: 367949 - DNA, 15 bp, Homo sapiens
aaaggcaaatgtcag

SEQ ID NO: 367950 - DNA, 15 bp, Homo sapiens
caaaggcaaatgtca

SEQ ID NO: 367951 - DNA, 15 bp, Homo sapiens
tcaaaggcaaatgtc

SEQ ID NO: 367952 - DNA, 15 bp, Homo sapiens
ctcaaaggcaaatgt

SEQ ID NO: 367953 - DNA, 15 bp, Homo sapiens
cctcaaaggcaaatg

SEQ ID NO: 367954 - DNA, 15 bp, Homo sapiens
acctcaaaggcaaat

SEQ ID NO: 367955 - DNA, 15 bp, Homo sapiens
aacctcaaaggcaaa

SEQ ID NO: 367956 - DNA, 15 bp, Homo sapiens
aaacctcaaaggcaa

SEQ ID NO: 367957 - DNA, 15 bp, Homo sapiens
aaaacctcaaaggca

SEQ ID NO: 367958 - DNA, 15 bp, Homo sapiens
aaaaacctcaaaggc

SEQ ID NO: 367959 - DNA, 15 bp, Homo sapiens
aaaaaacctcaaagg

SEQ ID NO: 367960 - DNA, 15 bp, Homo sapiens
aaaaaaacctcaaag

SEQ ID NO: 367961 - DNA, 15 bp, Homo sapiens
gaaaaaaacctcaaa

SEQ ID NO: 367962 - DNA, 15 bp, Homo sapiens
ggaaaaaaacctcaa

SEQ ID NO: 367963 - DNA, 15 bp, Homo sapiens
gggaaaaaaacctca

SEQ ID NO: 367964 - DNA, 15 bp, Homo sapiens
agggaaaaaaacctc

SEQ ID NO: 367965 - DNA, 15 bp, Homo sapiens
cagggaaaaaaacct

SEQ ID NO: 367966 - DNA, 15 bp, Homo sapiens
ccagggaaaaaaacc

SEQ ID NO: 367967 - DNA, 15 bp, Homo sapiens
gccagggaaaaaaac

SEQ ID NO: 367968 - DNA, 15 bp, Homo sapiens
tgccagggaaaaaaa

SEQ ID NO: 367969 - DNA, 15 bp, Homo sapiens
atgccagggaaaaaa

SEQ ID NO: 367970 - DNA, 15 bp, Homo sapiens
aatgccagggaaaaa

SEQ ID NO: 367971 - DNA, 15 bp, Homo sapiens
taatgccagggaaaa

SEQ ID NO: 367972 - DNA, 15 bp, Homo sapiens
ttaatgccagggaaa

SEQ ID NO: 367973 - DNA, 15 bp, Homo sapiens
gttaatgccagggaa

SEQ ID NO: 367974 - DNA, 15 bp, Homo sapiens
tgttaatgccaggga

SEQ ID NO: 367975 - DNA, 15 bp, Homo sapiens
ctgttaatgccaggg

SEQ ID NO: 367976 - DNA, 15 bp, Homo sapiens
cctgttaatgccagg

SEQ ID NO: 367977 - DNA, 15 bp, Homo sapiens
tcctgttaatgccag

SEQ ID NO: 367978 - DNA, 15 bp, Homo sapiens
ttcctgttaatgcca

SEQ ID NO: 367979 - DNA, 15 bp, Homo sapiens
tttcctgttaatgcc

SEQ ID NO: 367980 - DNA, 15 bp, Homo sapiens
atttcctgttaatgc

SEQ ID NO: 367981 - DNA, 15 bp, Homo sapiens
aatttcctgttaatg

SEQ ID NO: 367982 - DNA, 15 bp, Homo sapiens
aaatttcctgttaat

SEQ ID NO: 367983 - DNA, 15 bp, Homo sapiens
taaatttcctgttaa

SEQ ID NO: 367984 - DNA, 15 bp, Homo sapiens
ttaaatttcctgtta

SEQ ID NO: 367985 - DNA, 15 bp, Homo sapiens
attaaatttcctgtt

SEQ ID NO: 367986 - DNA, 15 bp, Homo sapiens
aattaaatttcctgt

SEQ ID NO: 367987 - DNA, 15 bp, Homo sapiens
gaattaaatttcctg

SEQ ID NO: 367988 - DNA, 15 bp, Homo sapiens
tgaattaaatttcct

SEQ ID NO: 367989 - DNA, 15 bp, Homo sapiens
atgaattaaatttcc

SEQ ID NO: 367990 - DNA, 15 bp, Homo sapiens
gatgaattaaatttc

SEQ ID NO: 367991 - DNA, 15 bp, Homo sapiens
agatgaattaaattt

SEQ ID NO: 367992 - DNA, 15 bp, Homo sapiens
gagatgaattaaatt

SEQ ID NO: 367993 - DNA, 15 bp, Homo sapiens
tgagatgaattaaat

SEQ ID NO: 367994 - DNA, 15 bp, Homo sapiens
atgagatgaattaaa

SEQ ID NO: 367995 - DNA, 15 bp, Homo sapiens
tatgagatgaattaa

SEQ ID NO: 367996 - DNA, 15 bp, Homo sapiens
ctatgagatgaatta

SEQ ID NO: 367997 - DNA, 15 bp, Homo sapiens
tctatgagatgaatt

SEQ ID NO: 367998 - DNA, 15 bp, Homo sapiens
atctatgagatgaat

SEQ ID NO: 367999 - DNA, 15 bp, Homo sapiens
catctatgagatgaa

SEQ ID NO: 368000 - DNA, 15 bp, Homo sapiens
tcatctatgagatga

SEQ ID NO: 368001 - DNA, 15 bp, Homo sapiens
atcatctatgagatg

SEQ ID NO: 368002 - DNA, 15 bp, Homo sapiens
catcatctatgagat

SEQ ID NO: 368003 - DNA, 15 bp, Homo sapiens
acatcatctatgaga

SEQ ID NO: 368004 - DNA, 15 bp, Homo sapiens
tacatcatctatgag

SEQ ID NO: 368005 - DNA, 15 bp, Homo sapiens
ttacatcatctatga

SEQ ID NO: 368006 - DNA, 15 bp, Homo sapiens
attacatcatctatg

SEQ ID NO: 368007 - DNA, 15 bp, Homo sapiens
tattacatcatctat

SEQ ID NO: 368008 - DNA, 15 bp, Homo sapiens
atattacatcatcta

SEQ ID NO: 368009 - DNA, 15 bp, Homo sapiens
catattacatcatct

SEQ ID NO: 368010 - DNA, 15 bp, Homo sapiens
tcatattacatcatc

SEQ ID NO: 368011 - DNA, 15 bp, Homo sapiens
ctcatattacatcat

SEQ ID NO: 368012 - DNA, 15 bp, Homo sapiens
tctcatattacatca

SEQ ID NO: 368013 - DNA, 15 bp, Homo sapiens
atctcatattacatc

SEQ ID NO: 368014 - DNA, 15 bp, Homo sapiens
catctcatattacat

SEQ ID NO: 368015 - DNA, 15 bp, Homo sapiens
acatctcatattaca

SEQ ID NO: 368016 - DNA, 15 bp, Homo sapiens
aacatctcatattac

SEQ ID NO: 368017 - DNA, 15 bp, Homo sapiens
aaacatctcatatta

SEQ ID NO: 368018 - DNA, 15 bp, Homo sapiens
gaaacatctcatatt

SEQ ID NO: 368019 - DNA, 15 bp, Homo sapiens
agaaacatctcatat

SEQ ID NO: 368020 - DNA, 15 bp, Homo sapiens
gagaaacatctcata

SEQ ID NO: 368021 - DNA, 15 bp, Homo sapiens
agagaaacatctcat

SEQ ID NO: 368022 - DNA, 15 bp, Homo sapiens
aagagaaacatctca

SEQ ID NO: 368023 - DNA, 15 bp, Homo sapiens
caagagaaacatctc

SEQ ID NO: 368024 - DNA, 15 bp, Homo sapiens
tcaagagaaacatct

SEQ ID NO: 368025 - DNA, 15 bp, Homo sapiens
atcaagagaaacatc

SEQ ID NO: 368026 - DNA, 15 bp, Homo sapiens
aatcaagagaaacat

SEQ ID NO: 368027 - DNA, 15 bp, Homo sapiens
aaatcaagagaaaca

SEQ ID NO: 368028 - DNA, 15 bp, Homo sapiens
aaaatcaagagaaac

SEQ ID NO: 368029 - DNA, 15 bp, Homo sapiens
taaaatcaagagaaa

SEQ ID NO: 368030 - DNA, 15 bp, Homo sapiens
ttaaaatcaagagaa

SEQ ID NO: 368031 - DNA, 15 bp, Homo sapiens
gttaaaatcaagaga

SEQ ID NO: 368032 - DNA, 15 bp, Homo sapiens
tgttaaaatcaagag

SEQ ID NO: 368033 - DNA, 15 bp, Homo sapiens
atgttaaaatcaaga

SEQ ID NO: 368034 - DNA, 15 bp, Homo sapiens
catgttaaaatcaag

SEQ ID NO: 368035 - DNA, 15 bp, Homo sapiens
acatgttaaaatcaa

SEQ ID NO: 368036 - DNA, 15 bp, Homo sapiens
gacatgttaaaatca

SEQ ID NO: 368037 - DNA, 15 bp, Homo sapiens
agacatgttaaaatc

SEQ ID NO: 368038 - DNA, 15 bp, Homo sapiens
aagacatgttaaaat

SEQ ID NO: 368039 - DNA, 15 bp, Homo sapiens
aaagacatgttaaaa

SEQ ID NO: 368040 - DNA, 15 bp, Homo sapiens
taaagacatgttaaa

SEQ ID NO: 368041 - DNA, 15 bp, Homo sapiens
ataaagacatgttaa

SEQ ID NO: 368042 - DNA, 15 bp, Homo sapiens
tataaagacatgtta

SEQ ID NO: 368043 - DNA, 15 bp, Homo sapiens
ctataaagacatgtt

SEQ ID NO: 368044 - DNA, 15 bp, Homo sapiens
tctataaagacatgt

SEQ ID NO: 368045 - DNA, 15 bp, Homo sapiens
atctataaagacatg

SEQ ID NO: 368046 - DNA, 15 bp, Homo sapiens
gatctataaagacat

SEQ ID NO: 368047 - DNA, 15 bp, Homo sapiens
tgatctataaagaca

SEQ ID NO: 368048 - DNA, 15 bp, Homo sapiens
atgatctataaagac

SEQ ID NO: 368049 - DNA, 15 bp, Homo sapiens
aatgatctataaaga

SEQ ID NO: 368050 - DNA, 15 bp, Homo sapiens
aaatgatctataaag

SEQ ID NO: 368051 - DNA, 15 bp, Homo sapiens
aaaatgatctataaa

SEQ ID NO: 368052 - DNA, 15 bp, Homo sapiens
aaaaatgatctataa

SEQ ID NO: 368053 - DNA, 15 bp, Homo sapiens
taaaaatgatctata

SEQ ID NO: 368054 - DNA, 15 bp, Homo sapiens
ttaaaaatgatctat

SEQ ID NO: 368055 - DNA, 15 bp, Homo sapiens
tttaaaaatgatcta

SEQ ID NO: 368056 - DNA, 15 bp, Homo sapiens
ctttaaaaatgatct

SEQ ID NO: 368057 - DNA, 15 bp, Homo sapiens
cctttaaaaatgatc

SEQ ID NO: 368058 - DNA, 15 bp, Homo sapiens
acctttaaaaatgat

SEQ ID NO: 368059 - DNA, 15 bp, Homo sapiens
cacctttaaaaatga

SEQ ID NO: 368060 - DNA, 15 bp, Homo sapiens
atcacctttaaaaat

SEQ ID NO: 368061 - DNA, 15 bp, Homo sapiens
gatcacctttaaaaa

SEQ ID NO: 368062 - DNA, 15 bp, Homo sapiens
agatcacctttaaaa

SEQ ID NO: 368063 - DNA, 15 bp, Homo sapiens
aagatcacctttaaa

SEQ ID NO: 368064 - DNA, 15 bp, Homo sapiens
aaagatcacctttaa

SEQ ID NO: 368065 - DNA, 15 bp, Homo sapiens
gaaagatcaccttta

SEQ ID NO: 368066 - DNA, 15 bp, Homo sapiens
ggaaagatcaccttt

SEQ ID NO: 368067 - DNA, 15 bp, Homo sapiens
gggaaagatcacctt

SEQ ID NO: 368068 - DNA, 15 bp, Homo sapiens
agggaaagatcacct

SEQ ID NO: 368069 - DNA, 15 bp, Homo sapiens
aagggaaagatcacc

SEQ ID NO: 368070 - DNA, 15 bp, Homo sapiens
aaagggaaagatcac

SEQ ID NO: 368071 - DNA, 15 bp, Homo sapiens
aaaagggaaagatca

SEQ ID NO: 368072 - DNA, 15 bp, Homo sapiens
taaaagggaaagatc

SEQ ID NO: 368073 - DNA, 15 bp, Homo sapiens
gtaaaagggaaagat

SEQ ID NO: 368074 - DNA, 15 bp, Homo sapiens
tgtaaaagggaaaga

SEQ ID NO: 368075 - DNA, 15 bp, Homo sapiens
ttgtaaaagggaaag

SEQ ID NO: 368076 - DNA, 15 bp, Homo sapiens
gttgtaaaagggaaa

SEQ ID NO: 368077 - DNA, 15 bp, Homo sapiens
agttgtaaaagggaa

SEQ ID NO: 368078 - DNA, 15 bp, Homo sapiens
aagttgtaaaaggga

SEQ ID NO: 368079 - DNA, 15 bp, Homo sapiens
gaagttgtaaaaggg

SEQ ID NO: 368080 - DNA, 15 bp, Homo sapiens
tgaagttgtaaaagg

SEQ ID NO: 368081 - DNA, 15 bp, Homo sapiens
atgaagttgtaaaag

SEQ ID NO: 368082 - DNA, 15 bp, Homo sapiens
tatgaagttgtaaaa

SEQ ID NO: 368083 - DNA, 15 bp, Homo sapiens
atatgaagttgtaaa

SEQ ID NO: 368084 - DNA, 15 bp, Homo sapiens
aatatgaagttgtaa

SEQ ID NO: 368085 - DNA, 15 bp, Homo sapiens
caatatgaagttgta

SEQ ID NO: 368086 - DNA, 15 bp, Homo sapiens
tcaatatgaagttgt

SEQ ID NO: 368087 - DNA, 15 bp, Homo sapiens
ttcaatatgaagttg

SEQ ID NO: 368088 - DNA, 15 bp, Homo sapiens
attcaatatgaagtt

SEQ ID NO: 368089 - DNA, 15 bp, Homo sapiens
tattcaatatgaagt

SEQ ID NO: 368090 - DNA, 15 bp, Homo sapiens
gtattcaatatgaag

SEQ ID NO: 368091 - DNA, 15 bp, Homo sapiens
ggtattcaatatgaa

SEQ ID NO: 368092 - DNA, 15 bp, Homo sapiens
aggtattcaatatga

SEQ ID NO: 368093 - DNA, 15 bp, Homo sapiens
caggtattcaatatg

SEQ ID NO: 368094 - DNA, 15 bp, Homo sapiens
acaggtattcaatat

SEQ ID NO: 368095 - DNA, 15 bp, Homo sapiens
gacaggtattcaata

SEQ ID NO: 368096 - DNA, 15 bp, Homo sapiens
agacaggtattcaat

SEQ ID NO: 368097 - DNA, 15 bp, Homo sapiens
gagacaggtattcaa

SEQ ID NO: 368098 - DNA, 15 bp, Homo sapiens
tgagacaggtattca

SEQ ID NO: 368099 - DNA, 15 bp, Homo sapiens
ctgagacaggtattc

SEQ ID NO: 368100 - DNA, 15 bp, Homo sapiens
gctgagacaggtatt

SEQ ID NO: 368101 - DNA, 15 bp, Homo sapiens
tgctgagacaggtat

SEQ ID NO: 368102 - DNA, 15 bp, Homo sapiens
ttgctgagacaggta

SEQ ID NO: 368103 - DNA, 15 bp, Homo sapiens
tttgctgagacaggt

SEQ ID NO: 368104 - DNA, 15 bp, Homo sapiens
gtttgctgagacagg

SEQ ID NO: 368105 - DNA, 15 bp, Homo sapiens
ggtttgctgagacag

SEQ ID NO: 368106 - DNA, 15 bp, Homo sapiens
aggtttgctgagaca

SEQ ID NO: 368107 - DNA, 15 bp, Homo sapiens
taggtttgctgagac

SEQ ID NO: 368108 - DNA, 15 bp, Homo sapiens
ctaggtttgctgaga

SEQ ID NO: 368109 - DNA, 15 bp, Homo sapiens
tctaggtttgctgag

SEQ ID NO: 368110 - DNA, 15 bp, Homo sapiens
atctaggtttgctga

SEQ ID NO: 368111 - DNA, 15 bp, Homo sapiens
catctaggtttgctg

SEQ ID NO: 368112 - DNA, 15 bp, Homo sapiens
tcatctaggtttgct

SEQ ID NO: 368113 - DNA, 15 bp, Homo sapiens
gtcatctaggtttgc

SEQ ID NO: 368114 - DNA, 15 bp, Homo sapiens
agtcatctaggtttg

SEQ ID NO: 368115 - DNA, 15 bp, Homo sapiens
gagtcatctaggttt

SEQ ID NO: 368116 - DNA, 15 bp, Homo sapiens
cgagtcatctaggtt

SEQ ID NO: 368117 - DNA, 15 bp, Homo sapiens
ccgagtcatctaggt

SEQ ID NO: 368118 - DNA, 15 bp, Homo sapiens
gccgagtcatctagg

SEQ ID NO: 368119 - DNA, 15 bp, Homo sapiens
ggccgagtcatctag

SEQ ID NO: 368120 - DNA, 15 bp, Homo sapiens
aggccgagtcatcta

SEQ ID NO: 368121 - DNA, 15 bp, Homo sapiens
taggccgagtcatct

SEQ ID NO: 368122 - DNA, 15 bp, Homo sapiens
ttaggccgagtcatc

SEQ ID NO: 368123 - DNA, 15 bp, Homo sapiens
attaggccgagtcat

SEQ ID NO: 368124 - DNA, 15 bp, Homo sapiens
aattaggccgagtca

SEQ ID NO: 368125 - DNA, 15 bp, Homo sapiens
aaattaggccgagtc

SEQ ID NO: 368126 - DNA, 15 bp, Homo sapiens
taaattaggccgagt

SEQ ID NO: 368127 - DNA, 15 bp, Homo sapiens
ataaattaggccgag

SEQ ID NO: 368128 - DNA, 15 bp, Homo sapiens
aataaattaggccga

SEQ ID NO: 368129 - DNA, 15 bp, Homo sapiens
aaataaattaggccg

SEQ ID NO: 368130 - DNA, 15 bp, Homo sapiens
gaaataaattaggcc

SEQ ID NO: 368131 - DNA, 15 bp, Homo sapiens
ggaaataaattaggc

SEQ ID NO: 368132 - DNA, 15 bp, Homo sapiens
gggaaataaattagg

SEQ ID NO: 368133 - DNA, 15 bp, Homo sapiens
agggaaataaattag

SEQ ID NO: 368134 - DNA, 15 bp, Homo sapiens
tagggaaataaatta

SEQ ID NO: 368135 - DNA, 15 bp, Homo sapiens
ctagggaaataaatt

SEQ ID NO: 368136 - DNA, 15 bp, Homo sapiens
actagggaaataaat

SEQ ID NO: 368137 - DNA, 15 bp, Homo sapiens
aactagggaaataaa

SEQ ID NO: 368138 - DNA, 15 bp, Homo sapiens
aaactagggaaataa

SEQ ID NO: 368139 - DNA, 15 bp, Homo sapiens
taaactagggaaata

SEQ ID NO: 368140 - DNA, 15 bp, Homo sapiens
ttaaactagggaaat

SEQ ID NO: 368141 - DNA, 15 bp, Homo sapiens
gttaaactagggaaa

SEQ ID NO: 368142 - DNA, 15 bp, Homo sapiens
cgttaaactagggaa

SEQ ID NO: 368143 - DNA, 15 bp, Homo sapiens
acgttaaactaggga

SEQ ID NO: 368144 - DNA, 15 bp, Homo sapiens
tacgttaaactaggg

SEQ ID NO: 368145 - DNA, 15 bp, Homo sapiens
ctacgttaaactagg

SEQ ID NO: 368146 - DNA, 15 bp, Homo sapiens
gctacgttaaactag

SEQ ID NO: 368147 - DNA, 15 bp, Homo sapiens
tgctacgttaaacta

SEQ ID NO: 368148 - DNA, 15 bp, Homo sapiens
atgctacgttaaact

SEQ ID NO: 368149 - DNA, 15 bp, Homo sapiens
tatgctacgttaaac

SEQ ID NO: 368150 - DNA, 15 bp, Homo sapiens
atatgctacgttaaa

SEQ ID NO: 368151 - DNA, 15 bp, Homo sapiens
catatgctacgttaa

SEQ ID NO: 368152 - DNA, 15 bp, Homo sapiens
ccatatgctacgtta

SEQ ID NO: 368153 - DNA, 15 bp, Homo sapiens
tccatatgctacgtt

SEQ ID NO: 368154 - DNA, 15 bp, Homo sapiens
atccatatgctacgt

SEQ ID NO: 368155 - DNA, 15 bp, Homo sapiens
aatccatatgctacg

SEQ ID NO: 368156 - DNA, 15 bp, Homo sapiens
aaatccatatgctac

SEQ ID NO: 368157 - DNA, 15 bp, Homo sapiens
gaaatccatatgcta

SEQ ID NO: 368158 - DNA, 15 bp, Homo sapiens
agaaatccatatgct

SEQ ID NO: 368159 - DNA, 15 bp, Homo sapiens
tagaaatccatatgc

SEQ ID NO: 368160 - DNA, 15 bp, Homo sapiens
ttagaaatccatatg

SEQ ID NO: 368161 - DNA, 15 bp, Homo sapiens
gttagaaatccatat

SEQ ID NO: 368162 - DNA, 15 bp, Homo sapiens
ggttagaaatccata

SEQ ID NO: 368163 - DNA, 15 bp, Homo sapiens
tggttagaaatccat

SEQ ID NO: 368164 - DNA, 15 bp, Homo sapiens
atggttagaaatcca

SEQ ID NO: 368165 - DNA, 15 bp, Homo sapiens
gatggttagaaatcc

SEQ ID NO: 368166 - DNA, 15 bp, Homo sapiens
tgatggttagaaatc

SEQ ID NO: 368167 - DNA, 15 bp, Homo sapiens
atgatggttagaaat

SEQ ID NO: 368168 - DNA, 15 bp, Homo sapiens
aatgatggttagaaa

SEQ ID NO: 368169 - DNA, 15 bp, Homo sapiens
aaatgatggttagaa

SEQ ID NO: 368170 - DNA, 15 bp, Homo sapiens
taaatgatggttaga

SEQ ID NO: 368171 - DNA, 15 bp, Homo sapiens
ataaatgatggttag

SEQ ID NO: 368172 - DNA, 15 bp, Homo sapiens
tataaatgatggtta

SEQ ID NO: 368173 - DNA, 15 bp, Homo sapiens
atataaatgatggtt

SEQ ID NO: 368174 - DNA, 15 bp, Homo sapiens
catataaatgatggt

SEQ ID NO: 368175 - DNA, 15 bp, Homo sapiens
gcatataaatgatgg

SEQ ID NO: 368176 - DNA, 15 bp, Homo sapiens
tgcatataaatgatg

SEQ ID NO: 368177 - DNA, 15 bp, Homo sapiens
gtgcatataaatgat

SEQ ID NO: 368178 - DNA, 15 bp, Homo sapiens
tgtgcatataaatga

SEQ ID NO: 368179 - DNA, 15 bp, Homo sapiens
gtgtgcatataaatg

SEQ ID NO: 368180 - DNA, 15 bp, Homo sapiens
tgtgtgcatataaat

SEQ ID NO: 368181 - DNA, 15 bp, Homo sapiens
ttgtgtgcatataaa

SEQ ID NO: 368182 - DNA, 15 bp, Homo sapiens
attgtgtgcatataa

SEQ ID NO: 368183 - DNA, 15 bp, Homo sapiens
tattgtgtgcatata

SEQ ID NO: 368184 - DNA, 15 bp, Homo sapiens
ttattgtgtgcatat

SEQ ID NO: 368185 - DNA, 15 bp, Homo sapiens
tttattgtgtgcata

SEQ ID NO: 368186 - DNA, 15 bp, Homo sapiens
ttttattgtgtgcat

SEQ ID NO: 368187 - DNA, 15 bp, Homo sapiens
cttttattgtgtgca

SEQ ID NO: 368188 - DNA, 15 bp, Homo sapiens
tcttttattgtgtgc

SEQ ID NO: 368189 - DNA, 15 bp, Homo sapiens
atcttttattgtgtg

SEQ ID NO: 368190 - DNA, 15 bp, Homo sapiens
tatcttttattgtgt

SEQ ID NO: 368191 - DNA, 15 bp, Homo sapiens
ttatcttttattgtg

SEQ ID NO: 368192 - DNA, 15 bp, Homo sapiens
attatcttttattgt

SEQ ID NO: 368193 - DNA, 15 bp, Homo sapiens
aattatcttttattg

SEQ ID NO: 368194 - DNA, 15 bp, Homo sapiens
aaattatcttttatt

SEQ ID NO: 368195 - DNA, 15 bp, Homo sapiens
caaattatcttttat

SEQ ID NO: 368196 - DNA, 15 bp, Homo sapiens
ccaaattatctttta

SEQ ID NO: 368197 - DNA, 15 bp, Homo sapiens
gccaaattatctttt

SEQ ID NO: 368198 - DNA, 15 bp, Homo sapiens
ggccaaattatcttt

SEQ ID NO: 368199 - DNA, 15 bp, Homo sapiens
gggccaaattatctt

SEQ ID NO: 368200 - DNA, 15 bp, Homo sapiens
tgggccaaattatct

SEQ ID NO: 368201 - DNA, 15 bp, Homo sapiens
gtgggccaaattatc

SEQ ID NO: 368202 - DNA, 15 bp, Homo sapiens
ggtgggccaaattat

SEQ ID NO: 368203 - DNA, 15 bp, Homo sapiens
tggtgggccaaatta

SEQ ID NO: 368204 - DNA, 15 bp, Homo sapiens
atggtgggccaaatt

SEQ ID NO: 368205 - DNA, 15 bp, Homo sapiens
aatggtgggccaaat

SEQ ID NO: 368206 - DNA, 15 bp, Homo sapiens
aaatggtgggccaaa

SEQ ID NO: 368207 - DNA, 15 bp, Homo sapiens
caaatggtgggccaa

SEQ ID NO: 368208 - DNA, 15 bp, Homo sapiens
tcaaatggtgggcca

SEQ ID NO: 368209 - DNA, 15 bp, Homo sapiens
ttcaaatggtgggcc

SEQ ID NO: 368210 - DNA, 15 bp, Homo sapiens
gttcaaatggtgggc

SEQ ID NO: 368211 - DNA, 15 bp, Homo sapiens
ggttcaaatggtggg

SEQ ID NO: 368212 - DNA, 15 bp, Homo sapiens
tggttcaaatggtgg

SEQ ID NO: 368213 - DNA, 15 bp, Homo sapiens
ttggttcaaatggtg

SEQ ID NO: 368214 - DNA, 15 bp, Homo sapiens
attggttcaaatggt

SEQ ID NO: 368215 - DNA, 15 bp, Homo sapiens
aattggttcaaatgg

SEQ ID NO: 368216 - DNA, 15 bp, Homo sapiens
gaattggttcaaatg

SEQ ID NO: 368217 - DNA, 15 bp, Homo sapiens
ggaattggttcaaat

SEQ ID NO: 368218 - DNA, 15 bp, Homo sapiens
aggaattggttcaaa

SEQ ID NO: 368219 - DNA, 15 bp, Homo sapiens
aaggaattggttcaa

SEQ ID NO: 368220 - DNA, 15 bp, Homo sapiens
aaaggaattggttca

SEQ ID NO: 368221 - DNA, 15 bp, Homo sapiens
taaaggaattggttc

SEQ ID NO: 368222 - DNA, 15 bp, Homo sapiens
ataaaggaattggtt

SEQ ID NO: 368223 - DNA, 15 bp, Homo sapiens
cataaaggaattggt

SEQ ID NO: 368224 - DNA, 15 bp, Homo sapiens
acataaaggaattgg

SEQ ID NO: 368225 - DNA, 15 bp, Homo sapiens
aacataaaggaattg

SEQ ID NO: 368226 - DNA, 15 bp, Homo sapiens
taacataaaggaatt

SEQ ID NO: 368227 - DNA, 15 bp, Homo sapiens
ttaacataaaggaat

SEQ ID NO: 368228 - DNA, 15 bp, Homo sapiens
cttaacataaaggaa

SEQ ID NO: 368229 - DNA, 15 bp, Homo sapiens
acttaacataaagga

SEQ ID NO: 368230 - DNA, 15 bp, Homo sapiens
gacttaacataaagg

SEQ ID NO: 368231 - DNA, 15 bp, Homo sapiens
agacttaacataaag

SEQ ID NO: 368232 - DNA, 15 bp, Homo sapiens
tagacttaacataaa

SEQ ID NO: 368233 - DNA, 15 bp, Homo sapiens
atagacttaacataa

SEQ ID NO: 368234 - DNA, 15 bp, Homo sapiens
gatagacttaacata

SEQ ID NO: 368235 - DNA, 15 bp, Homo sapiens
cgatagacttaacat

SEQ ID NO: 368236 - DNA, 15 bp, Homo sapiens
ccgatagacttaaca

SEQ ID NO: 368237 - DNA, 15 bp, Homo sapiens
cccgatagacttaac

SEQ ID NO: 368238 - DNA, 15 bp, Homo sapiens
ccccgatagacttaa

SEQ ID NO: 368239 - DNA, 15 bp, Homo sapiens
accccgatagactta

SEQ ID NO: 368240 - DNA, 15 bp, Homo sapiens
caccccgatagactt

SEQ ID NO: 368241 - DNA, 15 bp, Homo sapiens
ccaccccgatagact

SEQ ID NO: 368242 - DNA, 15 bp, Homo sapiens
cccaccccgatagac

SEQ ID NO: 368243 - DNA, 15 bp, Homo sapiens
tcccaccccgataga

SEQ ID NO: 368244 - DNA, 15 bp, Homo sapiens
ctcccaccccgatag

SEQ ID NO: 368245 - DNA, 15 bp, Homo sapiens
tctcccaccccgata

SEQ ID NO: 368246 - DNA, 15 bp, Homo sapiens
ttctcccaccccgat

SEQ ID NO: 368247 - DNA, 15 bp, Homo sapiens
cttctcccaccccga

SEQ ID NO: 368248 - DNA, 15 bp, Homo sapiens
gcttctcccaccccg

SEQ ID NO: 368249 - DNA, 15 bp, Homo sapiens
tgcttctcccacccc

SEQ ID NO: 368250 - DNA, 15 bp, Homo sapiens
gtgcttctcccaccc

SEQ ID NO: 368251 - DNA, 15 bp, Homo sapiens
agtgcttctcccacc

SEQ ID NO: 368252 - DNA, 15 bp, Homo sapiens
aagtgcttctcccac

SEQ ID NO: 368253 - DNA, 15 bp, Homo sapiens
taagtgcttctccca

SEQ ID NO: 368254 - DNA, 15 bp, Homo sapiens
gtaagtgcttctccc

SEQ ID NO: 368255 - DNA, 15 bp, Homo sapiens
ggtaagtgcttctcc

SEQ ID NO: 368256 - DNA, 15 bp, Homo sapiens
aggtaagtgcttctc

SEQ ID NO: 368257 - DNA, 15 bp, Homo sapiens
aaggtaagtgcttct

SEQ ID NO: 368258 - DNA, 15 bp, Homo sapiens
gaaggtaagtgcttc

SEQ ID NO: 368259 - DNA, 15 bp, Homo sapiens
tgaaggtaagtgctt

SEQ ID NO: 368260 - DNA, 15 bp, Homo sapiens
atgaaggtaagtgct

SEQ ID NO: 368261 - DNA, 15 bp, Homo sapiens
aatgaaggtaagtgc

SEQ ID NO: 368262 - DNA, 15 bp, Homo sapiens
aaatgaaggtaagtg

SEQ ID NO: 368263 - DNA, 15 bp, Homo sapiens
gaaatgaaggtaagt

SEQ ID NO: 368264 - DNA, 15 bp, Homo sapiens
agaaatgaaggtaag

SEQ ID NO: 368265 - DNA, 15 bp, Homo sapiens
gagaaatgaaggtaa

SEQ ID NO: 368266 - DNA, 15 bp, Homo sapiens
ggagaaatgaaggta

SEQ ID NO: 368267 - DNA, 15 bp, Homo sapiens
tggagaaatgaaggt

SEQ ID NO: 368268 - DNA, 15 bp, Homo sapiens
atggagaaatgaagg

SEQ ID NO: 368269 - DNA, 15 bp, Homo sapiens
gatggagaaatgaag

SEQ ID NO: 368270 - DNA, 15 bp, Homo sapiens
agatggagaaatgaa

SEQ ID NO: 368271 - DNA, 15 bp, Homo sapiens
tagatggagaaatga

SEQ ID NO: 368272 - DNA, 15 bp, Homo sapiens
atagatggagaaatg

SEQ ID NO: 368273 - DNA, 15 bp, Homo sapiens
aatagatggagaaat

SEQ ID NO: 368274 - DNA, 15 bp, Homo sapiens
gaatagatggagaaa

SEQ ID NO: 368275 - DNA, 15 bp, Homo sapiens
agaatagatggagaa

SEQ ID NO: 368276 - DNA, 15 bp, Homo sapiens
tagaatagatggaga

SEQ ID NO: 368277 - DNA, 15 bp, Homo sapiens
ctagaatagatggag

SEQ ID NO: 368278 - DNA, 15 bp, Homo sapiens
cctagaatagatgga

SEQ ID NO: 368279 - DNA, 15 bp, Homo sapiens
ccctagaatagatgg

SEQ ID NO: 368280 - DNA, 15 bp, Homo sapiens
cccctagaatagatg

SEQ ID NO: 368281 - DNA, 15 bp, Homo sapiens
tcccctagaatagat

SEQ ID NO: 368282 - DNA, 15 bp, Homo sapiens
ctcccctagaataga

SEQ ID NO: 368283 - DNA, 15 bp, Homo sapiens
tctcccctagaatag

SEQ ID NO: 368284 - DNA, 15 bp, Homo sapiens
atctcccctagaata

SEQ ID NO: 368285 - DNA, 15 bp, Homo sapiens
catctcccctagaat

SEQ ID NO: 368286 - DNA, 15 bp, Homo sapiens
tcatctcccctagaa

SEQ ID NO: 368287 - DNA, 15 bp, Homo sapiens
atcatctcccctaga

SEQ ID NO: 368288 - DNA, 15 bp, Homo sapiens
aatcatctcccctag

SEQ ID NO: 368289 - DNA, 15 bp, Homo sapiens
caatcatctccccta

SEQ ID NO: 368290 - DNA, 15 bp, Homo sapiens
tcaatcatctcccct

SEQ ID NO: 368291 - DNA, 15 bp, Homo sapiens
atcaatcatctcccc

SEQ ID NO: 368292 - DNA, 15 bp, Homo sapiens
tatcaatcatctccc

SEQ ID NO: 368293 - DNA, 15 bp, Homo sapiens
ttatcaatcatctcc

SEQ ID NO: 368294 - DNA, 15 bp, Homo sapiens
cttatcaatcatctc

SEQ ID NO: 368295 - DNA, 15 bp, Homo sapiens
tcttatcaatcatct

SEQ ID NO: 368296 - DNA, 15 bp, Homo sapiens
ttcttatcaatcatc

SEQ ID NO: 368297 - DNA, 15 bp, Homo sapiens
attcttatcaatcat

SEQ ID NO: 368298 - DNA, 15 bp, Homo sapiens
aattcttatcaatca

SEQ ID NO: 368299 - DNA, 15 bp, Homo sapiens
aaattcttatcaatc

SEQ ID NO: 368300 - DNA, 15 bp, Homo sapiens
gaaattcttatcaat

SEQ ID NO: 368301 - DNA, 15 bp, Homo sapiens
ggaaattcttatcaa

SEQ ID NO: 368302 - DNA, 15 bp, Homo sapiens
tggaaattcttatca

SEQ ID NO: 368303 - DNA, 15 bp, Homo sapiens
atggaaattcttatc

SEQ ID NO: 368304 - DNA, 15 bp, Homo sapiens
gatggaaattcttat

SEQ ID NO: 368305 - DNA, 15 bp, Homo sapiens
agatggaaattctta

SEQ ID NO: 368306 - DNA, 15 bp, Homo sapiens
gagatggaaattctt

SEQ ID NO: 368307 - DNA, 15 bp, Homo sapiens
ggagatggaaattct

SEQ ID NO: 368308 - DNA, 15 bp, Homo sapiens
gggagatggaaattc

SEQ ID NO: 368309 - DNA, 15 bp, Homo sapiens
agggagatggaaatt

SEQ ID NO: 368310 - DNA, 15 bp, Homo sapiens
gagggagatggaaat

SEQ ID NO: 368311 - DNA, 15 bp, Homo sapiens
agagggagatggaaa

SEQ ID NO: 368312 - DNA, 15 bp, Homo sapiens
gagagggagatggaa

SEQ ID NO: 368313 - DNA, 15 bp, Homo sapiens
agagagggagatgga

SEQ ID NO: 368314 - DNA, 15 bp, Homo sapiens
gagagagggagatgg

SEQ ID NO: 368315 - DNA, 15 bp, Homo sapiens
ggagagagggagatg

SEQ ID NO: 368316 - DNA, 15 bp, Homo sapiens
gggagagagggagat

SEQ ID NO: 368317 - DNA, 15 bp, Homo sapiens
agggagagagggaga

SEQ ID NO: 368318 - DNA, 15 bp, Homo sapiens
cagggagagagggag

SEQ ID NO: 368319 - DNA, 15 bp, Homo sapiens
ccagggagagaggga

SEQ ID NO: 368320 - DNA, 15 bp, Homo sapiens
tccagggagagaggg

SEQ ID NO: 368321 - DNA, 15 bp, Homo sapiens
ttccagggagagagg

SEQ ID NO: 368322 - DNA, 15 bp, Homo sapiens
tttccagggagagag

SEQ ID NO: 368323 - DNA, 15 bp, Homo sapiens
ctttccagggagaga

SEQ ID NO: 368324 - DNA, 15 bp, Homo sapiens
cctttccagggagag

SEQ ID NO: 368325 - DNA, 15 bp, Homo sapiens
gcctttccagggaga

SEQ ID NO: 368326 - DNA, 15 bp, Homo sapiens
agcctttccagggag

SEQ ID NO: 368327 - DNA, 15 bp, Homo sapiens
gagcctttccaggga

SEQ ID NO: 368328 - DNA, 15 bp, Homo sapiens
tgagcctttccaggg

SEQ ID NO: 368329 - DNA, 15 bp, Homo sapiens
ctgagcctttccagg

SEQ ID NO: 368330 - DNA, 15 bp, Homo sapiens
cctgagcctttccag

SEQ ID NO: 368331 - DNA, 15 bp, Homo sapiens
ccctgagcctttcca

SEQ ID NO: 368332 - DNA, 15 bp, Homo sapiens
tccctgagcctttcc

SEQ ID NO: 368333 - DNA, 15 bp, Homo sapiens
atccctgagcctttc

SEQ ID NO: 368334 - DNA, 15 bp, Homo sapiens
aatccctgagccttt

SEQ ID NO: 368335 - DNA, 15 bp, Homo sapiens
aaatccctgagcctt

SEQ ID NO: 368336 - DNA, 15 bp, Homo sapiens
taaatccctgagcct

SEQ ID NO: 368337 - DNA, 15 bp, Homo sapiens
ttaaatccctgagcc

SEQ ID NO: 368338 - DNA, 15 bp, Homo sapiens
gttaaatccctgagc

SEQ ID NO: 368339 - DNA, 15 bp, Homo sapiens
agttaaatccctgag

SEQ ID NO: 368340 - DNA, 15 bp, Homo sapiens
tagttaaatccctga

SEQ ID NO: 368341 - DNA, 15 bp, Homo sapiens
ctagttaaatccctg

SEQ ID NO: 368342 - DNA, 15 bp, Homo sapiens
cctagttaaatccct

SEQ ID NO: 368343 - DNA, 15 bp, Homo sapiens
ccctagttaaatccc

SEQ ID NO: 368344 - DNA, 15 bp, Homo sapiens
tccctagttaaatcc

SEQ ID NO: 368345 - DNA, 15 bp, Homo sapiens
ttccctagttaaatc

SEQ ID NO: 368346 - DNA, 15 bp, Homo sapiens
cttccctagttaaat

SEQ ID NO: 368347 - DNA, 15 bp, Homo sapiens
tcttccctagttaaa

SEQ ID NO: 368348 - DNA, 15 bp, Homo sapiens
atcttccctagttaa

SEQ ID NO: 368349 - DNA, 15 bp, Homo sapiens
aatcttccctagtta

SEQ ID NO: 368350 - DNA, 15 bp, Homo sapiens
aaatcttccctagtt

SEQ ID NO: 368351 - DNA, 15 bp, Homo sapiens
taaatcttccctagt

SEQ ID NO: 368352 - DNA, 15 bp, Homo sapiens
ctaaatcttccctag

SEQ ID NO: 368353 - DNA, 15 bp, Homo sapiens
tctaaatcttcccta

SEQ ID NO: 368354 - DNA, 15 bp, Homo sapiens
ttctaaatcttccct

SEQ ID NO: 368355 - DNA, 15 bp, Homo sapiens
tttctaaatcttccc

SEQ ID NO: 368356 - DNA, 15 bp, Homo sapiens
ctttctaaatcttcc

SEQ ID NO: 368357 - DNA, 15 bp, Homo sapiens
actttctaaatcttc

SEQ ID NO: 368358 - DNA, 15 bp, Homo sapiens
tactttctaaatctt

SEQ ID NO: 368359 - DNA, 15 bp, Homo sapiens
gtactttctaaatct

SEQ ID NO: 368360 - DNA, 15 bp, Homo sapiens
agtactttctaaatc

SEQ ID NO: 368361 - DNA, 15 bp, Homo sapiens
aagtactttctaaat

SEQ ID NO: 368362 - DNA, 15 bp, Homo sapiens
aaagtactttctaaa

SEQ ID NO: 368363 - DNA, 15 bp, Homo sapiens
caaagtactttctaa

SEQ ID NO: 368364 - DNA, 15 bp, Homo sapiens
acaaagtactttcta

SEQ ID NO: 368365 - DNA, 15 bp, Homo sapiens
cacaaagtactttct

SEQ ID NO: 368366 - DNA, 15 bp, Homo sapiens
acacaaagtactttc

SEQ ID NO: 368367 - DNA, 15 bp, Homo sapiens
aacacaaagtacttt

SEQ ID NO: 368368 - DNA, 15 bp, Homo sapiens
aaacacaaagtactt

SEQ ID NO: 368369 - DNA, 15 bp, Homo sapiens
gaaacacaaagtact

SEQ ID NO: 368370 - DNA, 15 bp, Homo sapiens
ggaaacacaaagtac

SEQ ID NO: 368371 - DNA, 15 bp, Homo sapiens
gggaaacacaaagta

SEQ ID NO: 368372 - DNA, 15 bp, Homo sapiens
ggggaaacacaaagt

SEQ ID NO: 368373 - DNA, 15 bp, Homo sapiens
gggggaaacacaaag

SEQ ID NO: 368374 - DNA, 15 bp, Homo sapiens
tgggggaaacacaaa

SEQ ID NO: 368375 - DNA, 15 bp, Homo sapiens
atgggggaaacacaa

SEQ ID NO: 368376 - DNA, 15 bp, Homo sapiens
catgggggaaacaca

SEQ ID NO: 368377 - DNA, 15 bp, Homo sapiens
ccatgggggaaacac

SEQ ID NO: 368378 - DNA, 15 bp, Homo sapiens
tccatgggggaaaca

SEQ ID NO: 368379 - DNA, 15 bp, Homo sapiens
ttccatgggggaaac

SEQ ID NO: 368380 - DNA, 15 bp, Homo sapiens
tttccatgggggaaa

SEQ ID NO: 368381 - DNA, 15 bp, Homo sapiens
ttttccatgggggaa

SEQ ID NO: 368382 - DNA, 15 bp, Homo sapiens
cttttccatggggga

SEQ ID NO: 368383 - DNA, 15 bp, Homo sapiens
acttttccatggggg

SEQ ID NO: 368384 - DNA, 15 bp, Homo sapiens
tacttttccatgggg

SEQ ID NO: 368385 - DNA, 15 bp, Homo sapiens
gtacttttccatggg

SEQ ID NO: 368386 - DNA, 15 bp, Homo sapiens
agtacttttccatgg

SEQ ID NO: 368387 - DNA, 15 bp, Homo sapiens
cagtacttttccatg

SEQ ID NO: 368388 - DNA, 15 bp, Homo sapiens
acagtacttttccat

SEQ ID NO: 368389 - DNA, 15 bp, Homo sapiens
tacagtacttttcca

SEQ ID NO: 368390 - DNA, 15 bp, Homo sapiens
ttacagtacttttcc

SEQ ID NO: 368391 - DNA, 15 bp, Homo sapiens
attacagtacttttc

SEQ ID NO: 368392 - DNA, 15 bp, Homo sapiens
tattacagtactttt

SEQ ID NO: 368393 - DNA, 15 bp, Homo sapiens
ttattacagtacttt

SEQ ID NO: 368394 - DNA, 15 bp, Homo sapiens
tttattacagtactt

SEQ ID NO: 368395 - DNA, 15 bp, Homo sapiens
ctttattacagtact

SEQ ID NO: 368396 - DNA, 15 bp, Homo sapiens
gctttattacagtac

SEQ ID NO: 368397 - DNA, 15 bp, Homo sapiens
tgctttattacagta

SEQ ID NO: 368398 - DNA, 15 bp, Homo sapiens
atgctttattacagt

SEQ ID NO: 368399 - DNA, 15 bp, Homo sapiens
aatgctttattacag

SEQ ID NO: 368400 - DNA, 15 bp, Homo sapiens
aaatgctttattaca

SEQ ID NO: 368401 - DNA, 15 bp, Homo sapiens
taaatgctttattac

SEQ ID NO: 368402 - DNA, 15 bp, Homo sapiens
ataaatgctttatta

SEQ ID NO: 368403 - DNA, 15 bp, Homo sapiens
aataaatgctttatt

SEQ ID NO: 368404 - DNA, 15 bp, Homo sapiens
taataaatgctttat

SEQ ID NO: 368405 - DNA, 15 bp, Homo sapiens
ataataaatgcttta

SEQ ID NO: 368406 - DNA, 15 bp, Homo sapiens
tataataaatgcttt

SEQ ID NO: 368407 - DNA, 15 bp, Homo sapiens
atataataaatgctt

SEQ ID NO: 368408 - DNA, 15 bp, Homo sapiens
catataataaatgct

SEQ ID NO: 368409 - DNA, 15 bp, Homo sapiens
acatataataaatgc

SEQ ID NO: 368410 - DNA, 15 bp, Homo sapiens
tacatataataaatg

SEQ ID NO: 368411 - DNA, 15 bp, Homo sapiens
gtacatataataaat

SEQ ID NO: 368412 - DNA, 15 bp, Homo sapiens
agtacatataataaa

SEQ ID NO: 368413 - DNA, 15 bp, Homo sapiens
cagtacatataataa

SEQ ID NO: 368414 - DNA, 15 bp, Homo sapiens
tcagtacatataata

SEQ ID NO: 368415 - DNA, 15 bp, Homo sapiens
ctcagtacatataat

SEQ ID NO: 368416 - DNA, 15 bp, Homo sapiens
actcagtacatataa

SEQ ID NO: 368417 - DNA, 15 bp, Homo sapiens
aactcagtacatata

SEQ ID NO: 368418 - DNA, 15 bp, Homo sapiens
caactcagtacatat

SEQ ID NO: 368419 - DNA, 15 bp, Homo sapiens
acaactcagtacata

SEQ ID NO: 368420 - DNA, 15 bp, Homo sapiens
cacaactcagtacat

SEQ ID NO: 368421 - DNA, 15 bp, Homo sapiens
gcacaactcagtaca

SEQ ID NO: 368422 - DNA, 15 bp, Homo sapiens
tgcacaactcagtac

SEQ ID NO: 368423 - DNA, 15 bp, Homo sapiens
atgcacaactcagta

SEQ ID NO: 368424 - DNA, 15 bp, Homo sapiens
catgcacaactcagt

SEQ ID NO: 368425 - DNA, 15 bp, Homo sapiens
gcatgcacaactcag

SEQ ID NO: 368426 - DNA, 15 bp, Homo sapiens
agcatgcacaactca

SEQ ID NO: 368427 - DNA, 15 bp, Homo sapiens
cagcatgcacaactc

SEQ ID NO: 368428 - DNA, 15 bp, Homo sapiens
gcagcatgcacaact

SEQ ID NO: 368429 - DNA, 15 bp, Homo sapiens
ggcagcatgcacaac

SEQ ID NO: 368430 - DNA, 15 bp, Homo sapiens
tggcagcatgcacaa

SEQ ID NO: 368431 - DNA, 15 bp, Homo sapiens
atggcagcatgcaca

SEQ ID NO: 368432 - DNA, 15 bp, Homo sapiens
tatggcagcatgcac

SEQ ID NO: 368433 - DNA, 15 bp, Homo sapiens
gtatggcagcatgca

SEQ ID NO: 368434 - DNA, 15 bp, Homo sapiens
ggtatggcagcatgc

SEQ ID NO: 368435 - DNA, 15 bp, Homo sapiens
tggtatggcagcatg

SEQ ID NO: 368436 - DNA, 15 bp, Homo sapiens
ttggtatggcagcat

SEQ ID NO: 368437 - DNA, 15 bp, Homo sapiens
tttggtatggcagca

SEQ ID NO: 368438 - DNA, 15 bp, Homo sapiens
ctttggtatggcagc

SEQ ID NO: 368439 - DNA, 15 bp, Homo sapiens
gctttggtatggcag

SEQ ID NO: 368440 - DNA, 15 bp, Homo sapiens
tgctttggtatggca

SEQ ID NO: 368441 - DNA, 15 bp, Homo sapiens
ttgctttggtatggc

SEQ ID NO: 368442 - DNA, 15 bp, Homo sapiens
cttgctttggtatgg

SEQ ID NO: 368443 - DNA, 15 bp, Homo sapiens
acttgctttggtatg

SEQ ID NO: 368444 - DNA, 15 bp, Homo sapiens
aacttgctttggtat

SEQ ID NO: 368445 - DNA, 15 bp, Homo sapiens
taacttgctttggta

SEQ ID NO: 368446 - DNA, 15 bp, Homo sapiens
ttaacttgctttggt

SEQ ID NO: 368447 - DNA, 15 bp, Homo sapiens
cttaacttgctttgg

SEQ ID NO: 368448 - DNA, 15 bp, Homo sapiens
gcttaacttgctttg

SEQ ID NO: 368449 - DNA, 15 bp, Homo sapiens
tgcttaacttgcttt

SEQ ID NO: 368450 - DNA, 15 bp, Homo sapiens
atgcttaacttgctt

SEQ ID NO: 368451 - DNA, 15 bp, Homo sapiens
tatgcttaacttgct

SEQ ID NO: 368452 - DNA, 15 bp, Homo sapiens
ttatgcttaacttgc

SEQ ID NO: 368453 - DNA, 15 bp, Homo sapiens
gttatgcttaacttg

SEQ ID NO: 368454 - DNA, 15 bp, Homo sapiens
agttatgcttaactt

SEQ ID NO: 368455 - DNA, 15 bp, Homo sapiens
tagttatgcttaact

SEQ ID NO: 368456 - DNA, 15 bp, Homo sapiens
gtagttatgcttaac

SEQ ID NO: 368457 - DNA, 15 bp, Homo sapiens
tgtagttatgcttaa

SEQ ID NO: 368458 - DNA, 15 bp, Homo sapiens
ttgtagttatgctta

SEQ ID NO: 368459 - DNA, 15 bp, Homo sapiens
attgtagttatgctt

SEQ ID NO: 368460 - DNA, 15 bp, Homo sapiens
cattgtagttatgct

SEQ ID NO: 368461 - DNA, 15 bp, Homo sapiens
ccattgtagttatgc

SEQ ID NO: 368462 - DNA, 15 bp, Homo sapiens
cccattgtagttatg

SEQ ID NO: 368463 - DNA, 15 bp, Homo sapiens
acccattgtagttat

SEQ ID NO: 368464 - DNA, 15 bp, Homo sapiens
gacccattgtagtta

SEQ ID NO: 368465 - DNA, 15 bp, Homo sapiens
ggacccattgtagtt

SEQ ID NO: 368466 - DNA, 15 bp, Homo sapiens
gggacccattgtagt

SEQ ID NO: 368467 - DNA, 15 bp, Homo sapiens
tgggacccattgtag

SEQ ID NO: 368468 - DNA, 15 bp, Homo sapiens
ctgggacccattgta

SEQ ID NO: 368469 - DNA, 15 bp, Homo sapiens
actgggacccattgt

SEQ ID NO: 368470 - DNA, 15 bp, Homo sapiens
aactgggacccattg

SEQ ID NO: 368471 - DNA, 15 bp, Homo sapiens
caactgggacccatt

SEQ ID NO: 368472 - DNA, 15 bp, Homo sapiens
acaactgggacccat

SEQ ID NO: 368473 - DNA, 15 bp, Homo sapiens
aacaactgggaccca

SEQ ID NO: 368474 - DNA, 15 bp, Homo sapiens
taacaactgggaccc

SEQ ID NO: 368475 - DNA, 15 bp, Homo sapiens
ataacaactgggacc

SEQ ID NO: 368476 - DNA, 15 bp, Homo sapiens
gataacaactgggac

SEQ ID NO: 368477 - DNA, 15 bp, Homo sapiens
agataacaactggga

SEQ ID NO: 368478 - DNA, 15 bp, Homo sapiens
cagataacaactggg

SEQ ID NO: 368479 - DNA, 15 bp, Homo sapiens
gcagataacaactgg

SEQ ID NO: 368480 - DNA, 15 bp, Homo sapiens
agcagataacaactg

SEQ ID NO: 368481 - DNA, 15 bp, Homo sapiens
tagcagataacaact

SEQ ID NO: 368482 - DNA, 15 bp, Homo sapiens
atagcagataacaac

SEQ ID NO: 368483 - DNA, 15 bp, Homo sapiens
aatagcagataacaa

SEQ ID NO: 368484 - DNA, 15 bp, Homo sapiens
caatagcagataaca

SEQ ID NO: 368485 - DNA, 15 bp, Homo sapiens
acaatagcagataac

SEQ ID NO: 368486 - DNA, 15 bp, Homo sapiens
aacaatagcagataa

SEQ ID NO: 368487 - DNA, 15 bp, Homo sapiens
aaacaatagcagata

SEQ ID NO: 368488 - DNA, 15 bp, Homo sapiens
taaacaatagcagat

SEQ ID NO: 368489 - DNA, 15 bp, Homo sapiens
ttaaacaatagcaga

SEQ ID NO: 368490 - DNA, 15 bp, Homo sapiens
tttaaacaatagcag

SEQ ID NO: 368491 - DNA, 15 bp, Homo sapiens
ttttaaacaatagca

SEQ ID NO: 368492 - DNA, 15 bp, Homo sapiens
cttttaaacaatagc

SEQ ID NO: 368493 - DNA, 15 bp, Homo sapiens
acttttaaacaatag

SEQ ID NO: 368494 - DNA, 15 bp, Homo sapiens
cacttttaaacaata

SEQ ID NO: 368495 - DNA, 15 bp, Homo sapiens
tcacttttaaacaat

SEQ ID NO: 368496 - DNA, 15 bp, Homo sapiens
ttcacttttaaacaa

SEQ ID NO: 368497 - DNA, 15 bp, Homo sapiens
tttcacttttaaaca

SEQ ID NO: 368498 - DNA, 15 bp, Homo sapiens
ttttcacttttaaac

SEQ ID NO: 368499 - DNA, 15 bp, Homo sapiens
gttttcacttttaaa

SEQ ID NO: 368500 - DNA, 15 bp, Homo sapiens
tgttttcacttttaa

SEQ ID NO: 368501 - DNA, 15 bp, Homo sapiens
ttgttttcactttta

SEQ ID NO: 368502 - DNA, 15 bp, Homo sapiens
attgttttcactttt

SEQ ID NO: 368503 - DNA, 15 bp, Homo sapiens
tattgttttcacttt

SEQ ID NO: 368504 - DNA, 15 bp, Homo sapiens
ttattgttttcactt

SEQ ID NO: 368505 - DNA, 15 bp, Homo sapiens
tttattgttttcact

SEQ ID NO: 368506 - DNA, 15 bp, Homo sapiens
ttttattgttttcac

SEQ ID NO: 368507 - DNA, 15 bp, Homo sapiens
tttttattgttttca

SEQ ID NO: 368508 - DNA, 15 bp, Homo sapiens
ctttttattgttttc

SEQ ID NO: 368509 - DNA, 15 bp, Homo sapiens
actttttattgtttt

SEQ ID NO: 368510 - DNA, 15 bp, Homo sapiens
tactttttattgttt

SEQ ID NO: 368511 - DNA, 15 bp, Homo sapiens
ttactttttattgtt

SEQ ID NO: 368512 - DNA, 15 bp, Homo sapiens
cttactttttattgt

SEQ ID NO: 368513 - DNA, 15 bp, Homo sapiens
tcttactttttattg

SEQ ID NO: 368514 - DNA, 15 bp, Homo sapiens
gtcttactttttatt

SEQ ID NO: 368515 - DNA, 15 bp, Homo sapiens
agtcttactttttat

SEQ ID NO: 368516 - DNA, 15 bp, Homo sapiens
cagtcttacttttta

SEQ ID NO: 368517 - DNA, 15 bp, Homo sapiens
ccagtcttacttttt

SEQ ID NO: 368518 - DNA, 15 bp, Homo sapiens
gccagtcttactttt

SEQ ID NO: 368519 - DNA, 15 bp, Homo sapiens
agccagtcttacttt

SEQ ID NO: 368520 - DNA, 15 bp, Homo sapiens
gagccagtcttactt

SEQ ID NO: 368521 - DNA, 15 bp, Homo sapiens
tgagccagtcttact

SEQ ID NO: 368522 - DNA, 15 bp, Homo sapiens
ctgagccagtcttac

SEQ ID NO: 368523 - DNA, 15 bp, Homo sapiens
cctgagccagtctta

SEQ ID NO: 368524 - DNA, 15 bp, Homo sapiens
gcctgagccagtctt

SEQ ID NO: 368525 - DNA, 15 bp, Homo sapiens
ggcctgagccagtct

SEQ ID NO: 368526 - DNA, 15 bp, Homo sapiens
aggcctgagccagtc

SEQ ID NO: 368527 - DNA, 15 bp, Homo sapiens
gaggcctgagccagt

SEQ ID NO: 368528 - DNA, 15 bp, Homo sapiens
tgaggcctgagccag

SEQ ID NO: 368529 - DNA, 15 bp, Homo sapiens
ctgaggcctgagcca

SEQ ID NO: 368530 - DNA, 15 bp, Homo sapiens
tctgaggcctgagcc

SEQ ID NO: 368531 - DNA, 15 bp, Homo sapiens
gtctgaggcctgagc

SEQ ID NO: 368532 - DNA, 15 bp, Homo sapiens
agtctgaggcctgag

SEQ ID NO: 368533 - DNA, 15 bp, Homo sapiens
aagtctgaggcctga

SEQ ID NO: 368534 - DNA, 15 bp, Homo sapiens
caagtctgaggcctg

SEQ ID NO: 368535 - DNA, 15 bp, Homo sapiens
gcaagtctgaggcct

SEQ ID NO: 368536 - DNA, 15 bp, Homo sapiens
ggcaagtctgaggcc

SEQ ID NO: 368537 - DNA, 15 bp, Homo sapiens
aggcaagtctgaggc

SEQ ID NO: 368538 - DNA, 15 bp, Homo sapiens
caggcaagtctgagg

SEQ ID NO: 368539 - DNA, 15 bp, Homo sapiens
gcaggcaagtctgag

SEQ ID NO: 368540 - DNA, 15 bp, Homo sapiens
ggcaggcaagtctga

SEQ ID NO: 368541 - DNA, 15 bp, Homo sapiens
tggcaggcaagtctg

SEQ ID NO: 368542 - DNA, 15 bp, Homo sapiens
ctggcaggcaagtct

SEQ ID NO: 368543 - DNA, 15 bp, Homo sapiens
cctggcaggcaagtc

SEQ ID NO: 368544 - DNA, 15 bp, Homo sapiens
ccctggcaggcaagt

SEQ ID NO: 368545 - DNA, 15 bp, Homo sapiens
tccctggcaggcaag

SEQ ID NO: 368546 - DNA, 15 bp, Homo sapiens
gtccctggcaggcaa

SEQ ID NO: 368547 - DNA, 15 bp, Homo sapiens
tgtccctggcaggca

SEQ ID NO: 368548 - DNA, 15 bp, Homo sapiens
ctgtccctggcaggc

SEQ ID NO: 368549 - DNA, 15 bp, Homo sapiens
actgtccctggcagg

SEQ ID NO: 368550 - DNA, 15 bp, Homo sapiens
tactgtccctggcag

SEQ ID NO: 368551 - DNA, 15 bp, Homo sapiens
gtactgtccctggca

SEQ ID NO: 368552 - DNA, 15 bp, Homo sapiens
ggtactgtccctggc

SEQ ID NO: 368553 - DNA, 15 bp, Homo sapiens
aggtactgtccctgg

SEQ ID NO: 368554 - DNA, 15 bp, Homo sapiens
taggtactgtccctg

SEQ ID NO: 368555 - DNA, 15 bp, Homo sapiens
ctaggtactgtccct

SEQ ID NO: 368556 - DNA, 15 bp, Homo sapiens
tctaggtactgtccc

SEQ ID NO: 368557 - DNA, 15 bp, Homo sapiens
ttctaggtactgtcc

SEQ ID NO: 368558 - DNA, 15 bp, Homo sapiens
cttctaggtactgtc

SEQ ID NO: 368559 - DNA, 15 bp, Homo sapiens
ccttctaggtactgt

SEQ ID NO: 368560 - DNA, 15 bp, Homo sapiens
tccttctaggtactg

SEQ ID NO: 368561 - DNA, 15 bp, Homo sapiens
ctccttctaggtact

SEQ ID NO: 368562 - DNA, 15 bp, Homo sapiens
tctccttctaggtac

SEQ ID NO: 368563 - DNA, 15 bp, Homo sapiens
ttctccttctaggta

SEQ ID NO: 368564 - DNA, 15 bp, Homo sapiens
cttctccttctaggt

SEQ ID NO: 368565 - DNA, 15 bp, Homo sapiens
ccttctccttctagg

SEQ ID NO: 368566 - DNA, 15 bp, Homo sapiens
gccttctccttctag

SEQ ID NO: 368567 - DNA, 15 bp, Homo sapiens
ggccttctccttcta

SEQ ID NO: 368568 - DNA, 15 bp, Homo sapiens
tggccttctccttct

SEQ ID NO: 368569 - DNA, 15 bp, Homo sapiens
ctggccttctccttc

SEQ ID NO: 368570 - DNA, 15 bp, Homo sapiens
gctggccttctcctt

SEQ ID NO: 368571 - DNA, 15 bp, Homo sapiens
tgctggccttctcct

SEQ ID NO: 368572 - DNA, 15 bp, Homo sapiens
gtgctggccttctcc

SEQ ID NO: 368573 - DNA, 15 bp, Homo sapiens
ggtgctggccttctc

SEQ ID NO: 368574 - DNA, 15 bp, Homo sapiens
gggtgctggccttct

SEQ ID NO: 368575 - DNA, 15 bp, Homo sapiens
tgggtgctggccttc

SEQ ID NO: 368576 - DNA, 15 bp, Homo sapiens
ttgggtgctggcctt

SEQ ID NO: 368577 - DNA, 15 bp, Homo sapiens
cttgggtgctggcct

SEQ ID NO: 368578 - DNA, 15 bp, Homo sapiens
acttgggtgctggcc

SEQ ID NO: 368579 - DNA, 15 bp, Homo sapiens
gacttgggtgctggc

SEQ ID NO: 368580 - DNA, 15 bp, Homo sapiens
tgacttgggtgctgg

SEQ ID NO: 368581 - DNA, 15 bp, Homo sapiens
ctgacttgggtgctg

SEQ ID NO: 368582 - DNA, 15 bp, Homo sapiens
cctgacttgggtgct

SEQ ID NO: 368583 - DNA, 15 bp, Homo sapiens
ccctgacttgggtgc

SEQ ID NO: 368584 - DNA, 15 bp, Homo sapiens
tccctgacttgggtg

SEQ ID NO: 368585 - DNA, 15 bp, Homo sapiens
atccctgacttgggt

SEQ ID NO: 368586 - DNA, 15 bp, Homo sapiens
catccctgacttggg

SEQ ID NO: 368587 - DNA, 15 bp, Homo sapiens
gcatccctgacttgg

SEQ ID NO: 368588 - DNA, 15 bp, Homo sapiens
cgcatccctgacttg

SEQ ID NO: 368589 - DNA, 15 bp, Homo sapiens
ccgcatccctgactt

SEQ ID NO: 368590 - DNA, 15 bp, Homo sapiens
gccgcatccctgact

SEQ ID NO: 368591 - DNA, 15 bp, Homo sapiens
tgccgcatccctgac

SEQ ID NO: 368592 - DNA, 15 bp, Homo sapiens
gtgccgcatccctga

SEQ ID NO: 368593 - DNA, 15 bp, Homo sapiens
tgtgccgcatccctg

SEQ ID NO: 368594 - DNA, 15 bp, Homo sapiens
ctgtgccgcatccct

SEQ ID NO: 368595 - DNA, 15 bp, Homo sapiens
gctgtgccgcatccc

SEQ ID NO: 368596 - DNA, 15 bp, Homo sapiens
ggctgtgccgcatcc

SEQ ID NO: 368597 - DNA, 15 bp, Homo sapiens
aggctgtgccgcatc

SEQ ID NO: 368598 - DNA, 15 bp, Homo sapiens
caggctgtgccgcat

SEQ ID NO: 368599 - DNA, 15 bp, Homo sapiens
gcaggctgtgccgca

SEQ ID NO: 368600 - DNA, 15 bp, Homo sapiens
tgcaggctgtgccgc

SEQ ID NO: 368601 - DNA, 15 bp, Homo sapiens
ctgcaggctgtgccg

SEQ ID NO: 368602 - DNA, 15 bp, Homo sapiens
cctgcaggctgtgcc

SEQ ID NO: 368603 - DNA, 15 bp, Homo sapiens
acctgcaggctgtgc

SEQ ID NO: 368604 - DNA, 15 bp, Homo sapiens
cacctgcaggctgtg

SEQ ID NO: 368605 - DNA, 15 bp, Homo sapiens
acacctgcaggctgt

SEQ ID NO: 368606 - DNA, 15 bp, Homo sapiens
gacacctgcaggctg

SEQ ID NO: 368607 - DNA, 15 bp, Homo sapiens
tgacacctgcaggct

SEQ ID NO: 368608 - DNA, 15 bp, Homo sapiens
ctgacacctgcaggc

SEQ ID NO: 368609 - DNA, 15 bp, Homo sapiens
cctgacacctgcagg

SEQ ID NO: 368610 - DNA, 15 bp, Homo sapiens
tcctgacacctgcag

SEQ ID NO: 368611 - DNA, 15 bp, Homo sapiens
ctcctgacacctgca

SEQ ID NO: 368612 - DNA, 15 bp, Homo sapiens
actcctgacacctgc

SEQ ID NO: 368613 - DNA, 15 bp, Homo sapiens
gactcctgacacctg

SEQ ID NO: 368614 - DNA, 15 bp, Homo sapiens
agactcctgacacct

SEQ ID NO: 368615 - DNA, 15 bp, Homo sapiens
cagactcctgacacc

SEQ ID NO: 368616 - DNA, 15 bp, Homo sapiens
tcagactcctgacac

SEQ ID NO: 368617 - DNA, 15 bp, Homo sapiens
ctcagactcctgaca

SEQ ID NO: 368618 - DNA, 15 bp, Homo sapiens
cctcagactcctgac

SEQ ID NO: 368619 - DNA, 15 bp, Homo sapiens
acctcagactcctga

SEQ ID NO: 368620 - DNA, 15 bp, Homo sapiens
gacctcagactcctg

SEQ ID NO: 368621 - DNA, 15 bp, Homo sapiens
tgacctcagactcct

SEQ ID NO: 368622 - DNA, 15 bp, Homo sapiens
ctgacctcagactcc

SEQ ID NO: 368623 - DNA, 15 bp, Homo sapiens
tctgacctcagactc

SEQ ID NO: 368624 - DNA, 15 bp, Homo sapiens
gtctgacctcagact

SEQ ID NO: 368625 - DNA, 15 bp, Homo sapiens
agtctgacctcagac

SEQ ID NO: 368626 - DNA, 15 bp, Homo sapiens
cagtctgacctcaga

SEQ ID NO: 368627 - DNA, 15 bp, Homo sapiens
gcagtctgacctcag

SEQ ID NO: 368628 - DNA, 15 bp, Homo sapiens
ggcagtctgacctca

SEQ ID NO: 368629 - DNA, 15 bp, Homo sapiens
aggcagtctgacctc

SEQ ID NO: 368630 - DNA, 15 bp, Homo sapiens
caggcagtctgacct

SEQ ID NO: 368631 - DNA, 15 bp, Homo sapiens
ccaggcagtctgacc

SEQ ID NO: 368632 - DNA, 15 bp, Homo sapiens
gccaggcagtctgac

SEQ ID NO: 368633 - DNA, 15 bp, Homo sapiens
agccaggcagtctga

SEQ ID NO: 368634 - DNA, 15 bp, Homo sapiens
cagccaggcagtctg

SEQ ID NO: 368635 - DNA, 15 bp, Homo sapiens
gcagccaggcagtct

SEQ ID NO: 368636 - DNA, 15 bp, Homo sapiens
cgcagccaggcagtc

SEQ ID NO: 368637 - DNA, 15 bp, Homo sapiens
ccgcagccaggcagt

SEQ ID NO: 368638 - DNA, 15 bp, Homo sapiens
gccgcagccaggcag

SEQ ID NO: 368639 - DNA, 15 bp, Homo sapiens
agccgcagccaggca

SEQ ID NO: 368640 - DNA, 15 bp, Homo sapiens
gagccgcagccaggc

SEQ ID NO: 368641 - DNA, 15 bp, Homo sapiens
ggagccgcagccagg

SEQ ID NO: 368642 - DNA, 15 bp, Homo sapiens
gggagccgcagccag

SEQ ID NO: 368643 - DNA, 15 bp, Homo sapiens
tgggagccgcagcca

SEQ ID NO: 368644 - DNA, 15 bp, Homo sapiens
ctgggagccgcagcc

SEQ ID NO: 368645 - DNA, 15 bp, Homo sapiens
cctgggagccgcagc

SEQ ID NO: 368646 - DNA, 15 bp, Homo sapiens
ccctgggagccgcag

SEQ ID NO: 368647 - DNA, 15 bp, Homo sapiens
tccctgggagccgca

SEQ ID NO: 368648 - DNA, 15 bp, Homo sapiens
gtccctgggagccgc

SEQ ID NO: 368649 - DNA, 15 bp, Homo sapiens
tgtccctgggagccg

SEQ ID NO: 368650 - DNA, 15 bp, Homo sapiens
gtgtccctgggagcc

SEQ ID NO: 368651 - DNA, 15 bp, Homo sapiens
agtgtccctgggagc

SEQ ID NO: 368652 - DNA, 15 bp, Homo sapiens
aagtgtccctgggag

SEQ ID NO: 368653 - DNA, 15 bp, Homo sapiens
taagtgtccctggga

SEQ ID NO: 368654 - DNA, 15 bp, Homo sapiens
gtaagtgtccctggg

SEQ ID NO: 368655 - DNA, 15 bp, Homo sapiens
ggtaagtgtccctgg

SEQ ID NO: 368656 - DNA, 15 bp, Homo sapiens
tggtaagtgtccctg

SEQ ID NO: 368657 - DNA, 15 bp, Homo sapiens
ttggtaagtgtccct

SEQ ID NO: 368658 - DNA, 15 bp, Homo sapiens
attggtaagtgtccc

SEQ ID NO: 368659 - DNA, 15 bp, Homo sapiens
aattggtaagtgtcc

SEQ ID NO: 368660 - DNA, 15 bp, Homo sapiens
caattggtaagtgtc

SEQ ID NO: 368661 - DNA, 15 bp, Homo sapiens
ccaattggtaagtgt

SEQ ID NO: 368662 - DNA, 15 bp, Homo sapiens
cccaattggtaagtg

SEQ ID NO: 368663 - DNA, 15 bp, Homo sapiens
acccaattggtaagt

SEQ ID NO: 368664 - DNA, 15 bp, Homo sapiens
tacccaattggtaag

SEQ ID NO: 368665 - DNA, 15 bp, Homo sapiens
atacccaattggtaa

SEQ ID NO: 368666 - DNA, 15 bp, Homo sapiens
catacccaattggta

SEQ ID NO: 368667 - DNA, 15 bp, Homo sapiens
gcatacccaattggt

SEQ ID NO: 368668 - DNA, 15 bp, Homo sapiens
agcatacccaattgg

SEQ ID NO: 368669 - DNA, 15 bp, Homo sapiens
aagcatacccaattg

SEQ ID NO: 368670 - DNA, 15 bp, Homo sapiens
caagcatacccaatt

SEQ ID NO: 368671 - DNA, 15 bp, Homo sapiens
tcaagcatacccaat

SEQ ID NO: 368672 - DNA, 15 bp, Homo sapiens
ctcaagcatacccaa

SEQ ID NO: 368673 - DNA, 15 bp, Homo sapiens
gctcaagcataccca

SEQ ID NO: 368674 - DNA, 15 bp, Homo sapiens
ggctcaagcataccc

SEQ ID NO: 368675 - DNA, 15 bp, Homo sapiens
tggctcaagcatacc

SEQ ID NO: 368676 - DNA, 15 bp, Homo sapiens
ctggctcaagcatac

SEQ ID NO: 368677 - DNA, 15 bp, Homo sapiens
actggctcaagcata

SEQ ID NO: 368678 - DNA, 15 bp, Homo sapiens
aactggctcaagcat

SEQ ID NO: 368679 - DNA, 15 bp, Homo sapiens
taactggctcaagca

SEQ ID NO: 368680 - DNA, 15 bp, Homo sapiens
ataactggctcaagc

SEQ ID NO: 368681 - DNA, 15 bp, Homo sapiens
cataactggctcaag

SEQ ID NO: 368682 - DNA, 15 bp, Homo sapiens
gcataactggctcaa

SEQ ID NO: 368683 - DNA, 15 bp, Homo sapiens
ggcataactggctca

SEQ ID NO: 368684 - DNA, 15 bp, Homo sapiens
tggcataactggctc

SEQ ID NO: 368685 - DNA, 15 bp, Homo sapiens
gtggcataactggct

SEQ ID NO: 368686 - DNA, 15 bp, Homo sapiens
agtggcataactggc

SEQ ID NO: 368687 - DNA, 15 bp, Homo sapiens
cagtggcataactgg

SEQ ID NO: 368688 - DNA, 15 bp, Homo sapiens
gcagtggcataactg

SEQ ID NO: 368689 - DNA, 15 bp, Homo sapiens
agcagtggcataact

SEQ ID NO: 368690 - DNA, 15 bp, Homo sapiens
gagcagtggcataac

SEQ ID NO: 368691 - DNA, 15 bp, Homo sapiens
agagcagtggcataa

SEQ ID NO: 368692 - DNA, 15 bp, Homo sapiens
cagagcagtggcata

SEQ ID NO: 368693 - DNA, 15 bp, Homo sapiens
tcagagcagtggcat

SEQ ID NO: 368694 - DNA, 15 bp, Homo sapiens
ttcagagcagtggca

SEQ ID NO: 368695 - DNA, 15 bp, Homo sapiens
attcagagcagtggc

SEQ ID NO: 368696 - DNA, 15 bp, Homo sapiens
gattcagagcagtgg

SEQ ID NO: 368697 - DNA, 15 bp, Homo sapiens
agattcagagcagtg

SEQ ID NO: 368698 - DNA, 15 bp, Homo sapiens
aagattcagagcagt

SEQ ID NO: 368699 - DNA, 15 bp, Homo sapiens
taagattcagagcag

SEQ ID NO: 368700 - DNA, 15 bp, Homo sapiens
ataagattcagagca

SEQ ID NO: 368701 - DNA, 15 bp, Homo sapiens
aataagattcagagc

SEQ ID NO: 368702 - DNA, 15 bp, Homo sapiens
aaataagattcagag

SEQ ID NO: 368703 - DNA, 15 bp, Homo sapiens
aaaataagattcaga

SEQ ID NO: 368704 - DNA, 15 bp, Homo sapiens
gaaaataagattcag

SEQ ID NO: 368705 - DNA, 15 bp, Homo sapiens
ggaaaataagattca

SEQ ID NO: 368706 - DNA, 15 bp, Homo sapiens
aggaaaataagattc

SEQ ID NO: 368707 - DNA, 15 bp, Homo sapiens
gaggaaaataagatt

SEQ ID NO: 368708 - DNA, 15 bp, Homo sapiens
agaggaaaataagat

SEQ ID NO: 368709 - DNA, 15 bp, Homo sapiens
aagaggaaaataaga

SEQ ID NO: 368710 - DNA, 15 bp, Homo sapiens
gaagaggaaaataag

SEQ ID NO: 368711 - DNA, 15 bp, Homo sapiens
agaagaggaaaataa

SEQ ID NO: 368712 - DNA, 15 bp, Homo sapiens
tagaagaggaaaata

SEQ ID NO: 368713 - DNA, 15 bp, Homo sapiens
gtagaagaggaaaat

SEQ ID NO: 368714 - DNA, 15 bp, Homo sapiens
tgtagaagaggaaaa

SEQ ID NO: 368715 - DNA, 15 bp, Homo sapiens
ttgtagaagaggaaa

SEQ ID NO: 368716 - DNA, 15 bp, Homo sapiens
tttgtagaagaggaa

SEQ ID NO: 368717 - DNA, 15 bp, Homo sapiens
ttttgtagaagagga

SEQ ID NO: 368718 - DNA, 15 bp, Homo sapiens
attttgtagaagagg

SEQ ID NO: 368719 - DNA, 15 bp, Homo sapiens
cattttgtagaagag

SEQ ID NO: 368720 - DNA, 15 bp, Homo sapiens
gcattttgtagaaga

SEQ ID NO: 368721 - DNA, 15 bp, Homo sapiens
tgcattttgtagaag

SEQ ID NO: 368722 - DNA, 15 bp, Homo sapiens
ttgcattttgtagaa

SEQ ID NO: 368723 - DNA, 15 bp, Homo sapiens
tttgcattttgtaga

SEQ ID NO: 368724 - DNA, 15 bp, Homo sapiens
atttgcattttgtag

SEQ ID NO: 368725 - DNA, 15 bp, Homo sapiens
tatttgcattttgta

SEQ ID NO: 368726 - DNA, 15 bp, Homo sapiens
atatttgcattttgt

SEQ ID NO: 368727 - DNA, 15 bp, Homo sapiens
gatatttgcattttg

SEQ ID NO: 368728 - DNA, 15 bp, Homo sapiens
tgatatttgcatttt

SEQ ID NO: 368729 - DNA, 15 bp, Homo sapiens
ttgatatttgcattt

SEQ ID NO: 368730 - DNA, 15 bp, Homo sapiens
gttgatatttgcatt

SEQ ID NO: 368731 - DNA, 15 bp, Homo sapiens
tgttgatatttgcat

SEQ ID NO: 368732 - DNA, 15 bp, Homo sapiens
ctgttgatatttgca

SEQ ID NO: 368733 - DNA, 15 bp, Homo sapiens
actgttgatatttgc

SEQ ID NO: 368734 - DNA, 15 bp, Homo sapiens
gactgttgatatttg

SEQ ID NO: 368735 - DNA, 15 bp, Homo sapiens
ggactgttgatattt

SEQ ID NO: 368736 - DNA, 15 bp, Homo sapiens
gggactgttgatatt

SEQ ID NO: 368737 - DNA, 15 bp, Homo sapiens
agggactgttgatat

SEQ ID NO: 368738 - DNA, 15 bp, Homo sapiens
tagggactgttgata

SEQ ID NO: 368739 - DNA, 15 bp, Homo sapiens
ttagggactgttgat

SEQ ID NO: 368740 - DNA, 15 bp, Homo sapiens
tttagggactgttga

SEQ ID NO: 368741 - DNA, 15 bp, Homo sapiens
gtttagggactgttg

SEQ ID NO: 368742 - DNA, 15 bp, Homo sapiens
tgtttagggactgtt

SEQ ID NO: 368743 - DNA, 15 bp, Homo sapiens
gtgtttagggactgt

SEQ ID NO: 368744 - DNA, 15 bp, Homo sapiens
tgtgtttagggactg

SEQ ID NO: 368745 - DNA, 15 bp, Homo sapiens
gtgtgtttagggact

SEQ ID NO: 368746 - DNA, 15 bp, Homo sapiens
tgtgtgtttagggac

SEQ ID NO: 368747 - DNA, 15 bp, Homo sapiens
ctgtgtgtttaggga

SEQ ID NO: 368748 - DNA, 15 bp, Homo sapiens
cctgtgtgtttaggg

SEQ ID NO: 368749 - DNA, 15 bp, Homo sapiens
ccctgtgtgtttagg

SEQ ID NO: 368750 - DNA, 15 bp, Homo sapiens
tccctgtgtgtttag

SEQ ID NO: 368751 - DNA, 15 bp, Homo sapiens
gtccctgtgtgttta

SEQ ID NO: 368752 - DNA, 15 bp, Homo sapiens
agtccctgtgtgttt

SEQ ID NO: 368753 - DNA, 15 bp, Homo sapiens
cagtccctgtgtgtt

SEQ ID NO: 368754 - DNA, 15 bp, Homo sapiens
acagtccctgtgtgt

SEQ ID NO: 368755 - DNA, 15 bp, Homo sapiens
aacagtccctgtgtg

SEQ ID NO: 368756 - DNA, 15 bp, Homo sapiens
taacagtccctgtgt

SEQ ID NO: 368757 - DNA, 15 bp, Homo sapiens
ataacagtccctgtg

SEQ ID NO: 368758 - DNA, 15 bp, Homo sapiens
cataacagtccctgt

SEQ ID NO: 368759 - DNA, 15 bp, Homo sapiens
tcataacagtccctg

SEQ ID NO: 368760 - DNA, 15 bp, Homo sapiens
ctcataacagtccct

SEQ ID NO: 368761 - DNA, 15 bp, Homo sapiens
cctcataacagtccc

SEQ ID NO: 368762 - DNA, 15 bp, Homo sapiens
tcctcataacagtcc

SEQ ID NO: 368763 - DNA, 15 bp, Homo sapiens
ttcctcataacagtc

SEQ ID NO: 368764 - DNA, 15 bp, Homo sapiens
attcctcataacagt

SEQ ID NO: 368765 - DNA, 15 bp, Homo sapiens
tattcctcataacag

SEQ ID NO: 368766 - DNA, 15 bp, Homo sapiens
ttattcctcataaca

SEQ ID NO: 368767 - DNA, 15 bp, Homo sapiens
tttattcctcataac

SEQ ID NO: 368768 - DNA, 15 bp, Homo sapiens
gtttattcctcataa

SEQ ID NO: 368769 - DNA, 15 bp, Homo sapiens
tgtttattcctcata

SEQ ID NO: 368770 - DNA, 15 bp, Homo sapiens
ttgtttattcctcat

SEQ ID NO: 368771 - DNA, 15 bp, Homo sapiens
cttgtttattcctca

SEQ ID NO: 368772 - DNA, 15 bp, Homo sapiens
ccttgtttattcctc

SEQ ID NO: 368773 - DNA, 15 bp, Homo sapiens
accttgtttattcct

SEQ ID NO: 368774 - DNA, 15 bp, Homo sapiens
caccttgtttattcc

SEQ ID NO: 368775 - DNA, 15 bp, Homo sapiens
ccaccttgtttattc

SEQ ID NO: 368776 - DNA, 15 bp, Homo sapiens
gccaccttgtttatt

SEQ ID NO: 368777 - DNA, 15 bp, Homo sapiens
ggccaccttgtttat

SEQ ID NO: 368778 - DNA, 15 bp, Homo sapiens
gggccaccttgttta

SEQ ID NO: 368779 - DNA, 15 bp, Homo sapiens
tgggccaccttgttt

SEQ ID NO: 368780 - DNA, 15 bp, Homo sapiens
atgggccaccttgtt

SEQ ID NO: 368781 - DNA, 15 bp, Homo sapiens
catgggccaccttgt

SEQ ID NO: 368782 - DNA, 15 bp, Homo sapiens
tcatgggccaccttg

SEQ ID NO: 368783 - DNA, 15 bp, Homo sapiens
ttcatgggccacctt

SEQ ID NO: 368784 - DNA, 15 bp, Homo sapiens
tttcatgggccacct

SEQ ID NO: 368785 - DNA, 15 bp, Homo sapiens
ttttcatgggccacc

SEQ ID NO: 368786 - DNA, 15 bp, Homo sapiens
tttttcatgggccac

SEQ ID NO: 368787 - DNA, 15 bp, Homo sapiens
ttttttcatgggcca

SEQ ID NO: 368788 - DNA, 15 bp, Homo sapiens
gttttttcatgggcc

SEQ ID NO: 368789 - DNA, 15 bp, Homo sapiens
ggttttttcatgggc

SEQ ID NO: 368790 - DNA, 15 bp, Homo sapiens
gggttttttcatggg

SEQ ID NO: 368791 - DNA, 15 bp, Homo sapiens
agggttttttcatgg

SEQ ID NO: 368792 - DNA, 15 bp, Homo sapiens
aagggttttttcatg

SEQ ID NO: 368793 - DNA, 15 bp, Homo sapiens
taagggttttttcat

SEQ ID NO: 368794 - DNA, 15 bp, Homo sapiens
ctaagggttttttca

SEQ ID NO: 368795 - DNA, 15 bp, Homo sapiens
gctaagggttttttc

SEQ ID NO: 368796 - DNA, 15 bp, Homo sapiens
ggctaagggtttttt

SEQ ID NO: 368797 - DNA, 15 bp, Homo sapiens
gggctaagggttttt

SEQ ID NO: 368798 - DNA, 15 bp, Homo sapiens
tgggctaagggtttt

SEQ ID NO: 368799 - DNA, 15 bp, Homo sapiens
ctgggctaagggttt

SEQ ID NO: 368800 - DNA, 15 bp, Homo sapiens
gctgggctaagggtt

SEQ ID NO: 368801 - DNA, 15 bp, Homo sapiens
ggctgggctaagggt

SEQ ID NO: 368802 - DNA, 15 bp, Homo sapiens
aggctgggctaaggg

SEQ ID NO: 368803 - DNA, 15 bp, Homo sapiens
caggctgggctaagg

SEQ ID NO: 368804 - DNA, 15 bp, Homo sapiens
ccaggctgggctaag

SEQ ID NO: 368805 - DNA, 15 bp, Homo sapiens
gccaggctgggctaa

SEQ ID NO: 368806 - DNA, 15 bp, Homo sapiens
tgccaggctgggcta

SEQ ID NO: 368807 - DNA, 15 bp, Homo sapiens
gtgccaggctgggct

SEQ ID NO: 368808 - DNA, 15 bp, Homo sapiens
tgtgccaggctgggc

SEQ ID NO: 368809 - DNA, 15 bp, Homo sapiens
atgtgccaggctggg

SEQ ID NO: 368810 - DNA, 15 bp, Homo sapiens
tatgtgccaggctgg

SEQ ID NO: 368811 - DNA, 15 bp, Homo sapiens
ttatgtgccaggctg

SEQ ID NO: 368812 - DNA, 15 bp, Homo sapiens
cttatgtgccaggct

SEQ ID NO: 368813 - DNA, 15 bp, Homo sapiens
tcttatgtgccaggc

SEQ ID NO: 368814 - DNA, 15 bp, Homo sapiens
ttcttatgtgccagg

SEQ ID NO: 368815 - DNA, 15 bp, Homo sapiens
cttcttatgtgccag

SEQ ID NO: 368816 - DNA, 15 bp, Homo sapiens
gcttcttatgtgcca

SEQ ID NO: 368817 - DNA, 15 bp, Homo sapiens
tgcttcttatgtgcc

SEQ ID NO: 368818 - DNA, 15 bp, Homo sapiens
ttgcttcttatgtgc

SEQ ID NO: 368819 - DNA, 15 bp, Homo sapiens
attgcttcttatgtg

SEQ ID NO: 368820 - DNA, 15 bp, Homo sapiens
tattgcttcttatgt

SEQ ID NO: 368821 - DNA, 15 bp, Homo sapiens
atattgcttcttatg

SEQ ID NO: 368822 - DNA, 15 bp, Homo sapiens
catattgcttcttat

SEQ ID NO: 368823 - DNA, 15 bp, Homo sapiens
ccatattgcttctta

SEQ ID NO: 368824 - DNA, 15 bp, Homo sapiens
gccatattgcttctt

SEQ ID NO: 368825 - DNA, 15 bp, Homo sapiens
cgccatattgcttct

SEQ ID NO: 368826 - DNA, 15 bp, Homo sapiens
acgccatattgcttc

SEQ ID NO: 368827 - DNA, 15 bp, Homo sapiens
cacgccatattgctt

SEQ ID NO: 368828 - DNA, 15 bp, Homo sapiens
ccacgccatattgct

SEQ ID NO: 368829 - DNA, 15 bp, Homo sapiens
accacgccatattgc

SEQ ID NO: 368830 - DNA, 15 bp, Homo sapiens
caccacgccatattg

SEQ ID NO: 368831 - DNA, 15 bp, Homo sapiens
ccaccacgccatatt

SEQ ID NO: 368832 - DNA, 15 bp, Homo sapiens
gccaccacgccatat

SEQ ID NO: 368833 - DNA, 15 bp, Homo sapiens
agccaccacgccata

SEQ ID NO: 368834 - DNA, 15 bp, Homo sapiens
aagccaccacgccat

SEQ ID NO: 368835 - DNA, 15 bp, Homo sapiens
taagccaccacgcca

SEQ ID NO: 368836 - DNA, 15 bp, Homo sapiens
ctaagccaccacgcc

SEQ ID NO: 368837 - DNA, 15 bp, Homo sapiens
tctaagccaccacgc

SEQ ID NO: 368838 - DNA, 15 bp, Homo sapiens
ctctaagccaccacg

SEQ ID NO: 368839 - DNA, 15 bp, Homo sapiens
cctctaagccaccac

SEQ ID NO: 368840 - DNA, 15 bp, Homo sapiens
tcctctaagccacca

SEQ ID NO: 368841 - DNA, 15 bp, Homo sapiens
ctcctctaagccacc

SEQ ID NO: 368842 - DNA, 15 bp, Homo sapiens
tctcctctaagccac

SEQ ID NO: 368843 - DNA, 15 bp, Homo sapiens
gtctcctctaagcca

SEQ ID NO: 368844 - DNA, 15 bp, Homo sapiens
tgtctcctctaagcc

SEQ ID NO: 368845 - DNA, 15 bp, Homo sapiens
gtgtctcctctaagc

SEQ ID NO: 368846 - DNA, 15 bp, Homo sapiens
agtgtctcctctaag

SEQ ID NO: 368847 - DNA, 15 bp, Homo sapiens
cagtgtctcctctaa

SEQ ID NO: 368848 - DNA, 15 bp, Homo sapiens
ccagtgtctcctcta

SEQ ID NO: 368849 - DNA, 15 bp, Homo sapiens
cccagtgtctcctct

SEQ ID NO: 368850 - DNA, 15 bp, Homo sapiens
tcccagtgtctcctc

SEQ ID NO: 368851 - DNA, 15 bp, Homo sapiens
gtcccagtgtctcct

SEQ ID NO: 368852 - DNA, 15 bp, Homo sapiens
agtcccagtgtctcc

SEQ ID NO: 368853 - DNA, 15 bp, Homo sapiens
aagtcccagtgtctc

SEQ ID NO: 368854 - DNA, 15 bp, Homo sapiens
caagtcccagtgtct

SEQ ID NO: 368855 - DNA, 15 bp, Homo sapiens
acaagtcccagtgtc

SEQ ID NO: 368856 - DNA, 15 bp, Homo sapiens
aacaagtcccagtgt

SEQ ID NO: 368857 - DNA, 15 bp, Homo sapiens
aaacaagtcccagtg

SEQ ID NO: 368858 - DNA, 15 bp, Homo sapiens
taaacaagtcccagt

SEQ ID NO: 368859 - DNA, 15 bp, Homo sapiens
ataaacaagtcccag

SEQ ID NO: 368860 - DNA, 15 bp, Homo sapiens
gataaacaagtccca

SEQ ID NO: 368861 - DNA, 15 bp, Homo sapiens
agataaacaagtccc

SEQ ID NO: 368862 - DNA, 15 bp, Homo sapiens
cagataaacaagtcc

SEQ ID NO: 368863 - DNA, 15 bp, Homo sapiens
ccagataaacaagtc

SEQ ID NO: 368864 - DNA, 15 bp, Homo sapiens
cccagataaacaagt

SEQ ID NO: 368865 - DNA, 15 bp, Homo sapiens
acccagataaacaag

SEQ ID NO: 368866 - DNA, 15 bp, Homo sapiens
aacccagataaacaa

SEQ ID NO: 368867 - DNA, 15 bp, Homo sapiens
gaacccagataaaca

SEQ ID NO: 368868 - DNA, 15 bp, Homo sapiens
ggaacccagataaac

SEQ ID NO: 368869 - DNA, 15 bp, Homo sapiens
tggaacccagataaa

SEQ ID NO: 368870 - DNA, 15 bp, Homo sapiens
gtggaacccagataa

SEQ ID NO: 368871 - DNA, 15 bp, Homo sapiens
agtggaacccagata

SEQ ID NO: 368872 - DNA, 15 bp, Homo sapiens
gagtggaacccagat

SEQ ID NO: 368873 - DNA, 15 bp, Homo sapiens
agagtggaacccaga

SEQ ID NO: 368874 - DNA, 15 bp, Homo sapiens
cagagtggaacccag

SEQ ID NO: 368875 - DNA, 15 bp, Homo sapiens
tcagagtggaaccca

SEQ ID NO: 368876 - DNA, 15 bp, Homo sapiens
ctcagagtggaaccc

SEQ ID NO: 368877 - DNA, 15 bp, Homo sapiens
tctcagagtggaacc

SEQ ID NO: 368878 - DNA, 15 bp, Homo sapiens
atctcagagtggaac

SEQ ID NO: 368879 - DNA, 15 bp, Homo sapiens
gatctcagagtggaa

SEQ ID NO: 368880 - DNA, 15 bp, Homo sapiens
agatctcagagtgga

SEQ ID NO: 368881 - DNA, 15 bp, Homo sapiens
cagatctcagagtgg

SEQ ID NO: 368882 - DNA, 15 bp, Homo sapiens
gcagatctcagagtg

SEQ ID NO: 368883 - DNA, 15 bp, Homo sapiens
agcagatctcagagt

SEQ ID NO: 368884 - DNA, 15 bp, Homo sapiens
tagcagatctcagag

SEQ ID NO: 368885 - DNA, 15 bp, Homo sapiens
ttagcagatctcaga

SEQ ID NO: 368886 - DNA, 15 bp, Homo sapiens
attagcagatctcag

SEQ ID NO: 368887 - DNA, 15 bp, Homo sapiens
aattagcagatctca

SEQ ID NO: 368888 - DNA, 15 bp, Homo sapiens
gaattagcagatctc

SEQ ID NO: 368889 - DNA, 15 bp, Homo sapiens
ggaattagcagatct

SEQ ID NO: 368890 - DNA, 15 bp, Homo sapiens
aggaattagcagatc

SEQ ID NO: 368891 - DNA, 15 bp, Homo sapiens
taggaattagcagat

SEQ ID NO: 368892 - DNA, 15 bp, Homo sapiens
ctaggaattagcaga

SEQ ID NO: 368893 - DNA, 15 bp, Homo sapiens
tctaggaattagcag

SEQ ID NO: 368894 - DNA, 15 bp, Homo sapiens
atctaggaattagca

SEQ ID NO: 368895 - DNA, 15 bp, Homo sapiens
catctaggaattagc

SEQ ID NO: 368896 - DNA, 15 bp, Homo sapiens
acatctaggaattag

SEQ ID NO: 368897 - DNA, 15 bp, Homo sapiens
tacatctaggaatta

SEQ ID NO: 368898 - DNA, 15 bp, Homo sapiens
atacatctaggaatt

SEQ ID NO: 368899 - DNA, 15 bp, Homo sapiens
catacatctaggaat

SEQ ID NO: 368900 - DNA, 15 bp, Homo sapiens
acatacatctaggaa

SEQ ID NO: 368901 - DNA, 15 bp, Homo sapiens
gacatacatctagga

SEQ ID NO: 368902 - DNA, 15 bp, Homo sapiens
ggacatacatctagg

SEQ ID NO: 368903 - DNA, 15 bp, Homo sapiens
aggacatacatctag

SEQ ID NO: 368904 - DNA, 15 bp, Homo sapiens
caggacatacatcta

SEQ ID NO: 368905 - DNA, 15 bp, Homo sapiens
ccaggacatacatct

SEQ ID NO: 368906 - DNA, 15 bp, Homo sapiens
cccaggacatacatc

SEQ ID NO: 368907 - DNA, 15 bp, Homo sapiens
ccccaggacatacat

SEQ ID NO: 368908 - DNA, 15 bp, Homo sapiens
gccccaggacataca

SEQ ID NO: 368909 - DNA, 15 bp, Homo sapiens
tgccccaggacatac

SEQ ID NO: 368910 - DNA, 15 bp, Homo sapiens
ttgccccaggacata

SEQ ID NO: 368911 - DNA, 15 bp, Homo sapiens
cttgccccaggacat

SEQ ID NO: 368912 - DNA, 15 bp, Homo sapiens
acttgccccaggaca

SEQ ID NO: 368913 - DNA, 15 bp, Homo sapiens
aacttgccccaggac

SEQ ID NO: 368914 - DNA, 15 bp, Homo sapiens
caacttgccccagga

SEQ ID NO: 368915 - DNA, 15 bp, Homo sapiens
gcaacttgccccagg

SEQ ID NO: 368916 - DNA, 15 bp, Homo sapiens
agcaacttgccccag

SEQ ID NO: 368917 - DNA, 15 bp, Homo sapiens
aagcaacttgcccca

SEQ ID NO: 368918 - DNA, 15 bp, Homo sapiens
taagcaacttgcccc

SEQ ID NO: 368919 - DNA, 15 bp, Homo sapiens
gtaagcaacttgccc

SEQ ID NO: 368920 - DNA, 15 bp, Homo sapiens
ggtaagcaacttgcc

SEQ ID NO: 368921 - DNA, 15 bp, Homo sapiens
aggtaagcaacttgc

SEQ ID NO: 368922 - DNA, 15 bp, Homo sapiens
aaggtaagcaacttg

SEQ ID NO: 368923 - DNA, 15 bp, Homo sapiens
gaaggtaagcaactt

SEQ ID NO: 368924 - DNA, 15 bp, Homo sapiens
agaaggtaagcaact

SEQ ID NO: 368925 - DNA, 15 bp, Homo sapiens
gagaaggtaagcaac

SEQ ID NO: 368926 - DNA, 15 bp, Homo sapiens
agagaaggtaagcaa

SEQ ID NO: 368927 - DNA, 15 bp, Homo sapiens
cagagaaggtaagca

SEQ ID NO: 368928 - DNA, 15 bp, Homo sapiens
acagagaaggtaagc

SEQ ID NO: 368929 - DNA, 15 bp, Homo sapiens
cacagagaaggtaag

SEQ ID NO: 368930 - DNA, 15 bp, Homo sapiens
gcacagagaaggtaa

SEQ ID NO: 368931 - DNA, 15 bp, Homo sapiens
agcacagagaaggta

SEQ ID NO: 368932 - DNA, 15 bp, Homo sapiens
aagcacagagaaggt

SEQ ID NO: 368933 - DNA, 15 bp, Homo sapiens
gaagcacagagaagg

SEQ ID NO: 368934 - DNA, 15 bp, Homo sapiens
gaggaaactgaagca

SEQ ID NO: 368935 - DNA, 15 bp, Homo sapiens
ggaggaaactgaagc

SEQ ID NO: 368936 - DNA, 15 bp, Homo sapiens
aggaggaaactgaag

SEQ ID NO: 368937 - DNA, 15 bp, Homo sapiens
gaggaggaaactgaa

SEQ ID NO: 368938 - DNA, 15 bp, Homo sapiens
agaggaggaaactga

SEQ ID NO: 368939 - DNA, 15 bp, Homo sapiens
cagaggaggaaactg

SEQ ID NO: 368940 - DNA, 15 bp, Homo sapiens
tcagaggaggaaact

SEQ ID NO: 368941 - DNA, 15 bp, Homo sapiens
tttcagaggaggaaa

SEQ ID NO: 368942 - DNA, 15 bp, Homo sapiens
ttttcagaggaggaa

SEQ ID NO: 368943 - DNA, 15 bp, Homo sapiens
tttttcagaggagga

SEQ ID NO: 368944 - DNA, 15 bp, Homo sapiens
atttttcagaggagg

SEQ ID NO: 368945 - DNA, 15 bp, Homo sapiens
tatttttcagaggag

SEQ ID NO: 368946 - DNA, 15 bp, Homo sapiens
ctatttttcagagga

SEQ ID NO: 368947 - DNA, 15 bp, Homo sapiens
actatttttcagagg

SEQ ID NO: 368948 - DNA, 15 bp, Homo sapiens
tactatttttcagag

SEQ ID NO: 368949 - DNA, 15 bp, Homo sapiens
ctactatttttcaga

SEQ ID NO: 368950 - DNA, 15 bp, Homo sapiens
actactatttttcag

SEQ ID NO: 368951 - DNA, 15 bp, Homo sapiens
tactactatttttca

SEQ ID NO: 368952 - DNA, 15 bp, Homo sapiens
atactactatttttc

SEQ ID NO: 368953 - DNA, 15 bp, Homo sapiens
tatactactattttt

SEQ ID NO: 368954 - DNA, 15 bp, Homo sapiens
atatactactatttt

SEQ ID NO: 368955 - DNA, 15 bp, Homo sapiens
tatatactactattt

SEQ ID NO: 368956 - DNA, 15 bp, Homo sapiens
gtatatactactatt

SEQ ID NO: 368957 - DNA, 15 bp, Homo sapiens
tgtatatactactat

SEQ ID NO: 368958 - DNA, 15 bp, Homo sapiens
atgtatatactacta

SEQ ID NO: 368959 - DNA, 15 bp, Homo sapiens
tatgtatatactact

SEQ ID NO: 368960 - DNA, 15 bp, Homo sapiens
ctatgtatatactac

SEQ ID NO: 368961 - DNA, 15 bp, Homo sapiens
cctatgtatatacta

SEQ ID NO: 368962 - DNA, 15 bp, Homo sapiens
tcctatgtatatact

SEQ ID NO: 368963 - DNA, 15 bp, Homo sapiens
atcctatgtatatac

SEQ ID NO: 368964 - DNA, 15 bp, Homo sapiens
catcctatgtatata

SEQ ID NO: 368965 - DNA, 15 bp, Homo sapiens
ccatcctatgtatat

SEQ ID NO: 368966 - DNA, 15 bp, Homo sapiens
accatcctatgtata

SEQ ID NO: 368967 - DNA, 15 bp, Homo sapiens
aaccatcctatgtat

SEQ ID NO: 368968 - DNA, 15 bp, Homo sapiens
gaaccatcctatgta

SEQ ID NO: 368969 - DNA, 15 bp, Homo sapiens
agaaccatcctatgt

SEQ ID NO: 368970 - DNA, 15 bp, Homo sapiens
cagaaccatcctatg

SEQ ID NO: 368971 - DNA, 15 bp, Homo sapiens
tcagaaccatcctat

SEQ ID NO: 368972 - DNA, 15 bp, Homo sapiens
ctcagaaccatccta

SEQ ID NO: 368973 - DNA, 15 bp, Homo sapiens
tctcagaaccatcct

SEQ ID NO: 368974 - DNA, 15 bp, Homo sapiens
ttctcagaaccatcc

SEQ ID NO: 368975 - DNA, 15 bp, Homo sapiens
gttctcagaaccatc

SEQ ID NO: 368976 - DNA, 15 bp, Homo sapiens
ggttctcagaaccat

SEQ ID NO: 368977 - DNA, 15 bp, Homo sapiens
cggttctcagaacca

SEQ ID NO: 368978 - DNA, 15 bp, Homo sapiens
tcggttctcagaacc

SEQ ID NO: 368979 - DNA, 15 bp, Homo sapiens
ttcggttctcagaac

SEQ ID NO: 368980 - DNA, 15 bp, Homo sapiens
cttcggttctcagaa

SEQ ID NO: 368981 - DNA, 15 bp, Homo sapiens
acttcggttctcaga

SEQ ID NO: 368982 - DNA, 15 bp, Homo sapiens
aacttcggttctcag

SEQ ID NO: 368983 - DNA, 15 bp, Homo sapiens
taacttcggttctca

SEQ ID NO: 368984 - DNA, 15 bp, Homo sapiens
ataacttcggttctc

SEQ ID NO: 368985 - DNA, 15 bp, Homo sapiens
aataacttcggttct

SEQ ID NO: 368986 - DNA, 15 bp, Homo sapiens
taataacttcggttc

SEQ ID NO: 368987 - DNA, 15 bp, Homo sapiens
gtaataacttcggtt

SEQ ID NO: 368988 - DNA, 15 bp, Homo sapiens
cgtaataacttcggt

SEQ ID NO: 368989 - DNA, 15 bp, Homo sapiens
acgtaataacttcgg

SEQ ID NO: 368990 - DNA, 15 bp, Homo sapiens
cacgtaataacttcg

SEQ ID NO: 368991 - DNA, 15 bp, Homo sapiens
tcacgtaataacttc

SEQ ID NO: 368992 - DNA, 15 bp, Homo sapiens
ctcacgtaataactt

SEQ ID NO: 368993 - DNA, 15 bp, Homo sapiens
gctcacgtaataact

SEQ ID NO: 368994 - DNA, 15 bp, Homo sapiens
tgctcacgtaataac

SEQ ID NO: 368995 - DNA, 15 bp, Homo sapiens
ttgctcacgtaataa

SEQ ID NO: 368996 - DNA, 15 bp, Homo sapiens
tttgctcacgtaata

SEQ ID NO: 368997 - DNA, 15 bp, Homo sapiens
ttttgctcacgtaat

SEQ ID NO: 368998 - DNA, 15 bp, Homo sapiens
attttgctcacgtaa

SEQ ID NO: 368999 - DNA, 15 bp, Homo sapiens
aattttgctcacgta

SEQ ID NO: 369000 - DNA, 15 bp, Homo sapiens
gaattttgctcacgt

SEQ ID NO: 369001 - DNA, 15 bp, Homo sapiens
tgaattttgctcacg

SEQ ID NO: 369002 - DNA, 15 bp, Homo sapiens
ctgaattttgctcac

SEQ ID NO: 369003 - DNA, 15 bp, Homo sapiens
actgaattttgctca

SEQ ID NO: 369004 - DNA, 15 bp, Homo sapiens
tactgaattttgctc

SEQ ID NO: 369005 - DNA, 15 bp, Homo sapiens
gtactgaattttgct

SEQ ID NO: 369006 - DNA, 15 bp, Homo sapiens
tgtactgaattttgc

SEQ ID NO: 369007 - DNA, 15 bp, Homo sapiens
atgtactgaattttg

SEQ ID NO: 369008 - DNA, 15 bp, Homo sapiens
tatgtactgaatttt

SEQ ID NO: 369009 - DNA, 15 bp, Homo sapiens
ctatgtactgaattt

SEQ ID NO: 369010 - DNA, 15 bp, Homo sapiens
actatgtactgaatt

SEQ ID NO: 369011 - DNA, 15 bp, Homo sapiens
tactatgtactgaat

SEQ ID NO: 369012 - DNA, 15 bp, Homo sapiens
ttactatgtactgaa

SEQ ID NO: 369013 - DNA, 15 bp, Homo sapiens
cttactatgtactga

SEQ ID NO: 369014 - DNA, 15 bp, Homo sapiens
gcttactatgtactg

SEQ ID NO: 369015 - DNA, 15 bp, Homo sapiens
tgcttactatgtact

SEQ ID NO: 369016 - DNA, 15 bp, Homo sapiens
gtgcttactatgtac

SEQ ID NO: 369017 - DNA, 15 bp, Homo sapiens
agtgcttactatgta

SEQ ID NO: 369018 - DNA, 15 bp, Homo sapiens
gagtgcttactatgt

SEQ ID NO: 369019 - DNA, 15 bp, Homo sapiens
tgagtgcttactatg

SEQ ID NO: 369020 - DNA, 15 bp, Homo sapiens
ctgagtgcttactat

SEQ ID NO: 369021 - DNA, 15 bp, Homo sapiens
actgagtgcttacta

SEQ ID NO: 369022 - DNA, 15 bp, Homo sapiens
tactgagtgcttact

SEQ ID NO: 369023 - DNA, 15 bp, Homo sapiens
ttactgagtgcttac

SEQ ID NO: 369024 - DNA, 15 bp, Homo sapiens
cttactgagtgctta

SEQ ID NO: 369025 - DNA, 15 bp, Homo sapiens
acttactgagtgctt

SEQ ID NO: 369026 - DNA, 15 bp, Homo sapiens
cacttactgagtgct

SEQ ID NO: 369027 - DNA, 15 bp, Homo sapiens
acacttactgagtgc

SEQ ID NO: 369028 - DNA, 15 bp, Homo sapiens
aacacttactgagtg

SEQ ID NO: 369029 - DNA, 15 bp, Homo sapiens
caacacttactgagt

SEQ ID NO: 369030 - DNA, 15 bp, Homo sapiens
ccaacacttactgag

SEQ ID NO: 369031 - DNA, 15 bp, Homo sapiens
gccaacacttactga

SEQ ID NO: 369032 - DNA, 15 bp, Homo sapiens
agccaacacttactg

SEQ ID NO: 369033 - DNA, 15 bp, Homo sapiens
tagccaacacttact

SEQ ID NO: 369034 - DNA, 15 bp, Homo sapiens
atagccaacacttac

SEQ ID NO: 369035 - DNA, 15 bp, Homo sapiens
aatagccaacactta

SEQ ID NO: 369036 - DNA, 15 bp, Homo sapiens
aaatagccaacactt

SEQ ID NO: 369037 - DNA, 15 bp, Homo sapiens
aaaatagccaacact

SEQ ID NO: 369038 - DNA, 15 bp, Homo sapiens
aaaaatagccaacac

SEQ ID NO: 369039 - DNA, 15 bp, Homo sapiens
aaaaaatagccaaca

SEQ ID NO: 369040 - DNA, 15 bp, Homo sapiens
aaaaaaatagccaac

SEQ ID NO: 369041 - DNA, 15 bp, Homo sapiens
aaaaaaaatagccaa

SEQ ID NO: 369042 - DNA, 15 bp, Homo sapiens
gaaaaaaaatagcca

SEQ ID NO: 369043 - DNA, 15 bp, Homo sapiens
agaaaaaaaatagcc

SEQ ID NO: 369044 - DNA, 15 bp, Homo sapiens
aagaaaaaaaatagc

SEQ ID NO: 369045 - DNA, 15 bp, Homo sapiens
aaagaaaaaaaatag

SEQ ID NO: 369046 - DNA, 15 bp, Homo sapiens
caaagaaaaaaaata

SEQ ID NO: 369047 - DNA, 15 bp, Homo sapiens
ccaaagaaaaaaaat

SEQ ID NO: 369048 - DNA, 15 bp, Homo sapiens
cccaaagaaaaaaaa

SEQ ID NO: 369049 - DNA, 15 bp, Homo sapiens
acccaaagaaaaaaa

SEQ ID NO: 369050 - DNA, 15 bp, Homo sapiens
aacccaaagaaaaaa

SEQ ID NO: 369051 - DNA, 15 bp, Homo sapiens
gaacccaaagaaaaa

SEQ ID NO: 369052 - DNA, 15 bp, Homo sapiens
agaacccaaagaaaa

SEQ ID NO: 369053 - DNA, 15 bp, Homo sapiens
tagaacccaaagaaa

SEQ ID NO: 369054 - DNA, 15 bp, Homo sapiens
ctagaacccaaagaa

SEQ ID NO: 369055 - DNA, 15 bp, Homo sapiens
actagaacccaaaga

SEQ ID NO: 369056 - DNA, 15 bp, Homo sapiens
aactagaacccaaag

SEQ ID NO: 369057 - DNA, 15 bp, Homo sapiens
gaactagaacccaaa

SEQ ID NO: 369058 - DNA, 15 bp, Homo sapiens
tgaactagaacccaa

SEQ ID NO: 369059 - DNA, 15 bp, Homo sapiens
ctgaactagaaccca

SEQ ID NO: 369060 - DNA, 15 bp, Homo sapiens
gctgaactagaaccc

SEQ ID NO: 369061 - DNA, 15 bp, Homo sapiens
ggctgaactagaacc

SEQ ID NO: 369062 - DNA, 15 bp, Homo sapiens
aggctgaactagaac

SEQ ID NO: 369063 - DNA, 15 bp, Homo sapiens
aaggctgaactagaa

SEQ ID NO: 369064 - DNA, 15 bp, Homo sapiens
gaaggctgaactaga

SEQ ID NO: 369065 - DNA, 15 bp, Homo sapiens
ggaaggctgaactag

SEQ ID NO: 369066 - DNA, 15 bp, Homo sapiens
gggaaggctgaacta

SEQ ID NO: 369067 - DNA, 15 bp, Homo sapiens
ggggaaggctgaact

SEQ ID NO: 369068 - DNA, 15 bp, Homo sapiens
gggggaaggctgaac

SEQ ID NO: 369069 - DNA, 15 bp, Homo sapiens
agggggaaggctgaa

SEQ ID NO: 369070 - DNA, 15 bp, Homo sapiens
gagggggaaggctga

SEQ ID NO: 369071 - DNA, 15 bp, Homo sapiens
agagggggaaggctg

SEQ ID NO: 369072 - DNA, 15 bp, Homo sapiens
gagagggggaaggct

SEQ ID NO: 369073 - DNA, 15 bp, Homo sapiens
agagagggggaaggc

SEQ ID NO: 369074 - DNA, 15 bp, Homo sapiens
aagagagggggaagg

SEQ ID NO: 369075 - DNA, 15 bp, Homo sapiens
gaagagagggggaag

SEQ ID NO: 369076 - DNA, 15 bp, Homo sapiens
agaagagagggggaa

SEQ ID NO: 369077 - DNA, 15 bp, Homo sapiens
aagaagagaggggga

SEQ ID NO: 369078 - DNA, 15 bp, Homo sapiens
gaagaagagaggggg

SEQ ID NO: 369079 - DNA, 15 bp, Homo sapiens
tgaagaagagagggg

SEQ ID NO: 369080 - DNA, 15 bp, Homo sapiens
atgaagaagagaggg

SEQ ID NO: 369081 - DNA, 15 bp, Homo sapiens
aatgaagaagagagg

SEQ ID NO: 369082 - DNA, 15 bp, Homo sapiens
gaatgaagaagagag

SEQ ID NO: 369083 - DNA, 15 bp, Homo sapiens
agaatgaagaagaga

SEQ ID NO: 369084 - DNA, 15 bp, Homo sapiens
gagaatgaagaagag

SEQ ID NO: 369085 - DNA, 15 bp, Homo sapiens
tgagaatgaagaaga

SEQ ID NO: 369086 - DNA, 15 bp, Homo sapiens
ttgagaatgaagaag

SEQ ID NO: 369087 - DNA, 15 bp, Homo sapiens
attgagaatgaagaa

SEQ ID NO: 369088 - DNA, 15 bp, Homo sapiens
aattgagaatgaaga

SEQ ID NO: 369089 - DNA, 15 bp, Homo sapiens
taattgagaatgaag

SEQ ID NO: 369090 - DNA, 15 bp, Homo sapiens
ataattgagaatgaa

SEQ ID NO: 369091 - DNA, 15 bp, Homo sapiens
aataattgagaatga

SEQ ID NO: 369092 - DNA, 15 bp, Homo sapiens
taataattgagaatg

SEQ ID NO: 369093 - DNA, 15 bp, Homo sapiens
ttaataattgagaat

SEQ ID NO: 369094 - DNA, 15 bp, Homo sapiens
gttaataattgagaa

SEQ ID NO: 369095 - DNA, 15 bp, Homo sapiens
ggttaataattgaga

SEQ ID NO: 369096 - DNA, 15 bp, Homo sapiens
tggttaataattgag

SEQ ID NO: 369097 - DNA, 15 bp, Homo sapiens
ctggttaataattga

SEQ ID NO: 369098 - DNA, 15 bp, Homo sapiens
actggttaataattg

SEQ ID NO: 369099 - DNA, 15 bp, Homo sapiens
aactggttaataatt

SEQ ID NO: 369100 - DNA, 15 bp, Homo sapiens
aaactggttaataat

SEQ ID NO: 369101 - DNA, 15 bp, Homo sapiens
taaactggttaataa

SEQ ID NO: 369102 - DNA, 15 bp, Homo sapiens
ctaaactggttaata

SEQ ID NO: 369103 - DNA, 15 bp, Homo sapiens
cctaaactggttaat

SEQ ID NO: 369104 - DNA, 15 bp, Homo sapiens
acctaaactggttaa

SEQ ID NO: 369105 - DNA, 15 bp, Homo sapiens
gacctaaactggtta

SEQ ID NO: 369106 - DNA, 15 bp, Homo sapiens
agacctaaactggtt

SEQ ID NO: 369107 - DNA, 15 bp, Homo sapiens
tagacctaaactggt

SEQ ID NO: 369108 - DNA, 15 bp, Homo sapiens
ctagacctaaactgg

SEQ ID NO: 369109 - DNA, 15 bp, Homo sapiens
tctagacctaaactg

SEQ ID NO: 369110 - DNA, 15 bp, Homo sapiens
ctctagacctaaact

SEQ ID NO: 369111 - DNA, 15 bp, Homo sapiens
actctagacctaaac

SEQ ID NO: 369112 - DNA, 15 bp, Homo sapiens
tactctagacctaaa

SEQ ID NO: 369113 - DNA, 15 bp, Homo sapiens
atactctagacctaa

SEQ ID NO: 369114 - DNA, 15 bp, Homo sapiens
aatactctagaccta

SEQ ID NO: 369115 - DNA, 15 bp, Homo sapiens
gaatactctagacct

SEQ ID NO: 369116 - DNA, 15 bp, Homo sapiens
agaatactctagacc

SEQ ID NO: 369117 - DNA, 15 bp, Homo sapiens
aagaatactctagac

SEQ ID NO: 369118 - DNA, 15 bp, Homo sapiens
caagaatactctaga

SEQ ID NO: 369119 - DNA, 15 bp, Homo sapiens
gcaagaatactctag

SEQ ID NO: 369120 - DNA, 15 bp, Homo sapiens
ggcaagaatactcta

SEQ ID NO: 369121 - DNA, 15 bp, Homo sapiens
aggcaagaatactct

SEQ ID NO: 369122 - DNA, 15 bp, Homo sapiens
aaggcaagaatactc

SEQ ID NO: 369123 - DNA, 15 bp, Homo sapiens
aaaggcaagaatact

SEQ ID NO: 369124 - DNA, 15 bp, Homo sapiens
caaaggcaagaatac

SEQ ID NO: 369125 - DNA, 15 bp, Homo sapiens
gcaaaggcaagaata

SEQ ID NO: 369126 - DNA, 15 bp, Homo sapiens
agcaaaggcaagaat

SEQ ID NO: 369127 - DNA, 15 bp, Homo sapiens
aagcaaaggcaagaa

SEQ ID NO: 369128 - DNA, 15 bp, Homo sapiens
aaagcaaaggcaaga

SEQ ID NO: 369129 - DNA, 15 bp, Homo sapiens
caaagcaaaggcaag

SEQ ID NO: 369130 - DNA, 15 bp, Homo sapiens
tcaaagcaaaggcaa

SEQ ID NO: 369131 - DNA, 15 bp, Homo sapiens
ctcaaagcaaaggca

SEQ ID NO: 369132 - DNA, 15 bp, Homo sapiens
actcaaagcaaaggc

SEQ ID NO: 369133 - DNA, 15 bp, Homo sapiens
gactcaaagcaaagg

SEQ ID NO: 369134 - DNA, 15 bp, Homo sapiens
agactcaaagcaaag

SEQ ID NO: 369135 - DNA, 15 bp, Homo sapiens
gagactcaaagcaaa

SEQ ID NO: 369136 - DNA, 15 bp, Homo sapiens
tgagactcaaagcaa

SEQ ID NO: 369137 - DNA, 15 bp, Homo sapiens
atgagactcaaagca

SEQ ID NO: 369138 - DNA, 15 bp, Homo sapiens
tatgagactcaaagc

SEQ ID NO: 369139 - DNA, 15 bp, Homo sapiens
ttatgagactcaaag

SEQ ID NO: 369140 - DNA, 15 bp, Homo sapiens
tttatgagactcaaa

SEQ ID NO: 369141 - DNA, 15 bp, Homo sapiens
ttttatgagactcaa

SEQ ID NO: 369142 - DNA, 15 bp, Homo sapiens
tttttatgagactca

SEQ ID NO: 369143 - DNA, 15 bp, Homo sapiens
gtttttatgagactc

SEQ ID NO: 369144 - DNA, 15 bp, Homo sapiens
tgtttttatgagact

SEQ ID NO: 369145 - DNA, 15 bp, Homo sapiens
ttgtttttatgagac

SEQ ID NO: 369146 - DNA, 15 bp, Homo sapiens
attgtttttatgaga

SEQ ID NO: 369147 - DNA, 15 bp, Homo sapiens
cattgtttttatgag

SEQ ID NO: 369148 - DNA, 15 bp, Homo sapiens
gcattgtttttatga

SEQ ID NO: 369149 - DNA, 15 bp, Homo sapiens
ggcattgtttttatg

SEQ ID NO: 369150 - DNA, 15 bp, Homo sapiens
tggcattgtttttat

SEQ ID NO: 369151 - DNA, 15 bp, Homo sapiens
atggcattgttttta

SEQ ID NO: 369152 - DNA, 15 bp, Homo sapiens
aatggcattgttttt

SEQ ID NO: 369153 - DNA, 15 bp, Homo sapiens
caatggcattgtttt

SEQ ID NO: 369154 - DNA, 15 bp, Homo sapiens
tcaatggcattgttt

SEQ ID NO: 369155 - DNA, 15 bp, Homo sapiens
ctcaatggcattgtt

SEQ ID NO: 369156 - DNA, 15 bp, Homo sapiens
gctcaatggcattgt

SEQ ID NO: 369157 - DNA, 15 bp, Homo sapiens
ggctcaatggcattg

SEQ ID NO: 369158 - DNA, 15 bp, Homo sapiens
aggctcaatggcatt

SEQ ID NO: 369159 - DNA, 15 bp, Homo sapiens
aaggctcaatggcat

SEQ ID NO: 369160 - DNA, 15 bp, Homo sapiens
aaaggctcaatggca

SEQ ID NO: 369161 - DNA, 15 bp, Homo sapiens
gaaaggctcaatggc

SEQ ID NO: 369162 - DNA, 15 bp, Homo sapiens
agaaaggctcaatgg

SEQ ID NO: 369163 - DNA, 15 bp, Homo sapiens
gagaaaggctcaatg

SEQ ID NO: 369164 - DNA, 15 bp, Homo sapiens
tgagaaaggctcaat

SEQ ID NO: 369165 - DNA, 15 bp, Homo sapiens
atgagaaaggctcaa

SEQ ID NO: 369166 - DNA, 15 bp, Homo sapiens
aatgagaaaggctca

SEQ ID NO: 369167 - DNA, 15 bp, Homo sapiens
aaatgagaaaggctc

SEQ ID NO: 369168 - DNA, 15 bp, Homo sapiens
aaaatgagaaaggct

SEQ ID NO: 369169 - DNA, 15 bp, Homo sapiens
gaaaatgagaaaggc

SEQ ID NO: 369170 - DNA, 15 bp, Homo sapiens
ggaaaatgagaaagg

SEQ ID NO: 369171 - DNA, 15 bp, Homo sapiens
tggaaaatgagaaag

SEQ ID NO: 369172 - DNA, 15 bp, Homo sapiens
ttggaaaatgagaaa

SEQ ID NO: 369173 - DNA, 15 bp, Homo sapiens
attggaaaatgagaa

SEQ ID NO: 369174 - DNA, 15 bp, Homo sapiens
cattggaaaatgaga

SEQ ID NO: 369175 - DNA, 15 bp, Homo sapiens
gcattggaaaatgag

SEQ ID NO: 369176 - DNA, 15 bp, Homo sapiens
tgcattggaaaatga

SEQ ID NO: 369177 - DNA, 15 bp, Homo sapiens
gtgcattggaaaatg

SEQ ID NO: 369178 - DNA, 15 bp, Homo sapiens
agtgcattggaaaat

SEQ ID NO: 369179 - DNA, 15 bp, Homo sapiens
aagtgcattggaaaa

SEQ ID NO: 369180 - DNA, 15 bp, Homo sapiens
caagtgcattggaaa

SEQ ID NO: 369181 - DNA, 15 bp, Homo sapiens
ccaagtgcattggaa

SEQ ID NO: 369182 - DNA, 15 bp, Homo sapiens
cccaagtgcattgga

SEQ ID NO: 369183 - DNA, 15 bp, Homo sapiens
acccaagtgcattgg

SEQ ID NO: 369184 - DNA, 15 bp, Homo sapiens
aacccaagtgcattg

SEQ ID NO: 369185 - DNA, 15 bp, Homo sapiens
aaacccaagtgcatt

SEQ ID NO: 369186 - DNA, 15 bp, Homo sapiens
taaacccaagtgcat

SEQ ID NO: 369187 - DNA, 15 bp, Homo sapiens
gtaaacccaagtgca

SEQ ID NO: 369188 - DNA, 15 bp, Homo sapiens
tgtaaacccaagtgc

SEQ ID NO: 369189 - DNA, 15 bp, Homo sapiens
ctgtaaacccaagtg

SEQ ID NO: 369190 - DNA, 15 bp, Homo sapiens
actgtaaacccaagt

SEQ ID NO: 369191 - DNA, 15 bp, Homo sapiens
cactgtaaacccaag

SEQ ID NO: 369192 - DNA, 15 bp, Homo sapiens
acactgtaaacccaa

SEQ ID NO: 369193 - DNA, 15 bp, Homo sapiens
gacactgtaaaccca

SEQ ID NO: 369194 - DNA, 15 bp, Homo sapiens
ggacactgtaaaccc

SEQ ID NO: 369195 - DNA, 15 bp, Homo sapiens
aggacactgtaaacc

SEQ ID NO: 369196 - DNA, 15 bp, Homo sapiens
caggacactgtaaac

SEQ ID NO: 369197 - DNA, 15 bp, Homo sapiens
ccaggacactgtaaa

SEQ ID NO: 369198 - DNA, 15 bp, Homo sapiens
tccaggacactgtaa

SEQ ID NO: 369199 - DNA, 15 bp, Homo sapiens
ttccaggacactgta

SEQ ID NO: 369200 - DNA, 15 bp, Homo sapiens
gttccaggacactgt

SEQ ID NO: 369201 - DNA, 15 bp, Homo sapiens
ggttccaggacactg

SEQ ID NO: 369202 - DNA, 15 bp, Homo sapiens
gggttccaggacact

SEQ ID NO: 369203 - DNA, 15 bp, Homo sapiens
agggttccaggacac

SEQ ID NO: 369204 - DNA, 15 bp, Homo sapiens
aagggttccaggaca

SEQ ID NO: 369205 - DNA, 15 bp, Homo sapiens
aaagggttccaggac

SEQ ID NO: 369206 - DNA, 15 bp, Homo sapiens
aaaagggttccagga

SEQ ID NO: 369207 - DNA, 15 bp, Homo sapiens
gaaaagggttccagg

SEQ ID NO: 369208 - DNA, 15 bp, Homo sapiens
ggaaaagggttccag

SEQ ID NO: 369209 - DNA, 15 bp, Homo sapiens
tggaaaagggttcca

SEQ ID NO: 369210 - DNA, 15 bp, Homo sapiens
ctggaaaagggttcc

SEQ ID NO: 369211 - DNA, 15 bp, Homo sapiens
gctggaaaagggttc

SEQ ID NO: 369212 - DNA, 15 bp, Homo sapiens
ggctggaaaagggtt

SEQ ID NO: 369213 - DNA, 15 bp, Homo sapiens
tggctggaaaagggt

SEQ ID NO: 369214 - DNA, 15 bp, Homo sapiens
atggctggaaaaggg

SEQ ID NO: 369215 - DNA, 15 bp, Homo sapiens
aatggctggaaaagg

SEQ ID NO: 369216 - DNA, 15 bp, Homo sapiens
taatggctggaaaag

SEQ ID NO: 369217 - DNA, 15 bp, Homo sapiens
gtaatggctggaaaa

SEQ ID NO: 369218 - DNA, 15 bp, Homo sapiens
agtaatggctggaaa

SEQ ID NO: 369219 - DNA, 15 bp, Homo sapiens
aagtaatggctggaa

SEQ ID NO: 369220 - DNA, 15 bp, Homo sapiens
caagtaatggctgga

SEQ ID NO: 369221 - DNA, 15 bp, Homo sapiens
acaagtaatggctgg

SEQ ID NO: 369222 - DNA, 15 bp, Homo sapiens
cacaagtaatggctg

SEQ ID NO: 369223 - DNA, 15 bp, Homo sapiens
acacaagtaatggct

SEQ ID NO: 369224 - DNA, 15 bp, Homo sapiens
tacacaagtaatggc

SEQ ID NO: 369225 - DNA, 15 bp, Homo sapiens
atacacaagtaatgg

SEQ ID NO: 369226 - DNA, 15 bp, Homo sapiens
tatacacaagtaatg

SEQ ID NO: 369227 - DNA, 15 bp, Homo sapiens
atatacacaagtaat

SEQ ID NO: 369228 - DNA, 15 bp, Homo sapiens
gatatacacaagtaa

SEQ ID NO: 369229 - DNA, 15 bp, Homo sapiens
agatatacacaagta

SEQ ID NO: 369230 - DNA, 15 bp, Homo sapiens
aagatatacacaagt

SEQ ID NO: 369231 - DNA, 15 bp, Homo sapiens
caagatatacacaag

SEQ ID NO: 369232 - DNA, 15 bp, Homo sapiens
acaagatatacacaa

SEQ ID NO: 369233 - DNA, 15 bp, Homo sapiens
gacaagatatacaca

SEQ ID NO: 369234 - DNA, 15 bp, Homo sapiens
agacaagatatacac

SEQ ID NO: 369235 - DNA, 15 bp, Homo sapiens
cagacaagatataca

SEQ ID NO: 369236 - DNA, 15 bp, Homo sapiens
tcagacaagatatac

SEQ ID NO: 369237 - DNA, 15 bp, Homo sapiens
ctcagacaagatata

SEQ ID NO: 369238 - DNA, 15 bp, Homo sapiens
gctcagacaagatat

SEQ ID NO: 369239 - DNA, 15 bp, Homo sapiens
ggctcagacaagata

SEQ ID NO: 369240 - DNA, 15 bp, Homo sapiens
tggctcagacaagat

SEQ ID NO: 369241 - DNA, 15 bp, Homo sapiens
atggctcagacaaga

SEQ ID NO: 369242 - DNA, 15 bp, Homo sapiens
tatggctcagacaag

SEQ ID NO: 369243 - DNA, 15 bp, Homo sapiens
ctatggctcagacaa

SEQ ID NO: 369244 - DNA, 15 bp, Homo sapiens
actatggctcagaca

SEQ ID NO: 369245 - DNA, 15 bp, Homo sapiens
gactatggctcagac

SEQ ID NO: 369246 - DNA, 15 bp, Homo sapiens
ggactatggctcaga

SEQ ID NO: 369247 - DNA, 15 bp, Homo sapiens
aggactatggctcag

SEQ ID NO: 369248 - DNA, 15 bp, Homo sapiens
aaggactatggctca

SEQ ID NO: 369249 - DNA, 15 bp, Homo sapiens
gaaggactatggctc

SEQ ID NO: 369250 - DNA, 15 bp, Homo sapiens
agaaggactatggct

SEQ ID NO: 369251 - DNA, 15 bp, Homo sapiens
aagaaggactatggc

SEQ ID NO: 369252 - DNA, 15 bp, Homo sapiens
aaagaaggactatgg

SEQ ID NO: 369253 - DNA, 15 bp, Homo sapiens
gaaagaaggactatg

SEQ ID NO: 369254 - DNA, 15 bp, Homo sapiens
ggaaagaaggactat

SEQ ID NO: 369255 - DNA, 15 bp, Homo sapiens
aggaaagaaggacta

SEQ ID NO: 369256 - DNA, 15 bp, Homo sapiens
aaggaaagaaggact

SEQ ID NO: 369257 - DNA, 15 bp, Homo sapiens
taaggaaagaaggac

SEQ ID NO: 369258 - DNA, 15 bp, Homo sapiens
ataaggaaagaagga

SEQ ID NO: 369259 - DNA, 15 bp, Homo sapiens
cataaggaaagaagg

SEQ ID NO: 369260 - DNA, 15 bp, Homo sapiens
tcataaggaaagaag

SEQ ID NO: 369261 - DNA, 15 bp, Homo sapiens
atcataaggaaagaa

SEQ ID NO: 369262 - DNA, 15 bp, Homo sapiens
gatcataaggaaaga

SEQ ID NO: 369263 - DNA, 15 bp, Homo sapiens
tgatcataaggaaag

SEQ ID NO: 369264 - DNA, 15 bp, Homo sapiens
gtgatcataaggaaa

SEQ ID NO: 369265 - DNA, 15 bp, Homo sapiens
tgtgatcataaggaa

SEQ ID NO: 369266 - DNA, 15 bp, Homo sapiens
atgtgatcataagga

SEQ ID NO: 369267 - DNA, 15 bp, Homo sapiens
tatgtgatcataagg

SEQ ID NO: 369268 - DNA, 15 bp, Homo sapiens
ttatgtgatcataag

SEQ ID NO: 369269 - DNA, 15 bp, Homo sapiens
cttatgtgatcataa

SEQ ID NO: 369270 - DNA, 15 bp, Homo sapiens
ccttatgtgatcata

SEQ ID NO: 369271 - DNA, 15 bp, Homo sapiens
tccttatgtgatcat

SEQ ID NO: 369272 - DNA, 15 bp, Homo sapiens
ttccttatgtgatca

SEQ ID NO: 369273 - DNA, 15 bp, Homo sapiens
attccttatgtgatc

SEQ ID NO: 369274 - DNA, 15 bp, Homo sapiens
tattccttatgtgat

SEQ ID NO: 369275 - DNA, 15 bp, Homo sapiens
atattccttatgtga

SEQ ID NO: 369276 - DNA, 15 bp, Homo sapiens
aatattccttatgtg

SEQ ID NO: 369277 - DNA, 15 bp, Homo sapiens
caatattccttatgt

SEQ ID NO: 369278 - DNA, 15 bp, Homo sapiens
acaatattccttatg

SEQ ID NO: 369279 - DNA, 15 bp, Homo sapiens
cacaatattccttat

SEQ ID NO: 369280 - DNA, 15 bp, Homo sapiens
acacaatattcctta

SEQ ID NO: 369281 - DNA, 15 bp, Homo sapiens
cacacaatattcctt

SEQ ID NO: 369282 - DNA, 15 bp, Homo sapiens
acacacaatattcct

SEQ ID NO: 369283 - DNA, 15 bp, Homo sapiens
tacacacaatattcc

SEQ ID NO: 369284 - DNA, 15 bp, Homo sapiens
atacacacaatattc

SEQ ID NO: 369285 - DNA, 15 bp, Homo sapiens
tatacacacaatatt

SEQ ID NO: 369286 - DNA, 15 bp, Homo sapiens
atatacacacaatat

SEQ ID NO: 369287 - DNA, 15 bp, Homo sapiens
tatatacacacaata

SEQ ID NO: 369288 - DNA, 15 bp, Homo sapiens
atatatacacacaat

SEQ ID NO: 369289 - DNA, 15 bp, Homo sapiens
tatatatacacacaa

SEQ ID NO: 369290 - DNA, 15 bp, Homo sapiens
attgtgtgtgtgtgt

SEQ ID NO: 369291 - DNA, 15 bp, Homo sapiens
cattgtgtgtgtgtg

SEQ ID NO: 369292 - DNA, 15 bp, Homo sapiens
gcattgtgtgtgtgt

SEQ ID NO: 369293 - DNA, 15 bp, Homo sapiens
agcattgtgtgtgtg

SEQ ID NO: 369294 - DNA, 15 bp, Homo sapiens
gagcattgtgtgtgt

SEQ ID NO: 369295 - DNA, 15 bp, Homo sapiens
tgagcattgtgtgtg

SEQ ID NO: 369296 - DNA, 15 bp, Homo sapiens
atgagcattgtgtgt

SEQ ID NO: 369297 - DNA, 15 bp, Homo sapiens
aatgagcattgtgtg

SEQ ID NO: 369298 - DNA, 15 bp, Homo sapiens
caatgagcattgtgt

SEQ ID NO: 369299 - DNA, 15 bp, Homo sapiens
gcaatgagcattgtg

SEQ ID NO: 369300 - DNA, 15 bp, Homo sapiens
ggcaatgagcattgt

SEQ ID NO: 369301 - DNA, 15 bp, Homo sapiens
aggcaatgagcattg

SEQ ID NO: 369302 - DNA, 15 bp, Homo sapiens
aaggcaatgagcatt

SEQ ID NO: 369303 - DNA, 15 bp, Homo sapiens
gaaggcaatgagcat

SEQ ID NO: 369304 - DNA, 15 bp, Homo sapiens
agaaggcaatgagca

SEQ ID NO: 369305 - DNA, 15 bp, Homo sapiens
gagaaggcaatgagc

SEQ ID NO: 369306 - DNA, 15 bp, Homo sapiens
tgagaaggcaatgag

SEQ ID NO: 369307 - DNA, 15 bp, Homo sapiens
atgagaaggcaatga

SEQ ID NO: 369308 - DNA, 15 bp, Homo sapiens
aatgagaaggcaatg

SEQ ID NO: 369309 - DNA, 15 bp, Homo sapiens
taatgagaaggcaat

SEQ ID NO: 369310 - DNA, 15 bp, Homo sapiens
ctaatgagaaggcaa

SEQ ID NO: 369311 - DNA, 15 bp, Homo sapiens
actaatgagaaggca

SEQ ID NO: 369312 - DNA, 15 bp, Homo sapiens
tactaatgagaaggc

SEQ ID NO: 369313 - DNA, 15 bp, Homo sapiens
atactaatgagaagg

SEQ ID NO: 369314 - DNA, 15 bp, Homo sapiens
aatactaatgagaag

SEQ ID NO: 369315 - DNA, 15 bp, Homo sapiens
gaatactaatgagaa

SEQ ID NO: 369316 - DNA, 15 bp, Homo sapiens
agaatactaatgaga

SEQ ID NO: 369317 - DNA, 15 bp, Homo sapiens
tagaatactaatgag

SEQ ID NO: 369318 - DNA, 15 bp, Homo sapiens
ctagaatactaatga

SEQ ID NO: 369319 - DNA, 15 bp, Homo sapiens
cctagaatactaatg

SEQ ID NO: 369320 - DNA, 15 bp, Homo sapiens
tcctagaatactaat

SEQ ID NO: 369321 - DNA, 15 bp, Homo sapiens
atcctagaatactaa

SEQ ID NO: 369322 - DNA, 15 bp, Homo sapiens
aatcctagaatacta

SEQ ID NO: 369323 - DNA, 15 bp, Homo sapiens
aaatcctagaatact

SEQ ID NO: 369324 - DNA, 15 bp, Homo sapiens
aaaatcctagaatac

SEQ ID NO: 369325 - DNA, 15 bp, Homo sapiens
gaaaatcctagaata

SEQ ID NO: 369326 - DNA, 15 bp, Homo sapiens
agaaaatcctagaat

SEQ ID NO: 369327 - DNA, 15 bp, Homo sapiens
cagaaaatcctagaa

SEQ ID NO: 369328 - DNA, 15 bp, Homo sapiens
acagaaaatcctaga

SEQ ID NO: 369329 - DNA, 15 bp, Homo sapiens
cacagaaaatcctag

SEQ ID NO: 369330 - DNA, 15 bp, Homo sapiens
acacagaaaatccta

SEQ ID NO: 369331 - DNA, 15 bp, Homo sapiens
cacacagaaaatcct

SEQ ID NO: 369332 - DNA, 15 bp, Homo sapiens
acacacagaaaatcc

SEQ ID NO: 369333 - DNA, 15 bp, Homo sapiens
cacacacagaaaatc

SEQ ID NO: 369334 - DNA, 15 bp, Homo sapiens
tcacacacagaaaat

SEQ ID NO: 369335 - DNA, 15 bp, Homo sapiens
ttcacacacagaaaa

SEQ ID NO: 369336 - DNA, 15 bp, Homo sapiens
tttcacacacagaaa

SEQ ID NO: 369337 - DNA, 15 bp, Homo sapiens
ttttcacacacagaa

SEQ ID NO: 369338 - DNA, 15 bp, Homo sapiens
tttttcacacacaga

SEQ ID NO: 369339 - DNA, 15 bp, Homo sapiens
atttttcacacacag

SEQ ID NO: 369340 - DNA, 15 bp, Homo sapiens
gatttttcacacaca

SEQ ID NO: 369341 - DNA, 15 bp, Homo sapiens
agatttttcacacac

SEQ ID NO: 369342 - DNA, 15 bp, Homo sapiens
aagatttttcacaca

SEQ ID NO: 369343 - DNA, 15 bp, Homo sapiens
aaagatttttcacac

SEQ ID NO: 369344 - DNA, 15 bp, Homo sapiens
aaaagatttttcaca

SEQ ID NO: 369345 - DNA, 15 bp, Homo sapiens
aaaaagatttttcac

SEQ ID NO: 369346 - DNA, 15 bp, Homo sapiens
aaaaaagatttttca

SEQ ID NO: 369347 - DNA, 15 bp, Homo sapiens
taaaaaagatttttc

SEQ ID NO: 369348 - DNA, 15 bp, Homo sapiens
ttaaaaaagattttt

SEQ ID NO: 369349 - DNA, 15 bp, Homo sapiens
cttaaaaaagatttt

SEQ ID NO: 369350 - DNA, 15 bp, Homo sapiens
tcttaaaaaagattt

SEQ ID NO: 369351 - DNA, 15 bp, Homo sapiens
ttcttaaaaaagatt

SEQ ID NO: 369352 - DNA, 15 bp, Homo sapiens
attcttaaaaaagat

SEQ ID NO: 369353 - DNA, 15 bp, Homo sapiens
gattcttaaaaaaga

SEQ ID NO: 369354 - DNA, 15 bp, Homo sapiens
agattcttaaaaaag

SEQ ID NO: 369355 - DNA, 15 bp, Homo sapiens
tagattcttaaaaaa

SEQ ID NO: 369356 - DNA, 15 bp, Homo sapiens
gtagattcttaaaaa

SEQ ID NO: 369357 - DNA, 15 bp, Homo sapiens
agtagattcttaaaa

SEQ ID NO: 369358 - DNA, 15 bp, Homo sapiens
tagtagattcttaaa

SEQ ID NO: 369359 - DNA, 15 bp, Homo sapiens
ttagtagattcttaa

SEQ ID NO: 369360 - DNA, 15 bp, Homo sapiens
tttagtagattctta

SEQ ID NO: 369361 - DNA, 15 bp, Homo sapiens
atttagtagattctt

SEQ ID NO: 369362 - DNA, 15 bp, Homo sapiens
tatttagtagattct

SEQ ID NO: 369363 - DNA, 15 bp, Homo sapiens
gtatttagtagattc

SEQ ID NO: 369364 - DNA, 15 bp, Homo sapiens
agtatttagtagatt

SEQ ID NO: 369365 - DNA, 15 bp, Homo sapiens
aagtatttagtagat

SEQ ID NO: 369366 - DNA, 15 bp, Homo sapiens
gaagtatttagtaga

SEQ ID NO: 369367 - DNA, 15 bp, Homo sapiens
agaagtatttagtag

SEQ ID NO: 369368 - DNA, 15 bp, Homo sapiens
aagaagtatttagta

SEQ ID NO: 369369 - DNA, 15 bp, Homo sapiens
gaagaagtatttagt

SEQ ID NO: 369370 - DNA, 15 bp, Homo sapiens
tgaagaagtatttag

SEQ ID NO: 369371 - DNA, 15 bp, Homo sapiens
ctgaagaagtattta

SEQ ID NO: 369372 - DNA, 15 bp, Homo sapiens
actgaagaagtattt

SEQ ID NO: 369373 - DNA, 15 bp, Homo sapiens
aactgaagaagtatt

SEQ ID NO: 369374 - DNA, 15 bp, Homo sapiens
gaactgaagaagtat

SEQ ID NO: 369375 - DNA, 15 bp, Homo sapiens
agaactgaagaagta

SEQ ID NO: 369376 - DNA, 15 bp, Homo sapiens
aagaactgaagaagt

SEQ ID NO: 369377 - DNA, 15 bp, Homo sapiens
aaagaactgaagaag

SEQ ID NO: 369378 - DNA, 15 bp, Homo sapiens
taaagaactgaagaa

SEQ ID NO: 369379 - DNA, 15 bp, Homo sapiens
ataaagaactgaaga

SEQ ID NO: 369380 - DNA, 15 bp, Homo sapiens
gataaagaactgaag

SEQ ID NO: 369381 - DNA, 15 bp, Homo sapiens
ggataaagaactgaa

SEQ ID NO: 369382 - DNA, 15 bp, Homo sapiens
tggataaagaactga

SEQ ID NO: 369383 - DNA, 15 bp, Homo sapiens
atggataaagaactg

SEQ ID NO: 369384 - DNA, 15 bp, Homo sapiens
tatggataaagaact

SEQ ID NO: 369385 - DNA, 15 bp, Homo sapiens
ctatggataaagaac

SEQ ID NO: 369386 - DNA, 15 bp, Homo sapiens
cctatggataaagaa

SEQ ID NO: 369387 - DNA, 15 bp, Homo sapiens
ccctatggataaaga

SEQ ID NO: 369388 - DNA, 15 bp, Homo sapiens
tccctatggataaag

SEQ ID NO: 369389 - DNA, 15 bp, Homo sapiens
ttccctatggataaa

SEQ ID NO: 369390 - DNA, 15 bp, Homo sapiens
cttccctatggataa

SEQ ID NO: 369391 - DNA, 15 bp, Homo sapiens
ccttccctatggata

SEQ ID NO: 369392 - DNA, 15 bp, Homo sapiens
cccttccctatggat

SEQ ID NO: 369393 - DNA, 15 bp, Homo sapiens
ccccttccctatgga

SEQ ID NO: 369394 - DNA, 15 bp, Homo sapiens
tccccttccctatgg

SEQ ID NO: 369395 - DNA, 15 bp, Homo sapiens
ttccccttccctatg

SEQ ID NO: 369396 - DNA, 15 bp, Homo sapiens
cttccccttccctat

SEQ ID NO: 369397 - DNA, 15 bp, Homo sapiens
acttccccttcccta

SEQ ID NO: 369398 - DNA, 15 bp, Homo sapiens
cacttccccttccct

SEQ ID NO: 369399 - DNA, 15 bp, Homo sapiens
tcacttccccttccc

SEQ ID NO: 369400 - DNA, 15 bp, Homo sapiens
atcacttccccttcc

SEQ ID NO: 369401 - DNA, 15 bp, Homo sapiens
gatcacttccccttc

SEQ ID NO: 369402 - DNA, 15 bp, Homo sapiens
ggatcacttcccctt

SEQ ID NO: 369403 - DNA, 15 bp, Homo sapiens
tggatcacttcccct

SEQ ID NO: 369404 - DNA, 15 bp, Homo sapiens
gtggatcacttcccc

SEQ ID NO: 369405 - DNA, 15 bp, Homo sapiens
cgtggatcacttccc

SEQ ID NO: 369406 - DNA, 15 bp, Homo sapiens
tcgtggatcacttcc

SEQ ID NO: 369407 - DNA, 15 bp, Homo sapiens
ttcgtggatcacttc

SEQ ID NO: 369408 - DNA, 15 bp, Homo sapiens
attcgtggatcactt

SEQ ID NO: 369409 - DNA, 15 bp, Homo sapiens
tattcgtggatcact

SEQ ID NO: 369410 - DNA, 15 bp, Homo sapiens
gtattcgtggatcac

SEQ ID NO: 369411 - DNA, 15 bp, Homo sapiens
agtattcgtggatca

SEQ ID NO: 369412 - DNA, 15 bp, Homo sapiens
aagtattcgtggatc

SEQ ID NO: 369413 - DNA, 15 bp, Homo sapiens
taagtattcgtggat

SEQ ID NO: 369414 - DNA, 15 bp, Homo sapiens
ataagtattcgtgga

SEQ ID NO: 369415 - DNA, 15 bp, Homo sapiens
aataagtattcgtgg

SEQ ID NO: 369416 - DNA, 15 bp, Homo sapiens
caataagtattcgtg

SEQ ID NO: 369417 - DNA, 15 bp, Homo sapiens
acaataagtattcgt

SEQ ID NO: 369418 - DNA, 15 bp, Homo sapiens
tacaataagtattcg

SEQ ID NO: 369419 - DNA, 15 bp, Homo sapiens
atacaataagtattc

SEQ ID NO: 369420 - DNA, 15 bp, Homo sapiens
tatacaataagtatt

SEQ ID NO: 369421 - DNA, 15 bp, Homo sapiens
gtatacaataagtat

SEQ ID NO: 369422 - DNA, 15 bp, Homo sapiens
ggtatacaataagta

SEQ ID NO: 369423 - DNA, 15 bp, Homo sapiens
aggtatacaataagt

SEQ ID NO: 369424 - DNA, 15 bp, Homo sapiens
taggtatacaataag

SEQ ID NO: 369425 - DNA, 15 bp, Homo sapiens
ttaggtatacaataa

SEQ ID NO: 369426 - DNA, 15 bp, Homo sapiens
attaggtatacaata

SEQ ID NO: 369427 - DNA, 15 bp, Homo sapiens
tattaggtatacaat

SEQ ID NO: 369428 - DNA, 15 bp, Homo sapiens
ttattaggtatacaa

SEQ ID NO: 369429 - DNA, 15 bp, Homo sapiens
tttattaggtataca

SEQ ID NO: 369430 - DNA, 15 bp, Homo sapiens
ttttattaggtatac

SEQ ID NO: 369431 - DNA, 15 bp, Homo sapiens
attttattaggtata

SEQ ID NO: 369432 - DNA, 15 bp, Homo sapiens
tattttattaggtat

SEQ ID NO: 369433 - DNA, 15 bp, Homo sapiens
atattttattaggta

SEQ ID NO: 369434 - DNA, 15 bp, Homo sapiens
aatattttattaggt

SEQ ID NO: 369435 - DNA, 15 bp, Homo sapiens
taatattttattagg

SEQ ID NO: 369436 - DNA, 15 bp, Homo sapiens
ttaatattttattag

SEQ ID NO: 369437 - DNA, 15 bp, Homo sapiens
attaatattttatta

SEQ ID NO: 369438 - DNA, 15 bp, Homo sapiens
tattaatattttatt

SEQ ID NO: 369439 - DNA, 15 bp, Homo sapiens
atattaatattttat

SEQ ID NO: 369440 - DNA, 15 bp, Homo sapiens
aatattaatatttta

SEQ ID NO: 369441 - DNA, 15 bp, Homo sapiens
caatattaatatttt

SEQ ID NO: 369442 - DNA, 15 bp, Homo sapiens
ccaatattaatattt

SEQ ID NO: 369443 - DNA, 15 bp, Homo sapiens
accaatattaatatt

SEQ ID NO: 369444 - DNA, 15 bp, Homo sapiens
taccaatattaatat

SEQ ID NO: 369445 - DNA, 15 bp, Homo sapiens
ctaccaatattaata

SEQ ID NO: 369446 - DNA, 15 bp, Homo sapiens
gctaccaatattaat

SEQ ID NO: 369447 - DNA, 15 bp, Homo sapiens
ggctaccaatattaa

SEQ ID NO: 369448 - DNA, 15 bp, Homo sapiens
tggctaccaatatta

SEQ ID NO: 369449 - DNA, 15 bp, Homo sapiens
ctggctaccaatatt

SEQ ID NO: 369450 - DNA, 15 bp, Homo sapiens
gctggctaccaatat

SEQ ID NO: 369451 - DNA, 15 bp, Homo sapiens
tgctggctaccaata

SEQ ID NO: 369452 - DNA, 15 bp, Homo sapiens
atgctggctaccaat

SEQ ID NO: 369453 - DNA, 15 bp, Homo sapiens
aatgctggctaccaa

SEQ ID NO: 369454 - DNA, 15 bp, Homo sapiens
aaatgctggctacca

SEQ ID NO: 369455 - DNA, 15 bp, Homo sapiens
aaaatgctggctacc

SEQ ID NO: 369456 - DNA, 15 bp, Homo sapiens
aaaaatgctggctac

SEQ ID NO: 369457 - DNA, 15 bp, Homo sapiens
aaaaaatgctggcta

SEQ ID NO: 369458 - DNA, 15 bp, Homo sapiens
taaaaaatgctggct

SEQ ID NO: 369459 - DNA, 15 bp, Homo sapiens
ctaaaaaatgctggc

SEQ ID NO: 369460 - DNA, 15 bp, Homo sapiens
gctaaaaaatgctgg

SEQ ID NO: 369461 - DNA, 15 bp, Homo sapiens
tgctaaaaaatgctg

SEQ ID NO: 369462 - DNA, 15 bp, Homo sapiens
gtgctaaaaaatgct

SEQ ID NO: 369463 - DNA, 15 bp, Homo sapiens
agtgctaaaaaatgc

SEQ ID NO: 369464 - DNA, 15 bp, Homo sapiens
aagtgctaaaaaatg

SEQ ID NO: 369465 - DNA, 15 bp, Homo sapiens
caagtgctaaaaaat

SEQ ID NO: 369466 - DNA, 15 bp, Homo sapiens
gcaagtgctaaaaaa

SEQ ID NO: 369467 - DNA, 15 bp, Homo sapiens
ggcaagtgctaaaaa

SEQ ID NO: 369468 - DNA, 15 bp, Homo sapiens
aggcaagtgctaaaa

SEQ ID NO: 369469 - DNA, 15 bp, Homo sapiens
gaggcaagtgctaaa

SEQ ID NO: 369470 - DNA, 15 bp, Homo sapiens
tgaggcaagtgctaa

SEQ ID NO: 369471 - DNA, 15 bp, Homo sapiens
atgaggcaagtgcta

SEQ ID NO: 369472 - DNA, 15 bp, Homo sapiens
tatgaggcaagtgct

SEQ ID NO: 369473 - DNA, 15 bp, Homo sapiens
gtatgaggcaagtgc

SEQ ID NO: 369474 - DNA, 15 bp, Homo sapiens
ggtatgaggcaagtg

SEQ ID NO: 369475 - DNA, 15 bp, Homo sapiens
tggtatgaggcaagt

SEQ ID NO: 369476 - DNA, 15 bp, Homo sapiens
ctggtatgaggcaag

SEQ ID NO: 369477 - DNA, 15 bp, Homo sapiens
tctggtatgaggcaa

SEQ ID NO: 369478 - DNA, 15 bp, Homo sapiens
atctggtatgaggca

SEQ ID NO: 369479 - DNA, 15 bp, Homo sapiens
tatctggtatgaggc

SEQ ID NO: 369480 - DNA, 15 bp, Homo sapiens
atatctggtatgagg

SEQ ID NO: 369481 - DNA, 15 bp, Homo sapiens
aatatctggtatgag

SEQ ID NO: 369482 - DNA, 15 bp, Homo sapiens
caatatctggtatga

SEQ ID NO: 369483 - DNA, 15 bp, Homo sapiens
acaatatctggtatg

SEQ ID NO: 369484 - DNA, 15 bp, Homo sapiens
tacaatatctggtat

SEQ ID NO: 369485 - DNA, 15 bp, Homo sapiens
gtacaatatctggta

SEQ ID NO: 369486 - DNA, 15 bp, Homo sapiens
agtacaatatctggt

SEQ ID NO: 369487 - DNA, 15 bp, Homo sapiens
tagtacaatatctgg

SEQ ID NO: 369488 - DNA, 15 bp, Homo sapiens
ttagtacaatatctg

SEQ ID NO: 369489 - DNA, 15 bp, Homo sapiens
tttagtacaatatct

SEQ ID NO: 369490 - DNA, 15 bp, Homo sapiens
atttagtacaatatc

SEQ ID NO: 369491 - DNA, 15 bp, Homo sapiens
catttagtacaatat

SEQ ID NO: 369492 - DNA, 15 bp, Homo sapiens
acatttagtacaata

SEQ ID NO: 369493 - DNA, 15 bp, Homo sapiens
aacatttagtacaat

SEQ ID NO: 369494 - DNA, 15 bp, Homo sapiens
aaacatttagtacaa

SEQ ID NO: 369495 - DNA, 15 bp, Homo sapiens
aaaacatttagtaca

SEQ ID NO: 369496 - DNA, 15 bp, Homo sapiens
taaaacatttagtac

SEQ ID NO: 369497 - DNA, 15 bp, Homo sapiens
ttaaaacatttagta

SEQ ID NO: 369498 - DNA, 15 bp, Homo sapiens
tttaaaacatttagt

SEQ ID NO: 369499 - DNA, 15 bp, Homo sapiens
atttaaaacatttag

SEQ ID NO: 369500 - DNA, 15 bp, Homo sapiens
tatttaaaacattta

SEQ ID NO: 369501 - DNA, 15 bp, Homo sapiens
gtatttaaaacattt

SEQ ID NO: 369502 - DNA, 15 bp, Homo sapiens
tgtatttaaaacatt

SEQ ID NO: 369503 - DNA, 15 bp, Homo sapiens
atgtatttaaaacat

SEQ ID NO: 369504 - DNA, 15 bp, Homo sapiens
aatgtatttaaaaca

SEQ ID NO: 369505 - DNA, 15 bp, Homo sapiens
taatgtatttaaaac

SEQ ID NO: 369506 - DNA, 15 bp, Homo sapiens
ataatgtatttaaaa

SEQ ID NO: 369507 - DNA, 15 bp, Homo sapiens
aataatgtatttaaa

SEQ ID NO: 369508 - DNA, 15 bp, Homo sapiens
aaataatgtatttaa

SEQ ID NO: 369509 - DNA, 15 bp, Homo sapiens
aaaataatgtattta

SEQ ID NO: 369510 - DNA, 15 bp, Homo sapiens
taaaataatgtattt

SEQ ID NO: 369511 - DNA, 15 bp, Homo sapiens
ataaaataatgtatt

SEQ ID NO: 369512 - DNA, 15 bp, Homo sapiens
aataaaataatgtat

SEQ ID NO: 369513 - DNA, 15 bp, Homo sapiens
aaataaaataatgta

SEQ ID NO: 369514 - DNA, 15 bp, Homo sapiens
aaaataaaataatgt

SEQ ID NO: 369515 - DNA, 15 bp, Homo sapiens
taaaataaaataatg

SEQ ID NO: 369516 - DNA, 15 bp, Homo sapiens
ataaaataaaataat

SEQ ID NO: 369517 - DNA, 15 bp, Homo sapiens
gataaaataaaataa

SEQ ID NO: 369518 - DNA, 15 bp, Homo sapiens
ggataaaataaaata

SEQ ID NO: 369519 - DNA, 15 bp, Homo sapiens
aggataaaataaaat

SEQ ID NO: 369520 - DNA, 15 bp, Homo sapiens
aaggataaaataaaa

SEQ ID NO: 369521 - DNA, 15 bp, Homo sapiens
taaggataaaataaa

SEQ ID NO: 369522 - DNA, 15 bp, Homo sapiens
gtaaggataaaataa

SEQ ID NO: 369523 - DNA, 15 bp, Homo sapiens
tgtaaggataaaata

SEQ ID NO: 369524 - DNA, 15 bp, Homo sapiens
ttgtaaggataaaat

SEQ ID NO: 369525 - DNA, 15 bp, Homo sapiens
attgtaaggataaaa

SEQ ID NO: 369526 - DNA, 15 bp, Homo sapiens
aattgtaaggataaa

SEQ ID NO: 369527 - DNA, 15 bp, Homo sapiens
caattgtaaggataa

SEQ ID NO: 369528 - DNA, 15 bp, Homo sapiens
acaattgtaaggata

SEQ ID NO: 369529 - DNA, 15 bp, Homo sapiens
gacaattgtaaggat

SEQ ID NO: 369530 - DNA, 15 bp, Homo sapiens
ggacaattgtaagga

SEQ ID NO: 369531 - DNA, 15 bp, Homo sapiens
aggacaattgtaagg

SEQ ID NO: 369532 - DNA, 15 bp, Homo sapiens
taggacaattgtaag

SEQ ID NO: 369533 - DNA, 15 bp, Homo sapiens
ataggacaattgtaa

SEQ ID NO: 369534 - DNA, 15 bp, Homo sapiens
cataggacaattgta

SEQ ID NO: 369535 - DNA, 15 bp, Homo sapiens
acataggacaattgt

SEQ ID NO: 369536 - DNA, 15 bp, Homo sapiens
cacataggacaattg

SEQ ID NO: 369537 - DNA, 15 bp, Homo sapiens
ccacataggacaatt

SEQ ID NO: 369538 - DNA, 15 bp, Homo sapiens
cccacataggacaat

SEQ ID NO: 369539 - DNA, 15 bp, Homo sapiens
tcccacataggacaa

SEQ ID NO: 369540 - DNA, 15 bp, Homo sapiens
ctcccacataggaca

SEQ ID NO: 369541 - DNA, 15 bp, Homo sapiens
cctcccacataggac

SEQ ID NO: 369542 - DNA, 15 bp, Homo sapiens
acctcccacatagga

SEQ ID NO: 369543 - DNA, 15 bp, Homo sapiens
tacctcccacatagg

SEQ ID NO: 369544 - DNA, 15 bp, Homo sapiens
atacctcccacatag

SEQ ID NO: 369545 - DNA, 15 bp, Homo sapiens
aatacctcccacata

SEQ ID NO: 369546 - DNA, 15 bp, Homo sapiens
aaatacctcccacat

SEQ ID NO: 369547 - DNA, 15 bp, Homo sapiens
caaatacctcccaca

SEQ ID NO: 369548 - DNA, 15 bp, Homo sapiens
acaaatacctcccac

SEQ ID NO: 369549 - DNA, 15 bp, Homo sapiens
cacaaatacctccca

SEQ ID NO: 369550 - DNA, 15 bp, Homo sapiens
ccacaaatacctccc

SEQ ID NO: 369551 - DNA, 15 bp, Homo sapiens
accacaaatacctcc

SEQ ID NO: 369552 - DNA, 15 bp, Homo sapiens
aaccacaaatacctc

SEQ ID NO: 369553 - DNA, 15 bp, Homo sapiens
aaaccacaaatacct

SEQ ID NO: 369554 - DNA, 15 bp, Homo sapiens
taaaccacaaatacc

SEQ ID NO: 369555 - DNA, 15 bp, Homo sapiens
ataaaccacaaatac

SEQ ID NO: 369556 - DNA, 15 bp, Homo sapiens
gataaaccacaaata

SEQ ID NO: 369557 - DNA, 15 bp, Homo sapiens
cgataaaccacaaat

SEQ ID NO: 369558 - DNA, 15 bp, Homo sapiens
tcgataaaccacaaa

SEQ ID NO: 369559 - DNA, 15 bp, Homo sapiens
atcgataaaccacaa

SEQ ID NO: 369560 - DNA, 15 bp, Homo sapiens
catcgataaaccaca

SEQ ID NO: 369561 - DNA, 15 bp, Homo sapiens
tcatcgataaaccac

SEQ ID NO: 369562 - DNA, 15 bp, Homo sapiens
ttcatcgataaacca

SEQ ID NO: 369563 - DNA, 15 bp, Homo sapiens
cttcatcgataaacc

SEQ ID NO: 369564 - DNA, 15 bp, Homo sapiens
tcttcatcgataaac

SEQ ID NO: 369565 - DNA, 15 bp, Homo sapiens
ttcttcatcgataaa

SEQ ID NO: 369566 - DNA, 15 bp, Homo sapiens
cttcttcatcgataa

SEQ ID NO: 369567 - DNA, 15 bp, Homo sapiens
gcttcttcatcgata

SEQ ID NO: 369568 - DNA, 15 bp, Homo sapiens
tgcttcttcatcgat

SEQ ID NO: 369569 - DNA, 15 bp, Homo sapiens
ctgcttcttcatcga

SEQ ID NO: 369570 - DNA, 15 bp, Homo sapiens
tctgcttcttcatcg

SEQ ID NO: 369571 - DNA, 15 bp, Homo sapiens
gtctgcttcttcatc

SEQ ID NO: 369572 - DNA, 15 bp, Homo sapiens
agtctgcttcttcat

SEQ ID NO: 369573 - DNA, 15 bp, Homo sapiens
tagtctgcttcttca

SEQ ID NO: 369574 - DNA, 15 bp, Homo sapiens
ctagtctgcttcttc

SEQ ID NO: 369575 - DNA, 15 bp, Homo sapiens
cctagtctgcttctt

SEQ ID NO: 369576 - DNA, 15 bp, Homo sapiens
tcctagtctgcttct

SEQ ID NO: 369577 - DNA, 15 bp, Homo sapiens
ctcctagtctgcttc

SEQ ID NO: 369578 - DNA, 15 bp, Homo sapiens
tctcctagtctgctt

SEQ ID NO: 369579 - DNA, 15 bp, Homo sapiens
ctctcctagtctgct

SEQ ID NO: 369580 - DNA, 15 bp, Homo sapiens
tctctcctagtctgc

SEQ ID NO: 369581 - DNA, 15 bp, Homo sapiens
ctctctcctagtctg

SEQ ID NO: 369582 - DNA, 15 bp, Homo sapiens
actctctcctagtct

SEQ ID NO: 369583 - DNA, 15 bp, Homo sapiens
gactctctcctagtc

SEQ ID NO: 369584 - DNA, 15 bp, Homo sapiens
agactctctcctagt

SEQ ID NO: 369585 - DNA, 15 bp, Homo sapiens
cagactctctcctag

SEQ ID NO: 369586 - DNA, 15 bp, Homo sapiens
gcagactctctccta

SEQ ID NO: 369587 - DNA, 15 bp, Homo sapiens
tgcagactctctcct

SEQ ID NO: 369588 - DNA, 15 bp, Homo sapiens
gtgcagactctctcc

SEQ ID NO: 369589 - DNA, 15 bp, Homo sapiens
tgtgcagactctctc

SEQ ID NO: 369590 - DNA, 15 bp, Homo sapiens
ttgtgcagactctct

SEQ ID NO: 369591 - DNA, 15 bp, Homo sapiens
attgtgcagactctc

SEQ ID NO: 369592 - DNA, 15 bp, Homo sapiens
cattgtgcagactct

SEQ ID NO: 369593 - DNA, 15 bp, Homo sapiens
gcattgtgcagactc

SEQ ID NO: 369594 - DNA, 15 bp, Homo sapiens
agcattgtgcagact

SEQ ID NO: 369595 - DNA, 15 bp, Homo sapiens
aagcattgtgcagac

SEQ ID NO: 369596 - DNA, 15 bp, Homo sapiens
taagcattgtgcaga

SEQ ID NO: 369597 - DNA, 15 bp, Homo sapiens
ataagcattgtgcag

SEQ ID NO: 369598 - DNA, 15 bp, Homo sapiens
tataagcattgtgca

SEQ ID NO: 369599 - DNA, 15 bp, Homo sapiens
ctataagcattgtgc

SEQ ID NO: 369600 - DNA, 15 bp, Homo sapiens
actataagcattgtg

SEQ ID NO: 369601 - DNA, 15 bp, Homo sapiens
cactataagcattgt

SEQ ID NO: 369602 - DNA, 15 bp, Homo sapiens
gcactataagcattg

SEQ ID NO: 369603 - DNA, 15 bp, Homo sapiens
ggcactataagcatt

SEQ ID NO: 369604 - DNA, 15 bp, Homo sapiens
tggcactataagcat

SEQ ID NO: 369605 - DNA, 15 bp, Homo sapiens
atggcactataagca

SEQ ID NO: 369606 - DNA, 15 bp, Homo sapiens
catggcactataagc

SEQ ID NO: 369607 - DNA, 15 bp, Homo sapiens
ccatggcactataag

SEQ ID NO: 369608 - DNA, 15 bp, Homo sapiens
gccatggcactataa

SEQ ID NO: 369609 - DNA, 15 bp, Homo sapiens
agccatggcactata

SEQ ID NO: 369610 - DNA, 15 bp, Homo sapiens
aagccatggcactat

SEQ ID NO: 369611 - DNA, 15 bp, Homo sapiens
taagccatggcacta

SEQ ID NO: 369612 - DNA, 15 bp, Homo sapiens
ataagccatggcact

SEQ ID NO: 369613 - DNA, 15 bp, Homo sapiens
tataagccatggcac

SEQ ID NO: 369614 - DNA, 15 bp, Homo sapiens
ctataagccatggca

SEQ ID NO: 369615 - DNA, 15 bp, Homo sapiens
cctataagccatggc

SEQ ID NO: 369616 - DNA, 15 bp, Homo sapiens
acctataagccatgg

SEQ ID NO: 369617 - DNA, 15 bp, Homo sapiens
cacctataagccatg

SEQ ID NO: 369618 - DNA, 15 bp, Homo sapiens
ccacctataagccat

SEQ ID NO: 369619 - DNA, 15 bp, Homo sapiens
tccacctataagcca

SEQ ID NO: 369620 - DNA, 15 bp, Homo sapiens
ctccacctataagcc

SEQ ID NO: 369621 - DNA, 15 bp, Homo sapiens
cctccacctataagc

SEQ ID NO: 369622 - DNA, 15 bp, Homo sapiens
acctccacctataag

SEQ ID NO: 369623 - DNA, 15 bp, Homo sapiens
cacctccacctataa

SEQ ID NO: 369624 - DNA, 15 bp, Homo sapiens
gcacctccacctata

SEQ ID NO: 369625 - DNA, 15 bp, Homo sapiens
ggcacctccacctat

SEQ ID NO: 369626 - DNA, 15 bp, Homo sapiens
tggcacctccaccta

SEQ ID NO: 369627 - DNA, 15 bp, Homo sapiens
ctggcacctccacct

SEQ ID NO: 369628 - DNA, 15 bp, Homo sapiens
tctggcacctccacc

SEQ ID NO: 369629 - DNA, 15 bp, Homo sapiens
ttctggcacctccac

SEQ ID NO: 369630 - DNA, 15 bp, Homo sapiens
attctggcacctcca

SEQ ID NO: 369631 - DNA, 15 bp, Homo sapiens
aattctggcacctcc

SEQ ID NO: 369632 - DNA, 15 bp, Homo sapiens
aaattctggcacctc

SEQ ID NO: 369633 - DNA, 15 bp, Homo sapiens
caaattctggcacct

SEQ ID NO: 369634 - DNA, 15 bp, Homo sapiens
tcaaattctggcacc

SEQ ID NO: 369635 - DNA, 15 bp, Homo sapiens
ttcaaattctggcac

SEQ ID NO: 369636 - DNA, 15 bp, Homo sapiens
attcaaattctggca

SEQ ID NO: 369637 - DNA, 15 bp, Homo sapiens
gattcaaattctggc

SEQ ID NO: 369638 - DNA, 15 bp, Homo sapiens
ggattcaaattctgg

SEQ ID NO: 369639 - DNA, 15 bp, Homo sapiens
tggattcaaattctg

SEQ ID NO: 369640 - DNA, 15 bp, Homo sapiens
ctggattcaaattct

SEQ ID NO: 369641 - DNA, 15 bp, Homo sapiens
cctggattcaaattc

SEQ ID NO: 369642 - DNA, 15 bp, Homo sapiens
tcctggattcaaatt

SEQ ID NO: 369643 - DNA, 15 bp, Homo sapiens
gtcctggattcaaat

SEQ ID NO: 369644 - DNA, 15 bp, Homo sapiens
tgtcctggattcaaa

SEQ ID NO: 369645 - DNA, 15 bp, Homo sapiens
gtgtcctggattcaa

SEQ ID NO: 369646 - DNA, 15 bp, Homo sapiens
ggtgtcctggattca

SEQ ID NO: 369647 - DNA, 15 bp, Homo sapiens
aggtgtcctggattc

SEQ ID NO: 369648 - DNA, 15 bp, Homo sapiens
caggtgtcctggatt

SEQ ID NO: 369649 - DNA, 15 bp, Homo sapiens
tcaggtgtcctggat

SEQ ID NO: 369650 - DNA, 15 bp, Homo sapiens
gtcaggtgtcctgga

SEQ ID NO: 369651 - DNA, 15 bp, Homo sapiens
agtcaggtgtcctgg

SEQ ID NO: 369652 - DNA, 15 bp, Homo sapiens
aagtcaggtgtcctg

SEQ ID NO: 369653 - DNA, 15 bp, Homo sapiens
aaagtcaggtgtcct

SEQ ID NO: 369654 - DNA, 15 bp, Homo sapiens
taaagtcaggtgtcc

SEQ ID NO: 369655 - DNA, 15 bp, Homo sapiens
gtaaagtcaggtgtc

SEQ ID NO: 369656 - DNA, 15 bp, Homo sapiens
tgtaaagtcaggtgt

SEQ ID NO: 369657 - DNA, 15 bp, Homo sapiens
ctgtaaagtcaggtg

SEQ ID NO: 369658 - DNA, 15 bp, Homo sapiens
gctgtaaagtcaggt

SEQ ID NO: 369659 - DNA, 15 bp, Homo sapiens
ggctgtaaagtcagg

SEQ ID NO: 369660 - DNA, 15 bp, Homo sapiens
gggctgtaaagtcag

SEQ ID NO: 369661 - DNA, 15 bp, Homo sapiens
tgggctgtaaagtca

SEQ ID NO: 369662 - DNA, 15 bp, Homo sapiens
atgggctgtaaagtc

SEQ ID NO: 369663 - DNA, 15 bp, Homo sapiens
catgggctgtaaagt

SEQ ID NO: 369664 - DNA, 15 bp, Homo sapiens
gcatgggctgtaaag

SEQ ID NO: 369665 - DNA, 15 bp, Homo sapiens
agcatgggctgtaaa

SEQ ID NO: 369666 - DNA, 15 bp, Homo sapiens
cagcatgggctgtaa

SEQ ID NO: 369667 - DNA, 15 bp, Homo sapiens
acagcatgggctgta

SEQ ID NO: 369668 - DNA, 15 bp, Homo sapiens
aacagcatgggctgt

SEQ ID NO: 369669 - DNA, 15 bp, Homo sapiens
taacagcatgggctg

SEQ ID NO: 369670 - DNA, 15 bp, Homo sapiens
ttaacagcatgggct

SEQ ID NO: 369671 - DNA, 15 bp, Homo sapiens
gttaacagcatgggc

SEQ ID NO: 369672 - DNA, 15 bp, Homo sapiens
tgttaacagcatggg

SEQ ID NO: 369673 - DNA, 15 bp, Homo sapiens
ttgttaacagcatgg

SEQ ID NO: 369674 - DNA, 15 bp, Homo sapiens
attgttaacagcatg

SEQ ID NO: 369675 - DNA, 15 bp, Homo sapiens
aattgttaacagcat

SEQ ID NO: 369676 - DNA, 15 bp, Homo sapiens
aaattgttaacagca

SEQ ID NO: 369677 - DNA, 15 bp, Homo sapiens
gaaattgttaacagc

SEQ ID NO: 369678 - DNA, 15 bp, Homo sapiens
tgaaattgttaacag

SEQ ID NO: 369679 - DNA, 15 bp, Homo sapiens
atgaaattgttaaca

SEQ ID NO: 369680 - DNA, 15 bp, Homo sapiens
aatgaaattgttaac

SEQ ID NO: 369681 - DNA, 15 bp, Homo sapiens
gaatgaaattgttaa

SEQ ID NO: 369682 - DNA, 15 bp, Homo sapiens
agaatgaaattgtta

SEQ ID NO: 369683 - DNA, 15 bp, Homo sapiens
tagaatgaaattgtt

SEQ ID NO: 369684 - DNA, 15 bp, Homo sapiens
atagaatgaaattgt

SEQ ID NO: 369685 - DNA, 15 bp, Homo sapiens
aatagaatgaaattg

SEQ ID NO: 369686 - DNA, 15 bp, Homo sapiens
aaatagaatgaaatt

SEQ ID NO: 369687 - DNA, 15 bp, Homo sapiens
gaaatagaatgaaat

SEQ ID NO: 369688 - DNA, 15 bp, Homo sapiens
agaaatagaatgaaa

SEQ ID NO: 369689 - DNA, 15 bp, Homo sapiens
aagaaatagaatgaa

SEQ ID NO: 369690 - DNA, 15 bp, Homo sapiens
aaagaaatagaatga

SEQ ID NO: 369691 - DNA, 15 bp, Homo sapiens
aaaagaaatagaatg

SEQ ID NO: 369692 - DNA, 15 bp, Homo sapiens
gaaaagaaatagaat

SEQ ID NO: 369693 - DNA, 15 bp, Homo sapiens
agaaaagaaatagaa

SEQ ID NO: 369694 - DNA, 15 bp, Homo sapiens
tagaaaagaaataga

SEQ ID NO: 369695 - DNA, 15 bp, Homo sapiens
atagaaaagaaatag

SEQ ID NO: 369696 - DNA, 15 bp, Homo sapiens
catagaaaagaaata

SEQ ID NO: 369697 - DNA, 15 bp, Homo sapiens
acatagaaaagaaat

SEQ ID NO: 369698 - DNA, 15 bp, Homo sapiens
cacatagaaaagaaa

SEQ ID NO: 369699 - DNA, 15 bp, Homo sapiens
gcacatagaaaagaa

SEQ ID NO: 369700 - DNA, 15 bp, Homo sapiens
agcacatagaaaaga

SEQ ID NO: 369701 - DNA, 15 bp, Homo sapiens
cagcacatagaaaag

SEQ ID NO: 369702 - DNA, 15 bp, Homo sapiens
ccagcacatagaaaa

SEQ ID NO: 369703 - DNA, 15 bp, Homo sapiens
cccagcacatagaaa

SEQ ID NO: 369704 - DNA, 15 bp, Homo sapiens
gcccagcacatagaa

SEQ ID NO: 369705 - DNA, 15 bp, Homo sapiens
tgcccagcacataga

SEQ ID NO: 369706 - DNA, 15 bp, Homo sapiens
atgcccagcacatag

SEQ ID NO: 369707 - DNA, 15 bp, Homo sapiens
aatgcccagcacata

SEQ ID NO: 369708 - DNA, 15 bp, Homo sapiens
aaatgcccagcacat

SEQ ID NO: 369709 - DNA, 15 bp, Homo sapiens
aaaatgcccagcaca

SEQ ID NO: 369710 - DNA, 15 bp, Homo sapiens
caaaatgcccagcac

SEQ ID NO: 369711 - DNA, 15 bp, Homo sapiens
acaaaatgcccagca

SEQ ID NO: 369712 - DNA, 15 bp, Homo sapiens
tacaaaatgcccagc

SEQ ID NO: 369713 - DNA, 15 bp, Homo sapiens
ctacaaaatgcccag

SEQ ID NO: 369714 - DNA, 15 bp, Homo sapiens
tctacaaaatgccca

SEQ ID NO: 369715 - DNA, 15 bp, Homo sapiens
atctacaaaatgccc

SEQ ID NO: 369716 - DNA, 15 bp, Homo sapiens
tatctacaaaatgcc

SEQ ID NO: 369717 - DNA, 15 bp, Homo sapiens
ttatctacaaaatgc

SEQ ID NO: 369718 - DNA, 15 bp, Homo sapiens
attatctacaaaatg

SEQ ID NO: 369719 - DNA, 15 bp, Homo sapiens
gattatctacaaaat

SEQ ID NO: 369720 - DNA, 15 bp, Homo sapiens
agattatctacaaaa

SEQ ID NO: 369721 - DNA, 15 bp, Homo sapiens
cagattatctacaaa

SEQ ID NO: 369722 - DNA, 15 bp, Homo sapiens
ccagattatctacaa

SEQ ID NO: 369723 - DNA, 15 bp, Homo sapiens
cccagattatctaca

SEQ ID NO: 369724 - DNA, 15 bp, Homo sapiens
tcccagattatctac

SEQ ID NO: 369725 - DNA, 15 bp, Homo sapiens
ttcccagattatcta

SEQ ID NO: 369726 - DNA, 15 bp, Homo sapiens
cttcccagattatct

SEQ ID NO: 369727 - DNA, 15 bp, Homo sapiens
acttcccagattatc

SEQ ID NO: 369728 - DNA, 15 bp, Homo sapiens
aacttcccagattat

SEQ ID NO: 369729 - DNA, 15 bp, Homo sapiens
gaacttcccagatta

SEQ ID NO: 369730 - DNA, 15 bp, Homo sapiens
tgaacttcccagatt

SEQ ID NO: 369731 - DNA, 15 bp, Homo sapiens
ttgaacttcccagat

SEQ ID NO: 369732 - DNA, 15 bp, Homo sapiens
tttgaacttcccaga

SEQ ID NO: 369733 - DNA, 15 bp, Homo sapiens
ctttgaacttcccag

SEQ ID NO: 369734 - DNA, 15 bp, Homo sapiens
tctttgaacttccca

SEQ ID NO: 369735 - DNA, 15 bp, Homo sapiens
ttctttgaacttccc

SEQ ID NO: 369736 - DNA, 15 bp, Homo sapiens
tttctttgaacttcc

SEQ ID NO: 369737 - DNA, 15 bp, Homo sapiens
atttctttgaacttc

SEQ ID NO: 369738 - DNA, 15 bp, Homo sapiens
catttctttgaactt

SEQ ID NO: 369739 - DNA, 15 bp, Homo sapiens
tcatttctttgaact

SEQ ID NO: 369740 - DNA, 15 bp, Homo sapiens
ttcatttctttgaac

SEQ ID NO: 369741 - DNA, 15 bp, Homo sapiens
tttcatttctttgaa

SEQ ID NO: 369742 - DNA, 15 bp, Homo sapiens
ttttcatttctttga

SEQ ID NO: 369743 - DNA, 15 bp, Homo sapiens
attttcatttctttg

SEQ ID NO: 369744 - DNA, 15 bp, Homo sapiens
gattttcatttcttt

SEQ ID NO: 369745 - DNA, 15 bp, Homo sapiens
ggattttcatttctt

SEQ ID NO: 369746 - DNA, 15 bp, Homo sapiens
tggattttcatttct

SEQ ID NO: 369747 - DNA, 15 bp, Homo sapiens
ctggattttcatttc

SEQ ID NO: 369748 - DNA, 15 bp, Homo sapiens
actggattttcattt

SEQ ID NO: 369749 - DNA, 15 bp, Homo sapiens
gactggattttcatt

SEQ ID NO: 369750 - DNA, 15 bp, Homo sapiens
agactggattttcat

SEQ ID NO: 369751 - DNA, 15 bp, Homo sapiens
gagactggattttca

SEQ ID NO: 369752 - DNA, 15 bp, Homo sapiens
agagactggattttc

SEQ ID NO: 369753 - DNA, 15 bp, Homo sapiens
cagagactggatttt

SEQ ID NO: 369754 - DNA, 15 bp, Homo sapiens
tcagagactggattt

SEQ ID NO: 369755 - DNA, 15 bp, Homo sapiens
gtcagagactggatt

SEQ ID NO: 369756 - DNA, 15 bp, Homo sapiens
ggtcagagactggat

SEQ ID NO: 369757 - DNA, 15 bp, Homo sapiens
aggtcagagactgga

SEQ ID NO: 369758 - DNA, 15 bp, Homo sapiens
taggtcagagactgg

SEQ ID NO: 369759 - DNA, 15 bp, Homo sapiens
ttaggtcagagactg

SEQ ID NO: 369760 - DNA, 15 bp, Homo sapiens
tttaggtcagagact

SEQ ID NO: 369761 - DNA, 15 bp, Homo sapiens
ctttaggtcagagac

SEQ ID NO: 369762 - DNA, 15 bp, Homo sapiens
actttaggtcagaga

SEQ ID NO: 369763 - DNA, 15 bp, Homo sapiens
aactttaggtcagag

SEQ ID NO: 369764 - DNA, 15 bp, Homo sapiens
gaactttaggtcaga

SEQ ID NO: 369765 - DNA, 15 bp, Homo sapiens
agaactttaggtcag

SEQ ID NO: 369766 - DNA, 15 bp, Homo sapiens
aagaactttaggtca

SEQ ID NO: 369767 - DNA, 15 bp, Homo sapiens
taagaactttaggtc

SEQ ID NO: 369768 - DNA, 15 bp, Homo sapiens
ataagaactttaggt

SEQ ID NO: 369769 - DNA, 15 bp, Homo sapiens
tataagaactttagg

SEQ ID NO: 369770 - DNA, 15 bp, Homo sapiens
gtataagaactttag

SEQ ID NO: 369771 - DNA, 15 bp, Homo sapiens
tgtataagaacttta

SEQ ID NO: 369772 - DNA, 15 bp, Homo sapiens
ctgtataagaacttt

SEQ ID NO: 369773 - DNA, 15 bp, Homo sapiens
actgtataagaactt

SEQ ID NO: 369774 - DNA, 15 bp, Homo sapiens
tactgtataagaact

SEQ ID NO: 369775 - DNA, 15 bp, Homo sapiens
atactgtataagaac

SEQ ID NO: 369776 - DNA, 15 bp, Homo sapiens
tatactgtataagaa

SEQ ID NO: 369777 - DNA, 15 bp, Homo sapiens
atatactgtataaga

SEQ ID NO: 369778 - DNA, 15 bp, Homo sapiens
tatatactgtataag

SEQ ID NO: 369779 - DNA, 15 bp, Homo sapiens
ctatatactgtataa

SEQ ID NO: 369780 - DNA, 15 bp, Homo sapiens
tctatatactgtata

SEQ ID NO: 369781 - DNA, 15 bp, Homo sapiens
ttctatatactgtat

SEQ ID NO: 369782 - DNA, 15 bp, Homo sapiens
attctatatactgta

SEQ ID NO: 369783 - DNA, 15 bp, Homo sapiens
cattctatatactgt

SEQ ID NO: 369784 - DNA, 15 bp, Homo sapiens
tcattctatatactg

SEQ ID NO: 369785 - DNA, 15 bp, Homo sapiens
ctcattctatatact

SEQ ID NO: 369786 - DNA, 15 bp, Homo sapiens
tctcattctatatac

SEQ ID NO: 369787 - DNA, 15 bp, Homo sapiens
ttctcattctatata

SEQ ID NO: 369788 - DNA, 15 bp, Homo sapiens
attctcattctatat

SEQ ID NO: 369789 - DNA, 15 bp, Homo sapiens
tattctcattctata

SEQ ID NO: 369790 - DNA, 15 bp, Homo sapiens
atattctcattctat

SEQ ID NO: 369791 - DNA, 15 bp, Homo sapiens
gatattctcattcta

SEQ ID NO: 369792 - DNA, 15 bp, Homo sapiens
agatattctcattct

SEQ ID NO: 369793 - DNA, 15 bp, Homo sapiens
cagatattctcattc

SEQ ID NO: 369794 - DNA, 15 bp, Homo sapiens
acagatattctcatt

SEQ ID NO: 369795 - DNA, 15 bp, Homo sapiens
gacagatattctcat

SEQ ID NO: 369796 - DNA, 15 bp, Homo sapiens
tgacagatattctca

SEQ ID NO: 369797 - DNA, 15 bp, Homo sapiens
atgacagatattctc

SEQ ID NO: 369798 - DNA, 15 bp, Homo sapiens
tatgacagatattct

SEQ ID NO: 369799 - DNA, 15 bp, Homo sapiens
ctatgacagatattc

SEQ ID NO: 369800 - DNA, 15 bp, Homo sapiens
cctatgacagatatt

SEQ ID NO: 369801 - DNA, 15 bp, Homo sapiens
tcctatgacagatat

SEQ ID NO: 369802 - DNA, 15 bp, Homo sapiens
atcctatgacagata

SEQ ID NO: 369803 - DNA, 15 bp, Homo sapiens
tatcctatgacagat

SEQ ID NO: 369804 - DNA, 15 bp, Homo sapiens
ttatcctatgacaga

SEQ ID NO: 369805 - DNA, 15 bp, Homo sapiens
tttatcctatgacag

SEQ ID NO: 369806 - DNA, 15 bp, Homo sapiens
ctttatcctatgaca

SEQ ID NO: 369807 - DNA, 15 bp, Homo sapiens
actttatcctatgac

SEQ ID NO: 369808 - DNA, 15 bp, Homo sapiens
aactttatcctatga

SEQ ID NO: 369809 - DNA, 15 bp, Homo sapiens
caactttatcctatg

SEQ ID NO: 369810 - DNA, 15 bp, Homo sapiens
ccaactttatcctat

SEQ ID NO: 369811 - DNA, 15 bp, Homo sapiens
accaactttatccta

SEQ ID NO: 369812 - DNA, 15 bp, Homo sapiens
gaccaactttatcct

SEQ ID NO: 369813 - DNA, 15 bp, Homo sapiens
tgaccaactttatcc

SEQ ID NO: 369814 - DNA, 15 bp, Homo sapiens
ttgaccaactttatc

SEQ ID NO: 369815 - DNA, 15 bp, Homo sapiens
cttgaccaactttat

SEQ ID NO: 369816 - DNA, 15 bp, Homo sapiens
gcttgaccaacttta

SEQ ID NO: 369817 - DNA, 15 bp, Homo sapiens
tgcttgaccaacttt

SEQ ID NO: 369818 - DNA, 15 bp, Homo sapiens
gtgcttgaccaactt

SEQ ID NO: 369819 - DNA, 15 bp, Homo sapiens
agtgcttgaccaact

SEQ ID NO: 369820 - DNA, 15 bp, Homo sapiens
aagtgcttgaccaac

SEQ ID NO: 369821 - DNA, 15 bp, Homo sapiens
taagtgcttgaccaa

SEQ ID NO: 369822 - DNA, 15 bp, Homo sapiens
ataagtgcttgacca

SEQ ID NO: 369823 - DNA, 15 bp, Homo sapiens
cataagtgcttgacc

SEQ ID NO: 369824 - DNA, 15 bp, Homo sapiens
acataagtgcttgac

SEQ ID NO: 369825 - DNA, 15 bp, Homo sapiens
gacataagtgcttga

SEQ ID NO: 369826 - DNA, 15 bp, Homo sapiens
agacataagtgcttg

SEQ ID NO: 369827 - DNA, 15 bp, Homo sapiens
gagacataagtgctt

SEQ ID NO: 369828 - DNA, 15 bp, Homo sapiens
tgagacataagtgct

SEQ ID NO: 369829 - DNA, 15 bp, Homo sapiens
atgagacataagtgc

SEQ ID NO: 369830 - DNA, 15 bp, Homo sapiens
catgagacataagtg

SEQ ID NO: 369831 - DNA, 15 bp, Homo sapiens
gcatgagacataagt

SEQ ID NO: 369832 - DNA, 15 bp, Homo sapiens
agcatgagacataag

SEQ ID NO: 369833 - DNA, 15 bp, Homo sapiens
cagcatgagacataa

SEQ ID NO: 369834 - DNA, 15 bp, Homo sapiens
tcagcatgagacata

SEQ ID NO: 369835 - DNA, 15 bp, Homo sapiens
ttcagcatgagacat

SEQ ID NO: 369836 - DNA, 15 bp, Homo sapiens
attcagcatgagaca

SEQ ID NO: 369837 - DNA, 15 bp, Homo sapiens
cattcagcatgagac

SEQ ID NO: 369838 - DNA, 15 bp, Homo sapiens
tcattcagcatgaga

SEQ ID NO: 369839 - DNA, 15 bp, Homo sapiens
ttcattcagcatgag

SEQ ID NO: 369840 - DNA, 15 bp, Homo sapiens
attcattcagcatga

SEQ ID NO: 369841 - DNA, 15 bp, Homo sapiens
tattcattcagcatg

SEQ ID NO: 369842 - DNA, 15 bp, Homo sapiens
ttattcattcagcat

SEQ ID NO: 369843 - DNA, 15 bp, Homo sapiens
tttattcattcagca

SEQ ID NO: 369844 - DNA, 15 bp, Homo sapiens
ttttattcattcagc

SEQ ID NO: 369845 - DNA, 15 bp, Homo sapiens
attttattcattcag

SEQ ID NO: 369846 - DNA, 15 bp, Homo sapiens
tattttattcattca

SEQ ID NO: 369847 - DNA, 15 bp, Homo sapiens
ctattttattcattc

SEQ ID NO: 369848 - DNA, 15 bp, Homo sapiens
cctattttattcatt

SEQ ID NO: 369849 - DNA, 15 bp, Homo sapiens
acctattttattcat

SEQ ID NO: 369850 - DNA, 15 bp, Homo sapiens
tacctattttattca

SEQ ID NO: 369851 - DNA, 15 bp, Homo sapiens
ttacctattttattc

SEQ ID NO: 369852 - DNA, 15 bp, Homo sapiens
gttacctattttatt

SEQ ID NO: 369853 - DNA, 15 bp, Homo sapiens
tgttacctattttat

SEQ ID NO: 369854 - DNA, 15 bp, Homo sapiens
ttgttacctatttta

SEQ ID NO: 369855 - DNA, 15 bp, Homo sapiens
tttgttacctatttt

SEQ ID NO: 369856 - DNA, 15 bp, Homo sapiens
ttttgttacctattt

SEQ ID NO: 369857 - DNA, 15 bp, Homo sapiens
tttttgttacctatt

SEQ ID NO: 369858 - DNA, 15 bp, Homo sapiens
gtttttgttacctat

SEQ ID NO: 369859 - DNA, 15 bp, Homo sapiens
ggtttttgttaccta

SEQ ID NO: 369860 - DNA, 15 bp, Homo sapiens
aggtttttgttacct

SEQ ID NO: 369861 - DNA, 15 bp, Homo sapiens
caggtttttgttacc

SEQ ID NO: 369862 - DNA, 15 bp, Homo sapiens
gcaggtttttgttac

SEQ ID NO: 369863 - DNA, 15 bp, Homo sapiens
ggcaggtttttgtta

SEQ ID NO: 369864 - DNA, 15 bp, Homo sapiens
tggcaggtttttgtt

SEQ ID NO: 369865 - DNA, 15 bp, Homo sapiens
gtggcaggtttttgt

SEQ ID NO: 369866 - DNA, 15 bp, Homo sapiens
tgtggcaggtttttg

SEQ ID NO: 369867 - DNA, 15 bp, Homo sapiens
gtgtggcaggttttt

SEQ ID NO: 369868 - DNA, 15 bp, Homo sapiens
ggtgtggcaggtttt

SEQ ID NO: 369869 - DNA, 15 bp, Homo sapiens
tggtgtggcaggttt

SEQ ID NO: 369870 - DNA, 15 bp, Homo sapiens
ctggtgtggcaggtt

SEQ ID NO: 369871 - DNA, 15 bp, Homo sapiens
gctggtgtggcaggt

SEQ ID NO: 369872 - DNA, 15 bp, Homo sapiens
ggctggtgtggcagg

SEQ ID NO: 369873 - DNA, 15 bp, Homo sapiens
tggctggtgtggcag

SEQ ID NO: 369874 - DNA, 15 bp, Homo sapiens
gtggctggtgtggca

SEQ ID NO: 369875 - DNA, 15 bp, Homo sapiens
agtggctggtgtggc

SEQ ID NO: 369876 - DNA, 15 bp, Homo sapiens
cagtggctggtgtgg

SEQ ID NO: 369877 - DNA, 15 bp, Homo sapiens
tcagtggctggtgtg

SEQ ID NO: 369878 - DNA, 15 bp, Homo sapiens
ttcagtggctggtgt

SEQ ID NO: 369879 - DNA, 15 bp, Homo sapiens
cttcagtggctggtg

SEQ ID NO: 369880 - DNA, 15 bp, Homo sapiens
tcttcagtggctggt

SEQ ID NO: 369881 - DNA, 15 bp, Homo sapiens
atcttcagtggctgg

SEQ ID NO: 369882 - DNA, 15 bp, Homo sapiens
aatcttcagtggctg

SEQ ID NO: 369883 - DNA, 15 bp, Homo sapiens
caatcttcagtggct

SEQ ID NO: 369884 - DNA, 15 bp, Homo sapiens
ccaatcttcagtggc

SEQ ID NO: 369885 - DNA, 15 bp, Homo sapiens
tccaatcttcagtgg

SEQ ID NO: 369886 - DNA, 15 bp, Homo sapiens
ctccaatcttcagtg

SEQ ID NO: 369887 - DNA, 15 bp, Homo sapiens
actccaatcttcagt

SEQ ID NO: 369888 - DNA, 15 bp, Homo sapiens
cactccaatcttcag

SEQ ID NO: 369889 - DNA, 15 bp, Homo sapiens
ccactccaatcttca

SEQ ID NO: 369890 - DNA, 15 bp, Homo sapiens
cccactccaatcttc

SEQ ID NO: 369891 - DNA, 15 bp, Homo sapiens
ccccactccaatctt

SEQ ID NO: 369892 - DNA, 15 bp, Homo sapiens
tccccactccaatct

SEQ ID NO: 369893 - DNA, 15 bp, Homo sapiens
ctccccactccaatc

SEQ ID NO: 369894 - DNA, 15 bp, Homo sapiens
tctccccactccaat

SEQ ID NO: 369895 - DNA, 15 bp, Homo sapiens
ttctccccactccaa

SEQ ID NO: 369896 - DNA, 15 bp, Homo sapiens
tttctccccactcca

SEQ ID NO: 369897 - DNA, 15 bp, Homo sapiens
ttttctccccactcc

SEQ ID NO: 369898 - DNA, 15 bp, Homo sapiens
gttttctccccactc

SEQ ID NO: 369899 - DNA, 15 bp, Homo sapiens
agttttctccccact

SEQ ID NO: 369900 - DNA, 15 bp, Homo sapiens
aagttttctccccac

SEQ ID NO: 369901 - DNA, 15 bp, Homo sapiens
taagttttctcccca

SEQ ID NO: 369902 - DNA, 15 bp, Homo sapiens
gtaagttttctcccc

SEQ ID NO: 369903 - DNA, 15 bp, Homo sapiens
tgtaagttttctccc

SEQ ID NO: 369904 - DNA, 15 bp, Homo sapiens
ctgtaagttttctcc

SEQ ID NO: 369905 - DNA, 15 bp, Homo sapiens
actgtaagttttctc

SEQ ID NO: 369906 - DNA, 15 bp, Homo sapiens
cactgtaagttttct

SEQ ID NO: 369907 - DNA, 15 bp, Homo sapiens
acactgtaagttttc

SEQ ID NO: 369908 - DNA, 15 bp, Homo sapiens
tacactgtaagtttt

SEQ ID NO: 369909 - DNA, 15 bp, Homo sapiens
ttacactgtaagttt

SEQ ID NO: 369910 - DNA, 15 bp, Homo sapiens
cttacactgtaagtt

SEQ ID NO: 369911 - DNA, 15 bp, Homo sapiens
ccttacactgtaagt

SEQ ID NO: 369912 - DNA, 15 bp, Homo sapiens
tccttacactgtaag

SEQ ID NO: 369913 - DNA, 15 bp, Homo sapiens
ctccttacactgtaa

SEQ ID NO: 369914 - DNA, 15 bp, Homo sapiens
actccttacactgta

SEQ ID NO: 369915 - DNA, 15 bp, Homo sapiens
aactccttacactgt

SEQ ID NO: 369916 - DNA, 15 bp, Homo sapiens
gaactccttacactg

SEQ ID NO: 369917 - DNA, 15 bp, Homo sapiens
tgaactccttacact

SEQ ID NO: 369918 - DNA, 15 bp, Homo sapiens
ctgaactccttacac

SEQ ID NO: 369919 - DNA, 15 bp, Homo sapiens
cctgaactccttaca

SEQ ID NO: 369920 - DNA, 15 bp, Homo sapiens
acctgaactccttac

SEQ ID NO: 369921 - DNA, 15 bp, Homo sapiens
cacctgaactcctta

SEQ ID NO: 369922 - DNA, 15 bp, Homo sapiens
ccacctgaactcctt

SEQ ID NO: 369923 - DNA, 15 bp, Homo sapiens
accacctgaactcct

SEQ ID NO: 369924 - DNA, 15 bp, Homo sapiens
gaccacctgaactcc

SEQ ID NO: 369925 - DNA, 15 bp, Homo sapiens
agaccacctgaactc

SEQ ID NO: 369926 - DNA, 15 bp, Homo sapiens
aagaccacctgaact

SEQ ID NO: 369927 - DNA, 15 bp, Homo sapiens
aaagaccacctgaac

SEQ ID NO: 369928 - DNA, 15 bp, Homo sapiens
caaagaccacctgaa

SEQ ID NO: 369929 - DNA, 15 bp, Homo sapiens
ccaaagaccacctga

SEQ ID NO: 369930 - DNA, 15 bp, Homo sapiens
tccaaagaccacctg

SEQ ID NO: 369931 - DNA, 15 bp, Homo sapiens
ttccaaagaccacct

SEQ ID NO: 369932 - DNA, 15 bp, Homo sapiens
cttccaaagaccacc

SEQ ID NO: 369933 - DNA, 15 bp, Homo sapiens
acttccaaagaccac

SEQ ID NO: 369934 - DNA, 15 bp, Homo sapiens
aacttccaaagacca

SEQ ID NO: 369935 - DNA, 15 bp, Homo sapiens
taacttccaaagacc

SEQ ID NO: 369936 - DNA, 15 bp, Homo sapiens
ataacttccaaagac

SEQ ID NO: 369937 - DNA, 15 bp, Homo sapiens
aataacttccaaaga

SEQ ID NO: 369938 - DNA, 15 bp, Homo sapiens
aaataacttccaaag

SEQ ID NO: 369939 - DNA, 15 bp, Homo sapiens
taaataacttccaaa

SEQ ID NO: 369940 - DNA, 15 bp, Homo sapiens
ataaataacttccaa

SEQ ID NO: 369941 - DNA, 15 bp, Homo sapiens
aataaataacttcca

SEQ ID NO: 369942 - DNA, 15 bp, Homo sapiens
aaataaataacttcc

SEQ ID NO: 369943 - DNA, 15 bp, Homo sapiens
aaaataaataacttc

SEQ ID NO: 369944 - DNA, 15 bp, Homo sapiens
taaaataaataactt

SEQ ID NO: 369945 - DNA, 15 bp, Homo sapiens
ataaaataaataact

SEQ ID NO: 369946 - DNA, 15 bp, Homo sapiens
aataaaataaataac

SEQ ID NO: 369947 - DNA, 15 bp, Homo sapiens
aaataaaataaataa

SEQ ID NO: 369948 - DNA, 15 bp, Homo sapiens
aaaaataaaataaat

SEQ ID NO: 369949 - DNA, 15 bp, Homo sapiens
taaaaataaaataaa

SEQ ID NO: 369950 - DNA, 15 bp, Homo sapiens
ataaaaataaaataa

SEQ ID NO: 369951 - DNA, 15 bp, Homo sapiens
aataaaaataaaata

SEQ ID NO: 369952 - DNA, 15 bp, Homo sapiens
caataaaaataaaat

SEQ ID NO: 369953 - DNA, 15 bp, Homo sapiens
acaataaaaataaaa

SEQ ID NO: 369954 - DNA, 15 bp, Homo sapiens
aacaataaaaataaa

SEQ ID NO: 369955 - DNA, 15 bp, Homo sapiens
aaacaataaaaataa

SEQ ID NO: 369956 - DNA, 15 bp, Homo sapiens
gaaacaataaaaata

SEQ ID NO: 369957 - DNA, 15 bp, Homo sapiens
ggaaacaataaaaat

SEQ ID NO: 369958 - DNA, 15 bp, Homo sapiens
tggaaacaataaaaa

SEQ ID NO: 369959 - DNA, 15 bp, Homo sapiens
ctggaaacaataaaa

SEQ ID NO: 369960 - DNA, 15 bp, Homo sapiens
tctggaaacaataaa

SEQ ID NO: 369961 - DNA, 15 bp, Homo sapiens
ttctggaaacaataa

SEQ ID NO: 369962 - DNA, 15 bp, Homo sapiens
cttctggaaacaata

SEQ ID NO: 369963 - DNA, 15 bp, Homo sapiens
acttctggaaacaat

SEQ ID NO: 369964 - DNA, 15 bp, Homo sapiens
aacttctggaaacaa

SEQ ID NO: 369965 - DNA, 15 bp, Homo sapiens
taacttctggaaaca

SEQ ID NO: 369966 - DNA, 15 bp, Homo sapiens
ataacttctggaaac

SEQ ID NO: 369967 - DNA, 15 bp, Homo sapiens
aataacttctggaaa

SEQ ID NO: 369968 - DNA, 15 bp, Homo sapiens
caataacttctggaa

SEQ ID NO: 369969 - DNA, 15 bp, Homo sapiens
ccaataacttctgga

SEQ ID NO: 369970 - DNA, 15 bp, Homo sapiens
cccaataacttctgg

SEQ ID NO: 369971 - DNA, 15 bp, Homo sapiens
ccccaataacttctg

SEQ ID NO: 369972 - DNA, 15 bp, Homo sapiens
accccaataacttct

SEQ ID NO: 369973 - DNA, 15 bp, Homo sapiens
taccccaataacttc

SEQ ID NO: 369974 - DNA, 15 bp, Homo sapiens
ataccccaataactt

SEQ ID NO: 369975 - DNA, 15 bp, Homo sapiens
aataccccaataact

SEQ ID NO: 369976 - DNA, 15 bp, Homo sapiens
caataccccaataac

SEQ ID NO: 369977 - DNA, 15 bp, Homo sapiens
ccaataccccaataa

SEQ ID NO: 369978 - DNA, 15 bp, Homo sapiens
cccaataccccaata

SEQ ID NO: 369979 - DNA, 15 bp, Homo sapiens
ccccaataccccaat

SEQ ID NO: 369980 - DNA, 15 bp, Homo sapiens
accccaataccccaa

SEQ ID NO: 369981 - DNA, 15 bp, Homo sapiens
taccccaatacccca

SEQ ID NO: 369982 - DNA, 15 bp, Homo sapiens
gtaccccaatacccc

SEQ ID NO: 369983 - DNA, 15 bp, Homo sapiens
tgtaccccaataccc

SEQ ID NO: 369984 - DNA, 15 bp, Homo sapiens
ctgtaccccaatacc

SEQ ID NO: 369985 - DNA, 15 bp, Homo sapiens
cctgtaccccaatac

SEQ ID NO: 369986 - DNA, 15 bp, Homo sapiens
acctgtaccccaata

SEQ ID NO: 369987 - DNA, 15 bp, Homo sapiens
cacctgtaccccaat

SEQ ID NO: 369988 - DNA, 15 bp, Homo sapiens
ccacctgtaccccaa

SEQ ID NO: 369989 - DNA, 15 bp, Homo sapiens
accacctgtacccca

SEQ ID NO: 369990 - DNA, 15 bp, Homo sapiens
caccacctgtacccc

SEQ ID NO: 369991 - DNA, 15 bp, Homo sapiens
acaccacctgtaccc

SEQ ID NO: 369992 - DNA, 15 bp, Homo sapiens
aacaccacctgtacc

SEQ ID NO: 369993 - DNA, 15 bp, Homo sapiens
aaacaccacctgtac

SEQ ID NO: 369994 - DNA, 15 bp, Homo sapiens
caaacaccacctgta

SEQ ID NO: 369995 - DNA, 15 bp, Homo sapiens
ccaaacaccacctgt

SEQ ID NO: 369996 - DNA, 15 bp, Homo sapiens
accaaacaccacctg

SEQ ID NO: 369997 - DNA, 15 bp, Homo sapiens
aaccaaacaccacct

SEQ ID NO: 369998 - DNA, 15 bp, Homo sapiens
caaccaaacaccacc

SEQ ID NO: 369999 - DNA, 15 bp, Homo sapiens
gcaaccaaacaccac

SEQ ID NO: 370000 - DNA, 15 bp, Homo sapiens
tgcaaccaaacacca

SEQ ID NO: 370001 - DNA, 15 bp, Homo sapiens
atgcaaccaaacacc

SEQ ID NO: 370002 - DNA, 15 bp, Homo sapiens
catgcaaccaaacac

SEQ ID NO: 370003 - DNA, 15 bp, Homo sapiens
tcatgcaaccaaaca

SEQ ID NO: 370004 - DNA, 15 bp, Homo sapiens
ctcatgcaaccaaac

SEQ ID NO: 370005 - DNA, 15 bp, Homo sapiens
actcatgcaaccaaa

SEQ ID NO: 370006 - DNA, 15 bp, Homo sapiens
tactcatgcaaccaa

SEQ ID NO: 370007 - DNA, 15 bp, Homo sapiens
ttactcatgcaacca

SEQ ID NO: 370008 - DNA, 15 bp, Homo sapiens
cttactcatgcaacc

SEQ ID NO: 370009 - DNA, 15 bp, Homo sapiens
acttactcatgcaac

SEQ ID NO: 370010 - DNA, 15 bp, Homo sapiens
aacttactcatgcaa

SEQ ID NO: 370011 - DNA, 15 bp, Homo sapiens
gaacttactcatgca

SEQ ID NO: 370012 - DNA, 15 bp, Homo sapiens
agaacttactcatgc

SEQ ID NO: 370013 - DNA, 15 bp, Homo sapiens
aagaacttactcatg

SEQ ID NO: 370014 - DNA, 15 bp, Homo sapiens
aaagaacttactcat

SEQ ID NO: 370015 - DNA, 15 bp, Homo sapiens
taaagaacttactca

SEQ ID NO: 370016 - DNA, 15 bp, Homo sapiens
ctaaagaacttactc

SEQ ID NO: 370017 - DNA, 15 bp, Homo sapiens
actaaagaacttact

SEQ ID NO: 370018 - DNA, 15 bp, Homo sapiens
cactaaagaacttac

SEQ ID NO: 370019 - DNA, 15 bp, Homo sapiens
ccactaaagaactta

SEQ ID NO: 370020 - DNA, 15 bp, Homo sapiens
accactaaagaactt

SEQ ID NO: 370021 - DNA, 15 bp, Homo sapiens
caccactaaagaact

SEQ ID NO: 370022 - DNA, 15 bp, Homo sapiens
tcaccactaaagaac

SEQ ID NO: 370023 - DNA, 15 bp, Homo sapiens
atcaccactaaagaa

SEQ ID NO: 370024 - DNA, 15 bp, Homo sapiens
gatcaccactaaaga

SEQ ID NO: 370025 - DNA, 15 bp, Homo sapiens
agatcaccactaaag

SEQ ID NO: 370026 - DNA, 15 bp, Homo sapiens
cagatcaccactaaa

SEQ ID NO: 370027 - DNA, 15 bp, Homo sapiens
acagatcaccactaa

SEQ ID NO: 370028 - DNA, 15 bp, Homo sapiens
cacagatcaccacta

SEQ ID NO: 370029 - DNA, 15 bp, Homo sapiens
tcacagatcaccact

SEQ ID NO: 370030 - DNA, 15 bp, Homo sapiens
ctcacagatcaccac

SEQ ID NO: 370031 - DNA, 15 bp, Homo sapiens
tctcacagatcacca

SEQ ID NO: 370032 - DNA, 15 bp, Homo sapiens
atctcacagatcacc

SEQ ID NO: 370033 - DNA, 15 bp, Homo sapiens
aatctcacagatcac

SEQ ID NO: 370034 - DNA, 15 bp, Homo sapiens
aaatctcacagatca

SEQ ID NO: 370035 - DNA, 15 bp, Homo sapiens
aaaatctcacagatc

SEQ ID NO: 370036 - DNA, 15 bp, Homo sapiens
caaaatctcacagat

SEQ ID NO: 370037 - DNA, 15 bp, Homo sapiens
ccaaaatctcacaga

SEQ ID NO: 370038 - DNA, 15 bp, Homo sapiens
accaaaatctcacag

SEQ ID NO: 370039 - DNA, 15 bp, Homo sapiens
caccaaaatctcaca

SEQ ID NO: 370040 - DNA, 15 bp, Homo sapiens
gcaccaaaatctcac

SEQ ID NO: 370041 - DNA, 15 bp, Homo sapiens
tgcaccaaaatctca

SEQ ID NO: 370042 - DNA, 15 bp, Homo sapiens
atgcaccaaaatctc

SEQ ID NO: 370043 - DNA, 15 bp, Homo sapiens
gatgcaccaaaatct

SEQ ID NO: 370044 - DNA, 15 bp, Homo sapiens
ggatgcaccaaaatc

SEQ ID NO: 370045 - DNA, 15 bp, Homo sapiens
aggatgcaccaaaat

SEQ ID NO: 370046 - DNA, 15 bp, Homo sapiens
aaggatgcaccaaaa

SEQ ID NO: 370047 - DNA, 15 bp, Homo sapiens
gaaggatgcaccaaa

SEQ ID NO: 370048 - DNA, 15 bp, Homo sapiens
tgaaggatgcaccaa

SEQ ID NO: 370049 - DNA, 15 bp, Homo sapiens
gtgaaggatgcacca

SEQ ID NO: 370050 - DNA, 15 bp, Homo sapiens
ggtgaaggatgcacc

SEQ ID NO: 370051 - DNA, 15 bp, Homo sapiens
gggtgaaggatgcac

SEQ ID NO: 370052 - DNA, 15 bp, Homo sapiens
tgggtgaaggatgca

SEQ ID NO: 370053 - DNA, 15 bp, Homo sapiens
ttgggtgaaggatgc

SEQ ID NO: 370054 - DNA, 15 bp, Homo sapiens
cttgggtgaaggatg

SEQ ID NO: 370055 - DNA, 15 bp, Homo sapiens
gcttgggtgaaggat

SEQ ID NO: 370056 - DNA, 15 bp, Homo sapiens
tgcttgggtgaagga

SEQ ID NO: 370057 - DNA, 15 bp, Homo sapiens
ctgcttgggtgaagg

SEQ ID NO: 370058 - DNA, 15 bp, Homo sapiens
actgcttgggtgaag

SEQ ID NO: 370059 - DNA, 15 bp, Homo sapiens
tactgcttgggtgaa

SEQ ID NO: 370060 - DNA, 15 bp, Homo sapiens
atactgcttgggtga

SEQ ID NO: 370061 - DNA, 15 bp, Homo sapiens
tatactgcttgggtg

SEQ ID NO: 370062 - DNA, 15 bp, Homo sapiens
gtatactgcttgggt

SEQ ID NO: 370063 - DNA, 15 bp, Homo sapiens
tgtatactgcttggg

SEQ ID NO: 370064 - DNA, 15 bp, Homo sapiens
gtgtatactgcttgg

SEQ ID NO: 370065 - DNA, 15 bp, Homo sapiens
agtgtatactgcttg

SEQ ID NO: 370066 - DNA, 15 bp, Homo sapiens
cagtgtatactgctt

SEQ ID NO: 370067 - DNA, 15 bp, Homo sapiens
gcagtgtatactgct

SEQ ID NO: 370068 - DNA, 15 bp, Homo sapiens
ggcagtgtatactgc

SEQ ID NO: 370069 - DNA, 15 bp, Homo sapiens
gggcagtgtatactg

SEQ ID NO: 370070 - DNA, 15 bp, Homo sapiens
ggggcagtgtatact

SEQ ID NO: 370071 - DNA, 15 bp, Homo sapiens
tggggcagtgtatac

SEQ ID NO: 370072 - DNA, 15 bp, Homo sapiens
atggggcagtgtata

SEQ ID NO: 370073 - DNA, 15 bp, Homo sapiens
tatggggcagtgtat

SEQ ID NO: 370074 - DNA, 15 bp, Homo sapiens
atatggggcagtgta

SEQ ID NO: 370075 - DNA, 15 bp, Homo sapiens
aatatggggcagtgt

SEQ ID NO: 370076 - DNA, 15 bp, Homo sapiens
aaatatggggcagtg

SEQ ID NO: 370077 - DNA, 15 bp, Homo sapiens
caaatatggggcagt

SEQ ID NO: 370078 - DNA, 15 bp, Homo sapiens
acaaatatggggcag

SEQ ID NO: 370079 - DNA, 15 bp, Homo sapiens
tacaaatatggggca

SEQ ID NO: 370080 - DNA, 15 bp, Homo sapiens
ctacaaatatggggc

SEQ ID NO: 370081 - DNA, 15 bp, Homo sapiens
actacaaatatgggg

SEQ ID NO: 370082 - DNA, 15 bp, Homo sapiens
gactacaaatatggg

SEQ ID NO: 370083 - DNA, 15 bp, Homo sapiens
agactacaaatatgg

SEQ ID NO: 370084 - DNA, 15 bp, Homo sapiens
aagactacaaatatg

SEQ ID NO: 370085 - DNA, 15 bp, Homo sapiens
aaagactacaaatat

SEQ ID NO: 370086 - DNA, 15 bp, Homo sapiens
aaaagactacaaata

SEQ ID NO: 370087 - DNA, 15 bp, Homo sapiens
taaaagactacaaat

SEQ ID NO: 370088 - DNA, 15 bp, Homo sapiens
ataaaagactacaaa

SEQ ID NO: 370089 - DNA, 15 bp, Homo sapiens
gataaaagactacaa

SEQ ID NO: 370090 - DNA, 15 bp, Homo sapiens
ggataaaagactaca

SEQ ID NO: 370091 - DNA, 15 bp, Homo sapiens
gggataaaagactac

SEQ ID NO: 370092 - DNA, 15 bp, Homo sapiens
agggataaaagacta

SEQ ID NO: 370093 - DNA, 15 bp, Homo sapiens
gagggataaaagact

SEQ ID NO: 370094 - DNA, 15 bp, Homo sapiens
cgagggataaaagac

SEQ ID NO: 370095 - DNA, 15 bp, Homo sapiens
acgagggataaaaga

SEQ ID NO: 370096 - DNA, 15 bp, Homo sapiens
gacgagggataaaag

SEQ ID NO: 370097 - DNA, 15 bp, Homo sapiens
agacgagggataaaa

SEQ ID NO: 370098 - DNA, 15 bp, Homo sapiens
gagacgagggataaa

SEQ ID NO: 370099 - DNA, 15 bp, Homo sapiens
ggagacgagggataa

SEQ ID NO: 370100 - DNA, 15 bp, Homo sapiens
gggagacgagggata

SEQ ID NO: 370101 - DNA, 15 bp, Homo sapiens
agggagacgagggat

SEQ ID NO: 370102 - DNA, 15 bp, Homo sapiens
gagggagacgaggga

SEQ ID NO: 370103 - DNA, 15 bp, Homo sapiens
ggagggagacgaggg

SEQ ID NO: 370104 - DNA, 15 bp, Homo sapiens
gggagggagacgagg

SEQ ID NO: 370105 - DNA, 15 bp, Homo sapiens
tgggagggagacgag

SEQ ID NO: 370106 - DNA, 15 bp, Homo sapiens
gtgggagggagacga

SEQ ID NO: 370107 - DNA, 15 bp, Homo sapiens
agtgggagggagacg

SEQ ID NO: 370108 - DNA, 15 bp, Homo sapiens
gagtgggagggagac

SEQ ID NO: 370109 - DNA, 15 bp, Homo sapiens
agagtgggagggaga

SEQ ID NO: 370110 - DNA, 15 bp, Homo sapiens
aagagtgggagggag

SEQ ID NO: 370111 - DNA, 15 bp, Homo sapiens
taagagtgggaggga

SEQ ID NO: 370112 - DNA, 15 bp, Homo sapiens
ttaagagtgggaggg

SEQ ID NO: 370113 - DNA, 15 bp, Homo sapiens
gttaagagtgggagg

SEQ ID NO: 370114 - DNA, 15 bp, Homo sapiens
ggttaagagtgggag

SEQ ID NO: 370115 - DNA, 15 bp, Homo sapiens
gggttaagagtggga

SEQ ID NO: 370116 - DNA, 15 bp, Homo sapiens
ggggttaagagtggg

SEQ ID NO: 370117 - DNA, 15 bp, Homo sapiens
aggggttaagagtgg

SEQ ID NO: 370118 - DNA, 15 bp, Homo sapiens
taggggttaagagtg

SEQ ID NO: 370119 - DNA, 15 bp, Homo sapiens
ttaggggttaagagt

SEQ ID NO: 370120 - DNA, 15 bp, Homo sapiens
cttaggggttaagag

SEQ ID NO: 370121 - DNA, 15 bp, Homo sapiens
acttaggggttaaga

SEQ ID NO: 370122 - DNA, 15 bp, Homo sapiens
gacttaggggttaag

SEQ ID NO: 370123 - DNA, 15 bp, Homo sapiens
ggacttaggggttaa

SEQ ID NO: 370124 - DNA, 15 bp, Homo sapiens
gggacttaggggtta

SEQ ID NO: 370125 - DNA, 15 bp, Homo sapiens
agggacttaggggtt

SEQ ID NO: 370126 - DNA, 15 bp, Homo sapiens
cagggacttaggggt

SEQ ID NO: 370127 - DNA, 15 bp, Homo sapiens
tcagggacttagggg

SEQ ID NO: 370128 - DNA, 15 bp, Homo sapiens
ttcagggacttaggg

SEQ ID NO: 370129 - DNA, 15 bp, Homo sapiens
cttcagggacttagg

SEQ ID NO: 370130 - DNA, 15 bp, Homo sapiens
acttcagggacttag

SEQ ID NO: 370131 - DNA, 15 bp, Homo sapiens
gacttcagggactta

SEQ ID NO: 370132 - DNA, 15 bp, Homo sapiens
agacttcagggactt

SEQ ID NO: 370133 - DNA, 15 bp, Homo sapiens
cagacttcagggact

SEQ ID NO: 370134 - DNA, 15 bp, Homo sapiens
acagacttcagggac

SEQ ID NO: 370135 - DNA, 15 bp, Homo sapiens
aacagacttcaggga

SEQ ID NO: 370136 - DNA, 15 bp, Homo sapiens
caacagacttcaggg

SEQ ID NO: 370137 - DNA, 15 bp, Homo sapiens
acaacagacttcagg

SEQ ID NO: 370138 - DNA, 15 bp, Homo sapiens
tacaacagacttcag

SEQ ID NO: 370139 - DNA, 15 bp, Homo sapiens
atacaacagacttca

SEQ ID NO: 370140 - DNA, 15 bp, Homo sapiens
gatacaacagacttc

SEQ ID NO: 370141 - DNA, 15 bp, Homo sapiens
tgatacaacagactt

SEQ ID NO: 370142 - DNA, 15 bp, Homo sapiens
atgatacaacagact

SEQ ID NO: 370143 - DNA, 15 bp, Homo sapiens
aatgatacaacagac

SEQ ID NO: 370144 - DNA, 15 bp, Homo sapiens
gaatgatacaacaga

SEQ ID NO: 370145 - DNA, 15 bp, Homo sapiens
agaatgatacaacag

SEQ ID NO: 370146 - DNA, 15 bp, Homo sapiens
aagaatgatacaaca

SEQ ID NO: 370147 - DNA, 15 bp, Homo sapiens
taagaatgatacaac

SEQ ID NO: 370148 - DNA, 15 bp, Homo sapiens
ataagaatgatacaa

SEQ ID NO: 370149 - DNA, 15 bp, Homo sapiens
cataagaatgataca

SEQ ID NO: 370150 - DNA, 15 bp, Homo sapiens
gcataagaatgatac

SEQ ID NO: 370151 - DNA, 15 bp, Homo sapiens
ggcataagaatgata

SEQ ID NO: 370152 - DNA, 15 bp, Homo sapiens
aggcataagaatgat

SEQ ID NO: 370153 - DNA, 15 bp, Homo sapiens
aaggcataagaatga

SEQ ID NO: 370154 - DNA, 15 bp, Homo sapiens
aaaggcataagaatg

SEQ ID NO: 370155 - DNA, 15 bp, Homo sapiens
caaaggcataagaat

SEQ ID NO: 370156 - DNA, 15 bp, Homo sapiens
gcaaaggcataagaa

SEQ ID NO: 370157 - DNA, 15 bp, Homo sapiens
tgcaaaggcataaga

SEQ ID NO: 370158 - DNA, 15 bp, Homo sapiens
atgcaaaggcataag

SEQ ID NO: 370159 - DNA, 15 bp, Homo sapiens
gatgcaaaggcataa

SEQ ID NO: 370160 - DNA, 15 bp, Homo sapiens
agatgcaaaggcata

SEQ ID NO: 370161 - DNA, 15 bp, Homo sapiens
gagatgcaaaggcat

SEQ ID NO: 370162 - DNA, 15 bp, Homo sapiens
ggagatgcaaaggca

SEQ ID NO: 370163 - DNA, 15 bp, Homo sapiens
tggagatgcaaaggc

SEQ ID NO: 370164 - DNA, 15 bp, Homo sapiens
atggagatgcaaagg

SEQ ID NO: 370165 - DNA, 15 bp, Homo sapiens
tatggagatgcaaag

SEQ ID NO: 370166 - DNA, 15 bp, Homo sapiens
ctatggagatgcaaa

SEQ ID NO: 370167 - DNA, 15 bp, Homo sapiens
gctatggagatgcaa

SEQ ID NO: 370168 - DNA, 15 bp, Homo sapiens
tgctatggagatgca

SEQ ID NO: 370169 - DNA, 15 bp, Homo sapiens
atgctatggagatgc

SEQ ID NO: 370170 - DNA, 15 bp, Homo sapiens
tatgctatggagatg

SEQ ID NO: 370171 - DNA, 15 bp, Homo sapiens
ctatgctatggagat

SEQ ID NO: 370172 - DNA, 15 bp, Homo sapiens
gctatgctatggaga

SEQ ID NO: 370173 - DNA, 15 bp, Homo sapiens
agctatgctatggag

SEQ ID NO: 370174 - DNA, 15 bp, Homo sapiens
gagctatgctatgga

SEQ ID NO: 370175 - DNA, 15 bp, Homo sapiens
ggagctatgctatgg

SEQ ID NO: 370176 - DNA, 15 bp, Homo sapiens
gggagctatgctatg

SEQ ID NO: 370177 - DNA, 15 bp, Homo sapiens
tgggagctatgctat

SEQ ID NO: 370178 - DNA, 15 bp, Homo sapiens
gtgggagctatgcta

SEQ ID NO: 370179 - DNA, 15 bp, Homo sapiens
tgtgggagctatgct

SEQ ID NO: 370180 - DNA, 15 bp, Homo sapiens
atgtgggagctatgc

SEQ ID NO: 370181 - DNA, 15 bp, Homo sapiens
tatgtgggagctatg

SEQ ID NO: 370182 - DNA, 15 bp, Homo sapiens
gtatgtgggagctat

SEQ ID NO: 370183 - DNA, 15 bp, Homo sapiens
ggtatgtgggagcta

SEQ ID NO: 370184 - DNA, 15 bp, Homo sapiens
tggtatgtgggagct

SEQ ID NO: 370185 - DNA, 15 bp, Homo sapiens
ctggtatgtgggagc

SEQ ID NO: 370186 - DNA, 15 bp, Homo sapiens
actggtatgtgggag

SEQ ID NO: 370187 - DNA, 15 bp, Homo sapiens
cactggtatgtggga

SEQ ID NO: 370188 - DNA, 15 bp, Homo sapiens
tcactggtatgtggg

SEQ ID NO: 370189 - DNA, 15 bp, Homo sapiens
ctcactggtatgtgg

SEQ ID NO: 370190 - DNA, 15 bp, Homo sapiens
tctcactggtatgtg

SEQ ID NO: 370191 - DNA, 15 bp, Homo sapiens
ttctcactggtatgt

SEQ ID NO: 370192 - DNA, 15 bp, Homo sapiens
gttctcactggtatg

SEQ ID NO: 370193 - DNA, 15 bp, Homo sapiens
tgttctcactggtat

SEQ ID NO: 370194 - DNA, 15 bp, Homo sapiens
atgttctcactggta

SEQ ID NO: 370195 - DNA, 15 bp, Homo sapiens
tatgttctcactggt

SEQ ID NO: 370196 - DNA, 15 bp, Homo sapiens
atatgttctcactgg

SEQ ID NO: 370197 - DNA, 15 bp, Homo sapiens
catatgttctcactg

SEQ ID NO: 370198 - DNA, 15 bp, Homo sapiens
tcatatgttctcact

SEQ ID NO: 370199 - DNA, 15 bp, Homo sapiens
atcatatgttctcac

SEQ ID NO: 370200 - DNA, 15 bp, Homo sapiens
catcatatgttctca

SEQ ID NO: 370201 - DNA, 15 bp, Homo sapiens
acatcatatgttctc

SEQ ID NO: 370202 - DNA, 15 bp, Homo sapiens
aacatcatatgttct

SEQ ID NO: 370203 - DNA, 15 bp, Homo sapiens
aaacatcatatgttc

SEQ ID NO: 370204 - DNA, 15 bp, Homo sapiens
caaacatcatatgtt

SEQ ID NO: 370205 - DNA, 15 bp, Homo sapiens
ccaaacatcatatgt

SEQ ID NO: 370206 - DNA, 15 bp, Homo sapiens
accaaacatcatatg

SEQ ID NO: 370207 - DNA, 15 bp, Homo sapiens
aaccaaacatcatat

SEQ ID NO: 370208 - DNA, 15 bp, Homo sapiens
aaaccaaacatcata

SEQ ID NO: 370209 - DNA, 15 bp, Homo sapiens
aaaaccaaacatcat

SEQ ID NO: 370210 - DNA, 15 bp, Homo sapiens
gaaaaccaaacatca

SEQ ID NO: 370211 - DNA, 15 bp, Homo sapiens
ggaaaaccaaacatc

SEQ ID NO: 370212 - DNA, 15 bp, Homo sapiens
tggaaaaccaaacat

SEQ ID NO: 370213 - DNA, 15 bp, Homo sapiens
atggaaaaccaaaca

SEQ ID NO: 370214 - DNA, 15 bp, Homo sapiens
aatggaaaaccaaac

SEQ ID NO: 370215 - DNA, 15 bp, Homo sapiens
gaatggaaaaccaaa

SEQ ID NO: 370216 - DNA, 15 bp, Homo sapiens
ggaatggaaaaccaa

SEQ ID NO: 370217 - DNA, 15 bp, Homo sapiens
aggaatggaaaacca

SEQ ID NO: 370218 - DNA, 15 bp, Homo sapiens
caggaatggaaaacc

SEQ ID NO: 370219 - DNA, 15 bp, Homo sapiens
tcaggaatggaaaac

SEQ ID NO: 370220 - DNA, 15 bp, Homo sapiens
ctcaggaatggaaaa

SEQ ID NO: 370221 - DNA, 15 bp, Homo sapiens
actcaggaatggaaa

SEQ ID NO: 370222 - DNA, 15 bp, Homo sapiens
aactcaggaatggaa

SEQ ID NO: 370223 - DNA, 15 bp, Homo sapiens
taactcaggaatgga

SEQ ID NO: 370224 - DNA, 15 bp, Homo sapiens
gtaactcaggaatgg

SEQ ID NO: 370225 - DNA, 15 bp, Homo sapiens
tgtaactcaggaatg

SEQ ID NO: 370226 - DNA, 15 bp, Homo sapiens
atgtaactcaggaat

SEQ ID NO: 370227 - DNA, 15 bp, Homo sapiens
gatgtaactcaggaa

SEQ ID NO: 370228 - DNA, 15 bp, Homo sapiens
tgatgtaactcagga

SEQ ID NO: 370229 - DNA, 15 bp, Homo sapiens
gtgatgtaactcagg

SEQ ID NO: 370230 - DNA, 15 bp, Homo sapiens
agtgatgtaactcag

SEQ ID NO: 370231 - DNA, 15 bp, Homo sapiens
aagtgatgtaactca

SEQ ID NO: 370232 - DNA, 15 bp, Homo sapiens
taagtgatgtaactc

SEQ ID NO: 370233 - DNA, 15 bp, Homo sapiens
ctaagtgatgtaact

SEQ ID NO: 370234 - DNA, 15 bp, Homo sapiens
tctaagtgatgtaac

SEQ ID NO: 370235 - DNA, 15 bp, Homo sapiens
ttctaagtgatgtaa

SEQ ID NO: 370236 - DNA, 15 bp, Homo sapiens
attctaagtgatgta

SEQ ID NO: 370237 - DNA, 15 bp, Homo sapiens
tattctaagtgatgt

SEQ ID NO: 370238 - DNA, 15 bp, Homo sapiens
ttattctaagtgatg

SEQ ID NO: 370239 - DNA, 15 bp, Homo sapiens
attattctaagtgat

SEQ ID NO: 370240 - DNA, 15 bp, Homo sapiens
tattattctaagtga

SEQ ID NO: 370241 - DNA, 15 bp, Homo sapiens
ctattattctaagtg

SEQ ID NO: 370242 - DNA, 15 bp, Homo sapiens
actattattctaagt

SEQ ID NO: 370243 - DNA, 15 bp, Homo sapiens
gactattattctaag

SEQ ID NO: 370244 - DNA, 15 bp, Homo sapiens
agactattattctaa

SEQ ID NO: 370245 - DNA, 15 bp, Homo sapiens
gagactattattcta

SEQ ID NO: 370246 - DNA, 15 bp, Homo sapiens
ggagactattattct

SEQ ID NO: 370247 - DNA, 15 bp, Homo sapiens
tggagactattattc

SEQ ID NO: 370248 - DNA, 15 bp, Homo sapiens
ctggagactattatt

SEQ ID NO: 370249 - DNA, 15 bp, Homo sapiens
actggagactattat

SEQ ID NO: 370250 - DNA, 15 bp, Homo sapiens
gactggagactatta

SEQ ID NO: 370251 - DNA, 15 bp, Homo sapiens
agactggagactatt

SEQ ID NO: 370252 - DNA, 15 bp, Homo sapiens
gagactggagactat

SEQ ID NO: 370253 - DNA, 15 bp, Homo sapiens
tgagactggagacta

SEQ ID NO: 370254 - DNA, 15 bp, Homo sapiens
atgagactggagact

SEQ ID NO: 370255 - DNA, 15 bp, Homo sapiens
gatgagactggagac

SEQ ID NO: 370256 - DNA, 15 bp, Homo sapiens
ggatgagactggaga

SEQ ID NO: 370257 - DNA, 15 bp, Homo sapiens
tggatgagactggag

SEQ ID NO: 370258 - DNA, 15 bp, Homo sapiens
ctggatgagactgga

SEQ ID NO: 370259 - DNA, 15 bp, Homo sapiens
cctggatgagactgg

SEQ ID NO: 370260 - DNA, 15 bp, Homo sapiens
acctggatgagactg

SEQ ID NO: 370261 - DNA, 15 bp, Homo sapiens
gacctggatgagact

SEQ ID NO: 370262 - DNA, 15 bp, Homo sapiens
tgacctggatgagac

SEQ ID NO: 370263 - DNA, 15 bp, Homo sapiens
gtgacctggatgaga

SEQ ID NO: 370264 - DNA, 15 bp, Homo sapiens
agtgacctggatgag

SEQ ID NO: 370265 - DNA, 15 bp, Homo sapiens
cagtgacctggatga

SEQ ID NO: 370266 - DNA, 15 bp, Homo sapiens
gcagtgacctggatg

SEQ ID NO: 370267 - DNA, 15 bp, Homo sapiens
tgcagtgacctggat

SEQ ID NO: 370268 - DNA, 15 bp, Homo sapiens
ttgcagtgacctgga

SEQ ID NO: 370269 - DNA, 15 bp, Homo sapiens
tttgcagtgacctgg

SEQ ID NO: 370270 - DNA, 15 bp, Homo sapiens
atttgcagtgacctg

SEQ ID NO: 370271 - DNA, 15 bp, Homo sapiens
catttgcagtgacct

SEQ ID NO: 370272 - DNA, 15 bp, Homo sapiens
gcatttgcagtgacc

SEQ ID NO: 370273 - DNA, 15 bp, Homo sapiens
agcatttgcagtgac

SEQ ID NO: 370274 - DNA, 15 bp, Homo sapiens
cagcatttgcagtga

SEQ ID NO: 370275 - DNA, 15 bp, Homo sapiens
acagcatttgcagtg

SEQ ID NO: 370276 - DNA, 15 bp, Homo sapiens
aacagcatttgcagt

SEQ ID NO: 370277 - DNA, 15 bp, Homo sapiens
taacagcatttgcag

SEQ ID NO: 370278 - DNA, 15 bp, Homo sapiens
ttaacagcatttgca

SEQ ID NO: 370279 - DNA, 15 bp, Homo sapiens
attaacagcatttgc

SEQ ID NO: 370280 - DNA, 15 bp, Homo sapiens
aattaacagcatttg

SEQ ID NO: 370281 - DNA, 15 bp, Homo sapiens
taattaacagcattt

SEQ ID NO: 370282 - DNA, 15 bp, Homo sapiens
ttaattaacagcatt

SEQ ID NO: 370283 - DNA, 15 bp, Homo sapiens
attaattaacagcat

SEQ ID NO: 370284 - DNA, 15 bp, Homo sapiens
aattaattaacagca

SEQ ID NO: 370285 - DNA, 15 bp, Homo sapiens
gaattaattaacagc

SEQ ID NO: 370286 - DNA, 15 bp, Homo sapiens
ggaattaattaacag

SEQ ID NO: 370287 - DNA, 15 bp, Homo sapiens
aggaattaattaaca

SEQ ID NO: 370288 - DNA, 15 bp, Homo sapiens
aaggaattaattaac

SEQ ID NO: 370289 - DNA, 15 bp, Homo sapiens
aaaggaattaattaa

SEQ ID NO: 370290 - DNA, 15 bp, Homo sapiens
caaaggaattaatta

SEQ ID NO: 370291 - DNA, 15 bp, Homo sapiens
acaaaggaattaatt

SEQ ID NO: 370292 - DNA, 15 bp, Homo sapiens
tacaaaggaattaat

SEQ ID NO: 370293 - DNA, 15 bp, Homo sapiens
atacaaaggaattaa

SEQ ID NO: 370294 - DNA, 15 bp, Homo sapiens
catacaaaggaatta

SEQ ID NO: 370295 - DNA, 15 bp, Homo sapiens
ccatacaaaggaatt

SEQ ID NO: 370296 - DNA, 15 bp, Homo sapiens
gccatacaaaggaat

SEQ ID NO: 370297 - DNA, 15 bp, Homo sapiens
agccatacaaaggaa

SEQ ID NO: 370298 - DNA, 15 bp, Homo sapiens
cagccatacaaagga

SEQ ID NO: 370299 - DNA, 15 bp, Homo sapiens
acagccatacaaagg

SEQ ID NO: 370300 - DNA, 15 bp, Homo sapiens
cacagccatacaaag

SEQ ID NO: 370301 - DNA, 15 bp, Homo sapiens
acacagccatacaaa

SEQ ID NO: 370302 - DNA, 15 bp, Homo sapiens
tacacagccatacaa

SEQ ID NO: 370303 - DNA, 15 bp, Homo sapiens
ctacacagccataca

SEQ ID NO: 370304 - DNA, 15 bp, Homo sapiens
actacacagccatac

SEQ ID NO: 370305 - DNA, 15 bp, Homo sapiens
tactacacagccata

SEQ ID NO: 370306 - DNA, 15 bp, Homo sapiens
atactacacagccat

SEQ ID NO: 370307 - DNA, 15 bp, Homo sapiens
aatactacacagcca

SEQ ID NO: 370308 - DNA, 15 bp, Homo sapiens
gaatactacacagcc

SEQ ID NO: 370309 - DNA, 15 bp, Homo sapiens
tgaatactacacagc

SEQ ID NO: 370310 - DNA, 15 bp, Homo sapiens
gtgaatactacacag

SEQ ID NO: 370311 - DNA, 15 bp, Homo sapiens
agtgaatactacaca

SEQ ID NO: 370312 - DNA, 15 bp, Homo sapiens
gagtgaatactacac

SEQ ID NO: 370313 - DNA, 15 bp, Homo sapiens
tgagtgaatactaca

SEQ ID NO: 370314 - DNA, 15 bp, Homo sapiens
gtgagtgaatactac

SEQ ID NO: 370315 - DNA, 15 bp, Homo sapiens
tgtgagtgaatacta

SEQ ID NO: 370316 - DNA, 15 bp, Homo sapiens
atgtgagtgaatact

SEQ ID NO: 370317 - DNA, 15 bp, Homo sapiens
tatgtgagtgaatac

SEQ ID NO: 370318 - DNA, 15 bp, Homo sapiens
atatgtgagtgaata

SEQ ID NO: 370319 - DNA, 15 bp, Homo sapiens
tatatgtgagtgaat

SEQ ID NO: 370320 - DNA, 15 bp, Homo sapiens
atatatgtgagtgaa

SEQ ID NO: 370321 - DNA, 15 bp, Homo sapiens
tatatatgtgagtga

SEQ ID NO: 370322 - DNA, 15 bp, Homo sapiens
atatatatgtgagtg

SEQ ID NO: 370323 - DNA, 15 bp, Homo sapiens
catatatatgtgagt

SEQ ID NO: 370324 - DNA, 15 bp, Homo sapiens
acatatatatgtgag

SEQ ID NO: 370325 - DNA, 15 bp, Homo sapiens
cacatatatatgtga

SEQ ID NO: 370326 - DNA, 15 bp, Homo sapiens
acacatatatatgtg

SEQ ID NO: 370327 - DNA, 15 bp, Homo sapiens
cacacatatatatgt

SEQ ID NO: 370328 - DNA, 15 bp, Homo sapiens
acacacatatatatg

SEQ ID NO: 370329 - DNA, 15 bp, Homo sapiens
atcacacacacacac

SEQ ID NO: 370330 - DNA, 15 bp, Homo sapiens
tcacatcacacacac

SEQ ID NO: 370331 - DNA, 15 bp, Homo sapiens
atcacatcacacaca

SEQ ID NO: 370332 - DNA, 15 bp, Homo sapiens
tatcacatcacacac

SEQ ID NO: 370333 - DNA, 15 bp, Homo sapiens
atatcacatcacaca

SEQ ID NO: 370334 - DNA, 15 bp, Homo sapiens
tatatcacatcacac

SEQ ID NO: 370335 - DNA, 15 bp, Homo sapiens
atatatcacatcaca

SEQ ID NO: 370336 - DNA, 15 bp, Homo sapiens
tatatatcacatcac

SEQ ID NO: 370337 - DNA, 15 bp, Homo sapiens
atatatatcacatca

SEQ ID NO: 370338 - DNA, 15 bp, Homo sapiens
tatatatatcacatc

SEQ ID NO: 370339 - DNA, 15 bp, Homo sapiens
atatatatatcacat

SEQ ID NO: 370340 - DNA, 15 bp, Homo sapiens
catatatatatcaca

SEQ ID NO: 370341 - DNA, 15 bp, Homo sapiens
acatatatatatcac

SEQ ID NO: 370342 - DNA, 15 bp, Homo sapiens
cacatatatatatca

SEQ ID NO: 370343 - DNA, 15 bp, Homo sapiens
acacatatatatatc

SEQ ID NO: 370344 - DNA, 15 bp, Homo sapiens
agatatatatatata

SEQ ID NO: 370345 - DNA, 15 bp, Homo sapiens
gagatatatatatat

SEQ ID NO: 370346 - DNA, 15 bp, Homo sapiens
tgagatatatatata

SEQ ID NO: 370347 - DNA, 15 bp, Homo sapiens
gtgagatatatatat

SEQ ID NO: 370348 - DNA, 15 bp, Homo sapiens
tgtgagatatatata

SEQ ID NO: 370349 - DNA, 15 bp, Homo sapiens
ctgtgagatatatat

SEQ ID NO: 370350 - DNA, 15 bp, Homo sapiens
actgtgagatatata

SEQ ID NO: 370351 - DNA, 15 bp, Homo sapiens
aactgtgagatatat

SEQ ID NO: 370352 - DNA, 15 bp, Homo sapiens
aaactgtgagatata

SEQ ID NO: 370353 - DNA, 15 bp, Homo sapiens
gaaactgtgagatat

SEQ ID NO: 370354 - DNA, 15 bp, Homo sapiens
agaaactgtgagata

SEQ ID NO: 370355 - DNA, 15 bp, Homo sapiens
aagaaactgtgagat

SEQ ID NO: 370356 - DNA, 15 bp, Homo sapiens
aaagaaactgtgaga

SEQ ID NO: 370357 - DNA, 15 bp, Homo sapiens
taaagaaactgtgag

SEQ ID NO: 370358 - DNA, 15 bp, Homo sapiens
ataaagaaactgtga

SEQ ID NO: 370359 - DNA, 15 bp, Homo sapiens
gataaagaaactgtg

SEQ ID NO: 370360 - DNA, 15 bp, Homo sapiens
ggataaagaaactgt

SEQ ID NO: 370361 - DNA, 15 bp, Homo sapiens
aggataaagaaactg

SEQ ID NO: 370362 - DNA, 15 bp, Homo sapiens
gaggataaagaaact

SEQ ID NO: 370363 - DNA, 15 bp, Homo sapiens
agaggataaagaaac

SEQ ID NO: 370364 - DNA, 15 bp, Homo sapiens
gagaggataaagaaa

SEQ ID NO: 370365 - DNA, 15 bp, Homo sapiens
tgagaggataaagaa

SEQ ID NO: 370366 - DNA, 15 bp, Homo sapiens
atgagaggataaaga

SEQ ID NO: 370367 - DNA, 15 bp, Homo sapiens
aatgagaggataaag

SEQ ID NO: 370368 - DNA, 15 bp, Homo sapiens
caatgagaggataaa

SEQ ID NO: 370369 - DNA, 15 bp, Homo sapiens
tcaatgagaggataa

SEQ ID NO: 370370 - DNA, 15 bp, Homo sapiens
atcaatgagaggata

SEQ ID NO: 370371 - DNA, 15 bp, Homo sapiens
aatcaatgagaggat

SEQ ID NO: 370372 - DNA, 15 bp, Homo sapiens
taatcaatgagagga

SEQ ID NO: 370373 - DNA, 15 bp, Homo sapiens
ttaatcaatgagagg

SEQ ID NO: 370374 - DNA, 15 bp, Homo sapiens
attaatcaatgagag

SEQ ID NO: 370375 - DNA, 15 bp, Homo sapiens
cattaatcaatgaga

SEQ ID NO: 370376 - DNA, 15 bp, Homo sapiens
ccattaatcaatgag

SEQ ID NO: 370377 - DNA, 15 bp, Homo sapiens
cccattaatcaatga

SEQ ID NO: 370378 - DNA, 15 bp, Homo sapiens
gcccattaatcaatg

SEQ ID NO: 370379 - DNA, 15 bp, Homo sapiens
tgcccattaatcaat

SEQ ID NO: 370380 - DNA, 15 bp, Homo sapiens
atgcccattaatcaa

SEQ ID NO: 370381 - DNA, 15 bp, Homo sapiens
aatgcccattaatca

SEQ ID NO: 370382 - DNA, 15 bp, Homo sapiens
aaatgcccattaatc

SEQ ID NO: 370383 - DNA, 15 bp, Homo sapiens
caaatgcccattaat

SEQ ID NO: 370384 - DNA, 15 bp, Homo sapiens
ccaaatgcccattaa

SEQ ID NO: 370385 - DNA, 15 bp, Homo sapiens
cccaaatgcccatta

SEQ ID NO: 370386 - DNA, 15 bp, Homo sapiens
acccaaatgcccatt

SEQ ID NO: 370387 - DNA, 15 bp, Homo sapiens
aacccaaatgcccat

SEQ ID NO: 370388 - DNA, 15 bp, Homo sapiens
taacccaaatgccca

SEQ ID NO: 370389 - DNA, 15 bp, Homo sapiens
ctaacccaaatgccc

SEQ ID NO: 370390 - DNA, 15 bp, Homo sapiens
actaacccaaatgcc

SEQ ID NO: 370391 - DNA, 15 bp, Homo sapiens
aactaacccaaatgc

SEQ ID NO: 370392 - DNA, 15 bp, Homo sapiens
gaactaacccaaatg

SEQ ID NO: 370393 - DNA, 15 bp, Homo sapiens
ggaactaacccaaat

SEQ ID NO: 370394 - DNA, 15 bp, Homo sapiens
tggaactaacccaaa

SEQ ID NO: 370395 - DNA, 15 bp, Homo sapiens
atggaactaacccaa

SEQ ID NO: 370396 - DNA, 15 bp, Homo sapiens
catggaactaaccca

SEQ ID NO: 370397 - DNA, 15 bp, Homo sapiens
ccatggaactaaccc

SEQ ID NO: 370398 - DNA, 15 bp, Homo sapiens
accatggaactaacc

SEQ ID NO: 370399 - DNA, 15 bp, Homo sapiens
aaccatggaactaac

SEQ ID NO: 370400 - DNA, 15 bp, Homo sapiens
aaaccatggaactaa

SEQ ID NO: 370401 - DNA, 15 bp, Homo sapiens
aaaaccatggaacta

SEQ ID NO: 370402 - DNA, 15 bp, Homo sapiens
caaaaccatggaact

SEQ ID NO: 370403 - DNA, 15 bp, Homo sapiens
gcaaaaccatggaac

SEQ ID NO: 370404 - DNA, 15 bp, Homo sapiens
tgcaaaaccatggaa

SEQ ID NO: 370405 - DNA, 15 bp, Homo sapiens
ttgcaaaaccatgga

SEQ ID NO: 370406 - DNA, 15 bp, Homo sapiens
attgcaaaaccatgg

SEQ ID NO: 370407 - DNA, 15 bp, Homo sapiens
aattgcaaaaccatg

SEQ ID NO: 370408 - DNA, 15 bp, Homo sapiens
caattgcaaaaccat

SEQ ID NO: 370409 - DNA, 15 bp, Homo sapiens
acaattgcaaaacca

SEQ ID NO: 370410 - DNA, 15 bp, Homo sapiens
cacaattgcaaaacc

SEQ ID NO: 370411 - DNA, 15 bp, Homo sapiens
tcacaattgcaaaac

SEQ ID NO: 370412 - DNA, 15 bp, Homo sapiens
ttcacaattgcaaaa

SEQ ID NO: 370413 - DNA, 15 bp, Homo sapiens
attcacaattgcaaa

SEQ ID NO: 370414 - DNA, 15 bp, Homo sapiens
aattcacaattgcaa

SEQ ID NO: 370415 - DNA, 15 bp, Homo sapiens
caattcacaattgca

SEQ ID NO: 370416 - DNA, 15 bp, Homo sapiens
acaattcacaattgc

SEQ ID NO: 370417 - DNA, 15 bp, Homo sapiens
cacaattcacaattg

SEQ ID NO: 370418 - DNA, 15 bp, Homo sapiens
gcacaattcacaatt

SEQ ID NO: 370419 - DNA, 15 bp, Homo sapiens
agcacaattcacaat

SEQ ID NO: 370420 - DNA, 15 bp, Homo sapiens
cagcacaattcacaa

SEQ ID NO: 370421 - DNA, 15 bp, Homo sapiens
gcagcacaattcaca

SEQ ID NO: 370422 - DNA, 15 bp, Homo sapiens
agcagcacaattcac

SEQ ID NO: 370423 - DNA, 15 bp, Homo sapiens
tagcagcacaattca

SEQ ID NO: 370424 - DNA, 15 bp, Homo sapiens
atagcagcacaattc

SEQ ID NO: 370425 - DNA, 15 bp, Homo sapiens
tatagcagcacaatt

SEQ ID NO: 370426 - DNA, 15 bp, Homo sapiens
ttatagcagcacaat

SEQ ID NO: 370427 - DNA, 15 bp, Homo sapiens
tttatagcagcacaa

SEQ ID NO: 370428 - DNA, 15 bp, Homo sapiens
gtttatagcagcaca

SEQ ID NO: 370429 - DNA, 15 bp, Homo sapiens
tgtttatagcagcac

SEQ ID NO: 370430 - DNA, 15 bp, Homo sapiens
atgtttatagcagca

SEQ ID NO: 370431 - DNA, 15 bp, Homo sapiens
aatgtttatagcagc

SEQ ID NO: 370432 - DNA, 15 bp, Homo sapiens
gaatgtttatagcag

SEQ ID NO: 370433 - DNA, 15 bp, Homo sapiens
cgaatgtttatagca

SEQ ID NO: 370434 - DNA, 15 bp, Homo sapiens
acgaatgtttatagc

SEQ ID NO: 370435 - DNA, 15 bp, Homo sapiens
cacgaatgtttatag

SEQ ID NO: 370436 - DNA, 15 bp, Homo sapiens
acacgaatgtttata

SEQ ID NO: 370437 - DNA, 15 bp, Homo sapiens
cacacgaatgtttat

SEQ ID NO: 370438 - DNA, 15 bp, Homo sapiens
gcacacgaatgttta

SEQ ID NO: 370439 - DNA, 15 bp, Homo sapiens
tgcacacgaatgttt

SEQ ID NO: 370440 - DNA, 15 bp, Homo sapiens
ttgcacacgaatgtt

SEQ ID NO: 370441 - DNA, 15 bp, Homo sapiens
cttgcacacgaatgt

SEQ ID NO: 370442 - DNA, 15 bp, Homo sapiens
acttgcacacgaatg

SEQ ID NO: 370443 - DNA, 15 bp, Homo sapiens
tacttgcacacgaat

SEQ ID NO: 370444 - DNA, 15 bp, Homo sapiens
atacttgcacacgaa

SEQ ID NO: 370445 - DNA, 15 bp, Homo sapiens
gatacttgcacacga

SEQ ID NO: 370446 - DNA, 15 bp, Homo sapiens
agatacttgcacacg

SEQ ID NO: 370447 - DNA, 15 bp, Homo sapiens
aagatacttgcacac

SEQ ID NO: 370448 - DNA, 15 bp, Homo sapiens
aaagatacttgcaca

SEQ ID NO: 370449 - DNA, 15 bp, Homo sapiens
aaaagatacttgcac

SEQ ID NO: 370450 - DNA, 15 bp, Homo sapiens
aaaaagatacttgca

SEQ ID NO: 370451 - DNA, 15 bp, Homo sapiens
gaaaaagatacttgc

SEQ ID NO: 370452 - DNA, 15 bp, Homo sapiens
cgaaaaagatacttg

SEQ ID NO: 370453 - DNA, 15 bp, Homo sapiens
tcgaaaaagatactt

SEQ ID NO: 370454 - DNA, 15 bp, Homo sapiens
ttcgaaaaagatact

SEQ ID NO: 370455 - DNA, 15 bp, Homo sapiens
attcgaaaaagatac

SEQ ID NO: 370456 - DNA, 15 bp, Homo sapiens
tattcgaaaaagata

SEQ ID NO: 370457 - DNA, 15 bp, Homo sapiens
ttattcgaaaaagat

SEQ ID NO: 370458 - DNA, 15 bp, Homo sapiens
attattcgaaaaaga

SEQ ID NO: 370459 - DNA, 15 bp, Homo sapiens
cattattcgaaaaag

SEQ ID NO: 370460 - DNA, 15 bp, Homo sapiens
tcattattcgaaaaa

SEQ ID NO: 370461 - DNA, 15 bp, Homo sapiens
gtcattattcgaaaa

SEQ ID NO: 370462 - DNA, 15 bp, Homo sapiens
agtcattattcgaaa

SEQ ID NO: 370463 - DNA, 15 bp, Homo sapiens
aagtcattattcgaa

SEQ ID NO: 370464 - DNA, 15 bp, Homo sapiens
gaagtcattattcga

SEQ ID NO: 370465 - DNA, 15 bp, Homo sapiens
agaagtcattattcg

SEQ ID NO: 370466 - DNA, 15 bp, Homo sapiens
aagaagtcattattc

SEQ ID NO: 370467 - DNA, 15 bp, Homo sapiens
aaagaagtcattatt

SEQ ID NO: 370468 - DNA, 15 bp, Homo sapiens
aaaagaagtcattat

SEQ ID NO: 370469 - DNA, 15 bp, Homo sapiens
gaaaagaagtcatta

SEQ ID NO: 370470 - DNA, 15 bp, Homo sapiens
ggaaaagaagtcatt

SEQ ID NO: 370471 - DNA, 15 bp, Homo sapiens
aggaaaagaagtcat

SEQ ID NO: 370472 - DNA, 15 bp, Homo sapiens
gaggaaaagaagtca

SEQ ID NO: 370473 - DNA, 15 bp, Homo sapiens
agaggaaaagaagtc

SEQ ID NO: 370474 - DNA, 15 bp, Homo sapiens
cagaggaaaagaagt

SEQ ID NO: 370475 - DNA, 15 bp, Homo sapiens
ccagaggaaaagaag

SEQ ID NO: 370476 - DNA, 15 bp, Homo sapiens
cccagaggaaaagaa

SEQ ID NO: 370477 - DNA, 15 bp, Homo sapiens
acccagaggaaaaga

SEQ ID NO: 370478 - DNA, 15 bp, Homo sapiens
tacccagaggaaaag

SEQ ID NO: 370479 - DNA, 15 bp, Homo sapiens
ctacccagaggaaaa

SEQ ID NO: 370480 - DNA, 15 bp, Homo sapiens
tctacccagaggaaa

SEQ ID NO: 370481 - DNA, 15 bp, Homo sapiens
atctacccagaggaa

SEQ ID NO: 370482 - DNA, 15 bp, Homo sapiens
tatctacccagagga

SEQ ID NO: 370483 - DNA, 15 bp, Homo sapiens
ttatctacccagagg

SEQ ID NO: 370484 - DNA, 15 bp, Homo sapiens
gttatctacccagag

SEQ ID NO: 370485 - DNA, 15 bp, Homo sapiens
ggttatctacccaga

SEQ ID NO: 370486 - DNA, 15 bp, Homo sapiens
tggttatctacccag

SEQ ID NO: 370487 - DNA, 15 bp, Homo sapiens
ctggttatctaccca

SEQ ID NO: 370488 - DNA, 15 bp, Homo sapiens
actggttatctaccc

SEQ ID NO: 370489 - DNA, 15 bp, Homo sapiens
cactggttatctacc

SEQ ID NO: 370490 - DNA, 15 bp, Homo sapiens
ccactggttatctac

SEQ ID NO: 370491 - DNA, 15 bp, Homo sapiens
accactggttatcta

SEQ ID NO: 370492 - DNA, 15 bp, Homo sapiens
caccactggttatct

SEQ ID NO: 370493 - DNA, 15 bp, Homo sapiens
ccaccactggttatc

SEQ ID NO: 370494 - DNA, 15 bp, Homo sapiens
cccaccactggttat

SEQ ID NO: 370495 - DNA, 15 bp, Homo sapiens
tcccaccactggtta

SEQ ID NO: 370496 - DNA, 15 bp, Homo sapiens
atcccaccactggtt

SEQ ID NO: 370497 - DNA, 15 bp, Homo sapiens
aatcccaccactggt

SEQ ID NO: 370498 - DNA, 15 bp, Homo sapiens
caatcccaccactgg

SEQ ID NO: 370499 - DNA, 15 bp, Homo sapiens
gcaatcccaccactg

SEQ ID NO: 370500 - DNA, 15 bp, Homo sapiens
agcaatcccaccact

SEQ ID NO: 370501 - DNA, 15 bp, Homo sapiens
cagcaatcccaccac

SEQ ID NO: 370502 - DNA, 15 bp, Homo sapiens
ccagcaatcccacca

SEQ ID NO: 370503 - DNA, 15 bp, Homo sapiens
tccagcaatcccacc

SEQ ID NO: 370504 - DNA, 15 bp, Homo sapiens
atccagcaatcccac

SEQ ID NO: 370505 - DNA, 15 bp, Homo sapiens
tatccagcaatccca

SEQ ID NO: 370506 - DNA, 15 bp, Homo sapiens
ttatccagcaatccc

SEQ ID NO: 370507 - DNA, 15 bp, Homo sapiens
tttatccagcaatcc

SEQ ID NO: 370508 - DNA, 15 bp, Homo sapiens
ttttatccagcaatc

SEQ ID NO: 370509 - DNA, 15 bp, Homo sapiens
attttatccagcaat

SEQ ID NO: 370510 - DNA, 15 bp, Homo sapiens
cattttatccagcaa

SEQ ID NO: 370511 - DNA, 15 bp, Homo sapiens
ccattttatccagca

SEQ ID NO: 370512 - DNA, 15 bp, Homo sapiens
accattttatccagc

SEQ ID NO: 370513 - DNA, 15 bp, Homo sapiens
taccattttatccag

SEQ ID NO: 370514 - DNA, 15 bp, Homo sapiens
ctaccattttatcca

SEQ ID NO: 370515 - DNA, 15 bp, Homo sapiens
tctaccattttatcc

SEQ ID NO: 370516 - DNA, 15 bp, Homo sapiens
atctaccattttatc

SEQ ID NO: 370517 - DNA, 15 bp, Homo sapiens
gatctaccattttat

SEQ ID NO: 370518 - DNA, 15 bp, Homo sapiens
agatctaccatttta

SEQ ID NO: 370519 - DNA, 15 bp, Homo sapiens
tagatctaccatttt

SEQ ID NO: 370520 - DNA, 15 bp, Homo sapiens
gtagatctaccattt

SEQ ID NO: 370521 - DNA, 15 bp, Homo sapiens
agtagatctaccatt

SEQ ID NO: 370522 - DNA, 15 bp, Homo sapiens
aagtagatctaccat

SEQ ID NO: 370523 - DNA, 15 bp, Homo sapiens
aaagtagatctacca

SEQ ID NO: 370524 - DNA, 15 bp, Homo sapiens
aaaagtagatctacc

SEQ ID NO: 370525 - DNA, 15 bp, Homo sapiens
taaaagtagatctac

SEQ ID NO: 370526 - DNA, 15 bp, Homo sapiens
ctaaaagtagatcta

SEQ ID NO: 370527 - DNA, 15 bp, Homo sapiens
actaaaagtagatct

SEQ ID NO: 370528 - DNA, 15 bp, Homo sapiens
aactaaaagtagatc

SEQ ID NO: 370529 - DNA, 15 bp, Homo sapiens
gaactaaaagtagat

SEQ ID NO: 370530 - DNA, 15 bp, Homo sapiens
agaactaaaagtaga

SEQ ID NO: 370531 - DNA, 15 bp, Homo sapiens
aagaactaaaagtag

SEQ ID NO: 370532 - DNA, 15 bp, Homo sapiens
aaagaactaaaagta

SEQ ID NO: 370533 - DNA, 15 bp, Homo sapiens
caaagaactaaaagt

SEQ ID NO: 370534 - DNA, 15 bp, Homo sapiens
tcaaagaactaaaag

SEQ ID NO: 370535 - DNA, 15 bp, Homo sapiens
ctcaaagaactaaaa

SEQ ID NO: 370536 - DNA, 15 bp, Homo sapiens
cctcaaagaactaaa

SEQ ID NO: 370537 - DNA, 15 bp, Homo sapiens
ttcctcaaagaacta

SEQ ID NO: 370538 - DNA, 15 bp, Homo sapiens
attcctcaaagaact

SEQ ID NO: 370539 - DNA, 15 bp, Homo sapiens
gattcctcaaagaac

SEQ ID NO: 370540 - DNA, 15 bp, Homo sapiens
agattcctcaaagaa

SEQ ID NO: 370541 - DNA, 15 bp, Homo sapiens
gagattcctcaaaga

SEQ ID NO: 370542 - DNA, 15 bp, Homo sapiens
ggagattcctcaaag

SEQ ID NO: 370543 - DNA, 15 bp, Homo sapiens
tggagattcctcaaa

SEQ ID NO: 370544 - DNA, 15 bp, Homo sapiens
gtggagattcctcaa

SEQ ID NO: 370545 - DNA, 15 bp, Homo sapiens
tgtggagattcctca

SEQ ID NO: 370546 - DNA, 15 bp, Homo sapiens
gtgtggagattcctc

SEQ ID NO: 370547 - DNA, 15 bp, Homo sapiens
agtgtggagattcct

SEQ ID NO: 370548 - DNA, 15 bp, Homo sapiens
cagtgtggagattcc

SEQ ID NO: 370549 - DNA, 15 bp, Homo sapiens
acagtgtggagattc

SEQ ID NO: 370550 - DNA, 15 bp, Homo sapiens
aaaacagtgtggaga

SEQ ID NO: 370551 - DNA, 15 bp, Homo sapiens
gaaaacagtgtggag

SEQ ID NO: 370552 - DNA, 15 bp, Homo sapiens
ggaaaacagtgtgga

SEQ ID NO: 370553 - DNA, 15 bp, Homo sapiens
tggaaaacagtgtgg

SEQ ID NO: 370554 - DNA, 15 bp, Homo sapiens
atggaaaacagtgtg

SEQ ID NO: 370555 - DNA, 15 bp, Homo sapiens
tatggaaaacagtgt

SEQ ID NO: 370556 - DNA, 15 bp, Homo sapiens
ctatggaaaacagtg

SEQ ID NO: 370557 - DNA, 15 bp, Homo sapiens
ctacagccactatgg

SEQ ID NO: 370558 - DNA, 15 bp, Homo sapiens
actacagccactatg

SEQ ID NO: 370559 - DNA, 15 bp, Homo sapiens
tactacagccactat

SEQ ID NO: 370560 - DNA, 15 bp, Homo sapiens
ctactacagccacta

SEQ ID NO: 370561 - DNA, 15 bp, Homo sapiens
actactacagccact

SEQ ID NO: 370562 - DNA, 15 bp, Homo sapiens
aactactacagccac

SEQ ID NO: 370563 - DNA, 15 bp, Homo sapiens
aaactactacagcca

SEQ ID NO: 370564 - DNA, 15 bp, Homo sapiens
taaactactacagcc

SEQ ID NO: 370565 - DNA, 15 bp, Homo sapiens
gtaaactactacagc

SEQ ID NO: 370566 - DNA, 15 bp, Homo sapiens
tgtaaactactacag

SEQ ID NO: 370567 - DNA, 15 bp, Homo sapiens
atgtaaactactaca

SEQ ID NO: 370568 - DNA, 15 bp, Homo sapiens
aatgtaaactactac

SEQ ID NO: 370569 - DNA, 15 bp, Homo sapiens
caatgtaaactacta

SEQ ID NO: 370570 - DNA, 15 bp, Homo sapiens
gcaatgtaaactact

SEQ ID NO: 370571 - DNA, 15 bp, Homo sapiens
ggcaatgtaaactac

SEQ ID NO: 370572 - DNA, 15 bp, Homo sapiens
cggcaatgtaaacta

SEQ ID NO: 370573 - DNA, 15 bp, Homo sapiens
gcggcaatgtaaact

SEQ ID NO: 370574 - DNA, 15 bp, Homo sapiens
ggcggcaatgtaaac

SEQ ID NO: 370575 - DNA, 15 bp, Homo sapiens
tggcggcaatgtaaa

SEQ ID NO: 370576 - DNA, 15 bp, Homo sapiens
ctggcggcaatgtaa

SEQ ID NO: 370577 - DNA, 15 bp, Homo sapiens
gctggcggcaatgta

SEQ ID NO: 370578 - DNA, 15 bp, Homo sapiens
tgctggcggcaatgt

SEQ ID NO: 370579 - DNA, 15 bp, Homo sapiens
ctgctggcggcaatg

SEQ ID NO: 370580 - DNA, 15 bp, Homo sapiens
actgctggcggcaat

SEQ ID NO: 370581 - DNA, 15 bp, Homo sapiens
cactgctggcggcaa

SEQ ID NO: 370582 - DNA, 15 bp, Homo sapiens
acactgctggcggca

SEQ ID NO: 370583 - DNA, 15 bp, Homo sapiens
tacactgctggcggc

SEQ ID NO: 370584 - DNA, 15 bp, Homo sapiens
ctacactgctggcgg

SEQ ID NO: 370585 - DNA, 15 bp, Homo sapiens
tctacactgctggcg

SEQ ID NO: 370586 - DNA, 15 bp, Homo sapiens
ctctacactgctggc

SEQ ID NO: 370587 - DNA, 15 bp, Homo sapiens
cctctacactgctgg

SEQ ID NO: 370588 - DNA, 15 bp, Homo sapiens
acctctacactgctg

SEQ ID NO: 370589 - DNA, 15 bp, Homo sapiens
cacctctacactgct

SEQ ID NO: 370590 - DNA, 15 bp, Homo sapiens
acacctctacactgc

SEQ ID NO: 370591 - DNA, 15 bp, Homo sapiens
aacacctctacactg

SEQ ID NO: 370592 - DNA, 15 bp, Homo sapiens
gaacacctctacact

SEQ ID NO: 370593 - DNA, 15 bp, Homo sapiens
agaacacctctacac

SEQ ID NO: 370594 - DNA, 15 bp, Homo sapiens
gagaacacctctaca

SEQ ID NO: 370595 - DNA, 15 bp, Homo sapiens
agagaacacctctac

SEQ ID NO: 370596 - DNA, 15 bp, Homo sapiens
cagagaacacctcta

SEQ ID NO: 370597 - DNA, 15 bp, Homo sapiens
acagagaacacctct

SEQ ID NO: 370598 - DNA, 15 bp, Homo sapiens
aacagagaacacctc

SEQ ID NO: 370599 - DNA, 15 bp, Homo sapiens
gaacagagaacacct

SEQ ID NO: 370600 - DNA, 15 bp, Homo sapiens
tgaacagagaacacc

SEQ ID NO: 370601 - DNA, 15 bp, Homo sapiens
gtgaacagagaacac

SEQ ID NO: 370602 - DNA, 15 bp, Homo sapiens
ggtgaacagagaaca

SEQ ID NO: 370603 - DNA, 15 bp, Homo sapiens
cggtgaacagagaac

SEQ ID NO: 370604 - DNA, 15 bp, Homo sapiens
gcggtgaacagagaa

SEQ ID NO: 370605 - DNA, 15 bp, Homo sapiens
tgcggtgaacagaga

SEQ ID NO: 370606 - DNA, 15 bp, Homo sapiens
atgcggtgaacagag

SEQ ID NO: 370607 - DNA, 15 bp, Homo sapiens
gatgcggtgaacaga

SEQ ID NO: 370608 - DNA, 15 bp, Homo sapiens
ggatgcggtgaacag

SEQ ID NO: 370609 - DNA, 15 bp, Homo sapiens
tggatgcggtgaaca

SEQ ID NO: 370610 - DNA, 15 bp, Homo sapiens
atggatgcggtgaac

SEQ ID NO: 370611 - DNA, 15 bp, Homo sapiens
catggatgcggtgaa

SEQ ID NO: 370612 - DNA, 15 bp, Homo sapiens
gcatggatgcggtga

SEQ ID NO: 370613 - DNA, 15 bp, Homo sapiens
ggcatggatgcggtg

SEQ ID NO: 370614 - DNA, 15 bp, Homo sapiens
tggcatggatgcggt

SEQ ID NO: 370615 - DNA, 15 bp, Homo sapiens
ttggcatggatgcgg

SEQ ID NO: 370616 - DNA, 15 bp, Homo sapiens
gttggcatggatgcg

SEQ ID NO: 370617 - DNA, 15 bp, Homo sapiens
tgttggcatggatgc

SEQ ID NO: 370618 - DNA, 15 bp, Homo sapiens
atgttggcatggatg

SEQ ID NO: 370619 - DNA, 15 bp, Homo sapiens
gatgttggcatggat

SEQ ID NO: 370620 - DNA, 15 bp, Homo sapiens
agatgttggcatgga

SEQ ID NO: 370621 - DNA, 15 bp, Homo sapiens
tagatgttggcatgg

SEQ ID NO: 370622 - DNA, 15 bp, Homo sapiens
gtagatgttggcatg

SEQ ID NO: 370623 - DNA, 15 bp, Homo sapiens
agtagatgttggcat

SEQ ID NO: 370624 - DNA, 15 bp, Homo sapiens
cagtagatgttggca

SEQ ID NO: 370625 - DNA, 15 bp, Homo sapiens
acagtagatgttggc

SEQ ID NO: 370626 - DNA, 15 bp, Homo sapiens
aacagtagatgttgg

SEQ ID NO: 370627 - DNA, 15 bp, Homo sapiens
aaacagtagatgttg

SEQ ID NO: 370628 - DNA, 15 bp, Homo sapiens
gaaacagtagatgtt

SEQ ID NO: 370629 - DNA, 15 bp, Homo sapiens
agaaacagtagatgt

SEQ ID NO: 370630 - DNA, 15 bp, Homo sapiens
aagaaacagtagatg

SEQ ID NO: 370631 - DNA, 15 bp, Homo sapiens
caagaaacagtagat

SEQ ID NO: 370632 - DNA, 15 bp, Homo sapiens
tcaagaaacagtaga

SEQ ID NO: 370633 - DNA, 15 bp, Homo sapiens
atcaagaaacagtag

SEQ ID NO: 370634 - DNA, 15 bp, Homo sapiens
tatcaagaaacagta

SEQ ID NO: 370635 - DNA, 15 bp, Homo sapiens
atatcaagaaacagt

SEQ ID NO: 370636 - DNA, 15 bp, Homo sapiens
aatatcaagaaacag

SEQ ID NO: 370637 - DNA, 15 bp, Homo sapiens
aaatatcaagaaaca

SEQ ID NO: 370638 - DNA, 15 bp, Homo sapiens
aaaatatcaagaaac

SEQ ID NO: 370639 - DNA, 15 bp, Homo sapiens
caaaatatcaagaaa

SEQ ID NO: 370640 - DNA, 15 bp, Homo sapiens
tcaaaatatcaagaa

SEQ ID NO: 370641 - DNA, 15 bp, Homo sapiens
atcaaaatatcaaga

SEQ ID NO: 370642 - DNA, 15 bp, Homo sapiens
aatcaaaatatcaag

SEQ ID NO: 370643 - DNA, 15 bp, Homo sapiens
taatcaaaatatcaa

SEQ ID NO: 370644 - DNA, 15 bp, Homo sapiens
ataatcaaaatatca

SEQ ID NO: 370645 - DNA, 15 bp, Homo sapiens
cataatcaaaatatc

SEQ ID NO: 370646 - DNA, 15 bp, Homo sapiens
ccataatcaaaatat

SEQ ID NO: 370647 - DNA, 15 bp, Homo sapiens
gccataatcaaaata

SEQ ID NO: 370648 - DNA, 15 bp, Homo sapiens
ggccataatcaaaat

SEQ ID NO: 370649 - DNA, 15 bp, Homo sapiens
cggccataatcaaaa

SEQ ID NO: 370650 - DNA, 15 bp, Homo sapiens
acggccataatcaaa

SEQ ID NO: 370651 - DNA, 15 bp, Homo sapiens
aacggccataatcaa

SEQ ID NO: 370652 - DNA, 15 bp, Homo sapiens
gaacggccataatca

SEQ ID NO: 370653 - DNA, 15 bp, Homo sapiens
agaacggccataatc

SEQ ID NO: 370654 - DNA, 15 bp, Homo sapiens
aagaacggccataat

SEQ ID NO: 370655 - DNA, 15 bp, Homo sapiens
caagaacggccataa

SEQ ID NO: 370656 - DNA, 15 bp, Homo sapiens
gcaagaacggccata

SEQ ID NO: 370657 - DNA, 15 bp, Homo sapiens
tgcaagaacggccat

SEQ ID NO: 370658 - DNA, 15 bp, Homo sapiens
ctgcaagaacggcca

SEQ ID NO: 370659 - DNA, 15 bp, Homo sapiens
cctgcaagaacggcc

SEQ ID NO: 370660 - DNA, 15 bp, Homo sapiens
tcctgcaagaacggc

SEQ ID NO: 370661 - DNA, 15 bp, Homo sapiens
ttcctgcaagaacgg

SEQ ID NO: 370662 - DNA, 15 bp, Homo sapiens
attcctgcaagaacg

SEQ ID NO: 370663 - DNA, 15 bp, Homo sapiens
tattcctgcaagaac

SEQ ID NO: 370664 - DNA, 15 bp, Homo sapiens
ttattcctgcaagaa

SEQ ID NO: 370665 - DNA, 15 bp, Homo sapiens
cttattcctgcaaga

SEQ ID NO: 370666 - DNA, 15 bp, Homo sapiens
ccttattcctgcaag

SEQ ID NO: 370667 - DNA, 15 bp, Homo sapiens
accttattcctgcaa

SEQ ID NO: 370668 - DNA, 15 bp, Homo sapiens
caccttattcctgca

SEQ ID NO: 370669 - DNA, 15 bp, Homo sapiens
ccaccttattcctgc

SEQ ID NO: 370670 - DNA, 15 bp, Homo sapiens
accaccttattcctg

SEQ ID NO: 370671 - DNA, 15 bp, Homo sapiens
taccaccttattcct

SEQ ID NO: 370672 - DNA, 15 bp, Homo sapiens
ataccaccttattcc

SEQ ID NO: 370673 - DNA, 15 bp, Homo sapiens
gataccaccttattc

SEQ ID NO: 370674 - DNA, 15 bp, Homo sapiens
tgataccaccttatt

SEQ ID NO: 370675 - DNA, 15 bp, Homo sapiens
gtgataccaccttat

SEQ ID NO: 370676 - DNA, 15 bp, Homo sapiens
tgtgataccacctta

SEQ ID NO: 370677 - DNA, 15 bp, Homo sapiens
atgtgataccacctt

SEQ ID NO: 370678 - DNA, 15 bp, Homo sapiens
aatgtgataccacct

SEQ ID NO: 370679 - DNA, 15 bp, Homo sapiens
caatgtgataccacc

SEQ ID NO: 370680 - DNA, 15 bp, Homo sapiens
acaatgtgataccac

SEQ ID NO: 370681 - DNA, 15 bp, Homo sapiens
cacaatgtgatacca

SEQ ID NO: 370682 - DNA, 15 bp, Homo sapiens
acacaatgtgatacc

SEQ ID NO: 370683 - DNA, 15 bp, Homo sapiens
aacacaatgtgatac

SEQ ID NO: 370684 - DNA, 15 bp, Homo sapiens
aaacacaatgtgata

SEQ ID NO: 370685 - DNA, 15 bp, Homo sapiens
aaaacacaatgtgat

SEQ ID NO: 370686 - DNA, 15 bp, Homo sapiens
caaaacacaatgtga

SEQ ID NO: 370687 - DNA, 15 bp, Homo sapiens
tcaaaacacaatgtg

SEQ ID NO: 370688 - DNA, 15 bp, Homo sapiens
atcaaaacacaatgt

SEQ ID NO: 370689 - DNA, 15 bp, Homo sapiens
aatcaaaacacaatg

SEQ ID NO: 370690 - DNA, 15 bp, Homo sapiens
aaatcaaaacacaat

SEQ ID NO: 370691 - DNA, 15 bp, Homo sapiens
caaatcaaaacacaa

SEQ ID NO: 370692 - DNA, 15 bp, Homo sapiens
gcaaatcaaaacaca

SEQ ID NO: 370693 - DNA, 15 bp, Homo sapiens
tgcaaatcaaaacac

SEQ ID NO: 370694 - DNA, 15 bp, Homo sapiens
atgcaaatcaaaaca

SEQ ID NO: 370695 - DNA, 15 bp, Homo sapiens
aaaatgcaaatcaaa

SEQ ID NO: 370696 - DNA, 15 bp, Homo sapiens
gaaaatgcaaatcaa

SEQ ID NO: 370697 - DNA, 15 bp, Homo sapiens
ggaaaatgcaaatca

SEQ ID NO: 370698 - DNA, 15 bp, Homo sapiens
aggaaaatgcaaatc

SEQ ID NO: 370699 - DNA, 15 bp, Homo sapiens
caggaaaatgcaaat

SEQ ID NO: 370700 - DNA, 15 bp, Homo sapiens
tcaggaaaatgcaaa

SEQ ID NO: 370701 - DNA, 15 bp, Homo sapiens
atcaggaaaatgcaa

SEQ ID NO: 370702 - DNA, 15 bp, Homo sapiens
tatcaggaaaatgca

SEQ ID NO: 370703 - DNA, 15 bp, Homo sapiens
gtatcaggaaaatgc

SEQ ID NO: 370704 - DNA, 15 bp, Homo sapiens
agtatcaggaaaatg

SEQ ID NO: 370705 - DNA, 15 bp, Homo sapiens
aagtatcaggaaaat

SEQ ID NO: 370706 - DNA, 15 bp, Homo sapiens
taagtatcaggaaaa

SEQ ID NO: 370707 - DNA, 15 bp, Homo sapiens
ctaagtatcaggaaa

SEQ ID NO: 370708 - DNA, 15 bp, Homo sapiens
actaagtatcaggaa

SEQ ID NO: 370709 - DNA, 15 bp, Homo sapiens
cactaagtatcagga

SEQ ID NO: 370710 - DNA, 15 bp, Homo sapiens
tcactaagtatcagg

SEQ ID NO: 370711 - DNA, 15 bp, Homo sapiens
atcactaagtatcag

SEQ ID NO: 370712 - DNA, 15 bp, Homo sapiens
catcactaagtatca

SEQ ID NO: 370713 - DNA, 15 bp, Homo sapiens
acatcactaagtatc

SEQ ID NO: 370714 - DNA, 15 bp, Homo sapiens
aacatcactaagtat

SEQ ID NO: 370715 - DNA, 15 bp, Homo sapiens
taacatcactaagta

SEQ ID NO: 370716 - DNA, 15 bp, Homo sapiens
ataacatcactaagt

SEQ ID NO: 370717 - DNA, 15 bp, Homo sapiens
tataacatcactaag

SEQ ID NO: 370718 - DNA, 15 bp, Homo sapiens
atataacatcactaa

SEQ ID NO: 370719 - DNA, 15 bp, Homo sapiens
tatataacatcacta

SEQ ID NO: 370720 - DNA, 15 bp, Homo sapiens
gtatataacatcact

SEQ ID NO: 370721 - DNA, 15 bp, Homo sapiens
tgtatataacatcac

SEQ ID NO: 370722 - DNA, 15 bp, Homo sapiens
ttgtatataacatca

SEQ ID NO: 370723 - DNA, 15 bp, Homo sapiens
tttgtatataacatc

SEQ ID NO: 370724 - DNA, 15 bp, Homo sapiens
atttgtatataacat

SEQ ID NO: 370725 - DNA, 15 bp, Homo sapiens
catttgtatataaca

SEQ ID NO: 370726 - DNA, 15 bp, Homo sapiens
ccatttgtatataac

SEQ ID NO: 370727 - DNA, 15 bp, Homo sapiens
gccatttgtatataa

SEQ ID NO: 370728 - DNA, 15 bp, Homo sapiens
ggccatttgtatata

SEQ ID NO: 370729 - DNA, 15 bp, Homo sapiens
tggccatttgtatat

SEQ ID NO: 370730 - DNA, 15 bp, Homo sapiens
ttggccatttgtata

SEQ ID NO: 370731 - DNA, 15 bp, Homo sapiens
gttggccatttgtat

SEQ ID NO: 370732 - DNA, 15 bp, Homo sapiens
tgttggccatttgta

SEQ ID NO: 370733 - DNA, 15 bp, Homo sapiens
ttgttggccatttgt

SEQ ID NO: 370734 - DNA, 15 bp, Homo sapiens
tttgttggccatttg

SEQ ID NO: 370735 - DNA, 15 bp, Homo sapiens
gtttgttggccattt

SEQ ID NO: 370736 - DNA, 15 bp, Homo sapiens
tgtttgttggccatt

SEQ ID NO: 370737 - DNA, 15 bp, Homo sapiens
atgtttgttggccat

SEQ ID NO: 370738 - DNA, 15 bp, Homo sapiens
tatgtttgttggcca

SEQ ID NO: 370739 - DNA, 15 bp, Homo sapiens
atatgtttgttggcc

SEQ ID NO: 370740 - DNA, 15 bp, Homo sapiens
catatgtttgttggc

SEQ ID NO: 370741 - DNA, 15 bp, Homo sapiens
ccatatgtttgttgg

SEQ ID NO: 370742 - DNA, 15 bp, Homo sapiens
tccatatgtttgttg

SEQ ID NO: 370743 - DNA, 15 bp, Homo sapiens
ttccatatgtttgtt

SEQ ID NO: 370744 - DNA, 15 bp, Homo sapiens
cttccatatgtttgt

SEQ ID NO: 370745 - DNA, 15 bp, Homo sapiens
acttccatatgtttg

SEQ ID NO: 370746 - DNA, 15 bp, Homo sapiens
gacttccatatgttt

SEQ ID NO: 370747 - DNA, 15 bp, Homo sapiens
tgacttccatatgtt

SEQ ID NO: 370748 - DNA, 15 bp, Homo sapiens
atgacttccatatgt

SEQ ID NO: 370749 - DNA, 15 bp, Homo sapiens
aatgacttccatatg

SEQ ID NO: 370750 - DNA, 15 bp, Homo sapiens
aaatgacttccatat

SEQ ID NO: 370751 - DNA, 15 bp, Homo sapiens
aaaatgacttccata

SEQ ID NO: 370752 - DNA, 15 bp, Homo sapiens
aaaaatgacttccat

SEQ ID NO: 370753 - DNA, 15 bp, Homo sapiens
taaaaatgacttcca

SEQ ID NO: 370754 - DNA, 15 bp, Homo sapiens
ctaaaaatgacttcc

SEQ ID NO: 370755 - DNA, 15 bp, Homo sapiens
gctaaaaatgacttc

SEQ ID NO: 370756 - DNA, 15 bp, Homo sapiens
tgctaaaaatgactt

SEQ ID NO: 370757 - DNA, 15 bp, Homo sapiens
gtgctaaaaatgact

SEQ ID NO: 370758 - DNA, 15 bp, Homo sapiens
tgtgctaaaaatgac

SEQ ID NO: 370759 - DNA, 15 bp, Homo sapiens
ttgtgctaaaaatga

SEQ ID NO: 370760 - DNA, 15 bp, Homo sapiens
tttgtgctaaaaatg

SEQ ID NO: 370761 - DNA, 15 bp, Homo sapiens
ttttgtgctaaaaat

SEQ ID NO: 370762 - DNA, 15 bp, Homo sapiens
gttttgtgctaaaaa

SEQ ID NO: 370763 - DNA, 15 bp, Homo sapiens
agttttgtgctaaaa

SEQ ID NO: 370764 - DNA, 15 bp, Homo sapiens
aagttttgtgctaaa

SEQ ID NO: 370765 - DNA, 15 bp, Homo sapiens
caagttttgtgctaa

SEQ ID NO: 370766 - DNA, 15 bp, Homo sapiens
gcaagttttgtgcta

SEQ ID NO: 370767 - DNA, 15 bp, Homo sapiens
ggcaagttttgtgct

SEQ ID NO: 370768 - DNA, 15 bp, Homo sapiens
aggcaagttttgtgc

SEQ ID NO: 370769 - DNA, 15 bp, Homo sapiens
gaggcaagttttgtg

SEQ ID NO: 370770 - DNA, 15 bp, Homo sapiens
ggaggcaagttttgt

SEQ ID NO: 370771 - DNA, 15 bp, Homo sapiens
gggaggcaagttttg

SEQ ID NO: 370772 - DNA, 15 bp, Homo sapiens
tgggaggcaagtttt

SEQ ID NO: 370773 - DNA, 15 bp, Homo sapiens
atgggaggcaagttt

SEQ ID NO: 370774 - DNA, 15 bp, Homo sapiens
catgggaggcaagtt

SEQ ID NO: 370775 - DNA, 15 bp, Homo sapiens
ccatgggaggcaagt

SEQ ID NO: 370776 - DNA, 15 bp, Homo sapiens
gccatgggaggcaag

SEQ ID NO: 370777 - DNA, 15 bp, Homo sapiens
ggccatgggaggcaa

SEQ ID NO: 370778 - DNA, 15 bp, Homo sapiens
tggccatgggaggca

SEQ ID NO: 370779 - DNA, 15 bp, Homo sapiens
atggccatgggaggc

SEQ ID NO: 370780 - DNA, 15 bp, Homo sapiens
catggccatgggagg

SEQ ID NO: 370781 - DNA, 15 bp, Homo sapiens
tcatggccatgggag

SEQ ID NO: 370782 - DNA, 15 bp, Homo sapiens
atcatggccatggga

SEQ ID NO: 370783 - DNA, 15 bp, Homo sapiens
gatcatggccatggg

SEQ ID NO: 370784 - DNA, 15 bp, Homo sapiens
tgatcatggccatgg

SEQ ID NO: 370785 - DNA, 15 bp, Homo sapiens
ttgatcatggccatg

SEQ ID NO: 370786 - DNA, 15 bp, Homo sapiens
gttgatcatggccat

SEQ ID NO: 370787 - DNA, 15 bp, Homo sapiens
tgttgatcatggcca

SEQ ID NO: 370788 - DNA, 15 bp, Homo sapiens
ttgttgatcatggcc

SEQ ID NO: 370789 - DNA, 15 bp, Homo sapiens
tttgttgatcatggc

SEQ ID NO: 370790 - DNA, 15 bp, Homo sapiens
ctttgttgatcatgg

SEQ ID NO: 370791 - DNA, 15 bp, Homo sapiens
actttgttgatcatg

SEQ ID NO: 370792 - DNA, 15 bp, Homo sapiens
cactttgttgatcat

SEQ ID NO: 370793 - DNA, 15 bp, Homo sapiens
gcactttgttgatca

SEQ ID NO: 370794 - DNA, 15 bp, Homo sapiens
agcactttgttgatc

SEQ ID NO: 370795 - DNA, 15 bp, Homo sapiens
tagcactttgttgat

SEQ ID NO: 370796 - DNA, 15 bp, Homo sapiens
atagcactttgttga

SEQ ID NO: 370797 - DNA, 15 bp, Homo sapiens
catagcactttgttg

SEQ ID NO: 370798 - DNA, 15 bp, Homo sapiens
ccatagcactttgtt

SEQ ID NO: 370799 - DNA, 15 bp, Homo sapiens
cccatagcactttgt

SEQ ID NO: 370800 - DNA, 15 bp, Homo sapiens
acccatagcactttg

SEQ ID NO: 370801 - DNA, 15 bp, Homo sapiens
tacccatagcacttt

SEQ ID NO: 370802 - DNA, 15 bp, Homo sapiens
gtacccatagcactt

SEQ ID NO: 370803 - DNA, 15 bp, Homo sapiens
tgtacccatagcact

SEQ ID NO: 370804 - DNA, 15 bp, Homo sapiens
atgtacccatagcac

SEQ ID NO: 370805 - DNA, 15 bp, Homo sapiens
catgtacccatagca

SEQ ID NO: 370806 - DNA, 15 bp, Homo sapiens
ccatgtacccatagc

SEQ ID NO: 370807 - DNA, 15 bp, Homo sapiens
gccatgtacccatag

SEQ ID NO: 370808 - DNA, 15 bp, Homo sapiens
agccatgtacccata

SEQ ID NO: 370809 - DNA, 15 bp, Homo sapiens
tagccatgtacccat

SEQ ID NO: 370810 - DNA, 15 bp, Homo sapiens
ttagccatgtaccca

SEQ ID NO: 370811 - DNA, 15 bp, Homo sapiens
tttagccatgtaccc

SEQ ID NO: 370812 - DNA, 15 bp, Homo sapiens
ctttagccatgtacc

SEQ ID NO: 370813 - DNA, 15 bp, Homo sapiens
tctttagccatgtac

SEQ ID NO: 370814 - DNA, 15 bp, Homo sapiens
ttctttagccatgta

SEQ ID NO: 370815 - DNA, 15 bp, Homo sapiens
attctttagccatgt

SEQ ID NO: 370816 - DNA, 15 bp, Homo sapiens
gattctttagccatg

SEQ ID NO: 370817 - DNA, 15 bp, Homo sapiens
tgattctttagccat

SEQ ID NO: 370818 - DNA, 15 bp, Homo sapiens
ctgattctttagcca

SEQ ID NO: 370819 - DNA, 15 bp, Homo sapiens
cctgattctttagcc

SEQ ID NO: 370820 - DNA, 15 bp, Homo sapiens
tcctgattctttagc

SEQ ID NO: 370821 - DNA, 15 bp, Homo sapiens
ctcctgattctttag

SEQ ID NO: 370822 - DNA, 15 bp, Homo sapiens
gctcctgattcttta

SEQ ID NO: 370823 - DNA, 15 bp, Homo sapiens
ggctcctgattcttt

SEQ ID NO: 370824 - DNA, 15 bp, Homo sapiens
gggctcctgattctt

SEQ ID NO: 370825 - DNA, 15 bp, Homo sapiens
tgggctcctgattct

SEQ ID NO: 370826 - DNA, 15 bp, Homo sapiens
atgggctcctgattc

SEQ ID NO: 370827 - DNA, 15 bp, Homo sapiens
gatgggctcctgatt

SEQ ID NO: 370828 - DNA, 15 bp, Homo sapiens
agatgggctcctgat

SEQ ID NO: 370829 - DNA, 15 bp, Homo sapiens
cagatgggctcctga

SEQ ID NO: 370830 - DNA, 15 bp, Homo sapiens
ccagatgggctcctg

SEQ ID NO: 370831 - DNA, 15 bp, Homo sapiens
accagatgggctcct

SEQ ID NO: 370832 - DNA, 15 bp, Homo sapiens
caccagatgggctcc

SEQ ID NO: 370833 - DNA, 15 bp, Homo sapiens
tcaccagatgggctc

SEQ ID NO: 370834 - DNA, 15 bp, Homo sapiens
atcaccagatgggct

SEQ ID NO: 370835 - DNA, 15 bp, Homo sapiens
tatcaccagatgggc

SEQ ID NO: 370836 - DNA, 15 bp, Homo sapiens
ctatcaccagatggg

SEQ ID NO: 370837 - DNA, 15 bp, Homo sapiens
gctatcaccagatgg

SEQ ID NO: 370838 - DNA, 15 bp, Homo sapiens
agctatcaccagatg

SEQ ID NO: 370839 - DNA, 15 bp, Homo sapiens
aagctatcaccagat

SEQ ID NO: 370840 - DNA, 15 bp, Homo sapiens
aaagctatcaccaga

SEQ ID NO: 370841 - DNA, 15 bp, Homo sapiens
caaagctatcaccag

SEQ ID NO: 370842 - DNA, 15 bp, Homo sapiens
ccaaagctatcacca

SEQ ID NO: 370843 - DNA, 15 bp, Homo sapiens
gccaaagctatcacc

SEQ ID NO: 370844 - DNA, 15 bp, Homo sapiens
agccaaagctatcac

SEQ ID NO: 370845 - DNA, 15 bp, Homo sapiens
cagccaaagctatca

SEQ ID NO: 370846 - DNA, 15 bp, Homo sapiens
acagccaaagctatc

SEQ ID NO: 370847 - DNA, 15 bp, Homo sapiens
cacagccaaagctat

SEQ ID NO: 370848 - DNA, 15 bp, Homo sapiens
ccacagccaaagcta

SEQ ID NO: 370849 - DNA, 15 bp, Homo sapiens
tccacagccaaagct

SEQ ID NO: 370850 - DNA, 15 bp, Homo sapiens
atccacagccaaagc

SEQ ID NO: 370851 - DNA, 15 bp, Homo sapiens
catccacagccaaag

SEQ ID NO: 370852 - DNA, 15 bp, Homo sapiens
tcatccacagccaaa

SEQ ID NO: 370853 - DNA, 15 bp, Homo sapiens
atcatccacagccaa

SEQ ID NO: 370854 - DNA, 15 bp, Homo sapiens
aatcatccacagcca

SEQ ID NO: 370855 - DNA, 15 bp, Homo sapiens
aaatcatccacagcc

SEQ ID NO: 370856 - DNA, 15 bp, Homo sapiens
taaatcatccacagc

SEQ ID NO: 370857 - DNA, 15 bp, Homo sapiens
tttaaatcatccaca

SEQ ID NO: 370858 - DNA, 15 bp, Homo sapiens
gtttaaatcatccac

SEQ ID NO: 370859 - DNA, 15 bp, Homo sapiens
agtttaaatcatcca

SEQ ID NO: 370860 - DNA, 15 bp, Homo sapiens
aagtttaaatcatcc

SEQ ID NO: 370861 - DNA, 15 bp, Homo sapiens
gaagtttaaatcatc

SEQ ID NO: 370862 - DNA, 15 bp, Homo sapiens
tgaagtttaaatcat

SEQ ID NO: 370863 - DNA, 15 bp, Homo sapiens
ctgaagtttaaatca

SEQ ID NO: 370864 - DNA, 15 bp, Homo sapiens
actgaagtttaaatc

SEQ ID NO: 370865 - DNA, 15 bp, Homo sapiens
gactgaagtttaaat

SEQ ID NO: 370866 - DNA, 15 bp, Homo sapiens
agactgaagtttaaa

SEQ ID NO: 370867 - DNA, 15 bp, Homo sapiens
aagactgaagtttaa

SEQ ID NO: 370868 - DNA, 15 bp, Homo sapiens
aaagactgaagttta

SEQ ID NO: 370869 - DNA, 15 bp, Homo sapiens
aaaagactgaagttt

SEQ ID NO: 370870 - DNA, 15 bp, Homo sapiens
gaaaagactgaagtt

SEQ ID NO: 370871 - DNA, 15 bp, Homo sapiens
ggaaaagactgaagt

SEQ ID NO: 370872 - DNA, 15 bp, Homo sapiens
aggaaaagactgaag

SEQ ID NO: 370873 - DNA, 15 bp, Homo sapiens
caggaaaagactgaa

SEQ ID NO: 370874 - DNA, 15 bp, Homo sapiens
tcaggaaaagactga

SEQ ID NO: 370875 - DNA, 15 bp, Homo sapiens
atcaggaaaagactg

SEQ ID NO: 370876 - DNA, 15 bp, Homo sapiens
aatcaggaaaagact

SEQ ID NO: 370877 - DNA, 15 bp, Homo sapiens
caatcaggaaaagac

SEQ ID NO: 370878 - DNA, 15 bp, Homo sapiens
tcaatcaggaaaaga

SEQ ID NO: 370879 - DNA, 15 bp, Homo sapiens
ctcaatcaggaaaag

SEQ ID NO: 370880 - DNA, 15 bp, Homo sapiens
cctcaatcaggaaaa

SEQ ID NO: 370881 - DNA, 15 bp, Homo sapiens
tcctcaatcaggaaa

SEQ ID NO: 370882 - DNA, 15 bp, Homo sapiens
gtcctcaatcaggaa

SEQ ID NO: 370883 - DNA, 15 bp, Homo sapiens
agtcctcaatcagga

SEQ ID NO: 370884 - DNA, 15 bp, Homo sapiens
aagtcctcaatcagg

SEQ ID NO: 370885 - DNA, 15 bp, Homo sapiens
gaagtcctcaatcag

SEQ ID NO: 370886 - DNA, 15 bp, Homo sapiens
agaagtcctcaatca

SEQ ID NO: 370887 - DNA, 15 bp, Homo sapiens
gagaagtcctcaatc

SEQ ID NO: 370888 - DNA, 15 bp, Homo sapiens
tgagaagtcctcaat

SEQ ID NO: 370889 - DNA, 15 bp, Homo sapiens
atgagaagtcctcaa

SEQ ID NO: 370890 - DNA, 15 bp, Homo sapiens
aatgagaagtcctca

SEQ ID NO: 370891 - DNA, 15 bp, Homo sapiens
gaatgagaagtcctc

SEQ ID NO: 370892 - DNA, 15 bp, Homo sapiens
ggaatgagaagtcct

SEQ ID NO: 370893 - DNA, 15 bp, Homo sapiens
tggaatgagaagtcc

SEQ ID NO: 370894 - DNA, 15 bp, Homo sapiens
atggaatgagaagtc

SEQ ID NO: 370895 - DNA, 15 bp, Homo sapiens
catggaatgagaagt

SEQ ID NO: 370896 - DNA, 15 bp, Homo sapiens
acatggaatgagaag

SEQ ID NO: 370897 - DNA, 15 bp, Homo sapiens
gacatggaatgagaa

SEQ ID NO: 370898 - DNA, 15 bp, Homo sapiens
agacatggaatgaga

SEQ ID NO: 370899 - DNA, 15 bp, Homo sapiens
gagacatggaatgag

SEQ ID NO: 370900 - DNA, 15 bp, Homo sapiens
agagacatggaatga

SEQ ID NO: 370901 - DNA, 15 bp, Homo sapiens
tagagacatggaatg

SEQ ID NO: 370902 - DNA, 15 bp, Homo sapiens
ttagagacatggaat

SEQ ID NO: 370903 - DNA, 15 bp, Homo sapiens
attagagacatggaa

SEQ ID NO: 370904 - DNA, 15 bp, Homo sapiens
cattagagacatgga

SEQ ID NO: 370905 - DNA, 15 bp, Homo sapiens
ccattagagacatgg

SEQ ID NO: 370906 - DNA, 15 bp, Homo sapiens
accattagagacatg

SEQ ID NO: 370907 - DNA, 15 bp, Homo sapiens
caccattagagacat

SEQ ID NO: 370908 - DNA, 15 bp, Homo sapiens
tcaccattagagaca

SEQ ID NO: 370909 - DNA, 15 bp, Homo sapiens
atcaccattagagac

SEQ ID NO: 370910 - DNA, 15 bp, Homo sapiens
tatcaccattagaga

SEQ ID NO: 370911 - DNA, 15 bp, Homo sapiens
atatcaccattagag

SEQ ID NO: 370912 - DNA, 15 bp, Homo sapiens
aatatcaccattaga

SEQ ID NO: 370913 - DNA, 15 bp, Homo sapiens
gaatatcaccattag

SEQ ID NO: 370914 - DNA, 15 bp, Homo sapiens
agaatatcaccatta

SEQ ID NO: 370915 - DNA, 15 bp, Homo sapiens
aagaatatcaccatt

SEQ ID NO: 370916 - DNA, 15 bp, Homo sapiens
taagaatatcaccat

SEQ ID NO: 370917 - DNA, 15 bp, Homo sapiens
ctaagaatatcacca

SEQ ID NO: 370918 - DNA, 15 bp, Homo sapiens
actaagaatatcacc

SEQ ID NO: 370919 - DNA, 15 bp, Homo sapiens
gactaagaatatcac

SEQ ID NO: 370920 - DNA, 15 bp, Homo sapiens
tgactaagaatatca

SEQ ID NO: 370921 - DNA, 15 bp, Homo sapiens
atgactaagaatatc

SEQ ID NO: 370922 - DNA, 15 bp, Homo sapiens
gatgactaagaatat

SEQ ID NO: 370923 - DNA, 15 bp, Homo sapiens
agatgactaagaata

SEQ ID NO: 370924 - DNA, 15 bp, Homo sapiens
aagatgactaagaat

SEQ ID NO: 370925 - DNA, 15 bp, Homo sapiens
aaagatgactaagaa

SEQ ID NO: 370926 - DNA, 15 bp, Homo sapiens
aaaagatgactaaga

SEQ ID NO: 370927 - DNA, 15 bp, Homo sapiens
gaaaagatgactaag

SEQ ID NO: 370928 - DNA, 15 bp, Homo sapiens
agaaaagatgactaa

SEQ ID NO: 370929 - DNA, 15 bp, Homo sapiens
cagaaaagatgacta

SEQ ID NO: 370930 - DNA, 15 bp, Homo sapiens
ccagaaaagatgact

SEQ ID NO: 370931 - DNA, 15 bp, Homo sapiens
gccagaaaagatgac

SEQ ID NO: 370932 - DNA, 15 bp, Homo sapiens
tgccagaaaagatga

SEQ ID NO: 370933 - DNA, 15 bp, Homo sapiens
ttgccagaaaagatg

SEQ ID NO: 370934 - DNA, 15 bp, Homo sapiens
tttgccagaaaagat

SEQ ID NO: 370935 - DNA, 15 bp, Homo sapiens
ttttgccagaaaaga

SEQ ID NO: 370936 - DNA, 15 bp, Homo sapiens
attttgccagaaaag

SEQ ID NO: 370937 - DNA, 15 bp, Homo sapiens
tattttgccagaaaa

SEQ ID NO: 370938 - DNA, 15 bp, Homo sapiens
ttattttgccagaaa

SEQ ID NO: 370939 - DNA, 15 bp, Homo sapiens
cttattttgccagaa

SEQ ID NO: 370940 - DNA, 15 bp, Homo sapiens
acttattttgccaga

SEQ ID NO: 370941 - DNA, 15 bp, Homo sapiens
cacttattttgccag

SEQ ID NO: 370942 - DNA, 15 bp, Homo sapiens
ccacttattttgcca

SEQ ID NO: 370943 - DNA, 15 bp, Homo sapiens
accacttattttgcc

SEQ ID NO: 370944 - DNA, 15 bp, Homo sapiens
aaccacttattttgc

SEQ ID NO: 370945 - DNA, 15 bp, Homo sapiens
caaccacttattttg

SEQ ID NO: 370946 - DNA, 15 bp, Homo sapiens
acaaccacttatttt

SEQ ID NO: 370947 - DNA, 15 bp, Homo sapiens
aacaaccacttattt

SEQ ID NO: 370948 - DNA, 15 bp, Homo sapiens
aaacaaccacttatt

SEQ ID NO: 370949 - DNA, 15 bp, Homo sapiens
gaaacaaccacttat

SEQ ID NO: 370950 - DNA, 15 bp, Homo sapiens
agaaacaaccactta

SEQ ID NO: 370951 - DNA, 15 bp, Homo sapiens
tagaaacaaccactt

SEQ ID NO: 370952 - DNA, 15 bp, Homo sapiens
ttagaaacaaccact

SEQ ID NO: 370953 - DNA, 15 bp, Homo sapiens
tttagaaacaaccac

SEQ ID NO: 370954 - DNA, 15 bp, Homo sapiens
ttttagaaacaacca

SEQ ID NO: 370955 - DNA, 15 bp, Homo sapiens
attttagaaacaacc

SEQ ID NO: 370956 - DNA, 15 bp, Homo sapiens
aattttagaaacaac

SEQ ID NO: 370957 - DNA, 15 bp, Homo sapiens
taattttagaaacaa

SEQ ID NO: 370958 - DNA, 15 bp, Homo sapiens
ttaattttagaaaca

SEQ ID NO: 370959 - DNA, 15 bp, Homo sapiens
gttaattttagaaac

SEQ ID NO: 370960 - DNA, 15 bp, Homo sapiens
agttaattttagaaa

SEQ ID NO: 370961 - DNA, 15 bp, Homo sapiens
aagttaattttagaa

SEQ ID NO: 370962 - DNA, 15 bp, Homo sapiens
gaagttaattttaga

SEQ ID NO: 370963 - DNA, 15 bp, Homo sapiens
ggaagttaattttag

SEQ ID NO: 370964 - DNA, 15 bp, Homo sapiens
gggaagttaatttta

SEQ ID NO: 370965 - DNA, 15 bp, Homo sapiens
tgggaagttaatttt

SEQ ID NO: 370966 - DNA, 15 bp, Homo sapiens
ttgggaagttaattt

SEQ ID NO: 370967 - DNA, 15 bp, Homo sapiens
cttgggaagttaatt

SEQ ID NO: 370968 - DNA, 15 bp, Homo sapiens
acttgggaagttaat

SEQ ID NO: 370969 - DNA, 15 bp, Homo sapiens
cacttgggaagttaa

SEQ ID NO: 370970 - DNA, 15 bp, Homo sapiens
acacttgggaagtta

SEQ ID NO: 370971 - DNA, 15 bp, Homo sapiens
aacacttgggaagtt

SEQ ID NO: 370972 - DNA, 15 bp, Homo sapiens
taacacttgggaagt

SEQ ID NO: 370973 - DNA, 15 bp, Homo sapiens
ctaacacttgggaag

SEQ ID NO: 370974 - DNA, 15 bp, Homo sapiens
actaacacttgggaa

SEQ ID NO: 370975 - DNA, 15 bp, Homo sapiens
aactaacacttggga

SEQ ID NO: 370976 - DNA, 15 bp, Homo sapiens
aaactaacacttggg

SEQ ID NO: 370977 - DNA, 15 bp, Homo sapiens
taaactaacacttgg

SEQ ID NO: 370978 - DNA, 15 bp, Homo sapiens
ttaaactaacacttg

SEQ ID NO: 370979 - DNA, 15 bp, Homo sapiens
gttaaactaacactt

SEQ ID NO: 370980 - DNA, 15 bp, Homo sapiens
agttaaactaacact

SEQ ID NO: 370981 - DNA, 15 bp, Homo sapiens
tagttaaactaacac

SEQ ID NO: 370982 - DNA, 15 bp, Homo sapiens
ttagttaaactaaca

SEQ ID NO: 370983 - DNA, 15 bp, Homo sapiens
attagttaaactaac

SEQ ID NO: 370984 - DNA, 15 bp, Homo sapiens
cattagttaaactaa

SEQ ID NO: 370985 - DNA, 15 bp, Homo sapiens
tcattagttaaacta

SEQ ID NO: 370986 - DNA, 15 bp, Homo sapiens
ttcattagttaaact

SEQ ID NO: 370987 - DNA, 15 bp, Homo sapiens
cttcattagttaaac

SEQ ID NO: 370988 - DNA, 15 bp, Homo sapiens
ccttcattagttaaa

SEQ ID NO: 370989 - DNA, 15 bp, Homo sapiens
cccttcattagttaa

SEQ ID NO: 370990 - DNA, 15 bp, Homo sapiens
tcccttcattagtta

SEQ ID NO: 370991 - DNA, 15 bp, Homo sapiens
ctcccttcattagtt

SEQ ID NO: 370992 - DNA, 15 bp, Homo sapiens
actcccttcattagt

SEQ ID NO: 370993 - DNA, 15 bp, Homo sapiens
cactcccttcattag

SEQ ID NO: 370994 - DNA, 15 bp, Homo sapiens
acactcccttcatta

SEQ ID NO: 370995 - DNA, 15 bp, Homo sapiens
aacactcccttcatt

SEQ ID NO: 370996 - DNA, 15 bp, Homo sapiens
aaacactcccttcat

SEQ ID NO: 370997 - DNA, 15 bp, Homo sapiens
gaaacactcccttca

SEQ ID NO: 370998 - DNA, 15 bp, Homo sapiens
ggaaacactcccttc

SEQ ID NO: 370999 - DNA, 15 bp, Homo sapiens
gggaaacactccctt

SEQ ID NO: 371000 - DNA, 15 bp, Homo sapiens
tgggaaacactccct

SEQ ID NO: 371001 - DNA, 15 bp, Homo sapiens
ctgggaaacactccc

SEQ ID NO: 371002 - DNA, 15 bp, Homo sapiens
actgggaaacactcc

SEQ ID NO: 371003 - DNA, 15 bp, Homo sapiens
aactgggaaacactc

SEQ ID NO: 371004 - DNA, 15 bp, Homo sapiens
aaactgggaaacact

SEQ ID NO: 371005 - DNA, 15 bp, Homo sapiens
gaaactgggaaacac

SEQ ID NO: 371006 - DNA, 15 bp, Homo sapiens
tgaaactgggaaaca

SEQ ID NO: 371007 - DNA, 15 bp, Homo sapiens
gtgaaactgggaaac

SEQ ID NO: 371008 - DNA, 15 bp, Homo sapiens
agtgaaactgggaaa

SEQ ID NO: 371009 - DNA, 15 bp, Homo sapiens
cagtgaaactgggaa

SEQ ID NO: 371010 - DNA, 15 bp, Homo sapiens
acagtgaaactggga

SEQ ID NO: 371011 - DNA, 15 bp, Homo sapiens
aacagtgaaactggg

SEQ ID NO: 371012 - DNA, 15 bp, Homo sapiens
gaacagtgaaactgg

SEQ ID NO: 371013 - DNA, 15 bp, Homo sapiens
agaacagtgaaactg

SEQ ID NO: 371014 - DNA, 15 bp, Homo sapiens
gagaacagtgaaact

SEQ ID NO: 371015 - DNA, 15 bp, Homo sapiens
agagaacagtgaaac

SEQ ID NO: 371016 - DNA, 15 bp, Homo sapiens
tagagaacagtgaaa

SEQ ID NO: 371017 - DNA, 15 bp, Homo sapiens
ctagagaacagtgaa

SEQ ID NO: 371018 - DNA, 15 bp, Homo sapiens
gctagagaacagtga

SEQ ID NO: 371019 - DNA, 15 bp, Homo sapiens
agctagagaacagtg

SEQ ID NO: 371020 - DNA, 15 bp, Homo sapiens
cagctagagaacagt

SEQ ID NO: 371021 - DNA, 15 bp, Homo sapiens
acagctagagaacag

SEQ ID NO: 371022 - DNA, 15 bp, Homo sapiens
tacagctagagaaca

SEQ ID NO: 371023 - DNA, 15 bp, Homo sapiens
ctacagctagagaac

SEQ ID NO: 371024 - DNA, 15 bp, Homo sapiens
tctacagctagagaa

SEQ ID NO: 371025 - DNA, 15 bp, Homo sapiens
atctacagctagaga

SEQ ID NO: 371026 - DNA, 15 bp, Homo sapiens
gatctacagctagag

SEQ ID NO: 371027 - DNA, 15 bp, Homo sapiens
agatctacagctaga

SEQ ID NO: 371028 - DNA, 15 bp, Homo sapiens
gagatctacagctag

SEQ ID NO: 371029 - DNA, 15 bp, Homo sapiens
agagatctacagcta

SEQ ID NO: 371030 - DNA, 15 bp, Homo sapiens
cagagatctacagct

SEQ ID NO: 371031 - DNA, 15 bp, Homo sapiens
ccagagatctacagc

SEQ ID NO: 371032 - DNA, 15 bp, Homo sapiens
tccagagatctacag

SEQ ID NO: 371033 - DNA, 15 bp, Homo sapiens
ctccagagatctaca

SEQ ID NO: 371034 - DNA, 15 bp, Homo sapiens
actccagagatctac

SEQ ID NO: 371035 - DNA, 15 bp, Homo sapiens
tactccagagatcta

SEQ ID NO: 371036 - DNA, 15 bp, Homo sapiens
atactccagagatct

SEQ ID NO: 371037 - DNA, 15 bp, Homo sapiens
tatactccagagatc

SEQ ID NO: 371038 - DNA, 15 bp, Homo sapiens
atatactccagagat

SEQ ID NO: 371039 - DNA, 15 bp, Homo sapiens
aatatactccagaga

SEQ ID NO: 371040 - DNA, 15 bp, Homo sapiens
gaatatactccagag

SEQ ID NO: 371041 - DNA, 15 bp, Homo sapiens
ggaatatactccaga

SEQ ID NO: 371042 - DNA, 15 bp, Homo sapiens
tggaatatactccag

SEQ ID NO: 371043 - DNA, 15 bp, Homo sapiens
atggaatatactcca

SEQ ID NO: 371044 - DNA, 15 bp, Homo sapiens
catggaatatactcc

SEQ ID NO: 371045 - DNA, 15 bp, Homo sapiens
acatggaatatactc

SEQ ID NO: 371046 - DNA, 15 bp, Homo sapiens
cacatggaatatact

SEQ ID NO: 371047 - DNA, 15 bp, Homo sapiens
gcacatggaatatac

SEQ ID NO: 371048 - DNA, 15 bp, Homo sapiens
ggcacatggaatata

SEQ ID NO: 371049 - DNA, 15 bp, Homo sapiens
tggcacatggaatat

SEQ ID NO: 371050 - DNA, 15 bp, Homo sapiens
ctggcacatggaata

SEQ ID NO: 371051 - DNA, 15 bp, Homo sapiens
actggcacatggaat

SEQ ID NO: 371052 - DNA, 15 bp, Homo sapiens
cactggcacatggaa

SEQ ID NO: 371053 - DNA, 15 bp, Homo sapiens
acactggcacatgga

SEQ ID NO: 371054 - DNA, 15 bp, Homo sapiens
cacactggcacatgg

SEQ ID NO: 371055 - DNA, 15 bp, Homo sapiens
acacactggcacatg

SEQ ID NO: 371056 - DNA, 15 bp, Homo sapiens
aacacactggcacat

SEQ ID NO: 371057 - DNA, 15 bp, Homo sapiens
gaacacactggcaca

SEQ ID NO: 371058 - DNA, 15 bp, Homo sapiens
tgaacacactggcac

SEQ ID NO: 371059 - DNA, 15 bp, Homo sapiens
gtgaacacactggca

SEQ ID NO: 371060 - DNA, 15 bp, Homo sapiens
tgtgaacacactggc

SEQ ID NO: 371061 - DNA, 15 bp, Homo sapiens
atgtgaacacactgg

SEQ ID NO: 371062 - DNA, 15 bp, Homo sapiens
catgtgaacacactg

SEQ ID NO: 371063 - DNA, 15 bp, Homo sapiens
gcatgtgaacacact

SEQ ID NO: 371064 - DNA, 15 bp, Homo sapiens
tgcatgtgaacacac

SEQ ID NO: 371065 - DNA, 15 bp, Homo sapiens
ctgcatgtgaacaca

SEQ ID NO: 371066 - DNA, 15 bp, Homo sapiens
tctgcatgtgaacac

SEQ ID NO: 371067 - DNA, 15 bp, Homo sapiens
ttctgcatgtgaaca

SEQ ID NO: 371068 - DNA, 15 bp, Homo sapiens
gttctgcatgtgaac

SEQ ID NO: 371069 - DNA, 15 bp, Homo sapiens
agttctgcatgtgaa

SEQ ID NO: 371070 - DNA, 15 bp, Homo sapiens
tagttctgcatgtga

SEQ ID NO: 371071 - DNA, 15 bp, Homo sapiens
ctagttctgcatgtg

SEQ ID NO: 371072 - DNA, 15 bp, Homo sapiens
cctagttctgcatgt

SEQ ID NO: 371073 - DNA, 15 bp, Homo sapiens
ccctagttctgcatg

SEQ ID NO: 371074 - DNA, 15 bp, Homo sapiens
gccctagttctgcat

SEQ ID NO: 371075 - DNA, 15 bp, Homo sapiens
cgccctagttctgca

SEQ ID NO: 371076 - DNA, 15 bp, Homo sapiens
acgccctagttctgc

SEQ ID NO: 371077 - DNA, 15 bp, Homo sapiens
aacgccctagttctg

SEQ ID NO: 371078 - DNA, 15 bp, Homo sapiens
caacgccctagttct

SEQ ID NO: 371079 - DNA, 15 bp, Homo sapiens
acaacgccctagttc

SEQ ID NO: 371080 - DNA, 15 bp, Homo sapiens
aacaacgccctagtt

SEQ ID NO: 371081 - DNA, 15 bp, Homo sapiens
aaacaacgccctagt

SEQ ID NO: 371082 - DNA, 15 bp, Homo sapiens
taaacaacgccctag

SEQ ID NO: 371083 - DNA, 15 bp, Homo sapiens
ttaaacaacgcccta

SEQ ID NO: 371084 - DNA, 15 bp, Homo sapiens
attaaacaacgccct

SEQ ID NO: 371085 - DNA, 15 bp, Homo sapiens
cattaaacaacgccc

SEQ ID NO: 371086 - DNA, 15 bp, Homo sapiens
acattaaacaacgcc

SEQ ID NO: 371087 - DNA, 15 bp, Homo sapiens
tacattaaacaacgc

SEQ ID NO: 371088 - DNA, 15 bp, Homo sapiens
ctacattaaacaacg

SEQ ID NO: 371089 - DNA, 15 bp, Homo sapiens
tctacattaaacaac

SEQ ID NO: 371090 - DNA, 15 bp, Homo sapiens
ctctacattaaacaa

SEQ ID NO: 371091 - DNA, 15 bp, Homo sapiens
tctctacattaaaca

SEQ ID NO: 371092 - DNA, 15 bp, Homo sapiens
ctctctacattaaac

SEQ ID NO: 371093 - DNA, 15 bp, Homo sapiens
tctctctacattaaa

SEQ ID NO: 371094 - DNA, 15 bp, Homo sapiens
gtctctctacattaa

SEQ ID NO: 371095 - DNA, 15 bp, Homo sapiens
agtctctctacatta

SEQ ID NO: 371096 - DNA, 15 bp, Homo sapiens
aagtctctctacatt

SEQ ID NO: 371097 - DNA, 15 bp, Homo sapiens
gaagtctctctacat

SEQ ID NO: 371098 - DNA, 15 bp, Homo sapiens
tgaagtctctctaca

SEQ ID NO: 371099 - DNA, 15 bp, Homo sapiens
ctgaagtctctctac

SEQ ID NO: 371100 - DNA, 15 bp, Homo sapiens
cctgaagtctctcta

SEQ ID NO: 371101 - DNA, 15 bp, Homo sapiens
acctgaagtctctct

SEQ ID NO: 371102 - DNA, 15 bp, Homo sapiens
cacctgaagtctctc

SEQ ID NO: 371103 - DNA, 15 bp, Homo sapiens
gcacctgaagtctct

SEQ ID NO: 371104 - DNA, 15 bp, Homo sapiens
agcacctgaagtctc

SEQ ID NO: 371105 - DNA, 15 bp, Homo sapiens
tagcacctgaagtct

SEQ ID NO: 371106 - DNA, 15 bp, Homo sapiens
gtagcacctgaagtc

SEQ ID NO: 371107 - DNA, 15 bp, Homo sapiens
ggtagcacctgaagt

SEQ ID NO: 371108 - DNA, 15 bp, Homo sapiens
gggtagcacctgaag

SEQ ID NO: 371109 - DNA, 15 bp, Homo sapiens
tgggtagcacctgaa

SEQ ID NO: 371110 - DNA, 15 bp, Homo sapiens
atgggtagcacctga

SEQ ID NO: 371111 - DNA, 15 bp, Homo sapiens
catgggtagcacctg

SEQ ID NO: 371112 - DNA, 15 bp, Homo sapiens
tcatgggtagcacct

SEQ ID NO: 371113 - DNA, 15 bp, Homo sapiens
atcatgggtagcacc

SEQ ID NO: 371114 - DNA, 15 bp, Homo sapiens
tatcatgggtagcac

SEQ ID NO: 371115 - DNA, 15 bp, Homo sapiens
atatcatgggtagca

SEQ ID NO: 371116 - DNA, 15 bp, Homo sapiens
tatatcatgggtagc

SEQ ID NO: 371117 - DNA, 15 bp, Homo sapiens
ctatatcatgggtag

SEQ ID NO: 371118 - DNA, 15 bp, Homo sapiens
actatatcatgggta

SEQ ID NO: 371119 - DNA, 15 bp, Homo sapiens
gactatatcatgggt

SEQ ID NO: 371120 - DNA, 15 bp, Homo sapiens
tgactatatcatggg

SEQ ID NO: 371121 - DNA, 15 bp, Homo sapiens
atgactatatcatgg

SEQ ID NO: 371122 - DNA, 15 bp, Homo sapiens
catgactatatcatg

SEQ ID NO: 371123 - DNA, 15 bp, Homo sapiens
ccatgactatatcat

SEQ ID NO: 371124 - DNA, 15 bp, Homo sapiens
gccatgactatatca

SEQ ID NO: 371125 - DNA, 15 bp, Homo sapiens
agccatgactatatc

SEQ ID NO: 371126 - DNA, 15 bp, Homo sapiens
cagccatgactatat

SEQ ID NO: 371127 - DNA, 15 bp, Homo sapiens
gcagccatgactata

SEQ ID NO: 371128 - DNA, 15 bp, Homo sapiens
tgcagccatgactat

SEQ ID NO: 371129 - DNA, 15 bp, Homo sapiens
ttgcagccatgacta

SEQ ID NO: 371130 - DNA, 15 bp, Homo sapiens
cttgcagccatgact

SEQ ID NO: 371131 - DNA, 15 bp, Homo sapiens
gcttgcagccatgac

SEQ ID NO: 371132 - DNA, 15 bp, Homo sapiens
tgcttgcagccatga

SEQ ID NO: 371133 - DNA, 15 bp, Homo sapiens
ttgcttgcagccatg

SEQ ID NO: 371134 - DNA, 15 bp, Homo sapiens
attgcttgcagccat

SEQ ID NO: 371135 - DNA, 15 bp, Homo sapiens
tattgcttgcagcca

SEQ ID NO: 371136 - DNA, 15 bp, Homo sapiens
ttattgcttgcagcc

SEQ ID NO: 371137 - DNA, 15 bp, Homo sapiens
attattgcttgcagc

SEQ ID NO: 371138 - DNA, 15 bp, Homo sapiens
cattattgcttgcag

SEQ ID NO: 371139 - DNA, 15 bp, Homo sapiens
ccattattgcttgca

SEQ ID NO: 371140 - DNA, 15 bp, Homo sapiens
cccattattgcttgc

SEQ ID NO: 371141 - DNA, 15 bp, Homo sapiens
tcccattattgcttg

SEQ ID NO: 371142 - DNA, 15 bp, Homo sapiens
ttcccattattgctt

SEQ ID NO: 371143 - DNA, 15 bp, Homo sapiens
cttcccattattgct

SEQ ID NO: 371144 - DNA, 15 bp, Homo sapiens
ccttcccattattgc

SEQ ID NO: 371145 - DNA, 15 bp, Homo sapiens
tccttcccattattg

SEQ ID NO: 371146 - DNA, 15 bp, Homo sapiens
ctccttcccattatt

SEQ ID NO: 371147 - DNA, 15 bp, Homo sapiens
tctccttcccattat

SEQ ID NO: 371148 - DNA, 15 bp, Homo sapiens
ctctccttcccatta

SEQ ID NO: 371149 - DNA, 15 bp, Homo sapiens
gctctccttcccatt

SEQ ID NO: 371150 - DNA, 15 bp, Homo sapiens
tgctctccttcccat

SEQ ID NO: 371151 - DNA, 15 bp, Homo sapiens
ttgctctccttccca

SEQ ID NO: 371152 - DNA, 15 bp, Homo sapiens
atcttgctctccttc

SEQ ID NO: 371153 - DNA, 15 bp, Homo sapiens
catcttgctctcctt

SEQ ID NO: 371154 - DNA, 15 bp, Homo sapiens
ccatcttgctctcct

SEQ ID NO: 371155 - DNA, 15 bp, Homo sapiens
accatcttgctctcc

SEQ ID NO: 371156 - DNA, 15 bp, Homo sapiens
gaccatcttgctctc

SEQ ID NO: 371157 - DNA, 15 bp, Homo sapiens
tgaccatcttgctct

SEQ ID NO: 371158 - DNA, 15 bp, Homo sapiens
ctgaccatcttgctc

SEQ ID NO: 371159 - DNA, 15 bp, Homo sapiens
tctgaccatcttgct

SEQ ID NO: 371160 - DNA, 15 bp, Homo sapiens
ctctgaccatcttgc

SEQ ID NO: 371161 - DNA, 15 bp, Homo sapiens
tctctgaccatcttg

SEQ ID NO: 371162 - DNA, 15 bp, Homo sapiens
atctctgaccatctt

SEQ ID NO: 371163 - DNA, 15 bp, Homo sapiens
aatctctgaccatct

SEQ ID NO: 371164 - DNA, 15 bp, Homo sapiens
caatctctgaccatc

SEQ ID NO: 371165 - DNA, 15 bp, Homo sapiens
ccaatctctgaccat

SEQ ID NO: 371166 - DNA, 15 bp, Homo sapiens
cccaatctctgacca

SEQ ID NO: 371167 - DNA, 15 bp, Homo sapiens
gcccaatctctgacc

SEQ ID NO: 371168 - DNA, 15 bp, Homo sapiens
ggcccaatctctgac

SEQ ID NO: 371169 - DNA, 15 bp, Homo sapiens
tggcccaatctctga

SEQ ID NO: 371170 - DNA, 15 bp, Homo sapiens
gtggcccaatctctg

SEQ ID NO: 371171 - DNA, 15 bp, Homo sapiens
tgtggcccaatctct

SEQ ID NO: 371172 - DNA, 15 bp, Homo sapiens
ttgtggcccaatctc

SEQ ID NO: 371173 - DNA, 15 bp, Homo sapiens
attgtggcccaatct

SEQ ID NO: 371174 - DNA, 15 bp, Homo sapiens
aattgtggcccaatc

SEQ ID NO: 371175 - DNA, 15 bp, Homo sapiens
aaattgtggcccaat

SEQ ID NO: 371176 - DNA, 15 bp, Homo sapiens
taaattgtggcccaa

SEQ ID NO: 371177 - DNA, 15 bp, Homo sapiens
ctaaattgtggccca

SEQ ID NO: 371178 - DNA, 15 bp, Homo sapiens
tctaaattgtggccc

SEQ ID NO: 371179 - DNA, 15 bp, Homo sapiens
gtctaaattgtggcc

SEQ ID NO: 371180 - DNA, 15 bp, Homo sapiens
ggtctaaattgtggc

SEQ ID NO: 371181 - DNA, 15 bp, Homo sapiens
aggtctaaattgtgg

SEQ ID NO: 371182 - DNA, 15 bp, Homo sapiens
caggtctaaattgtg

SEQ ID NO: 371183 - DNA, 15 bp, Homo sapiens
gcaggtctaaattgt

SEQ ID NO: 371184 - DNA, 15 bp, Homo sapiens
ggcaggtctaaattg

SEQ ID NO: 371185 - DNA, 15 bp, Homo sapiens
gggcaggtctaaatt

SEQ ID NO: 371186 - DNA, 15 bp, Homo sapiens
ggggcaggtctaaat

SEQ ID NO: 371187 - DNA, 15 bp, Homo sapiens
aggggcaggtctaaa

SEQ ID NO: 371188 - DNA, 15 bp, Homo sapiens
aaggggcaggtctaa

SEQ ID NO: 371189 - DNA, 15 bp, Homo sapiens
aaaggggcaggtcta

SEQ ID NO: 371190 - DNA, 15 bp, Homo sapiens
taaaggggcaggtct

SEQ ID NO: 371191 - DNA, 15 bp, Homo sapiens
ataaaggggcaggtc

SEQ ID NO: 371192 - DNA, 15 bp, Homo sapiens
gataaaggggcaggt

SEQ ID NO: 371193 - DNA, 15 bp, Homo sapiens
tgataaaggggcagg

SEQ ID NO: 371194 - DNA, 15 bp, Homo sapiens
ttgataaaggggcag

SEQ ID NO: 371195 - DNA, 15 bp, Homo sapiens
tttgataaaggggca

SEQ ID NO: 371196 - DNA, 15 bp, Homo sapiens
atttgataaaggggc

SEQ ID NO: 371197 - DNA, 15 bp, Homo sapiens
catttgataaagggg

SEQ ID NO: 371198 - DNA, 15 bp, Homo sapiens
gcatttgataaaggg

SEQ ID NO: 371199 - DNA, 15 bp, Homo sapiens
tgcatttgataaagg

SEQ ID NO: 371200 - DNA, 15 bp, Homo sapiens
ctgcatttgataaag

SEQ ID NO: 371201 - DNA, 15 bp, Homo sapiens
gctgcatttgataaa

SEQ ID NO: 371202 - DNA, 15 bp, Homo sapiens
agctgcatttgataa

SEQ ID NO: 371203 - DNA, 15 bp, Homo sapiens
tagctgcatttgata

SEQ ID NO: 371204 - DNA, 15 bp, Homo sapiens
atagctgcatttgat

SEQ ID NO: 371205 - DNA, 15 bp, Homo sapiens
catagctgcatttga

SEQ ID NO: 371206 - DNA, 15 bp, Homo sapiens
tcatagctgcatttg

SEQ ID NO: 371207 - DNA, 15 bp, Homo sapiens
ctcatagctgcattt

SEQ ID NO: 371208 - DNA, 15 bp, Homo sapiens
cctcatagctgcatt

SEQ ID NO: 371209 - DNA, 15 bp, Homo sapiens
tcctcatagctgcat

SEQ ID NO: 371210 - DNA, 15 bp, Homo sapiens
ttcctcatagctgca

SEQ ID NO: 371211 - DNA, 15 bp, Homo sapiens
attcctcatagctgc

SEQ ID NO: 371212 - DNA, 15 bp, Homo sapiens
cattcctcatagctg

SEQ ID NO: 371213 - DNA, 15 bp, Homo sapiens
gcattcctcatagct

SEQ ID NO: 371214 - DNA, 15 bp, Homo sapiens
cgcattcctcatagc

SEQ ID NO: 371215 - DNA, 15 bp, Homo sapiens
ccgcattcctcatag

SEQ ID NO: 371216 - DNA, 15 bp, Homo sapiens
accgcattcctcata

SEQ ID NO: 371217 - DNA, 15 bp, Homo sapiens
caccgcattcctcat

SEQ ID NO: 371218 - DNA, 15 bp, Homo sapiens
ccaccgcattcctca

SEQ ID NO: 371219 - DNA, 15 bp, Homo sapiens
tccaccgcattcctc

SEQ ID NO: 371220 - DNA, 15 bp, Homo sapiens
gtccaccgcattcct

SEQ ID NO: 371221 - DNA, 15 bp, Homo sapiens
tgtccaccgcattcc

SEQ ID NO: 371222 - DNA, 15 bp, Homo sapiens
gtgtccaccgcattc

SEQ ID NO: 371223 - DNA, 15 bp, Homo sapiens
ggtgtccaccgcatt

SEQ ID NO: 371224 - DNA, 15 bp, Homo sapiens
tggtgtccaccgcat

SEQ ID NO: 371225 - DNA, 15 bp, Homo sapiens
atggtgtccaccgca

SEQ ID NO: 371226 - DNA, 15 bp, Homo sapiens
gatggtgtccaccgc

SEQ ID NO: 371227 - DNA, 15 bp, Homo sapiens
ggatggtgtccaccg

SEQ ID NO: 371228 - DNA, 15 bp, Homo sapiens
aggatggtgtccacc

SEQ ID NO: 371229 - DNA, 15 bp, Homo sapiens
taggatggtgtccac

SEQ ID NO: 371230 - DNA, 15 bp, Homo sapiens
ataggatggtgtcca

SEQ ID NO: 371231 - DNA, 15 bp, Homo sapiens
cataggatggtgtcc

SEQ ID NO: 371232 - DNA, 15 bp, Homo sapiens
ccataggatggtgtc

SEQ ID NO: 371233 - DNA, 15 bp, Homo sapiens
gccataggatggtgt

SEQ ID NO: 371234 - DNA, 15 bp, Homo sapiens
tgccataggatggtg

SEQ ID NO: 371235 - DNA, 15 bp, Homo sapiens
atgccataggatggt

SEQ ID NO: 371236 - DNA, 15 bp, Homo sapiens
gatgccataggatgg

SEQ ID NO: 371237 - DNA, 15 bp, Homo sapiens
tgatgccataggatg

SEQ ID NO: 371238 - DNA, 15 bp, Homo sapiens
ttgatgccataggat

SEQ ID NO: 371239 - DNA, 15 bp, Homo sapiens
tttgatgccatagga

SEQ ID NO: 371240 - DNA, 15 bp, Homo sapiens
ctttgatgccatagg

SEQ ID NO: 371241 - DNA, 15 bp, Homo sapiens
cctttgatgccatag

SEQ ID NO: 371242 - DNA, 15 bp, Homo sapiens
gcctttgatgccata

SEQ ID NO: 371243 - DNA, 15 bp, Homo sapiens
ggcctttgatgccat

SEQ ID NO: 371244 - DNA, 15 bp, Homo sapiens
cggcctttgatgcca

SEQ ID NO: 371245 - DNA, 15 bp, Homo sapiens
ccggcctttgatgcc

SEQ ID NO: 371246 - DNA, 15 bp, Homo sapiens
tccggcctttgatgc

SEQ ID NO: 371247 - DNA, 15 bp, Homo sapiens
atccggcctttgatg

SEQ ID NO: 371248 - DNA, 15 bp, Homo sapiens
aatccggcctttgat

SEQ ID NO: 371249 - DNA, 15 bp, Homo sapiens
caatccggcctttga

SEQ ID NO: 371250 - DNA, 15 bp, Homo sapiens
gcaatccggcctttg

SEQ ID NO: 371251 - DNA, 15 bp, Homo sapiens
ggcaatccggccttt

SEQ ID NO: 371252 - DNA, 15 bp, Homo sapiens
aggcaatccggcctt

SEQ ID NO: 371253 - DNA, 15 bp, Homo sapiens
gaggcaatccggcct

SEQ ID NO: 371254 - DNA, 15 bp, Homo sapiens
tgaggcaatccggcc

SEQ ID NO: 371255 - DNA, 15 bp, Homo sapiens
atgaggcaatccggc

SEQ ID NO: 371256 - DNA, 15 bp, Homo sapiens
aatgaggcaatccgg

SEQ ID NO: 371257 - DNA, 15 bp, Homo sapiens
gaatgaggcaatccg

SEQ ID NO: 371258 - DNA, 15 bp, Homo sapiens
ggaatgaggcaatcc

SEQ ID NO: 371259 - DNA, 15 bp, Homo sapiens
aggaatgaggcaatc

SEQ ID NO: 371260 - DNA, 15 bp, Homo sapiens
aaggaatgaggcaat

SEQ ID NO: 371261 - DNA, 15 bp, Homo sapiens
aaaggaatgaggcaa

SEQ ID NO: 371262 - DNA, 15 bp, Homo sapiens
taaaggaatgaggca

SEQ ID NO: 371263 - DNA, 15 bp, Homo sapiens
ataaaggaatgaggc

SEQ ID NO: 371264 - DNA, 15 bp, Homo sapiens
cataaaggaatgagg

SEQ ID NO: 371265 - DNA, 15 bp, Homo sapiens
ccataaaggaatgag

SEQ ID NO: 371266 - DNA, 15 bp, Homo sapiens
tccataaaggaatga

SEQ ID NO: 371267 - DNA, 15 bp, Homo sapiens
ttccataaaggaatg

SEQ ID NO: 371268 - DNA, 15 bp, Homo sapiens
cttccataaaggaat

SEQ ID NO: 371269 - DNA, 15 bp, Homo sapiens
ccttccataaaggaa

SEQ ID NO: 371270 - DNA, 15 bp, Homo sapiens
accttccataaagga

SEQ ID NO: 371271 - DNA, 15 bp, Homo sapiens
caccttccataaagg

SEQ ID NO: 371272 - DNA, 15 bp, Homo sapiens
gcaccttccataaag

SEQ ID NO: 371273 - DNA, 15 bp, Homo sapiens
agcaccttccataaa

SEQ ID NO: 371274 - DNA, 15 bp, Homo sapiens
aagcaccttccataa

SEQ ID NO: 371275 - DNA, 15 bp, Homo sapiens
caagcaccttccata

SEQ ID NO: 371276 - DNA, 15 bp, Homo sapiens
tcaagcaccttccat

SEQ ID NO: 371277 - DNA, 15 bp, Homo sapiens
ttcaagcaccttcca

SEQ ID NO: 371278 - DNA, 15 bp, Homo sapiens
attcaagcaccttcc

SEQ ID NO: 371279 - DNA, 15 bp, Homo sapiens
aattcaagcaccttc

SEQ ID NO: 371280 - DNA, 15 bp, Homo sapiens
aaattcaagcacctt

SEQ ID NO: 371281 - DNA, 15 bp, Homo sapiens
gaaattcaagcacct

SEQ ID NO: 371282 - DNA, 15 bp, Homo sapiens
agaaattcaagcacc

SEQ ID NO: 371283 - DNA, 15 bp, Homo sapiens
gagaaattcaagcac

SEQ ID NO: 371284 - DNA, 15 bp, Homo sapiens
agagaaattcaagca

SEQ ID NO: 371285 - DNA, 15 bp, Homo sapiens
aagagaaattcaagc

SEQ ID NO: 371286 - DNA, 15 bp, Homo sapiens
gaagagaaattcaag

SEQ ID NO: 371287 - DNA, 15 bp, Homo sapiens
agaagagaaattcaa

SEQ ID NO: 371288 - DNA, 15 bp, Homo sapiens
gagaagagaaattca

SEQ ID NO: 371289 - DNA, 15 bp, Homo sapiens
agagaagagaaattc

SEQ ID NO: 371290 - DNA, 15 bp, Homo sapiens
gagagaagagaaatt

SEQ ID NO: 371291 - DNA, 15 bp, Homo sapiens
ggagagaagagaaat

SEQ ID NO: 371292 - DNA, 15 bp, Homo sapiens
tggagagaagagaaa

SEQ ID NO: 371293 - DNA, 15 bp, Homo sapiens
ttggagagaagagaa

SEQ ID NO: 371294 - DNA, 15 bp, Homo sapiens
tttggagagaagaga

SEQ ID NO: 371295 - DNA, 15 bp, Homo sapiens
ctttggagagaagag

SEQ ID NO: 371296 - DNA, 15 bp, Homo sapiens
gctttggagagaaga

SEQ ID NO: 371297 - DNA, 15 bp, Homo sapiens
ggctttggagagaag

SEQ ID NO: 371298 - DNA, 15 bp, Homo sapiens
tggctttggagagaa

SEQ ID NO: 371299 - DNA, 15 bp, Homo sapiens
atggctttggagaga

SEQ ID NO: 371300 - DNA, 15 bp, Homo sapiens
aatggctttggagag

SEQ ID NO: 371301 - DNA, 15 bp, Homo sapiens
aaatggctttggaga

SEQ ID NO: 371302 - DNA, 15 bp, Homo sapiens
taaatggctttggag

SEQ ID NO: 371303 - DNA, 15 bp, Homo sapiens
ttaaatggctttgga

SEQ ID NO: 371304 - DNA, 15 bp, Homo sapiens
cttaaatggctttgg

SEQ ID NO: 371305 - DNA, 15 bp, Homo sapiens
ccttaaatggctttg

SEQ ID NO: 371306 - DNA, 15 bp, Homo sapiens
tccttaaatggcttt

SEQ ID NO: 371307 - DNA, 15 bp, Homo sapiens
ttccttaaatggctt

SEQ ID NO: 371308 - DNA, 15 bp, Homo sapiens
attccttaaatggct

SEQ ID NO: 371309 - DNA, 15 bp, Homo sapiens
gattccttaaatggc

SEQ ID NO: 371310 - DNA, 15 bp, Homo sapiens
agattccttaaatgg

SEQ ID NO: 371311 - DNA, 15 bp, Homo sapiens
cagattccttaaatg

SEQ ID NO: 371312 - DNA, 15 bp, Homo sapiens
ccagattccttaaat

SEQ ID NO: 371313 - DNA, 15 bp, Homo sapiens
cccagattccttaaa

SEQ ID NO: 371314 - DNA, 15 bp, Homo sapiens
ccccagattccttaa

SEQ ID NO: 371315 - DNA, 15 bp, Homo sapiens
gccccagattcctta

SEQ ID NO: 371316 - DNA, 15 bp, Homo sapiens
tgccccagattcctt

SEQ ID NO: 371317 - DNA, 15 bp, Homo sapiens
ttgccccagattcct

SEQ ID NO: 371318 - DNA, 15 bp, Homo sapiens
attgccccagattcc

SEQ ID NO: 371319 - DNA, 15 bp, Homo sapiens
gattgccccagattc

SEQ ID NO: 371320 - DNA, 15 bp, Homo sapiens
ggattgccccagatt

SEQ ID NO: 371321 - DNA, 15 bp, Homo sapiens
aggattgccccagat

SEQ ID NO: 371322 - DNA, 15 bp, Homo sapiens
caggattgccccaga

SEQ ID NO: 371323 - DNA, 15 bp, Homo sapiens
gcaggattgccccag

SEQ ID NO: 371324 - DNA, 15 bp, Homo sapiens
ggcaggattgcccca

SEQ ID NO: 371325 - DNA, 15 bp, Homo sapiens
cggcaggattgcccc

SEQ ID NO: 371326 - DNA, 15 bp, Homo sapiens
acggcaggattgccc

SEQ ID NO: 371327 - DNA, 15 bp, Homo sapiens
aacggcaggattgcc

SEQ ID NO: 371328 - DNA, 15 bp, Homo sapiens
aaacggcaggattgc

SEQ ID NO: 371329 - DNA, 15 bp, Homo sapiens
gaaacggcaggattg

SEQ ID NO: 371330 - DNA, 15 bp, Homo sapiens
agaaacggcaggatt

SEQ ID NO: 371331 - DNA, 15 bp, Homo sapiens
cagaaacggcaggat

SEQ ID NO: 371332 - DNA, 15 bp, Homo sapiens
tcagaaacggcagga

SEQ ID NO: 371333 - DNA, 15 bp, Homo sapiens
gtcagaaacggcagg

SEQ ID NO: 371334 - DNA, 15 bp, Homo sapiens
ggtcagaaacggcag

SEQ ID NO: 371335 - DNA, 15 bp, Homo sapiens
tggtcagaaacggca

SEQ ID NO: 371336 - DNA, 15 bp, Homo sapiens
atggtcagaaacggc

SEQ ID NO: 371337 - DNA, 15 bp, Homo sapiens
tatggtcagaaacgg

SEQ ID NO: 371338 - DNA, 15 bp, Homo sapiens
ttatggtcagaaacg

SEQ ID NO: 371339 - DNA, 15 bp, Homo sapiens
attatggtcagaaac

SEQ ID NO: 371340 - DNA, 15 bp, Homo sapiens
aattatggtcagaaa

SEQ ID NO: 371341 - DNA, 15 bp, Homo sapiens
aaattatggtcagaa

SEQ ID NO: 371342 - DNA, 15 bp, Homo sapiens
aaaattatggtcaga

SEQ ID NO: 371343 - DNA, 15 bp, Homo sapiens
gaaaattatggtcag

SEQ ID NO: 371344 - DNA, 15 bp, Homo sapiens
ggaaaattatggtca

SEQ ID NO: 371345 - DNA, 15 bp, Homo sapiens
gggaaaattatggtc

SEQ ID NO: 371346 - DNA, 15 bp, Homo sapiens
tgggaaaattatggt

SEQ ID NO: 371347 - DNA, 15 bp, Homo sapiens
atgggaaaattatgg

SEQ ID NO: 371348 - DNA, 15 bp, Homo sapiens
atatgggaaaattat

SEQ ID NO: 371349 - DNA, 15 bp, Homo sapiens
gatatgggaaaatta

SEQ ID NO: 371350 - DNA, 15 bp, Homo sapiens
tgatatgggaaaatt

SEQ ID NO: 371351 - DNA, 15 bp, Homo sapiens
ctgatatgggaaaat

SEQ ID NO: 371352 - DNA, 15 bp, Homo sapiens
actgatatgggaaaa

SEQ ID NO: 371353 - DNA, 15 bp, Homo sapiens
tactgatatgggaaa

SEQ ID NO: 371354 - DNA, 15 bp, Homo sapiens
gtactgatatgggaa

SEQ ID NO: 371355 - DNA, 15 bp, Homo sapiens
ggtactgatatggga

SEQ ID NO: 371356 - DNA, 15 bp, Homo sapiens
gggtactgatatggg

SEQ ID NO: 371357 - DNA, 15 bp, Homo sapiens
ggggtactgatatgg

SEQ ID NO: 371358 - DNA, 15 bp, Homo sapiens
aggggtactgatatg

SEQ ID NO: 371359 - DNA, 15 bp, Homo sapiens
taggggtactgatat

SEQ ID NO: 371360 - DNA, 15 bp, Homo sapiens
ttaggggtactgata

SEQ ID NO: 371361 - DNA, 15 bp, Homo sapiens
cttaggggtactgat

SEQ ID NO: 371362 - DNA, 15 bp, Homo sapiens
tcttaggggtactga

SEQ ID NO: 371363 - DNA, 15 bp, Homo sapiens
ttcttaggggtactg

SEQ ID NO: 371364 - DNA, 15 bp, Homo sapiens
tttcttaggggtact

SEQ ID NO: 371365 - DNA, 15 bp, Homo sapiens
ctttcttaggggtac

SEQ ID NO: 371366 - DNA, 15 bp, Homo sapiens
tctttcttaggggta

SEQ ID NO: 371367 - DNA, 15 bp, Homo sapiens
ttctttcttaggggt

SEQ ID NO: 371368 - DNA, 15 bp, Homo sapiens
tttctttcttagggg

SEQ ID NO: 371369 - DNA, 15 bp, Homo sapiens
gtttctttcttaggg

SEQ ID NO: 371370 - DNA, 15 bp, Homo sapiens
tgtttctttcttagg

SEQ ID NO: 371371 - DNA, 15 bp, Homo sapiens
ttgtttctttcttag

SEQ ID NO: 371372 - DNA, 15 bp, Homo sapiens
attgtttctttctta

SEQ ID NO: 371373 - DNA, 15 bp, Homo sapiens
cattgtttctttctt

SEQ ID NO: 371374 - DNA, 15 bp, Homo sapiens
gcattgtttctttct

SEQ ID NO: 371375 - DNA, 15 bp, Homo sapiens
agcattgtttctttc

SEQ ID NO: 371376 - DNA, 15 bp, Homo sapiens
tagcattgtttcttt

SEQ ID NO: 371377 - DNA, 15 bp, Homo sapiens
ttagcattgtttctt

SEQ ID NO: 371378 - DNA, 15 bp, Homo sapiens
attagcattgtttct

SEQ ID NO: 371379 - DNA, 15 bp, Homo sapiens
tattagcattgtttc

SEQ ID NO: 371380 - DNA, 15 bp, Homo sapiens
ttattagcattgttt

SEQ ID NO: 371381 - DNA, 15 bp, Homo sapiens
tttattagcattgtt

SEQ ID NO: 371382 - DNA, 15 bp, Homo sapiens
atttattagcattgt

SEQ ID NO: 371383 - DNA, 15 bp, Homo sapiens
aatttattagcattg

SEQ ID NO: 371384 - DNA, 15 bp, Homo sapiens
taatttattagcatt

SEQ ID NO: 371385 - DNA, 15 bp, Homo sapiens
ataatttattagcat

SEQ ID NO: 371386 - DNA, 15 bp, Homo sapiens
cataatttattagca

SEQ ID NO: 371387 - DNA, 15 bp, Homo sapiens
acataatttattagc

SEQ ID NO: 371388 - DNA, 15 bp, Homo sapiens
aacataatttattag

SEQ ID NO: 371389 - DNA, 15 bp, Homo sapiens
gaacataatttatta

SEQ ID NO: 371390 - DNA, 15 bp, Homo sapiens
tgaacataatttatt

SEQ ID NO: 371391 - DNA, 15 bp, Homo sapiens
gtgaacataatttat

SEQ ID NO: 371392 - DNA, 15 bp, Homo sapiens
ggtgaacataattta

SEQ ID NO: 371393 - DNA, 15 bp, Homo sapiens
aggtgaacataattt

SEQ ID NO: 371394 - DNA, 15 bp, Homo sapiens
aaggtgaacataatt

SEQ ID NO: 371395 - DNA, 15 bp, Homo sapiens
aaaggtgaacataat

SEQ ID NO: 371396 - DNA, 15 bp, Homo sapiens
taaaggtgaacataa

SEQ ID NO: 371397 - DNA, 15 bp, Homo sapiens
ttaaaggtgaacata

SEQ ID NO: 371398 - DNA, 15 bp, Homo sapiens
gttaaaggtgaacat

SEQ ID NO: 371399 - DNA, 15 bp, Homo sapiens
tgttaaaggtgaaca

SEQ ID NO: 371400 - DNA, 15 bp, Homo sapiens
atgttaaaggtgaac

SEQ ID NO: 371401 - DNA, 15 bp, Homo sapiens
tatgttaaaggtgaa

SEQ ID NO: 371402 - DNA, 15 bp, Homo sapiens
ttatgttaaaggtga

SEQ ID NO: 371403 - DNA, 15 bp, Homo sapiens
gttatgttaaaggtg

SEQ ID NO: 371404 - DNA, 15 bp, Homo sapiens
agttatgttaaaggt

SEQ ID NO: 371405 - DNA, 15 bp, Homo sapiens
gagttatgttaaagg

SEQ ID NO: 371406 - DNA, 15 bp, Homo sapiens
agagttatgttaaag

SEQ ID NO: 371407 - DNA, 15 bp, Homo sapiens
tagagttatgttaaa

SEQ ID NO: 371408 - DNA, 15 bp, Homo sapiens
gtagagttatgttaa

SEQ ID NO: 371409 - DNA, 15 bp, Homo sapiens
tgtagagttatgtta

SEQ ID NO: 371410 - DNA, 15 bp, Homo sapiens
gtgtagagttatgtt

SEQ ID NO: 371411 - DNA, 15 bp, Homo sapiens
ggtgtagagttatgt

SEQ ID NO: 371412 - DNA, 15 bp, Homo sapiens
tggtgtagagttatg

SEQ ID NO: 371413 - DNA, 15 bp, Homo sapiens
ctggtgtagagttat

SEQ ID NO: 371414 - DNA, 15 bp, Homo sapiens
cctggtgtagagtta

SEQ ID NO: 371415 - DNA, 15 bp, Homo sapiens
ccctggtgtagagtt

SEQ ID NO: 371416 - DNA, 15 bp, Homo sapiens
tccctggtgtagagt

SEQ ID NO: 371417 - DNA, 15 bp, Homo sapiens
ttccctggtgtagag

SEQ ID NO: 371418 - DNA, 15 bp, Homo sapiens
tttccctggtgtaga

SEQ ID NO: 371419 - DNA, 15 bp, Homo sapiens
ttttccctggtgtag

SEQ ID NO: 371420 - DNA, 15 bp, Homo sapiens
tttttccctggtgta

SEQ ID NO: 371421 - DNA, 15 bp, Homo sapiens
ctttttccctggtgt

SEQ ID NO: 371422 - DNA, 15 bp, Homo sapiens
tctttttccctggtg

SEQ ID NO: 371423 - DNA, 15 bp, Homo sapiens
ttctttttccctggt

SEQ ID NO: 371424 - DNA, 15 bp, Homo sapiens
cttctttttccctgg

SEQ ID NO: 371425 - DNA, 15 bp, Homo sapiens
tcttctttttccctg

SEQ ID NO: 371426 - DNA, 15 bp, Homo sapiens
ttcttctttttccct

SEQ ID NO: 371427 - DNA, 15 bp, Homo sapiens
cttcttctttttccc

SEQ ID NO: 371428 - DNA, 15 bp, Homo sapiens
gcttcttctttttcc

SEQ ID NO: 371429 - DNA, 15 bp, Homo sapiens
ggcttcttctttttc

SEQ ID NO: 371430 - DNA, 15 bp, Homo sapiens
tggcttcttcttttt

SEQ ID NO: 371431 - DNA, 15 bp, Homo sapiens
ttggcttcttctttt

SEQ ID NO: 371432 - DNA, 15 bp, Homo sapiens
gttggcttcttcttt

SEQ ID NO: 371433 - DNA, 15 bp, Homo sapiens
agttggcttcttctt

SEQ ID NO: 371434 - DNA, 15 bp, Homo sapiens
aagttggcttcttct

SEQ ID NO: 371435 - DNA, 15 bp, Homo sapiens
aaagttggcttcttc

SEQ ID NO: 371436 - DNA, 15 bp, Homo sapiens
caaagttggcttctt

SEQ ID NO: 371437 - DNA, 15 bp, Homo sapiens
gcaaagttggcttct

SEQ ID NO: 371438 - DNA, 15 bp, Homo sapiens
agcaaagttggcttc

SEQ ID NO: 371439 - DNA, 15 bp, Homo sapiens
cagcaaagttggctt

SEQ ID NO: 371440 - DNA, 15 bp, Homo sapiens
acagcaaagttggct

SEQ ID NO: 371441 - DNA, 15 bp, Homo sapiens
aacagcaaagttggc

SEQ ID NO: 371442 - DNA, 15 bp, Homo sapiens
taacagcaaagttgg

SEQ ID NO: 371443 - DNA, 15 bp, Homo sapiens
ataacagcaaagttg

SEQ ID NO: 371444 - DNA, 15 bp, Homo sapiens
aataacagcaaagtt

SEQ ID NO: 371445 - DNA, 15 bp, Homo sapiens
caataacagcaaagt

SEQ ID NO: 371446 - DNA, 15 bp, Homo sapiens
acaataacagcaaag

SEQ ID NO: 371447 - DNA, 15 bp, Homo sapiens
aacaataacagcaaa

SEQ ID NO: 371448 - DNA, 15 bp, Homo sapiens
caacaataacagcaa

SEQ ID NO: 371449 - DNA, 15 bp, Homo sapiens
gcaacaataacagca

SEQ ID NO: 371450 - DNA, 15 bp, Homo sapiens
ggcaacaataacagc

SEQ ID NO: 371451 - DNA, 15 bp, Homo sapiens
aggcaacaataacag

SEQ ID NO: 371452 - DNA, 15 bp, Homo sapiens
aaggcaacaataaca

SEQ ID NO: 371453 - DNA, 15 bp, Homo sapiens
aaaggcaacaataac

SEQ ID NO: 371454 - DNA, 15 bp, Homo sapiens
aaaaggcaacaataa

SEQ ID NO: 371455 - DNA, 15 bp, Homo sapiens
caaaaggcaacaata

SEQ ID NO: 371456 - DNA, 15 bp, Homo sapiens
gcaaaaggcaacaat

SEQ ID NO: 371457 - DNA, 15 bp, Homo sapiens
agcaaaaggcaacaa

SEQ ID NO: 371458 - DNA, 15 bp, Homo sapiens
aagcaaaaggcaaca

SEQ ID NO: 371459 - DNA, 15 bp, Homo sapiens
aaagcaaaaggcaac

SEQ ID NO: 371460 - DNA, 15 bp, Homo sapiens
aaaagcaaaaggcaa

SEQ ID NO: 371461 - DNA, 15 bp, Homo sapiens
taaaagcaaaaggca

SEQ ID NO: 371462 - DNA, 15 bp, Homo sapiens
ttaaaagcaaaaggc

SEQ ID NO: 371463 - DNA, 15 bp, Homo sapiens
tttaaaagcaaaagg

SEQ ID NO: 371464 - DNA, 15 bp, Homo sapiens
ttttaaaagcaaaag

SEQ ID NO: 371465 - DNA, 15 bp, Homo sapiens
tttttaaaagcaaaa

SEQ ID NO: 371466 - DNA, 15 bp, Homo sapiens
atttttaaaagcaaa

SEQ ID NO: 371467 - DNA, 15 bp, Homo sapiens
catttttaaaagcaa

SEQ ID NO: 371468 - DNA, 15 bp, Homo sapiens
acatttttaaaagca

SEQ ID NO: 371469 - DNA, 15 bp, Homo sapiens
cacatttttaaaagc

SEQ ID NO: 371470 - DNA, 15 bp, Homo sapiens
acacatttttaaaag

SEQ ID NO: 371471 - DNA, 15 bp, Homo sapiens
cacacatttttaaaa

SEQ ID NO: 371472 - DNA, 15 bp, Homo sapiens
tcacacatttttaaa

SEQ ID NO: 371473 - DNA, 15 bp, Homo sapiens
gtcacacatttttaa

SEQ ID NO: 371474 - DNA, 15 bp, Homo sapiens
agtcacacattttta

SEQ ID NO: 371475 - DNA, 15 bp, Homo sapiens
tagtcacacattttt

SEQ ID NO: 371476 - DNA, 15 bp, Homo sapiens
ctagtcacacatttt

SEQ ID NO: 371477 - DNA, 15 bp, Homo sapiens
tctagtcacacattt

SEQ ID NO: 371478 - DNA, 15 bp, Homo sapiens
ttctagtcacacatt

SEQ ID NO: 371479 - DNA, 15 bp, Homo sapiens
tttctagtcacacat

SEQ ID NO: 371480 - DNA, 15 bp, Homo sapiens
ttttctagtcacaca

SEQ ID NO: 371481 - DNA, 15 bp, Homo sapiens
cttttctagtcacac

SEQ ID NO: 371482 - DNA, 15 bp, Homo sapiens
acttttctagtcaca

SEQ ID NO: 371483 - DNA, 15 bp, Homo sapiens
tacttttctagtcac

SEQ ID NO: 371484 - DNA, 15 bp, Homo sapiens
ctacttttctagtca

SEQ ID NO: 371485 - DNA, 15 bp, Homo sapiens
cctacttttctagtc

SEQ ID NO: 371486 - DNA, 15 bp, Homo sapiens
ccctacttttctagt

SEQ ID NO: 371487 - DNA, 15 bp, Homo sapiens
tccctacttttctag

SEQ ID NO: 371488 - DNA, 15 bp, Homo sapiens
ttccctacttttcta

SEQ ID NO: 371489 - DNA, 15 bp, Homo sapiens
tttccctacttttct

SEQ ID NO: 371490 - DNA, 15 bp, Homo sapiens
gtttccctacttttc

SEQ ID NO: 371491 - DNA, 15 bp, Homo sapiens
tgtttccctactttt

SEQ ID NO: 371492 - DNA, 15 bp, Homo sapiens
ttgtttccctacttt

SEQ ID NO: 371493 - DNA, 15 bp, Homo sapiens
tttgtttccctactt

SEQ ID NO: 371494 - DNA, 15 bp, Homo sapiens
ttttgtttccctact

SEQ ID NO: 371495 - DNA, 15 bp, Homo sapiens
tttttgtttccctac

SEQ ID NO: 371496 - DNA, 15 bp, Homo sapiens
ctttttgtttcccta

SEQ ID NO: 371497 - DNA, 15 bp, Homo sapiens
tctttttgtttccct

SEQ ID NO: 371498 - DNA, 15 bp, Homo sapiens
ctctttttgtttccc

SEQ ID NO: 371499 - DNA, 15 bp, Homo sapiens
cctctttttgtttcc

SEQ ID NO: 371500 - DNA, 15 bp, Homo sapiens
gcctctttttgtttc

SEQ ID NO: 371501 - DNA, 15 bp, Homo sapiens
tgcctctttttgttt

SEQ ID NO: 371502 - DNA, 15 bp, Homo sapiens
atgcctctttttgtt

SEQ ID NO: 371503 - DNA, 15 bp, Homo sapiens
catgcctctttttgt

SEQ ID NO: 371504 - DNA, 15 bp, Homo sapiens
tcatgcctctttttg

SEQ ID NO: 371505 - DNA, 15 bp, Homo sapiens
ttcatgcctcttttt

SEQ ID NO: 371506 - DNA, 15 bp, Homo sapiens
cttcatgcctctttt

SEQ ID NO: 371507 - DNA, 15 bp, Homo sapiens
acttcatgcctcttt

SEQ ID NO: 371508 - DNA, 15 bp, Homo sapiens
aacttcatgcctctt

SEQ ID NO: 371509 - DNA, 15 bp, Homo sapiens
aaacttcatgcctct

SEQ ID NO: 371510 - DNA, 15 bp, Homo sapiens
aaaacttcatgcctc

SEQ ID NO: 371511 - DNA, 15 bp, Homo sapiens
gaaaacttcatgcct

SEQ ID NO: 371512 - DNA, 15 bp, Homo sapiens
agaaaacttcatgcc

SEQ ID NO: 371513 - DNA, 15 bp, Homo sapiens
aagaaaacttcatgc

SEQ ID NO: 371514 - DNA, 15 bp, Homo sapiens
taagaaaacttcatg

SEQ ID NO: 371515 - DNA, 15 bp, Homo sapiens
ctaagaaaacttcat

SEQ ID NO: 371516 - DNA, 15 bp, Homo sapiens
gctaagaaaacttca

SEQ ID NO: 371517 - DNA, 15 bp, Homo sapiens
tgctaagaaaacttc

SEQ ID NO: 371518 - DNA, 15 bp, Homo sapiens
ttgctaagaaaactt

SEQ ID NO: 371519 - DNA, 15 bp, Homo sapiens
attgctaagaaaact

SEQ ID NO: 371520 - DNA, 15 bp, Homo sapiens
tattgctaagaaaac

SEQ ID NO: 371521 - DNA, 15 bp, Homo sapiens
ttattgctaagaaaa

SEQ ID NO: 371522 - DNA, 15 bp, Homo sapiens
tttattgctaagaaa

SEQ ID NO: 371523 - DNA, 15 bp, Homo sapiens
ttttattgctaagaa

SEQ ID NO: 371524 - DNA, 15 bp, Homo sapiens
cttttattgctaaga

SEQ ID NO: 371525 - DNA, 15 bp, Homo sapiens
gcttttattgctaag

SEQ ID NO: 371526 - DNA, 15 bp, Homo sapiens
tgcttttattgctaa

SEQ ID NO: 371527 - DNA, 15 bp, Homo sapiens
gtgcttttattgcta

SEQ ID NO: 371528 - DNA, 15 bp, Homo sapiens
tgtgcttttattgct

SEQ ID NO: 371529 - DNA, 15 bp, Homo sapiens
gtgtgcttttattgc

SEQ ID NO: 371530 - DNA, 15 bp, Homo sapiens
agtgtgcttttattg

SEQ ID NO: 371531 - DNA, 15 bp, Homo sapiens
aagtgtgcttttatt

SEQ ID NO: 371532 - DNA, 15 bp, Homo sapiens
aaagtgtgcttttat

SEQ ID NO: 371533 - DNA, 15 bp, Homo sapiens
aaaagtgtgctttta

SEQ ID NO: 371534 - DNA, 15 bp, Homo sapiens
aaaaagtgtgctttt

SEQ ID NO: 371535 - DNA, 15 bp, Homo sapiens
aaaaaagtgtgcttt

SEQ ID NO: 371536 - DNA, 15 bp, Homo sapiens
caaaaaagtgtgctt

SEQ ID NO: 371537 - DNA, 15 bp, Homo sapiens
ccaaaaaagtgtgct

SEQ ID NO: 371538 - DNA, 15 bp, Homo sapiens
cccaaaaaagtgtgc

SEQ ID NO: 371539 - DNA, 15 bp, Homo sapiens
ccccaaaaaagtgtg

SEQ ID NO: 371540 - DNA, 15 bp, Homo sapiens
tccccaaaaaagtgt

SEQ ID NO: 371541 - DNA, 15 bp, Homo sapiens
ctccccaaaaaagtg

SEQ ID NO: 371542 - DNA, 15 bp, Homo sapiens
actccccaaaaaagt

SEQ ID NO: 371543 - DNA, 15 bp, Homo sapiens
gactccccaaaaaag

SEQ ID NO: 371544 - DNA, 15 bp, Homo sapiens
tgactccccaaaaaa

SEQ ID NO: 371545 - DNA, 15 bp, Homo sapiens
atgactccccaaaaa

SEQ ID NO: 371546 - DNA, 15 bp, Homo sapiens
catgactccccaaaa

SEQ ID NO: 371547 - DNA, 15 bp, Homo sapiens
gcatgactccccaaa

SEQ ID NO: 371548 - DNA, 15 bp, Homo sapiens
tgcatgactccccaa

SEQ ID NO: 371549 - DNA, 15 bp, Homo sapiens
atgcatgactcccca

SEQ ID NO: 371550 - DNA, 15 bp, Homo sapiens
tatgcatgactcccc

SEQ ID NO: 371551 - DNA, 15 bp, Homo sapiens
ctatgcatgactccc

SEQ ID NO: 371552 - DNA, 15 bp, Homo sapiens
cctatgcatgactcc

SEQ ID NO: 371553 - DNA, 15 bp, Homo sapiens
ccctatgcatgactc

SEQ ID NO: 371554 - DNA, 15 bp, Homo sapiens
cccctatgcatgact

SEQ ID NO: 371555 - DNA, 15 bp, Homo sapiens
tcccctatgcatgac

SEQ ID NO: 371556 - DNA, 15 bp, Homo sapiens
ctcccctatgcatga

SEQ ID NO: 371557 - DNA, 15 bp, Homo sapiens
tctcccctatgcatg

SEQ ID NO: 371558 - DNA, 15 bp, Homo sapiens
ctctcccctatgcat

SEQ ID NO: 371559 - DNA, 15 bp, Homo sapiens
actctcccctatgca

SEQ ID NO: 371560 - DNA, 15 bp, Homo sapiens
aactctcccctatgc

SEQ ID NO: 371561 - DNA, 15 bp, Homo sapiens
caactctcccctatg

SEQ ID NO: 371562 - DNA, 15 bp, Homo sapiens
ccaactctcccctat

SEQ ID NO: 371563 - DNA, 15 bp, Homo sapiens
cccaactctccccta

SEQ ID NO: 371564 - DNA, 15 bp, Homo sapiens
gcccaactctcccct

SEQ ID NO: 371565 - DNA, 15 bp, Homo sapiens
ggcccaactctcccc

SEQ ID NO: 371566 - DNA, 15 bp, Homo sapiens
aggcccaactctccc

SEQ ID NO: 371567 - DNA, 15 bp, Homo sapiens
aaggcccaactctcc

SEQ ID NO: 371568 - DNA, 15 bp, Homo sapiens
gaaggcccaactctc

SEQ ID NO: 371569 - DNA, 15 bp, Homo sapiens
tgaaggcccaactct

SEQ ID NO: 371570 - DNA, 15 bp, Homo sapiens
ttgaaggcccaactc

SEQ ID NO: 371571 - DNA, 15 bp, Homo sapiens
gttgaaggcccaact

SEQ ID NO: 371572 - DNA, 15 bp, Homo sapiens
tgttgaaggcccaac

SEQ ID NO: 371573 - DNA, 15 bp, Homo sapiens
ctgttgaaggcccaa

SEQ ID NO: 371574 - DNA, 15 bp, Homo sapiens
tctgttgaaggccca

SEQ ID NO: 371575 - DNA, 15 bp, Homo sapiens
ctctgttgaaggccc

SEQ ID NO: 371576 - DNA, 15 bp, Homo sapiens
tctctgttgaaggcc

SEQ ID NO: 371577 - DNA, 15 bp, Homo sapiens
ctctctgttgaaggc

SEQ ID NO: 371578 - DNA, 15 bp, Homo sapiens
tctctctgttgaagg

SEQ ID NO: 371579 - DNA, 15 bp, Homo sapiens
atctctctgttgaag

SEQ ID NO: 371580 - DNA, 15 bp, Homo sapiens
catctctctgttgaa

SEQ ID NO: 371581 - DNA, 15 bp, Homo sapiens
acatctctctgttga

SEQ ID NO: 371582 - DNA, 15 bp, Homo sapiens
gacatctctctgttg

SEQ ID NO: 371583 - DNA, 15 bp, Homo sapiens
agacatctctctgtt

SEQ ID NO: 371584 - DNA, 15 bp, Homo sapiens
aagacatctctctgt

SEQ ID NO: 371585 - DNA, 15 bp, Homo sapiens
aaagacatctctctg

SEQ ID NO: 371586 - DNA, 15 bp, Homo sapiens
caaagacatctctct

SEQ ID NO: 371587 - DNA, 15 bp, Homo sapiens
ccaaagacatctctc

SEQ ID NO: 371588 - DNA, 15 bp, Homo sapiens
tccaaagacatctct

SEQ ID NO: 371589 - DNA, 15 bp, Homo sapiens
gtccaaagacatctc

SEQ ID NO: 371590 - DNA, 15 bp, Homo sapiens
tgtccaaagacatct

SEQ ID NO: 371591 - DNA, 15 bp, Homo sapiens
gtgtccaaagacatc

SEQ ID NO: 371592 - DNA, 15 bp, Homo sapiens
ggtgtccaaagacat

SEQ ID NO: 371593 - DNA, 15 bp, Homo sapiens
aggtgtccaaagaca

SEQ ID NO: 371594 - DNA, 15 bp, Homo sapiens
taggtgtccaaagac

SEQ ID NO: 371595 - DNA, 15 bp, Homo sapiens
gtaggtgtccaaaga

SEQ ID NO: 371596 - DNA, 15 bp, Homo sapiens
ggtaggtgtccaaag

SEQ ID NO: 371597 - DNA, 15 bp, Homo sapiens
tggtaggtgtccaaa

SEQ ID NO: 371598 - DNA, 15 bp, Homo sapiens
atggtaggtgtccaa

SEQ ID NO: 371599 - DNA, 15 bp, Homo sapiens
tatggtaggtgtcca

SEQ ID NO: 371600 - DNA, 15 bp, Homo sapiens
ctatggtaggtgtcc

SEQ ID NO: 371601 - DNA, 15 bp, Homo sapiens
actatggtaggtgtc

SEQ ID NO: 371602 - DNA, 15 bp, Homo sapiens
aactatggtaggtgt

SEQ ID NO: 371603 - DNA, 15 bp, Homo sapiens
aaactatggtaggtg

SEQ ID NO: 371604 - DNA, 15 bp, Homo sapiens
caaactatggtaggt

SEQ ID NO: 371605 - DNA, 15 bp, Homo sapiens
acaaactatggtagg

SEQ ID NO: 371606 - DNA, 15 bp, Homo sapiens
gacaaactatggtag

SEQ ID NO: 371607 - DNA, 15 bp, Homo sapiens
tgacaaactatggta

SEQ ID NO: 371608 - DNA, 15 bp, Homo sapiens
ctgacaaactatggt

SEQ ID NO: 371609 - DNA, 15 bp, Homo sapiens
actgacaaactatgg

SEQ ID NO: 371610 - DNA, 15 bp, Homo sapiens
aactgacaaactatg

SEQ ID NO: 371611 - DNA, 15 bp, Homo sapiens
caactgacaaactat

SEQ ID NO: 371612 - DNA, 15 bp, Homo sapiens
gcaactgacaaacta

SEQ ID NO: 371613 - DNA, 15 bp, Homo sapiens
tgcaactgacaaact

SEQ ID NO: 371614 - DNA, 15 bp, Homo sapiens
ctgcaactgacaaac

SEQ ID NO: 371615 - DNA, 15 bp, Homo sapiens
tctgcaactgacaaa

SEQ ID NO: 371616 - DNA, 15 bp, Homo sapiens
atctgcaactgacaa

SEQ ID NO: 371617 - DNA, 15 bp, Homo sapiens
catctgcaactgaca

SEQ ID NO: 371618 - DNA, 15 bp, Homo sapiens
gcatctgcaactgac

SEQ ID NO: 371619 - DNA, 15 bp, Homo sapiens
agcatctgcaactga

SEQ ID NO: 371620 - DNA, 15 bp, Homo sapiens
tagcatctgcaactg

SEQ ID NO: 371621 - DNA, 15 bp, Homo sapiens
ttagcatctgcaact

SEQ ID NO: 371622 - DNA, 15 bp, Homo sapiens
attagcatctgcaac

SEQ ID NO: 371623 - DNA, 15 bp, Homo sapiens
cattagcatctgcaa

SEQ ID NO: 371624 - DNA, 15 bp, Homo sapiens
ccattagcatctgca

SEQ ID NO: 371625 - DNA, 15 bp, Homo sapiens
tccattagcatctgc

SEQ ID NO: 371626 - DNA, 15 bp, Homo sapiens
ttccattagcatctg

SEQ ID NO: 371627 - DNA, 15 bp, Homo sapiens
gttccattagcatct

SEQ ID NO: 371628 - DNA, 15 bp, Homo sapiens
ggttccattagcatc

SEQ ID NO: 371629 - DNA, 15 bp, Homo sapiens
tggttccattagcat

SEQ ID NO: 371630 - DNA, 15 bp, Homo sapiens
ctggttccattagca

SEQ ID NO: 371631 - DNA, 15 bp, Homo sapiens
cctggttccattagc

SEQ ID NO: 371632 - DNA, 15 bp, Homo sapiens
gcctggttccattag

SEQ ID NO: 371633 - DNA, 15 bp, Homo sapiens
ggcctggttccatta

SEQ ID NO: 371634 - DNA, 15 bp, Homo sapiens
aggcctggttccatt

SEQ ID NO: 371635 - DNA, 15 bp, Homo sapiens
caggcctggttccat

SEQ ID NO: 371636 - DNA, 15 bp, Homo sapiens
ccaggcctggttcca

SEQ ID NO: 371637 - DNA, 15 bp, Homo sapiens
accaggcctggttcc

SEQ ID NO: 371638 - DNA, 15 bp, Homo sapiens
caccaggcctggttc

SEQ ID NO: 371639 - DNA, 15 bp, Homo sapiens
tcaccaggcctggtt

SEQ ID NO: 371640 - DNA, 15 bp, Homo sapiens
gtcaccaggcctggt

SEQ ID NO: 371641 - DNA, 15 bp, Homo sapiens
agtcaccaggcctgg

SEQ ID NO: 371642 - DNA, 15 bp, Homo sapiens
cagtcaccaggcctg

SEQ ID NO: 371643 - DNA, 15 bp, Homo sapiens
tcagtcaccaggcct

SEQ ID NO: 371644 - DNA, 15 bp, Homo sapiens
ttcagtcaccaggcc

SEQ ID NO: 371645 - DNA, 15 bp, Homo sapiens
cttcagtcaccaggc

SEQ ID NO: 371646 - DNA, 15 bp, Homo sapiens
ccttcagtcaccagg

SEQ ID NO: 371647 - DNA, 15 bp, Homo sapiens
cccttcagtcaccag

SEQ ID NO: 371648 - DNA, 15 bp, Homo sapiens
ccccttcagtcacca

SEQ ID NO: 371649 - DNA, 15 bp, Homo sapiens
tccccttcagtcacc

SEQ ID NO: 371650 - DNA, 15 bp, Homo sapiens
ttccccttcagtcac

SEQ ID NO: 371651 - DNA, 15 bp, Homo sapiens
tttccccttcagtca

SEQ ID NO: 371652 - DNA, 15 bp, Homo sapiens
ttttccccttcagtc

SEQ ID NO: 371653 - DNA, 15 bp, Homo sapiens
attttccccttcagt

SEQ ID NO: 371654 - DNA, 15 bp, Homo sapiens
cattttccccttcag

SEQ ID NO: 371655 - DNA, 15 bp, Homo sapiens
ccattttccccttca

SEQ ID NO: 371656 - DNA, 15 bp, Homo sapiens
tccattttccccttc

SEQ ID NO: 371657 - DNA, 15 bp, Homo sapiens
ttccattttcccctt

SEQ ID NO: 371658 - DNA, 15 bp, Homo sapiens
attccattttcccct

SEQ ID NO: 371659 - DNA, 15 bp, Homo sapiens
tattccattttcccc

SEQ ID NO: 371660 - DNA, 15 bp, Homo sapiens
atattccattttccc

SEQ ID NO: 371661 - DNA, 15 bp, Homo sapiens
catattccattttcc

SEQ ID NO: 371662 - DNA, 15 bp, Homo sapiens
tcatattccattttc

SEQ ID NO: 371663 - DNA, 15 bp, Homo sapiens
ttcatattccatttt

SEQ ID NO: 371664 - DNA, 15 bp, Homo sapiens
tttcatattccattt

SEQ ID NO: 371665 - DNA, 15 bp, Homo sapiens
ctttcatattccatt

SEQ ID NO: 371666 - DNA, 15 bp, Homo sapiens
gctttcatattccat

SEQ ID NO: 371667 - DNA, 15 bp, Homo sapiens
tgctttcatattcca

SEQ ID NO: 371668 - DNA, 15 bp, Homo sapiens
ttgctttcatattcc

SEQ ID NO: 371669 - DNA, 15 bp, Homo sapiens
tttgctttcatattc

SEQ ID NO: 371670 - DNA, 15 bp, Homo sapiens
ttttgctttcatatt

SEQ ID NO: 371671 - DNA, 15 bp, Homo sapiens
attttgctttcatat

SEQ ID NO: 371672 - DNA, 15 bp, Homo sapiens
cattttgctttcata

SEQ ID NO: 371673 - DNA, 15 bp, Homo sapiens
tcattttgctttcat

SEQ ID NO: 371674 - DNA, 15 bp, Homo sapiens
ttcattttgctttca

SEQ ID NO: 371675 - DNA, 15 bp, Homo sapiens
tttcattttgctttc

SEQ ID NO: 371676 - DNA, 15 bp, Homo sapiens
ctttcattttgcttt

SEQ ID NO: 371677 - DNA, 15 bp, Homo sapiens
tctttcattttgctt

SEQ ID NO: 371678 - DNA, 15 bp, Homo sapiens
ttctttcattttgct

SEQ ID NO: 371679 - DNA, 15 bp, Homo sapiens
cttctttcattttgc

SEQ ID NO: 371680 - DNA, 15 bp, Homo sapiens
gcttctttcattttg

SEQ ID NO: 371681 - DNA, 15 bp, Homo sapiens
ggcttctttcatttt

SEQ ID NO: 371682 - DNA, 15 bp, Homo sapiens
aggcttctttcattt

SEQ ID NO: 371683 - DNA, 15 bp, Homo sapiens
taggcttctttcatt

SEQ ID NO: 371684 - DNA, 15 bp, Homo sapiens
ataggcttctttcat

SEQ ID NO: 371685 - DNA, 15 bp, Homo sapiens
cataggcttctttca

SEQ ID NO: 371686 - DNA, 15 bp, Homo sapiens
tcataggcttctttc

SEQ ID NO: 371687 - DNA, 15 bp, Homo sapiens
ttcataggcttcttt

SEQ ID NO: 371688 - DNA, 15 bp, Homo sapiens
cttcataggcttctt

SEQ ID NO: 371689 - DNA, 15 bp, Homo sapiens
gcttcataggcttct

SEQ ID NO: 371690 - DNA, 15 bp, Homo sapiens
tgcttcataggcttc

SEQ ID NO: 371691 - DNA, 15 bp, Homo sapiens
ttgcttcataggctt

SEQ ID NO: 371692 - DNA, 15 bp, Homo sapiens
cttgcttcataggct

SEQ ID NO: 371693 - DNA, 15 bp, Homo sapiens
gcttgcttcataggc

SEQ ID NO: 371694 - DNA, 15 bp, Homo sapiens
tgcttgcttcatagg

SEQ ID NO: 371695 - DNA, 15 bp, Homo sapiens
atgcttgcttcatag

SEQ ID NO: 371696 - DNA, 15 bp, Homo sapiens
catgcttgcttcata

SEQ ID NO: 371697 - DNA, 15 bp, Homo sapiens
acatgcttgcttcat

SEQ ID NO: 371698 - DNA, 15 bp, Homo sapiens
gacatgcttgcttca

SEQ ID NO: 371699 - DNA, 15 bp, Homo sapiens
tgacatgcttgcttc

SEQ ID NO: 371700 - DNA, 15 bp, Homo sapiens
atgacatgcttgctt

SEQ ID NO: 371701 - DNA, 15 bp, Homo sapiens
aatgacatgcttgct

SEQ ID NO: 371702 - DNA, 15 bp, Homo sapiens
aaatgacatgcttgc

SEQ ID NO: 371703 - DNA, 15 bp, Homo sapiens
gaaatgacatgcttg

SEQ ID NO: 371704 - DNA, 15 bp, Homo sapiens
ggaaatgacatgctt

SEQ ID NO: 371705 - DNA, 15 bp, Homo sapiens
tggaaatgacatgct

SEQ ID NO: 371706 - DNA, 15 bp, Homo sapiens
ttggaaatgacatgc

SEQ ID NO: 371707 - DNA, 15 bp, Homo sapiens
tttggaaatgacatg

SEQ ID NO: 371708 - DNA, 15 bp, Homo sapiens
atttggaaatgacat

SEQ ID NO: 371709 - DNA, 15 bp, Homo sapiens
catttggaaatgaca

SEQ ID NO: 371710 - DNA, 15 bp, Homo sapiens
tcatttggaaatgac

SEQ ID NO: 371711 - DNA, 15 bp, Homo sapiens
ttcatttggaaatga

SEQ ID NO: 371712 - DNA, 15 bp, Homo sapiens
cttcatttggaaatg

SEQ ID NO: 371713 - DNA, 15 bp, Homo sapiens
ccttcatttggaaat

SEQ ID NO: 371714 - DNA, 15 bp, Homo sapiens
accttcatttggaaa

SEQ ID NO: 371715 - DNA, 15 bp, Homo sapiens
aaccttcatttggaa

SEQ ID NO: 371716 - DNA, 15 bp, Homo sapiens
aaaccttcatttgga

SEQ ID NO: 371717 - DNA, 15 bp, Homo sapiens
gaaaccttcatttgg

SEQ ID NO: 371718 - DNA, 15 bp, Homo sapiens
tgaaaccttcatttg

SEQ ID NO: 371719 - DNA, 15 bp, Homo sapiens
atgaaaccttcattt

SEQ ID NO: 371720 - DNA, 15 bp, Homo sapiens
catgaaaccttcatt

SEQ ID NO: 371721 - DNA, 15 bp, Homo sapiens
gcatgaaaccttcat

SEQ ID NO: 371722 - DNA, 15 bp, Homo sapiens
tgcatgaaaccttca

SEQ ID NO: 371723 - DNA, 15 bp, Homo sapiens
ttgcatgaaaccttc

SEQ ID NO: 371724 - DNA, 15 bp, Homo sapiens
tttgcatgaaacctt

SEQ ID NO: 371725 - DNA, 15 bp, Homo sapiens
ctttgcatgaaacct

SEQ ID NO: 371726 - DNA, 15 bp, Homo sapiens
cctttgcatgaaacc

SEQ ID NO: 371727 - DNA, 15 bp, Homo sapiens
tcctttgcatgaaac

SEQ ID NO: 371728 - DNA, 15 bp, Homo sapiens
ttcctttgcatgaaa

SEQ ID NO: 371729 - DNA, 15 bp, Homo sapiens
attcctttgcatgaa

SEQ ID NO: 371730 - DNA, 15 bp, Homo sapiens
aattcctttgcatga

SEQ ID NO: 371731 - DNA, 15 bp, Homo sapiens
caattcctttgcatg

SEQ ID NO: 371732 - DNA, 15 bp, Homo sapiens
tcaattcctttgcat

SEQ ID NO: 371733 - DNA, 15 bp, Homo sapiens
ctcaattcctttgca

SEQ ID NO: 371734 - DNA, 15 bp, Homo sapiens
actcaattcctttgc

SEQ ID NO: 371735 - DNA, 15 bp, Homo sapiens
gactcaattcctttg

SEQ ID NO: 371736 - DNA, 15 bp, Homo sapiens
agactcaattccttt

SEQ ID NO: 371737 - DNA, 15 bp, Homo sapiens
aagactcaattcctt

SEQ ID NO: 371738 - DNA, 15 bp, Homo sapiens
aaagactcaattcct

SEQ ID NO: 371739 - DNA, 15 bp, Homo sapiens
aaaagactcaattcc

SEQ ID NO: 371740 - DNA, 15 bp, Homo sapiens
gaaaagactcaattc

SEQ ID NO: 371741 - DNA, 15 bp, Homo sapiens
tgaaaagactcaatt

SEQ ID NO: 371742 - DNA, 15 bp, Homo sapiens
gtgaaaagactcaat

SEQ ID NO: 371743 - DNA, 15 bp, Homo sapiens
tgtgaaaagactcaa

SEQ ID NO: 371744 - DNA, 15 bp, Homo sapiens
ctgtgaaaagactca

SEQ ID NO: 371745 - DNA, 15 bp, Homo sapiens
gctgtgaaaagactc

SEQ ID NO: 371746 - DNA, 15 bp, Homo sapiens
agctgtgaaaagact

SEQ ID NO: 371747 - DNA, 15 bp, Homo sapiens
cagctgtgaaaagac

SEQ ID NO: 371748 - DNA, 15 bp, Homo sapiens
tcagctgtgaaaaga

SEQ ID NO: 371749 - DNA, 15 bp, Homo sapiens
ttcagctgtgaaaag

SEQ ID NO: 371750 - DNA, 15 bp, Homo sapiens
tttcagctgtgaaaa

SEQ ID NO: 371751 - DNA, 15 bp, Homo sapiens
ttttcagctgtgaaa

SEQ ID NO: 371752 - DNA, 15 bp, Homo sapiens
attttcagctgtgaa

SEQ ID NO: 371753 - DNA, 15 bp, Homo sapiens
cattttcagctgtga

SEQ ID NO: 371754 - DNA, 15 bp, Homo sapiens
ccattttcagctgtg

SEQ ID NO: 371755 - DNA, 15 bp, Homo sapiens
tccattttcagctgt

SEQ ID NO: 371756 - DNA, 15 bp, Homo sapiens
ttccattttcagctg

SEQ ID NO: 371757 - DNA, 15 bp, Homo sapiens
attccattttcagct

SEQ ID NO: 371758 - DNA, 15 bp, Homo sapiens
gattccattttcagc

SEQ ID NO: 371759 - DNA, 15 bp, Homo sapiens
agattccattttcag

SEQ ID NO: 371760 - DNA, 15 bp, Homo sapiens
aagattccattttca

SEQ ID NO: 371761 - DNA, 15 bp, Homo sapiens
taaagattccatttt

SEQ ID NO: 371762 - DNA, 15 bp, Homo sapiens
ttaaagattccattt

SEQ ID NO: 371763 - DNA, 15 bp, Homo sapiens
tttaaagattccatt

SEQ ID NO: 371764 - DNA, 15 bp, Homo sapiens
atttaaagattccat

SEQ ID NO: 371765 - DNA, 15 bp, Homo sapiens
tatttaaagattcca

SEQ ID NO: 371766 - DNA, 15 bp, Homo sapiens
ttatttaaagattcc

SEQ ID NO: 371767 - DNA, 15 bp, Homo sapiens
cttatttaaagattc

SEQ ID NO: 371768 - DNA, 15 bp, Homo sapiens
tcttatttaaagatt

SEQ ID NO: 371769 - DNA, 15 bp, Homo sapiens
atcttatttaaagat

SEQ ID NO: 371770 - DNA, 15 bp, Homo sapiens
tatcttatttaaaga

SEQ ID NO: 371771 - DNA, 15 bp, Homo sapiens
ttatcttatttaaag

SEQ ID NO: 371772 - DNA, 15 bp, Homo sapiens
tttatcttatttaaa

SEQ ID NO: 371773 - DNA, 15 bp, Homo sapiens
ttttatcttatttaa

SEQ ID NO: 371774 - DNA, 15 bp, Homo sapiens
attttatcttattta

SEQ ID NO: 371775 - DNA, 15 bp, Homo sapiens
tattttatcttattt

SEQ ID NO: 371776 - DNA, 15 bp, Homo sapiens
ttattttatcttatt

SEQ ID NO: 371777 - DNA, 15 bp, Homo sapiens
tttattttatcttat

SEQ ID NO: 371778 - DNA, 15 bp, Homo sapiens
ttttattttatctta

SEQ ID NO: 371779 - DNA, 15 bp, Homo sapiens
cttttattttatctt

SEQ ID NO: 371780 - DNA, 15 bp, Homo sapiens
ccttttattttatct

SEQ ID NO: 371781 - DNA, 15 bp, Homo sapiens
tccttttattttatc

SEQ ID NO: 371782 - DNA, 15 bp, Homo sapiens
atccttttattttat

SEQ ID NO: 371783 - DNA, 15 bp, Homo sapiens
catccttttatttta

SEQ ID NO: 371784 - DNA, 15 bp, Homo sapiens
gcatccttttatttt

SEQ ID NO: 371785 - DNA, 15 bp, Homo sapiens
ggcatccttttattt

SEQ ID NO: 371786 - DNA, 15 bp, Homo sapiens
cggcatccttttatt

SEQ ID NO: 371787 - DNA, 15 bp, Homo sapiens
acggcatccttttat

SEQ ID NO: 371788 - DNA, 15 bp, Homo sapiens
cacggcatcctttta

SEQ ID NO: 371789 - DNA, 15 bp, Homo sapiens
ccacggcatcctttt

SEQ ID NO: 371790 - DNA, 15 bp, Homo sapiens
gccacggcatccttt

SEQ ID NO: 371791 - DNA, 15 bp, Homo sapiens
agccacggcatcctt

SEQ ID NO: 371792 - DNA, 15 bp, Homo sapiens
aagccacggcatcct

SEQ ID NO: 371793 - DNA, 15 bp, Homo sapiens
caagccacggcatcc

SEQ ID NO: 371794 - DNA, 15 bp, Homo sapiens
acaagccacggcatc

SEQ ID NO: 371795 - DNA, 15 bp, Homo sapiens
aacaagccacggcat

SEQ ID NO: 371796 - DNA, 15 bp, Homo sapiens
caacaagccacggca

SEQ ID NO: 371797 - DNA, 15 bp, Homo sapiens
gcaacaagccacggc

SEQ ID NO: 371798 - DNA, 15 bp, Homo sapiens
cgcaacaagccacgg

SEQ ID NO: 371799 - DNA, 15 bp, Homo sapiens
tcgcaacaagccacg

SEQ ID NO: 371800 - DNA, 15 bp, Homo sapiens
ctcgcaacaagccac

SEQ ID NO: 371801 - DNA, 15 bp, Homo sapiens
actcgcaacaagcca

SEQ ID NO: 371802 - DNA, 15 bp, Homo sapiens
aactcgcaacaagcc

SEQ ID NO: 371803 - DNA, 15 bp, Homo sapiens
gaactcgcaacaagc

SEQ ID NO: 371804 - DNA, 15 bp, Homo sapiens
agaactcgcaacaag

SEQ ID NO: 371805 - DNA, 15 bp, Homo sapiens
cagaactcgcaacaa

SEQ ID NO: 371806 - DNA, 15 bp, Homo sapiens
acagaactcgcaaca

SEQ ID NO: 371807 - DNA, 15 bp, Homo sapiens
tacagaactcgcaac

SEQ ID NO: 371808 - DNA, 15 bp, Homo sapiens
ttacagaactcgcaa

SEQ ID NO: 371809 - DNA, 15 bp, Homo sapiens
attacagaactcgca

SEQ ID NO: 371810 - DNA, 15 bp, Homo sapiens
cattacagaactcgc

SEQ ID NO: 371811 - DNA, 15 bp, Homo sapiens
tcattacagaactcg

SEQ ID NO: 371812 - DNA, 15 bp, Homo sapiens
ttcattacagaactc

SEQ ID NO: 371813 - DNA, 15 bp, Homo sapiens
tttcattacagaact

SEQ ID NO: 371814 - DNA, 15 bp, Homo sapiens
atttcattacagaac

SEQ ID NO: 371815 - DNA, 15 bp, Homo sapiens
tatttcattacagaa

SEQ ID NO: 371816 - DNA, 15 bp, Homo sapiens
gtatttcattacaga

SEQ ID NO: 371817 - DNA, 15 bp, Homo sapiens
tgtatttcattacag

SEQ ID NO: 371818 - DNA, 15 bp, Homo sapiens
ctgtatttcattaca

SEQ ID NO: 371819 - DNA, 15 bp, Homo sapiens
actgtatttcattac

SEQ ID NO: 371820 - DNA, 15 bp, Homo sapiens
aactgtatttcatta

SEQ ID NO: 371821 - DNA, 15 bp, Homo sapiens
aaactgtatttcatt

SEQ ID NO: 371822 - DNA, 15 bp, Homo sapiens
aaaactgtatttcat

SEQ ID NO: 371823 - DNA, 15 bp, Homo sapiens
gaaaactgtatttca

SEQ ID NO: 371824 - DNA, 15 bp, Homo sapiens
ggaaaactgtatttc

SEQ ID NO: 371825 - DNA, 15 bp, Homo sapiens
aggaaaactgtattt

SEQ ID NO: 371826 - DNA, 15 bp, Homo sapiens
taggaaaactgtatt

SEQ ID NO: 371827 - DNA, 15 bp, Homo sapiens
ttaggaaaactgtat

SEQ ID NO: 371828 - DNA, 15 bp, Homo sapiens
attaggaaaactgta

SEQ ID NO: 371829 - DNA, 15 bp, Homo sapiens
tattaggaaaactgt

SEQ ID NO: 371830 - DNA, 15 bp, Homo sapiens
gtattaggaaaactg

SEQ ID NO: 371831 - DNA, 15 bp, Homo sapiens
ggtattaggaaaact

SEQ ID NO: 371832 - DNA, 15 bp, Homo sapiens
cggtattaggaaaac

SEQ ID NO: 371833 - DNA, 15 bp, Homo sapiens
acggtattaggaaaa

SEQ ID NO: 371834 - DNA, 15 bp, Homo sapiens
cacggtattaggaaa

SEQ ID NO: 371835 - DNA, 15 bp, Homo sapiens
acacggtattaggaa

SEQ ID NO: 371836 - DNA, 15 bp, Homo sapiens
cacacggtattagga

SEQ ID NO: 371837 - DNA, 15 bp, Homo sapiens
tcacacggtattagg

SEQ ID NO: 371838 - DNA, 15 bp, Homo sapiens
gtcacacggtattag

SEQ ID NO: 371839 - DNA, 15 bp, Homo sapiens
ggtcacacggtatta

SEQ ID NO: 371840 - DNA, 15 bp, Homo sapiens
aggtcacacggtatt

SEQ ID NO: 371841 - DNA, 15 bp, Homo sapiens
caggtcacacggtat

SEQ ID NO: 371842 - DNA, 15 bp, Homo sapiens
gcaggtcacacggta

SEQ ID NO: 371843 - DNA, 15 bp, Homo sapiens
tgcaggtcacacggt

SEQ ID NO: 371844 - DNA, 15 bp, Homo sapiens
atgcaggtcacacgg

SEQ ID NO: 371845 - DNA, 15 bp, Homo sapiens
aatgcaggtcacacg

SEQ ID NO: 371846 - DNA, 15 bp, Homo sapiens
aaatgcaggtcacac

SEQ ID NO: 371847 - DNA, 15 bp, Homo sapiens
gaaatgcaggtcaca

SEQ ID NO: 371848 - DNA, 15 bp, Homo sapiens
agaaatgcaggtcac

SEQ ID NO: 371849 - DNA, 15 bp, Homo sapiens
gagaaatgcaggtca

SEQ ID NO: 371850 - DNA, 15 bp, Homo sapiens
ggagaaatgcaggtc

SEQ ID NO: 371851 - DNA, 15 bp, Homo sapiens
gggagaaatgcaggt

SEQ ID NO: 371852 - DNA, 15 bp, Homo sapiens
agggagaaatgcagg

SEQ ID NO: 371853 - DNA, 15 bp, Homo sapiens
cagggagaaatgcag

SEQ ID NO: 371854 - DNA, 15 bp, Homo sapiens
gcagggagaaatgca

SEQ ID NO: 371855 - DNA, 15 bp, Homo sapiens
agcagggagaaatgc

SEQ ID NO: 371856 - DNA, 15 bp, Homo sapiens
aagcagggagaaatg

SEQ ID NO: 371857 - DNA, 15 bp, Homo sapiens
aaagcagggagaaat

SEQ ID NO: 371858 - DNA, 15 bp, Homo sapiens
taaagcagggagaaa

SEQ ID NO: 371859 - DNA, 15 bp, Homo sapiens
ataaagcagggagaa

SEQ ID NO: 371860 - DNA, 15 bp, Homo sapiens
cataaagcagggaga

SEQ ID NO: 371861 - DNA, 15 bp, Homo sapiens
ccataaagcagggag

SEQ ID NO: 371862 - DNA, 15 bp, Homo sapiens
cccataaagcaggga

SEQ ID NO: 371863 - DNA, 15 bp, Homo sapiens
acccataaagcaggg

SEQ ID NO: 371864 - DNA, 15 bp, Homo sapiens
cacccataaagcagg

SEQ ID NO: 371865 - DNA, 15 bp, Homo sapiens
gcacccataaagcag

SEQ ID NO: 371866 - DNA, 15 bp, Homo sapiens
agcacccataaagca

SEQ ID NO: 371867 - DNA, 15 bp, Homo sapiens
tagcacccataaagc

SEQ ID NO: 371868 - DNA, 15 bp, Homo sapiens
atagcacccataaag

SEQ ID NO: 371869 - DNA, 15 bp, Homo sapiens
aatagcacccataaa

SEQ ID NO: 371870 - DNA, 15 bp, Homo sapiens
gaatagcacccataa

SEQ ID NO: 371871 - DNA, 15 bp, Homo sapiens
ggaatagcacccata

SEQ ID NO: 371872 - DNA, 15 bp, Homo sapiens
aggaatagcacccat

SEQ ID NO: 371873 - DNA, 15 bp, Homo sapiens
aaggaatagcaccca

SEQ ID NO: 371874 - DNA, 15 bp, Homo sapiens
caaggaatagcaccc

SEQ ID NO: 371875 - DNA, 15 bp, Homo sapiens
tcaaggaatagcacc

SEQ ID NO: 371876 - DNA, 15 bp, Homo sapiens
gtcaaggaatagcac

SEQ ID NO: 371877 - DNA, 15 bp, Homo sapiens
cgtcaaggaatagca

SEQ ID NO: 371878 - DNA, 15 bp, Homo sapiens
acgtcaaggaatagc

SEQ ID NO: 371879 - DNA, 15 bp, Homo sapiens
tacgtcaaggaatag

SEQ ID NO: 371880 - DNA, 15 bp, Homo sapiens
gtacgtcaaggaata

SEQ ID NO: 371881 - DNA, 15 bp, Homo sapiens
tgtacgtcaaggaat

SEQ ID NO: 371882 - DNA, 15 bp, Homo sapiens
ttgtacgtcaaggaa

SEQ ID NO: 371883 - DNA, 15 bp, Homo sapiens
tttgtacgtcaagga

SEQ ID NO: 371884 - DNA, 15 bp, Homo sapiens
gtttgtacgtcaagg

SEQ ID NO: 371885 - DNA, 15 bp, Homo sapiens
ggtttgtacgtcaag

SEQ ID NO: 371886 - DNA, 15 bp, Homo sapiens
gggtttgtacgtcaa

SEQ ID NO: 371887 - DNA, 15 bp, Homo sapiens
cgggtttgtacgtca

SEQ ID NO: 371888 - DNA, 15 bp, Homo sapiens
acgggtttgtacgtc

SEQ ID NO: 371889 - DNA, 15 bp, Homo sapiens
tacgggtttgtacgt

SEQ ID NO: 371890 - DNA, 15 bp, Homo sapiens
atacgggtttgtacg

SEQ ID NO: 371891 - DNA, 15 bp, Homo sapiens
aatacgggtttgtac

SEQ ID NO: 371892 - DNA, 15 bp, Homo sapiens
aaatacgggtttgta

SEQ ID NO: 371893 - DNA, 15 bp, Homo sapiens
aaaatacgggtttgt

SEQ ID NO: 371894 - DNA, 15 bp, Homo sapiens
gaaaatacgggtttg

SEQ ID NO: 371895 - DNA, 15 bp, Homo sapiens
agaaaatacgggttt

SEQ ID NO: 371896 - DNA, 15 bp, Homo sapiens
gagaaaatacgggtt

SEQ ID NO: 371897 - DNA, 15 bp, Homo sapiens
tgagaaaatacgggt

SEQ ID NO: 371898 - DNA, 15 bp, Homo sapiens
ttgagaaaatacggg

SEQ ID NO: 371899 - DNA, 15 bp, Homo sapiens
cttgagaaaatacgg

SEQ ID NO: 371900 - DNA, 15 bp, Homo sapiens
acttgagaaaatacg

SEQ ID NO: 371901 - DNA, 15 bp, Homo sapiens
gacttgagaaaatac

SEQ ID NO: 371902 - DNA, 15 bp, Homo sapiens
tgacttgagaaaata

SEQ ID NO: 371903 - DNA, 15 bp, Homo sapiens
ctgacttgagaaaat

SEQ ID NO: 371904 - DNA, 15 bp, Homo sapiens
gctgacttgagaaaa

SEQ ID NO: 371905 - DNA, 15 bp, Homo sapiens
tgctgacttgagaaa

SEQ ID NO: 371906 - DNA, 15 bp, Homo sapiens
atgctgacttgagaa

SEQ ID NO: 371907 - DNA, 15 bp, Homo sapiens
aatgctgacttgaga

SEQ ID NO: 371908 - DNA, 15 bp, Homo sapiens
aaatgctgacttgag

SEQ ID NO: 371909 - DNA, 15 bp, Homo sapiens
caaatgctgacttga

SEQ ID NO: 371910 - DNA, 15 bp, Homo sapiens
tcaaatgctgacttg

SEQ ID NO: 371911 - DNA, 15 bp, Homo sapiens
atcaaatgctgactt

SEQ ID NO: 371912 - DNA, 15 bp, Homo sapiens
catcaaatgctgact

SEQ ID NO: 371913 - DNA, 15 bp, Homo sapiens
tcatcaaatgctgac

SEQ ID NO: 371914 - DNA, 15 bp, Homo sapiens
atcatcaaatgctga

SEQ ID NO: 371915 - DNA, 15 bp, Homo sapiens
catcatcaaatgctg

SEQ ID NO: 371916 - DNA, 15 bp, Homo sapiens
ccatcatcaaatgct

SEQ ID NO: 371917 - DNA, 15 bp, Homo sapiens
tccatcatcaaatgc

SEQ ID NO: 371918 - DNA, 15 bp, Homo sapiens
atccatcatcaaatg

SEQ ID NO: 371919 - DNA, 15 bp, Homo sapiens
catccatcatcaaat

SEQ ID NO: 371920 - DNA, 15 bp, Homo sapiens
acatccatcatcaaa

SEQ ID NO: 371921 - DNA, 15 bp, Homo sapiens
gacatccatcatcaa

SEQ ID NO: 371922 - DNA, 15 bp, Homo sapiens
tgacatccatcatca

SEQ ID NO: 371923 - DNA, 15 bp, Homo sapiens
ttgacatccatcatc

SEQ ID NO: 371924 - DNA, 15 bp, Homo sapiens
tttgacatccatcat

SEQ ID NO: 371925 - DNA, 15 bp, Homo sapiens
ttttgacatccatca

SEQ ID NO: 371926 - DNA, 15 bp, Homo sapiens
attttgacatccatc

SEQ ID NO: 371927 - DNA, 15 bp, Homo sapiens
tattttgacatccat

SEQ ID NO: 371928 - DNA, 15 bp, Homo sapiens
gtattttgacatcca

SEQ ID NO: 371929 - DNA, 15 bp, Homo sapiens
tgtattttgacatcc

SEQ ID NO: 371930 - DNA, 15 bp, Homo sapiens
ctgtattttgacatc

SEQ ID NO: 371931 - DNA, 15 bp, Homo sapiens
cctgtattttgacat

SEQ ID NO: 371932 - DNA, 15 bp, Homo sapiens
gcctgtattttgaca

SEQ ID NO: 371933 - DNA, 15 bp, Homo sapiens
ggcctgtattttgac

SEQ ID NO: 371934 - DNA, 15 bp, Homo sapiens
tggcctgtattttga

SEQ ID NO: 371935 - DNA, 15 bp, Homo sapiens
atggcctgtattttg

SEQ ID NO: 371936 - DNA, 15 bp, Homo sapiens
catggcctgtatttt

SEQ ID NO: 371937 - DNA, 15 bp, Homo sapiens
acatggcctgtattt

SEQ ID NO: 371938 - DNA, 15 bp, Homo sapiens
tacatggcctgtatt

SEQ ID NO: 371939 - DNA, 15 bp, Homo sapiens
atacatggcctgtat

SEQ ID NO: 371940 - DNA, 15 bp, Homo sapiens
aatacatggcctgta

SEQ ID NO: 371941 - DNA, 15 bp, Homo sapiens
taatacatggcctgt

SEQ ID NO: 371942 - DNA, 15 bp, Homo sapiens
ataatacatggcctg

SEQ ID NO: 371943 - DNA, 15 bp, Homo sapiens
cataatacatggcct

SEQ ID NO: 371944 - DNA, 15 bp, Homo sapiens
gcataatacatggcc

SEQ ID NO: 371945 - DNA, 15 bp, Homo sapiens
tgcataatacatggc

SEQ ID NO: 371946 - DNA, 15 bp, Homo sapiens
atgcataatacatgg

SEQ ID NO: 371947 - DNA, 15 bp, Homo sapiens
tatgcataatacatg

SEQ ID NO: 371948 - DNA, 15 bp, Homo sapiens
atatgcataatacat

SEQ ID NO: 371949 - DNA, 15 bp, Homo sapiens
tatatgcataataca

SEQ ID NO: 371950 - DNA, 15 bp, Homo sapiens
ctatatgcataatac

SEQ ID NO: 371951 - DNA, 15 bp, Homo sapiens
gctatatgcataata

SEQ ID NO: 371952 - DNA, 15 bp, Homo sapiens
tgctatatgcataat

SEQ ID NO: 371953 - DNA, 15 bp, Homo sapiens
atgctatatgcataa

SEQ ID NO: 371954 - DNA, 15 bp, Homo sapiens
aatgctatatgcata

SEQ ID NO: 371955 - DNA, 15 bp, Homo sapiens
taatgctatatgcat

SEQ ID NO: 371956 - DNA, 15 bp, Homo sapiens
gtaatgctatatgca

SEQ ID NO: 371957 - DNA, 15 bp, Homo sapiens
ggtaatgctatatgc

SEQ ID NO: 371958 - DNA, 15 bp, Homo sapiens
cggtaatgctatatg

SEQ ID NO: 371959 - DNA, 15 bp, Homo sapiens
tcggtaatgctatat

SEQ ID NO: 371960 - DNA, 15 bp, Homo sapiens
atcggtaatgctata

SEQ ID NO: 371961 - DNA, 15 bp, Homo sapiens
aatcggtaatgctat

SEQ ID NO: 371962 - DNA, 15 bp, Homo sapiens
aaatcggtaatgcta

SEQ ID NO: 371963 - DNA, 15 bp, Homo sapiens
taaatcggtaatgct

SEQ ID NO: 371964 - DNA, 15 bp, Homo sapiens
ttaaatcggtaatgc

SEQ ID NO: 371965 - DNA, 15 bp, Homo sapiens
cttaaatcggtaatg

SEQ ID NO: 371966 - DNA, 15 bp, Homo sapiens
ccttaaatcggtaat

SEQ ID NO: 371967 - DNA, 15 bp, Homo sapiens
accttaaatcggtaa

SEQ ID NO: 371968 - DNA, 15 bp, Homo sapiens
caccttaaatcggta

SEQ ID NO: 371969 - DNA, 15 bp, Homo sapiens
acaccttaaatcggt

SEQ ID NO: 371970 - DNA, 15 bp, Homo sapiens
aacaccttaaatcgg

SEQ ID NO: 371971 - DNA, 15 bp, Homo sapiens
aaacaccttaaatcg

SEQ ID NO: 371972 - DNA, 15 bp, Homo sapiens
taaacaccttaaatc

SEQ ID NO: 371973 - DNA, 15 bp, Homo sapiens
gtaaacaccttaaat

SEQ ID NO: 371974 - DNA, 15 bp, Homo sapiens
agtaaacaccttaaa

SEQ ID NO: 371975 - DNA, 15 bp, Homo sapiens
aagtaaacaccttaa

SEQ ID NO: 371976 - DNA, 15 bp, Homo sapiens
caagtaaacacctta

SEQ ID NO: 371977 - DNA, 15 bp, Homo sapiens
acaagtaaacacctt

SEQ ID NO: 371978 - DNA, 15 bp, Homo sapiens
gacaagtaaacacct

SEQ ID NO: 371979 - DNA, 15 bp, Homo sapiens
tgacaagtaaacacc

SEQ ID NO: 371980 - DNA, 15 bp, Homo sapiens
ttgacaagtaaacac

SEQ ID NO: 371981 - DNA, 15 bp, Homo sapiens
cttgacaagtaaaca

SEQ ID NO: 371982 - DNA, 15 bp, Homo sapiens
acttgacaagtaaac

SEQ ID NO: 371983 - DNA, 15 bp, Homo sapiens
aacttgacaagtaaa

SEQ ID NO: 371984 - DNA, 15 bp, Homo sapiens
caacttgacaagtaa

SEQ ID NO: 371985 - DNA, 15 bp, Homo sapiens
tcaacttgacaagta

SEQ ID NO: 371986 - DNA, 15 bp, Homo sapiens
ttcaacttgacaagt

SEQ ID NO: 371987 - DNA, 15 bp, Homo sapiens
cttcaacttgacaag

SEQ ID NO: 371988 - DNA, 15 bp, Homo sapiens
tcttcaacttgacaa

SEQ ID NO: 371989 - DNA, 15 bp, Homo sapiens
ttcttcaacttgaca

SEQ ID NO: 371990 - DNA, 15 bp, Homo sapiens
tttcttcaacttgac

SEQ ID NO: 371991 - DNA, 15 bp, Homo sapiens
atttcttcaacttga

SEQ ID NO: 371992 - DNA, 15 bp, Homo sapiens
aatttcttcaacttg

SEQ ID NO: 371993 - DNA, 15 bp, Homo sapiens
gaatttcttcaactt

SEQ ID NO: 371994 - DNA, 15 bp, Homo sapiens
tgaatttcttcaact

SEQ ID NO: 371995 - DNA, 15 bp, Homo sapiens
ttgaatttcttcaac

SEQ ID NO: 371996 - DNA, 15 bp, Homo sapiens
tttgaatttcttcaa

SEQ ID NO: 371997 - DNA, 15 bp, Homo sapiens
ttttgaatttcttca

SEQ ID NO: 371998 - DNA, 15 bp, Homo sapiens
tttttgaatttcttc

SEQ ID NO: 371999 - DNA, 15 bp, Homo sapiens
gtttttgaatttctt

SEQ ID NO: 372000 - DNA, 15 bp, Homo sapiens
cgtttttgaatttct

SEQ ID NO: 372001 - DNA, 15 bp, Homo sapiens
acgtttttgaatttc

SEQ ID NO: 372002 - DNA, 15 bp, Homo sapiens
gacgtttttgaattt

SEQ ID NO: 372003 - DNA, 15 bp, Homo sapiens
tgacgtttttgaatt

SEQ ID NO: 372004 - DNA, 15 bp, Homo sapiens
gtgacgtttttgaat

SEQ ID NO: 372005 - DNA, 15 bp, Homo sapiens
tgtgacgtttttgaa

SEQ ID NO: 372006 - DNA, 15 bp, Homo sapiens
atgtgacgtttttga

SEQ ID NO: 372007 - DNA, 15 bp, Homo sapiens
gatgtgacgtttttg

SEQ ID NO: 372008 - DNA, 15 bp, Homo sapiens
ggatgtgacgttttt

SEQ ID NO: 372009 - DNA, 15 bp, Homo sapiens
tggatgtgacgtttt

SEQ ID NO: 372010 - DNA, 15 bp, Homo sapiens
gtggatgtgacgttt

SEQ ID NO: 372011 - DNA, 15 bp, Homo sapiens
agtggatgtgacgtt

SEQ ID NO: 372012 - DNA, 15 bp, Homo sapiens
cagtggatgtgacgt

SEQ ID NO: 372013 - DNA, 15 bp, Homo sapiens
tcagtggatgtgacg

SEQ ID NO: 372014 - DNA, 15 bp, Homo sapiens
ttcagtggatgtgac

SEQ ID NO: 372015 - DNA, 15 bp, Homo sapiens
attcagtggatgtga

SEQ ID NO: 372016 - DNA, 15 bp, Homo sapiens
gattcagtggatgtg

SEQ ID NO: 372017 - DNA, 15 bp, Homo sapiens
agattcagtggatgt

SEQ ID NO: 372018 - DNA, 15 bp, Homo sapiens
cagattcagtggatg

SEQ ID NO: 372019 - DNA, 15 bp, Homo sapiens
gcagattcagtggat

SEQ ID NO: 372020 - DNA, 15 bp, Homo sapiens
tgcagattcagtgga

SEQ ID NO: 372021 - DNA, 15 bp, Homo sapiens
gtgcagattcagtgg

SEQ ID NO: 372022 - DNA, 15 bp, Homo sapiens
tgtgcagattcagtg

SEQ ID NO: 372023 - DNA, 15 bp, Homo sapiens
ctgtgcagattcagt

SEQ ID NO: 372024 - DNA, 15 bp, Homo sapiens
gctgtgcagattcag

SEQ ID NO: 372025 - DNA, 15 bp, Homo sapiens
agctgtgcagattca

SEQ ID NO: 372026 - DNA, 15 bp, Homo sapiens
cagctgtgcagattc

SEQ ID NO: 372027 - DNA, 15 bp, Homo sapiens
acagctgtgcagatt

SEQ ID NO: 372028 - DNA, 15 bp, Homo sapiens
gacagctgtgcagat

SEQ ID NO: 372029 - DNA, 15 bp, Homo sapiens
tgacagctgtgcaga

SEQ ID NO: 372030 - DNA, 15 bp, Homo sapiens
gtgacagctgtgcag

SEQ ID NO: 372031 - DNA, 15 bp, Homo sapiens
agtgacagctgtgca

SEQ ID NO: 372032 - DNA, 15 bp, Homo sapiens
aagtgacagctgtgc

SEQ ID NO: 372033 - DNA, 15 bp, Homo sapiens
gaagtgacagctgtg

SEQ ID NO: 372034 - DNA, 15 bp, Homo sapiens
ggaagtgacagctgt

SEQ ID NO: 372035 - DNA, 15 bp, Homo sapiens
tggaagtgacagctg

SEQ ID NO: 372036 - DNA, 15 bp, Homo sapiens
ctggaagtgacagct

SEQ ID NO: 372037 - DNA, 15 bp, Homo sapiens
actggaagtgacagc

SEQ ID NO: 372038 - DNA, 15 bp, Homo sapiens
aactggaagtgacag

SEQ ID NO: 372039 - DNA, 15 bp, Homo sapiens
aaactggaagtgaca

SEQ ID NO: 372040 - DNA, 15 bp, Homo sapiens
aaaactggaagtgac

SEQ ID NO: 372041 - DNA, 15 bp, Homo sapiens
aaaaactggaagtga

SEQ ID NO: 372042 - DNA, 15 bp, Homo sapiens
gaaaaactggaagtg

SEQ ID NO: 372043 - DNA, 15 bp, Homo sapiens
tgaaaaactggaagt

SEQ ID NO: 372044 - DNA, 15 bp, Homo sapiens
atgaaaaactggaag

SEQ ID NO: 372045 - DNA, 15 bp, Homo sapiens
catgaaaaactggaa

SEQ ID NO: 372046 - DNA, 15 bp, Homo sapiens
acatgaaaaactgga

SEQ ID NO: 372047 - DNA, 15 bp, Homo sapiens
aacatgaaaaactgg

SEQ ID NO: 372048 - DNA, 15 bp, Homo sapiens
aaaacatgaaaaact

SEQ ID NO: 372049 - DNA, 15 bp, Homo sapiens
aaaaacatgaaaaac

SEQ ID NO: 372050 - DNA, 15 bp, Homo sapiens
caaaaacatgaaaaa

SEQ ID NO: 372051 - DNA, 15 bp, Homo sapiens
tcaaaaacatgaaaa

SEQ ID NO: 372052 - DNA, 15 bp, Homo sapiens
ttcaaaaacatgaaa

SEQ ID NO: 372053 - DNA, 15 bp, Homo sapiens
attcaaaaacatgaa

SEQ ID NO: 372054 - DNA, 15 bp, Homo sapiens
cattcaaaaacatga

SEQ ID NO: 372055 - DNA, 15 bp, Homo sapiens
tcattcaaaaacatg

SEQ ID NO: 372056 - DNA, 15 bp, Homo sapiens
ttcattcaaaaacat

SEQ ID NO: 372057 - DNA, 15 bp, Homo sapiens
tttcattcaaaaaca

SEQ ID NO: 372058 - DNA, 15 bp, Homo sapiens
gtttcattcaaaaac

SEQ ID NO: 372059 - DNA, 15 bp, Homo sapiens
agtttcattcaaaaa

SEQ ID NO: 372060 - DNA, 15 bp, Homo sapiens
aagtttcattcaaaa

SEQ ID NO: 372061 - DNA, 15 bp, Homo sapiens
gaagtttcattcaaa

SEQ ID NO: 372062 - DNA, 15 bp, Homo sapiens
agaagtttcattcaa

SEQ ID NO: 372063 - DNA, 15 bp, Homo sapiens
tagaagtttcattca

SEQ ID NO: 372064 - DNA, 15 bp, Homo sapiens
ttagaagtttcattc

SEQ ID NO: 372065 - DNA, 15 bp, Homo sapiens
attagaagtttcatt

SEQ ID NO: 372066 - DNA, 15 bp, Homo sapiens
cattagaagtttcat

SEQ ID NO: 372067 - DNA, 15 bp, Homo sapiens
tcattagaagtttca

SEQ ID NO: 372068 - DNA, 15 bp, Homo sapiens
ttcattagaagtttc

SEQ ID NO: 372069 - DNA, 15 bp, Homo sapiens
tttcattagaagttt

SEQ ID NO: 372070 - DNA, 15 bp, Homo sapiens
ttttcattagaagtt

SEQ ID NO: 372071 - DNA, 15 bp, Homo sapiens
gttttcattagaagt

SEQ ID NO: 372072 - DNA, 15 bp, Homo sapiens
tgttttcattagaag

SEQ ID NO: 372073 - DNA, 15 bp, Homo sapiens
ctgttttcattagaa

SEQ ID NO: 372074 - DNA, 15 bp, Homo sapiens
actgttttcattaga

SEQ ID NO: 372075 - DNA, 15 bp, Homo sapiens
aactgttttcattag

SEQ ID NO: 372076 - DNA, 15 bp, Homo sapiens
aaactgttttcatta

SEQ ID NO: 372077 - DNA, 15 bp, Homo sapiens
taaactgttttcatt

SEQ ID NO: 372078 - DNA, 15 bp, Homo sapiens
ctaaactgttttcat

SEQ ID NO: 372079 - DNA, 15 bp, Homo sapiens
actaaactgttttca

SEQ ID NO: 372080 - DNA, 15 bp, Homo sapiens
aactaaactgttttc

SEQ ID NO: 372081 - DNA, 15 bp, Homo sapiens
aaactaaactgtttt

SEQ ID NO: 372082 - DNA, 15 bp, Homo sapiens
aaaactaaactgttt

SEQ ID NO: 372083 - DNA, 15 bp, Homo sapiens
gaaaactaaactgtt

SEQ ID NO: 372084 - DNA, 15 bp, Homo sapiens
ggaaaactaaactgt

SEQ ID NO: 372085 - DNA, 15 bp, Homo sapiens
gggaaaactaaactg

SEQ ID NO: 372086 - DNA, 15 bp, Homo sapiens
ggggaaaactaaact

SEQ ID NO: 372087 - DNA, 15 bp, Homo sapiens
aggggaaaactaaac

SEQ ID NO: 372088 - DNA, 15 bp, Homo sapiens
aaggggaaaactaaa

SEQ ID NO: 372089 - DNA, 15 bp, Homo sapiens
gaaggggaaaactaa

SEQ ID NO: 372090 - DNA, 15 bp, Homo sapiens
tgaaggggaaaacta

SEQ ID NO: 372091 - DNA, 15 bp, Homo sapiens
gtgaaggggaaaact

SEQ ID NO: 372092 - DNA, 15 bp, Homo sapiens
ggtgaaggggaaaac

SEQ ID NO: 372093 - DNA, 15 bp, Homo sapiens
tggtgaaggggaaaa

SEQ ID NO: 372094 - DNA, 15 bp, Homo sapiens
atggtgaaggggaaa

SEQ ID NO: 372095 - DNA, 15 bp, Homo sapiens
gatggtgaaggggaa

SEQ ID NO: 372096 - DNA, 15 bp, Homo sapiens
ggatggtgaagggga

SEQ ID NO: 372097 - DNA, 15 bp, Homo sapiens
aggatggtgaagggg

SEQ ID NO: 372098 - DNA, 15 bp, Homo sapiens
taggatggtgaaggg

SEQ ID NO: 372099 - DNA, 15 bp, Homo sapiens
ctaggatggtgaagg

SEQ ID NO: 372100 - DNA, 15 bp, Homo sapiens
tctaggatggtgaag

SEQ ID NO: 372101 - DNA, 15 bp, Homo sapiens
ttctaggatggtgaa

SEQ ID NO: 372102 - DNA, 15 bp, Homo sapiens
cttctaggatggtga

SEQ ID NO: 372103 - DNA, 15 bp, Homo sapiens
tcttctaggatggtg

SEQ ID NO: 372104 - DNA, 15 bp, Homo sapiens
ttcttctaggatggt

SEQ ID NO: 372105 - DNA, 15 bp, Homo sapiens
cttcttctaggatgg

SEQ ID NO: 372106 - DNA, 15 bp, Homo sapiens
tcttcttctaggatg

SEQ ID NO: 372107 - DNA, 15 bp, Homo sapiens
ttcttcttctaggat

SEQ ID NO: 372108 - DNA, 15 bp, Homo sapiens
tttcttcttctagga

SEQ ID NO: 372109 - DNA, 15 bp, Homo sapiens
ttttcttcttctagg

SEQ ID NO: 372110 - DNA, 15 bp, Homo sapiens
gttttcttcttctag

SEQ ID NO: 372111 - DNA, 15 bp, Homo sapiens
tgttttcttcttcta

SEQ ID NO: 372112 - DNA, 15 bp, Homo sapiens
ctgttttcttcttct

SEQ ID NO: 372113 - DNA, 15 bp, Homo sapiens
gctgttttcttcttc

SEQ ID NO: 372114 - DNA, 15 bp, Homo sapiens
agctgttttcttctt

SEQ ID NO: 372115 - DNA, 15 bp, Homo sapiens
tagctgttttcttct

SEQ ID NO: 372116 - DNA, 15 bp, Homo sapiens
ctagctgttttcttc

SEQ ID NO: 372117 - DNA, 15 bp, Homo sapiens
gctagctgttttctt

SEQ ID NO: 372118 - DNA, 15 bp, Homo sapiens
tgctagctgttttct

SEQ ID NO: 372119 - DNA, 15 bp, Homo sapiens
atgctagctgttttc

SEQ ID NO: 372120 - DNA, 15 bp, Homo sapiens
aatgctagctgtttt

SEQ ID NO: 372121 - DNA, 15 bp, Homo sapiens
aaatgctagctgttt

SEQ ID NO: 372122 - DNA, 15 bp, Homo sapiens
taaatgctagctgtt

SEQ ID NO: 372123 - DNA, 15 bp, Homo sapiens
ttaaatgctagctgt

SEQ ID NO: 372124 - DNA, 15 bp, Homo sapiens
tttaaatgctagctg

SEQ ID NO: 372125 - DNA, 15 bp, Homo sapiens
ttttaaatgctagct

SEQ ID NO: 372126 - DNA, 15 bp, Homo sapiens
tttttaaatgctagc

SEQ ID NO: 372127 - DNA, 15 bp, Homo sapiens
atttttaaatgctag

SEQ ID NO: 372128 - DNA, 15 bp, Homo sapiens
catttttaaatgcta

SEQ ID NO: 372129 - DNA, 15 bp, Homo sapiens
gcatttttaaatgct

SEQ ID NO: 372130 - DNA, 15 bp, Homo sapiens
cgcatttttaaatgc

SEQ ID NO: 372131 - DNA, 15 bp, Homo sapiens
acgcatttttaaatg

SEQ ID NO: 372132 - DNA, 15 bp, Homo sapiens
cacgcatttttaaat

SEQ ID NO: 372133 - DNA, 15 bp, Homo sapiens
acacgcatttttaaa

SEQ ID NO: 372134 - DNA, 15 bp, Homo sapiens
aacacgcatttttaa

SEQ ID NO: 372135 - DNA, 15 bp, Homo sapiens
aaacacgcattttta

SEQ ID NO: 372136 - DNA, 15 bp, Homo sapiens
aaaacacgcattttt

SEQ ID NO: 372137 - DNA, 15 bp, Homo sapiens
aaaaacacgcatttt

SEQ ID NO: 372138 - DNA, 15 bp, Homo sapiens
caaaaacacgcattt

SEQ ID NO: 372139 - DNA, 15 bp, Homo sapiens
ccaaaaacacgcatt

SEQ ID NO: 372140 - DNA, 15 bp, Homo sapiens
accaaaaacacgcat

SEQ ID NO: 372141 - DNA, 15 bp, Homo sapiens
aaccaaaaacacgca

SEQ ID NO: 372142 - DNA, 15 bp, Homo sapiens
taaccaaaaacacgc

SEQ ID NO: 372143 - DNA, 15 bp, Homo sapiens
ataaccaaaaacacg

SEQ ID NO: 372144 - DNA, 15 bp, Homo sapiens
cataaccaaaaacac

SEQ ID NO: 372145 - DNA, 15 bp, Homo sapiens
acataaccaaaaaca

SEQ ID NO: 372146 - DNA, 15 bp, Homo sapiens
cacataaccaaaaac

SEQ ID NO: 372147 - DNA, 15 bp, Homo sapiens
ccacataaccaaaaa

SEQ ID NO: 372148 - DNA, 15 bp, Homo sapiens
accacataaccaaaa

SEQ ID NO: 372149 - DNA, 15 bp, Homo sapiens
aaccacataaccaaa

SEQ ID NO: 372150 - DNA, 15 bp, Homo sapiens
caaccacataaccaa

SEQ ID NO: 372151 - DNA, 15 bp, Homo sapiens
ccaaccacataacca

SEQ ID NO: 372152 - DNA, 15 bp, Homo sapiens
gccaaccacataacc

SEQ ID NO: 372153 - DNA, 15 bp, Homo sapiens
agccaaccacataac

SEQ ID NO: 372154 - DNA, 15 bp, Homo sapiens
cagccaaccacataa

SEQ ID NO: 372155 - DNA, 15 bp, Homo sapiens
tcagccaaccacata

SEQ ID NO: 372156 - DNA, 15 bp, Homo sapiens
ttcagccaaccacat

SEQ ID NO: 372157 - DNA, 15 bp, Homo sapiens
tttcagccaaccaca

SEQ ID NO: 372158 - DNA, 15 bp, Homo sapiens
ttttcagccaaccac

SEQ ID NO: 372159 - DNA, 15 bp, Homo sapiens
tttttcagccaacca

SEQ ID NO: 372160 - DNA, 15 bp, Homo sapiens
gtttttcagccaacc

SEQ ID NO: 372161 - DNA, 15 bp, Homo sapiens
tgtttttcagccaac

SEQ ID NO: 372162 - DNA, 15 bp, Homo sapiens
atgtttttcagccaa

SEQ ID NO: 372163 - DNA, 15 bp, Homo sapiens
tatgtttttcagcca

SEQ ID NO: 372164 - DNA, 15 bp, Homo sapiens
atatgtttttcagcc

SEQ ID NO: 372165 - DNA, 15 bp, Homo sapiens
tatatgtttttcagc

SEQ ID NO: 372166 - DNA, 15 bp, Homo sapiens
atatatgtttttcag

SEQ ID NO: 372167 - DNA, 15 bp, Homo sapiens
aatatatgtttttca

SEQ ID NO: 372168 - DNA, 15 bp, Homo sapiens
gaatatatgtttttc

SEQ ID NO: 372169 - DNA, 15 bp, Homo sapiens
cgaatatatgttttt

SEQ ID NO: 372170 - DNA, 15 bp, Homo sapiens
tcgaatatatgtttt

SEQ ID NO: 372171 - DNA, 15 bp, Homo sapiens
ttcgaatatatgttt

SEQ ID NO: 372172 - DNA, 15 bp, Homo sapiens
tttcgaatatatgtt

SEQ ID NO: 372173 - DNA, 15 bp, Homo sapiens
ctttcgaatatatgt

SEQ ID NO: 372174 - DNA, 15 bp, Homo sapiens
actttcgaatatatg

SEQ ID NO: 372175 - DNA, 15 bp, Homo sapiens
aactttcgaatatat

SEQ ID NO: 372176 - DNA, 15 bp, Homo sapiens
aaactttcgaatata

SEQ ID NO: 372177 - DNA, 15 bp, Homo sapiens
caaactttcgaatat

SEQ ID NO: 372178 - DNA, 15 bp, Homo sapiens
tcaaactttcgaata

SEQ ID NO: 372179 - DNA, 15 bp, Homo sapiens
ttcaaactttcgaat

SEQ ID NO: 372180 - DNA, 15 bp, Homo sapiens
tttcaaactttcgaa

SEQ ID NO: 372181 - DNA, 15 bp, Homo sapiens
ttttcaaactttcga

SEQ ID NO: 372182 - DNA, 15 bp, Homo sapiens
cttttcaaactttcg

SEQ ID NO: 372183 - DNA, 15 bp, Homo sapiens
tcttttcaaactttc

SEQ ID NO: 372184 - DNA, 15 bp, Homo sapiens
atcttttcaaacttt

SEQ ID NO: 372185 - DNA, 15 bp, Homo sapiens
catcttttcaaactt

SEQ ID NO: 372186 - DNA, 15 bp, Homo sapiens
ccatcttttcaaact

SEQ ID NO: 372187 - DNA, 15 bp, Homo sapiens
tccatcttttcaaac

SEQ ID NO: 372188 - DNA, 15 bp, Homo sapiens
gtccatcttttcaaa

SEQ ID NO: 372189 - DNA, 15 bp, Homo sapiens
tgtccatcttttcaa

SEQ ID NO: 372190 - DNA, 15 bp, Homo sapiens
gtgtccatcttttca

SEQ ID NO: 372191 - DNA, 15 bp, Homo sapiens
agtgtccatcttttc

SEQ ID NO: 372192 - DNA, 15 bp, Homo sapiens
tagtgtccatctttt

SEQ ID NO: 372193 - DNA, 15 bp, Homo sapiens
gtagtgtccatcttt

SEQ ID NO: 372194 - DNA, 15 bp, Homo sapiens
tgtagtgtccatctt

SEQ ID NO: 372195 - DNA, 15 bp, Homo sapiens
ttgtagtgtccatct

SEQ ID NO: 372196 - DNA, 15 bp, Homo sapiens
attgtagtgtccatc

SEQ ID NO: 372197 - DNA, 15 bp, Homo sapiens
cattgtagtgtccat

SEQ ID NO: 372198 - DNA, 15 bp, Homo sapiens
acattgtagtgtcca

SEQ ID NO: 372199 - DNA, 15 bp, Homo sapiens
gacattgtagtgtcc

SEQ ID NO: 372200 - DNA, 15 bp, Homo sapiens
tgacattgtagtgtc

SEQ ID NO: 372201 - DNA, 15 bp, Homo sapiens
ttgacattgtagtgt

SEQ ID NO: 372202 - DNA, 15 bp, Homo sapiens
attgacattgtagtg

SEQ ID NO: 372203 - DNA, 15 bp, Homo sapiens
gattgacattgtagt

SEQ ID NO: 372204 - DNA, 15 bp, Homo sapiens
tgattgacattgtag

SEQ ID NO: 372205 - DNA, 15 bp, Homo sapiens
ttgattgacattgta

SEQ ID NO: 372206 - DNA, 15 bp, Homo sapiens
tttgattgacattgt

SEQ ID NO: 372207 - DNA, 15 bp, Homo sapiens
ttttgattgacattg

SEQ ID NO: 372208 - DNA, 15 bp, Homo sapiens
attttgattgacatt

SEQ ID NO: 372209 - DNA, 15 bp, Homo sapiens
cattttgattgacat

SEQ ID NO: 372210 - DNA, 15 bp, Homo sapiens
tcattttgattgaca

SEQ ID NO: 372211 - DNA, 15 bp, Homo sapiens
gtcattttgattgac

SEQ ID NO: 372212 - DNA, 15 bp, Homo sapiens
agtcattttgattga

SEQ ID NO: 372213 - DNA, 15 bp, Homo sapiens
aagtcattttgattg

SEQ ID NO: 372214 - DNA, 15 bp, Homo sapiens
taagtcattttgatt

SEQ ID NO: 372215 - DNA, 15 bp, Homo sapiens
gtaagtcattttgat

SEQ ID NO: 372216 - DNA, 15 bp, Homo sapiens
ggtaagtcattttga

SEQ ID NO: 372217 - DNA, 15 bp, Homo sapiens
gggtaagtcattttg

SEQ ID NO: 372218 - DNA, 15 bp, Homo sapiens
agggtaagtcatttt

SEQ ID NO: 372219 - DNA, 15 bp, Homo sapiens
aagggtaagtcattt

SEQ ID NO: 372220 - DNA, 15 bp, Homo sapiens
aaagggtaagtcatt

SEQ ID NO: 372221 - DNA, 15 bp, Homo sapiens
aaaagggtaagtcat

SEQ ID NO: 372222 - DNA, 15 bp, Homo sapiens
gaaaagggtaagtca

SEQ ID NO: 372223 - DNA, 15 bp, Homo sapiens
tgaaaagggtaagtc

SEQ ID NO: 372224 - DNA, 15 bp, Homo sapiens
atgaaaagggtaagt

SEQ ID NO: 372225 - DNA, 15 bp, Homo sapiens
tatgaaaagggtaag

SEQ ID NO: 372226 - DNA, 15 bp, Homo sapiens
ctatgaaaagggtaa

SEQ ID NO: 372227 - DNA, 15 bp, Homo sapiens
actatgaaaagggta

SEQ ID NO: 372228 - DNA, 15 bp, Homo sapiens
cactatgaaaagggt

SEQ ID NO: 372229 - DNA, 15 bp, Homo sapiens
acactatgaaaaggg

SEQ ID NO: 372230 - DNA, 15 bp, Homo sapiens
tacactatgaaaagg

SEQ ID NO: 372231 - DNA, 15 bp, Homo sapiens
atacactatgaaaag

SEQ ID NO: 372232 - DNA, 15 bp, Homo sapiens
aatacactatgaaaa

SEQ ID NO: 372233 - DNA, 15 bp, Homo sapiens
taatacactatgaaa

SEQ ID NO: 372234 - DNA, 15 bp, Homo sapiens
ttaatacactatgaa

SEQ ID NO: 372235 - DNA, 15 bp, Homo sapiens
attaatacactatga

SEQ ID NO: 372236 - DNA, 15 bp, Homo sapiens
cattaatacactatg

SEQ ID NO: 372237 - DNA, 15 bp, Homo sapiens
acattaatacactat

SEQ ID NO: 372238 - DNA, 15 bp, Homo sapiens
tacattaatacacta

SEQ ID NO: 372239 - DNA, 15 bp, Homo sapiens
ttacattaatacact

SEQ ID NO: 372240 - DNA, 15 bp, Homo sapiens
tttacattaatacac

SEQ ID NO: 372241 - DNA, 15 bp, Homo sapiens
ctttacattaataca

SEQ ID NO: 372242 - DNA, 15 bp, Homo sapiens
tctttacattaatac

SEQ ID NO: 372243 - DNA, 15 bp, Homo sapiens
ttctttacattaata

SEQ ID NO: 372244 - DNA, 15 bp, Homo sapiens
attctttacattaat

SEQ ID NO: 372245 - DNA, 15 bp, Homo sapiens
gattctttacattaa

SEQ ID NO: 372246 - DNA, 15 bp, Homo sapiens
tgattctttacatta

SEQ ID NO: 372247 - DNA, 15 bp, Homo sapiens
ttgattctttacatt

SEQ ID NO: 372248 - DNA, 15 bp, Homo sapiens
attgattctttacat

SEQ ID NO: 372249 - DNA, 15 bp, Homo sapiens
aattgattctttaca

SEQ ID NO: 372250 - DNA, 15 bp, Homo sapiens
aaattgattctttac

SEQ ID NO: 372251 - DNA, 15 bp, Homo sapiens
taaattgattcttta

SEQ ID NO: 372252 - DNA, 15 bp, Homo sapiens
ttaaattgattcttt

SEQ ID NO: 372253 - DNA, 15 bp, Homo sapiens
cttaaattgattctt

SEQ ID NO: 372254 - DNA, 15 bp, Homo sapiens
acttaaattgattct

SEQ ID NO: 372255 - DNA, 15 bp, Homo sapiens
cacttaaattgattc

SEQ ID NO: 372256 - DNA, 15 bp, Homo sapiens
gcacttaaattgatt

SEQ ID NO: 372257 - DNA, 15 bp, Homo sapiens
tgcacttaaattgat

SEQ ID NO: 372258 - DNA, 15 bp, Homo sapiens
ctgcacttaaattga

SEQ ID NO: 372259 - DNA, 15 bp, Homo sapiens
actgcacttaaattg

SEQ ID NO: 372260 - DNA, 15 bp, Homo sapiens
gactgcacttaaatt

SEQ ID NO: 372261 - DNA, 15 bp, Homo sapiens
tgactgcacttaaat

SEQ ID NO: 372262 - DNA, 15 bp, Homo sapiens
ctgactgcacttaaa

SEQ ID NO: 372263 - DNA, 15 bp, Homo sapiens
cctgactgcacttaa

SEQ ID NO: 372264 - DNA, 15 bp, Homo sapiens
ccctgactgcactta

SEQ ID NO: 372265 - DNA, 15 bp, Homo sapiens
tccctgactgcactt

SEQ ID NO: 372266 - DNA, 15 bp, Homo sapiens
ttccctgactgcact

SEQ ID NO: 372267 - DNA, 15 bp, Homo sapiens
attccctgactgcac

SEQ ID NO: 372268 - DNA, 15 bp, Homo sapiens
cattccctgactgca

SEQ ID NO: 372269 - DNA, 15 bp, Homo sapiens
ccattccctgactgc

SEQ ID NO: 372270 - DNA, 15 bp, Homo sapiens
tccattccctgactg

SEQ ID NO: 372271 - DNA, 15 bp, Homo sapiens
atccattccctgact

SEQ ID NO: 372272 - DNA, 15 bp, Homo sapiens
tatccattccctgac

SEQ ID NO: 372273 - DNA, 15 bp, Homo sapiens
atatccattccctga

SEQ ID NO: 372274 - DNA, 15 bp, Homo sapiens
aatatccattccctg

SEQ ID NO: 372275 - DNA, 15 bp, Homo sapiens
taatatccattccct

SEQ ID NO: 372276 - DNA, 15 bp, Homo sapiens
ttaatatccattccc

SEQ ID NO: 372277 - DNA, 15 bp, Homo sapiens
cttaatatccattcc

SEQ ID NO: 372278 - DNA, 15 bp, Homo sapiens
acttaatatccattc

SEQ ID NO: 372279 - DNA, 15 bp, Homo sapiens
tacttaatatccatt

SEQ ID NO: 372280 - DNA, 15 bp, Homo sapiens
ttacttaatatccat

SEQ ID NO: 372281 - DNA, 15 bp, Homo sapiens
tttacttaatatcca

SEQ ID NO: 372282 - DNA, 15 bp, Homo sapiens
ttttacttaatatcc

SEQ ID NO: 372283 - DNA, 15 bp, Homo sapiens
gttttacttaatatc

SEQ ID NO: 372284 - DNA, 15 bp, Homo sapiens
agttttacttaatat

SEQ ID NO: 372285 - DNA, 15 bp, Homo sapiens
aagttttacttaata

SEQ ID NO: 372286 - DNA, 15 bp, Homo sapiens
aaagttttacttaat

SEQ ID NO: 372287 - DNA, 15 bp, Homo sapiens
caaagttttacttaa

SEQ ID NO: 372288 - DNA, 15 bp, Homo sapiens
acaaagttttactta

SEQ ID NO: 372289 - DNA, 15 bp, Homo sapiens
gacaaagttttactt

SEQ ID NO: 372290 - DNA, 15 bp, Homo sapiens
agacaaagttttact

SEQ ID NO: 372291 - DNA, 15 bp, Homo sapiens
aagacaaagttttac

SEQ ID NO: 372292 - DNA, 15 bp, Homo sapiens
aaagacaaagtttta

SEQ ID NO: 372293 - DNA, 15 bp, Homo sapiens
gaaagacaaagtttt

SEQ ID NO: 372294 - DNA, 15 bp, Homo sapiens
agaaagacaaagttt

SEQ ID NO: 372295 - DNA, 15 bp, Homo sapiens
aagaaagacaaagtt

SEQ ID NO: 372296 - DNA, 15 bp, Homo sapiens
aaagaaagacaaagt

SEQ ID NO: 372297 - DNA, 15 bp, Homo sapiens
aaaagaaagacaaag

SEQ ID NO: 372298 - DNA, 15 bp, Homo sapiens
aaaaagaaagacaaa

SEQ ID NO: 372299 - DNA, 15 bp, Homo sapiens
caaaaagaaagacaa

SEQ ID NO: 372300 - DNA, 15 bp, Homo sapiens
tcaaaaagaaagaca

SEQ ID NO: 372301 - DNA, 15 bp, Homo sapiens
ttcaaaaagaaagac

SEQ ID NO: 372302 - DNA, 15 bp, Homo sapiens
tttcaaaaagaaaga

SEQ ID NO: 372303 - DNA, 15 bp, Homo sapiens
ctttcaaaaagaaag

SEQ ID NO: 372304 - DNA, 15 bp, Homo sapiens
actttcaaaaagaaa

SEQ ID NO: 372305 - DNA, 15 bp, Homo sapiens
tactttcaaaaagaa

SEQ ID NO: 372306 - DNA, 15 bp, Homo sapiens
atactttcaaaaaga

SEQ ID NO: 372307 - DNA, 15 bp, Homo sapiens
catactttcaaaaag

SEQ ID NO: 372308 - DNA, 15 bp, Homo sapiens
ccatactttcaaaaa

SEQ ID NO: 372309 - DNA, 15 bp, Homo sapiens
gccatactttcaaaa

SEQ ID NO: 372310 - DNA, 15 bp, Homo sapiens
tgccatactttcaaa

SEQ ID NO: 372311 - DNA, 15 bp, Homo sapiens
gtgccatactttcaa

SEQ ID NO: 372312 - DNA, 15 bp, Homo sapiens
agtgccatactttca

SEQ ID NO: 372313 - DNA, 15 bp, Homo sapiens
gagtgccatactttc

SEQ ID NO: 372314 - DNA, 15 bp, Homo sapiens
tgagtgccatacttt

SEQ ID NO: 372315 - DNA, 15 bp, Homo sapiens
ctgagtgccatactt

SEQ ID NO: 372316 - DNA, 15 bp, Homo sapiens
actgagtgccatact

SEQ ID NO: 372317 - DNA, 15 bp, Homo sapiens
cactgagtgccatac

SEQ ID NO: 372318 - DNA, 15 bp, Homo sapiens
tcactgagtgccata

SEQ ID NO: 372319 - DNA, 15 bp, Homo sapiens
atcactgagtgccat

SEQ ID NO: 372320 - DNA, 15 bp, Homo sapiens
tatcactgagtgcca

SEQ ID NO: 372321 - DNA, 15 bp, Homo sapiens
ttatcactgagtgcc

SEQ ID NO: 372322 - DNA, 15 bp, Homo sapiens
cttatcactgagtgc

SEQ ID NO: 372323 - DNA, 15 bp, Homo sapiens
tcttatcactgagtg

SEQ ID NO: 372324 - DNA, 15 bp, Homo sapiens
ttcttatcactgagt

SEQ ID NO: 372325 - DNA, 15 bp, Homo sapiens
tttcttatcactgag

SEQ ID NO: 372326 - DNA, 15 bp, Homo sapiens
atttcttatcactga

SEQ ID NO: 372327 - DNA, 15 bp, Homo sapiens
catttcttatcactg

SEQ ID NO: 372328 - DNA, 15 bp, Homo sapiens
acatttcttatcact

SEQ ID NO: 372329 - DNA, 15 bp, Homo sapiens
tacatttcttatcac

SEQ ID NO: 372330 - DNA, 15 bp, Homo sapiens
atacatttcttatca

SEQ ID NO: 372331 - DNA, 15 bp, Homo sapiens
tatacatttcttatc

SEQ ID NO: 372332 - DNA, 15 bp, Homo sapiens
gtatacatttcttat

SEQ ID NO: 372333 - DNA, 15 bp, Homo sapiens
tgtatacatttctta

SEQ ID NO: 372334 - DNA, 15 bp, Homo sapiens
gtgtatacatttctt

SEQ ID NO: 372335 - DNA, 15 bp, Homo sapiens
cgtgtatacatttct

SEQ ID NO: 372336 - DNA, 15 bp, Homo sapiens
ccgtgtatacatttc

SEQ ID NO: 372337 - DNA, 15 bp, Homo sapiens
cccgtgtatacattt

SEQ ID NO: 372338 - DNA, 15 bp, Homo sapiens
tcccgtgtatacatt

SEQ ID NO: 372339 - DNA, 15 bp, Homo sapiens
ctcccgtgtatacat

SEQ ID NO: 372340 - DNA, 15 bp, Homo sapiens
tctcccgtgtataca

SEQ ID NO: 372341 - DNA, 15 bp, Homo sapiens
ctctcccgtgtatac

SEQ ID NO: 372342 - DNA, 15 bp, Homo sapiens
gctctcccgtgtata

SEQ ID NO: 372343 - DNA, 15 bp, Homo sapiens
tgctctcccgtgtat

SEQ ID NO: 372344 - DNA, 15 bp, Homo sapiens
ctgctctcccgtgta

SEQ ID NO: 372345 - DNA, 15 bp, Homo sapiens
tctgctctcccgtgt

SEQ ID NO: 372346 - DNA, 15 bp, Homo sapiens
ttctgctctcccgtg

SEQ ID NO: 372347 - DNA, 15 bp, Homo sapiens
tttctgctctcccgt

SEQ ID NO: 372348 - DNA, 15 bp, Homo sapiens
ctttctgctctcccg

SEQ ID NO: 372349 - DNA, 15 bp, Homo sapiens
actttctgctctccc

SEQ ID NO: 372350 - DNA, 15 bp, Homo sapiens
tactttctgctctcc

SEQ ID NO: 372351 - DNA, 15 bp, Homo sapiens
ttactttctgctctc

SEQ ID NO: 372352 - DNA, 15 bp, Homo sapiens
cttactttctgctct

SEQ ID NO: 372353 - DNA, 15 bp, Homo sapiens
tcttactttctgctc

SEQ ID NO: 372354 - DNA, 15 bp, Homo sapiens
ttcttactttctgct

SEQ ID NO: 372355 - DNA, 15 bp, Homo sapiens
tttcttactttctgc

SEQ ID NO: 372356 - DNA, 15 bp, Homo sapiens
ttttcttactttctg

SEQ ID NO: 372357 - DNA, 15 bp, Homo sapiens
gttttcttactttct

SEQ ID NO: 372358 - DNA, 15 bp, Homo sapiens
ggttttcttactttc

SEQ ID NO: 372359 - DNA, 15 bp, Homo sapiens
gggttttcttacttt

SEQ ID NO: 372360 - DNA, 15 bp, Homo sapiens
agggttttcttactt

SEQ ID NO: 372361 - DNA, 15 bp, Homo sapiens
aagggttttcttact

SEQ ID NO: 372362 - DNA, 15 bp, Homo sapiens
aaagggttttcttac

SEQ ID NO: 372363 - DNA, 15 bp, Homo sapiens
aaaagggttttctta

SEQ ID NO: 372364 - DNA, 15 bp, Homo sapiens
taaaagggttttctt

SEQ ID NO: 372365 - DNA, 15 bp, Homo sapiens
ataaaagggttttct

SEQ ID NO: 372366 - DNA, 15 bp, Homo sapiens
tataaaagggttttc

SEQ ID NO: 372367 - DNA, 15 bp, Homo sapiens
atataaaagggtttt

SEQ ID NO: 372368 - DNA, 15 bp, Homo sapiens
aatataaaagggttt

SEQ ID NO: 372369 - DNA, 15 bp, Homo sapiens
aaatataaaagggtt

SEQ ID NO: 372370 - DNA, 15 bp, Homo sapiens
gaaatataaaagggt

SEQ ID NO: 372371 - DNA, 15 bp, Homo sapiens
agaaatataaaaggg

SEQ ID NO: 372372 - DNA, 15 bp, Homo sapiens
gagaaatataaaagg

SEQ ID NO: 372373 - DNA, 15 bp, Homo sapiens
agagaaatataaaag

SEQ ID NO: 372374 - DNA, 15 bp, Homo sapiens
cagagaaatataaaa

SEQ ID NO: 372375 - DNA, 15 bp, Homo sapiens
ccagagaaatataaa

SEQ ID NO: 372376 - DNA, 15 bp, Homo sapiens
gccagagaaatataa

SEQ ID NO: 372377 - DNA, 15 bp, Homo sapiens
tgccagagaaatata

SEQ ID NO: 372378 - DNA, 15 bp, Homo sapiens
atgccagagaaatat

SEQ ID NO: 372379 - DNA, 15 bp, Homo sapiens
aatgccagagaaata

SEQ ID NO: 372380 - DNA, 15 bp, Homo sapiens
aaatgccagagaaat

SEQ ID NO: 372381 - DNA, 15 bp, Homo sapiens
aaaatgccagagaaa

SEQ ID NO: 372382 - DNA, 15 bp, Homo sapiens
taaaatgccagagaa

SEQ ID NO: 372383 - DNA, 15 bp, Homo sapiens
ataaaatgccagaga

SEQ ID NO: 372384 - DNA, 15 bp, Homo sapiens
cataaaatgccagag

SEQ ID NO: 372385 - DNA, 15 bp, Homo sapiens
gcataaaatgccaga

SEQ ID NO: 372386 - DNA, 15 bp, Homo sapiens
tgcataaaatgccag

SEQ ID NO: 372387 - DNA, 15 bp, Homo sapiens
atgcataaaatgcca

SEQ ID NO: 372388 - DNA, 15 bp, Homo sapiens
aatgcataaaatgcc

SEQ ID NO: 372389 - DNA, 15 bp, Homo sapiens
taatgcataaaatgc

SEQ ID NO: 372390 - DNA, 15 bp, Homo sapiens
ataatgcataaaatg

SEQ ID NO: 372391 - DNA, 15 bp, Homo sapiens
cataatgcataaaat

SEQ ID NO: 372392 - DNA, 15 bp, Homo sapiens
gcataatgcataaaa

SEQ ID NO: 372393 - DNA, 15 bp, Homo sapiens
tgcataatgcataaa

SEQ ID NO: 372394 - DNA, 15 bp, Homo sapiens
gtgcataatgcataa

SEQ ID NO: 372395 - DNA, 15 bp, Homo sapiens
ggtgcataatgcata

SEQ ID NO: 372396 - DNA, 15 bp, Homo sapiens
aggtgcataatgcat

SEQ ID NO: 372397 - DNA, 15 bp, Homo sapiens
gaggtgcataatgca

SEQ ID NO: 372398 - DNA, 15 bp, Homo sapiens
ggaggtgcataatgc

SEQ ID NO: 372399 - DNA, 15 bp, Homo sapiens
tggaggtgcataatg

SEQ ID NO: 372400 - DNA, 15 bp, Homo sapiens
ttggaggtgcataat

SEQ ID NO: 372401 - DNA, 15 bp, Homo sapiens
tttggaggtgcataa

SEQ ID NO: 372402 - DNA, 15 bp, Homo sapiens
ttttggaggtgcata

SEQ ID NO: 372403 - DNA, 15 bp, Homo sapiens
gttttggaggtgcat

SEQ ID NO: 372404 - DNA, 15 bp, Homo sapiens
tgttttggaggtgca

SEQ ID NO: 372405 - DNA, 15 bp, Homo sapiens
ttgttttggaggtgc

SEQ ID NO: 372406 - DNA, 15 bp, Homo sapiens
gttgttttggaggtg

SEQ ID NO: 372407 - DNA, 15 bp, Homo sapiens
tgttgttttggaggt

SEQ ID NO: 372408 - DNA, 15 bp, Homo sapiens
ctgttgttttggagg

SEQ ID NO: 372409 - DNA, 15 bp, Homo sapiens
cctgttgttttggag

SEQ ID NO: 372410 - DNA, 15 bp, Homo sapiens
gcctgttgttttgga

SEQ ID NO: 372411 - DNA, 15 bp, Homo sapiens
tgcctgttgttttgg

SEQ ID NO: 372412 - DNA, 15 bp, Homo sapiens
ttgcctgttgttttg

SEQ ID NO: 372413 - DNA, 15 bp, Homo sapiens
attgcctgttgtttt

SEQ ID NO: 372414 - DNA, 15 bp, Homo sapiens
aattgcctgttgttt

SEQ ID NO: 372415 - DNA, 15 bp, Homo sapiens
taattgcctgttgtt

SEQ ID NO: 372416 - DNA, 15 bp, Homo sapiens
ataattgcctgttgt

SEQ ID NO: 372417 - DNA, 15 bp, Homo sapiens
aataattgcctgttg

SEQ ID NO: 372418 - DNA, 15 bp, Homo sapiens
caataattgcctgtt

SEQ ID NO: 372419 - DNA, 15 bp, Homo sapiens
tcaataattgcctgt

SEQ ID NO: 372420 - DNA, 15 bp, Homo sapiens
ctcaataattgcctg

SEQ ID NO: 372421 - DNA, 15 bp, Homo sapiens
gctcaataattgcct

SEQ ID NO: 372422 - DNA, 15 bp, Homo sapiens
agctcaataattgcc

SEQ ID NO: 372423 - DNA, 15 bp, Homo sapiens
gagctcaataattgc

SEQ ID NO: 372424 - DNA, 15 bp, Homo sapiens
ggagctcaataattg

SEQ ID NO: 372425 - DNA, 15 bp, Homo sapiens
gggagctcaataatt

SEQ ID NO: 372426 - DNA, 15 bp, Homo sapiens
cgggagctcaataat

SEQ ID NO: 372427 - DNA, 15 bp, Homo sapiens
acgggagctcaataa

SEQ ID NO: 372428 - DNA, 15 bp, Homo sapiens
tacgggagctcaata

SEQ ID NO: 372429 - DNA, 15 bp, Homo sapiens
atacgggagctcaat

SEQ ID NO: 372430 - DNA, 15 bp, Homo sapiens
aatacgggagctcaa

SEQ ID NO: 372431 - DNA, 15 bp, Homo sapiens
aaatacgggagctca

SEQ ID NO: 372432 - DNA, 15 bp, Homo sapiens
gaaatacgggagctc

SEQ ID NO: 372433 - DNA, 15 bp, Homo sapiens
tgaaatacgggagct

SEQ ID NO: 372434 - DNA, 15 bp, Homo sapiens
atgaaatacgggagc

SEQ ID NO: 372435 - DNA, 15 bp, Homo sapiens
aatgaaatacgggag

SEQ ID NO: 372436 - DNA, 15 bp, Homo sapiens
gaatgaaatacggga

SEQ ID NO: 372437 - DNA, 15 bp, Homo sapiens
ggaatgaaatacggg

SEQ ID NO: 372438 - DNA, 15 bp, Homo sapiens
aggaatgaaatacgg

SEQ ID NO: 372439 - DNA, 15 bp, Homo sapiens
caggaatgaaatacg

SEQ ID NO: 372440 - DNA, 15 bp, Homo sapiens
tcaggaatgaaatac

SEQ ID NO: 372441 - DNA, 15 bp, Homo sapiens
gtcaggaatgaaata

SEQ ID NO: 372442 - DNA, 15 bp, Homo sapiens
agtcaggaatgaaat

SEQ ID NO: 372443 - DNA, 15 bp, Homo sapiens
gagtcaggaatgaaa

SEQ ID NO: 372444 - DNA, 15 bp, Homo sapiens
tgagtcaggaatgaa

SEQ ID NO: 372445 - DNA, 15 bp, Homo sapiens
gtgagtcaggaatga

SEQ ID NO: 372446 - DNA, 15 bp, Homo sapiens
tgtgagtcaggaatg

SEQ ID NO: 372447 - DNA, 15 bp, Homo sapiens
gtgtgagtcaggaat

SEQ ID NO: 372448 - DNA, 15 bp, Homo sapiens
ggtgtgagtcaggaa

SEQ ID NO: 372449 - DNA, 15 bp, Homo sapiens
aggtgtgagtcagga

SEQ ID NO: 372450 - DNA, 15 bp, Homo sapiens
taggtgtgagtcagg

SEQ ID NO: 372451 - DNA, 15 bp, Homo sapiens
ctaggtgtgagtcag

SEQ ID NO: 372452 - DNA, 15 bp, Homo sapiens
gctaggtgtgagtca

SEQ ID NO: 372453 - DNA, 15 bp, Homo sapiens
ggctaggtgtgagtc

SEQ ID NO: 372454 - DNA, 15 bp, Homo sapiens
tggctaggtgtgagt

SEQ ID NO: 372455 - DNA, 15 bp, Homo sapiens
ttggctaggtgtgag

SEQ ID NO: 372456 - DNA, 15 bp, Homo sapiens
tttggctaggtgtga

SEQ ID NO: 372457 - DNA, 15 bp, Homo sapiens
ttttggctaggtgtg

SEQ ID NO: 372458 - DNA, 15 bp, Homo sapiens
attttggctaggtgt

SEQ ID NO: 372459 - DNA, 15 bp, Homo sapiens
cattttggctaggtg

SEQ ID NO: 372460 - DNA, 15 bp, Homo sapiens
gcattttggctaggt

SEQ ID NO: 372461 - DNA, 15 bp, Homo sapiens
ggcattttggctagg

SEQ ID NO: 372462 - DNA, 15 bp, Homo sapiens
tggcattttggctag

SEQ ID NO: 372463 - DNA, 15 bp, Homo sapiens
ctggcattttggcta

SEQ ID NO: 372464 - DNA, 15 bp, Homo sapiens
tctggcattttggct

SEQ ID NO: 372465 - DNA, 15 bp, Homo sapiens
gtctggcattttggc

SEQ ID NO: 372466 - DNA, 15 bp, Homo sapiens
agtctggcattttgg

SEQ ID NO: 372467 - DNA, 15 bp, Homo sapiens
gagtctggcattttg

SEQ ID NO: 372468 - DNA, 15 bp, Homo sapiens
tgagtctggcatttt

SEQ ID NO: 372469 - DNA, 15 bp, Homo sapiens
ttgagtctggcattt

SEQ ID NO: 372470 - DNA, 15 bp, Homo sapiens
gttgagtctggcatt

SEQ ID NO: 372471 - DNA, 15 bp, Homo sapiens
tgttgagtctggcat

SEQ ID NO: 372472 - DNA, 15 bp, Homo sapiens
gtgttgagtctggca

SEQ ID NO: 372473 - DNA, 15 bp, Homo sapiens
tgtgttgagtctggc

SEQ ID NO: 372474 - DNA, 15 bp, Homo sapiens
ttgtgttgagtctgg

SEQ ID NO: 372475 - DNA, 15 bp, Homo sapiens
attgtgttgagtctg

SEQ ID NO: 372476 - DNA, 15 bp, Homo sapiens
gattgtgttgagtct

SEQ ID NO: 372477 - DNA, 15 bp, Homo sapiens
agattgtgttgagtc

SEQ ID NO: 372478 - DNA, 15 bp, Homo sapiens
aagattgtgttgagt

SEQ ID NO: 372479 - DNA, 15 bp, Homo sapiens
caagattgtgttgag

SEQ ID NO: 372480 - DNA, 15 bp, Homo sapiens
acaagattgtgttga

SEQ ID NO: 372481 - DNA, 15 bp, Homo sapiens
gacaagattgtgttg

SEQ ID NO: 372482 - DNA, 15 bp, Homo sapiens
tgacaagattgtgtt

SEQ ID NO: 372483 - DNA, 15 bp, Homo sapiens
gtgacaagattgtgt

SEQ ID NO: 372484 - DNA, 15 bp, Homo sapiens
tgtgacaagattgtg

SEQ ID NO: 372485 - DNA, 15 bp, Homo sapiens
atgtgacaagattgt

SEQ ID NO: 372486 - DNA, 15 bp, Homo sapiens
aatgtgacaagattg

SEQ ID NO: 372487 - DNA, 15 bp, Homo sapiens
caatgtgacaagatt

SEQ ID NO: 372488 - DNA, 15 bp, Homo sapiens
gcaatgtgacaagat

SEQ ID NO: 372489 - DNA, 15 bp, Homo sapiens
agcaatgtgacaaga

SEQ ID NO: 372490 - DNA, 15 bp, Homo sapiens
cagcaatgtgacaag

SEQ ID NO: 372491 - DNA, 15 bp, Homo sapiens
ccagcaatgtgacaa

SEQ ID NO: 372492 - DNA, 15 bp, Homo sapiens
tccagcaatgtgaca

SEQ ID NO: 372493 - DNA, 15 bp, Homo sapiens
ttccagcaatgtgac

SEQ ID NO: 372494 - DNA, 15 bp, Homo sapiens
tttccagcaatgtga

SEQ ID NO: 372495 - DNA, 15 bp, Homo sapiens
ctttccagcaatgtg

SEQ ID NO: 372496 - DNA, 15 bp, Homo sapiens
actttccagcaatgt

SEQ ID NO: 372497 - DNA, 15 bp, Homo sapiens
cactttccagcaatg

SEQ ID NO: 372498 - DNA, 15 bp, Homo sapiens
tcactttccagcaat

SEQ ID NO: 372499 - DNA, 15 bp, Homo sapiens
ctcactttccagcaa

SEQ ID NO: 372500 - DNA, 15 bp, Homo sapiens
actcactttccagca

SEQ ID NO: 372501 - DNA, 15 bp, Homo sapiens
gactcactttccagc

SEQ ID NO: 372502 - DNA, 15 bp, Homo sapiens
tgactcactttccag

SEQ ID NO: 372503 - DNA, 15 bp, Homo sapiens
ctgactcactttcca

SEQ ID NO: 372504 - DNA, 15 bp, Homo sapiens
tctgactcactttcc

SEQ ID NO: 372505 - DNA, 15 bp, Homo sapiens
atctgactcactttc

SEQ ID NO: 372506 - DNA, 15 bp, Homo sapiens
tatctgactcacttt

SEQ ID NO: 372507 - DNA, 15 bp, Homo sapiens
atatctgactcactt

SEQ ID NO: 372508 - DNA, 15 bp, Homo sapiens
gatatctgactcact

SEQ ID NO: 372509 - DNA, 15 bp, Homo sapiens
agatatctgactcac

SEQ ID NO: 372510 - DNA, 15 bp, Homo sapiens
cagatatctgactca

SEQ ID NO: 372511 - DNA, 15 bp, Homo sapiens
ccagatatctgactc

SEQ ID NO: 372512 - DNA, 15 bp, Homo sapiens
accagatatctgact

SEQ ID NO: 372513 - DNA, 15 bp, Homo sapiens
gaccagatatctgac

SEQ ID NO: 372514 - DNA, 15 bp, Homo sapiens
tgaccagatatctga

SEQ ID NO: 372515 - DNA, 15 bp, Homo sapiens
gtgaccagatatctg

SEQ ID NO: 372516 - DNA, 15 bp, Homo sapiens
tgtgaccagatatct

SEQ ID NO: 372517 - DNA, 15 bp, Homo sapiens
atgtgaccagatatc

SEQ ID NO: 372518 - DNA, 15 bp, Homo sapiens
tatgtgaccagatat

SEQ ID NO: 372519 - DNA, 15 bp, Homo sapiens
ttatgtgaccagata

SEQ ID NO: 372520 - DNA, 15 bp, Homo sapiens
attatgtgaccagat

SEQ ID NO: 372521 - DNA, 15 bp, Homo sapiens
tattatgtgaccaga

SEQ ID NO: 372522 - DNA, 15 bp, Homo sapiens
ttattatgtgaccag

SEQ ID NO: 372523 - DNA, 15 bp, Homo sapiens
attattatgtgacca

SEQ ID NO: 372524 - DNA, 15 bp, Homo sapiens
gattattatgtgacc

SEQ ID NO: 372525 - DNA, 15 bp, Homo sapiens
agattattatgtgac

SEQ ID NO: 372526 - DNA, 15 bp, Homo sapiens
tagattattatgtga

SEQ ID NO: 372527 - DNA, 15 bp, Homo sapiens
atagattattatgtg

SEQ ID NO: 372528 - DNA, 15 bp, Homo sapiens
aatagattattatgt

SEQ ID NO: 372529 - DNA, 15 bp, Homo sapiens
aaatagattattatg

SEQ ID NO: 372530 - DNA, 15 bp, Homo sapiens
caaatagattattat

SEQ ID NO: 372531 - DNA, 15 bp, Homo sapiens
ccaaatagattatta

SEQ ID NO: 372532 - DNA, 15 bp, Homo sapiens
tccaaatagattatt

SEQ ID NO: 372533 - DNA, 15 bp, Homo sapiens
ctccaaatagattat

SEQ ID NO: 372534 - DNA, 15 bp, Homo sapiens
actccaaatagatta

SEQ ID NO: 372535 - DNA, 15 bp, Homo sapiens
aactccaaatagatt

SEQ ID NO: 372536 - DNA, 15 bp, Homo sapiens
aaactccaaatagat

SEQ ID NO: 372537 - DNA, 15 bp, Homo sapiens
aaaactccaaataga

SEQ ID NO: 372538 - DNA, 15 bp, Homo sapiens
taaaactccaaatag

SEQ ID NO: 372539 - DNA, 15 bp, Homo sapiens
ataaaactccaaata

SEQ ID NO: 372540 - DNA, 15 bp, Homo sapiens
gataaaactccaaat

SEQ ID NO: 372541 - DNA, 15 bp, Homo sapiens
ggataaaactccaaa

SEQ ID NO: 372542 - DNA, 15 bp, Homo sapiens
aggataaaactccaa

SEQ ID NO: 372543 - DNA, 15 bp, Homo sapiens
aaggataaaactcca

SEQ ID NO: 372544 - DNA, 15 bp, Homo sapiens
caaggataaaactcc

SEQ ID NO: 372545 - DNA, 15 bp, Homo sapiens
ccaaggataaaactc

SEQ ID NO: 372546 - DNA, 15 bp, Homo sapiens
tccaaggataaaact

SEQ ID NO: 372547 - DNA, 15 bp, Homo sapiens
ttccaaggataaaac

SEQ ID NO: 372548 - DNA, 15 bp, Homo sapiens
tttccaaggataaaa

SEQ ID NO: 372549 - DNA, 15 bp, Homo sapiens
atttccaaggataaa

SEQ ID NO: 372550 - DNA, 15 bp, Homo sapiens
aatttccaaggataa

SEQ ID NO: 372551 - DNA, 15 bp, Homo sapiens
aaatttccaaggata

SEQ ID NO: 372552 - DNA, 15 bp, Homo sapiens
taaatttccaaggat

SEQ ID NO: 372553 - DNA, 15 bp, Homo sapiens
ctaaatttccaagga

SEQ ID NO: 372554 - DNA, 15 bp, Homo sapiens
gctaaatttccaagg

SEQ ID NO: 372555 - DNA, 15 bp, Homo sapiens
tgctaaatttccaag

SEQ ID NO: 372556 - DNA, 15 bp, Homo sapiens
ttgctaaatttccaa

SEQ ID NO: 372557 - DNA, 15 bp, Homo sapiens
cttgctaaatttcca

SEQ ID NO: 372558 - DNA, 15 bp, Homo sapiens
acttgctaaatttcc

SEQ ID NO: 372559 - DNA, 15 bp, Homo sapiens
cacttgctaaatttc

SEQ ID NO: 372560 - DNA, 15 bp, Homo sapiens
tcacttgctaaattt

SEQ ID NO: 372561 - DNA, 15 bp, Homo sapiens
gtcacttgctaaatt

SEQ ID NO: 372562 - DNA, 15 bp, Homo sapiens
agtcacttgctaaat

SEQ ID NO: 372563 - DNA, 15 bp, Homo sapiens
aagtcacttgctaaa

SEQ ID NO: 372564 - DNA, 15 bp, Homo sapiens
aaagtcacttgctaa

SEQ ID NO: 372565 - DNA, 15 bp, Homo sapiens
caaagtcacttgcta

SEQ ID NO: 372566 - DNA, 15 bp, Homo sapiens
acaaagtcacttgct

SEQ ID NO: 372567 - DNA, 15 bp, Homo sapiens
aacaaagtcacttgc

SEQ ID NO: 372568 - DNA, 15 bp, Homo sapiens
gaacaaagtcacttg

SEQ ID NO: 372569 - DNA, 15 bp, Homo sapiens
ggaacaaagtcactt

SEQ ID NO: 372570 - DNA, 15 bp, Homo sapiens
aggaacaaagtcact

SEQ ID NO: 372571 - DNA, 15 bp, Homo sapiens
taggaacaaagtcac

SEQ ID NO: 372572 - DNA, 15 bp, Homo sapiens
ttaggaacaaagtca

SEQ ID NO: 372573 - DNA, 15 bp, Homo sapiens
tttaggaacaaagtc

SEQ ID NO: 372574 - DNA, 15 bp, Homo sapiens
ttttaggaacaaagt

SEQ ID NO: 372575 - DNA, 15 bp, Homo sapiens
cttttaggaacaaag

SEQ ID NO: 372576 - DNA, 15 bp, Homo sapiens
acttttaggaacaaa

SEQ ID NO: 372577 - DNA, 15 bp, Homo sapiens
gacttttaggaacaa

SEQ ID NO: 372578 - DNA, 15 bp, Homo sapiens
ggacttttaggaaca

SEQ ID NO: 372579 - DNA, 15 bp, Homo sapiens
gggacttttaggaac

SEQ ID NO: 372580 - DNA, 15 bp, Homo sapiens
agggacttttaggaa

SEQ ID NO: 372581 - DNA, 15 bp, Homo sapiens
tagggacttttagga

SEQ ID NO: 372582 - DNA, 15 bp, Homo sapiens
ttagggacttttagg

SEQ ID NO: 372583 - DNA, 15 bp, Homo sapiens
attagggacttttag

SEQ ID NO: 372584 - DNA, 15 bp, Homo sapiens
aattagggactttta

SEQ ID NO: 372585 - DNA, 15 bp, Homo sapiens
gaattagggactttt

SEQ ID NO: 372586 - DNA, 15 bp, Homo sapiens
tgaattagggacttt

SEQ ID NO: 372587 - DNA, 15 bp, Homo sapiens
atgaattagggactt

SEQ ID NO: 372588 - DNA, 15 bp, Homo sapiens
aatgaattagggact

SEQ ID NO: 372589 - DNA, 15 bp, Homo sapiens
caatgaattagggac

SEQ ID NO: 372590 - DNA, 15 bp, Homo sapiens
ccaatgaattaggga

SEQ ID NO: 372591 - DNA, 15 bp, Homo sapiens
accaatgaattaggg

SEQ ID NO: 372592 - DNA, 15 bp, Homo sapiens
taccaatgaattagg

SEQ ID NO: 372593 - DNA, 15 bp, Homo sapiens
ttaccaatgaattag

SEQ ID NO: 372594 - DNA, 15 bp, Homo sapiens
cttaccaatgaatta

SEQ ID NO: 372595 - DNA, 15 bp, Homo sapiens
gcttaccaatgaatt

SEQ ID NO: 372596 - DNA, 15 bp, Homo sapiens
ggcttaccaatgaat

SEQ ID NO: 372597 - DNA, 15 bp, Homo sapiens
gggcttaccaatgaa

SEQ ID NO: 372598 - DNA, 15 bp, Homo sapiens
tgggcttaccaatga

SEQ ID NO: 372599 - DNA, 15 bp, Homo sapiens
atgggcttaccaatg

SEQ ID NO: 372600 - DNA, 15 bp, Homo sapiens
catgggcttaccaat

SEQ ID NO: 372601 - DNA, 15 bp, Homo sapiens
acatgggcttaccaa

SEQ ID NO: 372602 - DNA, 15 bp, Homo sapiens
tacatgggcttacca

SEQ ID NO: 372603 - DNA, 15 bp, Homo sapiens
ctacatgggcttacc

SEQ ID NO: 372604 - DNA, 15 bp, Homo sapiens
gctacatgggcttac

SEQ ID NO: 372605 - DNA, 15 bp, Homo sapiens
tgctacatgggctta

SEQ ID NO: 372606 - DNA, 15 bp, Homo sapiens
atgctacatgggctt

SEQ ID NO: 372607 - DNA, 15 bp, Homo sapiens
aatgctacatgggct

SEQ ID NO: 372608 - DNA, 15 bp, Homo sapiens
gaatgctacatgggc

SEQ ID NO: 372609 - DNA, 15 bp, Homo sapiens
ggaatgctacatggg

SEQ ID NO: 372610 - DNA, 15 bp, Homo sapiens
cggaatgctacatgg

SEQ ID NO: 372611 - DNA, 15 bp, Homo sapiens
gcggaatgctacatg

SEQ ID NO: 372612 - DNA, 15 bp, Homo sapiens
agcggaatgctacat

SEQ ID NO: 372613 - DNA, 15 bp, Homo sapiens
cagcggaatgctaca

SEQ ID NO: 372614 - DNA, 15 bp, Homo sapiens
tcagcggaatgctac

SEQ ID NO: 372615 - DNA, 15 bp, Homo sapiens
ttcagcggaatgcta

SEQ ID NO: 372616 - DNA, 15 bp, Homo sapiens
cttcagcggaatgct

SEQ ID NO: 372617 - DNA, 15 bp, Homo sapiens
ccttcagcggaatgc

SEQ ID NO: 372618 - DNA, 15 bp, Homo sapiens
tccttcagcggaatg

SEQ ID NO: 372619 - DNA, 15 bp, Homo sapiens
ttccttcagcggaat

SEQ ID NO: 372620 - DNA, 15 bp, Homo sapiens
tttccttcagcggaa

SEQ ID NO: 372621 - DNA, 15 bp, Homo sapiens
ttttccttcagcgga

SEQ ID NO: 372622 - DNA, 15 bp, Homo sapiens
tttttccttcagcgg

SEQ ID NO: 372623 - DNA, 15 bp, Homo sapiens
ttttttccttcagcg

SEQ ID NO: 372624 - DNA, 15 bp, Homo sapiens
cttttttccttcagc

SEQ ID NO: 372625 - DNA, 15 bp, Homo sapiens
ccttttttccttcag

SEQ ID NO: 372626 - DNA, 15 bp, Homo sapiens
tccttttttccttca

SEQ ID NO: 372627 - DNA, 15 bp, Homo sapiens
ctccttttttccttc

SEQ ID NO: 372628 - DNA, 15 bp, Homo sapiens
tctccttttttcctt

SEQ ID NO: 372629 - DNA, 15 bp, Homo sapiens
tttctccttttttcc

SEQ ID NO: 372630 - DNA, 15 bp, Homo sapiens
gtttctccttttttc

SEQ ID NO: 372631 - DNA, 15 bp, Homo sapiens
ggtttctcctttttt

SEQ ID NO: 372632 - DNA, 15 bp, Homo sapiens
cggtttctccttttt

SEQ ID NO: 372633 - DNA, 15 bp, Homo sapiens
tcggtttctcctttt

SEQ ID NO: 372634 - DNA, 15 bp, Homo sapiens
ttcggtttctccttt

SEQ ID NO: 372635 - DNA, 15 bp, Homo sapiens
cttcggtttctcctt

SEQ ID NO: 372636 - DNA, 15 bp, Homo sapiens
acttcggtttctcct

SEQ ID NO: 372637 - DNA, 15 bp, Homo sapiens
cacttcggtttctcc

SEQ ID NO: 372638 - DNA, 15 bp, Homo sapiens
tcacttcggtttctc

SEQ ID NO: 372639 - DNA, 15 bp, Homo sapiens
ctcacttcggtttct

SEQ ID NO: 372640 - DNA, 15 bp, Homo sapiens
actcacttcggtttc

SEQ ID NO: 372641 - DNA, 15 bp, Homo sapiens
cactcacttcggttt

SEQ ID NO: 372642 - DNA, 15 bp, Homo sapiens
acactcacttcggtt

SEQ ID NO: 372643 - DNA, 15 bp, Homo sapiens
cacactcacttcggt

SEQ ID NO: 372644 - DNA, 15 bp, Homo sapiens
tcacactcacttcgg

SEQ ID NO: 372645 - DNA, 15 bp, Homo sapiens
ttcacactcacttcg

SEQ ID NO: 372646 - DNA, 15 bp, Homo sapiens
attcacactcacttc

SEQ ID NO: 372647 - DNA, 15 bp, Homo sapiens
cattcacactcactt

SEQ ID NO: 372648 - DNA, 15 bp, Homo sapiens
gcattcacactcact

SEQ ID NO: 372649 - DNA, 15 bp, Homo sapiens
agcattcacactcac

SEQ ID NO: 372650 - DNA, 15 bp, Homo sapiens
aagcattcacactca

SEQ ID NO: 372651 - DNA, 15 bp, Homo sapiens
caagcattcacactc

SEQ ID NO: 372652 - DNA, 15 bp, Homo sapiens
gcaagcattcacact

SEQ ID NO: 372653 - DNA, 15 bp, Homo sapiens
ggcaagcattcacac

SEQ ID NO: 372654 - DNA, 15 bp, Homo sapiens
aggcaagcattcaca

SEQ ID NO: 372655 - DNA, 15 bp, Homo sapiens
taggcaagcattcac

SEQ ID NO: 372656 - DNA, 15 bp, Homo sapiens
ataggcaagcattca

SEQ ID NO: 372657 - DNA, 15 bp, Homo sapiens
gataggcaagcattc

SEQ ID NO: 372658 - DNA, 15 bp, Homo sapiens
tgataggcaagcatt

SEQ ID NO: 372659 - DNA, 15 bp, Homo sapiens
atgataggcaagcat

SEQ ID NO: 372660 - DNA, 15 bp, Homo sapiens
gatgataggcaagca

SEQ ID NO: 372661 - DNA, 15 bp, Homo sapiens
agatgataggcaagc

SEQ ID NO: 372662 - DNA, 15 bp, Homo sapiens
tagatgataggcaag

SEQ ID NO: 372663 - DNA, 15 bp, Homo sapiens
ttagatgataggcaa

SEQ ID NO: 372664 - DNA, 15 bp, Homo sapiens
tttagatgataggca

SEQ ID NO: 372665 - DNA, 15 bp, Homo sapiens
atttagatgataggc

SEQ ID NO: 372666 - DNA, 15 bp, Homo sapiens
catttagatgatagg

SEQ ID NO: 372667 - DNA, 15 bp, Homo sapiens
acatttagatgatag

SEQ ID NO: 372668 - DNA, 15 bp, Homo sapiens
tacatttagatgata

SEQ ID NO: 372669 - DNA, 15 bp, Homo sapiens
ttacatttagatgat

SEQ ID NO: 372670 - DNA, 15 bp, Homo sapiens
attacatttagatga

SEQ ID NO: 372671 - DNA, 15 bp, Homo sapiens
aattacatttagatg

SEQ ID NO: 372672 - DNA, 15 bp, Homo sapiens
caattacatttagat

SEQ ID NO: 372673 - DNA, 15 bp, Homo sapiens
gcaattacatttaga

SEQ ID NO: 372674 - DNA, 15 bp, Homo sapiens
tgcaattacatttag

SEQ ID NO: 372675 - DNA, 15 bp, Homo sapiens
gtgcaattacattta

SEQ ID NO: 372676 - DNA, 15 bp, Homo sapiens
agtgcaattacattt

SEQ ID NO: 372677 - DNA, 15 bp, Homo sapiens
cagtgcaattacatt

SEQ ID NO: 372678 - DNA, 15 bp, Homo sapiens
ccagtgcaattacat

SEQ ID NO: 372679 - DNA, 15 bp, Homo sapiens
cccagtgcaattaca

SEQ ID NO: 372680 - DNA, 15 bp, Homo sapiens
acccagtgcaattac

SEQ ID NO: 372681 - DNA, 15 bp, Homo sapiens
gacccagtgcaatta

SEQ ID NO: 372682 - DNA, 15 bp, Homo sapiens
agacccagtgcaatt

SEQ ID NO: 372683 - DNA, 15 bp, Homo sapiens
aagacccagtgcaat

SEQ ID NO: 372684 - DNA, 15 bp, Homo sapiens
caagacccagtgcaa

SEQ ID NO: 372685 - DNA, 15 bp, Homo sapiens
gcaagacccagtgca

SEQ ID NO: 372686 - DNA, 15 bp, Homo sapiens
ggcaagacccagtgc

SEQ ID NO: 372687 - DNA, 15 bp, Homo sapiens
tggcaagacccagtg

SEQ ID NO: 372688 - DNA, 15 bp, Homo sapiens
gtggcaagacccagt

SEQ ID NO: 372689 - DNA, 15 bp, Homo sapiens
agtggcaagacccag

SEQ ID NO: 372690 - DNA, 15 bp, Homo sapiens
aagtggcaagaccca

SEQ ID NO: 372691 - DNA, 15 bp, Homo sapiens
caagtggcaagaccc

SEQ ID NO: 372692 - DNA, 15 bp, Homo sapiens
gcaagtggcaagacc

SEQ ID NO: 372693 - DNA, 15 bp, Homo sapiens
cgcaagtggcaagac

SEQ ID NO: 372694 - DNA, 15 bp, Homo sapiens
acgcaagtggcaaga

SEQ ID NO: 372695 - DNA, 15 bp, Homo sapiens
cacgcaagtggcaag

SEQ ID NO: 372696 - DNA, 15 bp, Homo sapiens
ccacgcaagtggcaa

SEQ ID NO: 372697 - DNA, 15 bp, Homo sapiens
tccacgcaagtggca

SEQ ID NO: 372698 - DNA, 15 bp, Homo sapiens
ctccacgcaagtggc

SEQ ID NO: 372699 - DNA, 15 bp, Homo sapiens
gctccacgcaagtgg

SEQ ID NO: 372700 - DNA, 15 bp, Homo sapiens
agctccacgcaagtg

SEQ ID NO: 372701 - DNA, 15 bp, Homo sapiens
cagctccacgcaagt

SEQ ID NO: 372702 - DNA, 15 bp, Homo sapiens
gcagctccacgcaag

SEQ ID NO: 372703 - DNA, 15 bp, Homo sapiens
ggcagctccacgcaa

SEQ ID NO: 372704 - DNA, 15 bp, Homo sapiens
cggcagctccacgca

SEQ ID NO: 372705 - DNA, 15 bp, Homo sapiens
acggcagctccacgc

SEQ ID NO: 372706 - DNA, 15 bp, Homo sapiens
tacggcagctccacg

SEQ ID NO: 372707 - DNA, 15 bp, Homo sapiens
atacggcagctccac

SEQ ID NO: 372708 - DNA, 15 bp, Homo sapiens
catacggcagctcca

SEQ ID NO: 372709 - DNA, 15 bp, Homo sapiens
gcatacggcagctcc

SEQ ID NO: 372710 - DNA, 15 bp, Homo sapiens
agcatacggcagctc

SEQ ID NO: 372711 - DNA, 15 bp, Homo sapiens
aagcatacggcagct

SEQ ID NO: 372712 - DNA, 15 bp, Homo sapiens
gaagcatacggcagc

SEQ ID NO: 372713 - DNA, 15 bp, Homo sapiens
cgaagcatacggcag

SEQ ID NO: 372714 - DNA, 15 bp, Homo sapiens
acgaagcatacggca

SEQ ID NO: 372715 - DNA, 15 bp, Homo sapiens
aacgaagcatacggc

SEQ ID NO: 372716 - DNA, 15 bp, Homo sapiens
taacgaagcatacgg

SEQ ID NO: 372717 - DNA, 15 bp, Homo sapiens
ctaacgaagcatacg

SEQ ID NO: 372718 - DNA, 15 bp, Homo sapiens
tctaacgaagcatac

SEQ ID NO: 372719 - DNA, 15 bp, Homo sapiens
ttctaacgaagcata

SEQ ID NO: 372720 - DNA, 15 bp, Homo sapiens
tttctaacgaagcat

SEQ ID NO: 372721 - DNA, 15 bp, Homo sapiens
ttttctaacgaagca

SEQ ID NO: 372722 - DNA, 15 bp, Homo sapiens
tttttctaacgaagc

SEQ ID NO: 372723 - DNA, 15 bp, Homo sapiens
atttttctaacgaag

SEQ ID NO: 372724 - DNA, 15 bp, Homo sapiens
aatttttctaacgaa

SEQ ID NO: 372725 - DNA, 15 bp, Homo sapiens
taatttttctaacga

SEQ ID NO: 372726 - DNA, 15 bp, Homo sapiens
ttaatttttctaacg

SEQ ID NO: 372727 - DNA, 15 bp, Homo sapiens
attaatttttctaac

SEQ ID NO: 372728 - DNA, 15 bp, Homo sapiens
aattaatttttctaa

SEQ ID NO: 372729 - DNA, 15 bp, Homo sapiens
aaattaatttttcta

SEQ ID NO: 372730 - DNA, 15 bp, Homo sapiens
aaaattaatttttct

SEQ ID NO: 372731 - DNA, 15 bp, Homo sapiens
aaaaattaatttttc

SEQ ID NO: 372732 - DNA, 15 bp, Homo sapiens
taaaaattaattttt

SEQ ID NO: 372733 - DNA, 15 bp, Homo sapiens
gtaaaaattaatttt

SEQ ID NO: 372734 - DNA, 15 bp, Homo sapiens
ggtaaaaattaattt

SEQ ID NO: 372735 - DNA, 15 bp, Homo sapiens
tggtaaaaattaatt

SEQ ID NO: 372736 - DNA, 15 bp, Homo sapiens
ctggtaaaaattaat

SEQ ID NO: 372737 - DNA, 15 bp, Homo sapiens
tctggtaaaaattaa

SEQ ID NO: 372738 - DNA, 15 bp, Homo sapiens
atctggtaaaaatta

SEQ ID NO: 372739 - DNA, 15 bp, Homo sapiens
catctggtaaaaatt

SEQ ID NO: 372740 - DNA, 15 bp, Homo sapiens
tcatctggtaaaaat

SEQ ID NO: 372741 - DNA, 15 bp, Homo sapiens
ttcatctggtaaaaa

SEQ ID NO: 372742 - DNA, 15 bp, Homo sapiens
attcatctggtaaaa

SEQ ID NO: 372743 - DNA, 15 bp, Homo sapiens
cattcatctggtaaa

SEQ ID NO: 372744 - DNA, 15 bp, Homo sapiens
acattcatctggtaa

SEQ ID NO: 372745 - DNA, 15 bp, Homo sapiens
tacattcatctggta

SEQ ID NO: 372746 - DNA, 15 bp, Homo sapiens
ctacattcatctggt

SEQ ID NO: 372747 - DNA, 15 bp, Homo sapiens
cctacattcatctgg

SEQ ID NO: 372748 - DNA, 15 bp, Homo sapiens
tcctacattcatctg

SEQ ID NO: 372749 - DNA, 15 bp, Homo sapiens
ttcctacattcatct

SEQ ID NO: 372750 - DNA, 15 bp, Homo sapiens
cttcctacattcatc

SEQ ID NO: 372751 - DNA, 15 bp, Homo sapiens
acttcctacattcat

SEQ ID NO: 372752 - DNA, 15 bp, Homo sapiens
tacttcctacattca

SEQ ID NO: 372753 - DNA, 15 bp, Homo sapiens
ttacttcctacattc

SEQ ID NO: 372754 - DNA, 15 bp, Homo sapiens
tttacttcctacatt

SEQ ID NO: 372755 - DNA, 15 bp, Homo sapiens
atttacttcctacat

SEQ ID NO: 372756 - DNA, 15 bp, Homo sapiens
tatttacttcctaca

SEQ ID NO: 372757 - DNA, 15 bp, Homo sapiens
ctatttacttcctac

SEQ ID NO: 372758 - DNA, 15 bp, Homo sapiens
cctatttacttccta

SEQ ID NO: 372759 - DNA, 15 bp, Homo sapiens
acctatttacttcct

SEQ ID NO: 372760 - DNA, 15 bp, Homo sapiens
aacctatttacttcc

SEQ ID NO: 372761 - DNA, 15 bp, Homo sapiens
aaacctatttacttc

SEQ ID NO: 372762 - DNA, 15 bp, Homo sapiens
gaaacctatttactt

SEQ ID NO: 372763 - DNA, 15 bp, Homo sapiens
agaaacctatttact

SEQ ID NO: 372764 - DNA, 15 bp, Homo sapiens
tagaaacctatttac

SEQ ID NO: 372765 - DNA, 15 bp, Homo sapiens
ttagaaacctattta

SEQ ID NO: 372766 - DNA, 15 bp, Homo sapiens
attagaaacctattt

SEQ ID NO: 372767 - DNA, 15 bp, Homo sapiens
tattagaaacctatt

SEQ ID NO: 372768 - DNA, 15 bp, Homo sapiens
atattagaaacctat

SEQ ID NO: 372769 - DNA, 15 bp, Homo sapiens
aatattagaaaccta

SEQ ID NO: 372770 - DNA, 15 bp, Homo sapiens
caatattagaaacct

SEQ ID NO: 372771 - DNA, 15 bp, Homo sapiens
tcaatattagaaacc

SEQ ID NO: 372772 - DNA, 15 bp, Homo sapiens
atcaatattagaaac

SEQ ID NO: 372773 - DNA, 15 bp, Homo sapiens
tatcaatattagaaa

SEQ ID NO: 372774 - DNA, 15 bp, Homo sapiens
atatcaatattagaa

SEQ ID NO: 372775 - DNA, 15 bp, Homo sapiens
catatcaatattaga

SEQ ID NO: 372776 - DNA, 15 bp, Homo sapiens
acatatcaatattag

SEQ ID NO: 372777 - DNA, 15 bp, Homo sapiens
cacatatcaatatta

SEQ ID NO: 372778 - DNA, 15 bp, Homo sapiens
acacatatcaatatt

SEQ ID NO: 372779 - DNA, 15 bp, Homo sapiens
gacacatatcaatat

SEQ ID NO: 372780 - DNA, 15 bp, Homo sapiens
ggacacatatcaata

SEQ ID NO: 372781 - DNA, 15 bp, Homo sapiens
tggacacatatcaat

SEQ ID NO: 372782 - DNA, 15 bp, Homo sapiens
atggacacatatcaa

SEQ ID NO: 372783 - DNA, 15 bp, Homo sapiens
catggacacatatca

SEQ ID NO: 372784 - DNA, 15 bp, Homo sapiens
gcatggacacatatc

SEQ ID NO: 372785 - DNA, 15 bp, Homo sapiens
tgcatggacacatat

SEQ ID NO: 372786 - DNA, 15 bp, Homo sapiens
ttgcatggacacata

SEQ ID NO: 372787 - DNA, 15 bp, Homo sapiens
tttgcatggacacat

SEQ ID NO: 372788 - DNA, 15 bp, Homo sapiens
ttttgcatggacaca

SEQ ID NO: 372789 - DNA, 15 bp, Homo sapiens
gttttgcatggacac

SEQ ID NO: 372790 - DNA, 15 bp, Homo sapiens
ggttttgcatggaca

SEQ ID NO: 372791 - DNA, 15 bp, Homo sapiens
aggttttgcatggac

SEQ ID NO: 372792 - DNA, 15 bp, Homo sapiens
aaggttttgcatgga

SEQ ID NO: 372793 - DNA, 15 bp, Homo sapiens
taaggttttgcatgg

SEQ ID NO: 372794 - DNA, 15 bp, Homo sapiens
ttaaggttttgcatg

SEQ ID NO: 372795 - DNA, 15 bp, Homo sapiens
gttaaggttttgcat

SEQ ID NO: 372796 - DNA, 15 bp, Homo sapiens
cgttaaggttttgca

SEQ ID NO: 372797 - DNA, 15 bp, Homo sapiens
tcgttaaggttttgc

SEQ ID NO: 372798 - DNA, 15 bp, Homo sapiens
ctcgttaaggttttg

SEQ ID NO: 372799 - DNA, 15 bp, Homo sapiens
cctcgttaaggtttt

SEQ ID NO: 372800 - DNA, 15 bp, Homo sapiens
gcctcgttaaggttt

SEQ ID NO: 372801 - DNA, 15 bp, Homo sapiens
tgcctcgttaaggtt

SEQ ID NO: 372802 - DNA, 15 bp, Homo sapiens
ctgcctcgttaaggt

SEQ ID NO: 372803 - DNA, 15 bp, Homo sapiens
tctgcctcgttaagg

SEQ ID NO: 372804 - DNA, 15 bp, Homo sapiens
gtctgcctcgttaag

SEQ ID NO: 372805 - DNA, 15 bp, Homo sapiens
tgtctgcctcgttaa

SEQ ID NO: 372806 - DNA, 15 bp, Homo sapiens
atgtctgcctcgtta

SEQ ID NO: 372807 - DNA, 15 bp, Homo sapiens
aatgtctgcctcgtt

SEQ ID NO: 372808 - DNA, 15 bp, Homo sapiens
gaatgtctgcctcgt

SEQ ID NO: 372809 - DNA, 15 bp, Homo sapiens
agaatgtctgcctcg

SEQ ID NO: 372810 - DNA, 15 bp, Homo sapiens
cagaatgtctgcctc

SEQ ID NO: 372811 - DNA, 15 bp, Homo sapiens
gcagaatgtctgcct

SEQ ID NO: 372812 - DNA, 15 bp, Homo sapiens
ggcagaatgtctgcc

SEQ ID NO: 372813 - DNA, 15 bp, Homo sapiens
aggcagaatgtctgc

SEQ ID NO: 372814 - DNA, 15 bp, Homo sapiens
taggcagaatgtctg

SEQ ID NO: 372815 - DNA, 15 bp, Homo sapiens
ctaggcagaatgtct

SEQ ID NO: 372816 - DNA, 15 bp, Homo sapiens
gctaggcagaatgtc

SEQ ID NO: 372817 - DNA, 15 bp, Homo sapiens
ggctaggcagaatgt

SEQ ID NO: 372818 - DNA, 15 bp, Homo sapiens
cggctaggcagaatg

SEQ ID NO: 372819 - DNA, 15 bp, Homo sapiens
ccggctaggcagaat

SEQ ID NO: 372820 - DNA, 15 bp, Homo sapiens
cccggctaggcagaa

SEQ ID NO: 372821 - DNA, 15 bp, Homo sapiens
tcccggctaggcaga

SEQ ID NO: 372822 - DNA, 15 bp, Homo sapiens
atcccggctaggcag

SEQ ID NO: 372823 - DNA, 15 bp, Homo sapiens
tatcccggctaggca

SEQ ID NO: 372824 - DNA, 15 bp, Homo sapiens
atatcccggctaggc

SEQ ID NO: 372825 - DNA, 15 bp, Homo sapiens
aatatcccggctagg

SEQ ID NO: 372826 - DNA, 15 bp, Homo sapiens
aaatatcccggctag

SEQ ID NO: 372827 - DNA, 15 bp, Homo sapiens
gaaatatcccggcta

SEQ ID NO: 372828 - DNA, 15 bp, Homo sapiens
agaaatatcccggct

SEQ ID NO: 372829 - DNA, 15 bp, Homo sapiens
gagaaatatcccggc

SEQ ID NO: 372830 - DNA, 15 bp, Homo sapiens
tgagaaatatcccgg

SEQ ID NO: 372831 - DNA, 15 bp, Homo sapiens
gtgagaaatatcccg

SEQ ID NO: 372832 - DNA, 15 bp, Homo sapiens
agtgagaaatatccc

SEQ ID NO: 372833 - DNA, 15 bp, Homo sapiens
gagtgagaaatatcc

SEQ ID NO: 372834 - DNA, 15 bp, Homo sapiens
agagtgagaaatatc

SEQ ID NO: 372835 - DNA, 15 bp, Homo sapiens
gagagtgagaaatat

SEQ ID NO: 372836 - DNA, 15 bp, Homo sapiens
tgagagtgagaaata

SEQ ID NO: 372837 - DNA, 15 bp, Homo sapiens
gtgagagtgagaaat

SEQ ID NO: 372838 - DNA, 15 bp, Homo sapiens
agtgagagtgagaaa

SEQ ID NO: 372839 - DNA, 15 bp, Homo sapiens
tagtgagagtgagaa

SEQ ID NO: 372840 - DNA, 15 bp, Homo sapiens
ttagtgagagtgaga

SEQ ID NO: 372841 - DNA, 15 bp, Homo sapiens
tttagtgagagtgag

SEQ ID NO: 372842 - DNA, 15 bp, Homo sapiens
gtttagtgagagtga

SEQ ID NO: 372843 - DNA, 15 bp, Homo sapiens
agtttagtgagagtg

SEQ ID NO: 372844 - DNA, 15 bp, Homo sapiens
cagtttagtgagagt

SEQ ID NO: 372845 - DNA, 15 bp, Homo sapiens
tcagtttagtgagag

SEQ ID NO: 372846 - DNA, 15 bp, Homo sapiens
ttcagtttagtgaga

SEQ ID NO: 372847 - DNA, 15 bp, Homo sapiens
tttcagtttagtgag

SEQ ID NO: 372848 - DNA, 15 bp, Homo sapiens
ctttcagtttagtga

SEQ ID NO: 372849 - DNA, 15 bp, Homo sapiens
actttcagtttagtg

SEQ ID NO: 372850 - DNA, 15 bp, Homo sapiens
aactttcagtttagt

SEQ ID NO: 372851 - DNA, 15 bp, Homo sapiens
taactttcagtttag

SEQ ID NO: 372852 - DNA, 15 bp, Homo sapiens
gtaactttcagttta

SEQ ID NO: 372853 - DNA, 15 bp, Homo sapiens
tgtaactttcagttt

SEQ ID NO: 372854 - DNA, 15 bp, Homo sapiens
ctgtaactttcagtt

SEQ ID NO: 372855 - DNA, 15 bp, Homo sapiens
actgtaactttcagt

SEQ ID NO: 372856 - DNA, 15 bp, Homo sapiens
aactgtaactttcag

SEQ ID NO: 372857 - DNA, 15 bp, Homo sapiens
caactgtaactttca

SEQ ID NO: 372858 - DNA, 15 bp, Homo sapiens
acaactgtaactttc

SEQ ID NO: 372859 - DNA, 15 bp, Homo sapiens
aacaactgtaacttt

SEQ ID NO: 372860 - DNA, 15 bp, Homo sapiens
gaacaactgtaactt

SEQ ID NO: 372861 - DNA, 15 bp, Homo sapiens
ggaacaactgtaact

SEQ ID NO: 372862 - DNA, 15 bp, Homo sapiens
tggaacaactgtaac

SEQ ID NO: 372863 - DNA, 15 bp, Homo sapiens
ttggaacaactgtaa

SEQ ID NO: 372864 - DNA, 15 bp, Homo sapiens
gttggaacaactgta

SEQ ID NO: 372865 - DNA, 15 bp, Homo sapiens
ggttggaacaactgt

SEQ ID NO: 372866 - DNA, 15 bp, Homo sapiens
aggttggaacaactg

SEQ ID NO: 372867 - DNA, 15 bp, Homo sapiens
gaggttggaacaact

SEQ ID NO: 372868 - DNA, 15 bp, Homo sapiens
tgaggttggaacaac

SEQ ID NO: 372869 - DNA, 15 bp, Homo sapiens
atgaggttggaacaa

SEQ ID NO: 372870 - DNA, 15 bp, Homo sapiens
gatgaggttggaaca

SEQ ID NO: 372871 - DNA, 15 bp, Homo sapiens
ggatgaggttggaac

SEQ ID NO: 372872 - DNA, 15 bp, Homo sapiens
tggatgaggttggaa

SEQ ID NO: 372873 - DNA, 15 bp, Homo sapiens
ctggatgaggttgga

SEQ ID NO: 372874 - DNA, 15 bp, Homo sapiens
cctggatgaggttgg

SEQ ID NO: 372875 - DNA, 15 bp, Homo sapiens
acctggatgaggttg

SEQ ID NO: 372876 - DNA, 15 bp, Homo sapiens
tacctggatgaggtt

SEQ ID NO: 372877 - DNA, 15 bp, Homo sapiens
atacctggatgaggt

SEQ ID NO: 372878 - DNA, 15 bp, Homo sapiens
catacctggatgagg

SEQ ID NO: 372879 - DNA, 15 bp, Homo sapiens
acatacctggatgag

SEQ ID NO: 372880 - DNA, 15 bp, Homo sapiens
tacatacctggatga

SEQ ID NO: 372881 - DNA, 15 bp, Homo sapiens
gtacatacctggatg

SEQ ID NO: 372882 - DNA, 15 bp, Homo sapiens
agtacatacctggat

SEQ ID NO: 372883 - DNA, 15 bp, Homo sapiens
aagtacatacctgga

SEQ ID NO: 372884 - DNA, 15 bp, Homo sapiens
caagtacatacctgg

SEQ ID NO: 372885 - DNA, 15 bp, Homo sapiens
ccaagtacatacctg

SEQ ID NO: 372886 - DNA, 15 bp, Homo sapiens
gccaagtacatacct

SEQ ID NO: 372887 - DNA, 15 bp, Homo sapiens
agccaagtacatacc

SEQ ID NO: 372888 - DNA, 15 bp, Homo sapiens
aagccaagtacatac

SEQ ID NO: 372889 - DNA, 15 bp, Homo sapiens
caagccaagtacata

SEQ ID NO: 372890 - DNA, 15 bp, Homo sapiens
ccaagccaagtacat

SEQ ID NO: 372891 - DNA, 15 bp, Homo sapiens
tccaagccaagtaca

SEQ ID NO: 372892 - DNA, 15 bp, Homo sapiens
gtccaagccaagtac

SEQ ID NO: 372893 - DNA, 15 bp, Homo sapiens
ggtccaagccaagta

SEQ ID NO: 372894 - DNA, 15 bp, Homo sapiens
aggtccaagccaagt

SEQ ID NO: 372895 - DNA, 15 bp, Homo sapiens
caggtccaagccaag

SEQ ID NO: 372896 - DNA, 15 bp, Homo sapiens
ccaggtccaagccaa

SEQ ID NO: 372897 - DNA, 15 bp, Homo sapiens
cccaggtccaagcca

SEQ ID NO: 372898 - DNA, 15 bp, Homo sapiens
tcccaggtccaagcc

SEQ ID NO: 372899 - DNA, 15 bp, Homo sapiens
gtcccaggtccaagc

SEQ ID NO: 372900 - DNA, 15 bp, Homo sapiens
ggtcccaggtccaag

SEQ ID NO: 372901 - DNA, 15 bp, Homo sapiens
gggtcccaggtccaa

SEQ ID NO: 372902 - DNA, 15 bp, Homo sapiens
tgggtcccaggtcca

SEQ ID NO: 372903 - DNA, 15 bp, Homo sapiens
ttgggtcccaggtcc

SEQ ID NO: 372904 - DNA, 15 bp, Homo sapiens
tttgggtcccaggtc

SEQ ID NO: 372905 - DNA, 15 bp, Homo sapiens
ctttgggtcccaggt

SEQ ID NO: 372906 - DNA, 15 bp, Homo sapiens
tctttgggtcccagg

SEQ ID NO: 372907 - DNA, 15 bp, Homo sapiens
ttctttgggtcccag

SEQ ID NO: 372908 - DNA, 15 bp, Homo sapiens
cttctttgggtccca

SEQ ID NO: 372909 - DNA, 15 bp, Homo sapiens
gcttctttgggtccc

SEQ ID NO: 372910 - DNA, 15 bp, Homo sapiens
ggcttctttgggtcc

SEQ ID NO: 372911 - DNA, 15 bp, Homo sapiens
gggcttctttgggtc

SEQ ID NO: 372912 - DNA, 15 bp, Homo sapiens
tgggcttctttgggt

SEQ ID NO: 372913 - DNA, 15 bp, Homo sapiens
ttgggcttctttggg

SEQ ID NO: 372914 - DNA, 15 bp, Homo sapiens
tttgggcttctttgg

SEQ ID NO: 372915 - DNA, 15 bp, Homo sapiens
gtttgggcttctttg

SEQ ID NO: 372916 - DNA, 15 bp, Homo sapiens
agtttgggcttcttt

SEQ ID NO: 372917 - DNA, 15 bp, Homo sapiens
cagtttgggcttctt

SEQ ID NO: 372918 - DNA, 15 bp, Homo sapiens
gcagtttgggcttct

SEQ ID NO: 372919 - DNA, 15 bp, Homo sapiens
tgcagtttgggcttc

SEQ ID NO: 372920 - DNA, 15 bp, Homo sapiens
ttgcagtttgggctt

SEQ ID NO: 372921 - DNA, 15 bp, Homo sapiens
tttgcagtttgggct

SEQ ID NO: 372922 - DNA, 15 bp, Homo sapiens
ttttgcagtttgggc

SEQ ID NO: 372923 - DNA, 15 bp, Homo sapiens
attttgcagtttggg

SEQ ID NO: 372924 - DNA, 15 bp, Homo sapiens
gattttgcagtttgg

SEQ ID NO: 372925 - DNA, 15 bp, Homo sapiens
tgattttgcagtttg

SEQ ID NO: 372926 - DNA, 15 bp, Homo sapiens
ctgattttgcagttt

SEQ ID NO: 372927 - DNA, 15 bp, Homo sapiens
tctgattttgcagtt

SEQ ID NO: 372928 - DNA, 15 bp, Homo sapiens
ctctgattttgcagt

SEQ ID NO: 372929 - DNA, 15 bp, Homo sapiens
tctctgattttgcag

SEQ ID NO: 372930 - DNA, 15 bp, Homo sapiens
gtctctgattttgca

SEQ ID NO: 372931 - DNA, 15 bp, Homo sapiens
ggtctctgattttgc

SEQ ID NO: 372932 - DNA, 15 bp, Homo sapiens
tggtctctgattttg

SEQ ID NO: 372933 - DNA, 15 bp, Homo sapiens
ttggtctctgatttt

SEQ ID NO: 372934 - DNA, 15 bp, Homo sapiens
cttggtctctgattt

SEQ ID NO: 372935 - DNA, 15 bp, Homo sapiens
gcttggtctctgatt

SEQ ID NO: 372936 - DNA, 15 bp, Homo sapiens
tgcttggtctctgat

SEQ ID NO: 372937 - DNA, 15 bp, Homo sapiens
ctgcttggtctctga

SEQ ID NO: 372938 - DNA, 15 bp, Homo sapiens
cctgcttggtctctg

SEQ ID NO: 372939 - DNA, 15 bp, Homo sapiens
gcctgcttggtctct

SEQ ID NO: 372940 - DNA, 15 bp, Homo sapiens
agcctgcttggtctc

SEQ ID NO: 372941 - DNA, 15 bp, Homo sapiens
cagcctgcttggtct

SEQ ID NO: 372942 - DNA, 15 bp, Homo sapiens
gcagcctgcttggtc

SEQ ID NO: 372943 - DNA, 15 bp, Homo sapiens
agcagcctgcttggt

SEQ ID NO: 372944 - DNA, 15 bp, Homo sapiens
aagcagcctgcttgg

SEQ ID NO: 372945 - DNA, 15 bp, Homo sapiens
aaagcagcctgcttg

SEQ ID NO: 372946 - DNA, 15 bp, Homo sapiens
gaaagcagcctgctt

SEQ ID NO: 372947 - DNA, 15 bp, Homo sapiens
ggaaagcagcctgct

SEQ ID NO: 372948 - DNA, 15 bp, Homo sapiens
tggaaagcagcctgc

SEQ ID NO: 372949 - DNA, 15 bp, Homo sapiens
ttggaaagcagcctg

SEQ ID NO: 372950 - DNA, 15 bp, Homo sapiens
attggaaagcagcct

SEQ ID NO: 372951 - DNA, 15 bp, Homo sapiens
aattggaaagcagcc

SEQ ID NO: 372952 - DNA, 15 bp, Homo sapiens
aaattggaaagcagc

SEQ ID NO: 372953 - DNA, 15 bp, Homo sapiens
aaaattggaaagcag

SEQ ID NO: 372954 - DNA, 15 bp, Homo sapiens
gaaaattggaaagca

SEQ ID NO: 372955 - DNA, 15 bp, Homo sapiens
ggaaaattggaaagc

SEQ ID NO: 372956 - DNA, 15 bp, Homo sapiens
aggaaaattggaaag

SEQ ID NO: 372957 - DNA, 15 bp, Homo sapiens
caggaaaattggaaa

SEQ ID NO: 372958 - DNA, 15 bp, Homo sapiens
acaggaaaattggaa

SEQ ID NO: 372959 - DNA, 15 bp, Homo sapiens
cacaggaaaattgga

SEQ ID NO: 372960 - DNA, 15 bp, Homo sapiens
acacaggaaaattgg

SEQ ID NO: 372961 - DNA, 15 bp, Homo sapiens
gacacaggaaaattg

SEQ ID NO: 372962 - DNA, 15 bp, Homo sapiens
ggacacaggaaaatt

SEQ ID NO: 372963 - DNA, 15 bp, Homo sapiens
tggacacaggaaaat

SEQ ID NO: 372964 - DNA, 15 bp, Homo sapiens
gtggacacaggaaaa

SEQ ID NO: 372965 - DNA, 15 bp, Homo sapiens
tgtggacacaggaaa

SEQ ID NO: 372966 - DNA, 15 bp, Homo sapiens
atgtggacacaggaa

SEQ ID NO: 372967 - DNA, 15 bp, Homo sapiens
tatgtggacacagga

SEQ ID NO: 372968 - DNA, 15 bp, Homo sapiens
atatgtggacacagg

SEQ ID NO: 372969 - DNA, 15 bp, Homo sapiens
tatatgtggacacag

SEQ ID NO: 372970 - DNA, 15 bp, Homo sapiens
gtatatgtggacaca

SEQ ID NO: 372971 - DNA, 15 bp, Homo sapiens
ggtatatgtggacac

SEQ ID NO: 372972 - DNA, 15 bp, Homo sapiens
aggtatatgtggaca

SEQ ID NO: 372973 - DNA, 15 bp, Homo sapiens
aaggtatatgtggac

SEQ ID NO: 372974 - DNA, 15 bp, Homo sapiens
taaggtatatgtgga

SEQ ID NO: 372975 - DNA, 15 bp, Homo sapiens
ataaggtatatgtgg

SEQ ID NO: 372976 - DNA, 15 bp, Homo sapiens
cataaggtatatgtg

SEQ ID NO: 372977 - DNA, 15 bp, Homo sapiens
acataaggtatatgt

SEQ ID NO: 372978 - DNA, 15 bp, Homo sapiens
cacataaggtatatg

SEQ ID NO: 372979 - DNA, 15 bp, Homo sapiens
ccacataaggtatat

SEQ ID NO: 372980 - DNA, 15 bp, Homo sapiens
accacataaggtata

SEQ ID NO: 372981 - DNA, 15 bp, Homo sapiens
gaccacataaggtat

SEQ ID NO: 372982 - DNA, 15 bp, Homo sapiens
agaccacataaggta

SEQ ID NO: 372983 - DNA, 15 bp, Homo sapiens
cagaccacataaggt

SEQ ID NO: 372984 - DNA, 15 bp, Homo sapiens
acagaccacataagg

SEQ ID NO: 372985 - DNA, 15 bp, Homo sapiens
cacagaccacataag

SEQ ID NO: 372986 - DNA, 15 bp, Homo sapiens
acacagaccacataa

SEQ ID NO: 372987 - DNA, 15 bp, Homo sapiens
aacacagaccacata

SEQ ID NO: 372988 - DNA, 15 bp, Homo sapiens
aaacacagaccacat

SEQ ID NO: 372989 - DNA, 15 bp, Homo sapiens
caaacacagaccaca

SEQ ID NO: 372990 - DNA, 15 bp, Homo sapiens
ccaaacacagaccac

SEQ ID NO: 372991 - DNA, 15 bp, Homo sapiens
gccaaacacagacca

SEQ ID NO: 372992 - DNA, 15 bp, Homo sapiens
tgccaaacacagacc

SEQ ID NO: 372993 - DNA, 15 bp, Homo sapiens
gtgccaaacacagac

SEQ ID NO: 372994 - DNA, 15 bp, Homo sapiens
tgtgccaaacacaga

SEQ ID NO: 372995 - DNA, 15 bp, Homo sapiens
gtgtgccaaacacag

SEQ ID NO: 372996 - DNA, 15 bp, Homo sapiens
agtgtgccaaacaca

SEQ ID NO: 372997 - DNA, 15 bp, Homo sapiens
cagtgtgccaaacac

SEQ ID NO: 372998 - DNA, 15 bp, Homo sapiens
ccagtgtgccaaaca

SEQ ID NO: 372999 - DNA, 15 bp, Homo sapiens
cccagtgtgccaaac

SEQ ID NO: 373000 - DNA, 15 bp, Homo sapiens
tcccagtgtgccaaa

SEQ ID NO: 373001 - DNA, 15 bp, Homo sapiens
ttcccagtgtgccaa

SEQ ID NO: 373002 - DNA, 15 bp, Homo sapiens
cttcccagtgtgcca

SEQ ID NO: 373003 - DNA, 15 bp, Homo sapiens
acttcccagtgtgcc

SEQ ID NO: 373004 - DNA, 15 bp, Homo sapiens
aacttcccagtgtgc

SEQ ID NO: 373005 - DNA, 15 bp, Homo sapiens
gaacttcccagtgtg

SEQ ID NO: 373006 - DNA, 15 bp, Homo sapiens
tgaacttcccagtgt

SEQ ID NO: 373007 - DNA, 15 bp, Homo sapiens
ttgaacttcccagtg

SEQ ID NO: 373008 - DNA, 15 bp, Homo sapiens
cttgaacttcccagt

SEQ ID NO: 373009 - DNA, 15 bp, Homo sapiens
ccttgaacttcccag

SEQ ID NO: 373010 - DNA, 15 bp, Homo sapiens
cccttgaacttccca

SEQ ID NO: 373011 - DNA, 15 bp, Homo sapiens
tcccttgaacttccc

SEQ ID NO: 373012 - DNA, 15 bp, Homo sapiens
atcccttgaacttcc

SEQ ID NO: 373013 - DNA, 15 bp, Homo sapiens
gatcccttgaacttc

SEQ ID NO: 373014 - DNA, 15 bp, Homo sapiens
tgatcccttgaactt

SEQ ID NO: 373015 - DNA, 15 bp, Homo sapiens
ctgatcccttgaact

SEQ ID NO: 373016 - DNA, 15 bp, Homo sapiens
gctgatcccttgaac

SEQ ID NO: 373017 - DNA, 15 bp, Homo sapiens
ggctgatcccttgaa

SEQ ID NO: 373018 - DNA, 15 bp, Homo sapiens
tggctgatcccttga

SEQ ID NO: 373019 - DNA, 15 bp, Homo sapiens
atggctgatcccttg

SEQ ID NO: 373020 - DNA, 15 bp, Homo sapiens
tatggctgatccctt

SEQ ID NO: 373021 - DNA, 15 bp, Homo sapiens
ttatggctgatccct

SEQ ID NO: 373022 - DNA, 15 bp, Homo sapiens
cttatggctgatccc

SEQ ID NO: 373023 - DNA, 15 bp, Homo sapiens
gcttatggctgatcc

SEQ ID NO: 373024 - DNA, 15 bp, Homo sapiens
tgcttatggctgatc

SEQ ID NO: 373025 - DNA, 15 bp, Homo sapiens
ctgcttatggctgat

SEQ ID NO: 373026 - DNA, 15 bp, Homo sapiens
cctgcttatggctga

SEQ ID NO: 373027 - DNA, 15 bp, Homo sapiens
acctgcttatggctg

SEQ ID NO: 373028 - DNA, 15 bp, Homo sapiens
cacctgcttatggct

SEQ ID NO: 373029 - DNA, 15 bp, Homo sapiens
ccacctgcttatggc

SEQ ID NO: 373030 - DNA, 15 bp, Homo sapiens
gccacctgcttatgg

SEQ ID NO: 373031 - DNA, 15 bp, Homo sapiens
tgccacctgcttatg

SEQ ID NO: 373032 - DNA, 15 bp, Homo sapiens
atgccacctgcttat

SEQ ID NO: 373033 - DNA, 15 bp, Homo sapiens
tatgccacctgctta

SEQ ID NO: 373034 - DNA, 15 bp, Homo sapiens
atatgccacctgctt

SEQ ID NO: 373035 - DNA, 15 bp, Homo sapiens
tatatgccacctgct

SEQ ID NO: 373036 - DNA, 15 bp, Homo sapiens
gtatatgccacctgc

SEQ ID NO: 373037 - DNA, 15 bp, Homo sapiens
tgtatatgccacctg

SEQ ID NO: 373038 - DNA, 15 bp, Homo sapiens
atgtatatgccacct

SEQ ID NO: 373039 - DNA, 15 bp, Homo sapiens
aatgtatatgccacc

SEQ ID NO: 373040 - DNA, 15 bp, Homo sapiens
taatgtatatgccac

SEQ ID NO: 373041 - DNA, 15 bp, Homo sapiens
ctaatgtatatgcca

SEQ ID NO: 373042 - DNA, 15 bp, Homo sapiens
actaatgtatatgcc

SEQ ID NO: 373043 - DNA, 15 bp, Homo sapiens
gactaatgtatatgc

SEQ ID NO: 373044 - DNA, 15 bp, Homo sapiens
tgactaatgtatatg

SEQ ID NO: 373045 - DNA, 15 bp, Homo sapiens
ctgactaatgtatat

SEQ ID NO: 373046 - DNA, 15 bp, Homo sapiens
cctgactaatgtata

SEQ ID NO: 373047 - DNA, 15 bp, Homo sapiens
tcctgactaatgtat

SEQ ID NO: 373048 - DNA, 15 bp, Homo sapiens
ctcctgactaatgta

SEQ ID NO: 373049 - DNA, 15 bp, Homo sapiens
cctcctgactaatgt

SEQ ID NO: 373050 - DNA, 15 bp, Homo sapiens
tcctcctgactaatg

SEQ ID NO: 373051 - DNA, 15 bp, Homo sapiens
atcctcctgactaat

SEQ ID NO: 373052 - DNA, 15 bp, Homo sapiens
aatcctcctgactaa

SEQ ID NO: 373053 - DNA, 15 bp, Homo sapiens
aaatcctcctgacta

SEQ ID NO: 373054 - DNA, 15 bp, Homo sapiens
taaatcctcctgact

SEQ ID NO: 373055 - DNA, 15 bp, Homo sapiens
ctaaatcctcctgac

SEQ ID NO: 373056 - DNA, 15 bp, Homo sapiens
tctaaatcctcctga

SEQ ID NO: 373057 - DNA, 15 bp, Homo sapiens
atctaaatcctcctg

SEQ ID NO: 373058 - DNA, 15 bp, Homo sapiens
catctaaatcctcct

SEQ ID NO: 373059 - DNA, 15 bp, Homo sapiens
gcatctaaatcctcc

SEQ ID NO: 373060 - DNA, 15 bp, Homo sapiens
tgcatctaaatcctc

SEQ ID NO: 373061 - DNA, 15 bp, Homo sapiens
ttgcatctaaatcct

SEQ ID NO: 373062 - DNA, 15 bp, Homo sapiens
cttgcatctaaatcc

SEQ ID NO: 373063 - DNA, 15 bp, Homo sapiens
acttgcatctaaatc

SEQ ID NO: 373064 - DNA, 15 bp, Homo sapiens
tacttgcatctaaat

SEQ ID NO: 373065 - DNA, 15 bp, Homo sapiens
ttacttgcatctaaa

SEQ ID NO: 373066 - DNA, 15 bp, Homo sapiens
tttacttgcatctaa

SEQ ID NO: 373067 - DNA, 15 bp, Homo sapiens
gtttacttgcatcta

SEQ ID NO: 373068 - DNA, 15 bp, Homo sapiens
agtttacttgcatct

SEQ ID NO: 373069 - DNA, 15 bp, Homo sapiens
gagtttacttgcatc

SEQ ID NO: 373070 - DNA, 15 bp, Homo sapiens
ggagtttacttgcat

SEQ ID NO: 373071 - DNA, 15 bp, Homo sapiens
aggagtttacttgca

SEQ ID NO: 373072 - DNA, 15 bp, Homo sapiens
aaggagtttacttgc

SEQ ID NO: 373073 - DNA, 15 bp, Homo sapiens
gaaggagtttacttg

SEQ ID NO: 373074 - DNA, 15 bp, Homo sapiens
agaaggagtttactt

SEQ ID NO: 373075 - DNA, 15 bp, Homo sapiens
gagaaggagtttact

SEQ ID NO: 373076 - DNA, 15 bp, Homo sapiens
ggagaaggagtttac

SEQ ID NO: 373077 - DNA, 15 bp, Homo sapiens
tggagaaggagttta

SEQ ID NO: 373078 - DNA, 15 bp, Homo sapiens
atggagaaggagttt

SEQ ID NO: 373079 - DNA, 15 bp, Homo sapiens
aatggagaaggagtt

SEQ ID NO: 373080 - DNA, 15 bp, Homo sapiens
aaatggagaaggagt

SEQ ID NO: 373081 - DNA, 15 bp, Homo sapiens
taaatggagaaggag

SEQ ID NO: 373082 - DNA, 15 bp, Homo sapiens
ctaaatggagaagga

SEQ ID NO: 373083 - DNA, 15 bp, Homo sapiens
gctaaatggagaagg

SEQ ID NO: 373084 - DNA, 15 bp, Homo sapiens
agctaaatggagaag

SEQ ID NO: 373085 - DNA, 15 bp, Homo sapiens
aagctaaatggagaa

SEQ ID NO: 373086 - DNA, 15 bp, Homo sapiens
taagctaaatggaga

SEQ ID NO: 373087 - DNA, 15 bp, Homo sapiens
ttaagctaaatggag

SEQ ID NO: 373088 - DNA, 15 bp, Homo sapiens
tttaagctaaatgga

SEQ ID NO: 373089 - DNA, 15 bp, Homo sapiens
gtttaagctaaatgg

SEQ ID NO: 373090 - DNA, 15 bp, Homo sapiens
tgtttaagctaaatg

SEQ ID NO: 373091 - DNA, 15 bp, Homo sapiens
ctgtttaagctaaat

SEQ ID NO: 373092 - DNA, 15 bp, Homo sapiens
tctgtttaagctaaa

SEQ ID NO: 373093 - DNA, 15 bp, Homo sapiens
ttctgtttaagctaa

SEQ ID NO: 373094 - DNA, 15 bp, Homo sapiens
tttctgtttaagcta

SEQ ID NO: 373095 - DNA, 15 bp, Homo sapiens
ctttctgtttaagct

SEQ ID NO: 373096 - DNA, 15 bp, Homo sapiens
tctttctgtttaagc

SEQ ID NO: 373097 - DNA, 15 bp, Homo sapiens
ttctttctgtttaag

SEQ ID NO: 373098 - DNA, 15 bp, Homo sapiens
tttctttctgtttaa

SEQ ID NO: 373099 - DNA, 15 bp, Homo sapiens
ttttctttctgttta

SEQ ID NO: 373100 - DNA, 15 bp, Homo sapiens
tttttctttctgttt

SEQ ID NO: 373101 - DNA, 15 bp, Homo sapiens
ttttttctttctgtt

SEQ ID NO: 373102 - DNA, 15 bp, Homo sapiens
tttttttctttctgt

SEQ ID NO: 373103 - DNA, 15 bp, Homo sapiens
atttttttctttctg

SEQ ID NO: 373104 - DNA, 15 bp, Homo sapiens
catttttttctttct

SEQ ID NO: 373105 - DNA, 15 bp, Homo sapiens
acatttttttctttc

SEQ ID NO: 373106 - DNA, 15 bp, Homo sapiens
cacatttttttcttt

SEQ ID NO: 373107 - DNA, 15 bp, Homo sapiens
tcacatttttttctt

SEQ ID NO: 373108 - DNA, 15 bp, Homo sapiens
ttcacatttttttct

SEQ ID NO: 373109 - DNA, 15 bp, Homo sapiens
gttcacatttttttc

SEQ ID NO: 373110 - DNA, 15 bp, Homo sapiens
tgttcacattttttt

SEQ ID NO: 373111 - DNA, 15 bp, Homo sapiens
atgttcacatttttt

SEQ ID NO: 373112 - DNA, 15 bp, Homo sapiens
gatgttcacattttt

SEQ ID NO: 373113 - DNA, 15 bp, Homo sapiens
agatgttcacatttt

SEQ ID NO: 373114 - DNA, 15 bp, Homo sapiens
aagatgttcacattt

SEQ ID NO: 373115 - DNA, 15 bp, Homo sapiens
taagatgttcacatt

SEQ ID NO: 373116 - DNA, 15 bp, Homo sapiens
ataagatgttcacat

SEQ ID NO: 373117 - DNA, 15 bp, Homo sapiens
aataagatgttcaca

SEQ ID NO: 373118 - DNA, 15 bp, Homo sapiens
taataagatgttcac

SEQ ID NO: 373119 - DNA, 15 bp, Homo sapiens
ataataagatgttca

SEQ ID NO: 373120 - DNA, 15 bp, Homo sapiens
tataataagatgttc

SEQ ID NO: 373121 - DNA, 15 bp, Homo sapiens
atataataagatgtt

SEQ ID NO: 373122 - DNA, 15 bp, Homo sapiens
aatataataagatgt

SEQ ID NO: 373123 - DNA, 15 bp, Homo sapiens
caatataataagatg

SEQ ID NO: 373124 - DNA, 15 bp, Homo sapiens
acaatataataagat

SEQ ID NO: 373125 - DNA, 15 bp, Homo sapiens
cacaatataataaga

SEQ ID NO: 373126 - DNA, 15 bp, Homo sapiens
acacaatataataag

SEQ ID NO: 373127 - DNA, 15 bp, Homo sapiens
cacacaatataataa

SEQ ID NO: 373128 - DNA, 15 bp, Homo sapiens
acacacaatataata

SEQ ID NO: 373129 - DNA, 15 bp, Homo sapiens
tacacacaatataat

SEQ ID NO: 373130 - DNA, 15 bp, Homo sapiens
atacacacaatataa

SEQ ID NO: 373131 - DNA, 15 bp, Homo sapiens
catacacacaatata

SEQ ID NO: 373132 - DNA, 15 bp, Homo sapiens
acatacacacaatat

SEQ ID NO: 373133 - DNA, 15 bp, Homo sapiens
tacatacacacaata

SEQ ID NO: 373134 - DNA, 15 bp, Homo sapiens
atacatacacacaat

SEQ ID NO: 373135 - DNA, 15 bp, Homo sapiens
tatacatacacacaa

SEQ ID NO: 373136 - DNA, 15 bp, Homo sapiens
atatacatacacaca

SEQ ID NO: 373137 - DNA, 15 bp, Homo sapiens
catatacatacacac

SEQ ID NO: 373138 - DNA, 15 bp, Homo sapiens
acatatacatacaca

SEQ ID NO: 373139 - DNA, 15 bp, Homo sapiens
tacatatacatacac

SEQ ID NO: 373140 - DNA, 15 bp, Homo sapiens
ttatacatatacata

SEQ ID NO: 373141 - DNA, 15 bp, Homo sapiens
tttatacatatacat

SEQ ID NO: 373142 - DNA, 15 bp, Homo sapiens
atttatacatataca

SEQ ID NO: 373143 - DNA, 15 bp, Homo sapiens
tatttatacatatac

SEQ ID NO: 373144 - DNA, 15 bp, Homo sapiens
gtatttatacatata

SEQ ID NO: 373145 - DNA, 15 bp, Homo sapiens
tgtatttatacatat

SEQ ID NO: 373146 - DNA, 15 bp, Homo sapiens
atgtatttatacata

SEQ ID NO: 373147 - DNA, 15 bp, Homo sapiens
aatgtatttatacat

SEQ ID NO: 373148 - DNA, 15 bp, Homo sapiens
aaatgtatttataca

SEQ ID NO: 373149 - DNA, 15 bp, Homo sapiens
caaatgtatttatac

SEQ ID NO: 373150 - DNA, 15 bp, Homo sapiens
acaaatgtatttata

SEQ ID NO: 373151 - DNA, 15 bp, Homo sapiens
cacaaatgtatttat

SEQ ID NO: 373152 - DNA, 15 bp, Homo sapiens
acacaaatgtattta

SEQ ID NO: 373153 - DNA, 15 bp, Homo sapiens
tacacaaatgtattt

SEQ ID NO: 373154 - DNA, 15 bp, Homo sapiens
atacacaaatgtatt

SEQ ID NO: 373155 - DNA, 15 bp, Homo sapiens
catacacaaatgtat

SEQ ID NO: 373156 - DNA, 15 bp, Homo sapiens
acatacacaaatgta

SEQ ID NO: 373157 - DNA, 15 bp, Homo sapiens
cacatacacaaatgt

SEQ ID NO: 373158 - DNA, 15 bp, Homo sapiens
acacatacacaaatg

SEQ ID NO: 373159 - DNA, 15 bp, Homo sapiens
cacacatacacaaat

SEQ ID NO: 373160 - DNA, 15 bp, Homo sapiens
acacacatacacaaa

SEQ ID NO: 373161 - DNA, 15 bp, Homo sapiens
cacacacatacacaa

SEQ ID NO: 373162 - DNA, 15 bp, Homo sapiens
ataaacacacacaca

SEQ ID NO: 373163 - DNA, 15 bp, Homo sapiens
cataaacacacacac

SEQ ID NO: 373164 - DNA, 15 bp, Homo sapiens
acataaacacacaca

SEQ ID NO: 373165 - DNA, 15 bp, Homo sapiens
cacataaacacacac

SEQ ID NO: 373166 - DNA, 15 bp, Homo sapiens
acacataaacacaca

SEQ ID NO: 373167 - DNA, 15 bp, Homo sapiens
tacacataaacacac

SEQ ID NO: 373168 - DNA, 15 bp, Homo sapiens
atacacataaacaca

SEQ ID NO: 373169 - DNA, 15 bp, Homo sapiens
tatacacataaacac

SEQ ID NO: 373170 - DNA, 15 bp, Homo sapiens
ttatacacataaaca

SEQ ID NO: 373171 - DNA, 15 bp, Homo sapiens
tttatacacataaac

SEQ ID NO: 373172 - DNA, 15 bp, Homo sapiens
ttttatacacataaa

SEQ ID NO: 373173 - DNA, 15 bp, Homo sapiens
attttatacacataa

SEQ ID NO: 373174 - DNA, 15 bp, Homo sapiens
gattttatacacata

SEQ ID NO: 373175 - DNA, 15 bp, Homo sapiens
agattttatacacat

SEQ ID NO: 373176 - DNA, 15 bp, Homo sapiens
gagattttatacaca

SEQ ID NO: 373177 - DNA, 15 bp, Homo sapiens
tgagattttatacac

SEQ ID NO: 373178 - DNA, 15 bp, Homo sapiens
gtgagattttataca

SEQ ID NO: 373179 - DNA, 15 bp, Homo sapiens
tgtgagattttatac

SEQ ID NO: 373180 - DNA, 15 bp, Homo sapiens
atgtgagattttata

SEQ ID NO: 373181 - DNA, 15 bp, Homo sapiens
tatgtgagattttat

SEQ ID NO: 373182 - DNA, 15 bp, Homo sapiens
ctatgtgagatttta

SEQ ID NO: 373183 - DNA, 15 bp, Homo sapiens
cctatgtgagatttt

SEQ ID NO: 373184 - DNA, 15 bp, Homo sapiens
ccctatgtgagattt

SEQ ID NO: 373185 - DNA, 15 bp, Homo sapiens
tccctatgtgagatt

SEQ ID NO: 373186 - DNA, 15 bp, Homo sapiens
ctccctatgtgagat

SEQ ID NO: 373187 - DNA, 15 bp, Homo sapiens
tctccctatgtgaga

SEQ ID NO: 373188 - DNA, 15 bp, Homo sapiens
ttctccctatgtgag

SEQ ID NO: 373189 - DNA, 15 bp, Homo sapiens
tttctccctatgtga

SEQ ID NO: 373190 - DNA, 15 bp, Homo sapiens
atttctccctatgtg

SEQ ID NO: 373191 - DNA, 15 bp, Homo sapiens
gatttctccctatgt

SEQ ID NO: 373192 - DNA, 15 bp, Homo sapiens
ggatttctccctatg

SEQ ID NO: 373193 - DNA, 15 bp, Homo sapiens
aggatttctccctat

SEQ ID NO: 373194 - DNA, 15 bp, Homo sapiens
caggatttctcccta

SEQ ID NO: 373195 - DNA, 15 bp, Homo sapiens
tcaggatttctccct

SEQ ID NO: 373196 - DNA, 15 bp, Homo sapiens
ctcaggatttctccc

SEQ ID NO: 373197 - DNA, 15 bp, Homo sapiens
cctcaggatttctcc

SEQ ID NO: 373198 - DNA, 15 bp, Homo sapiens
acctcaggatttctc

SEQ ID NO: 373199 - DNA, 15 bp, Homo sapiens
cacctcaggatttct

SEQ ID NO: 373200 - DNA, 15 bp, Homo sapiens
ccacctcaggatttc

SEQ ID NO: 373201 - DNA, 15 bp, Homo sapiens
cccacctcaggattt

SEQ ID NO: 373202 - DNA, 15 bp, Homo sapiens
tcccacctcaggatt

SEQ ID NO: 373203 - DNA, 15 bp, Homo sapiens
atcccacctcaggat

SEQ ID NO: 373204 - DNA, 15 bp, Homo sapiens
catcccacctcagga

SEQ ID NO: 373205 - DNA, 15 bp, Homo sapiens
ccatcccacctcagg

SEQ ID NO: 373206 - DNA, 15 bp, Homo sapiens
gccatcccacctcag

SEQ ID NO: 373207 - DNA, 15 bp, Homo sapiens
agccatcccacctca

SEQ ID NO: 373208 - DNA, 15 bp, Homo sapiens
gagccatcccacctc

SEQ ID NO: 373209 - DNA, 15 bp, Homo sapiens
ggagccatcccacct

SEQ ID NO: 373210 - DNA, 15 bp, Homo sapiens
tggagccatcccacc

SEQ ID NO: 373211 - DNA, 15 bp, Homo sapiens
ctggagccatcccac

SEQ ID NO: 373212 - DNA, 15 bp, Homo sapiens
cctggagccatccca

SEQ ID NO: 373213 - DNA, 15 bp, Homo sapiens
gcctggagccatccc

SEQ ID NO: 373214 - DNA, 15 bp, Homo sapiens
agcctggagccatcc

SEQ ID NO: 373215 - DNA, 15 bp, Homo sapiens
agcagcctggagcca

SEQ ID NO: 373216 - DNA, 15 bp, Homo sapiens
aagcagcctggagcc

SEQ ID NO: 373217 - DNA, 15 bp, Homo sapiens
caagcagcctggagc

SEQ ID NO: 373218 - DNA, 15 bp, Homo sapiens
gcaagcagcctggag

SEQ ID NO: 373219 - DNA, 15 bp, Homo sapiens
ggcaagcagcctgga

SEQ ID NO: 373220 - DNA, 15 bp, Homo sapiens
gggcaagcagcctgg

SEQ ID NO: 373221 - DNA, 15 bp, Homo sapiens
ggggcaagcagcctg

SEQ ID NO: 373222 - DNA, 15 bp, Homo sapiens
tggggcaagcagcct

SEQ ID NO: 373223 - DNA, 15 bp, Homo sapiens
ctggggcaagcagcc

SEQ ID NO: 373224 - DNA, 15 bp, Homo sapiens
cctggggcaagcagc

SEQ ID NO: 373225 - DNA, 15 bp, Homo sapiens
tcctggggcaagcag

SEQ ID NO: 373226 - DNA, 15 bp, Homo sapiens
ttcctggggcaagca

SEQ ID NO: 373227 - DNA, 15 bp, Homo sapiens
gttcctggggcaagc

SEQ ID NO: 373228 - DNA, 15 bp, Homo sapiens
agttcctggggcaag

SEQ ID NO: 373229 - DNA, 15 bp, Homo sapiens
gagttcctggggcaa

SEQ ID NO: 373230 - DNA, 15 bp, Homo sapiens
ggagttcctggggca

SEQ ID NO: 373231 - DNA, 15 bp, Homo sapiens
tggagttcctggggc

SEQ ID NO: 373232 - DNA, 15 bp, Homo sapiens
ctggagttcctgggg

SEQ ID NO: 373233 - DNA, 15 bp, Homo sapiens
cctggagttcctggg

SEQ ID NO: 373234 - DNA, 15 bp, Homo sapiens
tcctggagttcctgg

SEQ ID NO: 373235 - DNA, 15 bp, Homo sapiens
gtcctggagttcctg

SEQ ID NO: 373236 - DNA, 15 bp, Homo sapiens
tgtcctggagttcct

SEQ ID NO: 373237 - DNA, 15 bp, Homo sapiens
ctgtcctggagttcc

SEQ ID NO: 373238 - DNA, 15 bp, Homo sapiens
gctgtcctggagttc

SEQ ID NO: 373239 - DNA, 15 bp, Homo sapiens
agctgtcctggagtt

SEQ ID NO: 373240 - DNA, 15 bp, Homo sapiens
gagctgtcctggagt

SEQ ID NO: 373241 - DNA, 15 bp, Homo sapiens
agagctgtcctggag

SEQ ID NO: 373242 - DNA, 15 bp, Homo sapiens
aagagctgtcctgga

SEQ ID NO: 373243 - DNA, 15 bp, Homo sapiens
gaagagctgtcctgg

SEQ ID NO: 373244 - DNA, 15 bp, Homo sapiens
ggaagagctgtcctg

SEQ ID NO: 373245 - DNA, 15 bp, Homo sapiens
aggaagagctgtcct

SEQ ID NO: 373246 - DNA, 15 bp, Homo sapiens
caggaagagctgtcc

SEQ ID NO: 373247 - DNA, 15 bp, Homo sapiens
acaggaagagctgtc

SEQ ID NO: 373248 - DNA, 15 bp, Homo sapiens
gacaggaagagctgt

SEQ ID NO: 373249 - DNA, 15 bp, Homo sapiens
tgacaggaagagctg

SEQ ID NO: 373250 - DNA, 15 bp, Homo sapiens
atgacaggaagagct

SEQ ID NO: 373251 - DNA, 15 bp, Homo sapiens
aatgacaggaagagc

SEQ ID NO: 373252 - DNA, 15 bp, Homo sapiens
gaatgacaggaagag

SEQ ID NO: 373253 - DNA, 15 bp, Homo sapiens
tgaatgacaggaaga

SEQ ID NO: 373254 - DNA, 15 bp, Homo sapiens
gtgaatgacaggaag

SEQ ID NO: 373255 - DNA, 15 bp, Homo sapiens
agtgaatgacaggaa

SEQ ID NO: 373256 - DNA, 15 bp, Homo sapiens
aagtgaatgacagga

SEQ ID NO: 373257 - DNA, 15 bp, Homo sapiens
caagtgaatgacagg

SEQ ID NO: 373258 - DNA, 15 bp, Homo sapiens
tcaagtgaatgacag

SEQ ID NO: 373259 - DNA, 15 bp, Homo sapiens
ctcaagtgaatgaca

SEQ ID NO: 373260 - DNA, 15 bp, Homo sapiens
gctcaagtgaatgac

SEQ ID NO: 373261 - DNA, 15 bp, Homo sapiens
ggctcaagtgaatga

SEQ ID NO: 373262 - DNA, 15 bp, Homo sapiens
tggctcaagtgaatg

SEQ ID NO: 373263 - DNA, 15 bp, Homo sapiens
ttggctcaagtgaat

SEQ ID NO: 373264 - DNA, 15 bp, Homo sapiens
attggctcaagtgaa

SEQ ID NO: 373265 - DNA, 15 bp, Homo sapiens
tattggctcaagtga

SEQ ID NO: 373266 - DNA, 15 bp, Homo sapiens
atattggctcaagtg

SEQ ID NO: 373267 - DNA, 15 bp, Homo sapiens
gatattggctcaagt

SEQ ID NO: 373268 - DNA, 15 bp, Homo sapiens
tgatattggctcaag

SEQ ID NO: 373269 - DNA, 15 bp, Homo sapiens
gtgatattggctcaa

SEQ ID NO: 373270 - DNA, 15 bp, Homo sapiens
agtgatattggctca

SEQ ID NO: 373271 - DNA, 15 bp, Homo sapiens
tagtgatattggctc

SEQ ID NO: 373272 - DNA, 15 bp, Homo sapiens
ttagtgatattggct

SEQ ID NO: 373273 - DNA, 15 bp, Homo sapiens
cttagtgatattggc

SEQ ID NO: 373274 - DNA, 15 bp, Homo sapiens
acttagtgatattgg

SEQ ID NO: 373275 - DNA, 15 bp, Homo sapiens
aacttagtgatattg

SEQ ID NO: 373276 - DNA, 15 bp, Homo sapiens
taacttagtgatatt

SEQ ID NO: 373277 - DNA, 15 bp, Homo sapiens
ctaacttagtgatat

SEQ ID NO: 373278 - DNA, 15 bp, Homo sapiens
actaacttagtgata

SEQ ID NO: 373279 - DNA, 15 bp, Homo sapiens
aactaacttagtgat

SEQ ID NO: 373280 - DNA, 15 bp, Homo sapiens
taactaacttagtga

SEQ ID NO: 373281 - DNA, 15 bp, Homo sapiens
ataactaacttagtg

SEQ ID NO: 373282 - DNA, 15 bp, Homo sapiens
cataactaacttagt

SEQ ID NO: 373283 - DNA, 15 bp, Homo sapiens
gcataactaacttag

SEQ ID NO: 373284 - DNA, 15 bp, Homo sapiens
ggcataactaactta

SEQ ID NO: 373285 - DNA, 15 bp, Homo sapiens
gggcataactaactt

SEQ ID NO: 373286 - DNA, 15 bp, Homo sapiens
agggcataactaact

SEQ ID NO: 373287 - DNA, 15 bp, Homo sapiens
gagggcataactaac

SEQ ID NO: 373288 - DNA, 15 bp, Homo sapiens
tgagggcataactaa

SEQ ID NO: 373289 - DNA, 15 bp, Homo sapiens
ctgagggcataacta

SEQ ID NO: 373290 - DNA, 15 bp, Homo sapiens
gctgagggcataact

SEQ ID NO: 373291 - DNA, 15 bp, Homo sapiens
agctgagggcataac

SEQ ID NO: 373292 - DNA, 15 bp, Homo sapiens
cagctgagggcataa

SEQ ID NO: 373293 - DNA, 15 bp, Homo sapiens
ccagctgagggcata

SEQ ID NO: 373294 - DNA, 15 bp, Homo sapiens
accagctgagggcat

SEQ ID NO: 373295 - DNA, 15 bp, Homo sapiens
caccagctgagggca

SEQ ID NO: 373296 - DNA, 15 bp, Homo sapiens
gcaccagctgagggc

SEQ ID NO: 373297 - DNA, 15 bp, Homo sapiens
ggcaccagctgaggg

SEQ ID NO: 373298 - DNA, 15 bp, Homo sapiens
aggcaccagctgagg

SEQ ID NO: 373299 - DNA, 15 bp, Homo sapiens
gaggcaccagctgag

SEQ ID NO: 373300 - DNA, 15 bp, Homo sapiens
tgaggcaccagctga

SEQ ID NO: 373301 - DNA, 15 bp, Homo sapiens
ctgaggcaccagctg

SEQ ID NO: 373302 - DNA, 15 bp, Homo sapiens
actgaggcaccagct

SEQ ID NO: 373303 - DNA, 15 bp, Homo sapiens
aactgaggcaccagc

SEQ ID NO: 373304 - DNA, 15 bp, Homo sapiens
gaactgaggcaccag

SEQ ID NO: 373305 - DNA, 15 bp, Homo sapiens
ggaactgaggcacca

SEQ ID NO: 373306 - DNA, 15 bp, Homo sapiens
aggaactgaggcacc

SEQ ID NO: 373307 - DNA, 15 bp, Homo sapiens
caggaactgaggcac

SEQ ID NO: 373308 - DNA, 15 bp, Homo sapiens
ccaggaactgaggca

SEQ ID NO: 373309 - DNA, 15 bp, Homo sapiens
gccaggaactgaggc

SEQ ID NO: 373310 - DNA, 15 bp, Homo sapiens
tgccaggaactgagg

SEQ ID NO: 373311 - DNA, 15 bp, Homo sapiens
gtgccaggaactgag

SEQ ID NO: 373312 - DNA, 15 bp, Homo sapiens
agtgccaggaactga

SEQ ID NO: 373313 - DNA, 15 bp, Homo sapiens
tagtgccaggaactg

SEQ ID NO: 373314 - DNA, 15 bp, Homo sapiens
gtagtgccaggaact

SEQ ID NO: 373315 - DNA, 15 bp, Homo sapiens
tgtagtgccaggaac

SEQ ID NO: 373316 - DNA, 15 bp, Homo sapiens
ctgtagtgccaggaa

SEQ ID NO: 373317 - DNA, 15 bp, Homo sapiens
cctgtagtgccagga

SEQ ID NO: 373318 - DNA, 15 bp, Homo sapiens
gcctgtagtgccagg

SEQ ID NO: 373319 - DNA, 15 bp, Homo sapiens
tgcctgtagtgccag

SEQ ID NO: 373320 - DNA, 15 bp, Homo sapiens
gtgcctgtagtgcca

SEQ ID NO: 373321 - DNA, 15 bp, Homo sapiens
tgtgcctgtagtgcc

SEQ ID NO: 373322 - DNA, 15 bp, Homo sapiens
atgtgcctgtagtgc

SEQ ID NO: 373323 - DNA, 15 bp, Homo sapiens
tatgtgcctgtagtg

SEQ ID NO: 373324 - DNA, 15 bp, Homo sapiens
ttatgtgcctgtagt

SEQ ID NO: 373325 - DNA, 15 bp, Homo sapiens
tttatgtgcctgtag

SEQ ID NO: 373326 - DNA, 15 bp, Homo sapiens
ttttatgtgcctgta

SEQ ID NO: 373327 - DNA, 15 bp, Homo sapiens
gttttatgtgcctgt

SEQ ID NO: 373328 - DNA, 15 bp, Homo sapiens
ggttttatgtgcctg

SEQ ID NO: 373329 - DNA, 15 bp, Homo sapiens
cggttttatgtgcct

SEQ ID NO: 373330 - DNA, 15 bp, Homo sapiens
acggttttatgtgcc

SEQ ID NO: 373331 - DNA, 15 bp, Homo sapiens
cacggttttatgtgc

SEQ ID NO: 373332 - DNA, 15 bp, Homo sapiens
gcacggttttatgtg

SEQ ID NO: 373333 - DNA, 15 bp, Homo sapiens
agcacggttttatgt

SEQ ID NO: 373334 - DNA, 15 bp, Homo sapiens
gagcacggttttatg

SEQ ID NO: 373335 - DNA, 15 bp, Homo sapiens
tgagcacggttttat

SEQ ID NO: 373336 - DNA, 15 bp, Homo sapiens
ctgagcacggtttta

SEQ ID NO: 373337 - DNA, 15 bp, Homo sapiens
actgagcacggtttt

SEQ ID NO: 373338 - DNA, 15 bp, Homo sapiens
tactgagcacggttt

SEQ ID NO: 373339 - DNA, 15 bp, Homo sapiens
ttactgagcacggtt

SEQ ID NO: 373340 - DNA, 15 bp, Homo sapiens
tttactgagcacggt

SEQ ID NO: 373341 - DNA, 15 bp, Homo sapiens
atttactgagcacgg

SEQ ID NO: 373342 - DNA, 15 bp, Homo sapiens
aatttactgagcacg

SEQ ID NO: 373343 - DNA, 15 bp, Homo sapiens
taatttactgagcac

SEQ ID NO: 373344 - DNA, 15 bp, Homo sapiens
ttaatttactgagca

SEQ ID NO: 373345 - DNA, 15 bp, Homo sapiens
tttaatttactgagc

SEQ ID NO: 373346 - DNA, 15 bp, Homo sapiens
gacactgacggcaaa

SEQ ID NO: 373347 - DNA, 15 bp, Homo sapiens
ggacactgacggcaa

SEQ ID NO: 373348 - DNA, 15 bp, Homo sapiens
aggacactgacggca

SEQ ID NO: 373349 - DNA, 15 bp, Homo sapiens
caggacactgacggc

SEQ ID NO: 373350 - DNA, 15 bp, Homo sapiens
ccaggacactgacgg

SEQ ID NO: 373351 - DNA, 15 bp, Homo sapiens
tccaggacactgacg

SEQ ID NO: 373352 - DNA, 15 bp, Homo sapiens
gtccaggacactgac

SEQ ID NO: 373353 - DNA, 15 bp, Homo sapiens
agtccaggacactga

SEQ ID NO: 373354 - DNA, 15 bp, Homo sapiens
gagtccaggacactg

SEQ ID NO: 373355 - DNA, 15 bp, Homo sapiens
tgagtccaggacact

SEQ ID NO: 373356 - DNA, 15 bp, Homo sapiens
gtgagtccaggacac

SEQ ID NO: 373357 - DNA, 15 bp, Homo sapiens
agtgagtccaggaca

SEQ ID NO: 373358 - DNA, 15 bp, Homo sapiens
gagtgagtccaggac

SEQ ID NO: 373359 - DNA, 15 bp, Homo sapiens
tgagtgagtccagga

SEQ ID NO: 373360 - DNA, 15 bp, Homo sapiens
atgagtgagtccagg

SEQ ID NO: 373361 - DNA, 15 bp, Homo sapiens
catgagtgagtccag

SEQ ID NO: 373362 - DNA, 15 bp, Homo sapiens
tcatgagtgagtcca

SEQ ID NO: 373363 - DNA, 15 bp, Homo sapiens
ctcatgagtgagtcc

SEQ ID NO: 373364 - DNA, 15 bp, Homo sapiens
gctcatgagtgagtc

SEQ ID NO: 373365 - DNA, 15 bp, Homo sapiens
cgctcatgagtgagt

SEQ ID NO: 373366 - DNA, 15 bp, Homo sapiens
gcgctcatgagtgag

SEQ ID NO: 373367 - DNA, 15 bp, Homo sapiens
cgcgctcatgagtga

SEQ ID NO: 373368 - DNA, 15 bp, Homo sapiens
ccgcgctcatgagtg

SEQ ID NO: 373369 - DNA, 15 bp, Homo sapiens
accgcgctcatgagt

SEQ ID NO: 373370 - DNA, 15 bp, Homo sapiens
caccgcgctcatgag

SEQ ID NO: 373371 - DNA, 15 bp, Homo sapiens
tcaccgcgctcatga

SEQ ID NO: 373372 - DNA, 15 bp, Homo sapiens
ctcaccgcgctcatg

SEQ ID NO: 373373 - DNA, 15 bp, Homo sapiens
actcaccgcgctcat

SEQ ID NO: 373374 - DNA, 15 bp, Homo sapiens
aactcaccgcgctca

SEQ ID NO: 373375 - DNA, 15 bp, Homo sapiens
taactcaccgcgctc

SEQ ID NO: 373376 - DNA, 15 bp, Homo sapiens
ataactcaccgcgct

SEQ ID NO: 373377 - DNA, 15 bp, Homo sapiens
gataactcaccgcgc

SEQ ID NO: 373378 - DNA, 15 bp, Homo sapiens
ggataactcaccgcg

SEQ ID NO: 373379 - DNA, 15 bp, Homo sapiens
aggataactcaccgc

SEQ ID NO: 373380 - DNA, 15 bp, Homo sapiens
caggataactcaccg

SEQ ID NO: 373381 - DNA, 15 bp, Homo sapiens
acaggataactcacc

SEQ ID NO: 373382 - DNA, 15 bp, Homo sapiens
aacaggataactcac

SEQ ID NO: 373383 - DNA, 15 bp, Homo sapiens
gaacaggataactca

SEQ ID NO: 373384 - DNA, 15 bp, Homo sapiens
ggaacaggataactc

SEQ ID NO: 373385 - DNA, 15 bp, Homo sapiens
gggaacaggataact

SEQ ID NO: 373386 - DNA, 15 bp, Homo sapiens
agggaacaggataac

SEQ ID NO: 373387 - DNA, 15 bp, Homo sapiens
gagggaacaggataa

SEQ ID NO: 373388 - DNA, 15 bp, Homo sapiens
ggagggaacaggata

SEQ ID NO: 373389 - DNA, 15 bp, Homo sapiens
aggagggaacaggat

SEQ ID NO: 373390 - DNA, 15 bp, Homo sapiens
gaggagggaacagga

SEQ ID NO: 373391 - DNA, 15 bp, Homo sapiens
ggaggagggaacagg

SEQ ID NO: 373392 - DNA, 15 bp, Homo sapiens
aggaggagggaacag

SEQ ID NO: 373393 - DNA, 15 bp, Homo sapiens
gaggaggagggaaca

SEQ ID NO: 373394 - DNA, 15 bp, Homo sapiens
tgaggaggagggaac

SEQ ID NO: 373395 - DNA, 15 bp, Homo sapiens
gtgaggaggagggaa

SEQ ID NO: 373396 - DNA, 15 bp, Homo sapiens
agtgaggaggaggga

SEQ ID NO: 373397 - DNA, 15 bp, Homo sapiens
gagtgaggaggaggg

SEQ ID NO: 373398 - DNA, 15 bp, Homo sapiens
tgagtgaggaggagg

SEQ ID NO: 373399 - DNA, 15 bp, Homo sapiens
ttgagtgaggaggag

SEQ ID NO: 373400 - DNA, 15 bp, Homo sapiens
cttgagtgaggagga

SEQ ID NO: 373401 - DNA, 15 bp, Homo sapiens
ccttgagtgaggagg

SEQ ID NO: 373402 - DNA, 15 bp, Homo sapiens
cccttgagtgaggag

SEQ ID NO: 373403 - DNA, 15 bp, Homo sapiens
acccttgagtgagga

SEQ ID NO: 373404 - DNA, 15 bp, Homo sapiens
cacccttgagtgagg

SEQ ID NO: 373405 - DNA, 15 bp, Homo sapiens
ccacccttgagtgag

SEQ ID NO: 373406 - DNA, 15 bp, Homo sapiens
tccacccttgagtga

SEQ ID NO: 373407 - DNA, 15 bp, Homo sapiens
ctccacccttgagtg

SEQ ID NO: 373408 - DNA, 15 bp, Homo sapiens
cctccacccttgagt

SEQ ID NO: 373409 - DNA, 15 bp, Homo sapiens
tcctccacccttgag

SEQ ID NO: 373410 - DNA, 15 bp, Homo sapiens
atcctccacccttga

SEQ ID NO: 373411 - DNA, 15 bp, Homo sapiens
catcctccacccttg

SEQ ID NO: 373412 - DNA, 15 bp, Homo sapiens
acatcctccaccctt

SEQ ID NO: 373413 - DNA, 15 bp, Homo sapiens
cacatcctccaccct

SEQ ID NO: 373414 - DNA, 15 bp, Homo sapiens
gcacatcctccaccc

SEQ ID NO: 373415 - DNA, 15 bp, Homo sapiens
ggcacatcctccacc

SEQ ID NO: 373416 - DNA, 15 bp, Homo sapiens
tggcacatcctccac

SEQ ID NO: 373417 - DNA, 15 bp, Homo sapiens
ttggcacatcctcca

SEQ ID NO: 373418 - DNA, 15 bp, Homo sapiens
attggcacatcctcc

SEQ ID NO: 373419 - DNA, 15 bp, Homo sapiens
tattggcacatcctc

SEQ ID NO: 373420 - DNA, 15 bp, Homo sapiens
ctattggcacatcct

SEQ ID NO: 373421 - DNA, 15 bp, Homo sapiens
tctattggcacatcc

SEQ ID NO: 373422 - DNA, 15 bp, Homo sapiens
ctctattggcacatc

SEQ ID NO: 373423 - DNA, 15 bp, Homo sapiens
gctctattggcacat

SEQ ID NO: 373424 - DNA, 15 bp, Homo sapiens
tgctctattggcaca

SEQ ID NO: 373425 - DNA, 15 bp, Homo sapiens
gtgctctattggcac

SEQ ID NO: 373426 - DNA, 15 bp, Homo sapiens
ggtgctctattggca

SEQ ID NO: 373427 - DNA, 15 bp, Homo sapiens
aggtgctctattggc

SEQ ID NO: 373428 - DNA, 15 bp, Homo sapiens
gaggtgctctattgg

SEQ ID NO: 373429 - DNA, 15 bp, Homo sapiens
ggaggtgctctattg

SEQ ID NO: 373430 - DNA, 15 bp, Homo sapiens
tggaggtgctctatt

SEQ ID NO: 373431 - DNA, 15 bp, Homo sapiens
ttggaggtgctctat

SEQ ID NO: 373432 - DNA, 15 bp, Homo sapiens
gttggaggtgctcta

SEQ ID NO: 373433 - DNA, 15 bp, Homo sapiens
ggttggaggtgctct

SEQ ID NO: 373434 - DNA, 15 bp, Homo sapiens
aggttggaggtgctc

SEQ ID NO: 373435 - DNA, 15 bp, Homo sapiens
aaggttggaggtgct

SEQ ID NO: 373436 - DNA, 15 bp, Homo sapiens
aaaggttggaggtgc

SEQ ID NO: 373437 - DNA, 15 bp, Homo sapiens
caaaggttggaggtg

SEQ ID NO: 373438 - DNA, 15 bp, Homo sapiens
tcaaaggttggaggt

SEQ ID NO: 373439 - DNA, 15 bp, Homo sapiens
ctcaaaggttggagg

SEQ ID NO: 373440 - DNA, 15 bp, Homo sapiens
cctcaaaggttggag

SEQ ID NO: 373441 - DNA, 15 bp, Homo sapiens
gcctcaaaggttgga

SEQ ID NO: 373442 - DNA, 15 bp, Homo sapiens
ggcctcaaaggttgg

SEQ ID NO: 373443 - DNA, 15 bp, Homo sapiens
gggcctcaaaggttg

SEQ ID NO: 373444 - DNA, 15 bp, Homo sapiens
agggcctcaaaggtt

SEQ ID NO: 373445 - DNA, 15 bp, Homo sapiens
cagggcctcaaaggt

SEQ ID NO: 373446 - DNA, 15 bp, Homo sapiens
ccagggcctcaaagg

SEQ ID NO: 373447 - DNA, 15 bp, Homo sapiens
cccagggcctcaaag

SEQ ID NO: 373448 - DNA, 15 bp, Homo sapiens
gcccagggcctcaaa

SEQ ID NO: 373449 - DNA, 15 bp, Homo sapiens
agcccagggcctcaa

SEQ ID NO: 373450 - DNA, 15 bp, Homo sapiens
cagcccagggcctca

SEQ ID NO: 373451 - DNA, 15 bp, Homo sapiens
gcagcccagggcctc

SEQ ID NO: 373452 - DNA, 15 bp, Homo sapiens
tgcagcccagggcct

SEQ ID NO: 373453 - DNA, 15 bp, Homo sapiens
gtgcagcccagggcc

SEQ ID NO: 373454 - DNA, 15 bp, Homo sapiens
agtgcagcccagggc

SEQ ID NO: 373455 - DNA, 15 bp, Homo sapiens
cagtgcagcccaggg

SEQ ID NO: 373456 - DNA, 15 bp, Homo sapiens
ccagtgcagcccagg

SEQ ID NO: 373457 - DNA, 15 bp, Homo sapiens
cccagtgcagcccag

SEQ ID NO: 373458 - DNA, 15 bp, Homo sapiens
ccccagtgcagccca

SEQ ID NO: 373459 - DNA, 15 bp, Homo sapiens
gccccagtgcagccc

SEQ ID NO: 373460 - DNA, 15 bp, Homo sapiens
ggccccagtgcagcc

SEQ ID NO: 373461 - DNA, 15 bp, Homo sapiens
tggccccagtgcagc

SEQ ID NO: 373462 - DNA, 15 bp, Homo sapiens
gtggccccagtgcag

SEQ ID NO: 373463 - DNA, 15 bp, Homo sapiens
tgtggccccagtgca

SEQ ID NO: 373464 - DNA, 15 bp, Homo sapiens
ctgtggccccagtgc

SEQ ID NO: 373465 - DNA, 15 bp, Homo sapiens
actgtggccccagtg

SEQ ID NO: 373466 - DNA, 15 bp, Homo sapiens
cactgtggccccagt

SEQ ID NO: 373467 - DNA, 15 bp, Homo sapiens
ccactgtggccccag

SEQ ID NO: 373468 - DNA, 15 bp, Homo sapiens
tccactgtggcccca

SEQ ID NO: 373469 - DNA, 15 bp, Homo sapiens
ctccactgtggcccc

SEQ ID NO: 373470 - DNA, 15 bp, Homo sapiens
tctccactgtggccc

SEQ ID NO: 373471 - DNA, 15 bp, Homo sapiens
ctctccactgtggcc

SEQ ID NO: 373472 - DNA, 15 bp, Homo sapiens
gctctccactgtggc

SEQ ID NO: 373473 - DNA, 15 bp, Homo sapiens
tgctctccactgtgg

SEQ ID NO: 373474 - DNA, 15 bp, Homo sapiens
ttgctctccactgtg

SEQ ID NO: 373475 - DNA, 15 bp, Homo sapiens
cttgctctccactgt

SEQ ID NO: 373476 - DNA, 15 bp, Homo sapiens
tcttgctctccactg

SEQ ID NO: 373477 - DNA, 15 bp, Homo sapiens
gtcttgctctccact

SEQ ID NO: 373478 - DNA, 15 bp, Homo sapiens
agtcttgctctccac

SEQ ID NO: 373479 - DNA, 15 bp, Homo sapiens
gagtcttgctctcca

SEQ ID NO: 373480 - DNA, 15 bp, Homo sapiens
ggagtcttgctctcc

SEQ ID NO: 373481 - DNA, 15 bp, Homo sapiens
aggagtcttgctctc

SEQ ID NO: 373482 - DNA, 15 bp, Homo sapiens
taggagtcttgctct

SEQ ID NO: 373483 - DNA, 15 bp, Homo sapiens
ctaggagtcttgctc

SEQ ID NO: 373484 - DNA, 15 bp, Homo sapiens
tctaggagtcttgct

SEQ ID NO: 373485 - DNA, 15 bp, Homo sapiens
ttctaggagtcttgc

SEQ ID NO: 373486 - DNA, 15 bp, Homo sapiens
cttctaggagtcttg

SEQ ID NO: 373487 - DNA, 15 bp, Homo sapiens
gcttctaggagtctt

SEQ ID NO: 373488 - DNA, 15 bp, Homo sapiens
agcttctaggagtct

SEQ ID NO: 373489 - DNA, 15 bp, Homo sapiens
gagcttctaggagtc

SEQ ID NO: 373490 - DNA, 15 bp, Homo sapiens
tgagcttctaggagt

SEQ ID NO: 373491 - DNA, 15 bp, Homo sapiens
gtgagcttctaggag

SEQ ID NO: 373492 - DNA, 15 bp, Homo sapiens
tgtgagcttctagga

SEQ ID NO: 373493 - DNA, 15 bp, Homo sapiens
gtgtgagcttctagg

SEQ ID NO: 373494 - DNA, 15 bp, Homo sapiens
ggtgtgagcttctag

SEQ ID NO: 373495 - DNA, 15 bp, Homo sapiens
aggtgtgagcttcta

SEQ ID NO: 373496 - DNA, 15 bp, Homo sapiens
aaggtgtgagcttct

SEQ ID NO: 373497 - DNA, 15 bp, Homo sapiens
taaggtgtgagcttc

SEQ ID NO: 373498 - DNA, 15 bp, Homo sapiens
ctaaggtgtgagctt

SEQ ID NO: 373499 - DNA, 15 bp, Homo sapiens
tctaaggtgtgagct

SEQ ID NO: 373500 - DNA, 15 bp, Homo sapiens
ttctaaggtgtgagc

SEQ ID NO: 373501 - DNA, 15 bp, Homo sapiens
cttctaaggtgtgag

SEQ ID NO: 373502 - DNA, 15 bp, Homo sapiens
ccttctaaggtgtga

SEQ ID NO: 373503 - DNA, 15 bp, Homo sapiens
cccttctaaggtgtg

SEQ ID NO: 373504 - DNA, 15 bp, Homo sapiens
ccccttctaaggtgt

SEQ ID NO: 373505 - DNA, 15 bp, Homo sapiens
tccccttctaaggtg

SEQ ID NO: 373506 - DNA, 15 bp, Homo sapiens
ctccccttctaaggt

SEQ ID NO: 373507 - DNA, 15 bp, Homo sapiens
tctccccttctaagg

SEQ ID NO: 373508 - DNA, 15 bp, Homo sapiens
gtctccccttctaag

SEQ ID NO: 373509 - DNA, 15 bp, Homo sapiens
ggtctccccttctaa

SEQ ID NO: 373510 - DNA, 15 bp, Homo sapiens
gggtctccccttcta

SEQ ID NO: 373511 - DNA, 15 bp, Homo sapiens
tgggtctccccttct

SEQ ID NO: 373512 - DNA, 15 bp, Homo sapiens
gtgggtctccccttc

SEQ ID NO: 373513 - DNA, 15 bp, Homo sapiens
tgtgggtctcccctt

SEQ ID NO: 373514 - DNA, 15 bp, Homo sapiens
atgtgggtctcccct

SEQ ID NO: 373515 - DNA, 15 bp, Homo sapiens
aatgtgggtctcccc

SEQ ID NO: 373516 - DNA, 15 bp, Homo sapiens
taatgtgggtctccc

SEQ ID NO: 373517 - DNA, 15 bp, Homo sapiens
ataatgtgggtctcc

SEQ ID NO: 373518 - DNA, 15 bp, Homo sapiens
tataatgtgggtctc

SEQ ID NO: 373519 - DNA, 15 bp, Homo sapiens
ttataatgtgggtct

SEQ ID NO: 373520 - DNA, 15 bp, Homo sapiens
tttataatgtgggtc

SEQ ID NO: 373521 - DNA, 15 bp, Homo sapiens
ttttataatgtgggt

SEQ ID NO: 373522 - DNA, 15 bp, Homo sapiens
gttttataatgtggg

SEQ ID NO: 373523 - DNA, 15 bp, Homo sapiens
ggttttataatgtgg

SEQ ID NO: 373524 - DNA, 15 bp, Homo sapiens
tggttttataatgtg

SEQ ID NO: 373525 - DNA, 15 bp, Homo sapiens
atggttttataatgt

SEQ ID NO: 373526 - DNA, 15 bp, Homo sapiens
gatggttttataatg

SEQ ID NO: 373527 - DNA, 15 bp, Homo sapiens
tgatggttttataat

SEQ ID NO: 373528 - DNA, 15 bp, Homo sapiens
gtgatggttttataa

SEQ ID NO: 373529 - DNA, 15 bp, Homo sapiens
tgtgatggttttata

SEQ ID NO: 373530 - DNA, 15 bp, Homo sapiens
gtgtgatggttttat

SEQ ID NO: 373531 - DNA, 15 bp, Homo sapiens
tgtgtgatggtttta

SEQ ID NO: 373532 - DNA, 15 bp, Homo sapiens
ttgtgtgatggtttt

SEQ ID NO: 373533 - DNA, 15 bp, Homo sapiens
cttgtgtgatggttt

SEQ ID NO: 373534 - DNA, 15 bp, Homo sapiens
acttgtgtgatggtt

SEQ ID NO: 373535 - DNA, 15 bp, Homo sapiens
tacttgtgtgatggt

SEQ ID NO: 373536 - DNA, 15 bp, Homo sapiens
ttacttgtgtgatgg

SEQ ID NO: 373537 - DNA, 15 bp, Homo sapiens
tttacttgtgtgatg

SEQ ID NO: 373538 - DNA, 15 bp, Homo sapiens
atttacttgtgtgat

SEQ ID NO: 373539 - DNA, 15 bp, Homo sapiens
catttacttgtgtga

SEQ ID NO: 373540 - DNA, 15 bp, Homo sapiens
acatttacttgtgtg

SEQ ID NO: 373541 - DNA, 15 bp, Homo sapiens
aacatttacttgtgt

SEQ ID NO: 373542 - DNA, 15 bp, Homo sapiens
aaacatttacttgtg

SEQ ID NO: 373543 - DNA, 15 bp, Homo sapiens
caaacatttacttgt

SEQ ID NO: 373544 - DNA, 15 bp, Homo sapiens
tcaaacatttacttg

SEQ ID NO: 373545 - DNA, 15 bp, Homo sapiens
atcaaacatttactt

SEQ ID NO: 373546 - DNA, 15 bp, Homo sapiens
aatcaaacatttact

SEQ ID NO: 373547 - DNA, 15 bp, Homo sapiens
taatcaaacatttac

SEQ ID NO: 373548 - DNA, 15 bp, Homo sapiens
ataatcaaacattta

SEQ ID NO: 373549 - DNA, 15 bp, Homo sapiens
tataatcaaacattt

SEQ ID NO: 373550 - DNA, 15 bp, Homo sapiens
ttataatcaaacatt

SEQ ID NO: 373551 - DNA, 15 bp, Homo sapiens
tttataatcaaacat

SEQ ID NO: 373552 - DNA, 15 bp, Homo sapiens
atttataatcaaaca

SEQ ID NO: 373553 - DNA, 15 bp, Homo sapiens
aatttataatcaaac

SEQ ID NO: 373554 - DNA, 15 bp, Homo sapiens
gaatttataatcaaa

SEQ ID NO: 373555 - DNA, 15 bp, Homo sapiens
ggaatttataatcaa

SEQ ID NO: 373556 - DNA, 15 bp, Homo sapiens
aggaatttataatca

SEQ ID NO: 373557 - DNA, 15 bp, Homo sapiens
gaggaatttataatc

SEQ ID NO: 373558 - DNA, 15 bp, Homo sapiens
tgaggaatttataat

SEQ ID NO: 373559 - DNA, 15 bp, Homo sapiens
acttgaggaatttat

SEQ ID NO: 373560 - DNA, 15 bp, Homo sapiens
cacttgaggaattta

SEQ ID NO: 373561 - DNA, 15 bp, Homo sapiens
gcacttgaggaattt

SEQ ID NO: 373562 - DNA, 15 bp, Homo sapiens
tgcacttgaggaatt

SEQ ID NO: 373563 - DNA, 15 bp, Homo sapiens
ttgcacttgaggaat

SEQ ID NO: 373564 - DNA, 15 bp, Homo sapiens
cttgcacttgaggaa

SEQ ID NO: 373565 - DNA, 15 bp, Homo sapiens
ccttgcacttgagga

SEQ ID NO: 373566 - DNA, 15 bp, Homo sapiens
tccttgcacttgagg

SEQ ID NO: 373567 - DNA, 15 bp, Homo sapiens
ttccttgcacttgag

SEQ ID NO: 373568 - DNA, 15 bp, Homo sapiens
cttccttgcacttga

SEQ ID NO: 373569 - DNA, 15 bp, Homo sapiens
ccttccttgcacttg

SEQ ID NO: 373570 - DNA, 15 bp, Homo sapiens
gccttccttgcactt

SEQ ID NO: 373571 - DNA, 15 bp, Homo sapiens
tgccttccttgcact

SEQ ID NO: 373572 - DNA, 15 bp, Homo sapiens
ttgccttccttgcac

SEQ ID NO: 373573 - DNA, 15 bp, Homo sapiens
cttgccttccttgca

SEQ ID NO: 373574 - DNA, 15 bp, Homo sapiens
ccttgccttccttgc

SEQ ID NO: 373575 - DNA, 15 bp, Homo sapiens
gccttgccttccttg

SEQ ID NO: 373576 - DNA, 15 bp, Homo sapiens
tgccttgccttcctt

SEQ ID NO: 373577 - DNA, 15 bp, Homo sapiens
ctgccttgccttcct

SEQ ID NO: 373578 - DNA, 15 bp, Homo sapiens
cctgccttgccttcc

SEQ ID NO: 373579 - DNA, 15 bp, Homo sapiens
gcctgccttgccttc

SEQ ID NO: 373580 - DNA, 15 bp, Homo sapiens
agcctgccttgcctt

SEQ ID NO: 373581 - DNA, 15 bp, Homo sapiens
tagcctgccttgcct

SEQ ID NO: 373582 - DNA, 15 bp, Homo sapiens
ctagcctgccttgcc

SEQ ID NO: 373583 - DNA, 15 bp, Homo sapiens
tctagcctgccttgc

SEQ ID NO: 373584 - DNA, 15 bp, Homo sapiens
ttctagcctgccttg

SEQ ID NO: 373585 - DNA, 15 bp, Homo sapiens
cttctagcctgcctt

SEQ ID NO: 373586 - DNA, 15 bp, Homo sapiens
ccttctagcctgcct

SEQ ID NO: 373587 - DNA, 15 bp, Homo sapiens
tccttctagcctgcc

SEQ ID NO: 373588 - DNA, 15 bp, Homo sapiens
ttccttctagcctgc

SEQ ID NO: 373589 - DNA, 15 bp, Homo sapiens
tttccttctagcctg

SEQ ID NO: 373590 - DNA, 15 bp, Homo sapiens
atttccttctagcct

SEQ ID NO: 373591 - DNA, 15 bp, Homo sapiens
tatttccttctagcc

SEQ ID NO: 373592 - DNA, 15 bp, Homo sapiens
atatttccttctagc

SEQ ID NO: 373593 - DNA, 15 bp, Homo sapiens
tatatttccttctag

SEQ ID NO: 373594 - DNA, 15 bp, Homo sapiens
ctatatttccttcta

SEQ ID NO: 373595 - DNA, 15 bp, Homo sapiens
cctatatttccttct

SEQ ID NO: 373596 - DNA, 15 bp, Homo sapiens
acctatatttccttc

SEQ ID NO: 373597 - DNA, 15 bp, Homo sapiens
cacctatatttcctt

SEQ ID NO: 373598 - DNA, 15 bp, Homo sapiens
tcacctatatttcct

SEQ ID NO: 373599 - DNA, 15 bp, Homo sapiens
ctcacctatatttcc

SEQ ID NO: 373600 - DNA, 15 bp, Homo sapiens
cctcacctatatttc

SEQ ID NO: 373601 - DNA, 15 bp, Homo sapiens
ccctcacctatattt

SEQ ID NO: 373602 - DNA, 15 bp, Homo sapiens
gccctcacctatatt

SEQ ID NO: 373603 - DNA, 15 bp, Homo sapiens
agccctcacctatat

SEQ ID NO: 373604 - DNA, 15 bp, Homo sapiens
aagccctcacctata

SEQ ID NO: 373605 - DNA, 15 bp, Homo sapiens
caagccctcacctat

SEQ ID NO: 373606 - DNA, 15 bp, Homo sapiens
tcaagccctcaccta

SEQ ID NO: 373607 - DNA, 15 bp, Homo sapiens
gtcaagccctcacct

SEQ ID NO: 373608 - DNA, 15 bp, Homo sapiens
ggtcaagccctcacc

SEQ ID NO: 373609 - DNA, 15 bp, Homo sapiens
aggtcaagccctcac

SEQ ID NO: 373610 - DNA, 15 bp, Homo sapiens
caggtcaagccctca

SEQ ID NO: 373611 - DNA, 15 bp, Homo sapiens
ccaggtcaagccctc

SEQ ID NO: 373612 - DNA, 15 bp, Homo sapiens
accaggtcaagccct

SEQ ID NO: 373613 - DNA, 15 bp, Homo sapiens
aaccaggtcaagccc

SEQ ID NO: 373614 - DNA, 15 bp, Homo sapiens
aaaccaggtcaagcc

SEQ ID NO: 373615 - DNA, 15 bp, Homo sapiens
aaaaccaggtcaagc

SEQ ID NO: 373616 - DNA, 15 bp, Homo sapiens
caaaaccaggtcaag

SEQ ID NO: 373617 - DNA, 15 bp, Homo sapiens
ccaaaaccaggtcaa

SEQ ID NO: 373618 - DNA, 15 bp, Homo sapiens
cccaaaaccaggtca

SEQ ID NO: 373619 - DNA, 15 bp, Homo sapiens
ccccaaaaccaggtc

SEQ ID NO: 373620 - DNA, 15 bp, Homo sapiens
tccccaaaaccaggt

SEQ ID NO: 373621 - DNA, 15 bp, Homo sapiens
atccccaaaaccagg

SEQ ID NO: 373622 - DNA, 15 bp, Homo sapiens
gatccccaaaaccag

SEQ ID NO: 373623 - DNA, 15 bp, Homo sapiens
ggatccccaaaacca

SEQ ID NO: 373624 - DNA, 15 bp, Homo sapiens
gggatccccaaaacc

SEQ ID NO: 373625 - DNA, 15 bp, Homo sapiens
tgggatccccaaaac

SEQ ID NO: 373626 - DNA, 15 bp, Homo sapiens
ctgggatccccaaaa

SEQ ID NO: 373627 - DNA, 15 bp, Homo sapiens
tctgggatccccaaa

SEQ ID NO: 373628 - DNA, 15 bp, Homo sapiens
ttctgggatccccaa

SEQ ID NO: 373629 - DNA, 15 bp, Homo sapiens
tttctgggatcccca

SEQ ID NO: 373630 - DNA, 15 bp, Homo sapiens
ttttctgggatcccc

SEQ ID NO: 373631 - DNA, 15 bp, Homo sapiens
tttttctgggatccc

SEQ ID NO: 373632 - DNA, 15 bp, Homo sapiens
atttttctgggatcc

SEQ ID NO: 373633 - DNA, 15 bp, Homo sapiens
aatttttctgggatc

SEQ ID NO: 373634 - DNA, 15 bp, Homo sapiens
gaatttttctgggat

SEQ ID NO: 373635 - DNA, 15 bp, Homo sapiens
ggaatttttctggga

SEQ ID NO: 373636 - DNA, 15 bp, Homo sapiens
gggaatttttctggg

SEQ ID NO: 373637 - DNA, 15 bp, Homo sapiens
ggggaatttttctgg

SEQ ID NO: 373638 - DNA, 15 bp, Homo sapiens
tggggaatttttctg

SEQ ID NO: 373639 - DNA, 15 bp, Homo sapiens
ttggggaatttttct

SEQ ID NO: 373640 - DNA, 15 bp, Homo sapiens
cttggggaatttttc

SEQ ID NO: 373641 - DNA, 15 bp, Homo sapiens
ccttggggaattttt

SEQ ID NO: 373642 - DNA, 15 bp, Homo sapiens
cccttggggaatttt

SEQ ID NO: 373643 - DNA, 15 bp, Homo sapiens
tcccttggggaattt

SEQ ID NO: 373644 - DNA, 15 bp, Homo sapiens
ctcccttggggaatt

SEQ ID NO: 373645 - DNA, 15 bp, Homo sapiens
actcccttggggaat

SEQ ID NO: 373646 - DNA, 15 bp, Homo sapiens
aactcccttggggaa

SEQ ID NO: 373647 - DNA, 15 bp, Homo sapiens
caactcccttgggga

SEQ ID NO: 373648 - DNA, 15 bp, Homo sapiens
acaactcccttgggg

SEQ ID NO: 373649 - DNA, 15 bp, Homo sapiens
tacaactcccttggg

SEQ ID NO: 373650 - DNA, 15 bp, Homo sapiens
gtacaactcccttgg

SEQ ID NO: 373651 - DNA, 15 bp, Homo sapiens
tgtacaactcccttg

SEQ ID NO: 373652 - DNA, 15 bp, Homo sapiens
atgtacaactccctt

SEQ ID NO: 373653 - DNA, 15 bp, Homo sapiens
aatgtacaactccct

SEQ ID NO: 373654 - DNA, 15 bp, Homo sapiens
aaatgtacaactccc

SEQ ID NO: 373655 - DNA, 15 bp, Homo sapiens
aaaatgtacaactcc

SEQ ID NO: 373656 - DNA, 15 bp, Homo sapiens
taaaatgtacaactc

SEQ ID NO: 373657 - DNA, 15 bp, Homo sapiens
ataaaatgtacaact

SEQ ID NO: 373658 - DNA, 15 bp, Homo sapiens
cataaaatgtacaac

SEQ ID NO: 373659 - DNA, 15 bp, Homo sapiens
gcataaaatgtacaa

SEQ ID NO: 373660 - DNA, 15 bp, Homo sapiens
agcataaaatgtaca

SEQ ID NO: 373661 - DNA, 15 bp, Homo sapiens
tagcataaaatgtac

SEQ ID NO: 373662 - DNA, 15 bp, Homo sapiens
ttagcataaaatgta

SEQ ID NO: 373663 - DNA, 15 bp, Homo sapiens
tttagcataaaatgt

SEQ ID NO: 373664 - DNA, 15 bp, Homo sapiens
ttttagcataaaatg

SEQ ID NO: 373665 - DNA, 15 bp, Homo sapiens
attttagcataaaat

SEQ ID NO: 373666 - DNA, 15 bp, Homo sapiens
aattttagcataaaa

SEQ ID NO: 373667 - DNA, 15 bp, Homo sapiens
aaattttagcataaa

SEQ ID NO: 373668 - DNA, 15 bp, Homo sapiens
caaattttagcataa

SEQ ID NO: 373669 - DNA, 15 bp, Homo sapiens
tcaaattttagcata

SEQ ID NO: 373670 - DNA, 15 bp, Homo sapiens
ctcaaattttagcat

SEQ ID NO: 373671 - DNA, 15 bp, Homo sapiens
gctcaaattttagca

SEQ ID NO: 373672 - DNA, 15 bp, Homo sapiens
ggctcaaattttagc

SEQ ID NO: 373673 - DNA, 15 bp, Homo sapiens
tggctcaaattttag

SEQ ID NO: 373674 - DNA, 15 bp, Homo sapiens
atggctcaaatttta

SEQ ID NO: 373675 - DNA, 15 bp, Homo sapiens
tatggctcaaatttt

SEQ ID NO: 373676 - DNA, 15 bp, Homo sapiens
ttatggctcaaattt

SEQ ID NO: 373677 - DNA, 15 bp, Homo sapiens
tttatggctcaaatt

SEQ ID NO: 373678 - DNA, 15 bp, Homo sapiens
ctttatggctcaaat

SEQ ID NO: 373679 - DNA, 15 bp, Homo sapiens
tctttatggctcaaa

SEQ ID NO: 373680 - DNA, 15 bp, Homo sapiens
ctctttatggctcaa

SEQ ID NO: 373681 - DNA, 15 bp, Homo sapiens
cctctttatggctca

SEQ ID NO: 373682 - DNA, 15 bp, Homo sapiens
ccctctttatggctc

SEQ ID NO: 373683 - DNA, 15 bp, Homo sapiens
cccctctttatggct

SEQ ID NO: 373684 - DNA, 15 bp, Homo sapiens
tcccctctttatggc

SEQ ID NO: 373685 - DNA, 15 bp, Homo sapiens
ctcccctctttatgg

SEQ ID NO: 373686 - DNA, 15 bp, Homo sapiens
tctcccctctttatg

SEQ ID NO: 373687 - DNA, 15 bp, Homo sapiens
atctcccctctttat

SEQ ID NO: 373688 - DNA, 15 bp, Homo sapiens
gatctcccctcttta

SEQ ID NO: 373689 - DNA, 15 bp, Homo sapiens
agatctcccctcttt

SEQ ID NO: 373690 - DNA, 15 bp, Homo sapiens
aagatctcccctctt

SEQ ID NO: 373691 - DNA, 15 bp, Homo sapiens
caagatctcccctct

SEQ ID NO: 373692 - DNA, 15 bp, Homo sapiens
ccaagatctcccctc

SEQ ID NO: 373693 - DNA, 15 bp, Homo sapiens
cccaagatctcccct

SEQ ID NO: 373694 - DNA, 15 bp, Homo sapiens
ccccaagatctcccc

SEQ ID NO: 373695 - DNA, 15 bp, Homo sapiens
cccccaagatctccc

SEQ ID NO: 373696 - DNA, 15 bp, Homo sapiens
tcccccaagatctcc

SEQ ID NO: 373697 - DNA, 15 bp, Homo sapiens
ttcccccaagatctc

SEQ ID NO: 373698 - DNA, 15 bp, Homo sapiens
cttcccccaagatct

SEQ ID NO: 373699 - DNA, 15 bp, Homo sapiens
tcttcccccaagatc

SEQ ID NO: 373700 - DNA, 15 bp, Homo sapiens
ctcttcccccaagat

SEQ ID NO: 373701 - DNA, 15 bp, Homo sapiens
gctcttcccccaaga

SEQ ID NO: 373702 - DNA, 15 bp, Homo sapiens
tgctcttcccccaag

SEQ ID NO: 373703 - DNA, 15 bp, Homo sapiens
atgctcttcccccaa

SEQ ID NO: 373704 - DNA, 15 bp, Homo sapiens
aatgctcttccccca

SEQ ID NO: 373705 - DNA, 15 bp, Homo sapiens
gaatgctcttccccc

SEQ ID NO: 373706 - DNA, 15 bp, Homo sapiens
agaatgctcttcccc

SEQ ID NO: 373707 - DNA, 15 bp, Homo sapiens
gagaatgctcttccc

SEQ ID NO: 373708 - DNA, 15 bp, Homo sapiens
agagaatgctcttcc

SEQ ID NO: 373709 - DNA, 15 bp, Homo sapiens
cagagaatgctcttc

SEQ ID NO: 373710 - DNA, 15 bp, Homo sapiens
tcagagaatgctctt

SEQ ID NO: 373711 - DNA, 15 bp, Homo sapiens
ttcagagaatgctct

SEQ ID NO: 373712 - DNA, 15 bp, Homo sapiens
cttcagagaatgctc

SEQ ID NO: 373713 - DNA, 15 bp, Homo sapiens
tcttcagagaatgct

SEQ ID NO: 373714 - DNA, 15 bp, Homo sapiens
ttcttcagagaatgc

SEQ ID NO: 373715 - DNA, 15 bp, Homo sapiens
cttcttcagagaatg

SEQ ID NO: 373716 - DNA, 15 bp, Homo sapiens
tcttcttcagagaat

SEQ ID NO: 373717 - DNA, 15 bp, Homo sapiens
ttcttcttcagagaa

SEQ ID NO: 373718 - DNA, 15 bp, Homo sapiens
tttcttcttcagaga

SEQ ID NO: 373719 - DNA, 15 bp, Homo sapiens
ctttcttcttcagag

SEQ ID NO: 373720 - DNA, 15 bp, Homo sapiens
tctttcttcttcaga

SEQ ID NO: 373721 - DNA, 15 bp, Homo sapiens
ttctttcttcttcag

SEQ ID NO: 373722 - DNA, 15 bp, Homo sapiens
tttctttcttcttca

SEQ ID NO: 373723 - DNA, 15 bp, Homo sapiens
ctttctttcttcttc

SEQ ID NO: 373724 - DNA, 15 bp, Homo sapiens
gctttctttcttctt

SEQ ID NO: 373725 - DNA, 15 bp, Homo sapiens
tgctttctttcttct

SEQ ID NO: 373726 - DNA, 15 bp, Homo sapiens
ttgctttctttcttc

SEQ ID NO: 373727 - DNA, 15 bp, Homo sapiens
tttgctttctttctt

SEQ ID NO: 373728 - DNA, 15 bp, Homo sapiens
atttgctttctttct

SEQ ID NO: 373729 - DNA, 15 bp, Homo sapiens
catttgctttctttc

SEQ ID NO: 373730 - DNA, 15 bp, Homo sapiens
gcatttgctttcttt

SEQ ID NO: 373731 - DNA, 15 bp, Homo sapiens
tgcatttgctttctt

SEQ ID NO: 373732 - DNA, 15 bp, Homo sapiens
ttgcatttgctttct

SEQ ID NO: 373733 - DNA, 15 bp, Homo sapiens
tttgcatttgctttc

SEQ ID NO: 373734 - DNA, 15 bp, Homo sapiens
ttttgcatttgcttt

SEQ ID NO: 373735 - DNA, 15 bp, Homo sapiens
gttttgcatttgctt

SEQ ID NO: 373736 - DNA, 15 bp, Homo sapiens
ggttttgcatttgct

SEQ ID NO: 373737 - DNA, 15 bp, Homo sapiens
aggttttgcatttgc

SEQ ID NO: 373738 - DNA, 15 bp, Homo sapiens
caggttttgcatttg

SEQ ID NO: 373739 - DNA, 15 bp, Homo sapiens
ccaggttttgcattt

SEQ ID NO: 373740 - DNA, 15 bp, Homo sapiens
accaggttttgcatt

SEQ ID NO: 373741 - DNA, 15 bp, Homo sapiens
caccaggttttgcat

SEQ ID NO: 373742 - DNA, 15 bp, Homo sapiens
acaccaggttttgca

SEQ ID NO: 373743 - DNA, 15 bp, Homo sapiens
aacaccaggttttgc

SEQ ID NO: 373744 - DNA, 15 bp, Homo sapiens
caacaccaggttttg

SEQ ID NO: 373745 - DNA, 15 bp, Homo sapiens
ccaacaccaggtttt

SEQ ID NO: 373746 - DNA, 15 bp, Homo sapiens
cccaacaccaggttt

SEQ ID NO: 373747 - DNA, 15 bp, Homo sapiens
ccccaacaccaggtt

SEQ ID NO: 373748 - DNA, 15 bp, Homo sapiens
cccccaacaccaggt

SEQ ID NO: 373749 - DNA, 15 bp, Homo sapiens
ccccccaacaccagg

SEQ ID NO: 373750 - DNA, 15 bp, Homo sapiens
cccccccaacaccag

SEQ ID NO: 373751 - DNA, 15 bp, Homo sapiens
tcccccccaacacca

SEQ ID NO: 373752 - DNA, 15 bp, Homo sapiens
gtcccccccaacacc

SEQ ID NO: 373753 - DNA, 15 bp, Homo sapiens
ggtcccccccaacac

SEQ ID NO: 373754 - DNA, 15 bp, Homo sapiens
aggtcccccccaaca

SEQ ID NO: 373755 - DNA, 15 bp, Homo sapiens
caggtcccccccaac

SEQ ID NO: 373756 - DNA, 15 bp, Homo sapiens
tcaggtcccccccaa

SEQ ID NO: 373757 - DNA, 15 bp, Homo sapiens
ctcaggtccccccca

SEQ ID NO: 373758 - DNA, 15 bp, Homo sapiens
cctcaggtccccccc

SEQ ID NO: 373759 - DNA, 15 bp, Homo sapiens
gcctcaggtcccccc

SEQ ID NO: 373760 - DNA, 15 bp, Homo sapiens
agcctcaggtccccc

SEQ ID NO: 373761 - DNA, 15 bp, Homo sapiens
gagcctcaggtcccc

SEQ ID NO: 373762 - DNA, 15 bp, Homo sapiens
agagcctcaggtccc

SEQ ID NO: 373763 - DNA, 15 bp, Homo sapiens
gagagcctcaggtcc

SEQ ID NO: 373764 - DNA, 15 bp, Homo sapiens
tgagagcctcaggtc

SEQ ID NO: 373765 - DNA, 15 bp, Homo sapiens
ttgagagcctcaggt

SEQ ID NO: 373766 - DNA, 15 bp, Homo sapiens
tttgagagcctcagg

SEQ ID NO: 373767 - DNA, 15 bp, Homo sapiens
ctttgagagcctcag

SEQ ID NO: 373768 - DNA, 15 bp, Homo sapiens
tctttgagagcctca

SEQ ID NO: 373769 - DNA, 15 bp, Homo sapiens
ttctttgagagcctc

SEQ ID NO: 373770 - DNA, 15 bp, Homo sapiens
cttctttgagagcct

SEQ ID NO: 373771 - DNA, 15 bp, Homo sapiens
ccttctttgagagcc

SEQ ID NO: 373772 - DNA, 15 bp, Homo sapiens
gccttctttgagagc

SEQ ID NO: 373773 - DNA, 15 bp, Homo sapiens
tgccttctttgagag

SEQ ID NO: 373774 - DNA, 15 bp, Homo sapiens
ttgccttctttgaga

SEQ ID NO: 373775 - DNA, 15 bp, Homo sapiens
tttgccttctttgag

SEQ ID NO: 373776 - DNA, 15 bp, Homo sapiens
ctttgccttctttga

SEQ ID NO: 373777 - DNA, 15 bp, Homo sapiens
tctttgccttctttg

SEQ ID NO: 373778 - DNA, 15 bp, Homo sapiens
ttctttgccttcttt

SEQ ID NO: 373779 - DNA, 15 bp, Homo sapiens
tttctttgccttctt

SEQ ID NO: 373780 - DNA, 15 bp, Homo sapiens
gtttctttgccttct

SEQ ID NO: 373781 - DNA, 15 bp, Homo sapiens
ggtttctttgccttc

SEQ ID NO: 373782 - DNA, 15 bp, Homo sapiens
gggtttctttgcctt

SEQ ID NO: 373783 - DNA, 15 bp, Homo sapiens
agggtttctttgcct

SEQ ID NO: 373784 - DNA, 15 bp, Homo sapiens
cagggtttctttgcc

SEQ ID NO: 373785 - DNA, 15 bp, Homo sapiens
acagggtttctttgc

SEQ ID NO: 373786 - DNA, 15 bp, Homo sapiens
cacagggtttctttg

SEQ ID NO: 373787 - DNA, 15 bp, Homo sapiens
tcacagggtttcttt

SEQ ID NO: 373788 - DNA, 15 bp, Homo sapiens
ctcacagggtttctt

SEQ ID NO: 373789 - DNA, 15 bp, Homo sapiens
cctcacagggtttct

SEQ ID NO: 373790 - DNA, 15 bp, Homo sapiens
gcctcacagggtttc

SEQ ID NO: 373791 - DNA, 15 bp, Homo sapiens
agcctcacagggttt

SEQ ID NO: 373792 - DNA, 15 bp, Homo sapiens
cagcctcacagggtt

SEQ ID NO: 373793 - DNA, 15 bp, Homo sapiens
ccagcctcacagggt

SEQ ID NO: 373794 - DNA, 15 bp, Homo sapiens
tccagcctcacaggg

SEQ ID NO: 373795 - DNA, 15 bp, Homo sapiens
gtccagcctcacagg

SEQ ID NO: 373796 - DNA, 15 bp, Homo sapiens
ggtccagcctcacag

SEQ ID NO: 373797 - DNA, 15 bp, Homo sapiens
tggtccagcctcaca

SEQ ID NO: 373798 - DNA, 15 bp, Homo sapiens
atggtccagcctcac

SEQ ID NO: 373799 - DNA, 15 bp, Homo sapiens
catggtccagcctca

SEQ ID NO: 373800 - DNA, 15 bp, Homo sapiens
ccatggtccagcctc

SEQ ID NO: 373801 - DNA, 15 bp, Homo sapiens
cccatggtccagcct

SEQ ID NO: 373802 - DNA, 15 bp, Homo sapiens
ccccatggtccagcc

SEQ ID NO: 373803 - DNA, 15 bp, Homo sapiens
tccccatggtccagc

SEQ ID NO: 373804 - DNA, 15 bp, Homo sapiens
ctccccatggtccag

SEQ ID NO: 373805 - DNA, 15 bp, Homo sapiens
tctccccatggtcca

SEQ ID NO: 373806 - DNA, 15 bp, Homo sapiens
gtctccccatggtcc

SEQ ID NO: 373807 - DNA, 15 bp, Homo sapiens
tgtctccccatggtc

SEQ ID NO: 373808 - DNA, 15 bp, Homo sapiens
ttgtctccccatggt

SEQ ID NO: 373809 - DNA, 15 bp, Homo sapiens
cttgtctccccatgg

SEQ ID NO: 373810 - DNA, 15 bp, Homo sapiens
ccttgtctccccatg

SEQ ID NO: 373811 - DNA, 15 bp, Homo sapiens
cccttgtctccccat

SEQ ID NO: 373812 - DNA, 15 bp, Homo sapiens
acccttgtctcccca

SEQ ID NO: 373813 - DNA, 15 bp, Homo sapiens
cacccttgtctcccc

SEQ ID NO: 373814 - DNA, 15 bp, Homo sapiens
gcacccttgtctccc

SEQ ID NO: 373815 - DNA, 15 bp, Homo sapiens
tgcacccttgtctcc

SEQ ID NO: 373816 - DNA, 15 bp, Homo sapiens
ctgcacccttgtctc

SEQ ID NO: 373817 - DNA, 15 bp, Homo sapiens
cctgcacccttgtct

SEQ ID NO: 373818 - DNA, 15 bp, Homo sapiens
tcctgcacccttgtc

SEQ ID NO: 373819 - DNA, 15 bp, Homo sapiens
ctcctgcacccttgt

SEQ ID NO: 373820 - DNA, 15 bp, Homo sapiens
cctcctgcacccttg

SEQ ID NO: 373821 - DNA, 15 bp, Homo sapiens
tcctcctgcaccctt

SEQ ID NO: 373822 - DNA, 15 bp, Homo sapiens
atcctcctgcaccct

SEQ ID NO: 373823 - DNA, 15 bp, Homo sapiens
catcctcctgcaccc

SEQ ID NO: 373824 - DNA, 15 bp, Homo sapiens
ccatcctcctgcacc

SEQ ID NO: 373825 - DNA, 15 bp, Homo sapiens
gccatcctcctgcac

SEQ ID NO: 373826 - DNA, 15 bp, Homo sapiens
ggccatcctcctgca

SEQ ID NO: 373827 - DNA, 15 bp, Homo sapiens
tggccatcctcctgc

SEQ ID NO: 373828 - DNA, 15 bp, Homo sapiens
ttggccatcctcctg

SEQ ID NO: 373829 - DNA, 15 bp, Homo sapiens
cttggccatcctcct

SEQ ID NO: 373830 - DNA, 15 bp, Homo sapiens
ccttggccatcctcc

SEQ ID NO: 373831 - DNA, 15 bp, Homo sapiens
accttggccatcctc

SEQ ID NO: 373832 - DNA, 15 bp, Homo sapiens
aaccttggccatcct

SEQ ID NO: 373833 - DNA, 15 bp, Homo sapiens
taaccttggccatcc

SEQ ID NO: 373834 - DNA, 15 bp, Homo sapiens
ctaaccttggccatc

SEQ ID NO: 373835 - DNA, 15 bp, Homo sapiens
tctaaccttggccat

SEQ ID NO: 373836 - DNA, 15 bp, Homo sapiens
gtctaaccttggcca

SEQ ID NO: 373837 - DNA, 15 bp, Homo sapiens
ggtctaaccttggcc

SEQ ID NO: 373838 - DNA, 15 bp, Homo sapiens
aggtctaaccttggc

SEQ ID NO: 373839 - DNA, 15 bp, Homo sapiens
caggtctaaccttgg

SEQ ID NO: 373840 - DNA, 15 bp, Homo sapiens
gcaggtctaaccttg

SEQ ID NO: 373841 - DNA, 15 bp, Homo sapiens
tgcaggtctaacctt

SEQ ID NO: 373842 - DNA, 15 bp, Homo sapiens
ctgcaggtctaacct

SEQ ID NO: 373843 - DNA, 15 bp, Homo sapiens
tctgcaggtctaacc

SEQ ID NO: 373844 - DNA, 15 bp, Homo sapiens
ttctgcaggtctaac

SEQ ID NO: 373845 - DNA, 15 bp, Homo sapiens
gttctgcaggtctaa

SEQ ID NO: 373846 - DNA, 15 bp, Homo sapiens
ggttctgcaggtcta

SEQ ID NO: 373847 - DNA, 15 bp, Homo sapiens
aggttctgcaggtct

SEQ ID NO: 373848 - DNA, 15 bp, Homo sapiens
aaggttctgcaggtc

SEQ ID NO: 373849 - DNA, 15 bp, Homo sapiens
caaggttctgcaggt

SEQ ID NO: 373850 - DNA, 15 bp, Homo sapiens
tcaaggttctgcagg

SEQ ID NO: 373851 - DNA, 15 bp, Homo sapiens
ttcaaggttctgcag

SEQ ID NO: 373852 - DNA, 15 bp, Homo sapiens
tttcaaggttctgca

SEQ ID NO: 373853 - DNA, 15 bp, Homo sapiens
gtttcaaggttctgc

SEQ ID NO: 373854 - DNA, 15 bp, Homo sapiens
tgtttcaaggttctg

SEQ ID NO: 373855 - DNA, 15 bp, Homo sapiens
gtgtttcaaggttct

SEQ ID NO: 373856 - DNA, 15 bp, Homo sapiens
tgtgtttcaaggttc

SEQ ID NO: 373857 - DNA, 15 bp, Homo sapiens
atgtgtttcaaggtt

SEQ ID NO: 373858 - DNA, 15 bp, Homo sapiens
aatgtgtttcaaggt

SEQ ID NO: 373859 - DNA, 15 bp, Homo sapiens
aaatgtgtttcaagg

SEQ ID NO: 373860 - DNA, 15 bp, Homo sapiens
aaaatgtgtttcaag

SEQ ID NO: 373861 - DNA, 15 bp, Homo sapiens
gaaaatgtgtttcaa

SEQ ID NO: 373862 - DNA, 15 bp, Homo sapiens
tgaaaatgtgtttca

SEQ ID NO: 373863 - DNA, 15 bp, Homo sapiens
atgaaaatgtgtttc

SEQ ID NO: 373864 - DNA, 15 bp, Homo sapiens
catgaaaatgtgttt

SEQ ID NO: 373865 - DNA, 15 bp, Homo sapiens
ccatgaaaatgtgtt

SEQ ID NO: 373866 - DNA, 15 bp, Homo sapiens
accatgaaaatgtgt

SEQ ID NO: 373867 - DNA, 15 bp, Homo sapiens
aaccatgaaaatgtg

SEQ ID NO: 373868 - DNA, 15 bp, Homo sapiens
aaaccatgaaaatgt

SEQ ID NO: 373869 - DNA, 15 bp, Homo sapiens
aaaaccatgaaaatg

SEQ ID NO: 373870 - DNA, 15 bp, Homo sapiens
caaaaccatgaaaat

SEQ ID NO: 373871 - DNA, 15 bp, Homo sapiens
ccaaaaccatgaaaa

SEQ ID NO: 373872 - DNA, 15 bp, Homo sapiens
tccaaaaccatgaaa

SEQ ID NO: 373873 - DNA, 15 bp, Homo sapiens
gtccaaaaccatgaa

SEQ ID NO: 373874 - DNA, 15 bp, Homo sapiens
agtccaaaaccatga

SEQ ID NO: 373875 - DNA, 15 bp, Homo sapiens
aagtccaaaaccatg

SEQ ID NO: 373876 - DNA, 15 bp, Homo sapiens
aaagtccaaaaccat

SEQ ID NO: 373877 - DNA, 15 bp, Homo sapiens
aaaagtccaaaacca

SEQ ID NO: 373878 - DNA, 15 bp, Homo sapiens
aaaaagtccaaaacc

SEQ ID NO: 373879 - DNA, 15 bp, Homo sapiens
gaaaaagtccaaaac

SEQ ID NO: 373880 - DNA, 15 bp, Homo sapiens
agaaaaagtccaaaa

SEQ ID NO: 373881 - DNA, 15 bp, Homo sapiens
aagaaaaagtccaaa

SEQ ID NO: 373882 - DNA, 15 bp, Homo sapiens
taagaaaaagtccaa

SEQ ID NO: 373883 - DNA, 15 bp, Homo sapiens
ttaagaaaaagtcca

SEQ ID NO: 373884 - DNA, 15 bp, Homo sapiens
cttaagaaaaagtcc

SEQ ID NO: 373885 - DNA, 15 bp, Homo sapiens
tcttaagaaaaagtc

SEQ ID NO: 373886 - DNA, 15 bp, Homo sapiens
ttcttaagaaaaagt

SEQ ID NO: 373887 - DNA, 15 bp, Homo sapiens
attcttaagaaaaag

SEQ ID NO: 373888 - DNA, 15 bp, Homo sapiens
tattcttaagaaaaa

SEQ ID NO: 373889 - DNA, 15 bp, Homo sapiens
ttattcttaagaaaa

SEQ ID NO: 373890 - DNA, 15 bp, Homo sapiens
attattcttaagaaa

SEQ ID NO: 373891 - DNA, 15 bp, Homo sapiens
cattattcttaagaa

SEQ ID NO: 373892 - DNA, 15 bp, Homo sapiens
tcattattcttaaga

SEQ ID NO: 373893 - DNA, 15 bp, Homo sapiens
ttcattattcttaag

SEQ ID NO: 373894 - DNA, 15 bp, Homo sapiens
cttcattattcttaa

SEQ ID NO: 373895 - DNA, 15 bp, Homo sapiens
tcttcattattctta

SEQ ID NO: 373896 - DNA, 15 bp, Homo sapiens
ctcttcattattctt

SEQ ID NO: 373897 - DNA, 15 bp, Homo sapiens
cctcttcattattct

SEQ ID NO: 373898 - DNA, 15 bp, Homo sapiens
gcctcttcattattc

SEQ ID NO: 373899 - DNA, 15 bp, Homo sapiens
tgcctcttcattatt

SEQ ID NO: 373900 - DNA, 15 bp, Homo sapiens
gtgcctcttcattat

SEQ ID NO: 373901 - DNA, 15 bp, Homo sapiens
agtgcctcttcatta

SEQ ID NO: 373902 - DNA, 15 bp, Homo sapiens
cagtgcctcttcatt

SEQ ID NO: 373903 - DNA, 15 bp, Homo sapiens
tcagtgcctcttcat

SEQ ID NO: 373904 - DNA, 15 bp, Homo sapiens
ttcagtgcctcttca

SEQ ID NO: 373905 - DNA, 15 bp, Homo sapiens
cttcagtgcctcttc

SEQ ID NO: 373906 - DNA, 15 bp, Homo sapiens
ccttcagtgcctctt

SEQ ID NO: 373907 - DNA, 15 bp, Homo sapiens
tccttcagtgcctct

SEQ ID NO: 373908 - DNA, 15 bp, Homo sapiens
atccttcagtgcctc

SEQ ID NO: 373909 - DNA, 15 bp, Homo sapiens
aatccttcagtgcct

SEQ ID NO: 373910 - DNA, 15 bp, Homo sapiens
aaatccttcagtgcc

SEQ ID NO: 373911 - DNA, 15 bp, Homo sapiens
aaaatccttcagtgc

SEQ ID NO: 373912 - DNA, 15 bp, Homo sapiens
taaaatccttcagtg

SEQ ID NO: 373913 - DNA, 15 bp, Homo sapiens
ctaaaatccttcagt

SEQ ID NO: 373914 - DNA, 15 bp, Homo sapiens
actaaaatccttcag

SEQ ID NO: 373915 - DNA, 15 bp, Homo sapiens
aactaaaatccttca

SEQ ID NO: 373916 - DNA, 15 bp, Homo sapiens
caactaaaatccttc

SEQ ID NO: 373917 - DNA, 15 bp, Homo sapiens
ccaactaaaatcctt

SEQ ID NO: 373918 - DNA, 15 bp, Homo sapiens
tccaactaaaatcct

SEQ ID NO: 373919 - DNA, 15 bp, Homo sapiens
ctccaactaaaatcc

SEQ ID NO: 373920 - DNA, 15 bp, Homo sapiens
tctccaactaaaatc

SEQ ID NO: 373921 - DNA, 15 bp, Homo sapiens
ctctccaactaaaat

SEQ ID NO: 373922 - DNA, 15 bp, Homo sapiens
actctccaactaaaa

SEQ ID NO: 373923 - DNA, 15 bp, Homo sapiens
cactctccaactaaa

SEQ ID NO: 373924 - DNA, 15 bp, Homo sapiens
tcactctccaactaa

SEQ ID NO: 373925 - DNA, 15 bp, Homo sapiens
gtcactctccaacta

SEQ ID NO: 373926 - DNA, 15 bp, Homo sapiens
tgtcactctccaact

SEQ ID NO: 373927 - DNA, 15 bp, Homo sapiens
atgtcactctccaac

SEQ ID NO: 373928 - DNA, 15 bp, Homo sapiens
tatgtcactctccaa

SEQ ID NO: 373929 - DNA, 15 bp, Homo sapiens
ttatgtcactctcca

SEQ ID NO: 373930 - DNA, 15 bp, Homo sapiens
attatgtcactctcc

SEQ ID NO: 373931 - DNA, 15 bp, Homo sapiens
gattatgtcactctc

SEQ ID NO: 373932 - DNA, 15 bp, Homo sapiens
tgattatgtcactct

SEQ ID NO: 373933 - DNA, 15 bp, Homo sapiens
ctgattatgtcactc

SEQ ID NO: 373934 - DNA, 15 bp, Homo sapiens
cctgattatgtcact

SEQ ID NO: 373935 - DNA, 15 bp, Homo sapiens
acctgattatgtcac

SEQ ID NO: 373936 - DNA, 15 bp, Homo sapiens
aacctgattatgtca

SEQ ID NO: 373937 - DNA, 15 bp, Homo sapiens
gaacctgattatgtc

SEQ ID NO: 373938 - DNA, 15 bp, Homo sapiens
tgaacctgattatgt

SEQ ID NO: 373939 - DNA, 15 bp, Homo sapiens
atgaacctgattatg

SEQ ID NO: 373940 - DNA, 15 bp, Homo sapiens
catgaacctgattat

SEQ ID NO: 373941 - DNA, 15 bp, Homo sapiens
gcatgaacctgatta

SEQ ID NO: 373942 - DNA, 15 bp, Homo sapiens
agcatgaacctgatt

SEQ ID NO: 373943 - DNA, 15 bp, Homo sapiens
aagcatgaacctgat

SEQ ID NO: 373944 - DNA, 15 bp, Homo sapiens
aaagcatgaacctga

SEQ ID NO: 373945 - DNA, 15 bp, Homo sapiens
taaagcatgaacctg

SEQ ID NO: 373946 - DNA, 15 bp, Homo sapiens
ttaaagcatgaacct

SEQ ID NO: 373947 - DNA, 15 bp, Homo sapiens
cttaaagcatgaacc

SEQ ID NO: 373948 - DNA, 15 bp, Homo sapiens
ccttaaagcatgaac

SEQ ID NO: 373949 - DNA, 15 bp, Homo sapiens
cccttaaagcatgaa

SEQ ID NO: 373950 - DNA, 15 bp, Homo sapiens
ccccttaaagcatga

SEQ ID NO: 373951 - DNA, 15 bp, Homo sapiens
tccccttaaagcatg

SEQ ID NO: 373952 - DNA, 15 bp, Homo sapiens
atccccttaaagcat

SEQ ID NO: 373953 - DNA, 15 bp, Homo sapiens
aatccccttaaagca

SEQ ID NO: 373954 - DNA, 15 bp, Homo sapiens
caatccccttaaagc

SEQ ID NO: 373955 - DNA, 15 bp, Homo sapiens
gcaatccccttaaag

SEQ ID NO: 373956 - DNA, 15 bp, Homo sapiens
ggcaatccccttaaa

SEQ ID NO: 373957 - DNA, 15 bp, Homo sapiens
aggcaatccccttaa

SEQ ID NO: 373958 - DNA, 15 bp, Homo sapiens
aaggcaatcccctta

SEQ ID NO: 373959 - DNA, 15 bp, Homo sapiens
caaggcaatcccctt

SEQ ID NO: 373960 - DNA, 15 bp, Homo sapiens
ccaaggcaatcccct

SEQ ID NO: 373961 - DNA, 15 bp, Homo sapiens
gccaaggcaatcccc

SEQ ID NO: 373962 - DNA, 15 bp, Homo sapiens
agccaaggcaatccc

SEQ ID NO: 373963 - DNA, 15 bp, Homo sapiens
cagccaaggcaatcc

SEQ ID NO: 373964 - DNA, 15 bp, Homo sapiens
acagccaaggcaatc

SEQ ID NO: 373965 - DNA, 15 bp, Homo sapiens
aacagccaaggcaat

SEQ ID NO: 373966 - DNA, 15 bp, Homo sapiens
caacagccaaggcaa

SEQ ID NO: 373967 - DNA, 15 bp, Homo sapiens
acaacagccaaggca

SEQ ID NO: 373968 - DNA, 15 bp, Homo sapiens
tacaacagccaaggc

SEQ ID NO: 373969 - DNA, 15 bp, Homo sapiens
ctacaacagccaagg

SEQ ID NO: 373970 - DNA, 15 bp, Homo sapiens
cctacaacagccaag

SEQ ID NO: 373971 - DNA, 15 bp, Homo sapiens
ccctacaacagccaa

SEQ ID NO: 373972 - DNA, 15 bp, Homo sapiens
tccctacaacagcca

SEQ ID NO: 373973 - DNA, 15 bp, Homo sapiens
ctccctacaacagcc

SEQ ID NO: 373974 - DNA, 15 bp, Homo sapiens
cctccctacaacagc

SEQ ID NO: 373975 - DNA, 15 bp, Homo sapiens
tcctccctacaacag

SEQ ID NO: 373976 - DNA, 15 bp, Homo sapiens
atcctccctacaaca

SEQ ID NO: 373977 - DNA, 15 bp, Homo sapiens
catcctccctacaac

SEQ ID NO: 373978 - DNA, 15 bp, Homo sapiens
tcatcctccctacaa

SEQ ID NO: 373979 - DNA, 15 bp, Homo sapiens
atcatcctccctaca

SEQ ID NO: 373980 - DNA, 15 bp, Homo sapiens
aatcatcctccctac

SEQ ID NO: 373981 - DNA, 15 bp, Homo sapiens
gaatcatcctcccta

SEQ ID NO: 373982 - DNA, 15 bp, Homo sapiens
tgaatcatcctccct

SEQ ID NO: 373983 - DNA, 15 bp, Homo sapiens
ctgaatcatcctccc

SEQ ID NO: 373984 - DNA, 15 bp, Homo sapiens
tctgaatcatcctcc

SEQ ID NO: 373985 - DNA, 15 bp, Homo sapiens
ctctgaatcatcctc

SEQ ID NO: 373986 - DNA, 15 bp, Homo sapiens
cctctgaatcatcct

SEQ ID NO: 373987 - DNA, 15 bp, Homo sapiens
acctctgaatcatcc

SEQ ID NO: 373988 - DNA, 15 bp, Homo sapiens
tacctctgaatcatc

SEQ ID NO: 373989 - DNA, 15 bp, Homo sapiens
gtacctctgaatcat

SEQ ID NO: 373990 - DNA, 15 bp, Homo sapiens
tgtacctctgaatca

SEQ ID NO: 373991 - DNA, 15 bp, Homo sapiens
ttgtacctctgaatc

SEQ ID NO: 373992 - DNA, 15 bp, Homo sapiens
cttgtacctctgaat

SEQ ID NO: 373993 - DNA, 15 bp, Homo sapiens
tcttgtacctctgaa

SEQ ID NO: 373994 - DNA, 15 bp, Homo sapiens
atcttgtacctctga

SEQ ID NO: 373995 - DNA, 15 bp, Homo sapiens
catcttgtacctctg

SEQ ID NO: 373996 - DNA, 15 bp, Homo sapiens
ccatcttgtacctct

SEQ ID NO: 373997 - DNA, 15 bp, Homo sapiens
gccatcttgtacctc

SEQ ID NO: 373998 - DNA, 15 bp, Homo sapiens
cgccatcttgtacct

SEQ ID NO: 373999 - DNA, 15 bp, Homo sapiens
ccgccatcttgtacc

SEQ ID NO: 374000 - DNA, 15 bp, Homo sapiens
gccgccatcttgtac

SEQ ID NO: 374001 - DNA, 15 bp, Homo sapiens
tgccgccatcttgta

SEQ ID NO: 374002 - DNA, 15 bp, Homo sapiens
ctgccgccatcttgt

SEQ ID NO: 374003 - DNA, 15 bp, Homo sapiens
cctgccgccatcttg

SEQ ID NO: 374004 - DNA, 15 bp, Homo sapiens
tcctgccgccatctt

SEQ ID NO: 374005 - DNA, 15 bp, Homo sapiens
ctcctgccgccatct

SEQ ID NO: 374006 - DNA, 15 bp, Homo sapiens
cctcctgccgccatc

SEQ ID NO: 374007 - DNA, 15 bp, Homo sapiens
acctcctgccgccat

SEQ ID NO: 374008 - DNA, 15 bp, Homo sapiens
gacctcctgccgcca

SEQ ID NO: 374009 - DNA, 15 bp, Homo sapiens
agacctcctgccgcc

SEQ ID NO: 374010 - DNA, 15 bp, Homo sapiens
cagacctcctgccgc

SEQ ID NO: 374011 - DNA, 15 bp, Homo sapiens
tcagacctcctgccg

SEQ ID NO: 374012 - DNA, 15 bp, Homo sapiens
ctcagacctcctgcc

SEQ ID NO: 374013 - DNA, 15 bp, Homo sapiens
actcagacctcctgc

SEQ ID NO: 374014 - DNA, 15 bp, Homo sapiens
tactcagacctcctg

SEQ ID NO: 374015 - DNA, 15 bp, Homo sapiens
ttactcagacctcct

SEQ ID NO: 374016 - DNA, 15 bp, Homo sapiens
cttactcagacctcc

SEQ ID NO: 374017 - DNA, 15 bp, Homo sapiens
tcttactcagacctc

SEQ ID NO: 374018 - DNA, 15 bp, Homo sapiens
ctcttactcagacct

SEQ ID NO: 374019 - DNA, 15 bp, Homo sapiens
cctcttactcagacc

SEQ ID NO: 374020 - DNA, 15 bp, Homo sapiens
gcctcttactcagac

SEQ ID NO: 374021 - DNA, 15 bp, Homo sapiens
agcctcttactcaga

SEQ ID NO: 374022 - DNA, 15 bp, Homo sapiens
cagcctcttactcag

SEQ ID NO: 374023 - DNA, 15 bp, Homo sapiens
acagcctcttactca

SEQ ID NO: 374024 - DNA, 15 bp, Homo sapiens
gacagcctcttactc

SEQ ID NO: 374025 - DNA, 15 bp, Homo sapiens
tgacagcctcttact

SEQ ID NO: 374026 - DNA, 15 bp, Homo sapiens
atgacagcctcttac

SEQ ID NO: 374027 - DNA, 15 bp, Homo sapiens
catgacagcctctta

SEQ ID NO: 374028 - DNA, 15 bp, Homo sapiens
ccatgacagcctctt

SEQ ID NO: 374029 - DNA, 15 bp, Homo sapiens
gccatgacagcctct

SEQ ID NO: 374030 - DNA, 15 bp, Homo sapiens
agccatgacagcctc

SEQ ID NO: 374031 - DNA, 15 bp, Homo sapiens
aagccatgacagcct

SEQ ID NO: 374032 - DNA, 15 bp, Homo sapiens
caagccatgacagcc

SEQ ID NO: 374033 - DNA, 15 bp, Homo sapiens
ccaagccatgacagc

SEQ ID NO: 374034 - DNA, 15 bp, Homo sapiens
tccaagccatgacag

SEQ ID NO: 374035 - DNA, 15 bp, Homo sapiens
gtccaagccatgaca

SEQ ID NO: 374036 - DNA, 15 bp, Homo sapiens
agtccaagccatgac

SEQ ID NO: 374037 - DNA, 15 bp, Homo sapiens
tagtccaagccatga

SEQ ID NO: 374038 - DNA, 15 bp, Homo sapiens
ctagtccaagccatg

SEQ ID NO: 374039 - DNA, 15 bp, Homo sapiens
cctagtccaagccat

SEQ ID NO: 374040 - DNA, 15 bp, Homo sapiens
tcctagtccaagcca

SEQ ID NO: 374041 - DNA, 15 bp, Homo sapiens
atcctagtccaagcc

SEQ ID NO: 374042 - DNA, 15 bp, Homo sapiens
tatcctagtccaagc

SEQ ID NO: 374043 - DNA, 15 bp, Homo sapiens
ctatcctagtccaag

SEQ ID NO: 374044 - DNA, 15 bp, Homo sapiens
tctatcctagtccaa

SEQ ID NO: 374045 - DNA, 15 bp, Homo sapiens
ctctatcctagtcca

SEQ ID NO: 374046 - DNA, 15 bp, Homo sapiens
gctctatcctagtcc

SEQ ID NO: 374047 - DNA, 15 bp, Homo sapiens
agctctatcctagtc

SEQ ID NO: 374048 - DNA, 15 bp, Homo sapiens
cagctctatcctagt

SEQ ID NO: 374049 - DNA, 15 bp, Homo sapiens
ccagctctatcctag

SEQ ID NO: 374050 - DNA, 15 bp, Homo sapiens
accagctctatccta

SEQ ID NO: 374051 - DNA, 15 bp, Homo sapiens
caccagctctatcct

SEQ ID NO: 374052 - DNA, 15 bp, Homo sapiens
acaccagctctatcc

SEQ ID NO: 374053 - DNA, 15 bp, Homo sapiens
aacaccagctctatc

SEQ ID NO: 374054 - DNA, 15 bp, Homo sapiens
caacaccagctctat

SEQ ID NO: 374055 - DNA, 15 bp, Homo sapiens
ccaacaccagctcta

SEQ ID NO: 374056 - DNA, 15 bp, Homo sapiens
cccaacaccagctct

SEQ ID NO: 374057 - DNA, 15 bp, Homo sapiens
tcccaacaccagctc

SEQ ID NO: 374058 - DNA, 15 bp, Homo sapiens
atcccaacaccagct

SEQ ID NO: 374059 - DNA, 15 bp, Homo sapiens
gatcccaacaccagc

SEQ ID NO: 374060 - DNA, 15 bp, Homo sapiens
cgatcccaacaccag

SEQ ID NO: 374061 - DNA, 15 bp, Homo sapiens
tcgatcccaacacca

SEQ ID NO: 374062 - DNA, 15 bp, Homo sapiens
ctcgatcccaacacc

SEQ ID NO: 374063 - DNA, 15 bp, Homo sapiens
cctcgatcccaacac

SEQ ID NO: 374064 - DNA, 15 bp, Homo sapiens
ccctcgatcccaaca

SEQ ID NO: 374065 - DNA, 15 bp, Homo sapiens
tccctcgatcccaac

SEQ ID NO: 374066 - DNA, 15 bp, Homo sapiens
ctccctcgatcccaa

SEQ ID NO: 374067 - DNA, 15 bp, Homo sapiens
cctccctcgatccca

SEQ ID NO: 374068 - DNA, 15 bp, Homo sapiens
acctccctcgatccc

SEQ ID NO: 374069 - DNA, 15 bp, Homo sapiens
cacctccctcgatcc

SEQ ID NO: 374070 - DNA, 15 bp, Homo sapiens
ccacctccctcgatc

SEQ ID NO: 374071 - DNA, 15 bp, Homo sapiens
tccacctccctcgat

SEQ ID NO: 374072 - DNA, 15 bp, Homo sapiens
atccacctccctcga

SEQ ID NO: 374073 - DNA, 15 bp, Homo sapiens
catccacctccctcg

SEQ ID NO: 374074 - DNA, 15 bp, Homo sapiens
ccatccacctccctc

SEQ ID NO: 374075 - DNA, 15 bp, Homo sapiens
tccatccacctccct

SEQ ID NO: 374076 - DNA, 15 bp, Homo sapiens
ctccatccacctccc

SEQ ID NO: 374077 - DNA, 15 bp, Homo sapiens
gctccatccacctcc

SEQ ID NO: 374078 - DNA, 15 bp, Homo sapiens
agctccatccacctc

SEQ ID NO: 374079 - DNA, 15 bp, Homo sapiens
gagctccatccacct

SEQ ID NO: 374080 - DNA, 15 bp, Homo sapiens
tgagctccatccacc

SEQ ID NO: 374081 - DNA, 15 bp, Homo sapiens
ctgagctccatccac

SEQ ID NO: 374082 - DNA, 15 bp, Homo sapiens
actgagctccatcca

SEQ ID NO: 374083 - DNA, 15 bp, Homo sapiens
cactgagctccatcc

SEQ ID NO: 374084 - DNA, 15 bp, Homo sapiens
ccactgagctccatc

SEQ ID NO: 374085 - DNA, 15 bp, Homo sapiens
accactgagctccat

SEQ ID NO: 374086 - DNA, 15 bp, Homo sapiens
taccactgagctcca

SEQ ID NO: 374087 - DNA, 15 bp, Homo sapiens
ataccactgagctcc

SEQ ID NO: 374088 - DNA, 15 bp, Homo sapiens
aataccactgagctc

SEQ ID NO: 374089 - DNA, 15 bp, Homo sapiens
caataccactgagct

SEQ ID NO: 374090 - DNA, 15 bp, Homo sapiens
ccaataccactgagc

SEQ ID NO: 374091 - DNA, 15 bp, Homo sapiens
cccaataccactgag

SEQ ID NO: 374092 - DNA, 15 bp, Homo sapiens
gcccaataccactga

SEQ ID NO: 374093 - DNA, 15 bp, Homo sapiens
tgcccaataccactg

SEQ ID NO: 374094 - DNA, 15 bp, Homo sapiens
ctgcccaataccact

SEQ ID NO: 374095 - DNA, 15 bp, Homo sapiens
actgcccaataccac

SEQ ID NO: 374096 - DNA, 15 bp, Homo sapiens
tactgcccaatacca

SEQ ID NO: 374097 - DNA, 15 bp, Homo sapiens
gtactgcccaatacc

SEQ ID NO: 374098 - DNA, 15 bp, Homo sapiens
tgtactgcccaatac

SEQ ID NO: 374099 - DNA, 15 bp, Homo sapiens
ttgtactgcccaata

SEQ ID NO: 374100 - DNA, 15 bp, Homo sapiens
attgtactgcccaat

SEQ ID NO: 374101 - DNA, 15 bp, Homo sapiens
aattgtactgcccaa

SEQ ID NO: 374102 - DNA, 15 bp, Homo sapiens
taattgtactgccca

SEQ ID NO: 374103 - DNA, 15 bp, Homo sapiens
ttaattgtactgccc

SEQ ID NO: 374104 - DNA, 15 bp, Homo sapiens
attaattgtactgcc

SEQ ID NO: 374105 - DNA, 15 bp, Homo sapiens
tattaattgtactgc

SEQ ID NO: 374106 - DNA, 15 bp, Homo sapiens
ctattaattgtactg

SEQ ID NO: 374107 - DNA, 15 bp, Homo sapiens
cctattaattgtact

SEQ ID NO: 374108 - DNA, 15 bp, Homo sapiens
tcctattaattgtac

SEQ ID NO: 374109 - DNA, 15 bp, Homo sapiens
gtcctattaattgta

SEQ ID NO: 374110 - DNA, 15 bp, Homo sapiens
agtcctattaattgt

SEQ ID NO: 374111 - DNA, 15 bp, Homo sapiens
aagtcctattaattg

SEQ ID NO: 374112 - DNA, 15 bp, Homo sapiens
caagtcctattaatt

SEQ ID NO: 374113 - DNA, 15 bp, Homo sapiens
ccaagtcctattaat

SEQ ID NO: 374114 - DNA, 15 bp, Homo sapiens
cccaagtcctattaa

SEQ ID NO: 374115 - DNA, 15 bp, Homo sapiens
tcccaagtcctatta

SEQ ID NO: 374116 - DNA, 15 bp, Homo sapiens
ttcccaagtcctatt

SEQ ID NO: 374117 - DNA, 15 bp, Homo sapiens
tttcccaagtcctat

SEQ ID NO: 374118 - DNA, 15 bp, Homo sapiens
ttttcccaagtccta

SEQ ID NO: 374119 - DNA, 15 bp, Homo sapiens
cttttcccaagtcct

SEQ ID NO: 374120 - DNA, 15 bp, Homo sapiens
tcttttcccaagtcc

SEQ ID NO: 374121 - DNA, 15 bp, Homo sapiens
atcttttcccaagtc

SEQ ID NO: 374122 - DNA, 15 bp, Homo sapiens
aatcttttcccaagt

SEQ ID NO: 374123 - DNA, 15 bp, Homo sapiens
caatcttttcccaag

SEQ ID NO: 374124 - DNA, 15 bp, Homo sapiens
tcaatcttttcccaa

SEQ ID NO: 374125 - DNA, 15 bp, Homo sapiens
ctcaatcttttccca

SEQ ID NO: 374126 - DNA, 15 bp, Homo sapiens
gctcaatcttttccc

SEQ ID NO: 374127 - DNA, 15 bp, Homo sapiens
tgctcaatcttttcc

SEQ ID NO: 374128 - DNA, 15 bp, Homo sapiens
atgctcaatcttttc

SEQ ID NO: 374129 - DNA, 15 bp, Homo sapiens
catgctcaatctttt

SEQ ID NO: 374130 - DNA, 15 bp, Homo sapiens
tcatgctcaatcttt

SEQ ID NO: 374131 - DNA, 15 bp, Homo sapiens
ctcatgctcaatctt

SEQ ID NO: 374132 - DNA, 15 bp, Homo sapiens
gctcatgctcaatct

SEQ ID NO: 374133 - DNA, 15 bp, Homo sapiens
tgctcatgctcaatc

SEQ ID NO: 374134 - DNA, 15 bp, Homo sapiens
ctgctcatgctcaat

SEQ ID NO: 374135 - DNA, 15 bp, Homo sapiens
tctgctcatgctcaa

SEQ ID NO: 374136 - DNA, 15 bp, Homo sapiens
ttctgctcatgctca

SEQ ID NO: 374137 - DNA, 15 bp, Homo sapiens
cttctgctcatgctc

SEQ ID NO: 374138 - DNA, 15 bp, Homo sapiens
ccttctgctcatgct

SEQ ID NO: 374139 - DNA, 15 bp, Homo sapiens
accttctgctcatgc

SEQ ID NO: 374140 - DNA, 15 bp, Homo sapiens
caccttctgctcatg

SEQ ID NO: 374141 - DNA, 15 bp, Homo sapiens
ccaccttctgctcat

SEQ ID NO: 374142 - DNA, 15 bp, Homo sapiens
tccaccttctgctca

SEQ ID NO: 374143 - DNA, 15 bp, Homo sapiens
ctccaccttctgctc

SEQ ID NO: 374144 - DNA, 15 bp, Homo sapiens
tctccaccttctgct

SEQ ID NO: 374145 - DNA, 15 bp, Homo sapiens
ctctccaccttctgc

SEQ ID NO: 374146 - DNA, 15 bp, Homo sapiens
cctctccaccttctg

SEQ ID NO: 374147 - DNA, 15 bp, Homo sapiens
tcctctccaccttct

SEQ ID NO: 374148 - DNA, 15 bp, Homo sapiens
gtcctctccaccttc

SEQ ID NO: 374149 - DNA, 15 bp, Homo sapiens
tgtcctctccacctt

SEQ ID NO: 374150 - DNA, 15 bp, Homo sapiens
ctgtcctctccacct

SEQ ID NO: 374151 - DNA, 15 bp, Homo sapiens
actgtcctctccacc

SEQ ID NO: 374152 - DNA, 15 bp, Homo sapiens
cactgtcctctccac

SEQ ID NO: 374153 - DNA, 15 bp, Homo sapiens
ccactgtcctctcca

SEQ ID NO: 374154 - DNA, 15 bp, Homo sapiens
cccactgtcctctcc

SEQ ID NO: 374155 - DNA, 15 bp, Homo sapiens
acccactgtcctctc

SEQ ID NO: 374156 - DNA, 15 bp, Homo sapiens
gacccactgtcctct

SEQ ID NO: 374157 - DNA, 15 bp, Homo sapiens
tgacccactgtcctc

SEQ ID NO: 374158 - DNA, 15 bp, Homo sapiens
ttgacccactgtcct

SEQ ID NO: 374159 - DNA, 15 bp, Homo sapiens
tttgacccactgtcc

SEQ ID NO: 374160 - DNA, 15 bp, Homo sapiens
ctttgacccactgtc

SEQ ID NO: 374161 - DNA, 15 bp, Homo sapiens
tctttgacccactgt

SEQ ID NO: 374162 - DNA, 15 bp, Homo sapiens
atctttgacccactg

SEQ ID NO: 374163 - DNA, 15 bp, Homo sapiens
catctttgacccact

SEQ ID NO: 374164 - DNA, 15 bp, Homo sapiens
tcatctttgacccac

SEQ ID NO: 374165 - DNA, 15 bp, Homo sapiens
gtcatctttgaccca

SEQ ID NO: 374166 - DNA, 15 bp, Homo sapiens
agtcatctttgaccc

SEQ ID NO: 374167 - DNA, 15 bp, Homo sapiens
cagtcatctttgacc

SEQ ID NO: 374168 - DNA, 15 bp, Homo sapiens
gcagtcatctttgac

SEQ ID NO: 374169 - DNA, 15 bp, Homo sapiens
ggcagtcatctttga

SEQ ID NO: 374170 - DNA, 15 bp, Homo sapiens
tggcagtcatctttg

SEQ ID NO: 374171 - DNA, 15 bp, Homo sapiens
ctggcagtcatcttt

SEQ ID NO: 374172 - DNA, 15 bp, Homo sapiens
cctggcagtcatctt

SEQ ID NO: 374173 - DNA, 15 bp, Homo sapiens
gcctggcagtcatct

SEQ ID NO: 374174 - DNA, 15 bp, Homo sapiens
ggcctggcagtcatc

SEQ ID NO: 374175 - DNA, 15 bp, Homo sapiens
aggcctggcagtcat

SEQ ID NO: 374176 - DNA, 15 bp, Homo sapiens
caggcctggcagtca

SEQ ID NO: 374177 - DNA, 15 bp, Homo sapiens
acaggcctggcagtc

SEQ ID NO: 374178 - DNA, 15 bp, Homo sapiens
gacaggcctggcagt

SEQ ID NO: 374179 - DNA, 15 bp, Homo sapiens
tgacaggcctggcag

SEQ ID NO: 374180 - DNA, 15 bp, Homo sapiens
gtgacaggcctggca

SEQ ID NO: 374181 - DNA, 15 bp, Homo sapiens
agtgacaggcctggc

SEQ ID NO: 374182 - DNA, 15 bp, Homo sapiens
cagtgacaggcctgg

SEQ ID NO: 374183 - DNA, 15 bp, Homo sapiens
tcagtgacaggcctg

SEQ ID NO: 374184 - DNA, 15 bp, Homo sapiens
ctcagtgacaggcct

SEQ ID NO: 374185 - DNA, 15 bp, Homo sapiens
tctcagtgacaggcc

SEQ ID NO: 374186 - DNA, 15 bp, Homo sapiens
gtctcagtgacaggc

SEQ ID NO: 374187 - DNA, 15 bp, Homo sapiens
agtctcagtgacagg

SEQ ID NO: 374188 - DNA, 15 bp, Homo sapiens
cagtctcagtgacag

SEQ ID NO: 374189 - DNA, 15 bp, Homo sapiens
tcagtctcagtgaca

SEQ ID NO: 374190 - DNA, 15 bp, Homo sapiens
ttcagtctcagtgac

SEQ ID NO: 374191 - DNA, 15 bp, Homo sapiens
cttcagtctcagtga

SEQ ID NO: 374192 - DNA, 15 bp, Homo sapiens
acttcagtctcagtg

SEQ ID NO: 374193 - DNA, 15 bp, Homo sapiens
gacttcagtctcagt

SEQ ID NO: 374194 - DNA, 15 bp, Homo sapiens
ggacttcagtctcag

SEQ ID NO: 374195 - DNA, 15 bp, Homo sapiens
aggacttcagtctca

SEQ ID NO: 374196 - DNA, 15 bp, Homo sapiens
aaggacttcagtctc

SEQ ID NO: 374197 - DNA, 15 bp, Homo sapiens
caaggacttcagtct

SEQ ID NO: 374198 - DNA, 15 bp, Homo sapiens
ccaaggacttcagtc

SEQ ID NO: 374199 - DNA, 15 bp, Homo sapiens
cccaaggacttcagt

SEQ ID NO: 374200 - DNA, 15 bp, Homo sapiens
tcccaaggacttcag

SEQ ID NO: 374201 - DNA, 15 bp, Homo sapiens
ctcccaaggacttca

SEQ ID NO: 374202 - DNA, 15 bp, Homo sapiens
tctcccaaggacttc

SEQ ID NO: 374203 - DNA, 15 bp, Homo sapiens
ctctcccaaggactt

SEQ ID NO: 374204 - DNA, 15 bp, Homo sapiens
tctctcccaaggact

SEQ ID NO: 374205 - DNA, 15 bp, Homo sapiens
ttctctcccaaggac

SEQ ID NO: 374206 - DNA, 15 bp, Homo sapiens
gttctctcccaagga

SEQ ID NO: 374207 - DNA, 15 bp, Homo sapiens
ggttctctcccaagg

SEQ ID NO: 374208 - DNA, 15 bp, Homo sapiens
tggttctctcccaag

SEQ ID NO: 374209 - DNA, 15 bp, Homo sapiens
ctggttctctcccaa

SEQ ID NO: 374210 - DNA, 15 bp, Homo sapiens
cctggttctctccca

SEQ ID NO: 374211 - DNA, 15 bp, Homo sapiens
gcctggttctctccc

SEQ ID NO: 374212 - DNA, 15 bp, Homo sapiens
tgcctggttctctcc

SEQ ID NO: 374213 - DNA, 15 bp, Homo sapiens
atgcctggttctctc

SEQ ID NO: 374214 - DNA, 15 bp, Homo sapiens
catgcctggttctct

SEQ ID NO: 374215 - DNA, 15 bp, Homo sapiens
ccatgcctggttctc

SEQ ID NO: 374216 - DNA, 15 bp, Homo sapiens
tccatgcctggttct

SEQ ID NO: 374217 - DNA, 15 bp, Homo sapiens
ctccatgcctggttc

SEQ ID NO: 374218 - DNA, 15 bp, Homo sapiens
cctccatgcctggtt

SEQ ID NO: 374219 - DNA, 15 bp, Homo sapiens
gcctccatgcctggt

SEQ ID NO: 374220 - DNA, 15 bp, Homo sapiens
tgcctccatgcctgg

SEQ ID NO: 374221 - DNA, 15 bp, Homo sapiens
ttgcctccatgcctg

SEQ ID NO: 374222 - DNA, 15 bp, Homo sapiens
cttgcctccatgcct

SEQ ID NO: 374223 - DNA, 15 bp, Homo sapiens
ccttgcctccatgcc

SEQ ID NO: 374224 - DNA, 15 bp, Homo sapiens
gccttgcctccatgc

SEQ ID NO: 374225 - DNA, 15 bp, Homo sapiens
ggccttgcctccatg

SEQ ID NO: 374226 - DNA, 15 bp, Homo sapiens
aggccttgcctccat

SEQ ID NO: 374227 - DNA, 15 bp, Homo sapiens
caggccttgcctcca

SEQ ID NO: 374228 - DNA, 15 bp, Homo sapiens
ccaggccttgcctcc

SEQ ID NO: 374229 - DNA, 15 bp, Homo sapiens
gccaggccttgcctc

SEQ ID NO: 374230 - DNA, 15 bp, Homo sapiens
agccaggccttgcct

SEQ ID NO: 374231 - DNA, 15 bp, Homo sapiens
cagccaggccttgcc

SEQ ID NO: 374232 - DNA, 15 bp, Homo sapiens
ccagccaggccttgc

SEQ ID NO: 374233 - DNA, 15 bp, Homo sapiens
tccagccaggccttg

SEQ ID NO: 374234 - DNA, 15 bp, Homo sapiens
ttccagccaggcctt

SEQ ID NO: 374235 - DNA, 15 bp, Homo sapiens
cttccagccaggcct

SEQ ID NO: 374236 - DNA, 15 bp, Homo sapiens
ccttccagccaggcc

SEQ ID NO: 374237 - DNA, 15 bp, Homo sapiens
tccttccagccaggc

SEQ ID NO: 374238 - DNA, 15 bp, Homo sapiens
ctccttccagccagg

SEQ ID NO: 374239 - DNA, 15 bp, Homo sapiens
cctccttccagccag

SEQ ID NO: 374240 - DNA, 15 bp, Homo sapiens
ccctccttccagcca

SEQ ID NO: 374241 - DNA, 15 bp, Homo sapiens
tccctccttccagcc

SEQ ID NO: 374242 - DNA, 15 bp, Homo sapiens
ctccctccttccagc

SEQ ID NO: 374243 - DNA, 15 bp, Homo sapiens
cctccctccttccag

SEQ ID NO: 374244 - DNA, 15 bp, Homo sapiens
tcctccctccttcca

SEQ ID NO: 374245 - DNA, 15 bp, Homo sapiens
ctcctccctccttcc

SEQ ID NO: 374246 - DNA, 15 bp, Homo sapiens
actcctccctccttc

SEQ ID NO: 374247 - DNA, 15 bp, Homo sapiens
aactcctccctcctt

SEQ ID NO: 374248 - DNA, 15 bp, Homo sapiens
taactcctccctcct

SEQ ID NO: 374249 - DNA, 15 bp, Homo sapiens
ctaactcctccctcc

SEQ ID NO: 374250 - DNA, 15 bp, Homo sapiens
actaactcctccctc

SEQ ID NO: 374251 - DNA, 15 bp, Homo sapiens
cactaactcctccct

SEQ ID NO: 374252 - DNA, 15 bp, Homo sapiens
ccactaactcctccc

SEQ ID NO: 374253 - DNA, 15 bp, Homo sapiens
gccactaactcctcc

SEQ ID NO: 374254 - DNA, 15 bp, Homo sapiens
tgccactaactcctc

SEQ ID NO: 374255 - DNA, 15 bp, Homo sapiens
ctgccactaactcct

SEQ ID NO: 374256 - DNA, 15 bp, Homo sapiens
tctgccactaactcc

SEQ ID NO: 374257 - DNA, 15 bp, Homo sapiens
ctctgccactaactc

SEQ ID NO: 374258 - DNA, 15 bp, Homo sapiens
tctctgccactaact

SEQ ID NO: 374259 - DNA, 15 bp, Homo sapiens
ctctctgccactaac

SEQ ID NO: 374260 - DNA, 15 bp, Homo sapiens
tctctctgccactaa

SEQ ID NO: 374261 - DNA, 15 bp, Homo sapiens
ctctctctgccacta

SEQ ID NO: 374262 - DNA, 15 bp, Homo sapiens
cctctctctgccact

SEQ ID NO: 374263 - DNA, 15 bp, Homo sapiens
tcctctctctgccac

SEQ ID NO: 374264 - DNA, 15 bp, Homo sapiens
gtcctctctctgcca

SEQ ID NO: 374265 - DNA, 15 bp, Homo sapiens
tgtcctctctctgcc

SEQ ID NO: 374266 - DNA, 15 bp, Homo sapiens
ctgtcctctctctgc

SEQ ID NO: 374267 - DNA, 15 bp, Homo sapiens
actgtcctctctctg

SEQ ID NO: 374268 - DNA, 15 bp, Homo sapiens
cactgtcctctctct

SEQ ID NO: 374269 - DNA, 15 bp, Homo sapiens
ccactgtcctctctc

SEQ ID NO: 374270 - DNA, 15 bp, Homo sapiens
cccactgtcctctct

SEQ ID NO: 374271 - DNA, 15 bp, Homo sapiens
gcccactgtcctctc

SEQ ID NO: 374272 - DNA, 15 bp, Homo sapiens
agcccactgtcctct

SEQ ID NO: 374273 - DNA, 15 bp, Homo sapiens
cagcccactgtcctc

SEQ ID NO: 374274 - DNA, 15 bp, Homo sapiens
ccagcccactgtcct

SEQ ID NO: 374275 - DNA, 15 bp, Homo sapiens
gccagcccactgtcc

SEQ ID NO: 374276 - DNA, 15 bp, Homo sapiens
ggccagcccactgtc

SEQ ID NO: 374277 - DNA, 15 bp, Homo sapiens
gggccagcccactgt

SEQ ID NO: 374278 - DNA, 15 bp, Homo sapiens
tgggccagcccactg

SEQ ID NO: 374279 - DNA, 15 bp, Homo sapiens
ctgggccagcccact

SEQ ID NO: 374280 - DNA, 15 bp, Homo sapiens
cctgggccagcccac

SEQ ID NO: 374281 - DNA, 15 bp, Homo sapiens
ccctgggccagccca

SEQ ID NO: 374282 - DNA, 15 bp, Homo sapiens
tccctgggccagccc

SEQ ID NO: 374283 - DNA, 15 bp, Homo sapiens
atccctgggccagcc

SEQ ID NO: 374284 - DNA, 15 bp, Homo sapiens
gatccctgggccagc

SEQ ID NO: 374285 - DNA, 15 bp, Homo sapiens
tgatccctgggccag

SEQ ID NO: 374286 - DNA, 15 bp, Homo sapiens
ttgatccctgggcca

SEQ ID NO: 374287 - DNA, 15 bp, Homo sapiens
tttgatccctgggcc

SEQ ID NO: 374288 - DNA, 15 bp, Homo sapiens
gtttgatccctgggc

SEQ ID NO: 374289 - DNA, 15 bp, Homo sapiens
tgtttgatccctggg

SEQ ID NO: 374290 - DNA, 15 bp, Homo sapiens
gtgtttgatccctgg

SEQ ID NO: 374291 - DNA, 15 bp, Homo sapiens
tgtgtttgatccctg

SEQ ID NO: 374292 - DNA, 15 bp, Homo sapiens
ctgtgtttgatccct

SEQ ID NO: 374293 - DNA, 15 bp, Homo sapiens
gctgtgtttgatccc

SEQ ID NO: 374294 - DNA, 15 bp, Homo sapiens
agctgtgtttgatcc

SEQ ID NO: 374295 - DNA, 15 bp, Homo sapiens
aagctgtgtttgatc

SEQ ID NO: 374296 - DNA, 15 bp, Homo sapiens
aaagctgtgtttgat

SEQ ID NO: 374297 - DNA, 15 bp, Homo sapiens
caaagctgtgtttga

SEQ ID NO: 374298 - DNA, 15 bp, Homo sapiens
ccaaagctgtgtttg

SEQ ID NO: 374299 - DNA, 15 bp, Homo sapiens
accaaagctgtgttt

SEQ ID NO: 374300 - DNA, 15 bp, Homo sapiens
aaccaaagctgtgtt

SEQ ID NO: 374301 - DNA, 15 bp, Homo sapiens
aaaccaaagctgtgt

SEQ ID NO: 374302 - DNA, 15 bp, Homo sapiens
gaaaccaaagctgtg

SEQ ID NO: 374303 - DNA, 15 bp, Homo sapiens
agaaaccaaagctgt

SEQ ID NO: 374304 - DNA, 15 bp, Homo sapiens
aagaaaccaaagctg

SEQ ID NO: 374305 - DNA, 15 bp, Homo sapiens
aaagaaaccaaagct

SEQ ID NO: 374306 - DNA, 15 bp, Homo sapiens
aaaagaaaccaaagc

SEQ ID NO: 374307 - DNA, 15 bp, Homo sapiens
taaaagaaaccaaag

SEQ ID NO: 374308 - DNA, 15 bp, Homo sapiens
ataaaagaaaccaaa

SEQ ID NO: 374309 - DNA, 15 bp, Homo sapiens
tataaaagaaaccaa

SEQ ID NO: 374310 - DNA, 15 bp, Homo sapiens
ttataaaagaaacca

SEQ ID NO: 374311 - DNA, 15 bp, Homo sapiens
gttataaaagaaacc

SEQ ID NO: 374312 - DNA, 15 bp, Homo sapiens
agttataaaagaaac

SEQ ID NO: 374313 - DNA, 15 bp, Homo sapiens
aagttataaaagaaa

SEQ ID NO: 374314 - DNA, 15 bp, Homo sapiens
caagttataaaagaa

SEQ ID NO: 374315 - DNA, 15 bp, Homo sapiens
tcaagttataaaaga

SEQ ID NO: 374316 - DNA, 15 bp, Homo sapiens
atcaagttataaaag

SEQ ID NO: 374317 - DNA, 15 bp, Homo sapiens
catcaagttataaaa

SEQ ID NO: 374318 - DNA, 15 bp, Homo sapiens
acatcaagttataaa

SEQ ID NO: 374319 - DNA, 15 bp, Homo sapiens
cacatcaagttataa

SEQ ID NO: 374320 - DNA, 15 bp, Homo sapiens
gcacatcaagttata

SEQ ID NO: 374321 - DNA, 15 bp, Homo sapiens
tgcacatcaagttat

SEQ ID NO: 374322 - DNA, 15 bp, Homo sapiens
atgcacatcaagtta

SEQ ID NO: 374323 - DNA, 15 bp, Homo sapiens
gatgcacatcaagtt

SEQ ID NO: 374324 - DNA, 15 bp, Homo sapiens
agatgcacatcaagt

SEQ ID NO: 374325 - DNA, 15 bp, Homo sapiens
tagatgcacatcaag

SEQ ID NO: 374326 - DNA, 15 bp, Homo sapiens
ctagatgcacatcaa

SEQ ID NO: 374327 - DNA, 15 bp, Homo sapiens
gctagatgcacatca

SEQ ID NO: 374328 - DNA, 15 bp, Homo sapiens
tgctagatgcacatc

SEQ ID NO: 374329 - DNA, 15 bp, Homo sapiens
ttgctagatgcacat

SEQ ID NO: 374330 - DNA, 15 bp, Homo sapiens
attgctagatgcaca

SEQ ID NO: 374331 - DNA, 15 bp, Homo sapiens
gattgctagatgcac

SEQ ID NO: 374332 - DNA, 15 bp, Homo sapiens
tgattgctagatgca

SEQ ID NO: 374333 - DNA, 15 bp, Homo sapiens
ctgattgctagatgc

SEQ ID NO: 374334 - DNA, 15 bp, Homo sapiens
cctgattgctagatg

SEQ ID NO: 374335 - DNA, 15 bp, Homo sapiens
gcctgattgctagat

SEQ ID NO: 374336 - DNA, 15 bp, Homo sapiens
tgcctgattgctaga

SEQ ID NO: 374337 - DNA, 15 bp, Homo sapiens
atgcctgattgctag

SEQ ID NO: 374338 - DNA, 15 bp, Homo sapiens
aatgcctgattgcta

SEQ ID NO: 374339 - DNA, 15 bp, Homo sapiens
aaatgcctgattgct

SEQ ID NO: 374340 - DNA, 15 bp, Homo sapiens
caaatgcctgattgc

SEQ ID NO: 374341 - DNA, 15 bp, Homo sapiens
acaaatgcctgattg

SEQ ID NO: 374342 - DNA, 15 bp, Homo sapiens
aacaaatgcctgatt

SEQ ID NO: 374343 - DNA, 15 bp, Homo sapiens
aaacaaatgcctgat

SEQ ID NO: 374344 - DNA, 15 bp, Homo sapiens
aaaacaaatgcctga

SEQ ID NO: 374345 - DNA, 15 bp, Homo sapiens
aaaaacaaatgcctg

SEQ ID NO: 374346 - DNA, 15 bp, Homo sapiens
aaaaaacaaatgcct

SEQ ID NO: 374347 - DNA, 15 bp, Homo sapiens
gaaaaaacaaatgcc

SEQ ID NO: 374348 - DNA, 15 bp, Homo sapiens
tgaaaaaacaaatgc

SEQ ID NO: 374349 - DNA, 15 bp, Homo sapiens
gtgaaaaaacaaatg

SEQ ID NO: 374350 - DNA, 15 bp, Homo sapiens
agtgaaaaaacaaat

SEQ ID NO: 374351 - DNA, 15 bp, Homo sapiens
aagtgaaaaaacaaa

SEQ ID NO: 374352 - DNA, 15 bp, Homo sapiens
caaaagtgaaaaaac

SEQ ID NO: 374353 - DNA, 15 bp, Homo sapiens
gcaaaagtgaaaaaa

SEQ ID NO: 374354 - DNA, 15 bp, Homo sapiens
tgcaaaagtgaaaaa

SEQ ID NO: 374355 - DNA, 15 bp, Homo sapiens
ttgcaaaagtgaaaa

SEQ ID NO: 374356 - DNA, 15 bp, Homo sapiens
gttgcaaaagtgaaa

SEQ ID NO: 374357 - DNA, 15 bp, Homo sapiens
ggttgcaaaagtgaa

SEQ ID NO: 374358 - DNA, 15 bp, Homo sapiens
cggttgcaaaagtga

SEQ ID NO: 374359 - DNA, 15 bp, Homo sapiens
tcggttgcaaaagtg

SEQ ID NO: 374360 - DNA, 15 bp, Homo sapiens
ttcggttgcaaaagt

SEQ ID NO: 374361 - DNA, 15 bp, Homo sapiens
tttcggttgcaaaag

SEQ ID NO: 374362 - DNA, 15 bp, Homo sapiens
ttttcggttgcaaaa

SEQ ID NO: 374363 - DNA, 15 bp, Homo sapiens
tttttcggttgcaaa

SEQ ID NO: 374364 - DNA, 15 bp, Homo sapiens
gtttttcggttgcaa

SEQ ID NO: 374365 - DNA, 15 bp, Homo sapiens
tgtttttcggttgca

SEQ ID NO: 374366 - DNA, 15 bp, Homo sapiens
ttgtttttcggttgc

SEQ ID NO: 374367 - DNA, 15 bp, Homo sapiens
tttgtttttcggttg

SEQ ID NO: 374368 - DNA, 15 bp, Homo sapiens
atttgtttttcggtt

SEQ ID NO: 374369 - DNA, 15 bp, Homo sapiens
tatttgtttttcggt

SEQ ID NO: 374370 - DNA, 15 bp, Homo sapiens
ttatttgtttttcgg

SEQ ID NO: 374371 - DNA, 15 bp, Homo sapiens
gttatttgtttttcg

SEQ ID NO: 374372 - DNA, 15 bp, Homo sapiens
cgttatttgtttttc

SEQ ID NO: 374373 - DNA, 15 bp, Homo sapiens
tcgttatttgttttt

SEQ ID NO: 374374 - DNA, 15 bp, Homo sapiens
atcgttatttgtttt

SEQ ID NO: 374375 - DNA, 15 bp, Homo sapiens
aatcgttatttgttt

SEQ ID NO: 374376 - DNA, 15 bp, Homo sapiens
taatcgttatttgtt

SEQ ID NO: 374377 - DNA, 15 bp, Homo sapiens
ttaatcgttatttgt

SEQ ID NO: 374378 - DNA, 15 bp, Homo sapiens
tttaatcgttatttg

SEQ ID NO: 374379 - DNA, 15 bp, Homo sapiens
ttttaatcgttattt

SEQ ID NO: 374380 - DNA, 15 bp, Homo sapiens
tttttaatcgttatt

SEQ ID NO: 374381 - DNA, 15 bp, Homo sapiens
ttttttaatcgttat

SEQ ID NO: 374382 - DNA, 15 bp, Homo sapiens
attttttaatcgtta

SEQ ID NO: 374383 - DNA, 15 bp, Homo sapiens
cattttttaatcgtt

SEQ ID NO: 374384 - DNA, 15 bp, Homo sapiens
ccattttttaatcgt

SEQ ID NO: 374385 - DNA, 15 bp, Homo sapiens
cccattttttaatcg

SEQ ID NO: 374386 - DNA, 15 bp, Homo sapiens
acccattttttaatc

SEQ ID NO: 374387 - DNA, 15 bp, Homo sapiens
gacccattttttaat

SEQ ID NO: 374388 - DNA, 15 bp, Homo sapiens
ggacccattttttaa

SEQ ID NO: 374389 - DNA, 15 bp, Homo sapiens
gggacccatttttta

SEQ ID NO: 374390 - DNA, 15 bp, Homo sapiens
tgggacccatttttt

SEQ ID NO: 374391 - DNA, 15 bp, Homo sapiens
ttgggacccattttt

SEQ ID NO: 374392 - DNA, 15 bp, Homo sapiens
gttgggacccatttt

SEQ ID NO: 374393 - DNA, 15 bp, Homo sapiens
tgttgggacccattt

SEQ ID NO: 374394 - DNA, 15 bp, Homo sapiens
atgttgggacccatt

SEQ ID NO: 374395 - DNA, 15 bp, Homo sapiens
aatgttgggacccat

SEQ ID NO: 374396 - DNA, 15 bp, Homo sapiens
taatgttgggaccca

SEQ ID NO: 374397 - DNA, 15 bp, Homo sapiens
ataatgttgggaccc

SEQ ID NO: 374398 - DNA, 15 bp, Homo sapiens
cataatgttgggacc

SEQ ID NO: 374399 - DNA, 15 bp, Homo sapiens
ccataatgttgggac

SEQ ID NO: 374400 - DNA, 15 bp, Homo sapiens
tccataatgttggga

SEQ ID NO: 374401 - DNA, 15 bp, Homo sapiens
ctccataatgttggg

SEQ ID NO: 374402 - DNA, 15 bp, Homo sapiens
gctccataatgttgg

SEQ ID NO: 374403 - DNA, 15 bp, Homo sapiens
ggctccataatgttg

SEQ ID NO: 374404 - DNA, 15 bp, Homo sapiens
tggctccataatgtt

SEQ ID NO: 374405 - DNA, 15 bp, Homo sapiens
atggctccataatgt

SEQ ID NO: 374406 - DNA, 15 bp, Homo sapiens
gatggctccataatg

SEQ ID NO: 374407 - DNA, 15 bp, Homo sapiens
agatggctccataat

SEQ ID NO: 374408 - DNA, 15 bp, Homo sapiens
aagatggctccataa

SEQ ID NO: 374409 - DNA, 15 bp, Homo sapiens
aaagatggctccata

SEQ ID NO: 374410 - DNA, 15 bp, Homo sapiens
gaaagatggctccat

SEQ ID NO: 374411 - DNA, 15 bp, Homo sapiens
tgaaagatggctcca

SEQ ID NO: 374412 - DNA, 15 bp, Homo sapiens
gtgaaagatggctcc

SEQ ID NO: 374413 - DNA, 15 bp, Homo sapiens
agtgaaagatggctc

SEQ ID NO: 374414 - DNA, 15 bp, Homo sapiens
cagtgaaagatggct

SEQ ID NO: 374415 - DNA, 15 bp, Homo sapiens
gcagtgaaagatggc

SEQ ID NO: 374416 - DNA, 15 bp, Homo sapiens
tgcagtgaaagatgg

SEQ ID NO: 374417 - DNA, 15 bp, Homo sapiens
ttgcagtgaaagatg

SEQ ID NO: 374418 - DNA, 15 bp, Homo sapiens
tttgcagtgaaagat

SEQ ID NO: 374419 - DNA, 15 bp, Homo sapiens
ttttgcagtgaaaga

SEQ ID NO: 374420 - DNA, 15 bp, Homo sapiens
cttttgcagtgaaag

SEQ ID NO: 374421 - DNA, 15 bp, Homo sapiens
ccttttgcagtgaaa

SEQ ID NO: 374422 - DNA, 15 bp, Homo sapiens
gccttttgcagtgaa

SEQ ID NO: 374423 - DNA, 15 bp, Homo sapiens
tgccttttgcagtga

SEQ ID NO: 374424 - DNA, 15 bp, Homo sapiens
ttgccttttgcagtg

SEQ ID NO: 374425 - DNA, 15 bp, Homo sapiens
tttgccttttgcagt

SEQ ID NO: 374426 - DNA, 15 bp, Homo sapiens
ttttgccttttgcag

SEQ ID NO: 374427 - DNA, 15 bp, Homo sapiens
cttttgccttttgca

SEQ ID NO: 374428 - DNA, 15 bp, Homo sapiens
acttttgccttttgc

SEQ ID NO: 374429 - DNA, 15 bp, Homo sapiens
tacttttgccttttg

SEQ ID NO: 374430 - DNA, 15 bp, Homo sapiens
ctacttttgcctttt

SEQ ID NO: 374431 - DNA, 15 bp, Homo sapiens
cctacttttgccttt

SEQ ID NO: 374432 - DNA, 15 bp, Homo sapiens
gcctacttttgcctt

SEQ ID NO: 374433 - DNA, 15 bp, Homo sapiens
tgcctacttttgcct

SEQ ID NO: 374434 - DNA, 15 bp, Homo sapiens
atgcctacttttgcc

SEQ ID NO: 374435 - DNA, 15 bp, Homo sapiens
aatgcctacttttgc

SEQ ID NO: 374436 - DNA, 15 bp, Homo sapiens
aaatgcctacttttg

SEQ ID NO: 374437 - DNA, 15 bp, Homo sapiens
taaatgcctactttt

SEQ ID NO: 374438 - DNA, 15 bp, Homo sapiens
ctaaatgcctacttt

SEQ ID NO: 374439 - DNA, 15 bp, Homo sapiens
tctaaatgcctactt

SEQ ID NO: 374440 - DNA, 15 bp, Homo sapiens
ttctaaatgcctact

SEQ ID NO: 374441 - DNA, 15 bp, Homo sapiens
attctaaatgcctac

SEQ ID NO: 374442 - DNA, 15 bp, Homo sapiens
cattctaaatgccta

SEQ ID NO: 374443 - DNA, 15 bp, Homo sapiens
tcattctaaatgcct

SEQ ID NO: 374444 - DNA, 15 bp, Homo sapiens
ctcattctaaatgcc

SEQ ID NO: 374445 - DNA, 15 bp, Homo sapiens
actcattctaaatgc

SEQ ID NO: 374446 - DNA, 15 bp, Homo sapiens
gactcattctaaatg

SEQ ID NO: 374447 - DNA, 15 bp, Homo sapiens
tgactcattctaaat

SEQ ID NO: 374448 - DNA, 15 bp, Homo sapiens
atgactcattctaaa

SEQ ID NO: 374449 - DNA, 15 bp, Homo sapiens
tatgactcattctaa

SEQ ID NO: 374450 - DNA, 15 bp, Homo sapiens
ttatgactcattcta

SEQ ID NO: 374451 - DNA, 15 bp, Homo sapiens
gttatgactcattct

SEQ ID NO: 374452 - DNA, 15 bp, Homo sapiens
ggttatgactcattc

SEQ ID NO: 374453 - DNA, 15 bp, Homo sapiens
aggttatgactcatt

SEQ ID NO: 374454 - DNA, 15 bp, Homo sapiens
caggttatgactcat

SEQ ID NO: 374455 - DNA, 15 bp, Homo sapiens
ccaggttatgactca

SEQ ID NO: 374456 - DNA, 15 bp, Homo sapiens
cccaggttatgactc

SEQ ID NO: 374457 - DNA, 15 bp, Homo sapiens
acccaggttatgact

SEQ ID NO: 374458 - DNA, 15 bp, Homo sapiens
tacccaggttatgac

SEQ ID NO: 374459 - DNA, 15 bp, Homo sapiens
atacccaggttatga

SEQ ID NO: 374460 - DNA, 15 bp, Homo sapiens
aatacccaggttatg

SEQ ID NO: 374461 - DNA, 15 bp, Homo sapiens
taatacccaggttat

SEQ ID NO: 374462 - DNA, 15 bp, Homo sapiens
ataatacccaggtta

SEQ ID NO: 374463 - DNA, 15 bp, Homo sapiens
cataatacccaggtt

SEQ ID NO: 374464 - DNA, 15 bp, Homo sapiens
tcataatacccaggt

SEQ ID NO: 374465 - DNA, 15 bp, Homo sapiens
ttcataatacccagg

SEQ ID NO: 374466 - DNA, 15 bp, Homo sapiens
cttcataatacccag

SEQ ID NO: 374467 - DNA, 15 bp, Homo sapiens
acttcataataccca

SEQ ID NO: 374468 - DNA, 15 bp, Homo sapiens
gacttcataataccc

SEQ ID NO: 374469 - DNA, 15 bp, Homo sapiens
agacttcataatacc

SEQ ID NO: 374470 - DNA, 15 bp, Homo sapiens
aagacttcataatac

SEQ ID NO: 374471 - DNA, 15 bp, Homo sapiens
gaagacttcataata

SEQ ID NO: 374472 - DNA, 15 bp, Homo sapiens
ggaagacttcataat

SEQ ID NO: 374473 - DNA, 15 bp, Homo sapiens
gggaagacttcataa

SEQ ID NO: 374474 - DNA, 15 bp, Homo sapiens
tgggaagacttcata

SEQ ID NO: 374475 - DNA, 15 bp, Homo sapiens
gtgggaagacttcat

SEQ ID NO: 374476 - DNA, 15 bp, Homo sapiens
agtgggaagacttca

SEQ ID NO: 374477 - DNA, 15 bp, Homo sapiens
cagtgggaagacttc

SEQ ID NO: 374478 - DNA, 15 bp, Homo sapiens
tcagtgggaagactt

SEQ ID NO: 374479 - DNA, 15 bp, Homo sapiens
ctcagtgggaagact

SEQ ID NO: 374480 - DNA, 15 bp, Homo sapiens
gctcagtgggaagac

SEQ ID NO: 374481 - DNA, 15 bp, Homo sapiens
tgctcagtgggaaga

SEQ ID NO: 374482 - DNA, 15 bp, Homo sapiens
atgctcagtgggaag

SEQ ID NO: 374483 - DNA, 15 bp, Homo sapiens
gatgctcagtgggaa

SEQ ID NO: 374484 - DNA, 15 bp, Homo sapiens
agatgctcagtggga

SEQ ID NO: 374485 - DNA, 15 bp, Homo sapiens
aagatgctcagtggg

SEQ ID NO: 374486 - DNA, 15 bp, Homo sapiens
aaagatgctcagtgg

SEQ ID NO: 374487 - DNA, 15 bp, Homo sapiens
taaagatgctcagtg

SEQ ID NO: 374488 - DNA, 15 bp, Homo sapiens
ataaagatgctcagt

SEQ ID NO: 374489 - DNA, 15 bp, Homo sapiens
aataaagatgctcag

SEQ ID NO: 374490 - DNA, 15 bp, Homo sapiens
aaataaagatgctca

SEQ ID NO: 374491 - DNA, 15 bp, Homo sapiens
taaataaagatgctc

SEQ ID NO: 374492 - DNA, 15 bp, Homo sapiens
ataaataaagatgct

SEQ ID NO: 374493 - DNA, 15 bp, Homo sapiens
aataaataaagatgc

SEQ ID NO: 374494 - DNA, 15 bp, Homo sapiens
taataaataaagatg

SEQ ID NO: 374495 - DNA, 15 bp, Homo sapiens
ataataaataaagat

SEQ ID NO: 374496 - DNA, 15 bp, Homo sapiens
cataataaataaaga

SEQ ID NO: 374497 - DNA, 15 bp, Homo sapiens
acataataaataaag

SEQ ID NO: 374498 - DNA, 15 bp, Homo sapiens
tacataataaataaa

SEQ ID NO: 374499 - DNA, 15 bp, Homo sapiens
ctacataataaataa

SEQ ID NO: 374500 - DNA, 15 bp, Homo sapiens
tctacataataaata

SEQ ID NO: 374501 - DNA, 15 bp, Homo sapiens
ttctacataataaat

SEQ ID NO: 374502 - DNA, 15 bp, Homo sapiens
tttctacataataaa

SEQ ID NO: 374503 - DNA, 15 bp, Homo sapiens
ttttctacataataa

SEQ ID NO: 374504 - DNA, 15 bp, Homo sapiens
attttctacataata

SEQ ID NO: 374505 - DNA, 15 bp, Homo sapiens
gattttctacataat

SEQ ID NO: 374506 - DNA, 15 bp, Homo sapiens
agattttctacataa

SEQ ID NO: 374507 - DNA, 15 bp, Homo sapiens
aagattttctacata

SEQ ID NO: 374508 - DNA, 15 bp, Homo sapiens
gaagattttctacat

SEQ ID NO: 374509 - DNA, 15 bp, Homo sapiens
agaagattttctaca

SEQ ID NO: 374510 - DNA, 15 bp, Homo sapiens
aagaagattttctac

SEQ ID NO: 374511 - DNA, 15 bp, Homo sapiens
gaagaagattttcta

SEQ ID NO: 374512 - DNA, 15 bp, Homo sapiens
tgaagaagattttct

SEQ ID NO: 374513 - DNA, 15 bp, Homo sapiens
atgaagaagattttc

SEQ ID NO: 374514 - DNA, 15 bp, Homo sapiens
aatgaagaagatttt

SEQ ID NO: 374515 - DNA, 15 bp, Homo sapiens
aaatgaagaagattt

SEQ ID NO: 374516 - DNA, 15 bp, Homo sapiens
aaaatgaagaagatt

SEQ ID NO: 374517 - DNA, 15 bp, Homo sapiens
caaaatgaagaagat

SEQ ID NO: 374518 - DNA, 15 bp, Homo sapiens
ccaaaatgaagaaga

SEQ ID NO: 374519 - DNA, 15 bp, Homo sapiens
tccaaaatgaagaag

SEQ ID NO: 374520 - DNA, 15 bp, Homo sapiens
ctccaaaatgaagaa

SEQ ID NO: 374521 - DNA, 15 bp, Homo sapiens
actccaaaatgaaga

SEQ ID NO: 374522 - DNA, 15 bp, Homo sapiens
aactccaaaatgaag

SEQ ID NO: 374523 - DNA, 15 bp, Homo sapiens
gaactccaaaatgaa

SEQ ID NO: 374524 - DNA, 15 bp, Homo sapiens
agaactccaaaatga

SEQ ID NO: 374525 - DNA, 15 bp, Homo sapiens
gagaactccaaaatg

SEQ ID NO: 374526 - DNA, 15 bp, Homo sapiens
tgagaactccaaaat

SEQ ID NO: 374527 - DNA, 15 bp, Homo sapiens
ttgagaactccaaaa

SEQ ID NO: 374528 - DNA, 15 bp, Homo sapiens
tttgagaactccaaa

SEQ ID NO: 374529 - DNA, 15 bp, Homo sapiens
atttgagaactccaa

SEQ ID NO: 374530 - DNA, 15 bp, Homo sapiens
aatttgagaactcca

SEQ ID NO: 374531 - DNA, 15 bp, Homo sapiens
gaatttgagaactcc

SEQ ID NO: 374532 - DNA, 15 bp, Homo sapiens
agaatttgagaactc

SEQ ID NO: 374533 - DNA, 15 bp, Homo sapiens
gagaatttgagaact

SEQ ID NO: 374534 - DNA, 15 bp, Homo sapiens
tgagaatttgagaac

SEQ ID NO: 374535 - DNA, 15 bp, Homo sapiens
ttgagaatttgagaa

SEQ ID NO: 374536 - DNA, 15 bp, Homo sapiens
attgagaatttgaga

SEQ ID NO: 374537 - DNA, 15 bp, Homo sapiens
aattgagaatttgag

SEQ ID NO: 374538 - DNA, 15 bp, Homo sapiens
aaattgagaatttga

SEQ ID NO: 374539 - DNA, 15 bp, Homo sapiens
caaattgagaatttg

SEQ ID NO: 374540 - DNA, 15 bp, Homo sapiens
acaaattgagaattt

SEQ ID NO: 374541 - DNA, 15 bp, Homo sapiens
cacaaattgagaatt

SEQ ID NO: 374542 - DNA, 15 bp, Homo sapiens
tcacaaattgagaat

SEQ ID NO: 374543 - DNA, 15 bp, Homo sapiens
ttcacaaattgagaa

SEQ ID NO: 374544 - DNA, 15 bp, Homo sapiens
tttcacaaattgaga

SEQ ID NO: 374545 - DNA, 15 bp, Homo sapiens
ttttcacaaattgag

SEQ ID NO: 374546 - DNA, 15 bp, Homo sapiens
attttcacaaattga

SEQ ID NO: 374547 - DNA, 15 bp, Homo sapiens
cattttcacaaattg

SEQ ID NO: 374548 - DNA, 15 bp, Homo sapiens
gcattttcacaaatt

SEQ ID NO: 374549 - DNA, 15 bp, Homo sapiens
tgcattttcacaaat

SEQ ID NO: 374550 - DNA, 15 bp, Homo sapiens
ctgcattttcacaaa

SEQ ID NO: 374551 - DNA, 15 bp, Homo sapiens
tctgcattttcacaa

SEQ ID NO: 374552 - DNA, 15 bp, Homo sapiens
gtctgcattttcaca

SEQ ID NO: 374553 - DNA, 15 bp, Homo sapiens
tgtctgcattttcac

SEQ ID NO: 374554 - DNA, 15 bp, Homo sapiens
atgtctgcattttca

SEQ ID NO: 374555 - DNA, 15 bp, Homo sapiens
tatgtctgcattttc

SEQ ID NO: 374556 - DNA, 15 bp, Homo sapiens
ctatgtctgcatttt

SEQ ID NO: 374557 - DNA, 15 bp, Homo sapiens
cctatgtctgcattt

SEQ ID NO: 374558 - DNA, 15 bp, Homo sapiens
gcctatgtctgcatt

SEQ ID NO: 374559 - DNA, 15 bp, Homo sapiens
agcctatgtctgcat

SEQ ID NO: 374560 - DNA, 15 bp, Homo sapiens
cagcctatgtctgca

SEQ ID NO: 374561 - DNA, 15 bp, Homo sapiens
tcagcctatgtctgc

SEQ ID NO: 374562 - DNA, 15 bp, Homo sapiens
ttcagcctatgtctg

SEQ ID NO: 374563 - DNA, 15 bp, Homo sapiens
gttcagcctatgtct

SEQ ID NO: 374564 - DNA, 15 bp, Homo sapiens
tgttcagcctatgtc

SEQ ID NO: 374565 - DNA, 15 bp, Homo sapiens
ttgttcagcctatgt

SEQ ID NO: 374566 - DNA, 15 bp, Homo sapiens
tttgttcagcctatg

SEQ ID NO: 374567 - DNA, 15 bp, Homo sapiens
ttttgttcagcctat

SEQ ID NO: 374568 - DNA, 15 bp, Homo sapiens
tttttgttcagccta

SEQ ID NO: 374569 - DNA, 15 bp, Homo sapiens
gtttttgttcagcct

SEQ ID NO: 374570 - DNA, 15 bp, Homo sapiens
agtttttgttcagcc

SEQ ID NO: 374571 - DNA, 15 bp, Homo sapiens
aagtttttgttcagc

SEQ ID NO: 374572 - DNA, 15 bp, Homo sapiens
caagtttttgttcag

SEQ ID NO: 374573 - DNA, 15 bp, Homo sapiens
tcaagtttttgttca

SEQ ID NO: 374574 - DNA, 15 bp, Homo sapiens
gtcaagtttttgttc

SEQ ID NO: 374575 - DNA, 15 bp, Homo sapiens
ggtcaagtttttgtt

SEQ ID NO: 374576 - DNA, 15 bp, Homo sapiens
aggtcaagtttttgt

SEQ ID NO: 374577 - DNA, 15 bp, Homo sapiens
aaggtcaagtttttg

SEQ ID NO: 374578 - DNA, 15 bp, Homo sapiens
aaaggtcaagttttt

SEQ ID NO: 374579 - DNA, 15 bp, Homo sapiens
caaaggtcaagtttt

SEQ ID NO: 374580 - DNA, 15 bp, Homo sapiens
ccaaaggtcaagttt

SEQ ID NO: 374581 - DNA, 15 bp, Homo sapiens
tccaaaggtcaagtt

SEQ ID NO: 374582 - DNA, 15 bp, Homo sapiens
ctccaaaggtcaagt

SEQ ID NO: 374583 - DNA, 15 bp, Homo sapiens
tctccaaaggtcaag

SEQ ID NO: 374584 - DNA, 15 bp, Homo sapiens
ttctccaaaggtcaa

SEQ ID NO: 374585 - DNA, 15 bp, Homo sapiens
attctccaaaggtca

SEQ ID NO: 374586 - DNA, 15 bp, Homo sapiens
gattctccaaaggtc

SEQ ID NO: 374587 - DNA, 15 bp, Homo sapiens
ggattctccaaaggt

SEQ ID NO: 374588 - DNA, 15 bp, Homo sapiens
tggattctccaaagg

SEQ ID NO: 374589 - DNA, 15 bp, Homo sapiens
atggattctccaaag

SEQ ID NO: 374590 - DNA, 15 bp, Homo sapiens
catggattctccaaa

SEQ ID NO: 374591 - DNA, 15 bp, Homo sapiens
tcatggattctccaa

SEQ ID NO: 374592 - DNA, 15 bp, Homo sapiens
atcatggattctcca

SEQ ID NO: 374593 - DNA, 15 bp, Homo sapiens
tatcatggattctcc

SEQ ID NO: 374594 - DNA, 15 bp, Homo sapiens
ttatcatggattctc

SEQ ID NO: 374595 - DNA, 15 bp, Homo sapiens
tttatcatggattct

SEQ ID NO: 374596 - DNA, 15 bp, Homo sapiens
ctttatcatggattc

SEQ ID NO: 374597 - DNA, 15 bp, Homo sapiens
tctttatcatggatt

SEQ ID NO: 374598 - DNA, 15 bp, Homo sapiens
ctctttatcatggat

SEQ ID NO: 374599 - DNA, 15 bp, Homo sapiens
gctctttatcatgga

SEQ ID NO: 374600 - DNA, 15 bp, Homo sapiens
agctctttatcatgg

SEQ ID NO: 374601 - DNA, 15 bp, Homo sapiens
aagctctttatcatg

SEQ ID NO: 374602 - DNA, 15 bp, Homo sapiens
aaagctctttatcat

SEQ ID NO: 374603 - DNA, 15 bp, Homo sapiens
aaaagctctttatca

SEQ ID NO: 374604 - DNA, 15 bp, Homo sapiens
gaaaagctctttatc

SEQ ID NO: 374605 - DNA, 15 bp, Homo sapiens
agaaaagctctttat

SEQ ID NO: 374606 - DNA, 15 bp, Homo sapiens
cagaaaagctcttta

SEQ ID NO: 374607 - DNA, 15 bp, Homo sapiens
tcagaaaagctcttt

SEQ ID NO: 374608 - DNA, 15 bp, Homo sapiens
ttcagaaaagctctt

SEQ ID NO: 374609 - DNA, 15 bp, Homo sapiens
gttcagaaaagctct

SEQ ID NO: 374610 - DNA, 15 bp, Homo sapiens
tgttcagaaaagctc

SEQ ID NO: 374611 - DNA, 15 bp, Homo sapiens
gtgttcagaaaagct

SEQ ID NO: 374612 - DNA, 15 bp, Homo sapiens
tgtgttcagaaaagc

SEQ ID NO: 374613 - DNA, 15 bp, Homo sapiens
atgtgttcagaaaag

SEQ ID NO: 374614 - DNA, 15 bp, Homo sapiens
aatgtgttcagaaaa

SEQ ID NO: 374615 - DNA, 15 bp, Homo sapiens
taatgtgttcagaaa

SEQ ID NO: 374616 - DNA, 15 bp, Homo sapiens
ttaatgtgttcagaa

SEQ ID NO: 374617 - DNA, 15 bp, Homo sapiens
tttaatgtgttcaga

SEQ ID NO: 374618 - DNA, 15 bp, Homo sapiens
ttttaatgtgttcag

SEQ ID NO: 374619 - DNA, 15 bp, Homo sapiens
gttttaatgtgttca

SEQ ID NO: 374620 - DNA, 15 bp, Homo sapiens
ggttttaatgtgttc

SEQ ID NO: 374621 - DNA, 15 bp, Homo sapiens
tggttttaatgtgtt

SEQ ID NO: 374622 - DNA, 15 bp, Homo sapiens
atggttttaatgtgt

SEQ ID NO: 374623 - DNA, 15 bp, Homo sapiens
tatggttttaatgtg

SEQ ID NO: 374624 - DNA, 15 bp, Homo sapiens
ttatggttttaatgt

SEQ ID NO: 374625 - DNA, 15 bp, Homo sapiens
tttatggttttaatg

SEQ ID NO: 374626 - DNA, 15 bp, Homo sapiens
gtttatggttttaat

SEQ ID NO: 374627 - DNA, 15 bp, Homo sapiens
tgtttatggttttaa

SEQ ID NO: 374628 - DNA, 15 bp, Homo sapiens
ctgtttatggtttta

SEQ ID NO: 374629 - DNA, 15 bp, Homo sapiens
tctgtttatggtttt

SEQ ID NO: 374630 - DNA, 15 bp, Homo sapiens
ttctgtttatggttt

SEQ ID NO: 374631 - DNA, 15 bp, Homo sapiens
gttctgtttatggtt

SEQ ID NO: 374632 - DNA, 15 bp, Homo sapiens
agttctgtttatggt

SEQ ID NO: 374633 - DNA, 15 bp, Homo sapiens
gagttctgtttatgg

SEQ ID NO: 374634 - DNA, 15 bp, Homo sapiens
tgagttctgtttatg

SEQ ID NO: 374635 - DNA, 15 bp, Homo sapiens
ctgagttctgtttat

SEQ ID NO: 374636 - DNA, 15 bp, Homo sapiens
tctgagttctgttta

SEQ ID NO: 374637 - DNA, 15 bp, Homo sapiens
ctctgagttctgttt

SEQ ID NO: 374638 - DNA, 15 bp, Homo sapiens
actctgagttctgtt

SEQ ID NO: 374639 - DNA, 15 bp, Homo sapiens
aactctgagttctgt

SEQ ID NO: 374640 - DNA, 15 bp, Homo sapiens
aaactctgagttctg

SEQ ID NO: 374641 - DNA, 15 bp, Homo sapiens
aaaactctgagttct

SEQ ID NO: 374642 - DNA, 15 bp, Homo sapiens
aaaaactctgagttc

SEQ ID NO: 374643 - DNA, 15 bp, Homo sapiens
taaaaactctgagtt

SEQ ID NO: 374644 - DNA, 15 bp, Homo sapiens
gtaaaaactctgagt

SEQ ID NO: 374645 - DNA, 15 bp, Homo sapiens
tgtaaaaactctgag

SEQ ID NO: 374646 - DNA, 15 bp, Homo sapiens
gtgtaaaaactctga

SEQ ID NO: 374647 - DNA, 15 bp, Homo sapiens
tgtgtaaaaactctg

SEQ ID NO: 374648 - DNA, 15 bp, Homo sapiens
gtgtgtaaaaactct

SEQ ID NO: 374649 - DNA, 15 bp, Homo sapiens
cgtgtgtaaaaactc

SEQ ID NO: 374650 - DNA, 15 bp, Homo sapiens
acgtgtgtaaaaact

SEQ ID NO: 374651 - DNA, 15 bp, Homo sapiens
tacgtgtgtaaaaac

SEQ ID NO: 374652 - DNA, 15 bp, Homo sapiens
atacgtgtgtaaaaa

SEQ ID NO: 374653 - DNA, 15 bp, Homo sapiens
tatacgtgtgtaaaa

SEQ ID NO: 374654 - DNA, 15 bp, Homo sapiens
atatacgtgtgtaaa

SEQ ID NO: 374655 - DNA, 15 bp, Homo sapiens
aatatacgtgtgtaa

SEQ ID NO: 374656 - DNA, 15 bp, Homo sapiens
aaatatacgtgtgta

SEQ ID NO: 374657 - DNA, 15 bp, Homo sapiens
gaaatatacgtgtgt

SEQ ID NO: 374658 - DNA, 15 bp, Homo sapiens
agaaatatacgtgtg

SEQ ID NO: 374659 - DNA, 15 bp, Homo sapiens
aagaaatatacgtgt

SEQ ID NO: 374660 - DNA, 15 bp, Homo sapiens
taagaaatatacgtg

SEQ ID NO: 374661 - DNA, 15 bp, Homo sapiens
ttaagaaatatacgt

SEQ ID NO: 374662 - DNA, 15 bp, Homo sapiens
tttaagaaatatacg

SEQ ID NO: 374663 - DNA, 15 bp, Homo sapiens
ctttaagaaatatac

SEQ ID NO: 374664 - DNA, 15 bp, Homo sapiens
actttaagaaatata

SEQ ID NO: 374665 - DNA, 15 bp, Homo sapiens
cactttaagaaatat

SEQ ID NO: 374666 - DNA, 15 bp, Homo sapiens
gcactttaagaaata

SEQ ID NO: 374667 - DNA, 15 bp, Homo sapiens
agcactttaagaaat

SEQ ID NO: 374668 - DNA, 15 bp, Homo sapiens
cagcactttaagaaa

SEQ ID NO: 374669 - DNA, 15 bp, Homo sapiens
tcagcactttaagaa

SEQ ID NO: 374670 - DNA, 15 bp, Homo sapiens
ttcagcactttaaga

SEQ ID NO: 374671 - DNA, 15 bp, Homo sapiens
tttcagcactttaag

SEQ ID NO: 374672 - DNA, 15 bp, Homo sapiens
ctttcagcactttaa

SEQ ID NO: 374673 - DNA, 15 bp, Homo sapiens
actttcagcacttta

SEQ ID NO: 374674 - DNA, 15 bp, Homo sapiens
aactttcagcacttt

SEQ ID NO: 374675 - DNA, 15 bp, Homo sapiens
taactttcagcactt

SEQ ID NO: 374676 - DNA, 15 bp, Homo sapiens
ataactttcagcact

SEQ ID NO: 374677 - DNA, 15 bp, Homo sapiens
aataactttcagcac

SEQ ID NO: 374678 - DNA, 15 bp, Homo sapiens
gaataactttcagca

SEQ ID NO: 374679 - DNA, 15 bp, Homo sapiens
agaataactttcagc

SEQ ID NO: 374680 - DNA, 15 bp, Homo sapiens
gagaataactttcag

SEQ ID NO: 374681 - DNA, 15 bp, Homo sapiens
ggagaataactttca

SEQ ID NO: 374682 - DNA, 15 bp, Homo sapiens
aggagaataactttc

SEQ ID NO: 374683 - DNA, 15 bp, Homo sapiens
caggagaataacttt

SEQ ID NO: 374684 - DNA, 15 bp, Homo sapiens
tcaggagaataactt

SEQ ID NO: 374685 - DNA, 15 bp, Homo sapiens
ttcaggagaataact

SEQ ID NO: 374686 - DNA, 15 bp, Homo sapiens
attcaggagaataac

SEQ ID NO: 374687 - DNA, 15 bp, Homo sapiens
cattcaggagaataa

SEQ ID NO: 374688 - DNA, 15 bp, Homo sapiens
acattcaggagaata

SEQ ID NO: 374689 - DNA, 15 bp, Homo sapiens
cacattcaggagaat

SEQ ID NO: 374690 - DNA, 15 bp, Homo sapiens
gcacattcaggagaa

SEQ ID NO: 374691 - DNA, 15 bp, Homo sapiens
agcacattcaggaga

SEQ ID NO: 374692 - DNA, 15 bp, Homo sapiens
tagcacattcaggag

SEQ ID NO: 374693 - DNA, 15 bp, Homo sapiens
ttagcacattcagga

SEQ ID NO: 374694 - DNA, 15 bp, Homo sapiens
tttagcacattcagg

SEQ ID NO: 374695 - DNA, 15 bp, Homo sapiens
gtttagcacattcag

SEQ ID NO: 374696 - DNA, 15 bp, Homo sapiens
tgtttagcacattca

SEQ ID NO: 374697 - DNA, 15 bp, Homo sapiens
ttgtttagcacattc

SEQ ID NO: 374698 - DNA, 15 bp, Homo sapiens
gttgtttagcacatt

SEQ ID NO: 374699 - DNA, 15 bp, Homo sapiens
agttgtttagcacat

SEQ ID NO: 374700 - DNA, 15 bp, Homo sapiens
cagttgtttagcaca

SEQ ID NO: 374701 - DNA, 15 bp, Homo sapiens
tcagttgtttagcac

SEQ ID NO: 374702 - DNA, 15 bp, Homo sapiens
atcagttgtttagca

SEQ ID NO: 374703 - DNA, 15 bp, Homo sapiens
tatcagttgtttagc

SEQ ID NO: 374704 - DNA, 15 bp, Homo sapiens
atatcagttgtttag

SEQ ID NO: 374705 - DNA, 15 bp, Homo sapiens
catatcagttgttta

SEQ ID NO: 374706 - DNA, 15 bp, Homo sapiens
gcatatcagttgttt

SEQ ID NO: 374707 - DNA, 15 bp, Homo sapiens
agcatatcagttgtt

SEQ ID NO: 374708 - DNA, 15 bp, Homo sapiens
tagcatatcagttgt

SEQ ID NO: 374709 - DNA, 15 bp, Homo sapiens
ttagcatatcagttg

SEQ ID NO: 374710 - DNA, 15 bp, Homo sapiens
attagcatatcagtt

SEQ ID NO: 374711 - DNA, 15 bp, Homo sapiens
aattagcatatcagt

SEQ ID NO: 374712 - DNA, 15 bp, Homo sapiens
taattagcatatcag

SEQ ID NO: 374713 - DNA, 15 bp, Homo sapiens
ataattagcatatca

SEQ ID NO: 374714 - DNA, 15 bp, Homo sapiens
cataattagcatatc

SEQ ID NO: 374715 - DNA, 15 bp, Homo sapiens
acataattagcatat

SEQ ID NO: 374716 - DNA, 15 bp, Homo sapiens
tacataattagcata

SEQ ID NO: 374717 - DNA, 15 bp, Homo sapiens
gtacataattagcat

SEQ ID NO: 374718 - DNA, 15 bp, Homo sapiens
agtacataattagca

SEQ ID NO: 374719 - DNA, 15 bp, Homo sapiens
cagtacataattagc

SEQ ID NO: 374720 - DNA, 15 bp, Homo sapiens
ccagtacataattag

SEQ ID NO: 374721 - DNA, 15 bp, Homo sapiens
accagtacataatta

SEQ ID NO: 374722 - DNA, 15 bp, Homo sapiens
gaccagtacataatt

SEQ ID NO: 374723 - DNA, 15 bp, Homo sapiens
agaccagtacataat

SEQ ID NO: 374724 - DNA, 15 bp, Homo sapiens
gagaccagtacataa

SEQ ID NO: 374725 - DNA, 15 bp, Homo sapiens
tgagaccagtacata

SEQ ID NO: 374726 - DNA, 15 bp, Homo sapiens
atgagaccagtacat

SEQ ID NO: 374727 - DNA, 15 bp, Homo sapiens
gatgagaccagtaca

SEQ ID NO: 374728 - DNA, 15 bp, Homo sapiens
agatgagaccagtac

SEQ ID NO: 374729 - DNA, 15 bp, Homo sapiens
tagatgagaccagta

SEQ ID NO: 374730 - DNA, 15 bp, Homo sapiens
atagatgagaccagt

SEQ ID NO: 374731 - DNA, 15 bp, Homo sapiens
aatagatgagaccag

SEQ ID NO: 374732 - DNA, 15 bp, Homo sapiens
gaatagatgagacca

SEQ ID NO: 374733 - DNA, 15 bp, Homo sapiens
tgaatagatgagacc

SEQ ID NO: 374734 - DNA, 15 bp, Homo sapiens
atgaatagatgagac

SEQ ID NO: 374735 - DNA, 15 bp, Homo sapiens
aatgaatagatgaga

SEQ ID NO: 374736 - DNA, 15 bp, Homo sapiens
taatgaatagatgag

SEQ ID NO: 374737 - DNA, 15 bp, Homo sapiens
ttaatgaatagatga

SEQ ID NO: 374738 - DNA, 15 bp, Homo sapiens
tttaatgaatagatg

SEQ ID NO: 374739 - DNA, 15 bp, Homo sapiens
atttaatgaatagat

SEQ ID NO: 374740 - DNA, 15 bp, Homo sapiens
tatttaatgaataga

SEQ ID NO: 374741 - DNA, 15 bp, Homo sapiens
ttatttaatgaatag

SEQ ID NO: 374742 - DNA, 15 bp, Homo sapiens
attatttaatgaata

SEQ ID NO: 374743 - DNA, 15 bp, Homo sapiens
cattatttaatgaat

SEQ ID NO: 374744 - DNA, 15 bp, Homo sapiens
gcattatttaatgaa

SEQ ID NO: 374745 - DNA, 15 bp, Homo sapiens
agcattatttaatga

SEQ ID NO: 374746 - DNA, 15 bp, Homo sapiens
tagcattatttaatg

SEQ ID NO: 374747 - DNA, 15 bp, Homo sapiens
ttagcattatttaat

SEQ ID NO: 374748 - DNA, 15 bp, Homo sapiens
attagcattatttaa

SEQ ID NO: 374749 - DNA, 15 bp, Homo sapiens
gattagcattattta

SEQ ID NO: 374750 - DNA, 15 bp, Homo sapiens
ggattagcattattt

SEQ ID NO: 374751 - DNA, 15 bp, Homo sapiens
gggattagcattatt

SEQ ID NO: 374752 - DNA, 15 bp, Homo sapiens
tgggattagcattat

SEQ ID NO: 374753 - DNA, 15 bp, Homo sapiens
ctgggattagcatta

SEQ ID NO: 374754 - DNA, 15 bp, Homo sapiens
tctgggattagcatt

SEQ ID NO: 374755 - DNA, 15 bp, Homo sapiens
ttctgggattagcat

SEQ ID NO: 374756 - DNA, 15 bp, Homo sapiens
cttctgggattagca

SEQ ID NO: 374757 - DNA, 15 bp, Homo sapiens
ccttctgggattagc

SEQ ID NO: 374758 - DNA, 15 bp, Homo sapiens
tccttctgggattag

SEQ ID NO: 374759 - DNA, 15 bp, Homo sapiens
gtccttctgggatta

SEQ ID NO: 374760 - DNA, 15 bp, Homo sapiens
ggtccttctgggatt

SEQ ID NO: 374761 - DNA, 15 bp, Homo sapiens
aggtccttctgggat

SEQ ID NO: 374762 - DNA, 15 bp, Homo sapiens
gaggtccttctggga

SEQ ID NO: 374763 - DNA, 15 bp, Homo sapiens
agaggtccttctggg

SEQ ID NO: 374764 - DNA, 15 bp, Homo sapiens
tagaggtccttctgg

SEQ ID NO: 374765 - DNA, 15 bp, Homo sapiens
atagaggtccttctg

SEQ ID NO: 374766 - DNA, 15 bp, Homo sapiens
aatagaggtccttct

SEQ ID NO: 374767 - DNA, 15 bp, Homo sapiens
aaatagaggtccttc

SEQ ID NO: 374768 - DNA, 15 bp, Homo sapiens
caaatagaggtcctt

SEQ ID NO: 374769 - DNA, 15 bp, Homo sapiens
tcaaatagaggtcct

SEQ ID NO: 374770 - DNA, 15 bp, Homo sapiens
ctcaaatagaggtcc

SEQ ID NO: 374771 - DNA, 15 bp, Homo sapiens
cctcaaatagaggtc

SEQ ID NO: 374772 - DNA, 15 bp, Homo sapiens
tcctcaaatagaggt

SEQ ID NO: 374773 - DNA, 15 bp, Homo sapiens
ttcctcaaatagagg

SEQ ID NO: 374774 - DNA, 15 bp, Homo sapiens
tttcctcaaatagag

SEQ ID NO: 374775 - DNA, 15 bp, Homo sapiens
ctttcctcaaataga

SEQ ID NO: 374776 - DNA, 15 bp, Homo sapiens
tctttcctcaaatag

SEQ ID NO: 374777 - DNA, 15 bp, Homo sapiens
ttctttcctcaaata

SEQ ID NO: 374778 - DNA, 15 bp, Homo sapiens
tttctttcctcaaat

SEQ ID NO: 374779 - DNA, 15 bp, Homo sapiens
ttttctttcctcaaa

SEQ ID NO: 374780 - DNA, 15 bp, Homo sapiens
tttttctttcctcaa

SEQ ID NO: 374781 - DNA, 15 bp, Homo sapiens
ttttttctttcctca

SEQ ID NO: 374782 - DNA, 15 bp, Homo sapiens
gttttttctttcctc

SEQ ID NO: 374783 - DNA, 15 bp, Homo sapiens
tgttttttctttcct

SEQ ID NO: 374784 - DNA, 15 bp, Homo sapiens
atgttttttctttcc

SEQ ID NO: 374785 - DNA, 15 bp, Homo sapiens
tatgttttttctttc

SEQ ID NO: 374786 - DNA, 15 bp, Homo sapiens
ttatgttttttcttt

SEQ ID NO: 374787 - DNA, 15 bp, Homo sapiens
tttatgttttttctt

SEQ ID NO: 374788 - DNA, 15 bp, Homo sapiens
ctttatgttttttct

SEQ ID NO: 374789 - DNA, 15 bp, Homo sapiens
gctttatgttttttc

SEQ ID NO: 374790 - DNA, 15 bp, Homo sapiens
agctttatgtttttt

SEQ ID NO: 374791 - DNA, 15 bp, Homo sapiens
aagctttatgttttt

SEQ ID NO: 374792 - DNA, 15 bp, Homo sapiens
aaagctttatgtttt

SEQ ID NO: 374793 - DNA, 15 bp, Homo sapiens
aaaagctttatgttt

SEQ ID NO: 374794 - DNA, 15 bp, Homo sapiens
aaaaagctttatgtt

SEQ ID NO: 374795 - DNA, 15 bp, Homo sapiens
taaaaagctttatgt

SEQ ID NO: 374796 - DNA, 15 bp, Homo sapiens
ttaaaaagctttatg

SEQ ID NO: 374797 - DNA, 15 bp, Homo sapiens
cttaaaaagctttat

SEQ ID NO: 374798 - DNA, 15 bp, Homo sapiens
tcttaaaaagcttta

SEQ ID NO: 374799 - DNA, 15 bp, Homo sapiens
gtcttaaaaagcttt

SEQ ID NO: 374800 - DNA, 15 bp, Homo sapiens
agtcttaaaaagctt

SEQ ID NO: 374801 - DNA, 15 bp, Homo sapiens
tagtcttaaaaagct

SEQ ID NO: 374802 - DNA, 15 bp, Homo sapiens
ttagtcttaaaaagc

SEQ ID NO: 374803 - DNA, 15 bp, Homo sapiens
attagtcttaaaaag

SEQ ID NO: 374804 - DNA, 15 bp, Homo sapiens
aattagtcttaaaaa

SEQ ID NO: 374805 - DNA, 15 bp, Homo sapiens
aaattagtcttaaaa

SEQ ID NO: 374806 - DNA, 15 bp, Homo sapiens
caaattagtcttaaa

SEQ ID NO: 374807 - DNA, 15 bp, Homo sapiens
ccaaattagtcttaa

SEQ ID NO: 374808 - DNA, 15 bp, Homo sapiens
cccaaattagtctta

SEQ ID NO: 374809 - DNA, 15 bp, Homo sapiens
acccaaattagtctt

SEQ ID NO: 374810 - DNA, 15 bp, Homo sapiens
aacccaaattagtct

SEQ ID NO: 374811 - DNA, 15 bp, Homo sapiens
taacccaaattagtc

SEQ ID NO: 374812 - DNA, 15 bp, Homo sapiens
ataacccaaattagt

SEQ ID NO: 374813 - DNA, 15 bp, Homo sapiens
aataacccaaattag

SEQ ID NO: 374814 - DNA, 15 bp, Homo sapiens
gaataacccaaatta

SEQ ID NO: 374815 - DNA, 15 bp, Homo sapiens
agaataacccaaatt

SEQ ID NO: 374816 - DNA, 15 bp, Homo sapiens
cagaataacccaaat

SEQ ID NO: 374817 - DNA, 15 bp, Homo sapiens
acagaataacccaaa

SEQ ID NO: 374818 - DNA, 15 bp, Homo sapiens
tacagaataacccaa

SEQ ID NO: 374819 - DNA, 15 bp, Homo sapiens
atacagaataaccca

SEQ ID NO: 374820 - DNA, 15 bp, Homo sapiens
catacagaataaccc

SEQ ID NO: 374821 - DNA, 15 bp, Homo sapiens
gcatacagaataacc

SEQ ID NO: 374822 - DNA, 15 bp, Homo sapiens
ggcatacagaataac

SEQ ID NO: 374823 - DNA, 15 bp, Homo sapiens
aggcatacagaataa

SEQ ID NO: 374824 - DNA, 15 bp, Homo sapiens
caggcatacagaata

SEQ ID NO: 374825 - DNA, 15 bp, Homo sapiens
tcaggcatacagaat

SEQ ID NO: 374826 - DNA, 15 bp, Homo sapiens
ttcaggcatacagaa

SEQ ID NO: 374827 - DNA, 15 bp, Homo sapiens
gttcaggcatacaga

SEQ ID NO: 374828 - DNA, 15 bp, Homo sapiens
tgttcaggcatacag

SEQ ID NO: 374829 - DNA, 15 bp, Homo sapiens
atgttcaggcataca

SEQ ID NO: 374830 - DNA, 15 bp, Homo sapiens
aatgttcaggcatac

SEQ ID NO: 374831 - DNA, 15 bp, Homo sapiens
caatgttcaggcata

SEQ ID NO: 374832 - DNA, 15 bp, Homo sapiens
acaatgttcaggcat

SEQ ID NO: 374833 - DNA, 15 bp, Homo sapiens
gacaatgttcaggca

SEQ ID NO: 374834 - DNA, 15 bp, Homo sapiens
ggacaatgttcaggc

SEQ ID NO: 374835 - DNA, 15 bp, Homo sapiens
tggacaatgttcagg

SEQ ID NO: 374836 - DNA, 15 bp, Homo sapiens
ttggacaatgttcag

SEQ ID NO: 374837 - DNA, 15 bp, Homo sapiens
gttggacaatgttca

SEQ ID NO: 374838 - DNA, 15 bp, Homo sapiens
agttggacaatgttc

SEQ ID NO: 374839 - DNA, 15 bp, Homo sapiens
cagttggacaatgtt

SEQ ID NO: 374840 - DNA, 15 bp, Homo sapiens
gcagttggacaatgt

SEQ ID NO: 374841 - DNA, 15 bp, Homo sapiens
tgcagttggacaatg

SEQ ID NO: 374842 - DNA, 15 bp, Homo sapiens
ttgcagttggacaat

SEQ ID NO: 374843 - DNA, 15 bp, Homo sapiens
cttgcagttggacaa

SEQ ID NO: 374844 - DNA, 15 bp, Homo sapiens
gcttgcagttggaca

SEQ ID NO: 374845 - DNA, 15 bp, Homo sapiens
tgcttgcagttggac

SEQ ID NO: 374846 - DNA, 15 bp, Homo sapiens
atgcttgcagttgga

SEQ ID NO: 374847 - DNA, 15 bp, Homo sapiens
tatgcttgcagttgg

SEQ ID NO: 374848 - DNA, 15 bp, Homo sapiens
atatgcttgcagttg

SEQ ID NO: 374849 - DNA, 15 bp, Homo sapiens
gatatgcttgcagtt

SEQ ID NO: 374850 - DNA, 15 bp, Homo sapiens
agatatgcttgcagt

SEQ ID NO: 374851 - DNA, 15 bp, Homo sapiens
aagatatgcttgcag

SEQ ID NO: 374852 - DNA, 15 bp, Homo sapiens
taagatatgcttgca

SEQ ID NO: 374853 - DNA, 15 bp, Homo sapiens
ataagatatgcttgc

SEQ ID NO: 374854 - DNA, 15 bp, Homo sapiens
aataagatatgcttg

SEQ ID NO: 374855 - DNA, 15 bp, Homo sapiens
aaataagatatgctt

SEQ ID NO: 374856 - DNA, 15 bp, Homo sapiens
taaataagatatgct

SEQ ID NO: 374857 - DNA, 15 bp, Homo sapiens
ttaaataagatatgc

SEQ ID NO: 374858 - DNA, 15 bp, Homo sapiens
tttaaataagatatg

SEQ ID NO: 374859 - DNA, 15 bp, Homo sapiens
ttttaaataagatat

SEQ ID NO: 374860 - DNA, 15 bp, Homo sapiens
tttttaaataagata

SEQ ID NO: 374861 - DNA, 15 bp, Homo sapiens
atttttaaataagat

SEQ ID NO: 374862 - DNA, 15 bp, Homo sapiens
gatttttaaataaga

SEQ ID NO: 374863 - DNA, 15 bp, Homo sapiens
tgatttttaaataag

SEQ ID NO: 374864 - DNA, 15 bp, Homo sapiens
ctgatttttaaataa

SEQ ID NO: 374865 - DNA, 15 bp, Homo sapiens
tctgatttttaaata

SEQ ID NO: 374866 - DNA, 15 bp, Homo sapiens
ttctgatttttaaat

SEQ ID NO: 374867 - DNA, 15 bp, Homo sapiens
attctgatttttaaa

SEQ ID NO: 374868 - DNA, 15 bp, Homo sapiens
aattctgatttttaa

SEQ ID NO: 374869 - DNA, 15 bp, Homo sapiens
aaattctgattttta

SEQ ID NO: 374870 - DNA, 15 bp, Homo sapiens
aaaattctgattttt

SEQ ID NO: 374871 - DNA, 15 bp, Homo sapiens
caaaattctgatttt

SEQ ID NO: 374872 - DNA, 15 bp, Homo sapiens
ccaaaattctgattt

SEQ ID NO: 374873 - DNA, 15 bp, Homo sapiens
tccaaaattctgatt

SEQ ID NO: 374874 - DNA, 15 bp, Homo sapiens
atccaaaattctgat

SEQ ID NO: 374875 - DNA, 15 bp, Homo sapiens
aatccaaaattctga

SEQ ID NO: 374876 - DNA, 15 bp, Homo sapiens
aaatccaaaattctg

SEQ ID NO: 374877 - DNA, 15 bp, Homo sapiens
taaatccaaaattct

SEQ ID NO: 374878 - DNA, 15 bp, Homo sapiens
ttaaatccaaaattc

SEQ ID NO: 374879 - DNA, 15 bp, Homo sapiens
tttaaatccaaaatt

SEQ ID NO: 374880 - DNA, 15 bp, Homo sapiens
ttttaaatccaaaat

SEQ ID NO: 374881 - DNA, 15 bp, Homo sapiens
tttttaaatccaaaa

SEQ ID NO: 374882 - DNA, 15 bp, Homo sapiens
atttttaaatccaaa

SEQ ID NO: 374883 - DNA, 15 bp, Homo sapiens
catttttaaatccaa

SEQ ID NO: 374884 - DNA, 15 bp, Homo sapiens
tcatttttaaatcca

SEQ ID NO: 374885 - DNA, 15 bp, Homo sapiens
gtcatttttaaatcc

SEQ ID NO: 374886 - DNA, 15 bp, Homo sapiens
agtcatttttaaatc

SEQ ID NO: 374887 - DNA, 15 bp, Homo sapiens
cagtcatttttaaat

SEQ ID NO: 374888 - DNA, 15 bp, Homo sapiens
acagtcatttttaaa

SEQ ID NO: 374889 - DNA, 15 bp, Homo sapiens
cacagtcatttttaa

SEQ ID NO: 374890 - DNA, 15 bp, Homo sapiens
tcacagtcattttta

SEQ ID NO: 374891 - DNA, 15 bp, Homo sapiens
ttcacagtcattttt

SEQ ID NO: 374892 - DNA, 15 bp, Homo sapiens
tttcacagtcatttt

SEQ ID NO: 374893 - DNA, 15 bp, Homo sapiens
atttcacagtcattt

SEQ ID NO: 374894 - DNA, 15 bp, Homo sapiens
catttcacagtcatt

SEQ ID NO: 374895 - DNA, 15 bp, Homo sapiens
tcatttcacagtcat

SEQ ID NO: 374896 - DNA, 15 bp, Homo sapiens
gtcatttcacagtca

SEQ ID NO: 374897 - DNA, 15 bp, Homo sapiens
tgtcatttcacagtc

SEQ ID NO: 374898 - DNA, 15 bp, Homo sapiens
atgtcatttcacagt

SEQ ID NO: 374899 - DNA, 15 bp, Homo sapiens
aatgtcatttcacag

SEQ ID NO: 374900 - DNA, 15 bp, Homo sapiens
gaatgtcatttcaca

SEQ ID NO: 374901 - DNA, 15 bp, Homo sapiens
cgaatgtcatttcac

SEQ ID NO: 374902 - DNA, 15 bp, Homo sapiens
acgaatgtcatttca

SEQ ID NO: 374903 - DNA, 15 bp, Homo sapiens
gacgaatgtcatttc

SEQ ID NO: 374904 - DNA, 15 bp, Homo sapiens
agacgaatgtcattt

SEQ ID NO: 374905 - DNA, 15 bp, Homo sapiens
cagacgaatgtcatt

SEQ ID NO: 374906 - DNA, 15 bp, Homo sapiens
tcagacgaatgtcat

SEQ ID NO: 374907 - DNA, 15 bp, Homo sapiens
ttcagacgaatgtca

SEQ ID NO: 374908 - DNA, 15 bp, Homo sapiens
attcagacgaatgtc

SEQ ID NO: 374909 - DNA, 15 bp, Homo sapiens
aattcagacgaatgt

SEQ ID NO: 374910 - DNA, 15 bp, Homo sapiens
taattcagacgaatg

SEQ ID NO: 374911 - DNA, 15 bp, Homo sapiens
ttaattcagacgaat

SEQ ID NO: 374912 - DNA, 15 bp, Homo sapiens
cttaattcagacgaa

SEQ ID NO: 374913 - DNA, 15 bp, Homo sapiens
ccttaattcagacga

SEQ ID NO: 374914 - DNA, 15 bp, Homo sapiens
accttaattcagacg

SEQ ID NO: 374915 - DNA, 15 bp, Homo sapiens
aaccttaattcagac

SEQ ID NO: 374916 - DNA, 15 bp, Homo sapiens
taaccttaattcaga

SEQ ID NO: 374917 - DNA, 15 bp, Homo sapiens
ttaaccttaattcag

SEQ ID NO: 374918 - DNA, 15 bp, Homo sapiens
gttaaccttaattca

SEQ ID NO: 374919 - DNA, 15 bp, Homo sapiens
agttaaccttaattc

SEQ ID NO: 374920 - DNA, 15 bp, Homo sapiens
cagttaaccttaatt

SEQ ID NO: 374921 - DNA, 15 bp, Homo sapiens
ccagttaaccttaat

SEQ ID NO: 374922 - DNA, 15 bp, Homo sapiens
cccagttaaccttaa

SEQ ID NO: 374923 - DNA, 15 bp, Homo sapiens
gcccagttaacctta

SEQ ID NO: 374924 - DNA, 15 bp, Homo sapiens
agcccagttaacctt

SEQ ID NO: 374925 - DNA, 15 bp, Homo sapiens
aagcccagttaacct

SEQ ID NO: 374926 - DNA, 15 bp, Homo sapiens
gaagcccagttaacc

SEQ ID NO: 374927 - DNA, 15 bp, Homo sapiens
tgaagcccagttaac

SEQ ID NO: 374928 - DNA, 15 bp, Homo sapiens
atgaagcccagttaa

SEQ ID NO: 374929 - DNA, 15 bp, Homo sapiens
catgaagcccagtta

SEQ ID NO: 374930 - DNA, 15 bp, Homo sapiens
gcatgaagcccagtt

SEQ ID NO: 374931 - DNA, 15 bp, Homo sapiens
ggcatgaagcccagt

SEQ ID NO: 374932 - DNA, 15 bp, Homo sapiens
tggcatgaagcccag

SEQ ID NO: 374933 - DNA, 15 bp, Homo sapiens
atggcatgaagccca

SEQ ID NO: 374934 - DNA, 15 bp, Homo sapiens
catggcatgaagccc

SEQ ID NO: 374935 - DNA, 15 bp, Homo sapiens
gcatggcatgaagcc

SEQ ID NO: 374936 - DNA, 15 bp, Homo sapiens
ggcatggcatgaagc

SEQ ID NO: 374937 - DNA, 15 bp, Homo sapiens
tggcatggcatgaag

SEQ ID NO: 374938 - DNA, 15 bp, Homo sapiens
atggcatggcatgaa

SEQ ID NO: 374939 - DNA, 15 bp, Homo sapiens
catggcatggcatga

SEQ ID NO: 374940 - DNA, 15 bp, Homo sapiens
ccatggcatggcatg

SEQ ID NO: 374941 - DNA, 15 bp, Homo sapiens
gccatggcatggcat

SEQ ID NO: 374942 - DNA, 15 bp, Homo sapiens
agccatggcatggca

SEQ ID NO: 374943 - DNA, 15 bp, Homo sapiens
aagccatggcatggc

SEQ ID NO: 374944 - DNA, 15 bp, Homo sapiens
aaagccatggcatgg

SEQ ID NO: 374945 - DNA, 15 bp, Homo sapiens
gaaagccatggcatg

SEQ ID NO: 374946 - DNA, 15 bp, Homo sapiens
ggaaagccatggcat

SEQ ID NO: 374947 - DNA, 15 bp, Homo sapiens
tggaaagccatggca

SEQ ID NO: 374948 - DNA, 15 bp, Homo sapiens
ttggaaagccatggc

SEQ ID NO: 374949 - DNA, 15 bp, Homo sapiens
cttggaaagccatgg

SEQ ID NO: 374950 - DNA, 15 bp, Homo sapiens
gcttggaaagccatg

SEQ ID NO: 374951 - DNA, 15 bp, Homo sapiens
ggcttggaaagccat

SEQ ID NO: 374952 - DNA, 15 bp, Homo sapiens
tggcttggaaagcca

SEQ ID NO: 374953 - DNA, 15 bp, Homo sapiens
ttggcttggaaagcc

SEQ ID NO: 374954 - DNA, 15 bp, Homo sapiens
gttggcttggaaagc

SEQ ID NO: 374955 - DNA, 15 bp, Homo sapiens
tgttggcttggaaag

SEQ ID NO: 374956 - DNA, 15 bp, Homo sapiens
ttgttggcttggaaa

SEQ ID NO: 374957 - DNA, 15 bp, Homo sapiens
cttgttggcttggaa

SEQ ID NO: 374958 - DNA, 15 bp, Homo sapiens
ccttgttggcttgga

SEQ ID NO: 374959 - DNA, 15 bp, Homo sapiens
tccttgttggcttgg

SEQ ID NO: 374960 - DNA, 15 bp, Homo sapiens
ctccttgttggcttg

SEQ ID NO: 374961 - DNA, 15 bp, Homo sapiens
tctccttgttggctt

SEQ ID NO: 374962 - DNA, 15 bp, Homo sapiens
atctccttgttggct

SEQ ID NO: 374963 - DNA, 15 bp, Homo sapiens
tatctccttgttggc

SEQ ID NO: 374964 - DNA, 15 bp, Homo sapiens
ttatctccttgttgg

SEQ ID NO: 374965 - DNA, 15 bp, Homo sapiens
tttatctccttgttg

SEQ ID NO: 374966 - DNA, 15 bp, Homo sapiens
ttttatctccttgtt

SEQ ID NO: 374967 - DNA, 15 bp, Homo sapiens
attttatctccttgt

SEQ ID NO: 374968 - DNA, 15 bp, Homo sapiens
cattttatctccttg

SEQ ID NO: 374969 - DNA, 15 bp, Homo sapiens
ccattttatctcctt

SEQ ID NO: 374970 - DNA, 15 bp, Homo sapiens
accattttatctcct

SEQ ID NO: 374971 - DNA, 15 bp, Homo sapiens
gaccattttatctcc

SEQ ID NO: 374972 - DNA, 15 bp, Homo sapiens
ggaccattttatctc

SEQ ID NO: 374973 - DNA, 15 bp, Homo sapiens
aggaccattttatct

SEQ ID NO: 374974 - DNA, 15 bp, Homo sapiens
aaggaccattttatc

SEQ ID NO: 374975 - DNA, 15 bp, Homo sapiens
caaggaccattttat

SEQ ID NO: 374976 - DNA, 15 bp, Homo sapiens
ccaaggaccatttta

SEQ ID NO: 374977 - DNA, 15 bp, Homo sapiens
tccaaggaccatttt

SEQ ID NO: 374978 - DNA, 15 bp, Homo sapiens
ttccaaggaccattt

SEQ ID NO: 374979 - DNA, 15 bp, Homo sapiens
tttccaaggaccatt

SEQ ID NO: 374980 - DNA, 15 bp, Homo sapiens
ttttccaaggaccat

SEQ ID NO: 374981 - DNA, 15 bp, Homo sapiens
cttttccaaggacca

SEQ ID NO: 374982 - DNA, 15 bp, Homo sapiens
ccttttccaaggacc

SEQ ID NO: 374983 - DNA, 15 bp, Homo sapiens
cccttttccaaggac

SEQ ID NO: 374984 - DNA, 15 bp, Homo sapiens
gcccttttccaagga

SEQ ID NO: 374985 - DNA, 15 bp, Homo sapiens
agcccttttccaagg

SEQ ID NO: 374986 - DNA, 15 bp, Homo sapiens
gagcccttttccaag

SEQ ID NO: 374987 - DNA, 15 bp, Homo sapiens
ggagcccttttccaa

SEQ ID NO: 374988 - DNA, 15 bp, Homo sapiens
gggagcccttttcca

SEQ ID NO: 374989 - DNA, 15 bp, Homo sapiens
agggagcccttttcc

SEQ ID NO: 374990 - DNA, 15 bp, Homo sapiens
aagggagcccttttc

SEQ ID NO: 374991 - DNA, 15 bp, Homo sapiens
caagggagccctttt

SEQ ID NO: 374992 - DNA, 15 bp, Homo sapiens
ccaagggagcccttt

SEQ ID NO: 374993 - DNA, 15 bp, Homo sapiens
accaagggagccctt

SEQ ID NO: 374994 - DNA, 15 bp, Homo sapiens
aaccaagggagccct

SEQ ID NO: 374995 - DNA, 15 bp, Homo sapiens
aaaccaagggagccc

SEQ ID NO: 374996 - DNA, 15 bp, Homo sapiens
gaaaccaagggagcc

SEQ ID NO: 374997 - DNA, 15 bp, Homo sapiens
ggaaaccaagggagc

SEQ ID NO: 374998 - DNA, 15 bp, Homo sapiens
aggaaaccaagggag

SEQ ID NO: 374999 - DNA, 15 bp, Homo sapiens
caggaaaccaaggga

SEQ ID NO: 375000 - DNA, 15 bp, Homo sapiens
ccaggaaaccaaggg

SEQ ID NO: 375001 - DNA, 15 bp, Homo sapiens
cccaggaaaccaagg

SEQ ID NO: 375002 - DNA, 15 bp, Homo sapiens
ccccaggaaaccaag

SEQ ID NO: 375003 - DNA, 15 bp, Homo sapiens
gccccaggaaaccaa

SEQ ID NO: 375004 - DNA, 15 bp, Homo sapiens
agccccaggaaacca

SEQ ID NO: 375005 - DNA, 15 bp, Homo sapiens
gagccccaggaaacc

SEQ ID NO: 375006 - DNA, 15 bp, Homo sapiens
tgagccccaggaaac

SEQ ID NO: 375007 - DNA, 15 bp, Homo sapiens
atgagccccaggaaa

SEQ ID NO: 375008 - DNA, 15 bp, Homo sapiens
catgagccccaggaa

SEQ ID NO: 375009 - DNA, 15 bp, Homo sapiens
tcatgagccccagga

SEQ ID NO: 375010 - DNA, 15 bp, Homo sapiens
atcatgagccccagg

SEQ ID NO: 375011 - DNA, 15 bp, Homo sapiens
gatcatgagccccag

SEQ ID NO: 375012 - DNA, 15 bp, Homo sapiens
agatcatgagcccca

SEQ ID NO: 375013 - DNA, 15 bp, Homo sapiens
aagatcatgagcccc

SEQ ID NO: 375014 - DNA, 15 bp, Homo sapiens
aaagatcatgagccc

SEQ ID NO: 375015 - DNA, 15 bp, Homo sapiens
gaaagatcatgagcc

SEQ ID NO: 375016 - DNA, 15 bp, Homo sapiens
agaaagatcatgagc

SEQ ID NO: 375017 - DNA, 15 bp, Homo sapiens
aagaaagatcatgag

SEQ ID NO: 375018 - DNA, 15 bp, Homo sapiens
taagaaagatcatga

SEQ ID NO: 375019 - DNA, 15 bp, Homo sapiens
ataagaaagatcatg

SEQ ID NO: 375020 - DNA, 15 bp, Homo sapiens
cataagaaagatcat

SEQ ID NO: 375021 - DNA, 15 bp, Homo sapiens
ccataagaaagatca

SEQ ID NO: 375022 - DNA, 15 bp, Homo sapiens
gccataagaaagatc

SEQ ID NO: 375023 - DNA, 15 bp, Homo sapiens
ggccataagaaagat

SEQ ID NO: 375024 - DNA, 15 bp, Homo sapiens
aggccataagaaaga

SEQ ID NO: 375025 - DNA, 15 bp, Homo sapiens
caggccataagaaag

SEQ ID NO: 375026 - DNA, 15 bp, Homo sapiens
tcaggccataagaaa

SEQ ID NO: 375027 - DNA, 15 bp, Homo sapiens
atcaggccataagaa

SEQ ID NO: 375028 - DNA, 15 bp, Homo sapiens
catcaggccataaga

SEQ ID NO: 375029 - DNA, 15 bp, Homo sapiens
tcatcaggccataag

SEQ ID NO: 375030 - DNA, 15 bp, Homo sapiens
atcatcaggccataa

SEQ ID NO: 375031 - DNA, 15 bp, Homo sapiens
tatcatcaggccata

SEQ ID NO: 375032 - DNA, 15 bp, Homo sapiens
gtatcatcaggccat

SEQ ID NO: 375033 - DNA, 15 bp, Homo sapiens
ggtatcatcaggcca

SEQ ID NO: 375034 - DNA, 15 bp, Homo sapiens
tggtatcatcaggcc

SEQ ID NO: 375035 - DNA, 15 bp, Homo sapiens
ttggtatcatcaggc

SEQ ID NO: 375036 - DNA, 15 bp, Homo sapiens
cttggtatcatcagg

SEQ ID NO: 375037 - DNA, 15 bp, Homo sapiens
ccttggtatcatcag

SEQ ID NO: 375038 - DNA, 15 bp, Homo sapiens
gccttggtatcatca

SEQ ID NO: 375039 - DNA, 15 bp, Homo sapiens
agccttggtatcatc

SEQ ID NO: 375040 - DNA, 15 bp, Homo sapiens
tagccttggtatcat

SEQ ID NO: 375041 - DNA, 15 bp, Homo sapiens
ttagccttggtatca

SEQ ID NO: 375042 - DNA, 15 bp, Homo sapiens
gttagccttggtatc

SEQ ID NO: 375043 - DNA, 15 bp, Homo sapiens
ggttagccttggtat

SEQ ID NO: 375044 - DNA, 15 bp, Homo sapiens
aggttagccttggta

SEQ ID NO: 375045 - DNA, 15 bp, Homo sapiens
aaggttagccttggt

SEQ ID NO: 375046 - DNA, 15 bp, Homo sapiens
aaaggttagccttgg

SEQ ID NO: 375047 - DNA, 15 bp, Homo sapiens
gaaaggttagccttg

SEQ ID NO: 375048 - DNA, 15 bp, Homo sapiens
agaaaggttagcctt

SEQ ID NO: 375049 - DNA, 15 bp, Homo sapiens
tagaaaggttagcct

SEQ ID NO: 375050 - DNA, 15 bp, Homo sapiens
gtagaaaggttagcc

SEQ ID NO: 375051 - DNA, 15 bp, Homo sapiens
ggtagaaaggttagc

SEQ ID NO: 375052 - DNA, 15 bp, Homo sapiens
aggtagaaaggttag

SEQ ID NO: 375053 - DNA, 15 bp, Homo sapiens
caggtagaaaggtta

SEQ ID NO: 375054 - DNA, 15 bp, Homo sapiens
gcaggtagaaaggtt

SEQ ID NO: 375055 - DNA, 15 bp, Homo sapiens
agcaggtagaaaggt

SEQ ID NO: 375056 - DNA, 15 bp, Homo sapiens
tagcaggtagaaagg

SEQ ID NO: 375057 - DNA, 15 bp, Homo sapiens
ctagcaggtagaaag

SEQ ID NO: 375058 - DNA, 15 bp, Homo sapiens
actagcaggtagaaa

SEQ ID NO: 375059 - DNA, 15 bp, Homo sapiens
cactagcaggtagaa

SEQ ID NO: 375060 - DNA, 15 bp, Homo sapiens
tcactagcaggtaga

SEQ ID NO: 375061 - DNA, 15 bp, Homo sapiens
atcactagcaggtag

SEQ ID NO: 375062 - DNA, 15 bp, Homo sapiens
catcactagcaggta

SEQ ID NO: 375063 - DNA, 15 bp, Homo sapiens
acatcactagcaggt

SEQ ID NO: 375064 - DNA, 15 bp, Homo sapiens
aacatcactagcagg

SEQ ID NO: 375065 - DNA, 15 bp, Homo sapiens
caacatcactagcag

SEQ ID NO: 375066 - DNA, 15 bp, Homo sapiens
ccaacatcactagca

SEQ ID NO: 375067 - DNA, 15 bp, Homo sapiens
cccaacatcactagc

SEQ ID NO: 375068 - DNA, 15 bp, Homo sapiens
gcccaacatcactag

SEQ ID NO: 375069 - DNA, 15 bp, Homo sapiens
agcccaacatcacta

SEQ ID NO: 375070 - DNA, 15 bp, Homo sapiens
gagcccaacatcact

SEQ ID NO: 375071 - DNA, 15 bp, Homo sapiens
tgagcccaacatcac

SEQ ID NO: 375072 - DNA, 15 bp, Homo sapiens
ctgagcccaacatca

SEQ ID NO: 375073 - DNA, 15 bp, Homo sapiens
actgagcccaacatc

SEQ ID NO: 375074 - DNA, 15 bp, Homo sapiens
aactgagcccaacat

SEQ ID NO: 375075 - DNA, 15 bp, Homo sapiens
aaactgagcccaaca

SEQ ID NO: 375076 - DNA, 15 bp, Homo sapiens
caaactgagcccaac

SEQ ID NO: 375077 - DNA, 15 bp, Homo sapiens
ccaaactgagcccaa

SEQ ID NO: 375078 - DNA, 15 bp, Homo sapiens
cccaaactgagccca

SEQ ID NO: 375079 - DNA, 15 bp, Homo sapiens
gcccaaactgagccc

SEQ ID NO: 375080 - DNA, 15 bp, Homo sapiens
tgcccaaactgagcc

SEQ ID NO: 375081 - DNA, 15 bp, Homo sapiens
ttgcccaaactgagc

SEQ ID NO: 375082 - DNA, 15 bp, Homo sapiens
tttgcccaaactgag

SEQ ID NO: 375083 - DNA, 15 bp, Homo sapiens
gtttgcccaaactga

SEQ ID NO: 375084 - DNA, 15 bp, Homo sapiens
agtttgcccaaactg

SEQ ID NO: 375085 - DNA, 15 bp, Homo sapiens
gagtttgcccaaact

SEQ ID NO: 375086 - DNA, 15 bp, Homo sapiens
ggagtttgcccaaac

SEQ ID NO: 375087 - DNA, 15 bp, Homo sapiens
aggagtttgcccaaa

SEQ ID NO: 375088 - DNA, 15 bp, Homo sapiens
aaggagtttgcccaa

SEQ ID NO: 375089 - DNA, 15 bp, Homo sapiens
caaggagtttgccca

SEQ ID NO: 375090 - DNA, 15 bp, Homo sapiens
tcaaggagtttgccc

SEQ ID NO: 375091 - DNA, 15 bp, Homo sapiens
ctcaaggagtttgcc

SEQ ID NO: 375092 - DNA, 15 bp, Homo sapiens
gctcaaggagtttgc

SEQ ID NO: 375093 - DNA, 15 bp, Homo sapiens
tgctcaaggagtttg

SEQ ID NO: 375094 - DNA, 15 bp, Homo sapiens
ttgctcaaggagttt

SEQ ID NO: 375095 - DNA, 15 bp, Homo sapiens
cttgctcaaggagtt

SEQ ID NO: 375096 - DNA, 15 bp, Homo sapiens
gcttgctcaaggagt

SEQ ID NO: 375097 - DNA, 15 bp, Homo sapiens
ggcttgctcaaggag

SEQ ID NO: 375098 - DNA, 15 bp, Homo sapiens
tggcttgctcaagga

SEQ ID NO: 375099 - DNA, 15 bp, Homo sapiens
ctggcttgctcaagg

SEQ ID NO: 375100 - DNA, 15 bp, Homo sapiens
tctggcttgctcaag

SEQ ID NO: 375101 - DNA, 15 bp, Homo sapiens
ttctggcttgctcaa

SEQ ID NO: 375102 - DNA, 15 bp, Homo sapiens
cttctggcttgctca

SEQ ID NO: 375103 - DNA, 15 bp, Homo sapiens
ccttctggcttgctc

SEQ ID NO: 375104 - DNA, 15 bp, Homo sapiens
tccttctggcttgct

SEQ ID NO: 375105 - DNA, 15 bp, Homo sapiens
ttccttctggcttgc

SEQ ID NO: 375106 - DNA, 15 bp, Homo sapiens
attccttctggcttg

SEQ ID NO: 375107 - DNA, 15 bp, Homo sapiens
cattccttctggctt

SEQ ID NO: 375108 - DNA, 15 bp, Homo sapiens
tcattccttctggct

SEQ ID NO: 375109 - DNA, 15 bp, Homo sapiens
atcattccttctggc

SEQ ID NO: 375110 - DNA, 15 bp, Homo sapiens
tatcattccttctgg

SEQ ID NO: 375111 - DNA, 15 bp, Homo sapiens
ctatcattccttctg

SEQ ID NO: 375112 - DNA, 15 bp, Homo sapiens
tctatcattccttct

SEQ ID NO: 375113 - DNA, 15 bp, Homo sapiens
ttctatcattccttc

SEQ ID NO: 375114 - DNA, 15 bp, Homo sapiens
cttctatcattcctt

SEQ ID NO: 375115 - DNA, 15 bp, Homo sapiens
gcttctatcattcct

SEQ ID NO: 375116 - DNA, 15 bp, Homo sapiens
ggcttctatcattcc

SEQ ID NO: 375117 - DNA, 15 bp, Homo sapiens
aggcttctatcattc

SEQ ID NO: 375118 - DNA, 15 bp, Homo sapiens
gaggcttctatcatt

SEQ ID NO: 375119 - DNA, 15 bp, Homo sapiens
tgaggcttctatcat

SEQ ID NO: 375120 - DNA, 15 bp, Homo sapiens
ttgaggcttctatca

SEQ ID NO: 375121 - DNA, 15 bp, Homo sapiens
cttgaggcttctatc

SEQ ID NO: 375122 - DNA, 15 bp, Homo sapiens
tcttgaggcttctat

SEQ ID NO: 375123 - DNA, 15 bp, Homo sapiens
atcttgaggcttcta

SEQ ID NO: 375124 - DNA, 15 bp, Homo sapiens
catcttgaggcttct

SEQ ID NO: 375125 - DNA, 15 bp, Homo sapiens
acatcttgaggcttc

SEQ ID NO: 375126 - DNA, 15 bp, Homo sapiens
cacatcttgaggctt

SEQ ID NO: 375127 - DNA, 15 bp, Homo sapiens
acacatcttgaggct

SEQ ID NO: 375128 - DNA, 15 bp, Homo sapiens
aacacatcttgaggc

SEQ ID NO: 375129 - DNA, 15 bp, Homo sapiens
gaacacatcttgagg

SEQ ID NO: 375130 - DNA, 15 bp, Homo sapiens
ggaacacatcttgag

SEQ ID NO: 375131 - DNA, 15 bp, Homo sapiens
aggaacacatcttga

SEQ ID NO: 375132 - DNA, 15 bp, Homo sapiens
taggaacacatcttg

SEQ ID NO: 375133 - DNA, 15 bp, Homo sapiens
ttaggaacacatctt

SEQ ID NO: 375134 - DNA, 15 bp, Homo sapiens
cttaggaacacatct

SEQ ID NO: 375135 - DNA, 15 bp, Homo sapiens
tcttaggaacacatc

SEQ ID NO: 375136 - DNA, 15 bp, Homo sapiens
ttcttaggaacacat

SEQ ID NO: 375137 - DNA, 15 bp, Homo sapiens
cttcttaggaacaca

SEQ ID NO: 375138 - DNA, 15 bp, Homo sapiens
tcttcttaggaacac

SEQ ID NO: 375139 - DNA, 15 bp, Homo sapiens
gtcttcttaggaaca

SEQ ID NO: 375140 - DNA, 15 bp, Homo sapiens
ggtcttcttaggaac

SEQ ID NO: 375141 - DNA, 15 bp, Homo sapiens
tggtcttcttaggaa

SEQ ID NO: 375142 - DNA, 15 bp, Homo sapiens
atggtcttcttagga

SEQ ID NO: 375143 - DNA, 15 bp, Homo sapiens
tatggtcttcttagg

SEQ ID NO: 375144 - DNA, 15 bp, Homo sapiens
atatggtcttcttag

SEQ ID NO: 375145 - DNA, 15 bp, Homo sapiens
aatatggtcttctta

SEQ ID NO: 375146 - DNA, 15 bp, Homo sapiens
gaatatggtcttctt

SEQ ID NO: 375147 - DNA, 15 bp, Homo sapiens
agaatatggtcttct

SEQ ID NO: 375148 - DNA, 15 bp, Homo sapiens
gagaatatggtcttc

SEQ ID NO: 375149 - DNA, 15 bp, Homo sapiens
tgagaatatggtctt

SEQ ID NO: 375150 - DNA, 15 bp, Homo sapiens
ctgagaatatggtct

SEQ ID NO: 375151 - DNA, 15 bp, Homo sapiens
actgagaatatggtc

SEQ ID NO: 375152 - DNA, 15 bp, Homo sapiens
gactgagaatatggt

SEQ ID NO: 375153 - DNA, 15 bp, Homo sapiens
tgactgagaatatgg

SEQ ID NO: 375154 - DNA, 15 bp, Homo sapiens
atgactgagaatatg

SEQ ID NO: 375155 - DNA, 15 bp, Homo sapiens
tatgactgagaatat

SEQ ID NO: 375156 - DNA, 15 bp, Homo sapiens
ctatgactgagaata

SEQ ID NO: 375157 - DNA, 15 bp, Homo sapiens
cctatgactgagaat

SEQ ID NO: 375158 - DNA, 15 bp, Homo sapiens
gcctatgactgagaa

SEQ ID NO: 375159 - DNA, 15 bp, Homo sapiens
ggcctatgactgaga

SEQ ID NO: 375160 - DNA, 15 bp, Homo sapiens
aggcctatgactgag

SEQ ID NO: 375161 - DNA, 15 bp, Homo sapiens
gaggcctatgactga

SEQ ID NO: 375162 - DNA, 15 bp, Homo sapiens
tgaggcctatgactg

SEQ ID NO: 375163 - DNA, 15 bp, Homo sapiens
atgaggcctatgact

SEQ ID NO: 375164 - DNA, 15 bp, Homo sapiens
tatgaggcctatgac

SEQ ID NO: 375165 - DNA, 15 bp, Homo sapiens
atatgaggcctatga

SEQ ID NO: 375166 - DNA, 15 bp, Homo sapiens
aatatgaggcctatg

SEQ ID NO: 375167 - DNA, 15 bp, Homo sapiens
gaatatgaggcctat

SEQ ID NO: 375168 - DNA, 15 bp, Homo sapiens
agaatatgaggccta

SEQ ID NO: 375169 - DNA, 15 bp, Homo sapiens
cagaatatgaggcct

SEQ ID NO: 375170 - DNA, 15 bp, Homo sapiens
gcagaatatgaggcc

SEQ ID NO: 375171 - DNA, 15 bp, Homo sapiens
tgcagaatatgaggc

SEQ ID NO: 375172 - DNA, 15 bp, Homo sapiens
ttgcagaatatgagg

SEQ ID NO: 375173 - DNA, 15 bp, Homo sapiens
tttgcagaatatgag

SEQ ID NO: 375174 - DNA, 15 bp, Homo sapiens
atttgcagaatatga

SEQ ID NO: 375175 - DNA, 15 bp, Homo sapiens
gatttgcagaatatg

SEQ ID NO: 375176 - DNA, 15 bp, Homo sapiens
ggatttgcagaatat

SEQ ID NO: 375177 - DNA, 15 bp, Homo sapiens
tggatttgcagaata

SEQ ID NO: 375178 - DNA, 15 bp, Homo sapiens
ctggatttgcagaat

SEQ ID NO: 375179 - DNA, 15 bp, Homo sapiens
actggatttgcagaa

SEQ ID NO: 375180 - DNA, 15 bp, Homo sapiens
aactggatttgcaga

SEQ ID NO: 375181 - DNA, 15 bp, Homo sapiens
aaactggatttgcag

SEQ ID NO: 375182 - DNA, 15 bp, Homo sapiens
gaaactggatttgca

SEQ ID NO: 375183 - DNA, 15 bp, Homo sapiens
tgaaactggatttgc

SEQ ID NO: 375184 - DNA, 15 bp, Homo sapiens
ttgaaactggatttg

SEQ ID NO: 375185 - DNA, 15 bp, Homo sapiens
tttgaaactggattt

SEQ ID NO: 375186 - DNA, 15 bp, Homo sapiens
atttgaaactggatt

SEQ ID NO: 375187 - DNA, 15 bp, Homo sapiens
catttgaaactggat

SEQ ID NO: 375188 - DNA, 15 bp, Homo sapiens
ccatttgaaactgga

SEQ ID NO: 375189 - DNA, 15 bp, Homo sapiens
tccatttgaaactgg

SEQ ID NO: 375190 - DNA, 15 bp, Homo sapiens
atccatttgaaactg

SEQ ID NO: 375191 - DNA, 15 bp, Homo sapiens
aatccatttgaaact

SEQ ID NO: 375192 - DNA, 15 bp, Homo sapiens
aaatccatttgaaac

SEQ ID NO: 375193 - DNA, 15 bp, Homo sapiens
aaaatccatttgaaa

SEQ ID NO: 375194 - DNA, 15 bp, Homo sapiens
caaaatccatttgaa

SEQ ID NO: 375195 - DNA, 15 bp, Homo sapiens
ccaaaatccatttga

SEQ ID NO: 375196 - DNA, 15 bp, Homo sapiens
accaaaatccatttg

SEQ ID NO: 375197 - DNA, 15 bp, Homo sapiens
taccaaaatccattt

SEQ ID NO: 375198 - DNA, 15 bp, Homo sapiens
ttaccaaaatccatt

SEQ ID NO: 375199 - DNA, 15 bp, Homo sapiens
attaccaaaatccat

SEQ ID NO: 375200 - DNA, 15 bp, Homo sapiens
aattaccaaaatcca

SEQ ID NO: 375201 - DNA, 15 bp, Homo sapiens
gaattaccaaaatcc

SEQ ID NO: 375202 - DNA, 15 bp, Homo sapiens
tgaattaccaaaatc

SEQ ID NO: 375203 - DNA, 15 bp, Homo sapiens
atgaattaccaaaat

SEQ ID NO: 375204 - DNA, 15 bp, Homo sapiens
gatgaattaccaaaa

SEQ ID NO: 375205 - DNA, 15 bp, Homo sapiens
agatgaattaccaaa

SEQ ID NO: 375206 - DNA, 15 bp, Homo sapiens
gagatgaattaccaa

SEQ ID NO: 375207 - DNA, 15 bp, Homo sapiens
tgagatgaattacca

SEQ ID NO: 375208 - DNA, 15 bp, Homo sapiens
atgagatgaattacc

SEQ ID NO: 375209 - DNA, 15 bp, Homo sapiens
aatgagatgaattac

SEQ ID NO: 375210 - DNA, 15 bp, Homo sapiens
taatgagatgaatta

SEQ ID NO: 375211 - DNA, 15 bp, Homo sapiens
ctaatgagatgaatt

SEQ ID NO: 375212 - DNA, 15 bp, Homo sapiens
tctaatgagatgaat

SEQ ID NO: 375213 - DNA, 15 bp, Homo sapiens
ttctaatgagatgaa

SEQ ID NO: 375214 - DNA, 15 bp, Homo sapiens
tttctaatgagatga

SEQ ID NO: 375215 - DNA, 15 bp, Homo sapiens
atttctaatgagatg

SEQ ID NO: 375216 - DNA, 15 bp, Homo sapiens
aatttctaatgagat

SEQ ID NO: 375217 - DNA, 15 bp, Homo sapiens
aaatttctaatgaga

SEQ ID NO: 375218 - DNA, 15 bp, Homo sapiens
aaaatttctaatgag

SEQ ID NO: 375219 - DNA, 15 bp, Homo sapiens
aaaaatttctaatga

SEQ ID NO: 375220 - DNA, 15 bp, Homo sapiens
taaaaatttctaatg

SEQ ID NO: 375221 - DNA, 15 bp, Homo sapiens
ataaaaatttctaat

SEQ ID NO: 375222 - DNA, 15 bp, Homo sapiens
aataaaaatttctaa

SEQ ID NO: 375223 - DNA, 15 bp, Homo sapiens
aaataaaaatttcta

SEQ ID NO: 375224 - DNA, 15 bp, Homo sapiens
aaaataaaaatttct

SEQ ID NO: 375225 - DNA, 15 bp, Homo sapiens
taaaataaaaatttc

SEQ ID NO: 375226 - DNA, 15 bp, Homo sapiens
ctaaaataaaaattt

SEQ ID NO: 375227 - DNA, 15 bp, Homo sapiens
actaaaataaaaatt

SEQ ID NO: 375228 - DNA, 15 bp, Homo sapiens
aactaaaataaaaat

SEQ ID NO: 375229 - DNA, 15 bp, Homo sapiens
gaactaaaataaaaa

SEQ ID NO: 375230 - DNA, 15 bp, Homo sapiens
agaactaaaataaaa

SEQ ID NO: 375231 - DNA, 15 bp, Homo sapiens
cagaactaaaataaa

SEQ ID NO: 375232 - DNA, 15 bp, Homo sapiens
tcagaactaaaataa

SEQ ID NO: 375233 - DNA, 15 bp, Homo sapiens
atcagaactaaaata

SEQ ID NO: 375234 - DNA, 15 bp, Homo sapiens
gatcagaactaaaat

SEQ ID NO: 375235 - DNA, 15 bp, Homo sapiens
ggatcagaactaaaa

SEQ ID NO: 375236 - DNA, 15 bp, Homo sapiens
aggatcagaactaaa

SEQ ID NO: 375237 - DNA, 15 bp, Homo sapiens
taggatcagaactaa

SEQ ID NO: 375238 - DNA, 15 bp, Homo sapiens
ttaggatcagaacta

SEQ ID NO: 375239 - DNA, 15 bp, Homo sapiens
attaggatcagaact

SEQ ID NO: 375240 - DNA, 15 bp, Homo sapiens
aattaggatcagaac

SEQ ID NO: 375241 - DNA, 15 bp, Homo sapiens
taattaggatcagaa

SEQ ID NO: 375242 - DNA, 15 bp, Homo sapiens
gtaattaggatcaga

SEQ ID NO: 375243 - DNA, 15 bp, Homo sapiens
tgtaattaggatcag

SEQ ID NO: 375244 - DNA, 15 bp, Homo sapiens
ctgtaattaggatca

SEQ ID NO: 375245 - DNA, 15 bp, Homo sapiens
tctgtaattaggatc

SEQ ID NO: 375246 - DNA, 15 bp, Homo sapiens
ctctgtaattaggat

SEQ ID NO: 375247 - DNA, 15 bp, Homo sapiens
tctctgtaattagga

SEQ ID NO: 375248 - DNA, 15 bp, Homo sapiens
atctctgtaattagg

SEQ ID NO: 375249 - DNA, 15 bp, Homo sapiens
gatctctgtaattag

SEQ ID NO: 375250 - DNA, 15 bp, Homo sapiens
agatctctgtaatta

SEQ ID NO: 375251 - DNA, 15 bp, Homo sapiens
gagatctctgtaatt

SEQ ID NO: 375252 - DNA, 15 bp, Homo sapiens
tgagatctctgtaat

SEQ ID NO: 375253 - DNA, 15 bp, Homo sapiens
ctgagatctctgtaa

SEQ ID NO: 375254 - DNA, 15 bp, Homo sapiens
tctgagatctctgta

SEQ ID NO: 375255 - DNA, 15 bp, Homo sapiens
ttctgagatctctgt

SEQ ID NO: 375256 - DNA, 15 bp, Homo sapiens
cttctgagatctctg

SEQ ID NO: 375257 - DNA, 15 bp, Homo sapiens
tcttctgagatctct

SEQ ID NO: 375258 - DNA, 15 bp, Homo sapiens
gtcttctgagatctc

SEQ ID NO: 375259 - DNA, 15 bp, Homo sapiens
agtcttctgagatct

SEQ ID NO: 375260 - DNA, 15 bp, Homo sapiens
cagtcttctgagatc

SEQ ID NO: 375261 - DNA, 15 bp, Homo sapiens
acagtcttctgagat

SEQ ID NO: 375262 - DNA, 15 bp, Homo sapiens
aacagtcttctgaga

SEQ ID NO: 375263 - DNA, 15 bp, Homo sapiens
gaacagtcttctgag

SEQ ID NO: 375264 - DNA, 15 bp, Homo sapiens
agaacagtcttctga

SEQ ID NO: 375265 - DNA, 15 bp, Homo sapiens
tagaacagtcttctg

SEQ ID NO: 375266 - DNA, 15 bp, Homo sapiens
ttagaacagtcttct

SEQ ID NO: 375267 - DNA, 15 bp, Homo sapiens
cttagaacagtcttc

SEQ ID NO: 375268 - DNA, 15 bp, Homo sapiens
tcttagaacagtctt

SEQ ID NO: 375269 - DNA, 15 bp, Homo sapiens
ctcttagaacagtct

SEQ ID NO: 375270 - DNA, 15 bp, Homo sapiens
gctcttagaacagtc

SEQ ID NO: 375271 - DNA, 15 bp, Homo sapiens
agctcttagaacagt

SEQ ID NO: 375272 - DNA, 15 bp, Homo sapiens
cagctcttagaacag

SEQ ID NO: 375273 - DNA, 15 bp, Homo sapiens
ccagctcttagaaca

SEQ ID NO: 375274 - DNA, 15 bp, Homo sapiens
accagctcttagaac

SEQ ID NO: 375275 - DNA, 15 bp, Homo sapiens
aaccagctcttagaa

SEQ ID NO: 375276 - DNA, 15 bp, Homo sapiens
taaccagctcttaga

SEQ ID NO: 375277 - DNA, 15 bp, Homo sapiens
ttaaccagctcttag

SEQ ID NO: 375278 - DNA, 15 bp, Homo sapiens
tttaaccagctctta

SEQ ID NO: 375279 - DNA, 15 bp, Homo sapiens
gtttaaccagctctt

SEQ ID NO: 375280 - DNA, 15 bp, Homo sapiens
agtttaaccagctct

SEQ ID NO: 375281 - DNA, 15 bp, Homo sapiens
tagtttaaccagctc

SEQ ID NO: 375282 - DNA, 15 bp, Homo sapiens
atagtttaaccagct

SEQ ID NO: 375283 - DNA, 15 bp, Homo sapiens
aatagtttaaccagc

SEQ ID NO: 375284 - DNA, 15 bp, Homo sapiens
aaatagtttaaccag

SEQ ID NO: 375285 - DNA, 15 bp, Homo sapiens
taaatagtttaacca

SEQ ID NO: 375286 - DNA, 15 bp, Homo sapiens
gtaaatagtttaacc

SEQ ID NO: 375287 - DNA, 15 bp, Homo sapiens
tgtaaatagtttaac

SEQ ID NO: 375288 - DNA, 15 bp, Homo sapiens
ctgtaaatagtttaa

SEQ ID NO: 375289 - DNA, 15 bp, Homo sapiens
actgtaaatagttta

SEQ ID NO: 375290 - DNA, 15 bp, Homo sapiens
tactgtaaatagttt

SEQ ID NO: 375291 - DNA, 15 bp, Homo sapiens
ctactgtaaatagtt

SEQ ID NO: 375292 - DNA, 15 bp, Homo sapiens
tctactgtaaatagt

SEQ ID NO: 375293 - DNA, 15 bp, Homo sapiens
ttctactgtaaatag

SEQ ID NO: 375294 - DNA, 15 bp, Homo sapiens
attctactgtaaata

SEQ ID NO: 375295 - DNA, 15 bp, Homo sapiens
aattctactgtaaat

SEQ ID NO: 375296 - DNA, 15 bp, Homo sapiens
aaattctactgtaaa

SEQ ID NO: 375297 - DNA, 15 bp, Homo sapiens
aaaattctactgtaa

SEQ ID NO: 375298 - DNA, 15 bp, Homo sapiens
aaaaattctactgta

SEQ ID NO: 375299 - DNA, 15 bp, Homo sapiens
aaaaaattctactgt

SEQ ID NO: 375300 - DNA, 15 bp, Homo sapiens
aaaaaaattctactg

SEQ ID NO: 375301 - DNA, 15 bp, Homo sapiens
aaaaaaaattctact

SEQ ID NO: 375302 - DNA, 15 bp, Homo sapiens
aaaaaaaaattctac

SEQ ID NO: 375303 - DNA, 15 bp, Homo sapiens
gaaaaaaaaattcta

SEQ ID NO: 375304 - DNA, 15 bp, Homo sapiens
tgaaaaaaaaattct

SEQ ID NO: 375305 - DNA, 15 bp, Homo sapiens
ctgaaaaaaaaattc

SEQ ID NO: 375306 - DNA, 15 bp, Homo sapiens
tctgaaaaaaaaatt

SEQ ID NO: 375307 - DNA, 15 bp, Homo sapiens
ttctgaaaaaaaaat

SEQ ID NO: 375308 - DNA, 15 bp, Homo sapiens
gttctgaaaaaaaaa

SEQ ID NO: 375309 - DNA, 15 bp, Homo sapiens
agttctgaaaaaaaa

SEQ ID NO: 375310 - DNA, 15 bp, Homo sapiens
tagttctgaaaaaaa

SEQ ID NO: 375311 - DNA, 15 bp, Homo sapiens
gtagttctgaaaaaa

SEQ ID NO: 375312 - DNA, 15 bp, Homo sapiens
tgtagttctgaaaaa

SEQ ID NO: 375313 - DNA, 15 bp, Homo sapiens
ttgtagttctgaaaa

SEQ ID NO: 375314 - DNA, 15 bp, Homo sapiens
tttgtagttctgaaa

SEQ ID NO: 375315 - DNA, 15 bp, Homo sapiens
ttttgtagttctgaa

SEQ ID NO: 375316 - DNA, 15 bp, Homo sapiens
attttgtagttctga

SEQ ID NO: 375317 - DNA, 15 bp, Homo sapiens
tattttgtagttctg

SEQ ID NO: 375318 - DNA, 15 bp, Homo sapiens
gtattttgtagttct

SEQ ID NO: 375319 - DNA, 15 bp, Homo sapiens
agtattttgtagttc

SEQ ID NO: 375320 - DNA, 15 bp, Homo sapiens
gagtattttgtagtt

SEQ ID NO: 375321 - DNA, 15 bp, Homo sapiens
agagtattttgtagt

SEQ ID NO: 375322 - DNA, 15 bp, Homo sapiens
cagagtattttgtag

SEQ ID NO: 375323 - DNA, 15 bp, Homo sapiens
tcagagtattttgta

SEQ ID NO: 375324 - DNA, 15 bp, Homo sapiens
atcagagtattttgt

SEQ ID NO: 375325 - DNA, 15 bp, Homo sapiens
tatcagagtattttg

SEQ ID NO: 375326 - DNA, 15 bp, Homo sapiens
ttatcagagtatttt

SEQ ID NO: 375327 - DNA, 15 bp, Homo sapiens
gttatcagagtattt

SEQ ID NO: 375328 - DNA, 15 bp, Homo sapiens
tgttatcagagtatt

SEQ ID NO: 375329 - DNA, 15 bp, Homo sapiens
atgttatcagagtat

SEQ ID NO: 375330 - DNA, 15 bp, Homo sapiens
aatgttatcagagta

SEQ ID NO: 375331 - DNA, 15 bp, Homo sapiens
aaatgttatcagagt

SEQ ID NO: 375332 - DNA, 15 bp, Homo sapiens
aaaatgttatcagag

SEQ ID NO: 375333 - DNA, 15 bp, Homo sapiens
aaaaatgttatcaga

SEQ ID NO: 375334 - DNA, 15 bp, Homo sapiens
taaaaatgttatcag

SEQ ID NO: 375335 - DNA, 15 bp, Homo sapiens
ttaaaaatgttatca

SEQ ID NO: 375336 - DNA, 15 bp, Homo sapiens
tttaaaaatgttatc

SEQ ID NO: 375337 - DNA, 15 bp, Homo sapiens
ttttaaaaatgttat

SEQ ID NO: 375338 - DNA, 15 bp, Homo sapiens
attttaaaaatgtta

SEQ ID NO: 375339 - DNA, 15 bp, Homo sapiens
aattttaaaaatgtt

SEQ ID NO: 375340 - DNA, 15 bp, Homo sapiens
gaattttaaaaatgt

SEQ ID NO: 375341 - DNA, 15 bp, Homo sapiens
ggaattttaaaaatg

SEQ ID NO: 375342 - DNA, 15 bp, Homo sapiens
tggaattttaaaaat

SEQ ID NO: 375343 - DNA, 15 bp, Homo sapiens
ttggaattttaaaaa

SEQ ID NO: 375344 - DNA, 15 bp, Homo sapiens
tttggaattttaaaa

SEQ ID NO: 375345 - DNA, 15 bp, Homo sapiens
atttggaattttaaa

SEQ ID NO: 375346 - DNA, 15 bp, Homo sapiens
aatttggaattttaa

SEQ ID NO: 375347 - DNA, 15 bp, Homo sapiens
aaatttggaatttta

SEQ ID NO: 375348 - DNA, 15 bp, Homo sapiens
taaatttggaatttt

SEQ ID NO: 375349 - DNA, 15 bp, Homo sapiens
ataaatttggaattt

SEQ ID NO: 375350 - DNA, 15 bp, Homo sapiens
tataaatttggaatt

SEQ ID NO: 375351 - DNA, 15 bp, Homo sapiens
ttataaatttggaat

SEQ ID NO: 375352 - DNA, 15 bp, Homo sapiens
tttataaatttggaa

SEQ ID NO: 375353 - DNA, 15 bp, Homo sapiens
ttttataaatttgga

SEQ ID NO: 375354 - DNA, 15 bp, Homo sapiens
attttataaatttgg

SEQ ID NO: 375355 - DNA, 15 bp, Homo sapiens
aattttataaatttg

SEQ ID NO: 375356 - DNA, 15 bp, Homo sapiens
caattttataaattt

SEQ ID NO: 375357 - DNA, 15 bp, Homo sapiens
acaattttataaatt

SEQ ID NO: 375358 - DNA, 15 bp, Homo sapiens
aacaattttataaat

SEQ ID NO: 375359 - DNA, 15 bp, Homo sapiens
aaacaattttataaa

SEQ ID NO: 375360 - DNA, 15 bp, Homo sapiens
taaacaattttataa

SEQ ID NO: 375361 - DNA, 15 bp, Homo sapiens
ataaacaattttata

SEQ ID NO: 375362 - DNA, 15 bp, Homo sapiens
cataaacaattttat

SEQ ID NO: 375363 - DNA, 15 bp, Homo sapiens
acataaacaatttta

SEQ ID NO: 375364 - DNA, 15 bp, Homo sapiens
aacataaacaatttt

SEQ ID NO: 375365 - DNA, 15 bp, Homo sapiens
aaacataaacaattt

SEQ ID NO: 375366 - DNA, 15 bp, Homo sapiens
gaaacataaacaatt

SEQ ID NO: 375367 - DNA, 15 bp, Homo sapiens
agaaacataaacaat

SEQ ID NO: 375368 - DNA, 15 bp, Homo sapiens
tagaaacataaacaa

SEQ ID NO: 375369 - DNA, 15 bp, Homo sapiens
gtagaaacataaaca

SEQ ID NO: 375370 - DNA, 15 bp, Homo sapiens
tgtagaaacataaac

SEQ ID NO: 375371 - DNA, 15 bp, Homo sapiens
atgtagaaacataaa

SEQ ID NO: 375372 - DNA, 15 bp, Homo sapiens
tatgtagaaacataa

SEQ ID NO: 375373 - DNA, 15 bp, Homo sapiens
atatgtagaaacata

SEQ ID NO: 375374 - DNA, 15 bp, Homo sapiens
gatatgtagaaacat

SEQ ID NO: 375375 - DNA, 15 bp, Homo sapiens
tgatatgtagaaaca

SEQ ID NO: 375376 - DNA, 15 bp, Homo sapiens
ctgatatgtagaaac

SEQ ID NO: 375377 - DNA, 15 bp, Homo sapiens
tctgatatgtagaaa

SEQ ID NO: 375378 - DNA, 15 bp, Homo sapiens
atctgatatgtagaa

SEQ ID NO: 375379 - DNA, 15 bp, Homo sapiens
tatctgatatgtaga

SEQ ID NO: 375380 - DNA, 15 bp, Homo sapiens
atatctgatatgtag

SEQ ID NO: 375381 - DNA, 15 bp, Homo sapiens
aatatctgatatgta

SEQ ID NO: 375382 - DNA, 15 bp, Homo sapiens
aaatatctgatatgt

SEQ ID NO: 375383 - DNA, 15 bp, Homo sapiens
taaatatctgatatg

SEQ ID NO: 375384 - DNA, 15 bp, Homo sapiens
ctaaatatctgatat

SEQ ID NO: 375385 - DNA, 15 bp, Homo sapiens
actaaatatctgata

SEQ ID NO: 375386 - DNA, 15 bp, Homo sapiens
tactaaatatctgat

SEQ ID NO: 375387 - DNA, 15 bp, Homo sapiens
atactaaatatctga

SEQ ID NO: 375388 - DNA, 15 bp, Homo sapiens
catactaaatatctg

SEQ ID NO: 375389 - DNA, 15 bp, Homo sapiens
acatactaaatatct

SEQ ID NO: 375390 - DNA, 15 bp, Homo sapiens
aacatactaaatatc

SEQ ID NO: 375391 - DNA, 15 bp, Homo sapiens
aaacatactaaatat

SEQ ID NO: 375392 - DNA, 15 bp, Homo sapiens
gaaacatactaaata

SEQ ID NO: 375393 - DNA, 15 bp, Homo sapiens
agaaacatactaaat

SEQ ID NO: 375394 - DNA, 15 bp, Homo sapiens
tagaaacatactaaa

SEQ ID NO: 375395 - DNA, 15 bp, Homo sapiens
ctagaaacatactaa

SEQ ID NO: 375396 - DNA, 15 bp, Homo sapiens
gctagaaacatacta

SEQ ID NO: 375397 - DNA, 15 bp, Homo sapiens
tgctagaaacatact

SEQ ID NO: 375398 - DNA, 15 bp, Homo sapiens
ctgctagaaacatac

SEQ ID NO: 375399 - DNA, 15 bp, Homo sapiens
cctgctagaaacata

SEQ ID NO: 375400 - DNA, 15 bp, Homo sapiens
tcctgctagaaacat

SEQ ID NO: 375401 - DNA, 15 bp, Homo sapiens
gtcctgctagaaaca

SEQ ID NO: 375402 - DNA, 15 bp, Homo sapiens
agtcctgctagaaac

SEQ ID NO: 375403 - DNA, 15 bp, Homo sapiens
cagtcctgctagaaa

SEQ ID NO: 375404 - DNA, 15 bp, Homo sapiens
ccagtcctgctagaa

SEQ ID NO: 375405 - DNA, 15 bp, Homo sapiens
gccagtcctgctaga

SEQ ID NO: 375406 - DNA, 15 bp, Homo sapiens
agccagtcctgctag

SEQ ID NO: 375407 - DNA, 15 bp, Homo sapiens
tagccagtcctgcta

SEQ ID NO: 375408 - DNA, 15 bp, Homo sapiens
gtagccagtcctgct

SEQ ID NO: 375409 - DNA, 15 bp, Homo sapiens
tgtagccagtcctgc

SEQ ID NO: 375410 - DNA, 15 bp, Homo sapiens
atgtagccagtcctg

SEQ ID NO: 375411 - DNA, 15 bp, Homo sapiens
tatgtagccagtcct

SEQ ID NO: 375412 - DNA, 15 bp, Homo sapiens
ttatgtagccagtcc

SEQ ID NO: 375413 - DNA, 15 bp, Homo sapiens
attatgtagccagtc

SEQ ID NO: 375414 - DNA, 15 bp, Homo sapiens
aattatgtagccagt

SEQ ID NO: 375415 - DNA, 15 bp, Homo sapiens
aaattatgtagccag

SEQ ID NO: 375416 - DNA, 15 bp, Homo sapiens
caaattatgtagcca

SEQ ID NO: 375417 - DNA, 15 bp, Homo sapiens
gcaaattatgtagcc

SEQ ID NO: 375418 - DNA, 15 bp, Homo sapiens
tgcaaattatgtagc

SEQ ID NO: 375419 - DNA, 15 bp, Homo sapiens
ttgcaaattatgtag

SEQ ID NO: 375420 - DNA, 15 bp, Homo sapiens
cttgcaaattatgta

SEQ ID NO: 375421 - DNA, 15 bp, Homo sapiens
ccttgcaaattatgt

SEQ ID NO: 375422 - DNA, 15 bp, Homo sapiens
accttgcaaattatg

SEQ ID NO: 375423 - DNA, 15 bp, Homo sapiens
gaccttgcaaattat

SEQ ID NO: 375424 - DNA, 15 bp, Homo sapiens
tgaccttgcaaatta

SEQ ID NO: 375425 - DNA, 15 bp, Homo sapiens
gtgaccttgcaaatt

SEQ ID NO: 375426 - DNA, 15 bp, Homo sapiens
agtgaccttgcaaat

SEQ ID NO: 375427 - DNA, 15 bp, Homo sapiens
aagtgaccttgcaaa

SEQ ID NO: 375428 - DNA, 15 bp, Homo sapiens
aaagtgaccttgcaa

SEQ ID NO: 375429 - DNA, 15 bp, Homo sapiens
aaaagtgaccttgca

SEQ ID NO: 375430 - DNA, 15 bp, Homo sapiens
gaaaagtgaccttgc

SEQ ID NO: 375431 - DNA, 15 bp, Homo sapiens
tgaaaagtgaccttg

SEQ ID NO: 375432 - DNA, 15 bp, Homo sapiens
atgaaaagtgacctt

SEQ ID NO: 375433 - DNA, 15 bp, Homo sapiens
catgaaaagtgacct

SEQ ID NO: 375434 - DNA, 15 bp, Homo sapiens
tcatgaaaagtgacc

SEQ ID NO: 375435 - DNA, 15 bp, Homo sapiens
ttcatgaaaagtgac

SEQ ID NO: 375436 - DNA, 15 bp, Homo sapiens
attcatgaaaagtga

SEQ ID NO: 375437 - DNA, 15 bp, Homo sapiens
aattcatgaaaagtg

SEQ ID NO: 375438 - DNA, 15 bp, Homo sapiens
taattcatgaaaagt

SEQ ID NO: 375439 - DNA, 15 bp, Homo sapiens
ataattcatgaaaag

SEQ ID NO: 375440 - DNA, 15 bp, Homo sapiens
aataattcatgaaaa

SEQ ID NO: 375441 - DNA, 15 bp, Homo sapiens
taataattcatgaaa

SEQ ID NO: 375442 - DNA, 15 bp, Homo sapiens
ttaataattcatgaa

SEQ ID NO: 375443 - DNA, 15 bp, Homo sapiens
cttaataattcatga

SEQ ID NO: 375444 - DNA, 15 bp, Homo sapiens
tcttaataattcatg

SEQ ID NO: 375445 - DNA, 15 bp, Homo sapiens
ttcttaataattcat

SEQ ID NO: 375446 - DNA, 15 bp, Homo sapiens
attcttaataattca

SEQ ID NO: 375447 - DNA, 15 bp, Homo sapiens
aattcttaataattc

SEQ ID NO: 375448 - DNA, 15 bp, Homo sapiens
aaattcttaataatt

SEQ ID NO: 375449 - DNA, 15 bp, Homo sapiens
gaaattcttaataat

SEQ ID NO: 375450 - DNA, 15 bp, Homo sapiens
tgaaattcttaataa

SEQ ID NO: 375451 - DNA, 15 bp, Homo sapiens
ttgaaattcttaata

SEQ ID NO: 375452 - DNA, 15 bp, Homo sapiens
tttgaaattcttaat

SEQ ID NO: 375453 - DNA, 15 bp, Homo sapiens
ttttgaaattcttaa

SEQ ID NO: 375454 - DNA, 15 bp, Homo sapiens
attttgaaattctta

SEQ ID NO: 375455 - DNA, 15 bp, Homo sapiens
cattttgaaattctt

SEQ ID NO: 375456 - DNA, 15 bp, Homo sapiens
ccattttgaaattct

SEQ ID NO: 375457 - DNA, 15 bp, Homo sapiens
accattttgaaattc

SEQ ID NO: 375458 - DNA, 15 bp, Homo sapiens
caccattttgaaatt

SEQ ID NO: 375459 - DNA, 15 bp, Homo sapiens
tcaccattttgaaat

SEQ ID NO: 375460 - DNA, 15 bp, Homo sapiens
gtcaccattttgaaa

SEQ ID NO: 375461 - DNA, 15 bp, Homo sapiens
tgtcaccattttgaa

SEQ ID NO: 375462 - DNA, 15 bp, Homo sapiens
ctgtcaccattttga

SEQ ID NO: 375463 - DNA, 15 bp, Homo sapiens
gctgtcaccattttg

SEQ ID NO: 375464 - DNA, 15 bp, Homo sapiens
tgctgtcaccatttt

SEQ ID NO: 375465 - DNA, 15 bp, Homo sapiens
ctgctgtcaccattt

SEQ ID NO: 375466 - DNA, 15 bp, Homo sapiens
tctgctgtcaccatt

SEQ ID NO: 375467 - DNA, 15 bp, Homo sapiens
ctctgctgtcaccat

SEQ ID NO: 375468 - DNA, 15 bp, Homo sapiens
actctgctgtcacca

SEQ ID NO: 375469 - DNA, 15 bp, Homo sapiens
tactctgctgtcacc

SEQ ID NO: 375470 - DNA, 15 bp, Homo sapiens
atactctgctgtcac

SEQ ID NO: 375471 - DNA, 15 bp, Homo sapiens
aatactctgctgtca

SEQ ID NO: 375472 - DNA, 15 bp, Homo sapiens
taatactctgctgtc

SEQ ID NO: 375473 - DNA, 15 bp, Homo sapiens
ttaatactctgctgt

SEQ ID NO: 375474 - DNA, 15 bp, Homo sapiens
tttaatactctgctg

SEQ ID NO: 375475 - DNA, 15 bp, Homo sapiens
ttttaatactctgct

SEQ ID NO: 375476 - DNA, 15 bp, Homo sapiens
gttttaatactctgc

SEQ ID NO: 375477 - DNA, 15 bp, Homo sapiens
tgttttaatactctg

SEQ ID NO: 375478 - DNA, 15 bp, Homo sapiens
ttgttttaatactct

SEQ ID NO: 375479 - DNA, 15 bp, Homo sapiens
tttgttttaatactc

SEQ ID NO: 375480 - DNA, 15 bp, Homo sapiens
ttttgttttaatact

SEQ ID NO: 375481 - DNA, 15 bp, Homo sapiens
cttttgttttaatac

SEQ ID NO: 375482 - DNA, 15 bp, Homo sapiens
tcttttgttttaata

SEQ ID NO: 375483 - DNA, 15 bp, Homo sapiens
ctcttttgttttaat

SEQ ID NO: 375484 - DNA, 15 bp, Homo sapiens
tctcttttgttttaa

SEQ ID NO: 375485 - DNA, 15 bp, Homo sapiens
gtctcttttgtttta

SEQ ID NO: 375486 - DNA, 15 bp, Homo sapiens
agtctcttttgtttt

SEQ ID NO: 375487 - DNA, 15 bp, Homo sapiens
aagtctcttttgttt

SEQ ID NO: 375488 - DNA, 15 bp, Homo sapiens
caagtctcttttgtt

SEQ ID NO: 375489 - DNA, 15 bp, Homo sapiens
ccaagtctcttttgt

SEQ ID NO: 375490 - DNA, 15 bp, Homo sapiens
cccaagtctcttttg

SEQ ID NO: 375491 - DNA, 15 bp, Homo sapiens
ccccaagtctctttt

SEQ ID NO: 375492 - DNA, 15 bp, Homo sapiens
gccccaagtctcttt

SEQ ID NO: 375493 - DNA, 15 bp, Homo sapiens
agccccaagtctctt

SEQ ID NO: 375494 - DNA, 15 bp, Homo sapiens
cagccccaagtctct

SEQ ID NO: 375495 - DNA, 15 bp, Homo sapiens
ccagccccaagtctc

SEQ ID NO: 375496 - DNA, 15 bp, Homo sapiens
cccagccccaagtct

SEQ ID NO: 375497 - DNA, 15 bp, Homo sapiens
acccagccccaagtc

SEQ ID NO: 375498 - DNA, 15 bp, Homo sapiens
cacccagccccaagt

SEQ ID NO: 375499 - DNA, 15 bp, Homo sapiens
gcacccagccccaag

SEQ ID NO: 375500 - DNA, 15 bp, Homo sapiens
cgcacccagccccaa

SEQ ID NO: 375501 - DNA, 15 bp, Homo sapiens
ccgcacccagcccca

SEQ ID NO: 375502 - DNA, 15 bp, Homo sapiens
accgcacccagcccc

SEQ ID NO: 375503 - DNA, 15 bp, Homo sapiens
caccgcacccagccc

SEQ ID NO: 375504 - DNA, 15 bp, Homo sapiens
ccaccgcacccagcc

SEQ ID NO: 375505 - DNA, 15 bp, Homo sapiens
gccaccgcacccagc

SEQ ID NO: 375506 - DNA, 15 bp, Homo sapiens
agccaccgcacccag

SEQ ID NO: 375507 - DNA, 15 bp, Homo sapiens
tagccaccgcaccca

SEQ ID NO: 375508 - DNA, 15 bp, Homo sapiens
gtagccaccgcaccc

SEQ ID NO: 375509 - DNA, 15 bp, Homo sapiens
ggtagccaccgcacc

SEQ ID NO: 375510 - DNA, 15 bp, Homo sapiens
cggtagccaccgcac

SEQ ID NO: 375511 - DNA, 15 bp, Homo sapiens
gcggtagccaccgca

SEQ ID NO: 375512 - DNA, 15 bp, Homo sapiens
agcggtagccaccgc

SEQ ID NO: 375513 - DNA, 15 bp, Homo sapiens
aagcggtagccaccg

SEQ ID NO: 375514 - DNA, 15 bp, Homo sapiens
caagcggtagccacc

SEQ ID NO: 375515 - DNA, 15 bp, Homo sapiens
acaagcggtagccac

SEQ ID NO: 375516 - DNA, 15 bp, Homo sapiens
tacaagcggtagcca

SEQ ID NO: 375517 - DNA, 15 bp, Homo sapiens
ttacaagcggtagcc

SEQ ID NO: 375518 - DNA, 15 bp, Homo sapiens
gttacaagcggtagc

SEQ ID NO: 375519 - DNA, 15 bp, Homo sapiens
ggttacaagcggtag

SEQ ID NO: 375520 - DNA, 15 bp, Homo sapiens
gggttacaagcggta

SEQ ID NO: 375521 - DNA, 15 bp, Homo sapiens
tgggttacaagcggt

SEQ ID NO: 375522 - DNA, 15 bp, Homo sapiens
ctgggttacaagcgg

SEQ ID NO: 375523 - DNA, 15 bp, Homo sapiens
gctgggttacaagcg

SEQ ID NO: 375524 - DNA, 15 bp, Homo sapiens
tgctgggttacaagc

SEQ ID NO: 375525 - DNA, 15 bp, Homo sapiens
gtgctgggttacaag

SEQ ID NO: 375526 - DNA, 15 bp, Homo sapiens
agtgctgggttacaa

SEQ ID NO: 375527 - DNA, 15 bp, Homo sapiens
aagtgctgggttaca

SEQ ID NO: 375528 - DNA, 15 bp, Homo sapiens
aaagtgctgggttac

SEQ ID NO: 375529 - DNA, 15 bp, Homo sapiens
taaagtgctgggtta

SEQ ID NO: 375530 - DNA, 15 bp, Homo sapiens
ctaaagtgctgggtt

SEQ ID NO: 375531 - DNA, 15 bp, Homo sapiens
tctaaagtgctgggt

SEQ ID NO: 375532 - DNA, 15 bp, Homo sapiens
ttctaaagtgctggg

SEQ ID NO: 375533 - DNA, 15 bp, Homo sapiens
cttctaaagtgctgg

SEQ ID NO: 375534 - DNA, 15 bp, Homo sapiens
ccttctaaagtgctg

SEQ ID NO: 375535 - DNA, 15 bp, Homo sapiens
gccttctaaagtgct

SEQ ID NO: 375536 - DNA, 15 bp, Homo sapiens
ggccttctaaagtgc

SEQ ID NO: 375537 - DNA, 15 bp, Homo sapiens
cggccttctaaagtg

SEQ ID NO: 375538 - DNA, 15 bp, Homo sapiens
tcggccttctaaagt

SEQ ID NO: 375539 - DNA, 15 bp, Homo sapiens
ctcggccttctaaag

SEQ ID NO: 375540 - DNA, 15 bp, Homo sapiens
cctcggccttctaaa

SEQ ID NO: 375541 - DNA, 15 bp, Homo sapiens
acctcggccttctaa

SEQ ID NO: 375542 - DNA, 15 bp, Homo sapiens
cacctcggccttcta

SEQ ID NO: 375543 - DNA, 15 bp, Homo sapiens
ccacctcggccttct

SEQ ID NO: 375544 - DNA, 15 bp, Homo sapiens
cccacctcggccttc

SEQ ID NO: 375545 - DNA, 15 bp, Homo sapiens
gcccacctcggcctt

SEQ ID NO: 375546 - DNA, 15 bp, Homo sapiens
tgcccacctcggcct

SEQ ID NO: 375547 - DNA, 15 bp, Homo sapiens
ctgcccacctcggcc

SEQ ID NO: 375548 - DNA, 15 bp, Homo sapiens
tctgcccacctcggc

SEQ ID NO: 375549 - DNA, 15 bp, Homo sapiens
atctgcccacctcgg

SEQ ID NO: 375550 - DNA, 15 bp, Homo sapiens
gatctgcccacctcg

SEQ ID NO: 375551 - DNA, 15 bp, Homo sapiens
tgatctgcccacctc

SEQ ID NO: 375552 - DNA, 15 bp, Homo sapiens
gctcaagtgatctgc

SEQ ID NO: 375553 - DNA, 15 bp, Homo sapiens
ggctcaagtgatctg

SEQ ID NO: 375554 - DNA, 15 bp, Homo sapiens
gggctcaagtgatct

SEQ ID NO: 375555 - DNA, 15 bp, Homo sapiens
agggttttgccatgt

SEQ ID NO: 375556 - DNA, 15 bp, Homo sapiens
cagggttttgccatg

SEQ ID NO: 375557 - DNA, 15 bp, Homo sapiens
acagggttttgccat

SEQ ID NO: 375558 - DNA, 15 bp, Homo sapiens
gacagggttttgcca

SEQ ID NO: 375559 - DNA, 15 bp, Homo sapiens
agacagggttttgcc

SEQ ID NO: 375560 - DNA, 15 bp, Homo sapiens
gagacagggttttgc

SEQ ID NO: 375561 - DNA, 15 bp, Homo sapiens
agagacagggttttg

SEQ ID NO: 375562 - DNA, 15 bp, Homo sapiens
tagagacagggtttt

SEQ ID NO: 375563 - DNA, 15 bp, Homo sapiens
ttttttatattttta

SEQ ID NO: 375564 - DNA, 15 bp, Homo sapiens
tttttttatattttt

SEQ ID NO: 375565 - DNA, 15 bp, Homo sapiens
atttttttatatttt

SEQ ID NO: 375566 - DNA, 15 bp, Homo sapiens
aatttttttatattt

SEQ ID NO: 375567 - DNA, 15 bp, Homo sapiens
taatttttttatatt

SEQ ID NO: 375568 - DNA, 15 bp, Homo sapiens
ctaatttttttatat

SEQ ID NO: 375569 - DNA, 15 bp, Homo sapiens
gctaatttttttata

SEQ ID NO: 375570 - DNA, 15 bp, Homo sapiens
agctaatttttttat

SEQ ID NO: 375571 - DNA, 15 bp, Homo sapiens
cagctaattttttta

SEQ ID NO: 375572 - DNA, 15 bp, Homo sapiens
aagtagctgggatta

SEQ ID NO: 375573 - DNA, 15 bp, Homo sapiens
caagtagctgggatt

SEQ ID NO: 375574 - DNA, 15 bp, Homo sapiens
ccaagtagctgggat

SEQ ID NO: 375575 - DNA, 15 bp, Homo sapiens
ggcctcagcctccca

SEQ ID NO: 375576 - DNA, 15 bp, Homo sapiens
aggcctcagcctccc

SEQ ID NO: 375577 - DNA, 15 bp, Homo sapiens
caggcctcagcctcc

SEQ ID NO: 375578 - DNA, 15 bp, Homo sapiens
tcaggcctcagcctc

SEQ ID NO: 375579 - DNA, 15 bp, Homo sapiens
ctcaggcctcagcct

SEQ ID NO: 375580 - DNA, 15 bp, Homo sapiens
tctcaggcctcagcc

SEQ ID NO: 375581 - DNA, 15 bp, Homo sapiens
ttctcaggcctcagc

SEQ ID NO: 375582 - DNA, 15 bp, Homo sapiens
attctcaggcctcag

SEQ ID NO: 375583 - DNA, 15 bp, Homo sapiens
gattctcaggcctca

SEQ ID NO: 375584 - DNA, 15 bp, Homo sapiens
cgattctcaggcctc

SEQ ID NO: 375585 - DNA, 15 bp, Homo sapiens
gcgattctcaggcct

SEQ ID NO: 375586 - DNA, 15 bp, Homo sapiens
agcgattctcaggcc

SEQ ID NO: 375587 - DNA, 15 bp, Homo sapiens
aagcgattctcaggc

SEQ ID NO: 375588 - DNA, 15 bp, Homo sapiens
caagcgattctcagg

SEQ ID NO: 375589 - DNA, 15 bp, Homo sapiens
tcaagcgattctcag

SEQ ID NO: 375590 - DNA, 15 bp, Homo sapiens
ctcaagcgattctca

SEQ ID NO: 375591 - DNA, 15 bp, Homo sapiens
agcaacctccacctc

SEQ ID NO: 375592 - DNA, 15 bp, Homo sapiens
cagcaacctccacct

SEQ ID NO: 375593 - DNA, 15 bp, Homo sapiens
acagcaacctccacc

SEQ ID NO: 375594 - DNA, 15 bp, Homo sapiens
cacagcaacctccac

SEQ ID NO: 375595 - DNA, 15 bp, Homo sapiens
tcacagcaacctcca

SEQ ID NO: 375596 - DNA, 15 bp, Homo sapiens
ctcacagcaacctcc

SEQ ID NO: 375597 - DNA, 15 bp, Homo sapiens
tctcacagcaacctc

SEQ ID NO: 375598 - DNA, 15 bp, Homo sapiens
atctcacagcaacct

SEQ ID NO: 375599 - DNA, 15 bp, Homo sapiens
catctcacagcaacc

SEQ ID NO: 375600 - DNA, 15 bp, Homo sapiens
tcatctcacagcaac

SEQ ID NO: 375601 - DNA, 15 bp, Homo sapiens
atcatctcacagcaa

SEQ ID NO: 375602 - DNA, 15 bp, Homo sapiens
tatcatctcacagca

SEQ ID NO: 375603 - DNA, 15 bp, Homo sapiens
atatcatctcacagc

SEQ ID NO: 375604 - DNA, 15 bp, Homo sapiens
tatatcatctcacag

SEQ ID NO: 375605 - DNA, 15 bp, Homo sapiens
ctatatcatctcaca

SEQ ID NO: 375606 - DNA, 15 bp, Homo sapiens
gctatatcatctcac

SEQ ID NO: 375607 - DNA, 15 bp, Homo sapiens
cgctatatcatctca

SEQ ID NO: 375608 - DNA, 15 bp, Homo sapiens
gcgctatatcatctc

SEQ ID NO: 375609 - DNA, 15 bp, Homo sapiens
ggcgctatatcatct

SEQ ID NO: 375610 - DNA, 15 bp, Homo sapiens
tggcgctatatcatc

SEQ ID NO: 375611 - DNA, 15 bp, Homo sapiens
gtggcgctatatcat

SEQ ID NO: 375612 - DNA, 15 bp, Homo sapiens
agtggcgctatatca

SEQ ID NO: 375613 - DNA, 15 bp, Homo sapiens
cagtggcgctatatc

SEQ ID NO: 375614 - DNA, 15 bp, Homo sapiens
gcagtggcgctatat

SEQ ID NO: 375615 - DNA, 15 bp, Homo sapiens
tgcagtggcgctata

SEQ ID NO: 375616 - DNA, 15 bp, Homo sapiens
gtgcagtggcgctat

SEQ ID NO: 375617 - DNA, 15 bp, Homo sapiens
agtgcagtggcgcta

SEQ ID NO: 375618 - DNA, 15 bp, Homo sapiens
gagtgcagtggcgct

SEQ ID NO: 375619 - DNA, 15 bp, Homo sapiens
attctgtcacccagg

SEQ ID NO: 375620 - DNA, 15 bp, Homo sapiens
cattctgtcacccag

SEQ ID NO: 375621 - DNA, 15 bp, Homo sapiens
tcattctgtcaccca

SEQ ID NO: 375622 - DNA, 15 bp, Homo sapiens
ctcattctgtcaccc

SEQ ID NO: 375623 - DNA, 15 bp, Homo sapiens
tctcattctgtcacc

SEQ ID NO: 375624 - DNA, 15 bp, Homo sapiens
gtctcattctgtcac

SEQ ID NO: 375625 - DNA, 15 bp, Homo sapiens
ggtctcattctgtca

SEQ ID NO: 375626 - DNA, 15 bp, Homo sapiens
gggtctcattctgtc

SEQ ID NO: 375627 - DNA, 15 bp, Homo sapiens
agggtctcattctgt

SEQ ID NO: 375628 - DNA, 15 bp, Homo sapiens
cagggtctcattctg

SEQ ID NO: 375629 - DNA, 15 bp, Homo sapiens
acagggtctcattct

SEQ ID NO: 375630 - DNA, 15 bp, Homo sapiens
gacagggtctcattc

SEQ ID NO: 375631 - DNA, 15 bp, Homo sapiens
agacagggtctcatt

SEQ ID NO: 375632 - DNA, 15 bp, Homo sapiens
gagacagggtctcat

SEQ ID NO: 375633 - DNA, 15 bp, Homo sapiens
gttttattttatttt

SEQ ID NO: 375634 - DNA, 15 bp, Homo sapiens
tgttttattttattt

SEQ ID NO: 375635 - DNA, 15 bp, Homo sapiens
ttgttttattttatt

SEQ ID NO: 375636 - DNA, 15 bp, Homo sapiens
gttgttttattttat

SEQ ID NO: 375637 - DNA, 15 bp, Homo sapiens
tgttgttttatttta

SEQ ID NO: 375638 - DNA, 15 bp, Homo sapiens
ctgttgttttatttt

SEQ ID NO: 375639 - DNA, 15 bp, Homo sapiens
tctgttgttttattt

SEQ ID NO: 375640 - DNA, 15 bp, Homo sapiens
ctctgttgttttatt

SEQ ID NO: 375641 - DNA, 15 bp, Homo sapiens
tctctgttgttttat

SEQ ID NO: 375642 - DNA, 15 bp, Homo sapiens
atctctgttgtttta

SEQ ID NO: 375643 - DNA, 15 bp, Homo sapiens
catctctgttgtttt

SEQ ID NO: 375644 - DNA, 15 bp, Homo sapiens
acatctctgttgttt

SEQ ID NO: 375645 - DNA, 15 bp, Homo sapiens
cacatctctgttgtt

SEQ ID NO: 375646 - DNA, 15 bp, Homo sapiens
acacatctctgttgt

SEQ ID NO: 375647 - DNA, 15 bp, Homo sapiens
gacacatctctgttg

SEQ ID NO: 375648 - DNA, 15 bp, Homo sapiens
agacacatctctgtt

SEQ ID NO: 375649 - DNA, 15 bp, Homo sapiens
cagacacatctctgt

SEQ ID NO: 375650 - DNA, 15 bp, Homo sapiens
tcagacacatctctg

SEQ ID NO: 375651 - DNA, 15 bp, Homo sapiens
ctcagacacatctct

SEQ ID NO: 375652 - DNA, 15 bp, Homo sapiens
actcagacacatctc

SEQ ID NO: 375653 - DNA, 15 bp, Homo sapiens
tactcagacacatct

SEQ ID NO: 375654 - DNA, 15 bp, Homo sapiens
gtactcagacacatc

SEQ ID NO: 375655 - DNA, 15 bp, Homo sapiens
tgtactcagacacat

SEQ ID NO: 375656 - DNA, 15 bp, Homo sapiens
ctgtactcagacaca

SEQ ID NO: 375657 - DNA, 15 bp, Homo sapiens
gctgtactcagacac

SEQ ID NO: 375658 - DNA, 15 bp, Homo sapiens
ggctgtactcagaca

SEQ ID NO: 375659 - DNA, 15 bp, Homo sapiens
gggctgtactcagac

SEQ ID NO: 375660 - DNA, 15 bp, Homo sapiens
agggctgtactcaga

SEQ ID NO: 375661 - DNA, 15 bp, Homo sapiens
cagggctgtactcag

SEQ ID NO: 375662 - DNA, 15 bp, Homo sapiens
acagggctgtactca

SEQ ID NO: 375663 - DNA, 15 bp, Homo sapiens
cacagggctgtactc

SEQ ID NO: 375664 - DNA, 15 bp, Homo sapiens
gcacagggctgtact

SEQ ID NO: 375665 - DNA, 15 bp, Homo sapiens
tgcacagggctgtac

SEQ ID NO: 375666 - DNA, 15 bp, Homo sapiens
ttgcacagggctgta

SEQ ID NO: 375667 - DNA, 15 bp, Homo sapiens
gttgcacagggctgt

SEQ ID NO: 375668 - DNA, 15 bp, Homo sapiens
ggttgcacagggctg

SEQ ID NO: 375669 - DNA, 15 bp, Homo sapiens
tggttgcacagggct

SEQ ID NO: 375670 - DNA, 15 bp, Homo sapiens
gtggttgcacagggc

SEQ ID NO: 375671 - DNA, 15 bp, Homo sapiens
tgtggttgcacaggg

SEQ ID NO: 375672 - DNA, 15 bp, Homo sapiens
atgtggttgcacagg

SEQ ID NO: 375673 - DNA, 15 bp, Homo sapiens
tatgtggttgcacag

SEQ ID NO: 375674 - DNA, 15 bp, Homo sapiens
ctatgtggttgcaca

SEQ ID NO: 375675 - DNA, 15 bp, Homo sapiens
cctatgtggttgcac

SEQ ID NO: 375676 - DNA, 15 bp, Homo sapiens
gcctatgtggttgca

SEQ ID NO: 375677 - DNA, 15 bp, Homo sapiens
agcctatgtggttgc

SEQ ID NO: 375678 - DNA, 15 bp, Homo sapiens
cagcctatgtggttg

SEQ ID NO: 375679 - DNA, 15 bp, Homo sapiens
tcagcctatgtggtt

SEQ ID NO: 375680 - DNA, 15 bp, Homo sapiens
ttcagcctatgtggt

SEQ ID NO: 375681 - DNA, 15 bp, Homo sapiens
gttcagcctatgtgg

SEQ ID NO: 375682 - DNA, 15 bp, Homo sapiens
tgttcagcctatgtg

SEQ ID NO: 375683 - DNA, 15 bp, Homo sapiens
gtgttcagcctatgt

SEQ ID NO: 375684 - DNA, 15 bp, Homo sapiens
ggtgttcagcctatg

SEQ ID NO: 375685 - DNA, 15 bp, Homo sapiens
gggtgttcagcctat

SEQ ID NO: 375686 - DNA, 15 bp, Homo sapiens
tgggtgttcagccta

SEQ ID NO: 375687 - DNA, 15 bp, Homo sapiens
atgggtgttcagcct

SEQ ID NO: 375688 - DNA, 15 bp, Homo sapiens
catgggtgttcagcc

SEQ ID NO: 375689 - DNA, 15 bp, Homo sapiens
tcatgggtgttcagc

SEQ ID NO: 375690 - DNA, 15 bp, Homo sapiens
ttcatgggtgttcag

SEQ ID NO: 375691 - DNA, 15 bp, Homo sapiens
tttcatgggtgttca

SEQ ID NO: 375692 - DNA, 15 bp, Homo sapiens
gtttcatgggtgttc

SEQ ID NO: 375693 - DNA, 15 bp, Homo sapiens
ggtttcatgggtgtt

SEQ ID NO: 375694 - DNA, 15 bp, Homo sapiens
tggtttcatgggtgt

SEQ ID NO: 375695 - DNA, 15 bp, Homo sapiens
ctggtttcatgggtg

SEQ ID NO: 375696 - DNA, 15 bp, Homo sapiens
gctggtttcatgggt

SEQ ID NO: 375697 - DNA, 15 bp, Homo sapiens
ggctggtttcatggg

SEQ ID NO: 375698 - DNA, 15 bp, Homo sapiens
gggctggtttcatgg

SEQ ID NO: 375699 - DNA, 15 bp, Homo sapiens
agggctggtttcatg

SEQ ID NO: 375700 - DNA, 15 bp, Homo sapiens
cagggctggtttcat

SEQ ID NO: 375701 - DNA, 15 bp, Homo sapiens
ccagggctggtttca

SEQ ID NO: 375702 - DNA, 15 bp, Homo sapiens
accagggctggtttc

SEQ ID NO: 375703 - DNA, 15 bp, Homo sapiens
aaccagggctggttt

SEQ ID NO: 375704 - DNA, 15 bp, Homo sapiens
gaaccagggctggtt

SEQ ID NO: 375705 - DNA, 15 bp, Homo sapiens
ggaaccagggctggt

SEQ ID NO: 375706 - DNA, 15 bp, Homo sapiens
tggaaccagggctgg

SEQ ID NO: 375707 - DNA, 15 bp, Homo sapiens
ttggaaccagggctg

SEQ ID NO: 375708 - DNA, 15 bp, Homo sapiens
cttggaaccagggct

SEQ ID NO: 375709 - DNA, 15 bp, Homo sapiens
ccttggaaccagggc

SEQ ID NO: 375710 - DNA, 15 bp, Homo sapiens
tccttggaaccaggg

SEQ ID NO: 375711 - DNA, 15 bp, Homo sapiens
ttccttggaaccagg

SEQ ID NO: 375712 - DNA, 15 bp, Homo sapiens
attccttggaaccag

SEQ ID NO: 375713 - DNA, 15 bp, Homo sapiens
tattccttggaacca

SEQ ID NO: 375714 - DNA, 15 bp, Homo sapiens
ttattccttggaacc

SEQ ID NO: 375715 - DNA, 15 bp, Homo sapiens
tttattccttggaac

SEQ ID NO: 375716 - DNA, 15 bp, Homo sapiens
ttttattccttggaa

SEQ ID NO: 375717 - DNA, 15 bp, Homo sapiens
attttattccttgga

SEQ ID NO: 375718 - DNA, 15 bp, Homo sapiens
gattttattccttgg

SEQ ID NO: 375719 - DNA, 15 bp, Homo sapiens
cgattttattccttg

SEQ ID NO: 375720 - DNA, 15 bp, Homo sapiens
ccgattttattcctt

SEQ ID NO: 375721 - DNA, 15 bp, Homo sapiens
accgattttattcct

SEQ ID NO: 375722 - DNA, 15 bp, Homo sapiens
aaccgattttattcc

SEQ ID NO: 375723 - DNA, 15 bp, Homo sapiens
aaaccgattttattc

SEQ ID NO: 375724 - DNA, 15 bp, Homo sapiens
caaaccgattttatt

SEQ ID NO: 375725 - DNA, 15 bp, Homo sapiens
tcaaaccgattttat

SEQ ID NO: 375726 - DNA, 15 bp, Homo sapiens
ctcaaaccgatttta

SEQ ID NO: 375727 - DNA, 15 bp, Homo sapiens
gctcaaaccgatttt

SEQ ID NO: 375728 - DNA, 15 bp, Homo sapiens
tgctcaaaccgattt

SEQ ID NO: 375729 - DNA, 15 bp, Homo sapiens
gtgctcaaaccgatt

SEQ ID NO: 375730 - DNA, 15 bp, Homo sapiens
agtgctcaaaccgat

SEQ ID NO: 375731 - DNA, 15 bp, Homo sapiens
cagtgctcaaaccga

SEQ ID NO: 375732 - DNA, 15 bp, Homo sapiens
ccagtgctcaaaccg

SEQ ID NO: 375733 - DNA, 15 bp, Homo sapiens
tccagtgctcaaacc

SEQ ID NO: 375734 - DNA, 15 bp, Homo sapiens
ctccagtgctcaaac

SEQ ID NO: 375735 - DNA, 15 bp, Homo sapiens
tctccagtgctcaaa

SEQ ID NO: 375736 - DNA, 15 bp, Homo sapiens
ttctccagtgctcaa

SEQ ID NO: 375737 - DNA, 15 bp, Homo sapiens
gttctccagtgctca

SEQ ID NO: 375738 - DNA, 15 bp, Homo sapiens
agttctccagtgctc

SEQ ID NO: 375739 - DNA, 15 bp, Homo sapiens
aagttctccagtgct

SEQ ID NO: 375740 - DNA, 15 bp, Homo sapiens
gaagttctccagtgc

SEQ ID NO: 375741 - DNA, 15 bp, Homo sapiens
agaagttctccagtg

SEQ ID NO: 375742 - DNA, 15 bp, Homo sapiens
aagaagttctccagt

SEQ ID NO: 375743 - DNA, 15 bp, Homo sapiens
aaagaagttctccag

SEQ ID NO: 375744 - DNA, 15 bp, Homo sapiens
aaaagaagttctcca

SEQ ID NO: 375745 - DNA, 15 bp, Homo sapiens
gaaaagaagttctcc

SEQ ID NO: 375746 - DNA, 15 bp, Homo sapiens
tgaaaagaagttctc

SEQ ID NO: 375747 - DNA, 15 bp, Homo sapiens
ttgaaaagaagttct

SEQ ID NO: 375748 - DNA, 15 bp, Homo sapiens
gttgaaaagaagttc

SEQ ID NO: 375749 - DNA, 15 bp, Homo sapiens
tgttgaaaagaagtt

SEQ ID NO: 375750 - DNA, 15 bp, Homo sapiens
gtgttgaaaagaagt

SEQ ID NO: 375751 - DNA, 15 bp, Homo sapiens
tgtgttgaaaagaag

SEQ ID NO: 375752 - DNA, 15 bp, Homo sapiens
ctgtgttgaaaagaa

SEQ ID NO: 375753 - DNA, 15 bp, Homo sapiens
gctgtgttgaaaaga

SEQ ID NO: 375754 - DNA, 15 bp, Homo sapiens
ggctgtgttgaaaag

SEQ ID NO: 375755 - DNA, 15 bp, Homo sapiens
tggctgtgttgaaaa

SEQ ID NO: 375756 - DNA, 15 bp, Homo sapiens
ttggctgtgttgaaa

SEQ ID NO: 375757 - DNA, 15 bp, Homo sapiens
tttggctgtgttgaa

SEQ ID NO: 375758 - DNA, 15 bp, Homo sapiens
ctttggctgtgttga

SEQ ID NO: 375759 - DNA, 15 bp, Homo sapiens
cctttggctgtgttg

SEQ ID NO: 375760 - DNA, 15 bp, Homo sapiens
ccctttggctgtgtt

SEQ ID NO: 375761 - DNA, 15 bp, Homo sapiens
cccctttggctgtgt

SEQ ID NO: 375762 - DNA, 15 bp, Homo sapiens
gcccctttggctgtg

SEQ ID NO: 375763 - DNA, 15 bp, Homo sapiens
tgcccctttggctgt

SEQ ID NO: 375764 - DNA, 15 bp, Homo sapiens
atgcccctttggctg

SEQ ID NO: 375765 - DNA, 15 bp, Homo sapiens
tatgcccctttggct

SEQ ID NO: 375766 - DNA, 15 bp, Homo sapiens
atatgcccctttggc

SEQ ID NO: 375767 - DNA, 15 bp, Homo sapiens
catatgcccctttgg

SEQ ID NO: 375768 - DNA, 15 bp, Homo sapiens
ccatatgcccctttg

SEQ ID NO: 375769 - DNA, 15 bp, Homo sapiens
accatatgccccttt

SEQ ID NO: 375770 - DNA, 15 bp, Homo sapiens
taccatatgcccctt

SEQ ID NO: 375771 - DNA, 15 bp, Homo sapiens
ctaccatatgcccct

SEQ ID NO: 375772 - DNA, 15 bp, Homo sapiens
gctaccatatgcccc

SEQ ID NO: 375773 - DNA, 15 bp, Homo sapiens
ggctaccatatgccc

SEQ ID NO: 375774 - DNA, 15 bp, Homo sapiens
tggctaccatatgcc

SEQ ID NO: 375775 - DNA, 15 bp, Homo sapiens
gtggctaccatatgc

SEQ ID NO: 375776 - DNA, 15 bp, Homo sapiens
tgtggctaccatatg

SEQ ID NO: 375777 - DNA, 15 bp, Homo sapiens
ctgtggctaccatat

SEQ ID NO: 375778 - DNA, 15 bp, Homo sapiens
cctgtggctaccata

SEQ ID NO: 375779 - DNA, 15 bp, Homo sapiens
ccctgtggctaccat

SEQ ID NO: 375780 - DNA, 15 bp, Homo sapiens
accctgtggctacca

SEQ ID NO: 375781 - DNA, 15 bp, Homo sapiens
caccctgtggctacc

SEQ ID NO: 375782 - DNA, 15 bp, Homo sapiens
ccaccctgtggctac

SEQ ID NO: 375783 - DNA, 15 bp, Homo sapiens
tccaccctgtggcta

SEQ ID NO: 375784 - DNA, 15 bp, Homo sapiens
ctccaccctgtggct

SEQ ID NO: 375785 - DNA, 15 bp, Homo sapiens
cctccaccctgtggc

SEQ ID NO: 375786 - DNA, 15 bp, Homo sapiens
acctccaccctgtgg

SEQ ID NO: 375787 - DNA, 15 bp, Homo sapiens
cacctccaccctgtg

SEQ ID NO: 375788 - DNA, 15 bp, Homo sapiens
ccacctccaccctgt

SEQ ID NO: 375789 - DNA, 15 bp, Homo sapiens
cccacctccaccctg

SEQ ID NO: 375790 - DNA, 15 bp, Homo sapiens
ccccacctccaccct

SEQ ID NO: 375791 - DNA, 15 bp, Homo sapiens
cccccacctccaccc

SEQ ID NO: 375792 - DNA, 15 bp, Homo sapiens
gcccccacctccacc

SEQ ID NO: 375793 - DNA, 15 bp, Homo sapiens
ggcccccacctccac

SEQ ID NO: 375794 - DNA, 15 bp, Homo sapiens
gggcccccacctcca

SEQ ID NO: 375795 - DNA, 15 bp, Homo sapiens
tgggcccccacctcc

SEQ ID NO: 375796 - DNA, 15 bp, Homo sapiens
atgggcccccacctc

SEQ ID NO: 375797 - DNA, 15 bp, Homo sapiens
gatgggcccccacct

SEQ ID NO: 375798 - DNA, 15 bp, Homo sapiens
agatgggcccccacc

SEQ ID NO: 375799 - DNA, 15 bp, Homo sapiens
cagatgggcccccac

SEQ ID NO: 375800 - DNA, 15 bp, Homo sapiens
ccagatgggccccca

SEQ ID NO: 375801 - DNA, 15 bp, Homo sapiens
tccagatgggccccc

SEQ ID NO: 375802 - DNA, 15 bp, Homo sapiens
atccagatgggcccc

SEQ ID NO: 375803 - DNA, 15 bp, Homo sapiens
aatccagatgggccc

SEQ ID NO: 375804 - DNA, 15 bp, Homo sapiens
aaatccagatgggcc

SEQ ID NO: 375805 - DNA, 15 bp, Homo sapiens
caaatccagatgggc

SEQ ID NO: 375806 - DNA, 15 bp, Homo sapiens
tcaaatccagatggg

SEQ ID NO: 375807 - DNA, 15 bp, Homo sapiens
ctcaaatccagatgg

SEQ ID NO: 375808 - DNA, 15 bp, Homo sapiens
actcaaatccagatg

SEQ ID NO: 375809 - DNA, 15 bp, Homo sapiens
aactcaaatccagat

SEQ ID NO: 375810 - DNA, 15 bp, Homo sapiens
caactcaaatccaga

SEQ ID NO: 375811 - DNA, 15 bp, Homo sapiens
gcaactcaaatccag

SEQ ID NO: 375812 - DNA, 15 bp, Homo sapiens
tgcaactcaaatcca

SEQ ID NO: 375813 - DNA, 15 bp, Homo sapiens
gtgcaactcaaatcc

SEQ ID NO: 375814 - DNA, 15 bp, Homo sapiens
tgtgcaactcaaatc

SEQ ID NO: 375815 - DNA, 15 bp, Homo sapiens
ttgtgcaactcaaat

SEQ ID NO: 375816 - DNA, 15 bp, Homo sapiens
cttgtgcaactcaaa

SEQ ID NO: 375817 - DNA, 15 bp, Homo sapiens
gcttgtgcaactcaa

SEQ ID NO: 375818 - DNA, 15 bp, Homo sapiens
tgcttgtgcaactca

SEQ ID NO: 375819 - DNA, 15 bp, Homo sapiens
atgcttgtgcaactc

SEQ ID NO: 375820 - DNA, 15 bp, Homo sapiens
gatgcttgtgcaact

SEQ ID NO: 375821 - DNA, 15 bp, Homo sapiens
agatgcttgtgcaac

SEQ ID NO: 375822 - DNA, 15 bp, Homo sapiens
tagatgcttgtgcaa

SEQ ID NO: 375823 - DNA, 15 bp, Homo sapiens
atagatgcttgtgca

SEQ ID NO: 375824 - DNA, 15 bp, Homo sapiens
tatagatgcttgtgc

SEQ ID NO: 375825 - DNA, 15 bp, Homo sapiens
atatagatgcttgtg

SEQ ID NO: 375826 - DNA, 15 bp, Homo sapiens
gatatagatgcttgt

SEQ ID NO: 375827 - DNA, 15 bp, Homo sapiens
tgatatagatgcttg

SEQ ID NO: 375828 - DNA, 15 bp, Homo sapiens
atgatatagatgctt

SEQ ID NO: 375829 - DNA, 15 bp, Homo sapiens
gatgatatagatgct

SEQ ID NO: 375830 - DNA, 15 bp, Homo sapiens
tgatgatatagatgc

SEQ ID NO: 375831 - DNA, 15 bp, Homo sapiens
ctgatgatatagatg

SEQ ID NO: 375832 - DNA, 15 bp, Homo sapiens
actgatgatatagat

SEQ ID NO: 375833 - DNA, 15 bp, Homo sapiens
tactgatgatataga

SEQ ID NO: 375834 - DNA, 15 bp, Homo sapiens
ctactgatgatatag

SEQ ID NO: 375835 - DNA, 15 bp, Homo sapiens
cctactgatgatata

SEQ ID NO: 375836 - DNA, 15 bp, Homo sapiens
acctactgatgatat

SEQ ID NO: 375837 - DNA, 15 bp, Homo sapiens
tacctactgatgata

SEQ ID NO: 375838 - DNA, 15 bp, Homo sapiens
ctacctactgatgat

SEQ ID NO: 375839 - DNA, 15 bp, Homo sapiens
actacctactgatga

SEQ ID NO: 375840 - DNA, 15 bp, Homo sapiens
gactacctactgatg

SEQ ID NO: 375841 - DNA, 15 bp, Homo sapiens
tgactacctactgat

SEQ ID NO: 375842 - DNA, 15 bp, Homo sapiens
ctgactacctactga

SEQ ID NO: 375843 - DNA, 15 bp, Homo sapiens
actgactacctactg

SEQ ID NO: 375844 - DNA, 15 bp, Homo sapiens
aactgactacctact

SEQ ID NO: 375845 - DNA, 15 bp, Homo sapiens
gaactgactacctac

SEQ ID NO: 375846 - DNA, 15 bp, Homo sapiens
agaactgactaccta

SEQ ID NO: 375847 - DNA, 15 bp, Homo sapiens
aagaactgactacct

SEQ ID NO: 375848 - DNA, 15 bp, Homo sapiens
caagaactgactacc

SEQ ID NO: 375849 - DNA, 15 bp, Homo sapiens
ccaagaactgactac

SEQ ID NO: 375850 - DNA, 15 bp, Homo sapiens
tccaagaactgacta

SEQ ID NO: 375851 - DNA, 15 bp, Homo sapiens
ttccaagaactgact

SEQ ID NO: 375852 - DNA, 15 bp, Homo sapiens
tttccaagaactgac

SEQ ID NO: 375853 - DNA, 15 bp, Homo sapiens
atttccaagaactga

SEQ ID NO: 375854 - DNA, 15 bp, Homo sapiens
aatttccaagaactg

SEQ ID NO: 375855 - DNA, 15 bp, Homo sapiens
gaatttccaagaact

SEQ ID NO: 375856 - DNA, 15 bp, Homo sapiens
tgaatttccaagaac

SEQ ID NO: 375857 - DNA, 15 bp, Homo sapiens
ttgaatttccaagaa

SEQ ID NO: 375858 - DNA, 15 bp, Homo sapiens
tttgaatttccaaga

SEQ ID NO: 375859 - DNA, 15 bp, Homo sapiens
atttgaatttccaag

SEQ ID NO: 375860 - DNA, 15 bp, Homo sapiens
catttgaatttccaa

SEQ ID NO: 375861 - DNA, 15 bp, Homo sapiens
tcatttgaatttcca

SEQ ID NO: 375862 - DNA, 15 bp, Homo sapiens
ctcatttgaatttcc

SEQ ID NO: 375863 - DNA, 15 bp, Homo sapiens
tctcatttgaatttc

SEQ ID NO: 375864 - DNA, 15 bp, Homo sapiens
ttctcatttgaattt

SEQ ID NO: 375865 - DNA, 15 bp, Homo sapiens
attctcatttgaatt

SEQ ID NO: 375866 - DNA, 15 bp, Homo sapiens
aattctcatttgaat

SEQ ID NO: 375867 - DNA, 15 bp, Homo sapiens
gaattctcatttgaa

SEQ ID NO: 375868 - DNA, 15 bp, Homo sapiens
tgaattctcatttga

SEQ ID NO: 375869 - DNA, 15 bp, Homo sapiens
ttgaattctcatttg

SEQ ID NO: 375870 - DNA, 15 bp, Homo sapiens
tttgaattctcattt

SEQ ID NO: 375871 - DNA, 15 bp, Homo sapiens
ctttgaattctcatt

SEQ ID NO: 375872 - DNA, 15 bp, Homo sapiens
actttgaattctcat

SEQ ID NO: 375873 - DNA, 15 bp, Homo sapiens
cactttgaattctca

SEQ ID NO: 375874 - DNA, 15 bp, Homo sapiens
tcactttgaattctc

SEQ ID NO: 375875 - DNA, 15 bp, Homo sapiens
ttcactttgaattct

SEQ ID NO: 375876 - DNA, 15 bp, Homo sapiens
attcactttgaattc

SEQ ID NO: 375877 - DNA, 15 bp, Homo sapiens
aattcactttgaatt

SEQ ID NO: 375878 - DNA, 15 bp, Homo sapiens
caattcactttgaat

SEQ ID NO: 375879 - DNA, 15 bp, Homo sapiens
tcaattcactttgaa

SEQ ID NO: 375880 - DNA, 15 bp, Homo sapiens
atcaattcactttga

SEQ ID NO: 375881 - DNA, 15 bp, Homo sapiens
aatcaattcactttg

SEQ ID NO: 375882 - DNA, 15 bp, Homo sapiens
aaatcaattcacttt

SEQ ID NO: 375883 - DNA, 15 bp, Homo sapiens
caaatcaattcactt

SEQ ID NO: 375884 - DNA, 15 bp, Homo sapiens
tcaaatcaattcact

SEQ ID NO: 375885 - DNA, 15 bp, Homo sapiens
ttcaaatcaattcac

SEQ ID NO: 375886 - DNA, 15 bp, Homo sapiens
tttcaaatcaattca

SEQ ID NO: 375887 - DNA, 15 bp, Homo sapiens
atttcaaatcaattc

SEQ ID NO: 375888 - DNA, 15 bp, Homo sapiens
aatttcaaatcaatt

SEQ ID NO: 375889 - DNA, 15 bp, Homo sapiens
aaatttcaaatcaat

SEQ ID NO: 375890 - DNA, 15 bp, Homo sapiens
aaaatttcaaatcaa

SEQ ID NO: 375891 - DNA, 15 bp, Homo sapiens
aaaaatttcaaatca

SEQ ID NO: 375892 - DNA, 15 bp, Homo sapiens
taaaaatttcaaatc

SEQ ID NO: 375893 - DNA, 15 bp, Homo sapiens
ttaaaaatttcaaat

SEQ ID NO: 375894 - DNA, 15 bp, Homo sapiens
tttaaaaatttcaaa

SEQ ID NO: 375895 - DNA, 15 bp, Homo sapiens
gtttaaaaatttcaa

SEQ ID NO: 375896 - DNA, 15 bp, Homo sapiens
tgtttaaaaatttca

SEQ ID NO: 375897 - DNA, 15 bp, Homo sapiens
ttgtttaaaaatttc

SEQ ID NO: 375898 - DNA, 15 bp, Homo sapiens
cttgtttaaaaattt

SEQ ID NO: 375899 - DNA, 15 bp, Homo sapiens
ggcttgtttaaaaat

SEQ ID NO: 375900 - DNA, 15 bp, Homo sapiens
tggcttgtttaaaaa

SEQ ID NO: 375901 - DNA, 15 bp, Homo sapiens
atggcttgtttaaaa

SEQ ID NO: 375902 - DNA, 15 bp, Homo sapiens
gatggcttgtttaaa

SEQ ID NO: 375903 - DNA, 15 bp, Homo sapiens
agatggcttgtttaa

SEQ ID NO: 375904 - DNA, 15 bp, Homo sapiens
gagatggcttgttta

SEQ ID NO: 375905 - DNA, 15 bp, Homo sapiens
agagatggcttgttt

SEQ ID NO: 375906 - DNA, 15 bp, Homo sapiens
gagagatggcttgtt

SEQ ID NO: 375907 - DNA, 15 bp, Homo sapiens
tgagagatggcttgt

SEQ ID NO: 375908 - DNA, 15 bp, Homo sapiens
atgagagatggcttg

SEQ ID NO: 375909 - DNA, 15 bp, Homo sapiens
gatgagagatggctt

SEQ ID NO: 375910 - DNA, 15 bp, Homo sapiens
agatgagagatggct

SEQ ID NO: 375911 - DNA, 15 bp, Homo sapiens
gagatgagagatggc

SEQ ID NO: 375912 - DNA, 15 bp, Homo sapiens
ggagatgagagatgg

SEQ ID NO: 375913 - DNA, 15 bp, Homo sapiens
aggagatgagagatg

SEQ ID NO: 375914 - DNA, 15 bp, Homo sapiens
aaggagatgagagat

SEQ ID NO: 375915 - DNA, 15 bp, Homo sapiens
aaaggagatgagaga

SEQ ID NO: 375916 - DNA, 15 bp, Homo sapiens
caaaggagatgagag

SEQ ID NO: 375917 - DNA, 15 bp, Homo sapiens
tcaaaggagatgaga

SEQ ID NO: 375918 - DNA, 15 bp, Homo sapiens
ttcaaaggagatgag

SEQ ID NO: 375919 - DNA, 15 bp, Homo sapiens
tttcaaaggagatga

SEQ ID NO: 375920 - DNA, 15 bp, Homo sapiens
atttcaaaggagatg

SEQ ID NO: 375921 - DNA, 15 bp, Homo sapiens
catttcaaaggagat

SEQ ID NO: 375922 - DNA, 15 bp, Homo sapiens
gcatttcaaaggaga

SEQ ID NO: 375923 - DNA, 15 bp, Homo sapiens
tgcatttcaaaggag

SEQ ID NO: 375924 - DNA, 15 bp, Homo sapiens
gtgcatttcaaagga

SEQ ID NO: 375925 - DNA, 15 bp, Homo sapiens
tgtgcatttcaaagg

SEQ ID NO: 375926 - DNA, 15 bp, Homo sapiens
gtgtgcatttcaaag

SEQ ID NO: 375927 - DNA, 15 bp, Homo sapiens
tgtgtgcatttcaaa

SEQ ID NO: 375928 - DNA, 15 bp, Homo sapiens
ttgtgtgcatttcaa

SEQ ID NO: 375929 - DNA, 15 bp, Homo sapiens
tttgtgtgcatttca

SEQ ID NO: 375930 - DNA, 15 bp, Homo sapiens
ttttgtgtgcatttc

SEQ ID NO: 375931 - DNA, 15 bp, Homo sapiens
tttttgtgtgcattt

SEQ ID NO: 375932 - DNA, 15 bp, Homo sapiens
atttttgtgtgcatt

SEQ ID NO: 375933 - DNA, 15 bp, Homo sapiens
catttttgtgtgcat

SEQ ID NO: 375934 - DNA, 15 bp, Homo sapiens
acatttttgtgtgca

SEQ ID NO: 375935 - DNA, 15 bp, Homo sapiens
aacatttttgtgtgc

SEQ ID NO: 375936 - DNA, 15 bp, Homo sapiens
aaacatttttgtgtg

SEQ ID NO: 375937 - DNA, 15 bp, Homo sapiens
caaacatttttgtgt

SEQ ID NO: 375938 - DNA, 15 bp, Homo sapiens
ccaaacatttttgtg

SEQ ID NO: 375939 - DNA, 15 bp, Homo sapiens
cccaaacatttttgt

SEQ ID NO: 375940 - DNA, 15 bp, Homo sapiens
tcccaaacatttttg

SEQ ID NO: 375941 - DNA, 15 bp, Homo sapiens
atcccaaacattttt

SEQ ID NO: 375942 - DNA, 15 bp, Homo sapiens
tatcccaaacatttt

SEQ ID NO: 375943 - DNA, 15 bp, Homo sapiens
ctatcccaaacattt

SEQ ID NO: 375944 - DNA, 15 bp, Homo sapiens
actatcccaaacatt

SEQ ID NO: 375945 - DNA, 15 bp, Homo sapiens
cactatcccaaacat

SEQ ID NO: 375946 - DNA, 15 bp, Homo sapiens
acactatcccaaaca

SEQ ID NO: 375947 - DNA, 15 bp, Homo sapiens
cacactatcccaaac

SEQ ID NO: 375948 - DNA, 15 bp, Homo sapiens
tcacactatcccaaa

SEQ ID NO: 375949 - DNA, 15 bp, Homo sapiens
gtcacactatcccaa

SEQ ID NO: 375950 - DNA, 15 bp, Homo sapiens
agtcacactatccca

SEQ ID NO: 375951 - DNA, 15 bp, Homo sapiens
tagtcacactatccc

SEQ ID NO: 375952 - DNA, 15 bp, Homo sapiens
ttagtcacactatcc

SEQ ID NO: 375953 - DNA, 15 bp, Homo sapiens
cttagtcacactatc

SEQ ID NO: 375954 - DNA, 15 bp, Homo sapiens
ccttagtcacactat

SEQ ID NO: 375955 - DNA, 15 bp, Homo sapiens
gccttagtcacacta

SEQ ID NO: 375956 - DNA, 15 bp, Homo sapiens
tgccttagtcacact

SEQ ID NO: 375957 - DNA, 15 bp, Homo sapiens
atgccttagtcacac

SEQ ID NO: 375958 - DNA, 15 bp, Homo sapiens
catgccttagtcaca

SEQ ID NO: 375959 - DNA, 15 bp, Homo sapiens
acatgccttagtcac

SEQ ID NO: 375960 - DNA, 15 bp, Homo sapiens
aacatgccttagtca

SEQ ID NO: 375961 - DNA, 15 bp, Homo sapiens
aaacatgccttagtc

SEQ ID NO: 375962 - DNA, 15 bp, Homo sapiens
caaacatgccttagt

SEQ ID NO: 375963 - DNA, 15 bp, Homo sapiens
ccaaacatgccttag

SEQ ID NO: 375964 - DNA, 15 bp, Homo sapiens
tccaaacatgcctta

SEQ ID NO: 375965 - DNA, 15 bp, Homo sapiens
atccaaacatgcctt

SEQ ID NO: 375966 - DNA, 15 bp, Homo sapiens
catccaaacatgcct

SEQ ID NO: 375967 - DNA, 15 bp, Homo sapiens
gcatccaaacatgcc

SEQ ID NO: 375968 - DNA, 15 bp, Homo sapiens
tgcatccaaacatgc

SEQ ID NO: 375969 - DNA, 15 bp, Homo sapiens
ttgcatccaaacatg

SEQ ID NO: 375970 - DNA, 15 bp, Homo sapiens
attgcatccaaacat

SEQ ID NO: 375971 - DNA, 15 bp, Homo sapiens
tattgcatccaaaca

SEQ ID NO: 375972 - DNA, 15 bp, Homo sapiens
ctattgcatccaaac

SEQ ID NO: 375973 - DNA, 15 bp, Homo sapiens
actattgcatccaaa

SEQ ID NO: 375974 - DNA, 15 bp, Homo sapiens
tactattgcatccaa

SEQ ID NO: 375975 - DNA, 15 bp, Homo sapiens
atactattgcatcca

SEQ ID NO: 375976 - DNA, 15 bp, Homo sapiens
catactattgcatcc

SEQ ID NO: 375977 - DNA, 15 bp, Homo sapiens
ccatactattgcatc

SEQ ID NO: 375978 - DNA, 15 bp, Homo sapiens
cccatactattgcat

SEQ ID NO: 375979 - DNA, 15 bp, Homo sapiens
tcccatactattgca

SEQ ID NO: 375980 - DNA, 15 bp, Homo sapiens
ctcccatactattgc

SEQ ID NO: 375981 - DNA, 15 bp, Homo sapiens
gctcccatactattg

SEQ ID NO: 375982 - DNA, 15 bp, Homo sapiens
tgctcccatactatt

SEQ ID NO: 375983 - DNA, 15 bp, Homo sapiens
ctgctcccatactat

SEQ ID NO: 375984 - DNA, 15 bp, Homo sapiens
gctgctcccatacta

SEQ ID NO: 375985 - DNA, 15 bp, Homo sapiens
tgctgctcccatact

SEQ ID NO: 375986 - DNA, 15 bp, Homo sapiens
atgctgctcccatac

SEQ ID NO: 375987 - DNA, 15 bp, Homo sapiens
catgctgctcccata

SEQ ID NO: 375988 - DNA, 15 bp, Homo sapiens
acatgctgctcccat

SEQ ID NO: 375989 - DNA, 15 bp, Homo sapiens
gacatgctgctccca

SEQ ID NO: 375990 - DNA, 15 bp, Homo sapiens
agacatgctgctccc

SEQ ID NO: 375991 - DNA, 15 bp, Homo sapiens
aagacatgctgctcc

SEQ ID NO: 375992 - DNA, 15 bp, Homo sapiens
gaagacatgctgctc

SEQ ID NO: 375993 - DNA, 15 bp, Homo sapiens
agaagacatgctgct

SEQ ID NO: 375994 - DNA, 15 bp, Homo sapiens
cagaagacatgctgc

SEQ ID NO: 375995 - DNA, 15 bp, Homo sapiens
gcagaagacatgctg

SEQ ID NO: 375996 - DNA, 15 bp, Homo sapiens
tgcagaagacatgct

SEQ ID NO: 375997 - DNA, 15 bp, Homo sapiens
atgcagaagacatgc

SEQ ID NO: 375998 - DNA, 15 bp, Homo sapiens
aatgcagaagacatg

SEQ ID NO: 375999 - DNA, 15 bp, Homo sapiens
gaatgcagaagacat

SEQ ID NO: 376000 - DNA, 15 bp, Homo sapiens
agaatgcagaagaca

SEQ ID NO: 376001 - DNA, 15 bp, Homo sapiens
tagaatgcagaagac

SEQ ID NO: 376002 - DNA, 15 bp, Homo sapiens
ctagaatgcagaaga

SEQ ID NO: 376003 - DNA, 15 bp, Homo sapiens
gctagaatgcagaag

SEQ ID NO: 376004 - DNA, 15 bp, Homo sapiens
ggctagaatgcagaa

SEQ ID NO: 376005 - DNA, 15 bp, Homo sapiens
aggctagaatgcaga

SEQ ID NO: 376006 - DNA, 15 bp, Homo sapiens
taggctagaatgcag

SEQ ID NO: 376007 - DNA, 15 bp, Homo sapiens
ctaggctagaatgca

SEQ ID NO: 376008 - DNA, 15 bp, Homo sapiens
cctaggctagaatgc

SEQ ID NO: 376009 - DNA, 15 bp, Homo sapiens
tcctaggctagaatg

SEQ ID NO: 376010 - DNA, 15 bp, Homo sapiens
atcctaggctagaat

SEQ ID NO: 376011 - DNA, 15 bp, Homo sapiens
tatcctaggctagaa

SEQ ID NO: 376012 - DNA, 15 bp, Homo sapiens
ttatcctaggctaga

SEQ ID NO: 376013 - DNA, 15 bp, Homo sapiens
tttatcctaggctag

SEQ ID NO: 376014 - DNA, 15 bp, Homo sapiens
ttttatcctaggcta

SEQ ID NO: 376015 - DNA, 15 bp, Homo sapiens
cttttatcctaggct

SEQ ID NO: 376016 - DNA, 15 bp, Homo sapiens
ccttttatcctaggc

SEQ ID NO: 376017 - DNA, 15 bp, Homo sapiens
cccttttatcctagg

SEQ ID NO: 376018 - DNA, 15 bp, Homo sapiens
acccttttatcctag

SEQ ID NO: 376019 - DNA, 15 bp, Homo sapiens
tacccttttatccta

SEQ ID NO: 376020 - DNA, 15 bp, Homo sapiens
atacccttttatcct

SEQ ID NO: 376021 - DNA, 15 bp, Homo sapiens
gatacccttttatcc

SEQ ID NO: 376022 - DNA, 15 bp, Homo sapiens
tgatacccttttatc

SEQ ID NO: 376023 - DNA, 15 bp, Homo sapiens
ctgatacccttttat

SEQ ID NO: 376024 - DNA, 15 bp, Homo sapiens
cctgataccctttta

SEQ ID NO: 376025 - DNA, 15 bp, Homo sapiens
tcctgataccctttt

SEQ ID NO: 376026 - DNA, 15 bp, Homo sapiens
ttcctgatacccttt

SEQ ID NO: 376027 - DNA, 15 bp, Homo sapiens
attcctgataccctt

SEQ ID NO: 376028 - DNA, 15 bp, Homo sapiens
gattcctgataccct

SEQ ID NO: 376029 - DNA, 15 bp, Homo sapiens
agattcctgataccc

SEQ ID NO: 376030 - DNA, 15 bp, Homo sapiens
cagattcctgatacc

SEQ ID NO: 376031 - DNA, 15 bp, Homo sapiens
ccagattcctgatac

SEQ ID NO: 376032 - DNA, 15 bp, Homo sapiens
accagattcctgata

SEQ ID NO: 376033 - DNA, 15 bp, Homo sapiens
taccagattcctgat

SEQ ID NO: 376034 - DNA, 15 bp, Homo sapiens
ttaccagattcctga

SEQ ID NO: 376035 - DNA, 15 bp, Homo sapiens
gttaccagattcctg

SEQ ID NO: 376036 - DNA, 15 bp, Homo sapiens
agttaccagattcct

SEQ ID NO: 376037 - DNA, 15 bp, Homo sapiens
cagttaccagattcc

SEQ ID NO: 376038 - DNA, 15 bp, Homo sapiens
acagttaccagattc

SEQ ID NO: 376039 - DNA, 15 bp, Homo sapiens
gacagttaccagatt

SEQ ID NO: 376040 - DNA, 15 bp, Homo sapiens
tgacagttaccagat

SEQ ID NO: 376041 - DNA, 15 bp, Homo sapiens
atgacagttaccaga

SEQ ID NO: 376042 - DNA, 15 bp, Homo sapiens
aatgacagttaccag

SEQ ID NO: 376043 - DNA, 15 bp, Homo sapiens
caatgacagttacca

SEQ ID NO: 376044 - DNA, 15 bp, Homo sapiens
acaatgacagttacc

SEQ ID NO: 376045 - DNA, 15 bp, Homo sapiens
tacaatgacagttac

SEQ ID NO: 376046 - DNA, 15 bp, Homo sapiens
atacaatgacagtta

SEQ ID NO: 376047 - DNA, 15 bp, Homo sapiens
aatacaatgacagtt

SEQ ID NO: 376048 - DNA, 15 bp, Homo sapiens
aaatacaatgacagt

SEQ ID NO: 376049 - DNA, 15 bp, Homo sapiens
taaatacaatgacag

SEQ ID NO: 376050 - DNA, 15 bp, Homo sapiens
ataaatacaatgaca

SEQ ID NO: 376051 - DNA, 15 bp, Homo sapiens
gataaatacaatgac

SEQ ID NO: 376052 - DNA, 15 bp, Homo sapiens
tgataaatacaatga

SEQ ID NO: 376053 - DNA, 15 bp, Homo sapiens
atgataaatacaatg

SEQ ID NO: 376054 - DNA, 15 bp, Homo sapiens
gatgataaatacaat

SEQ ID NO: 376055 - DNA, 15 bp, Homo sapiens
tgatgataaatacaa

SEQ ID NO: 376056 - DNA, 15 bp, Homo sapiens
ctgatgataaataca

SEQ ID NO: 376057 - DNA, 15 bp, Homo sapiens
cctgatgataaatac

SEQ ID NO: 376058 - DNA, 15 bp, Homo sapiens
tcctgatgataaata

SEQ ID NO: 376059 - DNA, 15 bp, Homo sapiens
ctcctgatgataaat

SEQ ID NO: 376060 - DNA, 15 bp, Homo sapiens
gctcctgatgataaa

SEQ ID NO: 376061 - DNA, 15 bp, Homo sapiens
tgctcctgatgataa

SEQ ID NO: 376062 - DNA, 15 bp, Homo sapiens
atgctcctgatgata

SEQ ID NO: 376063 - DNA, 15 bp, Homo sapiens
gatgctcctgatgat

SEQ ID NO: 376064 - DNA, 15 bp, Homo sapiens
tgatgctcctgatga

SEQ ID NO: 376065 - DNA, 15 bp, Homo sapiens
atgatgctcctgatg

SEQ ID NO: 376066 - DNA, 15 bp, Homo sapiens
aatgatgctcctgat

SEQ ID NO: 376067 - DNA, 15 bp, Homo sapiens
aaatgatgctcctga

SEQ ID NO: 376068 - DNA, 15 bp, Homo sapiens
taaatgatgctcctg

SEQ ID NO: 376069 - DNA, 15 bp, Homo sapiens
gtaaatgatgctcct

SEQ ID NO: 376070 - DNA, 15 bp, Homo sapiens
agtaaatgatgctcc

SEQ ID NO: 376071 - DNA, 15 bp, Homo sapiens
tagtaaatgatgctc

SEQ ID NO: 376072 - DNA, 15 bp, Homo sapiens
ttagtaaatgatgct

SEQ ID NO: 376073 - DNA, 15 bp, Homo sapiens
cttagtaaatgatgc

SEQ ID NO: 376074 - DNA, 15 bp, Homo sapiens
ccttagtaaatgatg

SEQ ID NO: 376075 - DNA, 15 bp, Homo sapiens
cccttagtaaatgat

SEQ ID NO: 376076 - DNA, 15 bp, Homo sapiens
gcccttagtaaatga

SEQ ID NO: 376077 - DNA, 15 bp, Homo sapiens
ggcccttagtaaatg

SEQ ID NO: 376078 - DNA, 15 bp, Homo sapiens
gggcccttagtaaat

SEQ ID NO: 376079 - DNA, 15 bp, Homo sapiens
tgggcccttagtaaa

SEQ ID NO: 376080 - DNA, 15 bp, Homo sapiens
ctgggcccttagtaa

SEQ ID NO: 376081 - DNA, 15 bp, Homo sapiens
tctgggcccttagta

SEQ ID NO: 376082 - DNA, 15 bp, Homo sapiens
ttctgggcccttagt

SEQ ID NO: 376083 - DNA, 15 bp, Homo sapiens
gttctgggcccttag

SEQ ID NO: 376084 - DNA, 15 bp, Homo sapiens
agttctgggccctta

SEQ ID NO: 376085 - DNA, 15 bp, Homo sapiens
cagttctgggccctt

SEQ ID NO: 376086 - DNA, 15 bp, Homo sapiens
acagttctgggccct

SEQ ID NO: 376087 - DNA, 15 bp, Homo sapiens
cacagttctgggccc

SEQ ID NO: 376088 - DNA, 15 bp, Homo sapiens
gcacagttctgggcc

SEQ ID NO: 376089 - DNA, 15 bp, Homo sapiens
cgcacagttctgggc

SEQ ID NO: 376090 - DNA, 15 bp, Homo sapiens
tcgcacagttctggg

SEQ ID NO: 376091 - DNA, 15 bp, Homo sapiens
ctcgcacagttctgg

SEQ ID NO: 376092 - DNA, 15 bp, Homo sapiens
cctcgcacagttctg

SEQ ID NO: 376093 - DNA, 15 bp, Homo sapiens
gcctcgcacagttct

SEQ ID NO: 376094 - DNA, 15 bp, Homo sapiens
tgcctcgcacagttc

SEQ ID NO: 376095 - DNA, 15 bp, Homo sapiens
gtgcctcgcacagtt

SEQ ID NO: 376096 - DNA, 15 bp, Homo sapiens
agtgcctcgcacagt

SEQ ID NO: 376097 - DNA, 15 bp, Homo sapiens
aagtgcctcgcacag

SEQ ID NO: 376098 - DNA, 15 bp, Homo sapiens
aaagtgcctcgcaca

SEQ ID NO: 376099 - DNA, 15 bp, Homo sapiens
taaagtgcctcgcac

SEQ ID NO: 376100 - DNA, 15 bp, Homo sapiens
ctaaagtgcctcgca

SEQ ID NO: 376101 - DNA, 15 bp, Homo sapiens
gctaaagtgcctcgc

SEQ ID NO: 376102 - DNA, 15 bp, Homo sapiens
agctaaagtgcctcg

SEQ ID NO: 376103 - DNA, 15 bp, Homo sapiens
tagctaaagtgcctc

SEQ ID NO: 376104 - DNA, 15 bp, Homo sapiens
gtagctaaagtgcct

SEQ ID NO: 376105 - DNA, 15 bp, Homo sapiens
tgtagctaaagtgcc

SEQ ID NO: 376106 - DNA, 15 bp, Homo sapiens
gtgtagctaaagtgc

SEQ ID NO: 376107 - DNA, 15 bp, Homo sapiens
agtgtagctaaagtg

SEQ ID NO: 376108 - DNA, 15 bp, Homo sapiens
tagtgtagctaaagt

SEQ ID NO: 376109 - DNA, 15 bp, Homo sapiens
atagtgtagctaaag

SEQ ID NO: 376110 - DNA, 15 bp, Homo sapiens
gatagtgtagctaaa

SEQ ID NO: 376111 - DNA, 15 bp, Homo sapiens
cgatagtgtagctaa

SEQ ID NO: 376112 - DNA, 15 bp, Homo sapiens
tcgatagtgtagcta

SEQ ID NO: 376113 - DNA, 15 bp, Homo sapiens
ttcgatagtgtagct

SEQ ID NO: 376114 - DNA, 15 bp, Homo sapiens
attcgatagtgtagc

SEQ ID NO: 376115 - DNA, 15 bp, Homo sapiens
gattcgatagtgtag

SEQ ID NO: 376116 - DNA, 15 bp, Homo sapiens
agattcgatagtgta

SEQ ID NO: 376117 - DNA, 15 bp, Homo sapiens
aagattcgatagtgt

SEQ ID NO: 376118 - DNA, 15 bp, Homo sapiens
aaagattcgatagtg

SEQ ID NO: 376119 - DNA, 15 bp, Homo sapiens
aaaagattcgatagt

SEQ ID NO: 376120 - DNA, 15 bp, Homo sapiens
caaaagattcgatag

SEQ ID NO: 376121 - DNA, 15 bp, Homo sapiens
ccaaaagattcgata

SEQ ID NO: 376122 - DNA, 15 bp, Homo sapiens
tccaaaagattcgat

SEQ ID NO: 376123 - DNA, 15 bp, Homo sapiens
gtccaaaagattcga

SEQ ID NO: 376124 - DNA, 15 bp, Homo sapiens
tgtccaaaagattcg

SEQ ID NO: 376125 - DNA, 15 bp, Homo sapiens
ttgtccaaaagattc

SEQ ID NO: 376126 - DNA, 15 bp, Homo sapiens
attgtccaaaagatt

SEQ ID NO: 376127 - DNA, 15 bp, Homo sapiens
tattgtccaaaagat

SEQ ID NO: 376128 - DNA, 15 bp, Homo sapiens
ttattgtccaaaaga

SEQ ID NO: 376129 - DNA, 15 bp, Homo sapiens
attattgtccaaaag

SEQ ID NO: 376130 - DNA, 15 bp, Homo sapiens
cattattgtccaaaa

SEQ ID NO: 376131 - DNA, 15 bp, Homo sapiens
acattattgtccaaa

SEQ ID NO: 376132 - DNA, 15 bp, Homo sapiens
cacattattgtccaa

SEQ ID NO: 376133 - DNA, 15 bp, Homo sapiens
tcacattattgtcca

SEQ ID NO: 376134 - DNA, 15 bp, Homo sapiens
ttcacattattgtcc

SEQ ID NO: 376135 - DNA, 15 bp, Homo sapiens
attcacattattgtc

SEQ ID NO: 376136 - DNA, 15 bp, Homo sapiens
tattcacattattgt

SEQ ID NO: 376137 - DNA, 15 bp, Homo sapiens
gtattcacattattg

SEQ ID NO: 376138 - DNA, 15 bp, Homo sapiens
agtattcacattatt

SEQ ID NO: 376139 - DNA, 15 bp, Homo sapiens
gagtattcacattat

SEQ ID NO: 376140 - DNA, 15 bp, Homo sapiens
agagtattcacatta

SEQ ID NO: 376141 - DNA, 15 bp, Homo sapiens
aagagtattcacatt

SEQ ID NO: 376142 - DNA, 15 bp, Homo sapiens
caagagtattcacat

SEQ ID NO: 376143 - DNA, 15 bp, Homo sapiens
ccaagagtattcaca

SEQ ID NO: 376144 - DNA, 15 bp, Homo sapiens
accaagagtattcac

SEQ ID NO: 376145 - DNA, 15 bp, Homo sapiens
aaccaagagtattca

SEQ ID NO: 376146 - DNA, 15 bp, Homo sapiens
aaaccaagagtattc

SEQ ID NO: 376147 - DNA, 15 bp, Homo sapiens
taaaccaagagtatt

SEQ ID NO: 376148 - DNA, 15 bp, Homo sapiens
ttaaaccaagagtat

SEQ ID NO: 376149 - DNA, 15 bp, Homo sapiens
cttaaaccaagagta

SEQ ID NO: 376150 - DNA, 15 bp, Homo sapiens
acttaaaccaagagt

SEQ ID NO: 376151 - DNA, 15 bp, Homo sapiens
cacttaaaccaagag

SEQ ID NO: 376152 - DNA, 15 bp, Homo sapiens
acacttaaaccaaga

SEQ ID NO: 376153 - DNA, 15 bp, Homo sapiens
aacacttaaaccaag

SEQ ID NO: 376154 - DNA, 15 bp, Homo sapiens
caacacttaaaccaa

SEQ ID NO: 376155 - DNA, 15 bp, Homo sapiens
tcaacacttaaacca

SEQ ID NO: 376156 - DNA, 15 bp, Homo sapiens
ttcaacacttaaacc

SEQ ID NO: 376157 - DNA, 15 bp, Homo sapiens
cttcaacacttaaac

SEQ ID NO: 376158 - DNA, 15 bp, Homo sapiens
gcttcaacacttaaa

SEQ ID NO: 376159 - DNA, 15 bp, Homo sapiens
tgcttcaacacttaa

SEQ ID NO: 376160 - DNA, 15 bp, Homo sapiens
ttgcttcaacactta

SEQ ID NO: 376161 - DNA, 15 bp, Homo sapiens
cttgcttcaacactt

SEQ ID NO: 376162 - DNA, 15 bp, Homo sapiens
tcttgcttcaacact

SEQ ID NO: 376163 - DNA, 15 bp, Homo sapiens
gtcttgcttcaacac

SEQ ID NO: 376164 - DNA, 15 bp, Homo sapiens
tgtcttgcttcaaca

SEQ ID NO: 376165 - DNA, 15 bp, Homo sapiens
atgtcttgcttcaac

SEQ ID NO: 376166 - DNA, 15 bp, Homo sapiens
tatgtcttgcttcaa

SEQ ID NO: 376167 - DNA, 15 bp, Homo sapiens
atatgtcttgcttca

SEQ ID NO: 376168 - DNA, 15 bp, Homo sapiens
aatatgtcttgcttc

SEQ ID NO: 376169 - DNA, 15 bp, Homo sapiens
aaatatgtcttgctt

SEQ ID NO: 376170 - DNA, 15 bp, Homo sapiens
taaatatgtcttgct

SEQ ID NO: 376171 - DNA, 15 bp, Homo sapiens
ttaaatatgtcttgc

SEQ ID NO: 376172 - DNA, 15 bp, Homo sapiens
cttaaatatgtcttg

SEQ ID NO: 376173 - DNA, 15 bp, Homo sapiens
acttaaatatgtctt

SEQ ID NO: 376174 - DNA, 15 bp, Homo sapiens
tacttaaatatgtct

SEQ ID NO: 376175 - DNA, 15 bp, Homo sapiens
ttacttaaatatgtc

SEQ ID NO: 376176 - DNA, 15 bp, Homo sapiens
cttacttaaatatgt

SEQ ID NO: 376177 - DNA, 15 bp, Homo sapiens
acttacttaaatatg

SEQ ID NO: 376178 - DNA, 15 bp, Homo sapiens
gacttacttaaatat

SEQ ID NO: 376179 - DNA, 15 bp, Homo sapiens
tgacttacttaaata

SEQ ID NO: 376180 - DNA, 15 bp, Homo sapiens
atgacttacttaaat

SEQ ID NO: 376181 - DNA, 15 bp, Homo sapiens
aatgacttacttaaa

SEQ ID NO: 376182 - DNA, 15 bp, Homo sapiens
caatgacttacttaa

SEQ ID NO: 376183 - DNA, 15 bp, Homo sapiens
tcaatgacttactta

SEQ ID NO: 376184 - DNA, 15 bp, Homo sapiens
atcaatgacttactt

SEQ ID NO: 376185 - DNA, 15 bp, Homo sapiens
catcaatgacttact

SEQ ID NO: 376186 - DNA, 15 bp, Homo sapiens
ccatcaatgacttac

SEQ ID NO: 376187 - DNA, 15 bp, Homo sapiens
accatcaatgactta

SEQ ID NO: 376188 - DNA, 15 bp, Homo sapiens
taccatcaatgactt

SEQ ID NO: 376189 - DNA, 15 bp, Homo sapiens
ttaccatcaatgact

SEQ ID NO: 376190 - DNA, 15 bp, Homo sapiens
gttaccatcaatgac

SEQ ID NO: 376191 - DNA, 15 bp, Homo sapiens
agttaccatcaatga

SEQ ID NO: 376192 - DNA, 15 bp, Homo sapiens
aagttaccatcaatg

SEQ ID NO: 376193 - DNA, 15 bp, Homo sapiens
aaagttaccatcaat

SEQ ID NO: 376194 - DNA, 15 bp, Homo sapiens
aaaagttaccatcaa

SEQ ID NO: 376195 - DNA, 15 bp, Homo sapiens
gaaaagttaccatca

SEQ ID NO: 376196 - DNA, 15 bp, Homo sapiens
tgaaaagttaccatc

SEQ ID NO: 376197 - DNA, 15 bp, Homo sapiens
ttgaaaagttaccat

SEQ ID NO: 376198 - DNA, 15 bp, Homo sapiens
tttgaaaagttacca

SEQ ID NO: 376199 - DNA, 15 bp, Homo sapiens
atttgaaaagttacc

SEQ ID NO: 376200 - DNA, 15 bp, Homo sapiens
gatttgaaaagttac

SEQ ID NO: 376201 - DNA, 15 bp, Homo sapiens
tgatttgaaaagtta

SEQ ID NO: 376202 - DNA, 15 bp, Homo sapiens
atgatttgaaaagtt

SEQ ID NO: 376203 - DNA, 15 bp, Homo sapiens
aatgatttgaaaagt

SEQ ID NO: 376204 - DNA, 15 bp, Homo sapiens
taatgatttgaaaag

SEQ ID NO: 376205 - DNA, 15 bp, Homo sapiens
ttaatgatttgaaaa

SEQ ID NO: 376206 - DNA, 15 bp, Homo sapiens
attaatgatttgaaa

SEQ ID NO: 376207 - DNA, 15 bp, Homo sapiens
gattaatgatttgaa

SEQ ID NO: 376208 - DNA, 15 bp, Homo sapiens
tgattaatgatttga

SEQ ID NO: 376209 - DNA, 15 bp, Homo sapiens
ttgattaatgatttg

SEQ ID NO: 376210 - DNA, 15 bp, Homo sapiens
tttgattaatgattt

SEQ ID NO: 376211 - DNA, 15 bp, Homo sapiens
ttttgattaatgatt

SEQ ID NO: 376212 - DNA, 15 bp, Homo sapiens
attttgattaatgat

SEQ ID NO: 376213 - DNA, 15 bp, Homo sapiens
cattttgattaatga

SEQ ID NO: 376214 - DNA, 15 bp, Homo sapiens
gcattttgattaatg

SEQ ID NO: 376215 - DNA, 15 bp, Homo sapiens
ggcattttgattaat

SEQ ID NO: 376216 - DNA, 15 bp, Homo sapiens
aggcattttgattaa

SEQ ID NO: 376217 - DNA, 15 bp, Homo sapiens
taggcattttgatta

SEQ ID NO: 376218 - DNA, 15 bp, Homo sapiens
ataggcattttgatt

SEQ ID NO: 376219 - DNA, 15 bp, Homo sapiens
gataggcattttgat

SEQ ID NO: 376220 - DNA, 15 bp, Homo sapiens
tgataggcattttga

SEQ ID NO: 376221 - DNA, 15 bp, Homo sapiens
ttgataggcattttg

SEQ ID NO: 376222 - DNA, 15 bp, Homo sapiens
tttgataggcatttt

SEQ ID NO: 376223 - DNA, 15 bp, Homo sapiens
atttgataggcattt

SEQ ID NO: 376224 - DNA, 15 bp, Homo sapiens
aatttgataggcatt

SEQ ID NO: 376225 - DNA, 15 bp, Homo sapiens
taatttgataggcat

SEQ ID NO: 376226 - DNA, 15 bp, Homo sapiens
ataatttgataggca

SEQ ID NO: 376227 - DNA, 15 bp, Homo sapiens
aataatttgataggc

SEQ ID NO: 376228 - DNA, 15 bp, Homo sapiens
gaataatttgatagg

SEQ ID NO: 376229 - DNA, 15 bp, Homo sapiens
ggaataatttgatag

SEQ ID NO: 376230 - DNA, 15 bp, Homo sapiens
tggaataatttgata

SEQ ID NO: 376231 - DNA, 15 bp, Homo sapiens
ctggaataatttgat

SEQ ID NO: 376232 - DNA, 15 bp, Homo sapiens
cctggaataatttga

SEQ ID NO: 376233 - DNA, 15 bp, Homo sapiens
acctggaataatttg

SEQ ID NO: 376234 - DNA, 15 bp, Homo sapiens
gacctggaataattt

SEQ ID NO: 376235 - DNA, 15 bp, Homo sapiens
agacctggaataatt

SEQ ID NO: 376236 - DNA, 15 bp, Homo sapiens
aagacctggaataat

SEQ ID NO: 376237 - DNA, 15 bp, Homo sapiens
caagacctggaataa

SEQ ID NO: 376238 - DNA, 15 bp, Homo sapiens
acaagacctggaata

SEQ ID NO: 376239 - DNA, 15 bp, Homo sapiens
aacaagacctggaat

SEQ ID NO: 376240 - DNA, 15 bp, Homo sapiens
aaacaagacctggaa

SEQ ID NO: 376241 - DNA, 15 bp, Homo sapiens
aaaacaagacctgga

SEQ ID NO: 376242 - DNA, 15 bp, Homo sapiens
gaaaacaagacctgg

SEQ ID NO: 376243 - DNA, 15 bp, Homo sapiens
tgaaaacaagacctg

SEQ ID NO: 376244 - DNA, 15 bp, Homo sapiens
atgaaaacaagacct

SEQ ID NO: 376245 - DNA, 15 bp, Homo sapiens
aatgaaaacaagacc

SEQ ID NO: 376246 - DNA, 15 bp, Homo sapiens
caatgaaaacaagac

SEQ ID NO: 376247 - DNA, 15 bp, Homo sapiens
acaatgaaaacaaga

SEQ ID NO: 376248 - DNA, 15 bp, Homo sapiens
gacaatgaaaacaag

SEQ ID NO: 376249 - DNA, 15 bp, Homo sapiens
agacaatgaaaacaa

SEQ ID NO: 376250 - DNA, 15 bp, Homo sapiens
tagacaatgaaaaca

SEQ ID NO: 376251 - DNA, 15 bp, Homo sapiens
ctagacaatgaaaac

SEQ ID NO: 376252 - DNA, 15 bp, Homo sapiens
cctagacaatgaaaa

SEQ ID NO: 376253 - DNA, 15 bp, Homo sapiens
tcctagacaatgaaa

SEQ ID NO: 376254 - DNA, 15 bp, Homo sapiens
atcctagacaatgaa

SEQ ID NO: 376255 - DNA, 15 bp, Homo sapiens
catcctagacaatga

SEQ ID NO: 376256 - DNA, 15 bp, Homo sapiens
tcatcctagacaatg

SEQ ID NO: 376257 - DNA, 15 bp, Homo sapiens
ttcatcctagacaat

SEQ ID NO: 376258 - DNA, 15 bp, Homo sapiens
gttcatcctagacaa

SEQ ID NO: 376259 - DNA, 15 bp, Homo sapiens
tgttcatcctagaca

SEQ ID NO: 376260 - DNA, 15 bp, Homo sapiens
ttgttcatcctagac

SEQ ID NO: 376261 - DNA, 15 bp, Homo sapiens
cttgttcatcctaga

SEQ ID NO: 376262 - DNA, 15 bp, Homo sapiens
gcttgttcatcctag

SEQ ID NO: 376263 - DNA, 15 bp, Homo sapiens
agcttgttcatccta

SEQ ID NO: 376264 - DNA, 15 bp, Homo sapiens
aagcttgttcatcct

SEQ ID NO: 376265 - DNA, 15 bp, Homo sapiens
gaagcttgttcatcc

SEQ ID NO: 376266 - DNA, 15 bp, Homo sapiens
tgaagcttgttcatc

SEQ ID NO: 376267 - DNA, 15 bp, Homo sapiens
atgaagcttgttcat

SEQ ID NO: 376268 - DNA, 15 bp, Homo sapiens
tatgaagcttgttca

SEQ ID NO: 376269 - DNA, 15 bp, Homo sapiens
ttatgaagcttgttc

SEQ ID NO: 376270 - DNA, 15 bp, Homo sapiens
attatgaagcttgtt

SEQ ID NO: 376271 - DNA, 15 bp, Homo sapiens
cattatgaagcttgt

SEQ ID NO: 376272 - DNA, 15 bp, Homo sapiens
tcattatgaagcttg

SEQ ID NO: 376273 - DNA, 15 bp, Homo sapiens
ctcattatgaagctt

SEQ ID NO: 376274 - DNA, 15 bp, Homo sapiens
cctcattatgaagct

SEQ ID NO: 376275 - DNA, 15 bp, Homo sapiens
acctcattatgaagc

SEQ ID NO: 376276 - DNA, 15 bp, Homo sapiens
gacctcattatgaag

SEQ ID NO: 376277 - DNA, 15 bp, Homo sapiens
agacctcattatgaa

SEQ ID NO: 376278 - DNA, 15 bp, Homo sapiens
aagacctcattatga

SEQ ID NO: 376279 - DNA, 15 bp, Homo sapiens
caagacctcattatg

SEQ ID NO: 376280 - DNA, 15 bp, Homo sapiens
tcaagacctcattat

SEQ ID NO: 376281 - DNA, 15 bp, Homo sapiens
ctcaagacctcatta

SEQ ID NO: 376282 - DNA, 15 bp, Homo sapiens
actcaagacctcatt

SEQ ID NO: 376283 - DNA, 15 bp, Homo sapiens
tactcaagacctcat

SEQ ID NO: 376284 - DNA, 15 bp, Homo sapiens
ctactcaagacctca

SEQ ID NO: 376285 - DNA, 15 bp, Homo sapiens
cctactcaagacctc

SEQ ID NO: 376286 - DNA, 15 bp, Homo sapiens
accctactcaagacc

SEQ ID NO: 376287 - DNA, 15 bp, Homo sapiens
gaccctactcaagac

SEQ ID NO: 376288 - DNA, 15 bp, Homo sapiens
agaccctactcaaga

SEQ ID NO: 376289 - DNA, 15 bp, Homo sapiens
cagaccctactcaag

SEQ ID NO: 376290 - DNA, 15 bp, Homo sapiens
tcagaccctactcaa

SEQ ID NO: 376291 - DNA, 15 bp, Homo sapiens
ctcagaccctactca

SEQ ID NO: 376292 - DNA, 15 bp, Homo sapiens
actcagaccctactc

SEQ ID NO: 376293 - DNA, 15 bp, Homo sapiens
gactcagaccctact

SEQ ID NO: 376294 - DNA, 15 bp, Homo sapiens
ggactcagaccctac

SEQ ID NO: 376295 - DNA, 15 bp, Homo sapiens
tggactcagacccta

SEQ ID NO: 376296 - DNA, 15 bp, Homo sapiens
gtggactcagaccct

SEQ ID NO: 376297 - DNA, 15 bp, Homo sapiens
tgtggactcagaccc

SEQ ID NO: 376298 - DNA, 15 bp, Homo sapiens
ttgtggactcagacc

SEQ ID NO: 376299 - DNA, 15 bp, Homo sapiens
tttgtggactcagac

SEQ ID NO: 376300 - DNA, 15 bp, Homo sapiens
atttgtggactcaga

SEQ ID NO: 376301 - DNA, 15 bp, Homo sapiens
gatttgtggactcag

SEQ ID NO: 376302 - DNA, 15 bp, Homo sapiens
agatttgtggactca

SEQ ID NO: 376303 - DNA, 15 bp, Homo sapiens
tagatttgtggactc

SEQ ID NO: 376304 - DNA, 15 bp, Homo sapiens
ctagatttgtggact

SEQ ID NO: 376305 - DNA, 15 bp, Homo sapiens
actagatttgtggac

SEQ ID NO: 376306 - DNA, 15 bp, Homo sapiens
aactagatttgtgga

SEQ ID NO: 376307 - DNA, 15 bp, Homo sapiens
caactagatttgtgg

SEQ ID NO: 376308 - DNA, 15 bp, Homo sapiens
ccaactagatttgtg

SEQ ID NO: 376309 - DNA, 15 bp, Homo sapiens
tccaactagatttgt

SEQ ID NO: 376310 - DNA, 15 bp, Homo sapiens
atccaactagatttg

SEQ ID NO: 376311 - DNA, 15 bp, Homo sapiens
gatccaactagattt

SEQ ID NO: 376312 - DNA, 15 bp, Homo sapiens
ggatccaactagatt

SEQ ID NO: 376313 - DNA, 15 bp, Homo sapiens
tggatccaactagat

SEQ ID NO: 376314 - DNA, 15 bp, Homo sapiens
ctggatccaactaga

SEQ ID NO: 376315 - DNA, 15 bp, Homo sapiens
tctggatccaactag

SEQ ID NO: 376316 - DNA, 15 bp, Homo sapiens
gtctggatccaacta

SEQ ID NO: 376317 - DNA, 15 bp, Homo sapiens
cgtctggatccaact

SEQ ID NO: 376318 - DNA, 15 bp, Homo sapiens
acgtctggatccaac

SEQ ID NO: 376319 - DNA, 15 bp, Homo sapiens
aacgtctggatccaa

SEQ ID NO: 376320 - DNA, 15 bp, Homo sapiens
aaacgtctggatcca

SEQ ID NO: 376321 - DNA, 15 bp, Homo sapiens
aaaacgtctggatcc

SEQ ID NO: 376322 - DNA, 15 bp, Homo sapiens
caaaacgtctggatc

SEQ ID NO: 376323 - DNA, 15 bp, Homo sapiens
ccaaaacgtctggat

SEQ ID NO: 376324 - DNA, 15 bp, Homo sapiens
accaaaacgtctgga

SEQ ID NO: 376325 - DNA, 15 bp, Homo sapiens
taccaaaacgtctgg

SEQ ID NO: 376326 - DNA, 15 bp, Homo sapiens
ttaccaaaacgtctg

SEQ ID NO: 376327 - DNA, 15 bp, Homo sapiens
tttaccaaaacgtct

SEQ ID NO: 376328 - DNA, 15 bp, Homo sapiens
ttttaccaaaacgtc

SEQ ID NO: 376329 - DNA, 15 bp, Homo sapiens
attttaccaaaacgt

SEQ ID NO: 376330 - DNA, 15 bp, Homo sapiens
cattttaccaaaacg

SEQ ID NO: 376331 - DNA, 15 bp, Homo sapiens
acattttaccaaaac

SEQ ID NO: 376332 - DNA, 15 bp, Homo sapiens
aacattttaccaaaa

SEQ ID NO: 376333 - DNA, 15 bp, Homo sapiens
taacattttaccaaa

SEQ ID NO: 376334 - DNA, 15 bp, Homo sapiens
gtaacattttaccaa

SEQ ID NO: 376335 - DNA, 15 bp, Homo sapiens
ggtaacattttacca

SEQ ID NO: 376336 - DNA, 15 bp, Homo sapiens
aggtaacattttacc

SEQ ID NO: 376337 - DNA, 15 bp, Homo sapiens
caggtaacattttac

SEQ ID NO: 376338 - DNA, 15 bp, Homo sapiens
acaggtaacatttta

SEQ ID NO: 376339 - DNA, 15 bp, Homo sapiens
cacaggtaacatttt

SEQ ID NO: 376340 - DNA, 15 bp, Homo sapiens
tcacaggtaacattt

SEQ ID NO: 376341 - DNA, 15 bp, Homo sapiens
atcacaggtaacatt

SEQ ID NO: 376342 - DNA, 15 bp, Homo sapiens
aatcacaggtaacat

SEQ ID NO: 376343 - DNA, 15 bp, Homo sapiens
aaatcacaggtaaca

SEQ ID NO: 376344 - DNA, 15 bp, Homo sapiens
gaaatcacaggtaac

SEQ ID NO: 376345 - DNA, 15 bp, Homo sapiens
agaaatcacaggtaa

SEQ ID NO: 376346 - DNA, 15 bp, Homo sapiens
aagaaatcacaggta

SEQ ID NO: 376347 - DNA, 15 bp, Homo sapiens
aaagaaatcacaggt

SEQ ID NO: 376348 - DNA, 15 bp, Homo sapiens
caaagaaatcacagg

SEQ ID NO: 376349 - DNA, 15 bp, Homo sapiens
gcaaagaaatcacag

SEQ ID NO: 376350 - DNA, 15 bp, Homo sapiens
tgcaaagaaatcaca

SEQ ID NO: 376351 - DNA, 15 bp, Homo sapiens
atgcaaagaaatcac

SEQ ID NO: 376352 - DNA, 15 bp, Homo sapiens
aatgcaaagaaatca

SEQ ID NO: 376353 - DNA, 15 bp, Homo sapiens
gaatgcaaagaaatc

SEQ ID NO: 376354 - DNA, 15 bp, Homo sapiens
agaatgcaaagaaat

SEQ ID NO: 376355 - DNA, 15 bp, Homo sapiens
tagaatgcaaagaaa

SEQ ID NO: 376356 - DNA, 15 bp, Homo sapiens
gtagaatgcaaagaa

SEQ ID NO: 376357 - DNA, 15 bp, Homo sapiens
ggtagaatgcaaaga

SEQ ID NO: 376358 - DNA, 15 bp, Homo sapiens
gggtagaatgcaaag

SEQ ID NO: 376359 - DNA, 15 bp, Homo sapiens
ggggtagaatgcaaa

SEQ ID NO: 376360 - DNA, 15 bp, Homo sapiens
tggggtagaatgcaa

SEQ ID NO: 376361 - DNA, 15 bp, Homo sapiens
ttggggtagaatgca

SEQ ID NO: 376362 - DNA, 15 bp, Homo sapiens
gttggggtagaatgc

SEQ ID NO: 376363 - DNA, 15 bp, Homo sapiens
ggttggggtagaatg

SEQ ID NO: 376364 - DNA, 15 bp, Homo sapiens
aggttggggtagaat

SEQ ID NO: 376365 - DNA, 15 bp, Homo sapiens
aaggttggggtagaa

SEQ ID NO: 376366 - DNA, 15 bp, Homo sapiens
taaggttggggtaga

SEQ ID NO: 376367 - DNA, 15 bp, Homo sapiens
ttaaggttggggtag

SEQ ID NO: 376368 - DNA, 15 bp, Homo sapiens
attaaggttggggta

SEQ ID NO: 376369 - DNA, 15 bp, Homo sapiens
cattaaggttggggt

SEQ ID NO: 376370 - DNA, 15 bp, Homo sapiens
acattaaggttgggg

SEQ ID NO: 376371 - DNA, 15 bp, Homo sapiens
tacattaaggttggg

SEQ ID NO: 376372 - DNA, 15 bp, Homo sapiens
atacattaaggttgg

SEQ ID NO: 376373 - DNA, 15 bp, Homo sapiens
catacattaaggttg

SEQ ID NO: 376374 - DNA, 15 bp, Homo sapiens
tcatacattaaggtt

SEQ ID NO: 376375 - DNA, 15 bp, Homo sapiens
ttcatacattaaggt

SEQ ID NO: 376376 - DNA, 15 bp, Homo sapiens
tttcatacattaagg

SEQ ID NO: 376377 - DNA, 15 bp, Homo sapiens
ttttcatacattaag

SEQ ID NO: 376378 - DNA, 15 bp, Homo sapiens
tttttcatacattaa

SEQ ID NO: 376379 - DNA, 15 bp, Homo sapiens
ttttttcatacatta

SEQ ID NO: 376380 - DNA, 15 bp, Homo sapiens
gttttttcatacatt

SEQ ID NO: 376381 - DNA, 15 bp, Homo sapiens
tgttttttcatacat

SEQ ID NO: 376382 - DNA, 15 bp, Homo sapiens
ctgttttttcataca

SEQ ID NO: 376383 - DNA, 15 bp, Homo sapiens
tctgttttttcatac

SEQ ID NO: 376384 - DNA, 15 bp, Homo sapiens
atctgttttttcata

SEQ ID NO: 376385 - DNA, 15 bp, Homo sapiens
aatctgttttttcat

SEQ ID NO: 376386 - DNA, 15 bp, Homo sapiens
taatctgttttttca

SEQ ID NO: 376387 - DNA, 15 bp, Homo sapiens
ctaatctgttttttc

SEQ ID NO: 376388 - DNA, 15 bp, Homo sapiens
actaatctgtttttt

SEQ ID NO: 376389 - DNA, 15 bp, Homo sapiens
gactaatctgttttt

SEQ ID NO: 376390 - DNA, 15 bp, Homo sapiens
tgactaatctgtttt

SEQ ID NO: 376391 - DNA, 15 bp, Homo sapiens
ttgactaatctgttt

SEQ ID NO: 376392 - DNA, 15 bp, Homo sapiens
cttgactaatctgtt

SEQ ID NO: 376393 - DNA, 15 bp, Homo sapiens
acttgactaatctgt

SEQ ID NO: 376394 - DNA, 15 bp, Homo sapiens
cacttgactaatctg

SEQ ID NO: 376395 - DNA, 15 bp, Homo sapiens
gcacttgactaatct

SEQ ID NO: 376396 - DNA, 15 bp, Homo sapiens
ggcacttgactaatc

SEQ ID NO: 376397 - DNA, 15 bp, Homo sapiens
tggcacttgactaat

SEQ ID NO: 376398 - DNA, 15 bp, Homo sapiens
ttggcacttgactaa

SEQ ID NO: 376399 - DNA, 15 bp, Homo sapiens
cttggcacttgacta

SEQ ID NO: 376400 - DNA, 15 bp, Homo sapiens
ccttggcacttgact

SEQ ID NO: 376401 - DNA, 15 bp, Homo sapiens
gccttggcacttgac

SEQ ID NO: 376402 - DNA, 15 bp, Homo sapiens
tgccttggcacttga

SEQ ID NO: 376403 - DNA, 15 bp, Homo sapiens
ctgccttggcacttg

SEQ ID NO: 376404 - DNA, 15 bp, Homo sapiens
actgccttggcactt

SEQ ID NO: 376405 - DNA, 15 bp, Homo sapiens
tactgccttggcact

SEQ ID NO: 376406 - DNA, 15 bp, Homo sapiens
ttactgccttggcac

SEQ ID NO: 376407 - DNA, 15 bp, Homo sapiens
gttactgccttggca

SEQ ID NO: 376408 - DNA, 15 bp, Homo sapiens
agttactgccttggc

SEQ ID NO: 376409 - DNA, 15 bp, Homo sapiens
tagttactgccttgg

SEQ ID NO: 376410 - DNA, 15 bp, Homo sapiens
ctagttactgccttg

SEQ ID NO: 376411 - DNA, 15 bp, Homo sapiens
tctagttactgcctt

SEQ ID NO: 376412 - DNA, 15 bp, Homo sapiens
ttctagttactgcct

SEQ ID NO: 376413 - DNA, 15 bp, Homo sapiens
cttctagttactgcc

SEQ ID NO: 376414 - DNA, 15 bp, Homo sapiens
ccttctagttactgc

SEQ ID NO: 376415 - DNA, 15 bp, Homo sapiens
tccttctagttactg

SEQ ID NO: 376416 - DNA, 15 bp, Homo sapiens
ttccttctagttact

SEQ ID NO: 376417 - DNA, 15 bp, Homo sapiens
gttccttctagttac

SEQ ID NO: 376418 - DNA, 15 bp, Homo sapiens
tgttccttctagtta

SEQ ID NO: 376419 - DNA, 15 bp, Homo sapiens
ttgttccttctagtt

SEQ ID NO: 376420 - DNA, 15 bp, Homo sapiens
tttgttccttctagt

SEQ ID NO: 376421 - DNA, 15 bp, Homo sapiens
ttttgttccttctag

SEQ ID NO: 376422 - DNA, 15 bp, Homo sapiens
tttttgttccttcta

SEQ ID NO: 376423 - DNA, 15 bp, Homo sapiens
ctttttgttccttct

SEQ ID NO: 376424 - DNA, 15 bp, Homo sapiens
cctttttgttccttc

SEQ ID NO: 376425 - DNA, 15 bp, Homo sapiens
ccctttttgttcctt

SEQ ID NO: 376426 - DNA, 15 bp, Homo sapiens
gccctttttgttcct

SEQ ID NO: 376427 - DNA, 15 bp, Homo sapiens
agccctttttgttcc

SEQ ID NO: 376428 - DNA, 15 bp, Homo sapiens
cagccctttttgttc

SEQ ID NO: 376429 - DNA, 15 bp, Homo sapiens
acagccctttttgtt

SEQ ID NO: 376430 - DNA, 15 bp, Homo sapiens
gacagccctttttgt

SEQ ID NO: 376431 - DNA, 15 bp, Homo sapiens
tgacagccctttttg

SEQ ID NO: 376432 - DNA, 15 bp, Homo sapiens
atgacagcccttttt

SEQ ID NO: 376433 - DNA, 15 bp, Homo sapiens
catgacagccctttt

SEQ ID NO: 376434 - DNA, 15 bp, Homo sapiens
tcatgacagcccttt

SEQ ID NO: 376435 - DNA, 15 bp, Homo sapiens
ttcatgacagccctt

SEQ ID NO: 376436 - DNA, 15 bp, Homo sapiens
attcatgacagccct

SEQ ID NO: 376437 - DNA, 15 bp, Homo sapiens
tattcatgacagccc

SEQ ID NO: 376438 - DNA, 15 bp, Homo sapiens
atattcatgacagcc

SEQ ID NO: 376439 - DNA, 15 bp, Homo sapiens
tatattcatgacagc

SEQ ID NO: 376440 - DNA, 15 bp, Homo sapiens
ttatattcatgacag

SEQ ID NO: 376441 - DNA, 15 bp, Homo sapiens
tttatattcatgaca

SEQ ID NO: 376442 - DNA, 15 bp, Homo sapiens
atttatattcatgac

SEQ ID NO: 376443 - DNA, 15 bp, Homo sapiens
aatttatattcatga

SEQ ID NO: 376444 - DNA, 15 bp, Homo sapiens
caatttatattcatg

SEQ ID NO: 376445 - DNA, 15 bp, Homo sapiens
tcaatttatattcat

SEQ ID NO: 376446 - DNA, 15 bp, Homo sapiens
ctcaatttatattca

SEQ ID NO: 376447 - DNA, 15 bp, Homo sapiens
tctcaatttatattc

SEQ ID NO: 376448 - DNA, 15 bp, Homo sapiens
ttctcaatttatatt

SEQ ID NO: 376449 - DNA, 15 bp, Homo sapiens
tttctcaatttatat

SEQ ID NO: 376450 - DNA, 15 bp, Homo sapiens
ctttctcaatttata

SEQ ID NO: 376451 - DNA, 15 bp, Homo sapiens
actttctcaatttat

SEQ ID NO: 376452 - DNA, 15 bp, Homo sapiens
cactttctcaattta

SEQ ID NO: 376453 - DNA, 15 bp, Homo sapiens
tcactttctcaattt

SEQ ID NO: 376454 - DNA, 15 bp, Homo sapiens
ctcactttctcaatt

SEQ ID NO: 376455 - DNA, 15 bp, Homo sapiens
tctcactttctcaat

SEQ ID NO: 376456 - DNA, 15 bp, Homo sapiens
gtctcactttctcaa

SEQ ID NO: 376457 - DNA, 15 bp, Homo sapiens
agtctcactttctca

SEQ ID NO: 376458 - DNA, 15 bp, Homo sapiens
gagtctcactttctc

SEQ ID NO: 376459 - DNA, 15 bp, Homo sapiens
ggagtctcactttct

SEQ ID NO: 376460 - DNA, 15 bp, Homo sapiens
aggagtctcactttc

SEQ ID NO: 376461 - DNA, 15 bp, Homo sapiens
gaggagtctcacttt

SEQ ID NO: 376462 - DNA, 15 bp, Homo sapiens
ggaggagtctcactt

SEQ ID NO: 376463 - DNA, 15 bp, Homo sapiens
tggaggagtctcact

SEQ ID NO: 376464 - DNA, 15 bp, Homo sapiens
ttggaggagtctcac

SEQ ID NO: 376465 - DNA, 15 bp, Homo sapiens
tttggaggagtctca

SEQ ID NO: 376466 - DNA, 15 bp, Homo sapiens
gtttggaggagtctc

SEQ ID NO: 376467 - DNA, 15 bp, Homo sapiens
tgtttggaggagtct

SEQ ID NO: 376468 - DNA, 15 bp, Homo sapiens
ctgtttggaggagtc

SEQ ID NO: 376469 - DNA, 15 bp, Homo sapiens
gctgtttggaggagt

SEQ ID NO: 376470 - DNA, 15 bp, Homo sapiens
tgctgtttggaggag

SEQ ID NO: 376471 - DNA, 15 bp, Homo sapiens
ctgctgtttggagga

SEQ ID NO: 376472 - DNA, 15 bp, Homo sapiens
cctgctgtttggagg

SEQ ID NO: 376473 - DNA, 15 bp, Homo sapiens
tcctgctgtttggag

SEQ ID NO: 376474 - DNA, 15 bp, Homo sapiens
ctcctgctgtttgga

SEQ ID NO: 376475 - DNA, 15 bp, Homo sapiens
tctcctgctgtttgg

SEQ ID NO: 376476 - DNA, 15 bp, Homo sapiens
gtctcctgctgtttg

SEQ ID NO: 376477 - DNA, 15 bp, Homo sapiens
tgtctcctgctgttt

SEQ ID NO: 376478 - DNA, 15 bp, Homo sapiens
ctgtctcctgctgtt

SEQ ID NO: 376479 - DNA, 15 bp, Homo sapiens
tctgtctcctgctgt

SEQ ID NO: 376480 - DNA, 15 bp, Homo sapiens
ctctgtctcctgctg

SEQ ID NO: 376481 - DNA, 15 bp, Homo sapiens
cctctgtctcctgct

SEQ ID NO: 376482 - DNA, 15 bp, Homo sapiens
acctctgtctcctgc

SEQ ID NO: 376483 - DNA, 15 bp, Homo sapiens
tacctctgtctcctg

SEQ ID NO: 376484 - DNA, 15 bp, Homo sapiens
ttacctctgtctcct

SEQ ID NO: 376485 - DNA, 15 bp, Homo sapiens
tttacctctgtctcc

SEQ ID NO: 376486 - DNA, 15 bp, Homo sapiens
gtttacctctgtctc

SEQ ID NO: 376487 - DNA, 15 bp, Homo sapiens
agtttacctctgtct

SEQ ID NO: 376488 - DNA, 15 bp, Homo sapiens
aagtttacctctgtc

SEQ ID NO: 376489 - DNA, 15 bp, Homo sapiens
aaagtttacctctgt

SEQ ID NO: 376490 - DNA, 15 bp, Homo sapiens
gaaagtttacctctg

SEQ ID NO: 376491 - DNA, 15 bp, Homo sapiens
tgaaagtttacctct

SEQ ID NO: 376492 - DNA, 15 bp, Homo sapiens
atgaaagtttacctc

SEQ ID NO: 376493 - DNA, 15 bp, Homo sapiens
aatgaaagtttacct

SEQ ID NO: 376494 - DNA, 15 bp, Homo sapiens
caatgaaagtttacc

SEQ ID NO: 376495 - DNA, 15 bp, Homo sapiens
gcaatgaaagtttac

SEQ ID NO: 376496 - DNA, 15 bp, Homo sapiens
tgcaatgaaagttta

SEQ ID NO: 376497 - DNA, 15 bp, Homo sapiens
ctgcaatgaaagttt

SEQ ID NO: 376498 - DNA, 15 bp, Homo sapiens
cctgcaatgaaagtt

SEQ ID NO: 376499 - DNA, 15 bp, Homo sapiens
gcctgcaatgaaagt

SEQ ID NO: 376500 - DNA, 15 bp, Homo sapiens
tgcctgcaatgaaag

SEQ ID NO: 376501 - DNA, 15 bp, Homo sapiens
atgcctgcaatgaaa

SEQ ID NO: 376502 - DNA, 15 bp, Homo sapiens
aatgcctgcaatgaa

SEQ ID NO: 376503 - DNA, 15 bp, Homo sapiens
gaatgcctgcaatga

SEQ ID NO: 376504 - DNA, 15 bp, Homo sapiens
tgaatgcctgcaatg

SEQ ID NO: 376505 - DNA, 15 bp, Homo sapiens
gtgaatgcctgcaat

SEQ ID NO: 376506 - DNA, 15 bp, Homo sapiens
agtgaatgcctgcaa

SEQ ID NO: 376507 - DNA, 15 bp, Homo sapiens
gagtgaatgcctgca

SEQ ID NO: 376508 - DNA, 15 bp, Homo sapiens
tgagtgaatgcctgc

SEQ ID NO: 376509 - DNA, 15 bp, Homo sapiens
atgagtgaatgcctg

SEQ ID NO: 376510 - DNA, 15 bp, Homo sapiens
tatgagtgaatgcct

SEQ ID NO: 376511 - DNA, 15 bp, Homo sapiens
ttatgagtgaatgcc

SEQ ID NO: 376512 - DNA, 15 bp, Homo sapiens
cttatgagtgaatgc

SEQ ID NO: 376513 - DNA, 15 bp, Homo sapiens
gcttatgagtgaatg

SEQ ID NO: 376514 - DNA, 15 bp, Homo sapiens
tgcttatgagtgaat

SEQ ID NO: 376515 - DNA, 15 bp, Homo sapiens
ttgcttatgagtgaa

SEQ ID NO: 376516 - DNA, 15 bp, Homo sapiens
gttgcttatgagtga

SEQ ID NO: 376517 - DNA, 15 bp, Homo sapiens
tgttgcttatgagtg

SEQ ID NO: 376518 - DNA, 15 bp, Homo sapiens
atgttgcttatgagt

SEQ ID NO: 376519 - DNA, 15 bp, Homo sapiens
gatgttgcttatgag

SEQ ID NO: 376520 - DNA, 15 bp, Homo sapiens
tgatgttgcttatga

SEQ ID NO: 376521 - DNA, 15 bp, Homo sapiens
gtgatgttgcttatg

SEQ ID NO: 376522 - DNA, 15 bp, Homo sapiens
tgtgatgttgcttat

SEQ ID NO: 376523 - DNA, 15 bp, Homo sapiens
ttgtgatgttgctta

SEQ ID NO: 376524 - DNA, 15 bp, Homo sapiens
gttgtgatgttgctt

SEQ ID NO: 376525 - DNA, 15 bp, Homo sapiens
tgttgtgatgttgct

SEQ ID NO: 376526 - DNA, 15 bp, Homo sapiens
atgttgtgatgttgc

SEQ ID NO: 376527 - DNA, 15 bp, Homo sapiens
gatgttgtgatgttg

SEQ ID NO: 376528 - DNA, 15 bp, Homo sapiens
ggatgttgtgatgtt

SEQ ID NO: 376529 - DNA, 15 bp, Homo sapiens
tggatgttgtgatgt

SEQ ID NO: 376530 - DNA, 15 bp, Homo sapiens
gtggatgttgtgatg

SEQ ID NO: 376531 - DNA, 15 bp, Homo sapiens
tgtggatgttgtgat

SEQ ID NO: 376532 - DNA, 15 bp, Homo sapiens
gtgtggatgttgtga

SEQ ID NO: 376533 - DNA, 15 bp, Homo sapiens
tgtgtggatgttgtg

SEQ ID NO: 376534 - DNA, 15 bp, Homo sapiens
gtgtgtggatgttgt

SEQ ID NO: 376535 - DNA, 15 bp, Homo sapiens
tgtgtgtggatgttg

SEQ ID NO: 376536 - DNA, 15 bp, Homo sapiens
ttgtgtgtggatgtt

SEQ ID NO: 376537 - DNA, 15 bp, Homo sapiens
tttgtgtgtggatgt

SEQ ID NO: 376538 - DNA, 15 bp, Homo sapiens
atttgtgtgtggatg

SEQ ID NO: 376539 - DNA, 15 bp, Homo sapiens
gatttgtgtgtggat

SEQ ID NO: 376540 - DNA, 15 bp, Homo sapiens
agatttgtgtgtgga

SEQ ID NO: 376541 - DNA, 15 bp, Homo sapiens
gagatttgtgtgtgg

SEQ ID NO: 376542 - DNA, 15 bp, Homo sapiens
agagatttgtgtgtg

SEQ ID NO: 376543 - DNA, 15 bp, Homo sapiens
aagagatttgtgtgt

SEQ ID NO: 376544 - DNA, 15 bp, Homo sapiens
gaagagatttgtgtg

SEQ ID NO: 376545 - DNA, 15 bp, Homo sapiens
tgaagagatttgtgt

SEQ ID NO: 376546 - DNA, 15 bp, Homo sapiens
ctgaagagatttgtg

SEQ ID NO: 376547 - DNA, 15 bp, Homo sapiens
gctgaagagatttgt

SEQ ID NO: 376548 - DNA, 15 bp, Homo sapiens
agctgaagagatttg

SEQ ID NO: 376549 - DNA, 15 bp, Homo sapiens
cagctgaagagattt

SEQ ID NO: 376550 - DNA, 15 bp, Homo sapiens
acagctgaagagatt

SEQ ID NO: 376551 - DNA, 15 bp, Homo sapiens
aacagctgaagagat

SEQ ID NO: 376552 - DNA, 15 bp, Homo sapiens
caacagctgaagaga

SEQ ID NO: 376553 - DNA, 15 bp, Homo sapiens
tcaacagctgaagag

SEQ ID NO: 376554 - DNA, 15 bp, Homo sapiens
gtcaacagctgaaga

SEQ ID NO: 376555 - DNA, 15 bp, Homo sapiens
tgtcaacagctgaag

SEQ ID NO: 376556 - DNA, 15 bp, Homo sapiens
ctgtcaacagctgaa

SEQ ID NO: 376557 - DNA, 15 bp, Homo sapiens
actgtcaacagctga

SEQ ID NO: 376558 - DNA, 15 bp, Homo sapiens
gactgtcaacagctg

SEQ ID NO: 376559 - DNA, 15 bp, Homo sapiens
agactgtcaacagct

SEQ ID NO: 376560 - DNA, 15 bp, Homo sapiens
gagactgtcaacagc

SEQ ID NO: 376561 - DNA, 15 bp, Homo sapiens
ggagactgtcaacag

SEQ ID NO: 376562 - DNA, 15 bp, Homo sapiens
aggagactgtcaaca

SEQ ID NO: 376563 - DNA, 15 bp, Homo sapiens
aaggagactgtcaac

SEQ ID NO: 376564 - DNA, 15 bp, Homo sapiens
taaggagactgtcaa

SEQ ID NO: 376565 - DNA, 15 bp, Homo sapiens
ataaggagactgtca

SEQ ID NO: 376566 - DNA, 15 bp, Homo sapiens
aataaggagactgtc

SEQ ID NO: 376567 - DNA, 15 bp, Homo sapiens
gaataaggagactgt

SEQ ID NO: 376568 - DNA, 15 bp, Homo sapiens
agaataaggagactg

SEQ ID NO: 376569 - DNA, 15 bp, Homo sapiens
tagaataaggagact

SEQ ID NO: 376570 - DNA, 15 bp, Homo sapiens
ctagaataaggagac

SEQ ID NO: 376571 - DNA, 15 bp, Homo sapiens
gctagaataaggaga

SEQ ID NO: 376572 - DNA, 15 bp, Homo sapiens
cgctagaataaggag

SEQ ID NO: 376573 - DNA, 15 bp, Homo sapiens
gcgctagaataagga

SEQ ID NO: 376574 - DNA, 15 bp, Homo sapiens
agcgctagaataagg

SEQ ID NO: 376575 - DNA, 15 bp, Homo sapiens
gagcgctagaataag

SEQ ID NO: 376576 - DNA, 15 bp, Homo sapiens
ggagcgctagaataa

SEQ ID NO: 376577 - DNA, 15 bp, Homo sapiens
aggagcgctagaata

SEQ ID NO: 376578 - DNA, 15 bp, Homo sapiens
gaggagcgctagaat

SEQ ID NO: 376579 - DNA, 15 bp, Homo sapiens
ggaggagcgctagaa

SEQ ID NO: 376580 - DNA, 15 bp, Homo sapiens
gggaggagcgctaga

SEQ ID NO: 376581 - DNA, 15 bp, Homo sapiens
ggggaggagcgctag

SEQ ID NO: 376582 - DNA, 15 bp, Homo sapiens
tggggaggagcgcta

SEQ ID NO: 376583 - DNA, 15 bp, Homo sapiens
ttggggaggagcgct

SEQ ID NO: 376584 - DNA, 15 bp, Homo sapiens
tttggggaggagcgc

SEQ ID NO: 376585 - DNA, 15 bp, Homo sapiens
atttggggaggagcg

SEQ ID NO: 376586 - DNA, 15 bp, Homo sapiens
aatttggggaggagc

SEQ ID NO: 376587 - DNA, 15 bp, Homo sapiens
caatttggggaggag

SEQ ID NO: 376588 - DNA, 15 bp, Homo sapiens
acaatttggggagga

SEQ ID NO: 376589 - DNA, 15 bp, Homo sapiens
gacaatttggggagg

SEQ ID NO: 376590 - DNA, 15 bp, Homo sapiens
tgacaatttggggag

SEQ ID NO: 376591 - DNA, 15 bp, Homo sapiens
atgacaatttgggga

SEQ ID NO: 376592 - DNA, 15 bp, Homo sapiens
aatgacaatttgggg

SEQ ID NO: 376593 - DNA, 15 bp, Homo sapiens
aaatgacaatttggg

SEQ ID NO: 376594 - DNA, 15 bp, Homo sapiens
taaatgacaatttgg

SEQ ID NO: 376595 - DNA, 15 bp, Homo sapiens
ttaaatgacaatttg

SEQ ID NO: 376596 - DNA, 15 bp, Homo sapiens
attaaatgacaattt

SEQ ID NO: 376597 - DNA, 15 bp, Homo sapiens
gattaaatgacaatt

SEQ ID NO: 376598 - DNA, 15 bp, Homo sapiens
tgattaaatgacaat

SEQ ID NO: 376599 - DNA, 15 bp, Homo sapiens
atgattaaatgacaa

SEQ ID NO: 376600 - DNA, 15 bp, Homo sapiens
catgattaaatgaca

SEQ ID NO: 376601 - DNA, 15 bp, Homo sapiens
acatgattaaatgac

SEQ ID NO: 376602 - DNA, 15 bp, Homo sapiens
cacatgattaaatga

SEQ ID NO: 376603 - DNA, 15 bp, Homo sapiens
acacatgattaaatg

SEQ ID NO: 376604 - DNA, 15 bp, Homo sapiens
gacacatgattaaat

SEQ ID NO: 376605 - DNA, 15 bp, Homo sapiens
agacacatgattaaa

SEQ ID NO: 376606 - DNA, 15 bp, Homo sapiens
tagacacatgattaa

SEQ ID NO: 376607 - DNA, 15 bp, Homo sapiens
ttagacacatgatta

SEQ ID NO: 376608 - DNA, 15 bp, Homo sapiens
tttagacacatgatt

SEQ ID NO: 376609 - DNA, 15 bp, Homo sapiens
gtttagacacatgat

SEQ ID NO: 376610 - DNA, 15 bp, Homo sapiens
tgtttagacacatga

SEQ ID NO: 376611 - DNA, 15 bp, Homo sapiens
atgtttagacacatg

SEQ ID NO: 376612 - DNA, 15 bp, Homo sapiens
aatgtttagacacat

SEQ ID NO: 376613 - DNA, 15 bp, Homo sapiens
gaatgtttagacaca

SEQ ID NO: 376614 - DNA, 15 bp, Homo sapiens
agaatgtttagacac

SEQ ID NO: 376615 - DNA, 15 bp, Homo sapiens
gagaatgtttagaca

SEQ ID NO: 376616 - DNA, 15 bp, Homo sapiens
agagaatgtttagac

SEQ ID NO: 376617 - DNA, 15 bp, Homo sapiens
cagagaatgtttaga

SEQ ID NO: 376618 - DNA, 15 bp, Homo sapiens
tcagagaatgtttag

SEQ ID NO: 376619 - DNA, 15 bp, Homo sapiens
ttcagagaatgttta

SEQ ID NO: 376620 - DNA, 15 bp, Homo sapiens
attcagagaatgttt

SEQ ID NO: 376621 - DNA, 15 bp, Homo sapiens
tattcagagaatgtt

SEQ ID NO: 376622 - DNA, 15 bp, Homo sapiens
atattcagagaatgt

SEQ ID NO: 376623 - DNA, 15 bp, Homo sapiens
aatattcagagaatg

SEQ ID NO: 376624 - DNA, 15 bp, Homo sapiens
caatattcagagaat

SEQ ID NO: 376625 - DNA, 15 bp, Homo sapiens
acaatattcagagaa

SEQ ID NO: 376626 - DNA, 15 bp, Homo sapiens
gacaatattcagaga

SEQ ID NO: 376627 - DNA, 15 bp, Homo sapiens
ggacaatattcagag

SEQ ID NO: 376628 - DNA, 15 bp, Homo sapiens
aggacaatattcaga

SEQ ID NO: 376629 - DNA, 15 bp, Homo sapiens
aaggacaatattcag

SEQ ID NO: 376630 - DNA, 15 bp, Homo sapiens
gaaggacaatattca

SEQ ID NO: 376631 - DNA, 15 bp, Homo sapiens
tgaaggacaatattc

SEQ ID NO: 376632 - DNA, 15 bp, Homo sapiens
atgaaggacaatatt

SEQ ID NO: 376633 - DNA, 15 bp, Homo sapiens
tatgaaggacaatat

SEQ ID NO: 376634 - DNA, 15 bp, Homo sapiens
ttatgaaggacaata

SEQ ID NO: 376635 - DNA, 15 bp, Homo sapiens
gttatgaaggacaat

SEQ ID NO: 376636 - DNA, 15 bp, Homo sapiens
ggttatgaaggacaa

SEQ ID NO: 376637 - DNA, 15 bp, Homo sapiens
gggttatgaaggaca

SEQ ID NO: 376638 - DNA, 15 bp, Homo sapiens
tgggttatgaaggac

SEQ ID NO: 376639 - DNA, 15 bp, Homo sapiens
ttgggttatgaagga

SEQ ID NO: 376640 - DNA, 15 bp, Homo sapiens
gttgggttatgaagg

SEQ ID NO: 376641 - DNA, 15 bp, Homo sapiens
agttgggttatgaag

SEQ ID NO: 376642 - DNA, 15 bp, Homo sapiens
gagttgggttatgaa

SEQ ID NO: 376643 - DNA, 15 bp, Homo sapiens
ggagttgggttatga

SEQ ID NO: 376644 - DNA, 15 bp, Homo sapiens
aggagttgggttatg

SEQ ID NO: 376645 - DNA, 15 bp, Homo sapiens
caggagttgggttat

SEQ ID NO: 376646 - DNA, 15 bp, Homo sapiens
gcaggagttgggtta

SEQ ID NO: 376647 - DNA, 15 bp, Homo sapiens
agcaggagttgggtt

SEQ ID NO: 376648 - DNA, 15 bp, Homo sapiens
cagcaggagttgggt

SEQ ID NO: 376649 - DNA, 15 bp, Homo sapiens
gcagcaggagttggg

SEQ ID NO: 376650 - DNA, 15 bp, Homo sapiens
agcagcaggagttgg

SEQ ID NO: 376651 - DNA, 15 bp, Homo sapiens
aagcagcaggagttg

SEQ ID NO: 376652 - DNA, 15 bp, Homo sapiens
taagcagcaggagtt

SEQ ID NO: 376653 - DNA, 15 bp, Homo sapiens
gtaagcagcaggagt

SEQ ID NO: 376654 - DNA, 15 bp, Homo sapiens
agtaagcagcaggag

SEQ ID NO: 376655 - DNA, 15 bp, Homo sapiens
cagtaagcagcagga

SEQ ID NO: 376656 - DNA, 15 bp, Homo sapiens
gcagtaagcagcagg

SEQ ID NO: 376657 - DNA, 15 bp, Homo sapiens
agcagtaagcagcag

SEQ ID NO: 376658 - DNA, 15 bp, Homo sapiens
aagcagtaagcagca

SEQ ID NO: 376659 - DNA, 15 bp, Homo sapiens
gaagcagtaagcagc

SEQ ID NO: 376660 - DNA, 15 bp, Homo sapiens
tgaagcagtaagcag

SEQ ID NO: 376661 - DNA, 15 bp, Homo sapiens
atgaagcagtaagca

SEQ ID NO: 376662 - DNA, 15 bp, Homo sapiens
aatgaagcagtaagc

SEQ ID NO: 376663 - DNA, 15 bp, Homo sapiens
aaatgaagcagtaag

SEQ ID NO: 376664 - DNA, 15 bp, Homo sapiens
caaatgaagcagtaa

SEQ ID NO: 376665 - DNA, 15 bp, Homo sapiens
acaaatgaagcagta

SEQ ID NO: 376666 - DNA, 15 bp, Homo sapiens
aacaaatgaagcagt

SEQ ID NO: 376667 - DNA, 15 bp, Homo sapiens
taacaaatgaagcag

SEQ ID NO: 376668 - DNA, 15 bp, Homo sapiens
ttaacaaatgaagca

SEQ ID NO: 376669 - DNA, 15 bp, Homo sapiens
tttaacaaatgaagc

SEQ ID NO: 376670 - DNA, 15 bp, Homo sapiens
ttttaacaaatgaag

SEQ ID NO: 376671 - DNA, 15 bp, Homo sapiens
cttttaacaaatgaa

SEQ ID NO: 376672 - DNA, 15 bp, Homo sapiens
tcttttaacaaatga

SEQ ID NO: 376673 - DNA, 15 bp, Homo sapiens
ttcttttaacaaatg

SEQ ID NO: 376674 - DNA, 15 bp, Homo sapiens
attcttttaacaaat

SEQ ID NO: 376675 - DNA, 15 bp, Homo sapiens
tattcttttaacaaa

SEQ ID NO: 376676 - DNA, 15 bp, Homo sapiens
ttattcttttaacaa

SEQ ID NO: 376677 - DNA, 15 bp, Homo sapiens
attattcttttaaca

SEQ ID NO: 376678 - DNA, 15 bp, Homo sapiens
tattattcttttaac

SEQ ID NO: 376679 - DNA, 15 bp, Homo sapiens
atattattcttttaa

SEQ ID NO: 376680 - DNA, 15 bp, Homo sapiens
aatattattctttta

SEQ ID NO: 376681 - DNA, 15 bp, Homo sapiens
aaatattattctttt

SEQ ID NO: 376682 - DNA, 15 bp, Homo sapiens
aaaatattattcttt

SEQ ID NO: 376683 - DNA, 15 bp, Homo sapiens
caaaatattattctt

SEQ ID NO: 376684 - DNA, 15 bp, Homo sapiens
tcaaaatattattct

SEQ ID NO: 376685 - DNA, 15 bp, Homo sapiens
atcaaaatattattc

SEQ ID NO: 376686 - DNA, 15 bp, Homo sapiens
aatcaaaatattatt

SEQ ID NO: 376687 - DNA, 15 bp, Homo sapiens
gaatcaaaatattat

SEQ ID NO: 376688 - DNA, 15 bp, Homo sapiens
tgaatcaaaatatta

SEQ ID NO: 376689 - DNA, 15 bp, Homo sapiens
atgaatcaaaatatt

SEQ ID NO: 376690 - DNA, 15 bp, Homo sapiens
gatgaatcaaaatat

SEQ ID NO: 376691 - DNA, 15 bp, Homo sapiens
tgatgaatcaaaata

SEQ ID NO: 376692 - DNA, 15 bp, Homo sapiens
gtgatgaatcaaaat

SEQ ID NO: 376693 - DNA, 15 bp, Homo sapiens
tgtgatgaatcaaaa

SEQ ID NO: 376694 - DNA, 15 bp, Homo sapiens
ctgtgatgaatcaaa

SEQ ID NO: 376695 - DNA, 15 bp, Homo sapiens
cctgtgatgaatcaa

SEQ ID NO: 376696 - DNA, 15 bp, Homo sapiens
gcctgtgatgaatca

SEQ ID NO: 376697 - DNA, 15 bp, Homo sapiens
tgcctgtgatgaatc

SEQ ID NO: 376698 - DNA, 15 bp, Homo sapiens
atgcctgtgatgaat

SEQ ID NO: 376699 - DNA, 15 bp, Homo sapiens
aatgcctgtgatgaa

SEQ ID NO: 376700 - DNA, 15 bp, Homo sapiens
gaatgcctgtgatga

SEQ ID NO: 376701 - DNA, 15 bp, Homo sapiens
ggaatgcctgtgatg

SEQ ID NO: 376702 - DNA, 15 bp, Homo sapiens
aggaatgcctgtgat

SEQ ID NO: 376703 - DNA, 15 bp, Homo sapiens
caggaatgcctgtga

SEQ ID NO: 376704 - DNA, 15 bp, Homo sapiens
ccaggaatgcctgtg

SEQ ID NO: 376705 - DNA, 15 bp, Homo sapiens
tccaggaatgcctgt

SEQ ID NO: 376706 - DNA, 15 bp, Homo sapiens
ttccaggaatgcctg

SEQ ID NO: 376707 - DNA, 15 bp, Homo sapiens
gttccaggaatgcct

SEQ ID NO: 376708 - DNA, 15 bp, Homo sapiens
tgttccaggaatgcc

SEQ ID NO: 376709 - DNA, 15 bp, Homo sapiens
ctgttccaggaatgc

SEQ ID NO: 376710 - DNA, 15 bp, Homo sapiens
tctgttccaggaatg

SEQ ID NO: 376711 - DNA, 15 bp, Homo sapiens
atctgttccaggaat

SEQ ID NO: 376712 - DNA, 15 bp, Homo sapiens
gatctgttccaggaa

SEQ ID NO: 376713 - DNA, 15 bp, Homo sapiens
tgatctgttccagga

SEQ ID NO: 376714 - DNA, 15 bp, Homo sapiens
ctgatctgttccagg

SEQ ID NO: 376715 - DNA, 15 bp, Homo sapiens
cctgatctgttccag

SEQ ID NO: 376716 - DNA, 15 bp, Homo sapiens
tcctgatctgttcca

SEQ ID NO: 376717 - DNA, 15 bp, Homo sapiens
atcctgatctgttcc

SEQ ID NO: 376718 - DNA, 15 bp, Homo sapiens
catcctgatctgttc

SEQ ID NO: 376719 - DNA, 15 bp, Homo sapiens
acatcctgatctgtt

SEQ ID NO: 376720 - DNA, 15 bp, Homo sapiens
aacatcctgatctgt

SEQ ID NO: 376721 - DNA, 15 bp, Homo sapiens
taacatcctgatctg

SEQ ID NO: 376722 - DNA, 15 bp, Homo sapiens
gtaacatcctgatct

SEQ ID NO: 376723 - DNA, 15 bp, Homo sapiens
tgtaacatcctgatc

SEQ ID NO: 376724 - DNA, 15 bp, Homo sapiens
ctgtaacatcctgat

SEQ ID NO: 376725 - DNA, 15 bp, Homo sapiens
tctgtaacatcctga

SEQ ID NO: 376726 - DNA, 15 bp, Homo sapiens
gtctgtaacatcctg

SEQ ID NO: 376727 - DNA, 15 bp, Homo sapiens
tgtctgtaacatcct

SEQ ID NO: 376728 - DNA, 15 bp, Homo sapiens
atgtctgtaacatcc

SEQ ID NO: 376729 - DNA, 15 bp, Homo sapiens
catgtctgtaacatc

SEQ ID NO: 376730 - DNA, 15 bp, Homo sapiens
ccatgtctgtaacat

SEQ ID NO: 376731 - DNA, 15 bp, Homo sapiens
gccatgtctgtaaca

SEQ ID NO: 376732 - DNA, 15 bp, Homo sapiens
ggccatgtctgtaac

SEQ ID NO: 376733 - DNA, 15 bp, Homo sapiens
gggccatgtctgtaa

SEQ ID NO: 376734 - DNA, 15 bp, Homo sapiens
agggccatgtctgta

SEQ ID NO: 376735 - DNA, 15 bp, Homo sapiens
cagggccatgtctgt

SEQ ID NO: 376736 - DNA, 15 bp, Homo sapiens
acagggccatgtctg

SEQ ID NO: 376737 - DNA, 15 bp, Homo sapiens
cacagggccatgtct

SEQ ID NO: 376738 - DNA, 15 bp, Homo sapiens
ccacagggccatgtc

SEQ ID NO: 376739 - DNA, 15 bp, Homo sapiens
gccacagggccatgt

SEQ ID NO: 376740 - DNA, 15 bp, Homo sapiens
agccacagggccatg

SEQ ID NO: 376741 - DNA, 15 bp, Homo sapiens
aagccacagggccat

SEQ ID NO: 376742 - DNA, 15 bp, Homo sapiens
aaagccacagggcca

SEQ ID NO: 376743 - DNA, 15 bp, Homo sapiens
taaagccacagggcc

SEQ ID NO: 376744 - DNA, 15 bp, Homo sapiens
ataaagccacagggc

SEQ ID NO: 376745 - DNA, 15 bp, Homo sapiens
gataaagccacaggg

SEQ ID NO: 376746 - DNA, 15 bp, Homo sapiens
agataaagccacagg

SEQ ID NO: 376747 - DNA, 15 bp, Homo sapiens
gagataaagccacag

SEQ ID NO: 376748 - DNA, 15 bp, Homo sapiens
tgagataaagccaca

SEQ ID NO: 376749 - DNA, 15 bp, Homo sapiens
gtgagataaagccac

SEQ ID NO: 376750 - DNA, 15 bp, Homo sapiens
tgtgagataaagcca

SEQ ID NO: 376751 - DNA, 15 bp, Homo sapiens
ttgtgagataaagcc

SEQ ID NO: 376752 - DNA, 15 bp, Homo sapiens
tttgtgagataaagc

SEQ ID NO: 376753 - DNA, 15 bp, Homo sapiens
atttgtgagataaag

SEQ ID NO: 376754 - DNA, 15 bp, Homo sapiens
gatttgtgagataaa

SEQ ID NO: 376755 - DNA, 15 bp, Homo sapiens
tgatttgtgagataa

SEQ ID NO: 376756 - DNA, 15 bp, Homo sapiens
ttgatttgtgagata

SEQ ID NO: 376757 - DNA, 15 bp, Homo sapiens
gttgatttgtgagat

SEQ ID NO: 376758 - DNA, 15 bp, Homo sapiens
tgttgatttgtgaga

SEQ ID NO: 376759 - DNA, 15 bp, Homo sapiens
ctgttgatttgtgag

SEQ ID NO: 376760 - DNA, 15 bp, Homo sapiens
gctgttgatttgtga

SEQ ID NO: 376761 - DNA, 15 bp, Homo sapiens
tgctgttgatttgtg

SEQ ID NO: 376762 - DNA, 15 bp, Homo sapiens
ctgctgttgatttgt

SEQ ID NO: 376763 - DNA, 15 bp, Homo sapiens
tctgctgttgatttg

SEQ ID NO: 376764 - DNA, 15 bp, Homo sapiens
ttctgctgttgattt

SEQ ID NO: 376765 - DNA, 15 bp, Homo sapiens
tttctgctgttgatt

SEQ ID NO: 376766 - DNA, 15 bp, Homo sapiens
gtttctgctgttgat

SEQ ID NO: 376767 - DNA, 15 bp, Homo sapiens
tgtttctgctgttga

SEQ ID NO: 376768 - DNA, 15 bp, Homo sapiens
gtgtttctgctgttg

SEQ ID NO: 376769 - DNA, 15 bp, Homo sapiens
tgtgtttctgctgtt

SEQ ID NO: 376770 - DNA, 15 bp, Homo sapiens
ctgtgtttctgctgt

SEQ ID NO: 376771 - DNA, 15 bp, Homo sapiens
cctgtgtttctgctg

SEQ ID NO: 376772 - DNA, 15 bp, Homo sapiens
tcctgtgtttctgct

SEQ ID NO: 376773 - DNA, 15 bp, Homo sapiens
atcctgtgtttctgc

SEQ ID NO: 376774 - DNA, 15 bp, Homo sapiens
catcctgtgtttctg

SEQ ID NO: 376775 - DNA, 15 bp, Homo sapiens
tcatcctgtgtttct

SEQ ID NO: 376776 - DNA, 15 bp, Homo sapiens
ctcatcctgtgtttc

SEQ ID NO: 376777 - DNA, 15 bp, Homo sapiens
tctcatcctgtgttt

SEQ ID NO: 376778 - DNA, 15 bp, Homo sapiens
ctctcatcctgtgtt

SEQ ID NO: 376779 - DNA, 15 bp, Homo sapiens
cctctcatcctgtgt

SEQ ID NO: 376780 - DNA, 15 bp, Homo sapiens
ccctctcatcctgtg

SEQ ID NO: 376781 - DNA, 15 bp, Homo sapiens
tccctctcatcctgt

SEQ ID NO: 376782 - DNA, 15 bp, Homo sapiens
ttccctctcatcctg

SEQ ID NO: 376783 - DNA, 15 bp, Homo sapiens
attccctctcatcct

SEQ ID NO: 376784 - DNA, 15 bp, Homo sapiens
tattccctctcatcc

SEQ ID NO: 376785 - DNA, 15 bp, Homo sapiens
ttattccctctcatc

SEQ ID NO: 376786 - DNA, 15 bp, Homo sapiens
attattccctctcat

SEQ ID NO: 376787 - DNA, 15 bp, Homo sapiens
aattattccctctca

SEQ ID NO: 376788 - DNA, 15 bp, Homo sapiens
taattattccctctc

SEQ ID NO: 376789 - DNA, 15 bp, Homo sapiens
ctaattattccctct

SEQ ID NO: 376790 - DNA, 15 bp, Homo sapiens
cctaattattccctc

SEQ ID NO: 376791 - DNA, 15 bp, Homo sapiens
acctaattattccct

SEQ ID NO: 376792 - DNA, 15 bp, Homo sapiens
aacctaattattccc

SEQ ID NO: 376793 - DNA, 15 bp, Homo sapiens
aaacctaattattcc

SEQ ID NO: 376794 - DNA, 15 bp, Homo sapiens
aaaacctaattattc

SEQ ID NO: 376795 - DNA, 15 bp, Homo sapiens
aaaaacctaattatt

SEQ ID NO: 376796 - DNA, 15 bp, Homo sapiens
caaaaacctaattat

SEQ ID NO: 376797 - DNA, 15 bp, Homo sapiens
ccaaaaacctaatta

SEQ ID NO: 376798 - DNA, 15 bp, Homo sapiens
tccaaaaacctaatt

SEQ ID NO: 376799 - DNA, 15 bp, Homo sapiens
atccaaaaacctaat

SEQ ID NO: 376800 - DNA, 15 bp, Homo sapiens
tatccaaaaacctaa

SEQ ID NO: 376801 - DNA, 15 bp, Homo sapiens
atatccaaaaaccta

SEQ ID NO: 376802 - DNA, 15 bp, Homo sapiens
tatatccaaaaacct

SEQ ID NO: 376803 - DNA, 15 bp, Homo sapiens
atatatccaaaaacc

SEQ ID NO: 376804 - DNA, 15 bp, Homo sapiens
catatatccaaaaac

SEQ ID NO: 376805 - DNA, 15 bp, Homo sapiens
acatatatccaaaaa

SEQ ID NO: 376806 - DNA, 15 bp, Homo sapiens
gacatatatccaaaa

SEQ ID NO: 376807 - DNA, 15 bp, Homo sapiens
agacatatatccaaa

SEQ ID NO: 376808 - DNA, 15 bp, Homo sapiens
gagacatatatccaa

SEQ ID NO: 376809 - DNA, 15 bp, Homo sapiens
agagacatatatcca

SEQ ID NO: 376810 - DNA, 15 bp, Homo sapiens
tagagacatatatcc

SEQ ID NO: 376811 - DNA, 15 bp, Homo sapiens
ttagagacatatatc

SEQ ID NO: 376812 - DNA, 15 bp, Homo sapiens
cttagagacatatat

SEQ ID NO: 376813 - DNA, 15 bp, Homo sapiens
tcttagagacatata

SEQ ID NO: 376814 - DNA, 15 bp, Homo sapiens
ttcttagagacatat

SEQ ID NO: 376815 - DNA, 15 bp, Homo sapiens
cttcttagagacata

SEQ ID NO: 376816 - DNA, 15 bp, Homo sapiens
tcttcttagagacat

SEQ ID NO: 376817 - DNA, 15 bp, Homo sapiens
atcttcttagagaca

SEQ ID NO: 376818 - DNA, 15 bp, Homo sapiens
gatcttcttagagac

SEQ ID NO: 376819 - DNA, 15 bp, Homo sapiens
tgatcttcttagaga

SEQ ID NO: 376820 - DNA, 15 bp, Homo sapiens
gtgatcttcttagag

SEQ ID NO: 376821 - DNA, 15 bp, Homo sapiens
tgtgatcttcttaga

SEQ ID NO: 376822 - DNA, 15 bp, Homo sapiens
ttgtgatcttcttag

SEQ ID NO: 376823 - DNA, 15 bp, Homo sapiens
gttgtgatcttctta

SEQ ID NO: 376824 - DNA, 15 bp, Homo sapiens
agttgtgatcttctt

SEQ ID NO: 376825 - DNA, 15 bp, Homo sapiens
aagttgtgatcttct

SEQ ID NO: 376826 - DNA, 15 bp, Homo sapiens
taagttgtgatcttc

SEQ ID NO: 376827 - DNA, 15 bp, Homo sapiens
ctaagttgtgatctt

SEQ ID NO: 376828 - DNA, 15 bp, Homo sapiens
tctaagttgtgatct

SEQ ID NO: 376829 - DNA, 15 bp, Homo sapiens
ttctaagttgtgatc

SEQ ID NO: 376830 - DNA, 15 bp, Homo sapiens
tttctaagttgtgat

SEQ ID NO: 376831 - DNA, 15 bp, Homo sapiens
atttctaagttgtga

SEQ ID NO: 376832 - DNA, 15 bp, Homo sapiens
catttctaagttgtg

SEQ ID NO: 376833 - DNA, 15 bp, Homo sapiens
acatttctaagttgt

SEQ ID NO: 376834 - DNA, 15 bp, Homo sapiens
tacatttctaagttg

SEQ ID NO: 376835 - DNA, 15 bp, Homo sapiens
atacatttctaagtt

SEQ ID NO: 376836 - DNA, 15 bp, Homo sapiens
aatacatttctaagt

SEQ ID NO: 376837 - DNA, 15 bp, Homo sapiens
aaatacatttctaag

SEQ ID NO: 376838 - DNA, 15 bp, Homo sapiens
aaaatacatttctaa

SEQ ID NO: 376839 - DNA, 15 bp, Homo sapiens
aaaaatacatttcta

SEQ ID NO: 376840 - DNA, 15 bp, Homo sapiens
gaaaaatacatttct

SEQ ID NO: 376841 - DNA, 15 bp, Homo sapiens
tgaaaaatacatttc

SEQ ID NO: 376842 - DNA, 15 bp, Homo sapiens
ctgaaaaatacattt

SEQ ID NO: 376843 - DNA, 15 bp, Homo sapiens
tctgaaaaatacatt

SEQ ID NO: 376844 - DNA, 15 bp, Homo sapiens
ttctgaaaaatacat

SEQ ID NO: 376845 - DNA, 15 bp, Homo sapiens
attctgaaaaataca

SEQ ID NO: 376846 - DNA, 15 bp, Homo sapiens
cattctgaaaaatac

SEQ ID NO: 376847 - DNA, 15 bp, Homo sapiens
tcattctgaaaaata

SEQ ID NO: 376848 - DNA, 15 bp, Homo sapiens
atcattctgaaaaat

SEQ ID NO: 376849 - DNA, 15 bp, Homo sapiens
tatcattctgaaaaa

SEQ ID NO: 376850 - DNA, 15 bp, Homo sapiens
gtatcattctgaaaa

SEQ ID NO: 376851 - DNA, 15 bp, Homo sapiens
ggtatcattctgaaa

SEQ ID NO: 376852 - DNA, 15 bp, Homo sapiens
tggtatcattctgaa

SEQ ID NO: 376853 - DNA, 15 bp, Homo sapiens
atggtatcattctga

SEQ ID NO: 376854 - DNA, 15 bp, Homo sapiens
gatggtatcattctg

SEQ ID NO: 376855 - DNA, 15 bp, Homo sapiens
agatggtatcattct

SEQ ID NO: 376856 - DNA, 15 bp, Homo sapiens
aagatggtatcattc

SEQ ID NO: 376857 - DNA, 15 bp, Homo sapiens
caagatggtatcatt

SEQ ID NO: 376858 - DNA, 15 bp, Homo sapiens
tcaagatggtatcat

SEQ ID NO: 376859 - DNA, 15 bp, Homo sapiens
atcaagatggtatca

SEQ ID NO: 376860 - DNA, 15 bp, Homo sapiens
catcaagatggtatc

SEQ ID NO: 376861 - DNA, 15 bp, Homo sapiens
gcatcaagatggtat

SEQ ID NO: 376862 - DNA, 15 bp, Homo sapiens
tgcatcaagatggta

SEQ ID NO: 376863 - DNA, 15 bp, Homo sapiens
gtgcatcaagatggt

SEQ ID NO: 376864 - DNA, 15 bp, Homo sapiens
tgtgcatcaagatgg

SEQ ID NO: 376865 - DNA, 15 bp, Homo sapiens
gtgtgcatcaagatg

SEQ ID NO: 376866 - DNA, 15 bp, Homo sapiens
tgtgtgcatcaagat

SEQ ID NO: 376867 - DNA, 15 bp, Homo sapiens
ctgtgtgcatcaaga

SEQ ID NO: 376868 - DNA, 15 bp, Homo sapiens
actgtgtgcatcaag

SEQ ID NO: 376869 - DNA, 15 bp, Homo sapiens
gactgtgtgcatcaa

SEQ ID NO: 376870 - DNA, 15 bp, Homo sapiens
cgactgtgtgcatca

SEQ ID NO: 376871 - DNA, 15 bp, Homo sapiens
gcgactgtgtgcatc

SEQ ID NO: 376872 - DNA, 15 bp, Homo sapiens
tgcgactgtgtgcat

SEQ ID NO: 376873 - DNA, 15 bp, Homo sapiens
gtgcgactgtgtgca

SEQ ID NO: 376874 - DNA, 15 bp, Homo sapiens
ggtgcgactgtgtgc

SEQ ID NO: 376875 - DNA, 15 bp, Homo sapiens
tggtgcgactgtgtg

SEQ ID NO: 376876 - DNA, 15 bp, Homo sapiens
ctggtgcgactgtgt

SEQ ID NO: 376877 - DNA, 15 bp, Homo sapiens
cctggtgcgactgtg

SEQ ID NO: 376878 - DNA, 15 bp, Homo sapiens
acctggtgcgactgt

SEQ ID NO: 376879 - DNA, 15 bp, Homo sapiens
cacctggtgcgactg

SEQ ID NO: 376880 - DNA, 15 bp, Homo sapiens
tcacctggtgcgact

SEQ ID NO: 376881 - DNA, 15 bp, Homo sapiens
ttcacctggtgcgac

SEQ ID NO: 376882 - DNA, 15 bp, Homo sapiens
tttcacctggtgcga

SEQ ID NO: 376883 - DNA, 15 bp, Homo sapiens
ctttcacctggtgcg

SEQ ID NO: 376884 - DNA, 15 bp, Homo sapiens
cctttcacctggtgc

SEQ ID NO: 376885 - DNA, 15 bp, Homo sapiens
tcctttcacctggtg

SEQ ID NO: 376886 - DNA, 15 bp, Homo sapiens
ttcctttcacctggt

SEQ ID NO: 376887 - DNA, 15 bp, Homo sapiens
attcctttcacctgg

SEQ ID NO: 376888 - DNA, 15 bp, Homo sapiens
gattcctttcacctg

SEQ ID NO: 376889 - DNA, 15 bp, Homo sapiens
ggattcctttcacct

SEQ ID NO: 376890 - DNA, 15 bp, Homo sapiens
aggattcctttcacc

SEQ ID NO: 376891 - DNA, 15 bp, Homo sapiens
gaggattcctttcac

SEQ ID NO: 376892 - DNA, 15 bp, Homo sapiens
agaggattcctttca

SEQ ID NO: 376893 - DNA, 15 bp, Homo sapiens
gagaggattcctttc

SEQ ID NO: 376894 - DNA, 15 bp, Homo sapiens
agagaggattccttt

SEQ ID NO: 376895 - DNA, 15 bp, Homo sapiens
cagagaggattcctt

SEQ ID NO: 376896 - DNA, 15 bp, Homo sapiens
acagagaggattcct

SEQ ID NO: 376897 - DNA, 15 bp, Homo sapiens
aacagagaggattcc

SEQ ID NO: 376898 - DNA, 15 bp, Homo sapiens
aaacagagaggattc

SEQ ID NO: 376899 - DNA, 15 bp, Homo sapiens
aaaacagagaggatt

SEQ ID NO: 376900 - DNA, 15 bp, Homo sapiens
aaaaacagagaggat

SEQ ID NO: 376901 - DNA, 15 bp, Homo sapiens
taaaaacagagagga

SEQ ID NO: 376902 - DNA, 15 bp, Homo sapiens
ctaaaaacagagagg

SEQ ID NO: 376903 - DNA, 15 bp, Homo sapiens
cctaaaaacagagag

SEQ ID NO: 376904 - DNA, 15 bp, Homo sapiens
ccctaaaaacagaga

SEQ ID NO: 376905 - DNA, 15 bp, Homo sapiens
tccctaaaaacagag

SEQ ID NO: 376906 - DNA, 15 bp, Homo sapiens
atccctaaaaacaga

SEQ ID NO: 376907 - DNA, 15 bp, Homo sapiens
catccctaaaaacag

SEQ ID NO: 376908 - DNA, 15 bp, Homo sapiens
tcatccctaaaaaca

SEQ ID NO: 376909 - DNA, 15 bp, Homo sapiens
ctcatccctaaaaac

SEQ ID NO: 376910 - DNA, 15 bp, Homo sapiens
tctcatccctaaaaa

SEQ ID NO: 376911 - DNA, 15 bp, Homo sapiens
gtctcatccctaaaa

SEQ ID NO: 376912 - DNA, 15 bp, Homo sapiens
agtctcatccctaaa

SEQ ID NO: 376913 - DNA, 15 bp, Homo sapiens
gagtctcatccctaa

SEQ ID NO: 376914 - DNA, 15 bp, Homo sapiens
tgagtctcatcccta

SEQ ID NO: 376915 - DNA, 15 bp, Homo sapiens
gtgagtctcatccct

SEQ ID NO: 376916 - DNA, 15 bp, Homo sapiens
tgtgagtctcatccc

SEQ ID NO: 376917 - DNA, 15 bp, Homo sapiens
atgtgagtctcatcc

SEQ ID NO: 376918 - DNA, 15 bp, Homo sapiens
tatgtgagtctcatc

SEQ ID NO: 376919 - DNA, 15 bp, Homo sapiens
atatgtgagtctcat

SEQ ID NO: 376920 - DNA, 15 bp, Homo sapiens
catatgtgagtctca

SEQ ID NO: 376921 - DNA, 15 bp, Homo sapiens
tcatatgtgagtctc

SEQ ID NO: 376922 - DNA, 15 bp, Homo sapiens
ctcatatgtgagtct

SEQ ID NO: 376923 - DNA, 15 bp, Homo sapiens
actcatatgtgagtc

SEQ ID NO: 376924 - DNA, 15 bp, Homo sapiens
tactcatatgtgagt

SEQ ID NO: 376925 - DNA, 15 bp, Homo sapiens
atactcatatgtgag

SEQ ID NO: 376926 - DNA, 15 bp, Homo sapiens
aatactcatatgtga

SEQ ID NO: 376927 - DNA, 15 bp, Homo sapiens
gaatactcatatgtg

SEQ ID NO: 376928 - DNA, 15 bp, Homo sapiens
tgaatactcatatgt

SEQ ID NO: 376929 - DNA, 15 bp, Homo sapiens
ctgaatactcatatg

SEQ ID NO: 376930 - DNA, 15 bp, Homo sapiens
tctgaatactcatat

SEQ ID NO: 376931 - DNA, 15 bp, Homo sapiens
atctgaatactcata

SEQ ID NO: 376932 - DNA, 15 bp, Homo sapiens
aatctgaatactcat

SEQ ID NO: 376933 - DNA, 15 bp, Homo sapiens
aaatctgaatactca

SEQ ID NO: 376934 - DNA, 15 bp, Homo sapiens
gaaatctgaatactc

SEQ ID NO: 376935 - DNA, 15 bp, Homo sapiens
agaaatctgaatact

SEQ ID NO: 376936 - DNA, 15 bp, Homo sapiens
aagaaatctgaatac

SEQ ID NO: 376937 - DNA, 15 bp, Homo sapiens
aaagaaatctgaata

SEQ ID NO: 376938 - DNA, 15 bp, Homo sapiens
aaaagaaatctgaat

SEQ ID NO: 376939 - DNA, 15 bp, Homo sapiens
aaaaagaaatctgaa

SEQ ID NO: 376940 - DNA, 15 bp, Homo sapiens
gaaaaagaaatctga

SEQ ID NO: 376941 - DNA, 15 bp, Homo sapiens
tgaaaaagaaatctg

SEQ ID NO: 376942 - DNA, 15 bp, Homo sapiens
atgaaaaagaaatct

SEQ ID NO: 376943 - DNA, 15 bp, Homo sapiens
gatgaaaaagaaatc

SEQ ID NO: 376944 - DNA, 15 bp, Homo sapiens
ggatgaaaaagaaat

SEQ ID NO: 376945 - DNA, 15 bp, Homo sapiens
tggatgaaaaagaaa

SEQ ID NO: 376946 - DNA, 15 bp, Homo sapiens
ctggatgaaaaagaa

SEQ ID NO: 376947 - DNA, 15 bp, Homo sapiens
gctggatgaaaaaga

SEQ ID NO: 376948 - DNA, 15 bp, Homo sapiens
agctggatgaaaaag

SEQ ID NO: 376949 - DNA, 15 bp, Homo sapiens
tagctggatgaaaaa

SEQ ID NO: 376950 - DNA, 15 bp, Homo sapiens
atagctggatgaaaa

SEQ ID NO: 376951 - DNA, 15 bp, Homo sapiens
gatagctggatgaaa

SEQ ID NO: 376952 - DNA, 15 bp, Homo sapiens
tgatagctggatgaa

SEQ ID NO: 376953 - DNA, 15 bp, Homo sapiens
gtgatagctggatga

SEQ ID NO: 376954 - DNA, 15 bp, Homo sapiens
agtgatagctggatg

SEQ ID NO: 376955 - DNA, 15 bp, Homo sapiens
aagtgatagctggat

SEQ ID NO: 376956 - DNA, 15 bp, Homo sapiens
aaagtgatagctgga

SEQ ID NO: 376957 - DNA, 15 bp, Homo sapiens
gaaagtgatagctgg

SEQ ID NO: 376958 - DNA, 15 bp, Homo sapiens
agaaagtgatagctg

SEQ ID NO: 376959 - DNA, 15 bp, Homo sapiens
gagaaagtgatagct

SEQ ID NO: 376960 - DNA, 15 bp, Homo sapiens
ggagaaagtgatagc

SEQ ID NO: 376961 - DNA, 15 bp, Homo sapiens
gggagaaagtgatag

SEQ ID NO: 376962 - DNA, 15 bp, Homo sapiens
tgggagaaagtgata

SEQ ID NO: 376963 - DNA, 15 bp, Homo sapiens
ttgggagaaagtgat

SEQ ID NO: 376964 - DNA, 15 bp, Homo sapiens
gttgggagaaagtga

SEQ ID NO: 376965 - DNA, 15 bp, Homo sapiens
ggttgggagaaagtg

SEQ ID NO: 376966 - DNA, 15 bp, Homo sapiens
gggttgggagaaagt

SEQ ID NO: 376967 - DNA, 15 bp, Homo sapiens
ggggttgggagaaag

SEQ ID NO: 376968 - DNA, 15 bp, Homo sapiens
tggggttgggagaaa

SEQ ID NO: 376969 - DNA, 15 bp, Homo sapiens
ctggggttgggagaa

SEQ ID NO: 376970 - DNA, 15 bp, Homo sapiens
gctggggttgggaga

SEQ ID NO: 376971 - DNA, 15 bp, Homo sapiens
ggctggggttgggag

SEQ ID NO: 376972 - DNA, 15 bp, Homo sapiens
gggctggggttggga

SEQ ID NO: 376973 - DNA, 15 bp, Homo sapiens
ggggctggggttggg

SEQ ID NO: 376974 - DNA, 15 bp, Homo sapiens
tggggctggggttgg

SEQ ID NO: 376975 - DNA, 15 bp, Homo sapiens
ttggggctggggttg

SEQ ID NO: 376976 - DNA, 15 bp, Homo sapiens
gttggggctggggtt

SEQ ID NO: 376977 - DNA, 15 bp, Homo sapiens
agttggggctggggt

SEQ ID NO: 376978 - DNA, 15 bp, Homo sapiens
aagttggggctgggg

SEQ ID NO: 376979 - DNA, 15 bp, Homo sapiens
taagttggggctggg

SEQ ID NO: 376980 - DNA, 15 bp, Homo sapiens
ttaagttggggctgg

SEQ ID NO: 376981 - DNA, 15 bp, Homo sapiens
cttaagttggggctg

SEQ ID NO: 376982 - DNA, 15 bp, Homo sapiens
gcttaagttggggct

SEQ ID NO: 376983 - DNA, 15 bp, Homo sapiens
agcttaagttggggc

SEQ ID NO: 376984 - DNA, 15 bp, Homo sapiens
gagcttaagttgggg

SEQ ID NO: 376985 - DNA, 15 bp, Homo sapiens
ggagcttaagttggg

SEQ ID NO: 376986 - DNA, 15 bp, Homo sapiens
tggagcttaagttgg

SEQ ID NO: 376987 - DNA, 15 bp, Homo sapiens
gtggagcttaagttg

SEQ ID NO: 376988 - DNA, 15 bp, Homo sapiens
agtggagcttaagtt

SEQ ID NO: 376989 - DNA, 15 bp, Homo sapiens
aagtggagcttaagt

SEQ ID NO: 376990 - DNA, 15 bp, Homo sapiens
caagtggagcttaag

SEQ ID NO: 376991 - DNA, 15 bp, Homo sapiens
ccaagtggagcttaa

SEQ ID NO: 376992 - DNA, 15 bp, Homo sapiens
tccaagtggagctta

SEQ ID NO: 376993 - DNA, 15 bp, Homo sapiens
gtccaagtggagctt

SEQ ID NO: 376994 - DNA, 15 bp, Homo sapiens
ggtccaagtggagct

SEQ ID NO: 376995 - DNA, 15 bp, Homo sapiens
gggtccaagtggagc

SEQ ID NO: 376996 - DNA, 15 bp, Homo sapiens
agggtccaagtggag

SEQ ID NO: 376997 - DNA, 15 bp, Homo sapiens
cagggtccaagtgga

SEQ ID NO: 376998 - DNA, 15 bp, Homo sapiens
tcagggtccaagtgg

SEQ ID NO: 376999 - DNA, 15 bp, Homo sapiens
ttcagggtccaagtg

SEQ ID NO: 377000 - DNA, 15 bp, Homo sapiens
tttcagggtccaagt

SEQ ID NO: 377001 - DNA, 15 bp, Homo sapiens
ttttcagggtccaag

SEQ ID NO: 377002 - DNA, 15 bp, Homo sapiens
cttttcagggtccaa

SEQ ID NO: 377003 - DNA, 15 bp, Homo sapiens
acttttcagggtcca

SEQ ID NO: 377004 - DNA, 15 bp, Homo sapiens
cacttttcagggtcc

SEQ ID NO: 377005 - DNA, 15 bp, Homo sapiens
tcacttttcagggtc

SEQ ID NO: 377006 - DNA, 15 bp, Homo sapiens
ttcacttttcagggt

SEQ ID NO: 377007 - DNA, 15 bp, Homo sapiens
attcacttttcaggg

SEQ ID NO: 377008 - DNA, 15 bp, Homo sapiens
tattcacttttcagg

SEQ ID NO: 377009 - DNA, 15 bp, Homo sapiens
gtattcacttttcag

SEQ ID NO: 377010 - DNA, 15 bp, Homo sapiens
agtattcacttttca

SEQ ID NO: 377011 - DNA, 15 bp, Homo sapiens
cagtattcacttttc

SEQ ID NO: 377012 - DNA, 15 bp, Homo sapiens
ccagtattcactttt

SEQ ID NO: 377013 - DNA, 15 bp, Homo sapiens
tccagtattcacttt

SEQ ID NO: 377014 - DNA, 15 bp, Homo sapiens
gtccagtattcactt

SEQ ID NO: 377015 - DNA, 15 bp, Homo sapiens
tgtccagtattcact

SEQ ID NO: 377016 - DNA, 15 bp, Homo sapiens
atgtccagtattcac

SEQ ID NO: 377017 - DNA, 15 bp, Homo sapiens
catgtccagtattca

SEQ ID NO: 377018 - DNA, 15 bp, Homo sapiens
ccatgtccagtattc

SEQ ID NO: 377019 - DNA, 15 bp, Homo sapiens
tccatgtccagtatt

SEQ ID NO: 377020 - DNA, 15 bp, Homo sapiens
gtccatgtccagtat

SEQ ID NO: 377021 - DNA, 15 bp, Homo sapiens
agtccatgtccagta

SEQ ID NO: 377022 - DNA, 15 bp, Homo sapiens
gagtccatgtccagt

SEQ ID NO: 377023 - DNA, 15 bp, Homo sapiens
tgagtccatgtccag

SEQ ID NO: 377024 - DNA, 15 bp, Homo sapiens
ttgagtccatgtcca

SEQ ID NO: 377025 - DNA, 15 bp, Homo sapiens
cttgagtccatgtcc

SEQ ID NO: 377026 - DNA, 15 bp, Homo sapiens
gcttgagtccatgtc

SEQ ID NO: 377027 - DNA, 15 bp, Homo sapiens
cgcttgagtccatgt

SEQ ID NO: 377028 - DNA, 15 bp, Homo sapiens
gcgcttgagtccatg

SEQ ID NO: 377029 - DNA, 15 bp, Homo sapiens
ggcgcttgagtccat

SEQ ID NO: 377030 - DNA, 15 bp, Homo sapiens
tggcgcttgagtcca

SEQ ID NO: 377031 - DNA, 15 bp, Homo sapiens
ctggcgcttgagtcc

SEQ ID NO: 377032 - DNA, 15 bp, Homo sapiens
tctggcgcttgagtc

SEQ ID NO: 377033 - DNA, 15 bp, Homo sapiens
atctggcgcttgagt

SEQ ID NO: 377034 - DNA, 15 bp, Homo sapiens
catctggcgcttgag

SEQ ID NO: 377035 - DNA, 15 bp, Homo sapiens
ccatctggcgcttga

SEQ ID NO: 377036 - DNA, 15 bp, Homo sapiens
gccatctggcgcttg

SEQ ID NO: 377037 - DNA, 15 bp, Homo sapiens
agccatctggcgctt

SEQ ID NO: 377038 - DNA, 15 bp, Homo sapiens
aagccatctggcgct

SEQ ID NO: 377039 - DNA, 15 bp, Homo sapiens
taagccatctggcgc

SEQ ID NO: 377040 - DNA, 15 bp, Homo sapiens
ctaagccatctggcg

SEQ ID NO: 377041 - DNA, 15 bp, Homo sapiens
tctaagccatctggc

SEQ ID NO: 377042 - DNA, 15 bp, Homo sapiens
atctaagccatctgg

SEQ ID NO: 377043 - DNA, 15 bp, Homo sapiens
gatctaagccatctg

SEQ ID NO: 377044 - DNA, 15 bp, Homo sapiens
agatctaagccatct

SEQ ID NO: 377045 - DNA, 15 bp, Homo sapiens
cagatctaagccatc

SEQ ID NO: 377046 - DNA, 15 bp, Homo sapiens
ccagatctaagccat

SEQ ID NO: 377047 - DNA, 15 bp, Homo sapiens
tccagatctaagcca

SEQ ID NO: 377048 - DNA, 15 bp, Homo sapiens
atccagatctaagcc

SEQ ID NO: 377049 - DNA, 15 bp, Homo sapiens
aatccagatctaagc

SEQ ID NO: 377050 - DNA, 15 bp, Homo sapiens
gaatccagatctaag

SEQ ID NO: 377051 - DNA, 15 bp, Homo sapiens
ggaatccagatctaa

SEQ ID NO: 377052 - DNA, 15 bp, Homo sapiens
tggaatccagatcta

SEQ ID NO: 377053 - DNA, 15 bp, Homo sapiens
ctggaatccagatct

SEQ ID NO: 377054 - DNA, 15 bp, Homo sapiens
tctggaatccagatc

SEQ ID NO: 377055 - DNA, 15 bp, Homo sapiens
ttctggaatccagat

SEQ ID NO: 377056 - DNA, 15 bp, Homo sapiens
gttctggaatccaga

SEQ ID NO: 377057 - DNA, 15 bp, Homo sapiens
agttctggaatccag

SEQ ID NO: 377058 - DNA, 15 bp, Homo sapiens
cagttctggaatcca

SEQ ID NO: 377059 - DNA, 15 bp, Homo sapiens
gcagttctggaatcc

SEQ ID NO: 377060 - DNA, 15 bp, Homo sapiens
agcagttctggaatc

SEQ ID NO: 377061 - DNA, 15 bp, Homo sapiens
cagcagttctggaat

SEQ ID NO: 377062 - DNA, 15 bp, Homo sapiens
acagcagttctggaa

SEQ ID NO: 377063 - DNA, 15 bp, Homo sapiens
aacagcagttctgga

SEQ ID NO: 377064 - DNA, 15 bp, Homo sapiens
aaacagcagttctgg

SEQ ID NO: 377065 - DNA, 15 bp, Homo sapiens
taaacagcagttctg

SEQ ID NO: 377066 - DNA, 15 bp, Homo sapiens
gtaaacagcagttct

SEQ ID NO: 377067 - DNA, 15 bp, Homo sapiens
agtaaacagcagttc

SEQ ID NO: 377068 - DNA, 15 bp, Homo sapiens
cagtaaacagcagtt

SEQ ID NO: 377069 - DNA, 15 bp, Homo sapiens
ccagtaaacagcagt

SEQ ID NO: 377070 - DNA, 15 bp, Homo sapiens
gccagtaaacagcag

SEQ ID NO: 377071 - DNA, 15 bp, Homo sapiens
agccagtaaacagca

SEQ ID NO: 377072 - DNA, 15 bp, Homo sapiens
cagccagtaaacagc

SEQ ID NO: 377073 - DNA, 15 bp, Homo sapiens
ccagccagtaaacag

SEQ ID NO: 377074 - DNA, 15 bp, Homo sapiens
cccagccagtaaaca

SEQ ID NO: 377075 - DNA, 15 bp, Homo sapiens
acccagccagtaaac

SEQ ID NO: 377076 - DNA, 15 bp, Homo sapiens
tacccagccagtaaa

SEQ ID NO: 377077 - DNA, 15 bp, Homo sapiens
ttacccagccagtaa

SEQ ID NO: 377078 - DNA, 15 bp, Homo sapiens
gttacccagccagta

SEQ ID NO: 377079 - DNA, 15 bp, Homo sapiens
ggttacccagccagt

SEQ ID NO: 377080 - DNA, 15 bp, Homo sapiens
aggttacccagccag

SEQ ID NO: 377081 - DNA, 15 bp, Homo sapiens
aaggttacccagcca

SEQ ID NO: 377082 - DNA, 15 bp, Homo sapiens
taaggttacccagcc

SEQ ID NO: 377083 - DNA, 15 bp, Homo sapiens
ttaaggttacccagc

SEQ ID NO: 377084 - DNA, 15 bp, Homo sapiens
gttaaggttacccag

SEQ ID NO: 377085 - DNA, 15 bp, Homo sapiens
ggttaaggttaccca

SEQ ID NO: 377086 - DNA, 15 bp, Homo sapiens
aggttaaggttaccc

SEQ ID NO: 377087 - DNA, 15 bp, Homo sapiens
gaggttaaggttacc

SEQ ID NO: 377088 - DNA, 15 bp, Homo sapiens
ggaggttaaggttac

SEQ ID NO: 377089 - DNA, 15 bp, Homo sapiens
gggaggttaaggtta

SEQ ID NO: 377090 - DNA, 15 bp, Homo sapiens
agggaggttaaggtt

SEQ ID NO: 377091 - DNA, 15 bp, Homo sapiens
cagggaggttaaggt

SEQ ID NO: 377092 - DNA, 15 bp, Homo sapiens
acagggaggttaagg

SEQ ID NO: 377093 - DNA, 15 bp, Homo sapiens
cacagggaggttaag

SEQ ID NO: 377094 - DNA, 15 bp, Homo sapiens
gcacagggaggttaa

SEQ ID NO: 377095 - DNA, 15 bp, Homo sapiens
ggcacagggaggtta

SEQ ID NO: 377096 - DNA, 15 bp, Homo sapiens
aggcacagggaggtt

SEQ ID NO: 377097 - DNA, 15 bp, Homo sapiens
gaggcacagggaggt

SEQ ID NO: 377098 - DNA, 15 bp, Homo sapiens
tgaggcacagggagg

SEQ ID NO: 377099 - DNA, 15 bp, Homo sapiens
gaaaactgaggcaca

SEQ ID NO: 377100 - DNA, 15 bp, Homo sapiens
agaaaactgaggcac

SEQ ID NO: 377101 - DNA, 15 bp, Homo sapiens
gagaaaactgaggca

SEQ ID NO: 377102 - DNA, 15 bp, Homo sapiens
aagatgagaaaactg

SEQ ID NO: 377103 - DNA, 15 bp, Homo sapiens
aaagatgagaaaact

SEQ ID NO: 377104 - DNA, 15 bp, Homo sapiens
taaagatgagaaaac

SEQ ID NO: 377105 - DNA, 15 bp, Homo sapiens
ttaaagatgagaaaa

SEQ ID NO: 377106 - DNA, 15 bp, Homo sapiens
tttaaagatgagaaa

SEQ ID NO: 377107 - DNA, 15 bp, Homo sapiens
ttttaaagatgagaa

SEQ ID NO: 377108 - DNA, 15 bp, Homo sapiens
attttaaagatgaga

SEQ ID NO: 377109 - DNA, 15 bp, Homo sapiens
cattttaaagatgag

SEQ ID NO: 377110 - DNA, 15 bp, Homo sapiens
tcattttaaagatga

SEQ ID NO: 377111 - DNA, 15 bp, Homo sapiens
ttcattttaaagatg

SEQ ID NO: 377112 - DNA, 15 bp, Homo sapiens
cttcattttaaagat

SEQ ID NO: 377113 - DNA, 15 bp, Homo sapiens
tcttcattttaaaga

SEQ ID NO: 377114 - DNA, 15 bp, Homo sapiens
atcttcattttaaag

SEQ ID NO: 377115 - DNA, 15 bp, Homo sapiens
tatcttcattttaaa

SEQ ID NO: 377116 - DNA, 15 bp, Homo sapiens
ctatcttcattttaa

SEQ ID NO: 377117 - DNA, 15 bp, Homo sapiens
actatcttcatttta

SEQ ID NO: 377118 - DNA, 15 bp, Homo sapiens
tactatcttcatttt

SEQ ID NO: 377119 - DNA, 15 bp, Homo sapiens
ttactatcttcattt

SEQ ID NO: 377120 - DNA, 15 bp, Homo sapiens
attactatcttcatt

SEQ ID NO: 377121 - DNA, 15 bp, Homo sapiens
tattactatcttcat

SEQ ID NO: 377122 - DNA, 15 bp, Homo sapiens
ctattactatcttca

SEQ ID NO: 377123 - DNA, 15 bp, Homo sapiens
actattactatcttc

SEQ ID NO: 377124 - DNA, 15 bp, Homo sapiens
tactattactatctt

SEQ ID NO: 377125 - DNA, 15 bp, Homo sapiens
gtactattactatct

SEQ ID NO: 377126 - DNA, 15 bp, Homo sapiens
ggtactattactatc

SEQ ID NO: 377127 - DNA, 15 bp, Homo sapiens
aggtactattactat

SEQ ID NO: 377128 - DNA, 15 bp, Homo sapiens
taggtactattacta

SEQ ID NO: 377129 - DNA, 15 bp, Homo sapiens
ataggtactattact

SEQ ID NO: 377130 - DNA, 15 bp, Homo sapiens
cataggtactattac

SEQ ID NO: 377131 - DNA, 15 bp, Homo sapiens
acataggtactatta

SEQ ID NO: 377132 - DNA, 15 bp, Homo sapiens
gacataggtactatt

SEQ ID NO: 377133 - DNA, 15 bp, Homo sapiens
tgacataggtactat

SEQ ID NO: 377134 - DNA, 15 bp, Homo sapiens
gtgacataggtacta

SEQ ID NO: 377135 - DNA, 15 bp, Homo sapiens
tgtgacataggtact

SEQ ID NO: 377136 - DNA, 15 bp, Homo sapiens
ctgtgacataggtac

SEQ ID NO: 377137 - DNA, 15 bp, Homo sapiens
cctgtgacataggta

SEQ ID NO: 377138 - DNA, 15 bp, Homo sapiens
ccctgtgacataggt

SEQ ID NO: 377139 - DNA, 15 bp, Homo sapiens
accctgtgacatagg

SEQ ID NO: 377140 - DNA, 15 bp, Homo sapiens
aaccctgtgacatag

SEQ ID NO: 377141 - DNA, 15 bp, Homo sapiens
caaccctgtgacata

SEQ ID NO: 377142 - DNA, 15 bp, Homo sapiens
gcaaccctgtgacat

SEQ ID NO: 377143 - DNA, 15 bp, Homo sapiens
tgcaaccctgtgaca

SEQ ID NO: 377144 - DNA, 15 bp, Homo sapiens
ctgcaaccctgtgac

SEQ ID NO: 377145 - DNA, 15 bp, Homo sapiens
tctgcaaccctgtga

SEQ ID NO: 377146 - DNA, 15 bp, Homo sapiens
ctctgcaaccctgtg

SEQ ID NO: 377147 - DNA, 15 bp, Homo sapiens
tctctgcaaccctgt

SEQ ID NO: 377148 - DNA, 15 bp, Homo sapiens
atctctgcaaccctg

SEQ ID NO: 377149 - DNA, 15 bp, Homo sapiens
catctctgcaaccct

SEQ ID NO: 377150 - DNA, 15 bp, Homo sapiens
tcatctctgcaaccc

SEQ ID NO: 377151 - DNA, 15 bp, Homo sapiens
ctcatctctgcaacc

SEQ ID NO: 377152 - DNA, 15 bp, Homo sapiens
actcatctctgcaac

SEQ ID NO: 377153 - DNA, 15 bp, Homo sapiens
tactcatctctgcaa

SEQ ID NO: 377154 - DNA, 15 bp, Homo sapiens
ttactcatctctgca

SEQ ID NO: 377155 - DNA, 15 bp, Homo sapiens
tttactcatctctgc

SEQ ID NO: 377156 - DNA, 15 bp, Homo sapiens
atttactcatctctg

SEQ ID NO: 377157 - DNA, 15 bp, Homo sapiens
catttactcatctct

SEQ ID NO: 377158 - DNA, 15 bp, Homo sapiens
ccatttactcatctc

SEQ ID NO: 377159 - DNA, 15 bp, Homo sapiens
cccatttactcatct

SEQ ID NO: 377160 - DNA, 15 bp, Homo sapiens
acccatttactcatc

SEQ ID NO: 377161 - DNA, 15 bp, Homo sapiens
tacccatttactcat

SEQ ID NO: 377162 - DNA, 15 bp, Homo sapiens
ttacccatttactca

SEQ ID NO: 377163 - DNA, 15 bp, Homo sapiens
tttacccatttactc

SEQ ID NO: 377164 - DNA, 15 bp, Homo sapiens
ctttacccatttact

SEQ ID NO: 377165 - DNA, 15 bp, Homo sapiens
cctttacccatttac

SEQ ID NO: 377166 - DNA, 15 bp, Homo sapiens
acctttacccattta

SEQ ID NO: 377167 - DNA, 15 bp, Homo sapiens
aacctttacccattt

SEQ ID NO: 377168 - DNA, 15 bp, Homo sapiens
caacctttacccatt

SEQ ID NO: 377169 - DNA, 15 bp, Homo sapiens
acaacctttacccat

SEQ ID NO: 377170 - DNA, 15 bp, Homo sapiens
tacaacctttaccca

SEQ ID NO: 377171 - DNA, 15 bp, Homo sapiens
ttacaacctttaccc

SEQ ID NO: 377172 - DNA, 15 bp, Homo sapiens
tttacaacctttacc

SEQ ID NO: 377173 - DNA, 15 bp, Homo sapiens
ctttacaacctttac

SEQ ID NO: 377174 - DNA, 15 bp, Homo sapiens
gctttacaaccttta

SEQ ID NO: 377175 - DNA, 15 bp, Homo sapiens
cgctttacaaccttt

SEQ ID NO: 377176 - DNA, 15 bp, Homo sapiens
tcgctttacaacctt

SEQ ID NO: 377177 - DNA, 15 bp, Homo sapiens
atcgctttacaacct

SEQ ID NO: 377178 - DNA, 15 bp, Homo sapiens
aatcgctttacaacc

SEQ ID NO: 377179 - DNA, 15 bp, Homo sapiens
taatcgctttacaac

SEQ ID NO: 377180 - DNA, 15 bp, Homo sapiens
ctaatcgctttacaa

SEQ ID NO: 377181 - DNA, 15 bp, Homo sapiens
tctaatcgctttaca

SEQ ID NO: 377182 - DNA, 15 bp, Homo sapiens
ctctaatcgctttac

SEQ ID NO: 377183 - DNA, 15 bp, Homo sapiens
gctctaatcgcttta

SEQ ID NO: 377184 - DNA, 15 bp, Homo sapiens
cgctctaatcgcttt

SEQ ID NO: 377185 - DNA, 15 bp, Homo sapiens
ccgctctaatcgctt

SEQ ID NO: 377186 - DNA, 15 bp, Homo sapiens
accgctctaatcgct

SEQ ID NO: 377187 - DNA, 15 bp, Homo sapiens
caccgctctaatcgc

SEQ ID NO: 377188 - DNA, 15 bp, Homo sapiens
gcaccgctctaatcg

SEQ ID NO: 377189 - DNA, 15 bp, Homo sapiens
agcaccgctctaatc

SEQ ID NO: 377190 - DNA, 15 bp, Homo sapiens
aagcaccgctctaat

SEQ ID NO: 377191 - DNA, 15 bp, Homo sapiens
taagcaccgctctaa

SEQ ID NO: 377192 - DNA, 15 bp, Homo sapiens
ctaagcaccgctcta

SEQ ID NO: 377193 - DNA, 15 bp, Homo sapiens
gctaagcaccgctct

SEQ ID NO: 377194 - DNA, 15 bp, Homo sapiens
tgctaagcaccgctc

SEQ ID NO: 377195 - DNA, 15 bp, Homo sapiens
gtgctaagcaccgct

SEQ ID NO: 377196 - DNA, 15 bp, Homo sapiens
agtgctaagcaccgc

SEQ ID NO: 377197 - DNA, 15 bp, Homo sapiens
aagtgctaagcaccg

SEQ ID NO: 377198 - DNA, 15 bp, Homo sapiens
caagtgctaagcacc

SEQ ID NO: 377199 - DNA, 15 bp, Homo sapiens
tcaagtgctaagcac

SEQ ID NO: 377200 - DNA, 15 bp, Homo sapiens
gtcaagtgctaagca

SEQ ID NO: 377201 - DNA, 15 bp, Homo sapiens
tgtcaagtgctaagc

SEQ ID NO: 377202 - DNA, 15 bp, Homo sapiens
ttgtcaagtgctaag

SEQ ID NO: 377203 - DNA, 15 bp, Homo sapiens
cttgtcaagtgctaa

SEQ ID NO: 377204 - DNA, 15 bp, Homo sapiens
gcttgtcaagtgcta

SEQ ID NO: 377205 - DNA, 15 bp, Homo sapiens
agcttgtcaagtgct

SEQ ID NO: 377206 - DNA, 15 bp, Homo sapiens
gagcttgtcaagtgc

SEQ ID NO: 377207 - DNA, 15 bp, Homo sapiens
agagcttgtcaagtg

SEQ ID NO: 377208 - DNA, 15 bp, Homo sapiens
cagagcttgtcaagt

SEQ ID NO: 377209 - DNA, 15 bp, Homo sapiens
acagagcttgtcaag

SEQ ID NO: 377210 - DNA, 15 bp, Homo sapiens
tacagagcttgtcaa

SEQ ID NO: 377211 - DNA, 15 bp, Homo sapiens
atacagagcttgtca

SEQ ID NO: 377212 - DNA, 15 bp, Homo sapiens
catacagagcttgtc

SEQ ID NO: 377213 - DNA, 15 bp, Homo sapiens
acatacagagcttgt

SEQ ID NO: 377214 - DNA, 15 bp, Homo sapiens
tacatacagagcttg

SEQ ID NO: 377215 - DNA, 15 bp, Homo sapiens
atacatacagagctt

SEQ ID NO: 377216 - DNA, 15 bp, Homo sapiens
aatacatacagagct

SEQ ID NO: 377217 - DNA, 15 bp, Homo sapiens
aaatacatacagagc

SEQ ID NO: 377218 - DNA, 15 bp, Homo sapiens
taaatacatacagag

SEQ ID NO: 377219 - DNA, 15 bp, Homo sapiens
ataaatacatacaga

SEQ ID NO: 377220 - DNA, 15 bp, Homo sapiens
aataaatacatacag

SEQ ID NO: 377221 - DNA, 15 bp, Homo sapiens
caataaatacataca

SEQ ID NO: 377222 - DNA, 15 bp, Homo sapiens
acaataaatacatac

SEQ ID NO: 377223 - DNA, 15 bp, Homo sapiens
aacaataaatacata

SEQ ID NO: 377224 - DNA, 15 bp, Homo sapiens
caacaataaatacat

SEQ ID NO: 377225 - DNA, 15 bp, Homo sapiens
gcaacaataaataca

SEQ ID NO: 377226 - DNA, 15 bp, Homo sapiens
agcaacaataaatac

SEQ ID NO: 377227 - DNA, 15 bp, Homo sapiens
tagcaacaataaata

SEQ ID NO: 377228 - DNA, 15 bp, Homo sapiens
ctagcaacaataaat

SEQ ID NO: 377229 - DNA, 15 bp, Homo sapiens
actagcaacaataaa

SEQ ID NO: 377230 - DNA, 15 bp, Homo sapiens
cactagcaacaataa

SEQ ID NO: 377231 - DNA, 15 bp, Homo sapiens
acactagcaacaata

SEQ ID NO: 377232 - DNA, 15 bp, Homo sapiens
aacactagcaacaat

SEQ ID NO: 377233 - DNA, 15 bp, Homo sapiens
aaacactagcaacaa

SEQ ID NO: 377234 - DNA, 15 bp, Homo sapiens
gctctgggacaaaag

SEQ ID NO: 377235 - DNA, 15 bp, Homo sapiens
ggctctgggacaaaa

SEQ ID NO: 377236 - DNA, 15 bp, Homo sapiens
tggctctgggacaaa

SEQ ID NO: 377237 - DNA, 15 bp, Homo sapiens
ctggctctgggacaa

SEQ ID NO: 377238 - DNA, 15 bp, Homo sapiens
actggctctgggaca

SEQ ID NO: 377239 - DNA, 15 bp, Homo sapiens
aactggctctgggac

SEQ ID NO: 377240 - DNA, 15 bp, Homo sapiens
gaactggctctggga

SEQ ID NO: 377241 - DNA, 15 bp, Homo sapiens
ggaactggctctggg

SEQ ID NO: 377242 - DNA, 15 bp, Homo sapiens
gggaactggctctgg

SEQ ID NO: 377243 - DNA, 15 bp, Homo sapiens
agggaactggctctg

SEQ ID NO: 377244 - DNA, 15 bp, Homo sapiens
gagggaactggctct

SEQ ID NO: 377245 - DNA, 15 bp, Homo sapiens
agagggaactggctc

SEQ ID NO: 377246 - DNA, 15 bp, Homo sapiens
cagagggaactggct

SEQ ID NO: 377247 - DNA, 15 bp, Homo sapiens
ccagagggaactggc

SEQ ID NO: 377248 - DNA, 15 bp, Homo sapiens
cccagagggaactgg

SEQ ID NO: 377249 - DNA, 15 bp, Homo sapiens
tcccagagggaactg

SEQ ID NO: 377250 - DNA, 15 bp, Homo sapiens
ctcccagagggaact

SEQ ID NO: 377251 - DNA, 15 bp, Homo sapiens
actcccagagggaac

SEQ ID NO: 377252 - DNA, 15 bp, Homo sapiens
aactcccagagggaa

SEQ ID NO: 377253 - DNA, 15 bp, Homo sapiens
gaactcccagaggga

SEQ ID NO: 377254 - DNA, 15 bp, Homo sapiens
agaactcccagaggg

SEQ ID NO: 377255 - DNA, 15 bp, Homo sapiens
aagaactcccagagg

SEQ ID NO: 377256 - DNA, 15 bp, Homo sapiens
taagaactcccagag

SEQ ID NO: 377257 - DNA, 15 bp, Homo sapiens
ataagaactcccaga

SEQ ID NO: 377258 - DNA, 15 bp, Homo sapiens
cataagaactcccag

SEQ ID NO: 377259 - DNA, 15 bp, Homo sapiens
tcataagaactccca

SEQ ID NO: 377260 - DNA, 15 bp, Homo sapiens
ttcataagaactccc

SEQ ID NO: 377261 - DNA, 15 bp, Homo sapiens
gttcataagaactcc

SEQ ID NO: 377262 - DNA, 15 bp, Homo sapiens
tgttcataagaactc

SEQ ID NO: 377263 - DNA, 15 bp, Homo sapiens
atgttcataagaact

SEQ ID NO: 377264 - DNA, 15 bp, Homo sapiens
aatgttcataagaac

SEQ ID NO: 377265 - DNA, 15 bp, Homo sapiens
aaatgttcataagaa

SEQ ID NO: 377266 - DNA, 15 bp, Homo sapiens
gaaatgttcataaga

SEQ ID NO: 377267 - DNA, 15 bp, Homo sapiens
agaaatgttcataag

SEQ ID NO: 377268 - DNA, 15 bp, Homo sapiens
gagaaatgttcataa

SEQ ID NO: 377269 - DNA, 15 bp, Homo sapiens
tgagaaatgttcata

SEQ ID NO: 377270 - DNA, 15 bp, Homo sapiens
gtgagaaatgttcat

SEQ ID NO: 377271 - DNA, 15 bp, Homo sapiens
ggtgagaaatgttca

SEQ ID NO: 377272 - DNA, 15 bp, Homo sapiens
aggtgagaaatgttc

SEQ ID NO: 377273 - DNA, 15 bp, Homo sapiens
aaggtgagaaatgtt

SEQ ID NO: 377274 - DNA, 15 bp, Homo sapiens
taaggtgagaaatgt

SEQ ID NO: 377275 - DNA, 15 bp, Homo sapiens
ttaaggtgagaaatg

SEQ ID NO: 377276 - DNA, 15 bp, Homo sapiens
attaaggtgagaaat

SEQ ID NO: 377277 - DNA, 15 bp, Homo sapiens
tattaaggtgagaaa

SEQ ID NO: 377278 - DNA, 15 bp, Homo sapiens
atattaaggtgagaa

SEQ ID NO: 377279 - DNA, 15 bp, Homo sapiens
catattaaggtgaga

SEQ ID NO: 377280 - DNA, 15 bp, Homo sapiens
ccatattaaggtgag

SEQ ID NO: 377281 - DNA, 15 bp, Homo sapiens
tccatattaaggtga

SEQ ID NO: 377282 - DNA, 15 bp, Homo sapiens
ctccatattaaggtg

SEQ ID NO: 377283 - DNA, 15 bp, Homo sapiens
cctccatattaaggt

SEQ ID NO: 377284 - DNA, 15 bp, Homo sapiens
tcctccatattaagg

SEQ ID NO: 377285 - DNA, 15 bp, Homo sapiens
ctcctccatattaag

SEQ ID NO: 377286 - DNA, 15 bp, Homo sapiens
tctcctccatattaa

SEQ ID NO: 377287 - DNA, 15 bp, Homo sapiens
ctctcctccatatta

SEQ ID NO: 377288 - DNA, 15 bp, Homo sapiens
tctctcctccatatt

SEQ ID NO: 377289 - DNA, 15 bp, Homo sapiens
ttctctcctccatat

SEQ ID NO: 377290 - DNA, 15 bp, Homo sapiens
attctctcctccata

SEQ ID NO: 377291 - DNA, 15 bp, Homo sapiens
tattctctcctccat

SEQ ID NO: 377292 - DNA, 15 bp, Homo sapiens
ctattctctcctcca

SEQ ID NO: 377293 - DNA, 15 bp, Homo sapiens
actattctctcctcc

SEQ ID NO: 377294 - DNA, 15 bp, Homo sapiens
tactattctctcctc

SEQ ID NO: 377295 - DNA, 15 bp, Homo sapiens
atactattctctcct

SEQ ID NO: 377296 - DNA, 15 bp, Homo sapiens
aatactattctctcc

SEQ ID NO: 377297 - DNA, 15 bp, Homo sapiens
gaatactattctctc

SEQ ID NO: 377298 - DNA, 15 bp, Homo sapiens
ggaatactattctct

SEQ ID NO: 377299 - DNA, 15 bp, Homo sapiens
tggaatactattctc

SEQ ID NO: 377300 - DNA, 15 bp, Homo sapiens
ttggaatactattct

SEQ ID NO: 377301 - DNA, 15 bp, Homo sapiens
attggaatactattc

SEQ ID NO: 377302 - DNA, 15 bp, Homo sapiens
gattggaatactatt

SEQ ID NO: 377303 - DNA, 15 bp, Homo sapiens
tgattggaatactat

SEQ ID NO: 377304 - DNA, 15 bp, Homo sapiens
atgattggaatacta

SEQ ID NO: 377305 - DNA, 15 bp, Homo sapiens
catgattggaatact

SEQ ID NO: 377306 - DNA, 15 bp, Homo sapiens
ccatgattggaatac

SEQ ID NO: 377307 - DNA, 15 bp, Homo sapiens
tccatgattggaata

SEQ ID NO: 377308 - DNA, 15 bp, Homo sapiens
atccatgattggaat

SEQ ID NO: 377309 - DNA, 15 bp, Homo sapiens
catccatgattggaa

SEQ ID NO: 377310 - DNA, 15 bp, Homo sapiens
acatccatgattgga

SEQ ID NO: 377311 - DNA, 15 bp, Homo sapiens
tacatccatgattgg

SEQ ID NO: 377312 - DNA, 15 bp, Homo sapiens
atacatccatgattg

SEQ ID NO: 377313 - DNA, 15 bp, Homo sapiens
gatacatccatgatt

SEQ ID NO: 377314 - DNA, 15 bp, Homo sapiens
tgatacatccatgat

SEQ ID NO: 377315 - DNA, 15 bp, Homo sapiens
ttgatacatccatga

SEQ ID NO: 377316 - DNA, 15 bp, Homo sapiens
tttgatacatccatg

SEQ ID NO: 377317 - DNA, 15 bp, Homo sapiens
gaatttgatacatcc

SEQ ID NO: 377318 - DNA, 15 bp, Homo sapiens
agaatttgatacatc

SEQ ID NO: 377319 - DNA, 15 bp, Homo sapiens
tagaatttgatacat

SEQ ID NO: 377320 - DNA, 15 bp, Homo sapiens
ctagaatttgataca

SEQ ID NO: 377321 - DNA, 15 bp, Homo sapiens
actagaatttgatac

SEQ ID NO: 377322 - DNA, 15 bp, Homo sapiens
gactagaatttgata

SEQ ID NO: 377323 - DNA, 15 bp, Homo sapiens
tgactagaatttgat

SEQ ID NO: 377324 - DNA, 15 bp, Homo sapiens
atgactagaatttga

SEQ ID NO: 377325 - DNA, 15 bp, Homo sapiens
aatgactagaatttg

SEQ ID NO: 377326 - DNA, 15 bp, Homo sapiens
aaatgactagaattt

SEQ ID NO: 377327 - DNA, 15 bp, Homo sapiens
taaatgactagaatt

SEQ ID NO: 377328 - DNA, 15 bp, Homo sapiens
ctaaatgactagaat

SEQ ID NO: 377329 - DNA, 15 bp, Homo sapiens
actaaatgactagaa

SEQ ID NO: 377330 - DNA, 15 bp, Homo sapiens
aactaaatgactaga

SEQ ID NO: 377331 - DNA, 15 bp, Homo sapiens
aaactaaatgactag

SEQ ID NO: 377332 - DNA, 15 bp, Homo sapiens
taaactaaatgacta

SEQ ID NO: 377333 - DNA, 15 bp, Homo sapiens
ttaaactaaatgact

SEQ ID NO: 377334 - DNA, 15 bp, Homo sapiens
cttaaactaaatgac

SEQ ID NO: 377335 - DNA, 15 bp, Homo sapiens
acttaaactaaatga

SEQ ID NO: 377336 - DNA, 15 bp, Homo sapiens
cacttaaactaaatg

SEQ ID NO: 377337 - DNA, 15 bp, Homo sapiens
tcacttaaactaaat

SEQ ID NO: 377338 - DNA, 15 bp, Homo sapiens
ttcacttaaactaaa

SEQ ID NO: 377339 - DNA, 15 bp, Homo sapiens
tttcacttaaactaa

SEQ ID NO: 377340 - DNA, 15 bp, Homo sapiens
ttttcacttaaacta

SEQ ID NO: 377341 - DNA, 15 bp, Homo sapiens
cttttcacttaaact

SEQ ID NO: 377342 - DNA, 15 bp, Homo sapiens
tcttttcacttaaac

SEQ ID NO: 377343 - DNA, 15 bp, Homo sapiens
ctcttttcacttaaa

SEQ ID NO: 377344 - DNA, 15 bp, Homo sapiens
cctcttttcacttaa

SEQ ID NO: 377345 - DNA, 15 bp, Homo sapiens
acctcttttcactta

SEQ ID NO: 377346 - DNA, 15 bp, Homo sapiens
aacctcttttcactt

SEQ ID NO: 377347 - DNA, 15 bp, Homo sapiens
aaacctcttttcact

SEQ ID NO: 377348 - DNA, 15 bp, Homo sapiens
caaacctcttttcac

SEQ ID NO: 377349 - DNA, 15 bp, Homo sapiens
tcaaacctcttttca

SEQ ID NO: 377350 - DNA, 15 bp, Homo sapiens
atcaaacctcttttc

SEQ ID NO: 377351 - DNA, 15 bp, Homo sapiens
aatcaaacctctttt

SEQ ID NO: 377352 - DNA, 15 bp, Homo sapiens
caatcaaacctcttt

SEQ ID NO: 377353 - DNA, 15 bp, Homo sapiens
gcaatcaaacctctt

SEQ ID NO: 377354 - DNA, 15 bp, Homo sapiens
tgcaatcaaacctct

SEQ ID NO: 377355 - DNA, 15 bp, Homo sapiens
atgcaatcaaacctc

SEQ ID NO: 377356 - DNA, 15 bp, Homo sapiens
tatgcaatcaaacct

SEQ ID NO: 377357 - DNA, 15 bp, Homo sapiens
atatgcaatcaaacc

SEQ ID NO: 377358 - DNA, 15 bp, Homo sapiens
aatatgcaatcaaac

SEQ ID NO: 377359 - DNA, 15 bp, Homo sapiens
taatatgcaatcaaa

SEQ ID NO: 377360 - DNA, 15 bp, Homo sapiens
ttaatatgcaatcaa

SEQ ID NO: 377361 - DNA, 15 bp, Homo sapiens
tttaatatgcaatca

SEQ ID NO: 377362 - DNA, 15 bp, Homo sapiens
atttaatatgcaatc

SEQ ID NO: 377363 - DNA, 15 bp, Homo sapiens
aatttaatatgcaat

SEQ ID NO: 377364 - DNA, 15 bp, Homo sapiens
caatttaatatgcaa

SEQ ID NO: 377365 - DNA, 15 bp, Homo sapiens
acaatttaatatgca

SEQ ID NO: 377366 - DNA, 15 bp, Homo sapiens
aacaatttaatatgc

SEQ ID NO: 377367 - DNA, 15 bp, Homo sapiens
taacaatttaatatg

SEQ ID NO: 377368 - DNA, 15 bp, Homo sapiens
ataacaatttaatat

SEQ ID NO: 377369 - DNA, 15 bp, Homo sapiens
aataacaatttaata

SEQ ID NO: 377370 - DNA, 15 bp, Homo sapiens
gaataacaatttaat

SEQ ID NO: 377371 - DNA, 15 bp, Homo sapiens
agaataacaatttaa

SEQ ID NO: 377372 - DNA, 15 bp, Homo sapiens
cagaataacaattta

SEQ ID NO: 377373 - DNA, 15 bp, Homo sapiens
acagaataacaattt

SEQ ID NO: 377374 - DNA, 15 bp, Homo sapiens
gacagaataacaatt

SEQ ID NO: 377375 - DNA, 15 bp, Homo sapiens
agacagaataacaat

SEQ ID NO: 377376 - DNA, 15 bp, Homo sapiens
gagacagaataacaa

SEQ ID NO: 377377 - DNA, 15 bp, Homo sapiens
ggagacagaataaca

SEQ ID NO: 377378 - DNA, 15 bp, Homo sapiens
aggagacagaataac

SEQ ID NO: 377379 - DNA, 15 bp, Homo sapiens
aaggagacagaataa

SEQ ID NO: 377380 - DNA, 15 bp, Homo sapiens
taaggagacagaata

SEQ ID NO: 377381 - DNA, 15 bp, Homo sapiens
ataaggagacagaat

SEQ ID NO: 377382 - DNA, 15 bp, Homo sapiens
cataaggagacagaa

SEQ ID NO: 377383 - DNA, 15 bp, Homo sapiens
acataaggagacaga

SEQ ID NO: 377384 - DNA, 15 bp, Homo sapiens
aacataaggagacag

SEQ ID NO: 377385 - DNA, 15 bp, Homo sapiens
caacataaggagaca

SEQ ID NO: 377386 - DNA, 15 bp, Homo sapiens
gcaacataaggagac

SEQ ID NO: 377387 - DNA, 15 bp, Homo sapiens
ggcaacataaggaga

SEQ ID NO: 377388 - DNA, 15 bp, Homo sapiens
tggcaacataaggag

SEQ ID NO: 377389 - DNA, 15 bp, Homo sapiens
atggcaacataagga

SEQ ID NO: 377390 - DNA, 15 bp, Homo sapiens
tatggcaacataagg

SEQ ID NO: 377391 - DNA, 15 bp, Homo sapiens
atatggcaacataag

SEQ ID NO: 377392 - DNA, 15 bp, Homo sapiens
catatggcaacataa

SEQ ID NO: 377393 - DNA, 15 bp, Homo sapiens
tcatatggcaacata

SEQ ID NO: 377394 - DNA, 15 bp, Homo sapiens
ttcatatggcaacat

SEQ ID NO: 377395 - DNA, 15 bp, Homo sapiens
attcatatggcaaca

SEQ ID NO: 377396 - DNA, 15 bp, Homo sapiens
tattcatatggcaac

SEQ ID NO: 377397 - DNA, 15 bp, Homo sapiens
ctattcatatggcaa

SEQ ID NO: 377398 - DNA, 15 bp, Homo sapiens
gctattcatatggca

SEQ ID NO: 377399 - DNA, 15 bp, Homo sapiens
agctattcatatggc

SEQ ID NO: 377400 - DNA, 15 bp, Homo sapiens
tagctattcatatgg

SEQ ID NO: 377401 - DNA, 15 bp, Homo sapiens
atagctattcatatg

SEQ ID NO: 377402 - DNA, 15 bp, Homo sapiens
aatagctattcatat

SEQ ID NO: 377403 - DNA, 15 bp, Homo sapiens
aaatagctattcata

SEQ ID NO: 377404 - DNA, 15 bp, Homo sapiens
aaaatagctattcat

SEQ ID NO: 377405 - DNA, 15 bp, Homo sapiens
aaaaatagctattca

SEQ ID NO: 377406 - DNA, 15 bp, Homo sapiens
aaaaaatagctattc

SEQ ID NO: 377407 - DNA, 15 bp, Homo sapiens
aaaaaaatagctatt

SEQ ID NO: 377408 - DNA, 15 bp, Homo sapiens
aaaaaaaatagctat

SEQ ID NO: 377409 - DNA, 15 bp, Homo sapiens
gaaaaaaaatagcta

SEQ ID NO: 377410 - DNA, 15 bp, Homo sapiens
agaaaaaaaatagct

SEQ ID NO: 377411 - DNA, 15 bp, Homo sapiens
gaaagaaaaaaaata

SEQ ID NO: 377412 - DNA, 15 bp, Homo sapiens
tgaaagaaaaaaaat

SEQ ID NO: 377413 - DNA, 15 bp, Homo sapiens
gtgaaagaaaaaaaa

SEQ ID NO: 377414 - DNA, 15 bp, Homo sapiens
agtgaaagaaaaaaa

SEQ ID NO: 377415 - DNA, 15 bp, Homo sapiens
aagtgaaagaaaaaa

SEQ ID NO: 377416 - DNA, 15 bp, Homo sapiens
aaagtgaaagaaaaa

SEQ ID NO: 377417 - DNA, 15 bp, Homo sapiens
aaaagtgaaagaaaa

SEQ ID NO: 377418 - DNA, 15 bp, Homo sapiens
caaaagtgaaagaaa

SEQ ID NO: 377419 - DNA, 15 bp, Homo sapiens
tcaaaagtgaaagaa

SEQ ID NO: 377420 - DNA, 15 bp, Homo sapiens
gtcaaaagtgaaaga

SEQ ID NO: 377421 - DNA, 15 bp, Homo sapiens
tgtcaaaagtgaaag

SEQ ID NO: 377422 - DNA, 15 bp, Homo sapiens
atgtcaaaagtgaaa

SEQ ID NO: 377423 - DNA, 15 bp, Homo sapiens
aatgtcaaaagtgaa

SEQ ID NO: 377424 - DNA, 15 bp, Homo sapiens
aaatgtcaaaagtga

SEQ ID NO: 377425 - DNA, 15 bp, Homo sapiens
caaatgtcaaaagtg

SEQ ID NO: 377426 - DNA, 15 bp, Homo sapiens
ccaaatgtcaaaagt

SEQ ID NO: 377427 - DNA, 15 bp, Homo sapiens
cccaaatgtcaaaag

SEQ ID NO: 377428 - DNA, 15 bp, Homo sapiens
tcccaaatgtcaaaa

SEQ ID NO: 377429 - DNA, 15 bp, Homo sapiens
atcccaaatgtcaaa

SEQ ID NO: 377430 - DNA, 15 bp, Homo sapiens
catcccaaatgtcaa

SEQ ID NO: 377431 - DNA, 15 bp, Homo sapiens
tcatcccaaatgtca

SEQ ID NO: 377432 - DNA, 15 bp, Homo sapiens
ttcatcccaaatgtc

SEQ ID NO: 377433 - DNA, 15 bp, Homo sapiens
tttcatcccaaatgt

SEQ ID NO: 377434 - DNA, 15 bp, Homo sapiens
ttttcatcccaaatg

SEQ ID NO: 377435 - DNA, 15 bp, Homo sapiens
cttttcatcccaaat

SEQ ID NO: 377436 - DNA, 15 bp, Homo sapiens
gcttttcatcccaaa

SEQ ID NO: 377437 - DNA, 15 bp, Homo sapiens
ggcttttcatcccaa

SEQ ID NO: 377438 - DNA, 15 bp, Homo sapiens
tggcttttcatccca

SEQ ID NO: 377439 - DNA, 15 bp, Homo sapiens
atggcttttcatccc

SEQ ID NO: 377440 - DNA, 15 bp, Homo sapiens
tatggcttttcatcc

SEQ ID NO: 377441 - DNA, 15 bp, Homo sapiens
atatggcttttcatc

SEQ ID NO: 377442 - DNA, 15 bp, Homo sapiens
catatggcttttcat

SEQ ID NO: 377443 - DNA, 15 bp, Homo sapiens
acatatggcttttca

SEQ ID NO: 377444 - DNA, 15 bp, Homo sapiens
tacatatggcttttc

SEQ ID NO: 377445 - DNA, 15 bp, Homo sapiens
atacatatggctttt

SEQ ID NO: 377446 - DNA, 15 bp, Homo sapiens
gatacatatggcttt

SEQ ID NO: 377447 - DNA, 15 bp, Homo sapiens
tgatacatatggctt

SEQ ID NO: 377448 - DNA, 15 bp, Homo sapiens
atgatacatatggct

SEQ ID NO: 377449 - DNA, 15 bp, Homo sapiens
tatgatacatatggc

SEQ ID NO: 377450 - DNA, 15 bp, Homo sapiens
ttatgatacatatgg

SEQ ID NO: 377451 - DNA, 15 bp, Homo sapiens
tttatgatacatatg

SEQ ID NO: 377452 - DNA, 15 bp, Homo sapiens
atttatgatacatat

SEQ ID NO: 377453 - DNA, 15 bp, Homo sapiens
tatttatgatacata

SEQ ID NO: 377454 - DNA, 15 bp, Homo sapiens
atatttatgatacat

SEQ ID NO: 377455 - DNA, 15 bp, Homo sapiens
gatatttatgataca

SEQ ID NO: 377456 - DNA, 15 bp, Homo sapiens
tgatatttatgatac

SEQ ID NO: 377457 - DNA, 15 bp, Homo sapiens
ctgatatttatgata

SEQ ID NO: 377458 - DNA, 15 bp, Homo sapiens
tctgatatttatgat

SEQ ID NO: 377459 - DNA, 15 bp, Homo sapiens
atctgatatttatga

SEQ ID NO: 377460 - DNA, 15 bp, Homo sapiens
catctgatatttatg

SEQ ID NO: 377461 - DNA, 15 bp, Homo sapiens
acatctgatatttat

SEQ ID NO: 377462 - DNA, 15 bp, Homo sapiens
tacatctgatattta

SEQ ID NO: 377463 - DNA, 15 bp, Homo sapiens
ttacatctgatattt

SEQ ID NO: 377464 - DNA, 15 bp, Homo sapiens
cttacatctgatatt

SEQ ID NO: 377465 - DNA, 15 bp, Homo sapiens
acttacatctgatat

SEQ ID NO: 377466 - DNA, 15 bp, Homo sapiens
gacttacatctgata

SEQ ID NO: 377467 - DNA, 15 bp, Homo sapiens
tgacttacatctgat

SEQ ID NO: 377468 - DNA, 15 bp, Homo sapiens
atgacttacatctga

SEQ ID NO: 377469 - DNA, 15 bp, Homo sapiens
aatgacttacatctg

SEQ ID NO: 377470 - DNA, 15 bp, Homo sapiens
taatgacttacatct

SEQ ID NO: 377471 - DNA, 15 bp, Homo sapiens
ttaatgacttacatc

SEQ ID NO: 377472 - DNA, 15 bp, Homo sapiens
tttaatgacttacat

SEQ ID NO: 377473 - DNA, 15 bp, Homo sapiens
ttttaatgacttaca

SEQ ID NO: 377474 - DNA, 15 bp, Homo sapiens
tttttaatgacttac

SEQ ID NO: 377475 - DNA, 15 bp, Homo sapiens
gtttttaatgactta

SEQ ID NO: 377476 - DNA, 15 bp, Homo sapiens
agtttttaatgactt

SEQ ID NO: 377477 - DNA, 15 bp, Homo sapiens
cagtttttaatgact

SEQ ID NO: 377478 - DNA, 15 bp, Homo sapiens
gcagtttttaatgac

SEQ ID NO: 377479 - DNA, 15 bp, Homo sapiens
ggcagtttttaatga

SEQ ID NO: 377480 - DNA, 15 bp, Homo sapiens
aggcagtttttaatg

SEQ ID NO: 377481 - DNA, 15 bp, Homo sapiens
aaggcagtttttaat

SEQ ID NO: 377482 - DNA, 15 bp, Homo sapiens
gaaggcagtttttaa

SEQ ID NO: 377483 - DNA, 15 bp, Homo sapiens
ggaaggcagttttta

SEQ ID NO: 377484 - DNA, 15 bp, Homo sapiens
aggaaggcagttttt

SEQ ID NO: 377485 - DNA, 15 bp, Homo sapiens
caggaaggcagtttt

SEQ ID NO: 377486 - DNA, 15 bp, Homo sapiens
ccaggaaggcagttt

SEQ ID NO: 377487 - DNA, 15 bp, Homo sapiens
cccaggaaggcagtt

SEQ ID NO: 377488 - DNA, 15 bp, Homo sapiens
tcccaggaaggcagt

SEQ ID NO: 377489 - DNA, 15 bp, Homo sapiens
gtcccaggaaggcag

SEQ ID NO: 377490 - DNA, 15 bp, Homo sapiens
agtcccaggaaggca

SEQ ID NO: 377491 - DNA, 15 bp, Homo sapiens
aagtcccaggaaggc

SEQ ID NO: 377492 - DNA, 15 bp, Homo sapiens
aaagtcccaggaagg

SEQ ID NO: 377493 - DNA, 15 bp, Homo sapiens
aaaagtcccaggaag

SEQ ID NO: 377494 - DNA, 15 bp, Homo sapiens
taaaagtcccaggaa

SEQ ID NO: 377495 - DNA, 15 bp, Homo sapiens
gtaaaagtcccagga

SEQ ID NO: 377496 - DNA, 15 bp, Homo sapiens
tgtaaaagtcccagg

SEQ ID NO: 377497 - DNA, 15 bp, Homo sapiens
atgtaaaagtcccag

SEQ ID NO: 377498 - DNA, 15 bp, Homo sapiens
gatgtaaaagtccca

SEQ ID NO: 377499 - DNA, 15 bp, Homo sapiens
agatgtaaaagtccc

SEQ ID NO: 377500 - DNA, 15 bp, Homo sapiens
aagatgtaaaagtcc

SEQ ID NO: 377501 - DNA, 15 bp, Homo sapiens
aaagatgtaaaagtc

SEQ ID NO: 377502 - DNA, 15 bp, Homo sapiens
aaaagatgtaaaagt

SEQ ID NO: 377503 - DNA, 15 bp, Homo sapiens
taaaagatgtaaaag

SEQ ID NO: 377504 - DNA, 15 bp, Homo sapiens
ttaaaagatgtaaaa

SEQ ID NO: 377505 - DNA, 15 bp, Homo sapiens
tttaaaagatgtaaa

SEQ ID NO: 377506 - DNA, 15 bp, Homo sapiens
ttttaaaagatgtaa

SEQ ID NO: 377507 - DNA, 15 bp, Homo sapiens
cttttaaaagatgta

SEQ ID NO: 377508 - DNA, 15 bp, Homo sapiens
ccttttaaaagatgt

SEQ ID NO: 377509 - DNA, 15 bp, Homo sapiens
accttttaaaagatg

SEQ ID NO: 377510 - DNA, 15 bp, Homo sapiens
caccttttaaaagat

SEQ ID NO: 377511 - DNA, 15 bp, Homo sapiens
tcaccttttaaaaga

SEQ ID NO: 377512 - DNA, 15 bp, Homo sapiens
ttcaccttttaaaag

SEQ ID NO: 377513 - DNA, 15 bp, Homo sapiens
attcaccttttaaaa

SEQ ID NO: 377514 - DNA, 15 bp, Homo sapiens
aattcaccttttaaa

SEQ ID NO: 377515 - DNA, 15 bp, Homo sapiens
taattcaccttttaa

SEQ ID NO: 377516 - DNA, 15 bp, Homo sapiens
gtaattcacctttta

SEQ ID NO: 377517 - DNA, 15 bp, Homo sapiens
agtaattcacctttt

SEQ ID NO: 377518 - DNA, 15 bp, Homo sapiens
aagtaattcaccttt

SEQ ID NO: 377519 - DNA, 15 bp, Homo sapiens
taagtaattcacctt

SEQ ID NO: 377520 - DNA, 15 bp, Homo sapiens
gtaagtaattcacct

SEQ ID NO: 377521 - DNA, 15 bp, Homo sapiens
ggtaagtaattcacc

SEQ ID NO: 377522 - DNA, 15 bp, Homo sapiens
aggtaagtaattcac

SEQ ID NO: 377523 - DNA, 15 bp, Homo sapiens
aaggtaagtaattca

SEQ ID NO: 377524 - DNA, 15 bp, Homo sapiens
taaggtaagtaattc

SEQ ID NO: 377525 - DNA, 15 bp, Homo sapiens
ataaggtaagtaatt

SEQ ID NO: 377526 - DNA, 15 bp, Homo sapiens
cataaggtaagtaat

SEQ ID NO: 377527 - DNA, 15 bp, Homo sapiens
acataaggtaagtaa

SEQ ID NO: 377528 - DNA, 15 bp, Homo sapiens
tacataaggtaagta

SEQ ID NO: 377529 - DNA, 15 bp, Homo sapiens
gtacataaggtaagt

SEQ ID NO: 377530 - DNA, 15 bp, Homo sapiens
tgtacataaggtaag

SEQ ID NO: 377531 - DNA, 15 bp, Homo sapiens
ctgtacataaggtaa

SEQ ID NO: 377532 - DNA, 15 bp, Homo sapiens
tctgtacataaggta

SEQ ID NO: 377533 - DNA, 15 bp, Homo sapiens
ttctgtacataaggt

SEQ ID NO: 377534 - DNA, 15 bp, Homo sapiens
attctgtacataagg

SEQ ID NO: 377535 - DNA, 15 bp, Homo sapiens
tattctgtacataag

SEQ ID NO: 377536 - DNA, 15 bp, Homo sapiens
ttattctgtacataa

SEQ ID NO: 377537 - DNA, 15 bp, Homo sapiens
tttattctgtacata

SEQ ID NO: 377538 - DNA, 15 bp, Homo sapiens
atttattctgtacat

SEQ ID NO: 377539 - DNA, 15 bp, Homo sapiens
tatttattctgtaca

SEQ ID NO: 377540 - DNA, 15 bp, Homo sapiens
ttatttattctgtac

SEQ ID NO: 377541 - DNA, 15 bp, Homo sapiens
attatttattctgta

SEQ ID NO: 377542 - DNA, 15 bp, Homo sapiens
cattatttattctgt

SEQ ID NO: 377543 - DNA, 15 bp, Homo sapiens
gcattatttattctg

SEQ ID NO: 377544 - DNA, 15 bp, Homo sapiens
agcattatttattct

SEQ ID NO: 377545 - DNA, 15 bp, Homo sapiens
gagcattatttattc

SEQ ID NO: 377546 - DNA, 15 bp, Homo sapiens
tgagcattatttatt

SEQ ID NO: 377547 - DNA, 15 bp, Homo sapiens
ctgagcattatttat

SEQ ID NO: 377548 - DNA, 15 bp, Homo sapiens
cctgagcattattta

SEQ ID NO: 377549 - DNA, 15 bp, Homo sapiens
tcctgagcattattt

SEQ ID NO: 377550 - DNA, 15 bp, Homo sapiens
ttcctgagcattatt

SEQ ID NO: 377551 - DNA, 15 bp, Homo sapiens
tttcctgagcattat

SEQ ID NO: 377552 - DNA, 15 bp, Homo sapiens
ctttcctgagcatta

SEQ ID NO: 377553 - DNA, 15 bp, Homo sapiens
tctttcctgagcatt

SEQ ID NO: 377554 - DNA, 15 bp, Homo sapiens
ctctttcctgagcat

SEQ ID NO: 377555 - DNA, 15 bp, Homo sapiens
gctctttcctgagca

SEQ ID NO: 377556 - DNA, 15 bp, Homo sapiens
tgctctttcctgagc

SEQ ID NO: 377557 - DNA, 15 bp, Homo sapiens
ttgctctttcctgag

SEQ ID NO: 377558 - DNA, 15 bp, Homo sapiens
cttgctctttcctga

SEQ ID NO: 377559 - DNA, 15 bp, Homo sapiens
acttgctctttcctg

SEQ ID NO: 377560 - DNA, 15 bp, Homo sapiens
tacttgctctttcct

SEQ ID NO: 377561 - DNA, 15 bp, Homo sapiens
atacttgctctttcc

SEQ ID NO: 377562 - DNA, 15 bp, Homo sapiens
aatacttgctctttc

SEQ ID NO: 377563 - DNA, 15 bp, Homo sapiens
aaatacttgctcttt

SEQ ID NO: 377564 - DNA, 15 bp, Homo sapiens
aaaatacttgctctt

SEQ ID NO: 377565 - DNA, 15 bp, Homo sapiens
aaaaatacttgctct

SEQ ID NO: 377566 - DNA, 15 bp, Homo sapiens
gaaaaatacttgctc

SEQ ID NO: 377567 - DNA, 15 bp, Homo sapiens
ggaaaaatacttgct

SEQ ID NO: 377568 - DNA, 15 bp, Homo sapiens
tggaaaaatacttgc

SEQ ID NO: 377569 - DNA, 15 bp, Homo sapiens
atggaaaaatacttg

SEQ ID NO: 377570 - DNA, 15 bp, Homo sapiens
catggaaaaatactt

SEQ ID NO: 377571 - DNA, 15 bp, Homo sapiens
gcatggaaaaatact

SEQ ID NO: 377572 - DNA, 15 bp, Homo sapiens
tgcatggaaaaatac

SEQ ID NO: 377573 - DNA, 15 bp, Homo sapiens
atgcatggaaaaata

SEQ ID NO: 377574 - DNA, 15 bp, Homo sapiens
aatgcatggaaaaat

SEQ ID NO: 377575 - DNA, 15 bp, Homo sapiens
gaatgcatggaaaaa

SEQ ID NO: 377576 - DNA, 15 bp, Homo sapiens
agaatgcatggaaaa

SEQ ID NO: 377577 - DNA, 15 bp, Homo sapiens
gagaatgcatggaaa

SEQ ID NO: 377578 - DNA, 15 bp, Homo sapiens
tgagaatgcatggaa

SEQ ID NO: 377579 - DNA, 15 bp, Homo sapiens
ctgagaatgcatgga

SEQ ID NO: 377580 - DNA, 15 bp, Homo sapiens
cctgagaatgcatgg

SEQ ID NO: 377581 - DNA, 15 bp, Homo sapiens
ccctgagaatgcatg

SEQ ID NO: 377582 - DNA, 15 bp, Homo sapiens
cccctgagaatgcat

SEQ ID NO: 377583 - DNA, 15 bp, Homo sapiens
tcccctgagaatgca

SEQ ID NO: 377584 - DNA, 15 bp, Homo sapiens
atcccctgagaatgc

SEQ ID NO: 377585 - DNA, 15 bp, Homo sapiens
gatcccctgagaatg

SEQ ID NO: 377586 - DNA, 15 bp, Homo sapiens
agatcccctgagaat

SEQ ID NO: 377587 - DNA, 15 bp, Homo sapiens
aagatcccctgagaa

SEQ ID NO: 377588 - DNA, 15 bp, Homo sapiens
aaagatcccctgaga

SEQ ID NO: 377589 - DNA, 15 bp, Homo sapiens
aaaagatcccctgag

SEQ ID NO: 377590 - DNA, 15 bp, Homo sapiens
aaaaagatcccctga

SEQ ID NO: 377591 - DNA, 15 bp, Homo sapiens
taaaaagatcccctg

SEQ ID NO: 377592 - DNA, 15 bp, Homo sapiens
gtaaaaagatcccct

SEQ ID NO: 377593 - DNA, 15 bp, Homo sapiens
agtaaaaagatcccc

SEQ ID NO: 377594 - DNA, 15 bp, Homo sapiens
gagtaaaaagatccc

SEQ ID NO: 377595 - DNA, 15 bp, Homo sapiens
ggagtaaaaagatcc

SEQ ID NO: 377596 - DNA, 15 bp, Homo sapiens
gggagtaaaaagatc

SEQ ID NO: 377597 - DNA, 15 bp, Homo sapiens
ggggagtaaaaagat

SEQ ID NO: 377598 - DNA, 15 bp, Homo sapiens
aggggagtaaaaaga

SEQ ID NO: 377599 - DNA, 15 bp, Homo sapiens
aaggggagtaaaaag

SEQ ID NO: 377600 - DNA, 15 bp, Homo sapiens
aaaggggagtaaaaa

SEQ ID NO: 377601 - DNA, 15 bp, Homo sapiens
caaaggggagtaaaa

SEQ ID NO: 377602 - DNA, 15 bp, Homo sapiens
acaaaggggagtaaa

SEQ ID NO: 377603 - DNA, 15 bp, Homo sapiens
aacaaaggggagtaa

SEQ ID NO: 377604 - DNA, 15 bp, Homo sapiens
aaacaaaggggagta

SEQ ID NO: 377605 - DNA, 15 bp, Homo sapiens
caaacaaaggggagt

SEQ ID NO: 377606 - DNA, 15 bp, Homo sapiens
tcaaacaaaggggag

SEQ ID NO: 377607 - DNA, 15 bp, Homo sapiens
atcaaacaaagggga

SEQ ID NO: 377608 - DNA, 15 bp, Homo sapiens
aatcaaacaaagggg

SEQ ID NO: 377609 - DNA, 15 bp, Homo sapiens
taatcaaacaaaggg

SEQ ID NO: 377610 - DNA, 15 bp, Homo sapiens
ctaatcaaacaaagg

SEQ ID NO: 377611 - DNA, 15 bp, Homo sapiens
actaatcaaacaaag

SEQ ID NO: 377612 - DNA, 15 bp, Homo sapiens
aactaatcaaacaaa

SEQ ID NO: 377613 - DNA, 15 bp, Homo sapiens
taactaatcaaacaa

SEQ ID NO: 377614 - DNA, 15 bp, Homo sapiens
ctaactaatcaaaca

SEQ ID NO: 377615 - DNA, 15 bp, Homo sapiens
cctaactaatcaaac

SEQ ID NO: 377616 - DNA, 15 bp, Homo sapiens
ccctaactaatcaaa

SEQ ID NO: 377617 - DNA, 15 bp, Homo sapiens
gccctaactaatcaa

SEQ ID NO: 377618 - DNA, 15 bp, Homo sapiens
ggccctaactaatca

SEQ ID NO: 377619 - DNA, 15 bp, Homo sapiens
gggccctaactaatc

SEQ ID NO: 377620 - DNA, 15 bp, Homo sapiens
ggggccctaactaat

SEQ ID NO: 377621 - DNA, 15 bp, Homo sapiens
tggggccctaactaa

SEQ ID NO: 377622 - DNA, 15 bp, Homo sapiens
ttggggccctaacta

SEQ ID NO: 377623 - DNA, 15 bp, Homo sapiens
attggggccctaact

SEQ ID NO: 377624 - DNA, 15 bp, Homo sapiens
cattggggccctaac

SEQ ID NO: 377625 - DNA, 15 bp, Homo sapiens
gcattggggccctaa

SEQ ID NO: 377626 - DNA, 15 bp, Homo sapiens
ggcattggggcccta

SEQ ID NO: 377627 - DNA, 15 bp, Homo sapiens
tggcattggggccct

SEQ ID NO: 377628 - DNA, 15 bp, Homo sapiens
ctggcattggggccc

SEQ ID NO: 377629 - DNA, 15 bp, Homo sapiens
cctggcattggggcc

SEQ ID NO: 377630 - DNA, 15 bp, Homo sapiens
acctggcattggggc

SEQ ID NO: 377631 - DNA, 15 bp, Homo sapiens
tacctggcattgggg

SEQ ID NO: 377632 - DNA, 15 bp, Homo sapiens
ctacctggcattggg

SEQ ID NO: 377633 - DNA, 15 bp, Homo sapiens
cctacctggcattgg

SEQ ID NO: 377634 - DNA, 15 bp, Homo sapiens
tcctacctggcattg

SEQ ID NO: 377635 - DNA, 15 bp, Homo sapiens
ctcctacctggcatt

SEQ ID NO: 377636 - DNA, 15 bp, Homo sapiens
cctcctacctggcat

SEQ ID NO: 377637 - DNA, 15 bp, Homo sapiens
tcctcctacctggca

SEQ ID NO: 377638 - DNA, 15 bp, Homo sapiens
ttcctcctacctggc

SEQ ID NO: 377639 - DNA, 15 bp, Homo sapiens
cttcctcctacctgg

SEQ ID NO: 377640 - DNA, 15 bp, Homo sapiens
ccttcctcctacctg

SEQ ID NO: 377641 - DNA, 15 bp, Homo sapiens
cccttcctcctacct

SEQ ID NO: 377642 - DNA, 15 bp, Homo sapiens
gcccttcctcctacc

SEQ ID NO: 377643 - DNA, 15 bp, Homo sapiens
agcccttcctcctac

SEQ ID NO: 377644 - DNA, 15 bp, Homo sapiens
cagcccttcctccta

SEQ ID NO: 377645 - DNA, 15 bp, Homo sapiens
ccagcccttcctcct

SEQ ID NO: 377646 - DNA, 15 bp, Homo sapiens
cccagcccttcctcc

SEQ ID NO: 377647 - DNA, 15 bp, Homo sapiens
ccccagcccttcctc

SEQ ID NO: 377648 - DNA, 15 bp, Homo sapiens
gccccagcccttcct

SEQ ID NO: 377649 - DNA, 15 bp, Homo sapiens
tgccccagcccttcc

SEQ ID NO: 377650 - DNA, 15 bp, Homo sapiens
ttgccccagcccttc

SEQ ID NO: 377651 - DNA, 15 bp, Homo sapiens
attgccccagccctt

SEQ ID NO: 377652 - DNA, 15 bp, Homo sapiens
cattgccccagccct

SEQ ID NO: 377653 - DNA, 15 bp, Homo sapiens
ccattgccccagccc

SEQ ID NO: 377654 - DNA, 15 bp, Homo sapiens
accattgccccagcc

SEQ ID NO: 377655 - DNA, 15 bp, Homo sapiens
taccattgccccagc

SEQ ID NO: 377656 - DNA, 15 bp, Homo sapiens
ctaccattgccccag

SEQ ID NO: 377657 - DNA, 15 bp, Homo sapiens
tctaccattgcccca

SEQ ID NO: 377658 - DNA, 15 bp, Homo sapiens
ctctaccattgcccc

SEQ ID NO: 377659 - DNA, 15 bp, Homo sapiens
actctaccattgccc

SEQ ID NO: 377660 - DNA, 15 bp, Homo sapiens
cactctaccattgcc

SEQ ID NO: 377661 - DNA, 15 bp, Homo sapiens
tcactctaccattgc

SEQ ID NO: 377662 - DNA, 15 bp, Homo sapiens
ctcactctaccattg

SEQ ID NO: 377663 - DNA, 15 bp, Homo sapiens
tctcactctaccatt

SEQ ID NO: 377664 - DNA, 15 bp, Homo sapiens
ctctcactctaccat

SEQ ID NO: 377665 - DNA, 15 bp, Homo sapiens
cctctcactctacca

SEQ ID NO: 377666 - DNA, 15 bp, Homo sapiens
tcctctcactctacc

SEQ ID NO: 377667 - DNA, 15 bp, Homo sapiens
ttcctctcactctac

SEQ ID NO: 377668 - DNA, 15 bp, Homo sapiens
cttcctctcactcta

SEQ ID NO: 377669 - DNA, 15 bp, Homo sapiens
tcttcctctcactct

SEQ ID NO: 377670 - DNA, 15 bp, Homo sapiens
gtcttcctctcactc

SEQ ID NO: 377671 - DNA, 15 bp, Homo sapiens
tgtcttcctctcact

SEQ ID NO: 377672 - DNA, 15 bp, Homo sapiens
ttgtcttcctctcac

SEQ ID NO: 377673 - DNA, 15 bp, Homo sapiens
tttgtcttcctctca

SEQ ID NO: 377674 - DNA, 15 bp, Homo sapiens
gtttgtcttcctctc

SEQ ID NO: 377675 - DNA, 15 bp, Homo sapiens
ggtttgtcttcctct

SEQ ID NO: 377676 - DNA, 15 bp, Homo sapiens
gggtttgtcttcctc

SEQ ID NO: 377677 - DNA, 15 bp, Homo sapiens
tgggtttgtcttcct

SEQ ID NO: 377678 - DNA, 15 bp, Homo sapiens
ctgggtttgtcttcc

SEQ ID NO: 377679 - DNA, 15 bp, Homo sapiens
gctgggtttgtcttc

SEQ ID NO: 377680 - DNA, 15 bp, Homo sapiens
agctgggtttgtctt

SEQ ID NO: 377681 - DNA, 15 bp, Homo sapiens
cagctgggtttgtct

SEQ ID NO: 377682 - DNA, 15 bp, Homo sapiens
gcagctgggtttgtc

SEQ ID NO: 377683 - DNA, 15 bp, Homo sapiens
tgcagctgggtttgt

SEQ ID NO: 377684 - DNA, 15 bp, Homo sapiens
ctgcagctgggtttg

SEQ ID NO: 377685 - DNA, 15 bp, Homo sapiens
tctgcagctgggttt

SEQ ID NO: 377686 - DNA, 15 bp, Homo sapiens
atctgcagctgggtt

SEQ ID NO: 377687 - DNA, 15 bp, Homo sapiens
gatctgcagctgggt

SEQ ID NO: 377688 - DNA, 15 bp, Homo sapiens
tgatctgcagctggg

SEQ ID NO: 377689 - DNA, 15 bp, Homo sapiens
atgatctgcagctgg

SEQ ID NO: 377690 - DNA, 15 bp, Homo sapiens
catgatctgcagctg

SEQ ID NO: 377691 - DNA, 15 bp, Homo sapiens
gcatgatctgcagct

SEQ ID NO: 377692 - DNA, 15 bp, Homo sapiens
agcatgatctgcagc

SEQ ID NO: 377693 - DNA, 15 bp, Homo sapiens
aagcatgatctgcag

SEQ ID NO: 377694 - DNA, 15 bp, Homo sapiens
aaagcatgatctgca

SEQ ID NO: 377695 - DNA, 15 bp, Homo sapiens
aaaagcatgatctgc

SEQ ID NO: 377696 - DNA, 15 bp, Homo sapiens
gaaaagcatgatctg

SEQ ID NO: 377697 - DNA, 15 bp, Homo sapiens
agaaaagcatgatct

SEQ ID NO: 377698 - DNA, 15 bp, Homo sapiens
tagaaaagcatgatc

SEQ ID NO: 377699 - DNA, 15 bp, Homo sapiens
ctagaaaagcatgat

SEQ ID NO: 377700 - DNA, 15 bp, Homo sapiens
cctagaaaagcatga

SEQ ID NO: 377701 - DNA, 15 bp, Homo sapiens
tcctagaaaagcatg

SEQ ID NO: 377702 - DNA, 15 bp, Homo sapiens
ctcctagaaaagcat

SEQ ID NO: 377703 - DNA, 15 bp, Homo sapiens
gctcctagaaaagca

SEQ ID NO: 377704 - DNA, 15 bp, Homo sapiens
ggctcctagaaaagc

SEQ ID NO: 377705 - DNA, 15 bp, Homo sapiens
cggctcctagaaaag

SEQ ID NO: 377706 - DNA, 15 bp, Homo sapiens
tcggctcctagaaaa

SEQ ID NO: 377707 - DNA, 15 bp, Homo sapiens
gtcggctcctagaaa

SEQ ID NO: 377708 - DNA, 15 bp, Homo sapiens
tgtcggctcctagaa

SEQ ID NO: 377709 - DNA, 15 bp, Homo sapiens
atgtcggctcctaga

SEQ ID NO: 377710 - DNA, 15 bp, Homo sapiens
catgtcggctcctag

SEQ ID NO: 377711 - DNA, 15 bp, Homo sapiens
gcatgtcggctccta

SEQ ID NO: 377712 - DNA, 15 bp, Homo sapiens
agcatgtcggctcct

SEQ ID NO: 377713 - DNA, 15 bp, Homo sapiens
tagcatgtcggctcc

SEQ ID NO: 377714 - DNA, 15 bp, Homo sapiens
ttagcatgtcggctc

SEQ ID NO: 377715 - DNA, 15 bp, Homo sapiens
tttagcatgtcggct

SEQ ID NO: 377716 - DNA, 15 bp, Homo sapiens
atttagcatgtcggc

SEQ ID NO: 377717 - DNA, 15 bp, Homo sapiens
tatttagcatgtcgg

SEQ ID NO: 377718 - DNA, 15 bp, Homo sapiens
ttatttagcatgtcg

SEQ ID NO: 377719 - DNA, 15 bp, Homo sapiens
tttatttagcatgtc

SEQ ID NO: 377720 - DNA, 15 bp, Homo sapiens
atttatttagcatgt

SEQ ID NO: 377721 - DNA, 15 bp, Homo sapiens
aatttatttagcatg

SEQ ID NO: 377722 - DNA, 15 bp, Homo sapiens
taatttatttagcat

SEQ ID NO: 377723 - DNA, 15 bp, Homo sapiens
ctaatttatttagca

SEQ ID NO: 377724 - DNA, 15 bp, Homo sapiens
tctaatttatttagc

SEQ ID NO: 377725 - DNA, 15 bp, Homo sapiens
ttctaatttatttag

SEQ ID NO: 377726 - DNA, 15 bp, Homo sapiens
attctaatttattta

SEQ ID NO: 377727 - DNA, 15 bp, Homo sapiens
cattctaatttattt

SEQ ID NO: 377728 - DNA, 15 bp, Homo sapiens
acattctaatttatt

SEQ ID NO: 377729 - DNA, 15 bp, Homo sapiens
tacattctaatttat

SEQ ID NO: 377730 - DNA, 15 bp, Homo sapiens
ctacattctaattta

SEQ ID NO: 377731 - DNA, 15 bp, Homo sapiens
cctacattctaattt

SEQ ID NO: 377732 - DNA, 15 bp, Homo sapiens
tcctacattctaatt

SEQ ID NO: 377733 - DNA, 15 bp, Homo sapiens
ctcctacattctaat

SEQ ID NO: 377734 - DNA, 15 bp, Homo sapiens
cctcctacattctaa

SEQ ID NO: 377735 - DNA, 15 bp, Homo sapiens
tcctcctacattcta

SEQ ID NO: 377736 - DNA, 15 bp, Homo sapiens
atcctcctacattct

SEQ ID NO: 377737 - DNA, 15 bp, Homo sapiens
gatcctcctacattc

SEQ ID NO: 377738 - DNA, 15 bp, Homo sapiens
tgatcctcctacatt

SEQ ID NO: 377739 - DNA, 15 bp, Homo sapiens
ctgatcctcctacat

SEQ ID NO: 377740 - DNA, 15 bp, Homo sapiens
gctgatcctcctaca

SEQ ID NO: 377741 - DNA, 15 bp, Homo sapiens
ggctgatcctcctac

SEQ ID NO: 377742 - DNA, 15 bp, Homo sapiens
tggctgatcctccta

SEQ ID NO: 377743 - DNA, 15 bp, Homo sapiens
gtggctgatcctcct

SEQ ID NO: 377744 - DNA, 15 bp, Homo sapiens
tgtggctgatcctcc

SEQ ID NO: 377745 - DNA, 15 bp, Homo sapiens
ctgtggctgatcctc

SEQ ID NO: 377746 - DNA, 15 bp, Homo sapiens
actgtggctgatcct

SEQ ID NO: 377747 - DNA, 15 bp, Homo sapiens
aactgtggctgatcc

SEQ ID NO: 377748 - DNA, 15 bp, Homo sapiens
caactgtggctgatc

SEQ ID NO: 377749 - DNA, 15 bp, Homo sapiens
tcaactgtggctgat

SEQ ID NO: 377750 - DNA, 15 bp, Homo sapiens
gtcaactgtggctga

SEQ ID NO: 377751 - DNA, 15 bp, Homo sapiens
agtcaactgtggctg

SEQ ID NO: 377752 - DNA, 15 bp, Homo sapiens
gagtcaactgtggct

SEQ ID NO: 377753 - DNA, 15 bp, Homo sapiens
tgagtcaactgtggc

SEQ ID NO: 377754 - DNA, 15 bp, Homo sapiens
ttgagtcaactgtgg

SEQ ID NO: 377755 - DNA, 15 bp, Homo sapiens
gttgagtcaactgtg

SEQ ID NO: 377756 - DNA, 15 bp, Homo sapiens
tgttgagtcaactgt

SEQ ID NO: 377757 - DNA, 15 bp, Homo sapiens
ttgttgagtcaactg

SEQ ID NO: 377758 - DNA, 15 bp, Homo sapiens
tttgttgagtcaact

SEQ ID NO: 377759 - DNA, 15 bp, Homo sapiens
ctttgttgagtcaac

SEQ ID NO: 377760 - DNA, 15 bp, Homo sapiens
tctttgttgagtcaa

SEQ ID NO: 377761 - DNA, 15 bp, Homo sapiens
gtctttgttgagtca

SEQ ID NO: 377762 - DNA, 15 bp, Homo sapiens
tgtctttgttgagtc

SEQ ID NO: 377763 - DNA, 15 bp, Homo sapiens
ttgtctttgttgagt

SEQ ID NO: 377764 - DNA, 15 bp, Homo sapiens
tttgtctttgttgag

SEQ ID NO: 377765 - DNA, 15 bp, Homo sapiens
ttttgtctttgttga

SEQ ID NO: 377766 - DNA, 15 bp, Homo sapiens
cttttgtctttgttg

SEQ ID NO: 377767 - DNA, 15 bp, Homo sapiens
gcttttgtctttgtt

SEQ ID NO: 377768 - DNA, 15 bp, Homo sapiens
ggcttttgtctttgt

SEQ ID NO: 377769 - DNA, 15 bp, Homo sapiens
tggcttttgtctttg

SEQ ID NO: 377770 - DNA, 15 bp, Homo sapiens
ctggcttttgtcttt

SEQ ID NO: 377771 - DNA, 15 bp, Homo sapiens
gctggcttttgtctt

SEQ ID NO: 377772 - DNA, 15 bp, Homo sapiens
ggctggcttttgtct

SEQ ID NO: 377773 - DNA, 15 bp, Homo sapiens
tggctggcttttgtc

SEQ ID NO: 377774 - DNA, 15 bp, Homo sapiens
gtggctggcttttgt

SEQ ID NO: 377775 - DNA, 15 bp, Homo sapiens
ggtggctggcttttg

SEQ ID NO: 377776 - DNA, 15 bp, Homo sapiens
tggtggctggctttt

SEQ ID NO: 377777 - DNA, 15 bp, Homo sapiens
gtggtggctggcttt

SEQ ID NO: 377778 - DNA, 15 bp, Homo sapiens
ggtggtggctggctt

SEQ ID NO: 377779 - DNA, 15 bp, Homo sapiens
aggtggtggctggct

SEQ ID NO: 377780 - DNA, 15 bp, Homo sapiens
aaggtggtggctggc

SEQ ID NO: 377781 - DNA, 15 bp, Homo sapiens
gaaggtggtggctgg

SEQ ID NO: 377782 - DNA, 15 bp, Homo sapiens
tgaaggtggtggctg

SEQ ID NO: 377783 - DNA, 15 bp, Homo sapiens
ttgaaggtggtggct

SEQ ID NO: 377784 - DNA, 15 bp, Homo sapiens
gttgaaggtggtggc

SEQ ID NO: 377785 - DNA, 15 bp, Homo sapiens
agttgaaggtggtgg

SEQ ID NO: 377786 - DNA, 15 bp, Homo sapiens
cagttgaaggtggtg

SEQ ID NO: 377787 - DNA, 15 bp, Homo sapiens
acagttgaaggtggt

SEQ ID NO: 377788 - DNA, 15 bp, Homo sapiens
aacagttgaaggtgg

SEQ ID NO: 377789 - DNA, 15 bp, Homo sapiens
caacagttgaaggtg

SEQ ID NO: 377790 - DNA, 15 bp, Homo sapiens
ccaacagttgaaggt

SEQ ID NO: 377791 - DNA, 15 bp, Homo sapiens
gccaacagttgaagg

SEQ ID NO: 377792 - DNA, 15 bp, Homo sapiens
tgccaacagttgaag

SEQ ID NO: 377793 - DNA, 15 bp, Homo sapiens
gtgccaacagttgaa

SEQ ID NO: 377794 - DNA, 15 bp, Homo sapiens
tgtgccaacagttga

SEQ ID NO: 377795 - DNA, 15 bp, Homo sapiens
ctgtgccaacagttg

SEQ ID NO: 377796 - DNA, 15 bp, Homo sapiens
gctgtgccaacagtt

SEQ ID NO: 377797 - DNA, 15 bp, Homo sapiens
agctgtgccaacagt

SEQ ID NO: 377798 - DNA, 15 bp, Homo sapiens
cagctgtgccaacag

SEQ ID NO: 377799 - DNA, 15 bp, Homo sapiens
acagctgtgccaaca

SEQ ID NO: 377800 - DNA, 15 bp, Homo sapiens
cacagctgtgccaac

SEQ ID NO: 377801 - DNA, 15 bp, Homo sapiens
gcacagctgtgccaa

SEQ ID NO: 377802 - DNA, 15 bp, Homo sapiens
cgcacagctgtgcca

SEQ ID NO: 377803 - DNA, 15 bp, Homo sapiens
ccgcacagctgtgcc

SEQ ID NO: 377804 - DNA, 15 bp, Homo sapiens
accgcacagctgtgc

SEQ ID NO: 377805 - DNA, 15 bp, Homo sapiens
caccgcacagctgtg

SEQ ID NO: 377806 - DNA, 15 bp, Homo sapiens
gcaccgcacagctgt

SEQ ID NO: 377807 - DNA, 15 bp, Homo sapiens
agcaccgcacagctg

SEQ ID NO: 377808 - DNA, 15 bp, Homo sapiens
cagcaccgcacagct

SEQ ID NO: 377809 - DNA, 15 bp, Homo sapiens
ccagcaccgcacagc

SEQ ID NO: 377810 - DNA, 15 bp, Homo sapiens
gccagcaccgcacag

SEQ ID NO: 377811 - DNA, 15 bp, Homo sapiens
agccagcaccgcaca

SEQ ID NO: 377812 - DNA, 15 bp, Homo sapiens
cagccagcaccgcac

SEQ ID NO: 377813 - DNA, 15 bp, Homo sapiens
acagccagcaccgca

SEQ ID NO: 377814 - DNA, 15 bp, Homo sapiens
gacagccagcaccgc

SEQ ID NO: 377815 - DNA, 15 bp, Homo sapiens
ggacagccagcaccg

SEQ ID NO: 377816 - DNA, 15 bp, Homo sapiens
gggacagccagcacc

SEQ ID NO: 377817 - DNA, 15 bp, Homo sapiens
tgggacagccagcac

SEQ ID NO: 377818 - DNA, 15 bp, Homo sapiens
ttgggacagccagca

SEQ ID NO: 377819 - DNA, 15 bp, Homo sapiens
attgggacagccagc

SEQ ID NO: 377820 - DNA, 15 bp, Homo sapiens
cattgggacagccag

SEQ ID NO: 377821 - DNA, 15 bp, Homo sapiens
gcattgggacagcca

SEQ ID NO: 377822 - DNA, 15 bp, Homo sapiens
tgcattgggacagcc

SEQ ID NO: 377823 - DNA, 15 bp, Homo sapiens
ctgcattgggacagc

SEQ ID NO: 377824 - DNA, 15 bp, Homo sapiens
tctgcattgggacag

SEQ ID NO: 377825 - DNA, 15 bp, Homo sapiens
ttctgcattgggaca

SEQ ID NO: 377826 - DNA, 15 bp, Homo sapiens
tttctgcattgggac

SEQ ID NO: 377827 - DNA, 15 bp, Homo sapiens
ctttctgcattggga

SEQ ID NO: 377828 - DNA, 15 bp, Homo sapiens
gctttctgcattggg

SEQ ID NO: 377829 - DNA, 15 bp, Homo sapiens
agctttctgcattgg

SEQ ID NO: 377830 - DNA, 15 bp, Homo sapiens
cagctttctgcattg

SEQ ID NO: 377831 - DNA, 15 bp, Homo sapiens
ccagctttctgcatt

SEQ ID NO: 377832 - DNA, 15 bp, Homo sapiens
accagctttctgcat

SEQ ID NO: 377833 - DNA, 15 bp, Homo sapiens
caccagctttctgca

SEQ ID NO: 377834 - DNA, 15 bp, Homo sapiens
ccaccagctttctgc

SEQ ID NO: 377835 - DNA, 15 bp, Homo sapiens
cccaccagctttctg

SEQ ID NO: 377836 - DNA, 15 bp, Homo sapiens
tcccaccagctttct

SEQ ID NO: 377837 - DNA, 15 bp, Homo sapiens
ttcccaccagctttc

SEQ ID NO: 377838 - DNA, 15 bp, Homo sapiens
cttcccaccagcttt

SEQ ID NO: 377839 - DNA, 15 bp, Homo sapiens
ccttcccaccagctt

SEQ ID NO: 377840 - DNA, 15 bp, Homo sapiens
tccttcccaccagct

SEQ ID NO: 377841 - DNA, 15 bp, Homo sapiens
ttccttcccaccagc

SEQ ID NO: 377842 - DNA, 15 bp, Homo sapiens
attccttcccaccag

SEQ ID NO: 377843 - DNA, 15 bp, Homo sapiens
aattccttcccacca

SEQ ID NO: 377844 - DNA, 15 bp, Homo sapiens
gaattccttcccacc

SEQ ID NO: 377845 - DNA, 15 bp, Homo sapiens
ggaattccttcccac

SEQ ID NO: 377846 - DNA, 15 bp, Homo sapiens
aggaattccttccca

SEQ ID NO: 377847 - DNA, 15 bp, Homo sapiens
gaggaattccttccc

SEQ ID NO: 377848 - DNA, 15 bp, Homo sapiens
tgaggaattccttcc

SEQ ID NO: 377849 - DNA, 15 bp, Homo sapiens
atgaggaattccttc

SEQ ID NO: 377850 - DNA, 15 bp, Homo sapiens
gatgaggaattcctt

SEQ ID NO: 377851 - DNA, 15 bp, Homo sapiens
tgatgaggaattcct

SEQ ID NO: 377852 - DNA, 15 bp, Homo sapiens
atgatgaggaattcc

SEQ ID NO: 377853 - DNA, 15 bp, Homo sapiens
gatgatgaggaattc

SEQ ID NO: 377854 - DNA, 15 bp, Homo sapiens
tgatgatgaggaatt

SEQ ID NO: 377855 - DNA, 15 bp, Homo sapiens
gtgatgatgaggaat

SEQ ID NO: 377856 - DNA, 15 bp, Homo sapiens
agtgatgatgaggaa

SEQ ID NO: 377857 - DNA, 15 bp, Homo sapiens
aagtgatgatgagga

SEQ ID NO: 377858 - DNA, 15 bp, Homo sapiens
aaagtgatgatgagg

SEQ ID NO: 377859 - DNA, 15 bp, Homo sapiens
gaaagtgatgatgag

SEQ ID NO: 377860 - DNA, 15 bp, Homo sapiens
agaaagtgatgatga

SEQ ID NO: 377861 - DNA, 15 bp, Homo sapiens
aagaaagtgatgatg

SEQ ID NO: 377862 - DNA, 15 bp, Homo sapiens
aaagaaagtgatgat

SEQ ID NO: 377863 - DNA, 15 bp, Homo sapiens
taaagaaagtgatga

SEQ ID NO: 377864 - DNA, 15 bp, Homo sapiens
ttaaagaaagtgatg

SEQ ID NO: 377865 - DNA, 15 bp, Homo sapiens
attaaagaaagtgat

SEQ ID NO: 377866 - DNA, 15 bp, Homo sapiens
cattaaagaaagtga

SEQ ID NO: 377867 - DNA, 15 bp, Homo sapiens
acattaaagaaagtg

SEQ ID NO: 377868 - DNA, 15 bp, Homo sapiens
tacattaaagaaagt

SEQ ID NO: 377869 - DNA, 15 bp, Homo sapiens
ctacattaaagaaag

SEQ ID NO: 377870 - DNA, 15 bp, Homo sapiens
gctacattaaagaaa

SEQ ID NO: 377871 - DNA, 15 bp, Homo sapiens
ggctacattaaagaa

SEQ ID NO: 377872 - DNA, 15 bp, Homo sapiens
tggctacattaaaga

SEQ ID NO: 377873 - DNA, 15 bp, Homo sapiens
ttggctacattaaag

SEQ ID NO: 377874 - DNA, 15 bp, Homo sapiens
attggctacattaaa

SEQ ID NO: 377875 - DNA, 15 bp, Homo sapiens
aattggctacattaa

SEQ ID NO: 377876 - DNA, 15 bp, Homo sapiens
aaattggctacatta

SEQ ID NO: 377877 - DNA, 15 bp, Homo sapiens
taaattggctacatt

SEQ ID NO: 377878 - DNA, 15 bp, Homo sapiens
ctaaattggctacat

SEQ ID NO: 377879 - DNA, 15 bp, Homo sapiens
cctaaattggctaca

SEQ ID NO: 377880 - DNA, 15 bp, Homo sapiens
gcctaaattggctac

SEQ ID NO: 377881 - DNA, 15 bp, Homo sapiens
tgcctaaattggcta

SEQ ID NO: 377882 - DNA, 15 bp, Homo sapiens
ctgcctaaattggct

SEQ ID NO: 377883 - DNA, 15 bp, Homo sapiens
cctgcctaaattggc

SEQ ID NO: 377884 - DNA, 15 bp, Homo sapiens
ccctgcctaaattgg

SEQ ID NO: 377885 - DNA, 15 bp, Homo sapiens
accctgcctaaattg

SEQ ID NO: 377886 - DNA, 15 bp, Homo sapiens
taccctgcctaaatt

SEQ ID NO: 377887 - DNA, 15 bp, Homo sapiens
ttaccctgcctaaat

SEQ ID NO: 377888 - DNA, 15 bp, Homo sapiens
attaccctgcctaaa

SEQ ID NO: 377889 - DNA, 15 bp, Homo sapiens
cattaccctgcctaa

SEQ ID NO: 377890 - DNA, 15 bp, Homo sapiens
tcattaccctgccta

SEQ ID NO: 377891 - DNA, 15 bp, Homo sapiens
gtcattaccctgcct

SEQ ID NO: 377892 - DNA, 15 bp, Homo sapiens
cgtcattaccctgcc

SEQ ID NO: 377893 - DNA, 15 bp, Homo sapiens
ccgtcattaccctgc

SEQ ID NO: 377894 - DNA, 15 bp, Homo sapiens
gccgtcattaccctg

SEQ ID NO: 377895 - DNA, 15 bp, Homo sapiens
tgccgtcattaccct

SEQ ID NO: 377896 - DNA, 15 bp, Homo sapiens
ttgccgtcattaccc

SEQ ID NO: 377897 - DNA, 15 bp, Homo sapiens
attgccgtcattacc

SEQ ID NO: 377898 - DNA, 15 bp, Homo sapiens
tattgccgtcattac

SEQ ID NO: 377899 - DNA, 15 bp, Homo sapiens
ctattgccgtcatta

SEQ ID NO: 377900 - DNA, 15 bp, Homo sapiens
tctattgccgtcatt

SEQ ID NO: 377901 - DNA, 15 bp, Homo sapiens
ctctattgccgtcat

SEQ ID NO: 377902 - DNA, 15 bp, Homo sapiens
tctctattgccgtca

SEQ ID NO: 377903 - DNA, 15 bp, Homo sapiens
ctctctattgccgtc

SEQ ID NO: 377904 - DNA, 15 bp, Homo sapiens
gctctctattgccgt

SEQ ID NO: 377905 - DNA, 15 bp, Homo sapiens
agctctctattgccg

SEQ ID NO: 377906 - DNA, 15 bp, Homo sapiens
cagctctctattgcc

SEQ ID NO: 377907 - DNA, 15 bp, Homo sapiens
gcagctctctattgc

SEQ ID NO: 377908 - DNA, 15 bp, Homo sapiens
agcagctctctattg

SEQ ID NO: 377909 - DNA, 15 bp, Homo sapiens
gagcagctctctatt

SEQ ID NO: 377910 - DNA, 15 bp, Homo sapiens
ggagcagctctctat

SEQ ID NO: 377911 - DNA, 15 bp, Homo sapiens
aggagcagctctcta

SEQ ID NO: 377912 - DNA, 15 bp, Homo sapiens
aaggagcagctctct

SEQ ID NO: 377913 - DNA, 15 bp, Homo sapiens
caaggagcagctctc

SEQ ID NO: 377914 - DNA, 15 bp, Homo sapiens
acaaggagcagctct

SEQ ID NO: 377915 - DNA, 15 bp, Homo sapiens
gacaaggagcagctc

SEQ ID NO: 377916 - DNA, 15 bp, Homo sapiens
tgacaaggagcagct

SEQ ID NO: 377917 - DNA, 15 bp, Homo sapiens
atgacaaggagcagc

SEQ ID NO: 377918 - DNA, 15 bp, Homo sapiens
aatgacaaggagcag

SEQ ID NO: 377919 - DNA, 15 bp, Homo sapiens
taatgacaaggagca

SEQ ID NO: 377920 - DNA, 15 bp, Homo sapiens
ataatgacaaggagc

SEQ ID NO: 377921 - DNA, 15 bp, Homo sapiens
cataatgacaaggag

SEQ ID NO: 377922 - DNA, 15 bp, Homo sapiens
tcataatgacaagga

SEQ ID NO: 377923 - DNA, 15 bp, Homo sapiens
ctcataatgacaagg

SEQ ID NO: 377924 - DNA, 15 bp, Homo sapiens
tctcataatgacaag

SEQ ID NO: 377925 - DNA, 15 bp, Homo sapiens
gtctcataatgacaa

SEQ ID NO: 377926 - DNA, 15 bp, Homo sapiens
cgtctcataatgaca

SEQ ID NO: 377927 - DNA, 15 bp, Homo sapiens
acgtctcataatgac

SEQ ID NO: 377928 - DNA, 15 bp, Homo sapiens
cacgtctcataatga

SEQ ID NO: 377929 - DNA, 15 bp, Homo sapiens
ccacgtctcataatg

SEQ ID NO: 377930 - DNA, 15 bp, Homo sapiens
cccacgtctcataat

SEQ ID NO: 377931 - DNA, 15 bp, Homo sapiens
tcccacgtctcataa

SEQ ID NO: 377932 - DNA, 15 bp, Homo sapiens
atcccacgtctcata

SEQ ID NO: 377933 - DNA, 15 bp, Homo sapiens
tatcccacgtctcat

SEQ ID NO: 377934 - DNA, 15 bp, Homo sapiens
ttatcccacgtctca

SEQ ID NO: 377935 - DNA, 15 bp, Homo sapiens
cttatcccacgtctc

SEQ ID NO: 377936 - DNA, 15 bp, Homo sapiens
tcttatcccacgtct

SEQ ID NO: 377937 - DNA, 15 bp, Homo sapiens
ttcttatcccacgtc

SEQ ID NO: 377938 - DNA, 15 bp, Homo sapiens
cttcttatcccacgt

SEQ ID NO: 377939 - DNA, 15 bp, Homo sapiens
tcttcttatcccacg

SEQ ID NO: 377940 - DNA, 15 bp, Homo sapiens
ctcttcttatcccac

SEQ ID NO: 377941 - DNA, 15 bp, Homo sapiens
actcttcttatccca

SEQ ID NO: 377942 - DNA, 15 bp, Homo sapiens
cactcttcttatccc

SEQ ID NO: 377943 - DNA, 15 bp, Homo sapiens
gcactcttcttatcc

SEQ ID NO: 377944 - DNA, 15 bp, Homo sapiens
tgcactcttcttatc

SEQ ID NO: 377945 - DNA, 15 bp, Homo sapiens
ttgcactcttcttat

SEQ ID NO: 377946 - DNA, 15 bp, Homo sapiens
gttgcactcttctta

SEQ ID NO: 377947 - DNA, 15 bp, Homo sapiens
tgttgcactcttctt

SEQ ID NO: 377948 - DNA, 15 bp, Homo sapiens
ctgttgcactcttct

SEQ ID NO: 377949 - DNA, 15 bp, Homo sapiens
actgttgcactcttc

SEQ ID NO: 377950 - DNA, 15 bp, Homo sapiens
cactgttgcactctt

SEQ ID NO: 377951 - DNA, 15 bp, Homo sapiens
tcactgttgcactct

SEQ ID NO: 377952 - DNA, 15 bp, Homo sapiens
ctcactgttgcactc

SEQ ID NO: 377953 - DNA, 15 bp, Homo sapiens
gctcactgttgcact

SEQ ID NO: 377954 - DNA, 15 bp, Homo sapiens
ggctcactgttgcac

SEQ ID NO: 377955 - DNA, 15 bp, Homo sapiens
tggctcactgttgca

SEQ ID NO: 377956 - DNA, 15 bp, Homo sapiens
ttggctcactgttgc

SEQ ID NO: 377957 - DNA, 15 bp, Homo sapiens
tttggctcactgttg

SEQ ID NO: 377958 - DNA, 15 bp, Homo sapiens
gtttggctcactgtt

SEQ ID NO: 377959 - DNA, 15 bp, Homo sapiens
tgtttggctcactgt

SEQ ID NO: 377960 - DNA, 15 bp, Homo sapiens
gtgtttggctcactg

SEQ ID NO: 377961 - DNA, 15 bp, Homo sapiens
tgtgtttggctcact

SEQ ID NO: 377962 - DNA, 15 bp, Homo sapiens
atgtgtttggctcac

SEQ ID NO: 377963 - DNA, 15 bp, Homo sapiens
aatgtgtttggctca

SEQ ID NO: 377964 - DNA, 15 bp, Homo sapiens
aaatgtgtttggctc

SEQ ID NO: 377965 - DNA, 15 bp, Homo sapiens
aaaatgtgtttggct

SEQ ID NO: 377966 - DNA, 15 bp, Homo sapiens
caaaatgtgtttggc

SEQ ID NO: 377967 - DNA, 15 bp, Homo sapiens
ccaaaatgtgtttgg

SEQ ID NO: 377968 - DNA, 15 bp, Homo sapiens
accaaaatgtgtttg

SEQ ID NO: 377969 - DNA, 15 bp, Homo sapiens
taccaaaatgtgttt

SEQ ID NO: 377970 - DNA, 15 bp, Homo sapiens
ataccaaaatgtgtt

SEQ ID NO: 377971 - DNA, 15 bp, Homo sapiens
tataccaaaatgtgt

SEQ ID NO: 377972 - DNA, 15 bp, Homo sapiens
ctataccaaaatgtg

SEQ ID NO: 377973 - DNA, 15 bp, Homo sapiens
actataccaaaatgt

SEQ ID NO: 377974 - DNA, 15 bp, Homo sapiens
aactataccaaaatg

SEQ ID NO: 377975 - DNA, 15 bp, Homo sapiens
taactataccaaaat

SEQ ID NO: 377976 - DNA, 15 bp, Homo sapiens
ataactataccaaaa

SEQ ID NO: 377977 - DNA, 15 bp, Homo sapiens
aataactataccaaa

SEQ ID NO: 377978 - DNA, 15 bp, Homo sapiens
aaataactataccaa

SEQ ID NO: 377979 - DNA, 15 bp, Homo sapiens
aaaataactatacca

SEQ ID NO: 377980 - DNA, 15 bp, Homo sapiens
aaaaataactatacc

SEQ ID NO: 377981 - DNA, 15 bp, Homo sapiens
aaaaaataactatac

SEQ ID NO: 377982 - DNA, 15 bp, Homo sapiens
aaaaaaataactata

SEQ ID NO: 377983 - DNA, 15 bp, Homo sapiens
gaaaaaaataactat

SEQ ID NO: 377984 - DNA, 15 bp, Homo sapiens
agaaaaaaataacta

SEQ ID NO: 377985 - DNA, 15 bp, Homo sapiens
aagaaaaaaataact

SEQ ID NO: 377986 - DNA, 15 bp, Homo sapiens
gaagaaaaaaataac

SEQ ID NO: 377987 - DNA, 15 bp, Homo sapiens
agaagaaaaaaataa

SEQ ID NO: 377988 - DNA, 15 bp, Homo sapiens
aagaagaaaaaaata

SEQ ID NO: 377989 - DNA, 15 bp, Homo sapiens
aaagaagaaaaaaat

SEQ ID NO: 377990 - DNA, 15 bp, Homo sapiens
aaaagaagaaaaaaa

SEQ ID NO: 377991 - DNA, 15 bp, Homo sapiens
caaaagaagaaaaaa

SEQ ID NO: 377992 - DNA, 15 bp, Homo sapiens
acaaaagaagaaaaa

SEQ ID NO: 377993 - DNA, 15 bp, Homo sapiens
aacaaaagaagaaaa

SEQ ID NO: 377994 - DNA, 15 bp, Homo sapiens
aaacaaaagaagaaa

SEQ ID NO: 377995 - DNA, 15 bp, Homo sapiens
aaaacaaaagaagaa

SEQ ID NO: 377996 - DNA, 15 bp, Homo sapiens
gaaaacaaaagaaga

SEQ ID NO: 377997 - DNA, 15 bp, Homo sapiens
aaagaaaacaaaaga

SEQ ID NO: 377998 - DNA, 15 bp, Homo sapiens
gaaagaaaacaaaag

SEQ ID NO: 377999 - DNA, 15 bp, Homo sapiens
agaaagaaaacaaaa

SEQ ID NO: 378000 - DNA, 15 bp, Homo sapiens
aagaaagaaaacaaa

SEQ ID NO: 378001 - DNA, 15 bp, Homo sapiens
aaagaaagaaaacaa

SEQ ID NO: 378002 - DNA, 15 bp, Homo sapiens
aaaagaaagaaaaca

SEQ ID NO: 378003 - DNA, 15 bp, Homo sapiens
aaaaagaaagaaaac

SEQ ID NO: 378004 - DNA, 15 bp, Homo sapiens
ttaaaaaagaaagaa

SEQ ID NO: 378005 - DNA, 15 bp, Homo sapiens
gttaaaaaagaaaga

SEQ ID NO: 378006 - DNA, 15 bp, Homo sapiens
tgttaaaaaagaaag

SEQ ID NO: 378007 - DNA, 15 bp, Homo sapiens
gtgttaaaaaagaaa

SEQ ID NO: 378008 - DNA, 15 bp, Homo sapiens
agtgttaaaaaagaa

SEQ ID NO: 378009 - DNA, 15 bp, Homo sapiens
aagtgttaaaaaaga

SEQ ID NO: 378010 - DNA, 15 bp, Homo sapiens
taagtgttaaaaaag

SEQ ID NO: 378011 - DNA, 15 bp, Homo sapiens
ctaagtgttaaaaaa

SEQ ID NO: 378012 - DNA, 15 bp, Homo sapiens
actaagtgttaaaaa

SEQ ID NO: 378013 - DNA, 15 bp, Homo sapiens
tactaagtgttaaaa

SEQ ID NO: 378014 - DNA, 15 bp, Homo sapiens
ttactaagtgttaaa

SEQ ID NO: 378015 - DNA, 15 bp, Homo sapiens
cttactaagtgttaa

SEQ ID NO: 378016 - DNA, 15 bp, Homo sapiens
gcttactaagtgtta

SEQ ID NO: 378017 - DNA, 15 bp, Homo sapiens
tgcttactaagtgtt

SEQ ID NO: 378018 - DNA, 15 bp, Homo sapiens
atgcttactaagtgt

SEQ ID NO: 378019 - DNA, 15 bp, Homo sapiens
catgcttactaagtg

SEQ ID NO: 378020 - DNA, 15 bp, Homo sapiens
tcatgcttactaagt

SEQ ID NO: 378021 - DNA, 15 bp, Homo sapiens
ctcatgcttactaag

SEQ ID NO: 378022 - DNA, 15 bp, Homo sapiens
tctcatgcttactaa

SEQ ID NO: 378023 - DNA, 15 bp, Homo sapiens
ctctcatgcttacta

SEQ ID NO: 378024 - DNA, 15 bp, Homo sapiens
cctctcatgcttact

SEQ ID NO: 378025 - DNA, 15 bp, Homo sapiens
tcctctcatgcttac

SEQ ID NO: 378026 - DNA, 15 bp, Homo sapiens
ctcctctcatgctta

SEQ ID NO: 378027 - DNA, 15 bp, Homo sapiens
tctcctctcatgctt

SEQ ID NO: 378028 - DNA, 15 bp, Homo sapiens
ctctcctctcatgct

SEQ ID NO: 378029 - DNA, 15 bp, Homo sapiens
cctctcctctcatgc

SEQ ID NO: 378030 - DNA, 15 bp, Homo sapiens
acctctcctctcatg

SEQ ID NO: 378031 - DNA, 15 bp, Homo sapiens
tacctctcctctcat

SEQ ID NO: 378032 - DNA, 15 bp, Homo sapiens
ctacctctcctctca

SEQ ID NO: 378033 - DNA, 15 bp, Homo sapiens
tctacctctcctctc

SEQ ID NO: 378034 - DNA, 15 bp, Homo sapiens
ttctacctctcctct

SEQ ID NO: 378035 - DNA, 15 bp, Homo sapiens
tttctacctctcctc

SEQ ID NO: 378036 - DNA, 15 bp, Homo sapiens
ttttctacctctcct

SEQ ID NO: 378037 - DNA, 15 bp, Homo sapiens
tttttctacctctcc

SEQ ID NO: 378038 - DNA, 15 bp, Homo sapiens
atttttctacctctc

SEQ ID NO: 378039 - DNA, 15 bp, Homo sapiens
tatttttctacctct

SEQ ID NO: 378040 - DNA, 15 bp, Homo sapiens
gtatttttctacctc

SEQ ID NO: 378041 - DNA, 15 bp, Homo sapiens
ggtatttttctacct

SEQ ID NO: 378042 - DNA, 15 bp, Homo sapiens
gggtatttttctacc

SEQ ID NO: 378043 - DNA, 15 bp, Homo sapiens
agggtatttttctac

SEQ ID NO: 378044 - DNA, 15 bp, Homo sapiens
aagggtatttttcta

SEQ ID NO: 378045 - DNA, 15 bp, Homo sapiens
aaagggtatttttct

SEQ ID NO: 378046 - DNA, 15 bp, Homo sapiens
aaaagggtatttttc

SEQ ID NO: 378047 - DNA, 15 bp, Homo sapiens
aaaaagggtattttt

SEQ ID NO: 378048 - DNA, 15 bp, Homo sapiens
aaaaaagggtatttt

SEQ ID NO: 378049 - DNA, 15 bp, Homo sapiens
gaaaaaagggtattt

SEQ ID NO: 378050 - DNA, 15 bp, Homo sapiens
tgaaaaaagggtatt

SEQ ID NO: 378051 - DNA, 15 bp, Homo sapiens
ttgaaaaaagggtat

SEQ ID NO: 378052 - DNA, 15 bp, Homo sapiens
gttgaaaaaagggta

SEQ ID NO: 378053 - DNA, 15 bp, Homo sapiens
tgttgaaaaaagggt

SEQ ID NO: 378054 - DNA, 15 bp, Homo sapiens
atgttgaaaaaaggg

SEQ ID NO: 378055 - DNA, 15 bp, Homo sapiens
tatgttgaaaaaagg

SEQ ID NO: 378056 - DNA, 15 bp, Homo sapiens
atatgttgaaaaaag

SEQ ID NO: 378057 - DNA, 15 bp, Homo sapiens
tatatgttgaaaaaa

SEQ ID NO: 378058 - DNA, 15 bp, Homo sapiens
ctatatgttgaaaaa

SEQ ID NO: 378059 - DNA, 15 bp, Homo sapiens
actatatgttgaaaa

SEQ ID NO: 378060 - DNA, 15 bp, Homo sapiens
aactatatgttgaaa

SEQ ID NO: 378061 - DNA, 15 bp, Homo sapiens
caactatatgttgaa

SEQ ID NO: 378062 - DNA, 15 bp, Homo sapiens
acaactatatgttga

SEQ ID NO: 378063 - DNA, 15 bp, Homo sapiens
gacaactatatgttg

SEQ ID NO: 378064 - DNA, 15 bp, Homo sapiens
tgacaactatatgtt

SEQ ID NO: 378065 - DNA, 15 bp, Homo sapiens
ctgacaactatatgt

SEQ ID NO: 378066 - DNA, 15 bp, Homo sapiens
tctgacaactatatg

SEQ ID NO: 378067 - DNA, 15 bp, Homo sapiens
atctgacaactatat

SEQ ID NO: 378068 - DNA, 15 bp, Homo sapiens
catctgacaactata

SEQ ID NO: 378069 - DNA, 15 bp, Homo sapiens
gcatctgacaactat

SEQ ID NO: 378070 - DNA, 15 bp, Homo sapiens
agcatctgacaacta

SEQ ID NO: 378071 - DNA, 15 bp, Homo sapiens
aagcatctgacaact

SEQ ID NO: 378072 - DNA, 15 bp, Homo sapiens
aaagcatctgacaac

SEQ ID NO: 378073 - DNA, 15 bp, Homo sapiens
caaagcatctgacaa

SEQ ID NO: 378074 - DNA, 15 bp, Homo sapiens
acaaagcatctgaca

SEQ ID NO: 378075 - DNA, 15 bp, Homo sapiens
cacaaagcatctgac

SEQ ID NO: 378076 - DNA, 15 bp, Homo sapiens
gcacaaagcatctga

SEQ ID NO: 378077 - DNA, 15 bp, Homo sapiens
tgcacaaagcatctg

SEQ ID NO: 378078 - DNA, 15 bp, Homo sapiens
atgcacaaagcatct

SEQ ID NO: 378079 - DNA, 15 bp, Homo sapiens
catgcacaaagcatc

SEQ ID NO: 378080 - DNA, 15 bp, Homo sapiens
gcatgcacaaagcat

SEQ ID NO: 378081 - DNA, 15 bp, Homo sapiens
tgcatgcacaaagca

SEQ ID NO: 378082 - DNA, 15 bp, Homo sapiens
ttgcatgcacaaagc

SEQ ID NO: 378083 - DNA, 15 bp, Homo sapiens
tttgcatgcacaaag

SEQ ID NO: 378084 - DNA, 15 bp, Homo sapiens
atttgcatgcacaaa

SEQ ID NO: 378085 - DNA, 15 bp, Homo sapiens
gatttgcatgcacaa

SEQ ID NO: 378086 - DNA, 15 bp, Homo sapiens
tgatttgcatgcaca

SEQ ID NO: 378087 - DNA, 15 bp, Homo sapiens
atgatttgcatgcac

SEQ ID NO: 378088 - DNA, 15 bp, Homo sapiens
catgatttgcatgca

SEQ ID NO: 378089 - DNA, 15 bp, Homo sapiens
gcatgatttgcatgc

SEQ ID NO: 378090 - DNA, 15 bp, Homo sapiens
agcatgatttgcatg

SEQ ID NO: 378091 - DNA, 15 bp, Homo sapiens
aagcatgatttgcat

SEQ ID NO: 378092 - DNA, 15 bp, Homo sapiens
aaagcatgatttgca

SEQ ID NO: 378093 - DNA, 15 bp, Homo sapiens
taaagcatgatttgc

SEQ ID NO: 378094 - DNA, 15 bp, Homo sapiens
ctaaagcatgatttg

SEQ ID NO: 378095 - DNA, 15 bp, Homo sapiens
cctaaagcatgattt

SEQ ID NO: 378096 - DNA, 15 bp, Homo sapiens
gcctaaagcatgatt

SEQ ID NO: 378097 - DNA, 15 bp, Homo sapiens
tgcctaaagcatgat

SEQ ID NO: 378098 - DNA, 15 bp, Homo sapiens
ctgcctaaagcatga

SEQ ID NO: 378099 - DNA, 15 bp, Homo sapiens
actgcctaaagcatg

SEQ ID NO: 378100 - DNA, 15 bp, Homo sapiens
cactgcctaaagcat

SEQ ID NO: 378101 - DNA, 15 bp, Homo sapiens
gcactgcctaaagca

SEQ ID NO: 378102 - DNA, 15 bp, Homo sapiens
cgcactgcctaaagc

SEQ ID NO: 378103 - DNA, 15 bp, Homo sapiens
ccgcactgcctaaag

SEQ ID NO: 378104 - DNA, 15 bp, Homo sapiens
accgcactgcctaaa

SEQ ID NO: 378105 - DNA, 15 bp, Homo sapiens
taccgcactgcctaa

SEQ ID NO: 378106 - DNA, 15 bp, Homo sapiens
ataccgcactgccta

SEQ ID NO: 378107 - DNA, 15 bp, Homo sapiens
aataccgcactgcct

SEQ ID NO: 378108 - DNA, 15 bp, Homo sapiens
aaataccgcactgcc

SEQ ID NO: 378109 - DNA, 15 bp, Homo sapiens
gaaataccgcactgc

SEQ ID NO: 378110 - DNA, 15 bp, Homo sapiens
agaaataccgcactg

SEQ ID NO: 378111 - DNA, 15 bp, Homo sapiens
aagaaataccgcact

SEQ ID NO: 378112 - DNA, 15 bp, Homo sapiens
taagaaataccgcac

SEQ ID NO: 378113 - DNA, 15 bp, Homo sapiens
ttaagaaataccgca

SEQ ID NO: 378114 - DNA, 15 bp, Homo sapiens
tttaagaaataccgc

SEQ ID NO: 378115 - DNA, 15 bp, Homo sapiens
ttttaagaaataccg

SEQ ID NO: 378116 - DNA, 15 bp, Homo sapiens
tttttaagaaatacc

SEQ ID NO: 378117 - DNA, 15 bp, Homo sapiens
gtttttaagaaatac

SEQ ID NO: 378118 - DNA, 15 bp, Homo sapiens
agtttttaagaaata

SEQ ID NO: 378119 - DNA, 15 bp, Homo sapiens
cagtttttaagaaat

SEQ ID NO: 378120 - DNA, 15 bp, Homo sapiens
ccagtttttaagaaa

SEQ ID NO: 378121 - DNA, 15 bp, Homo sapiens
gccagtttttaagaa

SEQ ID NO: 378122 - DNA, 15 bp, Homo sapiens
ggccagtttttaaga

SEQ ID NO: 378123 - DNA, 15 bp, Homo sapiens
tggccagtttttaag

SEQ ID NO: 378124 - DNA, 15 bp, Homo sapiens
ttggccagtttttaa

SEQ ID NO: 378125 - DNA, 15 bp, Homo sapiens
attggccagttttta

SEQ ID NO: 378126 - DNA, 15 bp, Homo sapiens
aattggccagttttt

SEQ ID NO: 378127 - DNA, 15 bp, Homo sapiens
gaattggccagtttt

SEQ ID NO: 378128 - DNA, 15 bp, Homo sapiens
tgaattggccagttt

SEQ ID NO: 378129 - DNA, 15 bp, Homo sapiens
gtgaattggccagtt

SEQ ID NO: 378130 - DNA, 15 bp, Homo sapiens
ggtgaattggccagt

SEQ ID NO: 378131 - DNA, 15 bp, Homo sapiens
tggtgaattggccag

SEQ ID NO: 378132 - DNA, 15 bp, Homo sapiens
atggtgaattggcca

SEQ ID NO: 378133 - DNA, 15 bp, Homo sapiens
tatggtgaattggcc

SEQ ID NO: 378134 - DNA, 15 bp, Homo sapiens
ttatggtgaattggc

SEQ ID NO: 378135 - DNA, 15 bp, Homo sapiens
gttatggtgaattgg

SEQ ID NO: 378136 - DNA, 15 bp, Homo sapiens
ggttatggtgaattg

SEQ ID NO: 378137 - DNA, 15 bp, Homo sapiens
tggttatggtgaatt

SEQ ID NO: 378138 - DNA, 15 bp, Homo sapiens
ttggttatggtgaat

SEQ ID NO: 378139 - DNA, 15 bp, Homo sapiens
attggttatggtgaa

SEQ ID NO: 378140 - DNA, 15 bp, Homo sapiens
aattggttatggtga

SEQ ID NO: 378141 - DNA, 15 bp, Homo sapiens
aaattggttatggtg

SEQ ID NO: 378142 - DNA, 15 bp, Homo sapiens
gaaattggttatggt

SEQ ID NO: 378143 - DNA, 15 bp, Homo sapiens
ggaaattggttatgg

SEQ ID NO: 378144 - DNA, 15 bp, Homo sapiens
gggaaattggttatg

SEQ ID NO: 378145 - DNA, 15 bp, Homo sapiens
agggaaattggttat

SEQ ID NO: 378146 - DNA, 15 bp, Homo sapiens
aagggaaattggtta

SEQ ID NO: 378147 - DNA, 15 bp, Homo sapiens
taagggaaattggtt

SEQ ID NO: 378148 - DNA, 15 bp, Homo sapiens
ataagggaaattggt

SEQ ID NO: 378149 - DNA, 15 bp, Homo sapiens
cataagggaaattgg

SEQ ID NO: 378150 - DNA, 15 bp, Homo sapiens
ccataagggaaattg

SEQ ID NO: 378151 - DNA, 15 bp, Homo sapiens
tccataagggaaatt

SEQ ID NO: 378152 - DNA, 15 bp, Homo sapiens
atccataagggaaat

SEQ ID NO: 378153 - DNA, 15 bp, Homo sapiens
catccataagggaaa

SEQ ID NO: 378154 - DNA, 15 bp, Homo sapiens
ccatccataagggaa

SEQ ID NO: 378155 - DNA, 15 bp, Homo sapiens
tccatccataaggga

SEQ ID NO: 378156 - DNA, 15 bp, Homo sapiens
gtccatccataaggg

SEQ ID NO: 378157 - DNA, 15 bp, Homo sapiens
agtccatccataagg

SEQ ID NO: 378158 - DNA, 15 bp, Homo sapiens
tagtccatccataag

SEQ ID NO: 378159 - DNA, 15 bp, Homo sapiens
ctagtccatccataa

SEQ ID NO: 378160 - DNA, 15 bp, Homo sapiens
cctagtccatccata

SEQ ID NO: 378161 - DNA, 15 bp, Homo sapiens
gcctagtccatccat

SEQ ID NO: 378162 - DNA, 15 bp, Homo sapiens
agcctagtccatcca

SEQ ID NO: 378163 - DNA, 15 bp, Homo sapiens
cagcctagtccatcc

SEQ ID NO: 378164 - DNA, 15 bp, Homo sapiens
ccagcctagtccatc

SEQ ID NO: 378165 - DNA, 15 bp, Homo sapiens
accagcctagtccat

SEQ ID NO: 378166 - DNA, 15 bp, Homo sapiens
taccagcctagtcca

SEQ ID NO: 378167 - DNA, 15 bp, Homo sapiens
ataccagcctagtcc

SEQ ID NO: 378168 - DNA, 15 bp, Homo sapiens
tataccagcctagtc

SEQ ID NO: 378169 - DNA, 15 bp, Homo sapiens
atataccagcctagt

SEQ ID NO: 378170 - DNA, 15 bp, Homo sapiens
tatataccagcctag

SEQ ID NO: 378171 - DNA, 15 bp, Homo sapiens
gtatataccagccta

SEQ ID NO: 378172 - DNA, 15 bp, Homo sapiens
tgtatataccagcct

SEQ ID NO: 378173 - DNA, 15 bp, Homo sapiens
atgtatataccagcc

SEQ ID NO: 378174 - DNA, 15 bp, Homo sapiens
tatgtatataccagc

SEQ ID NO: 378175 - DNA, 15 bp, Homo sapiens
atatgtatataccag

SEQ ID NO: 378176 - DNA, 15 bp, Homo sapiens
aatatgtatatacca

SEQ ID NO: 378177 - DNA, 15 bp, Homo sapiens
aaatatgtatatacc

SEQ ID NO: 378178 - DNA, 15 bp, Homo sapiens
caaatatgtatatac

SEQ ID NO: 378179 - DNA, 15 bp, Homo sapiens
tcaaatatgtatata

SEQ ID NO: 378180 - DNA, 15 bp, Homo sapiens
ttcaaatatgtatat

SEQ ID NO: 378181 - DNA, 15 bp, Homo sapiens
tttcaaatatgtata

SEQ ID NO: 378182 - DNA, 15 bp, Homo sapiens
ttttcaaatatgtat

SEQ ID NO: 378183 - DNA, 15 bp, Homo sapiens
cttttcaaatatgta

SEQ ID NO: 378184 - DNA, 15 bp, Homo sapiens
acttttcaaatatgt

SEQ ID NO: 378185 - DNA, 15 bp, Homo sapiens
aacttttcaaatatg

SEQ ID NO: 378186 - DNA, 15 bp, Homo sapiens
aaacttttcaaatat

SEQ ID NO: 378187 - DNA, 15 bp, Homo sapiens
aaaacttttcaaata

SEQ ID NO: 378188 - DNA, 15 bp, Homo sapiens
taaaacttttcaaat

SEQ ID NO: 378189 - DNA, 15 bp, Homo sapiens
gtaaaacttttcaaa

SEQ ID NO: 378190 - DNA, 15 bp, Homo sapiens
agtaaaacttttcaa

SEQ ID NO: 378191 - DNA, 15 bp, Homo sapiens
aagtaaaacttttca

SEQ ID NO: 378192 - DNA, 15 bp, Homo sapiens
gaagtaaaacttttc

SEQ ID NO: 378193 - DNA, 15 bp, Homo sapiens
tgaagtaaaactttt

SEQ ID NO: 378194 - DNA, 15 bp, Homo sapiens
ttgaagtaaaacttt

SEQ ID NO: 378195 - DNA, 15 bp, Homo sapiens
tttgaagtaaaactt

SEQ ID NO: 378196 - DNA, 15 bp, Homo sapiens
ctttgaagtaaaact

SEQ ID NO: 378197 - DNA, 15 bp, Homo sapiens
tctttgaagtaaaac

SEQ ID NO: 378198 - DNA, 15 bp, Homo sapiens
ttctttgaagtaaaa

SEQ ID NO: 378199 - DNA, 15 bp, Homo sapiens
attctttgaagtaaa

SEQ ID NO: 378200 - DNA, 15 bp, Homo sapiens
aattctttgaagtaa

SEQ ID NO: 378201 - DNA, 15 bp, Homo sapiens
gaattctttgaagta

SEQ ID NO: 378202 - DNA, 15 bp, Homo sapiens
ggaattctttgaagt

SEQ ID NO: 378203 - DNA, 15 bp, Homo sapiens
tggaattctttgaag

SEQ ID NO: 378204 - DNA, 15 bp, Homo sapiens
atggaattctttgaa

SEQ ID NO: 378205 - DNA, 15 bp, Homo sapiens
gatggaattctttga

SEQ ID NO: 378206 - DNA, 15 bp, Homo sapiens
cgatggaattctttg

SEQ ID NO: 378207 - DNA, 15 bp, Homo sapiens
tcgatggaattcttt

SEQ ID NO: 378208 - DNA, 15 bp, Homo sapiens
ttcgatggaattctt

SEQ ID NO: 378209 - DNA, 15 bp, Homo sapiens
attcgatggaattct

SEQ ID NO: 378210 - DNA, 15 bp, Homo sapiens
tattcgatggaattc

SEQ ID NO: 378211 - DNA, 15 bp, Homo sapiens
ctattcgatggaatt

SEQ ID NO: 378212 - DNA, 15 bp, Homo sapiens
tctattcgatggaat

SEQ ID NO: 378213 - DNA, 15 bp, Homo sapiens
ttctattcgatggaa

SEQ ID NO: 378214 - DNA, 15 bp, Homo sapiens
attctattcgatgga

SEQ ID NO: 378215 - DNA, 15 bp, Homo sapiens
tattctattcgatgg

SEQ ID NO: 378216 - DNA, 15 bp, Homo sapiens
ctattctattcgatg

SEQ ID NO: 378217 - DNA, 15 bp, Homo sapiens
cctattctattcgat

SEQ ID NO: 378218 - DNA, 15 bp, Homo sapiens
ccctattctattcga

SEQ ID NO: 378219 - DNA, 15 bp, Homo sapiens
cccctattctattcg

SEQ ID NO: 378220 - DNA, 15 bp, Homo sapiens
acccctattctattc

SEQ ID NO: 378221 - DNA, 15 bp, Homo sapiens
tacccctattctatt

SEQ ID NO: 378222 - DNA, 15 bp, Homo sapiens
ttacccctattctat

SEQ ID NO: 378223 - DNA, 15 bp, Homo sapiens
tttacccctattcta

SEQ ID NO: 378224 - DNA, 15 bp, Homo sapiens
ttttacccctattct

SEQ ID NO: 378225 - DNA, 15 bp, Homo sapiens
cttttacccctattc

SEQ ID NO: 378226 - DNA, 15 bp, Homo sapiens
ccttttacccctatt

SEQ ID NO: 378227 - DNA, 15 bp, Homo sapiens
cccttttacccctat

SEQ ID NO: 378228 - DNA, 15 bp, Homo sapiens
tcccttttaccccta

SEQ ID NO: 378229 - DNA, 15 bp, Homo sapiens
ctcccttttacccct

SEQ ID NO: 378230 - DNA, 15 bp, Homo sapiens
cctcccttttacccc

SEQ ID NO: 378231 - DNA, 15 bp, Homo sapiens
tcctcccttttaccc

SEQ ID NO: 378232 - DNA, 15 bp, Homo sapiens
ctcctcccttttacc

SEQ ID NO: 378233 - DNA, 15 bp, Homo sapiens
cctcctcccttttac

SEQ ID NO: 378234 - DNA, 15 bp, Homo sapiens
tcctcctccctttta

SEQ ID NO: 378235 - DNA, 15 bp, Homo sapiens
ttcctcctccctttt

SEQ ID NO: 378236 - DNA, 15 bp, Homo sapiens
tttcctcctcccttt

SEQ ID NO: 378237 - DNA, 15 bp, Homo sapiens
ttttcctcctccctt

SEQ ID NO: 378238 - DNA, 15 bp, Homo sapiens
gttttcctcctccct

SEQ ID NO: 378239 - DNA, 15 bp, Homo sapiens
tgttttcctcctccc

SEQ ID NO: 378240 - DNA, 15 bp, Homo sapiens
atgttttcctcctcc

SEQ ID NO: 378241 - DNA, 15 bp, Homo sapiens
catgttttcctcctc

SEQ ID NO: 378242 - DNA, 15 bp, Homo sapiens
acatgttttcctcct

SEQ ID NO: 378243 - DNA, 15 bp, Homo sapiens
gacatgttttcctcc

SEQ ID NO: 378244 - DNA, 15 bp, Homo sapiens
tgacatgttttcctc

SEQ ID NO: 378245 - DNA, 15 bp, Homo sapiens
gtgacatgttttcct

SEQ ID NO: 378246 - DNA, 15 bp, Homo sapiens
tgtgacatgttttcc

SEQ ID NO: 378247 - DNA, 15 bp, Homo sapiens
ctgtgacatgttttc

SEQ ID NO: 378248 - DNA, 15 bp, Homo sapiens
gctgtgacatgtttt

SEQ ID NO: 378249 - DNA, 15 bp, Homo sapiens
agctgtgacatgttt

SEQ ID NO: 378250 - DNA, 15 bp, Homo sapiens
cagctgtgacatgtt

SEQ ID NO: 378251 - DNA, 15 bp, Homo sapiens
acagctgtgacatgt

SEQ ID NO: 378252 - DNA, 15 bp, Homo sapiens
tacagctgtgacatg

SEQ ID NO: 378253 - DNA, 15 bp, Homo sapiens
gtacagctgtgacat

SEQ ID NO: 378254 - DNA, 15 bp, Homo sapiens
ggtacagctgtgaca

SEQ ID NO: 378255 - DNA, 15 bp, Homo sapiens
tggtacagctgtgac

SEQ ID NO: 378256 - DNA, 15 bp, Homo sapiens
atggtacagctgtga

SEQ ID NO: 378257 - DNA, 15 bp, Homo sapiens
gatggtacagctgtg

SEQ ID NO: 378258 - DNA, 15 bp, Homo sapiens
agatggtacagctgt

SEQ ID NO: 378259 - DNA, 15 bp, Homo sapiens
gagatggtacagctg

SEQ ID NO: 378260 - DNA, 15 bp, Homo sapiens
agagatggtacagct

SEQ ID NO: 378261 - DNA, 15 bp, Homo sapiens
tagagatggtacagc

SEQ ID NO: 378262 - DNA, 15 bp, Homo sapiens
ttagagatggtacag

SEQ ID NO: 378263 - DNA, 15 bp, Homo sapiens
tttagagatggtaca

SEQ ID NO: 378264 - DNA, 15 bp, Homo sapiens
ttttagagatggtac

SEQ ID NO: 378265 - DNA, 15 bp, Homo sapiens
tttttagagatggta

SEQ ID NO: 378266 - DNA, 15 bp, Homo sapiens
ctttttagagatggt

SEQ ID NO: 378267 - DNA, 15 bp, Homo sapiens
cctttttagagatgg

SEQ ID NO: 378268 - DNA, 15 bp, Homo sapiens
acctttttagagatg

SEQ ID NO: 378269 - DNA, 15 bp, Homo sapiens
cacctttttagagat

SEQ ID NO: 378270 - DNA, 15 bp, Homo sapiens
acacctttttagaga

SEQ ID NO: 378271 - DNA, 15 bp, Homo sapiens
aacacctttttagag

SEQ ID NO: 378272 - DNA, 15 bp, Homo sapiens
aaacacctttttaga

SEQ ID NO: 378273 - DNA, 15 bp, Homo sapiens
aaaacacctttttag

SEQ ID NO: 378274 - DNA, 15 bp, Homo sapiens
aaaaacaccttttta

SEQ ID NO: 378275 - DNA, 15 bp, Homo sapiens
taaaaacaccttttt

SEQ ID NO: 378276 - DNA, 15 bp, Homo sapiens
ataaaaacacctttt

SEQ ID NO: 378277 - DNA, 15 bp, Homo sapiens
cataaaaacaccttt

SEQ ID NO: 378278 - DNA, 15 bp, Homo sapiens
ccataaaaacacctt

SEQ ID NO: 378279 - DNA, 15 bp, Homo sapiens
accataaaaacacct

SEQ ID NO: 378280 - DNA, 15 bp, Homo sapiens
caccataaaaacacc

SEQ ID NO: 378281 - DNA, 15 bp, Homo sapiens
tcaccataaaaacac

SEQ ID NO: 378282 - DNA, 15 bp, Homo sapiens
ttcaccataaaaaca

SEQ ID NO: 378283 - DNA, 15 bp, Homo sapiens
attcaccataaaaac

SEQ ID NO: 378284 - DNA, 15 bp, Homo sapiens
cattcaccataaaaa

SEQ ID NO: 378285 - DNA, 15 bp, Homo sapiens
acattcaccataaaa

SEQ ID NO: 378286 - DNA, 15 bp, Homo sapiens
aacattcaccataaa

SEQ ID NO: 378287 - DNA, 15 bp, Homo sapiens
aaacattcaccataa

SEQ ID NO: 378288 - DNA, 15 bp, Homo sapiens
aaaacattcaccata

SEQ ID NO: 378289 - DNA, 15 bp, Homo sapiens
caaaacattcaccat

SEQ ID NO: 378290 - DNA, 15 bp, Homo sapiens
ccaaaacattcacca

SEQ ID NO: 378291 - DNA, 15 bp, Homo sapiens
tccaaaacattcacc

SEQ ID NO: 378292 - DNA, 15 bp, Homo sapiens
atccaaaacattcac

SEQ ID NO: 378293 - DNA, 15 bp, Homo sapiens
aatccaaaacattca

SEQ ID NO: 378294 - DNA, 15 bp, Homo sapiens
aaatccaaaacattc

SEQ ID NO: 378295 - DNA, 15 bp, Homo sapiens
taaatccaaaacatt

SEQ ID NO: 378296 - DNA, 15 bp, Homo sapiens
ctaaatccaaaacat

SEQ ID NO: 378297 - DNA, 15 bp, Homo sapiens
tctaaatccaaaaca

SEQ ID NO: 378298 - DNA, 15 bp, Homo sapiens
atctaaatccaaaac

SEQ ID NO: 378299 - DNA, 15 bp, Homo sapiens
aatctaaatccaaaa

SEQ ID NO: 378300 - DNA, 15 bp, Homo sapiens
aaatctaaatccaaa

SEQ ID NO: 378301 - DNA, 15 bp, Homo sapiens
aaaatctaaatccaa

SEQ ID NO: 378302 - DNA, 15 bp, Homo sapiens
caaaatctaaatcca

SEQ ID NO: 378303 - DNA, 15 bp, Homo sapiens
ccaaaatctaaatcc

SEQ ID NO: 378304 - DNA, 15 bp, Homo sapiens
tccaaaatctaaatc

SEQ ID NO: 378305 - DNA, 15 bp, Homo sapiens
atccaaaatctaaat

SEQ ID NO: 378306 - DNA, 15 bp, Homo sapiens
gatccaaaatctaaa

SEQ ID NO: 378307 - DNA, 15 bp, Homo sapiens
ggatccaaaatctaa

SEQ ID NO: 378308 - DNA, 15 bp, Homo sapiens
gggatccaaaatcta

SEQ ID NO: 378309 - DNA, 15 bp, Homo sapiens
ggggatccaaaatct

SEQ ID NO: 378310 - DNA, 15 bp, Homo sapiens
gggggatccaaaatc

SEQ ID NO: 378311 - DNA, 15 bp, Homo sapiens
cgggggatccaaaat

SEQ ID NO: 378312 - DNA, 15 bp, Homo sapiens
acgggggatccaaaa

SEQ ID NO: 378313 - DNA, 15 bp, Homo sapiens
gacgggggatccaaa

SEQ ID NO: 378314 - DNA, 15 bp, Homo sapiens
ggacgggggatccaa

SEQ ID NO: 378315 - DNA, 15 bp, Homo sapiens
gggacgggggatcca

SEQ ID NO: 378316 - DNA, 15 bp, Homo sapiens
ggggacgggggatcc

SEQ ID NO: 378317 - DNA, 15 bp, Homo sapiens
aggggacgggggatc

SEQ ID NO: 378318 - DNA, 15 bp, Homo sapiens
gaggggacgggggat

SEQ ID NO: 378319 - DNA, 15 bp, Homo sapiens
tgaggggacggggga

SEQ ID NO: 378320 - DNA, 15 bp, Homo sapiens
ttgaggggacggggg

SEQ ID NO: 378321 - DNA, 15 bp, Homo sapiens
cttgaggggacgggg

SEQ ID NO: 378322 - DNA, 15 bp, Homo sapiens
gcttgaggggacggg

SEQ ID NO: 378323 - DNA, 15 bp, Homo sapiens
tgcttgaggggacgg

SEQ ID NO: 378324 - DNA, 15 bp, Homo sapiens
atgcttgaggggacg

SEQ ID NO: 378325 - DNA, 15 bp, Homo sapiens
catgcttgaggggac

SEQ ID NO: 378326 - DNA, 15 bp, Homo sapiens
tcatgcttgagggga

SEQ ID NO: 378327 - DNA, 15 bp, Homo sapiens
atcatgcttgagggg

SEQ ID NO: 378328 - DNA, 15 bp, Homo sapiens
tatcatgcttgaggg

SEQ ID NO: 378329 - DNA, 15 bp, Homo sapiens
ctatcatgcttgagg

SEQ ID NO: 378330 - DNA, 15 bp, Homo sapiens
actatcatgcttgag

SEQ ID NO: 378331 - DNA, 15 bp, Homo sapiens
aactatcatgcttga

SEQ ID NO: 378332 - DNA, 15 bp, Homo sapiens
aaactatcatgcttg

SEQ ID NO: 378333 - DNA, 15 bp, Homo sapiens
aaaactatcatgctt

SEQ ID NO: 378334 - DNA, 15 bp, Homo sapiens
caaaactatcatgct

SEQ ID NO: 378335 - DNA, 15 bp, Homo sapiens
ccaaaactatcatgc

SEQ ID NO: 378336 - DNA, 15 bp, Homo sapiens
tccaaaactatcatg

SEQ ID NO: 378337 - DNA, 15 bp, Homo sapiens
atccaaaactatcat

SEQ ID NO: 378338 - DNA, 15 bp, Homo sapiens
tatccaaaactatca

SEQ ID NO: 378339 - DNA, 15 bp, Homo sapiens
atatccaaaactatc

SEQ ID NO: 378340 - DNA, 15 bp, Homo sapiens
aatatccaaaactat

SEQ ID NO: 378341 - DNA, 15 bp, Homo sapiens
aaatatccaaaacta

SEQ ID NO: 378342 - DNA, 15 bp, Homo sapiens
caaatatccaaaact

SEQ ID NO: 378343 - DNA, 15 bp, Homo sapiens
gcaaatatccaaaac

SEQ ID NO: 378344 - DNA, 15 bp, Homo sapiens
agcaaatatccaaaa

SEQ ID NO: 378345 - DNA, 15 bp, Homo sapiens
aagcaaatatccaaa

SEQ ID NO: 378346 - DNA, 15 bp, Homo sapiens
caagcaaatatccaa

SEQ ID NO: 378347 - DNA, 15 bp, Homo sapiens
gcaagcaaatatcca

SEQ ID NO: 378348 - DNA, 15 bp, Homo sapiens
agcaagcaaatatcc

SEQ ID NO: 378349 - DNA, 15 bp, Homo sapiens
cagcaagcaaatatc

SEQ ID NO: 378350 - DNA, 15 bp, Homo sapiens
acagcaagcaaatat

SEQ ID NO: 378351 - DNA, 15 bp, Homo sapiens
cacagcaagcaaata

SEQ ID NO: 378352 - DNA, 15 bp, Homo sapiens
acacagcaagcaaat

SEQ ID NO: 378353 - DNA, 15 bp, Homo sapiens
cacacagcaagcaaa

SEQ ID NO: 378354 - DNA, 15 bp, Homo sapiens
tcacacagcaagcaa

SEQ ID NO: 378355 - DNA, 15 bp, Homo sapiens
ttcacacagcaagca

SEQ ID NO: 378356 - DNA, 15 bp, Homo sapiens
attcacacagcaagc

SEQ ID NO: 378357 - DNA, 15 bp, Homo sapiens
aattcacacagcaag

SEQ ID NO: 378358 - DNA, 15 bp, Homo sapiens
caattcacacagcaa

SEQ ID NO: 378359 - DNA, 15 bp, Homo sapiens
tcaattcacacagca

SEQ ID NO: 378360 - DNA, 15 bp, Homo sapiens
gtcaattcacacagc

SEQ ID NO: 378361 - DNA, 15 bp, Homo sapiens
tgtcaattcacacag

SEQ ID NO: 378362 - DNA, 15 bp, Homo sapiens
ttgtcaattcacaca

SEQ ID NO: 378363 - DNA, 15 bp, Homo sapiens
cttgtcaattcacac

SEQ ID NO: 378364 - DNA, 15 bp, Homo sapiens
gcttgtcaattcaca

SEQ ID NO: 378365 - DNA, 15 bp, Homo sapiens
tgcttgtcaattcac

SEQ ID NO: 378366 - DNA, 15 bp, Homo sapiens
gtgcttgtcaattca

SEQ ID NO: 378367 - DNA, 15 bp, Homo sapiens
agtgcttgtcaattc

SEQ ID NO: 378368 - DNA, 15 bp, Homo sapiens
aagtgcttgtcaatt

SEQ ID NO: 378369 - DNA, 15 bp, Homo sapiens
aaagtgcttgtcaat

SEQ ID NO: 378370 - DNA, 15 bp, Homo sapiens
aaaagtgcttgtcaa

SEQ ID NO: 378371 - DNA, 15 bp, Homo sapiens
taaaagtgcttgtca

SEQ ID NO: 378372 - DNA, 15 bp, Homo sapiens
gtaaaagtgcttgtc

SEQ ID NO: 378373 - DNA, 15 bp, Homo sapiens
agtaaaagtgcttgt

SEQ ID NO: 378374 - DNA, 15 bp, Homo sapiens
cagtaaaagtgcttg

SEQ ID NO: 378375 - DNA, 15 bp, Homo sapiens
tcagtaaaagtgctt

SEQ ID NO: 378376 - DNA, 15 bp, Homo sapiens
gtcagtaaaagtgct

SEQ ID NO: 378377 - DNA, 15 bp, Homo sapiens
tgtcagtaaaagtgc

SEQ ID NO: 378378 - DNA, 15 bp, Homo sapiens
ttgtcagtaaaagtg

SEQ ID NO: 378379 - DNA, 15 bp, Homo sapiens
tttgtcagtaaaagt

SEQ ID NO: 378380 - DNA, 15 bp, Homo sapiens
atttgtcagtaaaag

SEQ ID NO: 378381 - DNA, 15 bp, Homo sapiens
catttgtcagtaaaa

SEQ ID NO: 378382 - DNA, 15 bp, Homo sapiens
ccatttgtcagtaaa

SEQ ID NO: 378383 - DNA, 15 bp, Homo sapiens
accatttgtcagtaa

SEQ ID NO: 378384 - DNA, 15 bp, Homo sapiens
caccatttgtcagta

SEQ ID NO: 378385 - DNA, 15 bp, Homo sapiens
tcaccatttgtcagt

SEQ ID NO: 378386 - DNA, 15 bp, Homo sapiens
ctcaccatttgtcag

SEQ ID NO: 378387 - DNA, 15 bp, Homo sapiens
cctcaccatttgtca

SEQ ID NO: 378388 - DNA, 15 bp, Homo sapiens
gcctcaccatttgtc

SEQ ID NO: 378389 - DNA, 15 bp, Homo sapiens
agcctcaccatttgt

SEQ ID NO: 378390 - DNA, 15 bp, Homo sapiens
gagcctcaccatttg

SEQ ID NO: 378391 - DNA, 15 bp, Homo sapiens
tgagcctcaccattt

SEQ ID NO: 378392 - DNA, 15 bp, Homo sapiens
ctgagcctcaccatt

SEQ ID NO: 378393 - DNA, 15 bp, Homo sapiens
actgagcctcaccat

SEQ ID NO: 378394 - DNA, 15 bp, Homo sapiens
gactgagcctcacca

SEQ ID NO: 378395 - DNA, 15 bp, Homo sapiens
tgactgagcctcacc

SEQ ID NO: 378396 - DNA, 15 bp, Homo sapiens
ctgactgagcctcac

SEQ ID NO: 378397 - DNA, 15 bp, Homo sapiens
tctgactgagcctca

SEQ ID NO: 378398 - DNA, 15 bp, Homo sapiens
ttctgactgagcctc

SEQ ID NO: 378399 - DNA, 15 bp, Homo sapiens
gttctgactgagcct

SEQ ID NO: 378400 - DNA, 15 bp, Homo sapiens
ggttctgactgagcc

SEQ ID NO: 378401 - DNA, 15 bp, Homo sapiens
aggttctgactgagc

SEQ ID NO: 378402 - DNA, 15 bp, Homo sapiens
gaggttctgactgag

SEQ ID NO: 378403 - DNA, 15 bp, Homo sapiens
ggaggttctgactga

SEQ ID NO: 378404 - DNA, 15 bp, Homo sapiens
tggaggttctgactg

SEQ ID NO: 378405 - DNA, 15 bp, Homo sapiens
gtggaggttctgact

SEQ ID NO: 378406 - DNA, 15 bp, Homo sapiens
ggtggaggttctgac

SEQ ID NO: 378407 - DNA, 15 bp, Homo sapiens
gggtggaggttctga

SEQ ID NO: 378408 - DNA, 15 bp, Homo sapiens
agggtggaggttctg

SEQ ID NO: 378409 - DNA, 15 bp, Homo sapiens
gagggtggaggttct

SEQ ID NO: 378410 - DNA, 15 bp, Homo sapiens
ggagggtggaggttc

SEQ ID NO: 378411 - DNA, 15 bp, Homo sapiens
gggagggtggaggtt

SEQ ID NO: 378412 - DNA, 15 bp, Homo sapiens
ggggagggtggaggt

SEQ ID NO: 378413 - DNA, 15 bp, Homo sapiens
gggggagggtggagg

SEQ ID NO: 378414 - DNA, 15 bp, Homo sapiens
tgggggagggtggag

SEQ ID NO: 378415 - DNA, 15 bp, Homo sapiens
gtgggggagggtgga

SEQ ID NO: 378416 - DNA, 15 bp, Homo sapiens
tgtgggggagggtgg

SEQ ID NO: 378417 - DNA, 15 bp, Homo sapiens
gtgtgggggagggtg

SEQ ID NO: 378418 - DNA, 15 bp, Homo sapiens
ggtgtgggggagggt

SEQ ID NO: 378419 - DNA, 15 bp, Homo sapiens
tggtgtgggggaggg

SEQ ID NO: 378420 - DNA, 15 bp, Homo sapiens
ttggtgtgggggagg

SEQ ID NO: 378421 - DNA, 15 bp, Homo sapiens
tttggtgtgggggag

SEQ ID NO: 378422 - DNA, 15 bp, Homo sapiens
ctttggtgtggggga

SEQ ID NO: 378423 - DNA, 15 bp, Homo sapiens
tctttggtgtggggg

SEQ ID NO: 378424 - DNA, 15 bp, Homo sapiens
gtctttggtgtgggg

SEQ ID NO: 378425 - DNA, 15 bp, Homo sapiens
tgtctttggtgtggg

SEQ ID NO: 378426 - DNA, 15 bp, Homo sapiens
ctgtctttggtgtgg

SEQ ID NO: 378427 - DNA, 15 bp, Homo sapiens
cctgtctttggtgtg

SEQ ID NO: 378428 - DNA, 15 bp, Homo sapiens
ccctgtctttggtgt

SEQ ID NO: 378429 - DNA, 15 bp, Homo sapiens
cccctgtctttggtg

SEQ ID NO: 378430 - DNA, 15 bp, Homo sapiens
gcccctgtctttggt

SEQ ID NO: 378431 - DNA, 15 bp, Homo sapiens
tgcccctgtctttgg

SEQ ID NO: 378432 - DNA, 15 bp, Homo sapiens
ctgcccctgtctttg

SEQ ID NO: 378433 - DNA, 15 bp, Homo sapiens
gctgcccctgtcttt

SEQ ID NO: 378434 - DNA, 15 bp, Homo sapiens
cgctgcccctgtctt

SEQ ID NO: 378435 - DNA, 15 bp, Homo sapiens
acgctgcccctgtct

SEQ ID NO: 378436 - DNA, 15 bp, Homo sapiens
tacgctgcccctgtc

SEQ ID NO: 378437 - DNA, 15 bp, Homo sapiens
ctacgctgcccctgt

SEQ ID NO: 378438 - DNA, 15 bp, Homo sapiens
actacgctgcccctg

SEQ ID NO: 378439 - DNA, 15 bp, Homo sapiens
tactacgctgcccct

SEQ ID NO: 378440 - DNA, 15 bp, Homo sapiens
atactacgctgcccc

SEQ ID NO: 378441 - DNA, 15 bp, Homo sapiens
aatactacgctgccc

SEQ ID NO: 378442 - DNA, 15 bp, Homo sapiens
gaatactacgctgcc

SEQ ID NO: 378443 - DNA, 15 bp, Homo sapiens
tgaatactacgctgc

SEQ ID NO: 378444 - DNA, 15 bp, Homo sapiens
ttgaatactacgctg

SEQ ID NO: 378445 - DNA, 15 bp, Homo sapiens
tttgaatactacgct

SEQ ID NO: 378446 - DNA, 15 bp, Homo sapiens
gtttgaatactacgc

SEQ ID NO: 378447 - DNA, 15 bp, Homo sapiens
ggtttgaatactacg

SEQ ID NO: 378448 - DNA, 15 bp, Homo sapiens
tggtttgaatactac

SEQ ID NO: 378449 - DNA, 15 bp, Homo sapiens
ctggtttgaatacta

SEQ ID NO: 378450 - DNA, 15 bp, Homo sapiens
actggtttgaatact

SEQ ID NO: 378451 - DNA, 15 bp, Homo sapiens
tactggtttgaatac

SEQ ID NO: 378452 - DNA, 15 bp, Homo sapiens
atactggtttgaata

SEQ ID NO: 378453 - DNA, 15 bp, Homo sapiens
aatactggtttgaat

SEQ ID NO: 378454 - DNA, 15 bp, Homo sapiens
caatactggtttgaa

SEQ ID NO: 378455 - DNA, 15 bp, Homo sapiens
acaatactggtttga

SEQ ID NO: 378456 - DNA, 15 bp, Homo sapiens
cacaatactggtttg

SEQ ID NO: 378457 - DNA, 15 bp, Homo sapiens
ccacaatactggttt

SEQ ID NO: 378458 - DNA, 15 bp, Homo sapiens
accacaatactggtt

SEQ ID NO: 378459 - DNA, 15 bp, Homo sapiens
caccacaatactggt

SEQ ID NO: 378460 - DNA, 15 bp, Homo sapiens
ccaccacaatactgg

SEQ ID NO: 378461 - DNA, 15 bp, Homo sapiens
cccaccacaatactg

SEQ ID NO: 378462 - DNA, 15 bp, Homo sapiens
ccccaccacaatact

SEQ ID NO: 378463 - DNA, 15 bp, Homo sapiens
tccccaccacaatac

SEQ ID NO: 378464 - DNA, 15 bp, Homo sapiens
ttccccaccacaata

SEQ ID NO: 378465 - DNA, 15 bp, Homo sapiens
attccccaccacaat

SEQ ID NO: 378466 - DNA, 15 bp, Homo sapiens
tattccccaccacaa

SEQ ID NO: 378467 - DNA, 15 bp, Homo sapiens
ttattccccaccaca

SEQ ID NO: 378468 - DNA, 15 bp, Homo sapiens
attattccccaccac

SEQ ID NO: 378469 - DNA, 15 bp, Homo sapiens
aattattccccacca

SEQ ID NO: 378470 - DNA, 15 bp, Homo sapiens
caattattccccacc

SEQ ID NO: 378471 - DNA, 15 bp, Homo sapiens
acaattattccccac

SEQ ID NO: 378472 - DNA, 15 bp, Homo sapiens
tacaattattcccca

SEQ ID NO: 378473 - DNA, 15 bp, Homo sapiens
atacaattattcccc

SEQ ID NO: 378474 - DNA, 15 bp, Homo sapiens
tatacaattattccc

SEQ ID NO: 378475 - DNA, 15 bp, Homo sapiens
gtatacaattattcc

SEQ ID NO: 378476 - DNA, 15 bp, Homo sapiens
tgtatacaattattc

SEQ ID NO: 378477 - DNA, 15 bp, Homo sapiens
atgtatacaattatt

SEQ ID NO: 378478 - DNA, 15 bp, Homo sapiens
catgtatacaattat

SEQ ID NO: 378479 - DNA, 15 bp, Homo sapiens
acatgtatacaatta

SEQ ID NO: 378480 - DNA, 15 bp, Homo sapiens
tacatgtatacaatt

SEQ ID NO: 378481 - DNA, 15 bp, Homo sapiens
ttacatgtatacaat

SEQ ID NO: 378482 - DNA, 15 bp, Homo sapiens
tttacatgtatacaa

SEQ ID NO: 378483 - DNA, 15 bp, Homo sapiens
atttacatgtataca

SEQ ID NO: 378484 - DNA, 15 bp, Homo sapiens
aatttacatgtatac

SEQ ID NO: 378485 - DNA, 15 bp, Homo sapiens
taatttacatgtata

SEQ ID NO: 378486 - DNA, 15 bp, Homo sapiens
ataatttacatgtat

SEQ ID NO: 378487 - DNA, 15 bp, Homo sapiens
gataatttacatgta

SEQ ID NO: 378488 - DNA, 15 bp, Homo sapiens
tgataatttacatgt

SEQ ID NO: 378489 - DNA, 15 bp, Homo sapiens
ttgataatttacatg

SEQ ID NO: 378490 - DNA, 15 bp, Homo sapiens
cttgataatttacat

SEQ ID NO: 378491 - DNA, 15 bp, Homo sapiens
gcttgataatttaca

SEQ ID NO: 378492 - DNA, 15 bp, Homo sapiens
ggcttgataatttac

SEQ ID NO: 378493 - DNA, 15 bp, Homo sapiens
gggcttgataattta

SEQ ID NO: 378494 - DNA, 15 bp, Homo sapiens
agggcttgataattt

SEQ ID NO: 378495 - DNA, 15 bp, Homo sapiens
tagggcttgataatt

SEQ ID NO: 378496 - DNA, 15 bp, Homo sapiens
atagggcttgataat

SEQ ID NO: 378497 - DNA, 15 bp, Homo sapiens
catagggcttgataa

SEQ ID NO: 378498 - DNA, 15 bp, Homo sapiens
tcatagggcttgata

SEQ ID NO: 378499 - DNA, 15 bp, Homo sapiens
ctcatagggcttgat

SEQ ID NO: 378500 - DNA, 15 bp, Homo sapiens
actcatagggcttga

SEQ ID NO: 378501 - DNA, 15 bp, Homo sapiens
cactcatagggcttg

SEQ ID NO: 378502 - DNA, 15 bp, Homo sapiens
ccactcatagggctt

SEQ ID NO: 378503 - DNA, 15 bp, Homo sapiens
tccactcatagggct

SEQ ID NO: 378504 - DNA, 15 bp, Homo sapiens
ttccactcatagggc

SEQ ID NO: 378505 - DNA, 15 bp, Homo sapiens
cttccactcataggg

SEQ ID NO: 378506 - DNA, 15 bp, Homo sapiens
tcttccactcatagg

SEQ ID NO: 378507 - DNA, 15 bp, Homo sapiens
ttcttccactcatag

SEQ ID NO: 378508 - DNA, 15 bp, Homo sapiens
attcttccactcata

SEQ ID NO: 378509 - DNA, 15 bp, Homo sapiens
aattcttccactcat

SEQ ID NO: 378510 - DNA, 15 bp, Homo sapiens
aaattcttccactca

SEQ ID NO: 378511 - DNA, 15 bp, Homo sapiens
aaaattcttccactc

SEQ ID NO: 378512 - DNA, 15 bp, Homo sapiens
aaaaattcttccact

SEQ ID NO: 378513 - DNA, 15 bp, Homo sapiens
aaaaaattcttccac

SEQ ID NO: 378514 - DNA, 15 bp, Homo sapiens
gaaaaaattcttcca

SEQ ID NO: 378515 - DNA, 15 bp, Homo sapiens
tgaaaaaattcttcc

SEQ ID NO: 378516 - DNA, 15 bp, Homo sapiens
ttgaaaaaattcttc

SEQ ID NO: 378517 - DNA, 15 bp, Homo sapiens
tttgaaaaaattctt

SEQ ID NO: 378518 - DNA, 15 bp, Homo sapiens
atttgaaaaaattct

SEQ ID NO: 378519 - DNA, 15 bp, Homo sapiens
aatttgaaaaaattc

SEQ ID NO: 378520 - DNA, 15 bp, Homo sapiens
taatttgaaaaaatt

SEQ ID NO: 378521 - DNA, 15 bp, Homo sapiens
ataatttgaaaaaat

SEQ ID NO: 378522 - DNA, 15 bp, Homo sapiens
aataatttgaaaaaa

SEQ ID NO: 378523 - DNA, 15 bp, Homo sapiens
aaataatttgaaaaa

SEQ ID NO: 378524 - DNA, 15 bp, Homo sapiens
aaaataatttgaaaa

SEQ ID NO: 378525 - DNA, 15 bp, Homo sapiens
aaaaataatttgaaa

SEQ ID NO: 378526 - DNA, 15 bp, Homo sapiens
caaaaataatttgaa

SEQ ID NO: 378527 - DNA, 15 bp, Homo sapiens
acaaaaataatttga

SEQ ID NO: 378528 - DNA, 15 bp, Homo sapiens
gacaaaaataatttg

SEQ ID NO: 378529 - DNA, 15 bp, Homo sapiens
ggacaaaaataattt

SEQ ID NO: 378530 - DNA, 15 bp, Homo sapiens
gggacaaaaataatt

SEQ ID NO: 378531 - DNA, 15 bp, Homo sapiens
agggacaaaaataat

SEQ ID NO: 378532 - DNA, 15 bp, Homo sapiens
gagggacaaaaataa

SEQ ID NO: 378533 - DNA, 15 bp, Homo sapiens
agagggacaaaaata

SEQ ID NO: 378534 - DNA, 15 bp, Homo sapiens
tagagggacaaaaat

SEQ ID NO: 378535 - DNA, 15 bp, Homo sapiens
atagagggacaaaaa

SEQ ID NO: 378536 - DNA, 15 bp, Homo sapiens
tatagagggacaaaa

SEQ ID NO: 378537 - DNA, 15 bp, Homo sapiens
atatagagggacaaa

SEQ ID NO: 378538 - DNA, 15 bp, Homo sapiens
tatatagagggacaa

SEQ ID NO: 378539 - DNA, 15 bp, Homo sapiens
atatatagagggaca

SEQ ID NO: 378540 - DNA, 15 bp, Homo sapiens
aatatatagagggac

SEQ ID NO: 378541 - DNA, 15 bp, Homo sapiens
caatatatagaggga

SEQ ID NO: 378542 - DNA, 15 bp, Homo sapiens
tcaatatatagaggg

SEQ ID NO: 378543 - DNA, 15 bp, Homo sapiens
atcaatatatagagg

SEQ ID NO: 378544 - DNA, 15 bp, Homo sapiens
aatcaatatatagag

SEQ ID NO: 378545 - DNA, 15 bp, Homo sapiens
aaatcaatatataga

SEQ ID NO: 378546 - DNA, 15 bp, Homo sapiens
taaatcaatatatag

SEQ ID NO: 378547 - DNA, 15 bp, Homo sapiens
ataaatcaatatata

SEQ ID NO: 378548 - DNA, 15 bp, Homo sapiens
tataaatcaatatat

SEQ ID NO: 378549 - DNA, 15 bp, Homo sapiens
atataaatcaatata

SEQ ID NO: 378550 - DNA, 15 bp, Homo sapiens
aatataaatcaatat

SEQ ID NO: 378551 - DNA, 15 bp, Homo sapiens
taatataaatcaata

SEQ ID NO: 378552 - DNA, 15 bp, Homo sapiens
ataatataaatcaat

SEQ ID NO: 378553 - DNA, 15 bp, Homo sapiens
cataatataaatcaa

SEQ ID NO: 378554 - DNA, 15 bp, Homo sapiens
acataatataaatca

SEQ ID NO: 378555 - DNA, 15 bp, Homo sapiens
tacataatataaatc

SEQ ID NO: 378556 - DNA, 15 bp, Homo sapiens
atacataatataaat

SEQ ID NO: 378557 - DNA, 15 bp, Homo sapiens
tatacataatataaa

SEQ ID NO: 378558 - DNA, 15 bp, Homo sapiens
ttatacataatataa

SEQ ID NO: 378559 - DNA, 15 bp, Homo sapiens
gttatacataatata

SEQ ID NO: 378560 - DNA, 15 bp, Homo sapiens
agttatacataatat

SEQ ID NO: 378561 - DNA, 15 bp, Homo sapiens
tagttatacataata

SEQ ID NO: 378562 - DNA, 15 bp, Homo sapiens
atagttatacataat

SEQ ID NO: 378563 - DNA, 15 bp, Homo sapiens
gatagttatacataa

SEQ ID NO: 378564 - DNA, 15 bp, Homo sapiens
agatagttatacata

SEQ ID NO: 378565 - DNA, 15 bp, Homo sapiens
gagatagttatacat

SEQ ID NO: 378566 - DNA, 15 bp, Homo sapiens
agagatagttataca

SEQ ID NO: 378567 - DNA, 15 bp, Homo sapiens
aagagatagttatac

SEQ ID NO: 378568 - DNA, 15 bp, Homo sapiens
aaagagatagttata

SEQ ID NO: 378569 - DNA, 15 bp, Homo sapiens
taaagagatagttat

SEQ ID NO: 378570 - DNA, 15 bp, Homo sapiens
ataaagagatagtta

SEQ ID NO: 378571 - DNA, 15 bp, Homo sapiens
tataaagagatagtt

SEQ ID NO: 378572 - DNA, 15 bp, Homo sapiens
atataaagagatagt

SEQ ID NO: 378573 - DNA, 15 bp, Homo sapiens
tatataaagagatag

SEQ ID NO: 378574 - DNA, 15 bp, Homo sapiens
ttatataaagagata

SEQ ID NO: 378575 - DNA, 15 bp, Homo sapiens
tttatataaagagat

SEQ ID NO: 378576 - DNA, 15 bp, Homo sapiens
gtttatataaagaga

SEQ ID NO: 378577 - DNA, 15 bp, Homo sapiens
agtttatataaagag

SEQ ID NO: 378578 - DNA, 15 bp, Homo sapiens
tagtttatataaaga

SEQ ID NO: 378579 - DNA, 15 bp, Homo sapiens
atagtttatataaag

SEQ ID NO: 378580 - DNA, 15 bp, Homo sapiens
tatagtttatataaa

SEQ ID NO: 378581 - DNA, 15 bp, Homo sapiens
atatagtttatataa

SEQ ID NO: 378582 - DNA, 15 bp, Homo sapiens
tatatagtttatata

SEQ ID NO: 378583 - DNA, 15 bp, Homo sapiens
atatatagtttatat

SEQ ID NO: 378584 - DNA, 15 bp, Homo sapiens
tatatatagtttata

SEQ ID NO: 378585 - DNA, 15 bp, Homo sapiens
ttatatatagtttat

SEQ ID NO: 378586 - DNA, 15 bp, Homo sapiens
attatatatagttta

SEQ ID NO: 378587 - DNA, 15 bp, Homo sapiens
aattatatatagttt

SEQ ID NO: 378588 - DNA, 15 bp, Homo sapiens
taattatatatagtt

SEQ ID NO: 378589 - DNA, 15 bp, Homo sapiens
ataattatatatagt

SEQ ID NO: 378590 - DNA, 15 bp, Homo sapiens
tataattatatatag

SEQ ID NO: 378591 - DNA, 15 bp, Homo sapiens
atataattatatata

SEQ ID NO: 378592 - DNA, 15 bp, Homo sapiens
tatataattatatat

SEQ ID NO: 378593 - DNA, 15 bp, Homo sapiens
atatataattatata

SEQ ID NO: 378594 - DNA, 15 bp, Homo sapiens
tatatataattatat

SEQ ID NO: 378595 - DNA, 15 bp, Homo sapiens
atatatataattata

SEQ ID NO: 378596 - DNA, 15 bp, Homo sapiens
tatatatataattat

SEQ ID NO: 378597 - DNA, 15 bp, Homo sapiens
atatatatataatta

SEQ ID NO: 378598 - DNA, 15 bp, Homo sapiens
tatatatatataatt

SEQ ID NO: 378599 - DNA, 15 bp, Homo sapiens
ttatatatatataat

SEQ ID NO: 378600 - DNA, 15 bp, Homo sapiens
gttatatatatataa

SEQ ID NO: 378601 - DNA, 15 bp, Homo sapiens
agttatatatatata

SEQ ID NO: 378602 - DNA, 15 bp, Homo sapiens
tagttatatatatat

SEQ ID NO: 378603 - DNA, 15 bp, Homo sapiens
atagttatatatata

SEQ ID NO: 378604 - DNA, 15 bp, Homo sapiens
tatagttatatatat

SEQ ID NO: 378605 - DNA, 15 bp, Homo sapiens
atatagttatatata

SEQ ID NO: 378606 - DNA, 15 bp, Homo sapiens
tatatagttatatat

SEQ ID NO: 378607 - DNA, 15 bp, Homo sapiens
ttatatagttatata

SEQ ID NO: 378608 - DNA, 15 bp, Homo sapiens
attatatagttatat

SEQ ID NO: 378609 - DNA, 15 bp, Homo sapiens
aattatatagttata

SEQ ID NO: 378610 - DNA, 15 bp, Homo sapiens
taattatatagttat

SEQ ID NO: 378611 - DNA, 15 bp, Homo sapiens
ataattatatagtta

SEQ ID NO: 378612 - DNA, 15 bp, Homo sapiens
tataattatatagtt

SEQ ID NO: 378613 - DNA, 15 bp, Homo sapiens
atataattatatagt

SEQ ID NO: 378614 - DNA, 15 bp, Homo sapiens
tatataattatatag

SEQ ID NO: 378615 - DNA, 15 bp, Homo sapiens
atatatagttatata

SEQ ID NO: 378616 - DNA, 15 bp, Homo sapiens
tatatatagttatat

SEQ ID NO: 378617 - DNA, 15 bp, Homo sapiens
atatatatagttata

SEQ ID NO: 378618 - DNA, 15 bp, Homo sapiens
tatatatatagttat

SEQ ID NO: 378619 - DNA, 15 bp, Homo sapiens
ttatatatatagtta

SEQ ID NO: 378620 - DNA, 15 bp, Homo sapiens
gttatatatatagtt

SEQ ID NO: 378621 - DNA, 15 bp, Homo sapiens
agttatatatatagt

SEQ ID NO: 378622 - DNA, 15 bp, Homo sapiens
tagttatatatatag

SEQ ID NO: 378623 - DNA, 15 bp, Homo sapiens
catatatatagttat

SEQ ID NO: 378624 - DNA, 15 bp, Homo sapiens
acatatatatagtta

SEQ ID NO: 378625 - DNA, 15 bp, Homo sapiens
tacatatatatagtt

SEQ ID NO: 378626 - DNA, 15 bp, Homo sapiens
atacatatatatagt

SEQ ID NO: 378627 - DNA, 15 bp, Homo sapiens
gatacatatatatag

SEQ ID NO: 378628 - DNA, 15 bp, Homo sapiens
ggatacatatatata

SEQ ID NO: 378629 - DNA, 15 bp, Homo sapiens
gggatacatatatat

SEQ ID NO: 378630 - DNA, 15 bp, Homo sapiens
ggggatacatatata

SEQ ID NO: 378631 - DNA, 15 bp, Homo sapiens
aggggatacatatat

SEQ ID NO: 378632 - DNA, 15 bp, Homo sapiens
taggggatacatata

SEQ ID NO: 378633 - DNA, 15 bp, Homo sapiens
ctaggggatacatat

SEQ ID NO: 378634 - DNA, 15 bp, Homo sapiens
actaggggatacata

SEQ ID NO: 378635 - DNA, 15 bp, Homo sapiens
tactaggggatacat

SEQ ID NO: 378636 - DNA, 15 bp, Homo sapiens
atactaggggataca

SEQ ID NO: 378637 - DNA, 15 bp, Homo sapiens
aatactaggggatac

SEQ ID NO: 378638 - DNA, 15 bp, Homo sapiens
caatactaggggata

SEQ ID NO: 378639 - DNA, 15 bp, Homo sapiens
ccaatactaggggat

SEQ ID NO: 378640 - DNA, 15 bp, Homo sapiens
tccaatactagggga

SEQ ID NO: 378641 - DNA, 15 bp, Homo sapiens
atccaatactagggg

SEQ ID NO: 378642 - DNA, 15 bp, Homo sapiens
gatccaatactaggg

SEQ ID NO: 378643 - DNA, 15 bp, Homo sapiens
tgatccaatactagg

SEQ ID NO: 378644 - DNA, 15 bp, Homo sapiens
atgatccaatactag

SEQ ID NO: 378645 - DNA, 15 bp, Homo sapiens
catgatccaatacta

SEQ ID NO: 378646 - DNA, 15 bp, Homo sapiens
tcatgatccaatact

SEQ ID NO: 378647 - DNA, 15 bp, Homo sapiens
ttcatgatccaatac

SEQ ID NO: 378648 - DNA, 15 bp, Homo sapiens
cttcatgatccaata

SEQ ID NO: 378649 - DNA, 15 bp, Homo sapiens
tcttcatgatccaat

SEQ ID NO: 378650 - DNA, 15 bp, Homo sapiens
ctcttcatgatccaa

SEQ ID NO: 378651 - DNA, 15 bp, Homo sapiens
gctcttcatgatcca

SEQ ID NO: 378652 - DNA, 15 bp, Homo sapiens
agctcttcatgatcc

SEQ ID NO: 378653 - DNA, 15 bp, Homo sapiens
gagctcttcatgatc

SEQ ID NO: 378654 - DNA, 15 bp, Homo sapiens
agagctcttcatgat

SEQ ID NO: 378655 - DNA, 15 bp, Homo sapiens
aagagctcttcatga

SEQ ID NO: 378656 - DNA, 15 bp, Homo sapiens
gaagagctcttcatg

SEQ ID NO: 378657 - DNA, 15 bp, Homo sapiens
tgaagagctcttcat

SEQ ID NO: 378658 - DNA, 15 bp, Homo sapiens
atgaagagctcttca

SEQ ID NO: 378659 - DNA, 15 bp, Homo sapiens
catgaagagctcttc

SEQ ID NO: 378660 - DNA, 15 bp, Homo sapiens
gcatgaagagctctt

SEQ ID NO: 378661 - DNA, 15 bp, Homo sapiens
tgcatgaagagctct

SEQ ID NO: 378662 - DNA, 15 bp, Homo sapiens
atgcatgaagagctc

SEQ ID NO: 378663 - DNA, 15 bp, Homo sapiens
aatgcatgaagagct

SEQ ID NO: 378664 - DNA, 15 bp, Homo sapiens
gaatgcatgaagagc

SEQ ID NO: 378665 - DNA, 15 bp, Homo sapiens
agaatgcatgaagag

SEQ ID NO: 378666 - DNA, 15 bp, Homo sapiens
aagaatgcatgaaga

SEQ ID NO: 378667 - DNA, 15 bp, Homo sapiens
aaagaatgcatgaag

SEQ ID NO: 378668 - DNA, 15 bp, Homo sapiens
caaagaatgcatgaa

SEQ ID NO: 378669 - DNA, 15 bp, Homo sapiens
gcaaagaatgcatga

SEQ ID NO: 378670 - DNA, 15 bp, Homo sapiens
tgcaaagaatgcatg

SEQ ID NO: 378671 - DNA, 15 bp, Homo sapiens
ttgcaaagaatgcat

SEQ ID NO: 378672 - DNA, 15 bp, Homo sapiens
tttgcaaagaatgca

SEQ ID NO: 378673 - DNA, 15 bp, Homo sapiens
ctttgcaaagaatgc

SEQ ID NO: 378674 - DNA, 15 bp, Homo sapiens
cctttgcaaagaatg

SEQ ID NO: 378675 - DNA, 15 bp, Homo sapiens
tcctttgcaaagaat

SEQ ID NO: 378676 - DNA, 15 bp, Homo sapiens
ctcctttgcaaagaa

SEQ ID NO: 378677 - DNA, 15 bp, Homo sapiens
cctcctttgcaaaga

SEQ ID NO: 378678 - DNA, 15 bp, Homo sapiens
acctcctttgcaaag

SEQ ID NO: 378679 - DNA, 15 bp, Homo sapiens
aacctcctttgcaaa

SEQ ID NO: 378680 - DNA, 15 bp, Homo sapiens
taacctcctttgcaa

SEQ ID NO: 378681 - DNA, 15 bp, Homo sapiens
ataacctcctttgca

SEQ ID NO: 378682 - DNA, 15 bp, Homo sapiens
tataacctcctttgc

SEQ ID NO: 378683 - DNA, 15 bp, Homo sapiens
ttataacctcctttg

SEQ ID NO: 378684 - DNA, 15 bp, Homo sapiens
tttataacctccttt

SEQ ID NO: 378685 - DNA, 15 bp, Homo sapiens
ctttataacctcctt

SEQ ID NO: 378686 - DNA, 15 bp, Homo sapiens
actttataacctcct

SEQ ID NO: 378687 - DNA, 15 bp, Homo sapiens
aactttataacctcc

SEQ ID NO: 378688 - DNA, 15 bp, Homo sapiens
taactttataacctc

SEQ ID NO: 378689 - DNA, 15 bp, Homo sapiens
gtaactttataacct

SEQ ID NO: 378690 - DNA, 15 bp, Homo sapiens
cgtaactttataacc

SEQ ID NO: 378691 - DNA, 15 bp, Homo sapiens
gcgtaactttataac

SEQ ID NO: 378692 - DNA, 15 bp, Homo sapiens
ggcgtaactttataa

SEQ ID NO: 378693 - DNA, 15 bp, Homo sapiens
gggcgtaactttata

SEQ ID NO: 378694 - DNA, 15 bp, Homo sapiens
agggcgtaactttat

SEQ ID NO: 378695 - DNA, 15 bp, Homo sapiens
gagggcgtaacttta

SEQ ID NO: 378696 - DNA, 15 bp, Homo sapiens
tgagggcgtaacttt

SEQ ID NO: 378697 - DNA, 15 bp, Homo sapiens
ctgagggcgtaactt

SEQ ID NO: 378698 - DNA, 15 bp, Homo sapiens
tctgagggcgtaact

SEQ ID NO: 378699 - DNA, 15 bp, Homo sapiens
ttctgagggcgtaac

SEQ ID NO: 378700 - DNA, 15 bp, Homo sapiens
gttctgagggcgtaa

SEQ ID NO: 378701 - DNA, 15 bp, Homo sapiens
tgttctgagggcgta

SEQ ID NO: 378702 - DNA, 15 bp, Homo sapiens
atgttctgagggcgt

SEQ ID NO: 378703 - DNA, 15 bp, Homo sapiens
aatgttctgagggcg

SEQ ID NO: 378704 - DNA, 15 bp, Homo sapiens
aaatgttctgagggc

SEQ ID NO: 378705 - DNA, 15 bp, Homo sapiens
taaatgttctgaggg

SEQ ID NO: 378706 - DNA, 15 bp, Homo sapiens
ataaatgttctgagg

SEQ ID NO: 378707 - DNA, 15 bp, Homo sapiens
tataaatgttctgag

SEQ ID NO: 378708 - DNA, 15 bp, Homo sapiens
ttataaatgttctga

SEQ ID NO: 378709 - DNA, 15 bp, Homo sapiens
gttataaatgttctg

SEQ ID NO: 378710 - DNA, 15 bp, Homo sapiens
agttataaatgttct

SEQ ID NO: 378711 - DNA, 15 bp, Homo sapiens
tagttataaatgttc

SEQ ID NO: 378712 - DNA, 15 bp, Homo sapiens
atagttataaatgtt

SEQ ID NO: 378713 - DNA, 15 bp, Homo sapiens
tatagttataaatgt

SEQ ID NO: 378714 - DNA, 15 bp, Homo sapiens
ttatagttataaatg

SEQ ID NO: 378715 - DNA, 15 bp, Homo sapiens
cttatagttataaat

SEQ ID NO: 378716 - DNA, 15 bp, Homo sapiens
tcttatagttataaa

SEQ ID NO: 378717 - DNA, 15 bp, Homo sapiens
ttcttatagttataa

SEQ ID NO: 378718 - DNA, 15 bp, Homo sapiens
attcttatagttata

SEQ ID NO: 378719 - DNA, 15 bp, Homo sapiens
cattcttatagttat

SEQ ID NO: 378720 - DNA, 15 bp, Homo sapiens
acattcttatagtta

SEQ ID NO: 378721 - DNA, 15 bp, Homo sapiens
cacattcttatagtt

SEQ ID NO: 378722 - DNA, 15 bp, Homo sapiens
gcacattcttatagt

SEQ ID NO: 378723 - DNA, 15 bp, Homo sapiens
ggcacattcttatag

SEQ ID NO: 378724 - DNA, 15 bp, Homo sapiens
tggcacattcttata

SEQ ID NO: 378725 - DNA, 15 bp, Homo sapiens
ctggcacattcttat

SEQ ID NO: 378726 - DNA, 15 bp, Homo sapiens
actggcacattctta

SEQ ID NO: 378727 - DNA, 15 bp, Homo sapiens
aactggcacattctt

SEQ ID NO: 378728 - DNA, 15 bp, Homo sapiens
taactggcacattct

SEQ ID NO: 378729 - DNA, 15 bp, Homo sapiens
ttaactggcacattc

SEQ ID NO: 378730 - DNA, 15 bp, Homo sapiens
tttaactggcacatt

SEQ ID NO: 378731 - DNA, 15 bp, Homo sapiens
ctttaactggcacat

SEQ ID NO: 378732 - DNA, 15 bp, Homo sapiens
actttaactggcaca

SEQ ID NO: 378733 - DNA, 15 bp, Homo sapiens
cactttaactggcac

SEQ ID NO: 378734 - DNA, 15 bp, Homo sapiens
gcactttaactggca

SEQ ID NO: 378735 - DNA, 15 bp, Homo sapiens
agcactttaactggc

SEQ ID NO: 378736 - DNA, 15 bp, Homo sapiens
gagcactttaactgg

SEQ ID NO: 378737 - DNA, 15 bp, Homo sapiens
tgagcactttaactg

SEQ ID NO: 378738 - DNA, 15 bp, Homo sapiens
ttgagcactttaact

SEQ ID NO: 378739 - DNA, 15 bp, Homo sapiens
gttgagcactttaac

SEQ ID NO: 378740 - DNA, 15 bp, Homo sapiens
tgttgagcactttaa

SEQ ID NO: 378741 - DNA, 15 bp, Homo sapiens
ctgttgagcacttta

SEQ ID NO: 378742 - DNA, 15 bp, Homo sapiens
cctgttgagcacttt

SEQ ID NO: 378743 - DNA, 15 bp, Homo sapiens
tcctgttgagcactt

SEQ ID NO: 378744 - DNA, 15 bp, Homo sapiens
ttcctgttgagcact

SEQ ID NO: 378745 - DNA, 15 bp, Homo sapiens
tttcctgttgagcac

SEQ ID NO: 378746 - DNA, 15 bp, Homo sapiens
atttcctgttgagca

SEQ ID NO: 378747 - DNA, 15 bp, Homo sapiens
tatttcctgttgagc

SEQ ID NO: 378748 - DNA, 15 bp, Homo sapiens
atatttcctgttgag

SEQ ID NO: 378749 - DNA, 15 bp, Homo sapiens
catatttcctgttga

SEQ ID NO: 378750 - DNA, 15 bp, Homo sapiens
tcatatttcctgttg

SEQ ID NO: 378751 - DNA, 15 bp, Homo sapiens
gtcatatttcctgtt

SEQ ID NO: 378752 - DNA, 15 bp, Homo sapiens
tgtcatatttcctgt

SEQ ID NO: 378753 - DNA, 15 bp, Homo sapiens
ctgtcatatttcctg

SEQ ID NO: 378754 - DNA, 15 bp, Homo sapiens
actgtcatatttcct

SEQ ID NO: 378755 - DNA, 15 bp, Homo sapiens
aactgtcatatttcc

SEQ ID NO: 378756 - DNA, 15 bp, Homo sapiens
aaactgtcatatttc

SEQ ID NO: 378757 - DNA, 15 bp, Homo sapiens
taaactgtcatattt

SEQ ID NO: 378758 - DNA, 15 bp, Homo sapiens
ttaaactgtcatatt

SEQ ID NO: 378759 - DNA, 15 bp, Homo sapiens
tttaaactgtcatat

SEQ ID NO: 378760 - DNA, 15 bp, Homo sapiens
ttttaaactgtcata

SEQ ID NO: 378761 - DNA, 15 bp, Homo sapiens
cttttaaactgtcat

SEQ ID NO: 378762 - DNA, 15 bp, Homo sapiens
gcttttaaactgtca

SEQ ID NO: 378763 - DNA, 15 bp, Homo sapiens
tgcttttaaactgtc

SEQ ID NO: 378764 - DNA, 15 bp, Homo sapiens
atgcttttaaactgt

SEQ ID NO: 378765 - DNA, 15 bp, Homo sapiens
aatgcttttaaactg

SEQ ID NO: 378766 - DNA, 15 bp, Homo sapiens
caatgcttttaaact

SEQ ID NO: 378767 - DNA, 15 bp, Homo sapiens
acaatgcttttaaac

SEQ ID NO: 378768 - DNA, 15 bp, Homo sapiens
tacaatgcttttaaa

SEQ ID NO: 378769 - DNA, 15 bp, Homo sapiens
ttacaatgcttttaa

SEQ ID NO: 378770 - DNA, 15 bp, Homo sapiens
tttacaatgctttta

SEQ ID NO: 378771 - DNA, 15 bp, Homo sapiens
ttttacaatgctttt

SEQ ID NO: 378772 - DNA, 15 bp, Homo sapiens
gttttacaatgcttt

SEQ ID NO: 378773 - DNA, 15 bp, Homo sapiens
agttttacaatgctt

SEQ ID NO: 378774 - DNA, 15 bp, Homo sapiens
gagttttacaatgct

SEQ ID NO: 378775 - DNA, 15 bp, Homo sapiens
tgagttttacaatgc

SEQ ID NO: 378776 - DNA, 15 bp, Homo sapiens
gtgagttttacaatg

SEQ ID NO: 378777 - DNA, 15 bp, Homo sapiens
tgtgagttttacaat

SEQ ID NO: 378778 - DNA, 15 bp, Homo sapiens
atgtgagttttacaa

SEQ ID NO: 378779 - DNA, 15 bp, Homo sapiens
tatgtgagttttaca

SEQ ID NO: 378780 - DNA, 15 bp, Homo sapiens
ctatgtgagttttac

SEQ ID NO: 378781 - DNA, 15 bp, Homo sapiens
gctatgtgagtttta

SEQ ID NO: 378782 - DNA, 15 bp, Homo sapiens
agctatgtgagtttt

SEQ ID NO: 378783 - DNA, 15 bp, Homo sapiens
aagctatgtgagttt

SEQ ID NO: 378784 - DNA, 15 bp, Homo sapiens
taagctatgtgagtt

SEQ ID NO: 378785 - DNA, 15 bp, Homo sapiens
gtaagctatgtgagt

SEQ ID NO: 378786 - DNA, 15 bp, Homo sapiens
agtaagctatgtgag

SEQ ID NO: 378787 - DNA, 15 bp, Homo sapiens
aagtaagctatgtga

SEQ ID NO: 378788 - DNA, 15 bp, Homo sapiens
gaagtaagctatgtg

SEQ ID NO: 378789 - DNA, 15 bp, Homo sapiens
agaagtaagctatgt

SEQ ID NO: 378790 - DNA, 15 bp, Homo sapiens
gagaagtaagctatg

SEQ ID NO: 378791 - DNA, 15 bp, Homo sapiens
agagaagtaagctat

SEQ ID NO: 378792 - DNA, 15 bp, Homo sapiens
gagagaagtaagcta

SEQ ID NO: 378793 - DNA, 15 bp, Homo sapiens
agagagaagtaagct

SEQ ID NO: 378794 - DNA, 15 bp, Homo sapiens
gagagagaagtaagc

SEQ ID NO: 378795 - DNA, 15 bp, Homo sapiens
agagagagaagtaag

SEQ ID NO: 378796 - DNA, 15 bp, Homo sapiens
tagagagagaagtaa

SEQ ID NO: 378797 - DNA, 15 bp, Homo sapiens
ttagagagagaagta

SEQ ID NO: 378798 - DNA, 15 bp, Homo sapiens
tttagagagagaagt

SEQ ID NO: 378799 - DNA, 15 bp, Homo sapiens
ctttagagagagaag

SEQ ID NO: 378800 - DNA, 15 bp, Homo sapiens
actttagagagagaa

SEQ ID NO: 378801 - DNA, 15 bp, Homo sapiens
cactttagagagaga

SEQ ID NO: 378802 - DNA, 15 bp, Homo sapiens
gcactttagagagag

SEQ ID NO: 378803 - DNA, 15 bp, Homo sapiens
tgcactttagagaga

SEQ ID NO: 378804 - DNA, 15 bp, Homo sapiens
ttgcactttagagag

SEQ ID NO: 378805 - DNA, 15 bp, Homo sapiens
gttgcactttagaga

SEQ ID NO: 378806 - DNA, 15 bp, Homo sapiens
tgttgcactttagag

SEQ ID NO: 378807 - DNA, 15 bp, Homo sapiens
ttgttgcactttaga

SEQ ID NO: 378808 - DNA, 15 bp, Homo sapiens
cttgttgcactttag

SEQ ID NO: 378809 - DNA, 15 bp, Homo sapiens
ccttgttgcacttta

SEQ ID NO: 378810 - DNA, 15 bp, Homo sapiens
tccttgttgcacttt

SEQ ID NO: 378811 - DNA, 15 bp, Homo sapiens
atccttgttgcactt

SEQ ID NO: 378812 - DNA, 15 bp, Homo sapiens
catccttgttgcact

SEQ ID NO: 378813 - DNA, 15 bp, Homo sapiens
tcatccttgttgcac

SEQ ID NO: 378814 - DNA, 15 bp, Homo sapiens
ttcatccttgttgca

SEQ ID NO: 378815 - DNA, 15 bp, Homo sapiens
attcatccttgttgc

SEQ ID NO: 378816 - DNA, 15 bp, Homo sapiens
tattcatccttgttg

SEQ ID NO: 378817 - DNA, 15 bp, Homo sapiens
ctattcatccttgtt

SEQ ID NO: 378818 - DNA, 15 bp, Homo sapiens
tctattcatccttgt

SEQ ID NO: 378819 - DNA, 15 bp, Homo sapiens
ttctattcatccttg

SEQ ID NO: 378820 - DNA, 15 bp, Homo sapiens
attctattcatcctt

SEQ ID NO: 378821 - DNA, 15 bp, Homo sapiens
cattctattcatcct

SEQ ID NO: 378822 - DNA, 15 bp, Homo sapiens
ccattctattcatcc

SEQ ID NO: 378823 - DNA, 15 bp, Homo sapiens
cccattctattcatc

SEQ ID NO: 378824 - DNA, 15 bp, Homo sapiens
gcccattctattcat

SEQ ID NO: 378825 - DNA, 15 bp, Homo sapiens
ggcccattctattca

SEQ ID NO: 378826 - DNA, 15 bp, Homo sapiens
tggcccattctattc

SEQ ID NO: 378827 - DNA, 15 bp, Homo sapiens
ttggcccattctatt

SEQ ID NO: 378828 - DNA, 15 bp, Homo sapiens
cttggcccattctat

SEQ ID NO: 378829 - DNA, 15 bp, Homo sapiens
ccttggcccattcta

SEQ ID NO: 378830 - DNA, 15 bp, Homo sapiens
accttggcccattct

SEQ ID NO: 378831 - DNA, 15 bp, Homo sapiens
taccttggcccattc

SEQ ID NO: 378832 - DNA, 15 bp, Homo sapiens
ataccttggcccatt

SEQ ID NO: 378833 - DNA, 15 bp, Homo sapiens
cataccttggcccat

SEQ ID NO: 378834 - DNA, 15 bp, Homo sapiens
tcataccttggccca

SEQ ID NO: 378835 - DNA, 15 bp, Homo sapiens
gtcataccttggccc

SEQ ID NO: 378836 - DNA, 15 bp, Homo sapiens
tgtcataccttggcc

SEQ ID NO: 378837 - DNA, 15 bp, Homo sapiens
ttgtcataccttggc

SEQ ID NO: 378838 - DNA, 15 bp, Homo sapiens
attgtcataccttgg

SEQ ID NO: 378839 - DNA, 15 bp, Homo sapiens
aattgtcataccttg

SEQ ID NO: 378840 - DNA, 15 bp, Homo sapiens
taattgtcatacctt

SEQ ID NO: 378841 - DNA, 15 bp, Homo sapiens
ttaattgtcatacct

SEQ ID NO: 378842 - DNA, 15 bp, Homo sapiens
attaattgtcatacc

SEQ ID NO: 378843 - DNA, 15 bp, Homo sapiens
cattaattgtcatac

SEQ ID NO: 378844 - DNA, 15 bp, Homo sapiens
ccattaattgtcata

SEQ ID NO: 378845 - DNA, 15 bp, Homo sapiens
accattaattgtcat

SEQ ID NO: 378846 - DNA, 15 bp, Homo sapiens
aaccattaattgtca

SEQ ID NO: 378847 - DNA, 15 bp, Homo sapiens
gaaccattaattgtc

SEQ ID NO: 378848 - DNA, 15 bp, Homo sapiens
agaaccattaattgt

SEQ ID NO: 378849 - DNA, 15 bp, Homo sapiens
cagaaccattaattg

SEQ ID NO: 378850 - DNA, 15 bp, Homo sapiens
gcagaaccattaatt

SEQ ID NO: 378851 - DNA, 15 bp, Homo sapiens
tgcagaaccattaat

SEQ ID NO: 378852 - DNA, 15 bp, Homo sapiens
atgcagaaccattaa

SEQ ID NO: 378853 - DNA, 15 bp, Homo sapiens
catgcagaaccatta

SEQ ID NO: 378854 - DNA, 15 bp, Homo sapiens
tcatgcagaaccatt

SEQ ID NO: 378855 - DNA, 15 bp, Homo sapiens
gtcatgcagaaccat

SEQ ID NO: 378856 - DNA, 15 bp, Homo sapiens
ggtcatgcagaacca

SEQ ID NO: 378857 - DNA, 15 bp, Homo sapiens
aggtcatgcagaacc

SEQ ID NO: 378858 - DNA, 15 bp, Homo sapiens
taggtcatgcagaac

SEQ ID NO: 378859 - DNA, 15 bp, Homo sapiens
ctaggtcatgcagaa

SEQ ID NO: 378860 - DNA, 15 bp, Homo sapiens
gctaggtcatgcaga

SEQ ID NO: 378861 - DNA, 15 bp, Homo sapiens
ggctaggtcatgcag

SEQ ID NO: 378862 - DNA, 15 bp, Homo sapiens
tggctaggtcatgca

SEQ ID NO: 378863 - DNA, 15 bp, Homo sapiens
gtggctaggtcatgc

SEQ ID NO: 378864 - DNA, 15 bp, Homo sapiens
agtggctaggtcatg

SEQ ID NO: 378865 - DNA, 15 bp, Homo sapiens
cagtggctaggtcat

SEQ ID NO: 378866 - DNA, 15 bp, Homo sapiens
gcagtggctaggtca

SEQ ID NO: 378867 - DNA, 15 bp, Homo sapiens
agcagtggctaggtc

SEQ ID NO: 378868 - DNA, 15 bp, Homo sapiens
cagcagtggctaggt

SEQ ID NO: 378869 - DNA, 15 bp, Homo sapiens
ccagcagtggctagg

SEQ ID NO: 378870 - DNA, 15 bp, Homo sapiens
cccagcagtggctag

SEQ ID NO: 378871 - DNA, 15 bp, Homo sapiens
ccccagcagtggcta

SEQ ID NO: 378872 - DNA, 15 bp, Homo sapiens
cccccagcagtggct

SEQ ID NO: 378873 - DNA, 15 bp, Homo sapiens
acccccagcagtggc

SEQ ID NO: 378874 - DNA, 15 bp, Homo sapiens
aacccccagcagtgg

SEQ ID NO: 378875 - DNA, 15 bp, Homo sapiens
aaacccccagcagtg

SEQ ID NO: 378876 - DNA, 15 bp, Homo sapiens
aaaacccccagcagt

SEQ ID NO: 378877 - DNA, 15 bp, Homo sapiens
gaaaacccccagcag

SEQ ID NO: 378878 - DNA, 15 bp, Homo sapiens
agaaaacccccagca

SEQ ID NO: 378879 - DNA, 15 bp, Homo sapiens
aagaaaacccccagc

SEQ ID NO: 378880 - DNA, 15 bp, Homo sapiens
gaagaaaacccccag

SEQ ID NO: 378881 - DNA, 15 bp, Homo sapiens
agaagaaaaccccca

SEQ ID NO: 378882 - DNA, 15 bp, Homo sapiens
tagaagaaaaccccc

SEQ ID NO: 378883 - DNA, 15 bp, Homo sapiens
atagaagaaaacccc

SEQ ID NO: 378884 - DNA, 15 bp, Homo sapiens
tatagaagaaaaccc

SEQ ID NO: 378885 - DNA, 15 bp, Homo sapiens
ttatagaagaaaacc

SEQ ID NO: 378886 - DNA, 15 bp, Homo sapiens
gttatagaagaaaac

SEQ ID NO: 378887 - DNA, 15 bp, Homo sapiens
cgttatagaagaaaa

SEQ ID NO: 378888 - DNA, 15 bp, Homo sapiens
acgttatagaagaaa

SEQ ID NO: 378889 - DNA, 15 bp, Homo sapiens
aacgttatagaagaa

SEQ ID NO: 378890 - DNA, 15 bp, Homo sapiens
caacgttatagaaga

SEQ ID NO: 378891 - DNA, 15 bp, Homo sapiens
acaacgttatagaag

SEQ ID NO: 378892 - DNA, 15 bp, Homo sapiens
gacaacgttatagaa

SEQ ID NO: 378893 - DNA, 15 bp, Homo sapiens
ggacaacgttataga

SEQ ID NO: 378894 - DNA, 15 bp, Homo sapiens
aggacaacgttatag

SEQ ID NO: 378895 - DNA, 15 bp, Homo sapiens
aaggacaacgttata

SEQ ID NO: 378896 - DNA, 15 bp, Homo sapiens
caaggacaacgttat

SEQ ID NO: 378897 - DNA, 15 bp, Homo sapiens
acaaggacaacgtta

SEQ ID NO: 378898 - DNA, 15 bp, Homo sapiens
cacaaggacaacgtt

SEQ ID NO: 378899 - DNA, 15 bp, Homo sapiens
tcacaaggacaacgt

SEQ ID NO: 378900 - DNA, 15 bp, Homo sapiens
ttcacaaggacaacg

SEQ ID NO: 378901 - DNA, 15 bp, Homo sapiens
tttcacaaggacaac

SEQ ID NO: 378902 - DNA, 15 bp, Homo sapiens
ttttcacaaggacaa

SEQ ID NO: 378903 - DNA, 15 bp, Homo sapiens
gttttcacaaggaca

SEQ ID NO: 378904 - DNA, 15 bp, Homo sapiens
agttttcacaaggac

SEQ ID NO: 378905 - DNA, 15 bp, Homo sapiens
aagttttcacaagga

SEQ ID NO: 378906 - DNA, 15 bp, Homo sapiens
aaagttttcacaagg

SEQ ID NO: 378907 - DNA, 15 bp, Homo sapiens
aaaagttttcacaag

SEQ ID NO: 378908 - DNA, 15 bp, Homo sapiens
caaaagttttcacaa

SEQ ID NO: 378909 - DNA, 15 bp, Homo sapiens
acaaaagttttcaca

SEQ ID NO: 378910 - DNA, 15 bp, Homo sapiens
cacaaaagttttcac

SEQ ID NO: 378911 - DNA, 15 bp, Homo sapiens
tcacaaaagttttca

SEQ ID NO: 378912 - DNA, 15 bp, Homo sapiens
ttcacaaaagttttc

SEQ ID NO: 378913 - DNA, 15 bp, Homo sapiens
tttcacaaaagtttt

SEQ ID NO: 378914 - DNA, 15 bp, Homo sapiens
atttcacaaaagttt

SEQ ID NO: 378915 - DNA, 15 bp, Homo sapiens
aatttcacaaaagtt

SEQ ID NO: 378916 - DNA, 15 bp, Homo sapiens
taatttcacaaaagt

SEQ ID NO: 378917 - DNA, 15 bp, Homo sapiens
ttaatttcacaaaag

SEQ ID NO: 378918 - DNA, 15 bp, Homo sapiens
tttaatttcacaaaa

SEQ ID NO: 378919 - DNA, 15 bp, Homo sapiens
ttttaatttcacaaa

SEQ ID NO: 378920 - DNA, 15 bp, Homo sapiens
tttttaatttcacaa

SEQ ID NO: 378921 - DNA, 15 bp, Homo sapiens
ttttttaatttcaca

SEQ ID NO: 378922 - DNA, 15 bp, Homo sapiens
tttttttaatttcac

SEQ ID NO: 378923 - DNA, 15 bp, Homo sapiens
ttttttttaatttca

SEQ ID NO: 378924 - DNA, 15 bp, Homo sapiens
tttttttttaatttc

SEQ ID NO: 378925 - DNA, 15 bp, Homo sapiens
ctttttttttaattt

SEQ ID NO: 378926 - DNA, 15 bp, Homo sapiens
cctttttttttaatt

SEQ ID NO: 378927 - DNA, 15 bp, Homo sapiens
tcctttttttttaat

SEQ ID NO: 378928 - DNA, 15 bp, Homo sapiens
ctcctttttttttaa

SEQ ID NO: 378929 - DNA, 15 bp, Homo sapiens
actccttttttttta

SEQ ID NO: 378930 - DNA, 15 bp, Homo sapiens
aactccttttttttt

SEQ ID NO: 378931 - DNA, 15 bp, Homo sapiens
taactcctttttttt

SEQ ID NO: 378932 - DNA, 15 bp, Homo sapiens
gtaactccttttttt

SEQ ID NO: 378933 - DNA, 15 bp, Homo sapiens
tgtaactcctttttt

SEQ ID NO: 378934 - DNA, 15 bp, Homo sapiens
ttgtaactccttttt

SEQ ID NO: 378935 - DNA, 15 bp, Homo sapiens
tttgtaactcctttt

SEQ ID NO: 378936 - DNA, 15 bp, Homo sapiens
atttgtaactccttt

SEQ ID NO: 378937 - DNA, 15 bp, Homo sapiens
aatttgtaactcctt

SEQ ID NO: 378938 - DNA, 15 bp, Homo sapiens
aaatttgtaactcct

SEQ ID NO: 378939 - DNA, 15 bp, Homo sapiens
aaaatttgtaactcc

SEQ ID NO: 378940 - DNA, 15 bp, Homo sapiens
taaaatttgtaactc

SEQ ID NO: 378941 - DNA, 15 bp, Homo sapiens
ataaaatttgtaact

SEQ ID NO: 378942 - DNA, 15 bp, Homo sapiens
aataaaatttgtaac

SEQ ID NO: 378943 - DNA, 15 bp, Homo sapiens
gaataaaatttgtaa

SEQ ID NO: 378944 - DNA, 15 bp, Homo sapiens
agaataaaatttgta

SEQ ID NO: 378945 - DNA, 15 bp, Homo sapiens
cagaataaaatttgt

SEQ ID NO: 378946 - DNA, 15 bp, Homo sapiens
acagaataaaatttg

SEQ ID NO: 378947 - DNA, 15 bp, Homo sapiens
aacagaataaaattt

SEQ ID NO: 378948 - DNA, 15 bp, Homo sapiens
taacagaataaaatt

SEQ ID NO: 378949 - DNA, 15 bp, Homo sapiens
ataacagaataaaat

SEQ ID NO: 378950 - DNA, 15 bp, Homo sapiens
aataacagaataaaa

SEQ ID NO: 378951 - DNA, 15 bp, Homo sapiens
caataacagaataaa

SEQ ID NO: 378952 - DNA, 15 bp, Homo sapiens
ccaataacagaataa

SEQ ID NO: 378953 - DNA, 15 bp, Homo sapiens
accaataacagaata

SEQ ID NO: 378954 - DNA, 15 bp, Homo sapiens
aaccaataacagaat

SEQ ID NO: 378955 - DNA, 15 bp, Homo sapiens
aaaccaataacagaa

SEQ ID NO: 378956 - DNA, 15 bp, Homo sapiens
caaaccaataacaga

SEQ ID NO: 378957 - DNA, 15 bp, Homo sapiens
acaaaccaataacag

SEQ ID NO: 378958 - DNA, 15 bp, Homo sapiens
aacaaaccaataaca

SEQ ID NO: 378959 - DNA, 15 bp, Homo sapiens
aaacaaaccaataac

SEQ ID NO: 378960 - DNA, 15 bp, Homo sapiens
taaacaaaccaataa

SEQ ID NO: 378961 - DNA, 15 bp, Homo sapiens
ataaacaaaccaata

SEQ ID NO: 378962 - DNA, 15 bp, Homo sapiens
aataaacaaaccaat

SEQ ID NO: 378963 - DNA, 15 bp, Homo sapiens
aaataaacaaaccaa

SEQ ID NO: 378964 - DNA, 15 bp, Homo sapiens
aaaataaacaaacca

SEQ ID NO: 378965 - DNA, 15 bp, Homo sapiens
aaaaataaacaaacc

SEQ ID NO: 378966 - DNA, 15 bp, Homo sapiens
taaaaataaacaaac

SEQ ID NO: 378967 - DNA, 15 bp, Homo sapiens
ataaaaataaacaaa

SEQ ID NO: 378968 - DNA, 15 bp, Homo sapiens
aataaaaataaacaa

SEQ ID NO: 378969 - DNA, 15 bp, Homo sapiens
aaataaaaataaaca

SEQ ID NO: 378970 - DNA, 15 bp, Homo sapiens
taaataaaaataaac

SEQ ID NO: 378971 - DNA, 15 bp, Homo sapiens
ataaataaaaataaa

SEQ ID NO: 378972 - DNA, 15 bp, Homo sapiens
tataaataaaaataa

SEQ ID NO: 378973 - DNA, 15 bp, Homo sapiens
atataaataaaaata

SEQ ID NO: 378974 - DNA, 15 bp, Homo sapiens
aatataaataaaaat

SEQ ID NO: 378975 - DNA, 15 bp, Homo sapiens
caatataaataaaaa

SEQ ID NO: 378976 - DNA, 15 bp, Homo sapiens
acaatataaataaaa

SEQ ID NO: 378977 - DNA, 15 bp, Homo sapiens
aacaatataaataaa

SEQ ID NO: 378978 - DNA, 15 bp, Homo sapiens
gaacaatataaataa

SEQ ID NO: 378979 - DNA, 15 bp, Homo sapiens
agaacaatataaata

SEQ ID NO: 378980 - DNA, 15 bp, Homo sapiens
cagaacaatataaat

SEQ ID NO: 378981 - DNA, 15 bp, Homo sapiens
acagaacaatataaa

SEQ ID NO: 378982 - DNA, 15 bp, Homo sapiens
aacagaacaatataa

SEQ ID NO: 378983 - DNA, 15 bp, Homo sapiens
aaacagaacaatata

SEQ ID NO: 378984 - DNA, 15 bp, Homo sapiens
caaacagaacaatat

SEQ ID NO: 378985 - DNA, 15 bp, Homo sapiens
acaaacagaacaata

SEQ ID NO: 378986 - DNA, 15 bp, Homo sapiens
cacaaacagaacaat

SEQ ID NO: 378987 - DNA, 15 bp, Homo sapiens
ccacaaacagaacaa

SEQ ID NO: 378988 - DNA, 15 bp, Homo sapiens
accacaaacagaaca

SEQ ID NO: 378989 - DNA, 15 bp, Homo sapiens
aaccacaaacagaac

SEQ ID NO: 378990 - DNA, 15 bp, Homo sapiens
aaaccacaaacagaa

SEQ ID NO: 378991 - DNA, 15 bp, Homo sapiens
aaaaccacaaacaga

SEQ ID NO: 378992 - DNA, 15 bp, Homo sapiens
taaaaccacaaacag

SEQ ID NO: 378993 - DNA, 15 bp, Homo sapiens
ataaaaccacaaaca

SEQ ID NO: 378994 - DNA, 15 bp, Homo sapiens
aataaaaccacaaac

SEQ ID NO: 378995 - DNA, 15 bp, Homo sapiens
aaataaaaccacaaa

SEQ ID NO: 378996 - DNA, 15 bp, Homo sapiens
taaataaaaccacaa

SEQ ID NO: 378997 - DNA, 15 bp, Homo sapiens
ataaataaaaccaca

SEQ ID NO: 378998 - DNA, 15 bp, Homo sapiens
aataaataaaaccac

SEQ ID NO: 378999 - DNA, 15 bp, Homo sapiens
aaataaataaaacca

SEQ ID NO: 379000 - DNA, 15 bp, Homo sapiens
aaaataaataaaacc

SEQ ID NO: 379001 - DNA, 15 bp, Homo sapiens
caaaataaataaaac

SEQ ID NO: 379002 - DNA, 15 bp, Homo sapiens
acaaaataaataaaa

SEQ ID NO: 379003 - DNA, 15 bp, Homo sapiens
aacaaaataaataaa

SEQ ID NO: 379004 - DNA, 15 bp, Homo sapiens
aaacaaaataaataa

SEQ ID NO: 379005 - DNA, 15 bp, Homo sapiens
aaaacaaaataaata

SEQ ID NO: 379006 - DNA, 15 bp, Homo sapiens
caaaacaaaataaat

SEQ ID NO: 379007 - DNA, 15 bp, Homo sapiens
gcaaaacaaaataaa

SEQ ID NO: 379008 - DNA, 15 bp, Homo sapiens
agcaaaacaaaataa

SEQ ID NO: 379009 - DNA, 15 bp, Homo sapiens
aagcaaaacaaaata

SEQ ID NO: 379010 - DNA, 15 bp, Homo sapiens
aaagcaaaacaaaat

SEQ ID NO: 379011 - DNA, 15 bp, Homo sapiens
aaaagcaaaacaaaa

SEQ ID NO: 379012 - DNA, 15 bp, Homo sapiens
gaaaagcaaaacaaa

SEQ ID NO: 379013 - DNA, 15 bp, Homo sapiens
ggaaaagcaaaacaa

SEQ ID NO: 379014 - DNA, 15 bp, Homo sapiens
gggaaaagcaaaaca

SEQ ID NO: 379015 - DNA, 15 bp, Homo sapiens
ggggaaaagcaaaac

SEQ ID NO: 379016 - DNA, 15 bp, Homo sapiens
gggggaaaagcaaaa

SEQ ID NO: 379017 - DNA, 15 bp, Homo sapiens
ggggggaaaagcaaa

SEQ ID NO: 379018 - DNA, 15 bp, Homo sapiens
gggggggaaaagcaa

SEQ ID NO: 379019 - DNA, 15 bp, Homo sapiens
agggggggaaaagca

SEQ ID NO: 379020 - DNA, 15 bp, Homo sapiens
gagggggggaaaagc

SEQ ID NO: 379021 - DNA, 15 bp, Homo sapiens
ggagggggggaaaag

SEQ ID NO: 379022 - DNA, 15 bp, Homo sapiens
gggagggggggaaaa

SEQ ID NO: 379023 - DNA, 15 bp, Homo sapiens
ggggagggggggaaa

SEQ ID NO: 379024 - DNA, 15 bp, Homo sapiens
aggggagggggggaa

SEQ ID NO: 379025 - DNA, 15 bp, Homo sapiens
aaggggaggggggga

SEQ ID NO: 379026 - DNA, 15 bp, Homo sapiens
aaaggggaggggggg

SEQ ID NO: 379027 - DNA, 15 bp, Homo sapiens
gaaaggggagggggg

SEQ ID NO: 379028 - DNA, 15 bp, Homo sapiens
ggaaaggggaggggg

SEQ ID NO: 379029 - DNA, 15 bp, Homo sapiens
gggaaaggggagggg

SEQ ID NO: 379030 - DNA, 15 bp, Homo sapiens
agggaaaggggaggg

SEQ ID NO: 379031 - DNA, 15 bp, Homo sapiens
gagggaaaggggagg

SEQ ID NO: 379032 - DNA, 15 bp, Homo sapiens
agagggaaaggggag

SEQ ID NO: 379033 - DNA, 15 bp, Homo sapiens
gagagggaaagggga

SEQ ID NO: 379034 - DNA, 15 bp, Homo sapiens
ggagagggaaagggg

SEQ ID NO: 379035 - DNA, 15 bp, Homo sapiens
aggagagggaaaggg

SEQ ID NO: 379036 - DNA, 15 bp, Homo sapiens
aaggagagggaaagg

SEQ ID NO: 379037 - DNA, 15 bp, Homo sapiens
aaaggagagggaaag

SEQ ID NO: 379038 - DNA, 15 bp, Homo sapiens
aaaaggagagggaaa

SEQ ID NO: 379039 - DNA, 15 bp, Homo sapiens
gaaaaggagagggaa

SEQ ID NO: 379040 - DNA, 15 bp, Homo sapiens
ggaaaaggagaggga

SEQ ID NO: 379041 - DNA, 15 bp, Homo sapiens
gggaaaaggagaggg

SEQ ID NO: 379042 - DNA, 15 bp, Homo sapiens
agggaaaaggagagg

SEQ ID NO: 379043 - DNA, 15 bp, Homo sapiens
aagggaaaaggagag

SEQ ID NO: 379044 - DNA, 15 bp, Homo sapiens
gaagggaaaaggaga

SEQ ID NO: 379045 - DNA, 15 bp, Homo sapiens
ggaagggaaaaggag

SEQ ID NO: 379046 - DNA, 15 bp, Homo sapiens
aaggaagggaaaagg

SEQ ID NO: 379047 - DNA, 15 bp, Homo sapiens
gaaggaagggaaaag

SEQ ID NO: 379048 - DNA, 15 bp, Homo sapiens
agaaggaagggaaaa

SEQ ID NO: 379049 - DNA, 15 bp, Homo sapiens
aagaaggaagggaaa

SEQ ID NO: 379050 - DNA, 15 bp, Homo sapiens
gaagaaggaagggaa

SEQ ID NO: 379051 - DNA, 15 bp, Homo sapiens
agaagaaggaaggga

SEQ ID NO: 379052 - DNA, 15 bp, Homo sapiens
gagaagaaggaaggg

SEQ ID NO: 379053 - DNA, 15 bp, Homo sapiens
agagaagaaggaagg

SEQ ID NO: 379054 - DNA, 15 bp, Homo sapiens
aagagaagaaggaag

SEQ ID NO: 379055 - DNA, 15 bp, Homo sapiens
gaagagaagaaggaa

SEQ ID NO: 379056 - DNA, 15 bp, Homo sapiens
ggaagagaagaagga

SEQ ID NO: 379057 - DNA, 15 bp, Homo sapiens
aggaagagaagaagg

SEQ ID NO: 379058 - DNA, 15 bp, Homo sapiens
aaggaagagaagaag

SEQ ID NO: 379059 - DNA, 15 bp, Homo sapiens
gaaggaagagaagaa

SEQ ID NO: 379060 - DNA, 15 bp, Homo sapiens
ggaaggaagagaaga

SEQ ID NO: 379061 - DNA, 15 bp, Homo sapiens
aggaaggaagagaag

SEQ ID NO: 379062 - DNA, 15 bp, Homo sapiens
aaggaaggaagagaa

SEQ ID NO: 379063 - DNA, 15 bp, Homo sapiens
gaaggaaggaagaga

SEQ ID NO: 379064 - DNA, 15 bp, Homo sapiens
agaaggaaggaagag

SEQ ID NO: 379065 - DNA, 15 bp, Homo sapiens
aagaaggaaggaaga

SEQ ID NO: 379066 - DNA, 15 bp, Homo sapiens
gaagaaggaaggaag

SEQ ID NO: 379067 - DNA, 15 bp, Homo sapiens
ggaagaaggaaggaa

SEQ ID NO: 379068 - DNA, 15 bp, Homo sapiens
tggaagaaggaagga

SEQ ID NO: 379069 - DNA, 15 bp, Homo sapiens
gtggaagaaggaagg

SEQ ID NO: 379070 - DNA, 15 bp, Homo sapiens
agtggaagaaggaag

SEQ ID NO: 379071 - DNA, 15 bp, Homo sapiens
aagtggaagaaggaa

SEQ ID NO: 379072 - DNA, 15 bp, Homo sapiens
aaagtggaagaagga

SEQ ID NO: 379073 - DNA, 15 bp, Homo sapiens
gaaagtggaagaagg

SEQ ID NO: 379074 - DNA, 15 bp, Homo sapiens
agaaagtggaagaag

SEQ ID NO: 379075 - DNA, 15 bp, Homo sapiens
tagaaagtggaagaa

SEQ ID NO: 379076 - DNA, 15 bp, Homo sapiens
ttagaaagtggaaga

SEQ ID NO: 379077 - DNA, 15 bp, Homo sapiens
tttagaaagtggaag

SEQ ID NO: 379078 - DNA, 15 bp, Homo sapiens
atttagaaagtggaa

SEQ ID NO: 379079 - DNA, 15 bp, Homo sapiens
aatttagaaagtgga

SEQ ID NO: 379080 - DNA, 15 bp, Homo sapiens
caatttagaaagtgg

SEQ ID NO: 379081 - DNA, 15 bp, Homo sapiens
gcaatttagaaagtg

SEQ ID NO: 379082 - DNA, 15 bp, Homo sapiens
agcaatttagaaagt

SEQ ID NO: 379083 - DNA, 15 bp, Homo sapiens
gagcaatttagaaag

SEQ ID NO: 379084 - DNA, 15 bp, Homo sapiens
tgagcaatttagaaa

SEQ ID NO: 379085 - DNA, 15 bp, Homo sapiens
ctgagcaatttagaa

SEQ ID NO: 379086 - DNA, 15 bp, Homo sapiens
gctgagcaatttaga

SEQ ID NO: 379087 - DNA, 15 bp, Homo sapiens
cgctgagcaatttag

SEQ ID NO: 379088 - DNA, 15 bp, Homo sapiens
gcgctgagcaattta

SEQ ID NO: 379089 - DNA, 15 bp, Homo sapiens
tgcgctgagcaattt

SEQ ID NO: 379090 - DNA, 15 bp, Homo sapiens
ttgcgctgagcaatt

SEQ ID NO: 379091 - DNA, 15 bp, Homo sapiens
attgcgctgagcaat

SEQ ID NO: 379092 - DNA, 15 bp, Homo sapiens
cattgcgctgagcaa

SEQ ID NO: 379093 - DNA, 15 bp, Homo sapiens
tcattgcgctgagca

SEQ ID NO: 379094 - DNA, 15 bp, Homo sapiens
ctcattgcgctgagc

SEQ ID NO: 379095 - DNA, 15 bp, Homo sapiens
cctcattgcgctgag

SEQ ID NO: 379096 - DNA, 15 bp, Homo sapiens
gcctcattgcgctga

SEQ ID NO: 379097 - DNA, 15 bp, Homo sapiens
agcctcattgcgctg

SEQ ID NO: 379098 - DNA, 15 bp, Homo sapiens
cagcctcattgcgct

SEQ ID NO: 379099 - DNA, 15 bp, Homo sapiens
acagcctcattgcgc

SEQ ID NO: 379100 - DNA, 15 bp, Homo sapiens
cacagcctcattgcg

SEQ ID NO: 379101 - DNA, 15 bp, Homo sapiens
gcacagcctcattgc

SEQ ID NO: 379102 - DNA, 15 bp, Homo sapiens
agcacagcctcattg

SEQ ID NO: 379103 - DNA, 15 bp, Homo sapiens
cagcacagcctcatt

SEQ ID NO: 379104 - DNA, 15 bp, Homo sapiens
gcagcacagcctcat

SEQ ID NO: 379105 - DNA, 15 bp, Homo sapiens
agcagcacagcctca

SEQ ID NO: 379106 - DNA, 15 bp, Homo sapiens
cagcagcacagcctc

SEQ ID NO: 379107 - DNA, 15 bp, Homo sapiens
gcagcagcacagcct

SEQ ID NO: 379108 - DNA, 15 bp, Homo sapiens
agcagcagcacagcc

SEQ ID NO: 379109 - DNA, 15 bp, Homo sapiens
tagcagcagcacagc

SEQ ID NO: 379110 - DNA, 15 bp, Homo sapiens
atagcagcagcacag

SEQ ID NO: 379111 - DNA, 15 bp, Homo sapiens
gatagcagcagcaca

SEQ ID NO: 379112 - DNA, 15 bp, Homo sapiens
cgatagcagcagcac

SEQ ID NO: 379113 - DNA, 15 bp, Homo sapiens
gcgatagcagcagca

SEQ ID NO: 379114 - DNA, 15 bp, Homo sapiens
agcgatagcagcagc

SEQ ID NO: 379115 - DNA, 15 bp, Homo sapiens
tagcgatagcagcag

SEQ ID NO: 379116 - DNA, 15 bp, Homo sapiens
ctagcgatagcagca

SEQ ID NO: 379117 - DNA, 15 bp, Homo sapiens
tctagcgatagcagc

SEQ ID NO: 379118 - DNA, 15 bp, Homo sapiens
atctagcgatagcag

SEQ ID NO: 379119 - DNA, 15 bp, Homo sapiens
aatctagcgatagca

SEQ ID NO: 379120 - DNA, 15 bp, Homo sapiens
gaatctagcgatagc

SEQ ID NO: 379121 - DNA, 15 bp, Homo sapiens
ggaatctagcgatag

SEQ ID NO: 379122 - DNA, 15 bp, Homo sapiens
aggaatctagcgata

SEQ ID NO: 379123 - DNA, 15 bp, Homo sapiens
aaggaatctagcgat

SEQ ID NO: 379124 - DNA, 15 bp, Homo sapiens
taaggaatctagcga

SEQ ID NO: 379125 - DNA, 15 bp, Homo sapiens
ctaaggaatctagcg

SEQ ID NO: 379126 - DNA, 15 bp, Homo sapiens
tctaaggaatctagc

SEQ ID NO: 379127 - DNA, 15 bp, Homo sapiens
ctctaaggaatctag

SEQ ID NO: 379128 - DNA, 15 bp, Homo sapiens
actctaaggaatcta

SEQ ID NO: 379129 - DNA, 15 bp, Homo sapiens
aactctaaggaatct

SEQ ID NO: 379130 - DNA, 15 bp, Homo sapiens
aaactctaaggaatc

SEQ ID NO: 379131 - DNA, 15 bp, Homo sapiens
caaactctaaggaat

SEQ ID NO: 379132 - DNA, 15 bp, Homo sapiens
acaaactctaaggaa

SEQ ID NO: 379133 - DNA, 15 bp, Homo sapiens
aacaaactctaagga

SEQ ID NO: 379134 - DNA, 15 bp, Homo sapiens
aaacaaactctaagg

SEQ ID NO: 379135 - DNA, 15 bp, Homo sapiens
aaaacaaactctaag

SEQ ID NO: 379136 - DNA, 15 bp, Homo sapiens
caaaacaaactctaa

SEQ ID NO: 379137 - DNA, 15 bp, Homo sapiens
ccaaaacaaactcta

SEQ ID NO: 379138 - DNA, 15 bp, Homo sapiens
accaaaacaaactct

SEQ ID NO: 379139 - DNA, 15 bp, Homo sapiens
caccaaaacaaactc

SEQ ID NO: 379140 - DNA, 15 bp, Homo sapiens
acaccaaaacaaact

SEQ ID NO: 379141 - DNA, 15 bp, Homo sapiens
aacaccaaaacaaac

SEQ ID NO: 379142 - DNA, 15 bp, Homo sapiens
gaacaccaaaacaaa

SEQ ID NO: 379143 - DNA, 15 bp, Homo sapiens
agaacaccaaaacaa

SEQ ID NO: 379144 - DNA, 15 bp, Homo sapiens
aagaacaccaaaaca

SEQ ID NO: 379145 - DNA, 15 bp, Homo sapiens
caagaacaccaaaac

SEQ ID NO: 379146 - DNA, 15 bp, Homo sapiens
ccaagaacaccaaaa

SEQ ID NO: 379147 - DNA, 15 bp, Homo sapiens
cccaagaacaccaaa

SEQ ID NO: 379148 - DNA, 15 bp, Homo sapiens
acccaagaacaccaa

SEQ ID NO: 379149 - DNA, 15 bp, Homo sapiens
cacccaagaacacca

SEQ ID NO: 379150 - DNA, 15 bp, Homo sapiens
acacccaagaacacc

SEQ ID NO: 379151 - DNA, 15 bp, Homo sapiens
cacacccaagaacac

SEQ ID NO: 379152 - DNA, 15 bp, Homo sapiens
ccacacccaagaaca

SEQ ID NO: 379153 - DNA, 15 bp, Homo sapiens
cccacacccaagaac

SEQ ID NO: 379154 - DNA, 15 bp, Homo sapiens
ccccacacccaagaa

SEQ ID NO: 379155 - DNA, 15 bp, Homo sapiens
accccacacccaaga

SEQ ID NO: 379156 - DNA, 15 bp, Homo sapiens
aaccccacacccaag

SEQ ID NO: 379157 - DNA, 15 bp, Homo sapiens
caaccccacacccaa

SEQ ID NO: 379158 - DNA, 15 bp, Homo sapiens
ccaaccccacaccca

SEQ ID NO: 379159 - DNA, 15 bp, Homo sapiens
cccaaccccacaccc

SEQ ID NO: 379160 - DNA, 15 bp, Homo sapiens
acccaaccccacacc

SEQ ID NO: 379161 - DNA, 15 bp, Homo sapiens
tacccaaccccacac

SEQ ID NO: 379162 - DNA, 15 bp, Homo sapiens
ttacccaaccccaca

SEQ ID NO: 379163 - DNA, 15 bp, Homo sapiens
attacccaaccccac

SEQ ID NO: 379164 - DNA, 15 bp, Homo sapiens
aattacccaacccca

SEQ ID NO: 379165 - DNA, 15 bp, Homo sapiens
aaattacccaacccc

SEQ ID NO: 379166 - DNA, 15 bp, Homo sapiens
caaattacccaaccc

SEQ ID NO: 379167 - DNA, 15 bp, Homo sapiens
ccaaattacccaacc

SEQ ID NO: 379168 - DNA, 15 bp, Homo sapiens
cccaaattacccaac

SEQ ID NO: 379169 - DNA, 15 bp, Homo sapiens
ccccaaattacccaa

SEQ ID NO: 379170 - DNA, 15 bp, Homo sapiens
cccccaaattaccca

SEQ ID NO: 379171 - DNA, 15 bp, Homo sapiens
ccccccaaattaccc

SEQ ID NO: 379172 - DNA, 15 bp, Homo sapiens
tccccccaaattacc

SEQ ID NO: 379173 - DNA, 15 bp, Homo sapiens
ttccccccaaattac

SEQ ID NO: 379174 - DNA, 15 bp, Homo sapiens
gttccccccaaatta

SEQ ID NO: 379175 - DNA, 15 bp, Homo sapiens
agttccccccaaatt

SEQ ID NO: 379176 - DNA, 15 bp, Homo sapiens
aagttccccccaaat

SEQ ID NO: 379177 - DNA, 15 bp, Homo sapiens
gaagttccccccaaa

SEQ ID NO: 379178 - DNA, 15 bp, Homo sapiens
agaagttccccccaa

SEQ ID NO: 379179 - DNA, 15 bp, Homo sapiens
gagaagttcccccca

SEQ ID NO: 379180 - DNA, 15 bp, Homo sapiens
agagaagttcccccc

SEQ ID NO: 379181 - DNA, 15 bp, Homo sapiens
gagagaagttccccc

SEQ ID NO: 379182 - DNA, 15 bp, Homo sapiens
ggagagaagttcccc

SEQ ID NO: 379183 - DNA, 15 bp, Homo sapiens
tggagagaagttccc

SEQ ID NO: 379184 - DNA, 15 bp, Homo sapiens
atggagagaagttcc

SEQ ID NO: 379185 - DNA, 15 bp, Homo sapiens
gatggagagaagttc

SEQ ID NO: 379186 - DNA, 15 bp, Homo sapiens
agatggagagaagtt

SEQ ID NO: 379187 - DNA, 15 bp, Homo sapiens
cagatggagagaagt

SEQ ID NO: 379188 - DNA, 15 bp, Homo sapiens
ccagatggagagaag

SEQ ID NO: 379189 - DNA, 15 bp, Homo sapiens
gccagatggagagaa

SEQ ID NO: 379190 - DNA, 15 bp, Homo sapiens
agccagatggagaga

SEQ ID NO: 379191 - DNA, 15 bp, Homo sapiens
aagccagatggagag

SEQ ID NO: 379192 - DNA, 15 bp, Homo sapiens
caagccagatggaga

SEQ ID NO: 379193 - DNA, 15 bp, Homo sapiens
gcaagccagatggag

SEQ ID NO: 379194 - DNA, 15 bp, Homo sapiens
ggcaagccagatgga

SEQ ID NO: 379195 - DNA, 15 bp, Homo sapiens
aggcaagccagatgg

SEQ ID NO: 379196 - DNA, 15 bp, Homo sapiens
aaggcaagccagatg

SEQ ID NO: 379197 - DNA, 15 bp, Homo sapiens
aaaggcaagccagat

SEQ ID NO: 379198 - DNA, 15 bp, Homo sapiens
aaaaggcaagccaga

SEQ ID NO: 379199 - DNA, 15 bp, Homo sapiens
taaaaggcaagccag

SEQ ID NO: 379200 - DNA, 15 bp, Homo sapiens
ttaaaaggcaagcca

SEQ ID NO: 379201 - DNA, 15 bp, Homo sapiens
attaaaaggcaagcc

SEQ ID NO: 379202 - DNA, 15 bp, Homo sapiens
gattaaaaggcaagc

SEQ ID NO: 379203 - DNA, 15 bp, Homo sapiens
agattaaaaggcaag

SEQ ID NO: 379204 - DNA, 15 bp, Homo sapiens
cagattaaaaggcaa

SEQ ID NO: 379205 - DNA, 15 bp, Homo sapiens
gcagattaaaaggca

SEQ ID NO: 379206 - DNA, 15 bp, Homo sapiens
tgcagattaaaaggc

SEQ ID NO: 379207 - DNA, 15 bp, Homo sapiens
gtgcagattaaaagg

SEQ ID NO: 379208 - DNA, 15 bp, Homo sapiens
cgtgcagattaaaag

SEQ ID NO: 379209 - DNA, 15 bp, Homo sapiens
acgtgcagattaaaa

SEQ ID NO: 379210 - DNA, 15 bp, Homo sapiens
cacgtgcagattaaa

SEQ ID NO: 379211 - DNA, 15 bp, Homo sapiens
ccacgtgcagattaa

SEQ ID NO: 379212 - DNA, 15 bp, Homo sapiens
gccacgtgcagatta

SEQ ID NO: 379213 - DNA, 15 bp, Homo sapiens
ggccacgtgcagatt

SEQ ID NO: 379214 - DNA, 15 bp, Homo sapiens
aggccacgtgcagat

SEQ ID NO: 379215 - DNA, 15 bp, Homo sapiens
gaggccacgtgcaga

SEQ ID NO: 379216 - DNA, 15 bp, Homo sapiens
ggaggccacgtgcag

SEQ ID NO: 379217 - DNA, 15 bp, Homo sapiens
gggaggccacgtgca

SEQ ID NO: 379218 - DNA, 15 bp, Homo sapiens
agggaggccacgtgc

SEQ ID NO: 379219 - DNA, 15 bp, Homo sapiens
cagggaggccacgtg

SEQ ID NO: 379220 - DNA, 15 bp, Homo sapiens
gcagggaggccacgt

SEQ ID NO: 379221 - DNA, 15 bp, Homo sapiens
ggcagggaggccacg

SEQ ID NO: 379222 - DNA, 15 bp, Homo sapiens
gggcagggaggccac

SEQ ID NO: 379223 - DNA, 15 bp, Homo sapiens
tgggcagggaggcca

SEQ ID NO: 379224 - DNA, 15 bp, Homo sapiens
gtgggcagggaggcc

SEQ ID NO: 379225 - DNA, 15 bp, Homo sapiens
ggtgggcagggaggc

SEQ ID NO: 379226 - DNA, 15 bp, Homo sapiens
gggtgggcagggagg

SEQ ID NO: 379227 - DNA, 15 bp, Homo sapiens
agggtgggcagggag

SEQ ID NO: 379228 - DNA, 15 bp, Homo sapiens
cagggtgggcaggga

SEQ ID NO: 379229 - DNA, 15 bp, Homo sapiens
ccagggtgggcaggg

SEQ ID NO: 379230 - DNA, 15 bp, Homo sapiens
accagggtgggcagg

SEQ ID NO: 379231 - DNA, 15 bp, Homo sapiens
taccagggtgggcag

SEQ ID NO: 379232 - DNA, 15 bp, Homo sapiens
gtaccagggtgggca

SEQ ID NO: 379233 - DNA, 15 bp, Homo sapiens
ggtaccagggtgggc

SEQ ID NO: 379234 - DNA, 15 bp, Homo sapiens
aggtaccagggtggg

SEQ ID NO: 379235 - DNA, 15 bp, Homo sapiens
aaggtaccagggtgg

SEQ ID NO: 379236 - DNA, 15 bp, Homo sapiens
caaggtaccagggtg

SEQ ID NO: 379237 - DNA, 15 bp, Homo sapiens
gcaaggtaccagggt

SEQ ID NO: 379238 - DNA, 15 bp, Homo sapiens
agcaaggtaccaggg

SEQ ID NO: 379239 - DNA, 15 bp, Homo sapiens
gagcaaggtaccagg

SEQ ID NO: 379240 - DNA, 15 bp, Homo sapiens
ggagcaaggtaccag

SEQ ID NO: 379241 - DNA, 15 bp, Homo sapiens
tggagcaaggtacca

SEQ ID NO: 379242 - DNA, 15 bp, Homo sapiens
ttggagcaaggtacc

SEQ ID NO: 379243 - DNA, 15 bp, Homo sapiens
cttggagcaaggtac

SEQ ID NO: 379244 - DNA, 15 bp, Homo sapiens
acttggagcaaggta

SEQ ID NO: 379245 - DNA, 15 bp, Homo sapiens
gacttggagcaaggt

SEQ ID NO: 379246 - DNA, 15 bp, Homo sapiens
ggacttggagcaagg

SEQ ID NO: 379247 - DNA, 15 bp, Homo sapiens
cggacttggagcaag

SEQ ID NO: 379248 - DNA, 15 bp, Homo sapiens
tcggacttggagcaa

SEQ ID NO: 379249 - DNA, 15 bp, Homo sapiens
ttcggacttggagca

SEQ ID NO: 379250 - DNA, 15 bp, Homo sapiens
tttcggacttggagc

SEQ ID NO: 379251 - DNA, 15 bp, Homo sapiens
ctttcggacttggag

SEQ ID NO: 379252 - DNA, 15 bp, Homo sapiens
gctttcggacttgga

SEQ ID NO: 379253 - DNA, 15 bp, Homo sapiens
tgctttcggacttgg

SEQ ID NO: 379254 - DNA, 15 bp, Homo sapiens
atgctttcggacttg

SEQ ID NO: 379255 - DNA, 15 bp, Homo sapiens
aatgctttcggactt

SEQ ID NO: 379256 - DNA, 15 bp, Homo sapiens
aaatgctttcggact

SEQ ID NO: 379257 - DNA, 15 bp, Homo sapiens
aaaatgctttcggac

SEQ ID NO: 379258 - DNA, 15 bp, Homo sapiens
gaaaatgctttcgga

SEQ ID NO: 379259 - DNA, 15 bp, Homo sapiens
ggaaaatgctttcgg

SEQ ID NO: 379260 - DNA, 15 bp, Homo sapiens
aggaaaatgctttcg

SEQ ID NO: 379261 - DNA, 15 bp, Homo sapiens
taggaaaatgctttc

SEQ ID NO: 379262 - DNA, 15 bp, Homo sapiens
ataggaaaatgcttt

SEQ ID NO: 379263 - DNA, 15 bp, Homo sapiens
gataggaaaatgctt

SEQ ID NO: 379264 - DNA, 15 bp, Homo sapiens
tgataggaaaatgct

SEQ ID NO: 379265 - DNA, 15 bp, Homo sapiens
ttgataggaaaatgc

SEQ ID NO: 379266 - DNA, 15 bp, Homo sapiens
cttgataggaaaatg

SEQ ID NO: 379267 - DNA, 15 bp, Homo sapiens
tcttgataggaaaat

SEQ ID NO: 379268 - DNA, 15 bp, Homo sapiens
ttcttgataggaaaa

SEQ ID NO: 379269 - DNA, 15 bp, Homo sapiens
tttcttgataggaaa

SEQ ID NO: 379270 - DNA, 15 bp, Homo sapiens
gtttcttgataggaa

SEQ ID NO: 379271 - DNA, 15 bp, Homo sapiens
ggtttcttgatagga

SEQ ID NO: 379272 - DNA, 15 bp, Homo sapiens
gggtttcttgatagg

SEQ ID NO: 379273 - DNA, 15 bp, Homo sapiens
tgggtttcttgatag

SEQ ID NO: 379274 - DNA, 15 bp, Homo sapiens
ctgggtttcttgata

SEQ ID NO: 379275 - DNA, 15 bp, Homo sapiens
gctgggtttcttgat

SEQ ID NO: 379276 - DNA, 15 bp, Homo sapiens
agctgggtttcttga

SEQ ID NO: 379277 - DNA, 15 bp, Homo sapiens
aagctgggtttcttg

SEQ ID NO: 379278 - DNA, 15 bp, Homo sapiens
gaagctgggtttctt

SEQ ID NO: 379279 - DNA, 15 bp, Homo sapiens
ggaagctgggtttct

SEQ ID NO: 379280 - DNA, 15 bp, Homo sapiens
aggaagctgggtttc

SEQ ID NO: 379281 - DNA, 15 bp, Homo sapiens
aaggaagctgggttt

SEQ ID NO: 379282 - DNA, 15 bp, Homo sapiens
gaaggaagctgggtt

SEQ ID NO: 379283 - DNA, 15 bp, Homo sapiens
tgaaggaagctgggt

SEQ ID NO: 379284 - DNA, 15 bp, Homo sapiens
gtgaaggaagctggg

SEQ ID NO: 379285 - DNA, 15 bp, Homo sapiens
agtgaaggaagctgg

SEQ ID NO: 379286 - DNA, 15 bp, Homo sapiens
aagtgaaggaagctg

SEQ ID NO: 379287 - DNA, 15 bp, Homo sapiens
gaagtgaaggaagct

SEQ ID NO: 379288 - DNA, 15 bp, Homo sapiens
ggaagtgaaggaagc

SEQ ID NO: 379289 - DNA, 15 bp, Homo sapiens
gggaagtgaaggaag

SEQ ID NO: 379290 - DNA, 15 bp, Homo sapiens
ggggaagtgaaggaa

SEQ ID NO: 379291 - DNA, 15 bp, Homo sapiens
gggggaagtgaagga

SEQ ID NO: 379292 - DNA, 15 bp, Homo sapiens
tgggggaagtgaagg

SEQ ID NO: 379293 - DNA, 15 bp, Homo sapiens
atgggggaagtgaag

SEQ ID NO: 379294 - DNA, 15 bp, Homo sapiens
aatgggggaagtgaa

SEQ ID NO: 379295 - DNA, 15 bp, Homo sapiens
caatgggggaagtga

SEQ ID NO: 379296 - DNA, 15 bp, Homo sapiens
gcaatgggggaagtg

SEQ ID NO: 379297 - DNA, 15 bp, Homo sapiens
ggcaatgggggaagt

SEQ ID NO: 379298 - DNA, 15 bp, Homo sapiens
tggcaatgggggaag

SEQ ID NO: 379299 - DNA, 15 bp, Homo sapiens
gtggcaatgggggaa

SEQ ID NO: 379300 - DNA, 15 bp, Homo sapiens
ggtggcaatggggga

SEQ ID NO: 379301 - DNA, 15 bp, Homo sapiens
gggtggcaatggggg

SEQ ID NO: 379302 - DNA, 15 bp, Homo sapiens
ggggtggcaatgggg

SEQ ID NO: 379303 - DNA, 15 bp, Homo sapiens
gggggtggcaatggg

SEQ ID NO: 379304 - DNA, 15 bp, Homo sapiens
ggggggtggcaatgg

SEQ ID NO: 379305 - DNA, 15 bp, Homo sapiens
tggggggtggcaatg

SEQ ID NO: 379306 - DNA, 15 bp, Homo sapiens
ttggggggtggcaat

SEQ ID NO: 379307 - DNA, 15 bp, Homo sapiens
attggggggtggcaa

SEQ ID NO: 379308 - DNA, 15 bp, Homo sapiens
gattggggggtggca

SEQ ID NO: 379309 - DNA, 15 bp, Homo sapiens
ggattggggggtggc

SEQ ID NO: 379310 - DNA, 15 bp, Homo sapiens
gggattggggggtgg

SEQ ID NO: 379311 - DNA, 15 bp, Homo sapiens
tgggattggggggtg

SEQ ID NO: 379312 - DNA, 15 bp, Homo sapiens
ctgggattggggggt

SEQ ID NO: 379313 - DNA, 15 bp, Homo sapiens
actgggattgggggg

SEQ ID NO: 379314 - DNA, 15 bp, Homo sapiens
gactgggattggggg

SEQ ID NO: 379315 - DNA, 15 bp, Homo sapiens
ggactgggattgggg

SEQ ID NO: 379316 - DNA, 15 bp, Homo sapiens
gggactgggattggg

SEQ ID NO: 379317 - DNA, 15 bp, Homo sapiens
ggggactgggattgg

SEQ ID NO: 379318 - DNA, 15 bp, Homo sapiens
gggggactgggattg

SEQ ID NO: 379319 - DNA, 15 bp, Homo sapiens
ggggggactgggatt

SEQ ID NO: 379320 - DNA, 15 bp, Homo sapiens
tggggggactgggat

SEQ ID NO: 379321 - DNA, 15 bp, Homo sapiens
atggggggactggga

SEQ ID NO: 379322 - DNA, 15 bp, Homo sapiens
gatggggggactggg

SEQ ID NO: 379323 - DNA, 15 bp, Homo sapiens
cgatggggggactgg

SEQ ID NO: 379324 - DNA, 15 bp, Homo sapiens
ccgatggggggactg

SEQ ID NO: 379325 - DNA, 15 bp, Homo sapiens
accgatggggggact

SEQ ID NO: 379326 - DNA, 15 bp, Homo sapiens
gaccgatggggggac

SEQ ID NO: 379327 - DNA, 15 bp, Homo sapiens
agaccgatgggggga

SEQ ID NO: 379328 - DNA, 15 bp, Homo sapiens
cagaccgatgggggg

SEQ ID NO: 379329 - DNA, 15 bp, Homo sapiens
acagaccgatggggg

SEQ ID NO: 379330 - DNA, 15 bp, Homo sapiens
aacagaccgatgggg

SEQ ID NO: 379331 - DNA, 15 bp, Homo sapiens
gaacagaccgatggg

SEQ ID NO: 379332 - DNA, 15 bp, Homo sapiens
tgaacagaccgatgg

SEQ ID NO: 379333 - DNA, 15 bp, Homo sapiens
gtgaacagaccgatg

SEQ ID NO: 379334 - DNA, 15 bp, Homo sapiens
tgtgaacagaccgat

SEQ ID NO: 379335 - DNA, 15 bp, Homo sapiens
atgtgaacagaccga

SEQ ID NO: 379336 - DNA, 15 bp, Homo sapiens
gatgtgaacagaccg

SEQ ID NO: 379337 - DNA, 15 bp, Homo sapiens
agatgtgaacagacc

SEQ ID NO: 379338 - DNA, 15 bp, Homo sapiens
gagatgtgaacagac

SEQ ID NO: 379339 - DNA, 15 bp, Homo sapiens
agagatgtgaacaga

SEQ ID NO: 379340 - DNA, 15 bp, Homo sapiens
cagagatgtgaacag

SEQ ID NO: 379341 - DNA, 15 bp, Homo sapiens
acagagatgtgaaca

SEQ ID NO: 379342 - DNA, 15 bp, Homo sapiens
cacagagatgtgaac

SEQ ID NO: 379343 - DNA, 15 bp, Homo sapiens
acacagagatgtgaa

SEQ ID NO: 379344 - DNA, 15 bp, Homo sapiens
aacacagagatgtga

SEQ ID NO: 379345 - DNA, 15 bp, Homo sapiens
gaacacagagatgtg

SEQ ID NO: 379346 - DNA, 15 bp, Homo sapiens
tgaacacagagatgt

SEQ ID NO: 379347 - DNA, 15 bp, Homo sapiens
atgaacacagagatg

SEQ ID NO: 379348 - DNA, 15 bp, Homo sapiens
gatgaacacagagat

SEQ ID NO: 379349 - DNA, 15 bp, Homo sapiens
agatgaacacagaga

SEQ ID NO: 379350 - DNA, 15 bp, Homo sapiens
aagatgaacacagag

SEQ ID NO: 379351 - DNA, 15 bp, Homo sapiens
caagatgaacacaga

SEQ ID NO: 379352 - DNA, 15 bp, Homo sapiens
ccaagatgaacacag

SEQ ID NO: 379353 - DNA, 15 bp, Homo sapiens
gccaagatgaacaca

SEQ ID NO: 379354 - DNA, 15 bp, Homo sapiens
tgccaagatgaacac

SEQ ID NO: 379355 - DNA, 15 bp, Homo sapiens
ttgccaagatgaaca

SEQ ID NO: 379356 - DNA, 15 bp, Homo sapiens
cttgccaagatgaac

SEQ ID NO: 379357 - DNA, 15 bp, Homo sapiens
tcttgccaagatgaa

SEQ ID NO: 379358 - DNA, 15 bp, Homo sapiens
gtcttgccaagatga

SEQ ID NO: 379359 - DNA, 15 bp, Homo sapiens
ggtcttgccaagatg

SEQ ID NO: 379360 - DNA, 15 bp, Homo sapiens
aggtcttgccaagat

SEQ ID NO: 379361 - DNA, 15 bp, Homo sapiens
taggtcttgccaaga

SEQ ID NO: 379362 - DNA, 15 bp, Homo sapiens
gtaggtcttgccaag

SEQ ID NO: 379363 - DNA, 15 bp, Homo sapiens
agtaggtcttgccaa

SEQ ID NO: 379364 - DNA, 15 bp, Homo sapiens
gagtaggtcttgcca

SEQ ID NO: 379365 - DNA, 15 bp, Homo sapiens
tgagtaggtcttgcc

SEQ ID NO: 379366 - DNA, 15 bp, Homo sapiens
ttgagtaggtcttgc

SEQ ID NO: 379367 - DNA, 15 bp, Homo sapiens
attgagtaggtcttg

SEQ ID NO: 379368 - DNA, 15 bp, Homo sapiens
gattgagtaggtctt

SEQ ID NO: 379369 - DNA, 15 bp, Homo sapiens
tgattgagtaggtct

SEQ ID NO: 379370 - DNA, 15 bp, Homo sapiens
ttgattgagtaggtc

SEQ ID NO: 379371 - DNA, 15 bp, Homo sapiens
cttgattgagtaggt

SEQ ID NO: 379372 - DNA, 15 bp, Homo sapiens
acttgattgagtagg

SEQ ID NO: 379373 - DNA, 15 bp, Homo sapiens
cacttgattgagtag

SEQ ID NO: 379374 - DNA, 15 bp, Homo sapiens
tcacttgattgagta

SEQ ID NO: 379375 - DNA, 15 bp, Homo sapiens
atcacttgattgagt

SEQ ID NO: 379376 - DNA, 15 bp, Homo sapiens
catcacttgattgag

SEQ ID NO: 379377 - DNA, 15 bp, Homo sapiens
tcatcacttgattga

SEQ ID NO: 379378 - DNA, 15 bp, Homo sapiens
atcatcacttgattg

SEQ ID NO: 379379 - DNA, 15 bp, Homo sapiens
catcatcacttgatt

SEQ ID NO: 379380 - DNA, 15 bp, Homo sapiens
gcatcatcacttgat

SEQ ID NO: 379381 - DNA, 15 bp, Homo sapiens
ggcatcatcacttga

SEQ ID NO: 379382 - DNA, 15 bp, Homo sapiens
tggcatcatcacttg

SEQ ID NO: 379383 - DNA, 15 bp, Homo sapiens
ctggcatcatcactt

SEQ ID NO: 379384 - DNA, 15 bp, Homo sapiens
actggcatcatcact

SEQ ID NO: 379385 - DNA, 15 bp, Homo sapiens
aactggcatcatcac

SEQ ID NO: 379386 - DNA, 15 bp, Homo sapiens
caactggcatcatca

SEQ ID NO: 379387 - DNA, 15 bp, Homo sapiens
tcaactggcatcatc

SEQ ID NO: 379388 - DNA, 15 bp, Homo sapiens
atcaactggcatcat

SEQ ID NO: 379389 - DNA, 15 bp, Homo sapiens
tatcaactggcatca

SEQ ID NO: 379390 - DNA, 15 bp, Homo sapiens
ttatcaactggcatc

SEQ ID NO: 379391 - DNA, 15 bp, Homo sapiens
tttatcaactggcat

SEQ ID NO: 379392 - DNA, 15 bp, Homo sapiens
gtttatcaactggca

SEQ ID NO: 379393 - DNA, 15 bp, Homo sapiens
agtttatcaactggc

SEQ ID NO: 379394 - DNA, 15 bp, Homo sapiens
aagtttatcaactgg

SEQ ID NO: 379395 - DNA, 15 bp, Homo sapiens
gaagtttatcaactg

SEQ ID NO: 379396 - DNA, 15 bp, Homo sapiens
ggaagtttatcaact

SEQ ID NO: 379397 - DNA, 15 bp, Homo sapiens
gggaagtttatcaac

SEQ ID NO: 379398 - DNA, 15 bp, Homo sapiens
agggaagtttatcaa

SEQ ID NO: 379399 - DNA, 15 bp, Homo sapiens
cagggaagtttatca

SEQ ID NO: 379400 - DNA, 15 bp, Homo sapiens
ccagggaagtttatc

SEQ ID NO: 379401 - DNA, 15 bp, Homo sapiens
tccagggaagtttat

SEQ ID NO: 379402 - DNA, 15 bp, Homo sapiens
ttccagggaagttta

SEQ ID NO: 379403 - DNA, 15 bp, Homo sapiens
tttccagggaagttt

SEQ ID NO: 379404 - DNA, 15 bp, Homo sapiens
ttttccagggaagtt

SEQ ID NO: 379405 - DNA, 15 bp, Homo sapiens
gttttccagggaagt

SEQ ID NO: 379406 - DNA, 15 bp, Homo sapiens
tgttttccagggaag

SEQ ID NO: 379407 - DNA, 15 bp, Homo sapiens
atgttttccagggaa

SEQ ID NO: 379408 - DNA, 15 bp, Homo sapiens
aatgttttccaggga

SEQ ID NO: 379409 - DNA, 15 bp, Homo sapiens
aaatgttttccaggg

SEQ ID NO: 379410 - DNA, 15 bp, Homo sapiens
taaatgttttccagg

SEQ ID NO: 379411 - DNA, 15 bp, Homo sapiens
gtaaatgttttccag

SEQ ID NO: 379412 - DNA, 15 bp, Homo sapiens
tgtaaatgttttcca

SEQ ID NO: 379413 - DNA, 15 bp, Homo sapiens
ctgtaaatgttttcc

SEQ ID NO: 379414 - DNA, 15 bp, Homo sapiens
gctgtaaatgttttc

SEQ ID NO: 379415 - DNA, 15 bp, Homo sapiens
agctgtaaatgtttt

SEQ ID NO: 379416 - DNA, 15 bp, Homo sapiens
tagctgtaaatgttt

SEQ ID NO: 379417 - DNA, 15 bp, Homo sapiens
atagctgtaaatgtt

SEQ ID NO: 379418 - DNA, 15 bp, Homo sapiens
aatagctgtaaatgt

SEQ ID NO: 379419 - DNA, 15 bp, Homo sapiens
gaatagctgtaaatg

SEQ ID NO: 379420 - DNA, 15 bp, Homo sapiens
ggaatagctgtaaat

SEQ ID NO: 379421 - DNA, 15 bp, Homo sapiens
tggaatagctgtaaa

SEQ ID NO: 379422 - DNA, 15 bp, Homo sapiens
atggaatagctgtaa

SEQ ID NO: 379423 - DNA, 15 bp, Homo sapiens
aatggaatagctgta

SEQ ID NO: 379424 - DNA, 15 bp, Homo sapiens
aaatggaatagctgt

SEQ ID NO: 379425 - DNA, 15 bp, Homo sapiens
caaatggaatagctg

SEQ ID NO: 379426 - DNA, 15 bp, Homo sapiens
ccaaatggaatagct

SEQ ID NO: 379427 - DNA, 15 bp, Homo sapiens
gccaaatggaatagc

SEQ ID NO: 379428 - DNA, 15 bp, Homo sapiens
tgccaaatggaatag

SEQ ID NO: 379429 - DNA, 15 bp, Homo sapiens
ttgccaaatggaata

SEQ ID NO: 379430 - DNA, 15 bp, Homo sapiens
tttgccaaatggaat

SEQ ID NO: 379431 - DNA, 15 bp, Homo sapiens
gtttgccaaatggaa

SEQ ID NO: 379432 - DNA, 15 bp, Homo sapiens
agtttgccaaatgga

SEQ ID NO: 379433 - DNA, 15 bp, Homo sapiens
aagtttgccaaatgg

SEQ ID NO: 379434 - DNA, 15 bp, Homo sapiens
caagtttgccaaatg

SEQ ID NO: 379435 - DNA, 15 bp, Homo sapiens
gcaagtttgccaaat

SEQ ID NO: 379436 - DNA, 15 bp, Homo sapiens
agcaagtttgccaaa

SEQ ID NO: 379437 - DNA, 15 bp, Homo sapiens
aagcaagtttgccaa

SEQ ID NO: 379438 - DNA, 15 bp, Homo sapiens
gaagcaagtttgcca

SEQ ID NO: 379439 - DNA, 15 bp, Homo sapiens
agaagcaagtttgcc

SEQ ID NO: 379440 - DNA, 15 bp, Homo sapiens
gagaagcaagtttgc

SEQ ID NO: 379441 - DNA, 15 bp, Homo sapiens
agagaagcaagtttg

SEQ ID NO: 379442 - DNA, 15 bp, Homo sapiens
cagagaagcaagttt

SEQ ID NO: 379443 - DNA, 15 bp, Homo sapiens
acagagaagcaagtt

SEQ ID NO: 379444 - DNA, 15 bp, Homo sapiens
gacagagaagcaagt

SEQ ID NO: 379445 - DNA, 15 bp, Homo sapiens
tgacagagaagcaag

SEQ ID NO: 379446 - DNA, 15 bp, Homo sapiens
ttgacagagaagcaa

SEQ ID NO: 379447 - DNA, 15 bp, Homo sapiens
attgacagagaagca

SEQ ID NO: 379448 - DNA, 15 bp, Homo sapiens
tattgacagagaagc

SEQ ID NO: 379449 - DNA, 15 bp, Homo sapiens
atattgacagagaag

SEQ ID NO: 379450 - DNA, 15 bp, Homo sapiens
aaatattgacagaga

SEQ ID NO: 379451 - DNA, 15 bp, Homo sapiens
gaaatattgacagag

SEQ ID NO: 379452 - DNA, 15 bp, Homo sapiens
tgaaatattgacaga

SEQ ID NO: 379453 - DNA, 15 bp, Homo sapiens
atgaaatattgacag

SEQ ID NO: 379454 - DNA, 15 bp, Homo sapiens
gatgaaatattgaca

SEQ ID NO: 379455 - DNA, 15 bp, Homo sapiens
ggatgaaatattgac

SEQ ID NO: 379456 - DNA, 15 bp, Homo sapiens
aggatgaaatattga

SEQ ID NO: 379457 - DNA, 15 bp, Homo sapiens
gaggatgaaatattg

SEQ ID NO: 379458 - DNA, 15 bp, Homo sapiens
ggaggatgaaatatt

SEQ ID NO: 379459 - DNA, 15 bp, Homo sapiens
aggaggatgaaatat

SEQ ID NO: 379460 - DNA, 15 bp, Homo sapiens
aaggaggatgaaata

SEQ ID NO: 379461 - DNA, 15 bp, Homo sapiens
aaaggaggatgaaat

SEQ ID NO: 379462 - DNA, 15 bp, Homo sapiens
taaaggaggatgaaa

SEQ ID NO: 379463 - DNA, 15 bp, Homo sapiens
ttaaaggaggatgaa

SEQ ID NO: 379464 - DNA, 15 bp, Homo sapiens
tttaaaggaggatga

SEQ ID NO: 379465 - DNA, 15 bp, Homo sapiens
gtttaaaggaggatg

SEQ ID NO: 379466 - DNA, 15 bp, Homo sapiens
ggtttaaaggaggat

SEQ ID NO: 379467 - DNA, 15 bp, Homo sapiens
tggtttaaaggagga

SEQ ID NO: 379468 - DNA, 15 bp, Homo sapiens
ctggtttaaaggagg

SEQ ID NO: 379469 - DNA, 15 bp, Homo sapiens
cctggtttaaaggag

SEQ ID NO: 379470 - DNA, 15 bp, Homo sapiens
tcctggtttaaagga

SEQ ID NO: 379471 - DNA, 15 bp, Homo sapiens
ctcctggtttaaagg

SEQ ID NO: 379472 - DNA, 15 bp, Homo sapiens
cctcctggtttaaag

SEQ ID NO: 379473 - DNA, 15 bp, Homo sapiens
ccctcctggtttaaa

SEQ ID NO: 379474 - DNA, 15 bp, Homo sapiens
accctcctggtttaa

SEQ ID NO: 379475 - DNA, 15 bp, Homo sapiens
aaccctcctggttta

SEQ ID NO: 379476 - DNA, 15 bp, Homo sapiens
taaccctcctggttt

SEQ ID NO: 379477 - DNA, 15 bp, Homo sapiens
ataaccctcctggtt

SEQ ID NO: 379478 - DNA, 15 bp, Homo sapiens
aataaccctcctggt

SEQ ID NO: 379479 - DNA, 15 bp, Homo sapiens
taataaccctcctgg

SEQ ID NO: 379480 - DNA, 15 bp, Homo sapiens
ttaataaccctcctg

SEQ ID NO: 379481 - DNA, 15 bp, Homo sapiens
attaataaccctcct

SEQ ID NO: 379482 - DNA, 15 bp, Homo sapiens
cattaataaccctcc

SEQ ID NO: 379483 - DNA, 15 bp, Homo sapiens
ccattaataaccctc

SEQ ID NO: 379484 - DNA, 15 bp, Homo sapiens
gccattaataaccct

SEQ ID NO: 379485 - DNA, 15 bp, Homo sapiens
tgccattaataaccc

SEQ ID NO: 379486 - DNA, 15 bp, Homo sapiens
ttgccattaataacc

SEQ ID NO: 379487 - DNA, 15 bp, Homo sapiens
tttgccattaataac

SEQ ID NO: 379488 - DNA, 15 bp, Homo sapiens
ttttgccattaataa

SEQ ID NO: 379489 - DNA, 15 bp, Homo sapiens
cttttgccattaata

SEQ ID NO: 379490 - DNA, 15 bp, Homo sapiens
gcttttgccattaat

SEQ ID NO: 379491 - DNA, 15 bp, Homo sapiens
tgcttttgccattaa

SEQ ID NO: 379492 - DNA, 15 bp, Homo sapiens
atgcttttgccatta

SEQ ID NO: 379493 - DNA, 15 bp, Homo sapiens
aatgcttttgccatt

SEQ ID NO: 379494 - DNA, 15 bp, Homo sapiens
caatgcttttgccat

SEQ ID NO: 379495 - DNA, 15 bp, Homo sapiens
ccaatgcttttgcca

SEQ ID NO: 379496 - DNA, 15 bp, Homo sapiens
accaatgcttttgcc

SEQ ID NO: 379497 - DNA, 15 bp, Homo sapiens
gaccaatgcttttgc

SEQ ID NO: 379498 - DNA, 15 bp, Homo sapiens
agaccaatgcttttg

SEQ ID NO: 379499 - DNA, 15 bp, Homo sapiens
aagaccaatgctttt

SEQ ID NO: 379500 - DNA, 15 bp, Homo sapiens
gaagaccaatgcttt

SEQ ID NO: 379501 - DNA, 15 bp, Homo sapiens
agaagaccaatgctt

SEQ ID NO: 379502 - DNA, 15 bp, Homo sapiens
aagaagaccaatgct

SEQ ID NO: 379503 - DNA, 15 bp, Homo sapiens
aaagaagaccaatgc

SEQ ID NO: 379504 - DNA, 15 bp, Homo sapiens
taaagaagaccaatg

SEQ ID NO: 379505 - DNA, 15 bp, Homo sapiens
ataaagaagaccaat

SEQ ID NO: 379506 - DNA, 15 bp, Homo sapiens
cataaagaagaccaa

SEQ ID NO: 379507 - DNA, 15 bp, Homo sapiens
gcataaagaagacca

SEQ ID NO: 379508 - DNA, 15 bp, Homo sapiens
agcataaagaagacc

SEQ ID NO: 379509 - DNA, 15 bp, Homo sapiens
aagcataaagaagac

SEQ ID NO: 379510 - DNA, 15 bp, Homo sapiens
caagcataaagaaga

SEQ ID NO: 379511 - DNA, 15 bp, Homo sapiens
tcaagcataaagaag

SEQ ID NO: 379512 - DNA, 15 bp, Homo sapiens
atcaagcataaagaa

SEQ ID NO: 379513 - DNA, 15 bp, Homo sapiens
gatcaagcataaaga

SEQ ID NO: 379514 - DNA, 15 bp, Homo sapiens
tgatcaagcataaag

SEQ ID NO: 379515 - DNA, 15 bp, Homo sapiens
ctgatcaagcataaa

SEQ ID NO: 379516 - DNA, 15 bp, Homo sapiens
actgatcaagcataa

SEQ ID NO: 379517 - DNA, 15 bp, Homo sapiens
tactgatcaagcata

SEQ ID NO: 379518 - DNA, 15 bp, Homo sapiens
atactgatcaagcat

SEQ ID NO: 379519 - DNA, 15 bp, Homo sapiens
catactgatcaagca

SEQ ID NO: 379520 - DNA, 15 bp, Homo sapiens
tcatactgatcaagc

SEQ ID NO: 379521 - DNA, 15 bp, Homo sapiens
gtcatactgatcaag

SEQ ID NO: 379522 - DNA, 15 bp, Homo sapiens
agtcatactgatcaa

SEQ ID NO: 379523 - DNA, 15 bp, Homo sapiens
gagtcatactgatca

SEQ ID NO: 379524 - DNA, 15 bp, Homo sapiens
tgagtcatactgatc

SEQ ID NO: 379525 - DNA, 15 bp, Homo sapiens
ttgagtcatactgat

SEQ ID NO: 379526 - DNA, 15 bp, Homo sapiens
tttgagtcatactga

SEQ ID NO: 379527 - DNA, 15 bp, Homo sapiens
atttgagtcatactg

SEQ ID NO: 379528 - DNA, 15 bp, Homo sapiens
aatttgagtcatact

SEQ ID NO: 379529 - DNA, 15 bp, Homo sapiens
taatttgagtcatac

SEQ ID NO: 379530 - DNA, 15 bp, Homo sapiens
ttaatttgagtcata

SEQ ID NO: 379531 - DNA, 15 bp, Homo sapiens
tttaatttgagtcat

SEQ ID NO: 379532 - DNA, 15 bp, Homo sapiens
ttttaatttgagtca

SEQ ID NO: 379533 - DNA, 15 bp, Homo sapiens
cttttaatttgagtc

SEQ ID NO: 379534 - DNA, 15 bp, Homo sapiens
acttttaatttgagt

SEQ ID NO: 379535 - DNA, 15 bp, Homo sapiens
cacttttaatttgag

SEQ ID NO: 379536 - DNA, 15 bp, Homo sapiens
acacttttaatttga

SEQ ID NO: 379537 - DNA, 15 bp, Homo sapiens
aacacttttaatttg

SEQ ID NO: 379538 - DNA, 15 bp, Homo sapiens
gaacacttttaattt

SEQ ID NO: 379539 - DNA, 15 bp, Homo sapiens
agaacacttttaatt

SEQ ID NO: 379540 - DNA, 15 bp, Homo sapiens
cagaacacttttaat

SEQ ID NO: 379541 - DNA, 15 bp, Homo sapiens
gcagaacacttttaa

SEQ ID NO: 379542 - DNA, 15 bp, Homo sapiens
agcagaacactttta

SEQ ID NO: 379543 - DNA, 15 bp, Homo sapiens
cagcagaacactttt

SEQ ID NO: 379544 - DNA, 15 bp, Homo sapiens
acagcagaacacttt

SEQ ID NO: 379545 - DNA, 15 bp, Homo sapiens
cacagcagaacactt

SEQ ID NO: 379546 - DNA, 15 bp, Homo sapiens
acacagcagaacact

SEQ ID NO: 379547 - DNA, 15 bp, Homo sapiens
tacacagcagaacac

SEQ ID NO: 379548 - DNA, 15 bp, Homo sapiens
atacacagcagaaca

SEQ ID NO: 379549 - DNA, 15 bp, Homo sapiens
tatacacagcagaac

SEQ ID NO: 379550 - DNA, 15 bp, Homo sapiens
atatacacagcagaa

SEQ ID NO: 379551 - DNA, 15 bp, Homo sapiens
gatatacacagcaga

SEQ ID NO: 379552 - DNA, 15 bp, Homo sapiens
tgatatacacagcag

SEQ ID NO: 379553 - DNA, 15 bp, Homo sapiens
ttgatatacacagca

SEQ ID NO: 379554 - DNA, 15 bp, Homo sapiens
gttgatatacacagc

SEQ ID NO: 379555 - DNA, 15 bp, Homo sapiens
agttgatatacacag

SEQ ID NO: 379556 - DNA, 15 bp, Homo sapiens
gagttgatatacaca

SEQ ID NO: 379557 - DNA, 15 bp, Homo sapiens
tgagttgatatacac

SEQ ID NO: 379558 - DNA, 15 bp, Homo sapiens
ctgagttgatataca

SEQ ID NO: 379559 - DNA, 15 bp, Homo sapiens
actgagttgatatac

SEQ ID NO: 379560 - DNA, 15 bp, Homo sapiens
tactgagttgatata

SEQ ID NO: 379561 - DNA, 15 bp, Homo sapiens
ctactgagttgatat

SEQ ID NO: 379562 - DNA, 15 bp, Homo sapiens
gctactgagttgata

SEQ ID NO: 379563 - DNA, 15 bp, Homo sapiens
ggctactgagttgat

SEQ ID NO: 379564 - DNA, 15 bp, Homo sapiens
gggctactgagttga

SEQ ID NO: 379565 - DNA, 15 bp, Homo sapiens
tgggctactgagttg

SEQ ID NO: 379566 - DNA, 15 bp, Homo sapiens
gtgggctactgagtt

SEQ ID NO: 379567 - DNA, 15 bp, Homo sapiens
tgtgggctactgagt

SEQ ID NO: 379568 - DNA, 15 bp, Homo sapiens
gtgtgggctactgag

SEQ ID NO: 379569 - DNA, 15 bp, Homo sapiens
ggtgtgggctactga

SEQ ID NO: 379570 - DNA, 15 bp, Homo sapiens
gggtgtgggctactg

SEQ ID NO: 379571 - DNA, 15 bp, Homo sapiens
tgggtgtgggctact

SEQ ID NO: 379572 - DNA, 15 bp, Homo sapiens
ctgggtgtgggctac

SEQ ID NO: 379573 - DNA, 15 bp, Homo sapiens
actgggtgtgggcta

SEQ ID NO: 379574 - DNA, 15 bp, Homo sapiens
aactgggtgtgggct

SEQ ID NO: 379575 - DNA, 15 bp, Homo sapiens
taactgggtgtgggc

SEQ ID NO: 379576 - DNA, 15 bp, Homo sapiens
ataactgggtgtggg

SEQ ID NO: 379577 - DNA, 15 bp, Homo sapiens
gataactgggtgtgg

SEQ ID NO: 379578 - DNA, 15 bp, Homo sapiens
agataactgggtgtg

SEQ ID NO: 379579 - DNA, 15 bp, Homo sapiens
cagataactgggtgt

SEQ ID NO: 379580 - DNA, 15 bp, Homo sapiens
ccagataactgggtg

SEQ ID NO: 379581 - DNA, 15 bp, Homo sapiens
cccagataactgggt

SEQ ID NO: 379582 - DNA, 15 bp, Homo sapiens
tcccagataactggg

SEQ ID NO: 379583 - DNA, 15 bp, Homo sapiens
ctcccagataactgg

SEQ ID NO: 379584 - DNA, 15 bp, Homo sapiens
gctcccagataactg

SEQ ID NO: 379585 - DNA, 15 bp, Homo sapiens
agctcccagataact

SEQ ID NO: 379586 - DNA, 15 bp, Homo sapiens
cagctcccagataac

SEQ ID NO: 379587 - DNA, 15 bp, Homo sapiens
tcagctcccagataa

SEQ ID NO: 379588 - DNA, 15 bp, Homo sapiens
atcagctcccagata

SEQ ID NO: 379589 - DNA, 15 bp, Homo sapiens
catcagctcccagat

SEQ ID NO: 379590 - DNA, 15 bp, Homo sapiens
ccatcagctcccaga

SEQ ID NO: 379591 - DNA, 15 bp, Homo sapiens
accatcagctcccag

SEQ ID NO: 379592 - DNA, 15 bp, Homo sapiens
aaccatcagctccca

SEQ ID NO: 379593 - DNA, 15 bp, Homo sapiens
gaaccatcagctccc

SEQ ID NO: 379594 - DNA, 15 bp, Homo sapiens
tgaaccatcagctcc

SEQ ID NO: 379595 - DNA, 15 bp, Homo sapiens
ctgaaccatcagctc

SEQ ID NO: 379596 - DNA, 15 bp, Homo sapiens
actgaaccatcagct

SEQ ID NO: 379597 - DNA, 15 bp, Homo sapiens
gactgaaccatcagc

SEQ ID NO: 379598 - DNA, 15 bp, Homo sapiens
tgactgaaccatcag

SEQ ID NO: 379599 - DNA, 15 bp, Homo sapiens
gtgactgaaccatca

SEQ ID NO: 379600 - DNA, 15 bp, Homo sapiens
agtgactgaaccatc

SEQ ID NO: 379601 - DNA, 15 bp, Homo sapiens
cagtgactgaaccat

SEQ ID NO: 379602 - DNA, 15 bp, Homo sapiens
acagtgactgaacca

SEQ ID NO: 379603 - DNA, 15 bp, Homo sapiens
tacagtgactgaacc

SEQ ID NO: 379604 - DNA, 15 bp, Homo sapiens
atacagtgactgaac

SEQ ID NO: 379605 - DNA, 15 bp, Homo sapiens
aatacagtgactgaa

SEQ ID NO: 379606 - DNA, 15 bp, Homo sapiens
taatacagtgactga

SEQ ID NO: 379607 - DNA, 15 bp, Homo sapiens
gtaatacagtgactg

SEQ ID NO: 379608 - DNA, 15 bp, Homo sapiens
ggtaatacagtgact

SEQ ID NO: 379609 - DNA, 15 bp, Homo sapiens
gggtaatacagtgac

SEQ ID NO: 379610 - DNA, 15 bp, Homo sapiens
tgggtaatacagtga

SEQ ID NO: 379611 - DNA, 15 bp, Homo sapiens
ttgggtaatacagtg

SEQ ID NO: 379612 - DNA, 15 bp, Homo sapiens
tttgggtaatacagt

SEQ ID NO: 379613 - DNA, 15 bp, Homo sapiens
atttgggtaatacag

SEQ ID NO: 379614 - DNA, 15 bp, Homo sapiens
gatttgggtaataca

SEQ ID NO: 379615 - DNA, 15 bp, Homo sapiens
agatttgggtaatac

SEQ ID NO: 379616 - DNA, 15 bp, Homo sapiens
aagatttgggtaata

SEQ ID NO: 379617 - DNA, 15 bp, Homo sapiens
aaagatttgggtaat

SEQ ID NO: 379618 - DNA, 15 bp, Homo sapiens
gaaagatttgggtaa

SEQ ID NO: 379619 - DNA, 15 bp, Homo sapiens
ggaaagatttgggta

SEQ ID NO: 379620 - DNA, 15 bp, Homo sapiens
aggaaagatttgggt

SEQ ID NO: 379621 - DNA, 15 bp, Homo sapiens
caggaaagatttggg

SEQ ID NO: 379622 - DNA, 15 bp, Homo sapiens
gcaggaaagatttgg

SEQ ID NO: 379623 - DNA, 15 bp, Homo sapiens
ggcaggaaagatttg

SEQ ID NO: 379624 - DNA, 15 bp, Homo sapiens
tggcaggaaagattt

SEQ ID NO: 379625 - DNA, 15 bp, Homo sapiens
ctggcaggaaagatt

SEQ ID NO: 379626 - DNA, 15 bp, Homo sapiens
gctggcaggaaagat

SEQ ID NO: 379627 - DNA, 15 bp, Homo sapiens
agctggcaggaaaga

SEQ ID NO: 379628 - DNA, 15 bp, Homo sapiens
cagctggcaggaaag

SEQ ID NO: 379629 - DNA, 15 bp, Homo sapiens
gcagctggcaggaaa

SEQ ID NO: 379630 - DNA, 15 bp, Homo sapiens
ggcagctggcaggaa

SEQ ID NO: 379631 - DNA, 15 bp, Homo sapiens
aggcagctggcagga

SEQ ID NO: 379632 - DNA, 15 bp, Homo sapiens
aaggcagctggcagg

SEQ ID NO: 379633 - DNA, 15 bp, Homo sapiens
aaaggcagctggcag

SEQ ID NO: 379634 - DNA, 15 bp, Homo sapiens
gaaaggcagctggca

SEQ ID NO: 379635 - DNA, 15 bp, Homo sapiens
tgaaaggcagctggc

SEQ ID NO: 379636 - DNA, 15 bp, Homo sapiens
ctgaaaggcagctgg

SEQ ID NO: 379637 - DNA, 15 bp, Homo sapiens
tctgaaaggcagctg

SEQ ID NO: 379638 - DNA, 15 bp, Homo sapiens
gtctgaaaggcagct

SEQ ID NO: 379639 - DNA, 15 bp, Homo sapiens
tgtctgaaaggcagc

SEQ ID NO: 379640 - DNA, 15 bp, Homo sapiens
atgtctgaaaggcag

SEQ ID NO: 379641 - DNA, 15 bp, Homo sapiens
aatgtctgaaaggca

SEQ ID NO: 379642 - DNA, 15 bp, Homo sapiens
aaatgtctgaaaggc

SEQ ID NO: 379643 - DNA, 15 bp, Homo sapiens
caaatgtctgaaagg

SEQ ID NO: 379644 - DNA, 15 bp, Homo sapiens
acaaatgtctgaaag

SEQ ID NO: 379645 - DNA, 15 bp, Homo sapiens
aacaaatgtctgaaa

SEQ ID NO: 379646 - DNA, 15 bp, Homo sapiens
taacaaatgtctgaa

SEQ ID NO: 379647 - DNA, 15 bp, Homo sapiens
ttaacaaatgtctga

SEQ ID NO: 379648 - DNA, 15 bp, Homo sapiens
tttaacaaatgtctg

SEQ ID NO: 379649 - DNA, 15 bp, Homo sapiens
atttaacaaatgtct

SEQ ID NO: 379650 - DNA, 15 bp, Homo sapiens
gatttaacaaatgtc

SEQ ID NO: 379651 - DNA, 15 bp, Homo sapiens
ggatttaacaaatgt

SEQ ID NO: 379652 - DNA, 15 bp, Homo sapiens
gggatttaacaaatg

SEQ ID NO: 379653 - DNA, 15 bp, Homo sapiens
tgggatttaacaaat

SEQ ID NO: 379654 - DNA, 15 bp, Homo sapiens
ttgggatttaacaaa

SEQ ID NO: 379655 - DNA, 15 bp, Homo sapiens
gttgggatttaacaa

SEQ ID NO: 379656 - DNA, 15 bp, Homo sapiens
ggttgggatttaaca

SEQ ID NO: 379657 - DNA, 15 bp, Homo sapiens
tggttgggatttaac

SEQ ID NO: 379658 - DNA, 15 bp, Homo sapiens
ctggttgggatttaa

SEQ ID NO: 379659 - DNA, 15 bp, Homo sapiens
tctggttgggattta

SEQ ID NO: 379660 - DNA, 15 bp, Homo sapiens
ctctggttgggattt

SEQ ID NO: 379661 - DNA, 15 bp, Homo sapiens
tctctggttgggatt

SEQ ID NO: 379662 - DNA, 15 bp, Homo sapiens
gtctctggttgggat

SEQ ID NO: 379663 - DNA, 15 bp, Homo sapiens
ggtctctggttggga

SEQ ID NO: 379664 - DNA, 15 bp, Homo sapiens
cggtctctggttggg

SEQ ID NO: 379665 - DNA, 15 bp, Homo sapiens
ccggtctctggttgg

SEQ ID NO: 379666 - DNA, 15 bp, Homo sapiens
cccggtctctggttg

SEQ ID NO: 379667 - DNA, 15 bp, Homo sapiens
gcccggtctctggtt

SEQ ID NO: 379668 - DNA, 15 bp, Homo sapiens
tgcccggtctctggt

SEQ ID NO: 379669 - DNA, 15 bp, Homo sapiens
ctgcccggtctctgg

SEQ ID NO: 379670 - DNA, 15 bp, Homo sapiens
tctgcccggtctctg

SEQ ID NO: 379671 - DNA, 15 bp, Homo sapiens
atctgcccggtctct

SEQ ID NO: 379672 - DNA, 15 bp, Homo sapiens
tatctgcccggtctc

SEQ ID NO: 379673 - DNA, 15 bp, Homo sapiens
ctatctgcccggtct

SEQ ID NO: 379674 - DNA, 15 bp, Homo sapiens
tctatctgcccggtc

SEQ ID NO: 379675 - DNA, 15 bp, Homo sapiens
ctctatctgcccggt

SEQ ID NO: 379676 - DNA, 15 bp, Homo sapiens
tctctatctgcccgg

SEQ ID NO: 379677 - DNA, 15 bp, Homo sapiens
ctctctatctgcccg

SEQ ID NO: 379678 - DNA, 15 bp, Homo sapiens
tctctctatctgccc

SEQ ID NO: 379679 - DNA, 15 bp, Homo sapiens
ttctctctatctgcc

SEQ ID NO: 379680 - DNA, 15 bp, Homo sapiens
cttctctctatctgc

SEQ ID NO: 379681 - DNA, 15 bp, Homo sapiens
acttctctctatctg

SEQ ID NO: 379682 - DNA, 15 bp, Homo sapiens
tacttctctctatct

SEQ ID NO: 379683 - DNA, 15 bp, Homo sapiens
ttacttctctctatc

SEQ ID NO: 379684 - DNA, 15 bp, Homo sapiens
tttacttctctctat

SEQ ID NO: 379685 - DNA, 15 bp, Homo sapiens
atttacttctctcta

SEQ ID NO: 379686 - DNA, 15 bp, Homo sapiens
gatttacttctctct

SEQ ID NO: 379687 - DNA, 15 bp, Homo sapiens
ggatttacttctctc

SEQ ID NO: 379688 - DNA, 15 bp, Homo sapiens
cggatttacttctct

SEQ ID NO: 379689 - DNA, 15 bp, Homo sapiens
tcggatttacttctc

SEQ ID NO: 379690 - DNA, 15 bp, Homo sapiens
ttcggatttacttct

SEQ ID NO: 379691 - DNA, 15 bp, Homo sapiens
cttcggatttacttc

SEQ ID NO: 379692 - DNA, 15 bp, Homo sapiens
acttcggatttactt

SEQ ID NO: 379693 - DNA, 15 bp, Homo sapiens
cacttcggatttact

SEQ ID NO: 379694 - DNA, 15 bp, Homo sapiens
gcacttcggatttac

SEQ ID NO: 379695 - DNA, 15 bp, Homo sapiens
cgcacttcggattta

SEQ ID NO: 379696 - DNA, 15 bp, Homo sapiens
acgcacttcggattt

SEQ ID NO: 379697 - DNA, 15 bp, Homo sapiens
aacgcacttcggatt

SEQ ID NO: 379698 - DNA, 15 bp, Homo sapiens
aaacgcacttcggat

SEQ ID NO: 379699 - DNA, 15 bp, Homo sapiens
aaaacgcacttcgga

SEQ ID NO: 379700 - DNA, 15 bp, Homo sapiens
taaaacgcacttcgg

SEQ ID NO: 379701 - DNA, 15 bp, Homo sapiens
ataaaacgcacttcg

SEQ ID NO: 379702 - DNA, 15 bp, Homo sapiens
tataaaacgcacttc

SEQ ID NO: 379703 - DNA, 15 bp, Homo sapiens
atataaaacgcactt

SEQ ID NO: 379704 - DNA, 15 bp, Homo sapiens
tatataaaacgcact

SEQ ID NO: 379705 - DNA, 15 bp, Homo sapiens
gtatataaaacgcac

SEQ ID NO: 379706 - DNA, 15 bp, Homo sapiens
tgtatataaaacgca

SEQ ID NO: 379707 - DNA, 15 bp, Homo sapiens
ctgtatataaaacgc

SEQ ID NO: 379708 - DNA, 15 bp, Homo sapiens
actgtatataaaacg

SEQ ID NO: 379709 - DNA, 15 bp, Homo sapiens
gactgtatataaaac

SEQ ID NO: 379710 - DNA, 15 bp, Homo sapiens
agactgtatataaaa

SEQ ID NO: 379711 - DNA, 15 bp, Homo sapiens
cagactgtatataaa

SEQ ID NO: 379712 - DNA, 15 bp, Homo sapiens
acagactgtatataa

SEQ ID NO: 379713 - DNA, 15 bp, Homo sapiens
aacagactgtatata

SEQ ID NO: 379714 - DNA, 15 bp, Homo sapiens
taacagactgtatat

SEQ ID NO: 379715 - DNA, 15 bp, Homo sapiens
ctaacagactgtata

SEQ ID NO: 379716 - DNA, 15 bp, Homo sapiens
gctaacagactgtat

SEQ ID NO: 379717 - DNA, 15 bp, Homo sapiens
tgctaacagactgta

SEQ ID NO: 379718 - DNA, 15 bp, Homo sapiens
ttgctaacagactgt

SEQ ID NO: 379719 - DNA, 15 bp, Homo sapiens
gttgctaacagactg

SEQ ID NO: 379720 - DNA, 15 bp, Homo sapiens
agttgctaacagact

SEQ ID NO: 379721 - DNA, 15 bp, Homo sapiens
gagttgctaacagac

SEQ ID NO: 379722 - DNA, 15 bp, Homo sapiens
ggagttgctaacaga

SEQ ID NO: 379723 - DNA, 15 bp, Homo sapiens
tggagttgctaacag

SEQ ID NO: 379724 - DNA, 15 bp, Homo sapiens
ttggagttgctaaca

SEQ ID NO: 379725 - DNA, 15 bp, Homo sapiens
attggagttgctaac

SEQ ID NO: 379726 - DNA, 15 bp, Homo sapiens
cattggagttgctaa

SEQ ID NO: 379727 - DNA, 15 bp, Homo sapiens
tcattggagttgcta

SEQ ID NO: 379728 - DNA, 15 bp, Homo sapiens
ctcattggagttgct

SEQ ID NO: 379729 - DNA, 15 bp, Homo sapiens
tctcattggagttgc

SEQ ID NO: 379730 - DNA, 15 bp, Homo sapiens
atctcattggagttg

SEQ ID NO: 379731 - DNA, 15 bp, Homo sapiens
catctcattggagtt

SEQ ID NO: 379732 - DNA, 15 bp, Homo sapiens
tcatctcattggagt

SEQ ID NO: 379733 - DNA, 15 bp, Homo sapiens
atcatctcattggag

SEQ ID NO: 379734 - DNA, 15 bp, Homo sapiens
tatcatctcattgga

SEQ ID NO: 379735 - DNA, 15 bp, Homo sapiens
atatcatctcattgg

SEQ ID NO: 379736 - DNA, 15 bp, Homo sapiens
aatatcatctcattg

SEQ ID NO: 379737 - DNA, 15 bp, Homo sapiens
caatatcatctcatt

SEQ ID NO: 379738 - DNA, 15 bp, Homo sapiens
acaatatcatctcat

SEQ ID NO: 379739 - DNA, 15 bp, Homo sapiens
cacaatatcatctca

SEQ ID NO: 379740 - DNA, 15 bp, Homo sapiens
tcacaatatcatctc

SEQ ID NO: 379741 - DNA, 15 bp, Homo sapiens
atcacaatatcatct

SEQ ID NO: 379742 - DNA, 15 bp, Homo sapiens
catcacaatatcatc

SEQ ID NO: 379743 - DNA, 15 bp, Homo sapiens
ccatcacaatatcat

SEQ ID NO: 379744 - DNA, 15 bp, Homo sapiens
cccatcacaatatca

SEQ ID NO: 379745 - DNA, 15 bp, Homo sapiens
tcccatcacaatatc

SEQ ID NO: 379746 - DNA, 15 bp, Homo sapiens
ttcccatcacaatat

SEQ ID NO: 379747 - DNA, 15 bp, Homo sapiens
attcccatcacaata

SEQ ID NO: 379748 - DNA, 15 bp, Homo sapiens
cattcccatcacaat

SEQ ID NO: 379749 - DNA, 15 bp, Homo sapiens
ccattcccatcacaa

SEQ ID NO: 379750 - DNA, 15 bp, Homo sapiens
tccattcccatcaca

SEQ ID NO: 379751 - DNA, 15 bp, Homo sapiens
ttccattcccatcac

SEQ ID NO: 379752 - DNA, 15 bp, Homo sapiens
attccattcccatca

SEQ ID NO: 379753 - DNA, 15 bp, Homo sapiens
cattccattcccatc

SEQ ID NO: 379754 - DNA, 15 bp, Homo sapiens
ccattccattcccat

SEQ ID NO: 379755 - DNA, 15 bp, Homo sapiens
cccattccattccca

SEQ ID NO: 379756 - DNA, 15 bp, Homo sapiens
tcccattccattccc

SEQ ID NO: 379757 - DNA, 15 bp, Homo sapiens
ttcccattccattcc

SEQ ID NO: 379758 - DNA, 15 bp, Homo sapiens
gttcccattccattc

SEQ ID NO: 379759 - DNA, 15 bp, Homo sapiens
tgttcccattccatt

SEQ ID NO: 379760 - DNA, 15 bp, Homo sapiens
ctgttcccattccat

SEQ ID NO: 379761 - DNA, 15 bp, Homo sapiens
tctgttcccattcca

SEQ ID NO: 379762 - DNA, 15 bp, Homo sapiens
gtctgttcccattcc

SEQ ID NO: 379763 - DNA, 15 bp, Homo sapiens
agtctgttcccattc

SEQ ID NO: 379764 - DNA, 15 bp, Homo sapiens
tagtctgttcccatt

SEQ ID NO: 379765 - DNA, 15 bp, Homo sapiens
atagtctgttcccat

SEQ ID NO: 379766 - DNA, 15 bp, Homo sapiens
catagtctgttccca

SEQ ID NO: 379767 - DNA, 15 bp, Homo sapiens
tcatagtctgttccc

SEQ ID NO: 379768 - DNA, 15 bp, Homo sapiens
atcatagtctgttcc

SEQ ID NO: 379769 - DNA, 15 bp, Homo sapiens
tatcatagtctgttc

SEQ ID NO: 379770 - DNA, 15 bp, Homo sapiens
ttatcatagtctgtt

SEQ ID NO: 379771 - DNA, 15 bp, Homo sapiens
cttatcatagtctgt

SEQ ID NO: 379772 - DNA, 15 bp, Homo sapiens
tcttatcatagtctg

SEQ ID NO: 379773 - DNA, 15 bp, Homo sapiens
ctcttatcatagtct

SEQ ID NO: 379774 - DNA, 15 bp, Homo sapiens
tctcttatcatagtc

SEQ ID NO: 379775 - DNA, 15 bp, Homo sapiens
atctcttatcatagt

SEQ ID NO: 379776 - DNA, 15 bp, Homo sapiens
catctcttatcatag

SEQ ID NO: 379777 - DNA, 15 bp, Homo sapiens
ccatctcttatcata

SEQ ID NO: 379778 - DNA, 15 bp, Homo sapiens
tccatctcttatcat

SEQ ID NO: 379779 - DNA, 15 bp, Homo sapiens
ttccatctcttatca

SEQ ID NO: 379780 - DNA, 15 bp, Homo sapiens
attccatctcttatc

SEQ ID NO: 379781 - DNA, 15 bp, Homo sapiens
aattccatctcttat

SEQ ID NO: 379782 - DNA, 15 bp, Homo sapiens
aaattccatctctta

SEQ ID NO: 379783 - DNA, 15 bp, Homo sapiens
aaaattccatctctt

SEQ ID NO: 379784 - DNA, 15 bp, Homo sapiens
caaaattccatctct

SEQ ID NO: 379785 - DNA, 15 bp, Homo sapiens
tcaaaattccatctc

SEQ ID NO: 379786 - DNA, 15 bp, Homo sapiens
ctcaaaattccatct

SEQ ID NO: 379787 - DNA, 15 bp, Homo sapiens
cctcaaaattccatc

SEQ ID NO: 379788 - DNA, 15 bp, Homo sapiens
acctcaaaattccat

SEQ ID NO: 379789 - DNA, 15 bp, Homo sapiens
aacctcaaaattcca

SEQ ID NO: 379790 - DNA, 15 bp, Homo sapiens
aaacctcaaaattcc

SEQ ID NO: 379791 - DNA, 15 bp, Homo sapiens
aaaacctcaaaattc

SEQ ID NO: 379792 - DNA, 15 bp, Homo sapiens
gaaaacctcaaaatt

SEQ ID NO: 379793 - DNA, 15 bp, Homo sapiens
ggaaaacctcaaaat

SEQ ID NO: 379794 - DNA, 15 bp, Homo sapiens
aggaaaacctcaaaa

SEQ ID NO: 379795 - DNA, 15 bp, Homo sapiens
caggaaaacctcaaa

SEQ ID NO: 379796 - DNA, 15 bp, Homo sapiens
ccaggaaaacctcaa

SEQ ID NO: 379797 - DNA, 15 bp, Homo sapiens
tccaggaaaacctca

SEQ ID NO: 379798 - DNA, 15 bp, Homo sapiens
gtccaggaaaacctc

SEQ ID NO: 379799 - DNA, 15 bp, Homo sapiens
agtccaggaaaacct

SEQ ID NO: 379800 - DNA, 15 bp, Homo sapiens
aagtccaggaaaacc

SEQ ID NO: 379801 - DNA, 15 bp, Homo sapiens
aaagtccaggaaaac

SEQ ID NO: 379802 - DNA, 15 bp, Homo sapiens
caaagtccaggaaaa

SEQ ID NO: 379803 - DNA, 15 bp, Homo sapiens
ccaaagtccaggaaa

SEQ ID NO: 379804 - DNA, 15 bp, Homo sapiens
cccaaagtccaggaa

SEQ ID NO: 379805 - DNA, 15 bp, Homo sapiens
gcccaaagtccagga

SEQ ID NO: 379806 - DNA, 15 bp, Homo sapiens
tgcccaaagtccagg

SEQ ID NO: 379807 - DNA, 15 bp, Homo sapiens
gtgcccaaagtccag

SEQ ID NO: 379808 - DNA, 15 bp, Homo sapiens
tgtgcccaaagtcca

SEQ ID NO: 379809 - DNA, 15 bp, Homo sapiens
gtgtgcccaaagtcc

SEQ ID NO: 379810 - DNA, 15 bp, Homo sapiens
tgtgtgcccaaagtc

SEQ ID NO: 379811 - DNA, 15 bp, Homo sapiens
ctgtgtgcccaaagt

SEQ ID NO: 379812 - DNA, 15 bp, Homo sapiens
actgtgtgcccaaag

SEQ ID NO: 379813 - DNA, 15 bp, Homo sapiens
gactgtgtgcccaaa

SEQ ID NO: 379814 - DNA, 15 bp, Homo sapiens
tgactgtgtgcccaa

SEQ ID NO: 379815 - DNA, 15 bp, Homo sapiens
atgactgtgtgccca

SEQ ID NO: 379816 - DNA, 15 bp, Homo sapiens
catgactgtgtgccc

SEQ ID NO: 379817 - DNA, 15 bp, Homo sapiens
gcatgactgtgtgcc

SEQ ID NO: 379818 - DNA, 15 bp, Homo sapiens
ggcatgactgtgtgc

SEQ ID NO: 379819 - DNA, 15 bp, Homo sapiens
gggcatgactgtgtg

SEQ ID NO: 379820 - DNA, 15 bp, Homo sapiens
ggggcatgactgtgt

SEQ ID NO: 379821 - DNA, 15 bp, Homo sapiens
tggggcatgactgtg

SEQ ID NO: 379822 - DNA, 15 bp, Homo sapiens
ctggggcatgactgt

SEQ ID NO: 379823 - DNA, 15 bp, Homo sapiens
actggggcatgactg

SEQ ID NO: 379824 - DNA, 15 bp, Homo sapiens
cactggggcatgact

SEQ ID NO: 379825 - DNA, 15 bp, Homo sapiens
ccactggggcatgac

SEQ ID NO: 379826 - DNA, 15 bp, Homo sapiens
accactggggcatga

SEQ ID NO: 379827 - DNA, 15 bp, Homo sapiens
taccactggggcatg

SEQ ID NO: 379828 - DNA, 15 bp, Homo sapiens
ctaccactggggcat

SEQ ID NO: 379829 - DNA, 15 bp, Homo sapiens
tctaccactggggca

SEQ ID NO: 379830 - DNA, 15 bp, Homo sapiens
atctaccactggggc

SEQ ID NO: 379831 - DNA, 15 bp, Homo sapiens
tatctaccactgggg

SEQ ID NO: 379832 - DNA, 15 bp, Homo sapiens
ttatctaccactggg

SEQ ID NO: 379833 - DNA, 15 bp, Homo sapiens
attatctaccactgg

SEQ ID NO: 379834 - DNA, 15 bp, Homo sapiens
aattatctaccactg

SEQ ID NO: 379835 - DNA, 15 bp, Homo sapiens
caattatctaccact

SEQ ID NO: 379836 - DNA, 15 bp, Homo sapiens
tcaattatctaccac

SEQ ID NO: 379837 - DNA, 15 bp, Homo sapiens
ctcaattatctacca

SEQ ID NO: 379838 - DNA, 15 bp, Homo sapiens
tctcaattatctacc

SEQ ID NO: 379839 - DNA, 15 bp, Homo sapiens
ttctcaattatctac

SEQ ID NO: 379840 - DNA, 15 bp, Homo sapiens
attctcaattatcta

SEQ ID NO: 379841 - DNA, 15 bp, Homo sapiens
aattctcaattatct

SEQ ID NO: 379842 - DNA, 15 bp, Homo sapiens
gaattctcaattatc

SEQ ID NO: 379843 - DNA, 15 bp, Homo sapiens
tgaattctcaattat

SEQ ID NO: 379844 - DNA, 15 bp, Homo sapiens
gtgaattctcaatta

SEQ ID NO: 379845 - DNA, 15 bp, Homo sapiens
ggtgaattctcaatt

SEQ ID NO: 379846 - DNA, 15 bp, Homo sapiens
tggtgaattctcaat

SEQ ID NO: 379847 - DNA, 15 bp, Homo sapiens
atggtgaattctcaa

SEQ ID NO: 379848 - DNA, 15 bp, Homo sapiens
tatggtgaattctca

SEQ ID NO: 379849 - DNA, 15 bp, Homo sapiens
atatggtgaattctc

SEQ ID NO: 379850 - DNA, 15 bp, Homo sapiens
aatatggtgaattct

SEQ ID NO: 379851 - DNA, 15 bp, Homo sapiens
aaatatggtgaattc

SEQ ID NO: 379852 - DNA, 15 bp, Homo sapiens
caaatatggtgaatt

SEQ ID NO: 379853 - DNA, 15 bp, Homo sapiens
tcaaatatggtgaat

SEQ ID NO: 379854 - DNA, 15 bp, Homo sapiens
gtcaaatatggtgaa

SEQ ID NO: 379855 - DNA, 15 bp, Homo sapiens
agtcaaatatggtga

SEQ ID NO: 379856 - DNA, 15 bp, Homo sapiens
tagtcaaatatggtg

SEQ ID NO: 379857 - DNA, 15 bp, Homo sapiens
ttagtcaaatatggt

SEQ ID NO: 379858 - DNA, 15 bp, Homo sapiens
attagtcaaatatgg

SEQ ID NO: 379859 - DNA, 15 bp, Homo sapiens
cattagtcaaatatg

SEQ ID NO: 379860 - DNA, 15 bp, Homo sapiens
tcattagtcaaatat

SEQ ID NO: 379861 - DNA, 15 bp, Homo sapiens
atcattagtcaaata

SEQ ID NO: 379862 - DNA, 15 bp, Homo sapiens
tatcattagtcaaat

SEQ ID NO: 379863 - DNA, 15 bp, Homo sapiens
ttatcattagtcaaa

SEQ ID NO: 379864 - DNA, 15 bp, Homo sapiens
tttatcattagtcaa

SEQ ID NO: 379865 - DNA, 15 bp, Homo sapiens
atttatcattagtca

SEQ ID NO: 379866 - DNA, 15 bp, Homo sapiens
aatttatcattagtc

SEQ ID NO: 379867 - DNA, 15 bp, Homo sapiens
aaatttatcattagt

SEQ ID NO: 379868 - DNA, 15 bp, Homo sapiens
caaatttatcattag

SEQ ID NO: 379869 - DNA, 15 bp, Homo sapiens
tcaaatttatcatta

SEQ ID NO: 379870 - DNA, 15 bp, Homo sapiens
atcaaatttatcatt

SEQ ID NO: 379871 - DNA, 15 bp, Homo sapiens
catcaaatttatcat

SEQ ID NO: 379872 - DNA, 15 bp, Homo sapiens
tcatcaaatttatca

SEQ ID NO: 379873 - DNA, 15 bp, Homo sapiens
atcatcaaatttatc

SEQ ID NO: 379874 - DNA, 15 bp, Homo sapiens
catcatcaaatttat

SEQ ID NO: 379875 - DNA, 15 bp, Homo sapiens
ccatcatcaaattta

SEQ ID NO: 379876 - DNA, 15 bp, Homo sapiens
tccatcatcaaattt

SEQ ID NO: 379877 - DNA, 15 bp, Homo sapiens
ctccatcatcaaatt

SEQ ID NO: 379878 - DNA, 15 bp, Homo sapiens
tctccatcatcaaat

SEQ ID NO: 379879 - DNA, 15 bp, Homo sapiens
ttctccatcatcaaa

SEQ ID NO: 379880 - DNA, 15 bp, Homo sapiens
cttctccatcatcaa

SEQ ID NO: 379881 - DNA, 15 bp, Homo sapiens
ccttctccatcatca

SEQ ID NO: 379882 - DNA, 15 bp, Homo sapiens
tccttctccatcatc

SEQ ID NO: 379883 - DNA, 15 bp, Homo sapiens
atccttctccatcat

SEQ ID NO: 379884 - DNA, 15 bp, Homo sapiens
gatccttctccatca

SEQ ID NO: 379885 - DNA, 15 bp, Homo sapiens
tgatccttctccatc

SEQ ID NO: 379886 - DNA, 15 bp, Homo sapiens
atgatccttctccat

SEQ ID NO: 379887 - DNA, 15 bp, Homo sapiens
aatgatccttctcca

SEQ ID NO: 379888 - DNA, 15 bp, Homo sapiens
taatgatccttctcc

SEQ ID NO: 379889 - DNA, 15 bp, Homo sapiens
gtaatgatccttctc

SEQ ID NO: 379890 - DNA, 15 bp, Homo sapiens
agtaatgatccttct

SEQ ID NO: 379891 - DNA, 15 bp, Homo sapiens
tagtaatgatccttc

SEQ ID NO: 379892 - DNA, 15 bp, Homo sapiens
gtagtaatgatcctt

SEQ ID NO: 379893 - DNA, 15 bp, Homo sapiens
agtagtaatgatcct

SEQ ID NO: 379894 - DNA, 15 bp, Homo sapiens
aagtagtaatgatcc

SEQ ID NO: 379895 - DNA, 15 bp, Homo sapiens
gaagtagtaatgatc

SEQ ID NO: 379896 - DNA, 15 bp, Homo sapiens
tgaagtagtaatgat

SEQ ID NO: 379897 - DNA, 15 bp, Homo sapiens
ttgaagtagtaatga

SEQ ID NO: 379898 - DNA, 15 bp, Homo sapiens
attgaagtagtaatg

SEQ ID NO: 379899 - DNA, 15 bp, Homo sapiens
aattgaagtagtaat

SEQ ID NO: 379900 - DNA, 15 bp, Homo sapiens
aaattgaagtagtaa

SEQ ID NO: 379901 - DNA, 15 bp, Homo sapiens
aaaattgaagtagta

SEQ ID NO: 379902 - DNA, 15 bp, Homo sapiens
taaaattgaagtagt

SEQ ID NO: 379903 - DNA, 15 bp, Homo sapiens
ataaaattgaagtag

SEQ ID NO: 379904 - DNA, 15 bp, Homo sapiens
aataaaattgaagta

SEQ ID NO: 379905 - DNA, 15 bp, Homo sapiens
aaataaaattgaagt

SEQ ID NO: 379906 - DNA, 15 bp, Homo sapiens
caaataaaattgaag

SEQ ID NO: 379907 - DNA, 15 bp, Homo sapiens
gcaaataaaattgaa

SEQ ID NO: 379908 - DNA, 15 bp, Homo sapiens
ggcaaataaaattga

SEQ ID NO: 379909 - DNA, 15 bp, Homo sapiens
tggcaaataaaattg

SEQ ID NO: 379910 - DNA, 15 bp, Homo sapiens
ttggcaaataaaatt

SEQ ID NO: 379911 - DNA, 15 bp, Homo sapiens
tttggcaaataaaat

SEQ ID NO: 379912 - DNA, 15 bp, Homo sapiens
ttttggcaaataaaa

SEQ ID NO: 379913 - DNA, 15 bp, Homo sapiens
attttggcaaataaa

SEQ ID NO: 379914 - DNA, 15 bp, Homo sapiens
aattttggcaaataa

SEQ ID NO: 379915 - DNA, 15 bp, Homo sapiens
taattttggcaaata

SEQ ID NO: 379916 - DNA, 15 bp, Homo sapiens
gtaattttggcaaat

SEQ ID NO: 379917 - DNA, 15 bp, Homo sapiens
agtaattttggcaaa

SEQ ID NO: 379918 - DNA, 15 bp, Homo sapiens
tagtaattttggcaa

SEQ ID NO: 379919 - DNA, 15 bp, Homo sapiens
atagtaattttggca

SEQ ID NO: 379920 - DNA, 15 bp, Homo sapiens
tatagtaattttggc

SEQ ID NO: 379921 - DNA, 15 bp, Homo sapiens
atatagtaattttgg

SEQ ID NO: 379922 - DNA, 15 bp, Homo sapiens
aatatagtaattttg

SEQ ID NO: 379923 - DNA, 15 bp, Homo sapiens
taatatagtaatttt

SEQ ID NO: 379924 - DNA, 15 bp, Homo sapiens
ataatatagtaattt

SEQ ID NO: 379925 - DNA, 15 bp, Homo sapiens
tataatatagtaatt

SEQ ID NO: 379926 - DNA, 15 bp, Homo sapiens
gtataatatagtaat

SEQ ID NO: 379927 - DNA, 15 bp, Homo sapiens
agtataatatagtaa

SEQ ID NO: 379928 - DNA, 15 bp, Homo sapiens
aagtataatatagta

SEQ ID NO: 379929 - DNA, 15 bp, Homo sapiens
aaagtataatatagt

SEQ ID NO: 379930 - DNA, 15 bp, Homo sapiens
gaaagtataatatag

SEQ ID NO: 379931 - DNA, 15 bp, Homo sapiens
ggaaagtataatata

SEQ ID NO: 379932 - DNA, 15 bp, Homo sapiens
aggaaagtataatat

SEQ ID NO: 379933 - DNA, 15 bp, Homo sapiens
aaggaaagtataata

SEQ ID NO: 379934 - DNA, 15 bp, Homo sapiens
taaggaaagtataat

SEQ ID NO: 379935 - DNA, 15 bp, Homo sapiens
ttaaggaaagtataa

SEQ ID NO: 379936 - DNA, 15 bp, Homo sapiens
attaaggaaagtata

SEQ ID NO: 379937 - DNA, 15 bp, Homo sapiens
tattaaggaaagtat

SEQ ID NO: 379938 - DNA, 15 bp, Homo sapiens
ctattaaggaaagta

SEQ ID NO: 379939 - DNA, 15 bp, Homo sapiens
tctattaaggaaagt

SEQ ID NO: 379940 - DNA, 15 bp, Homo sapiens
ctctattaaggaaag

SEQ ID NO: 379941 - DNA, 15 bp, Homo sapiens
actctattaaggaaa

SEQ ID NO: 379942 - DNA, 15 bp, Homo sapiens
cactctattaaggaa

SEQ ID NO: 379943 - DNA, 15 bp, Homo sapiens
tcactctattaagga

SEQ ID NO: 379944 - DNA, 15 bp, Homo sapiens
ttcactctattaagg

SEQ ID NO: 379945 - DNA, 15 bp, Homo sapiens
cttcactctattaag

SEQ ID NO: 379946 - DNA, 15 bp, Homo sapiens
tcttcactctattaa

SEQ ID NO: 379947 - DNA, 15 bp, Homo sapiens
ctcttcactctatta

SEQ ID NO: 379948 - DNA, 15 bp, Homo sapiens
actcttcactctatt

SEQ ID NO: 379949 - DNA, 15 bp, Homo sapiens
gactcttcactctat

SEQ ID NO: 379950 - DNA, 15 bp, Homo sapiens
ggactcttcactcta

SEQ ID NO: 379951 - DNA, 15 bp, Homo sapiens
gggactcttcactct

SEQ ID NO: 379952 - DNA, 15 bp, Homo sapiens
ggggactcttcactc

SEQ ID NO: 379953 - DNA, 15 bp, Homo sapiens
aggggactcttcact

SEQ ID NO: 379954 - DNA, 15 bp, Homo sapiens
gaggggactcttcac

SEQ ID NO: 379955 - DNA, 15 bp, Homo sapiens
ggaggggactcttca

SEQ ID NO: 379956 - DNA, 15 bp, Homo sapiens
tggaggggactcttc

SEQ ID NO: 379957 - DNA, 15 bp, Homo sapiens
atggaggggactctt

SEQ ID NO: 379958 - DNA, 15 bp, Homo sapiens
aatggaggggactct

SEQ ID NO: 379959 - DNA, 15 bp, Homo sapiens
caatggaggggactc

SEQ ID NO: 379960 - DNA, 15 bp, Homo sapiens
acaatggaggggact

SEQ ID NO: 379961 - DNA, 15 bp, Homo sapiens
aacaatggaggggac

SEQ ID NO: 379962 - DNA, 15 bp, Homo sapiens
aaacaatggagggga

SEQ ID NO: 379963 - DNA, 15 bp, Homo sapiens
aaaacaatggagggg

SEQ ID NO: 379964 - DNA, 15 bp, Homo sapiens
gaaaacaatggaggg

SEQ ID NO: 379965 - DNA, 15 bp, Homo sapiens
agaaaacaatggagg

SEQ ID NO: 379966 - DNA, 15 bp, Homo sapiens
tagaaaacaatggag

SEQ ID NO: 379967 - DNA, 15 bp, Homo sapiens
atagaaaacaatgga

SEQ ID NO: 379968 - DNA, 15 bp, Homo sapiens
aatagaaaacaatgg

SEQ ID NO: 379969 - DNA, 15 bp, Homo sapiens
aaatagaaaacaatg

SEQ ID NO: 379970 - DNA, 15 bp, Homo sapiens
caaatagaaaacaat

SEQ ID NO: 379971 - DNA, 15 bp, Homo sapiens
tcaaatagaaaacaa

SEQ ID NO: 379972 - DNA, 15 bp, Homo sapiens
gtcaaatagaaaaca

SEQ ID NO: 379973 - DNA, 15 bp, Homo sapiens
agtcaaatagaaaac

SEQ ID NO: 379974 - DNA, 15 bp, Homo sapiens
gagtcaaatagaaaa

SEQ ID NO: 379975 - DNA, 15 bp, Homo sapiens
ggagtcaaatagaaa

SEQ ID NO: 379976 - DNA, 15 bp, Homo sapiens
tggagtcaaatagaa

SEQ ID NO: 379977 - DNA, 15 bp, Homo sapiens
ttggagtcaaataga

SEQ ID NO: 379978 - DNA, 15 bp, Homo sapiens
tttggagtcaaatag

SEQ ID NO: 379979 - DNA, 15 bp, Homo sapiens
gtttggagtcaaata

SEQ ID NO: 379980 - DNA, 15 bp, Homo sapiens
agtttggagtcaaat

SEQ ID NO: 379981 - DNA, 15 bp, Homo sapiens
aagtttggagtcaaa

SEQ ID NO: 379982 - DNA, 15 bp, Homo sapiens
gaagtttggagtcaa

SEQ ID NO: 379983 - DNA, 15 bp, Homo sapiens
ggaagtttggagtca

SEQ ID NO: 379984 - DNA, 15 bp, Homo sapiens
gggaagtttggagtc

SEQ ID NO: 379985 - DNA, 15 bp, Homo sapiens
ggggaagtttggagt

SEQ ID NO: 379986 - DNA, 15 bp, Homo sapiens
aggggaagtttggag
